(19) United States
(12) Patent Application Publication
(10) Pub. No.: US 2007/0042392 A1
(43) Pub. Date: Feb. 22, 2007

(54) Novel nucleic acids and polypeptides

(75) Inventors: Y. Tom Tang, San Jose, CA (US); Chenghua Liu, San Jose, CA (US); Vinod Asundi, Foster Ctiy, CA (US); Rui-hong Chen, Foster City, CA (US); Yunqing Ma, Santa Clara, CA (US); Feiyan Ren, Cupertino, CA (US); Jian-Rui Wang, Cupertino, CA (US); Thomas Wehrman, Stanford, CA (US); Chongjun Xu, San Jose, CA (US); Aidong Xue, Sunnyvale, CA (US); Yonghong Yang, San Jose, CA (US); Jie Zhang, Campbell, CA (US); Qing A. Zhao, San Jose, CA (US); Ping Zhou, Cupertino, CA (US); Radoje T. Drmanac, Palo Alto, CA (US); Yi-Cheng Cao, Sunnyvalle, CA (US); Dunrui Wang, Poway, CA (US); Zhi Wei Wang, Athens, GA (US); Ryle W. Goodrich, Los Angeles, CA (US)

Correspondence Address: NUVELO, INC, 201 INDUSTRIAL ROAD, SUITE 310, SAN CARLOS, CA, 94070, US

(73) Assignee: NUVELO, Inc., Sunnyvale, CA (US)

(21) Appl. No.: 11/218,141

(22) Filed: Aug. 31, 2005

Related U.S. Application Data
(63) Continuation of application No. 10/293,244, filed on Nov. 12, 2002.
(63) Continuation-in-part of application No. PCT/US01/04098, filed on Feb. 5, 2001.
(63) Continuation-in-part of application No. 09/496,914, filed on Feb. 3, 2000, now abandoned.
(63) Continuation-in-part of application No. 09/560,875, filed on Apr. 27, 2000, now abandoned.
(63) Continuation-in-part of application No. 10/112,931, filed on Mar. 28, 2002, now abandoned.
Application No. 10/112,931 is a division of application No. 09/598,075, filed on Jun. 20, 2000, now abandoned.
(63) Continuation-in-part of application No. 09/620,325, filed on Jul. 19, 2000, now abandoned.
(63) Continuation-in-part of application No. 09/654,936, filed on Sep. 1, 2000.
(63) Continuation-in-part of application No. 10/233,045, filed on Aug. 30, 2002, now abandoned.
Application No. 10/233,045 is a division of application No. 09/663,561, filed on Sep. 15, 2000, now abandoned.
(63) Continuation-in-part of application No. 10/256,113, filed on Sep. 25, 2002, now abandoned.
Application No. 10/256,113 is a division of application No. 09/693,325, filed on Oct. 20, 2000, now abandoned.
(63) Continuation-in-part of application No. 09/728,422, filed on Nov. 30, 2000, now abandoned.
(63) Continuation-in-part of application No. 09/774,434, filed on Jan. 30, 2001, now abandoned.

(51) Int. Cl. C12Q 1/68

(52) U.S. Cl. 435/6

(57) ABSTRACT

The present invention provides novel nucleic acids, novel polypeptide sequences encoded by these nucleic acids and uses thereof.

[0001] This application is a continuation-in-part of each of PCT/US01/04098 filed Feb. 5, 2001, Docket No. 787CIP2-2G/PCT; U.S. application Ser. No. 09/496,914 filed Feb. 3, 2000, Docket No. 787, now abandoned; U.S. application Ser. No. 09/560,875 filed Apr. 27, 2000, Docket No. 787CIP; U.S. application Ser. No. 10/112,931 filed Mar. 28, 2002, Docket No. 787CIP2DV1, which is a division of U.S. application Ser. No. 09/598,075 filed Jun. 20, 2000, Docket No. 787CIP2, now abandoned; U.S. application Ser. No. 09/620,325 filed Jul. 19, 2000, Docket No. 787CIP2B; U.S. application Ser. No. 09/654,936 filed Sep. 1, 2000, Docket No. 787CIP2C; U.S. application Ser. No. 10/233,045 filed Aug. 30, 2002, Docket No. 787CIP2DDIV, which is a division of U.S. application Ser. No. 09/663,561 filed Sep. 15, 2000, Docket No. 787CIP2D; U.S. application Ser. No. 10/256,113 filed Sep. 25, 2002, Docket No. 787CIP2EDV1, which is a division of U.S. application Ser. No. 09/693,325 filed Oct. 20, 2000, Docket No. 787CIP2E; U.S. application Ser. No. 09/728,422 filed Nov. 30, 2000, Docket No. 787CIP2F; U.S. application Ser. No. 09/774,434 filed Jan. 30, 2001, Docket No. 787CIP2G, all of which are incorporated herein by reference in their entirety, specifically including, but not limited to, incorporation by reference of the tables in each application displaying sequence information, homology information, ematrix signatures, pfam signatures, signal peptide information, transmembrane domain information, chromosomal localization and tissue distribution information, and/or 3-dimensional structural information.

### 1. TECHNICAL FIELD

[0002] The present invention provides novel polynucleotides and proteins encoded by such polynucleotides, along with uses for these polynucleotides and proteins, for example in therapeutic, diagnostic and research methods.

### 2. BACKGROUND

[0003] Technology aimed at the discovery of protein factors (including e.g., cytokines, such as lymphokines, interferons, circulating soluble factors, chemokines, and interleukins) has matured rapidly over the past decade. The now routine hybridization cloning and expression cloning techniques clone novel polynucleotides “directly” in the sense that they rely on information directly related to the discovered protein (i.e., partial DNA/amino acid sequence of the protein in the case of hybridization cloning; activity of the protein in the case of expression cloning). More recent “indirect” cloning techniques such as signal sequence cloning, which isolates DNA sequences based on the presence of a now well-recognized secretory leader sequence motif, as well as various PCR-based or low stringency hybridization-based cloning techniques, have advanced the state of the art by making available large numbers of DNA/amino acid sequences for proteins that are known to have biological activity, for example, by virtue of their secreted nature in the case of leader sequence cloning, by virtue of their cell or tissue source in the case of PCR-based techniques, or by virtue of structural similarity to other genes of known biological activity.

[0004] Identified polynucleotide and polypeptide sequences have numerous applications in, for example, diagnostics, forensics, gene mapping; identification of mutations responsible for genetic disorders or other traits, to assess biodiversity, and to produce many other types of data and products dependent on DNA and amino acid sequences.

### 3. SUMMARY OF THE INVENTION

[0005] The compositions of the present invention include novel isolated polypeptides, novel isolated polynucleotides encoding such polypeptides, including recombinant DNA molecules, cloned genes or degenerate variants thereof, especially naturally occurring variants such as allelic variants, antisense polynucleotide molecules, and antibodies that specifically recognize one or more epitopes present on such polypeptides, as well as hybridomas producing such antibodies.

[0006] The present invention relates to a collection or library of at least one novel nucleic acid sequence assembled from expressed sequence tags (ESTs) isolated mainly by sequencing by hybridization (SBH), and in some cases, sequences obtained from one or more public databases. The invention relates also to the proteins encoded by such polynucleotides, along with therapeutic, diagnostic and research utilities for these polynucleotides and proteins. These nucleic acid sequences are designated as SEQ ID NO: 1-984, 1969-2952, 3937-3942 or 3949-3954. The polypeptides sequences are designated SEQ ID NO: 985-1968, 2953-3936, 3943-3948 or 3955-3960. The nucleic acids and polypeptides are provided in the Sequence Listing. In the nucleic acids provided in the Sequence Listing, A is adenosine; C is cytosine; G is guanine; T is thymine; and N is any of the four bases. In the amino acids provided in the Sequence Listing, * corresponds to the stop codon.

[0007] The nucleic acid sequences of the present invention also include, nucleic acid sequences that hybridize to the complement of SEQ ID NO: 1-984, 1969-2952, 3937-3942 or 3949-3954 under stringent hybridization conditions; nucleic acid sequences which are allelic variants or species homologues of any of the nucleic acid sequences recited above, or nucleic acid sequences that encode a peptide comprising a specific domain or truncation of the peptides encoded by SEQ ID NO: 1-984, 1969-2952, 3937-3942 or 3949-3954. A polynucleotide comprising a nucleotide sequence having at least 90% identity to an identifying sequence of SEQ ID NO: 1-984, 1969-2952, 3937-3942 or 3949-3954 or a degenerate variant or fragment thereof. The identifying sequence can be 100 base pairs in length.

[0008] The nucleic acid sequences of the present invention also include the sequence information from the nucleic acid sequences of SEQ ID NO:1-984, 1969-2952, 3937-3942 or 3949-3954. The sequence information can be a segment of any one of SEQ ID NO:1-984, 1969-2952, 3937-3942 or 3949-3954 that uniquely identifies or represents the sequence information of SEQ ID NO:1-984, 1969-2952, 3937-3942 or 3949-3954.

[0009] A collection as used in this application can be a collection of only one polynucleotide. The collection of sequence information or identifying information of each sequence can be provided on a nucleic acid array. In one embodiment, segments of sequence information is provided on a nucleic acid array to detect the polynucleotide that contains the segment. The array can be designed to detect full-match or mismatch to the polynucleotide that contains the segment. The collection can also be provided in a computer-readable format.

[0010] This invention also includes the reverse or direct complement of any of the nucleic acid sequences recited above; cloning or expression vectors containing the nucleic acid sequences; and host cells or organisms transformed with these expression vectors. Nucleic acid sequences (or their reverse or direct complements) according to the invention have numerous applications in a variety of techniques known to those skilled in the art of molecular biology, such as use as hybridization probes, use as primers for PCR, use in an array, use in computer-readablemedia, use in sequencing full-length genes, use for chromosome and gene mapping, use in the recombinant production of protein, and use in the generation of anti-sense DNA or RNA, their chemical analogs and the like.

[0011] In a preferred embodiment, the nucleic acid sequences of SEQ ID NO:1-984, 1969-2952, 3937-3942 or 3949-3954 or novel segments or parts of the nucleic acids of the invention are used as primers in expression assays that are well known in the art. In a particularly preferred embodiment, the nucleic acid sequences of SEQ ID NO:1-984, 1969-2952, 3937-3942 or 3949-3954 or novel segments or parts of the nucleic acids provided herein are used in diagnostics for identifying expressed genes or, as well known in the art and exemplified by Vollrath et al., Science 258:52-59 (1992), as expressed sequence tags for physical mapping of the human genome.

[0012] The isolated polynucleotides of the invention include, but are not limited to, a polynucleotide comprising any one of the nucleotide sequences set forth in SEQ ID NO:1-984, 1969-2952, 3937-3942 or 3949-3954; a polynucleotide comprising any of the full length protein coding sequences of SEQ ID NO:1-984, 1969-2952, 3937-3942 or 3949-3954; and a polynucleotide comprising any of the nucleotide sequences of the mature protein coding sequences of SEQ ID NO:1-984, 1969-2952, 3937-3942 or 3949-3954. The polynucleotides of the present invention also include, but are not limited to, a polynucleotide that hybridizes under stringent hybridization conditions to (a) the complement of any one of the nucleotide sequences set forth in SEQ ID NO:1-984, 1969-2952, 3937-3942 or 3949-3954; (b) a nucleotide sequence encoding any one of the amino acid sequences set forth in the Sequence Listing; (c) a polynucleotide which is an allelic variant of any polynucleotides recited above; (d) a polynucleotide which encodes a species homolog (e.g. orthologs) of any of the proteins recited above; or (e) a polynucleotide that encodes a polypeptide comprising a specific domain or truncation of any of the polypeptides comprising an amino acid sequence set forth in the Sequence Listing.

[0013] The isolated polypeptides of the invention include, but are not limited to, a polypeptide comprising any of the amino acid sequences set forth in SEQ ID NO: 985-1968, 2953-3936, 3943-3948 or 3955-3960; or the corresponding full length or mature protein. Polypeptides of the invention also include polypeptides with biological activity that are encoded by (a) any of the polynucleotides having a nucleotide sequence set forth in SEQ ID NO:1-984, 1969-2952, 3937-3942 or 3949-3954; or b) polynucleotides that hybridize to the complement of the polynucleotides of (a) under stringent hybridization conditions. Biologically or immunologically active variants of any of the polypeptide sequences in the Sequence Listing, and “substantial equivalents” thereof (e.g., with at least about 65%, 70%, 75%, 80%, 85%, 90%, 95%, 98% or 99% amino acid sequence identity) that preferably retain biological activity are also contemplated. The polypeptides of the invention may be wholly or partially chemically synthesized but are preferably produced by recombinant means using the genetically engineered cells (e.g. host cells) of the invention.

[0014] The invention also provides compositions comprising a polypeptide of the invention. Polypeptide compositions of the invention may further comprise an acceptable carrier, such as a hydrophilic, e.g., pharmaceutically acceptable, carrier.

[0015] The invention also provides host cells transformed or transfected with a polynucleotide of the invention.

[0016] The invention also relates to methods for producing a polypeptide of the invention comprising growing a culture of the host cells of the invention in a suitable culture medium under conditions permitting expression of the desired polypeptide, and purifying the polypeptide from the culture or from the host cells. Preferred embodiments include those in which the protein produced by such process is a mature form of the protein.

[0017] Polynucleotides according to the invention have numerous applications in a variety of techniques known to those skilled in the art of molecular biology. These techniques include use as hybridization probes, use as oligomers, or primers, for PCR, use for chromosome and gene mapping, use in the recombinant production of protein, and use in generation of anti-sense DNA or RNA, their chemical analogs and the like. For example, when the expression of an mRNA is largely restricted to a particular cell or tissue type, polynucleotides of the invention can be used as hybridization probes to detect the presence of the particular cell or tissue mRNA in a sample using, e.g., in situ hybridization.

[0018] In other exemplary embodiments, the polynucleotides are used in diagnostics as expressed sequence tags for identifying expressed genes or, as well known in the art and exemplified by Vollrath et al., Science 258:52-59 (1992), as expressed sequence tags for physical mapping of the human genome.

[0019] The polypeptides according to the invention can be used in a variety of conventional procedures and methods that are currently applied to other proteins. For example, a polypeptide of the invention can be used to generate an antibody that specifically binds the polypeptide. Such antibodies, particularly monoclonal antibodies, are useful for detecting or quantitating the polypeptide in tissue. The polypeptides of the invention can also be used as molecular weight markers, and as a food supplement.

[0020] Methods are also provided for preventing, treating, or ameliorating a medical condition which comprises the step of administering to a mammalian subject a therapeutically effective amount of a composition comprising a polypeptide of the present invention and a pharmaceutically acceptable carrier.

[0021] In particular, the polypeptides and polynucleotides of the invention can be utilized, for example, in methods for the prevention and/or treatment of disorders involving aberrant protein expression or biological activity.

[0022] The present invention further relates to methods for detecting the presence of the polynucleotides or polypeptides of the invention in a sample. Such methods can, for example, be utilized as part of prognostic and diagnostic evaluation of disorders as recited herein and for the identification of subjects exhibiting a predisposition to such conditions. The invention provides a method for detecting the polynucleotides of the invention in a sample, comprising contacting the sample with a compound that binds to and forms a complex with the polynucleotide of interest for a period sufficient to form the complex and under conditions sufficient to form a complex and detecting the complex such that if a complex is detected, the polynucleotide of interest is detected. The invention also provides a method for detecting the polypeptides of the invention in a sample comprising contacting the sample with a compound that binds to and forms a complex with the polypeptide under conditions and for a period sufficient to form the complex and detecting the formation of the complex such that if a complex is formed, the polypeptide is detected.

[0023] The invention also provides kits comprising polynucleotide probes and/or monoclonal antibodies, and optionally quantitative standards, for carrying out methods of the invention. Furthermore, the invention provides methods for evaluating the efficacy of drugs, and monitoring the progress of patients, involved in clinical trials for the treatment of disorders as recited above.

[0024] The invention also provides methods for the identification of compounds that modulate (i.e., increase or decrease) the expression or activity of the polynucleotides and/or polypeptides of the invention. Such methods can be utilized, for example, for the identification of compounds that can ameliorate symptoms of disorders as recited herein. Such methods can include, but are not limited to, assays for identifying compounds and other substances that interact with (e.g., bind to) the polypeptides of the invention. The invention provides a method for identifying a compound that binds to the polypeptides of the invention comprising contacting the compound with a polypeptide of the invention in a cell for a time sufficient to form a polypeptide/compound complex, wherein the complex drives expression of a reporter gene sequence in the cell; and detecting the complex by detecting the reporter gene sequence expression such that if expression of the reporter gene is detected the compound the binds to a polypeptide of the invention is identified.

[0025] The methods of the invention also provides methods for treatment which involve the administration of the polynucleotides or polypeptides of the invention to individuals exhibiting symptoms or tendencies. In addition, the invention encompasses methods for treating diseases or disorders as recited herein comprising administering compounds and other substances that modulate the overall activity of the target gene products. Compounds and other substances can effect such modulation either on the level of target gene/protein expression or target protein activity.

[0026] The polypeptides of the present invention and the polynucleotides encoding them are also useful for the same functions known to one of skill in the art as the polypeptides and polynucleotides to which they have homology (set forth in Tables 2 and 9); for which they have a signature region (as set forth in Tables 3 and 10); or for which they have homology to a gene family (as set forth in Tables 4 and 11). If no homology is set forth for a sequence, then the polypeptides and polynucleotides of the present invention are useful for a variety of applications, as described herein, including use in arrays for detection.

### 4. DETAILED DESCRIPTION OF THE INVENTION

[0027] 4.1 Definitions

[0028] It must be noted that as used herein and in the appended claims, the singular forms “a”, “an” and “the” include plural references unless the context clearly dictates otherwise.

[0029] The term “active” refers to those forms of the polypeptide which retain the biologic and/or immunologic activities of any naturally occurring polypeptide. According to the invention, the terms “biologically active” or “biological activity” refer to a protein or peptide having structural, regulatory or biochemical functions of a naturally occurring molecule. Likewise “immunologically active” or “immunological activity” refers to the capability of the natural, recombinant or synthetic polypeptide to induce a specific immune response in appropriate animals or cells and to bind with specific antibodies.

[0030] The term “activated cells” as used in this application are those cells which are engaged in extracellular or intracellular membrane trafficking, including the export of secretory or enzymatic molecules as part of a normal or disease process.

[0031] The terms “complementary” or “complementarity” refer to the natural binding of polynucleotides by base pairing. For example, the sequence 5′-AGT-3′ binds to the complementary sequence 3′-TCA-5′. Complementarity between two single-stranded molecules may be “partial” such that only some of the nucleic acids bind or it may be “complete” such that total complementarity exists between the single stranded molecules. The degree of complementarity between the nucleic acid strands has significant effects on the efficiency and strength of the hybridization between the nucleic acid strands.

[0032] The term “embryonic stem cells (ES)” refers to a cell that can give rise to many differentiated cell types in an embryo or an adult, including the germ cells. The term “germ line stem cells (GSCs)” refers to stem cells derived from primordial stem cells that provide a steady and continuous source of germ cells for the production of gametes. The term “primordial germ cells (PGCs)” refers to a small population of cells set aside from other cell lineages particularly from the yolk sac, mesenteries, or gonadal ridges during embryogenesis that have the potential to differentiate into germ cells and other cells. PGCs are the source from which GSCs and ES cells are derived The PGCs, the GSCs and the ES cells are capable of self-renewal. Thus these cells not only populate the germ line and give rise to a plurality of terminally differentiated cells that comprise the adult specialized organs, but are able to regenerate themselves.

[0033] The term “expression modulating fragment,” EMF, means a series of nucleotides which modulates the expression of an operably linked ORF or another EMF.

[0034] As used herein, a sequence is said to “modulate the expression of an operably linked sequence” when the expression of the sequence is altered by the presence of the EMF. EMFs include, but are not limited to, promoters, and promoter modulating sequences (inducible elements). One class of EMFs are nucleic acid fragments which induce the expression of an operably linked ORF in response to a specific regulatory factor or physiological event.

[0035] The terms “nucleotide sequence” or “nucleic acid” or “polynucleotide” or “oligonculeotide” are used interchangeably and refer to a heteropolymer of nucleotides or the sequence of these nucleotides. These phrases also refer to DNA or RNA of genomic or synthetic origin which may be single-stranded or double-stranded and may represent the sense or the antisense strand, to peptide nucleic acid (PNA) or to any DNA-like or RNA-like material. In the sequences herein A is adenine, C is cytosine, T is thymine, G is guanine and N is A, C, G or T (U). It is contemplated that where the polynucleotide is RNA, the T (thymine) in the sequences provided herein is substituted with U (uracil). Generally, nucleic acid segments provided by this invention may be assembled from fragments of the genome and short oligonucleotide linkers, or from a series of oligonucleotides, or from individual nucleotides, to provide a synthetic nucleic acid which is capable of being expressed in a recombinant transcriptional unit comprising regulatory elements derived from a microbial or viral operon, or a eukaryotic gene.

[0036] The terms “oligonucleotide fragment” or a “polynucleotide fragment”, “portion,” or “segment” or “probe” or “primer” are used interchangeably and refer to a sequence of nucleotide residues which are at least about 5 nucleotides, more preferably at least about 7 nucleotides, more preferably at least about 9 nucleotides, more preferably at least about 11 nucleotides and most preferably at least about 17 nucleotides. The fragment is preferably less than about 500 nucleotides, preferably less than about 200 nucleotides, more preferably less than about 100 nucleotides, more preferably less than about 50 nucleotides and most preferably less than 30 nucleotides. Preferably the probe is from about 6 nucleotides to about 200 nucleotides, preferably from about 15 to about 50 nucleotides, more preferably from about 17 to 30 nucleotides and most preferably from about 20 to 25 nucleotides. Preferably the fragments can be used in polymerase chain reaction (PCR), various hybridization procedures or microarray procedures to identify or amplify identical or related parts of mRNA or DNA molecules. A fragment or segment may uniquely identify each polynucleotide sequence of the present invention. Preferably the fragment comprises a sequence substantially similar to any one of SEQ ID NOs:1-20.

[0037] Probes may, for example, be used to determine whether specific mRNA molecules are present in a cell or tissue or to isolate similar nucleic acid sequences from chromosomal DNA as described by Walsh et al. (Walsh, P. S. et al., 1992, PCR Methods Appl 1:241-250). They may be labeled by nick translation, Klenow fill-in reaction, PCR, or other methods well known in the art. Probes of the present invention, their preparation and/or labeling are elaborated in Sambrook, J. et al., 1989, Molecular Cloning: A Laboratory Manual, Cold Spring Harbor Laboratory, NY; or Ausubel, F. M. et al., 1989, Current Protocols in Molecular Biology, John Wiley & Sons, New York N.Y., both of which are incorporated herein by reference in their entirety.

[0038] The nucleic acid sequences of the present invention also include the sequence information from the nucleic acid sequences of SEQ ID NO: 1-984, 1969-2952, 3937-3942 or 3949-3954. The sequence information can be a segment of any one of SEQ ID NO:1-1-984, 1969-2952, 3937-3942 or 3949-3954 that uniquely identifies or represents the sequence information of that sequence of SEQ ID NO:1-984, 1969-2952, 3937-3942 or 3949-3954. One such segment can be a twenty-mer nucleic acid sequence because the probability that a twenty-mer is fully matched in the human genome is 1 in 300. In the human genome, there are three billion base pairs in one set of chromosomes. Because 4²⁰ possible twenty-mers exist, there are 300 times more twenty-mers than there are base pairs in a set of human chromosomes. Using the same analysis, the probability for a seventeen-mer to be fully matched in the human genome is approximately 1 in 5. When these segments are used in arrays for expression studies, fifteen-mer segments can be used. The probability that the fifteen-mer is fully matched in the expressed sequences is also approximately one in five because expressed sequences comprise less than approximately 5% of the entire genome sequence.

[0039] Similarly, when using sequence information for detecting a single mismatch, a segment can be a twenty-five mer. The probability that the twenty-five mer would appear in a human genome with a single mismatch is calculated by multiplying the probability for a full match (1÷4²⁵) times the increased probability for mismatch at each nucleotide position (3×25). The probability that an eighteen mer with a single mismatch can be detected in an array for expression studies is approximately one in five. The probability that a twenty-mer with a single mismatch can be detected in a human genome is approximately one in five.

[0040] The term “open reading frame,” ORF, means a series of nucleotide triplets coding for amino acids without any termination codons and is a sequence translatable into protein.

[0041] The terms “operably linked” or “operably associated” refer to functionally related nucleic acid sequences. For example, a promoter is operably associated or operably linked with a coding sequence if the promoter controls the transcription of the coding sequence. While operably linked nucleic acid sequences can be contiguous and in the same reading frame, certain genetic elements e.g. repressor genes are not contiguously linked to the coding sequence but still control transcription/translation of the coding sequence.

[0042] The term “pluripotent” refers to the capability of a cell to differentiate into a number of differentiated cell types that are present in an adult organism. A pluripotent cell is restricted in its differentiation capability in comparison to a totipotent cell.

[0043] The terms “polypeptide” or “peptide” or “amino acid sequence” refer to an oligopeptide, peptide, polypeptide or protein sequence or fragment thereof and to naturally occurring or synthetic molecules. A polypeptide “fragment,” “portion,” or “segment” is a stretch of amino acid residues of at least about 5 amino acids, preferably at least about 7 amino acids, more preferably at least about 9 amino acids and most preferably at least about 17 or more amino acids. The peptide preferably is not greater than about 500 amino acids, more preferably less than 200 amino acids more preferably less than 150 amino acids and most preferably less than 100 amino acids. Preferably the peptide is from about 5 to about 200 amino acids. To be active, any polypeptide must have sufficient length to display biological and/or immunological activity.

[0044] The term “naturally occurring polypeptide” refers to polypeptides produced by cells that have not been genetically engineered and specifically contemplates various polypeptides arising from post-translational modifications of the polypeptide including, but not limited to, acetylation, carboxylation, glycosylation, phosphorylation, lipidation and acylation.

[0045] The term “translated protein coding portion” means a sequence which encodes for the full length protein which may include any leader sequence or any processing sequence.

[0046] The term “mature protein coding sequence” means a sequence which encodes a peptide or protein without a signal or leader sequence. The “mature protein portion” means that portion of the protein which does not include a signal or leader sequence. The peptide may have been produced by processing in the cell which removes any leader/signal sequence. The mature protein portion may or may not include the initial methionine residue. The methionine residue may be removed from the protein during processing in the cell. The peptide may be produced synthetically or the protein may have been produced using a polynucleotide only encoding for the mature protein coding sequence.

[0047] The term “derivative” refers to polypeptides chemically modified by such techniques as ubiquitination, labeling (e.g., with radionuclides or various enzymes), covalent polymer attachment such as pegylation (derivatization with polyethylene glycol) and insertion or substitution by chemical synthesis of amino acids such as ornithine, which do not normally occur in human proteins.

[0048] The term “variant” (or “analog”) refers to any polypeptide differing from naturally occurring polypeptides by amino acid insertions, deletions, and substitutions, created using, e.g., recombinant DNA techniques. Guidance in determining which amino acid residues may be replaced, added or deleted without abolishing activities of interest, may be found by comparing the sequence of the particular polypeptide with that of homologous peptides and mining the number of amino acid sequence changes made in regions of high homology (conserved regions) or by replacing amino acids with consensus sequence.

[0049] Alternatively, recombinant variants encoding these same or similar polypeptides may be synthesized or selected by making use of the “redundancy” in the genetic code. Various codon substitutions, such as the silent changes which produce various restriction sites, may be introduced to optimize cloning into a plasmid or viral vector or expression in a particular prokaryotic or eukaryotic system. Mutations in the polynucleotide sequence may be reflected in the polypeptide or domains of other peptides added to the polypeptide to modify the properties of any part of the polypeptide, to change characteristics such as ligand-binding affinities, interchain affinities, or degradation/turnover rate.

[0050] Preferably, amino acid “substitutions” are the result of replacing one amino acid with another amino acid having similar structural and/or chemical properties, i.e., conservative amino acid replacements. “Conservative” amino acid substitutions may be made on the basis of similarity in polarity, charge, solubility, hydrophobicity, hydrophilicity, and/or the amphipathic nature of the residues involved. For example, nonpolar (hydrophobic) amino acids include alanine, leucine, isoleucine, valine, proline, phenylalanine, tryptophan, and methionine; polar neutral amino acids include glycine, serine, threonine, cysteine, tyrosine, asparagine, and glutamine; positively charged (basic) amino acids include arginine, lysine, and histidine; and negatively charged (acidic) amino acids include aspartic acid and glutamic acid. “Insertions” or “deletions” are preferably in the range of about 1 to 20 amino acids, more preferably 1 to 10 amino acids. The variation allowed may be experimentally determined by systematically making insertions, deletions, or substitutions of amino acids in a polypeptide molecule using recombinant DNA techniques and assaying the resulting recombinant variants for activity.

[0051] Alternatively, where alteration of function is desired, insertions, deletions or non-conservative alterations can be engineered to produce altered polypeptides. Such alterations can, for example, alter one or more of the biological functions or biochemical characteristics of the polypeptides of the invention. For example, such alterations may change polypeptide characteristics such as ligand-binding affinities, interchain affinities, or degradation/turnover rate. Further, such alterations can be selected so as to generate polypeptides that are better suited for expression, scale up and the like in the host cells chosen for expression. For example, cysteine residues can be deleted or substituted with another amino acid residue in order to eliminate disulfide bridges.

[0052] The terms “purified” or “substantially purified” as used herein denotes that the indicated nucleic acid or polypeptide is present in the substantial absence of other biological macromolecules, e.g., polynucleotides, proteins, and the like. In one embodiment, the polynucleotide or polypeptide is purified such that it constitutes at least 95% by weight, more preferably at least 99% by weight, of the indicated biological macromolecules present (but water, buffers, and other small molecules, especially molecules having a molecular weight of less than 1000 daltons, can be present).

[0053] The term “isolated” as used herein refers to a nucleic acid or polypeptide separated from at least one other component (e.g., nucleic acid or polypeptide) present with the nucleic acid or polypeptide in its natural source. In one embodiment, the nucleic acid or polypeptide is found in the presence of (if anything) only a solvent, buffer, ion, or other component normally present in a solution of the same. The terms “isolated” and “purified” do not encompass nucleic acids or polypeptides present in their natural source.

[0054] The term “recombinant,” when used herein to refer to a polypeptide or protein, means that a polypeptide or protein is derived from recombinant (e.g., microbial, insect, or mammalian) expression systems. “Microbial” refers to recombinant polypeptides or proteins made in bacterial or fungal (e.g., yeast) expression systems. As a product, “recombinant microbial” defines a polypeptide or protein essentially free of native endogenous substances and unaccompanied by associated native glycosylation. Polypeptides or proteins expressed in most bacterial cultures, e.g., E. coli, will be free of glycosylation modifications; polypeptides or proteins expressed in yeast will have a glycosylation pattern in general different from those expressed in mammalian cells.

[0055] The term “recombinant expression vehicle or vector” refers to a plasmid or phage or virus or vector, for expressing a polypeptide from a DNA (RNA) sequence. An expression vehicle can comprise a transcriptional unit comprising an assembly of (1) a genetic element or elements having a regulatory role in gene expression, for example, promoters or enhancers, (2) a structural or coding sequence which is transcribed into mRNA and translated into protein, and (3) appropriate transcription initiation and termination sequences. Structural units intended for use in yeast or eukaryotic expression systems preferably include a leader sequence enabling extracellular secretion of translated protein by a host cell. Alternatively, where recombinant protein is expressed without a leader or transport sequence, it may include an amino terminal methionine residue. This residue may or may not be subsequently cleaved from the expressed recombinant protein to provide a final product.

[0056] The term “recombinant expression system” means host cells which have stably integrated a recombinant transcriptional unit into chromosomal DNA or carry the recombinant transcriptional unit extrachromosomally. Recombinant expression systems as defined herein will express heterologous polypeptides or proteins upon induction of the regulatory elements linked to the DNA segment or synthetic gene to be expressed. This term also means host cells which have stably integrated a recombinant genetic element or elements having a regulatory role in gene expression, for example, promoters or enhancers. Recombinant expression systems as defined herein will express polypeptides or proteins endogenous to the cell upon induction of the regulatory elements linked to the endogenous DNA segment or gene to be expressed. The cells can be prokaryotic or eukaryotic.

[0057] The term “secreted” includes a protein that is transported across or through a membrane, including transport as a result of signal sequences in its amino acid sequence when it is expressed in a suitable host cell. “Secreted” proteins include without limitation proteins secreted wholly (e.g., soluble proteins) or partially (e.g., receptors) from the cell in which they are expressed. “Secreted” proteins also include without limitation proteins that are transported across the membrane of the endoplasmic reticulum. “Secreted” proteins are also intended to include proteins containing non-typical signal sequences (e.g. Interleukin-1 Beta, see Krasney, P. A. and Young, P. R. (1992) Cytokine 4(2):134-143) and factors released from damaged cells (e.g. Interleukin-1 Receptor Antagonist, see Arend, W. P. et. al. (1998) Annu. Rev. Immunol. 16:27-55)

[0058] Where desired, an expression vector may be designed to contain a “signal or leader sequence” which will direct the polypeptide through the membrane of a cell. Such a sequence may be naturally present on the polypeptides of the present invention or provided from heterologous protein sources by recombinant DNA techniques.

[0059] The term “stringent” is used to refer to conditions that are commonly understood in the art as stringent. Stringent conditions can include highly stringent conditions (i.e., hybridization to filter-bound DNA in 0.5 M NaHPO₄, 7% sodium dodecyl sulfate (SDS), 1 mM EDTA at 65° C., and washing in 0.1×SSC/0.1% SDS at 68° C.), and moderately stringent conditions (i.e., washing in 0.2×SSC/0.1% SDS at 42° C.). Other exemplary hybridization conditions are described herein in the examples.

[0060] In instances of hybridization of deoxyoligonucleotides, additional exemplary stringent hybridization conditions include washing in 6×SSC/0.05% sodium pyrophosphate at 37° C. (for 14-base oligonucleotides), 48° C. (for 17-base oligos), 55° C. (for 20-base oligonucleotides), and 60° C. (for 23-base oligonucleotides).

[0061] As used herein, “substantially equivalent” can refer both to nucleotide and amino acid sequences, for example a mutant sequence, that varies from a reference sequence by one or more substitutions, deletions, or additions, the net effect of which does not result in an adverse functional dissimilarity between the reference and subject sequences. Typically, such a substantially equivalent sequence varies from one of those listed herein by no more than about 35% (i.e., the number of individual residue substitutions, additions, and/or deletions in a substantially equivalent sequence, as compared to the corresponding reference sequence, divided by the total number of residues in the substantially equivalent sequence is about 0.35 or less). Such a sequence is said to have 65% sequence identity to the listed sequence. In one embodiment, a substantially equivalent, e.g., mutant, sequence of the invention varies from a listed sequence by no more than 30% (70% sequence identity); in a variation of this embodiment, by no more than 25% (75% sequence identity); and in a further variation of this embodiment, by no more than 20% (80% sequence identity) and in a further variation of this embodiment, by no more than 10% (90% sequence identity) and in a further variation of this embodiment, by no more that 5% (95% sequence identity). Substantially equivalent, e.g., mutant, amino acid sequences according to the invention preferably have at least 80% sequence identity with a listed amino acid sequence, more preferably at least 85% sequence identity, more preferably at least 90% sequence identity, more preferably at least 95% sequence identity, more preferably at least 98% sequence identity and most preferably at least 98% idenity. Substantially equivalent nucleotide sequences of the invention can have lower percent sequence identities, taking into account, for example, the redundancy or degeneracy of the genetic code. Preferably, nucleotide sequence has at least about 65% identity, more preferably at least about 75% identity, more preferably at least about 80% identity, more preferably at least about 85% identity, more preferably at least about 90% identity, and most preferably at least about 95% identity, more preferably at least 98% and most preferably at least about 99% identity. For the purposes of the present invention, sequences having substantially equivalent biological activity and substantially equivalent expression characteristics are considered substantially equivalent. For the purposes of determining equivalence, truncation of the mature sequence (e.g., via a mutation which creates a spurious stop codon) should be disregarded. Sequence identity may be determined, e.g., using the Jotun Hein method (Hein, J. (1990) Methods Enzymol. 183:626-645). Identity between sequences can also be determined by other methods known in the art, e.g. by varying hybridization conditions.

[0062] The term “totipotent” refers to the capability of a cell to differentiate into all of the cell types of an adult organism.

[0063] The term “transformation” means introducing DNA into a suitable host cell so that the DNA is replicable, either as an extrachromosomal element, or by chromosomal integration. The term “transfection” refers to the taking up of an expression vector by a suitable host cell, whether or not any coding sequences are in fact expressed. The term “infection” refers to the introduction of nucleic acids into a suitable host cell by use of a virus or viral vector.

[0064] As used herein, an “uptake modulating fragment,” UMF, means a series of nucleotides which mediate the uptake of a linked DNA fragment into a cell. UMFs can be readily identified using known UMFs as a target sequence or target motif with the computer-based systems described below. The presence and activity of a UMF can be confirmed by attaching the suspected UMF to a marker sequence. The resulting nucleic acid molecule is then incubated with an appropriate host under appropriate conditions and the uptake of the marker sequence is determined. As described above, a UMF will increase the frequency of uptake of a linked marker sequence.

[0065] Each of the above terms is meant to encompass all that is described for each, unless the context dictates otherwise.

[0066] 4.2 Nucleic Acids of the Invention

[0067] Nucleotide sequences of the invention are set forth in the Sequence Listing.

[0068] The isolated polynucleotides of the invention include a polynucleotide comprising the nucleotide sequences of SEQ ID NO: 1-984, 1969-2952, 3937-3942 or 3949-3954; a polynucleotide encoding any one of the peptide sequences of SEQ ID NO: 985-1968, 2953-3936, 3943-3948 or 3955-3960; and a polynucleotide comprising the nucleotide sequence encoding the mature protein coding sequence of the polypeptides of any one of SEQ ID NO: 985-1968, 2953-3936, 3943-3948 or 3955-3960. The polynucleotides of the present invention also include, but are not limited to, a polynucleotide that hybridizes under stringent conditions to (a) the complement of any of the nucleotides sequences of SEQ ID NO: 1-984, 1969-2952, 3937-3942 or 3949-3954; (b) nucleotide sequences encoding any one of the amino acid sequences set forth in the Sequence Listing as SEQ ID NO: 985-1968, 2953-3936, 3943-3948 or 3955-3960; (c) a polynucleotide which is an allelic variant of any polynucleotide recited above; (d) a polynucleotide which encodes a species homolog of any of the proteins recited above; or (e) a polynucleotide that encodes a polypeptide comprising a specific domain or truncation of the polypeptides of SEQ ID NO:985-1968, 2953-3936, 3943-3948 or 3955-3960. Domains of interest may depend on the nature of the encoded polypeptide; e.g., domains in receptor-like polypeptides include ligand-binding, extracellular, transmembrane, or cytoplasmic domains, or combinations thereof; domains in immunoglobulin-like proteins include the variable immunoglobulin-like domains; domains in enzyme-like polypeptides include catalytic and substrate binding domains; and domains in ligand polypeptides include receptor-binding domains.

[0069] The polynucleotides of the invention include naturally occurring or wholly or partially synthetic DNA, e.g., cDNA and genomic DNA, and RNA, e.g., mRNA. The polynucleotides may include all of the coding region of the cDNA or may represent a portion of the coding region of the cDNA.

[0070] The present invention also provides genes corresponding to the cDNA sequences disclosed herein. The corresponding genes can be isolated in accordance with known methods using the sequence information disclosed herein. Such methods include the preparation of probes or primers from the disclosed sequence information for identification and/or amplification of genes in appropriate genomic libraries or other sources of genomic materials. Further 5′ and 3′ sequence can be obtained using methods known in the art. For example, full length cDNA or genomic DNA that corresponds to any of the polynucleotides of SEQ ID NO: 1-984, 1969-2952, 3937-3942 or 3949-3954 can be obtained by screening appropriate cDNA or genomic DNA libraries under suitable hybridization conditions using any of the polynucleotides of SEQ ID NO: 1-984, 1969-2952, 3937-3942 or 3949-3954 or a portion thereof as a probe. Alternatively, the polynucleotides of SEQ ID NO: 1-984, 1969-2952, 3937-3942 or 3949-3954 may be used as the basis for suitable primer(s) that allow identification and/or amplification of genes in appropriate genomic DNA or cDNA libraries.

[0071] The nucleic acid sequences of the invention can be assembled from ESTs and sequences (including cDNA and genomic sequences) obtained from one or more public databases, such as dbEST, gbpri, and UniGene. The EST sequences can provide identifying sequence information, representative fragment or segment information, or novel segment information for the fill-length gene.

[0072] The polynucleotides of the invention also provide polynucleotides including nucleotide sequences that are substantially equivalent to the polynucleotides recited above. Polynucleotides according to the invention can have, e.g., at least about 65%, at least about 70%, at least about 75%, at least about 80%, 81%, 82%, 83%, 84%, more typically at least about 85%, 86%, 87%, 88%, 89%, and more typically at least about 90%, 91%, 92%, 93%, 94%, and even more typically at least about 95%, 96%, 97%, 98%, 99%, sequence identity to a polynucleotide recited above.

[0073] Included within the scope of the nucleic acid sequences of the invention are nucleic acid sequence fragments that hybridize under stringent conditions to any of the nucleotide sequences of SEQ ID NO: 1-984, 1969-2952, 3937-3942 or 3949-3954, or complements thereof, which fragment is greater than about 5 nucleotides, preferably 7 nucleotides, more preferably greater than 9 nucleotides and most preferably greater than 17 nucleotides. Fragments of, e.g. 15, 17, or 20 nucleotides or more that are selective for (i.e. specifically hybridize to any one of the polynucleotides of the invention) are contemplated. Probes capable of specifically hybridizing to a polynucleotide can differentiate polynucleotide sequences of the invention from other polynucleotide sequences in the same family of genes or can differentiate human genes from genes of other species, and are preferably based on unique nucleotide sequences.

[0074] The sequences falling within the scope of the present invention are not limited to these specific sequences, but also include allelic and species variations thereof. Allelic and species variations can be routinely determined by comparing the sequence provided SEQ ID NO: 1-984, 1969-2952, 3937-3942 or 3949-3954, a representative fragment thereof, or a nucleotide sequence at least 90% identical, preferably 95% identical, to SEQ ID NO: 1-984, 1969-2952, 3937-3942 or 3949-3954 with a sequence from another isolate of the same species. Furthermore, to accommodate codon variability, the invention includes nucleic acid molecules coding for the same amino acid sequences as do the specific ORFs disclosed herein. In other words, in the coding region of an ORF, substitution of one codon for another codon that encodes the same amino acid is expressly contemplated.

[0075] The nearest neighbor or homology result for the nucleic acids of the present invention, including SEQ ID NO: 1-984, 1969-2952, 3937-3942 or 3949-3954, can be obtained by searching a database using an algorithm or a program. Preferably, a BLAST which stands for Basic Local Alignment Search Tool is used to search for local sequence alignments (Altshul, S. F. J. Mol. Evol. 36 290-300 (1993) and Altschul S. F. et al. J. Mol. Biol. 21:403-410 (1990)). Alternatively a FASTA version 3 search against Genpept, using Fastxy algorithm.

[0076] Species homologs (or orthologs) of the disclosed polynucleotides and proteins are also provided by the present invention. Species homologs may be isolated and identified by making suitable probes or primers from the sequences provided herein and screening a suitable nucleic acid source from the desired species.

[0077] The invention also encompasses allelic variants of the disclosed polynucleotides or proteins; that is, naturally-occurring alternative forms of the isolated polynucleotide which also encode proteins which are identical, homologous or related to that encoded by the polynucleotides.

[0078] The nucleic acid sequences of the invention are further directed to sequences which encode variants of the described nucleic acids. These amino acid sequence variants may be prepared by methods known in the art by introducing appropriate nucleotide changes into a native or variant polynucleotide. There are two variables in the construction of amino acid sequence variants: the location of the mutation and the nature of the mutation. Nucleic acids encoding the amino acid sequence variants are preferably constructed by mutating the polynucleotide to encode an amino acid sequence that does not occur in nature. These nucleic acid alterations can be made at sites that differ in the nucleic acids from different species (variable positions) or in highly conserved regions (constant regions). Sites at such locations will typically be modified in series, e.g., by substituting first with conservative choices (e.g., hydrophobic amino acid to a different hydrophobic amino acid) and then with more distant choices (e.g., hydrophobic amino acid to a charged amino acid), and then deletions or insertions may be made at the target site. Amino acid sequence deletions generally range from about 1 to 30 residues, preferably about 1 to 10 residues, and are typically contiguous. Amino acid insertions include amino- and/or carboxyl-terminal fusions ranging in length from one to one hundred or more residues, as well as intrasequence insertions of single or multiple amino acid residues. Intrasequence insertions may range generally from about 1 to 10 amino residues, preferably from 1 to 5 residues. Examples of terminal insertions include the heterologous signal sequences necessary for secretion or for intracellular targeting in different host cells and sequences such as FLAG or poly-histidine sequences useful for purifying the expressed protein.

[0079] In a preferred method, polynucleotides encoding the novel amino acid sequences are changed via site-directed mutagenesis. This method uses oligonucleotide sequences to alter a polynucleotide to encode the desired amino acid variant, as well as sufficient adjacent nucleotides on both sides of the changed amino acid to form a stable duplex on either side of the site of being changed. In general, the techniques of site-directed mutagenesis are well known to those of skill in the art and this technique is exemplified by publications such as, Edelman et al., DNA 2:183 (1983). A versatile and efficient method for producing site-specific changes in a polynucleotide sequence was published by Zoller and Smith, Nucleic Acids Res. 10:6487-6500 (1982). PCR may also be used to create amino acid sequence variants of the novel nucleic acids. When small amounts of template DNA are used as starting material, primer(s) that differs slightly in sequence from the corresponding region in the template DNA can generate the desired amino acid variant PCR amplification results in a population of product DNA fragments that differ from the polynucleotide template encoding the polypeptide at the position specified by the primer. The product DNA fragments replace the corresponding region in the plasmid and this gives a polynucleotide encoding the desired amino acid variant.

[0080] A further technique for generating amino acid variants is the cassette mutagenesis technique described in Wells et al., Gene 34:315 (1985); and other mutagenesis techniques well known in the art, such as, for example, the techniques in Sambrook et al., supra, and Current Protocols in Molecular Biology, Ausubel et al. Due to the inherent degeneracy of the genetic code, other DNA sequences which encode substantially the same or a functionally equivalent amino acid sequence may be used in the practice of the invention for the cloning and expression of these novel nucleic acids. Such DNA sequences include those which are capable of hybridizing to the appropriate novel nucleic acid sequence under stringent conditions.

[0081] Polynucleotides encoding preferred polypeptide truncations of the invention can be used to generate polynucleotides encoding chimeric or fusion proteins comprising one or more domains of the invention and heterologous protein sequences.

[0082] The polynucleotides of the invention additionally include the complement of any of the polynucleotides recited above. The polynucleotide can be DNA (genomic, cDNA, amplified, or synthetic) or RNA. Methods and algorithms for obtaining such polynucleotides are well known to those of skill in the art and can include, for example, methods for determining hybridization conditions that can routinely isolate polynucleotides of the desired sequence identities.

[0083] In accordance with the invention, polynucleotide sequences comprising the mature protein coding sequences corresponding to any one of SEQ ID NO: 1-984, 1969-2952, 3937-3942 or 3949-3954, or functional equivalents thereof, may be used to generate recombinant DNA molecules that direct the expression of that nucleic acid, or a functional equivalent thereof, in appropriate host cells. Also included are the cDNA inserts of any of the clones identified herein.

[0084] A polynucleotide according to the invention can be joined to any of a variety of other nucleotide sequences by well-established recombinant DNA techniques (see Sambrook J et al. (1989) Molecular Cloning: A Laboratory Manual, Cold Spring Harbor Laboratory, NY). Useful nucleotide sequences for joining to polynucleotides include an assortment of vectors, e.g., plasmids, cosmids, lambda phage derivatives, phagemids, and the like, that are well known in the art. Accordingly, the invention also provides a vector including a polynucleotide of the invention and a host cell containing the polynucleotide. In general, the vector contains an origin of replication functional in at least one organism, convenient restriction endonuclease sites, and a selectable marker for the host cell. Vectors according to the invention include expression vectors, replication vectors, probe generation vectors, and sequencing vectors. A host cell according to the invention can be a prokaryotic or eukaryotic cell and can be a unicellular organism or part of a multicellular organism.

[0085] The present invention further provides recombinant constructs comprising a nucleic acid having any of the nucleotide sequences of SEQ ID NO: 1-984, 1969-2952, 3937-3942 or 3949-3954 or a fragment thereof or any other polynucleotides of the invention. In one embodiment, the recombinant constructs of the present invention comprise a vector, such as a plasmid or viral vector, into which a nucleic acid having any of the nucleotide sequences of SEQ ID NO: 1-984, 1969-2952, 3937-3942 or 3949-3954 or a fragment thereof is inserted, in a forward or reverse orientation. In the case of a vector comprising one of the ORFs of the present invention, the vector may further comprise regulatory sequences, including for example, a promoter, operably linked to the ORF. Large numbers of suitable vectors and promoters are known to those of skill in the art and are commercially available for generating the recombinant constructs of the present invention. The following vectors are provided by way of example. Bacterial: pBs, phagescript, PsiX174, pBluescript SK, pBs KS, pNH8a, pNH16a, pNH18a, pNH46a (Stratagene); pTrc99A, pKK223-3, pKK233-3, pDR540, pRIT5 (Pharmacia). Eukaryotic: pWLneo, pSV2cat, pOG44, PXT1, pSG (Stratagene) pSVK3, pBPV, pMSG, pSVL (Pharmacia).

[0086] The isolated polynucleotide of the invention may be operably linked to an expression control sequence such as the pMT2 or pED expression vectors disclosed in Kaufman et al., Nucleic Acids Res. 19, 4485-4490 (1991), in order to produce the protein recombinantly. Many suitable expression control sequences are known in the art. General methods of expressing recombinant proteins are also known and are exemplified in R. Kaufman, Methods in Enzymology 185, 537-566 (1990). As defined herein “operably linked” means that the isolated polynucleotide of the invention and an expression control sequence are situated within a vector or cell in such a way that the protein is expressed by a host cell which has been transformed (transfected) with the ligated polynucleotide/expression control sequence.

[0087] Promoter regions can be selected from any desired gene using CAT (chloramphenicol transferase) vectors or other vectors with selectable markers. Two appropriate vectors are pKK232-8 and pCM7. Particular named bacterial promoters include lacI, lacZ, T3, T7, gpt, lambda PR, and trc. Eukaryotic promoters include CMV immediate early, HSV thymidine kinase, early and late SV40, LTRs from retrovirus, and mouse metallothionein-I. Selection of the appropriate vector and promoter is well within the level of ordinary skill in the art. Generally, recombinant expression vectors will include origins of replication and selectable markers permitting transformation of the host cell, e.g., the ampicillin resistance gene of E. coli and S. cerevisiae TRP1 gene, and a promoter derived from a highly-expressed gene to direct transcription of a downstream structural sequence. Such promoters can be derived from operons encoding glycolytic enzymes such as 3-phosphoglycerate kinase (PGK), a-factor, acid phosphatase, or heat shock proteins, among others. The heterologous structural sequence is assembled in appropriate phase with translation initiation and termination sequences, and preferably, a leader sequence capable of directing secretion of translated protein into the periplasmic space or extracellular medium. Optionally, the heterologous sequence can encode a fusion protein including an amino terminal identification peptide imparting desired characteristics, e.g., stabilization or simplified purification of expressed recombinant product. Useful expression vectors for bacterial use are constructed by inserting a structural DNA sequence encoding a desired protein together with suitable translation initiation and termination signals in operable reading phase with a functional promoter. The vector will comprise one or more phenotypic selectable markers and an origin of replication to ensure maintenance of the vector and to, if desirable, provide amplification within the host. Suitable prokaryotic hosts for transformation include E. coli, Bacillus subtilis, Salmonella typhimurium and various species within the genera Pseudomonas, Streptomyces, and Staphylococcus, although others may also be employed as a matter of choice.

[0088] As a representative but non-limiting example, useful expression vectors for bacterial use can comprise a selectable marker and bacterial origin of replication derived from commercially available plasmids comprising genetic elements of the well known cloning vector pBR322 (ATCC 37017). Such commercial vectors include, for example, pKK223-3 (Pharmacia Fine Chemicals, Uppsala, Sweden) and GEM 1 (Promega Biotech, Madison, Wis., USA). These pBR322 “backbone” sections are combined with an appropriate promoter and the structural sequence to be expressed. Following transformation of a suitable host strain and growth of the host strain to an appropriate cell density, the selected promoter is induced or derepressed by appropriate means (e.g., temperature shift or chemical induction) and cells are cultured for an additional period. Cells are typically harvested by centrifugation, disrupted by physical or chemical means, and the resulting crude extract retained for further purification.

[0089] Polynucleotides of the invention can also be used to induce immune responses. For example, as described in Fan et al., Nat. Biotech. 17:870-872 (1999), incorporated herein by reference, nucleic acid sequences encoding a polypeptide may be used to generate antibodies against the encoded polypeptide following topical administration of naked plasmid DNA or following injection, and preferably intramuscular injection of the DNA. The nucleic acid sequences are preferably inserted in a recombinant expression vector and may be in the form of naked DNA.

[0090] 4.3 Antisense

[0091] Another aspect of the invention pertains to isolated antisense nucleic acid molecules that are hybridizable to or complementary to the nucleic acid molecule comprising the nucleotide sequence of SEQ ID NO: 1-984, 1969-2952, 3937-3942 or 3949-3954, or fragments, analogs or derivatives thereof. An “antisense” nucleic acid comprises a nucleotide sequence that is complementary to a “sense” nucleic acid encoding a protein, e.g., complementary to the coding strand of a double-stranded cDNA molecule or complementary to an mRNA sequence. In specific aspects, antisense nucleic acid molecules are provided that comprise a sequence complementary to at least about 10, 25, 50, 100, 250 or 500 nucleotides or an entire coding strand, or to only a portion thereof. Nucleic acid molecules encoding fragments, homologs, derivatives and analogs of a protein of any of SEQ ID NO: 985-1968, 2953-3936, 3943-3948 or 3955-3960 or antisense nucleic acids complementary to a nucleic acid sequence of SEQ ID NO: 1-984, 1969-2952, 3937-3942 or 3949-3954 are additionally provided.

[0092] In one embodiment, an antisense nucleic acid molecule is antisense to a “coding region” of the coding strand of a nucleotide sequence of the invention. The term “coding region” refers to the region of the nucleotide sequence comprising codons which are translated into amino acid residues. In another embodiment, the antisense nucleic acid molecule is antisense to a “noncoding region” of the coding strand of a nucleotide sequence of the invention. The term “noncoding region” refers to 5′ and 3′ sequences which flank the coding region that are not translated into amino acids (i.e., also referred to as 5′ and 3′ untranslated regions).

[0093] Given the coding strand sequences encoding a nucleic acid disclosed herein (e.g., SEQ ID NO: 1-984, 1969-2952, 3937-3942 or 3949-3954), antisense nucleic acids of the invention can be designed according to the rules of Watson and Crick or Hoogsteen base pairing. The antisense nucleic acid molecule can be complementary to the entire coding region of a mRNA, but more preferably is an oligonucleotide that is antisense to only a portion of the coding or noncoding region of a mRNA. For example, the antisense oligonucleotide can be complementary to the region surrounding the translation start site of a mRNA. An antisense oligonucleotide can be, for example, about 5, 10, 15, 20, 25, 30, 35, 40, 45 or 50 nucleotides in length. An antisense nucleic acid of the invention can be constructed using chemical synthesis or enzymatic ligation reactions using procedures known in the art. For example, an antisense nucleic acid (e.g., an antisense oligonucleotide) can be chemically synthesized using naturally occurring nucleotides or variously modified nucleotides designed to increase the biological stability of the molecules or to increase the physical stability of the duplex formed between the antisense and sense nucleic acids, e.g., phosphorothioate derivatives and acridine substituted nucleotides can be used.

[0094] Examples of modified nucleotides that can be used to generate the antisense nucleic acid include: 5-fluorouracil, 5-bromouracil, 5-chlorouracil, 5-iodouracil, hypoxanthine, xanthine, 4-acetylcytosine, 5-(carboxyhydroxylmethyl)uracil, 5-carboxymethylaminomethyl-2-thiouridine, 5-carboxymethylaminomethyluracil, dihydrouracil, beta-D-galactosylqueosine, inosine, N6-isopentenyladenine, 1-methylguanine, 1-methylinosine, 2,2-dimethylguanine, 2-methyladenine, 2-methylguanine, 3-methylcytosine, 5-methylcytosine, N6-adenine, 7-methylguanine, 5-methylaminomethyluracil, 5-methoxyaminomethyl-2-thiouracil, beta-D-mannosylqueosine, 5′-methoxycarboxymethyluracil, 5-methoxyuracil, 2-methylthio-N6-isopentenyladenine, uracil-5-oxyacetic acid (v), wybutoxosine, pseudouracil, queosine, 2-thiocytosine, 5-methyl-2-thiouracil, 2-thiouracil, 4-thiouracil, 5-methyluracil, uracil-5-oxyacetic acid methylester, uracil-5-oxyacetic acid (v), 5-methyl-2-thiouracil, 3-(3-amino-3-N-2-carboxypropyl) uracil, (acp3)w, and 2,6-diaminopurine. Alternatively, the antisense nucleic acid can be produced biologically using an expression vector into which a nucleic acid has been subcloned in an antisense orientation (i.e., RNA transcribed from the inserted nucleic acid will be of an antisense orientation to a target nucleic acid of interest, described further in the following subsection).

[0095] The antisense nucleic acid molecules of the invention are typically administered to a subject or generated in situ such that they hybridize with or bind to cellular mRNA and/or genomic DNA encoding a protein according to the invention to thereby inhibit expression of the protein, e.g., by inhibiting transcription and/or translation. The hybridization can be by conventional nucleotide complementarity to form a stable duplex, or, for example, in the case of an antisense nucleic acid molecule that binds to DNA duplexes, through specific interactions in the major groove of the double helix. An example of a route of administration of antisense nucleic acid molecules of the invention includes direct injection at a tissue site. Alternatively, antisense nucleic acid molecules can be modified to target selected cells and then administered systemically. For example, for systemic administration, antisense molecules can be modified such that they specifically bind to receptors or antigens expressed on a selected cell surface, e.g., by linking the antisense nucleic acid molecules to peptides or antibodies that bind to cell surface receptors or antigens. The antisense nucleic acid molecules can also be delivered to cells using the vectors described herein. To achieve sufficient intracellular concentrations of antisense molecules, vector constructs in which the antisense nucleic acid molecule is placed under the control of a strong pol II or pol III promoter are preferred.

[0096] In yet another embodiment, the antisense nucleic acid molecule of the invention is an α-anomeric nucleic acid molecule. An α-anomeric nucleic acid molecule forms specific double-stranded hybrids with complementary RNA in which, contrary to the usual β-units, the strands run parallel to each other (Gaultier et al. (1987) Nucleic Acids Res 15: 6625-6641). The antisense nucleic acid molecule can also comprise a 2′-o-methylribonucleotide (Inoue et al. (1987) Nucleic Acids Res 15: 6131-6148) or a chimeric RNA-DNA analogue (Inoue et al. (1987) FEBS Lett 215: 327-330).

[0097] 4.4 Ribozymes and PNA Moieties

[0098] In still another embodiment, an antisense nucleic acid of the invention is a ribozyme. Ribozymes are catalytic RNA molecules with ribonuclease activity that are capable of cleaving a single-stranded nucleic acid, such as a mRNA, to which they have a complementary region. Thus, ribozymes (e.g., hammerhead ribozymes (described in Haselhoff and Gerlach (1988) Nature 334:585-591)) can be used to catalytically cleave a mRNA transcripts to thereby inhibit translation of a mRNA. A ribozyme having specificity for a nucleic acid of the invention can be designed based upon the nucleotide sequence of a DNA disclosed herein (i.e., SEQ ID NO: 1-984, 1969-2952, 3937-3942 or 3949-3954). For example, a derivative of a Tetrahymena L-19 IVS RNA can be constructed in which the nucleotide sequence of the active site is complementary to the nucleotide sequence to be cleaved in a SECX-encoding mRNA. See, e.g., Cech et al. U.S. Pat. No. 4,987,071; and Cech et al. U.S. Pat. No. 5,116,742. Alternatively, SECX mRNA can be used to select a catalytic RNA having a specific ribonuclease activity from a pool of RNA molecules. See, e.g., Bartel et al., (1993) Science 261:1411-1418.

[0099] Alternatively, gene expression can be inhibited by targeting nucleotide sequences complementary to the regulatory region (e.g., promoter and/or enhancers) to form triple helical structures that prevent transcription of the gene in target cells. See generally, Helene. (1991) Anticancer Drug Des. 6: 569-84; Helene. et al. (1992) Ann. N.Y. Acad. Sci. 660:27-36; and Maher (1992) Bioassays 14: 807-15.

[0100] In various embodiments, the nucleic acids of the invention can be modified at the base moiety, sugar moiety or phosphate backbone to improve, e.g., the stability, hybridization, or solubility of the molecule. For example, the deoxyribose phosphate backbone of the nucleic acids can be modified to generate peptide nucleic acids (see Hyrup et al. (1996) Bioorg Med Chem 4: 5-23). As used herein, the terms “peptide nucleic acids” or “PNAs” refer to nucleic acid mimics, e.g., DNA mimics, in which the deoxyribose phosphate backbone is replaced by a pseudopeptide backbone and only the four natural nucleobases are retained. The neutral backbone of PNAs has been shown to allow for specific hybridization to DNA and RNA under conditions of low ionic strength. The synthesis of PNA oligomers can be performed using standard solid phase peptide synthesis protocols as described in Hyrup et al. (1996) above; Perry-O'Keefe et al. (1996) PNAS 93: 14670-675.

[0101] PNAs of the invention can be used in therapeutic and diagnostic applications. For example, PNAs can be used as antisense or antigene agents for sequence-specific modulation of gene expression by, e.g., inducing transcription or translation arrest or inhibiting replication. PNAs of the invention can also be used, e.g., in the analysis of single base pair mutations in a gene by, e.g., PNA directed PCR clamping; as artificial restriction enzymes when used in combination with other enzymes, e.g., S1 nucleases (Hyrup B. (1996) above); or as probes or primers for DNA sequence and hybridization (Hyrup et al. (1996), above; Perry-O'Keefe (1996), above).

[0102] In another embodiment, PNAs of the invention can be modified, e.g., to enhance their stability or cellular uptake, by attaching lipophilic or other helper groups to PNA, by the formation of PNA-DNA chimeras, or by the use of liposomes or other techniques of drug delivery known in the art. For example, PNA-DNA chimeras can be generated that may combine the advantageous properties of PNA and DNA. Such chimeras allow DNA recognition enzymes, e.g., RNase H and DNA polymerases, to interact with the DNA portion while the PNA portion would provide high binding affinity and specificity. PNA-DNA chimeras can be linked using linkers of appropriate lengths selected in terms of base stacking, number of bonds between the nucleobases, and orientation (Hyrup (1996) above). The synthesis of PNA-DNA chimeras can be performed as described in Hyrup (1996) above and Finn et al. (1996) Nucl Acids Res 24: 3357-63. For example, a DNA chain can be synthesized on a solid support using standard phosphoramidite coupling chemistry, and modified nucleoside analogs, e.g., 5′-(4-methoxytrityl)amino-5′-deoxy-thymidine phosphoramidite, can be used between the PNA and the 5′ end of DNA (Mag et al. (1989) Nucl Acid Res 17: 5973-88). PNA monomers are then coupled in a stepwise manner to produce a chimeric molecule with a 5′ PNA segment and a 3′ DNA segment (Finn et al. (1996) above). Alternatively, chimeric molecules can be synthesized with a 5′ DNA segment and a 3′ PNA segment. See, Petersen et al. (1975) Bioorg Med Chem Lett 5: 1119-11124.

[0103] In other embodiments, the oligonucleotide may include other appended groups such as peptides (e.g., for targeting host cell receptors in vivo), or agents facilitating transport across the cell membrane (see, e.g., Letsinger et al., 1989, Proc. Natl. Acad. Sci. U.S.A. 86:6553-6556; Lemaitre et al., 1987, Proc. Natl. Acad. Sci. 84:648-652; PCT Publication No. W088/09810) or the blood-brain barrier (see, e.g., PCT Publication No. W089/10134). In addition, oligonucleotides can be modified with hybridization triggered cleavage agents (See, e.g., Krol et al., 1988, BioTechniques 6:958-976) or intercalating agents. (See, e.g., Zon, 1988, Pharm. Res. 5: 539-549). To this end, the oligonucleotide may be conjugated to another molecule, e.g., a peptide, a hybridization triggered cross-linking agent, a transport agent, a hybridization-triggered cleavage agent, etc.

[0104] 4.5 Hosts

[0105] The present invention further provides host cells genetically engineered to contain the polynucleotides of the invention. For example, such host cells may contain nucleic acids of the invention introduced into the host cell using known transformation, transfection or infection methods. The present invention still further provides host cells genetically engineered to express the polynucleotides of the invention, wherein such polynucleotides are in operative association with a regulatory sequence heterologous to the host cell which drives expression of the polynucleotides in the cell.

[0106] Knowledge of nucleic acid sequences allows for modification of cells to permit, or increase, expression of endogenous polypeptide. Cells can be modified (e.g., by homologous recombination) to provide increased polypeptide expression by replacing, in whole or in part, the naturally occurring promoter with all or part of a heterologous promoter so that the cells express the polypeptide at higher levels. The heterologous promoter is inserted in such a manner that it is operatively linked to the encoding sequences. See, for example, PCT International Publication No. WO94/12650, PCT International Publication No. WO92/20808, and PCT International Publication No. WO91/09955. It is also contemplated that, in addition to heterologous promoter DNA, amplifiable marker DNA (e.g., ada, dhfr, and the multifunctional CAD gene which encodes carbamyl phosphate synthase, aspartate transcarbamylase, and dihydroorotase) and/or intron DNA may be inserted along with the heterologous promoter DNA. If linked to the coding sequence, amplification of the marker DNA by standard selection methods results in co-amplification of the desired protein coding sequences in the cells.

[0107] The host cell can be a higher eukaryotic host cell, such as a mammalian cell, a lower eukaryotic host cell, such as a yeast cell, or the host cell can be a prokaryotic cell, such as a bacterial cell. Introduction of the recombinant construct into the host cell can be effected by calcium phosphate transfection, DEAE, dextran mediated transfection, or electroporation (Davis, L. et al., Basic Methods in Molecular Biology (1986)). The host cells containing one of the polynucleotides of the invention, can be used in conventional manners to produce the gene product encoded by the isolated fragment (in the case of an ORF) or can be used to produce a heterologous protein under the control of the EMF.

[0108] Any host/vector system can be used to express one or more of the ORFs of the present invention. These include, but are not limited to, eukaryotic hosts such as HeLa cells, Cv-1 cell, COS cells, 293 cells, and Sf9 cells, as well as prokaryotic host such as E. coli and B. subtilis. The most preferred cells are those which do not normally express the particular polypeptide or protein or which expresses the polypeptide or protein at low natural level. Mature proteins can be expressed in mammalian cells, yeast, bacteria, or other cells under the control of appropriate promoters. Cell-free translation systems can also be employed to produce such proteins using RNAs derived from the DNA constructs of the present invention. Appropriate cloning and expression vectors for use with prokaryotic and eukaryotic hosts are described by Sambrook, et al., in Molecular Cloning: A Laboratory Manual, Second Edition, Cold Spring Harbor, N.Y. (1989), the disclosure of which is hereby incorporated by reference.

[0109] Various mammalian cell culture systems can also be employed to express recombinant protein. Examples of mammalian expression systems include the COS-7 lines of monkey kidney fibroblasts, described by Gluzman, Cell 23:175 (1981). Other cell lines capable of expressing a compatible vector are, for example, the C127, monkey COS cells, Chinese Hamster Ovary (CHO) cells, human kidney 293 cells, human epidermal A431 cells, human Colo205 cells, 3T3 cells, CV-1 cells, other transformed primate cell lines, normal diploid cells, cell strains derived from in vitro culture of primary tissue, primary explants, HeLa cells, mouse L cells, BHK, HL-60, U937, HaK or Jurkat cells. Mammalian expression vectors will comprise an origin of replication, a suitable promoter and also any necessary ribosome binding sites, polyadenylation site, splice donor and acceptor sites, transcriptional termination sequences, and 5′ flanking nontranscribed sequences. DNA sequences derived from the SV40 viral genome, for example, SV40 origin, early promoter, enhancer, splice, and polyadenylation sites may be used to provide the required nontranscribed genetic elements. Recombinant polypeptides and proteins produced in bacterial culture are usually isolated by initial extraction from cell pellets, followed by one or more salting-out, aqueous ion exchange or size exclusion chromatography steps. Protein refolding steps can be used, as necessary, in completing configuration of the mature protein. Finally, high performance liquid chromatography (HPLC) can be employed for final purification steps. Microbial cells employed in expression of proteins can be disrupted by any convenient method, including freeze-thaw cycling, sonication, mechanical disruption, or use of cell lysing agents.

[0110] Alternatively, it may be possible to produce the protein in lower eukaryotes such as yeast or insects or in prokaryotes such as bacteria. Potentially suitable yeast strains include Saccharomyces cerevisiae, Schizosaccharomyces pombe, Kluyveromyces strains, Candida, or any yeast strain capable of expressing heterologous proteins. Potentially suitable bacterial strains include Escherichia coli, Bacillus subtilis, Salmonella typhimurium, or any bacterial strain capable of expressing heterologous proteins. If the protein is made in yeast or bacteria, it may be necessary to modify the protein produced therein, for example by phosphorylation or glycosylation of the appropriate sites, in order to obtain the functional protein. Such covalent attachments may be accomplished using known chemical or enzymatic methods.

[0111] In another embodiment of the present invention, cells and tissues may be engineered to express an endogenous gene comprising the polynucleotides of the invention under the control of inducible regulatory elements, in which case the regulatory sequences of the endogenous gene may be replaced by homologous recombination. As described herein, gene targeting can be used to replace a gene's existing regulatory region with a regulatory sequence isolated from a different gene or a novel regulatory sequence synthesized by genetic engineering methods. Such regulatory sequences may be comprised of promoters, enhancers, scaffold-attachment regions, negative regulatory elements, transcriptional initiation sites, regulatory protein binding sites or combinations of said sequences. Alternatively, sequences which affect the structure or stability of the RNA or protein produced may be replaced, removed, added, or otherwise modified by targeting. These sequence include polyadenylation signals, mRNA stability elements, splice sites, leader sequences for enhancing or modifying transport or secretion properties of the protein, or other sequences which alter or improve the function or stability of protein or RNA molecules.

[0112] The targeting event may be a simple insertion of the regulatory sequence, placing the gene under the control of the new regulatory sequence, e.g., inserting a new promoter or enhancer or both upstream of a gene. Alternatively, the targeting event may be a simple deletion of a regulatory element, such as the deletion of a tissue-specific negative regulatory element. Alternatively, the targeting event may replace an existing element; for example, a tissue-specific enhancer can be replaced by an enhancer that has broader or different cell-type specificity than the naturally occurring elements. Here, the naturally occurring sequences are deleted and new sequences are added. In all cases, the identification of the targeting event may be facilitated by the use of one or more selectable marker genes that are contiguous with the targeting DNA, allowing for the selection of cells in which the exogenous DNA has integrated into the host cell genome. The identification of the targeting event may also be facilitated by the use of one or more marker genes exhibiting the property of negative selection, such that the negatively selectable marker is linked to the exogenous DNA, but configured such that the negatively selectable marker flanks the targeting sequence, and such that a correct homologous recombination event with sequences in the host cell genome does not result in the stable integration of the negatively selectable marker. Markers useful for this purpose include the Herpes Simplex Virus thymidine kinase (TK) gene or the bacterial xanthine-guanine phosphoribosyl-transferase (gpt) gene.

[0113] The gene targeting or gene activation techniques which can be used in accordance with this aspect of the invention are more particularly described in U.S. Pat. No. 5,272,071 to Chappel; U.S. Pat. No. 5,578,461 to Sherwin et al.; International Application No. PCT/US92/09627 (WO93/09222) by Selden et al.; and International Application No. PCT/US90/06436 (WO91/06667) by Skoultchi et al., each of which is incorporated by reference herein in its entirety.

[0114] 4.6 Polypeptides of the Invention

[0115] The isolated polypeptides of the invention include, but are not limited to, a polypeptide comprising: the amino acid sequences set forth as any one of SEQ ID NO: 985-1968, 2953-3936, 3943-3948 or 3955-3960 or an amino acid sequence encoded by any one of the nucleotide sequences SEQ ID NO: 1-984, 1969-2952, 3937-3942 or 3949-3954 or the corresponding full length or mature protein. Polypeptides of the invention also include polypeptides preferably with biological or immunological activity that are encoded by: (a) a polynucleotide having any one of the nucleotide sequences set forth in SEQ ID NO: 1-984, 1969-2952, 3937-3942 or 3949-3954 or (b) polynucleotides encoding any one of the amino acid sequences set forth as SEQ ID NO: 985-1968, 2953-3936, 3943-3948 or 3955-3960 or (c) polynucleotides that hybridize to the complement of the polynucleotides of either (a) or (b) under stringent hybridization conditions. The invention also provides biologically active or immunologically active variants of any of the amino acid sequences set forth as SEQ ID NO: 985-1968, 2953-3936, 3943-3948 or 3955-3960 or the corresponding full length or mature protein; and “substantial equivalents” thereof (e.g., at least about 65%, at least about 70%, at least about 75%, at least about 80%, 81%, 82%, 83%, 84%, more typically at least about 85%, 86%, 87%, 88%, 89%, and more typically at least about 90%, 91%, 92%, 93%, 94%, and even more typically at least about 95%, 96%, 97%, 98%, 99%, sequence identity that retain biological activity. Polypeptides encoded by allelic variants may have a similar, increased, or decreased activity compared to polypeptides comprising SEQ ID NO: 985-1968, 2953-3936, 3943-3948 or 3955-3960.

[0116] Fragments of the proteins of the present invention which are capable of exhibiting biological activity are also encompassed by the present invention. Fragments of the protein may be in linear form or they may be cyclized using known methods, for example, as described in H. U. Saragovi, et al., Bio/Technology 10, 773-778 (1992) and in R. S. McDowell, et al., J. Amer. Chem. Soc. 114, 9245-9253 (1992), both of which are incorporated herein by reference. Such fragments may be fused to carrier molecules such as immunoglobulins for many purposes, including increasing the valency of protein binding sites.

[0117] The present invention also provides both full-length and mature forms (for example, without a signal sequence or precursor sequence) of the disclosed proteins. The protein coding sequence is identified in the sequence listing by translation of the disclosed nucleotide sequences. The mature form of such protein may be obtained by expression of a full-length polynucleotide in a suitable mammalian cell or other host cell. The sequence of the mature form of the protein is also determinable from the amino acid sequence of the full-length form. Where proteins of the present invention are membrane bound, soluble forms of the proteins are also provided. In such forms, part or all of the regions causing the proteins to be membrane bound are deleted so that the proteins are fully secreted from the cell in which they are expressed.

[0118] Protein compositions of the present invention may further comprise an acceptable carrier, such as a hydrophilic, e.g., pharmaceutically acceptable, carrier.

[0119] The present invention further provides isolated polypeptides encoded by the nucleic acid fragments of the present invention or by degenerate variants of the nucleic acid fragments of the present invention. By “degenerate variant” is intended nucleotide fragments which differ from a nucleic acid fragment of the present invention (e.g., an ORF) by nucleotide sequence but, due to the degeneracy of the genetic code, encode an identical polypeptide sequence. Preferred nucleic acid fragments of the present invention are the ORFs that encode proteins.

[0120] A variety of methodologies known in the art can be utilized to obtain any one of the isolated polypeptides or proteins of the present invention. At the simplest level, the amino acid sequence can be synthesized using commercially available peptide synthesizers. The synthetically-constructed protein sequences, by virtue of sharing primary, secondary or tertiary structural and/or conformational characteristics with proteins may possess biological properties in common therewith, including protein activity. This technique is particularly useful in producing small peptides and fragments of larger polypeptides. Fragments are useful, for example, in generating antibodies against the native polypeptide. Thus, they may be employed as biologically active or immunological substitutes for natural, purified proteins in screening of therapeutic compounds and in immunological processes for the development of antibodies.

[0121] The polypeptides and proteins of the present invention can alternatively be purified from cells which have been altered to express the desired polypeptide or protein. As used herein, a cell is said to be altered to express a desired polypeptide or protein when the cell, through genetic manipulation, is made to produce a polypeptide or protein which it normally does not produce or which the cell normally produces at a lower level. One skilled in the art can readily adapt procedures for introducing and expressing either recombinant or synthetic sequences into eukaryotic or prokaryotic cells in order to generate a cell which produces one of the polypeptides or proteins of the present invention.

[0122] The invention also relates to methods for producing a polypeptide comprising growing a culture of host cells of the invention in a suitable culture medium, and purifying the protein from the cells or the culture in which the cells are grown. For example, the methods of the invention include a process for producing a polypeptide in which a host cell containing a suitable expression vector that includes a polynucleotide of the invention is cultured under conditions that allow expression of the encoded polypeptide. The polypeptide can be recovered from the culture, conveniently from the culture medium, or from a lysate prepared from the host cells and further purified. Preferred embodiments include those in which the protein produced by such process is a full length or mature form of the protein.

[0123] In an alternative method, the polypeptide or protein is purified from bacterial cells which naturally produce the polypeptide or protein. One skilled in the art can readily follow known methods for isolating polypeptides and proteins in order to obtain one of the isolated polypeptides or proteins of the present invention. These include, but are not limited to, immunochromatography, HPLC, size-exclusion chromatography, ion-exchange chromatography, and immuno-affinity chromatography. See, e.g., Scopes, Protein Purification: Principles and Practice, Springer-Verlag (1994); Sambrook, et al., in Molecular Cloning: A Laboratory Manual; Ausubel et al., Current Protocols in Molecular Biology. Polypeptide fragments that retain biological/immunological activity include fragments comprising greater than about 100 amino acids, or greater than about 200 amino acids, and fragments that encode specific protein domains.

[0124] The purified polypeptides can be used in in vitro binding assays which are well known in the art to identify molecules which bind to the polypeptides. These molecules include but are not limited to, for e.g., small molecules, molecules from combinatorial libraries, antibodies or other proteins. The molecules identified in the binding assay are then tested for antagonist or agonist activity in in viva tissue culture or animal models that are well known in the art. In brief, the molecules are titrated into a plurality of cell cultures or animals and then tested for either cell/animal death or prolonged survival of the animal/cells.

[0125] In addition, the peptides of the invention or molecules capable of binding to the peptides may be complexed with toxins, e.g., ricin or cholera, or with other compounds that are toxic to cells. The toxin-binding molecule complex is then targeted to a tumor or other cell by the specificity of the binding molecule for SEQ ID NO: 985-1968, 2953-3936, 3943-3948 or 3955-3960.

[0126] The protein of the invention may also be expressed as a product of transgenic animals, e.g., as a component of the milk of transgenic cows, goats, pigs, or sheep which are characterized by somatic or germ cells containing a nucleotide sequence encoding the protein.

[0127] The proteins provided herein also include proteins characterized by amino acid sequences similar to those of purified proteins but into which modification are naturally provided or deliberately engineered. For example, modifications, in the peptide or DNA sequence, can be made by those skilled in the art using known techniques. Modifications of interest in the protein sequences may include the alteration, substitution, replacement, insertion or deletion of a selected amino acid residue in the coding sequence. For example, one or more of the cysteine residues may be deleted or replaced with another amino acid to alter the conformation of the molecule. Techniques for such alteration, substitution, replacement, insertion or deletion are well known to those skilled in the art (see, e.g., U.S. Pat. No. 4,518,584). Preferably, such alteration, substitution, replacement, insertion or deletion retains the desired activity of the protein. Regions of the protein that are important for the protein function can be determined by various methods known in the art including the alanine-scanning method which involved systematic substitution of single or strings of amino acids with alanine, followed by testing the resulting alanine-containing variant for biological activity. This type of analysis determines the importance of the substituted amino acid(s) in biological activity. Regions of the protein that are important for protein function may be determined by the eMATRIX program.

[0128] Other fragments and derivatives of the sequences of proteins which would be expected to retain protein activity in whole or in part and are useful for screening or other immunological methodologies may also be easily made by those skilled in the art given the disclosures herein. Such modifications are encompassed by the present invention.

[0129] The protein may also be produced by operably linking the isolated polynucleotide of the invention to suitable control sequences in one or more insect expression vectors, and employing an insect expression system. Materials and methods for baculovirus/insect cell expression systems are commercially available in kit form from, e.g., Invitrogen, San Diego, Calif., U.S.A. (the MaxBat™ kit), and such methods are well known in the art, as described in Summers and Smith, Texas Agricultural Experiment Station Bulletin No. 1555 (1987), incorporated herein by reference. As used herein, an insect cell capable of expressing a polynucleotide of the present invention is “transformed.”

[0130] The protein of the invention may be prepared by culturing transformed host cells under culture conditions suitable to express the recombinant protein. The resulting expressed protein may then be purified from such culture (i.e., from culture medium or cell extracts) using known purification processes, such as gel filtration and ion exchange chromatography. The purification of the protein may also include an affinity column containing agents which will bind to the protein; one or more column steps over such affinity resins as concanavalin A-agarose, heparin-toyopearl™ or Cibacrom blue 3GA Sepharose™; one or more steps involving hydrophobic interaction chromatography using such resins as phenyl ether, butyl ether, or propyl ether; or immunoaffinity chromatography.

[0131] Alternatively, the protein of the invention may also be expressed in a form which will facilitate purification. For example, it may be expressed as a fusion protein, such as those of maltose binding protein (MBP), glutathione-5-transferase (GST) or thioredoxin (TRX), or as a His tag. Kits for expression and purification of such fusion proteins are commercially available from New England BioLab (Beverly, Mass.), Pharmacia (Piscataway, N.J.) and Invitrogen, respectively. The protein can also be tagged with an epitope and subsequently purified by using a specific antibody directed to such epitope. One such epitope (“FLAG® ”) is commercially available from Kodak (New Haven, Conn.).

[0132] Finally, one or more reverse-phase high performance liquid chromatography (RP-HPLC) steps employing hydrophobic RP-HPLC media, e.g., silica gel having pendant methyl or other aliphatic groups, can be employed to further purify the protein. Some or all of the foregoing purification steps, in various combinations, can also be employed to provide a substantially homogeneous isolated recombinant protein. The protein thus purified is substantially free of other mammalian proteins and is defined in accordance with the present invention as an “isolated protein.”

[0133] The polypeptides of the invention include analogs (variants). This embraces fragments, as well as peptides in which one or more amino acids has been deleted, inserted, or substituted. Also, analogs of the polypeptides of the invention embrace fusions of the polypeptides or modifications of the polypeptides of the invention, wherein the polypeptide or analog is fused to another moiety or moieties, e.g., targeting moiety or another therapeutic agent. Such analogs may exhibit improved properties such as activity and/or stability. Examples of moieties which may be fused to the polypeptide or an analog include, for example, targeting moieties which provide for the delivery of polypeptide to pancreatic cells, e.g., antibodies to pancreatic cells, antibodies to immune cells such as T-cells, monocytes, dendritic cells, granulocytes, etc., as well as receptor and ligands expressed on pancreatic or immune cells. Other moieties which may be fused to the polypeptide include therapeutic agents which are used for treatment, for example, immunosuppressive drugs such as cyclosporin, SK506, azathioprine, CD3 antibodies and steroids. Also, polypeptides may be fused to immune modulators, and other cytokines such as alpha or beta interferon.

[0134] 4.6.1 Determining Polypeptide and Polynucleotide Identity and Similarity

[0135] Preferred identity and/or similarity are designed to give the largest match between the sequences tested. Methods to determine identity and similarity are codified in computer programs including, but are not limited to, the GCG program package, including GAP (Devereux, J., et al., Nucleic Acids Research 12(1):387 (1984); Genetics Computer Group, University of Wisconsin, Madison, Wis.), BLASTP, BLASTN, BLASTX, FASTA (Altschul, S. F. et al., J. Molec. Biol. 215:403-410 (1990), PSI-BLAST (Altschul S. F. et al., Nucleic Acids Res. vol. 25, pp. 3389-3402, herein incorporated by reference), eMatrix software (Wu et al., J. Comp. Biol., Vol. 6, pp. 219-235 (1999), herein incorporated by reference), eMotif software (Nevill-Manning et al, ISMB-97, Vol. 4, pp. 202-209, herein incorporated by reference), pFam software (Sonnhammer et al., Nucleic Acids Res., Vol. 26(1), pp. 320-322 (1998), herein incorporated by reference) and the Kyte-Doolittle hydrophobocity prediction algorithm (J. Mol. Biol, 157, pp. 105-31 (1982), incorporated herein by reference). The BLAST programs are publicly available from the National Center for Biotechnology Information (NCBI) and other sources (BLAST Manual, Altschul, S., et al. NCB NLM NIH Bethesda, Md. 20894; Altschul, S., et al., J. Mol. Biol. 215:403-410 (1990).

[0136] 4.7 Chimeric and Fusion Proteins

[0137] The invention also provides chimeric or fusion proteins. As used herein, a “chimeric protein” or “fusion protein” comprises a polypeptide of the invention operatively linked to another polypeptide. Within a fusion protein the polypeptide according to the invention can correspond to all or a portion of a protein according to the invention. In one embodiment, a fusion protein comprises at least one biologically active portion of a protein according to the invention. In another embodiment, a fusion protein comprises at least two biologically active portions of a protein according to the invention. Within the fusion protein, the term “operatively linked” is intended to indicate that the polypeptide according to the invention and the other polypeptide are fused in-frame to each other. The polypeptide can be fused to the N-terminus or C-terminus.

[0138] For example, in one embodiment a fusion protein comprises a polypeptide according to the invention operably linked to the extracellular domain of a second protein. In another embodiment, the fusion protein is a GST-fusion protein in which the polypeptide sequences of the invention are fused to the C-terminus of the GST (i.e., glutathione S-transferase) sequences.

[0139] In another embodiment, the fusion protein is an immunoglobulin fusion protein in which the polypeptide sequences according to the invention comprise one or more domains fused to sequences derived from a member of the immunoglobulin protein family. The immunoglobulin fusion proteins of the invention can be incorporated into pharmaceutical compositions and administered to a subject to inhibit an interaction between a ligand and a protein of the invention on the surface of a cell, to thereby suppress signal transduction in vivo. The immunoglobulin fusion proteins can be used to affect the bioavailability of a cognate ligand. Inhibition of the ligand/protein interaction may be useful therapeutically for both the treatment of proliferative and differentiative disorders, e,g., cancer as well as modulating (e.g., promoting or inhibiting) cell survival. Moreover, the immunoglobulin fusion proteins of the invention can be used as immunogens to produce antibodies in a subject, to purify ligands, and in screening assays to identify molecules that inhibit the interaction of a polypeptide of the invention with a ligand.

[0140] A chimeric or fusion protein of the invention can be produced by standard recombinant DNA techniques. For example, DNA fragments coding for the different polypeptide sequences are ligated together in-frame in accordance with conventional techniques, e.g., by employing blunt-ended or stagger-ended termini for ligation, restriction enzyme digestion to provide for appropriate termini, filling-in of cohesive ends as appropriate, alkaline phosphatase treatment to avoid undesirable joining, and enzymatic ligation. In another embodiment, the fusion gene can be synthesized by conventional techniques including automated DNA synthesizers. Alternatively, PCR amplification of gene fragments can be carried out using anchor primers that give rise to complementary overhangs between two consecutive gene fragments that can subsequently be annealed and reamplified to generate a chimeric gene sequence (see, for example, Ausubel et al. (eds.) CURRENT PROTOCOLS IN MOLECULAR BIOLOGY, John Wiley & Sons, 1992). Moreover, many expression vectors are commercially available that already encode a fusion moiety (e.g., a GST polypeptide). A nucleic acid encoding a polypeptide of the invention can be cloned into such an expression vector such that the fusion moiety is linked in-frame to the protein of the invention.

[0141] 4.8 Gene Therapy

[0142] Mutations in the polynucleotides of the invention gene may result in loss of normal function of the encoded protein. The invention thus provides gene therapy to restore normal activity of the polypeptides of the invention; or to treat disease states involving polypeptides of the invention. Delivery of a functional gene encoding polypeptides of the invention to appropriate cells is effected ex vivo, in situ, or in vivo by use of vectors, and more particularly viral vectors (e.g., adenovirus, adeno-associated virus, or a retrovirus), or ex vivo by use of physical DNA transfer methods (e.g., liposomes or chemical treatments). See, for example, Anderson, Nature, supplement to vol. 392, no. 6679, pp. 25-20 (1998). For additional reviews of gene therapy technology see Friedmann, Science, 244: 1275-1281 (1989); Verma, Scientific American: 68-84 (1990); and Miller, Nature, 357: 455-460 (1992). Introduction of any one of the nucleotides of the present invention or a gene encoding the polypeptides of the present invention can also be accomplished with extrachromosomal substrates (transient expression) or artificial chromosomes (stable expression). Cells may also be cultured ex vivo in the presence of proteins of the present invention in order to proliferate or to produce a desired effect on or activity in such cells. Treated cells can then be introduced in vivo for therapeutic purposes. Alternatively, it is contemplated that in other human disease states, preventing the expression of or inhibiting the activity of polypeptides of the invention will be useful in treating the disease states. It is contemplated that antisense therapy or gene therapy could be applied to negatively regulate the expression of polypeptides of the invention.

[0143] Other methods inhibiting expression of a protein include the introduction of antisense molecules to the nucleic acids of the present invention, their complements, or their translated RNA sequences, by methods known in the art. Further, the polypeptides of the present invention can be inhibited by using targeted deletion methods, or the insertion of a negative regulatory element such as a silencer, which is tissue specific.

[0144] The present invention still further provides cells genetically engineered in vivo to express the polynucleotides of the invention, wherein such polynucleotides are in operative association with a regulatory sequence heterologous to the host cell which drives expression of the polynucleotides in the cell. These methods can be used to increase or decrease the expression of the polynucleotides of the present invention.

[0145] Knowledge of DNA sequences provided by the invention allows for modification of cells to permit, increase, or decrease, expression of endogenous polypeptide. Cells can be modified (e.g., by homologous recombination) to provide increased polypeptide expression by replacing, in whole or in part, the naturally occurring promoter with all or part of a heterologous promoter so that the cells express the protein at higher levels. The heterologous promoter is inserted in such a manner that it is operatively linked to the desired protein encoding sequences. See, for example, PCT International Publication No. WO 94/12650, PCT International Publication No. WO 92/20808, and PCT International Publication No. WO 91/09955. It is also contemplated that, in addition to heterologous promoter DNA, amplifiable marker DNA (e.g., ada, dhfr, and the multifunctional CAD gene which encodes carbamyl phosphate synthase, aspartate transcarbamylase, and dihydroorotase) and/or intron DNA may be inserted along with the heterologous promoter DNA. If linked to the desired protein coding sequence, amplification of the marker DNA by standard selection methods results in co-amplification of the desired protein coding sequences in the cells.

[0146] In another embodiment of the present invention, cells and tissues may be engineered to express an endogenous gene comprising the polynucleotides of the invention under the control of inducible regulatory elements, in which case the regulatory sequences of the endogenous gene may be replaced by homologous recombination. As described herein, gene targeting can be used to replace a gene's existing regulatory region with a regulatory sequence isolated from a different gene or a novel regulatory sequence synthesized by genetic engineering methods. Such regulatory sequences may be comprised of promoters, enhancers, scaffold-attachment regions, negative regulatory elements, transcriptional initiation sites, regulatory protein binding sites or combinations of said sequences. Alternatively, sequences which affect the structure or stability of the RNA or protein produced may be replaced, removed, added, or otherwise modified by targeting. These sequences include polyadenylation signals, mRNA stability elements, splice sites, leader sequences for enhancing or modifying transport or secretion properties of the protein, or other sequences which alter or improve the function or stability of protein or RNA molecules.

[0147] The targeting event may be a simple insertion of the regulatory sequence, placing the gene under the control of the new regulatory sequence, e.g., inserting a new promoter or enhancer or both upstream of a gene. Alternatively, the targeting event may be a simple deletion of a regulatory element, such as the deletion of a tissue-specific negative regulatory element. Alternatively, the targeting event may replace an existing element; for example, a tissue-specific enhancer can be replaced by an enhancer that has broader or different cell-type specificity than the naturally occurring elements. Here, the naturally occurring sequences are deleted and new sequences are added. In all cases, the identification of the targeting event may be facilitated by the use of one or more selectable marker genes that are contiguous with the targeting DNA, allowing for the selection of cells in which the exogenous DNA has integrated into the cell genome. The identification of the targeting event may also be facilitated by the use of one or more marker genes exhibiting the property of negative selection, such that the negatively selectable marker is linked to the exogenous DNA, but configured such that the negatively selectable marker flanks the targeting sequence, and such that a correct homologous recombination event with sequences in the host cell genome does not result in the stable integration of the negatively selectable marker. Markers useful for this purpose include the Herpes Simplex Virus thymidine kinase (TK) gene or the bacterial xanthine-guanine phosphoribosyl-transferase (gpt) gene.

[0148] The gene targeting or gene activation techniques which can be used in accordance with this aspect of the invention are more particularly described in U.S. Pat. No. 5,272,071 to Chappel; U.S. Pat. No. 5,578,461 to Sherwin et al.; International Application No. PCT/US92/09627 (WO93/09222) by Selden et al.; and International Application No. PCT/US90/06436 (WO91/06667) by Skoultchi et al., each of which is incorporated by reference herein in its entirety.

[0149] 4.9 Transgenic Animals

[0150] In preferred methods to determine biological functions of the polypeptides of the invention in vivo, one or more genes provided by the invention are either over expressed or inactivated in the germ line of animals using homologous recombination [Capecchi, Science 244:1288-1292 (1989)]. Animals in which the gene is over expressed, under the regulatory control of exogenous or endogenous promoter elements, are known as transgenic animals. Animals in which an endogenous gene has been inactivated by homologous recombination are referred to as “knockout” animals. Knockout animals, preferably non-human mammals, can be prepared as described in U.S. Pat. No. 5,557,032, incorporated herein by reference. Transgenic animals are useful to determine the roles polypeptides of the invention play in biological processes, and preferably in disease states. Transgenic animals are useful as model systems to identify compounds that modulate lipid metabolism. Transgenic animals, preferably non-human mammals, are produced using methods as described in U.S. Pat. No. 5,489,743 and PCT Publication No. WO94/28122, incorporated herein by reference.

[0151] Transgenic animals can be prepared wherein all or part of a promoter of the polynucleotides of the invention is either activated or inactivated to alter the level of expression of the polypeptides of the invention. Inactivation can be carried out using homologous recombination methods described above. Activation can be achieved by supplementing or even replacing the homologous promoter to provide for increased protein expression. The homologous promoter can be supplemented by insertion of one or more heterologous enhancer elements known to confer promoter activation in a particular tissue.

[0152] The polynucleotides of the present invention also make possible the development, through, e.g., homologous recombination or knock out strategies, of animals that fail to express polypeptides of the invention or that express a variant polypeptide. Such animals are useful as models for studying the in vivo activities of polypeptide as well as for studying modulators of the polypeptides of the invention.

[0153] In preferred methods to determine biological functions of the polypeptides of the invention in vivo, one or more genes provided by the invention are either over expressed or inactivated in the germ line of animals using homologous recombination [Capecchi, Science 244:1288-1292 (1989)]. Animals in which the gene is over expressed, under the regulatory control of exogenous or endogenous promoter elements, are known as transgenic animals. Animals in which an endogenous gene has been inactivated by homologous recombination are referred to as “knockout” animals. Knockout animals, preferably non-human mammals, can be prepared as described in U.S. Pat. No. 5,557,032, incorporated herein by reference. Transgenic animals are useful to determine the roles polypeptides of the invention play in biological processes, and preferably in disease states. Transgenic animals are useful as model systems to identify compounds that modulate lipid metabolism. Transgenic animals, preferably non-human mammals, are produced using methods as described in U.S. Pat. No. 5,489,743 and PCT Publication No. WO94/28122, incorporated herein by reference.

[0154] Transgenic animals can be prepared wherein all or part of the polynucleotides of the invention promoter is either activated or inactivated to alter the level of expression of the polypeptides of the invention. Inactivation can be carried out using homologous recombination methods described above. Activation can be achieved by supplementing or even replacing the homologous promoter to provide for increased protein expression. The homologous promoter can be supplemented by insertion of one or more heterologous enhancer elements known to confer promoter activation in a particular tissue.

[0155] 4.10 Uses and Biological Activity

[0156] The polynucleotides and proteins of the present invention are expected to exhibit one or more of the uses or biological activities (including those associated with assays cited herein) identified herein. Uses or activities described for proteins of the present invention may be provided by administration or use of such proteins or of polynucleotides encoding such proteins (such as, for example, in gene therapies or vectors suitable for introduction of DNA). The mechanism underlying the particular condition or pathology will dictate whether the polypeptides of the invention, the polynucleotides of the invention or modulators (activators or inhibitors) thereof would be beneficial to the subject in need of treatment. Thus, “therapeutic compositions of the invention” include compositions comprising isolated polynucleotides (including recombinant DNA molecules, cloned genes and degenerate variants thereof) or polypeptides of the invention (including full length protein, mature protein and truncations or domains thereof), or compounds and other substances that modulate the overall activity of the target gene products, either at the level of target gene/protein expression or target protein activity. Such modulators include polypeptides, analogs, (variants), including fragments and fusion proteins, antibodies and other binding proteins; chemical compounds that directly or indirectly activate or inhibit the polypeptides of the invention (identified, e.g., via drug screening assays as described herein); antisense polynucleotides and polynucleotides suitable for triple helix formation; and in particular antibodies or other binding partners that specifically recognize one or more epitopes of the polypeptides of the invention.

[0157] The polypeptides of the present invention may likewise be involved in cellular activation or in one of the other physiological pathways described herein.

[0158] 4.10.1 Research Uses and Utilities

[0159] The polynucleotides provided by the present invention can be used by the research community for various purposes. The polynucleotides can be used to express recombinant protein for analysis, characterization or therapeutic use; as markers for tissues in which the corresponding protein is preferentially expressed (either constitutively or at a particular stage of tissue differentiation or development or in disease states); as molecular weight markers on gels; as chromosome markers or tags (when labeled) to identify chromosomes or to map related gene positions; to compare with endogenous DNA sequences in patients to identify potential genetic disorders; as probes to hybridize and thus discover novel, related DNA sequences; as a source of information to derive PCR primers for genetic fingerprinting; as a probe to “subtract-out” known sequences in the process of discovering other novel polynucleotides; for selecting and making oligomers for attachment to a “gene chip” or other support, including for examination of expression patterns; to raise anti-protein antibodies using DNA immunization techniques; and as an antigen to raise anti-DNA antibodies or elicit another immune response. Where the polynucleotide encodes a protein which binds or potentially binds to another protein (such as, for example, in a receptor-ligand interaction), the polynucleotide can also be used in interaction trap assays (such as, for example, that described in Gyuris et al., Cell 75:791-803 (1993)) to identify polynucleotides encoding the other protein with which binding occurs or to identify inhibitors of the binding interaction.

[0160] The polypeptides provided by the present invention can similarly be used in assays to determine biological activity, including in a panel of multiple proteins for high-throughput screening; to raise antibodies or to elicit another immune response; as a reagent (including the labeled reagent) in assays designed to quantitatively determine levels of the protein (or its receptor) in biological fluids; as markers for tissues in which the corresponding polypeptide is preferentially expressed (either constitutively or at a particular stage of tissue differentiation or development or in a disease state); and, of course, to isolate correlative receptors or ligands. Proteins involved in these binding interactions can also be used to screen for peptide or small molecule inhibitors or agonists of the binding interaction.

[0161] Any or all of these research utilities are capable of being developed into reagent grade or kit format for commercialization ag research products.

[0162] Methods for performing the uses listed above are well known to those skilled in the art. References disclosing such methods include without limitation “Molecular Cloning: A Laboratory Manual”, 2d ed., Cold Spring Harbor Laboratory Press, Sambrook, J., E. F. Fritsch and T. Maniatis eds., 1989, and “Methods in Enzymology: Guide to Molecular Cloning Techniques”, Academic Press, Berger, S. L. and A. R. Kimmel eds., 1987.

[0163] 4.10.2 Nutritional Uses

[0164] Polynucleotides and polypeptides of the present invention can also be used as nutritional sources or supplements. Such uses include without limitation use as a protein or amino acid supplement, use as a carbon source, use as a nitrogen source and use as a source of carbohydrate. In such cases the polypeptide or polynucleotide of the invention can be added to the feed of a particular organism or can be administered as a separate solid or liquid preparation, such as in the form of powder, pills, solutions, suspensions or capsules. In the case of microorganisms, the polypeptide or polynucleotide of the invention can be added to the medium in or on which the microorganism is cultured.

[0165] 4.10.3 Cytokine and Cell Proliferation/Differentiation Activity

[0166] A polypeptide of the present invention may exhibit activity relating to cytokine, cell proliferation (either inducing or inhibiting) or cell differentiation (either inducing or inhibiting) activity or may induce production of other cytokines in certain cell populations. A polynucleotide of the invention can encode a polypeptide exhibiting such attributes. Many protein factors discovered to date, including all known cytokines, have exhibited activity in one or more factor-dependent cell proliferation assays, and hence the assays serve as a convenient confirmation of cytokine activity. The activity of therapeutic compositions of the present invention is evidenced by any one of a number of routine factor dependent cell proliferation assays for cell lines including, without limitation, 32D, DA2, DA1G, T10, B9, B9/11, BaF3, MC9/G, M+(preB M+), 2E8, RB5, DA1, 123, T1165, HT2, CTLL2, TF-1, Mo7e, CMK, HUVEC, and Caco. Therapeutic compositions of the invention can be used in the following:

[0167] Assays for T-cell or thymocyte proliferation include without limitation those described in: Current Protocols in Immunology, Ed by J. E. Coligan, A. M. Kruisbeek, D. H. Margulies, E. M. Shevach, W. Strober, Pub. Greene Publishing Associates and Wiley-Interscience (Chapter 3, In Vitro assays for Mouse Lymphocyte Function 3.1-3.19; Chapter 7, Immunologic studies in Humans); Takai et al., J. Immunol. 137:3494-3500, 1986; Bertagnolli et al., J. Immunol. 145:1706-1712, 1990; Bertagnolli et al., Cellular Immunology 133:327-341, 1991; Bertagnolli, et al., I. Immunol. 149:3778-3783, 1992; Bowman et al., I. Immunol. 152:1756-1761, 1994.

[0168] Assays for cytokine production and/or proliferation of spleen cells, lymph node cells or thymocytes include, without limitation, those described in: Polyclonal T cell stimulation, Kruisbeek, A. M. and Shevach, E. M. In Current Protocols in Immunology. J. E. e.a. Coligan eds. Vol 1 pp. 3.12.1-3.12.14, John Wiley and Sons, Toronto. 1994; and Measurement of mouse and human interleukin-γ, Schreiber, R. D. In Current Protocols in Immunology. J. E. e.a. Coligan eds. Vol 1 pp. 6.8.1-6.8.8, John Wiley and Sons, Toronto. 1994.

[0169] Assays for proliferation and differentiation of hematopoietic and lymphopoietic cells include, without limitation, those described in: Measurement of Human and Murine Interleukin 2 and Interleukin 4, Bottomly, K., Davis, L. S. and Lipsky, P. E. In Current Protocols in Immunology. J. E. e.a. Coligan eds. Vol 1 pp. 6.3.1-6.3.12, John Wiley and Sons, Toronto. 1991; deVries et al., J. Exp. Med. 173:1205-1211, 1991; Moreau et al., Nature 336:690-692, 1988; Greenberger et al., Proc. Natl. Acad. Sci. U.S.A. 80:2931-2938, 1983; Measurement of mouse and human interleukin 6—Nordan, R. In Current Protocols in Immunology. J. E. Coligan eds. Vol 1 pp. 6.6.1-6.6.5, John Wiley and Sons, Toronto. 1991; Smith et al., Proc. Natl. Aced. Sci. U.S.A. 83:1857-1861, 1986; Measurement of human Interleukin 11—Bennett, F., Giannotti, J., Clark, S. C. and Turner, K. J. In Current Protocols in Immunology. J. E. Coligan eds. Vol 1 pp. 6.15.1 John Wiley and Sons, Toronto. 1991; Measurement of mouse and human Interleukin 9-Ciarletta, A., Giannotti, J., Clark, S. C. and Turner, K. J. In Current Protocols in Immunology. J. E. Coligan eds. Vol 1 pp. 6.13.1, John Wiley and Sons, Toronto. 1991.

[0170] Assays for T-cell clone responses to antigens (which will identify, among others, proteins that affect APC-T cell interactions as well as direct T-cell effects by measuring proliferation and cytokine production) include, without limitation, those described in: Current Protocols in Immunology, Ed by J. E. Coligan, A. M. Kruisbeek, D. H. Margulies, E. M. Shevach, W Strober, Pub. Greene Publishing Associates and Wiley-Interscience (Chapter 3, In Vitro assays for Mouse Lymphocyte Function, Chapter 6, Cytokines and their cellular receptors; Chapter 7, Immunologic studies in Humans); Weinberger et al. Proc. Natl. Acad. Sci. USA 77:6091-6095, 1980; Weinberger et al., Eur. J. Immun. 11:405-411, 1981; Takai et al., J. Immunol. 137:3494-3500, 1986; Takai et al., J. Immunol. 140:508-512, 1988.

[0171] 4.10.4 Stem Cell Growth Factor Activity

[0172] A polypeptide of the present invention may exhibit stem cell growth factor activity and be involved in the proliferation, differentiation and survival of pluripotent and totipotent stem cells including primordial germ cells, embryonic stem cells, hematopoietic stem cells and/or germ line stem cells. Administration of the polypeptide of the invention to stem cells in vivo or ex vivo is expected to maintain and expand cell populations in a totipotential or pluripotential state which would be useful for re-engineering damaged or diseased tissues, transplantation, manufacture of bio-pharmaceuticals and the development of bio-sensors. The ability to produce large quantities of human cells has important working applications for the production of human proteins which currently must be obtained from non-human sources or donors, implantation of cells to treat diseases such as Parkinson's, Alzheimer's and other neurodegenerative diseases; tissues for grafting such as bone marrow, skin, cartilage, tendons, bone, muscle (including cardiac muscle), blood vessels, cornea, neural cells, gastrointestinal cells and others; and organs for transplantation such as kidney, liver, pancreas (including islet cells), heart and lung.

[0173] It is contemplated that multiple different exogenous growth factors and/or cytokines may be administered in combination with the polypeptide of the invention to achieve the desired effect, including any of the growth factors listed herein, other stem cell maintenance factors, and specifically including stem cell factor (SCF), leukemia inhibitory factor (LIF), Flt-3 ligand (Flt-3L), any of the interleukins, recombinant soluble IL-6 receptor fused to IL-6, macrophage inflammatory protein 1-alpha (MIP-1-alpha), G-CSF, GM-CSF, thrombopoietin (TPO), platelet factor 4 (PF4), platelet-derived growth factor (PDGF), neural growth factors and basic fibroblast growth factor (bFGF).

[0174] Since totipotent stem cells can give rise to virtually any mature cell type, expansion of these cells in culture will facilitate the production of large quantities of mature cells. Techniques for culturing stem cells are known in the art and administration of polypeptides of the invention, optionally with other growth factors and/or cytokines, is expected to enhance the survival and proliferation of the stem cell populations. This can be accomplished by direct administration of the polypeptide of the invention to the culture medium. Alternatively, stroma cells transfected with a polynucleotide that encodes for the polypeptide of the invention can be used as a feeder layer for the stem cell populations in culture or in vivo. Stromal support cells for feeder layers may include embryonic bone marrow fibroblasts, bone marrow stromal cells, fetal liver cells, or cultured embryonic fibroblasts (see U.S. Pat. No. 5,690,926).

[0175] Stem cells themselves can be transfected with a polynucleotide of the invention to induce autocrine expression of the polypeptide of the invention. This will allow for generation of undifferentiated totipotential/pluripotential stem cell lines that are useful as is or that can then be differentiated into the desired mature cell types. These stable cell lines can also serve as a source of undifferentiated totipotential/pluripotential mRNA to create cDNA libraries and templates for polymerase chain reaction experiments. These studies would allow for the isolation and identification of differentially expressed genes in stem cell populations that regulate stem cell proliferation and/or maintenance.

[0176] Expansion and maintenance of totipotent stem cell populations will be useful in the treatment of many pathological conditions. For example, polypeptides of the present invention may be used to manipulate stem cells in culture to give rise to neuroepithelial cells that can be used to augment or replace cells damaged by illness, autoimmune disease, accidental damage or genetic disorders. The polypeptide of the invention may be useful for inducing the proliferation of neural cells and for the regeneration of nerve and brain tissue, i.e. for the treatment of central and peripheral nervous system diseases and neuropathies, as well as mechanical and traumatic disorders which involve degeneration, death or trauma to neural cells or nerve tissue. In addition, the expanded stem cell populations can also be genetically altered for gene therapy purposes and to decrease host rejection of replacement tissues after grafting or implantation.

[0177] Expression of the polypeptide of the invention and its effect on stem cells can also be manipulated to achieve controlled differentiation of the stem cells into more differentiated cell types. A broadly applicable method of obtaining pure populations of a specific differentiated cell type from undifferentiated stem cell populations involves the use of a cell-type specific promoter driving a selectable marker. The selectable marker allows only cells of the desired type to survive. For example, stem cells can be induced to differentiate into cardiomyocytes (Wobus et al., Differentiation, 48: 173-182, (1991); Klug et al., J. Clin. Invest., 98(1): 216-224, (1998)) or skeletal muscle cells (Browder, L. W. In: Principles of Tissue Engineering eds. Lanza et al., Academic Press (1997)). Alternatively, directed differentiation of stem cells can be accomplished by culturing the stem cells in the presence of a differentiation factor such as retinoic acid and an antagonist of the polypeptide of the invention which would inhibit the effects of endogenous stem cell factor activity and allow differentiation to proceed.

[0178] In vitro cultures of stem cells can be used to determine if the polypeptide of the invention exhibits stem cell growth factor activity. Stem cells are isolated from any one of various cell sources (including hematopoietic stem cells and embryonic stem cells) and cultured on a feeder layer, as described by Thompson et al. Proc. Natl. Acad. Sci, U.S.A., 92: 7844-7848 (1995), in the presence of the polypeptide of the invention alone or in combination with other growth factors or cytokines. The ability of the polypeptide of the invention to induce stem cells proliferation is determined by colony formation on semi-solid support e.g. as described by Bernstein et al, Blood, 77: 2316-2321 (1991).

[0179] 4.10.5 Hematopoiesis Regulating Activity

[0180] A polypeptide of the present invention may be involved in regulation of hematopoiesis and, consequently, in the treatment of myeloid or lymphoid cell disorders. Even marginal biological activity in support of colony forming cells or of factor-dependent cell lines indicates involvement in regulating hematopoiesis, e.g. in supporting the growth and proliferation of erythroid progenitor cells alone or in combination with other cytokines, thereby indicating utility, for example, in treating various anemias or for use in conjunction with irradiation/chemotherapy to stimulate the production of erythroid precursors and/or erythroid cells; in supporting the growth and proliferation of myeloid cells such as granulocytes and monocytes/macrophages (i.e., traditional CSF activity) useful, for example, in conjunction with chemotherapy to prevent or treat consequent myelo-suppression; in supporting the growth and proliferation of megakaryocytes and consequently of platelets thereby allowing prevention or treatment of various platelet disorders such as thrombocytopenia, and generally for use in place of or complimentary to platelet transfusions; and/or in supporting the growth and proliferation of hematopoietic stem cells which are capable of maturing to any and all of the above-mentioned hematopoietic cells and therefore find therapeutic utility in various stem cell disorders (such as those usually treated with transplantation, including, without limitation, aplastic anemia and paroxysmal nocturnal hemoglobinuria), as well as in repopulating the stem cell compartment post irradiation/chemotherapy, either in-vivo or ex-vivo (i.e., in conjunction with bone marrow transplantation or with peripheral progenitor cell transplantation (homologous or heterologous)) as normal cells or genetically manipulated for gene therapy.

[0181] Therapeutic compositions of the invention can be used in the following:

[0182] Suitable assays for proliferation and differentiation of various hematopoietic lines are cited above.

[0183] Assays for embryonic stem cell differentiation (which will identify, among others, proteins that influence embryonic differentiation hematopoiesis) include, without limitation, those described in: Johansson et al. Cellular Biology 15:141-151, 1995; Keller et al., Molecular and Cellular Biology 13:473-486, 1993; McClanahan et al., Blood 81:2903-2915, 1993.

[0184] Assays for stem cell survival and differentiation (which will identify, among others, proteins that regulate lympho-hematopoiesis) include, without limitation, those described in: Methylcellulose colony forming assays, Freshney, M. G. In Culture of Hematopoietic Cells. R. I. Freshney, et al. eds. Vol pp. 265-268, Wiley-Liss, Inc., New York, N.Y. 1994; Hirayama et al., Proc. Natl. Acad. Sci. USA 89:5907-5911, 1992; Primitive hematopoietic colony forming cells with high proliferative potential, McNiece, I. K. and Briddell, R. A. In Culture of Hematopoietic Cells. R. I. Freshney, et al. eds. Vol pp. 23-39, Wiley-Liss, Inc., New York, N.Y. 1994; Neben et al., Experimental Hematology 22:353-359, 1994; Cobblestone area forming cell assay, Ploemacher, R. E. In Culture of Hematopoietic Cells. R. I. Freshney, et al. eds. Vol pp. 1-21, Wiley-Liss, Inc., New York, N.Y. 1994; Long term bone marrow cultures in the presence of stromal cells, Spooncer, E., Dexter, M. and Allen, T. In Culture of Hematopoietic Cells. R. I. Freshney, et al. eds. Vol pp. 163-179, Wiley-Liss, Inc., New York, N.Y. 1994; Long term culture initiating cell assay, Sutherland, H. J. In Culture of Hematopoietic Cells. R. I. Freshney, et al. eds. Vol pp. 139-162, Wiley-Liss, Inc., New York, N.Y. 1994.

[0185] 4.10.6 Tissue Growth Activity

[0186] A polypeptide of the present invention also may be involved in bone, cartilage, tendon, ligament and/or nerve tissue growth or regeneration, as well as in wound healing and tissue repair and replacement, and in healing of burns, incisions and ulcers.

[0187] A polypeptide of the present invention which induces cartilage and/or bone growth in circumstances where bone is not normally formed, has application in the healing of bone fractures and cartilage damage or defects in humans and other animals. Compositions of a polypeptide, antibody, binding partner, or other modulator of the invention may have prophylactic use in closed as well as open fracture reduction and also in the improved fixation of artificial joints. De novo bone formation induced by an osteogenic agent contributes to the repair of congenital, trauma induced, or oncologic resection induced craniofacial defects, and also is useful in cosmetic plastic surgery.

[0188] A polypeptide of this invention may also be involved in attracting bone-forming cells, stimulating growth of bone-forming cells, or inducing differentiation of progenitors of bone-forming cells. Treatment of osteoporosis, osteoarthritis, bone degenerative disorders, or periodontal disease, such as through stimulation of bone and/or cartilage repair or by blocking inflammation or processes of tissue destruction (collagenase activity, osteoclast activity, etc.) mediated by inflammatory processes may also be possible using the composition of the invention.

[0189] Another category of tissue regeneration activity that may involve the polypeptide of the present invention is tendon/ligament formation. Induction of tendon/ligament-like tissue or other tissue formation in circumstances where such tissue is not normally formed, has application in the healing of tendon or ligament tears, deformities and other tendon or ligament defects in humans and other animals. Such a preparation employing a tendon/ligament-like tissue inducing protein may have prophylactic use in preventing damage to tendon or ligament tissue, as well as use in the improved fixation of tendon or ligament to bone or other tissues, and in repairing defects to tendon or ligament tissue. De novo tendon/ligament-like tissue formation induced by a composition of the present invention contributes to the repair of congenital, trauma induced, or other tendon or ligament defects of other origin, and is also useful in cosmetic plastic surgery for attachment or repair of tendons or ligaments. The compositions of the present invention may provide environment to attract tendon- or ligament-forming cells, stimulate growth of tendon- or ligament-forming cells, induce differentiation of progenitors of tendon- or ligament-forming cells, or induce growth of tendon/ligament cells or progenitors ex vivo for return in vivo to effect tissue repair. The compositions of the invention may also be useful in the treatment of tendinitis, carpal tunnel syndrome and other tendon or ligament defects. The compositions may also include an appropriate matrix and/or sequestering agent as a carrier as is well known in the art.

[0190] The compositions of the present invention may also be useful for proliferation of neural cells and for regeneration of nerve and brain tissue, i.e. for the treatment of central and peripheral nervous system diseases and neuropathies, as well as mechanical and traumatic disorders, which involve degeneration, death or trauma to neural cells or nerve tissue. More specifically, a composition may be used in the treatment of diseases of the peripheral nervous system, such as peripheral nerve injuries, peripheral neuropathy and localized neuropathies, and central nervous system diseases, such as Alzheimer's, Parkinson's disease, Huntington's disease, amyotrophic lateral sclerosis, and Shy-Drager syndrome. Further conditions which may be treated in accordance with the present invention include mechanical and traumatic disorders, such as spinal cord disorders, head trauma and cerebrovascular diseases such as stroke. Peripheral neuropathies resulting from chemotherapy or other medical therapies may also be treatable using a composition of the invention.

[0191] Compositions of the invention may also be useful to promote better or faster closure of non-healing wounds, including without limitation pressure ulcers, ulcers associated with vascular insufficiency, surgical and traumatic wounds, and the like.

[0192] Compositions of the present invention may also be involved in the generation or regeneration of other tissues, such as organs (including, for example, pancreas, liver, intestine, kidney, skin, endothelium), muscle (smooth, skeletal or cardiac) and vascular (including vascular endothelium) tissue, or for promoting the growth of cells comprising such tissues. Part of the desired effects may be by inhibition or modulation of fibrotic scarring may allow normal tissue to regenerate. A polypeptide of the present invention may also exhibit angiogenic activity.

[0193] A composition of the present invention may also be useful for gut protection or regeneration and treatment of lung or liver fibrosis, reperfusion injury in various tissues, and conditions resulting from systemic cytokine damage.

[0194] A composition of the present invention may also be useful for promoting or inhibiting differentiation of tissues described above from precursor tissues or cells; or for inhibiting the growth of tissues described above.

[0195] Therapeutic compositions of the invention can be used in the following:

[0196] Assays for tissue generation activity include, without limitation, those described in: International Patent Publication No. WO95/16035 (bone, cartilage, tendon); International Patent Publication No. WO95/05846 (nerve, neuronal); International Patent Publication No. WO91/07491 (skin, endothelium).

[0197] Assays for wound healing activity include, without limitation, those described in: Winter, Epidermal Wound Healing, pps. 71-112 (Maibach, H. I. and Rovee, D. T., eds.), Year Book Medical Publishers, Inc., Chicago, as modified by Eaglstein and Mertz, J. Invest. Dermatol 71:382-84 (1978).

[0198] 4.10.7 Immune Stimulating or Suppressing Activity

[0199] A polypeptide of the present invention may also exhibit immune stimulating or immune suppressing activity, including without limitation the activities for which assays are described herein. A polynucleotide of the invention can encode a polypeptide exhibiting such activities. A protein may be useful in the treatment of various immune deficiencies and disorders (including severe combined immunodeficiency (SCID)), e.g., in regulating (up or down) growth and proliferation of T and/or B lymphocytes, as well as effecting the cytolytic activity of NK cells and other cell populations. These immune deficiencies may be genetic or be caused by viral (e.g., HIV) as well as bacterial or fungal infections, or may result from autoimmune disorders. More specifically, infectious diseases causes by viral, bacterial, fungal or other infection may be treatable using a protein of the present invention, including infections by HIV, hepatitis viruses, herpes viruses, mycobacteria, Leishmania spp., malaria spp. and various fungal infections such as candidiasis. Of course, in this regard, proteins of the present invention may also be useful where a boost to the immune system generally may be desirable, i.e., in the treatment of cancer.

[0200] Autoimmune disorders which may be treated using a protein of the present invention include, for example, connective tissue disease, multiple sclerosis, systemic lupus erythematosus, rheumatoid arthritis, autoimmune pulmonary inflammation, Guillain-Barre syndrome, autoimmune thyroiditis, insulin dependent diabetes mellitis, myasthenia gravis, graft-versus-host disease and autoimmune inflammatory eye disease. Such a protein (or antagonists thereof, including antibodies) of the present invention may also to be useful in the treatment of allergic reactions and conditions (e.g., anaphylaxis, serum sickness, drug reactions, food allergies, insect venom allergies, mastocytosis, allergic rhinitis, hypersensitivity pneumonitis, urticaria, angioedema, eczema, atopic dermatitis, allergic contact dermatitis, erythema multiforme, Stevens-Johnson syndrome, allergic conjunctivitis, atopic keratoconjunctivitis, venereal keratoconjunctivitis, giant papillary conjunctivitis and contact allergies); such as asthma (particularly allergic asthma) or other respiratory problems. Other conditions, in which immune suppression is desired (including, for example, organ transplantation), may also be treatable using a protein (or antagonists thereof) of the present invention. The therapeutic effects of the polypeptides or antagonists thereof on allergic reactions can be evaluated by in vivo animals models such as the cumulative contact enhancement test (Lastbom et al., Toxicology 125: 59-66, 1998), skin prick test (Hoffmann et al., Allergy 54: 446-54, 1999), guinea pig skin sensitization test (Vohr et al., Arch. Toxocol. 73: 501-9), and murine local lymph node assay (Kimber et al., J. Toxicol. Environ. Health 53: 563-79).

[0201] Using the proteins of the invention it may also be possible to modulate immune responses, in a number of ways. Down regulation may be in the form of inhibiting or blocking an immune response already in progress or may involve preventing the induction of an immune response. The functions of activated T cells may be inhibited by suppressing T cell responses or by inducing specific tolerance in T cells, or both. Immunosuppression of T cell responses is generally an active, non-antigen-specific, process which requires continuous exposure of the T cells to the suppressive agent. Tolerance, which involves inducing non-responsiveness or anergy in T cells, is distinguishable from immunosuppression in that it is generally antigen-specific and persists after exposure to the tolerizing agent has ceased. Operationally, tolerance can be demonstrated by the lack of a T cell response upon reexposure to specific antigen in the absence of the tolerizing agent.

[0202] Down regulating or preventing one or more antigen functions (including without limitation B lymphocyte antigen functions (such as, for example, B7)), e.g., preventing high level lymphokine synthesis by activated T cells, will be useful in situations of tissue, skin and organ transplantation and in graft-versus-host disease (GVHD). For example, blockage of T cell function should result in reduced tissue destruction in tissue transplantation. Typically, in tissue transplants, rejection of the transplant is initiated through its recognition as foreign by T cells, followed by an immune reaction that destroys the transplant. The administration of a therapeutic composition of the invention may prevent cytokine synthesis by immune cells, such as T cells, and thus acts as an immunosuppressant. Moreover, a lack of costimulation may also be sufficient to anergize the T cells, thereby inducing tolerance in a subject. Induction of long-term tolerance by B lymphocyte antigen-blocking reagents may avoid the necessity of repeated administration of these blocking reagents. To achieve sufficient immunosuppression or tolerance in a subject, it may also be necessary to block the function of a combination of B lymphocyte antigens.

[0203] The efficacy of particular therapeutic compositions in preventing organ transplant rejection or GVHD can be assessed using animal models that are predictive of efficacy in humans. Examples of appropriate systems which can be used include allogeneic cardiac grafts in rats and xenogeneic pancreatic islet cell grafts in mice, both of which have been used to examine the immunosuppressive effects of CTLA4Ig fusion proteins in vivo as described in Lenschow et al., Science 257:789-792 (1992) and Turka et al., Proc. Natl. Acad. Sci USA, 89:11102-11105 (1992). In addition, murine models of GVHD (see Paul ed., Fundamental Immunology, Raven Press, New York, 1989, pp. 846-847) can be used to determine the effect of therapeutic compositions of the invention on the development of that disease.

[0204] Blocking antigen function may also be therapeutically useful for treating autoimmune diseases. Many autoimmune disorders are the result of inappropriate activation of T cells that are reactive against self tissue and which promote the production of cytokines and autoantibodies involved in the pathology of the diseases. Preventing the activation of autoreactive T cells may reduce or eliminate disease symptoms. Administration of reagents which block stimulation of T cells can be used to inhibit T cell activation and prevent production of autoantibodies or T cell-derived cytokines which may be involved in the disease process. Additionally, blocking reagents may induce antigen-specific tolerance of autoreactive T cells which could lead to long-term relief from the disease. The efficacy of blocking reagents in preventing or alleviating autoimmune disorders can be determined using a number of well-characterized animal models of human autoimmune diseases. Examples include murine experimental autoimmune encephalitis, systemic lupus erythmatosis in MRL/lpr/lpr mice or NZB hybrid mice, murine autoimmune collagen arthritis, diabetes mellitus in NOD mice and BB rats, and murine experimental myasthenia gravis (see Paul ed., Fundamental Immunology, Raven Press, New York, 1989, pp. 840-856).

[0205] Upregulation of an antigen function (e.g., a B lymphocyte antigen function), as a means of up regulating immune responses, may also be useful in therapy. Upregulation of immune responses may be in the form of enhancing an existing immune response or eliciting an initial immune response. For example, enhancing an immune response may be useful in cases of viral infection, including systemic viral diseases such as influenza, the common cold, and encephalitis.

[0206] Alternatively, anti-viral immune responses may be enhanced in an infected patient by removing T cells from the patient, costimulating the T cells in vitro with viral antigen-pulsed APCs either expressing a peptide of the present invention or together with a stimulatory form of a soluble peptide of the present invention and reintroducing the in vitro activated T cells into the patient. Another method of enhancing anti-viral immune responses would be to isolate infected cells from a patient, transfect them with a nucleic acid encoding a protein of the present invention as described herein such that the cells express all or a portion of the protein on their surface, and reintroduce the transfected cells into the patient. The infected cells would now be capable of delivering a costimulatory signal to, and thereby activate, T cells in vivo.

[0207] A polypeptide of the present invention may provide the necessary stimulation signal to T cells to induce a T cell mediated immune response against the transfected tumor cells. In addition, tumor cells which lack MHC class I or MHC class II molecules, or which fail to reexpress sufficient mounts of MHC class I or MHC class II molecules, can be transfected with nucleic acid encoding all or a portion of (e.g., a cytoplasmic-domain truncated portion) of an MHC class I alpha chain protein and β₂ microglobulin protein or an MHC class II alpha chain protein and an MHC class II beta chain protein to thereby express MHC class I or MHC class II proteins on the cell surface. Expression of the appropriate class I or class II MHC in conjunction with a peptide having the activity of a B lymphocyte antigen (e.g., B7-1, B7-2, B7-3) induces a T cell mediated immune response against the transfected tumor cell. Optionally, a gene encoding an antisense construct which blocks expression of an MHC class II associated protein, such as the invariant chain, can also be cotransfected with a DNA encoding a peptide having the activity of a B lymphocyte antigen to promote presentation of tumor associated antigens and induce tumor specific immunity. Thus, the induction of a T cell mediated immune response in a human subject may be sufficient to overcome tumor-specific tolerance in the subject.

[0208] The activity of a protein of the invention may, among other means, be measured by the following methods:

[0209] Suitable assays for thymocyte or splenocyte cytotoxicity include, without limitation, those described in: Current Protocols in Immunology, Ed by J. E. Coligan, A. M. Kruisbeek, D. H. Margulies, E. M. Shevach, W. Strober, Pub. Greene Publishing Associates and Wiley-Interscience (Chapter 3, In Vitro assays for Mouse Lymphocyte Function 3.1-3.19; Chapter 7, Immunologic studies in Humans); Herrmann et al., Proc. Natl. Acad. Sci. USA 78:2488-2492, 1981; Herrmann et al., J. Immunol. 128:1968-1974, 1982; Handa et al., J. Immunol. 135:1564-1572, 1985; Takai et al., I. Immunol. 137:3494-3500, 1986; Takai et al., J. Immunol 140:508-512, 1988; Bowman et al., J. Virology 61:1992-1998; Bertagnolli et al., Cellular Immunology 133:327-341, 1991; Brown et al., J. Immunol. 153:3079-3092, 1994.

[0210] Assays for T-cell-dependent immunoglobulin responses and isotype switching (which will identify, among others, proteins that modulate T-cell dependent antibody responses and that affect Th1/Th2 profiles) include, without limitation, those described in: Maliszewski, J. Immunol. 144:3028-3033, 1990; and Assays for B cell function: In vitro antibody production, Mond, J. J. and Brunswick, M. In Current Protocols in Immunology. J. E. e.a. Coligan eds. Vol 1 pp. 3.8.1-3.8.16, John Wiley and Sons, Toronto. 1994.

[0211] Mixed lymphocyte reaction (MLR) assays (which will identify, among others, proteins that generate predominantly Th1 and CTL responses) include, without limitation, those described in: Current Protocols in Immunology, Ed by J. E. Coligan, A. M. Kruisbeek, D. H. Margulies, E. M. Shevach, W. Strober, Pub. Greene Publishing Associates and Wiley-Interscience (Chapter 3, In Vitro assays for Mouse Lymphocyte Function 3.1-3.19; Chapter 7, Immunologic studies in Humans); Takai et al., J. Immunol. 137:3494-3500, 1986; Takai et al., J. Immunol. 140:508-512, 1988; Bertagnolli et al., J. Immunol. 149:3778-3783, 1992.

[0212] Dendritic cell-dependent assays (which will identify, among others, proteins expressed by dendritic cells that activate naive T-cells) include, without limitation, those described in: Guery et al., J. Immunol. 134:536-544, 1995; Inaba et al., Journal of Experimental Medicine 173:549-559, 1991; Macatonia et al., Journal of Immunology 154:5071-5079, 1995; Porgador et al., Journal of Experimental Medicine 182:255-260, 1995; Nair et al., Journal of Virology 67:4062-4069, 1993; Huang et al., Science 264:961-965, 1994; Macatonia et al., Journal of Experimental Medicine 169:1255-1264, 1989; Bhardwaj et al., Journal of Clinical Investigation 94:797-807, 1994; and Inaba et al., Journal of Experimental Medicine 172:631-640, 1990.

[0213] Assays for lymphocyte survival/apoptosis (which will identify, among others, proteins that prevent apoptosis after superantigen induction and proteins that regulate lymphocyte homeostasis) include, without limitation, those described in: Darzynkiewicz et al., Cytometry 13:795-808, 1992; Gorczyca et al., Leukemia 7:659-670, 1993; Gorczyca et al., Cancer Research 53:1945-1951, 1993; Itoh et al., Cell 66:233-243, 1991; Zacharchuk, Journal of Immunology 145:4037-4045, 1990; Zamai et al., Cytometry 14:891-897, 1993; Gorczyca et al., International Journal of Oncology 1:639-648, 1992.

[0214] Assays for proteins that influence early steps of T-cell commitment and development include, without limitation, those described in: Antica et al., Blood 84:111-117, 1994; Fine et al., Cellular Immunology 155:111-122, 1994; Galy et al., Blood 85:2770-2778, 1995; Toki et al., Proc. Nat. Acad Sci. USA 88:7548-7551, 1991.

[0215] 4.10.8 Activin/Inhibin Activity

[0216] A polypeptide of the present invention may also exhibit activin- or inhibin-related activities. A polynucleotide of the invention may encode a polypeptide exhibiting such characteristics. Inhibins are characterized by their ability to inhibit the release of follicle stimulating hormone (FSH), while activins and are characterized by their ability to stimulate the release of follicle stimulating hormone (FSH). Thus, a polypeptide of the present invention, alone or in heterodimers with a member of the inhibin family, may be useful as a contraceptive based on the ability of inhibins to decrease fertility in female mammals and decrease spermatogenesis in male mammals. Administration of sufficient amounts of other inhibins can induce infertility in these mammals. Alternatively, the polypeptide of the invention, as a homodimer or as a heterodimer with other protein subunits of the inhibin group, may be useful as a fertility inducing therapeutic, based upon the ability of activin molecules in stimulating FSH release from cells of the anterior pituitary. See, for example, U.S. Pat. No. 4,798,885. A polypeptide of the invention may also be useful for advancement of the onset of fertility in sexually immature mammals, so as to increase the lifetime reproductive performance of domestic animals such as, but not limited to, cows, sheep and pigs.

[0217] The activity of a polypeptide of the invention may, among other means, be measured by the following methods.

[0218] Assays for activin/inhibin activity include, without limitation, those described in: Vale et al., Endocrinology 91:562-572, 1972; Ling et al., Nature 321:779-782, 1986; Vale et al., Nature 321:776-779, 1986; Mason et al., Nature 318:659-663, 1985; Forage et al., Proc. Natl. Acad. Sci. USA 83:3091-3095, 1986.

[0219] 4.10.9 Chemotactic/Chemokinetic Activity

[0220] A polypeptide of the present invention may be involved in chemotactic or chemokinetic activity for mammalian cells, including, for example, monocytes, fibroblasts, neutrophils, T-cells, mast cells, eosinophils, epithelial and/or endothelial cells. A polynucleotide of the invention can encode a polypeptide exhibiting such attributes. Chemotactic and chemokinetic receptor activation can be used to mobilize or attract a desired cell population to a desired site of action. Chemotactic or chemokinetic compositions (e.g. proteins, antibodies, binding partners, or modulators of the invention) provide particular advantages in treatment of wounds and other trauma to tissues, as well as in treatment of localized infections. For example, attraction of lymphocytes, monocytes or neutrophils to tumors or sites of infection may result in improved immune responses against the tumor or infecting agent.

[0221] A protein or peptide has chemotactic activity for a particular cell population if it can stimulate, directly or indirectly, the directed orientation or movement of such cell population. Preferably, the protein or peptide has the ability to directly stimulate directed movement of cells. Whether a particular protein has chemotactic activity for a population of cells can be readily determined by employing such protein or peptide in any known assay for cell chemotaxis.

[0222] Therapeutic compositions of the invention can be used in the following:

[0223] Assays for chemotactic activity (which will identify proteins that induce or prevent chemotaxis) consist of assays that measure the ability of a protein to induce the migration of cells across a membrane as well as the ability of a protein to induce the adhesion of one cell population to another cell population. Suitable assays for movement and adhesion include, without limitation, those described in: Current Protocols in Immunology, Ed by J. E. Coligan, A. M. Kruisbeek, D. H. Marguiles, E. M. Shevach, W. Strober, Pub. Greene Publishing Associates and Wiley-Interscience (Chapter 6.12, Measurement of alpha and beta Chemokines 6.12.1-6.12.28; Taub et al. J. Clin. Invest. 95:1370-1376, 1995; Lind et al. APMIS 103:140-146, 1995; Muller et al Eur. J. Immunol. 25:1744-1748; Gruber et al. J. of Immunol. 152:5860-5867, 1994; Johnston et al. J. of Immunol. 153:1762-1768, 1994.

[0224] 4.10.10 Hemostatic and Thrombolytic Activity

[0225] A polypeptide of the invention may also be involved in hemostatis or thrombolysis or thrombosis. A polynucleotide of the invention can encode a polypeptide exhibiting such attributes. Compositions may be useful in treatment of various coagulation disorders (including hereditary disorders, such as hemophilias) or to enhance coagulation and other hemostatic events in treating wounds resulting from trauma, surgery or other causes. A composition of the invention may also be useful for dissolving or inhibiting formation of thromboses and for treatment and prevention of conditions resulting therefrom (such as, for example, infarction of cardiac and central nervous system vessels (e.g., stroke).

[0226] Therapeutic compositions of the invention can be used in the following:

[0227] Assay for hemostatic and thrombolytic activity include, without limitation, those described in: Linet et al., J. Clin. Pharmacol. 26:131-140, 1986; Burdick et al., Thrombosis Res. 45:413-419, 1987; Humphrey et al., Fibrinolysis 5:71-79 (1991); Schaub, Prostaglandins 35:467-474, 1988.

[0228] 4.10.11 Cancer Diagnosis and Therapy

[0229] Polypeptides of the invention may be involved in cancer cell generation, proliferation or metastasis. Detection of the presence or amount of polynucleotides or polypeptides of the invention may be useful for the diagnosis and/or prognosis of one or more types of cancer. For example, the presence or increased expression of a polynucleotide/polypeptide of the invention may indicate a hereditary risk of cancer, a precancerous condition, or an ongoing malignancy. Conversely, a defect in the gene or absence of the polypeptide may be associated with a cancer condition. Identification of single nucleotide polymorphisms associated with cancer or a predisposition to cancer may also be useful for diagnosis or prognosis.

[0230] Cancer treatments promote tumor regression by inhibiting tumor cell proliferation, inhibiting angiogenesis (growth of new blood vessels that is necessary to support tumor growth) and/or prohibiting metastasis by reducing tumor cell motility or invasiveness. Therapeutic compositions of the invention may be effective in adult and pediatric oncology including in solid phase tumors/malignancies, locally advanced tumors, human soft tissue sarcomas, metastatic cancer, including lymphatic metastases, blood cell malignancies including multiple myeloma, acute and chronic leukemias, and lymphomas, head and neck cancers including mouth cancer, larynx cancer and thyroid cancer, lung cancers including small cell carcinoma and non-small cell cancers, breast cancers including small cell carcinoma and ductal carcinoma, gastrointestinal cancers including esophageal cancer, stomach cancer, colon cancer, colorectal cancer and polyps associated with colorectal neoplasia, pancreatic cancers, liver cancer, urologic cancers including bladder cancer and prostate cancer, malignancies of the female genital tract including ovarian carcinoma, uterine (including endometrial) cancers, and solid tumor in the ovarian follicle, kidney cancers including renal cell carcinoma, brain cancers including intrinsic brain tumors, neuroblastoma, astrocytic brain tumors, gliomas, metastatic tumor cell invasion in the central nervous system, bone cancers including osteomas, skin cancers including malignant melanoma, tumor progression of human skin keratinocytes, squamous cell carcinoma, basal cell carcinoma, hemangiopericytoma and Karposi's sarcoma.

[0231] Polypeptides, polynucleotides, or modulators of polypeptides of the invention (including inhibitors and stimulators of the biological activity of the polypeptide of the invention) may be administered to treat cancer. Therapeutic compositions can be administered in therapeutically effective dosages alone or in combination with adjuvant cancer therapy such as surgery, chemotherapy, radiotherapy, thermotherapy, and laser therapy, and may provide a beneficial effect, e.g. reducing tumor size, slowing rate of tumor growth, inhibiting metastasis, or otherwise improving overall clinical condition, without necessarily eradicating the cancer.

[0232] The composition can also be administered in therapeutically effective amounts as a portion of an anti-cancer cocktail. An anti-cancer cocktail is a mixture of the polypeptide or modulator of the invention with one or more anti-cancer drugs in addition to a pharmaceutically acceptable carrier for delivery. The use of anti-cancer cocktails as a cancer treatment is routine. Anti-cancer drugs that are well known in the art and can be used as a treatment in combination with the polypeptide or modulator of the invention include: Actinomycin D, Aminoglutethimide, Asparaginase, Bleomycin, Busulfan, Carboplatin, Carmustine, Chlorambucil, Cisplatin (cis-DDP), Cyclophosphamide, Cytarabine HCl (Cytosine arabinoside), Dacarbazine, Dactinomycin, Daunorubicin HCl, Doxorubicin HCl, Estramustine phosphate sodium, Etoposide (V16-213), Floxuridine, 5-Fluorouracil (5-Fu), Flutamide, Hydroxyurea (hydroxycarbamide), Ifosfamide, Interferon Alpha-2a, Interferon Alpha-2b, Leuprolide acetate (LHRH-releasing factor analog), Lomustine, Mechlorethamine HCl (nitrogen mustard), Melphalan, Mercaptopurine, Mesna, Methotrexate (MTX), Mitomycin, Mitoxantrone HCl, Octreotide, Plicamycin, Procarbazine HCl, Streptozocin, Tamoxifen citrate, Thioguanine, Thiotepa, Vinblastine sulfate, Vincristine sulfate, Amsacrine, Azacitidine, Hexamethylmelamine, Interleukin-2, Mitoguazone, Pentostatin, Semustine, Teniposide, and Vindesine sulfate.

[0233] In addition, therapeutic compositions of the invention may be used for prophylactic treatment of cancer. There are hereditary conditions and/or environmental situations (e.g. exposure to carcinogens) known in the art that predispose an individual to developing cancers. Under these circumstances, it may be beneficial to treat these individuals with therapeutically effective doses of the polypeptide of the invention to reduce the risk of developing cancers.

[0234] In vitro models can be used to determine the effective doses of the polypeptide of the invention as a potential cancer treatment. These in vitro models include proliferation assays of cultured tumor cells, growth of cultured tumor cells in soft agar (see Freshney, (1987) Culture of Animal Cells: A Manual of Basic Technique, Wily-Liss, New York, N.Y. Ch 18 and Ch 21), tumor systems in nude mice as described in Giovanella et al., J. Natl. Can. Inst., 52: 921-30 (1974), mobility and invasive potential of tumor cells in Boyden Chamber assays as described in Pilkington et al., Anticancer Res., 17: 4107-9 (1997), and angiogenesis assays such as induction of vascularization of the chick chorioallantoic membrane or induction of vascular endothelial cell migration as described in Ribatta et al., Intl. J. Dev. Biol., 40: 1189-97 (1999) and Li et al., Clin. Exp. Metastasis, 17:423-9 (1999), respectively. Suitable tumor cells lines are available, e.g. from American Type Tissue Culture Collection catalogs.

[0235] 4.10.12 Receptor/Ligand Activity

[0236] A polypeptide of the present invention may also demonstrate activity as receptor, receptor ligand or inhibitor or agonist of receptor/ligand interactions. A polynucleotide of the invention can encode a polypeptide exhibiting such characteristics. Examples of such receptors and ligands include, without limitation, cytokine receptors and their ligands, receptor kinases and their ligands, receptor phosphatases and their ligands, receptors involved in cell-cell interactions and their ligands (including without limitation, cellular adhesion molecules (such as selectins, integrins and their ligands) and receptor/ligand pairs involved in antigen presentation, antigen recognition and development of cellular and humoral immune responses. Receptors and ligands are also useful for screening of potential peptide or small molecule inhibitors of the relevant receptor/ligand interaction. A protein of the present invention (including, without limitation, fragments of receptors and ligands) may themselves be useful as inhibitors of receptor/ligand interactions.

[0237] The activity of a polypeptide of the invention may, among other means, be measured by the following methods:

[0238] Suitable assays for receptor-ligand activity include without imitation those described in: Current Protocols in Immunology, Ed by J. E. Coligan, A. M. Kruisbeek, D. H. Margulies, E. M. Shevach, W. Strober, Pub. Greene Publishing Associates and Wiley-Interscience (Chapter 7.28, Measurement of Cellular Adhesion under static conditions 7.28.1-7.28.22), Takai et al., Proc. Natl. Acad. Sci. USA 84:6864-6868, 1987; Bierer et al., J. Exp. Med. 168:1145-1156, 1988; Rosenstein et al., J. Exp. Med. 169:149-160 1989; Stoltenborg et al., J. Immunol. Methods 175:59-68, 1994; Stitt et al., Cell 80:661-670, 1995.

[0239] By way of example, the polypeptides of the invention may be used as a receptor for a ligand(s) thereby transmitting the biological activity of that ligand(s). Ligands may be identified through binding assays, affinity chromatography, dihybrid screening assays, BIAcore assays, gel overlay assays, or other methods known in the art.

[0240] Studies characterizing drugs or proteins as agonist or antagonist or partial agonists or a partial antagonist require the use of other proteins as competing ligands. The polypeptides of the present invention or ligand(s) thereof may be labeled by being coupled to radioisotopes, colorimetric molecules or a toxin molecules by conventional methods. (“Guide to Protein Purification” Murray P. Deutscher (ed) Methods in Enzymology Vol. 182 (1990) Academic Press, Inc. San Diego). Examples of radioisotopes include, but are not limited to, tritium and carbon-14. Examples of calorimetric molecules include, but are not limited to, fluorescent molecules such as fluorescamine, or rhodamine or other colorimetric molecules. Examples of toxins include, but are not limited, to ricin.

[0241] 4.10.13 Drug Screening

[0242] This invention is particularly useful for screening chemical compounds by using the novel polypeptides or binding fragments thereof in any of a variety of drug screening techniques. The polypeptides or fragments employed in such a test may either be free in solution, affixed to a solid support, borne on a cell surface or located intracellularly. One method of drug screening utilizes eukaryotic or prokaryotic host cells which are stably transformed with recombinant nucleic acids expressing the polypeptide or a fragment thereof. Drugs are screened against such transformed cells in competitive binding assays. Such cells, either in viable or fixed form, can be used for standard binding assays. One may measure, for example, the formation of complexes between polypeptides of the invention or fragments and the agent being tested or examine the diminution in complex formation between the novel polypeptides and an appropriate cell line, which are well known in the art.

[0243] Sources for test compounds that may be screened for ability to bind to or modulate (i.e., increase or decrease) the activity of polypeptides of the invention include (1) inorganic and organic chemical libraries, (2) natural product libraries, and (3) combinatorial libraries comprised of either random or mimetic peptides, oligonucleotides or organic molecules.

[0244] Chemical libraries may be readily synthesized or purchased from a number of commercial sources, and may include structural analogs of known compounds or compounds that are identified as “hits” or “leads” via natural product screening.

[0245] The sources of natural product libraries are microorganisms (including bacteria and fungi), animals, plants or other vegetation, or marine organisms, and libraries of mixtures for screening may be created by: (1) fermentation and extraction of broths from soil, plant or marine microorganisms or (2) extraction of the organisms themselves. Natural product libraries include polyketides, non-ribosomal peptides, and (non-naturally occurring) variants thereof. For a review, see Science 282:63-68 (1998).

[0246] Combinatorial libraries are composed of large numbers of peptides, oligonucleotides or organic compounds and can be readily prepared by traditional automated synthesis methods, PCR, cloning or proprietary synthetic methods. Of particular interest are peptide and oligonucleotide combinatorial libraries. Still other libraries of interest include peptide, protein, peptidomimetic, multiparallel synthetic collection, recombinatorial, and polypeptide libraries. For a review of combinatorial chemistry and libraries created therefrom, see Myers, Curr. Opin. Biotechnol. 8:701-707 (1997). For reviews and examples of peptidomimetic libraries, see Al-Obeidi et al., Mol. Biotechnol, 9(3):205-23 (1998); Hruby et al., Curr Opin Chem Biol, 1(1):114-19 (1997); Dorner et al., Bioorg Med Chem, 4(5):709-15 (1996) (alkylated dipeptides).

[0247] Identification of modulators through use of the various libraries described herein permits modification of the candidate “hit” (or “lead”) to optimize the capacity of the “hit” to bind a polypeptide of the invention. The molecules identified in the binding assay are then tested for antagonist or agonist activity in in vivo tissue culture or animal models that are well known in the art. In brief, the molecules are titrated into a plurality of cell cultures or animals and then tested for either cell/animal death or prolonged survival of the animal/cells.

[0248] The binding molecules thus identified may be complexed with toxins, e.g., ricin or cholera, or with other compounds that are toxic to cells such as radioisotopes. The toxin-binding molecule complex is then targeted to a tumor or other cell by the specificity of the binding molecule for a polypeptide of the invention. Alternatively, the binding molecules may be complexed with imaging agents for targeting and imaging purposes.

[0249] 4.10.14 Assay for Receptor Activity

[0250] The invention also provides methods to detect specific binding of a polypeptide e.g. a ligand or a receptor. The art provides numerous assays particularly useful for identifying previously unknown binding partners for receptor polypeptides of the invention. For example, expression cloning using mammalian or bacterial cells, or dihybrid screening assays can be used to identify polynucleotides encoding binding partners. As another example, affinity chromatography with the appropriate immobilized polypeptide of the invention can be used to isolate polypeptides that recognize and bind polypeptides of the invention. There are a number of different libraries used for the identification of compounds, and in particular small molecules, that modulate (i.e., increase or decrease) biological activity of a polypeptide of the invention. Ligands for receptor polypeptides of the invention can also be identified by adding exogenous ligands, or cocktails of ligands to two cells populations that are genetically identical except for the expression of the receptor of the invention: one cell population expresses the receptor of the invention whereas the other does not. The response of the two cell populations to the addition of ligands(s) are then compared. Alternatively, an expression library can be co-expressed with the polypeptide of the invention in cells and assayed for an autocrine response to identify potential ligand(s). As still another example, BIAcore assays, gel overlay assays, or other methods known in the art can be used to identify binding partner polypeptides, including, (1) organic and inorganic chemical libraries, (2) natural product libraries, and (3) combinatorial libraries comprised of random peptides, oligonucleotides or organic molecules.

[0251] The role of downstream intracellular signaling molecules in the signaling cascade of the polypeptide of the invention can be determined. For example, a chimeric protein in which the cytoplasmic domain of the polypeptide of the invention is fused to the extracellular portion of a protein, whose ligand has been identified, is produced in a host cell. The cell is then incubated with the ligand specific for the extracellular portion of the chimeric protein, thereby activating the chimeric receptor. Known downstream proteins involved in intracellular signaling can then be assayed for expected modifications i.e. phosphorylation. Other methods known to those in the art can also be used to identify signaling molecules involved in receptor activity.

[0252] 4.10.15 Anti-Inflammatory Activity

[0253] Compositions of the present invention may also exhibit anti-inflammatory activity. The anti-inflammatory activity may be achieved by providing a stimulus to cells involved in the inflammatory response, by inhibiting or promoting cell-cell interactions (such as, for example, cell adhesion), by inhibiting or promoting chemotaxis of cells involved in the inflammatory process, inhibiting or promoting cell extravasation, or by stimulating or suppressing production of other factors which more directly inhibit or promote an inflammatory response. Compositions with such activities can be used to treat inflammatory conditions including chronic or acute conditions), including without limitation intimation associated with infection (such as septic shock, sepsis or systemic inflammatory response syndrome (SIRS)), ischemia-reperfusion injury, endotoxin lethality, arthritis, complement-mediated hyperacute rejection, nephritis, cytokine or chemokine-induced lung injury, inflammatory bowel disease, Crohn's disease or resulting from over production of cytokines such as TNF or IL-1. Compositions of the invention may also be useful to treat anaphylaxis and hypersensitivity to an antigenic substance or material. Compositions of this invention may be utilized to prevent or treat conditions such as, but not limited to, sepsis, acute pancreatitis, endotoxin shock, cytokine induced shock, rheumatoid arthritis, chronic inflammatory arthritis, pancreatic cell damage from diabetes mellitus type 1, graft versus host disease, inflammatory bowel disease, inflamation associated with pulmonary disease, other autoimmune disease or inflammatory disease, an antiproliferative agent such as for acute or chronic mylegenous leukemia or in the prevention of premature labor secondary to intrauterine infections.

[0254] 4.10.16 Leukemias

[0255] Leukemias and related disorders may be treated or prevented by administration of a therapeutic that promotes or inhibits function of the polynucleotides and/or polypeptides of the invention. Such leukemias and related disorders include but are not limited to acute leukemia, acute lymphocytic leukemia, acute myelocytic leukemia, myeloblastic, promyelocytic, myelomonocytic, monocytic, erythroleukemia, chronic leukemia, chronic myelocytic (granulocytic) leukemia and chronic lymphocytic leukemia (for a review of such disorders, see Fishman et al., 1985, Medicine, 2d Ed., J.B. Lippincott Co., Philadelphia).

[0256] 4.10.17 Nervous System Disorders

[0257] Nervous system disorders, involving cell types which can be tested for efficacy of intervention with compounds that modulate the activity of the polynucleotides and/or polypeptides of the invention, and which can be treated upon thus observing an indication of therapeutic utility, include but are not limited to nervous system injuries, and diseases or disorders which result in either a disconnection of axons, a diminution or degeneration of neurons, or demyelination. Nervous system lesions which may be treated in a patient (including human and non-human mammalian patients) according to the invention include but are not limited to the following lesions of either the central (including spinal cord, brain) or peripheral nervous systems:

[0258] (i) traumatic lesions, including lesions caused by physical injury or associated with surgery, for example, lesions which sever a portion of the nervous system, or compression injuries;

[0259] (ii) ischemic lesions, in which a lack of oxygen in a portion of the nervous system results in neuronal injury or death, including cerebral infarction or ischemia, or spinal cord infarction or ischemia;

[0260] (iii) infectious lesions, in which a portion of the nervous system is destroyed or injured as a result of infection, for example, by an abscess or associated with infection by human immunodeficiency virus, herpes zoster, or herpes simplex virus or with Lyme disease, tuberculosis, syphilis;

[0261] (iv) degenerative lesions, in which a portion of the nervous system is destroyed or injured as a result of a degenerative process including but not limited to degeneration associated with Parkinson's disease, Alzheimer's disease, Huntington's chorea, or amyotrophic lateral sclerosis;

[0262] (v) lesions associated with nutritional diseases or disorders, in which a portion of the nervous system is destroyed or injured by a nutritional disorder or disorder of metabolism including but not limited to, vitamin B12 deficiency, folic acid deficiency, Wernicke disease, tobacco-alcohol amblyopia, Marchiafava-Bignami disease (primary degeneration of the corpus callosum), and alcoholic cerebellar degeneration;

[0263] (vi) neurological lesions associated with systemic diseases including but not limited to diabetes (diabetic neuropathy, Bell's palsy), systemic lupus erythematosus, carcinoma, or sarcoidosis;

[0264] (vii) lesions caused by toxic substances including alcohol, lead, or particular neurotoxins; and

[0265] (viii) demyelinated lesions in which a portion of the nervous system is destroyed or injured by a demyelinating disease including but not limited to multiple sclerosis, human immunodeficiency virus-associated myelopathy, transverse myelopathy or various etiologies, progressive multifocal leukoencephalopathy, and central pontine myelinolysis.

[0266] Therapeutics which are useful according to the invention for treatment of a nervous system disorder may be selected by testing for biological activity in promoting the survival or differentiation of neurons. For example, and not by way of limitation, therapeutics which elicit any of the following effects may be useful according to the invention:

[0267] (i) increased survival time of neurons in culture;

[0268] (ii) increased sprouting of neurons in culture or in vivo;

[0269] (iii) increased production of a neuron-associated molecule in culture or in vivo, e.g., choline acetyltransferase or acetylcholinesterase with respect to motor neurons; or

[0270] (iv) decreased symptoms of neuron dysfunction in vivo.

[0271] Such effects may be measured by any method known in the art. In preferred, non-limiting embodiments, increased survival of neurons may be measured by the method set forth in Arakawa et al. (1990, J. Neurosci. 10:3507-3515); increased sprouting of neurons may be detected by methods set forth in Pestronk et al. (1980, Exp. Neurol. 70:65-82) or Brown et al. (1981, Ann. Rev. Neurosci. 4:17-42); increased production of neuron-associated molecules may be measured by bioassay, enzymatic assay, antibody binding, Northern blot assay, etc., depending on the molecule to be measured; and motor neuron dysfunction may be measured by assessing the physical manifestation of motor neuron disorder, e.g., weakness, motor neuron conduction velocity, or functional disability.

[0272] In specific embodiments, motor neuron disorders that may be treated according to the invention include but are not limited to disorders such as infarction, infection, exposure to toxin, trauma, surgical damage, degenerative disease or malignancy that may affect motor neurons as well as other components of the nervous system, as well as disorders that selectively affect neurons such as amyotrophic lateral sclerosis, and including but not limited to progressive spinal muscular atrophy, progressive bulbar palsy, primary lateral sclerosis, infantile and juvenile muscular atrophy, progressive bulbar paralysis of childhood (Fazio-Londe syndrome), poliomyelitis and the post polio syndrome, and Hereditary Motorsensory Neuropathy (Charcot-Marie-Tooth Disease).

[0273] 4.10.18 Other Activities

[0274] A polypeptide of the invention may also exhibit one or more of the following additional activities or effects: inhibiting the growth, infection or function of, or killing, infectious agents, including, without limitation, bacteria, viruses, fungi and other parasites; effecting (suppressing or enhancing) bodily characteristics, including, without limitation, height, weight, hair color, eye color, skin, fat to lean ratio or other tissue pigmentation, or organ or body part size or shape (such as, for example, breast augmentation or diminution, change in bone form or shape); effecting biorhythms or circadian cycles or rhythms; effecting the fertility of male or female subjects; effecting the metabolism, catabolism, anabolism, processing, utilization, storage or elimination of dietary fat, lipid, protein, carbohydrate, vitamins, minerals, co-factors or other nutritional factors or component(s); effecting behavioral characteristics, including, without limitation, appetite, libido, stress, cognition (including cognitive disorders), depression (including depressive disorders) and violent behaviors; providing analgesic effects or other pain reducing effects; promoting differentiation and growth of embryonic stem cells in lineages other than hematopoietic lineages; hormonal or endocrine activity; in the case of enzymes, correcting deficiencies of the enzyme and treating deficiency-related diseases; treatment of hyperproliferative disorders (such as, for example, psoriasis); immunoglobulin-like activity (such as, for example, the ability to bind antigens or complement); and the ability to act as an antigen in a vaccine composition to raise an immune response against such protein or another material or entity which is cross-reactive with such protein.

[0275] 4.10.19 Identification of Polymorphisms

[0276] The demonstration of polymorphisms makes possible the identification of such polymorphisms in human subjects and the pharmacogenetic use of this information for diagnosis and treatment. Such polymorphisms may be associated with, e.g., differential predisposition or susceptibility to various disease states (such as disorders involving inflammation or immune response) or a differential response to drug administration, and this genetic information can be used to tailor preventive or therapeutic treatment appropriately. For example, the existence of a polymorphism associated with a predisposition to inflammation or autoimmune disease makes possible the diagnosis of this condition in humans by identifying the presence of the polymorphism.

[0277] Polymorphisms can be identified in a variety of ways known in the art which all generally involve obtaining a sample from a patient, analyzing DNA from the sample, optionally involving isolation or amplification of the DNA, and identifying the presence of the polymorphism in the DNA. For example, PCR may be used to amplify an appropriate fragment of genomic DNA which may then be sequenced. Alternatively, the DNA may be subjected to allele-specific oligonucleotide hybridization (in which appropriate oligonucleotides are hybridized to the DNA under conditions permitting detection of a single base mismatch) or to a single nucleotide extension assay (in which an oligonucleotide that hybridizes immediately adjacent to the position of the polymorphism is extended with one or more labeled nucleotides). In addition, traditional restriction fragment length polymorphism analysis (using restriction enzymes that provide differential digestion of the genomic DNA depending on the presence or absence of the polymorphism) may be performed. Arrays with nucleotide sequences of the present invention can be used to detect polymorphisms. The array can comprise modified nucleotide sequences of the present invention in order to detect the nucleotide sequences of the present invention. In the alternative, any one of the nucleotide sequences of the present invention can be placed on the array to detect changes from those sequences.

[0278] Alternatively a polymorphism resulting in a change in the amino acid sequence could also be detected by detecting a corresponding change in amino acid sequence of the protein, e.g., by an antibody specific to the variant sequence.

[0279] 4.10.20 Arthritis and Inflammation

[0280] The immunosuppressive effects of the compositions of the invention against rheumatoid arthritis is determined in an experimental animal model system. The experimental model system is adjuvant induced arthritis in rats, and the protocol is described by J. Holoshitz, et at., 1983, Science, 219:56, or by B. Waksman et al., 1963, Int. Arch. Allergy Appl. Immunol., 23:129. Induction of the disease can be caused by a single injection, generally intradermally, of a suspension of killed Mycobacterium tuberculosis in complete Freund's adjuvant (CFA). The route of injection can vary, but rats may be injected at the base of the tail with an adjuvant mixture. The polypeptide is administered in phosphate buffered solution (PBS) at a dose of about 1-5 mg/kg. The control consists of administering PBS only.

[0281] The procedure for testing the effects of the test compound would consist of intradermally injecting killed Mycobacterium tuberculosis in CFA followed by immediately administering the test compound and subsequent treatment every other day until day 24. At 14, 15, 18, 20, 22, and 24 days after injection of Mycobacterium CFA, an overall arthritis score may be obtained as described by J. Holoskitz above. An analysis of the data would reveal that the test compound would have a dramatic affect on the swelling of the joints as measured by a decrease of the arthritis score.

[0282] 4.11 Therapeutic Methods

[0283] The compositions (including polypeptide fragments, analogs, variants and antibodies or other binding partners or modulators including antisense polynucleotides) of the invention have numerous applications in a variety of therapeutic methods. Examples of therapeutic applications include, but are not limited to, those exemplified herein.

[0284] 4.11.1 Example

[0285] One embodiment of the invention is the administration of an effective amount of the polypeptides or other composition of the invention to individuals affected by a disease or disorder that can be modulated by regulating the peptides of the invention. While the mode of administration is not particularly important, parenteral administration is preferred. An exemplary mode of administration is to deliver an intravenous bolus. The dosage of the polypeptides or other composition of the invention will normally be determined by the prescribing physician. It is to be expected that the dosage will vary according to the age, weight, condition and response of the individual patient. Typically, the amount of polypeptide administered per dose will be in the range of about 0.01 μg/kg to 100 mg/kg of body weight, with the preferred dose being about 0.1 μg/kg to 10 mg/kg of patient body weight. For parenteral administration, polypeptides of the invention will be formulated in an injectable form combined with a pharmaceutically acceptable parenteral vehicle. Such vehicles are well known in the art and examples include water, saline, Ringer's solution, dextrose solution, and solutions consisting of small amounts of the human serum albumin. The vehicle may contain minor amounts of additives that maintain the isotonicity and stability of the polypeptide or other active ingredient. The preparation of such solutions is within the skill of the art.

[0286] 4.12 Pharmaceutical Formulations and Routes of Administration

[0287] A protein or other composition of the present invention (from whatever source derived, including without limitation from recombinant and non-recombinant sources and including antibodies and other binding partners of the polypeptides of the invention) may be administered to a patient in need, by itself, or in pharmaceutical compositions where it is mixed with suitable carriers or excipient(s) at doses to treat or ameliorate a variety of disorders. Such a composition may optionally contain (in addition to protein or other active ingredient and a carrier) diluents, fillers, salts, buffers, stabilizers, solubilizers, and other materials well known in the art. The term “pharmaceutically acceptable” means a non-toxic material that does not interfere with the effectiveness of the biological activity of the active ingredient(s). The characteristics of the carrier will depend on the route of administration. The pharmaceutical composition of the invention may also contain cytokines, lymphokines, or other hematopoietic factors such as M-CSF, GM-CSF, TNF, IL-1, IL-2, IL-3, IL-4, IL-5, IL-6, IL-7, IL-8, IL-9, IL-10, IL-11, IL-12, IL-13, IL-14, IL-15, IFN, TNF0, TNF1, TNF2, G-CSF, Meg-CSF, thrombopoietin, stem cell factor, and erythropoietin. In further compositions, proteins of the invention may be combined with other agents beneficial to the treatment of the disease or disorder in question. These agents include various growth factors such as epidermal growth factor (EGF), platelet-derived growth factor (PDGF), transforming growth factors (TGF-α and TGF-β), insulin-like growth factor (IGF), as well as cytokines described herein.

[0288] The pharmaceutical composition may further contain other agents which either enhance the activity of the protein or other active ingredient or complement its activity or use in treatment. Such additional factors and/or agents may be included in the pharmaceutical composition to produce a synergistic effect with protein or other active ingredient of the invention, or to minimize side effects. Conversely, protein or other active ingredient of the present invention may be included in formulations of the particular clotting factor, cytokine, lymphokine, other hematopoietic factor, thrombolytic or anti-thrombotic factor, or anti-inflammatory agent to minimize side effects of the clotting factor, cytokine, lymphokine, other hematopoietic factor, thrombolytic or anti-thrombotic factor, or anti-inflammatory agent (such as IL-1Ra, IL-1 Hy1, IL-1 Hy2, anti-TNF, corticosteroids, immunosuppressive agents). A protein of the present invention may be active in multimers (e.g., heterodimers or homodimers) or complexes with itself or other proteins. As a result, pharmaceutical compositions of the invention may comprise a protein of the invention in such multimeric or complexed form.

[0289] As an alternative to being included in a pharmaceutical composition of the invention including a first protein, a second protein or a therapeutic agent may be concurrently administered with the first protein (e.g., at the same time, or at differing times provided that therapeutic concentrations of the combination of agents is achieved at the treatment site). Techniques for formulation and administration of the compounds of the instant application may be found in “Remington's Pharmaceutical Sciences,” Mack Publishing Co., Easton, Pa., latest edition. A therapeutically effective dose further refers to that amount of the compound sufficient to result in amelioration of symptoms, e.g., treatment, healing, prevention or amelioration of the relevant medical condition, or an increase in rate of treatment, healing, prevention or amelioration of such conditions. When applied to an individual active ingredient, administered alone, a therapeutically effective dose refers to that ingredient alone. When applied to a combination, a therapeutically effective dose refers to combined amounts of the active ingredients that result in the therapeutic effect, whether administered in combination, serially or simultaneously.

[0290] In practicing the method of treatment or use of the present invention, a therapeutically effective amount of protein or other active ingredient of the present invention is administered to a mammal having a condition to be treated. Protein or other active ingredient of the present invention may be administered in accordance with the method of the invention either alone or in combination with other therapies such as treatments employing cytokines, lymphokines or other hematopoietic factors. When co-administered with one or more cytokines, lymphokines or other hematopoietic factors, protein or other active ingredient of the present invention may be administered either simultaneously with the cytokine(s), lymphokine(s), other hematopoietic factor(s), thrombolytic or anti-thrombotic factors, or sequentially. If administered sequentially, the attending physician will decide on the appropriate sequence of administering protein or other active ingredient of the present invention in combination with cytokine(s), lymphokine(s), other hematopoietic factor(s), thrombolytic or anti-thrombotic factors.

[0291] 4.12.1 Routes of Administration

[0292] Suitable routes of administration may, for example, include oral, rectal, transmucosal, or intestinal administration; parenteral delivery, including intramuscular, subcutaneous, intramedullary injections, as well as intrathecal, direct intraventricular, intravenous, intraperitoneal, intranasal, or intraocular injections. Administration of protein or other active ingredient of the present invention used in the pharmaceutical composition or to practice the method of the present invention can be carried out in a variety of conventional ways, such as oral ingestion, inhalation, topical application or cutaneous, subcutaneous, intraperitoneal, parenteral or intravenous injection. Intravenous administration to the patient is preferred.

[0293] Alternately, one may administer the compound in a local rather than systemic manner, for example, via injection of the compound directly into a arthritic joints or in fibrotic tissue, often in a depot or sustained release formulation. In order to prevent the scarring process frequently occurring as complication of glaucoma surgery, the compounds may be administered topically, for example, as eye drops. Furthermore, one may administer the drug in a targeted drug delivery system, for example, in a liposome coated with a specific antibody, targeting, for example, arthritic or fibrotic tissue. The liposomes will be targeted to and taken up selectively by the afflicted tissue.

[0294] The polypeptides of the invention are administered by any route that delivers an effective dosage to the desired site of action. The determination of a suitable route of administration and an effective dosage for a particular indication is within the level of skill in the art. Preferably for wound treatment, one administers the therapeutic compound directly to the site. Suitable dosage ranges for the polypeptides of the invention can be extrapolated from these dosages or from similar studies in appropriate animal models. Dosages can then be adjusted as necessary by the clinician to provide maximal therapeutic benefit.

[0295] 4.12.2 Compositions/Formulations

[0296] Pharmaceutical compositions for use in accordance with the present invention thus may be formulated in a conventional manner using one or more physiologically acceptable carriers comprising excipients and auxiliaries which facilitate processing of the active compounds into preparations which can be used pharmaceutically. These pharmaceutical compositions may be manufactured in a manner that is itself known, e.g., by means of conventional mixing, dissolving, granulating, dragee-making, levigating, emulsifying, encapsulating, entrapping or lyophilizing processes. Proper formulation is dependent upon the route of administration chosen. When a therapeutically effective amount of protein or other active ingredient of the present invention is administered orally, protein or other active ingredient of the present invention will be in the form of a tablet, capsule, powder, solution or elixir. When administered in tablet form, the pharmaceutical composition of the invention may additionally contain a solid carrier such as a gelatin or an adjuvant. The tablet, capsule, and powder contain from about 5 to 95% protein or other active ingredient of the present invention, and preferably from about 25 to 90% protein or other active ingredient of the present invention. When administered in liquid form, a liquid carrier such as water, petroleum, oils of animal or plant origin such as peanut oil, mineral oil, soybean oil, or sesame oil, or synthetic oils may be added. The liquid form of the pharmaceutical composition may further contain physiological saline solution, dextrose or other saccharide solution, or glycols such as ethylene glycol, propylene glycol or polyethylene glycol. When administered in liquid form, the pharmaceutical composition contains from about 0.5 to 90% by weight of protein or other active ingredient of the present invention, and preferably from about 1 to 50% protein or other active ingredient of the present invention.

[0297] When a therapeutically effective amount of protein or other active ingredient of the present invention is administered by intravenous, cutaneous or subcutaneous injection, protein or other active ingredient of the present invention will be in the form of a pyrogen-free, parenterally acceptable aqueous solution. The preparation of such parenterally acceptable protein or other active ingredient solutions, having due regard to pH, isotonicity, stability, and the like, is within the skill in the art. A preferred pharmaceutical composition for intravenous, cutaneous, or subcutaneous injection should contain, in addition to protein or other active ingredient of the present invention, an isotonic vehicle such as Sodium Chloride Injection, Ringer's Injection, Dextrose Injection, Dextrose and Sodium Chloride Injection, Lactated Ringer's Injection, or other vehicle as known in the art. The pharmaceutical composition of the present invention may also contain stabilizers, preservatives, buffers, antioxidants, or other additives known to those of skill in the art. For injection, the agents of the invention may be formulated in aqueous solutions, preferably in physiologically compatible buffers such as Hanks's solution, Ringer's solution, or physiological saline buffer. For transmucosal administration, penetrants appropriate to the barrier to be permeated are used in the formulation. Such penetrants are generally known in the art.

[0298] For oral administration, the compounds can be formulated readily by combining the active compounds with pharmaceutically acceptable carriers well known in the art. Such carriers enable the compounds of the invention to be formulated as tablets, pills, dragees, capsules, liquids, gels, syrups, slurries, suspensions and the like, for oral ingestion by a patient to be treated. Pharmaceutical preparations for oral use can be obtained from a solid excipient, optionally grinding a resulting mixture, and processing the mixture of granules, after adding suitable auxiliaries, if desired, to obtain tablets or dragee cores. Suitable excipients are, in particular, fillers such as sugars, including lactose, sucrose, mannitol, or sorbitol; cellulose preparations such as, for example, maize starch, wheat starch, rice starch, potato starch, gelatin, gum tragacanth, methyl cellulose, hydroxypropylmethyl-cellulose, sodium carboxymethylcellulose, and/or polyvinylpyrrolidone (PVP). If desired, disintegrating agents may be added, such as the cross-linked polyvinyl pyrrolidone, agar, or alginic acid or a salt thereof such as sodium alginate. Dragee cores are provided with suitable coatings. For this purpose, concentrated sugar solutions may be used, which may optionally contain gum arabic, talc, polyvinyl pyrrolidone, carbopol gel, polyethylene glycol, and/or titanium dioxide, lacquer solutions, and suitable organic solvents or solvent mixtures. Dyestuffs or pigments may be added to the tablets or dragee coatings for identification or to characterize different combinations of active compound doses.

[0299] Pharmaceutical preparations which can be used orally include push-fit capsules made of gelatin, as well as soft, sealed capsules made of gelatin and a plasticizer, such as glycerol or sorbitol. The push-fit capsules can contain the active ingredients in admixture with filler such as lactose, binders such as starches, and/or lubricants such as talc or magnesium stearate and, optionally, stabilizers. In soft capsules, the active compounds may be dissolved or suspended in suitable liquids, such as fatty oils, liquid paraffin, or liquid polyethylene glycols. In addition, stabilizers may be added. All formulations for oral administration should be in dosages suitable for such administration. For buccal administration, the compositions may take the form of tablets or lozenges formulated in conventional manner.

[0300] For administration by inhalation, the compounds for use according to the present invention are conveniently delivered in the form of an aerosol spray presentation from pressurized packs or a nebuliser, with the use of a suitable propellant, e.g., dichlorodifluoromethane, trichlorofluoromethane, dichlorotetrafluoroethane, carbon dioxide or other suitable gas. In the case of a pressurized aerosol the dosage unit may be determined by providing a valve to deliver a metered amount. Capsules and cartridges of, e.g., gelatin for use in an inhaler or insufflator may be formulated containing a powder mix of the compound and a suitable powder base such as lactose or starch. The compounds may be formulated for parenteral administration by injection, e.g., by bolus injection or continuous infusion. Formulations for injection may be presented in unit dosage form, e.g., in ampules or in multi-dose containers, with an added preservative. The compositions may take such forms as suspensions, solutions or emulsions in oily or aqueous vehicles, and may contain formulatory agents such as suspending, stabilizing and/or dispersing agents.

[0301] Pharmaceutical formulations for parenteral administration include aqueous solutions of the active compounds in water-soluble form. Additionally, suspensions of the active compounds may be prepared as appropriate oily injection suspensions. Suitable lipophilic solvents or vehicles include fatty oils such as sesame oil, or synthetic fatty acid esters, such as ethyl oleate or triglycerides, or liposomes. Aqueous injection suspensions may contain substances which increase the viscosity of the suspension, such as sodium carboxymethyl cellulose, sorbitol, or dextran. Optionally, the suspension may also contain suitable stabilizers or agents which increase the solubility of the compounds to allow for the preparation of highly concentrated solutions. Alternatively, the active ingredient may be in powder form for constitution with a suitable vehicle, e.g., sterile pyrogen-free water, before use.

[0302] The compounds may also be formulated in rectal compositions such as suppositories or retention enemas, e.g., containing conventional suppository bases such as cocoa butter or other glycerides. In addition to the formulations described previously, the compounds may also be formulated as a depot preparation. Such long acting formulations may be administered by implantation (for example subcutaneously or intramuscularly) or by intramuscular injection. Thus, for example, the compounds may be formulated with suitable polymeric or hydrophobic materials (for example as an emulsion in an acceptable oil) or ion exchange resins, or as sparingly soluble derivatives, for example, as a sparingly soluble salt.

[0303] A pharmaceutical carrier for the hydrophobic compounds of the invention is a co-solvent system comprising benzyl alcohol, a nonpolar surfactant, a water-miscible organic polymer, and an aqueous phase. The co-solvent system may be the VPD co-solvent system. VPD is a solution of 3% w/v benzyl alcohol, 8% w/v of the nonpolar surfactant polysorbate 80, and 65% w/v polyethylene glycol 300, made up to volume in absolute ethanol. The VPD co-solvent system (VPD:5W) consists of VPD diluted 1:1 with a 5% dextrose in water solution. This co-solvent system dissolves hydrophobic compounds well, and itself produces low toxicity upon systemic administration. Naturally, the proportions of a co-solvent system may be varied considerably without destroying its solubility and toxicity characteristics. Furthermore, the identity of the co-solvent components may be varied: for example, other low-toxicity nonpolar surfactants may be used instead of polysorbate 80; the fraction size of polyethylene glycol may be varied; other biocompatible polymers may replace polyethylene glycol, e.g. polyvinyl pyrrolidone; and other sugars or polysaccharides may substitute for dextrose. Alternatively, other delivery systems for hydrophobic pharmaceutical compounds may be employed. Liposomes and emulsions are well known examples of delivery vehicles or carriers for hydrophobic drugs. Certain organic solvents such as dimethylsulfoxide also may be employed, although usually at the cost of greater toxicity. Additionally, the compounds may be delivered using a sustained-release system, such as semipermeable matrices of solid hydrophobic polymers containing the therapeutic agent. Various types of sustained-release materials have been established and are well known by those skilled in the art. Sustained-release capsules may, depending on their chemical nature, release the compounds for a few weeks up to over 100 days. Depending on the chemical nature and the biological stability of the therapeutic reagent, additional strategies for protein or other active ingredient stabilization may be employed.

[0304] The pharmaceutical compositions also may comprise suitable solid or gel phase carriers or excipients. Examples of such carriers or excipients include but are not limited to calcium carbonate, calcium phosphate, various sugars, starches, cellulose derivatives, gelatin, and polymers such as polyethylene glycols. Many of the active ingredients of the invention may be provided as salts with pharmaceutically compatible counter ions. Such pharmaceutically acceptable base addition salts are those salts which retain the biological effectiveness and properties of the free acids and which are obtained by reaction with inorganic or organic bases such as sodium hydroxide, magnesium hydroxide, ammonia, trialkylamine, dialkylamine, monoalkylamine, dibasic amino acids, sodium acetate, potassium benzoate, triethanol amine and the like.

[0305] The pharmaceutical composition of the invention may be in the form of a complex of the protein(s) or other active ingredient(s) of present invention along with protein or peptide antigens. The protein and/or peptide antigen will deliver a stimulatory signal to both B and T lymphocytes. B lymphocytes will respond to antigen through their surface immunoglobulin receptor. T lymphocytes will respond to antigen through the T cell receptor (TCR) following presentation of the antigen by MHC proteins. MHC and structurally related proteins including those encoded by class I and class II MHC genes on host cells will serve to present the peptide antigen(s) to T lymphocytes. The antigen components could also be supplied as purified MHC-peptide complexes alone or with co-stimulatory molecules that can directly signal T cells. Alternatively antibodies able to bind surface immunoglobulin and other molecules on B cells as well as antibodies able to bind the TCR and other molecules on T cells can be combined with the pharmaceutical composition of the invention.

[0306] The pharmaceutical composition of the invention may be in the form of a liposome in which protein of the present invention is combined, in addition to other pharmaceutically acceptable carriers, with amphipathic agents such as lipids which exist in aggregated form as micelles, insoluble monolayers, liquid crystals, or lamellar layers in aqueous solution. Suitable lipids for liposomal formulation include, without limitation, monoglycerides, diglycerides, sulfatides, lysolecithins, phospholipids, saponin, bile acids, and the like. Preparation of such liposomal formulations is within the level of skill in the art, as disclosed, for example, in U.S. Pat. Nos. 4,235,871; 4,501,728; 4,837,028; and 4,737,323, all of which are incorporated herein by reference.

[0307] The amount of protein or other active ingredient of the present invention in the pharmaceutical composition of the present invention will depend upon the nature and severity of the condition being treated, and on the nature of prior treatments which the patient has undergone. Ultimately, the attending physician will decide the amount of protein or other active ingredient of the present invention with which to treat each individual patient. Initially, the attending physician will administer low doses of protein or other active ingredient of the present invention and observe the patient's response. Larger doses of protein or other active ingredient of the present invention may be administered until the optimal therapeutic effect is obtained for the patient, and at that point the dosage is not increased further. It is contemplated that the various pharmaceutical compositions used to practice the method of the present invention should contain about 0.01 μg to about 100 mg (preferably about 0.1 μg to about 10 mg, more preferably about 0.1 μg to about 1 mg) of protein or other active ingredient of the present invention per kg body weight. For compositions of the present invention which are useful for bone, cartilage, tendon or ligament regeneration, the therapeutic method includes administering the composition topically, systematically, or locally as an implant or device. When administered, the therapeutic composition for use in this invention is, of course, in a pyrogen-free, physiologically acceptable form. Further, the composition may desirably be encapsulated or injected in a viscous form for delivery to the site of bone, cartilage or tissue damage. Topical administration may be suitable for wound healing and tissue repair. Therapeutically useful agents other than a protein or other active ingredient of the invention which may also optionally be included in the composition as described above, may alternatively or additionally, be administered simultaneously or sequentially with the composition in the methods of the invention. Preferably for bone and/or cartilage formation, the composition would include a matrix capable of delivering the protein-containing or other active ingredient-containing composition to the site of bone and/or cartilage damage, providing a structure for the developing bone and cartilage and optimally capable of being resorbed into the body. Such matrices may be formed of materials presently in use for other implanted medical applications.

[0308] The choice of matrix material is based on biocompatibility, biodegradability, mechanical properties, cosmetic appearance and interface properties. The particular application of the compositions will define the appropriate formulation. Potential matrices for the compositions may be biodegradable and chemically defined calcium sulfate, tricalcium phosphate, hydroxyapatite, polylactic acid, polyglycolic acid and polyanhydrides. Other potential materials are biodegradable and biologically well-defined, such as bone or dermal collagen. Further matrices are comprised of pure proteins or extracellular matrix components. Other potential matrices are nonbiodegradable and chemically defined, such as sintered hydroxyapatite, bioglass, aluminates, or other ceramics. Matrices may be comprised of combinations of any of the above mentioned types of material, such as polylactic acid and hydroxyapatite or collagen and tricalcium phosphate. The bioceramics may be altered in composition, such as in calcium-aluminate-phosphate and processing to alter pore size, particle size, particle shape, and biodegradability. Presently preferred is a 50:50 (mole weight) copolymer of lactic acid and glycolic acid in the form of porous particles having diameters ranging from 150 to 800 microns. In some applications, it will be useful to utilize a sequestering agent, such as carboxymethyl cellulose or autologous blood clot, to prevent the protein compositions from disassociating from the matrix.

[0309] A preferred family of sequestering agents is cellulosic materials such as alkylcelluloses (including hydroxyalkylcelluloses), including methylcellulose, ethylcellulose, hydroxyethylcellulose, hydroxypropylcellulose, hydroxypropyl-methylcellulose, and carboxymethylcellulose, the most preferred being cationic salts of carboxymethylcellulose (CMC). Other preferred sequestering agents include hyaluronic acid, sodium alginate, poly(ethylene glycol), polyoxyethylene oxide, carboxyvinyl polymer and poly(vinyl alcohol). The amount of sequestering agent useful herein is 0.5-20 wt %, preferably 1-10 wt % based on total formulation weight, which represents the amount necessary to prevent desorption of the protein from the polymer matrix and to provide appropriate handling of the composition, yet not so much that the progenitor cells are prevented from infiltrating the matrix, thereby providing the protein the opportunity to assist the osteogenic activity of the progenitor cells. In further compositions, proteins or other active ingredients of the invention may be combined with other agents beneficial to the treatment of the bone and/or cartilage defect, wound, or tissue in question. These agents include various growth factors such as epidermal growth factor (EGF), platelet derived growth factor (PDGF), transforming growth factors (TGF-α and TGF-β), and insulin-like growth factor (IGF).

[0310] The therapeutic compositions are also presently valuable for veterinary applications. Particularly domestic animals and thoroughbred horses, in addition to humans, are desired patients for such treatment with proteins or other active ingredients of the present invention. The dosage regimen of a protein-containing pharmaceutical composition to be used in tissue regeneration will be determined by the attending physician considering various factors which modify the action of the proteins, e.g., amount of tissue weight desired to be formed, the site of damage, the condition of the damaged tissue, the size of a wound, type of damaged tissue (e.g., bone), the patient's age, sex, and diet, the severity of any infection, time of administration and other clinical factors. The dosage may vary with the type of matrix used in the reconstitution and with inclusion of other proteins in the pharmaceutical composition. For example, the addition of other known growth factors, such as IGF I (insulin like growth factor I), to the final composition, may also effect the dosage. Progress can be monitored by periodic assessment of tissue/bone growth and/or repair, for example, X-rays, histomorphometric determinations and tetracycline labeling.

[0311] Polynucleotides of the present invention can also be used for gene therapy. Such polynucleotides can be introduced either in vivo or ex vivo into cells for expression in a mammalian subject. Polynucleotides of the invention may also be administered by other known methods for introduction of nucleic acid into a cell or organism (including, without limitation, in the form of viral vectors or naked DNA). Cells may also be cultured ex vivo in the presence of proteins of the present invention in order to proliferate or to produce a desired effect on or activity in such cells. Treated cells can then be introduced in vivo for therapeutic purposes.

[0312] 4.12.3 Effective Dosage

[0313] Pharmaceutical compositions suitable for use in the present invention include compositions wherein the active ingredients are contained in an effective amount to achieve its intended purpose. More specifically, a therapeutically effective amount means an amount effective to prevent development of or to alleviate the existing symptoms of the subject being treated. Determination of the effective amount is well within the capability of those skilled in the art, especially in light of the detailed disclosure provided herein. For any compound used in the method of the invention, the therapeutically effective dose can be estimated initially from appropriate in vitro assays. For example, a dose can be formulated in animal models to achieve a circulating concentration range that can be used to more accurately determine useful doses in humans. For example, a dose can be formulated in animal models to achieve a circulating concentration range that includes the IC₅₀ as determined in cell culture (i.e., the concentration of the test compound which achieves a half-maximal inhibition of the protein's biological activity). Such information can be used to more accurately determine useful doses in humans.

[0314] A therapeutically effective dose refers to that amount of the compound that results in amelioration of symptoms or a prolongation of survival in a patient. Toxicity and therapeutic efficacy of such compounds can be determined by standard pharmaceutical procedures in cell cultures or experimental animals, e.g., for determining the LD₅₀ (the dose lethal to 50% of the population) and the ED₅₀ (the dose therapeutically effective in 50% of the population). The dose ratio between toxic and therapeutic effects is the therapeutic index and it can be expressed as the ratio between LD₅₀ and ED₅₀. Compounds which exhibit high therapeutic indices are preferred. The data obtained from these cell culture assays and animal studies can be used in formulating a range of dosage for use in human. The dosage of such compounds lies preferably within a range of circulating concentrations that include the ED₅₀ with little or no toxicity. The dosage may vary within this range depending upon the dosage form employed and the route of administration utilized. The exact formulation, route of administration and dosage can be chosen by the individual physician in view of the patient's condition. See, e.g., Fingl et al., 1975, in “The Pharmacological Basis of Therapeutics”, Ch. 1 p.1. Dosage amount and interval may be adjusted individually to provide plasma levels of the active moiety which are sufficient to maintain the desired effects, or minimal effective concentration (MEC). The MEC will vary for each compound but can be estimated from in vitro data. Dosages necessary to achieve the MEC will depend on individual characteristics and route of administration. However, HPLC assays or bioassays can be used to determine plasma concentrations.

[0315] Dosage intervals can also be determined using MEC value. Compounds should be administered using a regimen which maintains plasma levels above the MEC for 10-90% of the time, preferably between 30-90% and most preferably between 50-90%. In cases of local administration or selective uptake, the effective local concentration of the drug may not be related to plasma concentration.

[0316] An exemplary dosage regimen for polypeptides or other compositions of the invention will be in the range of about 0.01 μg/kg to 100 mg/kg of body weight daily, with the preferred dose being about 0.1 μg/kg to 25 mg/kg of patient body weight daily, varying in adults and children. Dosing may be once daily, or equivalent doses may be delivered at longer or shorter intervals.

[0317] The amount of composition administered will, of course, be dependent on the subject being treated, on the subject's age and weight, the severity of the affliction, the manner of administration and the judgment of the prescribing physician.

[0318] 4.12.4 Packaging

[0319] The compositions may, if desired, be presented in a pack or dispenser device which may contain one or more unit dosage forms containing the active ingredient. The pack may, for example, comprise metal or plastic foil, such as a blister pack. The pack or dispenser device may be accompanied by instructions for administration. Compositions comprising a compound of the invention formulated in a compatible pharmaceutical carrier may also be prepared, placed in an appropriate container, and labeled for treatment of an indicated condition.

[0320] 4.13 Antibodies

[0321] Also included in the invention are antibodies to proteins, or fragments of proteins of the invention. The term “antibody” as used herein refers to immunoglobulin molecules and immunologically active portions of immunoglobulin (Ig) molecules, i.e., molecules that contain an antigen binding site that specifically binds (immunoreacts with) an antigen. Such antibodies include, but are not limited to, polyclonal, monoclonal, chimeric, single chain, F_{ab}, F_{ab′} and F_{(ab′)2} fragments, and an F_{ab} expression library. In general, an antibody molecule obtained from humans relates to any of the classes IgG, IgM, IgA, IgE and IgD, which differ from one another by the nature of the heavy chain present in the molecule. Certain classes have subclasses as well, such as IgG₁, IgG₂, and others. Furthermore, in humans, the light chain may be a kappa chain or a lambda chain. Reference herein to antibodies includes a reference to all such classes, subclasses and types of human antibody species.

[0322] An isolated related protein of the invention may be intended to serve as an antigen, or a portion or fragment thereof, and additionally can be used as an immunogen to generate antibodies that immunospecifically bind the antigen, using standard techniques for polyclonal and monoclonal antibody preparation. The full-length protein can be used or, alternatively, the invention provides antigenic peptide fragments of the antigen for use as immunogens. An antigenic peptide fragment comprises at least 6 amino acid residues of the amino acid sequence of the full length protein, such as an amino acid sequence shown in SEQ ID NO:985, and encompasses an epitope thereof such that an antibody raised against the peptide forms a specific immune complex with the full length protein or with any fragment that contains the epitope. Preferably, the antigenic peptide comprises at least 10 amino acid residues, or at least 15 amino acid residues, or at least 20 amino acid residues, or at least 30 amino acid residues. Preferred epitopes encompassed by the antigenic peptide are regions of the protein that are located on its surface; commonly these are hydrophilic regions.

[0323] In certain embodiments of the invention, at least one epitope encompassed by the antigenic peptide is a region of -related protein that is located on the surface of the protein, e.g., a hydrophilic region. A hydrophobicity analysis of the human related protein sequence will indicate which regions of a related protein are particularly hydrophilic and, therefore, are likely to encode surface residues useful for targeting antibody production. As a means for targeting antibody production, hydropathy plots showing regions of hydrophilicity and hydrophobicity may be generated by any method well known in the art, including, for example, the Kyte Doolittle or the Hopp Woods methods, either with or without Fourier transformation. See, e.g., Hopp and Woods, 1981, Proc. Nat. Acad. Sci. USA 78: 3824-3828; Kyte and Doolittle 1982, J. Mol. Biol. 157: 105-142, each of which is incorporated herein by reference in its entirety. Antibodies that are specific for one or more domains within an antigenic protein, or derivatives, fragments, analogs or homologs thereof, are also provided herein.

[0324] A protein of the invention, or a derivative, fragment, analog, homolog or ortholog thereof, may be utilized as an immunogen in the generation of antibodies that immunospecifically bind these protein components.

[0325] Various procedures known within the art may be used for the production of polyclonal or monoclonal antibodies directed against a protein of the invention, or against derivatives, fragments, analogs homologs or orthologs thereof (see, for example, Antibodies: A Laboratory Manual, Harlow E, and Lane D, 198S, Cold Spring Harbor Laboratory Press, Cold Spring Harbor, N.Y., incorporated herein by reference). Some of these antibodies are discussed below.

[0326] 5.13.1 Polyclonal Antibodies

[0327] For the production of polyclonal antibodies, various suitable host animals (e.g., rabbit, goat, mouse or other mammal) may be immunized by one or more injections with the native protein, a synthetic variant thereof, or a derivative of the foregoing. An appropriate immunogenic preparation can contain, for example, the naturally occurring immunogenic protein, a chemically synthesized polypeptide representing the immunogenic protein, or a recombinantly expressed immunogenic protein. Furthermore, the protein may be conjugated to a second protein known to be immunogenic in the mammal being immunized. Examples of such immunogenic proteins include but are not limited to keyhole limpet hemocyanin, serum albumin, bovine thyroglobulin, and soybean trypsin inhibitor. The preparation can further include an adjuvant. Various adjuvants used to increase the immunological response include, but are not limited to, Freund's (complete and incomplete), mineral gels (e.g., aluminum hydroxide), surface active substances (e.g., lysolecithin, pluronic polyols, polyanions, peptides, oil emulsions, dinitrophenol, etc.), adjuvants usable in humans such as Bacille Calmette-Guerin and Corynebacterium parvum, or similar immunostimulatory agents. Additional examples of adjuvants which can be employed include MPTL-TDM adjuvant (monophosphoryl Lipid A, synthetic trehalose dicorynomycolate).

[0328] The polyclonal antibody molecules directed against the immunogenic protein can be isolated from the manual (e.g., from the blood) and further purified by well known techniques, such as affinity chromatography using protein A or protein G, which provide primarily the IgG fraction of immune serum. Subsequently, or alternatively, the specific antigen which is the target of the immunoglobulin sought, or an epitope thereof, may be immobilized on a column to purify the immune specific antibody by immunoaffinity chromatography. Purification of immunoglobulins is discussed, for example, by D. Wilkinson (The Scientist, published by The Scientist, Inc., Philadelphia Pa., Vol. 14, No. 8 (Apr. 17, 2000), pp. 25-28).

[0329] 5.13.2 Monoclonal Antibodies

[0330] The term “monoclonal antibody” (MAb) or “monoclonal antibody composition”, as used herein, refers to a population of antibody molecules that contain only one molecular species of antibody molecule consisting of a unique light chain gene product and a unique heavy chain gene product. In particular, the complementarity determining regions (CDRs) of the monoclonal antibody are identical in all the molecules of the population. MAbs thus contain an antigen binding site capable of immunoreacting with a particular epitope of the antigen characterized by a unique binding affinity for it.

[0331] Monoclonal antibodies can be prepared using hybridoma methods, such as those described by Kohler and Milstein, Nature, 256:495 (1975). In a hybridoma method, a mouse, hamster, or other appropriate host animal, is typically immunized with an immunizing agent to elicit lymphocytes that produce or are capable of producing antibodies that will specifically bind to the immunizing agent. Alternatively, the lymphocytes can be immunized in vitro. The immunizing agent will typically include the protein antigen, a fragment thereof or a fusion protein thereof. Generally, either peripheral blood lymphocytes are used if cells of human origin are desired, or spleen cells or lymph node cells are used if non-human mammalian sources are desired. The lymphocytes are then fused with an immortalized cell line using a suitable fusing agent, such as polyethylene glycol, to form a hybridoma cell (Goding, Monoclonal Antibodies: Principles and Practice, Academic Press, (1986) pp. 59-103). Immortalized cell lines are usually transformed mammalian cells, particularly myeloma cells of rodent, bovine and human origin. Usually, rat or mouse myeloma cell lines are employed. The hybridoma cells can be cultured in a suitable culture medium that preferably contains one or more substances that inhibit the growth or survival of the unfused, immortalized cells. For example, if the parental cells lack the enzyme hypoxanthine guanine phosphoribosyl transferase (HGPRT or HPRT), the culture medium for the hybridomas typically will include hypoxanthine, aminopterin, and thymidine (“HAT medium”), which substances prevent the growth of HGPRT-deficient cells.

[0332] Preferred immortalized cell lines are those that fuse efficiently, support stable high level expression of antibody by the selected antibody-producing cells, and are sensitive to a medium such as HAT medium. More preferred immortalized cell lines are murine myeloma lines, which can be obtained, for instance, from the Salk Institute Cell Distribution Center, San Diego, Calif. and the American Type Culture Collection, Manassas, Va. Human myeloma and mouse-human heteromyeloma cell lines also have been described for the production of human monoclonal antibodies (Kozbor, J. Immunol. 133:3001 (1984); Brodeur et al., Monoclonal Antibody Production Techniques and Applications, Marcel Dekker, Inc., New York, (1987) pp. 51-63).

[0333] The culture medium in which the hybridoma cells are cultured can then be assayed for the presence of monoclonal antibodies directed against the antigen. Preferably, the binding specificity of monoclonal antibodies produced by the hybridoma cells is determined by immunoprecipitation or by an in vitro binding assay, such as radioimmunoassay (RIA) or enzyme-linked immunoabsorbent assay (ELISA). Such techniques and assays are known in the art. The binding affinity of the monoclonal antibody can, for example, be determined by the Scatchard analysis of Munson and Pollard, Anal. Biochem., 107:220 (1980). Preferably, antibodies having a high degree of specificity and a high binding affinity for the target antigen are isolated.

[0334] After the desired hybridoma cells are identified, the clones can be subcloned by limiting dilution procedures and grown by standard methods. Suitable culture media for this purpose include, for example, Dulbecco's Modified Eagle's Medium and RPMI-1640 medium. Alternatively, the hybridoma cells can be grown in vivo as ascites in a mammal.

[0335] The monoclonal antibodies secreted by the subclones can be isolated or purified from the culture medium or ascites fluid by conventional immunoglobulin purification procedures such as, for example, protein A-Sepharose, hydroxylapatite chromatography, gel electrophoresis, dialysis, or affinity chromatography.

[0336] The monoclonal antibodies can also be made by recombinant DNA methods, such as those described in U.S. Pat. No. 4,816,567. DNA encoding the monoclonal antibodies of the invention can be readily isolated and sequenced using conventional procedures (e.g., by using oligonucleotide probes that are capable of binding specifically to genes encoding the heavy and light chains of murine antibodies). The hybridoma cells of the invention serve as a preferred source of such DNA. Once isolated, the DNA can be placed into expression vectors, which are then transfected into host cells such as simian COS cells, Chinese hamster ovary (CHO) cells, or myeloma cells that do not otherwise produce immunoglobulin protein, to obtain the synthesis of monoclonal antibodies in the recombinant host cells. The DNA also can be modified, for example, by substituting the coding sequence for human heavy and light chain constant domains in place of the homologous murine sequences (U.S. Pat. No. 4,816,567; Morrison, Nature 368, 812-13 (1994)) or by covalently joining to the immunoglobulin coding sequence all or part of the coding sequence for a non-immunoglobulin polypeptide. Such a non-immunoglobulin polypeptide can be substituted for the constant domains of an antibody of the invention, or can be substituted for the variable domains of one antigen-combining site of an antibody of the invention to create a chimeric bivalent antibody.

[0337] 5.13.2 Humanized Antibodies

[0338] The antibodies directed against the protein antigens of the invention can further comprise humanized antibodies or human antibodies. These antibodies are suitable for administration to humans without engendering an immune response by the human against the administered immunoglobulin. Humanized forms of antibodies are chimeric immunoglobulins, immunoglobulin chains or fragments thereof (such as Fv, Fab, Fab′, F(ab′)₂ or other antigen-binding subsequences of antibodies) that are principally comprised of the sequence of a human immunoglobulin, and contain minimal sequence derived from a non-human immunoglobulin. Humanization can be performed following the method of Winter and co-workers (Jones et al., Nature, 321:522-525 (1986); Riechmann et al., Nature, 332:323-327 (1988); Verhoeyen et al., Science, 239:1534-1536 (1988)), by substituting rodent CDRs or CDR sequences for the corresponding sequences of a human antibody. (See also U.S. Pat. No. 5,225,539.) In some instances, Fv framework residues of the human immunoglobulin are replaced by corresponding non-human residues. Humanized antibodies can also comprise residues which are found neither in the recipient antibody nor in the imported CDR or framework sequences. In general, the humanized antibody will comprise substantially all of at least one, and typically two, variable domains, in which all or substantially all of the CDR regions correspond to those of a non-human immunoglobulin and all or substantially all of the framework regions are those of a human immuoglobulin consensus sequence. The humanized antibody optimally also will comprise at least a portion of an immunoglobulin constant region (Fc), typically that of a human immunoglobulin (Jones et al., 1986; Riechmann et al., 1988; and Presta, Curr. Op. Struct. Biol., 2:593-596 (1992)).

[0339] 5.13.3 Human Antibodies

[0340] Fully human antibodies relate to antibody molecules in which essentially the entire sequences of both the light chain and the heavy chain, including the CDRs, arise from human genes. Such antibodies are termed “human antibodies”, or “fully human antibodies” herein. Human monoclonal antibodies can be prepared by the trioma technique; the human B-cell hybridoma technique (see Kozbor, et al., 1983 Immunol Today 4: 72) and the EBV hybridoma technique to produce human monoclonal antibodies (see Cole, et al., 1985 In: MONOCLONAL ANTIBODIES AND CANCER THERAPY, Alan R. Liss, Inc., pp. 77-96). Human monoclonal antibodies may be utilized in the practice of the present invention and may be produced by using human hybridomas (see Cote, et al., 1983. Proc Natl Acad Sci USA 80: 2026-2030) or by transforming human B-cells with Epstein Barr Virus in vitro (see Cole, et al., 1985 In: MONOCLONAL ANTIBODIES AND CANCER THERAPY, Alan R. Liss, Inc., pp. 77-96).

[0341] In addition, human antibodies can also be produced using additional techniques, including phage display libraries (Hoogenboom and Winter, J. Mol. Biol., 227:381 (1991); Marks et al., J. Mol. Biol., 222:581 (1991)). Similarly, human antibodies can be made by introducing human immunoglobulin loci into transgenic animals, e.g., mice in which the endogenous immunoglobulin genes have been partially or completely inactivated. Upon challenge, human antibody production is observed, which closely resembles that seen in humans in all respects, including gene rearrangement, assembly, and antibody repertoire. This approach is described, for example, in U.S. Pat. Nos. 5,545,807; 5,545,806; 5,569,825; 5,625,126; 5,633,425; 5,661,016, and in Marks et al. (Bio/Technology 10, 779-783 (1992)); Lonberg et al. (Nature 368 856-859 (1994)); Morrison (Nature 368, 812-13 (1994)); Fishwild et al, (Nature Biotechnology 14, 845-51 (1996)); Neuberger (Nature Biotechnology 14, 826 (1996)); and Lonberg and Huszar (Intern. Rev. Immunol. 13 65-93 (1995)).

[0342] Human antibodies may additionally be produced using transgenic nonhuman animals which are modified so as to produce fully human antibodies rather than the animal's endogenous antibodies in response to challenge by an antigen. (See PCT publication WO94/02602). The endogenous genes encoding the heavy and light immunoglobulin chains in the nonhuman host have been incapacitated, and active loci encoding human heavy and light chain immunoglobulins are inserted into the host's genome. The human genes are incorporated, for example, using yeast artificial chromosomes containing the requisite human DNA segments. An animal which provides all the desired modifications is then obtained as progeny by crossbreeding intermediate transgenic animals containing fewer than the full complement of the modifications. The preferred embodiment of such a nonhuman animal is a mouse, and is termed the Xenomouse™ as disclosed in PCT publications WO 96/33735 and WO 96/34096. This animal produces B cells which secrete fully human immunoglobulins. The antibodies can be obtained directly from the animal after immunization with an immunogen of interest, as, for example, a preparation of a polyclonal antibody, or alternatively from immortalized B cells derived from the animal, such as hybridomas producing monoclonal antibodies. Additionally, the genes encoding the immunoglobulins with human variable regions can be recovered and expressed to obtain the antibodies directly, or can be further modified to obtain analogs of antibodies such as, for example, single chain Fv molecules.

[0343] An example of a method of producing a nonhuman host, exemplified as a mouse, lacking expression of an endogenous immunoglobulin heavy chain is disclosed in U.S. Pat. No. 5,939,598. It can be obtained by a method including deleting the J segment genes from at least one endogenous heavy chain locus in an embryonic stem cell to prevent rearrangement of the locus and to prevent formation of a transcript of a rearranged immunoglobulin heavy chain locus, the deletion being effected by a targeting vector containing a gene encoding a selectable marker; and producing from the embryonic stem cell a transgenic mouse whose somatic and germ cells contain the gene encoding the selectable marker.

[0344] A method for producing an antibody of interest, such as a human antibody, is disclosed in U.S. Pat. No. 5,916,771. It includes introducing an expression vector that contains a nucleotide sequence encoding a heavy chain into one mammalian host cell in culture, introducing an expression vector containing a nucleotide sequence encoding a light chain into another mammalian host cell, and fusing the two cells to form a hybrid cell. The hybrid cell expresses an antibody containing the heavy chain and the light chain.

[0345] In a further improvement on this procedure, a method for identifying a clinically relevant epitope on an immunogen, and a correlative method for selecting an antibody that binds immunospecifically to the relevant epitope with high affinity, are disclosed in PCT publication WO 99/53049.

[0346] 5.13.4 F_{ab} Fragments and Single Chain Antibodies

[0347] According to the invention, techniques can be adapted for the production of single-chain antibodies specific to an antigenic protein of the invention (see e.g., U.S. Pat. No. 4,946,778). In addition, methods can be adapted for the construction of F_{ab} expression libraries (see e.g., Huse, et al., 1989 Science 246: 1275-1281) to allow rapid and effective identification of monoclonal F_{ab} fragments with the desired specificity for a protein or derivatives, fragments, analogs or homologs thereof. Antibody fragments that contain the idiotypes to a protein antigen may be produced by techniques known in the art including, but not limited to: (i) an F_{(ab′)2} fragment produced by pepsin digestion of an antibody molecule; (ii) an F_{ab} fragment generated by reducing the disulfide bridges of an F_{(ab′)2} fragment; (iii) an F_{ab} fragment generated by the treatment of the antibody molecule with papain and a reducing agent and (iv) Fᵥ fragments.

[0348] 5.13.5 Bispecific Antibodies

[0349] Bispecific antibodies are monoclonal, preferably human or humanized, antibodies that have binding specificities for at least two different antigens. In the present case, one of the binding specificities is for an antigenic protein of the invention. The second binding target is any other antigen, and advantageously is a cell-surface protein or receptor or receptor subunit.

[0350] Methods for making bispecific antibodies are known in the art. Traditionally, the recombinant production of bispecific antibodies is based on the co-expression of two immunoglobulin heavy-chain/light-chain pairs, where the two heavy chains have different specificities (Milstein and Cuello, Nature, 305:537-539 (1983)). Because of the random assortment of immunoglobulin heavy and light chains, these hybridomas (quadromas) produce a potential mixture of ten different antibody molecules, of which only one has the correct bispecific structure. The purification of the correct molecule is usually accomplished by affinity chromatography steps. Similar procedures are disclosed in WO 93/08829, published 13 May 1993, and in Traunecker et al., 1991 EMBO J., 10:3655-3659.

[0351] Antibody variable domains with the desired binding specificities (antibody-antigen combining sites) can be fused to immunoglobulin constant domain sequences. The fusion preferably is with an immunoglobulin heavy-chain constant domain, comprising at least part of the hinge, CH2, and CH3 regions. It is preferred to have the first heavy-chain constant region (CH1) containing the site necessary for light-chain binding present in at least one of the fusions. DNAs encoding the immunoglobulin heavy-chain fusions and, if desired, the immunoglobulin light chain, are inserted into separate expression vectors, and are co-transfected into a suitable host organism. For further details of generating bispecific antibodies see, for example, Suresh et al., Methods in Enzymology, 121:210 (1986).

[0352] According to another approach described in WO 96/27011, the interface between a pair of antibody molecules can be engineered to maximize the percentage of heterodimers which are recovered from recombinant cell culture. The preferred interface comprises at least a part of the CH3 region of an antibody constant domain. In this method, one or more small amino acid side chains from the interface of the first antibody molecule are replaced with larger side chains (e.g. tyrosine or tryptophan). Compensatory “cavities” of identical or similar size to the large side chain(s) are created on the interface of the second antibody molecule by replacing large amino acid side chains with smaller ones (e.g. alanine or threonine). This provides a mechanism for increasing the yield of the heterodimer over other unwanted end-products such as homodimers.

[0353] Bispecific antibodies can be prepared as full length antibodies or antibody fragments (e.g. F(ab′)₂ bispecific antibodies). Techniques for generating bispecific antibodies from antibody fragments have been described in the literature. For example, bispecific antibodies can be prepared using chemical linkage. Brennan et al., Science 229:81 (1985) describe a procedure wherein intact antibodies are proteolytically cleaved to generate F(ab′)₂ fragments. These fragments are reduced in the presence of the dithiol complexing agent sodium arsenite to stabilize vicinal dithiols and prevent intermolecular disulfide formation. The Fab′ fragments generated are then converted to thionitrobenzoate (TNB) derivatives. One of the Fab′-TNB derivatives is then reconverted to the Fab′-thiol by reduction with mercaptoethylamine and is mixed with an equimolar amount of the other Fab′-TNB derivative to form the bispecific antibody. The bispecific antibodies produced can be used as agents for the selective immunobilization of enzymes.

[0354] Additionally, Fab′ fragments can be directly recovered from E. coli and chemically coupled to form bispecific antibodies. Shalaby et al., J. Exp. Med. 175:217-225 (1992) describe the production of a fully humanized bispecific antibody F(ab′)₂ molecule. Each Fab′ fragment was separately secreted from E. coli and subjected to directed chemical coupling in vitro to form the bispecific antibody. The bispecific antibody thus formed was able to bind to cells overexpressing the ErbB2 receptor and normal human T cells, as well as trigger the lytic activity of human cytotoxic lymphocytes against human breast tumor targets.

[0355] Various techniques for making and isolating bispecific antibody fragments directly from recombinant cell culture have also been described. For example, bispecific antibodies have been produced using leucine zippers. Kostelny et al., J. Immunol. 148(5):1547-1553 (1992). The leucine zipper peptides from the Fos and Jun proteins were linked to the Fab′ portions of two different antibodies by gene fusion. The antibody homodimers were reduced at the hinge region to form monomers and then re-oxidized to form the antibody heterodimers. This method can also be utilized for the production of antibody homodimers. The “diabody” technology described by Hollinger et al., Proc. Natl. Acad. Sci. USA 90:6444-6448 (1993) has provided an alternative mechanism for making bispecific antibody fragments. The fragments comprise a heavy-chain variable domain (V_{H}) connected to a light-chain variable domain (V_{L}) by a linker which is too short to allow pairing between the two domains on the same chain. Accordingly, the V_{H} and V_{L} domains of one fragment are forced to pair with the complementary V_{L} and V_{H} domains of another fragment, thereby forming two antigen-binding sites. Another strategy for making bispecific antibody fragments by the use of single-chain Fv (sFv) dimers has also been reported. See, Gruber et al., J. Immunol. 152:5368 (1994).

[0356] Antibodies with more than two valencies are contemplated. For example, trispecific antibodies can be prepared. Tutt et al., J. Immunol. 147:60 (1991).

[0357] Exemplary bispecific antibodies can bind to two different epitopes, at least one of which originates in the protein antigen of the invention. Alternatively, an anti-antigenic arm of an immunoglobulin molecule can be combined with an arm which binds to a triggering molecule on a leukocyte such as a T-cell receptor molecule (e.g. CD2, CD3, CD28, or B7), or Fc receptors for IgG (FcγR), such as FcγRI (CD64), Fc®RII (CD32) and FcγRIII (CD16) so as to focus cellular defense mechanisms to the cell expressing the particular antigen. Bispecific antibodies can also be used to direct cytotoxic agents to cells which express a particular antigen. These antibodies possess an antigen-binding arm and an arm which binds a cytotoxic agent or a radionuclide chelator, such as EOTUBE, DPTA, DOTA, or TETA. Another bispecific antibody of interest binds the protein antigen described herein and further binds tissue factor (TF).

[0358] 5.13.6 Heteroconjugate Antibodies

[0359] Heteroconjugate antibodies are also within the scope of the present invention. Heteroconjugate antibodies are composed of two covalently joined antibodies. Such antibodies have, for example, been proposed to target immune system cells to unwanted cells (U.S. Pat. No. 4,676,980), and for treatment of HIV infection (WO 91/00360; WO 92/200373; EP 03089). It is contemplated that the antibodies can be prepared in vitro using known methods in synthetic protein chemistry, including those involving crosslinking agents. For example, immunotoxins can be constructed using a disulfide exchange reaction or by forming a thioether bond. Examples of suitable reagents for this purpose include iminothiolate and methyl-4-mercaptobutyrimidate and those disclosed, for example, in U.S. Pat. No. 4,676,980.

[0360] 5.13.7 Effector Function Engineering

[0361] It can be desirable to modify the antibody of the invention with respect to effector function, so as to enhance, e.g., the effectiveness of the antibody in treating cancer. For example, cysteine residue(s) can be introduced into the Fc region, thereby allowing interchain disulfide bond formation in this region. The homodimeric antibody thus generated can have improved internalization capability and/or increased complement-mediated cell killing and antibody-dependent cellular cytotoxicity (ADCC). See Caron et al., J. Exp Med., 176: 1191-1195 (1992) and Shopes, J. Immunol., 148: 2918-2922 (1992). Homodimeric antibodies with enhanced anti-tumor activity can also be prepared using heterobifunctional cross-linkers as described in Wolff et al. Cancer Research, 53: 2560-2565 (1993). Alternatively, an antibody can be engineered that has dual Fc regions and can thereby have enhanced complement lysis and ADCC capabilities. See Stevenson et al., Anti-Cancer Drug Design, 3: 219-230 (1989).

[0362] 5.13.8 Immunoconjugates

[0363] The invention also pertains to immunoconjugates comprising an antibody conjugated to a cytotoxic agent such as a chemotherapeutic agent, toxin (e.g., an enzymatically active toxin of bacterial, fungal, plant, or animal origin, or fragments thereof), or a radioactive isotope (i.e., a radioconjugate).

[0364] Chemotherapeutic agents useful in the generation of such immunoconjugates have been described above. Enzymatically active toxins and fragments thereof that can be used include diphtheria A chain, nonbinding active fragments of diphtheria toxin, exotoxin A chain (from Pseudomonas aeruginosa), ricin A chain, abrin A chain, modeccin A chain, alpha-sarcin, Aleurites fordii proteins; dianthin proteins, Phytolaca americana proteins (PAPI, PAPII, and PAP-S), momordica charantia inhibitor, curcin, crotin, sapaonaria officinalis inhibitor, gelonin, mitogellin, restrictocin, phenomycin, enomycin, and the tricothecenes. A variety of radionuclides are available for the production of radioconjugated antibodies. Examples include ²¹²Bi, ¹³¹I, ¹³¹In, ⁹⁰Y, and ¹⁸⁶Re.

[0365] Conjugates of the antibody and cytotoxic agent are made using a variety of bifunctional protein-coupling agents such as N-succinimidyl-3-(2-pyridyldithiol) propionate (SPDP), iminothiolane (IT), bifunctional derivatives of imidoesters (such as dimethyl adipimidate HCL), active esters (such as disuccinimidyl suberate), aldehydes (such as glutareldehyde), bis-azido compounds (such as bis(p-azidobenzoyl)hexanediamine), bis-diazonium derivatives (such as bis-(p-diazoniumbenzoyl)-ethylenediamine), diisocyanates (such as tolyene 2,6-diisocyanate), and bis-active fluorine compounds (such as 1,5-difluoro-2,4-dinitrobenzene). For example, a ricin immunotoxin can be prepared as described in Vitetta et al., Science, 238: 1098 (1987). Carbon-14-labeled 1-isothiocyanatobenzyl-3-methyldiethylene triaminepentaacetic acid (MX-DTPA) is an exemplary chelating agent for conjugation of radionucleotide to the antibody. See WO94/11026.

[0366] In another embodiment, the antibody can be conjugated to a “receptor” (such streptavidin) for utilization in tumor pretargeting wherein the antibody-receptor conjugate is administered to the patient, followed by removal of unbound conjugate from the circulation using a clearing agent and then administration of a “ligand” (e.g., avidin) that is in turn conjugated to a cytotoxic agent.

[0367] 4.14 Computer Readable Sequences

[0368] In one application of this embodiment, a nucleotide sequence of the present invention can be recorded on computer readable media. As used herein, “computer readable media” refers to any medium which can be read and accessed directly by a computer. Such media include, but are not limited to: magnetic storage media, such as floppy discs, hard disc storage medium, and magnetic tape; optical storage media such as CD-ROM; electrical storage media such as RAM and ROM; and hybrids of these categories such as magnetic/optical storage media. A skilled artisan can readily appreciate how any of the presently known computer readable mediums can be used to create a manufacture comprising computer readable medium having recorded thereon a nucleotide sequence of the present invention. As used herein, “recorded” refers to a process for storing information on computer readable medium. A skilled artisan can readily adopt any of the presently known methods for recording information on computer readable medium to generate manufactures comprising the nucleotide sequence information of the present invention.

[0369] A variety of data storage structures are available to a skilled artisan for creating a computer readable medium having recorded thereon a nucleotide sequence of the present invention. The choice of the data storage structure will generally be based on the means chosen to access the stored information. In addition, a variety of data processor programs and formats can be used to store the nucleotide sequence information of the present invention on computer readable medium. The sequence information can be represented in a word processing text file, formatted in commercially-available software such as WordPerfect and Microsoft Word, or represented in the form of an ASCII file, stored in a database application, such as DB2, Sybase, Oracle, or the like. A skilled artisan can readily adapt any number of data processor structuring formats (e.g. text file or database) in order to obtain computer readable medium having recorded thereon the nucleotide sequence information of the present invention.

[0370] By providing any of the nucleotide sequences SEQ ID NO: 1-984, 1969-2952, 3937-3942 or 3949-3954 or a representative fragment thereof; or a nucleotide sequence at least 95% identical to any of the nucleotide sequences of SEQ ID NO: 1-984, 1969-2952, 3937-3942 or 3949-3954 in computer readable form, a skilled artisan can routinely access the sequence information for a variety of purposes. Computer software is publicly available which allows a skilled artisan to access sequence information provided in a computer readable medium. The examples which follow demonstrate how software which implements the BLAST (Altschul et al., J. Mol. Biol. 215:403-410 (1990)) and BLAZE (Brutlag et al., Comp. Chem. 17:203-207 (1993)) search algorithms on a Sybase system is used to identify open reading frames (ORFs) within a nucleic acid sequence. Such ORFs may be protein encoding fragments and may be useful in producing commercially important proteins such as enzymes used in fermentation reactions and in the production of commercially useful metabolites.

[0371] As used herein, “a computer-based system” refers to the hardware means, software means, and data storage means used to analyze the nucleotide sequence information of the present invention. The minimum hardware means of the computer-based systems of the present invention comprises a central processing unit (CPU), input means, output means, and data storage means. A skilled artisan can readily appreciate that any one of the currently available computer-based systems are suitable for use in the present invention. As stated above, the computer-based systems of the present invention comprise a data storage means having stored therein a nucleotide sequence of the present invention and the necessary hardware means and software means for supporting and implementing a search means. As used herein, “data storage means” refers to memory which can store nucleotide sequence information of the present invention, or a memory access means which can access manufactures having recorded thereon the nucleotide sequence information of the present invention.

[0372] As used herein, “search means” refers to one or more programs which are implemented on the computer-based system to compare a target sequence or target structural motif with the sequence information stored within the data storage means. Search means are used to identify fragments or regions of a known sequence which match a particular target sequence or target motif. A variety of known algorithms are disclosed publicly and a variety of commercially available software for conducting search means are and can be used in the computer-based systems of the present invention. Examples of such software includes, but is not limited to, Smith-Waterman, MacPattern (EMBL), BLASTN and BLASTA (NPOLYPEPTIDEIA). A skilled artisan can readily recognize that any one of the available algorithms or implementing software packages for conducting homology searches can be adapted for use in the present computer-based systems. As used herein, a “target sequence” can be any nucleic acid or amino acid sequence of six or more nucleotides or two or more amino acids. A skilled artisan can readily recognize that the longer a target sequence is, the less likely a target sequence will be present as a random occurrence in the database. The most preferred sequence length of a target sequence is from about 10 to 300 amino acids, more preferably from about 30 to 100 nucleotide residues. However, it is well recognized that searches for commercially important fragments, such as sequence fragments involved in gene expression and protein processing, may be of shorter length.

[0373] As used herein, “a target structural motif,” or “target motif,” refers to any rationally selected sequence or combination of sequences in which the sequence(s) are chosen based on a three-dimensional configuration which is formed upon the folding of the target motif. There are a variety of target motifs known in the art. Protein target motifs include, but are not limited to, enzyme active sites and signal sequences. Nucleic acid target motifs include, but are not limited to, promoter sequences, hairpin structures and inducible expression elements (protein binding sequences).

[0374] 4.15 Triple Helix Formation

[0375] In addition, the fragments of the present invention, as broadly described, can be used to control gene expression through triple helix formation or antisense DNA or RNA, both of which methods are based on the binding of a polynucleotide sequence to DNA or RNA. Polynucleotides suitable for use in these methods are preferably 20 to 40 bases in length and are designed to be complementary to a region of the gene involved in transcription (triple helix—see Lee et al., Nucl. Acids Res. 6:3073 (1979); Cooney et al., Science 15241:456 (1988); and Dervan et al., Science 251:1360 (1991)) or to the mRNA itself (antisense—Olmno, J. Neurochem. 56:560 (1991); Oligodeoxynucleotides as Antisense Inhibitors of Gene Expression, CRC Press, Boca Raton, Fla. (1988)). Triple helix-formation optimally results in a shut-off of RNA transcription from DNA, while antisense RNA hybridization blocks translation of an mRNA molecule into polypeptide. Both techniques have been demonstrated to be effective in model systems. Information contained in the sequences of the present invention is necessary for the design of an antisense or triple helix oligonucleotide.

[0376] 4.16 Diagnostic Assays and Kits

[0377] The present invention further provides methods to identify the presence or expression of one of the ORFs of the present invention, or homolog thereof, in a test sample, using a nucleic acid probe or antibodies of the present invention, optionally conjugated or otherwise associated with a suitable label.

[0378] In general, methods for detecting a polynucleotide of the invention can comprise contacting a sample with a compound that binds to and forms a complex with the polynucleotide for a period sufficient to form the complex, and detecting the complex, so that if a complex is detected, a polynucleotide of the invention is detected in the sample. Such methods can also comprise contacting a sample under stringent hybridization conditions with nucleic acid primers that anneal to a polynucleotide of the invention under such conditions, and amplifying annealed polynucleotides, so that if a polynucleotide is amplified, a polynucleotide of the invention is detected in the sample.

[0379] In general, methods for detecting a polypeptide of the invention can comprise contacting a sample with a compound that binds to and forms a complex with the polypeptide for a period sufficient to form the complex, and detecting the complex, so that if a complex is detected, a polypeptide of the invention is detected in the sample.

[0380] In detail, such methods comprise incubating a test sample with one or more of the antibodies or one or more of the nucleic acid probes of the present invention and assaying for binding of the nucleic acid probes or antibodies to components within the test sample.

[0381] Conditions for incubating a nucleic acid probe or antibody with a test sample vary. Incubation conditions depend on the format employed in the assay, the detection methods employed, and the type and nature of the nucleic acid probe or antibody used in the assay. One skilled in the art will recognize that any one of the commonly available hybridization, amplification or immunological assay formats can readily be adapted to employ the nucleic acid probes or antibodies of the present invention. Examples of such assays can be found in Chard, T., An Introduction to Radioimmunoassay and Related Techniques, Elsevier Science Publishers, Amsterdam, The Netherlands (1986); Bullock, G. R. et al., Techniques in Immunocytochemistry, Academic Press, Orlando, Fla. Vol. 1 (1982), Vol. 2 (1983), Vol. 3 (1985); Tijssen, P., Practice and Theory of immunoassays: Laboratory Techniques in Biochemistry and Molecular Biology, Elsevier Science Publishers, Amsterdam, The Netherlands (1985). The test samples of the present invention include cells, protein or membrane extracts of cells, or biological fluids such as sputum, blood, serum, plasma, or urine. The test sample used in the above-described method will vary based on the assay format, nature of the detection method and the tissues, cells or extracts used as the sample to be assayed. Methods for preparing protein extracts or membrane extracts of cells are well known in the art and can be readily be adapted in order to obtain a sample which is compatible with the system utilized.

[0382] In another embodiment of the present invention, kits are provided which contain the necessary reagents to carry out the assays of the present invention. Specifically, the invention provides a compartment kit to receive, in close confinement, one or more containers which comprises: (a) a first container comprising one of the probes or antibodies of the present invention; and (b) one or more other containers comprising one or more of the following: wash reagents, reagents capable of detecting presence of a bound probe or antibody.

[0383] In detail, a compartment kit includes any kit in which reagents are contained in separate containers. Such containers include small glass containers, plastic containers or strips of plastic or paper. Such containers allows one to efficiently transfer reagents from one compartment to another compartment such that the samples and reagents are not cross-contaminated, and the agents or solutions of each container can be added in a quantitative fashion from one compartment to another. Such containers will include a container which will accept the test sample, a container which contains the antibodies used in the assay, containers which contain wash reagents (such as phosphate buffered saline, Tris-buffers, etc.), and containers which contain the reagents used to detect the bound antibody or probe. Types of detection reagents include labeled nucleic acid probes, labeled secondary antibodies, or in the alternative, if the primary antibody is labeled, the enzymatic, or antibody binding reagents which are capable of reacting with the labeled antibody. One skilled in the art will readily recognize that the disclosed probes and antibodies of the present invention can be readily incorporated into one of the established kit formats which are well known in the art.

[0384] 4.17 Medical Imaging

[0385] The novel polypeptides and binding partners of the invention are useful in medical imaging of sites expressing the molecules of the invention (e.g., where the polypeptide of the invention is involved in the immune response, for imaging sites of inflammation or infection). See, e.g., Kunkel et al., U.S. Pat. No. 5,413,778. Such methods involve chemical attachment of a labeling or imaging agent, administration of the labeled polypeptide to a subject in a pharmaceutically acceptable carrier, and imaging the labeled polypeptide in vivo at the target site.

[0386] 4.18 Screening Assays

[0387] Using the isolated proteins and polynucleotides of the invention, the present invention further provides methods of obtaining and identifying agents which bind to a polypeptide encoded by an ORF corresponding to any of the nucleotide sequences set forth in SEQ ID NO: 1-984, 1969-2952, 3937-3942 or 3949-3954, or bind to a specific domain of the polypeptide encoded by the nucleic acid. In detail, said method comprises the steps of:

[0388] (a) contacting an agent with an isolated protein encoded by an ORF of the present invention, or nucleic acid of the invention; and

[0389] (b) determining whether the agent binds to said protein or said nucleic acid.

[0390] In general, therefore, such methods for identifying compounds that bind to a polynucleotide of the invention can comprise contacting a compound with a polynucleotide of the invention for a time sufficient to form a polynucleotide/compound complex, and detecting the complex, so that if a polynucleotide/compound complex is detected, a compound that binds to a polynucleotide of the invention is identified.

[0391] Likewise, in general, therefore, such methods for identifying compounds that bind to a polypeptide of the invention can comprise contacting a compound with a polypeptide of the invention for a time sufficient to form a polypeptide/compound complex, and detecting the complex, so that if a polypeptide/compound complex is detected, a compound that binds to a polynucleotide of the invention is identified.

[0392] Methods for identifying compounds that bind to a polypeptide of the invention can also comprise contacting a compound with a polypeptide of the invention in a cell for a time sufficient to form a polypeptide/compound complex, wherein the complex drives expression of a receptor gene sequence in the cell, and detecting the complex by detecting reporter gene sequence expression, so that if a polypeptide/compound complex is detected, a compound that binds a polypeptide of the invention is identified.

[0393] Compounds identified via such methods can include compounds which modulate the activity of a polypeptide of the invention (that is, increase or decrease its activity, relative to activity observed in the absence of the compound). Alternatively, compounds identified via such methods can include compounds which modulate the expression of a polynucleotide of the invention (that is, increase or decrease expression relative to expression levels observed in the absence of the compound). Compounds, such as compounds identified via the methods of the invention, can be tested using standard assays well known to those of skill in the art for their ability to modulate activity/expression.

[0394] The agents screened in the above assay can be, but are not limited to, peptides, carbohydrates, vitamin derivatives, or other pharmaceutical agents. The agents can be selected and screened at random or rationally selected or designed using protein modeling techniques.

[0395] For random screening, agents such as peptides, carbohydrates, pharmaceutical agents and the like are selected at random and are assayed for their ability to bind to the protein encoded by the ORF of the present invention. Alternatively, agents may be rationally selected or designed. As used herein, an agent is said to be “rationally selected or designed” when the agent is chosen based on the configuration of the particular protein. For example, one skilled in the art can readily adapt currently available procedures to generate peptides, pharmaceutical agents and the like, capable of binding to a specific peptide sequence, in order to generate rationally designed antipeptide peptides, for example see Hurby et al., Application of Synthetic Peptides: Antisense Peptides,” In Synthetic Peptides, A User's Guide, W.H. Freeman, NY (1992), pp. 289-307, and Kaspczak et al., Biochemistry 28:9230-8 (1989), or pharmaceutical agents, or the like.

[0396] In addition to the foregoing, one class of agents of the present invention, as broadly described, can be used to control gene expression through binding to one of the ORFs or EMFs of the present invention. As described above, such agents can be randomly screened or rationally designed/selected. Targeting the ORF or EMF allows a skilled artisan to design sequence specific or element specific agents, modulating the expression of either a single ORF or multiple ORFs which rely on the same EMF for expression control. One class of DNA binding agents are agents which contain base residues which hybridize or form a triple helix formation by binding to DNA or RNA. Such agents can be based on the classic phosphodiester, ribonucleic acid backbone, or can be a variety of sulfhydryl or polymeric derivatives which have base attachment capacity.

[0397] Agents suitable for use in these methods preferably contain 20 to 40 bases and are designed to be complementary to a region of the gene involved in transcription (triple helix—see Lee et al., Nucl. Acids Res. 6:3073 (1979); Cooney et al., Science 241:456 (1988); and Dervan et al., Science 251:1360 (1991)) or to the mRNA itself (antisense—Okano, J. Neurochem. 56:560 (1991); Oligodeoxynucleotides as Antisense Inhibitors of Gene Expression, CRC Press, Boca Raton, Fla. (1988)). Triple helix-formation optimally results in a shut-off of RNA transcription from DNA, while antisense RNA hybridization blocks translation of an mRNA molecule into polypeptide. Both techniques have been demonstrated to be effective in model systems. Information contained in the sequences of the present invention is necessary for the design of an antisense or triple helix oligonucleotide and other DNA binding agents.

[0398] Agents which bind to a protein encoded by one of the ORFs of the present invention can be used as a diagnostic agent. Agents which bind to a protein encoded by one of the ORFs of the present invention can be formulated using known techniques to generate a pharmaceutical composition.

[0399] 4.19 Use of Nucleic Acids as Probes

[0400] Another aspect of the subject invention is to provide for polypeptide-specific nucleic acid hybridization probes capable of hybridizing with naturally occurring nucleotide sequences. The hybridization probes of the subject invention may be derived from any of the nucleotide sequences SEQ ID NO: 1-984, 1969-2952, 3937-3942 or 3949-3954. Because the corresponding gene is only expressed in a limited number of tissues, a hybridization probe derived from of any of the nucleotide sequences SEQ ID NO: 1-984, 1969-2952, 3937-3942 or 3949-3954 can be used as an indicator of the presence of RNA of cell type of such a tissue in a sample.

[0401] Any suitable hybridization technique can be employed, such as, for example, in situ hybridization. PCR as described in U.S. Pat. Nos. 4,683,195 and 4,965,188 provides additional uses for oligonucleotides based upon the nucleotide sequences. Such probes used in PCR may be of recombinant origin, may be chemically synthesized, or a mixture of both. The probe will comprise a discrete nucleotide sequence for the detection of identical sequences or a degenerate pool of possible sequences for identification of closely related genomic sequences.

[0402] Other means for producing specific hybridization probes for nucleic acids include the cloning of nucleic acid sequences into vectors for the production of mRNA probes. Such vectors are known in the art and are commercially available and may be used to synthesize RNA probes in vitro by means of the addition of the appropriate RNA polymerase as T7 or SP6 RNA polymerase and the appropriate radioactively labeled nucleotides. The nucleotide sequences may be used to construct hybridization probes for mapping their respective genomic sequences. The nucleotide sequence provided herein may be mapped to a chromosome or specific regions of a chromosome using well known genetic and/or chromosomal mapping techniques. These techniques include in situ hybridization, linkage analysis against known chromosomal markers, hybridization screening with libraries or flow-sorted chromosomal preparations specific to known chromosomes, and the like. The technique of fluorescent in situ hybridization of chromosome spreads has been described, among other places, in Verma et al (1988) Human Chromosomes: A Manual of Basic Techniques, Pergamon Press, New York N.Y.

[0403] Fluorescent in situ hybridization of chromosomal preparations and other physical chromosome mapping techniques may be correlated with additional genetic map data. Examples of genetic map data can be found in the 1994 Genome Issue of Science (265:1981f). Correlation between the location of a nucleic acid on a physical chromosomal map and a specific disease (or predisposition to a specific disease) may help delimit the region of DNA associated with that genetic disease. The nucleotide sequences of the subject invention may be used to detect differences in gene sequences between normal, carrier or affected individuals.

[0404] 4.20 Preparation of Support Bound Oligonucleotides

[0405] Oligonucleotides, i.e., small nucleic acid segments, may be readily prepared by, for example, directly synthesizing the oligonucleotide by chemical means, as is commonly practiced using an automated oligonucleotide synthesizer.

[0406] Support bound oligonucleotides may be prepared by any of the methods known to those of skill in the art using any suitable support such as glass, polystyrene or Teflon. One strategy is to precisely spot oligonucleotides synthesized by standard synthesizers. Immobilization can be achieved using passive adsorption (Inouye & Hondo, (1990) J. Clin. Microbiol. 28(6) 1469-72); using UV light (Nagata et al., 1985; Dahlen et al., 1987; Morrissey & Collins, (1989) Mol. Cell Probes 3(2) 189-207) or by covalent binding of base modified DNA (Keller et al., 1988; 1989); all references being specifically incorporated herein.

[0407] Another strategy that may be employed is the use of the strong biotin-streptavidin interaction as a linker. For example, Broude et al. (1994) Proc. Natl. Acad. Sci. USA 91(8) 3072-6, describe the use of biotinylated probes, although these are duplex probes, that are immobilized on streptavidin-coated magnetic beads. Streptavidin-coated beads may be purchased from Dynal, Oslo. Of course, this same linking chemistry is applicable to coating any surface with streptavidin. Biotinylated probes may be purchased from various sources, such as, e.g., Operon Technologies (Alameda, Calif.).

[0408] Nunc Laboratories (Naperville, Ill.) is also selling suitable material that could be used. Nunc Laboratories have developed a method by which DNA can be covalently bound to the microwell surface termed Covalink NH. CovaLink NH is a polystyrene surface grafted with secondary amino groups (>NH) that serve as bridge-heads for further covalent coupling. CovaLink Modules may be purchased from Nunc Laboratories. DNA molecules may be bound to CovaLink exclusively at the 5′-end by a phosphoramidate bond, allowing immobilization of more than 1 pmol of DNA (Rasmussen et al., (1991) Anal. Biochem. 198(1) 138-42).

[0409] The use of CovaLink NH strips for covalent binding of DNA molecules at the 5′-end has been described (Rasmussen et al., (1991). In this technology, a phosphoramidate bond is employed (Chu et al., (1983) Nucleic Acids Res. 11(8) 6513-29). This is beneficial as immobilization using only a single covalent bond is preferred. The phosphoramidate bond joins the DNA to the CovaLink NH secondary amino groups that are positioned at the end of spacer arms covalently grafted onto the polystyrene surface through a 2 nm long spacer arm. To link an oligonucleotide to CovaLink NH via an phosphoramidate bond, the oligonucleotide terminus must have a 5′-end phosphate group. It is, perhaps, even possible for biotin to be covalently bound to CovaLink and then streptavidin used to bind the probes.

[0410] More specifically, the linkage method includes dissolving DNA in water (7.5 ng/ul) and denaturing for 10 min. at 95° C. and cooling on ice for 10 min. Ice-cold 0.1 M 1-methylimidazole, pH 7.0 (1-MeIm₇), is then added to a final concentration of 10 mM 1-MeIm₇. A ss DNA solution is then dispensed into CovaLink NH strips (75 ul/well) standing on ice.

[0411] Carbodiimide 0.2 M 1-ethyl-3-(3-dimethylaminopropyl)-carbodiimide (EDC), dissolved in 10 mM 1-MeIm₇, is made fresh and 25 ul added per well. The strips are incubated for 5 hours at 50° C. After incubation the strips are washed using, e.g., Nunc-Immuno Wash; first the wells are washed 3 times, then they are soaked with washing solution for 5 min., and finally they are washed 3 times (where in the washing solution is 0.4 N NaOH, 0.25% SDS heated to 50° C.).

[0412] It is contemplated that a further suitable method for use with the present invention is that described in PCT Patent Application WO 90/03382 (Southern & Maskos), incorporated herein by reference. This method of preparing an oligonucleotide bound to a support involves attaching a nucleoside 3′-reagent through the phosphate group by a covalent phosphodiester link to aliphatic hydroxyl groups carried by the support. The oligonucleotide is then synthesized on the supported nucleoside and protecting groups removed from the synthetic oligonucleotide chain under standard conditions that do not cleave the oligonucleotide from the support. Suitable reagents include nucleoside phosphoramidite and nucleoside hydrogen phosphorate.

[0413] An on-chip strategy for the preparation of DNA probe for the preparation of DNA probe arrays may be employed. For example, addressable laser-activated photodeprotection may be employed in the chemical synthesis of oligonucleotides directly on a glass surface, as described by Fodor et al. (1991) Science 251(4995) 767-73, incorporated herein by reference. Probes may also be immobilized on nylon supports as described by Van Ness et al. (1991) Nucleic Acids Res. 19(12) 3345-50; or linked to Teflon using the method of Duncan & Cavalier (1988) Anal. Biochem. 169(1) 104-8; all references being specifically incorporated herein.

[0414] To link an oligonucleotide to a nylon support, as described by Van Ness et al. (1991), requires activation of the nylon surface via alkylation and selective activation of the 5′-amine of oligonucleotides with cyanuric chloride.

[0415] One particular way to prepare support bound oligonucleotides is to utilize the light-generated synthesis described by Pease et al., (1994) PNAS USA 91(11) 5022-6, incorporated herein by reference). These authors used current photolithographic techniques to generate arrays of immobilized oligonucleotide probes (DNA chips). These methods, in which light is used to direct the synthesis of oligonucleotide probes in high-density, miniaturized arrays, utilize photolabile 5′-protected N-acyl-deoxynucleoside phosphoramidites, surface linker chemistry and versatile combinatorial synthesis strategies. A matrix of 256 spatially defined oligonucleotide probes may be generated in this manner.

[0416] 4.21 Preparation of Nucleic Acid Fragments

[0417] The nucleic acids may be obtained from any appropriate source, such as cDNAs, genomic DNA, chromosomal DNA, microdissected chromosome bands, cosmid or YAC inserts, and RNA, including mRNA without any amplification steps. For example, Sambrook et al. (1989) describes three protocols for the isolation of high molecular weight DNA from mammalian cells (p. 9.14-9.23).

[0418] DNA fragments may be prepared as clones in M13, plasmid or lambda vectors and/or prepared directly from genomic DNA or cDNA by PCR or other amplification methods. Samples may be prepared or dispensed in multiwell plates. About 100-1000 ng of DNA samples may be prepared in 2-500 ml of final volume.

[0419] The nucleic acids would then be fragmented by any of the methods known to those of skill in the art including, for example, using restriction enzymes as described at 9.24-9.28 of Sambrook et al. (1989), shearing by ultrasound and NaOH treatment.

[0420] Low pressure shearing is also appropriate, as described by Schriefer et al. (1990) Nucleic Acids Res. 18(24) 7455-6, incorporated herein by reference). In this method, DNA samples are passed through a small French pressure cell at a variety of low to intermediate pressures. A lever device allows controlled application of low to intermediate pressures to the cell. The results of these studies indicate that low-pressure shearing is a useful alternative to sonic and enzymatic DNA fragmentation methods.

[0421] One particularly suitable way for fragmenting DNA is contemplated to be that using the two base recognition endonuclease, CviJI, described by Fitzgerald et al. (1992) Nucleic Acids Res. 20(14) 3753-62. These authors described an approach for the rapid fragmentation and fractionation of DNA into particular sizes that they contemplated to be suitable for shotgun cloning and sequencing.

[0422] The restriction endonuclease CviJI normally cleaves the recognition sequence PuGCPy between the G and C to leave blunt ends. A typical reaction conditions, which alter the specificity of this enzyme (CviJI**), yield a quasi-random distribution of DNA fragments form the small molecule pUC19(2688 base pairs). Fitzgerald et al. (1992) quantitatively evaluated the randomness of this fragmentation strategy, using a CviJI** digest of pUC19 that was size fractionated by a rapid gel filtration method and directly ligated, without end repair, to a lac Z minus M13 cloning vector. Sequence analysis of 76 clones showed that CviJI** restricts pyGCPy and PuGCPu, in addition to PuGCPy sites, and that new sequence data is accumulated at a rate consistent with random fragmentation.

[0423] As reported in the literature, advantages of this approach compared to sonication and agarose gel fractionation include: smaller amounts of DNA are required (0.2-0.5 ug instead of 2-5 ug); and fewer steps are involved (no preligation, end repair, chemical extraction, or agarose gel electrophoresis and elution are needed

[0424] Irrespective of the manner in which the nucleic acid fragments are obtained or prepared, it is important to denature the DNA to give single stranded pieces available for hybridization. This is achieved by incubating the DNA solution for 2-5 minutes at 80-90° C. The solution is then cooled quickly to 2° C. to prevent renaturation of the DNA fragments before they are contacted with the chip. Phosphate groups must also be removed from genomic DNA by methods known in the art

[0425] 4.22 Preparation of DNA Arrays

[0426] Arrays may be prepared by spotting DNA samples on a support such as a nylon membrane. Spotting may be performed by using arrays of metal pins (the positions of which correspond to an array of wells in a microtiter plate) to repeated by transfer of about 20 nl of a DNA solution to a nylon membrane. By offset printing, a density of dots higher than the density of the wells is achieved. One to 25 dots may be accommodated in 1 mm², depending on the type of label used. By avoiding spotting in some preselected number of rows and columns, separate subsets (subarrays) may be formed. Samples in one subarray may be the same genomic segment of DNA (or the same gene) from different individuals, or may be different, overlapped genomic clones. Each of the subarrays may represent replica spotting of the same samples. In one example, a selected gene segment may be amplified from 64 patients. For each patient, the amplified gene segment may be in one 96-well plate (all 96 wells containing the same sample). A plate for each of the 64 patients is prepared. By using a 96-pin device, all samples may be spotted on one 8×12 cm membrane. Subarrays may contain 64 samples, one from each patient. Where the 96 subarrays are identical, the dot span may be 1 mm² and there may be a 1 mm space between subarrays.

[0427] Another approach is to use membranes or plates (available from NUNC, Naperville, Ill.) which may be partitioned by physical spacers e.g. a plastic grid molded over the membrane, the grid being similar to the sort of membrane applied to the bottom of multiwell plates, or hydrophobic strips. A fixed physical spacer is not preferred for imaging by exposure to flat phosphor-storage screens or x-ray films.

[0428] The present invention is illustrated in the following examples. Upon consideration of the present disclosure, one of skill in the art will appreciate that many other embodiments and variations may be made in the scope of the present invention. Accordingly, it is intended that the broader aspects of the present invention not be limited to the disclosure of the following examples. The present invention is not to be limited in scope by the exemplified embodiments which are intended as illustrations of single aspects of the invention, and compositions and methods which are functionally equivalent are within the scope of the invention. Indeed, numerous modifications and variations in the practice of the invention are expected to occur to those skilled in the art upon consideration of the present preferred embodiments. Consequently, the only limitations which should be placed upon the scope of the invention are those which appear in the appended claims.

[0429] All references cited within the body of the instant specification are hereby incorporated by reference in their entirety.

### 5.0 EXAMPLES

### 5.1 Example 1

[0430] Novel Nucleic Acid Sequences Obtained from Various Libraries

[0431] A plurality of novel nucleic acids were obtained from cDNA libraries prepared from various human tissues and in some cases isolated from a genomic library derived from human chromosome using standard PCR, SBH sequence signature analysis and Sanger sequencing techniques. The inserts of the library were amplified with PCR using primers specific for the vector sequences which flank the inserts. Clones from cDNA libraries were spotted on nylon membrane filters and screened with oligonucleotide probes (e.g., 7-mers) to obtain signature sequences. The clones were clustered into groups of similar or identical sequences. Representative clones were selected for sequencing.

[0432] In some cases, the 5′ sequence of the amplified inserts was then deduced using a typical Sanger sequencing protocol. PCR products were purified and subjected to fluorescent dye terminator cycle sequencing. Single pass gel sequencing was done using a 377 Applied Biosystems (ABI) sequencer to obtain the novel nucleic acid sequences. In some cases RACE Random Amplification of cDNA Ends) was performed to further extend the sequence in the 5′ direction.

### 5.2 Example 2

[0433] Assemblage of Novel Nucleic Acids

[0434] The contigs or nucleic acids of the present invention, designated as SEQ ID NO: 1969-2951, and 3949-3954 were assembled using an EST sequence as a seed. Then a recursive algorithm was used to extend the seed EST into an extended assemblage, by pulling additional sequences from different databases (i.e., Hyseq's database containing EST sequences, dbEST version 114, gb pri 114, and UniGene version 101) that belong to this assemblage. The algorithm terminated when there was no additional sequences from the above databases that would extend the assemblage. Inclusion of component sequences into the assemblage was based on a BLASTN hit to the extending assemblage with BLAST score greater than 300 and percent identity greater than 95%.

[0435] Tables 6 and 8 sets forth the novel predicted polypeptides (including proteins) encoded by the novel polynucleotides (SEQ ID NO:2953-3936, and 3949-3954) of the present invention, and their corresponding nucleotide locations to each of SEQ ID NO: 2953-3936 and 3955-3960. Tables 6 and 8 also indicates the method by which the polypeptide was predicted. Method A refers to a polypeptide obtained by using a software program called FASTY (available from http://fasta.bioch.virginia.edu) which selects a polypeptide based on a comparison of the translated novel polynucleotide to known polynucleotides (W. R. Pearson, Methods in Enzymology, 183:63-98 (1990), herein incorporated by reference). Method B refers to a polypeptide obtained by using a software program called GenScan for human/vertebrate sequences (available from Stanford University, Office of Technology Licensing) that predicts the polypeptide based on a probabilistic model of gene structure/compositional properties (C. Burge and S. Karlin, J. Mol. Biol., 268:78-94 (1997), incorporated herein by reference). Method C refers to a polypeptide obtained by using a Hyseq proprietary software program that translates the novel polynucleotide and its complementary strand into six possible amino acid sequences (forward and reverse frames) and chooses the polypeptide with the longest open reading frame.

### 5.3 Example 3

[0436] Novel Nucleic Acids

[0437] Using PHRAP (Univ. of Washington) or CAP4 (Paracel), full length gene cDNA sequences and their corresponding protein sequences were generated from the assemblage. Any frame shifts and incorrect stop codons were corrected by hand editing. During editing, the sequence was checked using FASTY and/or BLAST against Genebank. Other computer programs which may have been used in the editing process were phredPhrap and Consed (University of Washington) and ed-ready, ed-ext and gc-zip-2 (Hyseq, Inc.). The full-length nucleotide sequences are shown in the Sequence Listing as SEQ ID NO:1-351. The amino acids are SEQ ID NO:985-1335.

[0438] Table 1 shows the various tissue sources of SEQ ID NO: 1-351.

[0439] The nearest neighbor results for SEQ ID NO: 1-351 were obtained by a BLASTP version 2.0al 19 MP-WashU search against Genpept release 120 and Geneseq Oct. 12, 2000 release 21 (Derwent), using BLAST algorithm. The nearest neighbor result showed the closest homologue for SEQ ID NO: 1-351 from Genpept. The translated amino acid sequences for which the nucleic acid sequence encodes are shown in the Sequence Listing. The homologs with identifiable functions for SEQ ID NO: 1-351 are shown in Table 2 below.

[0440] Using eMatrix software package (Stanford University, Stanford, Calif.) (Wu et al., J. Comp. Biol., Vol. 6 pp. 219-235 (1999) herein incorporated by reference), all the sequences were examined to determine whether they had identifiable signature regions. Table 3 shows the signature region found in the indicated polypeptide sequences, the description of the signature, the eMatrix p-value(s) and the position(s) of the signature within the polypeptide sequence.

[0441] Using the pFam software program (Sonnhammer et al., Nucleic Acids Res., Vol. 26(1) pp. 320-322 (1998) herein incorporated by reference) all the polypeptide sequences were examined for domains with homology to certain peptide domains. Table 4 shows the name of the domain found, the description, the p-value and the pFam score for the identified domain within the sequence.

[0442] The nucleotide sequence within the sequences that codes for signal peptide sequences and their cleavage sites can be determine from using Neural Network SignalP V1.1 program (from Center for Biological Sequence Analysis, The Technical University of Denmark). The process for identifying prokaryotic and eukaryotic signal peptides and their cleavage sites are also disclosed by Henrik Nielson, Jacob Engelbrecht, Soren Brunak, and Gunnar von Heijne in the publication “Identification of prokaryotic and eukaryotic signal peptides and prediction of their cleavage sites” Protein Engineering, Vol. 10, no. 1, pp. 1-6 (1997), incorporated herein by reference. A maximum S score and a mean S score, as described in the Nielson et as reference, was obtained for the polypeptide sequences. Table 7 shows the position of the signal peptide in each of the polypeptides and the maximum score and mean score associated with that signal peptide.

### 5.4 Example 4

[0443] Novel Nucleic Acids

[0444] Using PHRAP (Univ. of Washington) or CAP4 (Paracel), a full length gene cDNA sequence and its corresponding protein sequence were generated from the assemblage. Any frame shifts and incorrect stop codons were corrected by hand editing. During editing, the sequence was checked using FASTY and/or BLAST against Genbank (i.e. dbEST version 117, gb pri 117, UniGene version 117, Genpept release 117). Other computer programs which may have been used in the editing process were phredPhrap and Consed (University of Washington) and ed-ready, ed-ext and gc-zip-2 (Hyseq, Inc.). The full-length nucleotide, including splice variants resulting from these procedures are shown in the Sequence Listing as SEQ ID NOS: 352-766. The corresponding amino acids are SEQ ID NO: 1336-1750.

[0445] Table 1 shows the various tissue sources of SEQ ID NO: 352-766.

[0446] The nearest neighbor results for SEQ ID NO: 352-766 were obtained by a BLASTP version 2.0al 19 MP-WashU search against Genpept release 120 and Geneseq Oct. 12, 2000 release 21 (Derwent), using BLAST algorithm. The nearest neighbor result showed the closest homologue for SEQ ID NO: 352-766 from Genpept. The translated amino acid sequences for which the nucleic acid sequence encodes are shown in the Sequence Listing. The homologs with identifiable functions for SEQ ID NO: 352-766 are shown in Table 2 below.

[0447] Using eMatrix software package (Stanford University, Stanford, Calif.) (Wu et al., J. Comp. Biol., Vol. 6 pp. 219-235 (1999) herein incorporated by reference), all the sequences were examined to determine whether they had identifiable signature regions. Table 3 shows the signature region found in the indicated polypeptide sequences, the description of the signature, the eMatrix p-value(s) and the position(s) of the signature within the polypeptide sequence.

[0448] Using the pFam software program (Sonnhammer et al., Nucleic Acids Res., Vol. 26(1) pp. 320-322 (1998) herein incorporated by reference) all the polypeptide sequences were examined for domains with homology to certain peptide domains. Table 4 shows the name of the domain found, the description, the p-value and the pFam score for the identified domain within the sequence.

[0449] The nucleotide sequence within the sequences that codes for signal peptide sequences and their cleavage sites can be determine from using Neural Network SignalP V1.1 program (from Center for Biological Sequence Analysis, The Technical University of Denmark). The process for identifying prokaryotic and eukaryotic signal peptides and their cleavage sites are also disclosed by Henrik Nielson, Jacob Engelbrecht, Soren Brunak, and Gunnar von Heijne in the publication “Identification of prokaryotic and eukaryotic signal peptides and prediction of their cleavage sites” Protein Engineering, Vol. 10, no. 1, pp. 1-6 (1997), incorporated herein by reference. A maximum S score and a mean S score, as described in the Nielson et as reference, was obtained for the polypeptide sequences. Table 7 shows the position of the signal peptide in each of the polypeptides and the maximum score and mean score associated with that signal peptide.

### 5.5 Example 5

[0450] Novel Nucleic Acids

[0451] Using PHRAP (Univ. of Washington) or CAP4 (Paracel), a full length gene cDNA sequence and its corresponding protein sequence were generated from the assemblage. Any frame shifts and incorrect stop codons were corrected by hand editing. During editing, the sequence was checked using FASTY and/or BLAST against Genbank (i.e., dbEST version 118, gb pri 118, UniGene version 118, Genpept release 118). Other computer programs which may have been used in the editing process were phredPhrap and Consed (University of Washington) and ed-ready, ed-ext and gc-zip-2 (Hyseq, Inc.). The full-length nucleotide, including splice variants resulting from these procedures are shown in the Sequence Listing as SEQ ID NOS: 767-930. The corresponding amino acid sequences are SEQ ID NO:1751-1914.

[0452] Table 1 shows the various tissue sources of SEQ ID NO: 767-930.

[0453] The homology results for SEQ ID NO: 767-930 were obtained by a BLASTP version 2.0al 19 MP-WashU search against Genpept release 120 and Geneseq Oct. 12, 2000 release 21 (Derwent), using BLAST algorithm. The nearest neighbor result showed the homologs for SEQ ID NO: 767-930 from Genpept. The translated amino acid sequences for which the nucleic acid sequence encodes are shown in the Sequence Listing. The homologues with identifiable functions for SEQ ID NO: 767-930 are shown in Table 2 below.

[0454] Using eMatrix software package (Stanford University, Stanford, Calif.) (Wu et al., J. Comp. Biol., Vol. 6 pp. 219-235 (1999) herein incorporated by reference), all the sequences were examined to determine whether they had identifiable signature regions. Table 3 shows the signature region found in the indicated polypeptide sequences, the description of the signature, the eMatrix p-value(s) and the position(s) of the signature within the polypeptide sequence.

[0455] Using the pFam software program (Sonnhammer et al., Nucleic Acids Res., Vol. 26(1) pp. 320-322 (1998) herein incorporated by reference) all the polypeptide sequences were examined for domains with homology to certain peptide domains. Table 4 shows the name of the domain found, the description, the p-value and the pFam score for the identified domain within the sequence.

[0456] The nucleotide sequence within the sequences that codes for signal peptide sequences and their cleavage sites can be determine from using Neural Network SignalP V1.1 program (from Center for Biological Sequence Analysis, The Technical University of Denmark). The process for identifying prokaryotic and eukaryotic signal peptides and their cleavage sites are also disclosed by Henrik Nielson, Jacob Engelbrecht, Soren Brunak, and Gunnar von Heijne in the publication “Identification of prokaryotic and eukaryotic signal peptides and prediction of their cleavage sites” Protein Engineering, Vol. 10, no. 1, pp. 1-6 (1997), incorporated herein by reference. A maximum S score and a mean S score, as described in the Nielson et as reference, was obtained for the polypeptide sequences. Table 7 shows the position of the signal peptide in each of the polypeptides and the maximum score and mean score associated with that signal peptide.

### 5.6 Example 6

[0457] Novel Nucleic Acids

[0458] Using PHRAP (Univ. of Washington) or CAP4 (Paracel), a full length gene cDNA sequence and its corresponding protein sequence were generated from the assemblage. Any frame shifts and incorrect stop codons were corrected by hand editing. During editing, the sequence was checked using FASTY and/or BLAST against Genbank (i.e. dbEST version 118, gb pri 118, UniGene version 118, Genpept release 118). Other computer programs which may have been used in the editing process were phredPhrap and Consed (University of Washington) and ed-ready, ed-ext and gc-zip-2 (Hyseq, Inc.). The full-length nucleotide, including splice variants resulting from these procedures are shown in the Sequence Listing as SEQ ID NOS: 931-965. The corresponding amino acid sequences are shown in SEQ ID NO:1915-1949.

[0459] Table 1 shows the various tissue sources of SEQ ID NO: 931-965.

[0460] The nearest neighbor results for SEQ ID NO: 931-965 were obtained by a BLASTP version 2.0al 19 MP-WashU search against Genpept release 120 and Geneseq Oct. 12, 2000 release (Derwent), using BLAST algorithm. The nearest neighbor result showed the closest homologue for SEQ ID NO: 931-965 from Genpept. The translated amino acid sequences for which the nucleic acid sequence encodes are shown in the Sequence Listing. The homologs with identifiable functions for SEQ ID NO: 931-965 are shown in Table 2 below.

[0461] Using eMatrix software package (Stanford University, Stanford, Calif.) (Wu et al., J. Comp. Biol., Vol. 6 pp. 219-235 (1999) herein incorporated by reference), all the sequences were examined to determine whether they had identifiable signature regions. Table 3 shows the signature region found in the indicated polypeptide sequences, the description of the signature, the eMatrix p-value(s) and the position(s) of the signature within the polypeptide sequence.

[0462] Using the pFam software program (Sonnhammer et al., Nucleic Acids Res., Vol. 26(1) pp. 320-322 (1998) herein incorporated by reference) all the polypeptide sequences were examined for domains with homology to certain peptide domains. Table 4 shows the name of the domain found, the description, the p-value and the pfam score for the identified domain within the sequence.

[0463] The nucleotide sequence within the sequences that codes for signal peptide sequences and their cleavage sites can be determine from using Neural Network SignalP V1.1 program (from Center for Biological Sequence Analysis, The Technical University of Denmark). The process for identifying prokaryotic and eukaryotic signal peptides and their cleavage sites are also disclosed by Henrik Nielson, Jacob Engelbrecht, Soren Brunak, and Gunnar von Heijne in the publication “Identification of prokaryotic and eukaryotic signal peptides and prediction of their cleavage sites” Protein Engineering, Vol. 10, no. 1, pp. 1-6 (1997), incorporated herein by reference. A maximum S score and a mean S score, as described in the Nielson et as reference, was obtained for the polypeptide sequences. Table 7 shows the position of the signal peptide in each of the polypeptides and the maximum score and mean score associated with that signal peptide.

### 5.7 Example 7

[0464] Novel Nucleic Acids

[0465] Using PHRAP (Univ. of Washington) or CAP4 (Paracel), a full length gene cDNA sequence and its corresponding protein sequence were generated from the assemblage. Any frame shifts and incorrect stop codons were corrected by hand editing. During editing, the sequence was checked using FASTY and/or BLAST against Genbank (i.e. dbEST version 119, gb pri 119, UniGene version 119, Genpept release 119). Other computer programs which may have been used in the editing process were phredPhrap and Consed (University of Washington) and ed-ready, ed-ext and gc-zip-2 (Hyseq, Inc.). The full-length nucleotide, including splice variants resulting from these procedures are shown in the Sequence Listing as SEQ ID NOS:966-974. The corresponding amino acid sequences are SEQ ID NO:1950-1958.

[0466] Table 1 shows the various tissue sources of SEQ ID NO: 966-974.

[0467] The nearest neighbor results for SEQ ID NO: 966-974 were obtained by a BLASTP version 2.0al 19 MP-WashU search against Genpept release 120 and Geneseq Oct. 12, 2000 release (Derwent), using BLAST algorithm. The nearest neighbor result showed the closest homologue for SEQ ID NO: 966-974 from Genpept. The translated amino acid sequences for which the nucleic acid sequence encodes are shown in the Sequence Listing. The homologs with identifiable functions for SEQ ID NO: 966-974 are shown in Table 2 below.

[0468] Using eMatrix software package (Stanford University, Stanford, Calif.) (Wu et al., J. Comp. Biol., Vol. 6 pp. 219-235 (1999) herein incorporated by reference), all the sequences were examined to determine whether they had identifiable signature regions. Table 3 shows the signature region found in the indicated polypeptide sequences, the description of the signature, the eMatrix p-value(s) and the position(s) of the signature within the polypeptide sequence.

[0469] Using the pFam software program (Sonnhammer et al., Nucleic Acids Res., Vol. 26(1) pp. 320-322 (1998) herein incorporated by reference) all the polypeptide sequences were examined for domains with homology to certain peptide domains. Table 4 shows the name of the domain found, the description, the p-value and the pFam score for the identified domain within the sequence.

[0470] The nucleotide sequence within the sequences that codes for signal peptide sequences and their cleavage sites can be determine from using Neural Network SignalP V1.1 program (from Center for Biological Sequence Analysis, The Technical University of Denmark). The process for identifying prokaryotic and eukaryotic signal peptides and their cleavage sites are also disclosed by Henrik Nielson, Jacob Engelbrecht, Soren Brunak, and Gunnar von Heijne in the publication “Identification of prokaryotic and eukaryotic signal peptides and prediction of their cleavage sites” Protein Engineering, Vol. 10, no. 1, pp. 1-6 (1997), incorporated herein by reference. A maximum S score and a mean S score, as described in the Nielson et as reference, was obtained for the polypeptide sequences. Table 7 shows the position of the signal peptide in each of the polypeptides and the maximum score and mean score associated with that signal peptide.

### 5.8 Example 8

[0471] Novel Nucleic Acids

[0472] Using PHRAP (Univ. of Washington) or CAP4 (Paracel), a full length gene cDNA sequence and its corresponding protein sequence were generated from the assemblage. Any frame shifts and incorrect stop codons were corrected by hand editing. During editing, the sequence was checked using FASTY and/or BLAST against Genbank (i.e. dbEST version 120, gb pri 120, UniGene version 120, Genpept release 120). Other computer programs which may have been used in the editing process were phredPhrap and Consed (University of Washington) and ed-ready, ed-ext and gc-zip-2 (Hyseq, Inc.). The fill-length nucleotide, including splice variants resulting from these procedures are shown in the Sequence Listing as SEQ ID NOS:975-984. The corresponding amino acid sequences are SEQ ID NO:1959-1968.

[0473] Table 1 shows the various tissue sources of SEQ ID NO:975-984.

[0474] The nearest neighbor results for SEQ ID NO: 975-984 were obtained by a BLASTP version 2.0al 19 MP-WashU search against Genpept release 120 and Geneseq Oct. 21, 2000 release (Derwent), using BLAST algorithm. The nearest neighbor result showed the closest homologue for SEQ ID NO: 975-984 from Genpept. The translated amino acid sequences for which the nucleic acid sequence encodes are shown in the Sequence Listing. The homologs with identifiable functions for SEQ ID NO: 975-984 are shown in Table 2 below.

[0475] Using eMatrix software package (Stanford University, Stanford, Calif.) (Wu et al., J. Comp. Biol., Vol. 6 pp. 219-235 (1999) herein incorporated by reference), all the sequences were examined to determine whether they had identifiable signature regions. Table 3 shows the signature region found in the indicated polypeptide sequences, the description of the signature, the eMatrix p-value(s) and the position(s) of the signature within the polypeptide sequence.

[0476] Using the pFam software program (Sonnhammer et al., Nucleic Acids Res., Vol. 26(1) pp. 320-322 (1998) herein incorporated by reference) all the polypeptide sequences were examined for domains with homology to certain peptide domains. Table 4 shows the name of the domain found, the description, the p-value and the pFam score for the identified domain within the sequence.

[0477] The nucleotide sequence within the sequences that codes for signal peptide sequences and their cleavage sites can be determine from using Neural Network SignalP V1.1 program (from Center for Biological Sequence Analysis, The Technical University of Denmark). The process for identifying prokaryotic and eukaryotic signal peptides and their cleavage sites are also disclosed by Henrik Nielson, Jacob Engelbrecht, Soren Brunak, and Gunnar von Heijne in the publication “Identification of prokaryotic and eukaryotic signal peptides and prediction of their cleavage sites” Protein Engineering, Vol. 10, no. 1, pp. 1-6 (1997), incorporated herein by reference. A maximum S score and a mean S score, as described in the Nielson et as reference, was obtained for the polypeptide sequences. Table 7 shows the position of the signal peptide in each of the polypeptides and the maxinum score and mean score associated with that signal peptide.

### 5.9 Example 9

[0478] Novel Nucleic Acids

[0479] Using PHRAP (Univ. of Washington) or CAP4 (Paracel), a full length gene cDNA sequence and its corresponding protein sequence were generated from the assemblage. Any frame shifts and incorrect stop codons were corrected by hand editing. During editing, the sequence was checked using FASTY and/or BLAST against Genbank (i.e. dbEST version 120, gb pri 120, UniGene version 120, Genpept release 120). Other computer programs which may have been used in the editing process were phredPhrap and Consed (University of Washington) and ed-ready, ed-ext and gc-zip-2 (Hyseq, Inc.). The full-length nucleotide, including splice variants resulting from these procedures are shown in the Sequence Listing as SEQ ID NOS:3937-3942. The corresponding peptide sequence is SEQ ID NO: 3943-3948.

[0480] Table 1 shows the various tissue sources of SEQ ID NO: 3937-3942.

[0481] The nearest neighbor results for SEQ ID NO: 3937-3942 were obtained by a BLASTP version 2.0al 19 MP-WashU search against Genpept release 120 and Geneseq Oct. 12, 2000 release 21 (Derwent), using BLAST algorithm. The nearest neighbor result showed the closest homologue for SEQ ID NO: 3937-3942 from Genpept. The translated amino acid sequences for which the nucleic acid sequence encodes are shown in the Sequence Listing. The homologs with identifiable functions for SEQ ID NO: 3937-3942 are shown in Table 9 below.

[0482] Using eMatrix software package (Stanford University, Stanford, Calif.) (Wu et al., J. Comp. Biol., Vol. 6 pp. 219-235 (1999) herein incorporated by reference), all the sequences were examined to determine whether they had identifiable signature regions. Table 10 shows the signature region found in the indicated polypeptide sequences, the description of the signature, the eMatrix p-value(s) and the position(s) of the signature within the polypeptide sequence.

[0483] Using the pFam software program (Sonnhammer et al., Nucleic Acids Res., Vol. 26(1) pp. 320-322 (1998) herein incorporated by reference) all the polypeptide sequences were examined for domains with homology to certain peptide domains. Table 11 shows the name of the domain found, the description, the p-value and the pFam score for the identified domain within the sequence.

[0484] The nucleotide sequence within the sequences that codes for signal peptide sequences and their cleavage sites can be determine from using Neural Network SignalP V1.1 program (from Center for Biological Sequence Analysis, The Technical University of Denmark). The process for identifying prokaryotic and eukaryotic signal peptides and their cleavage sites are also disclosed by Henrik Nielson, Jacob Engelbrecht, Soren Brunak, and Gunnar von Heijne in the publication “Identification of prokaryotic and eukaryotic signal peptides and prediction of their cleavage sites” Protein Engineering, Vol. 10, no. 1, pp. 1-6 (1997), incorporated herein by reference. A maximum S score and a mean S score, as described in the Nielson et as reference, was obtained for the polypeptide sequences. Table 12 shows the position of the signal peptide in each of the polypeptides and the maximum score and mean score associated with that signal peptide.

[0485] Tables 5 and 13 are correlation tables of all of the sequences and the SEQ ID NOS.

LENGTHY TABLE REFERENCED HERE
US20070042392A1-20070222-T00001
Please refer to the end of the specification for access instructions.

LENGTHY TABLE REFERENCED HERE
US20070042392A1-20070222-T00002
Please refer to the end of the specification for access instructions.

LENGTHY TABLE REFERENCED HERE
US20070042392A1-20070222-T00003
Please refer to the end of the specification for access instructions.

LENGTHY TABLE REFERENCED HERE
US20070042392A1-20070222-T00004
Please refer to the end of the specification for access instructions.

LENGTHY TABLE REFERENCED HERE
US20070042392A1-20070222-T00005
Please refer to the end of the specification for access instructions.

LENGTHY TABLE REFERENCED HERE
US20070042392A1-20070222-T00006
Please refer to the end of the specification for access instructions.

LENGTHY TABLE REFERENCED HERE
US20070042392A1-20070222-T00007
Please refer to the end of the specification for access instructions.

LENGTHY TABLE REFERENCED HERE
US20070042392A1-20070222-T00008
Please refer to the end of the specification for access instructions.

LENGTHY TABLE REFERENCED HERE
US20070042392A1-20070222-T00009
Please refer to the end of the specification for access instructions.

LENGTHY TABLE REFERENCED HERE
US20070042392A1-20070222-T00010
Please refer to the end of the specification for access instructions.

LENGTHY TABLE REFERENCED HERE
US20070042392A1-20070222-T00011
Please refer to the end of the specification for access instructions.

LENGTHY TABLE REFERENCED HERE
US20070042392A1-20070222-T00012
Please refer to the end of the specification for access instructions.

LENGTHY TABLE REFERENCED HERE
US20070042392A1-20070222-T00013
Please refer to the end of the specification for access instructions.

LENGTHY TABLE REFERENCED HERE
US20070042392A1-20070222-T00014
Please refer to the end of the specification for access instructions.

LENGTHY TABLE
The patent application contains a lengthy table section. A copy of the table is available in electronic form from the USPTO web site (http://seqdata.uspto.gov/?pageRequest=docDetail&DocID=US20070042392A1). An electronic copy of the table will also be available from the USPTO upon request and payment of the fee set forth in 37 CFR 1.19(b)(3).

The application's sequence listing, which the Patent Office published only in electronic form, follows.

SEQUENCE LISTING (3960 sequences)

SEQ ID NO: 1 - DNA, 1867 bp, Homo sapiens
  CDS (416)..(814)
taccggtccggaattcccgggtcgacccacgcgtccggccaaggttgcgggtcatggagtcccgaaccctcctcctgctgttctcgggagccgtggccctgatccagacctgggcagattacaattacaatcaaggcagaaatgatctcatttttacattacaactctggaaaaggcaatagactgagatgcaagtgtgcccccaagtgatgggcagaaggagagaaggtgttttggatgcattctagaacacaggtaatctaaggagagttgatcaaggccgtggaagagtcctccagccactattggccatcaaaggagtcctctgtgtcccaggaatggtcctgctttggtgtccctggtgtgacccatcacccgctgggaacagcctgagagaagtagggcctctgcaccaatgctgctgaggatgtcagagcacaggaacgaggccttgggaaattacctggaaatgcgactgaaatcttccttcctgaggggtctgggctcttggaaatcaaaccctctcaggttgggtggctggacgattctcctcacacttacaatgggacaaggggaaccaggaggcccccaaggggatccctgggttccacacgaactcctcctaccctcattgtgtgacagcagccatgcctcctcctggggatcaggatctattacctgtgcctggagaggaggggactcctcttctcacccgctggtctctggacacatactgtccaattcccctgtggcagctgtaatgtgtagttcaatgggcactcatttgtccccttttaagggtaccctcctttagaatccaggaccttctaccctgcagagtgtggttttgggagagaagtgcaaaatcccacgacaggtgagttgaaggaatgggatatggagccacatccacttccaccccttggtatctggacccacgtgttcttcctactgagattacagaactgtagagatgtctttgatttttaaaatgcaccatgtcctgaaagatggcaccctcccacccgcagagtgcttcctgcaagctggcgttgagctgtgcctatagaagctcttttcaacattctttatggccagcagcccttggttggtgcagatggtgataggaccagtgggtcccacagcatggccacactgcacctccttcgctgtcaagtgggtcccccacgaagatactgcacggagagcagtgccaagcctgtggatcaggaatatcaacagcccccagagagtggtgctggctgagggtctgagagcaggacaggaaaacccacctatggaataggtgcctatccctgtgaagatgaacctctggcccttccaggatggaaggagtgcaatgtagtcaactcctcacttagggtctggttggtcacctaaagaaatagagccctaccagggaagatcattgggttcaaatgctgatgagtaggacatttagaggtggcagtgtctggatctaccttggtaggagggagtcagtactgttggacccataggtagcctcatccctgccactgtgtttgctccatttatgtacccatcctacccggcctgggctgacccatggggaaggctggctaatttcagtgcttctgcttggttgttcagggccatttcaggtttgggtgttttctggggatgttaacatgggattcaggctcaactcacaagaaacttttccatctcatgatgggatgctgttgggcatgtccaatgtatgacttcatgagttacacaggtgctaattcgtaggggcacttgggatcacatgggtgttttttgtccatggtcaagcatctatcttatcagggctacagtaacatgcaaaagtgcttccacattt

SEQ ID NO: 2 - DNA, 2586 bp, Homo sapiens
  CDS (1)..(2553)
aaagcaataaggatgtttaagtgctggtcagttgtcttggttctcggattcatttttctggagtcggaaggaaggccaaccaaagaaggaggatatggccttaaatcctatcagcctctaatgagattgcgacataagcaggaaaaaaatcaagaaagttcaagagtcaaaggatttatgattcaggatggccctttgggatcttgtgaaaataagtactgtggtttgggaagacactgtgttgccagcagagagacagggcaagcagaatgtgcctgtatggacctttgcaaacgtcactacagacctgtgtgtggatctgacggagaattctatgaaaaccactgtgaagtgcacagagctgcttgcctgaaaaaacaaaagattaccattgttcacaatgaagactgcttctttaaaggagataagtgcaagactactgaatacagcaagatgaaaaatatgctattagatttacaaaatcaaaaatatattatgcaagaaaatgaaaatcctaatggcgacgacatatctcggaagaagctattggtggatcaaatgtttaaatattttgatgcagacagtaatggacttgtagatattaatgaactaactcaggtgataaaacaggaagaacttggcaaggatctctttgattgtactttgtatgttctattgaaatatgatgattttaatgctgacaagcacctggctcttgaagaattttatagagcattccaagtgatccagttgagtctgccagaagatcagaaactaagcatcactgcagcaactgtgggacaaagtgctgttctgagctgtgccattcaaggaaccctgagacctcccattatctggaaaaggaacaatattattctaaataatttagatttggaagacatcaatgactttggagatgatgggtccttgtatattactaaggttaccacaactcacgttggcaattacacctgctatgcagatggctatgaacaagtctatcagactcacatcttccaagtgaatgttcctccagtcatccgggtgtatccagagagtcaggctagagagcctggggtaactgccagtcttaggtgccatgcagagggcataccaaagcctcagcttggctggttgaagaatggaattgatattacaccaaagctttccaaacaactcacgcttcaagcaaatggcagtgaggttcacataagcaatgtgcgctatgaagatactggagcatacacttgtatcgcaaagaatgaagcaggagtgtatgaagacatctcttctctttttgtggaagactctgctagaaagaccctagctaacatattatggagagaagaaggtctgggaattgggaacatgttctatgttttttatgaagatggaatcaaagtgatacaacccatagaatgtgaatttcagaggcacattaagcctagtgaaaagctccttggatttcaggatgaagtctgtcccaaagctgagggagatgaagttcagaggtgtgtgtgggcatcagctgttaatgtcaaagacaagttcatttatgttgcacagccaactttggacagagtccttattgttgatgtgcagtcccaaaaagttgttcaggcagtgagcacagaccctgtcccagttaaattacactatgacaaatcacatgatcaggtctgggtgctaagctggggtaccttggagaagacatcaccaacactacaggtaattaccctggccagtgggaatgtgcctcaccacacgatccacacccaaccagtgggaaagcaatttgacagagtggatgattttttcattcccaccacaacactcattatcacccatatgaggtttggatttattcttcataaagatgaagctgcactacaaaaaattgatcttgaaaccatgtcatacatcaagacaattaacttgaaggactataagtgcgttcctcagtcattggcatatacacacttgggaggctactacttcattggctgcaaacctgacagcaccggagcagtttccccacaggtcatggtggacggtgtaactgactcagtcattgggttcaatagtgatgtgacgggcactccatatgtctctccagatggccactaccttgtcagcattaatgatgtgaaaggtcttgtaagggttcagtacattaccatcagaggagaaatacaggaggcttttgatatttacacaaatctgcacatatctgatctggcatttcaaccatcctttactgaagcccaccaatataacatctacggtagttcaagcacacaaactgatgtgctctttgtggagctctcttctgggaaggtcaagatgataaagagtctcaaggaaccactcaaggcagaagaatggccttggaaccggaaaaacaggcaaatccaggacagtggcttgtttggtcaatacctgatgacaccttccaaggactctctcttcatcctagatggacgactcaataaattaaactgtgagatcactgaagttgaaaaaggaaatacagtcatttgggttggagatgcctaaaaaccctagggtacaattattgaatgaagg

SEQ ID NO: 3 - DNA, 2856 bp, Homo sapiens
  CDS (182)..(2593)
aaattggtatagcagtacccagctggctagcgtttaaacttaagcttggtaccgagctcggatccactagtccagtgtggtggaattccgcggctggaggtgtgaggatccgaacccaggggtggggggtggaggcggctcctgcgatcgaaggggacttgagactcaccggccgcacgccatgagggccctgtgggtgctgggcctctgctgcgtcctgctgaccttcgggtcggtcagagctgacgatgaagttgatgtggatggtacagtagaagaggatctgggtaaaagtagagaaggatcaaggacggatgatgaagtagtacagagagaggaagaagctattcagttggatggattaaatgcatcacaaataagagaacttagagagaagtcggaaaagtttgccttccaagccgaagttaacagaatgatgaaacttatcatcaattcattgtataaaaataaagagattttcctgagagaactgatttcaaatgcttctgatgctttagataagataaggctaatatcactgactgatgaaaatgctctttctggaaatgaggaactaacagtcaaaattaagtgtgataaggagaagaacctgctgcatgtcacagacaccggtgtaggaatgaccagagaagagttggttaaaaaccttggtaccatagccaaatctgggacaagcgagtttttaaacaaaatgactgaagcacaggaagatggccagtcaacttctgaattgattggccagtttggtgtcggtttctattccgccttccttgtagcagataaggttattgtcacttcaaaacacaacaacgatacccagcacatctgggagtctgactccaatgaattttctgtaattgctgacccaagaggaaacactctaggacggggaacgacaattacccttgtcttaaaagaagaagcatctgattaccttgaattggatacaattaaaaatctcgtcaaaaaatattcacagttcataaactttcctatttatgtatggagcagcaagactgaaactgttgaggagcccatggaggaagaagaagcagccaaagaagagaaagaagaatctgatgatgaagctgcagtagaggaagaagaagaagaaaagaaaccaaagactaaaaaagttgaaaaaactgtctgggactgggaacttatgaatgatatcaaaccaatatggcagagaccatcaaaagaagtagaagaagatgaatacaaagctttctacaaatcattttcaaaggaaagtgatgaccccatggcttatattcactttactgctgaaggggaagttaccttcaaatcaattttatttgtacccacatctgctccacgtggtctgtttgacgaatatggatctaaaaagagcgattacattaagctctatgtgcgccgtgtattcatcacagacgacttccatgatatgatgcctaaatacctcaattttgtcaagggtgtggtggactcagatgatctccccttgaatgtttcccgcgagactcttcagcaacataaactgcttaaggtgattaggaagaagcttgttcgtaaaacgctggacatgatcaagaagattgctgatgataaatacaatgatactttttggaaagaatttggtaccaacatcaagcttggtgtgattgaagaccactcgaatcgaacacgtcttgctaaacttcttaggttccagtcttctcatcatccaactgacattactagcctagaccagtatgtggaaagaatgaaggaaaaacaagacaaaatctacttcatggctgggtccagcagaaaagaggctgaatcttctccatttgttgagcgacttctgaaaaagggctatgaagttatttacctcacagaacctgtggatgaatactgtattcaggcccttcccgaatttgatgggaagaggttccagaatgttgccaaggaaggagtgaagttcgatgaaagtgagaaaactaaggagagtcgtgaagcagttgagaaagaatttgagcctctgctgaattggatgaaagataaagcccttaaggacaagattgaaaaggctgtggtgtctcagcgcctgacagaatctccgtgtgctttggtggccagccagtacggatggtctggcaacatggagagaatcatgaaagcacaagcgtaccaaacgggcaaggacatctctacaaattactatgcgagtcagaagaaaacatttgaaattaatcccagacacccgctgatcagagacatgcttcgacgaattaaggaagatgaagatgataaaacagttttggatcttgctgtggttttgtttgaaacagcaacgcttcggtcagggtatcttttaccagacactaaagcatatggagatagaatagaaagaatgcttcgcctcagtttgaacattgaccctgatgcaaaggtggaagaagagcctgaagaagaacctgaagagacagcagaagacacaacagaagacacagagcaagacgaagatgaagaaatggatgtgggaacagatgaagaagaagaaacagcaaaggaatctacagctgaaaaagatgaattgtaaattatactctcaccatttggatcctgtgtggagagggaatgtgaaatttacatcatttctttttgggagagacttgttttggatgccccctaatccccttctcccctgcactgtaaaatgtgggattatgggtcacaggaaaaagtgggttttttagttgaattttttttaacattcctcatgaatgtaaatttgtactatttaactgactattcttgatgtaaaatcttgtcatgtgtataaaaataaaaaagatcccaaat

SEQ ID NO: 4 - DNA, 415 bp, Homo sapiens
  CDS (1)..(249)
ttgcggaattcggcacgaggccgactacaacagattggagccatggctttggaacagaaccagtcaacagattattattatgaggaaaatgaaatgaatggcacttatgactacagtcaatatgaactgatctgtatcaaagaagatgtcagagaatttgcaaaagttttcctccctgtattcctcacaatagttttcgtcattggacttgcaggcaattccatggtagtggcaatttatgccaaacattaaaatatctcgacccctaaaagttctgctcacagtcgttatagttttcattgtcactcaactgccttataacattgtcaagttctgccgagccatagacatcatctactccctgatcaccagctgcaacatgagcaaacgcatggacatcgccatccaagtcaca

SEQ ID NO: 5 - DNA, 3190 bp, Homo sapiens
  CDS (653)..(1072)
tccttgaccggtccggaattcccgggtcgacgatttcgtggcggtagctgctttccccacaaacccaaactacatccccaaggtcagggccaggctctgttgagtaatgctccccatcacagcacgcagcacaaggctggctgtttgacaaatacacacataaccaaaagacatgtgaatgtggtttcccaactcactttaaacaaatattccgggaccaacttcaaggacgttctacaacagaaactggactgtactcttcacaaacatcaatgtcatgaaagacagaaaggctgaggacctgctccaaacgaaaggaggctgcagagaggacaactaaaggcagcgcttgatcctggattggatcctggaccagaaaaacaacggctttcaaaatcattattgggacagttggcaaatttgaaacaggaactacaaattagcaactcctgggctgatcagagaatattacacatttcctgaatttgagaactgtaccatgggcatgtgagaggctgtccctgttcttgggaaatgttcactaaaacatcttacggataaacgagcatgatgtatacaaataatcctcaaatggttcatggttcagagaggataggaagaaacaggggtgagggagaagaggagggaacgaatgaaagagaaaatgtggcaaaatgttctttgttgtacccttcaaactgctgtgattttgaaattatttcaaaataaagttttaaatattttaaaaaatttttttctttctccccttgataccaggaagaataaagtttttaaaaaatgggcaggtgggccaggcgcggtggctcacgcctgtaatcccagcactttgggaggccgaggcgggcggatcacaaagtcaggagatcgagaccatcctggccaacacggtgaaacccggtctctactaaaagtacaaaaaattagccaggtgtggtggcagatgactgtaggccaagctaattgggaggctgaggcaggagaatggtgcgaacccggggagggcagagcttgcagtgagccaagatcacccactgcactccagactgggtaacagagcaagactcggtctcaaaaaaaataataagttacatttaaatgtcatatacatatttaagaaaaaaaaaaccaagtacttctcatttaagacagagtagaaattatttaaaattaggagttggtgtaaaggatgagctacatattcaagtcaaattatagtaagtattcactattccactaccaaagtaggtcaattatactaaagagaagaaatctatgtgaattgaggcattttctcactttgatatatgtgaataaatttcaggttgtctaaattcctagggttatatagttagaaatatataattctcttatagacaggtcaactaggggaaataagttagcacaatcatttgaattggttgtctacatactgggcagggcttattccttttctttagcttctttgcacatgtaaagcaggccataagatgtcctgttttgccatggacaatgcaaccatttttaggtcgaccttgacaaatcacacaaggttcaatggcattaaggggcaaactagattccacactctcttctttgtcttgggtttcttccctttcaaactctttcacatcttcttggctgctataaataatgctactagaagttgatggctgagaatagtcttcactttcttgtgattgtgaagcttgtgtaattttatcatcattttcctcaacacatgactctctggaatcattcactatagtttttttacaatcaggaacatcaaagccctcttcagcttgtgttgagttttccagtttggctttctcagagatttcccctttatctttccctttatcttcaggaagccaattctcacgaagggcccaacatctgttgcaatgtgatggaagggggggattcatttcattgcatgaagtgcatttccaatagtcagctaaggaaatttcaggatcttcttcaaatgaatctgtatcactctcccctgcctgatacacagtaacttgatatacctcatcatcttcatctgagagttcttgtccttcttcactaaggctataatcttctgagtcgagagattcaacttcaaattctacactaaactgatctgaaactgaatcctgatccaaccaatcacctgaatgttcacttacaccagcatcaagatccggattcgatggcgtccctgtagattcactgctactgcttctttcacaacatatctcccttattacacacagagccaggctttcatcaaaggaaagggaaatactatcagatttgtggcgttttctttgtcgttcaccagataattcatctgaattttcttctgtctcactaattgctctccttctagatgaggtagatggtctagaaaccaaatgtgaagatgaaggtttctcttcctgaagctcttgtacaaggtccttttgatcactcccaccttcaaggtgacacctgttctcactcacagatgtacctgagtccgatgattcctgctgattgactactaccaagttcctgtagatcatggtatatattttcctgtgctctttcacagagaagcttggcacgccaaacaaatctcctagaagatcatttgaacaatatacaatatgttgttgcttctcatcatataatcgtttagtcataatatactggccaagataaaaaagaacctctttcatagtataagtgtctttttgtgcaccaacagactttaataacttcaaaagcaatggctttggtctaaccagggtctcttgttccgaagctggaatctgtgaggtggttacagcaccatcagtaggtacagacatgttggtattgcacatttgcctgctcctcaccatccggggttttcgcgcttggagtcgggggtccctcaagactccccagtttccttcacggggactgactactgcggaagcacgacgccctgggcctcggggatcattccactctccgggccagggcactgggcgctcgtacgcactaatccggggagggacggtgctcctggctgcgaaagcagcaggatctcggtcagaggggtcgcggccgcccctcgggctcggcttcttgctccatctttccgacacacagggccacacaggccccagaagcagccaagctcgcgcggtgc

SEQ ID NO: 6 - DNA, 1343 bp, Homo sapiens
  CDS (291)..(1109)
gcggccgccccggcggctcctggaaccccggttcgcggcgatgccagccaccccagcgaagccgccgcagttcagtgcttggataatttgaaagtacaatagttggtttccctgtccacccgccccacttcgcttgccatcacagcacgcctatcggatgtgagaggagaagtcccgctgctcgggcactgtctatatacgcctaacacctacatatattttaaaaacattaaatataattaacaatcaaaagaaagaggagaaaggaagggaagcattactgggttactatgcacttgcgactgatttcttggctttttatcattttgaactttatggaatacatcggcagccaaaacgcctcccggggaaggcgccagcgaagaatgcatcctaacgttagtcaaggctgccaaggaggctgtgcaacatgctcagattacaatggatgtttgtcatgtaagcccagactattttttgctctggaaagaattggcatgaagcagattggagtatgtctctcttcatgtccaagtggatattatggaactcgatatccagatataaataagtgtacaaaatgcaaagctgactgtgatacctgtttcaacaaaaatttctgcacaaaatgtaaaagtggattttacttacaccttggaaagtgccttgacaattgcccagaagggttggaagccaacaaccatactatggagtgtgtcagtattgtgcactgtgaggtcagtgaatggaatccttggagtccatgcacgaagaagggaaaaacatgtggcttcaaaagagggactgaaacacgggtccgagaaataatacagcatccttcagcaaagggtaacctatgtcccccaacaaatgagacaagaaagtgtacagtgcaaaggaagaagtgtcagaagggagaacgaggaaaaaaaggaagggagaggaaaagaaaaaaacctaataaaggagaaagtaaagaagcaatacctgacagcaaaagtctggaatccagcaaagaaatcccagagcaacgagaaaacaaacagcagcagaagaagcgaaaagtccaagataaacagaaatcggtatcagtcagcactgtacactagagggttccatgagattattgtagactcatgatgctgctatctcaaccagatgcccaggacaggtgctctagccattaggaccacaaatggacatgtcagttattgctctgtctaaacaacattcccagtagttgctatattcttcatacaagcatagttaacaacaaagagccaaaagatcaaagaagggatactttcagatggttgtcttgtgtgcttctctgcatttttaaa

SEQ ID NO: 7 - DNA, 973 bp, Homo sapiens
  CDS (1)..(795)
atggatccaaccatctcaaccttggacacagaactgacaccaatcaacggaactgaggagactctttgctacaagcagaccttgagcctcacggtgctgacgtgcatcgtttcccttgtcgggctgacaggaaacgcagttgtgctctggctcctgggctgccgcatgcgcaggaacgccttctccatctacatcctcaacttggccgcagcagacttcctcttcctcagcggccgccttatatattccctgttaagcttcatcagtatcccccataccatctctaaaatcctctatcctgtgatgatgttttcctactttgcaggcctgagcatgctgagcaccatcagcaccgagcaccgcctgtccgtcctgtggcccatctggtactgctgccactgccccacacacctgtcagcggtcatgtgtgtcctgctctgggccctgtccctgttgcagagcatcctggagtggatgttctgtagcttcctgtttagtgatgttgactctgataattggtgtcaaatattagatttcctcacagtcgcgtggctgatttttttaatctgtggttctctgtgggttcaccctggtcctgctgatcaggatcatatgtggatcccggaagataccgctgaccaggctgtatgtgaccatcctgctcacagggctggtcttcctcctctgtggcctgcccctcagcattcagtttttcctattatactggatccacgtggacagggaagtcttattttgtcatgttcatctagtttctattttcctgtccgctcttaacagcagtgccaaccccatcatttacttcttcgtgggctcctttaggcagcgtcaaaataggcagaacctgaagctggttctccagagggctctgcaggacgcgtctgaggtggatgaaggtggagggcagcttcctgaggaaatcctggagctgtcgggaagcagattggagcagtga

SEQ ID NO: 8 - DNA, 639 bp, Homo sapiens
  CDS (217)..(453)
atttggccctcgaggccaagaattcggcacgaggcgcttttgcaaagccgcggaggtgaagtgaacttagaggttgtggggccgaggggtcgtcttatagctaccagcccacaggcatttagtctacgttggaggtaaacaaatacgggtcctgcttaggagaaaagaaaaacgtcttacagccagtgtctaaactccaaacaacggaatgtatcaatgagaccttgtatatggatacacgtgcatttaaaaccgccctgccggcttgtagagcttttgccgttctccagcgctttacaggggttatcgcacttaagcctcggaacaactttaccagtgattctaccagaaaggaatgaagaacagaaccttcaggaattgagtcacaatgcagacaaatatcaaatgggagattgttgcaaggaagagattgatgatagtattttctactagccattgggaagataaaaggagacagaagattgaagcctttgccagccattctttccctttttgcttccaaactcctcaactgggaaccttcatatgtgcagtatttatattggatcatactggtgattataaaagttcctaggaggctagaagagccaaccaacagagaagggaaagcagtctgtt

SEQ ID NO: 9 - DNA, 3522 bp, Homo sapiens
  CDS (416)..(2353)
  misc_feature (1)...(3522): n = a,t,c or g
ccgagccgagcgccgaggaccgtgctaccccaggcccgggctcgcccagcgcaggctcctctctggcagcagcggcggcgcggngaccccngtccctcggcctccnnttcccatcccacctcccgagccttcctcttcccgcagcacgcccggcccggcccggccgtggccctcctcagtgccggccgccatggcagaggcgtccggcgcggggaaaatctagcccggggatttcatgcggcctagctcggttccgcctcctcctcgcgcggccccagcggctgcccgcaccccagccccactccgggcctccgtgtctctcctgtgatcgcactgacacggccggggggttagaatggaacaaactgaaggcccgatgagagaaagggaaagttaaggatgctggagcagaacaatggatttctctttctctttcatgcaagggatcatgggaaacacaattcagcaaccacctcaactcattgactccgccaacatccgtcaggaggatgcctttgataacaacagtgacattgctgaagatggtggccagacaccatatgaagctactttgcagcaaggctttcagtacccagctacaacagaagatcttcctccactcacaaatgggtatccatcatcaatcagtgtgtatgaaactcaaaccaaataccagtcatataatcagtatcctaatgggtcagccaatggctttggtgcagttagaaactttagccccactgactattatcattcagaaattccaaacacaagaccacatgaaattctggaaaaaccttcccctccacagccaccacctcctccttcggtaccacaaactgtgattccaaagaagactggctcacctgaaattaaactaaaaataaccaaaactatccagaatggcagggaattgtttgagtcttccctttgtggagaccttttaaatgaagtacaggcaagtgagcacacgaaatcaaagcatgaaagcagaaaagaaaagaggaaaaaaagcaacaagcatgactcatcaagatctgaagagcgcaagtcacacaaaatccccaaattagaaccagaggaacaaaatagaccaaatgagagggttgacactgtatcagaaaaaccaagggaagaaccagtactaaaagaggaagccccagttcagccaatactatcttctgttccaacaacggaagtgtccactggtgttaagtttcaggttggcgatcttgtgtggtccaaggtgggaacctatccttggtggccttgtatggtttcaagtgatccccagcttgaggttcatactaaaattaacacaagaggtgcccgagaatatcatgtccagttttttagcaaccagccagagagggcgtgggttcatgaaaaacgggtacgagagtataaaggtcataaacagtatgaagaattactggctgaggcaaccaaacaagccagcaatcactctgagaaacaaaagattcggaaaccccgacctcagagagaacgtgctcagtgggatattggcattgcccatgcagagaaagcattgaaaatgactcgagaagaaagaatagaacagtatacttttatttacattgataaacagcctgaagaggctttatcccaagcaaaaaagagtgttgcctccaaaaccgaagttaaaaaaacccgacgaccaagatctgtgctgaatactcagccagaacagaccaatgcaggggaggtggcctcctcactctcaagtactgaaattcggagacatagccagaggcggcacacaagtgcggaagaggaagagccaccgcctgttaaaatagcctggaaaactgcggcagcaaggaaatccttaccagcttccattacgatgcacaaagggagcctggatttgcagaagtgtaacatgtctccagttgtgaaaattgaacaagtgtttgctcttcagaatgctacaggggatgggaaatttatcgatcaatttgtttattcaacaaagggaattggtaacaaaacagaaataagtgtcagggggcaagacaggcttataatttctacaccaaaccagagaaatgaaaagccaacgcagagtgtatcatctcctgaagcaacatctggttctacaggctcagtagaaaagaagcaacagagaagatcaattagaactcgttctgaatcagagaaatccactgaggttgtgccaaagaagaagatcaaaaaggagcaggttgaaacagttcctcaggctacagtgaagactggattacagaaagggtcggcggaccggggagtgcagggctctgtcagattcagtgacagctccgtctccgcagcgattgaggaaactgtggactgagattcctgtacaatttcatcccagaaactccagacttgtagtctccatgcaagatttctttgtcggcggcttgataaacagtttctttgttttcgattttgatttcgccaatcatcattattggcattttcctgcctggtttcttcttcaagactctgaacaattgctttaacagtcaaatgatttttttttttcggtttgagctggatgggtacagcttaaatcatgggtccagcctaaaaaccaccatttaacttacactgatcaatttcaacatggactgtttttggttttttgtttttaaataaagcatcattaatgcacatctgcaggggtttgccaaacagcccaaactgtatacattacaatcattaaaagttcttattttttttaatattagtgccgttatcatggagaacagcatgacagctgtctttggcagtctgtcatttttctagcattttcagaaactcatcggaaatggcggtacctgtgtttcccttcgaaagcctctcagtacagcactcctgttcctctgttaaaactccttgttaatccagtgatcttttaggccaaggaaatattttgtgatggtgttctgggtccatacaccagcaatgaaggagatagatttgtgtacttgtgttttttaatcagcattaacatgggcaggcaccctcatttatagatgtcaggaaacattcagtgaaaaacttgtagaatgggatgtgataacgaggttccagtaatctgagcagtctaacgaggcccacctcctccaccacagaacgtggctatgttccaagtgctactctcactcagcctgttgcggatcttcatggcctcaggagacttgtttctccatgggctcttctggactgcacacttccaccatagcttgctgggttgatctagatgtctgtttgttgtatggaaattttgggggaaaaaatccaaaacacaaactgtgggttgaaatattaaccgtctccttggttccttggtattcaccgtgcctgatctgcacatttcatcgtggctgtttctgtatagcctatactgcattagcccaagagattgttgctttgtaactttttgcactattgttttggctggatttgtattacacacagttttaaaaaaaacaattccacactaaaaaaaaaaaa

SEQ ID NO: 10 - DNA, 2366 bp, Homo sapiens
  CDS (174)..(1541)
cctcagcctccccgccgccgccgccgccgccgccgccgagccggtttcctttttccggcgctccgggtgcgagagacaggtcgggccccctaggcagcgagccgcagcgcaatcccggcgctcgcccaaggaccctggaagctaccgttaccccgccgggcagcgtgggcgccatgagcagctcgggactgaattcggagaaggtagctgctctgatacagaaactgaattccgacccccagttcgtacttgcccagaatgtcgggaccacccacgacctgctggacatctgtctgaagcgggccacggtgcagcgcgcgcagcatgtgttccagcacgccgtgccccaggagggcaagccaatcaccaaccagaagagctcagggcgatgctggatcttttcttgtctgaatgttatgaggcttccattcatgaaaaagttaaatattgaagaatttgagtttagccaatcttacctgtttttttgggacaaggttgaacgctgttatttcttcttgagtgcttttgtggacacagcccagagaaaggagcctgaggatgggaggctggtgcagtttttgcttatgaaccctgcaaatgatggtggccaatgggatatgcttgttaatattgttgaaaaatatggtgttatccctaagaaatgcttccctgaatcttatacaacagaggcaaccagaaggatgaatgatattctgaatcacaagatgagagaattctgtatacgactgcggaacctggtacacagtggagcaaccaaaggagaaatctcggccacacaggacgtcatgatggaggagatattccgagtggtgtgcatctgtttgggtaatccaccagagacattcacctgggaatatcgagacaaagataaaaattatcagaaaattggccccataacacccttggagttttacagggaacatgtcaagccactcttcaatatggaagataagatttgtttagtgaatgaccctaggccccagcacaagtacaacaaactttacacagtggaatacttaagcaatatggttggagggagaaaaactctatacaacaaccagcccattgacttcctgaaaaagatggttgctgcctccatcaaagatggagaggctgtgtggtttggctgtgatgttggaaaacacttcaatagcaagctgggcctcagtgacatgaatctctatgaccatgagttagtgtttggtgtctccttgaagaacatgaataaagcggagaggctgacttttggtgagtcacttatgacccacgccatgaccttcactgctgtctcagagaaggatgatcaggatggtgctttcacaaaatggagagtggagaattcatggggtgaagaccatggccacaaaggttacctgtgcatgacagatgagtggttctctgagtatgtctacgaagtggtggtggacaggaagcatgtccctgaagaggtgctagctgtgttagagcaggaacccattatcctgccagcatgggaccccatgggagctttggctgagtgatactgccctccagctctttcctccttccatggaacctgacgtagctgcaaaggacagatccagggactgaagccaaagttatgcaagggactgtgtgttgccacaggacacagtcagatttccagtctccaccaggaacctcttcagaaagtgtgctttatgctgaaacagaatactgttaaaggaaaaaaaagaggggggaagatcaggtcatactatctactctcctcatctctaacagctcaggatctcttagcattttaattagatgtaattgtttgtctttaactgtcaaaaagtttggttctgtgtctgtgttttaataagacgagaggacgagcgattgaggtgtatggagagaaaacagacctaatgctccttgttcctagagtagagtggagggagggtggcctaagagttgagctctcggaactgcatgctgctggacagtatcactgtctttcctagatggcagtcactgaattccattttttcaaggtaatttcttgtgcctctaatagcccaagaatgggaggttgatcagatctgacatgattccttcctgttctgaactgtggggtgcacatctctgcttgagtcaggtttgagtagaggcttagagacagttgggtgagaacaaccaaaatcttatcatggtctcagtcataatcattagggggaactctagccaaatggtttaacttctgcctgtggaactggggattgggtgggcaggaaaaggtgatatccattctttctgataactagatggtgctgagaagcttttgaataaaaactttgctaaatgagaataagctgaaaaaa

SEQ ID NO: 11 - DNA, 1732 bp, Homo sapiens
  CDS (241)..(495)
gatgcctgatctcatcaatctagcgggagagacaggataacctgtccgagagtatagcgccacttatgactccgccggaaaaattactttaaaaatcgccaaaaattacttggagcaaagggcagtccggcggcgttcgccaaggtggcgcagtcggttttgacctgtagcagagaaccaattctggagaacagcctcacttctttgattgaatacttacataatgcattggaacatgacatgagattaaggtttaataatgatagaatgaagaccacaataaaagagaccacaatccttagctcagcaattcttacctttcttacctatttgatgaagatgtcttttgaaaggtgtactgcaaggaacaaaatgtttgtaaattctcccttttacccaagggtggataattactgtacctcctcatggaaaaagttttatttaaagtgttatttctcattgaatactatcaaaaaggaaaaaaaaatgacctaaacttttgagatagatttggctctagtaagtatttagttatatcacttgcatatctgggagaagaaataagagactatcatcagtacattcccatctactaaaaaaatttattttacacatgtcaagggattacttataacttccattttattactaatagcttgaacccttttaatgaagacctaactcctccaccagaaatttaagtttatgttcttactttgtttacttataaaatacatctcaggtatttcggatgtcttttttttttctaagcctatatgaaatgaaaaatatattggcaaagtaaatgtttaaaccttttacgttaaaattactttgaaagatgaaaagttagtgctgtttttgtcacgttatactgaaattaaatgtttataatttatattttgggtttatgtataaatcatggaatttatgcaaaaatatgagtagtacagattctcctctaattctgtaggactttgaataatgtgatatttttcttataattggacccttgtgttttgaagaaatgccaactgcttgaagaatctccttgttatttgtattatttgctatagggttagatgttgagaaattctgctgacaaaaaattttaagccagttttacactaaatgttcctcagtctgattaatttgttattggatgtattctgtatctttcttttgtaatttgtaacttttatccacttagcacgaatgattctattaaagaaaatcattaggaagtggtagaaactttaaatcgccccagagtttgcctgtttccatattttattatcttataatcttcgggagtgcttacacttatggagctaacattttcagagatacagcttcttatagtaacactaaaactttcttcctctttggactgaatacctataattataactatatggtagtttaagtttccttgtgattagtcaaaaataccattttagtatgaagcaatgaagtctattatttgttgtcccataattgagaaagcttaaatacaccttttattaagagtttgtaaattctagcttagtctacacagatttttatatcaatttgtttatatttttattaatgtcatttctggaagtgtgaaaatgttaatgttcaacaagcaacattaaaaatagatttgaaacatttatatatagagaggtacacatttatttactgtttaggtactgaagattatcacttaataaaaaatatatatccc

SEQ ID NO: 12 - DNA, 2913 bp, Homo sapiens
  CDS (511)..(2913)
atgaatatggacatcaatgattggtacttcgctactcatcatggtgatattagcggttctagacatatcctggatttgggactactaaaagcgcaaaagaaggcccagagaagggagcacatgctaaaacttgaggctgagaagaaaaagcttcgaactatacttcaagttcagtatgtattgcagaacttgacacaggagcacgtacaaaaagacttcaaagggggtttgaatggtgcagtgtatttgccttcaaaagaacttgactacctcattaagttttcaaaactgacctgccctgaaagaaatgaaagtctgagtgttgaagaccagatggagcagtcatccttgtacttttgggaccttttggaaggtagtgagaaagcagtggtaggaacgacatacaaacacttgaaggatctactgtctaaattgctgaactcaggctattttgaaagtatcccagttcccaaaaatgccaaggaaaaggaagtaccactggaggaagaaatgctaatacaatcagagaaaaaaacacaattatcgaagactgaatctgtcaaagagtcagagtctctaatggaatttgcccagccagagatacaaccacaagagtttcttaacagacgctatatgacagaagtagattattcaaacaaacaaggcgaagagcaaccttgggaagcagattatgctagaaaaccaaatctcccaaaacgttgggatatgcttactgaaccagatggtcaagagaagaaacaggagtcctttaagtcctgggaggcttctggtaagcaccaggaggtatccaagcctgcagtttccttagaacagaggaaacaagacacctcaaaactcaggtctactctgccggaagagcagaagaagcaggagatctccaaatccaagccatctcctagccagtggaagcaagatacacctaaatccaaagcagggtatgttcaagaggaacaaaagaaacaggagacaccaaagctgtggccagttcagctgcagaaagaacaagatccaaagaagcaaactccaaagtcttggacaccttccatgcagagcgaacagaacaccaccaagtcatggaccactcccatgtgtgaagaacaggattcaaaacagccagagactccaaaatcctgggaaaacaatgttgagagtcaaaaacactctttaacatcacagtcacagatttctccaaagtcctggggagtagctacagcaagcctcataccaaatgaccagctgctgcccaggaagttgaacacagaacccaaagatgtgcctaagcctgtgcatcagcctgtaggttcttcctctacccttccgaaggatccagtattgaggaaagaaaaactgcaggatctgatgactcagattcaaggaacttgtaactttatgcaagagtctgttcttgactttgacaaaccttcaagtgcaattccaacgtcacaaccgccttcagctactccaggtagccccgtagcatctaaagaacaaaatctgtccagtcaaagtgattttcttcaagagccgttacaggctacttcttctccagttacttgtagctcaaatgcttgcttggttactaccgatcaggcttcttctggatctgaaacagagtttatgacctcagagactcctgaggcagcaattcccccaggcaagcaaccgtcttcactagcttctccaaatcctcccatggcaaagggctctgaacagggcttccagtcacctccagcaagtagtagttcagtaaccattaacacagcaccctttcaagccatgcagacagtatttaacgttaatgcacctctgcctccacgaaaagaacaagaaataaaagaatccccttattcacctggctacaatcaaagttttaccacagcaagtacacaaacaccaccccagtgccaactgccatctatacatgtagaacaaactgtccattctcaagagactgcaaattatcatcctgatggaactattcaagtaagcaatggtagccttgccttttacccagcacagacgaatgtgtttcccagacctactcagccatttgtcaatagccggggatctgttagaggatgtactcgtggtgggagattaataaccaattcctatcggtcccctggtggttataaaggttttgatacttatagaggactcccttcaatttccaatggaaattatagccagctgcagttccaagctagagagtattctggagcaccttattcccaaaggtgtttggaaacatctgagcctctttggttgctggggaaggccaggataatttccagcagtgttataagcgaggagggacatctggtggtccacgagcaaattcgagaggtgagcagcccagaaagagacaacgaaacctttaacagtggtgactctggacaaggagactcccgtagcatgacccctgtggatgtgccagtgacaaatccagcagccaccatactgccagtacacgtctaccctctgcctcagcagatgcgagttgccttctcagcagccagaacctctaatctggcccctggaactttagaccaacctattgtgtttgatcttcttctgaacaacttaggagaaacttttgatcttcagcttggtagatttaattgcccagtgaatggcacttacgttttcatttttcacatgctaaagctggcagtgaatgtgccactgtatgtcaacctcatgaagaatgaagaggtcttggtatcagcctatgccaatgatggtgctccagaccatgaaactgctagcaatcatgcaattcttcagctcttccagggagaccagatatggttacgtctgcacaggggagcaatttatggaagtagctggaaatattctacgttttcaggctatcttctttatcaagattga

SEQ ID NO: 13 - DNA, 2643 bp, Homo sapiens
  CDS (511)..(2643)
atgaatatggacatcaatgattggtacttcgctactcatcatggtgatattagcggttctagacatatcctggatttgggactactaaaagcgcaaaagaaggcccagagaagggagcacatgctaaaacttgaggctgagaagaaaaagcttcgaactatacttcaagttcagtatgtattgcagaacttgacacaggagcacgtacaaaaagacttcaaagggggtttgaatggtgcagtgtatttgccttcaaaagaacttgactacctcattaagttttcaaaactgacctgccctgaaagaaatgaaagtctgagtgttgaagaccagatggagcagtcatccttgtacttttgggaccttttggaaggtagtgagaaagcagtggtaggaacgacatacaaacacttgaaggatctactgtctaaattgctgaactcaggctattttgaaagtatcccagttcccaaaaatgccaaggaaaaggaagtaccactggaggaagaaatgctaatacaatcagagaaaaaaacacaattatcgaagactgaatctgtcaaagagtcagagtctctaatggaatttgcccagccagagatacaaccacaagagtttcttaacagacgctatatgacagaagtagattattcaaacaaacaaggcgaagagcaaccttgggaagcagattatgctagaaaaccaaatctcccaaaacgttgggatatgcttactgaaccagatggtcaagagaagaaacaggagtcctttaagtcctgggaggcttctggtaagcaccaggaggtatccaagcctgcagtttccttagaacagaggaaacaagacacctcaaaactcaggtctactctgccggaagagcagaagaagcaggagatctccaaatccaagccatctcctagccagtggaagcaagatacacctaaatccaaagcagggtatgttcaagaggaacaaaagaaacaggagacaccaaagctgtggccagttcagctgcagaaagaacaagatccaaagaagcaaactccaaagtcttggacaccttccatgcagagcgaacagaacaccaccaagtcatggaccactcccatgtgtgaagaacaggattcaaaacagccagagactccaaaatcctgggaaaacaatgttgagagtcaaaaacactctttaacatcacagtcacagatttctccaaagtcctggggagtagctacagcaagcctcataccaaatgaccagctgctgcccaggaagttgaacacagaacccaaagatgtgcctaagcctgtgcatcagcctgtaggttcttcctctacccttccgaaggatccagtattgaggaaagaaaaactgcaggatctgatgactcagattcaaggaacttgtaactttatgcaagagtctgttcttgactttgacaaaccttcaagtgcaattccaacgtcacaaccgccttcagctactccaggtagccccgtagcatctaaagaacaaaatctgtccagtcaaagtgattttcttcaagagccgttacaggtatttaacgttaatgcacctctgcctccacgaaaagaacaagaaataaaagaatccccttattcacctggctacaatcaaagttttaccacagcaagtacacaaacaccaccccagtgccaactgccatctatacatgtagaacaaactgtccattctcaagagactgcagcaaattatcatcctgatggaactattcaagtaagcaatggtagccttgccttttacccagcacagacgaatgtgtttcccagacctactcagccatttgtcaatagccggggatctgttagaggatgtactcgtggtgggagattaataaccaattcctatcggtcccctggtggttataaaggttttgatacttatagaggactcccttcaatttccaatggaaattatagccagctgcagttccaagctagagagtattctggagcaccttattcccaaagggataatttccagcagtgttataagcgaggagggacatctggtggtccacgagcaaattcgagagcagggtggagtgattcttctcaggtgagcagcccagaaagagacaacgaaacctttaacagtggtgactctggacaaggagactcccgtagcatgacccctgtggatgtgccagtgacaaatccagcagccaccatactgccagtacacgtctaccctctgcctcagcagatgcgagttgccttctcagcagccagaacctctaatctggcccctggaactttagaccaaccttatggtgttgatcttcttctgaacaacttaggagaaacttttgatcttcagcttggtagatttaattgcccagtgaatggcacttacgttttcatttttcacatgctaaagctggcagtgaatgtgccactgtatgtcaacctcatgaagaatgaagaggtcttggtatcagcctatgccaatgatggtgctccagaccatgaaactgctagcaatcatgcaattcttcagctcttccagggagaccagatatggttacgtctgcacaggggagcaatttatggaagtagctggaaatattctacgttttcaggctatcttctttatcaagattga

SEQ ID NO: 14 - DNA, 1766 bp, Homo sapiens
  CDS (187)..(1557)
ccattgaggaccatcgcaaggaccggaccggaattcccgggtcgacccacgcgtccgaggccctggtgaagtacggaatgccggaagggccgggctcaaagctccgcctctggcgcgaccgacgactggagcgcagggcaggggtagaggctcgtaaatggaactggtagtcagctggagagcagcatggaggcgtcctgggggagcttcaacgctgagcggggctggtatgtctctgtccagcagcctgaagaagcggaggccgaagagttgagtccgttgctaagcaacgaacttcacagacagcgatccccaggtgtttcatttggtttatcagtgtttaatttgatgaatgccatcatgggaagtggcatccttggcttagcttatgttatggctaataccggtgtctttggatttagcttcttgctgctgacagttgctctcctggcttcttactcagtccatcttctgcttagtatgtgtattcagacagctgtaacatcttatgaagatcttggactctttgcatttggattacctggaaagttggtggtggcaggcaccataataattcagaatattggagctatgtcatcttatcttttaattattaaaacagagcttcctgctgctattgcagaatttttgactggagactatagtagatattggtatcttgatggacaaacactactaataatcatatgtgttggcattgtgttccctcttgcacttcttcccaaaataggctttcttggctacacaagtagtttatcatttttctttatgatgttctttgctcttgtggtaataattaaaaaatggtccatcccttgtcctctgacattaaattatgtagagaaaggcttccagatttcaaatgttacagatgattgtaagccaaagctctttcatttctccaaagagagtgcttatgccttaccaaccatggctttttcatttctctgccatacctcaatattgcccatatactgtgaacttcaaagtccttcaaagaaaagaatgcagaatgttaccaatacagcaattgctttaagttttctcatttattttatatctgcactctttgggtacctcactttttatgacaaagtggagtcagaattactaaaaggttatagtaaatacttatcacatgatgttgttgtcatgactgtgaagttatgcatactatttggtgtgcttttgacagtccctctaatccacttccctgccagaaaagctgtaacaatgatgtttttctccaattttccattctcatggattcgccattttttgatcactctagcactcaatattatcatcgttttacttgcaatatatgttcctgacattagaaatgtatttggtgtagttggtgccagtacatcaacatgtttgatttttatattcccaggactattttatcttaaacttagcagagaggattttctgtcatggaaaaagcttggggcattcgttttgctcatctttggaattttggttgggaattttagtttagcactcatcatttttgattggattaataaataaaagaaatattttcctacttcttacaagaataatatacccctagttgcaagaatgaattattccggaagacaccctggatgaaaaataacattttaataaaaattattaacagaaaagcagaacaaaatggcagtgggtatggggaagtaagagtgtagcagttttaatcaaaaaaagaaacaaactcgaaatgctcaaaaaaaaaaaaa

SEQ ID NO: 15 - DNA, 3503 bp, Homo sapiens
  CDS (225)..(3230)
tgtacccctgcaggtaccggtccggaattcccgggtcgacccacgcgtccgcaagtgggattgtggtcagagctttgtggagggaaaaaaaacctggtgggggcaggagagtaaaaagaagaaacccaggcagacaggcagttggacacactgaggaagaccccccacgagtgggaaccccctggaaggaacacaccggccccggcccccaggaagggagcacaatggaggccgctcatgctaaaaccacggaggaatgtttggcctattttggggtgagtgagaccacgggcctcaccccggaccaagttaagcggaatctggagaaatacggcctcaatgagctccctgctgaggaagggaagaccctgtgggagctggtgatagagcagtttgaagacctcctggtgcggattctcctcctggccgcatgcatttccttcgtgctggcctggtttgaggaaggtgaagagaccatcactgcctttgttgaaccctttgtcatcctcttgatcctcattgccaatgccatcgtgggggtttggcaggagcggaacgcagagaacgccatcgaggccctgaaggagtatgagccagagatggggaaggtctaccgggctgaccgcaagtcagtgcaaaggatcaaggctcgggacatcgtccctggggacatcgtggaggtggctgtgggggacaaagtccctgcagacatccgaatcctcgccatcaaatccaccacgctgcgggttgaccagtccatcctgacaggcgagtctgtatctgtcatcaaacacacggagcccgttcctgacccccgagctgtcaaccaggacaagaagaacatgcttttctcgggcaccaacattgcagccggcaaggccttgggcatcgtggccaccaccggtgtgggcaccgagattgggaagatccgagaccaaatggctgccacagaacaggacaagacccccttgcagcagaagctggatgagtttggggagcagctctccaaggtcatctccctcatctgtgtggctgtctggcttatcaacattggccacttcaacgaccccgtccatgggggctcctggttccgcggggccatctactactttaagattgccgtggccttggctgtggctgccatccccgaaggtcttcctgcagtcatcaccacctgcctggccctgggtacccgtcggatggcaaagaagaatgccattgtaagaagcttgccctccgtagagaccctgggctgcacctctgtcatctgttccgacaagacaggcaccctcaccaccaaccagatgtctgtctgcaagatgtttatcattgacaaggtggatggggacatctgcctcctgaatgagttctccatcaccggctccacttacgctccagagggagaggtcttgaagaatgataagccagtccggccagggcagtatgacgggctggtggagctggccaccatctgtgccctctgcaatgactcctccttggacttcaacgaggccaaaggtgtctatgagaaggtcggcgaggccaccgagacagcactcaccaccctggtggagaagatgaatgtgttcaacacggatgtgagaagcctctcgaaggtggagagagccaacgcctgcaactcggtgatccgccagctaatgaagaaggaattcaccctggagttctcccgagacagaaagtccatgtctgtctattgctccccagccaaatcttcccgggctgctgtgggcaacaagatgtttgtcaagggtgcccctgagggcgtcatcgaccgctgtaactatgtgcgagttggcaccacccgggtgccactgacggggccggtgaaggaaaagatcatggcggtgatcaaggagtggggcactggccgggacaccctgcgctgcttggccctggccacccgggacacccccccgaagcgagaggaaatggtcctggatgactctgccaggttcctggagtatgagacggacctgacattcgtgggtgtagtgggcatgctggaccctccgcgcaaggaggtcacgggctccatccagctgtgccgtgacgccgggatccgggtgatcatgatcactggggacaacaagggcacagccattgccatctgccggcgaattggcatctttggggagaacgaggaggtggccgatcgcgcctacacgggccgagagttcgacgacctgcccctggctgaacagcgggaagcctgccgacgtgcctgctgcttcgcccgtgtggagccctcgcacaagtccaagattgtggagtacctgcagtcctacgatgagatcacagccatgacaggtgatggcgtcaatgacgcccctgccctgaagaaggctgagattggcattgccatgggatctggcactgccgtggccaagactgcctctgagatggtgctggctgacgacaacttctccaccatcgtagctgctgtggaggagggccgcgccatctacaacaacatgaagcagttcatccgctacctcatttcctccaacgtgggcgaggtggtctgtatcttcctgaccgctgccctggggctgcctgaggccctgatcccggtgcagctgctatgggtgaacttggtgaccgacgggctcccagccacagccctgggcttcaacccaccagacctggacatcatggaccgccccccccggagccccaaggagcccctcatcagtggctggctcttcttccgctacatggcaatcgggggctatgtgggtgcagccaccgtgggagcagctgcctggtggttcctgtacgctgaggatgggcctcatgtcaactacagccagctgactcacttcatgcagtgcaccgaggacaacacccactttgagggcatagactgtgaggtcttcgaggcccccgagcccatgaccatggccctgtccgtgctggtgaccatcgagatgtgcaatgcactgaacagcctgtccgagaaccagtccctgctgcggatgccaccctgggtgaacatctggctgctgggctccatctgcctctccatgtccctgcacttcctcatcctctatgttgaccccctgccgatgatcttcaagctccgggccctggacctcacccagtggctcatggtcctcaagatctcactgccagtcattgggctcgacgaaatcctcaagttcgttgctcggaactacctagaggatccagaagatgaaagaaggaagtgaacatccttttgctctgtcctccccaccccgatagtgacacatcttcaggcagagctgtggcacagacccccgtcctgtcccccacacccgtgtcatgtgtctgtttataaacatgtccccttccctttccttccccctcggccacccgcctccctctcaaccttgtaaattccccttcccaaccccgaggggcttgcagggacaaggcgaccgactgcgctgagctgcttatttattgaaaataaacgacggaaaagtctgaaaaaaaaaaaa

SEQ ID NO: 16 - DNA, 6728 bp, Homo sapiens
  CDS (1)..(3159)
atgattaggaccctgctgctgtccactttggtggctggagccctcagttgtggggtctccacttacgcgcctgatatgtctaggatgcttggaggtgaagaagcgaggcccaacagctggccctggcaggtctccctgcagtacagctccaatggccagtggtaccacacctgcggagggtccctgatagccaacagctgggtcctgacggctgcccactgcatcagctcctccaggatctaccgcgtgatgctgggccagcataacctctacgttgcagagtccggctcgctggccgtcagtgtctctaagattgtggtgcacaaggactggaactccaaccaggtctccaaagggaacgacattgccctgctcaaactggctaaccccgtctccctcaccgacaagatccagctggcctgcctccctcctgccggcaccattctacccaacaactacccctgctacgtcacaggctggggaaggctgcagaccaacggggctctccctgatgacctgaagcagggccggttgctggttgtggactatgccacctgctccagctctggctggtggggcagcaccgtgaagacgaatatgatctgtgctgggggtgatggcgtgatatgcacctgcaacggagactccggtgggccgctgaactgtcaggcatctgacggccggtgggaggtgcatggcatcggcagcctcacgtcggtccttggttgcaactactactacaagccctccatcttcacgcgggtctccaactacaacgactggatcaattcgctctggaaaggaagagaaatggaagtgagaaagttgagcatttcctggcagttcttgatagttctggttctgatcctgcaaattctgtctgcgttggattttgacccatacagagtcctaggggtcagccgaacagccagtcaggctgatattaaaaaggcttataagaagctcgcccgggaatggcatcctgacaaaaacaaagatcctggagcagaagacaagttcattcaaatcagtaaggcttacgagattctttcaaatgaagaaaagagatcaaattatgatcaatatggagacgctggagagaaccagggctaccagaagcagcaacagcagcgagagtatcgcttccgccatttccatgaaaatttttattttgatgaatccttttttcacttcccttttaattctgaacggcgggactcaattgacgaaaagtatttattgcacttttcacattatgtgaatgaagtggttccagatagcttcaagaaaccctacctcatcaagatcacctccgattggtgctttagctgcattcatatcgagcctgtgtggaaagaagtcattcaagaactggaagaattgggtgtaggaattggcgtggtccatgctgggtatgagagacgcctggcccatcacctaggggcacacagcacgccctctatcctaggaatcattaacgggaaaatctccttcttccacaatgcagttgtccgtgaaaatctgcgacaatttgtagaaagtcttcttccagggaacttggtggagaaagttacaaataaaaattacgtcagattcctctctggctggcagcaagagaataagcctcatgtccttctgtttgaccaaacgcccattgtgccactgttatacaagttgactgcctttgcatacaaagattatttatcatttggatatgtatatgtgggtttgagagggacggaagagatgacaaggcggtacaacatcaatatctacgcccctaccctcttggtctttaaagaacatataaacaggcctgccgatgttatccaggcccgaggtatgaagaagcaaatcattgacgacttcatcacccgaaacaaatatctattggcagccaggctcaccagccagaagttgttccatgaactctgccctgtgaaacggtcgcatcgacagaggaagtactgtgtggttttattgactgctgagactaccaagttgagcaaaccctttgaggctttcctgtcctttgccctggcaaacactcaagacacagtgagatttgtgcatgtctacagcaatcggcagcaggagtttgccgacaccttactaccagacagtgaggcgtttcaagggaaatcagcggtgtctattttagaaaggcgcaacacagcaggaagggtggtgtataaaaccctggaagacccttggattgggagtgagagtgacaaatttatcctcttgggctatctcgaccagctgcgtaaagatccagctcttctgtcctctgaagcagtgcttcctgacctgaccgatgaacttgcccctgtttttctccttcgatggttctactctgcttctgactacatctcagactgctgggatagcatttttcacaacaactggagggaaatgatgcccctgctgtccctgatcttctctgccctcttcatcctcttcggcactgtcatcgttcaggctttcagcgactctaatgatgagcgagagtcaagccctccagaaaaagaggaagcccaagagaagactgggaaaactgagccaagcttcaccaaagaaaacagcagcaagattcctaaaaaaggctttgtggaggtaactgaactcacagatgtaacatacaccagtaacttggtacgtctgaggccaggccacatgaatgtggtcctcatcctgtcgaattctaccaagaccagcctactacagaaatttgctttggaggtctacacatttactgggagcagctgcctacacttctcctttctgagtctagataaacacagagaatggctagaatacttactagaatttgctcaagatgcagctccaatcccaaaccaatatgataagcatttcatggagcgtgactacactggttatgtactggctctgaatggccacaagaaatacttctgcctcttcaagccccaaaagacagtcgaagaggaggaagccatagggtcgtgcagtgatgttgactcttccctctacctgggtgaatctcgagggaaaccttcctgtggccttggatccaggcccatcaaaggaaagttgagcaagctctctttatggatggaacgcctgctggagggctccttacagaggttttatatcccatcatggcctgaactagactgagaggattttccaaagagatttgaactcttcagactttttaacatgcccctgtgaacaggtattttcaggactcaaactaccacaatgaacagagtatagattttagattgctcttctagaaccatggctagaagaatctttcctttgtcctgttctaacctaggaatgaaaaacaccaccagtttgaatcgcctagatgaaaatcttttcctctgggtgttatttttccccactgaatgccacaccattgaaaatagactgctcatcccctcttcctttcttgtccttgtcccatgctcaccccaccctcctgtcctgtgtcttggagaagcacagggctccaccctgcaagcggcatctggcggaccctcatgagcctgtcgtgcaggccaggtcattggccccttccccaatcccggccctgctgtgctgctgccatggcgcatgctcctaactctgaacaacccacggcagcttctagccccgcatctggaaaaaggcccctttccaagcaatctcacgtttactggttgttctgggagtaagtggctaaatgtatattttgggggtatcccccaacaacagtttgttggccacaggttgaaaaggaaaggaataaacgggagttctgcatgtgagttctcaagaaaaggaaagggaggctgagcagtggctgaagcgatgcagccttgagacacgctgtgagcatcccatccgccgccccagcgctgctggtagccaggggaggggtctgcacagcgagaagtactgtgatgactttgagccgttgacatgtatgtcttcagatgcctttctgcctctgtcgattttagggtatggatattaggagccataacttgtaatcttgttctctgaacgtagagataagctgctataaagccagtagatgttaaactgaagagaaattattcccacctgctatgagtcaggcttaaggaatctcttcaatagtgtctctttagtaaaataccaaacatgtctttgtatcaaggaacttaaaatttctcaacaattgtattttgaacactgttaccctaaaagtgctgtctcttcaagtcatcttttgcaggaagtgagccaagatttgttctagactcccattttgcaaaaggcttactttccacttctgggctgtattttgatgtctcatcttcattgttttcactcttaacttagagctgcttcaccagtattggggtcagactggccatcagcacctgagcgtgctgagctccaggtatagtggaccccagggtgcctcataccagccagttagagagcataccttttatttttcagggcagaatgaccagtggttctgagtttgagtttggacagcttcaaagagtggtccgttcaaatgtcaaagcaaggtgcctttggtggctttgtgaagggtgaaaatcagtgatgggacatttactaagtatttctttttttttttttttttttttagttgttgagacagagtttcactcttgttgcccaggctggagtgaaatggtgcgatctcggttcaccgcaacctccacatcccaggttcaagtgattctcctgcctcagcctcctgagtagctaggattacaggcatgtgccaccatgtaattagcccggctaattttgtatttttagtagagacgggatttctccatgttgatcaggctggtcatgaactcctgacctcaggtgatctgcctgcctcagcctcccaaagtgctgctgggattacaggcgtgagccaccactcccggctaagttagtatttctttaatcttaatgctttaaactaagccacttggatcctgaataatttaaatcttgagctacattggtaagtaataaattatttaaggccaggaattcctgtagttttcatggagtctgtagctttattaaaaaataaatcactgccaggcttcattcttccatatgatcctctaaaaatggacacttcctctgaatgctgtatctcatggcacctggtccaactagaaatggtcaaggaattcatttggctccttgatacatcagtcctcaatattactttctaggtattttatggccagattgcttatatgagtggtcttttggtttggtagtaggtttttatttttaatttctgtactaatgaaattcctgactttaatttctgaaaaccaaaaactctccaagtgtatttatttatattttttttaatagagacgaggtcttgctatgttgcccaggctggtcccaaactcctggcctcaagcagtccttccaccttggcctcccaaagtgctgggattatcaatatgagccaccatgccagatttgttcatttttaaatatttttatctcttcaagtcatcttttgatcttttaaaaagcaccttcaaacagctgcaccttccatttgcactaggaaatgaaggtagtgatgggattggcaatgttcctggcagatgtttcagcccaaaagctcttctacagaccggtttagagctggtgccctatgagaatattagggagcttttattttaaattgaactttacccttgtccatgcaaggcattcctcctgaatgcatccatgaatttgtttacttttgcgtcaaacatatgagccattgtcatgctcagcctgtgccaccattgctctgtctgatgtatgtaatcatacaagacctgattttggttctaacacagtggtctttgactatcaacattgatgtttttagagatgggttcttctggttgatacagactatgcattgcgtttagcagatggggtaaaactggcctaaaacaagtctttgcagaatacatgccaatttccaaaaaaaaaaaaaaaatttgttgctcaggtgttgcacaatttttatctaacactgaggctatcagctccaactaaacaacatttcagtgggtgaggctgccctaacttccattaggggccatggtctcactgccatcacttattagccatgagaatttggttgtagttttcaggtaggttggtttcttcctcatttgcagcttgttgatacttgttcctttttatttattaacatcccaatcaatttgcagctgccatcattacataaatatttttctgttataaaaagaagtgtgatctgtttttttagtgatttcctttgtttgggaatagagattggaagcacatactcagacctgttttgttaactagaattctttaaaagctgatgccaaacatctttacagaggaactgtagttcacatccacctgtctgacattgtcccctaaaaacaagtgcagtgtggcagctgctgaatctgtctgttcagtttgtcaaggaggataattatgcttgggagagatctgaaaagaaggtgaatattttgcacttttgatactcttaggaacaaataacttatttggcaaattgtttcttttttatgttttgggtgttgtttttgttttttgactttttttgtattgtgaacaggcactgaagctgatgttattttaagattacagaatggaaaaagaaataaactattttaatgtctgataaaaaaaaaaac

SEQ ID NO: 17 - DNA, 1203 bp, Homo sapiens
  CDS (107)..(1123)
atttggccctcgaggccaagaattcggcacgagagaagccactcttctttgaaaaggattatcacctgatcaggttctctctgcatttgcccctttagattgtgaaatgtggctcaaggtcttcacaactttcctttcctttgcaacaggtgcttgctcggggctgaaggtgacagtgccatcacacactgtccatggcgtcagaggtcaggccctctacctacccgtccactatggcttccacactccagcatcagacatccagatcatatggctatttgagagaccccacacaatgcccaaatacttactgggctctgtgaataagtctgtggttcctgacttggaataccaacacaagttcaccatgatgccacccaatgcatctctgcttatcaacccactgcagttccctgatgaaggcaattacatcgtgaaggtcaacattcagggaaatggaactctatctgccagtcagaagatacaagtcacggttgatgatcctgtcacaaagccagtggtgcagattcatcctccctctggggctgtggagtatgtggggaacatgaccctgacatgccatgtggaagggggcactcggctagcttaccaatggctaaaaaatgggagacctgtccacaccagctccacctactccttttctccccaaaacaatacccttcatattgctccagtaaccaaggaagacattgggaattacagctgcctggtgaggaaccctgtcagtgaaatggaaagtgatatcattatgcccatcatatattatggaccttatggacttcaagtgaattctgataaagggctaaaagtaggggaagtgtttactgttgaccttggagaggccatcctatttgattgttctgctgattctcatccccccaacacctactcctggattaggaggactgacaatactacatatatcattaagcatgggcctcgcttagaagttgcatctgagaaagtagcccagaagacaatggactatgtgtgctgtgcttacaacaacataaccggcaggcaagatgaaactcatttcacagttatcatcacttccgtaggtatgtgtgacatacaaggaagggatcctaataaaacatgaatgcatgctgaaagaactttattaaaaaaaaagatctttaattaagcggtgcaagcttattccctgttagtgagtgttaa

SEQ ID NO: 18 - DNA, 1800 bp, Homo sapiens
  CDS (165)..(962)
  misc_feature (1)...(1800): n = a,t,c or g
ttcccgggtcgacccacgcgtccggaagtttaaacttgtaagcttaagcttccgtttataaacagaagtttaaaattataggtcctgtttaacattcagctctgttaactcactcatctttttgtgtttttacactttgtcaagatttctttacatattcatcaatgtctgaagaagttacttatgcagatcttcaattccagaactccagtgagatggaaaaaatcccagaaattggcaaatttggggaaaaagcacctccagctccctctcatgtatggcgtccagcagccttgtttctgactcttctgtgccttctgttgctcattggattgggagtcttggcaagcatgtttcacgtaactttgaagatagaaatgaaaaaaatgaacaaactacaaaacatcagtgaagagctccagagaaatatttctctacaactgatgagtaacatgaatatctccaacaagatcaggaacctctccaccacactgcaaacaatagccaccaaattatgtcgtgagctatatagcaaagaacaagagcacaaatgtaagccttgtccaaggagatggatttggcataaggacagctgttatttcctaagtgatgatgtccaaacatggcaggagagtaaaatggcctgtgctgctcagaatgccagcctgttgaagataaacaacaaaaatgcattggaatttataaaatcccagagtagatcatatgactattggctgggattatctcctgaagaagattccactcgtggtatgagagtggataatataatcaactcctctgcctgggttataagaaacgcacctgacttaaataacatgtattgtggatatataaatagactatatgttcaatattatcactgcacttataaacaaagaatgatatgtgagaagatggccaatccagtgcagcttggttctacatattttagggaggcatgaggcatcaatcaaatacattgaaggagtgtagggggtgggggttctaggctataggtaaatttaaatattttctggttgacaattagttgagtttgtctgaagacctgggattttatcatgcagatgaaacatccaggtagcaagcttcagagagaatagactgtgaatgttaatgccagagaggtataatgaagcatgtcccacctcccactttccatcatggcctgaaccctggaggaagaggaagtccattcagatagttgtggggggccttcgaattttcattttcatttacgttcttccccttctggccaagatttgccagaggcaacatcaaaaaccagcaaattttaattttgtcccacagcgttgctagggtggcatggctccccatctcgggtccatcctatacttccatgggactccctatggctgaaggccttatgagtcaaaggacttatagccaattgattgttctaggccaggtaagaatggatatggacatgcatttattacctcttaaaattattattttaagtaaaagccaataaacaaaaacgaaaaggcaagttacgagactgacttatttttaacttctgtgtgttgagctactgtaagcttggcttttgttaaagacatacagcaattagctatgcaaacataagcattgttctgaaaaaaaatntatagatagatatgtttatctcccataactcataactggggagtattataccccggnggctttnttacaaggggttttttatccngttaggnaaatnttttccccggaaattntataataggcnaattaanttttcagggttgggggntggtt

SEQ ID NO: 19 - DNA, 1807 bp, Homo sapiens
  CDS (126)..(887)
tggtaccggtccggaattcccgggtcgacgatttcgtgcgactcgggctgagggagctcgggccaatcagagggacggccccagaatggcatggtagatggaacgcagctgagaggtctgacaagatgtaccaggtcccactaccactggatcgggatgggaccctggtacggctccgcttcaccatggtggccctggtcacggtctgctgtccacttgtcgccttcctcttctgcatcctctggtccctgctcttccacttcaaggagacaacggccacacactgtggggtgcccaattacctgccctcggtgagctcagccatcggcggggaggtgccccagcgctacgtgtggcgtttctgcatcggcctgcactcggcgcctcgcttcttggtggccttcgcctactggaaccactacctcagctgcacctccccgtgttcctgctatcgcccgctctgccgcctcaacttcggcctcaatgtcgtggagaacctcgcgttgctagtgctcacttatgtctcctcctccgaggacttcaccatccacgaaaatgctttcattgtgttcattgcctcatccctcgggcacatgctcctcacctgcattctctggcggttgaccaagaagcacacagtaagtcaggaggatcgcaagtcctacagctggaaacagcggctcttcatcatcaacttcatctccttcttctcggcgctggctgtctactttcggcacaacatgtattgtgaggctggagtgtacaccatctttgccatcctggagtacactgttgtcttaaccaacatggcgttccacatgacggcctggtgggacttcgggaacaaggagctgctcataacctctcagcctgaggaaaagcgattctgaacccttcagtcctgcttgggaggacgcagcccactgcccagaaacaagaaacacgataccattctggccttccccaccccacatcctctcttggccttactgaagatgggggaagggtaagaaggaagggtgtaggccaaggctcaccccagtgctgctggcttctcctctccacccctcatatgggcgtggggtcctcaaacatcacctttacctgagaggccccaagaagctgagctggcagagagctccaccatttggtgctaaaaaaaaaaaacgtcctgaggttcatgaccaccatccagtttctggcctttacacagtcacctttcactgaggtcaggagcccctgagcaggggctgttccctgacaaccacagccatttttttgcacgggggtcattcataggactaatgtatttcatgatctactgtgcacatccaggcctgtggccacagtcccctgctaaagttgctcaggtgttctagtcctgacttcacctttttgatttggtgtgtgccctagggtatgtacccttccccatctgagcctcggtgtgtccatgtgtctggtgggggatgggtggactgtatgatttccaaggactctaccagtcagtggttctgatgtcatcgggtggaggtggtgttctatacctaaaggatgacctgctccagaaacagcaccagcacagcatgtattttcttctcttctgaaagttctggcttgtagacccctcccctcctttgcaaaggtatgggatagaggggtcagatgcagatctctactgtaaaatgggctccctggtatctcctgtcttccctactgctccaaaccctaaattttggttgtacattttatttgaaaggaaaataaattttttttttgggccaaaaaaaaaaaaaaaaaaaaaaaa

SEQ ID NO: 20 - DNA, 1823 bp, Homo sapiens
  CDS (179)..(1582)
  misc_feature (1)...(1823): n = a,t,c or g
tggttggaccnagaaatgaaaaatttagaacgcctttagaacgcctgcggtaccggcccggaattcccgggtcgacccacgcgtccggcggcgcggcatactcagcggcagagacggaagaacagcgctcccgaggccgcgggagcctgcagagaggacagccggcctgcgccgggacatgcggccccaggagctccccaggctcgcgttcccgttgctgctgttgctgttgctgctgctgccgccgccgccgtgccctgcccacagcgccacgcgcttcgaccccacctgggagtccctggacgcccgccagctgcccgcgtggtttgaccaggccaagttcggcatcttcatccactggggagtgttttccgtgcccagcttcggtagcgagtggttctggtggtattggcaaaaggaaaagataccgaagtatgtggaatttatgaaagataattaccctcctagtttcaaatatgaagattttggaccactatttacagcaaaattttttaatgccaaccagtgggcagatatttttcaggcctctggtgccaaatacattgtcttaacttccaaacatcatgaaggctttaccttgtgggggtcagaatattcgtggaactggaatgccatagatgaggggcccaagagggacattgtcaaggaacttgaggtagccattaggaacagaactgacctgcgttttggactgtactattccctttttgaatggtttcatccgctcttccttgaggatgaatccagttcattccataagcggcaatttccagtttctaagacattgccagagctctatgagttagtgaacaactatcagcctgaggttctgtggtcggatggtgacggaggagaaccggatcaatactggaacagcacaggcttcttggcctggttatataatgaaagcccagttcggggcacagtagtcaccaatgatcgttggggagctggtagcatctgtaagcatggtggcttctatacctgcagtgatcgttataacccaggacatcttttgccacataaatgggaaaactgcatgacaatagacaaactgtcctggggctataggagggaagctggaatctctgactatcttacaattgaagaattggtgaagcaacttgtagagacagtttcatgtggaggaaatcttttgatgaatattgggcccacactagatggcaccatttctgtagtttttgaggagcgactgaggcaaatggggtcctggctaaaagtcaatggagaagctatttatgaaacccatacctggcgatcccagaatgacactgtcaccccagatgtgtggtacacatccaagcctaaagaaaaattagtctatgccatttttcttaaatggcccacatcaggacagctgttccttggccatcccaaagctattctgggggcaacagaggtgaaactactgggccatggacagccacttaactggatttctttggagcaaaatggcattatggtagaactgccacagctaaccattcatcagatgccgtgtaaatggggctgggctctagccctaactaatgtgatctaaagtgcagcagagtggctgatgctgcaagttatgtctaaggctaggaactatcaggtgtctataattgtagcacatggagaaagcaaatgtaaaactggataagaaaattattttggcagttcagccctttccctttttcccactaaattttttcttaaattacccatgtaaccattttaactctccagtgcactttgccattaaagtctcttcacattgatttgtttccaaaaaaaaaaaa

SEQ ID NO: 21 - DNA, 4882 bp, Homo sapiens
  CDS (69)..(1154)
ctgcggtaccgctccggaattcccgggtcgacgatttcgtgtgaagcgtacctagggcgggaggcgacatggagacaggggcggccgagctgtatgaccaggcccttttgggcatcctgcagcacgtgggcaacgtccaggatttcctgcgcgttctctttggcttcctctaccgcaagacagacttctatcgcttgctgcgccacccatcggaccgcatgggcttcccgcccggggccgcgcaggccttggtgctgcaggtattcaaaacctttgaccacatggcccgtcaggatgatgagaagagaaggcaggaacttgaagagaaaatcagaagaaaggaagaggaagaggccaagactgtgtcagctgctgcagctgagaaggagccagtcccagttccagtccaggaaatagagattgactccaccacagaattggatgggcatcaggaagtagagaaagtgcagcctccaggccctgtgaaggaaatggcccatggttcacaggaggcagaagctccaggagcagttgctggtgctgctgaagtccctagggaaccaccaattcttcccaggattcaggagcagttccagaaaaatcccgacagttacaatggtgctgtccgagagaactacacctggtcacaggactatactgacctggaggtcagggtgccagtacccaagcacgtggtgaagggaaagcaggtctcagtggcccttagcagcagctccattcgtgtggccatgctggaggaaaatggggagcgcgtcctcatggaagggaagctcacccacaagatcaacactgagagttctctctggagtctcgagcccgggaagtgcgttttggtgaacctgagcaaggtgggcgagtattggtggaacgccatcctggagggagaagagcccatcgacattgacaagatcaacaaggagcgctccatggccaccgtggatgaggaggaacaggcggtgttggacaggcttacctttgactaccaccagaagctgcagggcaagccacagagccatgagctgaaagtccatgagatgctgaagaaggggtgggatgctgaaggttctcccttccgaggccagcgattcgaccctgccatgttcaacatctccccgggggctgtgcagttttaatgaccagaaggaaaggaaaccctcgccggtggggaggcagagccttatcctcggctgcccttcttggctccctgcattccagggacttgctcgtcttgtttacccctagccatcctttctttcaagggtgaaccaggccttccaccctgaccttgcatctccagactgttccagagaaggtgcggggccagctgctatgtggtggccgctgtggctgacactgagtgaaggtgtttgaaatgcaggagaggatatcccagcaaattgggatcacatgcttttgtctccacagcaaccagccactgcaggcagcatgtctttcctcccctgctctctgcttgctgttgttttgacgctattctgcttgcatgtcttctggttgggatgtggagttgttgctggactctcaggcgaagctgaagtcattgaagtgtgtgaagctctgtgcttgcatgagggcaagcaaggaatggctgtgcctgaggctgctctgggaaactccttgccccttgacctcttttgagagcattcacgtggtcttcttgctcatccccttataaatgtgctttgcctgcctcagcctcatggtcagagcagtggagactggagccctgtttgcacgttctggttgttcggagaaagcctaggttctgggctcaggtccagatgcagcggggattctgttctctgactgtggcgaccttgctttggttcttgttgaagtgaaccaagcccggccaccacgcatggcatgctgtgcttggctccccataagacgtcctctttgggtgcacggtgtcaaagtgtgggcaggagtggagagctggtgccctcaggaggagaccacagcatgtccatcagctcagcagagctcgacagccacaagtcctgagaagctttgaccttgaagggcttctgggagaggaggaatttctgcatggggcgtgaaggcacactgtcccaccacaactgaaccagaagagagtgaagactcccctcttcccatcctctgtgccaggtgccagactgtgctccttggaacttatggcccaatcttacctgttctccagggactggtcactgcctcaggacccccaagcctatgccctgagccatggctgctgactgactccagccaaggtgcaaagacgagattatgagacaggtcctcaggcctgtgttccaagtactcacaggggctctgggtgcccatcgccgggagtatggttcagctgccaccggcactgtccatttgcctgtctgtcaagctcagagcatggataagccacacagcagggcagtgcaccctgggcaccatgcacggccagcaagaatcaaggcccgcagatgctaagagggcctattgtcaggggaaggtccccgctcctgcacactctctatggatacttgggttgtgggggctctcttggagagtaagtttgtggtttgtttctggtttacagtggtggctgacaccccttgtaagaaagcattcctgggaagtcttctgtgggtccaaacatgttgctccgatcatcacaggagagcaaaaggccctagataccccctttggaatgtgagagtcttgttgtctgatatttgccactgagctggtgaagcccctctaaagagatctcgaccctggggagcagaattcttgtcatctatgaggggtcctgagaaagacttgtcattttttttcctggagttcttcccattgaggtcctaggatttgcacaccactgtcccacaagagctttcctgcctaatgaaaggaggtcttgtggtgtgtgtctcctctcttctctatagttcccgagttggcccccattgcagcccccaccctgtgggtagtcttccagaagtgatgcagtggtgtgagatgccctacaccttgttatttgggagactttgagagtcattcacttccatggtgactagtgtttgttttgcctgattttatattctgtgttgcatttctccccactccctgccctgctttaataaacagcaaaccaatatctaggaagaatgactgagggatagtattgggtattggccccatggcaggaacagccacttgcatctggtcccggtgccacactgcggtgcttggtgtggttgtggagcctgtccctgcgcgccttgctcccgttgagccacgctgtctggtgggtgattctctgccctgagccaccaccctggactggcccagtctccagagctggcacaccctgcctgttttctctttttagacacaacagccgcagtttggccagccactaagtcccaccagctgaggtccgaggaaagcggggtgactcatttcccttgtccagggcccgaggagagtgaggtgtccagcctgcaaagctattccagctccttggtgttggtttgcaataaattggtatttaagcagttctgggtctgcgtgtgacatttgctgctgagacagttctgtctgtgcatggtcattattgttgcattctagccttgaggtcccaggccaacgtacacagcaaacaccagcatggggaattcttaggggttgtttcccatctggtctgaatgcactgggcaagatctcaatacagctttagaaatcctgtaagattttgaccagtggggagaaaaagaatgtagctatagatcttacatcctttcaaacaggttctggaattctgtagttactggaaagcttagggtgagtgcagagttgggaatgattccactgaagggccacctttgcccaccaggctccaaggccctccttggtctccaggtgcatacctgctgttaactttgctgagccctcgcaatgggcttcctccaggacataacgccgtgtctgacacagaagtctcccaggtggctggccacctgcttcttcctcagtcagatctttgactctccttctctgtgcccaccccatctccagcctcctctgaccctgctcacccctggggacaggacctaggggtgtgagaagtacttggctgaataaagactgtttcaaaggcaatccttagaattgcctagcatactcccagggccagaaataacccgccagaaaggagaggcgtatttgcccctgaagagtgcaggagggagaacagttgagaagtgttttgtgtggaaatgtgtccaagaggcgtcagctgctgcacagagaactcactgcccagaacactgcgcttggggaacagacctcacccccacctcaaatctgctctccactgggcctgttggcagccagctcagctggggaagggacagcatgactcgctttgtcgatgaaaagcacgaagttgtcagcacagaacctggccagtccttgagaaactccctccttggtggtcagaggtcaagcagcccatgtggcccacggtcctgaagaactgggctatgtccctgaggctcctctctaccgtctgactgtggggtctggggaacaggcatttaaaccaggctgctgccctggggagtgcccactggacgccagggtgccccatagggacagggtcacaaagccctggggcttcccctgccagtcctggtgaggacagtgtggtcactatctcagagagacgaaaaatgaatattctgtcatttcagactaaactactcacccagctcacactaatatggatttgttaattttacctttttttttctttccaactttaggttcaagggttgttacatgggtaaattggatcataggg

SEQ ID NO: 22 - DNA, 2220 bp, Homo sapiens
  CDS (188)..(1708)
  misc_feature (1)...(2220): n = a,t,c or g
cggcccccccgccgcccccnnnatttataggcgttcgaagctcgctagcgtttaaacttaagcttggtaccgagctcggatccactagtccagtgtggtggaattcggactagggtcgccggggaagcggtttgggagagcccatggtgactgcgtgagtggagcccagctgtgtggatgccccagcatggatgactacatggtcctgagaatgattggggagggctccttcggcagagctcttttggttcagcatgaaagcagtaatcagatgtttgccatgaaagaaataaggcttcccaagtctttctctaatacacagaattctaggaaggaggctgttcttttagccaaaatgaaacaccctaatattgttgccttcaaagaatcatttgaagctgaaggacacttgtatattgtgatggaatactgtgatggaggggatctaatgcaaaagattaaacagcagaaaggaaagttatttcctgaagacatgatacttaattggtttacccaaatgtgccttggagtaaatcacattcacaagaaacgtgtgctacacagagatatcaagtccaagaatatcttcctcactcagaatggaaaagtgaaattgggagactttggatctgcccgtcttctctccaatccgatggcatttgcttgtacctatgtgggaactccttattatgtgcctccagaaatttgggaaaacctgccttataacaataaaagtgacatctggtccttgggttgcatcctgtatgaactctgtacccttaagcatccatttcaggcaaatagttggaaaaatcttatcctcaaagtatgtcaagggtgcatcagtccactgccgtctcattactcctatgaacttcagttcctagtcaagcagatgtttaaaaggaatccctcacatcgcccctcggctacaacgcttctctctcgaggcatcgtagctcggcttgtccagaagtgcttaccccccgagatcatcatggaatatggtgaggaagtattagaagaaataaaaaattcgaagcataacacaccaagaaaaaaaacaaaccccagcagaatcaggatagctttgggaaatgaagcaagcacagtgcaagaggaagaacaagatagaaagggtagccatactgatttggaaagcattaatgaaaatttagttgaaagtgcattgagaagagtaaacagagaagaaaaaggtaataagtcagtccatctgaggaaagccagttcaccaaatcttcatagacgacagtgggagaaaaatgtacccaatacagctcttacagctttggaaaatgcatccatactcacctccagtttaacagcagaggacgatagaggtggttctgtaataaagtacagcaaaaatactactcgtaagcagtggctcaaagagacccctgacactttgttgaacatccttaagaatgctgatctcagcttggcttttcaaacatacacaatatatagaccaggttcagaagggttcttgaaaggccccctgtctgaagaaacagaagcatcggacagtgttgatggaggtcacgattctgtcattttggatccagagcgacttgagcctgggctagatgaggaggacacggactttgaggaggaagatgacaaccccgactgggtgtcagagctgaagaagcgagctggatggcaaggcctgtgcgacagataatgcctgaggaaatgttcctgagtcacgctgaggagaggcttcactcaggagttcatgctgagatgatcatgagttcatgcgacgtatattttcctttggaaacagaatgaagcagaggaaactcttaatacttaaaatcgttcttgattagtatcgtgagtttgaaaagtctagaactcctgtaagtttttgaactcaagggagaaggtatagtggaatgagtgtgagcatcgggctttgcagtcccatagaacagaaatgggatgctagcgtgccactacctacttgtgtgattgtgggaaattacttaacctcttcaagccccaatttcctcaaccataaaatgaagataataatgcctacctcagagggatgctgaccacagacctttatagcagcccgtatgatattattcacattatgatatgtgtttattattatgtgactctttttacatttcctaaaggtttgagaattaaatatatttaattatgatttaaaaaaaaaaaaaa

SEQ ID NO: 23 - DNA, 3782 bp, Homo sapiens
  CDS (139)..(2823)
  misc_feature (1)...(3782): n = a,t,c or g
gcggccgcagcgtggagccgggtgattgtgaccgccgggggagccgggagccggccgcggcgccctctctccgtgtggccccctgagcggcccccctcccctgcccgggagggaggcggggggcacctggggcccgccatgaaccccggcttcgatttgtcccgccggaacccgcaggaggacttcgagctgattcagcgcatcggcagcggcacctacggcgacgtctacaaggcacggaatgttaacactggtgaattagcagcaattaaagtaataaaattggaaccaggagaagactttgcagttgtgcagcaagaaattattatgatgaaagactgtaaacacccaaatattgttgcttattttggaagctatctcaggcgagataagctttggatttgcatggagttttgtggaggtggttctttacaggatatttatcacgtaactggacctctgtcagaactgcaaattgcatatgttagcagagaaacactgcagggattatattatcttcacagtaaaggaaaaatgcacagagatataaagggagctaacattctattaacggataatggtcatgtgaaattggctgattttggagtatctgcacagataacagctacaattgccaaacggaagtctttcattggcacaccatattggatggctccagaagttgcagctgttgagaggaaggggggttacaatcaactctgtgatctctgggcagtgggaatcactgccatagaacttgcagagcttcagcctcctatgtttgacttacacccaatgagagcattatttctaatgacaaaaagcaattttcagcctcctaaactaaaggataaaatgaaatggtcaaatagttttcatcactttgtgaaaatggcacttaccaaaaatccgaaaaaaagacctactgctgaaaaattattacagcatccttttgtaacacaacatttgacacggtctttggcaatcgagctgttggataaagtaaataatccagatcattccacttaccatgatttcgatgatgatgatcctgagcctcttgttgctgtaccacatagaattcactcaacaagtagaaacgtgagagaagaaaaaacacgctcagagataacctttggccaagtgaaatttgatccacccttaagaaaggagacagaaccacatcatgaacttcccgacagtgatggttttttggacagttcagaagaaatatactacactgcaagatctaatctggatctgcaactggaatatggacaaggacaccaaggtggttactttttaggtgcagacaagagtcttctcaagtctgttgaagaagaattgcatcagcgaggacacgtcgcacatttagaagatgatgaaggagatgatgatgaatctaaacactcaactctgaaagcaaaaattccacctcctttgccaccaaagcctaagtctatcttcataccacaggaaatgcattctactgaggatgaaaatcaaggaacaatcaagagatgtcccatgtcagggagcccagcaaagccatcccaagttccacctagaccaccacctcccagattacccccacacaaacctgttgccttaggaaatggaatgagctccttccagttaaatggtgaacgagatggctcattatgtcaacaacagaatgaacatagaggcacaaacctttcaagaaaagaaaagaaagatgtaccaaagcctattagtaatggtcttcctccaacacctaaagtgcatatgggtgcatgtttttcaaaagtttttaatgggtgtcccttgaaaattcactgtgcatcatcatggataaacccagatacaagagatcagtacttgatatttggtgccgaagaagggatttataccctcaatcttaatgaacttcatgaaacatcaatggaacagctattccctcgaaggtgtacatggttgtatgtaatgaacaattgcttgctatcaatatctggtaaagcttctcagctttattcccataatttaccagggctttttgattatgcaagacaaatgcaaaagttacctgttgctattccagcacacaaactccctgacagaatactgccaaggaaattttctgtatcagcaaaaatccctgaaaccaaatggtgccagaagtgttgtgttgtaagaaatccttacacgggccataaatacctatgtggagcacttcagactagcattgttctattagaatgggttgaaccaatgcagaaatttatgttaattaagcacatagattttcctataccatgtccacttagaatgtttgaaatgctggtagttcctgaacaggagtaccctttagtttgtgttggtgtcagtagaggtagagacttcaaccaagtggttcgatttgagacggtcaatccaaattctacctcttcatggtttacagaatcagataccccacagacaaatgttactcatgtaacccaactggagagagataccatccttgtatgcttggactgttgtataaaaatagtaaatctccaaggaagattaaaatctagcaggaaattgtcatcagaactcacctttgatttccagattgaatcaatagtgtgcctacaagacagtgtgctagctttctggaaacatggaatgcaaggtagaagttttagatctaatgaggtaacacaagaaatttcagatagcacaagaattttcaggctgcttggatctgacagggtcgtggttttggaaagtaggccaactgataaccccacagcaaatagcaatttgtacatcctggcgggtcatgaaaacagttactgagaattgttgtgctttgacagttaactctagaaagaaagaacactaccactgcaacattaatggatgcttgaagctgtacaaaagctgcagtaacctgtcttcagttactttgtaatttattgtggcatgagataagatggggaaaattttgttttaagtggtatggatatatttagcatattgaaccacacaagtgcttaattcattgttatgtaatctttgtacatataggcagtattttttctgtgaaacttcatattgctgaagacatacactaagaatttatgtagataatgtacttttatgagatgtacaagtaagtgtcttatctgtacagatgtaaatgttgatgaaaatgcaattggggttaatattttaagaattctttagtatattcttgggtgtggctatattacaaaatgggatgctggcaatgaaacaatacatttaacactattgtatttttattatatgtaatttagtaatatgaatataaatcttgtaacttttaaaattgtaatggaggctgtaatcattttataatctttttaattttaatgcaagtacactggtgtttatatttgcacaaagtattgatatgtgatgtattaagtcacaaaagtaagctgtgacattgtctataagcatttggctccacaaatgtatttggattgttttctatgtgaagcaaaccaattataattaaccacatgttgtagtaactggtctttttatatttaagcagaatcctgtaagattgcttgtctttgcttaaaaacaatacctttgaacatttttgaatcacagaatagcggtaccatgatagaatactgcaattgtggtcagaattacagtatgcacaaagaattaattagcattattaaagagtcctcactaaacatttcatatgatcacactgaagaactgtaacattccatagagtgaagtggntcactttc

SEQ ID NO: 24 - DNA, 3719 bp, Homo sapiens
  CDS (139)..(2760)
  misc_feature (1)...(3719): n = a,t,c or g
gcggccgcagcgtggagccgggtgattgtgaccgccgggggagccgggagccggccgcggcgccctctctccgtgtggccccctgagcggcccccctcccctgcccgggagggaggcggggggcacctggggcccgccatgaaccccggcttcgatttgtcccgccggaacccgcaggaggacttcgagctgattcagcgcatcggcagcggcacctacggcgacgtctacaaggcacggaatgttaacactggtgaattagcagcaattaaagtaataaaattggaaccaggagaagactttgcagttgtgcagcaagaaattattatgatgaaagactgtaaacacccaaatattgttgcttattttggaagctatctcaggcgagataagctttggatttgcatggagttttgtggaggtggttctttacaggatatttatcacgtaactggacctctgtcagaactgcaaattgcatatgttagcagagaaacactgcagggattatattatcttcacagtaaaggaaaaatgcacagagatataaagggagctaacattctattaacggataatggtcatgtgaaattggctgattttggagtatctgcacagataacagctacaattgccaaacggaagtctttcattggcacaccatattggatggctccagaagttgcagctgttgagaggaaggggggttacaatcaactctgtgatctctgggcagtgggaatcactgccatagaacttgcagagcttcagcctcctatgtttgacttacacccaatgagagcattatttctaatgacaaaaagcaattttcagcctcctaaactaaaggataaaatgaaatggtcaaatagttttcatcactttgtgaaaatggcacttaccaaaaatccgaaaaaaagacctactgctgaaaaattattacagcatccttttgtaacacaacatttgacacggtctttggcaatcgagctgttggataaagtaaataatccagatcattccacttaccatgatttcgatgatgatgatcctgagcctcttgttgctgtaccacatagaattcactcaacaagtagaaacgtgagagaagaaaaaacacgctcagagataacctttggccaagtgaaatttgatccacccttaagaaaggagacagaaccacatcatgaacttgatctgcaactggaatatggacaaggacaccaaggtggttactttttaggtgcaaacaagagtcttctcaagtctgttgaagaagaattgcatcagcgaggacacgtcgcacatttagaagatgatgaaggagatgatgatgaatctaaacactcaactctgaaagcaaaaattccacctcctttgccaccaaagcctaagtctatcttcataccacaggaaatgcattctactgaggatgaaaatcaaggaacaatcaagagatgtcccatgtcagggagcccagcaaagccatcccaagttccacctagaccaccacctcccagattacccccacacaaacctgttgccttaggaaatggaatgagctccttccagttaaatggtgaacgagatggctcattatgtcaacaacagaatgaacatagaggcacaaacctttcaagaaaagaaaagaaagatgtaccaaagcctattagtaatggtcttcctccaacacctaaagtgcatatgggtgcatgtttttcaaaagtttttaatgggtgtcccttgaaaattcactgtgcatcatcatggataaacccagatacaagagatcagtacttgatatttggtgccgaagaagggatttataccctcaatcttaatgaacttcatgaaacatcaatggaacagctattccctcgaaggtgtacatggttgtatgtaatgaacaattgcttgctatcaatatctggtaaagcttctcagctttattcccataatttaccagggctttttgattatgcaagacaaatgcaaaagttacctgttgctattccagcacacaaactccctgacagaatactgccaaggaaattttctgtatcagcaaaaatccctgaaaccaaatggtgccagaagtgttgtgttgtaagaaatccttacacgggccataaatacctatgtggagcacttcagactagcattgttctattagaatgggttgaaccaatgcagaaatttatgttaattaagcacatagattttcctataccatgtccacttagaatgtttgaaatgctggtagttcctgaacaggagtaccctttagtttgtgttggtgtcagtagaggtagagacttcaaccaagtggttcgatttgagacggtcaatccaaattctacctcttcatggtttacagaatcagataccccacagacaaatgttactcatgtaacccaactggagagagataccatccttgtatgcttggactgttgtataaaaatagtaaatctccaaggaagattaaaatctagcaggaaattgtcatcagaactcacctttgatttccagattgaatcaatagtgtgcctacaagacagtgtgctagctttctggaaacatggaatgcaaggtagaagttttagatctaatgaggtaacacaagaaatttcagatagcacaagaattttcaggctgcttggatctgacagggtcgtggttttggaaagtaggccaactgataaccccacagcaaatagcaatttgtacatcctggcgggtcatgaaaacagttactgagaattgttgtgctttgacagttaactctagaaagaaagaacactaccactgcaacattaatggatgcttgaagctgtacaaaagctgcagtaacctgtcttcagttactttgtaatttattgtggcatgagataagatggggaaaattttgttttaagtggtatggatatatttagcatattgaaccacacaagtgcttaattcattgttatgtaatctttgtacatataggcagtattttttctgtgaaacttcatattgctgaagacatacactaagaatttatgtagataatgtacttttatgagatgtacaagtaagtgtcttatctgtacagatgtaaatgttgatgaaaatgcaattggggttaatattttaagaattctttagtatattcttgggtgtggctatattacaaaatgggatgctggcaatgaaacaatacatttaacactattgtatttttattatatgtaatttagtaatatgaatataaatcttgtaacttttaaaattgtaatggaggctgtaatcattttataatctttttaattttaatgcaagtacactggtgtttatatttgcacaaagtattgatatgtgatgtattaagtcacaaaagtaagctgtgacattgtctataagcatttggctccacaaatgtatttggattgttttctatgtgaagcaaaccaattataattaaccacatgttgtagtaactggtctttttatatttaagcagaatcctgtaagattgcttgtctttgcttaaaaacaatacctttgaacatttttgaatcacagaatagcggtaccatgatagaatactgcaattgtggtcagaattacagtatgcacaaagaattaattagcattattaaagagtcctcactaaacatttcatatgatcacactgaagaactgtaacattccatagagtgaagtggntcactttc

SEQ ID NO: 25 - DNA, 2579 bp, Homo sapiens
  CDS (265)..(1587)
ggattgaagtgtcgcccgctgtaccggtccggaattcccgggtcgacgatttcgtctgcggagaccgtccgcctggctcgcccgagctcgcccgctgtccgccagcccgcgggagggaggagagaagcgaagcgtttccgcggttggctactcagtgtcttggtctcaagttgcctcattgcggctggcgttcccaatacagacgcatcgtttcttttttaatactccctaagaaagggaataaccttcaagctggcgggagcaatggttcacataaagaaaggcgagctgacccaggaggagaaggagctactggaagtcatcgggaaaggtactgtccaagaagctggaacattattatccagcaagaatgttcgtgtcaactgtttggacgagaatggaatgactcctctaatgcatgcagcatataaaggaaaactcgatatgtgcaaattactactgcgacatggagccgatgtaaattgtcatcagcatgaacatggatacacagccctcatgtttgctgcactttctggtaataaagacatcacatgggtaatgttagaagctggtgctgagacagatgttgtcaactctgtgggaagaacagcagctcagatggcagcctttgtgggtcaacatgattgtgtgaccataatcaacaatttctttcctcgagagagactggattattacactaagccccagggactggataaagagccaaaactgcccccaaagttggcaggcccgctgcacaaaattatcaccacaacgaatcttcatcctgtcaagatcgtgatgcttgtaaatgagaatcctctgctgacagaagaagcagccctgaataaatgctacagagtgatggatttgatttgtgagaaatgtatgaagcaaagagacatgaatgaagtattggctatgaagatgcattacataagctgtatctttcagaaatgcattaacttcttaaaagatggagagaataaactggacaccttgatcaaaagcttgttaaaaggccgagcttctgatggctttccagtgtatcaagaaaagatcattagagaaagtatcagaaaatttccttactgtgaagctacactcctccagcagctggttcgaagcattgctcctgttgaaattggttctgatcccactgcattctccgtccttacccaagccatcactggccaggtgggttttgtggatgtggaattttgcactacctgtggagaaaagggagcaagtaaaagatgttcagtttgcaaaatggtaatatattgtgatcaaacctgccagaaaacacactggtttactcataagaaaatctgtaagaatctgaaggacatttacgaaaagcaacagttggaggctgccaaagaaaagagacaagaggaaaaccacggcaaacttgatgtcaattctaactgtgttaatgaagagcaaccagaggctgaagtaggtatctctcaaaaggattccaatcctgaagattccggggaaggaaagaaagaatctcttgaaagcgaagctgagttggaaggcttacaggatgctcctgcagggccacaggtgtctgaggagtaaaagccagagcaagtgccagtgtggatggtcctcaccctgcaagaagctggaaaactcctaggaatgcattgtcctcaccttgttatacctgcgtggcaccatggcaggattccacatttcatagaatacaggttttcaagcaaacccctgttgaccatgccctaatttcctattgatttctgttgtataattgaatggatattcctatggaaaattttttgtttcaaaatacaggaaaaacattcctattacctttctgaggctggctttccagcaattgtttcaaaggaaaatagatccccttaaagaaaaaatacaggctttagggaacaaagggacaagcagaacaggtgtggaagagagattttcaggaagggaaaaatttatagctacagagggtagttagaaaaatcataacttatatgtgaataaaatacatataagcagcatttacggtagtggcattctacttattaagatgcaatgaaatgaagaaaggctttatgttcaaggacctttgccatagttcagctaattgtagttttatatagaaatgatcctgaacactctgaacttgacgtagtcctgcggtgatattctatctgcagtatttgtacctccagaatggcagatccctcagcaggaacaaaggcatattgacggttctctcagcgtatgcattaaaaaaggtacttcctgaaacttttgattcaataatgactaaacatactatgtacacaattactgtaaggctaattcacgtgccatactccacctgaaagcctgagttatcttgctataagcttttcatggagcacttcctttccagaaactgatttgtaactcatttagagaatgtcctggcgtcggtttttagcatatgtggtatttaaacagagctagaatgtgatgtctgaagataatgctgcatttctgggtttcttgtgtggattttaaaataaattgtgcctacaaatataaaaaaaaaa

SEQ ID NO: 26 - DNA, 7287 bp, Homo sapiens
  CDS (11)..(5281)
tttgaaggggatgatgtatataactatctattcgatgatgaagataccccaccaaacccaaaaaaagagatctctcgaggatccgaattcgcggccgcgtcgacgttcagatgacctacggacaggtctatttcaggatgtacaggatgctgaatctttgaaattgcctggcgtctatgaagtcttattttataatgaaactgaagattgcccagggatgatgttatggagatatccagaacctagaggactcacccttgtacgaataactcctgtaccttttaacaccacagaggatccagatattagcacagcagaccttggtgatgtgctacaggatccttgtagcttggaatactgggatgaactccagaaggtttttgttgcatttagagaatttaatctgtctgaaagcaaagtttgtgaactgcagttgccggatatcaatctcgtgaatgaccagaagaaattagtatcttcagatctttggagaattgtcttgaacagcagtcaaaatggagctgatgaccaaagctctgcaagtgagtctggttctcaaagcacttgtgatccacttgtgactccaacagccctggctgcctgtaccagagttgactcctgctttaccccatggtttgtcccatccctttgcgtttctttccagtttgctcacctggaattccatctttgtcatcaccttgaccaactaggcacagctgcaccacagtacctacagccatttgtttccgacagaaatatgccatctgaactagaatacatgattgtttccttcagagaaccacacatgtatcttcgacagtggaataatggttctgtctgtcaggagatccagttcttagctcaagcagactgtaaacttctagagtgcagaaatgtcactatgcaaagtgtggtgaaacccttcagcatcttcgggcagatggcagtttccagcgatgtagtggaaaagctgcttgactgcaccgtgatagttgattctgtatttgtaaaccttggacagcatgtagtccattcactaaacactgcaatacaagcttggcaacagaacaaatgccctgaggtagaggagttggtcttcagccattttgtgatctgtaatgacacacaggagacactgcggtttggccaggtggatactgatgaaaatattctgctggcgagtctccacagtcaccagtacagctggcgctctcacaaatccccacagctgttacacatctgtattgaaggttggggcaactggcgttggtcagagcctttcagtgtggaccatgccgggacttttattagaacaattcagtacaggggtcgaactgcttctctcatcatcaaggttcagcaactcaatggagtacaaaaacagattatcatctgtggaagacagatcatctgtagttacttgtctcaaagcatagaactaaaagtcgttcagcattacattggtcaagatggacaagctgtagttcgggaacattttgactgcctcacagccaaacagaaattgccttcgtacatactagaaaacaatgaactgacggagctgtgtgtgaaggccaaaggagatgaagactggtcaagagatgtgtgcctggaatccaaagcccctgagtacagcattgtcattcaggtgccatcttcaaacagttccattatttatgtctggtgcacagttttgactttagaacccaactctcaagtgcaacaacgaatgattgtgttcagccctctttttatcatgaggagtcatcttccagaccccattatcatacatttggagaaaaggagtctgggattgagtgaaacacaaattattccaggaaaagggcaggaaaaaccactgcaaaacatagaacctgaccttgtacatcacctgacattccaagcaagagaagaatatgatccttcagattgtgcagttcccatctcaacatccctcattaagcaaatagccactaaggtacaccctggaggcacagttaatcagatccttgacgaattctatgggccagaaaagtcgcttcaacccatatggccctataataagaaggattctgacaggaatgaacagctaagtcagtgggatagcccaatgcgagtgaagctgtcaatctggaagccatatgttagaactttgttgatagaacttctgccctgggccctgcttatcaatgaatccaaatgggacctctggctatttgaaggagagaaaattgttctacaggttcctgctggcaaaattattattcctcctaattttcaggaagcttttcaaattggaatatactgggcaaatacaaacactgtgcacaagtcagtagcaattaaactggtccataacctgacatctccaaagtggaaagatggaggtaatggtgaagttgtgacactggatgaagaagcgtttgttgatactgaaataagacttggtgcttttccaggacatcagaagttatgtcagttctgcatttcctccatggtacagcaaggtatacaaattattcagattgaagacaagactacaataatcaataatacaccatatcaaatattttataaaccacagctatctgtctgcaatccccattctggaaaggagtattttcgtgttccagacagtgctacttttagcatttgcccaggtggagagcagcctgctatgaaatccagctcccttccttgctgggacttgatgcctgacatcagtcagtcagtactggatgcatccctgcttcagaaacagatcatgctgggcttttctcctgccccaggtgctgacagctcacagtgctggagcctgccagctatagttagaccagagtttcccagacagagtgtggcagtacccctcgggaatttccgggaaaatggattctgtaccagggctatagtgctgacatatcaagaacacctcggagtgacttatttaaccctctcagaagaccctagtcctcgagtaattatccacaatagatgtccagtaaaaatgcttataaaggaaaacattaaagatattccaaagtttgaggtttattgcaaaaaaattccctccgagtgctcaattcatcatgagctgtatcatcagatttccagttatccggactgcaagaccaaagacttacttccaagcctacttttgagagttgaacctctagatgaagtaacaactgagtggagtgatgccattgacatcaacagtcagggaacacaggttgtgttcctgactggctttggctatgtgtatgtggatgttgtacatcagtgtggcacagtcttcatcactgtggccccagaaggaaaagcaggacctattttaaccaataccaacagagcgccagagaagattgttacatttaaaatgttcatcactcagttaagcctggcagtgtttgatgacctcacccaccacaaagcatcagctgagcttctgagactcacactggacaacatttttctctgtgtggccccgggagctggtcccctccctggggaagagcctgtggctgcgttgtttgaactttactgtgtggagatctgctgtggggacctgcagctagacaaccagctttataacaagtccaatttccactttgctgtcttagtctgccagggagaaaaagcagaacccattcagtgttccaaaatgcagagtctcctcatatccaacaaagagttggaagaatacaaggaaaaatgttttatcaaactttgcatcaccttaaatgaaggcaagagcatcctctgtgatattaatgagttcagctttgaattaaaacctgctcggttatacgtggaagacacatttgtatactacatcaagactttgtttgacacctaccttcctaacagcaggttggctggtcactccacacacctctccgggggtaaacaggtgttgcccatgcaggtcacacagcacgccagggccttggtgaatcctgtgaagttacggaaactggtgatccagccagtaaatttgctcgtcagcatccacgcttccctcaagctgtacatagcctcagaccacactcctctctccttctcggtgtttgaaagaggacccatcttcaccactgcgaggcagcttgtgcacgccctggcaatgcactatgccgctggggccctttttagagcaggctgggtagttgggtctctggatattcttggcagccctgcaagcctggtgagaagcatcgggaacggggtcgccgacttcttcaggcttccgtatgaggggctgacccggggccctggagccttcgtgagtggcgtctccagagggaccacatcgtttgtaaagcacatctccaaaggtaccctcacatccatcaccaacctcgccacaagcctggcccggaacatggaccggctctcactggatgaggagcactacaaccggcaggaggagtggcggcggcagctccccgagagcctgggcgaggggcttcgacagggcctgtcccggctgggcatcagcctgcttggtgcaattgctggtatagttgatcagccgatgcagaacttccagaaaacatctgaggcacaggcttcagcaggacacaaggccaagggtgtcatctcgggtgtggggaaaggaatcatgggggtgttcacaaagcccatcggaggagctgctgagctggtgtcacagactggctatggtattttacatggagctggactttctcagcttcccaaacagcgccatcagccaagtgatctacatgctgaccaggctccaaacagccatgtcaaatatgtctggaaaatgcttcagtctctgggcagaccagaagtccacatggccctggacgtggttctggtgaggggctcaggccaggagcatgaagggtgcttgctgctgacatcagaagtgctcttcgtggtgagtgtcagtgaggacacacagcagcaggccttccccgtcacagaaatcgactgtgcacaggacagcaagcagaacaacttactcacagtgcagctcaagcagccaagagtggcctgtgatgtggaggtagatggagtccgagagagactgtcagagcaacagtacaacagactggtggactacatcacaaagacatcttgtcacctggcccccagctgttcttccatgcaaataccatgccctgtggtggctgcagaacctcccccctccactgttaaaacataccattacctggttgatccacattttgctcaggtcttccttagtaaatttaccatggtgaaaaataaagccctgaggaaagggtttccttgagtcccctctgaggtgtttattcctgcttgtgtgatttagtttttgggtttctttgagacagggtctcactgcattgcccttgctgacctcaaattctggggttcaagcaatcctcccacctcaacccacaagtagctacgactgcaagcacctgccaccataaagggctgcattttgccaccataaagggctgcatttttttaaaaagcctaggcagctctaacatcatctgatatggacacaaggccaacagtttccttatttacatccttacctctaaaagatacttcaaagtgacaaaaacgtgttccttccccacttagagacaatgattaacagggccctatatgttcttaccacatacagaggatgcatttatttttgctctatgacacttgcaaaaatctctactgtaattaatttgggtctattattaactctctgttccatcatagaatgtggccaggccttacaatggagagccagagttaaaacttcaagttgcatctgtttttgggctgagtcaccacctttgcctcatgctcctttgtctgcaaaggcctaggattctttctttaaatgaaatgcttaggactttgtggcttgttacatttgtcatttaactgcagtgctattctttgaaagctgctatgtgtattttctctgaagtctgcattttactaaaatttacaacagtctgatgattgattgattactgtccaggtacattttagaaaaagtgttcttcttccagtttgttttactaagcaaactttgagtaaatcctttgtcctatattgaatccagtcccaaagtgttcaggtgagtttctctagttccataaacaaaacatacatagtgggaactccctggtatgccatagagcacacaagaaccccaatattaatgctaacaattataccagtccattttgtttattctgtggaattgacttgacaaagcatgaagatattcccagtgtctgtctgataatattttgcatctaagaatgggtttgactcaagatcttgggttaccaagatgtcttaaatgttcagtaaatatctttcttacagtccagtagcttagagcatgtttgctgattgatattacatttaaacttggggctacagcttgttacctagaattttgagatactaagagaatgcaattttaaatgcccactggttttatttgttttggagagagggtctcattctgtcacccaggctagagtacagtgggaacagtcatggctcactgcagcttaagctcactgcctgggctcaagtgatcttactccagcctcccaagcagctgggactacaccaccacaggtatgcaccaccatacctggctgatttttaaaattttttctagagatgaggtctcactatgttgcccagctggtctcatactcctcagttcacgcattcctcccacctccacctcccaaactgctgggattacaggtgtgagccaccatgcccaacacccactgatctttaactctcacatgttgggcataagaagtcactatataattgttactggaaagcaagacttaacgaacaattctgactatgaaaaatgtctctttcagtttgttctgtaaatatttagaaaagtgacagctgtcaacctcagagtaactatttctaaaaatgtaaatatgtattaatccttgtatcttttatggtaattttgcatattgatatgaattatataaaattgtttaaaataaaaggtgtccttgaattactgaccacccatagatgtctactgttaccaggttttacaatgcaaattttcactaatacctgggtttaatacagctcacatcactgaatgttacacatgagtttaaatgggtaatatacaggttttgttataataaagttactgattaaattaaaaaaaaaagggggccgctctagaggatccaagcttacgtacgcgtgcatgcgacgtcattagctcttcgtatacacgacactcaactcact

SEQ ID NO: 27 - DNA, 2715 bp, Homo sapiens
  CDS (56)..(2362)
ccctcgggaagccaaaggacacttgaagccagccctgaatgcagagccccaaagcatgagcttctccatgggacaactgttgcccaccttgggacaccttgactccaagcccagcagtaagtccaacatgattcggggccgcaactcagccacctctgctgatgagcagccccacattggaaactaccggctcctcaagaccattggcaagggtaattttgccaaggtgaagttggcccgacacatcctgactgggaaagaggtagctgtgaagatcattgacaagactcaactgaactcctccagcctccagaaactattccgcgaagtaagaataatgaaggttttgaatcatcccaacatagttaaattatttgaagtgattgagactgagaaaacgctctaccttgtcatggagtacgctagtggcggagaggtatttgattacctagtggctcatggcaggatgaaagaaaaagaggctcgagccaaattccgccagatagtgtctgctgtgcagtactgtcaccagaagtttattgtccatagagacttaaaggcagaaaacctgctcttggatgctgatatgaacatcaagattgcagactttggcttcagcaatgaattcacctttgggaacaagctggacaccttctgtggcagtcccccttatgctgccccagaactcttccagggcaaaaaatatgatggacccgaggtggatgtgtggagcctaggagttatcctctatacactggtcagcggatccctgccttttgatggacagaacctcaaggagctgcgggaacgggtactgaggggaaaataccgtattccattctacatgtccacggactgtgaaaacctgcttaagaaatttctcattcttaatcccagcaagagaggcactttagagcaaatcatgaaagatcgatggatgaatgtgggtcacgaagatgatgaactaaagccttacgtggagccactccctgactacaaggacccccggcggacagagctgatggtgtccatgggttatacacgggaagagatccaggactcgctggtgggccagagatacaacgaggtgatggccacctatctgctcctgggctacaagagctccgagctggaaggcgacaccatcaccctgaaaccccggccttcagctgatctgaccaatagcagcgcccatccccatcccacaaggtaccgcagcgtgtcggccaatcccaagcagcggcgcttcagcgaccaggctggtcctcccattcccacctctaattcttactctaagaagactcagagtaacaacgcagaaaataagcggcctgaggaggaccgggagtcagggcggaaagccagcagcacagccaaggtgcctgccagccccctgcccggtctggagaggaagaagaccaccccaaccccctccacgaacagcgtcctctccaccagcacaaatcgaagcaggaattccccacttttggagcgggccagcctcggccaggcctccatccagaatggcaaagacagcctaaccatgccagggtcccgggcctccacggcttctgcttctgccgcagtctctgcggcccggccccgccagcaccagaaatccatgtcggcctccgtgcaccccaacaaggcctctgggctgccccccacggagagtaactgtgaggtgccgcggcccagcacagccccccagcgtgtccctgttgcctccccatccgcccacaacatcagcagcagtggtggagccccagaccgaactaacttcccccggggtgtgtccagccgaagcaccttccatgctgggcagctccgacaggtgcgggaccagcagaatttgccctacggtgtgaccccagcctctccctctggccacagccagggccggcggggggcctctgggagcatcttcagcaagttcacctccaagtttgtacgcaggaacctgaatgaacctgaaagcaaagaccgagtggagacgctcagacctcacgtggtgggcagtggcggcaacgacaaagaaaaggaagaatttcgggaggccaagccccgctccctccgcttcacgtggagtatgaagaccacgagctccatggagcccaacgagatgatgcgggagatccgcaaggtgctggacgcgaacagctgccagagcgagctgcatgagaagtacatgctgctgtgcatgcacggcacgccgggccacgaggacttcgtgcagtgggagatggaggtgtgcaaactgccgcggctctctctcaacggggttcgatttaagcggatatcgggcacctccatggccttcaaaaacattgcctccaaaatagccaacgagctgaagctttaacaggctgccaggagcgggggcggcgggggcgggccagctggcacgggcatgtccgccgtgcgccgcccccacctgggcgagactgcagcgatggattggtgtgtctcccctgctggcacttctcccctccctggcccttctcagttttctcttacatgtttgtggggggtgggagattgttctccagccccccacattcacccctgcccagagattcccccttctcctctcccctactggaggcaaaggaaggggagggtggatgggggggcagggctccccctcggtactgcggttgcacagagtatttcgcctaaaccaagaaattttttattaccaaaaagctggagcgg

SEQ ID NO: 28 - DNA, 4438 bp, Homo sapiens
  CDS (234)..(3398)
gcacgaggcaaccttcagaacaagctagaggttttaaatcaacgctggcaaaatgttttggaaaaaacagaacaaaggaagcagcagctggatggtgccttgcccaggccaaagggttccatggcgaaattgaggatttgcagcagtggctgactgacacggagcgtcatctgttggcatctaaaccgctgggaggtttaccggaaacagccaaggagcagcttaatgtccatatggaagtctgtgctgcctttgaagctaaagaagaaacatataagagtctgatgcagaaaggccagcagatgcttgcaagatgcccaaaatctgcagagacaaatattgaccaagacataaataacttgaaagaaaaatgggaatcggtggaaaccaaactcaatgaaaggaaaactaaactggaagaggctctcaacttggcaatggagttccacaattctctccaagacttcatcaactggcttactcaggctgaacagaccctaaatgtagcttctcggccaagtctcatcttggacacagtcttatttcaaattgacgaacacaaggtttttgccaatgaagtaaattctcatcgtgagcagataatagagctggacaaaactggaacccacctaaaatattttagtcagaaacaagatgttgttctaatcaagaatctacttatcagtgtacaaagtcgatgggaaaaagtggttcaacggttggtagagagaggaagatctttggatgatgcaaggaagagagccaagcagttccatgaagcttggagtaaacttatggagtggctagaagagtcagaaaagtctttggattctgaactggaaatcgcaaatgatccagacaaaataaaaacacaacttgcacaacataaggagtttcagaaatcactcggagccaagcattctgtctacgacaccaccaacaggactggacgttctctgaaggagaaaacctccctggctgatgacaacctgaaactggatgacatgctgagtgaactcagagacaaatgggataccatatgtggaaaatctgtggaaagacaaaacaaattggaggaagccctgttattttctggacaattcacagatgccctacaggctctcattgattggttatatagagttgaaccccagctggcagaagaccagcctgttcatggagacattgatttggtgatgaatctgatcgataatcacaaggccttccaaaaagagttggggaagaggaccagcagtgtgcaggccctgaagcgctcagcccgagaactcatagaaggcagtcgggatgactcctcctgggtcaaggtccagatgcaggaattaagcacacgctgggagaccgtgtgtgcactttctatatcaaagcaaacacggttagaagcagccctgcgtcaggcagaggaattccactcggtggtacatgccctcttggagtggctggctgaggcggagcaaaccctgcgtttccatggtgtcctcccagatgatgaggatgctctccggactctcattgatcagcataaagaattcatgaagaaactggaagaaaagagagctgaactaaataaagccaccactatgggcgacaccgttttggctatctgccaccccgactccatcactaccattaagcactggataacaatcatccgggcgaggtttgaggaggtgctggcctgggcaaagcaacatcagcagagattagcaagtgctctggctgggcttattgccaaacaggaattgttggaagctttgctggcttggttgcaatgggctgaaactacacttactgataaggataaagaagtcatcccccaggagatcgaagaggtgaaagcactcattgcagaacaccagaccttcatggaggaaatgaccagaaaacagcctgatgttgataaagtaacgaagacctataagaggagagctgctgatccttcctcattacaatcccatattccagtcttggataagggacgagcaggaagaaaacgctttccagcatcaagcttgtatccctctgggtcacagacacaaattgaaaccaaaaatcctagggtaaacttactggtgagcaaatggcagcaagtctggctcctggcgttggaaagaaggaggaaactcaatgatgccttggacagactagaggagctgagggaatttgctaactttgattttgatatctggcgcaaaaaatacatgcgatggatgaatcacaagaaatctcgagtgatggacttcttcaggagaattgataaagaccaggatgggaaaataacgcggcaggaatttattgatggaattctttcctcaaagtttccaaccagtcgcttggagatgagcgcagttgcagacatctttgacagagatggcgatggatatattgactactatgaatttgtagcagcccttcacccaaataaagatgcatataaacctatcacagatgccgacaaaatcgaagatgaggtgacaaggcaggtagctaagtgtaaatgtgcaaagcgatttcaagttgagcagattggtgataataaatacaggttcttcctgggaaatcagtttggagactcccagcaactgcgactggtccggatcctgcggagtactgtgatggttcgtgttggaggtggatggatggcacttgatgagttcttagtgaaaaatgatccttgcagggccaaaggaaggacaaacatggaactgcgtgagaagttcattttagcagatggtgccagccagggtatggctgctttccgaccccgaggccgaagatcccggccatcatcacgaggcgcttcacccaacagatccacttctgtgtccagtcaggctgcgcaggcggcctccccacaggtccctgccaccaccacacccaagattctccatcctttaacacgcaattatggtaaaccatggttgacaaacagcaaaatgtcaactccttgtaaagcagcagagtgctcagactttcccgtgccatctgcagagggaacgccaatacaaggaagcaagcttcgacttccaggatatttatcagggaaaggcttccactctggggaggacagtggcttgataacaactgcagctgccagagtccgaacacagtttgctgattccaagaagactcccagccgaccaggaagtcgagctggaagcaaagctggcagcagggccagcagccgccgaggcagtgatgcatcagactttgacatttcagaaatccagtccgtgtgctcagatgtggaaactgtcccccagacacacagacctacaccccgagcaggttctcggccatccacagcgaagccttcaaaaatccccacgccccagaggaaatcacctgccagcaaattggacaagtcctcaaagagatagtgcaattggttctaccaaggcccttccttgagcatttattatttaagtttgaacgatgtaaaatatggtgtagaaattcttgtgaaatattgcaagaggcgagtttaaaattctgcagatggccttatttgtgtatttgtctttttattttatctgtataattttttttgtcagatattctggggttaaagtcacatcatatgtgaggaggaaaagtttaacatgaactaacatttctgcactgtaacgtgccgggcacacactaaactcagttactgtacctacaggtaagtctacatcctctctgacagccacagcactacatcaatccctgacgttagggatacctcatgacattttcctgtttttatggaaactctgagaagctgaatgatacatgcaggggatattttttgagatgatttaaatgtaaaccaaaagatggaagacaaaaagacaaacacacccacacgcagtctttgcagtatctgacagagaactcacaggaagttacttcaagcacttgccagtactatgatattcaagtaccttgcagcatttctctgccattgctttcaatgaggccagaggcatcctggatattagacctattatactgtaagaatataagtataaagtgcgttcatatacatgtgaggttttcttttgcttgagtggacagtagcacctgtatcattgaactcattttgtatcagagcaattttgcttgcagaaagctatgaaataaaacacgtcccttaactgcaaaaaaaaaaaaaggggggggcctttaaaaagaacccctggggggcccaaatttaacccgggagggaaaataaaaatttttccccttatggggggctttataataaccgcgtggggaattttggaaagaaaccttcttttggggggggggaaaaaagggaacaccccccccccaaaaattaaggcctcaagggaaaaaaaaaattttaaaggggtaaagggggaaaacaaacccacataccctggctgttaaaaatcaggcaggaccgaaccgc

SEQ ID NO: 29 - DNA, 4327 bp, Homo sapiens
  CDS (234)..(3287)
gcacgaggcaaccttcagaacaagctagaggttttaaatcaacgctggcaaaatgttttggaaaaaacagaacaaaggaagcagcagctggatggtgccttgcccaggccaaagggttccatggcgaaattgaggatttgcagcagtggctgactgacacggagcgtcatctgttggcatctaaaccgctgggaggtttaccggaaacagccaaggagcagcttaatgtccatatggaagtctgtgctgcctttgaagctaaagaagaaacatataagagtctgatgcagaaaggccagcagatgcttgcaagatgcccaaaatctgcagagacaaatattgaccaagacataaataacttgaaagaaaaatgggaatcggtggaaaccaaactcaatgaaaggaaaactaaactggaagaggctctcaacttggcaatggagttccacaattctctccaagacttcatcaactggcttactcaggctgaacagaccctaaatgtagcttctcggccaagtctcatcttggacacagtcttatttcaaattgacgaacacaaggtttttgccaatgaagtaaattctcatcgtgagcagataatagagctggacaaaactggaacccacctaaaatattttagtcagaaacaagatgttgttctaatcaagaatctacttatcagtgtacaaagtcgatgggaaaaagtggttcaacggttggtagagagaggaagatctttggatgatgcaaggaagagagccaagcagttccatgaagcttggagtaaacttatggagtggctagaagagtcagaaaagtctttggattctgaactggaaatcgcaaatgatccagacaaaataaaaacacaacttgcacaacataaggagtttcagaaatcactcggagccaagcattctgtctacgacaccaccaacaggactggacgttctctgaaggagaaaacctccctggctgatgacaacctgaaactggatgacatgctgagtgaactcagagacaaatgggataccatatgtggaaaatctgtggaaagacaaaacaaattggaggaagccctgttattttctggacaattcacagatgccctacaggctctcattgattggttatatagagttgaaccccagctggcagaagaccagcctgttcatggagacattgatttggtgatgaatctgatcgataatcacaaggccttccaaaaagagttggggaagaggaccagcagtgtgcaggccctgaagcgctcagcccgagaactcatagaaggcagtcgggatgactcctcctgggtcaaggtccagatgcaggaattaagcacacgctgggagaccgtgtgtgcactttctatatcaaagcaaacacggttagaagcagccctgcgtcaggcagaggaattccactcggtggtacatgccctcttggagtggctggctgaggcggagcaaaccctgcgtttccatggtgtcctcccagatgatgaggatgctctccggactctcattgatcagcataaagaattcatgaagaaactggaagaaaagagagctgaactaaataaagccaccactatgggcgacaccgttttggctatctgccaccccgactccatcactaccattaagcactggataacaatcatccgggcgaggtttgaggaggtgctggcctgggcaaagcaacatcagcagagattagcaagtgctctggctgggcttattgccaaacaggaattgttggaagctttgctggcttggttgcaatgggctgaaactacacttactgataaggataaagaagtcatcccccaggagatcgaagaggtgaaagcactcattgcagaacaccagaccttcatggaggaaatgaccagaaaacagcctgatgttgataaagtaacgaagacctataagaggagagctgctgatccttcctcattacaatcccatattccagtcttggataagggacgagcaggaagaaaacgctttccagcatcaagcttgtatccctctgggtcacagacacaaattgaaaccaaaaatcctagggtaaacttactggtgagcaaatggcagcaagtctggctcctggcgttggaaagaaggaggaaactcaatgatgccttggacagactagaggagctgagggaatttgctaactttgattttgatatctggcgcaaaaaatacatgcgatggatgaatcacaagaaatctcgagtgatggacttcttcaggagaattgataaagaccaggatgggaaaataacgcggcaggaatttattgatggaattctttcctcaaagtttccaaccagtcgcttggagatgagcgcagttgcagacatctttgacagagatggcgatggatatattgactactatgaatttgtagcagcccttcacccaaataaagatgcatataaacctatcacagatgccgacaaaatcgaagatgaggtgacaaggcaggtagctaagtgtaaatgtgcaaagcgatttcaagttgagcagattggtgataataaatacaggttcttcctgggaaatcagtttggagactcccagcaactgcgactggtccggatcctgcggagtactgtgatggttcgtgttggaggtggatggatggcacttgatgagttcttagtgaaaaatgatccttgcagggccaaaggaaggacaaacatggaactgcgtgagaagttcattttagcagatggtgccagccagggtatggctgctttccgaccccgaggccgaagatcccggccatcatcacgaggcgcttcacccaacagatccacttctgtgtccagtcaggctgcgcaggcggcctccccacaggtccctgccaccaccacacccaagggaacgccaatacaaggaagcaagcttcgacttccaggatatttatcagggaaaggcttccactctggggaggacagtggcttgataacaactgcagctgccagagtccgaacacagtttgctgattccaagaagactcccagccgaccaggaagtcgagctggaagcaaagctggcagcagggccagcagccgccgaggcagtgatgcatcagactttgacatttcagaaatccagtccgtgtgctcagatgtggaaactgtcccccagacacacagacctacaccccgagcaggttctcggccatccacagcgaagccttcaaaaatccccacgccccagaggaaatcacctgccagcaaattggacaagtcctcaaagagatagtgcaattggttctaccaaggcccttccttgagcatttattatttaagtttgaacgatgtaaaatatggtgtagaaattcttgtgaaatattgcaagaggcgagtttaaaattctgcagatggccttatttgtgtatttgtctttttattttatctgtataattttttttgtcagatattctggggttaaagtcacatcatatgtgaggaggaaaagtttaacatgaactaacatttctgcactgtaacgtgccgggcacacactaaactcagttactgtacctacaggtaagtctacatcctctctgacagccacagcactacatcaatccctgacgttagggatacctcatgacattttcctgtttttatggaaactctgagaagctgaatgatacatgcaggggatattttttgagatgatttaaatgtaaaccaaaagatggaagacaaaaagacaaacacacccacacgcagtctttgcagtatctgacagagaactcacaggaagttacttcaagcacttgccagtactatgatattcaagtaccttgcagcatttctctgccattgctttcaatgaggccagaggcatcctggatattagacctattatactgtaagaatataagtataaagtgcgttcatatacatgtgaggttttcttttgcttgagtggacagtagcacctgtatcattgaactcattttgtatcagagcaattttgcttgcagaaagctatgaaataaaacacgtcccttaactgcaaaaaaaaaaaaaggggggggcctttaaaaagaacccctggggggcccaaatttaacccgggagggaaaataaaaatttttccccttatggggggctttataataaccgcgtggggaattttggaaagaaaccttcttttggggggggggaaaaaagggaacaccccccccccaaaaattaaggcctcaagggaaaaaaaaaattttaaaggggtaaagggggaaaacaaacccacataccctggctgttaaaaatcaggcaggaccgaaccgc

SEQ ID NO: 30 - DNA, 2093 bp, Homo sapiens
  CDS (1)..(2052)
atggcggcgggcggcgcggagggcggctcgggccccggcgccgccatgggggactgcgcggagattaagtcgcaattccgcacgcgcgagggtttctacaagctactcccgggcgacggcgccgctcgcaggtcgggtccggcttccgcccagactccggtgccgcctcagccaccgcagcccccgcccggccctgcctccgcctccggtcccggcgctgcaggccccgcgtcgtccccgccgcccgcaggccccggacccgggcccgccctgcccgccgtgcgcctcagcctcgtgcgcctcggggagccggacagcgccggggccggggagccgcccgccacgcccgcggggctgggctcggggggagaccgcgtctgcttcaacttgggccgtgagctctatttctacccaggctgctgtcgtcgtgggagccaacggtggcatacaccattaactccttttctcccacccctcaagtccattgacctcaacaagccaattgacaagcggatctacaagggcacccagcccacctgccacgatttcaaccagttcactgctgccaccgagaccatctcgctgctggtgggcttctcagcgggtcaagtgcagtacctggatctcatcaaaaaggacaccagcaagctgttcaatgaggagcggttgatcgacaagaccaaggtgacatatctgaagtggctgcctgagtcggagagcctgttcctggcatcacacgccagtggccacctgtacctgtacaacgtcagccacccctgcgcctcggccccgccccagtacagcctgctgaagcagggcgagggcttctctgtctatgctgccaagagcaaggcaccccgcaacccgctggccaagtgggcggtgggtgaggggcccctcaacgagttcgccttctcgcccgatggccggcacctggcctgtgtgagccaggatggctgcctgcgcgtcttccacttcgactccatgctcctgcgtgggctcatgaagagctactttgggggcctgctgtgtgtgtgctggagccctgacggccgctacgtggtgacgggtggcgaagatgacctggtcaccgtgtggtccttcaccgagggccgcgtggtggctcgaggccatggccacaagtcctgggtcaacgctgtggcctttgacccctacaccacaagggcagaggaggcggcgacagcagccggtgctgatggggagcggagcggcgaagaggaggaggaggagcccgaggctgcgggcacaggctcggccgggggcgccccgctctctccactgcccaaggctggctccattacttaccgctttggctcggcgggccaggacacgcagttctgcctgtgggacctcactgaagacgtgctctacccgcacccccccctggcccgcacccgcaccctccctggcacacctggcaccacgccaccggccgccagcagctcgaggggtggcgagcctggcccaggccccctgcctcgctcgctgtcccgctccaacagtctcccgcacccagctggcgggggcaaggcgggcggcccgggtgtggcggcagagcctggcacaccattcagcattggccgcttcgccacgctcacactgcaggagcggcgggaccggggggcagagaaggagcacaagcgctaccacagcctgggcaacatcagccggggtggcagtggcggcagtggcagtggtggggagaagcccagcggccctgttccccgcagccgcctggaccccgccaaggtgctgggcactgcgctgtgcccgcgcatccacgaggtgcccctgctggagccccttgtgtgcaagaagatcgcccaggagcggctcacagtcctcctgttcctggaggactgcatcatcactgcctgccaggagggcctcatctgcacctgggcccggccgggcaaggcgggcatctcctcccaaccaggcaactccccgagtggcacagtggtgggaagccatggatattcggcccccccaaccccatgcccccagccctctagccataacccttccttgtgacctcacagatcaacgtattaacaagactaaccatgatg

SEQ ID NO: 31 - DNA, 3885 bp, Homo sapiens
  CDS (63)..(3635)
gtcgacgatttcgtctcagcgctcacagggcccagccctgctgccgctgcagggggctagagatgcctcgtggggttttccagcagctttccaacttggttttgcaggaacttaacgccaacctgagcaacctaacctcagcgtttgaaaaagcaacagctgagaaaatcaagtgtcagcaagaggccgatgccacgaacagggtgatcttactggcgaacaggctggtcgggggattagcatcggaaaacatccgctgggctgagtctgtggagaacttcaggagccagggggtcacgctgtgtggggacgtcctgctcatctctgccttcgtgtcctacgtgggctacttcaccaagaaataccggaatgagctgatggagaaattctggatcccttacatacataacttaaaggtccccatcccgatcacgaatggcctggatcccttgagcctgctgacagatgacgcggacgtggccacctggaacaaccagggcctccccagcgaccgcatgtccaccgagaatgccaccatcctgggcaacaccgagcggtggccgctgatcgtggacgcccagctccaaggaatcaagtggatcaaaaacaaatacaggagtgaactgaaagccatccgcctgggacagaagagctacctggatgtcatcgagcaggccacctcggaaggggacacgttgctcattgagaacatcggcgaaaccgtggaccccgcgctggaccctctactgggcaggaacacgattaaaaagggaaagtacattaagatcggtgacaaggaggtgggagtaccaccccaagttccgcctgatcctacacaccaagtacttcaacccacactacaagccagagatgcaggctcagtgcacctcatcaacttcctggtcaccagggatggactcgaggaccaactcttggccgctgtggtggccaaagagcgcccagatctggaacagctgaaggcaaacctcaccaagtcccaaaacgaatttaagattgttctgaaagagctggaagattcgctcctggcccgtctgtcggctgcgtcggggaactttctgggggacacgaccttggtggagaatctggagaccaccaagcacacagccagcgagatcgaggagaaggtggtggaggcaaaaatcacagaagttaaaatcaacgaggcgagagagaactaccgcccggctgcggagagggcatctctgctctacttcatactgaacgatctcaacaaaatcaaccccgtctaccagttctccctcaaggccttcaacgtggtgtttgagaaagccatccagaggaccacccctgccaacgaggtgaagcagcgggtgatcaacctgacggacgagatcacctactccgtctacatgtacacggcccggggactcttcgagagggacaaactcattttcctggcacaagttacgtttcaggtcctgtccatgaagaaggagctgaacccagtggagctggatttcctcctgcggttcccttttaaggccggagtggtctcaccagtggacttcctccagcatcaaggctggggcgggatcaaggccctctcggagatggatgagttcaaaaatctggacagtgacatcgaaggatctgccaagcgctggaaaaagctggtggagtcggaagcccccgagaaggagatcttccccaaggagtggaagaacaagacggccctgcagaagctgtgcatggtgcgctgcctgcggccagatcgcatgacctacgctatcaagaacttcgtggaggaaaagatgggcagcaagttcgtggaaggccggagtgttgagttttctaagtcctacgaggagagcagcccctccacgtcaatcttcttcatcctctccccgggggttgaccccttgaaagacgtggaagccctgggaaaaaaactagggtttaccatagacaatggaaaactccataatgtgtccctggggcagggacaagaggtggtggctgagaacgccctggacgtggctgcagagaaaggacactgggtcattctgcagaatatccacctggtggcccggtggctgggaacactggacaagaagctggagcgctacagcacgggcagccatgaggactaccgggtgttcatcagcgcggagcctgcccccagccccgagacccacatcatcccccagggcattctggagaacgccatcaagatcaccaacgagccccccacgggcatgcacgccaacttgcacaaggccctggacctgttcacccaggacaccctggagatgtgcaccaaggagatggagttcaagtgcatgctcttcgccctgtgctacttccacgctgtggtggcagagaggcgcaagttcggcgcccagggctggaaccggtcgtaccccttcaacaacggggacctcaccatctccatcaacgtgctctacaactacctggaggccaaccccaaggtgccctgggacgatctccgctacctttttggtgaaatcatgtatggcggccacatcacagatgactgggaccgtcggctgtgcaggacctacctggctgaatacatccggacggagatgctggagggagacgtcctgctggcccccggctttcagatcccccccaacctggactacaagggttaccacgaatacatcgatgagaacctgccccctgagagtccctatctgtatggcctgcaccccaacgcagagattggctttctgacggtcacctcagagaagctgttccgcactgtcctggaaatgcagccaaaagagacggactcgggggcaggcacgggagtgtcccgcgaggagaaggtgaaggccgtgctggacgacatcctggagaagattccggagactttcaacatggctgagatcatggcaaaggcagcggaaaagaccccctatgtggtagtcgcctttcaagaatgtgaaagaatgaacatcctgaccaacgaaatgcgccgttcgctcaaggagctgaacctggggctgaagggagaactgaccatcacgaccgacgtggaagatctgtccacggctctcttctatgacaccgtgcctgatacgtgggtggcccgggcctacccctccatgatgggcctggcggcctggtacgcagacctgctgctccgcatcagggaactcgaggcctggacgacagactttgccctgcccaccaccgtgtggctggccggcttcttcaacccccagtcgttcctcacggccatcatgcagtccatggccaggaagaacgagtggcccctggacaagatgtgtctgtctgtcgaggtgaccaagaaaaaccgagaggacatgaccgctcctccgcgagagggctcctacgtgtacggactcttcatggaaggggctcgctgggacacccagactggagtcatcgctgaagcgcggctgaaagagctgaccccggccatgcctgtcatcttcatcaaggccattcctgtggaccgcatggagaccaagaacatctatgagtgtcccgtgtacaaaacacgcatccgcggccccacctatgtctggacctttaacttgaagaccaaagagaaggcagcgaagtggatcctggcagccgtggcgctgctcctacaggtttagctcgctcctgcctcacagcccacactccctggggctggaccacaactcagcccttcacctgtgcacctgtgacttattctttacaggaactggtggtggtttttcgttctcttaaataatcaggtgctttgtaaccaagcacatcggaaccagagggtggaggttggtgtggaagaggtggggcagattaaagccagtggagccacaaaaaaaaaaaaaaaaaaaaaaaaaattggcggccgcaagctta

SEQ ID NO: 32 - DNA, 1763 bp, Homo sapiens
  CDS (64)..(1491)
acgcctgacgtaccggtccggaattcccgggtcgacgatttcgtgctttttcctgggatagcgatggagacgccgggcgcatcagcgtcgtccttgttgcttcccgccgcgtccaggcccccgaggaagcgcgaggcgggagaggctggggctgcgacgagcaagcagcgggtcctggacgaggaagagtatatcgagggcctccagacggtcatccaaagggatttctttcctgatgtggagaagctccaggcacagaaggagtacctggaagccgaggagaatggagacttggaacggatgcgccagattgccatcaagtttggctctgccttgggcaagatgtcccgggagcccccgccaccctatgtgactccagccacatttgaaacccctgaggtgcatgcaggcactggagtggtgggcaacaagcccaggccccgcggccgaggcctggaggatggagaggctggagaggaggaggagaaggagccgctgcccagcctagatgtcttcctgagccgctacacgagtgaggacaatgcctccttccaggagatcatggaggtggccaaggagagaagccgggcacgccacgcttggctctaccaggctgaggaagagtttgagaagaggcagaaagataatctcgaactcccgtcagcagagcaccaggccatcgagagcagccaggccagtgtggagacctggaagtacaaggccaagaattccctcatgtactatccagagggtgtccctgacgaggagcagctgtttaagaagccccggcaggtggtacataagaacacgcgcttccttagggaccccttcagccaagccctgagcaggtgccagctccagcaggcagccgccctcaatgcccagcacaaacagggcaaggtgggccccgatggcaaggagctgatcccccaggagtcccctcgagtgggtggatttggatttgttgccactccttcccctgcccctggtgtgaacgagtccccgatgatgacctggggggaggttgagaacacacccttgagagttgaagggtcggaaacgccctacgtggacaggacacccggcccagcttttaagatcctggagccaggccgcagggagcggctgggtctgaagatggccaacgaggccgctgccaagaaccgggccaagaagcaggaagccttgcggagagtgacggagaatctggccagcctcacccccaaaggcctgagcccagccatgtcgccagccctacagcgccttgtgagcaggacggccagcaagtacacagaccgggccctgcgggccagctacacaccatccccagcacgctccacccacctcaagaccccggccagtgggctgcagacccccacaagcacaccggcgcctggctctgccacacgcacccctctcacacaggacccggcctccatcacggacaacctgctgcagctccctgcccggcgcaaagcttcggacttcttttagagccaggcctgggctgggctcatagacgcttcacagagcctgcagggcagctgtacacccagcagaggactccagccttctcggggcccaggcctgggccagaagctgttgaccataccaggagtcactggagaaaggggctgtgctggggccagactggcacaaggcactcgtgcccacaccacaccccagggccttgccaagctgtttgctgtttaattggccccttgaactgtcattaaagaacacctaggtacagtcaaaaaaaa

SEQ ID NO: 33 - DNA, 2179 bp, Homo sapiens
  CDS (425)..(2005)
ctctccccggctgtgactccagtttcgtccccagccgccgggaccgccccctcgccccgcccccagcgggcactcaggccgtaccactgtgccttcatgggggtggagatagatcgtgggctagtcctgccgaggagagaggggttcttcctcaaaaaatatgattatgtatagtattcgcatgattctagttaacttgtttcccttctgcctgctcggaccctctacctgccctacgaagggggcggagtgcgttcctgcctccccctgctcttccgcgtttggtgcgcgcctgcgcggtgcgtaggcggcggagcgtacttaagcttcgacgcaggaggcggggctgctcagtcctccaggcgtcggtgctcagcggtgttggaacttcgttgcttgcttgcctgtgcgcgcgtgcgcggacatggcctcaaacgattatacccaacaagcaacccaaagctatggggcctaccccacccagcccgggcagggctattcccagcagagcagtcagccctacggacagcagagttacagtggttatagccagtccacggacacttcaggctatggccagagcagctattcttcttatggccagagccagaacacaggctatggaactcagtcaactccccagggatatggctcgactggcggctatggcagtagccagagctcccaatcgtcttacgggcagcagtcctcctaccctggctatggccagcagccagctcccagcagcacctcgggaagttacggtagcagttctcagagcagcagctatgggcagccccagagtgggagctacagccagcagcctagctatggtggacagcagcaaagctatggacagcagcaaagctataatccccctcagggctatggacagcagaaccagtacaacagcagcagtggtggtggaggtggaggtggaggtggaggtaactatggccaagatcaatcctccatgagtagtggtggtggcagtggtggcggttatggcaatcaagaccagagtggtggaggtggcagcggtggctatggacagcaggaccgtggaggccgcggcaggggtggcagtggtggcggcggcggcggcggcggtggtggttacaaccgcagcagtggtggctatgaacccagaggtcgtggaggtggccgtggaggcagaggtggcatgggcggaagtgaccgtggtggcttcaataaatttggtggccctcgggaccaaggatcacgtcatgactccgaacaggataattcagacaacaacaccatctttgtgcaaggcctgggtgagaatgttacaattgagtctgtggctgattacttcaagcagattggtattattaagacaaacaagaaaacgggacagcccatgattaatttgtacacagacagggaaactggcaagctgaagggagaggcaacggtctcttttgatgacccaccttcagctaaagcagctattgactggtttgatggtaaagaattctccggaaatcctatcaaggtctcatttgctactcgccgggcagactttaatcggggtggtggcaatggtcgtggaggccgagggcgaggaggacccatgggccgtggaggctatggaggtggtggcagtggtggtggtggccgaggaggatttcccagtggaggtggtggcggtggaggacagcagcgagctggtgactggaagtgtcctaatcccacctgtgagaatatgaacttctcttggaggaatgaatgcaaccagtgtaaggcccctaaaccagatggcccaggagggggaccaggtggctctcacatggggggtaactacggggatgatcgtcgtggtggcagaggaggctatgatcgaggcggctaccggggccgcggcggggaccgtggaggcttccgagggggccggggtggtggggacagaggtggctttggccctggcaagatggattccaggggtgagcacagacaggatcgcagggagaggccgtattaattagcctggctccccaggttctggaacagctttttgtcctgtacccagtgttaccctcgttattttgtaaccttccaattcctgatcacccaagggtttttttgtgtcggactatgtaattgtaactatacctctggttcccattaaaagtgaccattttagttaaaaaaaaaa

SEQ ID NO: 34 - DNA, 2209 bp, Homo sapiens
  CDS (425)..(2035)
ctctccccggctgtgactccagtttcgtccccagccgccgggaccgccccctcgccccgcccccagcgggcactcaggccgtaccactgtgccttcatgggggtggagatagatcgtgggctagtcctgccgaggagagaggggttcttcctcaaaaaatatgattatgtatagtattcgcatgattctagttaacttgtttcccttctgcctgctcggaccctctacctgccctacgaagggggcggagtgcgttcctgcctccccctgctcttccgcgtttggtgcgcgcctgcgcggtgcgtaggcggcggagcgtacttaagcttcgacgcaggaggcggggctgctcagtcctccaggcgtcggtgctcagcggtgttggaacttcgttgcttgcttgcctgtgcgcgcgtgcgcggacatggcctcaaacgattatacccaacaagcaacccaaagctatggggcctaccccacccagcccgggcagggctattcccagcagagcagtcagccctacggacagcagagttacagtggttatagccagtccacggacacttcaggctatggccagagcagctattcttcttatggccagagccagaacacaggctatggaactcagtcaactccccagggatatggctcgactggcggctatggcagtagccagagctcccaatcgtcttacgggcagcagtcctcctaccctggctatggccagcagccagctcccagcagcacctcgggaagttacggtagcagttctcagagcagcagctatgggcagccccagagtgggagctacagccagcagcctagctatggtggacagcagcaaagctatggacagcagcaaagctataatccccctcagggctatggacagcagaaccagtacaacagcagcagtggtggtggaggtggaggtggaggtggaggtaactatggccaagatcaatcctccatgagtagtggtggtcaagatcaatcctccatgagtagtggtggtggcagtggtggcggttatggcaatcaagaccagagtggtggaggtggcagcggtggctatggacagcaggaccgtggaggccgcggcaggggtggcagtggtggcggcggcggcggcggcggtggtggttacaaccgcagcagtggtggctatgaacccagaggtcgtggaggtggccgtggaggcagaggtggcatgggcggaagtgaccgtggtggcttcaataaatttggtggccctcgggaccaaggatcacgtcatgactccgaacaggataattcagacaacaacaccatctttgtgcaaggcctgggtgagaatgttacaattgagtctgtggctgattacttcaagcagattggtattattaagacaaacaagaaaacgggacagcccatgattaatttgtacacagacagggaaactggcaagctgaagggagaggcaacggtctcttttgatgacccaccttcagctaaagcagctattgactggtttgatggtaaagaattctccggaaatcctatcaaggtctcatttgctactcgccgggcagactttaatcggggtggtggcaatggtcgtggaggccgagggcgaggaggacccatgggccgtggaggctatggaggtggtggcagtggtggtggtggccgaggaggatttcccagtggaggtggtggcggtggaggacagcagcgagctggtgactggaagtgtcctaatcccacctgtgagaatatgaacttctcttggaggaatgaatgcaaccagtgtaaggcccctaaaccagatggcccaggagggggaccaggtggctctcacatggggggtaactacggggatgatcgtcgtggtggcagaggaggctatgatcgaggcggctaccggggccgcggcggggaccgtggaggcttccgagggggccggggtggtggggacagaggtggctttggccctggcaagatggattccaggggtgagcacagacaggatcgcagggagaggccgtattaattagcctggctccccaggttctggaacagctttttgtcctgtacccagtgttaccctcgttattttgtaaccttccaattcctgatcacccaagggtttttttgtgtcggactatgtaattgtaactatacctctggttcccattaaaagtgaccattttagttaaaaaaaaaa

SEQ ID NO: 35 - DNA, 1398 bp, Homo sapiens
  CDS (136)..(522)
tttcgtctggggagaaagtgggggctgtggcgtgggggctgaggaggggctaaggcgggaggggcgcctcatcccttcaccctcccttttcgccatgtgggggccctgagcgccgccccagaagaggtcgagggaatgttgtgggctggggcacaccagcacggcagaaactggagaaagcgagagacgtcgccagggacccagggacctctccctccagttccccgggcccgcccggccctgatggccactcacgctatagcgcccactctgtcctgggccatcccgcgccagcagtgtagcccccagcccgggcgcctgaatgctctccctccggatcgctgctcgggtccccactttggcgaccgtgcccccgagtcctgcttccccggggcctgctctgtatcaggcgcctgcgccttcaagggtacccggcccgcctgccctccccaagagccgagtttgcgctcctcccggaatcgtttgagagaaggacaaacttttggcaggatggaaatctagatgagcctgtccggagcagaacacccctgattagccaggcccaccgccatccacatctgctcggcaaagaaggaaggcagcttgttccagaccttggtgagcagctgcagactgcctgcctagaacagcctccttactccagcctggcagggaaggaaggaacctgacttgcttcgcaggatctggaagctcagccggcagagctgagagccgcagttgcatcctggagcctgatgctagaagcagcttccgtctttgggttcttgctgcctcggcctctgctctgttcagtttgctgttgtgtttttctcccccatgttggggtggtggggtacagggaaataaaatgctttctcccaggcccctaatccttccccatgcctccatcagcctcaaagctgctgacagtcatgaactgcaccttccagccctgcccataagctactcaaagcaaattcaaattctcttctggccagggggaagggcagatgctccctccttcctcaagcctccctggctcattgatccattttgagggcatttgggggtcaaagttgagaccagattgcttcagtttgtataaaattagcatttcttatcacaccaaggccacacctgttctctggcctcacaaaccagtgaggatgtaaaggtttgttgaggtggaggaacagaagtgaaatgagcaatctgctccatttagaagtcagtcgcttcggctgttcattccactaatatttatctagtacctattctgtgccaagcattgtctctacctcagtttgccacaaatatgaaaaaaaaaaaattcttggaactgtgaggcttcaatgtgttgtggaccaatatacaaataaaccaatggaaaaaaaaaaa

SEQ ID NO: 36 - DNA, 1014 bp, Homo sapiens
  CDS (1)..(1014)
atggggaacgattctgtcagctacgagtatggggattacagcgacctctcggaccgccctgtggactgcctggatggcgcctgcctggccatcgacccgctgcgcgtggccccgctcccactgtatgccgccatcttcctggtgggggtgccgggcaatgccatggtggcctgggtggctgggaaggtggcccgccggagggtgggtgccacctggttgctccacctggccgtggcggatttgctgtgctgtttgtctctgcccatcctggcagtgcccattgcccgtggaggccactggccgtatggtgcagtgggctgtcgggcgctgccctccatcatcctgctgaccatgtatgccagcgtcctgctcctggcagctctcagtgccgacctctgcttcctggctctcgggcctgcctggtggtctacggttcagcgggcgtgcggggtgcaggtggcctgtggggcagcctggacactggccttgctgctcaccgtgccctccgccatctaccgccggctgcaccaggagcacttcccagcccggctgcagtgtgtggtggactacggcggctcctccagcaccgagaatgcggtgactgccatccggtttctttttggcttcctggggcccctggtggccgtggccagctgccacagtgccctcctgtgctgggcagcccgacgctgccggccgctgggcacagccattgtggtggggttttttgtctgctgggcaccctaccacctgctggggctggtgctcactgtggcggccccgaactccgcactcctggccagggccctgcgggctgaacccctcatcgtgggccttgccctcgctcacagctgcctcaatcccatgctcttcctgtattttgggagggctcaactccgccggtcactgccagctgcctgtcactgggccctgagggagtcccagggccaggacgaaagtgtggacagcaagaaatccaccagccatgacctggtctcggagatggaggtgtag

SEQ ID NO: 37 - DNA, 5261 bp, Homo sapiens
  CDS (797)..(4381)
gaaaaacagagcctctctgtagagatgcttaaagtgctagctttatttaaaaatcagctggcaaagcgggagtgaagaacacacattttcagaagataccggtttcctgttttcattaagaaaacagggaatgcggaacagctgagtgcggcgggggtggtgtcactgcagccggagggagacctcgccggtgaaagctcagcctatggcatccgagcgtggccggccaagtttacacgaatgttgaaacttctcctcacggggtgaggatcgagggcgcccgaggccgggtccggctgagctggagcgagctgtgcggggcagcgcgggctggcggggagcgcggcgggcgccacgtggaaaagcaggtgatattctcagtggagaccaggacaaggaacagaaagacccttactttgtggagaccccctatggttatcaactagacttagatttcctcaaatatgtggatgacatacagaagggaaataccatcaaaagactgaacatccagaagaggcggaagccgtccgtgccatgcccagaacccaggaccacatctggtcagcaaggtatatggacttccactgaatccctctcatcctccaacagtgatgacaacaagcagtgccccaacttcctcatagccagaagtcaagttacatcaactccaatctcaaagccacctccccctctggagacctcactcccttttcttaccatcccagaaaatcgacagctgccacctccctcaccacaactcccaaagcataaccttcatgtcaccaagacactgatggagacccggagaagactggaacaggagagagccaccatgcagatgacaccgggtgagttcagaaggcccaggctggccagttttggaggcatgggcaccacaagctccctcccttcttttgtgggttctggaaaccacaatcctgccaagcaccagcttcagaatggataccaaggtaatggggattatggtagctatgccccagctgctcccaccacttcctccatggggagctccatccgccacagccccctgagctcagggatctccaccccagtgaccaacgtgagccccatgcacctgcagcacatccgcgagcagatggccattgctctgaaacgcctgaaggagctggaggagcaggtgcgaaccatccctgtgctccaggtaaagatctctgtcttgcaagaagagaaaaggcagttggtctcacagctgaaaaaccaaagggctgcatcccagatcaatgtctgtggtgtgaggaagcggtcctatagtgcggggaacgcctcccagctggaacagctctcccgggcccgaagaagtggcggggaattatacattgactatgaggaggaagaaatggagaccgtagaacagagcacgcagaggataaaggagttccggcaacttacagcagacatgcaagccctggagcagaagatccaggacagcagctgtgaggcctcctcagagctcagggagaatggagagtgccggtctgtggctgtgggtgccgaggagaacatgaacgacatcgtcgtgtaccacagaggctccaggtcctgtaaggatgcagctgtagggacacttgttgagatgagaaattgtggggtcagcgtgacagaggccatgcttggagtgatgactgaagctgacaaagaaattgagctccaacagcagaccatagaatccttgaaggaaaagatctatcgcctagaagtacagcttagagaaaccacccatgaccgggagatgactaaactgaaacaagagctgcaggctgctggatcgaggaaaaaggttgacaaagccacgatggcccagccgcttgttttcagtaaggtggtggaggcagtggtgcagaccagagaccaaatggtcggcagtcacatggacctggtggacacgtgtgttgggacctccgtggaaacaaacagtgtaggcatctcctgccagcctgaatgtaagaataaagtcgtagggcctgagctgcctatgaattggtggattgttaaggagagggtggaaatgcatgaccgatgtgctgggaggtctgtggaaatgtgtgacaagagtgtgagtgtggaagtcagcgtctgcgaaacaggcagcaacacagaggagtctgtgaacgacctcacactcctcaagacaaacttgaatctcaaagaagtgcggtctatcggttgtggagattgttctgttgacgtgaccgtctgctctccaaaggagtgcgcctcccggggcgtgaacactgaggctgttagccaggtggaagctgccgtcatggcagtgcctcgtactgcagaccaggacactagcacagatttggaacaggtgcaccagttcaccaacaccgagacggccaccctcatagagtcctgcaccaacacttgtctaagcactttggacaagcagaccagcacccagactgtggagacgcggacagtagctgtaggagaaggccgtgtcaaggacatcaactcctccaccaagacgcggtccattggtgttggaacgttgctttctggccattctgggtttgacaggccatcagctgtgaagaccaaagagtcaggtgtggggcagataaatattaacgacaactatctggttggtctcaaaatgaggactatagcttgtgggccaccacagttgactgtggggctgacagccagcagaaggagcgtgggggttggggatgaccctgtaggggaatctctggagaacccccagcctcaagctccacttggaatgatgactggcctggatcactacattgagcgtatccagaagctgctggcagaacagcagacactgctggctgagaactacagtgaactggcagaagctttcggggaacctcactcacagatgggctccctcaactctcagctcatcagcaccctgtcgtctatcaactctgtcatgaaatctgcaagcactgaagagctgaggaaccctgacttccagaaaaccagtctgggtaaaatcacaggcaattatttgggatatacctgtaagtgtgggggccttcagtcaggaagtcccttaagctcccagacatcccagcctgagcaagaagtggggacctcagaaggaaagccaatcagcagcctggatgccttccccactcaggaaggtacgctgtctccagtgaacctgacagacgaccagatcgccgctggcctctatgcatgtacaaacaatgaaagtacactgaagtccatcatgaagaagaaagatggtaacaaagattcaaatggcgcaaaaaagaatcttcagtttgttggcattaatggagggtatgaaacaacttcaagtgatgattccagctcagatgaaagctcttcttccgagtcagatgacgagtgtgatgtcattgagtatcctcttgaagaagaggaggaggaggaggatgaagacactcggggaatggcagaagggcaccatgcagttaatattgaaggtttgaagtctgccagggtggaagatgaaatgcaggttcaagaatgtgaacctgagaaggtggaaatcagagagaggtatgaattaagtgaaaagatgttgtctgcatgcaacttactgaaaaatactataaatgaccccaaagctttgaccagcaaagatatgaggttctgtctgaacaccctccagcacgagtggttccgcgtgtccagtcagaagtcagccattccagccatggtgggggactacatagctgcttttgaggccatttccccagatgtcctccgctatgtcatcaacttggcagacggcaacggcaacacagccctccattacagcgtgtcccactccaacttcgagattgtgaagctgctgttagatgccgatgtgtgtaatgtggatcaccagaacaaggcaggctacacccccatcatgttggcggccctcgccgctgtggaagcagagaaggacatgcggattgtggaagaactcttcggctgtggggatgtgaatgccaaagctagtcaggcgggacagacggccctcatgctggcggtcagtcacggacggatagacatggtgaagggccttctggcctgtggggctgatgtcaacatccaggatgacgagggctccacggccctcatgtgtgccagcgagcacgggcacgtggagattgtcaagctgctgctggcccagcccggctgcaacggtcacctagaggacaacgatggcagcactgcgctctcaatcgccctggaagcaggacacaaggacatcgctgttcttctgtatgcccatgtcaactttgcaaaagcccagtctccgggcacccctaggcttggaaggaagacgtctcctggccccacccaccgaggttcatttgattgattgtatgcaaatagccctttatttacatgccactattaagctgctaattgttcctgttggggtgacagatactgaatgtatacgtattgtgcctgagctcaccagcaaacagaagcatcaagcccaggggtaaaggctgaagctttcacagtgcagagactgctagcctgggcacacgcacctcctttctggccgtcttctgtgtagggcacactttaacccagtctctgttgctgttgagtctctgctccgttttgtacagtcacagggaattctgatctgaaggggcaccttctgttcactcccacaaagtggtgtctggttctcactgagacgttttaagatttttccacaaatatttatatgtactaaatgtggaaccattagaaagttcttccaaaatctcattccagcatagttttggatttttcttttgtcttattttaaaataaggaagtcgagatgactttgatcattggtaacttgggcctgggccagacaaagtataaaacttacaaaagaatattctcatttggtcttaactaggtagatgtaatatatgactttttataaaaagggtatctatatgaacttgacacagtattttcagcttttgtattccatactaaagccatgaagaactacacgtaacatcatcatttgtattaattgcacaactccaatgctaaaggttggattgtgttagaggaatcggctctgtatttgcctctagagaaacacagtgttctctttgtatttatggattcctttttaccgtgtcacatttactttggtcctctatgtatttaaatgtttgaagtgccttagactcttgccatattttcaaaataaaattccattaagctctaaaaaaaaaaaa

SEQ ID NO: 38 - DNA, 1695 bp, Homo sapiens
  CDS (460)..(1557)
gcacgaggttcgctcggccgcggtcgctatggaggagccggagatgcagctcaaggggaagaaagtcacggacaagttcactgagagcgtctacgtcctggccaacgagccatccgtggccctgtaccggctgcaggagcatgtgcgtcgctccctccccgagctggcccagcacaaggcagacatgcagcgttgggaggagcagagccagggagccatctacactgtggagtacgcctgcagcgccgtgaagaacctggtggacagcagcgtctacttccgcagcgtggagggtctgctcaaacaggccatcagcatccgggaccatatgaatgccagtgcccagggccacagcccggaggaaccacccccgccctcctcagcctgatcctggaagagactcggggccccccagcctccgccaacccagacaaagatcattccactcagcctgggacgatggggaggaaaaaaatccagatctcccgcatcctggaccaaaggaatcggcaggtgacgttcaccaagcggaagttcgggctgatgaagaaggcctatgagctgagcgtgctctgtgactgtgagatagccctcatcatcttcaacagcgccaaccgcctcttccagtatgccagcacggacatggaccgtgtgctgctgaagtacacagagtacagcgagccccacgagagccgcaccaacactgacatcctcgagacgctgaagcggaggggcattggcctcgatgggccagagctggagccggatgaagggcctgaggagccaggagagaagtttcggaggctggcaggcgaagggggtgatccggccttgccccgaccccggctgtatcctgcagctcctgctatgcccagcccagatgtggtatacggggccttaccgccaccaggctgtgaccccagtgggcttggggaagcactgcccgcccagagccgcccatctcccttccgaccagcagcccccaaagccgggcccccaggcctggggcaccctctcttctcaccaagccacctcaccagcaagacaccacccccactgtacctgccgacggaagggcggaggtcagacctgcctggtggcctggctgggccccgagggggactaaacacctccagaagcctctacagtggcctgcagaacccctgctccactgcaactcccggacccccactggggagcttccccttcctccccggaggccccccagtgggggccgaagcctgggcgaggagggtcccccaacccgcggcgcctccccgccgacccccccagtcagcatcaagtctgagcgcctctctccggcccccgggggccccggcgactttcctaagaccttcccctatcccttgctcctcgcccggtccctggcagagcctctgcggcctgggcccgccctgcgccggctgcccttggccgacggctggccccggtaggagatcacccggtggcaccagcccagagcgctcgccaggtacggcgagggcacgtggggaccccacctccctccaggcctcttcagagaagacccaacagtgacgcccccctccgcggtgggggcttggaggtgggcggctggactcaatccaccctggggggctcctttccttcttcctatttgtgtgtatatccacaaataaaacgcgcgtggcgtccgtggaccagaaaaaaaaaaaa

SEQ ID NO: 39 - DNA, 1622 bp, Homo sapiens
  CDS (74)..(1192)
  misc_feature (1)...(1622): n = a,t,c or g
atagctaccctgggntaaggaacngggaccnnnnnnncctcaacccctgcactgcgctagncctatagaggaaatgtctctacgctgcggggatgcggcccgcaccctggggccccgggtatttgggagatatttttgcagcccagtcagaccgttaagctccttgccagataaaaaaaaggaactcctacagaatggaccagaccttcaagattttgtatctggtgatcttgcagacaggagcacctgggatgaatataaaggaaacctaaaacgccagaaaggagaaaggttaagactacctccatggctaaagacagagattcccatggggaaaaattacaataaactgaaaaatactttgcggaatttaaatctccatacagtatgtgaggaagctcgatgtcccaatattggagagtgttggggaggtggagaatatgccaccgccacagccacgatcatgttgatgggtgacacatgtacaagaggttgcagattttgttctgttaagactgcaagaaatcctcctccactggatgccagtgagccctacaatactgcaaaggcaattgcagaatggggtctggattatgttgtcctgacatctgtggatcgagatgatatgcctgatgggggagctgaacacattgcaaagaccgtatcatatttaaaggaaaggaatccaaaaatccttgtggagtgtcttactcctgattttcgaggtgatctcaaagcaatagaaaaagttgctctgtcaggattagatgtgtatgcacataatgtagaaacagtcccggaattacagagtaaggttcgtgatcctcgggccaattttgatcagtccctacgtgtactgaaacatgccaagaaggttcagcctgatgttatttctaaaacatctataatgttgggtttaggcgagaatgatgagcaagtatatgcaacaatgaaagcacttcgtgaggcagatgtagactgcttgactttaggacaatatatgcagccaacaaggcgtcaccttaaggttgaagaatatattactcctgaaaaattcaaatactgggaaaaagtaggaaatgaacttggatttcattatactgcaagtggccctttggtgcgttcttcatataaagcaggtgaatttttcctgaaaaatctagtggctaaaagaaaaacaaaagacctctaaaacttcaacaagaccttcaagatcacagaaatttttaaaatttgattccagttaataacagaggtggtgccagaatgcctggactgcagtggatgtaccccacctctttgcttaaaaaaaaaaatgtcaatagccaggcatagtggctcacgcctgtaatcccagcactttaggaggccaaggcgggtggatcacctgaggtcaggagttcgagaccagcctggccaacatggtgaaatcctgtctccactaaaaacacaaaaattagtcaggcgtggtagtgggtgcctgtaatcccagctactcgggaggctaaggcaggagaatcacttgaacctgggagggggaggttgcagtgagccaagatcgctccattgccctccagcctgggtgacaagagcaaaactccatctcaaataaaaaaaaaaaa

SEQ ID NO: 40 - DNA, 2523 bp, Homo sapiens
  CDS (51)..(1637)
agccggttcctggtgtccccacttcgcctccctcctgctgcccccaagacatgcaggggccctgggtgctgctgctgctgggcctgaggctacagctctccctgggcgtcatcccagctgaggaggagaacccggccttctggaaccgccaggcagctgaggccctggatgctgccaagaagctgcagcccatccagaaggtcgccaagaacctcatcctcttcctgggcgatgggttgggggtgcccacggtgacagccaccaggatcctaaaggggcagaagaatggcaaactggggcctgagacgcccctggccatggaccgcttcccatacctggctctgtccaagacatacaatgtggacagacaggtgccagacagcgcagccacagccacggcctacctgtgcggggtcaaggccaacttccagaccatcggcttgagtgcagccgcccgctttaaccagtgcaacacgacacgcggcaatgaggtcatctccgtgatgaaccgggccaagcaagcaggaaagtcagtaggagtggtgaccaccacacgggtgcagcacgcctcgccagccggcacctacgcacacacagtgaaccgcaactggtactcagatgctgacatgcctgcctcagcccgccaggaggggtgccaggacatcgccactcagctcatctccaacatggacattgacgtgatccttggcggaggccgcaagtacatgtttcccatggggaccccagaccctgagtacccagctgatgccagccagaatggaatcaggctggacgggaagaacctggtgcaggaatggctggcaaagcaccagggtgcctggtatgtgtggaaccgcactgagctcatgcaggcgtccctggaccagtctgtgacccatctcatgggcctctttgagcccggagacacgaaatatgagatccaccgagaccccacactggacccctccctgatggagatgacagaggctgccctgcgcctgctgagcaggaacccccgcggcttctacctctttgtggagggcggccgcatcgaccatggtcatcatgagggtgtggcttaccaggcactcactgaggcggtcatgttcgacgacgccattgagagggcgggccagctcaccagcgaggaggacacgctgaccctcgtcaccgctgaccactcccatgtcttctcctttggtggctacaccttgcgagggagctccatcttcgggttggcccccagcaaggctcaggacagcaaagcctacacgtccatcctgtacggcaatggcccgggctacgtgttcaactcaggcgtgcgaccagacgtgaatgagagcgagagcgggagccccgattaccagcagcaggcggcggtgcccctgtcgtccgagacccacggaggcgaagacgtggcggtgtttgcgcgcggcccgcaggcgcacctggtgcatggtgtgcaggagcagagcttcgtagcgcatgtcatggccttcgctgcctgtctggagccctacacggcctgcgacctggcgcctcccgcctgcaccaccgacgccgcgcacccagttgccgcgtcgctgccactgctggccgggaccctgctgctgctgggggcgtccgctgctccctgagtgccccactccggagttatcctgctccccacctccgggcgtcctgccctgttccccgtcctgagccgccacttccagcgaacacacacaggtgtcctgccgttggaccttcacctcctagagataaaccagcctcagctggcgcagcggggcccttcttccctccgcatccccttcagggagcaggagcccagggcgccctgggagctgagcctgggacttccaggacctcccctcaggttgttctctgattcttcctcccaaccccagagactgcagatttgtgccatgcggctgcctgcaccccagacaataaagggaccaaaaccacccaacccccaccctgcctctatcctaaggaagaccaagcaggcctggacccagagacgtcccccatcgtgggacacgacacacccagaccgcgtgccccaccgtcttagcttcaatcctggcagcacctggtagacccaaggacttgggtggatcaggacacctgaagaagagaagcttccggcaaccctgcaacccacccaaggaggctactggatcggggattcccaggggggctttgacacagtcctctgctgtctccccactaggatcattccacacccctgcacctgaccaagggaccaatgaggcagaggcttgccccaagtcacagccactcagatgcttcctgccccccagtgcccattccaggtcaccagatccaaggagcgcttgaggagctctgggtacagggcagcaacccagagcccatgggccctcccgggacatctggatgctgggcatagatttctcaacaaggaagactcccctgcctcctcaaggtctccattctcctaggagacaaagcaataataaaaggtgttagacaatgtaa

SEQ ID NO: 41 - DNA, 1436 bp, Homo sapiens
  CDS (115)..(771)
tgcccgccctcccctccccctgcatcgactgccatcggtaccggtccggaattcccgggtcgacccacgcgtccgcccacgcgtccggtttgggtttcttcgcggctgctcaagatgaaccgactcttcgggaaagcgaaacccaaggctccgccgcccagcctgactgactgcattggcacggtggacagtagagcagaatccattgacaagaagatttctcgattggatgctgagctagtgaagtataaggatcagatcaagaagatgagagagggtcctgcaaagaatatggtcaagcagaaagccttgcgagttttaaagcaaaagaggatgtatgagcagcagcgggacaatcttgccaacagtcattcaacatggacaagccattataccatccagtctttgaaggacaccaagaccacggttgatgctatgaaactgggagtaaaggaaatgaagaaggcatacaagcaagtgaagatcgaccagattgaggatttacaagaccagctagaggatatgatggaagatgcaaatgaaatccaagaagcactgagtcgcagttatggcaccccagaactggatgaagatgatttagaagcagagttggatgcactaggtgatgagcttctggctgatgaagacagttcttatttggatgaggcagcatctgcacctgcaattccagaaggtgttcccactgatacaaaaaacaaggatggagttctggtggatgaatttggattgccacagatccctgcttcatagatttgcatcattcaagcatatcttgtaaaacaaacacatattatgggactaggaaatatttatctttccaaatttgccataacagatttaggtttctttcctttctttgaaggaaagtttaattacattgctcttttattttttccattaagagactcattgcttgggaaatgctttcttcgtactaaaatttgattcctttttttcttatgaaaaacgaactcagtttaaaagtatttttagctcgtatgacttgttttcattcattaataataatttgaaataaaactaaggaaatggaatcttaaaagtctatgacagtgtaactctacagtctcaaaatgacctgataaattgataagacaaagatgagattattggggctgttcatattatgattcagaatcattttctattgtggtattataggttggttaaagtgatggcctttttgatgggttttgttgtgtcttgtgaacaagtcgttactgtgtccattattggaatggaattatcactactgtatcatgagtgggtattttgattctatggttccctcagtattacatcttgacttgtaatcaattatgaatatttcttgatatttaatgtataggacatttatttatactcaataaatatttttcaaaaggaaaaaaaaaaaa

SEQ ID NO: 42 - DNA, 2060 bp, Homo sapiens
  CDS (438)..(1904)
aattcggcacgagcagtcccctggtgcccacccccgtcactgccgcccgcctggttccagcctcgcgagaccgctgtctacggcgctgacgccgcctctgcctcttgaccccttggccccgctgtcctgatccctgaggtcggggcctggtctgcactccaggaaagacgagtgcgcttagtgtgcgctgcacgtgagcagtgaagttgattccacgcgctgcgctgctcggcagctgtcccagaactgaccacggacccctccgcgggtcctgctcctgacaagggccttccggcactgggagttttgtgttagtggaaaggaagaatctaataataccaccacctttacagtaaagacgctgcgaattgacgccttttataataaagacacttatcttgcccaagagctggggagcatttcctgaagacgtagtcatgcagcacgtcagcagctcccagagcagccagcgccatgtccagtggcctggggcctgccccggcgcgggcgaggagcagccagcgtgctcccagccgtccctgcccctcacactggcatcccccagccaccaactacagcagctgatggtgagagggggccctgcgggtgggcagaacatgaatgttgacctgcagggcgtgggccctgggctccagggaagcccacaggtcacgctggccccactgccgctccccagccccacctctccaggcttccagttcagcgctcagcctcggcggtttgagcatgggtctccatcatacattcaggtcacgtcccccttgtcccagcaggtccagacccagagtcccacgcagcccagtccggggccggggcaggccttgcagaatgtgcgtgcaggtgcccctggccctgggctgggcctctgcagcagcagccctacaggggacttcgtggatgccagcgtgctggtgaggcagatcagcttgagcccctccagtggtggacactttgtgtttcaggatgggtcagggctcacccagatcgcccagggagcccaggttcagctccagcacccgggtacgcccatcacagtccgagagcggagaccctcccagccccacacacagtcagggggcaccatccaccacctgggaccccagagccctgcagccgcgggtggggccggcctgcagcccctggccagcccaagccacatcaccacggctaacttgccaccgcagatcagcagcatcatccagggccagctggttcagcagcagcaggtgctgcaggggccgccgctgccccggcccctgggcttcgagaggacgcccggcgtgctgctccccggggctgggggcgcagcggggtttgggatgacgtccccacccccgcccaccagcccttccaggactgccgtgcccccaggcctttccagcctcccactcacgtctgtggggaacacgggaatgaagaaggttcccaagaagttagaggagattcccccagcctctccggagatggcacagatgaggaagcagtgcctggactatcatcaccaggagatgcaggctctgaaggaggtcttcaaggagtatttgattgaactgtttttcttgcaacactttcaagggaacatgatggatttcttagctttcaaggagagactgtatggaccattacaagcatatcttaggcagaatgatttggacattgaagaagaggaagaggagcactttgaagtcattaatgatgaggtaaaggttgtggccagaaagcacgggcagcctgggactcctgttgccatagcaacccagctaccgccgaggacttctgcggcttttccagcccagcagcagccgctccaggtactttctgatggctccacagtgcagctccccagactttcctcactcggatttgaggactcgatgtgctgaggcaggacccagaggggtcccaagagcctgtcctcttttgttcaaaatacatcttgaaacgtctttgtgaaggctcttagttttaatgcatggatgctgttatttttccctactgttactgaaattaaaaagtgtttgtctctgaaaaaaaaaaaa

SEQ ID NO: 43 - DNA, 1082 bp, Homo sapiens
  CDS (128)..(1000)
aaagacaggtgactagaaatattaaaacaaaaacaaaaaaaaagagagagagagaaaaaggaaagagaaaatacatatttcttccccttactaagctagcgaaaataaaatttaaggcaactgaaatatgcacccaatcaatgtgagacgagaccccagcatccctatctatggactccgacagtccatcttattaaataccaggcttcaggactgctatgtggactcgccggctctcaccaacatctggatggccagaacatgtgcaaagcagaacattaatgccccagcaccagctaccacttcctcttgggaagttgtaaggaacccattaattgccagttccttctccctggttaagcttgtactcaggcggcaactgaagaataagtgctgcccaccaccatgcaagtttggagaaggaaaactctcgaagagattaaagcacaaggacgattcagtgatgaaagccacccagcaggccaggaaaagaaacttcatcagttccaagagcaagcagccagcagggcataggaggcctgcaggaggcatcagagagagtaaagaaagttcaaaggagaaaaaactaacagtccgccaagatcttgaggacagatatgctgaacatgtggctgccacccaagcgctaccccaggacagtgggacagcagcctggaagggccgagtgttgcttcctgaaacccaaaagagacagcagttgtcggaggacacgctaaccatccatggtctccccacagagggttaccaggctctgtaccacgctgtggtggagccaatgctgtggaatccttcagggacccccaagaggtacagcctggagctgggcaaggccattaaacaaaagctctgggaggctctttgcagtcagggtgccatctctgaaggtgctcagagggaccggttccctggcaggaagcagccaggtgtccacgaggagcctgtactcaagaaatggcccaagttaaagagcaaaaaataggaacaagaactcatgggattagagtattctctgctagagatctgaaaaataaacacaactttgcaccttcaaaaaaaaaaaa

SEQ ID NO: 44 - DNA, 1709 bp, Homo sapiens
  CDS (66)..(1709)
atgggaaatttggaattaagccttcccagaggagaatttctgggaaatctacatttcatagtgaaatggagggtgaagacacaagagatgattcattatactctattttagaagaattgtggcaagatgctgaacagataaagagatgtcaggaaaaacacaacaaacttctgagtcgcactactttcctcaataagaaaatattgaatacagagtgggattatgaatataaagactttggaaaatttgttcatccaagcccaaatctcattctttcacagaaaagaccccataaacgtgattcatttgggaagagttttaagcataatttagacttacatattcataataaaagcaatgcagcaaagaacctggataaaactattgggcatggtcaagtttttacccagaactcttcttatagtcaccacgaaaatacacatacaggagtgaagttctgtgaacgtaatcaatgtggaaaagtcctcagcctcaaacactcactcagtcaaaatgtgaaatttcccattggagagaaagcaaacacatgtactgaatttgggaagatcttcacccagaggtcacatttctttgctcctcaaaaaattcatactgtggaaaaacctcatgagcttagcaaatgtgtaaatgtttttacacagaagccactactcagtatatatctgagagttcatagagatgaaaaactctacatatgtactaaatgtgggaaggccttcatccagaattcagaattaattatgcatgagaaaactcatactagagagaaaccctataaatgcaatgaatgtgggaaatcatttttccaggtgtcatctctactcaggcatcagacaactcatactggagaaaaactctttgaatgcagtgaatgtggtaaaggcttctccctgaactcagccctcaatatacatcagaaaattcacactggagagagacatcacaaatgcagtgagtgtgggaaagcctttacccaaaaatcaacactcaggatgcatcagagaattcatacaggagagaggtcctatatctgtactcaatgtgggcaggccttcatccagaaggcacacttgattgcacatcaaagaattcatactggagagaagccttatgaatgcagtgactgtgggaaatctttcccttctaagtcacaactccagatgcataagagaattcatacaggagagaaaccctatatatgcactgaatgtgggaaggctttcaccaacaggtcaaatctcaatactcaccagaagtctcatactggagaaaagtcttatatatgtgctgaatgtgggaaggccttcaccgacaggtcaaatttcaataaacaccagaccattcacactggagagaaaccctatgtttgtgctgattgtgggagggccttcatccagaagtcagagttgattacacatcagagaattcatactacagagaagccttataaatgtcctgactgtgagaaatccttctccaagaaaccacatctcaaagtacatcaacgaattcacacaggggagaaaccatatatatgtgcagaatgtgggaaagccttcactgataggtcaaatttcaataaacatcagacaattcatactggagataaaccgtataaatgcagcgactgtggaaaggggttcacccagaaatcagttctcagtatgcatcgcaatattcatacatga

SEQ ID NO: 45 - DNA, 2110 bp, Homo sapiens
  CDS (70)..(1803)
atttggccctcgaggccaagaattcggcacgaggctcggctaactcggcgcccagtgcacggccgcaccatggggtcccgccacttcgaggggatttatgaccacgtggggcacttcggcagattccagagagtcctctatttcatatgtgccttccagaacatctcttgtggtattcactacttggcttctgtgttcatgggagtcacccctcatcatgtctgcaggcccccaggcaatgtgagtcaggttgttttccataatcactctaattggagtttggaggacaccggggccctgttgtcttcaggccagaaagattatgttacggtgcagttgcagaatggtgagatctgggagctctcaaggtgtagcaggaataagagggagaacacatcgagtttgggctatgaatacactggcagtaagaaagagtttccttgtgtggatggctacatatatgaccagaacacatggaaaagcactgcggtgacccagtggaacctggtctgtgaccgaaaatggcttgcaatgctgatccagcccctatttatgtttggagtcctactgggatcggtgacttttggctacttttctgacaggctaggacgccgggtggtcttgtgggccacaagcagtagcatgtttttgtttggaatagcagcggcgtttgcagttgattattacaccttcatggctgctcgcttttttcttgccatggttgcaagtggctatcttgtggtggggtttgtctatgtgatggaattcattggcatgaagtctcggacatgggcgtctgtccatttgcattccttttttgcagttggaaccctgctggtggctttgacaggatacttggtcaggacctggtggctttaccagatgatcctctccacagtgactgtcccctttatcctgtgctgttgggtgctcccagagacacctttttggcttctctcagagggacgatatgaagaagcacaaaaaatagttgacatcatggccaagtggaacagggcaagctcctgtaaactgtcagaacttttatcactggacctacaaggtcctgttagtaatagccccactgaagttcagaagcacaacctatcatatctgttttataactggagcattacgaaaaggacacttaccgtttggctaatctggttcactggaagtttgggattctactcgttttccttgaattctgttaacttaggaggcaatgaatacttaaacctcttcctcctgggtgtagtggaaattcccgcctacaccttcgtgtgcatcgccatggacaaggtcgggaggagaacagtcctggcctactctcttttctgcagtgcactggcctgtggtgtcgttatggtgatcccccagaaacattatattttgggtgtggtgacagctatggttggaaaatttgccatcggggcagcatttggcctcatttatctttatacagctgagctgtatccaaccattgtaagatcgctggctgtgggaagcggcagcatggtgtgtcgcctggccagcatcctggcgccgttctctgtggacctcagcagcatttggatcttcataccacagttgtttgttgggactatggccctcctgagtggagtgttaacactaaagcttccagaaacccttgggaaacggctagcaactacttgggaggaggctgcaaaactggagtcagagaatgaaagcaagtcaagcaaattacttctcacaactaataatagtgggctggaaaaaacggaagcgattacccccagggattctggtcttggtgaataaatgtgccatgcctgctgtctagcacctgaaatattatttaccctaatgcctttgtattagaggaatcttattctcatctcccatatgttgtttgtatgtctttttaataaattttgtaagaaaattttaaagcaaatatgttataaaagaaataaaaactaagatgaaaattctcagttttaaaaactgctttcttattgctgcaaaatatttttcaacatttgtttttctatgtagttgattctcaacctttccccaccacccccctaccatgctcgtgccgaattcttggcctcgagggccaaat

SEQ ID NO: 46 - DNA, 1695 bp, Homo sapiens
  CDS (400)..(1491)
attgaaaccctgataacctccccggaatccccgggtcgacccacgcgtccgcgcagcgtcccgccagccagctccttgcacccttcgcggccgaggcgctccctggtgctccccgcgcagccatggctcagcacttctccctggccgcctgcgacgtggtcggattcgacctggaccacactctgtgtcgctacaacctgcccgagagcgccccgctcatttataatagctttgcccagttcctagttaaggagaaagggtaccgataaggaattgctcaatgtgaccccagaggattgggatttctgttgcaaaggtttggcattggatctagaagatgggaacttccttaaacttgcaaataatggcactgttctcagggcaagccatggcaccaagatgatgactccagaggtgctggcagaggcatatggcaagaaagagtggaagcacttcttgtcggacactggaatggcttgccgctcaggaaagtattacttttacgacaactactttgacctgccaggagctcttctgtgtgccagggtggtggactatttaacaaaactgaacaatggtcaaaaaacatttgatttttggaaggatatagttgctgctatacaacacaattataaaatgtcagcttttaaggaaaactgtggaatatattttccagaaataaaaagagatccaggcagatatttacatagttgtcctgaatctgtgaaaaaatggcttcgacagctaaagaatgctgggaaaattcttctgttaattaccagttctcacagtgattactgtagacttctctgcgaatatattcttgggaatgattttacagacctttttgacattgtgattacaaatgcattgaagcctggtttcttctcccacttaccaagtcagagacctttccggacactcgagaatgatgaggagcaggaggcactgccatctctggataaacctggctggtactcccaagggaacgctgtccacctctatgaacttctgaagaaaatgactggcaaacctgaacccaaggttgtttattttggtgacagcatgcattcagatattttcccagctcgtcactatagtaattgggagacagtcctcatcctggaagaactcagaggggatgaaggcacgaggagtcagaggcctgaggagtcagagcctctagagaagaaaggaaaatatgagggaccaaaagcaaaacctttaaatacttcatctaaaaaatggggctctttttttattgattcagttttgggactggaaaatacagaagactccttggtttatacatggtcttgtaagagaatcagtacttacagcactattgcaattccaagtattgaagcaatcgcagaattacctctggactacaaatttacaagattctcttcaagcaattcaaaaacagctggctactatccaaatcctccactggtcttatcaagtgatgagacactgatatccaaataagttgtctttactgaaaaatgaagtgaagacccatatatgcagttaaaaaaaagttaattttcaaaaaatactgtaaaagactttaaggaacaagttttattgaccaataagttgatatttgtccataggtctcctttctataaatcatcttgatgtttaacaactcttattatattaaaatctcagtatcctaaaaaaaaaaaa

SEQ ID NO: 47 - DNA, 2713 bp, Homo sapiens
  CDS (1)..(2082)
  misc_feature (1)...(2713): n = a,t,c or g
atgactccccagtcgctgctgcagacgacactgttcctgctgagtctgctcttcctggtccaaggtgcccacggcaggggccacagggaagactttcgcttctgcagccagcggaaccagacacacaggagcagcctccactacaaacccacaccagacctgcgcatctccatcgagaactccgaagaggccctcacagtccatgcccctttccctgcagcccaccctgcttcccgatccttccctgaccccaggggcctctaccacttctgcctctactggaaccgacatgctgggagattacatcttctctatggcaagcgtgacttcttgctgagtgacaaagcctctagcctcctctgcttccagcaccaggaggagagcctggctcagggccccccgctgttagccacttctgtcacctcctggtggagccctcagaacatcagcctgcccagtgccgccagcttcaccttctccttccacagtcctccccacacggccgctcacaatgcctcggtggacatgtgcgagctcaaaagggacctccagctgctcagccagttcctgaagcatccccagaaggcctcaaggaggccctcggctgcccccgccagccagcagttgcagagcctggagtcgaaactgacctctgtgagattcatgggggacatggtgtccttcgaggaggaccggatcaacgccacggtgtggaagctccagcccacagccggcctccaggacctgcacatccactcccggcaggaggaggagcagagcgagatcatggagtactcggtgctgctgcctcgaacactcttccagaggacgaaaggccggagcggggaggctgagaagagactcctcctggtggacttcagcagccaagccctgttccaggacaagaattccagccaagtcctgggtgagaaggtcttggggattgtggtacagaacaccaaagtagccaacctcacggagcccgtggtgctcactttccagcaccagctacagccgaagaatgtgactctgcaatgtgtgttctgggttgaagaccccacattgagcagcccggggcattggagcagtgctgggtgtgagaccgtcaggagagaaacccaaacatcctgcttctgcaaccacttgacctactttgcagtgctgatggtctcctcggtggaggtggacgccgtgcacaagcactacctgagcctcctctcctacgtgggctgtgtcgtctctgccctggcctgccttgtcaccattgccgcctacctctgctccagggtgcccctgccgtgcaggaggaaacctcgggactacaccatcaaggtgcacatgaacctgctgctggccgtcttcctgctggacacgagcttcctgctcagcgagccggtggccctgacaggctctgaggctggctgccgagccagtgccatcttcctgcacttctccctgctcacctgcctttcctggatgggcctcgaggggtacaacctctaccgactcgtggtggaggtctttggcacctatgtccctggctacctactcaagctgagcgccatgggctggggcttccccatctttctggtgacgctggtggccctggtggatgtggacaactatggccccatcatcttggctgtgcataggactccagagggcgtcatctacccttccatgtgctggatccgggactccctggtcagctacatcaccaacctgggcctcttcagcctggtgtttctgttcaacatggccatgctagccaccatggtggtgcagatcctgcggctgcgcccccacacccaaaagtggtcacatgtgctgacactgctgggcctcagcctggtccttggcctgccctgggccttgatcttcttctcctttgcttctggcaccttccagcttgtcgtcctctaccttttcagcatcatcacctccttccaaggcttcctcatcttcatctggtactggtccatgcggctgcaggcccggggtggcccctcccctctgaagagcaactcagacagcgccaggctccccatcagctcgggcagcacctcgtccagccgcatctaggcctccagcccacctgcccatgtgatgaagcagagatgcggcctcgtcgcacactgcctgtggcccccgagcccggcccagccccaggccagtcagccgcagactttggaaagcccaacgaccatggagagatgggccgttgccatggtggacggactcccgggctgggcttttgaattggccttggggactactcggctctcactcagctcccacgggactcagaagtgcgccgccatgctgcctagggtactgtccccacatctgtcccaacccagctggaggcctggtctctccttacaacccctgggcccagccctcattgctgggggccaggccttggatcttgagggtctggcacatccttaatcctgtgcccctgcctgggacagaaatgtggctccagttgctctgtctctcgtggtcaccctgagggcactctgcatcctctgtcattttaacctcaggtggcacccagggcgaatggggcccagggcagaccttcanggccagagccctggcggaggagaggccctttgcaggagcacagcagcaactcgcctacctctgaggccggcccccctccttcctttagccccccagtcttccttcaatctccctggggtcttct

SEQ ID NO: 48 - DNA, 4318 bp, Homo sapiens
  CDS (2)..(925)
atttggccctcgaggccaagaattcggcacgagaagccgtggccagctcgacgccggacagtccagcgagcagcacggcgggaaccggcagccggagcagtcccggagcagaagcagcagcagcagcagcagccctcgccgttcgcggagcgcagccgagccggccatggcgttgtcgatgccgctgaatgggctgaaggaggaggacaaagagcccctcatcgagctcttcgtcaaggctggcagtgatggtgaaagcataggaaactgccccttttcccagaggctcttcatgattctttggctcaaaggagttgtatttagtgtgacgactgttgacctgaaaaggaagccagcagacctgcagaacttggctcccgggacccacccaccatttataactttcaacagtgaagtcaaaacggatgtaaataagattgaggaatttcttgaagaagtcttatgccctcccaagtacttaaagctttcaccaaaacacccagaatcaaatactgctggaatggacatctttgccaaattctctgcatatatcaagaattcaaggccagaggctaatgaagcactggagaggggtctcctgaaaaccctgcagaaactggatgaatatctgaattctcctctccctgatgaaattgatgaaaatagtatggaggacataaagttttctacacgtaaatttctggatggcaatgaaatgacattagctgattgcaacctgctgcccaaactgcatattgtcaaggtggtggccaaaaaatatcgcaactttgatattccaaaagaaatgactggcatctggagatacctaactaatgcatacagtagggacgagttcaccaatacctgtcccagtgataaggaggttgaaatagcatatagtgatgtagccaaaagactcaccaagtaaaatcgcgtttgtaaaagagatgtcttcatgtcttcccctaagaatacgcttttcctaacaggctactccttcctgtagagcagaaattgtattttgcacgaacatgcagttattgaagattaggatcaaggatagacaaggtatagtagttatcttaaaatatacactcctaagcagtattattttaaaatcctttaccctggctacctcccctacccgggttcccctctctttaatttggagacactccaccacaaacttttcactttagaggtagcttgccatctctcaggagccctcaccattgtgtccattcactgtgtatagatggcagaacttttgaggtgcaatgtttaattgttaaaaatagtagccacgactttatcaggcagccccaaactggtgcataatgcatggtacaagaaatatttatgtattttttggaattttgtaatatttagtaagagtatatgaaaggattgctactgtatcagaaatattgtttcaatttagtctatcctggatatgtactaacgaatattaccaccagagaagagagctttctacaaaagtcactacagattttgctatattgctttgtagatagatttttacttttgcctaaaagcatttatccttcataccaattgtaacatctgacaccatgtagaagctaaaagtttagagggagtgagcgttttctcaagaccttcctcaagcattttatctttagaagagaaactgatgggcacctgatactctgtctaaatacgtttgttatatgtgttttgccctgtgccattcatttggaactttattgcattctttattttaaaaagcttgtttttacgtaatcatagagcttgctatttgtacatctgttgagcaacactacataactgatttttagttgacttagctatagcagtacaatgattagtaatgtaaaaattaacacagaaattaacctaaggaatgaagggtgggtttgtcaaaatatcaagtaaatttttgtttctaaagtacatttaatgtagatgacctaaagaatgcgttatccatcctatataaaagaaagataaaacacaggtcaccaattttctcatttcaccccatttaccttgtatagaggattgttcattcctttgggactaagttatagttatggtgagtgtgtatttactgtagttttgcctgatctcactcattgcacttcctggagttaaattttccaacagccatgttgaggaatagcactctgcatgtttttgttttgtttttcggggttttttttaattgaagccctaaaccaggaattatttgtgttctaacaggaggatgaacttgctgaaaataaaactttgctatgtatttactcttttttaaaagacaaaagcaaaaccagactttctacgtactactccaaagactgtgattgtgactataatacatttttggtaatttttttatacctaatttgtataggaagtgctatttctcataggctgtttcttgaaattttaagtttattgctttaaaatggcagtgtttctcccactttgatatgctaacatttagtaagcactggctttatgaaagcggctttttataagtatactgcattttttgagcctatcattaattagcttagtatgaaagataagaaaatctccatgttgtatccatttggctcaggaagattctttgccttacctttcttagaactctttattgcttatcaaaagtttgagtacccgcttggtttttttttggtaattaaatattgtatgatttatctggttcaaggaagatgcactattcagttatctattgagaaattattttgcagtggttttagtgggtgaaaatgtcccatctgcaccagtacacaggcaggcattatcattcttcacctactttttaaatagtggcaacttgggattcattctggtgattctgaaccttgcctcatagcttaaagtataaaaaagattcaagagcagtgaggtttgttctttccagtgaatggtggactgagtggtgcgaggtggagggctaacaagaggaaagaactacattcttcagaatacagtgatgaaaattcattttgaaactcaaatattttcattttggatattctcctgtttttattaaaccagtgattacacctggccatccctctaaatgttctaggaaggcatgtctattgtgattttgatgaagacagaattatttttctctgtagaaacacagataccactttatcagggaagttagtcaaatgaaatggaaattggtaaatggacaaaagctagctagtaaaaaggacgacccagcaacatgctttaaccccattgtatgtttgtggaaagagcatagtttaacatcttgagaaatttgggacataaagttttcatggtagacagttcatgcagtatatgaattgacataatggaaataatctgattttatttttacaactaacatccattccccttcatttaaacaccttttgtgttttacttcagtgaggagattggagtctgaatggatctgttttccaagagattctgagaaatttttgtattcagcagttggaaagctctctattctagttgataaaacttcccttttttgatgtagatgcagatattctatacagttctgttgtcttttactaggactgtaaacttttgtgataaaattcaaataagattttatttcttggtaattttggctttcacaatttatctttaaatccttgagcaatctgtatacaattaagagatttctgacatttattcttacactaaatggatcaactctaggatttaggcatgttaacttctgttgtgttttgaatctctccagagttgcatgtagatagcatttatttctgtgcccttaaacccatttagaaaataactacaaagtaaaaatgtagaggaaatagaaatgtattttttcatgaacattttgatacaaatttcatcatttaatgattcaccaatttcttgcattaatttgaatttaagcatttaattcaaagagaggggagcatccattattgatacatgtgggcttttaaaaactccatcctttataaatagtcaaggtttgggccacacaaagtatatttttatcatggaaaaatttcaactcctcaagccgtaatgttgaacagaattggagtattttctttataatttcttgaacaggcaaatgaaagcttattatagaatgcatgtattttcttttatctttggaacatcagcaccagtatattgctggcagctattgtattaaaaaataaagtatattttcactatcataaaggattcttttttcccccctcatgaaaataaacaacaacttggggtaaaaaaaaaa

SEQ ID NO: 49 - DNA, 2357 bp, Homo sapiens
  CDS (1481)..(1879)
gctccggaattcccgggtcgacccacgcgtccggtttgagttctgtaagtcttcgtgttctgacttactgcttcagagggattggcctgtcccctttccctttctcggctatgggaaggaaggattgctcattggttgccttcatcagttacagcatgagacggaattcatcattccttccgaaacccctgatatttaatatttaatatttaaaaacccaaattatcaaaccattaagaactcattactggttctcagcctcctccagtactagcctcagtgtggctgctgcataagtatctgtagcctgtctacctcctgcagtggggccgctcgccgcttccctgtctactgctcaggctctcccacttcgtggcatccatgtaaagtaggtggcagggcagagatgtcactctcattcaacagggaggatgtctgttgctcagagaggttgtcctgaggggctgggtgattcctgggcctacattcttcccgaggctccaggccgctgtctctggaagtaaaagagccttgtcttaccttaatgcaagcagtctgtttgaacccctgtaggctgcattcaggagacagaaggtgtctgggccatcctgggcggccggtcagcgttgctaggcaggctcggctgtctggccgggacttgggcctgggtggcttttgagaccagtgaagaagggagagccggcctcatgccgatgcggcttgtggcacggctgggatgtgagggaggactcagatctacacacagaaacccctcttctccccgccctcccccagctcctacctgcctcccacgcctcaggtgtggctgcctgtgggaccatcccccaacccctttcctcgcacctccttgtcctcacccagttcctgcagtgtctctgacccacgcctcccgcctcctggccgacttgcccaggcggtgtctctggctcacctccgtctgttcatcaccttcctccccagtgtttccacttatcttggatgttttagattgaaacagcctgattcccggaagaatcctcttcattcattgctagtgcttcccctcacctcccactctccacttcccagtttgcaaatgtggctttcgcccaccaagtgaaagcggactgagagcagcccttggggacggcccggtgcctggctgcaaggccgcgctggggctctgtcttggtgcacatggcttgaccgggactttccctgcttcccaccacttccctcactcccagacctccctcattctttttgtctcttctttttgcctaaagccagtccttaacaccctattcttcctctgcaggtggcttgcagacttttccccacctttggggctcgtggtggtggagagggcagctggtgttaagaatgtaggttaccgggcatgacccggcagatgcttgcccagtagttctggaggaaggcccgggaatctgcaaatgagcgcattccccaggcagttcccatgcaggtgatccacggaccacatgttgagaaactgcagtcacccttagggccacaccgtccctctcctcgctgtcccctctctgtagtgactggccctgaccttcaggagtgcactttccactctaccaggaagccctatgacatcctcaggctccccagacctgcagcttgcatggggcccctcccttcttccacacccaccctccgtatggtcccctgctctgccctcgtgctttgctggcccctgcccgctactcccactctcagacacccaggggtggtgggccctaactggctggcccctcccagcgctgccctctgccgtccagatgctgcagtgtggccagatttaccttccagtaacatacttctagtcacccctcctcctgcgaagtgatctgcagtggctgtttgaccagaccacaaagttcacatctcctgagcttagtgtccgtggctgtccacctcccagccatacttgactgtccccaaactctccctgcagccacatgtttcccatgacctgtgggctctgcagatggacctctctccgctagagatgcccttctcccaaatggcttccctcctggaaggcccagcctgagtcctcgtctcctttccagtgcttctgccagaagcatccccatgatgttgtgaccgcacagcactttgtgtctcgctttgagcacttgccactctggctggtgctgctgccactgattgtgtactgtcttgctgccctttctagactgtgagctcctcgtgggcagggaccgcctgtgttctctgtatttcccacggcgcctagcacagtgccttgcacttgataggtgcttaataaatgtctgctcaactgaaaaaaaaaaaaaaaaaaa

SEQ ID NO: 50 - DNA, 2959 bp, Homo sapiens
  CDS (1053)..(2678)
ggatccagagcccggagccctgtgcgctgttccggcagctgaggctcggctgggtcctcctctccctggccctgggcggggcgctcacgctagggctctgaccttgttccagaaggcgggaggcggcaggagagcgctgggtgcgcctgcgaggaggccgcccccgcgggggtgctgcctgagctgcctacggaggcgccccctggggacgcccttgccgatcccccgtcgggcaccactgaggaggaggaagagcagcctgggaaggccccggacccgcaggacccccaggacgcggagtccgactctgccaccggatcgcagaggcagtccgtcatccagcagcctgccccggacaggggcacggcgaaactgggaaccaagaggccgcaccccgaggatggggacgggcagagcctcgagggcgtctctagctccggcgacagcgcagggctggaggccgggcagggccctggggctgacgagccgggcttgtcccgcgggaagccctatgcctgcggcgagtgcggggaggccttcgcgtggctctcgcacctgatggagcaccacagcagccatggcggccggaagcgctacgcctgtcagggctgctggaagaccttccacttcagcctggccctagccgagcaccagaagacccacgagaaggagaaaagctacgcgctggggggcgcccggggcccccaaccgtccacccgcgaagcccaggcgggggctagggcgggcggtcccccagagagcgtggagggcgaggctccccccgcacccccagaggcgcagagcagacgttcccgagctcagaaggaaaaaaaggacgaggaaggggctgcttatgagtgtgtcggtgttgatttagtagttgtggaatgtgagccctggggaaataagtggaagaggcatggaccgtgtggctccactggggcgttcgcgaatgcctcctggaggaggagaccaaccagaaagaagaggcagcgtccagcaactggacaaaggccagagggcctttctggcaagaggactgggtttgggatatgagattgaaaatgacgactcggaattttcctgagagagaagtaccctgtgatgtagaagtggaaagattcacaagggaagttccctgcttgtccagtttaggtgatggttgggactgtgagaaccaggagggacacttgaggcaatcagctttaactctggagaaaccagggactcaggaagcaatttgtgaatatcctggttttggggagcatttgattgcaagctcagaccttccaccgtctcagagagttctggcaacaaatggtttccatgcacctgactcaaatgttagtggtctggattgtgaccccgccttacccagctatcctaaaagttatgcagataagagaactggtgacagtgatgcctgtggaaaaggcttcaaccattccatggaagttattcatggaagaaatccagtgagagagaagccctacaaataccctgaaagtgttaagtcttttaatcattttacctctcttggtcatcagaaaataatgaaaagaggcaagaaatcgtatgaaggtaagaattttgagaacatctttactctgagctcatcgcttaatgaaaaccagagaaatctccctggagagaaacaatatagatgtactgaatgtggcaaatgcttcaaacggaactcttctcttgttttgcatcaccgaactcacaccggagagaagccttatacttgtaatgagtgtggaaagtccttctccaagaactacaacctgattgtgcatcaaagaatccacacaggagagaagccctatgaatgcagtaaatgtgggaaagctttcagtgatggctcagctctgacacagcaccagagaattcacacaggcgagaaaccttatgaatgcctagagtgtggaaaaaccttcaaccgaaattcatccttaattttgcaccaaagaactcatacaggggaaaaaccatatagatgtaacgaatgtgggaaacccttcactgacatctcccaccttacagtgcatctcagaatccacaccggtgagaagccctatgagtgtagcaaatgtggaaaggctttccgggacggctcgtacctcacccagcatgagaggactcacactggagaaaagccctttgagtgtgcagagtgcgggaaatccttcaacagaaactctcacctcattgtgcatcaaaagatccattctggggagaaaccctatgaatgtaaagaatgtggcaagactttcatcgagagtgcgtacctcatcaggcatcagaggattcatactggcgagaagccctatggctgcaaccagtgtcagaaacttttcaggaatatcgctggcctcattaggcaccagaggactcatactggtgagaagccctatgagtgtaatcagtgtggcaaagccttcagggacagctcctgtctgaccaagcaccagagaattcacactaaggagaccccatatcagtgtccagaatgtgggaagtccttcaagcagaactctcacctggcagtacatcagagactccatagcagggagggtcccagccggtgtcctcagtgtggaaaaatgttccaaaagagctcatcccttgttcgacatcaaagagcacacctgggagagcaacccatggaaacataatggttgggggccacatgagtcttccagttcactctcactcctgtgtttaggaggcgtgtcttagatctgactcctctctggtcagtagaaaagaatcctttaagctatccagtgaattgatgaatgtgagacattgctgagccacactgttaagtctgctcattggggaactccagagacaacttaggcatgagggcagaaaagtctttggggatgattcagtctgtaccagacatgacaacacacacactggaatgaaatgtgcaaacatgggggtgacc

SEQ ID NO: 51 - DNA, 1691 bp, Homo sapiens
  CDS (1)..(1524)
ctaccggaccggaattcccgggtcgacccacgcgtccgcagccttactgagcttctttccttctttcagccaactgctcactcgctcacctccctccttggcaccatgaccacctgcagccgccagttcacctcctccagctccatgaagggctcctgcggcatcggaggcggcatcgggggcggctccagccgcatctcctccgtcctggccggagggtcctgccgtgcccccagcacctacgggggcggcctgtctgtctcctctcgcttctcctctgggggagcctgcgggctggggggcggctatggcggtggcttcagcagcagcagcagctttggtagtggcttcgggggaggatatggtggtggccttggtgctggcttcggtggtggcttgggtgctggctttggtggtggttttgctggtggtgatgggcttctggtgggcagtgagaaggtgaccatgcagaacctcaatgaccgcctggcctcctacctggacaaggtgcgtgctctggaggaggccaacgccgacctggaagtgaagatccgtgactggtaccagaggcagcggcccagtgagatcaaagactacagtccctacttcaagaccatcgaggacctgaggaacaagatcattgcggccaccattgagaatgcgcagcccattttgcagattgacaatgccaggctggcagccgatgacttcaggaccaagtatgagcacgaactggccctgcggcagactgtggaggccgacgtcaatggcctgcgccgggtgttggatgagctgaccctggccaggactgacctggagatgcagatcgaaggcctgaaggaggagctggcctacctgaggaagaaccacgaggaggagatgcttgctctgagaggtcagaccggcggagatgtgaacgtggagatggatgctgcacctggcgtggacctgagccgcatcctgaatgagatgcgtgaccagtacgagcagatggcagagaaaaaccgcagagacgctgagacctggttcctgagcaagaccgaggagctgaacaaagaagtggcctccaacagcgaactggtacagagcagccgcagtgaggtgacggagctccggagggtgctccagggcctggagattgagctgcagtcccagctcagcatgaaagcatccctggagaacagcctggaggagaccaaaggccgctactgcatgcagctgtcccagatccagggactgattggcagtgtggaggagcagctggcccagctacgctgtgagatggagcagcagagccaggagtaccagatcttgctggatgtgaagacgcggctggagcaggagattgccacctaccgccgcctgctggagggcgaggatgcccacctttcctcccagcaagcatctggccaatcctattcttcccgcgaggtcttcacctcctcctcgtcctcttcgagccgtcagacccggcccatcctcaaggagcagagctcatccagcttcagccagggccagagctcctagaactgagctgcctctaccacagcctcctgcccaccagctggcctcacctcctgaaggcccgggtcaggaccctgctctcctggcgcagttcccagctatctcccctgctcctctgctggtggtgggctaataaagctgactttctggttgatgcaaaaaaaaaa

SEQ ID NO: 52 - DNA, 1869 bp, Homo sapiens
  CDS (185)..(937)
gggctgcgcgcccgacacgcgcttcttcgtgcccgagcccggcggccgaggggccgcgccctgggtcgccctggtggctcgtgggggctgcaccttcaaggacaaggtgctggtggcggcgcggaggaacgcctcggccgtcgtcctctacaatgaggagcgctacgggaacatcaccttgcccatgtctcacgcgggaacaggaaatatagtggtcattatgattagctatccaaaaggaagagaaattttggagctggtgcaaaaaggaattccagtaacgatgaccataggggttggcacccggcatgtacaggagttcatcagcggtcagtctgtggtgtttgtggccattgccttcatcaccatgatgattatctcgttagcctggctaatattttactatatacagcgtttcctatatactggctctcagattggaagtcagagccatagaaaagaaactaagaaagttattggccagcttctacttcatactgtaaagcatggagaaaagggaattgatgttgatgctgaaaattgtgcagtgtgtattgaaaatttcaaagtaaaggatattattagaattctgccatgcaagcatatttttcatagaatatgcattgacccatggcttttggatcaccgaacatgtccaatgtgtaaacttgatgtcatcaaagccctaggatattggggagagcctggggatgtacaggagatgcctgctccagaatctcctcctggaagggatccagctgcaaatttgagtctagctttaccagatgatgacggaagtgatgagagcagtccaccatcagcctcccctgctgaatctgagccacagtgtgatcccagctttaaaggagatgcaggagaaaatacggcattgctagaagccggcaggagtgactctcggcatggaggacccatctcctagcacacgtgcccactgaagtggcaccaacagaagtttggcttgaactaaaggacattttattttttttactttagcacataatttgtatatttgaaaataatgtatattattttacctattagattctgatttgatatacaaaggactaagatattttcttcttgaagagacttttcgattagtcctcatatatttatctactaaaatagagtgtttaccatgaacagtgtgttgcttcagactattacaaagacaactggggcaggtactctaatataaaggacaggtggtgtttctaaataattggctgctatggttctgtaaaaaccagttaattctatttttcaaggtttttggcaaagcacatcaatgttagactagttgaagtggaattgtataattcaattcgataattgatctcatgggctttccctggaggaaaggttttttttgttgttttttttttaagaacttgaaacttgtaaactgagatgtctgtagcttttttgcccatctgtagtgtatgtgaagatttcaaaacctgagagcactttttctttgtttagaattatgagaaaggcactagatgactttaggatttgcatttttccctttattgcctcatttcttgtgacgccttgttggggagggaaatctgtttattttttcctacaaataaaaagctaagattctatatcgcacatgagcattaagttcttcattgccttgttaaggaaaatgagtaggcagactcagaatctgttatattgatttcagttacaatttaatctttacaattaaaagggcgaaagatgtagaattttagtttttgttgttgactcgaaataaccagttttcttgattagagtttaagcagatttaataccatgaccttgcttaaccgcttcttcttttttacttgcttgctg

SEQ ID NO: 53 - DNA, 2590 bp, Homo sapiens
  CDS (159)..(2525)
atccgactaccattatccagaagctgataaaaaagctttgggaaacatgaacaaaacattgatgaaatgttggaaaccagttgaaacacagtaaaaccaactgggtaaaataggaccacttctcttcatctacactgggatttgtcaagaagtgaactatgacaatacatcaatttttgctactgtttctattctgggtatgcctgccacatttctgctctccagaaataatgttcagaaggacgcctgtgccacagcaaagaattttaagttcacgtgtaccaaggagtgatggcaaaattctccatcgtcaaaaacgtggttggatgtggaatcaatttttcttacttgaagaatatacaggatctgattatcagtacgtaggcaagctacattcagaccaagataaaggagatggatcactcaaatatatcttatctggagatggagctggtactctttttattattgatgaaaaaacaggtgatattcatgccacaaggcgaattgatagggaggaaaaggccttttatactctacgcgcacaagctattaacagaagaactctgaggccagtagagccagagtcagagtttgtgatcaaaattcatgatatcaatgacaatgagccaacgttcccagaagaaatctatacagctagtgttcccgaaatgtctgttgtaggtacttctgtggtgcaagtcacagctacagatgccgatgacccttcatatgggaacagcgccagagtcatttacagcatacttcaagggcagccctatttctctgtggagcctgaaacaggtatcatcaggactgctttaccgaacatgaacagagaaaacagagagcaataccaagtggtcatccaggccaaagacatgggcggccagatgggaggcttatcggggacaaccactgtgaacatcacgctgacagatgtcaatgacaacccaccacgtttcccccagaacactattcatcttcgagttcttgaatcctccccagttggcacagccattggaagtgtcaaagcaactgatgctgacactgggaaaaatgctgaagtagaataccgaattattgatggtgacggtactgatatgtttgacatcgtgactgagaaggacacacaggaaggcatcatcactgtgaaaaagccactcgactatgagagccgaagactttatactctgaaagtcgaagcagaaaacacccatgtagatccccgtttttattacctaggaccatttaaagatactaccatagtgaaaatctctatagaagatgtggatgaacctcctgtttttagtaggtcctcctatctgtttgaagttcatgaagatattgaagtgggcacaatcattggtactgtaatggcaagggacccagattctatttccagccccattagattttccttggatcgccatactgaccttgacagaatctttaacattcattcaggaaatggatctctttatacatcaaaacctcttgaccgtgaactatctcagtggcataatcttactgttattgctgctgaaatcaacaatcccaaagagacaacacgcgtggctgtttttgtgagaattttggatgttaatgacaatgccccacagtttgctgtgttctatgacacttttgtatgtgaaaatgccagaccagggcagctaatacagactataagtgcagtagacaaagatgaccctttaggtggacagaaattttttttcagtttagctgctgtcaatccaaacttcacagtacaggataatgaagataatactgccagaatcttaaccagaaaaaatggattcaatagacatgaaatcagtacctatctcttgcctgtggtgatatcagacaatgattacccaattcagagcagcacaggcacactgaccattcgagtgtgtgcttgtgacagccaaggcaacatgcaatcctgcagtgctgaagccctgctcctccctgccggcctcagcactggggccttgatcgccatcctcctctgcatcatcattctactggttatagtagtactgtttgcagctctgaaaagacagcgaaaaaaagagcctctgatcttgtcaaaagaagatatcagagacaacattgtgagctataacgatgagggtggtggagaggaggacacccaggcctttgatatcggcaccctgaggaatcctgcagccattgaggaaaaaaagctccggcgagatattattccagaaacgttatttattcctcggaggactcctacagctccagataacacggacgtccgggatttcattaatgaaaggctaaaagagcatgatcttgaccccaccgcacccccctacgactcacttgcaacctatgcctatgaaggaaatgattccattgctgaatctctgagttcattagaatcaggtactactgaaggagaccaaaactacgattacctccgagaatggggccctcggtttaataagctagcagaaatgtatggtggtggggaaagtgacaaagactcttaacgtaggatatatgttctgttcaaacaagagaaagtaactctacccatgctgtgtgcacttcacaa

SEQ ID NO: 54 - DNA, 944 bp, Homo sapiens
  CDS (125)..(640)
ctaaggaaggagagtatcctccagcaccttccagtgggtaagggcacattgtctcctaggctggacttctcatgagcagagggtggggtggtaaggaaagtctacgggccccgtgtgtgtgcacatgtctctgtgtgaatggacccttccccttcccacacgtgtatccctatcatcccacccttcccaccagagccatagccatctgctggtttggttatttggagagtgcaggccaggacaaggccatcgcttggggcatgaatcctctgcgtactgccctggccagatgcaaattccctgccatgggattccccagaaggttctgtttttcaggtggggcaagtccgtgggcatcatgttgaccgagctggagaaagccttgaactctatcatcgacgtctaccacaagtactccctgataaaggggaatttccatgccgtctacagggatgacctgaagaaattgctagagaccgagtgtcctcagtatatcaggaaaaagggtgcagacgtctggttcaaagagttggatatcaacactgatggtgcagttaacttccaggagttcctcattctggtgataaagatgggcgtggcagcccacaaaaaaagccatgaagaaagccacaaagagtagctgagttactgggcccagaggctgggcccctggacatgtacctgcagaataataaagtcatcaatacctcgaaaaaaagtcgacgcggccgcgaattccagatctatgaatcgtagatactgaaaaaccccgcaagttcacttcaactgtgcatcgtgcaccatctcaatttctttcatttatacatcgttttgccttcttttatgtaactatactcctctaagtttcaatcttggccatgtaacctctgatctatagaattttttaaatgactagaattaatgcccatcttttttttggacct

SEQ ID NO: 55 - DNA, 5230 bp, Homo sapiens
  CDS (1)..(1254)
atgtatgaaggcatcagatgcctgctgaaggcccttctggggtttgtatctctagcgataggaactctctactgcccaaggcagtaccgcccttttccaggcagtcttggaattgaggcaataaatgtcccggagcccattcccgactcctactacagagacatggccacgtggcctacacatgctccaagcgtggaggaaggaggccaggggcgctttgggaaccaggccgatcacttcttgggctctctggcatttgcaaagctgctaaaccgtaccttggctgtccctccttggattgagtaccagcatcacaagcctcctttcaccaacctccatgtgtcctaccagaagtacttcaagctggagcccctccaggcttaccatcgggtcatcagcttggaggatttcatggagaagctggcacccacccactggccccctgagaagcgggtggcatactgctttgaggtggcagcccagcgaagcccagataagaagacgtgccccatgaaggaaggaaacccctttggcccattctgggatcagtttcatgtgagtttcaacaagtcggagctttttacaggcatttccttcagtgcttcctacagagaacaatggagccagagattttctccaaaggaacatccggtgcttgccctgccaggagccccagcccagttccccgtcctagaggaacacaggccactacagaagtacatggtatggtcagacgaaatggtgaagacgggagaggcccagattcatgcccaccttgtccggccctatgtgggcattcatctgcgcattggctctgactggaagaacgcctgtgccatgctgaaggacgggactgcaggctcgcacttcatggcctctccgcagtgtgtgggctacagccgcagcacagcggcccccctcacgatgactatgtgcctgcctgacctgaaggagatccagagggctgtgaagctctgggtgaggtcgctggatgcccagtcggtctacgttgctactgattccgagagttatgtgcctgagctccaacagctcttcaaagggaaggtgaaggtggtgagcctgaagcctgaggtggcccaggtcgacctgtacatcctcggccaagccgaccactttattggcaactgtgtctcctccttcactgcctttgtgaagcgggagcgggacctccaggggaggccgtcttctttcttcggcatggacaggccccctaagctgcgggacgagttctgattctggccggagcaccagaccctctgatcctggagggaccagagtctgagctggtccttccagccaggcctggcagccagaggtgctccgggattgcaaactcctcttctcacctgccaaagatggagaagagtgccagggacccctcaaggagggagacgctccatatcccagggcataggacttgcaggttcctaggagcaggagcatctcccatcgcacgtgctttctgctcttctgggaatttctcacactggcaaagcagtccagcctccgtcttctggtccactctgctctgagcagcctgggatgctgaactcttcagagagatttttttatagagagatttctataattttgatacaaggtcatgactatcctagaactctctgtggtttttgaaaatcattgaattctattaatgtaggtacctaaagtgaccttaactgaatgtggatgaggctggggctggtgtgggtcttttggctgcttttcaaggtgtcccccaatgtggccctcaagagccatccccactgcctggccagagccattgttgtcccctacttcctaggccatttctggggcttgggggatgaatgctgtcctgtgctgtaaacactatgcaaatggaagttatcggttgtggtgctgtgcagcgctctgtgggcgactaagtgccactcacgcagcatgttcctggcaaggagcacataccatcaagccacactatcatggtattgttctcacagtcttttggtggttgatggccactgcaaacctggcaccatcagatctcttctgatctcttgccccagtggggcctggttggtagaatgttggcattcggttgatatccaaagcctgttctcccagccgtcctcctgcagctggagccttcaggccgtattctcacgagggaacgtttgccaaggctctgacctcacagaagatgcccagggcccagaagccatcagaattatcagtggagaagcaccttttgactcttcccttccaatgtaatctctgccaacaccatgaggcttaaggtgctctaagtcatgagtgttttggtctcaaatgctgcagttttaataatctgtgactcctgagagcccatggttttttgaccttgtggttctaaaattccttgtctgacccctgtagatcttttccttgccatgtcacctcccttggcctttgatcctggaaaggtggcagagcctccactgagccaggcccagagctccttgcagtgccttcttccttgtttacctgtgggaggaaacactttttttgtcaggggcagcctggttcagagctcagaggtcacactgtatcaaagatctcaaacagcaaagtcagcatttgctgtatagagctgccacccaactctaagcaggagaaactgtacagaaagggctttgctatttttcccttttgggaaaacaatgaagtgttttaagtcctgggtggactgagagatggtttgcctgtccagacttgctctcaagcctcatccagagaaggagctgcagatgagggagcccgtacactccctgccaccactaggttgtaagcctgtagctggctggctgatttcattttggaattcatttgccatccacagccttacactaggcacacactttagagtctggggctccagtggggcccgcctaattttttttccccccaagacagggccttgctctgtctcccaggctggagtgcagtggcatgatcatggcttactgcagccttgatctcccaggctcaagcgatccttctgcctcagcctctctggtagctgagactgcatgcccagctccaaatcaccttgattcatatcagcagtaataatcacttgtgttctgaaagaaagggcaccagaagttctagcaaaattcagttgtgttctgtgagctagcactttttcctctgacccaattttcttacctataaaatggtgataaaaaccgacaggttgttcaaaggcccagatcagctaaagcatgtatataagagcacgttgtaaacttgaaagagacaaaggcacaaatgtggctgttgattaatttgactgcttctcgttgctcgtcacctccatgccaggcactgtgcttgctaattgctttatgggggcattctcttatttattccccagccctgggaaataggagctgtcattatccttctctttctgcacaaggaaaaattaatgccctgagaattgtcataattttcccaaggctgcccagctggtggtgttaagccagaatttgacctcccagagccagtttccattagctgccatgctctgctgcctctaattcacagaatgcactttctaccctgtgtgccatggagacctcctatggaaaaatgatcagccaccttaccttctactgggtacctgctgtgagtctgcctatgccagaaggattaaggaggggaggttacccaagaaacaaagcctacatgccgcttacagcccccgttggatggttgctcagtacaacagtcttgcattcagcaggtgtttgttcatcacctactatgtgtcaggctctatgctaggtactggggatacaggagagaatcaagcgtaaagtctttgttctcaaggaatttgcattctagaaagtagaagatgtaataaatgtactgtgggacatgttaataagtgctataaagaaatataaagggtttgggagcaaaaagagggagtggatctattttagatgagcccaggtaagacctctctgaagagctgtcatgaaggagggagggagcacattcctggcagagaaaacagcacgtgcaaaggccccgagactggagtgtgttcctgaagagcagccaggaggccagcatggctggagaggcaggcataggcagggaaccgagcagcaggtcagagcaggcgagctgacattctgcagcctggacggccatggcaggaagcttttagttggagagatacaggaagcctcctagggttctgagcagaagaggggcatgagctgattcacattctgaaggacctctctagctggccagtgctgaggaggttggagagagaaagggtgaaagcagagagaccagtgcagggctgttaacagggttgcaggcgagagactggggtgctgggctcccctagactaggactccagtgccctcctctcccaagagacaaaggccattgcattgaaggaggtgggaaatgattagattctgaacatatgtaattatttttcagtctttttcaaagatacaaatatttacatagttttaatcatgtaatatatacaatttaatgtcctagtgttttacttaatagtgtatcatgttttccctgttggtatgtagcctggataaatgctcttaattataaaaaattctgtcgaggagtgttccatagtttattgttttcctattatgagaatttaggccaagtgtggtggctcatgcctgtaatcccagcactttgcgaggccgaggtgggcagatcacttgaggtgaggagttcaagaccagcctggccaacatggtgaattatctctactaaaaatacaaaaaaataataataatagccaggcgtggtggcacatgcctgtattcccagctgcttgggaggctgaggcaggagaatggcttgaacctgggaggtggaggttgcagtgagccgagatggtgccactgcattccagcctgggcaacagagcgagactccatctcaaaaaaaaggagacttcatgtgcccccaatttttcactattgttatttgaaaaaatatttttatttgtaagagtttttctttatttaaaatgttcattaataaagttgttggacgggaagcaaaaaaaaaaagttgtttaagataaattcccagaagtgaatttgttagatcaaacacttaaaactttttgttatggaagaattcaaatataaataaaaaattgtgagtaataaaatg

SEQ ID NO: 56 - DNA, 2343 bp, Homo sapiens
  CDS (101)..(784)
ctgaagtaccggtccggaattcccgggtcgacccacgcgtccggaaatcatcaacagcaaaaacttcgaccgagagattggccacaaaaaccccagggccatggcaggggagtcattcatggcaacagccccctttgtccaaattggcaggtttttcctctcgtcaggcctcatcgacaaagtcgacaacttcaagtccctgagcctatccaagctggaggaccctcatgtggacatcattcgccgtggagactttttctaccacagcgaaaatcccaagtatccagaggtgggagacttgcgtgtctccttttcctatgctggactgagcggcgatgaccctgacctgggcccagctcacgtggtcactgtgattgcccggcagcggggtgaccagctagtcccattctccaccaagtctggggataccttactgctcctgcaccacggggacttctcagcagaggaggtgtttcatagagaactaaggagcaactccatgaagacctggggcctgcgggcagctggctggatggccatgttcatgggcctcaaccttatgacacggatcctctacaccttggtggactggtttcctgttttccgagacctggtcaacattggcctgaaagcctttgccttctgtgtggccacctcgctgaccctgctgaccgtggcggctggctggctcttctaccgacccctgtgggccctcctcattgccggcctggcccttgtgcccatccttgttgctcggacacgggtgccagccaaaaagttggagtgaaaagaccctggcacccgcccgacacctgcgtgagccctaggatccaggtcctctctcacctctgacccagctccatgccagagcaggagccccggtcaattttggactctgcaccccctctcctcttcaggggccagacttggcagcatgtgcaccaggttggtgttcaccagctcatgtcttccccacatctcttcttgccagtaagcagctttggtgggcagcagcagctcatgaatggcaagctgacagcttctcctgctgtttccttcctctcttggactgagtgggtacggccagccactcagcccattggcagctgacaacgcagacacgctctacggaggcctgctgataaagggctcagccttgccgtgtgctgcttctcatcactgcacacaagtgccatgctttgccaccaccaccaagcacatctgtgatcctgaagggcggccgttagtcattactgctgagtcctgggtcaccagcagacacactgggcatggacccctcaaagcaggcacacccaaaacacaagtctgtggctagaacctgatgtggtgttttaaaagagaagaaacactgaagatgtcctgaggagaaaagctggacatatactgggcttcacacttatcttatggcttggcagaatctttgtagtgtgtgggatctctgaaggccctatttaagtttttcttcgttactttgctgcttcatgtgtactttcctaccccaagaggaagttttctgaaataagatttaaaaacaaaacaaaaaaaacacttaatatttcagactgttacaggaaacaccctttagtctgtcagttgaattcagagcactgaaaggtgttaaattggggtatgtggtttgattgataaaaagttacctctcagtattttgtgtcactgagaagctttacaatggatgcttttgaaacaagtatcagcaaaaggatttgttttcactctgggaggagagggtggagaaagcacttgctttcatcctctggcatcggaaactcccctatgcacttgaagatggtttaaaagattaaagaaacgattaagagaaaaggttggaagctttatactaaatgggctccttcatggtgacgccccgtcaaccacaatcaagaactgaggcctgaggctggttgtacaatgcccacgcctgcctggctgctttcacctgggagtgctttcgatgtgggcacctgggcttcctagggctgcttctgagtggttctttcacgtgttgtgtccatagctttagtcttcctaaataagatccacccacacctaagtcacagaatttctaagttccccaactactctcacacccttttaaagataaagtatgttgtaaccaggatgtcttaaatgattctttgtgtaccttttctgtcatattcagaaaccgttttgtgcctgctgggagtaattcctttagcaattaagtatttggtagctgaataaggggtcagaacttctgaaaccagagatctgtaatcatctctattggcctggggtgcctgtgctataaatgagtttctt

SEQ ID NO: 57 - DNA, 1005 bp, Homo sapiens
  CDS (81)..(629)
atttggccctcgaggccaagaattcggcacgagacgctttggactgagaagcatcgaggctataggacgcagctgttgccatgacggcccaggggggcctggtggctaaccgaggccggcgcttcaagtgggccattgagctaagcgggcctggaggaggcagcaggggtcgaagtgaccggggcagtggccagggagactcgctctacccagtcggttacttggacaagcaagtgcctgataccagcgtgcaagagacagaccggatcctggtggagaagcgctgctgggacatcgccttgggtcccctcaaacagattcccatgaatctcttcatcatgtacatggcaggcaatactatctccatcttccctactatgatggtgtgtatgatggcctggcgacccattcaggcacttatggccatttcagccactttcaagatgttagaaagttcaagccagaagtttcttcagggtttggtctatctcattgggaacctgatgggtttggcattggctgtttacaagtgccagtccatgggactgttacctacacatgcatcggattggttagccttcattgagccccctgagagaatggagttcagtggtggaggactgcttttgtgaacatgagaaagcagcgcctggtccctatgtatttgggtcttatttacatccttctttaagcccagtggctcctcagcatactcttaaactaatcacttatgttaaaaagaaccaaaagactcttttctccatggtggggtgacaggtcctagaaggacaatgtgcatattacgacaaacacaaagaaactataccataacccaaggctgaaaataatgtagaaaactttatttttgtttccagtacagagcaaaacaacaacaaaaaaacataactatgtaaacaagagaataactgctgctaaatcaagaactgttgcagcatctcctttcaataaattaaatggttgagaacaatgcataaaaaaaaaaaa

SEQ ID NO: 58 - DNA, 1408 bp, Homo sapiens
  CDS (175)..(1101)
gtaccgctcggacgcctgcggtaccggtccggaattcccgggtcgacccacgcgtccggacttattgacagtgccaaagctcggtactggacacaacgagggacctgggtctacgataacgcgcttttgctcctcctgaagtgtctttggtccaacgttgttccagagtgtaccatggcttccagtaacactgtgttgatgcggttggtagcctccgcatattctattgctcaaaaggcaggaatgatagtcagacgtgttattgctgaaggagacctgggtattgtggagaagacctgtgcaacagacctgcagaccaaagctgaccgattggcacagatgagcatatgttcttcattggcccggaaattccccaaactcacaattataggggaagaggatctgccttctgaggaagtggatcaagagctgattgaagacagtcagtgggaagaaatactgaagcaaccatgcccatcgcagtacagtgctattaaagaagaagatctcgtggtctgggttgatcctctggatggaaccaaggaatataccgaaggtcttcttgacaatgtaacagttcttattggaattgcttatgaaggaaaagccatagcaggagttattaaccagccatattacaactatgaggcaggaccagatgctgtgttggggaggacaatctggggagttttaggtttaggcgcctttgggtttcagctgaaagaagtccctgctgggaaacacattatcacaactactcgatcccatagcaacaagttggttactgactgtgttgctgctatgaaccccgatgctgtgctgcgagtaggaggagcaggaaataagattattcagctgattgaaggcaaagcctctgcttatgtatttgcaagtcctggttgtaagaagtgggatacttgtgctccagaagttattttacatgctgtgggaggcaagttaaccgatatccatgggaatgttcttcagtaccacaaggatgtgaagcatatgaactctgcaggagtcctggccacactgaggaattatgactactatgcaagccgagttccagaatctattaaaaatgcacttgttccttaaaggaaagtttcatttggccgggcgcggtggctcatgcctgtggtcccagcactttgggaggccgaggcaggtggatcacttgagctcaggagtttgagaccagcctgggcaatatcgtgagaccccatctctacaaaaatacaaattaactgggcatcctgtcatgcgcctgtcatcccagctacttgagaggctgaagcagaagaatctcttgagcccggaaggcggaggttgcagtgagctgagactgtgccactgcactccagcctgagtgacaggagttaagccctgtctcagaaaaaaaaaa

SEQ ID NO: 59 - DNA, 1947 bp, Homo sapiens
  CDS (306)..(1451)
accctggagctagcgtcatcgcgaaggaactcccacgaccggatggaagagcccagctgacacaaccaagacgagtctcagtgtctagggaagcttggggttctgctccttttacttcaggcgaacctgaactcagttaatgcaattttgaagcatgccctgaatagattcagtcattatcaagtcaaactaaaaacggtgaaaggttgcgactattaccaaataggaaaaacctgaagacataagaactacacatgaggaatatgtcatttagcactttcactttttgatctccacagaagacaatgagaagtcataccataacaatgacgacaacttcagtcagcagctggccttactcctcccacagaatgcgctttataaccaatcatagcgaccaaccgccacaaaacttctcagcaacaccaaatgttactacctgtcccatggatgaaaaattgctatctactgtgttaaccacatcctactctgttattttcatcgtgggactggttgggaacataatcgccctctatgtatttctgggtattcaccgtaaaagaaattccattcaaatttatctacttaacgtagccattgcagacctcctactcatcttctgcctccctttccgaataatgtatcatattaaccaaaacaagtggacactaggtgtgattctgtgcaaggttgtgggaacactgttttatatgaacatgtacattagcattattttgcttggattcatcagtttggatcgctatataaaaattaatcggtctatacagcaacggaaggcaataacaaccaaacaaagtatttatgtctgttgtatagtatggatgcttgctcttggtggattcctaactatgattattttaacacttaagaaaggagggcataattccacaatgtgtttccattacagagataagcataacgcaaaaggagaagccatttttaacttcattcttgtggtaatgttctggctaattttcttactaataatcctttcatatattaagattgggaagaatctattgaggatttctaaaaggaggtcaaaatttcctaattctggtaaatatgccactacagctcgtaactcctttattgtacttatcatttttactatatgttttgttccctatcatgcctttcgattcatctacatttcttcacagctaaatgtatcatcttgctactggaaagaaattgttcacaaaaccaatgagatcatgctggttctctcatctttcaatagttgcttagatccagtcatgtatttcctgatgtccagtaacattcgcaaaataatgtgccaacttctttttagacgatttcaaggtgaaccaagtaggagtgaaagcacttcagaatttaaaccaggatactccctgcatgatacatctgtggcagtgaaaatacagtctagttctaaaagtacttgaggtaaacatactaaaatgaattatataatgcagcctcttaattctttgaagaactaaaaaattaggaaacaaagttctagcatttacaaaactcagatctcaaagctctgcttgtatttgtgatatttcatttgcttaactgtaaaccatttcaaggtactatcttttaaatctgtatgtaaaatcttttcaaaatacatttttaagctaatactcttaacatagattatgaagttaagtgaaatttatggctctaacagcaaaataattaaagtgccatagtttctcaagtgactaaagtagttattaaaatcaagcacttgatactaatttgaagtgtgtttaaaagtaaatgatttgggaactgacaatgtgtcagaaaatatatgttcatttatcattttaaaatcttgtataatttgccactgtattcatttatgcctaaatctctataacagatgaaaagataattaataaaatcctaattaaaaaatgg

SEQ ID NO: 60 - DNA, 1523 bp, Homo sapiens
  CDS (344)..(1402)
ttccattgaacgcctgcgttaccggtccggaattcccgggtcgacccacgcgtccgactagttctagatcgcgagcggccgctcgcgatctataatgcctcttctgaagcagccatcccggcctcttggtactgctgaccccagccaggctacagggatcgattggagctgtccttggggctgtaattggccccagctgagcagggcaaacactgaggtcaactacaagccacaggccccttccccagcctcagttcacagctgccctgttgcagggaggcggtggcccttctgttgctagaccgagcctgtgggatataccaaggcagaggagcccatagccatgaggagcctcggggccctgctcttgctgctgagcgcctgcctggcggtgagcgctggccctgtgccaacgccgcccgacaacatccaagtgcaggaaaacttcaatatctctcggatctatgggaagtggtacaacctggccatcggttccacctgcccctggctgaagaagatcatggacaggatgacagtgagcacgctggtgctgggagagggcgctacagaggcggagatcagcatgaccagcactcgttggcggaaaggtgtctgtgaggagacgtctggagcttatgagaaaacagatactgatgggaagtttctctatcacaaatccaaatggaacataaccatggagtcctatgtggtccacaccaactatgatgagtatgccattttcctgaccaagaaattcagccgccatcatggacccaccattactgccaagctctacgggcgggcgccgcagctgagggaaactctcctgcaggacttcagagtggttgcccagggtgtgggcatccctgaggactccatcttcaccatggctgaccgaggtgaatgtgtccctggggagcaggaaccagagcccatcttaatcccgagagtccggagggctgtgctaccccaagaagaggaaggatcagggggtgggcaactggtaactgaagtcaccaagaaagaagattcctgccagctgggctactcggccggtccctgcatgggaatgaccagcaggtatttctataatggtacatccatggcctgtgagactttccagtacggcggctgcatgggcaacggtaacaacttcgtcacagaaaaggagtgtctgcagacctgccgaactgtggcggcctgcaatctccccatagtccggggcccctgccgagccttcatccagctctgggcatttgatgctgtcaaggggaagtgcgtcctcttcccctacgggggctgccagggcaacgggaacaagttctactcagagaaggagtgcagagagtactgcggtgtccctggtgatggtgatgaggagctgctgcgcttctccaactgacaactggccggtctgcaagtcagaggatggccagtgtctgtcccggggtcctgtggcaggcagcgccaagcaacctgggtccaaataaaaactaaattgtaaactcctaaaaaaaaaaaaa

SEQ ID NO: 61 - DNA, 597 bp, Homo sapiens
  CDS (165)..(470)
  misc_feature (1)...(597): n = a,t,c or g
tagaagnccattgganngaggatgatgtatataactatctattcgatgatgaagataccccaccaaacccaaaaaaagagatctctcgaggatccgaattcgcggccgcgtcgaccctcaagagtgtgggtgagacatatacagcctgttagacctgaaggcagatggctcttcttaaggccaataaggatctcatttccgcaggattgaaggagttcagcgttctgctgaatcagcaggtcttcaatgatcctctcgtctctgaagaagacatggtgactgtggtggaggactggatgaacttctacatcaactattacaggcagcaggtgacaggggagccccaagagcgagacaaggctctgcaggagcttcggcaagagctgaacactcttgccaaccctttcctggccaagtacagggacttcctgaagtctcatgagctcccgagtcacccaccgccctcctcctagctcagggacccagcccctcctctctgagaaactctgaccttcatgtccttaggctgtgctcctgccactctaccctgacacctcaataaagaccagtgctggttttgttggaaaaaaaaaaaaa

SEQ ID NO: 62 - DNA, 600 bp, Homo sapiens
  CDS (45)..(386)
gcacgagagtttggggcgcggactggagtaccttgcgtgcagttatgtcggcgtcggtagtgtctgtcatttcgcggttcttagaagagtacttgagctccactccgcagcgtctgaagttgctggacgcgtacctgctgtatatactgctgaccggggcgctgcagttcggttactgtctcctcgtggggaccttccccttcaactcttttctctcgggcttcatctcttgtgtggggagtttcatcctagcggtttgcctgagaatacagatcaacccacagaacaaagcggatttccaaggcatctccccagagcgagcctttgctgattttctctttgccagcaccatcctgcaccttgttgtcatgaactttgttggctgactcattctcatttacttaattgaggagtaggagactaaaagaatgttcactctttgaatttcctggataagagttctggagatggcagcttattggacacatggattttcttcagatttgcacttactgctagctctgctttttatgcaggagaaaagccaaaggtcactgtgtgtcagaccaacttctaacaaacatttattattcagccttg

SEQ ID NO: 63 - DNA, 1807 bp, Homo sapiens
  CDS (475)..(1404)
atggcggcacagggagctgctgcggcggttgcggcggggacttcaggggtcgcgggggagggcgagcccgggcccggggagaatgcggccgctgaggggaccgccccatccccgggccgcgtctctccgccgaccccggcgcgcggcgagccggaagtcacggtggagatcggagaaacgtacctgtgccggcgaccggatagcacctggcattctgctgaagtgatccagtctcgagtgaacgaccaggagggccgagaggaattctatgtacactacgtgggctttaaccggcggctggacgagtgggtagacaagaaccggctggcgctgaccaagacagtgaaggatgctgtacagaagaactcagagaagtacctgagcgagctcgcagagcagcctgagcgcaagatcactcgcaaccaaaagcgcaagcatgatgagatcaaccatgtgcagaagacttatgcagagatggaccccaccacagcagccttggagaaggagcatgaggcgatcaccaaggtgaagtatgtggacaagatccacatcgggaactacgaaattgatgcctggtatttctcaccattccccgaagactatgggaaacagcccaagctctggctctgcgagtactgcctcaagtacatgaaatatgagaagagctaccgcttccacttgggtcagtgccagtggcggcagccccccgggaaagagatctaccgcaagagcaacatctccgtgtacgaagttgatggcaaagaccataagatttactgtcagaacctgtgtctgctggccaagcttttcctggaccataagacactgtactttgacgtggagccgttcgtcttttacatcctgactgaggtggaccggcagggggcccacattgttggctacttctccaaggagaaggagtccccggatggaaacaatgtggcctgcatcctgaccttgcccccctaccaacgccgcggctacgggaagttcctcatcgctttcagttatgagctctccaagctggagagcacagtcggctccccggagaagccgctgtctgacctgggcaagctcagctaccgcagctactggtcctgggtgctgctggagatcctgcgggacttccggggcacactgtccatcaaggacctcagccagatgaccagtatcacccaaaatgacatcatcagtaccctgcaatccctcaatatggtcaagtactggaagggccagcacgtgatctgtgtcacacccaagctggtggaggagcacctcaaaagtgcccagtataagaaaccacccatcacaggtgggtggggggctgctgtgtgtcgggggcggtgggggagtgtcagtatatggactggtaggagtcaaggcctccttattgctgtcacatgatcccaaaccagtcagaccagctcccaggatggagcccggggcaggcctctcattcctgggcttccctgcccctccccagcacagcctgcccttttgttctcacctggaggaggtgaaactggcctgagcccagaggagggcagccaggtgtgagctggcctggcccaggcccagccctgcctcccgccccttctccccacagtggactccgtctgcctcaagtgggcaccccccaagcacaagcaagtcaagctctccaagaagtgagcagcctggcccctgctgtcggacctgagcctcctggctcccagcctgtaaatatgtatagacctgttttgtcatttttttaataaagtcagttctggtggccctggactttggaggggaaggggaggccaagaaa

SEQ ID NO: 64 - DNA, 1777 bp, Homo sapiens
  CDS (475)..(1374)
atggcggcacagggagctgctgcggcggttgcggcggggacttcaggggtcgcgggggagggcgagcccgggcccggggagaatgcggccgctgaggggaccgccccatccccgggccgcgtctctccgccgaccccggcgcgcggcgagccggaagtcacggtggagatcggagaaacgtacctgtgccggcgaccggatagcacctggcattctgctgaagtgatccagtctcgagtgaacgaccaggagggccgagaggaattctatgtacactacgtgggctttaaccggcggctggacgagtgggtagacaagaaccggctggcgctgaccaagacagtgaaggatgctgtacagaagaactcagagaagtacctgagcgagctcgcagagcagcctgagcgcaagatcactcgcaaccaaaagcgcaagcatgatgagatcaaccatgtgcagaagacttatgcagagatggaccccaccacagcagccttggagaaggagcatgaggcgatcaccaaggtgaagtatgtggacaagatccacatcgggaactacgaaattgatgcctggtatttctcaccattccccgaagactatgggaaacagcccaagctctggctctgcgagtactgcctcaagtacatgaaatatgagaagagctaccgcttccacttgggtcagtgccagtggcggcagccccccgggaaagagatctaccgcaagagcaacatctccgtgtacgaagttgatggcaaagaccataagatttactgtcagaacctgtgtctgctggccaagcttttcctggaccataagacactgtactttgacgtggagccgttcgtcttttacatcctgactgaggtggaccggcagggggcccacattgttggctacttctccaaggagaaggagtccccggatggaaacaatgtggcctgcatcctgaccttgcccccctaccaacgccgcggctacgggaagttcctcatcgctttcagttatgagctctccaagctggagagcacagtcggctccccggagaagccgctgtctgacctgggcaagctcagctaccgcagctactggtcctgggtgctgctggagatcctgcgggtcagccagatgaccagtatcacccaaaatgacatcatcagtaccctgcaatccctcaatatggtcaagtactggaagggccagcacgtgatctgtgtcacacccaagctggtggaggagcacctcaaaagtgcccagtataagaaaccacccatcacaggtgggtggggggctgctgtgtgtcgggggcggtgggggagtgtcagtatatggactggtaggagtcaaggcctccttattgctgtcacatgatcccaaaccagtcagaccagctcccaggatggagcccggggcaggcctctcattcctgggcttccctgcccctccccagcacagcctgcccttttgttctcacctggaggaggtgaaactggcctgagcccagaggagggcagccaggtgtgagctggcctggcccaggcccagccctgcctcccgccccttctccccacagtggactccgtctgcctcaagtgggcaccccccaagcacaagcaagtcaagctctccaagaagtgagcagcctggcccctgctgtcggacctgagcctcctggctcccagcctgtaaatatgtatagacctgttttgtcatttttttaataaagtcagttctggtggccctggactttggaggggaaggggaggccaagaaa

SEQ ID NO: 65 - DNA, 1617 bp, Homo sapiens
  CDS (169)..(789)
gaaagggggggggggaagaaatttgatttggatgggcgtgatgaataactatctattcgatgatgaagataccccaccaaacccaaaaaaagagatctctcgaggatccgaattcgcggccgcgtcgacccgggcggccagctgggctcggagcggaacggggtcaggatggacgaggacgtgctaaccaccctgaagatcctcatcatcggcgagagtggggtgggcaagtccagcctgctcttgaggttcacagatgatacgtttgatccagaacttgcagcaacaataggtgttgactttaaggtgaaaacaatttcagtggatggaaataaggctaaacttgcaatatgggatactgctggtcaagagaggtttagaacattaactcccagctattatagaggtgcacagggtgttatattagtttatgatgtcacaagaagagatacatttgttaaactggataattggttaaatgaattggaaacatactgtacaagaaatgacatagtaaacatgctagttggaaataaaatcgataaggaaaatcgtgaagtcgatagaaatgaaggcctgaaatttgcacgaaagcattccatgttatttatagaggcaagtgcaaaaacctgtgatggtgtacaatgtgcctttgaagaacttgttgaaaagatcattcagacccctggactgtgggaaagtgagaaccagaataaaggagtcaaactgtcacacagggaagaaggccaaggaggaggagcctgtggtggttattgctctgtgttataaactctgggaaattccatctcttgcatatttgatcagatagtgacatctttctgtatataaactctttaactgctattttagggaccttgcagtttgcacataattgttttatatcatagcagtaaatatttgcaagaaatcccactcatcgaccccgggtaaaatgttatggtaagcatgcacagtttgcagtctacagtttttttatgtagcacaaaataggtgtacctttataagtacattcaattttatgatttacatttatcatgtaatttttaaaaaaatccatctatctaggatatgttgatacaaagtctgcttttgctattctttttgcttaaatactcctatcattttctgaattacttggtatttagaactcctagcaccacggggaagaatagaggtatcatcaaacgtggcaaattttctttcaggaataataaagagcatgattccacagcttttctgggatgtttgagattcttttttagtactaagcaaaattctcatcacagaatgtagcccaggccaatttataactaaatctctatttgttcggatgatgcttctaaaacagcattgataggttaaagaagcttggtatttttaatttacttcaatgattagctcagttgcttaactggagttttaatcctgtgatatgtacattggattcatgactgtgcagcatttttagttatgtggtgtttggcagaatgacaataaggttttcccccattttggtttcaggaggacatgaatagtgtgtttattgtaactcctcatacacttttaaaaccaacatcttttttcataaatgttggg

SEQ ID NO: 66 - DNA, 1119 bp, Homo sapiens
  CDS (525)..(725)
tttttttttttttgcattgattcgacaagtgtttattgagcacctgccacggacaaggccttgtgtgattaaatagggttataattagtaatataaaaatgagaaatcactaatgctttttagacttaacattttctttttttgtaggtttcaggcacagaactgtatatccaataatagtgaaatggatgccactaattatgacagaaatgatgatacatttaaatgacttggatgttttgtaggtatgatctcgtgaaaccttgagagaaactgaatgaggaatgaaactattgttcctgtttcacacagaagaaaactgaggtgaaaaggggtaaagtaattttgcatggcatgaagtagaaattcaaagtacaggaatttgaacttggttctgtccttttctgaagcccttgaccactatagactcaaacatcaccttgtttttccactcattcaacactttttttttaaattatctaataggttggcactcatcatgagcccctgttctcattctgcaaatggtgaagctctctattgtcctgaccccacagttcctgtcccatgaccagggccagctcaccaaggagctgcagcagcacgtaaagtcagtgacatgcccatgcgagtacctgaggaaggtgagtgagtgcagacagatggggcctggtgcccttgagcagttcccgggtctcagctgccacacatctcatagcgggtgatgctgggggaagcttacgcagtcacagtactggcttcttcctctttttctttccatacaagtggcttagggatggggtagagtagttgacttatttggatgaaaaccactatcttctgtcagaaactcaaaaggaatcattgctggcatggtaaccgcacaggacgctctgattgacgcactgccaggagtagcgctctgtcttggggctgcagccggcctcctcagctcgagtgtaacaacagtcgtggccatggcagcacctgagctttctggaattttgctcccttgccctggtggctgagtgtggggtgtgtggagcaagtagtctgccccgaacgcgtgggcggacgcgtgggcggacgcgtgggtcgacccgggaattccggagcggg

SEQ ID NO: 67 - DNA, 1080 bp, Homo sapiens
  CDS (90)..(674)
atttggccctcgaggccaagaattcggcacgagcggcacgaggacgccaaggagttttcggtggctcagctgggtaaccggggatcaccatggcggcctcattggtggggaagaagatcgtgtttgtaacggggaacgccaagaagctggaggaggtcgttcagattctaggagataagtttccatgcactttggtggcacagaaaattgacctgccggagtaccagggggagccggatgagatttccatacagaaatgtcaggaggcagttcgccaggtacaggggcccgtgctggttgaggacacttgtctgtgcttcaatgcccttggagggctccccggcccctacataaagtggtttctggagaagttaaagcctgaaggtctccaccagctcctggccgggttcgaggacaagtcagcctatgcgctctgcacgtttgcactcagcaccggggacccaagccagcccgtgcgcctgttcaggggccggacctcgggccggatcgtggcacccagaggctgccaggactttggctgggacccctgctttcagcctgatggatatgagcagacgtacgcagagatgcctaaggcggagaagaacgctgtctcccatcgcttccgggccctgctggagctgcaggagtactttggcagtttggcagcttgacttctgcagctggaggaggcccctcaggccggggatctggggagggctagcccaaaacctcccgcatcgggcaggcaccccctgaagtacttccttcagggtttcccctttgtgagggtgtcgagtagcctcaccggcctgtctggaggagcagctggctctgctctgagaaactctggcaagtggacgccattctcttgcccttaggattcactgctctctcctacagccgccaggcctggggtcctgaaaggaccttgggtggtaaagctgtacttggtgggagtgagggcgtggggaggaaccatgcaaatcgccttccatggtttttaaatgcagtaaataacatttctggatgagacttgtttccaaaataaaccagctatatctgttttgaaaaaaaaaa

SEQ ID NO: 68 - DNA, 1402 bp, Homo sapiens
  CDS (232)..(1227)
atttggccctcgaggccaagaattcggcacgagctttttaaagcaacaaaagagtctaaaacaaaatacaacatttcttaaatacactgtttccagaaagagctattttaacagaagcaactcaaagatatcccttcgacagaagtggaagtgctgaaaaatgctcatctctcacacagacttttgatggacaggagtttctaagtatcatgcctaccaacaagctgtaaaatgatcaccctgaacaatcaagatcaacctgtcccttttaacagctcacatccagatgaatacaaaattgcagcccttgtcttctatagctgtatcttcataattggattatttgttaacatcactgcattatgggttttcagttgtaccaccaagaagagaaccacggtaaccatctatatgatgaatgtggcattagtggacttgatatttataatgactttaccctttcgaatgttttattatgcaaaagatgaatggccatttggagagtacttctgccagattcttggagctctcacagtgttttacccaagcattgctttatggcttcttgcctttattagtgctgacagatacatggccattgtacagccgaagtacgccaaagaacttaaaaacacgtgcaaagccgtgctggcgtgtgtgggagtctggataatgaccctgaccacgaccacccctctgctactgctctataaagacccagataaagactccactcccgccacctgcctcaagatttctgacatcatctatctaaaagctgtgaacgtgctgaacctcactcgactgacattttttttcttgattcctttgttcatcatgattgggtgctacttggtcattattcataatctccttcacggcaggacgtctaagctgaaacccaaagtcaaggagaagtccataaggatcatcatcacgctgctggtgcaggtgctcgtctgctttatgcccttccacatctgtttcgctttcctgatgctgggaacgggggagaacagttacaatccctggggagcctttaccaccttcctcatgaacctcagcacgtgtctggatgtgattctctactacatcgtttcaaaacaatttcaggctcgagtcattagtgtcatgctataccgtaattaccttcgaagcatgcgcagaaaaagtttccgatctggtagtctacggtcactaagcaatataaacagtgaaatgttatgaataataaggttctttcatttcaatcccatcaaaattcacttcactaactactctggcgtcaatggatattctgtataatactatcaagtcccttttctcttgaaaaaataaattcattatcttcattttaaaaacttatataaaacatttttgtgaattattcaaaaaaaaaaaa

SEQ ID NO: 69 - DNA, 2125 bp, Homo sapiens
  CDS (116)..(1948)
gatacgactcacatagggatttggccctcgagcagtaattcgggacgaggtttcaagccgactgtgtggcagctgagaagagttttgcacgtggatcgccgttcgggtgggcgagatggagacagcccccaagccgggcaaggatgtcccgcccaagaaagacaaacttcagaccaagagaaagaaaccgcggcgatactgggaggaagagaccgttccgaccacagccggagcctctccagggcctcctcgtaacaagaagaatcgggagctccgtcctcagagaccaaaaaatgcttacatcttaaagaagtctcggatctctaagaagcctcaggtcccgaagaaaccccgagaatggaagaacccggagtcccagcgcggcttgtccggggcccaagatccattcccaggccccgcccccgtccctgtggaagtggtccagaagttctgtcgcattgacaaatcccgaaagctaccacattctaaagccaaaactcgaagccgacttgaggtggctgaagctgaggaagaggaaacaagtatcaaagctgctcgttctgagctgctgcttgctgaagaacctgggtttctggaaggggaggatggggaagacacagcaaagatatgccaggctgacattgtggaggctgtggacattgcaagtgcagccaagcactttgacttgaatctgcggcagtttggaccctacagactaaactactctcgaactggaagacacctggcttttggagggcgccgaggtcatgtggctgcccttgattgggtaacaaagaagcttatgtgcgagatcaacgtcatggaggcggtgcgggacatccggtttctccattctgaggcactgcttgctgttgctcagaaccgctggctccacatctatgacaatcagggcattgagctccactgtatccgccgctgtgaccgagtaacacggcttgagttcctgcccttccacttcctcctggctacagcttcagaaacagggtttctaacctacctggatgtgtcagtggggaagattgtggcagctctgaatgctcgagctgggcggctcgatgttatgagtcagaacccttacaatgccgtcatccatctcggacacagcaatggtactgtgtctttatggagtccagctatgaaggagccactggcaaagattctctgtcatcgtggtggggtccgggctgtggcagtagattctacaggcacgtacatggccacctctggcctagaccaccagctgaagatctttgacttgcgagggacgtaccagcctctgagcactcggaccctgccccatggagcagggcacctggccttctcccagaggggactgctggtggcgggaatgggtgacgttgtcaacatctgggcagggcagggcaaggccagcccaccctcccttgaacagccctacctcacccaccggctctcaggccctgtgcatggccttcagttctgcccctttgaagatgtgctgggggtggggcacactgggggcatcaccagcatgctggtccctggggccggtgagcccaacttcgatggcctggagagtaatccatacagaagccggaagcagcgccaggagtgggaggtgaaggccctgctagagaaggtacctgcagagcttatttgtctggacccacgagccctggccgaggtggatgtcatctccctggagcagggaaagaaggagcagatagagaggctgggctatgacccgcaggctaaggctcccttccagccaaagccaaagcagaagggccgcagctccacggcaagcctggtgaagaggaagaggaaggtcatggatgaggaacacagggacaaggtccggcagagccttcagcagcagcatcataaggaggcgaaggccaagcccacgggggcccggccatctgccctggacagatttgtgcgctgagccagactccagggttgcctgggaacagtctctccccaagatcacctgtagggaaatgagtgttccctggaacaaggaggtgggggcagtgtggccccttccccaactgggggtggacagctgtctcctggggtgggttggtattaaagaggaaagcgattttttggaaaaaaaaaa

SEQ ID NO: 70 - DNA, 2250 bp, Homo sapiens
  CDS (238)..(2250)
atgacagcccaggatagcaacacttccgcgcacgcgcagcgcgacgggccggaacttccggcgtcctcctcgtggcggtcattttggcctctgtcctgtttgtccagcccgccagtttctgcagtggaggtcgcgactgagggacgggacagagaagtcgcgaaagtgggccagaggttctgcgacaccacctcgggtgagctgcgccaggcccgggatagggactgttgtgttcgaatgcccgccccggtcggccgccgctccccgcctagtccacggagctcaatggcggcagtcgcgctgagggactcggctcagggtatgacctttgaggatgtggccatttatttctcccaagaagagtgggagctccttgatgagtctcagaggttcctgtactgcgatgtgatgctggagaactttgcacatgtaacatccctgggttattgccatggaatggagaatgaggcgatagcttctgagcagagtgtatctatacaggtcaggacttctaagggcaatacacccacccagaaaactcacctcagtgagattaagatgtgtgtcccagtcttgaaagacattttgcctgcggctgagcaccaaaccacatcccctgtgcaaaagtcatacttgggtagcacaagcatgagaggcttctgcttcagtgctgaccttcaccagcatcaaaagcattacaatgaagaagagccctggaaaaggaaggtggatgaggctacatttgtgaccggctgcagattccatgtgttgaattatttcacctgtggggaggccttcccagcccccacggacctactccaacacgaagccactcccagtggtgaggagccacacagtagcagcagcaagcatatacaggcatttttcaatgcaaaaagttattacaagtggggtgaatacagaaaagcttcaagccacaaacacacacttgttcagcatcagagtgtctgttctgaaggagggctttatgagtgtagcaaatgtgagaaagccttcacttgcaagaacacacttgttcagcaccagcaaattcacactggacaaaagatgtttgagtgtagtgaatgtgaggaatcctttagcaaaaagtgccacctaatcttacacaagataattcacactggagaaaggccttatgaatgcagtgatcgtgagaaagcctttatccataaatctgaattcattcaccaccagagacgtcacactggaggagtgcgtcatgagtgtggtgaatgtaggaaaacctttagctacaaatctaacctcattgaacaccagagagttcacactggagaaaggccttatgaatgtggcgagtgcgggaaatcctttagacaaagctctagcctttttcgacaccagagagttcactctggagaaaggccttatcagtgctgtgagtgtgggaaatcctttagacaaatcttcaatctcattcgacatagaagagttcacactggagaaatgccttatcagtgcagtgattgtgggaaatcttttagctgcaaatcggaactcattcaacaccagagaattcacagtggagaaagaccttatgaatgcagagaatgtgggaaatcctttagacaattctctaacctcattcgacaccgcagcattcacactggtgataggccttatgagtgcagtgaatgtgagaaatcctttagccgcaaatttatcctgattcaacaccaaagagttcacactggagaaagaccttatgaatgcagtgaatgtggaaaatcctttacccgcaaatctgacctcattcaacaccggagaattcatactggcacaagaccttatgagtgcagtgaatgtggcaaatcttttagacagcgctctggcctcattcagcaccggagacttcatactggagaaaggccttatgaatgtagtgaatgtggaaagtcttttagccaaagtgctagcctcattcaacaccagagagttcacactggagaaaggccttatgaatgtagtgaatgtgggaaatcctttagccagagctctagcctcattcaacaccagagaggtcacactggagaaagaccttatgagtgcagtcaatgtgggaaaccctttacccacaaatcagaccttattcagcaccaaagagttcacactggagaaaggccttatgaatgcagtgaatgtgggaaatcctttagccgcaaatctaacctcattcgacatcggagagttcacactgaagaaaggccttaa

SEQ ID NO: 71 - DNA, 3191 bp, Homo sapiens
  CDS (169)..(2562)
ggcacgaggggagacgccgcgttgagagcttgggctcctccgtgagccgccggcgcgcttcgctgcctggcggcctttccccgagccgagcccgcttcccgaggccgccagtcgtcgcctgcccgcgcctgcgcagcgtcccgggccgagagggccacggcggcggccatggcgcaccgctgtttgcggctgtggggccggggcggctgctggccccgcggcctacagcagctcctcgtgcctggcggcgtgggcccgggcgagcagccctgcctccggacgctttaccgatttgttacaactcaagcaagggccagcagaaattctcttttgacagatataattgctgcttatcaaagattctgttctcgacccccaaaaggatttggaaaatactttcctaatggaaaaaatggaaaaaaagctagtgaacctaaagaagttatgggagagaaaaaagaatcaaagccagctgctaccacacgctcttctggaggaggaggtggtggcggtggaaaacgaggtggcaagaaagatgattctcactggtggtccaggtttcagaagggtgacattccatgggacgacaaggatttcaggatgttcttcctctggactgctctgttctggggtggagtcatgttttacttgctgctcaagagatccgggagagaaatcacttggaaggactttgtcaataactatctttcaaaaggagtagtagacagattggaagtcgtcaacaagcgttttgttcgagtgacctttacaccaggaaaaactcctgttgatgggcaatacgtttggtttaatattggcagtgtggacacctttgaacggaatctggaaactttacagcaggaattgggcatagaaggagaaaatcgggtgcctgttgtctacattgctgaaagtgatggctcttttctgctgagcatgctgcctacggtgctcatcatcgccttcttgctctacaccatcagaagagggcctgctgccattggccggacaggccgagggatgggcggactcttcagtgtcggagaaaccactgccaaggtcttaaaggatgaaattgatgtgaagttcaaagatgtggctggctgtgaggaggccaagctagagatcatggaatttgtgaatttcttgaaaaacccaaagcagtatcaagacctaggagcaaaaatcccaaagggtgccattctcactggtcctccaggcactgggaagacgctgctagctaaggccacagccggagaagccaatgtccccttcatcaccgttagtggatctgagtttttggagatgttcgttggtgtgggccctgctagagtccgagacttatttgcccttgctcggaagaatgccccttgcatcctcttcatcgatgaaatcgatgcggtgggaaggaagagaggaagaggcaactttggagggcagagtgagcaggagaacacactcaaccagctgctggtggagatggatggttttaatacaacaacaaatgtcgtcattttggccggcaccaatcgaccagatatcctggaccccgcgctacttaggccggggcgtttcgacaggcagatctttattggaccaccagacataaaaggaagagcttctattttcaaagttcatctccgaccgctaaaactggacagtaccctggagaaggataaattggcaagaaaactggcatctttaactccagggttttcaggtgctgatgttgctaatgtctgtaatgaagctgcgttgattgctgcaaggcatctgtcagattccataaatcagaaacactttgaacaggcaattgagcgagtgattggtggcttagagaagaaaacgcaggttctgcagcctgaggagaagaagactgtggcataccacgaagcaggccatgcggttgccggctggtatctggagcacgcagacccgcttttaaaggtatccatcatcccacgtggcaaaggactaggttatgctcagtatttaccaaaagaacaatacctctataccaaagagcagctcttggataggatgtgtatgactttaggtggtcgagtctctgaagaaatcttctttggaagaattacaactggtgctcaagatgacttgagaaaagtaactcagagtgcatatgcccaaattgttcagtttggcatgaatgaaaaggttgggcaaatctcctttgacctcccacgtcagggggacatggtattggagaaaccttacagtgaagccactgcaagattgatagatgatgaagtacgaatacttattaatgatgcttataaaagaacagtagctcttctcacagaaaagaaagctgacgtggagaaggttgctcttctgttgttagaaaaagaagtattagataagaatgatatggttgaacttttgggccccagaccatttgcggaaaaatctacctatgaagaatttgtggaaggcactggcagcttggatgaggacacctcacttccagaaggccttaaggactggaacaaggagcgggaaaaggagaaagaggagcccccgggtgagaaagttgccaactagaggcccagagggaggccatctcagtctgtccactgtggtttcagctggtgcattatttcagctgtggctttcagaagaatgggaatgctgcgctgattttagccagccactggcccagctgaaatgatggggaaaggagtccttagtcctttcagcctcagaggtcacagtgggtggcaggtgactttccggaggccttgagggaaatgcacactgtcccatagcctcattgggctcccagacgtgctggaaaggttgagcccagagtggccgaggctggaccctgtggcaccaagtggggtcggctgaccgtgtggcagggatcgttgcactggactcttggcgtgtgggaagggatgctttctctttgtcgcccactcttcattcctgtttctcctcagttcccctgtgcagatgggctgtgaaattaaattggagtcttgataagaacattttaatttgacttaatattttaaagattgaatccagatcacttgttgctgtcttaatggaatggttttctacaggagctgtaacatacttaaaaatatgaatgtattatgtaaatatggcttctttacataaaaaataaaatgtcaacactgtacttttctgaacacaaaaaaaaa

SEQ ID NO: 72 - DNA, 2859 bp, Homo sapiens
  CDS (334)..(1494)
accggtccggaattcccgggtcgacccacgcgtccgagcgctcctccttccggtgaaagtcgtcgggttcccagccgggagtctgcggagttctcatactctgttacccagcttcctttgtatgagtgctgttgcgcacttccggtggaagcgctgaagcgagtgggtggagtttacggagccggtgggcggtaggcggtgctacgggtagctgggtgctgtccaaaggcgacagggcgtcgttaggggagcgagtcgtgaccggttgggccacactcaacgtgggacgaagcttcgcctactgtttgactacgtgcgtgcagcctcccctcgatgtcggccctcgaaaagagcatgcacctcggccgccttccctctcgcccacctctacccggcagcgggggcagtcagagcggagccaagatgcgaatgggccctggaagaaagcgggacttttcccctgttccttggagtcagtattttgagtccatggaagatgtagaagtagagaatgaaactggcaaggatacttttcgagtctacaagagtggttcagagggtccagtcctgctccttctgcatggaggaggtcattctgccctttcttgggctgtgttcacggcagcgattattagtagagttcagtgtaggattgtagctttggatctgcgaagtcatggtgaaacaaaggtcaagaatcctgaagatctgtctgcagaaacaatggcaaaagacgttggcaatgtggttgaagccatgtatggggaccttcctcctccaattatgctgattggacatagcatgggtggtgctattgcagtccacacagcatcatccaacctggtaccaagcctcttgggtctgtgcatgattgatgttgtagaaggtacagctatggatgcacttaatagcatgcagaatttcttacggggtcgtcctaaaaccttcaagtctctggagaatgctattgaatggagtgtgaagagtggccagattcgaaatctggagtctgcccgtgtctcaatggttggccaagtcaaacagtgtgaaggaattacaagtccagaaggctcaaaatctatagtggaaggaatcatagaggaagaagaagaagatgaggaaggaagtgagtctataagcaagaggaaaaaggaagatgacatggagaccaagaaagaccatccatacacctggagaattgaactggcaaaaacagaaaaatactgggacggctggttccgaggcttatccaatctctttcttagttgtcccattcctaaattgctgctcttggctggtgttgatagattggataaagatctgaccattggccagatgcaagggaagttccagatgcaggtcctaccccagtgtggccatgcagtccatgaggatgcccctgacaaggtagctgaagctgttgccactttcctgatccggcacaggtttgcagaacccatcggtggattccagtgtgtgtttcctggctgttagtgacctgctgtccacccctcctcaacatcgagctctgttgtaaatacgtcgcaccagaggccactgtgatgccactgtctcctctccatcccgcccagccatgtgacactggctcccggtagacgggcaccccgagatgtaccaaccttttcatgtattctgccaaaagcattgttttccagggcccttgaccaacatcggcttccccagtccagggctcccctgctcctttcccttccctgtactggggtagctcctgcctgctctccctgcgttgcctagggtaaagcctccagatttgccatactgagcccctcttcctagcatcaggcgatacatctgagttcaaatgtcttcccaggctcagggacctccattccttgagattgtcttggcatggcccagccctgcctcatgggatggacaatgcatggggtggtctttatttttccctttcaaataaaacactagtcaggtaccgttttatcccagtcgtactcttccaggtttggaagacccagagaggccaagatcccatccttagccatagcgagcggtggtggtggatagcatcacaagaaacgagcctgaaaatcaggtccagccggtccaagcacatggcctcccatctgggagagcccactgtcccactcccacatgtctgggcacctgccctgggctgaggccaggctgctccaggggcctcctgcgccctcacctgccacagagcaacccaggttaaatacagcccatgcacaaagccacaggccaaagcctatggaattgtttttaatcatcaaatttaaccattttcataactggttcctggaggtgtgcagtgcccccttgcctcttcaaacctacagcttctctttgccatttgtggatttcacatcactccacacagaaacattacagcctggcatccccagtctttgccttcttccagctgcctcgacacagcactgtggcctgtccctattgcccaggcacgccatttccaagggcaggaaggggcagtgtcctgaagcccatcttttctgtgactgtcttaggtgatgtgtagccccctccacctttccactcaacaacctcccacccctgtcctgctgcatggtccggagtctgggacctactttgttttttgttatttatgaccttgtttaaagaaaataaatatctcgtcgacccgccgcgaattccagatctatgaatcgtagatactgaaaaaccccgcaagttcacttcaactgtgcatcgtgcaccatctcaatttctttcatttatacatcgttttgccttcttttatgtaactatactcctctaagtttcaatcttggccatgtaacctctgatctatagaat

SEQ ID NO: 73 - DNA, 636 bp, Homo sapiens
  CDS (157)..(324)
cgaggctgataccatgggggtcagagaggcagggcagggggtagcttccgctctgtccagggatggggaggccagctcaggaatccatttagaaccagtaaaagcctgagctggaagggcctttctagccttctgtttcccctctacaacctgcagatgggaaggccacgggacagaaaggaactgggcagaggtcactccccaccccatctagagggtccacatatgctaccttcaggggctgcaaggtggaggtggctggaggctcctgtcctggtgctggagcccttggtgctcagacctgcagcagctcccactccctgaggacacaattctcagcctgaccatcagaactcttagggtctcctagaccccatcggcggctctgaccctcttttatgaaagcacccaaagagcacctgaggcaaaggacagcatcccccaccctattgagctcctcattgcaggagctcaaagatgatgacctcagtcagaatgaaatggtatttaagcacaagccagtagctgttgccatcctggtcgacgcggccgcgaattcggatcctcgagagatctctttttttgggtttggtggggtatcttcatcatcgaatagatagttatatacatcatcgc

SEQ ID NO: 74 - DNA, 1747 bp, Homo sapiens
  CDS (290)..(1297)
ggtgcgctcgcaggtaccggtccggaattcccgggtcgacccacgcgtccggtaggctttcagttctgaaatggcaaataggtccttgatgctgagtttgaacaattacagtggtgagtaagaaattcacaggccaataagtagggtcgcccaccattggctcattctattcttgatcatctgaactaacggaggggagaagaagaataaataagccaaagtcccccagtcaaccagagaggagaaaagagaaaatgggcttgaagctagatctcctgccatcaatctgatgggattcaacgtggaagagatgtgtgaggcccacgcatggatccaaagaatcctgagtctccagaaccaccacatcattgagaataatcatattctgtaccttgggagaaaggaacatgacattttgtctcagcttcagaaaacttcaagtgtctccatcacagaaattatcagcccaggaaggacagagttagagattgaaggagcccgggctgacctcattgaggtggttatgaacattgaagatatgctttgtaaagtacaggaggaaatggcaaggaaaaaggagcgaggcctttggcgctcgttaggacagtggactattcagcaacaaaaaacccaagacgaaatgaaagaaaatatcatatttctgaaatgtcctgtgcctccaactcaagagcttctagatcaaaagaaacagtttgaaaaatgtggtttgcaggttctaaaggtggagaagatagacaatgaggtccttatggctgcctttcaaagaaagaagaaaatgatggaagaaaaactgcacaggcaacctgtgagccataggctgtttcagcaagtcccataccagttctgcaatgtggtatgcagagttggctttcaaagaatgtactcgacaccttgcgatccaaaatacggagctggcatatacttcaccaagaacctcaaaaacctggcagagaaggccaagaaaatctctgctgcagataagctgatctatgtgtttgaggctgaagtactcacaggcttcttctgccagggacatccgttaaatattgttcccccaccactgagtcctggagctatagatggtcatgacagtgtggttgacaatgtctccagccctgaaacctttgttatttttagtggcatgcaggctatacctcagtatttgtggacatgcacccaggaatatgtacagtcacaagattactcatcaggaccaatgagaccctttgcacagcatccttggaggggattcgcaagtggcagccctgttgattaatctctacatcattttaacagctggtatggccttaccttgggtgaactaaccaaataatgaccatcgatggctcaaagagtggcttgaatatatcccatgggttatctgtatggactgactgggttattgaaaggactagccacatactagcatcttagtgcctttatctgtctttatgtcttggggttggggtaggtagataccaaatgaaacactttcaggaccttccttcctcttgcagttgttctttaatctcctttactagaggagataaatattttgcatataatgaagaaatttttctagtatataacgcaggccttttattttctaaaatgatgatagtataaaaatgttaggataacagaatgattttagattttccagagaatattataaagtgctttaggtatgaaaataaatcatctttgtctgattaaaaaaaaaaaa

SEQ ID NO: 75 - DNA, 1058 bp, Homo sapiens
  CDS (333)..(773)
  misc_feature (1)...(1058): n = a,t,c or g
ggattgancccgttgnanngnccttgaagcccgtggtaccggtccggaattcccgggtcgacccacgcgtccgatctactgtgtctgggcgccaatcccgacgctgggcggagcgaggcccggtccctgcagcgggcgaaaggagcccgggcctggaggtttgcgtaccggtcgcctggtcccggcaccagcgccgcccagtgtggtttcccataaggaagctcttcttcctgcttggcttccacctttaacccttccacctgggagcgtcctctaacacattcagactacaagtccagacccaggagagcaaggcccagaaagaggtcaaaatggggtttatattttcaaaatctatgaatgaaagcatgaaaaatcaaaaggagttcatgcttatgaatgctcgacttcagctggaaaggcagctcatcatgcagagtgaaatgagggaaagacaaatggccatgcagattgcgtggtctcgggaattcctcaaatattttggaactttttttggccttgcagccatctctttaacagctggagcgattaaaaaaaagaagccagccttcctggtcccgattgttccattaagctttatcctcacctaccagtatgacttgggctatggaacccttttagaaagaatgaaaggtgaagctgaggacatactggaaacagaaaagagtaaattgcagctgccaagaggaatgatcacttttgaaagcattgaaaaagccagaaaggaacagagtagattcttcatagacaaatgaaatcatgcttaccaatcaaatctcaaagcacagaattattgacttgaatcatggtttttacagttttttaaatgctcaagattttgatattatagattttattttaaaatattaaaatgcaagatagttttgagctattttaaaataaaatttataacattcaacacaaaatcatggaggtgctctaaataacttttagatttcctctctctgtgtgcattaccaatatctaagtgtaaaattaataaattgttttgaattcctggaagcaaaaaaaaaaaa

SEQ ID NO: 76 - DNA, 1229 bp, Homo sapiens
  CDS (944)..(1216)
ttcggttcccggtgatttattttgatgcacgcacgagacggtatctagacttgcaggcacacacacgtctgtttttaggctcaacttcagaagcgggtgtgcagttccataggagttctgtattcgtgtccacgttgcacccaggaaaccttagcctgaacaccaatttgaactgtcagttggccctagcttcacacaaacaggagaaaaattgtttaacccctggagctgtcaagtaacctcttcagggtacaacttttattttacacgctgcaattaagggattgcaaaccccagcagagccaccggagccgcttggcagaatctccaacctgggggaaagctcaaagccaataaaactcccaaggcgctgcggcccgagggggtggctgcctcgagcggaggcgatcccttgttggggaaaaaatcctggagtgacttcgccggtcttggtttggtggttatgtttaattgcgaaagggataatgatttctaataaaattgcacggggccaaaagggcagctcggatcgtggtagcagggttaagggagaagtgctagaagctgggccccaggcgtggcgcttggaccttgagcagtgccgggctttgcagaaggcatctctggagaaaaggaagcggagaaagaaaggaaggggaatgtggcggaattggggtaagatagggggtgttggggcaggctcgcggcggagctcgaggaaggttttatcagttcgcaggctggagtgcgctctagaagcaagttcgcggcgtagagaggcctttatacctgtgtcggagcggccggcggcagattgtggtactggcgagcaattggactattgttgatatgctaatgaggcgattaggctgttggtaaagagccagagagtagctccacttgggtgcgagaccgagaggggcatatccgttcacgccgatccatgaaaatgctttggaaattgacggataatatcaagtacgaggactgcgaggtaagcgcgacgccggctcgatcatccgtgcggtcacaggctccgagcttgaccctccctctcctcctcctctccttgcaaccagctgcgaaacgcgggtgggacaaactttccccagcgcagcgcccgtccctcggattcgcccgaagaacgcgggggagaagctgcagagagaggacgtggatgctcccttctttggtttccgaattcctccacagggactagagactacgaa

SEQ ID NO: 77 - DNA, 1318 bp, Homo sapiens
  CDS (140)..(901)
ccttagggagacccaagctggctagcgtttaaacttaagcttggtaccgagctcggatccactagtccagtgtggtggaattcgctccagaaaactggaccagaagctgccagagctccgtggagtgggtgatcctgccatgatctcctctaatacctcctacctgtcctctagaggaagaatgattaaatggttctgggattcagctgaggagggctacaggacctaccacatggatgagtatgatgaggacaagaaccccagtggcatcattaacttgggcaccagtgagaacaaactctgctttgacctgctgtcctggcggctgagtcagcgcgacatgcagagggtggagccatccctgctgcagtatgctgactggaggggacatctgttcctccgggaggaagtggccaagttcctgtctttctactgcaagagcccagtacccctcagaccagagaatgtggttgtcctgaatggtggtgcctcgctcttctctgctctggccacggtgctgtgtgaggccggggaggctttcctgatccccaccccttactatggcgctatcacacagcacgtgtgtctctatggcaacatccggctggcctatgtctacctggacagtgaggtcactgggctagacacacgccccttccagctcacagtggagaagctggagatggccctgagagaagctcactctgagggtgtgaaggtcaaaggcctcatcctcatcagcccccagaaccctctgggtgatgtatactcccctgaagagctacaggagtacctggtatttgccaagaggcacaggctgcatgtgattgtggatgaggtctacatgctgtccgtgtttgagaagtctgttgggtaccgcagtgtcctaagcctggaaaggtgaggctccctgacacagctaactcccccagtccctattatcccacggagccctggccactttctggctcagcccacagcgatggcctgcccagagcaattccatttccacccagctggtcccactggtcctcagatctaatgagaagcagggacggttgggctagattagtgattttcaagttgttctgtggaatttctgagaactccaagaagaggcctcaggatcccttaagttagggctgagtggatggcaaattggcctctttgctgtttccttttcctccagagtcgctccagttttattcattcattcatttactcattcatgctctcattcactcagcacctctggagctccttacacacagagtgtgccaaacacctctggatatttaaatgttgggctttttcatta

SEQ ID NO: 78 - DNA, 1078 bp, Homo sapiens
  CDS (92)..(589)
  misc_feature (1)...(1078): n = a,t,c or g
attgatggcgacccagctgcctagcgtttaaacttaagcttggtaccgagctcggatccactagtccagtgtggtggaattcgtggggaaaatggcggtgtctacagtgttctcgacttcgtcgctgatgcttgctctgtcaaggcacagcctattgtctcctttgctcagtgtgacatcattcagacgcttctacagaggtgacagcccaacagattcccaaaaggacatgattgaaatccctttgcctccatggcaggagagaactgatgaatccatagaaaccaaaagagcccgcctgctctatgagagcagaaagaggggaatgttggaaaactgcattcttcttagtctttttgctaaagaacatctgcagcacatgacagaaaagcagctgaacctctatgaccgcctgattaacgagcctagtaatgactgggatatttactactgggccacagaagctaaaccagccccagaaatatttgaaaatgaagtcatggccctgctgagagactttgctaaaaacaaaaacaaagagcagagactgcgtgccccagatcttgagtacctctttgaaaagccacgttgagctgtgctccacggcctggcatgggggttcagtctgtggatggtaactacttatgatggacgttagccttgcttccggcttcttagatgcccagctgccctaccccagaccactggtcctgcctcaagtgatggacataaccctctcctaggacatacatgtaaatgcacaatgtgactcattctcatacttttttgttcagctctgagcctcaaaagtgatttgtcagcagcgtgggccatgcaggctttgcggggctggctatctctagagggcaagtctgccacgagaggggcacttgcagggcgagaggtttgtggctttgcttcattgccttcaggccccaagtgttattcaaaggaaaaggagggcagccagttgttgcgttggctgttacggggaaaggctttcccggcccttcccttgcaagtttccccgnccttcanttgggncccaggggtttttnttttgaagtggggaantttt

SEQ ID NO: 79 - DNA, 1330 bp, Homo sapiens
  CDS (104)..(976)
gattctctgaggcctgggaaagcagcattgaaaaaaaaggaggatggtgttattaaagagttaagcattgccatgcagctcctaagaaactgtgtttatcaaaatgaggaatgtaaagaagcaggatccactagtccagtgtggcggaattctgcactctctctggccttggattttgatggatgattcattgatgcaaatttctctgcagctcctttgtgtctatactgcaaattttccaaatggttgcagttctctttgttggtcaagttgtggacaacaccctgttcaagctacacatagaggagccgtgagcaactctctgatgctgtgtatcctaaagttggcttcccagatgccactggagaacaccacggttcagcagatggtttttatgcttctttcaaacctggccttgtcgcatgactgtaaaggagtaattcagaagagtaacttcttacagaacttcctctctctagcattgccaaaaggaggaaataaacatctaagtaatctgactattctttggttgaagttactcctgaatatatcatctggagaagatgggcaacaaatgattctgaggcttgatggctgtctagacttactaacagagatgagcaaatacaagcacaagagcagccctttattgcctcttcttatctttcataatgtttgcttcagtcctgcaaataaacccaagatcctggctaatgaaaaagtcattactgtgcttgctgcctgtctggaaagtgagaatcaaaatgctcagaggattggagcagctgccctttgggctctgatttacaattatcagaaggcaaaaacagctttgaaaagcccatcagtaaaaagaagagtggatgaagcatactccttagcaaagaaaactttcccaaactcagaagcaaaccctctaaatgcctattatttgaaatgtcttgaaaacctcgtgcagctccttaattcttcctgagtgccatgggatgctacaccttgaagctgacagtcatcaacaggggagctaaagttgaagccagctgtgtgtagcagctgttacctgaagacgtgctacctctctacaaagtgttgatccccttctttcccatgagagagagaactggtgatactccaacaccgtccagttgtggcagctctccagaagtaatagcagctgacaactttctgtgccttttcctttctgttgaaaaggcatagaaagttctgggaacataaacatttttacccttttctatgccatttattttgtaaaaatcctatttaacagttatttaataaaacaatatttttagaaactaaaaaaaaaaaa

SEQ ID NO: 80 - DNA, 1786 bp, Homo sapiens
  CDS (29)..(1231)
gcacgagccgaggccggctaaacgcagaatggggaagaatcctgtgcgtcctccacgagctcttccacctgtgccaagtcaagatgatattccacttagtcgtcctaagaaaaagaagcccagaacaaaaaacacaccagcaagtgcttctttggaaggccttgctcagactgctggtcgaaggccctctgagggcaatgagccatcaactaaagaactcaaagagcacccagaggctcctgttcaaagaagacagaaaaagacaaggctacctcttgaattggagacttcctccacccaaaagaagtcatctagttcatctttattacgaaatgaaaatggtattgatgcggagccagctgaggaggcagttattcaaaaacctcggaggaagacaaagaaaacccagccagcagaattacagtatgccaatgagctaggagtagaagatgaagacataatcactgatgagcaaactactgtggaacagcagtctgtattcactgcacccactggcattagccagcctgtaggcaaagtatttgtggaaaaaagccggagattccaggctgctgatcgttcagagttgataaagaccacagaaaacatagatgtgtcaatggacgtgaagccttcctggaccaccagagatgtggcacttacagtgcaccgggctttcaggatgattggtctcttttctcatggattcttggctggctgtgctgtgtggaatattgttgtgatatatgttctagcaggagatcagctatccaacctctcaaaccttctgcaacaatacaagaccctagcgtatccattccagagtcttctgtacttgcttttggctctgagtacaatttcagcttttgacaggattgactttgctaaaatatcagtagcaatccgaaattttttggccctggatcctacagctttagcatctttcttgtactttactgctcttatactatctctgagtcagcaaatgacaagtgacagaatccacctttacacaccttcttctgttaatggtagcctctgggaagcaggaattgaggaacagattctccagccatggattgtggtgaatctcgtggtggctcttctggttggattatcttggctatttttgtcttataggccaggcatggatcttagtgaagagttaatgttctcctcagaggtggaagaatatcctgataaagagaaagaaatcaaagcctcttcataataccagctcacctttggaggaataatgacccagtatttgtcccatttttgtttttaaatgtatttttataagatgtatacatgtgtatttgtaatagattttttgattatataatactgaaacatctctcaatattatgaaaaatgttaaaattgtgtttgctgtttatgtctaaacattaatttgtctagcattatcatcttaatgacaaagggaataatgaactagaaaccagcaagtgaaagtgtttatttcctattttctcaaaacagttgtatttataactattaccttaaaaagcactggtttagaaaaagccataacttaaatagtgttataaaatatatatcaggtttaaacataaatttagcgaatatggtagaagggaaaaaagccttcatttttgacctccccttactgaataaattgaaatatgaagtttgtcttttctgaaactggcttagtgattgagtatcatgtaataattataatataatttagcttgaaagatgctctacattatgaccaataaaaagggaatgtatgttttgtttg

SEQ ID NO: 81 - DNA, 2293 bp, Homo sapiens
  CDS (188)..(1288)
acccctgcggtaccggtccggaattcccgggtcgacccacgcgtccgccggagggatctggctgaggaggaagtggaggtgtcactggccccggcctttgccccaatcttgtgtgggcactgaagggggactacaggttcgagatacttcctcgcgtattgctaaaggaggagttgaccacaccaaaatgagtctacatggtgctagtgggggacatgagagatcaagagatagacgaaggtcaagtgacagatcacgagattcatctcatgaaagaacggagtctcagctcactccttgtattagaaatgtgacttctccaacacgacagcaccatgttgaacgagaaaaagatcacagttcctctcgtccaagcagtccgcgtcctcaaaaagcatccccaaatggttccattagcagtgctgggaacagcagcagaaacagtagtcagtcaagttcagatggtagctgtaagacagctggggagatggtgtttgtatatgaaaatgcaaaagaaggagctcggaatataagaacgtcagaacgagtgacactaatagtggataacactagatttgttgtagacccatccatttttactgcacagccaaatacaatgttgggcaggatgtttggatctggccgagaacataactttacacgacccaatgagaaaggagagtatgaggtggcagagggaattggttccactgtgtttcgagcgattctggattactataaaacaggaataatccgttgtcctgatggcatatctattcctgaactgagagaagcatgtgactatctttgtatctcttttgaatatagcactattaaatgtagagatctcagtgccctaatgcatgagttatcaaatgatggtgctcgtagacaatttgaattttatctggaagaaatgatcctccctctcatggtagctagtgcccagagtggggaacgggaatgtcatatagtggtgcttacagatgatgatgtggttgattgggatgaagaatatccaccacagatgggagaagaatattcacaaattatttatagcacaaaattatatagatttttcaagtatattgaaaacagagatgtggccaagtcagttttgaaggagaggggtcttaagaagattagattgggaatagaaggttatcctacctacaaagaaaaagtaaagaaaaggcctggaggcgcgcccagaagtgatctacaactatgtccaaagaccctttattcgaatgtcctggggagaaggaagaaggaaagagtcggcatgtagactttcagtgtgtaaagagtaaatctatcaccaatcttgcagcagctgcagcaggacattccccaggaccagctggtagtcatgcatccaactccacaagtggatgagctggatattctccctatccatcccccttctggcaacagtgacctcgatcctgatgcacagaatccaatgctgtgatgctgatcttccttgaaaccatagcatgctactcttcacagtgacgttgtactctcctcattctgcactgcaaggccactcttcttcattgtgagatgcacataacaatgtttaggatattgcagtgtaggcttttttaaagaccaaaggtagctgaatggtttttttttaaatgagtacaactctagcattttgaagttccagttgtaaatgtatttgtttaccagtaggtttgtgaaattggttctttgtatgggggatggtcctttttcacacagctaggtcttttcagaagtggtggaaattggcagctggggtactttcagtttggactgatattcatcacacctcagataaaatgcagagtaatatatagttgcactttataaatggtggttaaatggaaatgttcaagccattttatagttgtgatgcacaatataatttaagtgcttctgtcaaagtattcctccagtacaatttgtatagtttgctgcccttgatgagcaaaaagtatttatcttgggcttatctgaatgatcaggatgagatttaatgcccatatcttaccagttcagttatctccagagccatttcaccctttagagtgagtcacatgcagggagtgtgaatgtcagaggtggtttattatccagtctgccttacccttaatctgttcacagatatttatttactaatgctttttttttcttaagagttatgggataggaaaatgaagtgtttgctcttcatttactaaatgattgtaaacttgagtttttcatcaaaataaaattccattgttttaaaaaaaaaaaa

SEQ ID NO: 82 - DNA, 2563 bp, Homo sapiens
  CDS (110)..(2011)
atacccgtccggaattcccgggtcgacgatttcgtcgctggcccagcatcggagtgtggcagtgctgggctggccggcgggctgggctgcggcccgcgcgcggccggcgatgcaggggggcaactccggggtccgcaagcgcgaagaggagggcgacggggctggggctgtggctgcgccgccggccatcgactttcccgccgagggcccggaccccgaatatgacgaatctgatgttccagcagaaatccaggtgttaaaagaacccctacaacagccaaccttcccttttgcagttgcaaaccaactcttgctggtttctttgctggagcacttgagccacgtgcatgaaccaaacccacttcgttcaagacaggtgtttaagctactttgccagacgtttatcaaaatggggctgctgtcttctttcacttgtagtgacgagtttagctcattgagactacatcacaacagagctattactcacttaatgaggtctgctaaagagagagttcgtcaggatccttgtgaggatatttctcgtatccagaaaatcagatcaagggaagtagccttggaagcacaaacttcacgttacttaaatgaatttgaagaacttgccatcttaggaaaaggtggatacggaagagtatacaaggttgtcttccacgtcaggaataaattagatggtcagtattatgcaataaaaaaaatcctgattaagggtgcaactaaaacagtttgcatgaaggtcctacgggaagtgaaggtgctggcaggtcttcagcaccccaatattgttggctatcacaccgcgtggatagaacatgttcatgtgattcagccacgagcagacagagctgccattgagttgccatctctggaagtgctctccgaccaggaagaggacagagagcaatgtggtgttaaaaatgatgaaagtagcagctcatccattatctttgctgagcccaccccagaaaaagaaaaacgctttggagaatctgacactgaaaatcagaataacaagtcggtgaagtacaccaccaatttagtcataagagaatctggtgaacttgagtcgaccctggagctccaggaaaatggcttggctggtttgtctgccagttcaattgtggaacagcagctgccactcaggcgtaattcccacctagaggagagtttcacatccaccgaagaatcttccgaagaaaatgtcaactttttgggtcagacagaggcacagtaccacctgatgctgcacatccagatgcagctgtgtgagctctcgctgtgggattggatagtcgagagaaacaagcggggccgggagtatgtggacgagtctgcctgtccttatgttatggccaatgttgcaacaaaaatttttcaagaattggtagaaggtgtgttttacatacataacatgggaattgtgcaccgagatctgaagccaagaaatatttttcttcatggccctgatcagcaagtaaaaataggagactttggtctggcctgcacagacatcctacagaagaacacagactggaccaacagaaacgggaagagaacaccaacacatacgtccagagtgggtacttgtctgtacgcttcacccgaacagttggaaggatctgagtatgatgccaagtcagatatgtacagcttgggtgtggtcctgctagagctctttcagccgtttggaacagaaatggagcgagcagaagttctaacaggtttaagaactggtcagttgccggaatccctccgtaaaaggtgtccagtgcaagccaagtatatccagcacttaacgagaaggaactcatcgcagagaccatctgccattcagctgctgcagagtgaacttttccaaaattctggaaatgttaacctcaccctacagatgaagataatagagcaagaaaaagaaattgcagaactaaagaagcagctaaacctcctttctcaagacaaaggggtgagggatgacggaaaggatgggggcgtgggatgaaagtggacttaacttttaaggtagttaactggaatgtaaatttttaatctttattagggtatagttggtacaatgcttcgttgtatttagtaagcctttacaagacttgttaaagatgtcagagtgccccaagctgccgttccttcccttcctgccccacaagctccttttcctgaatttcctacctaaatattaaccatatgcctagtctctgaaactaaaaacttggacctcatcctcaattattttctcctttcaactctgttgaccctctgtctggtcttcctctagaaggttctaccgcaggaaattgatgtgtgctccctgccctcgtcactggcccaagcccgggcctggcacatactcactggactgttccagttttgacagctgccagtcttcctggcccctttcacactgcagctgaagttcattacctgaaggacgcctcatcatttcattccttggctccaaaccttctgctgcctctaagataaaagctcaactttcttaacaagtggtacagtgtggcaacttccaaaccttttt

SEQ ID NO: 83 - DNA, 1963 bp, Homo sapiens
  CDS (105)..(1064)
  misc_feature (1)...(1963): n = a,t,c or g
cgatacgacttttttttttttttttttttttccggtaggtcgccagctgaggcggtttgtaagttttgggtcgcagtatgctagaattttgaggctcccttctgatgaaaattgagctgtccatgcagccatggaacccgggttacagcagtgagggggccacggctcaagaaacttacacatgtccaaaaatgattgagatggagcaggcggaggcccagcttgctgagttagacctgctagccagtatgttccctggtgagaatgagctcatagtgaatgaccagctggctgtagcagaactgaaagattgtattgaaaagaagacaatggaggggcgatcttcaaaagtctactttactatcaatatgaacctggatgtatctgacgaaaaaatggcgatgttttctctggcctgtattcttccctttaaatacccggcagttctgcctgaaattactgtcagatcagtattattgagtagatcccagcagactcagctgaacacagatctgactgcattcctgcaaaaacattgtcatggagatgtttgtatactgaatgccacagagtgggttagagaacacgcctctggctatgtcagcagagatacttcatcttcacccaccacaggaagcacagtccagtcagttgacctcatcttcacgagactctggatctacagccatcatatctataacaaatgcaaaagaaagaatattctagagtgggcaaaggagctttccctgtctgggtttagcatgcctggaaaacctggtgttgtttgtgtggaaggcccacaaagtgcctgtgaagaattctggtcaagactcagaaaattaaactggaagagaattttaattcgccatcgagaagacattccttttgatggtacaaatgatgaaacggaaagacaaaggaaattttccatttttgaagaaaaagtgttcagtgttaatggagccaggggaaaccacatggactttggtcagctctatcagttcttaaacaccaaaggatgtggggatgttttccagatgttctttggtgtagaaggacaatgacatcaagagtagttgaaagtatcttgccactgttggccttttgatttttttttcccactttttcttgaaagattaagtaattttattttagttccattctagaatgttggggagtggggcacaagaaaaaatagtatagctgaaatgcatctgttaaaaatgtcatgattgaaagcagaactgagtttcaaattacaaccttaaaattgttgttagatatttcttcacatatcagctgcccattttgaaaaagaaattatcccataaaggtaatgttggtgctccaatttgccagccattcccaacccccttctcccttacctgccttcactaaagaacccagaaaagctaattgctcccctttcagcctctgttgcaactaacaactctcagtggcctcaggacacagctttggccttgggaattctgggaaaacttttacttcctgattaaagatacatatgcagctaggccacctcctcccccccttactgccataaacaccaaagtgatgactggagctggaggagttatttgaaccacgacggaagggccaagagaaccacgaagatgccagttgccacattgttgagctgctgacccaacaccagccattgcctgtctctaaacatcttatgaaataaaaccagttttgtttaatttctaggctttttttttaaatagacggagtcttgctctgtcgcccgggctagagtgcaatggtgcaacctccgctcactgcaacctccgnctcccaagttcaagcgattctcctgcctcagcctcccaagtagctgagattacaggngcccgcaccatgcctggctaatttttgtgttttttagtagagacagggtgtcaccatttttggccaggctggtcttgnaactactgnacct

SEQ ID NO: 84 - DNA, 3440 bp, Homo sapiens
  CDS (88)..(2319)
aagctggtacgcctgcaggtaccggtccggaattcccgggtcgacccacgcgtccgtgcagccgccgagccggacgtgtccgcgaagatggcgggccggagcatgcaagcggcaagatgtcctacagatgaattatctttaaccaattgtgcagttgtgaatgaaaaggatttccagtctggccagcatgtgattgtgaggacctctcccaatcacaggtacacatttacactgaagacacatccatcggtggttccagggagcattgcattcagtttacctcagagaaaatgggctgggctttctattgggcaagaaatagaagtctccttatatacatttgacaaagccaaacagtgtattggcacaatgaccatcgagattgatttcctgcagaaaaaaagcattgactccaacccttatgacaccgacaagatggcagcagaatttattcagcaattcaacaaccaggccttctcagtgggacaacagcttgtctttagcttcaatgaaaagctttttggcttactggtgaaggacattgaagccatggatcctagcatcctgaagggagagcctgcgacagggaaaaggcagaagattgaagtaggactggttgttggaaacagtcaagttgcatttgaaaaagcagaaaattcgtcacttaatcttattggcaaagctaaaaccaaggaaaatcgccaatcaattatcaatcctgactggaactttgaaaaaatgggaataggaggtctagacaaggaattttcagatattttccgacgagcatttgcttcccgagtatttcctccagagattgtggagcagatgggttgtaaacatgttaaaggcatcctgttatatggacccccaggttgtggtaagactctcttggctcgacagattggcaagatgttgaatgcaagagagcccaaagtggtcaatgggccagaaatccttaacaaatatgtgggagaatcagaggctaacattcgcaaactttttgctgatgctgaagaggagcaaaggaggcttggtgctaacagtggtttgcacatcatcatctttgatgaaattgatgccatctgcaagcagagagggagcatggctggtagcacgggagttcatgacactgttgtcaaccagttgctgtccaaaattgatggcgtggagcagctaaacaacatcctagtcattggaatgaccaatagaccagatctgatagatgaggctcttcttagacctggaagactggaagttaaaatggagataggcttgccagatgagaaaggccgactacagattcttcacatccacacagcaagaatgagagggcatcagttactctctgctgatgtagacattaaagaactggccgtggagaccaagaatttcagtggtgctgaattggagggtctggtgcgagcagcccagtccactgctatgaatagacacataaaggccagtactaaagtggaagtggacatggagaaagcagaaagcctgcaagtgacgagaggagacttccttgcttctttggagaatgatatcaaaccagcctttggcacaaaccaagaagattatgcaagttacattatgaacggtatcatcaaatggggtgacccagttactcgagttctagatgatggggagctgctggtgcagcagactaagaacagtgaccgcacaccattggtcagcgtgcttctggaaggccctcctcacagtgggaagactgctttagctgcaaaaattgcagaggaatccaacttcccgttcatcaagatctgttctcctgataaaatgattggcttttctgaaacagccaaatgtcaggccatgaagaagatctttgatgatgcgtacaaatcccagctcagttgtgtggttgtggatgacattgagagattgcttgattacgtccctattggccctcgattttcaaatcttgtattacaggctcttctcgttttactgaaaaaggcacctcctcagggccgcaagcttcttatcattgggaccactagccgcaaagatgtccttcaggagatggaaatgcttaacgctttcagcaccaccatccacgtgcccaacattgccacaggagagcagctgttggaagctttggagcttttgggcaacttcaaggataaggaacgcaccacaattgcacagcaagtcaaagggaagaaagtctggataggaatcaagaagttactaatgctgatcgagatgtccctacagatggatcctgaataccgtgtgagaaaattcttggccctcttaagagaagaaggagctagcccccttgattttgattgaaaatgaactatttgaaacacacagtgaccaagggaagtgaccaaggtgaagatggcctaggatcttcactgtcttactcaagatactggactaagtggaacgttctctaccttcaacatgtgctcgctctgcatgattagtgcaataaaactcccttccttatgcatactgagatagcttagtgtctcgtggaaggtgtcaatttggtttagaatgctgcgcttaccttcccatgcaggctaaagtgattccttcttgctcagtccctctgggtgggaaccatccagtacttgtggacactacacgtttcaacctctctactagcaccatcacccttgaaaactctcagtcagtgtcatgaatgttgcatgacaacagttggccgattagaaggcagactttctacatgcaaatctggcttagtaaatcgaggtgtgggccagagatcctctgacagctgtcctgagctaacactaaaagtcactgggtatttggttaaaggtctcccacaagactggtattctctttgcctgaagaaacaaggcattgaatctctaaaatgctgttctcaatcattgtcagagatgttttcaagttgcagtcagaagatctttcttaatagaaagtcagatgactaccgtgttggttgtgacttccccttaagtataactaatttgctctgtggtaagagatatgctcattattaccacttagaagatgttgttaaaaacatgtgaaagataggtatggaaaaagcatacacccccaaacagaaaggagttattaaagtaatttacaaacctctcagcactaattagtgtccaactccaagtgggtcaattccttagtataatattaaggcttactagtatcactgctttttccttagcttaatgacttacttagaatttatcctttattttaaatgatctgtactatctagtgtctaaaacactattctccagaaaaatcaatcattttctagccctctccctcagtcctttattgtccattccaatacattgaacacatttcctttacccctccacaccacttcttccaaaaggaagcacccggttggagtccttttgaggggtgatttggtcttacaactggac

SEQ ID NO: 85 - DNA, 1350 bp, Homo sapiens
  CDS (478)..(1350)
atgctggacacaggttctgagcacctgaaccggatactgaaggctctgccagccctccagagcgctggcagtgaaggacagaacggctccgcagaaagcctcggagaaggcgggacccgggacagcgacagagcacggagaaagctccgcgggggaaacaaggaaatccccaccttctatccctgtctcgtggtgcggtcccctgtgacggcctcagacctgcggggaacccaggactttgccgcctaccacggtctcagccttattctcgagcctctgggcgcctgcaaccggctgtctgtctgtgtgcctgttcactctcccccggggatgcgggtctctccgaggtcgccttctttgcgcactttggttattgatcctgctgaaccggccggagcgcagcggctgcgcttctctgggaaagaacggagtggggaggctggctccgccgtagaggggttggcagtggcggtcagcatgggcgatgggggcgccgagcgcgaccggggccccgcgcgccgggcggagtctggtggcggcggtgggcgctgcggagaccgcagcggagcgggggacttgcgagctgatggcggtggccacagcccaacggaggtggccgggacctcagcctccagtcccgcaggctccagggagagtggagccgacagcgacgggcagcccgggcccggcgaggcagaccactgccgccgcatactggtgcgagatgccaaagggacaattcgggaaattgtcctgcctaagggcctggacctggaccggcccaagcggacacgtacatccttcactgccgagcagctgtaccgcctggagatggagttccagcgctgccagtatgtggtgggccgcgagcgcactgagctggcccgccagctgaacctctccgagacccaggtgaaggtctggttccagaaccgccgcaccaagcagaagaaagaccagagcagagacctggagaagcgggcgtcctcctcagcctccgaggcctttgccacctccaacattctgcggctgctggagcagggccggctgctctctgtgcccagggcccctagcctcctggcgctgacccctagcctgccaggcctacctgccagccacaggggcacctccttaggtgaccccaggaactcctccccacgcctcaacccgctgtcctcggcctcagcgtcccccccactgccgccccctctgccagctgtctgcttttcctcggccccgctcctggatctgcctgccggctacgaactgggttcctcggccttcgagccatacagctggctagaacggaaagtgggcagcgccagcagctgcaagaaagctaacacttaa

SEQ ID NO: 86 - DNA, 1076 bp, Homo sapiens
  CDS (291)..(572)
  misc_feature (1)...(1076): n = a,t,c or g
gcacgaggcctagggcttgcaccagctcctcctcctgtacaggaacaggatgcttccatcaggtgagaatgttctccatacctcaaatctcatttcctagcttggagccttttcctgtttttgtaatcacacgggacaagttttctttttagacagagttattgcctctctgcagcagatctggtcccaagccccagtcaggagatcccctcctgcagctggctcagcaagccaggcccaggctgtctggagaacgcctggagacagcaccctctctgcttctctccaggatggcatgtgtcatctcaggctgggcactcagcagaggtgccaggacctggacctgggccacacctactggcccagtccacagagcacagccagcaatccgcagcctttctgctgaaggagcgcttactcgcctgaaggaagagaaatggccaggacggtatattctacctaaccacctcaccccaccgtttctttacaaacatcttggttcagtacctcccagtcattggagaagtcctttaatatcacatagtgtaaatatacttgcacttaattggagataaaggctgttccaaaagcaaatttgaattcactctgtgttgggttgaatttgtaaaccacagctcagaaccagtctgtgacgctccgcagatgtcggtggctatagagagaggtggctagggaaggcgatgatccgcggatgggtggggaactgaggaggccaagtcagctttgccaggccaccatgtgccgccaggagctgggcagcctgaggagagcaaagatgggccgggagcctccacctcaactgacaggagactgctcaccacatgccctccgagttcccacaggagaatgcacgtgcgctgggcaaggtgccaccctcggctcgggacggcagccttggcgtctggctacgggcgccgctttcacaggggtggctggcccgcctagagcttttgtggtcacagagaggaggggccaacaggagaaactccacaaaacaggcggaggtctgagcaggccagcagcaccgaatccttctgagagtnnnnggggagaat

SEQ ID NO: 87 - DNA, 1275 bp, Homo sapiens
  CDS (74)..(1165)
  misc_feature (1)...(1275): n = a,t,c or g
agagtnnattgancnctctgcccaggctgcaggaattcggcacgagcccggtctgacagccactccagaggccatgcttcgtttcttgccagatttggctttcagcttcctgttaattctggctttgggccaggcagtccaatttcaagaatatgtctttctccaatttctgggcttagataaggcgccttcaccccagaagttccaacctgtgccttatatcttgaagaaaattttccaggatcgcgaggcagcagcgaccactggggtctcccgagacttatgctacgtaaaggagctgggcgtccgcgggaatgtacttcgctttctcccagaccaaggtttctttctttacccaaagaaaatttcccaagcttcctcctgcctgcagaagctcctctactttaacctgtctgccatcaaagaaagggaacagttgacattggcccagctgggcctggacttggggcccaattcttactataacctgggaccagagctggaactggctctgttcctggttcaggagcctcatgtgtggggccagaccaaccctaagccaggtaaaatgtttgtgttgcggtcagtcccatggccacaaggtgctgttcacttcaacctgctggatgtagctaaggattggaatgacaacccccggaaaaatttcgggttattcctggagatactggtcaaagaagatagagactcaggggtgaattttcagcctgaagacacctgtgccagactaagatgctcccttcatgcttccctgctggtggtgactctcaaccctgatcagtgccacccttctcggaaaaggagagcagccatccctgtccccaagctttcttgtaagaacctctgccaccgtcaccagctattcattaacttccgggacctgggttggcacaagtggatcattgcccccaaggggttcatggcaaattactgccatggagagtgtcccttctcactgaccatctctctcaacagctccaattatgctttcatgcaagccctgatgcatgccgttgacccagagatcccccaggctgtgtgtatccccaccaagctgtctcccatttccatgctctaccaggacaataatgacaatgtcattctacgacattatgaagacatggtagtcgatgaatgtgggtgtgggtaggatgtcagaaatgggaatagaaggagtgttcttagggtaaatcttttaataaaactacctatctggtttatgaccacttagatcgaaatgtcaataaaaaaaaaaaa

SEQ ID NO: 88 - DNA, 1409 bp, Homo sapiens
  CDS (87)..(878)
atttggccctcgaggccaagaattcggcacgagcggagtgcaagtgagcttctcggctgccccgcgggccggggtgcggagccgacatgcgcccgcttctcggcctccttctggtcttcgccggctgcaccttcgccttgtacttgctgtcgacgcgactgccccgcgggcggagactgggctccaccgaggaggctggaggcaggtcgctgtggttcccctccgacctggcagagctgcgggagctctctgaggtccttcgagagtaccggaaggagcaccaggcctacgtgttcctgctcttctgcggcgcctacctctacaaacagggctttgccatccccggctccagcttcctgaatgttttagctggtgccttgtttgggccatggctggggcttctgctgtgctgtgtgttgacctcggtgggtgccacatgctgctacctgctctccagtatttttggcaaacagttggtggtgtcctactttcctgataaagtggccctgctgcagagaaaggtggaggagaacagaaacagcttgttttttttcttattgtttttgagacttttccccatgacaccaaactggttcttgaacctctcggccccaattctgaacattcccatcgtgcagttcttcttctcagttcttatcggtttgatcccatataatttcatctgtgtgcagacagggtccatcctgtcaaccctaacctctctggatgctcttttctcctgggacactgtctttaagctgttggccattgccatggtggcattaattcctggaaccctcattaaaaaatttagtcagaaacatctgcaattgaatgaaacaagtactgctaatcatatacacagtagaaaagacacatgatctggattttctgtttgccacatccctggactcagttgcttatttgtgtaatggatgtggtcctctaaagcccctcattgtttttgattgccttctataggtgatgtggacactgtgcatcaatgtgcagtgtcttttcagaaaggacactctgctcttgaaggtgtattacatcaggttttcaaaccagccctggtgtagcagacactgcaacagatgcctcctagaaaatgctgtttgtggccgggcgcggtggctcacgcctgtaatcccagcactttgggaggccgaggccggtgattcacaaggtcaggagttcaagaccagcctggccaagatggtgaaatcctgtctctaataaaaatacaaaaattagccaggcgtggtggcaggcacctgtaatcccagctactcgggaggctgaggcaggagaattgcttgaaccaaggtggcagaggttgcagtaagccaagatcacaccactgcactccagcctgggtgatagagtgagacactgtcttgacaaaa

SEQ ID NO: 89 - DNA, 1035 bp, Homo sapiens
  CDS (199)..(876)
atttggccctcgaggccaagaattcggcacgagcgctgcacagcctgcggcgcaacggagggcggaccgcagtcgagtctgcagagtgttgggtctgtagccagcaaattacttcatcatctagattatccattcagttgatcctaattagcaaggataacaagaatcgtccgcactaaagtcccctgcagcgtgaccatgtcgagaccccggaagaggctggctgggacttctggttcagacaagggactatcaggaaaacgcaccaaaactgagaactcaggtgaggcattagctaaagtggaggactccaaccctcagaagacttcagccactaaaaactgtttgaagaatctaagcagccactggctgatgaagtcagagccagagagccgcctagagaaaggtgtagatgtgaagttcagcattgaggatctcaaagcacagcccaaacagacaacatgctgggatggtgttcgtaactaccaggctcggaacttccttagagccatgaagctgggagaagaagccttcttctaccatagcaactgcaaagagccaggcatcgcaggactcatgaagatcgtgaaagaggcttacccagaccacacacagtttgagaaaaacaatccccattatgacccatctagcaaagaggacaaccctaagtggtccatggtggatgtacagtttgttcggatgatgaaacgtttcattcccctggctgagctcaaatcctatcatcaagctcacaaagctactggtggccccttaaaaaatatggttctcttcactcgccagagattatcaatccagcccctgacccaggaagagtttgattttgttttgagcctggaggaaaaggaaccaagttaactgagatactgctgctggaatgggcgagacattgctgcaaagaagtcaagcttttttcagacaaaaggtgtgaaaaaagcttgcttggtatgcttacctgggcttgtgtacctcagtggtttttgtgtacttttttcaataaaatatcaaagttgaaaa

SEQ ID NO: 90 - DNA, 912 bp, Homo sapiens
  CDS (199)..(753)
atttggccctcgaggccaagaattcggcacgagcgctgcacagcctgcggcgcaacggagggcggaccgcagtcgagtctgcagagtgttgggtctgtagccagcaaattacttcatcatctagattatccattcagttgatcctaattagcaaggataacaagaatcgtccgcactaaagtcccctgcagcgtgaccatgtcgagaccccggaagaggctggctgggacttctggttcagacaagggactatcaggaaaacgcaccaaaactgagaactcaggtgaggcattagctaaagtggaggactccaaccctcagaagacttcagccactaaaaactgtttgaagaatctaagcagccactggctgatgaagtcagagccagagagccgcctagagaaaggtgtagatgtgaagttcagcattgaggatctcaaagcacagcccaaacagacaacatgctgggatggtgttcgtaactaccaggctcggaacttccttagagccatgaagctgggagaagaagccttcttctaccatagcaactgcaaagagccaggcatcgcaggactcatgaagatcgtgaaagaggcttacccagaccacacacagtttgagaaaaacaatccccattatgacccatctagcaaagaggacaaccctaagtggtccatgagattatcaatccagcccctgacccaggaagagtttgattttgttttgagcctggaggaaaaggaaccaagttaactgagatactgctgctggaatgggcgagacattgctgcaaagaagtcaagcttttttcagacaaaaggtgtgaaaaaagcttgcttggtatgcttacctgggcttgtgtacctcagtggtttttgtgtacttttttcaataaaatatcaaagttgaaaa

SEQ ID NO: 91 - DNA, 1747 bp, Homo sapiens
  CDS (416)..(1348)
agtctggatgggaagacaatcaaccactgagtctgacagcagagatacagatatgctcagaatattcaggaaacacagatgagatctagaagataccatgtggcatagggtgatgaggaaggccttcaagaaaggcctgtcaggaggtgacagctgaactgagtccttatccacccagagtgctgtgcctttaaggtccactgggggcgtgatgtcagccgccctccggcacttggagaggtgagcgcggcagcccgcgcagccggtgactgggggactgggtttggagtaggacctgcggcgtgctcgagactccgacttcggtcttgcggcgcgctcgcgcccgcgggccatgccccactgactctaagtgggcactgccccggctccgggagggcgagaccgagcgccggccatgggaagcttccagctggaagactttgcggcgggctggatcggaggtgcagccagtgtcatcgtcggccaccctctggacacagtcaagactcgcctgcaggctggcgttggctacggaaacaccctcagctgcatccgcgtggtgtacaggagggagagtatgttcggcttcttcaagggcatgtccttccccctcgccagcattgccgtctacaactccgtggtgtttggggtcttcagtaacacgcagcggttcctcagccagcaccgctgcggggagccagaggccagtcctccccgcacgctgtcagacctgctcctggccagcatggtggccggcgtggtctctgtcgggctgggagggcccgtggacctcatcaagatccggttgcagatgcagacacaaccctttcgggacgccaacctcggtttgaagtccagggcagtggctcctgcggagcagccagcataccaggggccagtgcactgcattacaaccattgtgaggaatgagggcctggcggggctataccggggggccagtgccatgctgctgagggatgtcccaggctattgcctctacttcatcccctacgtgttcctgagtgagtggatcacacctgaggcctgcacaggccccagcccctgtgctgtgtggctggcgggcggcatggcaggagcaatttcttgggggacagcgactcctatggatgtcgtgaaaagtcgactccaagctgatggggtttatttaaacaaatataaaggtgtcctggactgtatctcccagagttaccagaaggaaggtcttaaagtgtttttcagaggcatcactgtgaacgcggtgcggggcttccccatgagtgcggccatgttccttgggtacgagctgtcgctgcaggctatccgcggggaccacgcagtgacgagcccataagcgccagggtctcatcccattaacaggtcaatgctaaaagtgtctgcagaacccatgatgtgaatttactgaagagaaagactctccaccaggtgggctttcagccaggcaggctgtcctcagaacctcttccttccttcacaattacaagcattctcatccccaccccggctggggcagcggagcttctgccttggagggattcaactgaccattggtcaactgatcaccaactattccagctttggacctgcacctggtaacaaacaaacgaacagaacaaaacaaaactggagtaaaatagaccctccccccatggccattgtaaactcactgtgaattcatggaagagctggagttggctctaagtttcaaaataaaagcattaaaaacctc

SEQ ID NO: 92 - DNA, 2594 bp, Homo sapiens
  CDS (281)..(1537)
atggcctgggtgcccactagactcacggaggggcagctctgctggaaaccaccctgccgcagccctgcacataccccagctccttctgcagccaggcattctcctcctccttctccttctcctccagcagttcagcagtttcctcttcacagtgcccagctcctgctgggcttctcacttgacattgttggccactgccaccgcagtctgcagatccggctggaaccacctccattccatggtcttcttctgaaaatgccagagcccaaccctgtgtcagatgcctgccagggctggtgcctgggcagagactccagagcccctgtatcagtcaccaagaaagaacagccagcagtgcttagtgaggccctgctttcacggtgtcttgctgctaggaaaaggcactggtggaaattacaccttcaggctctggcagggaccctggaggtgccgccggcctcagcccatggcccaaaggtacgatgagctgccgcactacccaggcatcgcggatggccccgcagccctggctggcttcccagaggcagtgcccgcggcaccagggccctatggccctcaccggcctccccagcccctacccccaggcttggacagcgacggcctgaagagggacaaggatgagatctatggacacccgctcttccccctcttggccctggtctttgagaaatgtgaactggctacatgctctccccgtgatggggccggagctgggctggggacaccccgcggcggcgacgtctgctcctctgattccttcaacgaggacaacactgccttcgccaagcaggtttgctctgagaggcccttctcctccaacccagaactggacaatctgatgatccaggcaatccaagtgctgcggttccacctgctagagctggagaagggaaagatgcccatcgacctggtcatcgaggatcgggatggcggctgcagggaggacttcgaggactacccagcctcctgccccagcctcccagaccagaataatatatggattcgagaccatgaggatagcgggtctgtacatttggggaccccaggtccatccagcggggggctggcctcccagagtggggacaactccagtgaccaaggagtcgggctggacaccagcgtggcctctcccagttctggtggagaagatgaggacttggaccaggagccacggcgaaacaagaagagggggatcttccccaaggtggccaccaacatcatgcgagcctggttgttccagcacctctcacacccgtacccctcggaggagcagaagaaacagctggcgcaggacacggggcttaccatcctgcaagtcaacaactggttcattaatgcccggagacgcatcgtgcaacctatgatcgatcaatccaaccgcacagggcagggtgcagccttcagcccagagggccagcccatcgggggctataccgagacagagccacacgtggccttccgggctccagcatcagtggggatgagtttgaactcggaaggagaatggcattatctatagaggctgatgcgggagagacccagcctccggctgtgacccccagcctcacacctggctctggttcccgcctggtcctctggcttcaggatcccacctccaaaggcctctccgctcaacgcctacctccctagggccctgctgggacatgggggcctgagtgcccacccaaggggctctcaaggacaccggcaaggcctccaggctctgagccccgcttctgccttcacctctgcctgggacccgagctgggctcctgggccttggtccccagaagatggcagctagggcctcgccgcgaggacagagaagggacagggtggctgggcagtcagggaaggagggtcgcccggatccgacattttggagagattctttcaccctcctgtcccccccacctcccttctctaatttcttctttttttaatgataaagtcttaaaacacagaaaaaaaaaagacttcagagaattaggtagatgaagcactttatacagtatatatcttcagcttaaatttgttttgagtattttttttatttttaagtaggcaaagatttaaaattttttatttttagtaaatgtttgaagcaaactaaaaagacgtgggcaatatttaccaaaacaaaacagaacccaaaaaattgtacatcttgatcttagcaaatatccttattgtagagacacttaataaagagatggtattttaatatctgcagttctgaggtagggtgtaacttagttctacattgtgatttaggaatttttaaacctttcttcttcaggggagaagtgacccaggcctcgagtttagtgctaaagccactagtgtacttatgctgtcacctaaccaccacatgcgacatggaggcagaggctaaatataggggctttcttaagaaagtgagaggaaattagcaagcattattagtgtttgactactgctatcaagtgaattcaaaggaaacaggtttttatgccatatttaagttacagaaaccaggcatgcttagaatagtttctaaggtgacagagtgagactccatctcaaaaaaaaaa

SEQ ID NO: 93 - DNA, 1008 bp, Homo sapiens
  CDS (186)..(965)
ctgttgcacacacacagtggcacacatgccaaagactctctcagctgacccacagatccattctcaagtatttactgatagacactcatgcgtgccaagtcctcatcctcaaacatacacatgcctctctttctctcccgtcttgccaggagtgtttcccctcctccatcccctctgcctcccatatggtgtcccaccctcaccccccacccagcccaaggtggggacagacacctgaggggctgccagctgcttccccgtgtgggcccgggccgcgctcatgcttctcgtccatcctgcccacaggggactcgtgggggatgttagcgtgcctgtgcacggtgctctggcacctccctgcagtgccagctctcaatcgcacaggggacccagggcctggcccctccatccagaaaacctatgaccccacccgctacctggagcaccaactccgcagcttggctgggacctatctgaactacctgggcccccctttcaacgagccagacttcaaccctccccgcctgggggcagagactctgcccagggccactgttgacttggaggtgtggcgaagcctcaatgacaaactgcggctgacccagaactacgaggcctacagccaccttctgtgttacttgcgtggcctcaaccgtcaggctgccactgctgagctgcgccgcagcctggcccacttctgcaccagcctccagggcctgctgggcagcattgcgggcgtcatggcagctctgggctacccactgccccagccgctgcctgggactgaacccacttggactcctggccctgcccacagtgacttcctccagaagatggacgacttctggctgctgaaggagctgcagacctggctgtggcgctcggccaaggacttcaaccggctcaagaagaagatgcagcctccagcagctgcagtcaccctgcacctgggggctcatggcttctgacttctgaccttctcctcttcgctcccccttcaaaccctgc

SEQ ID NO: 94 - DNA, 1938 bp, Homo sapiens
  CDS (1177)..(1572)
ttttttttttgccacatttcacatttgagaacccagaattcagctcctgttatacaaaatttgtaaaaatttattgccttggcgtaaagtgacaatcatgccttggcgtaaagtgaaaatcttcacagaagggtatgctttgtgtcaccaaatgggggtgcagctgtgtgatatctgtgcagtttgtgataaaattaaaaattttctgtgaaagattcttaactggaaattggaagggaaaacaagaagaaacaatgtaatgtagcagtggaaacaaaattctcacaatgaatagcagtctttccagcttctttgacacggatttcctcatcatcaatggcggctctcctgaactagggatgagtgtgaatctccatttgaggaaggggaagaagagcttggagggtgacagcctccccctgagagagccagttgtgttcatgattttggttccttcttcctcctaattaagcatctgcccaggagcccaggagccagggcttagcttcctggctattttcaactcttgttagtgaagaccagcattgccagcccactgaccccagtagggtcacccctgcccactgagaaccagccaccccctcaccccccaccagagttccctgcaggaaccagctgcctctagtgggagacagagtaaaggcagaggggcccctcctttctcaggtgccctgtgctagtgttgggcagctctaaggttggaaactgctttccccactgagctgaaggctgcctcctgggatatgcacccggcggtccccattcagccccgggagccactcgggtcaagtctggctgtatcccgagggcgaccaggacagccctgtgagcggcagttcccctcctggaacactgcttcaccagcccatcaccccagccctgtggactgctcctccctcacctggtttctacgtggacccaccattcttgccctcctggacccctaaactggcccatgtgtttagttgcagaatgggggccaggaccggacatgtggtttgattgctaaggacctagcagaggctcatcatgtggtagactctgtattttatcgtgtgtgtatgtgtgtgtatatttacacacacatacacacaagatagatatatatattaagtggacactgtatgtgtatatatacacatacatatattatagatgtatgcatatatgtatatatgtacacatatatgtatatgtgcatatagaggtatacatatagatgtatatctatacatgtgtatatatatacatatatggatacatacatatttatgtgtacacatatatgtatatgtgtatatatgtacacatatatgtatgtgtatacatacatatgtatatgtgtacacatatatgtatgtgtatacatacatatgtttatgcgtatacatatgtttatgtgtacacatatatctatgtgtatacatacatatgtatatgtgtacacatatatgtatgtgtatacatacatacgtacacatgtgcatatgtgtatacatacatatgtacacatgtgtatatgtgtatacatacacatgtgtatatatgtattaagtggacattgtacttctgatgtggatacggtgatgaagctacaaagtcacactatcctatggccttgtgtttagatggagcaaagcaactaaaaattgcctcaacaatcctgcaactccagatcttcaatttacactgaacaccgtacgcaattgttctgggcccatctttccaatctattgaaataatagggactgcatcccctgcttccatcccctgttcattccttccatggtctacccactgggagggagcgctcaagggggaaactagaagttttaaaaagacaggaaagtctagagaaagaactagtcaaaaagcgaaaaatcctcatctgcccaattattgtttttttttcctacc

SEQ ID NO: 95 - DNA, 997 bp, Homo sapiens
  CDS (125)..(868)
accccccaacggcaggtgcagcttgaagcctctttccctctgggaacatcctcgcctgacgggagctgacacgggttctttctcattgggctgtgagcggggcctgcagaggcaggggcaggacatgaggggtgaggaagaggtggccccagtgaccctctgcagcctctacacttatgatcagggagattccctggacctcctgggtcctattgggatccttcaggaggggcgggacccagggacccagggaccacaggagaaagagaagcaaatgccagcctcccccatgaacactgatgctcatcttgacatcaatttcaaggagggcttgaagaaggaaagaagttacaccgggcagtttgaagcgaatgtgagggatgaggagaggcagtgtgggtgcggtgtagttcctgacagcctcctcatgaaggtgctgagccagcgcctggaccagcaggactgcatccagaaaggctgggtgctacacggcgtcccgcgggacctcgaccaggcacacctgctgaaccgcctgggctacaatcccaacagggtgtttttcctgaatgtgccatttgattccatcatggagcggctgactctgagaagaattgatccagtcactggggaaaggtaccacctcatgtacaagccacctcccaccatggagatccaggctcgcctcctgcagaacccaaaggatgctgaagagcaggtcaagctgaaaatggacctgttctacaggaactcagctgacttggagcagttgtatgggtcggccatcaccctcaatggggaccaggacccatacacagtcttcgaatacatcgagagtgggatcattaatcccctgcccaagaaaatcccctgatgggttcagagccaggagcgctgccccagggaaagagttaatcccctgcccccagccccccagcctcggcacagctcccctaaaaagccaataaagcctgctggatacagtctcaaaaaaaaaaaa

SEQ ID NO: 96 - DNA, 1559 bp, Homo sapiens
  CDS (47)..(1207)
  misc_feature (1)...(1559): n = a,t,c or g
aagcgacggccagtgaattgaatttaggtgacactatagaagagctatgacgtcgcatgcacgcgtacgtaagcttggatcctctagagcggccgcggcggggccaggggcaggacaggaagtacagacagagaacgtgacagtggctgagggtggggtggctgagatcacctgccgtctgcaccagtatgatgggtccatagttgtcatccagaacccagcccggcagaccctcttcttcaatggcacccgtgccttgaaggatgagcgtttccagcttgaggagttctccccacgccgggtgcggatccggctctcagatgcccgcctggaggacgaggggggctatttctgccagctctacacagaagacacccaccaccagattgccacgctcacggtactagtggccccagagaatcctgtggtggaggtccgggagcaggcggtagagggcggcgaggtggagctcagctgcctcgttccgcggtcccgtccggctgccaccctgcgctggtaccgggaccgcaaggagctgaaaggagtgagcagcagccaggaaaatggcaaggtctggagcgtggcaagcacagtacggtttcgtgtggaccgtaaggacgacggtggtatcatcatctgtgaggcgcagaaccaggcgctgccctccggacacagcaagcagacgcagtacgtgctggatgtgcagtactcccccacggcccggattcatgcctcccaagctgtggtgagggagggagacacgctggtgttgacgtgtgctgtcacggggaaccccaggccaaaccagatccgctggaaccgcgggaatgagtctttgccggagagggcggaggccgtgggagagacgctcacgctgccgggtctggtatccgcggataacggcacctacacttgcgaggcgtccaataagcacggccatgcgagggcgctctacgtacttgtggtctacgaccctggtgcggtggtagaggctcagacgtcggttccctatgccattgtgggcggcatcctggcgctgctggtgtttctgatcatatgtgtgctagtgggcatggtctggtgctcggtacggcagaagggttcctatctgacccacgaagccagtggcttggatgaacagggagaagcaagagaagccttcctcaatggcagcgacggacacaagaggaaagaggaattcttcatctgaccctatccccaccccaggcctaggcctgggcctgggctggggtcccccccactgccagctgcaaggaaccagcaaagacatttaccagagtctgggatggtgggcttctccccccaccactaacacctcagacgcttgggcagggatgggggtgttggatgcctggatctctgtaagggccagaagtgagggcccagaggtctgggtcccccagggggcaggggccaaaggtccagaccccccaagtccagtgagggcagtagggattgggttgggggaatgacgaaatcgtcgacccgggaattccggaccggtcgtgcaggcgtactgcattcaattcccccnaact

SEQ ID NO: 97 - DNA, 3236 bp, Homo sapiens
  CDS (93)..(2342)
  misc_feature (1)...(3236): n = a,t,c or g
atggaggactgagagctgtacgcacgagcnaccggnccggaattcccgggtcgacgatttcgtaagtggggtgcacgcttcgggttggtgtcatggcagctgcggggagccgcaagaggcgcctggcggagctgacggtggacgagttcctagcttcgggctttgactccgagtccgaatccgagtccgaaaattctccacaagcggagacacgggaagcacgcgaggctgcccggagtccggataagccgggcgggagcccctcggccagccggcgtaaaggccgtgcctctgagcacaaagaccagctctctcggctgaaggacagagaccccgagttctacaagttcctgcaggagaatgaccagagcctgctaaacttcagcgactcggacagctctgaggaggaagaggggccgttccactccctgccagatgtgctggaggaagccagtgaggaggaggatggagcggaggaaggagaagatggggacagagtccccagagggctgaaggggaagaagaattctgttcctgtgaccgtcgccatggttgagagatggaagcaggcagcaaagcaacgcctcactccaaagctgttccatgaagtggtacaggcgttccgagcagctgtggccaccacccgaggggaccaggaaagtgctgaggccaacaaattccaggtcacggacagtgctgcattcaatgctctggttaccttctgcatcagagacctcattggctgtctccagaagctgctgtttggaaaggtggcaaaggatagcagcaggatgctgcagccgtccagcagcccgctctgggggaagcttcgtgtggacatcaaggcttacctgggctcggccatacagctggtgtcctgtctgtcggagacgacggtgttggcggccgtgctgcggcacatcagcgtgctggtgccctgcttcctgaccttccccaagcagtgccgcatgctgctcaagagaatggtggtcgtatggagcactggggaggagtctctgcgggtgctggctttcctggtcctcagcagagtctgccggcacaagaaggacactttccttggccccgtcctcaagcaaatgtacatcacgtatgtgaggaactgcaagttcacctcgcctggtgccctccccttcatcagtttcatgcagtggaccttgacggagctgctggccctggagccgggtgtggcctaccagcacgccttcctctacatccgccagctcgccatacacctgcgcaacgccatgaccacccgcaagaaggaaacataccagtctgtgtacaactggcagtatgtgcactgcctcttcctgtggtgccgggtcctgagcactgcgggccccagcgaagccctccagcccttggtctacccccttgcccaagtcatcattggctgtatcaagctcatccccactgcccgcttctacccgctgcgaatgcactgcatccgtgccctgacgctgctctcggggagctcgggggccttcatcccggtgctgcctttcatcctggagatgttccagcaggtcgacttcaacaggaagccagggcgcatgagctccaagcccatcaacttctccgtgatcctgaagctgtccaatgtcaacctgcaggagaaggcgtaccgggacggcctggtggagcagctgtacgacctcaccctggagtacctgcacagccaggcacactgcatcggcttcccggagctggtgctgcctgtggtcctgcagctgaagtcgttcctccgggagtgcaaggtggccaactactgccggcaggtgcagcagctgcttgggaaggttcaggagaactcggcatacatctgcagccgccgccagagggtttccttcggcgtctctgagcagcaggcagtggaagcctgggagaagctgacccgggaagaggggacacccttgaccttgtactacagccactggcgcaagctgcgtgaccgggagatccagctggagatcagtggcaaagagcggctggaagacctgaacttccctgagatcaaacgaaggaagatggctgacaggaaggatgaggacaggaagcaatttaaagacctctttgacctgaacagctctgaagaggacgacactgagggattctcggagagagggatactgaggcccctgagcactcggcatggggtggaagacgatgaagaggacgaggaggagggcgaggaggacagcagcaactcggaggatggagacccagacgcagaggcggggctggcccctggggagctgcagcagctggcccaggggccggaggacgagctggaggatctgcagctctcagaggacgactgaggcagcccatctggggggcctgtaggggctgccgggctggtggccagtgtttccacctccctggcagtcaggcctagaggctggcgtctgtgcagttgggggaggcagtagacacgggacaggctttattatttatttttcagcatgaaagaccaaacgtatcgagagctgggctgggctgggctggtgtggctgctgaagccccacagctgtgggctgctgaagtcagctccgcgggggagctgaccctgacgtcagcagaccgagaccagtcccagttccagggggaggcctgcaggcccctggccccttccaccacctctgccctccgtctgcagacctcgtccatctgcaccaggctctgccttcactcccccaagtctttggaaatttgttcttttcctttgaagtcacattttcttttaaaattttttgttttgcatccgaaaccgaaagaaataaagcggtgggaggcagggccattgtgttgagtggtggctcctggagatttgtgtggccccacccctacccccggcaacctcaacacagaggctgggaagggtcgggggcccctggaagtagagccaaggtcccattctcctgcttgggtgaagtttgaccggcaagggcgtggccccctccatagggggacgtggccgtcgtgggggacaagggctgctctcctgtgccgagttctcgctccggggcccgcaggtttggtggctgcagtggcagagccacggngaagctggccacgtagaaaactcggcccaggcgcctggccacctgggcccggatcttgagggcgggccccagcttcagccccatgttggtcagcaggtgctcctccgtcagcagtggcagggtctccccgtcgatcccctgctccctgaa

SEQ ID NO: 98 - DNA, 1100 bp, Homo sapiens
  CDS (31)..(780)
gggacgaactgactcagggaaccataagaaatgctttcaccaaacaggagaaacctgaaggtctgggtccagagcctcagatcttacactggcagcacacagggacacaacagttggactggcagcaacagggcttgcagcagctggactggcagcacacggggacacagcagctggactggcagcagcagggcttgcagcagctggactggcagcaggatgatccacagcctgaggagcagcaacagggcttacaacagctggactgggagcagccacaagaaccacatccccccttggaacccccacaggagccacagccccccttggagcccccacaggagccacagctggtgcaggaacaggctggcacccaggagcacacgggcttgcagcagcagacaggcacataacatctggagccacatcccccacagctggagctgcagcccccacagccagagccacagcccccacggccggagccacagcccccacagccagagccacaacccccacagctggagccacagcccccacagccggagccacagcctccggagcagccacagcagcccatggttctggtggattgagggtggatcaggtagaggagcaggtgagagggaggtgcaggtgtggagctccctgagcctgggctctttatatacctgtccagatgtcaggcatgacacagggtccctttcttgtgactgtttacactatttttccagagctctatttttttcctctttgctagtgacttccttctggctcagttgagcatctactttctttgttttctaaatttgtctttttccccatttgttttggcccctacaattaaaacctcagctccaggctgtctggttcttcctgcaaagctccagggtgctggtcacctgctctctgctgaccacatgtgaccaatgggcaacagcctctgcccacgtgctctaatctttcctgtgttgactccctcaataatattaattttacatttttagatttcaaaattatccacgatctttatactcatgccagtctcagctttccgggtgtgttagaccattctttgcattgctctaaagaaatacttg

SEQ ID NO: 99 - DNA, 5123 bp, Homo sapiens
  CDS (2)..(4021)
cgcagggatctttgaattggtggaacttgttggaaatggaacatacgggcaagtttataagggtcgtcatgtcaaaacgggccagcttgcagccatcaaggttatggatgtcacaggggatgaagaggaagaaatcaaacaagaaattaacatgttgaagaaatattctcatcaccggaatattgctacatactatggtgcttttatcaaaaagaacccaccaggcatggatgaccaactttggttggtgatggagttttgtggtgctggctctgtcaccgacctgatcaagaacacaaaaggttacacgttgaaagaggagtggattgcatacatctgcagggaaatcttacgggggctgagtcacctgcaccagcataaagtgattcatcgagatattaaagggcaaaatgtcttgctgactgaaaatgcagaagttaaactagtggactttggagtcagtgctcagcttgatcgaacagtgggcaggaggaatactttcattggaactccctactggatggcaccagaagttattgcctgtgatgaaaacccagatgccacatatgatttcaagagtgacttgtggtctttgggtatcaccgccattgaaatggcagaaggtgctccccctctctgtgacatgcaccccatgagagctctcttcctcatcccccggaatccagcgcctcggctgaagtctaagaagtggtcaaaaaaattccagtcatttattgagagctgcttggtaaagaatcacagccagcgaccagcaacagaacaattgatgaagcatccatttatacgagaccaacctaatgagcgacaggtccgcattcaactcaaggaccatattgatagaacaaagaagaagcgaggagaaaaagatgagacagagtatgagtacagtggaagtgaggaagaagaggaggagaatgactcaggagagcccagctccatcctgaatctgccaggggagtcgacgctgcggagggactttctgaggctgcagctggccaacaaggagcgttctgaggccctacggaggcagcagctggagcagcagcagcgggagaatgaggagcacaagcggcagctgctggccgagcgtcagaagcgcatcgaggagcagaaagagcagaggcggcggctggaggagcaacaaaggcgagagaaggagctgcggaagcagcaggagagggagcagcgccggcactatgaggagcagatgcgccgggaggaggagaggaggcgtgcggagcatgaacaggaatacatcaggcgacagttagaggaggagcagagacagttagagatcttgcagcagcagctactgcatgaacaagctctacttctggaatataagcgcaaacaattggaagaacagagacaagcagaaagactgcagaggcagctaaagcaagaaagagactacttagtttcccttcagcatcagcggcaggagcagaggcctgtggagaagaagccactgtaccattacaaagaaggaatgagtcctagtgagaagccagcatgggccaaggaggtagaagaacggtcaaggctcaaccggcaaagttcccctgccatgcctcacaaggttgccaacaggatatctgaccccaacctgcccccaaggtcggagtccttcagcattagtggagttcagcctgctcgaacaccccccatgctcagaccagtcgatccccagatcccacatctggtagctgtaaaatcccagggacctgccttgaccgcctcccagtcagtgcacgagcagcccacaaagggcctctctgggtttcaggaggctctgaacgtgacctcccaccgcgtggagatgccacgccagaactcagatcccacctcggaaaatcctcctctccccactcgcattgaaaagtttgaccgaagctcttggttacgacagaaagaagacattccaccaaaggtgcctcaaagaacaacttctatatccccagcattagccagaaagaattctcctgggaatggtagtgctctgggacccagactaggatctcaacccatcagagcaagcaaccctgatctccggagaactgagcccatcttggagagccccttgcagaggaccagcagtggcagttcctccagctccagcacccctagctcccagcccagctcccaaggaggctcccagcctggatcacaagcaggatccagtgaacgcaccagagttcgagccaacagtaagtcagaaggatcacctgtgcttccccatgagcctgccaaggtgaaaccagaagaatccagggacattacccggcccagtcgaccagctagctacaaaaaagctatagatgaggatctgacggcattagccaaagaactaagagaactccggattgaagaaacaaaccgcccaatgaagaaggtgactgattactcctcctccagtgaggagtcagaaagtagcgaggaagaggaggaagatggagagagcgagacccatgatgggacagtggctgtcagcgacatacccagactgataccaacaggagctccaggcagcaacgagcagtacaatgtgggaatggtggggacgcatgggctggagacctctcatgcggacagtttcagcggcagtatttcaagagaaggaaccttgatgattagagagacgtctggagagaagaagcgatctggccacagtgacagcaatggctttgctggccacatcaacctccctgacctggtgcagcagagccattctccagctggaaccccgactgagggactggggcgcgtctcaacccattcccaggagatggactctgggactgaatatggcatggggagcagcaccaaagcctccttcaccccctttgtggaccccagagtataccagacgtctcccactgatgaagatgaagaggatgaggaatcatcagccgcagctctgtttactagcgaacttcttaggcaagaacaggccaaactcaatgaagcaagaaagatttcggtggtaaatgtaaacccaaccaacattcggcctcatagcgacacaccagaaatcagaaaatacaagaaacgattcaactcagaaatactttgtgcagctctgtggggtgtaaaccttctggtggggactgaaaatggcctgatgcttttggaccgaagtgggcaaggcaaagtctataatctgatcaaccggaggcgatttcagcagatggatgtgctagagggactgaatgtccttgtgacaatttcaggaaagaagaataagctacgagtttactatctttcatggttaagaaacagaatactacataatgacccagaagtagaaaagaaacaaggctggatcactgttggggacttggaaggctgtatacattataaagttgttaaatatgaaaggatcaaatttttggtgattgccttaaagaatgctgtggaaatatatgcttgggctcctaaaccgtatcataaattcatggcatttaagtcttttgcagatctccagcacaagcctctgctagttgatctcacggtagaagaaggtcaaagattaaaggttatttttggttcacacactggtttccatgtaattgatgttgattcaggaaactcttatgatatctacataccatctcatattcagggcaatatcactcctcatgctattgtcatcttgcctaaaacagatggaatggaaatgcttgtttgctatgaggatgagggggtgtatgtaaacacctatggccggataactaaggatgtggtgctccaatggggagaaatgcccacgtctgtggcctacattcattccaatcagataatgggctggggcgagaaagctattgagatccggtcagtggaaacaggacatttggatggagtatttatgcataagcgagctcaaaggttaaagtttctatgtgaaagaaatgataaggtattttttgcatccgtgcgatctggaggaagtagccaagtgtttttcatgaccctcaacagaaattccatgatgaactggtaacagaagagcacttggcacttatcttcatggcgttatttctaatttaaaagaacataactcatgtggacttatgccagtctagaggcagaatcagaaggcttggttgaacatatcgctttccctttttcctctccctccgcccctcccagtacagtccatctttcaatgttgcagcctggttgagaaggagagaaaaaggtggcaggaatttccaggagatccccaagaatgctgccttgtctgtggacaaagatggaccatgtgcccttcggaattagggatagaaacaaatattgtgtgctcttaacgattaagctgtgttatggtgggttttcaggtttttaccttttttctttacccctttactctgcaagaatggggaaagaatgcatactgcgaaaatgagtcttttaaattctgtctgcctactagttttaagtatatggtatgttgtaaaatttccaatgatgagagacagcacaataaatgtaccttatctccttaggctgaaggccataactacatagtggagtaatttaagaactctcttgccttcaccaacccaaaaggttgctttttgatagcaactggctaatgaatttttaaaaagagaagaaaaatactagttttcccctcttttgggaaatagattttaaatggctaaactactagccttaaaactactagtctaataaaatcaactaccacttttgtgaatctgacaggccacatttttatatggccctttacagaatggagtgtgttgaacaggatactaacgccattgagttgagctggcctagcgatggagggacactctaacacaactttccctcagctattatgcaacagatcagggaaaaagatgggatgacagatggggtcagacagaaagagcttctgggaaacaagcttacatagtcttttttaaaatgcacaaagcctcccagctaagaggtcacttggtttgggcttcattaggactgagactttgttgagttctttctgggacttggagagtggatgatattcaggctctgaacattcccagcgctctcccgagggtgccactttctcaagatgaaaactgtgactgaaaaaa

SEQ ID NO: 100 - DNA, 1026 bp, Homo sapiens
  CDS (1)..(618)
atgggccaggtggagtgtggaggacagaagctgggaaaccagttagaagatgacagtgaaccagcagaggggaaggtgtacagctcagatgaggagaagctggaggcatcagcaggagacccagcaggcagcgaacaggaggaagagggctcaggcggtgacagcgaggatgacggtttcctggacagttctgcagggggcccaggggctcttctgggacctaaaccgaagctaaagggaagcctggggactggagctgaggagggggcaccggtgacagcaggggtcacagctcctggggggaaaagccgacggcgccgcacagcatttaccagcgagcagcttttggaattggagaaggaatttcattgtaagaaatacctgagcttgacagagcgctctcagatcgcccacgccctcaagctcagtgaggtgcaggtcaagatctggtttcagaatcgacgggccaagtggaagcgcatcaaagctggcaatgtgagcagccgttctggggagcccgtaagaaaccccaagattgttgtccccatacctgtgcatgtcaacaggtttgctgtgcggagccagcaccaacaaatggagcagggggcccggccctgaatgggcacccaagaacttaggaaggcgagggatctgtacctgagcctgctctgagactgtcagggttctgtggaccagaggggctgcaactgtgattctgccttgagaggggctagttgggaattaacctagccctgggtgtgctcttcccagactcctcccagaacctgagatgtgaagcacttgggcctgagcctgttccagagaacttcaggactaggggcttcaaggttaaagggggctggggttctattgctgagggagctgttgggactgaggtggactcctggggagggggtgggttctaagatgcctaagggcctgaaggttctgtggcaaatgccctggaaccagcttctgatgggtggagggaacaggcgatacctagccaagtagatcgcagctcct

SEQ ID NO: 101 - DNA, 2119 bp, Homo sapiens
  CDS (581)..(1996)
tttcgtgcagacggcgcctgcgtatcgagcctccgtgaagaaaatcactccccagaatgagcccggctttgcggctgggtcctaaactgcgacatctgaatgggactccgagtgccttacatccctgcagccccttcctcttcctacacccccagcagcaaatgaggcacacctgcagacagcagctatctctctgtggacagtggtggccgccgtgcaggctatagagaggaaggtggagatccacagccggcgactcctacacctagaaggtcggacagggacagcagagaagaaactagccagctgtgaaaagacagttaccgagcttgggaaccagctggagggcaagtgggccgtgctgggaaccctgctgcaggagtacgggctgctgcagaggcggctggagaacttggagaacctgctgcgcaacaggaacttctggatcctgcggctccctccaggtattaagggagatatcccaaaggtgcctgtggcatttgatgatgtctccatctacttttccactccagagtgggaaaaattagaagaatggcaaaaggaactttacaagaatatcatgaagggcaactacgagtctctcatctccatggattatgctataaatcaacctgatgtcttatctcagattcaaccagaaggggaacataatacagaggaccaggcagggccagaggaaagtgagattcccacagaccccagtgaagagcctggtatttcaacatcagatattctgtcttggattaaacaagaagaagagcctcaggttggggccccaccggagtccaaggagagtgacgtgtacaaaagcacttatgctgatgaagagcttgtcatcaaagctgaaggccttgctagatcctcgttgtgccctgaggttccagtccctttctcttctccaccagcagcagcaaaggatgctttttcagatgtggctttcaaaagccagcagtctacatccatgacaccttttggacgtccagccactgacctgcctgaagcctctgagggacaagtgacttttactcagttgggtagctatcccctcccacctccagttggcgagcaggtgttctcatgccaccactgtggcaagaatctcagccaagacatgttgctgacccaccaatgtagccatgctactgagcaccccttaccctgtgcccagtgccctaagcactttactccacaggcggacctcagcagcacctcccaggaccatgccagcgagacaccccccacctgcccacactgtgccaggacttttactcacccatcaagacttacctaccatcttcgggtccataacagcactgagcgtcctttcccctgtcctgattgccccaagcgctttgctgaccaggctcgactcaccagccaccggagagctcatgcaagcgaaaggcccttccgctgtgcccagtgcggcaggagcttcagcttgaaaatcagcctcctgctccaccagcggggtcatgcacaagagcgccccttctcctgccctcagtgtggcattgacttcaacggccactcggccctgatccgccaccagatgatccacacaggcgagcgtccttacccctgcactgactgcagtaagagcttcatgcgcaaggagcacctgctgaaccaccggcggctgcacacaggcgagcggcccttcagttgtcctcactgtggcaagagcttcatccgcaagcaccacctaatgaaacaccagcgcatccacaccggggagcggccctacccctgctcctactgtggcaggagcttccgctacaaacagacactcaaggaccacctccgttcaggccacaatggaggctgtgggggtgatagtgacccatcaggtcagccacccaacccaccaggtcccctcataactgggcttgaaacttctggcctgggtgtcaacactgaaggtctagagaccaaccagtggtatggggaagggagtggagggggagttttgtaaatccaaatctctgtggcttcatgcttgtatatgctcacagcagggcacaataatccaagagaaggtctgtgagccccatccaacacccacagtaattataatcttggcacatcaatggaattt

SEQ ID NO: 102 - DNA, 2546 bp, Homo sapiens
  CDS (3)..(2210)
gttcctgtggccacaaaagtgcttatggatcatacacagggctgcagcttttctgggaggatggccaggaactgctccagcaccagcagctccaggatctgcgcctttgtgtgcacctccggcctcagtcagagaaggtggagctctccttatggacactcttcgtggtggggaagggcgaacccagcgctgtcagggagaaactggggaaggctggcttcgcagctgcttctggtcctggtggccggccaggtgcggagcgcgcctcgacagtcctgaacattctccacttaacggctgagagccgctgggagcctaacgcctgcaaccgagtgagctcgagtccggctggggtcggaccgttggacctccccgttggccctttgttgtacttcttcgcgccctgggctcgcgcaagctttctctgccacgcgttccaacggccgctcaccggcatcgggctgaacacggtgcgcttcacctcggagttcccactccactccaaggatccaacagcgcacaagctgctcttcacgggcaactacctctgcaagcttcacccccggccccgccacgccccgcagggttccctgtctgatttttgccatggaacagagggcaaggacttaccttctgagcataacgtttctgtagaaggagtggcacaggacaggagtcccgaggcaactctgtgcccccagaagacctgcccctgtgacatatgtggcctacgtttgaaagacattttgcatttggctgaacaccagacaacacatcccaggcagaaaccatttgtgtgtgaggcatatgtgaaaggctctgagttcagtgcaaaccttccccagaaacaggtgcagcagaacgtacacaaccctatcagaacggaggagggccaggcttcccctgtaaagacctgcagagaccacacatcagatcagctttccacctgcagggagggtgggaaggactttgtggccacagcagggtttctgcagtgtgaggtcactcccagcgatggggagccgcacgaggccaccgaaggtgtggtggattttcacattgcactaaggcataacaagtgctgtgaatctggggatgccttcaataacaaatccactcttgttcagcaccagagaatccacagcagagaaaggccttatgaatgcagcaaatgtggaatcttcttcacttacgccgctgacctcactcaacaccagaaagttcacaatagaggaaaaccgtatgagtgctgtgaatgtggaaaattcttcagccagcactccagccttgttaaacatcgcagggttcacacgggtgaaagccctcacgtgtgtggtgactgtgggaaattcttcagccgaagctccaacctcattcagcataagagggttcacactggtgaaaagccatatgagtgcagcgactgtgggaagttcttcagccagcgttccaacctcattcatcataagagggttcatacgggcagaagtgcccatgagtgcagtgaatgtgggaaatctttcaactgcaactccagcctaattaaacattggagagttcacactggagaaagaccttacaagtgtaacgaatgtgggaaattcttcagccacattgccagcctcattcaacatcagatagttcacactggcgagcggcctcacgggtgtggtgagtgtgggaaagccttcatccgaagctctgacctcatgaaacatcagcgagttcacactggtgagcggccttatgaatgcaatgaatgtgggaagttatttagccagagctccagcctcaatagccatcggagacttcacactggtgaacggccttaccagtgcagtgaatgtgggaaattctttaaccaaagctccagcctcaataaccaccggagacttcacaccggcgagcggccttatgagtgcagcgaatgtgggaaaaccttcaggcagaggtccaatctgaggcagcacctgaaagttcacaaaccagacaggccttacgaatgcagcgaatgtgggaaagccttcaaccaaaggcctaccctcattcggcatcagaagattcacatcagagaaaggagcatggagaatgtgctccttccctgttcacagcacacaccagagataagctctgagaacagaccttatcagggcgctgtcaactacaagttgaaacttgttcatccaagtacccaccctggggaggttccctaggaatgctagctgtgttggaagctttctggagacaagttacattctcttactgtagattttatcagcgttttttcactgctggggttgtgatagaagccatgtcagcaccacacactgcagctctccaaagagtgtgtccaccactccactgtgctcagggaaggcagacctctcctctctctttccaatccctaaagggaattaggagtagtctgaagccttgggaagatgtcattcccgccctgtatggctggtttagccatggacatgaccagcttttggctgtgaagacctgagcagggttttgccaacagcttgttctagagaaggttt

SEQ ID NO: 103 - DNA, 6471 bp, Homo sapiens
  CDS (173)..(2761)
aaccggaattcccgggtcgacgatttcgtctggcggcgggctccgacgtctgcgccaagacctggctggctgagcccggcgcagcagcagcagccagggcagcgcggcccctactccctgtcaggtcgtagaggcgagcagggaccagctggtcgccggcccctcgggcaagatggggaaccgggagatggaggagctgatcccgctggtgaaccgtctgcaggacgcgttttcggcgctgggacagagctgcctgctggagctgccgcagatcgccgtggtgggcggccagagcgccggcaagagctcggtgctcgagaacttcgtgggcagggactttctccctcgagggtcgggcattgtaacaagacgacctcttgtgctgcagcttgttacttctaaagcagaatatgccgagtttctacattgcaaaggaaagaaatttacagattttgatgaagttcgccttgagattgaagcagaaacagatcgcgtgactggaatgaataaaggcatttcctccatacccattaatttacgagtctattccccacacgtgttaaatctaacccttattgatctacctggaataactaaagtgcctgtgggagatcagccaccagatatcgagtatcagatcagaatgattatgcagttcatcacgagggagaactgtctgattttagctgttactccagccaacactgatcttgcaaactcagatgcgctgaagctagctaaagaagttgatcctcaaggtctgagaaccattggagttatcaccaaactggaccttatggatgaaggaacggatgccagggatgttctagagaacaaactgttgcctcttcgcaggggttacgtgggggtggtaaacagaagccagaaggacatagatgggaagaaggacataaaggcagccatgctggcagagaggaagtttttcctttcccacccggcttacagacatatcgctgaccgaatgggaaccccacacctgcagaaggtccttaatcagcaacttaccaaccacattcgggataccctaccaaacttcaggaacaaactacagggacagttgctctccatagaacatgaagtagaagcctacaaaaatttcaaaccagaagacccaacaaggaagaccaaagcattgctgcagatggttcagcaatttgctgtggactttgagaagagaattgaagggtcaggggatcaagtagataccctggaactctcaggtggtgctaaaatcaatcgtatttttcatgaacgctttccttttgagatagtaaagatggagttcaatgagaaagaattgcgaagagaaataagctatgcaatcaaaaacatacatggtatcaggacagggttgtttactccagacatggcatttgaagcgatagtcaagaaacagattgtaaagttgaaagggccttccttgaagagtgtggatctggtaatacaagaattaatcaacactgtgaagaagtgtaccaaaaaactggcaaacttccccagactctgcgaggaaacggaaaggattgttgctaaccacattcgtgagcgagaagggaagacaaaggaccaggtattgctattgattgacattcaagtctcttacatcaacaccaaccatgaagacttcattggcttcgcaaatgctcagcagaggagcagtcaggttcacaagaaaaccacagttggaaatcaggtgattcgcaaggggtggctcaccatcagcaacattggcatcatgaaaggcggctcgaagggatactggttcgtccttactgcggaaagcttgtcctggtataaagatgatgaggaaaaagaaaagaagtacatgcttcccttggacaacctgaaagttcgggatgtggaaaagagctttatgtctagcaagcacatctttgcactctttaatacagagcaaaggaatgtatacaaagactatcgcttccttgagctggcatgtgattcccaggaggatgtcgacagctggaaggcatctctactaagagctggggtctatcctgacaaatctgtagggaacaacaaagctgaaaatgatgagaatggacaagcagaaaacttttccatggacccacaattggagaggcaagtggagaccattcgcaacctcgtagactcctacatgtccattatcaacaaatgtatccgagatctaattccaaaaacaataatgcaccttatgatcaataacgttaaagatttcataaattccgagctcctagcacagttgtattcttcagaggaccaaaataccctgatggaggaatctgctgagcaggctcagcgccgggatgagatgcttcgaatgtatcaagcactgaaagaagcccttgggataattggggacatcagcacggccaccgtgtccactccggcaccccctccagtggatgactcctggatacagcactctcgcaggtcacctcctccaagccccacaacccaaaggaggccaacactaagtgctcccctcgcaaggcccacatccggccgaggaccagctcctgccattccctctcctggcccccactctggggctcctccagtcccattccgtccaggcccattacctcctttccccagcagcagtgactccttcggagcccctccacaagttccatctaggcctacgagggccccgcccagtgtcccaagccggagaccacccccatcaccaactcgtcccactataatccgcccactagaatcctccctgttagactaaacgaagtgtctggcatggcaattaatcactaatgaattatgcgaaagcaacatatttgataaccgttgcagtaaatcatgagtagtcgcatgtgtggacatcagtaggcaagtaaccagttttactaatgcattcatcgctcatcttcattgctcatggtatgtcaaacctttggggtttgactcagaaactgctaaccttttagaggctttatatgttgtactgaccaaggtaggtttgtatagcagccctatactttggggatcatttgcctaccatgacatatatttgaaattgctttggacaagttttctaggctatctaccaggtagctcattaaacgtaattcttcagatatgagatagtgggcttagacctaagccatacatatttcttttcccacattctgtttaggatgacagtaattctgttgtctaccattaatgctactacctactccataattgcctatttagctcctcttttcttcctttttatttcataagactgctaggaagtgattttttaaaattaggactccttaagaataaacttttccagaagcacgaggtagtttgcaaaggaaaagtctgcactgtttgctctaaagagcttctcctcattccaatgtgttttgcttcatgctagaagcatatgcaacagtgaataaaagcttctttttttgttaatcagtcaataaatttggctaattagtttcagagttcaaggaagaagcaaaatatcacatctctagaagtgttggaaaaaatataatttctttctttacttatattcacctcatggtaggttatattgaaggctgacatggagaatgtttacttttctatttggcatagctaactacactttgatactaactccagttttactattattattttggttggaaaaaaaattcactttttacgtgctaatttgtaatcttgttttgtaagaatttatcctacccttgaaacaggctcagtgtaactgtatatccattctaggctttcttaataaatcttgaggctatgggataatcacatttaaagaatggttcctgaaatgaagtcagtagaaatggcatgggataagagcagagctcacacttttacagttgcagtatttcaaagtccctatccaggtcactccagaaaagggtattgaaacgttgaaatctaaagcaaatttgcaatttcttaagatttctaaaatttaccagaacagtttagcctgggggttaatagttaagtcttgaggctaagttttggactaccaaggaccagatgattcacatgtaggaaacagccagaagccaactggaattttgtgtgctaactgttcccagacagcagagcaagtattcactgagtaggggtgtcccatgacactatttcatattctacagaagtaaatcaggtttcaccaactgaaatgtctccctttgaaagtagcaaacatgatttgtatgttaacttaactttaatttcctgtgtagtttacacccagagcagatactcataaagtataaagtaaaaacttttaaccattattaaacagagaacttgccatgttgagtgccattgtattgaacttattctaaaggcttatgctaacccatttataattggtaaaaatcagaaaatacaagatttacataaaggtcatttcaacttttaaggttaccagtgattgtataaaaacatcacaatcctaaatcctctcgtatctcaccccaaaccccaaactgggggaaaaaaagttaactctttgtgaatggaaccaatgtgcaagatacatactgcatttttaaaatagtgtctcagctaaatggaaaactgttaagcaaacatccatagtaaaacaaataatcttcagtgagatctttttataaaacttcttgtttttaggattccctttgcttcttcctttgaattctctaaaataggcagctaacggattatatacttcagggtttggctttgtgctaaatgtggttttgtgttttgctgtatttcaaaattttccttctgttaaaggaaaatattgtgaataaccactggtgtgttcttagatcagcacaaaccatgtcaaaaaaaattggagatttttttccaattttccttccactgatcttaggcagtaataaacaatggcatttgtcatctttggcacttgcttttagattatagtcccacagttgcactgccccaattgtctacctttgtgggtacatttttgttctttactcctaagttatttctcatagaacccagcctactctagaatttcagcagtgacattggagaatatttttaatttgctgcagtactatgtcatattattagtatgaatctcatttcccaaagggtttgtattctgctaaaaggagatgccaatgttgaatgaagtctgaaactctagtatgtgcatagtttgacgtgcagcatgcacaccaggccttaagatgggaatgtagcttaatgattttctgtttcccataccatttctaatcttttgtgtaattttctcttaactgattgctctgatattgtaaacacaatagatgtagctctatcatgtctagcataatttaaaaaatcagtgtttttaggatttgggaaaataaactgtaaatgtttatttgataggtaaatatagttttattgtcacatgctaaatattgcatgcatattgactaattggaataaccatttactcaattatggacagcttattgaaatagtattgatttagaaaaagtatattgcatttctaaaaaacatctaccaaggttactcgtctgaatattgcttttagccgtgttttataacatagacgagcagtagggtctgtttattagcaaatttcctatttgttccaatacaaactcactttattctaaagtatattaatgaaaccagttcctgtgatgtaactgtaagccttctcgacttagacttaaaaagtggtcacatagattaattttgtgactttttagtatagactgtagccataattctcaaatatgaaatgggacctaataccagtatgtgataaatgttgatgttttctgtgtacaaacacattttctatgcatgtgtctctgtgtatatggcatatacctagtaagtatgtttctgtaagtatgtgtattttatgtccatttgagtaggtaggtaggttttaaaaatactagttaaaatgccacaagcatgagtgtgattgtatgtgcactgtgtgtatatatataaatatatgtatatgtatggttgtaaatatctatgtatacatgtacttagtatgtgtggtatcaggatattttttaaactgtgataatacaacagatagctttgaatgatctgccataacatgtggtaacaatagttcatttctcataacatatatgaggtatacaaaattttctaactccagattgtagtcattttgagaggtacaaagctcataattaccatgacaacatggtaatgtccatagacatttgtatctgaatccacaagaagatctgaatctaagaaggaattacctttgacaatatttttcggtaagaagtaaaacctctggagacctatctttaagatctctaattggaattataaattatttttggattgctgagctgaatcttaaaaagccaagttgatatacatagtcatttttcctctatggtagaaggaaaaaaagaaaaa

SEQ ID NO: 104 - DNA, 1008 bp, Homo sapiens
  CDS (50)..(928)
gacatgattaccaatttaactctactcactatagggaatttggccctcgatgccaagaaatcggcacgaggcgacgggcaggacgccccgttcgcctagcgcgtgctcaggagttggtgtcctgcctgcgctcaggatgagggggaatctggccctggtgggcgttctaatcagcctggccttcctgtcactgctgccatctggacatcctcagccggctggcgatgacgcctgctctgtgcagatcctcgtccctggcctcaaaggggatgcgggagagaagggagacaaaggcgcccccggacggcctggaagagtcggccccacgggagaaaaaggagacatgggggacaaaggacagaaaggcagtgtgggtcgtcatggaaaaattggtcccattggctctaaaggtgagaaaggagattccggtgacataggaccccctggtcctaatggagaaccaggcctcccatgtgagtgcagccagctgcgcaaggccatcggggagatggacaaccaggtctctcagctgaccagcgagctcaagttcatcaagaatgctgtcgccggtgtgcgcgagacggagagcaagatctacctgctggtgaaggaggagaagcgctacgcggacgcccagctgtcctgccagggccgcgggggcacgctgagcatgcccaaggacgaggctgccaatggcctgatggccgcatacctggcgcaagccggcctggcccgtgtcttcatcggcatcaacgacctggagaaggagggcgccttcgtgtactctgaccactcccccatgcggaccttcaacaagtggcgcagcggtgagcccaacaatgcctacgacgaggaggactgcgtggagatggtggcctcgggcggctggaacgacgtggcctgccacaccaccatgtacttcatgtagcagcccaggagaagagccgaagagagaagccgcagcctttcctaagctcacctggacatatcctgctgtctgcatccatt

SEQ ID NO: 105 - DNA, 936 bp, Homo sapiens
  CDS (50)..(856)
gacatgattaccaatttaactctactcactatagggaatttggccctcgatgccaagaaatcggcacgaggcgacgggcaggacgccccgttcgcctagcgcgtgctcaggagttggtgtcctgcctgcgctcaggatgagggggaatctggccctggtgggcgttctaatcagcctggccttcctgtcactgctgccatctggacatcctcagccggctggcgatgacgcctgctctgtgcagatcctcgtccctggcctcaaaggggatgcgggagagaagggagacaaaggcgcccccggacggcctggaagagtcggccccacgggagaaaaaggtgagaaaggagattccggtgacataggaccccctggtcctaatggagaaccaggcctcccatgtgagtgcagccagctgcgcaaggccatcggggagatggacaaccaggtctctcagctgaccagcgagctcaagttcatcaagaatgctgtcgccggtgtgcgcgagacggagagcaagatctacctgctggtgaaggaggagaagcgctacgcggacgcccagctgtcctgccagggccgcgggggcacgctgagcatgcccaaggacgaggctgccaatggcctgatggccgcatacctggcgcaagccggcctggcccgtgtcttcatcggcatcaacgacctggagaaggagggcgccttcgtgtactctgaccactcccccatgcggaccttcaacaagtggcgcagcggtgagcccaacaatgcctacgacgaggaggactgcgtggagatggtggcctcgggcggctggaacgacgtggcctgccacaccaccatgtacttcatgtagcagcccaggagaagagccgaagagagaagccgcagcctttcctaagctcacctggacatatcctgctgtctgcatccatt

SEQ ID NO: 106 - DNA, 4025 bp, Homo sapiens
  CDS (792)..(1520)
tgtattttttgtttttcgcaagattatttacataacacctctgcagtacttataccatttaatttttgtgttaaatgtctttaaaaataaacaacataacctgccccttacgcctgtcattcagcctggcaggtccttagtgggctagacctacctttctgatgagctgcccgcccccagcgcaagatgattgtttgagaggtaaaaactcttgccaaaaacaacgttaaacttttaatggatgttaacatacttgcatttacaagcagtgaagtttgtcaccttcatgttgttatttatgcagcattaacctttttctccagatcattgagactgaaaatatgatggaccgaattgtgactggcttgtctgagtctagtgtcaaggtgcggttagctgccgtcaggtatgagctttaaatggtctgaataaaaaccttttgccatatatttaacctgtttcctttctggtccttcactgagtaaacacagactacaaatgttcctcaaaaatctgctcaggtgaattcatagagtatataacattgtctaacagagagcctggcctccaaaccccataaagtggtctgatgtagttcacttaacaatgtagatatgcttgaagtgtacattagtcattgtaaaatgccagccagtttgtttgaaaagtaaaagttttgatttcttgtgaagctaattttgattattctttgtagatgtttgcacagtttatccagatctgtgcagcagcttcgaaccagtttccaggatcatgctgtttggaaacctttaatgaaggttttacaaaatgcaccagatgaaatcctagtggtagcatcttccatgctgtgtaatcttcttcttgaattttctccaagcaaagagccaattttggaatcaggagccgtagagctactttgtggattaactcagagtgaaaatcctgctttacgagtgaatggaatttgggctttaatgaatatggcatttcaggctgaacaaaaaataaaagcagatattttacgaagcttgagtactgaacagctattccggttattatcagattcagatttgaatgtgctgatgaagacattgggacttcttagaaatctcctctccactcgtcctcatatagataaaataatgagtactcatggaaagcaaattatgcaagccgtcactcttattctagaaggggaacataacattgaggtcaaagagcagacactgtgcatcttagccaacatagcggatgggacaacagcaaaagatcttattatgaccaatgatgatatcctacagaaaatcaagtattacatgggccattcacatgttaaactgcagcttgcagccatgttttgtatatcaaacctcatatggaatgaagaggaaggttcacaagaacgccaggataaattacgagacatgggcatcgtagatattctacacaaactgagtcagtcaccagattcaaacctttgtgacaaggcaaagatggcactgcagcagtacctggcatgatgggagtgcccctgggcacctgcgagcatcccacctccttgtttaaggaagtacaggaaccagcctcatttgattccttctatttgcacaagtcaccttggactgcagggagctgttttgcaaaagcagtttagtaggcttagatctcaaattcatcttgagaacatttttttgaggtagtaatttcctcagaagactcttgtgttttgttttggttttttttttctgagctactcggactctttattagaacaatcaatcattttcctttggacctacaatttttgcctatgctgcagccactttgtgagtgagaatgaatatgtctgtgtgaacacacaggcatgcgtgtgtatgtgcacgtacatgggccagaatgaatggatgtgtgtgtgtgagggatacctcagatttttcttttcttattttgtgtgaaaatctcttttctacagattttccagggtttaagcattgcttgctgtataaaaaactttactgaattatatacagtttgaatgaaatgttattttaaaaacaaaacaattgttaagtgttccataaaggttatgttgaattttggtcagatgaatatttgtaagtaaaaaatatatgcatttctgaacctcaacttacatagattttctttatataaaaaaaaagaaaaaaaaagaaaaagttggctatagttggcctgattaacaggcactatacatggtgctgtgcaaaatagtaagctagcatcttactgccgtcaatattagcaggtacagagccttttttcatcctaattcagtaagttctcaggctttcaagtcaaatggagaagtaaagtgaggcaacagattcaccataggctttttgaagcatcaaagggaaatataactactgatagtgaaagcccagccatgacccagatgggcttacccttgacaggaactggggaccaagagcctcccaattgccctaactcctgtcattggtattagcaatatctggccagatttagaaccagtcatggaaacttgtgctcaaactaaaagtaggtcatcacttcccagaaacagaataccttgtgcttcctgaaacagcatatatcactgtgaaactaaagaatattctacagacacccctgtagaaagaaacaaagaacaggatagtttagaaagctttctgttagctgtattcagcaaatttcatactagttgctcaggactgctagttggtatgcttttgtaaaacgagattgaaatttaataaaagatgcaactaaaatctttcctgcatgaagctaaaagcactcaagttgagagaggggcaagggaatctccccaggatgactgaagatgacttctttttacagcaagtactgttagcctttctgcaccccttagcttggcccctgctccaacttctgggtcagcagcaaggtgaactcaacagaagttgctcttgactgtttgaaggtagaagcagcctaccttttctctttgctaaaagaaggtcaaaggcttcgcaaccaggatgcaaggtctgcggtccagaagcttgcggtgagtgtgtgccactgatggagctccaagcccacccaccagccactcctgatggggttgctcacactgcagctgccctatcaccaccctgcacgttccttggaagatttaaatgtttggttgcaaatgaatgttttaaaaatgtatttaatgcaatttttcctgctctcaacatgaccacccaagattcaaacacagagacttccaagttactattttttcagaacatcaccgattttaaaatctgtcacaacaggacttggttttgtgcagatatcagagtgctaatgtgagaaacccagttaaaagaaaacttagtttattgggaagaaagcctcaggcccactcgtttctagaactgtgaaaatatccttggttggcatttttaacacaaaacactatagtgttggtattaaatagtactaggtaaatataaagaaaccaataatgaattgctgagacaatcttgaacccaaatagcattagaaagctgaaggcccaatgaaataacactttcacacttaaactctgtggataaattttgcctgtgggtataaacagatggtcaaattaaaaatgctttactataattaacttttctgatttgaatgaagggaaatgtatttattgaaacaaagctgtttgctgctttatgcaggtgcagtgttcagtcagcaaggaagtgggaagagtggacatggtattgtgtctacacccaagttcttaactaagcttctcgctctaatactgcattctgtttctccttttgtgccctgattgtaatccaaaatttatgaactagaaaagaatgtccaatttaataagttgcatttttttttctttaagcactttattcagaacaatacatgttcttctggtagtgtttggataatatgattttaacacatgctaataaaagccaagaaaaatcatggcaacttctaaaaaaaaaaaa

SEQ ID NO: 107 - DNA, 681 bp, Homo sapiens
  CDS (105)..(467)
caagctgtgtgaagatccttctggagcacaatgccaacatcgacattcagaatggtttcctgttgcgatacgccgtgatcaaaagcaatcactcttattgccgaatgttccttcagagaggggcagacacaaacttgggtcgcttagaagacggacagactcctttacacttatctgcccttagggatgatgtgctgtgtgcacggatgttatataattacggagcagacacgaacacacggaactatgaaggacagaccccattggctgtttcaataagtatttctggaagtagtcgaccatgtttggatttcttacaagaagtcacaagacagcccagaaacttgcaggacctgtgccgaattaaaattcgacaatgtataggccttcaaaacctaaagctacttgatgaactaccaattgccaaggtcatgaaagactacttaaaacacaaatttgatgatatctgatatgccagaactgtgagcaagattaggagttctattctagatacttaaaaggctttttgccttgcacaaagtatatcctatgcaatttctgatttgctgtgaaatcagaaagcaggtatacacttttgggttttctgtttgtttggttggttttcattgtaggggagggattttttatatatatataaaaacacacaccacatgcttaaaa

SEQ ID NO: 108 - DNA, 568 bp, Homo sapiens
  CDS (229)..(414)
tgggagagggatgatgattaggagaggatgatgtatataactatctattcgatgatgaagataccccaccaaacccaaaaaaagagatctctcgaggatccgaattcgcggccgcgtcgactctagctataaacactgcttgccgcgctgcactccaccacgcctcctccaagtcccagcgaacccgcgtgcaacctgtcccgactctagccgcctcttcagctcgccatggatcccaactgctcctgcgccgccggtgactcctgcacctgcgccggctcctgcaaatgcaaagagtgcaaatgcacctcctgcaagaaaagctgctgctcctgctgccctgtgggctgtgccaagtgtgcccagggctgcatctgcaaaggggcgtcggacaagtgcagctgctgcgcctgatgctgggacagccccgctcccagatgtaaagaacgcgacttccacaaacctggattttttatgtacaaccctgaccgtgaccgtttgctatattcctttttctatgaaataatgtgaatgataataaaacagctttgacttgaaaaaaaaaaaa

SEQ ID NO: 109 - DNA, 993 bp, Homo sapiens
  CDS (208)..(465)
atttggccctcgaggccaagaattcggcacgagggatctctcaccccgtcactcagggtggcgcaatcacgactcattggctcactgcagcctagacctcccagctggagcaattctcctgcctcagccttctgagtagctgggactacagttggttctaaagagtggtgagtcagaagagacgtcaggcagcaagcgacttgggccatggcctctgacctagacttctcacctccggaggtgcccgagcccactttcctggagaacctgctacggtacggactcttcctgggagccatcttccagctcatctgtgtgctggccatcatcgtacccattcccaagtcccacgaggcggaggctgaaccgtctgagcccagaagtgctgaggtgacgaggaagcccaaggctgctgttccttctgtgaacaagaggcccaagaaagagactaagaagaagcggtagaagaggaggcctgaggagctgggcgggcagggagagggtcttggggacagccctcctgggaatctacattgtgttcccccgcattccaggctcagggtctgaggaggctgtgacgccctatgaccgcagagatctagacagtcgtaacagtccccaggctccagctgggcaatccaccacttcctcttccttctgcttctgtgacggtttagagtcaagggggctgaaacacactgtgagcatagactgtattaggtttgttcagaagccgggtcagctcacagaatcacattttcttgcttagtcatgtgtccctccttgagttgccccctccttgtgggtttacactacatttgggagtcattgtctaatgctgacaagcacaccctctcccattatttgtgcactacagatctcctgctgatcagtcacctttgttgctgctgtgtagacagagccaggcctcacctgtttgtttaggccaagatgccatggacatgcagcgttagtgatcccactagctgcgac

SEQ ID NO: 110 - DNA, 1207 bp, Homo sapiens
  CDS (445)..(840)
  misc_feature (1)...(1207): n = a,t,c or g
tctgaactgtgcagagatcgggccggaattcccgcggnanncnangcgtncggtcattaacgtttcttatgtacaaggtttggtgatgtaagcgatttttttaccacattcgaacagtgatggtcagtcactttctgtagagtatctgtgtgcatattaacgctctaattatattttaaaatcttattttatataggatgtaattggaaaatcgatgaatcaagcaatctgtattccattgtatagagataccagaaggtaattctgtttacctattggatggtgtaattccgcagccaatttaaatttttctcatttctttttcccttttattttagtgaggattctacacgtagattgttcaaatttccttttctgtggaataataaaacttcaaatctacattatcttctttttactattctagaagattcactttataaaatgtgcatcttaaggagacatactgatatttctcaatctgtgagtaatggactaattgctattaaatttgggagctttacatatgccacaacagaaaaagtcagaagaagcatctacagttgtttagatgcacagttttatgatgatgaaactgtaacagtagttcttaaagacactgtaggacgtgaaggaagagatagactcttggtccagctgcctttgtctttagtatataacagtgaagattctgcagaatatcagttcactgggacttattctacaaggctagatgaacagtgtagtgctattcccacccgtaccatgcattttgagaagcactggagattactggaaagtatgaaagcacagtatgttgctgggaatggttttcgaaaagtgtcctgtgtgttaagctcaaatcttcgtcatgtgagagtatttgaaatggacatagatgatgaatgggagctcgatgagtcttcagatgaagaggaggaggccagtaataagcctgtaaaaataaaggaagaagtgttgtcggagtcagaggcagagaaccaacaagctggtgctgccgctttagctccagagatagtcattaaagtggaaaaacttgaccctgagctagactcctaatctagcttgccattattgtgtgtgtaattatggccaaaaggacataggagatggactaagatgtcttggaccacctttgtgtaacaaagaaataaacagtaaattttattttttcaaaaaaaaaaaa

SEQ ID NO: 111 - DNA, 1215 bp, Homo sapiens
  CDS (68)..(847)
ggtggaattctctctctgccgggcgcagccggctggtggtggccactgagacaagatgcctagcatcttcgcctatcagagctccgaggtggactggtgtgagagcaacttccagtactcggagctggtggccgagttctacaacacgttctccaatatccccttcttcatcttcgggccactgatgatgctcctgatgcacccgtatgcccagaagcgctcccgctacatttacgttgtctgggtcctcttcatgatcataggcctgttctccatgtatttccacatgacgctcagcttcctgggccagctgctggacgagatcgccatcctgtggctcctgggcagtggctatagcatatggatgccccgctgctatttcccctccttccttggggggaacaggtcccagttcatccgcctggtcttcatcaccactgtggtcagcacccttctgtccttcctgcggcccacggtcaacgcctacgccctcaacagcattgccctgcacattctctacatcgtgtgccaggagtacaggaagaccagcaataaggagcttcggcacctgattgaggtctccgtggttttatgggctgttgctctgaccagctggatcagtgaccgtctgctttgcagcttctggcagaggattcatttcttctatctgcacagcatctggcatgtgctcatcagcatcaccttcccttatggcatggtcaccatggccttggtggatgccaactatgagatgccaggtgaaaccctcaaagtccgctactggcctcgggacagttggcccgtggggctgccctacgtggaaatccggggtgatgacaaggactgctgagacctgccagcctcttgactatccaaccacccaacaacttgcctgtgtcttgagaagatagccccggtcaggacttgcacctgcgggacactcgtggttccttcctctgtttccccttccgtgtcctccttgtcctgcgctgccctgccttgaggcagatgatggactttgtgacatctctgagcagcagcctggtgactgtggggggctgtctcgtgcatctcccctccatgaccccccccatcctctttcatttcctcctctgtgtccacagcctcccagtgaccattgtcacatgagctggtgggactgtgtcaccaggtactggggtgactgaaggatgtggcatctaaatattagcttct

SEQ ID NO: 112 - DNA, 2048 bp, Homo sapiens
  CDS (558)..(1148)
ggccccttggatcgatactgttcgcctgcggtaccggtccggaattcccgggtcgacgatttcgtccggggctggttcatcacctccgaatattcctgtgacaggagacgcttgcaaaacccgcctccagcctccagcagcaaataaatagaaggcttgcagcccagaaggagccagaagaagtttctaggcgcgcgtgccctgggtttattaagctcctggctccgctctagacctcagcggttctggctgccagcctgggcagcctgggaagcctgggaggacggtggcttgccggtctgtcgtgaggcagtgcggacggggaccctctgggattctgctggatctgccccgggggttacctttgggggctgggaccccagtcgaggggacacaaccgtccctggcagtggttggttctgcttctccctgcagaaaagcagcattttcggaagctgaagaataagctagcccagccacaccaccttgttgtgtgaccttgggcaggtggttctgtctctctgagcctctgtttctctctgagctgagcagccaccatggctgacggtcagatgcccttctcctgccactacccaagccgcctgcgccgagaccccttccgggactctcccctctcctctcgcctgctggatgatggctttggcatggaccccttcccagacgacttgacagcctcttggcccgactgggctctgcctcgtctctcctccgcctggccaggcaccctaaggtcgggcatggtgccccggggccccactgccaccgccaggtttggggtgcctgccgagggcaggacccccccacccttccctggggagccctggaaagtgtgtgtgaatgtgcacagcttcaagccagaggagttgatggtgaagaccaaagatggatacgtggaggtgtctggcaaacatgaagagaaacagcaagaaggtggcattgtttctaagaacttcacaaagaaaatccagcttcctgcagaggtggatcctgtgacagtatttgcctcactttccccagagggtctgctgatcatcgaagctccccaggtccctccttactcaacatttggagagagcagtttcaacaacgagcttccccaggacagccaggaagtcacctgtacctgagatgccagtactggcccatccttgttttgtccccaaccctagggcttctctgattccaggatacattactttagctgaactcagatttagtgcaagtaaaatgttagagggtgcgggggtgaggactgaccacagattccctggatagtgtagtggtagatttctccacaggatagcgcaattggcaaatcatgcttggttgtgttaggccaaaatactagttttgctttctttaccttttctatcttgatgaaaatgttgcacattctatagttgcaaaacacataaaaggggacttaacatttcacgttgtatcttacttgcagtgaatgcaagggttacttttctctggggacctcccccatcacccaggttcctactctgggctcccgattcccatgggctcccaaaccatgccgcatggtttggttaatgaaacccagtagctaaccccactgtgcttccacatgcctgggcctaaaatgggtgatatacaggtcttatatccccatatgggaatttatccatcaaccacataaaaacaaacagtggccttctgccctctggcccagatgtgtccagcacgttctcaaagtttccacattagcactccctaagggacgctgggagccctgtcagtttatgatctgggcctagggtccccccctttcttctggtcccctgtgtttaagtcgggatttttacagaggggagctgtctccagacagctccatcaggaaccaaggcaaaggccagatagcctgacagataggctagtggtattgtgtatatgggcgggacgtgtgtgtcattattatttgagttatgctgttgtttaggggtaaataacagtaaataattaataataataataataataataaaggagctgacgttctt

SEQ ID NO: 113 - DNA, 4352 bp, Homo sapiens
  CDS (43)..(2925)
ttgcaggatgtgagtttgaatctatggaatgtctacagcaagatggatcctatgtctctggagagtttgctttcagatgatttggtggcttttgaacatcagtggactagcttcttcgctaattttgacacagaaattcctttcctgctagaactttcagaatctcaggcgggtgagtgtggtggtgccaggaattctactgggcaccagttaatagacgtaggaataattatccacatccctaaccggcagccatttgttctctttggtaatcactccacacgagaaaacctgaatgctggcaactttaacttcccttctgaaggacatctggtacgaagcactggtcccggcgggagctttgccaagcacatggtagcccagtgtgtctcaccaaagggacctcttgcttgttcgagaacatacttttttggagctactcatgttccttacttgggtggtgacagcaagctgcccaagaaaactgaacaaattaggctattgtcccagatatatgctgctgttattgaggctgttttggctggcattgcatgttatgctaaaacttccagtctaacaaaggccaaggaggtagcagagcaaactctgggatctgggttagattcctttgagttgattccgtttaaggcagccctgcgctccaagatgacttttcatatacatgctgtgaataatcagggaagaattgtaccgctggacagtgaagatagcttatcctttgtgaagacggcttgtatggccgtctatgacattcctgacttactgggaggcaatggttgtttaggatctgtggttttctctgaatcatttttgacttctcagatcttagttaaagaaaaggatggcactgttaccacagaaaccagctccgtagtcctgactgctgctgtacccagattctgctcctggctggtggaagataatgaagtaaaattgtctgagaaaacccagcaagcagtgaggggggatgagtctttcctgggcacttatctaacaggaggagaaggagcatatctttattccagcaatctacagtcctggcctgaggaagggaatgttcatttcttctctagtggccttctgttttctcactgtcgtcatggaagtatcatcatttccaaggatcacatgaattccatttccttctatgatggggattccaccagtactgttgctgctcttctcatagacttcaaaagctcattgcttcctcacctcccagttcatttccatggatcaagcaattttctgatgattgcccttttccccaaatcgaagatataccaagcattttactcagaggtcttctccctctggaaacagcaggataactcagggatctctttaaaagtgatccaggaagatggattatctgtggaacaaaagagattgcactccagtgcacagaagctcttcagtgccctgagccagcctgctggggagaaacggagttccctaaagttactctcagccaaactcccagagctggactggtttctccagcatttcgccatcagcagcattagccaggagcctgtgatgcggacccatcttcctgtgctgctgcagcaagctgaaatcaacactactcacagaatagaaagtgacaaggtaattatcagcattgtaaccggcctcccaggctgtcacgctagcgagctctgtgcttttctggtcactctgcataaggaatgtggcagatggatggtgtatcgccaaatcatggacagctctgaatgttttcatgctgcacacttccagagatacctttccagtgccctagaggcccagcagaaccgctctgcgcgccagtcagcctacatccgcaagaagaccagactgctggtggtgttacaaggctacacagatgttattgatgttgtccaggccctgcagacccacccagactcaaatgtcaaggcctccttcaccattggtgccatcacagcatgtgtggagcccatgagctgctacatggagcacagatttctctttcctaaatgtcttgaccagtgttcacaaggcctggtgagtaacgtggtattcaccagtcacaccacggagcagcggcaccctctccttgttcagctgcagagcctcatcagggctgccaatcctgctgcagccttcattcttgcagaaaatgggattgtcaccaggaatgaagacattgagctgattctctcagaaaacagtttttcaagtcctgagatgctacgatctcgatatttaatgtatcctggctggtatgaaggtaaattgaatgctggatcagtctatcccctaatggttcagatctgcgtatggtttggccgtcccttggagaagactcgctttgtggccaaatgtaaagcaattcagtcctccatcaagccaagtcccttctccggaaacatctaccacatcctgggcaaagtgaagttttcagactctgagaggaccatggaggtctgctacaacacactggccaactccttgagcatcatgccagttttggaaggacccacaccaccaccagactccaaaagcgtatctcaagacagcagcgggcagcaggagtgctaccttgtgttcatcggctgctccctgaaggaagacagcatcaaggactggctgcggcagtcagctaagcagaagcctcagaggaaagccctgaagaccagggggatgctgacgcaacaggagatcaggagcatccacgtaaaacgccacttggaacccctacctgcaggctacttttataatggcacccaatttgttaacttctttggtgacaaaactgattttcacccactcatggaccagttcatgaatgactacgtggaagaagccaaccgggaaattgagaagtataaccaggagctggaacagcaggagtatcatgacctctttgagctgaagccctagaggaaggctgggcccgtacgtcctgcagaatgtccaccttggagatggacgaacgggtgtcttaacctcagctctcctggaggcctctcccttaaggggctgtctttgttctccttggcctgtgtgggctggcttgagtgcatgttgtctttattccctgtatagcgctgaagagcatcacctgcaccattgattttgggggtcgggggaatactcaaggatgagcagatggggcctgcccgtctacgtgtgcaactggcagtccaggagctctgggtttctgataacaggatctcctttgggctcttgaggttggggagaagcattaggattacacagaggagctactgggacttagaaggaaccctggctgcctgaactgtggccgtgtctgggaggcgaggccacgacaggcctcaagcctcagatgctgctccacgagagccatcttccccagtggagtgcctgcctcccctgctaggcccgtttccctgaaggagctggccgtactggccgtgggcccagtcctgggaggagcagcacagccttgcccaggcccagtccacagagccagcagcttgggttgagatgaatgatgtgttcacaaatgaggggatttcccttctggactaaactgaaggagaggcttgttgctttccagaggtgtgtggctcttaagttgacatcagcttttccccttgtgggtggttctttagctctcctgtcacaccattcgggtgtcctaatgtagggacaagagcaagcctgctgctcaggccccctggcgaggcttcacctcactgtggaagggggcgtcctgcagctggttagtcttaggcctggtggctgatcacttgtggggtcagtctccagcacccagcgctcccacaagccttgccaaggaaggcctgcttttcagccacaaacttcaggaaactcatccccccgctccccaaagtgttgttgctggccctgggcttgtgtggctcctgaggattgggaatttcaaataattgcaatacctgagttagaattccttctaatggcatcgttttaagctggaccataaagcagaggggaattacaagtgtgtcccatgcctgaccttcataattggtttgggggacaggggagtcacagccactgatatttaggtgatgtctcttaggacttcagtgcctcagctgcctgaactgtaaatgttttctgaatttcacatatttttttttgcatgccttaggaagaagcacataggtaaaaccagcagtttccagtaatatagggggtttttgagcaaggcccctggagcagcggagagacaagatggagcacatgtagtctgtgtgcctggtcacacagaggcctgcatgcaagtagcaaagcagctctcaagggcttgtcagtaaaatatattaaaaaaaaaa

SEQ ID NO: 114 - DNA, 1247 bp, Homo sapiens
  CDS (158)..(538)
gggacagcgggcagggaaagccgcgggaagggtactccaggcgagaggcggacgcgagtcgtcgtggcaggaaaagtgactagctccccttcgttgtcagccagggacgagaacacagccacgctcccacccggctgccaacgatccctcggcggcgatgtcggccgccggtgcccgaggcctgcgggccacctaccaccggctcctcgataaagtggagctgatgctgcccgagaaattgaggccgttgtacaaccatccagcaggtcccagaacagttttcttctgggctccaattatgaaatgggggttggtgtgtgctggattggctgatatggccagacctgcagaaaaacttagcacagctcaatctgctgttttgatggctacagggtttatttggtcaagatactcacttgtaattattccaaaaaattggagtctgtttgctgttaatttctttgtgggggcagcaggagcctctcagctttttcgtatttggagatataaccaagaactaaaagctaaagcacacaaataaaagagttcctgatcacctgaacaatctagatgtggacaaaaccattgggacctagtttattatttggttattgataaagcaaagctaactgtgtgtttagaaggcactgtaactggtagctagttcttgattcaatagaaaaatgcagcaaacttttaataacagtctctctacatgacttaaggaacttatctatggatattagtaacatttttctaccatttgtccgtaataaaccatacttgctcgtatataccccctgcctccttctgttccagtcagccaacatatgtacataaaagaacacacaaattcaagaagttggaagattaaattatctgcttatttagtgtaggatggtcaggtagctagctataagtgaaaggaaattttgctgaagagactgagaaatgggtagtggaatgactatcaagatgacctcaaactatttaaaaacattttaacttgccatgaagaatcttgatgatttttgtataaatgttgtataaaattcttttacagctacagatttttaaataggatcattgtaaagattaatgagataatgttttaacatagtgcctggtccatgataagtgttaaatttttcaattaccctcagtaactgataatgtagcagaaaatactctatattcagacagacctgaatttgaatcccagctctatgacttatctgttgtgactt

SEQ ID NO: 115 - DNA, 2063 bp, Homo sapiens
  CDS (92)..(1066)
attgataaccgtagacagccttgctagcgttcaaacttaagcttggtaccgagctcggatccactagtccagtgtggtggaattcagagagatgtcgctgctgcggtcgctgcgcgtgtttctggtcgcgcggaccgggagctacccggctgggtctcttctgcgtcagtcgccccagccaaggcacacattttatgctgggccccgtctgtctgcctcggcctccagcaaggagctcctcatgaagctgcggcggaaaacaggctactcctttgtaaattgcaagaaagctctggagacttgtggcggggacctcaaacaggcagagatctggctccacaaggaggcccagaaggagggctggagcaaagctgccaagctccaagggaggaagaccaaagaaggcctgattgggctgttgcaggaaggaaacacaactgtattagtagaggtaaactgtgagacagattttgtttctagaaatttaaaatttcaactgttggtccagcaagtagcccttggaaccatgatgcattgtcagaccctaaaggatcaaccctctgcatacagtaaaggtttcttgaattcctctgagctttctggacttccagctgggcctgacagagaaggctcactcaaggatcagttggctttagcaattggaaaactgggagaaaacatgattcttaaacgagctgcatgggtgaaggtgccatctgggttctacgttggctcttatgtccacggagcaatgcagagtccctcacttcacaagctggtgctggggaagtatggggccctggtcatctgtgagacgtctgaacagaaaacaaaccttgaagacgttggccgccgccttgggcagcatgtggtgggcatggcccccctctctgttggctccctggacgatgagcctgggggagaggcagagactaagatgctgtcccagccgtatttgctggatccctccattaccttggggcagtatgtgcagcctcagggggtgtcggtagtagactttgtgcggtttgaatgtggagaaggtgaagaggcagcagaaactgaataggttccagagacttttggcccaggaggaatatttacttttagctctggacatcattacaaaaaggaatatttcccaaacctcttcagaccgagaatgcatgggtaaaattattaaatagttgtataataaaaataattttttccttgtttgcgtaatactggatttagcttttctgtgcctttcaaaaacaacaggtgggccttattgacgtgatagtgtcgtggagaacaggcatcaacaatactgctgctcccttcaacatagatttattatggtatttctgaaatttctaacttatatgttctgtcttacaccttttatgacatagaactcttttgttctgtttttgctttgcgacactgtgaaccgtgcttctgcctcggaacctccctagttatattacttgtgccacatggatttctttaggattattgattcaaacctagagttgtctggaaaatgtgggttctcttctttgtgattgtctgtagtatgctttgaaggtgctctgcagtggtagacacactggttctggcctcatttaatgaaattaataacacatgcccctatttctcttttggatgatgtgtgggtgggtgggtactgaggtttcctggccagctgtaaggcagattttgacattcttgtgccagaaacagaaattagagtagtccagttacccagagagctcacttaacattgcctctttacttccccagtactgaaacatttcttcaagtataacataaaattaccgtaacaagcagacccagaatactgaaaataactccatttgttcattataggtatctttatttgaaaagtgaaaaatgctttgacacattacagatctgggtatttggattttgcctatggagtgcatatatgatttcaatgatttacaggctaaatagattttagaaataatcatcttaaaattgaaaacaaaggtaggtcctggtataatattaaacataaagttattaaacatttt

SEQ ID NO: 116 - DNA, 1704 bp, Homo sapiens
  CDS (306)..(1532)
cgacccacgcgtgcgccttggcagagtctggggtccctggactgagccatcagctgggtcactgagacccatggcaaggaaacaaaataggaattccaaggaactgggcctagttcccctcacagatgacaccagccacgccaggcctccagggccagggagggcactgctggagtgtgaccacctgaggagtggggtgccaggtggaaggagaagaaaggactggtcctgctcgctcctcgtggcctccctcgcgggcgccttcggctcctccttcctctacggctacaacctgtcggtggtgaatgcccccaccccggaagcacactttgctggccaataatgggtttgcaatttctgctgcattgctgatggcctgctcgctccaggcaggagcctttgaaatgctcatcgtgggacgcttcatcatgggcatagatggaggcgtcgccctcagtgtgctccccatgtaccttagtgagatctcacccaaggagatccgtggctctctggggcaggtgactgccatctttatctgcattggcgtgttcactgggcagcttctgggcctgcccgagctgctgggaaaggagagtacctggccatacctgtttggagtgattgtggtccctgccgttgtccagctgctgagccttccctttctcccggacagcccacgctacctgctcttggagaagcacaacgaggcaagagctgtgaaagccttccaaacgttcttgggtaaagcagacatttcccaagaggtagaggaggtcctggctgagagccgcgtgcagaggagcatccgcctggtgtccgtgctggagctgctgagagctccctacgtccgctggcaggtggtcaccgtgattgtcaccatggcctgctaccagctctgtggcctcaatgcaatttggttctataccaacagcatctttggaaaagctgggatccctccggcaaagatcccatacgtcaccttgagtacagggggcatcgagactttggctgccgtcttctctggtttggtcattgagcacctgggacggagacccctcctcattggtggctttgggctcatgggcctcttctttgggaccctcaccatcacgctgaccctgcaggaccacgccccctgggtcccctacctgagtatcgtgggcattctggccatcatcgcctctttctgcagtgggccaggtggcatcccgttcatcttgactggtgagttcttccagcaatctcagcggccggctgccttcatcattgcaggcaccgtcaactggctctccaactttgctgttgggctcctcttcccattcattcagaaaagtctggacacctactgtttcctagtctttgctacaatttgtatcacaggtgctatctacctgtattttgtgctgcctgagaccaaaaacagaacctatgcagaaatcagccaggcattttccaaaaggaacaaagcatacccaccagaagagaaaatcgactcagctgtcactgatggtaagataaatggaaggccttaacaagtttcctcctccacgttggacaattatgtcaaaaacaggattgtctacatggatgatctcacttttcaggaaacttaaaatttacccattattgggaagcttaaatgaattgaagctatgcaagtcttttatattattaaatatttaaaagtaaacctgtactaatcta

SEQ ID NO: 117 - DNA, 1463 bp, Homo sapiens
  CDS (117)..(650)
atagttcgatccgcctgtggtaccggtccggaattcccgggtcgacccacgcgtccgacacgaggtctgagagacagaggcagcgtgtttgagctgctggtgcggtggtcagcgcgatgcccaaggccaagggcaaaacccggaggcagaagtttggttacagtgtcaaccgaaagcgtctgaaccggaatgctcgacggaaggcagcgccgcggatcgaatgctcccacatccgacatgcctgggaccacgctaaatcggtacggcagaacctggccgagatggggttggctgtggaccccaacagggcggtgcccctccgtaagagaaaggtgaaggccatggaggtggacatagaggagaggcctaaagagcttgtacggaagccctatgtgctgaatgacctggaggcagaagccagccttccagaaaagaaaggaaatactctgtctcgggacctcattgactatgtacgctacatggtagagaaccacggggaggactataaggccatggcccgtgatgagaagaattactatcaagataccccaaaacagattcggagtaagatcaacgtctataaacgcttttacccagcagagtggcaagacttcctcgattctttgcagaagaggaagatggaggtggagtgactggtttacatcacagctgccccaggctgaggcgtcccccggaccagtgaagctggagccagggtgtaaggcaaggaggtgctgtgtggctccagaggggctggccaggtcccatggaatcagaaggttacacacacacgtgcacactccccgctctggggaaggaactgttctcagaggctccaatttatattcatctgggggttcacggaaaagccagaacctggccgagatggggttggctgtggaccccaacagggcggtgcccctccgtaagagaaaggtgaaggccatggaggtggacatagaggagaggcctaaagagcttgtacggaagccctatgtgctgaatgacctggaggcagaagccagccttccagaaaagaaaggaaatactctgtctcgggacctcattgactatgtacgctacatggtagagaaccacggggaggactataagagtggcaagacttcctcgattctttgcagaagaggaagatggaggtggagtgactggtttacatcacagctgccccaggctgaggcgtcccccggaccagtgaagctggagccagggtgtaaggcaaggaggtgctgtgtggctccagaggggctggccaggtcccatggaatcagaaggttacacacacacgtgcacactccccgctctggggaaggaactgttctcagaggctccaatttatattcatctgggggttcacggaaaagccagaacctgctgttttcagggtgggtgatgtaaatatagtgtgtacataataaagcaaatatattttaaaaaaaaaaaaa

SEQ ID NO: 118 - DNA, 2661 bp, Homo sapiens
  CDS (439)..(2019)
gcagggtctaagtattccgtctgcaaaactggcaggccaccaacggccgcgtcccagggcggcctgaaggatgctgataaccgggagccccgccctgggttcggctatcccgggcaccccgggccggcggggcgaggctctccaattgctgggccagagcgggacccttcctttccgcaccctcctgggtatctccggtcttcaggcctccttcggagagccctgctccgagcccattgggcttccaatcttggcctgcctagcgccgagcagccaatcagaaggcagtcctcccgagggggcgggacgagggggtggtgctgattggctgagcctgaagtcgccacggactcggggcaacaggcagatttgcctgctgagggtggagacccacgagccgaggcctcctgcagtgttccgcacagcaaaccgcacgctatggctgacagccgggatcccgccagcgaccagatgcagcactggaaggagcagcgggccgcgcagaaagctgatgtcctgaccactggagctggtaacccagtaggagacaaacttaatgttattacagtagggccccgtgggccccttcttgttcaggatgtggttttcactgatgaaatggctcattttgaccgagagagaattcctgagagagttgtgcatgctaaaggagcaggggcctttggctactttgaggtcacacatgacattaccaaatactccaaggcaaaggtatttgagcatattggaaagaagactcccatcgcagttcggttctccactgttgctggagaatcgggttcagctgacacagttcgggaccctcgtgggtttgcagtgaaattttacacagaagatggtaactgggatctcgttggaaataacacccccattttcttcatcagggatcccatattgtttccatcttttatccacagccaaaagagaaatcctcagacacatctgaaggatccggacatggtctgggacttctggagcctacgtcctgagtctctgcatcaggtttctttcttgttcagtgatcgggggattccagatggacatcgccacatgaatggatatggatcacatactttcaagctggttaatgcaaatggggaggcagtttattgcaaattccattataagactgaccagggcatcaaaaacctttctgttgaagatgcggcgagactttcccaggaagatcctgactatggcatccgggatctttttaacgccattgccacaggaaagtacccctcctggactttttacatccaggtcatgacatttaatcaggcagaaacttttccatttaatccattcgatctcaccaaggtttggcctcacaaggactaccctctcatcccagttggtaaactggtcttaaaccggaatccagttaattactttgctgaggttgaacagatagccttcgacccaagcaacatgccacctggcattgaggccagtcctgacaaaatgcttcagggccgcctttttgcctatcctgacactcaccgccatcgcctgggacccaattatcttcatatacctgtgaactgtccctaccgtgctcgagtggccaactaccagcgtgacggcccgatgtgcatgcaggacaatcagggtggtgctccaaattactaccccaacagctttggtgctccggaacaacagccttctgccctggagcacagcatccaatattctggagaagtgcggagattcaacactgccaatgatgataacgttactcaggtgcgggcattctatgtgaacgtgctgaatgaggaacagaggaaacgtctgtgtgagaacattgccggccacctgaaggatgcacaaattttcatccagaagaaagcggtcaagaacttcactgaggtccaccctgactacgggagccacatccaggctcttctggacaagtacaatgctgagaagcctaagaatgcgattcacacctttgtgcagtccggatctcacttggcggcaagggagaaggcaaatctgtgaggccggggccctgcacctgtgcagcgaagcttagcgttcatccgtgtaacccgctcatcactggatgaagattctcctgtgctagatgtgcaaatgcaagctagtggcttcaaaatagagaatcccactttctatagcagattgtgtaacaattttaatgctatttccccaggggaaaatgaaggttaggatttaacagtcatttaaaaaaaaaaatttgttttgacggatgattggattattcatttaaaatgattagaaggcaagtttctagctagaaatatgattttatttgacaaaatttgttgaaattatgtatgtttacatatcacctcatggcctattatattaaaatatggctataaatatataaaaagaaaagataaagatgatctactcagaaatttttatttttctaaggttctcataggaaaagtacatttaatacagcagtgtcatcagaagataacttgagcaccgtcatggcttaatgtttattcctgataataattgatcaaattcatttttttcactggagttacattaatgttaattcagcactgatttcacaacagatcaatttgtaattgcttacatttttacaataaataatctgtacgtaagaacagaaaaaaaaaa

SEQ ID NO: 119 - DNA, 2263 bp, Homo sapiens
  CDS (253)..(1239)
ttttgatcgcgtgcggaaccgctccggaattcccgggtcgacccacgcgtccggtctctagggtggctagagcgtcctcccgcgctcagtcgcgctgcaggtgacggcgcccggaggctgtcgggaagtaggcggggtgacgtgtggttgacgagctcggcggcgggtttgctgagatctgtggccggcggcagctggtgcggggggcagctgagagcgagaggtggatcggggcggtgtgtggccagggccatgacgggcaatgccggggagtggtgcctcatggaaagcgaccccggggtcttcaccgagctcattaaaggattcggttgccgaggagcccaagtagaagaaatatggagtttagagcctgagaattttgaaaaattaaagccagttcatgggttaatttttcttttcaagtggcagccaggagaagaaccagcaggctctgtggttcaggactcccgacttgacacgatattttttgctaagcaggtaattaataatgcttgtgctactcaagccatagtgagtgtgttactgaactgtacccaccaggatgtccatttaggcgagacattatcagagtttaaagaattttcacaaagttttgatgcagctatgaaaggcttggcactgagcaattcagatgtgattcgacaagtacacaacagtttcgccagacagcaaatgtttgaatttgatacgaagacatcagcaaaagaagaagatgcttttcactttgtcagttatgttcctgttaatgggagactgtatgaattagatggattaagagaaggaccgattgatttaggtgcatgcaatcaagatgattggatcagtgcagtaaggcctgtcatagaaaaaaggatacaaaagtacagtgaaggtgaaattcgatttaatttaatggccattgtgtctgacagaaaaatgatatatgagcagaagatagcagagttacaaagacaacttgcagaggaggaacccatggatacagatcaaggtaatagtatgttaagtgctattcagtcagaagttgccaaaaatcagatgcttattgaagaagaagtacagaaattaaaaagatacaagattgagaatatcagaaggaagcataattatctgcctttcattatggaattgttaaagactttagcagaacaccagcagttaataccactagtagaaaaggcaaaagaaaaacagaacgcaaagaaagctcaggaaaccaaatgaagatgttttcagatatgtacacatttctgcttctgcacatattttcatggaaaccattatgtataaagaacttagagcaacatcctaattggctcagtgcacgtttggcaatagtgccagcctgtcttgtctttaatgcatggattcataaacttcttccctacctgcatcatgtgcatgtagtgcatattaaatgaaagtgatattaagaatgctttcccaaattccattatttgacattgagtctgacaactgttagttttctggttgtctaactaccatatgaagctagaaaatgcacaaacgatattccttatctgtaatttaaatacttaaaatttgcaattgtcagatcttgattaaactggttgtcttatttcttctcatcattaacggaaaaaaatcagtatttctatctttgatatctaagtgttttgaggattttaaaactgaattttatctgctataccagttatttgagaaagtatgattttaatgtaaatcatttaaaaaggacaaaagtataatttccagtgattttcactgctgtcagtagaaaagtaataaacatctcaattttattttagtaaattttcttcaagtgtttggggttatttgtttatgtattagagaattgtttcaggaaggtctgagtattatgcttcaaagcaaaatttcaggttaagaagaaattgtaaatcttaaagaatgttggtgttactctcaatggaatattgtttcaagcttgtaagctgtgtataaaaaaactggaggtctgacagttcatgttatctgcttttttaaaaagatggtagtggtgatgggggtctttctatgccaatttgaataaatttcgtacagcctgcagttttcaagagccatatgtaatttgctcacaattgatttttaaaaattgatttgggagttgctttgtaataatcttctgcttctaatcttcctttgcaagtcagactttaaaagaagactttataaagcttttttttttaaaggaagcaacctt

SEQ ID NO: 120 - DNA, 4646 bp, Homo sapiens
  CDS (505)..(2751)
gaaattggtttttcctcggccaataatctgtttctttaaaaaaagaaaaattcgttacctattgccactgacctggctacttcagagttcggagggaaatagcgtctccgtaccctcgccccacctgggctgctcctcggaccgccgctcgtcccagactccaggaggcgccaccaggcctcgctgaccccgctccatatctccgggagccctcagctggtcggccgcggcgaccggaagctccggactgaggtactggttccgcccgccgctcttccagccgagactcggcagcggcggtcggagcggctgccacgccgcacctgcccgcgagggggcgcgccaggcccaggccgcagccgactgccgcgctctctgcccccgccctccgccatccccggactgcgctcacctgtctgggccgctggcctgggaggcgggggccggcgggagccaagccgaggaaagggcggagcggctctccgggcgcgtcatcggagcaccatggcggagctaggagctggcggcgacggccacaggggcggcgacggcgcagtgcgaagcgaaacagcacccgacagctacaaagtgcaagataagaaaaatgcctccagccgccctgcctctgcaatttcaggacaaaataacaaccactcaggaaataaaccagaccctccgcctgtgttacgtgttgatgaccggcagcggctggcccgggagcgacgtgaggaacgggagaaacagctagctgcaagagaaatagtgtggttagaaagagaagagcgagccaggcagcactacgagaagcacctggaagagcggaagaagaggttggaggagcagaggcagaaggaggagcggaggagggctgctgtggaggagaagcggaggcagagacttgaggaggacaaagaacgccacgaagctgttgtacggcgcacaatggaaaggagccagaagccaaaacagaagcataaccgttggtcgtggggaggctctctccatgggagccctagcatccacagtgcagatccagacaggcggtcagtttccaccatgaatctttcgaaatatgttgatcccgtcattagcaagcggctctcctcttcatctgcaactttactaaattctccagatagagctcgccgcctgcagctcagcccatgggagagcagcgttgttaacagactcctgacgcccacacattcgttcctggccagaagtaaaagcacagctgccttgtctggagaagcagcatcttgcagccccatcatcatgccctacaaagctgcacactctagaaattcgatggatcgaccaaaactctttgtaacaccacctgagggctcttctcgcaggaggatcattcatggcacagcgagctataaaaaagaaagagagagagaaaatgtactcttcctcacatctggcacccgaagggctgtatctccatctaatcccaaagcaagacaaccagctcgctcccgactttggcttccgtccaagtctcttcctcatttgcctggcacacccagaccgacatcctccttgccacccggctcagtcaaagctgctcctgctcaggtccggcccccatcccccggcaacatccgccctgtcaagagggaagtcaaagtggagcctgagaagaaagatcctgagaaggaacctcagaaagttgccaatgagccctcactaaagggcagagcacctttagtgaaggtagaagaagccacagttgaagagcggacacctgctgaaccagaagttggccctgctgctccagccatggccccagctccagcctcggccccagctccagcctcggccccagctccagccccggtccccaccccagccatggtctcagccccgtcatccactgtgaatgccagtgcttctgttaagacttctgcaggcaccaccgacccagaggaggccacaaggcttctagctgagaagaggcggctggcccgagagcagagagaaaaggaagaaagggagaggagggagcaggaagagcttgaaagacaaaagagagaggaattggctcaacgtgtggctgaagagaggacgactcgccgtgaggaggagtcgcgcaggctggaagccgagcaggcccgggagaaggaggagcagctgcagcggcaggcggaggagcgggcgctgcgcgagtgggaggaggcagagcgcgcccagaggcagaaagaagaagaagctcgcgttcgtgaagaagcagagagggtccggcaggaacgagagaagcatttccagagagaagagcaagagcgcctggagagaaagaagcgacttgaggagattatgaaaagaaccaggagaacagaagctacagataagaaaaccagtgatcagagaaacggtgatatagccaagggagctctcactggaggaacagaggtgtctgcacttccatgtacaacaaacgctccgggaaatggaaagccagttggcagcccacatgtggttacctcacaccagtcaaaagtgacagtggagagcactcccgatttggaaaaacaaccaaatgaaaatggtgtatctgttcagaatgaaaattttgaagaaattataaacttacccattggatctaaaccatccagattagatgtcaccaacagtgagagcccagaaattcctttgaatccaattttggcctttgatgatgaagggacacttgggcccctgcctcaggtagatggtgttcagacacagcagactgcagaagttatatgagtgtttcttctgaagaaccaaagctgaaatttaatgagaatttctacaattaatggaattcctttcctgctataaaggagcatcccctccacccgttttctagagttcttgaccatcattttgaaaagatttattaaaactagctaaagacaacagactggatagcttttctaataattttcatcaataggaaaaaagaaatacgtctcattcttcaatactttaaaatggctttttccagtgtgctccttcttagcaatcaatatttttctgcattctttaaaagacaagagaatttggttataaaagaaatgggctgactaggcatgatttttttggtcttaaaagcttaacatgtaaaattggcaaaaaaaattttttaccttttataatacttgaaaaataagtacctctttgttctacaagtagaatgaataggagaagagtttaagcctgtttttttaaaatattattgcaaagagctctatttgtagaagcaaattataggcagattaccaggttcttataaatacagcttgtacatggacattctgcaaacccagctgtcacatttttcttgcaactccttttgcaaaagcagactaaaatgttttaaaatgtgaaaaaacattattttttcaaagcaagaaaataatttactgccctcttacataatgtatttataaagtttttccagataaactaatcaaataaattagaataatgtgacaacattacaaatttaatttgttagctgcattccttctgatgttaccacgatagaatgttactgatgattcagggctatttctgaagtctgtatgttgctgctgtccccagtgatggtggacttatctttgccttacctgatcacaaattatgttggggaaaataaagatttaatatttctttaaatagaaaaagaatttggttttgctcgtttaagagcaatgagaaaatgatggaatgttgactgtgtttggcacacaggacacggaccttcatggaagtccttgctctgcgtggcatctgtcagcttttcacctttcattcttattcttcacttttgctgctgagcctagctgtacaaacttgcactttcatttgctaatataaattcagttttattttaccattttagagactactaatgattaaatgtagaaggagagggtgcacatgtttttatgtggagtgtttaaaagataaatttataccactgtaatgtgcagcttttattaaaagagaaattggttgaactgctaggttgaatgagagacttcatctattggactattttttttaatccaggcatatggtctttagtaatggcttgtaatttgtgaaaacattaatttgggggttttccctgttttcagttgtccatgtacacatagtcattatattagaaaagaaatctgttcaacaaacttgtttaatttgtttaaatcaacatagcatgaaacaccaaataaaatgtttgacatagttttacttttagctttctcatatgttataacttcactcagattgattcttgagtcttcagattgtccttcatttaactcagtgacattttcctagcctcctgttgattaagcatataggatagccttatttaaaatttagagcagtaggtgtattttggctgtttttctttttcatgtgtgtttttaaactttagtcatcattagcaaacggaaagccttctaagtaatcaagttttaattagaagtggtgcaaaattcttaattatattgtgttaaagagcagcgctgccagagaatgaccctgacctttacaatggctggcttgctttttggccagcactggaaaaatctatatttacttgcagaccttaaggaggtcttcagtattcaccctacattaag

SEQ ID NO: 121 - DNA, 2829 bp, Homo sapiens
  CDS (145)..(2418)
cgacccacgcgtccgaggaggcggcggcggcggcggcggcacacagccggttgttgagccgcttagccacctcgtgtatgcagagaccatgtgtgtctgatctgctgggatcctagagctggaacaggagggtcacgcagcacaatgccagctctgcccctggaccaactccagatcacccacaaggacccgaagacaggaaagctgaggacttcaccagcgctgcaccccgagcagaaggcagaccggtattttgtgttatacaaaccgccccctaaagacaacattcccgccctagtggaggagtacctggaacgcgccaccttcgtagccaatgacctcgactggctcctggccttgcctcacgataaattctggtgccaggtgatctttgacgagactctacagaagtgcctggactcctacctgcgctatgtcccccgcaaattcgacgagggggtggcctcagcccctgaggttgttgacatgcagaagcgcctccatcgaagtgtttttctcaccttcctccgcatgtccactcacaaggaatccaaagatcacttcatttccccttctgcgtttggagaaatcctctacaataacttcctctttgacattccaaagatcctggacctctgcgtgctctttggaaaaggcaactcaccactgctccagaagatgataggaaacatctttacacagcagccaagttactacagtgacctggatgaaaccctgcctaccatccttcaggtcttcagcaatatcctccagcactgtggtttgcaaggggacggggccaataccacaccccagaagcttgaggagaggggccgattgacccccagtgacatgcctctcctggaattaaaggacattgttctctacctttgtgatacctgcaccacactttgggcctttctggatatcttccctttggcttgccagaccttccagaagcacgacttttgttacagactagcttccttctacgaagcagcaattcccgaaatggagtctgcaattaagaagaggaggcttgaagatagcaagcttcttggtgacctgtggcagaggctctcccattccaggaagaagctaatggagattttccacatcatcctgaaccagatctgcctccttcccatcctagaaagcagctgtgacaacattcagggcttcatcgaagagttccttcagatcttcagctccttgctgcaggagaagaggttcctccgggactatgatgcactcttccccgtggccgaagacatcagcttgctgcagcaggcctcatcagtcttggacgagacgcggactgcctacatcctccaggcagtcgagagtgcatgggaaggggtggacagacggaaagccacagatgctaaagacccatcggtgattgaggagcctaatggggagcctaacggggtcacggtgacagcagaggcagtcagtcaagcatcatcacatccggagaactcggaggaagaggagtgcatgggagcagccgcggctgtgggccctgccatgtgtggggtggaactggactctctcatctcccaagtgaaggacctgctgccagaccttggtgagggcttcatcctggcctgcctggagtactaccactacgacccagagcaggtgatcaacaatatcctggaggagcggctggcccccaccctcagccagctggaccgcaacctagacagagaaatgaaaccagaccctacacccctgctgacgtctcgccacaacgtcttccagaatgacgagtttgatgtgttcagcagggactcagtagacctgagccgggtgcacaagggcaagagcaccaggaaggaggaaaacacgcggagtttgctgaacgacaagcgtgcagtggcggcacagcggcagcgctacgagcagtacagcgtggtggtggaggaggtgccactgcagccaggcgagagcctgccctaccacagtgtctactacgaggatgagtacgatgacacatacgatggcaaccaggtgggcgccaatgatgcagactctgatgacgagctcatcagccgcaggccattcaccatccctcaggtgctgagaaccaaagtgcctagagaagggcaggaggaggatgacgacgatgaggaagacgatgctgacgaggaggctcccaagcccgaccattttgttcaggaccctgcagtgctgagagagaaggcagaagccaggcgcatggcctttctcgccaagaaagggtaccggcatgacagctcaacagcagtggccggcagcccccgaggccatgggcagagccgcgagacaacccaggaacgcaggaagaaggaagccaacaaggcgacaagagccaaccacaaccggagaaccatggccgaccgcaagaggagcaaaggcatgatcccatcctgagacctggtgcagggccagtggggaggcagcggcaccagactcaccaggccgcgctcccatcgcctggggcctcctcactaggggccccaagttcaactcaacccctcaacagcctcagctttgcagcccctgagaaggccgcctctcatctaccagccagccatgagcgccttcctgcagaacacacagtgccttatgccacagccgaagaatccgtggggccggcaagcaggcaccttcccccagctgcgctagcgggaaagagatggggatggagtcccaaggcaagcgccccaaacctcgggccacaagacaccacttcccctttaccctggacagcaggaaacctgtatattcaaaaacacaaaaagtcctgctaataaaatttttgaccctttcaaaaaaaaaaaa

SEQ ID NO: 122 - DNA, 457 bp, Homo sapiens
  CDS (106)..(312)
ccgtcgtctgcagcttccggtccggaattcccgggtcgacccacgcgtccggtccagttgcttggagaagcccgttcaccgcctccagctgctgctctcctcgacatggaccctgagacctgcccctgcccttctggtggctcctgcacctgcgcggactcctgcaagtgcgagggatgcaaatgcacctcctgcaagaagagctgctgctcctgctgccctgcggagtgtgagaagtgtgccaaggactgtgtgtgcaaaggcggagaggcagctgaggcagaagcagagaagtgcagctgctgccagtgagaaggcacccctccgtgtggagcacgtggagatagtgccaggtggctcagtgccacctatgcctgtggtgaagtgtggctggtgtccccttcccctgctgaccttggaggaatgacaataaatcccatgaacagcaaaaaaaaaa

SEQ ID NO: 123 - DNA, 1372 bp, Homo sapiens
  CDS (47)..(775)
atttggccctcgaggccaagaattcggcacgaggagaaaggttgtgatggcggctatagctgcatccgaggtgctggtggacagcgcggaggaggggtccctcgctgcggcggcggagctggccgctcagaagcgcgaacagagactgcgcaaattccgggagctgcacctgatgcggaatgaagctcgtaaattaaatcaccaggaagttgtggaagaagataaaagactaaaattacctgcaaattgggaagccaaaaaagctcgtttggagtgggaactaaaggaagaggaaaagaaaaaggaatgtgcggcaagaggagaagactatgagaaagtgaagttgctggagatcagtgcagaagatgcagaaagatgggagaggaaaaagaagaggaaaaaccctgatctgggattttcagattatgctgctgcccagttacgccagtatcatcggttgaccaagcagatcaaacctgacatggaaacatatgagagactgagagaaaaacatggagaagagtttttcccaacatccaatagtcttcttcatggaacacatgtgccttccacagaggaaattgacaggatggtcatagatctggaaaaacagattgaaaaacgagacaaatatagccggagacgtccttataatgatgatgcagatatcgactacattaatgaaaggaatgccaaattcaacaagaaagctgaaagattctatgggaaatacacagctgaaattaaacagaatttggaaagaggaacagctgtctaatcccttcaagaactgtttatagaagcttgagaatggggtaaaaatttctgctagcaaaatcaagttctttttgaaattttatcagtaatccagaatttagtagtccatgccttctcactcagcatttagaaataaaaatgtggtttcttaaacgtatatcctttcatgtatatttccacatttttgtgcttggatataagatgtatttcttgtagtgaagttgttttgtaatctactttgtatacattctaattatattatttttctatgtattttaaatgtatatggctgtttaatctttgaagcattttgggcttaagattgccagcagcacacatcagatgcagtcattgttgctatcagtgtggaatttgatagagtctagactcgggccacttggagttgtgtactccaaagctaaggacagtgatgaggaagatggcagtggccaccggaggactggagcagtccctcctcatggcggcctgtgaccaaggtcggggaggagtggagctatccttccatgatctgatcatgtacagttccctttttaaaaagcaataaatgcttgggattagaatttcaaaaaaaaaa

SEQ ID NO: 124 - DNA, 1266 bp, Homo sapiens
  CDS (67)..(672)
  misc_feature (1)...(1266): n = a,t,c or g
nttgagacttcgtagaccctagtccagngtggtggaattcggaagtgggaagagagaaaggttgtgatggcggctatagctgcatccgaggtgctggtggacagcgcggaggaggggtccctcgctgcggcggcggagctggccgctcagaagcgcgaacagagactgcgcaaattccgggagctgcacctgatgcgggaatgtgcggcaagaggagaagactatgagaaagtgaagttgctggagatcagtgcagaagatgcagaaagatgggagaggaaaaagaagaggaaaaaccctgatctgggattttcagattatgctgctgcccagttacgccagtatcatcggttgaccaagcagatcaaacctgacatggaaacatatgagagactgagagaaaaacatggagaagagtttttcccaacatccaatagtcttcttcatggaacacatgtgccttccacagaggaaattggcaggatggtcatagatctggaaaaacagattgaaaaacgagacaaatatagccggagacgtccttataatgatgatgcagatatcgactacattaatgaaaggaatgccaaattcaacaagaaagctgaaagattctatgggaaatacacagctgaaattaaacagaatttggaaagaggaacagctgtctaatcccttcaagaactgtttatagaagcttgagaatggggtaaaaatttctgctagcaaaatcaagttctttttgaaattttatcagtaatccagaatttagtagtccatgccttctcactcagcatttagaaataaaaatgtggtttcttaaacgtatatcctttcatgtatatttccacatttttgtgcttggatataagatgtatttcttgtagtgaagttgttttgtaatctactttgtatacattctaattatattatttttctatgtattttaaatgtatatggctgtttaatctttgaagcattttgggcttaagattgccagcagcacacatcagatgcagtcattgttgctatcagtgtggaatttgatagagtctagactcgggccacttggagttgtgtactccaaagctaaggacagtgatgaggaagatggcagtggccaccggaggactggagcagtccctcctcatggcggcctgtgaccaaggtcggggaggagtggagctatccttccatgatctgatcatgtacagttccctttttaaaaagcaataaatgcttgggattagaatttcaaaaaaaaaa

SEQ ID NO: 125 - DNA, 1302 bp, Homo sapiens
  CDS (10)..(978)
gcactgagaatgtccctgagacccagaagggcctgcgctcagctgctctggcaccccgctgcagggatggcctcctgggctaagggcaggagctacctggcgcctggtttgctgcagggccaagtggccatcgtcaccggcggggccacgggcatcggaaaagccatcgtgaaggagctcctggagctggggagtaatgtggtcattgcatcccgtaagttggagagattgaagtctgcggcagatgaactgcaggccaacctacctcccacaaagcaggcacgagtcattcccatacaatgcaacatccggaatgaggaggaggtgaataatttggtcaaatctaccttagatacttttggtaagatcaatttcttggtgaacaatggaggaggccagtttctttcccctgctgaacacatcagttctaagggatggcacgctgtgcttgagaccaacctgacgggtaccttctacatgtgcaaagcagtttacagctcctggatgaaaaagcatggaggatctatcgtcaatatcattgtccctactaaagctggatttccattagctgtgcattctggagctgcaagagcaggtgtttacaacctcaccaaatctttagctttggaatgggcctgcagtggaatacggatcaattgtgttgcccctggagttatttattcccagactgctgtggagaactatggttcctggggacaaagcttctttgaagggtcttttcagaaaatccccgctaaacgaattggtgttcctgaggaggtctcctctgtggtctgcttcctactgtctcctgcagcttccttcatcactggacagtcggtggatgtggatgggggccggagtctctatactcactcgtatgaggtaccagatcatgacaactggcccaagggagcaggggacctttctgttgtcaaaaagatgaaggagacctttaaggagaaagctaagctctgagctgaggaaacaaggtgtcctccatcccccagtgccttcacatcttgaggatatgcttctgtactttttaaaagcttatagttggtatggaaaacatttttcttatttttaagtgttattaattatatctatggaaaaactattcctgaaatatatacagtcttatgtcccaatcagagtcttttaacctatgatttaaaaatgtataagtaacagaaattaacatattttaatgactttactttttatttctaagaaaagtatttgaaaaatggaataattttaaatcaatgataattctagggatcatgaactcccagaaga

SEQ ID NO: 126 - DNA, 6774 bp, Homo sapiens
  CDS (401)..(3655)
gggccggccaattgatgggcgatcaattgtaactcgcgtctaaacttaagcttggtaccgagctcggatccactagtccagtgtggtggaattcctcaggtggtcaggaacacttttggaagataaatctaaggaagagagtggtacttagcagctgtcattttcctttcaggctcctgtgacgtttgatgacatcactgtgtacttactccaggaggaatgggtgctgctgagccagcaacagaaggagctctgtggttccaacaagctggtggcaccactgggaccaactgttgccaatcctgagctgttccgcaagttcggacgagggccagagccatggcttggcagcgtccagggccagaggagccttctggagcatcacccaggaaaaaaacagatgggctacatgggagaaatggaggtgcaaggtcccaccagggagagtggacagtccctcccgcctcagaagaaagcctacctttcccacctcagtacaggcagtggacacatcgagggagactgggccggaagaaacaggaaacttctgaagccccggtccatccagaagtcgtggtttgtgcagtttccgtggctgatcatgaatgaggagcagacggctctgttctgctctgcttgccgagaatacccctccatcagggacaaacggtcaagactaatagaaggttatacaggaccattcaaggtggagactctcaaataccacgcgaagagcaaggcccacatgttctgtgtcaatgccttggcagcgagggaccccatctgggcagcccggttccggagcatcagagacccacctggagatgttctggccagcccggagccgctcttcactgcagattgccccatattctaccccccagggcctctgggaggatttgatagcatggctgagctcctgccaagttcaagagctgaactagaggaccctgggggggatggagcaattcctgcaatgtatctagactgcatttcagatttgaggcaaaaagaaatcactgatggcatccacagctcctcagacattaatattttatataatgatgcagtagaatcctgcattcaggacccttctgcagaggggctgtcggaggaggttcctgtggtgtttgaggagctgccggtggtgttcgaggatgtggcagtgtatttcacccgggaggagtggggcatgctagacaagcggcagaaggagctgtacagagacgtgatgcggatgaactacgagctgttggcatccttgggacctgctgctgccaagccagacttgatctccaaactggagcggagggctgcaccctggatcaaggacccaaatgggccaaagtgggggaaaggtcgtcctccagggaacaagaagatggtggcagtgagagaggcagacacacaggcctcggctgcagactccgcgttgcttccaggctctcccgtggaggcccgtgcctcctgctgcagttccagcatttgtgaggaaggagatggacctaggagaatcaagaggacatacaggccccgttccattcagaggtcatggtttgggcagttcccatggttagtaattgaccccaaagagaccaaactcttctgctcagcctgcatagaaagacctaatctccatgataaatcatctcggttagtcagaggttacacggggccttttaaagtggagactttaaaataccatgaagtcagcaaagcgcacaggctctgtgtcaacacggttgaaatcaaggaagacacccctcacactgccctcgttccagagatctccagcgacctcatggccaacatggagcactttttcaatgccgcctactccattgcataccactcaaggcccctgaatgactttgagaagatcctgcagctcctccaaagcacggggaccgtgatattaggcaagtaccgcaatcgcacggcgtgcactcagttcatcaagtacatctcagagaccctgaagagggagatcctggaggacgtgcggaactcgccctgtgtgagcgtgctgctggacagctccaccgacgcctccgagcaggcctgcgtggggatttacatccgctacttcaagcagatggaggtgaaagagtcctacatcactctggcccctctctacagtgagacagcagatgggtacttcgagaccatcgtttctgccctggatgagctggacatccccttccggaagcctggctgggtggtggggctggggacggatggctcagccatgttgagctgcagaggaggccttgtggaaaagttccaggaggtcatcccgcagctgctccctgtccactgcgtggcccaccggctgcacctggctgtggtggacgcctgcgggagcatcgatctggtgaagaagtgtgaccggcacatccgcaccgtcttcaagttttatcagtcctcaaacaagaggctgaacgagctgcaggaaggtgcggcgcctctggagcaggagatcatccgcctgaaggatctgaatgcggtccgctgggtggccagcaggaggcgcacgctgcacgcgctgctcgtgagctggcccgccctggccaggcacctccagagggtggcagaggctgggggccagattgggcaccgggccaaagggatgctgaagctcatgcgcggcttccactttgtcaagttctgccacttcctgttggacttcctgagcatctacaggcctctgtccgaggtgtgccagaaggagatcgtgctgattacagaggtgaacgccacgctgggccgcgcctacgtggcactggagagcctccgtcaccaggcagggcccaaagaggaagaattcaacgccagcttcaaggatgggcggctccacggcatctgcttggacaaactggaggtagcggaacagcggttccaggcggatagggagaggacagtcctgacggggattgagtacctccagcagaggtttgacgcagaccgacccccacagctgaagaacatggaggtgtttgacaccatggcctggccaagtgggattgaacttgccagttttgggaatgatgacattctcaacctggccaggtatttcgagtgctccctcccaacaggatacagtgaggaagctctgctggaggagtggctgggcctgaaaaccattgcccagcacctcccgttctccatgctttgcaaaaacgccctggcccagcactgccgcttccccctgctaagcaagctcatggccgtggtggtctgtgtgcccatctccacctcttgctgtgagcgggggttcaaggccatgaaccgaatcaggaccgatgagaggaccaagctctccaacgaggtgctcaacatgctcatgatgacagctgtgaacggtgtggccgtcacggagtacgacccccagcccgccatccagcactggtacctgacctcctcaggccggcgtttcagccatgtctacacctgtgcccaggtgccagcccgctcccctgcaagcgccaggctcaggaaggaggagatgggagccctctatgtggaggagcccaggacccagaagccacccatcctgccctccagggaagcagcggaggttctgaaggactgcatcatggagcctcccgagagactcctgtatccccacaccagccaggaggcccccgggatgtcctgagggacagggagtccttgggactgccttggagacgcctctgtgatcactgggacaggctctgcagattctaggctgccctaggatcttctgctggtggcgatggtctctaagcaccaggaagtgggcagtggcatcccagagcagcaggggtatcaggaggtgcatgacctgtttcctgaggccccactcagcacagccatgcctcacagcacacaaatgtgccagaaggttctatatctcaagttcatttttaaggtgctgcagaaaataaccccatcatgaaaggtttcagcccctgagttttggtggcaagaggagtgtcctggtaggggagactgttggacatccctggggaatgttccagggaggctgcccacagtctaagtgggaatgggaaagaccaccttgttagagggggaggttgcccctgctctagggacagctggcctggctgcaagagcccccagaggcattgttctgggacttcctaccctggctcccacagcagaagcagtgaggccgtggtctcgtgcggaactctacctcttcccagggcttcctttagggcgaaacaatcacaagccctttgcacagagcacccaagaaagttctcttcctgcagctccagatggtggagctgggctcttctggcagggggtctggtgcttcccggagagccgagccgcgtttaacccgtggcatgcccggcccggtttacccaggagaggatgggacgaagttggagttgggaggcttgggatgcagccccagctctgctgcaggcagtggtctgattaatcccttcctctttgtgcctcagtttccctctccatgaagtggcagcagagatccaagtgcctgctgactccccatctgccctaggattagtgaatgagagcctcgagctccctgaaagacctctggctgcagtgtggacttagctgccatctgccccatcctcgtccttagtgggacaggtaggaatttgtctccaaagtccttgttgtaggagttgctctctgaatgcaccatctgcacgacaggctagtccactcttctctgagctgccctggggactctgcaccaggatctccagggcccactgagacatccccgaatgggcgctcagtgacaagggctttgaacaacctcctccagggactttgggcctgctctagcttcagaaccacagaaccaccgccctagaggcacagaggggcttctggcactgctaggttcacaccctcctcgcccatcttccttccacctaaagtgaagcacttttccttccaagggcagctccgtcttggcaggctcaggaggccgcttatcaggaggaggatgattttgtctaggttctgccttccttaaccatgggcaggaaatgaggcaagtcagcaggcagggtttctctgccctgcctgatacttgttttaaacaggcaggaagtgggcgccatccatcccagcttgcttgctgcctggctcaggcaggtcctgtgctgtgctgcaggcccctgtgggtgggccctttctccatagtctgccgcttcccattcccagggtagatgctggcatctgagcacctgagtacccttcctattcccagggtagaagctgctgtctgagtacccttcccattcccagggtagatgctggcgtccgagcccctccccggtaccgcaggtaccctggtaccccacctgccctttcatccccaccccagtacttagccttagcactgttgctttcgtgtcattttcagttctagtcaggaattcctttcttgctttctgcctttgacctgtggaaatgtctcccagccctgtgggtctggcggtcagagggaccccacaggcctgtggtgcgggagctctgggaggtgttactatctgcgtggctaaggcacacacaggcctccttctccccatcaccgtctccatgggcgttcaggaacttgcccaggtcaggcactgtggatgtgaactcgtggaaagggagggagaaaggcttttttaggtggggctatagcctctgccctacccacagggattccacatcaaggtgctgttccagcacacatgcttcctgcggcctcttcatccttgaagaatccctcagagcaggaggccatcctgtgagcagccgtgagtgggtctctgtgggagtagttctggagctgaggtggaagctaggggaagcaactcgccctctccacgtcagcatcagcgtgctccgaggacaccggccagtgccttccttaggtggtgggaaaggggtgtccctgtgcagcggggccactgagaatgctgtttgtcataaaatttgcactacccgatttctcaaggggcacaggcctgctccgttcccctttgtcagccaatggccaagaaggaagaagatgactgccatcttattcctgaacttcctcattcaggacccccgtggaaacacagtgagcatccttatcagaggccctggcccaggctggcccctttgctttgtttggagaggctggctgagtttcagcccctagtgctggagacccccttgttggagaggcttcctgtttatgcctcacaagaagaaaaaccacagggctctgggaggggaagaagcatgcactcccgctttggctggagtcccagcgcttgtcgccaccctcctccttgcctgtagtcttgacagcatccgtatgtacgtgtcctggcatttcccctccctctccctgatgactgatacccaccgggtctgacattccaagtaaccagtatgtaactggtagtttgatcccaatagccatagcgactccaggtgggagtgagggagcccagccccctgtcctggaagataccttagagtatgtgaccgcgctccagacccttgcttctctctcctgcagaggatgagtttctagggtgctaagtacctatcagaacagtgtggaggggcgggtccctcatacaggtgtgtgcttagccaaatacagtaactgtgactggcccagggatgttctctcctctattttcaaagatgaaaggaggttttaaaaaccatgtttgattcctaaccttttgctacctgaataaagcagagtctatttcaacacaaaaaaaa

SEQ ID NO: 127 - DNA, 2104 bp, Homo sapiens
  CDS (451)..(1512)
cctccgccgcctcctcctcctccggcagccgcggcagcaggacccaccctgccccccaccccaccctctgtcggctccggctgcggctccagcctcgactattattttatttattttgggtcgtgcacaagcctcagtgcctgcagtccgcgcctcctcggcccgcgggcgcctcctcccttggctccggagccccagaccccggccaccctcgattcgacaaccccagacccctgccagctgccgcgagtctccgctgctggaatcttgttagcggctgtctttttggagggttctggtttcccgacatttttgtttccagcccaggagaggatatcgtgattttccccccttgagcccaggctctgctctctgggggggtggggggcgctccaagccggggagccgtgccagccgagtcgtgcgggctgtggcagggaaggggccaccatgggatgtactctgagcgcagaggagagagccgccctcgagcggagcaaggcgattgagaaaaacctcaaagaggatggcatcagcgccgccaaagacgtgaaattactcctgctcggggctggagaatcaggaaaaagcaccattgtgaagcagatgaagatcatccatgaagatggcttctccggagaagacgtgaaacagtacaagcctgttgtctacagcaacactatccagtccctggcagccatcgtccgggccatggacactttgggcatcgaatatggtgataaggagagaaaggctgacgccaagatggtgtgtgatgtggtgagtcggatggaagacaccgagcccttctctgcagagctgctttctgccatgatgcggctctggggcgactcaggaatccaagagtgcttcaaccggtcccgggagtatcagctcaacgactctgccaaatactacctggacagcctggatcggattggggccgccgactaccagcccaccgagcaggacatcctccgaaccagggtcaaaaccactggcatcgtagaaacccacttcacattcaagaacctccacttcaggctgtttgacgtcggaggccagcgatctgaacgcaagaagtggatccattgcttcgaggacgtcacggccatcattttctgtgtcgcgctcagcggctatgaccaggtgctccacgaagacgaaaccacgaaccgcatgcacgaatccctgaagctttttgacagcatctgcaacaacaaatggttcacagacacgtccatcatcctgtttcttaacaagaaggacatatttgaagagaagatcaagaagtccccgctcaccatctgctttcctgaatatacaggccccagcgccttcacagaagccgtggcttacatccaggcccagtacgagagcaagaacaagtcagcccacaaagagatctacacccacgtcacctgcgccacggacaccaacaacatccagtttgtctttgatgctgtgacggacgtcatcatcgccaaaaacctgcggggctgtggactctactgagcccagccgccctgcccggcacccttgccctgcctggcctgccgcccccccttccttggaaccaggctccaccactctcagaccactctttgcacttgaggaagaagacctcagaggctggcaccaagggagggaggagggagcatcctccacccgcaccccccaacagaacttgtggtaacgcaggggcggggcggggctgctgagtgcatgctgcaaggccaggagactccacgctcacagcctctgtgtcatctgtgagtgcttgatcgggaagctggggggacagggcagggcccagatgggcacaccctgcacctgatgactcactggaagcctcggagtgtcctcctgtcatcttgggtggtgcaggggcgcagatggccctgcagcagggtgctggcagggtggggtcataggagccatccttcagctttgcctggggtctctggtggagggcagttccgtcaacaaaagccagggaaggggccaccatgggatgtactctgagcgcagaggagagagccgccctcgagcggagcaaggcgattgagaaaaacctcaaagaggatggcatcagcgccgccaa

SEQ ID NO: 128 - DNA, 1777 bp, Homo sapiens
  CDS (41)..(994)
tcggcacgagccgcggcgccggcactgcagctggggctgagaagccaggacggcccgagaactgacagacggagtgacagacggactgaccatggccgaccagccaaaacccatcagcccgctcaagaacctgctggccggcggctttggcggcgtgtgcctggtgttcgtcggtcaccctctggacacggtcaaggtccgactgcagacacagccaccgagtttgcctggacaacctcccatgtactctgggacctttgactgtttccggaagactctttttagagagggcatcacggggctatatcggggaatggctgcccctatcatcggggtcactcccatgtttgccgtgtgcttctttgggtttggtttggggaagaaactacaacagaaacacccagaagatgtgctcagctatccccagctttttgcagctgggatgttatctggcgtattcaccacaggaatcatgactcctggagaacggatcaagtgcttattacagattcaggcttcttcaggagaaagcaagtacactggtaccttggactgtgcaaagaagctgtaccaggagtttgggatccgaggcatctacaaagggactgtgcttacccttatgcgagatgtcccagctagtggaatgtatttcatgacatatgaatggctgaaaaatatcttcactccggagggaaagagggtcagtgagctcagtgcccctcggatcttggtggctgggggcattgcagggatcttcaactgggctgtggcaatccccccagatgtgctcaagtctcgattccagactgcacctcctgggaaatatcctaatggtttcagagatgtgctgagggagctgatccgggatgaaggagtcacatccttgtacaaagggttcaatgcagtgatgatccgagccttcccagccaatgcggcctgtttccttggctttgaagttgccatgaagttccttaattgggccacccccaacttgtgaggctgaaggctgctcaagttcacttctggatgctggaagctgtcgttgaggagaaggagtagtaagcagaactaagcagtcttggagggcaaggggaggggaatggtgagatccgagccctgtgcatggacttggtgagactgttgccttaatgacatcctgcaccgtgtataacttagtgtgtcattttgaaacttgaattcattcttatcaatttaagggatcttaaaaggatttggaaatggaacaagtagcttccagaccagatactacctgtggcaagaatgctgcctaccagttaactgctggtcctaccacagtcaaagtattcctcattaaagagagaatctcaggttctcactggaggcactgtgcatattttcaaccagatcaccaggagctgagatcttcttcagtccctagccaggaatacccatttgatttccagggtgccatctaatcctgggctgtacatgtggatatggacttgaggcccacctctgtgtccaagtggattgagcatatatgcctaggaggagatagactgttaatcgttggattttgatttttttttttttatgcctgcaaataatcaaaagtaaaactggagtagcctaattttctgggagcaggtggagaactttccctcctacacagtgaggacagtcccagtctgctgggataagtgagaaagcccagggtgtaggaaggccctttttacatactcttttctcatgagagctcactattttaacaataaacaataaacgttgtttctaa

SEQ ID NO: 129 - DNA, 2207 bp, Homo sapiens
  CDS (73)..(2073)
  misc_feature (1)...(2207): n = a,t,c or g
tggcgcctcgatcnccatcgacgcccgtggtaccggtccggaattcccgggtcgacccacgcgtccgcgataatggcggatatggaggatctcttcgggagcgacgccgacagcgaagctgagcgtaaagattctgattctggatctgactcagattctgatcaagagaatgctgcctctggcagtaatgcctctggaagtgaaagtgatcaggatgaaagaggtgattcaggacaaccaagtaataaggaactgtttggagatgacagtgaggacgagggagcttcacatcatagtggtagtgataatcactctgaaagatcagacaatagatcagaagcttctgagcgttctgaccatgaggacaatgacccctcagatgtagatcagcacagtggatcagaagcccctaatgatgatgaagacgaaggtcatagatcggatggagggagccatcattcagaagcagaaggttctgaaaaagcacattcagatgatgaaaaatggggcagagaagataaaagtgaccagtcagatgatgaaaagatacaaaattctgatgatgaggagagggcacaaggatctgatgaagataagctgcagaattctgacgatgatgagaaaatgcagaacacagatgatgaggagaggcctcagctttccgatgatgagagacaacagctatctgaggaggaaaaggctaattctgatgatgaacggccggtagcttctgataatgatgatgagaaacagaattctgatgatgaagaacaaccacagctgtctgatgaagagaaaatgcaaaattctgatgatgaaaggccacaggcctcagatgaagaacacaggcattcagatgatgaagaggaacaggatcataaatcagaatctgcaagaggcagtgatagtgaagatgaagttttacgaatgaaacgcaagaatgcgattgcatctgattcagaagcggatagtgacactgaggtgccaaaagataatagtggaaccatggatttatttggaggtgcagatgatatctcttcagggagtgatggagaagacaaaccacctactccaggacagcctgttgatgaaaatggattgcctcaggatcaacaggaagaggagccaattcctgagaccagaatagaagtagaaatacccaaagtaaacactgatttaggaaacgacttatattttgttaaactgcccaactttctcagtgtagagcccagaccttttgatcctcagtattatgaagatgaatttgaagatgaagaaatgctggatgaagaaggtagaaccaggttaaaattaaaggtagaaaatactataagatggaggatacgccgagatgaagaaggaaatgaaattaaagaaagcaatgctcggatagtcaagtggtcagatggaagcatgtccctgcatttaggcaatgaagtgtttgatgtgtacaaagccccactgcagggcgaccacaatcatctttttataagacaaggtactggtctacagggacaagcagtctttaaaacgaaactcaccttcagacctcactctacggacagtgccacacatagaaagatgactctgtcacttgcagataggtgttcaaagacacagaagattagaatcttgccaatggctggtcgtgatcctgaatgccaacgcacagaaatgattaagaaagaagaagaacgtttgagggcttccatacgtagggaatctcagcagcgccgaatgagagagaaacagcaccagcgggggctgagcgccagttacctggaacctgatcgatacgatcaggaggaggaaggcgaggagtccatcagcttggctgccattaaaaaccgatataaagggggcattcgagaggaacgagccagaatctattcatcagacagtgatgagggatcagaagaagataaagctcaaagattactcaaagcaaagaaacttaccagtgatgaggaaggtgaaccttccggaaagagaaaagcagaagatgatgataaagcaaataaaaagcataagaagtatgtgatcagcgatgaagaggaagaagatgatgattgaagtatgaaatatgaaaacattttatatattttattgtacagttataaatatgtaaacatgagttattttgattgaaatgaatcgatttgcttttgtgtaattttaattgtaataaaacaatttaaaagcaaaaa

SEQ ID NO: 130 - DNA, 915 bp, Homo sapiens
  CDS (46)..(792)
gccgaaccggtccggaattcccgggtcgacgatttcgtcgtaaaaatggctacaaacttcctagcacatgagaagatctggttcgacaagttcaaatatgacgacgcagaaaggagattctacgagcagatgaacgggcctgtggcaggtgcctcccgccaggagaacggcgccagcgtgatcctccgtgacattgcgagagccagagagaacatccagaaatccctggctggaagctcaggccccggggcctccagcggcaccagcggagaccacgtggtacaggagctgcagcaggccatctccaagctggaggcccggctgaacgtgctggagaagagctcgcctggccaccgggccacgggcccacagacccagcacgtatctcccatgcgccaagtggagcccccagccaagaagccagccacaccagcagaggatgacgaggatgatgacattgacctgtttggcagtgacaatgaggaggaggacaaggaggcggcacagttccgggaggagcggttacggcattacgcggagaagaaggccaagaagcctgcacttggtggccaagtcctccatcctgcttggaatgtcaaaccttgggatgatgacgacggacatggcccagctggaggcctgtgtgcgctctatccagctggacgggctggtctggggggcttccaagctggtgcccgtgggctacggtatccggaagctacagattcagtgtgtggtggaggacgacaaggtggggacagacttgctggaggaggagatcaccaagtttgaggagcacgtgcagagtgtcgatatcgcagctttcaacaagatctgaagcctgagtgtgtgtacgtgcgcgcgtgcgtgaggccctgccacgattaaagactgagaccggcaaaaaaaaaaaaa

SEQ ID NO: 131 - DNA, 959 bp, Homo sapiens
  CDS (95)..(880)
ccgtgtggcctggtgcctcgaagctgcctccctgtctcaccgacccggtcctcggtctggcctgtccgtgtccagcctgagacccaccagaaaaatggctacaaacttcctagcacatgagaagatctggttcgacaagttcaaatatgacgacgcagaaaggagattctacgagcagatgaacgggcctgtgcgaggtgcctcccgccaggagaacggcgccagcgtgatcctccgtgacattgcgagagccagagagaacatccagaaatccctggctggaagctcaggccccggggcctccagcggcaccagcggagaccacgtggtacaggagctgcagcaggccatctccaagctggaggcccggctgaacgtgctggagaagagctcgcctggccaccgggccacggccccacagacccagcacgtatctcccatgcgccaagtggagcccccagccaagaagccagccacaccagcagaggatgacgaggatgatgacattgacctgtttggcagtgacaatgaggaggaggacaaggaggcggcacagctgcgggaggagcggctacggcagtacgcggagaagaaggccaagaagcctgcactggtggccaagtcctccatcctgctggatgtcaagccttgggatgatgagacggacatggcccagctggaggcctgtgtgcgctctatccagctggacgggctggtctggggggcttccaagctggtgcccgtgggctacggtatccggaagctacagattcagtgtgtggtggaggacgacaaggtggggacagacttgctggaggaggagatcaccaagtttgaggagcacgtgcagagtgtcgatatcgcagctttcaacaagatctgaagcctgagtgtgtgtacgtgcgcgcgtgcgtgaggccctgccacgattaaagactgagaccggcaaaaaaaaaaaa

SEQ ID NO: 132 - DNA, 5952 bp, Homo sapiens
  CDS (278)..(4177)
cgtgtgacccgggttggaggcgaatgatggctgtgtatataactctctattcgatgatgaagataccccaccaaacccaaaaaaagagatctctcgaggatccgaattcgcggccgcgtcgacctgaggactgactggggttctgagactccctgtcccggaccgcagcgttaaaaggatctgaacaaagtctgctcaaatctcctgctgtgaaccagcagaatttttgaacaggtttcttcacatataaaaatctattgtaaaaatacggaaaagaatggcagcggaaacgcagacactgaactttgggcctgaatggctccgagctctgtccagtggtgggagtattacatcccctcctctttctccagcattgccgaagtataaattagcagattatcgttacggcagagaagaaatgttagcacttttccttaaagacaacaagataccttcagaccttctggataaagaatttctgcctatcctccaggaggaaccccttccaccattggctctggtaccctttacagaagaagaacagagaaacttttccatgtctgtaaatagtgctgctgtcctgcgattgacaggacgaggaggaggaggaacagtggtgggggctcctagaggtcgaagttcttcaagagggcgaggcagaggcagaggtgaatgtggtttctaccaaagaagttttgatgaagtagagggtgtttttggtcgaggaggtggcagagaaatgcatagatcgcagagctgggaggaaaggggtgacagacgttttgaaaaaccaggacgaaaagatgtagggagaccaaattttgaggaaggtggaccaacatcagtagggagaaagcatgaatttatacgctcagaaagtgaaaattggcgcatctttagagaggaacaaaatggagaagatgaagatggaggttggcgactagctggatcaaggagggatggagagaggtggcgacctcacagtcctgatggccctcgttctgcaggctggcgggaacacatggaacgacgtcggaggtttgagtttgattttcgagatagagatgatgaacggggttaccgaagggttcgctctggcagtgggagcatagatgatgacagggatagcttgcccgaatggtgcttagaggatgctgaagaagaaatgggtacatttgactcatctggagcattcctttctctaaaaaaagtacagaaagagcctattccagaagagcaggagatggacttccggcctgtggacgaaggggaggagtgctctgactctgagggtagccataatgaagaggccaaagaacccgataagacaaataagaaagaaggagagaaaacagatagagtaggagttgaagctagtgaggaaactccccagacctcatcatcatctgctagaccaggtactccttcagaccatcagtctcaggaagcatcacagtttgagaggaaagatgaaccaaaaactgagcaaacggaaaaagctgaagaggagactcggatggaaaatagtctaccagccaaagtgcccagcagaggggatgaaatggttgctgatgtccagcagcccctgtcgcagattccttcagatacagcctctcctcttctcatacttccacctcctgttcccaatcctagtcctactctccggccagttgaaacaccagttgtaggtgctcctggtatgggcagtgtttccacagaacctgatgatgaagaaggtctcaaacatttggagcagcaagctgagaaaatggtggcttatctccaagacagtgcactagatgatgaaagattggcatcaaaactgcaagagcacagagctaaaggagtgtcgattccattgatgcatgaagcaatgcagaagtggtattacaaagatcctcagggagaaattcaaggtcccttcaataatcaggagatggcagaatggtttcaggcgggctattttactatgtctttattggtgaagagagcgtgtgatgaaagcttccaacctcttggcgatatcatgaaaatgtggggaagggttcccttttctccaggtccagctccccctcctcatatgggagagctggaccaggaacgactgaccaggcagcaagaactcacagccttataccagatgcagcacctgcagtaccagcagtttttaatacaacaacaatatgcacaggttttggcccaacagcagaaagcagcactgtcttcccagcagcagcagcagttggcacttcttcttcaacagtttcagaccttgaagatgagaatatctgatcagaacatcattccctcagtaactaggtctgtgtccgtgccagatactggctctatctgggagcttcagccaacagcttcacagcctacagtttgggaaggtggtagtgtatgggatcttcctctggacaccacgacaccaggccctgccctggaacagcttcagcagctagagaaggccaaagctgcaaagctagagcaagagagaagagaggcagaaatgagggcaaaacgggaagaggaagagcgaaagaggcaggaagaactccgaagacaacaggaggaaattcttcggcgacagcaggaagaagaaaggaaaaggcgagaggaagaagaacttgcccgaaggaaacaggaagaggctctgcgtcgccagcgggagcaagaaattgcattaaggcgacagcgagaagaggaagaaagacagcagcaagaagaagctcttagaagactggaagagaggagaagagaagaggaagaaaggcggaagcaggaagaattgttacgcaaacaggaagaggaggctgcaaaatgggcccgggaagaagaagaagcccagcgtcgattagaggagaaccggctgcggatggaagaggaggcagccagactccggcatgaggaagaagaacggaagagaaaggagctggaggtccagcggcagaaggagttaatgcgccagaggcagcagcagcaagaggctctccggaggttgcagcagcagcagcagcaacaacagctggcgcagatgaagcttccttcttcttcaacgtggggccagcagtccaatacaacagcatgtcagtcccaggccacgctgtcgttggctgaaatccaaaaactagaggaagaacgagaacggcagcttcgagaagagcaaaggcgccagcagagggagttgatgaaagctcttcagcagcagcagcaacagcaacagcagaaactctcaggttgggggaatgtcagcaaaccttcaggtaccacgaaatctcttctggagatccagcaggaagaggccaggcaaatgcaaaagcagcagcagcagcagcagcaacaccagcaaccaaacagagctcgtaacaatacgcattccaacctgcacaccagcattgggaattctgtttggggctctataaatactggtcctcctaaccagtgggcatctgacctagtcagtagtatttggagtaatgctgacactaaaaactccaacatgggattctgggatgatgcagtgaaagaggtgggacctaggaattcaacaaataaaaataaaaacaacgccagtctcagtaaatctgtaggtgtgtctaaccggcagaataagaaagtagaagaagaagaaaagttgctgaagctctttcagggagtaaataaagcccaagatggatttacgcagtggtgtgaacagatgcttcatgcccttaatacggcaaataacttggatgttcccacatttgtttctttcctgaaagaagtagaatctccttatgaggtccatgattatatcagggcctatttaggagatacttctgaggccaaggagtttgccaagcagttccttgagcgccgtgccaaacagaaagccaaccagcagcgtcagcagcagcagctgccacagcagcagcagcagcagccgccacagcagccgccacagcagccacaacagcaggactctgtgtgggggatgaaccacagtacactccattcagtatttcagaccaatcaaagcaacaaccaacaatccaattttgaggctgtgcagagtggcaagaagaagaaaaagcagaagatggtccgagcagatcccagtttattaggattttcagtcaatgcatcatcggagcgactcaacatgggtgaaatcgagacgttggatgactactgagcacctgccagtggactggccatccctctcctgtctgccgactatggagtctccacctttggacacaacacttactcaccatttactctttatcactctgcaacaaatcacagaaccgatcatctcaggctttttcttctggccctttgtgtccaagattctttaatccatttttgttggtgaacatctcagactatagataagtggactggaccctgtgtcttgggggtggcagttgggattactccccaacaaggctgattttaggcagcatgtgttcactgtgctgtgatttcatctactgtctcccagaaagtgtgttgggatcggccattagcagcttgctttctcttgtcactttttttcttctattttgttttttcttcttctttttccccccatcagggcaaatggtctaactggtgcaatcatgaagagagttaatggttaacagacattggccaataacaaaacaccccatggactgtgactcgagtatccaacaggcagtcagagctctcccggtctgaaagttgcattgccactgctaactttgggattgcatcagagaggccctgagtggggttgagatgaggttggtttggtttgatgttacacactcctcacctgttctttctgagtgtcctttctctgaaaggatttatgtttttcttcgttagatagtgacttctgagcaagctgatctcccctggcatgctccaacctgattggacaaaggaagctctatggcctgggagagagactattcttaatttttctttcttacaaaaactgatttttcccataaatatttttacttcagaggactaggaccattttgttttgggcccttctgctgaaaatttgtctcgtttaagaggcagctagaatctttaccatatgtatgaatttgtataatttcatttttggatagggataaacttttgcttctgataaaagcctggaatttcatctggtcctcagagcattgcgtgtgtgtcttgctgtagcccggaaaaggttttgtgtaaagattctgggatggcaagttgtttgccttttctgaaaagagaacatacagaacctgtccatctttaagaccttcatccatggaatctactatacaggaggatgcagtgggctggaggggatgggcgaaaatgggagcaggaagcctggcctggcttctggtcatggcctcctaaaaccttaaacttcaagtagaaatgtactcaagccctatttataaacaaatacttttcctgcctccaccaaacccctacagaacatcacctggaattgccactcacactgggttggagtcattgggcagctgtgcctgtgcgagaggtgctgtggtctgggcagcccctggaaaagcacctttgctgcctgtcattgttgcctgaagaaggctggagttgctctgagagcagtttgggtttggagtattatatttggcttctatttttattattttggatcaccattctccctatcccttcttgcctccctcccttctaaacatgtgtaataactatacagagactgctacaaaattgtatatagtttttggatcaaatagcatgaggggagaggaaaccattaaaaattggggctcctactctcctttgctttgtaaattcaaaagttgggggtgggtaagagggatagttaaaatgtttacaaaactttaggctccctcggaacttttgccagtgtggaggaaaataaaaaagaacttaaataaaatctgattgtattcaaaaaaaaaa

SEQ ID NO: 133 - DNA, 5829 bp, Homo sapiens
  CDS (278)..(4054)
cgtgtgacccgggttggaggcgaatgatggctgtgtatataactctctattcgatgatgaagataccccaccaaacccaaaaaaagagatctctcgaggatccgaattcgcggccgcgtcgacctgaggactgactggggttctgagactccctgtcccggaccgcagcgttaaaaggatctgaacaaagtctgctcaaatctcctgctgtgaaccagcagaatttttgaacaggtttcttcacatataaaaatctattgtaaaaatacggaaaagaatggcagcggaaacgcagacactgaactttgggcctgaatggctccgagctctgtccagtggtgggagtattacatcccctcctctttctccagcattgccgaagtataaattagcagattatcgttacggcagagaagaaatgttagcacttttccttaaagacaacaagataccttcagaccttctggataaagaatttctgcctatcctccaggaggaaccccttccaccattggctctggtaccctttacagaagaagaacagagaaacttttccatgtctgtaaatagtgctgctgtcctgcgattgacaggacgaggaggaggaggaacagtggtgggggctcctagaggtcgaagttcttcaagagggcgaggcagaggcagaggtgaatgtggtttctaccaaagaagttttgatgaagtagagggtgtttttggtcgaggaggtggcagagaaatgcatagatcgcagagctgggaggaaaggggtgacagacgttttgaaaaaccaggacgaaaagatgtagggagaccaaattttgaggaaggtggaccaacatcagtagggagaaagcatgaatttatacgctcagaaagtgaaaattggcgcatctttagagaggaacaaaatggagaagatgaagatggaggttggcgactagctggatcaaggagggatggagagaggtggcgacctcacagtcctgatggccctcgttctgcaggctggcgggaacacatggaacgacgtcggaggtttgagtttgattttcgagatagagatgatgaacggggttaccgaagggttcgctctggcagtgggagcatagatgatgacagggatagcttgcccgaatggtgcttagaggatgctgaagaagaaatgggtacatttgactcatctggagcattcctttctctaaaaaaagtacagaaagagcctattccagaagagcaggagatggacttccggcctgtggacgaaggggaggagtgctctgactctgagggtagccataatgaagaggccaaagaacccgataagacaaataagaaagaaggagagaaaacagatagagtaggagttgaagctagtgaggaaactccccagacctcatcatcatctgctagaccaggtactccttcagaccatcagtctcaggaagcatcacagtttgagaggaaagatgaaccaaaaactgagcaaacggaaaaagctgaagaggagactcggatggaaaatagtctaccagccaaagtgcccagcagaggggatgaaatggttgctgatgtccagcagcccctgtcgcagattccttcagatacagcctctcctcttctcatacttccacctcctgttcccaatcctagtcctactctccggccagttgaaacaccagttgtaggtgctcctggtatgggcagtgtttccacagaacctgatgatgaagaaggtctcaaacatttggagcagcaagctgagaaaatggtggcttatctccaagacagtgcactagatgatgaaagattggcatcaaaactgcaagagcacagagctaaaggagtgtcgattccattgatgcatgaagcaatgcagaagtggtattacaaagatcctcagggagaaattcaaggtcccttcaataatcaggagatggcagaatggtttcaggcgggctattttactatgtctttattggtgaagagagcgtgtgatgaaagcttccaacctcttggcgatatcatgaaaatgtggggaagggttcccttttctccaggtccagctccccctcctcatatgggagagctggaccaggaacgactgaccaggcagcaagaactcacagccttataccagatgcagcacctgcagtaccagcagtttttaatacaacaacaatatgcacaggttttggcccaacagcagaaagcagcactgtcttcccagcagcagcagcagttggcacttcttcttcaacagtttcagaccttgaagatgagaatatctgatcagaacatcattccctcagtaactaggtctgtgtccgtgccagatactggctctatctgggagcttcagccaacagcttcacagcctacagtttgggaaggtggtagtgtatgggatcttcctctggacaccacgacaccaggccctgccctggaacagcttcagcagctagagaaggccaaagctgcaaagctagagcaagagagaagagaggcagaaatgagggcaaaacgggaagaggaagagcgaaagaggcaggaagaactccgaagacaacaggaggaaattcttcggcgacagcaggaagaagaaaggaaaaggcgagaggaagaagaacttgcccgaaggaaacaggaagaggctctgcgtcgccagcgggagcaagaaattgcattaaggcgacagcgagaagaggaagaaagacagcagcaagaagaagctcttagaagactggaagagaggagaagagaagaggaagaaaggcggaagcaggaagaattgttacgcaaacaggaagaggaggctgcaaaatgggcccgggaagaagaagaagcccagcgtcgattagaggagaaccggctgcggatggaagaggaggcagccagactccggcatgaggaagaagaacggaagagaaaggagctggaggtccagcggcagaaggagttaatgcgccagaggcagcagcagcaagaggctctccggaggttgcagcagcagcagcagcaacaacagctggcgcagatgaagcaaaggcgccagcagagggagttgatgaaagctcttcagcagcagcagcaacagcaacagcagaaactctcaggttgggggaatgtcagcaaaccttcaggtaccacgaaatctcttctggagatccagcaggaagaggccaggcaaatgcaaaagcagcagcagcagcagcagcaacaccagcaaccaaacagagctcgtaacaatacgcattccaacctgcacaccagcattgggaattctgtttggggctctataaatactggtcctcctaaccagtgggcatctgacctagtcagtagtatttggagtaatgctgacactaaaaactccaacatgggattctgggatgatgcagtgaaagaggtgggacctaggaattcaacaaataaaaataaaaacaacgccagtctcagtaaatctgtaggtgtgtctaaccggcagaataagaaagtagaagaagaagaaaagttgctgaagctctttcagggagtaaataaagcccaagatggatttacgcagtggtgtgaacagatgcttcatgcccttaatacggcaaataacttggatgttcccacatttgtttctttcctgaaagaagtagaatctccttatgaggtccatgattatatcagggcctatttaggagatacttctgaggccaaggagtttgccaagcagttccttgagcgccgtgccaaacagaaagccaaccagcagcgtcagcagcagcagctgccacagcagcagcagcagcagccgccacagcagccgccacagcagccacaacagcaggactctgtgtgggggatgaaccacagtacactccattcagtatttcagaccaatcaaagcaacaaccaacaatccaattttgaggctgtgcagagtggcaagaagaagaaaaagcagaagatggtccgagcagatcccagtttattaggattttcagtcaatgcatcatcggagcgactcaacatgggtgaaatcgagacgttggatgactactgagcacctgccagtggactggccatccctctcctgtctgccgactatggagtctccacctttggacacaacacttactcaccatttactctttatcactctgcaacaaatcacagaaccgatcatctcaggctttttcttctggccctttgtgtccaagattctttaatccatttttgttggtgaacatctcagactatagataagtggactggaccctgtgtcttgggggtggcagttgggattactccccaacaaggctgattttaggcagcatgtgttcactgtgctgtgatttcatctactgtctcccagaaagtgtgttgggatcggccattagcagcttgctttctcttgtcactttttttcttctattttgttttttcttcttctttttccccccatcagggcaaatggtctaactggtgcaatcatgaagagagttaatggttaacagacattggccaataacaaaacaccccatggactgtgactcgagtatccaacaggcagtcagagctctcccggtctgaaagttgcattgccactgctaactttgggattgcatcagagaggccctgagtggggttgagatgaggttggtttggtttgatgttacacactcctcacctgttctttctgagtgtcctttctctgaaaggatttatgtttttcttcgttagatagtgacttctgagcaagctgatctcccctggcatgctccaacctgattggacaaaggaagctctatggcctgggagagagactattcttaatttttctttcttacaaaaactgatttttcccataaatatttttacttcagaggactaggaccattttgttttgggcccttctgctgaaaatttgtctcgtttaagaggcagctagaatctttaccatatgtatgaatttgtataatttcatttttggatagggataaacttttgcttctgataaaagcctggaatttcatctggtcctcagagcattgcgtgtgtgtcttgctgtagcccggaaaaggttttgtgtaaagattctgggatggcaagttgtttgccttttctgaaaagagaacatacagaacctgtccatctttaagaccttcatccatggaatctactatacaggaggatgcagtgggctggaggggatgggcgaaaatgggagcaggaagcctggcctggcttctggtcatggcctcctaaaaccttaaacttcaagtagaaatgtactcaagccctatttataaacaaatacttttcctgcctccaccaaacccctacagaacatcacctggaattgccactcacactgggttggagtcattgggcagctgtgcctgtgcgagaggtgctgtggtctgggcagcccctggaaaagcacctttgctgcctgtcattgttgcctgaagaaggctggagttgctctgagagcagtttgggtttggagtattatatttggcttctatttttattattttggatcaccattctccctatcccttcttgcctccctcccttctaaacatgtgtaataactatacagagactgctacaaaattgtatatagtttttggatcaaatagcatgaggggagaggaaaccattaaaaattggggctcctactctcctttgctttgtaaattcaaaagttgggggtgggtaagagggatagttaaaatgtttacaaaactttaggctccctcggaacttttgccagtgtggaggaaaataaaaaagaacttaaataaaatctgattgtattcaaaaaaaaaa

SEQ ID NO: 134 - DNA, 814 bp, Homo sapiens
  CDS (25)..(681)
gcccatagtttattataaaggtgactgcaccctgcagccaccagcactgcctggctccgcgtgcctcctggtctcagtatggcgctgtcctgggttcttacagtcctgagcctcctacctctgctggaagcccagatcccattgtgtgccaacctagtaccggtgcccatcaccaacgccaccctggaccggatcactggcaagtggttttatatcgcatcggcctttcgaaacgaggagtacaataagtcggttcaggagatccaagcaaccttcttttacttcacccccaacaagacagaggacacgatctttctcagagagtaccagacccgacaggaccagtgcatctataacaccacctacctgaatgtccagcgggaaaatgggaccatctccagatacgtgggaggccaagagcatttcgctcacttgctgatcctcagggacaccaagacctacatgcttgcttttgacgtgaacgatgagaagaactgggggctgtctgtctatgctgacaagccagagacgaccaaggagcaactgggagagttctacgaagctctcgactgcttgcgcattcccaagtcagatgtcgtgtacaccgattggaaaaaggataagtgtgagccactggagaagcagcacgagaaggagaggaaacaggaggagggggaatcctagcaggacacagccttggatcaggacagagacttgggggccatcctgcccctccaacccgacatgtgtacctcagctttttccctcacttgcatcaataaagcttctgtgtttggaacagctaaaaaaaaaa

SEQ ID NO: 135 - DNA, 3026 bp, Homo sapiens
  CDS (32)..(1585)
gctgcaccgccgcgtccgcccgcccgccagcatggccatcaccgccacctgcacccgtttcaccgacgactaccagctcttcgaggagcttggcaagggtgctttctctgtggtccgcaggagtgtgaagaaaacctccacgcacgagtacgccgcaaaaatcatcaataccaagaagttgtctgcccgggatcaccagaaactagaacgtgaggctcggatatgtcgacttctgaaacatccaaacatcgtgcgcctccatgacagtatttctgaagaagggtttcactacctcgtgtttgaccttgttacgggaggggagctgtttgaagacattgtggccagagagtactacagtgaagcagatgccagccactgtatacatcagattctggagagtgttaaccacatccaccagcatgacatcgtccacagggacctgaagcctgagaacctgctgctggcgagtaaatgcaagggtgccgccgtcaagctggctgattttggcctagccatcgaagtacagggagagcagcaggcttggtttggttttgctggcaccccaggttacttgtcccctgaggtcttgaggaaagatccctatggaaaacctgtggatatctgggcctgcggggtcatcctgtatatcctcctggtgggctatcctcccttctgggatgaggatcagcacaagctgtatcagcagatcaaggctggagcctatgatttcccatcaccagaatgggacacggtaactcctgaagccaagaacttgatcaaccagatgctgaccataaacccagcaaagcgcatcacggctgaccaggctctcaagcacccgtgggtctgtcaacgatccacggtggcatccatgatgcatcgtcaggagactgtggagtgtttgcgcaagttcaatgcccggagaaaactgaagggtgccatcctcacgaccatgcttgtctccaggaacttctcagctgccaaaagcctattgaacaagaagtcggatggcggtgtcaagccacagagcaacaacaaaaacagtctcgtaagcccagcccaagagcccgcgcccttgcagacggccatggagccacaaaccactgtggtacacaacgctacagatgggatcaagggctccacagagagctgcaacaccaccacagaagatgaggacctcaaagtgcgaaaacaggagatcattaagattacagaacagctgattgaagccatcaacaatggggactttgaggcctacacgaagatttgtgatccaggcctcacttcctttgagcctgaggcccttggtaacctcgtggaggggatggatttccataagttttactttgagaatctcctgtccaagaacagcaagcctatccataccaccatcctaaacccacacgtccacgtgattggggaggacgcagcgtgcatcgcctacatccgcctcacccagtacatcgacgggcagggtcggcctcgcaccagccagtcagaagagacccgggtctggcaccgtcgggatggcaagtggctcaatgtccactatcactgctcaggggcccctgccgcaccgctgcagtgagctcagccacaggggctttaggagattccagccggaggtccaaccttcgcagccagtggctctggagggcctgagtgacagcggcagtcctgtttgtttgaggtttaaaacaattcaattacaaaagcggcagcagccaatgcacgcccctgcatgcagccctcccgcccgcccttcgtgtctgtctctgctgtaccgaggtgttttttacatttaagaaaaaaaaaaaaagaaaaaaagattgtttaaaaaaaaaaggaatccataccatgatgcgttttaaaaccaccgacagcccttgggttggcaagaaggcaggagtatgtatgaggtccatcctggcatgagcagtggctcacccaccggccttgaagaggtgagcttggcctctctggtccccatggacttagggggaccaggcaagaactctgacagagctttgggggccgtgatgtgattgcagctcctgaggtggcctgcttaccccaggtctaggaatgaacttctttggaacttgcataggcgcctagaatggggctgatgagaacatcgtgaccatcagacctacttgggagagaacgcagagctcccagcctgctgtggaggcagctgagaagtggtggcctcaggactgagagcccggacgttgctgtactgtcttgtttagtgtagaagggaagagaattggtgctgcagaagtgtacccgccatgaagccgatgagaaacctcgtgttagtctgacatgcactcactcatccatttctataggatgcacaatgcatgtgggccctaatattgaggccttatccctgcagctaggagggggaggggttgttgctgctttgcttcgtgttttcttctaacctggcaaggagagagccaggccctggtcagggctcccgtgccgcctttggcggttctgtttctgtgctgatctggaccatctttgtcttgccttttcacggtagtggtccccatgctgaccctcatctgggcctgggccctctgccaagtgcccctgtgggatgggaggagtgaggcagtgggagaagaggtggtggtcgtttctatgcattcaggctgcctttggggctgcctcccttcttattcttccttgctgcacgtccatctcttttcctgtctttgagattgacctgactgctctggcaagaagaagaggtgtccttacagaggcctctttactgaccaactgaagtatagacttactgctggacaatctgcatgggcatcacccctccccgcatgtaacccaaaagaggtgtccagagccaaggcttctaccttcattgtccctctctgtgctcaaggagttccattccaggaggaagagatctataccctaaggcagataggcaaagaagataatggaggagcaattggtcatggccttggtttccctcaaaacaacgctgcaga

SEQ ID NO: 136 - DNA, 1949 bp, Homo sapiens
  CDS (286)..(1263)
cccgacgtcgcatgctcccggccgccatggccgcgggattttcccgggtcgacgatttcgtttgaccagaacgtgtgcagctcagccagccacagaactggaatttttcaggagcagggggagcatggagtttggactttgctgagcaactgaagtggagcgcagagcttgctcgcttaggagagagcatcatggatggcaaacaagggggcatggatgggagcaagcccgcggggccaagggactttcctggcatcaggcttctttcaaacccattgatgggcgatgctgtgtctgattggtctactcactatagggctcgagcggccgcccgggcaggtcatttgtccagaacgtgtgcagctcagccagccacagaactggaatttttcaggagcagggggagcatggagtttggactttgctgagcaactgaagtggagcgcagagcttgctcgcttaggagagagcatcatggatggcaaacaagggggcatggatgggagcaagcccgcggggccaagggactttcctggcatcaggcttctttcaaacccattgatgggcgatgctgtgtctgattggtctcctatgcatgaagctgcaatccacggacatcagctgtctctgaggaacctcatcagccaggggtgggctgtgaacatcatcacggcagatcatgtttccccactccatgaagcctgtcttggaggtcatctctcttgtgtgaagattttattaaagcatggagctcaggtgaatggtgtgacagcagactggcacactccactgtttaatgcttgtgtcagcggcagctgggattgtgtgaatttgcttctgcagcacggagccagcgttcaacctgagagtgatctggcatcccccatccatgaagctgctaggagaggccacgtggagtgtgtcaactctcttatagcttatgggggcaacattgaccataagatcagccacctgggcactccactctatttggcttgtgaaaaccaacagagagcctgtgtcaagaagcttctggagtcaggagcggacgtgaaccaagggaaaggtcaggattccccacttcatgcagtggccaggacagccagtgaagagctggcctgcctgctcatggattttggagcggacacccaggccaagaatgctgaaggcaaacgtcctgtggagctggtgcctccagagagccccttggcccagctcttcttggagagagaaggtgcttctttgccaaaacctaagccctaatctgttgacatcccttggggctctagtagaagggcccccttctttgatgcagttatgccgccttagaattcggaagtgttttggaatccagcagcatcataagataaccaaactcgtcctcccagaggatctgaaacagtttctcctacatctttaaatgcatctagggaatggattcacaaacgatgtgaaaacattattgagtgttgtagccactagaattttaaaatcaagttggatttatagagtttgactagttttttcgattagatttgtatttgttataaacttgtttatggagtttgactaattttttctattcaatttgtatttgttaaactcaagccagggtggaaagacactgcatacgtttgtattattagttagaaggcatgaagacttttttccctgcttggagagtgtcataagttattgttttgcatatctactgcatgccaagcactttctgcatcatctaatttagccctcacagccactgggtcaagatgtccaattttccagagtaaggatagaggagtcaaattcaaatacaggttttctgacattaacttatgtgatgacttgatcgaggcaggcttttccagcatcactgtcctggttccatctctgctatatgggaatgaaaataaagaaacatatttcttggcttgtctaaaaaaaaaagt

SEQ ID NO: 137 - DNA, 488 bp, Homo sapiens
  CDS (126)..(485)
tttgatcgccttcggtaccgctccggaattcccgggtcgacccacgcgtccggagctatttatccctaggtcctttcctcctgcacgtcagctttgagccccgagctggtgcttctgctctctgagacatggcaggcctgatgaccatagtaaccagccttctgttccttggtgtctgtgcccaccacatcatccctacgggctctgtggtcctcccctctccctgctgcatgttctttgtttccaagagaattcctgagaaccgagtggtcagctaccagctgtccagcaggagcacatgcctcaaggcaggagtgatcttcaccaccaagaagggccagcagttctgtggcgaccccaagcaggagtgggtccagaggtacatgaagaacctggacgccaagcagaagaaggcttcccctagggccagggcagtggctgtcaagggccctgtccagagatatcctggcaaccaaaccacctgctaa

SEQ ID NO: 138 - DNA, 4697 bp, Homo sapiens
  CDS (76)..(4089)
attgaattcattgctgttacgcctgcggtaccggtccggaattcccgggtcgacgatttcgtccgccggtgactcatggaggcgggaggcgggggaggagctcttcctgcaggcgtggaaaccatggtgctcacgctcggagaaagttggccggtattggtggggaggaggtttctcagtctgtccgcagccgacggcagcgatggcagccacgacagctgggacgtggagcgcgtcgccgagtggccctggctctccgggaccattcgagctgtttcccacaccgacgttaccaagaaggatctgaaggtgtgtgtggaatttgatggggaatcttggaggaaaagaagatggatagaagtctacagccttctaaggagagcatttttagtagaacataatttggttttagctgaacgaaagtcacctgaaatttctgaacgaattgtacagtggcctgcaataacgtacaaacctctgttggacaaagctggtttgggatccataacttctgttcgctttctgggagatcaacaaagagtatttctttctaaagaccttttgaagcctatacaggatgtaaacagtcttcgactttctcttacggataatcagattgtcagtaaagaatttcaagctttgattgtgaagcatttagatgaaagccatcttttaaaaggtgacaaaaacttagttggttcagaagtaaaaatttatagcttggacccatctactcagtggttttcagcaaccgttgtaaatggaaacccagcatcaaaaactcttcaagtcaactgtgaggagattccagcactgaaaattgttgatccgtcactgattcatgttgaagttgtacacgataaccttgtgacatgtggtaattctgcaagaattggagctgtaaaacgcaagtcttctgagaataatggaaccctggtttccaaacaagcaaaatcttgctctgaggcctctcccagtatgtgtcctgtgcagtctgtacctacaacagtttttaaggagatactgcttggctgtactgcagcaactccacctagtaaggacccaagacagcaaagtactccccaggctgccaactctccacctaaccttggagcaaaaattcctcaaggatgtcataaacaaagtttaccagaggaaatttcttcctgtctaaatacaaagtctgaagctctgagaacaaaaccagatgtctgcaaagcagggttgctctcaaagtcctctcagattggaactggagacttgaaaattctgactgagccaaaaggcagctgtactcagcctaagacaaacactgatcaggaaaacagattggagtctgttccacaagcattgactggccttcctaaggagtgcttacctacaaaggcttcttctaaggcagaattggaaattgccaatcctcctgaactgcagaagcacctagaacatgcaccttccccatcggatgtttcaaatgcaccagaagtgaaagcaggtgtcaatagtgatagccctaataactgttcaggaaaaaaggtagaaccttcagctttagcttgccgatcacagaatttaaaggaatcttcagtaaaagtagataatgaaagctgttgttcaagaagcaacaataaaatccagaatgccccatccaggaagtcggttttgacagacccagctaaactcaaaaagctgcaacagagtggcgaggccttcgtacaggatgattcttgtgtgaacatcgtggcacagttgcctaaatgccgagagtgtcgcttggacagtctccgcaaggataaggagcaacagaaggactcacctgtgttttgccgcttctttcacttcaggaggttacaattcaacaaacatggtgtgttgcgggtagaaggcttcttaacaccaaacaagtatgacaatgaagcaattggcttgtggttacctttaaccaaaaacgttgtggggattgatttggacacagcaaagtacatcttggccaacattggagaccacttctgtcaaatggtgatttctgaaaaggaagctatgtcaactattgagccacacagacaggttgcttggaagcgagctgtcaaaggtgttcgagaaatgtgtgatgtgtgcgacaccaccatcttcaacctgcactgggtgtgtcctcggtgtgggtttggagtatgtgtggactgctaccggatgaagagaaagaattgccaacagggtgctgcttacaagactttctcttggctaaaatgtgtgaagagtcagatacatgaaccagagaacttaatgcccacacagatcattcctggaaaagcactctatgatgttggagacattgttcattctgtaagagcgaaatggggaataaaggcaaactgcccttgttcaaacaggcaattcaaactcttttcaaagccagcctcaaaggaagacctaaaacagacttctttagctggagaaaaaccgactcttggtgcagtgctccagcagaatccctcagtgttggagccagcagctgtgggtggggaagcagcctccaagccagccggcagcatgaagcctgcctgtccagccagcacatctcctctaaactggctggccgacctaaccagcgggaatgtcaacaaggaaaacaaggaaaaacaaccaacaatgccaattttaaagaatgaaatcaaatgccttccacccctcccacctttaagcaaatccagcacagtcctccatacgtttaacagcacaattttgacacccgtaagcaacaacaattctggtttcctccggaatctcttgaattcttctacaggaaagacagaaaatggactcaagaatacaccaaaaatccttgatgacatctttgcctctttggtgcaaaataagacgacttctgatttatctaagaggcctcaaggactaaccatcaagcccagcattctgggctttgacactcctcactattggctttgtgataatcgcttgctgtgcttgcaagaccccaacaataagagcaactggaatgtgtttagggagtgctggaaacaagggcagccagtgatggtgtctggagtgcatcataaattgaactctgaactttggaaacctgaatccttcaggaaagagtttggtgagcaggaagtagacctagttaattgtaggaccaatgaaatcatcacaggagccacagtaggagacttctgggatggatttgaagatgttccaaatcgtttgaaaaatgaaaaagaaccaatggtgttgaaacttaaggactggccaccaggagaagattttagagatatgatgccttccaggtttgatgatctgatggccaacattccactgcccgagtacacaaggcgagatggcaaactgaatttggcctctaggctgccaaactactttgttcggccagatctgggccccaagatgtataatgcttatggattaatcactcctgaagatcggaaatatggaacaacaaatcttcacttagatgtatctgatgcagctaatgtcatggtctatgtgggaattcccaaaggacagtgtgagcaagaagaagaagtccttaagaccatccaagatggagattctgacgaactcacaataaagcgatttattgaaggaaaagagaagccaggagcactgtggcacatatatgctgcaaaggacacggagaagataagggaatttcttaaaaaggtatcagaagagcaaggtcaagaaaacccagcagaccacgatcctattcatgatcaaagctggtatttagaccgatcattaagaaaacgtcttcatcaagagtatggagttcaaggctgggctattgtacagtttcttggggatgtggtgtttatcccggcaggagctccacatcaggttcataacttatatagctgcatcaaagtggctgaagattttgtttctccagagcatgttaaacactgcttctggcttactcaggaattccgatatctgtcacagactcataccaatcacgaagataaattacaggtgaagaatgttatctaccatgcagtgaaagatgcagttgctatgctgaaagccagtgaatccagttttggcaaaccttaatctccctgcacattggaaatgaattacaggcagctgttcaaactcttcaggcaggattcctgtggactttgagattcatgttacctcatcttcttttttaaactgtacccaacttgtgagggtactctgtctaatgtatatttctagtgtttacagacagtaaatgtgtatatgtagtaactatttacagaacatgcatccttaaactgtgacttctcacctagtgcagaacttttaccaggctgtaaaagcaaaacctcgtatcagctctggaacaatacctgcagttattcttcagctgtttggacaacttagattgggtttataactattaggaatcactgcacagtttatttgggttgtgttttgtgtctgagtcccctccctcatcccttagggtccagaagagcaatggaggaagtgacagctaatgttgcagttcttattgtatggcataggactggcattatatagcagaaatcaactactgtacaatttcttggggttaaccatctttagttaaatggaattttaatttaaatgacgctttgctaattttaagtgttaagcattttgcattaaaatattcatataataaaaaaaaaaaa

SEQ ID NO: 139 - DNA, 2446 bp, Homo sapiens
  CDS (200)..(1903)
  misc_feature (1)...(2446): n = a,t,c or g
aattgagatcgatgtcgtcgccagcggcaccggtccggaattcccgggtcgacccacgcgtccggcgagtccgtcgcgtgctgagggagactctggaggtggagccggccgggtgctcgagggaaggagactggaagctggttccggcgtgaggagagtctgaaaaaggggagcgcggagaggaggctggaagaggaagatgcctagcacagaccttctgatgttgaaggcctttgagccctacttagagattttggaagtatactccacaaaagccaagaattatgtaaatggacattgcaccaagtatgagccctggcagctaattgcatggagtgtcgtgtggaccctgctgatagtctggggatatgagtttgtcttccagccagagagtttatggtcaaggtttaaaaagaaatgttttaagctcaccaggaagatgcccattattggtcgtaagattcaagacaagttgaacaagaccaaggatgatattagcaagaacatgtcattcctgaaagtggacaaagagtatgtgaaagctttaccctcccagggtctgagctcatctgctgttttggagaaacttaaggagtacagctctatggacgccttctggcaagaggggagagcctctggaacagtgtacagtggggaggagaagctcactgagctccttgtgaaggcttatggagattttgcatggagtaaccccctgcatccagatatcttcccaggactacgcaagatagaggcagaaattgtgaggatagcttgttccctgttcaatgggggaccagattcgtgtggatgtgtgacttctgggggaacagaaagcatactgatggcctgcaaagcatatcgggatctggcctttgagaaggggatcaaaactccagaaattgtggctccccaaagtgcccatgctgcatttaacaaagcagccagttactttgggatgaagattgtgcgggtcccattgacgaagatgatggaggtggatgtgcgggcaatgagaagagctatctccaggaacactgccatgctcgtctgttctaccccacagtttcctcatggtgtaatagatcctgtccctgaagtggccaagctggctgtcaaatacaaaataccccttcatgtcgacgcttgtctgggaggcttcctcatcgtctttatggagaaagcaggatacccactggagcacccatttgatttccgggtgaaaggtgtaaccagcatttcagctgacacccataagtatggctatgccccaaaaggctcatcattggtgttgtatagtgacaagaagtacaggaactatcagttcttcgtcgatacagattggcagggtggcatctatgcttccccaaccatcgcaggctcacggcctggtggcattagcgcagcctgttgggctgccttgatgcacttcggtgagaacggctatgttgaagctaccaaacagatcatcaaaactgctcgcttcctcaagtcagaactggaaaatatcaaaggcatctttgtttttgggaatccccaattgtcagtcattgctctgggatcccgtgattttgacatctaccgactatcaaacctgatgactgctaaggggtggaacttgaaccagttgcagttcccacccagtattcatttctgcatcacattactacacgcccggaaacgagtagctatacaattcctaaaggacattcgagaatctgtcactcaaatcatgaagaatcctaaagcgaagaccacaggaatgggtgccatctatggcatggcccagacaactgttgacaggaatatggttgcagaattgtcctcagtcttcttggacagcttgtacagcaccgacactgtcacccagggcagccagatgaatggttctccaaaaccccactgaacttggaccctttctagtctcaaggggattccagccttcagaaggttcttgggatatggaacaggccgtgcacaactttgacatctggtcttgctccatagagcacaactcaagatagaccatgagacagcttgagcctcaggattcttgttcttcctcttatcttccttttgtggtttttaatttgaagaccccagagaattccattacataatgattttgcccttgttataaatgttaccctaggaattgttttaaccatttccttttctaaactctctagctttcaactttactttaaacattgtgtggtagctctgacctgtcctgattctttagagaagctggggtacagtttatgagatagctagagcttctttgttatctcaggcaggaggcgtttacataacagatgtttcctcagctgggtgtgaggtatactctaagcaggaggctttttcagccttctctctctttttnttttttttttntttttttgagatggaattttgctcttttgcccagtctggagtgcagtgg

SEQ ID NO: 140 - DNA, 2975 bp, Homo sapiens
  CDS (183)..(2975)
gacgatttcgtgagcctccataaccgccagattgaaaactgactgttcaagactgtctaaatcctacttctggatgactgtgcagtcagaattctcctgaagattgggttaatttcagctcagaaaagcagaaacgatacccttggtactggactggaagaaaactacgaagtgagagagccatgaagattcagaaaaagctgactggctgcagcaggctgatgcttctgtgtctttctctggagctgctgttggaagctggggctgggaatattcactactcagtgccggaagagacagacaaaggttccttcgtaggcaacatcgccaaggacctagggctgcaaccccaggagctggcagatggcggagtccgcatcgtctccagaggtaggatgccgcttttcgctctgaatcctagaagtggcagcttgatcaccgcgcgcaggatagaccgggaggagctctgcgctcagagcatgccgtgtctcgtgagttttaatatccttgttgaggataaaatgaagctttttcctgttgaagtagaaataattgatattaatgacaacactccccaattccagttagaggaactggagtttaaaatgaatgaaataacgactccaggtaccagagtctcattgccttttgggcaagaccttgatgtgggtatgaactcactccagagctaccaactcagctctaaccctcatttctccctggatgtgcaacagggagccgatgggcctcaacatccagagatggtgctgcagagtcccttagacagagaagaagaagctgtccaccacctcatcctcacagcttctgatgggggtgaaccagtccgttcagggaccctcagaatttacattcaggtggtggatgcaaatgacaatcctccagcatttactcaggcacaataccatataaatgtccccgaaaacgtgccgctgggtactcagctgctcatggtaaatgccactgaccctgatgagggagccaatggggaagtaacgtactcctttcacaatgtagaccacagagtggcccaaatatttcgtttagattcttacacaggagaaatatcaaataaagaaccactagatttcgaagaatacaaaatgtattcaatggaagttcaagcccaggatggtgcggggctcatggctaaagttaaggtactgatcaaagttttggatgtaaatgataatgccccagaagtgaccatcacctctgtcaccactgcagttccagaaaactttcctcctgggaccataattgctcttatcagtgtgcatgaccaggactcaggagacaatggctacaccacatgtttcattcctggaaatttaccctttaaattggaaaagttagttgataattattaccgtttagtgactgaaagaacactggacagagaacttatctctgggtacaacatcacaataacagcaatagaccaaggaactccagctctatctactgaaactcacatttcactactagtgacagatatcaatgacaactccccagtcttccatcaggactcctactctgcctacattcccgaaaacaaccccagaggagcctccatcttctctgtgagggcccacgacttggacagcaatgagaatgcacaaatcacttactccctaatagaggacactatccagggggcacccctatctgcctacctctccatcaactccgacactggggtcctgtatgcgctgcgatccttcgactatgagcagttccgggacatgcaactgaaagtgatggcgcgggacagtggggatccgcccctcagcagcaacgtgtctctcagcctattcctgctggaccagaacgacaacgcgcccgagatcctgtaccccgccctccccacagatggttctaccggcgtggagctggcgcccctctccgcagagcccggctacctggtgaccaaggtggtggcggtggacagagactcgggccagaacgcctggctgtcctaccgcctgctcaaggccagcgagccgggactcttctcggtgggtctgcacacgggcgaggtgcgcacggcgcgagccctgctggacagagacgcgctcaagcagagtctcgtggtggccgtccaggaccacggccagcccccgctctccgccactgtcacgctcaccgtggccgtggccgacaggatctccgacatcctggccgacctgggcagcctcgagccctccgccaaacccaacgattcggacctcactctgtacctggtggtggcggcggccgcggtctcctgcgtcttcctggccttcgtcatcgtgctgctggcgcacaggctgcggcgctggcacaagtcacgtctgctacaggcttcgggaggcggcttagcgagcatgcccggttcgcactttgtgggcgtggacggggttcgggctttcctgcagacctattcccacgaggtctccctcactgcggactcgcggaagagccacctgattttcccccagcccaactatgcggacacactcatcagccaggagagctgtgagaaaaagggttttctatcagcaccccagtctttacttgaagacaaaaaggaaccattttctcagcaagccccgcccaacacggactggcgtttctctcaggcccagagacccggcaccagcggctcccaaaatggcgatgacaccggcacctggcccaacaaccagtttgacacagagatgctgcaagccatgatcttggcgtccgccagtgaagctgctgatgggagctccaccctgggagggggtgccggcaccatgggattgagcgcccgctacggaccccagttcaccctgcagcacgtgcccgactaccgccagaatgtctacatcccaggcagcaatgccacactgaccaacgcagctggcaagcgggatggcaaggccccagcaggtggcaatggcaacaagaagaagtcgggcaagaaggagaagaag

SEQ ID NO: 141 - DNA, 4042 bp, Homo sapiens
  CDS (76)..(3861)
ccacctgataaccaaaaacttggcttgttggaagccttattaaagattggtgattggcaacatgcacagaacattatggatcagatgcctccatactatgcagcttcacacaagctaatagcccttgctatttgcaagctcattcatataactattgagcctctctaccgaagtgtcacttcatgggccgtggaccatgcaggcttcttagagagtgacccctgtgactccacagtggggcacctgctgagcagagttggagttcctaaaggtgctaaaggctcacctgttaatgctttgcaaaacaagagagcaccaaaacaagctgagagctttgaagatttgaggagagacgtgttcaatatgttctgttaccttggtcctcacctttctcacgatcccattttatttgcaaaagtggtgcgcataggcaagtcatttatgaaggagtttcagtctgatggaagcaaacaagaagataaagaaaaaacggaagttatccttagctgtttgcttagcattactgaccaggtactacttccatctctttctttgatggactgcaatgcttgtatgtctgaggaactatggggaatgtttaaaacatttccatatcagcatagatatcgtctgtatggccagtggaagaatgaaacttataacagtcacccacttttagtaaaagttaaagctcaaacaatagacagagccaaatatatcatgaagcgcctaaccaaggaaaatgtgaagccttctggaagacaaattgggaagttgagccacagcaatccaaccattttgtttgattatgtatgttttgagatcttgtcacaaatacagaagtatgataacttaataacacctgtagtagattcattgaaatacctcacttcactgaattatgatgtcttggcctgtatcctttcaaattgtatcattgaagctttagctaatccagaaaaggaaagaatgaaacatgatgacacaaccatctcaagctggcttcagagtctggctagtttctgtggtgcagtttttcgtaaatatccaattgatcttgctggtcttcttcagtatgttgccaatcagctaaaggcgggcaaaagttttgacctgcttatattgaaagaagtggtacaaaaaatggcaggaatagaaattacagaggaaatgacaatggagcaactagaggctatgactggtggagagcagctaaaagctgagggtggttattttggtcagatcagaaacactaaaaaatcctctcagagattaaaggatgctctattggaccatgatcttgcccttcctctctgtctgcttatggctcagcagagaaatggggtaatctttcaggaaggtggagagaaacatttgaaacttgtgggaaagctctatgaccagtgtcatgataccctggtgcagtttggtgggtttttagcatctaatctgagcacagaagattatataaagcgagtgccttcaattgatgtactctgtaatgaatttcatacaccccatgatgcagcatttttcctgtctaggccaatgtatgcccatcatatttcgtcaaagtatgatgaacttaaaaaatcagaaaagggaagtaaacagcaacataaagttcataagtacattacatcatgtgagatggtgatggcgcctgtccatgaagcagtggtctccttacatgtttccaaagtctgggatgacatcagccctcaattctatgctacattctggtcattgacaatgtatgaccttgcagttccacacaccagctatgaacgagaagtcaataaacttaaagtccagatgaaagcaattgatgacaatcaggaaatgcccccaaataaaaagaaaaaagagaaggagcgctgtactgcccttcaggacaagcttcttgaagaagaaaagaaacagatggaacatgtacagagagttctacagagattgaaactggaaaaggacaactggcttttagcaaaatctaccaaaaatgagaccatcacaaaatttctacagctgtgtatatttcctcgatgtattttttcagcaattgatgctgtttactgtgctcgttttgttgaattggtacatcaacagaaaactccaaatttttccacacttctttgctatgatcgagttttctctgacataatttacacagttgcaagctgtactgaaaatgaagccagtcgatacggaaggtttctttgctgcatgttagagactgtgaccaggtggcatagtgatagagccacatatgaaaaggaatgtggaaactatccaggattccttaccatattacgggcaactggatttgatggtggaaataaggctgatcaattagactatgaaaattttcgacatgttgtacataaatggcattacaaactaaccaaggcatcggtacattgccttgaaacaggcgaatatactcacatcaggaatatcttgattgtgctaacaaaaatacttccttggtacccaaaagttttgaatctgggtcaagctttggaaagaagagtacacaaaatctgccaagaagaaaaagagaagaggccagatctatatgcattggctatgggctactctgggcagttgaaaagtagaaagtcatacatgatacctgaaaatgagtttcatcacaaagacccccctccgaggaatgcagttgccagtgtgcaaaatgggcctggtggtgggccttcttcatcatcaataggaagtgcatctaaatcggatgaaagcagtactgaggagactgataaatcaagggagagatctcagtgtggtgtgaaagctgttaataaagcttctagtaccacacctaaagggaattcaagcaatggaaatagtggctctaacagcaacaaagctgttaaagaaaatgacaaagaaaaagggaaagagaaagaaaaagagaaaaaagaaaagactccagctactactccagaggccagggtacttggtaaagatggtaaagaaaaaccaaaggaagagcggccaaataaagatgaaaaagcaagagagaccaaggaaagaacgccgaagtctgacaaagagaaagaaaaattcaagaaggaagaaaaagctaaagatgagaaatttaagaccactgtccccaacgcagaatcaaaatcaactcaagaaagggaaagagagaaggagccatccagagaaagagatatagcaaaggaaatgaaatcaaaggaaaatgttaaaggaggagaaaaaacaccagtttctgggtccttgaaatcacctgttcccagatcagatattccagagcctgaaagggaacaaaaacgccgcaaaattgatactcacccttctccatcacattcctccacagtaaaggacagtctcatcgaactcaaggaatcttcagcaaagctctacattaatcatactcctccaccactgtccaagagtaaggagagagaaatggacaagaaagatttggacaagtcaagggaaagatccagagaaagagagaaaaaagatgaaaaggacaggaaagagcggaaaagggatcactcaaacaacgaccgtgaagtgccaccggacttaaccaagagacgtaaagaggagaatggaacaatgggggtttcaaaacataaaagtgaaagtccttgtgaatctccttatccaaatgagaaagacaaggaaaaaaataagtcaaaatcttcaggcaaagaaaaaggcagtgattcatttaaatctgagaagatggataaaatctcctccggtggcaaaaaggagtccaggcatgataaagaaaagatagaaaagaaagagaaacgggacagttcaggaggaaaggaagagaagaaacagtcctcggacaagcacagataatgaagactttccatcaaggtgagtgttctctcaccaccttttcacttaatgatagaaacataaaatgagttctgataatgttgaaaaactagatgcattttacaagctacaactacttgtttttttcacctaaatataacgaccaagtcttcgggtatagatgcaaaacaagattcag

SEQ ID NO: 142 - DNA, 1462 bp, Homo sapiens
  CDS (66)..(878)
gcacgagggagcccagccggcgcggagcgggagcggtgcaggctgaggtctccgagcggctcgccatggctggcccgcagcagcagcccccttacctgcacctggccgagctgacggcgtcccagttcctggaaatatggaagcactttgacgcagacggaaatgggtatattgaaggtaaagagctagaaaactttttccaagagctggagaaggcaaggaaaggctctggcatgatgtcaaagagtgacaactttggagaaaagatgaaggagttcatgcagaagtatgataaaaactcagatgggaaaatcgagatggcagagctggcgcagatcctgccaaccgaagagaacttccttctgtgcttcaggcagcacgtgggctccagcgccgagtttatggaggcttggcggaagtacgacacagacaggagtggctacatcgaagccaatgagctcaagggattcctgtcagacctgctgaagaaggcgaaccggccgtacgatgagcccaagctccaggaatacacccaaaccatactacggatgtttgacttgaacggggatggcaaattgggcctctcagagatgtcccgactcctgcctgtccaggaaaacttcctgcttaaatttcagggcatgaagctgacctcagaggagtttaacgcgatcttcacattttacgacaaggatagaagcggctacattgacgagcatgagctggatgcccttttgaaggatctgtacgagaaaaacaaaaaggaaatgaatattcaacagctcaccaactacagaaagagcgtcatgtccttggcagaggcagggaagctctaccgcaaggacctggagattgtgctctgcagcgagccccccatgtaaagtggggacgggggctgcttctccacctcccccaaaccctgcttctgctgccctgatgcgtctacccagactcagagaccgtgagcgccccgcccccacccctacagcctgcacacacctgcctgcagagcaggaaatgagagatagaggatgggcagctggggggctgtcctgagccccctgcacccacccctgcccaggcagtctttgctcagtggatcacacacatggaaggtgatgggggcatgggtggagggtccctaattctcttcgctgtgatgcatgagctccctcgctgtatgatttaggcttctatgtccaacagagtggactcttccctctcgctcccctctgccggtcccccatgccaccacccaccccaaacttccaggttccatccaccaccttgccaatggtgtagctgtcctctcagaactcctgtgtgtggaaggcacccgccctttccttgccttctttactcggcgtgctccttttctctttgggtttcttgtttaccaaagaagagtttacagacaataaaatggaaaggtcctgctgtggaaacttacccaaaaaaaaaa

SEQ ID NO: 143 - DNA, 1886 bp, Homo sapiens
  CDS (289)..(1167)
ccgggccggggtgccagcgcccgccttcccgtttcctcccgttccgcagcgcgcccacggcctgtgaccccggcgaccgctccccagtgacgagagagcggggccgggcgctgctccggcctgacctgcgaagggacctcggtccagtcccctgttgcgccgcgcccccgtccgtccgtgcgcgggccagtcaggggccagtgtctcgagcggtcgaggtcgcagacctagaggcgccccacaggccggcccggggcgctgggagcgccggccgcgggccgggtggggatgcctctgcacgtgaagtggccgttccccgcggtgccgccgctcacctggaccctggccagcagcgtcgtcatgggcttggtgggcacctacagctgcttctggaccaagtacatgaaccacctgaccgtgcacaacagggaggtgctgtacgagctcatcgagaagcgaggcccggccacgcccctcatcaccgtgtccaatcaccagtcctgcatggacgaccctcatctctgggggatcctgaaactccgccacatctggaacctgaagttgatgcgttggacccctgcagctgcagacatctgcttcaccaaggagctacactcccacttcttcagcttgggcaagtgtgtgcctgtgtgccgaggagcagaatttttccaagcagagaatgaggggaaaggtgttctagacacaggcaggcacatgccaggtgctggaaaaagaagagagaaaggagatggcgtctaccagaaggggatggacttcattttggagaagctcaaccatggggactgggtgcatatcttcccagaagggaaagtgaacatgagttccgaattcctgcgtttcaagtggggaatcgggcgcctgattgctgagtgtcatctcaaccccatcatcctgcccctgtggcatgtcggaatgaatgacgtccttcctaacagtccgccctacttcccccgctttggacagaaaatcactgtgctgatcgggaagcccttcagtgccctgcctgtactcgagcggctccgggcggagaacaagtcggctgtggagatgcggaaagccctgacggacttcattcaagaggaattccagcatctgaagactcaggcagagcagctccacaaccacctccagcctgggagataggccttgcttgctgccttctggattcttggcccgcacagagctggggctgagggatggactgatgcttttagctcaaacgtggcttttagacagatttgttcatagaccctctcaagtgccctctccgagctggtaggcattccagctcctccgtgcttcctcagttacacaaaggacctcagctgcttctcccacttggccaagcagggaggaagaagcttaggcagggctctctttccttcttgccttcagatgttctctcccaggggctggcttcaggagggagcatagaaggcaggtgagcaaccagttggctaggggagcagggggcccaccagagctgtggagaggggaccctaagactcctcggcctggctcctacccaccgcccttgccgaaccaggagctgctcactacctcctcagggatggccgttggccacgtcttccttctgcctgagcttcccccccaccacaggccctttcctcaggcaaggtctggcctcaggtgggccgcaggcgggaaaagcagcccttggccagaagtcaagcccagccacgtggagcctagagtgagggcctgaggtctggctgcttgcccccatgctggcgccaacaacttctccatcctttctgcctctcaacatcacttgaatcctagggcctgggttttcatgtttttgaaacagaaccataaagcatatgtgttggcttgttgta

SEQ ID NO: 144 - DNA, 6516 bp, Homo sapiens
  CDS (130)..(2697)
catgattacggcttgcttgaatgcgagcttatatatagggaaggctgggaaccacgctggcgtgcccaagctttatgtatttgatgcagaattcgtgatttcccgggtcgacgatttcgttcggccaccatgtcggcgccgtcggaggaggaggagtacgcgcggctggtgatggaggcgcagccggagtggctgcgcgccgaggtgaagcggctgtcccacgagctggccgagaccacgcgtgagaagatccaggcggccgagtacgggctggcggtgctcgaggagaagcaccagctcaagctgcagttcgaggagctcgaggtggactatgaggctatccgcagcgagatggagcagctcaaggaggcctttggacaagcacacacaaaccacaagaaggtggctgctgacggagagagccgggaggagagcctgatccaggagtcggcctccaaggagcagtactacgtgcggaaggtgctagagctgcagacggagctgaagcagttgcgcaatgtcctcaccaacacgcagtcggagaatgagcgcctggcctctgtggcccaggagctgaaggagatcaaccagaatgtggagatccagcgtggccgcctgcgggatgacatcaaggagtacaaattccgggaagctcgtctgctgcaggactactcggaactggaggaggagaacatcagcctgcagaagcaagtgtctgtgctcagacagaaccaggtggagtttgagggcctcaagcatgagatcaagcgtctggaggaggagaccgagtacctcaacagccagctggaggatgccatccgcctcaaggagatctcagagcggcagctggaggaggcgctggagaccctgaagacggagcgcgaacagaagaacagcctgcgcaaggagctgtcacactacatgagcatcaatgactccttctacaccagccacctgcatgtctcgctggatggcctcaagttcagtgacgatgctgccgagcccaacaacgatgccgaggccctggtcaatggctttgagcacggcggcctggccaagctgccactggacaacaagacctccacgcccaagaaggagggcctcgcaccgccctcccccagcctcgtctccgacctactcagtgagctcaacatctctgagatccagaagctgaagcagcagctgatgcagatggagcgggaaaaggcgggcctgctggcaacgctgcaggacacacagaagcagctggagcacacgcggggctccctgtcagaacagcaggagaaggtgacccgcctcacagagaatctgagtgccctgcggcgcctgcaggccagcaaggagcggcagacagccctggacaacgagaaggaccgtgacagccatgaggatggggactactacgaggtggacatcaacgggcctgagatcttggcctgcaagtaccatgtggctgtggctgaggctggcgagctccgcgagcagctcaaggcactgcgcagcacgcacgaggctcgtgaggcccagcacgccgaggagaagggccgctatgaggctgagggccaggcactcacggagaaggtctccctgctagagaaggccagccgccaggaccgcgagctgctggcccggctggagaaggagctaaagaaggtgagcgacgtcgccggcgagacacagggcagcctgagtgtggcccaggatgagctggtgaccttcagtgaggagctggccaatctctaccaccacgtgtgcatgtgcaacaatgagacacccaaccgtgtcatgctggactactaccgcgagggccagggcggggccggccgcaccagtcccgggggccgcaccagccccgaggcgcgtggccggcgctcacccatcctcctacccaaggggctgctggctcctgaggcgggccgagcagatggtgggacgggggacagcagcccctcgcctggctcctcactgccatcacccctgagtgacccacgccgggagcccatgaacatctacaacctgatcgctatcatccgtgaccagatcaagcacctgcaggcagccgtggaccgcaccacggagctgtcacgccagcgcattgcctctcaggagctgggccccgccgtggacaaggacaaggaagcgcttatggaggagatcctcaagctgaagtcgctgctcagcaccaagcgggagcagatcaccacgctgcgcactgtgctcaaggccaacaagcagacggccgaggtggcccttgccaacctgaagagcaagtatgagaatgagaaggccatggttaccgagaccatgatgaagctgcgcaatgagctcaaggccctcaaggaggacgcagccaccttctcctcgctgcgtgctatgtttgccaccaggtgtgacgagtacattacacagctggatgagatgcagcggcagctggcggctgctgaggacgagaagaagacgctgaactcgctgctgcgcatggccatccagcagaagctggcgctgacccagcggctggagctgctcgagctggaccatgagcagacccggcgtggccgtgccaaagccgccccgaagaccaagccagccacaccgagcgtaagtcacacctgtgcctgtgccagcgacagggccgagggcaccgggctggccaaccaggtgttctgcagcgagaagcacagcatttactgtgattaggggctgtggggcgccgcacgctgcagctaacatctgcttcacctcaactaacccagcagcagcgggacggcggtgctaggtcaatcttaacgtgactaatgcacagagggtaggagtctagccgaggcgccatggggcgttgcatcagcaggacacttgtgagagctttgtgtcgcttctcactcctcaaagccccctcaggagcacccagtcctcagctgctctcttaggtgggggtcagagggggggatagagctgcacattcttgcagcagatgtgtgatgaaagcatcttctaagccctgcgcacccgtggggaaacccaagggaggagtcctggtcctgctccctcagcacccaaaaggggcagaacctgagttgagacttgcatgttcctcgcatgtgtctaatgtcagcactagaaagcagttttaggaggttccagcctgcagcataggtacgacctcagaggatggctttgcacttggcatagtttcatggaaaggagtacgttgtagtttatgcagtatctgactgcaaatcatattcaggaaagaagtgcagaatttcttccccaagcccagagaagagcagccctgagcccctgtattctgctggccagacacacatggcacagacacagctgaccataacccaggaatccagagctcggtttctcatttctgagatcaggatgcttgtatagtggcctgtgaggtgacagattggcagggcccaaggccccaggttttcatttttcatgagaaaagctttccaagtgcctggccagaccttggtccttagtgcagagcccgtccttttgtacttggggtgaccccagcagccaattatccggccttccatagggggttcagtcccaaaagacatgggggcttttgaaaaaccctagcctgaaagtctgaagccaccaaagggcttggctgggttggacacccacaggtgtatccagagcccagcccggtgctgggaaagctttgcatacggccagggccacttgtcaggattcacaggtaggagatgtttaggtctctttatttagtgcaatctgggggatggcaacagagaaagaggaaaggtagctgtagggttctcccatttccagaggctccatccacacctgccttcccacattctgagcagaacttttctcagtacttttttcccgatcaccctgtgggaccagctggacctgaggctgcagtcttctctcctgcaggctgcttgccttgtctctcatgcggaagaggcattcgagttacctggtgagagaccgtgttgccccctcccacagctctctgccctgcgcgttcttccctttggtgccgagtatgtttcggtcccctccagactccaggacacgcccatgtatgtcccctgcgtgttcatcctgggcccagatccccctgccccagcaagactcgcagtgggatggctgctggcatgcccaccctgcatgcgctttgccctctccttgcaagcctggcatatagcttctctccatactcctaagggactttgcagacacccaagccactgggacccctgctaacacatgcaggtcttctcttctgccaactaacgtgctcgcgccctcccagcacgtggagagcttcaattgtcagataaacaggaagcgacagatgaccgctttctaacgctctcttttctcccgttttcagctgtagagtagctgccaggaggacttggccacccggccctgtcacactgcagccccttccccttccctctcgtggcccacaaggaggaaggaagggcaacctaaaagcccacttagaaactttttggatatgccactgcaattcttttcaaaatagcattccccaggtttttaatgggaggaaaaaaagctttaatgttgagcatgctgcgagctgctgcgtggaaaggcctctgtatgggccgaagacccttcttccctggctgccaggctcgccaggagcccactggaaacgcccaccacgggggctccttgttacacatgttctttttttatccgatcaacctgtgcacttttgatattttgatattatatttgcttccttaattcctcgcgtagagacggtctcaggtgccgtggtctatgctcgtggtcctgtaggctgtccgcctcagctcccaccgtgtttgtctggtgtcagcacgagggcagagctgtgtgctccatagcgtgtagctttagactcggagatgagtgctttgacccagcgaggagctcagctaagtgtatccacgctgtggttcagcagcctttagatcatacggcattgtggttcatgtttgaaattacagattttaaatgccatgttcattaagaaatccagggtattcagattctggggtttttcatattgtattattattattcttaggaatagttcaatgtaacaagaagaaaacttgacctttgctctggttaaaacagtaataggcacttgaaaaaaaaagataaattattgaatgagtagtattacctacaaattccagaattttctgggttttaggacgttgtgaagcatgactgattaacagaattttatacaactgtaccaataaaattccaaattggaattgttttgttactctggttgttgtgccaaattgtggtacacttagaaaattctacagtcgtcgatttttagggtgttctctttcaacacctttttgttagtaatcattgccagtagtgccttcatcagttaagggaggtgtcccagcacagatcattctcaaaagcgagcagggaagagctagtgggcatgctgaaggccagcgtggacagcaggtgaggcaggtgctcctcacacccagacctgggcatcttcattgagggaaagaaaacagtcattgtgcaaaattctgttagtcagtgattctttacttgcaaattcaggggcttagaaaatgaaagcaaacacaaaaccttgagtgtgctttgggaaccaaatggaccttctgggacaagctgagcaagctgtatgaacgccacgtttgtgaagagctgagggtatcaggagggccgacgctgtgttggcatgcgcagtaggggatgagggttagccatagtattctttgcaaatgtgaaagcgagacattatatcttctcttgcttggtgtaactaatcactgttaatttcaggaaacagaactcattaaaactccttagcaaaccaggtctacatcctgttttgtttgctgagtgaggttagtgggagtggtcaaattggtactcttggaggaagaaaaactgtccttccttctccaaaaaaggaaaaattataataatataaatgacaaaaataaaagaattctgtttcctggaataagcatttcttattcctagttgtagggactcctatttttaccttccgttacagtgttgattcataagaaatattgttacatttgagataacttcatctgtatgggggtatttatttgcaatgatgtctgagtactgtattttttctgtgcattaccttagtgtcagaatgttggtctttattttaaagtcatatgcatgttctcctgccaaggaacctttacacagacccaaacaaaaaaataataatcaaatgccttcaatttctgagaaaatgaggcagagcatggaaaaggaataggaaggagaaattaattgagattttcaggacacagacatatgatgtgaatgcctacaaagccagtgcgcataggaacagtgggcctgggtaaagagtcacattggtaggaccaataaagaataataaaaagacaaagcacaaaaaaggaaaaaaaaaaa

SEQ ID NO: 145 - DNA, 1118 bp, Homo sapiens
  CDS (1)..(930)
atggtgaaggtcgtgccggccacgcgaggaaatctgcctcgctcacaactcacaggcacacatcaacactgccaaccgagggagcccaaaatcaccgcaagcgaaaggctccggcggcggccacgggccacagcccgcctccgcgcacacgcagcccctcccgagcctccactcgccgtcttcgccccgccttcggaccggaaggagttgttggcgcttccggtggcctgcgaccccgtaattgcctcggtgatgtcgtgggttcaagcagcctccttgatccagggccctggagacaaaggggacgtgtttgacgaagaagcagacgagtcgctcctggcgcagcgggaatggcagagtaacatgcaaagacgagtcaaagaaggttatagagatggaatagatgctggcaaagcagttactcttcaacagggcttcaatcaaggttataagaaaggtgcagaagtcattttaaactatggacgactccgaggaacattgagtgctttgctctcctggtgtcaccttcataataataattcaactttgatcaataaaataaacaatcttctggatgcagttggccagtgtgaagagtatgtgctcaaacatctgaaatcaatcactccaccgtcccatgttgtagatttattggactccattgaggatatggacctttgtcatgtagttccagctgagaaaaagattgatgaagctaaagatgaaagactctgtgaaaataatgctgagtttaacaaaaactgtagcaagagccatagtgggatagattgttcatatgtagaatgttgtagaacacaggagcatgcacattcagaaaacccaagccccacatggattttggaacagacagccagtttagttaaacagctgggcctatcagtagatgtattacaacacctcaaacaactataaaattaccttcccttttctaatgaaaataatgttcagaacatttggtttcctaacaatcgaaatttgtactggtttctgcatcaaacacctcaactgtagggttaccctttatggaagtttgaaattaacactattgtcttcaaaattaacactattaaatgtaatataagcctttaaaaaaaaaa

SEQ ID NO: 146 - DNA, 1372 bp, Homo sapiens
  CDS (1)..(405)
atttggccctcgaggccaagaattcggcacgagcgtccggcttcggagcgggagtgttcgttgtgccagcgactaaaaagagaattaaatatgggtgatgttgagaaaggcaagaagatttttattatgaagtgttcccagtgccacaccgttgaaaagggaggcaagcacaaggctgggccaactctccatggtctctttgggcggaagacaggtcaggcccctggatactcttacacagccgccaataagaacaaaggcatcatctggggagaggatacactgatggagtatttggagaatcccaagaagtacatccctggaacaaaaatgatctttgtcggcattaagaagaaggaagaaagggcagacttaatagcttatctcaaaaaagctactaatgagtaataattggccactgccttatttattacaaaacagaaatgtctcatgacttttttatgtgtaccatcctttaatagatctcatacaccagaattcagatcatgaatgactgacagaatattttgttgggcagtcctgatttaaaactaagactggcttgtggttaaatgaatatgttcagtttttgaattttaatagtaactccaattcagtaaatggtatcactgtttaccccttttaaagatatgattagacttcgttagtaatgttcaacttttcacaaagatggtgagtgccatcttaaaacttactggagattggttttatatttagatttatataactggttatgtgaatatatttaaatactggggaaattgcttcactgtcttagaaccaagcaagattcacctgtgttttgtgttcatgttcatttgcctcttaaaggcaagggttgaagataaataaggtagcaatgtctatagttttggccttaactatgccaatctaattataattccctgtatttaaaatggtttcttttacttattgaaaggcattttagtgtggtttatgtgtaatattaaagattattcaacacctctcacatcttacagatctataaggtcacatgcttttaaaatagtagcaagttaaacttcactcttgaattctttacaatctaagtcaaactaagttataatttaggattgtctttaaacagccattcagaaacaaaactgtagaactgtgtatttgattgggaatggtgcttttgccaacttaaaaggattaaagtaacggagatatacacaaattttaaaattatgtgtgatcacaagactaaagataattaaaaagaaaaccacagatcatgaaaaaaaaagggggggcggttttaaagaatccaatttatacgccgcgggcttgcaaggtaatattttttttatggggcccccaaaatcca

SEQ ID NO: 147 - DNA, 1450 bp, Homo sapiens
  CDS (2)..(1450)
catgcacgcgtacgtaagcttggatcctctagagcggccgctgccattgcccggagatggccggcagagccgccgagacgccgaagagcccgccgcccgcgcgaggtgtagacggggcactgccttcagagcaggtcctgccagcctcgctggagaggatgccctcgtgtccgtgatgggctgtgggacaagcaaggtccttcccgagccacccaaggatgtccagctggatctggtcaagaaggtggagcccttcagtggcactaagagtgacgtgtacaagcacttcatcacagaggtggacagtgttggccctgtcaaagccgggttcccagcagcaagtcagtatgcacacccctgccccggtcccccgactgctggccacacggagcctccctcagaaccaccacgcagggccagggtagctaagtacagggccaagtttgacccacgtgttacagctaagtatgacatcaaggccctaattggccgaggcagcttcagccgagtggtacgtgtagagcaccgggcaacccggcagccgtatgccatcaagatgattgagaccaagtaccgggaggggcgggaggtgtgtgagtcggagctgcgtgtgctgcgtcgggtgcgtcatgccaacatcatccagctggtggaggtgttcgagacacaggagcgggtgtacatggtgatggagctggccactggtggagagctctttgaccgcatcattgccaagggctccttcaccgagcgtgacgccacgcgggtgctgcagatggtgctggatggcgtccggtatctgcatgcactgggcatcacacaccgagacctcaaacctgagaatctgctctactaccatccgggcactgactccaagatcatcatcaccgacttcggcctggccagtgctcgcaagaagggtgatgactgcttgatgaagaccacctgtggcacgcctgagtacattgccccagaagtcctggtccgcaagccatacaccaactcagtggacatgtgggcgctgggcgtcattgcctacatcctactcagtggcaccatgccgtttgaggatgacaaccgtacccggctgtaccggcagatcctcaggggcaagtacagttactctggggagccctggcctagtgtgtccaacctggccaaggacttcattgaccgcctgctgacagtggaccctggagcccgtatgactgcactgcaggccctgaggcacccgtgggtggtgagcatggctgcctcttcatccatgaagaacctgcaccgctccatatcccagaacctccttaaacgtgcctcctcgcgctgccagagcaccaaatctgcccagtccacgcgttccagccgctccacacgctccaataagtcacgccgtgtgcgggaacgggagctgcgggagctcaacctgcgctaccagcagcaatacaatggctga

SEQ ID NO: 148 - DNA, 2105 bp, Homo sapiens
  CDS (256)..(1524)
cgaggattgggtgtgacaatcgcggccaccgccaggaggaacggttggtgggttcaggtaccagcctggccgggacccggctgtgggaccaacgcttccggtgagcgacagaggcagctccccagggcctggagacccgtggggcggactctgggatctgagcctatcgccctggcctggagcccccctttgtacctattccccattcccctaccgagctgggcagttagccagcccactccaactctcggaaccatgtttgcagacttggattatgacatcgaagaggataaactcggaatcccgactgtgcctgggaaggtgaccctgcagaaggatgctcagaacctgatcgggatcagcattggaggaggggcccagtactgtccctgcctctatatcgtccaggtatttgacaacaccccagcagccttggacggcacagtggcagctggcgatgagatcaccggtgtcaatggcaggtcaatcaaagggaaaactaaggtggaggtggcgaagatgattcaggaggtgaagggggaggtgaccatccactacaacaagctgcaggcggaccccaagcagggcatgtccctggacattgtgttgaagaaagtcaagcaccggctggtggagaacatgagttcagggaccgcagatgctctgggcctgagccgggccatcctgtgcaatgatgggcttgtcaagaggctagaggagctggagcggaccgctgagctatacaaagggatgacggaacacaccaagaacctcctacgggccttttatgagctgtcgcagactcaccggggtaatggcatcccccaaagctgtgcctttggggacgtgttctccgtgatcggggtgcgggagccccagccagctgcgagcgaggcttttgtgaagttcgccgatgcccaccgcagcatcgagaagttcggcattcggcttctgaaaaccatcaagccgatgctgacggatctgaacacgtacctcaacaaagccatcccggacactcgcctcaccatcaagaagtacctggacgtgaagtttgagtacctgtcgtactgcctgaaggtgaaggagatggatgacgaggaatacagctgcattgccctaggcgagcccctttaccgggtgagcaccggcaactatgagtaccgcctgatcctgcgctgccgccaggaggcgcgcgcccgcttctcccagatgcgcaaggatgtgctggagaagatggagctgctggaccagaagcacgtccaggacatcgtgttccagctgcagcgcctcgtgtccaccatgtccaagtactacaacgactgctacgcagtgctgcgggatgccgacgtcttccccatcgaggtagacctggcgcacaccacattggcctatggcctcaaccaggaggagttcacagatggggaggaggaggaggaggaggaagacacggcagctggggagccgtccagggatacacgaggggctgctgggcccttggacaagggtggaagctggtgtgactcctgagtgccccgcggctgtggtgccgggggcagggtgcgtgggaggacggagcctgggagcggggcggggccgccgcgcaagggggcgacgcataaaggcctgctggcttggggcgcctgcctccctgctcctctgtcctcgcacagcgaacctgggctcctgcccaggacaggcaccagggtcatggcctgggacctggacactggcccctccaccctccctcccctcccggctccccggccagagggagagcttggtctctggacctgccttaggaaggagagggagggcaggaaggaaaagaaaggacttggaggtggcaggagtccgagccctgctccttgtgggcgctcacactgcccccggagcctgctgggagtggggccagccgtggacagctgaggttggggtcaatgcctcctgggcacccttgcctcgccccagaccggcccgtccagtccccatcacacctcggcggcctttatttattctgttcccccagctcggccacttctctgaaggagggctgggttctgggcctgtatcgaataaacacaaacctggatggcgcaaaaaaaaaa

SEQ ID NO: 149 - DNA, 1275 bp, Homo sapiens
  CDS (107)..(1075)
  misc_feature (1)...(1275): n = a,t,c or g
acgaaaatctgctacnnngcnccttntgcaggatcccatcgattcgaattccgttgctgtcggagaagcagcagcaaacatttgctagtcagacaagtgacagggaatggattccaaacagcagtgtgtaaagctaaatgatggccacttcatgcctgtattgggatttggcacctatgcacctccagaggttccgagaagtaaagctttggaggtcacaaaattagcaatagaagctgggttccgccatatagattctgctcatttatacaataatgaggagcaggttggactggccatccgaagcaagattgcagatggcagtgtgaagagagaagacatattctacacttcaaagctttggtccacttttcatcgaccagagttggtccgaccagccttggaaaactcactgaaaaaagctcaattggactatgttgacctctatcttattcattctccaatgtctctaaagccaggtgaggaactttcaccaacagatgaaaatggaaaagtaatatttgacatagtggatctctgtaccacctgggaggccatggagaagtgtaaggatgcaggattggccaagtccattggggtgtcaaacttcaaccgcaggcagctggagatgatcctcaacaagccaggactcaagtacaagcctgtctgcaaccaggtagaatgtcatccgtatttcaaccggagtaaattgctagatttctgcaagtcgaaagatattgttctggttgcctatagtgctctgggatctcaacgagacaaacgatgggtggacccgaactccccggtgctcttggaggacccagtcctttgtgccttggcaaaaaagcacaagcgaaccccagccctgattgccctgcgctaccagctgcagcgtggggttgtggtcctggccaagagctacaatgagcagcgcatcagacagaacgtgcaggtttttgagttccagttgactgcagaggacatgaaagccatagatggcctagacagaaatctccactattttaacagtgatagttttgctagccaccctaattatccatattcagatgaatattaacatggagagctttgcctgatgtctaccagaagccctgtgtgtgtgtggatggtgacgcagaggacgtctctatgccggtgactggacatatcacctctacttaaatccgtcctgtttagcgacttcagtcaactacagctgagtccataggccagaaagacaataaatttttatcattttgaaataaaaaaaaaaaa

SEQ ID NO: 150 - DNA, 1408 bp, Homo sapiens
  CDS (300)..(1151)
ttagagctgtacgcctgcggtaccggtccggaattcccgggtcgacccacgcgtccgcagcaaggccttaaaggctactgagtgcgccggccgttccgtgtccagaacctcccctactcctccgccttctcttccttggccgcccaccgccaagttccgactccggttttcgcctttgcaaagcctaaggaggaggttaggaacagccgcgcccccctccctgcggccgccgccccctgcctctcggctctgctccctgccgcgtgcgcctgggccgtgcgccccggcaggccccagccatgtcgatgctgccgtcgtttggctttacgcaggagcaagtggcgtgcgtgtgcgaggttctgcagcaaggcggaaacctggagcgcctgggcaggttcctgtggtcactgcccgcctgcgaccacctgcacaagaacgagagcgtactcaaggccaaggcggtggtcgccttccaccgcggcaacttccgtgagctctacaagatcctggagagccaccagttctcgcctcacaaccaccccaaactgcagcaactgtggctgaaggcgcattacgtggaggccgagaagctgcgcggccgacccctgggcgccgtgggcaaatatcgggtgcgccgaaaatttccactgccgcgcaccatctgggacggcgaggagaccagctactgcttcaaggagaagtcgaggggtgtcctgcgggagtggtacgcgcacaatccctacccatcgccgcgtgagaagcgggagctggccgaggccaccggcctcaccaccacccaggtcagcaactggtttaagaaccggaggcaaagagaccgggccgcggaggccaaggaaagggagaacaccgaaaacaataactcctcctccaacaagcagaaccaactctctcctctggaagggggcaagccgctcatgtccagctcagaagaggaattctcacctccccaaagtccagaccagaactcggtccttctgctgcagggcaatatgggccacgccaggagctcaaactattctctcccgggcttaacagcctcgcagcccagtcacggcctgcagacccaccagcatcagctccaagactctctgctcggccccctcacctccagtctggtggacttggggtcctaagtggggagggactggggcctcgaagggattcctggagcagcaaccactgcagcgactagggacacttgtaaatagaaatcaggaacatttttgcagcttgtttctggagttgtttgcgcataaaggaatggtggactttcacaaatatctttttaaaaatcaaaaccaacagcgatctcaagcttaatctcctcttctctccaactctttccacttttgcattttccttcccaatgcagagatcagggaaaaaa

SEQ ID NO: 151 - DNA, 1657 bp, Homo sapiens
  CDS (144)..(1589)
gcacgaggcacctcccatgagggctcgggcgcctgcgcagaagacgcacagtgacagcttcctttctcggaaacgcggcgcggccggctgccggaaaacagggcagacctgtatgattggtttattcctggggttgtcatatcatggctgataatgacacagacagaaaccagactgagaagctcctaaaaagagtacgagaactggagcaagaggtgcaaagacttaaaaaggaacaggccaaaaataaggaggactcaaacattagagaaaattcatcaggagctggaaaaactaagcgtgcatttgatttcagtgctcatggccgaagacacgtagccctaagaatagcctatatgggctggggataccagggctttgctagtcaggaaaacacaaataataccattgaagagaaactgtttgaagctctaaccaagactcgactagtagaaagcagacagacatccaactatcaccgatgtgggagaacagataaaggagttagtgcctttggacaggtgatctcacttgaccttcgctctcagtttccaaggggcagggattccgaggactttaatgtaaaagaggaggctaatgctgctgctgaagagatccgttatacccacattctcaatcgggtactccctccagacatccgtatattggcctgggcccctgtagaaccaagcttcagtgctaggttcagctgccttgagcggacttaccgctattttttccctcgtgctgatttagatattgtaaccatggattatgcagctcagaagtatgttggcacccatgatttcaggaacttgtgtaaaatggatgtagccaacggtgtgattaattttcagaggactattctatctgctcaagtacagctagtgggccagagcccaggtgaggggagatggcaagaacctttccagttatgtcagtttgaagtgactggccaggcattcctttatcatcaagtccgatgtatgatggctatcctctttctgattggccaaggaatggagaagccagagattattgatgagctgctgaatatagagaaaaatccccaaaagcctcaatatagtatggctgtagaatttcctctagtcttatatgactgtaagtttgaaaatgtcaagtggatctatgaccaggaggctcaggagttcaatattacccacctacaacaactgtgggctaatcatgctgtcaaaactcacatgttgtatagtatgctacaaggactggacactgttccagtaccctgtggaataggaccaaagatggatggaatgacagaatggggaaatgttaagccctctgtcataaagcagaccagtgcctttgtagaaggagtgaagatgcgcacatataagcccctcatggaccgtcctaaatgccaaggactggaatcccggatccagcattttgtacgtaggggacgaattgagcacccacatttattccatgaggaagaaacaaaagccaaaagggactgtaatgacacactagaggaagacaatactaatttggagacaccaacgaagagggtctgtgttgacacagaaattaaaagcatcatttaaccatagacaatttgccaggatctaggaaccacctaatggtaggtggacagaaaaggaaaaaaaaaaaa

SEQ ID NO: 152 - DNA, 2688 bp, Homo sapiens
  CDS (294)..(1568)
ggcgctgatatacattctatcattcgatgatgaagataccccaccaaacccaaaaaaagagatctctcgaggatccgaattcgcggccgcgtcgaccggctgtatatccatgagcgccgctggcagccggggagctgcaggaaccagactgggggcgagctgagcacctgtagtcaatcacacgcagcttttaggtttgtttgaataagagatctgacctgaccggcccaactgtacaactcttcaaggaaaattcgtatttgcagtgggaagaataagtaacattgatcaagatgaatgccatgctggagactcccgaactcccagccgtgtttgatggagtgaagctggctgcagtggctgctgtgctgtacgtgatcgtccggtgtttgaacctgaagagccccacagccccacctgacctctacttccaggactcggggctctcacgctttctgctcaagtcctgtcctcttctgaccaaagaatacattccaccgttgatctgggggaaaagtggacacatccagacagccttgtatgggaagatgggaagggtgaggtcgccacatccttatgggcaccggaagttcatcactatgtctgatggagccacttctacattcgacctcttcgagcccttggctgagcactgtgttggagatgatatcaccatggtcatctgccctggaattgccaatcacagcgagaagcaatacatccgcactttcgttgactacgcccagaaaaatggctatcggtgcgccgtgctgaaccacctgggtgccctgcccaacattgaattgacctcgccacgcatgttcacctatggctgcacgtgggaatttggagccatggtgaactacatcaagaagacatatcccctgacccagctggtcgtcgtgggcttcagcctgggtggtaacattgtgtgcaaatacttgggggagactcaggcaaaccaagagaaggtcctgtgctgcgtcagcgtgtgccaggggtacagtgcactgagggcccaggaaaccttcatgcaatgggatcagtgccggcggttctacaacttcctcatggctgacaacatgaagaagatcatcctctcgcacaggcaagctctttttggagaccatgttaagaaaccccagagcctggaagacacggacttgagccggctctacacagcaacatccctgatgcagattgatgacaatgtgatgaggaagtttcacggctataactccctgaaggaatactatgaggaagaaagttgcatgcggtacctgcacaggatttatgttcctctcatgctggttaatgcagctgacgatccgttggtgcatgaaagtcttctaaccattccaaaatctctttcagagaaacgagagaacgtcatgtttgtgctgcctctgcatgggggccacttgggcttctttgagggctctgtgctgttccccgagcccctgacatggatggataagctggtggtggagtacgccaacgccatttgccaatgggagcgtaacaagttgcagtgctctgacacggagcaggtggaggccgacctggagtgaggcctccggactctggcacgctccagcagccctcctctggaagctgcgtcccctcaccccctgtttcaggtctcccatctccctcagtgacctggatctgacctcacaccatcagcagggggcacccaccatgcacacctgtctcggagtaggcagctcttcctgggagctccaggctatttttgtgcttagttactggttttctccattgcattgttaggcatggtgacaagtgacagagttcttgccctctgtccagtttcagcatctggttgcttttaagccaagtacatctagtttccctattaaaaatgtgtctgaatagcgattttgctttgccaccaaaaggcttttccctgagaacagtgaaggatgtatgtcattttgtggtggttgtatgtgtccttacatagaccttaaaaagagctcacccttccaggccaatgctgaagacacagctccgcttgggagcctgagaacccaggcttcccaggccagagtgtggcttcttaaacggcaaaggaaattcctttgagtcacaagccaagttttcgccctgtctcctgagaccatttccctacgctttgctgctgctgagagttacgtgaggcacttgttaaaaattcagcctcccaggtccctcccctcggagaggctgattcactgggtctgggaaggagcctggggattttaatttttcacaagtgccccagatgattctcatcaccaagcaaattttggaaatgctgttcaacagcgcccttaaattggaaacatctttgcagctcgttttattgaaattcataatcaggggtgtcctctagctcccacggtctccagagcagcaaggccggctatggagctgccgtcgtgtgaccacagtgtgatgtctcagaagggctctgggtgggctgagcatctgggctgtgccctggctctgcttttcaccctggacaaagtcgctgtggacttcaatttcttcacctctaaaatgggggacttggaccagccctgtgtctttgactggcttctcttcagagtccccgttgtcatcgtaagacccttgctgtttggagggtggtcttgtgactgtggcagctgctggccgctggaatga

SEQ ID NO: 153 - DNA, 4450 bp, Homo sapiens
  CDS (1)..(3615)
atggggctgctgctcatgatcctggcgtcggccgtgctgggttccttcctcacgctcctcgcccagttcttcctgctgtaccgcagacagcccgagccgccggcggacgaggccgcccgcgcgggcgagggcttccgctacatcaagccagtgccgggcctgctcctaagggagtacctttatggcggcggccgggatgaggagccctccggagcggcccctgagggcggcgcgacccccaccgcggcccccgagacccccgccccgccgacgcgggagacttgctacttcctcaacgccaccatcctattcctgttccgggagttgcgggacaccgcgctgacccgccgctgggtcaccaagaagatcaaggtggagttcgaggagctgctgcagaccaagacggccgggcgcctgctggaggggctgagcctgcgggacgtgttcctgggcgagacggtgcccttcatcaagaccatccggctcgtgcggccagtcgtgccctcggccaccggggagcccgatggccctgaaggggaggcgctgcccgccgcctgccccgaggagctggccttcgaggcggaggtggagtacaacgggggcttccacctggccatcgacgtggacctggtcttcggcaagtccgcctacttgtttgtcaagctgtcccgcgtggtgggaaggctgcgcttggtctttacgcgcgtgcccttcacccactggttcttctccttcgtggaagacccgctgatcgacttcgaggtgcgctcccagtttgaagggcggcccatgccccagctcacctccatcatcgtcaaccagctcaagaagatcatcaagcgcaagcacaccctaccgaattacaagatcaggtttaagccgttttttccataccagaccttgcaaggatttgaagaagatgaagagcatatccatatacaacaatgggcacttactgaaggccgtcttaaagttacgttgttagaatgtagcaggttactcatttttggatcctatgacagagaggcaaatgttcattgcacacttgagttaagcagtagtgtttgggaagaaaaacagaggagttctattaagacgggtacaatctccctcacagctgttttcatgggctggcatcgagtgtctgaggcttttccaggcttatggtacaagctgttggtggatcttccattctggggtctggaggatggtggccctcttctcacagctccactaggcagtgccctggttgaattaataaaaggaaatttacaaagtgttggacttacacttcgtcttgtccagtcaactgatgggtatgctgggcacgtcatcattgaaactgtggctccaaactcgcctgctgcaattgcagatcttcagcggggagatcgacttatcgccattggaggtgtgaaaatcacatcaacactgcaagtgttgaagcttatcaagcaggctggtgaccgagtcctggtgtactatgaaaggcctgttggccagagtaatcaaggtgcagtgctgcaagataactttggccagttggaagaaaactttttgtcaagctcatgccaatcgggttatgaagaggaagctgccgggttgacagtagatactgaaagtagagagctggattctgaatttgaagacttggcaagtgatgtcagagcacaaaatgagttcaaagatgaggcacaatcattaagtcatagtcccaaacgtgttccaacaacactttctattaaaccccttggagctatatcaccagttttaaaccgtaaattagctgtaggaagtcacccactaccaccgaaaattcagtccaaagatggaaataaacctccacccctaaaaacttctgagataacagacccagcacaagtgtcaaaaccaacccaaggatctgctttcaaaccacctgtgccaccacgaccacaagcgaaagttcctttgccttccgccgatgctccaaatcaggcagaaccagatgttctcgttgaaaagccagagaaggtggtgccacctcctcttgtagataaatctgctgaaaagcaagcaaaaaatgtggatgccatagacgatgcagctgcacctaagcaatttttagcaaagcaagaagtggccaaagatgtcacttcagaaacttcctgccctactaaggacagttcggacgaccgtcaaacatgggaatcatcagaaattctttatcgtaataagctaggaaaatggacaagaaccagagcatcctgtttgtttgacatagaagcctgtcacaggtacttaaacattgcattgtggtgcagggatcctttcaagttgggaggtctcatctgtttggggcatgttagtttaaaacttgaagatgtggctttaggatgcctagctacatcaaacacggaatacctttccaaattgagactggaagccccctcacctaaggctatagtcactagaaccgcactacgcaatctgagtatgcaaaagggattcaatgacaaattttgctatggtgacattactattcacttcaaatatttgaaagaaggagaatcagaccaccatgtagttactaacgtagaaaaagaaaaagaaccccatttggttgaagaagtttctgttctccctaaagaggagcaatttgttggacagatgggtttaacagaaaacaaacacagttttcaggatactcagttccagaacccaacatggtgtgactactgtaagaaaaaagtttggactaaagcagcttcccagtgtatgttttgtgcttatgtttgccataaaaaatgtcaagaaaagtgtctagctgagacttctgtttgtggagcaactgataggcgaatagacaggacactgaaaaaccttaggctggaaggacaggaaaccctcttaggcctgcctcctcgtgttgatgctgaagctagcaagtcagtcaataaaacaacaggtttgacaaggcatattatcaatactagttctcgtttattaaatttgcgtcaagtctctaaaactcgcctttctgaaccaggaaccgatctcgtagaaccttcaccaaaacacacacccaacacgtcagacaacgaaggcagtgacacggaggtctgtggtccaaacagtccttctaaacggggaaacagcacaggaataaagttagtgagaaaagagggtggtctggatgacagtgttttcattgcagttaaagaaattggtcgtgatctgtacaggggcttgcctacagaggaaaggatccagaaactagagttcatgttggataagctacagaatgaaattgatcaggagttggaacacaataattcccttgttagagaagaaaaagagacaactgatacaaggaaaaaatcacttctttctgctgccttagctaaatcaggtgaaaggctacaagctctaacacttcttatgattcactacagagcaggcattgaagatatagaaactttagaaagtctgtctttagaccagcactccaaaaaaataagcaagtacacagatgatacagaagaagaccttgataatgaaataagccaactaatagactctcagccattcagcagcatatcagatgacttatttggcccatccgagtctgtgtagcagacaggtctatttaaactttcaaatgaacagggtaaagttgcatctaaagtaccacagatacaaccatgtttaaatcctcgtatgcactctggcctgcttctccagttacttgcttgtgtaagaacaaaaatgagaaaggttgttttccagtaaaaacatgaccagcttactaattggttgttttggattgcatttatagctatgcttttttgggtttatactgggaatttatttttactaaattatttaacttttctaattatgtaattatgtaagctagcttttcatgtttatgtatgtatggtgtccccttgtgttatttttcttcctcttggtttttgaattagtgttaaatagaatactgtctggattcttaaaatattttcatttccatcatggttataacaaatttgcctgcatgcccaaactgacaacagcaatcactgagggaacaggttttgaatctttcttttgtgttatgaagtttatcgtctctacttgcttgagatttttgttattttgggggtttgggggtgctttttgttttgtttttgccaaatgtaacatgaaagcagatgctgcagctttagtctgttatgctgatttagtaaaaaaaaattttttacatatattgcttgctttcgatgcttctgtgaaacttttttctaaagcttttgtgcagctgtatggtaaaaatatggtgattaatttgaagagcttacattgaaagacaatgtattaggaaataaatgcagattgcgagtggtcaagaatcttgtagagaggataacaagacttaattactgaacaacagcaacatagcattttgaag

SEQ ID NO: 154 - DNA, 1027 bp, Homo sapiens
  CDS (60)..(560)
  misc_feature (1)...(1027): n = a,t,c or g
gggggatcgagaccattgnnntttgtagtcactatcagtgcggtggaattcccggcaagatggcggcggctggggctggccgtctgaggcgggtggcatcggctctgctgctgcggagcccccgcctgcccgcccgggagctgtcggccccggcccgactctatcacaagaaggttgttgatcattatgaaaatcctagaaacgtggggtcccttgacaagacatctaaaaatgttggaactggactggtgggggctccagcatgtggtgacgtaatgaaattacagattcaagtggatgaaaaggggaagattgtggatgctaggtttaaaacatttggctgtggttccgcaattgcctccagctcattagccactgaatgggtgaaaggaaagacggtggaggaagccttgactatcaaaaacacagatatcgccaaggagctctgccttcctcccgtgaaactgcactgctccatgctggctgaagatgcaatcaaggccgccctggctgattacaaattgaaacaagaacccaaaaaaggagaggcagagaagaaatgagccctccctcggcgaagcctccagcaggccacaccagctgtttcccacctgctgtgcagtcaccttagatgttcagaagccgcttcctctccactgaagagctatgagatacgcacaatacttgctgttcacgttatgactctcatgcaagcaaaatacacagtttcattgttctgaatcctgtggtttctttcagcccacttttatcgccttaacctagttaatgtatattttgaattgtgtgtatgacctcagaactgaaattgataatgaagttgcaagttttgatagcccgtgaagtgcataagtatctaattttacctgaattgatttggggggaaattaccagtagaatgccttggtctgaatatttgatagaaccaattgttgtacataaaacagatctgcgcatatatatatatgtataaaaaataataaaataatggaagatgaaaaaaaaaaaa

SEQ ID NO: 155 - DNA, 1281 bp, Homo sapiens
  CDS (262)..(1281)
ttttgaagctcgtcgcctgcaggcaccggtccggaattcccgggtcgacccacgcgtccgcccacgcgtccgcaaatactggttaactgcgtttgcagctagaagttaggctctgattcactgttttgtattttctaaaagggttatatgtaatttgaaagatagacctgccaagacgtgagatctgtgttctccttggttagagctaacatttttggtgaggaaagcactgcaggagcaggctggcacagagaagaggacatgcggaaggagctccagctctccctgtcagtcaccttgctgcttgtctgtggcttcctctaccagttcaccctgaagtccagctgcctcttctgcttgccttctttcaagtcccaccaggggctggaagccctcctgagccacagacgtggcattgtgtttctagagacctcagagagaatggagccaccccatttggtctcctgttccgtagagtctgctgccaagatttatcctgagtggcctgtggtgttctttatgaagggtcttactgattccacaccgatgccctcaaactccacatacccagctttttccttcctgtcagcaatagacaacgttttcctcttccctttggatatgaaaaggctgcttgaagacacaccattgttttcatggtacaatcaaatcaacgccagcgcagagagaaactggctccacatcagctcggatgcatcccgcctggccatcatctggaaatacggtggcatctacatggacaccgatgtcatctccatcaggcccatccctgaggagaactttttggctgcgcaggcttctcggtactctagtaatggaatatttgggttcctcccccaccacccctttttgtgggaatgcatggaaaactttgttgaacactataattcagccatttggggcaaccaaggccctgagttgatgacaaggatgttgagggtatggtgtaaacttgaagacttccaggaggtgagcgacctcaggtgtctgaacatatccttcttacacccccaaagattttaccccatctcctatcgagagtggaggcgctactatgaagtgtgggatacagagccaagcttcaatgtctcttatgccctgcatttgtggaaccacatgaaccaggaggggcgggctgtgattagaggaagcaacacactggtggaaaatctctatcgcaagcactgtcccaggacttacagggacctgattaaaggcccagaggggtcagtgactggggagctgggtccaggtaacaaa

SEQ ID NO: 156 - DNA, 1705 bp, Homo sapiens
  CDS (123)..(866)
ggcccccccctatggaatagcgtgacccaagctgcctagcgtttaaacttaagcttggtaccgagctcggatccactagtccagtgtggtggaattcggaagttgctttgttttgcttcgagatggctgcggggatgtatttggaacattatctggacagtattgaaaaccttccctttgaattacagagaaactttcagctcatgagggacctagaccaaagaacagaggacctgaaggctgaaattgacaagttggccactgagtatatgagtagtgcccgcagcctgagctccgaggaaaaattggcccttctcaaacagatccaggaagcctatggcaagtgcaaggaatttggtgacgacaaggtgcagcttgccatgcagacctatgagatggtggacaaacacattcggcggctggacacagacctggcccgttttgaggctgatctcaaggagaaacagattgagtcaagtgactatgacagctcttccagcaaaggcaaaaagagccggactcaaaaggagaagaaagctgctcgtgctcgttccaaagggaaaaactcggatgaagaagcccccaagactgcccagaagaagttaaagctcgtgcgcacaagtcctgagtatgggatgccctcagtgacctttggcagtgtccacccctctgatgtgttggatatgcctgtggatcccaacgaacccacctattgcctttgtcaccaggtctcctatggagagatgattggctgtgacaaccctgattgttccattgagtggttccattttgcctgtgtggggctgacaaccaagcctcgggggaaatggttttgcccacgctgctcccaagaacggaagaagaaatagataagggccttggattccaacacagtttcttccacatcccctgacttgggctagtgggcagaggaatgcctgtgctggggccaggggttcagggaggagtggatggcacagtgctgtcatcccttctcctcccctctccccactcccggtgctgaggctgcatcagaccctggtagggaggggtgccgcagccactaacggtatgtgctctccttcagccctctcccttcggagggacgtggtcttgcccactgtccttttgcctccatgctgaggtcggtgctgtatttcagagggagggtccttttcattctccttgctttgtatttaaggactggggcatagcatgggggcagtcccccagacctcttcattccccctcctgtggtgagggctaggtgtgatcaacacttttcttctccattcccttcctgcttttttcatggtgggggatccaccaggtcatctaggctctggccctagttgaaggggcaccccttcctctgtgccaagaggattcatcctgggagagggggcaaggtggaatgcagataactcacatgtaaaaggaacttgggtaggtaaataaaagctatacatgttggcctgctgtgtttattgtagagacactgttttagtaaacatgctgagcattcattttgcgtcctctgggttggatgcgatgtgagaggatggcatgccagaattaggacacgacatgaaaccagagtggtgcctctgtccgagaacttgtaagttctcaacttgggaaagacagaggtgctggagggtgggcctcagaccagggggtctccaaaactttgtaaatcatgcat

SEQ ID NO: 157 - DNA, 5643 bp, Homo sapiens
  CDS (1)..(2616)
atggttgctgtacgggctgctggcccacgagaaggggccagccaggatgaagcgggcacagtttgggcccccatgactggctgcccttgccagtgccgcccaggacccagctggctgctggtggacaccctggagcctgagacagcgtacccagttcagcgtcctggcccagaacaagctgggaaccagcgccttcagatgaagcgggcacagtttgggccccatgactggctgtccttgccagtgccgccaggacccagctggctgctggtggacaccctggagcctgagacagcgtaccagttcagcgtcctggcccagaacaagctgggaaccagcgccttcagtgaggtggtcactgtgaacactttagcattccctattacaactccagaacccctggtgctggtcaccccaccgaggtgcctcatagccaatcggactcagcagggtgtgctcctgtcctggcttccgcctgccaaccacagctttcccatcgaccgctacatcatggagttccgtgtcgcagagcgctgggagttgctcgacgatggcatccccggcaccgaaggagagttctttgccaaggatctgtcacaggacacgtggtatgagttccgggttctggccgtcatgcaggatctgatcagcgagcccagcaacatcgccggcgtctccagcacagacatcttcccgcagccggacctgaccgaggatgggctggcgcggcctgtgctggcgggaatcgtagctaccatctgcttcttggcagctgccatcctgttcagcaccctggctgcctgctttgtcaacaagcagcgcaagcgtaagctcaagcgcaaaaaagaccctccactctccatcacccactgcaggaagagcctggagtctcccttgtcctctggcaaggtgagccccgagagcatccgcacgctccgagcgccgtcagaatcctccgacgaccagggccagcccgcggccaagaggatgctgagccccacccgtgagaaggagctgtcgctgtacaagaagaccaagcgggccatcagcagcaagaagtacagcgtggccaaggcagaggccgaggcagaggccaccacgcccatcgagctcatcagcagaggccctgacggccgcttcgtgatggaccctgccgagatggagccctcgctgaagagcaggcgcatcgagggcttccccttcgccgaggagacggacatgtaccccgagttccgccagtcggacgaggagaacgaggacccactggtgcccacatctgtggccgccctgaagtcccagctcacccctctgtcatccagccaggagtcctacctgccaccaccagcatacagccctcggttccagccccgcgggctggagggccccggtggcctggaaggtcggcttcaggccacaggccaggcccggccccctgccccccggcccttccaccatggccagtattatgggtacctcagcagcagcagccctggggaggtggagccgcccccgttctacgtgccagaagtgggcagccccctgagctccgtcatgtcgtccccgcccctgcccaccgaggggccctttggccaccccaccatccccgaggagaatggagagaatgcatccaacagcacgctgcccttgactcagacacctacaggagggcgctcccctgagccctggggccggccagaattccccttcggggggctggagaccccagcgatgatgttcccccaccagctgccaccctgtgatgtgcccgagagtctgcagcccaaggccggcctcccccgaggactgccccccacctccctgcaggtgcccgcggcctacccgggcatcctgtctctggaggcaccgaagggttgggcaggcaagtcgcccggcaggggccctgtcccagcgccccccgccgccaagtggcaggacagacctatgcaacctctggtaagccaagggcagctgcgacatacaagccaaggcatgggcatacctgtgctgccttaccccgagccggctgagccgggggcgcacggcggccccagcacatttggcctggacacccggtggtatgagccccagccccggccccggcctagccctcggcaggccaggcgcgccgagcccagtttacatcaagtggtgctacagccctcccggctctcacctctgacccaaagccccctcagctcccgcaccggctcccctgagctcgccgcccgtgcccggcctcgcccgggcctcctgcagcaggcagagatgtcagagatcaccctgcagccgccggctgcagtcagcttttctcgaaagtctacgccgtccacaggctccccctcccagagcagccgcagtgggagtcccagctaccggcccgccatgggcttcaccactctggccaccggctacccttcccctccacccggccccgcccctgctgggcctggggacagcttggacgtgtttggacagacgccttcccctcgaaggacgggggaggaattgctccgaccggagaccccaccacccacgttacctacttcagggaagctgcggagagacagaccagctcccgcgaccagcccgcctgagagagcactctctaaactgtagcagctggtattccagctatctgggcagtgttgtcgagacaagcctctcctcagctcaataggtaagggagctcctcggctgggcgggcgggggcgggcaggcggacggggcttcggccgggccattgcttcctggacaggggatccaaaccatgtcccctcaccgccccgtggggtggccgctgccgctcctcgatccccacggcttctgggttccccacatcgagccacgctcggcaccgcctagctgcagcttctgccccccaccccccgtccccatgtccggcccctctagagccccctgcggctctcctcactcctcgccagcctcgccagcctgctgccagtacacccagggcctcccacagaagccctggggccctgcatgcaccccgaaggggcccagaacacccgagatctgctttgcatctctgcacccttggggacctctctggggcccctctggtatccaggaagagcccccccgcaccctattctcccagcagccccaggcataacatcccttctcctggggtggctggcccctcaccagcttcttgagatcttcgtggtattaggctctctcgaggagtacaaggttgggatgagccccacttcttccttgacagtggggtcctctgcagggtcaggtccctgcagtcctatggggctttgtagcgaaatgtcatcactcccctgtgctccttgccttctgcagcctgaccttggtagtcacaggactgaaatgtgacctagcccttgggtccacattgctttcaaggtccctgttgtagccttgtcgtcctccctgggtcatgctgtagggaaagggtcttaggaggacctccccgaggggagggggcaggcttcccctgggcagacaggcattgagctggcaggaagtgaaacccccagggaccagcactgtgtccctccccctgcccccgcagtcagcctctccttgagtgtccttccaggtggaagctaaaggaacttgggcattcagggagcctctgagtccctcacagagactcagggccacccgaagctcgctccctctcacagtagcctgacaaggtgctgccgctcgccacggaccctctgccctgtgcctgggcacacacaggcatcgggcacctgcatgggagacggcgagcctcccgtccaggtgcttctggctttccaggcgagaaggagacaggtgccttccccccctagagatgtcaagggaggttcactttcctaaccagggctataaatctcattcattcctaagagtggcctccataaagaggactgccctgacatttctttaccatctgtagctataaaattgtcagcagcccagaggccctggaattgtgggtgaggctgtctggcatagggtgactgtgagggctgtcaggcagcgtttatgagctcacctgctctggggccctcctgcgcccagagacccactggtcttccaccttccccagctccctccctgtcccagctgtgactcctccacagcccccggaggtgtgggagccctagactagctctcaccccagctcctggaaattcctagactctgctctcatgtgttattcctcaccccttcactcaactccattgaccctcccctttcccagtgtccccactgtgccagatccaagagaagcccgctctcctttcactgctgtggcaaacccagaaaccaggggcagcgatgagggaccatcgtttctctcccgggcctggccagcatccccagcctaggagaaggagaccctccccatcctgagtcagcccctcggtgctggcctctcctgcctgctgggagcctccccggtacggctgctgggtcctggggagatgcaggctctgttcagatgctgtctccatgctgcacctttgcatgtgtgccctcttggtcttgcttggagaagttgtgacagctcttgtccacgtgcgttctcactgtttcttttcccttcagttcctctcctgttcctttggtccatatgtagttgttgcccctgcctctcctcctttctctctccctttttttctcctcttcccaactcccttctcaacatggggagttgtattgcgtggacctgtcctttctgtggactgtggggaggccgagccaattcttagctcctgtctgagcctagtgatgccctgtcctcacctctgcttccactccctttcccattcaggctgactgtcaccgcagggaggcaggtgggtctggagcatggagtggcccctgtcctgggtcagctgtaggaaggggcccctttgtaaacaagcttctgccaggttctgaggcagagcactggtctgagtccggccccacagaagggttccatcttgtggtcagcggggtgggctcagacctgcagactcccgcagtgggcccaccctttcccttgctatggcccgtctatgagtggctttcccctgcctccatcggtgtataatcaggcaggtggtgtttgctcttaggtgattagaagaggaggaaaatgcccatcaagccactgcttcagcctgttggccagggaacacctgaacagggtcaaaatggtcagctcctgggcgctgagctaaggaaatatgcagggggttttgactttccctgtcctgaggcttgcctccactttgacctggctgcatctttcctcagctcttctgggtaagctgagagctaagcaaataagacctcctgggctacctggtcatgatttgggttttgtatggattttttgaaaagagagaaaaagagtgtgggctgggtgccgtggcccagagggcagatctcttgagtccaggagttcaaggccagcctgggcaacatagtgaagccccatctctgcaaaaaaatacaaaaaaatagctgggcatggtggcacatgcctatagtcccagctccttggggggctgaggtgggaagatcatctgagctggggaggtcgaggcagcagtgagccgagattgcgccacttcactccagcctgggtgacagagatcctgtctc

SEQ ID NO: 158 - DNA, 1779 bp, Homo sapiens
  CDS (106)..(924)
tccctccccccactcccccctcccccgcccgccggggcaggggagcgccacgaattgaccaagtgaagctacaactttgcgacataaattttggggtctcgaaccatgtcgctgaccaacacaaagacggggttttcggtcaaggacatcttagacctgccggacaccaacgatgaggagggctctgtggccgaaggtccggaggaagagaacgaggggcccgagccagccaagagggccgggccgctggggcagggcgccctggacgcggtgcagagcctgcccctgaagaaccccttctacgacagcagcgacaacccgtacacgcgctggctggccagcaccgagggccttcagtactccctgcacggtctggctgccggggcgccccctcaggactcaagctccaagtccccggagccctcggccgacgagtcaccggacaatgacaaggagaccccgggcggcgggggggacgccggcaagaagcgaaagcggcgagtgcttttctccaaggcgcagacctacgagctggagcggcgctttcggcagcagcggtacctgtcggcgcccgagcgcgaacacctggccagcctcatccgcctcacgcccacgcaggtcaagatctggttccagaaccaccgctacaagatgaagcgcgcccgggccgagaaaggtatggaggtgacgcccctgccctcgccgcgccgggtggccgtgcccgtcttggtcagggacggcaaaccatgtcacgcgctcaaagcccaggacctggcagccgccaccttccaggcgggcattcccttttctgcctacagcgcgcagtcgctgcagcacatgcagtacaacgcccagtacagctcggccagcaccccccagtacccgacagcacaccccctggtccaggcccagcagtggacttggtgagcgccgccccaacgagactcgcggccccaggcccaggccccaccccggcggcggtggcggcgaggaggcctcggtccttatggtggttattattattattataattattattatggagtcgagttgactctcggctccactagggaggcgccgggaggttgcctgcgtctccttggagtggcagattccacccacccagctctgcccatgcctctccttctgaaccttgggagagggctgaactctacgccgtgtttacagaatgtttgcgcagcttcgcttctttgcctctccccggggggaccaaaccgtcccagcgttaatgtcgtcacttgaaaacgagaaaaagaccgaccccccacccctgctttcgtgcattttgtaaaatatgtttgtgtgagtagcgatattgtcagccgtcttctaaagcaagtggagaacactttaaaaatacagagaatttcttcctttttttaaaaaaaaaataagaaaatgctaaatatttatggccatgtaaacgttctgacaactggtggcagatttcgcttttcgttgtaaatatcggtggtgattgttgccaaaatgaccttcaggaccggcctgtttcccgtctgggtccaactcctttctttgtggcttgtttgggtttgttttttgttttgtttttgtttttgcgttttcccctgctttcttcctttctctttttattttattgtgcaaacatttctcaaatatggaaaagaaaaccctgtaggcagggagccctctgccctgtcctccgggccttcagccccgaacttggagctcagctattcggcgcggttccccaacagcgccgggcgcagaaagctt

SEQ ID NO: 159 - DNA, 607 bp, Homo sapiens
  CDS (56)..(232)
ggcacgagggaacgaggggacgtaacggaggcaggttggagccgctgccgtcgccatgacccgcggtaaccagcgtgagctcgcccgccagaagaatatgaaaaagcagagcgactcggttaagggaaagcgccgagatgacgggctttctgctgccgcccgcaagcagagggactcggagatcatgcagcagaagcagaaaaaggcaaacgagaagaaggaggaacccaagtagctttgtggcttcgtgtccaaccctcttgcccttcgcctgtgtgcctggagccagtcccaccacgctcgcgtttcctcctgtagtgctcacaggtcccagcaccgatggcattccctttgccctgagtctgcagcgggtcccttttgtgcttccttcccctcaggtagcctctctccccctgggccactcccgggggtgaggggttaccccttcccagtgttttttattcctgtggggctcaccccaaagtattaaaagtagctttgtaaaaaaaaaaaaaaagggcggccgctttaaaggatccttcgaggggcccaagcttacgcgtgcatgcagacgaatagctttctccctatagggagtcgtattata

SEQ ID NO: 160 - DNA, 2850 bp, Homo sapiens
  CDS (275)..(2806)
atcgaagggcgatgtatataactatctattcgatgatgaagataccccaccaaacccaaaaaaagagatctctcgaggatccgaattcgcggccgcgtcgaccgccgcgcagcgcggctgtatttgcggcctgtgcgagtaggcgcttgggcactcagtctccctggcgagcgacgggcagaaatctcgaaccagtggagcgcactcgtaacctggatcccagaaggtcgcgaaggcagtaccgtttcctcagcggcggactgctgcagtaagaatgtcttttccacctcatttgaatcgccctcccatgggaatcccagcactcccaccagggatcccacccccgcagtttccaggatttcctccacctgtacctccagggaccccaatgattcctgtaccaatgagcattatggctcctgctccaactgtcttagtacccactgtgtctatggttggaaagcatttgggcgcaagaaaggatcatccaggcttaaaggctaaagaaaatgatgaaaattgtggtcctactaccactgtttttgttggcaacatttccgagaaagcttcagacatgcttataagacaactcttagctaaatgtggtttggttttgagctggaagagagtacaaggtgcttccggaaagcttcaagccttcggattctgtgagtacaaggagccagaatctaccctccgtgcactcagattattacatgacctgcaaattggagagaaaaagctactcgttaaagttgatgcaaagacaaaggcacagctggatgaatggaaagcaaagaagaaagcttctaatgggaatgcaaggccagaaactgtcactaatgacgatgaagaagccttggatgaagaaacaaagaggagagatcagatgattaaaggggctattgaagttttaattcgtgaatactccagtgagctaaatgccccctcacaggaatctgattctcaccccaggaagaagaagaaggaaaagaaggaggacattttccgcagatttccagtggccccactgatcccttatccactcatcactaaggaggatataaatgctatagaaatggaagaagacaaaagagacctgatatctcgagagatcagcaaattcagagacacacataagaaactggaagaagagaaaggcaaaaaggaaaaagaaagacaggaaattgagaaagaacggagagaaagagagagggagcgtgaaagggaacgagaaaggcgagaacgggaacgagaaagggaaagagaacgtgaacgagaaaaggagaaagaacgggagcgggaacgagaacgggatagggaccgtgaccggacaaaagagagagaccgagatcgggatcgagagagagatcgtgaccgggatagagaaaggagctcagatcgtaataaggatcgcagtcgatcaagagaaaaaagcagagatcgtgaaagggaacgagagcgggaaagagagagagagagagaacgagagcgagaacgagaacgggagcgagagagagagcgagagagggaacgggagcgagaaagagaaaaagacaaaaaacgggaccgagaagaagatgaagaagatgcatacgaacgaagaaaacttgaaagaaaactccgagagaaagaagctgcttatcaagagcgccttaagaattgggaaatcagagaacgaaagaaaacccgggaatatgagaaagaagctgaaagagaagaagaaagaagaagagaaatggccaaagaagctaaacgactaaaagaattcttagaagactatgatgatgatagagatgaccccaaatattacagaggaagtgctcttcagaaaaggttgcgtgatagagaaaaggaaatggaagcagatgaacgagataggaagagagagaaggaggagcttgaggaaatcaggcagcgccttctggcagaagggcatccagatccagatgcagagctccagaggatggaacaagaggctgagaggcgcaggcagccacaaataaagcaagagccagaatcagaagaggaggaagaagaaaagcaagaaaaagaagaaaaacgagaagaacccatggaagaggaagaggagccagagcaaaagccttgtctgaaacctactctgaggcccatcagctctgctccatctgtttcctctgccagtggcaatgcaacacctaacactcctggggatgagtctccctgtggtattattattcctcatgaaaactcaccagatcaacagcaacctgaggagcataggccaaaaataggactaagtcttaaactgggtgcttccaatagtcctggtcagcctaattctgtgaagagaaagaaactacctgtagatagtgtctttaacaaatttgaggatgaagacagtgatgacgtaccccgaaaaaggaaactggttcccttggattatggtgaagatgataaaaatgcaaccaaaggcactgtaaacactgaagaaaagcgtaaacacattaagagtctcattgagaaaatccctacagccaaacctgagctcttcgcttatcccctggattggtctattgtggattctatactgatggaacgtcgaattagaccatggattaataagaaaatcatagaatatataggtgaagaagaagctacattagttgattttgtttgttctaaggttatggctcatagttcaccccagagcattttagatgatgttgccatggtacttgatgaagaagcagaagtttttatagtcaaaatgtggagattattgatatatgaaacagaagccaagaaaattggtcttgtgaagtaaaactttttatatttagagttccatttcagatttcttctttgcca

SEQ ID NO: 161 - DNA, 927 bp, Homo sapiens
  CDS (159)..(713)
ttcgattgcagatccagctggctagcgtttaaacttaagcttggtaccgagctcggatccactagtccagtgtggtggaattcgcgaagccagctgctggaggtgccgagaatctgagtttcggcaagcagccaggtctggaaactaatattttaaaaatgactacaccaaacaagacacctcctggtgctgaccccaagcagttggaaaggactggaacagtacgggaaattgggtcacaagctgtttggtcactctcatcttgcaaaccaggatttggagtggatcagttacgagatgacaatctagaaacttattggcaatcagatggttcccagcctcatttagtgaacatccaattcagaagaaaaacaacagtgaagacattatgtatttatgcagactacaaatctgatgaaagctatactccaagcaagatctcagtcagagtaggaaataattttcacaaccttcaagaaattcggcaacttgagttggtggaaccaagtggctggattcatgttcccttaactgacaatcataagaagccaactcgtacattcatgatacagattgctgttctagccaatcaccagaatggaagagacacccatatgagacaaattaaaatatacacaccagtagaagagagctccattggtaaatttcctagatgtacaactatagatttcatgatgtatcgttcaataaggtgactttaaaatgagacgaaaatcattaaacgtatctttgttttatcctgtatttaaataatatatcatgtacctttattgaacaaggcatccgttatatctaattttgtatatgtttaaaaatattttattgtaactttgacaaataaatttggggtcatattatctttattttctttaacatgtaataaagctcacatattttacattacta

SEQ ID NO: 162 - DNA, 1829 bp, Homo sapiens
  CDS (392)..(1555)
atgacttcgaaagaggaaagcaggaggcagcagcccacagctggtcctgcagggcagggaaagttaccctcgccctccgagccacaactccccacgccgccaactcggtctttacatcattttcgacgccccctaagtccctcccgagaggcgcaggcgcacatcgccccttctagcgaactacatctcccacaatcccaatcggccggaccacctccgctcggggcggggacggaggtggagctggtggtccccggtcgggacgaaggctcccgaggtgccctgcctgggtcctccggggtaaagttcgtttggcggaagattgtccgttttcctggtaaggtcacctgtcccaatcaggtcattgctaggaagaactctgggtacaataatgaatacaatgtatgtgatgatggctcagatcttaagatctcacctgataaaggctacagtgattcctaatcgagtgaaaatgcttccatattttggtatcattagaaatagaatgatgtcaacccataaatccaaaaagaagatcagagaatattatagactgctgaacgtggaggaaggatgctctgcagatgaagtcagggaatcttttcataagcttgccaagcaatatcatcctgacagtggctctaatactgctgattctgcaacatttataaggattgaaaaagcttatagaaaggtgctctcccatgtgatagaacaaacaaatgccagtcagagtaaaggtgaagaagaagaagatgtagaaaaattcaaatataaaacaccccaacaccgacattatttaagttttgaaggtattggttttgggactccaactcaacgagagaagcattataggcaatttagggcagaccgtgctgctgaacaagtgatggaatatcaaaagcagaaactacaaagccagtattttcctgatagtgtaattgttaaaaatataagacagagcaaacagcaaaagataacgcaagctatagaacgtttagtggaggacctcattcaagaatccatggcaaaaggagactttgacaatctcagtgggaaaggaaaacctctgaaaaagttttctgactgttcttacattgatcccatgactcacaacctgaaccgaatactgatcgataatggataccaaccagaatggatccttaagcaaaaggaaataagcgatactattgagcaactcagagaggcaattttagtgtctaggaaaaaacttgggaatccaatgacaccaactgaaaagaaacagtggaaccatgtttgtgagcagtttcaagaaaacatcagaaaattaaacaagcgaattaatgattttaatttaattgttcccatcctgaccaggcaaaaagtccattttgatgctcagaaagaaattgtcagagcccagaaaatatacgagacccttataaaaacaaaagaagtcacagatagaaacccaaataaccttgatcaaggagaaggagagaaaacacctgaaatcaagaaaggttttttaaactggatgaatctgtggaaatttattaaaatacgatcattttgatgtttactatcataaatcattcttagttccactgacactttacatggaaaatgagatttattgctataatacaagaatttaagaattgtgccattgtacttatcacaaaactaatcacatagccaatgatgtgtgagtgagaaacctatcaggtttgtcctgaggatatagcaagaaaagaaaataactgaaactcctttttttttgagacggcgtctcgctcgtgtcacccaggctgggagtggcaatgggcgcgatctgggctcactgc

SEQ ID NO: 163 - DNA, 3078 bp, Homo sapiens
  CDS (141)..(2057)
ccggaattcccgggtcgacccacgcgtccgaccgctgcgggtgcctcagctactgccgcagtcttcgcggaattcggcgagtagaaccgctgaggcgggcgcgggcccgggtggggccaaggttccggccactctgcagaatggagataatcaggagcaattttaagagtaatcttcacaaagtgtaccaggccatagaggaggccgacttcttcgccatcgatggggagttttcaggaatcagtgatggaccttcagtctctgcattaacaaatggttttgacactccagaagagaggtatcagaagcttaaaaagcattccatggactttttgctatttcagtttggcctttgcacttttaagtatgactacacagattcaaagtatataacgaagtcatttaacttctatgttttcccgaaacccttcaatagatcctcaccagatgtcaaatttgtttgtcagagctccagcattgactttctagcaagccagggatttgattttaataaagtttttcgaaatggaattccatatttaaatcaggaagaagaaagacagttaagagagcagtatgatgaaaaacgttcacaggcgaatggtgcaggagctctgtcctatgtatctcctaacacttcaaaatgtcctgtcacgattcctgaggatcaaaagaagtttattgaccaagtggtagagaaaatagaggatttattacaaagtgaagaaaacaagaacttggatttagagccatgtaccgggttccaaagaaaactaatttatcagactttgagctggaagtatccgaaaggcattcatgttgagactttagaaactgaaaagaaggagcgatatatagttatcagcaaagtagatgaagaagaacgcaaaagaagagagcagcagaaacatgccaaagaacaggaggagctgaatgatgctgtgggattttctagagtcattcacgccattgctaattcgggaaaacttgttattggacacaatatgctcttggacgtcatgcacacagttcatcagttctactgccctctgcctgcggacttaagtgagtttaaagagatgacaacatgtgttttccccagactcttggatactaaattgatggccagcacacaaccttttaaggatatcattaacaacacatcccttgcggaattggaaaagcggttaaaagagacacctttcaaccctcctaaagttgaaagtgccgaaggttttccaagttatgacacagcctctgaacaactccacgaggcaggctacgatgcctacatcacagggctgtgcttcatctccatggccaattacctaggttcttttctcagccctccaaaaattcatgtgtctgccagatcaaaactcattgaacctttttttaacaagttatttcttatgagggtcatggatatcccctatctaaacttggaaggaccagacttgcagcctaaacgtgatcatgttctccatgtgacattccccaaagaatggaaaaccagcgacctttaccagcttttcagtgcctttggtaacattcagatatcctggattgatgacacatcagcatttgtttcccttagccagcccgagcaagtaaagattgctgtcaataccagcaaatatgcagaaagctatcggatccaaacctatgctgaatatatggggagaaaacaggaagagaagcagatcaaaagaaagtggactgaagatagctggaaggaggctgacagcaaacggttaaacccccagtgcataccctacaccctgcagaatcactattaccgcaacaatagttttacagctcccagcacagtaggaaagagaaatttgagtcctagtcaagaggaagctggcctggaggacggagtgtcaggggagatttccgacactgagcttgagcagaccgattcctgtgcagagcccctctcagagggaaggaaaaaggccaagaaattaaaaagaatgaagaaggagctttctccagcaggaagcatctcgaagaacagccctgccacactctttgaagttcctgacacatggtaaccaagacctgagggcagcaaaccgctggtgctgtcgctgtgagcaagagccggctggcacatttggaagccgcactgtatttaacttaatcaaatgtggtatgggaggggttggaaaccaagttgtctcctgggggggagaaaacaggttttatttttgtggctgtggttttttcccctttttaatctaactgcctgttgacattgacactcatcacggttgtaggctgtcatgaatgtgtacgtgcttaaccagtgaattccgtgttgctcttgtgaggcctttcctgtcatgacccagtgtgcttaagaacctgcctgatggggagtgtcggctgtgaaatctgcaaaaagagctgacattccagctgctgtgatcatgaatttgggggtgtactgtcctgcctgtgcatcttctcgcactgagattttgaggcagttgcagccctcggttagtctcccagtggaaaaatcggttgtgcctccctgcttcccaccatagctgcctgaaaacatgacgctctcaagcttgtccttccttcaggaagatgtccactcatgcccacccatgagagggcttgccgtatgccctggcctttgggccatatttatgtagagttcctttctcctaagacgtgagtttctcatgggggatgtacgagtaaaaaggttaacttctgttcttatgcgtggcgctgtgttcactttccagagtctctgttcgtttgtttggatggcggtctcggggtacggcagcgtgtgtgcgtacgtgtctgtgtgtgtgtgtgtgtgtgtgtgtgtgtgtgtgtgtgtgaaatcgtgcaaatctacaacatgtcccagcccattctccgttgaaacagatcacagcaacgacaaacgctcatggcgctgctttgctccacccgcttcagatagatcattgttagatatttcacatttttgtatggtggaaataaaaatgaaaaatgtatttccaaaagatgaaaattaaaaacattttcataggaaaaaaaaaa

SEQ ID NO: 164 - DNA, 1526 bp, Homo sapiens
  CDS (1)..(1422)
atggctctggcggtggccccgtgggggcgacagtgggaagaggcccgcgccctgggccgggcagtcaggatgctgcagcgcctagaagagcaatgcgtcgacccccggctgtccgtgagtcccccttcgctgcgggacctgctgccccgcacagcgcagctgcttcgagaggtggcccattctcggcgggcggccggcggaggcggccccgggggtcccggcggctctggggactttctactcatctacctggccaatctggaggccaagagcaggcaggtggccgcgctgctgcctctccggggccgaaggagtgccaacgacgagctcttccgggcgggctccagactcaggcgacagctggccaagctggccatcatcttcagccacatgcacgcagagctgcacgcactcttccccgggggaaagtactgtggacacatgtaccagctcaccaaggcccccgcccacaccttctggagggaaagttgcggagcccggtgtgtgctgccctgggctgagtttgagtccctcctgggcacctgccaccctgtggaaccaggctgcacagccctggccttgcgcaccaccattgacctcacctgcagcgggcacgtgtccatcttcgagttcgacgtcttcaccaggctctttcagccatggccaacactcctcaagaactggcagctcctggcagtcaaccacccaggctacatggccttcctcacctatgatgaggtccaagagcgtctgcaggcctgcagggacaagccaggcagttacatcttccggcccagctgtactcgcctggggcagtgggccatcggctatgtgagctcagatggcagcatcctgcagaccatccctgccaacaaacccctgtcccaggtgctcctggagggacagaaggacggcttctacctctacccagatggaaagacccacaacccagacctgactgagctcggccaggcagaaccccagcagcgcatccacgtgtcagaggagcagctgcagctctactgggccatggactccacatttgagctctgcaagatctgtgctgagagcaacaaggatgtgaagattgagccgtgcgggcacctgctctgcagctgctgcctggctgcctggcagcactcggacagccagacctgccccttctgccgctgcgagatcaagggctgggaggccgtgagtatctaccagttccacggtcaggctactgctgaggactcagggaacagcagtgaccaggaaggcagggagttggagctggggcaggtgcccctttcggctcctccattgcccccacggccagatctgccccccaggaagcccagaaatgcccagccgaaagtgagactcctaaaggggaactcccctccagctgcgctgggaccccaggaccctgccccggcctgaaggccagggcacccagatgtgctgctcaagggagccccaagggctggaagggggttgtgaaaccgaaataaactgccaagcctggtctgtcaaaaaaaaaa

SEQ ID NO: 165 - DNA, 3547 bp, Homo sapiens
  CDS (344)..(3547)
gtagatcttgccaatttgtacatccgaactggagccaagaacatgcccactgtgttcctgctgacagatgcccaggttctagatgagagcttcctcgtgctgattaatgacttgctggcatcaggagaaatcccagatctgttcagcgatgaagatgtggacaagataatttctggaattcataatgaagttcatgctctgggcatggtagactccagggaaaactgttggaaattctttatggccagggtgcgactacagctcaaaatagccatctcgacggcttcatccatgagagaggcactcttcacccctcctgcagcacattctgacacatgcactaatgagaaacaagaaacactctaacaactggcttgcccagcactggttccagagctctatcattttgtgtttctctccagttggtcgcacgctgagagttagagctcggaagttcccagccatagttaactgcacggctattgactggtttcatgcgtggccgcaggaggctctggtctccgtcagcaggaggttcattgaggaaaccaagggaattgagccagtgcacaaagactctattagccttttcatggcacatgttcacaccactgtaaatgaaatgagtaccagatattaccagaatgagagaagacacaactataccaccccaaagagttttctagaacaaatatcactgtttaagaacctgttgaagaagaagcaaaatgaggtatccgagaaaaaagaacgcctggtgaacggcatccaaaagctaaaaaccacagcctctcaggtgggagatctaaaagccagacttgcctctcaagaagccgagctgcaactgagaaatcatgatgccgaagctctgatcacaaagatcggccttcagacggagaaagtgagccgggaaaagaccatcgctgatgctgaggagcgaaaggtgacagccattcagactgaagtgttccagaaacagagagaatgtgaagctgacttactcaaggctgagcctgcactggtggctgctacagctgcactcaatacactcaacagggtcaacctcagtgagctgaaagcctttcccaaccctcccatcgcagttaccaatgttactgcagccgtgatggtccttctggctcctcggggaagagtgcccaaagaccgaagttggaaagcagctaaagtcttcatgggaaaggttgatgattttttgcaagcattaattaactatgacaaagagcacattccagagaactgtctaaaagtggtgaatgaacactatttgaaagacccagagtttaatccaaacctgattcgaaccaaatcttttgcagcagctggcctgtgtgcctgggtcatcaacatcattaaattctatgaggtctactgtgatgtggagccaaaacgccaagcattagcccaagcaaacttagaactggctgcagctactgaaaaactagaggctatcaggaaaaagcttgtggtgagtgcaaactatgacattgaaaagtcagagaagattcgctggggtcaatccattaagtcctttgaagctcaagagaagacactctgtggagatgttcttctcacggcggcatttgtgtcttacgtcggacccttcacaaggcagtatcgccaggagctggtgcactgcaagtgggttccctttcttcaacagaaggtttccattccactaaccgaaggcctggacttgatatccatgttgacggatgatgctacaattgccgcctggaataacgaaggactgcccagtgacagaatgtccaccgaaaatgccgctatcctaacacactgtgagcgctggcctctggtgatagatccccagcaacagggaattaagtggatcaagaataagtatggaatggacctgaaagtcacacatttgggccagaaagggtttttgaatgccattgaaactgctttggcctttggtgatgtcatcttaattgaaaatctcgaggaaacgatagatccagtcctggatccactacttggcaggaacacaattaaaaaaggaaagtatatcaggattggagataaagaatgtgaatttaacaagaactttcgccttatccttcacacaaaattggcaaatcctcactataagccggaattacaagctcagacaactctcctcaatttcacagtcacagaagatggtctagaagcccagctgctggcagaggttgtcagtattgaaaggccagatttggagaaacttaagttggtattgacaaagcaccaaaatgattttaaaattgagctcaagtatctggaagacgatctccttttgcgcctttctgcggcagagggaagctttctggatgacaccaaactggtagagagattggaggcaacaaagaccaccgtggcagagatagagcacaaggtgattgaagccaaagaaaatgaaagaaaaatcaacgaggcccgagaatgttacagaccagtggcagcaagagcatctcttctttattttgttattaatgacctccaaaaaatcaaccccctctaccaattctctttgaaggcttttaacgtgctgttccacagagcgatcgagcaggctgacaaggtggaagacatgcagggacgcatctctatcctgatggagagcatcacccatgctgtcttcctctacaccagccaggcgctgtttgagaaggacaagctcaccttcctgtcccagatggcttttcagattttgttgagaaagaaagagatagaccctcttgaattggatttcctgcttcgattcacagttgaacacactcatctgagtcccgttgacttcctaacttctcagtcatggagtgctatcaaggcaattgccgtcatggaagaatttcgaggcatagaccgagatgtggaaggatctgccaagcagtggaggaagtgggtagaatccgagtgtccagaaaaagaaaaattacctcaagaatggaagaagaaaagtttaatacagaagctgattcttctgagagcaatgcgccctgacagaatgacgtatgctctcaggaattttgtagaggaaaaactgggtgcgaagtatgtggagaggaccagattggacttagttaaagcattcgaagaaagcagcccagccacccccatattcttcatcctgtctccgggggtagatgcccttaaagacctggagattcttggcaaaagacttggctttacaattgactctggaaaattccacaatgtgtctttaggacaaggtcaggagacggtggcagaagtggccctggagaaagcttccaaaggaggacactgggtcatcctccaaaatgttcatttggtagccaagtggctaggaaccttggagaagctccttgaaagattcagccaaggaagccacagagattacagggttttcatgagtgctgagtctgcacctacaccagatgagcatatcatccctcaaggactcctggaaaattccattaagatcactaatgaacccccaacagggatgctggccaatttgcatgccgccctgtacaactttgatcag

SEQ ID NO: 166 - DNA, 557 bp, Homo sapiens
  CDS (59)..(409)
cttaaagacaaacatctcgccccggaagagggccactgtgttgaagttgccgtcacagatgttgggtttggtgcctggtgtggatggccggtccccgaggggcggccgagggggcctgggctggcgctcgtgtttcctctccgatggtgagtggatcctgcggacggggagtgtagggagtggccttgtgggctccagaggctcggctgggggtccgcggctcgaaatggaccccaactgctcttgcgccactggtggctcctgcacgtgcgccggctcctgcaagtgcaaagagtgcaaatgcacctcctgcaagaagagctgctgttcctgctgccccgtgggctgtgccaagtgtgcccagggctgcgtctgcaaaggggcatcggagaagtgcagctgctgtgcctgatgtgggaacagctcttctcccagatgtaaatagaacaacctgcacaacctggatttttttaaaaatacaacactgagccatttgctggcatttcttttttatactaaatatgtgactgacaataaaaacaattttgactttaaaa

SEQ ID NO: 167 - DNA, 4570 bp, Homo sapiens
  CDS (592)..(3450)
gtaccggtccggaattcccgggtcgacccacgcgtccgagcgtcctcccgggccacggcgcttcccggccccggcgtccccggaccatggcgctctccgggctcttctctagctctcagcggctgcgaagtctgtaaacctggtggccaacatctcagttataagaaatgcacatctccgctcagggtcccctgggacagtgcaaggaaagaaagaagcctgcggtgaaagtgacactgagtgattgtaagtcaggagactttccttcggtttctgcctttgatggcaagaggtggagattgtggcggcgattacagaaaacgtctgggaagacaagttgctgtttttatgggaatcgcaggcttggaagagacagaagcaattccagaaataaattggaaattgaagatttaaacaatgttgttttaaaatattctaacttcaaagaatgatgccagaaacttaaaaaggggctgcgcagagtagcaggggccctggagggcgcggcctgaatcctgattgcccttctgctgagaggacacacgcagctgaagatgaatttgggaaaagtagccgcttgctactttaactatggaagagcagggccacagtgagatggaaataatcccatcagagtctcacccccacattcaattactgaaaagcaatcgggaacttctggtcactcacatccgcaatactcagtgtctggtggacaacttgctgaagaatgactacttctcggccgaagatgcggagattgtgtgtgcctgccccacccagcctgacaaggtccgcaaaattctggacctggtacagagcaagggcgaggaggtgtccgagttcttcctctacttgctccagcaactcgcagatgcctacgtggacctcaggccttggctgctggagatcggcttctccccttccctgctcactcagagcaaagtcgtggtcaacactgacccagtgagcaggtatacccagcagctgcgacaccatctgggccgtgactccaagttcgtgctgtgctatgcccagaaggaggagctgctgctggaggagatctacatggacaccatcatggagctggttggcttcagcaatgagagcctgggcagcctgaacagcctggcctgcctcctggaccacaccaccggcatcctcaatgagcagggtgagaccatcttcatcctgggtgatgctggggtgggcaagtccatgctgctacagcggctgcagagcctctgggccacgggccggctagacgcaggggtcaaattcttcttccactttcgctgccgcatgttcagctgcttcaaggaaagtgacaggctgtgtctgcaggacctgctcttcaagcactactgctacccagagcgggaccccgaggaggtgtttgccttcctgctgcgcttcccccacgtggccctcttcaccttcgatggcctggacgagctgcactcggacttggacctgagccgcgtgcctgacagctcctgcccctgggagcctgcccaccccctggtcttgctggccaacctgctcagtgggaagctgctcaagggggctagcaagctgctcacagcccgcacaggcatcgaggtcccgcgccagttcctgcggaagaaggtgcttctccggggcttctcccccagccacctgcgcgcctatgccaggaggatgttccccgagcgggccctgcaggaccgcctgctgagccagctggaggccaaccccaacctctgcagcctgtgctctgtgcccctcttctgctggatcatcttccggtgcttccagcacttccgtgctgcctttgaaggctcaccacagctgcccgactgcacgatgaccctgacagatgtcttcctcctggtcactgaggtccatctgaacaggatgcagcccagcagcctggtgcagcggaacacacgcagcccagtggagaccctccacgccggccgggacactctgtgctcgctggggcaggtggcccaccggggcatggagaagagcctctttgtcttcacccaggaggaggtgcaggcctccgggctgcaggagagagacatgcagctgggcttcctgcgggctttgccggagctgggccccgggggtgaccagcagtcctatgagtttttccacctcaccctccaggccttctttacagccttcttcctcgtgctggacgacagggtgggcactcaggagctgctcaggttcttccaggagtggatgccccctgcgggggcagcgaccacgtcctgctatcctcccttcctcccgttccagtgcctgcagggcagtggtccggcgcgggaagacctcttcaagaacaaggatcacttccagttcaccaacctcttcctgtgcgggctgttgtccaaagccaaacagaaactcctgcggcatctggtgcccgcggcagccctgaggagaaagcgcaaggccctgtgggcacacctgttttccagcctgcggggctacctgaagagcctgccccgcgttcaggtcgaaagcttcaaccaggtgcaggccatgcccacgttcatctggatgctgcgctgcatctacgagacacagagccagaaggtggggcagctggcggccaggggcatctgcgccaactacctcaagctgacctactgcaacgcctgctcggccgactgcagcgccctctccttcgtcctgcatcacttccccaagcggctggccctagacctagacaacaacaatctcaacgactacggcgtgcgggagctgcagccctgcttcagccgcctcactgttctcagactcagcgtaaaccagatcactgacggtggggtaaaggtgctaagcgaagagctgaccaaatacaaaattgtgacctatttgggtttatacaacaaccagatcaccgatgtcggagccaggtacgtcaccaaaatcctggatgaatgcaaaggcctcacgcatcttaaactgggaaaaaacaaaataacaagtgaaggagggaagtatctcgccctggctgtgaagaacagcaaatcaatctctgaggttgggatgtggggcaatcaagttggggatgaaggagcaaaagccttcgcagaggctctgcggaaccaccccagcttgaccaccctgagtcttgcgtccaacggcatctccacagaaggaggaaagagccttgcgagggccctgcagcagaacacgtctctagaaatactgtggctgacccaaaatgaactcaacgatgaagtggcagagagtttggcagaaatgttgaaagtcaaccagacgttaaagcatttatggcttatccagaatcagatcacagctaaggggactgcccagctggcagatgcgttacagagcaacactggcataacagagatttgcctaaatggaaacctgataaaaccagaggaggccaaagtctatgaagatgagaagcggattatctgtttctgagaggatgctttcctgttcatggggtttttgccctggagcctcagcagcaaatgccactctgggcagtcttttgtgtcagtgtcttaaaggggcctgcgcaggcgggactatcaggagtccactgcctccatgatgcaagccagcttcctgtgcagaaggtctggtcggcaaactccctaagtacccgctacaattctgcagaaaaagaatgtgtcttgcgagctgttgtagttacagtaaatacactgtgaagagactttattgcctattataattatttttatctgaagctagaggaataaagctgtgagcaaacagaggaggccagcctcacctcattccaacacctgccatagggaccaacgggagcgagttggtcaccgctcttttcattgaagagttgaggatgtggcacaaagttggtgccaagcttcttgaataaaacgtgtttgatggattagtattatacctgaaatattttcttccttctcagcactttcccatgtattgatactggtcccacttcacagctggagacaccggagtatgtgcagtgtgggatttgactcctccaaggttttgtggaaagttaatgtcaaggaaaggatgcaccacgggcttttaattttaatcctggagtctcactgtctgctggcaaagatagagaatgccctcagctcttagctggtctaagaatgacgatgccttcaaaatgctgcttccactcagggcttctcctctgctaggctaccctcctctagaaggctgagtaccatgggctacagtgtctggccttgggaagaagtgattctgtccctccaaagaaatagggcatggcttgcccctgtggccctggcatccaaatggctgcttttgtctcccttacctcgtgaagaggggaagtctcttcctgcctcccaagcagctgaagggtgactaaacgggcgccaagactcaggggatcggctgggaactgggccagcagagcatgttggacaccccccaccatggtgggcttgtggtggctgctccatgagggtgggggtgatactactagatcacttgtcctcttgccagctcatttgttaataaaatactgaaaacactaaaaaaaaaa

SEQ ID NO: 168 - DNA, 1666 bp, Homo sapiens
  CDS (118)..(1038)
ggtccggaattcccgggtcgacccacgcgtccgcggacgcgtgggtttttttttcgccggaaatcccggaagtgacagctttgggggtttgctgctggctctgactcccgtcctgcgatgggttgcgacgggggaacaatccccaagaggcatgaactggtgaaggggccgaagaaggttgagaaggtcgacaaagatgctgaattagtggcccaatggaactattgtactctaagtcaggaaatattaagacgaccaatagttgcctgtgaacttggcagactttataacaaagatgccgtcattgaatttctcttggacaaatctgcagaaaaggctcttgggaaggcagcatctcacattaaaagcattaagaatgtgacagagctgaagctttctgataatcctgcctgggaaggggataaaggaaacactaaaggtgacaagcacgatgacctccagcgggcgcgtttcatctgccccgttgtgggcctggagatgaacggccgacacaggttctgcttccttcggtgctgcggctgtgtgttttctgagcgagccttgaaagagataaaagcggaagtttgccacacgtgtggggctgccttccaggaggatgatgtcatcgtgctcaatggcaccaaggaggatgtggacgtgctgaagacaaggatggaggagagaaggctgagagcgaagctggaaaagaaaacaaagaaacccaaggcagcagagtctgtttcaaaaccagatgtcagtgaagaagccccagggccatcaaaagttaagacagggaagcctgaagaagccagccttgattctagagagaagaaaaccaacttggctcccaaaagcacagcaatgaatgagagctcttctggaaaagctgggaagcctccgtgtggagccacaaagaggtccatcgctgacagtgaagaatcggaggcctacaagtccctctttaccactcacagctccgccaagcgctccaaggaggagtctgcccactgggtcacccacacgtcctactgcttctgaagcccgcactgccaccgctcctgccccagaaggttgtttagtttccacgtaggcaggtcgctttgtgcctctgagtgcgctgctgtgtgttctctctatagttctgtgtcataaagctgtcctggccagccttcaagctggtgtggccactcttgatgtgaggcgtgtcggttccaggggggacatgggaggggctgcacagtggcccgaggtcatgcttgcttccacctgcaggtgcatttggtcctttccatggccaggaagccctgtgggctgcactttttatgcttgcagtaacaagagactccagagtcctcaccggtgcagagttggcacatattaattaactaaaattctaatgatcttgctaccagcaataaatcaagtaggccaagtgaaactgggctttaaaaaggatggatttcaaatacactgtgcccactagaagcttcgaagggcctcgtccctctgctacagccctgggaggagccaggatccttgttggtctagctaaatactgttaggggagtgtgccccatctcatcatttcgaagatagcagagtcatagttgggcacccagtgattgggttcaaaaataaagctggtctgcctcttctaaaaaaaaaa

SEQ ID NO: 169 - DNA, 2120 bp, Homo sapiens
  CDS (55)..(1674)
atttggccctcgaggccaagaattcggcacgagagatctctcagttaagtctacatgaaaaggatggtttcttggagcttccacaaacttaaaaccatgaaacatctattattgctactattgtgtgtttttctagttaagtcccaaggtgtcaacgacaatgaggagcaatacaggattacaattaagaggacaagatctgaaaatctcacaaactataaaataataaaagagcagaattttaagataaaagaaactggtgatgagaaaactggggcacagataaagcaacttgcccaaggtctcatagctggtttcttcagtgcccgtggtcatcgaccccttgacaagaagagagaagaggctcccagcctgaggcctgccccaccgcccatcagtggaggtggctatcgggctcgtccagccaaagcagctgccactcaaaagaaagtagaaagaaaagcccctgatgctggaggctgtcttcacgctgacccagacctgggggtgttgtgtcctacaggatgtcagttgcaagaggctttgctacaacaggaaaggccaatcagaaatagtgttgatgagttaaataacaatgtggaagctgtttcccagacctcctcttcttcctttcagtacatgtatttgctgaaagacctgtggcaaaagaggcagaagcaagtaaaagataatgaaaatgtagtcaatgagtactcctcagaactggaaaagcaccaattatatatagatgagactgtgaatagcaatatcccaactaaccttcgtgtgcttcgttcaatcctggaaaacctgagaagcaaaatacaaaagttagaatctgatgtctcagctcaaatggaatattgtcgcaccccatgcactgtcagttgcaatattcctgtggtgtctggcaaagaatgtgaggaaattatcaggaaaggaggtgaaacatctgaaatgtatctcattcaacctgacagttctgtcaaaccgtatagagtatactgtgacatgaatacagaaaatggaggatggacagtgattcagaaccgtcaagacggtagtgttgactttggcaggaaatgggatccatataaacagggatttggaaatgttgcaaccaacacagatgggaagaattactgtggcctaccaggtgaatattggcttggaaatgataaaattagccagcttaccaggatgggacccacagaacttttgatagaaatggaggactggaaaggagacaaagtaaaggctcactatggaggattcactgtacagaatgaagccaacaaataccagatctcagtgaacaaatacagaggaacagccggtaatgccctcatggatggagcatctcagctgatgggagaaaacaggaccatgaccattcacaacggcatgttcttcagcacgtatgacagagacaatgacggctggttaacatcagatcccagaaaacagtgttctaaagaagacggtggtggatggtggtataatagatgtcatgcagccaatccaaacggcagatactactggggtggacagtacacctgggacatggcaaagcatggcacagatgatggtgtagtatggatgaattggaaggggtcatggtactcaatgaggaagatgagtatgaagatcaggcccttcttcccacagcaatagtccccaatacgtagatttttgctcttctgtatgtgacaacatttttgtacattatgttattggaattttctttcatacattatattcctctaaaactctcaagcagacgtgagtgtgactttttgaaaaaagtataggataaattacattaaaatagcacatgattttcttttgttttcttcatttctcttgctcaccaagaagtaacaaaagtatagttttgacagagttggtgttcataatttcagttctagttgattgcgagaattttcaaataaggaagaggggtcttttatccttgtcgtaggaaaaccatgacggaaaggaaaaactgatgtttaaaagtccacttttaaaactatatttatttatgtaggatctgtcaaagaaaacttccaaaaagatttattaattaaaccagactctgttgcaataaaaaaaaaaaa

SEQ ID NO: 170 - DNA, 1976 bp, Homo sapiens
  CDS (55)..(1530)
atttggccctcgaggccaagaattcggcacgagagatctctcagttaagtctacatgaaaaggatggtttcttggagcttccacaaacttaaaaccatgaaacatctattattgctactattgtgtgtttttctagttaagtcccaaggtgtcaacgacaatgaggagggtttcttcagtgcccgtggtcatcgaccccttgacaagaagagagaagaggctcccagcctgaggcctgccccaccgcccatcagtggaggtggctatcgggctcgtccagccaaagcagctgccactcaaaagaaagtagaaagaaaagcccctgatgctggaggctgtcttcacgctgacccagacctgggggtgttgtgtcctacaggatgtcagttgcaagaggctttgctacaacaggaaaggccaatcagaaatagtgttgatgagttaaataacaatgtggaagctgtttcccagacctcctcttcttcctttcagtacatgtatttgctgaaagacctgtggcaaaagaggcagaagcaagtaaaagataatgaaaatgtagtcaatgagtactcctcagaactggaaaagcaccaattatatatagatgagactgtgaatagcaatatcccaactaaccttcgtgtgcttcgttcaatcctggaaaacctgagaagcaaaatacaaaagttagaatctgatgtctcagctcaaatggaatattgtcgcaccccatgcactgtcagttgcaatattcctgtggtgtctggcaaagaatgtgaggaaattatcaggaaaggaggtgaaacatctgaaatgtatctcattcaacctgacagttctgtcaaaccgtatagagtatactgtgacatgaatacagaaaatggaggatggacagtgattcagaaccgtcaagacggtagtgttgactttggcaggaaatgggatccatataaacagggatttggaaatgttgcaaccaacacagatgggaagaattactgtggcctaccaggtgaatattggcttggaaatgataaaattagccagcttaccaggatgggacccacagaacttttgatagaaatggaggactggaaaggagacaaagtaaaggctcactatggaggattcactgtacagaatgaagccaacaaataccagatctcagtgaacaaatacagaggaacagccggtaatgccctcatggatggagcatctcagctgatgggagaaaacaggaccatgaccattcacaacggcatgttcttcagcacgtatgacagagacaatgacggctggttaacatcagatcccagaaaacagtgttctaaagaagacggtggtggatggtggtataatagatgtcatgcagccaatccaaacggcagatactactggggtggacagtacacctgggacatggcaaagcatggcacagatgatggtgtagtatggatgaattggaaggggtcatggtactcaatgaggaagatgagtatgaagatcaggcccttcttcccacagcaatagtccccaatacgtagatttttgctcttctgtatgtgacaacatttttgtacattatgttattggaattttctttcatacattatattcctctaaaactctcaagcagacgtgagtgtgactttttgaaaaaagtataggataaattacattaaaatagcacatgattttcttttgttttcttcatttctcttgctcaccaagaagtaacaaaagtatagttttgacagagttggtgttcataatttcagttctagttgattgcgagaattttcaaataaggaagaggggtcttttatccttgtcgtaggaaaaccatgacggaaaggaaaaactgatgtttaaaagtccacttttaaaactatatttatttatgtaggatctgtcaaagaaaacttccaaaaagatttattaattaaaccagactctgttgcaataaaaaaaaaaaa

SEQ ID NO: 171 - DNA, 1862 bp, Homo sapiens
  CDS (55)..(1416)
atttggccctcgaggccaagaattcggcacgagagatctctcagttaagtctacatgaaaaggatggtttcttggagcttccacaaacttaaaaccatgaaacatctattattgctactattgtgtgtttttctagttaagtcccaaggtgtcaacgacaatgaggagggtttcttcagtgcccgtggtcatcgaccccttgacaagaagagagaagaggctcccagcctgaggcctgccccaccgcccatcagtggaggtggctatcgggctcgtccagccaaagcagctgccactcaaaagaaagtagaaagaaaagcccctgatgctggaggctgtcttcacgctgacccagacctgggggtgttgtgtcctacaggatgtcagttgcaagaggctttgctacaacaggaaaggccaatcagaaatagtgttgatgagttaaataacaatgtggaagctgtttcccagacctcctcttcttcctttcagtacatgtatttgctgaaagacctgtggcaaaagaggcagaagcaagtaaaagataatgaaaatgtagtcaatgagtactcctcagaactggaaaagcaccaattatatatagatgagactgtgaatagcaatatcccaactaaccttcgtgtgcttcgttcaatcctggaaaacctgagaagcaaaatacaaaagttagaatctgatgtctcagctcaaatggaatattgtcgcaccccatgcactgtcagttgcaatattcctgtggtgtctggcaaaggatggacagtgattcagaaccgtcaagacggtagtgttgactttggcaggaaatgggatccatataaacagggatttggaaatgttgcaaccaacacagatgggaagaattactgtggcctaccaggtgaatattggcttggaaatgataaaattagccagcttaccaggatgggacccacagaacttttgatagaaatggaggactggaaaggagacaaagtaaaggctcactatggaggattcactgtacagaatgaagccaacaaataccagatctcagtgaacaaatacagaggaacagccggtaatgccctcatggatggagcatctcagctgatgggagaaaacaggaccatgaccattcacaacggcatgttcttcagcacgtatgacagagacaatgacggctggttaacatcagatcccagaaaacagtgttctaaagaagacggtggtggatggtggtataatagatgtcatgcagccaatccaaacggcagatactactggggtggacagtacacctgggacatggcaaagcatggcacagatgatggtgtagtatggatgaattggaaggggtcatggtactcaatgaggaagatgagtatgaagatcaggcccttcttcccacagcaatagtccccaatacgtagatttttgctcttctgtatgtgacaacatttttgtacattatgttattggaattttctttcatacattatattcctctaaaactctcaagcagacgtgagtgtgactttttgaaaaaagtataggataaattacattaaaatagcacatgattttcttttgttttcttcatttctcttgctcaccaagaagtaacaaaagtatagttttgacagagttggtgttcataatttcagttctagttgattgcgagaattttcaaataaggaagaggggtcttttatccttgtcgtaggaaaaccatgacggaaaggaaaaactgatgtttaaaagtccacttttaaaactatatttatttatgtaggatctgtcaaagaaaacttccaaaaagatttattaattaaaccagactctgttgcaataaaaaaaaaaaa

SEQ ID NO: 172 - DNA, 754 bp, Homo sapiens
  CDS (154)..(606)
  misc_feature (1)...(754): n = a,t,c or g
aatcgattgctctcggtaccggcccggaattcccgggtcgacccacgcgtccgcggacgcgtgggcggacgcgtgggttccggtctcctcagaagtcgcttagctcttcggtggttgtcacacgtccggaggcctagccgtcgcgtacctaggatgccgcgtggaagccgaagccgcacctcccgcatggcccctccggccagccgggcccctcagatgagagctgcacccaggccagcaccagtcgctcagccaccagcagcggcacccccatctgcagttggctcttctgctgctgcgccccggcagccaggtctgatggcccagatggcaaccactgcagctggcgtggctgtgggctctgctgtggggcacacattgggtcacgccattactgggggcttcagtggaggaagtaatgctgagcctgcgaggcctgacatcacttaccaggagcctcagggaacccagccagcacagcagcagcagccttgcctctatgagatcaaacagtttctggagtgtgcccagaaccagggtgacatcaagctctgtgagggtttcaatgaggtgctgaaacagtgccgacttgcaaacggattggcctaatgaagaagtttcaacctggagagagatggaaatcagctctcataactaagttaattagtttaaaatngaattatattagggtttaaatgtaccatcagttaaactctctgcaatccnagttcctgcttcaaattaaatgaagtgg

SEQ ID NO: 173 - DNA, 1002 bp, Homo sapiens
  CDS (181)..(870)
  misc_feature (1)...(1002): n = a,t,c or g
atgactacgatggctgacggcttggaaggccaggactcgtccaaatccgccttcatggagttcgggcagcagcagcagcagcagcagcaacagcagcagcagcagcagcagcaacagcaacagccgccgccgccgccgccgccgccgccgcagccgcactcgcagcagagctccccggccatggcaggcgcgcactaccctctgcactgcctgcactcggcggcggcggcggcagcggccggctcgcaccaccaccaccaccaccagcaccaccaccacggctcgccctacgcgtcgggcggagggaactcctacaaccaccgctcgctcgccgcctacccctacatgagccactcgcagcacagcccttacctccagtcctaccacaacagcagcgcagccgcccagacgcgaggggacgacacagatcaacaaaaaactacagtgattgaaaacggggaaatcaggttcaatggaaaagggaaaaagattcggaagcctcggaccatttattccagcctgcagctccaggctttaaaccatcgctttcagcagacacagtatctggcccttccagagagagccgaactggcagcttccttaggactgacacaaacacaggtgaagatatggtttcagaacaaacgctctaagtttaagaaactgctgaagcagggcagtaatcctcatgagagcgaccccctccagggctcggcggccctgtcgccacgctcgccagcgctgcctccagtctgggacgtttctgcctcggccaagggtgtcagtatgccccccaacagctacatgcctggctattctcactggtactcctctccacaccaggacacgatgcagagaccacagatgatgtgagttgcccaagggaacaccctagggaaacgtctgaacaaggaaaagaggatccgggaacctgcttgtatctgcgaaaaaggagccaaaggagcaaggtttaggaagagttcttaaggtttggncaagagg

SEQ ID NO: 174 - DNA, 8291 bp, Homo sapiens
  CDS (75)..(6374)
atgcagttgatgctccagtccctgagcacctgagccagtgtcagaacctgacactctaccagggcttctgtgccatgaagtatgccatctatgccctctgtgtaaactcacaccagcactcccagtgccaggactgcaaagacagcctctctgaggacctggcctcagctacagagccagcgaatgactctctctcctccccaggtgctgcaaatctcttctcaacttacctggccaggtgtcaacagtatctgtgcagtattcctgactctctgtgcctggagcttctggaaaacatcttctcattgcttctcatcacctctgctgatcttcacccagagcctcacttgcctgaggactatgctgaggatgatgacattgaggggaagagcccctcaggtttgaggtccccatcagagagccctcagcacatagcacatcctgaaaggaagtcagaacggggttccctgggagtcccaaagacccttgcttatacaatgccaagccatgtgaaggcagagccaaaagacagttacccagggcctcataggcacagctttttggacttaaaacactttactagtggtatcagtggatttctggctgatgaatttgcaataggggccttcctcaggcttctccaagagcaactggatgagatcagtagccgcagccctcctgagaagccaaagcaagaaagtcagagctgctcaggaagcagagatggactgcagagccgcctgcatcgactttccaaggttgtctctgaggcccagtggagacacaaggtggtgacaagcaaccatcgttcaggtgagagaagggtggaactggtgggaccagaaggtggagagggagaaagatcccaggaatatgggagagagctaggagtacataggagtcaccccataactcagggcatatcgtcaccatggcaaccagtgtcagaacactggggtatgctccatgtctcagagcccagtgcaaaccttccccaacctgttatgccaagaaagggccaaatcaaagttgatcactctcctttctgtcccattgggtttgctctttcagaggagcaaccttcccgaagataccagcctgccacacgtcaccccagtctccgccggggtcgtcggacaagaaggagccaggcagagggaagtctgagtgccatgtctggccggaatgagctgcacagtagattgcacccccatcctcaaagttcactcatccccatgatgttctccccacctgagtcactgctggcatcctgcatccttcgcgggaacttcgcagaagcccatcaggtgctgttcacgttcaacctgaagtcctcacccagttcaggggaactgatgttcatggagcgctaccaggaagtgatccaagaactggcccaagtagagcacaagattgaaaaccagaactcagatgcgggtagcagcaccattcggagaactggcagtggccgctcaactctacaggccattggcagcgctgcagcagcaggaatggtgttttactctatctctgacgtgactgacaagctgctcaacacctctggagaccccatccccatgctccaggaggacttttggataagcacggctctagtggagcccactgctcccctgagagaggttctggaagacctcagtccccctgccatggctgcatttgacctagcttgctctcagtgccagctctggaaaacctgcaagcagcttttggagacagccgaacggcgtttgaatagtagccttgaaaggcggggtcgacggatagaccacgtactcctaaatgctgatggcattcgaggttttccagttgttcttcagcaaatcagtaagagtctcaattatctgcttatgtcagccagtcaaaccaaatcagagagtgtggaagaaaagggaggaggccctccacggtgcagcatcactgaactgcttcagatgtgctggcccagcctaagcgaggactgtgttgccagccacaccaccctctcccagcagctagatcaggtccttcagtcactgagagaggcactagagctgccagagcccaggactcctccactgtcttccctggtggagcaggcagcccagaaagctccagaggcagaggcccaccctgtgcagatccagactcagctcctccagaagaacctgggcaaacagaccccatcaggcagcaggcagatggactacttgggcaccttcttcagttactgcagcacccttgctgcagttctccttcaaagtttgagctctgagcctgatcatgtggaggtcaaggtaggaaatccctttgttctgctgcaacagagctcttcccaactggtgtcacatctcctgtttgagagacaagttcccccagagagactggcagcccttctggcccaagagaatctcagcctaagtgtgccacaggtcatcgtcagctgctgctgtgagccccttgctctttgctcatcccggcaaagccagcagacctcctccctcctgactcgtctgggtactctggcccagctacacgcctctcactgcctggatgacctcccactttctacaccgagctccccgaggacaactgagaaccctacattggaaagaaagccctactcctccccaagggactcatcactcccagccctcacctcctctgccttggcctttcttaagtcacgctcaaagctcctagctacggtggcctgcctgggggcttccccgaggttaaaggtcagcaaacccagcttgtcatggaaggaacttcgtggccgcagggaggtgcctctggctgcagagcaggtagcccgggagtgtgagcgccttctggaacaattccctctgtttgaggccttcctcctggctgcctgggagcccctgcgagggtctttgcagcaggggcagagtctggcagtgaatctctgtggttgggccagtctttctaccgttctcctgggcctacattctcccattgccctagatgtactgagtgaggcttttgaggaatccttggtggccagagattggtcccgggcccttcagctcactgaagtgtacgggcgagatgtggacgatttgagcagcataaaggatgcagtcctgagctgtgctgtggcatgtgacaaagaaggttggcaatacctgtttcccgtgaaggatgcatctctgagaagtcggctggccctacagtttgtggacaggtggcccctggagtcatgcctggagattctggcctactgcatttcagacacggctgtccaagaaggactaaagtgtgagctacagaggaagctggcggagctgcaggtgtatcagaagattctgggtttgcagtctcccccagtgtggtgtgactggcagaccttgaggagctgttgtgttgaggacccatcaactgtcatgaacatgattctagaagcacaggagtatgaactgtgtgaagagtggggctgcctgtaccccattccaagagaacatttaatcagccttcatcaaaagcatcttctccaccttctagaaagaagagatcatgacaaggctctgcaactcctgcgaagaatccctgaccccaccatgtgccttgaagtgacagagcaatccctcgaccagcacactagcttggccacttctcacttcttggccaactacctcaccacccacttctatggacaactgactgctgtccgacaccgtgaaatccaggcgctgtatgtgggatccaagattctgctgaccctgcctgagcagcaccgggccagctattcccacttgtcctctaaccccctgttcatgctggagcagctgcttatgaacatgaaggtggattgggccactgtggctgtgcagactctccagcagctgctggttggacaggagattggcttcactatggacgaggtggactcactgctttccagatacgcagagaaagccctggactttccataccctcagagggagaaacgatcagattctgtgattcacctccaagaaattgtccaccaggctgcagatcccgagaccctccctagatcaccatcagcagagttctctcctgctgctcctcctggtatctccagtatacattcccctagtctaagggaaaggagtttcccaccaacccagccctcacaggaatttgtgcccccagcgacaccccctgccaggcaccagtgggtaccggatgagactgagagtatctgcatggtctgctgcagggagcacttcaccatgtttaacaggcgtcatcattgtcgccgctgtggccggctagtgtgcagctcctgctccactaagaaaatggtggttgaaggctgcagagagaaccctgctcgtgtgtgtgatcagtgctatagttactgcaacaaagatgtaccagaggagccttcagaaaaaccagaagctctagacagctccaagagtgaaagccctccatactcgtttgtggtgagagtccccaaagcagatgaggtggaatggattttggatctcaaagaggaggaaaatgagctggtgcggagtgaattttactatgagcaggcccccagcgcctccttgtgcattgccatcctgaatctgcaccgggacagcattgcctgtggtcaccagctgattgagcactgctgcaggctctccaagggcctcaccaacccagaggtggatgccgggctgctcacggacatcatgaagcagctgctgttcagcgccaagatgatgttcgtcaaagccggccagagccaagacttggctctttgtgacagctacatcagcaaggtagatgtgctgaatattttagttgctgctgcctatcgccacgtgccatctttggatcagatcttgcagccagctgcagtaaccaggctaaggaaccagcttttggaagccgagtactaccaactgggcgttgaggtctccacaaagactgggcttgataccaccggggcgtggcatgcttggggcatggcctgcctcaaagccgggaacctcactgctgcacgggagaagttcagtcgctgtctgaagcccccatttgacctcaatcagctgaatcatggctcaaggctggtgcaggatgtggttgagtacctagagtccacagtgaggccctttgtatccttgcaagatgacgattactttgccaccctgagggaactggaagctacccttcggacgcagagcctttctctggcagtgattcctgaagggaaaatcatgaacaacacctactaccaggaatgcctcttctacctgcacaactatagcaccaacctggccatcatcagcttctacgtgaggcacagctgcctgcgggaagctcttctgcaccttctcaacaaggagagtcctccagaagtttttatagaaggcattttccaaccaagctataaaagtgggaagctacacactttggagaacttgctagaatccattgatccaaccttggagagctggggaaagtacttgattgctgcctgccaacatttacagaagaagaactactaccacattctgtatgagctgcagcagtttatgaaggaccaagttcgggccgccatgacctgtattcggttcttcagtcacaaagcaaagtcatatacagaactgggagagaagctctcatggctacttaaggccaaggaccacctgaagatctacctccaagaaacatcccgcagctctggaaggaagaaaaccacattcttcagaaagaagatgactgcagctgatgtgtcaaggcacatgaacacacttcagctgcagatggaagtgaccaggttcttgcatcggtgcgaaagtgctgggacctctcaaatcaccactttgcctctgccaaccctgtttggaaataaccacatgaaaatggatgttgcctgcaaggtcatgctgggagggaaaaatgtagaagatggttttggaattgctttccgtgttctgcaggacttccagctggatgctgccatgacctactgcagagctgcccgccagttggtggagaaagagaagtacagtgagatccagcaactgctcaaatgtgtcagtgagtcaggcatggcagccaaaagtgacggggacaccatcctcctcaactgcctggaagcgttcaagagaattccgccccaggagctggagggcctgatccaggcaatacacaatgatgacaacaaggttcgggcctacctgatatgttgcaaactgcgttctgcctacttgattgctgtgaagcaagaacactcacgggccacagcccttgtccagcaggtgcagcaggccgccaagagcagcggggatgcagtagtgcaagacatctgtgcccagtggcttctgacaagccacccccggggtgcccatggcccaggctccaggaagtgaccttgggcagtggggccaggaacacgtggcctgagagctgggcaacagcagtgatggcgatgccctccacctctttcctccagtggagtgggacttctctggctctgccctaggttggaaagagttggattggaccctacttgccttcccgggcaaggataggacctttcacgcaagtgccatgtttctctaaaattgtggaatctatgtgtgtttgtctggagatggccagttctttctacctcagagtgagtgagtgagtatgtgtgcacacacgtgtgcatgttcctgtgcgctgatgtttacgcccaagcatttctgaacaaatgaaactcttctccatttaaaagaggcactttactttggacttgccactctgaaaaccttccctgcgttttggttcttgacccgggttgtcctgtttgtatagtcccccctctgtggacgtgctttagtagctcctcttacctagagggcttttacagagaattagagcaacaccaaaaggattgcctcttttccttccttcccattccaaaattcagagatgggctttggggcaagtgctacctgtggaataaacctgttttccaggtgtctcttctcccaagcacaagaagtcctggagtctttggaaggtagtctgaatagaagggttttcaggtgcaggcatctgaaagctgtgggtatgtgtataaatgatcaggtctgtgaggctaacacgggcaagagggaaagaaaggctaaccatccaaacagggatacaggggaggcggtggggggtggtggggggagcgggtgctcacaagcacagagctgcctgttgtgaatgtccctgctgcaaagttggtgggtgagagaatgggacttcctctttgagagtctggggagagaaaaggtggccaggatcctaggactgaatgactcgattttacctatttgagctgcagtcctgtttgcgctccttgaattggttaggaagctgcttccttttccctcctgcttcccttcagtctcttcaggaccacaggatggatatgcagacatgtggggtcattgggaagggagtgcgcttcttttctctgtcttagaaaagggagtcaagggttggctttggaattgggcctctggacagagtcagaatgagggaataatgaataggtcacatctggttggtggaaaactaggtgaagtgcttctttaatatgcactgtcttgtcttcccacgcaagatgtgacaatgtttgagaaaaggtgtgtcatactcagtgacttcaatttgcaaatgtggggcctaaagaaagctctgcagctctgaacctctcactggccagagctcagcctattggtcccatccatgatgctgagacaaacagaaactggaagctgaagtcagtgtctctggtgctcagaaaccctgtggatttccctctgaaccaagatttttagtagtaaaataaacaactcatggacatctgtcagatgagaagttttggtcctgttagagaggagaaagactgtaatgaaactactagacccatttgggctaaagtttggcttttccttccttgagtcatagaacatatccatctcccaggaaatgtccttctctgggcgtctgcttgcccttctgagtctgccttttttgcactgaacataagcactttatactaatgggtcacaaatcttgcagcccttaatttggggataagaccagattttcctgacattttcctctaactcattgaactatcaaattataggcaaccactgactagactgatatgagatgaggctaaaagcctttgaacaccacgctgtagtctccaacagaaaaacaccaccaaaacagatacccatgttgaggggttgaatgttttactacaaacaagccacaataaagtgtctatcaacatg

SEQ ID NO: 175 - DNA, 2511 bp, Homo sapiens
  CDS (379)..(2511)
gcggccgctttcgccagtccgtccggccgttccgcattaggtccgggataactaggtggagtaggtgtgcggcccgccgccggacagcccgctcgctgtttctttaagcccccgcctccgtcttcacggccctctcccgttctgctggaaagctgacgtggggcaatccgttcagaccctccatggagaagtttgggatgaatttcgggggcggcccgagcaagaaggacttgctggagactatagagacccagaagaagcagcttctccagtaccaggcacggctcaaggatgtggtccgtgcctataaaagcctgctgaaggagaaagaggcattagaggccagcatcaaggtgctgtcggtatcccacgaggcagatgtgggcctcgcaggtgtccagcttccaggcctcacctttcctgactctgtggatgaccggtgctccactcacagcgaggatagcactgggaccgccactagcttggatacctgcggccagtctcaccagcaccaagggtgagtttggggtagaagatgacagaccggcccgtggaccaccacctccaaagtccgaagaggccagttggtccgagagtggcgttagcagtagcagtggggatgggccatttgcaggtggggaggtggacaaaagactgcaccagctgaagactcagttggctactttgaccagttctttggctacagtcactcaggagaagtcccgcatggaggcttcttacttggctgacaagaaaaagatgaaacaggacttagaggatgccagtaacaaggcggaggaggagagggcccgcctggagggagaattgaaggggctgcaggagcaaatagcagaaaccaaagcccggcttatcacgcagcagcatgatcgggcccaagagcagagtgaccatgccttgatgctgcgtgagctccagaagctgctgcaggaggagaggacccagcgccaggacttggagcttaggttagaagagacccgagaagccttggcaggacgagcatatgcagctgaacagatggaaggatttgaactgcagaccaagcagctgacccgtgaggtggaggagctgaaaagtgaactgcaggccattcgagatgagaagaatcagccagatccccggctgcaagaacttcaggaagaggctgcccgccttaagagccatttccaggctcagttacagcaggaaatgagaaagacagctcttgcagaggatcaactccgtcagcaatctcaggtagaagaacagagggtggcagccctggagaatcaaatatccgaggtgtctgagctgctaggcacctacgagaaagccaagcagaaggaccagctggccattcagaagctgaaggagcgcattctgcagctggacctggagaacaagacactggctctagcagcctccagcaggtcccctttagacagccatggagaggagtccagtctggatgtcaatgtcctgaaagataagatggagaagctgaagaggctgctgcaggttgcggccaggaaaagccaggtgaccctggatgtggagaagctctgtgacctggagataatgcccagctcggaggctgctgatggggagaaggctactgcactctattaccaacaggagctgaaacagctgaaggaagagtttgagaggtacaagatgagagcccaggttgtcctcaaaagcaagaataccaaagatggtaacctgggaaaggagctggaggcagcccaggaacagcttgcagagctgaaggagaagtatatttccctgcggctctcctgcgaggagctggagcaccaacaccagcaggaggctgatgactggaagcaggagctggcccggctgcagcagctccaccggcaggagctggagcggtgccagctggacttcagggaccgcacactgaaactggaggaggagctgcacaagcagcgggatcgtgccctagctgtgctcaccgagaaggacttggaactggagcaactgcgttctgtggccttggcctctgggctgccaggacgcagaagtcctgtgggtggtggcggtcctggggacccagctgacacatcatcctctgatagcctgacccaagcattacaacttgcagcggccaatgagcccactttctttctgtacgctgagcaactggcccgcaaggaggtggagatcacatcactgaggaagcagaagcacaggctggaggtcgaggtgcatcagctgcaggatcggctgctggaggagggcgaacggcatcgtgaggaggttgcagccctgcagagccacatcgaaaagaacatcagggaccagagcagggagggagccaatctggagtacctcaaaaacatcatctaccgcttcctgaccttacctgactccctgggccgccagcagactctcacagccatactgactatcttgcacttcagtccagaggagaaacaagtgataatgcgactcccaaccagtgccagctggtggccttctggcaagagatga

SEQ ID NO: 176 - DNA, 2337 bp, Homo sapiens
  CDS (514)..(1530)
tcacttattgagggcctaataatatatattttgactacatttcttatatttcgcgtggagacgttttcagcctctcaaactgcatcgcctacgcacagaagcttcccgaatcttagacgagacacaacaaagctgcgcgctgccctcgccccgcccgcgggcgcggcggcgacaggccctcggccccgcccacaccgcggtgccacgcctccaacccgcctccagccgtgcctccccaggcccttggccccgcccacaccgtctcgccccgccccaagccgcgctgtgctccaggggcgggggcccacggcggccactcactgagccccacgggccgcagcggcagtgacgtagggttggcgcacggatccgttgcggctgcagctctgcagtcgggccgttccttcgccgccgccaggggtagcggtgtagctgcgcagcgtcgcgcgcgctaccgcacccaggttcggcccgtaggcgtctggcagcccggcgccatcttcatcgagcgccatggccgcagcctgcgggccgggagcggccgggtactgcttgctcctcggcttgcatttgtttctgctgaccgcgggccctgccctgggctggaacgaccctgacagaatgttgctgcgggatgtaaaagctcttaccctccactatgaccgctataccacctcccgcaggctggatcccatcccacagttgaaatgtgttggaggcacagctggttgtgattcttataccccaaaagtcatacagtgtcagaacaaaggctgggatgggtatgatgtacagtgggaatgtaagacggacttagatattgcatacaaatttggaaaaactgtggtgagctgtgaaggctatgagtcctctgaagaccagtatgtactaagaggttcttgtggcttggagtataatttagattatacagaacttggcctgcagaaactgaaggagtctggaaagcagcacggctttgcctctttctctgattattattataagtggtcctcggcggattcctgtaacatgagtggattgattaccatcgtggtactccttgggatcgcctttgtagtctataagctgttcctgagtgacgggcagtattctcctccaccgtactctgagtatcctccattttcccaccgttaccagagattcaccaactcagcaggacctcctcccccaggctttaagtctgagttcacaggaccacagaatactggccatggtgcaacttctggttttggcagtgcttttacaggacaacaaggatatgaaaattcaggaccagggttctggacaggcttgggaactggtggaatactaggatatttgtttggcagcaatagagcggcaacacccttctcagactcgtggtactacccgtcctatcctccctcctaccctggcacgtggaatagggcttactcaccccttcatggaggctcgggcagctattcggtatgttcaaactcagacacgaaaaccagaactgcatcaggatatggtggtaccaggagacgataaagtagaaagttggagtcaaacactggatgcagaaattttggatttttcatcactttctctttagaaaaaaagtactacctgttaacaattgggaaaaggggatattcaaaagttctgtggtgttatgtccagtgtagctttttgtattctattatttgaggctaaaagttgatgtgtgacaaaatacttatgtgttgtatgtcagtgtaacatgcagatgtatattgcagtttttgaaagtgatcattactgtggaatgctaaaaatacattaatttctaaaacctgtgatgccctaagaagcattaagaatgaaggtgttgtactaatagaaactaagtacagaaaatttcagttttaggtggttgtagctgatgagttattacctcatagagactataatattctatttggtattatattatttgatgtttgctgttcttcaaacatttaaatcaagctttggactaattatgctaatttgtgagttctgatcacttttgagctctgaagctttgaatcattcagtggtggagatggccttctggtaactgaatattaccttctgtaggaaaaggtggaaaataagcatctagaaggttgttgtgaatgactcctgtgctggcaaaaatgccttgaaacctctatatttccttccggtccataaagagggtaaaggtcaaatttttccaaccaaaagtcccttttaataaccaaagccatgcagttttctgtgaaatctcaaatattgttgtaatagtctgtttcaattttaaaaagaatcaataaaaccaaaaaaaaaaaa

SEQ ID NO: 177 - DNA, 2952 bp, Homo sapiens
  CDS (340)..(1440)
cgcctctcccaaagtctagccgggcaggggaacgcggtgcattcctgaccggcacctggcgaggctcatgcgtcccgtgagggcggttcctcgagcctgggggcgctcagattgctttggagacgctgagagaacctttgcgagagcgccggttgacgtgcggagtgcggggctccgggggactgagcagcacgagaccccatcctcccctccgggttttcacactgggcgaagggaggactcctgagctctgcctcttccagtaacattgaggattactgtgttttgtgagagctcgctaggcgccctaagcaacagagttctgagaaatcgagaaacatgataaggaattggctgactatttttatcctttttcccctgaagctcgtagagaaatgtgagtcaagcgtcagcctcactgttcctcctgtcgtaaagctggagaacggcagctcgaccaacgtcagcctcaccctgcggccaccattaaatgcaaccctggtgatcacttttgaaatcacatttcgttccaaaaatattactatccttgagctccccgatgaagttgtggtgcctcctggagtgacaaactcctcttttcaagtgacatctcaaaatgttggacaacttactgtttatctacatggaaatcactccaatcagaccggcccgaggatacgctttcttgtgatccgcagcagcgccattagcatcataaaccaggtgattggctggatctactttgtggcctggtccatctccttctaccctcaggtgatcatgaattggaggcggaaaagtgtcattggtctgagcttcgacttcgtggctctgaacctgacgggcttcgtggcctacagtgtattcaacatcggcctcctctgggtgccctacatcaaggagcagtttctcctcaaataccccaacggagtgaaccccgtgaacagcaacgacgtcttcttcagcctgcacgcggttgtcctcacgctgatcatcatcgtgcagtgctgcctgtatgagcgcggtggccagcgcgtgtcctggcctgccatcggcttcctggtgctcgcgtggctcttcgcatttgtcaccatgatcgtggctgcagtgggagtgatcacgtggctgcagtttctcttctgcttctcctacatcaagctcgcagtcacgctggtcaagtattttccacaggcctacatgaacttttactacaaaagcactgagggctggagcattggcaacgtgctcctggacttcaccgggggcagcttcagcctcctgcagatgttcctccagtcctacaacaacgaccagtggacgctgatcttcggagacccaaccaagtttggactcggggtcttctccatcgtcttcgacgtcgtcttcttcatccagcacttctgtttgtacagaaagagaccggggtatgaccagctgaactagcacccagggacccagtgtacccagcctctggcctcgtgccctgctggggaaggcctcacccagcgaaggccggagaagcggttgggccctggcacacagggctggctcagtgtgcggacagaggagaccactctgctcctggggccagaggccattcaatagcctgccttcgtccgggcccctcctgggcctccccggccaggcacgtggcaccgtcgccttgacaccgccatctcttttctttaaggcttcaggcagcgcgcacaggctctggcagccgtctcaggcaggactgggcagcaagcttgcagccgaaggccttgccccaaactaccagcgtttctgcaagcagcttgaagggctgaccttgcagccgggtgagccaagggcactttgctgccaccgctgcattcccagagatcaagcagcccggtgccgtggccagtgaactcagaggtgctggtggacgggctaggactttggggttaggccatggggctctttctctgaaggccactttcctgacgtactctctgtacataactcagcgtccgtgactgcagtaacagccagccctacccagagtatttctgagccatgaggggcccaccagattggttctgaattggattcatgcccagcgcattagcatagtaactcctttcagattttttggagggacgtttggaagtggcttactctcttctgccctctctcctacctccaccttctcagaagagccccatctgagcacatccagctgctccttacccagcatctggagtacaggacatagctctctcctgctaccagtctgtgccttagaggtctgttaggcctgccaaacggcgaccagctcccctggagcgagggcaggccccttccctctctttccccagacacctacttgagactcaccaatttctgagccatgaggggcccaccagattggttctgaattggattcatgcccagcgcattagcatagtaactcctttcagattttttggagggacgtttggaagtggcttactctcttctgccctctctcctacctccaccttctcagatgagccccatctgagcacatccagctgctccttacccagcatctggagtacaggacatagctctctcctgctaccagtctgtgccttaaaggtttgttaggcctgccaaacggcgaccagctcccctggagcgagggcaggccccttccctctctttccccagacacctacttgagactcaccaatttttggcctgttcaggagcctcaaataagtatttggacttgagaccccctcacacaatttgtatggggccaaccctgatttcaaacctccttccctttgcccaaaactgtccttcctatggcaggaggggtgggggtcccaggacgtgcctcatacatgacttgagcttgtcagtcccctgagtttccttttacgagatcaacgcgaggggcctgtattttgaattaaaacctactcgcttccaaaaaaaaaa

SEQ ID NO: 178 - DNA, 2203 bp, Homo sapiens
  CDS (145)..(2058)
ggtaccggtccggaattcccgggtcgacgatttcgtgatgggcggagccccagccgctagtgctggtggccgccgctgctgccccagctggagcccgagccgccgcctctgcgtccgcgcgtcgctgcttcccagggcggcggtatgctggggaaaggagtagtcggcggtggcggcggcaccaaggcccccaagccctccttcgtgtcgtacgtacgccctgaggaaattcacacaaacgaaaaggaagtaacagagaaggaagtaactcttcacttgttgccaggtgaacagctgctttgtgaagccagcacagtactgaagtatgtccaggaagattcctgtcagcatggggtctatgggaggcttgtctgcacagacttcaagattgccttcttgggtgatgatgaatctgcattggataatgatgaaactcaatttaagaataaggttataggagaaaatgacattacactccactgtgttgatcagatttatggagtgtttgatgagaaaaagaaaactctctttggacaactgaagaaataccctgagaagctcatcatccactgcaaagaccttcgagtgttccagttttgtctgaggtacacaaaggaagaggaagtcaaaaggattgtcagtggcataattcatcatacccaggctcctaaactgcttaaacgattatttctgttttcctatgcgactgctgcacaaaacaatacagtcactgatcccaagaaccataccgtaatgtttgacacacttaaggactggtgttgggaactggaacggaccaaaggcaacatgaagtacaaagcagtgagtgtcaacgaaggctataaagtctgtgagagattgccagcatactttgttgtccccacccctcttcctgaagagaatgtgcagcgctttcagggtcatggcataccaatatggtgttggtcctgccacaatggaagtgcccttttgaaaatgtcagcactgcccaaagaacaggatgacggcattttacaaatccaaaagagcttcttagatggaatttacaagaccatccacaggccaccctatgaaattgttaaaacggaagacctgtcaagcaacttcctgtccctgcaggaaatccagactgcatactctaaatttaaacagctatttctgatagataacagtactgaattttgggacacagatataaaatggttttctctgttggaaagtagcagctggcttgacataatcagacgttgcctgaaaaaagcaatagagattacagaatgtatggaagcacaaaacatgaatgttcttcttttagaggagaatgcatccgacctctgctgtctcatttcctctctggtgcaactgatgatggacccccactgcagaaccagaattggtttccagagcctcatccaaaaggagtgggtcatgggtggccactgtttcttggatcgctgcaaccatctccgccagaacgacaaagaggagcatcaacgacaactttctttgccacttacacaatctaagtcatctcccaaaagaggatttttcagggaagaaacagatcatttaattaaaaaccttctgggcaagagaattagcaaacttattaattcttctgatgagctccaagacaactttcgagagttctatgacagctggcatagcaagtccactgactaccatggtttgttgttaccgcatatcgaggggcccgaaatcaaagtctgggcccagcgctacctacgttggattccagaagcccaaatcctaggtggtggccaagtggccactctgagcaaactcttggaaatgatggaggaagtccagagtttacaagagaagatcgacgagagacaccacagccagcaggccccccaggctgaggccccctgcctgctgaggaactctgcccgcctctcgtctttgtttcctttcgctctgctccagcgacattcctctaagcccgtcttacccaccagtggctggaaagctttgggagatgaagacgatttggccaaacgagaagatgagttcgtggacctaggggatgtgtgacctgtttgttgagtgattgtgaaagaggaatgtgggagattgggacagctgatccctggatttgtgtcacgctacagctcatgctggctgggtccttagcccggcactccgttagaataaacctgggccttcgggaaaaaaaaaa

SEQ ID NO: 179 - DNA, 2091 bp, Homo sapiens
  CDS (228)..(980)
  misc_feature (1)...(2091): n = a,t,c or g
cgcgcnaattgaaactttgtggaacccgttcggaattcccgggtcgacccacgcgtccgcgctggtccgaattcggtggcgccacgtccgcccgtctccgccttctgcatcgcggcttcggcggcttccacctagacacctaacagtcgcggagccggccgcgtcgtgagggggtcggcacggggagtcgggcggtcttgtgcatcttggctacctgtgggtcgaagatgtcggacatcggagactggttcaggagcatcccggcgatcacgcgctattggttcgccgccaccgtcgccgtgcccttggtcggcaaactcggcctcatcagcccggcctacctcttcctctggcccgaagccttcctttatcgctttcagatttggaggccaatcactgccaccttttatttccctgtgggtccaggaactggatttctttatttggtcaatttatatttcttatatcagtattctacgcgacttgaaacaggagcttttgatgggaggccagcagactatttattcatgctcctctttaactggatttgcatcgtgattactggcttagcaatggatatgcagttgctgatgattcctctgatcatgtcagtactttatgtctgggcccagctgaacagagacatgattgtatcattttggtttggaacacgatttaaggcctgctatttaccctgggttatccttggattcaactatatcatcggaggctcggtaatcaatgagcttattggaaatctggttggacatctttattttttcctaatgttcagatacccaatggacttgggaggaagaaattttctatccacacctcagtttttgtaccgctggctgcccagtaggagaggaggagtatcaggatttggtgtgccccctgctagcatgaggcgagctgctgatcagaatggcggaggcgggagacacaactggggccagggctttcgacttggagaccagtgaaggggcggcctcgggcagccgctcctctcaagccacatttcctcccagtgctgggtgcgcttaacaactgcgttctggctaacactgttggacctgacccacactgaatgtagtctttcagtacgagacaaagtttcttaaatcccgaagaaaaatataagtgttccacaagtttcacgattctcattcaagtccttactgctgtgaagaacaaataccaactgtgcaaattgcaaaactgactacattttttggtgtcttctcttctcccctttccgtctgaataatgggttttagcgggtcctagtctgctggcattgagctggggctgggtcaccaaacccttcccaaaaggacccttatctctttcttgcacacatgcctctctcccacttttcccaacccccacatttgcaactagaagaggttgcccataaaattgctctgcccttgacaggttctgttatttattgacttttgccaaggcttggtcacaacaatcatattcacgtaattttccccctttggtggcagaactgtagcaatagggggagaagacaagcagcggatgaagcgttttctcagcttttggaattgcttcgacctgacatccgttgtaaccgtttgccacttcttcagatatttttataaaaaagtaccactgagtcagtgagggccacagattggtattaatgagatacgagggttgttgctgggtgtttgtttcctgagctaagtgatcaagactgtagtggagttgcagctaacatgggttaggtttaaaccgtgggggatgcaacccctttgcgtttcatatgtaggcctactggctttgtgtagctggagtagttgggttgctttgtgttaggaggatccagatcatgttggctacagggagatgctctctttgagaggctcctgggcattgattccatttcaatctcattctggatatgtgttcattgagtaaaggaggagagaccctcatacgctatttaaatgtcacttttttgcctatcccccgttttttggtcatgtttcaattaaaaatgagaaaagcgcagctcctctctgtacgaatacgaaatcgtcgacccgggaattccgg

SEQ ID NO: 180 - DNA, 1704 bp, Homo sapiens
  CDS (1)..(819)
atggcgttcctggccgggccgcgcctgctggactgggccagctcgccgccgcacctgcagttcaataagttcgtgctgaccgggtaccggcccgccagcagcggctcgggctgcctgcgcagcctcttctacctgcacaacgaactgggcaacatctacacgcacgggctggccctgctgggcttcctggtgctggtgccaatgaccatgccctggggtcagctgggcaaggatggctggctgggaggcacacattgcgtggcctgccttgcaccccctgcaggctccgtgctctatcacctctttatgtgccaccaagggggcagcgctgtgtacgcccggctcctcgccctggacatgtgtggggtctgccttgtcaacacccttggggccctgcccatcatccactgcaccctggcctgcaggccctggctgcgcccggctgccctggtgggctacactgtgttgtcgggtgtggccggctggcgtgctctcaccgccccctccaccagtgctcggctccgggcatttggatggcaggctgctgcccgcctactggtatttggggcccggggagtgggtctgggttcaggggctccaggctccctgccctgctacctgcgcatggacgcactggcgctgcttgggggactggtaaatgtagcccgtctgcccgagcgctggggacctggccgctttgactactggggcaactcccaccagatcatgcacctgctgagcgtgggctccatcctgcagctgcacgccggcgtcgtgcccgacctgctctgggctgcccaccacgcctgtccccgggactgagctgccatgccagcctgcccacagcagcctcctagagttagcaacaccaggtgttcctcccaactcgtctgcaaggggctggcttcttggatgcttccagctcatgagatgtctcagcaggagccctgttcacccgttcttccctgtggactgacctcttccacccacgccgtggcgctccaacttccttccctgccttttccctccaagctcctattttactgtgtcagctggaaggaaacctttccctcttgggacctctttaccctctgtgacctgtggggttagaccagagagggactctggggtcacgtcttgctctgagagttcaagtcctgccaggccgccagcccagagcctcctcaccctatcctgttcctcccaccaggcctgtggccagtcttcctgatctccatctttctgccctgcataccagccctcccagcagccacaagcttgcccgccctggctccctctgcccagagactatggagtaaggcattcaggacaaaaggaccaagggggcgtggacccgtcttgtaccagctggccacaggcacaagggctgcagctgcttcttccaggaaactgacacagggagctcagcggcctcagatcctgggacccctgggccgtgcctgccctccaccttgagtgccatactcccaacagctccaggtacccaccgggggatgtgcctgctcaggaaacctctttgctccacacagcatggggcttcagctgctggcccaagggccaggagcgctgggttctgcagcagggctcagcctcaggggcgttaagaccctggatgacatcaataaagggacaggaagggccatgttgccacatgagcaaaaaaaaaaaacaagggcggccgct

SEQ ID NO: 181 - DNA, 7005 bp, Homo sapiens
  CDS (529)..(2922)
atgacatgcttcaaagggcaaaaaggagaacaaagatcacatgcttttgaggccaataaagatcacaaggcaaaggttccatctcccaacctctatagccagctgaatgcactacagtttactgtggatgaaagaagcattctatggttaaatcaatttctgttggatttaaaacagagtcttaatcagttcatggctgtgtacaagttgaatgacaattcaaaatctgacgagcatgttgatgttcgagttgatggcttaatgctaaagtttgtcattccttctgaagtgaaatctgaatgtcatcaagatcagccacgtgcaatttctattcagagttctgaaatgattgccacaaatacaaggcactgtccaaactgtcgacattctgacctagaagctttgtttcaagactttaaagattgtgatttttttagtaaaacatataccagcttccccaaatcttgtgacaattttaatcttctacatccaattttccagagacatgctcatgaacaagataccaaaatgcatgaaatttataaaggaaatattactccccaattgaataaaaacactcttaaaacttctgctgccacggatgtttgggctgtgtacttttctcaattttggatagattatgaagggatgaaaagtggaaaaggacggccaataagttttgtagactcattccctctttccatttggatttgtcaaccaacaagatatgcagagtcacaaaaagagccgcagacttgtaatcaggtatctctaaatacatcacaaagtgaatctagtgatctggctggccgattgaagcggaagaagctcttgaaggagtattatagtacagagtctgagcctttgacaaatggtggtcagaagccttcttcatcagatacatttttcagattttccccttcctcgtcagaggcagatattcatctcctagttcatgttcataaacatgtcagtatgcagattaatcactaccagtatctgcttctacttttcctgcatgagtcacttatcctgctttcagagaacttaaggaaagatgtagaagctgtaactggcagtcctgctagtcagacatccatttgtattggaattttacttagaagtgcagaactggctcttttgctccatccagtggatcaagcaaatactcttaagtctcctgtttctgaaagtgtgagcccagtggtacctgattatttgcctacagaaaatggggattttttgtcttcaaaaagaaaacaaattagtagggatataaatagaattagaagtgtaactgttaatcatatgtcagacaacagatctatgagtgttgaccttagccatatccctttaaaggatcctttgctttttaaatcagctagtgatacaaatctgcaaaaaggcatttcttttatggactatttatcagataaacatttagggaaaataagtgaagatgaaagtagtggacttgtttacaaaagtggctcaggagaaattggatcagaaacaagtgacaaaaaggattcattttatacagattcaagtagtgtcttaaactacagagaagattcgaatatactttcatttgatagtgatggtaatcaaaacatactttcaagtactttaactagtaaaggaaatgaaaccatagagtccatctttaaagctgaagatttgcttccagaagcagcttcactctctgaaaacctggatatcagtaaagaagagacccccccagttagaacacttaaatcacagtcatctttaagtggaaagcctaaggaacgttgcccacccaacctggctcctctctgtgtttcttataagaatatgaaaagaagctcttcacaaatgtcattggataccatttcacttgacagcatgatattggaagaacagttattagaaagtgatggaagtgatagccatatgtttttggaaaaaggaaataaaaagaactcaactacaaattacaggggcacagcagaaagtgtgaatgctggtgcaaacctacagaattatggtgaaacttctccagatgccatcagtacaaattcagagggtgctcaggaaaatcatgatgacctgatgtccgttgtggtatttaaaattactggtgttaatggggaaattgacatccgaggggaagatacagaaatctgtcttcaagtgaaccaggtgacaccagaccaattaggcaatatcagccttcggcattacctttgtaatcgtccagttggttccgatcagaaagctgtaattcattccaaatcctctcctgagatttctctgagatttgaaagtgggcctggtgctgtaatacactctttacttgcagaaaaaaatggatttctgcagtgccacatagaaaacttcagcactgagtttcttacatcttctcttatgaatattcaacattttttggaagatgaaactgttgcaacagtaatgccaatgaagatacaagtttctaacacgaaaataaatttaaaagatgatagtccccggagtagtacagtatcccttgaaccagctcctgtaactgtacatattgatcatcttgtggtagagagaagtgacgatggctcttttcatatcagagattctcacatgcttaacactggaaatgatttgaaagaaaatgtcaaaagcgattcagtgctgctgaccagtggaaagtatgatctgaagaaacaacgcagtgtcacgcaagccactcagacaagcccaggggttccttggccttctcagtcagctaactttcctgagttctcctttgacttcactagggaacagctcatggaagagaatgaatctcttaaacaggaactggctaaagctaaaatggctcttgcagaggctcacttggaaaaagatgctcttcttcatcatataaagaagatgacagttgaatagcaggagtggcagtcaaaactgaaattatagctctggagtaggaaggttatatttataatgtggatgttaccagttaggggaagacttttattttcatgaaaagacaataaaacaaaatggaatgtgatgaagtggtgactatttcaaagccagtttagaaagtattagtacgggcattacaatcttttggttgttttgtgttttggggcttaaccctcttttaagctgttgtgatctagggaagtcaacacatagtgtaaaataattacatgcctaatgaaaagaagatgtcatttcctaattttgatatctcattttcggcattttttaaaatgtaaaaggaaaacctcttgtgttcacacagattgctgaattgatttctccatatttgttaataatttactattatttacaaagattcaaatgcttttatgactaatgtaaaatgaaaagaggcttacattttaaatgttattaaaattatgtacttaaatctataattatttaattattgtaaaaagtccaagcagatcaataaactatataattaatgggtttggaaaatcatcaccctactgaacttacaaaatatcttgaaaatgtgaaaaatatcattttaaataatgggtacattgtataagtggaagctataattttcaacaaaaagatggtacaaatgtaaaagtaaaaagcacaaactatacaaaagcaaaatctatggccaagtgatttaaaagcattacttgtacattcctttaaacatttgttgttagaagcaaaagagtaatttatcctgctaaatttggcaccatttgtaattataaaaattttgattaatactatttatattaatttctttaccttcattttttctccttaaggagttgattgtttttggaaatgtttttttccttgcacataagacagtttcataccattcttatagaatcatattaggtgggtgtttgcacatactaaatttataaagctagttttgattaaagctctatgtgagatatatatacatacacaagtcttctataataagagtcgttggtgaattttgaattctattttgttaggaattaaggttgaaatcaacatgaaagaatctcaatcatgcattataaaataaaagtacatgggtgttaagaaacaagagacttttaaagatttaaaatatatttctgatagaatttaactaagtggtgtgtattttaaaattcacattcttaaacataaatctatccaagatagaaaatgaaatagctggactactctttctttaagatacttgaaaattttaaaccacattgcaacactttatggtgctttgcgtgtttggcatgacatacacagtggtcctggtatataagtgcttgggggaaaatacatattttgtttacattaaattttgaagtgatttaggctttattgaaaacaatactggccttccctccccttctctaacatccattttcatttacgttatttaaaatatacaggcactgttttgggtacagaggatatagccaagagcaaattgatagtagtttacctcagagtattaaaaaaatcataataagtcatgttaatctaaaactatataatagccttagattaaatgtgcagatgtctaattaaagatttaaaatgtatagcgtatgtccttagaacatttgatttttaggtatacattcggcaaaaacagtctgttatggaaaagaaggattgatgggacattaacttcttccgagctaacattgtttctgaagattgacctattctatataaatttaaatttttctatgtttttctttttttttttgcgatgaggtttcgctcttgttgcccaggctggagtacagtggtgtgatcttggctcaccgcaacctccgcctcgtgggttcaaatgattctcctgtctcagcctcctgagtaactggggttacaggcgcccaccactacgcccagctaatttttggtatttttggtagacacagggtttcaccatgttggccaggctggtcttcaactcctgaccccaggtgatccgcccacctcagcctcccaaggtgctgggattgcaggcgtgagccaccgtacccggcctctatcgtatattataattgcttattgttatagaagctgaatgttttacttactacttttaaatttatttggtcttcccaaggaaatcatacaaacggtagagattatgataatctgagcattctgtgtgcttagtttgatttttttatttataagcagtactatttttatagatgtttaaaattcataaaacactgtattctgagaggtaggtattattcaaatgttagaaattttttttaaaaaaatgccctgaggcttagaaaggacaaatgactgaaatcacaattagtaatctggtctttagacttaaagcctagttatatgcttttattatagcttagtcattaattcacacattttcccttatcttttttatcttttaaaggtgaccataaaactttaaattgtgtgtgtacgtctatgtatgaggtatatgttaccctgtttgtgttattcaaactacctaaaagataggatgatttttgtttaagtgaatcccaaactagcagtctgagaaatacaggaaagcctgataattgacttaccagagttggctttttttttttaagttaccataatttagatataaagttgtcatgtcctggaatttaaaaaagaaatctctagctgagagatgttaatggtcaggagttgaaaatgacaattgtgctttgctttttatttttattttttgtttacttttgagttttttggagtttttttcctatatttttaattgagaagtaaaaattatatatttatggtgtacaacacgatgtgatacatgtataccttgtggaatggctaaatcaagctatctaacatgttacctcacaaactttttttgtagcgagaacacttaaaattttgtaacaattttcaagtatacagcatattgttattaactgtaatcacgtgatatacagtagatctcttgaacttatatttactaactgcaatttcgtgtccttttacaaacatctccccatttccccatcccccagcctctgataaccagaattttactctccatcccatgaagttgactttttttgcactccgtaagtgagatcatctagaattttggcatgtctttctgtgcctggcttatttcacttaacacagtggtcccctgtgtagctgggaccacaggcgtgtgccactacacccaggtttatccatgttgtcagaaatgacaggatttcctttttttaaaagttgaatggtattctcttatgtatattttccacatttgctttttccattcatccattgatggacagttaaattgattccatatcttggctattgagtaatgctgcagtgaacatgggattgcagatgtctcttccacatactgatttcgtttcctttgaacatataccaaatagtgggattggtggataatatggtagttctattttttaatgttttgaggaccctccatactgttttccgtaatggctataataatttacattgccaccaacagtgtacaaagcttttctttccttttctctgcatcctctccaacacttcccttttgtcttcttgataatagtcattctaacgggtatgattacagtagctttgtagtgggttttctgtgctgtgctttttaatttcatgtatgtaaaaaacattgggtattttgaatgtttttcttttctcaccttatcctagaacttgaggctgggcgcggtggctcatccctgtaatctcagcactttgggaggccaaattgggcggatcacttgaggtcaggagttcgagaccggcctggccaacatggtgaaaccccatttctactaaaaatacaaaaattggccaggcgtggtggtgcacgcctgtagtcccagccaatcagtaggctgaggcacgagaatcgcttgaacccaggaggccaaggctgcggtgagccacgattgcaccactgcactctaacctgagcaacacagactccatctc

SEQ ID NO: 182 - DNA, 6163 bp, Homo sapiens
  CDS (98)..(1603)
ttgttccggaattcccgggtcgacgatttcgtaggaggaggagggactgagcggcggcggcccccgcgttccgtgctctctatgggggaagcagacaatggattatgatttcaaggcgaagctggcggcggagcgggagcgggtggaggatttgtttgagtacgaagggtgcaaagtgggacgcggcacctacggtcacgtctacaaggcgaggcggaaagatggaaaagatgaaaaggaatatgcattgaagcaaattgaaggcacaggaatatccatgtcggcttgtagagagattgcacttttgcgagaattgaagcaccctaatgtgattgcattgcagaaggtgttcctttctcacagtgacaggaaggtatggctgctgtttgattatgcagagcatgacttgtggcatattattaagtttcaccgtgcatcaaaagcaaataaaaagcccatgcagttgccaagatctatggttaaatccttactttaccagattcttgatggtatccattacctccatgcaaattgggtgcttcacagagacttgaaaccagcaaatatcctagtaatgggagaaggtcctgagagggggagagtcaaaatagctgacatgggttttgccagattattcaattctcctctaaagccactagcagatttggatccagtagttgtgacattttggtatcgggctccagaacttttgcttggtgcaaggcattatacaaaggccattgatatatgggcaataggttgtatatttgctgaattgttgacttcggaacctatttttcactgtcgtcaggaagatataaaaacaagcaatccctttcatcatgatcaactggatcggatatttagtgtcatggggtttcctgcagataaagactgggaagatattagaaagatgccagaatatcccacacttcaaaaagactttagaagaacaacgtatgccaacagtagcctcataaagtacatggagaaacacaaggtcaagcctgacagcaaagtgttcctcttgcttcagaaactcctgaccatggatccaaccaagagaattacctcggagcaagctctgcaggatccctattttcaggaggaccctttgccaacattagatgtatttgccggctgccagattccataccccaaacgagaattccttaatgaagatgatcctgaagaaaaaggtgacaagaatcagcaacagcagcagaaccagcatcagcagcccacagcccctccacagcaggcagcagcccctccacaggcgcccccaccacagcagaacagcacccagaccaacgggaccgcaggtggggctggggccggggtcgggggcaccggagcagggttgcagcacagccaggactccagcctgaaccaggtgcctccaaacaagaagccacggctagggccttcaggcgcaaactcaggtggacctgtgatgccctcggattatcagcactccagttctcgcctgaattaccaaagcagcgttcagggatcctctcagtcccagagcacacttggctactcttcctcgtctcagcagagctcacagtaccacccatctcaccaggcccaccggtactgaccagctcccgttgggccaggccagcccagcccagagcacaggctccagcaatatgtctgcattgaaaagaaccaaaaaaatgcaaactatgatgccatttaaaactcatacacatgggaggaaaaccttatatactgagcattgtgcaggactgatagctcttctttattgacttaaagaagattcttgtgaagtttccccagcaccccttccctgcatgtgttccattgtgacttctctgataaagcgtctgatctaatcccagcacttctgtaaccttcagcatttctttgaaggatttcctggtgcacctttctcatgctgtagcaatcactatggtttatcttttcaaagctcttttaataggattttaatgttttagaaacaggattccagtggtgtatagttttatacttcatgaactgatttagcaacacaggtaaaaatgcaccttttaaagcactacgttttcacagacaataactgttctgctcatggaagtcttaaacagaaactgttactgtcccaaagtactttactattacgttcgtatttatctagtttcagggaaggtctaataaaaagacaagcggtgggacagagggaacctacaaccaaaaactgcctagatctttgcagttatgtgctttatgccacgaagaactgaagtatgtggtaatttttatagaatcattcatatggaactgagttcccagcatcatcttattctgaatagcattcagtaattaagaattacaattttaaccttcatgtagctaagtctaccttaaaaagggtttcaagagctttgtacagtctcgatggcccacaccaaaacgctgaagagagtaacaactgcactaggatttctgtaaggagtaattttgatcaaaagacgtgttacttccctttgaaggaaaagtttttagtgtgtattgtacataaagtcggcttctctaaagaaccattggtttcttcacatctgggtctgcgtgagtaactttcttgcataatcaaggttactcaagtagaagcctgaaaattaatctgcttttaaaataaagagcagtgttctccattcgtatttgtattagatatagagtgactatttttaaagcatgttaaaaatttaggttttattcatgtttaaagtatgtattatgtatgcataattttgctgttgttactgaaacttaattctatcaagaatctttttcattgcactgaatgatttcttttgcccctaggagaaaacttaataattgtgcctaaaaactatgggcggatagtataagactatactagacaaagtgaatatttgcatttccattatctatgaattagtggctgagttctttcttagctgctttaaggagcccctcactccccagagtcaaaaggaaatgtaaaaacttagagctcccattgtaatgtaaggggcaagaaatttgtgttcttctgaatgctactagcagcaccagccttgttttaaatgttttcttgagctagaagaaatagctgattattgtatatgcaaattacatgcatttttaaaaactattctttctgaacttatctacctggttatgatactgtgggtccatacacaagtaaaataagattagacagaagccagtatacattttgcactattgatgtgatactgtagccagccaggaccttactgatctcagcataataatgctcactaataatgaagtctgcatagtgacactcatcaagactgaagatgaagcaggttacgtgctccattggaaggagtttctgatagtctcctgctgttttaccccttccattttttaaaataagaaattagcagccctctgcataatgtagctgcctatatgcagttttatcctgtgccctaaagcctcactgtccagagctgttggtcatcagatgcttattgcaccctcaccatgtgcctggtgccctgctgggtagagaacacagaggacagggcatacttcttgtccttaaggagcttgtgatctgtgacagtaagccctcctgggatgtctgtgccatgtgattgacttacaagtgaaactgtcttataatatgaaggtctttttgtttacttctaaacccacttgggtagttactatccccaaatctgttctgtaaataatattatggaagggtttctatgtcagtctaccttagagaaagccagtgattcaatatcacaaaaggcattgacgtatctttgaaatgttcacagcagccttttaacaacaactgggtggtccttgtaggcagaacatactctcctaagtggttgtaggaaattgcaaggaaaatagaaggtctgttcttgctctcaaggaggttacctttaataaaagaagacaaacccagatagatatgtaaaccaaaatactatgccccttaatactttataagcagcattgttaaatagttcttacgcttatacattcacagaactaccctgttttccttgtatataatgacttttgctggcagaactgaaatataaactgtaaggggatttcgtcagttgctcccagtatacaatatcctccaggacatagccagaaatctccattccacacatgactgagttcctatccctgcactggtactggctcttttctcctctttccttgcctcagggttcgtgctacccactgattccctttacccttagtaataattttggatcattttctttcctttaaaggggaacaaagccttttttttttttgagacggagtgttgctctgtcacccaagctggagtgcagtggcacgatcttggctcactccaacctccaccttccaggttcaagtgattctcctgcctcagcctcccgagtagctgggactacgggcacgcaccaccacgtctggctaatttttgtatttttagtagagatggggtttcaccctattggtcaggctggtcttgaattcctcacctcaggtcatccgcctgtctcggcctcccgaagtgctgggattataggtgtgagccaccgcacccagttgggaacaaagcctttttaacacacgtaagggccctcaaaccgtgggacctctaaggagacctttgaagctttttgagggcaaactttacctttgtggtccccaaatgatggcatttctctttgaaatttattagatactgttatgtcccccaagggtacaggaggggcatccctcagcctatgggaacacccaaactaggaggggttattgacaggaaggaatgaatccaagtgaaggctttctgctcttcgtgttacaaaccagtttcagagttagctttctggggaggtgtgtgtttgtgaaaggaattcaagtgttgcaggacagatgagctcaaggtaaggtagctttggcagcagggctgatactatgaggctgaaacaatccttgtgatgaagtagatcatgcagtgacatacaaagaccaaggattatgtatatttttatatctctgtggttttgaaactttagtacttagaattttggccttctgcactactcttttgctcttacgaacataatggactcttaagaatggaaagggatgacatttacctatgtgtgctgcctcattcctggtgaagcaactgctacttgttctctatgcctctaaaatgatgctgttttctctgctaaaggtaaaagaaaagaaaaaaatagttggaaaataagacatgcaacttgatgtgcttttgagtaaatttatgcagcagaaactatacaatgaaggaagaattctatggaaattacaaatccaaaactctatgatgatgtcttcctagggagtagagaaaggcagtgaaatggcagttagaccaacagaggcttgaaggattcaagtacaagtaatattttgtataaaacatagcagtttaggtccccataatcctcaaaaatagtcacaaatataacaaagttcattgttttagggtttttaaaaaacgtgttgtacctaaggccatacttactcttctatgctatcactgcaaaggggtgatatgtatgtattatataaaaaaaaaaacccttaatgcactgttatctcctaaatatttagtaaattaatactatttaatttttttaaagatttgtctgtgtagacactaaaagtattacacaaaatctggactgaaggtgtcctttttaacaacaatttaaagtactttttatatatgttatgtagtatatcctttctaaactgcctagtttgtatattcctataattcctatttgtgaagtgtacctgttcttgtctcttttttcagtcattttctgcacgcatccccctttatatggttatagagatgactgtagcttttcgtgctccactgcgaggtttgtgctcagagccgctgcaccccagcgaggcctgctccatggagtgcaggacgagctactgctttggagcgagggtttcctgcttttgagttgacctgacttccttcttgaaatgactgttaaaactaaaataaattacattgcatttattttatattcttggttgaaataaaatttaattgactttg

SEQ ID NO: 183 - DNA, 1440 bp, Homo sapiens
  CDS (12)..(1439)
aggagcgcaaaatggcggaaccgccgagccccgtgcactgtgtcgctgccgcggcccccaccgccaccgtctcggagaaagaaccgtttggcaagctgcaactctcctcccgggaccctccgggttctctgtccgccaagaaggtccggactgaggagaagaaggcaccgcggagagtgaacggagaagggggcagcggcgggaacagcaggcagctgcagccgccggcagcaccttcgcctcagagctatggcagccccgcgtcttggagctttgcccctctgtctgctgctccctccccgtcctcttctcggagcagtttctctttctccgctggcacggccgttccctcctcagcctccgcttccttgtctcagccggtgccgcgcaaactgctggtccctcctacgctgctgcacgctcagcctcaccatctcctcctgcccgccgccgccgccgctgcctcggctaacgccaagtcgcgcagacctaaggagaagcgggagaaggagaggaggaggcacggtctcggtggggcccgagaggccggcggggcctcccgggaggagaacggggaggtgaagccgctgccccgagataaaatcaaagacaaaattaaagagagagacaaagaaaaagaaagagaaaaaaagaaacataaagtaatgaatgagatcaagaaagagaatggagaagtaaagattttgctgaaaagtgggaaggagaaaccaaaaacaaatatagaagacttacaaattaaaaaggtaaagaagaaaaagaaaaagaaacacaaagagaatgaaaaacggaagcgtccgaaaatgtatagcaaatctattcagaccatctgctcaggattgctaactgatgttgaagatcaagcagccaaaggcatcctaaatgataacataaaagattacgttgggaagaatttggataccaagaactatgattccaaaattccagagaacagtgagtttccatttgtctcattaaaggagccacgagttcagaataacctcaaaaggttggacactttggaatttaaacaactcattcatatagagcaccagcctaatggaggtgcatcggttatccatgcctacagtaacgaactctcccacctgtctcctatggagatggagaggtttgcagaagagtttgtgggtctagtgttcagtgaaaatgaaaactctgcagctttctacgtgatgggtattgttcatggggcagctacttatttacctgactttttagactatttttcatttaattttcccaattcaccagtgaaaatggagatattgggaaagaaagatatagagacaacgactatgtccaattttcatgctcagagtctcactgtactccagcctggacgacagagtgagactccatctcaaaaaaaaagaaagaaattcatgataatgctatcctcta

SEQ ID NO: 184 - DNA, 1651 bp, Homo sapiens
  CDS (214)..(963)
atttggccctcgaggccaagaattcggcacgaggtaagcctgccagacacactgtgacggctgcctgaagctagtgagtcgcggcgccgcgcactggtggttgggtcagtgccgcgcgccgatcggtcgttaccgcgaggcgctggtggccttcaggctggacggcgcgggtcagccctggttcgccggcttctgggtctttgaacagccgcgatgtcgatcttcacccccaccaaccagatccgcctaaccaatgtggccgtggtacggatgaagcgtgccgggaagcgcttcgaaatcgcctgctacaaaaacaaggtcgtcggctggcggagcggcgtggaaaaagacctcgatgaagttctgcagacccactcagtgtttgtaaatgtttctaaaggtcaggttgccaaaaaggaagatctcatcagtgcgtttggaacagatgaccaaactgaaatctgtaagcagattttgactaaaggagaagttcaagtatcagataaagaaagacacacacaactggagcagatgtttagggacattgcaactattgtggcagacaaatgtgtgaatcctgaaacaaagagaccatacaccgtgatccttattgagagagccatgaaggacatccactattcggtgaaaaccaacaagagtacaaaacagcaggctttggaagtgataaagcagttaaaagagaaaatgaagatagaacgtgctcacatgaggcttcggttcatccttccagtcaatgaaggcaagaagctgaaagaaaagctcaagccactgatcaaggtcatagaaagtgaagattatggccaacagttagaaatcgtatgtctgattgacccgggctgcttccgagaaattgatgagctaataaaaaaggaaactaaaggcaaaggttctttggaagtactcaatctgaaagatgtagaagaaggagatgagaaatttgaatgacacccatcaatctcttcacctctaaaacactaaagtgtttccgtttccgacggcactgtttcatgtctgtggtctgccaaatacttgcttaaactatttgacattttctatctttgtgttaacagtggacacagcaaggctttcctacataagtataataatgtgggaatgatttggttttaattataaactggggtctaaatcctaaagcaaaattgaaactccaagatgcaaagtccagagtggcattttgctactctgtctcatgccttgatagctttccaaaatgaaagttacttgaggcagctcttgtgggtgaaaagttatttgtacagtagagtaagattattaggggtatgtctatacaacaaaagggggggtctttcctaaaaaagaaaacatatgatgcttcatttctacttaatggaacttgtgttctgagggtcattatggtatcgtaatgtaaagcttggatgatgttcctgattatctgagaaacagatatagaaaaattgtgccggacttacctttcattgaacatgctgccataacttagattattcttggttaaaaaataaaagtcacttatttctaattcttaaagtttataatatatattaatatagctaaaattgtatgtaatcaataaaaccactcttatgtttattaaactaaaaaaaaaaaa

SEQ ID NO: 185 - DNA, 5360 bp, Homo sapiens
  CDS (1)..(3144)
atggtagaaggcaaaaggcacgtcttacatggcggcagacaagagagaatgagagccaagcagaaggggaaacctcttataaaatcttcagatctcgtgagacttattcactaccaccacaacagctccccactgcacaaacagtcatctggaccctcctcctccccggccgcagctgctgcccccgagaagccgggccccaaggcggcggaagtgggggatgacttcctgggggactttgtggtgggcgagcgggtgtgggtgaacggcgtgaagccaggcgtggtgcagtatctgggagagacgcagttcgcaccgggccagtgggctggcgtggtgctggacgacccggtgggcaagaatgatggcgcggtgggcggcgtgcgctacttcgagtgcccggccctccagggtatcttcacgcggccctccaagctgacccggcagcccacggccgagggctcggggagtgatgcccactccgtggagtcgctgactgcccagaacctgtcattgcattcgggcacggccacgcccccgctgaccagccgcgtcatccccctgcgggagagcgtcctcaacagctccgtgaagaccggcaacgagtcgggatccaacctctcagacagcggctctgtgaagcggggcgaaaaggacctgcgcctgggggaccgcgtgctggttggcgggacgaagactggcgtggtgcggtacgtgggggagacagactttgccaagggcgagtggtgtggcgtggagctggacgagccccttgggaagaatgatggggcggtggcgggcaccaggtacttccagtgcccacccaagtttggtctcttcgcgcccatccacaaagtgatccgtatcggcttcccatctaccagcccagccaaggccaagaagaccaagcgtatggccatgggtgtgtcagcactgacccacagtcccagcagttcctccatcagctccgtcagctctgtggcctcctccgtggggggtcggcccagccgcagtggcctgctcacggagacctcttcacgctacgcccgcaagatctcgggcaccacggccttgcaggaggcactgaaggagaagcagcagcacattgagcagctgctggctgaacgagacctggaacgggctgaggtggccaaggccacaagccacatctgcgaggtggagaaggagattgccctgctcaaggcacagcatgagcagtatgttgcagaagccgaggagaagctgcagcgagcccggctgctcgtggagagcgtgcggaaagagaaggtggacctgtccaaccagctggaggaggagaggaggaaggtggaggatctgcagttccgcgtggaggaggagtccatcaccaagggagacctggagacccagacgcagctggagcacgcgcgcattggggagctggaacagagcctgctactggagaaggcgcaggccgagcggctgctccgagaattagcggacaacaggctgaccacagtggccgagaagtcgcgcgtgctgcagctggaggaggagctcaccctgcgccgaggtgaaatcgaggagctccagcagtgcctgttgcactcgggtcccccacctccggaccacccagacgccgccgagatcctgcggctacgggagcggctgctctcggccagcaaggaacaccagagggagagtggggtgctgcgggataaatacgagaaggccctgaaggcctaccaggcggaggtggacaagctccgcgcggccaacgagaagtacgcacaggaggtggcgggcctgaaggacaaggttcagcaggccaccagcgagaacatggggctaatggacaactggaaatccaagctggactcgctggcctcggaccaccagaagtccctggaggacctcaaagccaccctgaactcgggcccaggcgcccagcagaaggagatcggcgagctgaaggcagtgatggagggcatcaagatggagcaccagctggagctgggtaacttgcaggccaagcatgacctggagaccgccatgcacgtgaaggagaaggaggccctgcgagagaagctgcaggaggcccaggaggagctggctgggctgcagcggcactggcgggcccagctggaggtgcaagccagccagcaccggctggagctgcaggaggcccaggaccagcgccgggatgccgagctgcgtgtgcacgagctggaaaaactggacgtggagtaccggggccaggcgcaggctatcgagttcctcaaggagcagatctcgctggccgagaagaagatgttggactacgagcggctgcagcgggcagaagcccagggcaaacaggaggtcgagagtttgcgggagaagctcctggtggctgagaacagactccaggcggtcgaggccctgtgctcctcccagcacacccacatgattgagtcgaatgacatttcagaggagacgatcaggacgaaggaaactgtggagggcctgcaggacaagctgaacaagagggacaaagaggtgacagccttgacctcccagaccgagatgctcagggcccaagtaagtgcgctggagagcaagtgtaagtcaggcgagaagaaggtggacgccctcctgaaggagaagcggcgcctggaggcagagctggagaccgtgtcccggaagacccatgacgcctcgggccagctagtcctcatcagccaggagctgctgcggaaggagcggagcctgaacgaactgcgggtgttgctgctggaggccaatcgtcactccccagggccggagagggacctgagccgtgaggtacacaaggctgagtggcggatcaaggagcagaaactcaaggatgacatccggggcctgcgtgaaaagctgaccgggctggacaaagagaaatccctgtcggatcagaggcgctactccctcatcgacccgtcctcggcgcccgagcttctgcggctgcagcaccagctgatgagcacggaggacgccctgcgggatgcgctggaccaggctcagcaggtggagaagctgatggaggccatgaggagctgccctgacaaggcccagaccatcggcaattccggttctgcaaacggcatccaccagcaggacaaagctcagaaacaagaggacaagcactgatcctgaggggatactgtggagcagcccagtccacaccagagccccacgcggctgcccggcagtacctcctccaggcaggagccgggactgtcactttggagacaaaacagtgtttgtaacaataacgtactcaccgccgcggacaatcccccaccccgatccctcgccagaccaggacgcttcctcaagcccagccttctacagagagtgtgaacggtacagccctggcctgacccggggaccttcagcctggacacccggcagcttctggagtttgtcagtggaggcagaggggatccggccaggcccctctgtccagaaggagctgccctgaggaccatcttagcggccctgtcctctttttccgcccattctccctcgggtctccccagaggggccggcgggggctggggagggggtaagtttatccatgcagacaccaagggggagcatccagtctttaagagccaagtgggggccccttttccgaagccacttccaggccaaggcagtcgccagggcttcttgtccccaccttctgaaccttcttcaaacagtagtacaagctcccctcagccagcctgcctgcccagcgaggcccccaggttcaaggtgttggcgggggcggagggcaggggaacgggatccttctcccgctgcccaccaacaccaacacacacacacctctaagctgctggccgaagatgtcaccaaggccaaagacacagtattatgaaggtttggaaacccctctcctcacctcccaccgtgaccttgggcaaaccctggctcggagcccagggcagaggcagctcagagtggaggctctaggcaggtttgacaaaggtcagtaatacggtttcccctggggttgaccagatgttccaaaatatctgcatccacctggagatgcagctaagtgggtccttatgtacacaccacgttcacacacacacagagggaccacgtgtgcacgcatgaccgtgtgggtggcggcgtttgctgtgaaccatgctcaggccacacagagacacatacttggtttctgggactgagacccaggcctggcaggaccgtgcctacagatactgcaaacgttcctacagcctagaggtgcgtatacacacccaagtacacgcagccaggcattcaggggtgtgtttgccacatggagcatcccttcctggtcttgccaggcacctgcacagagcgtctccagccccatctcctaacgggggctgggggtaagagaaatctaactgcgctcccccaacccctcgccctgccatcttcccctcaagcctgctaagttatcccaggcctgtgcgtggtggaaaaagccagccttggccctgcagcctccacctcgccgctgggggaccaacaggttgcttacagctttgcaccccggcatcagcacaggggtccctgccccaccctccggcagctcagggagtgttttcctgtgaggcctcccccatcagtggaccagagggagaagcccgatgccccatcccggctttcccgtaacgcacaggacacgtgtgcaattcataggaacggcccagatcgccctcatgagtgccacctggtacaggtaggtggcgctcacgttcctgcccaaatgcagcccatcggggagtcacagtcagtccccccggcccccctcccagtccctgttggctttcggtagctctcgcatgcagttctattaacagccgtctagaagcgatgctttagtggcctaacccagggtcaaatacagctctttctagcaaaatcaggcagctctgccccatcggtaggggcaccgattagtctactaacagccagaggtccatctagcagggtgccgggaggagctgagcccccggaggtgggctcctggtgacgggtgtccaagaagcggtttccttgggagcttctgcctccgtgggcctctcagcccgccccgtgtggccgcccgggtgtggctcagccatgtcccctccccaggtccttcattcacccctcccctccccacagtggaattgttgaagtgtggcgagtctgtgctcgggacaataaagcttgtgacaggtccaggaccccggcagttggcttgtctcctcctctccgtggggaccccgggcttctcgatctctcccaattcttgggcaccctggtgccaggagatggcccccgatcctgccctctgccagctcattccttcccag

SEQ ID NO: 186 - DNA, 2903 bp, Homo sapiens
  CDS (214)..(2547)
cccgagcaggcaccggaccggaattcccgggtcgacccacgcgtccgagtggggaagctgctaacccgacccggattggcgctgaggtggcccgtggggcagggcagatgattctggaccagatgaagcctgaggagccttccagctctaagatagcaggataggagacttctaagattggagctgcagaagacttgccagcccaccagcacaatgtcaggaagccatacacctgcctgtggccctttctcagccctgactccgagcatatggccccaggagatcttggccaagtacacgcagaaggaagagtcagcagagcaaccagagttctactacgatgagtttggtttccgtgtgtacaaggaagaaggtgatgagcctggctccagtctgctggcgaactcccctctgatggaggatgctccacagaggctgcggtggcaggcccacctggagttcacccataaccacgatgtgggggatctcacctgggacaagattgccgtctccctaccccgctctgagaagctccgctccctggtgctggccggcatcccacatggcatgaggccacagctgtggatgcggctctctggggccctgcagaagaagaggaactctgagctgtcctaccgcgagattgtgaagaacagctccaacgatgagaccatcgctgccaagcagatcgagaaggacctgctccgcaccatgcccagcaacgcctgcttcgccagcatgggtagcatcggggtgccccgcctgcgcagggtgctccgggccctggcctggctctacccagagatcggctactgccagggcaccggcatggtggccgcctgcctcctgctgttcctggaggaggaggacgccttctggatgatgtctgccatcatcgaggacctgctccccgcctcctacttcagcaccaccctgctgggtgtccagactgaccagcgggtcctgcgccacctcattgtccagtacctgcctcgcctggacaagctgctccaggagcatgacattgagctgtccctgatcacactgcactggttcctcacggccttcgccagcgtggtggacatcaagctgctcctgcgcatctgggacctgtttttctacgagggctcccgggtgctgttccagctcacgctgggcatgctgcacctcaaggaggaagagctgatccagtcagagaactcggcctccatcttcaacacgctatcggatatcccgtcgcagatggaggacgcggagctgcttctgggggtggccatgcggctggccggctccctcaccgatgtggccgtggagactcagcgccgcaagcacctggcctatctcattgcagaccagggccagctcctgggggccggcaccctcaccaacctctctcaggttgttcgccgcaggacccagcggaggaagtccaccatcactgctctgctcttcggggaggatgacctggaggcactcaaggccaagaacatcaagcagacggaactggtggctgacctccgggaagccatcctgcgcgtggcacgccacttccagtgcacagaccccaaaaactgcagcgtggtgagtcgccagctccctgggctgctaccaaacacggccctaactcctccaacccccttggtgggcctgtgttcactgtggcaggagctgactccagactatagcatggagagccaccagcgggaccacgagaactacgtggcgtgctcacgcagccaccggcgccgagccaaggccctgctggactttgagcggcacgacgacgacgagctgggcttccgcaagaacgacatcatcacaatcgtgtctcagaaggacgagcactgctgggtgggggagctcaacggcctgcgaggctggtttccagccaagttcgtggaagtcctggatgagcgcagcaaagagtactccatcgcgggggatgactcggtgacggagggggtcacagacctcgtgcgagggaccctctgcccggcccttaaggccctgttcgaacatggactgaagaagccatccctgcttgggggcgcctgccacccctggctgtttatcgaggaggctgcaggccgggaggtcgagagagactttgcctccgtgtattcccgtctggtgctctgtaagaccttcaggttggatgaagatggcaaagtcctgaccccggaggagctgctctaccgggctgtgcagtctgtgaacgtgacccacgatgcagtgcatgcacaaatggatgtgaagctccgctcactgatctgcgtggggctcaatgagcaggtgctgcacctgtggctggaggtgctctgctccagcctgcccaccgtggagaagtggtaccagccctggtccttcctgcgcagcccgggctgggtccagatcaagtgtgagctccgagtcctctgctgctttgccttcagcctctcccaggactgggagctccctgcgaagagagaggcgcagcagcccctgaaggagggcgtccgggacatgctggtgaagcaccacctcttcagctgggatgtggacgggtgaccccctcctccccagcccaacctcgggcctgcgtctgaggtggcccaggaccccaagctgcagagcccagggaagagcagctccagagccctggccggggccgcgggatatcaatatcaggctgccccactccacgttccccagcacatcccaggtggtgggagcagagggtaccctgccccaccagggtccttagggatgctctaggccaaaccacagtttgtaccaaaaaccttgtgaggaggtgggggagccatgtctgtgctcaggaagagggaaggggatgggggtggctagtaggctcctggcctctttggtttataaataaactgtgtctgtctttgagaaaaaaaaaa

SEQ ID NO: 187 - DNA, 2989 bp, Homo sapiens
  CDS (214)..(2463)
cccgagcaggcaccggaccggaattcccgggtcgacccacgcgtccgagtggggaagctgctaacccgacccggattggcgctgaggtggcccgtggggcagggcagatgattctggaccagatgaagcctgaggagccttccagctctaagatagcaggataggagacttctaagattggagctgcagaagacttgccagcccaccagcacaatgtcaggaagccatacacctgcctgtggccctttctcagccctgactccgagcatatggccccaggagatcttggccaagtacacgcagaaggaagagtcagcagagcaaccagagttctactacgatgagtttggtttccgtgtgtacaaggaagaaggtgatgagcctggctccagtctgctggcgaactcccctctgatggaggatgctccacagaggctgcggtggcaggcccacctggagttcacccataaccacgatgtgggggatctcacctgggacaagattgccgtctccctaccccgctctgagaagctccgctccctggtgctggccggcatcccacatggcatgaggccacagctgtggatgcggctctctggggccctgcagaagaagaggaactctgagctgtcctaccgcgagattgtgaagaacagctccaacgatgagaccatcgctgccaagcagatcgagaaggacctgctccgcaccatgcccagcaacgcctgcttcgccagcatgggtagcatcggggtgccccgcctgcgcagggtgctccgggccctggcctggctctacccagagatcggctactgccagggcaccggcatggtggccgcctgcctcctgctgttcctggaggaggaggacgccttctggatgatgtctgccatcatcgaggacctgctccccgcctcctacttcagcaccaccctgctgggtgtccagactgaccagcgggtcctgcgccacctcattgtccagtacctgcctcgcctggacaagctgctccaggagcatgacattgagctgtccctgatcacactgcactggttcctcacggccttcgccagcgtggtggacatcaagctgctcctgcgcatctgggacctgtttttctacgagggctcccgggtgctgttccagctcacgctgggcatgctgcacctcaaggaggaagagctgatccagtcagagaactcggcctccatcttcaacacgctatcggatatcccgtcgcagatggaggacgcggagctgcttctgggggtggccatgcggctggccggctccctcaccgatgtggccgtggagactcagcgccgcaagcacctggcctatctcattgcagaccagggccagctcctgggggccggcaccctcaccaacctctctcaggttgttcgccgcaggacccagcggaggaagtccaccatcactgctctgctcttcggggaggatgacctggaggcactcaaggccaagaacatcaagcagacggaactggtggctgacctccgggaagccatcctgcgcgtggcacgccacttccagtgcacagaccccaaaaactgcagcgtggagctgactccagactatagcatggagagccaccagcgggaccacgagaactacgtggcgtgctcacgcagccaccggcgccgagccaaggccctgctggactttgagcggcacgacgacgacgagctgggcttccgcaagaacgacatcatcacaatcgtgtctcagaaggacgagcactgctgggtgggggagctcaacggcctgcgaggctggtttccagccaagttcgtggaagtcctggatgagcgcagcaaagagtactccatcgcgggggatgactcggtgacggagggggtcacagacctcgtgcgagggaccctctgcccggcccttaaggccctgttcgaacatggactgaagaagccatccctgcttgggggcgcctgccacccctggctgtttatcgaggaggctgcaggccgggaggtcgagagagactttgcctccgtgtattcccgtctggtgctctgtaagaccttcaggttggatgaagatggcaaagtcctgaccccggaggagctgctctaccgggctgtgcagtctgtgaacgtgacccacgatgcagtgcatgcacaaatggatgtgaagctccgctcactgatctgcgtggggctcaatgagcaggtgctgcacctgtggctggaggtgctctgctccagcctgcccaccgtggagaagtggtaccagccctggtccttcctgcgcagcccgggctgggtccagatcaagtgtgagctccgagtcctctgctgctttgccttcagcctctcccaggactgggagctccctgcgaagagagaggcgcagcagcccctgaaggagggcgtccgggacatgctggtgaagcaccacctcttcagctgggatgtggacgggtgaccccctcctccccagcccaacctcgggcctgcgtctgaggtggcccaggaccccaagctgcagagcccagggaagagcagctccagagccctggccggggccgcgggatatcaatatcaggctgccccactccacgttccccagcacatccccaggtggtgggagcagagggtaccctgccccaccagggtccttagggatgctctaggccaaaccacagtttgtaccaaaaaccttgtgaggaggtgggggagccatgtctgtgctcaggaagagggaaggggatgggggtggctagtaggctcctggcctctttggtttataaataaactgtgtctgtctttgagaaagcacctacctgtcttctgtgcagctagggctgcagagctgtattcaggtccaaggttctgcccttccttgagtggtctagaaggcactgcgtggcccctcagatgctgggacacaacagacccgggacccagctgtgctacccaccccttccatggactgaataagatggactaac

SEQ ID NO: 188 - DNA, 7515 bp, Homo sapiens
  CDS (91)..(4938)
tctgcggcgctcggagcctcccttgcgatcccacggccgggactgcccggagtgcatgggcgcgggccagggacgctgagcggtcgcgccatggagggcgccgagccccgcgcgcggcccgagcgcctggccgaggccgagacgcgggcggcggacggcgggcgcctggtggaggtgcagctgagcggcggcgccccgtggggcttcaccctgaagggcggccgcgagcacggcgagccgctggtcatcaccaagattgaagagggcagtaaagccgcggcggtcgacaagttactggctggagatgagatcgtcggcatcaatgacattggtctctcagggtttagacaggaagcgatttgcctggtgaaggggtcccataagaccctgaagctggtcgtcaaaaggaggagcgagctgggctggaggcctcactcctggcatgccaccaagttctctgacagccaccccgagctagcggcctccccattcacctccaccagcggctgtccttcctggtccggccgacaccacgcgagttcttcctcccacgacctgtccagttcctgggagcagacgaacctacagcgcaccttagatcacttcagctccttggggagcgttgacagcctggaccacccctccagtcgcctctcggtggccaagtccaacagcagcatcgaccacctgggcagccacagcaagcgcgactcggcctacggctccttctccaccagctctagcactcctgaccacaccttgtccaaagccgacacgtcctccgcagagaacatcctctacactgtgggcctctgggaggctcccaggcagggtggccggcaggcccaggccgcaggcgaccctcagggctcggaggagaagctcagttgtttcccgcccagggtccccggtgacagcggcaaaggccccaggccagagtacaatgccgagcccaagctggctgcccctgggaggtccaattttgggccagtctggtatgttcccgataagaagaaagcaccatcatccccacctcctccccctccccctctccgcagtgacagctttgctgccaccaagagccacgagaaggcccagggccctgtgttctcagaggcggctgcggcacagcactttacggccctggcccaggctcagcctcgtggtgaccggagaccagagctcaccgatcggccttggaggtcagcacacccggggagcctcgggaagggatcgggaggcccgggctgcccacaggaggcccacgcagacggcagctggccgccctccaaggatggagcttccagtaggctgcaggcctctctgtccagctcagatgtgcgcttccctcagtctcctcatagcggccgacaccctcccctatacagcgaccacagccccctctgtgctgacagccttgggcaggagccaggggctgccagcttccagaacgacagccctcctcaggtgagggggctcagcagctgtgaccagaagctggggagcggctggcagggtccccggccctgtgtgcagggagacctgcaagcagcacagctctgggcgggatgctggccttctgacacagcccttggagccctcgagagtcttcccccacccacggtgggccagagcccacgccatcacctacctcagcctgagggtcctccggatgcccgcgagacaggacggtgttacccgctggacaaaggggccgagggctgctccgcgggagcccaggagcctcccagggccagccgtgcagaaaaagccagccagaggctggcagccagcatcacgtgggcagatggggagagcagcaggatctgcccgcaggagacgcccctgttgcactccctgacccaggaggggaagcgccggcctgagagcagtccagaggacagcgccaccagaccgccaccgttcgacgcccacgtgggcaagcccacccgaagaagcgaccgctttgccaccaccctgcggaatgagatccagatgcatagagccaagctgcagaagagccggagcacagtggctctgactgcagcaggggaggcggaggatggcaccggccgctggagggccgggttgggaggtggcacccaggaaggacccctcgctggcacctataaagaccacctgaaagaggcccaagcccgggtcctgagggccacgtccttcaagcgccgcgacttggaccccaacccaggagacctatacccggagtcactggaacaccggatgggggatccagacactgtcccccacttctgggaggcaggcctggcccagccaccctcatctacaagtggcgggccccacccgccccgcatcggaggccggagacggttcacagctgagcagaaattgaagtcctactcggaacctgagaagatgaacgaggtgggcctcacgaggggctacagtcctcaccagcaccccaggacatctgaggatactgtgggcacgtttgctgacaggtggaagttttttgaggaaacgagcaaacctgttccccagaggcctgcccagaagcaagctcttcacggaatcccgagagacaagccagagaggccgcggacagcgggccgcacatgtgagggcacggagccctggtcgcgcaccacctcccttggggacagcctcaacgctcacagcgcagcggagaaggcagggacttcagacctgccgcggaggctcggcacctttgcagagtatcaggcctcttggaaggaacagaggaaacctctggaggccaggagctctgggcgctgccactcagcggatgacatcctggatgtgagcctggacccacaggagaggccgcagcacgttcatgggaggtcccggtcttcaccgtccacagaccactacaagcaggaagcttctgtcgaactgcgaaggcaggcaggggaccccggcgagcccagagaagagcttccctccgcagtccgggccgaggagggacagtccacgccgagacaagcagatgcccagtgtcgggaaggcagcccaggatcacagcagcacccaccgagtcagaaggcaccgaacccacccacattctctgaactatctcactgccggggagccccagagctgccccgggagggccggggccgagcgggaaccctacctcgagattatagatactcggaggagagcaccccagcagacttgggaccccgagcccagagccctggctcacccctgcatgctcgaggacaagactcgtggccagtgagctcagccctgctctccaagaggccagccccacagaggccaccgccacccaagcgcgagcccaggagatacagggccacagacggcgcacctgctgacgcccccgtgggcgtcctcggcaggcccttcccaacgccatcccctgcgtccctggatgtgtatgtggcccgcctgtccctctcccacagcccctctgtgttcagcagtgcccagccccaggacaccccgaaggccactgtctgtgagcgtggaagccagcatgtgggcggggacgcatcacgtcctctgccagaagcactgctccctcccaagcagcagcacctgcgcctgcagacggccaccatggagacctcgcgctccccctcgccccagttcgccccccagaaactgacggacaaacctcccctgctcatccaggatgaggattcaaccagaattgagcgggtgatggacaacaacaccacggtgaagatggtgcccatcaagatcgtgcactcggagagccagccagagaaggagagccgccagagcctggcatgccccgccgagccacctgccctgccccacgggctggagaaagaccagatcaagacgctgagcacatctgagcagttctactcgcgcttctgtctgtacacgcggcagggtgctgagcccgaggccccacatagggcccagccggctgagccccagcccctgggcacccaggtgccccccgagaaagaccgctgcacctcccctccagggctcagctacatgaaggccaaagagaagactgtggaagacctgaagtcggaggagctggccagggagatcgtggggaaggataagtccctggccgacatcctggatcccagtgtgaagatcaaaaccactatggacttgatggaaggcatcttccccaaagacgagcacctcctggaagaagcccagcaacggaggaagctgctccccaaaatcccctctcctagaagcacagaggagaggaaagaggagcccagcgtgcctgcggccgtgtccctggccaccaattctacctactacagcacgtcggcccccaaggcggagctgctgatcaagatgaaggacctgcaggagcagcaggagcacgaagaggattcgggaagcgacttggaccacgacctgtcggtgaagaagcaggagctcatcgagagcatcagccgcaagctgcaggtgctccgggaggcccgcgagagcctgctggaggacgtgcaggccaacaccgtgctgggggccgaggtggaggccatcgtgaaaggcgtctgcaagcccagcgagtttgacaagttccggatgttcattggagacctggacaaagtggtgaacctcctgctgtcgctgtcaggccgcctggcccgggtggagaatgccctcaataatttggacgacggcgcttctcccggtgatcggcaatcactgcttgagaagcagagagtcctgatccagcagcacgaggacgccaaggagctcaaggagaacctggaccgccgcgagcgcatcgtctttgacattttggccaactatctgagcgaggagagcctcgcggactatgagcacttcgtgaagatgaagtcggccctcatcatcgagcagcgggagctggaagataaaatccaccttggtgaagagcagctgaagtgcttattggacagccttcagcccgaaaggggcaaataagagaccagtccccggtggaggaggggcacggggcctccgagctccagctccgttcccaaggatactcgtgaagaccccatctgtgttcatggcctggaaagagacttctcccatagcaaagaggctgttataaaagcaataacttttgtgtttgtgtgggatgatttatttaattttttagtttcccctttgattgctgagagccattttcctttacacataactacacctgacaccaggctctgctggatgtgagtttccactgcatgggctgtgggctgggcctgtggtgcctgccgagtggtcactgtcagtgggaaacccgttgttcctcccgtcttcagatgctgagccaactgcttggacagcagccagcgcgtcatgacgtgcatgagagggggaccctggtgctcatcttctcttgtcattcatccaggcatgggctgccaggttttgtccctgctcgttcaacagtgtgagcatttgtctctgttatctaatgatgttctctgacccagcagaaatcatcatcatgatgatgataatttattaactttttggaagggtgaatagtttcctaatggttaaaaaccaactgtgaaaggaaccacctgtgtggttgggttcactcattctcagattaaattgccacttaaagaaataacgtgcatgctttaaaaaacacagtcacgcaccaagcaggcaaatagctttagtccttctcacctcacatcacagttgttctgcaaagtaaaattttttggttaagagcgtgtccagtagtaatgtgcttgttagctgtttctcaagaccaacagaagattttttcagttactttccccccatgtattttgtatgcatatgattgtccgtgataattggctacttttccattgtttcctccttaaatcgtttagcatggcatgagggccacattccatggacgggaagaccccttcctcttcagaggtcccgtggactacacagctcctgagcttgatctttttctgccatgaagtttaaagattctatgcccatttccttgattgaaatggcaggattctaaagagagcctggtttgttaaaagaaaacactgtcatgctgtcagttcccaattgacaagtcacagactgggagaaaatatttgcaaatcgtgtatctgacaaaaggtttgtgtccaggatgtacaaagaactctcaaaccggatagtaagaaaacaaacagcccaagtgaaaagcaggcaaaagacttgaatagacacttcaccaaagagcatacacgcgtggcaaacaagcacacgaaaagacgttcagccgccgatggcttggttataatttataacttacttatttttatctaataattgtagattcagtgtatttcttcaaaaaatgtttaattaaatgcatgttaatggtgagtgaatcccttgggtgacttcgtgtttaggtcgtattagggcatttgttggatcaacggatcattttaaccctgacttccccttattcccataaaagaagttttccagtggaatggagatttcattttgtcagcagcagtgaccacagccttaccaaagcagacgcgtgcgcgtgcacagatgcacacacacagatgtcttaaaagactagaatccacacttcctgagccagaggggccgtgttgacggtaatgcattctctatagagccaagtccaaactggcaagctcaatgatgcaggcaataaaccgcctttttggcagcctaccaatgccaaaaggataaatgtctttccaaaagtgtgtattcctgttaaattaagctcttgctaacttgaaaaatccctgttctgccagcgaagcttcctcctcctctccagctggtagtcacttgcgtgaatgctggtcagtctgaaaaggtgaagctggctgtgcacttacccccatctttctccctcggggagacgacccaaggaatttcagagtattttgtttggcagagcttttacctgttattctttgccctcaaatacagtattgtggtcattttgatgatatgtgtgtaaaatgtgaataatccaattggtgtctgtactcagccttttgatgtctttttaggactttctcttctacacagcaatacgtcgtgctcgagtatccttgtagcaaagcacatagagccagctgtcctgtcagttcccctgtttgcctctgaaacgtctggttagtggggacccaaagattctagtgagtcaacatccataactctgtatctagttgtattattcatagaaaatcaatctggtgctaatggttggccctggtgttgttgggtggcagctgctccttcgccctcttgtagtgtggctgtggagggctctgcctatggggggtggcctgtggcttgtatccttcagtccaccacagcaaatgtgtgtagatttcatgctcgacacttaccactcacctatcaacagatcatcctgcttgactgtaacaaaataaatagtgtctcttcaagtgaaaaaaaaaaagggcgcccgtttaaagggaacaaattttactcccggtggtggcgacgatattttttttt

SEQ ID NO: 189 - DNA, 2946 bp, Homo sapiens
  CDS (78)..(1856)
agtgccggcgtccgcggctggaatggtgctggctgtgttggtcggtgcctgcgttctgaagcccgagaggagccacaatggagacgccgccgctgcctcccgcatgcacaaagcagggtcatcagaagcctctcgattcaaaagatgataataccgaaaaacactgcccagtgacagtgaatccttggcatatgaagaaagctttcaaagtcatgaacgaattaagaagtcaaaatttgctgtgcgatgtcacaattgtggcagaagacatggaaatttctgctcatagagtggtgctggccgcctgtagtccttattttcatgccatgtttacaggtgagatgagtgagagccgagcaaagagagttagaataaaagaggtagatggctggaccctgaggatgctaattgattatgtttacactgcagaaattcaggttacagaagaaaatgtacaggtacttctcccagcagctggtctcttacagttacaggatgtgaagaagacttgttgtgaatttttggaatcccagcttcaccctgtcaactgcttaggaatccgggcttttgctgatatgcatgcatgtaccgaccttctgaacaaggccaacacctatgcagagcaacattttgcagatgttgtacttagtgaagaatttctcaatcttggcatcgaacaagtgtgcagcttaatctcaagtgacaaacttaccatttcttcagaagagaaggtatttgaagcagtaatagcatgggtgaaccatgacaaggatgtgaggcaagagtttatggcccgactgatggaacatgtacggttacctttgcttcctcgggaatatttagttcagagggttgaagaggaagcattggtcaagaatagcagtgcttgcaaaaattacctgattgaagcaatgaagtaccatttgctgccaacagagcagcgtatattaatgaagagtgtccggacccggctgaggacacccatgaaccttcccaaattgatggtggtggttgggggccaagcaccaaaggctatccggagtgtggaatgctatgactttaaagaacaaaggtggcaccaagtagcagagttgccttccaggaggtgcagagcaggcatggtctacatggctggacttgtttttgctgttggtggctttaatggctcattaagagttcgcactgtagattcctacgaccctgtgaaggaccagtggaccagcgttgctaacatgagagaccggagaagcactttgggagctgctgtgttaaatggattattatacgctgtgggaggctttgatgggagtacaggtttgtcatctgtggaagcatacaacataaagtctaatgagtggtttcatgtagctcccatgaatacaaggaggagcagtgttggtgtgggtgttgttggaggtttgctctatgctgtaggaggttatgatggagcatcacgtcagtatcttagcacagtagaatgctataatgctacaacaaatgagtggacctatatagcagaaatgagcaccaggcggagtggagcaggtgttggtgtgttaaacaatttattgtatgctgtaggaggtcatgatggccctttagtacgaaaaagtgttgaagtatatgatcccaccactaacgcatggagacaggttgcagatatgaacatgtgcagaagaaatgcaggagtttgtgcagttaatggtctgttatatgttgttggaggggatgatggttcctgtaacttggcgtcagtagaatattataacccaacaaccgataaatggacagttgtgtcatcgtgtatgagcacagggagaagttatgcaggggtcacagttattgataaaccattatgagcctgaaggacattttcagcatatttatacatgagaaacagccttcaacaagtatttgtgaagtgactgagaatctagcacttctccacttgtagctgcactttaagtctcagcagaagatacgatcgtctgcctttataggcctcagatactgaagattatttttggtagaagcaccgtgtaggctttttctgcaatgagcagcagctgactgaattttcataagaaacttggactgcaggacttaatctgtagtctttagacaacagttgctttcataaagactagttcttatcaaccttgaatgactacagattattttgtgaaggaggatgaagtaatgtgtgttcttgtaaaattaaattttatctttatttcttctaaaaatctgtataccaggaactgaaaatctttgaacagatattaaaatctacgtaagtatacaaactagttgagggatacactgtttgcttttataaaataactttgattacatgaatataataaattatgtgcatataaatgtgtgtctatatgctttcctttaaatatgtttgaaaagatgtttgaaacttgattatactatttataattggcacagtactttgaattatgccagtactacattgtaaaacagagttgtattttttgatatttaacaatgcttaacactttaaatgccacttctgaggaatggacctggtgtaacacacttgaatatgtgtgatgccaaactttttaaaatacaatataaattatgcttatttattattttctttagtttaatcttggtcatgttttggtgtgtatttttaatttttttcttaaattaacactttggcatgaacattactgcaggtttttgatgaatataatgaatgtatggaattcaattgaatttgcatggtcttcggaattttttctgtgtgtataaatttagctgctattaacagaagagagaactttctgtgagtagccatgtgtgttgatcagatacagtttttctgagatcttcaattaatctcactttaaaaatgaccaaaacatgtctttcttgaattaactttgaataaaagtttgtatatta

SEQ ID NO: 190 - DNA, 1815 bp, Homo sapiens
  CDS (209)..(1063)
ttgaaaccctcgacgccgcctgcaggtaccggtccggaattcccgggtcgacccacgcgtccgcccacgcgtccgcggtcgcccccttgggaaagtacatatctgggagaagcaggcgggtccgcgctcgcactcccgctcctccgcccgaccgcgcgctcgccccgccgctcctgctgcagccccagggcccctcgccgccgccaccatggacgccatcaagaagaagatgcagatgctgaagctcgacaaggagaacgccttggatcgagctgagcaggcggaggccgacaagaaggcggcggaagacaggagcaagcagctggaggaggacatcgcggccaaggagaagttgctgcgggtgtcggaggacgagcgggacaaatactctgaggctctcaaagatgcggaggacagcctcctggccgccgaagaggccgccgccaaggctgaagccgacgtagcttctctgaacagacgcatccagctggttgaggaagagttggatcgtgcccaggagcgtctggcaacagctttgcagaagctggaggaagctgagaaggcagcagatgagagtgagagaggcatgaaagtcattgagagtcgagcccaaaaagatgaagaaaaaatggaaattcaggagatccaactgaaagaggcaaagcacattgctgaagatgccgaccgcaaatatgaagaggtggcccgtaagctggtcatcattgagagcgacctggaacgtgcagaggagcgggctgagctctcagaaggcaaatgtgccgagcttgaagaagaattgaaaactgtgacgaacaacttgaagtcactggaggctcaggctgagaagtactcgcagaaggaagacagatatgaggaagagatcaaggtcctttccgacaagctgaaggaggctgagactcgggctgagtttgcggagaggtcagtaactaaattggagaaaagcattgatgacttagaagagaaagtggctcatgccaaagaagaaaaccttagtatgcatcagatgctggatcagactttactggagttaaacaacatgtgaaaacctccttagctgcgaccacattctttcgttttgttttgttttgtttttaaacacctgcttaccccttaaatgcaatttatttacttttaccactgtcacagaaacatccacaagataccagctaggtcagggggtggggaaaacacatacaaaaaggcaagcccatgtcagggcgatcctggttcaaatgtgccatttcccgggttgatgctgccacactttgtagagagtttagcaacacagtgtgcttagtcagcgtaggaatcctcactaaagcagaagaagttccattcaaagtgccaatgatagagtcaacaggaaggttaatgttggaaacacaatcaggtgtggattggtgctactttgaacaaaaggtccccctgtggtcttttgttcaacattgtacaatgtagaactctgtccaacactaatttattttgtcttgagttttactacaagatgagactatggatcccgcatgcctgaattcactaaagccaagggtctgtaagccacgctgctcttccgagacttccattcctttctgattggcacacgtgcagctcatgacaatctgtaggataacaatcagtgtggatttccactcttttcagtccttcatgttaaagatttagacaccacatacaactggtaaaggacgttttcttgagagttttaactatatgtaaacattgtataatgatatggaataaaatgcacattgtaggacattttctaaaaaaaaaaaa

SEQ ID NO: 191 - DNA, 984 bp, Homo sapiens
  CDS (210)..(830)
attgaaaactgatagcctgcggaaccgcgtccggaattcccgggtcgacccacgcgtccgagtcagaagaacttgatagagagaagaaattaaaagaggatagtccgaggaaaactcctaataaagagagtggtgtgcccagccttcctgtatcgttaacaagcattaaagaggagcccaaagaggccaagcatcctgattctcaatcaatggaggagagcaagctgaaaaatgatgatcgaaagactcctgtgaactggaaggactctcggggaacaagagtggctgtctcctcacccatgagtcagcatcagtcatacatacagtacttgcatgcttatccttacccacagatgtacgaccccagccatcctgcataccgggctgtttctcccgtcctaatgcacagttatcctggggcatatctctctccaggatttcattatcctgtttatgggaagatgtcagggagagaagagacagagaaagtcaataccagccctagcgtcaacacgaaaacaaccactgaatctaaagcactggatttgctccagcagcatgctaaccaataccgcagcaagtctcctgctcctgtggaaaaggctacagctgagcgggaacgggaggcagaaagggaaagggatcgccactcccccttcggccagcggcacctgcacacgcaccaccacacccacgttggcatgggttacccgctaatcccgggtcaatatgacccttttcaaggcttgacctctgctgcccttgttgcctctcagcaggtggctgcccaggcatctgcatctggaatgtttcctggacaaagaagagaataacaagattggacatgtacattgtcatgtgactggatcacatggggaagcgctttatacagacatcagttccatggtgttaatttgaaatgccttaatggcaggcaaaaaccagtcatttcatttttgtaaattacagattttatcacaggag

SEQ ID NO: 192 - DNA, 957 bp, Homo sapiens
  CDS (207)..(839)
  misc_feature (1)...(957): n = a,t,c or g
aattgaacttgcgccggttttcagnatctacgaatcatagatctggaattcgcggccgcttttactgacaagttaccatttattttcttttcggggggaatattagacagagaagaaagctgtgaatgaatttcatttgattaacaatagattggacactctactgatcttgcctttttacaacctctcttccacctgacctttaaatggtgaagggtttcaggaattggcttaaaccttcttccttatctacacttcctctccaatatggaattctcttccccaagctgttggcatggctagttcatttgcattttgggcatttcagctcagctgtcatctcagtgaccagtttttatctgagcatgaatcttgatggctctgcacaagatcctgaaaagagggaatattcttctgtgtgtgtgggcagagaagatgacattaaaaaatctgaaagaatgacagctgttgtccatgatagagaagtggtcattttctaccacaagggagaatatcatgctatggatattcgctgttaccactcaggaggacctttacatttgggagatatagaggattttgatggacgaccgtgtatagtttgcccctggcataaatacaaaattactttggcaacaggagaaggtctgtaccagtctataaaccctaaagatccatcagcaaaacccaagtggtgctccaaaggaataaagcaaaggattcacacagtgacagtagacaacggaaatatttatgtgactctttctaatgaaccttttaagtgtgactctgatttttatgccactggagacttcaaagtaattaagagttcttcctgaaggtcgacacggccgcgaattcggatcctcgagagatctctttttttgggtttggtggggtatcttcatcatcgaatagatagtgtatatacatcatggtaatcgataagcattcaac

SEQ ID NO: 193 - DNA, 666 bp, Homo sapiens
  CDS (98)..(373)
tgcggtaccggtccggaattcccgggtcgacccacgcgtccgcaggaacagccttctcctgcctcctctgcacctggacaactcaactcctgccaagatgtcctgccagcagaaccagcagcagtgccaacccccacccaagtgtccctcacccaagtgtcccccaaagagcccagtacagtgtctgcctccagcttcctctggctgtgccccaagctctgggggctgtggccctagctccgagggcggctgcttcctgaaccaccacaggcgccaccaccgatgccggcgccagaggcccaactcctgtgacaggggcagtggtcagcaaggcgggggctctggctgcggccatggctctggaggctgctgctgacctggatcctgatgctgagacaagcgattttggaggaaacaagaatcccaagggcccaggaaaaccccatcttgatgcatgagttcccagataccctcttctggctttcacaggctgagctaggggttttcctgtggaaggtctgagctctccccagaaggcacttcctgtctgatgtccaggatgtcacatgttcccttacccctgtacctgtgaaggattggcagtgcttgtgcctgacctcatcaaaaaataaagctccttgtcctcattaaaaaaaaaaaaaaaaa

SEQ ID NO: 194 - DNA, 1658 bp, Homo sapiens
  CDS (133)..(1347)
gcgtggcaggatacgctgcgggctctgcgcagcgggagcgggaaggagcccgggcagggcccagaccagcgccgccgggaatgggagaggccggaagctgctggcggagcctgccgcccagcccgagtggggatgctgggggacccacccgccagtcccctgacccggaaccgcactggtgccgccgctagccggctgcccacgtgcctgcaacagtggccacgtggggccctgaggaaacgcctttacaaaggtttgtcccctgcgctgcccagtagggaggaaaaccggaggagagcgcaggaggaaacagtaccggctggaggccggtcttgcaggagcgggggactgctgggggcggggcttggtggtgaccgctggcggggcggggcctggggctcagaggggtgggctttggagatcagagggtcgacgctgcttcgttgcctggactctggtttccgccctggagcaagccggggcctggtcggcagctgggccgccatggagtccacgctgggcgcgggcatcgtgatagccgaggcgctacagaaccagctagcctggctggagaacgtgtggctctggatcacctttctgggcgatcccaagatcctctttctgttctacttccccgcggcctactacgcctcccgccgtgtgggcatcgcggtgctctggatcagcctcatcaccgagtggctcaacctcatcttcaagtgccgctgggtaagggtgatgcctagcctggcttattgcaccttccttttggcggttggcttgtcgcgaatcttcatcttagcacatttccctcaccaggtgctggctggcctaataactggcgctgtcctgggctggctgatgactccccgagtgcctatggagcgggagctaagcttctatgggttgactgcactggccctcatgctaggcaccagcctcatctattggaccctctttacactgggcctggatctttcttggtccatcagcctagccttcaagtggtgtgagcggcctgagtggatacacgtggatagccggccctttgcctccctgagccgtgactcaggggctgccctgggcctgggcattgccttgcactctccctgctatgcccaggtgcgtcgggcacagctgggaaatggccagaagatagcctgccttgtgctggccatggggctgctgggccccctggactggctgggccacccccctcagatcagcctcttctacattttcaatttcctcaagtacaccctctggccatgcctagtcctggccctcgtgccctgggcagtgcacatgttcagtgcccaggaagcaccgcccatccactcttcctgacttcttgtgtgcctccctttcctttccctcccacaaagccaacactctgtgaccaccacactccaggaggcagccccatccccttccagcccctaagtaggccctcccctccctaaatctgcttccgcaccacctggtcttagccccaaagatgggccttctctctcccagataagttggtcctccctctgcctttcctctcaagcccccaaagagcaaaggcaacagcaagaccagcgggttcttgcaacactgtgaggggcagccagggcggccccaataaagcccttgaatactttgaaaaaaaaaaa

SEQ ID NO: 195 - DNA, 1597 bp, Homo sapiens
  CDS (212)..(1009)
gcggcgcccatagaagtcgtacgccgtagcgaccggaccggaattcccgggtcgagccacgcgtccggtgctccctgcagtcaggactctgggaccgcagggggctcccggaccctgactctgcagccgaaccggcacggtttcgtggggacccaggcttgcaaagtgacggtcattttctctttctttctccctcttgagtccttctgagatgatggctctgggcgcagcgggagctacccgggtctttgtcgcgatggtagcggcggctctcggcggccaccctctgctgggagtgagcgccaccttgaactcggttctcaattccaacgctatcaagaacctgcccccaccgctgggcggcgctgcggggcacccaggctctgcagtcagcgccgcgccgggaatcctgtacccgggcgggaataagtaccagaccattgacaactaccagccgtacccgtgcgcagaggacgaggagtgcggcactgatgagtactgcgctagtcccacccgcggaggggacgcgggcgtgcaaatctgtctcgcctgcaggaagcgccgaaaacgctgcatgcgtcacgctatgtgctgccccgggaattactgcaaaaatggaatatgtgtgtcttctgatcaaaatcatttccgaggagaaattgaggaaaccatcactgaaagctttggtaatgatcatagcaccttggatgggtattccagaagaaccaccttgtcttcaaaaatgtatcacaccaaaggacaagaaggttctgtttgtctccggtcatcagactgtgcctcaggattgtgttgtgctagacacttctggtccaagatctgtaaacctgtcctgaaagaaggtcaagtgtgtaccaagcataggagaaaaggctctcatggactagaaatattccagcgttgttactgtggagaaggtctgtcttgccggatacagaaagatcaccatcaagccagtaattcttctaggcttcacacttgtcagagacactaaaccagctatccaaatgcagtgaactccttttatataatagatgctatgaaaaccttttatgaccttcatcaactcaatcctaaggatatacaagttctgtggtttcagttaagcattccaataacaccttccaaaaacctggagtgtaagagctttgtttctttatggaactcccctgtgattgcagtaaattactgtattgtaaattctcagtgtggcacttacctgtaaatgcaatgaaacttttaattatttttctaaaggtgctgcactgcctatttttcctcttgttatgtaaatttttgtacacattgattgttatcttgactgacaaatattctatattgaactgaagtaaatcatttcagcttatagttcttaaaagcataaccctttaccccatttaattctagagtctagaacgcaaggatctcttggaatgacaaatgataggtacctaaaatgtaacatgaaaatactagcttattttctgaaatgtactatcttaatgcttaaattatatttccctttaggctgtgatagtttttgaaataaaatttaacatttaatatcaaaaaaaaaaaa

SEQ ID NO: 196 - DNA, 4457 bp, Homo sapiens
  CDS (1)..(1560)
  misc_feature (1)...(4457): n = a,t,c or g
atgtccaccctctacgacatcagggcccacaaggcgcagctgctccggttcttcgccagctccgactccaacaaggcgctggagcagcggcgcacgctgcacacgcccaagctggagcacctggaccgcgtcctgtacgagtggttcctggggaagcgctccgagggcgtccccgtgtcaggccccatgctcatcgagaaggccaaggacttctacgagcagatgcagctcactgagccctgcgtgttctccggagggtggctttggcgctttaaggccagacacggcattaaaaagctagatgcatccagtgaaaagcagtcagccgaccaccaggccgcggagcagttctgtgcgtttttcaggagcttggctgctgagcacgggctgtccgccgagcaggtttacaacgctgatgagaccggccttttctggcggtgcctgccaaatcccactccggaaggcggggctgtgcctggccccaagcagggcaaggaccggctgaccgtgctgatgtgtgccaacgccacgggctcccacaggctcaagcccttggccatcgggaagtgcagcggtcccagggctttcaaaggcatccagcacctgcccgtcgcctataaggcccaggggaacgcctgggtggacaaggagattttttccgattggttccatcatatctttgtgccctcggtgagagagcacttcagaaccataggtttgccggaagacagcaaagccgttctcttgctggacagctcccgggctcacccgcaggaggccgagctggtgtccagtaacgttttcaccatcttcctgcctgccagcgtggcctcattggtgcagcccatggagcagggcattcggagagatttcatgaggaacttcattaaccctccggtccccctgcagggcccccacgcccgctacaacatgaacgatgccatattcagcgtggcctgtgcctggaacgcagtccctagccacgtcttcaggcgggcctggaggaagctgtggccgtcggttgcgtttgccgaaggctcctcctctgaggaggagttggaggcagagtgcttcccagtgaagccccacaacaagtcctttgcacacatcctggagcttgtgaaggaaggctcctcctgcccgggccagcttcgccagcgccaggccgccagctggggggtagcgggaagggaggcagaagggggacggccccctgctgccacgtcgccagcagaggttgtgtggagttcagaaaagactccgaaagctgaccaggacggcagaggagatcctggtgagggcgaggaggtggcctgggagcaggcggccgtggcctttgacgcagtcctgcgctttgcggagcggcagccatgcttcagtgcgcaggaagtggggcagctgcgggcgctgcgtgccgtgttccggagccagcagcaggtgaggaggcggcgtggtgccctcggggctgtggtcaaggttgaagccctccaggagggccctggtggctgtggggccacagctcagtctcccttgccctgctcatccacagcaggtgacaactgatggcttctctgccctgccctggccactggccctgtttctcccacaccctggagtggcatggtcctgtgccccgaccccacctgaggcaggagggcatgtgcagacactcaagagcccttccaggagtgggtcgcccacgggtgtggctcgggtgcccaggacggtctgtgcccgaggttcctgtcaatacaggttttattttatcacttgccgtgtcatccgaaagtgaggaaatgttttggaagggtccaccctagcctagaacaagccagagccgcaccctggctggaatgggggccaggctgagccgatctggtctcgtgttcgctggctgatcattgcagtatcagagggtggagatgtcagtctgtccacgtggagagaagttgccctccaggccgacaggaggccatgcccaccgcccctggacaggcttcgtctcagaaggctctatctgctgggctggcggccatccccgtgttgggtggaccccgagcacggttgcctgaggtccgatggcccgagagctgggactcagttcttggcctgctagcggctgaacaggccgcacatctcacttcagttgtggcctcattcagcagaatgactctggaaccatcctctgttacccgcagatcctgtcccatgggctctggccccaagatgttggggggccccacggagagttgacttggtagagttcctttctgggaagaaagtaggagtggctgaccaggccctgctcatcacccggatagaggacacggaccctgtgtggtattttggcattttggctcagagtccaatgtaccatgttgcccagaatttcatacttacggcctttacatgaatacgtcttgatcagacattcagagattagtcttaggtttccacgtaagtcactgaaaacagtaaaacaggctgcttagatttctagcagtatgtgtgctcttatccccagctgttagcacgttagtaatacttttggggaggagttgtctgtcctggtcagttttcacagaggcggttgtaagaggatgtggttattttctccatgtctgtagttgctttgcggcatctccatttcacgggcaacactcactgcctgcagctgagattccagaacgccctgtgtccacagtgattagcctcgtctttcagcgagcataaaataggtgcattgtccttttcttttcttgaggcagggtctcgctctgttgaccaggctggagtgaagtggtgtgatcccagctcactgcagcctcgacctccctggcttgagtgatcctcccgccccagcctcctgagtagctgggactagaggcacgcaccaccgcgcctttttattttttttgtagagacagggtctcactgtgttgcccgggctggtcttgaactcttggcctcaagcgatcctccttcctcatccttctaaagtgctgggattacaggtgtgagccacagcactcggcctaaataggtttttcttgctatgttattttcagtgctttgcccttgaattcttttcctctcttaaattcatatcatttggccgagtcagcacgtagtttgcattccagcgtctgctgttgattccactgaaacctctgttctcatgaaggagaggatttggctcgctgtgtgttctcgtactttcacatctctgtagatacaggggcaaaagtcattgctgacagagccctatctatgtcctggaagtgtgtgtttcttgctttgaatgcatgtgtgaagattataaaagccaaatagtttttaaagatctcggtgctgaacgacagtcccagttcccatttgtgtcccacacaggcgaggatcgttgggcctccttagtagccaaaggaactgaggtccagagcagggaatgtgttgcccagtgtcagcatggtctgctctggggtcaggcgtcttgccctggtcctaagccaccccaagccaaggcatgtccctgggcccatttcctctctcgaggtcttgggttccctatttctgatgtgtgtgaaaggaaggcctgtcctctggggtgaccatgaggctcagggggaggagctgccaggcttgagctgggacttggcacctggccagccttttttctatttcattgtaccttgatgggctgtcagttctgaagagaaaaaatacactaggaatccattcttcctccaccattctccctggcagagggaagtgactacacccctatggtgtggacatactgacgctcctccatgaagcagcaaagttctgttgtttcaggagactgtgggccttgaggatgtggtagtgacctcaccagaggagttggcaattcctaagtgctgcctggaggcctctacagagacataatgttggagaacttctgccacatggcagtgctgggtaagacccctctgtccccaccagtgcccttaaggttatgggtgttggtaggtctgtggcctccatttccatgacgatggtgttaaggactgcatgtttgtgtccccccccaaagtttatatgttgaaaccctgacccccaggagggtggtattaggaggtggggcctttgggaggtgactaggcttaggtgagatcgtgagggtggggctcgccgatgagatcgagtccttataagaaaaggaaggaactagagcgaggtcactttgtgctgtgtgagcatacaagaaaactgccatcttcaagctgggtgcagtggctcacgcctgtaatcccagcactggaaggccaaggcattaggattgcatgagtccaggagttcgagaccagcctaggcatgataagaccttattgctaaaaaaaaaaaaaaggaaataaaatagaaaaattgccatctgcaaatngagaaagccnttcagcccgacacccanaantgcc

SEQ ID NO: 197 - DNA, 4147 bp, Homo sapiens
  CDS (163)..(4146)
ctccggaattcccgggtcgacgatttcgtctgtctctcctccgctttgctgagccctcccttctcctctcagttcctagagaccgaccgccgccgccgccgagagagaggagaaggagggggagtggccacagcaggtcctatctggtggtgagtggctgtcatgatctctacagcaccgctctacagcggcgtgcacaactggaccagttctgaccggattcgcatgtgtggcatcaacgaggagagaagagcacctctttctgatgaggagtcaacgacaggcgactgccagcactttggatctcaggagttttgtgtcagcagcagtttttccaaggtggagctcacggcagttggaagtggcagcaatgcccggggggcagacccagatggcagtgctacagaaaaacttgggcacaagtcagaagacaagcctgacgatccccagccaaaaatggactacgctgggaacgtggcagaggctgagggcctcttggtgcccctgagcagcccaggagacgggctcaagcttcccgcatctgacagcgccgaggccagcaacagcagggccgactgctcctggactccactcaacacccaaatgagcaaacaggttgactgctcacccgccggagtaaaggctttggactctcggcaaggtgttggagagaagaatactttcattttggcaactctgggaactggagtccctgtggaggggaccctgcccctggttaccactaacttcagtcctctgccagcccctatctgtccccctgctcccagttcggcctctgtgccccactctgttccagatgcattccaggctcctgtgcccccttcagctccgaccttggttctcgctcccgtccccactccggttctggctcccatgccagcatccacgcctccagcggcccctgcccctccgtctgtgcccatgcccactccaaccccatcttccggcccaccttctacccccaccctcatccccgcctttgctcctacaccggtgcctgcacccaccccagcccccatctttactccagcccctacacccatgcctgctgccacgccagctgccattcccacctctgcacccatcccggcctccttcagtttgagtagagtgtgctttcctgcagctcaggcaccagctatgcaaaaagtccccctgtcctttcagccagggacagtgctgaccccgagccagccgctggtatatatcccgcctccaagctgtgggcagccactcagtgtggccacactgccaaccactctaggggtttcctccactcttacgctccctgtcctgccgtcctacctgcaggacaggtgtctcccaggcgtgctagcctcccccgagctccgttcttacccgtatgcattttctgtggcccggcctctgacttcggattccaagctggtatctctggaggtgaacaggctcccctgcacttccccatccggtagcaccaccacccagcctgcacccgatggggtccctgggcctttggcagatacctcccttgttactgcttctgccaaggtgcttccaactccacagcctctgctgccagcccccagtgggagctcagccccaccgcaccccgccaagatgcccagtggcaccgagcagcaaacagaagggacttccgttaccttctctcctcttaagtcaccgccacagctggaacgagagatggcctctccacctgagtgcagcgagatgccccttgatctgtcctccaagtccaaccgccagaagcttccattgccgaaccagcgcaagacaccccccatgcctgtgttgacccccgtgcacaccagcagcaaggccctcctctccacagtcctgtctaggtctcagcgcacaacccaggctgccggtggcaatgtcacctcctgcctgggctccacttcctcgccctttgtcatctttcccgagatcgtgaggaatggggacccgagcacctgggtgaagaactcaactgcactgatcagcaccattcctggcacctacgtgggagtggccaacccagtgcctgcatccctgctgctgaacaaagaccccaacctgggcctcaaccgtgacccccgccatctccccaagcaggagcccatctccatcattgatcaaggagagcctaagggcactggtgccacgtgtggcaaaaagggcagccaggctggtgctgagggacagccaagcacagtgaaacgatatactccagcccgcattgcccctgggctgccagggtgccaaaccaaggaactctctttgtggaaacccacggggccggcaaatatttatccccggtgttcagtcaatgggaaacctaccagcacccaggtcctgcctgttggctggtccccgtaccaccaggcgtctctgctttccattggcatttccagtgccgggcagctgacccccagtcagggggcgcccatcaggcccaccagcgttgtttcggagttttctggtgtgccatctctcagctccagcgaagccgtgcacggacttcctgaggggcaaccacggcctgggggctccttcgttccagagcaggaccctgttacaaagaacaaaacttgccggattgctgccaagccttatgaagaacaagtcaatcctgtcctcttgaccctcagccctcagactgggaccctggcactgtctgttcagcctagcggtggggacattcgaatgaatcaggggcctgaggaatcagagagccacctctgctctgacagcactcctaagatggaaggcccccagggggcttgtggcctgaagctggcaggagacacgaagcctaagaaccaagtgctggccacctacatgtcccatgagctggtcctggccaccccccagaacctgcctaagatgcctgagctgcctttgctacctcacgacagccaccccaaggaacttatattggacgtggttccgagcagcaggaggggctccagcacagagcgcccacagcttggaagccaggtggatctggggcgagtgaaaatggagaaggtggatggtgatgtggtcttcaatttagccacctgcttccgggctgatggcctcccagtggctccccagaggggccaagctgaagttcgggctaaggccgggcaggctcgagtgaaacaggaaagcgtaggggtctttgcttgcaagaacaagtggcagccagatgatgtgacggaatctctgccgcccaagaagatgaagtgcggcaaagagaaggacagtgaagagcagcagctccagccacaagccaaggccgtggtccggagttcccacagacccaagtgccggaagctgcccagtgacccccaggaatccaccaagaaaagccccaggggggcttcagattcaggaaaagagcacaatggagtcaggggaaagcacaagcaccggaagccgacaaagccggagtcccagtctccaggaaaacgagccgacagccacgaggaaggttccttggaaaagaaagcaaagagcagtttccgtgactttattcctgtggttctgagcacccgcacgcgcagtcagtctgatttaaaggcccgtaagcagaagacttcctcctcccaaagtttggagcaccgcctcaggaacaggaaccttctcttgcccaacaaagtccaggggatctcggattcaccaaacggtttcctcccaaataacctggaagagccagcctgccttgaaaattcagaaaagccatcaggaaaacgaaagtgcaagaccaagcacatggcaaccgtctcagaagaggcaaagggcaaaggtcgttggagccagcagaagacacgatctcccaaatctcccaccccagtgaaacccacagaaccatgtacaccctctaagtcccgaagtgccagctcagaggaggcctcagagtcacctacagcccggcagatccccccagaggcacgtcggctcatagtgaacaaaaatgctggtgagaccctcctgcagagggcggcgcgtcttggctataaggatgttgttctctactgcctccagaaagacagtgaagatgtgaatcaccgtgacaatgctggctacacagccctgcatgaggcttgttcccggggctggaccgacatcctgaacatcctgctggagcacggggccg

SEQ ID NO: 198 - DNA, 3058 bp, Homo sapiens
  CDS (89)..(3058)
  misc_feature (1)...(3058): n = a,t,c or g
ggcgtatttttgtggtagttccttttttcaaatacatacctctgtanaatggagaacgaaattttttactccccctctggagcagttcatgaccagccctttggtcacttgggttaaaacgtttggacctctggccgcaggaaatgggaccaaccttgatgaatatgtggctttggtggatggggtattcttgaaccaggtcatgctccaaattaatcctaaattggagagtcagagagtaaataaaaaagtcaataatgatgcctcacttagaatgcacaatctatccattttggtgagacagataaaattttattaccaggagactttgcagcaattgatcatgatgtcgttgccaaatgtcttaatcattggcaaaaatcccttttctgaacaaggcacagaagaagttaaaaaactgcttttacttttattgggttgtgcagttcagtgtcagaaaaaagaggaatttattgaaagaattcaaggtttagattttgatacaaaagcagcggttgccgcacatattcaagaggtaactcataatcaggaaaatgtgtttgacctgcaatggatggaagtgactgatatgtcgcaggaggacatagaaccactcttgaaaaatatggcattgcatctaaaaagacttatagatgagagagatgaacattcagagactatcatagaactctctgaagagcgggatggtctccattttctaccccatgcctcttcatctgcacagtcaccctgtggttctccaggcatgaagcgaacagaaagtcgacaacatctgtcggtggaactggcagatgctaaagccaagataagaaggcttaggcaggaattggaggaaaagactgagcagttgttggattgtaaacaagaacttgagcaaatggaaatagaactcaaaaggctgcaacaagagaacatgaatttgctttcggatgctcgctctgccagaatgtaccgagatgaattagatgcacttcgagagaaagcagtcagagtcgataagcttgaaagtgaagtcagcagatataaagagagactacatgatattgaattttataaggcaagagttgaggaattaaaagaagacaatcaagttttattagaaacaaaaaccatgttggaagaccaactagagggaactcgtgctcgttctgataaattacatgaattagaaaaagagaacttacaactgaaagctaaacttcatgatatggaaatggaacgagatatggatagaaaaaagattgaagaattaatggaagaaaatatgactttggaaatggcacagaaacaaagtatggatgaatcattacatcttggctgggaactggaacagatatccagaactagtgaactttccgaagcaccccagaaatccctgggccatgaggtgaatgagttgacatcaagtagattattgaagctagagatggaaaatcaaagtttgacaaaaaccgtagaagagcttcggactactgtggattctgtagaaggcaatgcttccaaaatcctgaaaatggaaaaagaaaatcaaaggctcagtaaaaaggttgagattcttgaaaatgagattgttcaagaaaagcaaagtcttcagaattgtcagaatttaagcaaggatctaatgaaggagaaagctcagcttgaaaaaacaatagaaacactgagagaaaattcagagagacagattaagatactggaacaggaaaatgaacatctgaatcaaacagtgtcttccttaaggcagcggtcccagataagtgcagaagcaagagtgaaagacattgaaaaagaaaacaaaattcttcatgaatctatcaaagaaacaagtagcaagctaagcaagattgaatttgaaaaaagacaaattaaaaaagaattggaacattataaagaaaaaggagaacgagctgaagaacttgaaaatgaattgcatcatcttgaaaaagaaaatgaattattacagaaaaaaataactaatttaaaaattacttgtgaaaaaattgaggccttagaacaagaaaattcagagctagaaagagaaaatagaaaattaaaaaaaacattggatagctttaaaaatctgacctttcagttagaatccctagaaaaagagaattcccaacttgatgaggaaaacttagaactgcgaaggaatgtagaatctttgaagtgtgcaagcatgaaaatggctcagctacagctagaaaacaaagaactggaaagtgaaaaagagcaacttaagaagggtttggagctcctgaaagcatctttcaagaaaacagaacgcttagaagttagctaccagggtttagatatagaaaatcaaagactgcaaaaaactttagagaacagcaataaaaaaatccagcaattagagagtgaactacaagacttagagatggaaaatcaaacattgcagaaaaacctagaagaactaaaaatatctagcaaaagactagaacagctggaaaaagaaaataaatcattagagcaagagacttctcaactggaaaaggataagaaacaattggagaaggaaaataagagactccgacaacaagcagaaattaaagataccacattagaagaaaataatgtgaagattggaaatttggaaaaagaaaacaaaaccctatccaaagaaattggtatatataaagaatcttgtgtccgtctgaaagaactagaaaaagaaaataaggagcttgtgaaaagagcaactattgatataaaaacgttggttacactacgtgaggatttggtgagtgaaaagttgaagacccaacagatgaacaatgatctcgaaaaattaactcatgagcttgagaagatagggttaaataaggagcgactcttacatgatgaacaaagtactgatgacagtaggtataaacttttggaatcaaaattagaatccactcttaagaagtctcttgaaataaaagaagaaaaaattgctgctttagaagctcgattagaagaatccacgaattataaccagcaattgcgccaagaacttaaaacagtgaaaaaaaaa

SEQ ID NO: 199 - DNA, 5198 bp, Homo sapiens
  CDS (104)..(2560)
gtctgacgtaccggtccggaattcccgggtcgacccacgcgtccgaggcttttggctgcatctcacactgctcggagcctccctgccggctgcgctgggatggatggacccaggaaccagcagaggcccggatgtgggtgtgggggagtcacaggcagaggagcccagaagctttgaagtcacaagaagagaagggctttccagccacaacgagctgctggcctcctgcgggaagaagttctgcagccgagggagccggtgcgtgctcagcaggaagacaggggagcccgaatgccagtgcctggaggcatgcaggcccagctacgtgcctgtgtgcggctctgatgggaggttttatgaaaaccactgtaagctccaccgtgctgcttgcctcctgggaaagaggatcaccgtcatccacagcaaggactgtttcctcaaaggtgacacgtgcaccatggccggctacgcccgcttgaagaatgtccttctggcactccagacccgtctgcagccactccaagaaggagacagcagacaagaccctgcctcccagaagcgcctcctggtggaatctctgttcagggacttagatgcagatggcaatggccacctcagcagctccgaactggctcagcatgtgctgaagaagcaggacctggatgaagacttacttggttgctcaccaggtgacctcctccgatttgacgattacaacagtgacagctccctgaccctccgcgagttctacatggccttccaagtggttcagctcagcctcgcccccgaggacagggtcagtgtgaccacagtgaccgtggggctgagcacagtgctgacctgcgccgtccatggagacctgaggccaccaatcatctggaagcgcaacgggctcaccctgaacttcctggacttggaagacatcaatgactttggagaggatgattccctgtacatcaccaaggtgaccaccatccacatgggcaattacacctgccatgcttccggccacgagcagctgttccagacccacgtcctgcaggtgaatgtgccgccagtcatccgtgtctatccagagagccaggcacaggagcctggagtggcagccagcctaagatgccatgctgagggcattcccatgcccagaatcacttggctgaaaaacggcgtggatgtctcaactcagatgtccaaacagctctcccttttagccaatgggagcgaactccacatcagcagtgttcggtatgaagacacaggggcatacacctgcattgccaaaaatgaagtgggtgtggatgaagatatctcctcgctcttcattgaagactcagctagaaagacccttgcaaacatcctgtggcgagaggaaggcctcagcgtgggaaacatgttctatgtcttctccgacgacggtatcatcgtcatccatcctgtggactgtgagatccagaggcacctcaaacccacggaaaagattttcatgagctatgaagaaatctgtcctcaaagagaaaaaaatgcaacccagccctgccagtgggtatctgcagtcaatgtccggaaccggtacatctatgtggcccagccagcactgagcagagtccttgtggtcgacatccaagcccagaaagtcctacagtccataggtgtggaccctctgccggctaagctgtcctatgacaagtcacatgaccaagtgtgggtcctgagctggggggacgtgcacaagtcccgaccaagtctccaggtgatcacagaagccagcaccggccagagccagcacctcatccgcacaccctttgcaggagtggatgatttcttcattcccccaacaaacctcatcatcaaccacatcaggtttggcttcatcttcaacaagtctgatcctgcagtccacaaggtggacctggaaacaatgatgcccctcaagaccatcggcctgcaccaccatggctgcgtgccccaggccatggcacacacccacctgggcggctacttcttcatccagtgccgacaggacagccccgcctctgctgcccgacagctgctcgttgacagtgtcacagactctgtgcttggccccaatggtgatgtaacaggcaccccacacacatcccccgacgggcgcttcatagtcagtgctgcagctgacagcccctggctgcacgtgcaggagatcacagtgcggggcgagatccagaccctgtatgacctgcaaataaactcgggcatctcagacttggccttccagcgctccttcactgaaagcaatcaatacaacatctacgcggctctgcacacggagccggacctgctgttcctggagctgtccacggggaaggtgggcatgctgaagaacttaaaggagccacccgcagggccagctcagccctgggggggtacccacagaatcatgagggacagtgggctgtttggacagtacctcctcacaccagcccgagagtcactgttcctcatcaatgggagacaaaacacgctgcggtgtgaggtgtcaggtataaagggggggaccacagtggtgtgggtgggtgaggtatgaagggcccagagcagagccctgggccaaggaacaccccctagtcctgacactgcagcctcaagcaggtacgctgtacatttttacagacaaaagcaaaaacctgtactcgctttgtggttcaacactggtctccttgcaagtttcctagtataaggtatgcgctgctaccaagattggggttttttcgttaggaagtatgatttatgccttgagctacgatgagaacatatgctgctgtgtaaagggatcatttctgtgccaagctgcacaccgagtgacctggggacatcatggaaccaagggatcctgctctccaagcagacacctctgtcagttgccttcacatagtcattgtcccttactgccagacccagccagactttgccctgacggagtggcccggaagcagaggccgaccaggagcaggggcctccctcccgaactgaaagcccatccgtcctcgcgtgggaccgcatcttctccctcgcagctgcttcttgcttttctttccatttgacttgctgtaagcctgagggagagccaacaagacttactgcatcttgggggatggggaaatcactcactttattttggaaatttttgattaaaaaaaaattttataatctcaaatgctagtaagcagaaagatgctctccgaggtccaactatatccttccctgccttaggccgagtctcgggggtggtcacaaccccacatcccacagccagaaagaacaatggtcatctgagaatactggccctgtcgactattgccaccctgcttctccaagagcagaccaggccacctcatccgtaaggactcggttctgtgttgggaccccaaaaaaccagaacaagttctgtgtgcctcctttcagcacagaagggagacatctcattagtcaggtctggtaccccagattcagggcagactgggcttgcctggcaaggtatgggtggcctccaggctcaatgcagaaaccccaaggacacgagtggggccaggtgagttcctgaagctataccttttcaaaacagattttgttttcctacctgtggcccatccactcctctctggtaccccatccccgcatcagcactgcagagagaacacatttcggcgagggttttcttacccacattccccaatcaatacacacacactgcagaacccagaacagaaggccacaggctggcactactgcattctccttatgtgtctcaggctgtggtgactctcacatgggcatcgaagaagtacaacccacatagccctctggagaccgcctagatcagagactcagcaaaaacaggctcgccttccctctcccacatatgagtggaacttacatgtgtcctggtttgaatgatcattttgcaagccacacgggttgggagaggtggtctcaccacagacgtctttgctaatttggccaccttcacctactgacatgaccaggattttcctttgccattaaggaatgaactctttcaaggagaggaaaccctagactctgtgtcactctcaacacacacagctcctttcactcctgcctgactgccaagccacctgcatcccccgccccagatctcatgagatcaatcacttgtatgtctcacgcaacttggtccaccaaacgcctgtcccctgtaactcctaggggtgcgcctagacaggtacgtctgttttttattttaaaagatatgctatgtagatataagttgaggaagctcacctcaaaagcctagaatgcagtttcacagtagctgggatgcatggatgacccatctcacccctttttttttcctgcctcaatatcttgatatgttatgtttactcccaatctcccatttttaccactaaaattctccaactttcataaacttttttttggaaaaatttccattgtatcagcccctgacagaaaaaggatctctgagcctaaaggaggaaaagtcccaccaactaccagaccagaacacgagcccctctgggcagcaggattcctaagtcaaagaccagtttgacccaaactggccttttaaaataatcaggagtgacagagtcaacttctgcagcacctgcttctcccccactgtcccttccatcttggaatgtgtctaaaaaagcatagctgccctttgctgtcctcagagtgcatttcctggagacggcaggcttaggtctcactgacagcatgccagacacaactgaatcgaagcaggcctgaagcctaggtcagggtttcaggagtccagccccaggaggcaaagtcaccaatgcagggaggtaaatgccttttggcaggaaaaccaatagagttggttgggtggggagtcaggggtgggaggagaaggaggaagaggaggaaggccagactggcctgccctttctcccatacttcaccccagcagaggttcatgggacacagttggaaagccactgggaggaaatgcctcactacaggggggcctcctgtagcaagcccagccggtaatcctcctaatgaacccacaaggtcaattcacaactgatatcttagctattaaagaagtactgactttaccaaaagaatcatcaagaaagctatttatataaaccccctcagtcattttgaaataaaattaattttac

SEQ ID NO: 200 - DNA, 3071 bp, Homo sapiens
  CDS (133)..(2643)
ggcgctggctggcaggtgtcgctaaccggacggtggtcgccagggcgagaggcgggagccggagaggtgaggcaggacccgggctccactgccgcctctccgagctcttgtgacgcggacctcagtgccaggatggctcggggcgagcggcggcgccgcgcagtgccggcagagggagtgcggacagccgagagggcggctcggggaggccccgggcgacgggacggccggggcggcgggccgcgtagcacggctggaggagtggctctggccgtcgtggtcctgtctttggccctgggtatgtcggggcgctgggtgctggcgtggtaccgtgcgcggcgggcggtcacgctgcactccgcgcctcctgtgttgcctgccgactcctccagccccgccgtggccccggacctcttctggggaacctaccgccctcacgtctacttcggcatgaagacccgcagcccgaagcccctcctcaccggactgatgtgggcgcagcagggcaccaccccggggactcctaagctcaggcacacgtgtgagcagggggacggtgtgggtccctatggctgggagttccacgacggcctctccttcgggcgccaacacatccaggatggggccttaaggctcaccactgagttcgtcaagaggcctgggggtcagcacggaggggactggagctggagagtgactgtagagcctcaggactcaggtacttctgccctccctttggtctccctgttcttctatgtggtgacagatggcaaggaagtcctactaccagaggttggggccaaggggcagttgaagtttatcagtgggcacaccagtgaacttggtgacttccgctttacacttttgccaccaaccagtccaggggatacagcccccaagtatggcagctacaatgtcttctggacctccaacccaggactgcccctgctgacagagatggtaaagagtcgcctaaatagctggtttcagcatcggcccccaggggcctcccctgaacgctacctcggcttgccaggatccctgaagtgggaggacagaggtccaagtgggcaagggcaggggcagttcttgatacagcaggtgaccctgaaaattcccatttccatagagtttgtgtttgaatcaggcagtgcccaggcaggaggaaatcaagccctgccaagactggcaggcagtctactgacccaggccctggagagccatgctgaaggctttagagagcgctttgagaagaccttccagctgaaggagaagggcctgagctctggcgagcaggttttgggtcaggctgccctcagcggcctccttggtggaattggctacttctacggacaagggctggtattgccagacatcggggtggaagggtctgagcagaaggtggacccagccctctttccacccgtacctctttttacagcagtgccctcccggtcattcttcccacgaggcttcctttgggatgaaggctttcaccagctggtggttcagcggtgggatccctccctcacccgggaagcccttggccactggctggggctgctaaatgctgatggctggattgggagggagcagatactgggggatgaggcccgagcccgggtgcctccagaattcctagtacaacgagcagtccacgccaaccccccaaccctacttttgcctgtagcccatatgctagaggttggtgaccctgacgacttggctttcctccgaaaggccttgccccgcctgcatgcctggttttcctggctccatcagagccaggcaggcccactgccactatcttaccgctggcggggacgggaccctgccttaccaaccttactgaaccccaagaccctaccctctgggctggatgactacccccgggcttcacacccttcagtaaccgagcggcacctggacctgcgatgttgggtggcactgggtgcccgtgtgctgacgcggctggcagagcatctgggtgaggctgaggtagctgctgagctgggcccactggctgcctcactggaggcagcagagagcctggatgagctgcactgggccccagagctaggagtctttgcagactttgggaaccacacaaaagcagtacagctgaagcccaggccccctcaggggctcgttcgggtggtgggtcggccccaacctcaactgcagtatgtagatgctcttggctatgtcagtctttttcccttgctgctgcgactgctggaccccacctcatcccgccttgggcccctgctggacattctagccgacagccgccatctctggagcccctttggtttacgctcccttgcagcctccagctccttttatggccagcgcaattcagagcatgatcccccctactggcggggtgctgtgtggctcaatgtcaactacctggctttgggagcactccaccactatgggcatctggagggtcctcaccaggctcgggctgccaaactccacggtgagctccgtgccaacgtggtaggcaatgtatggcgccagtaccaggctacaggctttctttgggagcagtacagtgaccgcgatgggcgaggcatgggctgccgccctttccacggctggaccagccttgtcttactggccatggctgaagactactgaagggagggagaggaggggagccaagacactcatgccactctggctctgaaggacaagggacaaaggcttctggcttttgcccccagccccttggataccagtaattcaaaccttcctcatttcatctcaggtgtctccttgctgtcatcccacatagccctggggtgaatgtgaatccagagtctatttttctaaataaattggaaaaaagcaaacctaaagaagcaaaaatggggggggcccctttaaagggaatgagcttattgtcggggctggggcgacctgaagttttttattaggcccccgagaaacaagtattggggcggggttttaaaaaaggtgagataggaaaaaccgcgggtgtccccactttaaggcctctgagcaagacacctgggtgcacgggttgggagcttgcaggagat

SEQ ID NO: 201 - DNA, 5236 bp, Homo sapiens
  CDS (93)..(4022)
aagctggtacgcctgcaggtaccggtccggaattcccgggtcgacgatttcgtggcaaggggcggccgggcgcggccgagctgccatcagtcatgctcttaaacggggactgcccagagagcctgaagaaggaggcggcggcggccgagccacccagggaaaatgggcttgacgaggccggcccgggagatgagaccaccggccaggaagccattgtcattcaggacacgggcttttctgtgaagatcctcgcccctgggatcgagcccttctccctgcaggtgtccccccaggagatggtgcaggagattcaccaggtgctcatggaccgggaggacacgtgtcaccgcacctgcttctcactgcacctggatggcaacgtgctggaccacttctcggagctgcgcagcgtcgaggggctgcaggagggctctgtgctgcgtgtggtggaagagccgtacacggtgcgtgaggcccgcatccacgtgcgccatgtccgagacctgctcaagagcctggacccatccgatgccttcaacggggttgactgcaactccttgtccttcctgagtgtcttcaccgacggcgacctgggagacagcgggaagcggaagaagggcttggagatggaccccatcgactgcacaccacccgagtacatcctgccagggagccgggagcggccactgtgtcccctgcagccccaaaaccgtgactggaagcccttgcagtgcctgaaagtactcaccatgagcggatggaacccgcccccggggaaccggaagatgcacggggacctcatgtacctgtttgtgatcacagccgaggaccggcaagtcagcatcaccgcgtccacacggggcttttacctgaatcagtccacagcttatcacttcaaccccaagcccgccagcccccgcttcctaagccattccctagtggagctgctcaaccagatcagcccgaccttcaagaagaacttcgctgtgctgcagaagaaaagggtccagcgccacccgttcgagaggatcgccaccccattccaggtgtacagctggacagccccccaggcggagcatgccatggattgcgtgcgtgcagaggacgcctacacctcgaggctgggctatgaggagcacattcctggacagacccgagactggaatgaggagctgcagacgacgagggagctgcctcgcaagaacctgcctgagcggctgctccgagaaagggccatattcaaggtgcacagcgacttcaccgcggcagccaccaggggcgccatggccgtcattgacggcaacgtgatggccatcaaccccagcgaggagaccaagatgcagatgttcatctggaacaacatcttcttcagcctgggcttcgacgtccgagaccactacaaggacttcgggggggacgtggcggcctacgtggcgcccaccaacgacctgaatggcgtccgcacgtacaacgcggtggacgtggaggggctgtacacgctgggcacggtggtggtggattaccgcggctaccgggtcacggcccagtccatcatccccggcatcctggagcgggaccaggagcagagcgtcatctacggctccatcgacttcggcaagaccgtggtgtcacacccgcggtacctggagctgctggagcgcacgagtcggcccctcaagatcctgcggcaccaggtgctcaacgaccgtgacgaggaggtggagctctgctcctcggtcgagtgcaagggcatcattggcaacgacgggcgccactacatcctcgacctgctgcgcaccttccccccggacctcaacttcctgcccgtgcctggcgaggagctgcctgaggaatgcgcccgcgccggcttcccccgcgcccaccggcacaagctctgctgcctgcgccaggagctggtggacgccttcgtggagcacaggtacctcctctttatgaagctggccgccttgcagctgatgcagcagaacgccagccagctggagaccccctcctccctggaaaatggtggtccttcctccttggagtccaagtctgaggatcctccaggacaggaggcgggaagtgaggaggagggtagcagcgccagcggcctggccaaggtgaaggagctggcagagaccatcgccgcagacgacggcacagaccctcggagccgggaggtgatccgcaacgcgtgcaaggcggtcggctccatcagcagcaccgccttcgacattcgcttcaatcctgacatcttctcaccaggggttcgtttccctgagtcctgccaggatgaagttcgggaccagaagcagctgctgaaggacgcggctgccttcctgctctcctgccagatccctggcttggtgaaggactgcatggagcacgcggtcctgcccgtggacggggcaacgctggcagaggtgatgcgccagcggggcatcaacatgcgctacctgggcaaggtgctggagctggtgctgcggagcccggcccgccaccagctggaccacgtctttaaaatcggcattggagaactcatcacccgctcggccaagcacatcttcaagacgtacttacagggagtcgagctctccggcctctcagccgccatcagccacttcctgaactgcttcctgagctcctacccaaaccccgtggcccacctgcccgccgacgagctggtctccaagaagcggaataagaggaggaaaaaccggcccccgggggctgcagataacacagcctgggctgtcatgaccccccaggagctctggaagaacatctgccaggaggccaagaactactttgacttcgacctcgagtgtgagaccgtggaccaggctgtggagacctacggcctgcagaagataacgctcctgcgggagatctcgctgaaaacagggatccaggtcctgctgaaggagtacagcttcgacagtcgccacaagcccgcgttcaccgaggaggacgtgctcaacatcttccccgtggtcaagcacgtcaaccccaaggcctcggatgccttccatttcttccagagcgggcaggccaaagtgcagcagggcttcctgaaggagggctgtgagctcatcaatgaggccctgaacctgtttaacaacgtctacggagccatgcacgtggagacctgcgcctgcctgcgcctcctcgcccgcctccactacatcatgggcgactacgcagaggccctgagtaaccagcagaaggcggtgctgatgagcgagcgggtgatgggcaccgagcaccccaacaccatccaggaatacatgcacctggccctgtactgcttcgccagcagccagctgtccaccgccctgagcctgctgtaccgcgcccgctacctcatgctgctggtgttcggggaagaccaccccgagatggcgctgctggacaacaacatcgggctggtgctgcacggggtgatggagtacgacctgtcgctgcgcttcctggagaacgcgctggccgtcagcaccaagtaccacgggcccaaggccctcaaggtggccctcagccaccaccttgtcgcccgagtctacgagagcaaagctgagttccggtcggccctgcagcacgagaaggagggttacaccatctacaagacgcagctgggcgaggaccatgagaagaccaaggaaagctccgagtacctcaagtgcctgacccagcaggccgtggccctgcagcgcaccatgaacgagatctaccgcaacggctccagcgccaacatcccgcccctcaagttcacggcccccagcatggccagcgtcttggagcagctgaacgtcattaacggcatcctcttcattcctctcagccaaaaagacctggagaatctgaaagccgaggtggcgcggcggcaccagctccaggaggccagcagaaacagggatagagccgaggagcccatggctaccgagcccgcgccagcgggggccccaggagacctgggctcccagcccccggctgccaaggacccttctccgagcgtgcagggatagagagggagccagacggacagccagccagcggccccgtcaccagggagcccgactgcgggagaagggggcgagcctgcgggcggaagaggaagcaaggccctcttcctccacgtctcaccccaccccacccccgtgtcctcctgggagcctggcctgcctgccccgcagaaggtgtttttgcgctggttcaatgaatagatgatgcagaggccccattggagacacgtgaatggcgtgtgcggccatcagttcccggctggggggcaggtgttgcttcggcccccgccctccggccggcgtgtgcgagtgcgcccctggctgtgagtgttgaccgttcctctcccctgtacatagcccgagccagtcctgagtgggtgactcctgagtgggtgacgcgcagacgggatttctcaggtcatttgtatggtcgacatgatggctgctgctttggctgccaccacccccgggcccagcctgtctgaaagttcagggtttaggccgaaaaacccggtggggaggggtggggagccggagctctgtggcggggctggagggctggggtgcactttagtttggggcgggacgggagccgccgttgtgactggcgtggtctggctgctgctcccgaacggaggggtcggggttggcttgctgggccctcagagcccagtgggtggctctgactcggctccctactccctgcacccagctgggcgcagccttggggcctgcggtctgaatgtatccctcccctcagttttaacctgagctgccgaacgcacagtgggccgggggcgaggctgggggaagcggggcccaattacggatcccgggagttacaggtgccgacgtgatgtcgcttctctggtgcccagctcccttcctggtctgagactagctctgggggtggcgggggcccccacacgctgctcccgctccaccctgcccgtgctgctgctctgtgcctgctgtcagagccctggtgggggaggatgtggccaccctgagacccggaggagacgggcgtctgcctgggtttgcggagagccgcttatgggtgtggtccgtccagacaccttgtttcaagggggatgggcgtgagcgggcaagcagagcatccccaccgctgagcaagaactttttcttgtttttaaaccatcacgtcctcatttcacattggaataaagtgagtttttgaaacctgaaaaaaaaaa

SEQ ID NO: 202 - DNA, 5007 bp, Homo sapiens
  CDS (437)..(4057)
gggagaggaatcgtatctccatatttcttctttcagccccaatccaagggttgtagctggaactttccatcagttcttcctttctttttcctctctaagcctttgccttgctctgtcacagtgaagtcagccagagcagggctgttaaactctgtgaaatttgtcataagggtgtcaggtatttcttactggcttccaaagaaacatagataaagaaatctttcctgtggcttcccttggcaggctgcattcagaaggtctctcagttgaagaaagagcttggaggacaacagcacaacaggagagtaaaagatgccccagggctgaggcctccgctcaggcagccgcatctggggtcaatcatactcaccttgcccgggccatgctccagcaaaatcaagctgttttcttttgaaagttcaaactcatcaagattatgctgctcactcttatcattctgttgccagtagtttcaaaatttagttttgttagtctctcagcaccgcagcactggagctgtcctgaaggtactctcgcaggaaatgggaattctacttgtgtgggtcctgcacccttcttaattttctcccatggaaatagtatctttaggattgacacagaaggaaccaattatgagcaattggtggtggatgctggtgtctcagtgatcatggattttcattataatgagaaaagaatctattgggtggatttagaaagacaacttttgcaaagagtttttctgaatgggtcaaggcaagagagagtatgtaatatagagaaaaatgtttctggaatggcaataaattggataaatgaagaagttatttggtcaaatcaacaggaaggaatcattacagtaacagatatgaaaggaaataattcccacattcttttaagtgctttaaaatatcctgcaaatgtagcagttgatccagtagaaaggtttatattttggtcttcagaggtggctggaagcctttatagagcagatctcgatggtgtgggagtgaaggctctgttggagacatcagagaaaataacagctgtgtcattggatgtgcttgataagcggctgttttggattcagtacaacagagaaggaagcaattctcttatttgctcctgtgattatgatggaggttctgtccacattagtaaacatccaacacagcataatttgtttgcaatgtccctttttggtgaccgtatcttctattcaacatggaaaatgaagacaatttggatagccaacaaacacactggaaaggacatggttagaattaacctccattcatcatttgtaccacttggtgaactgaaagtagtgcatccacttgcacaacccaaggcagaagatgacacttgggagcctgagcagaaactttgcaaattgaggaaaggaaactgcagcagcactgtgtgtgggcaagacctccagtcacacttgtgcatgtgtgcagagggatacgccctaagtcgagaccggaagtactgtgaagatgttaatgaatgtgctttttggaatcatggctgtactcttgggtgtaaaaacacccctggatcctattactgcacgtgccctgtaggatttgttctgcttcctgatgggaaacgatgtcatcaacttgtttcctgtccacgcaatgtgtctgaatgcagccatgactgtgttctgacatcagaaggtcccttatgtttctgtcctgaaggctcagtgcttgagagagatgggaaaacatgtagcggttgttcctcacccgataatggtggatgtagccagctctgcgttcctcttagcccagtatcctgggaatgtgattgctttcctgggtatgacctacaactggatgaaaaaagctgtgcagcttcaggaccacaaccatttttgctgtttgccaattctcaagatattcgacacatgcattttgatggaacagactatggaactctgctcagccagcagatgggaatggtttatgccctagatcatgaccctgtggaaaataagatatactttgcccatacagccctgaagtggatagagagagctaatatggatggttcccagcgagaaaggcttattgaggaaggagtagatgtgccagaaggtcttgctgtggactggattggccgtagattctattggacagacagagggaaatctctgattggaaggagtgatttaaatgggaaacgttccaaaataatcactaaggagaacatctctcaaccacgaggaattgctgttcatccaatggccaagagattattctggactgatacagggattaatccacgaattgaaagttcttccctccaaggccttggccgtctggttatagccagctctgatctaatctggcccagtggaataacgattgacttcttaactgacaagttgtactggtgcgatgccaagcagtctgtgattgaaatggccaatctggatggttcaaaacgccgaagacttacccagaatgatgtaggtcacccatttgctgtagcagtgtttgaggattatgtgtggttctcagattgggctatgccatcagtaataagagtaaacaagaggactggcaaagatagagtacgtctccaaggcagcatgctgaagccctcatcactggttgtggttcatccattggcaaaaccaggagcagatccctgcttatatcaaaacggaggctgtgaacatatttgcaaaaagaggcttggaactgcttggtgttcgtgtcgtgaaggttttatgaaagcctcagatgggaaaacgtgtctggctctggatggtcatcagctgttggcaggtggtgaagttgatctaaagaaccaagtaacaccattggacatcttgtccaagactagagtgtcagaagataacattacagaatctcaacacatgctagtggctgaaatcatggtgtcagatcaagatgactgtgctcctgtgggatgcagcatgtatgctcggtgtatttcagagggagaggatgccacatgtcagtgtttgaaaggatttgctggggatggaaaactatgttctgatatagatgaatgtgagatgggtgtcccagtgtgcccccctgcctcctccaagtgcatcaacaccgaaggtggttatgtctgccggtgctcagaaggctaccaaggagatgggattcactgtcttgatattgatgagtgccaactgggggtgcacagctgtggagagaatgccagctgcacaaatacagagggaggctatacctgcatgtgtgctggacgcctgtctgaaccaggactgatttgccctgactctactccaccccctcacctcagggaagatgaccaccactattccgtaagaaatagtgactctgaatgtcccctgtcccacgatgggtactgcctccatgatggtgtgtgcatgtatattgaagcattggacaagtatgcatgcaactgtgttgttggctacatcggggagcgatgtcagtaccgagacctgaagtggtgggaactgcgccacgctggccacgggcagcagcagaaggtcatcgtggtggctgtctgcgtggtggtgcttgtcatgctgctcctcctgagcctgtggggggcccactactacaggactcagaagctgctatcgaaaaacccaaagaatccttatgaggagtcgagcagagatgtgaggagtcgcaggcctgctgacactgaggatgggatgtcctcttgccctcaaccttggtttgtggttataaaagaacaccaagacctcaagaatgggggtcaaccagtggctggtgaggatggccaggcagcagatgggtcaatgcaaccaacttcatggaggcaggagccccagttatgtggaatgggcacagagcaaggctgctggattccagtatccagtgataagggctcctgtccccaggtaatggagcgaagctttcatatgccctcctatgggacacagacccttgaagggggtgtcgagaagccccattctctcctatcagctaacccattatggcaacaaagggccctggacccaccacaccaaatggagctgactcagtgaaaactggaattaaaaggaaagtcaagaagaatgaactatgtcgatgcacagtatcttttctttcaaaagtagagcaaaactataggttttggttccacaatctctacgactaatcacctactcaatgcctggagacagatacgtagttgtgcttttgtttgctcttttaagcagtctcactgcagtcttatttccaagtaagagtactgggagaatcactaggtaacttattagaaacccaaattgggacaacagtgctttgtaaattgtgttgtcttcagcagtcaatacaaatagatttttgtttttgttgttcctgcagccccagaagaaattaggggttaaagcagacagtcacactggtttggtcagttacaaagtaatttctttgatctggacagaacatttatatcagtttcatgaaatgattggaatattacaataccgttaagatacagtgtaggcatttaactcctcattggcgtggtccatgctgatgattttgcaaaatgagttgtgatgaatcaatgaaaaatgtaatttagaaactgatttcttcagaattagatggcttattttttaaaatatttgaatgaaaacattttatttttaaaatattacacaggaggccttcggagtttcttagtcattactgtccttttcccctacagaattttccctcttggtgtgattgcacagaatttgtatgtattttcagttacaagattgtaagtaaattgcctgatttgttttcattatagacaacgatgaatttcttctaattatttaaataaaatcaccaaaaacataaacattttattgtatgcctgattaagtagttaattatagtctaaggcagtactagagttgaaccataatgatttgtcaagcttgctgattgttcttgtattcgatattttttctttttcccgagagagataataacc

SEQ ID NO: 203 - DNA, 1073 bp, Homo sapiens
  CDS (613)..(864)
  misc_feature (1)...(1073): n = a,t,c or g
ccaaaatggagctgctattgttgttccaaaaaggatgacantggcgaaggcattcttccttcagttgtccagtcgctggaacattccagtgatgagattgcagctcatgaaggtctgagtgagttcttcagggaagcgatactctgagtaccacagggaccagccgtccttatcaaagtgctcccagaaatatggcagtgccacagagagtgtgtcctcattggagtacttgcgcttaaattcatccaacacaaaggtactcttgggcaggtgagcgaaggggtccttggccttgggctcagcagccagcgcctgctcacattcatccatctcctcctcaggagcaggggcagccgcctttttctcctccttccgctcagcctggggcttctgcttctcttcccgtgaacccttctctttccgtggtgtgtcctttttaggttgggtctctgcaaactttttagcatcaaactgggccatcttctcacacagtttcacttcccccaagacagcccggaactggggctggttaatgcaggtgaggaaccagcggttggtattgggaaaggcctggcggaaagaaggggtcgcctttggagcagagaggaggcaatggccaccatggagaacaaggtgatctgcgccctggtcctggtgtccatgctggccctcggcaccctggccgaggcccagacagagacgtgtacagtggccccccgtgaaagacagaattgtggttttcctggtgtcacgccctcccagtgtgcaaataagggctgctgtttcgacgacaccgttcgtggggtcccctggtgcttctatcctaataccatcgacgtccctccagaagaggagtgtgaattttagacacttctgcagggatctgcctgcatcctgacgcggtgccgtccccagcacggtgattagtcccagagctcggctgccacctccaccggacacctcagacacgcttctgcagctgtgcctcggctcacaacacagattgactgctctgactttgactactcaaaattggcctaaaaattaaaagagatcgatatcaaaaaaaaaaa

SEQ ID NO: 204 - DNA, 2070 bp, Homo sapiens
  CDS (1)..(1674)
atggcgaagagcaacggagagaatgggccgcgcgcgcccgcggccggggaaagcctgtcgggaacccgggagagcctggcccagggccccgacgccgcaaccaccgacgaactcagctctctcgggtctgactcggaggccaacggcttcgccgagcgccgcatcgacaagttcggcttcatcgtgggctcgcagggcgccgagggcgcctccatcctgggacagacagtcccttctcctcatggaagggtcggagaagggccccctatccgctcatacacagcttcctccactggcactggcaacaggctggaggaagtacccctggaggtgctgaggcagagggagtccaagtggctggacatgctcaacaactgggacaaatggatggccaagaagcacaaaaagattcgtctgcggtgccaaaagggcatcccgccttctctgcggggccgtgcttggcagtacctgtcaggaggcaaggtgaagttacagcagaaccctggaaagtttgacgagctggacatgtcccctggggaccccaagtggctggacgtgattgagcgtgacctgcaccggcagttcccattccatgagatgtttgtgtcccgggggggccacggccagcaggacctattccgtgtgctgaaggcctacacgctgtaccggcccgaggagggctactgccaggcccaggcgcccattgccgctgtcttgctcatgcatatgcctgctgagcaagccttctggtgcctggtacagatctgtgagaagtacctgcccggctactacagcgagaaactggaggcgatccagctggacggggagatccttttctcgctgttgcagaaggtgtcgccggtggcccacaagcacctcagccgtcagaagatcgacccgctcctctatatgacagaatggttcatgtgcgccttctcccgaaccttgccctggagctctgtgctgcgtgtctgggacatgttcttctgtgaagagaaaccccaaaaagcttccttgtacttactgcccatcccccatgcaggggtcaagatcatcttccgggtggggctggtgctgctgaagcacgcgctgggctcccctgagaaggtcaaagcctgccagggccagtacgagaccatcgagcgactgcggagcctcagccccaagatcatgcaggaggcctttctggtccaggaggtggtggagttgcccgtgacagagcgccagattgagcgcgaacacctcattcagctgcggcgctggcaggagacccggggtgagctgcagtgccgctccccgcccaggctgcatggtgccaaggctatcttggatgcagaacctggtccccggcctgccctacaaccttcaccatccatccgcctgcccctagatgcccccctccctggctccaaagccaagcccaagccacccaagcaggcccagaaggagcagcggaaacagatgaaggggagagggcagctggagaagcccccagccccaaatcaagccatggtggtggccgctgcaggagatgcatgtcccccacagcatgtgcccccgaaggactcagcccccaaggactcagcccctcaggatttggctccccaggtctcagcccaccaccgctcccaggagagcttgacgtcccaagagagtgaggacacctacttgtaaccctggcagctaaggcctccagggcggggtctccatataactacacggttcatgaactgacattccacatcctgcccaccctctgagggccaagctgcctggccactgggctgggctggagtctggctggtccaacacagattctgcctggtccaacacagattctgcctgagcctccttatttattttctttacagtggcactcaggctggcccagccagggcaggcagaagctagggcctggggggtggggcctccttcagccccctcctcctgggggatgctccccagggttagggtgctggtgtgaggggaaagggtggggtgttctttgtgtaaaatagaaacatggttttgtacagaaataaacagccttgtatagagaaaaaaaaaaaa

SEQ ID NO: 205 - DNA, 740 bp, Homo sapiens
  CDS (12)..(599)
ccagctcggccatggggtcgcgcagctcccacgccgcggtcattcccgacggggacagtattcggcgagagaccggcttctcccaagccagcctgctccgcctgcaccaccggttccgggcactggacaggaataagaagggctacctgagccgcatggatctccagcagataggggcgctcgccgtgaaccccctgggagaccgaattatagaaagcttcttccccgatgggagccagcgagtggatttcccaggctttgtcagggtcttggctcattttcgccctgtagaagatgaggacacagaaacccaagaccccaagaaacctgaacctctcaacagcagaaggaacaaacttcactatgcatttcagctctatgacctggatcgcgatgggaagatctccaggcatgagatgctgcaggttctccgtctgatggttggggtacaggtgacagaagagcagctggagaacatcgctgaccgcacggtgcaggaggctgatgaagatggggatggggctgtgtccttcgtggagttcaccaagtccttagagaagatggacgttgagcaaaaaatgagcatccggatcctgaagtgactccgtttgtgccttgggcttgctcctgcaaccagtatctccttggaattcatccaaagcccccatggacgcatggacgcagggcgacaataaactgtattttcgtttctaactctatttagggccaagagaagaaag

SEQ ID NO: 206 - DNA, 655 bp, Homo sapiens
  CDS (93)..(461)
  misc_feature (1)...(655): n = a,t,c or g
gctgtcattcgagcaccatccggaccggaattcccgggtcgacccacgcgtccggaatttcatcctgcccacacactgcatatgagggaagcatgtctactttatccaatttcacacagacgctggaagacgtcttccgaaggatttttattacttatatggacaattggcgccagaacacaacagctgagcaagaggccctccaagccaaagttgatgctgagaacttctactatgtcatcctgtacctcatggtgatgattggaatgttctctttcatcatcgtggccatcctggtgagcactgtgaaatccaagagacgggaacactccaatgacccctaccaccagtacattgtagaggactggcaggaaaagtacaagagccaaatcttgaatctagaagaatcgaaggccaccatccatgagaacattggtgcggctgggttcaaaatgtccccctgataagggagaaaggcaccaagctaacatctgacgtccagacatgaagagatgccagtgccacgaggcaaatccaaattgtctttgcttagaagaaagtgagttccttgctctctgttgagaattttcatggagattatgtggttggccaataaagatagatgacatttcaatctcnnnnnanaaaaaaaaaa

SEQ ID NO: 207 - DNA, 972 bp, Homo sapiens
  CDS (143)..(529)
  misc_feature (1)...(972): n = a,t,c or g
cacggtggaagggctggggccacggggcagagaagaaaggttatctctgcttgttggacaaacagaggggagattataaaacatacccggcagtggacaccatgcattctgcaagccaccctggggtgcagctgagctagacatgggacggcgagacgcccagctcctggcagcgctcctcgtcctggggctatgtgccctggcggggagtgagaaaccctccccctgccagtgctccaggctgagcccccataacaggacgaactgcggcttccctggaatcaccagtgaccagtgttttgacaatggatgctgtttcgactccagtgtcactggggtcccctggtgtttccaccccctcccaaagcaagagtcggatcagtgcgtcatggaggtctcagaccgaagaaactgtggctacccgggcatcagccccgaggaatgcgcctctcggaagtgctgcttctccaacttcatctttgaagtgccctggtgcttcttcccgaagtctgtggaagactgccattactaagagaggctggttccagaggatgcatctggctcaccgggtgttccgaaaccaaagaagaaacttcgccttatcagcttcatatttcatgaaatcctgggttttcttaaccatcttttcctcattttcaatggtttaacatataatttctttaaataaaacccttaaaatctgctaaatttctttttggtttcattaacacagaggtggtaatggtggtgtgcgtgtgtacacatgtatgggtgtgtgtacccatgtatgggtgtgtgtacccatgtatgggtgtgtgtatatgtgcgaatgtgcatatgtgtgagtgtatatgcagggtttttttgtgtgtgttttgagacagagtcttgctctgtcacccaggctagagtgcaatggtgcaatcttggntcactgcaacctcctcctcccaggttcaagctatcctcctg

SEQ ID NO: 208 - DNA, 706 bp, Homo sapiens
  CDS (137)..(340)
  misc_feature (1)...(706): n = a,t,c or g
atttggccctcgaggccaagaattcggcacgagggtgtagagaggagagagagtgaacagggagcggggcttttgtctgttggtctccctggactgaagagagggagaatagaagcccaagactaagattctcaaaatggtttattacccagaactctttgtctgggtcagtcaagaaccatttccaaacaaggacatggagggaaggcttcctaagggaagacttcctgtcccaaaggaagtgaaccgcaagaagaacgatgagacaaacgctgcctccctgactccactgggcagcagtgaactccgctccccaagaatcagttacctccactttttttaatcgtgaacaccttccatttgtnttgacatatggtgtatgggtattgatgaggtcatggtatcatatatgggatttttttctgtgtaaatcatcaagtataagaagaaactatgggactctgagccttgctttagagaatttacagtggacaaataggtatatcagctgtgtaaatagagcaagaaaacagtattctgcatctgtggcatttatgtagagttgcagttgtgtactgctgaaaatgcaggcttttgtaacagtgtgatctttactgatgcactcatgacaagtacccaatgtattttagctattttagtagtatttgttcaataaatacgcaagctgtaaggtaaaaaaaaaaaa

SEQ ID NO: 209 - DNA, 699 bp, Homo sapiens
  CDS (117)..(572)
tgcggtgatgtatataactatctattcgatgatgaagataccccaccaaacccaaaaaaagagatctctcgaggatccgaattcgcggccgcgtcgacgccgcttgtgctgcagccatgtctctagtgatccctgaaaagttccagcatattttgcgagtactcaacaccaacatcgatgggcggcggaaaatagcctttgccatcactgccattaagggtgtgggccgaagatatgctcatgtggtgttgaggaaagcagacattgacctcaccaagagggcgggagaactcactgaggatgaggtggaacgtgtgatcaccattatgcagaatccacgccagtacaagatcccagactggttcttgaacagacagaaggatgtaaaggatggaaaatacagccaggtcctagccaatggtctggacaacaagctccgtgaagacctggagcgactgaagaagattcgggcccatagagggctgcgtcacttctggggccttcgtgtccgaggccagcacaccaagaccactggccgccgtggccgcaccgtgggtgtgtccaagaagaaataagtctgtaggccttgtctgttagtcgacgcggccgcgaattcggatcctcgagagatctctttttttgggtttggtggggtatcttcatcatcgaatagatagttatatacatcacccgtccaat

SEQ ID NO: 210 - DNA, 3152 bp, Homo sapiens
  CDS (4)..(1938)
  misc_feature (1)...(3152): n = a,t,c or g
gggatgccgaggagccggggcggccgcgccgcgccggggccgccgccgccgccgccgccgccgggccaggccccgcgctggagccgctggcgggtccctgggcggctgctgctgctgctgctgcccgcgctctgctgcctcccgggcgccgcgcgggcggcggcggcggcggcgggggcagggaaccgggcagcggtggcggtggcggtggcgcgggcggacgaggcggaggcgcccttcgccgggcagaactggttaaagtcctatggctatctgcttccctatgactcacgggcatctgcgctgcactcagcgaaggccttgcagtcggcagtctccactatgcagcagttttacgggatcccggtcaccggtgtgttggatcagacaacgatcgagtggatgaagaaaccccgatgtggtgtccctgatcacccccacttaagccgtaggcggagaaacaagcgctatgccctgactggacagaagtggaggcaaaaacacatcacctacagcattcacaactataccccaaaagtgggtgagctagacacgcggaaagctattcgccaggctttcgatgtgtggcagaaggtgaccccactgacctttgaagaggtgccataccatgagatcaaaagtgaccggaaggaggcagacatcatgatcttttttgcttctggtttccatggcgacagctccccatttgatggagaagggggattcctggcccatgcctacttccctggcccagggattggaggagacacccactttgactccgatgagccatggacgctaggaaatgccaaccatgacgggaacgacctcttcctggtggctgtgcatgagctgggccacgcgctgggactggagcactccagcgaccccagcgccatcatggcgcccttctaccagtacatggagacgcacaacttcaagctgccccaggacgatctccagggcatccagaagatctatggacccccagccgagcctctggagcccacaaggccactccctacactccccgtccgcaggatccactcaccatcggagaggaaacacgagcgccagcccaggccccctcggccgcccctcggggaccggccatccacaccaggcaccaaacccaacatctgtgacggcaacttcaacacagtggccctcttccggggcgagatgtttgtctttaaggatcgctggttctggcgtctgcgcaataaccgagtgcaggagggctaccccatgcagatcgagcagttctggaagggcctgcctgcccgcatcgacgcagcctatgaaagggccgatgggagatttgtcttcttcaaaggtgacaagtattgggtgtttaaggaggtgacggtggagcctgggtacccccacagcctgggggagctgggcagctgtttgccccgtgaaggcattgacacagctctgcgctgggaacctgtgggcaagacctactttttcaaaggcgagcggtactggcgctacagcgaggagcggcgggccacggaccctggctaccctaagcccatcaccgtgtggaagggcatcccacaggctccccaaggagccttcatcagcaaggaaggatattacacctatttctacaagggccgggactactggaagtttgacaaccagaaactgagcgtggagccaggctacccgcgcaacatcctgcgtgactggatgggctgcaaccagaaggaggtggagcggcggaaggagcggcggctgccccaggacgacgtggacatcatggtgaccatcaacgatgtgccgggctccgtgaacgccgtggccgtggtcatcccctgcatcctgtccctctgcatcctggtgctggtctacaccatcttccagttcaagaacaagacaggccctcagcctgtcacctactataagcggccagtccaggaatgggtgtgagcagcccagagccctctctatccacttggtctggccagccaggcccttcctcaccagggtctgaggggcagctctggccagtgctcaccagggccagcagggccctaggctggggtcgtacagctgaagttgtgggtgcattggcctaggctgagcgtggggcagggaattatgggggctgtgccgagaggtgggtgtctggcacccagctgccagccttctgtcctgggcaaactactccctacttaagggaataggccaggctccatccggaggcagggaccatgccaggaggagcccctgtggtcacggcatcctgtggtgtccatgaggtaccacagctccactcctggctggaacccagcaccctctgtgggaagccagcactagctctcatcccccatccgggagataccaccagtcctggtccccttttgccaacacctgctggtcatatgtccccctacccccaccccactgtcctccaaggctacaggacccctgcttctgacacagtgagcaacaagcctgggtttccctgctggcagacggcagatccctcaggaaacctgctccacttgtcagggtctcttcggagacccaggatttagggtcacatgctgcaggcagggctgtggcccagctgggtctgacaaggacccagctgtcacatcgtgaatatttaaatgtcctgtcactactgtcccattttgcaaaggctgcttgaggctttaggtgaactagaggtgactgtcttggtgatgaggccagcatagcggccctcccccaggcgacaaggaccaaggtgctgctaaggccactctagcgcccagacaccccagtagctgagctctgctcctatggctacagagctggggcagaagctgaccccatttctggaggaagatccgagtttgtgaccgtcctccactcccctctattgtcactgtccccagctttgctgccagtctgtcacttgcagcctgggagctcagcctcaccagttaggtgaggaggagatgggcttgcagggccaacactgggcagagctgggggaagttcctttcggaagggggaccaggggcgttttgaagtgcttagttgcccccactactctgaggccgacttcagctactctgaggccgattcaatctntcgggtnggaagcagtttttttcccagagtttggccttgntgaacttggtcattgg

SEQ ID NO: 211 - DNA, 1964 bp, Homo sapiens
  CDS (1)..(1578)
  misc_feature (1)...(1964): n = a,t,c or g
atggcgtccgggcctcattcgacagctactgctgccgcagccgcctcatcggccgccccaagcgcgggcggctccagctccgggacgacgaccacgacgacgaccacgacgggagggatcctgatcggcgatcgcctgtactcggaagtttcacttaccatcgaccactctctgattccggaggagaggctctcgcccaccccatccatgcaggatgggctcgacctgcccagtgagacggacttacgcatcctgggctgcgagctcatccaggccgccggcattctcctccggctgccgcaggtggcgatggcaacggggcaggtgttgtttcatcgttttttctactccaaatctttcgtcaaacacagtttcgagattgttgctatggcttgtattaatcttgcatcaaaaatcgaagaagcacctagaagaataagagatgtgattaatgtattccaccacctccgccagttaagaggaaaaaggactccaagccccctgatccttgatcagaactacattaacaccaaaaatcaagttatcaaagcagagaggagggtgctaaaggagttgggattttgtgttcatgtcaagcatcctcataagatcattgttatgtatttacaagtcttagaatgtgaacgtaatcaaaccctggttcaaactgcctggaattacatgaatgacagtcttcgaaccaatgtgtttgttcgatttcaaccagagactatagcatgtgcttgcatctaccttgcagctagagcacttcagattccgttgccaactcgtccccattggtttcttctttttggtactacagaagaggaaatccaggaaatctgcatagaaacacttaggctttataccagaaaaaagccaaactatgaattactggaaaaagaagtagaaaaaagaaaagtagccttacaagaagccaaattaaaagcaaagggattgaatccggatggaactccagccctttcaaccctgggtggattttctccagcctccaagccatcatcaccaagagaagtaaaagctgaagagaaatcaccaatctccattaatgtgaagacagtcaaaaaagaacctgaggatagacaacaggcttccaaaagcccttacaatggtgtaagaaaagacagcaagagaagtagaaatagcagaagtgcaagtcgatcgaggtcaagaacacgatcacgttctagatcacatactccaagaagacactataataataggcggagtcgatctggaacatacagctcgagatcaagaagcaggtcccgcagtcacagtgaaagccctcgaagacatcataatcatggttctcctcaccttaaggccaagcataccagagatgatttaaaaagttcaaacagacatggtcataaaaggaaaaaatctcgttctcgatctcagagcaagtctcgggatcactcagatgcagccaagaaacacaggcatgaaaggggacatcatagggacaggcgtgaacgatctcgctcctttgagaggtcccataaaagcaagcaccatggtggcagtcgctcaggacatggcaggcacaggcgctgactttctcttcctttgagcctgcatcagttcttggttttgcctatctacagtgtgatgtatggactcaatcaaaaacattaaacgcaaactgattaggatttgatttcttgaaaccctctaggtctctagaacactgaggacagtttcttttgaaaagaactatgttaatttttttgcacattaaaatgccctagcagtatctaattaaaaaccatggtcaggttcaattgtactttattatagttgtgtattgtttattgctataagaactggagtcgacgcggccgcgaattcggatcctcgagagatctctttttttgggtttggtggggtatcttcatcatcgaatagatagtgatatacatacggccntcaattggcgg

SEQ ID NO: 212 - DNA, 5263 bp, Homo sapiens
  CDS (24)..(3275)
gggactgtcggctgcaggcggccatgcccaccaacttcaccgtggtgcccgtggaggctcacgccgacggcggcggggacgagactgccgagcggacggaggctccgggcacccccgagggccccgagcccgagcgccccagcccgggagatggaaatccaagagaaaacagcccattcctcaacaatgtcgaggtggaacaagagagcttctttgaagggaagaacatggcacttttcgaggaggagatggacagtaaccccatggtgtcctcgctgctcaacaagctggccaactacaccaacctgagccagggcgtggtggagcacgaggaggacgaggagagccggcggcgggaggccaaggctccgcgcatgggcaccttcatcggcgtctacctgccgtgcctgcagaacatcctgggcgtcatcctcttcctgcgcctgacgtggatcgtgggggtggctggtgtcctggagtccttcctcatcgtggccatgtgctgcacatgtacaatgctgaccgccatttccatgagtgcgatcgctaccaacggtgtggtcccagctggcgggtcctactacatgatatcgcgctcgctgggacccgagtttggaggcgctgtcggcctctgcttctacctgggcacgacgtttgcaggggccatgtatattttggggaccatcgagatttttctgacgtacatctccccgggtgcggccatcttccaggcggaggctgcaggtggcgaggcggccgccatgctgcacaacatgcgtgtgtacggcacgtgcacgctcgtgctcatggccctggtggtcttcgtgggcgtcaagtatgtcaacaagctggcgctggtcttcctggcctgcgtcgtgctgtccatcctggccatctatgccggcgtcatcaagtctgccttcgaccccccggacatcccggtctgcctcctggggaaccgcacgctgtcacggcgcagcttcgatgcctgcgtcaaggcctacggcatccacaacaactcagccacctccgcgctctggggcctcttctgcaacggctcccagcccagcgccgcctgtgacgagtacttcatccagaacaacgtcaccgaaatccagggcatcccgggcgcggccagtggtgtcttcctggagaacctgtggagtacgtacgcgcacgcgggggcgtttgtggagaagaaaggtgtgccctcggtgcccgtggcagaggagagccgtgccagcacactgccctacgtgctcaccgacatcgcggcctccttcaccctgctggttggcatctacttcccttccgtgaccggtatcatggcgggttcaaaccggtccggggacctcaaggatgcacagaagtccatccccacggggaccatcctggccatagtgacgacgtctttcatctatctctcctgcattgtgctgtttggggcctgcattgaaggcgtggtcttacgagataagttcggggaggccctgcaggggaacctggtcatcggcatgctggcctggccctccccctgggtcatcgtcatcggctccttcttctccacctgcggtgccggcctgcagaccctcacgggggcaccgcgcctactgcaggccattgcccgtgacggcatcgtccccttcctgcaggtgtttggccacgggaaggccaacggggagcccacgtgggcgctgctgctgacagtcctcatctgcgagactggcatcctcatcgcctctctggacagcgtggccccgatcctctccatgttcttcctcatgtgctacctgttcgtgaacctggcctgcgccgtgcagaccctgctacgtacccccaactggcgtccacgcttcaagttctaccactggaccctgtcctttctgggtatgagcctgtgcctggcgctgatgttcatctgctcctggtactacgcgctgtccgccatgctcatcgctggctgcatctacaagtacatcgagtaccgcggggccgagaaggagtggggcgatggcatccgtggcctatccctgaacgccgcccgctacgccctgctgcgcgtggagcacggtcccccccacaccaagaactggaggccccaggtgctggtgatgctgaacctggacgcggagcaggccgtgaagcacccccgcctgctgtccttcacgtcgcagctgaaggccggcaagggcctgaccatcgtgggctcggtgctggaggggacgtacctggacaagcacatggaggctcagcgggccgaggagaacatacggtccctaatgagcacagagaagaccaagggcttctgccagctggtggtctcgtccagcctgcgggatggcatgtcccacctgatccagtcggccggcctgggcggcctgaagcacaacacggtgctcatggcctggcccgcatcctggaagcaggaggacaaccccttctcctggaagaactttgtagacaccgtccgcgacaccaccgccgcgcaccaggctctgctggtggccaagaacgtcgactcgtttccgcaaaaccaggagcgcttcggcgggggccacatcgacgtgtggtggatcgtgcacgacggcggcatgctcatgctgctgcccttcctgctgcgccagcacaaggtgtggaggaagtgccggatgcgtatcttcaccgtggcccaggtggacgacaacagcatccagatgaagaaggacctgcagatgttcttgtaccacttgcgcatcagcgccgaggtggaggtggtggagatggttgaaaacgacatatctgctttcacctacgagaggacactaatgatggagcagaggtcgcagatgctgaagcagatgcagctgtccaagaacgagcaggagcgagaggcccagctgatccacgacaggaacaccgcgtcccacaccgcggcggcagccaggacccaagcgccgcctacgccagacaaggtgcagatgacctggaccagggagaagctgatcgctgagaagtacaggagcagagacaccagcctatctggtttcaaagacctcttcagcatgaagccggaccagtccaacgtcaggcggatgcacacggctgtgaagctcaatggcgtcgtcctcaacaagtcccaggatgcgcagctggtcctgctcaacatgccaggtcctcccaaaaaccggcagggagacgagaactacatggagtttcttgaagtcctgaccgaggggctgaacagagtcctcctggtcaggggtggcggccgggaggtgatcaccatctactcctaatgcccaacagcatcacggcactctgggacaggcacggaggacggcgtgggcagcctgggcctgggcttggcccagggaaacagacggcagacacacctgtcccccagtgatgccacccaagctgcccatggggcttcctacggaagtttctaggcccgtcacctagggctctcctgttcagccttaacaggctcagcaaatcagggcgtggctggacgatttccttgcatctgagggcagacgctgctaccggagtgacctggacgtggccagatcttctcgcaggtcacaagaagccagtgagcccttgccttggtttctggaagttcttttccttggctggatttacccagtggttaggttgcatttctaccccatccagaacattcttggaagagcacccggagctgaagctgtccctgatgatgaaggtgaaacgtcagccctggccatggctccgctcagggccccggtcacctccgagtcactctgttccttgactgtctttgtgtttctgtacctcaaggcactgaagctggaggactctgtccatgcccgtgtcaccctcgtgtgggagcctctgggctcggcaggtccacatttcatgagctgaggcgtgggccagggccatctggaaagggaactcggcttttccagaacgtggtggatcatctgtcgggtgtgtggtgaacacgttcagttcatcagggcctacgctccgggaaggggcccccagctgtggctctgccatgccgggctgtgtttgcagctgtccgagtctccatccacctttagaaaaccagccacttcttttcataagcactgacagggcccagcccacagccacaggtgcgatcagtgcctcacgcaggcaaatgcactgaaacccaggggcacacgcgcgcagagtgaacagtgagttcccccgacagcccacgacagccaggactgccctccccaccccaccccaccccaggagcacggcacacagttcagcctctgagctggctcacacgtgccatccccaccccggtgctccagggaaggaggacacggacccgacgtgggaggtcctcaggcagcagtggcgcctggtgtcaggtctgtctggctgagtcccgggcgtcccctgccatggcctgtgccttgcatggaggcggcggtggcactgaagagatagctttcaagggcccaacactttgcacttcggctggctgtgagtttctgctttgtaggttgtggtcacatttgcaggctgcgggcagtggcaccgacttgggcctccctttctatgtggcatatttatttatttaaacaccccagggagttacgtggtaacaaggttgtccataaagaggttgcttctatatactagaggccccagatggccaggccttgggctacgtctggcttgcatggtctcccaagggaatcagccccatcaacaaagttcaaatcggggcagaggctgcacttgtgcccccagatgtttctgaggagccagactagggctggcattgctgtagagtgacggctgctgcccagagcgtgtcccagacatcacagcggggctcagcagttcccacagcctctgcctgccttggctaagcatgagttaagcagcaaaacgctcctccatgtctggatggggccggcaggtcctgtgtcccctgcacctggaggagagcaggctagaggcacagcggccacatggtgctggctctgaacgttggttggtggctggaaaacagccctgcttctgagggccgctcagttctgcacacgaaaccacctcctgagggctcagctctgcccccgccctgggctgcagcctctgcacgcaagcaccaggcatcctttgtgttgtcaactccgtgtaaccagtaactacagccatttacaattgactccgtttccttttgtaggtttccctgtctgtctgtgttagtagaaaaataaaatcctatgaaatctgagtaaaaaaaaaa

SEQ ID NO: 213 - DNA, 6033 bp, Homo sapiens
  CDS (42)..(2765)
ccggccagtgaattgaatttaggtgacactatagaagagctatgacgtcgcatgcacgcgtacgtaagcttggatcctctagagcggccgcggagcccggggcgggtccggcgcgggagccagcgcggctgtgtggctatctgcagaagctgtcgggcaagggccccctgcgtggctaccgcagccgctggttcgtgttcgacgcgcgccgctgctacctttactatttcaagagtccgcaggacgcgctgcccctcggccacttggacatcgcggacgcctgcttcagctaccagggccccgacgaggcggcggagccgggcacggagccgcccgcgcacttccaggtgcacagcgcgggagccgtcacggtgctcaaggctcccaatcgtcaactcatgacttactggttacaggagcttcagcagaagagatgggaatattgtaacagtcttgacatggtcaagtgggacagcaggacctctccaactcccggggattttcctaagggtcttgtagccagagataacactgatttaatttacccacacccaaatgcttctgcagaaaaagccagaaatgtcctagctgtggagactgtgcctggagagctggtgggagaacaagctgcaaatcagcccgccccagggcatccaaattccattaatttttactctttgaaacagtggggcaatgagctcaagaattcgatgtcttctttccgtcctgggagaggacataatgatagtcggaggactgtgttttataccaatgaagagtgggaacttttagacccaacccctaaggacctagaggagtccatagtacaggaagaaaagaagaagctgacccctgaaggaaacaaaggagtaactggctcaggattcccctttgattttggacgtaacccctacaaaggaaagcgccctttgaaagacataattgggtcgtacaaaaatcgtcacagcagtggtgacccttcaagtgaaggcacatcaggcagtggcagcgtcagcatcaggaagccggcctccgaaatgcaactgcaggtccagagccagcaggaagagctggaacagttaaagaaagacctgtccagtcagaaggagcttgttcgactgctccagcagacagtccggtcatcccagtatgacaagtatttcacaagcagccggctctgtgagggggtcccaaaggacacgctcgagcttctgcaccaaaaggatgatcagattctgggccttaccagccagctggagaggttcagcttggagaaggagagtcttcagcaggaagtaaggacgctgaagagcaaagtgggcgagctcaacgagcagctgggaatgctcatggagaccatccaagccaaggacgaggtcatcatcaagctcagcgagggcgagggcaacgggcctcctcccaccgtggcgcccagctccccttcggttgtgcctgttgccagggaccagctggaactggacaggctgaaagataatctacaggggtacaaaacccaaaacaaatttctaaataaggagattttggaactctcagctctacgaagaaatgcagaaaggagagagagggatctgatggcaaagtattctagcctggaagccaagctctgccagatagaaagtaaatacctgatattgctccaagaaatgaagacaccagtgtgctcagaagaccaggggcccacccgggaggtcatagcccagttgctggaggatgctctgcaggttgagagccaagagcagccggagcaagcatttgttaaacctcatcttgtcagtgaatatgatatttatgggttcaggactgtacctgaggatgatgaggaagagaaattggttgccaaggtccgcgcgttggatctgaagactctctacctcacagaaaaccaggaagtctccactggggtcaagtgggaaaactattttgcaagtacagtgaacagggagatgatgtgctctccagagttaaaaaacctcatccgtgcgggcattccccacgagcaccgttccaaggtgtggaagtggtgtgtggaccgtcacaccaggaagttcaaggacaacactgagcctggccacttccagaccttgctgcagaaggcgctggagaaacagaacccagcctccaagcagattgagctggacttgctgcgaactctgcccaacaacaaacattactcctgccccacctcagaaggcatacagaagttacgcaatgtcctcctcgccttctcctggcggaatccagatatcggctactgtcaaggcctaaacaggttggtggcagtggccctcctgtacctggaacaagaagatgctttctggtgtctcgttaccatagtggaagttttcatgcctcgagactattatacaaagactcttttaggatcccaggtggaccagcgggtgttcagagaccttatgagtgagaagctgcctcggttgcatggccactttgaacagtacaaagtcgactacactctcatcactttcaactggtttctggtggtatttgtggatagtgtcgttagtgacatcctctttaaaatatgggactctttcctttatgaaggaccaaaggttattttccgttttgctctggcactttttaagtacaaggaagaggagattttgaaattgcaagattcgatgtctatatttaagtatctccgctacttcactcgcactatccttgatgctagatccggaaccgacgcgcctaccacttggagaaagtccggctggagctgaccgagctggaggccatccgtgaggacttcctgcgtgagcgggacaccagccctgacaagggtgagctggtcagtgacgaggaggaggatacctgagtgggctcgggatgctgctcttccttccttcacaaccaaagtgtgcccaaagggtgaaagtgcacttaaaagccagaatgtaacgtgtgtgtcctctggggatctgctgggcagatgtcccaagccaggctgcccttcctcatttcccactgtgcggggggcaggggtgggaggtctaatctgtttacaaccatttccgtgccatgcttttggttacacgtatctcagtcacgctttctgcctggttggtggatcctcaggcttaccagtggctatttgcaagagcctgtttccagcctccgtcagcctgtcggtgctctgaccctctgaaaccttgctttgctgggcatctccccatattctctctcctgtacatagtgggcagtggtgtgtggttttgaatggcagtgctataaaggatgccagctgtgctttaggcacctgtaggccagagggttgctgcctcaggcataaggttggtatgaaaaggggctgccttagaaaagcaggcacatcccttgttcagaaatggccactgtaggaaagcctgtgaacctcccaccagtggctttaagctgccagccatgccccatttctagaatagcctttgctcttccacacgcaacccttccatcagtgtcttccagcctgcatggggagggcctggctgcccagacacccaccctcacttctcatggccagcctgtgtttgcagatcactgggctgctctgtccccagcttgccccgtgccaggcatggctctgtgagattctgtggaatgcccttcttgacttgtggaaatcattcaccaagtacgatgggatgggattccaagtaaacagtggaccgtcatattgcaaagcaggcccacgcctgggctggccttggttgaggggatggaggaatgttttcgggggtgctttgcagggcagtggtgcagccgcagcgtgaacgctcttggacagctgaaaaccatggcctccttggggatggccagtgctcctggtgtctccacctgcctgggttgtgcaggaggccggctgccagtgcctggggctgggaaacttttttgcttggggcaggcttgggtgagctctcccagatgtgtgcccaccccaccactgcctggaacatccttgttctctgccaggatgcaggggcactgttgcctctgacacagcagtttctgggaactcagaggactgcctttctgaaggctggggagaggctttgagcaaggagcttgtttttgcttaatcgctctagaccatccctgatgcgtagatgtgagaggatgttttctggcacagtgttatgaaaatacaagataaatgatctcagtggaatgtttcatattacccgaaaaaaactggaaatcatcctttgttgtgaacacactgagactaagaattgaagcaatgcagttttaagaagtatttttcctattttttgctgtcaactttttggcaatgccacggcaaagttggtgtttcagcacatgctagagtgagctccggcttcgtgtctttaaccaactccactaatgtttcactgggtagacggagctggcctctatatttagccagaagcctttgcctcttttcaggcatcaaaaatgggttttgtcattgtctttgtctttgagagcagcagtttgaggtctgactccttcagttgtcctgtgagctgggcgttgcagtctgctcgaatcaagtgttggaaaccccccacccctcagcccatcgtgaaacgacagctgtcagcctggggggcggctgctgaggaggtgcagcaggaatggggctgggccctgaggttttactttccgagccaatggcccctggaacatgccagcacacactgccatgtcctggggctaagagctgcctttagggacaggctcgtgttgtccagtttgccctgagagatgcacctgaccaggggcccgtcgtggctgcaacccacggtggtatgttagtgtttccaggcagttgtcagcagctgccgggtagtgtgtgtgtgcgacagcaggagagttcctggaggaaagggactggggacactttctcagaggttctcctgcctggaatcaagtgatgcgtgtccagaaggcaagagagggcggctccgcctggttaaagtttgggaacgggacggagccaactcctccttccaggactgtgggccccactcttttgcgctaacacttcccctccctcgggtcactgaggaaagagctgctctgtcccctccagtgccctgaaggtccctggcctccactggctgccatggcagggggcccttctgacaggggctgccccaagctgctgttcctcctctgaaccttcaccccaacacccagcccgtggcccctgcaagggggaccctgccagctgggaaacccaaaggcctgtccaaacgtgcgcaccaggaccgaggggagctccctcccaacacctgctaggaattgccaacttttaaatggatggggttttttatgggttgaacctctgttaatacttttgtacactctcactacagtttatatttttataggctattttctcaaggtgtttctagattccacatatctattttatataacaagttattatgttatgtgtgtgactcccttgtgtgtatctgtgccagcctcagcctccgagttgcttttccctctggccctgactctcactgactcaccgatgtgatgtgcaggcccacttcttaccccagatagcctcgggcgctgcctgtagtcatgctgacagctgtacagtagccgccaagactgctgacagctggagacggttctggtttcaactacggtatattgatatcggaagtattctagacagatcctcggttgggttttctagctacatgtttgtattgcacagatccccacctgccatcctatagtgttgtcttcctgtgtgttccggggcttctgggcagctgggcctgcccggggaagtccttgcaggtgggaggccatacagagacccactgtgtgccactgagcgtcccactgctgctgggcaactggaggactgcagggggcgccaggtgactctctccttttatatcacagcagctcctgtgctgaccttcaagttacgttttggaactgtaatactaaaggaagaaataaactactaatttgtataat

SEQ ID NO: 214 - DNA, 5103 bp, Homo sapiens
  CDS (37)..(4140)
gtttaaggttagctgagcaactgggccgaagagaagatgaggcaaaaattcgccatggccttggcctctccctttgggctagtggaaacttggaggaggcccaacagccagctttatagggcatcagccttgtttgaaacaatccgacatgaggcacagctgagcacggactacaaactctccctctttgacctgcagacatcatcctaccaggccttgcagcgggtgctcgtcagcctaggccatcatgatgaagccctggctgtggcagaaaggggacggacaagggcatttgctgatcttctggtggaacgacaaacaggacaacaagactccgacccctactccccagtcactattgatcagatcttagagatggtaaatggccagaggggactagtgctttactattccctggctgcaggctatctgtatagctggctgctggctcctggggcaggaattgtgaagtttcatgaacactacctgggtgagaacacagtggaaaactcaagtgacttccaggccagcagcagtgtaacccttccaacagcaaccggctcagccctggagcagcacattgccagtgtccgggaggccctgggggtggagtctcactactcaagggcctgtgccagcagtgagacagagagtgaagcgggagacatcatggaccagcaatttgaagagatgaacaacaaactcaactcggtcactgaccccactggctttctgcggatggttcgccgcaataacctgtttaacaggagctgccagagcatgacgagcctgttcagtaacactgtgtcaccgacccaggacgggacctcctctcttcccaggaggcagagctcgtttgccaagcccccgctccgtgccctgtatgacctgctcatcgcgcccatggaagggggcctgatgcactccagcggccccgtgggccggcaccggcagctcatcctggttctggagggggagctctacctcattcctttcgccctcctgaagggaagctcctccaatgagtacctctacgagcgcttcggcctccttgctgtcccttccatccgctccctcagcgtgcagtccaagtctcacttacggaagaacccgcccacatactccagctccacatccatggcggctgtcatcggcaaccccaagctaccatcggccgtgatggacaggtggctgtgggggcccatgccatcggccgaggaagaggcctacatggtgtccgagctgctgggctgccagcccctagtgggcagtgtggccaccaaggagagggtcatgagtgccctgacccaggctgaatgcgtccactttgccacccacatctcctggaagctgtcggccttggtcctcacgcccagcatggacggcaaccctgccagcagcaagagctccttcggccacccctacacgatccctgagtccttgcgggtgcaggacgatgccagtgatggggagagcatctcggactgcccgcccctgcaggagctgctgcttactgccgccgacgtcctggacctgcagctgcctgtgaagctggtggtgcttggctcctcccaggagtccaacagcaaagtcgcagccgacggggtcatcgcgctgacaagggccttcctggctgccggcgctcagtgtgtcctcgtgtctctgtggcctgtgccagtggctgcttttaagatgttcatccatgccttctactcatccctgctgaacggcctgaaagccagcgccgccctgggggaggccatgaaggtggtgcagagcagcaaggccttctcgcacccctccaactgggcagggttcatgctcatcgggagtgacgttaagctgaacagcccctcatcactcatcggccaggccctcacagagatcctgcagcacccggagcgtgcgcgggacgccctgcgagtgctgctgcacctggtggagaaatccctgcagcgcatccagaatgggcagcgcaatgccatgtacacatcccagcagagtgtggagaacaaagtgggcggcatccctggctggcaggccctcctcaccgctgtgggcttccggctggaccccccaaccagtggcctgccagcggctgtcttcttcccaacctccgacccgggcgaccggctccagcagtgcagcagcacactccagtccctgctgggtctgcccaatcctgccctccaagccctttgcaaactcatcactgcctccgagacgggcgagcagctcatcagccgggctgttaaaaatatggttggaatgctccaccaggtgctggttcagctccaggctggcgagaaggagcaggacttggcatcagctcccattcaggtctccatcagcgtccagctgtggcggctcccgggatgccacgagttcctggcagctctaggttttgatctctgtgaagttggtcaggaggaagtaatcctgaaaaccgggaagcaagctaatcgacggactgtgcacttcgcgctccagtccctgctgtctctgtttgattctactgagctacccaagcgcctcagccttgacagctcctcctccctcgagtctcttgcttctgctcagtctgtttccaacgccctgcccttgggttaccagcaaccccccttctctcccaccggtgcggacagcatcgcctcagatgccatctctgtgtacagtctgagctccattgcctcctcaatgagctttgtctccaaacccgagggtggatcagagggtggaggccccggaggacggcaggaccatgaccggtccaagaacgcttacctgcagagatccaccctgcctaggagccagctgcctccccagacccgccctgcaggcaacaaagatgaagaagaatatgaagggttttctatcatcagtaacgagcccttggcgacctaccaagaaaaccgaaacacatgcttctcaccagaccacaaacaaccccaacctgggacagccggaggcatgagagtctcggtgagctccaaagggagcatcagcactccaaattctccagtgaaaatgactctgattcccagccccaactcacccttccaaaaggtgggaaaactagcaagctcagatacaggagaatcagaccagtctagcacagaaacggacagtaccgtgaaatcccaagaagaaagcaacccaaaactggatccacaagagttagcccagaaaattctggaggagacacagagtcatctcattgcggtggagcgtcttcagaggagcggcggccaggtgagcaagagtaataaccctgaagacggcgttcaggcgcccagcagcactgctgtcttcagagcgtcagaaaccagtgcgttcagcaggcctgttctctcccatcagaagagtcagccatcaccagtcactgttaaaccaaagcccccagccaggagctcctccctgcccaaggtgagttccggatatagcagccccaccacctcagagatgtccatcaaagacagcccgagccagcacagtggccggccatcgcccggctgcgactcacagacttcccagctggaccagcctctctttaaactgaagtaccccagctctccttacagcgctcacatttccaaatcaccaaggaacatgtccccaagctccggccaccagtctcctgctggcagtgcaccctccccagctctctcctactcctcagctggatctgctcgctcaagtccagcagacgctcccgacatagacaaactgaaaatggcagccattgatgaaaaggtgcaggctgtccataacctgaagatgttctggcagagcacaccccagcattccacagggccaatgaagatcttccggggggctcctggcacgatgacttccaaaagggatgtcctcagtctgttgaatttgtcaccacggcacaataagaaggaggagggagtggataagcttgaactgaaggagctgtccctgcagcagcatgacggagctccaccgaaagcccctcccaacggacactggcgcaccgagaccacctcgctgggctcactgccgctgcccgccggccctcccgccacagcccccgcgcgccctttgaggcttccttctggaaatggctacaagttcctgtctccaggaagatttttcccttcttccaaatgctaaagcatcttttatacccactgactctgagcagcctgcagatgggggcctggcgtttgcttcagcccttccctgagtgcagtccccccacagccaccagcaccctcatgatgctgtgctctgcaggcgaggggcaccaccacgtccaaaggctgccacacacactggtggcttttctgggccacattcaccaaaagccaggacttctgtggggctggtacaggaggctcatggaatttcctacacacttcaccaaatgtttgtttacctttgaactccctgcttctcatctttgatatgattcttcaccaggattttgtacaaaaatgatcatggttctggggtggggagaggaaagggagcacatattttgctaagaggtatatatgcagtaccttttatacacagaaatacaaatagagctttttctaaggctttcggttgctggttgggggtgggatatatgaaatttcagttgaattctacaggaaagtgttatattagccaaaaacagaaaaatggtttttaaaatgccaatgatttgtaattaaattgtagcaattttggtctcatgatagtgtaatatctcagcaacaatgcaataattcacattgaaacagcgcttccattctgaactctgctctgcaaatgtcttttgggtcccgctgtcaaccaaacttgaattttcttaaaaaaaaaattatgtaactcttatccaggcattttagaactatgcaattgtgatttaaaatgcaactttgtgcttttaaaacattattgaccttttttgtatatggataaacaacttggttttattatcaatagtactttgcatttatagctattatttttaaaagctcaaaaagttttttaaaatgtcaaattttgaatagtcatcaataagtaattatcaagtttggaaggaaaggttgaaatgactccgtttccttataagcaaaaaaaaaa

SEQ ID NO: 215 - DNA, 1317 bp, Homo sapiens
  CDS (65)..(790)
ggaccgctccggaattcccgggtcgacggctgcgagaagacgacagaagggcaaggaggagaacatgatgatggacctttttgaaactggctcctatttcttctacttggatggggaaaatgttactctgcagccattagaagtggcagaaggctctcctttgtatccagggagtgatggtaccttgtccccctgccaggaccaaatgcccccggaagcggggagcgacagcagcggagaggaacatgtcctggcgcccccgggcctgcagcctccacactgccccggccagtgtctgatctgggcttgcaagacctgcaagagaaaatctgcccccactgaccggcgaaaagccgccaccctgcgcgaaaggaggaggctaaagaaaatcaacgaggccttcgaggcactgaagcggcgaactgtggccaaccccaaccagaggctgcccaaggtggagattctgcggagcgccatcagctatattgagcggctgcaggacctgctgcaccggctggatcagcaggagaagatgcaggagctgggggtggaccccttcagctacagacccaaacaagaaaatcttgagggtgcggatttcctgcgcacctgcagctcccagtggccaagtgtttccgatcattccagggggctcgtgataacggctaaggaaggaggagcaagtattgattcgtcagcctcgagtagccttcgatgcctttcttccatcgtggacagtatttcctcggaggaacgcaaactcccctgcgtggaggaagtggtggagaagtaactgagcctgcgcttgagaccttctccacgcagcaggaagatcccaccgacccttcctggcctaatcctttagattaggtcacattacattaacatttaggaacccagaccgaaaagttgctgaaagggaaggagacacattcacaaagaaacgttgcgaaaattgcgaaatctgttgtgcatgctcaaatgaaaacgcctttcggctttgggcttttatttttttggaactgcgagtggcttaggtctagcctcattttgtttttgtttggttggttttatactatattaacttttattacggtgatccttttgtgccatgttcaaaagaagttcattcctgtctaaagtgggaaagttgcatttaatgttaggggtatttaatgtatttttgtaaatagtttagcactttctttttttacgtaaacctgaaatatattttaaatgtggaatgatgtatataaaatgtgcgaggatcctggtattgtaatattaaaaagaagtttctatatgaaaaaaaaaaaa

SEQ ID NO: 216 - DNA, 719 bp, Homo sapiens
  CDS (91)..(525)
ggacatcgaacgcctgtcggtaccggtccggaattcccgggtcgacccacgcgtccgcccacgcgtccggctagtagccggagggtcaccatgaagttcaatcccttcgttacctcggaccgcagtaaaaaccgcaaacgtcacttcaatgccccctcacacgtgcgcaggaagatcatgtcatccccgctctccaaggagctgcggcagaagtacaatgtccgctccatgcccatccgcaaggacgacgaggtccaggtagttcgaggacactacaaaggtcagcaaattggcaaggtagtccaggtgtacagaaagaaatatgtcatctacatcgagcgggtgcagcgtgagaaggccaacggcacaactgtccacgtgggcattcacccaagcaaggtggttatcaccaggctaaaactggacaaggatcggaaaaaaattcttgaacgcaaagccaagtctcgacaagttggaaaagagaaaggcaaatataaagaagaacttattgagaaaatgcaggaataaatagaacctgttgtgcaaccacggtttaacccggagatttttgaggctagggtgtgtttctttcgaacttttcggaatgtttggaacatttcatttcctgttttgttacctgggcctctgtaaatctacttttgcaattttaagtaataattttatgaataaaaatgggaaatgcttcctaaaaaaaaaaa

SEQ ID NO: 217 - DNA, 3760 bp, Homo sapiens
  CDS (283)..(3213)
ctgatatccttcggtaccgccccggaattcccgggtcgacccacgcgtccggtgccacgactccacacgcgcgcacgcagccagcgagcggccggagcggacggcagacggggcgggcggcgtcagggtcgcagcgtctacagctgctcgggggcggtttcttggcggaggcttggccggctcctctctcccggctccgcggcggctgcgaaggcggcggctcctgccctctcgctttccctctcgcgtctctggctgcaggtgaaaggaaagcaagccaggatggatatttacgacactcaaaccttgggggttgtggtctttggaggattcatggttgtttctgccattggcatcttcctggtgtcgactttctccatgaaggaaacgtcatatgaagaagccctagccaaccagcgcaaggagatggcgaaaactcaccaccagaaagtcgagaagaaaaagaaggagaaaacagtggagaagaaaggaaagaccaagaaaaaggaagagaaacctaatgggaagatacctgatcatgatccagcccccaatgtgactgtcctccttcgagaaccagtgcgggctcctgctgtggctgtggctccaaccccagtgcagccccccattatcgttgctcctgtcgccacagttccagccatgccccaggagaagctggcctcctcccccaaggacaaaaagaagaaggagaaaaaagtggcaaaagtggaaccagctgtcagctctgtagtgaattccatccaggttctcacttcgaaggctgccatcttggaaactgctcccaaggagggcagaaatacagatgtggcccagagcccagaggcaccaaagcaagaggctcctgccaagaagaagtctggttcaaagaaaaaagggcccccagatgccgacggccctctctacctcccctacaagacgctggtctccacggttgggagcatggtgttcaacgagggcgaggcccagcggctcatcgagatcctgtctgagaaggctggcatcattcaggacacctggcacaaggccactcagaagggtgaccctgtggcgattctgaaacgccagctggaagagaaggaaaaactgctggccacagaacaggaagatgcggctgtcgccaagagcaaactgagggagctcaacaaggagatggcagcagaaaaggccaaagcagcagccggggaggccaaagtgaaaaagcagctggtggcccgggagcaggagatcacggctgtgcaggcacgcatgcaggccagctaccgggagcacgtgaaggaggtgcagcagctgcagggcaagatccggactcttcaggagcagctggagaatggccccaacacgcagctggcccgcctgcagcaggagaactccatcctgcgggatgccttgaaccaggccacgagccaggtggagagcaagcagaacgcagagctggccaagcttcggcaggagctcagcaaggtcagcaaagagctggtggagaagtcagaggctgtgcggcaagatgagcagcagcggaaagctctggaagccaaggcagctgccttcgagaagcaggtcctgcagctgcaggcgtcccacagggagagtgaggaggccctgcagaagcgcctggacgaggtcagccgggagctgtgccacacgcagagcagccacgccagcctccgggcggatgccgagaaggcccaggagcaacagcagcagatggccgagctgcacagcaagttacagtcctccgaggcggaggtgcgcagcaaatgcgaggagctgagtggcctccacgggcagctccaggaggccagggcggagaactcccagctcacagagagaatccgttccattgaggccctgctggaggcgggccaggcgcgggatgcccaggacgtccaggccagccaggcggaggctgaccagcagcagactcgcctcaaggagctggagtcccaggtgtcgggtctggagaaggaggccatcgagctcagggaggccgtcgagcagcagaaagtgaagaacaatgacctccgggagaagaactggaaggccatggaggcactggccacggccgagcaggcctgcaaggagaagctgcactccctgacccaggccaaggaggaatcggagaagcagctctgtctgattgaggcgcagaccatggaggccctgctggctctgctcccagaactctctgtcttggcacaacagaattacaccgagtggctgcaggatctcaaagagaaaggccccacgctgctgaagcacccgccagctcccgcggagccctcctcggacctggcctccaagttgagggaggccgaggagacgcagagcacactgcaggccgagtgtgaccagtaccgcagcatcctggcggagacggagggcatgctcagagacctgcagaagagcgtggaggaggaggagcaggtgtggagggccaaggtgggcgccgcagaggaggagctccagaagtcccgggtcacagtgaagcatctcgaagagattgtagagaagctaaaaggagaacttgaaagttcggaccaggtgagggagcacacgtcgcatttggaggcagagctggaaaagcacatggcggccgccagcgccgagtgccagaactacgccaaggaggtggcagggctgaggcaacttctcctagaatctcaatctcagctcgatgccgccaagagcgaagcccagaaacagagcgatgagcttgccctggtcaggcagcagttgagtgaaatgaagagccacgtagaggatggtgacatagctggggccccagcttcctccccagaggcgcccccagccgagcaggaccccgttcagctgaagacgcagctggagtggacagaagccatcctggaggatgagcagacacagcggcagaagctcacggccgagtttgaggaggctcagacctcggcatgtcggttacaagaagaattggagaagctccgcacagccggccccctagagtcttcagaaacagaggaggcctcacagctgaaggagagactagaaaaagagaagaagttaacaagtgacctggggcgcgccgccacgagactgcaggagcttctgaagacgacccaggagcagctggcaagggagaaggacacggtgaagaagctgcaggaacagctggaaaaggcagaggacggcagcagctcaaaggagggcacctctgtctgagtttcctctttggaaaaagaagttactgttcaacttaccaaaatgccttacacattccttacaaataaaccaaccaacctacacagcgttatccaggcccaacttccggtagctccgagagaagccatgagagacaagtctcttagagccacagaagtagaccttccagagccccagtttgtaaatgaacctgtgtcacatttgataaacactatcctgggcgcagccccgggccaccgccgagtgacgccaaagccctggttgactctgacagccccgtgggtgtgtgggaggccgggcgctctggggtctgtctgtcagtgcaatcgtttagtgttttttcagtggggcggggcgggaagcgggtgggaccgggcagccagttctcaaaggctgtggggccgactggaggccacagcccctcacccctagacgttgccaaccagaactgacgtgtgacctcctgggtgttgatgccattaaaaccaacgttggtgcccggtgaaaaaaaaaaaaaaaaaaaaaaaaaaaaaaaaaaaaaaaa

SEQ ID NO: 218 - DNA, 6717 bp, Homo sapiens
  CDS (105)..(2747)
  misc_feature (1)...(6717): n = a,t,c or g
ttttgacccccgtcgttagaggacacgatccgcccgggncgacccacgcgtccgagaaatactcctacggccatttgcctacccacagcatcacggcccacccaatggtaaccattcggatcagtgaccggcagaggctcatccagccatatatccataactactcctggctgctctttgctgccctggctctctatagcgcccacctggccagtgcagaggatgtggatggggagaagctggacccccagacgcgcagcagtgccaccaccctgcggagccagtgcatgcagctcgtcggggactgtctgatgaaggctcatcagggaaaaggccttaaagctctagctttgctgggtgtattgccagatggggactcgagcctagaagatcatgccctaccagtcactgtgcccaccggagcgtcagaggagcagctagagaagaaagctgtccagggtgctgagctgtcagaagcaggcaatggaaagagagctgttcatgaggaaatcagacctgtagatttcaagcagagaaataaggcagataaaggtgtatcattatcgaaggatccttcatgccagacccaaatttcagattcacctgcagatgctagcccacctacaggacttccagatgctgaagattcagaagtgtcatctcagaagcccatagaggaaaaagcagttactccaagccctgagcaagtgtttgctgagtgttcccagaagaggattttgggattactagcagccatgttacctcccttaaagtcgggccccacggttcccctgatagacctggagcacgtccttccactcatgtttcaggttgtcatctcaaacgcaggccacctgaatgaaacctaccatctcaccctgggtcttctcggccagttaattatccgtcttttgccagcagaggtagacgccgcagtgatcaaagtcctctcagccaaacacaacctgtttgctgcaggggacagttccattgtgccagatggctggaaaaccacccacctgctctttagcctgggagctgtgtgtctggacagccgggtgggcttggactgggcgtgctccatggcagagatcctgcggtcactcaacagtgccccactgtggcgtgatgtcattgccaccttcacagaccactgcatcaagcagctgccattccagctgaagcacaccaacatcttcaccctgctcgtgctggttggcttcccccaggtcctctgtgtgggaacccgctgcgtttatatggataatgccaatgaaccccataatgtgatcatcttgaagcactttactgagaagaacagggctgtgattgttgatgtcaaaactcggaagaggaaaacagtgaaggactaccagctggtccagaagggaggaggacaagagtgtggtgactctcgggcccagctgagccagtactcccagcactttgcctttatcgccagtcaccttctgcaaagcagcatggacagccattgtcccgaggcagtagaagcaacttgggtcctgtccctggccctgaaaggattgtataaaacactaaaggctcacggttttgaggagatccgtgctactttccttcagaccgatttgctgaagttgctggtgaaaaagtgcagcaaagggactggctttagtaaaacgtggctcctccgggacctggaaattttgtccatcatgctgtactcctcaaaaaaggagatcaacgctttggctgagcacggagacctagagctggatgagcgaggggaccgagaggaagaggtggaacggccagtcagcagccctggcgacccagagcagaaaaagctggacccccttgagggcctggatgagcccaccagaatatgtttcttgatggctcatgatgccctcaatgcccctctgcacattctccgggccatatacgaactgcagatgaaaaagaccgattatttcttcctggaggttcagaagaggtttgatggtgatgagctcaccacagatgaaaggatacggtccctggctcagcggtggcagcccagtaagagtctgaggctggaagaacagagcgccaaagctgtggatacagacatgattatcctgccatgcttgtcccggcctgcacgctgtgaccaagccactgctgaatcgaaccctgtgacccagaagctgatctccagcacagagagcgaactgcagcagagctatgccaagcagcgccgtagcaagagcgccgccctcctgcacaaggagctgaactgcaagagtaagagggctgtccgggactacctcttccgagtgaacgaggccacagctgtcctgtacgcccgccacgtgcttgcatccctgctcgccgagtggcctagccacgtgccagtgagcgaggacatcctggagctcagtggccctgcccatatgacctacattttggatatgttcatgcagctggaagaaaagcatgagtgggagaaggtagttatgcagactgagcttgtgctcacccaccaggttcttcctctgccccacaggcttcctccagtgagtgcttcctggagcgaggctacctgtgtggctgtgcagctccctgacaggtgtgaatgcagcaaaggtagggtcactgtatcctctcccaaggattgggctagtgaggaactcaggggccctgagcgcgatttccagctgaaccagaaagctttgtcgccatcttcccagtttccaagtgcagaaatcttgaggcacattcggtagctcctttttgatcctgtccctcacccaccttcacacacacacacgcagtccatgaggaagttcatttggcctctcagccttgctttgtccatctgagaacaccaccagacctcgaggtcttttcccggccttgcagccctgcaggtgctggcaggcttgctctagcatatctatctttcggaagggacagagggagccaccctgcctctactaggcccttgcataggcgtgtcctcccacagttcttgccacctagagctcccaaccctgcacctcactccaggcatcgattacattgtgtggtcattatttatccataggccaatccacctgcttggctggggactccttcaaggaccaggaccctttatgattggttcagttagttctttcagaccacctctaagtagcatcattctgaaaggactgcagtgtcctgattgacaccaagagcctggtcaagtgagaggtggctggtggagttggttttgggtggtggagtcacagaggctcgtcctaggtctaagatgatgccagcacctttgggtggagcttgggttgaagtaaactgtcccttcttcctgatgccacttgcaggccctgaccttatctgtctgcttcccaccagatcctgcagaaagtgctccagggctgccgagaggacatgctggggaccatggccctggctgcatgccagttcatggaggagccaggaatggaggtgcaagtgagggagtcgaaacacccgtataacaacaacaccaacttcgaggataaagttcacattcctggtgccatctacctctcaatcaaattcgactctcagtgcaacacagaggagggctgtgacgagttagccatgtccagcagcagtgacttccagcaagaccgacacagcttcagcgggtctcagcagaagtggaaagattttgaacttccaggagacactctgtattaccgcttcacctccgacatgagcaacaccgagtggggctacagattcaccgtgacggccggacacctggggcggttccagacaggattcgagattttgaagcagatgttgtcagaagaaagggtcgtgcctcatctcccattggcaaaaatttgggaatggctggtgggcgtggcctgtcgccagactggccatcaacgattaaaagccatccacttacttctgaggattgtgcgatgctgcggccacagtgacctgtgtgaccttgcgctgttgaagcccctgtggcagctctttacccacatggagtacggcctgtttgaggacgtgacgcagcccggcatcctccttcccctgcatcgtgccctcactgagctcttcttcgtcaccgagaaccgtgcccaggagcttggcgtgctgcaggattacctgctggccctaaccacggacgaccaccttctccgctgtgcggcacaggctctgcagaacattgctgccatcagcctggccatcaactacccaaacaaggccacccgcctctggaatgtggagtgttagcccttggtggggcgtgcatgggactagttcatctgccacagggattttagagcagacatctaacctcattcaggaaaactcctgtagcgccagtgcccagctctccttgagctgaccactccagttaggatgccaagcagccacgtctccaagagctcccgtgcgtaggctggacacaagcacaggctgtagcatggtgaaaataagccaagcagtgcagaatgcctcagaaagggtgggcagggggcccttaagaaggttcagagaccagccttctccagaggctgtcactgcaggagccgtgggcctgggaagacttggaagcggcctctctcaactggtttctgtctccgtggagctggaactgcctgcacttgccttcagagggaggcacagtccacccagatccacctttccagcaagacccccagtggctgcccagcctgggagcacctctttgcttttcacaccaaaccaaaactggcgagagcccctcctagccaccagtgatccccaagcatccagtacagaaccaggcatcgagctagctccctgcacggccgcaccctcccagagaactccttgaggagaacaagtgcccttggggacagccggcaggcgcccctgtacgtctgctcatgcaccaggcagcacagccgcagttcctcagttgttgttttgacatatttcagtttccacctcacgtttttagagcagaaccacactgtctccctggaggggctcgagggcatgaccggggactgaccattctgtgaaaggagcagaatgtgaggagcacgcgtgagcttatgtaccgtgaagatgatcagaggatatcttattttaagagtaaaaacccacataattttatttctgcttgatagtcatggtagtctgtcatacccacctctgggactctgcgtggctgtttggctgtcacttgtagcaataacgacattagttctagtcagtgctgttttacatttttcttttgatgggtttagtcttgccctggagtgccgatgatgattctccctccagagccacgcttgggaacatgaagcaagtctggcgtgtgggctgcgtgccggccttagtgggacccgtggggttggagcatgcctttaggggcagtgtctgggccgaagcacgtcccaccacacagtgccagagccagagaaggggccccaccaccaaggccaagcttgaccaggtcagcattgccatggcccagtgtgccccgtggcctctgaagatccctctgtgcagggtctgcagggatctggattgcaagggcccaagtctgcaggtctggaagcatcttcctataagagcactttcgccttctgggtcaggactccaaggtgcagcggggcttcacagccctacaattgggttctcagctaagccccagagttctggtagaaccatcccggggcgggtggagggtgggatttaagggagacgggaacacatggggcaggtcctggaacttggtggcctgaggactgaggccattgccctggtggaaaggcctggcctggttcctgtggcttgggacctgaataggcaggtgctgctggctccgtagaaacccttttcccatcttttgctctttgccaaacctaccttgctttgggagctgcctgcaccaccccagagaaggccccaccttcttcatccctcagacccgaggaggcctcccagtaaggagtttcccaagaggggactcacaggaaacaagtcttagtgcttgggagggaggccccgctgcgtgctcagactcacagccaacctgggaaggtagacgagatagcgccacccacgcccctccacaccccagactccgagtaaagcgggcggtagggccggagtcacctcccctatggcagtggccgccgctgtactccatcctcccgtcaggaagatcagctgtaaataaacgctgggctccccagagcacctgtccgcccactgcccttgctgttctgggatcttcgctgcagttcacgggaaacaagcctgagtccgctcgcacccgcggctgctctcccggctcggcccggccgcctctgtctccggccaccgggtggcgctgccgagccagagccgccgcgtcccggcgctttccaggagccccaggcccggaggaggcgaagcccgcagagcaaaggtggaaacacgtgcctacgctgtaaagaaatcctgttccagagcatacctgttgtacaaacagacactgttcctaacgagaggagtgacgtattttcatcaccgtttttaatttgttttcttacgggtttacgattttgaatttttcttatttggttgaaagaattttgattctatcagcctgagtgagttcagcctgtaaaaaggatgttaagctgtgggtaaaatatgcaaacgaaaagaaatatattgtacaaattctatataataaggtaaaaaaaaaaa

SEQ ID NO: 219 - DNA, 537 bp, Homo sapiens
  CDS (15)..(476)
aattcggcactaggatggcggggccggtgaaggaccgcgaggccttccagaggctcaacttcctgtaccaggccgcccattgtgtccttgcccaggaccccgagaaccaggcgctggcgaggttttactgctacactgagaggaccattgcgaagcggctcgtcttgcggcgagatccctcggtgaagaggactctctgtcgaggctgctcttccctcctcgtcccgggcctcacctgcacccagcgccagagacgctgcaggggacagcgctggaccgtacagacctgcctaacatgccagcgcagccaacgcttcctcaatgatcccgggcatttactctggggagacaggcctgaggcccagctcgggagccaagcagattccaaaccactacaacccttgccaaacacagcccactccatttcagaccgccttcctgaggagaaaatgcagactcagggttccagtaaccagtgatggattcaccccatctcccaaataaagtttacttgttttacattccaaaaaaaaaaaa

SEQ ID NO: 220 - DNA, 657 bp, Homo sapiens
  CDS (167)..(493)
atttcgtcgggcgggtgctggcagaggacgcaaaaggggtgaggtcacgtctcccttgagccccgagccgctggcttttcagagcctcgccacaagccggcggccagagccccagaccacacagaccgtgcgctcctccgccctcccggcgccgccggcctcgcccatgtctcagtacgcccctagcccggacttcaagagggctttggacagcagtcccgaggccaacactgaagatgacaagaccgaggaggacgtgcccatgcccaagaactacctgtggctcaccatcgtctcgtgtttttgccctgcgtaccccatcaacatcgtggctttggtcttttccatcatgtctctgaacagctacaacgacggagactacgaaggagccaggcggcttgggcggaatgctaagtgggtagccatcgcctccatcatcattggccttctcatcatcggcatttcttgtgcagttcacttcacaaggaatgcctgaggaaccagcggtcagtgggctgtgagcgtggaggatggacctcatccacacacaccccaaaggagtctctaaggaatggatccttgacttcagactgtgagatcttttcctccaggactctccagaggcaggtccctggcaaatgaacaagaaaaaaaaaa

SEQ ID NO: 221 - DNA, 5757 bp, Homo sapiens
  CDS (2)..(4078)
  misc_feature (1)...(5757): n = a,t,c or g
ggagcaaggcccccggcgggcggggaggatatggggcggcagtggcggctgcaggaggcgggcgtggacgagccggtggctgcagcggcggcggtccccggagtcctgtgaagcgcccctgtccgcgcctctgtggggccctcagagagggctgccaggacgcgagccactgaggagccgctcagccagcgccatagcccttaggactatcggtcacattctcgcgctcctgctccggctcctccatcttggcctcggcagtggcggctgccgggaggatgtgccgccttctggcagggggaagaaggaggagaagatgaagaagcaccggcgggccttggccctggtctcctgcctgtttctgtgctctctggtctggcttcccagctggcgtgtatgttgtaaagagagttcttcagcttcagcgtcatcatattactctcaagatgacaactgcgcactagaaaatgaagatgtacaattccagaaaaaggatgaaagagagggacctatcaatgccgaatcattgggaaaatcaggttcaaatttacctatttctccaaaagaacataaattaaaagatgattctattgtggatgtacaaaatacagagtcaaaaaagttaagtccaccggtggtggagacactccctacagttgatttgcatgaagagtcttccaatgcagttgtggacagtgaaactgttgaaaatatttccagctcatctacctcagaaatcactccaatctcaaagcttgatgaaatagaaaaatctggtactattccgatagccaaaccaagtgaaactgagcagtctgaaactgattgtgatgttggtgaggcccttgatgctagtgctccaattgaacaaccttcctttgtcagtccacctgacagccttgttggccagcatatagaaaatgtatcatcttcacatggtaaaggaaagataacaaaatcagaatttgaatcaaaagtttcagcaagtgaacagggcggtggtgatccaaaatctgcattgaatgcttcagataatttaaaaaatgagagctctgattatacaaaaccaggagacattgaccctacatcagtagcaagtcccaaagatccagaagatataccaacatttgatgaatggaagaagaaagttatggaagtagaaaaagaaaaaagtcagtcgatgcatgcatcttctaatggaggttcacatgccaccaaaaaggtccagaaaaatcgaaataattatgcctcagtagaatgtggtgccaaaattctagcagctaatccagaagccaagagcacatctgctattcttatagaaaatatggatctttacatgttgaatccttgcagcactaaaatttggtttgttattgaactttgtgaaccaattcaagtaaaacagcttgatattgcaaattatgaattattttcttctactcctaaagattttctggtttctatcagtgacagatatccaacaaataagtggattaagctgggtacttttcatggtagagatgagcggaatgtacagagtttccctttagatgaacagatgtatgcaaaatatgtcaagatgttcatcaagtacataaaggttgagttgctatcacattttggatcagagcacttttgtccattaagccttataagggtatttggcactagcatggtggaagaatatgaagaaattgctgattcccagtatcactcagaacgccaggaactatttgatgaggactatgattatccactggattataatactggagaggataaatcctcaaaaaatcttcttggttctgctacaaatgccattctaaatatggtgaatattgctgctaatattctgggagcaaaaactgaagacctgacagaaggaaataaaagtatatctgagaatgccactgccacagctgcacctaaaatgcctgaatcaactcctgtttcaactcctgttccatctcctgagtatgtaaccactgaagtacacacacatgacatggagccgtcaacaccagatactccaaaagagagtcccattgtacagttagttcaagaggaggaagaggaggcaagtccatctacagtgacccttctgggcagcggtgaacaggaagatgaatcatcaccctggtttgagtcagagacacaaatattttgcagtgaactgaccacaatttgttgtatttctagtttttcagaatacatatataaatggtgttcagttagagttgctctttatcggcagcgcagccgaactgctttgagtaaaggaaaagattatcttgtgttagctcaaccacccttactacttcctgcggaatcagtagatgtttcagtattgcaacctctgagtggagaattggaaaatacgaatatagaaagggaagctgaaactgttgttctgggtgatttaagtagtagtatgcaccaggatgacttggtgaatcacactgtagatgcagttgaacttgaaccaagccattctcaaactctttctcagtctcttcttttagatattaccccagaaatcaatcccttgcctaaaatagaagtatctgagtctgttgaatatgaggcaggacatataccatcaccagtgattccccaagagagttctgttgagatcgataatgaaacagaacaaaagtctgagagctttagttctatagagaaaccatctattacctatgaaacaaataaagttaatgagttaatggataatattataaaagaagatgtgaactccatgcaaattttcacaaagctgtctgaaacaatagtgccaccaataaatacagccactgtacccgacaatgaagatggggaagccaaaatgaatatagctgacacagcaaagcaaactttgatttctgttgtggattcttcttcattacctgaagtaaaagaagaagaacagtctccagaagatgcccttttgagagggttacagaggacagctacagatttttatgctgaattgcaaaattctacagatctaggatatgctaatggaaatcttgtacatggatcaaaccaaaaggagtcagtatttatgagacttaataatcgtattaaagccttagaagttaacatgtctctcagtggtcgctatctggaggagcttagccaaaggtaccgaaaacaaatggaagaaatgcaaaaggctttcaataaaacaatcgtgaaacttcagaatacttcaagaatagcagaggagcaggatcagcggcaaactgaagccatccagttgctacaggcacagctgaccaacatgacacagcttgtttcaaatttatcagcaacagtagcagaattgaaacgggaggtttcagatcgacaaagctatcttgtcatatctttggttctttgtgttgtcttgggactgatgctttgtatgcagcgttgtcgaaatacttctcaatttgatggagattatatttcaaaacttcctaaaagtaatcagtatccaagccctaaaaggtgtttctcttcctatgatgatatgaatttgaaaagaagaacttcattcccactcatgagatccaagtctctacagttaactggcaaagaagtagacccaaatgatttgtacattgtagaacccctcaagttttctccagaaaagaagaagaagcgctgcaagtacaaaattgaaaaaattgagaccataaagcctgaagaaccattgcaccccatagccaatggcgacataaaaggaagaaagccctttacgaaccagagagatttttctaatatgggagaagtttatcactcttcttataaaggtcctccatctgaaggaagctcagaaacttcatcacagtcagaagagtcctatttttgtggcatttcagcttgcacaagtctgtgcaatggacagtctcaaaagacaaaaactgagaagagggctttaaaacgaagacgatctaaagtccaagaccaaggaaaattgataaaaactctaatacagactaagtcgggatcattgccgagcctgcatgacataatcaaaggaaacaaagagatcaccgtgggaacatttggtgttacagcagtctcgggacatatctaaaattaattgaacttttcatacagaagacttttttgttgttgttctttgaagaacagtctgtagtatttgaagggtttgggggagggagaaaatattaatgggaaaggcattcagaaattatggtttctacctttttaaaaagtagatgggattgtgtcaatcttggttaatgagctacagttttacaaagctgatcacttcctataaggacaatggtagacattttataaagatgttttttcacaagattaattactgggacaaaagtaatttggaagcccagttccttaggtgggataggaatgaaagcctaaacctcttcctttagctttgttcctatttcttgcaccttcccatatttatgtgccttttgtctatttataatgccactggaagaggagggataactttttctgttatttgatttcttttataactttgttaggtttttgaagctgcaaacactacaatgctttgagggggtctgtgcctgaagctcaggagtgtggatcagacagtctaaagatcctaaaaacttgccaactggatctttgtttagcaaactcactggaaatgaacacttaatggaatttttaagtctgttctgttaggtagatggtgatgctcttgttattttcacttattcagactggattacttcttacttagttactaactcaatgaggaaaaatccctacaggatctttttttgcaaacaactgatatatgcagacaaatttttgacaaattcaccttttaaacacacttaaccatttgtgaaggttttctttagcttacattttaaacatacacaataaacactaatcctccaaactttcactgtttttattagtatgaatataaaatttgaaggtttggccaattagtacaagtctcatgatataatcactgcctgcatacatatgcacagatccagttagtgagtttgtcaagcttaatctaattggttaagtctaaagagattattattccttgatgtttgctttgtattggctacaaatgtgcagaggtaatacatatgtgatgtcgatgtctctgtctttttttttgtctttaaaaaataattggcagcaactgtatttgaataaaatgatttcttagtatgattgtacagtaatgaatgaaagtggaacatgtttctttttgaaagggagagaattgaccatttattgttgtgatgtttaagttataacttattgagcacttttagtagtgataactgtttttaaacttgcctaatacctttcttgggtattgtttgtaatgtgacttatttaacgccttttttgtttgtttaagttgctgctttaggttaacagcgtgttttagaagatttaaatttctttcctgtctgcacaattagctattcagagcaagagggcctgattttatagaagccccttgaaaagaggtccagatgagagcagagatacagtgagaaattatgtgatctgtgtgttgtgggaagagaattttcaatatgtaactacggagctgtagtgccattagaaactgtgaatttccaagtcgacgcggccgcgaattcggatcctcgagagatctctttttttgggtttggtggggtatcttcatcatcgaatagatagtgtagatacatcatgcccntcaagggnaaaaccccccgtgcccatcca

SEQ ID NO: 222 - DNA, 5217 bp, Homo sapiens
  CDS (583)..(4656)
ttggtacacgtccggaattcccgggtcgacgatttcgtcctctctttcacgtcagaggcaggaaccgactgtgctaaggctgttggctcaacacccagaggagacgggcagacccagggagagtgagagaagggggtcctctctgacccaaggaattaccactagtggagtgaagccacctgactttttgatcttattttggttgcctcctcattctccttccacccgtagccctgacagcttgggtttcatttctttcgtggagccttgtctcttcctcccagaataggaggaagggaagagaagggaaagaggagggctctctaggtgagcgcatcagctggctccagcctgagcaagcaagaattttcttcccaggaagctcctctcgctccccggccgcccacccccagcctgggtggctgtatcgttttaactgcatagagggcaggtctcttttggaattaggattaaagaaagtgcagtaaagagaaagcatcgaagacaccatcacaaaagattcccacaactccatgctgtgtgctgcaggctggtcctgaacccagatctctggctgagaggatgggggcagatggggaaacagtggttctgaagaacatgctcattggcgtcaacctgatccttctgggctccatgatcaagccttcagagtgtcagctggaggtcaccacagaaagggtccagagacagtcagtggaggaggagggaggcattgccaactacaacacgtccagcaaagagcagcctgtggtcttcaaccacgtgtacaacattaacgtgcccttggacaacctctgctcctcagggctagaggcctctgctgagcaggaggtgagtgcagaagacgagactctggcagagtacatgggccagacctcagaccacgagagccaggtcacctttacacacaggatcaacttccccaaaaaggcctgtccatgtgccagttcagcccaggtgctgcaggagctgctgagccggatcgagatgctggagagggaggtgtcggtgctgcgagaccagtgcaacgccaactgctgccaagaaagtgctgccacaggacaactggactatatccctcactgcagtggccacggcaactttagctttgagtcctgtggctgcatctgcaacgaaggctggtttggcaagaattgctcggagccctactgcccgctgggttgctccagccggggggtgtgtgtggatggccagtgcatctgtgacagcgagtacagcggggatgactgttccgaactccggtgcccaacagactgcagctcccgggggctctgcgtggacggggagtgtgtctgtgaagagccctacactggcgaggactgcagggaactgaggtgccctggggactgttcggggaaggggagatgtgccaacggtacctgtttatgcgaggagggctacgttggtgaggactgcggccagcggcagtgtctgaatgcctgcagtgggcgaggacaatgtgaggaggggctctgcgtctgtgaagagggctaccagggccctgactgctcagcagttgcccctccagaggacttgcgagtggctggtatcagcgacaggtccattgagctggaatgggacgggccgatggcagtgacggaatatgtgatctcttaccagccgacggccctggggggcctccagctccagcagcgggtgcctggagattggagtggtgtcaccatcacggagctggagccaggtctcacctacaacatcagcgtctacgctgtcattagcaacatcctcagccttcccatcactgccaaggtggccacccatctctccactcctcaagggctacaatttaagacgatcacagagaccaccgtggaggtgcagtgggagcccttctcattttccttcgatgggtgggaaatcagcttcattccaaagaacaatgaagggggagtgattgctcaggtccccagcgatgttacgtcctttaaccagacaggactaaagcctggggaggaatacattgtcaatgtggtggctctgaaagaacaggcccgcagcccccctacctcggccagcgtctccacagtcattgacggccccacgcagatcctggttcgcgatgtctcggacactgtggcttttgtggagtggattccccctcgagccaaagtcgatttcattcttttgaaatatggcctggtgggcggggaaggtgggaggaccaccttccggctgcagcctcccctgagccaatactcagtgcaggccctgcggcctggctcccgatacgaggtgtcagtcagtgccgtccgagggaccaacgagagcgattctgccaccactcagttcacaacagagatcgatgcccccaagaacttgcgagttggttctcgcacagcaaccagccttgacctcgagtgggataacagtgaagccgaagttcaggagtacaaggttgtgtacagcaccctggcgggtgagcaatatcatgaggtactggtccccaggggcattggtccaaccaccagggccaccctgacagatctggtacctggcactgagtatggagttggaatatctgccgtcatgaactcacagcaaagcgtgccagccaccatgaatgccaggactgaacttgacagtccccgagacctcatggtgacagcctcctcggagacctccatctccctcatctggaccaaggccagtggccccattgaccactaccgaattacctttaccccatcctctgggattgcctcagaagtcaccgtacccaaggacaggacctcatacacactaacagatctagagcctggggcagagtacatcatttccgtcactgctgagaggggtcggcagcagagcttggagtccactgtggatgctttcacaggcttccgtcccatctctcatctgcacttttctcatgtgacctcctccagtgtgaacatcacttggagtgatccatctcccccagcagacagactcattcttaactacagccccagggatgaggaggaagagatgatggaggtctccctggatgccaccaagaggcatgctgtcctgatgggcctgcaaccagccacagagtatattgtgaaccttgtggctgtccatggcacagtgacctctgagcccattgtgggctccatcaccacaggaattgatcccccaaaagacatcacaattagcaatgtgaccaaggactcagtgatggtctcctggagccctcctgttgcatctttcgattactaccgagtatcatatcgacccacccaagtgggacgactagacagctcagtggtgcccaacactgtgacagaattcaccatcaccagactgaacccagctaccgaatacgaaatcagcctcaacagcgtgcggggcagggaggaaagcgagcgcatctgtactcttgtgcacacagccatggacaaccctgtggatctgattgctaccaatatcactccaacagaagccctgctgcagtggaaggcaccagtgggtgaggtggagaactacgtcattgttcttacacactttgcagtcgctggagagaccatccttgttgacggagtcagtgaggaatttcggcttgttgacctgcttcctagcacccactatactgccaccatgtatgccaccaatggacctctcaccagtggcaccatcagcaccaacttttctactctcctggaccctccggcaaacctgacagccagtgaagtcaccagacaaagtgccctgatctcctggcagcctcccagggcagagattgaaaattatgtcttgacctacaaatccaccgacggaagccgcaaggagctgattgtggatgcagaagacacctggattcgactggagggcctgttggagaacacagactacacggtgctcctgcaggcagcacaggacaccacgtggagcagcatcacctccaccgctttcaccacaggaggccgggtgttccctcatccccaagactgtgcccagcatttgatgaatggagacactttgagtggggtttaccccatcttcctcaatggggagctgagccagaaattacaagtgtactgtgatatgaccaccgacgggggcggctggattgtattccagaggcggcagaatggccaaactgattttttccggaaatgggctgattaccgtgttggcttcgggaacgtggaggatgagttctggctggggctggacaatatacacaggatcacatcccagggccgctatgagctgcgcgtggacatgcgggatggccaggaggccgccttcgcctcctacgacaggttctctgtcgaggacagcagaaacctgtacaaactccgcataggaagctacaacggcactgcgggggactccctcagctatcatcaaggacgccctttctccacagaggatagagacaatgatgttgcagtgactaactgtgccatgtcgtacaagggagcatggtggtataagaactgccaccggaccaacctcaatgggaagtacggggagtccaggcacagtcagggcatcaactggtaccattggaaaggccatgagttctccatcccctttgtggaaatgaagatgcgcccctacaaccaccgtctcatggcagggagaaaacggcagtccttacagttctgagcagtgggcggctgcaagccaaccaatattttctgtcatttgtttgtattttataatatgaaacaaggggggagggtaatagcaatgtgttttgcaacatattaagagtatgtgaaggaagcagggatgtcgcaggaatccgctggctaacatctgctcttggtttctgctgccctggagcctgaccctcagtctccattctccctcctacccaggcctcctcaaccttcacctcctttcccaccaaggaggagaagtaggaagttttcttaaagggccaattcaaagccaagtcgtggggtgcagattgttatggtgacaggcacacacatttttctacccttcttctgagatgtcctctgccttccaggtatttgtgattttgtcacagcctgacatggccaggttctcacactggcccagagaaaagagcctcagcaagagagttttgccaacaattccccttaaaaggaaacagatcaactacaccgcatcccaacaacccaggttcttttccttccttccttccttcctcccttccttctttcctgccttccc

SEQ ID NO: 223 - DNA, 1093 bp, Homo sapiens
  CDS (92)..(589)
  misc_feature (1)...(1093): n = a,t,c or g
taccctgcaggtaccggtccggaattcccgggtcgacccacgcgtccgagccgaagcccgagctgccgccgcagccacagccgagggcactatggcttctggagttacagtgaatgatgaagtcatcaaagtttttaatgatatgaaagtaaggaaatcttctacacaagaggagatcaaaaagagaaagaaagcagttctcttctgtttaagcgatgacaaaagacaaataattgtagaggaagcaaagcagatcttggtgggtgacattggtgatactgtagaggacccctacacatcttttgtgaagttgctacctctgaatgattgccgatatgctttgtacgatgccacatacgaaacaaaagagtctaagaaagaagacctagtatttatattctgggctcctgaaagtgcacctttaaaaagcaagatgatttatgctagctctaaagatgccattaaaaagaaatttacaggtattaaacatgagtggcaagtaaatggcttggatgatattaaggaccgttcgacacttggagagaaattgggaggcaatgtagtagtttcacttgaaggaaaaccattataaaatgacagtcaagtgccatctggatcttaaggagcttccatttctccagctcagtccattggaatagtattaggttttggttttttgttgtatttccccctttccactgggcccttccaacacaatgaatgaaggaaatatcatttatttaagcagcctatcagtgattgccattagactgttgaatactgttacttttatatagaacccaaggaatgccttcctgtcatattttagccaaaacaactggttatatgcctcccttgcagcaagcactacaatgtatgtgatcgtcaatgtgaatagcttagaatactgcaaaggataagctaattgaatgccttgaaagtattatccactggtcagatggtcaacttttttcagtattattttatagttgggcacttggattggcagttctgtggaggcttgaggcatttcatgacacctcacctggcctgggcaaggccnatttttaggtgatatgggcagcacgggata

SEQ ID NO: 224 - DNA, 2535 bp, Homo sapiens
  CDS (120)..(1547)
atttggccctcgaggccaagaattcggcacgagaggtttgtctccgctgtttcatctctatggctgtcagaggtgggcggctttgaccgagaggctgctggagctcgtgtttggacgcgatgtttcgtctgaactcactttctgctttggcagaactggctgtgggttctcgatggtaccatggaggatcacagcccatccagatccggcgaagactaatgatggtggctttcctgggagcatctgcagtaactgcaagtactggtcttttgtggaagagggcccatgcagaatctccaccatgtgtagacaacctaaaaagtgacatcggtgataaagggaagaataaagatgaaggggatgtttgtaaccatgagaaaaagactgcagatcttgcccctcacccagaagagaaaaagaagaaacgttctggattcagagacagaaaagtgatggaatatgagaataggattcgagcctactccacgccagacaaaatcttccgatattttgccaccttgaaagtcatcagtgagcctggtgaagcagaagtgtttatgacaccagaagattttgtgcgatccataacacccaatgaaaaacaaccagaacacttgggtctggatcaatatataataaaacgctttgatggaaagaaaatttcccaggaacgagaaaaatttgctgatgaaggcagtatattttacacccttggagaatgtgggctcatatccttttcagactacattttcctcacaactgttctttccactcctcagagaaattttgaaattgccttcaagatgtttgatttgaatggagatggagaagtagatatggaagaatttgaacaggttcagagcatcattcgctcccaaaccagtatgggtatgcgccacagagatcgtccaactactggcaacaccctcaagtctggcttgtgttcagccctcacaacctacttttttggagctgatctgaagggaaagctgacaatcaaaaacttcctcgaatttcagcgtaaactgcagcatgatgttctgaagcttgagtttgaacgccatgaccctgtggatgggagaattactgagaggcagtttggtggcatgctacttgcctacagtggggtgcagtccaagaagctgaccgccatgcagaggcagctcaagaagcacttcaaagaaggaaagggtctgacatttcaggaggtggagaacttctttactttcctaaagaacattaatgatgtggacactgcattgagtttttaccatatggctggagcatctcttgataaagtgaccatgcagcaggtggccaggacagtggctaaagtggagctctcagaccacgtgtgtgatgtggtgtttgcactctttgactgtgatggcaatggcgaactgagcaataaggaatttgtttccatcatgaagcaacggctgatgagaggcctggaaaagcccaaagacatgggtttcactcgcctcatgcaggccatgtggaaatgtgcacaggaaactgcctgggacttcgctttacccaaacagtaaccccacactgcaagaggggacccctccacccccagtaccctggaccccctccgcagagtctcggcagagccctttgtgctgctgcttctggaagtagtcccccttcctcccgggatgacctcaggactctgtcggtttcccctctttacccttccccgtccccgtgttctgctgggctctgattctgcccaatgagtatccccataggttctcaaaaacatgaacaagtctgtaaagctcagacatttgtcagcctcaacagcaccacccattcaagcatcctgtggataaagaattcagggaaccatccacacacctgccaaccctgggaagcatccagttctcaaatcgtttttgctatggatttatactaacaagaacattccttgacttccctcctgctggtgttttaaagccacaagtagggaagatatctggcaggcagaaagaagtctgtgatgataaacaatgatgaggatgacctaggcaccctacgctagtgtgagaagcctgcgccccaggaaggatctgtgttagtccctgggatggctccaaggcctgctctaggaaggcagcatgctcagtgggaacacagcaagattcagaatttaaagtagttgcttcatggctctgtgcactcccttttcttcctcgcagcctccctaagatgactccagtgtgaccctgtgcttagtgagcaatagtgattgagctcatgttccctgcaagtgccatttcctctccaggatgggcctctaaagctgaggcctggctcagagcctgtttgccctctgtcttaaacaattgtaaatatcacttaaattataaccatttgcaataaacatcccccctcaaacctaaaaaacaaaaaaggagaggaggagggaggagagagagggagaagaagaaaaaaagggtctttaattaggcgggcccaagtttttcccttaggggggggtaattttacttggaatggccgccgttt

SEQ ID NO: 225 - DNA, 710 bp, Homo sapiens
  CDS (257)..(646)
ggcctacggctgtggggcgcgcagagtccacctggcggccaagggcgctggcgaccgctgaagctcctgggggtgttcggggtccgggctgcgcctgtgcccgcgggaaggctgggcgcttcccacacacagaccccgctccgggccagccccgcagggagactaccagggctggcggtagctgggcgtggtcgggtcgggggcggctgtgggcggccggcaggcagcgcgcggggcagccctcggcagacggccaatggcggcggtgctcggggcgctcggggcgacgcggcgcttgttggcggcgctgcgaggccagagcctagggctagcggccatgtcatcaggtactcacaggttgactgcagaggagaggaaccaagctatacttgaccttaaagcagcaggatggtcggaattaagtgagagagatgccatctacaaagaattctccttccacaattttaatcaggcatttggctttatgtcccgagttgccctacaagcagagaagatgaatcatcacccagaatggttcaatgtatacaacaaggtccagataactctcacctcacatgactgtggtgaactgaccaaaaaagatgtgaagctggccaagtttattgaaaaagcagctgcttctgtgtgatttcttccaaaatacatgtaaaatcttgcacacatcttagctgcattggatgttgagggaa

SEQ ID NO: 226 - DNA, 1209 bp, Homo sapiens
  CDS (339)..(1010)
cggctgagcgtgtggctgcaggagcttctgtgggagtacggtcatgagccttttgctgtactatgccctccctgccctgggcagctatgccatgctctccatcttcttcctgcgccggcctcatctgctgcacacgcccagggctcccaccttccgcatccgcctgggggcccaccgaggaggatctggagagctgctggagaacaccatggaggccatggagaactccatggcccagcgctcggacctcctggagctcgactgtcagctgacacgggacagagtggtggtggtgtcacatgatgagaacctgtgccgccagtcgggcctaaacagggatgtgggcagcctggacttcggagctcatccgtgagatagcaggcttggtgagacgctatgaccgtaatgaaatcaccatctgggcctcggagaagcgggtcagaccggcgcatggttcgtctggaggacctgttccagaggtttccaaggacacccatgagcgtagagatcaaagggaagacgaagagctcatccgtgagatagcaggcttggtgagacgctatgaccgtaatgaaatcaccatctgggcctcggagaagagctcggtcatgaagaaatgcaaggctgccaaccccgagatgcccctgtccttcacaataagccgaggattctgggtgctgctttcctactacctggggctgctgcccttcatcccaatccctgagaagttcttcttctgcttcctgcccaacatcatcaacaggacctatttcccattttcctgctcttgcctgaaccagttattggctgtggtttcgaaatggctgatcatgaggaagagtctgatccgacacttggaggagcgaggggtgcaggtggtcttttggtgccttaatgaagagtcggattttgaagcagccttcagcgtgggagccactggcgtcataacggattatcccacagccctgcggcactacctggacaaccatggaccagctgcccggacctcctaagtccagaagcctcgaggtctcctgtttctcttcctgaaaaataaatatttgcctttcgatcacatcgttgtgcttctcctcccaggtctccttctccagaagctcccagaatgcttctgccatcttcagccccagggccatattcactgaaggaactacacattcacatttcacagatacttcctgagcgcctcct

SEQ ID NO: 227 - DNA, 1983 bp, Homo sapiens
  CDS (296)..(1690)
atttggccctcgaggccaagaattcggcacgagttgaaaagtgatgacggttgacgtttgctgatttttgactttgcttgtagctgctccccgaactcgccgtcttcctgtcggcggccggcactgtaggtgagcgcgagaggacggaggaaggaagcctgcagacagacgccttctccatcccaaggcgcgggcaggtgccgggacgctgggcctggcggtgttttcgtcgtgctcagcggtgggaggaggcggaagaaaccagagcctgggagattaacaggaaacttccaagatggaaactttgtctttccccagatataatgtagctgagattgtgattcatattcgcaataagatcttaacaggagctgatggtaaaaacctcaccaagaatgatctttatccaaatccaaagcctgaagtcttgcacatgatctacatgagagccttacaaatagtatatggaattcgactggaacatttttacatgatgccagtgaactctgaagtcatgtatccacatttaatggaaagcttcttaccattcagcaatttagttactcatctggactcatttttgcctatctgccgggtgaatgactttgagactgctgatattctatgtccaaaagcaaaacggacaagtcggtttttaagtggcattatcaactttattcacttcagagaagcatgccgtgaaacgtatatggaatttctttggcaatataaatcctctgcggacaaaatgcaacagttaaacgccgcacaccaggaggcattaatgaaactggagagacttgattctgttccagttgaagagcaagaagagttcaagcagctttcagatggtattcaggagctacaacaatcactaaatcaggattttcatcaaaaaacgatagtgctgcaagagggaaattcccaaaagaagtcaaatatttcagagaaaaccaagcgtttgaatgaactaaaattgttggtggtttctttgaaagaaatacaagagagtttgaaaacaaaaattgtggattctccagagaagttaaagaattataaagaaaaaatgaaagatacggtccagaagcttaaaaatgccagacaagaagtggtggagaaatatgaaatctatggagactcagttgactgcctgccttcatgtcagttggaagtgcagttatatcaaaagaaaatacaggacctttcagataatagggaaaaattagccagtatcttaaaggagagcctgaacttggaggaccaaattgagagtgatgagtcagaactgaagaaattgaagactgaagaaaattcgttcaaaagactgatgattgtgaagaaggaaaaacttgccacagcacaattcaaaataaataagaagcatgaagatgttaagcaatacaaacgcacagtaattgaggattgcaataaagttcaagaaaaaagaggtgctgtctatgaacgagtaaccacaattaatcacgagatccaaaagattagacttggaattcaacaactaaaagatgctgctgaaagggagaaactgaagtcccaggaaatatttctaaacttgaaaactgctttggagaaataccacgacggtattgaaaaggcagcagaggactcctatgctaagatagatgagaagacagctgaactgaagaggaagatgttcaaaatgtcaacctgattaacaaaattacatgtctttttgtaaatggcttgccatcttttaattttctatttagaaagaaaagttgaagcgaatggaagtatcagaagtaccaaataatgttggcttcatcagtttttatacactctcataagtagttaataagatgaatttaatgtaggcttttattaatttataattaaaataacttgtgcagctattcatgtctctactctgccccttgttgtaaatagtttgagtaaaacaaaactagttacctttgaaatatatatatttttttctgttacaaa

SEQ ID NO: 228 - DNA, 7281 bp, Homo sapiens
  CDS (342)..(7124)
acgcctgaggtaccggtccggaattcccgggtcgacgatttcgtgtgagtggggccgggacccgcagagccgagccgacccttctctcccgggctgcggcagggcagggcggggagctccgcgcaccaacagagccggttctcagggcgctttgctccttgttttttccccggttctgttttctccccttctccggaaggcttgtcaaggggtaggagaaagagacgcaaacacaaaagtggaaaacagttaatgaccagccacggcgtccctgctgtgagctctggccgctgccttccagggctcccgagccacacgctgggggtgctggctgagggaacatggcttgttggcctcagctgaggttgctgctgtggaagaacctcactttcagaagaagacaaacatgtcagctgctgctggaagtggcctggcctctatttatcttcctgatcctgatctctgttcggctgagctacccaccctatgaacaacatgaatgccattttccaaataaagccatgccctctgcaggaacacttccttgggttcaggggattatctgtaatgccaacaacccctgtttccgttacccgactcctggggaggctcccggagttgttggaaactttaacaaatccattgtggctcgcctgttctcagatgctcggaggcttcttttatacagccagaaagacaccagcatgaaggacatgcgcaaagttctgagaacattacagcagatcaagaaatccagctcaaacttgaagcttcaagatttcctggtggacaatgaaaccttctctgggttcctgtatcacaacctctctctcccaaagtctactgtggacaagatgctgagggctgatgtcattctccacaaggtatttttgcaaggctaccagttacatttgacaagtctgtgcaatggatcaaaatcagaagagatgattcaacttggtgaccaagaagtttctgagctttgtggcctaccaagggagaaactggctgcagcagagcgagtacttcgttccaacatggacatcctgaagccaatcctgagaacactaaactctacatctcccttcccgagcaaggagctggccgaagccacaaaaacattgctgcatagtcttgggactctggcccaggagctgttcagcatgagaagctggagtgacatgcgacaggaggtgatgtttctgaccaatgtgaacagctccagctcctccacccaaatctaccaggctgtgtctcgtattgtctgcgggcatcccgagggaggggggctgaagatcaagtctctcaactggtatgaggacaacaactacaaagccctctttggaggcaatggcactgaggaagatgctgaaaccttctatgacaactctacaactccttactgcaatgatttgatgaagaatttggagtctagtcctctttcccgcattatctggaaagctctgaagccgctgctcgttgggaagatcctgtatacacctgacactccagccacaaggcaggtcatggctgaggtgaacaagaccttccaggaactggctgtgttccatgatctggaaggcatgtgggaggaactcagccccaagatctggaccttcatggagaacagccaagaaatggaccttgtccggatgctgttggacagcagggacaatgaccacttttgggaacagcagttggatggcttagattggacagcccaagacatcgtggcgtttttggccaagcacccagaggatgtccagtccagtaatggttctgtgtacacctggagagaagctttcaacgagactaaccaggcaatccggaccatatctcgcttcatggagtgtgtcaacctgaacaagctagaacccatagcaacagaagtctggctcatcaacaagtccatggagctgctggatgagaggaagttctgggctggtattgtgttcactggaattactccaggcagcattgagctgccccatcatgtcaagtacaagatccgaatgggcattgacaatgtggagaggacaaataaaatcaaggatgggtactgggaccctggtcctcgagctgacccctttgaggacatgcggtacgtctgggggggcttcgcctacttgcaggatgtggtggagcaggcaatcatcagggtgctgacgggcaccgagaagaaaactggtgtctatatgcaacagatgccctatccctgttacgttgatgacatctttctgcgggtgatgagccggtcaatgcccctcttcatgacgctggcctggatttactcagtggctgtgatcatcaagggcatcgtgtatgagaaggaggcacggctgaaagagaccatgcggatcatgggcctggacaacagcatcctctggtttagctggttcattagtagcctcattcctcttcttgtgagcgctggcctgctagtggtcatcctgaagttaggaaacctgctgccctacagtgatcccagcgtggtgtttgtcttcctgtccgtgtttgctgtggtgacaatcctgcagtgcttcctgattagcacactcttctccagagccaacctggcagcagcctgtgggggcatcatctacttcacgctgtacctgccctacgtcctgtgtgtggcatggcaggactacgtgggcttcacactcaagatcttcgctagcctgctgtctcctgtggcttttgggtttggctgtgagtactttgccctttttgaggagcagggcattggagtgcagtgggacaacctgtttgagagtcctgtggaggaagatggcttcaatctcaccacttcggtctccatgatgctgtttgacaccttcctctatggggtgatgacctggtacattgaggctgtctttccaggccagtacggaattcccaggccctggtattttccttgcaccaagtcctactggtttggcgaggaaagtgatgagaagagccaccctggttccaaccagaagagaatatcagaaatctgcatggaggaggaacccacccacttgaagctgggcgtgtccattcagaacctggtaaaagtctaccgagatgggatgaaggtggctgtcgatggcctggcactgaatttttatgagggccagatcacctccttcctgggccacaatggagcggggaagacgaccaccatgtcaatcctgaccgggttgttccccccgacctcgggcaccgcctacatcctgggaaaagacattcgctctgagatgagcaccatccggcagaacctgggggtctgtccccagcataacgtgctgtttgacatgctgactgtcgaagaacacatctggttctatgcccgcttgaaagggctctctgagaagcacgtgaaggcggagatggagcagatggccctggatgttggtttgccatcaagcaagctgaaaagcaaaacaagccagctgtcaggtggaatgcagagaaagctatctgtggccttggcctttgtcgggggatctaaggttgtcattctggatgaacccacagctggtgtggacccttactcccgcaggggaatatgggagctgctgctgaaataccgacaaggccgcaccattattctctctacacaccacatggatgaagcggacgtcctgggggacaggattgccatcatctcccatgggaagctgtgctgtgtgggctcctccctgtttctgaagaaccagctgggaacaggctactacctgaccttggtcaagaaagatgtggaatcctccctcagttcctgcagaaacagtagtagcactgtgtcatacctgaaaaaggaggacagtgtttctcagagcagttctgatgctggcctgggcagcgaccatgagagtgacacgctgaccatcgatgtctctgctatctccaacctcatcaggaagcatgtgtctgaagcccggctggtggaagacatagggcatgagctgacctatgtgctgccatatgaagctgctaaggagggagcctttgtggaactctttcatgagattgatgaccggctctcagacctgggcatttctagttatggcatctcagagacgaccctggaagaaatattcctcaaggtggccgaagagagtggggtggatgctgagacctcagatggtaccttgccagcaagacgaaacaggcgggccttcggggacaagcagagctgtcttcgcccgttcactgaagatgatgctgctgatccaaatgattctgacatagacccagaatccagagagacagacttgctcagtgggatggatggcaaagggtcctaccaggtgaaaggctggaaacttacacagcaacagtttgtggcccttttgtggaagagactgctaattgccagacggagtcggaaaggattttttgctcagattgtcttgccagctgtgtttgtctgcattgcccttgtgttcagcctgatcgtgccaccctttggcaagtaccccagcctggaacttcagccctggatgtacaacgaacagtacacatttgtcagcaatgatgctcctgaggacacgggaaccctggaactcttaaacgccctcaccaaagaccctggcttcgggacccgctgtatggaaggaaacccaatcccagacacgccctgccaggcaggggaggaagagtggaccactgccccagttccccagaccatcatggacctcttccagaatgggaactggacaatgcagaacccttcacctgcatgccagtgtagcagcgacaaaatcaagaagatgctgcctgtgtgtcccccaggggcaggggggctgcctcctccacaaagaaaacaaaacactgcagatatccttcaggacctgacaggaagaaacatttcggattatctggtgaagacgtatgtgcagatcatagccaaaagcttaaagaacaagatctgggtgaatgagtttaggtatggcggcttttccctgggtgtcagtaatactcaagcacttcctccgagtcaagaagttaatgatgccaccaaacaaatgaagaaacacctaaagctggccaaggacagttctgcagatcgatttctcaacagcttgggaagatttatgacaggactggacaccagaaataatgtcaaggtgtggttcaataacaagggctggcatgcaatcagctctttcctgaatgtcatcaacaatgccattctccgggccaacctgcaaaagggagagaaccctagccattatggaattactgctttcaatcatcccctgaatctcaccaagcagcagctctcagaggtggctccgatgaccacatcagtggatgtccttgtgtccatctgtgtcatctttgcaatgtccttcgtcccagccagctttgtcgtattcctgatccaggagcgggtcagcaaagcaaaacacctgcagttcatcagtggagtgaagcctgtcatctactggctctctaattttgtctgggatatgtgcaattacgttgtccctgccacactggtcattatcatcttcatctgcttccagcagaagtcctatgtgtcctccaccaatctgcctgtgctagcccttctacttttgctgtatgggtggtcaatcacacctctcatgtacccagcctcctttgtgttcaagatccccagcacagcctatgtggtgctcaccagcgtgaacctcttcattggcattaatggcagcgtggccacctttgtgctggagctgttcaccgacaataagctgaataatatcaatgatatcctgaagtccgtgttcttgatcttcccacatttttgcctgggacgagggctcatcgacatggtgaaaaaccaggcaatggctgatgccctggaaaggtttggggagaatcgctttgtgtcaccattatcttgggacttggtgggacgaaacctcttcgccatggccgtggaaggggtggtgttcttcctcattactgttctgatccagtacagattcttcatcaggcccagacctgtaaatgcaaagctatctcctctgaatgatgaagatgaagatgtgaggcgggaaagacagagaattcttgatggtggaggccagaatgacatcttagaaatcaaggagttgacgaagatatatagaaggaagcggaagcctgctgttgacaggatttgcgtgggcattcctcctggtgagtgctttgggctcctgggagttaatggggctggaaaatcatcaactttcaagatgttaacaggagataccactgttaccagaggagatgctttccttaacagaaatagtatcttatcaaacatccatgaagtacatcagaacatgggctactgccctcagtttgatgccatcacagagctgttgactgggagagaacacgtggagttctttgcccttttgagaggagtcccagagaaagaagttggcaaggttggtgagtgggcgattcggaaactgggcctcgtgaagtatggagaaaaatatgctggtaactatagtggaggcaacaaacgcaagctctctacagccatggctttgatcggcgggcctcctgtggtgtttctggatgaacccaccacaggcatggatcccaaagcccggcggttcttgtggaattgtgccctaagtgttgtcaaggaggggagatcagtagtgcttacatctcatagtatggaagaatgtgaagctctttgcactaggatggcaatcatggtcaatggaaggttcaggtgccttggcagtgtccagcatctaaaaaataggtttggagatggttatacaatagttgtacgaatagcagggtccaacccggacctgaagcctgtccaggatttctttggacttgcatttcctggaagtgttccaaaagagaaacaccggaacatgctacaataccagcttccatcttcattatcttctctggccaggatattcagcatcctctcccagagcaaaaagcgactccacatagaagactactctgtttctcagacaacacttgaccaagtatttgtgaactttgccaaggaccaaagtgatgatgaccacttaaaagacctctcattacacaaaaaccagacagtagtggacgttgcagttctcacatcttttctacaggatgagaaagtgaaagaaagctatgtatgaagaatcctgttcatacggggtggctgaaagtaaagagggactagactttcctttgcaccatgtgaagtgttgtggagaaaagagccagaagttgatgtgggaagaagtaaactggatactgtactgatactattcaatgcaatgcaattcaatg

SEQ ID NO: 229 - DNA, 1714 bp, Homo sapiens
  CDS (157)..(1401)
gcttactgagcgccgatgggtaccgtcactgaattcccgggtcgacccacgcgtccgccggctcctaccctgaaggtgcacctgcagtcctcgccgataagaggcagcagttcggaagccggttcctgagagatccggcgcgcgtcttccaccacaatgcctggtaatcactctgccccttcgcccggcctgtcgctgaccctctgtcccgccgcctcggagcactccggaattcccgggtcgacccacgcgtgcgcggacgcgtgggtggccggctcctaccctgaaggtgcacctgcagtcctcgccgataagaggcagcagttcggaagccggttcctgagagatccggcgcgcgtcttccaccacaatgcctgggacaatgtggagtggtcggaagagcaagccgcggcggcggagagaaaagtccaggagaacagtatccagcgggtgtgccaggagaaacaagttgattatgagatcaatgcccacaaatactggaatgacttctacaaaatccacgaaaatgggtttttcaaggatagacattggctttttaccgaattccctgagctggcacctagccaaaatcaaaatcatttgaaggactggttcttggagaacaagagtgaagtacctgaatgtagaaacaatgaggatggacctggtttaataatggaagaacagcacaagtgttcttcgaagagccttgaacataaaacacagacacctcctgtggaggagaatgtaactcagaaaattagtgacctggaaatttgtgctgatgagtttcctggatcctcagccacctaccgaatactggaggttggctgtggtgtgggaaacacagtctttccaattttacaaacgaacaatgacccaggactctttgtttattgctgtgatttttcttccacagctatagaactggtccagacaaattcagaatatgatccttctcggtgttttgcctttgttcacgacctgtgtgatgaagagaagagttacccagtgcccaagggcagtcttgatattatcattctcatatttgttctttcagcaattgttccagacaagatgcagaaggctatcaacaggctgagcaggcttctgaaacctggggggatggtacttctgcgagattacggccgctatgacatggctcagcttcggtttaaaaaaggtcagtgtctatctggaaatttctatgtgagaggtgatggaaccagagtttacttcttcacacaagaggaactggacacgcttttcaccactgctggactggaaaaagttcagaacctggtggaccgccgactgcaggtgaaccgagggaagcaactgacaatgtaccgggtttggattcagtgcaaatactgcaagccccttctgtccagcaccagctaagaggcacctgctgccaacacgatgcaagcccgttgtgtttccgagcttttttaaaaaaaaatttgtagcaccgggcatggtgcatgcctgtaatcccagccactcaggaggctgaggcagggaggatccattgagcccaggagtccagcctgggcaaaatagcgagagaccctgaatctgaaagtaatgataaaataaaaagaatatccatgaggtctcgttgatgctggacaattcaagaaatcagacttgaaccttaaacctagatgtattgcggccgctctggaggatcctcgcaacaggcgcaaac

SEQ ID NO: 230 - DNA, 3109 bp, Homo sapiens
  CDS (146)..(1306)
  misc_feature (1)...(3109): n = a,t,c or g
cccccgcgccgcgcagccccggccgccaggccttagcccgccccggcccccgccaggccgcgtccccctcccctcccctcccccgcgcgccacccgcgcccgcccccgcccggcaccgcggacccacccggacctcggcggggagatggaggtcctggcggcagagaccacgtcccagcaggagcggctgcaggccatcgcagagaagcggaagcggcaggcggagatcgagaacaagcgccggcagctggaggacgagcggaggcagctgcagcacctgaagtccaaggcactgcgggagcgctggctgctggaggggacgccgtcctcggcctcagagggggatgaggacctgaggaggcagatgcaggacgacgagcagaagacacggctgctggaggactcggtgtccaggttggagaaggaaattgaggtgctggagcgtggagactccgccccagccgctgccaaggagaacgcggcggccccgagcccagtccgggccccagccccgagtccagccaaggaggagcgcaagacagaggtggtgatgaattcacagcagacgccggtgggcacgcccaaagacaagcgagtctccaacacgcccctgaggacggttgacggctcccccatgatgaaggcagccatgtactcggttgagatcactgtggagaaggacaaggtgacaggggagaccagggtgctgtccagcaccacgctgctccctcggcagccgctccctctgggcatcaaagtctacgaggacgagaccaaagtggtccatgctgtggacggcaccgccgagaacgggatccaccccctgagctcctccgaggtggacgaactcatccacaaagcggacgaggtcacgctgagcgaggcagggtccacggccggggcggcagagacccggggggctgtggagggggcagcccggaccacgccctcccggcgggagatcaccggtgtgcaggcacagccaggcgaggccacgtccggcccgccggggatccagcccggccaggagcccccggtcacaatgatcttcatgggttaccagaacgtggaggatgaggccgagaccaagaaggtgctgggccttcaagataccatcacggcggagctggtggtcatcgaagacgcggctgagcccaaggagcctgcaccacccaacggcagtgctgccgagcctcccacggaggccgcctccagggaagagaatcaggcggggcccgaggccaccaccagcgacccccaggacctcgacatgaagaagcaccgttgtaaatgctgctccatcatgtgagccggcccccgagaccccggcccccaccccacaccacagacacccaccagcccggcccctcccggcgcctgcccaccctccacccacagcctcacgggtccaggacttggcgtgttgttacatgttccttccgagttttctttcgctggaaagagggacaggggcccccacccgtcaccacgccccaacactccccccgaaccagagccgtgcacttgtgcctggtaggagagagacaggacagacccgcttttcccgagacaaggaccccccatgtcacggcagcttcacagacgcggctcgcgcccaccggggtcctggcgggtgggacccgcggcctccacgcggcccaggccagcctgccaccctctgggcctcctacctgtgcctttctctgaggggacaccccgccagagagggccccgggagccgggggtgggtactgaggcctgctcaggccctggaagtgaggctctatggggttccctggccaaggcgctggccccccaatctcaggcagttggggtgaggccgtgcctctttgggggctaaaggtcttgggtggaggacaggcccctctgctgtgcccctatgccctgtgtgggcccaaccagtggacaatggagtctgggggagggggaaccccggggacatgcccccacccgggaggggccggtaacccctgggctatcttctagacggggcgaaccaggggtcattgacctgccccctgcacagggcagggaccgagtgagccactccttgtcccgagctcccgcccccactgggccctccttcctcctggtgctaatttggggaccccaggggccgcccccggcctcttctccatcctgcttggaccagggtcctgggtcttcccaaccataccccgagatcaggccccacctgccagctctactgggcttggagcacgtccgggcagtggagggagggacacagcctgggacaggaagcctcttgggttggagcaggagaccctcatttgccacccagaccaatgtgagcctgcccccagccccctctcattggaagtggcaaggggcttccctcctgggggcagctacactcgtccccagaggcacattcgtgcacattctcacagacaccgtctcacacgttggctttggacaaccaggccccaacttggtccctgccctagggacctccagcctggtgcccagtgctcaggccacctcctggtccagtcaccacctgcagcctcggcagggcaggtacaggggccacctcggatgggagcctgggtccctgcctccgctctgcccctgggtggctgggaggagaggccctctcgggggtgacctgggcgtcagccgtggaaccccctcctcctccctggagtctgcctgagtccctcgaggccgcgagccttcgctgaagtgcccttgctataaccccctctgcttctggtgtgtgacgaggcccccgatgttcttgattttcccagagaagcaaataaacagcgtgaacagccccaaaaaaaaaaaaagggggggccctttttaaggtctcaattttattaccccggtgctggcacaattatannnnnnnnnnggggcccctaaaattaatttctgggccgggtttttacccccttggggggggaaaaacccgggggtgccccatatttatccctttggcaacaaatttattaactgtctattgtgtcaatgttattttttttatctgtgatcttgtttttttatcttttttatttttattgagccctattattttatctttaagatcatgattgtttcg

SEQ ID NO: 231 - DNA, 2796 bp, Homo sapiens
  CDS (573)..(1934)
gaagtttgcaggagacccgcgctgcctaggcaaagggacccggcgaccaagacacccccgcaagggcccagggcgcgtccctcccgccaggccccagactccggctctgcgccaccccctcctacgccccggcgcgggcgcagccagtccggcttcctccaggcccccaagtcccggaccgagtgtggggccgcctctccctctcggaaggagccatcgccgctttaagtggaagaggagaggaagggggcgggggagcggggggcggggagcggaggcggaggagggggagggggatccccctggctcccacgtggtccgggcgcctgtgaatcgcgcccaccggagggtctcacagcgaaatacaaaagcagctgggaagcggcggggactcgagttcccagcgccgggcggagcgccggacagagccccgcagcgccccgcggccgcgatggggccgaagcgcccgaagccccggagcccacaaactgccgggcccgcctcgccgccgggacccgggtgcctgggctcggcttgaagcggcggcggcgcaccggcacagccgcgggagcatgggcaggaggatgcggggcgccgccgccaccgcggggctctggctgctggcgctgggctcgctgctggcgctgtggggagggctcctgccgccgcggaccgagctgcccgcctcccggccgcccgaagaccgactcccacggcgcccggcccggagcggcggccccgcgcccgcgcctcgcttccctctgcccccgcccctggcgtgggacgcccgcggcggctccctgaaaactttccgggcgctgctcaccctggcggccggcgcggacggcccgccccggcagtcccggagcgagcccaggtggcacgtgtcagccaggcagccccggccggaggagagcgccgcggtgcacgggggcgtcttctggagccgcggcctggaggagcaggtgcccccgggcttttcggaggcccaggcggcggcgtggctggaggcggctcgcggcgcccggatggtggccctggagcgcgggggttgcgggcgcagctccaaccgactggcccgttttgccgacggcacccgcgcctgcgtgcgctacggcatcaacccggagcagattcagggcgaggccctgtcttactatctggcgcgcctgctgggcctccagcgccacgtgccgccgctggcactggctcgggtggaggctcggggcgcgcagtgggcgcaggtgcaggaggagctgcgcgctgcgcactggaccgagggcagcgtggtgagcctgacacgctggctgcccaacctcacggacgtggtggtgcccgcgccctggcgctcggaggacggccgtctgcgccccctccgggatgccgggggtgagctggccaacctcagccaggcggagctggtggacctagtacaatggaccgacttaatccttttcgactacctgacggccaacttcgaccggctcgtaagcaacctcttcagcctgcagtgggacccgcgcgtcatgcagcgtgccaccagcaacctgcaccgcggtccgggcggggcgctggtctttctggacaatgaggcgggcttggtgcacggctaccgggtagcaggcatgtgggacaagtataacgagccgctgttgcagtcagtgtgcgtgttccgcgagcggaccgcgcggcgcgtcctggagctgcaccgcggacaggacgccgcggcccggctgctgcgcctctaccggcgccacgagcctcgcttccccgagctggccgcccttgcagacccccacgctcagctgctacagcgccgcctcgacttcctcgccaagcacattttgcactgtaaggccaagtacggccgccggtctggggacttagtgtcaccgggaggaaaagagagagatctggggctggggtatggatgatggggggaaggcggtcgcctctgccactgtcagggaccagccggccaacgcccacccgcaaaggtgtctaaaaacttcagcttttcacccacctgcccctttctttcaatcccacgctgtttcctttcaaagttctgggaggacgaactcaccgaggcgagaagtgtaacattctctccacccagcttataaaaggattctttactgtgccagcacggggattggatccgaagaaactggctactggggtttggcccccgagtggccgtccctgtgggagatgcaccccattcttgggcccccctcattccctttccgaaaaaggaaaacttgcgtttgagccgttgagctaattctgcaattttctaccaaacagagcgctggtggccccggagcagggctgtgacattggctggtggagcacccttcctgtgttctccctttgttccagcgccgcgatggtgagatcactgttccaagcagggggacggctcgcgataggacaaagagagcaggacctccagactctggggaccctgcagaccttgacaatttgcctgactcattcctgacctcttgtcattttggcctgaaggctacaaattcagggtcagctgtatgcactaagtcaaataatgaatttcttcctccctctcgcaaccgaccaaaattttgacaacgatgatgttcaccagaaggaaaaaaaaatcagttttatgcactttattttgttttgattttcattttttattaagaaaaaattttattttacagaatttaccttctctgtatatatgtgcataaagtgtggtgtaaatatactaaacaaacttatatttcaataaaagggagcttaaaattt

SEQ ID NO: 232 - DNA, 1147 bp, Homo sapiens
  CDS (61)..(1002)
gggtcgacccacgcgtccgcggacgcgtgggcgcaatggttctgcactgaggccctcgtcatgggggcgcctgtgtggtacttggtagcggcggctctgctagtcggctttatcctcttcctgactcgcagccggggccgggcggcatcagccggccaagagccactgcacaatgaggagctggcaggagcaggccgggtggcccagcctgggcccctggagcctgaggagccgagagctggaggcaggcctcggcgccggagggacctgggcagccgcctacaggcccagcgtcgagcccagcgggtggcctgggcagaagcagatgagaacgaggaggaagctgtcatcctagcccaggaggaggaaggtgtcgagaagccagcggaaactcacctgtcggggaaaattggagctaagaaactgcggaagctggaggagaaacaagcgcgaaaggcccagcgtgaggcagaggaggctgaacgtgaggagcggaaacgactcgagtcccagcgcgaagctgagtggaagaaggaggaggagcggcttcgcctggaggaggagcagaaggaggaggaggagaggaaggcccgcgaggagcaggcccagcgggagcatgaggagtacctgaaactgaaggaggcctttgtggtggaggaggaaggcgtaggagagaccatgactgaggaacagtcccagagcttcctgacagagttcatcaactacatcaagcagtccaaggttgtgctcttggaggacctggcttcccaggtgggcctacgaactcaggcaaccataaatcgcatccaggacctgctggctgaggggactataacaggtgtgattgacgaccggggcaagttcatctacataaccccagaggaactggccgccgtggccaacttcatccgacagcggggccgggtgtccatcgccgagcttgcccaagccagcaactccctcatcgcctggggccgggagtcccctgcccaagccccagcctgaccccagtccttcccttttggactcaaagttggtgtggcctacctggctatacattttcatccctcccccccatcctggggaagtgatggtgtggccaggcagttataaattaaaggcctgtgagttctgctgaaaaaaaaaa

SEQ ID NO: 233 - DNA, 7464 bp, Homo sapiens
  CDS (3034)..(7173)
gaggaggagctggagggggcgcggcttcctctcggtcgctccctggcgccgggcctctttctctgcctggcccagggctggcggccggcgggggtcgcggcggcggcagtgggggcgctggcgggccgcgggtggcgggggccgggccgcggctccgggtgttaggagacaagatggcggcggctctcagaaggccggtctcctcctctccgccgtcctccgccccgccgctcgccgcctcctcctctcgggtctcctcctcctcgtttgctgcctcctcctcctcctgcagcagcaccagcgaccgccgaagcgccggctcgctcacccggagctccggaggtggatagacggggcagctgcaggctccggcgaccgaggccgagctggggccggggcggggacggcggcggcggcggcggcgacggcggcggcgccgggtggggatggggtcgcagacgctgcagatcctccgacagggggtgtgggccgcgctcagcgggggctggtactacgacccgcaccaggccaccttcgtgaacgcgctgcacctctacctgtggctcttctgctgggcctacccttcaccctctacatggcccttccttctaccatgattatagtagcagtttattgtcctgtgatagctgctgttttcattgttctgaagatggtcaactatcgactacacagagcacttgatgctggagaagttgtagataggactgcaaatgagttcacggatcagcgaaccaaagctgaacaaggcaactgttcaaccaggagaaaagacagcaatggaccgagtgatcctggtggagggattgaaatgtctgagttcatccgagaggccacacccccagttggttgcagttccagaaattcttatgccggtctagatccaagcaaccagattggatctggttcctcgcgtcttggaacagcagcaactattaaaggagatacagacactgctaagacttctgatgatatcagtttaagtctgggccaaagttctagtctttgtaaggaaggaagtgaagaacaagatttggcagctgatcggaagctctttcgtcttgtctccaatgactccttcatctctattcagccttccttatcctcttgtggacaggacttgccaagggacttcagtgacaaagtgaacctgccaagtcataaccaccaccaccatgttgatcagtctctgtccagcgcctgtgacacagaagtagcttctcttgtacctttacactcacactcttatagaaaagaccaccggccgcgaggtgtaccacggacttctagctctgctgtggcttttccagacacttcactgaatgattttcccctttatcagcaaagacgtggattagatccagttagtgagttagaatcttccaagcctctttctggatccaaagaatccttggtggaaaattctggtttatctggggaatttcagcttgctggtgacttgaaaatcaatacttctcagccacccacaaaaagtgggaagagcaaacctttgaaagcagagaaaagcatggacagcttgaggagcctgagcacacggagtagtgggtcaacagaaagctactgcagtggaacggaccgggacactaacagtactgtcagcagctataaaagtgagcagaccagctcaactcacatagagagcatcctgtcagagcatgaggagtctcctaaagcaggaacaaaaagtgggaggaagaaagagtgctgtgcaggcccagaggagaagaatagctgtgccagtgacaaaaggactagcagtgaaaagattgctatggaagcgagtaccaacagtggggttcacgaggccaaggaccccaccccctctgatgagatgcacaaccagagaggtctcagcacctctgcatctgaagaagccaataaaaatccccatgcaaatgaatttacttcccaaggggacagaccacctgggaacactgcagaaaacaaagaagagaagagtgataagtcagctgtttctgtggattccaaagtgcgtaaagatgttggtggaaagcaaaaggaaggggatgttcgacctaaatcttctagcgtaatccatcggacagcttctgcccacaagtcaggcaggagacgcacaggaaaaaaacgggctagcagttttgattcaagccggcatagggactatgtttgctttcgaggtgtttctggtaccaagccacacagtgctatattttgtcatgacgaagactctagtgatcagagtgacttgagtagagcatcaagtgttcagtctgctcaccagttcagcagtgatagctcttctagcaccacttctcattcctgtcagtctcctgagggcagatacagtgctctaaagaccaaacacactcataaagaaaggggcacagactctgaacacacacacaaagctcatttggttcctgaaggaaccagcaaaaagcgtgcaacacgacggacttctagcacaaatagtgccaagactcgtgcccgagtgttgagcctggacagtggcacagtagcatgtttgaatgactcaaacaggttaatggcacctgaaagtataaagcccttaaccacttcaaaatcagatcttgaggccaaagagggagaggtgctagatgagctatctttattaggacgggcttcccagttagagacagtcactcgatctaggaatagcttgccaaaccaggttgcatttcctgaaggggaagagcaagatgcagtcagtggagcagcacaagccagcgaggaggcagtgtcatttcgccgtgaacgcagcacatttaggcgccaggcagtacggcgccggcacaatgcagggagtaaccctacccctcctacattgctcatcggatcacccctaagccttcaagatggtcagcaaggccagcagtccacagcccaggtcaaagtccagtcccgccccccttcccaggctgcagtgctcagtgctagtgcctccttgctggtaagttctcttctacgctgtatgagactggtggctgtgatatgtcacttgtgaattttgaaccagcagcaagaagagcatccaatatctgtgacacagattctcatgtatccagttctacctcagttcgattttatccacatgatgtgctctctctcccacagattcgattgaatagactattgaccattgatacagatttgttggagcaacaggacattgatctaagccctgacttggcagctacttacggcccaacagaagaagctgcccaaaaggttaaacactattatcgcttttggatcctaccccagctgtggattggcattaactttgacagactcacacttttggccctgtttgatagaaatcgtgagatcctggaaaatgtgttagctgtcatcctggctattctcgtggcctttttgggatctattcttctcatacaaggattcttcagagatatctgggtcttccagttctgcctcgtcatagccagctgtcaatactcactgcttaagagtgttcaaccagattcttcttctcccagacatggtcataatcgtatcattgcctacagtagaccagtttatttctgcatatgttgcggtcttatttggctcttggattatggtagcagaaacctgactgcaaccaagttcaaattatatggaataactttcaccaatccactggtgtttatatcagccagggatttagttatagtgtttacactctgtttcccaatagtgtttttcattggtctcctgcctcaggtgaatacatttgtaatgtacctttgtgaacaattggatattcatatttttggtggtaatgccactacaagcctgcttgcagcactttacagttttatctgtagcattgttgcagtagccttattgtatggattatgttatggggctttaaaggattcttgggatggccagcatattccagtacttttctccattttttgtggtttattagtggcagtgtcttaccatctcagccgacaaagcagtgatccatctgtacttttctctttagtgcaatccaagatttttccaaaaacggaagagaaaaatccagaagaccctctatctgaagtaaaagatccactgcctgaaaaacttagaaattctgttagtgagcgattacagtctgacctggtagtatgcattgtaattggtgtgctgtattttgctattcatgtaagcacagtcttcacagtattgcagcctgccctcaagtatgtgttgtatacattggttggctttgtgggttttgtaacccattatgtgctgcctcaagttagaaaacagctaccatggcactgtttctctcatcctctgctaaagacactagagtataatcagtatgaagttcgaaatgcagccactatgatgtggtttgagaaacttcatgtgtggcttctttttgtggagaagaatataatctatccattgattgttctcaatgaactgagcagcagtgcagagacaattgctagtccaaagaaactgaatacagaattaggtgctttaatgatcactgttgctggtttgaagttgctacgatcctcttttagcagccctacatatcagtatgttacagtcatctttactgtgctgtttttcaaatttgactatgaagctttttcagagaccatgctgttggatctcttctttatgtccatactcttcaacaagctttgggaactactttataaattgcagtttgtgtatacctatattgccccatggcagatcacatggggttctgctttccatgcttttgctcagccttttgcagtgcctcattcagccatgctgtttattcaggctgctgtctcggccttcttctctactccactgaacccctttctgggaagtgcaatattcatcacttcatatgtccgacctgtgaaattctgggagagagactataacacaaaacgagtggatcattcaaataccagattggcttcccagcttgatagaaatccaggtacctactgtcaacaacgggaagtggaggccattactgaaggtgtagaggaagatgaaggattttgctgttgtgaacctggccatattcctcacatgctttcatttaatgctgcatttagccagcgatggctagcttgggaagtgatagtcacaaagtacattctggagggttatagcatcactgataacagtgctgcttctatgcttcaagtctttgatcttcggaaagtactcaccacttactatgtcaagggtatcatttattatgttacgacctcgtctaagctagaggagtggctagctaatgagacaatgcaggaaggacttcgtctgtgtgctgatcgcaattatgtcgatgtggacccgacctttaatccaaacattgatgaagactatgaccaccgactggcaggcatatctagggagagtttctgtgtgatttacctcaactggatagagtactgctcttcccgaagagcaaagcctgtggatgtggacaaagattcatccctagtgactctctgttatggactctgtgttctgggacggagagctttggggactgcatcccatcatatgtccagtaatttagagtcattcctctatggattgcatgccctatttaaaggagatttccgtatttcttcaattcgagatgaatggatctttgctgacatggaattgctaagaaaagtagtagtccctgggatccgtatgtccattaaacttcatcaggatcattttacttctccagatgaatatgatgaccctactgtgctctatgaagccatagtatctcatgagaagaacctcgtaatagcccatgaaggggaccctgcatggcggagtgcagtacttgccaactctccctccttgcttgctctgcggcatgtcatggatgatggcaccaatgaatataaaatcatcatgctcaacagacgctacctgagcttcagggtcattaaagtgaataaggaatgtgtccgaggtctttgggcagggcaacagcaggagcttgtttttctacgtaaccgtaacccagagagaggtagcatccaaaatgcaaagcaagccctgagaaacatgataaactcatcttgtgatcaacctattggctacccaatctttgtctcacccctgacaacttcttactctgacagccacgaacagcttaaagacattcttgggggtcctatcagcttgggaaatatcaggaacttcatagtgtcaacctggcacaggcttaggaaaggttgcggagctggatgtaacagtggtggcaatattgaagattctgatactggaggtgggacttcctgcactggtaacaatgcaacaactgccaacaatccccacagcaacgtgacccagggaagcattggaaatcctgggcagggatcaggaactggactccacccacctgtcacatcttatcctccaacactaggcactagccacagctctcactctgtgcagtcgggcctggtcagacagtctcctgcccgggcctcagtagccagccagtcttcctactgctatagcagccggcattcatccctccggatgtccaccactgggtttgtgccttgtcggcgctcttctactagtcagatatcgcttcgaaacttgccatcatccatccaatcccgactgtcgatggtgaaccaaatggaaccctcaggtcagagcggcctggcctgtgtgcagcacggcctgccttcctccagcagctccagccaaagcatcccagcctgcaaacatcacactctcgtgggctttcttgcgacagagggaggtcagagcagtgccactgatgcacagccaggcaacaccttaagtcctgccaacaattcacactccagaaaggcagaagtgatttacagagtccaaattgtggatcccagtcaaattctggaagggatcaacctgtctaaaaggaaagagctacagtggcctgatgaaggaatccggttaaaagctgggagaaatagctggaaagactggagtccgcaggagggcatggaaggccatgtgattcaccgatgggtgccttgcagcagagatccaggtaccagatcccacatcgacaaggcagtgcttctggtccagattgatgataaatatgtgactgtaattgaaactggggtactagaacttggggctgaagtgtgagccagtgtttattataaagacatttctttttccctctcaattccaaggcattggaaaaagagaggaacaagcagaagatgcctgcaggtatcactttgatcctatgtgggagcgactgaaaatagaatgagcttggttaagcacctctcctttgcccttcaccctgactcctgtcactgtctccatccccaaataaagctgaaatatttttttaagttagctgccgagaaaacattttgcatgaaggataaagttctgttaaaatacatccttaaaaaaagtttttcctaa

SEQ ID NO: 234 - DNA, 940 bp, Homo sapiens
  CDS (134)..(589)
atggaggggcgatgtatataactatctattcgatgatgaagataccccaccaaacccaaaaaaagagatctctcgaggatccgaattcgcggccgcgtcgacctttcccgagcttggaacttcgttatccgcgatgcgtttcctggcagctacattcctgctcctggcgctcagcaccgctgcccaggccgaaccggtgcagttcaaggactgcggttctgtggatggagttataaaggaagtgaatgtgagcccatgccccacccaaccctgccagctgagcaaaggacagtcttacagcgtcaatgtcaccttcaccagcaatattcagtctaaaagcagcaaggccgtggtgcatggcatcctgatgggcgtcccagttccctttcccattcctgagcctgatggttgtaagagtggaattaactgccctatccaaaaagacaagacctatagctacctgaataaactaccagtgaaaagcgaatatccctctataaaactggtggtggagtggcaacttcaggatgacaaaaaccaaagtctcttctgctgggaaatcccagtacagatcgtttctcatctctaagtgcctcattgagttcggtgcatctggccaatgagtctgctgagactcttgacagcacctccagctctgctgcttcaacaacagtgacttgctctccaatggtatccagtgattcgttgaagaggaggtgctctgtagcagaaactgagctccgggtggctggttctcagtggttgtctcatgtctctttttctgtcttaggtggtttcattaaatgcagcacttggttagcagatgtttaattttttttttaacaacattaacttgtggcctctttctacacctggaaatttactcttgaataaataaaaactcgtttgtcttgtcttctgcatgtggaaaaaaaaaaaa

SEQ ID NO: 235 - DNA, 832 bp, Homo sapiens
  CDS (134)..(481)
atggaggggcgatgtatataactatctattcgatgatgaagataccccaccaaacccaaaaaaagagatctctcgaggatccgaattcgcggccgcgtcgacctttcccgagcttggaacttcgttatccgcgatgcgtttcctggcagctacattcctgctcctggcgctcagcaccgctgcccaggccgaaccggtgcagttcaaggactgcgatattcagtctaaaagcagcaaggccgtggtgcatggcatcctgatgggcgtcccagttccctttcccattcctgagcctgatggttgtaagagtggaattaactgccctatccaaaaagacaagacctatagctacctgaataaactaccagtgaaaagcgaatatccctctataaaactggtggtggagtggcaacttcaggatgacaaaaaccaaagtctcttctgctgggaaatcccagtacagatcgtttctcatctctaagtgcctcattgagttcggtgcatctggccaatgagtctgctgagactcttgacagcacctccagctctgctgcttcaacaacagtgacttgctctccaatggtatccagtgattcgttgaagaggaggtgctctgtagcagaaactgagctccgggtggctggttctcagtggttgtctcatgtctctttttctgtcttaggtggtttcattaaatgcagcacttggttagcagatgtttaattttttttttaacaacattaacttgtggcctctttctacacctggaaatttactcttgaataaataaaaactcgtttgtcttgtcttctgcatgtggaaaaaaaaaaaa

SEQ ID NO: 236 - DNA, 4929 bp, Homo sapiens
  CDS (2)..(3538)
catgcctgtacgcctgcaggtaccggtccggaattcccgggtcgacccacgcgtccgcccacgcgtccgcaccaagttaatactgctagttaatgacaagaaaagatatgagcgggttggtggcggccccaagcggctgggacgagatgtggaaatggaagaaatgattgagcagctgcaagagaaagttcatgagcttgaaaaacaaaatgaaaccctcaaaaacagactgatttcagccaaacagcaacttcaaacccagggttacaggcaaactccatacaataatgtacaatctcgtattaacactgggcgtagaaaagcaaatgaaaatgctggtttacaggaatgccccaggaaaggtataaaattccaagatgcagatgtagcagaaactccacatcccatgtttacaaaatatggcaacagtttacttgaagaagccagaggagaaataagaaatttagaaaacgttattcagtcacaaagaggccagatagaggagttagagcacttggctgagatcctgaaaactcagttgaggagaaaagaaaatgaaattgagttatctcttcttcagcttcgagaacagcaagctacagatcaaaggtcaaatattcgggacaatgtagaaatgattaagcttcataaacagctagtagagaaaagcaatgctctttcagcaatggaaggaaaatttattcagcttcaagagaagcaaagaactctcaaaatcagccacgatgctttgatggcaaatggggatgaattaaacatgcaacttaaagagcagcgtttaaaatgctgcagtcttgagaaacaattacattctatgaagttttctgaaagaagaatagaagagctgcaggatagaattaatgatttagaaaaggaacgggaacttttaaaggaaaactatgataaactttatgacagtgccttcagtgctgcccatgaagagcaatggaagttaaaggagcaacagctgaaagtgcagattgctcagctcgagactgccttgaagtctgacttaacagacaaaactgaaatccttgacagattaaaaactgaaagagatcaaaatgaaaaactcgttcaagagaatagagaactacagttacagtatctggaacaaaagcaacaacttgatgaacttaaaaaacgcataaaattgtacaaccaggagaatgatattaatgctgatgaattgagtgaagctctcctacttataaaggctcaaaaagaacaaaaaaatggagacctttcctttttagtgaaagtagatagtgaaattaataaagatctagaacgctctatgagagagctgcaagcaactcatgcagaaacggtgcaagagctggaaaagacaagaaacatgctaattatgcaacacaaaattaataaagattatcagatggaggttgaggcagtgacccgtaagatggaaaatttgcagcaagattatgaactcaaagtggaacagtatgttcatcttcttgatatcagggctgcacgtatccataaactagaagcccaattaaaggatattgcctatggcaccaagcagtacaaatttaaaccagaaatcatgccagatgactctgttgatgaatttgatgaaaccatccacttagaacgaggcgaaaatctatttgaaatccatatcaacaaagtaaccttttcttctgaagttttacaggcatctggagataaagagcctgtcactttctgtacctatgctttctatgattttgaactacagacaactcccgtagtgcgaggccttcatcccgaatataacttcacttctcaatatcttgttcatgttaatgacttatttttgcaatatattcagaagaatactatcacccttgaggtccaccaggcttatagcacagaatatgaaacaattgcagcatgtcaattaaaatttcacgaaattcttgaaaaaagcggccgaatattttgtacagcaagtttgattggaacaaaaggagacatcccaaattttggcacagtggaatactggttccgattaagagttcccatggatcaagcaattcgactttatcgagaaagggcaaaggctttggggtatataacatcaaattttaaggggccagagcatatgcagtcgttaagtcagcaagcacccaaaactgctcaactcagttctacagattccacagatggcaacttaaatgaacttcacattacaataagatgttgcaaccacctgcagtcccgagcaagccacctgcagccacacccatatgttgtgtacaagttttttgattttgcagaccatgatacagctatcattcccagtagcaatgatccacagtttgatgatcatatgtatttcccagtgccaatgaatatggacttggatcgataccttaagtcagagtctctgagtttttatgtttttgatgatagtgatacccaggagaatatttacataggaaaagtcaatgtgcctctgatttcgttggcacatgacaggtgtatctcaggaatatttgagttaacagaccatcaaaagcatcctgctggcaccatccatgttatattgaaatggaaatttgcttaccttccaccaagtggatcaataacaactgaagacttaggaaatttcattcgcagcgaagagccagaagttgttcaaagacttcctccagcatcctctgttagcacactagttttagcaccaagacctaaaccaagacaacgtttaacacctgtagataagaaggtatctttcgtggatatcatgccacatcagagtgatgtttcacaagaaggcagtgtagatgaggtaaaagagaatactgagaaaatgcagcaaggaaaagatgatgtgtctttactatctgaaggtcagcttgcagaacaaagcttggcatcttctgaagatgaaacagaaataacagaggacttggaaccagaagttgaagaggacatgtcagcttctgacagtgatgactgtattattccaggtcctatctccaagaatatcaaacagccatcagaaaaaattcggattgagatcatagctctaagccttaatgattctcaagtaaccatggatgacactatccaacggctgtttgttgagtgtcgattctacagtcttcctgctgaagagacacccgtgtcacttccaaaacccaagagtgggcagtgggtctactataactatagcaatgtgatctacgtggataaagaaaacaacaaagcaaagagagacatcttaaaagctatactacaaaaacaagagatgcctaatagaagccttcgcttcaccgtggtcagtgaccctccagaggacgagcaggacctggagtgtgaggacattggcgtggctcacgtcgaccttgccgacatgtttcaggaagggagggacctcattgagcaaaatatcgatgtttttgatgcacgagcagatggtgaaggtattggcaagctcagggtaacagtcgaagctctccatgccctccagtctgtctacaagcaatacagagatgacttggaggcttgaaagcaaatgctccagaggcatctcctactcctcagtaaatgctcacatgaaagttcctacatgagatttttgtaattactctggtgtatataatctataattcatgggaagctgggagcggggagacctgggtttgaagtgttgaagttttgtatactttttcatttgtttatttctctattccctccttctcataactgccacccctcaggacttaagttctccataatgggcagtaccttctcaataatttatacctacgtgatagcgtgagaaagtctatttgcattttcaacattttcttaggaagaaccgaaatgcaattcccatttttatttttaataagcaaaagcataaatcttagaaaacctatgaaaaagaaatacttttatgttatccctaatcgtcccactaaatggaatgcctatgattagcttcattaagagttttatactgtgaagattttattagaagcaatatatgaaaattacttggattaatgtgttaatcttcctctttaaaatgctaatatccattttatgcacattaaagctcagtatgcattttctttgatgcatgcagtttctatcaattaaatataaagaatgaaacttagcaccaacttattcaatgactgcaagttttttgtctttctttcttaaaagttcattctatttgtattattttcatacatttgtaatggggacccagggatgtatatataaaaaggagatagttatatagatagatgtgaaatttacacgttgaaaacttagtatatgacacagaaagaaattatgaaaagtataactcaaattctgatatgcttagttagacgtgaaaggagtatctttttatcattttttaaatttacatcaagccagtacagtgccagggtgtatctgggtaaccagatcctcgaaaagcagctctgaaagttaattttctagcttttacccaatctcactgaaggatttaattgatatttttaatggagctgtgaatcaatgctgcaaaggaattgtctctagaggtctaggatataatgcatttcattttttaatttacttttttatttgtcattttcttcaaaggatttttataggctgtgggttttcactgtttgcaaacaggctatgttccttcttaagcatatgtaaagtattcagggagataagtaatttattaaaatctacctaatttgccgtgatatattaaatctctgcttcagtgatcacagaccatttcatttagagaattaggcattccctctttgtgtgattaaagctctggaaaatgagttctttgctcctatttgtgaacattcaaagcctgctaatggcaagaagatggaatagattatgagacaattcattacagttcaatag

SEQ ID NO: 237 - DNA, 1361 bp, Homo sapiens
  CDS (456)..(1157)
gtggtggaattccagcaacatagtgtggggaattttctactctgggccatttgctgagagggctcctgggcctaagctgctaccacctcctttatctctccctgtcgggtgactctataaaaagacaggagaagctgaggctcattcactcactttgtccacttcattcccaagagaagtgtcggggggacctgccaggcttaggggaagctctgagctgagccccttgtgcaaagaggcgagccacccagaggcagctgttcccttctaggcctggaagtgcacatgctcatctacagctttcttggaagaagaaagaaacaaaaactgagatttagaacaccaggtctgtttccactggcggccactcttgggcactggagaccagcaagagctttgtttttaaaaggctcttccatggcagatattcgcagaggcatcagggctacacttaaatgaagggctccggctggcacctgaggagcggcatggtgggcacgttgatcaccaccatcctgccgcactggcggaggacagcgcacgtgggcaccaacatcctcacggccgtgtcctacctgaaagggctctggatggagtgtgtgtggcacagcacaggcatctaccagtgccagatctaccgatccctgctggcgctgccccaagacctccaggctgcccgcgccctcatggtcatctcctgcctgctctcgggcatagcctgcgcctgcgccgtcatcgggatgaagtgcacgcgctgcgccaagggcacacccgccaagaccacctttgccatcctcggcggcaccctcttcatcctggccggcctcctgtgcatggtggccgtctcctggaccaccaacgacgtggtgcagaacttctacaacccgctgctgcccagcggcatgaagtttgagattggccaggccctgtacctgggcttcatctcctcgtccctctcgctcattggtggcaccctgctttgcctgtcctgccaggacgaggcaccctacaggccctaccaggccccgcccagggccaccacgaccactgcaaacaccgcacctgcctaccagccaccagctgcctacaaagacaatcgggccccctcagtgacctcggccacgcacagcgggtacaggctgaacgactacgtgtgagtccccacagcctgcttctcccctgggctgctgtgggctggttcccggcgggactgtcaatggaggcaggggttccagcacaaagtttacttctgggcaatttttgtatccaaggaaataatgtgaatgcgaggaaatgtctttagagcacagggacagagggggaaataagaggaggagaaagctctctataccaaagactga

SEQ ID NO: 238 - DNA, 2606 bp, Homo sapiens
  CDS (267)..(1031)
cccgttcgactgcggtaccggaccggaattcccgggtcgacgatttcgtggctttggtggtgttcacagctgcctctttggcacctcctcccaagccggagtcaaggaggcccctgagccttggaccagccactgccacctccgacctgctcggccagaagctgcccagggacaaagcagagtgcaggtcatttatcttcaggctttgagatctgcgtggggggagctgttgcagcagcccaagccgcaggaattgctgagacaggatggcctggcaggggctggtcctggctgcctgcctcctcatgttcccctccaccacagcggactgcctgtcgcggtgctccttgtgtgctgtaaagacccaggatggtcccaaacctatcaatcccctgatttgctccctgcaatgccaggctgccctgctgccctctgaggaatgggagagatgccagagctttctgtcttttttcaccccctccacccttgggctcaatgacaaggaggacttggggagcaagtcggttggggaagggccctacagtgagctggccaagctctctgggtcattcctgaaggagctggagaaaagcaagtttctcccaagtatctcaacaaaggagaacactctgagcaagagcctggaggagaagctcaggggtctctctgacgggtttagggagggagcagagtctgagctgatgagggatgcccagctgaacgatggtgccatggagactggcacactctatctcgctgaggaggaccccaaggagcaggtcaaacgctatgggggctttttgcgcaaataccccaagaggagctcagaggtggctggggagggggacggggatagcatgggccatgaggacctgtacaaacgctatgggggcttcttgcggcgcattcgtcccaagctcaagtgggacaaccagaagcgctatggcggttttctccggcgccagttcaaggtggtgactcggtctcaggaagatccgaatgcttactctggagagctttttgatgcataagcacctcttttcatggagtagagtcaggagaaacccctgacaccttttcaggttggagtgcattcattcatcctcttatatgtgccccttccccatgctcagctcagcattgtgtacaaaatatccaagcccagcctatctctcttctgcgtgggagtatgttatttctctggggtctgtgatggggaagggtggatgtcccttccccacaataggcttagtgcttggctcagacacctagactctaaaactatcagcagcggcagcagcagcagcagcagcagtttgtgatctgtccttccaacctgttcacgtgactcctcaattccagggaacgagggcgatgtgttctttgtacctgtaggtctatgatgtccaaacttaacagatcacatgcccctcttagaagaaatatgagcatgctccctcatgcagatagtatacacatcataaacaaagagtagaactttaaaagaaggtaaataatcatacacagaaatcctaacattatattcccaaatctcaaaagatctcctgtgcacctgactttggagacgatgctttaggtaaaaagcttaaacattgccttatattggatcaggaacccttacagtagagggtccagtcttctagtgggtttaatgtttagtcagtgtactctgagtcctcattgttcagaaaagcacctcttgaagaactgacttcctgaactcccagtcatgttggtaccctggacagtgcctaactccttacagaagggagtgaaaacctctttcggaaatgattgagagcagcctcttgaatgcttaaatgatcaaggagggagaaaggcaaaccaatttgttctgtgcaacaaactcaaaatgtggaccagttccctcagccctcattaaactaattaaactgatgggtatcatgcttctactccatggtgaactgaagcagagtcaagctgatgaagttaagcacaaccatgttcttgagcagctgaattggctgccaagagtccaagccatctggcccaacatacgcactgggcattgggtaagggactccagaagcagcagctagaaagagaaaaagccctcttcaatccccataatgcttctttcctcttaatgtctcaaaataaaaccagaaagaggaataaaatgattaagtgcttgaggccaaatgagttcccttgattcaaataaccctgaatcagaggcagagacctcctgatgtcttggtttccatcaaagccctccctgtctgtctgtctctcttttgctctctcattcccaggcactctcttttggtttgtgggtccaggagatgaggctggataggagaggaaaaggcttgagtctggataatttgtataagatgctgctgagcacatctcttcatgcgcagtccccaggtatctgatgatgttctgaaatggatagattgttttagagttattttgtgtcctttaaaaaaatcccatttatgcaatttacttggaatttgcttagcctttaataggcttgtgtaatttcctgctcctccagtacaataaataaaagaaagatgctgaaaaaaaaaaaa

SEQ ID NO: 239 - DNA, 648 bp, Homo sapiens
  CDS (129)..(590)
taagcttgggccagccaccgccgctgccggcgcctctgctgtaggggaccagcgcgggtgcgcagacgaaaggcgctctttgccagctgaaagttcccacggaaaaactaccatctcccctgcccaccatggcagacgaaattgatttcactactggagatgccggggcttccagcacttaccctatgcagtgctcggccttgcgcaaaaacggcttcgtggtgctcaaaggacgaccatgcaaaatagtggagatgtcaacttccaaaactggaaagcatggtcatgccaaggttcaccttgttggaattgatattttcacgggcaaaaaatatgaagatatttgtccttctactcacaacatggatgttccaaatattaagagaaatgattatcaactgatatgcattcaagatggttacctttccctgctgacagaaactggtgaagttcgtgaggatcttaaactgccagaaggtgaactaggcaaagaaatagagggaaaatacaatgcaggtgaagatgtacaggtgtctgtcatgtgtgcaatgagtgaagaatatgctgtagccataaaaccctgcaaataaacggaaacatcaggcatgaacactgtttatgtctgaatcaactgcaaaaaaaaaaaaa

SEQ ID NO: 240 - DNA, 1942 bp, Homo sapiens
  CDS (150)..(1688)
accggaccggaattcccgggtcgacgatttcgtccaggcggctggcggaggaggagagacggaggaggccgagaccggagcgccgctcgccgcagacttacttccccggctcagcagggaaaggttcctagaaggtgagcgcggacggtatgcaaagttgtgaatccagtggtgacagtgcggatgaccctctcagtcgcggcctacggagaaggggacagcctcgtgtggtggtgatcggcgccggcttggctggcctggctgcagccaaagcacttcttgagcagggtttcacggatgtcactgtgcttgaggcttccagccacatcggaggccgtgtgcagagtgtgaaacttggacacgccacctttgagctgggagccacctggatccatggctcccatgggaaccctatctatcatctagcagaagccaacggcctcctggaagagacaaccgatggggaacgcagcgtgggccgcatcagcctctattccaagaatggcgtggcctgctaccttaccaaccacggccgcaggatccccaaggacgtggttgaggaattcagcgatttatacaacgaggtctataacttgacccaggagttcttccggcacgataaaccagtcaatgctgaaagtcaaaatagcgtgggggtgttcacccgagaggaggtgcgtaaccgcatcaggaatgaccctgacgacccagaggctaccaagcgcctgaagctcgccatgatccagcagtacctgaaggtggagagctgtgagagcagctcacacagcatggacgaggtgtccctgagcgccttcggggagtggaccgagatccccggcgctcaccacatcatcccctcgggcttcatgcgggttgtggagctgctggcggagggcatccctgcccacgtcatccagctagggaaacctgtccgctgcattcactgggaccaggcctcagcccgccccagaggccctgagattgagccccggggtgagggcgaccacaatcacgacactggggagggtggccagggtggagaggagccccgggggggcaggtgggatgaggatgagcagtggtcggtggtggtggagtgcgaggactgtgagctgatcccggcggaccatgtgattgtgaccgtgtcgctaggtgtgctaaagaggcagtacaccagtttcttccggccaggcctgcccacagagaaggtggctgccatccaccgcctgggcattggcaccaccgacaagatctttctggaattcgaggagcccttctggggccctgagtgcaacagcctacagtttgtgtgggaggacgaagcagagagccacaccctcacctacccacctgagctctggtaccgcaagatctgcggctttgatgtcctctacccgcctgagcgctacggccatgtgctgagcggctggatctgcggggaggaggccctcgtcatggagaagtgtgatgacgaggcagtggccgagatctgcacggagatgctgcgtcagttcacagggaaccccaacattccaaaacctcggcgaatcttgcgctcggcctggggcagcaacccttacttccgcggctcctattcatacacgcaggtggggctccagcggggcggcatgtggagaagctgggccaagcccctgccgtacacggagagctcaaagacagcgacaaaatagaagccacctggaggcaacttcctcacccatcgacaagctcaccagccttcatgcctgtcctttggagcttccctgcagacagaggcagctagttctcaatttggtgtggtgtcctagccccacctgtggagtcaagtcccacctcctacctcaatcagaacctgagtttttttccaacacgagctccaggaaacaacttttggcttcatgatcctctcttttattctggctgttggccacttgagttattt

SEQ ID NO: 241 - DNA, 2263 bp, Homo sapiens
  CDS (43)..(2205)
agtgagtggcgatacctcctgtctgggggctccatctcgatcatgactgagaatccggcaccggactggctgtcagaccgggcttggcgagacatcctagcactctcgaacctgccaaccttttcctccttctcttccgacttcgtgaagcacctctcagaattccgggtcatcttcgacagccttgagccccaccgcccactctccccagctgtccggctggccgaatccctggggccaccaacctccttccaacaggctggctctcagggaggtgtgggccactgttgcagggagcctttgcctggcatctgggaccagtacctagaccagttccagaagctgctagtcctccgctgcctgcgtggggacaagacagccaatctgtcagtggtgttcaaagactccaactccaccacacccctcatctttgtgctgtcacccggcacagaccctgctgccgacctctacaagtttgccgaagaaatgaagttctccaaaaagctctctgccatctccctgggccaggggcagggccctcgggcagaagccatgatgcgcagctccatagagaggggcaaatgggtcttcttccagaactgccacctggcaccaagctggatgccagccctagaacgcctcatcgagcacatcaaccccgacaaggtacacagggacttccgcctctggctcaccagcctgcccagcaacaagttcccagtgtccatcctgcagaacggctccaagatgaccattgagccgccacgcggtgtcagggccaacctgctgaagtcctatagtagccttggtgaagacttcctcaactcctgccacaaggtgatggagttcaagtctctgctgctgtctctgtgcttgttccatgggaacgccctggagcgccgtaagtttgggcccctgggcttcaacatcccctatgagttcacggatggagatctgcgcatctgcatcagccagctcaagatgttcctggacgaatatgatgacatcccctacaaggtcctcaagtacacggcaggggagatcaattacgggggccgtgtcactgatgactgggaccggcgctgcatcatgaacatcttggaggacttctacaaccctgacgtgctctcccctgagcacagctacagcgcctcgggcatctaccaccagatcccgcctacctacgacctccacggctacctctcctacatcaagagcctcccactcaatgatatgcctgagatctttggcctgcatgacaatgccaacatcacctttgcccagaacgagacgttcgccctcctgggcaccatcatccagctgcaacccaaatcatcttctgcaggcagccagggccgggaggagatagtggaggacgtcacccaaaacattctgctcaaggtgcctgagcctatcaacttgcaatgggtgatggccaagtacccagtgctgtatgaggaatcaatgaacacagtactagtacaagaggtcattaggtacaatcggctgctgcaggtgatcacacagacactgcaagacctactcaaggcactcaaggggctggtagtgatgtcctctcagctggagctgatggctgccagcctgtacaacaatactgtgcctgagctctggagtgccaaggcctacccatcgctcaagcctctgtcatcatgggtcatggacctgctgcaacgcctggactttctgcaggcctggatccaagatggcatcccagctgtcttctggatcagtggattcttcttcccccaggctttcttaacaggcactctgcagaattttgcccgcaaatttgtcatctccattgacaccatctcctttgatttcaaggtgatgtttgaggcaccatcagagttaacacaaagaccccaagtagggtgctatatccatggattattcctggaaggtgcccgctgggatccagaggccttccagctggctgagtctcagcccaaggagctgtacacagagatggccgttatctggctcttgccaacacccaaccgcaaggcccaggaccaggacttttacctgtgccccatctacaagacactgactcgtgctggaacactatcaaccacaggacactctaccaactatgtcattgctgtggagatccccacccatcagccccagcgacactggataaagcgtggtgtggccctcatctgtgccctggactactagactcagacagaagggctggggccattaaagctgaattttctaagcaaaaaaaaaaaaa

SEQ ID NO: 242 - DNA, 1032 bp, Homo sapiens
  CDS (64)..(852)
gatggctggacaccagttcacgcagctgtggacactggtaatgtggacagcctcaagcttcttatgtaccatagaataccagctcatggaaattctttcaatgaggaggagtccgagtcaagtgtctttgacttggatggaggagaagagagtcctgaaggcatatccaagcctgttgttcctgcagacctcattaaccacgccaacagagaaggctggactgctgcccacattgctgcttccaaaggttttaagaactgcctagaaatcttgtgtaggcacggagggcttgagccagaaaggagagacaagtgcaatcggactgtgcatgatgttgccactgatgactgcaagcatttgctggagaatctgaatgctcttaaaatacccttaaggatttcagtgggtgagattgaaccaagcaactatggttctgatgacttggaatgtgaaaacacaatatgtgctttaaatatccgcaaacagacatcatgggatgatttttcaaaagcagtgagtcaagctctgacaaatcatttccaggcaatctcttctgatggatggtggagtctggaagacgtgacttgcaataacaccactgattccaacatcggcctcagtgcaagaagcatacgatccatcacgctaggaaatgtgccgtggtcagtgggtcagagcttcgcgcagtccccgtgggactttatgaggaagaataaggcagagcacatcactgtgcttttgtcaggtcctcaagaaggctgtctcagtagtgtgacttatgcctccatgatccctctccagatgatgcagaactacctcaggctgatggggaaactgaacagagagaggtaaaatgctcaaagtcatgcatctagcaagtgatgaagccaggattgtgcaagtctctgatgtgtatgagatcaatctgaaactaatactactggtataaaacattaaacataattttgcttgctgccttaatttcgatgacctttttaaataaatgagttggaactatgaaaaaaaaaaaaa

SEQ ID NO: 243 - DNA, 2199 bp, Homo sapiens
  CDS (388)..(2199)
ttgaaagctgttcgcctgccgtaccggtccggaattcccgggtcgacgatttcgtgcctggaccgctgggtaggcgcgtccagcggcctgagcaggggagggtaatgaggctgttacgcgccttctccgcatcttggcgggagcctgacgccccgcttcttccctaacggggtgttccaccggcgcctgccgaggcctaggcctccgcagccgccctccgtctcctcagccccgacgctgcgcccgctttgtgctcatttttctctggggaaactgaggctccgagtgcgaaagtcagccgaggtcgccccgcccaggacagagaagggctgggggtcggctgagccgcggcattcccgggccccgctagggctgcagggtctcaggatggcagcctcggcgcaggtgtctgtgacctttgaggatgtggctgtgacattcacccaggaggagtggggacagttggatgcagcccagagaaccttgtatcaggaggtgatgctggagacctgcggacttctcatgtctctgggctgtcctttgttcaaaccagagctgatctaccagttggatcacagacaggagctatggatggctacaaaagacctctcccaaagctcctatccaggtgacaacacaaaacccaagaccacagagcctaccttttctcacctggccttgcctgaggaagtcttactccaggaacaactgacacaaggagcctcaaagaactcccaattagggcaatccaaggatcaggatgggccatctgaaatgcaagaagtccacttgaaaatagggataggcccccagcgggggaagctgctggagaaaatgagttctgaacgtgatggtttggggtcagatgatggtgtatgtacaaagattacacagaaacaagtttcaacagaaggtgatctctatgaatgtgattcacatggaccagttacagatgccttgattcgcgaagagaaaaattcctataaatgtgaggaatgcgggaaagtgtttaaaaagaatgccctccttgttcagcatgaacggattcacactcaagtgaagccctatgaatgcacagagtgtgggaaaacctttagcaagagcactcatcttcttcagcacctcatcatccacactggggagaagccctataagtgcatggagtgtgggaaggcttttaaccgcaggtcacacctcacacggcaccagcggattcacagtggagagaagccttataagtgcagtgaatgtggaaaggccttcacccaccgctccacttttgtcttgcatcacaggagccacactggagaaaaaccctttgtgtgcaaagagtgtggcaaagcctttcgagataggccaggtttcattcgacactacatcatccacacgggagagaagccctatgagtgcattgagtgtattgagtgtgggaaggccttcaaccgccggtcatacctcacgtggcaccaacagattcacactggagtgaaaccctttgaatgcaacgagtgtggaaaagctttttgcgagagtgcagacctcattcaacactacattatccacactggggagaagccctataagtgcatggagtgtgggaaggcgttcaaccgtaggtcacacctcaagcagcatcaacggattcacactggggagaagccttatgaatgcagtgaatgtggaaaggccttcacccactgctccacttttgtcttgcataaaaggacccacacaggagaaaaaccctatgaatgcaaagaatgtggaaaagcctttagtgatagggcagacctcattcgccacttcagcatccacactggagagaaaccctatgagtgcgtggagtgtggaaaggccttcaaccgcagctcacacctcacgaggcaccaacagattcacactggagagaaaccctatgaatgcatccagtgtgggaaagccttttgccggagcgcaaaccttattcgacactccatcattcacactggagagaagccgtatgaatgcagtgagtgtggaaaggcttttaatcgcggctcatccctcacacatcatcaaaggattcatactgggagaaaccctaccattgtaacagatgtgggaagaccttttatgactgcacagacttcagtcaacatccaggaacttttattagggaaagagtttttgaatatcaccactgaagaaaatctgtggtga

SEQ ID NO: 244 - DNA, 1416 bp, Homo sapiens
  CDS (74)..(1150)
gcacgagggaggcttctgggagcgaccgctccgctcgtctcgttggttccggaggtcgctgcggcggtgggaaatgctggcgcgcgcggcgcggggcactggggcccttttgctgaggggctctctactggcttctggccgcgctccgcgccgcgcctcctctggattgccccgaaacaccgtggtactgttcgtgccgcagcaggaggcctgggtggtggagcgaatgggccgattccaccggatcctggagcctggtttgaacatcctcatccctgtgttagaccggatccgatatgtgcagagtctcaaggaaattgtcatcaacgtgcctgagcagtcggctgtgactctcgacaatgtaactctgcaaatcgatggagtcctttacctgcgcatcatggacccttacaaggcaagctacggtgtggaggaccctgagtatgccgtcacccagctagctcaaacaaccatgagatcagagctcggcaaactctctctggacaaagtcttccgggaacgggagtccctgaatgccagcattgtggatgccatcaaccaagctgctgactgctggggtatccgctgcctccgttatgagatcaaggatatccatgtgccaccccgggtgaaagagtctatgcagatgcaggtggaggcagagcggcggaaacgggccacagttctagagtctgaggggacccgagagtcggccatcaatgtggcagaagggaagaaacaggcccagatcctggcctccgaagcagaaaaggctgaacagataaatcaggcagcaggagaggccagtgcagttctggcgaaggccaaggctaaagctgaagctattcgaatcctggctgcagctctgacacaacataatggagatgcagcagcttcactgactgtggccgagcagtatgtcagcgcgttctccaaactggccaaggactccaacactatcctactgccctccaaccctggcgatgtcaccagcatggtggctcaggccatgggtgtatatggagccctcaccaaagccccagtcccagtgccagggactccagactcactctccagtgggagcagcagagatgtccagggtacagatgcaagtcttgatgaggaacttgatcgagtcaagatgagttagtggagctgggcttggccagggagtctggggacaaggaagcagattttcctgattctggctctagcttccctgccaagattttggtttttatttttttatttgaactttagtcgtgtaataaactcaccagtggcaaaccaaaaactgtcctctttgattggggaatgaagttgggaaagtcactagcattttccttggatccagtcctgtcagcatgatgcctccatgaataagagtgaacttcttgtaaagtgaaaaaaaaaaaa

SEQ ID NO: 245 - DNA, 5316 bp, Homo sapiens
  CDS (271)..(3660)
cggtccggaattcccgggtcgacgatttcgtgctcttaatgtgtagattacaacaaattcgctgcatccacaccgacctgacacgcttgactctgggagtgcgctgctgcagctgcaggacagcgggacgggggagtcactttgttcctgaaggggcgagtcctcggcagacgctgcgccgcctccctctttgctagggaggtctgtgtttctacctcctcttcacgccccgcttgcttcctgcactgtgcccgcgctcgtggggagcagatgcaccagatggcgtccggggtggggtcaatgaagtgcagcctgaggaagatgtggcgccctggagaaaagaaggagccccagggcgttgtctatgaggatgtgccggacgacacggaggatttcaaggaatcgcttaaggtggtttttgaaggaagtgcatatggattacaaaactttaataagcaaaagaaattaaaaacatgtgacgatatggacaccttcttcttgcattatgctgcagcagaaggccaaattgagctaatggagaagatcaccagagattcctctttggaagtgctgcatgaaatggatgattatggaaatacccctctgcattgtgctgtagaaaaaaaccaaattgaaagcgttaagtttcttctcagcagaggagcaaacccaaacctccgaaacttcaacatgatggctcctctccacatagctgtgcagggcatgaataatgaggtgatgaaggtcttgcttgagcatagaactattgatgttaatttggaaggagaaaatggaaacacagctgtgatcattgcgtgcaccacaaataatagcgaagcattgcagattttgcttaacaaaggagctaagccatgtaaatcaaataaatggggatgtttccctattcaccaagctgcattttcaggttccaaagaatgcatggaaataatactaaggtttggtgaagagcatgggtacagtagacagttgcacattaactttatgaataatgggaaagccacccctctccacctggctgtgcaaaatggtgacttggaaatgatcaaaatgtgcctggacaatggtgcacaaatagacccagtggagaagggaaggtgcacagccattcattttgctgccacccagggagccactgagattgttaaactgatgatatcgtcctattctggtagcgtggatattgttaacacaaccgatggatgtcatgagaccatgcttcacagagcttcattgtttgatcaccatgagctagcagactatttaatttcagtgggagcagatattaataagatcgattctgaaggacgctctccacttatattagcaactgcttctgcatcttggaatattgtaaatttgctactctctaaaggtgcccaagtagacataaaagataattttggacgtaattttctgcatttaactgtacagcaaccttatggattaaaaaatctgcgacctgaatttatgcagatgcaacagatcaaagagctggtaatggatgaagacaacgatgggtgtactcctctacattatgcatgtagacaggggggccctggttctgtaaataacctacttggctttaatgtgtccattcattccaaaagcaaagataagaaatcacctctgcattttgcagccagttatgggcgtatcaatacctgtcagaggctcctacaagacataagtgatacgaggcttctgaatgaaggtgaccttcatggaatgactcctctccatctggcagcaaagaatggacatgataaagtagttcagcttcttctgaaaaaaggtgcattgtttctcagtgaccacaatggctggacagctttgcatcatgcgtccatgggcgggtacactcagaccatgaaggtcattcttgatactaatttgaagtgcacagatcgcttggatgaagacgggaacactgcacttcactttgctgcaagggaaggccacgccaaagccgttgcgcttcttctgagccacaatgctgacatagtcctgaacaagcagcaggcctcctttttgcaccttgcacttcacaataagaggaaggaggttgttcttacgatcatcaggagcaaaagatgggatgaatgtcttaagattttcagtcataattctccaggcaataaatgtccaattacagaaatgatagaatacctccctgaatgcatgaaggtacttttagatttctgcatgttgcattccacagaagacaagtcctgccgagactattatatcgagtataatttcaaatatcttcaatgtccattagaattcaccaaaaaaacacctacacaggatgttatatatgaaccgcttacagccctcaacgcaatggtacaaaataaccgcatagagcttctcaatcatcctgtgtgtaaagaatatttactcatgaaatggttggcttatggatttagagctcatatgatgaatttaggatcttactgtcttggtctcatacctatgaccattctcgttgtcaatataaaaccaggaatggctttcaactcaactggcatcatcaatgaaactagtgatcattcagaaatactagataccacgaattcatatctaataaaaacttgtatgattttagtgtttttatcaagtatatttgggtattgcaaagaagcggggcaaattttccaacagaaaaggaattattttatggatataagcaatgttcttgaatggattatctacacgacgggcatcatttttgtgctgcccttgtttgttgaaataccagctcatctgcagtggcaatgtggagcaattgctgtttacttctattggatgaatttcttattgtatcttcaaagatttgaaaattgtggaatttttattgttatgttggaggtaattttgaaaactttgttgaggtctacagttgtatttatcttccttcttctggcttttggactcagcttttacatcctcctgaatttacaggatcccttcagctctccattgctttctataatccagaccttcagcatgatgctaggagatatcaattatcgagagtccttcctagaaccatatctgagaaatgaattggcacatccagttctgtcctttgcacaacttgtttccttcacaatatttgtcccaattgtcctcatgaatttacttattggtttggcagttggcgacattgctgaggtccagaaacatgcatcattgaagaggatagctatgcaggtggaacttcataccagcttagagaagaagctgccactttggtttctacgcaaagtggatcagaaatccaccatcgtgtatcccaacaaacccagatctggtgggatgttattccatatattctgttttttattttgcactggggaaataagacaagaaataccaaatgctgataaatctttagaaatggaaatattaaagcagaaataccggctgaaggatcttacttttctcctggaaaaacagcatgagctcattaaactgatcattcagaagatggagatcatctctgagacagaggatgatgatagccattgttcttttcaagacaggtttaagaaagagcagatggaacaaaggaatagcagatggaatactgtgttgagagcagtcaaggcaaaaacacaccatcttgagccttagctcctcagaccttcagtgaggcttctaatggggggtgcatgacttgctggttctaactttcaatttaaaaagagtgaggaagaagcagaatgattgattttactgcgtgtgaaatcatggttcctgcatgctatataaaagtaaaccatcttttatcctctattcatattttctaccaatcactatgtattggggatatctttgcagatatgttcaaattggactggactttgatgagatataatctcattatttgaatgggtagaaaatgaatttgctagaacacacatttttaatgaaaagaagtaataaatgtaactattaagctaaaatgcaaatgtcagtactgaattcctgcttgttaattacataatatgtgatgctctagaaaatagtcacaagtattaataatgccttagatgatagtcttaaatattaggttgaggtctacctaacctaagctgcttcctggaaagcttcatgttgaaagaacctatgggtggcaccatgtggacttttctgtccctactgtgatgaatagccccacccttcttgctgtccccaacacacctgatgtcactttgagccatatagttgaagtacaaattaataggccttatgatatgcacgaattttactatagataatatatgttgtttctggttttgtttgccaatgagcataataaatgtaaaacctatatagtatccctgtgattattgtatgagcctttgtttgagatttgaaaaaaacatggctccatcacatattcccttttttcttttgatgtctactcaaatcatgaattaatcacatacctcatcattaatcttttcaaggtccttctattgttttgtctgattttctccatcatcctgattagcatgtttattccctcactacccccaggagatattcactgtaatgaatatgtctttggctatgtatgtgtccttgtgttatgttgtacagtgttgttttgagtctgttattatttacacagatgttattatgctatagcttctatttctgtttttgcttcttatttctcttataattctcacttatttcctattttttctactcatttctatttgttactcctttttactggacatgatgtttacaagatacaactgtgttactgtattccatctagtacggggcctttggtgtggcttactatttcattgtgtgcacccacccacccaccacactggacttttctagagatggacagcttggttacctccaccttcctgcactcattctcaaacatactgatgttcatacaaaccagcagagtgctgagggacgatatgtactattacaaaaccagacacttttacattcatggtccaacagaacacatggcctagaggcaatgttgcatataccttaatctttgatatgaataatatctttgttctttatatttcttaaaacagaaagggtggaaaatcactatacagaagcaatatccaaagatctcctgatcataaagacaaggggtcttttcagtcttccctctcctcaaaccttgtgtagcattgcacaatatagatctcagtcaacattcactgagtgccaagaatgtgagaaacactgtaccatgcctgtcatgcgaaatatttaaataaacagattgtcttacag

SEQ ID NO: 246 - DNA, 2704 bp, Homo sapiens
  CDS (212)..(2257)
  misc_feature (1)...(2704): n = a,t,c or g
gccgctacagatgaacatccggaccggcattcccgggtcgacccacgcgtccgagaaatctctgtgtggaaatatgataccttgctgctagggcacaattaggatgcagttcgcaggaagagaaaaataaaaggaaaagtccttgcaccatgtagatcagcgtcccccactttggcatcccggccggccggggacctcccagtctgcggccatgaacgcgagcagcgagggcgagagcttcgcgggctcggtgcaaattccaggtggcacaacggtgctggtggagctgactcccgacatccatatctgcggcatctgcaagcagcagtttaacaacctggatgcctttgtagctcacaagcaaagtggctgccagctgacaggcacatccgcagcagcccccagcacggtccagtttgtatcggaggaaacagtgcctgccacccagactcagaccaccaccagaaccatcacctcggagacccagacaatcacagtttcagctccagaatttgtttttgaacatggctatcaaacttacctgcccacggaaagtaatgaaaaccagacagccactgtcatctctctccctgccaagtcacgcaccaaaaagcccacaacaccacctgctcagaaaaggcttaactgttgctatccaggttgccaattcaagactgcttatggcatgaaggacatggagcggcatttaaaaattcacacgggagacaaaccccataagtgtgaagtctgtggcaagtgctttagccggaaagacaagctgaaaactcacatgcggtgccacacgggcgtgaagccctacaagtgtaagacgtgtgactacgccgctgccgacagcagcagcctcaacaagcacctgaggatccactcggacgagcggcccttcaaatgccagatctgcccctacgccagccgcaactccagccagctcactgtccacctgcgatcccacacgggggacgcccccttccagtgctggctctgtagcgccaagttcaaaatcagctcggacttgaaaaggcacatgcgggtgcactcgggggagaagcctttcaagtgcgagttctgcaatgtccgctgcaccatgaaggggaacctcaagtcgcacatccgtatcaagcacagcgggaataacttcaagtgtcctcattgcgacttcctgggtgacagcaaagccaccctccggaagcacagccgcgtgcaccagtcggagcatcctgagaagtgctcggaatgcagctactcctgctccagcaaggccgccctgcgcatccacgagcgtatccactgcaccgaccgccctttcaagtgcaactactgcagcttcgacaccaaacagcccagcaacctgagcaagcacatgaagaagttccatggggacatggttaagactgaggctctagagaggaaggacaccggcaggcagagcagccggcaggtggccaagctggatgccaagaagagtttccactgcgatatatgcgatgcctccttcatgcgggaggactcgctccgcagccacaagagacagcacagtgagtacagtgagagtaagaactcggacgtgaccgttctccagtttcagatcgaccccagcaagcagcccgccacgcccctcactgtgggacacctccaggtgcccctccagcccagccaagtgccccagttcagcgagggaagagtcaaaatcatcgttgggcatcaggtgccccaggcgaacaccatcgtccaggctgccgccgctgcagtgaacatcgtcccgcctgccttggtggcccagaacccagaggaactcccagggaacagccggctgcagatcctgcgccaggtcagtctgatcgccccccctcagtcctcgcggtgtccgagcgaggcgggcgcaatgacccagccggctgtcctgctgaccacccacgagcagacggacggagccactctgcaccagactctcatccccacggcctcaggtggcccccaggaaggctctggcaatcaaactttcattaccagttcgggtattacttgcactgactttgaaggcctaaacgccttgattcaggaggggacagcagaagtgacagtggtgagcgatggaggccagaacatcgcagtggccaccacagcgccaccggtcttctcctcctcttcccagcaagaactacccaagcagacctactccatcattcaaggggcagcccatccagctttgctctgtcccgccgactccattccagattagtgcttaaaaaaacaaaaggagtgggggaaaggaattgagaaaaagaaatcttaagtagaattctctaaaaggtttgctcttaatgttttctttgttttgttttgtttttgagacggagtctcgnctctgtttcccaggctggagtgcagtggcgctatcttggctcactgcaacgtccgcctcccaggttcaagcgattctcatggcctcagcccctccgagtagctgggaccacaggtgtacgacatcatgactggctaatttttgtatatttagtagagacggggtttcatcatgttgaactcctgacctcaagtgatctgcccacctcagcctcccaaagtgctgggattacaggtgtgagccaccatgcctggccgtggtttgctcttaatgtttttaaggatggttgtgaatccccctggccccataataaattgtaatttt

SEQ ID NO: 247 - DNA, 2712 bp, Homo sapiens
  CDS (489)..(2204)
ttttttttttgccactgccggctcggctaccagctttttattcctttatttgaccccgcccacatcctgctgactggtccattttacagagtgctgattggtccattttacagagtgctgattggcccatttttacagagcgctgattggtacgtttacaaactttagctagacacagcactgattggtgcatttacaaatctttagctagacagaaaagttctccaagtccccactcgacccaggaagtccagctggcttcacctcccaccaggaggccaaacaaaaaggacagtgctgagaggaaccatcgtcctgctagggaagggagtgtggcacaaaggcagcccaaccctgctgccctggagaaagccgagcctgcagcgcggaagaggaatgagagagaaggtggaggttcacaggagccaggcagggagcacagcctggagaaaggatactgggctccaggcctgggcccagatccctctatgtgctcgaagcaggtggacccctcggagggcgcgagttcccacctcaagcaccgtggcggctcccgcgctgcgcacctggaagtgcgcaggctgctccgccgcctcgtcggcgcgctggtagctgaagcaggcttctgctatgtccaggtggccgaggggcagcgggtcgtgggggttcttgaagtagcagaggcagcagcggcgcccgtccaacacgaaccgacggctgcggtagccacgcagtcgcgctggttcccgcgcggtacccgccccgggctctgcagcctccccatcgccgtcgctgccctcctctgcccgggttccggccccggcgctcaaagtggcctggaatttgtagaacgcccccctccaagcccgttggcagttgtcctagcccgctggcccttgcccccgcccgctggccgttgcccccgcgacgccccggaagccagagtaccggaaaaagctcgagcagaggggtcggaaagggaaaacaactacggctgcggtgtggttggtggtgagatgacgaccttagtgctggataatggagcttacaacgccaaaatcggttacagccatgaaaatgtgtcggttattcctaattgtcagttccggtcaaaaacagcacgtcttaaaacttttactgccaaccagatagatgaaataaaagacccttctggactcttttacatcctcccttttcaaaagggctacttggtgaattgggatgttcagagacaagtttgggattacctttttggaaaagaaatgtatcaggttgattttttagatactaatattattatcactgaaccatactttaacttcacttcaattcaagaatcaatgaatgaaattctatttgaagaataccagtttcaagcagtattaagagtaaatgctggggctctcagtgcacataggtatttccgagataatccttccgaattatgctgtatcattgttgatagtggatattcctttacacatatagttccttattgtagaagtaaaaagaaaaaagaagcaattattcggataaatgtgggaggaaaactcttaaccaatcatctaaaggagatcatatcttacaggcagctacatgttatggatgaaacacatgtgattaatcaagtgaaagaagatgtatgctatgtgtctcaggatttttatagagacatggatattgcaaagttgaaaggagaagaaaatacagtaatgatagactatgtcttgcctgacttcagtacaattaaaaagggcttttgtaagccaagggaagagatggtgttgagtggaaaatacaaatctggggaacaaattcttcgtttggccaatgagagatttgctgttccggaaatactctttaatccttctgatataggcattcaagaaatgggaattccagaagctattgtctattcaattcaaaatctacctgaagaaatgcagccgcatttttttaagaacattgtcttgacaggaggaaattcccttttcccaggatttagggatcgggtttactcagaagttcgatgtcttactccaacagattatgatgtttctgttgtgctgcctgaaaaccctattacttatgcctgggaaggtggaaaattgatatcagagaatgatgattttgaagatatggtggtaacaagagaagattacgaagaaaatggacatagcgtctgtgaagagaaatttgatatttaagcaacatttttgaatgaaagttgtgaccataaggtttaatttcaaagttccttttaaaagaggttaaggaactgtgttaccttttgtcctaagaaaaaggcttgaatttatgtaaatactttgatcgattgctaattttcaaaggcttcttaggtaggttactacagtaaactgtaactcagtccacattttcatttaggagctagactaccataacaatgcttatgctgtttccaagggtaggttatttttcattaaaagaagaatgaatgcattttaagtttaattcttcatagctgaaagcacaaatttaacggcttcactggacagttttccttagaaggtagttttgtgtgactgtgactaaactattttattttaaaatgtcattcttatttatacattctaaagttggaaagactgatcttatatgtgtataatgtttattttgtacctagagtacatttaaaagggtggagcactcagctaataaagtttttttggc

SEQ ID NO: 248 - DNA, 1263 bp, Homo sapiens
  CDS (65)..(760)
ctaacttcagtacgctcactatagggaacttggcctcgagcagtcaattcggcacgaggcgctcatgagccgcccagccccggggcgccgcgctgcgccgaccgccaccgccgccgccgccatgaacattttccggctgactggggacctgtcccacctggcggccatcgtcatcctgctgctgaagatctggaagacgcgctcctgcgccggtatttctgggaaaagccagcttctgtttgcactggtcttcacaactcgttacctggatctttttacttcatttatttcattgtataacacatctatgaaggttatctaccttgcctgctcctatgccacagtgtacctgatctacctgaaatttaaggcaacctacgatggaaatcatgataccttccgagtggagtttctggtggtccctgtgggaggcctctcatttttagttaatcacgatttctctcctcttgagatcctctggaccttctccatctacctggagtccgtggctatccttccgcagctgtttatgatcagcaagactggggaggccgagaccatcaccacccactacctgttcttcctgggcctctatcgtgctttgtatcttgtcaactggatctggcgcttctactttgagggcttctttgacctcattgctgtggtggccggcgtagtccagaccatcctatactgtgacttcttctacttgtacattacaaaagtactcaagggaaagaagctcagtttgccagcataagttgccaaagaccatcaccagcatctgtccttcagggtgctcggacagaattcttaccacagcaaaggcataagatgcttgatacggaaaatcagaaacttaactcttttgttgcagatagtcatcagtggctctgtaaaaacgcagaggaaaagagccagaaggtttctgtttaatgcatcttgccttatctttttttattactgtgtacaaagatttttttacacaaagaaacttaatgctgtattaataaattcagtgtgtagcttcaattgggatagttccaaaagtgaagattttgtgaggaataagtgcaaattttttttttattttaaaaaattctttgaaactcttaagtctttgtgtctgcaatgaaattgtactccttgacagttgatagattatgtattcttccatccctcaaacttgcattccactatatttattttttggcaaaagatgagctgtatttgtttgaaatctgagacactatgttcaattgg

SEQ ID NO: 249 - DNA, 642 bp, Homo sapiens
  CDS (87)..(521)
acctatctattcgatgatgaagataccccaccaaacccaaaaaaagagatctctcgaggatccgaattcgcggacgcgtgaccaagatggagttagtgcaggtcctgaaacgcgggctgcagcagatcaccggccacggcggtctccgaggctatctacgggtttttttcaggacaaatgatgcgaaggttggtacattagtgggggaagacaaatatggaaacaaatactatgaagacaacaagcaattttttggccgtcaccgatgggttgtatatactactgaaatgaatggcaaaaacacattctgggatgtggatggaagcatggtgcctcctgaatggcatcgttggcttcacagtatgactgatgatcctccaacaacaaaaccacttactgctcgtaaattcatttggacgaaccataaattcaacgtgactggcaccccagaacaatatgtaccttattctaccactagaaagaagattcaggagtggatcccaccttcaacaccttacaagtaaagacaatgaagaacagttgaaacatgcaaaatatggagcttttcatgtaattactcttttactgtttaccattcactataattcacaattaaaattgtgtgactaaacaaaaaaaaaa

SEQ ID NO: 250 - DNA, 1604 bp, Homo sapiens
  CDS (162)..(839)
  misc_feature (1)...(1604): n = a,t,c or g
aggtgtcacgcgtcgacccacgcgtccgatttgaaaaaccactgggttccgagttcattactacaggaaattctgttctcttctgcggcacagagaaccctgcttcaaagcagaagtagcagttccggagtccagctggctaaaactcatcccagaggataatggcaacccatgccttagaaatcgctgggctgtttcttggtggtgttggaatggtgggcacagtggctgtcactgtcatgcctcagtggagagtgtcggccttcattgaaaacaacatcgtggtttttgaaaacttctgggaaggactgtggatgaattgcgtgaggcaggctaacatcaggatgcagtgcaaaatctatgattccctgctggctctttctccggacctacaggcagccagaggactgatgtgtgctgcttccgtgatgtccttcttggctttcatgatggccatccttggcatgaaatgcaccaggtgcacgggggacaatgagaaggtgaaggctcacattctgctgacggctggaatcatcttcatcatcacgggcatggtggtgctcatccctgtgagctgggttgccaatgccatcatcagagatttctataactcaatagtgaatgttgcccaaaaacgtgagcttggagaagctctctacttaggatggaccacggcactggtgctgattgttggaggagctctgttctgctgcgttttttgttgcaacgaaaagagcagtagctacagatactcgataccttcccatcgcacaacccaaaaaagttatcacaccggaaagaagtcaccgagcgtctactccagaagtcagtatgtgtagttgtgtatgtttttttaactttactataaagccatgcaaatgacaaaaatctatattactttctcaaaatggaccccaaagaaactttgatttactgttcttaactgcctaatcttaattacaggaactgtgcatcagctatttatgattctataagctatttcagcagaatgagatattaaatccaatgctttgattgtnctagaaagtatagtaatttgttttctaaggtggttcaagcatctactcttttnatcatttacttcaaaatgacattgctaaagactgcattatttnactactgtaatttctccacggccatagcattatgtacataggtgagtgtaccatttattatcctcaccattggnggccatgctttattatgggttttaatttnaaaattggaatgccccggtcccattnccacctggnattaantagggcctccaaccttattgccttttnnagggggaaatcatggggtagggggttgnaagggagggttncttgttnatntggnntaaaanccaggtttgggggttaatggccccccntttttnattggcggtttaanatngaggnttnnatccgggattgttanggganttgattgngttcctggtntcgtggttttnggccttgggggttgggncccnacctccntnaccccttntncccngggggttttttcccctgggggnttantacccntntnnaangggggnttttnnccngggggttngntnaancngggttcccggg

SEQ ID NO: 251 - DNA, 1637 bp, Homo sapiens
  CDS (637)..(1080)
  misc_feature (1)...(1637): n = a,t,c or g
atgcgggccgctgccatgacgaccgccatcttggagcgcctgagcaccctgtcggtcagcgggcagcagctgcgccgcctgcccaagatcctggaggatgggcttcccaagatgccttgcactgtcccagaaacggatgtgccccagctcttccgggagccttacatccgcaccggctaccgccccacggggcacgagtggcgctactacttcttcagcctctttcagaaacacaacgaggtggtcaacgtctggacccatttactggcagccctggccgtcctcttgcgattctgggcctttgccgaggctgaggccttgccatgggcgtctacccactccctgcctctgctcctcttcatcctgtcgtcaatcacttacctcacctgcagccttctggcccacctgctgcagtccaagtcagagctctcccactacaccttctactttgtggactatgttggcgtgagcgtttaccaatatggcagtgctttggctcatttcttctacagctctgaccaggcctggtatgaccggttctggcttttcttcttgccagcagctgccttctgtggctggttatcttgtgctggctgttgctatgccaaatatcgttaccggaggccttatccagtcatgaggaagatctgtcaagtggtgccagcaggtctggcttttatcctagacatcagccctgtggcacaccgtgtggcgctctgtcacctggctggctgccaggagcaagcagcctggtaccacaccctccagatcctcttcttcctggttagcgcttatttcttctcctgccccgtgcctgagaagtacttcccgggttcctgtgacatcgtgggccatgggcatcagatcttccatgcatttctgtccatctgtacgctctcccagctggaggccatcctcctggactaccaggggcggcaggagatcttcctgcagcgccatggacccctatctgtccacatggcctgcctctccttcttcttcctggctgcctgcagtgctgccaccgcagcccttctgaggcacaaagtcaaggccagactgaccaagaaagattcctgaggctggcaagtggggcaacgtgtggaggaagcccctcataatttggagaaaacttgatacaatagaagctgactcttaaggcattggcttttaaattaatacatatatccaaggatatgttatagctgcagtgtttgaaagccaaaggatttaagagttttgttgttgttaataaaaggaatactccttttccttttggatcatagcttaacaaggcacaggaagggaagggatcttgactaagattcatgagacattgaattaaggagaatcatcttcatgcctgaaaatttagcaaaattccgactatggcctccaggggcaattcctaaaagctgaatggataataaaattggactgggaaagtaagtaggtggctggtcctcaccctgttgggaatgggctatcctacttatggctgttctttgggtaatggggattaaattgaccccaagggacccgattttcntttgggttttcaaattgttccagagttgggaaaagccnttccaaggtggacatggtggaatttactccgtttcntctgatttctnggt

SEQ ID NO: 252 - DNA, 2076 bp, Homo sapiens
  CDS (320)..(1306)
  misc_feature (1)...(2076): n = a,t,c or g
tttgaccctaggtggatctccgaagacccngantacgccaagcttggcacgaggggaggacggaggtggctgaagcatcataggccacaatagcagttgtctgagacagggggggacgtgtggcagatgttacagccaccacctattgtgtgcagacaacagttagcctgagtcggctccgttacctgcattcatcagctccagaatcctcccagctgcttggaggaactggtgctcctatgtggtgacccgcaccatctcatgccatgtgcagaatggcacctaccttcagcgagtgctgcagaactgcccctggcccatgagctgtccggggagcagctacagaactgtggtgagacccacatacaaggtgatgtacaagatagtgaccgcccgtgagtggaggtgctgccctgggcactcaagagtgagctgcgaggaagttgcaggttcctctgcctccttggagcccatgtggtcgggcagtaccatgcggcggatggcgcttcggcccacagccttctcaggttgtctcaactgcagcaaagtgtcagagctgacagagcggctgaaggtgctggaggccaagatgaccatgctgactgtcatagagcagccagtacctccaacaccagctacccctgaggaccctgccccgctctggggtccccctcctgcccagggcagccccggagatggaggcctccaggaccaagtcggtgcttgggggcttcccgggcccaccggccccaagggagatgccggcagtcggggcccaatggggatgagaggcccaccaggagacccattgctgtccaacaccttcactgagaccaacaaccactggccccagggacccactgggcctccaggccctccagggcccatgggtccccctgggcctcctggccccacaggtgtccctgggagtcctggtcacataggacccccaggccccactggacccaaaggaatctctggccacccaggagagaagggcgagagaggactgcgtggggagcctggcccccaaggctctgctgggcagcggggggaacctggccctaagggagaccctggtgagaagagccactggggggaggggttgcaccagctacgcgaggctttgaagattttagctgagagggttttaatcttggaaacaatgattgggctctatgaaccagagctggggtctggggcgggccctgccggcacaggcacccccagcctccttcggggcaagaggggcggacatgcaaccaactaccggatcgtggcccccaggagccgggacgagagaggctgagggtggtggcggcccctgaggcagaccaggccaggcttcccctcctacctggactcggccagctgcctccagggaccgcccgtccatatttattaatgtcctcagggtcccttctgccatctaggccttaggggtaagcaggtctcagtcctggcaccatgcacatgtctgaggctgagcaagggctgagaggagaggcttgggcctcagtttccctctgtgaagtggggggaggcaggccttcaaggagggatagaggtacaaggcttcgtctcatctgctgtctgagcatccaggcccaaaggcactgagggagtcaggagctggggctcggcacatgcagagatgacagggcagggggcagtcttcctccccctccccgaccaaacctcggggagccctcctgtgcccctccctccttgttgtccagtgctgggctccccaccccgaggtcaggctgcccaatcctctgactggatcaccgggggcttcttgcctcagttcttccctctgagcccccaggccctcccgcatctcaggttggggatggggacatggagaggaaggggccgcctactcctgcaaatgcttgtgacagatgccaggaggtagatgtgtgctggccaataaaggcccctacctgattccccgcagaaaaaaagtcgacgcggccgcgaattcggatcctcgagagatctctttttttgggtttggtggggtatcttcatcatcgaatagatagttatatacatcatcgcctttcgatg

SEQ ID NO: 253 - DNA, 2858 bp, Homo sapiens
  CDS (137)..(1207)
  misc_feature (1)...(2858): n = a,t,c or g
cactggagaccttggnagnggcgggaactgatatctttggcaganncnaaggacttctactcaaaagtggcagagtgtattcaatgattctcaggagcacttggaaagattttactgtaacccagaaaatgatagaatgagaatgaagtatggaggacaagaattttgggcagatttgaatgccatgaacgtgtatgaaacaactgaatttgaccaactacgaaggctgtccacaccaccctctagcaatgtcaactctatttaccacacagtctggaaattcttctgtagggaccactttggatggagagagtatcccgagtctgtcattcgattgattgaagaagccaactctcggggtctgaaagaggttcgatttatgatgtggaataaccactacatcctccacaattcattcttcaggagagagataaaaaggagacccctcttccgctcctgttttatactgcttccatatttacagacacttggtggggttcccacacaagctcctccacctcttgaagcaacttcatcatcacaaattatctgcccagatggggtcacttcagcaaacttttaccctgaaacttgggtttatatgcatccatctcaggacttcatccaagtccctgtttctgcagaggataaaagttatcggatcatttacaatctttttcataagactgtgcctgagtttaaatacagaattttgcagatattgagagtccaaaaccagtttctttgggagaaatataaaaggaaaaaggaatatatgaacaggaaaatgtttggccgtgacaggataataaatgagagacatttatttcatggaacatcccaggatgtggtagatggaatctgcaaacacaactttgaccctcgagtctgtggaaagcatgctacaatgtttggacaaggcagttattttgcaaagaaggcaagctactctcataacttttctaagaagtcctccaaaggagtccacttcatgtttctggccaaagtgctgacgggcagatacacaatgggcagtcatggcatgagaaggcccccgccagtcaatcctggcagtgtcaccagtgacctttatgactcttgtgtggataatttctttgagcctcagatttttgtcatttttaatgatgaccagagttacccttattttgttatccaatatgaagaagtcagtaacactgtttccatttgaaaaatcttggtactgctaaattatttgatatgaactcaatccagcatttgtagcaggttttgaatgggtgggactgggtggggaacagcattggacattaatagggcacttttcagacccattttttaaagtgctagaaaatgctttttttaaaaaaaaaatacaagttttaaaatgaccacttactctttaattatttactaattgctagtgtactcagtgtggaaaagactacagattacacactcttttcattcacacttgtacatatagacagcaatgttattaggagcattaaattaaaaaactgaacagcctaatttaaatgtggcttgggcctggtagaagtttgaccaaatggaatggaggctgtgagcaatgtgaggattctatttatttatttacgtttgataaaacttactggaactagtactaccatgcgtattccctgtcccaaagcatcactgctttggtatagtataagttcatgaaattctggtgggtagaaagaaatttttatttctatcagcagtactaaaatgtatcagccaaccagagaacatcagtgactttaacttctgcagagtttgccccagaattcagagttctatttagaggaagttaaaacaacaacaaaaaacaaccatttgaaaaatttttgtcaccagcaaaacttttcactaattagtgatatgaaatgtgatttttgtgttgttaaacttcagctttggaaaactcagtctctttcattatcatccattccaatttgaaggagttgggcagctaatttggttaaaggcagtcttgagggttagaagtattacttccttttcgggttccagacctagcttgtgactgaaagttttagaaaaaggaagtacatctatagccgaattgataaggttattactgtgttttgcacaaagtatattagcaaaagtatttgctggaattattggtagatggcagtcccactcctacacctgctttgtcagatacagctgggttccctggctgactctgtaccttacttacactacttacttaatagaaacacaaacttggaaattgtgccagtggtccagctggagcacaacgtttggtgaatatgctgtttcctcagttcagagaggtagcaactaggtaaactccttataaaaagcaaatacctggatttacaaaagtgaaagtagttgttcacaaaagaattcgccatggaattctttcagttaccaagctctcctggtaatgtttgtggttatatcatttacacaaaacttttcaggaacttctgtgttgtttaagcaagatgtatctgtactgatgtctcagtgaatcagtctgtttattaagcacttatcagggcttccacacacttatttattttgccctagttaatcctgttgtttgctgccattggcatgaaatggccaactgtggctgttacagttctttcattcaattataacttgtaaaccagtgactcctaatctttttcaagttaagacaccttaccattgcttatttggttttatgagacttgttcctttttttctccctaaggaaaaagaaagctttatgacatatttatttttttaataaaactaagcaaaaataaaacttatggtaattctttaaaaaaaaaaaa

SEQ ID NO: 254 - DNA, 6840 bp, Homo sapiens
  CDS (296)..(4498)
actttcaggagtaatggtgtgtgatgtgagatttgaaatttatttcctttttgttaaaatattaataaaacagttaatatgtttgccttttctgaataaatttgaactttaagaaaacatttaaaactctacagatccatttgaacatctactaaaatgtcactattttaatatttgaagttgctatctcattctacctttccttctatttaaagatggccttcgccggattttatgtcaagttggtttacaagaagggccagatggtgaaaactcttctctagtggacagactgatgcttagtgattccaaattatggaaaggtgctaggagtgtatatcatcagttgttcatgagcagtctgcttatggatttgaaatacaagaaactatttgctgttcgatttgcaaaaaactatgagcgtttgcagagtgattatgtgacagatgaccacgacagagagttttcagtcgcagacctctcggttcagatattcacggttccttcacttgctcgaatgctcatcacagaagaaaacttgatgagcattatcattaagacttttatggatcatttgagacatcgagatgcccagggcagatttcagtttgaacgatacactgctttacaagccttcaaatttaggagagtacagagccttattttagatctcaagtatgtgttaattagcaaaccaactgaatggtcagatgagctgaggcagaagttcctagaagggtttgatgcctttttggaattactaaaatgtatgcagggaatggatccaattacacgtcaagtaggacaacatattgaaatggaaccagagtgggaagcagccttcacactacaaatgaaattaacacatgtcatttcaatgatgcaggactggtgtgcttcagatgaaaaagtgttaatcgaagcttacaagaaatgtctcgctgtactgatgcagtgtcatggtggttatactgatggtgaacagccaatcacactaagcatttgtggacattcagtggaaactatcagatactgtgtttcccaagaaaaagttagcattcacctcccagtttctcgcttacttgcaggtttacatgtattattaagcaaaagtgaagtggcatataaatttccagagctcctacctctaagtgaacttagcccacccatgttgatagaacaccctcttagatgtcttgttctgtgtgcccaagtacatgccggaatgtggagaagaaatgggttctctctagtaaaccagatttattactaccataatgtgaaatgcagacgtgagatgtttgacaaggatgtagtaatgcttcagacaggtgtctccatgatggatccaaatcatttcctgatgatcatgctcagccgctttgaactttatcagattttcagtactccagactatggaaaaagatttagttctgagattacccataaggatgttgttcagcagaacaatactctaatagaagaaatgctatacctcattataatgcttgttggagagagatttagtcctggagttggacaggtaaatgctacagatgaaatcaagcgagagattatccatcagttgagtatcaagcctatggctcatagtgaattggtaaagtctttacctgaagatgagaacaaggagactggcatggagagtgtaatcgaagcagttgcccatttcaagaaacctggattaacaggacgaggcatgtatgaactgaaaccagaatgtgccaaagagttcaacttgtatttctatcacttttcaagggcagaacagtccaaggcagaagaagcgcaacggaaattgaaaagacaaaatagagaagatacagcactcccacctccggtgttgcctccattctgccctctgtttgcaagcctggttaacattttgcagtcagatgtcatgttgtgcatcatgggaacaattctgcaatgggctgtggaacataatggatatgcctggtcagagtccatgctgcaaagggtgttacatttaattggcatggcactacaagaagaaaaacaacatttagagaatgtcacggaagagcatgtagtaacatttaccttcactcagaagatatcaaaacctggtgaagcgccaaaaaattctcctagcatactagctatgctggaaacactacaaaatgctccctacctagaagtccacaaagacatgattcggtggatattgaagacttttaatgctgttaaaaagatgagggagagttcacctaccagtcccgtggcagagacagaaggaaccataatggaagagagttcaagggacaaagacaaagctgagaggaagagaaaagcagagattgccagactgcgcagagaaaagatcatggctcagatgtctgaaatgcagcggcattttattgatgaaaacaaagaactctttcagcagacattagaactggatgcctcaacctctgctgttcttgatcatagccctgtggcttcagatatgacacttacagcactgggccccgcacaaactcaggttcctgaacaaagacaattcgttacatgtatattgtgtcaagaggagcaagaagttaaagtggaaagcagggcaatggtcttggcagcatttgttcagagatcaactgtattatcaaaaaacagaagtaaatttattcaagatccagaaaaatatgatccattattcatgcaccctgatctgtcttgtggaacacacactagtagctgtgggcacattatgcatgcccattgttggcaaaggtattttgattccgttcaagctaaagaacagcgaaggcaacagagattacgcttacatacgagctatgatgtagaaaacggagaattcctttgccccctttgtgaatgcttgagtaatactgttattcctctgctgcttcctccaagaaatatttttaacaacaggttaaatttttcagaccaaccaaatctgactcagtggattagaacaatatctcagcaaataaaagcattacagtttcttaggaaagaagaaagtactcctaataatgcctctacaaagaattcagaaaatgtggatgaattacagctccctgaagggttcaggcctgattttcgtcctaagatcccttattctgagagcataaaagaaatgctaacgacatttggaactgctacctacaaggtgggactaaaggttcatcccaatgaagaggatcctcgtgttcccataatgtgttggggtagctgcgcgtacaccatccaaagcatagaaagaattttgagtgatgaagataaaccattgtttggtcctttaccttgcagactggatgactgtcttaggtcattgacgagatttgccgcagcacactggacagtggcatcagtttcagtggtgcaaggacatttttgtaaaccttttgcatcactggtgcctaatgacagccatgaggaacttccatgcatattagatattgacatgtttcatttattggtgggcttggtgcttgcatttcctgcgttgcagtgtcaggatttttcagggatcagccttggcactggagaccttcacattttccatctggttactatggcacacatcatacagatcttacttacctcatgtacagaagagaatggcatggatcaagaaaatcccccttgtgaagaagaatcagcagttcttgctttgtataaaacacttcaccagtatacgggaagtgccttgaaagaaataccatccggctggcatctgtggaggagtgtcagagctggaatcatgcctttcctgaagtgttctgctttattttttcattacttaaatggagttccttccccacccgacattcaagttcctggaacaagccattttgaacatttatgtagctatctttccctaccaaacaacctcatttgcctttttcaagaaaatagtgagataatgaattcactgattgaaagttggtgccgtaacagtgaagttaaaagatatctagaaggtgaaagagatgctataagatatccaagagaatctaacaaattaataaaccttccagaggattacagcagcctcattaatcaagcatccaatttctcgtgcccgaaatcaggtggtgataagagcagagccccaactctgtgccttgtgtgcggatctctgctgtgctcccagagttactgctgccagactgaactggaaggggaggatgtaggagcctgcacagctcacacctactcctgtggctctggagtgggcatcttcctgagagtacgggaatgtcaggtgctatttttagctggcaaaaccaaaggctgtttttattctcctccttaccttgatgactatggggagaccgaccagggactcagacggggaaatcctttacatttatgcaaagagcgattcaagaagattcagaagctctggcaccaacacagtgtcacagaggaaattggacatgcacaggaagccaatcagacactggttggcattgactggcaacatttataattattgcaccaccaaaaaacacaaacttggatttttttaacccagttggctttttaagaaagaaagaagttctgctgaatttggaaataaattctttatttaaactttccttcccagttttatagtttctggttctgaggactgatgaaaatcatcttccatcagcagattttcttgcactgtttgctgtgcccctcaaatataatgtcttgggttttaagatcgagcaaggagcttctcttcctagattggatcccagcccctttgtgggggtctgactgcatagtcccagccattatgtgatatttcacgttattgatgatagtgaaccgtgggtccgaagctgactcaacggaggcagggaacaaagtctctgtggtctgttgggtcatacttcctggttccactgagtggcccaacactgggactgggttggtgtcccctctgctgacaggaccctactcctaggagcaaagtggttgattttgaaggcagtgttcccttctctccattgactatgagagagttgggggacacacatgcagaagaagcccgtggggagaaggtggattcctggtgtgctggctggtttttcagggctgttagaggtttttttttttcttttttttttttatggcaagacttttggctttgagaaaactcacttagagggctttccaaaaacttaggatggtctaaaaaattaggatattcttttagaattaggaagaaaaattaggatattctaaaagaatatggattaaaaatttaggatattcttttagatatcctaatatctagatgagaggccttccttcataagatctggttgtttgggctgtggttggcataagtgatatttattttggcctctgtcacatccagtttcttgagcttttaaggtaagcttcttttggctttttttcagatgttcaccaagcttaagtttaaaataataggtattctaaaagagtatcctaattttcttatctgtattcttttagaataccctaatgtttcagacagtgatattctcttgttatttctaaggctaaattggcagagtatatcatctaaagccaaacactgaagaaggtgagaacccactcccacccagccagcatttcctggaacagacaagctgctgcttccttgctggctcacttagtgcattcctgggatggtctggcacccaggctttttattctttttgatcattgttcttactgaggtgccttcctagaacaagagccacttacaaaatagcttataattattatgtaccacacaactactattgtttgatgtatgactgctgagagcttgaatacatgcagagagtgactgaagacttagtagaggaataaattctgagcctgtctaaggtggggctaaggaacagatgagtaataagaggctcttggatttttttaaccaatgcaactgaccctttcaatcagttttctttgaattacatctacaagttttgttccactcagctaccagtcaactaggcatgctccacagtatcacaggaagaaggtcagaaatctggaactgaagctaaaagaagtgaggatgtagaagccacattcctctccaaggtagtgtgtgaaagaaccgccccctcttgacaggaggatgaccgtcgccattcttgcgtgggactgactcacccagctgagaggaggaccaatagaaagaaaattcacatttgagtccacctctctccccctttttctgaccttcattcataagatctggttgtttgggctgtaggtggcataattcatgtttattttggcctctgtcacatccagtttctttagcttttaaggtaagcttcttttggctttttttcatatgttcaccaagctaaaatttaaaataataagaccaggtttctctctctacaagtggattataaacattttcaccaaatcataacaatactccagctttccggtccgacttcctaggagcctggagttagcaaagggttgtctctggatttcattctctgagaatatcacagagcctgggagaagatgaatttacatgaaattgcaacatacacacctttttattttctggtgttaagctagttgtctttcctaccttacaaatcatgttagttttatgatttgttccgcatgttttatgtttattgtagaaatgtttatataacatacgctttccatatcagggaaaatcatatctgtttaataaattggctataactttaatatctgtggacaacttgtaaaatttggaatgtatcatatgtaaaaagtttaaagatatccaaataaatgctttaggtgttggcattaaaaaaaaaa

SEQ ID NO: 255 - DNA, 3692 bp, Homo sapiens
  CDS (162)..(983)
acattgcagtaccggtccggaattcccgggtcgacccacgcgtccgggcggcggcggcctcgaggtgacaactgtctccgtcgcaggctccggcgggggcgcaggaggtcgcccggcgcgtcactgtcgggtcggcgagccacgggggccgccgcagcaccatggcgaccaccgtcagcactcagcgcgggccggtgtacatcggtgagctcccgcaggacttcctccgcatcacgcccacacagcagcagcggcaggtccagctggacgcccaggcggcccagcagctgcagtacggaggcgcagtgggcaccgtgggccgactgaacatcacggtggtacaggcaaagttggccaagaattacggcatgacccgcatggacccctactgccgactgcgcctgggctacgcggtgtacgagacgcccacggcacacaatggcgccaagaatccccgctggaataaggtcatccactgcacggtgcccccaggcgtggactctttctatctcgagatcttcgatgagagagccttctccatggacgaccgcattgcctggacccacatcaccatcccggagtccctgaggcagggcaaggtggaggacaagtggtacagcctgagcgggaggcagggggacgacaaggagggcatgatcaacctcgtcatgtcctacgcgctgcttccagctgccatggtgatgccaccccagcccgtggtcctgatgccaacagtgtaccagcagggcgttggctatgtgcccatcacagggatgcccgctgtctgtagccccggcatggtgcccgtggccctgcccccggccgccgtgaacgcccagccccgctgtagcgaggaggacctgaaagccatccaggacatgttccccaacatggaccaggaggtgatccgctccgtgctggaagcccagcgagggaacaaggatgccgccatcaactccctgctgcagatgggggaggagccatagagcctctgcctcgatgccgttttgcccccgctctttggacacgccgacccggcgctccccaaggaatgctgtcccaacaagattcccgtgaaagagcacccgtgtcgccccctcccgtggacttctgtgccgccccgtccacacctgttcttgggtgcatgtgggttttcggttcctggcggtccaggacggggcgggggctcccctcccatctcgtgctgggaggtctcagcgcgctctcctgtccctgggacgtgcgtctctccttctcatgccgttctggaaaatgctcttgctgtagagagcagctgcttctgccagggtgttggaggtggtggagcgccttccgattccattcatggcattttgtgatgtgatgtaattggaatagagctgttgatttaaggcacacacaatccctcacactgtgggttttttttagaacttcccagacgaaaactcacgcccttgccctaacgcgctttgctgtgagcctggcccctgcccagggcttgggtctggtgagctgagcagcttcctgtggatggtgtggggccggcctctggcctggctcacctggccactgtccagccagccttgtgacagactccggcctgaaggcagaatgaacccacacctggagtgaggaagggggcctggcacggttggccaggctctgcctgattgccagccagcgggcatctgaagccgggtccttcgcccgccggaggctgccgtccgtctctcctgctgcgctcgtgccagctccgtgggtgtcctcccagggagcttctcttctcaacaggccttgcgaggctggggtgagaggtgatagaggcagcactgtgcatgattccgagagggtgtggtggcactgccagccgactgctgacagcttgggagctgctgtgcccaggacgtgggttcagcgtgggcgaggaaagcctggcgagcgtggccctgtaaaagctttctgaggcgggaggcgctcacttacctctgactgcctgggcgctgcgtgtagcatcttggcctacaggacagattttaggtgacacctggttatgacagtcagaaatttgagaagcttctcacaagtgatgcactttaaataatctgcatgccattgagacacctgcatgtctggtgtttgtggttcaagtgtcttgccgccggccttcggatgtaaacccactgataacggacagaaagagaatgcccacaagtgggtcttctgtggaagatgcagaaggaggaagttagtgcttacattttagtctttttctccctcaaaaaaataggttaagtttcagtgccagctagaaaatactgctttctgccatcgattgggggtggtttttgtcaaatatactgttgataaatatttatttttgtaaacttgaagtgtgtggtggccgtgggggagggacatgctggcagcaggcgccttcttcagctgtgggtcctaaaggcctttgatcctttgaagaagaaagacatggtatttgttcagcagacgccgaccactcagacggaggggcccctgggattccctgtctcagatggcctggtcttacgcctgtgtagatttcttctccattgggaatgaaggtgtcaggcgggactggaacgttctagatggtatgttccgtgatattaacaactctaacccaggacagaccacaagccacactcagaggcctcactgtgctgggggcttcggtgtccaggcgcccaggtgtggccaccagcaccggtttctgccttcgcgttgctggggtgcagtgagactgccacacgcgtgcacatgtggctctgtgggtgtctcctagagaggacgtggcccctgctgccagcccttgagcagcccgtgtgggggcccgagggacccacacagtgggggccagcctcgctggagggagagcaaccctttgccgatgaccacgcttgccgccatctcttagttttctttttcacaagcgctttatttttttaatagacaaatcacattttgcaaggcctttaattaaataagattcttctttccttcattttatgctttatttcctgtttgaaggcttactgtagaagtggcttactgtagaagcagcttgctgagcccctccgagcggtccccagaattagctggttcacaacccccaccctcccccgcccccgcctgtgtcaggtgtggatgaggtcgtcacactcagaaggacaggcttgtctgccagctcacaaggggaggctgcagtgggtttgggagctgggtttaggcccctggtgtctgagggcccaggccttgccagcctctgctgctcctgctcctgggtttgaagatgcaggccgatcgccagctccgtggcagcggtcactaaggacagcctgactgtgccatcttggagcctcaggcggggctccggagatagaagacaggtcgccggaggctccccctcctctcctctcccctctgcagatgctccctgggcgctaccctgcagggtgccaggcaggagtggtctcagaacgtgcgcttctgattattttactggggtccattgtccagatttttctttgattgtaaaatatatttttactttttagtcttctaatttaataaatgatccatataaaaatagagaaataaagtcctttaagggaaggttaaaaaaactcgtgccgaattcttggcctcgagggccaaat

SEQ ID NO: 256 - DNA, 1642 bp, Homo sapiens
  CDS (91)..(1230)
gtccggaatgccggtcgacgaattactgtgacgcccgggccggaagcgctcgcgcaggagaccccgggtgacggggcccggcgccgctaactggagcgaaccccagcgtccgccgacatggcctggaccaagtaccagctgttcctggccgggctcatgcttgttaccggctccatcaacacgctctcggcaaaatgggcggacaatttcatggccgagggctgtggagggagcaaggagcacagcttccagcatcccttcctccaggcagtgggcatgttcctgggagaattctcctgcctggctgccttctacctcctccgatgcagagctgcagggcaatcagactccagcgtagacccccagcagcccttcaaccctcttcttttcctgcccccagcgctctgtgacatgacagggaccagcctcatgtatgtggctctgaacatgaccagtgcctccagcttccagatgctgcggggtgcagtgatcatattcactggcctgttctcggtggccttcctgggccggaggctggtgctgagccagtggctgggcatcctagccaccatcgcggggctggtggtcgtgggcctggctgacctcctgagcaagcacgacagtcagcacaagctcagcgaagtgatcacaggggacctgttgatcatcatggcccagatcatcgttgccatccagatggtgctagaggagaagttcgtctacaaacacaatgtgcacccactgcgggcagttggcactgagggcctctttggctttgtgatcctctccctgctgctggtgcccatgtactacatccccgccggctccttcagcggaaaccctcgtgggacactggaggatgcattggacgccttctgccaggtgggccagcagccgctcattgccgtggcactgctgggcaacatcagcagcattgccttcttcaacttcgcaggcatcagcgtcaccaaggaactgagcgccaccacccgcatggtgttggacagcttgcgcaccgttgtcatctgggcactgagcctggcactgggctgggaggccttccatgcactgcagatccttggcttcctcatactccttataggcactgccctctacaatgggctacaccgtccgctgctgggccgcctgtccaggggccggcccctggcagaggagagcgagcaggagagactgctgggtggcacccgcactcccatcaatgatgccagctgaggttccctggaggcttctactgccacccgggtgctccttctccctgagactgaggccacacaggctggtgggccccgaatgccctatccccaaggcctcaccctgtcccctccctgcagaacccccagggcagctgctgccacagaagataacaacacccaagtcctctttttctcactaccacctgcagggtggtgttacccagcccccacaagcctgagtgcagtggcagacctcagctctctggacccctcctacagcactagagctaaatcatgaagttgaattgtaggaatttaccaccgtagtgtatctgaatcataaactagattatcatagttatctagtttatgagtcataagctagatttgattcttcaaagaagaaaagtcagtgagcaaatttaaaa

SEQ ID NO: 257 - DNA, 5227 bp, Homo sapiens
  CDS (308)..(1999)
tttcgtaggtgattgtggccacactgtcacactccattgtcttttcagggcagctgtcatagtagaactttgctggtgactggcatgtgccctttcagcctgagccaaggtggtttccttgaaagagttttcatgtttctggagaagagagaaacctgtttcctctctgtcttctctccaggtgaaagcagaagcctcctgggactccgcggtgcatggctgccctcagctcagcaggggcacgcccgtggacgagcggttgttcctgatcgtgcgcgtgacggtccagctcagccaccctgctgacatgcaactggtgttacgcaagagaatctgtgtcaatgttcacggccgccagggttttgcacagagtctcctaaaaaagatgtctcatcgaagttctattcctggctgtggagtgacttttgaaattgtctccaatattccagaggatgcccagggagtggaagaacgggaagcattagcaagaatggcagccaatgttgaaaacccagcttctgctgactcggaggcttatattgaaaagtacctcaggagcgtgctggctgtagaaaacctcctgactttagatcgtctgcgccaggaagttgcagtgaaggaacagttaacaggaaaaggaaagttgagcaggaggagtatcagttctccaaatgtgaacagattgtctggaagccgacaagatctcattccatcatacagtctaggcagcaacaagggccggtgggaaagtcagcaggatgtatcccaaaccacagtttccagaggaatagctcctgcccccgccctctctgtttctccccaaaataaccattctccagatccaggactcagtaaccttgcagcatcctacttgaatcctgtcaaatccttcgtgccgcaaatgccaaagctcctcaagtctctctttcccgtccgcgatgagaagaggggcaagcggccgtctcccctcgcacaccagcccgtgccccgcatcatggtgcagtcagccagcccggacatcagggtgaccaggatggaggaggctcagccggagatgggccctgacgtgctggtgcagacgatgggggccccggccttgaagatctgcgacaaacctgccaaagtgccttccccaccgcctgtcatagctgtcacagcggtcaccccggctccggaggcacaggacgggccccccagccccctgagtgaagcctctagcgggtacttctcccacagcgtctccaccgcgaccctgtcggacgccctgggccccggcctggacgctgcggccccgccggggtccatgcccaccgcccctgaggccgagcccgaggcgcccatcagccaccccccaccgcccacggccgtccccgccgaggagccccctggcccccagcagctcgtgagccccggtcgggagcgccccgacctcgaggccccggcgcccggctccccgttccgcgtccggagggtgcgggcctcggagttgcgctccttctcgcgcatgctggctggggaccccggctgctccccgggggccgaggggaatgcgccggccccgggcgccgggggacaggccctggcctctgattccgaggaagctgacgaggtcccggagtggctccgagagggcgagttcgtcaccgtgggcgcccacaaaacgggcgtggtgagatacgtggggcctgccgacttccaagagggcacgtgggtcggcgtggagctcgacctgccctcaggtaagaatgacggttccatcggcgggaagcagtacttcaggtgtaaccctggctacgggctgctggtcaggcccagccgggtccgcagggccacgggccctgtgcggcggcgcagcacaggactccggctgggtgcccccgaggcccgccggagcgccaccctctcgggctccgccaccaacctggcctcgctgacagctgccctggccaaggccgacaggagccacaagaaccctgagaaccggaaatcctgggccagctgagccgctgccttagggcgaacttttctgggggtgcccggccccttttgagccctgccagtgacagccctgaggagccaggagcccggtggccccttccccaggggcagggcgatgaatgctttttgcacgacacagggctggtgacctccctgggcctctggaagctttgtttcttctgtacccgggtaaagtgggggcctcaactgtgcctcctccggtggatggaaggttctgggtgcccgcaggggctgggggatgctaggactgagaccctgggtggtgcagcgcctggtgatcttgctgtgtgcctgtgcctggggccttatgttgctctttctatcatttccattctggtggccccactaatgtcttaacctaaaccataattgtaaccagtgcctttcctccccactggagggcaagcccccccacccacccaggatgtcctggctcactccgcaagccccccagcctcccaccctggtcccagtttcccgcaaagtgcctctgggggaccccccagcctcccaccctggtcccaggttccacaagtgcctctggagggccctgggctctggcagatggtcctggtgccccagacgggggccgagggcctgagcccccccatccctcctctgccagggtttcttagcggtttctctgtggatgttttggcatctttagacacctggaaagtctcttatgtttgccgtttattcccttcacagaaggcttggaatgtatttatttatatttattttttcaaaatccgaaatcatttgcgagccgcaatcgtcgtctgcctgtgtgggggggcccagggcctgccttgcacgttgcagcctctctggccattgcagagctgctggcctcctgcccaggtggagggtcctggggacggcagaggataaagccccctcctcacatccctctattgcggatccacagtggccttactcttaacttggatgagagcaaaaacctgggagaatgatgtgcttctgtagtcggtgacaaaggaagaggcattgctactttatttggtgcacttttggtttctaggaaggtctttgggtcattttaacttctcggcaactcccagactctcagagtgtggggctggggcctggcggctgggctggtgcagggagtgtgctggttagtctccagaccctcacagcagccacgcccccaggcccaccgtgcatggtgtgggcgggacagccggaagcttccggggtggcctccacctcctggctggggcacttatgctcccagagcctttggtgccaggtttgtgggatgggggttagcgtctatgtgtggaaggccaccaatctagggacaggagtcctgggtcaagattcacacagccacccttggagctggtttctagttctcacatttagtcaacatctagaaagcgctgcggaaggctctggttctctagggacttgaaggcgccaacagagtagtctccatggtgggcctgtcccagccctggctgcgaggacaggttgtctttctctccccagttggcgagggacacgaaggctgcggccgggctggcagagggcccggcccctggggggaggcactcctccagggctctccctgtccttagccgattttgagggaaccctgtggcacctgtccctggatgaagagctgtcacctctgccttgccctttaactcaacccgcttcccagcacagcggctttctttttaaaacctgtttcactgagaagtttgtttttgggtccgctggtgtcactatggcctgggtgagaggccagcactgctgctgccctgaggggaaacgcctgggccgtgtagtggggacgctctgggaatggtggcggacgggcagcgtgggtgggacctggcacttcgtggtggctgagccatccacccagcagcggcctcctgtagcaccatattgggaaagtcctgggggacgtgtgtgtcgtgctttttaccatcggtttgacttacagtggagtagaacgagccagagttcctgacttgagcaggtggatttgggcccaggccctgttcactcttgcttctcggtgcggactaatgtcagcttgtggctgggaaagagggatgtgcagtgacgtggtcaccaaggcagtgagccccgctgaccccgggccagcacttggcaggcaggaggtgcggtctccagagtggtgggccagggcgggctggcctccgtcttctatcttcttttcttgcctccctgaccagcagactcacctcccaagaacgcctgcccgcccacccgccttaggactcccgatgcgctcctggaaggccccaggagtggcaccttagtgtgggtcggcccgcagatggcacccaaggccgggaagggcagtaactgcacacgcggcgctgtcagagatgggggtgggggatgcttctgggggccctgcctccccattgtgtgcccagaacatccctggccccaccccgccacttccctcgggcccttatgaaggactgaggctccagggtgagaaggctcacttctgccccaggcactgcgtccagcagcagaggggacagggggcaggtgtgtgactgggttcctgggtacccaggcctgaccagagggagcgggagggcagaggtgaggagggggaagatgtttctgggcctaccaaggttcaacaagagaacggagctgggaatgtgactgctggagcctgagaggtggaggagttctgatcccccgttacttcctagcattttctcctcttgccttaaaagttccctgtatgtgaaacgggaagtcctgagagtgtgtgttggtggctgtgcgcacgcacacaagacgggagtcaccctgtgcttcctgcccaagatactgacccattgaacccccaaagcatctttctctccacaaagtccgtggtgccttcctggtgggctgcagacactaatggtgttggggggtcttggaacagcttctctatgtgtggattcgtgtaaatgcgaagagttcacatataaagaagtgactttgattctgtgattatattgatttggtacacagtaaatgggagtttaaaaaatccaaagactctaatgacttgtaaagactctaatgatttgtatcatgtaatgaactaaaccacctgtaattttgtaccatatgtgtctttccatcaaatgaccaacagcttctcaataaaaccagaccatttctcacctgc

SEQ ID NO: 258 - DNA, 1059 bp, Homo sapiens
  CDS (247)..(591)
aatgattgcatgcgtgaagactacctatctattcgatgatgaagataccccaccacacccaaaaaaagagatctctcgaggatcctaatttgcggccgcgtcgacccggggcgcagcgcgcacgcaatcgcgtttccggagagacctggctgctgtgtcccgcggcttgcgctccgtagtggactccgcgggccttcggcagatgcaggcctggggtagtctcctttctggactgagaagagaagaatggagaagcccctcttcccattagtgcctttgcattggtttggctttggctacacagcactggttgtttctggtgggatcgttggctatgtaaaaacaggcagcgtgccgtccctggctgcagggctgctcttcggcagtctagccggcctgggtgcttaccagctgtatcaggatccaaggaacgtttggggtttcctagccgctacatctgttacttttgttggtgttatgggaatgagatcctactactatggaaaattcatgcctgtaggtttaattgcaggtgccagtttgctgatggccgccaaagttggagttcgtatgttgatgacatctgattagcagaagtcatgttccagcttggactcatgaaggattaaaaatctgcatcttccactattttcaatgtattaagagaaataagtgcagcatttttgcatctgacattttacctaaaaaaaaaaagacaccaaatttggcggagggggggaaaatcagttgttaccattataaccctacaaagggggggagcatgtaacatgagcttattgagaccatcataaagaccgattcttggatatggattttatctctttctgtatctataggaaaatctcaggggtaaaaggttaggggttgacattgaaaaccctgaaaccccattccctgctcaaaggaacagggggaaaaaaaatctcttgagagattaaaaaaatcttttttttggctcattttaaaccacaaacggactttgaaattatgttaggggaaatatcattgaaaataaagtttactataaataaaaaaaaa

SEQ ID NO: 259 - DNA, 1225 bp, Homo sapiens
  CDS (159)..(638)
cacgatgctggtacgcctgcaggtaccggtccggaattcccgggtcgacccacgcgtccgcgcaacgggcggggcggggccgggcaagtttgttccccgagttcggagcctaggagccccccgcggctgcggcgcaggtgccctcggcctgagtcgggatggagctgcctgctgtgaacctgaaggtgattctcctaggtcactggctgctgacaacctggggctgcattgtattctcaggctcctatgcctgggccaacttcaccatcctggccttgggcgtgtgggctgtggctcagcgggactccatcgacgccataagcatgtttctgggtggcttgctggccaccatcttcctggacatcgtgcacatcagcatcttctacccgcgggtcagcctcacggacacgggccgctttggcgtgggcatggccatcctcagcttgctgctcaagccgctctcctgctgcttcgtctaccacatgtaccgggagcgcgggggtgagctcctggtccacactggtttccttgggtcttctcaggaccgtagtgcctaccagacgattgactcagcagaggcgcccgcagatccctttgcagtcccagagggcaggagtcaagatgcccgagggtactgaagccagccacgctgcgcccggccctgccccgggccttcctcgtgcctgggaggtcgttctagggatgctcctgacctccgtctcttggacctaagatggaatgtgtccccagctcagggattgcctgaaccaagaggccaggagcccccatgggccgcccagtaccatgcacactcctgtcccgaactccctgaggcctcccctcccttcagggcacccactggttcccaggctggaaccagggtctctctttacctcctaccccatggtggcaccacagaggccctcagccgagtcctgcctgagtgttgcaagctcaggcctttaaggactgctgatgccccctcaggcctcccccaagtttgctgggctttggtggaagccctgagagcttcaggtcctgctcagcccgaggagcagtctgacatgggagtgaggccccgtccttctcactgcctggtcacatggtgcctagggatgcagggctggaggccagaggtgtcagcaacactgtgacccaccacaacctccagcctcccttttcagagcacagcattaaagtttggggaattctgtaaaaaaaaaaa

SEQ ID NO: 260 - DNA, 2285 bp, Homo sapiens
  CDS (127)..(1944)
cattgtggcctcgtgtcagtaccggcccggaattcccgggtcgacgatttcgtgcgctgcgttggctgcggcctggcaccaaaggggcggccccggcggagagcggacccagtggcctcggcgattatggacccggccgaggcggtgctgcaagagaaggcactcaagtttatgtgctctatgcccaggtctctgtggctgggctgctccagcctggcggacagcatgccttcgctgcgatgcctgtataacccagggactggcgcactcacagctttcatgaattcctcagagagagaagactgtaataatggcgaaccccctaggaagataataccagagaagaattcgcttagacagacatacaacagctgtgccagactctgcttaaaccaagaaacagtatgtttagcaagcactgctatgaagactgagaattgtgtggccaaaacaaaacttgccaatggcacttccagtatgattgtgcccaagcaacggaaactctcagcaagctatgaaaaggaaaaggaactgtgtgtcaaatactttgagcagtggtcagagtcagatcaagtggaatttgtggaacatcttatatcccaaatgtgtcattaccaacatgggcacataaactcgtatcttaaacctatgttgcagagagatttcataactgctctgccagctcggggattggatcatattgctgagaacattctgtcatacctggatgccaaatcactatgtgctgctgaacttgtgtgcaaggaatggtaccgagtgacctctgatggcatgctgtggaagaagcttatcgagagaatggtcaggacagattctctgtggagaggcctggcagaacgaagaggatggggacagtatttattcaaaaacaaacctcctgacgggaatgctcctcccaactctttttatagagcactttatcctaaaattatacaagacattgagacaatagaatctaattggagatgtggaagacatagtttacagagaattcactgccgaagtgaaacaagcaaaggagtttactgtttacagtatgatgatcagaaaatagtaagcggccttcgagacaacacaatcaagatctgggataaaaacacattggaatgcaagcgaattctcacaggccatacaggttcagtcctctgtctccagtatgatgagagagtgatcataacaggatcatcggattccacggtcagagtgtgggatgtaaatacaggtgaaatgctaaacacgttgattcaccattgtgaagcagttctgcacttgcgtttcaataatggcatgatggtgacctgctccaaagatcgttccattgctgtatgggatatggcctccccaactgacattaccctccggagggtgctggtcggacaccgagctgctgtcaatgttgtagactttgatgacaagtacattgtttctgcatctggggatagaactataaaggtatggaacacaagtacttgtgaatttgtaaggaccttaaatggacacaaacgaggcattgcctgtttgcagtacagggacaggctggtagtgagtggctcatctgacaacactatcagattatgggacatagaatgtggtgcatgtttacgagtgttagaaggccatgaggaattggtgcgttgtattcgatttgataacaagaggatagtcagtggggcctatgatggaaaaattaaagtgtgggatcttgtggctgctttggacccccgtgctcctgcagggacactctgtctacggacccttgtggagcattccggaagagtttttcgactacagtttgatgaattccagattgtcagtagttcacatgatgacacaatcctcatctgggacttcctaaatgatccagctgcccaagctgaacccccccgttccccttctcgaacatacacctacatctccagataaataaccatacactgacctcatacttgcccaggtatcgaaatcgattatgtacataacactgtgggtaggagacgggatattagctgtaaggtgttgctagttcatggaactttctcctgccgtttgggtcaccaactcctgtaaagccgaggaagcagacaatgtgagacagggctgaagctgccacagtgtggacagtgcctttcaccaaggtagccagcctcagttctagatgattctagggtcctacttgtgtggtaagcctagtcattcctgccctagttatctagtagtactgttatgaaaataaaatgagatttgaatcagtttgaaaaaaaaaa

SEQ ID NO: 261 - DNA, 2207 bp, Homo sapiens
  CDS (127)..(1866)
cattgtggcctcgtgtcagtaccggcccggaattcccgggtcgacgatttcgtgcgctgcgttggctgcggcctggcaccaaaggggcggccccggcggagagcggacccagtggcctcggcgattatggacccggccgaggcggtgctgcaagagaaggcactcaagtttatgtgctctatgcccaggtctctgtggctgggctgctccagcctggcggacagcatgccttcgctgcgatgcctgtataacccagggactggcgcactcacagctttccagacatacaacagctgtgccagactctgcttaaaccaagaaacagtatgtttagcaagcactgctatgaagactgagaattgtgtggccaaaacaaaacttgccaatggcacttccagtatgattgtgcccaagcaacggaaactctcagcaagctatgaaaaggaaaaggaactgtgtgtcaaatactttgagcagtggtcagagtcagatcaagtggaatttgtggaacatcttatatcccaaatgtgtcattaccaacatgggcacataaactcgtatcttaaacctatgttgcagagagatttcataactgctctgccagctcggggattggatcatattgctgagaacattctgtcatacctggatgccaaatcactatgtgctgctgaacttgtgtgcaaggaatggtaccgagtgacctctgatggcatgctgtggaagaagcttatcgagagaatggtcaggacagattctctgtggagaggcctggcagaacgaagaggatggggacagtatttattcaaaaacaaacctcctgacgggaatgctcctcccaactctttttatagagcactttatcctaaaattatacaagacattgagacaatagaatctaattggagatgtggaagacatagtttacagagaattcactgccgaagtgaaacaagcaaaggagtttactgtttacagtatgatgatcagaaaatagtaagcggccttcgagacaacacaatcaagatctgggataaaaacacattggaatgcaagcgaattctcacaggccatacaggttcagtcctctgtctccagtatgatgagagagtgatcataacaggatcatcggattccacggtcagagtgtgggatgtaaatacaggtgaaatgctaaacacgttgattcaccattgtgaagcagttctgcacttgcgtttcaataatggcatgatggtgacctgctccaaagatcgttccattgctgtatgggatatggcctccccaactgacattaccctccggagggtgctggtcggacaccgagctgctgtcaatgttgtagactttgatgacaagtacattgtttctgcatctggggatagaactataaaggtatggaacacaagtacttgtgaatttgtaaggaccttaaatggacacaaacgaggcattgcctgtttgcagtacagggacaggctggtagtgagtggctcatctgacaacactatcagattatgggacatagaatgtggtgcatgtttacgagtgttagaaggccatgaggaattggtgcgttgtattcgatttgataacaagaggatagtcagtggggcctatgatggaaaaattaaagtgtgggatcttgtggctgctttggacccccgtgctcctgcagggacactctgtctacggacccttgtggagcattccggaagagtttttcgactacagtttgatgaattccagattgtcagtagttcacatgatgacacaatcctcatctgggacttcctaaatgatccagctgcccaagctgaacccccccgttccccttctcgaacatacacctacatctccagataaataaccatacactgacctcatacttgcccaggtatcgaaatcgattatgtacataacactgtgggtaggagacgggatattagctgtaaggtgttgctagttcatggaactttctcctgccgtttgggtcaccaactcctgtaaagccgaggaagcagacaatgtgagacagggctgaagctgccacagtgtggacagtgcctttcaccaaggtagccagcctcagttctagatgattctagggtcctacttgtgtggtaagcctagtcattcctgccctagttatctagtagtactgttatgaaaataaaatgagatttgaatcagtttgaaaaaaaaaa

SEQ ID NO: 262 - DNA, 2366 bp, Homo sapiens
  CDS (127)..(2025)
cattgtggcctcgtgtcagtaccggcccggaattcccgggtcgacgatttcgtgcgctgcgttggctgcggcctggcaccaaaggggcggccccggcggagagcggacccagtggcctcggcgattatggacccggccgaggcggtgctgcaagagaaggcactcaagtttatgatggagtttcgctcttggtgcccaggctggaatacaatggcgcgatctcggctcaccgcaacctccacctcccgggttcaatgctctatgcccaggtctctgtggctgggctgctccagcctggcggacagcatgccttcgctgcgatgcctgtataacccagggactggcgcactcacagctttcatgaattcctcagagagagaagactgtaataatggcgaaccccctaggaagataataccagagaagaattcgcttagacagacatacaacagctgtgccagactctgcttaaaccaagaaacagtatgtttagcaagcactgctatgaagactgagaattgtgtggccaaaacaaaacttgccaatggcacttccagtatgattgtgcccaagcaacggaaactctcagcaagctatgaaaaggaaaaggaactgtgtgtcaaatactttgagcagtggtcagagtcagatcaagtggaatttgtggaacatcttatatcccaaatgtgtcattaccaacatgggcacataaactcgtatcttaaacctatgttgcagagagatttcataactgctctgccagctcggggattggatcatattgctgagaacattctgtcatacctggatgccaaatcactatgtgctgctgaacttgtgtgcaaggaatggtaccgagtgacctctgatggcatgctgtggaagaagcttatcgagagaatggtcaggacagattctctgtggagaggcctggcagaacgaagaggatggggacagtatttattcaaaaacaaacctcctgacgggaatgctcctcccaactctttttatagagcactttatcctaaaattatacaagacattgagacaatagaatctaattggagatgtggaagacatagtttacagagaattcactgccgaagtgaaacaagcaaaggagtttactgtttacagtatgatgatcagaaaatagtaagcggccttcgagacaacacaatcaagatctgggataaaaacacattggaatgcaagcgaattctcacaggccatacaggttcagtcctctgtctccagtatgatgagagagtgatcataacaggatcatcggattccacggtcagagtgtgggatgtaaatacaggtgaaatgctaaacacgttgattcaccattgtgaagcagttctgcacttgcgtttcaataatggcatgatggtgacctgctccaaagatcgttccattgctgtatgggatatggcctccccaactgacattaccctccggagggtgctggtcggacaccgagctgctgtcaatgttgtagactttgatgacaagtacattgtttctgcatctggggatagaactataaaggtatggaacacaagtacttgtgaatttgtaaggaccttaaatggacacaaacgaggcattgcctgtttgcagtacagggacaggctggtagtgagtggctcatctgacaacactatcagattatgggacatagaatgtggtgcatgtttacgagtgttagaaggccatgaggaattggtgcgttgtattcgatttgataacaagaggatagtcagtggggcctatgatggaaaaattaaagtgtgggatcttgtggctgctttggacccccgtgctcctgcagggacactctgtctacggacccttgtggagcattccggaagagtttttcgactacagtttgatgaattccagattgtcagtagttcacatgatgacacaatcctcatctgggacttcctaaatgatccagctgcccaagctgaacccccccgttccccttctcgaacatacacctacatctccagataaataaccatacactgacctcatacttgcccaggtatcgaaatcgattatgtacataacactgtgggtaggagacgggatattagctgtaaggtgttgctagttcatggaactttctcctgccgtttgggtcaccaactcctgtaaagccgaggaagcagacaatgtgagacagggctgaagctgccacagtgtggacagtgcctttcaccaaggtagccagcctcagttctagatgattctagggtcctacttgtgtggtaagcctagtcattcctgccctagttatctagtagtactgttatgaaaataaaatgagatttgaatcagtttgaaaaaaaaaa

SEQ ID NO: 263 - DNA, 2378 bp, Homo sapiens
  CDS (284)..(1576)
aagacgggctaagtctgcgcccccaggatccctccctgaggacaaacagaaggccgggtcctcccttctcccgcttgtccttcggcattcgcgggacctgcatgctagaccagctggccggacagctcgctaggaccgcgggtgcggctggcccctgccatttccgcttcctgccgtggggcggggtttccggttgtcggaggcgaggcttgtcggctgtcaaaggggcggcccggcccggcccggaagctacagcagcggcgcggagactgcggggcgggccatggcggcgaacctgagccggaacgggccagcgctgcaagaggcctacgtgcgggtggtcaccgagaagtccccgaccgactgggctctctttacctatgaaggcaacagcaatgacatccgcgtggctggcacaggggagggtggcctggaggagatggtggaggagctcaacagcgggaaggtgatgtacgccttctgcagagtgaaggaccccaactctggactgcccaaatttgtcctcatcaactggacaggcgagggcgtgaacgatgtgcggaagggagcctgtgccagccacgtcagcaccatggccagcttcctgaagggggcccatgtgaccatcaacgcacgggccgaggaggatgtggagcctgagtgcatcatggagaaggtggccaaggcttcaggtgccaactacagctttcacaaggagagtggccgcttccaggacgtgggaccccaggccccagtgggctctgtgtaccagaagaccaatgccgtgtctgagattaaaagggttggtaaagacagcttctgggccaaagcagagaaggaggaggagaaccgtcggctggaggaaaagcggcgggccgaggaggcacagcggcagctggagcaggagcgccgggagcgtgagctgcgtgaggctgcacgccgggagcagcgctatcaggagcagggtggcgaggccagcccccagaggacgtgggagcagcagcaagaagtggtttcaaggaaccgaaatgagcaggagtctgccgtgcacccgagggagattttcaagcagaaggagagggccatgtccaccacctccatctccagtcctcagcctggcaagctgaggagccccttcctgcagaagcagctcacccaaccagagacccactttggcagagagccagctgctgccatctcaaggcccagggcagatctccctgctgaggagccggcgcccagcactcctccatgtctggtgcaggcagaagaggaggctgtgtatgaggaacctccagagcaggagaccttctacgagcagcccccactggtgcagcagcaaggtgctggctctgagcacattgaccaccacattcagggccaggggctcagtgggcaagggctctgtgcccgtgccctgtacgactaccaggcagccgacgacacagagatctcctttgaccccgagaacctcatcacgggcatcgaggtgatcgacgaaggctggtggcgtggctatgggccggatggccattttggcatgttccctgccaactacgtggagctcattgagtgaggctgagggcacatcttgcccttcccctctcagacatggcttccttattgctggaagaggaggcctgggagttgacattcagcactcttccaggaataggacccccagtgaggatgaggcctcagggctccctccggcttggcagactcagcctgtcaccccaaatgcagcaatggcctggtgattcccacacatccttcctgcatcccccgaccctcccagacagcttggctcttgcccctgacaggatactgagccaagccctgcctgtggccaagccctgagtggccactgccaagctgcggggaagggtcctgagcaggggcatctgggaggctctggctgccttctgcatttatttgccttttttctttttctcttgcttctaaggggtggtggccaccactgtttagaatgacccttgggaacagtgaacgtagagaattgtttttagcagagtttgtgaccaaagtcagagtggatcatggtggtttggcagcagggaatttgtcttgttggagcctgctctgtgctccccactccatttctctgtccctctgcctgggctatgggaagtggggatgcagatggccaagctcccaccctgggtattcaaaaacggcagacacaacatgttcctccacgcggctcactcgatgcctgcaggccccagtgtgtgcctcaactgattctgacttcaggaaaagtaacacagagtggccttggcctgttgtcttcccctattttctgtcccagctcatccgtgtctctgaagaacaaatatgcttttggaaaaaaaaaa

SEQ ID NO: 264 - DNA, 1041 bp, Homo sapiens
  CDS (215)..(652)
cttcgcccggcattgtggaggctgatgtatataactatctattcgatgatgaagataccccaccaaacccaaaaaaagagatctctcgaggatccgaattcgcggccgcgtctaccgctaggaagaggccgcgtggggcgaaggcggcgcttggctggtggggcccgcggcgggattttcccgggcggcgagagcggatctatcttgggatcccatggctttctttactgggctctggggccccttcacctgtgtaagcagagtgctgagccatcactgtttcagcaccactgggagtctgagtgcgattcagaagatgacgcgggtacgagtggtggacaacagtgccctggggaacagcccataccatcgggctcctcgctgcatccatgtctataagaagaatggagtgggcaaggtgggcgaccagatactactggccatcaagggacagaagaaaaaggcgctcattgtggggcactgcatgcctggcccccgaatgacccccagatttgactccaacaacgtggtcctcattgaggacaacgggaaccctgtggggacacgaattaagacacccatccccaccagcctgcgcaagcgggaaggcgagtattccaaggtgctggccattgctcagaactttgtgtgagttgagcccaggcctctggttgcaggactcgtgaatggagcagttctgagaaccacccttttgctaagggagcttgggagccacatggctgctcccttcacactgggtaacagtgtagtatcctgtgagagaataaatgtattcatttatgtgtttttccagagctttctgggatgtgggaaaataaattacactgaagcagttgaaaggtggcttacccgagtctggccacacggggtagcattctttacatggagcagccttggtgccagggtctgagcccttgcttttctggtttggaccctataagttcatccaggactgtcaggccctggaaaactgaggtacacaccaaatgccaatttataaatgtaccgtggctctaacca

SEQ ID NO: 265 - DNA, 1948 bp, Homo sapiens
  CDS (1)..(1566)
atgctgtgtgccctgctcctcctgcccagcctcctgggggccaccagggccagccccacctcaggcccccaggagtgtgcaaagggctccacggtgtggtgtcaggatctgcagacagctgccaggtgcggggctgtggggtactgccaaggggccgtatggaacaaacccaccgcgaagtctctgccctgcgacgtatgccaggacatagcagccgccgctggcaatgggctgaaccctgacgccacggagtctgacatcctggctttggtgatgaagacctgtgagtggctccccagccaggagtcttcagccggatgcaagtggatggtggatgcccacagttcggccatcctgagcatgctccgtggggccccggacagtgccccggcacaggtgtgcacagcgctcagcctctgtgagccgctgcagaggcacctggccaccctgaggccactctccaaagaggacacctttgaggctgtggctccgttcatggccaatgggccccttaccttccacccccgccaggcgcctgaaggagctctgtgccaagactgtgtacggcaggtctcccgactccaggaggctgtccggtccaacttgaccttggccgacttgaacatccaggagcagtgtgagtccttggggcctggcctggccgtcctctgcaagaactacctcttccagttttttgtccctgctgaccaagcactgaggcttctccccccgcaggagctctgcaggaaggggggattctgtgaggagctaggggcacctgcccgtttgactcaagtagtggccatggacggggtcccctccctggagctggggttgccaaggaaacagagcgagatgcagatgaaggccggtgtgacctgtgaggtgtgcatgaacgtggtgcagaagctggaccactggctcatgtccaacagctctgagctcatgatcacccatgccctggagcgcgtgtgctcggtaatgcctgcctctatcacgaaggagtgcatcatcttggtggacacctacagcccctccttggtgcagcttgtggccaaaatcaccccagagaaggtgtgcaagttcatccgtctgtgtggcaaccggaggcgggcccgggcagtccatgatgcctatgccatcgtgccgtccccagagtgggacgcggagaaccagggcagcttctgcaatgggtgcaagaggctgctcacggtgtcctcccacaacctggagagcaagagcaccaagcgagacatcctggtggccttcaagggtggctgcagcatcctgccgctgccctatatgatccagtgcaagcacttcgtcacccagtacgagcccgtgctcattgagagtctcaaggacatgatggaccccgtggctgtgtgcaagaaggtgggggcctgccacggccccaggaccccactgctgggcaccgaccagtgtgccctgggcccaagcttctggtgcaggagccaggaggccgccaagctgtgcaacgctgtgcaacactgccagaagcatgtatggaaagagatgcacctccacgctggggaacacgcgtgaccgtggctgccagagacccagagcctgctagcgaggcccatgaggtgggtgccttccccatccccatttcacaaatgaaaaactgaagctctgaggagggaggctgggaaggagcagagctgaagttcaaaaccaagtattcctgatcccgaaagcctctctcttaacaacggtgccgcacagctttgcccttgaaagcatctctactggaccggaacacactcatgtgccccgctccctgacccagccaagcctgccctttcatctccaaggctgagatgttgccgggggtcccatgagagcctgcccatgggctcaggtgcccctttaccttctgctggatggacatctggctgtgagccaggctggggtcaatggccgc

SEQ ID NO: 266 - DNA, 1471 bp, Homo sapiens
  CDS (1)..(1089)
atgctgtgtgccctgctcctcctgcccagcctcctgggggccaccagggccagccccacctcaggcccccaggagtgtgcaaagggctccacggtgtggtgtcaggatctgcagacagctgccaggtgcggggctgtggggtactgccaaggggccgtatggaacaaacccaccgcgaagtctctgccctgcgacgtatgccaggacatagcagccgccgctggcaatgggctgaaccctgacgccacggagtctgacatcctggctttggtgatgaagacctgtgagtggctccccagccaggagtcttcagccggatgcaagtggatggtggatgcccacagttcggccatcctgagcatgctccgtggggccccggacagtgccccggcacaggtgtgcacagcgctcagcctctgtgagccgctgcagaggcacctggccaccctgaggccactctccaaagaggacacctttgaggctgtggctccgttcatggccaatgggccccttaccttccacccccgccaggcgcctgaaggagctctgtgccaagactgtgtacggcagcttgtggccaaaatcaccccagagaaggtgtgcaagttcatccgtctgtgtggcaaccggaggcgggcccgggcagtccatgatgcctatgccatcgtgccgtccccagagtgggacgcggagaaccagggcagcttctgcaatgggtgcaagaggctgctcacggtgtcctcccacaacctggagagcaagagcaccaagcgagacatcctggtggccttcaagggtggctgcagcatcctgccgctgccctatatgatccagtgcaagcacttcgtcacccagtacgagcccgtgctcattgagagtctcaaggacatgatggaccccgtggctgtgtgcaagaaggtgggggcctgccacggccccaggaccccactgctgggcaccgaccagtgtgccctgggcccaagcttctggtgcaggagccaggaggccgccaagctgtgcaacgctgtgcaacactgccagaagcatgtatggaaagagatgcacctccacgctggggaacacgcgtgaccgtggctgccagagacccagagcctgctagcgaggcccatgaggtgggtgccttccccatccccatttcacaaatgaaaaactgaagctctgaggagggaggctgggaaggagcagagctgaagttcaaaaccaagtattcctgatcccgaaagcctctctcttaacaacggtgccgcacagctttgcccttgaaagcatctctactggaccggaacacactcatgtgccccgctccctgacccagccaagcctgccctttcatctccaaggctgagatgttgccgggggtcccatgagagcctgcccatgggctcaggtgcccctttaccttctgctggatggacatctggctgtgagccaggctggggtcaatggccgc

SEQ ID NO: 267 - DNA, 3376 bp, Homo sapiens
  CDS (1)..(2808)
atgagggacctggagctcagagaggttaagcaacttgcccgaggtcacacagctggttataagacccttctcaagtgcctctcaggtaaattctgccgccgggagctgattggcatcatgggcccctcaggggctggcaagtctacattcatgaacatcttggcaggatacagggagtctggaatgaaggggcagatcctggttaatggaaggccacgggagctgaggaccttccgcaagatgtcctgctacatcatgcaagatgacatgctgctgccgcacctcacggtgttggaagccatgatggtctctgctaacctgaagctgagtgagaagcaggaggtgaagaaggagctggtgacagagatcctgacggcactgggcctgatgtcgtgctcccacacgaggacagccctgctctctggcgggcagaggaagcgtctggccatcgccctggagctggtcaacaacccgcctgtcatgttctttgatgagcccaccagtggtctggatagcgcctcttgtttccaagtggtgtccctcatgaagtccctggcacaggggggccgtaccatcatctgcaccatccaccagcccagtgccaagctctttgagatgtttgacaagtgcatcttcaaaggcgtggtcaccaacctgatcccctatctaaagggactcggcttgcattgccccacctaccacaacccggctgacttcatcatcgaggtggcctctggcgagtatggagacctgaaccccatgttgttcagggctgtgcagaatgggctgtgcgctatggctgagaagaagagcagccctgagaagaacgaggtccctgccccatgccctccttgtcctccggaagtggatcccattgaaagccacacctttgccaccagcaccctcacacagttctgcatcctcttcaagaggaccttcctgtccatcctcagggacacggtggtgtgtccggtggtctactgcagcattgtgtactggatgacgggccagcccgctgagaccagccgcttcctgctcttctcagccctggccaccgccaccgccttggtggcccaatctttggggctgctgatcggagctgcttccaactccctacaggtggccacttttgtgggcccagttaccgccatccctgtcctcttgttctccggcttctttgtcagcttcaagaccatccccacttacctgcaatggagctcctatctctcctatgtcaggtatggctttgagggtgtgatcctgacgatctatggcatggagcgaggagacctgacatgtttagaggaacgctgcccgttccgggagccacagagcatcctccgagcgctggatgtggaggatgccaagctctacatggacttcctggtcttgggcatcttcttcctagccctgcggctgctggcctaccttgtgctgcgttaccgggaatgtggcttttgttctctggacagttctgctgacctcatccgccatgtctacttccactgctaccacaccaagctgaaacagtgggggctgcaggccttgcaaagccaggctgaccttggcccctgcatcctggacttccagagccggaacgtcatccctgatatccctgaccacttcctgtgtctgtgggagcactgtgagttgcccctggcacagaattccttcgacaatcctgagtggttttatcggcatgtggaagcacacagtctgtgctgtgaatacgaagcagtcggcaaggacaacccggtggtgctgtgtggctggaaaggctgtacctgcaccttcaaggaccgcagtaaacttcgagagcacctccgcagccatacccaggagaaagtggtagcctgccccacctgtgggggcatgtttgccaacaataccaagttcttagatcacatccgtcgccagacctcattggatcagcagcacttccagtgttctcactgttccaagagatttgccacagagcggctattgcgggaccacatgcgcaaccatgtgaatcactataagtgccctctgtgtgacatgacctgcccgctgccttcctccctccgcaaccacatgcgctttcgtcacagtgaggaccggccctttaaatgtgactgttgtgactacagctgcaagaatcttattgacctccagaagcacctggatacccacagcgaggagccagcctacaggtgtgattttgagaactgcaccttcagtgcccgatccctctgctctatcaagtcccattaccgcaaagtacatgaaggagactctgagccaaggtacaaatgtcatgtgtgtgacaaatgcttcacacggggcaacaacctcaccgtgcaccttcgcaagaagcaccagttcaagtggccctcagggcatccccgttttcggtacaaggaacatgaagatggctatatgcggctgcagctggttcgctacgagagtgtagagctgacacagcaactgctgcggcaaccacaagagggatcgggcctgggaacgtcgctgaacgagagcagcctgcagggcattattctagaaacagtgccaggggagccaggacgtaaggaagaggaagaggagggcaagggtagcgaagggacagccctctcagcctctcaggacaaccccagttctgtcatccacgtggtgaatcagaccaatgcccaaggccagcaagagattgtctactatgtgctgtctgaagccccaggggagcctcccccagtccctgagccaccttcagggggcatcatggaaaagcttcaaggaatagctgaggagccagagatccagatggtttgaaggccgcagagccagaccatttcttccccaggtcctgaagtttgagccaggcaagtggcagtgcccctagtgggcagccgttgccaatggatgcctttaggagtggtgccgagagcagtgtggtccactctggcctgggtttgcatcattctgcagactctaaagacttcccttttctgccagactacattttgtggggagcctgaggactctggattctttgaggggatcctggatgtgtgtgttcttgttaaagaggctgttatcaggcttaactataaccctcaagatctgcttgacagtgattaaatccttagctcacatccattcccatctttcgggctccttaggcccaaggatggcatgtgactggtccctgcaagggtcctttctttgtcaccagccaaggcattgataaccaagtagccattttcctcttaaggtttcctctacaaccccaaggactttcatgattatcctcagggacaggattggaggcattgagcgtgtttattaacaaattgtttttggtaataaaataaatgcttggactcttaaaaaaaaaaaa

SEQ ID NO: 268 - DNA, 2780 bp, Homo sapiens
  CDS (1)..(2040)
atggaccgcgtgaccagataccccatcctgggcatccctcaggcacaccgtggcaccggcctggtgctggatggagacaccagctacacataccatctggtgtgcatgggccccgaggccagcggctggggccaggatgagccgcagacatggcccactgaccacagggcccagcagggcgtgcagaggcagggggtgtcctacagcgtgcatgcctacactggccagccgtccccacgggggctccactcggagaacagggaggatgagggttggcaggtttaccgcctgggcaccagggatgcccaccagggacgtccaacatgggcactccgcccagaggacggggaggacaaggagatgaagacctaccgcctggatgctggggacgctgaccccaggaggctgtgtgacctggagcgggagcgctgggccgtcatccagggccaggcagtcaggaagagcagcaccgtggccacgctccagggcactcctgaccacggagaccccaggacccccggcccacctcggtccacgcccctggaggagaacgtggttgacagggagcagattgacttcctggcagcgagacagcagttcctgagtctggagcaggcgaacaagggggcccctcatagctccccggccagggggacccccgcaggcacaaccccaggggccagccaggcccccaaggccttcaacaagccccacctggccaacgggcacgtggttcccatcaagccccaggtgaagggggtggtcagggaagagaacaaggtgcgtgctgtgcccacctgggccagtgtccaagttgtggatgaccctggctccttggcctcagtggagtccccggggacccccaaggagacgcccatcgagcgggagatccgtctggctcaggagcgtgaggcagacctgcgagagcagagggggcttcggcaggcaaccgaccaccaggagctggtggaaatccccaccaggccgctgctgaccaagctgagcctgatcacagccccacggcgggagagagggcgcccgtccctctacgtgcagcgggacatagtacaggagacacagcgtgaggaagaccaccggcgggagggcctgcacgtgggccgggcgtccacacccgactgggtctcggagggtccccagcccggactccggagagccctcagctcagattccatcctcagcccggccccagatgcccgtgcggccgacccagctccagaagtgaggaaggtgaaccgcatcccacctgatgcctaccagccgtacctgagccccgggaccccccagctagaattctcagccttcggagcattcggcaagcccagcagtctctccacagcggaggccaaggctgcgacttcaccaaaggccacgatgtccccgaggcatctctcagaatcctctggaaaacccctgagcacaaagcaagaggcatcgaagccccctcggggatgcccgcaagccaacaggggtgtcgtgcggtgggagtacttccgcctgcgtcctctgcggttcagggccccagacgagccccagcaggcccaagtcccccatgtctggggctgggaggtggctggggcccctgcactgaggctgcagaagtcccagtcatctgatctgctggaaagggagagggagagtgtcctgcgccgggagcaagaggtggcagaggagcggagaaatgctctcttcccagaggtcttctccccaacgccagatgagaactctgaccagaactccaggagctcctcccaggcatccggcatcacgggcagttactcggtgtctgagtctcccttcttcagccccatccacctacactcaaacgtggcgtggacagtggaagatccagtggacagtgctcctcccgggcagagaaagaaggagcaatggtacgctggcatcaacccctcggacggtatcaactcagaggtcctggaagccatacgggtgacccgtcacaagaacgccatggcagagcgctgggaatcccgcatctacgccagtgaggaggatgactgagcctcgggatggggcgcccaccccctgccctgccctgaccctcgtgggaactgccaagaccatcgccaagcccccaccctaggaaatgggtcctaggtccaggatccaagaaccacagctcatctgccaacaatcccaccatgggcacatttgggactgttgggtttttcgtttccgtttctatcttcctttagaaatgtttctgcctttggggtctaaagcttttggggatgaaatgggacccctgctgattctttctgcttctaagactttgccaaatgccctgggtctaagaaagaaagagacccgctcctccactttcaggtgtaatttgcttccgctagtctgagggcagagggaccggtcaaagagggtggcacagatcgcagcaccttgaggggctgcgggtctgagggaggagacactcagctcctccctctgagaagtcccaagctgagaggggagacctgcccctttccaaccctgggaaaccatccagtctgagggaggaggccaaactcccagtgctgggggtccctgtgcagccctcaaacccttcaccttggtgcacccagccacacctggtggacacaaagctctcacatcgataggatcccatgaggatggtccccttcacctgggagaaaagtgacccagtttaggagctggaggggggtctttgtcccccacccccaaactgccctgaaataaacctggagtgagctgccaaaaaaaaaaaa

SEQ ID NO: 269 - DNA, 600 bp, Homo sapiens
  CDS (114)..(536)
cccccccccccccccccccatagattgctttatcaacctggctagcgtttaaacttaagcttggtaccgagctcggatccactagtccagtgtggtggaattcggcgttcaagatgtcgaagcgaggacgtggtgggtcctctggtgcgaaattccggatttccttgggtcttccggtaggagctgtaatcaattgtgctgacaacacaggagccaaaaacctgtatatcatctccgtgaaggggatcaagggacggctgaacagacttcccgctgctggtgtgggtgacatggtgatggccacagtcaagaaaggcaaaccagagctcagaaaaaaggtacatccagcagtggtcattcgacaacgaaagtcataccgtagaaaagatggcgtgtttctttattttgaagataatgcaggagtcatagtgaacaataaaggcgagatgaaaggttctgccattacaggaccagtagcaaaggagtgtgcagacttgtggccccggattgcatccaatgctggcagcattgcatgattctcccagtatatttgtaaaaaataaaaaaaaactaaacccattaaaaagtaaaaaaaaaaaa

SEQ ID NO: 270 - DNA, 2203 bp, Homo sapiens
  CDS (244)..(1359)
cctagagaggacgtgttctctggacttaggggtagacagacactggggagggttagtgacccgaggagggtgatgaccctgggagtctgggtcttggctgaggctttccgtccctgaaagaccccaggtctgtctcccatgtcattcacctcgttgctgtgttttctcagaccccagagtcagaaggagtgagaaccctgacccctaatcccactgcatccagccaataggagcccagccaccatggcggagctgcaggaggtgcagatcacagaggagaagccactgttgccaggacagacgcctgaggcggccaaggaggctgagttagctgcccgaatcctcctggaccagggacagactcactctgtggagacaccatacggctctgtcactttcactgtctatggcacccccaaacccaaacgcccagcgatccttacctaccacgatgtgggactcaactataaatcttgcttccagccactgtttcagttcgaggacatgcaggaaatcattcagaactttgtgcgggttcatgtggatgcccctggaatggaagagggagcccctgtgttccctttgggatatcagtacccatctctggaccagcttgcagacatgatcccttgcgtcctgcagtacctaaatttctctacaataattggagttggtgttggagctggagcctacatcctggcgagatatgctcttaaccacccggacactgttgaaggtcttgtcctcatcaacattgatcccaatgccaagggttggatggattgggcagcccacaagctaacaggcctcacctcctgcagtccggagatgatccttggacatcttttcagccaggaagagctctctggaaattctgagttgatacaaaagtacagaaatatcattacacatgcacccaacctggataacattgaattgtactggaacagctacaacaaccgccgagacctgaactttgagcgtggaggtgatatcaccctcaggtgtcctgtgatgctggtggtaggagaccaagcacctcatgaagatgcagtggtggaatgtaactcaaaactggaccccacccagacctcgttcctcaagatggctgactccggaggtcagccccagctgactcagccaggcaagctgaccgaggccttcaagtacttcctgcaaggcatgggctacatggcctcatcctgcatgactcggctgtcccggtctcgtacagcctctctgaccagtgcagaatccgttgatggtaaccggtcccgctctcgcaccctgtcccagagcagagagtctggaactctttcttcggggcccccggggcacaccatggaggtctcctgttgaatggcccttgttgccctagagtgggacccagccctcacctcccccagagctaacctgggaggtgctgaaggggcattgggccaccgtaagcaagggaaaaagggcagatcatgcggggagatgaccttgatctttgattgctaccctaaccttgacctttaacccgtgattccccccagctcctggaagagatgtcctaatatctcttagggacccagacccctaaattctcctcctcccccattttgatgttaaggtggagagggcatatgcatcctctgtcctgatctaggtgtctatagctgaggggtaagaggttgttgtagttgtcctggtgcctccatcagactctccctacttgtcccatatttgcaaggggaggggatttggggctggggctccattcaccaaagctgaggtggcttctcattaaccctttaggactctgaagggtatggacctacgtgaatgtgtgtcagggggagacttgctggtgggttagtggtcctcaggatgtgatagaaacatccagtgtaaaaaggaagttggaatgggagttggcgggcagtgaacgagtgtggggaaggattggtgctggggcaacaggaaggggcctggggccgtttggctgcactaactttggtagctcagtgtgcatctagagtgggactggggagggagctaagcttgggctgggctgcttggggcttggcatagggtggaaagggctaccctggggctctgaccacactgtagtatgtgtggagggtgccctcccgtctcccacaacttctgctataacaataaactgtagaggaatctgagtaccgttaaaaaaaaaaaa

SEQ ID NO: 271 - DNA, 2622 bp, Homo sapiens
  CDS (255)..(1817)
gtcagcctcacgcggcgggaaggaaccggtccgaggccccgggctgccggcgcgggcgcccggcacgtccacaggctgggtcgcgaggtggcgatcgctgagaggcaggagggccgaggcgggcctgggaggcggcccggaggtggggcgccgctggggccggcccgcacgggcttcatctgagggcgcacggcccgcgaccgagcgtgcggactggcctcccaagcgtggggcgacaagctgccggagctgcaatgggccgcggctggggattcttgtttggcctcctgggcgccgtgtggctgctcagctcgggccacggagaggagcagcccccggagacagcggcacagaggtgcttctgccaggttagtggttacttggatgattgtacctgtgatgttgaaaccattgatagatttaataactacaggcttttcccaagactacaaaaacttcttgaaagtgactactttaggtattacaaggtaaacctgaagaggccgtgtcctttctggaatgacatcagccagtgtggaagaagggactgtgctgtcaaaccatgtcaatctgatgaagttcctgatggaattaaatctgcgagctacaagtattctgaagaagccaataatctcattgaagaatgtgaacaagctgaacgacttggagcagtggatgaatctctgagtgaggaaacacagaaggctgttcttcagtggaccaagcatgatgattcttcagatggaattaaatctgcgagctacaagtattctgaagaagccaataatctcattgaagaatgtgaacaagctgaacgacttggagcagtggatgaatctctgagtgaggaaacacagaaggctgttcttcagtggaccaagcatgatgattcttcagataacttctgtgaagctgatgacattcagtcccctgaagctgaatatgtagatttgcttcttaatcctgagcgctacactggttacaagggaccagatgcttggaaaatatggaatgtcatctacgaagaaaactgttttaagccacagacaattaaaagacctttaaatcctttggcttctggtcaagggacaagtgaagagaacactttttacagttggctagaaggtctctgtgtagaaaaaagagcattctacagacttatatctggcctacatgcaagcattaatgtgcatttgagtgcaagatatcttttacaagagacctggttagaaaagaaatggggacacaacattacagaatttcaacagcgatttgatggaattttgactgaaggagaaggtccaagaaggcttaagaacttgtattttctctacttaatagaactaagggctttatccaaagtgttaccattcttcgagcgcccagattttcaactctttactggaaataaaattcaggatgaggaaaacaaaatgttacttctggaaatacttcatgaaatcaagtcatttcctttgcattttgatgagaattcattttttgctggggataaaaaagaagcacacaaactaaaggaggactttcgactgcattttagaaatatttcaagaattatggattgtgttggttgttttaaatgtcgtctgtggggaaagcttcagactcagggtttgggcactgctctgaagatcttattttctgagaaattgatagcaaatatgccagaaagtggacctagttatgaattccatctaaccagacaagaaatagtatcattattcaacgcatttggaagaatttctacaagtgtgaaagaattagaaaacttcaggaacttgttacagaatattcattaaagaaaacaagctgatatgtgcctgtttctggacaatggaggcgaaagagtggaatttcattcaaaggcataatagcaatgacagtcttaagccaaacattttatataaagttgcttttgtaaaggagaattatattgttttaagtaaacacatttttaaaaattgtgttaagtctatgtataatactactgtgagtaaaagtaatactttaataatgtggtacaaattttaaagtttaatattgaataaaaggaggattatcaaattcatatatgataaaagtgaatgttctaagtctctcaaactagcgttttatgtaataatatgtaatataaataaaactatggtaaatgtgacaagcatttaataggaaaatgctaaggaggcctcataaatgacccataattaccaacgtagaatttttcagtacatttagggttgctggatttagcaaataaaaataaagattgcccagttagatttgaatttcagataaacaattagttttttaatattttacatggaatatttggaaaatacttatactaaaaaattatttgtttgaaattcaaatttaactgggagtcttgtattttatctggcaatcctaaaatacattggtatgaaacaaatcacttttagaagtatattgctattttgattgggttgtttttgtgtgtagaaacgtacaataacaactcaaaggcacaggagatttctaaacattgtgaaaagttgaatagattatatatttattctcataatactttcactaatactaaataaaatttggggaacacttttt

SEQ ID NO: 272 - DNA, 1461 bp, Homo sapiens
  CDS (179)..(802)
  misc_feature (1)...(1461): n = a,t,c or g
tcccgggtcgacgatttcgtgggaccgggacgcagctggggagtcagggacgcgcgcagccagcccttccccctccggctcccgcaccgccggccgcctcccctcgccctcctactctcccctccctgctccttcgctttttcctcctcctcctctcccggccccggctgccagcaccatgtccgcagggggagattttgggaatccactgagaaaattcaagttggtgttcttgggggagcagagcgtcgggaagacgtctctgattacgaggttcatgtacgacagcttcgacaacacataccaggcaaccattgggattgacttcttgtcaaaaaccatgtacttggaggaccgcacggtgcgactgcagctctgggacacagctggtcaggagaggttccgcagcctgatccccagctacatccgggactccacggtggctgtggtggtgtacgacatcacaaatctcaactccttccaacagacctctaagtggatcgacgacgtcaggacagagaggggcagtgatgttatcatcatgctggtgggcaacaagacggacctggctgataagaggcagataaccatcgaggagggggagcagcgcgccaaagaactgagcgtcatgttcattgagaccagtgcgaagactggctacaacgtgaagcagctttttcgacgtgtggcgtcggctctacccggaatggagaatgtccaggagaaaagcaaagaagggatgattgacatcaagctggacaaaccccaggagcccccggccagcgagggcggctgctcctgctaatgcagagccgacctgtggcttcccatgacactccttgcttgttgtgttgcttcctattggctagcttcctaaggggggagggaaccgagttatcaagatgggaggatttttcttttctctctgtctttaggagtagggtgggatggggagggaggctgggcatcagggatcacatcactcttaacggctgttacttaaacaactattttttggtttggttgtaatatattgtactttattaagattgccaaaaactgttaaaatttaaaaaaaatttaaatcatgtgtatacaattttttgccagataaaaatgtagtcatttttatttgaaagatgtgctttttgtttttgtatatttgtaaacttatagagaaccttttccacacacctcctccttcctgttctctttgaaccattcatcacctctgccttcctcctatccccagcccaataaattaaaacaattaactgagcaaattaattagggcttcagtctggggggccatctggcnccccttcttctaggggcccctactccagtttaaatcaaacattgggttggaacacatcagcctctggaaagggtaggctctggacttcttgtctttccatggccagagtgggtcgtcaacctcgtgtggagctgagaccaagg

SEQ ID NO: 273 - DNA, 5910 bp, Homo sapiens
  CDS (194)..(5365)
cggtccggaattcccgggtcgacgatttagtgttagttcaagccaaaatggccgacagagtctctgctggtttctgaatatttaaaatacaaaaaaacagatagacaaaaagaattcattttttggaccttttttcatttccatttctaccttgtatgcctcaatttgctggatttaagcactgctgcactttatgagagagaaggagcaagaaagggaagaacagttaatggaagacaagaaaaggaagaaagaggataaaaagaaaaaagaagccactcagaaggtcacggaacaaaaaaccaaagtgcccgaagtgacgaaaccaagtttaagccaaccaacggccgccagcccaattggcagctctccatcgccaccagtcaatggtggcaacaatgccaaaagggtggcagtgccgaacggacaaccgccaagcgccgcccgctacatgcctcgggaggtgccgccgcgattccgttgccagcaggaccacaaagtgttactaaaacgtgggcagccccctccaccgtcctgcatgctccttgggggtggggcagggcctcctccctgcacagcacctggagcaaacccaaacaacgcacaagtgacaggagcgctgctgcagagtgagagtgggactgcgccagactcaacccttggaggtgctgctgcttcaaattatgcaaattccacttggggctcgggagcctcctccaacaacggcacctcccccaacccaattcacatctgggacaaggtgattgtagacgggtctgacatggaagagtggccttgtattgccagcaaagacactgaatcttcttccgaaaacaccaccgataacaacagtgcctcgaaccctggctctgagaagagcactctgccaggaagcaccactagtaacaaaggaaaagggagccagtgccagtctgcaagttctgggaacgaatgtaatcttggggtctggaaatctgaccctaaggctaaatctgttcaatcttccaactctactacagagaacaacaatggactaggaaattggaggaatgtgagtggtcaggatagaattggacctggctctggcttcagcaactttaacccaaatagcaacccatctgcctggccagcactggtccaagaaggaacttctaggaaaggggcattggaaacagataatagtaattccagtgcacaggttagcacagtaggtcagacatccagggaacagcagtcaaagatggaaaatgcgggtgttaattttgttgtctctggcagagaacaggctcaaattcataacactgatggaccaaaaaatggaaacactaactccttgaacttaagttcaccaaaccccatggagaataagggaatgccctttggaatgggcttggggaacacctccaggagcactgatgccccttcacaaagcactggagatcgaaagactgggagtgttggatcttggggtgcagctagggggccttctggaactgacacagtctctggacaaagcaattctggaaacaatgggaacaatggaaaagagagagaggactcctggaaaggagcttctgttcagaaatcaactgggtcaaaaaatgactcttgggacaacaataacaggtctacgggtgggtcctggaactttggcccccaggactctaatgacaacaaatggggtgaagggaacaaaatgacatctggggtctctcagggagaatggaaacagccgactgggtctgatgagttgaaaattggagaatggagtggtccaaaccaaccaaattctagcactggagcatgggacaatcaaaagggccaccccctccctgaaaaccaaggcaatgcccaggctccctgttggggaagatcttccagctccacaggaagtgaagttggaggtcaaagcactggaagcaaccacaaagcaggaagtagtgacagtcataactctggccgtcggtcgtacaggcccacacatcctgattgtcaggctgtcttgcagactcttttgagccgaactgatttggaccccagggtgctctcaaacactggctggggccaaactcaaattaagcaggacacagtgtgggacattgaagaggtgccaaggcctgaggggaaatctgacaaaggaactgaggggtgggagagcgctgccacacagaccaagaactcagggggctggggagatgcacccagccaaagcaatcaaatgaagtctggatggggggagctctcagcctctacagagtggaaagaccccaagaacacaggaggctggaatgactacaagaacaacaactcttccaactggggaggaggacgacctgatgaaaagacaccttcctcttggaatgagaatcccagcaaggatcaggggtggggaggtggacgccagcccaatcaaggatggtcttctggaaagaatggttggggggaggaagtcgatcagacaaaaaacagcaattgggaaagttctgcaagtaaacctgtgtctgggtggggtgaaggagggcagaatgaaatcgggacttggggtaatggtggcaatgcaagcctagcttcaaaaggtgggtgggaggattgcaaaagatccccagcatggaatgagacgggccgacagcccaattcctggaataaacaacaccaacagcagcagcccccacagcagccgccgccaccacaaccagaggcttctggttcgtggggaggcccacccccaccacctccaggcaacgttcgaccttccaattccagctggagcagcgggccacagcctgcaacacctaaggatgaggaacccagtggttgggaagagccatccccacagtcaattagtcggaaaatggacattgatgatggcacttcagcatggggagaccctaacagttataactacaagaatgtgaatctgtgggataagaattcccaagggggcccagcacctcgagaaccaaacctgcccaccccaatgaccagtaaatcggcatcagattccaaatctatgcaagacggctggggggagagtgacgggccagtcacaggagctcgccatcccagctgggaagaggaggaggatggaggagtctggaacaccactggctctcagggcagtgcttcctcccacaactcagcaagctggggacaaggaggaaagaaacaaatgaagtgctcactcaaaggaggaaacaatgattcatggatgaatcctcttgccaaacagttttcaaatatgggattgctgagtcagactgaagataatccaagcagcaaaatggatttgtctgtaggaagcctttcagataaaaaatttgatgtggacaagcgagcgatgaatctcggggattttaatgatatcatgaggaaggatcgatctgggttccgtccacctaattccaaagacatgggaaccacagatagtgggccttattttgagaagggcggtagtcatggtttgtttggaaacagcacagcacaatcgagaggtctgcacacacccgtgcagccactaaattcttctcccagtctccgggcgcaagtgcctccccagtttatttccccccaggtttctgcctcaatgctcaagcagtttcccaacagtggcctgagtccaggtcttttcaatgtggggccccagttatctcctcaacaaattgccatgctgagccagcttccacaaattccccagtttcagttggcatgtcagcttctcttgcagcagcagcaacagcagcagttgttacagaaccagagaaagatttctcaagctgtacgccaacagcaagagcagcagctggctcgaatggtgagtgcactgcagcagcagcagcagcagcagcagaggcagccaggcatgaagcactcgccctctcatcctgttgggcccaagccgcatctggacaacatggtacccaacgcattgaatgtggggctcccagaccttcaaaccaaagggccaatacctggatatggttctggcttcagctctggcggcatggactatggcatggttggtgggaaggaggctggaaccgagtctcgctttaaacagtggacctccatgatggaggggctgccctctgtagccacacaggaagccaatatgcacaaaaatggcgctatagtggcccctggtaaaacccggggagggtcaccgtacaaccagtttgatatcatccctggtgacacactgggtggccatacgggtcctgctggtgatagctggttacctgccaaatctccaccaacaaataaaatcggaagtaaatccagcaatgccagttggcctccagaattccaaccaggagtgccatggaaaggtatccaaaacattgaccctgaatctgacccctatgtcaccccaggaagtgtgctggggggtacagccacatctcccattgtagatactgaccaccaactgctgcgggataacaccacagggtctaattcttccctcaacacctcgctgccttcacctggtgcctggccctacagtgcctctgacaactcctttaccaacgttcatagcacttcagcaaagttccctgattacaaatcaacatggtccccagatcccataggacacaaccccactcatctctccaacaagatgtggaaaaaccatatttcctccaggaacactacaccgctgccccgcccacctcctggtctgaccaaccccaaaccatcatctccctggagcagcacagcaccccgatcagtcagggggtgggggacacaggactcacggctcgcctcggcctctacctggagtgatggtggctcagttcgtcctagttactggctggttcttcacaatctcaccccacagattgatgggtcaaccttgagaacgatctgcatgcagcatggcccactgctgacattccatctgaatctaacccagggcactgccctgatccgatacagcaccaaacaggaggcggccaaggcccaaactgcactgcacatgtgtgtgttgggaaacactaccatccttgctgagtttgccactgatgatgaagtcagccgctttctggcacaagctcagccccctacacctgcagcaaccccaagtgcgccagctgcggggtggcagtcgctggagaccggccagaaccagtcagatcccgtgggacctgctctgaatctttttggtgggtccactgggctcgggcagtggagcagcagcgctggtggcagcagcggggccgatcttgctggcgcttcattgtgggggcccccaaactattcttctagcttatggggagtcccaacggtggaagatccccataggatgggcagccctgctcctttactacctggtgaccttctgggaggagggtcggattcaatctgaacttagaactttcaactctgacctcgtgaccttttttggaacagcagcagcactaacttgaccttttcgttttttttttcaacttgcaataaatacatttttaaaaggaaaaaagaaaacggagagaaaaaaaggtgggtcattgacagactgtctgagcacatagttgcctcccttataacttcagttttttcgtttggaatatgaatccaaaaagagaacatatcactcttgaaatacttgaatcatgaacgccaacctagaaagacaatgtgaagcaagtacacataccatttaaatttaaacacaaaaaaattaaaaaaattagtttctagtttttcacttttttcatgttatatggaagttgttgctaagaaacatatatactgaaaaaaaatagctttttaactttgtttgcactgggtgtgtttccgtccttaggtctaccatgtttgggagggagggaaattcaaaagaattgttgggggaggggggagggaagacttgacggagcctcactttaaaaacaaaaacacaaaaaacct

SEQ ID NO: 274 - DNA, 2471 bp, Homo sapiens
  CDS (588)..(1499)
atttggccctcgaggccaagaattcggcacgagcggcatttctcaagaaccagctggaaagcctgcagcggcgtggggaagacgaagtcaacagtggagtgggccaggatggctcgctgttgtcctccccgttcctcaagggattcctggctggctatgtggtggccaaactgagggcatcagcagtattgggctttgctgtgggcacctgcactggcatctatgcggctcaggcatatgctgtgcccaacgtggagaagacattaagggactatttgcagttgctacgcaaggggcccgactagctctaggtgccatggaagaggcaggatgagcagctcagccttcaggtggagacactttatctggattccccagctgtcatccatttgctatctccaactttcctgccaccttcatccttgcctcccttcctgcagattgtggacagtagttcctcagcctgcaccctggattccttcttccccttcctagctccatgggactcgccccaagactgtggcttcaaggaccaccagccccttactcttcaagccctgactgtggagttggcccgctggaccctgatgctactcctatccactgccatgtacggtgcccatgccccattgctggcactgtgccatgtggacggccgagtgcccttccggccctcctcagccgtgctgctgactgagctgaccaagctactgttatgcgccttctcccttctggtaggctggcaagcatggccccaggggcccccaccctggcgccaggctgctcccttcgcactatcagccctgctctatggcgctaacaacaacctggtgatctatcttcagcgttacatggaccccagcacctaccaggtgctgagtaatctcaagattggaagcacagctgtgctctactgcctctgcctccggcaccgcctctctgtgcgtcaggggttagcgctgctgctgctgatggctgcgggagcctgctatgcagcagggggccttcaagttcccgggaacacccttcccagtccccctccagcagctgctgccagccccatgcccctgcatatcactccgctaggcctgctgctcctcattctgtactgcctcatctcaggcttgtcgtcagtgtacacagagctgctcatgaagcgacagcggctgcccctggcacttcagaacctcttcctctacacttttggtgtgcttctgaatctaggtctgcatgctggcggcggctctggcccaggcctcctggaaggtttctcaggatgggcagcactcgtggtgctgagccaggcactaaatggactgctcatgtctgctgtcatgaagcatggcagcagcatcacacgcctctttgtggtgtcctgctcgctggtggtcaacgccgtgctctcagcagtcctgctacggctgcagctcacagccgccttcttcctggccacattgctcattggcctggccatgcgcctgtactatggcagccgctagtccctgacaacttccaccctgattccggaccctgtagattgggcgccaccaccagatccccctcccaggccttcctccctctcccatcagcagccctgtaacaagtgccttgtgagaaaagctggagaagtgagggcagccaggttattctctggaggttggtggatgaaggggtacccctaggagatgtgaagtgtgggtttggttaaggaaatgcttaccatcccccacccccaaccaagttcttccagactaaagaattaaggtaacatcaatacctaggcctgagaaataaccccatccttgttgggcagctccctgctttgtcctgcatgaacagagttgatgaaagtggggtgtgggcaacaagtggctttccttgcctactttagtcacccagcagagccactggagctggctagtccagcccagccatgggtgcatgactcttccataagggatcctcacccttccactttcatggcaagaagggcccagttgccacagattatacaaccattacccaaaccactctgacagtctcctccagttccagcaatgcctagagacatggttccctggccctctccacagtgctgctccccacacctagcctttgttctgggaaaccccagagagggctggggcttgactcatctcagggaatgtagcccctgggccctgggcttaagccgacactcctgacctctctgttcaccctgagggctgtcttgaagcccgctacccactttaaggctcctaggaggtaccatgcttcccactttggggcctgcccctgcctagcagtttcccagctcccaacagcctggggaagctttgcacagagtgacctgagaccaggtacaggaaacctgtagctcaatcagtgtctctttaactgcataagcaataagattttaataaagttttttaggctgtagggtggttcctccacccccagcaaaaaaaaaa

SEQ ID NO: 275 - DNA, 955 bp, Homo sapiens
  CDS (109)..(714)
atttggccctcgaggccaagaattcggcacgagcgctccacgcgcgcccggactcggcggccaggcttgcgcgcggttcccctcccggtgggcggattcctgggcaagatgaagtgggtgtgggcgctcttgctgttggcggcgctgggcagcggccgcgcggagcgcgactgccgagtgagcagcttccgagtcaaggagaacttcgacaaggctcgcttctctgggacctggtacgccatggccaagaaggaccccgagggcctctttctgcaggacaacatcgtcgcggagttctccgtggacgagaccggccagatgagcgccacagccaagggccgagtccgtcttttgaataactgggacgtgtgcgcagacatggtgggcaccttcacagacaccgaggaccctgccaagttcaagatgaagtactggggcgtagcctcctttctccagaaaggaaatgatgaccactggatcgtcgacacagactacgacacgtatgccgtgcagtactcctgccgcctcctgaacctcgatggcacctgtgctgacagctactccttcgtgttttcccgggaccccaacggcctgcccccagaagcgcagaagattgtaaggcagcggcaggaggagctgtgcctggccaggcagtacaggctgatcgtccacaacggttactgcgatggcagatcagaaagaaaccttttgtagcaatatcaagaatctagtttcatctgagaacttctgattagctctcagtcttcagctctatttatcttaggagtttaatttgcccttctctccccatcttccctcagttcccataaaaccttcattacacataaagatacacgtgggggtcagtgaatctgcttgcctttcctgaaagtttctggggcttaagattccagactctgattcattaaactatagtcacccgtgaaaaaaaaaa

SEQ ID NO: 276 - DNA, 2196 bp, Homo sapiens
  CDS (463)..(1107)
cggcaactgagaggaagcaaagggaaaaaaactccattaaaaagcccagctttcctccatgttagatgtgacttggaaaatgagaaagatttagcaaaattccaccgtatcttttgccaggctagagacagggagagcagagtaaaaccctcaggctgctgaaatttctaggctgttaggaagcccctcgaattctgtgaaaatgagggtttcttaactcacactgagagcggaaaggggcagacccttttcataactccctcaagtgtgtgttacctttctttaccagcatggtaagcaacaggacatatcccagcctcggacatgtctgtatgatccaaggtacccaaagtcagacagagtaaactcaagcctggcactggctttctgccgcttcatgtgctttggaaaaagcaggagaagcaatagcagcaggagtccccagcagctggagccgcaagaatgaactgcaaagagggaactgacagcagctgcggctgcaggggcaacgacgagaagaagatgttgaagtgtgtggtggtgggggacggtgccgtggggaaaacctgcctgctgatgagctacgccaacgacgccttcccagaggaatacgtgcccactgtgtttgaccactatgcagttactgtgactgtgggaggcaagcaacacttgctcggactgtatgacaccgcgggacaggaggactacaaccagctgaggccactctcctaccccaacacggatgtgtttttgatctgcttctctgtcgtaaaccctgcctcttaccacaatgtccaggaggaatgggtccccgagctcaaggactgcatgcctcacgtgccttatgtcctcatagggacccagattgatctccgtgatgacccaaaaaccttggcccgtttgctgtatatgaaagagaaacctctcacttacgagcatggtgtgaagctcgcaaaagcgatcggagcacagtgctacttggaatgttcagctctgactcagaaaggtctcaaagcggtttttgatgaagcaatcctcaccattttccaccccaagaaaaagaagaaacgctgttctgagggtcacagctgctgttcaattatctgaggttgtctgggacctgcctccaccccatccagggatgagaatggcagccaatctctgtggccaagctccagccaaaaaggagggcacgaccagaaaggaactccctttgcacggaggcttgccccatcaccctctgagccctcccaacacagcacactagtcagcccactgccacgacctccctgccagccagaagcatccgtactgcacgctgtctgagaatgctgggcctggattgcagacagtgccgctgctgatcgcatcaaaaacaaagtcaaaggccatctcacattttacaaatccccagctcatgaacgtgaagctgataggaaatcaccccagggaacccgaaaaagaaacttgattcctctattgctggccttacttgatgtcttttataaaacttgggactacaatactaacctttttttctgaatctgctgttctacccatgtgtctcacattcatttgtattatttcaagaaatgtactaatttccagttcactcaggccttactaatccataccaaattagcctaaagacaaggcattttatattcatttctattttcagcatgtttctaccaaagctattagaaccaacacgtacctctgaatgcccgattataagaagacatgagaagactttaaaagttttggaaatttacagagccatgatttttgaacctaattgaaagaaaaccatctgaattgttgcaggtccacatttttgccaaagatacactctatagatgcttagtagtggcctgatttttttccatgtattgccacgacaaactaaaaatgaactgtgtttaagaatgtagtatttctgtttttcatccaagttgattgggggaagaatatggcaggatccatcttttacagtattttgtattcagtaaagtggacattcctgctcctcccttcccccattgcatgccctcttcctcccttgatttcactttctctcatgcccggatccttttattctccccagttataacccagttataaaagaaagatctgagcataaagatacgtgtttaaaaataactaaaagtaaaggaaagtgccttaaaaaaaaaa

SEQ ID NO: 277 - DNA, 1165 bp, Homo sapiens
  CDS (95)..(766)
tgcgcaattgaccttgcggtaccggtccggaattcccgggtcgacccacgcgtccggtcttccctaggctatttctgccgggcgctccgcgaagatgcagctcaagccgatggagatcaaccccgagatgctgaacaaagtgctgtcccggctgggggtcgccggccagtggcgcttcgtggacgtgctggggctggaagaggagtctctgggctcggtgccagcgcctgcctgcgcgctgctgctgctgtttcccctcacggcccagcatgagaacttcaggaaaaagcagattgaagagctgaagggacaagaagttagtcctaaagtgtacttcatgaagcagaccattgggaattcctgtggcacaatcggacttattcacgcagtggccaataatcaagacaaactgggatttgaggatggatcagttctgaaacagtttctttctgaaacagagaaaatgtcccctgaagccagagcaaaatgctttgaaaagaatgaggccatacaggcagcccatgatgccgtggcacaggaaggccaatgtcgggtagatgacaaggtgaatttccattttattctgtttaacaacgtggatggccacctctatgaacttgatggacgaatgccttttccggtgaaccatggcgccagttcagaggacaccctgctgaaggacgctgccaaggtctgcagagaattcaccgagcgtgagcaaggagaagtccgcttctctgccgtggctctctgcaaggcagcctaatgctctgtgggagggactttgctgatttcccctcttcccttcaacatgaaaatatatacccccccatgcagtctaaaatgcttcagtacttgtgaaacacagctgttcttctgttctgcagacacgccttcccctcagccacacccaggcacttaagcacaagcagagtgcacagctgtccactgggccattgtggtgtgagcttcagatggtgaagcattctccccagtgtatgtcttgtatccgatatctaacgctttaaatggctactttggtttctgtctgtaagttaagaccttggatgtggtttaattgtttgtcctcaaaaggaataaaacttttctgctgataagatagccaaaaaaagagccaaagctaagacccccgaaaccagacgag

SEQ ID NO: 278 - DNA, 2543 bp, Homo sapiens
  CDS (366)..(1478)
  misc_feature (1)...(2543): n = a,t,c or g
gcgtgctgctgggcctgagctgtctgtctcgtttctgtccgcgcgccctgcatcccggccccgggcgcccgctggaggtcgccgaggagccacagggctgactggtctgctgcccgggcccaggagtgcctggtgtagcagtcgcggagccatcccggcgtctgctgccatgaccgactctcccctcagaggagactcttcctcagcggtggctgcagagacagatgagcggcggctcctggccgcgggaccgtgagacgggttcgtggccggccatttagggggacgctgcgaccaccgcctgcgcccctccggactggttccttgggccccggaagctcgcggcgggccctgcgggaggcggcatgctcccgcggaggctgctggccgcctggctggcggggacgcggggcgggggcctgctggcgcttctggccaatcagtgccgcttcgtcacgggcctgcgcgtgcggcgcgcgcagcagatcgcgcagctctacggccgcctctactccgagagctcacgccgcgttctcctcggccgcctctggcgccggctgcacggccgtcctggccatgcctctgccttgatggcggcgttagccggcgtcttcgtttgggacgaggagaggatccaggaggaggagttgcagagatctattaatgagatgaagcggttggaagaaatgtcaaatatgtttcagagctctggagtccagcaccaccctccagaaccaaaagcccaaacagaagggaatgaagattcagagggcaaagagcaacgttgggaaatggtgatggataagaaacactttaagctgtggcggcgcccaattacaggcacccacctttaccagtaccgagtttttggaacctacacagatgtgacacctcggcagttcttcaatgttcagctggacacagagtatagaaaaaaatgggatgccctggtaatcaagctggaggtgattgagagggatgtggttagtggttccgaggttcttcactgggtaacccattttccttatccaatgtactcacgggattatgtttatgttcggcggtatagtgtggatcaggaaaacaacatgatggtgttggtgtcgcgtgctgtggagcatccgagtgtgccagagtctccagaattcgtcagggtcagatcatatgaatcccaaatggttatccgtccccacaagtcatttgatgagaatggctttgactacttactaacatacagtgacaatccccaaacggtgtttcctcgctactgtgttagttggatggtttccagtggcatgccagatttcctggagaagctgcacatggccactctgaaagccaagaatatggagattaaagtaaaggactacatctcagctaagcctctggaaatgagtagtgaagccaaggccaccagccagtcctctgagcgaaagaacgagggcagctgtggccctgctcggattgagtatgcttgacaggctttgggataagaagggacaaggtgcttctagccctgtctcagtccgttatcactctgctgtagaagggggacatgccacatgtattagaaggcatctgctgtaacttccagtgcaagataattcaataactgatgtcccatttcattcagagcccttattgctcttatcaaaacagaagaaggctacatttgtgggagtgttgtcatattctcaggccaactgttttgaaattcggtatctcactgagctaatctggaacaaacctctcacctcaggccagaaggggatgacctccatttgcttctctgagtagtttcctctgctgacattccaaatcccaccatcgattgtgcagcgctttggatttccttcagttctccaggtccacctggaaagtatagttggccagttgagtctctcaaatgaggggctactgggagtgctcttggtaacaatcatgatgtgaatgggtgtgaacgatacttggctatgttaagtgccttgtccgcaccttgcttttatctctagagacatgaagttattattaattttttttttttttaagtagagatggagtttcactctgtttcccaggctggtcttgaactcctgggccatgcctggccagggacatgaatttgtacaaagaaatttccctccctgcctgcacaatatcacccattgactcaccttatccaaagcaagtttcctgtgaatcggccagttcttctatattcattggatcattgcctccttcctaaccttccccatttaccaagaacactgggagactaatccttttagatagtagctttttgatgctcaaaacatcacatttaaatttagtttaaaaattttttaacttttgtgtcaaataggagttgaggaattgagcaggattctacgtcgacgcggccgaggtcgacgcggccgcgaattcggatcctcgagagatctctttttttgggtttggtggggtatcttcatcatcgaatagatgggtattcatacgactctcaaggncnttcaggggcncaggcccccccgcgtaaactcccc

SEQ ID NO: 279 - DNA, 2190 bp, Homo sapiens
  CDS (101)..(1570)
aggcttcgccgttccggtccggaattcccgggtcgacgatttcgttccggagccgcccgaagccggtgcctcagtcccctgcgcccccggtgaccccgacatgtccttccgcaaagtggtccggcagagcaaattccggcatgtgttcgggcagccggtcaagaacgaccagtgctatgaggacattcgcgtgtcccgtgttacctgggacagcaccttctgcgccgtcaaccccaagttcctggcggtgattgtggaggccagtggagggggtgcctttctggtgctccccctaagcaagacgggccgcattgacaaggcctacccgacggtgtgtgggcacacgggacctgtcctggacatcgactggtgtcctcacaacgacgaagtcatagccagcggctcggaggactgcacggtcatggtgtggcagatcccagagaacgggctgacctccccgctgacagagccggtggtggtactggaggggcacaccaagcgagtgggcatcatcgcctggcaccccacggcccgaaacgtgctgctcagtgcaggctgcgacaacgtggtactcatctggaatgtgggcacagcggaggagctgtaccgcctggacagcctgcaccctgacctcatctacaatgtcagctggaaccacaatggcagcctgttttgctcagcatgcaaggacaagagcgtgcgcatcatcgacccccgtcggggcaccctggtggcagagcgggagaaggctcatgagggggcccggcccatgcgggccatcttcctggcagatggcaaggtgttcaccacaggcttcagccgaatgagcgagcggcagctggcgctctgggacccagaaaacctcgaggaacccatggccctgcaggaactggactcgagcaacggggccctgctgcccttctacgaccccgacaccagtgtggtctacgtctgcggcaagggtgactccagcatccggtactttgagatcacagaggagcctccctacatccacttcctgaacacgttcaccagcaaggagccgcagcggggtatgggcagcatgcccaagcggggcctggaggtcagcaagtgcgagatcgcccggttctacaaactgcatgagcgcaagtgtgagcccatcgtcatgactgtgccaagaaagtcggacctcttccaggatgatctgtaccccgacacagccgggcccgaggcagccctggaggctgaggagtgggtgagcgggcgggatgccgacccgatcctcatctcactgcgggaggcctacgtgcccagcaagcagcgggacctgaagatcagccggcgcaacgtgttgtctgacagccggcccgccatggccccgggctcctcccacctaggggcccccgcctccaccaccactgctgctgatgccacccccagcggcagcctggccagagccggggaggctgggaagctggaggaggtgatgcaggagctgcgggccctgagggcgctggtcaaggagcagggcgaccgcatctgccgcctggaggagcagctgggccgcatggagaacggggatgcgtagggccacagccacacgccaccttcatctcctccgccgcccccttcccactcagcttctgccagcgggtcgcaccgggctagctggctgcccagagcctctgaggcagcgcaggggtcagttcccacccccacccgtcccaggcccaggccgaagccagcgcccagctttcctcactgttcctgtggaggatgtctacgcccaggcgagctcctcgacctctgagggaccatctccccgaccactgcccagccctctgctccctccccagaggaggcgggagggtgggctctatattttcattccaaataaaattctctttctaaaagccaggctgacctgctgctgcaagggtggggctgagaagtctggaaacctggagacagatgatgtcacaggagtcacacatgtgcagaaggtctgggggcagtgagcagccccacaggcattgctcccctggattgtcaggcagggaaactgaggcagaagacctgagaacacatgcaaggctgcatccagcttcaagttggtgctgcttcttccttggaggacaggcccggcagcccagcctcctccagagagacgaaatcgtcgacccgggaattccggagcggtaccgcaga

SEQ ID NO: 280 - DNA, 888 bp, Homo sapiens
  CDS (104)..(673)
ccacgcgtgcggactagttctaggccccagcactccctctctcttctccactatggacagatttggccctcgaggccaagaattcggcacgagcccagctgacatgggcaccgcaggagccatgcagctgtgctgggtgatcctgggcttcctcctgttccgaggccacaactcccagcccacaatgacccagacctctagctctcagggaggccttggcggtctaagtctgaccacagagccagtttcttccaacccaggatacatcccttcctcagaggctaacaggccaagccatctgtccagcactggtaccccagacacatttcaaactgttccccccaattcaaccaccatgagcctgagcatgagggaagatgcgaccatcctgcccagccccacgtcagagactgtgctcactgtggctgcatttggtgttatcagcttcattgtcatcctggtggttgtggtgatcatcctagttggtgtggtcagcctgaggttcaagtgtcggaagagcaaggagtctgaagatccccagaaacctgggagttcagggctgtctgaaagctgctccacagccaatggagagaaagacagcatcacccttatctccatgaagaacatcaacatgaataatggcaaacaaagtctctcagcagagaagatctaaaggacactagcattgccccagatctgggagcaagctaccaacaggggagactctttcctgtatggacagctgctgtggaaatactgcctgcttctcccacctcctcagagccacaggaaagaggaggtgacagagagagagcaaggaaagtgatgaggtggattgatactttctactttgcattaaaattattttctagcctgcaaaaaaaaaaa

SEQ ID NO: 281 - DNA, 1070 bp, Homo sapiens
  CDS (104)..(721)
ccacgcgtgcggactagttctaggccccagcactccctctctcttctccactatggacagatttggccctcgaggccaagaattcggcacgagcccagctgacatgggcaccgcaggagccatgcagctgtgctgggtgatcctgggcttcctcctgttccgaggccacaactcccagcccacaatgacccagacctctagctctcagggaggccttggcggtctaagtctgaccacagagccagtttcttccaacccaggatacatcccttcctcagaggctaacaggccaagccatctgtccagcactggtaccccaggcgcaggtgtccccagcagtggaagagacggaggcacaagcagagacacatttcaaactgttccccccaattcaaccaccatgagcctgagcatgagggaagatgcgaccatcctgcccagccccacgtcagagactgtgctcactgtggctgcatttggtgttatcagcttcattgtcatcctggtggttgtggtgatcatcctagttggtgtggtcagcctgaggttcaagtgtcggaagagcaaggagtctgaagatccccagaaacctgggagttcagggctgtctgaaagctgctccacagccaatggagagaaagacagcatcacccttatctccatgaagaacatcaacatgaataatggcaaacaaagtctctcagcagagaaggttctttaaaagcaactttgggtccccatgagtccaaggatgatgcagctgccctgtgactacaaggaggaagagatggaattagtagaggcaatgaaccacatgtaaattattttattgtttcatgtctgcttctagatctaaaggacactagcattgccccagatctgggagcaagctaccaacaggggagactctttcctgtatggacagctgctgtggaaatactgcctgcttctcccacctcctcaagagccacaggaaagaggaggtgacagagagagagcaaggaaagtgatgaggtggattgatactttctactttgcattaaaattattttctagcctgcaaaaaaaaa

SEQ ID NO: 282 - DNA, 4424 bp, Homo sapiens
  CDS (1425)..(4214)
  misc_feature (1)...(4424): n = a,t,c or g
agccaaacttggttcaacttcattcctcttgncaagcttggaatctttgcctgggggtcgaaagccagtttggaatttcccattgattgggaaaggccattggcctctcggtatttcacaagcctctcagcttcgcggcgggaccactctttcatcctgtagtcaggcagataggccacaaaggtgctgccaaggaccaggatgatggagacgccaaagaagaagacaagtcgcatgttccagacgtccaaaacggggtccttgtcataaccatgggagtctgggttcttctcatacaagttttcgtcctcgggttctgggtcctcttgccacggtgtggtcggttctgggggccgctttcccgccacagcggacggggcgaccacagtcctggagaagctagattcccagcggacgcgggcggccgggagccctcgcgtcgccgctgccgccaaaagacggcgagcgctcaaaccaaacagcccagccgccatgacagatggtgctgcagggtctcaggggcggggaaagaaatgcgactgtgcgcagctgcagtgggtgcgagcgcgacaatcatcgccccgcctccgccacgctatataggtcccagatctgatttggttttccaatgaggcggggcgttgagcaaccctctttgcctccagttgtcgtggcttcgtggggccaaccattttcggccaggctgagaaatttcttattgatgggtctgctcatttcctgcataggaagaaatcggtgacatttgggtggatacagttcccagccaatcgccccgagttccctcgcccactggggaaagaggcagacgtccgctagtctttcatcttcaaaggaaatcaagcttctaaaaagcgggccctgccgaattggctaatagctactccttttctccactaggggagcgttcgcaaggggtgtggggaggtggccagcgcttgccaatcagaggaggccagggctgtcccctagcgggcggtgaccaatcgccggggccggccagagcgcgcttccttagtaggtggatggtggtcggagcgccgactcccttctcgtcgtcgccattttgagctggtgactgtggccggctgggagtaggcggcagtgagtttccctgggagggcagcgcgcttggcgcttctcccctccccccgatctgcctccagtctcggacttggttgttgcgcgctccggctccggctgagctgggagagttggaggaggtggcggcgggcagaggtgatgtctgggagcccttccttgacagcccgggccgagaagagtccctgcaggaagcatcacccaggctggcagatcatggtagcagcagcgggggtggctgggaagtgaaacggagccagcggctgaggaggggccccagcagcccccgaaggccctatcaggacatggagtatgaaagacgtggtggtcgtggtgacaggactggccgctatggagccactgaccgctcgcaggatgatggtggggagaaccgcagccgagaccacgactaccgggacatggactaccgttcatatcctcgcgagtatggcagccaggagggcaagcatgactatgacgactcatctgaggagcagagtgcggaggattcctacgaggcctccccgggctccgagactcagcgtaggcggcggcggcggcacaggcacagccccaccggcccgccaggcttcccccgagacggcgactatcgggaccaggactatcggaccgagcaaggggaggaggaggaggaggaggaggatgaggaggaggaggagaaggccagtaacatcgtcatgctgaggatgctgccacaggcagccactgaggatgacatccgtggccagctgcagtcgcacggcgtgcaagcacgggaggttcggctgatgcggaacaaatcttcaggtcagagccggggcttcgccttcgtcgagtttagtcacttgcaggacgctacacgatggatggaagccaatcagcactccctcaacatcctgggccagaaggtgtcgatgcactacagtgaccccaagcccaagatcaatgaggactggctgtgcaataagtgtggcgtccagaacttcaaacgccgagagaagtgcttcaaatgtggcgtgcccaagtcagaggcagagcagaagctgcccctcggcacgaggctggatcagcagacactgccactgggtggccgggagctgagccagggcctgcttcccctgccgcagccctaccaggcccagggagtcctggcctcccaagccctgtcacagggctcggagccaagctcagagaacgccaatgacaccatcattttgcgcaacctgaacccacacagcaccatggattccatcctgggggccctggcaccctacgcggtgctgtcctcctccaacgtgcgcgtcataaaggacaagcagacccaactgaaccgcggctttgccttcatccagctctccaccatcgaggcagcccagctgctgcagatcctgcaggccctgcacccaccactcactatcgacggcaagaccatcaatgttgagtttgccaagggttctaagagggacatggcctccaatgaaggcagtcgcatcagtgctgcctctgtggccagcactgccattgctgcggcccagtgggccatctcacaggcctcccaaggtggggagggtacctgggccacctccgaggagccgccggtcgactacagctactaccaacaggatgagggctatggcaacagccagggcacagagtcttccctctatgcccatggctacctcaagggcaccaagggccctggcatcactggaaccaaaggggatcccactggagcaggtcccgaggcctccctagagcctggggccgactctgtgtcgatgcaggctttctctcgcccccagcctggtgctgctcctggcatctaccaacaatcagccgaggcgagcagtagccagggcactgctgccaacagccagtcgtataccatcatgtcacccgctgtgctcaaatctgagctccagagccctacccatcctagttctgctctcccaccggctaccagccccactgcccaggaatcctacagccagtaccctgttcccgacgtctctacctaccagtacgatgagacctccggctactactatgacccccagaccggcctctactatgaccccaactcccagtattactacaatgctcagagccagcagtacctgtactgggatggggagaggcggacctatgttcccgccctggagcagtcggccgacggacataaggagacaggggcaccctcgaaggagggcaaagagaagaaggagaagcacaagaccaagacagctcaacagattgccaaggacatggaacgctgggcccgcagtctcaacaaacaaaaagaaaacttcaaaaatagcttccagcctatcagctccctgcgagatgacgagaggcgggagtcagccactgcagatgctggctatgccatcctcgagaagaagggagcactagccgagagacagcacaccagcatggatctcccgaaattggccagtgacgaccgcccaagccctccgcgaggactggtggcagcctacagcggggagagtgacagtgaggaggagcaggagcgtgggggccctgagcgggaggagaagctcaccgactggcagaagctggcctgtctgctctgccgacgccagttccccagcaaagaggcgctcatccggcaccagcagctctcagggctccacaagcaaaaccttgagattcaccggcgagcccacttgtcagaaaacgagctagaagcactagagaagaatgacatggagcaaatgaagtaccgggaccgtgcagctgaacgcagagaaaagtatggcatccccgagccgccagagcccaagaggaggaagtacggcggcatatccacagcctctgtagacttcgagcagcctactcgggacgggctgggcagtgacaacattggcagtcggatgctgcaggccatgggctggaaagagggcagcggcctgggccgcaagaagcagggcattgtaacgcctatcgaggcccaaacacgggtgcggggctccggcctgggtgcacggggcagctcctacggggtcacctcaaccgagtcctacaaggagacactgcacaagacaatggtgacccgcttcaacgaggcccagtgagcagcttcaagagcaacttctccacatgttgggtgtccatcctggggcagggaaggacagagtgttggatggctgggacggggccttgctcttgtcggccagcccactccccagccagagagggcttgaccaaatcaaattgaggtggtgacttttgttggaaaattgggctgggatcacgtcctgttttgtaataaaagctgaaaagtc

SEQ ID NO: 283 - DNA, 1526 bp, Homo sapiens
  CDS (18)..(1277)
ctgacgccgtggtttgacgccctcggaaccggcccggaattcccgggtcgacccacgcgtccgctccgagcttcttaaacacaggccttgggcctacggctctgggggtacttgggggggcgggggcaggtctgatgagtaacccctccccccaggttccagaggaagaagcctccacatctgtctgccggcccaagagttccatggcctccacttcccgccgccaacgccgagaacgtcgctttcgtcgttacttgtctgcaggacggctggtccgggcccaggccctcctccagcgacacccaggcctcgatgtagatgctgggcagcccccaccactgcaccgggcctgtgcccgccacgatgcccctgccctgtgcctgctgcttcggctcggggctgaccctgcccaccaggaccgccatggggacacggcactgcatgctgctgcccgccagggcccagatgcctacaccgatttcttcctcccgctgctaagccgctgtccctccgccatgggaataaagaataaggatggggagacccctggccaaattttgggctggggacccccctgggattctgctgaagaggaggaagaagatgatgcctccaaggagcgggaatggagacagaagctccagggtgagctggaggacgagtggcaggaagtcatggggaggtttgaaggtgatgcctcccatgaaacccaggaacctgagtccttctcagcctggtcagatcgcctggcccgggaacatgcccagaagtgccagcagcagcagcgagaagcagagggatcctgtcgacccccacgtgctgagggctccagccagagctggcgacagcaggaggaggagcagcggctcttcagggagcgagcccgggccaaggaggaagagctgcgtgagagccgagccaggagggcgcaggaggctctaggggaccgagaacccaagccaaccagggccgggcccagggaagagcaccccagaggagcggggaggggcagcctctggcgatttggtgatgtgccctggccctgccctgggggaggggacccagaggccatggctgcagccctggtggccaggggcccccctttggaggaacagggggctctgaggaggtacttgagggtccagcaggtccgctggcaccctgaccgcttcctgcagcgattccgaagccagattgagacctgggagctgggccgtgtgatgggagcagtgacagccctttctcaggccctgaatcgccatgcagaggccctcaagtgaccctagggaagaagcaagaaacttcggggctgcagcctcaggatgaggcagaaggaagggtaagggaaaggatggggaccacaaggaagagccaggtgctgctcagcagaggatatgggtgggagcgaaagttgtaacaagtgggggtggggggtgcgggccgccaccactgctccttgactctgccgtttcctaataagacctggttccacatctcaaaaaaaaaaaaataaagcaattaaccac

SEQ ID NO: 284 - DNA, 1884 bp, Homo sapiens
  CDS (10)..(747)
gccggtggtatggctgagccgactagtgatttcgcgactcctatcgggtggcctgcatctcccgggctgactcccacgttagggcccctgaccgacactgccccgccgcgggacagctggatgttctgggcaattctgccgccaccgccaccaccgcttacgtcctcgcttcccgcagccgggtcaaagccttcctctgagtcgcagccccccatagaggcccagtctctccccagggctccgcccctctttgacgcccagcttcttcccggggcgcaaccccccttccacgcacagtccccccttgattctcagcctcaacccagcggccagccttggaatttccatgcttccacatcgtggtattggagacagtcttctgataggtttcctcggcatcagaagtccttcaacccttcagttaaaaattcttattatccacgaaagtatgatgcaaaattcacagacttcagcttacctcccagtagaaaacagaaaaaaaagaaaagaaaggaaccagtttttcactttttttgtgatacctgtgatcgtggttttaaaaatcaagaaaagtatgacaaacacatgtctgaacatacaaaatgccctgaattagattgctcttttactgcacacgagaagattgtccagttccattggagaaatatgcatgctcctggcatgaagaagatcaagttagacactccagaggaaattgcacggtggagggaagaaagaaggaaaaactatccaactctggccaatattgaaaggaagaagaagttaaaacttgaaaaggagaagagaggagcagtattgacaacaacacaatatggcaagatgaaggggatgtccagacattcacaaatggcaaagatcagaagtcctggcaagaatcacaaatggaaaaacgacaattctagacagagagcagtcactggatcaggcagtcacttgtgtgatttgaagctagaaggtccaccggaggcaaatgcagatcctcttggtgttttgataaacagtgattctgagtctgataaggaggagaaaccacaacattctgtgatacccaaggaagtgacaccagccctatgctcactaatgagtagctatggcagtctttcagggtcagagagtgagccagaagaaactcccatcaagactgaagcagacgttttggcagaaaaccaggttcttgatagcagtgctcctaagagtccaagtcaagatgttaaagcaactgttagaaatttttcagaagccaagagtgagaaccgaaagaaaagctttgaaaaaacaaaccctaagaggaaaaaagattatcacaactatcaaacgttattcgaaccaagaacacaccatccatatctcttggaaatgcttctagctccggacattcgacatgaaagaaatgtgattttgcagtgtgttcggtacatcatcaaaaaagacttttttggactggatactaattctgcgaaaagtaaagatgtataggcatctggtgtttcagcatacataactgaagcatgtgaaacagtatcatcctcgttagtagaggaaaaccaaaacccttttttccgtcaaaattggatttgtaattaaattgtaagcctcgtaggatgtatgttggaattttaagtctttcctttggttctatgcaaataaaaaaataactgattttttaagactgtgtctgtattgttgggattgaatctagtatttgctgggagaattttttctttgtatttattttaatgtattgttctcatgtaagaatgactgatgttgtgttagttaagaattgaagataggtttagcagtaaagaagaaagcttttaaaaggattgattcagctaagcaaagttgggcagtcctcgtgcc

SEQ ID NO: 285 - DNA, 4064 bp, Homo sapiens
  CDS (399)..(1871)
ggagccagcgtcgccctccagctgttgcgcgtcggaagccggaagcagggactgagcgacagactaggaaacgccggtttctccggggctccccagcgccccacctttaccccggaggccgccctcttccatttgctcttgggcgtcagggcggtaccccactccgctcgaccctttggatccgctcgcacttcctcccgtccagagtcaaaggccccggaagtgacgtttacgcgccgcgcgtaacgtgcgttcgctggcggtgccgggggcggggcgagcaggagggtgggtgtgaggcgggagctggccgcggagcccagacctacccgggcgaagcgggcgagcggtggtttggacgccggcggagacgcgggcgagtggttagcaggaagaagatgagccttaagtctgaacgccgaggaattcatgtggatcaatcggatctcctgtgcaagaaaggatgtggttactacggcaaccctgcctggcagggtttctgctccaagtgctggagggaagagtaccacaaagccaggcagaagcagattcaggaggactgggagctggcggagcgactccagcgggaggaagaagaggcctttgccagcagtcagagcagccaaggggcccaatccctcacattctccaagtttgaagaaaagaaaaccaacgagaagacccgcaaggttaccacagtgaagaaattcttcagtgcatcttccagggtcggatcaaagaaggaaattcaggaagcaaaagctcccagtccttccataaaccggcaaaccagcattgaaacggatagagtgtctaaggagttcatagaatttctcaagaccttccacaagacaggccaagaaatctataaacagaccaagctgtttttggaaggaatgcattacaaaagggatctaagcattgaagaacagtcagagtgtgctcaggatttctaccacaatgtggccgaaaggatgcaaactcgtgggaaagtgcctccagaaagagtcgagaagataatggatcagattgaaaagtacatcatgactcgtctctataaatatgtattctgtccagaaactactgatgatgagaagaaagatcttgccattcaaaagagaatcagagccctgcgctgggttacgcctcagatgctgtgtgtccctgttaatgaagacatcccagaagtgtctgatatggtggtgaaggcgatcacagatatcattgaaatggattccaagcgtgtgcctcgagacaagctggcctgcatcaccaagtgcagcaagcacatcttcaatgccatcaagatcaccaagaatgagccggcgtcagcggatgacttcctccccaccctcatctacattgttttgaagggcaaccccccacgccttcagtctaatatccagtatatcacgcgcttctgcaatccaagccgactgatgactggagaggatggctactatttcaccaatctgtgctgtgctgtggctttcattgagaagctagacgcccagtctttgaatctaagtcaggaggattttgatcgctacatgtctggccagacctctcccaggaagcaagaagctgagagttggtctcctgatgcttgcttaggcgtcaagcaaatgtataagaacttggatctcttgtctcagttgaatgaacgacaagaaaggatcatgaatgaagccaagaaactggaaaaagacctcatagattggacagatggaattgcaagagaagttcaagacatcgttgagaaatacccactggaaattaagcctccgaatcaaccgttagcagctattgactctgaaaacgttgaaaatgataaacttcctccaccactgcaacctcaagtttatgcaggatgatcacaatttagtggagagtatttatttgagcctaaattgtaggtagcccttactacactcaactgattgggatctagaatgtaactaaattgcttataaatgtcagagcattttttaaaggtacagtatatggggattgtttcgtttttcctagcaggggaaccttagttaataataaaatactacttatttgagttactgatacagattcatttaaggcttgtgtgcaaattttgtctcaatctttttttccctccatgattttcctatgtgcttcctctggcattcactgtggttttggtaaataattgccttttaaaggattaaacaaatgaatgctacaaagtgtatgttcaagaaaattaaatggtaccactcttccacagtttggaataattttataattgtaaagatagaaattatattgataagtaaatatgtaaaattgtaaatatgtaaaaaaaagaatggtgtctgctgtgcatggcattttatatgttaattttttagtttaaaatgaagtatattgaatgtttgcctttagcaccattttatttggtttgtcccactaaaatgactcgagaagtgtttagacaaactccccttaagatgtgcactccatctttaagaacgtgttagccttaactttgaggttctatatagtcagagactatgacaccactaaggttcagaataaagtttaggccacataaaattgctgtttaatgtagtcgatggaagactttaaactatgcttctagcttatttttccctcattcattcagcaaatctctattgagttcttcagtgagaaggagcaggcactgggcctggaatggaaggcgggaatgaatgggcctctgatggtgagaggtgacggggtccctcagctgtgagatgcaaggggcgccttgcagcctccataatatacatttgactttgcaaacgtctagacatgttttctgaacctttttcaggacatttcaacctcgggactattcatattagtggcctgagaggtgtttgttgtggggccaccctgtgcatggtagaatgttcagcagcattcctgccatccatatccattaggtgccagtagcacccccgctagagctgtgaaaaattctctccagacatagtcagatgtctcctggggccatatcacccctccgttaagaaccactgatgtcttttacaaaccaggagttatcctcctggtggttaatatggtgtaaccaaagaatcttgcactcaatgcacagtgtgatgttaactaaaacgagttaaatatttaggaggcttgacagctacctgcattgtagaaccttttcttatctcagtggaaccttctataacctaaatataccattgatgattcttcttccattcagtgacatccacagattatgcagctatacttgtgaaatcgtgcatgaggccccagggcaccgttctagaacaacgtcacttcacacaggcagctgagaaaggttctcttgcttttccagtatcttcctaaggatggagcccaaaattgcagagcagtaactttggaataaaaccagggtgggtataaaacttcttattcttaaatttacatataagatctattaagcttgacacatctgtgtcatcacgcactgaagacaggaagcagttcactgagtcagctggttcccaagctcgcacagaaggtgataagttactatcaaatgccagtgagaatcttcttatagaataacctgggcccaagtgattttagtacaaaacttgcccttctttggtttaattttctatgtgcttttaggtgtgaatccagatatgcggtcttaattcctttggaaatacacagttcgtttagttactgtacactctgtttgttcaataaactgcatatcaacttcccacaaaagctgacttttttgggtctcttacatataaagtaggtcattgagttgatttttttggaggtatctcatattggtcgaattcttctggtatggactcttgccttatatagaggcttctatttctcttaagtcaccatcaatacaacggccggagtttctgtttttgcaataagaagatgttggtattttatgtagggtaaatgtgactggaatacacctttggaacggaattctttatcaataaagtttcacaatccgtccctcttccaaaaaaaaaaaa

SEQ ID NO: 286 - DNA, 1407 bp, Homo sapiens
  CDS (124)..(999)
gtaccggaccggaattcccgggtcgacccacgcgtccgctgctgcctgcttaggaggttgtagaaagctctgtaggttctctctgtgtgtcctacaggagtcttcaggccagctccctgtcggatggcttttatgaaaaaatatctcctccccattctggggctcttcatggcctactactactattctgcaaacgaggaattcagaccagagatgctccaaggaaagaaagtgattgtcacaggggccagcaaagggatcggaagagagatggcttatcatctggcgaagatgggagcccatgtggtggtgacagcgaggtcaaaagaaactctacagaaggtggtatcccactgcctggagcttggagcagcctcagcacactacattgctggcaccatggaagacatgaccttcgcagagcaatttgttgcccaagcaggaaagctcatgggaggactagacatgctcattctcaaccacatcaccaacacttctttgaatctttttcatgatgatattcaccatgtgcgcaaaagcatggaagtcaacttcctcagttacgtggtcctgactgtagctgccttgcccatgctgaagcagagcaatggaagcattgttgtcgtctcctctctggctgggaaagtggcttatccaatggttgctgcctattctgcaagcaagtttgctttggatgggttcttctcctccatcagaaaggaatattcagtgtccagggtcaatgtatcaatcactctctgtgttcttggcctcatagacacagaaacagccatgaaggcagtttctgggatagtccatatgcaagcagctccaaaggaggaatgtgccctggagatcatcaaagggggagctctgcgccaagaagaagtgtattatgacagctcactctggaccactcttctgatcagaaatccatgcaggaagatcctggaatttctctactcaacgagctataatatggacagattcataaacaagtaggaactcccctgagggctgggcatgctgagggattttgggactgttctgtctcatgtttatctgagctcttatctatgaagacatcttcccagagtgtccccagagacatgcaagtcatgggtcacacctgacaaatggaaggagttcctctaacatttgcaaaatggaaatgtaataataatgaatgtcatgcaccgctgcagccagcagttgtaaaattgttagtaaacataggtataattaccagatagttatattaaatttatatcttatatataataatatgtgatgattaatacaatattaattataataaaggtcacataaactttataaattcataactggtagctataacttgagcttattcaggatggtttctttaaaaccataaactgtacaatg

SEQ ID NO: 287 - DNA, 1288 bp, Homo sapiens
  CDS (254)..(1288)
gcacgaggttcatgatggcctcatgttactaatgaggaaactggggcccacagtcagacatgagccactggtgggacagaaataggctcctggttctgtgtgatccaaagttggtgcttttctgtctatccctagctgttggtcaccaccagctttctgcatattttctcacggtgcctctcatttcccagagccgcctggagcccaaggctgtacacgtgccctgtgctgattctctgcctaggaaaggaccatgcagctagagatcaaagtggccctgaacttcatcatctcctacttgtacaacaagctgccccggcgccgggcagacctgtttggggaggagctagagcggcttttgaaaaagaaatatgaaggccactggtaccctgagaagccactgaaaggctctggcttccgctgtgttcacattggggagatggtggaccccgtggtggagctggccgccaagcggagtggcctggcagtggaagatgtgcgggccaatgtgcctgaggagctgagtgtctggattgatccctttgaggtgtcctaccagattggtgagaagggagctgtgaaagtgctgtacctggatgacagtgagggttgcggtgccccagagctggacaaggagatcaagagcagcttcaaccctgacgcccaggtgttcgtgcccattggcagccaggacagctccctgtccaactccccatcgccatcctttggccagtcacccagccctaccttcattccccgctccgctcagcccatcaccttcaccaccgcctccttcgctgccaccaaatttggctccactaagatgaagaaggggggcggggcagcaagtggtgggggtgtagccagcagtggggcgggtggccagcagccacaccagcagcctcgcatggcccgctcacccaccaacagcctgctgaagcacaagagcctctctctgtctatgcattcactgaacttcatcacggccaacccggcccctcagtcccagctctcacccaatgccaaggagttcgtgtacaacggtggtggctcacccagcctcttctttgatgcggccgatggcagggcagcggcaccccaggcccgtttggaggcagtggggctggcacctgcaacagcagcagctttgacatggcccaggtatttggaggtggtgccaacagcctcttcctggagaagacacccctttgtggaaggcctcagctacaacctgaacaccatgcagtatcccagccagcagttccagcccgtggtgctggccaactga

SEQ ID NO: 288 - DNA, 1036 bp, Homo sapiens
  CDS (199)..(921)
atttggccctcgaggccaagaattcggcacgaggctctaagaaagggacaggaagtctcagaggctggagagcagagcaccaagatcgttctggcaggaacagccagtgggaggttccagctgagcgctccccagaggtgagctgatccccagccacagcacacaggaccaggctgcgagaacagcatcatcagcatcatgctattacaatcccaaaccatgggggtttctcacagctttacaccaaagggcatcactatccctcaaagagagaaacctggacacatgtaccaaaacgaagattacctgcagaacgggctgccaacagaaaccaccgttcttgggactgtccagatcctgtgttgcctattgatttcaagtctgggggccatcttggtttttgctccctacccctcccacttcaatccagcaatttccaccactttgatgtctgggtacccatttttaggagctctgtgttttggcattactggatccctctcaattatctctggaaaacaatcaactaagccctttgacctgagcagcttgacctcaaatgcagtgagttctgttactgcaggagcaggcctcttcctccttgctgacagcatggtagccctgaggactgcctctcaacattgtggctcagaaatggattatctatcctcattgccttattcggagtactattatccaatatatgaaatcaaagattgtctcctgaccagtgtcagtttaacaggtgtcctagtggtgatgctcatcttcactgtgctggagctcttattagctgcatacagttctgtcttttggtggaaacagctctactccaacaaccctgggagttcattttcctcgacccagtcacaagatcatatccaacaggtcaaaaagagttcttcacggtcttggatataagtaactcttggcctcagaggaaggaaaagcaactcaacactcatggtcaagtgtgattagactttcctgaaatctctgccattttagatactgtgaaacaaactaaaaaaaaaaa

SEQ ID NO: 289 - DNA, 1055 bp, Homo sapiens
  CDS (169)..(456)
atttggccctcgaggccaagaattcggcacgagtgtggcctgagctccaggtctcgtcttcagcgctctgtgtcctctgctcctagaggtccaggctctgtggccctgtgacctgcaggtattgggagatctacagctaagacgccaggaacccctggaagcctagaaatggagaacctgaagtctggagtgtatcctctcaaggaagcaagtggatgccctggggctgacaggaatcttctggtgtactctttttatgaaaaggggccattgacatttagggatgtggccatagaattttctctggaggagtggcaatgcctggacactgctcagcaggatttgtatagaaaagtgatgttagagaactacagaaacctggtcttcttgggtgagaataactttaatacaaaatcccttatataccctaaagttttcatttctctgttttcatagaataatttttggtaatttatgctttgcataagtgagtttctgatgcctgttttaaagaaatcttgaagaactgtccgtgtggaaaaaaatttcttcaggatgttttatcttggcctgatctttttacatttctgagccggtctgtatccttcactctacagtagtggtaatttcagaaatttagtagtataaaatattgttgtccatatgttaaaatctatatgccaccactaattttttatccatgaatactgggtggcaaaattaagcacctacaaatttaaaatattttctaaatgttaagaactttctgtcattaaatagtattttgggataaattttctagaatattctattacatcctctttactaagcatggtactaggtaggtaattagagaatatgagcaagattcatgttatttatttttaataaagcaggtattgctgtctctaagccagatctggtcacctgtctggagcaaggaaaagatccctggaatatgaagggacacagtacggtagtcaaacccccaggtaggtgagagtgaatgaaacagttgacatagatgaaaggttgaaagatttaaaaaaaaaaaa

SEQ ID NO: 290 - DNA, 1954 bp, Homo sapiens
  CDS (221)..(904)
ggggatgatgtatataactatctattcgatgatgaagataccccaccaaacccaaaaaaagagatctctcgaggatccgaattcgcggccgcgtcgacgcgctgtcctgttaatggcgggcagtagccgctgaggggattgcagataaccgcttcccgcacggggaaagtctaccctgcctgccactttctgctcgccgtcagcgccggagctcgccagcatgtctgtggtaccgcccaatcgctcgcagaccggctggccccggggggtcactcagttcggcaacaagtacatccagcagacgaagcccctcaccctggagcgcaccatcaacctgtaccctcttaccaattatacttttggtacaaaagagcccctctacgagaaggacagctctgttgcagccagatttcagcgcatgagggaagaatttgataaaattggaatgaggaggactgtagaaggggttctgattgtacatgagcaccggctaccccatgtgttactgctgcagctgggaacaactttcttcaaactacctggtggtgaacttaacccaggagaagatgaagttgaaggactaaaacgcttaatgacagagatactgggtcgtcaggatggagttttgcaagactgggtcattgacgattgcattggtaactggtggagaccaaattttgaacctcctcagtatccatatattcctgcacatattacaaagcctaaggaacataagaagttgtttctggttcagcttcaagaaaaagccttgtttgcagtccctaaaaattacaagctggtagctgcaccattgtttgaattgtatgacaatgcaccaggatatggacccatcatttctagtctccctcagctgttgagcaggttcaattttatttacaactgaattcctgcgcagtggagaagtaaaagaagccgcttgtctctgtgagcacagctatatacagtgtagaataaatgtggtagaaaagtttttttggttttatctcttttgcgatccctaaattgccacctttctattgtttgaatagtaaaattaatatgaagaactagatagtggtgtaaacaaatgtgataatgtttatttactttcggttctgctcatacttttttgtacaacattaaagaaaatggactttttttattttaatttctcattaaacttctaaaattcttataggtgaggatcatttttccccccaccttaggatggtgaatgttgcaacacaatgacaggtttaagtcagtcaagtttattggacccttgctttgataccattcttgggcacatactccaagattgtattagatttttgtgatgaagagcttccattacttctgaaaactatatttatctgagtgagtccaaggtgcaactcctaaatgaattgtgttgcagagaactcccagtataattcactgaccagtacattttataaccatccaggccttggtttgcaagcaacagaccttaaacatacaggaaactattaaaattggctcgatcagtagtcataggaattggtataagaagagactcatttagagctcagagttttcttcacataatgggggtattaattatttgtgctgttgcgaaattatgtgtcttattcttaaagccatggtaaaaatagggatctgtgaaggaaatttctaaaattggatgtattaggttttgaactctgagattgcacaaatattcaattaacttgaagttgtgtacatagagaagaaaatttggttttagcaaatgacagagccttcaaaaatatttttggaataatgtgaatcaaccgaaaactgggggcaaggcagaggacaggttttctcaggttaagagaaaaacgaaattttaaaaactttaaaaaatactgataaattcggatcaaatttgggggaataaaaaatattagagcaaaggaaaaaaaaaaaa

SEQ ID NO: 291 - DNA, 999 bp, Homo sapiens
  CDS (447)..(869)
cggaagccgagtgcgagggacgagcggagtaaaatctccacaagctgggaacaaacctcgtcccaactcccacccaccggcgtttctccagctcgatctggaggctgcttcgccagtgtgggacgcagctgacgcccgcttattagctctcgctgcgtcgccccggctcagaagctccgtggcggcggcgaccgtgacgagaagcccacggccagctcagttctcttctactttgggagagagagaaagtcagatgccccttttaaactccctcttcaaaactcatctcctgggtgactgagttaatagagtggatacaaccttgctgaagatgaagaatatacaatattgaggatatttttttctttttttttttcaagtcttgatttgtggcttacctcaagttaccatttttcagtcaagtctgtttgtttgcttcttcagaaatgttttttacaatctcaagaaaaaatatgtcccagaaattgagtttactgttgcttgtatttggactcatttggggattgatgttactgcactatacttttcaacaaccaagacatcaaagcagtgtcaagttacgtgagcaaatactagacttaagcaaaagatatgttaaagctctagcagaggaaaataagaacacagtggatgtcgagaacggtgcttctatggcaggatatgcggatctgaaaagaacaattgctgtccttctggatgacattttgcaacgattggtgaagctggagaacaaagttgactatattgttgtgaatggctcagcagccaacaccaccaatggtactagtgggaatttggtgccagtaaccacaaataaaagaacgaatgtctcgggcagtatcagatagcagttgaaaatcaccttgtgctgctccatccactgtggattatatcctatggcagaaaagctttataattgctggcttaggacagagcaatactttacaataaaagctctacacattttcaaaaaaaaaa

SEQ ID NO: 292 - DNA, 1975 bp, Homo sapiens
  CDS (91)..(1488)
ttgccgtaccggtccggaattcccgggtcgacccacgcgtccgagcccaagggataggagggctcaaagccggcacacatctgagtcctcatggacgggaggatgatgagaagcatgaggctgagagaggaggagtcacccggacccagccacacagcgtcctgcctctgcggctctgccccctgcatcctgtgcagctgctgccccgccagccgcaactccaccgtgagccgcctcatcttcacgttcttcctcttcctgggggtgctggtgtccatcattatgctgagcccgggcgtggagagtcagctctacaagctgccctgggtgtgtgaggagggggccgggatccccaccgtcctgcagggccacatcgactgtggctccctgcttggctaccgcgctgtctaccgcatgtgcttcgccacggcggccttcttcttctttttcaccctgctcatgctctgcgtgagcagcagccgggacccccgggctgccatccagaatgggttttggttctttaagttcctgatcctggtgggcctcaccgtgggtgccttctacattcctgacggctccttcaccaacatctggttctacttcggcgtcgtgggctccttcctcttcatcctcatccagctggtgctgctcatcgactttgcgcactcctggaaccagcggtggctgggcaaggccgaggagtgcgattcccgtgcctggtacgcaggcctcttcttcttcactctcctcttctacttgctgtcgatcgcggccgtggcgctgatgttcatgtactacactgagcccagcggctgccacgagggcaaggtcttcatcagcctcaacctcaccttctgtgtctgcgtgtccatcgctgctgtcctgcccaaggtccaggacgcccagcccaactcgggtctgctgcaggcctcggtcatcaccctctacaccatgtttgtcacctggtcagccctatccagtatccctgaacagaaatgcaacccccatttgccaacccagctgggcaacgagacagttgtggcaggccccgagggctatgagacccagtggtgggatgccccgagcattgtgggcctcatcatcttcctcctgtgcaccctcttcatcagtctgcgctcctcagaccaccggcaggtgaacagcctgatgcagaccgaggagtgcccacctatgctagacgccacacagcagcagcagcagcaggtggcagcctgtgagggccgggcctttgacaacgagcaggacggcgtcacctacagctactccttcttccacttctgcctggtgctggcctcactgcacgtcatgatgacgctcaccaactggtacaagcccggtgagacccggaagatgatcagcacgtggaccgccgtgtgggtgaagatctgtgccagctgggcagggctgctcctctacctgtggaccctggtagccccactcctcctgcgcaaccgcgacttcagctgaggcagcctcacagcctgccatctggtgcctcctgccacctggtgcctctcggctcagtgacagccaacctgccccctccccacaccaatcagccaggctgagcccccacccctgccccagctccaggacctgcccctgagccgggccttctagtcgtagtgccttcagggtccgaggagcatcaggctcctgcagagccccatccccccgccacacccacacggtggagctgcctcttccttcccctcctccctgttgcccatactcagcatctcggatgaaagggctcccttgtcctcaggctccacgggagcggggctgctggagagagcggggaactcccaccacagtggggcatccggcactgaagccctggtgttcctggtcacgtcccccaggggaccctgcccgcttcctggacttcgtgccttactgagtctctaagactttttctaataaacaagccagtgcgtgtaaaaaaaaaaaa

SEQ ID NO: 293 - DNA, 2389 bp, Homo sapiens
  CDS (136)..(1347)
accggtccggaattcccgggtcgacgatttcgtgaggattttttaatttgagagccctcaaatgggccagtggtctagtcagcattgggaaatgaagatgatgagatcctgtaactcggaaaagatatcagaggaatgttcgtggcatcagagagaaagatgagagctcaccaggtgctcaccttcctcctgctcttcgtgatcacctcggtggcctctgaaaacgccagcacatcccgaggctgtgggctggacctcctccctcagtacgtgtccctgtgcgacctggacgccatctggggcattgtggtggaggcggtggccggggcgggcgccctgatcacactgctcctgatgctcatcctcctggtgcggctgcccttcatcaaggagaaggagaagaagagccctgtgggcctccactttctgttcctcctggggaccctgggcctctttgggctgacgtttgccttcatcatccaggaggacgagaccatctgctctgtccgccgcttcctctggggcgtcctctttgcgctctgcttctcctgcctgctgagccaggcatggcgcgtgcggaggctggtgcggcatggcacgggccccgcgggctggcagctggtgggcctggcgctgtgcctgatgctggtgcaagtcatcatcgctgtggagtggctggtgctcaccgtgctgcgtgacacaaggccagcctgcgcctacgagcccatggactttgtgatggccctcatctacgacatggtactgcttgtggtcaccctggggctggccctcttcactctgtgcggcaagttcaagaggtggaagctgaacggggccttcctcctcatcacagccttcctctctgtgctcatctgggtggcctggatgaccatgtacctcttcggcaatgtcaagctgcagcagggggatgcctggaacgaccccaccttggccatcacgctggcggccagcggctgggtcttcgtcatcttccacgccatccctgagatccactgcacccttctgccagccctgcaggagaacacgcccaactacttcgacacgtcgcagcccaggatgcgggagacggccttcgaggaggacgtgcagctgccgcgggcctatatggagaacaaggccttctccatggatgaacacaatgcagctctccgaacagcaggatttcccaacggcagcttgggaaaaagacccagtggcagcttggggaaaagacccagcgctccgtttagaagcaacgtgtatcagccaactgagatggccgtcgtgctcaacggtgggaccatcccaactgctccgccaagtcacacaggaagacacctttggtgaaagactttaagttccagagaatcagaatttctcttaccgatttgcctccctggctgtgtctttcttgagggagaaatcggtaacagttgccgaaccaggccgcctcacagccaggaaatttggaaatcctagccaaggggatttcgtgtaaatgtgaacactgacgaactgaaaagctaacaccgactgcccgcccctcccctgccacacacacagacacgtaataccagaccaacctcaatccccgcaaactaaagcaaagctaattgcaaatagtattaggctcactggaaaatgtggctgggaagactgtttcatcctctgggggtagaacagaaccaaattcacagctggtgggccagactggtgttggttggaggtggggggctcccactcttatcacctctccccagcaagtgctggaccccaggtagcctcttggagatgaccgttgcgttgaggacaaatggggactttgccaccggcttgcctggtggtttgcacatttcaggggggtcaggagagttaaggaggttgtgggtgggattccaaggtgaggcccaactgaatcgtggggtgagctttatagccagtagaggtggagggaccctggcatgtgccaaagaagaggccctctgggtgatgaagtgaccatcacatttggaaagtgatcaaccactgttccttctatggggctcttgctctagtgtctatggtgagaacacaggccccgccccttcccttgtagagccatagaaatattctggcttggggcagcagtcccttcttcccttgatcatctcgccctgttcctacacttacgggtgtatctccaaatcctctcccaattttattcccttattcatttcaagagctccaatggggtctccagctgaaagccccctccgggaggcaggttggaaggcaggcaccacggcaggttttccgcgatgatgtcacctagcagggcttcaggggttcccactaggatgcagagatgacctctcgctgcctcacaagcagtgacacctcgggtcctttc

SEQ ID NO: 294 - DNA, 1239 bp, Homo sapiens
  CDS (153)..(572)
accggtccggaattcccgggtcgacgatttcgtgtggactccgggctggagctgtcctgggggagcttgtttgcggcagcggctgctgctgccactgctgtgctgggggcccggtcgccaggcaaaaagccctcccacgtttgaggggagtcatgagccgtttcctgaatgtgttaagaagttggctggttatggtgtccatcatagccatggggaacacgctgcagagcttccgagaccacacttttctctatgaaaagctctacactggcaagccaaaccttgtgaatggcctccaagctcggacctttgggatctggacgctgctctcatcagtgattcgctgcctctgtgccattgacattcacaacaagacgctctatcacatcacactctggaccttcctccttgccctggggcatttcctctctgagttgtttgtctatggaactgcagctcccacgattggcgtcctggcacccctgatggtggcaagtttctccatcctgggtatgctggtcgggctccggtatctagaagtagaaccagtatccagacagaagaagagaaactgaggccagcattatcacctccaggactttctcgttttccaccttggccatcttcttccttcgtcgtctctcctctttaatttcttttctattccatcatctgcccttttattcacttttagcctctttttttaatttttaaaatttaaagatatgcatactgaaaagtatataacatgtacgtacaatttaaagaataattttaaagtgaatactacgtaactccatccaagtcaagaaattgccagcttctcggaagcccactgtgtctccttcccctacctgcaacctcttccaggctcccttttccagccttcccctttttcccttttattttcatgccttgatttgacttgtgtggtgggaacatgtgaactatgaaacttaaacctgctgcccacccagagcagctgtgaccaagggctgcctcaaggggttgtccacgcaggttgggctcctctctgctgctggacccaagactctgaaccttccaagggacaggcagttcttctaagaagggctcccctgtgtgtgagcaagaccacagctctccttctatctacagatgcatgagggttggaagagtctgggctgtttttagaccttctggtcagctgtatttgtgtaacaacttttgtaataaatagaaaaaccctcaaaaaaaaaa

SEQ ID NO: 295 - DNA, 1962 bp, Homo sapiens
  CDS (448)..(1179)
atgggggaagggggcgccgcggcggcgctggtggcggcggcagcagcagcagcagcggcagcggcagcggtggtggccgggcagcggcggcggcggctagggcgcagggcgcgctgccatgggcctggccgggctgcaggcgggaagatgtccaagccctgcgcggtggaggcggcggcggcggcggtggcagcgacggccccgggcccggagatggtggagcggaggggcccggggaggccccgcaccgacggggagaacgtatttaccgggcagtcaaagatctattcctacatgagcccgaacaaatgctctggaatgcgtttcccccttcaggaagagaactcagttacacatcacgaagtcaaatgccaggggaaaccattagccggaatctacaggaaacgagaagagaaaagaaatgctgggaacgcagtacggagcgccatgaagtccgaggaacagaagatcaaagacgccaggaaaggtcccctggtaccttttccaaaccaaaaatctgaagcagcagaacctccaaaaactccaccctcatcttgtgattccaccaatgcagccatcgccaagcaagccctgaaaaagcccatcaagggcaaacaggccccccgaaaaaaagctcaaggaaaaacgcaacagaatcgcaaacttacggatttctaccctgtccgaaggagctccaggaagagcaaagccgagctgcagtctgaagaaaggaaaagaatagatgaattgattgaaagtgggaaggaagaaggaatgaagattgacctcatcgatggcaaaggcaggggtgtgattgccaccaagcagttctcccggggtgactttgtggtggaataccacggggacctcatcgagatcaccgacgccaagaaacgggaggctctgtacgcacaggacccttccacgggctgctacatgtactattttcagtatctgagcaaaacctactgcgtggatgcaactagagagacaaatcgcctaggaagactgatcaatcacagcaaatgtgggaactgccaaaccaaactgcacgacatcgacggcgtacctcacctcatcctcatcgcctcccgagacatcgcggctggggaggagctcctgtatgactatggggaccgcagcaaggcttccattgaagcccacccgtggctgaagcattaaccggtgggccccgtgccctccccgccccactttcccttcttcaaaggacaaagtgccctcaaagggaattgaattttttttttacacacttaatcttagcggattacttcagatgtttttaaaaagtatattaagatgccttttcactgtagtatttaaatatctgttacaggtttccaaggtggacttgaacagatggccttatattaccaaaacttttatattctagttgtttttgtactttttttgcatacaagccgaacgtttgtgcttcccgtgcatgcagtcaaagactcagcacaggttttagaggaaatagtcaaacatgaactaggaagccaggtgagtctcctttctccagtggaagagccgggaccttccccctgcacccccgacatccagggacggggtgtgaggaagacgctgcctcccaatggcctggacgggatgtttccaagctcttgttcccctaacgtctcaacaggcgctcactgaagtgtatgaatattttttaaaaaggtttttgcagtaagctagtcttcccctctgctttctcgaaagcttactgagccctgggccccaagcacgggccgggcatagatttcctcttccacaagctgccgcttttctgggcaccttgaagcatcagggcgtgaaatcaaactagatgtgggcagggagagggttgcttacctgccctgctggggcagggtttcctgaaactgggttaattctttatagaaatgtgaacactgaatttattttaaaaaaaaaaaaaaa

SEQ ID NO: 296 - DNA, 1446 bp, Homo sapiens
  CDS (106)..(894)
  misc_feature (1)...(1446): n = a,t,c or g
ctgcgtgtggtaccgaccnnnnatcccgggtcgacgatttcgtgttccgaactcaaaggaacccagtgccgggccacagccgggtcacgtggccggcggccccccatgacgtgctggctgcggggcgtcacggcgacgttcgggcgacctgccgagtggccaggctacctcagtcacctgtgtggtcgcagtgctgccatggacctgggacccatgcgcaagagttaccgcggggaccgagaggcatttgaggagactcatctgacctcccttgacccagtgaaacagtttgctgcctggtttgaggaggctgttcagtgtcctgacataggggaagccaatgccatgtgtctggctacctgcaccagagatggaaaaccctctgctcgcatgttgctgctgaagggcttcgggaaagatggcttccgcttcttcactaacttcgagagtcgaaaaggaaaagagctggactctaatccctttgcttcccttgtcttctactgggagccacttaaccgtcaggtgcgtgtggaaggccctgtgaagaaactgcctgaggaggaggctgaagttgctactttccacttccccggccccaagagcagccagattggggctgtggtcagccaccagagttctgtgatccctgatcgggagtatctgagaaagaaaaatgaggaactggaacagctctaccaggatcaagaggtgcccaagccaaaatcctggggtggctatgtcctgtaccctcaggtgatggagttctggcaaggtcaaaccaaccgcctgcatgaccggatagtctttcggcggggcctacccacaggagattcccctttggggcccatgacccaccgcggggaggaagactggctctatgagagacttgcaccttaactctgggacctgctggcccagagtggagctagggctaggtgtcaagagagggtgtgggattgggacccaggcccttctttctaaactcaacccatttccctccctaccccttatcttcaggactcttcagagctaatcctctaagttctctgtactcagttggttctcagttagctggtcaagtggagtgtaatggtggcgtagagaatcacaaatggaaaataattccataattatttttttgaccttgcctatgattgattaggatagctccctctaggggtagcagccggtgtgactccctttctggtgacagacagggccccagcagccctgtctgttaccatgtgagtcatactggccaaagcttagtcctagcatatgcacctgagccaacctggccaatcagattgttttgtcaataatttgaaatttgaactcggagagatccagaaccttgggagtcattaaagccaagtcattcatagcagccaggaaacaataggaaccaacagcctctgcctgctgctattgcaattcccaggatct

SEQ ID NO: 297 - DNA, 1783 bp, Homo sapiens
  CDS (78)..(1214)
attgtaagctgtacgcctgcggtaccggtccggaattcccgggtcgacccacgcgtccgggcgagtccggtctcaaaatggaggtaaaaccgccgcccggtcgcccccagcccgactccggccgtcgccgtcgccgccggggggaggagggccatgatccaaaggaaccagagcagttgagaaaactgtttattggtggtctgagctttgaaactacagatgatagtttacgagaacattttgagaaatggggcacactcacagattgtgtggtaatgagagacccccaaacaaaacgttccaggggctttggttttgtgacttattcttgtgttgaagaggtggatgcagcaatgtgtgctcgaccacacaaggttgatgggcgtgtagtggaaccaaagagagctgtttctagagaggattctgtaaagcctggtgcccatctaacagtgaagaaaatttttgttggtggtattaaagaagatacagaagaatataatttgagagactactttgaaaagtatggcaagattgaaaccatagaagttatggaagacaggcagagtggaaaaaagagaggatttgcttttgtaacttttgatgatcatgatacagttgataaaattgttgttcagaaataccacactattaatgggcataactgtgaagtgaaaaaggcccttgctaaacaagtgatgcagccggctggatcacagaggggtcgtggaggtggatctggcaattgtatgggtcacagaggaaactttggaggtggtggaggtaattttggccgtgatggaaactttggtggaagaggaggctatggtggtggaggtggtggcagcagaggtagttatggaggaggtgatggtggatataatggatttggaggtgatggtggcaactatggcggtggtcctggttatagtagtagagggggctatggtggtggtggaccaggatatggaaaccaaggtggtggatatggtggaggtggaggatatgatggttacaatgaaggaggaaattttggcggtggtaactatggtggtggtgggaactataatgattttggaaattatagtggacaacagcaatcaaattatggacccatgaaagggggcagttttggtggaagaagctcgggcagtccctatggtggtggttatggatctggtggtggaagtggtggatatggtagcagaaggttctaaaaacagcagaaaagggctacagttcttagcaggagagagagcgaggagttgtcaggaaagctgcaggttactttgagacagtcgtcccaaatgcattagaggaactgtaaaaatctgccacagaaggaacgatgatccatagtcagaaaagttactgcagcttaaacaggaaacccttcttgttcaggactgtcatagccacagtttgcaaaaagtgcagctattgattaatgcaatgtagtgtcaattagatgtacattcctgaggtcttttatctgttgtagctttgtctttttctttttcttttcattacatcaggtatattgccctgtaaattgtggtagtggtaccaggaataaaaaattaaggaatttttaacttttcaatatttgtgtagttcagtttttctacattttagtacagaaactttaacaaaatgcagtttcgaaggtgtttccttgtgagttaacaagtaaagaagatcattgttaattactattttgtatgaattttgctaaagttaactgtaaagaaacacctgctgacttgcagtttaaggggaatctatt

SEQ ID NO: 298 - DNA, 1376 bp, Homo sapiens
  CDS (78)..(1175)
gagacagtgagtgcgcgccctgagtcgcaggccgaggagacagtgagtgcgcgccctgagtcgcaggccgaggagacatggctgcacttcgtgacgctgagatacagaaggacgtgcagacctactacgggcaggtgctgaagagatcggcagacctccagaccaacggctgtgtcaccacagccaggccggtccccaagcacatccgggaagccttgcaaaatgtacacgaagaagtagccctaagatattatggctgtggtctggtgatccctgagcatctagaaaactgctggattttggatctgggtagtggaagtggcagagattgctatgtacttagccagctggttggtgaaaaaggacacgtgactggaatagacatgaccaaaggccaggtggaagtggctgaaaagtatcttgactatcacatggaaaaatatggcttccaggcatctaatgtgacttttattcatggctacattgagaagttgggagaggctggaatcaagaatgagagccatgatattgttgtatcaaactgtgttattaaccttgtgcctgataaacaacaagtgcttcaggaggcatatcgggtgctgaagcatggtggggagttatatttcagtgacgtctatacgagccttgaactgccagaagaaatcaggacacacaaagttttatggggtgagtgtctgggtggtgctttatactggaaggaacttgctgtccttgctcaaaaaattgggttctgccctccacgtttggtcactgccaatctcattacaattcaaaacaaggaactggaaagagttatcggtgactgtcgttttgtttctgcaacatttcgcctcttcaaacactctaagacaggaccaaccaagagatgccaagttatttacaatggaggaattacaggacatgaaaaagaactaatgtttgatgccaattttacatttaaggaaggtgaaattgttgaagtggatgaagaaacagcagctatcttgaagaattcaagatttgctcaagattttctgatcagaccaattggagagaagttgccaacatctggaggctgttctgctttggagttaaaggatataatcacacatccatttaagcttgcagaaaagtttgaccctatgaattccacacgagcccctgatgcttcttaaggctgctgtgtatcaaaaaatagctgctgaagccattgcctaccacgtgaccactcaagtgtgcgggaaagcacctcctgagtatgaacccagtttcccccttaccggcagctgtacaacgcaaacgcaccatcccttgagcgcggccataaacgaattatttctcctaggcgtgtgttagtgatgcacaggaattacttg

SEQ ID NO: 299 - DNA, 1427 bp, Homo sapiens
  CDS (78)..(1226)
gagacagtgagtgcgcgccctgagtcgcaggccgaggagacagtgagtgcgcgccctgagtcgcaggccgaggagacatggctgcacttcgtgacgctgagatacagaaggacgtgcagacctactacgggcaggtgctgaagagatcggcagacctccagaccaacggctgtgtcaccacagccaggccggtccccaagcacatccgggaagccttgcaaaatgtacacgaagaagtagccctaagatattatggctgtggtctggtgatccctgagcatctagaaaactgctggattttggatctgggtagtggaagtggcagagattgctatgtacttagccagctggttggtgaaaaaggacacgtgactggaatagacatgaccaaaggccaggtggaagtggctgaaaagtatcttgactatcacatggaaaaatatggcttccaggcatctaatgtgacttttattcatggctacattgagaagttgggagaggctggaatcaagaatgagagccatgatattgttgtatcaaactgtgttattaaccttgtgcctgataaacaacaagtgcttcaggaggcatatcgggtgctgaaggttgcaaaaggtagtaaatccgaggtgacagttgtcactgaatgtgttaagcatggtggggagttatatttcagtgacgtctatacgagccttgaactgccagaagaaatcaggacacacaaagttttatggggtgagtgtctgggtggtgctttatactggaaggaacttgctgtccttgctcaaaaaattgggttctgccctccacgtttggtcactgccaatctcattacaattcaaaacaaggaactggaaagagttatcggtgactgtcgttttgtttctgcaacatttcgcctcttcaaacactctaagacaggaccaaccaagagatgccaagttatttacaatggaggaattacaggacatgaaaaagaactaatgtttgatgccaattttacatttaaggaaggtgaaattgttgaagtggatgaagaaacagcagctatcttgaagaattcaagatttgctcaagattttctgatcagaccaattggagagaagttgccaacatctggaggctgttctgctttggagttaaaggatataatcacacatccatttaagcttgcagaaaagtttgaccctatgaattccacacgagcccctgatgcttcttaaggctgctgtgtatcaaaaaatagctgctgaagccattgcctaccacgtgaccactcaagtgtgcgggaaagcacctcctgagtatgaacccagtttcccccttaccggcagctgtacaacgcaaacgcaccatcccttgagcgcggccataaacgaattatttctcctaggcgtgtgttagtgatgcacaggaattacttg

SEQ ID NO: 300 - DNA, 1709 bp, Homo sapiens
  CDS (1)..(627)
aagctggtacgcctgcaggtaccggtccggaattcccgggtcgacccacgcgtccgcctgggttcgaacacggcacccgcactgcgcgtcatggtgcaggcctggtatatggacgacgccccgggcgacccgcggcaaccccaccgccccgaccccggccgcccagtgggcctggagcagctgcggcggctcggggtgctctactggaagctggatgctgacaaatatgagaatgatccagaattagaaaagatccgaagagagaggaactactcctggatggacatcataaccatatgcaaagataaactaccaaattatgaagaaaagattaagatgttctacgaggagcatttgcacttggacgatgagatccgctacatcctggatggcagtgggtacttcgatgtgagggacaaggaggaccagtggatccggatcttcatggagaagggagacatggtgacgctccccgcggggatctatcaccgcttcacggtggacgagaagaactacacgaaggccatgcggctgtttgtgggagaaccggtgtggacagcgtacaaccggcccgctgaccattttgaagcccgcgggcagtacgtgaaatttctggcacagaccgcctagcagtgctgcctgggaactaacacgcgcctcgtaaaggtccccaatgtaatgactgagcagaaaatcaatcactttctctttgcttttagaggatagccttgaggctaggttatctttcctttgtaagattatttgatcagaatattttgtaatgaaaggatctagaaagcaacttggaagtgtaaagagtcaccttcattttctgtaactcaatcaagactggtgggtccatggccctgtgttagttcatgcattcagttgagtcccaaatgaaagtttcatctcccgaaatgcagttccttagatgcccatctggacgtgatgccgcgcctgccatgtaagaaggtgcaatcctagataacacagctagccagatagaagacacttttttctccaaaatgatgccttggggtggggagtggtagggggaagagctccccaccctaaggggcacacactgagttgcttatgccacttccttgttcaaaataaagtaactgccttaatcttatactcatggcttggagttaccttatattcaggtatatgtgatattttgcctggtttgttaaaattgccccatttagattccttctataattgttcttatagataagtaatttatatatgagctgtgttagtattttttcagtgtgagatctctggattctttcacaataaagctgttgaattttaacaggagtattagtacataaattttctactcaacaattccgagataggattatgcctagtttgtcatatcacagaaaaactccaagttaacttcatgttttggaagggcaggtcgtttttaaagtatttctttttttaactggatgaaaaatcttcatgttaggattaattttcttaatcacctccacactgtacagaggaaactcaagccttaaatgtttaagtaaactctgtctcagttttaggattaaaatacccaccggtggtgtgatgatgccatataccgcagggcttgcttctgtcaagtgtgactctatctcagtaattaaaataagtgctgatctactgattttttttaatggattcatttctaaatgggcatt

SEQ ID NO: 301 - DNA, 1716 bp, Homo sapiens
  CDS (138)..(1055)
cgcccccatggatcgatcgcattcggtaccggtccggaattcccgggtcgacccacgcgtccgcccacgcgtgcgcccacgcgtccgcccacgcgtccggtcggcttgtcaggtggtggaggaaaaggcgctccgtcatggggatccagacgagccccgtcctgctggcctccctgggggtggggctggtcactctgctcggcctggctgtgggctcctacttggttcggaggtcccgccggcctcaggtcactctcctggaccccaatgaaaagtacctgctacgactgctagacaagacgactgtgagccacaacaccaagaggttccgctttgccctgcccaccgcccaccacactctggggctgcctgtgggcaaacatatctacctctccacccgaattgatggcagcctggtcatcaggccatacactcctgtcaccagtgatgaggatcaaggctatgtggatcttgtcatcaaggtctacctgaagggtgtgcaccccaaatttcctgagggagggaagatgtctcagtacctggatagcctgaaggttggggatgtggtggagtttcgggggccaagcgggttgctcacttacactggaaaagggcattttaacattcagcccaacaagaaatctccaccagaaccccgagtggcgaagaaactgggaatgattgccggcgggacaggaatcaccccaatgctacagctgatccgggccatcctgaaagtccctgaagatccaacccagtgctttctgctttttgccaaccagacagaaaaggatatcatcttgcgggaggacttagaggaactgcaggcccgctatcccaatcgctttaagctctggttcactctggatcatcccccaaaagattgggcctacagcaagggctttgtgactgccgacatgatccgggaacacctgcccgctccaggggatgatgtgctggtactgctttgtgggccacccccaatggtgcagctggcctgccatcccaacttggacaaactgggctactcacaaaagatgcgattcacctactgagcatcctccagcttccctggtgctgttcgctgcagttgttccccatcagtactcaagcactataagccttagattcctttcctcagagtttcaggttttttcagttacatctagagctgaaatctggatagtacctgcaggaacaatattcctgtagccatggaagagggccaaggctcagtcactccttggatggcctcctaaatctccccgtggcaacaggtccaggagaggcccatggagcagtctcttccatggagtaagaaggaagggagcatgtacgcttggtccaagattggctagttccttgatagcatcttactctcaccttctttgtgtctgtgatgaaaggaacagtctgtgcaatgggttttacttaaacttcactgttcaacctatgagcaaatctgtatgtgtgagtataagttgagcatagcatacttccagaggtggtcttatggagatggcaagaaaggaggaaatgatttcttcagatctcaaaggagtctgaaatatcatatttctgtgtgtgtctctctcagcccctgcccaggctagagggaaacagctactgataatcgaaaactgctgtttgtggcaggaacccctggctgtgcaaataaatggggctgaggcccctgtgtgatattgaaaaaaaaaa

SEQ ID NO: 302 - DNA, 1635 bp, Homo sapiens
  CDS (127)..(1110)
  misc_feature (1)...(1635): n = a,t,c or g
atttggccctcgaggccaagaattcggcacgaggttacgcacgtcctgattctcctggagtctccagcccgcccagtggccgcagtcacccaggtccagaggcggcggtatcacaggctctccgacatgtctatgctggctgaacgtcggcggaagcagaagtgggctgtggatcctcagaacactgcctggagtaatgacgattccaagtttggccagcggatgctagagaagatggggtggtctaaaggaaagggtttaggggctcaggagcaaggagccacagatcatattaaagttcaagtgaaaaataaccacctgggactcggagctaccatcaataatgaagacaactggattgcccatcaggatgattttaaccagcttctggccgaactgaacacttgccatgggcaggaaaccacagattcctcggacaagaaggaaaagaaatcttttagccttgaggaaaagtccaaaatctccaaaaaccgtgttcactatatgaaattcacaaaagggaaggatctgtcatctcggagcaaaacagatcttgactgcatttttgggaaaagacagagtaagaagactcccgagggcgatgccagtccctccactccagaggagaacgaaaccacgacaaccagcgccttcaccatccaggagtactttgccaagcggatggcagcactgaagaacaagccccaggttccagttccagggtctgacatttctgagacgcaggtggaacgtaaaagggggaagaaaagaaataaagaggccacaggtaaagatgtggaaagttacctccagcctaaggccaagaggcacacggagggaaagcccgagagggccgaggcccaggagcgagtggccaagaagaagagcgcgccagcagaagagcagctcagaggcccctgctgggaccagagttccaaggcctctgctcaggatgcaggggaccatgtgcagccgcctgagggccgggacttcaccctgaagcccaaaaagaggagagggaagaaaaagctgcaaaaaccagtagagatagcagaggacgctacactagaagaaacgctagtgaaaaagaagaagaagaaagattccaaatgaatccttcccagccggggccttccgaccactcagctgtcagggcactgcgggggcagacacctctggcctgaagtcacagcagagttcaccccagagcgcctgggcgcatcttgtggcatgcccatgggctgccgagtcctgccctctcgccacatttcccccaagttacattcccaggaggacctttttaatgttctcaatcgtggctctcagacacaaataaatttttttgtaaactctgagcccttcagcaagagagtttaattataatcattacaaatacatgcattcatgtaagtgtgcacacgtgtgtgtgcatgtgcgcatctgtgtgtgtgtgtgtgtgtcactatctccgtttgctctcggttcccttcaataacaatgaatggtgctttcttctgaaagactcagcctaattaaaggattaagaggcaatagcttggattcagaatgttctttttgttctatatnnnncctgtattgcgcccgctcgagagtatcccagcatacgtgcgcgta

SEQ ID NO: 303 - DNA, 566 bp, Homo sapiens
  CDS (110)..(361)
tgcgagactcggcgggcgctgttgagggagtcgggccgcgactgtggtcgtttttataccttcccgcgcggacgccggcgctgccaacggaagggcgggctctgctgccatgaaggtgaagattaagtgctggaacggcgtggccacttggctctgggtggccaacgatgagaactgtggcatctgcaggatggcatttaacggatgctgccctgactgcaaggtgcccggcgacgactgcccgctggtgtggggccagtgctcccactgcttccacatgcattgcatcctcaagtggctgcacgcacagcaggtgcagcagcactgccccatgtgccgccaggaatggaagttcaaggagtgaggcccgacctggctctcgctggaggggcatcctgagactccttcctcatgctggcgccgatggctgctggggacagcgcccctgagctgcaacaaggtggaaacaagggctggagctgcgtttgttttgccatcactatgttgacacttttatccaataagtgaaaactcattaaactactcaaatcttgaaaaaaaaaaaa

SEQ ID NO: 304 - DNA, 2172 bp, Homo sapiens
  CDS (415)..(669)
actatagaatacaagctacttgttctttttgcaggatcccatcgataagcttgcttgttcttttggccgaagcggcctacggctgcgagaagacgacagaagggtacggctgcgagaagacgacagaagggtacggctgcgagaagacgacagaagggtacggctgcgagaagacgacagaagggtacggctgcgagaagacgacagaagggtacggctgcgagaagacgacagaagggtacggctgcgagaagacgacagaagggtacggctgcgagaagacgacagaagggtacggctgcgagaagacgacagaagggtacggctgcgagaagacgacagaaggggacactagaggaagtcgtgctacccccgcggagttgtcgtgtgttctggattcattccggcaccaccatgtcgaaggtttcctttaagatcacgctgacgtcggacccacggctgccgtacaaagtactcagtgttcctgaaagtacacctttcacagcagtcttaaagtttgcagcagaagaatttaaagttcctgctgcaacaagtgcaattattaccaatgatggaataggaataaatcctgcacagactgctggaaatgtttttctaaaacatggttcagaactgcggattattcctagagatcgtgttggaagttgttaatatctgctacttggaacatacgattgcctttcagaataaatattggtattttttgttgttgtaaaattgaaatcaggcatttaacatactatgaaaacaccaggagtcaatgattaatgaaaggtgactcatctgtccctttttgttgtccatactcttcctatgaagagggaatgcgtatgaattaaggctactactgtcacagaagatcatagtctttgatgctacctcacaacacaaacaggtagttcgttgggggcaaatgaattagccaactgttaactggaagcttttgataatttttttttttagaacaatttggaacattaaaatttactgaatcgtatatattcatctgagataaaaatataaaaagaattatggaccctggatggcaatttgcttgatagcatctgatttgcagactcataatttgatttttaattaaatatataggttatgatgaagtgaatagacatatcagtgaacagttaactatattaaatttttatcatttactttttttaagattcagacctcagttatataaatttcagtttaatatcaaccaaaaaattaaaattttaatctaacccttatgtgtataaattggtgtcccataccagcttttaatggtggacctatagaatccagtacttttaatggtgggaatttacagtagaagcatcctttgctgagttatacattcctttatcaatctcttttgatacaacatttaaaacaagtagcttcaagaaaccactggtgttttgaggatagtatttctaaatagcattcaggaacagagtattattgcacagatctgaagatcaaaaaaaagctcaaggaaatacagatcggaagtgctgatgagttatatttattgaaaacccaacttttaaggaagtgctaagatcagtcacccatgtgaataagaagccaggaaaggaaagatggggaagcccagatcaccaggcttctattaaggaggaaagcaacagaggaaacagtgaaggggaacagaagggggtagcaaagtgttacagaaaagcggactggatagacaaaactgcagaaggtgtatgttggggagaactgaaagggaaaacaaaatacttgacatagtcttaagtagaagaaggcagttagagaaaacaaagtatctactggccttgtcaacatacagacttcaaaataccccttatgagaatccaaagaatgatgtgtgtaagggaagattttatttgcccttccggaagaaatcagtatctatgcaaatcttgaaagacgaaatcaaagcccattaatgattcagaatcagtgcttgacctcctgtattctgaatggtgaactctggaagcagggattgtgtctggctctttttagagctggaaatgtagtggctttcattaaatacttgctgtaaagtctttctaagaccaattattatcttagcatgtttcagtatcttctctatcataggccctaagttcattgggg

SEQ ID NO: 305 - DNA, 1509 bp, Homo sapiens
  CDS (69)..(1214)
aacctgcaaaatctttacatacacagaagaacagacagttcttcaatgaaccagaagaaaatttctggatggtcatggttgttcggaatcctataattgaaaaacagagtaaagatggaaaaccagttattgaatatcaagaggaggagttgttggacaaggtttatagctcggtgctgcggcagtgctacagcatgtacaagctttttaatggtacatttctgaaagccatggaagacggaggcgtcaagcttctgaaagaaagattagagaaattcttccatcggtatttgcaaacgctacatttgcagtcatgtgacctacttgacatttttggtggaatcagcttcttcccgttggataaaatgacttatttgaaaatccagtcctttattaatagaatggaggaaagcctgaatatagtcaaatacactgcttttctctataacgatcagcttatctggagtggattagaacaagatgacatgagaattttatacaaataccttaccacctcccttttcccaaggcacatcgaacctgagttagcaggaagggattctccaataagagcagaaatgccaggaaatcttcaacactatggaagatttcttaccggacccttgaacctcaatgatccagatgcaaaatgcagattccccaaaatttttgtaaatacagatgacacttatgaagagctccatttaatcgtttataaggccatgagtgcggctgtgtgctttatgatcgacgcctctgtccacccaacgttggatttttgccgaagactggacagcatcgttgggccccagctcacagtgctggcctctgacatctgtgaacagtttaacatcaacaagaggatgtccgggtctgagaaagaaccccagtttaagtttatctacttcaaccacatgaatctcgccgagaagagcacagttcacatgaggaaaacgcccagcgtgtcgctcacttccgtgcacccggatttaatgaagattctcggtgacatcaacagtgactttaccagagtggatgaagatgaggagatcattgtgaaggccatgagtgattactgggttgttggaaagaagtctgatcggcgggagctctatgttattttgaatcaaaaaaatgcaaacctgattgaagtaaatgaagaggtcaagaaactttgtgcaacacagttcaacaacatcttcttcttggattgacggatgacggctcactgagagcatatctaaaaaacactctgcaaacatttggtcacatgcaagttagtggtcatatgacggactgcattcaggacaagggtaaagcaatacttgctttgaagaatcacatttcgactcggtctgctgatctgaggtttttagattttaaatatttatgtggaattaattaaaggtagttggctatatcgctatcatttcattcttttgacattatgtgaatattttactggaaaataagactaataaattgttaaaagtttttaaaaaaaaaaaa

SEQ ID NO: 306 - DNA, 1919 bp, Homo sapiens
  CDS (198)..(1622)
  misc_feature (1)...(1919): n = a,t,c or g
gagtccnnangnngnnnnnttttgaaaccgtcctgatagctttacgcctgcggtaccggcccggaattcccgggtcgacgatttcgtcgtgtggtgaggcctacagaagcggccttcagctggaccttggtctccccgccggacttcgagggtgtcatcgccgcccctgttgggggtgagcgccgcgcggctgcagcatgcctcacaggaagaaaaagccctttatagagaagaagaaagctgtgtcttttcacttggtccaccggagccaacgagatcctttagcagcagatgagagtgcaccccagagggttctattgcccacacaaaaaatagacaatgaagaaaggcgagcagaacagaggaagtatggagtgttctttgatgacgactatgactacctgcagcacctgaaggaaccatctgggccttcagagcttattccctcaagtaccttcagtgcacacaacaggagagaggagaaagaagaaacgctagtaattccaagcactggaattaagttgccttcatcagtgtttgcttcagagtttgaggaagatgttggattgttaaataaagcagctccagtttcaggacctcgactggattttgatcctgacattgttgcagctcttgatgatgattttgactttgatgatccagataatctgcttgaggatgactttattcttcaggccaataaggcaacaggagaggaagagggaatggatatacagaaatctgagaatgaagatgacagcgagtgggaagatgtggatgatgagaagggagatagcaatgatgactatgactctgcaggcctattgtcagatgaagactgtatgtctgtgcccggaaaaactcacagagctatagcagatcacttgttctggagtgaggaaacaaagagtcgcttcacggagtattcgatgacttcctcagtcatgaggagaaatgaacagctgaccctacatgatgagaggtttgagaagttttatgagcaatatgatgatgatgaaattggagctctggataatgcagaattggaaggttctattcaagtggacagcaatcgcttacaggaagttttgaatgactactataaagagaaggcagagaattgtgtaaaattgaatacccttgaacccttggaggatcaagacctgccaatgaatgagcttgatgagtctgaggaggaagaaatgattactgtagtccttgaagaagccaaagagaagtgggattgtgaatctatttgtagtacatactcaaatttatataaccatccacagcttatcaagtatcaaccaaagcccaaacaaattcgaatatcttctaaaacaggaatacctctcaatgtcttaccaaagaaaggactcacagcaaagcaaactgaaagaatacagatgattaatggcagtgatcttcctaaagtatcaactcagccacgttctaaaaatgaaagcaaagaagataaaagagcaagaaagcaagctataaaagaagagcgcaaggaacgaagagtggagaagaaagctaacaaattagcatttaaactggagaaaagaaggcaagaaaaagagctgctgaacttgaagaagaatgttgagggtctaaagctatagacagtggagcatacagggcaaggcactttattaggggctcctcatctttggttattgactagaaacttcagaaagacaaaactgtttgccatttttactggcagataagaggaaaatacaatatttgtattatttttatactagtaagtgtcccctgccaaccatcttgtaaatattgtaatactttaatttttaatattataagcttacatttgctctgaagtaaatgacttcatgaatgtgaaatgtttgataaattaaaggaaaatatcttcataacgtggaaaaaaaaaa

SEQ ID NO: 307 - DNA, 2138 bp, Homo sapiens
  CDS (224)..(1180)
taactgcagaatgtacgctgtcttcagttaaggctgagagtgggaaggagttcctaatcagagatgacatggagatcccttaaagagaaccagattcatacacaaaatgtaagataatttattggctataaaatataaatgatggtatttctgaaaggttagcaatgcatgcctgtctcgtttccctctttctctctctctctctgatagtcacttcaatcaaatggaaccaggaaatgatacacaaatttcagaatttcttcttctgggattttcacaagaacctggactgcaacccttcctctttgggctgttcctgtccatgtacctggtcactgtgctcgggaacctgctcatcatcctggccacaatctcagactcccacctccacacccccatgtacttcttcctctccaacctgtcctttgctgacatttgtgttacttccaccaccattccaaaaatgctgatgaacatccagacacagaacaaagtcatcacctacatagcctgcctcatgcagatgtattttttcatactctttgctggatttgaaaacttcctcctgtccgtgatggcctatgaccggtttgtggccatctgtcaccccctgcactacatggtcattatgaaccctcacctctgtggactgctggttctagcatcctggaccatgagtgctctgtattccttgctacaaatcttaatggtagtacggctgtccttctgcacagccttagaaatcccccactttttctgtgaacttaatcaggtcatccaacttgcttgttctgatagctttcttaatcacatggtgatatattttacagttgcgctgctgggtggaggtcccctgactgggatcctttactcttactctaagataatttcttccatacatgcaatctcatcagctcaggggaagtacaaggcattttccacctgtgcatctcacctctcagttgtctccttattttatggtgcaatcctaggggtgtaccttagttctgctgccacccgcaactcacactcaagtgcaacagcctcagtgatgtacactgtggtcacccccatgctgaacccctttatctatagtctgaggaataaagacataaagagggctctgggaatacatttgttgtggggaacaatgaaagggcaatttttcaagaagtgcccatgattgcagggctctaagcttcagaggtagtaactgtcattcttcaatcagatagtggaaatagaacttgctccttctattaatacttattatatttctgggagtttcaatttgttgtgatttcaactggtcttgtagaatttaagcaactccttttattaagctttctgctctctgatatccaacagttttttctctttgttgttttcctactttctcaaggttatttccgactttggatcagaaacactttggagatttccatttgtctcatacagggaagagttgtatgtctcctgtggcatagactacacttggcaattggggtaattgatgtaaatttatagtggaatatgacctgagaccacaatttgttcacttttgtattcttcagtcctatgtctgtctctaccttcaatgctcctcctgataatgtagacctgaacatacttgtgtattttgcagctggtcatgagattgtgttgtcctcattaggacatcatgtctttgtcagtgccatgtccacagtatctgccatactccctggcatagtacggtaaggcaaaaattgtttatcaaaaatatgttccgagtgcaatgcccactgaaagacaaacttgcatatgttgattaacttaatatggacttacagtcagagatgaccttaaatatgatggagtaaaattgtcaatcatacattgaattgctatggaagacttgtttttatgatgtgcatggactcattgaagtatggaagcttagtgcccatatataagtttatttattggagtgatggatttggtgccatggtctataatgtttcatgcatccatacttctgtttttgcttcaaaatttttagtgctccctacaaatacgaatccttctatcccactaaccaaaatacctccttcattataaaattttgtcgtaaacattaaagtgcaggtcagtgaaca

SEQ ID NO: 308 - DNA, 7445 bp, Homo sapiens
  CDS (477)..(2567)
ccacagcaactgccaatgaaggatgaatcccctttttaaaaagttgttgttgttgttgtttatttgatttcccaccacctccattagaccaagtgcaggaggaggaatgtgaagtagaaagggtgactgaacatgggacaccaaagccctttcgaaagtttgacagtgtagcttttggagaaagtcaaagtgaggatgaacaatttgaaaatgacttagagacagacccacccaactggcagcagcttgttagtcgagaagtgttactgggactaaaaccttgtgaaatcaaaagacaggaagtgattaatgaattgttctacactgaaagagctcatgttcgaacactgaaggttcttgatcaagtgttctatcagcgagtatccagagaaggaattctgtcaccctcagagctacggaaaattttttcaaacttggaagatattcttcaacttcatattggattgaatgaacaaatgaaggctgttcgaaagagaaatgagacctctgttatcgatcagattggggaagatttgctgacatggttcagcggaccaggagaggagaaattgaaacatgctgctgctaccttttgcagtaaccaacctttcgccctggaaatgatcaaatctcgtcagaaaaaggattctcgatttcagacttttgtgcaagatgctgaaagtaatccactgtgtcgtcgtcttcaactgaaggatattattcccactcaaatgcaaaggcttactaagtacccacttctgttggataatattgccaaatacacagaatggccaacagaaagggagaaggtgaagaaagctgcagatcactgtcgtcagatcttaaattatgtaaatcaggctgtcaaggaggcagaaaacaagcagcgcctagaagattatcagcgtcgccttgatacctccagcctgaagttgtcagagtacccaaatgttgaagagctcaggaatttggatttaacaaaaaggaagatgattcatgaagggccattggtttggaaggtgaatagagataaaactattgatttatacacgttgctgctggaagacattcttgtattgttacaaaagcaggatgatagactggttttaaggtgtcatagtaagattctggcatctacagctgatagcaaacacacgtttagccctgtcattaagttgagtacagtgttggttcgacaagtggcaacagataacaaagctttattcgtcatttccatgtcagacaatggcgctcagatttatgaactggtggcacagacagtttctgaaaagactgtctggcaggacctaatctgtcggatggctgcatcagtgaaggagcaatccacaaagccaattccattaccacagtcaacacctggcgaaggagataatgatgaagaagatccttcaaaattaaaagaggagcagcatggcatttcagtcactggtttgcagagtccagacagagatttgggattagaatctaccttaatatcgtcaaaacctcagtctcattcactgagtacctctgggaaatcagaggtacgtgatctgtttgtggctgagagacagtttgcaaaggaacaacatacagatgggacactaaaggaagttggagaagattatcaaatcgcaatcccagattcacacctgcctgtctcagaagaacggtgggcattggatgcactaagaaatttgggtttgttgaagcagttgctggtgcaacagctaggtttgactgagaagagcgttcaggaagactggcaacatttcccaagatacagaacagcctctcaggggccgcagacagacagtgtcatccagaactctgaaaatattaaggcctatcattctggtgaaggacatatgccctttagaactggaactggtgacattgcaacttgttacagtccacggacttcaactgaatcttttgctccacgggattcagtgggactggcaccccaggatagccaggcaagtaacattttagtaatggaccacatgattatgaccccagagatgcctaccatggagccagaagggggtcttgatgacagtggagagcacttttttgatgcccgtgaagcacatagtgatgagaatccatcagaaggtgatggagcagttaacaaggaagagaaggatgttaatttacgcatctcaggaaactatttgatccttgatggctatgacccagtgcaggagagttccacagatgaggaggttgcttcctcacttaccctgcagcccatgacaggcatccctgctgtggaatccacccaccagcagcaacattctcctcagaatactcactccgatggggcaatttcaccattcacccccgaatttctggtccagcagcgctggggagctatggagtattcctgttttgagatccagagtccctcctcttgtgcagattcacagagccagatcatggagtacattcataagatagaggctgaccttgaacacttaaagaaggtggaggaaagttacaccattctttgccaaaggctggctggatcagccctcacagacaagcactcagataaaagttagagccgcatgtcctggaggtgactgcaggttgttggatttggagtatcggccgtgtctcaccacatcctggctccagtgtggatgcagagagagtgtgacagaggatctgcctgtgaaccacctgggattagtcaagtcccaaggtgcccagagtgggactagttcttcacagtgtggcagctgcactaatctgtttgtgagggaatatccattccctcactctactctcctcactatcggaaattcattttgattcagaataaaaaccaaatgtatagagctttgggtgtaggatatgaaattgtacttagatttaagaaaaagagaaaatcagatgtatttatttgacttcattccgtatttgaaagcacattttaatttttatttgccttgttttgttttaattgagtagtgagagttttagacctttgtctttagtacacccaaggatcaactgctcctgaagcaaagaggtcaggatggagtatgcagaagttgggtagagaggttaagaagaggaggaagtgagacggggaagggaggagcaccttgcttcactatacagtattccaagctctctgctgtccagtaggctgcttctctgagggtcacctcaaaggtatgctatgccgtgtggctcttatgtgcccaggtggtgtggtcagagagtggatgggcttcctcccgccctgaggcaagcacctcttctctgtagctgggatcaaccacaattaataggaatcctcaacatactaaatagcaggcacttgaaaatgggtgtgttttcttccattgtcgtcttttctattgagggttgggatttgggtgggagaggaaagcaaattttattttcttgactataaatttgttattcttggtatcatttcatttttataattatacattagacattggcacttgtgtaaaactgtccctgcagattgagcaggaagtaaaaacaaatggaaatgcttcggatagtggcaggggtgggggttgctaaggaaagggtgggatgggagtgggtaaagagtttgggaaggttatctaactgaatcactactgagttgaatcatggctatcattagccacaggtactgctgattataaggccagtaaaattttagtacctggaggtttgactctaatttttgcactgatggtgccaaagggccctgagtcaaaaggatagccaagggtggagtggaaaaagatatggtgaaggcagaactgctcacaccagctccagaagcacgtcctctgacttcactgccgcagctctttccacacggggccgtgattgaccctaaaaattgcagaccagcacatacactggacactgcaggcaaggtgttggtaactgcctgctctaggatgaatagtagcgttagcagcaccctacagagggtaagtttcagaattgtaatttgagaactccttcaattatattgactttctttggttttccttgtgcattaggtatatattttttgaagtatttttgccaactaaaatgaagtctgtaaattctgttaataaacaaggagttcatccgttgctcacatctttcattggtgccctctgaactctgtgggttgctaggatgtaattttaatgcttccctgcagtccaaagatgatttttcaccacaaatggtaagggatgcccacctacttttataaacaccactgcaacttaacaagtttatttatctatgtccagatttctgtttctgtcctaaattgatctgtgtttttaggtggatcaacttggatctttagacctcatctataaattgaaattatatttttaagtcataagccaagtacaatctaactcagaatgggattaaaaattttagaagcagaagctaatatataaatgaagtttgggatttggaactttctgtatctcttaggaggaacaagtaaaaaccaaatggttacattgtgctgctagaaataatgtcattctcaattaaaagggttacacctgtagccacttgacactaacaccatcgagggcaattaatcaggagaaaagtaaatataaaaactttgctcttaacgtcacacactacagggtaattatgtaattctctagcactcaattaagaagcttgtaggttagcaaaatttcagtttctctagttcagccagtgtcttgtccttagtaattatttgctttccctgcagttcaatttctccttggaactctaacaggactaactggaaaaatactttgaccatagctctagtactttcccaaattaaattcatatctagattttcaaacaaagccccaggatggaggtctaattctgaaaatatctcacaatttttgaatgttctttttatcttaccgacctaacttctcttttccctcccaacttggcctcccacacgttccatttcattttggccattatagtcacatccgtttgactttggttgtgacatcttcctttcaggatgatggaattagatgcagtctgtctttgagtgagactggtcaccatcagaggagttttttctaagtgacgtgactagaagttgaaatctacttccctgctaaagggcacaggggtggtgtacaaagaaagctaccttcccagagcaagcaggctgcattttagctatggaagtgacctgctgtgacactgtgctctcttctgtgggcttaatggttcctttgctatgaagtggcaaattacatgtagagtgtctccttccttttcagagaacagttaatcaaggcaaatcagcaagcccccaaagtgctgtaatttaacatcatgattaccaccttcgaagctatatattttgcatactttaaaatcacctaacttggactgcttgaattacattggcttttagaaccgaaattgtaactatgtattgtatttcatgggaggtatattttatgagctttttggctttcttttttcccacagcaactgccaatgaaggatgaatcccctttttaaaaagttgttgttgttgttgtttatttgattttgagttaggagggataatagagaagtccatttaaaaattatttttagaagctaaagaaagtaattatgcttcctgtgaattgtcttttactggcatctttgttttcctctttgatgttagtaaatttggtgtaatacgtggggcttccatatttcaaagtggaagctttcttctctgaagtcgatatatggttttgaattactagagctttggtcagtatttccttccctatatgtcacagagggcaccactgagaactgcgtgcataggacctcaaaatacaaaattagcagggcctcacagtcagcttcctcatggctagtttttcccccttatattacaatttttgttttataagtcatttttttcctgatatttccaccacttttcagagtcatctacaaaatttttctttcctcaagaaaagagttccttttgccttattccttatgccttccccactggtattgagggttttgataataaattggtaggaaaaaaaagtacctcctagaaggaagccttccccaccatttccaggtgccaactgctaagcagatatattccaaaaatggtaactgtcatgtgcacactgttggttatttttaataagcctcttcctactagaacattttattttccttgttcaccatacaatcatgtactctttaacagaaattgcttttaaaaaatatctggaactatctttaaaaaaactttattaataatcatgtatttttactgatcacattttgaaatgcctaaaagactttattgttctaattatccagatgtacctttgtaaaatagctcttttatgaattagctgataaggctgtatgtttctggaacaaaatattggtcatctaaaaactttctgttttctggggtctgggaaaatagaaaataagatttcaaatattaaataagcttaaaggaaccaagcatgtgactttttatttgtattctggttgatttgtcttgtccaagttatattagaaaagttgaggagtcgaggagcctgtaattaattttcctgtcagtgactgtcagacatcttcctgcttattagagcatccctagcaacaaggctaaaccttcatgacagtgctgggcaggtggggcttgccctaggcatgtggggcaggtttgttgtttttttaatagctttattgagatattcacatatcatataattcatccatttaaagtgtataatcagatgggttttggtatattattgatttttaattgtggtgaaatatatatataacaaaatttgctattgtaactatttttaagtataaagttcagtgaggtaggccagcttttatgacgcacctgaagataactttggttttaatcctaccctaaatgaagcatatgcctctatttttcctgtccccagtgctgggcttcttcacataccaacatttctgtgcttttaccaacagcattttagctcagaaggctcgcttactttgggcatttgctgtattttggttttgaaatacttgtaatttgacttattcttgggataatattttagttttcagtcattcaagggcacatttggctgacggagctaataagcgtaataaaatgcttagtagtttataccatcttttagttaaacattttaaagattaagactattcaaatgtactttgcggaaattaacctgtttgtatgcctggctttgtttacaaacatatatctatatctatatatatagatacagatacagatacatatctggtggaacaaagaaatacctgtaccattcccacttgctctttgatagccacctcctaggaatggagacaataaaactctgtatttgcatgtgaaaaaaaaaaaa

SEQ ID NO: 309 - DNA, 2380 bp, Homo sapiens
  CDS (31)..(2100)
gcggtggaattcgcggagggagcgctgaccatggctccctggcctgaattgggagatgcccagcccaaccccgataagtacctcgaaggggccgcaggtcagcagcccactgcccctgataaaagcaaagagaccaacaaaacagataacactgaggcacctgtaaccaagattgaacttctgccgtcctactccacggctacactgatagatgagcccactgaggtggatgacccctggaacctacccactcttcaggactcggggatcaagtggtcagagagagacaccaaagggaagattctctgtttcttccaagggattgggagattgattttacttctcggatttctctactttttcgtgtgctccctggatattcttagtagcgccttccagctggttggaggaaaaatggcaggacagttcttcagcaacagctctattatgtccaaccctttgttggggctggtgatcggggtgctggtgaccgtcttggtgcagagctccagcacctcaacgtccatcgttgtcagcatggtgtcctcttcattgctcactgttcgggctgccatccccattatcatgggggccaacattggaacgtcaatcaccaacactattgttgcgctcatgcaggtgggagatcggagtgagttcagaagagcttttgcaggagccactgtccatgacttcttcaactggctgtccgtgttggtgctcttgcccgtggaggtggccacccattacctcgagatcataacccagcttatagtggagagcttccacttcaagaatggagaagatgccccagatcttctgaaagtcatcactaagcccttcacaaagctcattgtccagctggataaaaaagttatcagccaaattgcaatgaacgatgaaaaagcgaaaaacaagagtcttgtcaagatttggtgcaaaacttttaccaacaagacccagattaacgtcactgttccctcgactgctaactgcacctccccttccctctgttggacggatggcatccaaaactggaccatgaagaatgtgacctacaaggagaacatcgccaaatgccagcatatctttgtgaatttccacctcccggatcttgctgtgggcaccatcttgctcatactctccctgctggtcctctgtggttgcctgatcatgattgtcaagatcctgggctctgtgctcaaggggcaggtcgccactgtcatcaagaagaccatcaacactgatttcccctttccctttgcatggttgactggctacctggccatcctcgtcggggcaggcatgaccttcatcgtacagagcagctctgtgttcacgtcggccttgacccccctgattggaatcggcgtgataaccattgagagggcttatccactcacgctgggctccaacatcggcaccaccaccaccgccatcctggccgccttagccagccctggcaatgcattgaggagttcactccagatcgccctgtgccactttttcttcaacatctccggcatcttgctgtggtacccgatcccgttcactcgcctgcccatccgcatggccaaggggctgggcaacatctctgccaagtatcgctggttcgccgtcttctacctgatcatcttcttcttcctgatcccgctgacggtgtttggcctctcgctggccggctggcgggtgctggttggtgtcggggttcccgtcgtcttcatcatcatcctggtactgtgcctccgactcctgcagtctcgctgcccacgcgtcctgccgaagaaactccagaactggaacttcctgccgctgtggatgcgctcgctgaagccctgggatgccgtcgtctccaagttcaccggctgcttccagatgcgctgctgctgctgctgccgcgtgtgctgccgcgcgtgctgcttgctgtgtggctgccccaagtgctgccgctgcagcaagtgctgcgaggacttggaggaggcgcaggaggggcaggatgtccctgtcaaggctcctgagacctttgataacataaccattagcagagaggctcagggtgaggtccctgcctcggactcaaagaccgaatgcacggccttgtaggggacgccccagattgtcagggattgggggatggtccttgagttttgcatgctctcctccctcccacttctgcaccctttcaccacctcgaggagatttgctccccattagcgaatgaaattgatgcagtcctacctaactcgattccctttggcttggtgggtaggcctgcagggcacttttattccaacccctggtcactcagtaatcttttactccaggaaggcacaggatggtacctaaagagaattagagaatgaacctggcgggacggatg

SEQ ID NO: 310 - DNA, 1710 bp, Homo sapiens
  CDS (194)..(1405)
ccggaattcccgggtcgacccacgcgtccggctacttcccggatgagaagggcggccgtgaagccagcagggaagccagccccacaggcaagggccccccagcctcctcacagctccccatagcctggacctgccggccctccctccaggaccgaggggctcccaagggaaactcaggcgtgtgctggtcccaatgtcagtgaaacccagctgggggcctggcccctcggagggggtcaccgcagtgcctaccagtgaccttggagagatccacaactggaccgagctgcttgacctcttcaaccacactttgtctgagtgccacgtggagctcagccagagcaccaagcgcgtggtcctctttgccctctacctggccatgtttgtggttgggctggtggagaacctcctggtgatatgcgtcaactggcgcggctcaggccgggcagggctgatgaacctctacatcctcaacatggccatcgcggacctgggcattgtcctgtctctgcccgtgtggatgctggaggtcacgctggactacacctggctctggggcagcttctcctgccgcttcactcactacttctactttgtcaacatgtatagcagcatcttcttcctggtgtgcctcagtgtcgaccgctatgtcaccctcaccagcgcctccccctcctggcagcgttaccagcaccgagtgcggcgggccatgtgtgcaggcatctgggtcctctcggccatcatcccgctgcctgaggtggtccacatccagctggtggagggccctgagcccatgtgcctcttcatggcaccttttgaaacgtacagcacctgggccctggcggtggccctgtccaccaccatcctgggcttcctgctgcccttccctctcatcacagtcttcaatgtgctgacagcctgccggctgcggcagccaggacaacccaagagccggcgccactgcttgctgctgtgcgcctacgtggccgtctttgtcatgtgctggctgccctatcatgtgaccctgctgctgctcacactgcatgggacccacatctccctccactgccacctggtccacctgctctacttcttctatgatgtcattgactgcttctccatgctgcactgtgtcatcaaccccatcctttacaactttctcagcccacacttccggggccggctcctgaatgctgtagtccattaccttcctaaggaccagaccaaggcgggcacatgcgcctcctcttcctcctgttccacccagcattccatcatcatcaccaagggtgatagccagcctgctgcagcagccccccaccctgagccaagcctgagctttcaggcacaccatttgcttccaaatacttcccccatctctcccactcagcctcttacacccagctgaggtagaggccagactcctccaacagtgaaggaaaaggcacagatcaccttagaggccacgctcccaagattagttatcaccctggcagtatgaatacttccctaaggcctcccatccatggaggggaagagtgggaaccagctgttacactcagcatctactgagcactgatgggagccctgcctgggccatgtgctgtggggccaaatggacatcactccctaacttcttgaggtctgtctcctctgtggattcacgcatgtatcaacctcattaaactatgccaaactttaaaaaaaaaa

SEQ ID NO: 311 - DNA, 1424 bp, Homo sapiens
  CDS (212)..(1102)
ccgagacccgggtcgccaatataaatgcttgatgagtgaatgaatgacttccgtctgggacttggttgcaaataaagccgagctgcatcttagggaggggtggagactttgcccctgtttgtgccttgaagccagcagggccttgcctacggatacctccacccaccctcctgcccagcaagtggaggcccgcagcccgagtgtcgccgccatggcttcgccgcagctctgccgcgcgctggtgtcggcgcaatgggtggcggaggcgctgcgggccccgcgcgctgggcagcctctgcagctgctggacgcctcctggtacctgccgaagctggggcgcgacgcgcgacgcgagttcgaggagcgccacatcccgggcgccgctttcttcgacatcgaccagtgcagcgaccgcacctcgccctacgaccacatgctgcccggggccgagcatttcgcggagtacgcaggccgcctgggcgtgggcgcggccacccacgtcgtgatctacgacgccagcgaccagggcctctactccgccccgcgcgtctggtggatgttccgcgccttcggccaccacgccgtgtcactgcttgatggcggcctccgccactggctgcgccagaacctcccgctcagctccggcaagagccaacctgctcccgccgagttccgcgctcagctcgaccccgccttcatcaagacctacgaggacatcaaggagaacctggaatcccggcgcttccaggtggtggactcccgagccactggcaggttccgcggcaccgagcccgagccccgagacggcattgaacctggccacatcccaggtaccgtgaacatccccttcacagacttcctgagccaggaggggctggagaagagccctgaggagatccgccatctgttccaggagaagaaagtggacctgtctaagccactggtggccacgtgtggctctggcgtcacagcctgccacgtggcactaggggcctacctctgcggcaagccagacgtgcccatctacgatggctcctgggtggagtggtacatgcgcgcccggcccgaggatgtcatctcagagggccgggggaagacccactgaagctgggcaggacacaggcgagctcaggtgatgccggccaccagcaatgcctggcctggtagctccgcttctgctttcaccaagagagtgtttcttcactcaactcaggtggcatttggggtgacatctcaaaggccaggaattccgttgacttgttggctgccagtaggggcgggaggaaaggcggaggcgagccctggaggagggaggccacaactccgagctgcccacctggtgctgagctggggccccgcctcctttctgttttatttttgaggaaataaaataaccaagtgctaaatcttgtaaaaaaaaaaaa

SEQ ID NO: 312 - DNA, 1631 bp, Homo sapiens
  CDS (91)..(1425)
ccccccccgaggtctctgcgcagcccagcccgccggtccacgccgcgcaccgctccgagggccagcgccacccgctccgcagccggcaccatgcgcgagatcgtgcacatccaggcgggccagtgcggcaaccagatcggcgccaagttttgggaggtcatcagcgatgagcatgggatcgaccccacaggcagttaccatggagacagtgacttgcagctggagagaatcaacgtgtactacaatgaggctgctggtaacaaatatgtacctcgggccatcctggtggatctggagcctggcaccatggactctgtcaggtctggacccttcggccagatcttcagaccagacaacttcgtgttcggccagagtggagccgggaataactgggccaagggccactacacagagggagccgagctggtcgactcggtcctggatgtggtgaggaaggagtcagagagctgtgactgtctccagggcttccagctgacccactctctggggggcggcacggggtccgggatgggcaccctgctcatcagcaagatccgggaagagtacccagaccgcatcatgaacaccttcagcgtcatgccctcacccaaggtgtcagacacggtggtggagccctacaacgccaccctctctgtccaccagctggtggaaaacacagatgaaacctactccattgataacgaggccctgtatgacatctgcttccgcaccctgaagctgaccacccccacctacggggacctcaaccacctggtgtcggccaccatgagcggggtcaccacctgcctgcgcttcccgggccagctgaacgcagacctgcgcaagctggcggtgaacatggtgcccttccctcgcctgcacttcttcatgcccggcttcgcgcccctgaccagccggggcagccagcagtaccgggcgctcacggtgcccgagctcacccagcagatgttcgactccaagaacatgatggccgcctgcgacccgcgccacggccgctacctgacggtggctgccatcttccggggccgcatgtccatgaaggaggtggacgagcagatgctcaacgtgcagaacaagaacagcagctacttcgtggagtggatccccaacaacgtgaagacggccgtgtgcgacatcccgccccgcggcctgaagatgtcggccaccttcatcggcaacagcacggccatccaggagctgttcaagcgcatctccgagcagttcacggccatgttccggcgcaaggccttcctgcactggtacacgggcgagggcatggacgagatggagttcaccgaggccgagagcaacatgaacgacctggtgtccgagtaccagcagtaccaggacgccacggccgacgaacaaggggagttcgaggaggaggagggcgaggacgaggcttaaaaacttctcagatcaatcgtgcatccttagtgaacttctgttgtcctcaagcatggtctttctacttgtaaactatggtgctcagttttgcctctgttagaaattcacactgttgatgtaatgatgtggaactcctctaaaaattacagtattgtctgtgaaggtatctatactaataaaaaagcatgtgtagaaaaaaaaaa

SEQ ID NO: 313 - DNA, 1047 bp, Homo sapiens
  CDS (373)..(912)
ataacagttacgcctgccgtaccggtccggaattcccgggtcgacccacgcgtccgcggacgcgtgggcggtttcgtgggctttacttggcccgcgcttagggccctcgcggggggcttgtgggtcctcctccccctcccactgacaactgccccaactgctcttcccgccccggtcacagtgaaaatgtagacggggtcgttgtccgtacgactgtgcgccagggctcggggaggggcgccctccgcgtgagcgcccccctgggaatattgaacataatcacctctcattccagactatgttaggtcttaatggtgggaggacgcccgagtgctcggcccgtttcaccccgaggaggaaggacactgggtcatgacgccatcagagggcgccagagcagggaccggacgcgagttggagatgttggactcgctgttggccttgggcggcctggtgctgcttcgggattccgtggagtgggaggggcgcagtctcttgaaggcgcttgtcaagaaatctgcactgtgtggggagcaagtgcatatcctgggctgtgaagtgagcgaggaagagtttcgtgaaggttttgactctgatatcaacaatcggctggtttaccatgacttcttcagagaccctctcaactggtcaaaaactgaggaggcctttcctggggggccgctgggagccttgagagccatgtgcaagaggacagatcctgttcctgtcaccattgctctcgattcactcagctggctgctacttcgccttccctgcaccacactctgccaggtcctgcatgctgtgagccatcaggactcttgtcctggtgagacccctccttcattgtttcccctcatacatctccctctgccaaggagtgtgccccttttcctttctaccctagaataaacatctgggttctccagtcagaccttttttcatttttttgacttttttgtctgttttttttttttttacttctccttaatgccatctaccacttgctttttttctccaagttatttttttactcatttgtttcac

SEQ ID NO: 314 - DNA, 2013 bp, Homo sapiens
  CDS (110)..(919)
cgctcggaattcccgggtcgacccacgcgtccgcgcagcgggtgcgggcgccgacgggcgagagccagcgagcgagcgagcgagccgagccgagcctcccgccgtcgccatgggccagaacgacctgatgggcacggccgaggacttcgccgaccagttcctccgtgtcacaaagcagtacctgccccacgtggcgcgcctctgtctgatcagcaccttcctggaggacggcatccgtatgtggttccagtggagcgagcagcgcgactacatcgacaccacctggaactgcggctacctgctggcctcgtccttcgtcttcctcaacttgctgggacagctgactggctgcgtcctggtgttgagcaggaacttcgtgcagtacgcctgcttcgggctctttggaatcatagctctgcagacgattgcctacagcattttatgggacttgaagtttttgatgaggaacctggccctgggaggaggcctgttgctgctcctagcagaatcccgttctgaagggaagagcatgtttgcgggcgtccccaccatgcgtgagagctcccccaaacagtacatgcagctcggaggcagggtcttgctggttctgatgttcatgaccctccttcactttgacgccagcttcttttctattgtccagaacatcgtgggcacagctctgatgattttagtggccattggttttaaaaccaagctggctgctttgactcttgttgtgtggctctttgccatcaacgtatatttcaacgccttctggaccattccagtctacaagcccatgcatgacttcctgaaatacgacttcttccagaccatgtcggtgattgggggcttgctcctggtggtggccctgggccctgggggtgtctccatggatgagaagaagaaggagtggtaacagtcacagatccctacctgcctggctaagacccgtggccgtcaaggactggttcggggtggattcaacaaaactgccagcttttatgtatcctcttcccttcccctcccttggtaaaggcacagatgttttgagaactttatttgcagagacacctgagaatcgatggctcagtctgctctggagccacagtctggcgtctgacccttcagtgcaggccagcctggcagctggaagcctcccccacgccgaggctttggagtgaacagcctggccagctgctcagaccagcttgcagagccgcagccgctgtgggcagggggtgtggcaggagctcccagcactggagacccacggactcaacccagttacctcacatggggccttttctgagcaaggtctcgaaagcgcaggccgccctggctgagcagcaccgccctttcccagctgcactcgccctgtggacagccccgacacaccactttcctgaggctgtcgctcactcagattgtccgtttgctatgccgaatgcagccaaaattcctttttacaatttgtgatgccttaccgatttgatcttaatcctgtatttaaagttttctaacactgccttatactgtgtttctctttttgggggagcttaactgcttgttgctccctgtcgtctgcaccatagtaaatgccacaagggtagtcgaacacctctctggcccctagacctatctggggacaggctggctcagcctgtctccagggctgctgcggcccagccccgagcctgcctccctcttggcctctcatccattggctctgcagggcaggggtgaggcaggtttctgctcataagtgcttttggaagtcacctacctttttaacacagccgaactagtcccaacgcgtttgcaaatattcccctggtagcctacttccttacccccgaatattggtaagatcgagcaatggcttcaggacatgggttctcttctcctgtgatcattcaagtgctcactgcatgaagactggcttatctcagtgtttcaacctcaccagggctgtctcttggtccacacctcgctccctgttagtgccgtatg

SEQ ID NO: 315 - DNA, 737 bp, Homo sapiens
  CDS (346)..(702)
atttggccctcgaggccaagaattcggcacgaggagaattccaatttcttaagcctagtaagaaatgagcaaaaacttcaatatatatgactcaggcaagaaatcagcatctgtggcaaatactagaatgaaatgcaagaaagctcactgcaaggagtctccctccctgcagattccaaggctggaatctttttcttctggctccaggcagcacagacagggcctagcctggagagggtggacaagatgtcctctcagggtcttcaatggccaagtccatgcccactgcagaatctttctgtctacccgtaagtatcctttcctgagttccaggcaaagctggggatgttagcctatgactgtcatctgacttggaaggtacacctaggggccggggggaggtcagcaggggagtttgggagccacttctccccccacgtggcactggagtgtgaactggctcattctggacaccagcatggagccagcacgggaacaggggggcagcctagagcacaagctctatctgtgtccttcagagctcctgggaaacatgatgcgccctcatgggaatggcattttgcatatcacacaggctgtcctgggagtcaggcagactggattgtcacgtgcggtgtgcatgcagcagcttgtgcactgcagtggacctgtggaccatttctaaaggtgcacaacaaataataaatgtgtccttctttgtttttaaaaaaaaaaaa

SEQ ID NO: 316 - DNA, 722 bp, Homo sapiens
  CDS (494)..(673)
tatttcatcaaatccaagatataccaattgtaagatgcaccattattatatgcatcactgataattttatgcatcactgatatttttcaaaaggcatcctgaatgttataagaagctgactgatatcagagatgttagaataggatctcagaacggatgaaatatgttatgaaatatggttatggttatgcaaatacctagtcataacagtcatcaatagaagtgtagctcctttttgcccacctcaaaggcaaagcctgtgtcatctttatacccactatggaacctaagactggatcatgatggaatgatggcaataaaaaacataactgatatttactgagcactttatttgtgttgcagcgcaactttatatgaattaatactcaagataacttttattgcttgttttggtaagtactattattcccactttgcagataagggtactgagacttaaagagaagttaaacatctcaaccaagttaggaagatgcttggattacaaacccaagtctatctaatgctagatctacaccttctaagccactgtgttacactgtccttaaggagggtcaggttgtgggtgtcaagactacaaaggcaagtaacacacgtgagaagctcaggccagaatcagagagaaggatggtcaagagttttggagatgaggtaacttaaagaactggctcgtgccgaattcttggcctcgagggccaaat

SEQ ID NO: 317 - DNA, 1091 bp, Homo sapiens
  CDS (132)..(824)
gcacgagctaaagagagcccggagccagcgtgggaggccgctgccgtcgcgcgccttggtttttctgttccttttttttttttttttttaacttcctgcctatacacacgcagccatcagcccacaaagacatgactaccaacgcgggccccttgcacccatactggcctcagcacctaagactggacaactttgtacctaatgaccgccccacctggcatatactggctggcctcttctctgtcacaggggtcttagtcgtgaccacatggctgttgtcaggtcgtgctgcggttgtcccattggggacttggcggcgactgtccctgtgctggtttgcagtgtgtgggttcattcacctggtgatcgagggctggttcgttctctactacgaagacctgcttggagaccaagccttcttatctcaactctggaaagagtatgccaagggagacagccgatacatcctgggtgacaacttcacagtgtgcatggaaaccatcacagcttgcctgtggggaccactcagcctgtgggtggtgatcgcctttctccgccagcatcccctccgcttcattctacagcttgtggtctctgtgggccagatctatggggatgtgctctacttcctgacagagcaccgcgacggattccagcacggagagctgggccaccctctctacttctggttttactttgtcttcatgaatgccctgtggctggtgctgcctggagtccttgtgcttgatgctgtgaagcacctcactcatgcccagagcacgctggatgccaaggccacaaaagccaagagcaagaagaactgaggagtggtggaccaggctcgaacactggccgaggaggagctctctgcctgccagaagagtctagtcctgctcccacagtttggagggacaaagctaattgatctgtcacactcaggctcatgggcaggcacaagaaggggaataaaggggctgtgtgaaggcactgctgggagccattagaacacagatacaagagaagccaggaggtctatgatggtgacgatttttaaaatcaggaaataaaagatcttgactctaaaaaaaaaa

SEQ ID NO: 318 - DNA, 1777 bp, Homo sapiens
  CDS (117)..(305)
cggaccacacacaccccgtgatcccaggggaaccgtcaaccgtagggggtattgtttgggttgggagccttgggtccttggaccaagtgcaggtggacaccggcccacaaatacttatgtcatatttagattcagttgcatcaaagttattgcaaatggtgaaaaaattatcccagtccttttgcagtaattttaaatatctaacaaaatattcaagaaaacaggtttctgatgaaatcaaaaagtcaagaagaactgtggaatcaaatcctatatttttcaagaagaacaagaaaatacagtgaggattatagccattttcatgagtgtgatggtcccacatttcttttccctgagtcaagctttcagtggcttcacatcctctggtcagtgttaagtagatgcccagtgatgccttggcagcctccagcatgtcatcgtcttgttctatgaaaacccgagacagccatttgcacggattgtgtaattgcagagagggctgaagatgaggctttaagaaggtcagtaactcagacatgaacctctgtaagtcaactttcatttcacttgctgaagaataattttgaaacttgatttctaaggatttcattataactaagcttgctgctctaaggatcacatgatctggactagtgataagttcacattcaggttgaacttcatcacctccaaaaaaggaatgtttttcataaacagacagtgtcttcaacaaccccgaattcacagcttgcaaaacagcattagctaaagccagcatgtccaccgctacatgatggtctggcggcattaaggcaggcacagatccacgacagaggtcttcacccactttacagagaaggcactttttgaggaatatgatgaccttccttttaacaaaagcctgaataggccaggtaataacttctagcatgcaagatggtttcaaaaataaaatcctctggcaagtgaaatgtaacttcaggtggattctggaggcgatgagaagctcaagcaaatccaggaaacacatcaggatgtttactattttagaagtatcccggcagttttcaaaatgctgagagaataaggaattgtaaaacacttcaaaaatggtgtcgaaatgagtcaggaactgctttagaatttctgttttctgtgaacatgaatctttaaagatttcttttattattgctgtaagagtccagaggcagtatattgctttattactctcagagtattcagaaagatttttctggcaaaaagcaatccaggaattacttaaggttatcttttctctcaattggaaatatagaagcaatgcaaggcactgtgcagccatgtgagataacaatttatctgaattttggaacatgcagattaatttagaatcgactttggctgattctaagagaattttaattacatctctgtactgctcctttgcatggaactcggttttgacagacaatatccgggttgtcatcactttgatcactgttaactgaaggagcattacttctctggaaccgctcatctgagagttggtcttcaaacacacaggtgctacagcaatgggagccacaccaacagagatgggctgatgcctgccctggataccacaggtgtttgcccattctaaggaggtggctgtagaacaatcttgatctgaaactgctgggttgagataaaagatgtaatcatggctgtcattttcaagtgtggctccaagaagtaccttcttgtataactcttctaaaacttcacagaaaactttcat

SEQ ID NO: 319 - DNA, 2036 bp, Homo sapiens
  CDS (101)..(364)
cctgcagcgaccggtccggaattcccgggtcgacccacgcgtccgctcatccactgcctatgtgtcccacagactttcttctgtttaaatcagtgaacagatgtacattcctgtcacccaaggtgatatgccaggggagatgagaatttttttttttttttttaggtatttctttataattaaacacagtgttcccagagatgggccagggacatccttggaaattttccacttacttacaagtgaggagagcaaattccccactgtctcagccactggaagagctactccgtccacatgcccattagccgacccctgcctcccctccgctggctgctgctggaggcaggtgcagttacactgaaggacgtggtcatgtcagtgggactcaggctcctgtatgggtctctgcgtgcgcacgtcctgctttgcaaacgccacagtgatgccctgcagaaaagctgtggcagaatccccttgatagtccccagcactcttcacatcactctccccatcaccagacaaccacatcagagcctgactgacgatgagatgcaggtaaaggtaacaagacaaggcccaggctcgcaagcttctgtccccaaaaggccacctgcttgacagccacaggtgtcacagctgtaactgggttcattttggccaagagataggtaaagtttaaaatattgataccctgttaactataatttcataactcctattttttaaagataatttcttcaaattccaaaagttttaaacagcaacagcaaattgttactggtgttaacaaattgttaaacagcaacagcaaactcttactgtggctggtcaccacagtgtagatacagtccgggctttctctgtgctttgcagacctcagtgagacaccagagggcagggcaggtgtcccagggtgcccacactcgtgtgacggtgtggcatcaggcaggccctgcagtcccagttctgctggttaacctgccacatgcacttctgtcctgacacacaaggacagcagggcaagaccgtaaaccatgaccttgtctttgtaaagaaaggcccagagcctgagaaaagcaggcctttagcaggaagggctctgccctcctcacctcagagcaaatccatttgccgcgttctgaagctcattaatagacctcctcaggccaaagagaacaatgtccccaccaaccctccctaacagtcacagatacacttcattgtccggacttacaggtcagttaatcagaagcctgagctctggaatattgtcaaagaaatggagttttgagtagtgagtacatggtgtactctcccaaatgcagcctaatcttagtaaccttgaagtttatcattctttaaaaataaatagaataccaatggtttagatattccaacaaagaatgctagaaacaaatgtctaatctcgattattagctttaccaaccctgtgaacactgaggttgcagaactgccaggttaatccctgtggcctagactactgaggattctgatagcacatgtaagactaagcactcttcaagctgtaataaagcatccacatgtatctgtgatgattttcattgctttagcattgcagccatgtaacaactgcagaaagaaggtatttttaaaaatacaatagactacactttttggatcacagagaaatacagatgcactctgagactgcctatgtttataaacatgttgtgtcccctaactgaagtgacaggtcttctggaattgacattaagaagtgtggatagtcatatcacacgcaatgtatttgttttcagcagtgagcagaccgtacaggagcagcacaccaggagccatgagaagtgccttggaaaccaacagggaaacagaactatctttatacacatcccctcatggacaagagatttatttttgcagacagactcttccataagtcctttgagttttgtatgttgttgacagtttgcagatatatattcgataaatcagtgtacttgacagtgttatctgtcacttatttaaaaaaaaaa

SEQ ID NO: 320 - DNA, 1721 bp, Homo sapiens
  CDS (1088)..(1417)
atttggccctcgaggccaagaattcggcacgaggccatctatgccaaaactcgccctcaaaaacaaacaaggcttgctgggaggcgtgctgggcttggccatcagtatttccagtgtggtaaactattgctggcacttccccctggaaataactaatgaggttacgagttgggcacctgcacagatgtccttctctcatagttcctaatgcttaggaatagaggagaaataaaaaaatggattctctcaaaacactgccatttgaatagcgacagaagtgctcccccagcccccaactttggacagcaaagttgaggagaatgagcagacacagttgtttgcttgatctgaatctctctaaagtaaagtatttccaaactgtgtgacaagagcctacctaccactgtagcggtcaaagctgaagcttcttacagcagtgaaacggggcaccacctcccccacactcctcattccccgcttaaaacatggatactttcaaatttgactgtttcttaaactgccatcctaagatatggaaaatttttatagtaaagtgtctagttagcttatttccttttctaaaacaagtgttttcaagataactgtattttacctttatatgtactgaatagctgtttctttttgaattatttgccttttaaaatttgataatgtctctggatataacaggacaggagttcttaaaaaatatcttaagaaattcactttatgggtaaacccaaggtttttgccaacttgttgcctagaaaataagggctagtttcagtttatacaaatagaattattaaacattttacagtccttgattagaaaccagacccaatctccttataacaccacagcgtatcctgccattgacagtgtaatcacaattctccctttttcatttagctgcttttttattattactaaatgttttggattgagcatttttccctctgtaattttcttccttcacgtttattttattttaactcttgtagtattttattgttgttaatttacaagtttaaaaatattaggtactattaataatggttaaaaatagaaaaatgcatatttttgtatgataatcaaatgtaaaatacttttatttttgctggacagttgttatatcatgattattgtgctacagtttattgtgcataatatgaaaaacaactatgacagccttcagtcgggccagggtgaagctgcttataccacctctgccgtcagagggacatgtggtgacagcagtggtgtggctgcacagggcgcactagagagagctcagcacccctgctgcccgccagcagagcccgtgctgagggaatgccgcacagatgctgatgcactgggtgaaatttctagtattgaacgtaaaggtgtacagtgtcttgctgttattttatgatggaaactgattttgaaaccaaaaatagctaactaactttatttaaggaaaggatattaatttgtactaacagagggtgaaagctgttcacatttgtcaacaaaatctgcttgctgcagtagtaacctcaagtggttaaaacttgatttcccgagaaaactaaaacctttgtgcctaaaattgatgacttgagttcaagtgggatgagcaagaagatgtgttatcttgttgttcaacagtattgagtgtgaaggaaattttgatggcttaataaaattccacagcgactgttaaaaaaaaaaaa

SEQ ID NO: 321 - DNA, 1708 bp, Homo sapiens
  CDS (221)..(1558)
gcacgagaccagcacttccggtacgaaaactcgctgctgccccaacctggcttgacaggcttggtctctgcaagtggctctcagccccttcttctttcctgcctcaccttccaattcgtttgccgccgccgtcccgcagctgctgtttccggagttgccccttccccatgttccggggcaggagtccgcaaagcgaagatccgcccgccggttcctcatcatgtccgaactgactaaagagctgatggagctggtgtggggcaccaagagcagccccggtctctcggacaccattttctgccgctggacgcaagggtttgtgtttagtgaatcagagggatctgcattagaacagtttgaaggtggcccctgtgctgttattgcacctgttcaggcatttcttttgaagaagctcctgttttcttcggagaagtcttcttggcgggattgttcagaggaagagcagaaggaactcctttgtcataccttgtgtgatattttagaaagtgcttgttgtgaccactctggatcatactgcttggtttcatggttaagaggaaagacaactgaggaaactgctagtatttctgggagtcctgcagagtctagttgccaagtggaacattcttctgccttggctgtcgaagagcttggctttgagcgatttcatgcattaattcaaaaaagatcgttcagaagtttaccagaattaaaagatgctgtcttggaccagtattcaatgtggggaaataaatttggagtattgctttttctgtattctgtattactgacaaagggcattgaaaacataaaaaacgaaattgaagatgcaagtgaacccttgatagatcctgtatatggacatggcagccaaagtttaattaatctcctgctgacgggacatgctgtttctaatgtatgggatggtgatagagagtgctcaggaatgaaacttcttggtatacatgaacaagcagcagtaggatttttaacactaatggaagctttaagatactgtaaggttggttcttacttgaaatctccaaaattccctatttggattgttggcagtgagactcacctcaccgtattttttgccaaggatatggctttagttgcccctgaagctccttcagaacaagccagaagagtttttcaaacctacgacccagaagataatggattcatacccgattcacttctggaagatgtgatgaaagcattggaccttgtttcagatcctgaatatataaatctcatgaagaataaattagatccagaaggattaggaatcatattattgggcccatttcttcaagaattttttcctgatcagggctccagtggtccagaatcttttactgtctaccactacaatggattgaagcagtcaaattataatgaaaaggtcatgtacgtagaagggactgcagttgtgatgggttttgaagatcccatgctacagacagatgacactcctattaaacgctgtctgcaaaccaaatggccatacattgagttactctggaccacagatcgctctccttcactaaattaatttgtctaagtatttataaggaagatcttaataacagatgttgaaagaaggagtcaagactggcaattggctggattaagctaaacactggtatcactgattaactgtaaataacaattaaaaacacattttcagtgtttaaaaaaaaaa

SEQ ID NO: 322 - DNA, 1347 bp, Homo sapiens
  CDS (249)..(1259)
ccgactgatcgccgtcagcaccggcccggaattcccgggtcgacccacgcgtccgcgagtgggaagcggttcaagagatggggtgaagggtggttcaccggttcttcaagtcctcagccttctggcccgcggaagttaagcaaccaagaggcgggcctaagaccggaagcaggaaggagggcgcaggaagcagggcgccgcagcctgtcgtacggtccttctgtgggtctgtcggtgccgagggcaggatggagaagctgcggctcctgggcctccgctaccaggagtacgtgactcgtcacccggccgccacggcccagctggagacagcagtgcggggcttcagttacctgctggcaggtcgattcgccgattcgcacgagctgtcagagctggtgtactctgcctctaacctgcttgtgctgctcaatgacgggatcctacggaaggagcttcggaaaaagttgcctgtgtcgctgtcccagcagaagctgctgacatggctgagcgtgctggagtgcgtggaggtgttcatggagatgggagctgccaaggtgtggggtgaagtgggccgctggcttgtcatcgccctcatccagctggccaaggctgtactgcggatgctcctgctgctctggttcaaggctggcctccagacttcaccccctatcgttccactggacagagagacccaggcacagcccccggatggtgaccacagccctggcaaccatgagcagtcctacgtggggaagcggtcaaaccgggtggtgcgaaccctccagaacacgccgtccctgcactccaggcactggggagctccccagcagcgggagggacggcagcagcagcatcacgaggagctgagtgcgacccccacccccctggggctgcaggagaccatcgcagagtttttgtacattgcccggccgctgctgcacttgctcagcctgggcctgtggggtcagaggtcgtggaaaccctggctcttggctggtgttgtggacgtgaccagcctgagcctcctgagtgacagaaagggcctgacccggagggagcggcgggagctgcggcgccggaccatcctgctgctctactacctgctgcgctctcctttctacgaccgcttctccgaggccaggatcctcttcctgctccagttgctggccgaccacgtccctggcgttggcctggtcacaaggccgctcatggattacttgcccacctggcagaaaatctacttctacagttggggctgacagacctcccggaaggagggtgtggggaggggtggggcagggagcccctcttccctaataaaactgactccggcagcgaaaaaaaaaa

SEQ ID NO: 323 - DNA, 1207 bp, Homo sapiens
  CDS (562)..(918)
ccggaccggaattcccgggtcgacccacgcgtccgccggaattatatatgaataataagcactgtggaataacttgtgagaggattctgtgctaaattagaactttttcaaaggtggcctgaaaagaggggacttcagcttaattccagagatggtaattctggggacgtgttttacttggagctggacttcttgtgacgtggtgatgaagaaagagggaaacctaaacttccttgtccatttttggtgtggatgtctcagagacatcaggttgtagcagtgtctgaaatttgtttcctaagtgtctctgaagtccagcgcttctcttcactgtaaagaactgaggggtgggcagtacagacctgtctgttggtcctgtgttctgagcattgcagaacctcgactgctgacttgggacccccctgggctctgctgtacctgcaaaccagaggcactgctatccaggcctttgccccagctcctcggccctggatggtgctgaaaggggcatcatctgtggggtcggctggctctcatggctgggccgctcaggcatagaggatgcaggtggctgctcacaatctggaatttgctctgtctttctgtagttgcagcatttgcaagaagaagcagaatagacacttcattgttccagcttctcgcttcaagctcctgaagggagctgagcacataacgacttacacgttcaatactcacaaagcccagcataccttctgtaagagatgtggcgttcagagcttctatactccacgatcaaaccccggaggcttcggaattgccccccactgcctggatgagggcactgtgcggagtatggtcactgaggaattcaatggcagcgattgggagaaggccatgaaagagcacaagaccatcaagaacatgtctaaagagtgagcttctgcctctcctgccctgaaaaggaggaatgattggggccagcaactttgctctccctgccgtgcctcggtggtgctcctgaatgtggctgacctgggctgctggttccgttgactagggtcatcttgatctctgcagtttgctccagctaccagtttctttaggcagctctttgtcctccctctgcccagattttgatgtagtctaattgacatccttctcttcccaacttttgtgtgatcttttaggaaaaaaaataaatatttttaacattaaaaaaaaaaaa

SEQ ID NO: 324 - DNA, 651 bp, Homo sapiens
  CDS (444)..(602)
gaccagaatctccggtccgcttccctccagctgaaactaaaaatgaagagccagcagcccacggtagtggaggagactgtgagagaggatgcctcctccccaggagcatatggcttcctattaactgaagaactgcaggttgcaggtgtgtggcatgcacgaggagtctggcgtctgctcccgttttgactaatagaacctaaaggagcttaagaaatcaggtgaatgtgaatcagctttgcacacgtcttttaaattgattatctttatgtttaggctctaaacaggattactttatcggcgtcgctaatagcagttcatttattaagttgattatcaataatccctgacaaatgagtcataagacgatggttttatccattcatccagtgtgtgaggagcacatataatgcctcacagtgaaggcgcaatggcaatgataaatgagacagctcttgctttcaaaggctatagggactctcgggaaagcaaacaggcatgtggtagagacaagcacgagcagtgaggaaatatgctgcaggggacgtaactccagggagccttcccagaggaggcaatcagagctgggcatggaaggatgaccggcagcaaggaggagacggtgaacagccgacttcaagtcagaggagc

SEQ ID NO: 325 - DNA, 2615 bp, Homo sapiens
  CDS (125)..(2272)
attgaaagctgtacgcctgcggtacatggacggctttcccgggtcgacgatttcgtagaagctgggggtggagccggaggaggaaggcggcggcgacgacgaggaagacgccgaggcctgggccatggaactggcggacgtgggggcggcagccagctcgcagggagttcatgatcaagtgttgcccacaccaaatgcttcatccagagtcatagtacatgtggatctggattgcttttatgcacaagtagaaatgatctcaaatccagagctaaaagacaaacctttaggggttcaacagaaatatttggtggttacctgcaactatgaagctaggaaacttggagttaagaaacttatgaatgtcagagatgcaaaagaaaagtgtccacagttggtattagttaatggagaagacctgacccgctacagagaaatgtcttataaggttacagaattactggaagaatttagtccagttgttgagagacttggatttgatgaaaattttgtggatctaacagaaatggttgagaggagactacagcagctgcaaagtgatgaactttctgcggtgactgtgtcgggtcatgtatacaataatcagtctataaacctgcttgacgtcttgcacatcagactacttgttggatctcagattgcagcagagatgcgggaagccatgtataatcagttggggctcactggctgtgctggagtggcttctaataaactgttggcaaaattagtttctggtgtctttaaaccaaatcaacaaacagtcttattacctgaaagttgtcaacatcttattcatagtttgaatcacataaaggaaatacctggtattggctataaaactgccaaatgtcttgaagcactgggtatcaatagtgtgcgtgatctccaaaccttttcacccaaaattttagaaaaagaattaggaatttcagttgctcagcgtatccaaaagctcagttttggagaggataactcccctgtgatactctcaggaccacctcagtcctttagtgaagaagattcatttaaaaaatgttcatctgaagttgaagctaaaaataagattgaagaactacttgctagtcttttaaacagagtatgccaagatggaaggaagcctcatacagtgagattaataatccgtcggtattcctctgagaagcactatggtcgtgagagtcgtcagtgccctattccttcacatgtaattcagaaattagggacaggaaattatgatgtgatgaccccaatggttgatatacttatgaaactttttcgaaatatggtgaatgtgaagatgccatttcaccttacccttctaagtgtgtgcttctgcaaccttaaagcactaaatactgctaagaaagggcttattgattattatttaatgccatcattatcaactacttcacgctctggcaagcacagttttaaaatgaaagacactcatatggaagattttcccaaagacaaagaaacaaaccgggatttcctaccaagtggaagaattgaaagtacaagaactagggagtctccactagataccacaaatttttctaaagaaaaagacattaatgaattcccactctgttcacttcctgaaggtgttgaccaagaagtcttcaagcagcttccagtagatattcaagaagaaatcctttctggaaaatctagggaaaaatttcaagggaaaggaagtgtgagttgtccattacatgcctctagaggagtattatctttcttttctaaaaaacaaatgcaagatattcccataaatcctagagatcatttatccagtagcaaacaggtatcctctgtatctccttgtgaaccgggaacatcaggctttaatagcagtagttcttcttacatgtctagccaaaaggattattcatattatttagataatagattaaaagatgaacgaataagtcaaggacctaaagaacctcaaggattccactttacaaattcaaaccctgctgtgtctgcttttcattcatttccaaacttgcagagtgagcaacttttctccagaaaccacactacagatagccataagcaaacagtagcaacagactctcatgaaggacttacagaaaatagagagccagattctgttgatgagaaaattactttcccttctgacattgatcctcaagttttctatgaactaccagaagcagtacaaaaggaactgctggcagagtggaagagaacaggatcagatttccacattggacataaataagcatattcagcaaaaaggtctgaaaagcaagggaataccattattttcggattagcggtttattaagctcttctatattaaacactaatagatattcaataacggagtaaactgttccagataaagcaagaatagttgcaagaagtaaattctggcacaaagcgtaaaaatataacagaagaaataatgtaaaatactatcttttatgtctaaagccattttatattacttttcaataaaaagaatatcatggtcaaaaaaaaaaaaaaaaaagggcggccgctctagagtatccctcgaggggcccaagcttacgcgtacccagctttcttgtacaaagtgg

SEQ ID NO: 326 - DNA, 1506 bp, Homo sapiens
  CDS (107)..(964)
atttggccctcgaggccaagaattcggcacgagggaaaccccggactgggatcatttggccctcgaggccaagaattcggcacgagggaaaccccggactgggatcatggcagccgagactcggaacgtggccggagcagaggccccaccgccccagaagcgctactaccggcaacgtgctcactccaaccccatggcggaccacacgctgcgctaccctgtgaagccagaggagatggactggtctgagctatacccagagttcttcgctccactcactcaaaatcagagccacgatgacccaaaggataagaaagaaaagagagctcaggcccaagtggagtttgcagacataggctgtggctatggtggcctgttagtggaactgtcaccgctgttcccagacacacttattctgggtctggagatccgggtgaaggtctcagactatgtacaagaccggattcgggccctacgcgcagctcctgcaggtggcttccagaacatcgcctgtctccgtagcaatgccatgaagcaccttcctaacttcttctacaagggccagctgacaaagatgttcttcctcttccccgacccacatttcaagcggacaaagcacaagtggcgaatcatcagtcccaccctgctagcagaatatgcctacgtgctaagagttggggtgagttgggatcggagggatgatggggggctggtgtataccataaccgatgtgctggagctacacgactggatgtgcactcatttcgaagagcacccactgtttgagcgtgtgcctctggaggacctgagtgaagaccccgttgtgggacatctaggcacctcaactgaggaggggaagaaagttctacgtaatggagggaagaatttcccagccatcttccgaagaatacaagatcccgtcctccaggcagtgacctcccaaaccagcctgcctggtcactgactgcttactctaccttagctggacctcgtctcccagggattagagaaaagagcaggagtcctgggtcttcccagttgagactgctggagctgagacacagtactctcttaaagaaggtggggagctgcccagggcagaacccactggtgttcatgactacccctggctcctctcaccttgtccctccactgccaacagaaaacaaagcagctgactgagatggtcaaaggactttggaccataggggatctttggaaggctgtggggtcttgctcttccttagcactcctttctccttgtgagatctctcctcagctggaatgaggaatgtagtccatctaaactgcttgctaggctcaattaccacttctgtttgctttgtggatcctgggataacatgtatatgtgtacacaaaaaaaaaaaaaaaaaaaaaagggcggccgctctagagtatccctcgaggggcccaagcttacgcgtacccagctttcttgtacaaagtggtccctatagtgagtcgtatatagctagccacacgtct

SEQ ID NO: 327 - DNA, 2913 bp, Homo sapiens
  CDS (118)..(2913)
gaaaagccaacgctccacgcccattttcgtcagggaatatgtacccatcggctttagataaataaggaaacagggggctgaaccagaactaagagaagattgggcagagagaaggcaatggcgagtccacctaggggctggggctgcggagagctgctgctgcccttcatgctcctggggacgctgtgcgagccaggatccgggcagatccgctactcgatgccggaggagctggacaaaggctccttcgtcggcaacatagccaaggaccttgggctggagccccaggagctggcggagcgcggagtccgcatcgtctccagaggtaggacgcagctttttgccctgaacccgcgaagcggcagcttggtcaccgcgggcaggatagaccgggaggagctctgcgctcagagcccactgtgtgtggtgaactttaacatcttggttgagaacaaaatgaaaatttatggagtagaagtagaaataatcgatattaatgataacttcccgcgtttccgggatgaagagttaaaagtaaaagttaatgaaaatgcggctgcagggacacggttagtgcttcccttcgcgcgggatgcggatgtgggtgtgaactctctccggagttaccagctcagctccaatctgcacttctctctggatgtggtaagcggaactgatggacaaaagtatccggagctggtgttggaacagcccctagaccgcgagaaagagactgttcacgacctcctcctcacagctttagatggcggagacccggtactctccggcaccacgcacatccgtgttacggtcctcgacgcaaacgacaatgcgcccctgttcaccccatccgagtacagcgtgagtgttccagagaacatacctgtgggcactcggctgctcatgctaaccgccacggatccagatgagggaataaacgggaaattgacctactcttttcgcaatgaagaagaaaaaatttcggagactttccaacttgattccaacctgggggaaatctcaactctacaatcactggactatgaagaatccagattctacctcatggaagtggtagctcaggatggaggcgctcttgttgccagcgctaaggtggtggtcacagtacaggacgtgaatgacaatgcccccgaagtgatcctcacctctctgaccagttcgatctctgaagactgtcttcccggaactgtaatcgcgctgtttagcgtacatgatggtgattctggagaaaatggtgagattgcatgctctattcctaggaatttgccttttaaattggagaagtcagttgataattactatcacctattaacaactagggacctggacagagaagagacttcagattataatatcactttaaccgtcatggaccatggaaccccgcccctctctacagaaagccacatccccttgaaagtagcagacgttaatgacaacccacccaatttccctcaagcctcctactccacctctgtcacagaaaacaatcccagaggtgtctctatcttctctgtgacagcccatgaccccgacagcggcgacaacgctcgagtcacctactccctggctgaagacacatttcagggggcgcccttgtcctcctatgtatccattaactctgacaccggtgtcctgtatgctctgagatccttcgactatgagcagttgagagacctacagttgtgggtgacagccagcgacagtgggaaccctccacttagcagcaacgtgtcgctgagcctgtttgtgctggaccagaacgacaatacgcctgagatcctgtaccccgccctccccacagacggttccacgggcgtggagctggcgcctcgctccgcagaacctggctacctggtgaccaaggtggtagcggtggacaaagattcaggccagaacgcctggctgtcctaccgcctgcttaaggccagcgagccaggactctttgcggttgggctgcacacgggcgaggtgcgcacagcgcgagccctgctggacagagacgcgctcaagcagagcctcgtggtggccgtcgaagaccatggccagccccctctgtcagccaccttcacggtcaccgttgccgtggccgacaggatccctgacatcctggctgacctaggcagtatcaagacccccattgaccctgaggatctggacctcacactctatcttgtggtggcagtggctgcagtctcctgcgtcttcctggccttcgtcatcgtgctgctggtgctcagactgaggcgctggcacaagtcacgcctgcttcaggctgaaggcagcaggttggcgggtgtgcccgcctcgcactttgtgggcgtggatggggttcgggctttcctgcagacctattcccacgaggtctccctcaccgcggactcgaggaagagtcacctgatctttccccagcccaactacgcagacacgctccttagtgaagagagctgtgagaaaagcgagcctcttctgatgtctgataaggtagatgcaaacaaagaagaacggcgagttcagcaagccccgcccaacacggactggcgtttctctcaggcccagagacccggcaccagcggctcccaaaatggcgatgacaccggcacctggcccaacaaccagtttgacacagagatgctgcaagccatgatcttggcgtccgccagtgaagctgctgatgggagctccaccctgggagggggtgccggcaccatgggattgagcgcccgctacggaccccagttcaccctgcagcacgtgcccgactaccgccagaatgtctacatcccaggcagcaatgccacactgaccaacgcagctggcaagcgggatggcaaggccccagcaggtggcaatggcaacaagaagaagtcgggcaagaaggagaagaagtaa

SEQ ID NO: 328 - DNA, 1347 bp, Homo sapiens
  CDS (167)..(1291)
  misc_feature (1)...(1347): n = a,t,c or g
aattcgccnnnacatctccacggaatgtagcgcgggggaccgcggcccccagcagagcccgcctgcccggcttgtctaccatcagagggagatctctgccccctggggctgagagaccccaacctttccccaagctgaagctgcagggtattgaggtaccagccagatgtcttcccacaaaggatctgtggtggcacaggggaatggggctcctgccagtaacagggaagctgacacggtggaactggctgaactgggacccctgctagaagagaagggcaaacgggtaatcgccaacccacccaaagctgaagaagagcaaacatgcccagtgccccaggaagaagaggaggaggtgcgggtactgacacttcccctgcaagcccaccacgccatggagaagatggaagagtttgtgtacaaggtctgggagggacgttggagggtcatcccatatgatgtgctccctgactggctaaaggacaacgactatctgctacatggtcatagacctcccatgccctcctttcgggcttgcttcaagagcatcttccgcattcatacagaaactggcaacatctggacccatctgcttggtttcgtgctgtttctctttttgggaatcttgaccatgctcagaccaaatatgtacttcatggcccctctacaggagaaggtggtttttgggatgttctttttgggtgcagtgctctgcctcagcttctcctggctctttcacaccgtctattgtcattcagagaaagtctctcggactttttccaaactggactattcagggattgctcttctaattatggggagctttgtcccctggctctattattccttctactgctccccacagccacggctcatctacctctccatcgtctgtgtcctgggcatttctgccatcattgtggcgcagtgggaccggtttgccactcctaagcaccggcagacaagagcaggcgtgttcctgggacttggcttgagtggcgtcgtgcccaccatgcactttactatcgctgagggctttgtcaaggccaccacagtgggccagatgggctggttcttcctcatggctgtgatgtacatcactggagctggcctttatgctgctcgaattcctgagcgcttctttcctggaaaatttgacatatggttccagtctcatcagattttccatgtcctggtggtggcagcagcctttgtccacttctatggagtctccaaccttcaggaattccgttacggcctagaaggcggctgtactgatgacacccttctctgagccttcccacctgcggggtggaggaggaacttcccaagtgcttttaaaaataa

SEQ ID NO: 329 - DNA, 931 bp, Homo sapiens
  CDS (66)..(539)
agccatctttctcttgccgcgtgctggtgttggaggaccctccctgcttcagatttaccaacagcatgaatcaagaaaagttagccaaacttcaggctcaggtccggatagggggcaagggtacagctcgcagaaagaagaaggtggtacatagaacagccacagctgatgacaaaaagcttcagagttctctaaaaaaactggctgtgaataatatagctggtattgaagaggtgaacatgattaaagatgatgggacagttattcatttcaacaatcccaaagtccaagcttccctttctgctaatacctttgcaattactggtcatgcagaagccaaaccaatcacagaaatgcttcctggaatattaagtcagcttggtgctgacagtttaacaagccttaggaagttagctgaacagttcccacggcaagtcttggacagtaaagcaccaaaaccagaagacattgatgaggaagatgatgatgttccagatcttgtagaaaattttgatgaggcatcaaagaatgaagctaactaaaagtttggtttttggaagctggcatggactagatttaacaaatcagctatgtggttccaaagttttacagacatggagaacatcacctgttactagttcagtaatataaatattttgtatattaataatgctgtttgttcagcatttttcggtcatttgattttgcattttgcacttcctcccaggatatttttttggtcaaaatatgaagtattggtgcagtttgagggtgttttggtttttgattcctggtttttttgttttttgtttggggtatttttggtgtatgtatgtttatgtatgtgtgtgggtatgtgtgtatacagtggagagcaaattggaaaacagttctatttatcctcctccctccccagtagaaataaaaaaaa

SEQ ID NO: 330 - DNA, 1394 bp, Homo sapiens
  CDS (230)..(1036)
tcggcgagggaggaggcgggggagctgcgaacacccagacccaaaccctgacatgctctggggcggagaggaggaagccaggagctgagcgcagccgcgggggctgcttcgccctccggctccgagcgccgggctccgggcgccctgccctgcgcctggggcagcagcctttgctggtcttgggggcgccccccgcttcccgccccgggggtccgcggccggcaggaccatgctgctgaaagagtaccggatctgcatgccgctcaccgtagacgagtacaaaattggacagctgtacatgatcagcaaacacagccatgaacagagtgaccggggagaaggggtggaggtcgtccagaatgagccctttgaggaccctcaccatggcaatgggcagttcaccgagaagcgggtgtatctcaacagcaaactgcctagttgggctagagctgttgtccccaaaatattttatgtgacagagaaggcttggaactattatccctacacaattacagaatacacatgttcctttctgccgaaattctccattcatatagaaaccaagtatgaggacaacaaaggaagcaatgacaccattttcgacaatgaagccaaagacgtggagagagaagtttgctttattgatattgcctgcgatgaaattccagagcgctactacaaagaatctgaggatcctaagcacttcaagtcagagaagacaggacggggacagttgagggaaggctggagagatagtcatcagcctatcatgtgctcctacaagctggtgactgtgaagtttgaggtctgggggcttcagaccagagtggaacaatttgtacacaaggtggtccgagacattctgctgattggacatagacaggcttttgcatgggttgatgagtggtatgatatgacaatggatgatgttcgggaatacgagaaaaacatgcatgaacaaaccaacataaaagtttgcaatcagcattcctcccctgtggatgacatagagagtcatgcccaaacaagtacatgacaatggatgaagtccgagaatttgaacgagccactcaggaagccaccaacaagaaaatcggcattttcccacctgcaatttctatctccagcatccccctgctgccttcttccgtccgcagtgcgccttctagtgctccatccacccctctctccacagacgcacccgaatttctgtccgttcccaaagatcggccccggaaaaagtctgccccagaaactctcacacttccagaccctgagaaaaaagccaccctgaatttacccggcatgcactcttcagataagccatgtcggcccaaatctgagtaactttatataaatatctcatggggttttatattttcaaaaaaaaaaaa

SEQ ID NO: 331 - DNA, 772 bp, Homo sapiens
  CDS (301)..(615)
agaaaaacttgaaaccctcgacgcccgtcgtaccggtccggaattcccgggtcgacccacgcgtccgcggacgcgtggggtgccggcgggagagctggcttggggcgctggcacctcctcttacagctttactcctgccagcttgggaaaaggccggagaaggtgaaattctgtgtgctccctccggcgagagactttgtcagctcccgcacagtaacatcctgaataaagtcaaaactcaaccaacaggtggaagtccaagaatccgagtggaggctcaccgaggcgaaggggccaaccatgggaaaggagagtggatgggactcaggcagggctgctgtagcagctgtggtcggaggagttgtggctgtggggactgtgctcgtggcgctcagtgccatgggcttcacctcagtaggaatcgccgcatcctccatagcagccaagatgatgtctacagcagccattgccaacgggggcggagttgctgctggcagtctggtggctattctgcagtcagtgggggcagctggactctctgtgacatctaaagttatcgggggctttgctgggacagctcttggggcctggctgggttcacccccttccagctgaacaccacactgaggcagggagttggctctcttggtggagatgactttcctgggcctctggatgacaatcttccaaaggacaagtctcctactcccaaaactatttaaggaagcatgaaaaataaagatgctggttatcttctcctaaaaaaaaaaaa

SEQ ID NO: 332 - DNA, 931 bp, Homo sapiens
  CDS (336)..(716)
attgagaccccttttgatagcctgcggaaccggtccggaattcccgggtcgacccacgcgtccggccgcgggcgcaaagctggcgctctatcccacggagttggttaactcctctcaccggcccctggaaagggttccaagtcctttagtacccgacgctgtctgggaattccgggcgtttcggctccttggtcgcagaggcaggaggcgtgcgtggcaggagggttcgggttatatactcctaggtcctgggacagaatagttacgacctctgggacaggaactcttctctcttttgttaataaacttccaactccctcctcagacccgaccgcatgtctgtcatggacctcgccaatacttgctccagctttcagtcggacctggatttctgttcagattgcggctcggtcctgcctctgcccggggctcaggatacggtcacctgtattcgctgtggcttcaacatcaacgttcgggactttgaggggaaggttgtgaagacttcggttgtgttccaccaactggggacagccatgcctatgtcggtggaggaagggcctgagtgccagggacctgtggttgacaggcgctgccctcgatgtggtcatgaaggaatggcataccacaccagacagatgcgttcagccgatgaagggcaaactgtcttctacacctgtaccaactgcaagttccaggagaaggaagactcttgacctttttcctgggcaactctacagtccctccctcctttcggaaggtgaaggatactgggtttttagatgccttgtccatcctgtctggttgcaatgttttgctcccagaagagaatcagatcatcatgtggggattaccattgttcctggagtactcctacccttagttgaatttccttattaaagttatatttttctataaaaaaaaaaaaaaa

SEQ ID NO: 333 - DNA, 2043 bp, Homo sapiens
  CDS (189)..(1571)
  misc_feature (1)...(2043): n = a,t,c or g
tcttattcggacgagggcggctgccggcgtagtgagcccgccgccgtggagtgtagcggaaagggctcgccgtccttctccgtttctcgctgcttcgggacgcgctctctgcggctctgtgagcgcccctgagcgccggcagcggccgcggggggatcttcaggttatcttatgatgaggcttttgctatggctaatgatcccttggaaggcttccatgaagtaaaccttgcttcacctacttctccggaccttcttggtgtgtatgaatcaggaactcaagagcagactacctcaccaagtgtcatctaccggccacacccttcagctttatcctctgtacctatccaggcaaatgcattagatgtttctgaacttcctacacaacccgtgtattcatcccccagacgtttaaattgtgcggaaatatctagtatcagctttcatgttacagacccagccccttgctctacctctggagtcacagctggattaactaaattaactacaagaaaggacaactataatgcagagagagagtttttacagggtgctactataacagaggcttgcgatggcagtgatgatatttttgggttgagtactgatagtctgtctcgtttacgaagcccatctgttttggaagttagagaaaagggctatgaacgattaaaagaagaactcgcaaaagctcagagggaactgaagttaaaagatgaagaatgtgagaggctttcaaaagtgcgagatcaacttggacaggaattggaagaactcacagctagtctatttgaggaagctcataaaatggtgagagaagcaaatatcaagcaggcaacagcagaaaaacagctaaaagaagcacaaggaaaaattgatgtacttcaagctgaagtagctgcattgaagacacttgtattgtccagttctccaacatcacctacgcaggagcctttgccaggtggaaagacaccttttaaaaaggggcatacaagaaataaaagcacaagcagtgctatgagtggcagtcatcatgacctcagtgtgatacagccaattgtaaaagactgcaaagaggctgacttatccttgtataatgaattccgattgtggaaggatgagcccacaatggacaggacgtgtcctttcttagacaaaatctaccaggaagatatctttccatgtttaacattctcaaaaagtgagttggcttcagctgttctggaggctgtggaaaacaatactctaagcattgaaccagtgggattacaacctatccggtttgtgaaagcttctgcagttgaatgcggaggaccaaaaaaatgtgctctcactggccagagtaagtcctgtaaacacagaattaaattaggggactcaagcaactattattatatttctcctttttgcagatacaggatcacttctgtatgtaacttttttacatacattcgatacattcagcagggactcgtgaaacagcaggatgttgatcagatgttttgggaggttatgcagttgagaaaagagatgtcattggcaaagctgggttatttcaaagaggaactctgatgctctgcgtgggaccatgcctgaactccccgaataactgaaaaatggctgaatatttttatggttacttgatatttatttccaaggagtgagcctaagacttttttccccttttgcaaattgctctaagaagtaccatgatttcttttaaactgatctatgctgtgtttgcttattctttagttgaacacactatgaagaattccaggtgtactagtgaatgtaatttatagttgccaaaaaaaagcgcgcggctgaatttagtagtagagcgacctggaatccgacggtactgcagcgtacactttctataggagtcgatagagctgcgaacatgtcaagtgttctggtgaatgtacgcgcnatcaccacatcgagcgacataatgtagctggggctagagggcacccatatgctgccatgcgctcatcggactgcggcacgcatagacgcacgcggaagcgtcgatggc

SEQ ID NO: 334 - DNA, 797 bp, Homo sapiens
  CDS (94)..(666)
  misc_feature (1)...(797): n = a,t,c or g
aattgaagccgctcgcnngnnncnnnattgaaagtcgtacgcctgcaggtaccggtccggaattcccgggtcgacccacgcgtccggcagagcatggcggcgggcgagcttgagggtggcaaacccctgagcgggctgctgaatgcgctggcccaggacactttccacgggtaccccggcatcacagaggagctgctacggagccagctatatccagaggtgccacccgaggagttccgcccctttctggcaaagatgagggggattcttaagtctattgcgtctgcagacatggatttcaaccagctggaggcattcttgactgctcaaaccaaaaagcaaggtgggatcacatctgaccaagctgctgtcatttccaaattctggaagagccacaagacaaaaatccgtgagagcctcatgaaccagagccgctggaatagcgggcttcggggcctgagctggagagttgatggcaagtctcagtcaaggcactcagctcaaatacacacacctgttgccattatagagctggaattaggcaaatatggacaggaatctgaatttctgtgtttggaatttgatgaggtcaaagtcaaccaaattctgaagacgctgtcagaggtagaagaaagtatcagcacactgatcagccagcctaactgaagatgatgtatgaaggagttggagttgttgaaaccaaggtgtccatgatccctccccactgaccttttctaagaaaattcttgtgcccgcattggtattaaatcctcgcattcagtcttaaaaaaaaaaaa

SEQ ID NO: 335 - DNA, 1102 bp, Homo sapiens
  CDS (76)..(408)
  misc_feature (1)...(1102): n = a,t,c or g
tatgattatggacgtccgcaggnaccggnccggaattcccgggtcgacccacgcgtccgggcttagttaggagctatggctaaacatcatcctgatttgatcttttgccgcaagcaggctggtgttgccatcggaagactgtgtgaaaaatgtgatggcaagtgtgtgatttgtgactcctatgtgcgtccctgcactctggtgcgcatatgtgatgagtgtaactatggatcttaccaggggcgctgtgtgatctgtggaggacctggggtctctgatgcctattattgtaaggagtgcaccatccaggagaaggacagagatggctgcccaaagattgtcaatctggggagctctaagacagacctcttctatgaacgcaaaaaatacggcttcaagaagaggtgattggtgggtggccccttcctccccccaacatcagtctgctgcagctgccagaaaacatgcctactactaccagcagaaagggagcagagcccagagcatcaccaggagtgcctgctagtgtactggcagcttgccaccccctcctctcccttcacccagacacgtggtagggatggaaaaggattcttcacagagcactctggcacaccatatcggagaaaacttgatagattagttaatggtttttcttgaattcgagaagcatagatctgttctccatattggtatgttctccctcaaccaagatcttctaaaaagaaataatattttagtcttctgcttgaggaactgactgtgaagcgacgcccagtgaaaaacatgttcttgcagcagctctggtggcagctgtccttgaggaacctttggtgtgtggtgggaagctatcagaacaagaaatgtaggcatttcccgtttttttggggggggggggggggggggccagggctctgccctcttgaaaggcatttacttgtttaacacttgtccagctacagtggggtacagtagctggctattcacaggcatcatcatagcccactagtctcatattattttccttttgagaaattggaaactctttctgttgctattatattaataaagttggtgtttattttctggtaaaaaaaaaaaa

SEQ ID NO: 336 - DNA, 681 bp, Homo sapiens
  CDS (125)..(502)
cccccccccccgccccattgtatagcagtaccattcgtataacgagacccaagctggctagcgtttaaacttaagcttggtaccgagctcggatccactagtccagtgtggtggaattcgcgacatgaaactgcttacccacaatctgctgagctcgcatgtgcggggggtggggtcccgtggcttccccctgcgcctccaggccaccgaggtccgtatctgccctgtggaattcaaccccaacttcgtggcgcgtatgatacctaaagtggagtggtcggcgttcctggaggcggccgataacttgcgtctgatccaggtgccgaaagggccggttgagggatatgaggagaatgaggagtttctgaggaccatgcaccacctgctgctggaggtggaagtgatagagggcaccctgcagtgcccggaatctggacgtatgttccccatcagccgcgggatccccaacatgctgctgagtgaagaggaaactgagagttgattgtgccaggcgcccagtttttcttgttatgactgtgtatttttgttgatctataccctgtttccgaattctgccgtgtgtatccccaacccttgacccaatgacaccaaacacagtgtttttgagctcggtattatatatttttttctcattaaaggtttaaaaccaaaaaaaaaaaa

SEQ ID NO: 337 - DNA, 2352 bp, Homo sapiens
  CDS (168)..(1757)
  misc_feature (1)...(2352): n = a,t,c or g
agtggcgttttaactganttactgacgctntccgaattcggcacgagcctactccgagaggccccgggtccctctgccacaacttctgtcgctctgccgcctgcaccgtgacccgcactattcacgggagccctagagaggacaccgggacacccagaagccgggaaatggattcagtggcctttgaggatgtggctgtcagcttcacccaggaggagtgggctttgctggatccttcccagaagaatctctacagggatgtgatgcaggaaaccttcaagaacctgacctctgtaggaaaaacatggaaagttcagaacattgaagatgagtacaaaaatcccaggagaaatctaagtcttatgagagagaaactctgtgaaagtaaagaaagtcatcactgtggagaaagcttcaaccagattgcagatgacatgctgaacaggaaaactcttcctggaataacaccatgtgaaagcagtgtgtgtggagaagttggcacgggtcattcatctcttaatacgcatatcagagctgacactggacacaagtcatctgagtatcaggaatatggagagaatccatatagaaataaggaatgtaagaaagccttcagttatcttgactcctttcaatcacatgataaagcttgcactaaagagaaaccctatgatggtaaagaatgtacagaaaccttcatttcccattcatgcattcaaagacacagggtaatgcacagtggagatggaccttataaatgtaagttttgtgggaaagccttctattttctcaatttatgtcttatccatgaacgaattcacactggtgtgaaaccatataagtgtaaacaatgtggtaaggcctttactcgttccactacccttccagtacatgaaagaactcacacaggagtgaatgccgatgaatgtaaagaatgtgggaatgcattcagttttcctagtgaaattcgtagacataaaaggtctcacactggagaaaaaccctatgagtgtaagcaatgtgggaaagtcttcatttctttcagttccattcagtatcataagatgactcacactggagagaaaccctatgaatgtaagcagtgtgggaaagcctttagatgtggctcacaccttcaaaagcatggaaggactcacactggagagaaaccctatgaatgtaggcaatgtggtaaagccttcagatgtacctcggaccttcaaaggcatgaaaagacacacactgaggataaaccctatggatgtaagcagtgtgggaaaggctttagatgtgcttcacaacttcaaattcatgaaaggacgcacagtggagagaaaccccatgaatgtaaggaatgtggaaaagtattcaagtatttttcttccttgcgtatacatgaaaggacgcacactggagagaagccccatgaatgtaagcaatgtggaaaagcattcaggtatttctcttccttgcatatacatgaaaggacacacactggagataagccatatgagtgtaaggtatgtggcaaagccttcacttgttccagttccattcgatatcatgaaaggactcacactggagagaaaccctatgaatgtaagcactgtggtaaggcctttatttccaattacattcgatatcatgaaaggactcacactggagagaaaccctatcaatgcaagcaatgtggcaaagcctttattcgtgccagttcatgtcgagaacatgaaagaactcataccattaatagatgagaaatccttttagtggaagcaacgggagaagctttctgttgtcccacttcctttgaaacacaagaaaagagagtggtgaaagaacctctggataactgctttttgaattgagaagagagacttgcgataggacaataaaatctagaagaacttggatggtttcgtaatacaattcacctatagccaatcttgcatgagatttcaaaggcacagaaaaggaaggcatcagtcacatattagaggccccacacagggagagaggtgtgtggctacccgcttccagcccattttcctgattctttggcttgttaatcgagaatatcccccaaatcacttgtctctgttcctcagagttgtaggtctccagatatgtccccagtgctccacattaaagataacatgcccactttgctgtttcttcagaaatgttaaaatgtttaccagagaactaataaatgttgttatggctggaaatactcactgatgcccaactcttctatagattgagttggtttaagaggtctactttgtattgcaagcattgttgtttctacggattagcgagcctgttcttgattaaaccaactagatggga

SEQ ID NO: 338 - DNA, 2285 bp, Homo sapiens
  CDS (260)..(331)
cggccgcccgcgatccagctccgacaacaggaattttctccgagagcgggccgggctcagttcagctgctgtccagacccggatcggcaacagtgccgcctccagacgttctcctgccgctcgcccgcccgtcccagcgcccccagccctcccgcgagggcgccccgggacggaaggatccaccagtctgtcggcgcccgccgttctcgtggtcgccgtcgccgtcgtcgtggtggtagtctccgccgtcgcctgggccatggccaattacatccacgtccctcccggctccccggaggtgcccaagctgaacgtcaccgttcaggatcaggaggagcatcgctgccgggagggggccctgagcctcctgcaacacctgcggcctcactgggacccccaggaggtgaccctgcagctcttcacagatggaatcacaaataaacttattggctgttacgtgggaaacaccatggaggatgtagtcctggtgagaatttatggcaataagactgagttattagtcgatcgagatgaggaagtaaagagttttcgagtgttgcaggctcatgggtgtgcaccacaactctactgtaccttcaataatggactatgctatgaatttatacaaggagaagcactggatccaaagcatgtctgcaacccagccattttcaggctaatagctcgtcagcttgctaaaatccatgctattcatgcacacaatggctggatccccaaatctaatctttggctaaagatgggaaagtatttctctctcattcccacaggatttgcagatgaagacattaataaaaggttcctaagtgatatcccaagctctcagattctccaggaagagatgacttggatgaaggagattctttccaacctgggctcacctgttgtgctttgccataatgacctattgtgtaagaatataatctacaatgagaaacaaggtgatgtacagttcattgattatgaatattctggatacaactacctggcatatgatattggaaatcatttcaatgaatttgcaggtgtgagtgatgtagactatagtctgtatccagatagagaactacagagtcagtggctgcgtgcttaccttgaagcctacaaagaatttaagggctttgggactgaagttactgaaaaggaggtagaaatactcttcattcaagtcaatcagtttgcattggcttctcatttcttttggggattgtgggctttgattcaagccaaatactccactattgagtttgatttccttgggtatgcaattgttcgttttaaccagtactttaaaatgaagcctgaggttactgcattaaaagtgcctgagtaaagaagagatttaattattctccagtagctgagcaatgcttgtgaatcttttcttaagaaatcccaaaaagccaatattagttaaaattctgttgtttaatttggttatcttgctttataaattatgcctctaaacaatcaaatctatttttgaaatagactgaatgatgtcaagaaatatacctactgctatccgtatgtggtggattagaaatgtgttaaatctgcaaaaggtataaagatgtcagtttaatttctttgataatttaacctatgttgtatgtgaattatttattataaacttagcacgattctgtgactgtttttctctgtttcacgttcgttgagtgtaagcaatgaaaatgtcccaaataagttttttaagttttactttaataagattaatttcagtaaacattctagttgttcagtgtaacctttttatcttgatgcattgtaagtaaaatgaatcatttactcttgaaatgccagtcattgactgatgtagataatttaggattttcatataaaaatagctgtttaggaaggtgaaatacattcactgtctctgttggtggtacatcttgttgaattcaatattagaaagtatttctttttggggtaatataacttagaattaaatccctgtttctctatgtagtctggcagtataaatataaatatttaccatataatcttggaataagtattagttaatgttaccaaaatctgtattaaataatgttttcaaatgctaaatatggtcgttactattttcagttttaaaaattttatagtatcaaattgtttctaaccaaaaatttccttttacttctagagatgctttatgtttttgattattaaatagtcactagtattgctaatttttgaaacaaatacccaaaatttatcatatgtagaaataagaaaaaaaa

SEQ ID NO: 339 - DNA, 1069 bp, Homo sapiens
  CDS (156)..(836)
gcggccgctccaacatgttaccattctgatgttggagccggttagcgaaccccaagagtgcagagtgtggagcgtggagcgccgggactgtgcacgcttgaccggaagcccagaccagtgcggtcctagccagagagaaaggacatttgccaacaatgagacacgaagcgcccatgcagatggcctctgcccaagatgccaggtacggccagaaagactcctctgatcagaactttgactacatgttcaaattactcatcatcggcaatagcagtgtggggaaaacatcttttctattccgttatgcagatgactcctttacatctgcattcgtcagcacagttgggatcgatttcaaagtaaaaactgtattcaaaaatgaaaagagaatcaagcttcagatttgggacacagcaggccaggaaagatacaggactatcaccacagcctattatcgtggagccatgggctttattttaatgtatgacattacaaatgaagaatccttcaatgcagtacaagattggtcaactcaaatcaaaacatactcttgggacaatgcccaagttattctggttgggaacaagtgtgacatggaagacgagcgggtcatctcaactgagcgaggtcaacatttaggagaacagcttgggtttgagttttttgaaacaagtgccaaggacaacattaatgtcaagcagacatttgagcgccttgtggatatcatctgcgacaaaatgtcagagagtttggagactgatcctgccatcactgctgcaaagcagaacacgagactcaaggaaactcctcctccaccgcagcccaactgtgcctgctagtgtccccgtgcacacaggcagctccagggggctctggttgccaacaaacagcatttgtaaatggtctattagccttcatttatactgcctaacaattatttgaaggaataaattgatgtcaatggctcgtacgcattcaattcttgggagctttcctgtttaatatgtggcaaatatgtgatcttaaatttataaggactatccatctataaacatctggtacctgcaaa

SEQ ID NO: 340 - DNA, 5371 bp, Homo sapiens
  CDS (3)..(4139)
tgatgaaccgccctggaattccggccgcgagtgcatcttccacgaacctaattcatctctccagcaaaggacacatctctccagcaaaggacacctctctccagcaaaggacacctgcagagatgtccccagtccttcacttctatgttcgtccctctggccatgagggggcagcctctggacacactcggaggaaactgcaagggaaactgccagagctgcagggcgtcgagactgaactgtgctacaacgtgaactggacagctgaggccctccccagtgctgaggagacaaagaagctgatgtggctgtttggttgccccttactgctggatgatgttgctcgggagtcctggctccttcctggctccaatgacctgctgctggaggtcgggcccaggctgaacttctccaccccaacatccaccaacatcgtgtcagtgtgccgcgccactgggctggggcctgtggatcgtgtggagaccacccggcgctaccggctctcgtttgcccaccccccgtcagctgaggtggaagccattgctctggctaccctgcacgaccggatgacagagcagcacttcccccatcccatccagagtttctcccctgagagcatgccggaacccctcaatggccctatcaatatactgggtgagggccggcttgcgctggagaaggccaaccaggagcttggtctggctttagactcttgggacctagacttctacaccaagcgcttccaggagctacagcggaacccgagcactgtggaggcctttgacttggcgcagtccaatagcgagcacagccgacactggttcttcaagggccagctccacgtggatgggcagaagctggtgcactcactgtttgagtccatcatgagcacccaggaatcctcgaaccccaacaacgtcctcaaattctgtgataacagcagtgcaatccagggaaaggaagtccgattcctacggcctgaggaccccacacggccaagccgcttccagcaacagcaagggctgagacatgttgtcttcacagcagagactcacaactttcccacaggagtatgcccctttagtggtgcaaccactggcacagggggccggattcgagatgtccagtgcacaggccgcggggcccacgtggtggctggcactgccggctattgctttggaaatctgcatattccaggttacaatctgccctgggaggatctaagcttccagtatcctgggaattttgcccggcccctggaggttgccattgaagccagtaatggagcttctgactatggcaacaagtttggggaaccagtgctggctggcttcgcccgctccttgggcctccagctcccagacggccagcggcgtgagtggatcaagcccatcatgtttagtgggggcattgggtccatggaagctgaccacataagcaaggaggccccagagccaggcatggaagttgtaaaggttggaggtcccgtctacaggattggagttggaggtggagctgcttcatctgtgcaggtgcagggagataacaccagtgacctggactttggggctgtgcagcgaggagacccggagatggaacagaagatgaaccgtgtgatcagggcttgtgtggaggcccccaagggaaaccccatctgcagccttcatgatcagggcgctggtggcaatggcaatgtcctaaaagagctgagtgacccagctggagccatcatttacaccagccgcttccagcttggggacccaaccctgaatgccctggaaatctggggggctgagtaccaggaatcaaatgctcttctgctgaggtcccccaaccgggacttcctgactcatgtcagtgcccgtgaacgttgcccggcttgcttcgtgggcaccatcactggagaccggagaatagtgctggtggacgatcgggagtgtcctgtcagaagaaatggccagggggatgcccccccgacacccccgccaacccctgtggacctggagctcgaatgggtgctgggcaagatgcctcggaaggagttcttcctgcagaggaagccccccatgctgcagcctctggccttgcccccagggctgagcgtgcaccaggctctggagagggttctgaggctgcccgccgtggccagcaagcgctacctcaccaataaggtggaccgctccgtgggaggcctggtggcccagcagcagtgcgtggggcccctgcaaactcctctggcagatgtagcggttgtggcactgagccatgaggagctcataggggctgccacagccttgggagaacagccagtcaagagcctgctggacccaaaagtcgccgcccggctggccgtggccgaagccctcaccaacctggtgtttgctctggtcactgacctccgggatgtgaagtgtagcgggaactggatgtgggcagccaagctcccaggggagggcgcagctttggcggatgcctgtgaggctatggtggcagtgatggcagccctgggtgtggcagtggatggtggcaaggactccctcagcatggctgctcgggttggcactgagaccgtgcgggctcctgggtcactggtcatctcagcctatgccgtctgcccagacatcacagccactgtgaccccagacctcaagcatcctgaagggagaggccatctgctctatgtggctctgagccctgggcagcaccggctcgggggcacagctctggcccagtgcttctcccagcttggggaacaccctccagacctggaccttcctgagaacttggtgcgggccttcagcatcactcaggggctgctgaaagaccgcctcctctgctcaggccacgatgtcagtgacggaggcctcgtcacatgcctgctggagatggcctttgctggaaattgcgggctacaggtggatgtgcctgtccccagggttgatgtcctgtctgtgctgttcgctgaggagccaggcctcgtgctggaggtgcaggagccagacctggcccaggtgctgaagcgttaccgggatgctggcctccattgcctggagctgggccacacaggcgaggccgggccccacgccatggtccgggtgtcagtgaacggggctgtggttctggaggagcctgttggggagctgcgagccctctgggaggagacgagtttccagctggaccggctacaggcagagcctcgctgtgtggcagaggaggaacggggcctgagggagcggatggggcccagctattgcctgccccccacctttcccaaagcctccgtgccccgtgagcctggtggtcccagcccccgagtcgccatcttgcgagaggagggcagtaatggagaccgggagatggccgatgccttccacttagctgggtttgaggtatgggacgtgaccatgcaggacctctgctctggggcaattgggctggacactttccgtggcgtggccttcgtgggcggcttcagctatgcagatgtcctgggctctgccaaagggtgggcagctgctgtgacctttcatcccagggctggggctgagctgaggcgcttccggaagcggccagacaccttcagcctgggcgtgtgtaatggctgtcaactgctggctctgctcggctgggtgggaggcgaccccaatgaggatgctgcagagatgggccctgactcccagccagcccggccaggccttctgctacgccacaacctgtctgggcgctacgagtctcgctgggccagcgtgcgtgtggggcctgggccagccctgatgctgcgagggatggagggcgccgtgctgcccgtgtggagtgcgcacggggaaggttacgtagcattttcttctccggaactccaagctcagattgaggccaggggcttggctccactgcactgggctgatgatgacgggaaccccacagagcagtaccctctgaatcccaatgggtccccagggggcgtggctggcatctgctcctgtgatggccgccacctggctgtcatgcctcaccctgagcgggccgttaggccttggcagtgggcatggcgaccccctccatttgatactctgaccacctccccctggctccagctctttatcaatgcccgaaactggaccctggaagggagctgctgactggccacaggggctcacctgggccccatggcttttcacctaagtgggtcctgccccctcccccatgaccttcaggagcaccccatattatttccaaaaatatcttggacagacaaggaccaaaatgccaaaatctcagcggactcgatgatctgcctgctgatgttccttctgtggctgtgtctattttcagttctgctctaacatggcatgccctttctcagcccaggaaacagcatgtggttcagagaaaagagcgacaaggaaaagttaggactcctgaggtccgaacaggggcttctgttgcccacttcacaacacccagtgatcaccggtgtgcaattgcctccttggctctgagggatgttttgcgctcccttttctcatcattggggttagcgggtgcagacaaattcagcaatagtatgcagatcagcccctcaccacctcattgttctcatctggaactgaaactttctggatttctcttgaagtgctacactgcactgaatgtaaggaattgttgcttgtggaagtttctcagcgtttctggctgtcttagggctggcctcagaacccagcattcctgttatttgcttctaaattagcagctctctttttttttttttttttgaggcagtctcactctgtcacccaggctggagtacaatggcgtgatctcggcccactgcaacctctgcctcctgggttcaagcaattttcctgcctcagcctcccgagtagctgggagtacaggcacacaccaccacacccagctaatttttgtatttttagtagagatagggtttcaccatgtctcccaggctggtctcaaactcctaacctcaagtgattcgcctgcctcggcctcccaaagtgctgggattacaggtgggagccactacagctggcccagcagctctgtttctgatagaggtggttggggctctcatccctagatcctaaccctttagtatgctggaattctactcttcacttactgcattgactgttgttgattagttattattgcaaagcactgtcaccggcctcagggagtttatgtgtaatagaattaaaaataatagctgtgtataacacttagctcaagccacgcatgtgtgaggcatttggtatgtatctgaattaattctcactaaaattcagcaaaggacttgatagcctctccccgccttttcaataaaggatgaatgaaggttgaaaaaaaaaaa

SEQ ID NO: 341 - DNA, 1293 bp, Homo sapiens
  CDS (197)..(748)
  misc_feature (1)...(1293): n = a,t,c or g
aggatggncnngnnagcacgccccattgaaaaccngttttgatatancgagtaccaagctggctagcgtttaaacttaagcttggtaccgagctcggatccactagtccagtgtggtggaattccagtgggccgcttggcggtgtcgttgcggtaccaggtccgcgtgaggggttcgggggttctgggcaggcacaatggcgtctcgagcaggcccgcgagcggccggcaccgacggcagcgactttcagcaccgggagcgcgtcgccatgcactaccagatgagtgtgaccctcaagtatgaaatcaagaagctgatctacgtacatctggtcatatggctgctgctggttgctaagatgagcgtgggacacctgaggctcttgtcacatgatcaggtggccatgccctatcagtgggaatacccgtatttgctgagcattttgccctctctcttgggccttctctcctttccccgcaacaacattagctacctggtgctctccatgatcagcatgggactcttttccatcgctccactcatttatggcagcatggagatgttccctgctgcacagcagctctaccgccatggcaaggcctaccgtttcctctttggtttttctgccgtttccatcatgtacctggtgttggtgttggcagtgcaagtgcatgcctggcagttgtactacagcaagaagctcctagactcttggttcaccagcacacaggagaagaagcataaatgaagcctctttggggtgaagcctggacatcccatcgaatgaaaggacactagtacagcggttccaaaatcccttctggtgattttagcagctgtgatgttggtacctggtgcagaccaggccaaagttctggaaagctccttttgccatctgctgaggtggcaaaactataatttattcctggttggctagaactgggtgaccgacagctatgaaacaaatttcagctgtttgaagttgaactttgaggtttttctttaagaatgagcttcgtccttgcctctactcggtcattctccccatttccatccattaccccttagccattgagactaaaggaaatagggaataaatcaaattacttcatctctaggtcacgggtcaggaaacatttgggcagctgctcccttggcaggctgtggtctcctctgcaaagcattttaattaaaaacctcaataaagatggccctgcccacactgtgccttgtgtttggggcttgatagagtgtgaaaggtgtgttgcttgaaaggtgtggccttagacacta

SEQ ID NO: 342 - DNA, 2202 bp, Homo sapiens
  CDS (167)..(1822)
ctcgttagtgccccctgtgtttggggccccgtgatctcaacggtcctgccctcggtctccctcttcccccgccccgccctgggccaggtgttcgaatcccgactccagaactggcggcgtcccagtcccgcgggcgtggagcgccggaggacccgccctcgggctcatggcggccccggtccgcctgggccggaagcgcccgctgcctgcctgtcccaacccgctcttcgttcgctggctgaccgagtggcgggacgaggcgacccgcagcaggcaccgcacgcgcttcgtatttcagaaggcgctgcgttccctccgacggtacccactgccgctgcgcagcgggaaggaagctaagatcctacagcacttcggagacgggctctgccggatgctggacgagcggctgcagcggcaccgaacatcgggcggtgaccatgccccggactcaccatctggagagaacagtccagccccgcaggggcgacttgcggaagtccaggactcttccatgccagttcctgcccagcccaaagcgggaggctctggcagctactggccagctcggcactcaggagcccgagtgatactgctggtgctctaccgggagcacctgaatcctaatggtcaccacttcttaaccaaggaggagctgctgcagaggtgtgctcagaagtcccccagggtagcccctgggagtgccccaccctggccagccctccgctccctccttcacaggaacctggtcctcaggacacaccagccagccaggtactcattgaccccagagggcctggagctggcccagaagttggccgagtcagaaggcctgagcttgctgaatgtgggcatcgggcccaaggagccccctggggaggagacagcagtgccaggagcagcttcagcagagcttgccagtgaagcaggggtccagcagcagccactggagctgaggcctggagagtacagggtgctgttgtgtgtggacattggcgagacccgggggggcgggcacaggccggagctgctccgagagctacagcggctgcacgtgacccacacggtgcgcaagctgcacgttggagattttgtgtgggtggctcaggagaccaatcctagagacccagcaaaccctggggagttggtactggatcacattgtggagcgcaagcgactggatgacctttgcagcagcatcatcgacggccgcttccgggagcagaagttccgactgaagcgctgtggtctggagcgccgggtatacctggtggaagagcatggttccgtccacaacctcagccttcctgagagcacactgctgcaggctgtcaccaacactcaggtcattgatggcttttttgtgaagcgcacagcagacattaaggagtcagccgcctacctggccctcttgactcggggcctgcagagactctaccagggccacaccctacgcagccgcccctggggaacccctgggaaccctgaatcaggggccatgacctctccaaaccctctctgctcactcctcaccttcagtgacttcaacgcaggagccatcaagaataaggcccagtcggtgcgagaagtgtttgcccggcagctgatgcaggtgcgcggagtgagtggggagaaggcagcagccctggtggatcgatacagcacccctgccagcctcctggccgcctatgatgcctgtgccacccccaaggaacaagagacactgctgagcaccattaagtgtgggcgtctacagaggaatctggggcctgctctgagcaggaccttatcccagctctactgcagctacggccccttgacctgagcttatgccgtgaaacagcccccagcccccgtctgtcccccaacccaggctagccagccttttaacaacatcttttggggtacaattagaatctaagtgtttgcagccatatgtgtcatgtagaagatgcctagccctggggaccttgtgaaatacgcaggaaccagggataccatctggtccagtggtttttaaacaaagctgcttagcacctggaattccctggtcagggagatggagtcagtggggcattgcagcttggaatctattttatgtcaccagttggtcctcatcaaataaaatttccttaggagtgcagagggctcattgggaaaataaaaataataaaaataaataaaacttcctaaaagaaaaaaaaa

SEQ ID NO: 343 - DNA, 2013 bp, Homo sapiens
  CDS (167)..(1150)
  misc_feature (1)...(2013): n = a,t,c or g
tttgacnatcgatgatcactagcccagngcggnggaattccacccccacacccaagtgagcggcctgctcactcctcagctgcaggagccagacgtgtggagtcccagcagaggccaacctgtgtctcttcatctccctgggaaaggtgcccccgaggtgaaagagatggcctggtggaaatcctggattgaacaggagggtgtcacagtgaagagcagctcccacttcaacccagaccctgatgcagagaccctctacaaagccatgaaggggatcgggaccaacgagcaggctatcatcgatgtgctcaccaagagaagcaacacgcagcggcagcagatcgccaagtccttcaaggctcagttcggcaaggacctcactgagaccttgaagtctgagctcagtggcaagtttgagaggctcattgtggcccttatgtacccgccatacagatacgaagccaaggagctgcatgacgccatgaagggcttaggaaccaaggagggtgtcatcattgagatcctggcctctcggaccaagaaccagctgcgggagataatgaaggcgtatgaggaagactatgggtccagcctggaggaggacatccaagcagacacaagtggctacctggagaggatcctggtgtgcctcctgcagggcagcagggatgatgtgagcagctttgtggacccggcactggccctccaagacgcacaggatctgtatgcggcaggcgagaagattcgtgggactgatgagatgaaattcatcaccatcctgtgcacgcgcagtgccactcacctgctgagagtgtttgaagagtatgagaaaattgccaacaagagcattgaggacagcatcaagagtgagacccatggctcactggaggaggccatgctcactgtggtgaaatgcacccaaaacctccacagctactttgcagagagactctactatgccatgaagggagcagggacgcgtgatgggaccctgataagaaacatcgtttcaaggagcgagattgacttaaatcttatcaaatgtcacttcaagaagatgtacggcaagaccctcagcagcatgatcatggaagacaccagcggcgactacaagaacgccctgctgagcctggtgggcagcgacccctgaggcacagaagaacaagagcaaagaccatgaagccagagtctccaggactcctcactcaacctcggccatggacgcaggttgggtgtgaggggggtcccagcctttcggtcttctatttccctatttccagtgctttccagccgggtttctgacccagagggtggaaccggcctggactcctcttcccaacttcctccaggtcatttcccagtgtgagcacaatgccaaccttagtgtttctccagccagacagatgcctcagcatgaagggcttggggacttgtggatcattccttcctccctgcaggagcttcccaagctggtcacagagtctcctgggcacaggttatacagaccccagccccattcccatctactgaaacagggtctccacaagaggggccagggaatatgggtttttaacaagcgtcttacaaaacacttctctatcatgcagccggagagctggctgggagcccttttgttttagaacacacatccttcagcagctgagaaacgaacacgaatccatcccaaccgagatgccattaacattcatctaaaaatgttaggctctaaatggacgaaaaattctctcgccatcttaataacaaaataaactacaaattcctgacccaaggacactgtgttataagaggcgtgggctcccctggtggctgaccaggtcagctgccctggccttgcacccctctgcatgcagcacagaagggtgtgaccatgccctcagcaccactcttgtccccactgaacggcaactgagactgggtacctggagattctgaagtgcctttgctgtggttttcaaaataataaagatttgtattcaactcaaaaaaaaaaaa

SEQ ID NO: 344 - DNA, 864 bp, Homo sapiens
  CDS (57)..(836)
atttggccctcgaggccaagaattcggcacgaggggtggtgtagggccgggcgataatggcggcgtcgaggctggagctaaacctggtgcggctgctatcccgctgcgaggcgatggcagcggagaaacgggacccggacgagtggcgcctggagaagtacgtgggagccctagaggacatgttgcaggccctgaaggtccacgcgagcaaaccggcctctgaggtgatcaatgaatattcctggaaggtggattttctgaaggggatgctgcaagccgagaagctgacctcctcctcagagaaagcactggccaaccagttcctggcccctggccgtgtgccaaccacagccagagagcgagtgcccgccacaaagacggtgcatctgcagtcacgggcgcggtacaccagcgagatgcggagtgagctactaggcacggactctgcagagcctgagatggacgtaaggaagagaactggagtggcagggtcccagccagtgagtgagaagcagtcggcagctgagctagacctcgtcctgcagcgacatcagaacctccaggaaaagctggcggaagagatgctaggactggcccggagcctcaagaccaataccctggccgcccagagtgtcatcaagaaggacaaccagaccctgtcacactcactgaaaatggcggaccagaacctggagaaactgaagacggagtcagagcgtctggagcagcacacgcagaagtcagtcaactggctgctctgggccatgctcattatcgtctgcttcatcttcattagcatgatcctcttcattcgaatcatgcctaaactcaaataaagacccccgcccacctaaaaaaaaaaaa

SEQ ID NO: 345 - DNA, 827 bp, Homo sapiens
  CDS (217)..(618)
  misc_feature (1)...(827): n = a,t,c or g
gacatcagaaccccaggctctccagcctttggacttcaggactgacacaagcaacctgctgggttcttaggcctttggcttggtactgagacttacaccatcagcttccctggtcctgagacttttggacttggattgagccacgctactggcatcccaggatctccagcttgcagacagcctgtcgtgggacttcacagcctccataattatagaatggcaatggtctctgcgatgtcctgggtcctgtatttgtggataagtgcttgtgcaatgctactctgccatggatcccttcagcacactttccagcagcatcacctgcacagaccagaaggagggacgtgtgaagtgatagcagcacaccgatgttgtaacaagaatcgcattgaggagcggtcacaaacagtaaagtgttcctgtctacctggaaaagtggctggaacaacaagaaaccggccttcttgcgtcgatgcctccatagtgattgggaaatggtggtgtgagatggagccttgcctagaaggagaagaatgtaagacactccctgacaattctggatggatgtgcgcaacaggcaacaaaattaagaccacgagaattcacccaagaacctaacagaagcatttgtggtagtaaagggaaaaccaaccctttggaaaatacattttgggantctcaaaacatctcacatatatacaagccaaatgggatttcttacttncactttgactggctaccngataatcacagtncgtttacttgtgtntaacgaaaatatcctacagtggaggaagacacaggcgtttttgggcaacaccatnggg

SEQ ID NO: 346 - DNA, 1541 bp, Homo sapiens
  CDS (420)..(989)
cgtccggaattcccgggtcgacgatttcgtattccctctttctttcttcctctccgccctcacccctctggttctccagctccacaggcagcagagaaagcaggctctttgtctgacatcatctttcactccctggcctgctaagagttactcactcaggcaatccctgctccaccagaggagactgtccaattgccaagcaacccactgctggccaatcacagagcttggaggtgatgtcatggcaagagcgagcagtggtgctgatgttgagagaagcccagggtaccactaattgagggagtgaggaagagagcagctcgcttctaactggactgcacgttggtgacagcgtcccaagctggtgacagacccactctgtaactttcagctagattcagccaccagatcccagaaacatgacccttgctgcctacaaagagaagatgaaggagctcccgctggtgtccttgttctgctcctgcttcctggccgatcccctgaataagtcgtcctacaaatatgaagcagacacggtggacctgaattggtgcgtcatttccgacatggaagtcatcgagctgaacaaatgcacctcgggccaatcctttgaagtcatcctgaagccaccctcctttgatggggttcccgagttcaacgcctccctgccaaggcggcgagacccatccctggaagagatccagaagaaactagaagcggctgaggagcgaaggaagtaccaggaagcggagctcctgaaacacctagcagagaaacgggaacatgagagagaggtgatccaaaaggccattgaggaaaacaacaacttcatcaagatggctaaggaaaaactggcccagaagatggaatccaacaaggagaacagggaggcccacctcgccgccatgttggaacggctgcaagagaaggacaagcacgccgaggaggtgcggaaaaacaaggagctgaaggaagaggcctccaggtaaagcctagaggccaaagaactttccaggtcagccggacagctccagcagctccacgttccaggcagcctcgcccgccggctgcgctcccagcactggggtttggggggaggggggtggccaaggggcgtttcctctgcttttggtgtttgtacatgttaagaattgaccagtgaagccatcctatttgtttccggggaacaatgacggggtgggagaggggagaggagagagtttgggaaagggagatggagaagaactcaaggacattgcaaccctgcccggcgcagatctgattttcacatctctacctggacattgagcctccaggcaccatgttgaggagagatgaaaaccagggcggtagaacttcagggtgaaggacagagtcctgggtggggcagcggctgcagggcgcaccagagaacccagccagagggggtgtgagtaccagtggtgttgcttccaccctgcagcaggtgggatgaggtctgtgtgtgtgtgtgaaccatcattttttgatcatcatgaccaatgaaacattgaaaaaaaaaa

SEQ ID NO: 347 - DNA, 1220 bp, Homo sapiens
  CDS (39)..(998)
  misc_feature (1)...(1220): n = a,t,c or g
tgatttagttgattggggggcagangnaatttgaagggatgatgtatataactatctattcgatgatgaagataccccaccaaacccaaaaaaagagatctctcgaggatccgaattcgcggccgcgtcgacgcggtgtcctgagccgattacagctaggtagtggagcgccgctgcttacctgggtgcaggagacagccggagtcgctgggggagctccgcgccgccggacgcccgtgaccatgtggaggctgctggctcgcgctagtgcgccgctcctgcgggtgcccttgtcagattcctgggcactcctccccgccagtgctggcgtaaagacactgctcccagtaccaagttttgaagatgtttccattcctgaaaaacccaagcttagatttattgaaagggcaccacttgtgccaaaagtaagaagagaacctaaaaatttaagtgacatacggggaccttccactgaagctacggagtttacagaaggcaattttgcaatcttggcattgggtggtggctacctgcattggggccactttgaaatgatgcgcctgacaatcaaccgctctatggaccccaagaacatgtttgccatatggcgagtaccagcccctttcaagcccatcactcgcaaaagtgttgggcatcgcatggggggaggcaaaggtgctattgaccactacgtgacacctgtgaaggctggccgccttgttgtagagatgggtgggcgttgtgaatttgaagaagtgcaaggtttccttgaccaggttgcccacaagttgcccttcgcagcaaaggctgtgagccgcgggactctagagaagatgcgaaaagatcaagaggaaagagaacgtaacaaccagaacccctggacatttgagcgaatagccactgccaacatgctgggcatacggaaagtactgagcccatatgacttgacccacaaggggaaatactggggcaagttctacatgcccaaacgtgtgtagtgagtgtaggagataactgtatataggctactgaaagaaggattctgcatttctattcccctcagcctacccactgaagtctttgggtagctcttaagccataactaaggagcagcatttgagtagatttctgaaaaacaatgttatttgttgatttaaaaagaaaactgtatttttattaaataaaatttaaacatcacttcaggatataaaaaaaaaaaa

SEQ ID NO: 348 - DNA, 2159 bp, Homo sapiens
  CDS (3)..(1868)
tccgaaaccgctccggaattcccgggtcgacccacgcgtccggcgggtccgggagcgcggcggagacgatgcctgagatcagagtcacgcccttgggggccggccaggacgtgggccgaagctgcatcctggtctccattgcgggcaagaatgtcatgctggactgtggaatgcacatgggcttcaatgacgaccgacgcttccctgacttctcctacatcacccagaacggccgcctaacagacttcctggactgtgtgatcattagccacttccacctggaccactgcggggcactcccctacttcagcgagatggtgggctacgacggccccatctacatgactcaccccacccaggccatctgccccatcttgctggaggactaccgcaagatcgccgtagacaagaagggcgaggccaacttcttcacctcccagatgatcaaagactgcatgaagaaggtggtggctgtccacctccaccagacggtccaggtagatgatgagctggagatcaaggcctactatgcaggccacgtgctgggggcagccatgttccagattaaagtgggctcagagtctgtggtctacacgggtgattataacatgaccccagaccgacacttaggagctgcctggattgacaagtgccgccccaacctgctcatcacagagtccacgtacgccacgaccatccgtgactccaagcgctgccgggagcgagacttcctgaagaaagtccacgagaccgtggagcgtggtgggaaggtgctgatacctgtgttcgcgctgggccgcgcccaggagctctgcatcctcctggagaccttctgggagcgcatgaacctgaaggtgcccatctacttctccacggggctgaccgagaaggccaaccactactacaagctgttcatcccctggaccaaccagaagatccgcaagactttcgtgcagaggaacatgtttgagttcaagcacatcaaggccttcgaccgggcttttgctgacaacccaggaccgatggttgtgtttgccacgccaggaatgctgcacgctgggcagtccctgcagatcttccggaaatgggccggaaacgaaaagaacatggtcatcatgcccggctactgcgtgcagggcaccgtcggccacaagatcctcagcgggcagcggaagctcgagatggaggggcggcaggtgctggaggtcaagatgcaggtggagtacatgtcattcagcgcacacgcggacgccaagggcatcatgcagctggtgggccaggcagagccggagagcgtgctgctggtgcatggcgaggccaagaagatggagttcctgaagcagaagatcgagcaggagctccgggtcaactgctacatgccggccaatggcgagacggtgacgctgcccacaagccccagcatccccgtaggcatctcgctggggctgctgaagcgggagatggcgcaggggctgctccctgaggccaagaagcctcggctcctgcacggcaccctgatcatgaaggacagcaacttccggctggtgtcctcagagcaagccctcaaagagctgggtctggctgagcaccagctgcgcttcacctgccgcgtgcacctgcatgacacacgcaaggagcaggagacggcattgcgcgtctacagccacctcaagagcgtcctgaaggaccactgtgtgcagcacctcccggacggctctgtgactgtggagtccgtcctcctccaggccgccgccccttctgaggacccaggcaccaaggtgctgctggtctcctggacctaccaggacgaggagctggggagcttcctcacatctctgctgaagaagggcctcccccaggcccccagctgaggccggcaactcacccagccgccacctctgccctctcccagctggacagaccctgggcctgcacttcaggactgtgggtgccctgggtgaacagaccctgcaggtcccatccctggggacagaggccttgtgtcacctgcctgcccaggcagctgtttgcagctgaagaaacaaactggtctccaggctgtcttgcctttattcctggttagggcaggtggtcctagacagcagtttccagtaaaagctgaacaaaagactacttggtactctcaaaaaaaaaaaaaa

SEQ ID NO: 349 - DNA, 434 bp, Homo sapiens
  CDS (1)..(333)
gcacgagcagctttccgccgcttgggcgccttgtccggagctgcggccttaggcttcgcttcctacggggcgcacggcgcccaattcccagatgcctacgggaaggagctgtttgacaaggccaacaaacaccacttcttacacagcctggccctgttaggggtgccccattgcagaaagccactctgggctgggttattgctagcttccggaacgaccttattctgcaccagcttttactaccaggctctgagtggagaccccagcatccagactttggcccctgcgggagggaccctgctactcttgggctggcttgccttggctctttgagctcccttttgcttaattactgggttttctgggcagttttttttttaaagagttggagtaagaagaggattaaaaaggaaaggcaaataaaaaaaaaaaaa

SEQ ID NO: 350 - DNA, 1194 bp, Homo sapiens
  CDS (3)..(1193)
ccgcgcgcagtccagcggccccgcgtgtgtgccctcgccctgccggagccgggaaaatggaggctgtgattgagaaggaatgcagcgcgctcggaggcctcttccagaccatcatcagcgacatgaaggggagctatccagtttgggaagatttcataaacaaagcaggaaagctgcagtcccagcttcggacaacagtagtagcagcagctgccttcttggacgcctttcagaaagtggctgacatggccaccaacacacgtggtgggaccagggagattggatctgctctcaccaggatgtgcatgaggcacagaagcattgaagccaagctgaggcagttttcgagcgctttaattgattgtctgataaacccacttcaagaacagatggaagaatggaagaaagtggccaaccagctggataaagaccacgcaaaagaatataagaaagcccgccaagagataaaaaagaagtcctcggatacgctgaaactgcagaagaaagcaaaaaaagggagaggtgatatccagcctcagttggacagtgctctccaagatgtcaatgataagtatctcttattggaagaaacagaaaagcaggctgtccggaaggctttgattgaagaacgtggccgattctgtaccttcatctctatgctgcggccagtgattgaagaagaaatctcaatgctaggggaaataacccaccttcagaccatctcggaagatctaaaaagcctgaccatggaccctcacaaactgccctcctcaagtgaacaggtgattctggacttgaaaggttctgattacagctggtcgtatcagacgccaccctcttcccccagcaccaccatgtccagaaagtccagtgtctgcagcagcctgaacagtgtcaacagcagtgactcccggtccagcggctcccactcgcattcccccagctcacattaccgctaccgcagctccaacctggcccagcaggctcctgtgaggctgtccagcgtgtcctcccatgactcaggattcatatcccaggatgccttccagtccaagtcaccatcccccatgccgccagaggcccccaaccagcgccgcaaagagaagcgagaaccggaccccaacgggggaggacccactaccgccagcggcccacctgcagcagctgaggaggctcagagaccacggagcatga

SEQ ID NO: 351 - DNA, 1699 bp, Homo sapiens
  CDS (1)..(834)
atgaacctggaagggctggagatggttgctgtgctcgtggtcctcgctctgtttgtcaaggtcctggagcagtttggcctctttgagcctgtctccttggaaggccaccctccagggcccactaaaaaagcgctgaagcagcgattcctcaagctgctgccgtgctgcgggccccaagccctgccctcagtcagtgaaagcaagtgcctctcatgtgcttccgggggcggggctcgatgtgtgcacagcgtggacgatgaatttgaattgtccaccgtgtgtcaccggcctgagggtctggagcagctgcaggagcaaaccaaattcacgcgcaaggagttgcaggtcctgtaccggggcttcaagaacgaatgtcccagcggaattgtcaatgaggagaacttcaagcagatttactcccagttctttcctcaaggagactccagcacctatgccacttttctcttcaatgcctttgacaccaaccatgatggctcggtcagttttgaggactttgtggctggtttgtccgtgattcttcggggaactgtagatgacaggcttaattgggccttcaacctgtatgaccttaacaaggacggctgcatcaccaaggaggaaatgcttgacatcatgaagtccatctatgacatgatgggcaagtacacgtaccctgcactccgggaggaggccccaagggaacacgtggagagcttcttccagaagatggacagaaacaaggatggtgtggtgaccattgaggaattcattgagtcttgtcaaaaggatgagaacatcatgaggtccatgcagctctttgacaatgtcatctagcccccaggagagggggtcagtgtttcctggggggaccatgctctaaccctagtccaggcggacctcacccttctcttcccaggtctatcctcatcctacgcctccctgggggctggagggatccaagagcttggggattcagtagtccagatctctggagctgaaggggccagagagtgggcagagtgcatctcggggggtgttcccaactcccaccagctctcacccccttcctgcctgacacccagtgttgagagtgcccctcctgtaggaattgagcggttccccacctcctacccctactctagaaacacactagacagatgtctcctgctatggtgcttcccccatccctgacctcataaacatttcccctaagactcccctctcagagagaatgctccattcttggcactggctggcttctcagaccagccattgagagccctgtgggagggggacaagaatgtatagggagaaatcttgggcctgagtcaatggataggtcctaggaggtggctggggttgagaatagaagggcctggacagattatgattgctcaggcataccaggttatagctccaagttccacaggtctgctaccacaggccatcaaaatataagtttccaggctttgcagaagaccttgtctccttagaaatgccccagaaattttccaaaccctcctcggtatccatggagagcctggggccagatatctgggctcatctctggcattgcttcctctccttccttcctgcatgtgttggtggtggttgtggtgggggaatgtggatgggggatgtcctgggctgatgcctgccaaaatttcatcccaccctccttgcttatcgtccctgtttt

SEQ ID NO: 352 - DNA, 2021 bp, Homo sapiens
  CDS (109)..(477)
gcctgtggtaccggtccggaattcccgggtcgacccacgcgtccgcaaaaaaagaaaaggaaaaatacaatacagtgtgataaatactatgacagtggtaagcacaggatgatttggtacacagagaaggggcacctaaccaagactagggacttcaagaagttaaggaaactttctggaagtggtgactcctgggcgagggcccccacccaccacacaattcagacaagagctttgtggccctgtgcaagaaaggacctcattattctttttaccttacagaatgttgctgaggcacagtgcatcgccaaccaagttcagctcttctacgctactgatcggaaagagacctacgggttagtggagacctttaacctcagaccaaatgagttcaaatatatgtctgtcatcgctgaattggagcaaagcggacttggagcagaactgaaatgtgcccagaaccaaaataagacttagaactgtacaggttggcccttcacctagttgactcagccctcgatagtctagagcccaccccctcctcaggaactcaagagctcagcatttataatgagcagttggtaatgagttgccctatgtgcttgtcgcaagcagtcacagagatgagccctattacttgatattcaggaacaaaggtacctgaacattctgataattatctcagcatacttgaggtttccttttttaagtgttcgaggttataacaagagacagccaaggacctacaagacagttgacttgattttgcacagtgtaacagcgcagttgcattctggccactttgaccttatagctcccaaatgatgagtttgtcatctttatgaactcatgacaggataataagcttgaagacctgctgtagttagatatgggctttaatccttcccatgcaccagtcagctgaacaaaagcataagccaaacatcctgtttaacctgatgggaatatctggttattctacagtttaaacaggatgtttggcttatgcttttgttcagctgactggtgcatgggaaggattaaagcccatatctaactacagcaggtcttcaagcttattatcctgtcatgagttcataaagatgacaaactcatcatttgggagctataaggtcaaagtggccagaatgcaactgcgctgttacactgtgcaaaatcaagtcaactgtcttgtaggtccttggctgtctcttgttataacctcgaacacttaaaaaaggaaacctcaagtatgctgagataattatcagaatgttcaggtacctttgttcctgaatatcaagtaatagggctcatctctgtgactgcttgcgacaagcacatagggcaactcattaccaactgctcattataaatgctgagctcttgagttcctgaggagggggtgggctctagactatcgagggctgagtcaactaggtgaagggccaacctgtacagttctaagtcttattttggttctgggcacatttcagttctgctccaagtccgctttgctccaattcagcgatgacagacatatatttgaactcatttggtctgaggttaaaggtctccactaacccgtaggtctctttccgatcagtagcgtagaagagctgaacttggttagcgatgcactgtgcctcagcaacattcagaaatgtggaatccatttctgcagtcatcagcactatgcccttttcttccttaagttcaggatagtgatataaaatcagctggctggctgcagcttcccctcgggtctgaatatttataagtgcagtgaagtggagttcagtacctgtccattgtcctacaaaaaactcataaccttcccttcttggcagagcacatagaaatgttggacaggactgagcccggttccagatcaaatcaaacttttctgcaggaataactgcgtagactgtatcttttgctgcaaaatattgctgccaaatctgttttatttcttctgcagttttttcctcgtgccgaattcttggcctcgagggccaaat

SEQ ID NO: 353 - DNA, 722 bp, Homo sapiens
  CDS (156)..(722)
gtgaagaaggaagaacgttgcttgtgcaaaaggagcatattctcaggagacggggcccctgcctgccacaccaagcattaggccaccaggaagacccccatctgcaagcaagcctagccttccagggagaaagaggcccctgcagctccttcatcatgaactggcacatgatcatctctgggcttattgtggtagtgcttaaagttgttggaatgaccttatttctactttatttcccacagatttttaacaaaagtaacgatggtttcaccaccaccaggagctatggaacagtctcacagatttttgggagcagttccccaagtcccaacggcttcattaccacaaggagctatggaacagtctgccccaaagactgggaattttatcaagcaagatgttttttcttatccacttctgaatcatcttggaatgaaagcagggacttttgcaaaggaaaaggatccacattggcaattgtcaacacgccagagaaactgaagtttcttcaggacataactgatgctgagaagtattttattggcttaatttaccatcgtgaagagaaaaggtggcgttggatcaacaactctgtgttcaatggcaatgttaccaatcagaatcagaatttcaactgtgcgaccattggcctaacaaagacctttgatgctgcatcatgtgacatcagctaccgcaggatctgtgagaagaatgccaaatga

SEQ ID NO: 354 - DNA, 3647 bp, Homo sapiens
  CDS (14)..(3280)
cgatttcgtgttgatgggcagcgcggcgcgctgggaaggctcgttctcgcgagagttcagctcccttcttagccgtggctgcctcagcacctcgaggatcgacatggacgctctcgaggactacgtttggccgcgggcaacctcggagcttatactcctcccagtgacgggtctggagtgcgtgggggaccggctgttggcgggtgagggtcccgatgtcctggtgtacagcttggactttggtgggcatctgcggatgataaagcgagtgcagaacctgcttggccactatcttatccatggcttccgggtacggccagagcctaatggagaccttgacttggaggccatggtggctgtgtttggaagcaagggactccgagttgtgaaaattagctggggacagggccacttctgggagctttggcgctctggcctgtggaacatgtctgactggatttgggatgcacgctggcttgagggaaatatagccttggccctgggccacaactcagtggtgctatatgaccctgtagtagggtgcatcctgcaagaggtgccctgcacagacaggtgcaccctctcttcagcctgcctgattggagacgcctggaaggagctgaccatagtggcaggtgctgtttccaaccagctcttggtctggtacccagcaactgccttagcagacaacaaacctgtagcacctgaccgacgaatcagtgggcatgtgggcatcatcttcagcatgtcatacctggaaagcaagggattgctggctacagcttcagaagaccgaagcgttcgtatctggaaggtgggcgacctgcgagtgcctgggggtcgggtgcagaatattgggcactgctttgggcacagcgcccgtgtgtggcaggtcaagcttctagagaattaccttatcagtgcaggagaggattgtgtctgcttggtgtggagccatgaaggtgagatcctccaggcctttcggggacaccagggacgtgggatccgggccatagctgcccatgagaggcaggcctgggtgatcactgggggtgatgactcaggcattcggctgtggcacttggtagggcgtgggtaccggggattgggggtctcggctctctgcttcaagtcccgtagtaggccaggtacactcaaggctgtgactctggctggctcttggcgactgctggcagtgactgatacaggggccctgtatctctatgacgtcgaggtcaagtgctgggagcagctgctagaggataaacatttccagtcctactgcctgctggaggcagctcctggtcccgagggcttcggattgtgtgctatggccaatggggaaggtcgtgtcaaggttgtccccatcaacactccaactgctgctgtggaccagaccctgtttcctgggaaggtgcacagcttgagctgggccctgcgtggttatgaggagctcctgttgctggcatcgggccctggcggggtagtagcttgcctagagatctcagccgcaccctctggcaaggccatctttgtcaaggaacgttgtcggtacctgctgcccccaagcaagcagagatggcacacatgcagtgccttcctacccccaggtgacttcctggtgtgtggtgaccgccggggctctgtgctgctattcccctccggaccagggcgtgatggagcctactaccagctgtttgtacgagacggccagctccagccagtcctaaggcagaagtcctgtcgaggcatgaactggctagctgggctccgtatagtgcccgatgggagcatggttatcctgggtttccatgccaatgagtttgtggtgtggaaccctcggtcacacgagaagctgcacatcatcaactgtggtggagggcaccgttcgtgggcattctctgatactgaggcggccatggcctttgcttacctcaaggatggggatgtcatgctgtacagggctctgggtggctgcacccggccacacgtgattctccgggagggtctgcatggccgtgagatcacttgtgtaaagcgtgtgggcaccattaccctggggcctgaatatggagtgcccagcttcatgcagcctgatgacctggagcctggcagtgaggggcccgacttgactgacattgtgatcacatgtagtgaggacactactgtctgtgtcctagcactccctacaaccacaggctcagcccacgcactcacagctgtttgtaaccatatctcctcggtacgtgctgtggctgtgtggggcattggcaccccaggtggccctcaggatcctcagccaggcctgactgcccatgtggtgtctgcgggggggcgggctgagatgcactgcttcagcatcatggttactccggaccccagcaccccaagccgcctcgcctgccatgtcatgcacctttcgtcccaccggctagatgagtattgggaccggcaacgcaatcggcatcggatggttaaggtagacccagagaccaggtacatgtcccttgctgtgtgtgaacttgaccagcccggccttggcccccttgtggctgcagcctgtagtgatggggccgtaaggctctttcttttgcaggattctgggcggattctgcagctccttgctgaaaccttccaccataagcgatgtgtcctcaaggtccactcctttacacacgaggcacccaaccagaggcggaggctcctcctgtgcagcgcagctactgatggcagcctggctttctgggatctcaccaccatgctagaccatgactccactgtcctggagcctccagtggatcctgggcttccctaccggcttggcaccccctccctgactctccaggcccacagctgtggtatcaacagcctgcacaccttgcccacccgtgagggccaccatctcgtggccagtggcagtgaagatggatccctccatgtcttcgtgcttgctgtggagatgctacagctagaagaggctgtgggagaggctgggctggtaccccagctgcgtgtgctagaggaatactctgtcccctgtgcacatgctgcccatgtgacaggcctcaagatcctaagcccaagcatcatggtctcagcctccattgatcaacggctgaccttctggcgtctggggcatggtgaacccaccttcatgaatagcactgtgttccatgtgcctgatgtggctgacatggactgctggcctgtgagccctgagtttggccaccgttgtgcccttgggggtcaggggcttgaggtttacaactggtatgactgaggtatcctgcggtggctggcgtgctgggcatggggcctgctcacagacagcatggagcagggatgggctgtctgtgcccatgctcagcatgccttgaggggaggaggtggtggccgtgggttcctgatgtcggtgcaggagctgaaggtgagtggagtgctgccaagaatatgcccgactccccatgacaagacagaactttgtaacaaacagtaccaatttattttggccgtgggtttttgctttttttccagttgatgactttgtgaacattcccaggtattggagcctctgtggccttaaatgtggctcagtggagggagacccagcatagccaggccagtatggagcacctcacgcacagctt

SEQ ID NO: 355 - DNA, 1551 bp, Homo sapiens
  CDS (337)..(891)
ttggaaaacattgtagatccctagtccagtgtggtggaattcattgactttacagaagtaaaaccacaccgggctgggtacaaataccttctagtactggtagacaccttctctggatggactgaagcatttgctaccaaaaacgaaactgtcaatatggtagttaagtttttactcaatgaaatcatccctcgacatgggctgcctgttgccatagggtctgataatggaccggccttcgccttgtctatagtttagtcagtcagtaaggcgttaaacattcaatggaagctccattgtgcctatcgaccccagagctctgggcaagtagaacgcatgaactgcaccctaaaaaacactcttacaaaattaatcttagaaaccggtgtaaattgtgtaagtctccttcctttagccctacttagagtaaggtgcaccccttactgggctgggttcttaccttttgaaatcatgtatgggagggcgctgcctatcttgcctaagctaagagatgcccaattggcaaaaatatcacaaactaatttattacagtacctacagtctccccaacaggtacaagatatcatcctgccacttgttcgaggaacccatcccaatccaattcctgaacagacagggccctgccattcattcccgccaggtgacctgttgtttgttaaaaagttccagagagaaggactccctcctgcttggaagagacctcacaccgtcatcacgatgccaacggctctgaaggtggatggcattcctgcgtggattcatcactcccgcatcaaaaaggccaacagagcccaactagaaacatgggtccccagggctgggtcaggccccttaaaactgcacctaagttgggtgaagccattagattaattctttttcttaattttgtaaaacaatgcatagcttctgtcaaacttatgtatcttaagactcaatataacccccttgttataactgaggaatcaatgatttgattccccaaaaacacaagtggggaatgtagtgtccaacctggtttttactaaccctgtttttagactctccctttcctttaatcactcagccttgtttccacctgaattgactctcccttagctaagagcgccagatggactccatcttggctctttcactggcagccgcttcctcaaggacttaacttgtgcaagctgactcccagcacatccaagaatgcaattaactgataagatactgtggcaagctatatccgcagttcccaggaattcgtccaattgattacaccccaaagccccgcgtctatcaccttgtaataatcttaaagcccctgcacctggaactattaacgttcctgtaaccatttatccttttaacttttttgcctactttatttctgtaaaattgttttaactagaccccccctctcctttctaaaccaaagtataaaagaagatctagccccttcttcaggccgagagaatttcgagcgttagccgtctcttggccaccagctaaataaacggattcttcatgtgtctcaaaaaaaaaaaa

SEQ ID NO: 356 - DNA, 2665 bp, Homo sapiens
  CDS (347)..(2563)
cctgcggtaccggtccggaattcccgggtcgacgatttcgtcctcatcagaaactggcagcggcagccacagctcgggcaggcggctccagccccaggctggatttgcagaatctgtcctttgcctccaagcccagctttcagctgggagagggggaagaaggggcagtggcagcagttcttctggctctttctccctttctctctttctctttctgtgttcaagtcacattacatgggattctgttcttttgggacttcgtcatcttttccaatatgtcctgggacctccggagctgtaacggggatgctaaggacacggtcagtggattatcgtgactgtactaatgaaaggattcaagctctcctgcactgccagtaactccaaccgcagcacgccggcctgctcgcccatcctccggaagcggtctcgctcgccaaccccgcagaaccaggacggagacaccatggtggagaagggctcagatcactcctcggacaagtccccgtccacaccggagcagggcgtgcagcgcagctgctcctcccagtccggccggagcggcggcaagaattccaagaaaagccagagttggtataatgtgttaagccccacctacaagcagagaaatgaagacttcagaaagctctttaagcagcttccagacacggagcgcctcattgttgattactcatgtgcactccaaagagacattctccttcagggccgactctacctctctgaaaattggatctgcttctacagcaacatcttccgctgggaaactctgctgacagtccgtttgaaagacatctgttccatgactaaagaaaaaacagctcgcctcattcccaacgccatccaagtttgcactgattcagaaaagcacttcttcacttcgtttggggcccgggataggacatatatgatgatgttccggctctggcagaatgctctccttgaaaagcctctgtgtcccaaggagctctggcactttgttcaccagtgctatgggaacgaattgggcctgaccagtgatgacgaggactacgtgccccctgacgacgacttcaacacaatgggatactgtgaagagatccctgtggaagagaatgaagtgaatgacagctcatccaagagcagcatagagaccaagccagatgccagtccacagctgcccaagaaatccatcaccaacagcacactaacatccacagggagcagtgaggcccccgtctcgtttgatgggctgcccctggaggaagaggcgctggagggagacgggtccctggaaaaggagctcgccattgacaacatcatgggggagaagattgagatgatcgctcctgtgaactccccttcactggacttcaatgacaatgaggacatccccactgagctcagtgactcttccgacacacacgatgaaggagaggtccaggccttctatgaggacctgagtggccggcagtacgtgaatgaagtcttcaacttcagcgtggacaagctctatgacctcctcttcaccaactcgcccttccagcgggatttcatggagcagcggcgcttctctgatatcatcttccatccatggaaaaaggaggagaatggaaaccagagccgagtgattctttacaccatcacccttaccaaccctctggctcccaaaactgccactgtcagggagacacagaccatgtacaaggcgagccaggagagtgaatgttacgtgatagatgccgaagtcctcacccacgacgtgccctaccatgactacttttacacaatcaatcgctacacgctcacccgtgtggctcggaacaagagccgactcagggtctccacagagctgcgctatcgaaaacagccctgggggttagtgaaaacgttcatcgagaagaacttctggagtgggctggaggactacttccgccatttagagagcgagctggccaaaacggagagcacttatttggctgagatgcacagacaatctcccaaagagaaggccagcaagactacaacggtgcggaggaggaagcgtccccatgcccacctgcgagtccctcacctggaagaggtgatgagcccggtcaccacgcccacagatgaggatgtgggccacaggatcaaacatgtggcaggttccacacagacgcggcatatcccggaggacacccccaacggtttccacctgcagagcgtgtccaagctgctgctggttatcagctgtgtgatctgtttcagtctggtgctgctggtcatccttaacatgatgctcttctacaaactctggatgttggaatacaccacgcagaccctcactgcctggcagggtctaaggctccaagaaaggttaccccagtctcagacagaatgggcccagctcttagagtcccaacaaaagtaccacgatactgagctccaaaaatggagggaaatcatcaaatcctcagtgatgctccttgaccagatgaaggactcgctcatcaaccttcagaacggcatcaggtcccgcgactacacgtcggaaagtgaagaaaagaggaatcgctatcattgacaaggcaggaacagggtggctgcaagaggcctgtgcaatacatgtacatagaccatataaatatatatatataaatatatatatatacagaaaaaaaaaaaa

SEQ ID NO: 357 - DNA, 2653 bp, Homo sapiens
  CDS (347)..(2551)
cctgcggtaccggtccggaattcccgggtcgacgatttcgtcctcatcagaaactggcagcggcagccacagctcgggcaggcggctccagccccaggctggatttgcagaatctgtcctttgcctccaagcccagctttcagctgggagagggggaagaaggggcagtggcagcagttcttctggctctttctccctttctctctttctctttctgtgttcaagtcacattacatgggattctgttcttttgggacttcgtcatcttttccaatatgtcctgggacctccggagctgtaacggggatgctaaggacacggtcagtggattatcgtgactgtactaatgaaaggattcaagctctcctgcactgccagtaactccaaccgcagcacgccggcctgctcgcccatcctccggaagcggtctcgctcgccaaccccgcagaaccaggacggagacaccatggtggagaagggctcagatcactcctcggacaagtccccgtccacaccggagcagggcgtgcagcgcagctgctcctcccagtccggccggagcggcggcaagaattccaagaaaagccagagttggtataatgtgttaagccccacctacaagcagagaaatgaagacttcagaaagctctttaagcagcttccagacacggagcgcctcattgttgattactcatgtgcactccaaagagacattctccttcagggccgactctacctctctgaaaattggatctgcttctacagcaacatcttccgctgggaaactctgctgacagtccgtttgaaagacatctgttccatgactaaagaaaaaacagctcgcctcattcccaacgccatccaagtttgcactgattcagaaaagcacttcttcacttcgtttggggcccgggataggacatatatgatgatgttccggctctggcagaatgctctccttgaaaagcctctgtgtcccaaggagctctggcactttgttcaccagtgctatgggaacgaattgggcctgaccagtgatgacgaggactacgtgccccctgacgacgacttcaacacaatgggatactgtgaagagatccctgtggaagagaatgaagtgaatgacagctcatccaagagcagcatagagaccaagccagatgccagtccacagctgcccaagaaatccatcaccaacagcacactaacatccacagggagcagtgaggcccccgtctcgtttgatgggctgcccctggaggaagaggcgctggagggagacgggtccctggaaaaggagctcgccattgacaacatcatgggggagaagattgagatgatcgctcctgtgaactccccttcactggacttcaatgacaatgaggacatccccactgagctcagtgactcttccgacacacacgatgaaggagaggtccaggccttctatgaggacctgagtggccggcagtacgtgaatgaagtcttcaacttcagcgtggacaagctctatgacctcctcttcaccaactcgcccttccagcgggatttcatggagcagcggcgcttctctgatatcatcttccatccatggaaaaaggaggagaatggaaaccagagccgagtgattctttacaccatcacccttaccaaccctctggctcccaaaactgccactgtcagggagacacagaccatgtacaaggcgagccaggagagtgaatgttacgtgatagatgccgaagtcctcacccacgacgtgccctaccatgactacttttacacaatcaatcgctacacgctcacccgtgtggctcggaacaagagccgactcagggtctccacagagctgcgctatcgaaaacagccctgggggttagtgaaaacgttcatcgagaagaacttctggagtgggctggaggactacttccgccatttagagagcgagctggccaaaacggagagcacttatttggctgagatgcacagacaatctcccaaagagaaggccagcaagactacaacggtgcggaggaggaagcgtccccatgcccacctgcgagtccctcacctggaagaggtgatgagcccggtcaccacgcccacagatgaggatgtgggccacaggatcaaacatgtggcaggttccacacagacgcggcatatcccggaggacacccccaacggtttccacctgcagagcgtgtccaagctgctgctggttatcagctgtgttctggtgctgctggtcatccttaacatgatgctcttctacaaactctggatgttggaatacaccacgcagaccctcactgcctggcagggtctaaggctccaagaaaggttaccccagtctcagacagaatgggcccagctcttagagtcccaacaaaagtaccacgatactgagctccaaaaatggagggaaatcatcaaatcctcagtgatgctccttgaccagatgaaggactcgctcatcaaccttcagaacggcatcaggtcccgcgactacacgtcggaaagtgaagaaaagaggaatcgctatcattgacaaggcaggaacagggtggctgcaagaggcctgtgcaatacatgtacatagaccatataaatatatatatataaatatatatatatacagaaaaaaaaaaaa

SEQ ID NO: 358 - DNA, 1949 bp, Homo sapiens
  CDS (161)..(1468)
aaggatccttaattaaattaatcccccccccccccccccggcctttgtgccatccgggtctctcgcgcgagcgatttagtctgaggcgaagcttcggagcggccggtactgttgaaagcgacaagtggaggcgccgctctagcggccgggactctgaactatggcggctagtgatacagagcgagatggactagccccagaaaagacatcaccagatagagataagaaaaaagagcagtcagaagtatctgtttctcctagagcttcaaaacatcattattcaagatcacgatcaaggtcaagagaaagaaaacgaaagtcagataatgaaggaagaaaacacaggagccggagcagaagcaaagagggaagaagacatgaatccaaagataaatcctctaagaaacataagtctgaggaacataatgacaaagaacattcttctgataaaggaagagagcgactaaattcatctgaaaatggtgaggacaggcacaaacgcaaagaaagaaagtcatcaagaggcagaagtcactcaagatctaggtctcgtgaaagacgccatcgtagtagaagcagggagcggaagaagtctcgatccaggagtagggagcggaagaaatcgagatccagaagcagagagaggaagaaatcgagatccagaagcagggaaagaaaacggcggatcaggtctcgttcccgctcaagatcaagacacaggcataggactagaagcaggagtaggacaaggagtaggagtcgagatagaaagaagagaattgaaaagccgagaagatttagcagaagtttaagccggactccaagtccacctcccttcagaggcagaaacacagcaatggatgcacaggaagctttagctagaaggttggaaagggcaaagaaattacaagaacagcgagaaaaggaaatggttgaaaaacaaaaacaacaagaaatagctgcagcagctgcagctactggaggttctgttctcaatgttgctgccctgttggcatcaggaacacaagtaacacctcagatagccatggcagctcagatggcagccctgcaagctaaagctttggcagagacaggaatagctgttcctagctactataacccagccgctgttaatccaatgaaatttgctgaacaagagaaaaaaaggaaaatgctttggcagggcaagaaagaaggggacaaatcccaatctgctgaaatatgggaaaaattgaattttggaaacaaggaccaaaatgtcaaatttaggaaattgatgggtattaagagtgaagatgaagctggatgtagctcagttgatgaagaaagttacaagactctgaagcagcaggaagaagtatttcgaaatttagatgctcagtatgaaatggcaagatcacaaacccacacacaaagaggaatgggtttgggtttcacatcttcaatgcgaggaatggatgcagtttgaaaatgatcacacttgtaaagtttgggacttatagacttcttgttctgatgtcacgtccttgttcaccaaacagctagcactctagcttgcatgggtgttgcattgactttaatttattgaaaaatacaaatttttgtaaatatcagatcagtgatactggtgttagtgttgtaatcaggttaaacccacttccattaaacttgacaggactatagaaggataatattttttagttcatgaattctacttttcaaatatataaaagctgcaggtggggataaaatctcatacatggattttttcgtgtccgctgtcttgtgtacttttgtacttaaccttgtacagttattttcatctcttgaaacatgaaagaaatgttatgtagatgttctttagaagatctggccatttggtacataatccagcacagataagctgggtggtaatgataataaaaatggttttctcaaaaaaaaaaaaa

SEQ ID NO: 359 - DNA, 708 bp, Homo sapiens
  CDS (133)..(531)
atttggccctcgaggccaagaattcggcacgagagacaccagggcatttgctgacatctgaggcccttcccaggaagacatggcctcgttcttggtgtggccactgaggacggcgctgagagggggaaagtcatgggcagggcctggtgtgggatgtggaggagacggcgcccggggaggaggagcgctgtgcccaggtggcctcacttgtcatctcaaagtggcgtcgaaccccctgacaggtggacgggaacccccggctggccctccagagaccaggaggcccctggctcaatgatgccacctgcagctgcccaaccctccgcccatggtgcccttgttccacctgccaccgctcatgaacctgtggatcacccagctctgcactggcttgcctgctgctgctgtctcagtttacctgggcagttgcccctggctatccggctgggatgggacttggacttagaagcaggcccctcctctggaaagctgtgtcctcgggccaggaggtggcagcctctaccttcctgagacagggacccttttctgtccatcagaggacagctgtatgaagacacagagagaaggcagccatctgtaagccaggaagagagccctcaccaagactggaatcagcagcaccttgatattggacttccagcctccagaactgcaagaaataagcacctgctgtttaaaaaaaaaaaa

SEQ ID NO: 360 - DNA, 781 bp, Homo sapiens
  CDS (95)..(781)
caagctggctagcgtttaaacttaagcttggtaccgagctcggatccactagtccagtgtggtggaattcggtcggcagcacagagctctggagatgaagaccctgttcctgggtgtcacgctcggcctggccgctgccctgtccttcaccctggaggaggaggatatcacagggacctggtacgtgaaggccatggtggtcgataaggactttccggaggacaggaggcccaggaaggtgtccccagtgaaggtgacagccctgggcggtgggaacttggaagccacgttcaccttcatgagggaggatcggtgcatccagaagaaaatcctgatgcggaagacggaggagcctggcaaattcagcgcctatgggggcaggaagctcatatacctgcaggagctgcccgggacggacgactacgtcttttactgcaaagaccagcgccgtgggggcctgcgctacatgggaaagcttgtggcatctgctccctgcagggccgtgccgctgtccccacgtcggctcacctggccacctcacctgcaggtaggaatcctaataccaacctggaggccctggaagaatttaagaaattggtgcagcacaagggactctcggaggaggacattttcatgcccctgcagacgggaagctgcgttctcgaacactaggcagcccccgggtctgcacctccagagcccaccctaccaccagacacagagcccggaccacctggacctaccctccagccatgacccttccctgctcccacccacctga

SEQ ID NO: 361 - DNA, 2147 bp, Homo sapiens
  CDS (58)..(1683)
gcacgaggtttgtggctgcatttttatctctggtggctctgctacggcggcgcagaaatgaggcagaagcggaaaggagatctcagccctgctgagctgatgatgctgactataggagatgttattaaacaactgattgaagcccacgagcaggggaaagacatcgatctaaataaggtgaaaaccaagacagctgccaaatatggcctttctgcccagccccgcctggtggatatcattgctgccgtccctcctcagtatcgcaaggtcttgatgcccaagttaaaggcgaaacccatcagaactgctagtgggattgctgtcgtggctgtgatgtgcaaaccccacagatgtccacacatcagttttacaggaaatatatgtgtatactgccctggtggacctgattctgattttgagtattccacccagtcttacactggctatgagccaacctccatgagagctatccgtgccagatatgaccctttcctacagacaagacaccgaatagaacagttaaaacaacttggtcatagtgtggataaagtggagtttattgtgatgggtggaacgtttatggcccttccagaagaatacagagattattttattcgaaatttacatgatgccttatcaggacatacttccaacaatatttacgaggcagtcaagtattctgagagaagcctcacaaagtgtattggaattactattgaaaccagaccagattactgcatgaagcgacatttaagtgacatgttgacctatggctgcacaaggctggagattggggtgcagagtgtttatgaagatgtggctagagacaccaacaggggccacactgtgaaggcagtgtgtgagtcatttcacctggccaaagattccggttttaaagtggtggcccatatgatgcctgacctgccaaacgtgggactagaaagagacattgaacagttcacagagttttttgagaaccctgcttttcgtcccgatgggctgaaactctatcctaccctggtgattcgtgggaccgggctttatgagctttggaaatcaggaagagataagagttactctcctagtgacctggttgaattggtggctcggatcctagccctcgtgcctccatggactcgagtgtaccgagtacagagggatattccaatgcctttagttagctcaggagtagagcatggtaacctgagagagctggcacttgcaagaatgaaagacctcggaatacagtgtcgagatgtgagaaccagagaagttggaatccaagaaattcatcacaaagtacggccataccaggttgaattggtaaggagagattatgttgcaaatggtggctgggaaacattcttgtcatacgaagacccagatcaagacattttgattggcctcctacgattacgcaagtgttcagaagaaactttccgtttcgaattgggtggaggtgtctccatagtacgagagctgcatgtgtatgggagtgtggtccctgtgagcagccgggatcctactaaatttcagcatcagggatttggcatgctgctgatggaggaagcagaaagaatagctagagaagaacatgggtctgggaaaatcgctgtgatatcaggagtggatgtcctggggcagaggcagaggggaggccaccacagaagctgttcactctaggcactttgcaaggggtcggcaccaggaattattatagaaagatcggctacagattacaaggcccgtacatggtgaagatgctgaaataatggccacaccagtccactcttctgcagtatcctccctggcagaacacggagaatcaggatttcttaaatactcaacagagaggctgagcagagcaaatggggggcttcaccctcatcccgcagctgcagagactggaaactgccttcaaggccacggctggtcatctgctgaccacaccccagatccgccctctcctgcgtgcaccccaaaaaatcacttgcgtttttgaggcttaaatcatctatccagtttctacattttgcatgaggcctgcaggtggcctattttgactcagacggtgaaaaaagcaaattaactcatttggacaccataactcatgcaataaaactgattgtcattcgaaaaaaaaaaaa

SEQ ID NO: 362 - DNA, 2076 bp, Homo sapiens
  CDS (58)..(1701)
gcacgaggtttgtggctgcatttttatctctggtggctctgctacggcggcgcagaaatgaggcagaagcggaaaggagatctcagccctgctgagctgatgatgctgactataggagatgttattaaacaactgattgaagcccacgagcaggggaaagacatcgatctaaataaggtgaaaaccaagacagctgccaaatatggcctttctgcccagccccgcctggtggatatcattgctgccgtccctcctcagtatcgcaaggtcttgatgcccaagttaaaggcgaaacccatcagaactgctagtgggattgctgtcgtggctgtgatgtgcaaaccccacagatgtccacacatcagttttacaggaaatatatgtgtatactgccctggtggacctgattctgattttgagtattccacccagtcttacactggctatgagccaacctccatgagagctatccgtgccagatatgaccctttcctacagacaagacaccgaatagaacagttaaaacaacttggtcatagtgtggataaagtggagtttattgtgatgggtggaacgtttatggcccttccagaagaatacagagattattttattcgaaatttacatgatgccttatcaggacatacttccaacaatatttacgaggcagtcaagtattctgagagaagcctcacaaagtgtattggaattactattgaaaccagaccagattactgcatgaagcgacatttaagtgacatgttgacctatggctgcacaaggctggagattggggtgcagagtgtttatgaagatgtggctagagacaccaacaggggccacactgtgaaggcagtgtgtgagtcatttcacctggccaaagattccggttttaaagtggtggcccatatgatgcctgacctgccaaacgtgggactagaaagagacattgaacagttcacagagttttttgagaaccctgcttttcgtcccgatgggctgaaactctatcctaccctggtgattcgtgggaccgggctttatgagctttggaaatcaggaagagataagagttactctcctagtgacctggttgaattggtggctcggatcctagccctcgtgcctccatggactcgagtgtaccgagtacagagggatattccaatgcctttagttagctcaggagtagagcatggtaacctgagagagctggcacttgcaagaatgaaagacctcggaatacagtgtcgagatgtgagaaccagagaagttggaatccaagaaattcatcacaaagtacggccataccaggttgaattggtaaggagagattatgttgcaaatggtggctgggaaacattcttgtcatacgaagacccagatcaagacattttgattggcctcctacgattacgcaagtgttcagaagaaactttccgtttcgaattgggtggaggtgtctccatagtacgagagctgcatgtgtatgggagtgtggtccctgtgagcagccgggatcctactaaatttcagcatcagggatttggcatgctgctgatggaggaagcagaaagaatagctagagaagaacatgggtctgggaaaatcgctgtgatatcaggggtcggcaccaggaattattatagaaagatcggctacagattacaaggcccgtacatggtgaagatgctgaaataatggccacaccagtccactcttctgcagtatcctccctggcagaacacggagaatcaggatttcttaaatactcaacagagaggctgagcagagcaaatggggggcttcaccctcatcccgcagctgcagagactggaaactgccttcaaggccacggctggtcatctgctgaccacaccccagatccgccctctcctgcgtgcaccccaaaaaatcacttgcgtttttgaggcttaaatcatctatccagtttctacattttgcatgaggcctgcaggtggcctattttgactcagacggtgaaaaaagcaaattaactcatttggacaccataactcatgcaataaaactgattgtcattcgaaaaaaaaaaaa

SEQ ID NO: 363 - DNA, 2123 bp, Homo sapiens
  CDS (71)..(487)
tttctagtccagcgtggtggaattcatatgggcgccggcgcggagcgccgcggggcagcgcggggtcgccatggctgagctgcagcagctccgggtgcaggaggcggtggagtccatggtgaagagtctggaaagagagaacatccggaagatgcagggtctcatgttccggtgcagcgccagctgttgtgaggacagccaggcctccatgaagcaggtgcaccagtgcatcgagcgctgccatgtgcctctggctcaagcccaggctttggtcaccagtgagctggagaagttccaggaccgcctggcccggtgcaccatgcattgcaacgacaaagccaaagattcaatagatgctgggagtaaggagcttcaggtgaagcagcagctggacagttgtgtgaccaagtgtgtggatgaccacatgcacctcatcccaactatgaccaagaagatgaaggaggctctcttatcaattggaaaataaaagtatttgccagtggccatcagggctgagggcaagaatatattttttataaggaattgggaattttagtcttttaagcaaagtttacgaatgaagaaatgaaggatggccacaagcgtaaggcatatgtcacttgcctctggacactggttattttatgtttcagtccctaaaaaatgaaatggaaaaaagtggtgctaaatcgagtcagagatattacaggagagttttagagcttattatttcctgtggccagtgcttgtcctggcagtaaggctttcccctgtaacaagccagagccctccaaggtaccagactcttcttactacacaggtactaacaggctggcaggttagagttggtggagtctgaggagagatattttctctttgttgccaacatcctgtttaccaaaagtgtcaccccaccatcttccataagctgtgaaacaaaatcaatgaggtcactaacttagaagggaaagaaagttttctgggtctttgttttcttgatttggggtaatttatacaagggcatacaagttgattttaagatgtggaactgggaggtagactagtttggataagaactttgaaatgttccttgtggatccccatttctggtcatcaagatgtggatgtacatttcttaaaattattacatgctgcatctttcagcctggagactgtgcagaaacatgagaggtgatgacacactaattatgggaagcagaattactggctgatggcccctgaggctgtgtgtaacaaaatgacaggacaatcttgcagtaacactttccccttgaagagaagggggttttgattgtgatatatactagtatctaggaatgaacagtaaaagaggagcagttggctacttgattacaacagagtaaatgaagtactggatttgggaaaacctggttttattagaacatatggaatgaaagcctacacctagcattgcctacttagccccctgaattaacagagcccaattgagacaaacccctggcaacaggaaattcaagggagaaaaagtaagcaacttgggctaggatgagctgactcccttagagcaaaggagagacagcccccattaccaaataccatttttgcctggggcttgtgcagctggcagtgttcctgccccagcatggcaccttattgttttgatagcaacttcgttgaattttcaccaacttattacttgaaattataatatagcctgtccgtttgctgtttccaggctgtgatatattttcctagtggtttgactttaaaaataaataaggtgccatgctggggcaggaacactgccagctgcacaagccccaggcaaaaatggtatttggtaatgggggctgtctctcctttgctctaagggagtcagctcatcctagcccaagttgcttactttttctcccttgaatttcctgttgccaggggtttgtctcaattgggctctgttaattcagggggctaagtaggcaatgctaggtgtaggctttcattccatatgttctaatgtcgagcggccgggaatttagtagtagtaggcggccgctctagaggatccaagcttacgtacgcgtgcatgcgacgtcatagctcttatatagtgtcacctaaaa

SEQ ID NO: 364 - DNA, 3820 bp, Homo sapiens
  CDS (60)..(2363)
accggtccggaattcccgggtcgacgatttcgtcctagcggagccgggactggagcaacatgaaccgtgaagaccggaatgtgctgcgtatgaaagaacgggaaaggcggaatcaggaaattcagcagggcgaagacgccttcccacctagctctcctctctttgcagagccatacaaagttactagcaaagaagataagttatcaagtcgtattcagagtatgcttggaaactacgatgaaatgaaggatttcataggagacagatctataccaaagcttgttgcaattcccaagcctacagtaccaccatcagcagatgaaaaatctaacccaaatttctttgaacagagacatggaggctctcatcagagtagcaaatggactccagtaggacccgcacccagcacttctcagtctcagaaacggtcctcaggcttacagagtggacatagtagccagcggaccagcgcaggtagcagtagtggcactaacagtagtggtcagaggcacgaccgtgagtcatataacaatagtgggagcagtagccggaaaaaaggccagcatggatcagaacactccaaatcacgttcttccagccctggaaaaccccaggctgtttcttcattaaactctagtcattccaggtctcatgggaatgatcaccatagcaaggaacatcaacgctccaaatcacctcgggaccctgatgcaaactgggattctccttcccgtgtacctttttcaagtgggcagcactcaactcaatctttcccaccctcattgatgtcaaagtccaattcaatgttacagaaacccactgcctatgtgcggcccatggacggacaggagtccatggaaccaaagctgtcctctgagcactacagcagccaatcccatggcaacagcatgactgagctgaagcccagcagcaaagcacatctcaccaagctgaaaataccttcccaaccactggatgcatcagcttctggtgatgtgagctgtgtggatgaaatcctaaaagagatgacgcattcatggcctccccctctaacggctattcatacaccatgcaaaacagaaccttccaaatttccttttccaactaaggagtctcagcagtccaattttggcactggagaacaaaaaagatataatccttctaaaacttcaaatgggcaccagtctaaatctatgttaaaagatgacttaaaactaagcagcagtgaagacagtgatggggaacaggattgtgataagacaatgccgaggagtacaccaggaagtaactctgaaccttcacaccataatagtgaaggagcagataactccagggatgattctagtagccacagtggatctgaaagcagctctggatctgactcagagagtgaaagtagttccagtgacagtgaggcaaatgagccatcccagagtgcatctcccgagcctgaacccccgccaacaaacaaatggcaacttgataattggctgaataaagtgaacccacataaagtgtcacccgcctcttcagtggacagtaacatcccatcatctcaaggctacaaaaaggaaggccgagagcagggcactgggaatagctacactgatacaagtggacctaaagaaacgagttccgctactccgggacgagactccaaaaccatccaaaagggatcagaaagtgggcgtgggaggcagaaatctcctgcacagagtgacagcacaacacagagaagaactgtaggcaaaaaacaacccaaaaaggctgagaaggcagctgctgaagagcctcgtggaggcctgaagatagaaagtgaaacccctgtagacttggctagcagcatgccctccagcagacacaaagcagccaccaaaggctcaaggaaacccaatataaagaaggagtctaagtcttcccctcgacctacagcagagaaaaagaaatataagtcaacaagtaaatcttcccagaaatcaagggaaatcatagaaacagatacctcatcctcagattcagatgaaagtgagagccttcctccttcctcacaaactcctaagtaccccgagagcaataggactcctgttaaaccctcctcagtggaggaagaagatagcttttttcggcaacgaatgttctctcctatggaagagaaggaacttctttcacccctcagtgagcctgatgacaggtacccacttattgtgaagattgacctgaatcttttgactagaataccaggaaagccttacaaagaaacagagccgcccaagggggaaaagaaaaatgtgccagaaaagcacacgagagaggctcagaaacaagcctcagaaaaagtttccaacaaaggcaagagggaagcataagaatgaagatgataaccgagccagtgagagcaagaaacccaaaacggaggacaagaattcagcaggccataagccatccagcaacagagagtcatctaagcagagtgctgcaaaagaaaaggatttgttgccttctcccgctgggcctgttccttcaaaagatccaaaaacagagcatggctctcggaagaggactattagtcagtcttcttccttaaagtcaagcagtaacagcaacaaggagacgagtggcagcagcaaaaacagttcctccacatcaaagcagaagaagaccgaagggaagacttccagtagctccaaggaggttaaggaaaaggctccaagtagctcctctaactgtcctccatctgcaccaactcttgattcttctaagcctcggagaacaaagcttgtctttgatgacagaaattattcagcagaccattatttacaagaagcaaaaaagctaaagcacaatgcagatgcattgtctgataggtttgagaaagctgtatactatcttgatgctgtggtatctttcattgaatgtgggaatgcattagagaagaatgctcaggaatccaaatccccattccctatgtattcagagacggtggatctcatcaaatacactatgaagctaaagaattacttggcaccagatgctacagctgcagataaacgactcacagtactttgcctgcgatgcgagtctttgctgtacctgaggctgttcaaactgaagaaggaaaatgctctgaagtactcaaagacactgacagagcacctgaagaattcttataataattctcaagcaccatcgcctggcttgggaagcaaagctgtggggatgccttcccctgtttctccaaagctgtcaccaggcaattcaggaaattattcatctggggccagtagtgcttctgcaagtggttcttcagtgaccattccacagaagatccaccagatggcagccagctatgttcaggtcacatccaacttcctctatgccaccgaaatttgggaccaagctgaacagctttccaaagagcaaaaagaattctttgctgaactggataaagtaatgggccctctcatctttaatgcaagcatcatgacagatctagttcgttatacccggcagggactgcactggcttcgccaggatgccaagttgatatcttgaactgaacacattctcgttgcctctgattttctccacaacactgtgtcacatcacgaaggaaaactgccataacataccacctagtcgacactaagaatgaggaatagttttctcctcgttggttcatgtgttgttgtttttgataatccaaagcgatcatgtcagttggccctttaatatttccaatgtgaaagattatttaaatgcttttaaatctgcagcacattgataaaatctcgtgccgaattcttggcctcgagggccaaat

SEQ ID NO: 365 - DNA, 3203 bp, Homo sapiens
  CDS (191)..(2692)
taagcttgcggccgccctggccactgcccgaagtttgtgggggacgccccgccttccctgcagcccgggatggcaaggggcgacgaagaggcttctggtgcggtcggtctccggggccagtaaccaccagccgaactcgaatagtggcagataccgggacacggtgctgctgccgcagacgagcttccccatgaagctgctgggccgccagcagccggacacggagctggagatccagcagaaatgtggattttcagaactttattcatggcaaagagaaagaaaagtaaagacagaattttgccttcatgatggacctccttatgcaaacggtgaccctcatgttggacatgctttaaataagattttgaaagacatagccaatcgattccatatgatgaatggctccaaaatacattttgtgcccggctgggattgtcatgggttgcccattgaaataaaagtattatcagaacttggtagagaagctcagaatctttcagctatggaaattagaaagaaagctagatcatttgctaaagcagccattgagaaacagaaatcagcatttattcgttggggaataatggcagattggaataattgctactatacatttgatgggaagtatgaagccaaacagttgagaactttttaccaaatgtatgataagggcttggtttatcgatcttacaaacctgtgttttggtctccgtcatctaggactgcattggctgaagcagaacttgaatataatcctgagcatgtcagtcgttcaatatatgtaaaatttcctctcttaaagccttctccaaaattggcatctcttatagatggttcatctcctgttagtattttggtctggaccacacaaccttggacgattccagccaatgaagctgtttgctatatgcctgaatcaaagtatgctgttgtgaaatgttctaagtctggagacctctacgtactggcggcagataaagtagcatctgttgcttctactttggaaacaacatttgagactatttcaacactttcaggtgtagatttggaaaatggtacttgcagtcatccattaattcctgataaagcctctcctcttttacctgcaaatcatgtgaccatggcaaaaggaacgggattggttcacacagccccagctcatggtatggaagactacggtgtagcgtctcagcacaacctgcccatggattgtctagtggacgaagatggagttttcacagatgttgcaggtcctgaacttcaaaacaaggctgtccttgaagagggaactgatgtggttataaagatgcttcagactgcaaagaatttgttgaaagaggagaaattggtgcatagctatccgtatgactggaggaccaagaaacctgtggttattcgtgccagcaagcagtggtttataaacatcacggatattaagactgcagccaaggaattgttaaaaaaggtgaaatttattcctggatcagcactgaatggcatggttgaaatgatggacaggcggccatattggtgtatatcaaggcaaagagtttggggtgttccaattcctgtgtttcatcataagaccaaggatgaatacttgatcaacagccaaaccactgagcatattgttaaactagtggaacaacacggcagtgatatctggtggactcttccccctgaacaacttcttccaaaagaagtcttatctgaggttggtggccctgatgccttggaatatgtgccaggtcaggatattttggacatctggtttgatagcggaacttcatggtcttatgttcttccaggtcctgaccaaagagcagatttgtacttggaaggaaaagaccagctcgggggttggtttcagtcatccttattaacaagtgtggcagcaaggaagagagcaccttataagacagtgattgttcatggatttacccttggagaaaagggagaaaagatgtccaagtctcttgggaatgtcattcatcctgatgttgtcgttaatggaggacaagatcaaagcaaagagcctccgtatggtgctgatgtccttcgctggtgggtagctgattccaatgtcttcaccgaagttgcaattggcccatccgtgctcaatgctgccagagatgatattagcaagcttaggaatacacttcgctttcttttgggaaatgtggctgatttcaacccagaaacagattccatccctgtaaacgatatgtatgtcatagaccagtacatgctacacttactgcaggatttggcaaacaagattaccgaattatacaaacaatatgattttggaaaagttgttcggctgttacggacgttttataccagagagctctctaacttttatttcagtataatcaaagataggctctattgtgaaaaggaaaatgaccccaaacgacgctcttgtcagactgcattagttgaaattttggatgtaatagttcgttcttttgctcccattcttcctcacctggctgaagaggtgttccagcacataccttatattaaagagcccaagagtgttttccgtactgggtggattagtactagttctatctggaaaaagcccgggttggaagaagctgtgagagtgcgtgtgcaatgcgagactcatttcttggaagcatccctggcaaaaatgcagctgagtacaaggttatcactgtgatagaacctggactgctttttgagataatagagatgctgcagtctgaagagacttccagcacctctcagttgaatgaattaatgatggcttctgagtcaactttactggctcaggaaccacgagagatgactgcagatgtaatcgagcttaaagggaaattcctcatcaacttagaaggtggtgatattcgtgaagagtcttcctataaagtaattgtcatgccgactacgaaagaaaaatgcccccgttgttggaagtatacagcggagtcttcagatacactgtgtcctcgatgtgcagaagttgtcagtggaaaatagtattaacagctcactcgagcaagaaccctcctgacagtactggctggaagtttggatggattatttacaatatagggaagaaagccaagatttaggtaatgagtggatgagtaaatggtggaggatgggagcaaaatagaattatagaagaagtatttccttaactatagaaagattatgtatatatacat

SEQ ID NO: 366 - DNA, 2000 bp, Homo sapiens
  CDS (66)..(1835)
gcacgaggagacattagagagataatacggctgatagacaacaagaaggtattccaagctgcacaatgaggcccaggagacccttggtcttcatgtctttggtgtgtgcactcttgaacacatgccaggcacacagggtgcatgacgacaagcctaatattgtcctaatcatggttgatgacctgggtattggagatctgggctgctacggcaatgacaccatgaggacgcctcacatcgaccgccttgccagggaaggcgtgcgactgactcagcacatctctgccgcctccctctgcagcccaagccggtccgcgttcttgacgggaagataccccatccgatcaggtatggtttctagtggtaatagacgtgtcatccaaaatcttgcagtccccgcaggcctccctcttaatgagacaacacttgcagccttgctaaagaagcaaggatacagcacggggcttataggcaaatggcaccaaggcttgaactgcgactcccgaagtgaccagtgccaccatccatataattatgggtttgactactactatggcatgccgttcactctcgttgacagctgctggccggacccctctcgtaacacggaattagcctttgagagtcagctctggctctgtgtgcagctagttgccattgccatcctcaccctaacctttgggaagctgagcggctgggtctctgttccctggctcctgatcttctccatgattctgtttattttcctcttgggctatgcttggttctccagccacacgtcccctttatactgggactgcctcctcatgcgggggcacgagatcacggagcagcccatgaaggctgaacgagctggatccattatggtgaaggaagcgatttcctttttagaaaggcacagtaaggaaactttccttctctttttctcctttcttcacgtgcacacacctctccccaccacggacgatttcactggcaccagcaagcatggcttgtatggggataatgtggaagagatggactccatggtgggcaagattcttgatgctatcgatgattttggcctaaggaacaacacccttgtctactttacatcagatcacggagggcatttggaagctaggcgagggcatgcccaacttggtggatggaatggaatatacaaaggtggaaaaggcatggggggctgggaaggtggaatccgcgtcccaggaattgtccgatggcctggaaaggtaccagctggacggttgattaaggaacctacaagtttaatggatattttaccaactgtcgcatcagtgtcaggaggaagtctccctcaggacagggtcattgacggccgagacctcatgcccttgctgcagggcaacgtcaggcactcggagcatgaatttcttttccactactgtggctcctacctgcacgccgtgcggtggatccccaaggacgacagtgggtcagtttggaaggctcactatgtgaccccggtattccagccaccagcttctggtggctgctatgtcacctcattatgcagatgtttcggagaacaggttacctaccacaacccccctctgctcttcgatctctccagggacccctcagagtccacacccctgacacctgccacagagcccctctatgattttgtgattaaaaaggtggccaacgccctgaaggaacaccaggaaaccatcgtgcctgtgacctaccaactctcagaactgaatcagggcaggacgtggctgaagccttgctgtggggtgttcccattttgtctgtgtgacaaggaagaggaagtctctcagcctcggggtcctaacgagaagagataattacaatcaggctaccagaggaagcctttggtcctaacgagaagagataattacaatcaggctaccaaaggaagcactaactttggtgctttcaagttggcaaggagtgcatttaatagtcaataaattcatctaccattccagattattaaaaaaaaaaaa

SEQ ID NO: 367 - DNA, 2469 bp, Homo sapiens
  CDS (9)..(2255)
tgggtccgatgctgggtacgctgcgcgccatggagggcgaggacgtggaagacgaccagctgctgcagaagctcagggccagtcgccgccgcttccagaggcgcatgcagcggctgatagagaagtacaaccagcccttcgaggacaccccggtggtgcaaatggccacgctgacctacgagacgccacagggattgagaatttggggtggaagactaataaaggaaagaaacgaaggagagatccaggactcctccatgaagcccgcggacaggacagatggctccgtgcaagctgcagcctggggtcctgagcttccctcgcaccgcacagtcctgggagccgattcaaaaagcggtgaggtcgatgccacgtcagaccaggaagagtcagttgcttgggccttagcacctgcagtgcctcaaagccctttgaaaaatgaattaagaaggaaatacttgacccaagtggatatactgctacaaggtgcagagtattttgagtgtgcaggtaacagagctggaagggatgtacgtgtgactccgctgccttcactggcctcacctgccgtgcctgcccccggatactgcagtcgtatctccagaaagagtcctggtgacccagcgaaaccagcttcatctcccagagaatgggatcctttgcatccttcctccacagacatggccttagtacctagaaatgacagcctctccctacaagagaccagtagcagcagcttcttaagcagccagccctttgaagatgatgacatttgcaatgtgaccatcagtgacctgtacgcagggatgctgcactccatgagccggctgttgagcacaaagccatcaagcatcatctccaccaaaacgttcatcatgcaaaactggaactgcaggaggaggcacagatataagagcaggatgaacaaaacatattgcaaaggagccagacgttctcagaggagctccaaggagaacttcataccctgctctgagcctgtgaaagggacaggggcattaagagattgcaagaacgtattagatgtttcttgccgtaagacaggtttaaaattggaaaaagcttttcttgaagtcaacagaccccaaatccataagttagatccaagttggaaggagcgcaaagtgacaccctcgaagtattcttccttgatttacttcgactccagtgcaacatataatcttgatgaggaaaatagatttaggacattaaaatggttaatttctcctgtaaaaatagtttccagaccaacaatacgacagggccatggagagaaccgtcagagggagattgaaatccgatttgatcagcttcatcgggaatattgcctgagtcccaggaaccagcctcgccggatgtgcctcccggactcctgggccatgaacatgtacagagggggtcctgcgagtcctggtggccttcagggcttagaaacccgcaggctgagtttaccttccagcaaagcaaaagcaaaaagtttaagtgaggcttttgaaaacctaggcaaaagatctctggaagcaggtaggtgcctgcccaagagcgattcatcttcatcacttccaaagaccaaccccacacacagcgcaactcgcccgcagcagacatctgaccttcacgttcagggaaatagttctggaatatttagaaagtcagtgtcacccagcaaaactctttcagtcccagataaagaagtgccaggccacggaaggaatcgttacgatgaaattaaagaagaatttgacaagcttcatcaaaagtattgcctcaaatctcctgggcagatgacagtgcctttatgtattggagtgtctacagataaagcaagtatggaagttcgatatcaaacagaaggcttcttaggaaaattaaatccagaccctcacttccagggtttccagaagttgccatcatcacccctggggtgcagaaaaagtctactgggctcaactgcaattgaggctccttcatctacatgtgttgctcgtgccatcacgagggatggcacgagggaccatcagttccctgcaaaaagacccaggctatcagaaccccagggctccggacgccagggcaattccctgggtgcctcagatggggtggacaacaccgtcagaccgggagaccagggcagctcttcacagcccaactcagaagagagaggagagaacacgtcttacaggatggaagagaaaagtgatttcatgctagaaaaattggaaactaaaagtgtgtagctaggttatttcggagtgttatttatcttcccacttgctctctgtttgtatttttgttttgtttttgattcttgagactgtgaggacttggttgacttctctgcccttaaagtaaatattagtgaaattggttccatcagagataacctcgagttcttggtgtagaaattatgtgaataaagttgctcaattagaattttaaaaaaaaaaaaaa

SEQ ID NO: 368 - DNA, 1201 bp, Homo sapiens
  CDS (59)..(700)
ccggaattcccgggtcgacccacgcgtccgcccgcagctaagcgcagctcccgacgcaatggacccggcgctggcagcccaaatgagcgaggctgtggccgaaaagatgctccagtaccggcgggacacagcaggctggaagatttgccgggaaggcaatggagtttcagtttcctggaggccatctgtggagtttccagggaacctgtaccgaggagaaggcattgtatatgggacactagaggaggtgtgggactgtgtgaagccagctgttggaggcctacgagtgaagtgggatgagaatgtgaccggttttgaaattatccaaagcatcactgacaccctgtgtgtaagcagaacctccactccctccgctgccatgaagctcatttctcccagagattttgtggacttggtgctagtcaagagatatgaggatgggaccatcagttccaacgccacccatgtggagcatccgttatgtcccccgaagccaggttttgtgagaggatttaaccatccttgtggttgcttctgtgaacctcttccaggggaacccaccaagaccaacctggtcacattcttccataccgacctcagcggttacctcccacagaacgtggtggactccttcttcccccgcagcatgacccggttttatgccaaccttcagaaagcagtgaagcaattccatgagtaatgctatcgttacttcttggcaaagaactcccgtgactcatcgaggagctccagctgttgggacaccaaggagcctgggagcacgcagaggcctgtgttcactctttggaacaagctgatggactgcgcatctctgagaatgccaaccagaggcggcagcccacccttcctgcctcctgccccactcagggttggcgtgtgatgagccattcatgtgttccaaactccatctgcctgttacccaaacacgcctctcctggcagggtagacccaggcctctaaccatctgacagagactcggcctggacaccatgcgatgcactctggcaccaaggctttatgtgcccatcactctcagagaccacgtttccctgactgtcatagagaatcatcatcgccactgaaaaccaggccctgttgccttttaagcatgtaccgctccctcagtcctgtgctgcagccccccaaatatatttttctgatatagaaaaaaaaaaaaaaa

SEQ ID NO: 369 - DNA, 1501 bp, Homo sapiens
  CDS (256)..(1329)
  misc_feature (1)...(1501): n = a,t,c or g
attgaaagcccgttcgactgccgtaccggnccggaattcccgggtcgacgatttcgtgccttcgcggcgcacgaggagaagatccagaccgtgttcgagcagctggtgctggtggaccacccgaacatcgtgaagttgcacaagtactggctggatacctctgaggcctgcgcgagggtcatcttcatcacagagtacgtgtcatcaggcagcctcaagcaattcctcaaaaagaccaagaagaaccacaaggccatgaacgcccgggcctggaagcgctggtgcacgcagatcctgtctgcgctcagcttcctgcacgcctgcacccccccaatcatccacgggaacctgaccagcgacaccatcttcattcagcacaacggcctcatcaagatcggctccgtgtggcaccgaatcttctccaatgcacttccagatgatctccgaagccccatccgcgctgagcgagaggaacttcggaacctgcacttcttccccccagagtatggagaggtggccgatgggaccgctgtggacatcttctcctttgggatgtgtgcgctggagatggctgtactggaaatccagaccaatggggacacccgggtcacagaggaggccattgctcgcgccaggcactcgctgagtgaccccaacatgcgggagttcatcctttgctgcctggcccgggaccctgcccgccggccctctgcccacagcctcctcttccaccgcgtgctcttcgaggtgcactcgctgaagctcctggcagcccactgcttcatccagcaccagtacctcatgcctgagaatgtggtggaggagaagaccaaggccatggacctgcacgcggtcttggcggagcttccccggccccgcaggcccccgctgcagtggcggtactcggaagtctccttcatggagctggacaaattcctggaggatgtcaggaatggaatctacccactgatgaactttgcagccactcgacccctggggctgccccgtgtgctggccccacccccggaggaggtccaaaaggccaagaccccgacgccagagccctttgactctgagaccagaaaggtcatccagatgcagtgcaacctggagagaagcgaggacaaggcgcgctggcatctcactctgcttctggtgctggaagaccggctgcaccggcagctgacctacgacctgctcccaacggacagcgcccaggacctcgcctcggagctcgtgcactatggcttcctccacgagcacgaccggatgaagctggccgccttcctggagagcaccttcctcaagtaccgtgggacccaggcctgacccggagccccagccccaggggaccatgccggggtgctgcccgggcaggccatgttggggagactccagcaccgtggggctgccctcctccatgcgcctgggagcacaaaggccccggtagtgaaggaaccccccgtctcctgagagtggggctgaccctgccttgggcgcc

SEQ ID NO: 370 - DNA, 2510 bp, Homo sapiens
  CDS (362)..(1966)
  misc_feature (1)...(2510): n = a,t,c or g
ggtaccggtccggaattcccgggtcgacgatttcgtgtggggagggcacggactgacagacggactccggcggaatggggggtgtggctgctccgccagggtccccagggtgggagagcggctccgcggccaccgatgcccggaccccctctgtcttctgctagacatgctcttcctctcggtgagttgttttgctgtcgtcgcgggccggattcgtggccttagtcacgcccctggggaggaggaaggagccgggccgcttcgatctgtgtggcctggatagggcagggcaaaggggaactgacccgcttcgctcccgggcctcctccttttggggcatgttgatccgcggctgcgctccatgttccagtttcatgcaggctcttgggaaagctggtgctgctgctgcctgattcccgccgacagaccttgggaccggggccaacactggcagctggagatggcggacacgagatccgtgcacgagactaggtttgaggcggccgtgaaggtgatccagagtttgccgaagaatggttcattccagccaacaaatgaaatgatgcttaaattttatagcttctataagcaggcaactgaaggaccctgtaaactttcaaggcctggattttgggatcctattggaagatataaatgggatgcttggagttcactgggtgatatgaccaaagaggaagccatgattgcatatgttgaagaaatgaaaaagattattgaaactatgccaatgactgagaaagttgaagaattgctgcgtgtcataggtccattttatgaaattgtcgaggacaaaaagagtggcaggagttctgatataccctcagtccgactggagaaaatctctaaatgtttagaagatcttggtaatgttctcacttctactccgaacgccaaaaccgttaatggtaaagctgaaagcagtgacagtggagccgagtctgaggaagaagaggcccaagaagaagtgaaaggagcagaccaaagtgataatgataagaaaatgatgaagaagtcagcagaccataagaatttggaagtcattgtcactaatggctatgataaagatggctttgttcaggatatacagaatgacattcatgccagttcttccctgaatggcagaagcactgaagaagtaaagcccattgatgaaaacttggggcaaactggaaaatctgctgtttgcattcaccaagatataaatgatgatcatgttgaagatgttacaggaattcagcatttgacaagcgattcagacagtgaagtttactgtgattctatggaacaatttggacaagaagagtctttagacagctttacgtccaacaatggaccatttcagtattacttgggtggtcattccagtcaacccatggaaaattctggatttcgtgaagatattcaagtacctcctggaaatggcaacattgggaatatgcaggtggttgcagttgaaggaaaaggtgaagtcaagcatggaggagaagatggcaggaataacagcggagcaccacaccgggagaagcgaggcggagaaactgacgaattctctaatgttagaagaggaagaggacataggatgcaacacttgagcgaaggaaccaagggccggcaggtgggaagtggaggtgatggggagcgctggggctccgacagagggtcccgaggcagcctcaatgagcagatcgccctcgtgctgatgagactgcaggaggacatgcagaatgtccttcagagactgcagaaactggaaacgctgactgctttgcaggcaaaatcatcaacatcaacattgcagactgctcctcagcccacctcacagagaccatcttggtggcccttcgagatgtctcctggtgtgctaacgtttgccatcatatggccttttattgcacagtggttggtgtatttatactatcaaagaaggagaagaaaactgaactgaggaaaatggtgttttcctcaagaagactactggaactggatgacctcagaatgaactggattgtggtgttcacaagaaaatcttagtttgtgatgattacattgctttttgttgtccagtagtttagtttgtgtacatatatacacatatatattttgcactacacaaacgataacattttaaggactaatattgctgatacttgaataatcaatctctactaggttataagtagtatacacagatttaccctgcccttgaacttgaaggacattaaattattaatgatcatttggtaacatgtttacctgattatcttccatagagtaacataagctgcttttcaaaggtaccgttgtgataatgagatcaagtttataagttattcgttttaattttttaaactaaataaaagaaagaatgcaaaccaggagtgactttcaaatgagacgtaatagggctttatatgttagtctcgaagttgccatggcatgtattgcggtcgctctagaggatcacatnnacnnacgcgtgcatgcgacgt

SEQ ID NO: 371 - DNA, 2363 bp, Homo sapiens
  CDS (186)..(1676)
cgcctcctcctcctcagccggcggcggcccgggcccagcaaccatggctgaagactactgggacgggcgcctgcggcgaacaggaggagaaggaggtcgcgcggcctcatcccgggccgccgccccaggcgccgccgcgccggccccgcggctctgaggttgctcgcgcgcccccgccgatcgccatggatcggatgaagaagatcaaacggcagctgtcaatgacactccgaggtggccgaggcatagacaagaccaatggtgcccctgagcagataggcctggatgagagtggtggtggtggcggcagtgaccctggagaggcccccacacgtgctgctcctggggaacttcgttctgcacggggcccactcagctctgcaccagagattgtgcacgaggacttgaagatggggtctgatggggagagtgaccaggcttcagccacgtcctcggatgaggtgcagtctccagtgagagtgcgtatgcgcaaccatcccccacgcaagatctccactgaggacatcaacaagcgcctatcactaccagctgacatccggctgcctgagggctacctggagaagctgaccctcaatagccccatctttgacaagcccctcagccgccgcctccgtcgtgtcagcctatctgagattggctttgggaaactggagacctacattaagctggacaaactgggcgagggtacctatgccaccgtctacaaaggcaaaagcaagctcacagacaaccttgtggcactcaaggagatcagactggaacatgaagagggggcaccctgcaccgccatccgggaagtgtccctgctcaaggacctcaaacacgccaacatcgttacgctacatgacattatccacacggagaagtccctcacccttgtctttgagtacctggacaaggacctgaagcagtacctggatgactgtgggaacatcatcaacatgcacaacgtgaaactgttcctgttccagctgctccgtggcctggcctactgccaccggcagaaggtgctacaccgagatctcaagccccagaacctgctcatcaacgagaggggagagctcaagctggctgactttggcctggcccgagccaagtcaatcccaacaaagacatactccaatgaggtggtgacactgtggtaccggccccctgacatcctgcttgggtccacggactactccactcagattgacatgtggggtgtgggctgcatcttctatgagatggccacaggccgtcccctctttccgggctccacggtggaggaacagctacacttcatcttccgtatcttaggaaccccaactgaggagacgtggccaggcatcctgtccaacgaggagttcaagacatacaactaccccaagtaccgagccgaggcccttttgagccacgcaccccgacttgatagcgacggggccgacctcctcaccaagctgttgcagtttgagggtcgaaatcggatctccgcagaggatgccatgaaacatccattcttcctcagtctgggggagcggatccacaaacttcctgacactacttccatatttgcactaaaggagattcagctacaaaaggaggccagccttcggtcttcgtcgatgcctgactcaggcaggccagctttccgcgtggtggacaccgagttctaagccacagaccgaggccccagcaggcagcggctggagggatgccacacccctcacagggcagcccccaactacatcttccctgcttactctctgcctacctgcctgagccatgttcacctgcccacttgtcccctgctgcctgcccaaacaccccaccattggcctgtcaacccacccattggcctgtctgctgggtgctaacaaagctctcatcactccttcacttggtctgtctgtctctgtcttggtagttgccggtggacagcatggccgtgccagcctcccacactgaggccaggtctaccccccatcataccagcccccaggaccactaccccacggccagccaggggtccagagctagcccaggctggggatctcgactcagacaagatggtgacaatgccttgagtctgaggcatcctctgcctgctttcctgcctgccccacctgcctcatattgtgtgggcctttttttgtttgtttcattcattgttttttttttttaaataatttaaaaggaaatttttgttttttttaaaggcaatatttttgtatacagactggctgggcccccccccctgcggggggccctcccacagtattttgggcaaggaacccctgctcccaccctttcaaaaacggggacccaacccctatttggaaccctgatcatcaccaaacctg

SEQ ID NO: 372 - DNA, 2027 bp, Homo sapiens
  CDS (156)..(1853)
atttggccctcgaggccaaaaattcggcacgagcgagctttcttcgttcgttcgccggcggcttcgcgcccttctcgcgcctcggggctgcgaggctggggaaggggttggagggggctgttgatcgccgcgtttaagttgcgctcggggcggccatgtcggccggcgaggtcgagcgcctagtgtcggagctgagcggcgggaccggaggggatgaggaggaagagtggctctatggcgatgaaaatgaagttgaaaggccagaagaagaaaatgccagtgctaatcctccatctggaattgaagatgaaactgctgaaaatggtgtaccaaaaccgaaagtgactgagaccgaagatgatagtgatagtgacagcgatgatgatgaagatgatgttcatgtcactataggagacattaaaacgggagcaccacagtatgggagttatggtacagcacctgtaaatcttaacatcaagacagggggaagagtttatggaactacagggacaaaagtcaaaggagtagaccttgatgcacctggaagcattaatggagttccactcttagaggtagatttggattcttttgaagataaaccatggcgtaaacctggtgctgatctttctgattattttaattatgggtttaatgaagatacctggaaagcttactgtgaaaaacaaaagaggatacgaatgggacttgaagttataccagtaacctctactacaaataaaattacggtacagcagggaagaactggaaactcagagaaagaaactgcccttccatctacaaaagctgagtttacttctcctccttctttgttcaagactgggcttccaccgagcagaaacagcacttcttctcagtctcagacaagtactgcctccagaaaagccaattcaagcgttgggaagtggcaggatcgatatgggagggccgaatcacctgatctaaggagattacctggggcaattgatgttatcggtcagactataactatcagccgagtagaaggcaggcgacgggcaaatgagaacagcaacatacaggtcctttctgaaagatctgctactgaagtagacaacaattttagcaaaccacctccgtttttccctccaggagctcctcccactcaccttccacctcctccatttcttccacctcctccgactgtcagcactgctccacctctgattccaccaccgggtattccaataactgtaccacctccaggttttcctcctccaccaggcgctccacctccatctcttataccaacaatagaaagtggacattcctctggttatgatagtcgttctgcacgtgcatttccatatggcaatgttgcctttccccatcttcctggttctgctccttcgtggcctagtcttgtggacaccagcaagcagtgggactattatgccagaagagagaaagaccgagatagagagagagacagagacagagagcgagaccgtgatcgggacagagaaagagaacgcaccagagagagagagagggagcgtgatcacagtcctacaccaagtgttttcaacagcgatgaagaacgatacagatacagggaatatgcagaaagaggttatgagcgtcacagagcaagtcgagaaaaagaagaacgacatagagaaagacgacacagggagaaagaggaaaccagacataagtcttctcgaagtaatagtagacgtcgccatgaaagtgaagaaggagatagtcacaggagacacaaacacaaaaaatctaaaagaagcaaagaaggaaaagaagcgggcagtgagcctgcccctgaacaggagagcaccgaagctacacctgcagaataggcatggttttggccttttgtgtatattagtaccagaagtagatactataaatcttgttatttttctggataatgtttaagaaatttaccttaaatcttgttctgtttgttagtatgaaaagttaactttttttccaaaataaaagagtgaatttttcatgttaaaaaaaaaaaa

SEQ ID NO: 373 - DNA, 13202 bp, Homo sapiens
  CDS (391)..(6801)
tgacatgcccgcgtacgtaagcttggatcctctagagcggccgccggtttagagcaccgctgccagcatccggaggagagcaatgcgggggcccgagcggcagctcgaacagtaatgtggatttacagtcgtttcccgcaggagtcggccgagacgccctaagtcccgggcactggcagcgcccggcggagccgagcacctggcgagggggcgggggaacagcacctggggacgccgccgaaacttgcgcttggaataggaattacaagggtgacctttattccgctgtctcctttttgattcccataacttctggacctatcaaggactgcttgcattaaaggacttcctcatcctttttttcatgaaactgagcttgcttaatcagagatggagcaaactgactgcaaaccctaccagcctctaccaaaagtcaagcatgaaatggatctagcttacaccagttcttctgatgagagtgaagatggaagaaaaccaagacagtcatacaactccagggagaccctgcacgagtataaccaggagctgaggatgaattacaatagccagagtagaaagaggaaagaagtagaaaaatctactcaagagatggaattctgtgaaacctctcacactctgtgctctggctaccaaacagacatgcacagcgtttctcggcatggctaccagctagagatgggatctgatgtggacacagagacagaaggtgctgcctcacctgaccatgcactaagaatgtggataaggggaatgaaatcagagcatagttcctgtttgtccagccgggccaactctgcattatccttgactgacactgaccatgaaaggaagtctgatggggaaaatggtttcaaattctctcctgtttgttgtgacatggaggctcaagctgggtctactcaagatgtgcagagcagcccacacaaccagttcaccttcagacccctcccaccgccacctccgcctcctcatgcctgcacctgtgccaggaagccaccccctgcagcggactctcttcagaggagatcaatgactacccgcagccagcccagcccagctgctccagctcccccaaccagcacgcaggattcagtccatctgcataacagctgggtcctgaacagcaacataccattggagaccaggcatttcctgttcaaacatggatctggttcctctgcgatcttcagtgcagccagtcagaactaccctctgacatccaataccgtgtactcgccccctcccaggcctcttcctcgaagcaccttttcccgacctgcctttacctttaacaaaccttacaggtgctgcaactggaagtgcacagcattgagcgccactgcaatcacagtgactttggccttgttactagcctatgtgattgcagtgcatttgttcggcctgacttggcagttgcaaccagttgaaggagagctgtatgcaaatggagttagcaaagggaacagggggaccgagtccatggacactacttactctccaattggaggaaaagtttctgataaatcagagaaaaaagtgtttcagaagggacgggcgatagacactggagaagttgacattggtgcacaggtcatgcagaccattccacctggtttattctggcgtttccagattactatccaccatccaatatatctgaagttcaatatttctttagccaaggactctctgctgggaatttatggcagaagaaacattccacctacacatactcagtttgattttgtaaaactaatggatggcaaacagctggtcaagcaggactccaagggctctgatgatacacagcactcccctcggaacctgatcttaacttcgcttcaggagacaggtttcatagagtatatggatcaaggaccttggtatctggcgttttacaatgatggaaaaaagatggagcaagtattcgtgttaactacagcaattgaaataatggatgactgttcaaccaattgcaatggaaatggagagtgtatctctggccattgtcattgtttcccaggattccttggacctgactgtgctagagattcctgccctgtgctgtgtggtgggaatggagaatacgagaaaggacactgtgtctgccggcatggctggaaggggccagagtgtgacgttccggaagaacaatgcattgatccaacatgctttggccacggcacctgcatcatgggagtctgcatctgtgtgccaggatacaaaggagaaatatgcgaggaagaggactgcctagacccaatgtgttccaaccatggcatctgtgtaaaaggagaatgtcactgttctactggctggggaggagttaactgtgaaacaccacttcctgtatgtcaagagcagtgctcaggacacggaacttttcttctggacgctggagtatgcagctgtgatcccaagtggacaggatctgactgctcaacagagctgtgtaccatggagtgtggtagccatggagtctgctcaagaggaatttgccagtgtgaagaaggctgggtaggaccaacatgtgaggaacgctcctgtcattctcattgtactgagcatggccaatgcaaagatggaaaatgtgagtgtagccctggatgggagggcgaccactgcacaattgctcactacttagatgctgtccgagatggctgcccagggctctgctttggaaatggacgatgtaccctggatcaaaatggttggcactgtgtgtgtcaggtgggttggagtgggacaggctgcaatgttgtcatggaaatgctttgtggagataacttggacaatgatggagatggtttaaccgactgtgtggatcctgactgttgtcaacaaagcaactgttatataagtcctctctgccagggctcaccagatcctcttgacctcattcagcaaagccaaactctcttctctcagcacacttcaagacttttttatgatcgaatcaaattcctcattggcaaggacagtactcatgtcattcctcctgaggtgtcatttgacagcaggcgtgcctgtgtgattcgaggccaagtggtggccatagatggaactcctctagtgggagtgaatgtcagtttcttgcaccacagtgattatgggtttaccatcagccggcaagatggaagctttgacctcgtggccatcggtggcatctctgtcatcttaatcttcgaccgatcccctttcctgcctgagaagagaacactctggttgccttggaatcagtttattgtggtagagaaagtcaccatgcagagagttgtatcagacccgccatcctgcgatatctccaactttatcagcccaaaccctattgtgcttccttcaccgctcacatcatttggagggtcctgtccagagaggggaactattgttcctgagctgcaggttgtacaggaggaaattcccattccctccagctttgtgaggctgagttacctgagcagccgcacccctgggtataaaaccctgctacggatccttctgacacattcaacgattcccgtaggcatgataaaagtacacctcacagtagctgtggaagggcgactcacacagaagtggtttcccgccgcaattaatcttgtctacacatttgcttggaacaagaccgatatctatggacagaaggtttggggcctggcagaggctttggtatctgtgggatatgaatatgaaacgtgccctgactttattctctgggagcaaaggacagtcgttttacaaggttttgagatggatgcttctaacctaggagactggtctttgaataagcatcacattttgaatcctcaaagtggaatcatacataaagggaatggagaaaatatgttcatttcccagcagcccccagtcatatcaaccataatgggtaatggacaccaaaggagtgtagcctgcaccaactgcaatggcccagcccacaacaacaaactctttgctcctgtcgccttagcttctggccctgatggcagtgtgtatgttggcgacttcaattttgtaaggagaatatttccctcgggaaactccgttagtattttggaattaagcacaagtcctgctcacaaatactatctggctatggaccctgtgtctgaatcactctatctatcagacaccaatactcgcaaagtctacaagttgaaatctcttgtggagacgaaagatctgtccaagaattttgaagtggtggcaggaactggtgatcagtgccttccctttgaccagagtcattgtggagatggtgggagagcatcggaagcttcactgaatagccctcgaggcatcacagttgataggcatggatttatttactttgtggatgggactatgattcgcaaaattgatgagaatgctgtgatcacaactgtaatcggctcaaatggtctgacttccacacaaccactgagctgtgactcaggaatggacatcactcaggtgcgattagagtggccaacagaccttgcagtaaatcctatggacaattcattgtatgtcttggataacaacattgtgctgcaaatttctgagaacaggcgtgttcggatcatcgcaggacgccccattcactgccaggtgccaggcatcgatcatttcctggtcagcaaggtagcaattcactccactctagagtcagcgagggccatcagtgtctcccacagcgggctgctcttcatagctgaaacagacgagaggaaagtaaaccgcattcagcaagtaaccaccaatggggagatctacatcatcgctggtgcccccactgactgtgactgcaaaattgatccaaactgtgactgtttttcaggtgatggtggctatgccaaagatgcaaagatgaaagccccttcctccttagcagtgtcgcctgatggaaccctctatgtggcagacctcggaaatgttcgaattcgtaccatcagcaggaaccaagcccacctgaatgacatgaacatttatgagattgcttcacccgctgatcaggaactgtaccagttcactgtaaatggaacccacctacacaccctgaacttgataacaagggactatgtttataacttcacctacaattctgaaggtgacttgggcgcgattaccagcagcaatggcaattcagtgcacattcgccgtgatgcaggcggaatgccgctatggcttgtggtgcctggcggacaagtatactggctgactataagcagcaatggagtcctgaaaagagtgtcagcccaaggctataatccggccttaatgacctatccaggaaacacagggcttctggctaccaaaagtaacgaaaatggatggacaaccgtttatgagtatgaccccgagggacacctgaccaatgcaacgtttcccactggagaggtcagcagcttccacagtgacctggagaagctgacaaaagtggagctagatacttccaaccgtgaaaatgtcctcatgtcaaccaacttgacggcaactagtaccatatatattttaaaacaagaaaatactcaaagtacctatcgggtgaatccagatggttccctgcgtgtcacttttgccagcgggatggagatcggcctcagctcagagccccacatcctggcaggggcagtcaaccctaccctgggcaaatgcaacatctcattgcccggagagcacaatgcaaacctcatcgagtggcggcagaggaaggagcaaaacaaaggcaatgtttcggcttttgaaaggaggctgagggcccacaacagaaacctactctccatagattttgatcatataacccgcacaggaaagatctatgatgaccatcgaaaattcacccttcgaattctttatgaccagactgggcgacccattctgtggtctcctgtaagcagatataatgaagtgaacatcacatattcaccttcgggattggtgacgtttattcaaagaggaacgtggaatgaaaaaatggaatatgaccagagtgggaaaattatttcaagaacttgggctgatgggaaaatttggagctatacctacttagaaaaatctgtgatgcttctcctacacagccagcggcgttacatctttgagtatgaccaatcagattgcctgctgtcagttaccatgcctagcatggtgcgccacagcttacaaaccatgctttcagtgggctactaccgtaatatctacaccccaccggacagtagcacttcttttatccaagactatagtcgagatggccgattgctacagaccctgcatctggggacagggcgcagagtcttatacaagtacaccaagcaagcaaggctttctgaggttctctatgataccactcaggtcacattaacatatgaagagtcttctggagtgattaagacaatacacctgatgcatgacggattcatctgcacaatcagatacaggcaaacaggacctcttattggacgccagattttcagattcagtgaagaaggccttgtgaatgcacggttcgactacagctacaacaatttccgagtcacaagcatgcaagctgtaatcaatgaaacccctttgcctatagatctttaccgatatgttgatgtctctggcagaacagagcagtttggaaaattcagtgtaattaattacgatttaaatcaggtcataactactacagtgatgaaacacaccaaaatcttcagtgccaatggacaagtcattgaagtccaatatgaaatcctaaaggcaattgcctactggatgaccattcaatatgataatgtgggccgacatggtaatatgtgacataagggtaggagtagatgccaatataacaaggtacttctatgaatacgatgctgatgggcaacttcagactgtttctgtaaatgacaaaacccagtggcgttatagttacgatctgaatggaaacatcaacctcttaagccatgggaagagtgctcgtcttactcctctccgatatgacctccgagaccgcatcaccagattaggagaaattcagtataaaatggatgaagatggctttctgaggcagaggggaaatgatatttttgaatataattctaatggcctgctgcagaaagcctacaataaggcttctggctggactgtgcagtattactatgatgggcttgggcgacgtgtcgcgagtaagtccagcctagggcagcaccttcagttcttttatgcagaccttaccaaccccataagagttactcatttgtacaaccacacaagctcggagattacatctctgtattatgatctccaaggtcaccttattgccatggagttaagcagtggtgaagaatattatgtagcctgtgataatacaggtaccccactagctgtgttcagcagccgaggtcaggtcataaaggagatactatacacaccttatggcgatatctatcatgacacttaccctgactttcaggtcattattggttttcatggaggactctatgatttccttactaaattagtgcacctggggcaaagggattatgatgttgttgctggcagatggacaacgcctaatcatcacatatggaaacagttgaacctccttcctaaaccattcaacctctactcctttgaaaataactacccagttggcaaaattcaagatgttgcaaagtataccacagacatcagaagttggttggagctatttggtttccaattacacaatgtactacctggatttcccaaacctgaattagaaaatttagaattaacttacgagcttctacggcttcagacaaaaactcaagagtgggatcctggaaagactatcctgggcattcagtgtgaactccagaaacagctcaggaatttcatttccttggaccaactacctatgactccccgatacaatgatggacggtgccttgaaggagggaagcaaccaaggtttgctgctgtcccttctgtttttgggaaaggtataaaatttgccatcaaggatggcatagtaacagctgatattataggagtagccaatgaagatagcaggcggcttgctgccattctcaataatgcccattacctggaaaacctacattttaccatagaggggagggacactcactacttcattaagcttgggtctctggaggaagacctggtgctcatcggtaacactggggggaggcggattctggagaatggtgtcaatgtcactgtgtcccagatgacttctgtgttgaatgggaggactagacggtttgcagatattcagctccagcatggagccctgtgcttcaacatccggtatgggacaactgtcgaagaggaaaagaatcacgtgttggagattgccagacagcgcgcagtggcccaggcctggactaaggaacaaagaaggctgcaagagggggaagaggggattagggcatggacagaaggggaaaagcagcagcttttgagcactgggcgggtacaaggttacgatgggtattttgttttgtctgttgagcagtatttagaactttctgacagtgccaataatattcactttatgagacagagcgaaataggcaggaggtaacaaaaatatctctgcctttgcgtcaccaaagactgcctgtttttaaaacataaaatggtttattgtattggttttctagatcagaactctgtatatgtaaatatggaggaaaaacatatccaactgcctttcaatgtgacggaagatggtattttaatattgtttgtttaaactctttaagaaatgacagagatttttagttcttgtgtggcagtattcaaaataacacaagtagaactcaaacagctaaaaacagttttcagaaagcaccactttcaatttgccgagccatgcatatgttccaatatccagaaagaacccaaggttctctatctctattgtgagaagcagtttcatccttaactgttggcagaacttacgggctatttgaataggtggtgcaatagtatctgaaacttgcctttcgaaagactgccagccctttgacgttttccagatctgttataggaaacttaaaaacaggtgtaaaatgtcttcagccaccatctcctagagtgaggacccaattgcccttccttcttgattattcctccttgcttgttaaagtaaatgccatattgttgtgctgtgttttggcgtgtggtggctgggttctgtctaccatgcttccctgtgggtgtggtaaccagactgtatagccgctatttgctcgtgtgtacatgataccaaagcagctggccagcgtgacctctctcacacgacctgttttgactcaattttttactaaaagttgttcagctgtattggtatcatgtaaacatagcttttattaacctgggtaggaatttctcatttatatataggatgtgttttggtcatagtttcacattagtgattcagtatctatacactgacccaatggttttgtgcacatgaacggtaatttacttaaaagtatgattctggtacaaaaacaaacaaaggctttagcaggcatacgtgtctgggatgccgatacatacattaactactactgcagaaattcataagagccaaaaccttaaaaaaatagacctggtacttaagtgaaagtactaaagggaagaccagaccaaacatcacagcagttgctgccacattgtttcagcccacttagatttatctttcaaatgtacaattctgtattgaacatctcccagccatcttcaggaaatcgaatcaagtaaatcctttccaaccgaaaacatttcaactaactatagagaggcagactcatttttactaaaataatttatacagttagttattttcgttctccgtacttacccatttatctttatttaatcgtctctactgcctaggaaaataactattttccaggacgggttatttgttctgcgatcatttaaaatttggagaaaggtcaggattagtgttaatatcagctgcagtttctcaatctctaggaatcctgcagtaaaacaagccccttggtgagctggaagatttgtgcccagtgacaaagagatagtttgtaaaatgctgtgtaattgtaagttaccacaaatgaaaatacatgacagcacaatgtggcccgtagaaaattcccctgagccagcttctgcactttcatcaccgaatctgaacatttgctatgtctgaaggcaaatttatgatggaatgttagtttggattctttccagatgctacctaaatgcagtgtggggtcattgccttgctttgcgatgacagtttctttgaaaatatgcaaagtcataagctcatgttaaggtttttcaagagtctgcctcctactacacaaaggaaagcaagggaaaggaaatgaccctggcaaacagtagggaagggtgtattcaaacatttcattttcaaaaccttcgggttagaataccacttacacatgtattctgagagacagaattcatgaggaactcatctctctttataactggaaacacaccagcttgatatattgctaatccatactaaaatcatattattgggttttttctgaatcaggcctgtattaatggtacagtatttattcagaatggaattctaaaattactaacaaacttgttgaaaatttgaatacctccacaccaacctaaaaatggaccttaagttcctagaacctctgatgttcttttaaattaatggaaaaataatttgtgaactgtatatagagagtgcattcataaatgtgattatgtattttatcacaaatccaaaatgtcaatattagagtctattttgcttatattttaagcaattatacgtttttgcaattcattgatgatgtatcattttcaaactgctttaaatatccattagaaacaaatatttgaagcttttacttaatagtgattaccttgaactgtgcatttctagtttgtaatacgtatttggttggttcgtgcctttagtttgttaaagttacatttgtattatattcaggaaatgcactttttattacttacagctgtggttttaatactgccttgaactattattattctttttacaactcctaaagcttgagggaggaaagaaaaaaaaaacaaaactactaatcagtagtaaatcgaagagaaacattttggcatttcttaaaaagaagatggagatattgagtatatcacttcctattcagctgaatagaaagaatgccttcattgacttgcagttctgcagtttaaattattgaaagaacaattcgtttgcatttcctgatgaaagtaaaagcatttttcagagaaacatatgaatttctcatacccagcagacagatggctgacactgcacagccacacaccattcgagtaagttaaagtgagagcatagtagttggactctcctatgaagaacattctgggctggaggcagggaatactccatggttgtttctttttcctacttaagcccattttgtttgtgcttttctgttttgttttgttttcactcttgcactacagtctagagatccaaatgaactgaaaagttcaaagtttaacacatttaaatatgtttacttttagttgtcattctaatcgttattgattagaagcatgactcctgaaggaaagggaaataaatctcaattcatactaacttgcaacaaaacacttttaccatataaataagtatatgatttatttttaacccaaaaaatgtataaaataagtgtgtcctttactgtcaatttatctagaagatctataatatatagactacatatatataatatatacaacatagccaaatgtatgaaaacttgacaatgtataatttggaattcacatgctacctatgtagacaggtatgaaattaagttataattttcatgagacattttcatcactgttgacacagtttcaagcattccatcatgttattttgactctttttcttttttttttctttaaaaatatatttttaactagaccaggccccactataatatcacttaagagagtcagggcaaagtttttgcatttatgaagatgtgttcatgtaagggtgattgtaatggagttcattggtaatagaagcaaaagtacagtaacgaagtattgaaaagaaaattttggagacattggagcatattatatatagcttgtggaaagacataaggctacagatggaatggaacattcctgttttcttgaagaaattcacatacacatagctgacctgactagtacttcagctcttccacagccttctataaaggttctttcttctgcaaagaaaacaaaacaaaacaaaacaaaacaaaaaaaaaaaaaaaagcgcaaaaaacaaaaaaacaaaaaaaagcaaagtaaaatttaaaaatacagaaaacaaacaacaaaaaagaattcaaccataaatagtgactattattttcagtgtgtccttcatgtgaaagctattaaggaccaaatatactactgttcataagaagaaattactttctaaacagtaactgaaaatacttagagttaaacttgctgtggattttgtcttggcagttgtcatcttacattatttgtcaaaggaaatgtgtttggcagttaaaaatctttccttagatttagtggtggactttaacctcttaaataaatgttagtatatcagattgtgtccttgaaaaatattttacttgtatgaatcatgacaacgtctaaatctttactattcttctggcaaaagcatcagtaagaaagaaggcgaaaaagagaagtatagcctttatgtcagaaaaacattctttttagctgcttactttctcatgaaaagtaaagatgtttacagtgtatgccaagttttcagtttctgtataacaacaggtagaggttctaatcatattgaaaattgtgttataatggtctgagccatgttgctaggaaacaataggttccaattttgtattcctgctctcctgtgctgaaaagtgactggatactgtacaggttcatgttctctggctgcagttaaatggtcttttgcattttgctctggctttcaggccagaagcatgcatttttctacaagagcatcacaacaacatgctgtaaatatttaaagttaaacattatgtgttgatatttgaaagaaaagtactttgaatatttcatttttaaaaaataaaattgccaatgaaaaa

SEQ ID NO: 374 - DNA, 2947 bp, Homo sapiens
  CDS (1105)..(1311)
taagcttgcggccgcaaatctttttttttttttttttttaccacccattaatgtatttctgtacttaacatttgttacattgtttcctatttctttatttaccaatattacctttctcatatcctttcatctaacagacctcagtgcccaggactggatgactcaaaacccctcacaacatcttgtcacctggcgctgcactcccactgctcattcatccatccacacacgcaatgtagactttttggcctttttttctttcttttgtcatttatttatttatgtgcagacttcaagtgctcaggcttagataacttttggtaaaagtacactctcatctttcgcccactgggtcctctttctttctttgctattctttgaactcgttctctgtggtttatttttctatgccaggagcatatattatttgtatcagtcctaatgcttagcttacaatagtctgacatggtcctccttacagagttactcattactcatcctctagtctgttttttttttttaacctttctttgttgttttggttttttaaaaaaaacctttcccttctcccttttgatcacttgttccctaacttgcatcttttcattttgacgggcctcaaaatctatgtctcattctgcacttcactactcatacatccattctttctttcatttaggttctttttcattgtcaaatgtcagaggcatatatttgagttacacataccccttagtccataatcacctgatatcgctttgtgtgttgccctattacttagtgattcactggtttttttctatttatatattgattgcctagccatcaaagcggatgaaccatggtcttgtgtacacacactctcatcctggcttgcttacttctttacctatttacttgtttattcattctctcttgcttcactcattcattcatctggtcatttattatacaatgcaatagataccagtgaaacaacctctcaacaacaacagcaacaaaactcagaacattcacagtatctttggcattcctgcttcttctcactgagtcaccaaccaaggtacacacagcccacagtccagaaacacacacaaatggcggatgcagagcagagacacagtgaatgttaagtttactcccagatccttctggggctcgcgtcctaaacatactgggggcagatctgagatgagggcccacgttccccaggccccttgggcaaggcaagcgccgcctgttctgcccctctggaccgtggtgaatgaccatccccatgagaaacctgtttcaagaccccagaatacatagagacacacacatggtacatagtctcctggtgggaaacgacggacatggagttcatttttaaataggtggctttgtctgtggcaatataaaaatattttggcctttcaaggcaaatacaaaagaaactacccattaacatggctgagtgtctcagtcccaaacaataaagaacttgaagaggtttagccggaaactttgaagacagaaaatctgcccattatgttttccagacatttcgagggggcgagcggaggtcattggagcttgaagcccatttggaaggctggtccctcggcctgcgttttctccttggccctttgaagggccccccagctcacagggcacttccatcctagtctgccgatttcgagctggagaggggctggggtcccacattcgaggtcccttcccacgtaggcatccaggtgatggcttccgcccaaaccaggaaggagacgagaggcccgccaggaagaagacttgggtccgggatggtgggccccatcagggcctcttccgcagcttccatccgcagttcttcagccgacccagccgggccacggcccacgtgcctttgtgagcgtgcttccacggagtagagcgagtcaggaagcagtgggttgaagaggaaattggaggtgaggaaggaagacagcaagtgtagacaggcctttcaagaagcttggctgatgcaaggagagcccgtggacaagggctgcctggagtgctgttggagaataaataagacaagtaagacaagcaagaggggtgggaagggactgacctgtcaaaccttttcaacaaacatttgctgatcacctcctctatgccagatcctgcctgaggcctcttttatctcatttaattctcacaacaaccctaggaggttgctctcatcgaccccattcccccagaaaaggataggaagatcttcagagaggtggggcgtgcctttggtgattcagtagcatgctcattccagaagcccacccagggccttggagttgccagcaggatgctggccaagcccttggcccaggtccccctcctgagaatttcccaaagggatccttccattcaggacatcataagggtgatgacagagtcagtcgacaaagactgacacccccttggggagggaaacactccagtttgctagcaggtgaacacaagcaaagacttataggaaagtactcatagagtcaaagtatgagcatagcaaaggtcagggcttaatgcccaatgccccctcactagggcattggtttaagtctttaggtaagagggacagctggctggtcagttccggtcctcttcatcctttgccatcctggtcctgggggtcagtgagtggctgctttgtatgttggtgggatccaggaaaccgtgctcctagtgccctcgtgaggtgtagatgggcagcaggccccttggcagcagctcagcatggagaggaggtggtccttgaagacaaggaggtggacggatgatgtcatccctgaggagagacccgggtgagggatcctctcgtgggcgccccagctctcctgaggagccgccgccaaggccagcgagccaaggcgcgctccctctctgctctccgctcgtgccgaattcttggcctcgagggccaaat

SEQ ID NO: 375 - DNA, 2041 bp, Homo sapiens
  CDS (140)..(1645)
ttgtcgcctgtcgattcggcacgaggcgacagcaatcccgccccggcctgtcgggagcggtggggcagaggctgcggagccccaggaggatctgcctccgctttcacagtcctccagatttttccaagagcagcagaaaatgaataaatccctggggccagtgtcattcaaggacgtggctgtggacttcacccaggaggaatggcagcagctggatcctgagcagaagataacttacagggatgtgatgctggagaactacagcaatctagtttctgtggggtatcacattatcaaaccggatgttatcagcaagttggagcaaggagaagagccatggatagtagaaggagaattcctacttcagagctatccagatgaagtctggcaaactgatgacctaatagagagaatccaggaagaggaaaataaaccttcaaggcaaactgtgttcattgagaccctgattgaagagagaggtaatgttcctggtaaaacttttgatgtagaaacgaaccctgttccttcaagaaaaatagcctataaaaatagcctctgtgactcatgtgaaaagtgtttaacgtctgtttcagaatatattagtagtgatggaagctatgcaagaatgaaagctgatgaatgtagtggatgtgggaaatcactcctccatattaagcttgagaaaactcatccaggagatcaagcttatgaatttaatcaaaatggggaaccttatactctaaatgaagaaagtctttatcagaaaattcgtattttggagaaaccttttgaatatattgaatgccagaaagccttccaaaaggacactgtttttgttaatcacatggaagaaaagccctataagtggaatggatctgaaatagcctttctccagatgtcggacctcactgtacatcagacatctcatatggaaatgaagccctatgaatgcagtgaatgtgggaaatccttctgtaaaaagtcaaaatttattatacatcagaggactcacacaggagagaaaccttacgaatgtaatcagtgtgggaaatccttctgccagaagggaacccttactgtgcatcagagaacacacacaggggagaagccctatgaatgtaatgaatgtgggaagaacttttaccagaagttacacctcattcagcatcagagaactcactcaggagagaagccctatgaatgtagttattgtggaaaatccttttgccagaagacacacctcacacaacatcagagaacacattcaggagagagaccttatgtttgtcatgactgtgggaaaaccttctcgcagaagtcagcacttaatgaccatcagaaaattcacacaggtgtgaaactctacaagtgtagtgaatgtgggaaatgcttctgccgcaagtctactctcacgacccacctgaggacccacacaggagagaaaccgtatgaatgtaatgagtgtggaaaagccttctctcggatgtcatacctcactgtacattatagaactcattcaggagagaaaccctatgagtgtactgaatgtggaaaaaaattctaccacaaatcagcattcaacagccatcagagaattcataggagaggcaatatgaatgtaatagatgtgggaaggcttctctgaagtcagacctcattttatatcagagaaccctttcagtatagtgaatcagaaactcctgcctgaagtcaaacaccttgtacatcagagagttcacacaggttagtgtggacatccccttgtgtgttggactcataatctgaagactcacagaatggaaaccatgattataacaagaccacatggtataacaatactagactatagacaagtaaaaatttataaatattaagaatgtatatacatgtcaccatggattggaactgttttgcatatcagggaaatcatagccaaggggaaatctatcagtataaggaatgtggaagacataatcctttggaaactgttaatactaaaagatatgtttctgatacaatagcaaacttgaaaaaaaaaaaa

SEQ ID NO: 376 - DNA, 1316 bp, Homo sapiens
  CDS (192)..(1058)
accggtccggaattcccgggtcgacgatttcgtgttgagcaccttcgtcgccattggctttcctcccccagctccagcctctctcatcttgggaatctgcgtcagaagtcactcgcagtcccgtcagcccagaagacgtaaagcaggctaccagcaattttgagaacttgcaaaaacagcttgcaaggaaaatgaagcttcctattttcatagcagatgcattcacagcaagagcatttcgtgggaatcctgctgctgtttgcctcctagaaaatgaattggatgaagacatgcatcagaaaattgcaagggagatgaacctctctgaaactgcttttatccgaaaactgcacccgacagacaactttgcacaaagttcctgctttggactgagatggtttacaccagcgagtgaggtcccactctgtggccatgccaccctggcttctgcagctgtgctgtttcacaaaataaaaaacatgaatagcacgctcacgtttgtcactctgagtggagaactaagggccagacgagcagaggacggcatcgtcctggacttgcctctttatccagcccacccccaggacttccatgaagtagaggacttgataaagactgccataggcaacacactggtccaggacatctgttattctccagatacccaaaagctcctcgtccgcctcagtgacgtttacaacaggtcgtttctggagaacctgaaagtgaacacggagaatctgctgcaagttgaaaacacagggaaggtgaaagggcttattcttacccttaaaggagagcctggtgggcagacccaagcatttgacttttactcaagatattttgcaccgtgggttggtgtggctgaagacccagtgacagggtctgcacacgctgttctcagcagctactggtcccagcatctggggaagaaagaaatgcatgcttttcagtgttcccaccgaggaggagagctgggaatttcccttcgtccagacggaagggttgacattagaggaggtgcagctgttgttttagagggcacactgacagcctagaggtggttatgctgtgacgctgctgtctctaaccaccaagtattttctgcttaaaaagaaatgtaaggggctgcctttagcaaatgtgcgtagtagtctacttaatcctcatgttaaaaatcgaaaaatgggccaggcgcagtggctcatgcctgtaatcgtagcactttgagaggccaaggtgggtggatcacctgaggtcaggggttcgacaccagcctggccaacatggtgaaacctcgtctctataaaaaaaaa

SEQ ID NO: 377 - DNA, 685 bp, Homo sapiens
  CDS (172)..(456)
aagctggtacgcctgcaggtaccggtccggaattcccgggtcgacccacgcgtccgctggctttggtgattcagccctgacttctcaaaaagcactgcacagaggaggaggcagcagaaccccatttcagcttcttaggactctgcacttccccagaaggaagaattaaaaatgaatatgttcaaggaagcagtgaccttcaaggacgtggctgtgaccttcacggaggaggaattggggctgctgggccctgcccagaggaagctgtaccgagatgtgatggtggagaactttaggaacctgctgtcagtggggcatccacccttcaaacaagatgtatcacctatagaaagaaatgagcagctttggataatgacgacagcaacccgaagacagggaaatttagataccttacttgtaaaagctcttttgctctatgacctggctcaaacttaaacttggatttgaagttagaagaaatgttggaagtcatttatatatgaagaaatgttggaaggactcatatatgcatacattccttgagtgactatgaatgactgccgggcagtaacttctgggctgtggttgtaaactgtgagcactacaaaatgtttttccttattgataccatattatggtaggaaagacatggaataaaaaatttagatagtaaaaaaaaaaaaaa

SEQ ID NO: 378 - DNA, 917 bp, Homo sapiens
  CDS (160)..(714)
ccggaattcccgggtcgacccacgcgtccgcccacgcgtccggcgagcggcggtgacttgccagtaagggtttggagtcatcagcaggtttaattttggaggaactttacaggtttggctccagcagctgctgttgccaccaccactagttcaagcaccatgcagtttacctcaatatcaaattctttgacctccactgctgctattgggctctcatttacaacttcaacgactaccaccgccactttcaccaccaacactactaccacaatcaccagtggctttactgtgaaccaaaaccaactgttatcaagagggtttgaaaaccttgtaccttatacttcaactgttagtgtagtagcaactcctgtgatgacatatggtcatctggagggtcttataaatgagtggaaccttgagctggaagatcaagagaagtactttcttctccaggccactcaggtcaatgcttgggaccatacattgattgagaatggtgagatgattcgtattttacatggagaagtgaacaaagtgaaactggatcagaaaagattggaacaagaattggattttatcctgtcacagcagcaggaactagaatttctgttgacttatttagaggagtctacgcgcgaccagagtggacttcattatctgcaggatgcagatgaggagcatgtggagatctccaccagatctgcagaattctgaatgcccatatggactccctgcagtggattgatcggaattcaggcatgctgcgaaggaaggtagaagtggtaacacgggtttttcgaggattatcattcacgaggggtctttcacatcatgttcatcactgttttttagtgtattgacccttttttcagcttgtcgtttctggattattatctactaattcttttgtttatttt

SEQ ID NO: 379 - DNA, 1631 bp, Homo sapiens
  CDS (459)..(1511)
gaatttaatacgatcactatagggaatttggccctcgaggcatagaattcggcacgagggctggccaagtaagccactaacctaggtcataaagagttagctttgggaccatttatttccatgatcaaaataaatacatctgggtttaacctgaatcaccatttagtaacatagtcatcagtttcagtacctttgtctttttccaggtaaaactctttagcctcttatcaaacatgttatgccacatctaaattccatattttatgtaatataaggaaaaatagttttatttgtatgatttatacttcatgtgttaggaacctgtgactacatgttctgaactgttagtaagaaaaatggtattggataccttactctttaagatttttaattatttttggtaaaactgggaaatagccgtctgatttgcattttattttcttttgtattttaaggatatggaatattatcttgtaaaatggaaaggatggccagattctacaaatacttgggaacctttgcaaaatctgaagtgcccgttactgcttcagcaattctctaatgacaagcataattatttatctcaggtaaagaaaggcaaagcaataactccaaaagacaataacaaaactttgaaacctgccattgctgagtacattgtgaagaaggctaaacaaaggatagctctgcagagatggcaagatgaactcaacagaagaaagaatcataaaggaatgatatttgttgaaaatactgttgatttagagggcccaccttcagacttctattacattaacgaatacaaaccagctcctggaatcagcttagtcaatgaagctacctttggttgttcatgcacagattgcttctttcaaaaatgttgtcctgctgaagctggagttcttttggcttataataaaaaccaacaaattaaaatcccacctggtactcccatctatgaatgcaactcaaggtgtcagtgtggtcctgattgtcccaataggattgtacaaaaaggcacacagtattcgctttgcatctttcgaactagcaatggacgtggctggggtgtaaagacccttgtgaagattaaaagaatgagttttgtcatggaatatgttggagaggtaatcacaagtgaagaagctgaaagacgaggacagttctatgacaacaagggaatcacgtatctctttgatctggactatgagtctgatgaattcacagtggatgcggctcgatacggcaatgtgtctcattttgtgaatcacagctgtgacccaaatcttcaggtgttcaatgttttcattgataacctcgatactcgtcttccccgaatagcattgttttccacaagaaccataaatgctggagaagagctgacttttgattatcaaatgaaaggttctggagatatatcttcagattctattgaccacagcccagccaaaaagagggtcagaacagtatgtaaatgtggagctgtgacttgcagaggttacctcaactgaactttttcaggaaatagagctgatgattataatatttttttcctaatgttaacatttttaaaaatacatatttgggactcttattatcaaggttctacctatgttaatttacgattcatg

SEQ ID NO: 380 - DNA, 4884 bp, Homo sapiens
  CDS (116)..(4666)
aaggatccttaattaaattaatccccccccccccagcgggaagagccggccgaagcgtggcggccacagactgtgggtaccgggtccgagggactcgcgcttttctctccgtgccatggcgccagcgaaagccacgaacgtggtgcggctgctactaggctccacagcgctgtggctttcgcagctcggctccgggacggtcgccgcgtccaagtcggtgactgcccacttggccgcgaagtggcccgagaccccgctgctgctggaggcaagtgaatttatggcagaagaaagtaatgaaaaattttggcagtttttggaaactgtgcaagaattagcaatttataagcaaacagaatcagattattcttattacaacttaatcctgaagaaagctggacagtttctagacaatttacacatcaaccttttaaagtttgctttctctataagggcatactccccagctattcagatgtttcagcagattgcagctgatgagccaccaccagatggttgtaatgcatttgtggttattcataagaagcacacctgtaaaattaatgagattaaaaagctgctgaagaaagctgcttcaaggactagaccttatctatttaaaggagatcacaaatttcctacaaacaaagagaacttaccagtggtgattctctatgccgaaatgggtactagaacatttagtgcatttcacaaagtattgtctgaaaaagctcaaaatgaggaaattctgtatgttcttcgccattatattcagaaaccaagctcacggaaaatgtacttatctgggtatggtgtggagctagcaattaagagtacagaatacaaagcactggatgatacccaagttaaaactgtgactaatactactgtagaggatgagactgaaacaaatgaagttcaaggatttctctttgggaaactaaaagaaatatattcagatcttagagataatctgacagcattccaaaaatacctgattgagagtaacaaacaaatgatgcctttgaaagtctgggaactacaagatcttagttttcaagcagcttctcaaataatgtccgctccagtttatgatgccattaaattaatgaaagacatttcacagaacttccccataaaagccagatctctaaccagaattgctgtaaatcaacatatgagagaagaaataaaggaaaatcaaaaggatcttcaagttagatttaaaattcagccaggcgatgctcgtctatttataaatggccttcgtgttgatatggatgtttatgacgcttttagtattttggatatgctgaaattagaaggaaaaatgatgaatggccttcgcaatcttgggatcaatggggaagatatgagcaaatttttaaaattaaattcacacatttgggaatatacttatgtattagatattcgacattcttctataatgtggattaatgacttagaaaatgatgatttgtatattacatggcctacaagttgccagaaacttctgaagccagtatttcctggaagtgtaccttccataaggcgcaattttcataatttggttctgtttattgatccggcccaagaatataccttggattttataaaacttgctgatgttttctattctcacgaagttcctcttagaattggttttgtgttcattcttaatacagatgatgaagttgatggagcaaatgatgctggagttgctctctggcgagctttcaactatattgcagaagaatttgatatatcagaagcatttatttctatagtacacatgtaccaaaaagtgaagaaggatcaaaatatactcactgtggacaatgtgaagagtgttctccaaaatacatttcctcatgctaatatttgggatattttgggaattcattctaaatatgatgaagaaagaaaggctggagcaagcttttataagatgactggcctgggtcctttgcctcaagctctttataatggtgaaccctttaaacatgaagagatgaatattaaagaactaaaaatggctgttcttcaaagaatgatggatgcatctgtatatttacaaagagaagtttttttgggcacattaaatgatcgcacgaatgcaattgattttctaatggataggaataatgttgtaccccgtataaatactttgattttgcgtactaaccagcagtacctcaatttaatatctacatcagtaactgctgatgttgaagatttctctactttctttttcttggattcacaagataagagtgctgtaattgcaaagaacatgtattatttaacccaagacgatgagagtataatttctgcagtcactctctggattattgcagattttgataagccttctgggagaaaacttctttttaatgcattaaagcacatgaaaacaagtgttcatagtcggttggggattatttataatcctacatcaaaaataaatgaagagaacacagctatttctagaggaattttggcagcttttcttacacagaagaacatgtttttgagaagctttcttgggcaactggcaaaggaagaaattgctacagctatttactctggagataaaattaaaacattccttattgaggggatggataagaatgcttttgagaaaaaatataatactgttggagtgaatatttttcgaactcaccagttgttctgtcaagatgtacttaaattacgtcctggagaaatgggtattgtcagcaatgggagattcttaggacctttagatgaagatttttatgcagaagatttttacttgttggaaaagataacatttagtaatttaggagagaaaattaaaggcattgttgaaaatatgggaatcaacgcaaataacatgagtgactttattatgaaagttgatgcccttatgtcctctgtgcctaagcgtgcatctcgatatgatgtcacatttcttagggagaatcacagtgttataaagacgaatcctcaagagaatgatatgttcttcaatgtcattgctattgttgatccattaacaagagaagcacagaaaatggcacagttgttggttgtacttggcaagattatcaacatgaagataaagttgttcatgaactgtaggggcaggctttcagaagcccctttagaaagcttttaccgttttgttctggaaccagaactgatgtcaggggctaatgacgtttcttctcttggaccagtggcaaaatttttggatattcctgaatcacccctcctaatcctcaacatgattactccagaaggctggttggttgaaacagtgcacagcaactgtgaccttgataatattcacttaaaggatactgagaaaactgttacagcagaatatgaactagaatacttactactggaaggacaatgctttgataaagtgacagaacagcctcctcggggtctgcagttcacactaggcacaaaaaataaacctgctgtggttgatacaatagtgatggcacatcatgggtattttcaattaaaagcaaacccaggtgcttggatactgaggttacaccaaggaaaatctgaagatatttatcaaatagttgggcatgaaggaactgactctcaagcagacctagaagatatcattgttgtattaaacagcttcaaaagcaagatactcaaagtaaaagtgaaaaaagaaacagacaaaattaaggaagatatccttaccgatgaagatgaaaaaacaaaaggactgtgggattccattaaaagtttcacagtaagcttgcataaagaaaacaaaaaggaaaaagatgtcctaaacattttttcagttgcttctggtcatttatatgaacgttttttaagaattatgatgctttctgttttgcgtaacaccaaaacaccagtgaaattctggttgctaaaaaattatctctcaccgacatttaaagaagtaattcctcacatggctaaagagtatggattccgatatgaactagttcaatataggtggccccgttggcttcgtcaacagactgaaagacagaggattatttggggttacaaaattcttttccttgatgttcttttcccactagcagtggacaaaatcatttttgttgatgctgaccagattgtgagacatgatctaaaagaacttcgagatttcgatctggatggagctccttatgggtatactccattttgtgatagccgcagggaaatggatggatatcgtttctggaaaacaggatactgggcatcacatcttttaagacggaaataccatatcagtgctttatatgtagtggatctcaagaagttcaggagaattggagcaggtgacaggctcaggagccagtatcaagctctcagtcaagatccaaacagtctttcaaacctagatcaggatctccccaataatatgatttaccaagtcgccattaagtctcttcctcaagactggctgtggtgtgaaacctggtgtgatgatgaatccaaacaaagagccaaaacaattgatctgtgcaataatcccaaaacaaaagaatccaaactaaaagctgctgccagaattgtcccagaatgggtggagtatgatgctgagataagacaactattagatcatcttgaaaacaagaagcaagatacaattttgacacatgatgaactctagcactggtgtatatgagaaggaaggcgaaagcatgacaggaaacctgccgcctgctggggaagtctggagcccctgctgagacgatttggaagtctcgttaagatcagtgacatattctttaattttaaaaaattgtaattatttaaaacagttatttaatgtattgaatgagtttaagttatataataaatgaccattgagtatttaaaaaaaaaaaa

SEQ ID NO: 381 - DNA, 2362 bp, Homo sapiens
  CDS (130)..(1230)
ccggaattcccgggtcgacgatttcgtgggggccagggccaggccactgcctgggggcagcatgcatcataaactaaaggcagcctgagccgggcagggcccctgcctctgctacggcagcccccgatcatgcagcccccactggacctcaagcagatcctgcccttcccactcgagccagcccctacccttggcctcttcagcaactacagcaccatggaccctgtgcagaaggctgtgctctcccacacttttgggggacccttgctcaagaccaaacggcccgtcatttcctgtaatatctgtcaaatccgcttcaattctcagagccaggctgaggcgcactacaaaggtaatcgccacgcccgacgagtcaaaggcattgaggctgccaagaccagaggcagggagcctggcgtccgagaacctggagacccagctcccccaggcagcaccccaacaaatggggatggtgtagcaccccgtccagtttccatggagaatggactggggccagccccaggatccccagagaaacagcctggctccccatcccctcccagcattccggagactggtcagggtgtaaccaagggtgaaggggggactccagccccggcttccttgcctgggggtagcaaggaagaggaggagaaagccaagcggctgctctactgtgctctgtgcaaggtggctgtgaactccctgtcccagcttgaggcacataacaaaggtactaagcacaagacaattctggaggcccgaagtgggctcgggcccatcaaagcttaccctcggctggggcctcccaccccgggggaaccagaggctcctgcccaggaccgaactttccactgtgagatctgcaatgtcaaggtcaactcggaggtccaactgaaacagcacatctccagccggcggcaccgagacggcgtggccgggaagcccaacccactactgagccgtcacaagaagtctaggggcgccggggagctggcgggcacgctgactttctccaaggagctgcccaagtccctggcgggcggcctgctccccagccccctggcggtggctgcagtgatggcagcggcagcaggctcgccgctgtccctgcgcccggctccagccgcacctcttctccagggaccgccgatcactcaccctctgcttcacccggcccccggacccatccgaactgcgcacggacccatcctcttctccccgtactgacctcaaccctgaacccctcccattcaactccccacctccagccgggacccaggcgtccgggctcccagcccgcccctcctcccggcactccctaaatgatctctccttccccccccccaccccgagatacggggttccaggaaaggggaggggtagcgggggaggggggcttcagaagggggggaacaccccagatctcagggaaccccgccccctgcctttccctctcccctagaaaagggggggccgtctcacccccgagcccccttggagacaccccccctcccaaaagccatgtccatccagcccttccccccaaacctagcacaaaacggggttcacaagccatggtcggggtccgggggggacagaaatggattttcttggcaataagcggactctgggactccggctccctaccccaaactgaagcgcttccgtgaacacccccgtcctccgtagggggaggggagcaggcgggatcctgggtccctcataagcactttggttttaccgcctgcaacctcactgtgcccgccccgcaccatgccctagccccaggtctagccgggcccattgcagggggcagcacttgggggcatctccggcacttgggtgggaccaaggagatgccaccatagacctttccctcgccttcttcctccctagtccgggttccattcttttcaccagcacccatcgcccaaggggtaccgaggggggcaaggggtgtccagtccaagcccacccccgcctcgccttccgcaaaactgtgagcaaaaagcaatagaagcctcgcccccgcccttccccttcgcaggattcgccgagtctgtagcctccccgatccaagttcctagacctcatggctgtcccctcccaccagtcacctccactgcacaactcgggcgggggtgtgacacctctcccccacccccgactccgtggtttccgtatcgtcaacccttcagccgccgacccgggaggggtctggcctacactggtcttccccttcccatcaactctttctgcttgacaatgtagcaacccaggccccccacccacggtcctcccctttttcctctccctgacaataaagtctgaatttgttctgccctccaaaaaaaaaaaa

SEQ ID NO: 382 - DNA, 2079 bp, Homo sapiens
  CDS (678)..(1118)
ggaatttcagaaccacttaggaaggaaagaactcccggtctccagggtggtatttcagtgtctgtgataatgtcacgcaacacctcttcggggaccagtgcccaggatctaatggaagcggaattggggcaactgggcccatgtggccagagctcagttagccagtgccgggcggccacagattacactgaccaatctcctcccttggctctgcaagcctcccacccagccttctctggcttaacccttgttggcgaaaactcttccacagtggcctccttggggacccagaacccggaggaaggggcatgaggcaggaagtggggccgatgtctgcaacccagaccacttcgtggaatgggctcttgaccaaatccctttttttgcgatttacccgttcaagcaaaacaacgttttggttaactaaggattgtgctaaagccgataccaggtccttcacacgtgtgcactaggaacaggagcgaacagcacagagagacgctccctgtgggacgcagcagccccgtggccccggcccagttcccagccaccctccctggctctgctcacaccagagatttccatagcaggagcggttggtgcagaagtaggttcagatgaacctcagttaacgtcgccacccctcctcccaccatggtaccctgtaggagccctgtatgacatctgagcgtggtggaggtaggagggttgccagctgcagtgaccctgccacagaggcagggtcagtgcagaggtcgctttggttccgcttccctgggccacagaacggaacacagcataggttctgcagcaggagccgcagtggcaggatggagggtgcgaagggcaaggagtgcactgctgggcattcctggccagccccggccctctggtgcctgcttcctgtgacttcagaaggcaggtggacagagcctccctctggccttgtcctcttcccagccacagaacgggcagggtggcacccgaccccaggggagcagtacctggtcccccaccccctcctcccaaccacctccaaggccaagctgggtcccatagccagcacggcatggttctccccttccccccttcccaggtcaggggagttggacaagtagcaggtgtttgtttttaaagcacagccctttgggaaagcaacacattattgagactcactgtgattcccccgggagtcagactggctttgtcctcttcctctctggagggccatgggccatcagcaggagctccacatcgagccccaggccagaaccccctccctttcacagagagggaactttattgcacaattgggtgccttttagcttttgtgtgttgaaatgggcgttttggaagcaagggtcaggggacagcttctaaaggtgtgagtctctgacctgagcatctgggcctcgcctgggcccttcttcctccccaggggtggaaacgtggaggggccagcagcaccccggggtctgcccaggggagtcaaggccccgaggtgggggggcctattccaggaggagtgggatctcggccctgtccagagcgagttaatgtgtccatctgcccaaccctgtcctgagaaaggacctggttttggccaggacctgacaaatacccaatggcagcagtgtcaacagacgggagtccagccagggtgggtgcccttgtcattgaggttagggacagctatccccaggttatgcctggccccacccagcagggagttggggtccccccacaggctgtgagctctgtgggccctgggatgtgatctagctcagatgccttctcatccttgatgtcatagttgagtgcacccaagtggcacccactggcggccaggggcacagcctggtggtggtggcaatagaactgtgcccctcctcagctcctcgcttcccctcccacagccccagccttactccaccatgcggacaatcattttgtacggatcacgggagcaatgctgtacggttttgtacactggtggtttgtttcctagaaaacccattgtgtctctggatttctagcacattactaaaagagcctctgctttgtaaaaaaaaaaaaaaa

SEQ ID NO: 383 - DNA, 4884 bp, Homo sapiens; identical to SEQ ID NO: 380
  CDS (116)..(4666)

SEQ ID NO: 384 - DNA, 1897 bp, Homo sapiens
  CDS (527)..(1897)
cggaattcccgggtcgacccacgcgtccgcacagtccccactgatgctaacctctgtgtttggaaatactctttgtctggagacacttctgtgggctacttcttttttcaggcagaactcaaccttggtgtgttatctgaccaacttcccacatacgctgaagagaagtgcacatggccatcaaaggcacgcgccccccccttcccttcagctgccttggcagctgccgaacccaccctcgcagtggctgcccagaacctttacacatgtatgtgtgcgcgtgtgcagagcatgacaaggcaggtggctggggctccagcctggctaaagagaacttgcccttaggggcaagagagggaggcactgcatttccagtttcgttctggaagtgcccacctgacatctgtggtgcccactgatctttacagatatcctgctggatgacattgtccttacccattctctcttcctcccgacggagaaatttctgcaggagctacaccagtactttgttcgggcaggaggcatggagggccctgaagggctgggccggaagcaagcctgtctagccatgcttctccatttcttggacacctaccaggggctgcttcaagaggaagagggggccggccacatcatcaaggatctatacctgctaattatgaaggacgagtccctttaccagggcctccgagaggacactctgaggctgcaccagctggtggagacggtggaactaaagattccagaggagaaccagccacccagcaagcaggtgaagccactcttccgccacttccgccggatagactcctgtctgcagacccgggtggccttccggggctctgatgagatcttctgccgtgtatacatgcctgaccactcttatgtgaccatacgcagccgcctttcagcatctgtgcaggacattctgggctctgtgacggagaaacttcaatattcagaggagcccgcggggcgtgaggattccctcatcctggtagctgtgtcctcctctggagagaaggtccttctccagcccactgaggactgtgttttcaccgcactgggcatcaacagccacctgtttgcctgtactcgggacagctatgaggctctggtgcccctccccgaggagatccaggtctcccctggagacacagagatccaccgagtggagcctgaggacgttgccaaccacctaactgccttccactgggagctgttccgatgtgtgcatgagctggagttcgtggactacgtgttccacggggagcgcggccgccgggagacggccaacttggagctgctgctgcagcgctgcagcgaggtcacgcactgggtggccaccgaagtgctgctctgcgaggccccgggcaagcgcgcgcagctgctcaagaagttcatcaagatcgcggccctctgcaagcagaaccaggacctgctgtctttctacgccgtggtcatggggctggacaacgccgctgtcagccgccttcgactcacctgggagaagctgccagggaaattcaagaacttgtttcgcaaatttgagaacctgacggacccctgcaggaaccacaaaagctaccgagaagtgatctccaaaatgaagccccctgtgattcccttcgtgcctctgatcctcaaagacctgactttcctgcacgaagggagtaagacccttgtagatggtttggtgaacatcgagaagctgcattcagtggccgaaaaagtgaggacaatccgcaaataccggagccggcccctttgcctggacatggaggcatcccccaatcacctgcagaccaaggcctatgtgcgccagtttcaggtcatcgacaaccagaacctcctcttcgagctctcctacaagctggaggcaaacagtcagtga

SEQ ID NO: 385 - DNA, 1998 bp, Homo sapiens
  CDS (200)..(1879)
  misc_feature (1)...(1998): n = a,t,c or g
gaccggtccggaattcccgggtcgacgatttcgtcttcgctgtgacgatttcgcgttaggctgatgagaaagcggcgcgcggagggtgtgagatggcagacaggtttgcaggaaaccctcacaaagggggctggaggatttagccactctgtcctccccttccggcagtccagggcctcctcccgagcacagcggcgctatggactctccaggatacaactgcttcgtggacaaagacaagatggacgctgccatccaggacctggggcccaaggagctgagctgcactgaactgcaggaactgaagcagctggcgcgccagggctactgggcccaaagccacgccctgcggggaaaggtgtaccagcgcctgatccgggacattccctgccgcacggtcacgcctgacgccagcgtgtacagcgacatcgtgggcaagatcgtgggcaagcacagcagcagctgcctgccgctgcccgagttcgtggacaacacgcaggtgcccagctactgcctgaatgcacgcggcgagggggccgtgcgcaagatcctcctgtgcctggccaaccagttccccgacatctccttctgccccgccctgccggccgtggtggccctgctgctgcactacagcatcgacgaggccgagtgcttcgagaaggcctgccgcatcctggcctgcaatgaccccggcaggaggctgatcgaccagagcttcctggcctttgagtcgtcctgcatgacgtttggggacctggtgaacaagtactgccaggcggcccacaagctgatggtggccgtgtcggaggatgtcctgcaggtctatgcggactggcagcgctggctgtttggggagctgcccctctgctacttcgcccgggtctttgacgtcttcctggtggagggctacaaggtgctgtaccgcgtggcgctggccatcctcaagttcttccataaggtgagggccgggcagccgctggagtcggacagcgtgaagcaggacatccgcacgttcgtcagagacatcgcgaagacggtgtcccctgagaagctgctggagaaagcgttcgccatccgcctcttgtcccgcaaggagatccagctcctgcagatggccaatgagaaagccctgaagcagaagggcatcaccgtgaagcagaagagtgtgtcactttctaaaaggcagtttgtacacttggccgtccatgcagagaacttccgctcggagatcgtcagcgtgagggagatgagagacatctggtcctgggtccccgagcgctttgccctgtgccagccccttctgctgttctcctccctgcagcacgggtacagcctggccaggttctacttccagtgtgaaggacatgagcctaccctcttgctcatcaagaccacgcagaaggaggtgtgtggtgcttacctgtccacagactggagtgagagaaataagtttggaggcaaactgggcttctttgggaccggagaatgctttgtgtttaggctgcagcctgaggtgcagcgctacgagtgggtggtgatcaagcaccccgagctgaccaagcccccacccttgatggctgccgagcccaccgccccactcagccactccgcctcctcagaccccgctgaccgcctctcgcccttcctggccgctcgccacttcaacctgccctccaagaccgagtccatgttcatggcggggggcagcgactgcctcatcgtcgggggaggaggcggccaggcgctctacatcgatggggacctgaaccggggccgcacaagccactgcgacaccttcaacaaccagcccctctgctccgagaacttcctcattgctgccgtgaaggcctggggcttccaggaccctgacacccagtgacggcctgtgccacggtgactgagccgtggtggggcggtgggccgaaaatggaaatnccgcctcgggcagcagagagcagatgtattgcgtgcgctctagacgaaacaaggagtgttcgt

SEQ ID NO: 386 - DNA, 1798 bp, Homo sapiens
  CDS (82)..(1515)
gacatctgttcgcctgcaggtaccggtccggaattcccgggtcgacgatttcgtgggaaagttcgcggccggagcgcggagatgccgggcagcgacacggcgctcaccgtggaccggacctactcggaccccggccggcaccaccgctgcaagagccgggtagaacgtcatgacatgaataccttaagcctgcccctgaacatacgccgaggggggtcagacaccaacctcaactttgatgtcccggatggcatcctggacttccacaaggtcaaactcactgcagacagcctgaagcaaaaaattctaaaggtaacagagcagataaaaattgagcaaacatcgcgcgatgggaatgttgcggagtatctgaaactagtgaacaacgcggacaagcagcaggcgggacgtatcaagcaagtctttgagaagaagaatcagaaatcagctcactccatcgcccagctgcagaagaagttagagcagtatcatcgaaagctcagagagatcgagcagaatggagcctctaggagctcaaaggacatttccaaagaccacctgaaggatatacatcgctctttgaaagatgcccacgtgaaatctcgaactgccccccattgcatggagagcagcaaatcgggcatgccaggggtctcacttactccacctgtgttcgttttcaataagtccagagagtttgccaacctgatccggaataagtttggcagcgccgacaacattgctcacttgaaaaattccttagaggagtttaggccagaggcgagtgccagggcctacgggggcagcgctaccatcgtgaacaaacccaagtatggcagtgatgatgaatgttcgagtggcacgtcaggctcggccgacagtaacggaaaccagtcgtttggggctggtggagccagcacactggacagccagggcaagctcgccgtgatcctggaggaactgagggagatcaaggatacccaagctcagctggctgaggacatcgaggcactgaaggtgcagtttaagagagaatatggttttatttctcagaccctgcaagaggaaagatacaggtatgagcgactggaggaccagctgcatgacctgacggacctgcatcagcatgagacagccaacctgaagcaggagctggccagcattgaggagaaggtggcctaccaggcctacgagcgctcgcgggacatccaggaagccttggaatcctgccagactcgcatttctaagctggagctccaccagcaagagcagcaagctctgcagacagacaccgtgaatgctaaagttctcctggggaggtgcatcaacgtgatcctggccttcatgactgtcatcttagtgtgtgtgtccaccatcgcgaagttcgtctcacccatgatgaagagtcgctgccacattcttggcaccttctttgccgtgactcttcttgctatattttgtaaaaactgggaccatatcctgtgtgccatagaaaggatgataataccaagatgaagccactggttcctgccttcaagttctttcaagtttttattttaaagaaaactctgtgcatactaccaaattttacagtgaatgattgtgcggactcgtgtgtaagaaaaactaggactgtgtggtgtaaataactacaattctcttaactcggtagcagttgccaactcagtccttgtacttcgttaacacggatctgtttcagagctctcctaccttgctcactgccttaatcagaccgatttcctgcccacctgaccagcccaacgtggtaaacctctgt

SEQ ID NO: 387 - DNA, 1038 bp, Homo sapiens
  CDS (367)..(1026)
ggcagctgttttgggctgaggtgtccctagctggctctgcggctcttccgggtctgggctcggagattcacaggcggcccgcgaggccgagcgagggacgcatggccctgaggcggccgcagggcttggcggggtccggaggttgacctcgcccccgcagccggccttcgaggctgcctcctccaggcagcctctggggcccgcgcccgcgcctgctcaggctcccgtgttcaggctgcccatcccctccccaccggcgtcccggacgttgggacctgtgaccgtggcctcgggctgggcttccaaagccggccgcagcccggcgacccccgaggcctctcgccccgggcccctagacctctcactatgaccgcggccgccgcctccaactgggggctgatcacgaacatcgtgaacagcatcgtaggggtcagtgtcctcaccatgcccttctgcttcaaacagtgcggcatcgtcctgggggcgctgctcttggtcttctgctcatggatgacgcaccagtcgtgcatgttcttggtgaagtcggccagcctgagcaagcggaggacctacgccggcctggcattccacgcctacgggaaggcaggcaagatgctggtggagaccagcatgatcgggctgatgctgggcacctgcatcgccttctacgtcgtgatcggcgacttggggtccaacttctttgcccggctgttcgggtttcaggtgggcggcaccttccgcatgttcctgctgttcgccgtgtcgctgtgcatcgtgctcccgctcagcctgcagcggaacatgatggcctccatccagtccttcagcgccatggccctcctcttctacaccgtgtttatgttcgtgatcgtgctctcccctctcaagcacggcctcttcagtgggcagtggctgcggcgggtcagctacgtccgctgggagggcgtcttccgctgcatccccatcttcgggcatgtccttcgcctgccagtcccaagtgctgcccacctacgacagcctggatgagccgtcagtgat

SEQ ID NO: 388 - DNA, 6976 bp, Homo sapiens
  CDS (226)..(6417)
tcccgtgtcgacgatttcgaggcgctccaaggcccgcccgggagggccggggccgcgctcagaattttgatttggctgctgggctgctaccttgaaatccaagccctaaaaatgccagcttctttggacttagaagatgacctggataaatgataaaaattaagaaagagattttgaagttttcttattgtcctcttggcatatgcttctggaataatattcaccatggttttggatgaccttccaaacttagaagacatctatacttccttgtgttcatcaacaatggaagactcagagatggattttgactctggactagaagatgatgacacaaaaagtgatagtattttggaggattccacaatttttgtggccttcaaaggaaatatagatgataaagacttcaaatggaaattagatgcaatattgaaaaacgtgcccaatttgttacacatggagtccagcaagctaaaagtacagaaggtggagccctggaacagcgtgcgtgtgacattcaacatcccccgggaagcagcggagcggctacggatccttgctcagagcaacaaccagcagcttcgggatttagggattctctccgttcagattgaaggggaaggtgctattaacctggctttggctcagaaccgaagccaagatgtgagaatgaatggacccatgggagctggaaattcagttaggatggaggcgggatttcctatggcaagtggtccaggaataataaggatgaacaaccctgccactgttatgatacccccgggtggaaatgtgtcatcttccatgatggcaccaggccccaatccagagctgcagcccaggactcctcgccctgcttctcagtcagatgcaatggatccactcctctctgggctccatatacagcagcaaagtcatccctcaggatctttagctcccccacatcacccaatgcagcctgtctctgtgaacagacaaatgaacccagctaattttccccagctgcagcagcagcagcaacaacaacaacagcagcagcagcagcagcagcagcaacaacagcaacagcagcaacaacagttgcaggcaagacccccacagcaacatcagcagcaacagccacagggaattcgaccccagtttactgccccaactcaggtgcctgttcctccaggctggaaccagctgccttctggagcccttcaacctcctccagcccagggttctctgggcacaatgactgcaaaccaagggtggaagaaggctcccttgcccggcccaatgcaacagcaactccaggcaagaccatccttagccacggtacagacgccttcccaccctccccctccatatccctttggcagccagcaagcctcacaagcccacacaaactttcctcagatgagcaacccaggccagttcacagctcctcagatgaagagtttgcagggagggccctctagggtcccaactcccttgcagcagccccacctcaccaacaagtctcctgcctcctcaccctcctccttccagcagggatcccctgcatcctccccaacggttaaccaaactcagcagcagatgggaccaaggccacctcaaaataacccacttccccagggatttcagcagcctgtcagctctccgggtcggaatcctatggttcaacagggaaatgtgccacctaacttcatggtgatgcagcagcaaccaccaaaccaggggccacagagtttacatccaggcctaggaggaatgcctaaacgcctcccacctggcttctcagcaggacaggccaatccgaactttatgcaaggtcaggtgccttcgaccacagcaaccacccctgggaattcaggagcccctcagctgcaagcaaatcaaaatgtccagcatgcaggtggtcaaggagctggtcctcctcaaaaccagatgcaggtgtcccacgggccgccaaatatgatgcagcccagcctcatgggaattcatggcaacatgaacaatcagcaggctggtacttctggggttcctcaagtgaacctcagcaacatgcaaggccagccccagcagggcccaccatctcagctgatgggcatgcaccagcaaatcgtgccctcccagggccagatggtccagcaacaaggaaccttgaaccctcagaaccctatgatcctttcaagggcccagcttatgccacagggccagatgatggtgaaccccccgagccaaaatcttgggccctcgccccaaaggatgaccccacccaagcagatgctttcccagcagggcccacaaatgatggcgccacataaccagatgatggggcctcaggggcaggttttgctccaacagaacccaatgatagagcagattatgaccaatcaaatgcaggggaataagcagcagtttaacactcagaaccagtccaatgtcatgccgggaccagcccagataatgaggggaccaactccaaacatgcaaggaaatatggtgcagtttacgggacagatgtcaggacagatgctgccccagcaagggcctgtgaacaacagtccatctcaggttatgggcattcagggacaggtcctgcggccaccagggcccagcccacacatggcccagcagcatggtgatcctgctactacagcaaataacgatgtcagtttatctcagatgatgcctgatgttagcattcaacaaaccaacatggtcccccctcatgtgcaggccatgcagggaaacagtgcctcgggaaaccacttctcaggccatgggatgtctttcaatgcacctttcagtggagctcccaatggaaatcagatgtcctgtggtcaaaatccaggcttcccagtcaataaggatgtcacgctaacgagcccattgttggtcaacttattgcagagtgacatatctgcaggccattttggggtaaacaataagcaaaataataccaacgcaaataaaccgaagaagaagaaaccccctcggaagaagaaaaatagtcagcaagatctaaacaccccagatactcgcccagctggtctggaagaggctgatcagccaccgttgcctggagaacaaggaattagcttggataactcaggccctaaactgccagaattttcaaaccggccaccaggttatccttctcaaccagttgaacagaggccacttcagcagatgcctcctcaactcatgcagcatgtggcacccccaccacagccaccacagcagcagccacagccacaactgcctcagcagcagcagccaccacctcccagtcagccacagtctcagcagcagcagcagcagcagcaacaaatgatgatgatgctcatgatgcagcaggatcccaaatcagttaggcttccagtctctcaaaatgtccatcctccaaggggccccctgaaccccgactcccagagaatgcccatgcaacagagtggcagtgtgcctgtcatggtcagtctgcaaggacctgcctccgtgccaccatcacctgataaacaaagaatgccaatgcctgtgaatactcccttgggaagcaattcaaggaaaatggtctatcaggagagcccgcagaatccttccagctcgccactggcggagatggcctcactccctgaagcaagtggcagtgaagcaccatctgtcccaggaggcccaaacaacatgccttcacatgtagtacttccccagaatcagttaatgatgacagggccaaaacctggaccatcgcccctttcagcaactcaaggtgcaactccccagcaaccccctgtaaattccctgcccagctctcacggccaccacttcccaaatgtggctgcgccaacccagacatctaggcccaaaacaccaaacagagccagccccagaccctattatcctcagacacccaacaaccgccctcccagcacagaaccttcagaaatcagtctgtcaccagaaagactcaatgcctccatagcaggactcttccctccacagattaatattcctttacctcctaggccaaatttaaacaggggctttgatcaacaaggcctaaatccgacaattttgaaggccatcgggcaagcaccttcaaatcttaccatgaatccttccaattttgctaccccacaaactcacaaattagattctgtggtagtgaattctggaaagcagtctaattctggagcaacaaaacgggcaagtccaagcaacagtcgcaggtctagtcctgggtccagtaggaaaaccactccaagccctgggaggcaaaattcaaaagcccctaaacttactctggcctctcagacaaatgcagccctattgcagaatgtggagttgccgagaaatgtattggtcagtcccactcctctggccaatccccctgtacctgggagctttcctaacaacagtgggctgaatcctcagaattctactgtgtctgtggctgcagttgggggtgttgttgaggataacaaggagagcttgaatgtgcctcaggacagtgattgccagaattcccagagtaggaaggaacaggtaaacattgaactaaaagcagtccctgcccaagaagttaaaatggttgtccctgaagatcagtccaaaaaggatgggcagccttcggatcctaacaaacttcccagtgtcgaagagaacaaaaatttggtgtctcctgctatgagggaagcaccaacatcgttaagtcaacttcttgacaactctggagctcccaatgtgacaattaaaccccctgggcttacagatctggaagtaacacctccagtagtttctggggaggacctcaaaaaagcatctgtcattcccacactgcaggatctgtcttcttctaaagaaccttctaattccctaaacttacctcacagtaatgagctgtgttcatcccttgtgcatcccgaattgagtgaggtcagttctaacgttgcaccaagcatccctccagtaatgtcaagacctgttagctcttcctccatttccactcccttgcccccaaatcaaataactgtatttgtcacttccaatcccatcacaacttcagctaacacatcagcagctttgccaactcacttgcagtctgcattgatgtcaacagttgtcacaatgcccaatgcgggtagcaaggttatggtttctgagggacagtcagctgctcagtctaatgcccggcctcagttcattacacctgtctttatcaattcatcctcaataattcaggttatgaaaggatcacagccaagcacaattcctgcagccccactgacaaccaactctggcctgatgcctccctctgttgcagttgttggccctttacacatacctcagaacataaaattttcttctgctcctgtaccgcctaatgccctctccagtagtcctgctccaaacatccagacaggtcgacctttggtccttagctcacgagccacccctgttcagcttccttcccctccttgtacgtcttctccagttgtcccttctcatccccctgtgcagcaagtgaaagaattgaatccagatgaggctagccctcaggtgaacacctcagcagatcagaacactcttccctcttcacagtcaaccacaatggtttctccccttttgaccaatagtccagggtcctctggcaaccggcgaagcccagtctcgtctagtaagggcaaaggaaaagtggacaaaattggccaaattttgttgaccaaggcatgtaagaaagttacaggctctcttgagaaaggggaagaacaatatggtgcagatggagagactgaaggccaagggctagacaccacagctccggggctcatgggaacagagcagttatccacagagctggacagtaaaaccccaacgcccccagcacccactctgctaaaaatgacctctagccctgtgggcccgggcactgcctcagcaggacccagcttacctggcggtgctctccccaccagtgtacgctcgatagtaaccactctggtaccctccgagctcatctccgccgtaccgaccacaaaaagcaatcatggtggcatagcatctgagtcacttgcgggtggcctagtggaggagaaggtgggatcccatccagaacttctacccagcatagccccgtcgcagaatttagtctcaaaggaaacttcaaccacagcactgcaggcctctgttgccagaccagagctggaggtaaatgctgccatagtctctggacaaagcagtgagcccaaagagatagttgaaaagtccaaaatcccaggccgaagaaactcccgaactgaagagccaactgtggcctctgaaagtgtggaaaatggacatcgtaaacgatcttctcgacctgcttcagcctccagctctactaaagacataaccagtgcggtgcaatccaagcgaagaaaatccaagtaaacaagcaggactgcgacttgatacttggaaatgtgtgtgacttttacaaagagcaattttgagctgtgacttttttaaatcaatttctgtacagttagtaattttaataatgtggcccttttcctagtccctgcaacctgtttcataaagtgcaatggggaaagcaggactgttgagcccttttggtgttgcgagttgaagttcaaggtttctaaaatgttgtcttgtattgaaaggagctaatgccattataaatgttactagttttcacatttcctaagcagcctagagtacagggtgagcatttttagatctcctaatgatattgtgccgtggaagtactgtgtgtgaatagcagtagtgggggcaaaagcaatcttctcatttggaaatgttgtaaataattttattatatagtgttttggatgtatttgttgtagaaatggaccagtgaataaagagaatctaaggatttgtacaatgtgaaataacgtgttaaataaatgtcattgtcatagaacataaagttatgttattggtaagggaaaaaaaaaaaaaa

SEQ ID NO: 389 - DNA, 2282 bp, Homo sapiens
  CDS (87)..(2063)
tcgcctaccgtaccggtccggaattcccgggtcgacgatttcgtggcggctgcgccgggctgtgagtctctcgccgccggaggaagatgaggctgaagattggattcatcttacgcagtttgctggtggtgggaagcttcctggggctagtggtcctctggtcttccctgaccccgcggccggacgacccaagcccgctgagcaggatgagggaagacagagatgtcaatgaccccatgcccaaccgaggcggcaatggactagctcctggggaggacagattcaaacctgtggtaccatggcctcatgttgaaggagtagaagtggacttagagtctattagaagaataaacaaggccaaaaatgaacaagagcaccatgctggaggagattcccagaaagatatcatgcagaggcagtatctcacatttaagcctcagacattcacctaccatgatcctgtgcttcgcccagggatcctcggtaactttgaacccaaagaacctgagcctcctggagtggttggtggccctgggagagaaagccaagccattggttttggggcccagaatttaaacaagcaattcaagccagcatttaaagagtttgggtttaacatggtggcaagtgacatgttctcactggaccgcaacgtcaatgacttacgccaagaagaatgcaagtattggcattatgatgaaaacttgctcacttcgagcgttgtcattgtcttccataatgaaggatggtcaaccctcatgagaacagtccacagtgtaattaaaaggactccaaggaaatatttagcagaaattgtgttaattgacgatttcagtaataaagaacacttaaaagaaaaactggatgaatatattaagctgtggaatggcctagtgaaggtatttcgaaatgaaagaagggaaggtttaattcaagcacgaagtattggtgctcagaaggctaaacttggacaggttttgatataccttgatgcccactgtgaggtggcagttaactggtatgcaccacttgtagctcccatatctaaggacagaaccatttgcactgtgccgcttatagatgtcataaatggcaacacatatgaaattataccccaagggggtggtgatgaagatgggtatgcccgaggagcatgggattggagtatgctctggaaacgggtgcctctgacccctcaagagaagagactgagaaagacaaaaactgaaccgtatcggtccccagccatggctgggggattatgtgccattgaacgagagttcttctttgaattgggtctctatgatccaggtctccagatttggggtggtgaaaactttgagatctcatacaagatatggcagtgtggtggcaaattattatttgttccttgttctcgtgttggacatatctaccgtcttgagggctggcaaggaaatcctccgcccatttatgttgggtcttctccaactctgaagaattatgttagagttgtggaggtttggtgggatgaatataaagactacttctatgctagtcgtcctgaatcgcaggcattaccatatggggatatatcggagctgaaaaaatttcgagaagatcacaactgcaaaagttttaagtggttcatggaagaaatagcttatgatatcacctcacactaccctttgccacccaaaaatgttgactggggagaaatcagaggcttcgaaactgcttactgcattgatagcatgggaaaaacaaatggaggctttgttgaactaggaccctgccacaggatgggagggaatcagcttttcagaatcaatgaagcaaatcaactcatgcagtatgaccagtgtttgacaaagggagctgatggatcaaaagttatgattacacactgtaatctaaatgaatttaaggaatggcagtacttcaagaacctgcacagatttactcatattccttcaggaaagtgtttagatcgctcagaggtcctgcatcaagtattcatctccaattgtgactccagtaaaacgactcaaaaatgggaaatgaataacatccatagtgtttagagagaaaaaaataaaccaataacctacctactgacaagtaaatttatacaggactgaaaaccgcctgaaacctgctgcaactattgttattaactctgtatagctccaaacctggaacctcctgatcagtttgaaggacattgataaactgtgattttacaataacattatcatctgcaggtactggttacaagactgcttttaaccttaaactttgag

SEQ ID NO: 390 - DNA, 2513 bp, Homo sapiens
  CDS (385)..(2241)
ccggaattcccgggtcgacgatttcgtccgagggccggcggactggagcggtttgcccctctcgggggccccgccgagtgcgcgtcctcccatcttatcctgcataaatgatgaaagtttcctgtgaagcataacaatccctgattgtgaaagtaccccacacgcatcgttaactataaagtaaggaaaagtatgaaagaaccatctggttgagtctaaagttggaagatcaccatatccaccacaagacccaggatggatctgcaacaaagcaccaccatcacttccctatagaaatggtgtttggatgagtcactgtctggctgcagaagacattatagtgtcaagaaaaaactgaagttaattcgagtcttaggccttttcatgggtctggtagccattagcactgtctcattttcaatcagtgccttttctgagacagatacacagagcacaggagaggccagtgttgtaagtggccctagggtagcacagggttaccatcagagaactctcttagatttaaatgacaagattctggattatactccacagccacctctttctaaggaaggcgagtctgagaatagtacagatcacgcccaaggagactacccgaaagacatcttttcccttgaggagagaagaaaaggtgcgatcattctgcacgtcattggaatgatctacatgttcatagccttagccattgtctgtgatgagttctttgttccttctttgactgtcatcactgaaaaactgggcatctctgatgatgtggctggagccaccttcatggctgcaggagggtcagccccagaacttttcacatctctcataggggtattcatcgctcacagcaacgttggcataggcacaattgtaggttcagcagtattcaacatcctctttgttattggcatgtgtgctctgttttctagagaaatcttaaacctgacatggtggccgctctttcgagatgtgtctttctacattgttgacttgatcatgctgatcatatttttcctggataatgtcatcatgtggtgggaaagcttgcttctcttaacagcttatttttgctatgtggttttcatgaaattcaacgtccaagtagaaaaatgggtgaagcaaatgataaaccgcaataaggtcgtcaaggtgacagcaccagaagcccaagcaaagccatctgcagccagggacaaggatgaaccaactctaccggctaagccgcgtctccagcgaggtggaagctctgcctccctccacaacagtctcatgaggaatagcatcttccaactcatgatacacacccttgacccactcgccgaagaacttggatcatatggaaaactaaaatattatgacacaatgactgaagaagggaggttcagagaaaaggcttcaattctccacaagatcgccaagaagaaatgtcatgtggatgagaacgagcggcagaatggggctgccaaccacgtggaaaaaattgagcttccaaacagcaccagcacagatgttgaaatgacaccatccagtgatgcttcagaacctgtacaaaatggaaatctctcccacaacattgaaggtgcagaagcccagaccgctgatgaggaggaggaccagcctctcagccttgcctggccttctgaaacccgcaagcaagtcacgtttctgattgttttccccatagtgtttcctctctggattacgttacctgacgttcgcaaaccttcatcgaggaagttttttcccatcacgttctttggctccattacctggattgcagtattctcttacttgatggtctggtgggcgcaccaggttggagagacaattggcatcagtgaagagattatgggcctgaccatcttggctgctgggacctccatccctgatcttatcaccagtgtcatagtggcccggaaggggctaggggacatggctgtgtccagctctgttggaagcaacatttttgacatcactgtagggctcccactgccctggctcctgtacaccgtcattcacagattccagccagtggctgtcagcagcaatggccttttctgtgccatcgtccttctcttcatcatgctgctcttcgtcatcctctctatcgccctctgcaagtggcgaatgaacaaaatcctgggcttcatcatgtttggcctctactttgtgttcctggtggtgagcgttctcctagaagacagaattcttacatgccccgtctccatctagcaggaaaagccatatcttgcaccagcagcatgaatggtccctccacactctgggctctgggctccttgacctcttgagaagaggcagctggcacacagccctgggtgccaagtgtccctccttggtgaatttgaggagagatggattcacactgggcccattcacttcacaggctgcttccaccctgcctactgaaatgacttcatgtaaaagacaaagagaaccgtcaatacagggcttctccctattcaccactgacaagtacacctcgc

SEQ ID NO: 391 - DNA, 5824 bp, Homo sapiens
  CDS (590)..(5824)
ttcgagatccctagtcagtgtggtggaattcctttacaccagacaggcctcattttaaatcctgtctctaccgtttactagctgtgtgatcttgggcaagatacttaacctctctgagtttctgtttcctcatctatcaatgaagatgatactatgaacccaataaggctgttaaaacaggttttttattacctaccacggcgggctgtacatctctgacgtacagaaggaggacgccctctccacctatcgctgcatcaccaagcacaagtatagcggggagacccggcagagcaatggggcacgcctctctgtgacagaccctgctgagtcgatccccaccatcctggatggcttccactcccaggaagtgtgggccggccacaccgtggagctgccctgcaccgcctcgggctaccctatccccgccatccgctggctcaaggatggccggcccctcccggctgacagccgctggaccaagcgcatcacagggctgaccatcagcgacttgcggaccgaggacagcggcacctacatttgtgaggtcaccaacaccttcggttcggcagaggccacaggcatcctcatggtcattgatccccttcatgtgaccctgacaccaaagaagctgaagaccggcattggcagcacggtcatcctctcctgtgccctgacgggctccccagagttcaccatccgctggtatcgcaacacggagctggtgctgcctgacgaggccatctccatccgcgggctcagcaacgagacgctgctcatcacctcggcccagaagagccattccggggcctaccagtgcttcgctacccgcaaggcccagaccgcccaggactttgccatcattgcacttgaggatggcacgccccgcatcgtctcgtccttcagcgagaaggtggtcaaccccggggagcagttctcactgatgtgtgcggccaagggcgccccgccccccacggtcacctgggccctcgacgatgagcccatcgtgcgggatggcagccaccgcaccaaccagtacaccatgtcggacggcaccaccatcagccacatgaacgtcacaggcccccagatccgcgacgggggcgtgtaccggtgcacagcgcggaacttggtgggcagtgctgaatatcaggcgcgaataaacgtaagaggcccacccagcatccgggctatgcggaacatcacagcagtcgccgggcgggacacccttatcaactgcagggtcatcggctatccctactactccatcaagtggtacaaggatgccctgctgctgccagacaaccaccgccaggtggtgtttgagaatgggaccctcaagctgactgacgtgcagaagggcatggatgagggggagtacctgtgcagtgtcctcatccagccccagctctccatcagccagagcgttcacgtagccgtcaaagtgccccctctgatccagcccttcgaattcccacccgcctccatcggccagctgctctacattccctgtgtggtgtcctcgggggacatgcccatccgtatcacctggaggaaggacggacaggtgatcatctcaggctcgggcgtgaccatcgagagcaaggaattcatgagctccctgcagatctctagcgtctccctcaagcacaacggcaactatacatgcatcgccagcaacgcagccgccaccgtgagccgggagcgccagctcatcgtgcgtgtgccccctcgatttgtggtgcaacccaacaaccaggatggcatctacggcaaagctggtgtgctcaactgctcggtggacggctaccccccacccaaggtcatgtggaagcatgccaaggggagcgggaacccccagcagtaccaccctgtgcccctcactggccgcatccagatcctgcccaacagctcgctgctgatccgccacgtcctagaagaggacatcggctactacctctgccaggccagcaacggcgtaggcaccgacatcagcaagtccatgttcctcacagtcaagatcccggccatgatcacttcccaccccaacaccaccatcgccatcaagggccatgcgaaggagctaaactgcacggcacggggtgagcggcccatcatcatccgctgggagaagggggacacagtcatcgaccctgaccgcgtcatgcggtatgccatcgccaccaaggacaacggcgacgaggtcgtctccacactgaagctcaagcccgctgaccgtggggactctgtgttcttcagctgccatgccatcaactcgtatggggaggaccggggcttgatccaactcactgtgcaagagccccccgaccccccagagctggagatccgggaggtgaaggcccggagcatgaacctgcgctggacccagcgattcgacgggaacagcatcatcacgggcttcgacattgaatacaagaacaaatcagattcctgggacttcaagcagtccacacgcaacatctcccccaccatcaaccaggccaacattgtggacttgcacccggcatctgtgtacagcatccgcatgtactctttcaacaagattggccgcagtgaaccaagcaaggagctcaccatcagcactgaggaggccgctcccgatgggccccccatggatgttaccttgcagccagtgacctcacagagcatccaggtgacctggaaggcacccaagaaggagctgcagaacggtgtcatccggggctaccagattggctacagagagaacagccccggcagcaacgggcagtacagcatcgtggagatgaaggccacgggggacagcgaggtctacaccctggacaacctcaagaagttcgcccagtatggggtggtggtccaagccttcaatcgggctggcacggggccctcttccagcgagatcaatgccaccactctggaggatgtgcccagccagccccctgagaacgtccgggccctgtccatcacttctgacgtggccgtcatctcctggtcagagcccccgcgcagcaccctcaatggcgtcctcaaaggctatcgggtcatcttctggtccctctatgttgatggggagtggggcgagatgcagaacatcaccaccacgcgggagcgggtggagctgcggggcatggagaagttcaccaactacagcgtccaggtgctggcctacacccaggctggggacggcgtacgcagcagtgtgctctacatccagaccaaggaggacgttccaggtccccctgctggcatcaaagctgtcccttcatcagctagcagtgtggttgtgtcttggctcccccctaccaagcccaacggggtgatccgcaagtacaccatcttctgttccagccccgggtctggccagccggctcccagcgagtacgagacgagtccagagcagctcttctaccggatcgcccacctaaaccgcggtcagcagtatctgctgtgggtggccgccgtcacctctgccggccggggcaacagcagcgagaaggtgaccatcgagcctgctggcaaggccccagcaaagatcatctcctttgggggcaccgtgacaacaccttggatgaaagatgttcggctgccttgcaattcagtgggagatccagcccctgctgtgaagtggaccaaggacagtgaagactcggccattccagtgtccatggatgggcaccggctcatccacaccaatggcacactgctgctgcgtgcagtgaaggctgaggactctggctactacacgtgcacggccaccaacactggtggctttgacaccatcatcgtcaaccttctggtgcaagttcccccggaccagccccgcctcactgtctccaaaacctcagcttcgtccatcaccctgacctggattccaggtgacaatgggggcagctccatccgaggcttcgtgctacagtactcggtggacaacagcgaggagtggaaggatgtgttcatcagctccagcgagcgctccttcaagctggacagcctcaagtgtggcacgtggtacaaggtgaagctggcagccaagaacagcgtgggctctgggcgcatcagcgagatcatcgaggccaagacccacgggcgggagccctccttcagcaaagaccaacacctcttcacccacatcaactccacgcatgctcggcttaacctgcagggctggaacaatgggggctgccctatcacagccatcgttctggagtaccggcccaaggggacctgggcctggcagggcctccgggccaacagctccggggaggtgtttctgacggaactgcgagaggccacgtggtacgagctgcgcatgagggcttgcaacagtgcgggctgcggcaatgaaacagcccagttcgccaccctggactacgatggcagcaccattccacccatcaagtctgctcaaggtgaaggggatgatgtgaagaagctgttcaccatcggctgccctgtcatcctggccacactgggggtggcactgctcttcatcgtacgcaagaagaggaaggagaaacggctgaagcgactccgagatgcaaagagtttggcagaaatgttgataagcaagaacaatagaagctttgacacccctgtgaaagggccaccccagggcccacggctacacattgacatccccagggtccagctgctcatcgaggacaaagaaggcatcaagcaactgggagatgacaaggccaccatccctgtgacagatgctgagttcagccaagctgtcaacccacagagcttctgtactggcgtctccttgcaccacccaaccctcatccagagcacaggacccctcatcgacatgtctgacatccggccaggaaccaatccagtgtccaggaagaatgtgaagtcagcccacagcacccggaaccggtactcaagccagtggaccctgaccaagtgccaggcctccacacctgcccgcaccctcacctccgactggcgcaccgtgggctcccagcatggtgtcacggtcactgagagtgacagctacagtgccagcctgtcccaggacacagacaaaggaaggaacagcatggtgtccactgagagtgcctcttccacctacgaggagctggcccgggcctatgagcatgccaagctggaggagcagctgcagcacgccaagtttgagatcaccgagtgcttcatctctgacagttcctctgaccagatgaccacaggcaccaacgagaacgccgacagcatgacatccatgagcacaccctcagagcctggcatctgccgctttaccgcctcaccacccaagccccaggatgcggaccggggcaaaaacgtggctgtgcccatccctcaccgggccaacaagagtgactactgcaacctgcccctgtatgccaagtcagaggccttctttcgaaaggcagatggacgtgagccctgccccgtggtcccaccccgtgaggcctccatccggaacctggctcgaacctaccacacccaggctcgccacctgaccctggaccctgccagcaagtccttgggccttccccacccaggggcccccgctgccgcctccacagccaccttacctcagaggactctggccatgccagcccccccagccggcacagcccccccagcccccggccccacccctgctgagccacccaccgcccccagcgctgcccctccggcccccagcaccgagcctccacgagccgggggcccacacaccaaaatggggggctccagggactcgcttctcgagatgagcacatcgggggtagggaggtctcagaagcagggggccggggcctactccaaatcctacaccctggtgtag

SEQ ID NO: 392 - DNA, 4694 bp, Homo sapiens
  CDS (168)..(2981)
taagcttgcggccgccaaccatcaccaagcagtcagcgaaggatcacatcgtggacccccgtgataacatcctgattgagtgtgaagcaaaagggaaccctgcccccagcttccactggacacgaaacagcagattcttcaacatcgccaaggacccccgggtgtccatgaggaggaggtctgggaccctggtgattgacttccgcagtggcgggcggccggaggaatatgagggggaatatcagtgcttcgcccgcaacaaatttggcacggccctgtccaataggatccgcctgcaggtgtctaaatctcctctgtggcccaaggaaaacctagaccctgtcgtggtccaagagggcgctcctttgacgctccagtgcaaccccccgcctggacttccatccccggtcatcttctggatgagcagctccatggagcccatcacccaagacaaacgtgtctctcagggccataacggagacctatacttctccaacgtgatgctgcaggacatgcagaccgactacagttgtaacgcccgcttccacttcacccacaccatccagcagaagaaccctttcaccctcaaggtcctcaccacccgaggagttgcagaaagaacaccaagcttcatgtatccccagggcaccgcgagcagccagatggtgcttcgtggcatggacctcctgctggaatgcatcgcctccggggtcccaacaccagacatcgcatggtacaagaaaggtggggacctcccatctgataaggccaagtttgagaactttaataaggccctgcgtatcacaaatgtctctgaggaagactccggggagtatttctgcctggcctccaacaagatgggcagcatccggcacacgatctcggtgagagtaaaggctgctccctactggctggacgaacccaagaaccttattctggctcctggcgaggatgggagactggtgtgtcgagccaatggaaaccccaaacccactgtccagtggatggtgaatggggaacctttgcaatcggcaccacctaacccaaaccgtgaggtggccggagacaccatcatcttccgggacacccagatcagcagcagggctgtgtaccagtgcaacacctccaacgagcatggctacctgctggccaacgcctttgtcagtgtgctggatgtgccgcctcggatgctgtcgccccggaaccagctcattcgagtgattctttacaaccggacgcggctggactgccctttctttgggtctcccatccccacactgcgatggtttaagaatgggcaaggaagcaacctggatggtggcaactaccatgtttatgagaacggcagtctggaaattaagatgatccgcaaagaggaccagggcatctacacctgtgtcgccaccaacatcctgggcaaagctgaaaaccaagtccgcctggaggtcaaagaccccaccaggatctaccggatgcccgaggaccaggtggccagaaggggcaccacggtgcagctggagtgtcgggtgaagcacgacccctccctgaaactcaccgtctcctggctgaaggatgacgagccgctctatattggaaacaggatgaagaaggaagacgatttcgtgaccatctttggggtggcagagcgggaccagggcagttacacgtgtgtcgccagcaccgagctagaccaagacctggccaaggcctacctcaccgtgctaggacggccagaccggccccgggacctggagctgaccgacctggccgagaggagcgtgcggctgacctggatccccggggatgctaacaacagccccatcacagactacgtcgtccagtttgaagaagaccagttccaacctggggtctggcatgaccattccaagtaccccggcagcgttaactcagccgtcctccggctgtccccgtatgtcaactaccagttccgtgtcattgccatcaacgaggttgggagcagccaccccagcctcccatccgagcgctaccgaaccagtggagcaccccccgagtccaatcctggtgacgtgaagggagaggggaccagaaagaacaacatggagatcacgtggacgcccatgaatgccacctcggcctttggccccaacctgcgctacattgtcaagtggaggcggagagagactcgagaggcctggaacaacgtcacagtgtggggctctcgctacgtggtggggcagaccccagtctacgtgccctatgagatccgagtccaggctgaaaatgacttcgggaagggccctgagccagagtccgtcatcggttactccggagaagattatcccagggctgcgcccactgaagttaaagtccgagtcatgaacagcacagccatcagccttcagtggaaccgcgtctactccgacacggtccagggccagctcagagagtaccgagcctactactggagggagagcagcttgctgaagaacctgtgggtgtctcagaagagacagcaagccagcttccctggtgaccgcctccgtggcgtggtgtcccgcctcttcccctacagtaactacaagctggagatggttgtggtcaatgggagaggtgatgggcctcgcagtgagaccaaggagttcaccaccccggaaggagtacccagtgcccctaggcgtttccgagtccggcagcccaacctggagacaatcaacctggaatgggatcatcctgagcatccaaatgggatcatgattggatacactctcaaatatgtggcctttaacgggaccaaagtaggaaagcagatagtggaaaacttctctcccaatcagaccaagttcacggtgcaaagaacggaccccgtgtcacgctaccgctttaccctcagcgccaggacgcaggtgggctctggggaagccgtcacagaggagtcaccagcacccccgaatgaaggtaggtgcatggcagcagcccctggggtaaaaggtcccagctaattccgaggcctagagaaacactgagatctgtagctggctgcctgggatggagaggaaatgagacttgcaagtcctcaagccctcggaaggtgagaacccatcttatgtgtgagaggtaggtgctggcattgtatctggagctcagctctccttggaccactgtggtcacacctgggtccccacttgccctgacttgctcagtcacttgacatctatcatctttccttcttgtagaggaataaggaagagagcatgagttgagaaatgagagaaatcataatgaactccaaagaacagtgagtgttcacctcttgagggaggcaggaatatgattgtgagtgctcccatgagggctctggggacaaccttctttcttcgaaggcacatgggttcaaggaggtaggggaaaccgtcaggatgacgctgttactggcatcatgagtagagcagagaatgtggtccttccttgcagcctgaattggatgcgttgtcaggctgcagagaggaggaggagttaggaaacagccatttgccaagccagcttcacaaagagcaaatgagttcatcacctgggtccaggcgtcatctggcagcatttcagccccaccagagctgcacctgcctgaggactccactagagggggctccaggctcacccgcacacgcactggcatcaggggaatgtgcagtctgggacctctcgaggaggcaaggctgcaaaagcctcaatactggcacaccctctgggaaaggctggggacccccgtgtgtctccagagatacaatggtctattcaacagccatttcttgagtacccacaatgtgaggtgccagacactgccacacacaagggatatacaaaggtaacaagaagctcacaccatctagagggggagtcatctataagaatatctaattgcatgtctaaatgagggggcgcagtggctgggcagagaaggggattcagtcttcacgggaagactccagagaagaggtgatgtgagtgggcactctggaagctgacaagtcatcgtgtctggtgctttccacagaagggtcaggtcccgtggcctggcccaggcccagacggggtcttctgaataccacccctacccgcattccaggagagcatcagtgctgccttctctggggctaccaggcccgctgcgtcaccccgggatcccaggcagcttcacaagctgcccacatccttccccagcccaccactctagccagtagaccagcgctgaggcaggagaagaggggccaggcagaagcagagaaaggctgacagcccgctctgcatccctctctggtctcagaaaccaggagtgagtcacacaaccagctctccctcctgctgtgctcttctgcactctcccaagcccctgggcactcgggaagtttattagggcagggggacttaggttagtggctgatgtgtgtctgtcaccaaaggccaggccaggccaggccatgatgcactttcttgattactcaattctgcaaatagatagataaagagagccccttcttccctccctatgtgcaccccaatacagaacatcagataacaaagccctattgtccagccccagtaaccaccacagagaatgttctgcagccccaggggacaaaaggacaaatagaggcttttttcttaacttagggctttgcagaaaattcaagaatttcacttagggctctcagtcc

SEQ ID NO: 393 - DNA, 4739 bp, Homo sapiens
  CDS (168)..(3026)
taagcttgcggccgccaaccatcaccaagcagtcagcgaaggatcacatcgtggacccccgtgataacatcctgattgagtgtgaagcaaaagggaaccctgcccccagcttccactggacacgaaacagcagattcttcaacatcgccaaggacccccgggtgtccatgaggaggaggtctgggaccctggtgattgacttccgcagtggcgggcggccggaggaatatgagggggaatatcagtgcttcgcccgcaacaaatttggcacggccctgtccaataggatccgcctgcaggtgtctaaatctcctctgtggcccaaggaaaacctagaccctgtcgtggtccaagagggcgctcctttgacgctccagtgcaaccccccgcctggacttccatccccggtcatcttctggatgagcagctccatggagcccatcacccaagacaaacgtgtctctcagggccataacggagacctatacttctccaacgtgatgctgcaggacatgcagaccgactacagttgtaacgcccgcttccacttcacccacaccatccagcagaagaaccctttcaccctcaaggtcctcaccacccgaggagttgcagaaagaacaccaagcttcatgtatccccagggcaccgcgagcagccagatggtgcttcgtggcatggacctcctgctggaatgcatcgcctccggggtcccaacaccagacatcgcatggtacaagaaaggtggggacctcccatctgataaggccaagtttgagaactttaataaggccctgcgtatcacaaatgtctctgaggaagactccggggagtatttctgcctggcctccaacaagatgggcagcatccggcacacgatctcggtgagagtaaaggctgctccctactggctggacgaacccaagaaccttattctggctcctggcgaggatgggagactggtgtgtcgagccaatggaaaccccaaacccactgtccagtggatggtgaatggggaacctttgcaatcggcaccacctaacccaaaccgtgaggtggccggagacaccatcatcttccgggacacccagatcagcagcagggctgtgtaccagtgcaacacctccaacgagcatggctacctgctggccaacgcctttgtcagtgtgctggatgtgccgcctcggatgctgtcgccccggaaccagctcattcgagtgattctttacaaccggacgcggctggactgccctttctttgggtctcccatccccacactgcgatggtttaagaatgggcaaggaagcaacctggatggtggcaactaccatgtttatgagaacggcagtctggaaattaagatgatccgcaaagaggaccagggcatctacacctgtgtcgccaccaacatcctgggcaaagctgaaaaccaagtccgcctggaggtcaaagaccccaccaggatctaccggatgcccgaggaccaggtggccagaaggggcaccacggtgcagctggagtgtcgggtgaagcacgacccctccctgaaactcaccgtctcctggctgaaggatgacgagccgctctatattggaaacaggatgaagaaggaagacgatttcgtgaccatctttggggtggcagagcgggaccagggcagttacacgtgtgtcgccagcaccgagctagaccaagacctggccaaggcctacctcaccgtgctagctgatcaggccactccaactaaccgtttggctgccctgcccaaaggacggccagaccggccccgggacctggagctgaccgacctggccgagaggagcgtgcggctgacctggatccccggggatgctaacaacagccccatcacagactacgtcgtccagtttgaagaagaccagttccaacctggggtctggcatgaccattccaagtaccccggcagcgttaactcagccgtcctccggctgtccccgtatgtcaactaccagttccgtgtcattgccatcaacgaggttgggagcagccaccccagcctcccatccgagcgctaccgaaccagtggagcaccccccgagtccaatcctggtgacgtgaagggagaggggaccagaaagaacaacatggagatcacgtggacgcccatgaatgccacctcggcctttggccccaacctgcgctacattgtcaagtggaggcggagagagactcgagaggcctggaacaacgtcacagtgtggggctctcgctacgtggtggggcagaccccagtctacgtgccctatgagatccgagtccaggctgaaaatgacttcgggaagggccctgagccagagtccgtcatcggttactccggagaagattatcccagggctgcgcccactgaagttaaagtccgagtcatgaacagcacagccatcagccttcagtggaaccgcgtctactccgacacggtccagggccagctcagagagtaccgagcctactactggagggagagcagcttgctgaagaacctgtgggtgtctcagaagagacagcaagccagcttccctggtgaccgcctccgtggcgtggtgtcccgcctcttcccctacagtaactacaagctggagatggttgtggtcaatgggagaggtgatgggcctcgcagtgagaccaaggagttcaccaccccggaaggagtacccagtgcccctaggcgtttccgagtccggcagcccaacctggagacaatcaacctggaatgggatcatcctgagcatccaaatgggatcatgattggatacactctcaaatatgtggcctttaacgggaccaaagtaggaaagcagatagtggaaaacttctctcccaatcagaccaagttcacggtgcaaagaacggaccccgtgtcacgctaccgctttaccctcagcgccaggacgcaggtgggctctggggaagccgtcacagaggagtcaccagcacccccgaatgaaggtaggtgcatggcagcagcccctggggtaaaaggtcccagctaattccgaggcctagagaaacactgagatctgtagctggctgcctgggatggagaggaaatgagacttgcaagtcctcaagccctcggaaggtgagaacccatcttatgtgtgagaggtaggtgctggcattgtatctggagctcagctctccttggaccactgtggtcacacctgggtccccacttgccctgacttgctcagtcacttgacatctatcatctttccttcttgtagaggaataaggaagagagcatgagttgagaaatgagagaaatcataatgaactccaaagaacagtgagtgttcacctcttgagggaggcaggaatatgattgtgagtgctcccatgagggctctggggacaaccttctttcttcgaaggcacatgggttcaaggaggtaggggaaaccgtcaggatgacgctgttactggcatcatgagtagagcagagaatgtggtccttccttgcagcctgaattggatgcgttgtcaggctgcagagaggaggaggagttaggaaacagccatttgccaagccagcttcacaaagagcaaatgagttcatcacctgggtccaggcgtcatctggcagcatttcagccccaccagagctgcacctgcctgaggactccactagagggggctccaggctcacccgcacacgcactggcatcaggggaatgtgcagtctgggacctctcgaggaggcaaggctgcaaaagcctcaatactggcacaccctctgggaaaggctggggacccccgtgtgtctccagagatacaatggtctattcaacagccatttcttgagtacccacaatgtgaggtgccagacactgccacacacaagggatatacaaaggtaacaagaagctcacaccatctagagggggagtcatctataagaatatctaattgcatgtctaaatgagggggcgcagtggctgggcagagaaggggattcagtcttcacgggaagactccagagaagaggtgatgtgagtgggcactctggaagctgacaagtcatcgtgtctggtgctttccacagaagggtcaggtcccgtggcctggcccaggcccagacggggtcttctgaataccacccctacccgcattccaggagagcatcagtgctgccttctctggggctaccaggcccgctgcgtcaccccgggatcccaggcagcttcacaagctgcccacatccttccccagcccaccactctagccagtagaccagcgctgaggcaggagaagaggggccaggcagaagcagagaaaggctgacagcccgctctgcatccctctctggtctcagaaaccaggagtgagtcacacaaccagctctccctcctgctgtgctcttctgcactctcccaagcccctgggcactcgggaagtttattagggcagggggacttaggttagtggctgatgtgtgtctgtcaccaaaggccaggccaggccaggccatgatgcactttcttgattactcaattctgcaaatagatagataaagagagccccttcttccctccctatgtgcaccccaatacagaacatcagataacaaagccctattgtccagccccagtaaccaccacagagaatgttctgcagccccaggggacaaaaggacaaatagaggcttttttcttaacttagggctttgcagaaaattcaagaatttcacttagggctctcagtcc

SEQ ID NO: 394 - DNA, 14530 bp, Homo sapiens
  CDS (94)..(2466)
ggaggaaaagggggaccccccaactggggggggtgaaggagagaagtagcaggaccagaggggaaggggctgctgcttgcatcaacccacaccatgctgaccccgccgttgctcctgctgctgcccctgctctcagctctggtcgcggcggctatcgacgcccctaagacttgcagccccaagcagtttgcctgcagagatcaaataacctgtatctcaaagggctggcggtgcgacggtgagagggactgcccagacggatctgacgaggcccctgagatttgtccacagagtaaggcccagcgatgccagccaaacgagcataactgcctgggtactgagctgtgtgttcccatgtcccgcctctgcaatggggtccaggactgcatggacggctcagatgaggggccccactgccgagagctccaaggcaactgctctcgcctgggctgccagcaccattgtgtccccacactcgatgggcccacctgctactgcaacagcagctttcagcttcaggcagatggcaagacctgcaaagattttgatgagtgctcagtgtacggcacctgcagccagctatgcaccaacacagacggctccttcatatgtggctgtgttgaaggatacctcctgcagccggataaccgctcctgcaaggccaagaacgagccagtagaccggccccctgtgctgttgatagccaactcccagaacatcttggccacgtacctgagtggggcccaggtgtctaccatcacacctacgagcacgcggcagaccacagccatggacttcagctatgccaacgagaccgtatgctgggtgcatgttggggacagtgctgctcagacgcagctcaagtgtgcccgcatgcctggcctaaagggcttcgtggatgagcacaccatcaacatctccctcagtctgcaccacgtggaacagatggccatcgactggctgacaggcaacttctactttgtggatgacatcgatgataggatctttgtctgcaacagaaatggggacacatgtgtcacattgctagacctggaactctacaaccccaagggcattgccctggaccctgccatggggaaggtgtttttcactgactatgggcagatcccaaaggtggaacgctgtgacatggatgggcagaaccgcaccaagctcgtcgacagcaagattgtgtttcctcatggcatcacgctggacctggtcagccgccttgtctactgggcagatgcctatctggactatattgaagtggtggactatgagggcaagggccgccagaccatcatccagggcatcctgattgagcacctgtacggcctgactgtgtttgagaattatctctatgccaccaactcggacaatgccaatgcccagcagaagacgagtgtgatccgtgtgaaccgctttaacagcaccgagtaccaggttgtcacccgggtggacaagggtggtgccctccacatctaccaccagaggcgtcagccccgagtgaggagccatgcctgtgaaaacgaccagtatgggaagccgggtggctgctctgacatctgcctgctggccaacagccacaaggcgcggacctgccgctgccgttccggcttcagcctgggcagtgacgggaagtcatgcaagaagccggagcatgagctgttcctcgtgtatggcaagggccggccaggcatcatccggggcatggatatgggggccaaggtcccggatgagcacatgatccccattgaaaacctcatgaacccccgagccctggacttccacgctgagaccggcttcatctactttgccgacaccaccagctacctcattggccgccagaagattgatggcactgagcgggagaccatcctgaaggacggcatccacaatgtggagggtgtggccgtggactggatgggagacaatctgtactggacggacgatgggcccaaaaagacaatcagcgtggccaggctggagaaagctgctcagacccgcaagactttaatcgagggcaaaatgacacaccccagggctattgtggtggatccactcaatgggtggatgtactggacagactgggaggaggaccccaaggacagtcggcgtgggcggctggagagggcgtggatggatggctcacaccgagacatctttgtcacctccaagacagtgctttggcccaatgggctaagcctggacatcccggctgggcgcctctactgggtggatgccttctacgaccgcatcgagacgatactgctcaatggcacagaccggaagattgtgtatgaaggtcctgagctgaaccacgcctttggcctgtgtcaccatggcaactacctcttctggactgagtatcggagtggcagtgtctaccgcttggaacggggtgtaggaggcgcaccccccactgtgacccttctgcgcagtgagccggccccccatctttgagatccgaatgtatgatgcccagcagcagcaagttggcaccaacaaatgccgggtgaacaatggcggctgcagcagcctgtgcttggccacccctgggagccgccagtgcgcctgtgctgaggaccaggtgttggacgcagacggcgtcacttgcttggcgaacccatcctacgtgcctccaccccagtgccagccaggcgagtttgcctgtgccaacagccgctgcatccaggagcgctggaagtgtgacggagacaacgattgcctggacaacagtgatgaggccccagccctctgccatcagcacacctgcccctcggaccgattcaagtgcgagaacaaccggtgcatccccaaccgctggctctgcgacggggacaatgactgtgggaacagtgaagatgagtccaatgccacttgttcagcccgcacctgcccccccaaccagttctcctgtgccagtggccgctgcatccccatctcctggacgtgtgatctggatgacgactgtggggaccgctctgatgagtctgcttcgtgtgcctatcccacctgcttccccctgactcagtttacctgcaacaatggcagatgtatcaacatcaactggagatgcgacaatgacaatgactgtggggacaacagtgacgaagccggctgcagccactcctgttctagcacccagttcaagtgcaacagcgggcgttgcatccccgagcactggacctgcgatggggacaatgactgcggagactacagtgatgagacacacgccaactgcaccaaccaggccacgaggccccctggtggctgccacactgatgagttccagtgccggctggatggactatgcatccccctgcggtggcgctgcgatggggacactgactgcatggactccagcgatgagaagagctgtgagggagtgacccacgtctgcgatcccagtgtcaagtttggctgcaaggactcagctcggtgcatcagcaaagcgtgggtgtgtgatggcgacaatgactgtgaggataactcggacgaggagaactgcgagtccctggcctgcaggccaccctcgcacccttgtgccaacaacacctcagtctgcctgccccctgacaagctgtgtgatggcaacgacgactgtggcgacggctcagatgagggcgagctctgtgaccagtgctctctgaataacggtggctgcagccacaactgctcagtggcacctggcgaaggcattgtgtgttcctgccctctgggcatggagctggggcccgacaaccacacctgccagatacagagctactgtgccaagcatctcaaatgcagccaaaagtgcgaccagaacaagttcagcgtgaagtgctcctgctacgagggctgggtcctggaacctgacggcgagagctgccgcagcctggaccccttcaagccgttcatcattttctccaaccgccatgaaatccggcgcatcgatcttcacaaaggagactacagcgtcctggtgcccggcctgcgcaacaccatcgccctggacttccacctcagccagagcgccctctactggaccgacgtggtggaggacaagatctaccgcgggaagctgctggacaacggagccctgactagtttcgaggtggtgattcagtatggcctggccacacccgagggcctggctgtagactggattgcaggcaacatctactgggtggagagtaacctggatcagatcgaggtggccaagctggatgggaccctccggaccaccctgctggccggtgacattgagcacccaagggcaatcgcactggatccccgggatgggatcctgttttggacagactgggatgccagcctgccccgcattgaggcagcctccatgagtggggctgggcgccgcaccgtgcaccgggagaccggctctgggggctggcccaacgggctcaccgtggactacctggagaagcgcatcctttggattgacgccaggtcagatgccatttactcagcccgttacgacggctctggccacatggaggtgcttcggggacacgagttcctgtcgcacccgtttgcagtgacgctgtacgggggggaggtctactggactgactggcgaacaaacacactggctaaggccaacaagtggaccggccacaatgtcaccgtggtacagaggaccaacacccagccctttgacctgcaggtgtaccacccctcccgccagcccatggctcccaatccctgtgaggccaatgggggccagggcccctgctcccacctgtgtctcatcaactacaaccggaccgtgtcctgcgcctgcccccacctcatgaagctccacaaggacaacaccacctgctatgagtttaagaagttcctgctgtacgcacgtcagatggagatccgaggtgtggacctggatgctccctactacaactacatcatctccttcacggtgcccgacatcgacaacgtcacagtgctagactacgatgcccgcgagcagcgtgtgtactggtctgacgtgcggacacaggccatcaagcgggccttcatcaacggcacaggcgtggagacagtcgtctctgcagacttgccaaatgcccacgggctggctgtggactgggtctcccgaaacctgttctggacaagctatgacaccaataagaagcagatcaatgtggcccggctggatggctccttcaagaacgcagtggtgcagggcctggagcagccccatggccttgtcgtccaccctctgcgtgggaagctctactggaccgatggtgacaacatcagcatggccaacatggatggcagcaatcgcaccctgctcttcagtggccagaagggccccgtgggcctggctattgacttccctgaaagcaaactctactggatcagctccgggaaccataccatcaaccgctgcaacctggatgggagtgggctggaggtcatcgatgccatgcggagccagctgggcaaggccaccgccctggccatcatgggggacaagctgtggtgggctgatcaggtgtcggaaaagatgggcacatgcagcaaggctgacggctcgggctccgtggtccttcggaacagcaccaccctggtgatgcacatgaaggtctatgacgagagcatccagctggaccataagggcaccaacccctgcagtgtcaacaacggtgactggctcccagctctgcctgcccacgtcagagacgacccgctcctgcatgtgcacagccggctatagcctccggagtggccagcaggcctgcgagggcgtaggttcctttctcctgtactctgtgcatgagggaatcaggggaattcccctggatcccaatgacaagtcagatgccctggtcccagtgtccgggacctcgctggctgtcggcatcgacttccacgctgaaaatgacaccatctactgggtggacatgggcctgagcacgatcagccgggccaagcgggaccagacgtggcgtgaagacgtggtgaccaatggcattggccgtgtggagggcattgcagtggactggatcgcaggcaacatctactggacagaccagggctttgatgtcatcgaggtcgcccggctcaatggctccttccgctacgtggtgatctcccagggtctagacaagccccgggccatcaccgtccacccggagaaagggtacttgttctggactgagtggggtcagtatccgcgtattgagcggtctcggctagatggcacggagcgtgtggtgctggtcaacgtcagcatcagctggcccaacggcatctcagtggactaccaggatgggaagctgtactggtgcgatgcacggacagacaagattgaacggatcgacctggagacaggtgagaaccgcgaggtggttctgtccagcaacaacatggacatgttttcagtgtctgtgtttgaggatttcatctactggagtgacaggactcatgccaacggctctatcaagcgcgggagcaaagacaatgccacagactccgtgcccctgcgaaccggcatcggcgtccagcttaaagacatcaaagtcttcaaccgggaccggcagaaaggcaccaacgtgtgcgcggtggccaatggcgggtgccagcagctgtgcctgtaccggggccgtgggcagcgggcctgcgcctgtgcccacgggatgctggctgaagacggagcatcgtgccgcgagtatgccggctacctgctctactcagagcgcaccattctcaagagtatccacctgtcggatgagcgcaacctcaatgcgcccgtgcagcccttcgaggaccctgagcacatgaagaacgtcatcgccctggcctttgactaccgggcaggcacctctccgggcacccccaatcgcatcttcttcagcgacatccactttgggaacatccaacagatcaacgacgatggctccaggaggatcaccattgtggaaaacgtgggctccgtggaaggcctggcctatcaccgtggctgggacactctctattggacaagctacacgacatccaccatcacgcgccacacagtggaccagacccgcccaggggccttcgagcgtgagaccgtcatcactatgtctggagatgaccacccacgggccttcgttttggacgagtgccagaacctcatgttctggaccaactggaatgagcagcatcccagcatcatgcgggcggcgctctcgggagccaatgtcctgacccttatcgagaaggacatccgtacccccaatggcctggccatcgaccaccgtgccgagaagctctacttctctgacgccaccctggacaagatcgagcggtgcgagtatgacggctcccaccgctatgtgatcctaaagtcagagcctgtccaccccttcgggctggccgtgtatggggagcacattttctggactgactgggtgcggcgggcagtgcagcgggccaacaagcacgtgggcagcaacatgaagctgctgcgcgtggacatcccccagcagcccatgggcatcatcgccgtggccaacgacaccaacagctgtgaactctctccatgccgaatcaacaacggtggctgccaggacctgtgtctgctcactcaccagggccatgtcaactgctcatgccgagggggccgaatcctccaggatgacctcacctgccgagcggtgaattcctcttgccgagcacaagatgagtttgagtgtgccaatggcgagtgcatcaacttcagcctgacctgcgacggcgtcccccactgcaaggacaagtccgatgagaagccatcctactgcaactcccgccgctgcaagaagactttccggcagtgcagcaatgggcgctgtgtgtccaacatgctgtggtgcaacggggccgacgactgtggggatggctctgacgagatcccttgcaacaagacagcctgtggtgtgggcgagttccgctgccgggacgggacctgcatcgggaactccagccgctgcaaccagtttgtggattgtgaggacgcctcagatgagatgaactgcagtgccaccgactgcagcagctacttccgcctgggcgtgaagggcgtgctcttccagccctgcgagcggacctcactctgctacgcacccagctgggtgtgtgatggcgccaatgactgtggggactacagtgatgagcgcgactgcccaggtgtgaaacgccccagatgccctctgaattacttcgcctgccctagtgggcgctgcatccccatgagctggacgtgtgacaaagaggatgactgtgaacatggcgaggacgagacccactgcaacaagttctgctcagaggcccagtttgagtgccagaaccatcgctgcatctccaagcagtggctgtgtgacggcagcgatgactgtggggatggctcagacgaggctgctcactgtgaaggcaagacgtgcggcccctcctccttctcctgccctggcacccacgtgtgcgtccccgagcgctggctctgtgacggtgacaaagactgtgctgatggtgcagacgagagcatcgcagctggttgcttgtacaacagcacttgtgacgaccgtgagttcatgtgccagaaccgccagtgcatccccaagcacttcgtgtgtgaccacgaccgtgactgtgcagatggctctgatgagtcccccgagtgtgagtacccgacctgcggccccagtgagttccgctgtgccaatgggcgctgtctgagctcccgccagtgggagtgtgatggcgagaatgactgccacgaccagagtgacgaggctcccaagaacccacactgcaccagcccagagcacaagtgcaatgcctcgtcacagttcctgtgcagcagtgggcgctgtgtggctgaggcactgctctgcaacggccaggatgactgtggcgacagctcggacgagcgtggctgccacatcaatgagtgtctcagccgcaagctcagtggctgcagccaggactgtgaggacctcaagatcggcttcaagtgccgctgtcgccctggcttccggctgaaggacgacggccggacgtgtgctgatgtggacgagtgcagcaccaccttcccctgcagccagcgctgcatcaacacccatggcagctataagtgtctgtgtgtggagggctatgcaccccgcggcggcgacccccacagctgcaaggctgtgactgacgaggaaccgtttctgatcttcgccaaccggtactacctgcgcaagctcaacctggacgggtccaactacacgttacttaagcagggcctgaacaacgccgttgccttggattttgactaccgagagcagatgatctactggacagatgtgaccacccagggcagcatgatccgaaggatgcaccttaacgggagcaatgtgcaggtcctacaccgtacaggcctcagcaaccccgatgggctggctgtggactgggtgggtggcaacctgtactggtgcgacaaaggccgggacaccatcgaggtgtccaagctcaatggggcctatcggacggtgctggtcagctctggcctccgtgagcccagggctctggtggtggatgtgcagaatgggtacctgtactggacagactggggtgaccattcactgatcggccgcatcggcatggatgggtccagccgcagcgtcatcgtggacaccaagatcacatggcccaatggcctgacgctggactatgtcactgagcgcatctactgggccgacgcccgcgaggactacattgaatttgccagcctggatggctccaatcgccacgttgtgctgagccaggacatcccgcacatctttgcactgaccctgtttgaggactacgtctactggaccgactgggaaacaaagtccattaaccgagcccacaagaccacgggcaccaacaaaacgctcctcatcagcacgctgcaccggcccatggacctgcatgtcttccatgccctgcgccagccagacgtgcccaatcacccctgcaaggtcaacaatggtggctgcagcaacctgtgcctgctgtcccccgggggagggcacaaatgtgcctgccccaccaacttctacctgggcagcgatgggcgcacctgtgtgtccaactgcacggctagccagtttgtatgcaagaacgacaagtgcatccccttctggtggaagtgtgacaccgaggacgactgcggggaccactcagacgagcccccggactgccctgagttcaagtgccggcccggacagttccagtgctccacaggtatctgcacaaaccctgccttcatctgcgatggcgacaatgactgccaggacaacagtgacgaggccaactgtgacatccacgtctgcttgcccagtcagttcaaatgcaccaacaccaaccgctgtattcccggcatcttccgctgcaatgggcaggacaactgcggagatggggaggatgagagggactgccccgaggtgacctgcgcccccaaccagttccagtgctccattaccaaacggtgcatcccccgggtctgggtctgcgaccgggacaatgactgtgtggatggcagtgatgagcccgccaactgcacccagatgacctgtggtgtggacgagttccgctgcaaggattcgggccgctgcatcccagcgcgttggaagtgtgacggagaggatgactgtggggatggctcggatgagcccaaggaagagtgtgatgaacgcacctgtgagccataccagttccgctgcaagaacaaccgctgcgtgcccggccgctggcagtgcgactacgacaacgattgcggtgacaactccgatgaagagagctgcacccctcggccctgctccgagagtgagttctcctgtgccaacggccgctgcatcgcggggcgctggaaatgcgatggagaccacgactgcgcggacggctcggacgagaaagactgcaccccccgctgtgacatggaccagttccagtgcaagagcggccactgcatccccctgcgctggcgctgtgacgcaaacgccgactgcatggacggcagcgacgaggaggcctgcggcactggcgtgcggacctgccccctggacgagttccagtgcaacaacaccttgtgcaagccgctggcctggaagtgcgatggcgaggatgactgtggggacaactcagatgagaaccccgaggagtgtgcccggttcgtgtgccctcccaaccggcccttccgttgcaagaatgaccgcgtctgtctgtggatcgggcgccaatgcgatggcacggacaactgtggggatgggactgatgaagaggactgtgagccccccacagcccacaccacccactgcaaagacaagaaggagtttctgtgccggaaccagcgctgcctctcctcctccctgcgctgcaacatgttcgatgactgcggggacggctctgacgaggaggactgcagcatcgaccccaagctgaccagctgcgccaccaatgccagcatctgtggggacgaggcacgctgcgtgcgcaccgagaaagcggcctactgtgcctgccgctcgggcttccacaccgtgcccggccagcccggatgccaagacatcaacgagtgcctgcgcttcggcacctgctcccagctctgcaacaacaccaagggcggccacctctgcagctgcgctcggaacttcatgaagacgcacaacacctgcaaggccgaaggctctgagtaccaggtcctgtacatcgctgatgacaatgagatccgcagcctgttccccggccacccccattcggcttacgagcaggcattccagggtgacgagagtgtccgcattgatgctatggatgtccatgtcaaggctggccgtgtctattggaccaactggcacacgggcaccatctcctaccgcagcctgccacctgctgcgcctcctaccacttccaaccgccaccggcgacagattgaccggggtgtcacccacctcaacatttcagggctgaagatgcccagaggcatcgccatcgactgggtggccggaaacgtgtactggaccgactcgggccgagatgtgattgaggtggcgcagatgaagggcgagaaccgcaagacgctcatctcgggcatgattgacgagccccacgccattgtggtggacccactgagggggaccatgtactggtcagactggggcaaccaccccaagattgagacggcagcgatggatgggacgcttcgggagacactggtgcaggacaacattcagtggcccacaggcctggccgtggattatcacaatgagcggctgtactgggcagacgccaagctttcagtcatcggcagcatccggctcaatggcacggaccccattgtggctgctgacagcaaacgaggcctaagtcaccccttcagcatcgacgtctttgaggattacatctatggtgtcacctacatcaataatcgtgtcttcaagatccataagtttggccacagccccttggtcaacctgacagggggcctgagccacgcctctgacgtggtcctttaccatcagcacaagcagcccgaagtgaccaacccatgtgaccgcaagaaatgcgagtggctctgcctgctgagccccagtgggcctgtctgcacctgtcccaatgggaagcggctggacaacggcacatgcgtgcctgtgccctctccaacgccccccccagatgctccccggcctggaacctgtaacctgcagtgcttcaacggtggcagctgtttcctcaatgcacggaggcagcccaagtgccgctgccaaccccgctacacgggtgacaagtgtgaactggaccagtgctgggagcactgtcgcaatgggggcacctgtgctgcctccccctctggcatgcccacgtgccggtgccccacgggcttcacgggccccaaatgcacccagcaggtgtgtgcgggctactgtgccaacaacagcacctgcactgtcaaccagggcaaccagccccagtgccgatgcctacccggcttcctgggcgaccgctgccagtaccggcagtgctctggctactgtgagaactttggcacatgccagatggctgctgatggctcccgacaatgccgctgcactgcctactttgagggatcgaggtgtgaggtgaacaagtgcagccgctgtctcgaaggggcctgtgtggtcaacaagcagagtggggatgtcacctgcaactgcacggatggccgggtggcccccagctgtctgacctgcgtcggccactgcagcaatggcggctcctgtaccatgaacagcaaaatgatgcctgagtgccagtgcccaccccacatgacagggccccggtgtgaggagcacgtcttcagccagcagcagccaggacatatagcctccatcctaatccctctgctgttgctgctgctgctggttctggtggccggagtggtattctggtataagcggcgagtccaaggggctaagggcttccagcaccaacggatgaccaacggggccatgaacgtggagattggaaaccccacctacaagatgtacgaaggcggagagcctgatgatgtgggaggcctactggacgctgactttgccctggaccctgacaagcccaccaacttcaccaaccccgtgtatgccacactctacatggggggccatggcagtcgccactccctggccagcacggacgagaagcgagaactcctgggccggggccctgaggacgagataggggaccccttggcatagggccctgccccgtcggactgcccccagaaagcctcctgccccctgccggtgaagtccttcagtgagcccctccccagccagcccttccctggccccgccggatgtataaatgtaaaaatgaaggaattacattttatatgtgagcgagcaagccggcaagcgagcacagtattatttctccatcccctccctgcctgctccttggcacccccatgctgccttcagggagacaggcagggagggcttggggctgcacctcctaccctcccaccagaacgcaccccactgggagagctggtggtgcagccttcccctccctgtataagacactttgccaaggctctcccctctcgccccatccctgcttgcccgctcccacagcttcctgagggctaattctgggaagggagagttctttgctgcccctgtctggaagacgtggctctgggtgaggtaggcgggaaaggatggagtgttttagttcttgggggaggccaccccaaaccccagccccaactccaggggcacctatgagatggccatgctcaacccccctcccagacaggccctccctgtctccagggcccccaccgaggttcccagggctggagacttcctctggtaaacattcctccagcctcccctcccctggggacgccaaggaggtgggccacacccaggaagggaaagcgggcagccccgttttggggacgtgaacgttttaataatttttgctgaattcctttacaactaaataacacagatattgttataaataaaattgtaaaaaaaaaaaaaaa

SEQ ID NO: 395 - DNA, 979 bp, Homo sapiens
  CDS (151)..(636)
agtgtccctccatcgaaggacgatgtacataactatctattcgatgatgaagataccccaccaaacccaaaaaaagagatctctcgaggatccgaattcgcggccgcgtcgacgcgggtgccgcctctaaagagagcaatcactacacttatggctgggattttgcgcttagtagttcaatggcccccaggcagactacagaccgtgacaaaaggtgtggagtctcttatttgtacagattggattcgtcacaaattcaccagatcaagaattccagaaaaagtgtttcaggcctcacctgaagatcatgaaaaatacggtggggatccacagaaccctcataaactgcatattgttaccagaataaaaagtacaagaagacgtccatattgggaaaaagatataataaagatgcttggattagaaaaagcacatacccctcaagttcacaagaatatcccttcagtgaatgcaaaattgaaagtagttaagcatttgataagaatcaagcccttgaagttgccacaaggacttccaacagaggagaacatgtctaacacgtgcctcaaaagcactggggagttagtagtgcagtggcatctgaaacctgtggagcagaaagcacatgagtcctaatgccccagcagcttccgattggaaaatgcaaattgtttttatttaaagatgatacctggaggggtggggagaagtaagaattgtaagggaggttcagtagtggggaattctgtgacagctgattgaagatgatgatgaagaacctctgcattctagttaccctttgcttcccttcacctcttgtaaaatttggcttggcaacaatgacattgtcatgcttattgtcccaatatccatcctgtcgtagatcttaatgtttttgatcgttgcgttaaagtggaagtgccacccacagtgaaaccagatcccattaataaataagcttaaaggcaaaaaaaaaaaa

SEQ ID NO: 396 - DNA, 1703 bp, Homo sapiens
  CDS (74)..(1387)
ggcccgacgtcgcatgctcccggccgccatggccgcgggatttcccgggtcgacgatttcgtgaaaacacagaatgcccgaagaaaaagactgtggtggcggagatgctctctccaatggcatcaagaaacacagaacaagtttgccttctcctatgttttccagaaatgacttcagtatctggagcatcctcagaaaatgtattggaatggaactatccaagatcacgatgccagttatatttaatgagcctctgagcttcctacagcgcctaactgaatacatggagcatacttacctcatccacaaggccagttcactctctgatcctgtggaaaggatgcagtgtgtagctgcgtttgctgtatctgctgttgcttctcagtgggaacggactggaaaacctttcaacccactgctgggagagacttatgaattagtgcgagatgaccttggatttagactcatctccgaacaggtcagccatcacccaccaatcagtgcatttcatgctgaaggattaaacaatgacttcatctttcatggctctatctatcccaaactgaaattctgggggaagagtgtagaagcagaacccaaaggaaccatcaccttggagctccttgaacacaatgaggcatatacatggacaaatcccacctgctgtgtgcataatatcattgtgggtaaactgtggatcgaacagtatggcaatgtggaaattataaaccacaagactggggacaaatgtgtgttgaattttaagccatgtggcctttttggtaaggaattacacaaagttgaaggctacattcaagataaaagcaaaaagaagctctgtgccctctatgggaagtggactgaatgtttatacagtgttgaccctgccacgtttgacgcttacaaaaaaaatgataagaaaaatacagaagagaagaagaacagcaaacagatgagcacctctgaggagttggatgaaatgccagtgccggattctgaaagtgtattcattatccctggaagcgttcttctatggcgaatagccccacggcctccaaattctgcccagatgtataattttactagttttgcaatggttttgaatgaagtagacaaagacatggagagtgtgattcccaagacagactgcaggttacggcctgacatcagagccatggaaaatggagagatagatcaagctagtgaagaaaaaaaacgacttgaggaaaaacaaagagcagcccgcaaaaacaggtccaagtcagaagaggactggaagacgaggtggttccatcaaggtcctaatccctacaatggagcacaggactggatttactctggcagctactgggacagaaattacttcaatttgcctgacatttattaaaatgcatacaagtcagggtgtttggctaatctacaaataagtcttaaacctatgtttttaaatttttttcccttggtttctacttatcttttaaaaaaaaaaatgaaaaaacactcatgagataactgcatttcacccaacaaaagcagggtataaggcgatattggtgatgaaagtcttaggaaaaatgcataattttgctataaaatgtacttatttggaatactattttatatagaggtaagagaacactgctggggaatatgctttttatgggtggttgttgccctattacttgagggttatacctaaaaga

SEQ ID NO: 397 - DNA, 7819 bp, Homo sapiens
  CDS (1)..(4692)
atgctgggagccccgcccatcagcctggagaacctgcttgcagctgtgtcccttagtcgaatcaagagcaacgtggatgggcggtacctggtggacggcgtccctttcagctgctgcaatcctagctcgccacggccctgcatccagtatcagatcaccaacaactcagcacactacagttacgaccaccagacggaggagctcaacctgtgggtgcgtggctgcagggctgccctgctgagctactacagcagcctcatgaactccatgggtgtcgtcacgctcctcatttggctcttcgaggtgaccattacaattgggctgcgctacctacagacgtcgctggatggtgtgtccaaccccgaggaatctgagagcgagagcgagggctggctgctggagaagagcgtgccggagacctggaaggcctttctggagagtgtgaagaagctgggcaagggcaaccaggtgactgtggctattaacaaaaacatcagctctgaccctttgccaagagcagtggacaatgaatttgagacagttgccactcagctcctaaaaaggacccaagctatgcttaacaaatacagatgcctgctcctagaagatgccatgcgaatcaatccctctgctgagatggtgatgatcgataggatgttcaaccaggaggaaagagcttccctgtcccgagacaagcgtttggcacttgtagaccctgagggttttcaggctgatttctgttgttccttcaaacttgataaagctgctcatgagacacagtttggccggagtgaccagcatggcagtaaagcaagcagctctctgcaaccgccagccaaggcccaaggcagagaccgagccaaaaccggtgtgacggaacccatgaatcatgaccagtttcatctagtgcctaatcacatcgtggtctctgcagaaggaaacatttctaaaaaaacagaatgccttggcagagcactgaaatttgacaaagtgggcttagtgcagtaccagagcacgtctgaagagaaggccagccggagagagcctctgaaggccagtcagtgctctcccggccctgaggggcaccggaaaacctcatccagatcggatcatggtactgagagcaaactgtcaagcatcctagcagattcgcacttggagatgacgtgtaacaattccttccaggacaaaagtctgaggaattctccaaagaatgaagttttacacacagacatcatgaaagggtcaggcgaaccccagccagatctccagctgacaaagagcttggaaaccacatttaagaacatcttggaactcaaaaaggcgggacggcagccccagagtgaccccacggttagcggctctgttgagttagatttccccaacttttctcctatggcttcacaggaaaactgcctggaaaagttcatcccggaccacagtgacgttgtcatggatgatgatgatgactcgtgtctccttgatcttattggagacccacaagcattgaactattttctacatggacctagtaataaatctagcaatgatgacttgactaatgcaggatattctgcagccaattcaaattcaattttcgccaactctagtaatgctgatcctaagtcatccctcaaaggtgtaagcaaccagcttggagaagggcccagtgatggactgccactttcaagtagcctccagtttcttgaagatgaactcgagtcttctcctcttcctgatctcactgaggaccaacctttcgacattcttcagaaatccttgcaagaggccaatatcactgaacagacattggcagaagaggcatatttggatgccagtataggttcaagccaacagtttgcacaagctcagcttcatccttcttcatcagcatcctttactcaggcttctaatgtttctaattactcaggtcagacgctgcagcctataggggtgacgcatgtgcctgttggagcatcgtttgcaagcaatacagtgggtgtacaacatggctttatgcaacatgtggggatcagtgttcccagccagcatttgtctaatagcagtcagattagtggttctggtcaaatacagttaattgggtcatttggtaatcatccttccatgatgactattaataacctagatggatctcaaatcatattaaagggcagcgggcagcaagccccatcaaatgtgagtggagggctcctggttcatagacagactcctaatggcaactccttgtttgggaactctagttccagtccagtagcacagcctgttaccgttccatttaacagcacaaattttcaaacatctttacctgtgcataacatcatcatacaaaggggtcttgcaccaaattcaaataaagtcccaattaatatacagccaaagcctatccagatgggtcagcaaaatacatacaatgtgaacaatttgggaattcagcagcaccacgtacaacaagggatctcttttgcttctgcaagctcaccccagggctcagtagttggtccacacatgtctgtgaacattgtaaaccaacagaacacaagaaagccagtcacctcacaggcagtgagcagcactgggggcagtattgttattcattcccccatgggccaacctcacgcaccccaaagtcagttccttatacctacaagcctttctgtcagttccaactcggtacaccacgtccagactataaatgggcaacttcttcaaactcaaccctctcagctcatttctggccaagtggcctcagagcatgtcatgttgaacagaaactcttccaacatgctcaggaccaaccaaccatatactggaccgatgcttaacaaccagaatactgctgtccacttagtgtctgggcagacatttgctgcctctggaagtccagtgatagccaatcatgcctctcctcagcttgtgggtggacagatgcccttgcagcaggcatccccaactgtattacacctgtcacctgggcagagcagcgtttcccaaggaagacctggcttcgccaccatgccatcggtgacaagcatgtcaggacctagtcggttccctgctgtcagctcagccagcactgcccatcctagtcttgggtctgcagttcagtctggttcatcaggatcaaactttacaggagatcagctgacccagccaaacaggactccagtaccagtcagtgtgtctcatcgtcttccagtttcttcttccaagtctaccagcaccttcagtaacacacctggaacaggaacccagcaacaattcttctgccaggctcagaaaaaatgtctgaatcagacttcccccatttctgctcccaagaccacagacggcctgaggcaagcacagatccctgggctcttgagcaccacactgccagggcaggattctggaagcaaagttatatccgcatccttaggaaccgcacaaccacagcaggaaaaagtagttggatcatctcctggccatccagctgtgcaggtggagagtcattcgggaggacaaaaaaggcctgctgcgaaacagctaacgaaaggagctttcattctccagcagttgcagagggaccaagcccacactgtgacaccagacaaaagtcacttccgatcactaagtgatgcggtacagagactgctctcctaccacgtgtgccagggctccatgcccactgaagaagacttgagaaaagtggacaatgaatttgagacagttgccactcagctcctaaaaaggacccaagctatgcttaacaaatacagatgcctgctcctagaagatgccatgcgaatcaatccctctgctgagatggtgatgatcgataggatgttcaaccaggaggaaagagcttccctgtcccgagacaagcgtttggcacttgtagaccctgagggttttcaggctgatttctgttgttccttcaaacttgataaagctgctcatgagacacagtttggccggagtgaccagcatggcagtaaagcaagcagctctctgcaaccgccagccaaggcccaaggcagagaccgagccaaaaccggtgtgacggaacccatgaatcatgaccagtttcatctagtgcctaatcacatcgtggtctctgcagaaggaaacatttctaaaaaaacagaatgccttggcagagcactgaaatttgacaaagtgggcttagtgcagtaccagagcacgtctgaagagaaggccagccggagagagcctctgaaggccagtcagtgctctcccggccctgaggggcaccggaaaacctcatccagatcggatcatggtactgagagcaaactgtcaagcatcctagcagattcgcacttggagatgacgtgtaacaattccttccaggacaaaagtctgaggaattctccaaagaatgaagttttacacacagacatcatgaaagggtcaggcgaaccccagccagatctccagctgacaaagagcttggaaaccacatttaagaacatcttggaactcaaaaaggcgggacggcagccccagagtgaccccacggttagcggctctgttgagttagatttccccaacttttctcctatggcttcacaggaaaactgcctggaaaagttcatcccggaccacagtgaaggtgttgtagaaactgactccattttagaagcagctgtaaatagtatcctagagtgttaatagcagcagtcctccccctaccccgccccgagaccccaccccgagaccccaccccggaccagttacattcgttcctggcaaaagcaaatggaaatggtctcctgtctccagcctgcttgatctttcatcacaggttattctttctaatctcaatcctgttctttgtttaagagcaatacttgtcgtgattacagggagatcctttagtaaaattaatccttggcagaaagcagtctgataggccccactcatttcaagtgttatgaaagtgcttataggcattttgtttatttgttttgttttttaaaaacactgtaactcaatgagaccacagtatacttggcccttggtaaaattttgacaatcataagtcatttgaaaagaacagacttactaaaatcaaacgagacggatagaagctactttttaaagaatatcccactgcatctgcaaatttagttttgggtttttttattattattattttgagtttttttgtgtgtgttttgttgttattgttgaggggaagaccacatggttcttccccctcagccatctttgagcagtaaattgctggctgtgctgccagggacccgcagccctggtggaaaagccagtagcacatacgcagggcattgcagggcttccctattgatggttcaagtgcttttctgatgcttccggagcaaaacctcatgcttttaggcatatctatgttgaatttcacctagggaatgttctgttcttagttacagcagcaaaatttgaaataatttcaccaggctaaataaaggaaaatggaaaccagttaagaggcacagtgtacagaggaggccgggatagagccatgagggttataatattaatatgtatatatgtaaaagcatatatatgttaactattgagaaaaaacaagttttgcattttataattggatatagtcaacatataatgtatgtttttgtttgttgctggattttgtttcatttaacctctctttgcaccctctcccacaacaaataccaagcatcaaaagcactttcatttgaaaattattatgttgtaatttttcagtttaaactttaaggagactctggccttgtttatgcttcttgtctgagaacagtagtgacccctggcagcaattcattaccaaaacacagacaaaccaaaggtaaccagctagcccaccactgaaaggaaagatctgagacatgggattcccatttgagagccaaaggatatgccctgtcatggtttctgtttggcctgtgttcatattagtgagcatggcttactgcttttttttttttttttttttgtcagggagtattctccgttttcctttctcgtatacctgccccaggttatcccatttctgttgttacctttattcttaatgtcattgtaaccatcacttatctcctctcattgggaaagctacatgatagtatttttatgcactcttctcccacacatacacacacgtgcatgtatctgagctgctcggatccagaggtcatttttgttacagtgtgtgcacactcactctccttcttagtgtgcatactctctcatttattctgtttatctccctggctctggaggtgcagccactggtcttcactttaatgtgttgccagaatctgcttctggctgtcgccaacatggggatgacccccattgtcatcatgttgggcatttcttttccagattggcctgtgatggaaaggaaggcttctaattagaaaacacagcaacagaagacctataccccggtgcccctgtgtcccactacacacagaaaaccctgtgagatggccagtcttcataatagcaacgtaccttcaccccagccacatgccccagccaatacaaattggaaaatctggcccattttagggttaccattttttccttatttgtgccaatgtccaagttgcagatttcccctttttcctgtattgtaacatattagataagttggtgtcgccagttggtactttctgtttgggtagtcctagggtaacaccctgccctaaactccatgatttcataggcttttcttcccttggggctcatgctcccctaattcctagcaagatgatccttcctaatcaaattcttctcattgcagaactttatccctggaagccttcatgtgggctgctagtgagttacattaattactgcaaatcagtggaattctcaagagacaagataagcttcatgtacatttgtcacctctctttcttccctatcctgccctgctgtcccaatcctagcttttctatataccatcttaaagggtttttaagccctaacacttgtctagcaaatggagagcctaatttaccaaaatgaaacttgtaaatttttgtgtcattgtatgtaagtttactttttatggaggaaggattctagataatgacaaatgaagattatgacatgtatttcactcctgtgattaggttctacgcacatgggtcataactcgcatgtcgagccccctctagtgaagggtaggagagctcagcctcggatggccaacattcagttgttcaggttcattcgtcaaagttaagttttagaactatttgtactcagtaacaaaaatcattttctttttttttttttttttctgttgtggaaaagcgtgaatttgttattaagcatttgattttctgtgtccttaagtacttcctgaagatgaagcaaaattttaatctggcaattatgaaaaagaaatattttagctctgaaggatttagtagattctgttagattagggaggccttacagactgactttacttaaagaggacgcgtcactcgctgtcagtgtggtgtgggctttatttgcttaaataccttcatttgtatagtacgtctcacttgaaattgctttgtatacattttgtaaaaatatttataaaatgttttgtaaaaaaaaaaaaaactataacaaattgcagtttattttgttatgttggataaatactgttaaaagaaaccagtcagtaactatattgttaatccatggttaggaaatgtttagttggagattacaaattgaaacaaccattgcaatacagccaaagatttgggaaaaaaaaaaaaaaaaaaaa

SEQ ID NO: 398 - DNA, 2530 bp, Homo sapiens
  CDS (218)..(775)
atttggccctcgaggccaagaattcggcacgaggcaccagctcaggactgcatctgcctgccatttcccttccactcctcctttctggagtctgacattagaaagccagcgagaaggaagattcaaacaaccaaccctgatttcctgcttctccttttcatgagtgttcctgtggtctctgcacctcctttctgtcccccggcagagggcagtagagatggccggcccaaggcctcggtggcgcgaccagctgctgttcatgagcatcatagtcctcgtgattgtggtcatctgcctgatgttatacgctcttctctgggaggctggcaacctcactgacctgcccaacctgagaatcggcttctataacttctgcctgtggaatgaggacaccagcaccctacagtgtcaccagttccctgagctggaagccctgggggtgcctcgggttggcctgggcctggccaggcttggcgtgtacgggtccctggtcctcaccctctttgccccccagcctctcctcctagcccagtgcaacagtgatgagagagcgtggcggctggcagtgggcttcctggctgtgtcctctgtgctgctggccggcggcctgggcctcttcctctcctatgtgtggaagtgggtcaggctctccctcccggggcctgggtttctagctctgggcagcgcccaggccttactcatcctcttgcttatagccatggctgtgttccctctgagggctgagagggctgagagcaagcttgagagctgctaaaggcttacgtgattgcaagggttcagttccaaccatggtcagaggtggcacatctgctcagccatctcattttacagctaacgctgatctccagctccagcgatggaacccactacagaggaggtggggcccctgtgtcaaagaggccgaggggcagcaagggcagccagggcacctgtgacttcttagtacaagattgtctgtccttcaggacttccaaggctcccaaagactccctaaaccatgcagctcattgtcacaccaattcctgctttaattaatggatctgagcaaatcttcctctagcttcaggagggtggggagggagtgattgctgtcatggggccagacttccaggctgatttgccaaatgccaaaatgaaacctagcaaagaacttacggcaacaaacgaggacattaaaagagcgagcacctcagtgtctctggggacatggttaaggagcttccactcagcccaccatagtgagtgggccgccataagccatcactggaactccaaccccagaggtccaggagtgatctctgagtgactcaacaaagacaggacacatggggtacaaagacaaggcttgactgcttcaaagcttccctggacctgaagccagacagggcagaggcgtccgctgacaaatcactcccatgatgagaccctggaggactccaaatcctcgctgtgaacaggactggacggttgcgcacaaacaaacgctgccaccctccacttcccaacccagaacttggaaagacattagcacaacttacgcattggggaattgtgtgtattttctagcacttgtgtattggaaaacctgtatggcagtgatttattcatatattcctgtccaaagccacactgaaaacagaggcagagacatgtactctggtgtgatctcttgtcctcagtgtctcttctgggctcctgtccctcttgctttatagctagctgcccggagaccaaggtacaggtgaaagcaaggtagcagcttgcgggaggaggcctgtctggcttaccagtctatacactgtgggcagctcgtttgctttctaggctggctggagaggtgggagctcattgatagactcatgatggaaactatttttgaaacaggcttcctccttcaggagagatcatgcggactaaactgtagcaattccagtgcacctggcagtgatccttttctttgcaaagtactgtctctttggttccagtaagttggaccaccacatgacatcattttccctggaacctggtcactgactaacacagacaattgggactccagagcctcaagagccaggagagggcacagtacatacagagggagtcaaatgggatctcattttgagtcctgccttccgcacactcagaacggcagccccaaggcccggagtgtccaggggcttctggcctgaggtgaatctgccaggcccaagaaggcacaaaggtaggagcacagagagccccattcccacaggcgggcggcccagcagcaccagtggaagctcagctgtcctccagctgctctcggcagacagttcagtgcacagtttatgccctagctgaaaaagatctcccggacgtatttcaacacatcctcttcctcctcctcctcagtcgacggccgcgaattagtagtagtagtcggccgctctagaggatccaagcttacgtacgcgtgcatgcgacgtcatagctcttctatagtgtcacctaaattcaattcactggccgt

SEQ ID NO: 399 - DNA, 2595 bp, Homo sapiens
  CDS (15)..(1172)
ggtgggatctgaacatggcggcggtggtagctgctacggcgctgaagggccggggggcgagaaatgcccgcgtcctccgggggattctcgcaggagccacagctaacaaggcttctcataacaggacccgggccctgcaaagccacagctccccagagggcaaggaggaacctgaacccctatccccggagctggaatacattcccagaaagaggggcaagaaccccatgaaagctgtgggactggcctggtacagcctgtacacccgcacctggctcgggtacctcttctaccgacagcagctgcgcagggctcggaatcgctaccctaaaggccactcgaaaacccagccccgcctcttcaatggagtgaaggtgcttcccatccctgtcctctcggacaactacagctacctcatcatcgacacccaggcccagctggctgtggctgtggacccttcagaccctcgggctgtgcaggcttccattgaaaaggaaggggtcaccttggtcgccattctgtgtactcacaagcactgggaccacagtggagggaaccgtgacctcagccggcggcaccgggactgtcgggtgtacgggagccctcaggacggcatcccctacctcacccatcccctgtgtcatcaagatgtggtcagcgtgggacggcttcagatccgggccctggctacacctggccacacacaaggccatctggtctacctactggatggggagccctacaagggtccctcctgcctcttctcaggggacctgctcttcctctctggctgtgggcggacctttgagggcaatgcagagaccatgctgagctcactggacactgtgctggggctaggggatgacacccttctgtggcctggtcatgagtatgcagaggagaacctgggctttgcaggtgtggtggagcccgagaacctggcccgggagaggaagatgcagtgggtgcagcggcagcggctggagcgcaagggcacgtgcccatctaccctgggagaggagcgctcctacaacccgttcctgagaacccactgcctggcgctacaggaggctctggggccggggccgggccccactggggatgatgactactcccgggcccagctcctggaagagctccgccggctgaaggatatgcacaagagcaagtgatgcccccagcgcccccagcccagcccactccccgcatggggaggccgccaccaccaacacctcatcatccttctcatcgctaacaccaccaactccatcggcacccaagcgggcatcatccccccacactgctcaggggaggggagggatcaggcgatgagactgtgaggccaaaagaagggggcctgttggaggctgggaaccccgcagcgcgaggctgcctcatcaacggcaagaggaaaggaggggtctcgggacatctccagaccctaccaactgggagggtcccctcctccttccctactcctgggacggcagcaaggacatgggggctgctgttagcttctccgtcaggaggcctcatctcactgtagccctggaacccagggtccatcttgcccttcccccatccatggttgggaaagaagctcagcccctcacagtggcctcaagtgtgatgccttacaaaagcaccactcagatgggcagctggactctggtgtcctgagactctgccctcttcccacagcctccctgccccacccatccctgcaaagccatttttcagacagagccattcctaagaacactgaagggctggaatgctggctggccactctctgcctcagtggcctccctacagcctggaagaaggagggtcctgattgccaaggaaacctctcctcattgggctaaggagacactggagtctggagtgtggagccccacagtcttgcaggtcacatgctctccttgcacatctggcctggttgtacccactggcctctgcctctgccctgggccaaaagggcccctccttgccaggggagagacagccacggtcctctttggccgatgctgtattctcattttggcccttgttcttaggcccgtctgcccgccttcctccatctaacctttcctgttttatccgcagcccttttcttctttgagttagtaaagatttattctgtaacctgacactcatctggccctttgcagtttgccagccatattcccatgtgatttcccactggatccaggcccccatccggctggcaggagggggctctgacgtgcaggttggaaatcagaagtctgtgagagcgcgggagtgcatggcagctctgggtcccagacctggcccgacccctctgcttcacctccagctctgctgctcctctactcttgggtcgagatccctttggagccacagcgaggaaccctgtggtcctcaggcaggtgtaccttgagtcagccaggagccctcttttcctgtgtcaaagcctgccctcgggctctgctcacctctggtgaccctccaagatgcccctgccctcagtttcccctcatgatctggcctctgccccttctctagccacagcctctagtacactttagcaataccaccagactagttaga

SEQ ID NO: 400 - DNA, 1625 bp, Homo sapiens
  CDS (142)..(1479)
taccgcgtccggaattcccgggtcgacgatttcgtggaggggcaaggcgagtgtgtgtccttatcctatcaattggggcgcgggcctgtgagccagttggagttgcggcggcgggaacgattgggctgagcagaggacgacatgttgcttttcgtggagcaggtagcatctaaaggaactggtttaaatcctaatgccaaagtatggcaagaaattgctcctggaaatactgatgccaccccagtaactcatggaactgaaagctcttggcatgaaatagcagctacatcaggtgctcatcctgagggtaatgcagagctctcagaagatatatgtaaagaatatgaagtaatgtattcttcatcttgtgaaaccacaagaaatactacaggcattgaagaatcaactgatgggatgattttaggaccagaagatctgagttaccaaatatatgatgtttccggagaaagcaattcagcagtttctacagaagacctaaaagaatgtctgaagaaacaattagaattctgtttttcacgagaaaatttttcaaaggatctttacttgatatctcaaatggatagtgatcagttcatcccaatttggacagttgccaacatggaagaaataaaaaagttgactacagaccctgatctaattcttgaagtgttaagatcttctcccatggtacaagttgatgagaagggtgagaaagtgagaccaagtcataagcgttgtattgtaattcttagagagattcctgaaacaacaccaatagaggaagtgaaaggtttgttcaaaagtgaaaactgccccaaagtgataagctgtgagtttgcacacaatagcaactggtatatcactttccagtcagacacagatgcacaacaggcttttaaatacttaagagaagaagttaaaacatttcagggcaagccaattatggcaaggataaaagccatcaatacattttttgctaagaatggttatcgattaatggattctagtatctatagtcaccccattcaaactcaagcacagtatgcctccccagtctttatgcagcctgtatataatcctcaccaacagtactcggtctatagtattgtgcctcagtcttggtctccaaatcctacaccttactttgaaacaccactggctccctttcccaatggtagttttgtgaatggctttaattcgccaggatcttataaaacaaatgctgctgctatgaatatgggtcgaccattccaaaaaaatcgtgtgaagcctcagtttaggtcatctggtggttcagaacactcaacagagggctctgtatccttgggggatggacagttgaacagatatagttcaagaaactttccagctgaacggcataaccccacagtaactgggcatcaggagcaaacttaccttcagaaggagacttccactttgcaggtggaacagaatggggactatggtaggggcaggtaagaaaataaagtacctgaaaacctttgataataatgtgatcatcctgaataattgaagaacgtgatcttcataataattaaatgagcatttaattattggtatatggttatattaaataaatacgttattttcagaaaaaaaaaaaa

SEQ ID NO: 401 - DNA, 895 bp, Homo sapiens
  CDS (152)..(724)
actggacgcccgcagtaccggtccgtaattcccgggtcgacccacgcgtccgcccacgcgtccggtcgcgaccctggtccggacctgacctgaattgcgaccccaacctggactgctcccctgaccgcaacccctacccccgcccaccagcatggcccggcacgtgttcctaacggggcccccaggagttggaaaaacaacattgatccataaagccagtgaggttttaaaatcctctggtgtgcctgttgatggattttataccgaagaagtcagacagggagggagaagaataggattcgatgtcgtcacgttgtccggcacccgggggcctttatcgagagttgggttagagcctccacctggaaaacgtgaatgccgagttgggcagtatgtggtcgacctgacttcttttgagcagttggcactacccgtcttgaggaatgccgactgcagcagtggcccagggcaaagagtgtgcgtcatcgatgagattgggaagatggagctcttcagtcagcttttcattcaagctgttcgtcagacgctgtctaccccagggactataatccttggcacaatcccagttcctaaaggaaagccactggctcttgtagaagaaatcagaaacagaaaggatgtgaaggtgtttaatgtcaccaaggaaaacagaaaccaccttctgccagatatcgtgacgtgcgtgcagagcagcaggaagtgaagacacgtgcattcctgccttccgtgaaggagtgcccagttcaagaggagcctgatggagccctgcctgtcgaggctgtatgcctatggggttatggaaccttgtgggcttttctagagaaaactcaacagctgtttcccataaaatgtttaaaagatcaaaaaaaaaaaa

SEQ ID NO: 402 - DNA, 1301 bp, Homo sapiens
  CDS (56)..(1267)
aagctggtacgcctgcaggtaccggtccggaattcccgggtcgacgatttcgtgaatggagccggtaggctgctgcggcgagtgccgcggctcctccgtagacccgcggagcaccttcgtgttgagtaacctggcggaggtggtggagcgtgtgctcaccttcctgcccgccaaggcgttgctgcgggtggcctgcgtgtgccgcttatggagggagtgtgtgcgcagagtattgcggacccatcggagcgtaacctggatctccgcaggcctggcggaggccggccacctggaggggcattgcttggttcgcgtggtagcagaggagcttgagaatgttcgcatcttaccacatacagttctttacatggctgattcagaaactttcattagtctggaagagtgtcgtggccataagagagcaaggaaaagaactagtatggaaacagcacttgcccttgagaagctattccccaaacaatgccaagtccttgggattgtgaccccaggaattgtagtgactccaatgggatcaggtagcaatcgacctcaggaaatagaaattggagaatctggttttgctttattattccctcaaattgaaggaataaaaatacaaccctttcattttattaaggatccaaagaatttaacattagaaagacatcaactcactgaagtaggtcttttagataaccctgaacttcgtgtggtccttgtctttggttataattgctgtaaggtgggagccagtaattatctgcagcaagtagtcagcactttcagtgatatgaatatcatcttggctggaggccaggtggacaacctgtcatcactgacttctgaaaagaaccctctggatattgatgcctcgggtgtggttggactgtcatttagtggacaccgaatccagagtgccactgtgctcctcaacgaggacgtcagtgatgagaagactgctgaggctgcgatgcagcgcctcaaagcggccaacattccagagcataacaccattggcttcatgtttgcatgcgttggcaggggctttcagtattacagagccaaggggaatgttgaggctgatgcatttagaaagttttttcctagtgttcccttattcggcttctttggaaatggagaaattggatgtgatcggatagtcactgggaactttatattgaggaaatgtaatgaggtaaaagatgatgatctgtttcatagctatacaacaataatggcactcatacatctggggtcatctaaataataattaaagtggctttcataataaaaaaaaaaaa

SEQ ID NO: 403 - DNA, 932 bp, Homo sapiens
  CDS (48)..(728)
ccagtgatgggcaattcggacggcagccgaccggggcgtgcggagggatgtggcccggaatattggcagggggggcccgggaggcgtcatgcaggtaccccgcgctggggcctcgcctcgccgctcactttccagcgcagcggccgccgcagcggacactccagaacggcctggccctgcagcggtgcctgcacgcgacggcgacccgggctctcccgctcattcccatcgtggtggagcagacgggtcgcggcgagcgcgcctatgacatctactcgcggctgctgcgggagcgcatcgtgtgcgtcatgggcccgatcgatgacagcgttgccagccttgttatcgcacagctcctcttcctgcttctcgccgccggcaccccaggcatgcgccactcgctccccaactcccgtatcatgatccaccagccctcaggaggcgcccggggccaagccacagacattgccatccaggcagaggagatcatgaagctcaagaagcagctctataacatctacgccaagcacaccaaacagagcctgcaggtgatcgagtccgccatggagagggaccgctacatgagccccatggaggcccaggagtttggcatcttagacaaggttctggtccaccctccccaggacggtgaggatgagcccacgctggtgcagaaggagcctgtagaagcagcgccggcagcagaacctgtcccagctagcacctgagagctgggcctcctctccagaatcatgtggaggggccagaggcctgccagacccccagctgggccctgctcaccccttgttgctgggcttggaggggcctcttgaggaacttttaatttgcaggggtgcccgctatggacggggcattccagctgagacactgtgattttaaattaaatctttgtggtctttaaaaaaaaaaaa

SEQ ID NO: 404 - DNA, 670 bp, Homo sapiens
  CDS (88)..(312)
cgatgaagttgatagtaagtatcttcgagcttcaatacttatcaagttggtccttttctccatcatccgggaaagacattagtgttgatgctgacatccctgtcaaggccaataactaccatggctctcagtgccttggtgtaccctgggatgtgtggccttctggccaagcatctgtcatttcatattgttggagcattccttataaccctggggttgcagctctctgtaagtttgctgtggcctgaccaagaaagaaggcatatgcagatttctacagaaattataattgaattaaagaatttgaggtgaggaaggctaatatctctcagagtacaaagtgattttggaacataaagtatttctttgggttgaattacataaaagtttgtcactgtacctgtgttcctgaactatctgtgaaacatgaatatgtgggctaagaaattgtttatcttaataaataattaacaaaccctttaaacggttaaaaaaaaaaagtcatggtcagtcttttttcatatgtatagacccctaactactaccgttaagcaaattccagacttcataatttgggggaagtaactatcagatttcatctgtactagaatcgtggcaaagtaccattccacctgctctcgtgccgaattcttggcctcgagggccaaat

SEQ ID NO: 405 - DNA, 401 bp, Homo sapiens
  CDS (58)..(390)
cccacgcgtccgggctcctgtggaggcctgctgggaacgggacttctaaaaggaactatgtctggaaggctgtggtccaaggccatttttgctggctataagcggggtctccggaaccaaagggagcacacagctcttcttaaaattgaaggtgtttacgcccgagatgaaacagaattctatttgggcaagagatgcgcttatgtatataaagcaaagaacaacacagtcactcctggcggcaaaccaaacaaaaccagagtcatctggggaaaagtaactcgggcccatggaaacagtggcatggttcgtgccaaattccgaagcaatcttcctgctaaggccattggacacagaatccgagtgatgctgtacccctcaaggatttaaactaacgaagt

SEQ ID NO: 406 - DNA, 5759 bp, Homo sapiens
  CDS (168)..(2885)
tttcgtcaggaatttcccttcaaggtagcaggagatgaacgcgtgctgctccaggattttacagaactgattctgcagcaaagacaaatgttgcctgtatttgccagatagtataaacaggagcaaaagttgcacagctaaaccaggggctcattcccaggacagacatgcagttatggattccgaaagacaagtcaaggacactgatgacattgaaagtcctaaacgcagtatccgagacagtggctacatcgactgctgggattccgagcgcagcgactccctctctcctcctcgccacggcagagatgattccttcgacagcctggattcctttggctctcgctcgtcggcagacgccttcaccagatgtagtcctcaggggaagcagcgatgggagaggaagcgactctgaatccgacttgcctcatcggaagctgccagatgtgaagaaggatgacatgtctgcacggcggacttcccatggtgagccgaaatcagcagtgccttttaaccagtacctcccgaacaaaagcaatcagacggcctacgtccccgcgcctctgagaaagaagaaagcagagagagaggaataccgcaagagctggagtaccgccacctccccgctgggtggggagaggcccttcagatacggtccgagaactcctgtgtctgatgacgcagagagcaccagcatgtttgacatgcggtgtgaggaggaggccgcggtgcagccgcacagcagggcccgccaggagcagctgcagctgataaataaccagctgagggaagaggacgacaaatggcaagatgacctggctcgttggaagagtcgtagaagaagtgtttctcaggacttaatcaagaaagaggaagaaaggaaaaaaatggagaagttactggctggagaagatgggacaagtgaacgaaggaaaagcatcaaaacctacagagaaattgttcaagaaaaagagcggagagagagagagctgcatgaagcatataagaacgctcggtcccaggaggaggcagaggggatccttcaacagtacattgagaggttcaccatcagtgaggctgttctcgaacgcttggagatgccaaaaattctggaaagaagccattcaacagagccaaatttatcctccttcctgaatgaccccaatcccatgaaatacctgcggcaacagtcactgcctccacccaaattcactgccactgttgaaaccaccattgctcgtgccagtgttctggataccagcatgtcagcaggcagtgggtctccaagcaaaactgtcactcccaaagcagtgcctatgctgacacccaagccttactcccagcccaaaaattctcaagatgttctgaagacctttaaggtagacgggaaagtcagtgtgaatggagagacggttcatagagaggaggagaaggaaagagagtgtcccacggtggcacctgcccactccttaaccaaatcccagatgtttgaaggtgtggccagagtgcacgggtctccactggagctgaaacaagacaacggtagcatcgagatcaacataaagaagccaaactctgttccccaagagctcgcagcaaccactgagaaaacggaaccgaatagtcaagaggacaagaatgatggtggaaaatcaagaaaagggaatatagaacttgcctcatcagaaccacagcattttacaacaactgtgactcgatgcagcccgaccgtggcctttgtggaatttccctccagcccccagctgaagaatgatgtgtcggaagaaaaagaccagaagaaaccagaaaatgaaatgagtggaaaggtggagttggtgctgtcacaaaaggtggtaaagccaaaatctccagaacccgaagcaacgctgacatttccatttctggacaaaatgcctgaagccaaccaactacatttgccaaatctcaattctcaagtggattctccaagcagtgagaagtcacctgttacgacaccttttaagttctgggcatgggacccagaagaggagcgcaggcgacaggaaaaatggcaacaggaacaggaacgtttgctccaggagagataccagaaggagcaggacaagctgaaagaagagtgggaaaaggcccaaaaggaggtggaagaggaagaacgcagatactatgaggaggagcgtaagataattgaagacactgtggttccatttactgtttcttcaagttccgctgaccagctgtctacctcttcctccatgactgaaggcagtgggacaatgaataagatagacctgggaaactgtcaagatgaaaaacaagacagaagatggaagaaatcattccagggagatgacagtgacttattgctgaagactagggaaagtgatcgactggaggagaagggcagcctaactgaaggggccttggctcattctgggaaccctgtatcaaaaggagtccatgaagaccatcagctggataccgaggctggggccccacactgtggaacaaacccacagcttgctcaggatccatcccagaatcagcagacatcaaatccaacgcacagttcagaagatgtgaagccaaaaaccctcccgctggataaaagcattaaccatcagatcgagtctcccagtgaaaggcggaagtctataagtggaaagaagctgtgctcttcctgtgggcttcctttgggtaaaggagctgcaatgatcatcgagaccctcaatctctattttcacatccagtgtttcaggtgtggaatttgtaaaggccagcttggagatgcagtgagtgggacggatgttaggattcgaaatggtctcctgaactgtaatgattgctacatgcgatccagaagtgccgggcagcctacaacattgtgacacggctttcaagcttccggatcactcaccatttctttactgagagtgtcccctggcaactgcttaacaaaatcccaagctcaggggcttctcagcatttacctaatttctgaaaggctcttctgaaaggtggtatctgttctttcgtagcacagtgtttatgtttttcctgtttattgttttggttttttttttttttttgcatttgcacagtatacacaaaagaatatggggttgtaatgatcctgaatagctcaaaaaaggttttagcatggtcaaacaggcttatggtttaaaatgtgttattctcttctttgggaattagctaaatgatgcaataaacctgttttgttttagaatgtctaggaattaaacactttatgtttacagaattgagctgcagaaagtgcaagacatgccaatttgagacacacggtcttctaagactgaaggataaatttaatgcatttcagaaactaaacatcacagcaagctctatctctgagctataatttgtttttaatgcaaagacactagtttgataatatatactgtaatcctgaaacatttgtgttacttacctttggaggtagaaattataccaataaattattgcaccgttagtattagattctgtgtaccttggaagttatgtcattaatataggctggttcatcaaataaagcaaaaccttgcaatatcagctagatttacactccgggacgttgcccaaaggtaggaagaaagcagagggaaatatttcagtcatcatttccaaagtcattatcaaaatctgtgaggaagtttaatcttccaaagagtcaatgtcagacatcaggcctctgttgcctgcttctctcgaggcactagattaggagtcttcaataagagacttaacatgaggtatatggaagatgaggcaccgagataagttcatcattaggtgtgagcactgctcacccttgctggcaagttctccttaagggcctgaagcacaggtgtccaaagaaaagcgttaagtccatcttaatagaatctatgtggtatatgatgtggtcagcccctgggtctgtgatcagcaagaacctacagcacagattatgccctgcccacttcaatgaatacctactctcctccattctccatcactttttttgctgtcaagaactccggaccttgcccatggagaagtttagagaggaactcttgtggagagctggtttattttctgcccctgtgcgacgagtttcagctggccaagaaaggagtcaagttattaaaaagcatcacaatgtagatctccaggctggttttttgttttttgttgttaagactggggaaagggggactatttattctgccttaaatcaatggcaaataagtcaagatgacattttgtgaatgtagactatggatacactcctaatagattgatgtagtcataaaagggggtcaagtagatgtttttctgttatgtaagcaataatttttccgtgtcttattgagtatggctagcgattatttattacatgctagatgggttctttgcatgtgggttccatataggtgcagaaatttcctcagccactggagggatttcgaccatatttgtcatttggatgagctgttattagattgaaatctacacatcatttcattaaaaattgtgccttagaaaacgcaaagctgttgcacatggcgataaattatggatgcagtacattgaagagagatgaagtcacttccaagtttccaagacttctcatggaggtgtttgctgttttacaggaaaaaataaaaataaaaaaagaaaaaaagaaaaaattaaaaagaaaaattgttttgaaaatgtacagatcaagtccaatattttgattatccacctgcatgttttattaaatattttgataatgtggatgtttacactttgcatgatattagcagagtaccactagtaatgcacaaacatgtacaatatggtcattcataaccgatttttatagaatactttttacatgtgcaactccatccgttatgtaaggattacatgaatattgcacattcccttctggtttcacaaacccatttatacatatttcttagtgaggctcattgtacatgtattgaagctagaatcgagtcaagaaaaataaagccccattctccaactgcaaaatgtgctttcccataatgaacactagtcaccagcacagaataatctccaacattttctaaattctaattgccaactggtttctatttatatttgatttatatttcatttggagtctgttacatggcagcttaagcagactagatcttgttttttccaatgcagcataatgagtatgatctatttcttttcaaataatctttgagatcccaggaaaaaaaaaatgctctgctccattgagctataatgtaaatgtgtttgtttaaaaaacaggtgaggcaagtgagtgatttattgttcctgaggaagtatatctgattttttttctcatactccaaaagctagtccctactctttaataaaaataatgggtaactttttgtttttcactagcgaacttccatgacatttcctttctatgtagtgtgattaatgcaatacatattatagttatctatacacagtgtaagatttaacaaactgaaatgatccacctcatatgtgagtccgtccaaaagatgttactgctctgggtgggccagtgttctatatcggttatactaactttcatttaaagtatttattctaaaatgcctctgagaaacagtaaaaaataaaaacaacaagttgtctaaaatgcaacagcttttatagtaaatgtacatttataaataaaatactcaaatcaaaaaaaaaaaaaa

SEQ ID NO: 407 - DNA, 671 bp, Homo sapiens
  CDS (279)..(662)
ggaattcccctccacctgctgcggccccgggaacccctcaccttctcagcaagaccccaccgggagcccttttgggggcaccacctccgcttgtgcccgccccccggcccagttccccacctaggggccctggcccagctcgggctgacaggtgaggggaacgggggggggtcggggcaaagctccatctccccttcctttaaccaggtcctagggctgaggttttaagccagggctggagggcaaaggtcataacctcaccagccacctctgaggtcatggaacctgggaacagaagcctcaacccccacaagaccaagcatcacatggagtgtagggtcactgggagagcagaggtcacagcctctagagaagggagaggggcgtgtgcatgggagtgtggctcatctcgggggccatggggcctcctgaggtacacctttgcccctgtaagggcctctaggccctgggcctgcctccccaagggctcactaagccagaggccaaaggtgccccctcccgttcacctaccacccaagtcctcatgccctccgagggctgggggaggaggggctcaaggaaggcgggttccatgtacatatttatcacccctttcacatagccccaagaccttttgtacatttttacaggggtgcccctagcaacaggcg

SEQ ID NO: 408 - DNA, 530 bp, Homo sapiens
  CDS (261)..(350)
taagaactgctgattcctacaggaacacttggacaatccaatacctaaatgttaaccatcaattaacccagtaaacctgcaagatggaaacgaagatttgttctcacgagtttcacgtgattatttaaagtaagggaaatttcagctgtttatagttctgtcttaactttttcctctcttcattcttttcctctcattttttgtagcacttctggggcccagtagccaactggggtcttcccattgctgccatcaatgatatgaaaaagtctccagagattatcagtgggcggatgacatttggtacagcctcggaactggcttctgtttgcatgccacgcaacaaatgaagtagcccagctcatccagggagggcggcttatcaaacacgagatgactaaaacggcatctgcataacaatggaaaaggaagaacacggtcttgaagggacagcattgccagctgctgctgagtcacagatgtcattataaatagcctccctaaggaatatacactgaatgctattcttt

SEQ ID NO: 409 - DNA, 4844 bp, Homo sapiens
  CDS (581)..(4324)
cccgaggctcatttccatgcaaagagcctgacatcagagcaccttttgttgctaaacgctttctttagcctcgagggagagagtcatgtggagctggaagagctcattttgaagagaggggtcccggggagctccctccaagatctagaggctccgcggccacccctgccgggtcctgccaagacttgctagaaggaacgagtcgcgtgccttagttagttggttcccgtcacaggaagaaacgcctttgcagtgggtttaattgcttctgggccgagcgaattccccgccgtacaactcagtggtgcggactttgcctcctgctaccctgttgctgcgccgagcggggtgggaaagtttctggagttgtcagtcgcgcagcccgtggccacctagacccgaggtgcgggcgcctgcgaagggcccccgcggggtggccggggccgccggggcatgcagcgcgggggcgcggctcggtgacgccgcgggcggggacccggcatccgggcaggctgcgcgcgggtgcggggcgagggcgccgcggggactgggacgcacggcccgcgcgcgggacacggccatggaggacgcgggagcagctggcccggggccggagcctgagcccgagcccgagccggagcccgagcccgcgccggagccggaaccggagcccaagccgggtgctggcacatccgaggcgttctcccgactctggaccgacgtgatgggtatcctggacggttcactgggaaacatcgatgacctggcgcagcagtatgcagattattacaacacctgtttctccgacgtgtgcgagaggatggaggagctgcggaaacggcgggtttcccaggacctggaagtggagaaacccgatgctagccccacgtcacttcagctgcggtcccagatcgaagagtcgcttggcttctgtagcgccgtgtcaaccccagaagtggaaagaaagaaccctcttcataaatcaaactcagaagacagctctgtaggaaaaggagactggaagaagaaaaataagtatttctggcagaacttccgaaagaaccagaaaggaataatgagacagacttcaaaaggagaagacgttggttatgttgccagtgaaataacgatgagcgatgaggagcggattcagctaatgatgatggtcaaagaaaagatgatcacaattgaggaagcacttgctaggctcaaggaatacgaggcccagcaccggcagtcggctgccctggaccctgctgactggccagatggttcttacccaacgtttgatggctcatcaaactgcaattcaagagaacaatcggatgatgagactgaggagtcggtgaagtttaagaggttacacaagctggtaaactccactcgcagagtcagaaagaaactaattagggtggaagaaatgaaaaaacccagcactgaaggtggggaggagcacgtgtttgagaattcgccggtcctggatgaacggtccgccctctactctggcgtgcacaagaagccccttttctttgatggctctcctgagaaacctcccgaagatgactcagactctctcaccacgtctccatcctccagcagcctggacacctggggggctggccggaagttggtcaaaaccttcagcaaaggagagagccggggcctgattaagccccccaagaagatggggacattcttctcctacccagaagaagaaaaggcccagaaagtgtcccgctccctcaccgagggggagatgaagaagggtctcgggtccctaagccacgggagaacctgcagttttggaggatttgacttgacgaatcgctctctgcacgttggcagtaataattctgacccaatgggtaaagaaggagactttgtgtacaaagaagtcatcaaatcacctactgcctctcgcatctctcttgggaaaaaggtgaaatcagtgaaagagacgatgagaaagagaatgtctaaaaaatacagcagctctgtctctgagcaggactcgggccttgatggaatgcctggctcccctccgccttcacagcccgaccccgaacacttggacaagcccaagctcaaggccgggggttctgtagaaagtcttcgcagttctctcagtgggcagagctccatgagcggtcaaacagtgagcaccactgattcctcaaccagcaaccgggaaagcgtcaagtcggaagatggggatgacgaagagccgccttaccgaggcccgttctgcgggcgtgccagggtgcacaccgacttcacccccagtccctatgacacagactcactcaagctcaagaaaggagatatcatcgatataatcagcaagccacccatggggacctggatgggcctgctgaacaacaaagtcggcacgttcaagttcatctacgtggacgtgctcagtgaagacgaggagaaacccaaacgccccaccaggaggcgtcggaaaggacgaccaccccagcccaagtctgtggaggatctcctggatcggattaacctaaaagagcacatgcccactttcctgttcaatggatatgaagatttggacacctttaagctgctggaggaggaagacttggatgagttaaatatcagggacccggaacacagagctgttctcttgacagcagtggagctgttacaagagtatgacagtaacagcgaccagtcaggatcccaggagaagctgctcgttgacagccagggcctgagtggatgctcaccccgagactcaggatgctacgaaagcagtgagaacctggaaaacggcaagactcggaaagctagcctcctatctgccaagtcatccaccgagcccagcttgaagtcttttagcagaaaccagttgggcaattacccaacattgcctttaatgaaatcaggggatgcactgaagcagggacaggaggagggcaggctgggtggtggccttgccccagacacgtccaagagctgtgacccacctggtgtgactggtttgaataaaaaccgaagaagcctcccagtttccatctgccggagctgtgagaccctggagggcccccagactgtggacacttggccccgatcccattccctggatgaccttcaagtggagcctggtgctgagcaagacgtgcctaccgaggtgacagaaccgccccctcagattgtacctgaagtgccacagaagacgaccgcctcttccacgaaggcccagcccctggagcgagactctgctgtcgacaatgcattgctactgacccaaagcaagagattttctgaacctcagaaattgacaactaagaaactggagggctcaatcgcagcctctggtcgcggcctgtcaccccctcagtgtttgcccagaaactatgatgctcagcctcctggagctaaacacggtttagcaaggacgcctctggagggccacagaaaaggacacgagtttgaaggaacacaccatcccctgggcaccaaagaaggggtagatgctgagcagagaatgcagcccaaaattccatcacagcctccacctgttcctgccaaaaagagcagagaacgccttgctaacggactccaccctgttcccatgggccccagtggggccctccccagtcccgatgcgccatgcctgccagtgaaaaggggcagccccgccagccccaccagccctagcgactgtcccccagcactggctcccaggcctctctcagggcaggcgcctggcagcccaccaagcacaaggccgcccccctggctctcagagctccccgagaacacaagcctccaggagcacggtgtgaagctgggcccggctttgaccaggaaggtctcctgtgcccggggagtggatctagaaacgctcactgaaaacaagctgcacgctgaaggcatcgatctcacggaggagccgtattctgataagcatggccgctgtgggattcctgaagccctggtgcagagatacgcagaggacttggatcagcccgagcgggacgtcgccgccaacatggaccagatccgggtgaagcagcttcggaagcagcaccgcatggcgattccaagtggtggactcacggaaatctgccgaaagcccgtctctcctgggtgcatttcgtctgtgtcagattggctcatttccatcggtctgcccatgtacgccggcaccctctccaccgcgggcttcagcacactgagccaagtgccttctctgtctcacacttgccttcaggaggccggcatcacagaggagagacacataagaaagctcctatctgcagccagactcttcaaactgccgccaggccctgaggccatgtagccaggcccggaatgggcctctctggacaagagccaccctttcactgtgcatatgatgctgatgcaattcctccatcatctctggacgtgcagaccagatccagaagaaaggcctggcgtgtggccaaacagcgtgaaaccttggcacaggactgaggatcctctcctccagaaaagccccctcgaggaaataaattagtgcggttctctttgacctccaaagacaagacaagcacttatttttattttcagaagacaaaagaaccaagatgccaactggctgcgaatgctctatctccagtctgtctctgtgtactggtagaggctgggaggagtagggggcagcctgttccatttctgatagtgcccttgctcttctgtctgtcatcttgcaggatgcccgagggccagatgggcttagctaggccaaagtaacagactcaagagttattgtacattactgaccacgctcatttgttcaaaagttagaacatctggctgcaccaggaaaaaaaaaaaaa

SEQ ID NO: 410 - DNA, 4922 bp, Homo sapiens
  CDS (166)..(4704)
cgctcttattacgctcactatagggaattttgccctcgagcatgaattcggcacgagggcggcgtcgggtacgcgcacacgttgcatcttcttcctttcgcggggtcctccgtagttctggcacgagccaggcgtactgacaggtggaccagcggactggtggagatggcgacgctctctctgaccgtgaattcaggagaccctccgctaggagctttgctggcagtagaacacgtgaaagacgatgtcagcatttccgttgaagaagggaaagagaatattcttcatgtttctgaaaatgtgatattcacagatgtgaattctatacttcgctacttggctagagttgcaactacagctgggttatatggctctaatctgatggaacatactgagattgatcactggttggagttcagtgctacaaaattatcttcatgtgattcctttacttctacaattaatgaactcaatcattgcctgtctctgagaacatacttagttggaaactccttgagtttagcagatttatgtgtttgggccaccctaaaaggaaatgctgcctggcaagaacagttgaaacagaagaaagctccagttcatgtaaaacgttggtttggctttcttgaagcccagcaggccttccagtcagtaggtaccaagtgggatgtttcaacaaccaaagctcgagtggcacctgagaaaaagcaagatgttgggaaatttgttgagcttccaggtgcggagatgggaaaggttaccgtcagatttcctccagaggccagtggttacttacacattgggcatgcaaaagctgctcttctgaaccagcactaccaggttaactttaaagggaaactgatcatgagatttgatgacacaaatcctgaaaaaaaaaaggaagattttgagaaggttatcttggaagatgttgcaatgttgcatatcaaaccagatcaatttacttatacttcggatcattttgaaactataatgaagtatgcagagaagctaattcaagaagggaaggcttatgtggatgatactcctgctgaacagatgaaagcagaacgtgagcagaggatagaatctaaacatagaaaaaaccctattgagaagaatctacaaatgtgggaagaaatgaaaaaagggagccagtttggtcagtcctgttgtttgcgagcaaaaattgacatgagtagtaacaatggatgcatgagagatccaaccctttatcgctgcaaaattcaaccacatccaagaactggaaataaatacaatgtttatccaacatatgattttgcctgccccatagttgacagcatcgaaggtgttacacatgccctgagaacaacagaataccatgacagagatgagcagttttactggattattgaagctttaggcataagaaaaccatatatttgggaatatagtcggctaaatctcaacaacacagtgctatccaaaagaaaactcacatggtttgtcaatgaaggactagtagatggatgggatgacccaagatttcctacggttcgtggtgtactgagaagagggatgacagttgaaggactgaaacagtttattgctgctcagggctcctcacgttcagtcgtgaacatggagtgggacaaaatctgggcgtttaacaaaaaggttattgacccagtggctccacgatatgttgcattactgaagaaagaagtgatcccagtgaatgtacctgaagctcaggaggagatgaaagaagtagccaaacacccaaagaatcctgaggttggcttgaagcctgtgtggtatagtcccaaagttttcattgaaggtgctgatgcagagactttttcggagggtgagatggttacatttataaattggggcaacctcaacattacaaaaatacacaaaaatgcagatggaaaaatcatatctcttgatgcaaagttgaatttggaaaacaaagactacaagaaaaccactaaggtcacttggcttgcagagactacacatgctcttcctattccagtaatctgtgtcacttatgagcacttgatcacaaagccagtgctaggaaaagacgaggactttaagcagtatgtcaacaagaacagtaagcatgaagagctaatgctaggggatccctgccttaaggatttgaaaaaaggagatattatacaactccagagaagaggattcttcatatgtgatcaaccttatgaacctgttagcccatatagttgcaaggaagccccgtgtgttttgatatacattcctgatgggcacacaaaggaaatgccaacatcagggtcaaaggaaaagaccaaagtagaagccacaaaaaatgagacctctgctccttttaaggaaagaccaacaccttctctgaataataattgtactacatctgaggattccttggtcctttacaatagagtggctgttcaaggagatgtggttcgtgaattaaaagccaagaaagcaccaaaggaagatgtagatgcagctgtaaaacagcttttgtctttgaaagctgaatataaggagaaaactggccaggaatataaacctggaaaccctcctgctgaaataggacagaatatttcttctaattcctcagcaagtattctggaaagtaaatctctgtatgatgaagttgctgcacaaggggaggtggttcgtaagctaaaagctgaaaaatcccctaaggctaaaataaatgaagctgtagaatgcttactgtccctgaaggctcagtataaagaaaaaactgggaaggagtacatacctggtcagcccccattatctcaaagttcggattcaagcccaaccagaaattctgaacctgctggtttagaaacaccagaagcgaaagtactttttgacaaagtagcttctcaaggggaagtagttcggaaacttaaaactgaaaaagcccctaaggatcaagtagatatagctgttcaagaactccttcagctaaaggcacagtacaagtctttgataggagtagagtataagcctgtgtcggccactggagctgaggacaaagataagaagaagaaaaaaaaaaaaaaaaaatctgaaaagcagaataagcctcagaaacaaaatgatggccaaaggaaagacccttctaaaaaccaaggaggtgggctctcatcaagtggagcaggagaagggcaggggcctaagaaacagaccaggttgggtcttgaggcaaaaaaagaagaaaatcttgctgattggtattctcaggtcatcacaaagtcagaaatgattgaataccatgacataagtggctgttatattcttcgtccctgggcctatgccatttgggaagccatcaaggacttttttgatgctgagatcaagaaacttggtgttgaaaactgctacttccccatgtttgtgtctcaaagtgcattagagaaagagaagactcatgttgctgactttgccccagaggttgcttgggttacaagatctggcaaaaccgagctggcagaaccaattgccattcgtcctactagtgaaacagtaatgtatcctgcatatgcaaaatgggtacagtcacacagagacctgcccatcaagctcaatcagtggtgcaatgtggtgcgttgggaattcaagcatcctcagcctttcctacgtactcgtgaatttctttggcaggaagggcacagtgcttttgctaccatggaagaggcagcggaagaggtcttgcagatacttgacttatatgctcaggtatatgaagaactcctggcaattcctgttgttaaaggaagaaagacggaaaaggaaaaatttgcaggaggagactatacaactacaatagaagcatttatatctgctagtggaagagctatccagggaggaacatcacatcatttagggcagaatttttccaaaatgtttgaaatcgtttttgaagatccaaagataccaggagagaagcaatttgcctatcaaaactcctggggcctgacaactcgaactattggtgttatgaccatggttcatggggacaacatgggtttagtattaccaccccgtgtagcatgtgttcaggtggtgattattccttgtggcattaccaatgcactttctgaagaagacaaagaagcgctgattgcaaaatgcaatgattatcgaaggcgattactcagtgttaacatccgcgttagagctgatttacgagataattattctccaggttggaaattcaatcactgggagctcaagggagttcccattagacttgaagttgggccacgtgatatgaagagctgtcagtttgtagccgtcagacgagatactggagaaaagctgacagttgctgaaaatgaggcagagactaaacttcaagctattttggaagacatccaggtcacccttttcacaagggcttctgaagaccttaagactcatatggttgtggctaatacaatggaagactttcagaagatactagattctggaaagattgttcagattccattctgtggggaaattgactgtgaggactggatcaaaaagaccactgccagggatcaagatcttgaacctggtgctccatccatgggagctaaaagcctttgcatccccttcaaaccactctgtgaactgcagcctggagccaaatgtgtctgtggcaagaaccctgccaagtactacaccttatttggtcgcagctactgagggatgaacgaaagccccctcttcaactcctctcactttttaaagcattgatattagtatcttctcagatacagaccgttttatgattttttaaaaagtaaaagttctaaaatgaagtcacacaggacaattattcttatgcctaagttaacagtggataaaagacttttctgtaaacaactccagtaataaatatcatgaactaaaaaaaaaaaaaa

SEQ ID NO: 411 - DNA, 4021 bp, Homo sapiens
  CDS (275)..(2512)
ggttcggaatatccccatctattcgaggaagaagatcccccaccaaacccaaaaaaagagagctctcgaggattcgaattcgcggccgcgtcgacgttaggacgaaggggaaggaggagaagcgcttaaagcggcgggagcggtgcgggagaggggttggacccagggctgaggcaggcccccccctccctcccgcctcagtggatcatgcccagggcggcagcggcggcggttgcgggggggaagtgactgggcggtgccggcgccggagacgatgccgtttccagttacaacacagggatcacaacaaacacaaccgccacagaagcactatggcattacttctcctatcagcttagcagcccccaaggagactgactgcgtacttacacagaaactaattgagacattgaaaccctttggggtttttgaagaggaagaggaactgcagcgcaggattttaattttgggaaaactaaataacctggtaaaagagtggatacgagaaatcagtgaaagcaagaatcttccacaatctgtaattgaaaatgttggaggaaaaatttttacatttggatcttacagattaggagtgcatacaaaaggtgctgatattgatgcgttgtgtgttgcaccaagacatgttgatcgaagtgactttttcacctcattctatgataagttgaaattacaggaagaagtaaaagatttaagagctgttgaagaggcattcgtaccagttattaaactctgttttgatgggatagagattgatattttgtttgcaagattagcactgcagacaattcctgaagatttggatctacgagatgacagtctgctaaaaaatttagatataagatgtataagaagtcttaacggttgcagggtaaccgatgaaattttacatctagtaccaaacattgacaacttcaggttaactctgagagctatcaaactatgggccaaacgccacaacatctattccaatatattaggtttcctcggtggtgtttcctgggctatgctagtagcaagaacttgccagctttatccaaatgcaatagcatcaactcttgtacataaatttttcttggtattttctaaatgggaatggccaaatccagtgctattgaaacagcctgaagaatgcaatcttaatttgcctgtatgggacccaagggtaaaccccagtgataggtaccatcttatgcctataattacaccagcatacccacaacagaactccacgtacaatgtgtccgtttcaacacggatggtcatggttgaggagtttaaacaaggtcttgctatcacagatgaaattttgctgagtaaggcagagtggtccaaactttttgaagctccaaacttctttcaaaagtacaagcattatattgtacttctagcaagtgcaccaacagaaaaacaacgcctggaatgggtgggcttggtggaatcaaaaatccgaatcctggttggaagcttggagaagaatgaatttattacactggctcatgtgaatccccagtcatttccagcacccaaagaaaatcccgacaaggaagaatttcgcacgatgtgggtgattgggttagtgtttaaaaaaacagaaaactctgaaaacctcagtgttgatctcacctatgatattcagtctttcacagatacagtttataggcaagcaataaacagcaagatgtttgaggtggatatgaaaattgctgcaatgcatgtaaaaagaaagcaactccatcaactactacctaatcatgtgcttcagaaaaaaaaaaagcattcaacagaaggtgtcaaattgacagctctcaatgacagcagcctcgacttgtctatggacagtgataacagcatgtctgtgccttcacctactagtgctacgaagaccagtccattgaacagttctggcagctctcagggcagaaacagtcctgctccagctgtaacagcagcatctgtgaccaacatacaggctactgaagtttctgtgccacaagtaaattccagtgaaagctcagggggtacatcgagtgaaagcattcctcaaactgccacacaaccagccatttctccaccaccaaagcctacggtctccagagttgtttcttcaacacgtctggtaaacccaccacctagatcttcaggaaatgcagcaacttcaggaaatgcagcaacaaaaatacctactcctatagtaggagtcaagaggacatcctcacctcataaagaagagagtcccaagaaaaccaaaacagaagaggatgaaacaagtgaagatgctaactgtcttgctttgagtggacatgataaaacagaagcaaaggaacaacttgatacagagacaagtacaactcaatcagaaactattcagacagcggcttctctgttggcctctcagaaaacatccagtacagacctttctgatatccctgctctccctgcaaatcctattcctgttatcaagaattcaataaaactgagattgaatcggtaaaaacaacctcaggggtccataaacaatatctgccaactcaacctgttgtcttcaaatgctaaaaaaggagaatggagggtacaagactagacatgactgaaatggatttgggttttttggtgacctcccttactgggctaatcagcacttgatcggaagtccaggttagtatgtgaagccaggagtactattattattgtgttagcaacagttgcattaactatttcaaaaattactgcctttaaaaaaaacaacctcaagctatatttgtattcataattgacatctggattgggtttatgtttgatgcattgtttggaaaatttgcaatacaaactggcataagaattacttattctgatgatgcacttttatgtatttttcattagaaagtagaactaattttagattttcagcttgatggattttcagtttttcctgaagaattttctttaccattagtcttcaaattggatactgttgtgcagtggtgtactgttatacttcagagaaagggtaagagtacatctagttcagttcctatgaggtagctgtaacccttaaaaatgaaacgtcaactctagggtacatttgacattgaaagaatagttaggaaataacttggttttgatagggtcatgattaagaaatgatatattggttttatttatggaattgttttatagtgcatacaaatcagcgatcagccagcaaatatttttctttgagcttgtgaaagctctgtgttcttttgccttcaatctgttgtcttcaaaacaaacaaacaaaaaaagcttcttgcgcctttccctcccctgttttcttcctttttctttttgcttgtatgcacaaggtaggacttacttcgtaagaaacaaaatgccagtattttcttaagccatgatgtgaaaccaatgaccctgtgaccacatggcacagaacactaaattttggtcccatggctgaaacttgagggtgactaaaagtaatgcctgtgaaacatgatatctatctgggatggccatttgatctctaaaaggaattttgtacactccacagaactcctatctatagtaaaattgattttcagttttaaatgtgggcaaaaaggcattttctccaagattttaaaactaattcttatttttaaatggtttaccaaaatttgtcagtacattttacgtgtagaagcattttaaaaatcatttctagcaagcacttgacatctagtcagctctctactcctttattttgttttatcaaaagattaagagctcctttctttgaataaaataatttctcataattaagcagtagaagatctatcttcacaaagtatgagggatgccagatgttgataaacttactctttctgaatctggacaaagtcgacttaacagatttttctgatgagcatgttttatgaatcctccattgtgctccattctatcacatgtgcatttttcatgttaaactgcaattacttaatctcttcccctatccttctaa

SEQ ID NO: 412 - DNA, 3667 bp, Homo sapiens
  CDS (101)..(3127)
ccggaattcccgggtcgacccacgcgtccggacccacgcgtccgcccggacgccatttccagcggttgctggttctgacgggttgtagtctgccaggacaatgagttatgactaccatcagaactggggccgtgatgggggtccccgcagctccggtgggggctatggaggggggccagcagggggtcatggaggtaaccgaggctccggaggaggcggcggcggcggagggggtggtcgaggcggcaggggccggcatcccgggcacctgaaaggccgcgaaatcggcatgtggtacgcgaaaaaacaggggcagaagaacaaggaagcggagaggcaagagagagctgtagtacacatggatgaacgacgagaagaacaaattgtacagttactgaattctgttcaagcgaagaatgataaagagtcagaagcacagatatcctggtttgctcctgaggatcatggatacggtactgaagtttctactaagaacacaccatgctcagagaacaaacttgacatccaggaaaagaagttgataaatcaagaaaaaaaaatgtttagaatcaggaacagatcatatattgaccgagattctgagtatctcttgcaagaaaatgaaccagatggaactttagaccaaaaattattggaagatttacaaaagaaaaaaaatgaccttcggtatattgaaatgcagcatttcagagaaaagctgccttcgtatggaatgcaaaaggaattggtaaatttaattgataaccatcaggtaacagtaataagtggtgaaactggttgtggcaaaaccactcaagttactcagttcattttggataactacattgaaagaggaaaaggatctgcttgcagaatagtttgtactcagccaagaagaattagtgccatttcagttgcggaaagagtagctgcagaaagggcagaatcttgtggcagtggtaatagtactggatatcaaattcgtctccagagtcggttgccaaggaaacagggttctatcttatactgtacaacaggaatcatccttcagtggctccagtcagacccgtatttgtccagtgttagtcatatcgtacttgatgaaatccatgaaagaaatctgcagtcagatgttttaatgactgttgttaaagaccttctcaattttcgatctgacttgaaagtaatattgatgagtgcaacattgaatgcagaaaagttttcagaatattttggtaactgtccaatgatacatatacctggttttacctttccggttgtggaatatcttttggaagatgtaattgaaaaaataaggtatgttccagaacaaaaagaacacagatcccagtttaagaggggtttcatgcaagggcatgtaaatagacaaaaaaaaaaaaaaaaagaagcaatatataaagaacgttggccagattatgtaagggaactgcgaagaaggtattctgcaagtactgtagatgttatagaaatgatggaggatgataaagttgatctgaatttgattgttgccctcatccgatacattgttttggaagaagaggatggtgcgatactggtctttctgccaggctgggacaatatcagcactttacatgatctcttgatgtcacaagtaatgtttaaatcagataaatttttaattatacctttacattcactgatgcctacagttaaccagacacaggtgtttaaaagaacccctcctggtgttcggaaaatagtaattgctaccaacattgcggagactagcattaccatagatgatgtcgtttatgtgatagatggaggaaaaataaaagagacgcattttgatactcagaacaatatcagtacaatgtccgctgagtgggttagtaaagctaatgccaaacagagaaaaggtcgagctggaagagttcaacctggtcattgctatcatctgtataatggtcttagagcaagtcttctagatgactatcaactgccagaaattttgagaactcctttggaagaactttgtttacaaataaagattttaaggctaggtggaattgcttattttctgagtagattaatggacccaccatcaaatgaggcagtgttactctccataagacacctgatggagctgaacgctttggataaacaagaagaattgacacctcttggagtccacttggcacgattacccgttgagccacatattggaaaaatgattctttttggagcactgttctgctgcttagacccagtactcactattgctgctagtctcagtttcaaagatccatttgtcattccactgggaaaagaaaagattgcagatgcaagaagaaaggaattggcaaaggatactagaagtgatcacttaacagttgtgaatgcgtttgagggctgggaagaggctaggcgacgtggtttcagatacgaaaaggactattgctgggaatattttctgtcttcaaacacactgcagatgctgcataacatgaaaggacagtttgctgagcatcttcttggagctggatttgtaagcagtagaaatcctaaagatccagaatctaatataaattcagataatgagaagataattaaagctgtcatctgtgctggtttatatcccaaagttgctaaaattcgactaaatttgggtaaaaaaagaaaaatggtaaaagtttacacaaaaaccgatggcctggttgctgttcatcctaaatctgttaatgtggagcaaacagactttcactacaactggcttatctatcacctaaagatgagaacaagcagtatatacttgtatgactgcacagaggtttccccatactgtctcttgttttttggaggtgacatttccatccagaaggataacgatcaggaaactattgctgtagatgagtggattgtatttcagtctccagcaagaattgcccatcttgttaaggaattaagaaaggaactagatattcttctgcaagagaagattgaaagtcctcatcctgtagactggaatgacactaaatccagagactgtgcagtactgtcagctattatagacttgatcaaaacacaggaaaaggcaactcccaggaactttccgccacgattccaggatggatattacagctgacagcttttcaggggtggtctgaaaagccagtttgacagccattcttcatcattgtttaaattttggctggatgccaaaccctgggacatgaacaattttcatgtgtaaggtagaagccttcagtaggtagtaaagacttaatgtgcatgacttgatgttatatgtagagatatatatatatatatatatataccataaaagcaatatgttctctgatcatatactctgctgtggtcatgcccactctttgggagtatattccctttatatatattgagtattgtaccacttgagaaattcctttgttctgttatacaaaattaatctttctgctcataatgattgatgataccaccagtaaaaataggatgtttaccccaaaacaagtgtcaattaagaatttgaacacaaccacattttttaaaatgaaacttctatcggaagtaaattaatttgttgtaataaagtccagtatttaataaaatgtacaatgttaaatctcaaaaaaaaaaaaaaaaaaaaaaactcggcgcaagctta

SEQ ID NO: 413 - DNA, 1047 bp, Homo sapiens
  CDS (308)..(454)
aagcttaaaccgacaaaacacggtcagtgccaagctaaaattaactcctcactaaagggaataagcttgcggccgcatatctttttttttttttttttttttaagtatttatatttttattccactctaacacctcagagtaaagaactgatgggcaggcatcggcttctgctgacaattgccaaccggcatgagattgctgagctgaggtggactctccagacactggaactggaactccaggcccaatggcctctggtaagaatgctgcaacgtgagacccttgagagagactgacttgttgaagatgaagagaaaaccaagagcctccagtccagttgttgaagagcaaccacgagccaacaccaaggagacaaggaagaagaagtccttctctcaaccgatgaccgcaagcacaaagaagagtcccaagatagcgaagaaaggaaaataactcaagggagagccaggaagaaaaatgctccacaaaaatccatggctttaagaatacttgaggaagggagcaggccaacaccctctggccacagtgaccagctgaatgaggaactctaacagaatgagctgcagttggagcaacagaggggacatagctggaacaacagagcgaggggacacagccggagcaacagagtgggaggatgccaaccatttcaactctctccctgagcagcgagtaatttcagggcaagcccagagactaggatccatctgagaagtcttcagaggtctgacccagagtactcaacaacaggatacgtcccatggtgatgaaaataaaatgaatcttgtgttcaccgttgtattcctcacgacttaagttaaaaacctgatgaaaagtggttaatctccataatgggtgttagctccatcgcagggagcatgaggttggacagacagagtcgggcaaggttatggagaagacttaatccatccacaagaggtccgagtatgttgatgaagtgatgacagtactgtttcaagaacatcaaccctgccgcagtgcggacgcgtgggtcgacccgggaa

SEQ ID NO: 414 - DNA, 1386 bp, Homo sapiens
  CDS (89)..(838)
atttggccctcgaggccaagaattcggcacgagtgaggcgtttactgatgcttcctggtccggtggcctcggtcccggtaagccaggcatgaagatcacaaggcagaaacatgccaagaagcatcttggcttcttccgcaacaacttcggagtccgcgagccgtaccagatcctgctggacggcaccttctgtcaggcggcgctgcggggccgcatccagctgcgggagcagctgccccgctacctcatgggggagacgcagctgtgcaccacaagatgtgtgttaaaagagctagaaacattgggaaaggacttatatggggcaaaactgattgcacaaaaatgccaagttcgaaattgtcctcatttcaagaatgcagtgagtggatcagaatgtctgctttccatggttgaagagggaaatcctcatcattattttgtggcaacacaggatcagaatttgtctgtgaaagtaaaaaagaagcctggagttcctctcatgtttattattcagaacactatggttttggacaaaccttctcccaaaacaattgcctttgtaaaagcagtggagtcaggtcagcttgtctcagtgcatgagaaagaaagtatcaaacatctcaaagaggaacagggtttagtgaaaaacactgaacagagtagaagaaaaaagcgcaagaaaataagtggtcccaatcctcttagttgtttgaagaaaaagaaaaaggcaccggacacacaatcatctgcttctgaaaagaaaagaaaaagaaaaagaattcggaacagatctaacccaaaagtactttctgagaagcagaatgcagaaggagaatgaatcctttggatactttcaaggacattcaaatgtgaaaatgaattttttacaactagaagtatttataataaaagaccaaacttatttttgtaaatgaacccatatgctttactaaaattaattataaaataaaaacagtgaccagtctagccagcatggaaaaccccatctctactaaaatacaaaaattagctgggcatgatggtgcacagttgtaattccagctactcaggaggctgaggcatgagaatcgcttgaacctgggaggcagagattgcagtgagcccagttcgtgtcacttcactccagcctgggcaacagagtgagaacatgtctcaaaaaaaaaaataaaaacagtgaatgggtgtaggtgtgatggaattcactttacttactaaatggtttcgggaggttgtttctccaggtaaaattgtcgcctctctggtcccattcccaccttcaaacattatatgcaaacagttttaaaaaatcttacagttctaaaagggcttgtgacaaaaaagaggcagtcctctttcacattgaca

SEQ ID NO: 415 - DNA, 1503 bp, Homo sapiens
  CDS (125)..(1474)
attgaacgcctgcggtaccggtccggaattcccgggtcgacccacgcgtccgggcggctgtatctggagcagtcggggcgggcaggcccagctgagaggtgcgcgggcgaggacagcggcagcgatgcgggaatgcatatcagtccacgtgggccaagcgggagttcagattggcaatgcctgctgggagctcttctgcctggaacacggcatccaggcagacggcacttttgatgctcaagctagcaagatcaacgatgatgactccttcaccacctttttcagcgagactggcaatgggaagcatgtgccccgggccgtcatgatagatctggagcctactgtagtggatgaggttcgggcaggaacctaccgccagctcttccatccagagcagctgatcacaggaaaggaggatgcagccaacaactatgcccggggccactacacggtgggcaaggagagcattgacctggtgctggaccgcatacggaagctgacagatgcttgctctggcctgcagggcttcctgattttccacagttttggtgggggcactggctccggcttcacttctctgctgatggaacgcctctccctggattatggcaagaaatccaagctggagtttgccatctacccagccccccaggtctctactgcagtggtggagccctacaactccatcctgaccacccacaccacactggaacattcagattgtgctttcatggtggacaacgaagccatctatgacatctgccgcaggaaccttgacattgagcgccctacctataccaacctcaaccgcctcatcagtcagattgtgtcctcaatcactgcttctctccgctttgacggggccctcaatgtggacctcactgagttccagaccaacctggtgccctacccccgcatccacttcccgctggtcacctacgcgcccatcatctctgccgagaaagcctatcacgaacagctctctgtggccgagataaccagctcctgctttgagcccaacagccagatggtgaagtgcgacccgagacatggcaagtacatggcctgctgcatgctctaccggggcgacgtggtgcccaaggatgtgaatgtcgctattgctgccatcaagaccaagaggaccatccagtttgtagactggtgtcccacaggcttcaaggtgggcatcaactaccagcccccgaccgtggtccccgggggagacctggccaaggtgcagcgggccgtctgcatgctcagcaacaccacggccattgcggaggcctgggcccgcctcgaccacaagttcgacctcatgtacgccaagcgggcctttgtgcattggtatgtgggagaggggatggaagaaggagaattttctgaggccagggaagacttagctgccctggagaaggattatgaagaagtggggactgattcgtttgaagaagaaaatgaaggggaggaattttaaatatataccttccccttgaaaaaaaaaat

SEQ ID NO: 416 - DNA, 5376 bp, Homo sapiens
  CDS (109)..(2679)
ttactaccaatttacatatcgactcactatataggaatttggccctggaagccacagaattcggcacgagctggaattcacgttccttcagaagatattcctgaaactatggacgaagattcttcgttgagagattatactgtaagcttggactctgacatggatgatgcatctaaatttcttcaggattatgatattcgaactggcaacaccagggaagctttgagtccttgtccaagtactgtaagtaccaagtctcagccaggcagcagtgcttcttctagttctggagttaaaatgaccagctttgctgaacaaaaattcaggaaactgaatcataccgatggaaaaagtagtggaagcagttctcaaaaaactacaccagaaggctctgaacttaatattcctcatgtggttgcttgggcacaaattccagaagaaacagggcttccacagggacgggacactacccagctgttggcctctgaaatggtgcatcttaggatgaaactagaagaaaagaggcgtgctatagaagcccagaaaaagaaaatggaagctgcttttaccaaacagagacagaaaatgggaaggacagcattccttactgtagtgaaaaagaaaggggatgggatatctcctctacgagaggaagcggcgggtgcagaagatgagaaagtatatactgatcgagcaaaagaaaaggaatcacaaaaaactgatggacaaaggagcaagtcactggcagatataaaagagagcatggagaatcctcaagccaaatggctaaagtctccaactacacctattgatcctgagaagcagtggaacctggcaagcccctcagaagaaactttaaatgaaggagagattttagaatataccaaatccattgaaaagttaaattcatccctgcattttctacaacaagaaatgcaacgcttgtcacttcagcaggagatgttaatgcagatgagagagcaacaatcttgggtgatttcacctccacaaccctctccacagaaacagattcgagattttaagccttctaagcaggcaggcctgtcatcagccattgcaccattctcctcagactcccctcgtcctactcacccatctccacagtcttctaacaggaaaagtgcatctttttctgttaaaagtcaaaggactcctaggccaaatgagttaaaaataacacctttgaatcgaaccttgacacctcctcggtctgtggatagccttcctcggttaaggaggttttcaccaagtcaagttcctattcaaactaggtcatttgtatgttttggggatgatggagaacctcagttaaaggaatccaaacctaaagaggaagttaaaaaggaggaattggaatccaaagggactttggaacagcgtggacataatccagaagaaaaggaaatcaaaccttttgagtcaacagtctctgaagtcctatcactgcctgtcacagagactgtatgtctgacaccaaatgaggaccaattgaatcaacccacagaaccccctcctaaacccgttttcccacccactgctccaaaaaatgttaatctgattgaagtttccctctcagatttgaaaccccctgaaaaggctgatgtacctgttgaaaaatatgatggagaaagtgataaagaacaatttgatgatgaccagaaagtatgctgtggattcttttttaaggatgatcaaaaagcagaaaatgatatggcaatgaaacgggcagctttgttggagaaaagattaagaagggaaaaggaaactcagctccggaaacaacagttggaagcagaaatggagcataagaaggaggaaacaaggcgtaaaactgaggaagaacgtcagaagaaagaagatgagagagcacgcagagaatttattaggcaagaatatatgaggcggaaacaactgaaactaatggaagatatggatacagtaattaaaccccgtcctcaagtagtaaaacaaaaaaaacagcgaccaaaatctattcacagagatcatattgaatcccccaaaacaccaataaagggtcctccagtctctagcctttctttggcatcgctgaacacgggtgataacgagagtgtacattcaggcaagaggacgccaagatcagagtctgtagaaggcttcttatctccaagtcgttgtggcagtcgaaatggagaaaaagactgggagaatgcatcaacaacttcttcagtggcttctggaacagaatatacaggaccaaagctctacaaagaacccagtgcaaaatccaataagcacataatacaaaatgctttagctcattgctgtttggctggaaaagtaaatgaaggtcagaagaaaaaaatactggaggaaatggagaaatcagatgccaacaacttcttaatcttgttccgggattcaggatgccagttcagatctttatacacttattgcccagaaactgaagaaatcaataaactgactgggataggccctaaatctatcactaaaaaaatgattgaaggactttacaaatataattctgacaggaaacagtttagccacatacccgctaaaactttatctgccagtgttgatgcaattaccattcatagccatttatggcagaccaaaagaccagtaacacccaaaaaacttttacccactaaggcatagaagttgggaaatacttgcttcagaacattcatggtaaatttgcacttcatctttcctgcctatagaaaatctttctaattgccaacaagacttttattaattaaaactggacattaagctctgttgtcatgaacaactggaatgtaaaccacagtattttggagtgcagaacattctcaattaagtgataagtccaaatgatgaaggaaatgttttaattcacaaatggagatttgtatgtgttatcaggttcacctgcttgatattagatacattaaagcactgaattttcatggatattagttggatttatcattgaaatatggttaagattacaaattatgtgttttatttgttgcttttttttaaccttttaatgtatattcttgtcttcagatggtttgctatttttctctcctgggggtttattctaagatacctttgtattttatttcatgtggagatcatgaaagtaggaaatatacctttagaagtaactcgcacctttcttatgatgttaagagaaacactagtgtttagttttacagtaaccctcatattttaatggtgttacagcatttgcaaaaattattctgctaagtatttacaactctatttattattcactcaagtattaacattctctattaaataagaggaggtgttgtaaagagctgctagtaggttcgctttaaaccacatgagcttaaccaagaatatgttatgagaagttgctgattaaatcagtgctgtttttacaccacttctggccaactcagaataatttagattgttcttttaacaaaaaaggctttctatctcttttaaagtaagtcactttataagttggcagaagtgaatgacactttgagagtagtctttcaatctgaagatgtaagacttcctgaaacaagttctcaagaagtctttacattatatttataactcatataaaaattatatttagaatttttaaacatgtacaaagggctacattttaattttaaaatagcttcacattattttacttatattgggtttttcttcattttaatccttttcaagtggaatggcttagaataagtatacacttgaaatctcctctacatgatctttgttctttaacagtgtataccagagggttagttggggaaaaacttcattctcaggaaaagacttgaatgattatgtgaccctgttatatttcagtgttgtgacaaatgtgtaaactagcgggggaagacagtattgtatcataaatgagatgcgtagtttgttttctttcatgggaagtagagataaaaatatatacatttctctaattgagttgtttagagaaagaactaatgtctcatatgatgtatttacttattttaaaaaaaagaataggaatgagatgtccctgagctgtacttttctattattataaggcctttaggcatcagtgcatctgggttatcaacattttctcaaatgctgtcaatattttactgtaatttatgttcttatatttatgtatatttgttaaaactgtaaaaaaatttcacagatttttttccaatacctgtgcaagatacatgtgtagctcaaaactatttgtgatctactgtttgcatgtaagagaccaggatatgtaactcttatattttaagtgtatacatattgtgtatataacatatggatattaaaaatggggaattgcacattttaccttttggacagtaatttctatcacagttagaaggaaatgatagtcaaatacacgtttagattaaaactagtttaaaaaattataaatgaatctaatcaaaatgtgaatagtagtcaaaaggataatttaataagcattttacgttactaaatttgttcatttcaatattaactaaatttccctcatcaaagcaatctttgtgatattacttcgctattaaataaagaaaattggatgcaagacaatggagaaactttaaaactaaacaggaccaccctttattcttaaatttgtgtgtgtccaacagttgaattgaatgtctataaggtctaaaggtagaatgtgaatattgccacagagttcattgctctcagtataagattttactttattaatgcagaaggaatatggatatatttctttaagtctgcagatttttttattatggtgcagcttttttttaattatgtttttaaaattatacagttgaaaaatatgccatttcataaagtctgaggattttcgtcaaccttactgaaacacactggtgctttcatcatcagaggtcaaattattatgataactattccattaagtttgccaaacatttgtcgtggttaccagtgcagcctgtcaaattctgctatttgacacagctttggaaagatttagttcttggtttttccgttttgtattagaatgactgttacagttttatttggctgtttaaagccaaattcagctatttaattatggtttcatggacactgttgagcaatgtacagtgtatggtgtgcttacctgtccactctagagcattgcttacaggttttttgttttttaagatgctgtgctgtaaaatactgtcatacttgctatttcctggtacagtgtagtttttcccctttcatttgaataaaagcatggcaccaaatgactccttttctgtttcttgaataaaatgtagtttttggtaaaattatttg

SEQ ID NO: 417 - DNA, 1180 bp, Homo sapiens
  CDS (196)..(1077)
ccactttgtacaagaaagctgggtacgcgtaagcttgggcccctcgaggtttactctagagcggccgcgggcttgggggcttcgccggggccgggcggccggcgcccccggctgctcccgccgccgcccggacccgcgccccgccggggcagcggtggtgagagccccgactccccggacgccgcccgccgtgccatggggttcccggccgcggcgctgctctgcgcgctgtgctgcggcctcctggccccggctgcccgcgccggctactccgaggagcgctgcagctggaggggcagcggcctcacccaggagcccggcagcgtggggcagctggccctggcctgtgcggagggcgcggttgagtggctgtacccggctggggcgctgcgcctgaccctgggcggccccgatcccagagcgcggcccggcatcgcctgtctgcggccggtgcggcccttcgcgggcgcccaggtcttcgcggagcgcgcagggggcgccctggagctgctgctggctgagggcccgggcccggcagggggccgctgcgtgcgctggggtccccgcgagcgccgggccctcttcctgcaggccacgccgcaccaggacatcagccgccgcgtggccgccttccgctttgagctgcgcgaggacgggcgccccgagctgcccccgcaggcccacggtctcggcgtagacggtgcctgcaggccctgcagcgacgctgagctgctcctggccgcatgcaccagcgacttcgtaattcacgggatcatccatggggtcacccatgacgtggagctgcaggagtctgtcatcactgtggtggccgcccgtgtcctccgccagacaccgccgctgttccaggcggggcgatccggggaccaggggctgacctccattcgtaccccactgcgctgtggcgtccacccgggcccaggcaccttcctcttcatgggctggagccgctttggggaggcccggctgggctgtgccccacgattccaggagttccgccgtgcctacgaggctgcccgtgctgcccacctccacccctgcgaggtggcgctgcactgaggggctgggtgctggggaggggctggtaggagggagggtgggcccactgctttggaggtgatgggactatcaataagaactctgttcacgcaaaaaaaaaaaa

SEQ ID NO: 418 - DNA, 1540 bp, Homo sapiens
  CDS (210)..(1322)
  misc_feature (1)...(1540): n = a,t,c or g
aggttccccccnntttgacgactgagagcatgatgatataactatctattcgatgatgaagataccccaccaaacccaaaaaaagagatctctcgaggatccgaattcgcggccgcgtcgaccgacacgaccatcatttgtcgacgccgctgccaccgcctgcctgagagaagtcgtcgcggccgaccccgtcgcctccgccggctaccatgtccgcccaggcgcagatgcgggccctgctggaccagctcatgggcacggctcgggacgacgaaaccagacagagggtcaagtttacagatgaccgtgtctgcaagagtcaccttctggactgctgcccccatgacatcctggctgggacgcgcatggatttaggagaatgtaccaaaatccacgacttggccctccgagcagattatgagattgcaagtaaagaaagagacctgttttttgaattagatgcaatggatcacttggagtcctttattgctgaatgtgatcggagaactgagctcgccaagaagcggctggcagaaacacaggaggaaatcagtgcggaagtttctgcaaaggcagaaaaagtacatgagttaaatgaagaaataggaaaactccttgctaaagccgaacagctaggggctgaaggtaatgtggatgaatcccagaagattcttatggaagtggaaaaagttcgtgcgaagaaaaaagaagctgaggaagaatacagaaattccatgcctgcatccagttttcagcagcaaaagctgcgtgtctgcgaggtctgttcagcctaccttggtctccatgacaatgaccgtcgcctggcagaccacttcggtggcaagttacacttggggttcattcagatccgagagaagcttgatcagttgaggaaaactgtcgctgaaaagcaggagaagagaaatcaggatcgcttgaggaggagagaggagagggaacgggaggagcgtctgagcaggaggtcgggatcaagaaccagagatcgcaggaggtcacgctcccgggatcggcgtcggaggcggtcaagatctacctcccgagagcgacggaaattgtcccggtcccggtcccgagatagacatcggcgccaccgcagccgttcccggagccacagccggggacatcgtcgggcttcccgggaccgaagtgcgaaatacaagttctccagagagcgggcatccagagaggagtcctgggagagcgggcggagcgagcgagggcccccggactggaggcttgagagctccaacgggaagatggcttcacggaggtcagaagagaaggaggccggcgagatctgaacccgtctcccgggtgctgtaaatagtctgataaacgttcacacagtctaaaattaccctttatatttgctgaatacaactcatcttttgtagtttaaaatttctattgttttggagctagctgtgagtttctagaagtgtacagagttgctcctgtgttcccgggtcatgttgagtaggaataaataaatctgatgctgcctcctgaaaaaaaaaaa

SEQ ID NO: 419 - DNA, 1363 bp, Homo sapiens
  CDS (210)..(1145)
  misc_feature (1)...(1363): n = a,t,c or g
aggttccccccnntttgacgactgagagcatgatgatataactatctattcgatgatgaagataccccaccaaacccaaaaaaagagatctctcgaggatccgaattcgcggccgcgtcgaccgacacgaccatcatttgtcgacgccgctgccaccgcctgcctgagagaagtcgtcgcggccgaccccgtcgcctccgccggctaccatgtccgcccaggcgcagatgcgggccctgctggaccagctcatgggcacggctcgggacgacgaaaccagacagagggtcaagtttacagatgaccgtgtctgcaagagtcaccttctggactgctgcccccatgacatcctggctgggacgcgcatggatttaggagaatgtaccaaaatccacgacttggccctccgagcagattatgagattgcaagtaaagaaagagacctgttttttgaattagatgcaatggatcacttggagtcctttattgctgaatgtgatcggagaactgagctcgccaagaagcggctggcagaaacacaggaggaaatcagtgcggaagtttctgcaaaggcagaaaaagtacatgagttaaatgaagaaataggaaaactccttgctaaagccgaacagctaggggctgaaggtaatgtggatgaatcccagaagattcttatggaagtggaaaaagttcgtgcgaagaaaaaagaagctgagaaaactgtcgctgaaaagcaggagaagagaaatcaggatcgcttgaggaggagagaggagagggaacgggaggagcgtctgagcaggaggtcgggatcaagaaccagagatcgcaggaggtcacgctcccgggatcggcgtcggaggcggtcaagatctacctcccgagagcgacggaaattgtcccggtcccggtcccgagatagacatcggcgccaccgcagccgttcccggagccacagccggggacatcgtcgggcttcccgggaccgaagtgcgaaatacaagttctccagagagcgggcatccagagaggagtcctgggagagcgggcggagcgagcgagggcccccggactggaggcttgagagctccaacgggaagatggcttcacggaggtcagaagagaaggaggccggcgagatctgaacccgtctcccgggtgctgtaaatagtctgataaacgttcacacagtctaaaattaccctttatatttgctgaatacaactcatcttttgtagtttaaaatttctattgttttggagctagctgtgagtttctagaagtgtacagagttgctcctgtgttcccgggtcatgttgagtaggaataaataaatctgatgctgcctcctgaaaaaaaaaaa

SEQ ID NO: 420 - DNA, 3552 bp, Homo sapiens
  CDS (30)..(3218)
aatcacctccatctgtccagagtttggctatgaggctactgagtatgccaggagcccagggagctgcagcagcagggtctgaaccccctccagccaccacgagcccagagggacagcccaaggtccaccgagcccgcaaaaccatgtccaaaccaggaaatggacagcccccggtccctgagaagcggccccctgaaatacagcatttccgcatgagtgatgatgtccactcactgggaaaggtgacctcagatctggccaaaaggaggaagctgaactcaggaggtggcctgtcggaggagttaggttctgcccggcgttcaggagaagtgaccctgacgaaaggggaccccgggtccctggaggagtgggagacggtggtgggtgatgacttcagtctctactatgattcctactctgtggatgagcgcgtggactccgacagcaagtctgaagttgaagctctaactgaacaactaagtgaagaggaggaggaggaagaggaggaagaagaagaagaggaagaggaggaggaagaggaagaagaagaggaagatgaggagtcagggaatcagtcagataggagtggttccagtggccggcgcaaggccaagaagaaatggcgaaaagacagcccatgggtgaagccgtctcggaaacggcgcaagcgggagcctccgcgggccaaggagccacgaggagtgaatggtgtgggctcctcaggccccagtgagtacatggaggtccctctggggtccctggagctgcccagcgaggggaccctctcccccaaccacgctggggtgtccaatgacacatcttcgctggagacagagcgagggtttgaggagttgcccctgtgcagctgccgcatggaggcacccaagattgaccgcatcagcgagagggcggggcacaagtgcatggccactgagagtgtggacggagagctgtcaggctgcaatgccgccatcctcaagcgggagaccatgaggccatccagccgtgtggccctgatggtgctctgtgagacccaccgcgcccgcatggtcaaacaccactgctgcccgggctgcggctacttctgcacggcgggcaccttcctggagtgccaccctgacttccgtgtggcccaccgcttccacaaggcctgtgtgtctcagctgaatgggatggtcttctgtccccactgtggggaggatgcttctgaagctcaagaggtgaccatcccccggggtgacggggtgaccccaccggccggcactgcagctcctgcacccccacccctgtcccaggatgtccccgggagagcagacacttctcagcccagtgcccggatgcgagggcatggggaaccccggcgcccgccctgcgatcccctggctgacaccattgacagctcagggccctccctgaccctgcccaatgggggctgcctttcagccgtggggctgccactggggccaggccgggaggccctggaaaaggccctggtcatccaggagtcagagaggcggaagaagctccgtttccaccctcggcagttgtacctgtccgtgaagcagggcgagctgcagaaggtgatcctgatgctgttggacaacctggaccccaacttccagagcgaccagcagagcaagcgcacgcccctgcatgcagccgcccagaagggctccgtggagatctgccatgtgctgctgcaggctggagccaacataaatgcagtggacaaacagcagcggacgccactgatggaggccgtggtgaacaaccacctggaggtagcccgttacatggtgcagcgtggtggctgtgtctatagcaaggaggaggacggttccacctgcctccaccacgcagccaaaatcgggaacttggagatggtcagcctgctgctgagcacaggacaggtggacgtcaacgcccaggacagtggggggtggacgcccatcatctgggctgcagagcacaagcacatcgaggtgatccgcatgctactgacgcggggcgccgacgtcaccctcactgacaacgaggagaacatctgcctgcactgggcctccttcacgggcagcgccgccatcgccgaagtccttctgaatgcgcgctgtgacctccatgctgtcaactaccatggggacacccccctgcacatcgcagctcgggagagctaccatgactgcgtgctgttattcctgtcacgtggggccaaccctgagctgcggaacaaagagggggacacagcatgggacctgactcccgagcgctccgacgtgtggtttgcgcttcaactcaaccgcaagctccgacttggggtgggaaatcgggccatccgcacagagaagatcatctgccgggacgtggctcggggctatgagaacgtgcccattccctgtgtcaacggtgtggatggggagccctgccctgaggattacaagtacatctcagagaactgcgagacgtccaccatgaacatcgatcgcaacatcacccacctgcagcactgcacgtgtgtggacgactgctctagctccaactgcctgtgcggccagctcagcatccggtgctggtatgacaaggatgggcgattgctccaggaatttaacaagattgagcctccgctgattttcgagtgtaaccaggcgtgctcatgctggagaaactgcaagaaccgggtcgtacagagtggcatcaaggtgcggctacagctctaccgaacagccaagatgggctggggggtccgcgccctgcagaccatcccacaggggaccttcatctgcgagtatgtcggggagctgatctctgatgctgaggctgatgtgagagaggatgattcttacctcttcgacttagacaacaaggatggagaggtgtactgcatagatgcccgttactatggcaacatcagccgcctcctctgccacctgtgtgaccccaacatcattcccgtccgggtcttcatgctgcaccaagacctgcgatttccacgcatcgccttcttcagttcccgagacatccggactggggaggagctagggtttgactatggcgaccgcttctgggacatcaaaagcaaatatttcacctgccaatgtggctctgagaagtgcaagcactcagccgaagccattgccctggagcagagccgtctggcccgcctggacccacaccctgagctgctgcccgagctcggctccctgccccctgtcaacacatgagaacggaccacaccctctctccccagcatggatggccacagctcagccgcctcctctgccaccagctgctcgcagcccatgcctgggggtgctgccatcttctctccccaccaccctttcacacattcctgaccagagatcccagccaggccctggaggtctgacagcccctccctcccagagctggttcctccctgggagggcaacttcagggctggccaccccccgtgttccccatcctcagttgaagtttgatgaattgaagtcgggcctctatgccaactggttccttttgttctcaataaatgttgggtttggtaataaaaaaaaaaaa

SEQ ID NO: 421 - DNA, 1925 bp, Homo sapiens
  CDS (510)..(1562)
  misc_feature (1)...(1925): n = a,t,c or g
atttggccctcgaggccaagaattcggcacgaggggagccgcacggtcccctctccttccccatcctctcccctcccctctccgggttcccccacccacaggagccttgggccgaccactcccccgatggcctcagccacggaggaccccgttctggagcgttatttcaaaggccacaaagctgcgatcacctccttggacctcagccccaacggcaagcaacttgctactgcttcttgggatacctttctcatgctatggaatttcaagccacatgctagagcttacagatatgtgggtcacaaggatgttgtaaccagcgtgcagttttctccacatggaaacttattggcgtctgcctcacgagacagaaccgtgagactctggattcctgataagagaggaaaattctcagaatttaaagctcatacagctccagttcgaagtgtagacttttcagctgatggccagtttctagctacagcttctgaagacaaatccataaaagtatggagcatgtatcgccagcgcttcctgtattccttgtatcgacatacacactgggtacgctgtgcccaatttcacccgatggaagactaattgtgtcatgtagtgaggataaaactattaaaatttgggataccacaaataagcaatgtgttaataacttctcagattccgttggatttgcaaattttgtggactttaaccctagtggtacatgcatagcttcagcaggttctgatcaaactgtgaaagtctgggatgtaagagtgaacaaattactacagcattaccaagttcacagcggtggagttaattgcatatcattccatccttcgggtaactatctcatcacagcttcttcagatggtacccttaagattctggacctcttagaaggaaggctcatctatacacttcaaggacatacgggacctgtctttactgtttcattttcaaaaggtggagagctatttgcatcaggaggtgcagacacacaggtcttattatggaggactaactttgatgaattgcattgtaaaggtcttaccaaaagaaatctcaaaagattacattttgattcaccaccacatcttcttgatatctacccaagaacaccacatccccatgaggaaaaagttgagactgtagaaattaatccaaagcttgaggtaatcgatttgcagatctctactccccctgttatggatatcctttcttttgattctaccacaacaacagaaaccagtggtaggactctgccagacaagggtgaagaggcctgtggatatttcttgaacccttccttaatgtcaccagaatgtttgccaacaaccacgaaaaagaaaacagaagacatgagtgacctcccctgtgaaagtcaaaggagcatacctctcgctgtgactgatgctttagagcatattatggaacaactcaatgttttgacacagactgtttcaatcttggagcagcgactgactttgacagaggataagctgaaagactgccttgaaaatcagcaaaagcttttcagtgctgtccaacagaaaagctgaataaaaaattcattttcatttgttgggcagaggcccaataaatgaacaaatgtacatacactcaggaaggtagtacaagatactccatacaacacaaccatgtgctatttatcatggcatttcttaaaagggtgagcaacagaacaaaaggcagaaaaggcatacctaaggactaatttaaacacatatcaatgtgaaggactaatttaaattactatcatttatgattgcagtaataaagtgataagcattcaagcaactctgtattttccccatattaatttaaatgtccattntcatttataggccanatcctgccaagaaaagaacccagatctctggatttcactgttaagtcattta

SEQ ID NO: 422 - DNA, 956 bp, Homo sapiens
  CDS (484)..(837)
agaggggggccccttcccggccgggttttaggccttgggaaaggatttcggggccccctcgctccccgggaagcgttttggccccacccggaatggtgtcatctggttaagaagcgcaagtggcgctttggagaaaccaaccaagaccccgggggggggttgggccccaatcctaattacccttctgtccccaacttccagttagccaaaatataaagaaggcaaatcctgtactgttggcaaaaacagccacccaaaagttgttaaaaagcaaaacaaaacacctcaagcttaaatttttgaaaaacaatcctcacacaaagatactatcaacaaatcacacaccaatttatcttagaaggatcaagagatgaaaaacagcaaaggatattttcgtaatatgctagaatctttgaatataatactgaagttggcaaccaaaagcaattcagaagttcaacttagaactaatggctgtatccgatggcactgtctattttagatattaaaatgtcaccatcttggtattttcacatggctataggcattataaactggaacactactgcgggtttatctggcactctgtatccaaaagtcccccaaaagtacatactctttgactctgtaattctgcttctaggcatgttaagaaaaatacgtcaggtatgccaaaatgtatacatgaaagggtgttcaccaataacattatttaaaatagttcactactggccaggcgcagtagctcatgcctataatcctagcactttgggaggccaagttgggggcaaatcacctgaggtcaggagttcgagaccagcctggactacatggtgaaaccccatctctactaaaagaacaaaaattaggtcgacgcggccgcgaattcggatcctcgagagatctctttttttgggtttggtggggtatcttcatcgtcgaatcgttagttatat

SEQ ID NO: 423 - DNA, 1615 bp, Homo sapiens
  CDS (215)..(1507)
agttcggaattcccggcacgacccacgcgatcgcggacgcgtgggccggaatgttacctatgatgaagcaggtggaccccgtgaggctgtcagcaaacttcaagaattatgtcatctatggctgaagccagagatccactcaaaagagcagatactggaactgctggtgctggagcagttcctgactattctgcccagggagacacagacccagatgcagaagcaccatccacagagcattgaggaggctgtggctctggtagaacacttgcagagggaatctggtcaaacatggaatggggttgcagtccatgagctgggaaaggaggcagtgctcttgggagaaacagcagaggcctcaagtttcgggctgaagccaacagagtcccaaccagtgggcgtatcccaagatgaagaattttggaatacatacgagggtctgcaagaacagctcagcaggaatactcataaagagactgagcctgtgtatgagagggctgtgcctactcaacagattctagcttttcctgagcaaacaaacaccaaagactggacagtgacacctgagcacgtcttgcctgagtcccagagcttgttgacatttgaagaagtggccatgtatttttcccaggaagaatgggagttattggatcccactcagaaggccctctacaatgatgtaatgcaggaaaactatgagactgtcatctctctagcattgtttgtgctccccaaacctaaagtgatctcctgtctagagcaaggggaagagccatgggttcaagtatccccggagtttaaggatagtgccggaaaatctcctacagggttaaagctcaaaaacgacactgaaaatcatcagcctgcgtctctttctgacttagaaatacaagcatcagcaggcgtcatatcaaaaaaggccaaagtaaaagttccccagaaaacagcaggcaaagaaaatcattttgatatgcacagagtgggaaaatggcaccaagattttccagtgaagaaaagaaagaaactttcaacctggaaacaagagctgctcaaacttatggatcgtcacaagaaagattgtgcaagagagaagccttttaaatgtcaggaatgtgggaaaaccttcagagttagctctgaccttattaagcaccaaagaattcacactgaagagaaaccctataaatgtcaacagtgtgataagaggtttagatggagttcagatcttaataagcacttaacaacacaccaaggaataaaaccatataaatgttcatggtgtgggaaaagcttcagtcaaaatacaaatttacatacacaccaaagaactcatacaggagaaaagcccttcacatgtcatgaatgtggaaaaaaattcagtcagaactcccaccttattaaacaccggagaacccacacaggtgagcagccatatacttgtagcatatgcaggagaaacttcagcaggcggtcaagccttcttagacaccagaaactccacctgtgaagagaagcttgtccagtgtcctcattctgaagacattcaccaaatggagcttggcactaaaatttatgtaaagaaaaatcacaaacctttgaaaattttacatcagaa

SEQ ID NO: 424 - DNA, 2531 bp, Homo sapiens
  CDS (221)..(2314)
aatttccggttcgacgatcccgtcccctggcggagccggcgcgcccggggtgccgctccctgcctggcgcgctccgcacctggaggtgccttgcccctctcctgcccacctcggaatttccctgtggctcctttgatccttcgagtctccagctcctctcccttccacctgtttcccccaagaaaggcaggatcctggtccctgctacgtttctggggccatggctggtctgggccccggcgtaggcgattcagaggggggaccccggcccctgttttgcagaaagggggctctgaggcagaaggtggtccacgaagtcaagagccacaagttcaccgctcgcttcttcaagcagcccaccttctgcagccactgcaccgacttcatctggggtatcggaaagcagggcctgcaatgtcaagtctgcagctttgtggttcatcgacgatgccacgaatttgtgaccttcgagtgtccaggcgctgggaagggcccccagacggacgacccccggaacaaacacaagttccgcctgcatagctacagcagccccaccttctgcgaccactgtggctccctcctctacgggcttgtgcaccagggcatgaaatgctcctgctgcgagatgaacgtgcaccggcgctgtgtgcgtagcgtgccctccctgtgcggtgtggaccacaccgagcgccgcgggcgcctgcagctggagatccgggctcccacagcagatgagatccacgtaactgttggcgaggcccgtaacctaattcctatggaccccaatggtctctctgatccctatgtgaaactgaagctcatcccagaccctcggaacctgacgaaacagaagacccgaacggtgaaagccacgctaaaccctgtgtggaatgagacctttgtgttcaacctgaagccaggggatgtggagcgccggctcagcgtggaggtgtgggactgggaccggacctcccgcaacgacttcatgggggccatgtcctttggcgtctcggagctgctcaaggcgcccgtggatggctggtacaagttactgaaccaggaggagggcgagtattacaatgtgccggtggccgatgctgacaactgcagcctcctccagaagtttgaggcttgtaactaccccctggaattgtatgagcgggtgcggatgggcccctcttcctctcccatcccctccccttcccctagtcccaccgaccccaagcgctgcttcttcggggcgagtccaggacgcctgcacatctccgacttcagcttcctcatggttctaggaaaaggcagttttgggaaggtgatgctggccgagcgcaggggctctgatgagctctacgccatcaagatcttgaaaaaggacgtgatcgtccaggacgacgatgtggactgcacgctggtggagaaacgtgtgctggcgctggggggccggggtcctggcggccggccccacttcctcacccagctccactccaccttccagaccccggaccgcctgtatttcgtgatggagtacgtcaccgggggagacttgatgtaccacattcaacagctgggcaagtttaaggagccccatgcagcgttctacgcggcagaaatcgctatcggcctcttcttccttcacaatcagggcatcatctacagggacctgaagctggacaatgtgatgctggatgctgagggacacatcaagatcactgactttggcatgtgtaaggagaacgtcttccccgggacgacaacccgcaccttctgcgggaccccggactacatagccccggagatcattgcctaccagccctatgggaagtctgtcgattggtggtcctttggagttctgctgtatgagatgttggcaggacagcctcccttcgatggggaggacgaggaggagctgtttcaggccatcatggaacaaactgtcacctaccccaagtcgctttcccgggaagccgtggccatctgcaaggggttcctgaccaagcacccagggaagcgcctgggctcagggcctgatggggaacctaccatccgtgcacatggctttttccgctggattgactgggagcggctggaacgattggagatcccgcctcctttcagaccccgcccgtgtggccgcagcggcgagaactttgacaagttcttcacgcgggcggcgccagcgctgacccctccagaccgcctagtcctggccagcatcgaccaggccgatttccagggcttcacctacgtgaaccccgacttcgtgcacccggatgcccgcagccccaccagcccagtgcctgtgcccgtcatgtaatctcaaccgccgccactaggtgtccccaacgtcccctccgccgtgccggcggcagccccacttcacccccaacttcaccaccccctgtcccattctagatcctgcaccccagcattccagctctgcccccgcgggttctagacgcccctcccaagcgttcctggccttctgaactccatacagcctctacagccgtcccgcgttcaagacttgagcg

SEQ ID NO: 425 - DNA, 5359 bp, Homo sapiens
  CDS (4556)..(4729)
tttattgaacatttattctgttcaaaacattcccaaaggcaacagaagatacaaataaatctctgcccatgaaaaggtgtggggggcattagaaggcgttctcttcggtgtaatgaagtaatgagagaagaaaaagtagtttgaagctatggagtaagggactttgagtatcccaggctcaaaaagttgggacttgaacagtacgggggtgctgctgaaaacgtttgagggaggtaatgacatgatcgaagctatacttgagaaaggtgaatctgataaagtatgagtgaaaaagagactgaaggtctagaaattagattgaggctaatgacaaaatccacataaataggaggacttgaacgaaggggcacttagaagaggacaggagatagtaaaaggcattcaatgatgagagcacacactacaggggagcatgagggaggttggaaaagataatgaaaggattaccgagcttcactgacgatgtgtttgaaatgagcaggaatcttgtagtgatcctaatccgtggttttctggagcatttcacagcctaggaacatacaaggggggcatctccctggaatgtaaattgactaagaggaattcaataatggtcaaatgaatgcagaattttagagtcttgcttagtattctcaccacatttcgtttaatctactcatactctttttctcttactgctgacactagatggaaaaactcttaattaaaagtatttcacaaaatgtgctcgttttcagtcattccgtttccactccagcctgttgtgttgtttttttgaaataataatttaaagtaattttccttttgcaggatggcatagtcaatccaacaataagaaaagatttgaaaactggaccgaaattctactgctgtccaattgaaggctgccccagaggccctgagagaccgttttctcagttttctctcgtaaaacagcactttatgaaaatgcatgctgagaagaagcacaaatgtagtaagtgcagcaattcgtacggtacagaatgggacctgaaaagacatgcagaggactgtggcaagaccttccggtgcacatgcggctgtccctacgccagtagaacagcactgcagtctcacatctaccgaactgggcacgagatacctgcagaacacagggacccacctagtaagaaaaggaaaatggaaaactgtgcacaaaaccagaagttatccaacaagaccattgaatcattgaacaaccaaccaatccctagaccagacactcaagaactagaagcttcagaaataaagctagaaccatcttttgaagactcttgtggctctaacactgacaagcagactcttacaacaccaccgagatatcctcagaagttgcttttaccaaagcccaaagtggctttggttaaactacccgtgatgcagttttctgtcatgcctgtctttgtgcctacagccgactcctcagcccagcctgtggtgttaggtgttgatcagggctctgccacaggggctgtgcacttaatgcccttgtcagtaggaaccctgatcctcggcctagattcagaggcttgctctcttaaggagagcctacctcttttcaaaattgctaatcctattgctggtgagccaataagtactggtgttcaagtgaactttggtaaaagtccatctaatcctttacaagaactagggaacacgtgtcaaaagaatagcatttcttcaatcaacgtgcagacagatctgtcttatgcctcacaaaactttataccttctgcacagtgggccactgctgattcctctgtgtcgtcttgttctcaaactgatttgtcgtttgattctcaagtgtctcttcccattagtgttcacactcagacatttttgcccagctctaaggtaacttcatctatagctgctcagactgatgcatttatggacacctgtttccagtcaggtggggtctccagagaaactcaaaccagtgggatagaaagtccaacggatgaccatgtacagatggaccaagctggaatgtgcggagacatttttgagagtgttcattcatcatataatgttgctacaggtaacattataagcaacagtttagtagcagagacagtaactcatagtttgttacctcagaatgagcctaagactttaaatcaagatattgagaaatctgcaccaattataaatttcagtgcacagaatagtatgcttccttcacagaacatgacagataatcagacccaaaccatagatttattaagtgatttggaaaacatcttgtcaagtaatctgcctgcccagacattggatcatcgtagtcttttgtctgacacaaatcctggacctgacacccagctcccatctggcccagcccagaaccccggaatcgattttgatatcgaagagttcttttcggcctcaaatatccagactcaaactgaagagagtgaacttagcaccatgaccaccgagccagtcttggagtcactggacatagagactcaaacggacttcttactcgcagatacctctgctcagtcctatgggtgtaggggaaattctaacttcttaggccttgagatgtttgacacacagacacagacagacttaaactttttcttagacagtagccctcatctgcctctgggaagtattctgaaacactccagcttttccgtgagtactgattcatctgacacagagacccaaactgaaggagtctccactgctaaaaatatacctgctctagaaagcaaagttcagttgaacagtacagaaacacagaccatgagttctgggtttgaaaccctggggagcttgttcttcaccagcaacgaaactcagacagcaatggatgactttcttctggctgatctggcctggaacacgatggagtctcagttcagctctgtagaaacccagacttctgcggaaccacacacagtctccaacttctaaaactaacggtggagtccatgtgtgaaatggcatctaccatttcctctggattaaaactacggactggggacaacagtattaattcgattgaatgtggctgatgatgcagttgcttagcttctttgtgtttctttgccttttgtacttgtaaacagaaatttgcgtataaatgtgagtgtattataaagtttgagatgttgatctaaattgtttttgtgttgcctacatttgccttttcacagctagtcttttcatgttaaaaaaaaaatgtatttcatatctataaaacctatatagccatttagctgaagcccagcttaccaggttcaagggtacaaacttctcaaatcttcaaaacattttagtcaaagtgtaatatacttaaactgcacctaaaatatctttggcactgcttgttagaaattcctgattcctgttactaatcactaaagaaaccggatgctgccaccgtaggatttaagcagtagtgcttccatgctcttaagactcctgctgcctggaccttcgtcagctttgacacctcttttctgatttaaagacaccaaggaaaactacaactgtctttagctttgaagcagttttcatgtaatcattgccacctcttcgctacatgaactactattgataccagcatacaagtgtatagcactttacacacaagaggtttattgatgtaaaattatcggctagggaagcagcagcgggccaggtgtggtggcttacccctgtaatcccagcactttgggaggccaaagcaggacgatcacttgagcccaggagttcaacaccagcttgggcaacataagaagaccgtgtctctggaatttttttttttttttaattagccaggcacagtggcatgcgcctgtgatcccagctacttggaaggctgaggtgagaggatcactcgaggagattggggctgccatgagccatggtcttggcactgtactccaacctgggtaacagggcaagaccctatctcaaaaaaaaaaaaagtcgccagcaacaagcacgtagtgtagtgttcctgctaaatgagcgtaggttatccaaaccttgggaacagggagttatggaaacgtgcctatgacttcatcttggggtgtgtcctatgaagatcctttctggtctccacagtaggccagagttgggggctctggagctgtttccccaagtgcatccacaagctggatctgagttttgtcactctaaaattaaacaagaaaaaaagtgggaaaagggcatcccccattaggtttcaatactttgcacttctactaagcttgatagggcaggagtgcaatctacaattattttaaagtgaatttccttccattcaccattctttatcttttctttgaataagaaaaagtatctagcaaggatattacttgtgccttgaggctagcaattataggatagattcatctaaaatatggtattctgcattttggttttttttcttaagtgaataataccagtcttcaaagaaaacaaggtgaagacctattgcttcaataatcaagaatgctttgtgtgttttgaggtaggagcatgatcaagtatgctttggggattttctgtatttaggagatcctggattcttaattgttggctaagttccagtcaagtaggaatcagtgcagcctgtaagttctccacattgacacacacacacacacacacacacacacacacacgacatgctcctttctgtggcacatgcctgtattactgaaagctaaatcctcaaaacctagtaaggagactaatgattcattaaagtaaattgatggttttgctactaattcctatcccatacatttgacacaaaagaagtgttggtaatggataaataacatatcccgggcagatgagctcaacctagtaggtaagagtttggtttggtcacagttgcctatgagtgtgggtttcaaaagaaacataaagccttaacttagaatttcattatgttttagaatcatcactgccttaatattcaagcatctatttaagtcctaataaaggagaaatgcatgtttatggcttttttgtaaatataaatgcagtgatctatggcttaaaaaatttgtttctgtgacaatgtttgtaaatctagccaatagagtcatttacagaagaaaaatgagcatgtaataatacaagaactgtttccccctcaaaacctgaacctgaattatttgtaaaaactgaaatttaatgattaaagagaagccagaattgtacccttttttgtgaattcttgaacgtactcataaatatgacttattgtattgccttaagttttcactcattgtcttttgaaagccatatgataaaatgattttatttaataataaaaaaaaaa

SEQ ID NO: 426 - DNA, 1248 bp, Homo sapiens
  CDS (291)..(890)
cctgccgtaccggtccggaattcccgggtcgacgatttcgtgccccaacgggggctggaacccggcgccgagagtagagaaaaggggcctctggtgaccgcccctacctggcatccctctaacccaggaggagcgtggggaaaggggctgtgggcctctcggggagcgagctgcgggtagcggcgcactgggtacaggcgcgcgcttggctgtcgcctctgccgctgtgtttgggaggactcgaactggcgccaggaaatattaggaagctgtgattttcaaagctaattatgaaaacatttatcattggaatcagtggtgtgacaaacagtggcaaaacaacactggctaagaatttgcagaaacacctcccaaattgcagtgtcatatctcaggatgatttcttcaagccagagtctgagatagagacagataaaaatggatttttgcagtacgatgtgcttgaagcacttaacatggaaaaaatgatgtcagccatttcctgctggatggaaagcgcaagacactctgtggtatcaacagaccaggaaagtgctgaggaaattcccattttaatcatcgaaggttttcttctttttaattataagccccttgacactatatggaatagaagctatttcctgactattccatatgaagaatgtaaaaggaggaggagtacaagggtctatcagcctccagactctccgggatactttgatggccatgtgtggcccatgtatctaaagtacagacaagaaatgcaggacatcacatgggaagttgtgtacctggatggaacaaaatctgaagaggacctctttttgcaagtatatgaagatctaatacaagaactagcaaagcaaaagtgtttgcaagtgacagcataaagacggaacacaacaaatccttcctgaagtgaattaggaaactccaaggagtaatttaagaaccttcaccaagatacaatgtatactgtggtacaatgacagccattgtttcatatgtttgatttttattgcacatggttttcccaacatgtggaacaataaatatccatgccaatggacaggactgtaccttagcaagttgctccctctccagggagcgcatagatacagcagagctcacagtgagtcagaaagtctccactttctgaacatagctctataacaatgattgtcaaacttttctaactggagctcagagtaagaaataaagattacatcacaatccaaaaaaaaaaaa

SEQ ID NO: 427 - DNA, 1176 bp, Homo sapiens
  CDS (291)..(818)
cctgccgtaccggtccggaattcccgggtcgacgatttcgtgccccaacgggggctggaacccggcgccgagagtagagaaaaggggcctctggtgaccgcccctacctggcatccctctaacccaggaggagcgtggggaaaggggctgtgggcctctcggggagcgagctgcgggtagcggcgcactgggtacaggcgcgcgcttggctgtcgcctctgccgctgtgtttgggaggactcgaactggcgccaggaaatattaggaagctgtgattttcaaagctaattatgaaaacatttatcattggaatcagtggtgtgacaaacagtggcaaaacaacactggctaagaatttgcagaaacacctcccaaattgcagtgtcatatctcaggatgatttcttcaagccagagtctgagatagagacagataaaaatggatttttgcagtacgatgtgcttgaagcacttaacatggaaaaaatgatgtcagccatttcctgctggatggaaagcgcaagacactctgtggtatcaacagaccaggaaagtgctgaggaaattcccattttaatcatcgaaggttttcttctttttaattataatacaagggtctatcagcctccagactctccgggatactttgatggccatgtgtggcccatgtatctaaagtacagacaagaaatgcaggacatcacatgggaagttgtgtacctggatggaacaaaatctgaagaggacctctttttgcaagtatatgaagatctaatacaagaactagcaaagcaaaagtgtttgcaagtgacagcataaagacggaacacaacaaatccttcctgaagtgaattaggaaactccaaggagtaatttaagaaccttcaccaagatacaatgtatactgtggtacaatgacagccattgtttcatatgtttgatttttattgcacatggttttcccaacatgtggaacaataaatatccatgccaatggacaggactgtaccttagcaagttgctccctctccagggagcgcatagatacagcagagctcacagtgagtcagaaagtctccactttctgaacatagctctataacaatgattgtcaaacttttctaactggagctcagagtaagaaataaagattacatcacaatccaaaaaaaaaaaa

SEQ ID NO: 428 - DNA, 1939 bp, Homo sapiens
  CDS (669)..(1142)
atttggccctcgaggccaagaattcggcacgaggcggattcgtgcctatgagatgacaatgcgggtgaaagacaaagtgtatcacctggaatgtttcaagtgcgccgcctgtcagaagcatttctgttaacaactgctctgaaaagaagatatttttcaacctgaacttgcagtagctagtggagaggcaggaaaaaggaaatgaaacagagacagagggaagcctgagccaaaatagaccttcccgagagaggaggaagcccggagagagacgcacggtcccctccccgcccctaggccgccgccccctctctgccctcggcggcgagcagggcgccgcgacccggggccggaaaggtgccaggggctccgggcggccgggcgggcgcacaccatccccgcgggcggcgcggagccggcgacagcgcgcgagagggaccgggcggtggcggcggcgggaccgggatggaagggagcgcggtgactgtccttgagcgcggaggggcgagctcgccggcggaggccgagcaagcggaggcaggagcggcggcgacggcggcggcggcggcggcgcccgagcacccgagggggtccgagccccggcagccggccagccccgcgccacaaagggagcgcccccgccgcccggcaccccgcctcccttcccaatgtcctcggccatcgaaaggaagagcctggacccttcagaggaaccagtggatgaggtgctgcagatccccccatccctgctgacatgcggcggctgccagcagaacatcggggaccgctacttcctgaaggccatcgaccagtactggcacgaggactgcctgagctgcgacctctgtggctgccggctgggtgaggtggggcggcgcctctactacaaactgggccggaagctctgccggagagactatctcaggctttttgggcaagacggtctctgcgcatcctgtgacaagcggattcgtgcctatgagatgacaatgcgggtgaaagacaaagtgtatcacctggaatgtttcaagtgcgccgcctgtcagaagcatttctgtgtaggtgacagatacctcctcatcaactctgacatagtgtgcgaacaggacatctacgagtggactaagatcaatgggatgatataggcccgagtccccgggcatctttggggaggtgttcactgaagacgccgtctccatggcatcttcgtcttcactcttaggcactttgggggtttgagggtggggtaagggatttcttaggggatggtagacctttattgggtatcaagacatagcatccaagtggcataattcaggggctgacacttcaaggtgacagaaggaccagcccttgagggagaacttatggccacagcccatccatagtaactgacatgattagcagaagaaaggaacatttaggggcaagcaggcgctgtgctatcatgatggaatttcatatctacagatagagagttgttgtgtacagacttgttgtgactttgacgcttgcgaactagagatgtgcaattgatttcttttcttcctggctttttaactcccctgtttcaatcactgtcctccacacaagggaaggacagaaaggagagtggccattctttttttcttggcccccttcccaaggccttaagctttggacccaaggaaaactgcatggagacgcatttcggttgagaatggaaaccacaacttttaaccaaacaattatttaaagcaatgctgatgaatcactgtttttagacaccttcattttgaggggaggagttccacagattgtttctatacaaatataaatcttaaaaagttgttcaactattttattatcctagattatatcaaagtatttgtcgtgtgtagaaaaaaaaaacagctctgcaggcttaataaaaatgacagactgaaaaaaaaaaaaaaaa

SEQ ID NO: 429 - DNA, 985 bp, Homo sapiens
  CDS (134)..(517)
  misc_feature (1)...(985): n = a,t,c or g
tgtgagtacantgcaatngncgnggacttcgaagagattggngtccctgaagttaagaaagccacctttgcctacagatggtgttcactttgtttttgtggagtcacagcttgacttttgggggccccaggagatgttgacccagcagggcatggcgctgcagaactacgacaacaagctggtcaaatgcatagaggagctatgccagaagcaggaggagctgtgctggcagatccagcaggaggaggacaagaaacagcggctgcagaatgaggtgaggcagctgacagagaagctggcctgcgtcaacgagaagctggcccgcgtcaacgagaacctggcacgcaagattgcctcttgcagtaagttctaccagaccatcgcggagacggaggccgcctacctcaagatcctggagagctcccagactttgctcagcgttctcaagagggaagctgggaacctgaccaaggctacagccccagaccagaaaagtagcggcggcagggacagctgaccagaccacaggcagggcctgcctccgtgtgcccctcagctcagccccagcaagtgtgtgctcagagcatctttgttcttcacggcagcagctaccttccctcactgtctcaggtgccgagaggggcaggtgccagcctccactggcatcagtgacaagcccagggcacagcccacccgggggtcctcgcttcatgctcacacaggctatggggatggtgggctccaggtcagctctgcaaggggcttgtctctgtggcacccacactcctgccctgccagggaggctctggttgtctgagcaccatgggggccccctcaccttgtccctcctcagccagcagaggcccagggcaagggacaggaggacaggggttctccttcaccacagaacccaaacctcaggtctcacccctgtggcctgtgattatgaataaagattatctttgtaaagatcaaaaaaaaaaaa

SEQ ID NO: 430 - DNA, 1730 bp, Homo sapiens
  CDS (466)..(990)
ggtccggaattcccgggtcgacccacgcgtccgcccacgcgtacggcgatagcggcaagatggcggaccgtggcggcgtgggtgaagccgcagctgttggagcgtctcctgcatctgtccctggcctaaacccgacgctaggctggagggagcgactgcgggccgggctggcggggactggggcctcgttgtggttcgtggcggggctggggctgctttacgccctgaggatccctttgaggctgtgtgagaatttggcagcgggcttatcttgagtaataaaatagtacaggaagtgagagcgccacaaacaacagtgggtttgctagttctttcgacgtctgtagaacacttgctacgtattctgtgctgacaatacgaacacatatatttgaatggtggtacttccataagcatggcacatcttttattgagcaagtatctgtaagccatttgcaaccactgatgggaggaacagagagcagcatttcagaaccaggttctccttcgaggaacagagaaaatgaaaccagcagacagaatttgtcagaatgtaaggtatggagaaaccctctaaatcttttcagaggagcagaatataggagatacacttgggtgactggtaaagagccacttacatactatgacatgaacctgtcagctcaggaccatcagacctttttcacctgtgacacagattttttacgtccttcagacacagttatgcagaaggcttggagggaaagaaatcctccagctcgaatcaaagcagcctatcaagctttagaattaaacaatgactgtgccactgcatatgttctactggctgaggaagaagcaacaactattgtagatgctgaaaggttatttaaacaggcactcaaggcaggagaaacaatttataggcagtcacagcagtgccagcaccaaagtcctcagcatgaagctcaactgaggagagataccaatgtactggtatatattaattgaagattggcaatgtgtgcaagaaaattaggaagaataagagaagcagtaaaaataatgagagatttgatgaaagaatttcctcctcttaccatgttgaacatccatgaaaatctcttagaatcacttttatgaattacaggcctatccagatgttcaggcagtcctagcaaaatatgatgatataagccttccaaagtcagcagcaatctgttacacagcagcactgttgaagacaaggactgtttcagaaaaattctctccagaaacagcctccagaagaggattaagcacagcagaaattaatgccgtggaagcaattcatagagctgtggaatttaatcctcatgttccaaaatatttattagagatgaaaagtttaattttacctccagaacacattctgaaacggggtgatagtgaagcaattgcctatgctttctttcatcttcagcactggaaacgaatagaaggtgctcttaatctgttacagtgtacatgggaaggcacttttagaatgattccatacccgttagagaaaggacatctattttacccttatcccagctgcacagagacggctgatagagagctattacctacctttcatcatgtttctgcttacccacaaaaggagcttcctttgttcatccatttcacagcaggattttgctcttttacagcaatgatagccattctcactcaccagtttcctgaaatcatgggtatttttgctaaagctg

SEQ ID NO: 431 - DNA, 2896 bp, Homo sapiens
  CDS (324)..(2318)
cggcatgagaggccagcctgccagggaaatccaggaatctgcaacaaaaacgatgacagtctgaaatactctctggtgccaacctccaaattctcgtctgtcacttcagacccccactagttgacagagcagcagaatttcaactccagtagacttgaatgtgcctctgggcaaagaagcagagctaacgaggaaagggatttaaagagtttttcttgggtgtttgtcaaacttttattccctgtctgtgtgcagaggggattcaacttcaatttttctgcagtggctctgagtccagccccttacttaaagatctggaaagcatgaagactgggctttttttcctatgtctcttgggaactgcagctgcaatcccgacaaatgcaagattattatctgatcattccaaaccaactgctgaaacggtagcacctgacaacactgcaatccccagtttaagggctgaagctgaagaaaatgaaaaagaaacagcagtatccacagaagacgattcccaccataaggctgaaaaatcatcagtactaaagtcaaaagaggaaagccatgaacagtcagcagaacagggcaagagttctagccaagagctgggattgaaggatcaagaggacagtgatggtcacttaagtgtgaatttggagtatgcaccaactgaaggtacattggacataaaagaagatatgagtgagcctcaggagaaaaaactctcagagaacactgattttttggctcctggtgttagttccttcacagattctaaccaacaagaaagtatcacaaagagagaggaaaaccaagaacaacctagaaattattcacatcatcagttgaacaggagcagtaaacatagccaaggcctaagggatcaaggaaaccaagagcaggatccaaatatttccaatggagaagaggaagaagaaaaagagccaggtgaagttggtacccacaatgataaccaagaaagaaagacagaattgcccagggagcatgctaacagcaagcaggaggaagacaatacccaatctgatgatattttggaagagtctgatcaaccaactcaagtaagcaagatgcaggaggatgaatttgatcagggtaaccaagaacaagaagataactccaatgcagaaatggaagaggaaaatgcatcgaacgtcaataagcacattcaagaaactgaatggcagagtcaagagggtaaaactggcctagaagctatcagcaaccacaaagagacagaagaaaagactgtttctgaggctctgctcatggaacctactgatgatggtaataccacgcccagaaatcatggagttgatgatgatggcgatgatgatggcgatgatggcggcactgatggccccaggcacagtgcaagtgatgactacttcatcccaagccaggcctttctggaggccgagagagctcaatccattgcctatcacctcaaaattgaggagcaaagagaaaaagtacatgaaaatgaaaatataggtaccactgagcctggagagcaccaagaggccaagaaagcagagaactcatcaaatgaggaggaaacgtcaagtgaaggcaacatgagggtgcatgctgtggattcttgcatgagcttccagtgtaaaagaggccacatctgtaaggcagaccaacagggaaaacctcactgtgtctgccaggatccagtgacttgtcctccaacaaaaccccttgatcaagtttgtggcactgacaatcagacctatgctagttcctgtcatctattcgctactaaatgcagactggaggggaccaaaaaggggcatcaactccagctggattattttggagcctgcaaatctattcctacttgtacggactttgaagtgattcagtttcctctacggatgagagactggctcaagaatatcctcatgcagctttatgaagccaactctgaacacgctggttatctaaatgagaagcagagaaataaagtcaagaaaatttacctggatgaaaagaggcttttggctggggaccatcccattgatcttctcttaagggactttaagaaaaactaccacatgtatgtgtatcctgtgcactggcagtttagtgaacttgaccaacaccctatggatagagtcttgacacattctgaacttgctcctctgcgagcatctctggtgcccatggaacactgcataacccgtttctttgaggagtgtgaccccaacaaggataagcacatcaccctgaaggagtggggccactgctttggaattaaagaagaggacatagatgaaaatctcttgttttgaacgaagattttaaagaactcaactttccagcatcctcctctgttctaaccacttcagaaatatatgcagctgtgatacttgtagatttatatttagcaaaatgttagcatgtatgacaagacaatgagagtaattgcttgacaacaacctatgcaccaggtatttaacattaactttggaaacaaaaatgtacaattaagtaaagtcaacatatgcaaaatactgtacattgtgaacagaagtttaattcatagtaatttcactctctgcattgacttatgagataattaatgattaaactattaatgataaaaataatgcatttgtattgttcataatatcatgtgcacttcaagaaaatggaatgctactcttttgtggtttacgtgtattattttcaatatcttaataccctaataaagagtccataaaaatccaaaaaaaaaaaaaaaaaaaaaagtcgaccggccgcgaatttagtagtagtaggcggccgctctagaggatccaagcttacgtacgcgtgcatgcgacgtcatagctcttctatagtgtcacctaaattcaattcactgccg

SEQ ID NO: 432 - DNA, 4121 bp, Homo sapiens
  CDS (1087)..(3273)
atggaaactccttcaaccctggctttctccgacttctgctttttgcggcaggccctttccccactctactgccccctgtttgctgagcttgagaacgcctcatttgtcccctggaaccatctatgcttcagtaattcccataagctggcggtcgcctctgggtctaaactcccaaggcctccattgggcactgagcacattcggttatttccagaaacgctccgcggtcttggggatcagcctcagttgtgccagtgcggccgtagagagtgttcggccatttccgaaagcgctcgggcgtctctaagcccagccgagcccagtctcggatccctcgccgacccgattgcactcggctacctctggaaacgctcggctgtctcgggggcaccctctagtccaccagtcccgcgggattacgttcggctacttccggaaacactcgggtgcccccttacctcaggctccgcctcggcctcggttcatccgcccggctcgaatgcgctcgggcatttccgccgggggcgggccaggccgctcggaaccgtggcggcggcggaggcggggatcccgcggctgcggcgacggtggccgcggtggagccacggggcgggcttggcttggtgtgacggcggctgcggcggcggtggcggccgcgaccaggtcggcgtcctcagctggccgagcatggtggcagcctgcacccttggctcccttgtctggtgcagccagcagagccgccagccttgggcgcccatggccctccgtgtgagggcgtgagcggcctgccccagcctcacctgctgatggaggactcaatggcccagtgacctgacaccacaccaccaactccctcccaccagctgacgaatggtggacccagtgacgagtggcccttgtaagggtcatggaataatttgaagcgaggcatgagcggcccctgtggtcgcctgtgactgctggagatagaggtcccagcaccccaagccaacccagcggaccctcccagccctgcttcaaccaatggggccagtggggctccaagcagccacctaaccatccagaccccaccccactcacgcggccatggcgggccctgagggcttccagtaccgcgctctgtacccgttccgccgggagcggccggaggacctggagctgctgcccggcgacgtgctggtagtgagccgggcggccttgcaggcgctgggcgtggccgagggtggcgagcgctgcccacagagcgtgggctggatgcccggcctcaacgagcgcacacggcagcgaggtgacttccctggcacctatgtggagttcctggggcccgtggccctggcccggcccggccctcgcccacggggcccccgcccactgcccgccaggccccgtgatggggcccctgagccaggcctcacactccccgacttgcccgagcagttctccccacctgatgtggctccccctcttctggtgaagcttgtggaggccattgaaaggacagggctggacagcgaatctcactaccgcccggagctgcccgcaccgcgtacagactggtccctgagcgacgtggatcagtgggacacggcagccctggctgacggcattaagagcttcctgctggcactgcccgcgccgctcgtgacccccgaggcctcggccgaggcgcgccgggccctgcgggaggccgcggggcccgtggggccggcgctggagccaccgacgctgccgctgcaccgcgcgctcacgctgcgcttcctgctccagcacctgggccgcgtggccagccgcgccccggccctgggtcccgcggtccgggccctgggcgccacctttgggccgctgctgctgcgcgcgccgccgccgccgtcctcgccgccgccagggggcgctcccgacgggagtgagcccagccctgacttcccggcgctgctggtggagaagctgcttcaggaacacttggaagagcaggaggttgcgcccccagcgctgccgcctaaaccccccaaggcaaagccggcctccacagtcctggccaatggagggagcccaccctccctgcaggatgctgagtggtactggggggacatttcaagggaggaggtgaacgagaaactccgggacactcccgatggcaccttcctagtccgagatgcttctagcaagatccagggcgagtacacgctgaccctcaggaaaggcgggaacaataagctgatcaaggtcttccaccgagatgggcactatggcttctcagagccactcaccttctgctccgttgtggacctcatcaatcactaccgccacgagtctctggcccagtacaatgccaagctggacacacggctcctctaccctgtgtccaaataccagcaggaccagattgtcaaggaggacagcgtggaggcagtgggcgcccagcttaaggtctatcaccagcagtaccaggacaagagccgcgagtatgaccagctttatgaagagtacacacggacctcccaggagctgcagatgaagcgtactgcaattgaggccttcaatgagactatcaagatctttgaagagcagagccagactcaagagaaatgcagcaaggaatacctggagcgcttccggcgtgagggcaacgagaaagagatgcaaaggatcctgctgaactccgagcggctcaagtcccgcattgccgagatccatgagagccgcacgaagctggagcagcagctgcgggcccaggcctcggacaacagagagatcgacaagcgcatgaacagcctcaagccggacctcatgcagctgcgcaagatccgagaccagtacctcgtgtggctcacccagaaaggcgcccggcagaagaaaatcaacgagtggctggggattaaaaatgagactgaggaccagtacgcactcatggaggacgaggacgatctcccgcaccacgaggaacgcacttggtacgtgggcaagatcaaccgcacgcaggcagaggagatgctgagtggcaagcgggatggcaccttcctcatccgcgagagcagccagcggggctgctacgcctgctccgtggtagtggacggcgacaccaagcactgcgtcatctaccgcacggccaccggcttcggcttcgcggagccctacaacctgtacgggtcgctgaaggagctggtgctgcactaccagcacgcctcgctggtgcagcacaacgacgcgctcaccgtcaccctggcgcacccagtgcgcgccccgggccccggcccgccgcctgccgcccgctgagcaccgaggacccgccccaagcagagccgcccctgggcccgtctgcgccggaggctgcggcggcgggagccacggaccagaccagccacatccaggggtcctcatttctccggctctggctcttgtttggggttctctcaccctctttctctttccttccctcccccattctccagatctccctctgtctccttttctctgtctttcttggcccctgtctctctccatgttgggggtcctaactcccccaccccatatctacgtgtcctccgggcattgccctctccatggctctggtcaccctgaccctctgccctgcccaccgcaggtcccccggggtcccggaagccccttctggctgcacctgccatgtttacagagggcccctgggctgcgcggccccagcctgggcaccctgatttttaagccatagacctggggtcagggcaggaaggaacttcactctgctgcttccgagaacctcggccgtgacattcggggccgggcgggacccgccccacagactccaacttcccctccaaaccccgaagtgaaacccgccaccgggttacccccacaagggggccgctgcgagaagttcacccacccccgaaaaaataattaaactcgcaggccaggcacggtggctcatgcctgtaatcccagcactttgggaggccaagacgggcggatcttttgaggtcgggagttggaggccagcctggccaaaatggcaaaaccccgcatctactaaaatacaaaaattagccgggcgtggtggcggccgctctagagtatccctcgaggggcccaagcttacgcgtacccagctttcttgtacaaagtgg

SEQ ID NO: 433 - DNA, 2570 bp, Homo sapiens
  CDS (259)..(2373)
ctactatcatggtacttagagattgtaggggctggataataaacaagggatgtaaacagctggaaagaactttgcttcaatcattacaacaaggaaactacaaactgctaccgtacaacaaggaaatggacaaactacaaaataatttttctaggacccttcagagaactgaggtcacagggcaaccaagtaatcttaaatctggggaaagaaagatgccagctgagagaaacaggactcaagctttacttacctgggatggactctgccagacaccatataagccactctacttctgcaggccccatcccttcccagaaagaagaggaaatgactgagtcccagggaacagtaacattcaaagatgtggctatcgacttcactcaggaggagtggaagagattggatcctgctcagagaaaactgtaccggaatgtgatgctagaaaactataacaacttaatcacagtaggctatccgttcaccaaacctgatgtgattttcaaattggagcaagaagaagaaccatgggtgatggaggaagaagtattaaggagacactggcaaggagaaatatggggagttgatgagcatcagaaaaaccaggacagacttttgagacaagttgaagttaaattccagaaaacactgactgaagaaaaaggcaatgaatgtcaaaagaaatttgcaaatgtatttcctctgaactctgattttttcccttccagacacaatctctatgagtatgacttatttggaaagtgtttagaacataattttgactgtcataataatgtgaaatgccttatgagaaaggagcattgtgaatataatgaacctgtgaaatcatatggtaatagctcatcccattttgtcattaccccctttaagtgtaatcattgtggaaaaggcttcaatcagactttggacctcatcagacatctgagaattcatactggagagaagccctatgaatgtagtaactgtagaaaagccttcagtcacaaggaaaaacttattaaacattataaaattcacagtagggagcagtcttacaaatgtaatgaatgtggtaaagctttcattaaaatgtcaaatctcattagacatcaaagaattcatactggagagaagccctatgcatgtaaggaatgtgagaagtccttcagccagaaatcaaatcttattgatcatgaaaaaattcatactggagagaaaccttatgaatgtaatgagtgtggaaaagcattcagccagaagcaaagcctcattgcacatcagaaagttcatactggggagaaaccttatgcatgtaatgaatgtggtaaagccttccctcgaattgcatcccttgctcttcatatgagaagtcatacaggagaaaaaccttataaatgtgataaatgtggtaaagccttctctcagttttccatgcttattatacatgttagaattcatacaggtgaaaaaccctatgaatgtaatgagtgtggaaaagccttctctcaaagctcagcccttactgtacatatgagaagtcacactggtgagaaaccctatgaatgtaaggaatgcagaaaagccttcagccacaagaaaaacttcattacacaccagaaaattcatactagagagaaaccttatgagtgtaatgaatgtgggaaagcttttatacagatgtcaaatcttgttagacaccagagaattcatactggggaaaaaccctatatatgtaaggaatgtgggaaagcctttagccagaattcaaatctcattgctcatgaaaaaattcattctggagagaaaccctatgaatgcaatgaatgtggtaaagccttcagccaaaagcaaaacttcattacacatcaaaaagttcatactggagagaaaccttatgattgtaatgaatgtggtaaagccttctctcaaattgcatcccttacccttcatttgagaagtcatacaggggaaaagccttatgaatgtgataaatgtggtaaagccttctctcagtgctcactgcttaatttacatatgagaagtcacacaggtgagaagccctatgtatgtaatgaatgtgggaaagccttctctcaaagaacttcccttattgtgcacatgagaggccatacaggtgaaaaaccctatgaatgtaataaatgtggaaaagccttctcccaaagctcatcccttactatacatatacgaggacatacaggtgagaaaccctatgaatgtaaggaatgcagaaaagccttcagccacaagaaaaacttcattacacaccagaaaattcatactagagagaaacctttaagtgtaatcattgtggaaaaggcttcaatcagactttggacctcatcagacatctgagaattcatactggagagaagccctatgaatgtagtaactgtagaaaagccttcagtcacaaggaaaaacttattaaacattataaagtcgacgcggccgcgaattcggatcctcgagagatctctttttttgggtttggtggggtatcttcatcatcgaatagatagttatgccatcagcattcagaggggggctgt

SEQ ID NO: 434 - DNA, 1698 bp, Homo sapiens
  CDS (419)..(1195)
ggtacctgtccggaattcccgggtcgacgtttcgtggggcggcgggagtgcgggtgggcgtttaaaggggccttcggcacccaggtcggttcgccgccgggactgctgacggggagggctaggtagccctgggagtcgggatctagaaggtagaggagaagcggggctgtctgacccccggaggtgacaaggggagaggggctgtgtgaataccctccatgggcagtaatgggatgactatccccagggagcattgcgaaggagagaggcggctgagggactgcactttctggggccccccgggagagtcagagggcagttaagagggatcacaggcccggcttggtactgtcactccccttcccactccctgctctcagcattctgtcacctccctaccccgtcgcggtgcccagccatggccagacctcccgtgcccggttcggtggttgtcccaaactggcacgagagtgccgagggcaaggagtacctggcttgcattctgcgcaagaaccgccggcgggtgtttgggctgcttgagcggccagtgctgctgccgcctgtgtccattgacactgccagctacaagatctttgtgtccgggaagagtggtgtgggcaagacggcgctggtggccaagctggctggcctggaggtgcctgtggtgcaccacgagaccaccggcatccagaccaccgtggtattttggccagccaagctgcaggccagcagccgtgtcgtcatgtttcgttttgagttctgggactgtggagagtctgcactcaaaaagttcgatcatatgctgctggcttgcatggagaacacagatgccttcctcttcctcttctccttcactgaccgtgcctcctttgaagacctccctggacagctggcccgcatagcaggtgaggcccctggtgtcgtcaggatggtcatcggctccaaatttgaccagtacatgcacacggacgtgcccgagcgggacctcacagccttccggcaggcctgggagctgcccctgctacgggtgaagagtgtgccggggcggcggctggctgatgggcgcacactggacgggcgggctgggctggccgacgttgcccacatactcaatggccttgctgagcagctgtggcaccaggaccaggtggcggctggcctgcttcccaaccccccagagagtgctcctgaatgagtcacgagtggttgcctgtgatcccacccccaaccctcaggtctcgacatagggctggaggctggggcaggaacatggatcctatctggaggactggccagcatggcctgatcagggaggatgtggccagagaaggcccacccgcgagcagcgctttccttgcagaattcatggcagggaggtggggaccaaggccctgagctcgaacatctcccgtggcctttccccctttggcagcaccgatggaggatgactgggagagggggtgcctctcaagttacttcaatcaagaacctgtattggttgaggtgacaccatctgttgtaacagataaaccccgaaatcccagtgctgaactccagagacgtgttcgttctcacgtaggcctcagctcgggaggaggtgacagtgggcgtggggctctgctccaggcgctcctgcagagacccagccccagagaccctaccctgcccagttgccctagggtgtcagcacccagtcag

SEQ ID NO: 435 - DNA, 2188 bp, Homo sapiens
  CDS (349)..(1425)
  misc_feature (1)...(2188): n = a,t,c or g
gctggtcacctgtggtaccggaccggaattcccgggtcgacccacgcgtccggtccagcaagttggggaaatgcaacagcttgaagtggctctagtggcccagagtcagagctggaataggaattggcatctgctggctgtgtggcccctgcttgccctagtgagttaccatttctctgtccctacggnggagcctttggggttattgtgagttcatgggaggagcgtgtaagcaccggcacagcatcagcccatgagagtgctcctggcctgagagggtaagggtcagggcagctcaggagaccctagacctgcatagtgatccccccaccaggaaggccccacaagatgctcacctgccctccctatccctgtccccagctggaggagcaccggaattcacagaagcagatgaagctcctacagaaaaagcagagccagctggtgcaagagaaggaccacctgcgcggtgagcacagcaaggccgtcctggcccgcagcaagcttgagagcctatgccgtgagctgcagcggcacaaccgctccctcaaggaagaaggtgtgcagcgggcccgggaggaggaggagaagcgcaaggaggtgacctcgcacttccaggtgacactgaatgacattcagctgcagatggaacagcacaatgagcgcaactccaagctgcgccaagagaacatggagctggctgagaggctcaagaagctgattgagcagtatgagctgcgcgaggagcatatcgacaaagtcttcaaacacaaggacctacaacagcagctggtggatgccaagctccagcaggcccaggagatgctaaaggaggcagaagagcggcaccagcgggagaaggattttctcctgaaagaggcagtagagtcccagaggatgtgtgagctgatgaagcagcaagagacccacctgaagcaacagcttgccctatacacagagaagtttgaggagttccagaacacactttccaaaagcagcgaggtattcaccacattcaagcaggagatggaaaagatgactaagaagatcaagaagctggagaaagaaaccaccatgtaccggtcccggtgggagagcagcaacaaggccctgcttgagatggctgaggagaaaacagtccgggataaagaactggagggcctgcaggtaaaaatccaacggctggagaagctgtgccgggcactgcagacagagcgcaatgacctgaacaagagggtacaggacctgagtgctggtggccagggctccctcactgacagtggccctgagaggaggccagaggggcctggggctcaagcacccagctcccccagggtcacagaagcgccttgctacccaggagcaccgagcacagaagcatcaggccagactgggcctcaagagcccacctccgccagggcctagagagcctggtgttgggtcatgctgggaagggagcggcagcccagccaggcctggcccataaaaggctcccatgctgagcagcccattgctgaagccaggatgttctgacctggctggcatctggcacttgcaattttggattttgtgggtcagttttacgtacatagggcattttgcaaggccttgcaaatgcatttatacctgtaagtgtacagtgggcttgcattggggatgggggtgtgtacagatgaagtcagtggcttgtctgtgagctgaagagtcttgagaggggctgtcatctgtagctgccatcacagtgagttggcagaagtgacttaagcatttctctgtctggtgtgaggctcagacccctccctgcccttcagagctcaagacaagtaatgcacccaggtcttgactgcatttgtcttgtgagcagggcttgcttggtcagctcaggccctcctagctgctctggaggctcctttgattctctagacctggaaaaggtgtccctaggcagagccctggcagggcgctcagagctggggatttcctgcctggaacaagggacctggagaatgtttttgcgtgggatgatgtgctggtcaggagccccttgggcatcgcttcccctgccctttggtagtgccaggaccaggccaatgatgcttctcagtagccttatcattcacaggtgcctctctagcctgcacaaatgattgacaagagatcacccaaaggattatttctgaaggtgttg

SEQ ID NO: 436 - DNA, 2903 bp, Homo sapiens
  CDS (118)..(2667)
agacccaccgggccggaattcccgggtcgacgatttcgtccagcccaagcctgagcctgagcccgccccgaggtccccgccccgcccgcctggctctctcgccgcggagccgccaagatgggggacaagaaagatgacaaggactcacccaagaagaacaagggcaaggagcgccgggacctggatgacctcaagaaggaggtggctatgacagagcacaagatgtcagtggaagaggtctgccggaaatacaacacagactgtgtgcagggtttgacccacagcaaagcccaggagatcctggcccgggatgggcctaacgcactcacgccaccgcctaccaccccagagtgggtcaagttttgccggcagctcttcgggggcttctccatcctgctgtggatcggggctatcctctgcttcctggcctacggtatccaggcgggcaccgaggacgacccctctggtgacaacctgtacctgggcatcgtgctggcggccgtggtgatcatcactggctgcttctcctactaccaggaggccaagagctccaagatcatggagtccttcaagaacatggtgccccagcaagccctggtgatccgggaaggtgagaagatgcaggtgaacgctgaggaggtggtggtcggggacctggtggagatcaagggtggagaccgagtgccagctgacctgcggatcatctcagcccacggctgcaaggtggacaactcctccctgactggcgaatccgagccccagactcgctctcccgactgcactcacgacaaccccttggagactcggaacatcaccttcttttccaccaactgtgtggaaggcacggctcggggcgtggtggtggccacgggcgaccgcactgtcatgggccgtatcgccaccctggcatcagggctggaggtgggcaagacgcccatcgccatcgagattgagcacttcatccagctcatcaccggcgtggctgtcttcctgggtgtctccttcttcatcctctccctcattctcggatacacctggcttgaggctgtcatcttcctcatcggcatcatcgtggccaatgtcccagagggtctgctggccactgtcactgtgtgtctgacgctgaccgccaagcgcatggcccggaagaactgcctggtgaagaacctggaggctgtagaaaccctgggctccacgtccaccatctgctcagataagacagggaccctcactcagaaccgcatgacagtcgcccacatgtggtttgacaaccagatccacgaggctgacaccactgaggaccagtcagggacctcatttgacaagagttcgcacacctgggtggccctgtctcacatcgctgggctctgcaatcgcgctgtcttcaagggtggtcaggacaacatccctgtgctcaagagggatgtggctggggatgcgtctgagtctgccctgctcaagtgcatcgagctgtcctctggctccgtgaagctgatgcgtgaacgcaacaagaaagtggctgagattcccttcaattccaccaacaaataccagctctccatccatgagaccgaggaccccaacgacaaccgatacctgctggtgatgaagggtgcccccgagcgcatcctggaccgctgctccaccatcctgctacagggcaaggagcagcctctggacgaggaaatgaaggaggccttccagaatgcctaccttgagctcggtggcctgggcgagcgcgtgcttggtttctgccattattacctgcccgaggagcagttccccaagggctttgccttcgactgtgatgacgtgaacttcaccacggacaacctctgctttgtgggcctcatgtccatgatcgacccaccccgggcagccgtccctgacgcggtgggcaagtgtcgcagcgcaggcatcaaggtcatcatggtcaccggcgatcaccccatcacggccaaggccattgccaagggtgtgggcatcatctttgagggcaacgagactgtggaggacatcgccgcccggctcaacattcccgtcagccaggttaacccccgggatgccaaggcctgcgtgatccacggcaccgacctcaaggacttcacctccgagcaaatcgacgagatcctgcagaatcacaccgagatcgtcttcgcccgcacatccccccagcagaagctcatcattgtggagggctgtcagagacagggtgcaattgtggctgtgaccggggatggtgtgaacgactcccccgctctgaagaaggccgacattggggtggccatgggcatcgctggctctgacgtctccaagcaggcagctgacatgatcctgctggacgacaactttgcctccatcgtcacaggggtggaggagggccgcctgatcttcgacaacctaaagaagtccattgcctacaccctgaccagcaatatcccggagatcacgcccttcctgctgttcatcatggccaacatcccgctgcccctgggcaccatcaccatcctctgcatcgatctgggcactgacatggtccctgccatctcactggcgtacgaggctgccgaaagcgacatcatgaagagacagcccaggaacccgcggacggacaaattggctgaggagccaatggggcgaagctaccatctgtgggattatgactgaacgcctctaagtcagaatcccgcccaggcggaacgatacggcagcgccgcggagcctcggttggcctcggatagccggtcccccgcctgtccccgccggcgggccgccccccccctccacgcgccccgcgcgcgcgggagggcgcgtgccccgccgcgcgccgggaccggggtccggtgcggagtgcccttcgtcctgggaaacggggcgcggccggaaaggcggccgcaagctta

SEQ ID NO: 437 - DNA, 6415 bp, Homo sapiens
  CDS (145)..(5307)
agtccccaatgagtcgtacgcctgtggtaccggcccggaattcccgggtcgacgatttcgtccgggcttgaggttgaattaagaatagtcaggtggtgagtggaacgtctcttggggtgtcggaattcaaaacggacctggaggatgttgatctccaagaacatgccctggcggcggctgcagggcatttccttcgggatgtattcggctgaagagctcaagaaattaagtgttaaatccattacgaaccctcgatacctggacagcctggggaacccatcggcaaacggcctgtacgatttagctttgggccctgcagattccaaagaggtgtgctccacctgcgtgcaggacttcagcaactgttctgggcacctgggccacattgagctcccactcacagtgtataaccctctcctcttcgataagctgtacctgctgcttcggggctcttgtttaaactgccacatgctgacttgtccccgggccgtgattcacctcttactctgccagctgagggttctggaagtcggggccctacaagcagtctacgagcttgagagaattctgaacaggtttctggaagaaaatgccgatccctctgcctctgaaattcgggaggaattagaacaatacacaactgaaattgtgcagaacaacctcctggggtcccagggcgcacatgtaaagaacgtgtgtgagagcaagagcaagctcattgctctcttctggaaggcacatatgaatgctaagcgctgtccccactgcaagaccgggcgatccgttgtccgaaaggaacacaacagcaagttgactatcacatttccagccatggtgcacaggacagctggccagaaggactctgagcccctgggaattgaggaagctcagataggaaaacgaggatacttaacacccaccagtgcccgcgaacacctttctgccctgtggaagaatgaaggattctttctgaactaccttttttcgggaatggatgatgatggtatggaatccagattcaatcccagtgtgttctttctagatttcttggtggtgccgccctcaaggtatcgcccagtcagtcgcctaggagaccagatgtttactaatggccagacggtgaacttgcaggctgtcatgaaggatgtagttctgattcgaaaacttctggcattgatggcccaagaacagaagttgccagaggaagtggccacacccactacagatgaggaaaaagactctttgattgctattgaccgatcctttttgagtacacttccaggccagtccctcatagacaaactttacaacatttggattcgccttcagagccacgtcaatattgtgtttgatagcgagatggacaaactaatgatggacaagtacccaggcattaggcagatcctggagaagaaagaaggcctgttccgaaaacacatgatgggaaagcgagtggactacgctgcgcgctcagtcatctgcccagacatgtacatcaacaccaacgaaattggaattcccatggtgtttgccacaaaactgacctacccacagccagttaccccatggaatgttcaggaacttaggcaagcggtcatcaacggccctaatgtgcacccaggagcctccatggtcatcaatgaggacggcagccgcacagccctgagcgctgtggacatgacccagcgagaggccgtggccaagcagcttctgaccccagccacgggggcacctaagccccaggggacaaaaattgtgtgccggcatgtgaagaatggggacattctgctactgaaccgacagcccacactgcacagaccctccatccaggcccaccgtgcccgcatcctgcctgaagagaaagtgctgcggctccactatgccaactgcaaggcctataatgccgactttgatggagacgagatgaatgcccatttcccccagagtgagctgggccgggccgaggcctacgtcctggcctgcactgatcagcagtaccttgttcccaaggatggccaaccattggcgggactgatccaggatcacatggtttcaggggcaagcatgactactcggggttgctttttcacccgggagcactatatggagctggtgtaccgaggactcacggacaaagtggggcgcgtgaagctcctttctccttccatcctgaagccctttccgctgtggacaggaaaacaggttgtgtcaacgctgctcataaatataatcccagaggaccacatcccactgaacttatctggaaaggcgaaaatcactgggaaagcctgggtgaaggaaactcctcgatccgttcctggctttaaccctgactcgatgtgcgagtcccaggtgatcatcagggaaggggagctgctctgcggagtgctggacaaggcgcactatgggagctccgcctacggcctggtccactgctgctatgagatctatggaggcgagaccagcggcaaggttctaacctgcctggcccgcctcttcaccgcctacctgcagctctacagaggcttcaccttgggcgtggaagacattttggtgaagccaaaggcagatgtcaagaggcaacgtatcattgaagaatccacccactgcgggccccaggctgtcagggctgcattaaacctgccagaagccgcatcatatgatgaggtccgaggaaaatggcaggatgcccatctgggcaaggaccagagggattttaacatgattgatctgaagttcaaggaggaagtgaaccattacagcaatgagattaacaaggcatgcatgccttttggcctacacagacagttcccagagaacacgctgcagctgatggtgcagtcgggagccaaaggttcaactgtgaacacgatgcagatctcgtgcctgctgggccagattgaactggaaggtcggagcaccccgctgatggcgtctggcaagtcactgccctgctttgagccttatgagttcacccccagggctggtggctttgtcactggcaggttcctcaccggcatcaaacctcctgagttcttcttccactgcatggcaggacgagagggcctggtggacactgctgtgaaaaccagccgctcaggctatctccaaaggtgcatcatcaagcacctagaggggctggtcgtgcagtatgatctcacggtccgtgacagtgacggcagtgtggtgcagttcctgtatggggaggatggcctggacatccccaagacacagttcctgcagcccaagcagttccccttcctggccagcaactacgaggtgataatgaaatcacagcatctccatgaagttttatccagagcagatcccaaaaaagctctccaccacttcagagctatcaaaaaatggcaaagcaagcaccccaacaccctgctgagaagaggcgccttcttgagttattcccagaaaattcaggaagctgtgaaagccctgaaacttgagagtgaaaaccgcaatggccgcagaccctgggactcagggaggatgctgaggatgtggtatgagttggatgaggaaagccgaaggaaataccagaagaaggcggccgcttgtcctgaccccagtctgtctgtctggcgtcctgacatctactttgcatcagtgtcagaaacatttgaaacaaaggttgatgactacagtcaagagtgggcagctcaaacagagaagagttatgagaaatcagagctttctctcgacaggttgaggaccttgctgcagctgaagtggcagcgctcactgtgtgagccgggcgaggctgtgggcctgctggctgcccagagcatcggagagccctccacccagatgaccctcaacaccttccactttgcaggcagaggcgagatgaacgtcaccctgggcattccaaggttgcgggagattctcatggtggccagcgccaacatcaagacacccatgatgagcgtgcccgtgctcaacaccaagaaagccctgaagagagtgaaaagcctgaagaagcaactcaccagggtgtgcttgggggaggtgttgcagaaaattgacgtccaggagtccttctgtatggaagaaaaacagaacaaattccaggtgtaccagctgcggtttcagttcctgccacatgcatattaccagcaggagaagtgcctgagacccgaggacatcctgcgcttcatggaaacaagattctttaaacttctgatggaatccatcaaaaagaagaataataaagcatcagctttcaggaacgtaaacactcgaagagctacacagcgggatctggacaacgctggggagttggggaggagtcggggagagcaggagggtgatgaggaagaggaggggcacattgtggatgctgaagctgaggagggagacgccgatgcctctgatgccaaacgcaaggagaagcaggaggaggaggttgattatgagagtgaggaagaggaggagagggagggcgaggagaacgacgatgaagacatgcaggaggaacgaaatccccacagggaaggtgctcgaaagacccaagagcaagatgaagaggtgggcttaggcactgaggaggacccgtcccttcccgccctcctgacgcagccccggaaacccacccacagccaggagccccaggggcccgaggccatggagcgccgggtccaggctgtgcgtgagatccacccgttcatagatgactaccagtacgacaccgaggagagcctgtggtgccaggtgacagtgaagctccctctgatgaagatcaactttgacatgagctccctggtagtatctttggcccatggtgccgtcatctatgcgaccaagggcatcactcggtgcctcctgaatgaaacaaccaacaataagaacgagaaggagcttgtgctaaacacagaaggaatcaacctcccagagctattcaagtatgcagaggtcctggatctgcgccgcctctactccaacgacatccacgccatagccaacacgtatggcattgaggccgcgctgcgggtgatcgagaaggagatcaaggatgtgtttgccgtgtatggcatcgcggtcgaccctcgccatctctccctggttgctgattatatgtgcttcgagggtgtttacaagccactgaatcgctttgggatccggtcaaactcttccccgctacagcagatgacatttgaaaccagcttccagtttctgaagcaagccaccatgctgggatcccacgatgagctgaggtctccttctgcctgccttgtggtcgggaaggtcgtcaggggcgggacaggcctgttcgagctcaagcagcctctgagatagcagctaccccggcaccatctgcccagctccaaggacccttggtgagggcgtggcccagcctgccttctgcatgagaggaccaggagactggaatccagggcagttccaagtgacagtacagagcacagcagcgaccttgggcctgaaagcagtgggcctctgagctgggccagcttcacctggaaagtgacagagttgctcatccttgcccctccctgtctctggatttttatcaaggtttaccaagtcttctgagtccccctgagatggctggggcttcacctgtgctgcaggaggcctctgtggcataacccctaaggagaagtcctgattcacgattcactgagaagaccaaggggaagccatgctttgctgctggggaccccaggcacctccagagtagggaagcggggttcttttgctgtgagtggccagggacaacagacaagattcctgggggctcccgatgagcaggaacgtggagcctgctgcccaaggcctgctccttccggctgctccagcccctgggggcagagtccacaaagagtccccatcaagacttcttccctgagtcaagtacagcgtagcatagtcctccacccacccaacctctctgcctggccagggtcctggccctgccactgtgtggcgaggtgtccttctagaccacatcagccccaaggctgggagcagtcgctccagggccgcagcagttcactcccacacatagaacccaggtcactgctggggcgattgaacaggttgcctggcttttctctgctgtcagtttggtgtggaggcctatgttctgccccatacaccccacaggccctgcttatgggaaggaacacaggcctccagcccagaggactgtgccgccctgttcttggccgtccacgtttcctctccctctagcaccagcaatacatttccctggcatggacagaaaagacagagaggacttatacaaaggctttgtaaaaccagaggctagcttctatctttgtctactgttatttcagctcagggcgggtaattaacatcattggaactagctattaggaaagaaaaaaaacttggttttttttacaacaaaaaaaaaaaa

SEQ ID NO: 438 - DNA, 6315 bp, Homo sapiens
  CDS (27)..(2402)
ccgtcaggggggcaccgcggagcaagatggaagagaagaggcgaaaatactccatcagcagtgacaactctgacaccactgacagtcacgcgacatctacatccgcatcaagatgctccaaactgcccagcagcaccaagtcgggctggccccgacagaacgaaaagaagccctccgaggttttccggacagacttgatcacagccatgaagatcccggactcataccagctcagcccggatgactactacatcctggcagacccatggcgacaggaatgggagaaaggtgtgcaggtgcctgccggggcagaggccatcccagagcccgtggtgaggatcctcccaccactggaaggcccccctgcccaggcatccccgagcagcaccatgcttggtgagggctcccagcctgattggccagggggcagccgctatgacttggacgagattgatgcctactggctggagctcatcaactcggagcttaaggagatggagaggccggagctggacgagctgacattagagcgtgtgctggaggagctggagaccctgtgccaccagaatatggccagggccattgagacgcaggaggggctgggcatcgagtacgacgaggatgttgtctgcgacgtgtgtcgctctcctgagggcgaggatggcaacgagatggtcttctgtgacaagtgcaacgtctgtgtgcatcaggcatgctacgggatcctcaaggtgcccacgggcagctggctgtgccggacgtgtgccctgggtgtccagccaaagtgcctgctctgccccaagcgaggaggagccttgaagcccactagaagtgggaccaagtgggtgcatgtcagctgtgccctatggattcctgaggtcagcatcggctgcccagagaagatggagcccatcaccaagatctcgcatatcccagccagccgctgggctctgtcctgcagcctctgcaaggaatgcacaggcacctgcatccagtgttccatgccttcctgcgtcacagcgttccatgtcacatgcgcctttgaccacggcctggaaatgcggactatattagcagacaacgatgaggtcaagttcaagtcattctgccaggagcacagtgacgggggcccacgtaatgagcccacatctgagcccacggaacccagccaggctggcgaggacctggaaaaggtgaccctgcgcaagcagcggctgcagcagctagaggaggacttctacgagctggtggagccggctgaggtggctgagcggctggacctggctgaggcactggtcgacttcatctaccagtactggaagctgaagaggaaagccaatgccaaccagccgctgctgacccccaagaccgacgaggtggacaacctggcccagcaggagcaggacgtcctctaccgccgcctgaagctcttcacccatctgcggcaggacctagagagggttagaaatctgtgctacatggtgacaaggcgcgagagaacgaaacacgccatctgcaaactccaggagcagatattccacctgcagatgaaacttattgaacaggatctgtgtcgagcaggcctgtccacctcattccccatcgatggcaccttcttcaacagctggctggcacagtcggtgcagatcacagcagagaacatggccatgagcgagtggccactgaacaatgggcaccgcgaggaccctgctccagggctgctgtcagaggaactgctgcaggacgaggagacactgctcagcttcatgcgggacccctcgctgcgacctggtgaccctgctaggaaggcccgaggccgcacccgcctgcctgccaagaagaaaccaccaccaccaccaccgcaggacgggcctggttcacggacgactccagacaaagcccccaagaagacctggggccaggatgcaggcagtggcaaggggggtcaagggccacctaccaggaagccaccacgtcggacatcttctcacttgccgtccagccctgcagccggggactgtcccatcctagccacccctgaaagccccccgccactggcccctgagaccccggacgaggcagcctcagtagctgctgactcagatgtccaagtgcctggccctgcagcaagccctaagcctttgggccggctccggccaccccgcgagagcaaggtaacccggagattgccgggtgccaggcctgatgctgggatgggaccaccttcagctgtggctgagaggcccaaggtcagcctgcattttgacactgagactgatggctacttctctgatggggagatgagcgactcagatgtagaggccgaggacggtggggtgcagcggggtccccgggaggcaggggcagaggaggtggtccgcatgggcgtactggcctcctaactcacccccttccctgtcccaggccctgccctggtccccccacaaggcctcagcccagtcacaactgccatttccagtctctgctgagtgtcccagaccctcgaggctgccactccgtcgtggttttatttttaatatagagagagttttgaattctacactgttgtctttcctctgtgctggcctaggacattaggattccttccacggctccggccgctaggaccctgccaggtcccgcgcaccatccctgccctgcccacgtggtattgctgggctcctggctagatgcaagcaaggtggacaagagctcaggactccagcccactgccactgggtgacacagactgtcgtttgggcattatttcatggcagatgggccagtccagggcctaccccgccttgcccccagatcccactggggtccatttggggggtcctgctacactccaccgatccccaaggaagtataataaacgatacccagccagagtctactcactgtcacaagcacaacgagtttatatgagaaagcactgagggggtgcagagggcccgctagttccaggggaactgaaagctgttcctgatcagcccgtatcatctgaggcctgcctgcccaccctgccaccctcccctcccttgctgctctgcccctgccagtgcccagcccagcggctctgggaaggggttcccagaatccctcctgagctgtgccatttactcaggggactcccaaacagccagctgccagtgcaggtggagggctgtaggggagggccagtgcccagacagggtcatggggctcagaccagcccactgtagagaatcactctgaggctccaacttccttccttccttcggggccagtctcggccgaagtctggtcacgctcagacagagctgaccagaccagaccgtttgccttttcaagtttcctagtcctgctacaagatgagcttcttccgtggtttccttttggaaactcctccttccaacaagcagtgggatcccggggcccagggcgggccggtgttggccgctggggctgttgtaagtcttgctggatgttcccctgttcctgagccttaacccctcgcacagccatcccccccccccgtcctgccatccccccccgccgtcctgccttccccaccccacccttaggtcccaggtagttgctctgaagagtttcagtagagtggccccagggtgatagctcagggaacaacaaaaaaggaattccgtgaaaacatttttttttctttgatgaattactcctgggtcacttccaccactggtaaagccagaacttctccaaaaagaaccttgcaaaaagtccagtgaatcagtcgaatcattctgtggatgccaaagaatattttgaccataatacagcacagcctggacctgacaacttgtcatttggacttttttttaaatggagttctttagcaacaaagtatagaaacatgttcattgcacacacccaaggagaagagctcaagcgcttggaagaggatgctttgctgctgctgaagtgtacctgggtgttagatttcagatcctgggctgagcccactgtgagctttcctaaactgtgagactcacagaggggaaagatactgacggtgaaaccagcatggaaaacgtctttaccatgtggttccctcctccccaaatacataaagcaaataagcaggatggggaacagcttgaccttcatccacccctaactccaaaactatcaaggtacgacagtggcattgtcatcgacactcaatttcatgtgaattttagcaaaacaggaaacaaagataatgactcagttcagaggatcggacaaatgtgtctagtccgggtggactcggagggagtggggtgggcttcaaggattctgggcgttgggatggcatgagctaccctgtagagtttagtctgcctgcccgccttggtagtagtgaccagtcagtgtcagcatcagtgtcccaaccccagtctctgtttactgcctttgaacagaacttcttccttccccatgctttgggtcacctcgggctgcaaccctgtctgtgccagattgcccggtctgaccctgcaggaagcaaagaggtgagcttaaagaacaaccaaactctgccaggggtcccagaaagcccagggtccagcagtctcagcacttggccccttgccccttcacaccatcctggggcaggggctgggcctccctggtggcaggggtgggtggagaattagggagagggtgcaacgagtctggccccttgcctcgggctggctggtgttcttccaagagcctctgctcacattgttggcctctggattctggcccttcttcattggctgttgctttggactggactgttgctgagcctgtgtcctgcagaacccagatgtctgttaggctggctggctgctgcgaggggaggggggtggcctttcatttggggtgccctttcactcccaggccaagccctggagcaatcttcttcaggcagctgtctccacctccaggatgtccagcaggctgcaaggagaaggatgccagccacccatcctcccccagttcccagcctttcccctgttggtcacagccgcttctgtctttttccggtctactgtccccagtgtagagggctttgctgtccctgagactgaggcaggttccttttccaggtcagaggtggaggtagatctttctctcaaccacatctgcctccacacacagctcctccgcagggaaggagaagctgctctgtaactcattctggctatcgtcccccttctcactgacctgaccgcccaccacctccttccccctcatcacatgacaaaggataatgtgcaagaaaagtatttttatgtatcataaatgtattttgaaacaaatgagaagaagaaaggtagaagggtttattttattaaatgagcctgacttagtgacagtgtgtgagcatttgcaatgtaagggcctcagcttccttggagaagccaccccaggtttccagacatagatgttgaattgtttgtggggggtgtgccaggccacgtctcgtgtgtccgtatgcaggcatgcctgtgtatactgtgtatgggcacactgtgggactagctgggacaattcctagagattcaactgcccaattctaaccaacattggcagcggctgaacttggcatttccttgctaactgccagatgtggccaacctttgtccatatgcaaaccactgaaaaatgatctggatttctatagcaaggcccttggggagggcactctcccatgcccttggcctcgctggccacattggccaatgagccagggctggagtctgagacctttggttgttctttaaggcacctcctgccactttctccctcagaggcacaaacactttgtgttccacgtcagtttgaggggacggtggggggatgatatgaatgtcacaggaggagacaccttctgtctttgtttcaaagaaagtgatgtgccatttgttaatatacaagagaaatattgaaaatatattgaaaagagcaattttaaattatttttggcttatgttgcaatatttattttcttgtattagaaaagattcctttgtagagaaaaaatgtatttttcattaacgcaaagacctatttctcctttttgtacattgtccatgtgcgcaacccttaacgagcaatagaatgtatggtcacctgggtgtggccagtgcccgctgtgccctgcatgattctgtgttgccgctgctgcatagttcccagccccatcctgtcctgctcactcatgggggcttccagaccccggccccaccagggcttgtgtcatagggagccctttgcactcctcgtgtgttggcaaacgcagttaataaagcaatgttttctgtg

SEQ ID NO: 439 - DNA, 1437 bp, Homo sapiens
  CDS (990)..(1340)
gtcattcagagccaggggttgtgatggtcccctctgtgtccactgtccccagcacagggtccagcacaccacagtgggtagcaaatgctatttaaatgagatgggatgaaattcccttccttcactttcttcacctcaaggtaaggaccatgttcctgtttccatcattccctgtccttctcctgtctgtggtgacagcttcctgctccaaaacaaaagcctgtgcagatacccagaagacctgctccatgattacctgtggcatccccgtcaccaatggcaccccaggcagagatgggcgagatagacccaagggggaaaagggagagccaggtctgggacaggtttctgtggcttcctaaatctccacctccggcaggtgttcaagcaaatctgtgcttgagcctgccacacgagggttaaagcacagacttggggaggctcccctttcatcaggacccatgctacactcagaacaacccctgtaaaatgccattgcctccaaaacaaagctgttcgtggactctctgggatcccatatttccacacaggaactgggggtgtgtggttgtcccttcagaggggtgtcctgcctggttggggagctggccttggtgcaggccctccactaggttgcaggagagtctttcttctttgggtcagatcactggctcattggctgtgccgggggtgaacaggaatggagcattgagcttttgggaaaaaaaaaaagagtgacagccactgggtcatcttccctttgtcttgcaacaggtcaagggctcagaggtttgcagggccctcctgggaagatggggcccccaggaaacacagggacttctggaattccaggacctaggggccaaaaaggagatcgtggggacaattcagttgctgaggctaagctggccaacttagagagaaagctatagagcctgagatcagaactggaccacacgaagaagctgtaagccttctccttggggaaaatgtctgggaagaagcttttcgtgaccaatggtgagcggatgcctttctccaaagtgaaggctctgtgtgctgggctccaggccacagtggctgcccccaagaatgccgaggagaataaggccatccaggatgtggccaaagacactgccttcctgggcatcacagatgaggcaactgaaggccagttcatgtacttgacgggcgggaggctgacctacagcaactggaagaaggatgagccaaatgaccacggctcaggggaggactgcgttattctcctgaacaatgggctctggaatggcatctcctgcacctcctccttcattgccatctgtgagtttcctgcctgaagaggcacgttcctcagccccctccttgcctccctgctgaactctctgctgctttggaagagaattcaatgttggttttcttcaaaaaaaaaaaaaa

SEQ ID NO: 440 - DNA, 2189 bp, Homo sapiens
  CDS (289)..(1806)
caccgctccgtaattcccgggtcgacgatttcgtgtgccggggtttaagggccaggaaaggaagcattcagggaatttaggtgtagccagaagaaaatcaggtcctggctccccagaagcaagagagttcaagtgaaggaaggaggaggttcctggatgtggatgtcatcatttctgggaacactcttaaatggagactcagatttcttagccaaaatttagggaggatccagaagaaaccaaagacgaagcatcccagttcttgggtatttcctgaaacagaagaaaatgacaaaggcccaggaatcactgaccctggaggatgtggctgtggacttcacctgggaggagtggcagttcctgagccctgctcagaaggacctgtaccgggatgtgatgttggagaactacagcaaccttgtgtcagtggggtatcaagccggcaaacctgatgccctcaccaagttggaacaaggagaaccactatggacactagaagatgaaatccacagtccagcccacccagaaattgagaaagctgatgatcatctgcagcagcccttgcaaaaccaaaaaatactgaagaggacgggacaacgctatgaacacggaagaactttgaaatcatatttaggtttaaccaaccagagcagaagatacaacagaaaggagcctgctgagtttaatggagatggagcttttctccatgataatcatgaacaaatgcctacggaaattgaattccctgaaagtagaaaacccatcagcaccaagtcacaattccttaaacatcagcaaacacacaacatagagaaagcccatgaatgcactgactgtgggaaagctttcctcaagaagtctcagctcactgagcataagagaattcatacaggaaagaaaccccacgtgtgtagcttgtgtgggaaagccttctacaagaagtacaggctcactgaacacgagagagctcacagaggagagaaaccccacgggtgtagcttgtgtgggaaagccttctacaagaggtacaggctcactgaacacgagagagctcacaaaggagagaaaccatacgggtgcagtgaatgtgggaaagccttccccaggaaatctgagcttactgaacatcaaaggattcacacgggaattaagccccatcaatgcagcgaatgtgggagagctttctccagaaaatcactactcgttgtacatcagcgaactcatacaggagagaagcctcatacatgcagtgaatgtggaaaaggcttcattcagaagggcaatctcaacatacatcaacgaactcacactggagagaaaccttatggatgcattgactgtggcaaggccttcagccagaagtcttgccttgtagcacatcagagatatcatacaggaaagactccctttgtatgtcctgaatgtgggcaaccctgttcacagaagtcaggactcattagacatcagaaaattcactcaggagagaaaccctataaatgcagtgactgtgggaaagccttccttacaaagacaatgctcattgtacatcacagaactcacacgggagagagaccctatggctgtgatgagtgtgagaaagcttacttctatatgtcttgccttgttaaacataagagaatacactcaagggagaaacggggggattcagtgaaggtggaaaatccttccacagcaagtcacagcttaagtcctagtgaacatgtgcaggggaaaagccctgttaatatggtaactgtggcaatggtggcagggcagtgtgagtttgcccacatcctgcattcatgataaacagtttgctgtttgatcatatagcctccagcggaatgctgagtttgtcatgtcccatgggcctttggctccctgcactaatatgtatagtagggtttacaagatatgaaatatattttacttttttatatcttataaacctcactacccctcccacaatattgtttttcatttactatcttgatcatagagtttggctggggaggggggcagttttaaaggcttccacttggtgttcctcagaatgatatctcttactccgggggccaaggtaggggttagcttttgttctctttgtagtttagattgtatctcttgccttgttcaagttcccaaatctttttgtgtatacacatatgtacatgaaaaaaaaaaaaaaa

SEQ ID NO: 441 - DNA, 1663 bp, Homo sapiens
  CDS (292)..(1509)
ccagcccccctcagctcggggctggggacccatctcaagtggggcatgctgtactttgcggatcagtaatcgcacggagctcttcttggggattttgtcctcttcggcatcggtgctgtctgtggcgaatgctttgacctcaaagtcaaccccacaggacttccctgaatcttgtggagctggctgcaacatcactgaacagagcatagagaccctctccttgccacccggcccttcccacctggttggtgacaaatcacaaggtggtagaagttgccagggacagataacatggcagccagcgggaagaccagcaagtccgaaccgaaccatgttatcttcaagaagatctcccgggacaaatcggtgaccatctacctggggaacagagactacatagaccatgtcagccaagtccagcctgtggatggtgtcgtgttggttgatcctgatcttgtgaagggaaagaaagtgtatgtcactctgacctgcgccttccgctatggccaagaggacattgacgtgatcggcttgaccttccgcagggacctgtacttctcccgggtccaggtgtatcctcctgtgggggccgcgagcacccccacaaaactgcaagagagcctgcttaaaaagctggggagcaacacgtacccctttctcctgacgtttcctgactacttgccctgttcagtgatgttgcagccagctccacaagattcagggaagtcctgtggggttgactttgaggtcaaagcattcgccacagacagcaccgatgccgaagaggacaaaatccccaagaagagctccgtgcgattactgatccgcaaagtacagcatgccccacttgagatgggtccccagccccgagctgaggcggcctggcagttcttcatgtctgacaagcccctgcaccttgcggtctctctcaacaaagagatctatttccatggggagcccatccctgtgaccgtgactgtcaccaataacacagagaagaccgtgaagaagattaaagcattcgtggaacaggtggccaatgtggttctctactcgagtgattattacgtcaagcccgtggctatggaggaagcgcaagaaaaagtgccaccaaacagcactttgaccaagacgctgacgctgctgcccttgctggctaacaatcgagaaaggagaggcattgccctggatgggaaaatcaagcacgaggacacaaaccttgcctccagcaccatcattaaggagggcatagaccggaccgtcctgggaatcctggtgtcttaccagatcaaggtgaagctcacagtgtcaggctttctgggagagctcacctccagtgaagtcgccactgaggtcccattccgcctcatgcaccctcagcctgaggacccagctaaggaaagttatcaggatgcaaatttagtttttgaggagtttgctcgccataatctgaaagatgcaggagaagctgaggaggggaagagagacaagaatgacattgatgagtgaagatgtcggctcaggatgccggaaaatgacctgtagttaccagtgcaacgagcaaagccccacagtttagtcctttggagttatgctgcgtatgaaaggatgagtcttcttccgagaaataaagcttgtttgttctcccctgaaaaaaaaaaaa

SEQ ID NO: 442 - DNA, 1977 bp, Homo sapiens
  CDS (259)..(1611)
accggtccggaattcccgggtcgacccacgcgtccgcccacgcgtccgacgaccacgggccggaaggctgccaggcccagtgggcaagcgaagaaatgaaccaccgcaacgcgggcgcttcggggcggggccgagtgcgaacctgagccccaaatcccgacccaggcaggggcggggcccggagcggggccttggaggcccagcccgcgcggcgacgtctccgcgtggcgtcacggcaccgactgacggccacccaccatggccgcagaccagcgcccgaaggccgacacgctggccctgaggcaacggctcatcagctcttcctgcagactcttttttcccgaggatcctgttaagattgtccgggcccaagggcagtacatgtacgatgaacagggggcagaatacatcgattgcatcagcaatgtggcgcacgttgggcactgccaccctctcgtggtccaagcagcacatgagcagaaccaggtgctcaacaccaacagccggtacctgcatgacaacatcgtggactatgcgcagaggctgtcagagaccctgccggagcagctctgtgtgttctatttcctgaattctgggtcagaagccaatgacctggccctgaggctggctcgccactacacgggacaccaggacgtggtggtattagatcatgcgtatcacggccacctgagctccctgattgacatcagtccctacaagttccgcaacctggatggccagaaggagtgggtccacgtggcacctctcccagacacctaccggggcccctaccgggaggaccaccccaacccagctatggcctatgccaacgaggtgaaacgtgtggtcagcagtgcacaggagaagggcaggaagattgcagccttcttcgctgagtctctgcccagtgtgggagggcagatcattccccctgctggctacttctcccaagtggcagagcacatccgcaaggccggaggggtctttgttgcaaatgagatccaggttggctttggccgggtaggcaagcacttctgggccttccagctccagggaaaagacttcgtccctgacatcgtcaccatgggcaagtccattggcaacggccaccctgttgcctgcgtggccgcaacccagcctgtggcgagggcatttgaagccaccggcgttgagtacttcaacacgtttgggggcagcccagtgtcctgcgctgtggggctggccgtcctgaatgtcttggagaaggagcagctccaggatcatgccaccagtgtaggcagcttcctgatgcagctcctcgggcagcaaaaaatcaaacatcccatcgtcggggatgtcaggggtgttgggctcttcattggtgtggatctgatcaaagatgaggccacaaggacaccagcaactgaagaggctgcctacttggtatcaaggctgaaggagaactacgttttgctgagcactgatggccctgggaggaacatcctgaagtttaagcccccaatgtgcttcagcctggacaatgcacggcaggtggtggcaaagctggatgccattctgactgacatggaagagaaggtgagaagttgtgaaacgctgaggctccagccctaagccagccctgctctgcctaagtgtactccagaagaaactcatctcatccaaatacacgctattgagaaggcgagcctgacctccctcttacagataaagtcagctttcagaggctcagggtgggggggcctgcccgaggccataatgctacccaccccctcctcctaaccactggtctgttggaataacccagatgtctgcatcccctcaagtcagtcaatttcctttctgtccactgggggtggaatggggtagggtgggatactttaaagtgctcctgcttaaataaattagaccagaccagtgtatttctaaagaaaatcctgacatgcacacccattaaaaatagtacattttacagtgaaa

SEQ ID NO: 443 - DNA, 1570 bp, Homo sapiens
  CDS (73)..(1245)
  misc_feature (1)...(1570): n = a,t,c or g
gtctcgcagtacctgtccggaattcccgggtcgacgatttcgtgacggtttcaggcctccggtgcggctgcaatgctgagctcccgggccgaggcggcgatgaccgcggccgacagggccatccagcgcttcctgcggaccggggcggccgtcagatataaagtcatgaagaactggggagttataggtggaattgctgctgctcttgcagcaggaatatatgttatttggggtcccattacagaaagaaagaagcgtagaaaagggcttgtgcctggccttgttaatttagggaacacctgcttcatgaactccctgctacaaggcctgtctgcctgtcctgctttcatcgggtggctggaagagttcacctcccagtactccagggatcagaaggagcccccctcacaccagtatttatccttaacactcttgcaccttctgaaagccttgtcctgccaagaagttactgatgatgaggtcttacatgcaagctgcttgttggatgtcttaagaatgtacagatggcagatctcatcatttgaagaacaggatgctcacgaattattccatgtcattacctcgtcattggaagatgagcgagaccgccagcctcgggtcacacatttgtttgatgtgcattccctggagcagcagtcagaaataactcccaaacaaattacctgccgcacaagagggtcacctcaccccacatccaatcactggaagtctcaacatccttttcatggaagactcactagtaatatggtctgcaaacactgtgaacaccagagtcctgttcgatttgatacctttgatagcctttcactaagtattccagccgccacatggggtcacccattgaccctggaccactgccttcaccacttcatctcatcagaatcagtgcgggatgttgtgtgtgacaactgtacaaagattgaagccaagggaacgttgaacggggaaaaggtggaacaccagaggaccacttttgttaaacagttaaaactagggaagctccctcagtgtctctgcatccacctacagcggctgagctggtccagccacggcacgcctctgaagcggcatgagcacgtgcagttcaatgagttcctgatgatggacatttacaagtaccacctccttggacataaacctagtcaacacaaccctaaactgaacaagaacccagggcctacactggagctgcaggatgggccgggagccccacaccagttctgaatcagccaggggcccccaaaacacagatttttatgaatggcgcctgctccccatctttattgccaacgctgtcagcgccgatgcccttccctctcccagttgttcccgactacagctcctccacatacctcttccggctgatgggcagttgtcgtccaccatgggagacatggcactctgggacactttgttcatttaccgacggtccccacctttttgccaggggaaccntcttttcaattaggcantcagttggctgttgggttttccgatggacattgttccgnaaggccaggcttgcagggaggtctcgttcnttccagcg

SEQ ID NO: 444 - DNA, 2183 bp, Homo sapiens
  CDS (291)..(1805)
ccggtccggaattcccgggtcgacgatttcgtctgtaactgctcctcactgcgttacccagtaatgcgctgatcgggggagggggcgggggggccggggagcgagcgggagagcgagccgacttggaaatgtgaacgcaagaagcaggcttgatttttttttctccccccttctctctctctctctctctctctcttcctctctccctctttctcctctctcacccacactcacgcacacctccaaaccgcacacccagacgcacacgcataccccagcgcccggcagttatgtattctccgctctgtctcacccaggatgaatttcatcctttcatcgaagcacttctgccccacgtccgagcctttgcctacacatggttcaacctgcaggcccgaaaacgaaaatacttcaaaaaacatgaaaagcgtatgtcaaaagaagaagagagagccgtgaaggatgaattgctaagtgaaaaaccagaggtcaagcagaagtgggcatctcgacttctggcaaagttgcggaaagatatccgacccgaatatcgagaggattttgttcttacagttacagggaaaaaacctccatgttgtgttctttccaacccagaccagaaaggcaagatgcgaagaattgactgcctccgccaggcagataaagtctggaggttggaccttgttatggtgattttgtttaaaggtattccgctggaaagtactgatggcgagcgccttgtaaagtccccacaatgctctaatccagggctctgtgtccaaccccatcacataggggtttctgttaaggaactcgatttatatttggcatactttgtgcatgcagcagattcaagtcaatctgaaagtcccagccagccaagtgacgctgacattaaggaccagccagaaaatggacatttgggcttccaggacagttttgtcacatcaggtgtttttagtgtcactgagctagtaagagtgtcacagacaccaatagctgcaggaactggcccaaatttttctctctcagatttggaaagttcttcatactacagcatgagtccaggagcaatgaggaggtctttacccagcacatcctctacgagctccacaaagcgcctcaagtctgtggaggatgaaatggacagtcctggtgaggagccattttatacaggccaagggcgctccccaggaagtggcagtcagtcaagtggatggcatgaagtggagccaggaatgccatctccaaccacactgaagaagtcggagaagtctggtttcagcagcccctccccttcacagacctcctccctgggaacggcgttcacacagcatcaccgacctgtcattacaggacccagagcaagtccacatgcaacaccatcgactcttcatttcccgacatcacccattatccagcagcctgggccttacttctcacacccagccatccgctatcaccctcaggagacgctgaaagaatttgtccaacttgtctgccctgatgctggtcagcaggctggacagcccaatgggagcagccaaggcaaggtgcacaacccattccttcccaccccaatgttgccaccgccaccgccaccaccgatggccaggcctgtgcctctgccggtgccagacacaaagcctccaaccacgtcaacagaaggaggtgcagcctcccccacgtcaccaacctactcgacacccagcacctcccccgcaaaccgattcgtcagtgttggaccacgggatccaagctttgtaaatatccctcaacagacacagtcctggtacctgggataaaagttgcagcgtcccaccatccaccagacagaccacctgatcccttctcaactctgtaacatggacgcaacctcaacccagcgcagttacaacttcactatcagcggaaggggagaaaaaccgattcaaatcaacttgtacatggaaacagcaagcattatggtcaaacagcaaaggccataaccttttgggatttttttttttttaaaatactttagggactgttggtattctcatatggtgctggaaatggttgggctttggaacatttgaagtgtttccatgtagcgtgcatttaaggtacgtggctagggaggactaccctgctcactgacttctgttgtacaactttcttacggaccggctgtttcaagtaga

SEQ ID NO: 445 - DNA, 2106 bp, Homo sapiens
  CDS (265)..(2067)
acgggcaccctcactgaggacggcttagacgtgatgggggtggtgcccctgaaggggcaggcattcctgcccctggtcccagagcctcgccgcctgcctgtggggcccctgctccgagcactggccacctgccatgccctcagccggctccaggacacccccgtgggcgaccccatggacttgaagatggtggagtctactggctgggtcctggaggaagagccggctgcagactcagcatttgggacccaggtcttggcagtgatgagacccccactttgggagccccagctgcaggcaatggaggagcccccggtgccagtcagcgtcctccaccgcttccccttctcttcggctctgcagcgcatgagtgtggtggtggcgtggccaggggccactcagcccgaggcctacgtcaaaggctccccggagctggtggcagggctctgcaaccccgagacagtgcccaccgacttcgcccagatgctgcagagctatacagctgctggctaccgtgtcgtggccctggccagcaagccactgcccactgtgcccagcctggaggcagcccagcaactgacgagggacactgtggaaggagacctgagcctcctggggctgctggtcatgaggaacctactgaagccgcagacaacgccagttatccaggctctgcgaaggacccgcatccgcgccgtcatggtgacaggggacaacctgcagacagcggtgactgtggcccggggctgtggcatggtggccccccaggagcatctgatcatcgtccacgccacccaccctgagcggggtcagcctgcctctctcgagttcctgccgatggagtcccccacagccgtgaatggcgttaaggatcctgaccaggctgcaagctacaccgtggagccagacccccgatccaggcacctggccctcagcgggcccacctttggtatcattgtgaagcacttccccaagctgctgcccaaggtcctggtccagggcactgtctttgcccgcatggcccctgagcagaagacagagctggtgtgcgagctacagaagcttcagtactgcgtgggcatgtgcggagacggtgccaatgactgtggggccctgaaggcggctgatgtcggcatctcgctgtcccaggcagaagcctcagtggtctcacccttcacctcgagcatggccagtattgagtgcgtgcccatggtcatcagggaggggcgctgttcccttgacacttcgttcagcgtcttcaagtacatggctctgtacagcctgacccagttcatctccgtcctgatcctctacacgatcaacaccaacctgggtgacctgcagttcctggccatcgacctggtcatcaccaccacagtggcagtgctcatgagccgcacggggccagcgctggtcctgggacgggtgcggccaccgggggcgctgctcagcgtgcccgtgctcagcagcctgctgctgcagatggtcctggtgaccggcgtgcagctagggggctacttcctgaccctggcccagccatggttcgtgcctctgaacaggacagtggccgcaccagacaacctgcccaactacgagaacaccgtggtcttctctctgtccagcttccagtacctcatcctggctgcagccgtgtccaagggggcgcccttccgccggccgctctacaccaatgagcgtgctagaccagtgcctccccgcctgcctgcgccgcctccggcccaagcgggcctccaagaagcgcttcaagcagctggaacgagagctggccgagcagccctggccgccgctgcccgccggccccctgaggtagtgcaggcccacgggcaccccagacactggaactccctgcctctgagccaccaactggacccctctccagcaacaccaccgccaccacctcccacatccctgaggttggcgactgtctacactcctcccccgagaccacccccaccctggggaagcgttgactactgtcccctaccttggaccatcccgcgtaggggtggcagcccccagctcccctcagtgctgctgtcagtgtagcaaataaagtcatgatattttcctggcaaaaaaaaaaaa

SEQ ID NO: 446 - DNA, 1555 bp, Homo sapiens
  CDS (808)..(966)
  misc_feature (1)...(1555): n = a,t,c or g
ggtacacgcgccgcagaattccgcgtcgacgatattcgtgggggagggccccacagaggcgctgcaagaaatccagatcccaggcgacacctgctgccttgcctgctgcccccgcaaaatccctgcatctggagccacccacctggaggaactcatcgggcttcctctgtagacgggaaaaaacaaacgcaccacaaaccgacaatcaaagccatggcggatgcggggccgccaccagttcatctccctggagccaggcggctccaggcctctctcacctttcttgtgtggaacgcaggcttgcaatgttctgagcccacctgtcctcgggctagtcccattttcaaaagttctgagtacgcaggtgagaagacacccccacaaaaccccaaaactagccttaggctgtttttccccaacacaacgcacctccacaccccacaccgccagcagcccacctgggtacccaaagtgagctgccagggggttccgaggaccctgcctggtgccttccagctcataaggagaggccaagagccatggggaggaagccacacggcccagcgctcagggcttgtcatccaagagtgagagaagtggggagagaggtgacggagggtggagtggtgtgtggcgtcnaaataggctagccagagagagaggtgcttgtgggattctgctggctggagccaggaggtaagtgtgaacagggaggccaaagatgaaagttatctgaaagagcccgtaccccctataaacacggcagaggaatgtcttaagagccaccaacagtaattccctttccggatgttaacaggttatttgtatcttatgtggcgtcgtaaagcattctggagtggcacacaacgtcatccccttcccggtggtctgaagaggaggaggagaccagggaggggtccttggccagcccctggcggccaaggggtgggtccttctgctctatagaaggcaggaagcccgccagctaaccgcccgggtcagggggagcaggcctgatctctcccaagcctgtgaccgaggtcctgcctgatgtccaaggggcccctgtgccagtacccccacttcccacgccccccagccttcctcacctccagaatcagccgcccaggtgcagcactatctcctttctttttcttggaagccgtctcaggggcctgagtgacgggcctgaccgtccccgctaccgcctgctgccatgcgaccagatggctgacccggcccggcttctcagggcccagaccagcctggcctcgtgcccacctgcttcgctcccaacctcaccaccaggcaagggtttccagaaaaccgagacacgcaaacacccaccaccacgacaacaacacaaaccaaagtgcactgcgaaccgccctttggcctccttcttgtaggtgccttgaaacttcaatgttgagatgaatgtgattaactacttggtcctattttctgtttgtctattttcatagaaaatgtccaagtccacttgccttgttctttcttgaaataaatagaaagatttaactttaaaaaaaaaaaa

SEQ ID NO: 447 - DNA, 2205 bp, Homo sapiens
  CDS (1)..(2205)
atgcacgaatctgtccacgtgggtttcctgtccataccatccaaggagaaaggccttggcctcctccagctgggtctgctccttcctttgaaccccatcggtacctatgcccacacctttcagagctttcctgatcagtgtcaacatgctgctcttcctcttacaaaatgtaccatcaatacagcccaggcacatggctcccacaaagctagccacttatatagtatgggtcacatcaaaaatgactccagcacaatcattcatacagacttctctcacactaaacctttaaacaagcaaggttcagtagctacagaactctccatcatcatcatcatcatcatctggttgcttttggcaaggttcagtagctacagaactctccttcatcatcatcatcatctggttgcttttggcaagcaaggttcagtagctacagaactctcctcctcctcctcctcctcctcatcatcatcatcatctggttgctttcagcaaggttcagtagctacagaactctccatcatcatcatcatcatcatcatcatcatcatcatcatctggttgcttttggcaaggttcagtagctacagaactctcctcctcctcctcctcctcctcctcctcctcatcatcatcatcatcatctggttgcttttagcaaggttcagtagctacagaactctcctcctcctcctcctcctcctcatcatcatcatcatctggttgctttcagcaaggttcagtagctacagaactctccttcatcatcatcaacatcatcatctggttgcttttggcaagcaaggttcagtagctacagaactctcctcctcctcctcctcctcctcatcatcatcatcatctggttgctttcagcaaggttcagtagctacagaactctccatcatcatcatcatcatcatcatcatcatcatcatcatctggttgcttttggcaaggttcagtagctacagaactctccttcatcatcatcatcatcatcatctggttgcttttggcaagcaaggttcagtagctacagaactctccatcatcatcatcatcatcatcatcatcatcatcatcatctggttgcttttggcaaggttcagtagctacagaactctccttcatcatcatcatcatcatcatctggttgcttttggcaaggccctggcaagaattatttggctttaccgaaacacctattccataggtaaccaattccagtcaaaaatgccagagtattactcctcaacccaatgccctatctccttagtggattataaacttactacgacaacctgtcttctttggatccaatccccgcccaagtctgagtcttctctcccaggctacaagcccccaagtcctggcagctctatgcttgacagctcgctgacctccacctcatcagaccattgggtcgcccttctcgccgtcctccagccttcttcccgctcagacactcatccactgtccggggagcctcgacccctcctataccccctccccgatcccgcagtccccttctggaccttgcggacccctctcagcccccgtaccccctaccgcctcttcctcctccactcccacaactccgcccgagctccactgcgcctgtgcggccaacgaggccgcgcgcaggcgatcggggcagaagagcttccggttcctgctgtcaataagacgtggacctgcgagccggggcaaaagggcttccggtctgcgggaaactggaggctagcggtgggcgtggaccgtcgaggtgactggcggttgtcggatctgctgttgtttgctgaccaggcagccgtaggtaatgacggatgcccagaccctgtgggcggagtaaaggaatcatgcactgatacacgcacactcaccgaggggcgcgtccgtctgcgtgcccctcatctcgtagccgaaaggagcgcgttccggggcaggcctccgggtacttcccgcagaggaccgggctttatactctttgctccttttcctcccctaaaagctgtgcttgacttcttggtgtacatggataaaggctacaatgaaggaaacattttagaaatactcgcctacctggtagtccacagatctttagatttcattggccagcaaaatctcaaaggaagagaaagagagaacaagagagaccatcatatggaagacaaatttgatgccatcacttcaaaatga

SEQ ID NO: 448 - DNA, 1832 bp, Homo sapiens
  CDS (131)..(1513)
  misc_feature (1)...(1832): n = a,t,c or g
tttgacctaccggtccggaattcccgggtcgacccacgcgtccgcccacatgggcccagcaagctnnnnccttccctttgccagcttggtgcccgagcctgtccccggtggctgccaggagcctgaggagatgagctggccgccatcgggggagattgccagcccaccagagctgccaagcagcccacctcctgggcttcccgaagtggccccagatgcaacctccactggcctccctgatacccccgcagctccagaaaccagcaccaactacccagtggagtgcaccgaggggtctgcaggcccccagtctctccccttgcctattctggagccggtcaaaaacccctgctctgtcaaagaccagacgccactccaactttctgtagaagataccacctctccaaataccaagccgtgcccacctactcccaccaccccagaaacatcccctcctcctcctcctcctcctccttcatctactccttgttcagctcacctgaccccctcctccctgttcccttcctccctggaatcatcatcggaacagaaattctataactttgtgatcctccacgccagggcagacgaacacatcgccctgcgggttcgggagaagctggaggcccttggcgtgcccgacggggccaccttctgcgaggatttccaggtgccggggcgcggggagctgagctgcctgcaggacgccatagaccactcagctttcatcatcctacttctcacctccaacttcgactgtcgcctgagcctgcaccaggtgaaccaagccatgatgagcaacctcacgcgacaggggtcgccagactgtgtcatccccttcctgcccctggagagctccccggcccggctcagctccgacacggccagcctgctctccgggctggtgcggctggacgaacactcccagatcttcgccaggaaggtggccaacaccttcaagccccacaggcttcaggcccgaaaggccatgtggaggaaggaacaggacacccgagccctgcgggaacagagccaacacctggatggtgagcggatgcaggcggcggcactgaacgcagcctactcagcctacctccagagctacttgtcctaccaggcacagatggagcagctccaggtggcttttgggagccacatgtcatttgggactggggcgccctatggggctcgaatgccctttgggggccaggtgcccctgggagccccgccaccctttcccacttggccggggtgcccgcagccgccacccctgcacgcatggcaggctggcacccccccaccgccctccccacagccagcagcctttccacagtcactgcccttcccgcagtccccagccttccctacggcctcacccgcaccccctcagagcccagggctgcaacccctcattatccaccacgcacagatggtacagctggggctgaacaaccacatgtggaaccagagagggtcccaggcgcccgaggacaagacgcaggaggcagaatgaccgcgtgtccttgcctgaccacctggggaacacccctggacccaggcatcggccaggaccccatagagcaccccggtctgccctgtgccctgtggacagtggaagatgaggtcatctgccactttcaggacattgtccgggagcccttcatttaggacaaaacgggcgcgatgatgccctggctttcagggtggtcagaactggatacggtgtttacaattccaatctctctatttctgggtgaagggtcttggtggtgggggtattgctacggtcttttaattataataaatatttattgaatgctaaaaaaaaaaaa

SEQ ID NO: 449 - DNA, 1382 bp, Homo sapiens
  CDS (154)..(1302)
tttccagtccagggccgctgagagtgggggtggctgggagcagcgcagcctccggaggaggaggcggaggccgaggaccaggaatcaccttcaagcctatgtcgtgaggctttggcagaaattaagaaggaaatatctccattgttcattggcatggaaaaatgttcagtgggaggattagagttgactgaacagactcctgctttattagggaatatggccatggcaactagtctcatggacataggggattcatttggtcatccagcttgtcctttagtcagtagatctaggaactcaccagtggaagatgatgatgatgatgatgatgttgtgtttattgaatctatacaacctccttcaatttctgctccagcaatagctgatcaaagaaacttcatatttgcatcatcaaaaaatgaaaagcctcaaggaaattattctgtaattcctccttcttcaagagatttggcatctcagaaaggaaatataagtgagacaattgttattgatgatgaagaggacatagaaacaaatggaggagcagagaaaaagtcttcctgttttatcgaatggggacttcctggaactaaaaacaaaaccaacgatttggatttctccacttccagtctttcaagaagtaagaccaagactggagtaagaccttttaaccctggtagaatgaatgtggcaggagacttatttcagaatggagaatttgcaactcatcatagtcctgattcttggatctcccagtcagcttcatttcccagtaatcagaaacagccaggggtggattctttatcaccagtggccttacttcgtaagcagaatttccagcctacagcccaacaacaacttactaaaccagctaaaatcacttgtgcaaattgcaaaaagcctttacagaagggacagacagcttatcaacgaaaaggatcagctcacctcttttgctctaccacctgcctttcttccttctctcataaacgtactcaaaacacacgaagcataatatgtaaaaaagatgcatctacaaagaaggctaatgtcattcttccagtagaatcaagcaaatccttccaagaattttatagtacatcttgtttgtctccctgtgaaaacaactggaatcttaaaaaaggagtttttaataagtcaagatgtacaatttgtagtaaattagcagaggtctggatttttatacctaagttgttgtttaggctaacagtgataattttaacttttaagtgctattatgtactctttcatctacataatgcacgtgttctggatgtataacatgaagctgaaaggaagaataaggatatgttagaactatcttatgggatattttataaataaaattccatttgcatagc

SEQ ID NO: 450 - DNA, 1113 bp, Homo sapiens
  CDS (154)..(1017)
tttccagtccagggccgctgagagtgggggtggctgggagcagcgcagcctccggaggaggaggcggaggccgaggaccaggaatcaccttcaagcctatgtcgtgaggctttggcagaaattaagaaggaaatatctccattgttcattggcatggaaaaatgttcagtgggaggattagagttgactgaacagactcctgctttattagggaatatggccatggcaactagtctcatggacataggggattcatttggtcatccagcttgtcctttagtcagtagatctaggaactcaccagtggaagatgatgatgatgatgatgatgttgtgtttattgaatctatacaacctccttcaatttctgctccagcaatagctgatcaaagaaacttcatatttgcatcatcaaaaaatgaaaagcctcaaggaaattattctgtaattcctccttcttcaagagatttggcatctcagaaaggaaatataagtgagacaattgttattgatgatgaagaggacatagaaacaaatggaggagcagagaaaaagtcttcctgttttatcgaatggggacttcctggaactaaaaacaaaaccaacgatttggatttctccacttccagtctttcaagaagtaagaccaagactggagtaagaccttttaaccctggtagaatgaatgtggcaggagacttatttcagaatggagaatttgcaactcatcatagtcctgatgatgcatctacaaagaaggctaatgtcattcttccagtagaatcaagcaaatccttccaagaattttataggacatcttgtttgtctccctgtgaaaacaactggaatcttaaaaaaggagtttttaataagtcaagatgtacaatttgtagtaaattagcagaggtctggatttttatacctaagttgttgtttaggctaacagtgataattttaacttttaagtgctattatggactctttcatctacataatgcacgtgttctggatgtataacatgaagctgaaaggaagaataaggatatgttagaactatcttatgggatattttataaataaaattccctttgcatagcatggaaaaaaaaaaaa

SEQ ID NO: 451 - DNA, 2890 bp, Homo sapiens
  CDS (1)..(2169)
atgagcctctccatgagagatccggtcattcctgggacaagcatggcctaccatccgttcctacctcaccgggcgccggacttcgccatgagcgcggtgctgggtcaccagccgccgttcttccccgcgctgacgctgcctcccaacggcgcggcggcgctctcgctgccgggcgccctggccaagccgatcatggatcaattggtgggggcggccgagaccggcatcccgttctcctccctggggccccaggcgcatctgaggcctttgaagaccatggagcccgaagaagaggtggaggacgaccccaaggtgcacctggaggctaaagaactttgggatcagtttcacaagcggggcaccgagatggtcattaccaagtcgggaaggcgaatgtttcctccatttaaagtgagatgttctgggctggataaaaaagccaaatacattttattgatggacattatagctgctgatgactgtcgttataaatttcacaattctcggtggatggtggctggtaaggccgaccccgaaatgccaaagaggatgtacattcacccggacagccccgctactggggaacagtggatgtccaaagtcgtcactttccacaaactgaaactcaccaacaacatttcagacaaacatggatttactatattgaactccatgcacaaataccagccccggttccacattgtaagagccaatgacatcttgaaactcccttatagtacatttcggacatacttgttccccgaaactgaattcatcgctgtgactgcataccagaatgataagataacccagttaaaaatagacaacaacccttttgcaaaaggtttccgggacactggaaatggccgaagagaaaaaagaaaacagctcaccctgcagtccatgagggtgtttgatgaaagacacaaaaaggagaatgggacctctgatgagtcctccagtgaacaagcagctttcaactgcttcgcccaggcttcttctccagccgcctccactgtagggacatcgaacctcaaagatttatgtcccagcgagggtgagagcgacgccgaggccgagagcaaagaggagcatggccccgaggcctgcgacgcggccaagatctccaccaccacgtcggaggagccctgccgtgacaagggcagccccgcggtcaaggctcaccttttcgctgctgagcggccccgggacagcgggcggctggacaaagcgtcgcccgactcacgccatagccccgccaccatctcgtccagcactcgcggcctgggcgcggaggagcgcaggagcccggttcgcgagggcacagcgccggccaaggtggaagaggcgcgcgcgctcccgggcaaggaggccttcgcgccgctcacggtgcagacggacgcggccgccgcgcacctggcccagggccccctgcctggcctcggcttcgccccgggcctggcgggccaacagttcttcaacgggcacccgctcttcctgcaccccagccagtttgccatggggggcgccttctccagcatggcggccgctggcatgggtcccctcctggccacggtttctggggcctccaccggtgtctcgggcctggattccacggccatggcctctgccgctgcggcgcagggactgtccggggcgtccgcggccaccctgcccttccacctccagcagcacgtcctggcctctcagggcctggccatgtcccctttcggaagcctgttcccttacccctacacgtacatggccgcagcggcggccgcttctctgcggcagcctcagcttcggtgcaccgcaccccttcttaatctgaacaccatgcgcccgcggttgcgctacagcccctactccatcccggtgccggtcccggacggcagcagtctgctcaccaccgccctgccctccatggcggcggccgcggggcccctggacggcaaagtcgccgccctggccgccagcccggcctcggtggcagtggactcgggctctgaactcaccagccgctcctccacgctctcctccagctccatgtccttgtcgcccaaactctgcgcggagaaagaggcggccaccagcgaactgcagagcatccagcggttggttagcggcttggaagccaagccggacaggtcccgcagcgcgtccccgtagacccgtcccagacacgtcttttcattccagtccagttcaggctgccgtgcactttgtcggatataaaataaaccacgggcccgccatggcgttagcccttccttttgcagttgcgtctgggaaggggccccggactccctcgagagaatgtgctagagacagcccctgtcttcttggcgtggtttatatgtccgggatctggatcagattctgggggctcagaaacgtcggttgcattgagctactgggggtaggagttccaacatttatgtccagagcaacttccagcaaggctggtctgggtctctgcccaccaggcggggaggtgttcaaagacatctccctcagtgcggatttatatatatatttttccttcactgtgtcaagtggaaacaaaaacaaaatctttcaaaaaaaaaatcgggacaagtgaacacattaacatgattctgtttgtgcagattaaaaactttatagggacttgcattatcggttctcaataaattactgagcagctttgtttggggagggaagtccctaccatccttgtttagtctatattaagaaaatctgggtctttttaatattcttgtgatgttttcagagccgctgtaggtctcttcttgcatgtccacagtaatgtatttgtggtttttattttgaacgcttgcttttagagagaaaacaatatagccccctacccttttcccaatcctttgcg

SEQ ID NO: 452 - DNA, 1899 bp, Homo sapiens
  CDS (465)..(1493)
accgtggtatcgctggtaaattcttcttcccactttcaaatctagaatagtaaaacagcaaaaatcccaacaggcatgagagttatcgcagtagataggttaagctgcttctctgctgtggtcaacgtcagctctgttgcgaggcgggttctcccaacaatagcccacaccatttccaggcttttctgggcgaggggcagggcgcccggcccccaaagcgagaagacagacagccccggttctccgcagccccaggtttgctcctcaaggacggaggggcctctcagctccggccgcctcctttccgccccctgcaggccggccggaggaaagctcagggcccaggtcggcccagggagcacggaaccaaagagcgctagcgccggttcggccgcctttccagaaagcccgggccgaacggccccgccgcagagactcagcgcggatcgctgctccctctcgccatggcgcaggtgctgatcgtgggcgccgggatgacaggaagcttgtgcgctgcgctgctgaggaggcagacgtccggtcccttgtaccttgctgtgtgggacaaggctgaggactcagggggaagaatgactacagcctgcagtcctcataatcctcagtgcacagctgacttgggtgctcagtacatcacctgcactcctcattatgccaaaaaacaccaacgtttttatgatgaactgttagcctatggcgttttgaggcctctaagctcgcctattgaaggaatggtgatgaaagaaggagactgtaactttgtggcacctcaaggaatttcttcaattattaagcattacttgaaagaatcaggtgcagaagtctacttcagacatcgtgtgacacagatcaacctaagagatgacaaatgggaagtatccaaacaaacaggctcccctgagcagtttgatcttattgttctcacaatgccagttcctgagattctgcagcttcaaggtgacatcaccaccttaattagtgaatgccaaaggcagcaactggaggctgtgagctactcctctcgatatgctctgggcctcttttatgaagctggtacgaagattgatgtcccttgggctgggcagtacatcaccagtaatccctgcatacgcttcgtctccattgataataagaagcgcaatatagagtcatcagaaattgggccttccctcgtgattcacaccactgtcccatttggagttacatacttggaacacagcattgaggatgtgcaagagttagtcttccagcagctggaaaacattttgccgggtttgcctcagccaattgctaccaaatgccaaaaatggagacattcacaggttacaaatgctgctgccaactgtcctggccaaatgactctgcatcacaaacctttccttgcatgtggaggggatggatttactcagtccaactttgatggctgcatcacttctgccctatgtgttctggaagctttaaagaattatatttagtgcctatatccttattctctacatgtgtattgggtttttattttcacaattttctgttattgattattttgttttctattttgctaagaaaaattactggaaaattgttcttcacttattatcatttttcatgtggagtataaaatcaattttgtaattttgatagttacaacccatgctagaatggaaattcctcacaccttgcaccttccctacttttctgaattgctatgactactccttgttggaggaaaagtggtacttaaaaaataacaaacgactctctcaaaaaaattacattaaatcacaataacagtttgtatgccaaaaacttgattatccttatgaaaatttcaattctgaataaagaataatcacattatcaaagccccaaaaaaaaaaaaaa

SEQ ID NO: 453 - DNA, 1078 bp, Homo sapiens
  CDS (95)..(862)
  misc_feature (1)...(1078): n = a,t,c or g
gagaaaaaattagatccccttgatagccctcggaaccgcnccggaattcccgggtcgacccacgcgtccgcccacgcgtccggcggctgtcgccatgttgtcggtagcagcccgctcgggcccgttcgcgcccgtcctgtcggccaccccggagcagcctgtgttggacctgaagcggcccttcctcagccgggagtcgctgagcggccaggccgtgcgccggcctttggtcgcctccgtgggcctcaatgtccctgcttctgtttgttattcccacacagacatcaaggtgcctgacttctctgaataccgccgccttgaagttttagatagtacgaagtcttcaagagaaagcagcgaggctaggaaaggtttctcctatttggtaactggagtaactactgtgggtgtcgcatatgctgccaagaatgccgtcacccagttcgtttccagcatgagtgcttctgctgatgtgttggccctggcgaaaatcgaaatcaagttatccgatattccagaaggcaagaacatggctttcaaatggagaggcaaacccctgtttgtgcgtcatagaacccagaaggaaattgagcaggaagctgcagttgaattatcacagttgagggacccacagcatgatctagatcgagtaaagaaacctgaatgggttatcctgataggtgtttgcactcatcttggctgtgtacccattgcaaatgcaggagattttggtggttattactgcccttgccatgggtcacactatgatgcatctggcaggatcagattgggtcctgctcctctcaaccttgaagtccccacgtatgagttcaccagtgacgatatggtgattgttggttaagagacttggactcaagtcataggcttctttcagtctttatgtcacctcaggagacttatttgagaggaagccttctgtacttgaagttgatttgaaatatgtaagaattgatgatgtatttgcaaacattaatgtgaaataaattgaatttaatgttgaatactttcaggcattcccttaataaagaccctgttaagcccaaaaaaaaaaaaaaaa

SEQ ID NO: 454 - DNA, 2228 bp, Homo sapiens
  CDS (53)..(2017)
actatagtgcaacaaaattaagccactaaagggaataagcttgggccgctggatgtgggtgggccggcagcgggactccggcgtcctgtcccgtccctgcccgtcgactgcggccttgcccgaagcccttttgtgcagctccgcgcccgcagcccgacgccccagcttgtgcggggccacgggagggtcatgcgcggatttcgactcgggtgtggatttcgtccgtagagagagcagcggtctgtggggcccacagcctccactttctcctgttaaaaattatactgagatgtttcaggacccagtggcttttaaggatgtggctgtgaacttcacccaggaggagtgggctttgctggatatttcccagaagaatctctacagggaagtgatgctggaaactttctggaacctgacctctataggaaaaaagtggaaagaccagaacattgaatatgagtaccaaaaccccaggagaaacttcaggagtgtcacagaagagaaagtcaatgaaattaaagaagacagtcattgtggagaaacttttaccccagttccagatgacaggctgaacttccagaagaagaaagcttctcctgaagtaaaatcatgtgacagctttgtgtgtgaagttggcctaggtaactcatcttctaatatgaacatcagaggtgacactggacacaaggcatgtgaatgtcaggaatatggaccaaagccatggaagagtcaacaacctaaaaaagccttcagatatcacccctccttgagaacacaagaaagggatcacactggaaagaaaccctatgcttgtaaagaatgtggaaaaaacattatttaccattcaagcattcaaagacacatggtagtgcacagtggggatggaccttataaatgtaagttttgtgggaaagcattccattgtctcagtttatatcttatccatgaaagaactcacactggagagaaaccgtatgaatgtaaacaatgtggtaaatcttttagttattctgctacccatcgaatacatgaaagaactcacattggagaaaagccttatgaatgtcaggaatgtgggaaagcattccatagtcccagatcctgtcacagacatgaaaggagtcacatgggagagaaggcttatcaatgtaaggaatgtggaaaagcattcatgtgtccccgttatgttcgtagacatgaaaggacccactctaggaaaaaactttatgaatgtaagcagtgtgggaaagcattatcctctcttacaagttttcaaacacacataagaatgcactctggagaaagaccttatgaatgtaagacatgtgggaaaggcttttattctgccaagtcatttcaaagacatgaaaaaactcacagtggagagaaaccgtataaatgcaagcaatgtggtaaagccttcactcgttccggttcctttcgatatcatgaaaggactcacactggagagaaaccctatgagtgtaagcaatgtgggaaagccttcagatctgccccaaatcttcaatcgcatggtaggactcacactggagagaaaccgtatcaatgtaaggaatgtgggaaagctttcagatctgcctcacaacttcgaatccatcgtaggattcacactggagagaaaccctatgaatgtaagaaatgtgggaaagccttcagatatgtccagaactttcgatttcatgaaaggacacacaatggagagaaaccctatgaatgtaaagaatgcagaaaagcattcagcttgcctacttcctttcatagacatgaaaagacattggaaggaaaccctatgaaggcaagcaatgtggcaaagctttcacttcttccagttcttttcaatatcatgaaagaattcacactggggagaaaccctatcagtgtaagcaatgtgcgaaagcctttatttcttccacttcttttcaatatcatgaaaggactcacatgggagagaaaccctatgagtgtatgccatgtgggaaagccttcatttttctagttgctttcgatgtcatgaaaggactcacactggagagaagccctatgaatgtaagcaatgcaggaaagccttcagatcagcctcacaccttcaaatgtatggaaggactcacactggagagaaaccctatgaatgtaagcagtatgggaaagcattcagacctgacaagattctttgaatacagataatgaatgtaaacaaaaaaaaaaaa

SEQ ID NO: 455 - DNA, 1474 bp, Homo sapiens
  CDS (346)..(1236)
  misc_feature (1)...(1474): n = a,t,c or g
cacttttnnnacctgttcgcctgccgtaccggtccncactcccgggtcgacccacgcgtccgaccagccgcgccgagcggggcctctccgggccgcgtctgtggggtcgagactgcgcggccgttgggcgtgcagcggcgccagtcggcggacgaggggcccccgggagttgctggactgagacatgagcctccaactgtgtggttgggctcggtagcacatcgtgggacttgggtgtgcgcccacagatggtttggccctgcagtgaccagagcagcccaagccgccaccatggtgaaattgctagtggccaaaatcctgtgcatggtgggcgtgttcttcttcatgctgctcggctccctgctccccgtgaagatcatcgagacagattttgagaaggcccatcgctcgaaaaagatcctctctctctgcaacacctttggaggaggggtgtttctggccacgtgcttcaacgctctgctgcccgctgtgagggaaaagctccagaaggtcctgagcctcggccacatcagcaccgactacccgctggccgaaaccatcctcctgctgggcttcttcatgaccgtcttcctggagcagctgatcctgaccttccgcaaggagaagccgtccttcatcgacctggagaccttcaacgccggatcggacgtgggcagcgactcggagtatgagagccccttcatggggggcgcgcggggccacgcgctgtacgtggagccccacggccacggccccagcctgagcgtgcagggcctctcgcgcgccagccccgtgcgcctgctcagcctggccttcgcgctgtcggcccactcggtctttgagggcctggccctgggcctgcaggaggagggggagaaagtggtgagcctgttcgtgggggtggccgtccacgagacactggtggccgtggccctgggcatcagcatggcccggagtgccatgcccctgcgggacgcggccaagctggcggtcaccgtaagcgccatgatccccctgggcatcggcctgggcctgggcattgagagcgcccagggcgtgccgggcagcgtggcgtccgtgctgctgcagggcctggcgggcggcaccttcctcttcatcaccttcctggagatcctggccaaggagctggaggagaagagtgaccgtctgctcaaggtcctcttcctggtgctgggctacaccgtcctggccgggatggtcttcctcaagtggtgagcggccttgccattgtccctgccgccggagcccgccgggagccccgggccggacacaggccgcgtcccccggccgcgcgtcccccaagagcgagcactgtggccctgggccaccacctgtgcacaaggggcctcccgggaccaggctgtgcccccgatcctacaccctgagcctcagagcactgctactttttaaaatacttctttctcttaaaagtctttaccaaaaaaaaaaaaaa

SEQ ID NO: 456 - DNA, 6616 bp, Homo sapiens
  CDS (14)..(4369)
ctttcctagctgcatgacccggggcaagtctcttgacttctctgcgcctcagtttcctcatctggaaagtagaaatgataaccgcacctgccactggtgtgacacagagattcatatagtgaacgccaccatcagtgacactgattgcatgaaatctgccatggtggtggcccttagtaagagaagtcaggaggcggaggctgcttttctgagtgtttacaagcaattaattgaagcaccagccctgtgggaactcaagctcaagtccaggcctgcccttggagactctcgggttcagcaaggacaacatgacccaaagacagacaaccagaatacacaacagaaagcaggcttcaaggaaggatggctggcagaggcctcagagagggaggcctttggacctggttttaaagaccccgtgcctgtgtttgaggcggcacgcagcctagacgacagactgcagccccccagctttgaccccagtgggcagccccggcgagacctccacacttcgtggaagaggaaccccgagctcctcagccccaaagcgctaaaggctacgcaggcagagctgctagagctgcggcggaagtacgacgaggaggcagcatccaaggcagatgaagtcggcctgatcatgaccaacctggagaaagctaatcagcgagctgaggctgcccagcgggaggtggaaagtctccgggaacagctggcctctgtcaacagctccatccgcctggcttgctgctctccccaggggcccagtggggataaggtgaacttcactctgtgctcgggccctcggctggaggccgcgctggcctccaaggacagggagatcctgcggctgctgaaggacgtgcagcacctccagagctcactgcaggagctggaggaggcatccgccaaccagatcgccgacctggagcggcagctcacggccaagtccgaggccatagaaaagctggaagagaagctccaggcccagtctgactatgaggaaattaaaacggagctgagcatcctgaaagccatgaagctggcctccagcacctgcagcctcccccagggcatggccaagcctgaagactcactgcttattgcaaaggaggccttcttccccacgcagaaattccttctggagaagcccagcctcctggccagccctgaggaagacccatcagaggacgattccatcaaggattcactgggcacggagcagtcctacccctcccctcagcagctcccacctccaccagggccagaagaccccctgtctcccagccccgggcagcccctgctgggccccagcttggggcctgacggcactcggactttctcgctgtcccccttccccagcctggcatcaggggagagactgatgatgcccccagccgccttcaagggagaggcgggcggcctgctggtgttccccccagccttctatggcgccaagccccccacagcccctgccaccccggcccctggccctgagccactgggcggtcctgagcccgcggatggtggtgggggcggagcggcggggcccggggcagaggaggagcagctggacacggcagagatcgccttccaggtgaaggagcagctgctgaaacacaacatcgggcagcgggtgtttgggcattacgtgctggggctgtcgcagggctcggtcagcgagatcctagcccggcccaagccctggcgcaagctcacggtgaagggcaaggagcccttcatcaagatgaagcagttcctgtcggatgagcagaatgtactggcgctcaggaccatccaagtgcggcagcgaggcagcatcaccccgagaatccgcacgcctgagacaggctcagacgacgccatcaagagcattctagagcaggccaagaaggagatcgagtcgcagaagggcggcgagcccaagacctcggtggccccgctgagcatcgccaacggcacgacccccgccagcacctcggaggacgccatcaagagcatcctggagcaggcacgccgtgagatgcaggcgcaacagcaggcgctgctggagatggaggtggcgcccaggggccgctcggtgcccccctcgcccccggagcggccatcactggccaccgcgagccagaacggggccccggccttggtgaagcaggaggagggcagcgggggccccgcgcaggcgccgctcccggtcctgtcccccgccgccttcgtgcagagcatcatccgcaaggtcaagtccgagatcggcgacgccggctacttcgaccaccactgggcctccgaccgcggcctgctcagccgcccctacgcctccgtgtcgccctcgctgtcctcctcctcctcctctggctactctggccagcccaacggccgcgcctggccccgcggggacgaggcccctgtgccccccgaggacgaggcggcggcaggggcggaggacgaaccccccaggacgggcgagctcaaggctgagggcgcgacggccgaggcgggcgcgcggctgccctactacccggcctacgtgccgcgcaccctgaagcccaccgtgccgccgctgacccccgagcagtacgagctgtacatgtaccgtgaggtagacacgctggagctcacccgccaggtcaaggagaagctggccaagaacggcatctgccagaggatcttcggggagaaggtgctgggcctgtcacagggcagcgtgagcgacatgctgtcccggccgaagccatggagcaagctgacgcagaaggggcgggagcccttcatccgcatgcagctgtggctctctgaccagctcggccaggcagtgggccagcagcctggtgcctcccaggccagtcccacagaaccaaggtcctcaccatccccaccccccagccccacagagcctgagaagagctcccaggagccgttgagcctgtccctggagagcagcaaggagaaccagcagccagagggccgctccagctcctcgttgagcgggaagatgtactcaggcagccaggccccagggggcatccaggagatcgtggccatgtcccccgagctggacacgtactccatcaccaagagggtgaaggaggtcctcacagacaacaatctagggcagcggctgtttggggaaagcatcctgggtctgacacagggctccgtgtctgacctgctgtcccggcccaaaccctggcacaagctgagcctgaaggggcgggagccttttgtccgcatgcagctgtggctcaatgacccccataacgtggagaagctgagggatatgaagaagctggagaagaaagcctacctgaaacgtcgctatggcctcatcagcaccggctcagacagtgagtccccggccacccgctcagagtgccccagcccctgcctgcagccccaggacctgagcctcctgcagatcaagaagccccgggtggtgctggcacccgaggagaaggaggcactgcggaaggcctatcagctggaaccctacccctcgcagcagaccatcgagctcctctccttccagctcaacctcaagaccaacaccgtcatcaactggttccacaactacaggtcccggatgcgccgggagatgttggtggaggggacccaggatgagccagaccttgatccaagcgggggtcctggaatcctaccgccaggccactcccacccagaccccaccccgcagagccctgactctgagactgaggaccagaagccaaccgtgaaggaactggagcttcaggagggccctgaggagaacagcacacccctgaccacccaggacaaggcccaagtgaggatcaagcaggaacagatggaggaggacgctgaggaagaggcaggcagccagccccaggactcaggggagctggacaaaggccaaggtccccccaaagaggagcatcccgaccctccgggtaatgatggactcccaaaagtggctcccgggcccctccttccaggtggatccaccccagactgtccctcacttcatccccaacaggagagtgaggccggggagcgacttcacccggaccctttaagttttaagtcagcctcagagtcctcacgctgcagcctggaggtgtcactgaactcgccctcggccgcctcctcaccaggcctcatgatgtctgtgtcacctgtcccctcctcctcagctcccatctccccatccccacctggcgccccccctgccaaagtgccgagtgccagccccactgctgacatggctggagccttgcaccccagtgccaaggtgaaccccaacttgcagcggcggcatgagaagatggccaatctgaacaacatcatttaccgactagagcgggctgccaatcgggaggaggccctggagtgggagttctgaaggcagggtgagggggcaagggacataccctggtaactaccttccttctcgcacttactctcctcaacaggatggggtaagggagggaggaactcaaccatcaaaatgtggacagcaatgttatgccgtttacgttttttgttgtaatcctagttctatgaagctgtgtgagcaggtgggtcaaatgccattgcctccacttttctgcacccccctgctcctcttcaccctgacccctctgcaggaggcagaagcaaaatggcaccacatattcacctgaaaactccaaactcttttagaaaaataaataaatatttatagacctcttttagatattttaataaaggatcctttgggaatttatcccagctgatgctgttttgatattacagagagttataaaatcaggatgctgtcacaactgttgcgaagtatacactgaagttgtgtcgtttttgccactagatgagattaaaagaagacaattattcaaagccatcacaaaacactataagactgaccaaaatttagataacctttgaaccacgatttttttccacatctgtctgtgagacacagcgcaatgctactgcccttccagaaactgtgctaaaaagagaaagtccaaaagactctaaacaaaaacctcgacgccgttgaggatgtgtttcattctggtggtctgttttgcaagcttgataacagaatgtccgtgccattgtaaatgttgtagagatgtgggccgtggcccaaccgtcctatatgagatgtagcatggtacagaacaaactgcttacacaggtctcactagttagaaacctgtgggccatggaggtcagacatccatcttgtccatctataggcaagaagtgtttccagatcctttggaaaggtgggcatggggcaggtgcttggagagtggcgtttgagccagagcgaccccatttcccgtgtgaaccataggcacaacccaggaagtttccccacttgtaggagtgtgggtattccagagcaagactgtggccaccatcttcccctcttggtgttttccgaaagtgacagtgttggtcatcccatgaccactgaagcttagtaaccagcgccaaaaaagtagattcatcaaactagagaccccagctccccttctcgccatcttctttctcaagttgaccgtggtgctgtttctggaaggcatctgcaactccaagtccatgcagaactctggaaggccaagttcatcgcagcatgttcaccattatcccagcctccaaatctatcctcctaccttccaacgcatgacctgttggggagcagagacttaacccccaactcagaggaacccttcctccagcgtctttggcatggtttctagggtgagagttcccaatttggatagaacggccaccatattggttactgaatctctctcccttgtttttattacgtttcctttttcaaactgtccatgggaaggctgaattgagtgactccccagaatgaagatgagaaggtgaatataatcaatgccaatgtaatgccagcgggtgagatggccgatggaggtttcaaagatgtagctagcattttgaaaccatatgggcaaaacccggcaaccagaaggggacagataaggaccgttccagaaatcccaactctcacacccagcccaggctgcagtctccacaccaaacagtcaacaaaacacaaaccctgaaggaaaaccttttccatacacccaggctatgcattgaagagttttccactgtatacatttttatccagatgaaggtatttttatattttgacaataggaaacagtgaccattttcagagtaatcaaatctggaacaaatgaaacatcttttagccaccaccaccctgttgcaattaagacaaccgtgggggaacacaccactttttactgttgaaaccaacacaacgttgaaatccaggcttatacgcagactccgattcctagagaactaaatttggctttagtgtgacgggatttgattaagcacttagtatagtcttttgaacacggaaatcctgttgtacttaaagctagcggacccgtgaacaactttgtcaggttcacgtcctataacggttaaaaaacacacacacacatacacaaaccgtttctatgagagattgatgaactttgtttaaaattttaaaaaaaggaacacgttctgtaaacgagtcgctaaatacagaattgtataataaaaaaaaaaaaaa

SEQ ID NO: 457 - DNA, 1461 bp, Homo sapiens
  CDS (262)..(1323)
attgaagcccgtcgcctgaggtaccggtccggaattcccgggtcgacccacgcgtccggttcaccggatcagagatagcagagcgccgagttggggccacgaaggcgtgaggggagtcgtcgtccctcctgcacgaaagcgtctaagccttggcgacgccgccctgggggacccacgtcaggcctgggatagggaccgctgtccccgggtccctaccaatgtcgcccgtcgctcccggcccagctctacccgcagagtctgatggcagcggccactctgaggacgccaactcagggcactgtgacctttgaagatgtggccgtacacttctcctgggaggaatggggtctccttgatgaggctcaaagatgcctgtaccgtgatgtgatgctggagaacttggctcttttaacctctctagatgttcatcatcagaagcagcaccttggagaaaaacatttcataagcaatgtgggccgagccttgtttgtgaagacctgcacattccatgtgtcaggggagccttccacctgcagagaatttgggaaggacttcctggccaagttgggatttctccatcaacaggctgctcacactggggagcaatccaatagcaaaagcgacggtggggccatcagtcacagaggaaaaactcattacaactgtggagaacacacaaaagcattcagcggtaaacacacacttgttcagcagcagagaaccctcactacagaaagatgttacatatgcagtgaatgtgggaaatcctttagcaaaagctacagtctcaatgaccattggagacttcacactggagaaaagccttatgaatgtcgagagtgtgggaagtcctttaggcaaagctctagtctcattcaacaccggagaggtcacactgcagtacgacctcatgagggggatgaatgtggaaaattatttagcaacccgtctaacctcattaaacatcggagagttcacactggggaaaggccatatgagtgcagcgaatgtgggaaatcctttaaccaaaggtctgcactccttcaacatcggggaggtcacactggggagaggccttatgagtgcagtgaatgtgggaagttttttccctacagctccagtctccgaaaacaccagagagttcacactggatcaagaccctatgagtgcagtgaatgtgggaaatcctttactcaaaattccggcctcattaagcacaggagggttcacactggggagaagccttatgagtgcacggaatgtgggaaatcctttagccataactccagccttattaaacatcagagaattcatagtcgataaaaggcttatgagtggcaaatgtggaaaatctgttagcaccctggagaaagtccttgagtacacagtgaatgtcagaaagcttcagctgaaggccatatctcattgagtgccacacaggtcacaagggaaagacacttt

SEQ ID NO: 458 - DNA, 1035 bp, Homo sapiens
  CDS (206)..(1009)
tcttggaattctgggggaggacgtgggtgcgggggcggagcgtggtccgagggctccgtgctgcggtactcaggcccatcatgaggccctgaagatggagtggcagaacttcctgaacctgtgcatctgccaggagacccagctccagcacgtggaggactacagccggattctgtgtccatcttcctctcctcattgactctgcatgaaggggatttctggtggagtaagggtagcagctcttgccgcacgtgcagagagagaggaacttccagtgcccgctatggagccacagcccacagcatggggaagtccccatccagaggcagtgctgcagctagaggtagctccagagtcctccgggccctgcaccgatacagccaaagaccagcaaagcgacaagctgccagacctcatgccacctgctgtagccactgggctcagccctggagctgagagcatcgctggagatagacgtggcagagaagaggttgcgagcatggccccagccagcagctcccacgctgcccctagtcctgggcatggagcgagccttggtgtcagagaccagggtgtgcagtctgagctcctctaccttactaaagagaggcctcttttatttaccagagccacagccctgctgcctcaggaccttttcattctgccggtgctggggctgtctatctgcaagctggaggtgttgagagcaggaaaaggaggctgtgaggaagggttcgggcagctcctcctgctctcagaggtggcctcctcctccaggcatggaggtctgtccactactgggcttctgggctatttgcccctgatttgctccctggtacgggctcttgttaacaggcaggcaaggggtgcggggaccaggcaagggcttcaaagggtacagtaccaaatcttccaaactcagcacttgtgccctggggtctccaaactgtcttctgccctaggatttattcatactgttaaattaccagtttatgcaaatgatatgtaaataaagctcaattttttgaaaaaaaa

SEQ ID NO: 459 - DNA, 906 bp, Homo sapiens
  CDS (49)..(756)
actgctcccaattcccgtgtcgacccacgcgtccggggaatctgcaccatgccctgggctctgctcctcctgaccctcctcactcactctgcagtgtcagtggtccaggcagggctgactcagccaccctcggtgtccaagggcttgagacagaccgccacactcacctgcactgggaacagcaacaatgttggcgaccaaggagcatcttggctgcagcagcaccagggccaccctcccaaactcctctcctacaggaataacaaccggccctcagggatctcagagagattatctgcatccaggtcaggaaacacagcctccctgaccattactggactccagcctgaggacgaggctgactattactgctcagcatgggacagcagcctcagtgcttgggtgttcggcggagggaccaagctgaccgtcctaggtcagcccaaggctgccccctcggtcactctgttcccgccctcctctgaggagcttcaagccaacaaggccacactggtgtgtctcataagtgacttctacccgggagccgtgacagtggcctggaaggcagatagcagccccgtcaaggcgggagtggagaccaccacaccctccaaacaaagcaacaacaagtacgcggccagcagctacctgagcctgacgcctgagcagtggaagtcccacagaagctacagctgccaggtcacgcatgaagggagcaccgtggagaagacagtggcccctacagaatgttcataggttctcaaccctcacccccaccacgggagactagagctgcaggatcccaggggaggggtctctcctcccaccccaaggcatcaagcccttctccctgcactcaataaaccctcaataaatattctcattgtcaatcaaaaaaaaaaaaaa

SEQ ID NO: 460 - DNA, 1941 bp, Homo sapiens
  CDS (203)..(1588)
tcccgggtcgacgatttcgtattttgaggaggtcggagcggaaggacgtcgtggagattgcttgcgctggggtgccacacttaggctgagctgcaggttttcgcacagtcgcgagttaacctctgcttgctccagaggcctcgtcctaatccacctcggctgacggcgcgggatccctggctccgcgagcctcagcctcaccatgtgtgtcaggagctgtttccagtccccccgtctccagtgggtgtggagaacagccttcctgaaacacacccagcgcaggcaccaggggtcccaccgatggacacaccttggaggcagcacctacagagcggtgattttcgacatgggcggagttctcattccttctccagggagagtcgctgcagaatgggaggtacagaatcgtatcccttctggaactatattaaaggccttgatggaaggtggtgaaaatgggccctggatgagatttatgagagcagaaataacagcagagggttttttacgagaatttgggagactttgctctgaaatgttaaagacctccgtgcctgtggactcatttttctctctgttgaccagtgagcgagtggcaaagcagttcccagtgatgactgaggccataactcaaattcgggcaaaaggtcttcagactgcagtcttgagcaataatttttatcttcccaaccagaaaagctttttgcccctggaccggaaacagtttgatgtgattgtggagtcctgcatggaagggatctgtaagccagaccctaggatctacaagctgtgcttggagcagctcggcctgcagccctctgagtccatctttcttgatgaccttggaacaaatctaaaagaagctgccagacttggtattcacaccattaaggttaatgacccagagactgcagtaaaggaattagaagctctcttgggttttacattgagagtaggtgttccaaacactcggcctgtgaaaaagacgatggaaattccgaaagattccttgcagaagtacctcaaagacttactgggtatccagaccacaggcccattggaactacttcagtttgatcacgggcagtcaaatccaacttactacatcaggctggctaatcgtgatctagttctgaggaagaagcccccagggacactccttccatctgcccatgccatagagagggagttcaggattatgaaagcccttgcaaatgctggagtacctgtccctaacgttcttgatctctgtgaagattcaagtgtcattggcacccccttctatgtgatggagtactgcccaggtctcatctacaaagacccttccctgccaggcttggagcccagccacagacgagccatatacactgccatgaacacagtcctgtgcaaaattcacagtgtggatctgcaggctgtgggacttgaagactatgggaagcaaggctcgacaacctggtgtttcatccagaagagccagaggtgcttgctgtccttgactgggaactttctaccttgggcgacccccttgctgatgtggcctacagctgcctggctcattacctgccatccagttttcccgtgctgagaggtattaatgactgtgacttgacacagctgggaatccctgctgcagaggagtatttcaggatgtactgtctccaaatggggctccctcccactgagaactggaacttctatatggctttttcctttttccgtgtggctgcaatcctacagggagtctacaagcgatcactcacaggtaatgggatggctgccctgaagagccactgcgggcattctgccgacatggaagccatcacaaacggcatgatgaacctgaatcgccagcggcatcagcaccttgtcgccttgcgtataatatttgcccatggtgaaaacgggggcgaagaagttgtccatattggccacgtttaa

SEQ ID NO: 461 - DNA, 1110 bp, Homo sapiens
  CDS (218)..(835)
ttcggcacgaggaaatcccccaagttctcatgatccttgcttccctttccagtcacccttggtgccctgtacttcactgtggtcctgaactgaagagctgtgtttttcaggaagacttggccaggccgtgttccgtgtctctggattcaagtcccaggagtcctgaccagagagcaggcatcagtgtttttctgaccgaagttctcatttcctgacaatggaaatggaacaagaaaaaatgaccatgaataaggaattgagtccagacgcggctgcttactgctgctcggcctgccacggcgatgagacctggagttacaaccaccccatccggggccgggccaagtctcgcagcctgtctgcctcgcccgccctggggagcaccaaggagttcaggaggacacgctctcttcatgggccatgcccggtgaccacttttggaccaaaggcctgtgtgctgcagaacccccagaccatcatgcacattcaggaccccgcgagccagcggctgacgtggaacaagtccccaaagagcgtccttgtcatcaagaagatgagagatgccagcctactgcagccgttcaaggagctctgcacgcacctcatggaggagaacatgatcgtgtatgtggaaaagaaagtgctagaagaccctgccatcgccagcgatgaaagctttggggcagtgaagaagaaattctgtacctttcgagaagattatgatgacatttccaatcagatagacttcatcatctgcctggggggagacgggacgctgctgtacgcttcctcgcttttccagggaacgcagctgttgttctccggagtcggctgaaggtcagggtggtgaaggagctccgggggaagaagacggccgtgcacaatgggctgggtgagaaaggctcgcaggctgcaggcctggacatggatgtcgggaagcaggccatgcagtaccaggtcctgaatgaggtggtgattgacagaggcccctcctcctacctgtccaatgtggatgtctacctggacggacacctcatcaccacggtgcagggcgacggagtgatcgtgtccaccccgacgggcagcacggcgtatgcggccgcaagctta

SEQ ID NO: 462 - DNA, 3344 bp, Homo sapiens
  CDS (602)..(2251)
ccggaattcccgggtcgacccacgcgtccggctttagtccatttggctatccctttcaccctggcatttcatcaaccagaggaaaaaaaaaataagacatcataaagggagagaagccccttatgggtctttcaactctcgtatatatttaaatgcaattggagccccgcagggaataccagatcaatttaaagcttgaaatcaaatagttacaggactgaagtcaatattttggtagatgacagtcaataaaaatgtaaattagatacactacatctattacaaccaacagcaacgagcttttcatgagttaaaaagaaaaactcatgtcggccccagccctggggctacctgacctgacaaaactctttacactccatgtgtcaaaaagagaaaaaatggcagttggagttttaacccagactgtggggccctggccaaggccagtggcctatctctcaaaacaactagatgggtttccaaaggctggccactatgtctaaggaccctggcagcaacagccctgttagcacaagaagcagataaactaacccttgggcaaaacctgaatataaaggccccccatgctgtggtaactttgatgactaccgaaggacatcattggctaacaaatgctagattaaccaagtaccaaagcttgccatgtgaaaatccccacataactattgaagtctgtaacaccctaaatcccaccaccctgctcccagtatcagagagcccgggcgagcataactgtgtagaggtgttggactcagtctattctagcagacctgaccttcgggaccagccatgggcatcatcagtagactgggagttatacatggacgggagcagcttcatcaactcacaaggagaaagatgtgcaggatatgcggtggtaactttggatgctgtcattaaagccaaactgtggctacagggcacttcagcccagaaggctgagctcattgctttaactcgggctgtagaactcagtgaagggcaagagtcacttgaagaattgttaggccggtacttctacgtctcacacttgccagcctttgccaaagcagtagcacaactgtgcattacatgccgacagcacaatgcgaggcaaagccccactgtttcgccccacatacaagcttatggagcagctccttttgaggatcttcaggtggatttcacagaaatgccaaaatgtggaggtaacaagtatttgctggttcttacgtgtacttactctgggtgggtggaggcttatccaacacgaactgaaaaggcctacgaagtaacccgtgtgcttctccgagatcttattcctaggtttggactgcccttacgaattggctcacataacgggccggtgtttgtggctgacttggactgtgtggaaatcaatgtggatactggtgtcatttgggccacttggataaaaaatgaaaaggatccagtgcagcttcagaaaggaaaaagtggcccttcctgtactaagggacaatgtaaccccttagagctagtaataaccaatccccttgatcctcgctggaaaaaaggggagcgtgtgaccttaggaatcaatggggctggactgaatccccgagtaaatatcttggttcgaggagaagtttacaaatgctctcttgagccagtgtttcaaactttctatgatgaactaaatgtgccaataacagaatttccaggaaaaacaagaaatttgtttttgcaattagccgagcatgtagcccagtctctcactgtcacttcatgttatgtatgtggaggaactgtaatagcagatcaatggccatgggaagcccgagaattagtacctacagacccagttcctgatgaattcccagctcaaaagaatcaccctgataatttctgggtcctaaaagcctcaatcattagacaatactatatagcaagagtggagaaggacttcacccttcctgtaggaagactacatggtggagttcaaaccacacagagaaaaatccattcagtaaatttccaaagttgcagaccgtttaggcccacccagaatcccaccgggactggacagcccccactgggctatactggatatgtggacatagagcctacactaagctgcctgacaagtagttgtgttattggcactattaaaccatctttcttcctactgtccataaaaacaggagaactcctgggcttccctgtctatgcttcccgtgaaaagcatagctataagaaattgaaacaatgataaatggccccctgagagaatcatacagtattatgggcctgctacttaggcacaagatggctcgtggggataccggatccccatttatatgatcaaccgaatcatacggttacaagctgtcttaaaaataatcactgcaaccggcagagccttgactattctggcccagcaagaaactcagatgagaaatgctatctatcaaaatagattagctctcgactacttgctagcagctgaaggagaggtctgtaggaaatttaaccttactaattgctgcctacacatagataaccaagggcaagtagttgaagacatagttagagatatgacaaaagtggcacatgtgcccgtgcaagtgtggcatggatttgatcctggggccatgtttagaaaatggttcccagcgctaggaggatttaaaactcttataataagaggtataatagtaataggaacctacttactgctccctcgtttgctacctgtacttcttcaaatgataaaaagcttcatcgctaccttagtgtaccaaaatgcatcatcacaggtgtactatataaatcactattgatctgtctagcacgaagacatgggtagtaaacatgaaacaactcctgctattgagtgagagtctcaaagtgggggaataagggaggagaccacccctcatattgtcttatgcccaatttctgcctccaaagaaagaaaaagtaaaaactaaaaggcagaaatgaaatccacaagcagacagcccgggcgccacaccctgggactggtagttgaaaatcaatcccggacctaatcggttatgttatctatagattacagacattgtatagaaaagcattgtgaaaatctcattcctgttttgttccaatctaattactggtgcgtgcagcccccagtcacgtacccacgtacctcctgcttgctcaatcgatcacgaccctctcacgcacacccccttagacttgtgagtccttaaaagggacaggaattgctcactcggggcgggggctcggctcttgagacaggagtcttgctgcactgccggcctaataaaccccttccttctttaaaaaaaaaaaaaaaa

SEQ ID NO: 463 - DNA, 673 bp, Homo sapiens
  CDS (240)..(575)
atttggccctcgaggccaagaattcggcacgagcttcagtgtgcatgttccttggacacctgcctcagtgtgcatgttcactgggcatcttcccttcgacccctttgcccacgtggtgaccgctggggagctgtgagagtgtgaggggcacgttccagccgtctggactctttctctcctactgagacgcagcctataggtccgcaggccagtcctcccaggaactgaaatagtgaaatatgagttggcgaggaagatcaacatataggcctaggccaagaagaagtttacagcctcctgagctgattggggctatgcttgaacccactgatgaagagcctaaagaagagaaaccacccactaaaagtcggaatcctacacctgatcagaagagagaagatgatcagggtgcagctgagattcaagtgcctgacctggaagccgatctccaggagctatgtcagacaaagactggggatggatgtgaaggtggtactgatgtcaaggggaagattctaccaaaagcagagcactttaaaatgccagaagcaggtgaagggaaatcacaggtttaaaggaagataagctgaaacaacacaaactgtttttatattagatattttactttaaaatatcttaataaagttttaagcttttctccaaaaaaaaaaaa

SEQ ID NO: 464 - DNA, 987 bp, Homo sapiens
  CDS (733)..(909)
  misc_feature (1)...(987): n = a,t,c or g
gatccaaatttanagctatcaacataaggttgaccctactaaagggaataagcttgcggccgcataggttttttttttttttttttacaaagaatcaactttattgaacattcagggtcaggttctcttcttgctcttgcctgtgaccttggctggtgtgaggactggagctgctgcctggtacagggtggaggagatcttgttgatgtagtacagaccaaccatggagaagatgaagcaggtggtgacacagactcggtggatgaggccagatgcaaagagagccaacaggaggcacaggagaatctcagggaagatctttgcttggaatcctttgcccaagacaagattttccaaattattgaaggcagtgagcgagaacacgaagagaccctaaccaagcaggccgccttggatggtgagccactcggtggaggccagctgacggctgtacatctgcatcccagcaaagagcagcagggacaggagggaggagagcgccagcgaggtgcccgtacccaccactggaggggatgggagaagggacggagagtcaggctccgccctccctccggcaagctacgggcagatcagccggtccggaagctcggtgggccgaccccctccaagaactcccgggactgcagccacacgccccaactccccacaccgcgcggcaacccctacgtattccccagccccggacaccccgaaccctcccgtccggtggaaatgcccgctcccggtggaacccaggacacgtcagctctgtcgggagaggacgaggaaagcttgtccacccaaaccccgaccccctctaggacttcctggggaccccaccggtcctgttacccatcatgccccgcccgtgagtccaaccggcgcctctggccaagaaaggcgagctgaaccgggtgcggttagctatgcgcatgcgtcagcgacgaaatcgtcgacccgggaattccggaccggtacctcaggcgt

SEQ ID NO: 465 - DNA, 1618 bp, Homo sapiens
  CDS (255)..(809)
tttccactggaggtgggctttattactgtcgccatgatgtgaaaagaggaagacagcacccattcccacgcctcctagacactgtgcaccaacaactgtctgctggggttagcacggagctgtccccacccccagggtcagagcacccacaggtgccgagctggcccaggagacccccacgctgctgacgctgtttgccttgtgtctgcacaggcctctactaaactctcccacacaattagtgtcttaaatatatgtacacgtatatattttgtcccaactgtgtcagttataaaatgaaaactgaccacttctccttacgttatcttcacagtagctgtgcagaagacaacaaatccagtgttgatagctcagggcaggctgcccaccccagcaaagggaagttcttcccccatgggacccactgggggacccagtgccgcggccacatctccgtgcttgggtggcagtgtagctgcccatctacggggtgccgggttggcttgggccttgccatgtgccagacgcatgcatacatacacacacacacacacacacacacacacaccccacccgattatggagcacatcacaccgatcccttgcagaggtgggggctggggcccaggacaatcagaagcagggcccctcccccagctgtctcgagaccaaagccatccagggcctctgagccctggggcatcacccagaagcgctgggctcccaggctggcacccagcacaccaggagcccagggcgcgtgggagatgcgccagggacggtctttcactccagaccaggctgactaataaatatgacatccagtgttgtcaggagatgagaaaataacgtagacttggctggactctgttgtcaaggccattcccagtcacagaggaaacatcccaggtggtctccaggcgtccaggtggctctgcacctgccgacccccagaggccagtgaggttctggcagcaagatgtgctccattaggcaggcaaagcagggcgacctgaaccaacgacatgtgtgggggttgtggtctccacattctattcatgttcgaggagcgtcagtctcccaaggctgcggatggaggcccctagggtgctgcgactcccactcctcacctgcccctaaccctgccgccatggccactttcacccatgcctcgccgtggggaaaggaaggcccgcaaaccctgcccctggcggacagggcagcccttgcctctgctcagtcagtgcacggaaatgcccacagctccagggagaccccctagcaggcagagtgaccgtcaaggtaaggcccacggtggcccagcagcagcacacagctcagcggcccagaccccaccctgggggatgcccagaggcttcctagacctgcactcaggcagacaagcatgtggctgggcggccaccagcagacatctggccgcctcaggaggctcttcctggctctaaagagaatccagttccaaattcccactttctctgctcaaagttacagtgtggtcataattgcacgctctcatggacccacgtcccacccgagtgacaatgatgccacagccactcagcttctagctggctctactccgaattccaccagactg

SEQ ID NO: 466 - DNA, 4258 bp, Homo sapiens
  CDS (50)..(3259)
agaaggctctgtctactgcagcatcaatagagaacagtatgcaggccttatgccaactcagactgatgtcaagttaaaattcaagccattatctaaaaaagttgtatctgccgctcttcagttttcattatcttgcatttttctgagggaaggaaaagccacagatgaagacatgcaaagtttggctagtttgatgagtatgaagcaggctgacattggcaatttagatgacttcgaagaagataatgaagatgatgatgagaacagagtgaaccaagaagaaaaggcagctaaaattacagagcttatcaacaaacttaactttttggatgaagcagaaaaggacttggccaccgtgaattcaaatccatttgatgatcctgatgctgcagaattaaatccatttggagatcctgactcagaagaacctatcactgaaacagcttcacctagaaaaacagaagactctttttataataacagctataatccctttaaagaggtgcagactccacagtatttgaacccattcgatgagccagaagcatttgtgaccataaaggattctcctccccagtctacaaaaagaaaaaatataagacctgtggatatgagcaagtacctctatgctgatagttctaaaactgaagaagaagaattggatgaatcaaatcctttttatgaacctaaatcaactcctcctccaaataatttggtaaatcctgttcaagaactagaaactgaaaggcgagtgaaaagaaaggccccggctccaccagtcctctcaccaaaaacaggagtattaaatgaaaacacagtttctgcaggaaaagatctctctacttctcctaagccaagccctataccaagtcctgttttggggcgaaagccaaatgctagtcagtctttgcttgtatggtgtaaagaagttacaaagaactaccgaggagtaaaaatcaccaattttactacatcgtggagaaatggtttatctttttgtgcaatattacaccactttagaccagatttaattgactacaagtctctgaatcctcaagatattaaagagaacaacaaaaaggcatacgatggatttgccagcataggaatttcccgattattggaaccttctgatatggtattattagcaattcctgataaactgactgttatgacttatctctatcaaataagggcacatttcagtggccaagaactaaatgtcgttcagatagaggaaaacagcagtaaaagcacatataaagttggaaactatgaaacagatacaaacagttctgttgatcaagaaaaattctatgcagagcttagtgatctgaagcgggagcctgaactacaacagcctatcagcggagcagtagacttcttatcacaggatgactctgtatttgtaaatgatagcggggttggagagtcagaaagtgagcatcaaactcctgatgatcaccttagtccaagcacagcctccccttactgtcgcaggactaaaagtgacacagaaccccagaagtctcagcagagctctggaaggacttcaggatctgatgaccctggaatatgttccaatacagattcaacccaagcacaggttttgttaggcaaaaagagactattgaaagctgagactttagaattgagtgacttatatgttagtgataagaagaaggatatgtctccaccctttatttgtgaggagacagatgaacaaaagcttcaaactctagacatcggtagtaacttggagaaagaaaaattagagaattccagatccttagaatgcagatcagatccagaatctcctatcaaaaaaacaagtttatctcctacttctaaacttggatactcatatagtagagatctagaccttgctaagaaaaaacatgcttccctgaggcagacggagtctgatccagatgctgatagaaccactttaaatcatgcagatcattcatcaaaaatagtccagcatcgattgttatctagacaagaagaacttaaggaaagagcaagagttctgcttgagcaagcaagaagagatgcagccttaaaggcggggaataagcacaataccaacacagccaccccattctgcaacaggcagctaagtgatcagcaagatgaagagcgacgtcggcagctgagagagagagctcgtcagctaatagcagaagctcgatctggagtgaagatgtcagaacttcccagctatggtgaaatggctgcagaaaagttgaaagaaaggtcaaaggcatctggagatgaaaatgataatattgagatagatactaacgaggagatccctgaaggctttgttgtaggaggtggagatgaacttactaacttagaaaatgaccttgatactcccgaacaaaacagtaagttggtggacttgaagctgaagaagctcctagaagttcagccacaggtggcaaattcaccctccagtgctgcccagaaagctgtaactgagagctcagagcaggacatgaaaagtggcacagaagatctccggactgaacgattacaaaaaacaacagaacgttttagaaatcctgttgtgttcagcaaagattctacagtcagaaaaactcaacttcagtctttcagccaatatattgagaatagaccagagatgaaaaggcagagatcaatacaggaagatacaaagaaaggaaatgaggagaaggcagcgataactgaaactcagaggaagccatcagaagatgaagtgcttaataaagggttcaaagacaccagtcagtatgtagtaggagaattggcagcactagagaatgagcaaaagcaaattgacacccgtgccgcgctggtggagaagcgccttcgctatctcatggacacaggaaggaacacagaagaagaagaagctatgatgcaggaatggtttatgttagttaataagaaaaatgccttaataaggagaatgaatcagctctctcttctggaaaaagaacatgatttagaacgacggtatgagctgctgaaccgggaattgagggcaatgctagccattgaagactggcagaagaccgaggcccagaagcgacgcgaacagcttctgctagatgagctggtggccctggtgaacaagcgcgatgcgctcgtcagggacctggacgcgcaggagaagcaggccgaagaagaagatgagcatttggagcgaactctggagcaaaacaaaggcaagatggccaagaaagaggagaaatgtgttcttcagtagccatcagatcagaaagaatctctcccaacattttagagtcttgcttcccaaaccagaaaaagtcagactcattgttgatttaaaacttttaacattttgtttggctggattgtactactttacctctactttaccaccaccacccttttcctccctcctttccaaataatatacagaactccaaaatagcttcatttaaggatttttttgtgagttaacaatttccttgaaatcctgtgaaatagatttgcacagacaccttgtgagtgattggtattggaggtgttcaagaaactgttcgaaaaagaacaaaaacacttccctcgttattttctctcattttttgatgagaggaaaatttgaaacattattcttgttgttgttggtaatagcataatgacagtgggaggggtacaaggggataagaaaaatgtcatgatttttttccggtcctgccacatgtaacacttactctgttacctaaattttatagttagatcatatccaatctacttattaaactgtgttctatttaccagtggagtttttctgcagtggttgcgtttcactgtaaggataatggagttcctctcctctgctttcctcagaggatggtcctttaacatagccagaaacaagccctgtggtttgaaggtgagctgtgaggatgggactaattgatatgcaccagtttacaaagacagtcttatcatccgagaatacaccatctttttctctggataattatttcttacatcatgcttgattcctacattttgttgggtctcaacattggctcacgaatgctgttaatatttattctgtattgataaaaagtctgtcttgccactacaagtaaatcccccatttaatattttcttctttagcatagcactgtcattttttgtgaaaatggttatgtttatttattacaatactgagtcatatataaattttcaataaaagcagaaactttcttaccttaaaaaaaaaaaaaaa

SEQ ID NO: 467 - DNA, 4150 bp, Homo sapiens
  CDS (50)..(3151)
agaaggctctgtctactgcagcatcaatagagaacagtatgcaggccttatgccaactcagactgatgtcaagttaaaattcaagccattatctaaaaaagttgtatctgccgctcttcagttttcattatcttgcatttttctgagggaaggaaaagccacagatgaagacatgcaaagtttggctagtttgatgagtatgaagcaggctgacattggcaatttagatgacttcgaagaagataatgaagatgatgatgagaacagagtgaaccaagaagaaaaggcagctaaaattacagagcttatcaacaaacttaactttttggatgaagcagaaaaggacttggccaccgtgaattcaaatccatttgatgatcctgatgctgcagaattaaatccatttggagatcctgactcagaagaacctatcactgaaacagcttcacctagaaaaacagaagactctttttataataacagctataatccctttaaagaggtgcagactccacagtatttgaacccattcgatgagccagaagcatttgtgaccataaaggattctcctccccagtctacaaaaagaaaaaatataagacctgtggatatgagcaagtacctctatgctgatagttctaaaactgaagaagaagaattggatgaatcaaatcctttttatgaacctaaatcaactcctcctccaaataatttggtaaatcctgttcaagaactagaaactgaaaggcgagtgaaaagaaaggccccggctccaccagtcctctcaccaaaaacaggagtattaaatgaaaacacagtttctgcaggaaaagatctctctacttctcctaagccaagccctataccaagtcctgttttggggcgaaagccaaatgctagtcagtctttgcttgtatggtgtaaagaagttacaaagaactaccgaggagtaaaaatcaccaattttactacatcgtggagaaatggtttatctttttgtgcaatattacaccactttagaccagatttaattgactacaagtctctgaatcctcaagatattaaagagaacaacaaaaaggcatacgatggatttgccagcataggaatttcccgattattggaaccttctgatatggtattattagcaattcctgataaactgactgttatgacttatctctatcaaataagggcacatttcagtggccaagaactaaatgtcgttcagatagaggaaaacagcagtaaaagcacatataaagttggaaactatgaaacagatacaaacagttctgttgatcaagaaaaattctatgcagagcttagtgatctgaagcgggagcctgaactacaacagcctatcagcggagcagtagacttcttatcacaggatgactctgtatttgtaaatgatagcggggttggagagtcagaaagtgagcatcaaactcctgatgatcaccttagtccaagcacagcctccccttactgtcgcaggactaaaagtgacacagaaccccagaagtctcagcagagctctggaaggacttcaggatctgatgaccctggaatatgttccaatacagattcaacccaagcacaggttttgttaggcaaaaagagactattgaaagctgagactttagaattgagtgacttatatgttagtgataagaagaaggatatgtctccaccctttatttgtgaggagacagatgaacaaaagcttcaaactctagacatcggtagtaacttggagaaagaaaaattagagaattccagatccttagaatgcagatcagatccagaatctcctatcaaaaaaacaagtttatctcctacttctaaacttggatactcatatagtagagatctagaccttgctaagaaaaaacatgcttccctgaggcagacggagtctgatccagatgctgatagaaccactttaaatcatgcagatcattcatcaaaaatagtccagcatcgattgttatctagacaagaagaacttaaggaaagagcaagagttctgcttgagcaagcaagaagagatgcagccttaaaggcggggaataagcacaataccaacacagccaccccattctgcaacaggcagctaagtgatcagcaagatgaagagcgacgtcggcagctgagagagagagctcgtcagctaatagcagaagctcgatctggagtgaagatgtcagaacttcccagctatggtgaaatggctgcagaaaagttgaaagaaaggtcaaaggcatctggagaacaaaacagtaagttggtggacttgaagctgaagaagctcctagaagttcagccacaggtggcaaattcaccctccagtgctgcccagaaagctgtaactgagagctcagagcaggacatgaaaagtggcacagaagatctccggactgaacgattacaaaaaacaacagaacgttttagaaatcctgttgtgttcagcaaagattctacagtcagaaaaactcaacttcagtctttcagccaatatattgagaatagaccagagatgaaaaggcagagatcaatacaggaagatacaaagaaaggaaatgaggagaaggcagcgataactgaaactcagaggaagccatcagaagatgaagtgcttaataaagggttcaaagacaccagtcagtatgtagtaggagaattggcagcactagagaatgagcaaaagcaaattgacacccgtgccgcgctggtggagaagcgccttcgctatctcatggacacaggaaggaacacagaagaagaagaagctatgatgcaggaatggtttatgttagttaataagaaaaatgccttaataaggagaatgaatcagctctctcttctggaaaaagaacatgatttagaacgacggtatgagctgctgaaccgggaattgagggcaatgctagccattgaagactggcagaagaccgaggcccagaagcgacgcgaacagcttctgctagatgagctggtggccctggtgaacaagcgcgatgcgctcgtcagggacctggacgcgcaggagaagcaggccgaagaagaagatgagcatttggagcgaactctggagcaaaacaaaggcaagatggccaagaaagaggagaaatgtgttcttcagtagccatcagatcagaaagaatctctcccaacattttagagtcttgcttcccaaaccagaaaaagtcagactcattgttgatttaaaacttttaacattttgtttggctggattgtactactttacctctactttaccaccaccacccttttcctccctcctttccaaataatatacagaactccaaaatagcttcatttaaggatttttttgtgagttaacaatttccttgaaatcctgtgaaatagatttgcacagacaccttgtgagtgattggtattggaggtgttcaagaaactgttcgaaaaagaacaaaaacacttccctcgttattttctctcattttttgatgagaggaaaatttgaaacattattcttgttgttgttggtaatagcataatgacagtgggaggggtacaaggggataagaaaaatgtcatgatttttttccggtcctgccacatgtaacacttactctgttacctaaattttatagttagatcatatccaatctacttattaaactgtgttctatttaccagtggagtttttctgcagtggttgcgtttcactgtaaggataatggagttcctctcctctgctttcctcagaggatggtcctttaacatagccagaaacaagccctgtggtttgaaggtgagctgtgaggatgggactaattgatatgcaccagtttacaaagacagtcttatcatccgagaatacaccatctttttctctggataattatttcttacatcatgcttgattcctacattttgttgggtctcaacattggctcacgaatgctgttaatatttattctgtattgataaaaagtctgtcttgccactacaagtaaatcccccatttaatattttcttctttagcatagcactgtcattttttgtgaaaatggttatgtttatttattacaatactgagtcatatataaattttcaataaaagcagaaactttcttaccttaaaaaaaaaaaaaaa

SEQ ID NO: 468 - DNA, 1380 bp, Homo sapiens
  CDS (54)..(959)
ttggccctcgaggccaagaattcggcacgagggagggacacatctggggctctatgaggaggacagctttgatcctgggctctggacttctctcatttgtggccttctggaactcagtgacatggcatcttcagagattttggggtgcttctggctacttttggcaagcccagtgggagaggctgctgactacatttgaagggaaggagtggatcctcttctttataggtgccatccaagtgccttgtctcttcttctggagcttcaatgggcttctattggtggttgacacaacaggaaaacctaacttcatctctcgctaccgaattcaggtcggcaagaatgaacctgtggatcctgtgaaactgcaccagtgcatgatatctttccccatggtggtcttcctctatcccttcctcaaatggtggagagacccctgccgccgtgagctacccaccttccactggttcctcctggagctggccatcttcacgctgatcgaggaagtcttgttctactattcacaccggctccttcaccacccaacattctacaagaaaatccacaagaaacaccatgagtggacagctcccattggcgtgatctctctctatgcccaccctatagagcatgcagtctccaacatgctaccggtgatagtgggcccattagtaatgggctcccacttgtcctccatcaccatgtggttttccttggccctcatcatcaccaccatctcccactgtggctaccaccttcccttcctgccttcgcctgaattccacgactaccaccatctcaagttcaaccagtgctatggggtgctgggtgtgctggaccacctccatgggactgacaccatgttcaagcagaccaaggcctacgagagacatgtcctcctgctgggcttcaccccgctctctgagagcatcccagactccccaaagaggatggagtgagagacagcctaagtgtcatcctggctgtccctcagccatgggatgcagacacggcttcctgattgcacctaacaatttgcctccttcggccacacgccctaatgatggcaccaccagggtagagggaaggtcggcttcccggaaaagcagggccaaggatgaggctttcttcaaactactgcccttgatgtccctcaatgggatcaggagttagcttaagaaaaaggaaaacacagctccccagactggaggctggtcagagggaggagacccctggtcctctgctgtggaaggagaggggttcagccccagataactcctttgtggcctgggcaggatgcagagaatgacaaggctgaaaggagggggactggaggctgcctggctccagcgagagctccttctgggaccagagggtggg

SEQ ID NO: 469 - DNA, 2184 bp, Homo sapiens
  CDS (323)..(2020)
cctatagggtagacccacgctggctagcgtttaaacttaagcttggtaccgagctcggatccactagtccagtgtggtggaattcgcggaaagtggtagcgattttcagcagagacgtagaaggcgccgggacccggaggaaccggaaaaaacagaactcagcgaaagagagctggcagtagcagtggcggtgtcccaggagaacgatgaggagaacgaagagcgctgggttggacctttacctgtggaggcaacactggccaagaagaggaaagtcttagagtttgaaagagtctatcttgataatctccccagtgcatccatgtatgagcgcagttacatgcatagagatgttatcacccatgtggtatgcaccaaaacagattttattattactgccagtcatgatggacatgtcaagttctggaaaaaaatagaagagggaattgaatttgttaaacattttcgtagtcacctgggagttattgagagtattgcagttagctctgagggagcattgttctgttctgtgggtgatgataaagcaatgaaggtgtttgatgtagtgaactttgacatgatcaacatgctgaaacttggctattttcctggacagtgtgagtggatctattgcccaggggatgcaatttcttcagttgctgcttccgaaaagagtacaggaaaaattttcatttatgatggccgaggagataaccagccacttcatatttttgacaaactccatacatcacctcttactcagatacggctaaacccagtttacaaagcagtagtgtcttctgacaaatctgggatgattgaatactggactgggcctcctcatgaatataaattccccaaaaatgtgaactgggaatataaaactgacactgatttatatgaatttgccaagtgtaaggcttatccaaccagcgtatgtttttcaccagatgggaagaaaatagctactattggttctgatagaaaagttagaattttcagatttgtaactggaaaactcatgagagtctttgatgaatcactaagcatgtttactgaactgcaacagatgaggcaacagttaccagacatggaatttggccgacgaatggctgtagaacgtgagttggagaaggttgatgctgtaagattaattaatatagtttttgatgaaactggacacttcgtgctgtatggaacaatgctgggcattaaagttataaatgtagagacaaaccggtgtgtgcggattttaggcaaacaagaaaatattagagtgatgcaattggctttgttccaggggatagccaaaaagcatcgtgctgcaactactatagaaatgaaagcttctgaaaatcctgttcttcagaatattcaagctgacccaacaatagtctgtacatcattcaaaaagaatagattttatatgtttaccaaacgagaaccagaagatacgaaaagtgcagattctgatcgagatgtttttaatgagaaaccttctaaagaagaagtcatggcagctactcaagctgaaggacctaaacgagtttcggacagtgccattatccacaccagcatgggagacattcacaccaaactttttcctgttgagtgccctaagacagtggaaaacttctgtgttcacagcagaaatggttattataatgggcatacatttcaccgtataattaagggctttatgattcagactggagatccaacaggtactggtatgggaggagaaagcatatggggaggagaatttgaagatgaatttcattcaacattacgacatgacaggccatacacactcagcatggctaacgcgggatcaaatactaatggatcccagtttttcataacggtagtaccaacgccttggcttgataataagcatacagtatttggacgagtgactaaaggaatggaagttgtacagaggatctccaacgtcaaagtcaatcccaaaacagataagccctatgaggatgtcagcatcataaatattactgtcaagtaaaataagatttgttttaatgtacttgcaaataaaaatacaatattaaacagattattttacattaggaagcttaggacttgctgaatatacagatcatgtttcaaagatacagtatttttgtattttttattaaaggctattttttaaaaattaaaaaaaaaaaa

SEQ ID NO: 470 - DNA, 2319 bp, Homo sapiens
  CDS (76)..(2076)
  misc_feature (1)...(2319): n = a,t,c or g
cttcgcgccggcccttccgcgggtgatcagctggtctgcgctcccctgacgtgggctggggcacgtcaccgccgaatggcagcctccagaaagccaccgcgagtaagggtgaatcaccaggattttcaactgagaaatttaagaataattgaacctaacgaggtgacacactcaggagacacaggtgtggaaacagacggcagaatgcctccaaaggtgacttcagagctgcttcggcagctgagacaagccatgaggaactctgagtatgtgaccgaaccgatccaggcctacatcatcccatcgggagatgctcatcagagtgagtatattgctccatgtgactgtcggcgggcttttgtctctggattcgatggctctgcgggcacagccatcatcacagaagagcatgcagccatgtggactgacgggcgctactttctccaggctgccaagcaaatggacagcaactggacacttatgaagatgggtctgaaggacacaccaactcaggaagactggctggtgagtgtgcttcctgaaggatccagggttggtgtggaccccttgatcattcctacagattattggaagaaaatggccaaagttctgagaagtgccggccatcacctcattcctgtcaaggagaacctcgttgacaaaatctggacagaccgtcctgagcgcccttgcaagcctctcctcacactgggcctggattacacaggcatctcctggaaggacaaggttgcagaccttcggttgaaaatggctgagaggaacgtcatgtggtttgtggtcactgccttggatgagattgcgtggctatttaatctccgaggatcagatgtggagcacaatccagtatttttctcctacgcaatcataggactagagacgatcatgctcttcattgatggtgaccgcatagacgcccccagtgtgaaggagcacctgcttcttgacttgggtctggaagccgaatacaggatccaggtgcatccctacaagtccatcctgagcgagctcaaggccctgtgtgctgacctctccccaagggagaaggtgtgggtcagtgacaaggccagctatgctgtgagcgagaccatccccaaggaccaccgctgctgtatgccttacacccccatctgcatcgccaaagctgtgaagaattcagctgagtcagaaggcatgaggcgggctcacattaaagatgctgttgctctctgtgaactctttaactggctggagaaagaggttcccaaaggtggtgtgacagagatctcagctgctgacaaagctgaggagtttcgcaggcaacaggcagactttgtggacctgagcttcccaacaatttccagtacgggacccaacggcgccatcattcactacgcgccagtccctgagacgaataggaccttgtccctggatgaggtgtaccttattgactcgggtgctcaatacaaggatggcaccacagatgtgacgcggacaatgcattttgggacccctacagcctacgagaaggaatgcttcacatatgtcctcaagggccacatagctgtgagtgcagccgttttcccgactggaaccaaaggtcaccttcttgactcctttgcccgttcagctttatgggattcaggcctagattacttgcacgggactggacatggtgttgggtcttttttgaatgtccatgagggtccttgcggcatcagttacaaaacattctctgatgagcccttggaggcaggcatgattgtcactgatgagcccgggtactatgaagatggggcttttggaattcgcattgagaatgttgtccttgtggttcctgtgaagaccaagtataattttaataaccggggaagcctgacctttgaacctctaacattggttccaattcagaccaaaatgatagatgtggattctcttacagacaaagagtgcgactggctcaacaattaccacctgacctgcagggatgtgattgggaaggaattgcagaaacagggccgccaggaagctctcgagtggctcatcagagagacgcaacccatctccaaacagcattaataaatacctccccggttttgtttttgtaaaatgctctggaggaaggaagaaacgtggcagatccctgacatctttcccctttcctttccttcttccctacctcccctttttactttagactttaaggaaggacagaaantcttcttatcctctttganattttattgcaaacattcagtcttttatggntttttnattgttggggaccaggccaggattaaattgctggcaccagaggggggg

SEQ ID NO: 471 - DNA, 4813 bp, Homo sapiens
  CDS (155)..(4813)
tttcgtggcctgccaggtgaggcgcggtcaccctgggcctctcacttccgcccaggtgaggcagggccgacaccgagcccgcccgacccgggctcccacctgctcctccagcgcaccaggtgtctttaagagtgattgaagagaataattcaaaatgcctgaaaatcctgctacagataaactgcaggtgctgcaggtacttgatcgcctgaaaatgaaattgcaggagaagggtgacacgtcgcagaatgagaagttatctatgttttatgagacactaaagagtcctctcttcaaccagatactcacacttcagcagtccatcaagcaactgaagggtcaactcaaccatataccctcagattgttcagccaactttgatttttctaggaaaggtttgttagtgttcacagatggttccattactaatggaaatgtccacaggccctctaataactcgactgtatctgggttatttccgtggaccccgaagttgggaaatgaagactttaactcagtcattcaacagatggctcagggccggcaaattgaatatatagatatagaacggccttcaactggaggccttggattcagtgtggtggccctcagaagtcaaaatctcggaaaagttgatatcttcgtgaaggatgtccagccagggagtgtagcagacagggatcaaagattaaaggaaaatgatcaaatattggccattaatcacacgccattggatcagaacatttcccatcagcaagcaattgcattattacaacaaaccactggatctttgagactgattgtggccagggaaccagtccacacaaaaagcagtacttctagcagcctaaatgatacaactctgcctgaaacagtttgttggggccatgttgaagaggttgagctcattaatgatggctctggactaggttttggaatagttggaggaaaaacaagtggcgtggttgtgaggactatagttcctggaggattagcagatcgagatggaagactccagacaggggaccacatcttgaagattggtggcacaaacgtgcagggaatgaccagtgagcaagttgcacaagttctaaggaactgtgggaattcagtcaggatgctcgttgctagagatccagctggtgacatttcagtcaccccccctgcccctgcagccttacctgttgccctgcctactgtagccagcaagggccctggttctgacagttctctttttgaaacttataatgttgagcttgtgagaaaagatgggcagagtcttggaattagaattgttggctatgttggaacatctcatacaggggaagcttcagggatttatgtgaaaagtataatacctggcagtgctgcgtaccacaatggccacattcaagtgaatgacaaaatagttgctgtcgatggcgtgaacattcagggttttgccaaccatgatgttgttgaagtattacgaaatgcagggcaggtggtacacctaaccctagttcgaaggaagacatcctcatctacttctccacttgaaccaccttcagacagaggaactgttgtagaaccactgaaaccaccagctctctttctaactggagcagtggaaactgaaactaatgtggatggtgaagatgaggaaattaaagaaagaattgatactttaaaaaatgacaacatacaagccttagaaaaattggaaaaagtcccagactctccagaaaatgagctgaaatccagatgggaaaacctgttgggtcctgattatgaagtaatggttgctactttggacacacagattgcagatgatgctgagttacagaaatattcaaagctgctgcctattcacactctgaggcttggtgtggaagtggattcctttgatgggcaccattatatttcttcaattgtttctggtggtcctgttgatacattgggtctcctacagccagaagatgagctgcttgaggtcaatggcatgcagctttatggaaaatctcgccgagaagcagtctcctttcttaaagaagtgccacccccttttactttggtttgctgtcggaggttgtttgatgatgaagcttctgtagatgaaccaaggcgcactgaaacctctcttcctgagacagaggttgaccacaatatggatgtcaatactgaagaagatgatgatggggaattagcactgtggtcccctgaagtcaagattgttgaactagtaaaagattgtaaaggtttgggattcagcattttggattaccaggaccctttagatcctacaagatcagtgattgtgatccgctccctggtagcagatggtgtagcagaaagaagtgggggactattacctggagaccgcctggtctcagtcaatgaataccgtttggacaacacctcacttgctgaagctgtggaaatattgaaagctgtgccaccaggcctagtacaccttggcatctgtaagcctttggtggaagataatgaagaagaaagttgttatattttacattcaagcagtaatgaagacaagactgaattttcaggaacaattcatgatataaattcatctttaatactcgaagcacccaagggatttagagatgaaccatattttaaagaagaacttgtggatgaaccatttctagatctgggaaagtctttccattcccaacaaaaagagatagagcaaagcaaggaggcctgggagatgcatgaatttctgactcctagattgcaggaaatggatgaagaaagagaaatgcttgttgatgaagaatatgagttatatcaagatccctcaccatccatggagttgtatcccttgtcgcacattcaagaggccactcctgtgccctctgtgaatgaacttcactttggtacacagtggttgcatgataatgaaccatccgagtctcaagaggcaagaaccgggaggactgtctattcccaggaggcacagccgtatggctattgccctgaaaatgtgatgaaagaaaattttgtcatggagtccctaccatctgtaccatcaactgaaggaaacagtcaacaaggcagatttgacgacctggaaaatcttaattcattagcaaaaactagtctggatttaggcatgatcccgaatgatgtccaaggtcctagcttgctcattgaccttcctgttgtggctcaaaggagggagcaagaagatttgcctttatatcaacaccaagcgacacgagttatttccaaggcctcagcatacacaggaatgttgtcttctagatatgccactgatacatgtgagttacctgagagagaagaaggcgaaggagaagaaactccaaattttagccactggggtccaccgagaattgttgagatttttagagaacccaatgtgtctcttgggatcagtattgttggtggacaaactgttataaaacgtctaaagaatggagaggagcttaaaggtatattcatcaaacaagttttagaagacagtccagcagggaagacgaacgcacttaaaactggagataaaatacttgaggtgtctggagtagatttgcagaatgcctcacacagcgaagcagttgaggccattaagaatgcaggaaaccctgtggtgttcattgttcagagtttgtcatccactccacgagtcattcctaacgtacataacaaggccaacaaaatcaccggtaaccagaaccaggacacccaagaaaagaaagaaaagaggcaaggaactgctccaccgccaatgaaacttcctcctccttataaagctctgactgatgacagtgatgaaaatgaagaagaagatgcctttaccgaccaaaaaatcagacaaagatatgcagatctgcctggagaactgcacattattgaacttgaaaaagataagaatggacttggactcagccttgctggtaataaagaccgatcacgcatgagcatatttgtggtgggaattaacccggaaggacctgctgccgcagatggacgaatgcgtattggagatgaactcttagagataaacaatcagattctgtatggaagaagtcaccaaaatgcatctgccattattaagactgccccatcaaaggtcaagctggttttcatcagaaacgaggatgcagtcaatcagatggccgttactccctttccagtgccatcaagttctccatcttctattgaggatcagagcggcaccgaacctattagtagtgaggaagatggcagcctcgaagttggtattaaacaattgcctgaaagtgaaagcttcaaactggctgtcagccagatgaaacagcaaaaatatccaacaaaagtctccttcagttcacaagagataccattagcaccagcttcatcataccattcaacagatgcagacttcacaggctatggtggtttccaggctcctctgtcagtggaccccgcaacgtgtcccattgtccctggacaggaaatgattatagaaatatccaagggacgttcagggcttggtctcagcattgtgggaggaaaagacacacccttgaatgctatagttatccatgaagtctatgaagaaggggcagcagccagagatggaagactttgggctggtgaccagatattagaggttaatggggttgacctgaggaactccagccacgaagaagccatcacagccctgaggcagaccccccagaaggtgcggctggtggtgtatagagatgaggcacactaccgggatgaggagaacttggagattttccctgtggatctgcagaagaaagctggccggggcctgggcctgagcatcgttgggaaacggtaa

SEQ ID NO: 472 - DNA, 2470 bp, Homo sapiens
  CDS (473)..(1324)
ggcggacatttgccatctgcaaagagagtgcagtcagcacattacagaagaggaagatgatgatcctgatgtttattactttgaatcagatcatgtggcactgaaacacaacaaagattatcagagactattacagacgattgctgtactcgaggctcagcgttctcaagcagtccaagaccttgaaagtttaggcaggcaccagagagaagcactgaaaaatcccattggatttgtggaaaaactccagaagaaggctgatattgggcttccatatccacagagagttgttcaattgcctgagatcgtatgggaccaatatacccatagccttgggaattttgaaagagaatttaaaaatcgtaaaagacatactagaagagttaagctagtttttgataaagtaggtttacctgctagaccaaaaagtcctttagatcctaagaaggatggagagtccctttcatattctatgttgcctttgagtgatggtccagaaggctcaagcagtcgtcctcagatgataagaggacgcttgtgtgatgataccaaacctgaaacatttaaccagttgtggactgttgaagaacagaaaaagctggaacagctactcatcaaataccctcctgaagaagtagaatctcgacgctggcagaagatagcagatgaattgggcaacaggacagcaaaacaggttgccagccgagtacagaagtatttcataaagctaactaaagctggcattccagtaccaggcagaacaccaaacttatatatatactccaaaaagtcttcaacaagcagacgacagcaccctcttaataagcatctctttaagccttccactttcatgacttcacatgaaccgccagtgtatatggatgaagatgatgaccgatcttgttttcatagccacatgaacactgctgttgaagatgcatcagatgacgaaagtattcctatcatgtataggaatttacctgaatataaagaactattacagtttaaaaagttaaagaagcagaaacttcagcaaatgcaagctgaaagtggatttgtgcaacatgtgggctttaagtgtgataactgtggcatagaacccatccagggtgttcggtggcattgccaggattgtcctccagaaatgtctttggatttctgtgattcttgttcagactgtctacatgaaacagatattcacaaggaagatcaccaattagaacctatttataggtcagagacattcttagacagagactactgtgtgtctcagggcaccagttacaattaccttgacccaaactactttccagcaaacagatgacatggaagagaacatcatttactagtcctcttcaacacatagcaatggtatcattgttaattatgtgcacagtttggaaagattctctgctttcccagaaatgacactcacagcatgagagcttcctgagtgttctcgtcaagtacagctctgcaccgttgtggctctagatcactgttcagcagctgaacattcctggtgagcaaaggtttccctggtgaatttttcaccactgcgttttaggtggtgatcttaaatgggtgagatggaacgagagcacacattaaagagagagtaaattccaaaggtttcaaagaacttggtcataaatatgataatgagaagacaaagtatttatattaaaacagtttagtagccttcagttttgtgaaaatagttttcagcacagaaactgacttctttagacaaagttttaaccaatgatggtgtttgcttctaggatatacactttaaaagaactcactgtcccagtggtggtcattgatggcctttagtaaattggagctgcttaatcatattgatatctaatttcttttaaccacaatgaattgtccttaattaccaacagtgaagcactacaggaggcaactgtggcattgcttccttaaccagctcatggtgtgtgaatgttataaaattgtcactcagatatattttttaaatgtaatgttatataagatgatcatgtgatgtgtacaaactatggtgaaaagtgccagtggtagtaactgtgtaaagtttctaattcacaacattaattcctttaaaatacacagccttctgcctctgtatttggagttgtcagtacaactcatcaaagaaaactgcctaatataaaaatcatatatatggtaataatttccctcttttgtagtctgcacaagatccataaaagattgtatttttattactatttaaacaagtgattaaatttagtctgcacagtgagcaagggttcacatgcattcttttatactgctggattttgttgtgcatcatttaaaacattttgtatgtttcttcttatctgtgtatacagtatgttcttgaatgatgttcatttgtcaggagaactgtgagaaataaactatgtggatactgtctgtttatattaaaaaaaaaaaa

SEQ ID NO: 473 - DNA, 2374 bp, Homo sapiens
  CDS (473)..(1228)
ggcggacatttgccatctgcaaagagagtgcagtcagcacattacagaagaggaagatgatgatcctgatgtttattactttgaatcagatcatgtggcactgaaacacaacaaagattatcagagactattacagacgattgctgtactcgaggctcagcgttctcaagcagtccaagaccttgaaagtttaggcaggcaccagagagaagcactgaaaaatcccattggatttgtggaaaaactccagaagaaggctgatattgggcttccatatccacagagagttgttcaattgcctgagatcgtatgggaccaatatacccatagccttgggaattttgaaagagaatttaaaaatcgtaaaagacatactagaagagttaagctagtttttgataaagtaggtttacctgctagaccaaaaagtcctttagatcctaagaaggatggagagtccctttcatattctatgttgcctttgagtgatggtccagaaggctcaagcagtcgtcctcagatgataagaggacgcttgtgtgatgataccaaacctgaaacatttaaccagttgtggactgttgaagaacagaaaaagctggaacagctactcatcaaataccctcctgaagaagtagaatctcgacgctggcagaagatagcagatgaattgggcaacaggacagcaaaacagtcttcaacaagcagacgacagcaccctcttaataagcatctctttaagccttccactttcatgacttcacatgaaccgccagtgtatatggatgaagatgatgaccgatcttgttttcatagccacatgaacactgctgttgaagatgcatcagatgacgaaagtattcctatcatgtataggaatttacctgaatataaagaactattacagtttaaaaagttaaagaagcagaaacttcagcaaatgcaagctgaaagtggatttgtgcaacatgtgggctttaagtgtgataactgtggcatagaacccatccagggtgttcggtggcattgccaggattgtcctccagaaatgtctttggatttctgtgattcttgttcagactgtctacatgaaacagatattcacaaggaagatcaccaattagaacctatttataggtcagagacattcttagacagagactactgtgtgtctcagggcaccagttacaattaccttgacccaaactactttccagcaaacagatgacatggaagagaacatcatttactagtcctcttcaacacatagcaatggtatcattgttaattatgtgcacagtttggaaagattctctgctttcccagaaatgacactcacagcatgagagcttcctgagtgttctcgtcaagtacagctctgcaccgttgtggctctagatcactgttcagcagctgaacattcctggtgagcaaaggtttccctggtgaatttttcaccactgcgttttaggtggtgatcttaaatgggtgagatggaacgagagcacacattaaagagagagtaaattccaaaggtttcaaagaacttggtcataaatatgataatgagaagacaaagtatttatattaaaacagtttagtagccttcagttttgtgaaaatagttttcagcacagaaactgacttctttagacaaagttttaaccaatgatggtgtttgcttctaggatatacactttaaaagaactcactgtcccagtggtggtcattgatggcctttagtaaattggagctgcttaatcatattgatatctaatttcttttaaccacaatgaattgtccttaattaccaacagtgaagcactacaggaggcaactgtggcattgcttccttaaccagctcatggtgtgtgaatgttataaaattgtcactcagatatattttttaaatgtaatgttatataagatgatcatgtgatgtgtacaaactatggtgaaaagtgccagtggtagtaactgtgtaaagtttctaattcacaacattaattcctttaaaatacacagccttctgcctctgtatttggagttgtcagtacaactcatcaaagaaaactgcctaatataaaaatcatatatatggtaataatttccctcttttgtagtctgcacaagatccataaaagattgtatttttattactatttaaacaagtgattaaatttagtctgcacagtgagcaagggttcacatgcattcttttatactgctggattttgttgtgcatcatttaaaacattttgtatgtttcttcttatctgtgtatacagtatgttcttgaatgatgttcatttgtcaggagaactgtgagaaataaactatgtggatactgtctgtttatattaaaaaaaaaaaa

SEQ ID NO: 474 - DNA, 1432 bp, Homo sapiens
  CDS (13)..(1413)
cattgaaagtcgatggcatcgcacgagaccatggcggctgggaccctgtacacgtatcctgaaaactggagggccttcaaggctctcatcgctgctcagtacagcggggctcatgtccgcgtgctctccgcaccaccccacttccattttggccaaaccaaccgcacccctgaatttctccgcaaatttcctgccggcaaggtcccagcatttgagggtgatgatggattctgtgtgtttgagagcaacgccattgcctactatgtgagcaatgaggagctgcggggaagtactccagaggcagcagcccaggtggtgcagtgggtgagctttgctgattccgatatagtgcccccagccagtacctgggtgttccccaccttgggcatcatgcaccacaacaaacaggccactgagaatgcaaaggaggaagtgaggcgaattctggggctgctggatgcttacttgaagacgaggacttttctggtgggcgaacgagtgacattggctgacatcacagttgtctgcaccctgttgtggctctataagcaggttctagagccttctttccgccaggcctttcccaataccaaccgctggttcctcacctgcattaaccagccccagttccgggctgtcttgggcgaagtgaaactgtgtgagaagatggcccagtttgatgctaaaaagtttgcagagacccaacctaaaaaggacacaccacggaaagagaagggttcacgggaagagaagcagaagccccaggctgagcggaaggaggagaaaaaggcggctgcccctgctcctgaggaggagatggatgaatgtgagcaggcgctggctgctgagcccaaggccaaggaccccttcgctcacctgcccaagagtacctttgtgttggatgaatttaagcgcaagtactccaatgaggacacactctctgtggcactgccatatttctgggagcactttgataaggacggctggtccctgtggtactcagagtatcgcttccctgaagaactcactcagaccttcatgagctgcaatctcatcactggaatgttccagcgactggacaagctgaggaagaatgccttcgccagtgtcatcctttttggaaccaacaatagcagctccatttctggagtctgggtcttccgaggccaggagcttgcctttccgctgagtccagattggcaggtggactacgagtcatacacatggcggaaactggatcctggcagcgaggagacccagacgctggttcgagagtacttttcctgggagggggccttccagcatgtggcaaagccttcaatcagggcaagatcttcaagtgaacatctcttgccatcacctagctgcctgcacctgcccttcagggagatgggggtcattaaaggaaactgaacattgaaaaaaaaaaaaa

SEQ ID NO: 475 - DNA, 846 bp, Homo sapiens
  CDS (250)..(624)
  misc_feature (1)...(846): n = a,t,c or g
tgtggcttcccagtggaggatgatcagaatgtcccgggggtaatgntggntcgcagttttctcacgtgctgactgaaggttttttgccgtggctcaacagctttcgaggcacatcttcagtaggataatatctaggcattttgcgaagtttaaccacccgggtaccgccgttcttgtcaccaccaactggttttgtaacagttgcgagaaccttctccttctttttctttccaacttggacgctgcagaatggctcccgcaaagaagggtggcgagaagaaaaagggccgttctgccatcaacgaagtggtaacccgagaatacaccatcaacattcacaagcgcatccatggagtgggcttcaagaagcgtgcacctcgggcactcaaagagattcggaaatttgccatgaaggagatgggaactccagatgtgcgcattgacaccaggctcaacaaagctgtctgggccaaaggaataaggaatgtgccataccgaatccgtgtgcggctgtccagaaaacgtaatgaggatgaagattcaccaaataagctatatactttggttacctatgtacctgttaccactttcaaaaatctacagacagtcaatgtggatgagaactaatcgctgatcgtcagatcaaataaagttataaaattgccttcatgtttttgttctttttagttgcaacataatgtacttgtataccctatcctaattatgggatcatttgaagagcttttcccaaattgatggcctgtgctgccttcttcccatnccctgggttttaaagtgattcnaactgcanctagttttagaaccactgttctgggtagttnggga

SEQ ID NO: 476 - DNA, 2289 bp, Homo sapiens
  CDS (31)..(1938)
tgactgcccctttctctttctttctcagaaatgcctctaccgctgctgccgatggacctgaagggagagcccggcccccctgggaagcccgggccctggggtccccctggcccccctggcttcccaggaaaaccaggccatggaaagccaggactccatgggcagcctggccctgctgggccccctggcttctcccggatgggcaaggctggtcccccagggctccctggcaacgtcgggccaccagggcagccggggcttcggggggagccaggaatacgaggggaccagggcctccggggacccccaggaccccctggcctcccgggcccctcaggcattactatccctggaaaaccaggtgcccaaggggtgccagggcccccaggattccagggggaaccagggccccagggggagcctgggcccccaggtgatcgaggcctcaagggggataatggagtgggccagcccgggctgcctggggccccagggcaggggggtgcccccggcccccccggcctccctggtccagctggcttaggcaaacctggtttggatgggcttcctggggccccaggagacaagggtgagtctgggcctcctggagttccaggccccaggggggagccaggagctgtgggcccaaaaggacctcctggagtagacggtgtgggagtcccaggggcagcagggttgccaggaccacagggcccatcaggggccaaaggggagccaggaacccggggcccccctgggctgataggccccactggctatgggatgccaggactgccaggccccaagggggacaggggcccagctggggtcccaggactcttgggggacaggggtgagccaggggaggatggggagccaggggagcagggcccacagggtcttgggggtccccctgggcttcctgggtctgcagggcttcctggcagacgtgggccccctgggcctaagggtgaggcagggcctggaggacccccaggagtgcctggcattcgaggtgaccaggggcctagtgggctggctgggaaaccaggggtcccaggtgagaggggacttcctggggcccatggaccccctggaccaactgggcccaagggtgagccgggtttcacgggtcgccctggaggaccaggggtggcaggagccctggggcagaaaggtgacttggggctccctgggcagcctggcctgaggggtccctcaggaatcccaggactccagggtccagctggccctattggcccccaaggcctgccgggcctgaagggggaaccaggcctgccagggccccctggagaggggagagcaggggaacctggcacggctggcccacgggggcccccaggggtccctggctcccctggaatcacggggcctccggggctcccgggaccccctggtgcccctggggccttcgatgagactggcatcgcaggcttgcacctgcccaacggcggtgtggagggtgccgtgctgggcaaggggggcaagccacagtttgggctgggcgagctgtctgcccatgccacaccggccttcactgcggtgctcacctcgcccttacccgcctcgggcatgcccgtgaaatttgaccggactctctacaatggccacagcggctacaacccagccactggcatcttcacctgccctgtgggcggcgtctactactttgcttaccatgtgcacgtcaagggcaccaacgtgtgggtggccctgtacaagaacaacgtgccggccacctatacctacgatgagtacaagaagggctacctggaccaggcatctggtggggccgtgctccagctgcggcccaacgaccaggtctgggtgcagatgccgtcggaccaggccaacggcctctactccacggagtacatccactcctccttttcaggattcttgctctgccccacataacccgcggggggtgtcctgctgccctggcctcctcccctttagtggtagagcgaccttttcaattacaaagaacctcctggaaaaaaaaacaaaagctgaacagaggcggccgtggccttggcccgaggagactaacttgctttctccctgcatgcaggctgagattgtttctggaaggggctggcctgagtttctttcccccaaatgtctgtgcagtgtcagggctgcaccccataggccctgaggcacacagcccagccccttgtgagtcctggcctctgctgggccctgaaggagctgagagggagctcaactccccaccccgccacgtggggagaccgcccttccccc

SEQ ID NO: 477 - DNA, 1134 bp, Homo sapiens
  CDS (353)..(1075)
ggaattcaatgctgcacaagctctgagccctcctggggctgcgaagttcctctgatgggaggtgtgtggtggccatcccatccctgtgtaagacctggggaaaccactcttcaaggttcaggaggagggagggcggcccccgacccttaaccagagcgaggttgttgctttgtgtccacagggaccaggagcgaaccatgatgccaggtaggaggggctgactgggccctgcgagcgcgtgcctttcctgctgggcagaggccctccacatggggccacgcgggccgggcacaggagggcagtcagatgggcagggcctgagagcctccctcctctccctaggtccctaatcatggactccccaagagctggcacccaccagggccccctcgatgcagagacagaggtcggtgctgaccgctgcacgtcgactgcctaccaggagcagaggccccaggtggagcaagttggcaaacaggctcctctctccccagggctgccggcaatgggggggcctggccccggcccctgtgaggaccccgcgggtgctgggggagcaggtgcagggggctccgagcccctggtgactgtcaccgtgcagtgcgccttcacagtggccctgagggcacgaagaggagccgacctgtccagcctgcgggcactgctgggccaagccctccctcaccaggcccagcttgggcaactcagttacctagccccaggtgaggacgggcactgggtccccatccccgaggaggagtcgctgcagagggcctggcaggacgcagctgcctgccccagggggctgcagctgcagtgcaggggagccgggggtcggccggtcctctaccaggtggtggcccagcacagctactccgcccaggggccagaggacctgggcttccgacagggggacacggtggacgtcctgtgtgaagtggaccaggcatggctggagggccactgtgacggccgcatcggcatcttccccaagtgcttcgtggtccccgccggccctcggatgtcaggagcccccggccgcctgccccgatcccagcagggagatcagccctaatgatgctgtgtccatgatgcttttaataaaaacaacccccactgcaaaaaaaaaaaaaa

SEQ ID NO: 478 - DNA, 3175 bp, Homo sapiens
  CDS (694)..(1779)
caggaagggccatgaagattaataaagatttggactcagggcaaatatttacttagtagcaataactcaaagaattactgttgaataaataagccaattaagcagccaatcacgtactatgcggatgcacacaaatgaaaccctcacttcaacctgaagacattcgcacatgagttacgtagagggacctgcaggaagcggtagagaaaacataaggcttatgcgtttaatttccacaccaatttcaggatctttgtcactgacagcagcactaagacttgttaactttatatagttaagaagaacaaggctgagcgcgatgactcacgcctgtaagcctagaactttgggaggccaaagcaggcagactgcttgagcccaggagttccagaccagcctgggcaacatggcaacaccccatctctacaaaaaaatacaagaatcagctgggcgtggtgatgtgttcctgtaatctcagctactcgggaggcagaggcaggaggattgcttgaacccgggaggcagaggttgtagttagccgagatctcgccactgcactccagtctggacgacagagtgagactcagtctcaaataaataaataaatacataaatataaggaaaaaaataaagctgctttctcctcttcctcctctttggtctcatctggctctgctccaggcatctgccacaatgtgggtgcttacacctgctgcttttgctgggaagctcttgagtgtgttcaggcaacctctgagctctctgtggaggagcctggtcccgctgttctgctggctgagggcaaccttctggctgctagctaccaagaggagaaagcagcagctggtcctgagagggccagatgagaccaaagaggaggaagaggaccctcctctgcccaccaccccaaccagcgtcaactatcacttcactcgccagtgcaactacaaatgcggcttctgtttccacacagccaaaacatcctttgtgctgccccttgaggaagcaaagagaggattgcttttgcttaaggaagctggtatggagaagatcaacttttcaggtggagagccatttcttcaagaccggggagaatacctgggcaagttggtgaggttctgcaaagtagagttgcggctgcccagcgtgacgatcgtgagcaatggaagcctgatccgggagaggtggttccagaattatggtgagtatttggacattctcgctatctcctgtgacagctttgacgaggaagtcaatgtccttattggccgtggccaaggaaagaagaaccatgtggaaaaccttcaaaagctgaggaggtggtgtagggattatagagtcgctttcaagataaattctgtcattaatcgtttcaacgtggaagaggacatgacggaacagatcaaagcactaaaccctgtccgctggaaagtgttccagtgcctcttaattgagggtgagaattgtggagaagatgctctaagagaagcagaaagatttgttattggtgatgaagaatttgaaagattcttggagcgccacaaagaagtgtcctgcttggtgcctgaatctaaccagaagatgaaagactcctaccttattctggatgaatatatgcgctttctgaactgtagaaagggacggaaggacccttccaagtccatcctggatgttggtgtagaagaagctataaaattcagtggatttgatgaaaagatgtttctgaagcgaggaggaaaatacatatggagtaaggctgatctgaagctggattggtagagcggaaagtggaacgagacttcaacacaccagtgggaaaactcctagagtaactgccattgtctgcaatactatcccgttggtatttcccagtggctgaaaacctgattttctgctgcacgtggcatctgattacctgtggtcactgaacacacgaataacttggatagcaaatcctgagacaatggaaaaccattaactttacttcattggcttataaccttgttgttattgaaacagcacttctgtttttgagtttgttttagctaaaaagaaggaatacacacaggaataatgaccccaaaaatgcttagataaggcccctatacacaggacctgacatttagctcaatgatgcgtttgtaagaaataagctctagtgatatctgtgggggcaatatttaatttggatttgattttttaaaacaatgtttactgcgatttctatatttccattttgaaactatttcttgttccaggtttgttcatttgacagagtcagtattttttgccaaatatccagataaccagttttcacatctgagacattacaaagtatctgcctcaattatttctgctggttataatgcttttttttttttttgcttttatgccattgcagtcttgtactttttactgtgatgtacagaaatagtcaacagatgtttccaagaacatatgatatgataatcctaccaattttcaagaagtctctagaaagagataacacatggaaagatggtgtggtgcagcccagcccacggtgcctgttccatgaatgctggctacctatgtgtgtggtacctgttgtgtccctttctcttcaaagatccctgagcaaaacaaagatacgctttccatttgatgatggagttgacatggaggcagtgcttgcattgctttgttcgcctatcatctggccacatgaggctgtcaagcaaaagaataggagtgtagttgagtagctggttggccctacatctctgagaagtgacgttacactgggttggcataagatatcctaaaatcacgctggaaccttgggcaaggaagaatgtgagcaagagtagagagagtgcctggatttcatgtcagtgaagccatgtcaccatatcatatttttgaatgaactctgagtcagttgaaatagggtaccatctaggtcagtttaagaagagtcagctcagagaaagcaagcataagggaaaatgtcacgtaaactagatcagggaacaaaatcctctccttgtggaaatatcccatgcagtttgttgatacaacttagtatcttattgcctaaaaaaaaatttcttatcattgtttcaaaaaagcaaaatcatggaaaatttttgttgtccaggcaaataaaaggtcattttaatttaaaaaaaaaaaa

SEQ ID NO: 479 - DNA, 5710 bp, Homo sapiens
  CDS (480)..(3572)
catttagatttgatacgagaaacagtagcgccccattcgagaggataagtatgcctcaaacacaggagttcttgggaagagaattatcacaagagacaacttctgttgggtgttggccagtgtccctcgtccccccaccctgggtccccactgctttacctcttgctttgcagccttctctcctcacagccttcctgtggctgtgtttttggccctgatagccccatggcacaactgcactttgcctcacctaggcctgtggcttcttgcctggcaggtgccacttctccacttttaagcagtgccaagagtggctctcacggctaagccgagccacagcaagacctgccaagcctgaagacctctttgcctttgcctaccatgcctggtgcctggggctgaccgaggaggaccagcacactcacctatgtcagccaggtgagcacatacgttgtcgacaggaggcggagcttgcaaggatgggctttgacctgcagaacgtctggagagtctcacacatcaacagcaactacaaattgtgccccagttacccccagaagctgctggttcctgtgtggatcactgacaaagagctggagaacgtggcttccttccgctcctggaagcggattcccgtggttgtgtatagacacttgcgcaatggggctgccatcgcccgctgcagccagccagagatcagctggtggggctggcgcaatgctgatgatgagtacctggtcacgtccattgctaaagcctgtgccctggacccggggacaagggccactgggggctccctcagcaccgggaataatgataccagcgaggcgtgtgatgctgactttgattcttctctgactgcgtgctctggagtggagagcacagcagctcctcaaaagctgctgatcctggatgcgcgatcctacacggcagcagtggccaaccgggccaagggtggaggctgtgaatgtgaagagtactatcccaactgtgaggtcgtgttcatgggaatggccaacatccatgccatccggaacagctttcagtacctccgggctgtgtgtagccagatgccggatcctagcaactggttgtcggcactggagagtaccaaatggctgcagcacttgtcggtgatgctaaaagcagctgtgctggtggctaatacagtagaccgggaaggccggcctgtgctggtacactgctcagatggctgggaccgcacaccgcagatcgtagccctggccaaaatattactggacccatattacaggacgttggagggcttccaagtgttagtggagtctgactggctggattttgggcacaagtttggagatcgctgtggccaccaagagaatgtggaggaccaaaacgaacaatgccctgtgttcctccagtggcttgattctgttcatcagttgcttaagcagttcccctgcatgtttgaatttaatgaagcattcctggtaaaactggtgcaacacacatactcctgcctctacggcaccttcctggccaacaacccctgtgagcgagagaagcgcaacatctacaagcggacctgctctgtgtgggcgctccttcgagctggcaataaaaactttcataacttcctctacacacccagctcagacatggtcctgcatcctgtttgtcatgtccgggccctgcacctctggacagctgtttatctgccagcatcatctccatgcacacttggggaagaaaacatggatctttacctttccccagtggcccagagccaggagttctctggccgctctctggacagattacctaaaaccagatccatggatgatcttctttctgcctgtgacacaagcagccccctgactcgtacatccagtgaccctaacctgaataaccactgtcaggaggtcagggtaggcctggagccctggcacagcaatcctgagggatcagagacaagctttgtggactctggggtaggagggcctcagcaaactgtaggagaagtgggtcttcctcctcctctgcccagcagccagaaagactacttgagcaataaacctttcaagagtcacaaaagctgttctccaagttacaaactgcttaataccgcagtgcctcgggaaatgaagagcaacacctctgatcctgagatcaaagtcctagaagagactaagggaccagctccagacccttctgcccaggatgagctgggtaggactttagatggcataggggagccacctgaacattgtcctgaaacagaagctgtcagtgcactctccaaggtcatttctaacaagtgtgatggagtttgtaattttcctgagtcttcccagaactctcctacaggtacgccccaacaggcccagccagactccatgctaggtgtgccctccaagtgtgttcttgatcacagcctcagcaccgtttgcaacccaccgagtgctgcctgccaaactcctctagacccaagcactgacttcctcaaccaagatccctcagggtctgtggcaagtatctcccaccaggaacaactgagttctgtgccggatctgacccatggggaggaagacattggtaaaagaggaaataataggaatgggcagttattggaaaatcctcgctttgggaaaatgccattggaattggtccggaagccaatttctcagagccagatcagtgagttctcttttctagggtccaactgggacagcttccaagggatggtgacttcattcccaagtggggaggccacccctcggcggctgctttcctatggctgttgtagcaagaggccaaacagtaagcagatgcgggccacagggccctgctttgggggccagtgggctcagagagaaggtgtgaagtcacctgtctgttctagtcattccaatggacattgtactggcccaggaggaaagaaccagatgtggttgtccagtcatccaaagcaagtctctagcacaaagcccgttccactgaactgcccttctccagtgcctcctctgtatttggatgatgatggactcccctttcccacggatgtgatccagcataggttacggcaaatcgaagcagggtacaaacaagaggtggagcagctacgtcgacaggtgcgtgagcttcagatgaggctggacatccgtcactgctgtgcccctccagcagagccccccatggactatgaggatgattttacatgtttgaaggagtcagatggcagtgatactgaggattttggctctgatcacagtgaagactgcctttcagaagcaagctgggaacctgttgataagaaagagactgaggtgactcgctgggttccagaccatatggcatcacactgctataactgtgactgtgaattctggttggccaaacgaagacaccattgcagaaattgtgggaatgtattttgtgctggatgctgccacctgaagctgcccattcctgatcagcaactctatgacccagttctcgtctgtaactcatgttacgaacacattcaagtctctcgtgccagggaactcatgagccaacagctgaagaaacccattgctacagcttccagttgaatgccggggagaaacctgtccaattttagcaggtttgaagggaggatcttcttcagttgtagtttggaaggttccttggtgtggctcatgaaatcacagagctcagagataccatcttgagaaatcctccttggtatcatgaaactggagcagaggaattgcaatttagcaggaggtcctctactggtgataccctcaccttggggtaatggtcctaacccagacccagggtctggaagcttaatgttgagttggtgactccagcctctttctcctggaggtcacaagatgatgattgcgtagatgttgcctggtgcaaagtgccccaaacagcaatagaaaggcatatgtataaccaaactccaagtgataaccagacccatctctcctccaccttgacaaaagcagattatagtatacaaggtaggaattcctgtcctatttgagatgaactatatcctgtacctctgtgctctgtgtctgcatgaaggctcagcctttagaggcactccttctagttgcattagtactgtctttctgtggagtttggtttgaagactggctcagcaagtggaggtttcaatgtatttttcagttggctcatcagccagcattggtgaatattcagtttaggggaacagttctagggagtgagacatttttgggagcagaggaaaactctgctgatgttcggtcctggcaaacattgagttattttgagctgtgaaggcagtcgtctctgttacacagtggcagctcttgagttatgcactgtgaagaatgagaagggaaaagcaaaaattatccttgtgaaatatctgctgattgtgccctactctttgcacctgacttttcctagttgtcctggtgctaacacaggagctacaccttgatcctctcctggcatgaaaataaaacaaaggttttcgttgttgttgttccattgcccatttcccccatgttgtctttcccttggctgatgcctcctctgggtcacattgcttcttatcctgaacacttgacaccttgagggtagaatttagcgtttggtttttacctcctagcatatgctgtttggtatgtgagggtttcagtacaaatgctgctgtctatttctgtgcacttaacaatggaacccaaacagaagagaataaagccttgataccaaaattgggaaagaacatgtgtccatttggaccaaacgttgttggtttttaaaaaattttattttgtttttttgttttttttttttttttttttcatcttaatatgtaccagtggcacttaaccaaaagatacagtgatatagccatgtactgtgggtgggacagatacagtctccttggcctataatgaaaccactaggactttatacagttttccttaatttgttgacatataaatggtaaattatatttaggcttatcctgttttgaaatgatggtagtcatctttcttactgctactttcatgttgctttctagaaaacagcatttcattccaaaataactaggatctgcatttagaacaagaatcattatttgtcctgaccttttcagtcctacagagacgcatctgtggttcttttgtacttgccatagatgtaacctaaaaagttttggcatatttaggtcagcctagcggaactttttttttcatttaaatggagctgaataatggagattttgtgtctgcaaaattcctgagatcattgaaaaagtaacaagctgttccttgtttctgatacataaaattattttaagcattttatcaatcattaaaatttactgccagttgtgagtggctttttaattaacttgtctttcattgcacttcactctgcctgttttcaaggggagtaagattggtaacatttggggagactgtatctgtctacttagcgtggctgttttgagggactgtcccatcagtgaacaaactgcatggccttggagagagactctgggctcttggctcagatgtgttcatcaaatactcctttcagagctgttgtgggtgtaagtgacatgatgtggccaaaaatccaaactgtgcagttgcgttgtgacaaacatgcaatgtgctgtaaaaattcaatacagtttaaataaaatctctatattagtaaaaaaaaaaaa

SEQ ID NO: 480 - DNA, 1906 bp, Homo sapiens
  CDS (67)..(1740)
ccggaattcccgggtcgacccacgcgtccgggaaaaacaactattggtttttcttgggatgactgaatgacctttttctcttcagttgctgattttatagggctagatcccagaattgctgcatggcttatagatcctagtgatgccacaccctcttttgaagatttagtagaaaaatactgtgaaaaatccattacagttaaagtgaacagcacatatggaaattcctcaagaaatattgtgaatcagaatgtacgtgagaacctgaagacactctacagacttacaatggacctttgctctaaactgaaggattatggtttatggcaactatttcgtactttggagcttcctctgataccaattttggcagtgatggaaagccatgccattcaggtgaacaaagaggagatggagaagacgtcagcacttcttggggctcgtctcaaggaattggagcaagaagctcattttgttgcaggagaacggtttcttataacgagcaataaccagcttcgagagatcctctttggcaagttaaagctgcacctgctgagtcaaaggaacagtctccccagaacggggttgcagaaatacccgtctacagtgtcagaagcattaaatgctctgcgagaccttcatccattacccaagataattttggaatacaggcaggttcacaagatcaagtcaacctttgtagatggattactagcttgcatgaaaaagggctccatttcctctacatggaatcagactggaactgtgactggaagactttcagccaagcatcctaatatccaaggtatctccaagcacccaattcagattactacacctaagaattttaaaggtaaagaagacaagattctcacgatctccccgagggccatgtttgtttcatccaaaggccacacctttctagcagcagacttttcacagattgaattgcgcattcttacacatttatctggagatccggaacttctgaagttattccaggaatctgaaagagatgatgtattttctactctgacttcacagtggaaggatgtgcccgtggaacaggtgacacacgcagacagagagcaaaccaagaaggtggtgtacgcggtggtctatggagcagggaaggagcggctggctgcttgccttggagttcctattcaggaagctgcccagtttttggagagttttttgcagaagtacaagaaaatcaaggacttcgcccgagcagctattgcccagtgtcaccagacaggctgtgtggtgtccatcatgggcagaaggagacccctgccaaggattcacgctcatgaccagcaactccgggcacaagcagagcgacaggcagtgaacttcgtggtgcaaggctccgctgctgacctctgcaagctggccatgatccatgtcttcactgcagtggctgcttcccacaccttgacggccaggctggtggcccagatccatgatgagctgctgtttgaagtggaagatccgcagatcccggagtgtgcagctctcgtcaggaggaccatggagtccttggaacaggtacccctcaaggtgagcctgagtgccggccgctcatggggacacctggtgccactgcaggaggcctggggccctccgccaggcccatgtcgcactgagtctcccagcaacagcctggctgcccctgggtcccctgccagcacccagcccccacccctgcatttttcgccttcattttgtctgtagccccaggcaacagtgggaggagagaactggtttccagcagtccattgtgtggccttccccaaggtcaccagctctgtacgccccaggacgcattaaccctttggggctggggtggcccgccatcccctggagtaaatgcctgtgcaaagccctcaaaaaaaaaaaa

SEQ ID NO: 481 - DNA, 1546 bp, Homo sapiens
  CDS (309)..(1127)
gcacgagggtcgccgagcaggagcagggaacaaaggagcggagaggggaggggagagagttgggcgagggagagcccccggccggctgccagaagatcccggcgggaggaagcccaagtgtcacttgaattccacccaaggagcgggcgcctgggatcagagcgtcctgtttagcaataacggctggagcacgtcctacaagttacgggagagtcggctgtgaaggagacgttcgcttatcccctgtgtccccgctcctggcccctccagacccccgccttgcctcgcgctgggaggggagatccagaatgaaaggcaagaaaggtattgttgcagcatctggcagtgagactgaggatgaggacagcatggacattcccttggacctttcttcatccgctggctcaggcaagagaaggagaaggggcaacctacccaaggagtctgtgcagattcttcgggattggctgtatgagcaccgttacaatgcctatccttcagagcaagaaaaagcgttgctgtcccagcaaacacacctgtctacgctacaggtctgtaactggttcatcaacgcccgccgcaggctcctccctgacatgctgagaaaggatggcaaagatccaaatcagttcacaatttcccgccgtggggccaagatttctgaaacgagctctgtggagtccgtgatgggcatcaaaaacttcatgccagctctagaggagaccccatttcattcctgtacagctgggccaaacccaaccctagggaggccactgtctcctaagccgtcatccccgggatcagttttggctcgtccatcagtgatctgccataccactgtgactgcattgaaagatgtccctttctctctctgccagtcggtcggtgtgggacaaaacacagatatacagcagatagcggccaaaaacttcacagacacctctctcatgtacccagaggacacttgtaaatctggaccaagtacgaatacacagagtggtcttttcaacactcctccccctactccaccggacctcaaccaggacttcagtggatttcagcttctagtggatgttgcactcaaacgggctgcagagatggagcttcaggcaaaacttacagcttaacccattttcaagcaaaacagttctcagaaatgtcatgattgccggggtgaaggcaagagatgaattgcattattttatatattttttattaatatttgcacatgggattgctaaaacagcttcctgttactgagatgtcttcaatggaatacagtcattccaagaactataaacttaaagctactgtagaaacaaagggttttcttttttaaatgtttcttggtagattattcataatgtgagatggttcccaatatcatgtgattttttttttcctccccttccctttttttgttattttttcagactgtgcaatacttagagaacctatagcatcttctcattcccatgtggaacaggatgcccacatactgtctaattaataaattttccattttttttcaaacaaaaaaaaaaaa

SEQ ID NO: 482 - DNA, 1759 bp, Homo sapiens
  CDS (397)..(1428)
accggaccggaattcccgggtcgacgatttcgtgaggccgcaggccgcaggagtgctggtggaggggcttccagaaagaccctgcggcagcgccccccctcggctctccccgcaggagagcgggcacctgcgcggcgccgggtgaaggcgagagcctcggcgagccctctgcagcggagccccctgcccatttggttttggccagtcagcctggaaatctgcctgtagtcagctgatgcagagtcaccctgcagttcctactttgaggggttgcagaagcacatatttcactatggagggccgcctgcaggcctcgcgctgacaggatcttttgtgacgctgcaaatgtcctgaaccaccgggaggaactgggccattctaacacccgttgctaccatgctggccacccgcctctccagacccctgtcacggctcccaggaaaaaccctaagtgcctgtgatagagaaaatggagcaagacgcccactattgcttggttctacttcctttatcccgattggccgtcggacttatgccagtgcggcggagccggttggcagcaaagctgtcctggtcacaggctgtgactctggatttgggttctcattggccaagcatctgcattcaaaaggcttccttgtgtttgctggctgcttgatgaaggacaaaggccatgatggggtcaaggagctggacagcctaaacagtgaccgattgagaaccgtccagctcaatgtctgcagcagcgaagaggtggagaaagtggtggagattgtccgctcgagcctgaaggaccctgagaaaggcatgtggggcctcgttaacaatgccggcatctcaacgttcggggaggtggagttcaccagcctggagacctacaagcaggtggcagaagtgaacctttggggcacagtgcggatgacgaaatcctttctccccctcatccgaagggccaaaggccgcgtcgtcaatatcagcagcatgctgggccgcatggccaacccggcccgctccccgtactgcatcaccaagttcggggtagaggctttctcggactgcctgcgctatgagatgtaccccctgggcgtgaaggtcagcgtggtggagcccggcaacttcatcgctgccaccagcctttacagccctgagagcattcaggccatcgccaagaagatgtgggaggagctgcctgaggtcgtgcgcaaggactacggcaagaagtactttgatgaaaagatcgccaagatggagacctactgcagcagtggctccacagacacgtcccctgtcatcgatgctgtcacacacgccctgaccgccaccaccccctacacccgctaccaccccatggactactactggtggctgcgaatgcagatcatgacccacttgcctggagccatctccgacatgatctacatccgctgaagagtctcgctgtggcctctgtcagggatccctggtggaaggggaggggagggaggaacccatatagtcaactcttgattatccacgtgtggattatccaccatgccaggaagacccataactggttttaacactaactagagggaatgacttctttgcatagtgagtgacttgggccttcacaaacagggtgtggagtggcaggcagaggcctctaaatctcagggcaaacatggtgaatctatctctccggagataatttcatacagagattttaagaaaacatctttatattaaaaacagatctcatttgatccttaaaaaaaaaaaa

SEQ ID NO: 483 - DNA, 4945 bp, Homo sapiens
  CDS (241)..(3531)
ccactttgtacaagaaagctgggtacgcgtaagcttgggcccctcgagggatactctagagcggccgcgacagggccagcgagagccccgcagcccgccgcagctgccgcctcgccgcggccgggccggagagcacggcggcgggagcgcggccttaggaggcggccggagcggtgggcacagctcggcgcggagcgtcctgtcaggcggcggccgagggcgtcgcggactctccccgcgatgatgccgatgatattaactgttttcttgagcaacaatgaacagattttaacagaagttcctataacaccggaaacaacctgtcgagatgttgtagaattttgcaaggaacctggagaaggcagctgccatttagctgaagtgtggaggggaaatgaacgtcccataccctttgatcatatgatgtacgaacatcttcagaaatggggtccacggagggaagaagtgaaatttttccttcgacacgaggactccccaactgagaacagtgaacaaggtggccgtcagacccaagagcaacgaactcagagaaatgtaataaatgtacctggagaaaaacgtactgaaaatggggttgggaatccacgtgttgaacttaccctctcagagctccaagatatggcagctaggcaacagcagcagattgaaaatcagcagcagatgttggttgccaaggaacagcgtttacattttctaaagcaacaggagcgccgtcagcagcagtctatttctgaaaatgaaaagcttcagaaattgaaagaacgagttgaagcccaggagaacaagctgaagaaaattcgtgcaatgagaggacaagtcgactacagcaaaatcatgaacggcaatctgtctgctgaaatagaaaggttcagtgccatgttccaggaaaagaagcaggaagtacagactgcaattttaagggttgatcagcttagtcagcaattggaagatttaaagaaaggaaaactgaatgggttccagtcttacaatggcaaattgacgggaccagcggcggtggagttaaaaagactgtaccaagaactacagattcgtaaccaacttaaccaggaacaaaattcaaaacttcagcagcagaaggaactcttaaataagcgcaacatggaggtggccatgatggacaagcgaatcagtgaactgcgtgaacgtctctatgggaaaaaaattcaggcatgtgaaaaagtttttctgaaccgtgtgaatggcacgtcatcaccacagtcccctctgagcacatcgggcagggtcgctgctgtggggccttatatccaggttcccagtgccggaagctttcctgtgctgggggaccctataaagccccagtctctcagtattgcctcaaatgctgctcatggaagatccaaatccgctaatgatggaaactggccaacattaaaacagaattctagctcttccgtgaaaccagtgcaggtggccggtgcagactggaaggatccgagcgtggaggggtctgtcaagcagggcactgtctccagccagcctgtgcccttctcagcactgggacccacggagaagccgggcatcgagattggtaaagtgccacctcccatcccgggtgtaggcaagcagctgcctccaagctatgggacatacccaagtcctacacctctgggtcctgggtcgacaagctccctggaaaggaggaaggaaggcagcttgcccaggcccagtgcaggcctgccaagtcgacagaggcccaccctgctgcccgccacaggcagcaccccccagccaggctcctcacaacagattcagcagaggatttccgtaccgccaagtcccacgtacccgccagcgggaccacctgcatttccagctggggacagcaagcctgaactcccactgacagtggccattaggcctttcctggctgataaagggtcaaggccacagtctcccaggaaaggaccccagacagtgaattcaagttccatatactccatgtacctccagcaagccacaccacctaagaattaccagccggcagcacacagcgccttaaataagtcagttaaagcagtgtatggtaagcccgttttaccttcgggttcaacctctccatcgccgctgccgtttcttcacgggtcactgtccacgggcacaccacagcctcagccaccttcagaaagtactgagaaagagcctgagcaggatggccccgccgcccccgcagatggcagcaccgtggagagcctgccacggccactcagccccaccaagctcacgcccatcgtgcattcgccactgcgctaccagagtgatgcagacctggaggccctccgcaggaagctggccaacgcgccccggcccctgaaaaagcgcagctccatcacagagcccgagggccccggcgggcccaacatccagaagctgctgtaccagcgcttcaacaccctggccggtggcatggagggcacccctttctaccagcccagcccctcccaggacttcatgggcaccttggccgatgtggacaatggaaacaccaatgccaatggaaacctggaagagctcccccctgcccagcccacagccccactccccgctgagcctgccccgtcatcagatgccaatgataatgagttaccttcccccgaaccagaggagctcatctgtccccaaaccacccaccaaactgccgagccggcagaggacaataacaacaacgtggccacggtccccaccacggagcagatcccgagtcctgtggctgaggccccatctccaggggaagagcaggtccctccagcacctcttccccctgccagccaccctcctgccacctccacgaacaagcggaccaacttgaagaagcccaactcggagcggacggggcacgggctgagagtccggtttaaccccctggcactgctcctagacgcgtctctggaaggagagttcgatctggtgcagaggatcatctatgaggtggaagatcccagcaagcccaacgacgaagggatcaccccactgcacaacgccgtctgcgccggccaccatcacatcgtgaagttcctgctggattttggtgtcaacgtgaatgctgctgatagtgatggatggacgccgctgcactgcgctgcctcttgtaacagcgttcacctctgcaaacagctggtggagagtggtgccgccatttttgcctcaaccataagcgacattgaaactgctgcagacaagtgtgaggagatggaggaaggctacatccagtgctcccagtttctatatggggtgcaggaaaagctgggtgtgatgaacaaaggtgtggcgtatgctctgtgggactacgaggcccagaacagtgacgagctgtccttccacgaaggggacgccctcaccatcctgaggcgcaaggacgaaagcgagactgagtggtggtgggctcgccttggagaccgggagggctatgtgcccaaaaacctgctggggctgtatccacggatcaaaccccgacagcgaacactcgcctgaacttccttttggagcaccgcatggtcttgccagctaccaggagccacttaagagattattgtgctgttttccaggaaagctgcagctagaaaatggtcttaatggtgctcactttagcagacagcgtccacaatgtgaatcctacagtttccaggtgaggccctttctccagtttgcccattaactgggagaggtactttcgcctccaaggactgaattttgccaattactataaatccaaataaatacccactttcaaaacacccacccctcttgccattaagaagtcccataacccccggttggttgccagtgaagacagaagctcttactgacttggccccgaggccatcaccccctccagcagtgaacactgtccgccgctgtgaggcctgctcccctgcgaccgccctgccccccgtcaccgaatcggacactcatcctttctcacacttcccacacatgatccttcttcccttcatcaccaaaggagcctctgtatggaaacatgtccagtgttgctgcccagtgtgtatgcctcccagtacccactctgctcggccgccttgggggttccgcttcctgttccagttcacctaaaggctgattgtgcaggcccagcactgtggctggactgccgcgccacgggcaccaggacccctaagaccaagtgacaactgggagagcctcagcatatactcttctcctccgatctcacagcctgtcatgctgctcagtgtggttctcacccctgcaagctcaaattcagttccctgaatggagtcaggtgctggaggccgtggcagcggagggtggttggggttggggctgggggtggactggtgtgagggcagaccagggccaggtagacggggctgtttggtgcctgaaggatggcagacgcctggtgtcaggaggggccgccaccaaggagcagcagctggggcagaggagctggggtcaggggccacccctctctgccgatctccctgcctgggctggctgtgaggccacctttgtcccaggcccagcctcaaggcaaggagggcgcttcactgaggtgtgaattgtacgtacaggctttttatataccaaaagtattttttgactagaccattcaaagctacccgaactatgttggaaattttttttttctcattaaaatacaggcccttaggctctatttttcatgtatgagtcgtgtgtaatttatgtaaaaatgtgtgtacagactcactgatgcagcactgtagcccatcaccttggagcactgactgtacatagtgtggtgaagaaaagtgaacgcccttgtagagcagcccgaccacaggagcatggccgctgccagcccagacgctgctgacgctgtgtaaatgtgcacaataaacccgtctcaccccggaaaaaaaaaaaa

SEQ ID NO: 484 - DNA, 2913 bp, Homo sapiens
  CDS (107)..(2602)
cctgtaggcagacccaagctggctagcgtttaaacttaagcttggtaccgagctcggatccactagtccagtgtggtggaattctcccagacatcagagctgtataatgcatgttgatatggattgcttctttgtatcagtgggtatacgaaatagaccagatctcaaaggaaaaccagtggctgttacaagtaacagaggcacaggaagggcacctttacgtcctggcgctaacccccagctggagtggcagtattaccagaataaaatcctgaaaggcaaagcagatataccagattcatcattgtgggagaatccagattctgcgcaagcaaatggaattgattctgttttgtcaagggctgaaattgcatcttgtagttatgaggccaggcaacttggcattaagaacggaatgttttttgggcatgctaaacaactatgtcctaatcttcaagctgttccatacgattttcatgcatataaggaagtcgcacaaacattgtatgaaacattggcaagctacactcataacattgaagctgtcagttgtgatgaagcgctggtagacattaccgaaatccttgcagagaccaaacttactcctgatgaatttgcaaatgctgttcgtatggaaatcaaagaccagacgaaatgtgctgcctctgttggaattggttctaatattctcctggctagaatggcaactagaaaagcaaaaccagatgggcagtaccacctaaaaccagaagaagtagatgattttatcagaggccagctagtgaccaatctaccaggagttggacattcaatggaatctaagttggcatctttgggaattaaaacttgtggagacttgcagtatatgaccatggcaaaactccaaaaagaatttggtcccaaaacaggtcagatgctttataggttctgccgtggcttggatgatagaccagttcgaactgaaaaggaaagaaaatctgtttcagctgagatcaactatggaataaggtttactcagccaaaagaggcagaagcttttcttctgagtctttcagaagaaattcaaagaagactagaagccactggcatgaagggtaaacgtctaactctcaaaatcatggtacgaaagcctggggctcctgtagaaactgcaaaatttggaggccatggaatttgtgataacattgccaggactgtaactcttgaccaggcaacagataatgcaaaaataattggaaaggcgatgctaaacatgtttcatacaatgaaactaaatatatcagatatgagaggggttgggattcacgtgaatcagttggttccaactaatctgaacccttccacatgtcccagtcgcccatcagttcagtcaagccactttcctagtgggtcatactctgtccgtgatgtcttccaagttcagaaagctaagaaatccaccgaagaggagcacaaagaagtatttcgggctgctgtggatctggaaatatcatctgcttctagaacttgcactttcttgccaccttttcctgcacatctgccgaccagtcctgatactaacaaggctgagtcttcagggaaatggaatggtctacatactcctgtcagtgtgcagtcgagacttaacctgagtatagaggtcccgtcaccttcccagctggatcagtctgttttagaagcacttccacctgatctccgggaacaagtagagcaagtctgtgctgtccagcaagcagagtcacatggcgacaaaaagaaagaaccagtaaatggctgtaatacaggaattttgccacaaccagttgggacagtcttgttgcaaataccagaacctcaagaatcgaacagtgacgcaggaataaatttaatagcccttccagcattttcacaggtggaccctgaggtatttgctgcccttcctgctgaacttcagagggagctgaaagcagcgtatgatcaaagacaaaggcagggcgagaacagcactcaccagcagtcagccagcgcatctgtgccaaagaatcctttacttcatctaaaggcagcagtgaaagaaaagaaaagaaacaagaagaaaaaaaccatcggttcaccaaaaaggattcagagtcctttgaataacaagctgcttaacagtcctgcaaaaactctgccaggggcctgtggcagtccccagaagttaattgatgggtttctaaaacatgaaggacctcctgcagagaaacccctggaagaactctctgcttctacttcaggtgtgccaggcctttctagtttgcagtctgacccagctggctgtgtgagacctccagcacccaatctagctggagctgttgaattcaatgatgtgaagaccttgctcagagaatggataactacaatttcagatccaatggaagaagacattctccaagttgtgaaatactgtactgatctaatagaagaaaaagatttggaaaaactggatctagttataaaatacatgaaaaggctgatgcagcaatcggtggaatcggtttggaatatggcatttgactttattcttgacaatgtccaggtggttttacaacaaacttatggaagcacattaaaagttacataaatattaccagagagcctgatgctctctgatagctgtgccataagtgcttgtgaggtatttgcaaagtgcatgatagtaatgctcggagtttttataattttaaatttcttttaaagcaagtgttttgtacatttcttttcaaaaagtgccaaatttgtcagtattgcatgtaaataattgtgttaattattttactgtagcatagattctatttacaaaatgtttgtttataaagttttatggatttttacagtgaagtgtttacagttgtttaataaagaactgtatgtatattttgaaaaaaaaaaaaa

SEQ ID NO: 485 - DNA, 4530 bp, Homo sapiens
  CDS (151)..(3759)
accggaccggaattcccgggtcgacgatttcgtgtcggtgtggggtagaatggccgctgccgccgtcacccgcgggaccccgggagcacagactccccctccccccggcccctcaggccgggggtgaccttgccccctggagccctcaccatgaataccaaggacaccaccgaggttgctgaaaacagccaccacctgaagatctttctccccaagaagctgctggagtgtcttcctcgctgcccgctgctgcctccagagaggctacggtggaatacaaatgaggagattgcatcctacctgatcacctttgagaagcatgatgagtggctgtcttgtgccccaaagacaaggcctcagaatggctccatcatcctctacaatcgcaagaaggtgaaatatcggaaggatggttacctctggaagaagcggaaggatgggaagaccacccgagaggaccacatgaagctgaaggtccagggcatggagtgtctctatggctgctacgttcactcttccatcgtccccacattccatcggcgctgctactggctgctccagaaccctgacatcgtccttgtgcactacctgaacgtcccagccctggaggactgtggaaagggctgcagccccatcttttgttccatcagcagcgaccgtcgagagtggctgaagtggtcccgggaggagttgttgggacagctgaagcccatgtttcatggcatcaagtggagctgcgggaatggaacagaagagttctctgtagaacacctggtgcagcagattttggacacccacccaaccaagcctgctccccgaacccacgcctgtctctgcagtggggggcttggttctgggagccttacccacaaatgcagcagcacgaaacaccgcatcatctctcccaaagtggagccccgagctttaaccctgacctctatcccccaccctcaccccccagagcctcctccactgatagccccacttcccccagagctccccaaggcacacacctccccatcttcttcctcttcttcctcctcatcaggttttgcagagcccctagaaatcagacctagccctcccacttctcgagggggttcttcaagaggaggcactgctatcctcctcctgacaggactggagcagcgggctggaggcttgacgcccaccaggcacttggctccacaggctgatcctaggccttccatgagtttggcagtggttgtaggcactgagccttctgccccaccagctcctcccagtcctgcctttgaccctgatcgttttctcaacagcccccagaggggccagacatatggaggggggcagggagtaagcccagacttccccgaggcagaggccgctcataccccctgttctgccctagagcctgctgctgccctggagccccaggcagctgctcggggtcccccaccacagtcagtagcaggtgggagaagaggaaactgcttcttcatccaagatgatgacagtggggaggagctcaagggtcacggggctgccccacccataccttcaccccctccctcacccccaccctcacctgcccccttggagccgtcaagcagggtaggaagaggagaggccttgtttggaggacctgttggggccagtgaactggagcccttcagtctttcatcattcccagaccttatgggagaactcatcagtgacgaagctccaagcatccctgctccaaccccccagctgtctcctgctcttagcaccatcacagacttctccccagagtggtcctacccagagggtggggtcaaggtgctcatcacaggtccttggaccgaagccgccgagcattactcctgtgtctttgatcacatcgcagtgccagcctcacttgtccagcctggtgtcttacgctgctactgtcccgcccatgaggtagggctggtgtctttgcaggtggcagggcgggaggggcccctttctgcttctgtgctctttgagtatcgagcccgccgattcctgtctctgcctagtactcaacttgactggctgtcactggacgacaaccagttccggatgtccatactagagcgactggagcagatggagaagcggatggcagagatcgcagcagctgggcaggtgccttgccagggtcctgatgctcctccagttcaggatgaaggccaggggcctgggttcgaagcacgggtagtggtcttggtagaaagcatgatcccacgctccacctggaagggtcctgaacgtctggcccatggaagccccttccggggcatgagccttctgcacctggctgctgcccagggctatgcccgcctcatcgagaccctgagccagtggcggagtgtggagactggaagcttggacttagagcaggaggttgacccgctcaacgtggatcatttctcttgcacccctctgatgtgggcttgtgccctgggacacctggaagctgctgtgctccttttccgttggaaccgacaggcactgagcattcccgactctctgggccgtctgccattgtctgtggctcattcccggggtcatgtgcgccttgcccgctgccttgaggaactacagagacaggagccttcggtggagcccccatttgccctatcgccaccctcctccagcccagacactggtctgagcagcgtctcctcgccctcggagctgtcggatggcaccttttccgtcacgtcagcctattctagtgccccagatggcagtcccccccctgcacctctgccagcctctgagatgactatggaggacatggccccaggccagctttcctctggtgtcccagaagcccccctactcctcatggactatgaggctaccaactccaaggggcccctctcctcccttcctgccctcccaccagcttcagatgatggggctgctccagaggacgctgacagcccacaggctgtggatgtgatcccggtggacatgatctcactagccaagcagatcatcgaagccacaccggagcggattaaacgagaggacttcgtggggctgcccgaggctggagcctcaatgcgggagcggacaggggctgtggggctcagtgagaccatgtcctggctggccagctacctggagaatgtggaccatttccccagctcaacccctcccagcgaactgccctttgagcgaggtcgcctggctgtcccttcagcaccctcctgggcagagtttctctctgcatccaccagtggcaagatggaaagtgattttgccctgctgacactatcagatcacgagcagcgggaactgtatgaggctgcccgagtcatccagacggccttccgaaagtacaagggccggcggctgaaggagcagcaggaggtagcagcagctgtaatccagcgctgttaccggaagtacaagcagctgacctggattgcacttaagtttgcactctataagaagatgacccaggcggccatcctgatccagagcaagttccgaagctactatgaacagaagcgatttcagcagagccgccgagcggctgtgctcatccagcagcactaccgctcctaccgccgcaggcccggccctccccaccggacttcggccaccctgcctgcccgcaacaaaggctcctttctcaccaagaagcaggaccaggcagcccggaagatcatgagattcctgcggcgctgccgacacaggatgagggaactgaagcagaaccaggagctggaagggcttccccagccgggactggccacatgacctggccaccgcctttctcaccaccctgggggcgcctcgtgcagtcttaacagggagagggctttctggggcagggggagcccctgtcggcagctttcctgttcacctttgttggagccctctgtaggcctcctccctcctccccacgccttgctcccacacccctctcctcgtccctcctggtcgtgccccgtctcttttggtcctggctccagaaaacccgcgccccacatacctgcatcttccgctgtgacctccggagccctgcctgcccctgctccccagctcctcctgcctgcacccgactcggccccctcctgacttgccttatttatttgttcgacgcgtctctgaatgtatccgcctcggttcccaccactgccttcgctgcgcacgcccctcgtgtttcagggctgaccgtgtccccacccgactccgcatgtttgcgtctgtttcctccctctctggccctgtcttaccccatcacccgactctggccactgacctcagggccgaaggggaggtggtgtacataggaacgcgttgcggagtccgccccgtcccccgaggggaggggtcttgtacatactgtaacatacagagtatagtgaagaatctatttaaggcgccgcggggagggctgcacggccgggcttgtggttctctagcgcggcgggggcctcctgccggctccacgggcactttctacttgtgcatgggcttggtttatacgaattgccattaaacatcgctgcaccaaaaaaaaaaaaa

SEQ ID NO: 486 - DNA, 3122 bp, Homo sapiens
  CDS (511)..(2601)
ggttgaaaggctgcatgtactcagaagatttgcaagcaacactccaattcttgtcatagagctcgcagacttctcacttatcggcttttttccttccttattttttaagaattattcttattttcccctctctttttctgctctctcctctctcagtctctccttttctatctgcctcttcatttttctcctagtctgttttttttttcccggctctgcacctggattgtatcttcagcaaacaatcgggcactttgagaactaactggagacagtcttgtagggaagatctgtatggaattatctgcttttatggtgaacttggcatttgtgaatgggaatcttgttcacaatattaattgctagcaaaaacaagaaaaagaacacaggagtaaaacgtggatttttctgaatacgcattgtgatgaccagcaattaccttaccgactaatatccagaggagaataatttggaagactgttgtggggaacagcctttaagagctggaagatgaaagctccgattccacacttgattctcttatacgctacttttactcagagtttgaaggttgtgaccaaaagaggctccgccgatggatgcactgactggtctatcgatatcaagaaatatcaagttttggtgggagagcctgttcgaatcaaatgtgcactcttttatggttatatcagaacaaattactcccttgcccaaagtgctggactcagtttgatgtggtacaaaagttctggtcctggagactttgaagagccaatagcctttgacggaagtagaatgagcaaagaagaagactccatttggttccggccaacattgctacaggacagtggtctctacgcctgtgtcatcagaaactccacttactgtatgaaagtatccatctcactgacagtgggtgaaaatgacactggactctgctataattccaagatgaagtattttgaaaaagctgaacttagcaaaagcaaggaaatttcatgccgtgacatagaggattttctactgccaaccagagaacctgaaatcctttggtacaaggaatgcaggacaaaaacatggaggccaagtattgtattcaaaagagatactctgcttataagagaagtcagagaagatgacattggaaattatacctgtgaattaaaatatggaggctttgttgtgagaagaactactgaattaactgttacagcccctctgactgataagccacccaagcttttgtatcctatggaaagtaaactgacaattcaggagacccagctgggtgactctgctaatctaacctgcagagctttctttgggtacagcggagatgtcagtcctttaatttactggatgaaaggagaaaaatttattgaagatctggatgaaaatcgagtttgggaaagtgacattagaattcttaaggagcatcttggggaacaggaagtttccatctcattaattgtggactctgtggaagaaggtgacttgggaaattactcctgttatgttgaaaatggaaatggacgtcgacacgccagcgttctccttcataaacgagagctaatgtacacagtggaacttgctggaggccttggtgctatactcttgctgcttgtatgtttggtgaccatctacaagtgttacaagatagaaatcatgctcttctacaggaatcattttggagctgaagagctcgatggagacaataaagattatgatgcatacttatcatacaccaaagtggatcctgaccagtggaatcaagagactggggaagaagaacgttttgcccttgaaatcctacctgatatgcttgaaaagcattatggatataagttgtttataccagatagagatttaatcccaactggaacatacattgaagatgtggcaagatgtgtagatcaaagcaagcggctgattattgtcatgaccccaaattacgtagttagaaggggctggagcatctttgagctggaaaccagacttcgaaatatgcttgtgactggagaaattaaagtgattctaattgaatgcagtgaactgagaggaattatgaactaccaggaggtggaggccctgaagcacaccatcaagctcctgacggtcattaaatggcatggaccaaaatgcaacaagttgaactccaagttctggaaacgtttacagtatgaaatgccttttaagaggatagaacccattacacatgagcaggctttagatgtcagtgagcaagggccttttggggagctgcagactgtctcggccatttccatggccgcggccacctccacagctctagccactgcccatccagatctccgttctacctttcacaacacgtaccattcacaaatgcgtcagaaacactactaccgaagctatgagtacgacgtacctcctaccggcaccctgcctcttacctccataggcaatcagcatacctactgtaacatccctatgacactcatcaacgggcagcggccacagacaaaatcgagcagggagcagaatccagatgaggcccacacaaacagtgccatcctgccgctgttgccaagggagaccagtatatccagtgtgatatggtgacagaaaagcaagggacatcccgtccctgggaggttgagtggaatctgcagtccagtgcctggaactaaatcctcgactgctgctgttaaaaaacatgcattagaatctctagaacacgaggaaaaacagggtcttgtacatatgttttttggaatttctttgtagcatcagtgtcctcctgttttaccatgtcttttaccattacattttttgactttgttttatatgtcgttggaatttgtaaatttacattttttttaaagaagagactgatgtgtagatagaaaaccctttttttgcttcattagtttagttttagaatgggtttttattttatttccttttttaaaattttactttgcttttaacatttccttggggtgcttggacaaatctatccgatgggacaaggagcaccggattctttctcgggttctgcctagcatcaactgggccacgtcggccttcagagaacagtgcaacaaatgccagcattgccattcgggggaaaaaaaaaaaaa

SEQ ID NO: 487 - DNA, 2312 bp, Homo sapiens
  CDS (379)..(2055)
atttggccctcgaggccaagaattcggcacgaggtcactagcataacagaaaagacgaatggcttttgttttaaactgagggcacttttacaaaagtcatctttccatttatttttctttcagaaaaaagaatttgggttttgagcttttttaaaaaaaaaaagacaaacactttccttgactttgagaaataatttaagtcaaagaatctgctctatgctaaccaagagatagagcacagcaaagatctgccagccccaggcctctacctaggggcctggaaattcaagtattcttattgggggaggccatttgtttctgattagaagctgtctaaacctcctactcctcaactcaaaggaaaacacagagcataccatggccaagaaagttgcagtgattggagctggtgtgagtggcctctcctccatcaaatgctgtgtggatgaggacctggagcccacctgctttgagagaagtgatgacattgggggattatggaagtttactgaatcttccaaagatgggatgaccagggtctataagtcattagtgacaaatgtctgtaaggaaatgtcatgttacagtgacttccctttccacgaagattatcctaatttcatgaaccatgaaaaattttgggactatctccaagaatttgctgagcactttgacctcctgaaatacattcagtttaagaccactgtgtgcagcataacgaagcgtccagacttctccgaaactggtcagtgggatgttgtcacagagacagagggcaagcaaaatagagctgtctttgatgctgttatggtttgcactggacatttcctgaatccccatttacctttggaagcctttcctggaattcataagtttaaaggtcagatcctgcatagtcaagagtacaagatcccagaaggctttcagggcaaacgcgtcttggtgattggtcttgggaacactggaggagacattgctgtggaactcagtcgaacggcagctcaggtacttctcagtactagaactggtacctgggttcttgggcgctcttcagattggggctatccttataatatgatggttacaagaagatgctgtagttttattgcacaagttctgccttcacgttttctaaactggattcaagaaaggaagttgaataagagatttaatcatgaggattatggattaagtattaccaaagggaaaaaagcaaaattcattgtgaatgatgagctgccaaactgtatcctctgtggggcaatcactatgaaaaccagcgtgattgaatttacagaaacctctgctgtctttgaagatgggacagtggaagaaaacattgatgttgtgatcttcactacaggatatacattttcttttccattttttgaagaacctcttaaaagcctctgtacaaagaagatatttctatacaagcaagtctttcccttaaacctagagagagcgacattagccatcatcggccttatcggccttaaaggatccatcttatcaggcacagagctccaagcacgatgggtcacaagagtattcaaaggactctgtaagatacctccatcccaaaaattgatgatggaggctactgaaaaggaacagctcattaaaaggggagtgtttaaagacaccagcaaagacaaatttgactacattgcctacatggatgatatcgctgcctgcataggcacaaagcccagcatcccacttctgttcctcaaggatcccagactagcttgggaagttttctttggaccatgtactccttatcagtaccgcctcatgggccctggaaaatgggatggagccagaaatgccatcctgacccagtgggacagaacattgaaacctttaaaaactcgaattgtccctgattcctccaagcctgcctccatgtcacattatttaaaagcctggggggcacctgtcctacttgcctctcttctacttatctgtaaatcttcacttttcttgaaattggtgagagataaactacaggacagaatgtccccttacctagtaagtctttggcgaggatgaacctgattgttacaagggttacaccaagtcatgctaattctatctccaagtatcttgtgcatccctcctctgctctccatcataactgctattagccaaattcaggcccagtcatctcctatctgaattattgtattatcttcttctttgttttcagtaccctctttcttgccaccctttccaatgcatcttctaccctgctacctcagtgattattctaaaataaatatatatgatatggttaaaaaaaaaaaaaa

SEQ ID NO: 488 - DNA, 7545 bp, Homo sapiens
  CDS (113)..(3517)
tccgagactgttaaggggatgttggacacatcctaatgaacctgttagtgacctctcttactttgactgcattgagagtgtgatggaaaactccaaggttctgggtgaatcgatggcagggatttcacagaatgccaagaccggagacctccctgcctttggggaatgtgtggggattgcatccaaggctctctgtgggctgacagaggctgcagcccaggctgcatacttggttggcatctttgatccaaacagccaggcaggccaccagggcctggtggaccccatccagtttgccagggctaaccaggccatccagatggcatgccagaacttggtggaccctggcagcagcccatcacaggtcctgtcagccgccacaattgttgccaagcacacgtcagccttgtgtaatgcctgccgcatcgcctcatccaagacggccaacccagtagccaagaggcacttcgtccagtcggccaaggaagtcgccaacagcactgccaacctggtgaagaccatcaaggccctggatggggatttctctgaagacaaccgcaataagtgtcgcatcgccaccgcacccttgattgaagctgtggagaacctgacagcgttcgcctcaaaccctgagtttgtcagcattcctgcccagatcagctccgagggttcccaggcacaggaaccaatcctggtctcagccaagaccatgctggagagttcatcgtacctcattcgcactgcacgctctctggccatcaaccccaaagacccacccacctggtctgtactggctggacattcccatacagtgtccgactccatcaagagtctcatcacttctatcagggacaaggcccctggacagagggagtgtgattactccatcgatggcatcaaccggtgcatccgggacatcgagcaggcctcgctggccgccgtcagccagagcctggccacgagggacgacatctctgtggaggccctgcaggagcagctgacttcggtggtccaggaaatcggacaccttatcgatcccatcgccacagcggctcggggagaagcagctcagctgggacataaggtgacacaactggcaagctattttgagcccttgatcttagccgcagttggtgtggcctccaagattcttgatcatcagcagcagatgacggtgctggaccagaccaagactctcgcagagtctgccttgcagatgttgtatgcagccaaagaaggtggcggaaaccccaaggcacaacacacccatgacgccatcacagaggccgcccagttgatgaaggaagccgtggatgacatcatggtgacgctgaacgaagctgccagtgaagtggggctggttgggggcatggtggacgccattgcagaagccatgagcaagctggatgaaggcactcctccagaaccaaagggaacatttgtcgactatcagacgactgtggttaaatactccaaaagcattgcggtgacagctcaggaaatgatgactaagtcggttactaacccggaggagttgggaggactggcttcacaaatgaccagtgactatgggcacctggctttccagggccagatggcagcagccacggcggaaccagaggagatcggattccagattcgcactcgtgtgcaggacctgggccacggctgtatcttcctggtgcagaaggcaggggccctccaggtctgccccacagacagctacaccaagagggagctgatcgaatgcgcccgtgccgtcacggaaaaggtctccttggtgctctcggctctccaggccgggaacaaaggaacccaggcatgcattacagccgccaccgctgtgtctgggatcattgccgacctggacaccaccattatgtttgcaacagcggggacgctgaatgcagagaacagtgagaccttcgcagaccacagggagaacattctcaagacggccaaggccttggtagaagacacgaaactacttgtgtcaggagctgcgtccactcctgacaagctggcccaggcggcccagtcctcagcagccaccatcacccagctcgcagaagtggtcaagctgggggcagccagcctgggctccgacgaccccgagacccaggtggttttgatcaatgccatcaaagatgtggccaaggccctttctgatctcatcagtgctaccaagggagctgccagcaagccagtggacgacccttccatgtaccagctcaagggggctgccaaggtgatggtgaccaatgtcacctcgctcctcaagactgtaaaggcagtggaggatgaggccacccggggcaccagggcgcttgaggccacaattgaatgcataaagcaggagcttacggtgttccagtcaaaagacgtacctgaaaagacatcatcacctgaagaatccataaggatgacgaaaggcatcaccatggcaacagccaaagccgtggcagctgggaactcatgtagacaggaggacgtgattgctactgccaacctgagccggaaagccgtgtcagatatgttgacggcttgcaagcaagcatccttccaccccgatgtcagtgacgaggtgagaaccagagccttgcgtttcgggacggagtgcacccttggctacttggacctcctggagcacgtcttggtgattcttcagaaaccaaccccagaattcaagcagcagctggccgctttctccaagcgagtcgccggcgctgtgacagagctcatccaggcggcggaagccatgaaaggaacagagtgggtggatccagaagacccaactgtcattgcagaaacagagttactgggggctgcagcatccatcgaagctgctgctaagaagttagagcaactgaagccaagagcaaaaccaaaacaagcggatgagaccctggactttgaggaacagatcttggaagctgctaaatccattgctgctgccacaagcgccctggtcaaatcggcctcagcagcccagagggagctggtggcccaaggaaaggtgggctccatccctgccaatgctgcagacgacggacagtggtcacaggggctgatttctgctgcccggatggtggcggctgcgaccagcagtctctgtgaggcggccaatgcctccgttcagggacacgccagcgaggagaagctcatctcatctgccaagcaggtcgccgcttccacggctcagctgctggtggcctgcaaggtgaaggccgaccaggattcagaggccatgaggcggctacaggcggcaggaaatgctgtgaaaagagcctcagacaatcttgtccgtgcagcccagaaggcagcttttggcaaagctgatgacgacgatgttgtagtgaaaaccaagtttgtggggggcattgctcagatcatcgccgcccaggaagaaatgctaaagaaagagcgagaactggaagaagcaaggaaaaaactggcccaaatccgccagcagcagtataagtttttacccaccgagctgagggaagatgagggctaaaggtgcgagcccagatggcgagccccaggggatggccctggctgaactggacagacagtgttcctgagaggctgggcacttagctggaaaccgcccacctccctcccgggtgagcctggagccctgcgtgcttgttctcacatctctgtcccgtcggcactggctgcatgatcgtgatgtcacacggtacaatgtcctacccacaactcctctgccgcctcccctcatgcctcaccgtgtctcaggagagaggggtgcacgtttcatggactgttaccaacaaagaaaagtcagtattatgttgttctcagacactttggcttttgttggtccttctcttaggcctgctcctggacctctttatgatattgtgatagggaaaaaaatcattgacgtcatagaatattcttcttcctctcaggagaagacggaagctggagttggacatggttcataaaagccagaaacacaaacccgtgtggactccgggagggtgactcaggtcctccttccatgtcttgagcactggctcacccagggggtgaaaaattcccgcccctgtttgcacgctttcttgcctccgtgtgtaagctccttgtacaacccagacccatcttgtattttgtggcccagaaaactgaacgattattttgttcctccgtagtccaaagggcagagttgcggaaggccgtcggggcttggtgagcaggggctgtaatacagtctgtgggctccttaccctgcagaggctgtttcagctcacacagagtcatccacacaaacccacggctcccagttgacagtcagtggaatgctcgtctccttagcgtccagggtggggattctgctggaataaagagcttcctcagtgactcatctttaggtcccacgctggtttctgtgccttcagaatggtcacaagcccggattggaaaggatctgcttacaaacctgtcccctgtcctccaacccaaaacgcctttttttctgtcttaatatccagaaaatctaaatgcatcctaaaatcaatgtgaacctttaacaagatagttttacttattatcacataagacataagatgttttcattttctggatgtcacacttccagaatttcatatttttcccctcttttctttccccttttcagagccctcccataggaagggaagggcttgaatttacccttaatctgcacctttagccaaggcagtgcatggaagatgaatggctcgtggggccagaatctaatgccagggagcaggagtgtttgaaagaattcatagtggggaaggtaaaagttaatggaagtacatgattttcaaaactggtaacagttaaaggcactcaccctccgcctctctctctctctctctctctggtgtgctatcatgtcttggactccatccacactatagtttcaaagttccactgacgggggaaagttggtgctttggtcctccgaagatgtcacctttcgaccttgcccgatcttgtttcaccagactctagcccatgtcatggttttaaaatacataaacttctgacagcttcccatatttataagttacttataagtgctgcacgtattagaatttttttttttcagaccagtaaagttagagaaaagacgctgtaaaggaaaagcaagtgagagtatgtgtaggacactgacagtgtgtgggcaccagttctgaagaggaggggagctgctggagccctagcctgttggggaaaagctggcacactcttggctcgccctctttgagtggagctgatccaacacctcatgcctgccttggccggacactgagaggaggggcacacgtgcttccagagacactcaggagtcagaccccaatgctcagagtcacaatgtgttcatggcctcctgtaacaggactctggggatcccctctgtggcccagcccaccccaccctctgctcttctatgctgtgcccagggcagctgccctcttctgcctgtgccccatcccatcctgaaaacccaggaccaaggcaggggcaggcagccagttcttccaccttgcctcagagtcatttaaaacctttactgcatttgataccagaaaagcctccagagacaaaccaaatgcaaaggcctttcctttataactctaaagaacaggcatcgaaagtttatttttgtaggagctatataaatactcacctttctggagtcgtccagtgctgggagctttggggagtttggttctcagttatcacctggtatggtcccagtttctcatctgtcctttcctcatccaccctgcacatgtgtatgtgaacggcttcgtggccggtgtggtggtttctcatttcataagatagttgaagggccatgccttgtctggatgttatttaataggcactactgcggtgtcctcagatggtactgagggggccttctggtccttcaaaggaaaataacacaggcatgagttcatttgggagtgtgaactttcagaacacctaataagagagtggtgtcagagtaaaaacggccccaggtctggagcatagaagtgtatctctgtgaagagagagccggtgtgttgacatgtggttcttctcacacccctctactcctcgagggctttgaatccttgggctgatttttgtgccagaaattgctgttcccgatggccaaaaggggaacctgaactggatttcagaactgcccagtgatttgaaaatttagattttacttgggcctttcaggagtctttagatagggatgctgaggtcatatttagttcaatgaacagcccttgtttaagttttgccagtgtccagccagctgtggccctggccatctgtgcaggcaggttcctcaattcctggttggccctgcagtcggtcaacacagtccctccaggtcggctgcagaggcagctgcccagcctgcagtctatgcacgggccttaagaaatgagctgcctgtagcctcacggcatatgcttttatcagggaaaacccttcgagcttcttctgattctcacctgcttgctttctggctgtcttagtcagtgtgtttacaggcaactaaagcctgttcctaatttatcaaaaaattataaccaaaattcaccatagcctaagagagtaaaccccacctccaaagtgatgccaaggccaaaacctcatcaaggaaccagacacaggtcaaaagtggtgagcaagccatggtctctgctcctggggaactcacacgctgacccccgaggagccttggtttcctccctggcagatagtccccagaatcttctctcccagctttgaggttctgggctctggaaaggcctctgggatgctggccttaagatctcagcacagactatcagcatgttccattctcagattcctggaggaaaggtaccctctgttgaccaaggggctggctgcttctgagacttaccaacccaagaaatttggagacattcccctcaggctaaaaggcagcggtccccagagttcagaaagcaaaagatcttgacaactgtgccagtagtggctctggtcctatctctccacagtgctggcctctgctggggaaggcatctttcccaaaggtatccccaagtaccatgttgaaaatgtcctcagtctgttgctccatctttctgagcctctgcttggtatgtcatgtttatggtcactacggatgagtgtgtgcagagtttgggttgattcttttaaatgctacaaacaagagctatttcttttcaataaaaaaggtttggattcggcctcttcctctgagcccacctcccagccctccagggagcatcagtgtacctgagtcactttgtctgcatctcttcatcccacaaaacacgaggctgggtctcattcagcggcctctcaccaaccttcaagatccagaagaaaacaggaacgttcagctctgccctgtgtcgtatctaatcacatacattaatttatctaaccacataagttatttttttttatttgccagaaataaacctttaaaggaaaaaaaaaaaa

SEQ ID NO: 489 - DNA, 1710 bp, Homo sapiens
  CDS (36)..(1571)
gcacaggaggagttggcgtccggggagcaagggccatggccaccgtgcaggagaaggctgctgcgctgaacctctcggctctccacagccccgcgcacaggcctccgggtttcagtgtagctcagaagccatttggagccacgtatgtatggagcagcatcataaacactcttcaaacacaagtggaagtgaaaaaacgaaggcaccgtttaaaacgacataatgactgctttgttggttcagaagctgtggatgtcattttttctcacctaattcagaataagtattttggtgatgtagatattcctcgagccaaagtggtgagagtgtgtcaagcgcttatggactacaaagtatttgaagcagttccaaccaaagtctttggaaaagacaaaaaacctacatttgaagatagtagttgcagcctttatagattcaccacaatacctaaccaagacagtcagttaggcaaagagaacaaactatattcacctgccaggtatgcagatgcattatttaagtcatccgatatcagatcagccagtttagaggacctgtgggaaaatctgagtttaaagcctgccaactcccctcatgtaaatatctctacaaccttgtctccacaagttattaatgaagtgtggcaagaagaaacaattgggcgtctactacaacttgtagaccttccacttcttgactccttactgaaacagcaagaggctgtacctaaaattcctcaacctaagaggcagtccaccatggtcaacagcagtaactatctggatcgagggattctcaaggcttatagtgactctcaggaagatgagtggctctcggcagcaattgactgtttagaataccttccagaccaaatggtggtggaaataagcagaagctttcctgagcaaccagaccgaacagacttagtgaaagaacttctgtttgatgccattggcagatattacagtagtagggaacctctgttaaatcacttatctgacgttcataatggaattgcagaactcttagtgaatgggaagacggaaatagctttagaagctacccagctccttctaaagcttttagatttccaaaatagagaagaatttagaagactactgtatttcatggctgttgcagcaaatccttctgagtttaaattacagaaagaaagtgacaaccgaatggttgtgaaaaggatattctcaaaagctattgttgacaataaaaatttatccaaaggcaaaacagatcttctggtactctttttaatggatcatcagaaagatgtttttaagattcctggaactctacataaaattgtaagtgttaagcttatggccatacagaacggaagagatccaaatagagatgcaggatatatttattgccagagaattgatcaacgtgactattccaacaatacagagaagacaaccaaagatgagctgttgaatttactaaaaactcttgatgaggattcaaaactttctgccaaagagaagaaaaaattgctaggtcaattctataagtgtcacccagacatctttattgagcattttggagactgagtttttaatatctgtatataagttgtgtattttaagaataaattatgtatcctaaatatccaatcacatttgtaagtgtggaagctctaaatttgaaactgtacttaataaaaatttttttgtataaaaaaaaaaaaaa

SEQ ID NO: 490 - DNA, 1011 bp, Homo sapiens
  CDS (379)..(972)
cctagtatagcagatcgagctcgctagcgtttaaacttaagcttggtaccgagctcggatccactagtccagtgtggtggaattccttaggaagagaaggtcagagttcgcgggggcagaggcattcttgccgctggcccagtcgctatgtagtggaggggcagacaccctcccgcaaattctgggctgcttaggaagagaaggtcagagttcgcgggggcagaggcattcttgccgctggcccagtcactatgtagtggaggggcagacaccctcccgcaaattctggaaggttcttagtctcgactagggcagtagccccaggactcctagtcgccggcttcaggtcactgccggctgaacggagctgccgtcgccatgtttggctgcttggtggcggggaggctggtgcaaacagctgcacagcaagtggcagaggataaatttgtttttgacttacctgattatgaaagtatcaaccatgttgtggtttttatgctgggaacaatcccatttcctgagggaatgggaggatctgtctacttttcttatcctgattcaaatggaatgccagtatggcaactcctaggatttgtcacgaatgggaagccaagtgccatcttcaaaatttcaggtcttaaatctggagaaggaagccaacatccttttggagccatgaatattgtccgaactccatctgttgctcagattggaatttcagtggaattattagacagtatggctcagcagactcctgtaggtaatgctgctgtatcctcagttgactcattcactcagttcacacaaaagatgttggacaatttctacaattttgcttcatcatttgctgtctctcaggcccagatgacaccaagcccatctgaaatgttcattccggcaaatgtggttctgaaatggtatgaaaactttcaaagacgactagcacagaaccctctcttttggaaaacataatttgaataaaataatttttaatggataaaaaaaaaaaaa

SEQ ID NO: 491 - DNA, 5641 bp, Homo sapiens
  CDS (72)..(1406)
tgccgtaccggttcggaattcccgggtcgacgatttcgtggcacgtgaggaggaggtggcttgaggcaaccatggcgggaggaatgaaagtggcggtctcgccggcagttggtcccgggccctggggctcgggagtcgggggcggtgggacagtgcggctactcttgatcctctccggctgcttggtctacggcacagctgaaactgatgtaaatgtggtcatgcttcaggaatcccaagtttgtgaaaagcgtgccagccaacaattctgttacacaaatgtgcttatcccacaatggcatgatatatggacacggatacagatccgagtaaatagttccagattggttcgagtcacccaggtggagaatgaggagaaactgaaggagctagagcagtttagtatctggaactttttttcctcctttttaaaagagaaattgaatgacacctatgttaacgtgggtctatacagcacaaaaacctgcctcaaagttgagattatagagaaggacaccaagtacagtgtcattgtgatccggagatttgatcccaaactctttcttgttttccttcttggacttatgctatttttttgtggagacttgctgagcagaagtcaaattttctactactctactgggatgactgtgggaattgtggcctctctgctaatcatcatttttatactatctaagtttatgcctaagaaaagtcccatttacgtcatcctggtgggaggctggtctttttctctgtacctcattcaactagtttttaaaaatttacaagagatctggaggtgttactggcagtatcttttaagttatgtcctcacagttggattcatgagttttgcagtatgttacaagtatgggcccttggagaatgaacgaagtatcaacctgctgacctggaccttgcagctgatgggcctgtgtttcatgtattctggcatccagataccacatattgcccttgccattatcatcattgctctttgtactaagaacctggaacaccctattcagtggctgtacatcacctgcagaaaggtgtgtaagggagcagaaaagcctgttccccctcgtctcctgacagaagaagaatatcggatacaaggagaggtagaaacccgaaaggctttagaggagctccgagaattttgtaacagtccagactgctctgcttggaagactgtttctcgaatccagtctccaaaaagatttgctgactttgtggaaggctcttcccacctcacgccaaatgaagtttctgtccatgagcaggagtatggattagggagcattattgcccaggatgaaatctatgaggaagcatcctctgaggaggaggactcatattctcggtgtcctgctatcacacagaacaactttctaacctaggtagtggtcagttatctttacgtggactggcttggtgccttggtccatgttgcatgtgttgtgcaattgctttcaaccctttgaaacagagtgagatagacagggtagaaattctcctactgaaataagaggcctaaaaaggcctccctttggaaatgggaggtctctatgggatccctgaggaaggagagtggataaagtagtgaatgctgggtagttcacttcccattggttaagctaacagcccacttttatgtttccagagaaattggatggccacagctagcatggcattctagctccttcttgaaagttgattcaatcatggcatttctgtcactggctggctctccaaagtaagaactgttgttaagtgcaggaatgcttttagactataggctgcaacttccagagagaaatccacaaatctgagcctccttcactccagcttttatttcagtgactttagaataattattgatttaactgttttgggaggaaaatagatttttattgttttgttttttaaatgaatgtcttttaaaaaacataacaaactcatgttccagaaccagcaagtgctccagagtgacacaccccctaggcccctacatatttattaatatggattatccattaaagccccaggagctgttgttttaagctttgatttagttctcatacatatgatagaaagtcctatttgcctttaggaacatgcctgtaggctcttctgcaggtgagatgtactgggctttttattatattcaactttcaattccatcttaaaaaacatttgtattcttctcttcccattcttccttaccctgcctttgccctttcaggaagggtcagttcccttacctgtgaactatgtatgttcagagtagcattattcctgctagctaggagaagtcatcttgtttaggggatttggatgctttttatacgttctccattttcctgtcattgggtcatgttatctttgagttgctatgaaatcaggaaactgtctccttttcctttcccttcctttgtctacatgctctgtccattcctttcagccttttctcaccacccatactcccccaaatctgggtaatttttaagccttgaaactatgtagtttcttgatacacaatttgtagttatgcagcagccacaatttgcattgccaggaaataggctccaggttatcttcatgcctctgggtgctcattcagctgtcaagtttccatgaacttacacttatttatgattgcgtttctgacctgagatgtatgctgcctgttattgcagtagcattagtttcagattcttttgccattgcaaagtaccccttataaaccagcaatgtcatctgtgaggaagcaaattctcaagtgtctgtcatttacttggttctttttctttgtggtcttcacccttataccctggaaaagtctgtaattaccttagccaggaagatagatggtcatggcaagcgcacagcaccagacttactggctcaccaagatgatggaaaaaggcagatgattttttaaaaagccgtaatgactcctttagaccagccatttagcgtggtaattttgaaaggcctagctccattgcagacttccaaagggtcagctctgagactgccctccaggtgggcagttgattatttccaccagtgttttccagagccttaaactgtcctaagtgacaactacctcagttggcaggaaagagacatatagtagaaagtgaaaaatgagcagtatttgggcagatgctatgggttacagttgaagggtaaaaggaactttacattgggaaacctttatacccttgtgaattatgtacatggtaaaatgttctctctctacaaagaactattaaaacttctgaaatatactattttttaccttatttatagaaattgagacctagcatatttaagcataagtttattttaaaaaataattcaactcgtgcaagtggtctcaggattctctggagattttggtgcctcccctacttagggaggtgatagcttgcctataagggtgacttttcctgatcatgtctttatttcaatgagaaagcactgtgaaattgtgaaagattctcctctttctctgtttaataaacccccatgaaatatagtttccatctctagaccagttttttttccaccgtgtttagacttgaggtgaataaaatcaaactgttttttactccctatctggtagttggagacctgagctgtaggcagtggagatggcaattggttctgcagcctgagagttgctctcacacagtgaaggacggtgctgctctggtgtgctgtgtgtccttgccctgcctgcctgtggctctgcccagatgcttcagatcctctgtgttccggagattgcttgacttcaaccttctttaggagctgctcttgtctccctcttggccacttagtttgctggctcagtcactacttgaagaccccatttaatttttctctggcagttatagctcttgtgatttcagtacagtctcatctctcagaccaatctcatcaagaaggattgaagggataactatgaggtaagctggacattggagccgtgtttgctgccacgtcagcgtcttgctgggtgaatgtcaagccataaatgggctccagggctctggatctcatcagcattggaaatctattgcctctcatcagtctgaccaaattatgtagagcattaatgtagagactcccattaatgggaatacaagaggcagctggcataaaacatttctttcactttcctttcccactcagattgcttcaagagaccaacagaacacagggatcaaaaacaaggaaaatttagcaacttcattaccttctaataagtaattcctgttagccactgcatcccaccaaaactagtttatttttcccctcaaattcatgatttttacgtctgttacaaagggaattttgctgatagctctttgggtcccactgttccattttatgctaatagattccattctagggcccagccgtctcttgactgatggtgttccctttaacccttggcatgtataatagaattttggtgaatgaaagaacccaaataggccagatagtccccccaggccctgatatccataaaaggcttgggaatgcattatgtaattgtccttagtctttttgttgttttagaaaaaaaaaacaagatgggctcagatggatgcctacgtaaaaatggttcctagctgtgtactcataacttttctttgaattgagtagtgaaaggaaggaggaggaaaggaaattaaatgtccttctagtattctctggactcaagtctgacatatgagataataacctatattgaaatgccaagaattgtatctgaaacaagagaacagtttgacacatttatcatgccttcatattacatattaactgaaaccaattaataaacatatgaaatatccattgcacaaggcaaaggcacctaaaccttttgtttctttttctacatagcagaaattgattttttttttatttttttaggggaacctatataattatgacccagtgatgtcttttggtgacttaagcttatgaattcaggttacaattgagttgattctagatggttactaccttgaaaaggatgttggtgccttatgtgacacgagccagagcctgctgggaataaacaaagcagattcatgccaacaccaactcgtagctttagtggcagatgggagtggtcacagactcccaaaatgtggggctttggatttccacaccatcccacgtgtgtgtcatcttcctctttcacactcttgatgataatttgaaaatgatgaaatcacctctgaatttgcctatagcatgagcacattcttatgacaacataacaaatagttcataatgtgaatattagaaactgttacagcctgcagttaccataattttccatgtttgtggaattgatattgaaatagcagggctaaggaattactggcaagttttagcctgtgggtaataccttagggttatttaaatatttgtaattttatttaaatgttcatgaatgtttgaaaggaacaaaattatcagggatggctctttgccatgggtcttattttcaccctcttttctgtaagaaaaaagaacaatgtcttaatgtatttttaaagtttttggtatagtttctaattccaattttaataaaagttttatagat

SEQ ID NO: 492 - DNA, 2149 bp, Homo sapiens
  CDS (610)..(1734)
gtaccgctccggaattcccgggtcgacgatttcgtcccacgtgatcctggcctgcagttgggtggctgcggtgagatacctgggttcctgaagggcgggtggttaggtcgtaactactgcccccgccggctgagtctccgagcggccgggctcggaagccacgagccagctgaggcgttctccgcttagtgcctacggcatgggtcagctctttctgccacctccgccttcgcggtcctcacctctttgcgggtgaagttacctttgggtttccagaccttgggggcctgaggcccaaactcgggacgaacccctaacccacctctcttttcctgtcattctccaactcttactttgtaccacggaatcacttggccttaaagctagccagctcggccgtgccttgaggccaggttcgagagataaaggtaaccgtggggaaagcggccccccagtggacaaaggcggaggcaagaatagagcaggcctgagggccataggcgatgagaataggcagttgaggggtgaaaaagaaaacaaacaaacaacaacaacaaaccctgaagagtactgaagatttagaagggactggaaaggacttgttgcgcaatggaagaatctgactctgagaaaacgacggagaaagaaaatctggggccgagaatggatccaccactaggggaaccggaaggatcgcttgggtgggtgctaccaaatacagccatgaagaaaaaggtgctgttgatgggtaaaagtgggtctggtaagaccagcatgaggtctattatctttgcaaattatattgccagagacacacgtcgccttggcgcaacaatactagaccgtatacatagtcttcaaattaatagcagtttgagcacctactctctcgtagactctgttggaaatacaaagacatttgatgtagaacattctcatgttcgatttctgggaaacctggtattgaacctgtgggattgtggtgggcaagacaccttcatggaaaattatttcactagccaacgggacaacatcttccgaaatgtggaggttctgatttatgtctttgatgtggagagccgcgaactggaaaaggacatgcactattaccaatcatgcctggaggccattctgcagaattctccagatgccaaaatattttgcttggtacacaaaatggatctggtacaggaggatcaacgggacctgatttttaaagagcgagaagaagatttgaggcgtttgtctcgcccattggaatgttcttgtttccgaacatctatctgggatgaaaccctctataaggcttggtccagcatagtttatcagctgattcccaatgttcagcagctggaaatgaacctaaggaattttgctgaaattatcgaagctgatgaagtacttctttttgagagagctacttttctggtaatttctcactatcagtgtaaagagcagcgtgatgcccatagatttgagaaaataagcaacattattaagcagttcaagctgagctgcagcaagctggctgcctctttccagagtatggaagtcaggaactctaacttcgctgctttcattgacatctttacatccaacacttatgtgatggttgtgatgtctgatccgtccattccttctgcagctactctgatcaacatccgcaatgccaggaaacactttgaaaagctggaaagagtggatggaccaaagcagtgtcttctcatgcgctaaacattgatgaatattgtttcacacaaaaattaaaagtttcctaattaatgttgtattcatatatgtaggctctgaaatgttgtgatgcttattgcttctgtatttcttctctactccctagtcttaatgtttaaccttgaatgctattaacttaaatagccattgaggagttagaagatgaattgttcatgaagtcggtgttacataaaagtaggtgatatgtaagttttctgataacaaggttctaatagtgtttaaatgtactggtaacctggttccaatagttgtgtttgcccaagcctttctcggcatcatcttgtattccttatcagatagtaagtaacctgtaagtttggagtattactgttttctcagcatgcattaaaaatattccttaacttcaaaaaaaaaaaaa

SEQ ID NO: 493 - DNA, 2065 bp, Homo sapiens
  CDS (610)..(1650)
gtaccgctccggaattcccgggtcgacgatttcgtcccacgtgatcctggcctgcagttgggtggctgcggtgagatacctgggttcctgaagggcgggtggttaggtcgtaactactgcccccgccggctgagtctccgagcggccgggctcggaagccacgagccagctgaggcgttctccgcttagtgcctacggcatgggtcagctctttctgccacctccgccttcgcggtcctcacctctttgcgggtgaagttacctttgggtttccagaccttgggggcctgaggcccaaactcgggacgaacccctaacccacctctcttttcctgtcattctccaactcttactttgtaccacggaatcacttggccttaaagctagccagctcggccgtgccttgaggccaggttcgagagataaaggtaaccgtggggaaagcggccccccagtggacaaaggcggaggcaagaatagagcaggcctgagggccataggcgatgagaataggcagttgaggggtgaaaaagaaaacaaacaaacaacaacaacaaaccctgaagagtactgaagatttagaagggactggaaaggacttgttgcgcaatggaagaatctgactctgagaaaacgacggagaaagaaaatctggggccgagaatggatccaccactaggggaaccggaaggatcgcttgggtgggtgctaccaaatacagccatgaagaaaaaggtgctgttgatgggtaaaagtgggtctggtaagaccagcatgaggtctattatctttgcaaattatattgccagagacacacgtcgccttggcgcaacaattgatgtagaacattctcatgttcgatttctgggaaacctggtattgaacctgtgggattgtggtgggcaagacaccttcatggaaaattatttcactagccaacgggacaacatcttccgaaatgtggaggttctgatttatgtctttgatgtggagagccgcgaactggaaaaggacatgcactattaccaatcatgcctggaggccattctgcagaattctccagatgccaaaatattttgcttggtacacaaaatggatctggtacaggaggatcaacgggacctgatttttaaagagcgagaagaagatttgaggcgtttgtctcgcccattggaatgttcttgtttccgaacatctatctgggatgaaaccctctataaggcttggtccagcatagtttatcagctgattcccaatgttcagcagctggaaatgaacctaaggaattttgctgaaattatcgaagctgatgaagtacttctttttgagagagctacttttctggtaatttctcactatcagtgtaaagagcagcgtgatgcccatagatttgagaaaataagcaacattattaagcagttcaagctgagctgcagcaagctggctgcctctttccagagtatggaagtcaggaactctaacttcgctgctttcattgacatctttacatccaacacttatgtgatggttgtgatgtctgatccgtccattccttctgcagctactctgatcaacatccgcaatgccaggaaacactttgaaaagctggaaagagtggatggaccaaagcagtgtcttctcatgcgctaaacattgatgaatattgtttcacacaaaaattaaaagtttcctaattaatgttgtattcatatatgtaggctctgaaatgttgtgatgcttattgcttctgtatttcttctctactccctagtcttaatgtttaaccttgaatgctattaacttaaatagccattgaggagttagaagatgaattgttcatgaagtcggtgttacataaaagtaggtgatatgtaagttttctgataacaaggttctaatagtgtttaaatgtactggtaacctggttccaatagttgtgtttgcccaagcctttctcggcatcatcttgtattccttatcagatagtaagtaacctgtaagtttggagtattactgttttctcagcatgcattaaaaatattccttaacttcaaaaaaaaaaaaa

SEQ ID NO: 494 - DNA, 2188 bp, Homo sapiens
  CDS (610)..(1773)
gtaccgctccggaattcccgggtcgacgatttcgtcccacgtgatcctggcctgcagttgggtggctgcggtgagatacctgggttcctgaagggcgggtggttaggtcgtaactactgcccccgccggctgagtctccgagcggccgggctcggaagccacgagccagctgaggcgttctccgcttagtgcctacggcatgggtcagctctttctgccacctccgccttcgcggtcctcacctctttgcgggtgaagttacctttgggtttccagaccttgggggcctgaggcccaaactcgggacgaacccctaacccacctctcttttcctgtcattctccaactcttactttgtaccacggaatcacttggccttaaagctagccagctcggccgtgccttgaggccaggttcgagagataaaggtaaccgtggggaaagcggccccccagtggacaaaggcggaggcaagaatagagcaggcctgagggccataggcgatgagaataggcagttgaggggtgaaaaagaaaacaaacaaacaacaacaacaaaccctgaagagtactgaagatttagaagggactggaaaggacttgttgcgcaatggaagaatctgactctgagaaaacgacggagaaagaaaatctggggccgagaatggatccaccactaggggaaccggaaggatcgcttgggtgggtgctaccaaatacagccatgaagaaaaaggtaagacgtgttagatacgtcaaaaccatgaagaaaaaggtgctgttgatgggtaaaagtgggtctggtaagaccagcatgaggtctattatctttgcaaattatattgccagagacacacgtcgccttggcgcaacaatactagaccgtatacatagtcttcaaattaatagcagtttgagcacctactctctcgtagactctgttggaaatacaaagacatttgatgtagaacattctcatgttcgatttctgggaaacctggtattgaacctgtgggattgtggtgggcaagacaccttcatggaaaattatttcactagccaacgggacaacatcttccgaaatgtggaggttctgatttatgtctttgatgtggagagccgcgaactggaaaaggacatgcactattaccaatcatgcctggaggccattctgcagaattctccagatgccaaaatattttgcttggtacacaaaatggatctggtacaggaggatcaacgggacctgatttttaaagagcgagaagaagatttgaggcgtttgtctcgcccattggaatgttcttgtttccgaacatctatctgggatgaaaccctctataaggcttggtccagcatagtttatcagctgattcccaatgttcagcagctggaaatgaacctaaggaattttgctgaaattatcgaagctgatgaagtacttctttttgagagagctacttttctggtaatttctcactatcagtgtaaagagcagcgtgatgcccatagatttgagaaaataagcaacattattaagcagttcaagctgagctgcagcaagctggctgcctctttccagagtatggaagtcaggaactctaacttcgctgctttcattgacatctttacatccaacacttatgtgatggttgtgatgtctgatccgtccattccttctgcagctactctgatcaacatccgcaatgccaggaaacactttgaaaagctggaaagagtggatggaccaaagcagtgtcttctcatgcgctaaacattgatgaatattgtttcacacaaaaattaaaagtttcctaattaatgttgtattcatatatgtaggctctgaaatgttgtgatgcttattgcttctgtatttcttctctactccctagtcttaatgtttaaccttgaatgctattaacttaaatagccattgaggagttagaagatgaattgttcatgaagtcggtgttacataaaagtaggtgatatgtaagttttctgataacaaggttctaatagtgtttaaatgtactggtaacctggttccaatagttgtgtttgcccaagcctttctcggcatcatcttgtattccttatcagatagtaagtaacctgtaagtttggagtattactgttttctcagcatgcattaaaaatattccttaacttcaaaaaaaaaaaaa

SEQ ID NO: 495 - DNA, 7818 bp, Homo sapiens
  CDS (61)..(2931)
gtattgttaggccccttatgggacaagctctcaactgctgatcacccagtgattgtcaccatggccagcaagaggaaatccaccacaccatgcatgatcccagtgaagactgtggtgttgcaagatgccagcatggaggcccagcccgctgagaccttgcctgaaggaccccagcaggatctgcccccagaagcatctgctgccagcagtgaggcagcacagaaccccagcagtactgatggctctacactggccaatgggcatcggagcactttagatggctatttatattcctgtaaatactgcgatttcagatcccatgacatgacccaatttgtgggacatatgaactcagagcacacagactttaataaagacccaacctttgtatgcagtgggtgcagttttctggcaaaaacccctgaggggctttccttgcacaatgccacatgtcactccggggaagccagctttgtgtggaacgtggccaagccagacaatcatgtggttgtggagcagagcatccctgagagcaccagcactcctgacctagcgggtgagcccagtgctgaaggggctgatggacaggcagaaatcatcattaccaaaactccaatcatgaagataatgaaaggcaaagctgaagccaaaaaaattcatacactcaaggagaatgtccctagccagcctgtgggtgaggccttaccaaagctgtcgactggagaaatggaggtgagagagggggaccattccttcatcaatggggcagttccagtcagccaggcatctgccagctctgcaaaaaacccccatgccgccaacgggcccctgataggaacagtgccagttttgccagctggcatagcacagttcctctccctccagcagcagcccccagtgcatgcccaacaccatgtccaccagccactgcccacggccaaggcccttcccaaagtgatgatccccctgagcagcattccaacgtacagtgcagccatggactctaacagcttcctgaagaactccttccacaagttcccctaccccaccaaagccgagctctgctatttgactgtggtgaccaagtatccagaagaacagctcaagatctggttcacagcccaaaggctgaagcaggggatcagctggtcccctgaggagattgaggatgcccggaaaaagatgttcaatacagtcatccagtctgtgcctcagcccacaattacggttctaaataccccactcgtcgccagtgctggcaatgtccagcatctcatccaggccgctcttccaggtcacgttgtggggcagccagagggtacaggagggggacttctggtcactcagccattgatggccaatgggttgcaagcaacaagttcccctctccccctcacggtgacatccgtccccaagcagccaggtgtggcacccattaacactgtgtgttcaaatacaacgtcagctgtgaaggtggtcaatgcggcccagtcgctcctcacggcctgccccagcataacctcccaagccttccttgatgctagcatctacaaaaataagaaatctcatgaacagctgtcagctctgaaagggagcttctgtcggaaccagttcccagggcagagcgaagttgaacatctcacaaaagtgacgggcctcagtaccagagaggtgcggaaatggttcagtgatcgtagataccactgccggaacttgaagggctccagagcgatgatacctggagatcacagttccatcatcattgactctgtgccagaggtgtccttctccccatcgtccaaggtccctgaggtaacctgcattccgacaacagccacactagcaacccacccttctgccaaacgacaatcttggcaccagactcctgacttcacaccaaccaaatacaaggagagagcccctgagcagctcagagccctggagagcagttttgcacaaaaccctcttcctcttgatgaggaactggaccgcctgagaagtgaaaccaaaatgacccgacgagaaattgatagctggttttcagagagacggaaaaaagtgaatgctgaggagaccaagaaggctgaggagaatgcctctcaggaggaagaggaggctgctgaggatgagggtggagaagaggatttggccagtgagctaagggtctctggtgaaaatggctctctggaaatgcccagcagccatatcttggcagagcgcaaagtcagccccattaaaatcaacctgaagaacctgagggtcactgaagccaatggcaggaacgagattccagggctgggtgcctgtgaccctgaggatgatgagtcaaacaaactggcagagcagctcccaggcaaagtgagctgcaaaaagactgcccagcagcggcacttgctgcggcagctctttgtccagacacagtggccaagcaaccaggactatgactccatcatggcccagacgggtctgccacggccagaggtggtgcgctggtttggagatagcaggtacgcactgaagaacggccaactcaaatggtacgaagactataagcgaggcaacttcccaccagggctactggtcattgcccctggcaaccgggagctcctgcaggactattacatgacacacaagatgctgtatgaagaggacctgcagaacctctgtgacaagacccagatgagctcccagcaggtcaagcagtggtttgctgagaaaatgggggaggagaccagagccgtggcagacacaggcagtgaggaccagggccctggtactggtgagctcacagcagttcacaaagggatgggtgacacctattcagaggtgtctgagaacagtgagtcgtgggagccccgtgtccctgaggccagctcagagccctttgacacatcgagtccccaggctggacgtcagctcgaaacagactgaatttgatctgattaatgtgaaggactggccagtctgggaaaccgcctgccacgtggaagagccaaacccgactctctgctgccacatgccgttcccatgcccggctgctgggcacctgggagagcttccagaatcctcgcagacagcccagagcctgccgctaccctcggcctgcccaccaccaagcaagcagcaagcaagatggggttctcatcagttcttcctcccacaatgtaggacctttcctttaccttccaatggataaaatagttcagagttcatagtcatattcatagacacagaatcaagcttttaacatatacatccacctctatatgttaaataaaacatcagattatcaacactgtcattacgtagaaactttggttagccaagcagtgcattgtcagttacgtcatctctaaaaatgacctgtgtctgttctctggggattgctgggtcacaggtgcccctcaccttccacagtcaggcagggaagttataggcacaaagctacgtctggaacccctttgtgccccctttgtgttcctcaaggaagcagtacctttgaagagatctctgctgcattaagtgatgaccggctacgtttcatgtcaggcttgctttgccttgtgggctactcagtgcagaacctgctgtaaccctcagttcaaaaaatggactggcaatgtgattagcgttggatgctttaccattctctttagttgttaccgtaattctgctttttcatgggagtttgaatcatggaccataacttttcagttatcagatcaactaaagaaacatttgttgttaagcctaatgtgctgacctatgtgcctgcattttttttttaatctagacatgtttggagtgagagaaagatggaaaaaagacatggggtagggacgtaagtggaaatctatagccacagcctgaagctttgaccactgcggttttcagagccctttctccacactcatttcagagcctcctatggtttgggaaggaataacacactggcccattagtaagggtgaaggctggagggatttgttgacttcttggaattatcagaggtagggtggtctttagcacaaagacttgcatgcagagatccctggcagaacacccagagtgcccgtggctcccaccccagggtctggccggtgtgctggatgcatgcccaagggtgctgggcatcactggtccttgtgaggatgcttttaaagttttatatttatgtccccaaacttggaaacaagaactctactttagcctaaccctcatgtccttttttgaattgagaaaattacaggaaatggtgcctttgaaaattagaaaacttgcttacagagctgttctaaatggtaaatcctcaatttccccaagaccggttgctctgagagtagctggtaaagaggggcgaactaaagacctgtccacctgtagctccgctcatttcttagaaaccacctgcttcccagagtgccaagccacaagtaccaggcttcgtgggcacagacacctcctgggctgggcagagtgacagtgctagaagaccccagagagagggcaagggctttgggcaagaagcactggtggtgttttagggaccgtccttctcccctacccagggaactggacctggcagggcaccgtgctcatgtggctccaaggacaagcatggcggtggccccttctgccttccaggagaggtcttgcttttgaaaccaaaatcatgttcttctaaagtgtcatcttctgccctccctgtcccaatagggaccacatcttatttgtctcaaacagggacttgtgagtacttggcaagttttgcagcctatttttgtattcttaatttggggagtaaagatgtttggtctcaaaaacctttgaggaattgccaagaatggcgagtgattgctttccttcagagaacagacacttggaatttctccttttagtgtttatatacgtgcagattaatttatatatatatatatacacacacacatatacagtataaatactcatttgattctcgtaaaacgcgcatctggcgtgtgcagttgagaaacttggtggcacatgggtgttgggggagtagcctgtgttggagggacaccagtgcactaggcagctggggcggcccaggctgaagccatctccgggtgtctgagaaaccacccagtgcctcacctccagatcctgctggcatcacctccagagccctgcatgcactggctgaagagttggtctgtggagaggattttcttggttacttgtattcacggttaatttacaacccaaacagcaaaacacagttggtggacaagttcatgcaggacctacagtgacccagccatgggcactagctcatctttcaggtggaaaagtacagtgctgcctgccctggtatgtttttcttatagatgttagccctgcccaacagccagggctacactacaaaaggcaagaatgcccatgtaaggagcccagcagtctggacagatccttcttcctctgctgttggatgagagtgagtgagtatggtctggaccttatccttgaaagatgatcaaaagcgatgatgagggaggcagtcatcacgcaggtgcttaaagggacattgtaggaggtactcaagggtttgggggcaaaaccctgaatccagccagtcgtgcacagagacacacccacactagcccagtggcagtgggggatgtgggatggcagcagccaggtatgtagccctgtcacaggacagctcactgtggttttgcacactgcctaagggttaaattgtgttgttgccttcagtagaaggcatttgtgggctgcagagttgagagttgggtgaggttagtctctcctgaagaaaaagcctataaaaagtggctaatcttatcccttttctctgtatgcagttggactcgtcagagatagtaaaatcatcttttagtgtttttttgttgctgatgtcttgtacccatttgttttttacatggggttgtagatcgagttctcaaaggtgaaaccagatgatcattctgataaaggaaatttaaatttgatacatatgctttgtatattttgattacttgttttcgtttttgactataaaggagctttttttcttgctcagagtttacctgggagatttcaccagtttgactcaccatttgcagatgtgcttttgtattaaatttaaattttcacatatcacatccattctcaaggtagttatatgctggagaagaaaaatcctctagacacatgaaggcccacatagtcaagtcttccagggcaaagccagcagcccacccaggtcaggtagccagcagggctcagttcccctcactccagacacggaccctcctcttcagggtctcttgacccagcttccttctctccttttacctgagagcacagacctctctcagccagcctgcccagaccacggggggctactcccatgtagtttggggagcacttgatctcagaaaagctccattgtctgagcaaatgggcagttgtggagctcaagcctttctcctgtgctcaagtcccttccccaagcaaggcttcaacctcatctacccaccatgtagttttctctggccatttaagtggggcggcagggacatggttgggccatgccacaccagggctggtgaggcaaccagttttgattttgacagagtggctggaggaaaagtggcaatcaaggtgctgcttggtttgctctgagtgcaaatggaaccaacaggtttctgctgcaatctgtgtgttcccagtgccaggtcacaccaggaggggtggggcagggctaaccaagtggtctctgaactcaccgagcgtctgcacttggttgtgaagttaatgggagtacagagagcgtctggccttggagaggggttgagagcctcctttttggttcttcattcctgagctcttgcctgcccacaaatctgacctctttgaatggggacgcagtccttcaacagagaagtttctatggcaaagaagtttctatttagctctagatccagcagagtcatccattctaactgccctgaagtctagagcaggggagggaacccagaggctggggatgagactaggcagaccctggttaccatatggacaaggacaggggaaagcacccccttcctcaatttctgaaagttctatctttgggttcgcaggactttgaggatgataaagaacatataggtactagcttgttgttgctggtccaaagcttccacagccctgagaatttggctttcgtggctgctctggcagctgagcgaagggaggaaggcagccgctctggtggggactctaggcaccttccctgctgtccacttggataggcggtgagccccagggtactgagaggagcctgagcatttacctgccattagtgcctcttccttcaggagactggcttgaaacgtgtgttcatgtgcgcgtgcacacacacacatgagcacctgtatgtgttaatgaatagtttttcttggttaatgctttttaacttctgttcctttccgtaagtggatgattcaaaattaacgtgacttggctgggcgcagtggctcacacctgtaatcccagcactttgggaggccaagggaggcggatcacctgaggtcaggagttcgagaccagcctgatcggcatggtgaaaccccgtttctactaaaaatacaaaaattagccgggcgtggtggtgcgcgcctgtaatcccagctactcaggaggctgaggaaggagaatcacttgaacccgggaggtggaggttgcagtgagctgagatcgtgccactgcactccagcctgggcgacagagcgaaactccgtctcaaaaaaaaaaaaa

SEQ ID NO: 496 - DNA, 4824 bp, Homo sapiens
  CDS (377)..(1576)
  misc_feature (1)...(4824): n = a,t,c or g
catcgaagctgtacgcctgcggtaccggtccggaattcccgggtcgacgatttcgtggccagggccgagaagggcttcaggacgcgggaggcgcacttgcttcaagtcgcgggcgtgggaacggggttgcaaaacggggcctctttgtccgggtgggttaagggccctggcagctttttcgcgaaggcgccatgtcctancagttgggccgcagtgggcccgaggtccactcggaccgccgagacggctcgatggccctggagctggaggaagggggatacctgggcgccggccgccgccctcgcaactcggccgaggcccctatctcaacctagtttctgtttttcccctgttctgcaggcttgcttccggcgtcatggctcaaagggccttcccgaatccttatgctgattataacaaatccctggccgaaggctactttgatgctgccgggaggctgactcctgagttctcacaacgcttgaccaataagattcgggagcttcttcagcaaatggagagaggcctgaaatcagcagaccctcgggatggcaccggttacactggctgggcaggtattgctgtgctttacttacatctttatgatgtatttggggaccctgcctacctacagttagcacatggctatgtaaagcaaagtctgaactgcttaaccaagcgctccatcaccttcctttgtggggatgcaggccccctggcagtggccgctgtgctatatcacaagatgaacaatgagaagcaggcagaagattgcatcacacggctaattcacctaaataagattgatcctcatgctccaaatgaaatgctctatgggcgaataggctacatctatgctcttctttttgtcaataagaactttggagtggaaaagattcctcaaagccatattcagcagatttgtgaaacaattttaacctctggagaaaacctagctaggaagagaaacttcacggcaaagtctccactgatgtatgaatggtaccaggaatattatgtaggggctgctcatggcctggctggaatttattactacctgatgcagcccagccttcaagtgagccaagggaagttacatagtttggtcaagcccagtgtagactacgtctgccagctgaaattcccttctggcaattaccctccatgtataggtgataatcgagatctgcttgtccattggtgccatggcgcccctggggtaatctacatgctcatccaggcctataaggtattcagagaggaaaagtatctctgtgatgcctatcagtgtgctgatgtgatctggcaatatgggttgctgaagaagggatatgggctgtgccacggttctgcagggaatgcctatgccttcctgacactctacaacctcacacaggacatgaagtacctgtatagggcctgtaagtttgctgaatggtgcttagagtatggagaacatggatgcagaacaccagacacccctttctctctctttgaaggaatggctggaacaatatatttcctggctgacctgctagtccccacaaaagccaggttccctgcatttgaactctgaaaggatagcatgccacctgcaactcactgcatgaccctttctgtatattcaaacccaagctaagtgcttccgttgctttccaaggaaacaaagagtcaaactgtggacttgattttgttagcttttttcagaatttatctttcattcagttcccttccattatcatttacttttacttagaagtatccaaggaagtcttttaactttaatttccatttcttcctaaagggagagtgagtgatatgtacagtgttttgagattgtatacatatattccagaacttggaggaaatcttatttaagtttatgaatataaccatctgttactgttctaaaaatgtttaaaagaaactcaatacagataaagataaatatgtgactattattgggtattacacttcacttctctttaatatttttcctccaactggagggcagacaattttctgacttgcttttctctaggtggttcattttgaaaggggacagaaatataactaaatgcttccaggagaaaaattccaagagttacaatctggacttggtacctaaatatcattttttaaattcttgatgcctatttggactagaggtaaacatactttcagattggcctgtttttgtcggtaaggcatacagccttcagaagccaacatttttaatcaaaaacttataaaacatgatgatcattgtgaaaattctgagttgaaggttagtttaagataagctaacaataacagtctgtgttttctctaaaataatctgagttttttggaactctttatttaaatatgtgtgtttttcagtattcaaataagatcaggaagccaattttctatgtatgaatatgctttaacctaggatttcagtccactctgactgactttctaaactttaacttgggtttttacagtgactatgcattagtgctgactctttggtataagccataaaatattttccttcctatcaatttatctgaactttggtcttttcactaaattgtacagtattctacttctgtttaaaaaggggagatgagaaagggaatactatctaaccaataacttgaacaaaaacactaaactaagcatttaatagaaatgctttttattgaggaggtattatccagagttcatgcttagaacaaatgcatctttgcgtatcctagacttaacaattcatcagtttctgagaccacagaatcaggttttccgtagtagataaagactctctggtgcttcaaattctgttcaagtgttttgactcatcagcttctactctttctattactgcctttgcctggcttgttttgtctctttgcaactgattttgcaaaaaaaaattgtagctttaaaataacagggtctaagtattttaaatgtgcctatttcacagctctcttggtcacaaaaacatgctatttttattggaacttcaaaccaaatccccactgagtgtgtactggttcctgcaggtagcagtctcctattatctcctgtttagcaccaaaagagctaatattattggaaactgaccttttaaaggccactggcagtaggatttaaaaagcagcccactgctcagtttccaggatcagcttcctccttctgtcacttgtgtaagttggcactaccttgtgcctctcagattgctgaagtgctgctggtaagcatgtgcatgctctgcctttcttgtgaaagttttcaatcagcgatatcagcacttacagtaagaagtaaaagtagtgcacagcaaagctaatttgcctttgcctggggtgttcagcttgaaagaataaagctcatttggtttagttaaatgtcttactctactgtgcctatgcttttagctgcgttactaagcaagggaaaaataacagtttctctgagccagagaagacttgatcacagttctccaagcatcgtgatagcaatgcttaaccccaggaagatttcaaggcagggagaagaacatttcaaataagattcttgttaacccatttatgcctagtgttccattattggaatgctaagcttgtgggagtcatttacatcctactgctcaaagtcattgccaaggtctgatttttcacacaaaaaattgcaacccccagcataaatgggttagctactgtcatcagttagcaaattcatccacacaaacacaattagagtttggtttttttttaagcttttcaaaacttactaaactggcacaattttatatgtatgctatttgttgtatttatgcttaagagcaaaaaagttttgatgggattttaaattcaggcaaagcctacaacgctgagacaatcccctaacaacatggtagtaactaaagaaacttttatactaggcttcttagttttaaaaggaagtggcatcattgtttcagttctagtttgtatttttctctcagatatttttcttctttaaaaatctttcccagaagttggttcctagaaaactcaataccatcatctcttatctctatacagggactaggtaataaaaccttcaaaggttgtcaaaggtcatcaagcagtgttcatttatcctgtcacatgtttctgtttctatagtaatttagaaattgcaaatagttaacttttcatcatgtaaaaagttaacattatcctatttccatagataccatggacggcggtgtggcctgagttgtcagtctttaatcctgagtcatgtggctctcttttcatctttgatgtcagttccaattatttggcatcaaaaaccttcatggtaggtagagttttaggtaaaagtggatctagggttactttctttattaacatttcctaaataactgaattgagagacatactctgctactatgtcctcaggttaatttttgtctgatcttacgatgccctgccttttactagctactttagaaatagaaaatgtgaagagtgactatttacatgtatactcctttggctgctagaactcatctgtagtcctttattatttacactgaattccaatttcatttctgcttccgctaagtaagagcacctcattcctgtgttttctctactattgagctgtagacgaactgtttctctaattataaagcaaactgtttgggatattcagggaaactaccccaatgttatgttgtcatttaatgggaaaggctgggatcatatgtatttctatgttctgtaaagtatttgacttactagttctcaataaaattttattaggactataaaaaaaaaaaaa

SEQ ID NO: 497 - DNA, 3400 bp, Homo sapiens
  CDS (146)..(2653)
cgagatctgcaggaggcttacagctctgggccgtgaagtctcagcagctgctcaggaattcccggggccctccaaggggcctcagacccgaggtgtctccgctgcagagtcaccgtggaatattcctgatccaaagcagctgccaatgcctcagacgcctgtgcccccagagggccaggggcagctgccgcgcagggcggggagccgggaggcggtgccggcgcccgcctcggccccggaggcggcaccaggaagcgcccgccccggccggagccgccatgtaaccggcgccgcccggagcccgagccgcgcgggccccagcgacccgcccgccatgggggacgaggacgacgatgagagctgcgccgtggagctgcggatcacagaagccaacctgaccgggcacgaggagaaggtgagcgtggagaacttcgagctgctcaaggtgctgggcacgggagcctacggcaaggtgttcctggtgcggaaggcgggcgggcacgacgcggggaagctgtacgccatgaaggtgctgcgcaaggcggcgctggtgcagcgcgccaagacgcaggagcacacgcgcaccgagcgctcggtgctggagctggtgcgccaggcgcccttcctggtcacgctgcactacgctttccagacggatgccaagctgcacctcatcctggactatgtgagcggcggggagatgttcacccacctctaccagcgccagtacttcaaggaggctgaggtgcgcgtgtatgggggtgagatcgtgctggccctggaacacctgcacaagctcggcatcatttaccgagacctgaaactggagaatgtgctgctggactccgagggccacattgtcctcacggacttcgggctgagcaaggagttcctgacggaggagaaagagcggaccttctccttctgtggcaccatcgagtacatggcccccgaaatcatccgtagcaagacggggcatggcaaggctgtggactggtggagcctgggcatcttgctcttcgagctgctgacgggggcctcgcccttcaccctggagggcgagaggaacacgcaggctgaggtgtctcgacggatcctgaagtgctcccctcccttcccccctcggatcgggcccgtggcgcaggacctgctgcagcggctgctttgtaaggatcctaagaagcgattgggcgcggggccccagggggcacaagaagtccggaaccatcccttcttccagggcctcgattgggtggctctggctgccaggaagattccagccccattccggccccaaatccgctcagagctggatgtgggcaactttgcggaggaattcactcggctggagcctgtctactcaccccctggcagccccccacctggggacccccgaatctttcagggatactcctttgtggcaccctccattctctttgaccacaacaacgcggtgatgaccgatgggctggaagcgcctggtgctggagaccggccaggtcgggcagcggtggccaggagcgctatgatgcaggactcgcccttcttccagcagtacgagctggacctgcgggagcctgcgctgggccagggcagcttttctgtgtgtcgccgctgccgccagcgccagagcggccaggagttcgcagtcaagatcctcagtcgcaggctggaggcgaacacgcagcgcgaagtggctgccctgcgcctgtgccagtcacaccccaacgtggtgaatctgcacgaggtgcatcacgaccagctgcacacgtacctggtcctggagctgctgcggggcggggagctgctggagcacatccgcaagaagcggcacttcagcgagtcggaagcaagccagatcctgcgcagcctcgtgtcggccgtgagcttcatgcacgaggaggcgggcgtggtgcaccgcgacctcaagccggagaacatcctgtacgccgacgacacgcccggggccccggtgaaaatcatcgacttcgggttcgcgcggttgcggccgcagagtcccggggtgcccatgcagacgccctgcttcacgctgcagtacgctgcccccgagctgctggcgcagcagggctacgacgagtcctgcgacctctggagcctgggcgtcattctgtacatgatgctgtcggggcaggtccccttccagggggcctctggccagggcgggcagagccaggcggccgagatcatgtgcaaaatccgcgaggggcgcttctcccttgacggggaggcctggcagggtgtatccgaggaagccaaggagctggtccgagggctcctgaccgtggaccccgccaagcggctgaagctcgagggactgcggggcagctcgtggctgcaggacggcagcgcgcgctcctcgcccccgctccggacgcccgacgtgctcgagtcctctgggcccgcagtgcgctcgggtctcaacgccaccttcatggcattcaaccggggcaagcgggagggcttcttcctgaagagcgtggagaacgcacccctggccaagcggcggaagcagaagctgcggagcgccaccgcctcccgccggggctcccctgcaccagccaacccgggccgagcccccgtcgcctccaaaggggccccccgccgagccaacggccccctgcccccctcctaatccccaccactgtgacccccttccctcataggggctgtgacctgggagcccggctcactcccggaggcctctgcctgcggctgacctgatccccaagggactgtcctttcctctcctaccccaccccactcccagacagagcagaagtatttttataagcagagaattttttatgtcttaccagatagagttgcagggaagggggggcctgctggggagtggggtttggggggccctctcccaggacactgcctcttctgggcagaaggcccctccagggggactgctccaacaggaaagagcccctcccccacttctaagcactgagttaggagtgctaactcctaaactgggaccccctaccctgttctcccctgaggccccgttcctgggaggggcacccctcaactgtcactttatggactgtctgtgcaattacgtccaccaaagacccgtgttgggggtactgaaggagaggccctgggggaccctctgaagcatttctgcctcactttatgtcatctgcttctcccctgttggggctaaggaaggagataggtggctcctaaaagaggaggccatcttctcacccaccccttcctctttggcacagctactcctggctgggggtggggccttgggggtctgggctgggcatccatggtcactgcctcagcccagccaggctgtgcctttgactttaaaataaaagtccacccagtgctgtgtgtggcaaaaaaaaaaaaa

SEQ ID NO: 498 - DNA, 3118 bp, Homo sapiens
  CDS (213)..(1514)
tgcccgcctgctgaattcggcacgaggacacgctgaacagaattcacctcacgtccagtatgagatgggagtatgaacaaacagtcatgcagagtgatgagtgcaaacatggactataaagcggccatagagaatgaactgtgtttgtgtttagagaagacacactccccacccctgaacaggcttcttaaaagtactagaaaggaacagaaatgaataaaagtcgctggcagagtagaagacgacatgggagaagaagccaccagcagaacccttggttcagactccgtgattctgaagacaggtctgactcccgggcagcacagcccgctcacgattccggccacggtgatgacgagtctccgtcaacctcgtctggcacagctgggacctcctctgtgccagagctacctgggttttactttgaccctgaaaagaaacgctacttccgcttgctccctggacataacaactgcaaccccctgacgaaagagagcatccggcagaaggagatggagagcaagagactgcggctgctccaggaagaagacagacggaaaaagattgccaggatgggatttaatgcatcttccatgctacgaaaaagccagctgggttttctcaacgtcaccaattactgccatttagcccacgagctgcgtctcagctgcatggagaggaaaaaggtccagattcgaagcatggatccctccgccttggcaagcgaccgatttaacctcatactggcagataccaacagtgaccggctcttcacagtgaacgatgttacagttggaggctccaagtatggtatcatcaacctgcaaagtctgaagacccctacgctcaaggtgttcatgcacgaaaacctctacttcaccaaccggaaggtgaattcggtgtgctgggcctcgctgaatcacttggattcccacattctgctatgcctcatgggactcgcagagactccaggctgtgccaccctgctcccagcatcactgttcgtcaatagtcacccaggaatagaccggcctggcatgctctgcagtttccggatccctggtgcctggtcctgtgcctggtccctgaatatccaagcaaataactgcttcagtacaggcttgtctcggcgggtcctgttgaccaacgtggtgacgggacaccggcagtcctttgggaccaacagtgatgtcttggcccagcagtttgctttcatggctcctctgctgtttaatggctgccgctctggggaaatctttgccattgatctgcgttgtggaaatcaaggcaagggatggaaggccacccgcctgtttcatgattcagcagtgacctctgtgcggatcctccaagatgagcaatacctgatggcttcagacatggctggaaagatcaagctgtgggacctgaggaccacgaagtgcgtaaggcagtacgaaggccacgtgaatgagtacgcctacctgcccctgcatgtgcacgaggaagaaggaatcctggtggcaggtacttgaggaaggaaggggaagttccaccccatcaaatactgtctctcaggggcgatcccagcaacttcagcagcagagggaaaagttaccccaaaacagaactgaatcaaggggagtgtggacagctgggtggggagactaggagggaagtagaattagattatattagtaatcaggagtgtaaataaatgtccaccaggtggacagcctcatcccatgtcagtgggcaaacgtcacttcagaaacaggcaggtggggaggtcctggggagcctgggtttggagtttgagtggatttcatcaggccagcattattccaccacgcaactatcttatccaaaaacttgggctccctgttgtctctactcacatttccaccagaggatgctgagaaaagaagttatggtcattgtaaagattcttggccccggcccggcgcggtggctcacgtccgtaatcccaacactttgggaggccaaggagggtggatcacgaggtcaggagattgagaccatcctggccaacatggtgaaaccccatctctactaaaatacaaaaattaactgggcatggtggcacctgcctgtaatctctcagctactcggaagtcagaagcaggagaattgcttggaccaggaagtcggaggttgcagtgagccgatatcacgccactgcactccagcctggcaacagagcgagactccgtctcaaaataaataaataaataaaaaagatttgtggcccctttactaccatccctgtggctccatgatctgcagattaggagcagctatctggccactaagccccctggaagggagttaccagttgattacagatgatggtggctatagcgtaatcagacagtgtgcaggctcaatgctttcacactgaaatagtagctgctgacactgcagaatgtgttctcagtcttcaagaattgtcacctctactggtattcctatagaaagggcttataccccatggaacatttttgtggctaggaagcattactttgttaggacattcatagacttatttactattctcatcaacaccaggacttcgcctcctttttaagtggatttttcacctgtttttatcacagaagagctcttgtgagctggatgatagagagagctcagccttgctgagaggcagatgcaggtagttaccagctgcagtaataaactgcagccgggattcagcttcagccaagatagcacttctggtcttagagccacacaagtgatcagaatcacaaatgtgaaatccatgactgcccaaggcctgtcctcttctcctgctgaaggtctccagtagtgtatatcatgtttctgggctgctgtaacccatgctgttgtgtgtcacagtcctcagaactggagccctgaagacttaaaccggtcctaggaactgaagcattaaaccagaaagagctgtggggagagttgtcaacctagcccatccccaggatgtaatgactttgacagatcttttactataacatgaaaagatcaggccaggtgtggtagctataattccagcacttagggagcttgaggccaggagtttaagaccagctggggcaacacagcaagaccctatctc

SEQ ID NO: 499 - DNA, 6342 bp, Homo sapiens
  CDS (31)..(6024)
gtctcctctggatcttaactactgagcgcaatgctgagccatggagccgggttggccttgtggatcacactgagcctgctgcagactggactggcggagccagagagatgtaacttcaccctggcggagtccaaggcctccagccattctgtgtctatccagtggagaattttgggctcaccctgtaactttagcctcatctatagcagtgacaccctgggggccgcgttgtgccctacctttcggatagacaacaccacatacggatgtaaccttcaagatttacaagcaggaaccatctataacttcaagattatttctctggatgaagagagaactgtggtcttgcaaacagatcctttacctcctgctaggtttggagtcagtaaagagaagacgacttcaaccggcttgcatgtttggtggactccttcttccggaaaagtcacctcatatgaggtgcaattatttgatgaaaataaccaaaagatacagggggttcaaattcaagaaagtacttcatggaatgaatacacttttttcaatctcactgctggtagtaaatacaatattgccatcacagctgtttctggaggaaaacgttctttttcagtttataccaatggatcaacagtgccatctccagtgaaagatattggtatttccacaaaagccaattctctcctgatttcctggtcccatggttctgggaatgtggaacgataccggctgatgctaatggataaagggatcctagttcatggcggtgttgtggacaaacatgctacttcctatgcttttcacgggctgtcccctggctacctctacaacctcactgttatgactgaggctgcagggctgcaaaactacaggtggaaactagtcaggacagcccccatggaagtctcaaatctgaaggtgacaaatgatggcagtttgacctctctaaaagtcaaatggcaaagacctcctggaaatgtggattcttacaatatcaccctgtctcacaaagggaccatcaaggaatccagagtattagcaccttggattactgaaactcactttaaagagttagtccccggtcgactttatcaagttactgtcagctgtgtctctggtgaactgtctgctcagaagatggcagtgggcagaacatttccagacaaagttgcaaacctggaggcaaacaataatggcaggatgaggtctcttgtagtgagctggtcgccccctgctggagactgggagcagtatcggatcctactcttcaatgattctgtggtgctgctcaacatcactgtgggaaaggaagaaacacagtatgtcatggatggcacggggctcgtaccgggaagacagtatgaggtggaagtcattgttgagagtggaaatttgaagaattctgagcgttgccaaggcaggacagtccccctggctgtcctccagcttcgtgtcaaacatgccaatgaaacctcactgagtatcatgtggcagacccctgtagcagaatgggagaaatacatcatttccctagctgacagagacctcttactgatccacaagtcactctccaaagatgccaaagaattcacttttactgacctggtgcctggacgaaaatacatggctacagtcaccagtattagtggagacttaaaaaattcctcttcagtaaaaggaagaacagtgcctgcccaagtgactgacttgcatgtggccaaccaaggaatgaccagtagtctgtttactaactggacccaggcacaaggagacgtagaattttaccaagtcttactgatccatgaaaatgtggtcattaaaaatgaaagcatctccagtgagaccagcagatacagcttccactctctcaagtccggcagcctgtactccgtggtggtaacaacagtgagtggagggatctcttcccgacaagtggttgtggagggaagaacagtcccttccagtgtgagtggagtaacggtgaacaattccggtcgtaatgactacctcagcgtttcctggctgctggcgcccggagatgtggataactatgaggtaacattgtctcatgacggcaaggtggttcagtcccttgtcattgccaagtctgtcagagaatgttccttcagctccctcaccccaggccgcctctacaccgtgaccataactacaaggagtggcaagtatgaaaatcactccttcagccaagagcggacagtgcctgacaaagtccagggagtcagtgttagcaactcagccaggagtgactatttaagggtatcctgggtgcatgccactggagactttgatcactatgaagtcaccattaaaaacaaaaacaacttcattcaaactaaaagcattcccaagtcagaaaacgaatgtgtatttgttcagctagtccctggacggttgtacagtgtcactgttactacaaaaagtggacaatatgaagccaatgaacaagggaatgggagaacaattccagagcctgttaaggatctaacattgcgcaacaggagcactgaggacttgcatgtgacttggtcaggagctaatggggatgtcgaccaatatgagatccagctgctcttcaatgacatgaaagtatttcctccttttcaccttgtaaataccgcaaccgagtatcgatttacttccctaacaccaggccgccaatacaaaattcttgtcttgacgattagcggggatgtacagcagtcagccttcattgagggcttcacagttcctagtgctgtcaaaaatattcacatttctcccaatggagcaacagatagcctgacggtgaactggactcctggtgggggagacgttgattcctacacggtgtcggcattcaggcacagtcaaaaggttgactctcagactattcccaagcacgtctttgagcacacgttccacagactggaggccggggagcagtaccagatcatgattgcctcagtcagcgggtccctgaagaatcagataaatgtggttgggcggacagttccagcatctgtccaaggagtaattgcagacaatgcatacagcagttattccttaatagtaagttggcaaaaagctgctggtgtggcagaaagatatgatatcctgcttctaactgaaaatggaatccttctgcgcaacacatcagagccagccaccactaagcaacacaaatttgaagatctaacaccaggcaagaaatacaagatacagatcctaactgtcagtggaggcctctttagcaaggaagcccagactgaaggccgaacagtcccagcagctgtcaccgacctgaggatcacagagaactccaccaggcacctgtccttccgctggaccgcctcagagggggagctcagctggtacaacatctttttgtacaacccagatgggaatctccaggagagagctcaagttgacccactagtccagagcttctctttccagaacttgctacaaggcagaatgtacaagatggtgattgtaactcacagtggggagctgtctaatgagtctttcatatttggtagaacagtcccagcctctgtgagtcatctcagggggtccaatcggaacacgacagacagcctttggttcaactggagtccagcctctggggactttgacttttatgagctgattctctataatcccaatggcacaaagaaggaaaactggaaagacaaggacctgacggagtggcggtttcaaggccttgttcctggaaggaagtacgtgctgtgggtggtaactcacagtggagatctcagcaataaagtcacagcggagagcagaacagctccaagtcctcccagtcttatgtcatttgctgacattgcaaacacatccttggccatcacgtggaaagggcccccagactggacagactacaacgactttgagctgcagtggttgcccagagatgcacttactgtcttcaacccctacaacaacagaaaatcagaaggacgcattgtgtatggtcttcgtccagggagatcctatcaattcaacgtcaagactgtcagtggtgattcctggaaaacttacagcaaaccaatttttggatctgtgaggacaaagcctgacaagatacaaaacctgcattgccggcctcagaactccacggccattgcctgttcttggatccctcctgattctgactttgatggttatagtattgaatgccggaaaatggacacccaagaagttgagttttccagaaagctggagaaagaaaaatctctgctcaacatcatgatgctagtgccccataagaggtacctggtgtccatcaaagtgcagtcggccggcatgaccagcgaggtggttgaagacagcactatcacaatgatagaccgcccccctcctccacccccacacattcgtgtgaatgaaaaggatgtgctaattagcaagtcttccatcaactttactgtcaactgcagctggttcagcgacaccaatggagctgtgaaatacttcacagtggtggtgagagaggctgatggcagtgatgagctgaagccagaacagcagcaccctctcccttcctacctggagtacaggcacaatgcctccattcgggtgtatcagactaattattttgccagcaaatgtgccgaaaatcctaacagcaactccaagagttttaacattaagcttggagcagagatggagagcctaggtggaaaatgcgatcccactcagcaaaaattctgtgatggaccactgaagccacacactgcctacagaatcagcattcgagcttttacacagctctttgatgaggacctgaaggaattcacaaagccactctattcagacacatttttttctttacccatcactactgaatcagagcccttgtttggagctattgaaggtgtgagtgctggtctgtttttaattggcatgctagtggctgttgttgccttattgatctgcagacagaaagtgagccatggtcgagaaagaccctctgcccgtctgagcattcgtagggatcgaccattatctgtccacttaaacctgggccagaaaggtaaccggaaaacttcttgtccaataaaaataaatcagtttgaagggcatttcatgaagctacaggctgactccaactaccttctatccaaggaatacgaggagttaaaagacgtgggccgaaaccagtcatgtgacattgcactcttgccggagaatagagggaaaaatcgatacaacaatatattgccctatgatgccacgcgagtgaagctctccaatgtagatgatgatccttgctctgactacatcaatgccagctacatccctggcaacaacttcagaagagaatacattgtcactcagggaccgcttcctggcaccaaggatgacttctggaaaatggtgtgggaacaaaacgttcacaacatcgtcatggtgacccagtgtgttgagaagggccgagtaaagtgtgaccattactggccagcggaccaggattccctctactatggggacctcatcctgcagatgctctcagagtccgtcctgcctgagtggaccatccgggagtttaagatatgcggtgaggaacagcttgatgcacacagactcatccgccactttcactatacggtgtggccagaccatggagtcccagaaaccacccagtctctgatccagtttgtgagaactgtcagggactacatcaacagaagcccgggtgctgggcccactgtggtgcactgcagtgctggtgtgggtaggactggaacctttattgcattggaccgaatcctccagcagttagactccaaagactctgtggacatttatggagcagtgcacgacctaagacttcacagggttcacatggtccagactgagtgtcagtatgtctacctacatcagtgtgtaagagatgtcctcagagcaagaaagctacggagtgaacaagaaaaccccttgtttccaatctatgaaaatgtgaatccagagtatcacagagatccagtctattcaaggcattgagaatgtacctgaagagctcctggataaaaattattcactgtgtgatttgtttttaaaaacttgcttcatgccctacagaggtgccagctatttctgttgatactatgtataatttattaatctggagaatgtttaaaattttatataatttaaaggtaacagatattattgtacatagttgtattttgtagtttcttctgtaaatatgtatttttcataatgtttaatattaagctttatataatactatttttccacactaaagtgttcatgacttgttctacataaaactaattcaacctgtaaaaaaaaaaaaaa

SEQ ID NO: 500 - DNA, 1868 bp, Homo sapiens
  CDS (449)..(1438)
caaagttctgaacacagaattacggttaggttaaatcagatatgaagtagtttaacaaagtaaaaacaaggcaacttagcaattgtatatgtggaaattttgaagtaaatttccaaagtagaacatgaagagatgcatccataaatcccactagcaataatgtgctcctctgatcttagtgatattcacttttaagtgatgccaataactattgtaataatgctgtatttatgacagcattcatctagtcagtctgtcttgaagacggtgaacttaaaagtagtgttattttttcttttccatttactaatgatatccttagttttataggcaccagtcacagatcaacccgcgtccgcccacgcgtccgcccacgcgtccgcccacgcgtccggtgcaaaatcagagaggggtgcaagatcctgatttttcaggagttcaagcgacaatggcagcccaatacggcagtatgagcttcaaccccagcacaccaggggccagttatgggcctggaaggcaagagcccagaaattcccaattgagaattgtgttagtgggtaaaaccggagcaggaaaaagtgcaacaggaaacagcatccttggccggaaagtgtttcattctggcactgcagcaaaatccattaccaagaagtgtgagaaacgcagcagctcatggaaggaaacagaacttgtcgtagttgacacaccaggcattttcgacacagaggtgcccaatgctgaaacgtccaaggagattattcgctgcattcttctgacctccccagggcctcatgctctgcttctggtggttccactgggccgttacactgaggaagagcacaaagccacagagaagatcctgaaaatgtttggagagagggctagaagtttcatgattctcatattcacccggaaagatgacttaggtgacaccaatttgcatgactacttaagggaagctccagaagacattcaagacttgatggacattttcggtgaccgctactgtgcgttaaacaacaaggcaacaggcgctgagcaggaggcccagagggcacagttgctgggcctgatccagcgcgtggtgagggagaacaaggaaggctgctacactaataggatgtaccaaagggcggaggaggagatccagaagcaaacacaagcaatgcaagaactccacagagtggagctggagagagagaaagcgcggataagagaggagtatgaagagaaaatcagaaagctggaagataaagtggagcaggaaaagagaaagaagcaaatggagaagaaactagcagaacaggaggctcactatgctgtaaggcagcaaagggcaagaacggaagtggagagtaaggatgggatacttgaattaatcatgacagcgttacagattgcttcctttattttgttacgtctgttcgcggaagattaaacttaatgaaaatctgtttgtattttctgcatattctctggcaaccttgccccatacttacttatttagcatagtcgagtgctctagtttctgtctctcaggcactcgtaactaaggaccaccattggccattggtagatgtttgattgacttaacaagagagggacaaattttcaatttgtgaaactccaaagcagaaagtattggtgcttgctaccttgtgaattcttccttagacatgcagagaaaatgtatgcaagagaccaaaaagatggctccaagctatgtcatgttacctgtaataaaatcttttcttctagattctttctatgttggcagataatctccccttgtagcttccactcacttattcttgcattcagagtcacaatgatcatcttacccatgtggtttttgagaaagaaagatc

SEQ ID NO: 501 - DNA, 2461 bp, Homo sapiens
  CDS (241)..(2358)
atagggaatttggccctcgagcagtagcttcggcacgagggcatgacatttttggcacaatgcaactgtggcactggcacttatttcagtgaagaaaaactttgtggttctatggcattcatcatttgacaaatgcaagcatcttccttatcaatcagctcctattgaacttactagcactgactgtggaatccttaagggcccattacatttctgaagaagaaagctaagatgaaggacatgccactccgaattcatgtgctacttggcctagctatcactacactagtacaagctgtagataaaaaagtggattgtccacggttatgtacgtgtgaaatcaggccttggtttacacccagatccatttatatggaagcatctacagtggattgtaatgatttaggtcttttaactttcccagccagattgccagctaacacacagattcttctcctacagactaacaatattgcaaaaattgaatactccacagactttccagtaaaccttactggcctggatttatctcaaaacaatttatcttcagtcaccaatattaatgtaaaaaagatgcctcagctcctttctgtgtacctagaggaaaacaaacttactgaactgcctgaaaaatgtctgtccgaactgagcaacttacaagaactctatattaatcacaacttgctttctacaatttcacctggagcctttattggcctacataatcttcttcgacttcatctcaattcaaatagattgcagatgatcaacagtaagtggtttgatgctcttccaaatctagagattctgatgattggggaaaatccaattatcagaatcaaagacatgaactttaagcctcttatcaatcttcgcagcctggttatagctggtataaacctcacagaaataccagataacgccttggttggactggaaaacttagaaagcatctctttttacgataacaggcttattaaagtaccccatgttgctcttcaaaaagttgtaaatctcaaatttttggatctaaataaaaatcctattaatagaatacgaaggggtgattttagcaatatgctacacttaaaagagttggggataaataatatgcctgagctgatttccatcgatagtcttgctgtggataacctgccagatttaagaaaaatagaagctactaacaaccctagattgtcttacattcaccccaatgcatttttcagactccccaagctggaatcactcatgctgaacagcaatgctctcagtgccctgtaccatggtaccattgagtctctgccaaacctcaaggaaatcagcatacacagtaaccccatcaggtgtgactgtgtcatccgttggatgaacatgaacaaaaccaacattcgattcatggagccagattcactgttttgcgtggacccacctgaattccaaggtcagaatgttcggcaagtgcatttcagggacatgatggaaatttgtctccctcttatagctcctgagagctttccttctaatctaaatgtagaagctgggagctatgtttcctttcactgtagagctactgcagaaccacagcctgaaatctactggataacaccttctggtcaaaaactcttgcctaataccctgacagacaagttctatgtccattctgagggaacactagatataaatggcgtaactcccaaagaagggggtttatatacttgtatagcaactaacctagttggcgctgacttgaagtctgttatgatcaaagtggatggatcttttccacaagataacaatggctctttgaatattaaaataagagatattcaggccaattcagttttggtgtcctggaaagcaagttctaaaattctcaaatctagtgttaaatggacagcctttgtcaagactgaaaattctcatgctgcgcaaagtgctcgaataccatctgatgtcaaggtatataatcttactcatctgaatccatcaactgagtataaaatttgtattgatattcccaccatctatcagaaaaacagaaaaaaatgtgtaaatgtcaccaccaaaggtttgcaccctgatcaaaaagagtatgaaaagaataataccacaacacttatggcctgtcttggaggccttctggggattattggtgtgatatgtcttatcagctgcctctctccagaaatgaactgtgatggtggacacagctatgtgaggaattacttacagaaaccaacctttgcattaggtgagctttatcctcctctgataaatctctgggaagcaggaaaagaaaaaagtacatcactgaaagtaaaagcaactgttataggtttaccaacaaatatgtcctaaaaaccaccaaggaaacctactccaaaaatgaacaaaaaaaaaaaaagcgaaagactgcagttgtgctaaaaacaaaacaaaacaaacaaacaaaaaaaaaaaa

SEQ ID NO: 502 - DNA, 1948 bp, Homo sapiens
  CDS (214)..(1764)
gtgcactttagaattagcttatccaacctcctaaatctcccataaatcacctgaagtaaaaacattaactcataagccttggaagcgggagcttttgtatccaggttcttctaaggatgatgtgattgagaaaggtatctttttgccacatacgttgctccttctgccactcttgacattggactccaacaggaaaagaaaaaagaaatttatatgaaaatacagccaccatttgaagacctttttgacacagcagaggaatatatccttctcctccttcttgagccatggacaaagatggtaaaatcggaccaaattgcttataaaaaggtggagctggtggaagaaactcgacagttagactccacatacttcagaaagctacaggctttgcataaagagacattttccaagaaagctgaggacaccacttgtgaaattggaactggcattttatcactctctaacgtctctaaacgaacagaatattgggataatgttcctgcagaatacaagcattttaagtttagtgatctgcttaacaacaaactggagtttgaacatttccgtcagtttcttgagactcattcttcaagcatggatcttatgtgctggacagacattgagcagttccggagaataacttacagagatcgaaatcaaaggaaggcaaaatctatatacattaaaaacaaataccttaataaaaaatatttctttggacccaacagtccagcttctctgtatcagcagaaccaggtaatgcatttaagtggtggctgggggaagattcttcatgagcagcttgatgcacctgttctagttgaaatccagaagcatgtgcaaaataggctagaaaatgtatggctgccattgtttcttgcaagtgaacagtttgcagcacgtcagaagataaaggtacagatgaaagacatagcagaagagctcttactacagaaggctgaaaagaaaatcggggtctggaagcctgtggagagtaagtggatctcttcatcttgtaaaatcattgcttttcgcaaagcattattgaatccagttacttcaagacaatttcaacgttttgtggctctaaaaggagatttattggaaaatggtttactcttttggcaagaagtacaaaaatataaggacttgtgccattctcattgtgatgagtctgtcatccagaagaagattacaactattatcaactgctttattaattccagtattccaccagctttacaaattgacattccagtagagcaagcccagaagattattgaacaccggaaggagttaggaccatatgtatttagagaggcacagatgacaatttttggggttctgtttaaattctggcctcagttctgtgagtttaggaagaatttaacagatgaaaatattatgagtgttttagagagaagacaagaatataataagcagaaaaaaaaattggcagtcctagaagacgaaaaatctggaaaggatggaatcaaacaatatgcaaatacttcagtgcctgctatcaaaactgctttactcagtgattccttcctaggcctccaaccatatggccgacagccaacctggtgctactcaaagtatatagaagccttagaacaggagagaattcttcttaagatccaagaagaactagaaaaaaagttgtttgcaggcttgcaacctctcacaaattttaaggctagctcttcaactatgtctttgaaaaagaatatgtctgcccacagcagccagaagtgacagcattcttgtgaatgtttacatcctgctgctgataggttcaaggaattctttaaaccagattctgctgacatgagaagctccagtgatttgtttttttgaaggtctgtatcagagcaagcctaacatctaaataaagtttgattctggattttccaggtgggaaataaataaaaaaaaaaaa

SEQ ID NO: 503 - DNA, 7713 bp, Homo sapiens
  CDS (3953)..(7033)
ttttttttttttgagatggtgtctcactctgttgtccaggccggagtgcaatggctggatcttggctcactgcaacctttgcctcccaggttcaagcaattctcctgcctcagcctcccaagtatctgggattacaggcgtgtgccaccacgcctggctaattcttttgtattttcagtagagatggggtttcacccatcaggctggtctcgaacttttgacgacctcagatgatccactcacgtcagcctcccaaagtgctgggattataggcctgagccaccacgcccggcctcccagcccctaattcttatgttcatcaatcaatctcttgctggggttcccctaggaggaggtgaaatgaccccagctcgctgttcctcacatgggtgctgccgtgtcactggctcaggctcagttgctgggtcaccagtagaatggacccttcctccacctcagttcagagcacagtgatgattcgtgactttctttcccaatagaacttcaaatctctgaagacggggggtggggggatgtgcttgagtgtttgtactcatggtcttgttctagaagtgacaaagctgggacgcaatacctttatgcatgaaaaggttgtcacttgtcacaactaacaggctttcacctcacggaaattttcttcccttgtgcacttttcccctggcagtggacatggctgcactcttccaagaagcaagcagctgtcccgtctgctcagactatctagagaaaccaatgtccctggagtgtggatgcgctgtctgcttcaagtgcatcaattcactgcagaaggagccccatggggaggatctactttgctgttgctgttccatggtctctcagaagaacaaaatcaggcccagttggcagctagagaggctggcttcccacatcaaggaactggagcccaagctgaagaagattctgcagatgaacccaaggatgcggaagttccaaggtgagggatctgtatacactgcccccttcctacgaccagaccaggaaaaatcatctgtgcaactggcccctcattccatatggggattagctgctgtctggcacctaaaattgagatgcttcttcatcatcagattctcagccctgacaacatacagaatcacctggtgatctccaaaaaaaaggctggctgggcatggtggctcatgcctgtaatgtcagcactttgggaggccgaggcgggtggatcacgaggtcaggagatcgggaccatcctggataacacggtgaaaccctgtctctactaaaaatacaaaaaattagccaggcttggtggtgggtgcctgtagtcccagctacttgggggttgaggcaggagaatggcgttaacctggggggggcggagcttgcagtgagccaagattgcaccactgcactccagcctgggtgacagagtgagactccgtctcaaaaaaaaaaacctgatgtctatgtcatgggttagacaagggattctctaaacttagtgtgctcagattacctggggatcttgttaaaatgcagatgctgaactgggaagtctcaggattgatcccgctggcttggggactttgctgagtagcaaaaacacagagcaacttaatttgaatttctctctagcaaaggttcccaggactctgacatttaaatgggcctggtaattctaatgcacagtgagtattggcacccactgtaccaaacaacctcaccccagggttgggaagagtttggaatggagcacctatggtgtttgtttctgtgagtggggcgagttgcagacgctggtctcctcatcggtgtgccatggacttcaacaggggtcctggctacaggaaatactatcactctccataactctggggaatagggacatttaaatgaagaggttatggtcagcctgggcaaagaattacacctataaatggtggtggcttctgccctgacacccatgatctctactcatccacctacccatacctgactgtgtctctgctgaaatatggaggacagattcaccctgcctaagtcatgtttggaaccctcttcctccttccttgtccatgtccactcatctcatttcattccctaattcaccatcaaacagcaatcagtctcctcaagtcttactgtaatctataaaatctatattggtgatcatcagttttttgacttgaaggatcatatgttctgtagatttttttttcagaatgctctggacaattaattttctttaggccagatcacactgcctcctccatgagaattggcagcttcacctatcaaccacatacccaatgcattaaattattgacctttgtatttactgcccttattctctacgatcagtcagttatgacgaacaactttctttttttttttattttttgagatggagtctcgctctgccgcctaggctggaggtgcagtggcatgatctctgctcattgcaagctccgcctcctgggttcatgccattctcctgcctcagtctaccaagtagctaggactacaggcacccgccaccatgtccggctaatttttttgtatgttttttagtagagacagggtttcacgtgttagccaggatggtctcgatctcctgacctcgtgatccacccgtctcggcctcccaaagtgctgggattacaggtgtgagccaccgcgctcagccaacaaacaactttcaaatacctttctcttcactccaaaatttaccattgttttgcttaaggtttcacctcccatgtaggatggaaaacattctttcatctaaggcccccctcttcctcctggccttggagcctcctaatgtccaggaccggcacctctgtcatcacattgtcagctgcagagataccctacctgctgtcagaaccatgcacaattaatttgcttacaaacatggaaaacaaaggcctggaatcatgctctatatactgagttgagcaatacaagatggaagcagaaacatatttaacatcgaccatttgcattgtcttaattatcattcattttttcatgcatcaaggtggtagaaagggggtcatggtgtctgccttcagagaccctccactctaaatgaagaaaagtccaatgaagcaaacacgtgacataaagtaaaataattgctactgtgaataagagttgggtattgccacaaagcatacctatgagaatttgaactagtcagggaagttgcctcatgaaaagttttgattttgggggaagaagagaattaaagaaaccaaagtcaagagatatttgggcctttgaagtagaggagaggcatggggttggcttctgtccattttctgatcaactttttttccttttcacagtggatatgaccttggatgccgacacagccaacaacttcctcctcatttctgacgacctcaggagcgtccgaagtgggtgcatcacacagaatcggcaagaccttgccgagagatttgacgtgtccatttgcatcctgggctcccctcgctttacctgtggccgccactactgggaggtggacgtgggaacaagcacagaatgggacctgggagtctgcagagaatctgttcaccgcaaagggaggatccatctgaccacagagcgtggattctggactgtgagtttgagggatggaagccgcctctctgccagcacggtgccgctgactttcctcttcgtagaccgcaagttacagcgagtggggatttttctggatatgggcatgcagaacgtttccttttttgatgctgaaggtggttcccatgtctatacattcaggagtgtctctgctgaggagccactgcacttgttttttgctcctccaagtccacctaatggtgataagagtgtcttgagtatctgtcctgtgataaacccgggcactactgatgctccagtccatcctggggaggccaaataagcccccactgctcaggccatgatgagcttcggcggcgcggacgcgctgctgggcgccccgttcgcgccgctgcatggcggcggcagcctccactacgcgctagcccgaaagggtggcgcaggcgggacgcgctccgccgctggctcctccagcggcttccactcgtggacacggacgtccgtgagctccgtgtccgcctcgcccagccgcttccgtggcgcaggcgccgcctcaagcaccgactcgctggacacgctgagcaacgggccggagggctgcatggtggcggtggccacctcacgcagtgagaaggagcagctgcaggcgctgaacgaccgcttcgccgggtacatcgacaaggtgcggcagctggaggcgcacaaccgcagcctggagggcgaggctgcggcgctgcggcagcagcaggcgggccgctccgctatgggcgagctgtacgagcgcgaggtccgcgagatgcgcggcgcggtgctgcgcctgggcgcggcgcgcggtcagctacgcctggagcaggagcacctgctcgaggacatcgcgcacgtgcgccagcgcctagacgacgaggcccggcagcgagaggaggccgaggcggcggcccgcgcgctggcgcgcttcgcgcaggaggccgaggcggcgcgcgtggacctgcagaagaaggcgcaggcgctgcaggaggagtgcggctacctgcggcgccaccaccaggaagaggtgggcgagctgctcggccagatccagggctccggcgccgcgcaggcgcagatgcaggccgagacgcgcgacgccctgaagtgcgacgtgacgtcggcgctgcgcgagattcgcgcgcagcttgaaggccacgcggtgcagagcacgctgcagtccgaggagtggttccgagtgaggctggaccgactgtcggaggcagccaaggtgaacacagacgctatgcgctcagcgcaggaggagataactgagtaccggcgtcagctgcaggccaggaccacagagctggaggcactgaaaagcaccaaggactcactggagaggcagcgctctgagctggaggaccgtcatcaggccgacattgcctcctaccaggaagccattcagcagctggacgctgagctgaggaacaccaagtgggagatggccgcccagctgcgagaataccaggacctgctcaatgtcaagatggctctggatatagagatagccgcttacagaaaactcctggaaggtgaagagtgtcggattggctttggcccaattcctttctcgcttccagaaggactccccaaaattccctctgtgtccactcacataaaggtgaaaagcgaagagaagatcaaagtggtggagaagtctgagaaagaaactgtgattgtggaggaacagacagaggagacccaagtgactgaagaagtgactgaagaagaggagaaagaggccaaagaggaggagggcaaggaggaagaagggggtgaagaagaggaggcagaagggggagaagaagaaacaaagtctcccccagtagaagaggctgcatccccagagaaggaagccaagtcaccagtaaaggaagaggcaaagtcaccggctgaggccaagtccccagagaaggaggaagcaaaatccccagccgaagtcaagtcccctgagaaggccaagtctccagcaaaggaagaggcaaagtcaccgcctgaggccaagtccccagagaaggaggaagcaaaatctccagctgaggtcaagtcccccgagaaggccaagtccccagcaaaggaagaggcaaagtcaccggccgaggccaagtctccagagaaggccaagtccccagtgaaggaagaagcaaagtcaccggctgaggccaagtccccagtgaaggaagaagcaaaatctccagctgaggtcaagtccccggaaaaggccaagtctccaacgaaggaggaagcaaagtcccctgagaaggccaagtcccctgagaaggccaagtccccagagaaggaagaggccaagtcccctgagaaggccaagtccccagtgaaggcagaagcaaagtcccctgagaaggccaagtccccagtgaaggcagaagcaaagtcccctgagaaggccaagtccccagtgaaggaagaagcaaagtcccctgagaaggccaagtccccagtgaaggaagaagcaaagtcccctgagaaggccaagtccccagtgaaggaagaagcaaagacccccgagaaggccaagtccccagtgaaggaagaagccaagtccccagagaaggccaagtccccagagaaggccaagactcttgatgtgaagtctccagaagccaagactccagcgaaggaggaagcaaggtcccctgcagacaaattccctgaaaaggccaaaagccctgtcaaggaggaggtcaagtccccagagaaggcgaaatctcccctgaaggaggatgccaaggcccctgagaaggagatcccaaaaaaggaagaggtgaagtccccagtgaaggaggaggagaagccccaggaggtgaaagtcaaagagcccccaaagaaggcagaggaagagaaagcccctgccacaccaaaaacagaggagaagaaggacagcaagaaagaggaggcacccaagaaggaggctccaaagcccaaggtggaggagaagaaggaacctgctgtcgaaaagcccaaagaatccaaagttgaagccaagaaggaagaggctgaagataagaaaaaagtccccaccccagagaaggaggctcctgccaaggtggaggtgaaggaagacgctaaacccaaagaaaagacagaggtggccaagaaggaaccagatgatgccaaggccaaggaacccagcaaaccagcagagaagaaggaggcagcaccggagaaaaaagacaccaaggaggagaaggccaagaagcctgaggagaaacccaagacagaggccaaagccaaggaagatgacaagaccctctcaaaagagcctagcaagcctaaggcagaaaaggctgaaaaatcctccagcacagaccaaaaagacagcaagcctccagagaaggccacagaagacaaggccgccaaggggaagtaaggcagggagaaaggaacatccggaacagccaaagaaactcagaagagtcccggagctcaaggatcagagtaacacaattttcactttttctgtctttatgtaagaagaaactgcttagatgacggggcctccttcttcaaacaggaatttctgttagcaatatgttagcaagagagggcactcccaggcccctgcccccatgccctccccaggcgatggacaattatgatagcttatgtagctgaatgtgatacatgccgaatgccacacgtaaacacttgactataaaaactgcccccctcctttccaaataagtgcatttattgcctctatgtgcaactgacagatgaccgcaataatgaatgagcagttagaaatacattatgcttgagatgtcttaacctattcccaaatgccttctgttttccaaaggagtggtcaagcccttgcccagagctctctattctggaagagcggtccaggtggggccggggactggccactgaattatgccagggcgcactttccactggagttcactttcaattgcttctgtgcaataaaaccaagtgcttataaaatgaaaaaaaaaaagtcgacgcggccgcgaatttagtagtagtaggcggccgctctagaggatccaagcttacgtacgcgtgcatgcgacgtcatagctc

SEQ ID NO: 504 - DNA, 3077 bp, Homo sapiens
  CDS (191)..(1579)
gctagcgggcgggaccagcaagaggcgcctgccggatgtccgggcccctgagccgcgggctgagcagccgggacgacatgcgcgggagggcccgcggggcagccgcgctcctccgggggaatgaaagctactggttgattttaaagtgcctgggcctcacaggtttggagatgtcccagaataaggcacaatgtcaatagcaggagttgctgctcaggagatcagagtcccattaaaaactggatttctacataatggccgagccatggggaatatgaggaagacctactggagcagtcgcagtgagtttaaaaacaactttttaaatattgacccgataaccatggcctacagtctgaactcttctgctcaggagcgcctaataccacttgggcatgcttccaaatctgctccgatgaatggccactgctttgcagaaaatggtccatctcaaaagtccagcttgccccctcttcttattcccccaagtgaaaacttgggaccacatgaagaggatcaagttgtatgtggttttaagaaactcacagtgaatggggtttgtgcttccacccctccactgacacccataaaaaactccccttcccttttcccctgtgcccctctttgtgaacggggttctaggcctcttccaccgttgccaatctctgaagccctctctctggatgacacagactgtgaggtggaattcctaactagctcagatacagacttccttttagaagactctacactttctgatttcaaatatgatgttcctggcaggcgaagcttccgtgggtgtggacaaatcaactatgcatattttgataccccagctgtttctgcagcagatctcagctatgtgtctgaccaaaatggaggtgtcccagatccaaatcctcctccacctcagacccaccgaagattaagaaggtctcattcgggaccagctggctcctttaacaagccagccataaggatatccaactgttgtatacacagagcttctcctaactccgatgaagacaaacctgaggttccccccagagttcccatacctcctagaccagtaaagccagattatagaagatggtcagcagaagttacttcgagcacctatagtgatgaagacaggcctcccaaagtaccgccaagagaacctttgtcaccgagtaactcgcgcacaccgagtcccaaaagccttccgtcttacctcaatggggtcatgcccccgacacagagctttgcccctgatcccaagtatgtcagcagcaaagcactgcaaagacagaacagcgaaggatctgccagtaaggttccttgcattctgcccattattgaaaatgggaagaaggttagttcaacacattattacctactacctgaacgaccaccatacctggacaaatatgaaaaattttttagggaagcagaagaaacaaatggaggcgcccaaatccagccattacctgctgactgcggtatatcttcagccacagaaaagccagactcaaaaacaaaaatggatctgggtggccacgtgaagcgtaaacatttatcctatgtggtttctccttagaccttggggtcatggttcagcagaggttacataggagcaaatggttctcaattttccagtttgattgaagtgcagagaaaaatcccttagattgcaaaataaaatagttgaactctctgtcttcatgtggaaggtttagagcagttgtgagatgctgttatgctgagaaaccctgactttgttagtgttggaaaaaagtcttacaagtctataatttaaagatgtgatggtggggaggggaggatggggaagctttttatatatgcatacattacatacctatatataaacttgtggtataaccatagaccatagctgcaggttaaccaattagttactatcgtagagtaatatatattcagaataataaactcaagctggagaaatgagtcctgatagactgaaaattgagcaaatggaagaagatacagtattgtttagatcagaatcattaaaaaatatttttgtttagtaagtttgaagatttctggcttttaggccttttctattttgttccatttatttttgcaggcaatcttttccatggagggcagggtatccattctttaccatgggtgtacctgcttaggttaaaaatcataccaaggcctcatacttccaggtttcatgttgcgtcttgttgagggagggagagcaggttacttggcaaccatattgtcacctgtacctgtcacacatcttgaaaaataaaacgataatagaactagtgactaattttcccttacagttcctgcttggtcccacccactgaagtagctcatccgtagtgcgggccgtattagaggcagtggggtacgttagactcagatggaaaagtattctaggtgccagtgttaggatgtcagttttacaaaataatgaagcaattagctatgtgattgagagttattgtttggggatgtgtgttgtggttttgctttttttttttagactgtattaataaacatacaacacaagctggccttgtgttgctggttcctattcagtatttcctggggattgtttgctttttaagtaaaacacttctgacccatagctcagtatgtctgaattccagaggtcacatcagcatctttctgctttgaaaactctcacagctgtggctgcttcacttagatgcagtgagacacatagttggtgttccgattttcacatccttccatgtatttatcttgaagagataagcacagaagagaaggtgctcactaacagaggtacattactgcaatgttctcttaacagttaaacaagctgtttacagtttaaactgctgaatattatttgagctatttaaagcttattatattttagtatgaactaaatgaaggttaaaacatgcttaagaaaaatgcactgatttctgcattatgtgtacagtattggacaaaggattttattcattttgttgcattattttgaatattgtcttttcattttaataaagttatcatacttatttatgattaaaaaaaaaaaa

SEQ ID NO: 505 - DNA, 5489 bp, Homo sapiens
  CDS (670)..(5028)
cccgggtcgacgatttcgtttatctgccttcttggccataaaaggctggttgtgtggcctgacattcgactgcctgaccacatgcattatttttgaactggcccccagggtcctgtctttagccctgcctcttaacattgtcttggattcaacctaggtggagtcttcattctctcatccagctcctcggcctcatcggaacatttccaccaccattactcctttggaaactggtggcccggttccttcaagaggcacaggatgtctttgcctttttatcagaggtgccaccagcactatgatctcagctaccgcaacaaggacgtgcgcagcaccgtgagtcactaccagcgggagaagaaacgctccgccgtctacacccagggctccacggcctacagcagccgctcctccgccgcgcaccgccgggagtccgaggccttccgtcgggcgtccgcctcctcctcccagcagcaggcctcgcagcacgccctgagctctgaagtcagtcggaaggcagcctcagcctacgattatggctcctcccatggacttacagattccagtctgctgttagatgattattcatccaagttgagccccaaaccaaagagagccaagcacagcctactgtctggagaagagaaagaaaatttgcccagtgactacatggtacccattttctcaggacgtcaaaagcatgtcagtggaattactgatacggaagaagaaagaattaaggaagctgctgcttatatagcccagaggaatcttcttgctagtgaggaaggaatcacaacacctaaacagtccacggcatccaagcagaccacggcatctaagcagtccacggcatccaagcagtccacagcatccaagcagtccacggcatccaggcagtccacggcatccaggcagtctgtggtttccaaacaggccacatccgctcttcaacaggaagaaacttctgaaaagaagtcaaggaaagttgtgattcgaggaaaggcagaacgcctgtccctgaggaaaacattagaagaaaccgagacatatcatgccaagctgaatgaagaccatcttctccatgctcctgagtttatcattaaacctcgctcccacacggtttgggagaaggagaatgtaaaattgcattgctccatagcaggatggccagaacctcgtgtcacgtggtataaaaaccaggtgccaataaatgtccatgcaaaccctggaaagtatattattgagagtcgatatggaatgcacactctggagattaatgcatgtgattttgaagatacagctcagtaccgggcctcggcgatgaatgttaaaggagagctttcggcatatgcttcagttgtggtaaaaaggtataagggagagtttgatgagactcgcttccatgctggggcttccaccatgcccctcagctttggtgtgaccccatatggttatgcatcccggtttgagatccactttgatgacaaatttgatgtgtcttttgggagagagggagagacaatgagtctaggctgtcgtgttgtcatcactcctgaaattaaacatttccagccagagatccggtggtacagaaatggagtacctctttctccatcaaaatgggtgcaaacactttggagtggagagcgggcaacgctgacattttcccatctcaacaaagaagatgaaggcctctatacaatccgtgtacggatgggagaatattatgaacaatatagtgcttatgtctttgttcgagatgctgatgcagagattgaaggagccccagctgctcccttggatgtgaagtgcttggaggccaacaaagattatatcatcatctcctggaaacagccagctgtcgatggagggagtcctattctcggatattttattgataagtgtgaggtgggcacagatagctggtcgcagtgcaatgacacacctgtgaagtttgctcgttttcctgtcactggattgatcgaaggtcgttcctatatcttccgagttcgagctgtgaataaaatgggaataggtttcccatctcgagtttccgaggccgtggctgctctggatccggctgagaaagctagactaaagtcgcccctcagcaccctggactggacagtcattgttactgaagaggaaccttcagagggtattgtgcctggccccccgacagacctctctgtcactgaggccacccggagctatgtggtgctcagctggaagccccctggccagcgtggtcatgagggcattatgtactttgtggaaaagtgtgaggcaggaacagaaaactggcagcgagtgaacacggagctccctgtgaagtctccccgctttgctctgtttgacttggccgaggggaaatcctactgtttccgtgtccgctgttctaattctgcaggagttggtgagccctcagaggcaacggaggtgactgtggtaggggacaaacttgatatccccaaggctcctggcaaaatcatcccaagcagaaacacagacacctcagtggtagtttcgtgggaggagtccaaagatgccaaagagctggtcgggtactacatagaggcgagcgttgctggctctggcaagtgggagccctgtaacaacaaccccgtgaagggctcacgattcacttgtcatggattagtgactggtcagagttatattttccgggtcagagcagtcaatgcagctggacttagtgaatattcccaggattcagaagctattgaagtcaaagctgctattgcaccaccatctccaccctgtgatatcacctgtcttgaaagttttcgtgactcaatggttcttggatggaagcaaccagataagattggaggggcagaaattactggctattatgtgaactatcgcgaggtcattgatggggtaccaggaaaatggagagaagccaatgtcaaggctgtcagtgaggaggcatacaagattagcaacttgaaggaaaacatggtgtatcagttccaagtggcagccatgaacatggctgggctgggcgcgccctccgcagtaagcgaatgcttcaaatgtgaagagtggaccatcgccgtcccaggaccaccgcacagtctcaagtgtagtgaagtcaggaaagactcactggttctccagtggaagccgccagtccactccgggcggactccggtcactggttacttcgtggacttgaaggaggccaaggccaaagaagaccagtggcgagggctcaatgaggcggctattaaaaacgtatacctgaaggttcgaggcctcaaggagggcgtcagctacgtgttccgtgttcgagccataaaccaggcgggagttgggaagccatctgaccttgctggccctgttgtggcagagacccgtccaggaaccaaagaggttgttgtaaatgtggatgatgatggagtcatttcattgaacttcgagtgtgataagatgactccaaagtccgagttctcctggtccaaagattatgtatccactgaggactctccacgattggaagtcgaaagcaagggcaacaagacgaaaatgaccttcaaagaccttgggatggatgacttgggtatttactcttgcgatgtaacagacactgatggaatagcatcaagctacttaatagatgaggaagaattgaaacgtttacttgctctcagccatgaacacaagttcccaactgtcccagttaaatcagagttggcagttgaaattttggagaaaggccaggtccggttttggatgcaggctgagaaactgtctggcaatgccaaagtcaactacatatttaacgagaaggaaatttttgaaggcccgaaatataaaatgcatattgaccgaaacactggcatcatcgaaatgttcatggaaaagctacaggatgaggatgagggaacgtacactttccagcttcaagatggaaaagcaactaaccattctactgttgttctcgttggagatgttttcaaaaagctccagaaagaagctgaattccagcggcaagaatggatcaggaaacaaggtcctcactttgttgagtatttgagctgggaagtgactggtgaatgtaatgtactattgaaatgcaaggtggcaaatattaagaaggagactcatattgtgtggtacaaagatgagagggagatatcagtggatgaaaagcatgactttaaggatggtatatgtaccctgcttataacagagttttccaagaaagatgctgggatttatgaagttatcctgaaagatgaccgaggaaaagataagagcagactgaagcttgtggatgaagcctttaaggaactgatgatggaagtatgcaaaaaaatagctttgtctgctacagacctgaaaatccagagcacagccgagggcatccaactgtactcttttgtaacttactatgtggaggatttgaaagttaactggtcccacaatgggtccgccattaggtactcagacagagttaagaccggggtcactggagagcagatctggctacaaatcaacgagcccaccccgaatgacaaagggaagtatgtcatggagctctttgatggcaaaactggacatcagaagacagtggatctctctggacaagcatacgatgaggcttatgctgaattccagaggttgaaacaagctgccattgccgagaaaaatcgtgcccgggtgttgggaggtctcccagacgtggtcaccatccaggaggggaaggcccttaatctcacttgcaacgtgtggggagacccgcctccggaggtgtcgtggttgaagaacgagaaggccctggcctcagacgaccactgcaacctcaagttcgaggctgggaggaccgcgtacttcaccatcaacggcgtgagcaccgctgactcgggcaaatacgggctggttgtgaagaacaagtatggctcggagaccagcgacttcaccgtcagcgtgttcatcccagaggaggaggcgaggatggccgccttggagtccctgaaaggcggcaagaaggccaagtgaccggaggtgcgaggagagccagccggcctgtgtgacttgggtgtgaatggtttgggttaaggatgagacgtcttcatgctttctcctccctattattttctggcttgaggggaaaataatgtcaggtctttcactcatataaaaaagcaccaactaatgacactttaattgtttttctttatctacaaaattatgtgttaagaaaataccattcatagcatgaagattaggaaacagttttaaggagaagacttgaatgaagttggagggacattgaatgatggtcagagggcagacgaatgtgtcgtggggcgagttgggatttgctgcagctgtgaagccatggccgtgtctcgtgtgttgttacagaggtgatgtgcttttcgacgggcgcctcgtggcttggaacctcctctgtatgaataaacagttttcacgtctgtcctcttaaaaaaaaaaaa

SEQ ID NO: 506 - DNA, 8609 bp, Homo sapiens
  CDS (4699)..(7785)
atggcagatgtggacccagatacattgctggaatggctacagatgggacagggagatgaaagggacatgcaactaatagcccttgaacagctatgcatgctgcttttgatgtctgacaacgtggatcgttgttttgaaacatgtcctcctcgcactttcttaccagccctttgcaaaatttttcttgatgaaagtgctccagacaatgtattagaggtgacagcccgtgccataacatactacctggatgtatctgcggaatgtacccgaaggattgttggggtagatggagctataaaagcactttgtaatcgtttggttgtagttgaacttaacaacaggactagcagagacttagccgaacagtgtgtaaaggtattagaactgatatgtactcgtgagtcaggagcagtctttgaggctggtggtttgaattgtgtgcttaccttcattcgtgacagtggacatctagttcataaagacaccttgcactctgctatggctgtggtatcaagactctgtggcaaaatggagcctcaagattcttctttagaaatttgtgtagaatctctgtctagtttattaaagcatgaagatcatcaggtttcagatggagctctgcgatgctttgcatcactggctgaccgatttacccgtcgtggtgttgacccagctccattagccaagcatggattaactgaggagctgttatctcgaatggctgctgctggtggtactgtttcaggaccatcatcagcatgcaaaccaggtcgcagcaccacaggagctccatccaccactgcagattccaaattgagtaatcaggtgtcaacaattgatcttctgaggtcggagcttccagattcaattgaaagtgcattgcagggtgatgaaagatgtgtgcttgatactatgcgtttggttgaccttctcttggtgctattatttgaaggacgaaaagctttgccaaagtctagtgctggatctacaggcagaatcccaggactccggagattagatagttctggggagcgctcacatcggcagcttatagattgtattcgaagtaaagataccgatgcacttatagatgcaattgacacaggagcctttgaagtaaattttatggatgatgtaggtcagactctattaaactgggcctctgcttttggaactcaggaaatggtagaatttctttgtgagagaggtgcagatgttaatagaggtcaaaggtcatcatcattacattatgctgcatgttttggaagacctcaagtagcaaagactctgttacggcatggtgcaaatccagatctgagagatgaagatgggaaaactccattagataaagctcgagaaaggggccatagtgaagtggtagctattcttcagtctccaggtgattggatgtgtccagttaataaaggagatgataagaaaaagaaagatacaaacaaagatgaagaagaatgtaatgagcccaaaggagatccggaaatggcacccatatacttgaaaaggttattgccagtgtttgcacaaacatttcagcaaactatgctgccttcaataaggaaagcaagtcttgctctaattcgaaaaatgattcatttttgctctgaagcactgttaaaagaagtttgtgattctgatgttggtcacaatttgcctacaatactagtggaaatcactgcaactgtcctggatcaagaggatgatgatgatggccacttgctggctttgcagatcataagggatttagtagataaaggtggtgatatatttttggatcagctagccagacttggtgtaattagcaaagtgtcaacgttggcaggtccttcctctgatgatgagaatgaagaggaatcaaaaccagaaaaagaagatgaaccacaggaagatgctaaagaattgcaacaaggtaaaccatatcattggagagactggtcaatcattaggggaagggactgcttatatatttggagtgatgcagcagccttggaattatctaatggcagtaatggatggttcagatttatcttggatggaaaacttgccaccatgtattcaagtggtagtccggaaggtggatctgacagttcagaaagccgaagtgaattcttagagaagttacaaagagctcgaggccaagtaaagccatctacttcaagtcaacctatactgtcagcaccaggacccactaaacttactgtaggaaattggtcactgacatgtttgaaagaaggagaaattgctattcataattcagatggtcagcaagctacaatattgaaagaagatttacctggttttgtatttgaatctaatagaggaaccaaacattcatttactgcagaaacttccctgggttcagaatttgtgactggctggactggcaaaagaggcagaaaactgaaatctaagttagaaaaaacaaagcaaaaggtacgaactatggctcgagatttatacgatgaccattttaaagctgttgaaagcatgcctcgtggagtagtggtaacactcagaaacatagcaactcagttagagtcatcttgggaacttcatacaaatagacaatgtattgagagtgagaacacttggagagatttaatgaagacagctttagaaaacctaattgtacttttgaaggatgaaaacacaatttcaccatatgaaatgtgtagcagtggcttggtacaagcacttcttactgtgttaaacaatagcatggatttggatatgaaacaagattgtagtcaactggtagaaagaataaatgtttttaaaactgcctttagtgaaaatgaagatgatgaaagtcgaccagcagttgcgttaattcgaaagttaatagctgtactagaatctattgaacgtctacctctccatttgtatgatacaccaggatccacatataacctccagatacttacaaggagattacgatttcggttggaacgtgcacctggtgaaactgcattgattgacaggactggcagaatgttgaagatggaacctttggctacagttgaatctctggaacagtaccttttgaaaatggtagcaaaacagtggtatgattttgaccgatcttcatttgtttttgttcgaaaattaagagaaggacaaaattttatatttcggcaccagcatgattttgatgaaaatggaatcatttactggattggaacaaatgcaaaaactgcttatgaatgggtaaatccagctgcctatggacttgtagtagtaacgtcatcagaaggaagaaatctaccttatggccgcttagaagacatactaagtcgtgataattcagctttaaattgtcatagcaatgatgataagaatgcctggtttgccatagatctgggtctctgggtgataccatcagcatatacacttcgtcatgctcgtggttatggaaggtctgcactgagaaattgggttttccaggtatccaaagatggacagaactggacttctttgtatacccatgttgatgactgcagtctcaatgaaccagggtcaactgcaacttggcctcttgatccaccaaaggatgagaaacaagggtggagacatgtgagaattaaacagatggggaaaaatgccagtggacaaacacactacctctcattatctggattcgaactttatggcactgtaaatggagtatgtgaagatcagctagggaaagcagctaaagaagcagaagctaatcttagacggcagagacgtctagtacgttcccaggttctgaaatacatggttccaggagctcgtgttatcagaggcctggattggaaatggcgagatcaggatggcagcccacagggagaaggcactgtcacaggagaactacacaatggctggattgatgtcacctgggatgctggtggctcaaactcttaccgtatgggcgcagaaggaaaatttgacctcaagcttgcaccagggtacgaccctgatacagtggcatcacccaaacctgtttcatccactgtttcaggcacaacgcaatcatggagcagcttggtgaaaaacaactgtccagacaagacatctgctgctgcaggctcctcaagtagaaaaggaagcagcagttctgtgtgtagcgtggccagtagcagcgacatcagcttgggttcgaccaaaacggaacggagatcagaaattgtaatggaacacagtatagtttcaggagctgatgtccatgaaccaattgttgttctttcatctgctgaaaacgtccctcaaacagaagtagggtcatcttccagtgcaagcaccagcaccttaacagcggaaacgggaagtgaaaatgctgaaaggaagttaggccctgatagttctgttcgtactcctggggagtctagtgcaatatccatgggaattgtcagtgttagttctcctgatgttagttcagtatctgaattaactaataaagaagcagcttcacaacgacctcttagctcttcagcaagtaacagactgtcagtgagttctttgttggctgctggggcccctatgagctctagtgcaagtgtacctaacctgtcctcaagagaaacatctagcttggagagttttgtaaggagagtggcaaacatagcacggactaatgccacgaacaacatgaatctaagccgaagcagcagtgataacaacactaatactttggggaggaatgtgatgagcacagcaacttctcctcttatgggtgctcagagtttccctaatttgaccacacctggtactacatcaacagtgactatgtcaacatccagtgttactagcagcagcaatgtagctacagcaacaacagttttatcagttggtcaatctttaagtaacactttaaccaccagcctcacatcaacttccagtgagagtgacacaggtcaggaagcagaatattccttatatgatttccttgatagctgccgtgccagtactctattggctgagctcgatgatgatgaggacttacctgagccagatgaagaagatgatgagaatgaagatgacaatcaggaggaccaagaatacgaggaggttatgattctgagacgcccatccctgcaacgtcgagctggctcccgctctgatgtaacgcatcatgctgttacctcgcagctaccacaggtacctgctggagcagggagccgacctattggggagcaggaagaagaagagtacgaaactaaaggaggacgccggagaacatgggatgatgattatgtgctaaagagacagttttctgcattggttcctgcttttgatcctagacctggtcgtactaatgtccagcagacaactgatctagaaataccacccccagggacccctcattcagagctcttggaagaagtcgaatgtactccgtcacctcgattagctctcactttgaaagtaacaggtcttggaacgactcgtgaagttgaattaccactcaccaatttcagatcaaccatcttttactatgtacaaaaattgcttcaattgtcctgtaatggcaatgtgaaatcagataaacttaggcgtatttgggagcccacatacacaatcatgtacagagaaatgaaggattctgataaagaaaaggaaaatggaaaaatgggttgctggtctatagagcatgtggagcagtaccttggcactgatgaattaccaaagaatgacttgataacctacctgcagaagaatgcagacgctgctttcctgcgccactggaaattaactggcactaataaaagtattaggaaaaacagaaattgttctcagctcatagctgcatataaggatttttgtgagcatggaacaaagtctgggttaaaccagggggccatttctactcttcaaagtagtgatattcttaatttaacaaaagaacaacctcaggccaaagcaggcaatggacagaactcttgtggagtagaagatgtccttcagcttctgcgtattctatatatagttgcaagtgacccttattcaagaatatcccaggaagatggtgatgaacagcctcagtttacttttccaccagatgaattcactagcaaaaaaattacaacaaaaatattacagcagattgaggaaccattggcactggcaagtggggctctgccagactggtgtgaacaattaaccagcaaatgtccttttctaataccatttgaaactagacagctttatttcacatgtacagcatttggcgcctcaagagcaatagtatggttacagaaccgacgtgaagccactgtggagcgaacgagaaccacaagcagtgttaggcgagatgaccctggagagtttcgagttggtcgtctcaagcatgaaagagtaaaagttccacgtggcgagtcactgatggaatgggctgagaatgtcatgcaaatacatgcagatcggaaatcagttcttgaggttgaatttttaggagaagaaggaactggcttgggacccacattagagttttatgctctggtggcagcagaattccagagaactgacttgggagcttggctttgtgatgataattttccagatgatgaatctcgtcacgttgatcttggaggtggattgaaacctcctggatattatgtgcagaggtcatgtggactgttcacagcaccatttccacaggatagtgatgagcttgaaaggatcacgaaactgtttcatttccttggaattttcttggccaaatgcattcaagacaatagacttgtggacttacctatttctaaacctttttttaaacttatgtgtatgggtgacattaaaagcaatatgagtaaactgatttatgagtcacgaggtgatagagacttacactgtactgaaagtcagtctgaagcttctacagaagaaggtcatgattcactctcggtaggaagctttgaagaggattcaaaatcagaatttattcttgatccccctaaaccaaaacccccagcttggtttaatggaattttgacttgggaagactttgaattagtaaacccacacagagccagatttttaaaagaaattaaagaccttgctatcaagaggcgccaaattttaagcaacaaaggtctttctgaagatgagaagaacacaaaattacaggaactagtgctgaagaatccatcaggttctgggcctccacttagcatagaggatttaggtttaaatttccagttttgcccttcctcaagaatatatggttttacagctgtggatctcaagccaagtggtgaagatgagatgataacaatggataatgcagaagaatatgtggatttgatgtttgacttttgtatgcatacgggtattcagaaacaaatggaagcctttagagatgggtttaataaagtttttccaatggagaaattaagttccttcagccatgaagaagtccaaatgattctttgtggaaaccagtcaccatcctgggcagcagaggatattatcaattacactgaacctaagctgggttatacacgtgacagccctggtttcctgaggtttgtgagggttttatgtggcatgtcttctgatgaaaggaaagcattcttgcagtttaccactggttgttcaactctacccccaggtggactggctaacctgcatcccaggctcacggttgtacgcaaggttgatgctactgatgcaagctatccatcagtcaatacatgtgtgcattaccttaagttgcctgaatattcttccgaggagatcatgagagagcgcctgctagctgctacaatggagaaaggctttcatctcaattgagctttgaagtgcaatgggagacatcagagactttaaaaatactagtgaagcctcttgtgtttgtgtgcagagaagtatatgatccaccatgctaatgacacttgcctttttttccaccattaaggctttaagaacatgtggaataagttttttagctgctaatgacaaaacaaatcctgtaactacccagccagcaagtatatagcacagaacactgtgttactttacaagggcttatgtgactggaataaggtggtcccacttgactgttccaaagagcagcttctcagatcttcagtgttcactggtaaatttctaacagtgtatttgtgtaaagtttgtcatttcatactccatacactacagttgctgtcactgatccctgttttgctggcttttaagctacttggtcaaaaatcctgcttccttaaaacatagagaattaatgagcatctcaagctttttcttttcctttttaatgatgcctgcactatcaagagtattctagtgttctctctttgtttggcatataatcatgcaccaaactttttatttctttaaggtgggagtatatttttatttcctaaatgccatactatgaagatcaaagtcttaagtgtgtttgcagctcaaaaataaagatgtattaaggggggaaaacctggtctaagtgcaaggcacacttacagcgagttttactttcggttgtattttctttgtatattataaacatttatttaacttgttgccgtttgaagtaaaaaatttccaaaatgtatgctcaacaataatcattaaaatgtttgcagcgtaaaaaaaaaaaa

SEQ ID NO: 507 - DNA, 818 bp, Homo sapiens
  CDS (101)..(562)
aaggatccttaatttaattaatcccccccccccggtgatgcctaaagctgtggaccgcgtgggctcgcctccctgggactaggtttcagcggccgctgcgatgaccaaaataaaggcagatcccgacgggcccgaggctcaggcggaggcgtgttccggggagcgcacctaccaggagctgctggtcaaccagaaccccatcgcgcagcccctggcttctcgccgcctcacgcggaagctctacaaatgcatcaagaaagcggtgaagcagaagcagattcggcgcggggtgaaagaggttcagaaatttgtcaacaaaggagaaaaagggatcatggttttggcaggagacacactgcccattgaggtatactgccatctcccagtcatgtgtgaggaccgaaatttgccctatgtctatatcccctctaagacggacctgggtgcagccgcaggctccaagcgccccacctgtgtgataatggtcaagccccatgaggagtaccaggaggcttacgatgagtgcctggaggaggtgcagtccctgcccctacccctatgaggggctccggtagcacctgggcacctgccgctggaagctattgggctggcagcaggacgactggctgtcctcctgcccacccacactgacggcatcttcccagttccccaaggcacgccttcttcccaggcagctctaacagccctttcatgaaggtaatgctagtcttctgtccatcagtgccatttcctgtagaactaaaggctgttccaagaatgtggggtggggaaagtaaatgctaagactaaaaaaaaaa

SEQ ID NO: 508 - DNA, 2650 bp, Homo sapiens
  CDS (215)..(2113)
gagcgtgatgtatataactatctattcgatgatgaagataccccaccaaacccaaaaaaagagatctctcgaggatccgaattcgcggccgcgtcgacaagccgcggagctggtggtggctacagttggtgttgggggcttaggcgagggacgttaccgggaagttgcaggcgggaggactcttccccatccagtcacctgacaggtcacaaacatgtcagacaaaagtgaattaaaggctgagttggaacgtaagaagcagcgactggcccaaatcagagaggaaaagaagagaaaagaagaagaaaggaaaaaaaaagaaacagaccagaagaaggaagctgttgctcctgtgcaagaagaatcagatcttgaaaaaaaaaggagagaagctgaagcattgcttcaaagcatggggctaactccagaatcccccattgtccctcctcctatgtctccatcctccaaatctgtgagcactccaagtgaagctggaagccaagactctggagatggcgccgtgggatctaggacgctgcattgggatacagatccatcagttcttcagcttcactcagattccgatttgggacgaggacctattaaacttggaatggctaaaatcacgcaagtcgactttcctcctcgagaaattgtcacgtatacaaaggaaactcagactccagttatggctcaacccaaagaagatgaagaggaagatgatgatgtagtggctcctaaaccacctattgaacctgaagaagagaaaactttaaagaaagatgaggaaaatgatagtaaagctccccctcatgagctgactgaagaagaaaagcaacaaatcttgcactctgaggaatttttaagtttctttgaccattctacaagaattgtagaaagagctctttctgagcagattaacatcttctttgactatagtgggagagatttggaagacaaagaaggagagattcaagcaggtgctaaactgtcattaaatcgacaattttttgacgaacgttggtcaaagcatcgggtggttagttgtttggattggtcatctcagtatccggagttactcgtggcttcctataacaacaatgaagatgcccctcatgagcctgatggtgtggcccttgtatggaatatgaaatacaaaaaaactaccccagagtatgtgtttcactgccagtcagctgtgatgtctgccacatttgcaaaatttcatccaaatcttgttgttggtggtacatattcaggccaaattgtgctttgggataaccgtagcaataaaagaactccagtgcaaagaactccactgtcagcagctgcacacacacaccctgtatattgtgtaaatgttgttggaacacaaaatgctcacaatctgattagcatctctactgatggaaaaatttgttcatggagtctggacatgctttcccatccacaggatagcatggagttggttcataaacagtcaaaagcagtagctgtgacatctatgtccttccctgttggagatgtcaacaactttgttgttgggagtgaagaaggttctgtgtacacagcatgccgccatggcagcaaagctggaatcagtgagatgtttgaggggcatcaaggaccaatcactggcatccattgtcatgcagctgttggagcagtagacttctcacatctttatgtcacttcatcgtttgactggacagtaaagctttggacaactaagaataacaagcctttgtattcatttgaagataacgcagactatgtttatgatgttatgtggtcacctacccacccagccctgtttgcctgtgtggatggcatggggagattggatttgtggaatctcaataatgacacagaggtaccaactgccagcatttctgtggagggtaatcctgctcttaatcgtgtgagatggacccattctggcagagagattgctgtgggtgattctgaaggacagattgttatatacgatgtgggagagcagattgctgttccccgcaatgatgaatgggcacggtttggccgaacacttgcagaaattaatgcaaaccgagctgatgcagaggaggaagcagctacccgaatacctgcttagttcctgaaaaggggagtgtaactagtggatttgggaaaggttcttaagtagatcctgagactatttgcatgcttctgtctaaatgataattaaaaggaaatttcatggattaaaccatgggtttaatgcagcaaggaaacttacaatgtccctttatatataacatgcatcttgttttggatttgtgtcattttttaatatagctgattgacttcacagaaagcagcttttttgaattctaatacataggtgtatatttggtattagttattttgagttcttttcaacttataacactgtatacagttatttctaaagcacagatgaaataagttctgcatatttttaaataatcacagttccctgttatacagataatgttctcactacccataatatgtaggaacattgtttctccttagccgtagtatgcatacacctatccatgttcattctgacatcctttgttgtctttataattcatgtggtagttacctataaataaaaacaaatatgcgttaacttttaaaaaaaaaa

SEQ ID NO: 509 - DNA, 2592 bp, Homo sapiens
  CDS (215)..(2053)
gagcgtgatgtatataactatctattcgatgatgaagataccccaccaaacccaaaaaaagagatctctcgaggatccgaattcgcggccgcgtcgacaagccgcggagctggtggtggctacagttggtgttgggggcttaggcgagggacgttaccgggaagttgcaggcgggaggactcttccccatccagtcacctgacaggtcacaaacatgtcagacaaaagtgaattaaaggctgagttggaacgtaagaagcagcgactggcccaaatcagagaggaaaagaagagaaaagaagaagaaaggaaaaaaaaagaaacagaccagaagaaggaagctgttgctcctgtgcaagaagaatcagatcttgaaaaaaaaaggagagaagctgaagcattgcttcaaagcatggggctaactccagaatcccccattgtccctcctcctatgtctccatcctccaaatctgtgagcactccaagtgaagctggaagccaagactctggagatggcgccgtgggatctagacgaggacctattaaacttggaatggctaaaatcacgcaagtcgactttcctcctcgagaaattgtcacgtatacaaaggaaactcagactccagttatggctcaacccaaagaagatgaagaggaagatgatgatgtagtggctcctaaaccacctattgaacctgaagaagagaaaactttaaagaaagatgaggaaaatgatagtaaagctccccctcatgagctgactgaagaagaaaagcaacaaatcttgcactctgaggaatttttaagtttctttgaccattctacaagaattgtagaaagagctctttctgagcagattaacatcttctttgactatagtgggagagatttggaagacaaagaaggagagattcaagcaggtgctaaactgtcattaaatcgacaattttttgacgaacgttggtcaaagcatcgggtggttagttgtttggattggtcatctcagtatccggagttactcgtggcttcctataacaacaatgaagatgcccctcatgagcctgatggtgtggcccttgtatggaatatgaaatacaaaaaaactaccccagagtatgtgtttcactgccagtcagctgtgatgtctgccacatttgcaaaatttcatccaaatcttgttgttggtggtacatattcaggccaaattgtgctttgggataaccgtagcaataaaagaactccagtgcaaagaactccactgtcagcagctgcacacacacaccctgtatattgtgtaaatgttgttggaacacaaaatgctcacaatctgattagcatctctactgatggaaaaatttgttcatggagtctggacatgctttcccatccacaggatagcatggagttggttcataaacagtcaaaagcagtagctgtgacatctatgtccttccctgttggagatgtcaacaactttgttgttgggagtgaagaaggttctgtgtacacagcatgccgccatggcagcaaagctggaatcagtgagatgtttgaggggcatcaaggaccaatcactggcatccattgtcatgcagctgttggagcagtagacttctcacatctttatgtcacttcatcgtttgactggacagtaaagctttggacaactaagaataacaagcctttgtattcatttgaagataacgcagactatgtttatgatgttatgtggtcacctacccacccagccctgtttgcctgtgtggatggcatggggagattggatttgtggaatctcaataatgacacagaggtaccaactgccagcatttctgtggagggtaatcctgctcttaatcgtgtgagatggacccattctggcagagagattgctgtgggtgattctgaaggacagattgttatatacgatgtgggagagcagattgctgttccccgcaatgatgaatgggcacggtttggccgaacacttgcagaaattaatgcaaaccgagctgatgcagaggaggaagcagctacccgaatacctgcttagttcctgaaaaggggagtgtaactagtggatttgggaaaggttcttaagtagatcctgagactatttgcatgcttctgtctaaatgataattaaaaggaaatttcatggattaaaccatgggtttaatgcagcaaggaaacttacaatgtccctttatatataacatgcatcttgttttggatttgtgtcattttttaatatagctgattgacttcacagaaagcagcttttttgaattctaatacataggtgtatatttggtattagttattttgagttcttttcaacttataacactgtatacagttatttctaaagcacagatgaaataagttctgcatatttttaaataatcacagttccctgttatacagataatgttctcactacccataatatgtaggaacattgtttctccttagccgtagtatgcatacacctatccatgttcattctgacatcctttgttgtctttataattcatgtggtagttacctataaataaaaacaaatatgcgttaacttttaaaaaaaaaaaa

SEQ ID NO: 510 - DNA, 7569 bp, Homo sapiens
  CDS (628)..(3279)
gacctggagcggctaaagaagaaggaggtcaggcagcggaggaagagccccgagaaggaagccttcaaaaagagggcaaaactccaacaggagaacagcgaggagacggatgagaacgaggcggaggaggaggaggaagagcgagacgagagtggctgtgaggaggaggaagggcgcgaggatgaagatgaggactcgggcagtgaagagagcctggtggactcagactcagaccccgaggagaaggaggtgaacttccaggcggacctggccgacctgacttgtgagatcgaaatcaagcagaagctgatcgacgagctggagaacagccagcggcggttgcagacgctcaagcaccagtatgaggaaaagctgattctgctgcagaacaagatccgagacacacagctggagcgcgacccgtgtgctgcagaacctcagcaccatggagtgctatactgaggagaaggccaacaagatcaaggcagactatgagaagaggctgcgggagatgaaccgggacctgcagaagctgcaggccgcccagaaagagcacgcccggctgcttaagaaccagtcgcgctacgagagggagcttgaagaagcttcaggcccgaggtggctgagatgaagaaggccaaggtggccctgatgaagcagatgcgtgaggagcaacagcggcggcggctagtggagaccaagaggaaccgggagatcgcacagctcaagaaggagcagcggcgacaggagtttcagatccgagctctggagtcccagaagcggcagcaggagatggtcctgaggaggaagacccaggaggtttctgcactgaggcgcctggccaagcccatgtctgagcgggtggcagggcgtgcaggactaaagccacccatgctggactctggggctgaggtgtcggccagcactacctcatctgaggctgaatcaggggcccgctctgtctccagcatcgtgcgccagtggaaccgcaaaatcaaccacttcttgggggaccatcctgcgcccactgtcaatggcacccgtcctgcccgaaagaagttccagaagaagggggccagccagagcttcagtaaggcggcaaggctcaagtggcagtccctggagcgacggatcattgacatcgtcatgcagagaatgaccattgtcaacctggaggctgacatggagcggctcatcaagaaaagggaggagctgttcctcctgcaggaggcactgcggaggaagcgggagcggctgcaggctgagagccccgaggaagagaaggggctgcaggagctggctgaggagatcgaggtgctggcagccaacattgactacatcaatgacggcatcaccgactgccaggccaccatcgtgcagctggaggagaccaaggaggagctggactccacagacacatccgtggtcatcagctcctgctccctggctgaagcccgcctcctgctagacaacttcctcaaggcatccattgacaaggggctgcaagtggcacaaaaggaagcccagatccggctgttggagggccgactgaggcagacggatatggcaggctcctcccagaaccatctgctcctggacgccctgcgtgagaaggctgaagctcaccccgagctgcaggccctcatctacaatgtgcagcaggagaatggctacgccagcacagatgaggagatctcagagttctctgagggcagcttctcccagtcattcaccatgaaaggctccaccagccatgacgatttcaagttcaagagcgagcccaaactgtctgcccaaatgaaagctgtgtcggctgagtgcctgggccccccactggatatctccaccaagaacatcaccaagtccctggcctccctcgttgagatcaaagaggacggagtgggcttctctgtccgagacccctattaccgggacagggtctcgcgcaccgtcagtctgcctacccggggcagcactttccctaggcaatctcgagccacagagacgtccccgctgacgagaaggaagtcctacgaccgagggcagcccattaggtccacagatgtgggattcacacccccatcatcccctcccactcggccccgcaatgaccgcaatgtcttctctcgtctcaccagtaatcagagccaggggtcagcgctggacaagtctgatgacagcgactcctctttgtcggaggtcctgaggggcatcatctccccggttggaggagccaagggtgcacggacggccccactgcagtgtgtctccatggccgaaggccacaccaagcccatcctctgcctggatgccacagatgagttgctattcacagggtccaaagaccgaagctgcaagatgtggaacttggttacgggacaggagatcgcagctctaaagggccaccccaacaacgtggtctccatcaagtactgcagccactcggggcttgtgttctccgtgtccacctcctacatcaaggtgtgggacatccgggactcagccaagtgcattcggactctcacgtcctcgggccaggtgatctcaggggatgcctgtgccgccacatccacccgtgccatcaccagtgctcagggcgagcatcagatcaaccagatcgccctcagcccttcgggcaccatgctgtacgccgcctcgggcaatgccgtccgcatctgggagcttagcaggttccagcctgtcggcaagctgactggccacatcggccctgtgatgtgcctgacggtcacccagacggccagccagcatgacctcgtggtgactggctccaaggaccactacgttaagatgttcgagctgggcgagtgtgtgacgggcaccatcggccccactcacaacttcgagcccccgcactacgatggcatcgagtgtctcgccatccagggagacatcctgttcagtggctcccgagataacggcatcaagaagtgggacctagaccagcaggagctcatccagcaaatccccaatgcgcacaaggactgggtgtgcgccctggccttcatcccgggccgccccatgctgctcagcgcctgccgtgcgggtgtcatcaaggtctggaacgtggacaacttcacacccatcggtgagatcaagggccacgacagtcccatcaatgccatctgcaccaatgccaagcatatcttcacagcctccagtgactgccgggtaaagttgtggaattacgtccctggactcaccccctgccttcctcgccgagtcctggccataaagggccgcgccaccaccctgccctgaccctccccaactctccctgtctcctctttcattcttcccctctttccttttccctctctttccccacttcgatctgagctgcttcttaacgtgacctgacggtgaagttctggagtgtccggcggttaccccacagcggcccaccctaggagtgaggtcagagggatgcccccggaccctcgaccccagcagcctggacaccatggaagggaagctgtgacccggccgatggggccagctgctctggggacagagggcgtggccccctctcctgccctcctccctctcccttggccttcccacaggacactgttccctcatccctcccctgcctctcaggagcctctgggtgagagagaggctggggaggaaattaagctgtgaagccaaagggcattatcccttcttgttctcctcctggcagtcgtggccacattgtctcctgctgaaccggctctgcccctttctcaggcctttggcccagtggtggagccctgtggggaggtgcagcagcctggccccatcccacccttccgaggagctggcctccccgcttctcccagcccagcctctagagccactgcacctgcctctgagcccaaaaagataagtcctcaggtagctaaggaaaccaggtgtgggcggctgggccttgcagctaacccttaaccctctggcaacccgcagatagccccaactggccccaacagttccctggggtcccttttggatggggccaaggtggagctgctagaaagattcctttggggagatggtcagaaatacttcagttatttattattttgttatttttattttttgctgttgcctcctggaaacggacttgaagtttcttcccctatattctttccctcagctcttgggggccagaaatcccaaagggagtccgctgccccggccctccagggccgcctcctctgtttgctttgcagaggagggaactgctccttcgactctgcagctcaggcctgtccccgacacagcccccagggagtcttctagctacccctggcctctaggccgcctgacgctcagtgccttcctccgttccggggcctggcacccgtgccgggcagccttacaccagccatgcccgcggcaccacatgtgtcttctcactcgcgaggtcttgtgcccagcgcccccgggaaggcgggggcgctcaccccacagcccaggccccggggttctgccccacagtcctgcgtgggccacgtaggaagcagcgtgggggctgtgtctgctgggaggtggcttggatggggaggacagcccggcacctggacccccgcccctccccagccctgcagtcccccactgggccggggagtctctccagcttctctctctctggttattcaggagacacattttcggccttaaaactggcatggagcgcaggccctcccttgcagaaaattatcaaggaagagggagttggcagagtttctctgccccggggctggggacgcggagctccggggaaattgttaaatcagtgttctggcgccccctgttgggggaactctggaattacaggagtgggccttgggggggactgagctccatccctctcccccgccccacccccacccaaagttgcccaccctgtttttccgttgcatcgctggtcttgtgcttcccgcttcagtctgggagccaagagccagccccacctcccttcagaggacgcagtgacttttggactttccagaggtggttctgtgtttctgcccttggctcctctccgtcttgggctggggcacttggagccctctccatgtggcgcccagtgttggggggaggcaggctccagtggaggctgagtgaggcctggtcccttccccgtgccctcctcggagctgccacagaggctaagacggctgtcctgctggtgctggccctgctggatgtggtattgaagtctggggcagctgatagcaggaaggagacccccttggatgctggtctcctgggacctgaacagtctgtcagcaatggctggaaatccttcttcctctggccaccccgggggtgccgggcaacccccttagctctaagatgtggccacaaatctcttcccactcctccccgccaacctgaacagaaagttttgaccttgcaacctgtaagaaagaatccgtccgcatgactgtttacaagcgatagaaacacgtaagactctgtccccttgagctcccacccccgggccggggatgccccacctggggtgactgcactgtagctgcaaggcgtgttcttgcacgaagtgtgatcttatggccctgcgagaggtgctcatcatcatgcccattttctgctgtttctgatgggtcagctacctcacggcggggccagctctgctgtcctggcaagtgtcattgactctctaaacttgaagtccttcaggagccctgagcccaacatccatgagacaccccgagttgtgcttcatgagagttggattctctgcccactctttcagggatgtccaaggtccatgttagggggcaggcccccagctccactcactgcacaagcaccctaaatgttggaagcacaaaatggttgtgatttgagcacaatggcagggtcctgcaggcagacttgacaggcccaggcccgggaggatccccccacgttggctctgtccaaagtgagattgggggtgcctgtgtctgggacagggggctgcccttgctcagaccaggccttggctcatggcttgtcctaattctgggactcgtcatcttacttcttgcccttctgtgcccatcttaagactggaggctgagccttgtcaggcccagccacatctttacgccatgggaccaggagtaaagcgctctctaaaccccgcaccccaaatctctaaacgcctgagttcaggctgagtcctagccctagtgagcctgaagagcttggactgattcccagtctcctgggtcaagccccactttgtgctttcgaagcttatgagcgggttccctggatagaaggagtcttccatccccactgcccttgggcctcttcagcatagtcctgtgccagggccctgtcctcactatcagtcagttcagtatttgctttcacgtgagtggcggactcttctgaagcagccagaactctcaaaggcagcgcatggagttgccttgcgagatttccaaggaaggaggaaagattaacaggcggagcctggcacacccaagcctttgaggtggtcagagtgccaccttcagccccttgggaagggacagcggtgggtctgggagtggcctcaccctggattcagcctaggaatctcttcaccctcagctgtccagccctgctgcctgtctggggatgtgtggcctgggcagagggcagtttaaagcacaaaaccacatggggaaaacacaaggttgcggggactttctcatgtgcctgatgtggtggagggagacaccagcaggtggctgcagtgacgttagggaacataacacttctttgccctgctagctctcagctctggggggcatcccccgatgtggtctgggctgggagcaggcatatcccctggttgttgcctgtgcctggtctgttcaccatcgtgtttgtgtgggcagagcctgccctgcaggagcagtgactttcttcccactgtgtgtcccggacctgtggtatgtgtccctttgccatcccaaacaggcaactgcttgctgctctccttgcttggcatagcctcctggtcagtggccaatgccccacaggccttcctgggcctggccctcctctcctgactcccagatccttccctgccctcttgtgtgcaaggacagattttgcagggaaagttctgtttcttctttgatacctttgttctgtcccctgccccatccccagcactcatgatcttgaagcccctatcacactctagttcagtcctgtgaaccatgtcctgagggccttgcagggaagtaggaaatagaaactcctccacaaagagccgaggatcagagaagacccctgagatgaatcagggccctgccctgcccaccaactcttttctagcaatcatgtcctgcccaggctgcaggcttcattaggctcctgctgtcctccatgatgtgactagcacaaggtgtatatatgttttgtacctctgccgatggctgtacatagtgtatgaaagttatttaagccccatgttgtacatttctgttcctagattggatgtgtgtgttctaagaagttgtcataaataaaacctgaatgaccaaaaaaaaaaaa

SEQ ID NO: 511 - DNA, 3937 bp, Homo sapiens
  CDS (334)..(3246)
atcggaactcggaatgccgttataactatctattcgatgatgaagataccccaccaaacccaaaaaaagagatctctcgaggatccgaattcgcggccgcgtcgaccggacggcaagcggcgggagattttcaaaatgggagcccagaggcaccgcccaggcctcggaaggtgtcagggagaactttccgtggtttcagcgtcgtcgcctggagcggcggtttagagagccgagcctgatgggcgccaaggccggctggctgcttggagcgctgcctcgaagggactgcgtgaaggaagctaatccggagaacccaggccagagcctggaaatatggcgacctgcatcggggagaagatcgaggattttaaagttggaaatctgcttggtaaaggatcatttgctggtgtctacagagctgagtccattcacactggtttggaagttgcaatcaaaatgatagataagaaagccatgtacaaagcaggaatggtacagagagtccaaaatgaggtgaaaatacattgccaattgaaacatccttctatcttggagctttataactattttgaagatagcaattatgtgtatctggtattagaaatgtgccataatggagaaatgaacaggtatctaaagaatagagtgaaacccttctcagaaaatgaagctcgacacttcatgcaccagatcatcacagggatgttgtatcttcattctcatggtatactacaccgggacctcacactttctaacctcctactgactcgtaatatgaacatcaagattgctgattttgggctggcaactcaactgaaaatgccacatgaaaagcactatacattatgtggaactcctaactacatttcaccagaaattgccactcgaagtgcacatggccttgaatctgatgtttggtccctgggctgtatgttttatacattacttatcgggagaccacccttcgacactgacacagtcaagaacacattaaataaagtagtattggcagattatgaaatgccaacttttttgtcaatagaggccaaggaccttattcaccagttacttcgtagaaatccagcagatcgtttaagtctgtcttcagtattggaccatccttttatgtcccgaaattcttcaacaaaaagtaaagatttaggaactgtggaagactcaattgatagtgggcatgccacaatttctactgcaattacagcttcttccagtaccagtataagtggtagtttatttgacaaaagaagacttttgattggtcagccactcccaaataaaatgactgtatttccaaagaataaaagttcaactgatttttcttcttcaggagatggaaacagtttttatactcagtggggaaatcaagaaaccagtaatagtggaaggggaagagtaattcaagatgcagaagaaaggccacattctcgataccttcgtagagcttattcctctgatagatctggcacttctaatagtcagtctcaagcaaaaacatatacaatggaacgatgtcactcagcagaaatgctttcagtgtccaaaagatcaggaggaggtgaaaatgaagagaggtactcacccacagacaacaatgccaacatttttaacttctttaaagaaaagacatccagtagttctggatcttttgaaagacctgataacaatcaagcactctccaatcatctttgtccaggaaaaactccttttccatttgcagacccgacacctcagactgaaaccgtacaacagtggtttgggaatctgcaaataaatgctcatttaagaaaaactactgaatatgacagcatcagcccaaaccgggacttccagggccatccagatttgcagaaggacacatcaaaaaatgcctggactgatacaaaagtcaaaaagaactctgatgcttctgataatgcacattctgtaaaacagcaaaataccatgaaatatatgactgcacttcacagtaaacctgagataatccaacaagaatgtgtttttggctcagatcctctttctgaacagagcaagactaggggtatggagccaccatggggttatcagaatcgtacattaagaagcattacatctccgttggttgctcacaggttaaaaccaatcagacagaaaaccaaaaaggctgtggtgagcatacttgattcagaggaggtgtgtgtggagcttgtaaaggagtatgcatctcaagaatatgtgaaagaagttcttcagatatctagtgatggaaatacgatcactatttattatccaaatggtggtagaggttttcctcttgctgatagaccaccctcacctactgacaacatcagtaggtacagctttgacaatttaccagaaaaatactggcgaaaatatcaatatgcttccaggtttgtacagcttgtaagatctaaatctcccaaaatcacttattttacaagatatgctaaatgcattttgatggagaattctcctggtgctgattttgaggtttggttttatgatggggtaaaaatacacaaaacagaagatttcattcaggtgattgaaaagacagggaagtcttacactttaaaaagtgaaagtgaagttaatagcttgaaagaggagataaaaatgtatatggaccatgctaatgagggtcatcgtatttgtttagcactggaatccataatttcagaagaggaaaggaaaactaggagtgctccctttttcccaataatcataggaagaaaacctggtagtactagttcacctaaggccttatcacctcctccttctgtggattcaaattacccaacgagagatagagcatctttcaacagaatggtcatgcatagtgctgcttctccaacacaggcaccaatccttaatccctctatggttacaaatgaaggacttggtcttacaactacagcttctggaacagacatctcttctaatagtctaaaagattgtcttcctaaatcagcacaacttttgaaatctgtttttgtgaaaaatgttggttgggctacacagttaactagtggagctgtgtgggttcagtttaatgatgggtcccagttggttgtgcaggcaggagtgtcttctatcagttatacctcaccaaatggtcaaacaactaggtatggagaaaatgaaaaattaccagactacatcaaacagaaattacagtgtctgtcttccatccttttgatgttttctaatccgactcctaattttcattgattaaaactcctttcagacatataagtttaataaataacttttttgttgactttcaagtaaagtgattttttttaatttacataaaagtcttcagaaagcctttctatgaaagaattttaacctataatgtaaaggatgtattctgagagaacaaagcagaatgaaacttgagtcacttactaaatatagtggatataaaatagaacacctgactttgctcttagaccataacccccgaacttactatgttcatatatttgtattgaacaatcttttaaaagcaaaaatgtaaatgatgtgtagtttatttgtgcttttattgttttccctgcgtctcagacatgttgagaatcatggacaaaacctgctggaattttggaatttttgaagatgtaaataatgtgtatttatgttataagtaacatatgtaaacatgtatatttgttttatatttatttttgtaacaccagtgtctgatgaaacatttttgcaaatgcattttataaaaaaataaatatagtgataagttacattatcttttgattcatttaattaaatacttatttttaaataacttaccagtaaactcactttttaaattttgttgcctgttgaggagccaattaaattttaaatattaattttgcaaatgttaaatacattgtttctctattatctgaaaaaaaaaaaa

SEQ ID NO: 512 - DNA, 527 bp, Homo sapiens
  CDS (143)..(346)
ttctttaccataggccgtgaggagcgtttccggaacatcacttggccctcgctctcactcgcggtcgcctggccgttgtcattgtttctccgctgacactttttcaagccccaggctggctgcttcagaagcccctgaccccatggaggagtgggacgtgccacagatgaagaaagaggtggagagccttaagtaccagctggccttccagcgggagatggcgtccaagaccatccccgagctgctgaagtggatcgaggacgggatccccaaggaccccttcctgaaccccgacctgatgaagaacaacccatgggtggaaaagggcaaatgcaccatcctgtgagccccgcacccggcccctctcacaccatcctgtgagaccacgcccggtcccactctcaccatcttgtaagaatgtgcccaggcccactcaattcatgctttgagttcccatttccaggtttatattttcatcattctgttgagctctatgtcggtgctatttatattaatttgtgagtttg

SEQ ID NO: 513 - DNA, 6248 bp, Homo sapiens
  CDS (1)..(5856)
atgaatgccctcgccagcctggggccaggagacaggctctccgtggctcagcgcctgagcatccacttacaggacactcacctgcagaggtaccctgagcaccgttgtgggttaagggactttctcccctctggaaacagtcctgagaagctgaaggtcttgggggcctctcaccaaatgtctttgggagatgcccaagagagctgctccatgcgctgtggcgccctggacaggccatgttcctgccacccgacgtgctccggccttggtacctgctgcttggatttccaggacttctgcctggagatattgccctactcagtctccatgatgggcggcaaggactttgtggtgcggcacttcaagatgtccagccccacagacaccagcccacaggtttgcatgccacaggagagcatccagaccctcggccatgtggactcctccgggcaagtgcacttcgtgtcgcccctgctctatgagagcggccacgtccccttcaccatctcactggacgatggccactccttccctcgtgcgggcacttggctggctgtgcaccccaacaaagtgttgatgaaggagaagagtgagttgatgaacgagatgcattggcaatactacggcaccgccaacacctcaggcaacctcagcctgacctggcacgttgaggcgctgcccacacagacaccatcaagctgtggggctatgaggagacaggtgagaaagctggaccgggagagggtaggagcttggtggagaggcgcctgggccagacatccgcggcaggaggcgggggaacatgccaagaggcggaaggggcacgcggagacccccagggggcgccggaaggggcgcgccgggcggtcggcggcggccgttggcgagctgaggcctgccaggcgaagtctggagaccagccgggccgcggccgcaatggccaaggactcgcccagccccttgggcgcgtcgcccaagaagccgggctgctccagcccggcggcggcagtgctggagaaccagaggcgggagctggagaagctacgggcggagctggaggcggagcgggcaggctggcgggcggaacggcggcgcttcgctgcccgggagcgccagctgcgtgaggaggccgagcgggagcggcgacagctggctgaccgtctgcgctccaagtgggaggcacagcgcagccgggagttgcggcagctgcaagaggagatgcagcgggaacgcgaggccgagatccggcagctgctgcgctggaaggaggccgagcagcggcagctgcagcagctgctgcaccgggagcgcgatggcgtggtgcgccaagcccgggagctgcagcgccagctggccgaggagctggtgaaccgcggccactgtagccgcccgggggcgtccgaggtttccgcggcgcagtgccgctgtcgcctgcaggaagtgttggcgcagcttcgctggcagactgacggcgagcaggcggcgcgcatccgctatctgcaggcggcgctggaggtggagcgccagctcttcctcaagtacatcctggcgcacttccgcgggcacccggctttgtcgggatcaccggacccccaagctgtgcattccttggaagaaccgctgccccagacctccagcggctcttgccacgcccccaaacccgcctgccaactcggatctctagacagcctgagtgctgaagtcggtgtgcgctcccgctcgctaggcctggtgtcctctgcgtgctccagctccccagacggcctgctctccacgcacgccagctcccttgattgcttcgcacctgcgtgttcccgctcgcttgacagcacccggagcctccccaaggcctccaaatccgaggagcggccctcctcaccagacacctccacccctggctcccggaggctctcgccgccaccatcgccactcccgccgccaccaccaccgtcagcccacaggaaactcagcaacccgcggggaggagaaggctctgagagccagccctgcgaagtcctgactccctcacccccgggcctgggccaccacgagctgataaagctgaactggctgctggccaaggcgttgtgggtgctggcgcgccgctgttataccctgcaagcggagaacaagcagctgcggcgtgcaggctgcccctaccaggcagacgagaaggtgaagcggctcaaggtaaagcgcgcggagctgaccgggctcgcgcggcgcctagctgaccgcgcccgcaagctgcaggagaccaacctccgggccgtgagcgcgcctatacccggcgagagttgcgccggcctggagctgtgccaagtctttgcccgccagcgcgctcgggacctgtcggagcaggcgagcgcgccgctggccaaggacaagcagatcgaagagctgcggcaggagtgccacctcctgcaggcgcgtgtcgcctcgggtccctgcagcgacctgcatactggaaggggcggcccctgcacccagtggctcaacgtcagagacttagaccgcctgcagcgcgagtcccagcgggaagtgctgcgcctgcagaggcagttgatgcttcagcagggcaacggtggcgcttggcccgaggcgggcggccagagcgcaacctgcgaggaggtgcgacggcagatgctggcgctggagcgcgagctggaccagcggcggcgcgagtgccaggagctgggcgcgcaggcggccccggcgcggcgacgtggcgaggaggccgagacacagctgcaggcggcgctgctcaaaaacgcctggctggcggaggagaatgggcggctgcaggccaagaccgactgggtgcggaaggtggaggctgagaatagcgaagtgcgcggccacctgggccgcgcgtgtcaagagcgcgatgcctccggcttgatcgccgaacagctgctgcagcaggcggcgcgcgggcaggacaggcagcagcagctgcaacgcgacccgcagaaggccctgtgtgacctccatccttcctggaaggagatacaggcgctccagtgtcggcctggtcaccctcctgaacagccctgggagaccagtcaaatgccggagtcccaagttaaaggtagcagaaggcccaagttccacgcacggcctgaagactacgcagtgtcacagcccaacagagacatacaggagaaaagggaagcctccctcgaggagagcccagttgcccttggggagtcagccagtgtcccccaagtttcagagacagtccctgccagccaacctctgtccaagaaaaccagctcccagtcaaactcctcctctgaggggtcgatgtgggccaccgtgccgtcctcccctactctggacagggacacagccagtgaggtggatgacctggagcctgacagcgtgtccctggccctggaaatggggggctcggcggctcctgctgcccccaagctcaagatcttcatggctcagtataactacaacccatttgaggggcccaatgatcaccctgagggtgagctgcccctcacagctggggactacatatatatcttcggggacatggatgaggatggcttctatgagggggagcttgaggatggccggcgggggctggtgccctccaacttcgtggagcagattccggacagctacatcccaggctgcctgcctgccaaatcccctgatcttggccccagtcaactcccagcggggcaggatgaagctctggaggaagacagcttattatctgggaaagcccagggagtggtggacagagggctgtgccagatggtcagggtgggctccaagacagaagtagcaacagagatcctggataccaagacggaagcctgccagctgggcttgctgcagagcatggggaagcagggcctctccagaccccttctggggaccaaaggggtgctccgtatggctcccatgcagctacacctgcagaatgtcacagccacatcagccaacatcacctgggtctacagcagccaccgccacccccatgtggtatatcttgatgaccgagagcatgccctgaccccagcgggcgtgagctgctacaccttccagggcctgtgccccggcacgcactaccgggcgcgggtggaggtgcggctgccacgggacttgctgcaggtgtattggggaactatgtcctccaccgtcaccttcgacacactcttggcaggacctccctacccaccgctggatgtgctggtggagcgccatgcctcgccaggtgtcctggtggtcagctggctccctgtgaccattgactcagctgggtcctccaatggagtccaggtcaccggttatgctgtgtatgcagatgggcttaaggtttgtgaggtcgccgatgccactgctgggagcaccctattggaattctcccagctacaggtgcccctcacgtggcagaaggtctcagtgagaaccatgtcactctgtggtgagtccctggattcagtgcctgctcagatccccgaggacttcttcatgtgtcaccgatggccagagactccaccctttagctacacttgtggcgacccatccacctacagagtcaccttccccgtctgcccccagaagctgtcactggctcctccgagtgccaaggccagcccccacaaccctggaagctgcggggagccccaggccaagttcctagaagcattctttgaagaacccccaaggaggcaatccccagtgtccaacctgggctcagaaggagaatgtccgagttcaggggctggcagccaagcccaggagcttgcagaggcctgggagggctgtagaaaggacctgctctttcagaagagtccccagaaccacaggccaccttcagtcagtgaccagcctggggagaaggaaaattgctcccagcacatgggcaccagcaaaagccctgctccaggattcatccatctacgcaccgagtgtgggcccaggaaagaaccgtgtcaggaaaaggctgcccttgagagggtacttcggcaaaagcaagatgcccaagggttcacacctccccagctgggcgccagccaacagtatgcatctgacttccataacgttttgaaggaggagcaggaggcactgtgcttggatctgtggggcacagagaggcgagaggagaggagggagcctgagccccacagcaggcaaggacaagctctgggggtgaagagagggtgccagctccatgagcccagctcggcactgtgtccagctccatccgccaaagtcatcaagatgcccaggggtggcccccaacagctggggacgggggccaacactccagccagggtctttgtggccctctctgattacaaccccctggtgatgtctgccaacctcaaggctgcagaggaggagctggtcttccagaaaaggcagttgctaagagtgtggggctctcaggacacccatgatttctacctcagcgagtgcaacaggcaagtgggcaatatccccgggcgcctagtggctgagatggaggtggggacagagcagactgataggaggtggcgttctccggcccaagggcacctgccttctgtggcccacctcgaggactttcaggggctcaccatcccccagggttcctccctggtgctccaggggaactccaagagactcccactgtggactccaaagatcatgatagcagctctggactatgatcctggggatgggcaaatggggggccaggggaagggcaggctggcgctgagggcaggagacgtggtcatggtttacgggcccatggatgaccaaggattctattatggagagttgggcggccacaggggcctggttcctgcccacctgctggatcacatgtccctccatggacactgagcaagcatccttgcccaggtagtggcctctggctgctcacaccctgccagaggagaagcaagcgttcagaccctcacaccagcacccctcctcaccaccataagtagcatgtgctccaagtgccactgtgttaaactgatggtagtccttaagtgtcccctaggctctgaaagtagcaggacttaagcctgagttatttgcaaaagcaaacacaacaagccaacccctgagagtctgagaagccatttcaaagttgctgataactatggcaggtatacggagaagcgcctttttctgtggccaatgtgtgttttctctgggaggttaaggttatctgtccattgccttgtacgaaagtctcaagaaaagtctacatcttaaaaaaaaaaaaa

SEQ ID NO: 514 - DNA, 1265 bp, Homo sapiens
  CDS (204)..(1265)
ggtcagaattccaggtcgacctcgctgtcgacgatttcgttgtggaagggccgtgttcgtgttggcaaagaaggtcggctgctgagccagggcgtgtctcccggaggcctgtgggctgccaggatccccacctctctgcaatgggctgcccaggctgaccagccggttcctgctggaagctcctggtctgatctggggataccatgtccaagccccccgacctcctgctgcggctgctccggggcgccccaaggcagcgggtctgcaccctgttcatcatcggcttcaagttcacgtttttcgtctccatcgtgatctactggcacgttgtgggagagcccaaggagaaagggcagctctataacctgccagcagagatcccctgccccaccttgacaccccccaccccaccctcccacggccccactccaggcaacatcttcttcctggagacttcagaccggaccaaccccaacttcctgttcatgtgctcggtggagtcggccgccagaactcaccccgaatcccacgtgctggtcctgatgaaagggcttccgggtggcaacgcctctctgccccggcacctgggcatctcacttctgagctgcttcccgaatgtccagatgctcccgctggacctgcgggagctgttccgggacacacccctggccgactggtacgcggccgtgcaggggcgctgggagccctacctgctgcccgtgctctccgacgcctccaggatcgcactcatgtggaagttcggcggcatctacctggacacggacttcattgttctcaagaacctgcggaacctgaccaacgtgctgggcacccagtcccgctacgtcctcaacggcgcgttcctggccttcgagcgccggcacgagttcatggcgctgtgcatgcgggacttcgtggaccactacaacggctggatctggggtcaccagggcccgcagctgctcacgcgggtcttcaagaagtggtgttccatccgcagcctggccgagagccgcgcctgccgcggcgtcaccaccctgccccctgaggccttctaccccatcccctggcaggactggaagaagtactttgaggacatcaacccggaggagctgccgcggctgctcagtgccacctatgctgtccacgtgtggaacaagaagagccagggcacgcggttcgaggccacgtccagggcactgctggcccagctgcatgcccgctactgccccacgacgcacgaggccatgaaaatgtacttgtga

SEQ ID NO: 515 - DNA, 1825 bp, Homo sapiens
  CDS (1)..(1584)
atggcaaaggtcattctgaagcagagtaaacaatgcaagaatctgcttacctgcaaagtggcccaggtctgccccgtatgtggctgtcttcattgttatttctggtggctctcaggtcttgagtcaagacgtcccagctctccactcatcgatattaaacccatcgagtttggcgttctcagcgccaagaaggagcccatccaaccttcggtgctcagacggacctataaccccgacgactatttcaggaagttcgaaccccacctgtactccctcgactccaacagcgacgatgtggactctctgacagacgaggagatcctgtccaagtaccagctgggcatgctgcacttcagcactcagtacgacctgctgcacaaccacctcaccgtgcgcgtgatcgaggccagggacctgccacctcccatctcccacgatggctcgcgccaggacatggcgcactccaacccctacgtcaagatctgtctcctgccagaccagaagaactcaaagcagaccggggtcaaacgcaagacccagaagcccgtgtttgaggagcgctacaccttcgagatccccttcctggaggcccagaggaggaccctgctcctgaccgtggtggattttgataagttctcccgccactgtgtcattgggaaagtttctgtgcctttgtgtgaagttgacctggtcaagggcgggcactggtggaaggcgcatgattcccagttctcagcaccaggcttgcccgccgatcaacaatttttcgccgatctgttcagcggcctggtgcttaacccgcaactactggggcgcgtctggtttgccagccagcctgcctcgttgccggtgggcagtttatgtattgattttccccgtctggatatcgtgctgcgcggcgaatacggcaatctgctggaagcaaagcagcaacgtttggtggaaggagaaatgctgtttattccggcgcgcgcggctaatttaccggtcaacaacaaaccggtgatgctgttaagcctggtgttcgctccgacctggcttgggttatcgttttacgatagccgcaccacgtcgttgttgcatcctgctcgccagatccagcttcccagcctgcaacgcggtgaaggtgaagcgatgcttaccgccctcacccatcttagccgttcgccgctggagcaaaatatcattcagccgctggtgttaagtttgctgcatctttgccgtagcgtggtgaatatgccgccgggcaattcgcagccgcgcggcgattttctctatcacagcatttgtaactgggttcaggataattatgcccagccgctcacccgcgagagcgtggcgcagttttttaatatcacgcccaatcatctgtcaaaactgtttgctcagcatggaacgatgcgttttatcgagtatgtgcgttgggtgcgaatggcgaaggcgaggatgattttgcagaaatatcatctgtcaattcatgaagtggcacagcgttgcggttttccggatagcgactatttttgtcgcgttttccggcgtcagtttggtctgacgccgggagagtacagcgcccgttttcagggctaacgtcagaaggttaattctgtttccagcagcgtcaggatactttgtgcatcttgcgcggcaaacaacgactggcggaagtttttattcaccagtttacgcgccagctgcgagaagactttcacatgattcatcccttcgttagcacccagcgtcagcatgatcaccagttcgacttcgcccatttctgactgccagccaatcggtttcgccagccgggcaatgctgatactggaatgac

SEQ ID NO: 516 - DNA, 4880 bp, Homo sapiens
  CDS (225)..(3248)
cgcctgcaggtaccggtccggaattcccgggtcgacgatttcgtgagaatcagagagagagagagtctgtgtctctgggaaagaagaacatctctgcttcacagtgatttgcgctgggggagaggcatcaattggcttcggacccaagggggagacgagaccaggtcaccccggttaagaccaagtgagcgttgcccctccctctcccaactctctacccgggaatgtctcggcgaaagcagcggaaaccccaacagttaatctcggactgcgaaggtcccagcgcgtctgagaacggtgatgctagcgaggaggatcacccccaagtctgtgccaagtgctgcgcacaattcactgacccaactgaattcctcgcccaccagaacgcatgttctactgaccctcctgtaatggtgataattgggggccaggagaaccccaacaactcttcggcctcctctgaaccccggcctgagggtcacaataatcctcaggtcatggacacagagcatagcaaccccccagattctgggtcctccgtgcccacggatcccacctggggcccagagaggagaggagaggagtcttcagggcatttcctggtcgctgccacaggtacagcggctgggggaggcgggggcctgatcttggccagtcccaagctgggagcaaccccattacctccagaatcgacccctgcaccccctcctcctccaccaccccctccgcccccaggggtaggcagtggccacttgaatatccccctgatcttggaagagctacgggtgctgcagcagcggcagatccatcagatgcagatgactgagcaaatctgcaggcaggtgctgttgcttggctccttaggccagacggtgggtgcccctgccagtccctcagagctacctgggacagggactgcctcttccaccaagcccctactacccctcttcagccccatcaagcctgtccaaaccagcaagacactggcatcttcctcctcctcctcctcttcctcttcaggggcagaaacgcccaagcaggccttcttccacctttaccacccactggggtcacagcatcctttctctgctggaggggttgggcgaagccacaaacccacccctgccccttccccagccttgccaggcagcacagatcagctgattgcctcgcctcatctggcattcccaagcaccacgggactactggcagcacagtgtcttggggcagcccgaggccttgaggccactgcctccccagggctcctgaagccaaagaatggaagtggtgagctgagctacggagaagtgatgggtcccttggagaagcctggtggaaggcacaaatgccgcttctgtgccaaagtatttggcagtgacagtgccctgcagatccaccttcgttcccacacgggtgagaggccctataagtgcaatgtctgtggaaaccgttttaccacccgtggcaacctcaaagtgcatttccaccggcatcgtgagaagtacccacatgtgcagatgaacccacacccagtaccagagcacctagactatgtcattaccagcagtggcttgccttatggtatgtccgtgccaccagagaaggccgaggaggaggcagccactccaggtggaggggttgagcgcaagcctctggtggcctccacaacagcactcagtgccacagagagcctgactctgctctccaccagtgcaggcacagccacggctccaggactccctgctttcaataagtttgtgctcatgaaagcagtggaacccaagaataaagctgatgaaaacacccccccagggagtgagggctcagccatcagtggagtggcagaaagtagcacggcaactctcatgcaactaagtaagttgatgacttcactaccaagctgggcactgcttaccaaccacttcaagtccactggcagcttcccgcttcccctatgtgctagagccttgggggcctcaccctctgagacatcaaagctgcagcaactggtagaaaagattgaccggcaaggagctgtggcggtgacctcagctgcctcaggagcccccaccacctctgcccctgcaccttcatcctcagcctcttctggacctaaccagtgtgtcatctgtctccgagtgcttagctgtcctcgggccctacgccttcattatggccaacatggaggtgagaggcccttcaaatgcaaagtgtgtggcagagccttctccaccaggggtaatctgcgtgcacatttcgtgggccacaaggccagtccagctgcccgggcacagaattcctgccccatctgccagaagaagttcaccaatgctgtcactctgcagcagcatgtccggatgcacctggggggccagatccccaacggtggtactgcactccctgaaggtggaggagctgctcaggagaatggctccgagcaatctacagtctccggagcagggagtttcccccagcagcagtcccagcagccatcaccggaagaggagttgtctgaggaggaggaagaggaggatgaggaagaagaggaagatgtgactgatgaagattccctggcagggagaggctcagagagtggaggtgagaaggcaatatcagtgagaggtgattcagaagaggcatctggggcagaggaggaggtggggacagtggcggcagcagccacagctgggaaggagatggacagtaatgagaaaactactcaacagtcttctttgccaccaccaccaccacctgacagcctggatcagcctcagccaatggagcagggaagcagtggtgttttaggaggcaaggaagaggggggcaaaccggagagaagctcaagtccggcatcagcactcaccccagaaggggaagccaccagcgtgaccttggtagaggagctgagcctgcaggaggcaatgagaaaggagccaggagagagcagcagcagaaaggcctgcgaagtgtgtggccaggcctttccctcccaggcagctctggaggagcatcagaagacccaccccaaggaggggccgctcttcacttgtgttttctgcaggcagggctttcttgagcgggctaccctcaagaagcatatgctcctggcacaccaccaggtacagccctttgccccccatggccctcagaatattgctgctctttctctagtccctggctgttcgccttccatcacctccacagggctctccccctttccccgaaaagatgaccccacgatcccatgagcctgtttttctgtacctgctgctctttgtcccacagagcagaaacagcttcacaaaaggacctcccagagttatgagccctgattttgtctttttctctaagttcttaacatgttatgtccctagtggcttttctgtagtccctgagcttggaaattactgtgcttacaaggggatggccccctaaggaatttttcttccctcctcattctttgtacctgaggaacatagattctctgcagctttctcaaggggaaccctctccagcttccctggtgtgacccttcttccccctcctctctcctctccctttccctttggtaggtgcacctgagcacctacatttggcattgcagcctagccaaaaagggctggcagctgtctctggagggcccagtgccactcctctggggtgacctttctgctcagctggtgggtatgggtcccctatctttctagaaccagtatgtggcattcctgtcaaatgggctgcccatgaagccctggaattccagctccacctccactaccactccaagcctggccccaccagtgctgtttggcctaggaactgtggctgggaaggtgcctccaacaatgggatccagggaagccaaggagaagacagcccccctcctatttcagcctcctgcacccaaggcagtgcctgagaagcccatcatagacaagaagtagcaaactgtacattccttcttcctccccctgctccagaaggtgccggtactgaagatgctccagtaattggtgacccaaccctaggaagtagggagaaatgaaggaagggcataggaaaattttcccagtaaatcccctgatggtcacattaaggtaaaggttttggctggtcagtgtgccaagacctctccagcttctcattcatgatgacctctcaaagttgggaaacaagctgatttcttgccaagaggtctcccaggagatatttgggaaatgtgaagttcgtatctttaaggagcatttttggtcagcatggttgatgaactaatgatgagagagttaaggaatgttgctagaacatagggcttgctggtacctatgtgactaagaaagggacatgatgtaagggaaaaggcctcaaattcttgtgaatgtctggacattctcgttaatattcttttgggctaatagtgacatagtgtgcagaggtgtaccagggatcatgggggatttcctagcactagtatgcttctagttttagataactccctcctttattccctggccccttgtattttccttatcttcctctttcaagacccctacccattttgcctatccgtaggctggggcttgtgtctttgtcattgtctggttcttaagagtcccagactttgggagaccagctccaggtggcgtcctccctgcctctccgtcttgtaatgagttgtagtatttactcttaacataggatcatttggaacaggagttctgaggaggagagagtgagggttttgctattgactgacttgaacgatggcttctcctcaagctgtaggctccagagcttcctaacctagtaaaatgtcaagaacagacgggagatattagtgtctttccctctatcattaaaggtgttttaaccaaaaaaaaaaa

SEQ ID NO: 517 - DNA, 6418 bp, Homo sapiens
  CDS (6)..(5663)
acaacatgagaccattatcctttgcattgtttttaggagacccaaacatggcaaacctggaagaaagcttcccccgaggaggtacaagaaagatccacaaaccagagaaagctttccagcagtcagttgaacaagacaacttatttgatatttctactgaagagggatccaccaaaagaaaaaagagccagaaggggccagcaaaaacaaaaaagttgaaaatcgaaaagagagaaagcagcaagtccgcaagagagaagtttgaaatccttagtgttgagtccctgtgtgagggaatgcgtattttgggttgcgtgaaagaggtgaatgaactggaactggtgattagtctccccaatggcctccagggctttgtgcaagtcactgaaatctgtgatgcctacaccaaaaagctgaatgagcaggtgacacaagaacaacctctgaaggacctacttcacttgcctgaacttttctcacctggaatgctggtaagatgtgtggtgagcagtctgggcatcacagacaggggcaagaagagtgtcaagctgtctctgaaccccaaaaatgtcaacagagtgctgagtgctgaggccctgaagcctggcatgctacttacaggtaccgtatccagcctggaagaccatggctacctagtggacattggtgttgatgggaccagagcttttctgccactgctgaaagcccaggagtacatcagacagaagaacaaaggtgctaaactaaaggtgggtcagtacctgaactgcattgttgaaaaggtgaaaggcaacggaggagttgttagtctgtctgttggtcactcagaggtttctacggccattgctactgaacagcagagctggaaccttaataacttgctaccaggactggtggtcaaagctcaggtacagaaggtgactccatttggccttacgctaaacttcctcacattcttcacgggcgtggttgactttatgcacctggatcccaagaaagctggaacatatttctcaaatcaggcagtgagggcctgcatcctttgcgtccatcctcgaaccagagttgtgcacctgagcctgcgccccatcttcctacagcctggacgcccactcacccgactctcttgccagaaccttggagcagtgctggatgatgttcctgtccagggttttttcaaaaaggctggggccacctttaggctgaaggatggggttctggcctatgcccggctcagccatctctctgattctaagaacgtcttcaatcctgaggccttcaagccagggaacactcacaagtgtagaattattgactacagccaaatggatgaactggccttgctctctctacgaacgtctattattgaagctcagtaccttagatatcatgacatcgaacctggggcagtggtaaagggcacagtgctaaccataaagtcatatgggatgctggtgaaggtgggcgagcagatgaggggcctggtacctcccatgcacctggctgacatcctgatgaagaatccggagaagaagtaccacatcggggatgaggtcaagtgccgggttttgctttgtgaccctgaagccaagaagctgatgatgaccctgaaaaaaaccctgattgagtccaaactacctgtcattacctgctatgccgatgccaagcctggtctgcagacacatggcttcatcatcagggtcaaggactatggctgcattgtgaagttctacaacaatgtgcagggactggtgcccaagcatgagctcagtactgagtatatccctgacccggagagagttttttacactggccaggtggtgaaggttgtcgtattgaactgtgagccatccaaagagaggatgctcttatccttcaagctgtcgagtgatccagagccaaagaaagagcctgcaggacacagtcagaagaaaggaaaagccattaacattgggcagttggtagatgtgaaggttttagagaagaccaaagatgggctggaggtggctgtcctgccccacaacatccgtgctttcctccccacatctcatctgtcggaccacgttgccaacggcccattgttacatcattggctccaggcaggtgacatccttcaccgagtcctgtgtctgagccagagcgaggggcgtgttcttctttgcaggaagccagccttggtctccacagtagaaggtggccaggatcccaagaacttctcagaaatccatcctggaatgctgctcattggttttgtgaagagcatcaaggactatggcgtgttcatccagttcccctcaggtcttagcggactggccccaaaagctatcatgagtgacaaatttgtgacctccacaagtgaccactttgttgagggccagacagtagcggcaaaggtgaccaatgtggatgaggagaagcagcggatgctgctgtcactgcggctgtcggactgtggtctgggggacttggctatcaccagcctcctcctcctgaatcagtgcctggaggagctgcagggcgtgcgcagccttatgagcaaccgagactctgtgttgatccagacgctggccgagatgaccccaggaatgttccttgacctagtggtgcaggaggtgttggaagatggctctgtggtattcagtgggggtccagtgcccgacctggtcctgaaagccagcagataccatcgcgcagggcaggaggtggaatctgggcagaaaaagaaggttgttatcttaaatgttgatcttttgaagttggaagtgcacgtttcccttcaccaggacttggtgaatagaaaagctagaaagctgaggaaaggcagcgaacaccaggcgattgtgcagcacttggagaagtcctttgccattgcctccttggtagagacgggccacctggcagctttctccctgacctctcacctcaacgacaccttccgctttgactcagagaaattgcaggtgggacagggtgtctccctaaccctcaagaccacagaaccaggagtgactggccttcttttggctgtggaggggccggctgccaagaggaccatgaggccgacccagaaggactctgagacagttgatgaggatgaagaagtggatccagctctgactgtagggaccataaagaagcacaccctctccatcggggacatggtcacagggactgtcaagtccattaagcctacccatgtggttgtgactctggaagatggcattattggctgtatccatgcctcccacattctagatgatgttccagagggcacctctcctactaccaagctgaaggttgggaagacggtcactgcccgagtgattggcgggcgagacatgaagacattcaagtatctcccaataagtcaccccagattcgttcgaaccatcccggagctgagtgttcggccaagtgagctggaggatggccacactgctcttaacactcactctgttagccccatggagaagattaaacagtaccaggccggccagactgttacttgcttcttaaagaaatacaatgtggtgaagaaatggcttgaggtggagattgccccagacatccgggggagaattcccttattgctcacttctctgagcttcaaggttctgaagcatccagataagaagttccgggttggccaggccctgagggccaccgttgttggcccagattcctccaagaccttcttatgtctgtccctcacaggtcctcacaagcttgaggaaggggaagtggccatgggccgagtggtgaaggtgactcccaacgaggggctgaccgtctccttcccctttgggaagataggaacagtcagtatatttcacatgagtgactcctactccgagacgcccctggaagacttcgtcccccagaaggttgtcagatgttacatcctgtccactgcagacaacgtattgactttgtcgctgcgatcatccagaacaaacccggagacgaaaagcaaagtagaagatccagagattaactccatccaggacattaaggaagggcagcttctgaggggctatgtagggtccatccagccacacggtgtgttctttcgccttggcccctccgttgtgggtttggctcggtactcccatgtctcccagcacagcccgtccaagaaagccctttataacaaacacctccctgaagggaagctgctcacagccagggtcctacgccttaaccaccagaagaacctggtagagctgtctttcctccccggagacactgggaagccagacgtgctttctgcttccttggaagggcaacttacaaagcaagaggagaggaaaacagaggctgaggagagagaccaaaaaggggaaaagaaaaatcagaaaaggaacgagaagaagaaccagaaggggcaggaggaggtggagatgcccagcaaggagaagcaacagccccagaagccacaggcgcagaagcggggcgggcgggagtgccgggagtctgggagtgagcaggaaagagtgagcaagaagccaaagaaagccggcctgtcagaggaggacgacagccttgtggacgtgtactatcgggagggaaaagaggaggcagaagagacgaatgtgctgcccaaggagaagcaaaccaagccagcagaagcgccccggctgcagctgtcttcaggcttcgcttggaatgtgggactagactctctgaccccggccttgccacctctagcagagagctcagacagcgaggaggatgagaagccacaccaagccacgataaagaaaagcaagaaagaaagggagttggagaagcagaaggcagagaaggaactgtcccgcattgaggaggcgctgatggatcctgggcggcagccagagtccgcggatgattttgaccgactggtgctgagctcccccaacagctccattctgtggctgcagtacatggctttccacctgcaggccacggagatcgagaaggcccgtgccgtggctgagagggcccttaagaccatctccttcagagaggagcaggagaagctgaacgtgtgggtggctctgctgaacctggagaacatgtacggctctcaggagtccctgaccaaggtctttgagcgagccgtgcagtacaacgagcctctcaaagtctttctccacctggctgacatctacgccaagtcagagaaattccaggaagctggtgaactctacaaccggatgctgaagcgtttccggcaggagaaagctgtgtggatcaaatacggcgccttccttctgcggaggagccaggctgcagccagtcaccgcgtgctgcagcgagccctggagtgcctgcctagcaaggagcatgtggatgtcattgccaagtttgcccagcttgagtttcagctgggggatgcagagcgggccaaagccatttttgagaacacgctgagcacctacccaaagcgcacagatgtctggtcggtctatatcgacatgaccatcaagcacggcagccagaaggacgtccgggacatctttgagcgggtcattcatctgagcttggcccccaagagaatgaagttcttcttcaagcgctacctggactacgagaagcagcatggcactgagaaggatgtgcaggcagtcaaggccaaggccctggagtatgtggaggccaagagctcagtgctagaggactagtggcaggctggctctgtgggacactgtcaacaatgggccagcccggccccgcctcgagtgcctgggcactcggaaaactgttacctcaggactctatttaaatgctgctttttctgcagcacgcttggggaaatcctgtcaggatgaaaaggaagttgagattttttaaatccctcttcgcttgctttattttcagtaccaacttgttatctttttccttatctgaggctacctggggattgtgggcagcaggcccctggactcccagaaatgctgagggtccctcttccaggggagttccctggggagcaagagtagaggggctattcccgagggtcctgtggtcagggtcctgctttgtccctggcaggctgtcagtccagctggagggggtcagtaggctccagggagtgggccctcccctccgatcttggagtctctgggtgttccttcagcctcagcctcactggtaccttctgccctttaggggaggctatgagtctgggacaggaggacaaattcagagcccagagggggaaatggagaaacctgggctgctgaggaaagccacgggtgttggcgtgaactgatgatgtctcatcccacgcccactatggccacattacctaacctctccatatctgggctattcaaggtcttggaggccagcacagacccagctagttgttgaagccagttcttttttgtcttggtcatgagggaattaaacgttttctctggcagaaaaaaaaaaa

SEQ ID NO: 518 - DNA, 3419 bp, Homo sapiens
  CDS (1121)..(2197)
aggaaagaagggagtttatcactgtaactggatacagggagaaggctggagataattccagcagaccaactcaaagtgctacaattttcttactgtttatataggttggggttatgtgcctacatgcagtacagcaatcacctaagtctactggtaactaattttgttccaaggagaaggtcagaggcaaaaaaaatgcttgctaagtccgattaaaaggggcccagtgccttcaaggcctgtctactgtggtaccggagtgattatttcgattgtatctcctttacagcttggtccagagagctgccttagactatccaattgatctattcaaacagctgcctgttcccttaacttgtcttcagattttgtcgacccgagatgggtcctggcactaggaatgtaaaaccgttcctattattttggcttgctccagcaaaagagaagcccatgcaaggctcctgctgaccatgtttcatttctagctttgatgtctgggcactgatttccctagatttaactatgtgctcaatggtaaggcagtgctgtggaaatctgtctgtgtaactggggtgctatgcaggcctgtctgggtgactgtcagggacaactgtcctaccacaccaaggacacagccctgggggtgcttttcttcatagccaaagaagctgcaggaaacccaccctagtgggacaaagaccaatgcagggtcagtccccacagccaggtgatgcaaacaggctggacgtgggccgcctcccctccagcttgacttgtgacagggaaaccaatgcagcagcagcagggccaccagagtcctgtcctggggacaggcttccttccagcgggcggggagtgggtgctcctgccagaccagcctggcttccacggttccagagaccctgttctccctcagcccagtccccgcccccactccttggctttatgagttcattggctgaagtcacccggagacaatgctgagtgttccacccctgagtcgaagcccagcccagggcagcccagccagacgcctccggtagtgtaaatgaggacaatgcctgctggcccacatgacggggggatgtagacggcagcggcgccagtcgctcctggcaccatggacgatgccacagtcctaaggaagaagggttacatcgtaggcatcaatcttggcaagggttcctacgcaaaagtcaaatctgcctactctgagcgcctcaagttcaatgtggctgtcaagatcatcgaccgcaagaaaacacctactgactttgtggagagattccttcctcgggagatggacatcctggcaactgtcaaccacggctccatcatcaagacttacgagatctttgagacctctgacggacggatctacatcatcatggagcttggcgtccagggcgacctcctcgagttcatcaagtgccagggagccctgcatgaggacgtggcacgcaagatgttccgacagctctcctccgccgtcaagtactgccacgacctggacatcgtccaccgggacctcaagtgcgagaaccttctcctcgacaaggacttcaacatcaagctgtctgactttggcttctccaagcgctgcctgcgggacagcaatgggcgcatcatcctcagcaagaccttctgcgggtcggcagcatatgcagcccccgaggtgctgcagagcatcccctaccagcccaaggtgtatgacatctggagcctgggcgtgatcctgtacatcatggtctgcggctccatgccctatgacgactccgacatcaggaagatgctgcgtatccagaaggagcaccgtgtggacttcccgcgctccaagaacctgacctgcgagtgcaaggacctcatctaccgcatgctgcagcccgacgtcagccagcggctccacatcgatgagatcctcagccactcgtggctgcagccccccaagcccaaagccacgtcttctgcctccttcaagagggagggggagggcaagtaccgcgctgagtgcaaactggacaccaagacaggcttgaggcccgaccaccggcccgaccacaagcttggagccaaaacccagcaccggctgctggtggtgcccgagaacgagaacaggatggaggacaggctggccgagacctccagggccaaagaccatcacatctccggagctgaggtggggaaagcaagcacctagcatgacaatggccccgttgtgtgtggtgggggtcggggttggggggcatggtgcagtcggccttcacgtaaactaagtaggcaggtaggatctgaagaaggcacaggtgcaagtaaaattcgtcaattaaaccactattttgattacgttccattagctttcttccacttagcagcaaagacgttccttactgaccaccaaataaaccacagggtgtgtgcaagcatcaagagtgcccagtgaggagtgtttttctctgggactcagccaaccgccccacctgacacacagtggtctccggcctaggagcacaggacagatgctcaggtacaggcagaatcacagtgtggcctggccttgtgggggacaagagggcctctgccagggtccacccaccaggcccacactgtctccctctgacctggccttgtccccaatgccctggggctggccagctccagtggtccacgactccccctggcttcctgcagttcagccccctctgacctacccccactccctcacaatccctcgctcagcatcctcctcttcctctatttcctggagtcatgtgagatttctgtcctcagccctcaagttccctgccctgtcctccaggggcagccccagctgagacctccccgtgtgccctccccacccagtggctcttcaagctgctcagcagcccttgatgatggcacactggccggtcttttgtgcttcctgctgggtcacccattgctcccaaagcatgcggcccacttgctggccaagtgctccaggtggtcagcacctagacatgctcctcccccctccctccccacttcctgggggctcccttgggataacgtgcaccctttcctaggggataaagcactgaaggccccacgtcccccaccccttaagagtcccagcctgatctgtccagcaacccactgttatctgggagctcctgttggtggaagtgaccaggtgaggccagggccagcagcataagatgggcagtgcctatagcagaggggtgagtgggatagtcccaccccatgagctggaagccaggtgctgggagaaggtgatagctgagatcacctgatatgcagcccccacacagtcctataaccagcgcacctcacagccggcaagcccagagtggaggctgcagacctgggcccagaaccgcaggggaacctaagggtacaacttccaagggctccgtttctcc

SEQ ID NO: 519 - DNA, 784 bp, Homo sapiens
  CDS (431)..(637)
gcggtggaattcccagaaaccaggaaggagggagcacagcctgccctgggtacacacggggaaactgaggctgcagaggaaagggctgggccaggacacctgggaaaggtgacttgggaagggctcctaggaaggcacagggctgtctgctctgcagagggctccagtggaaaggagggaatgaggagggaaggagaggccctgggtggaccagacggccacaccatgaaccctcccagagactttagacagagagaggcgctccacaacaccccacactccctctgccatctctcaccccctcctctgtccacacaggtcagcccaagactaccccgtcggtcattctgttcctgccgtcctgtgaggagccccaagccaacaaggccacactggtgtgtctcatgaataactttatccgggaatcttgatggtgacctggaaggcagatggtaccctcatcacccagagcgtggagaagaccacgccctccaaacagagcaacaacaagtacgtggccagcagctacctgagcctgacgcccgagcagtggaggtcccgcagaagctacagctgccaggttatgcaagaagggagcaccgtggagaagtcagtggcccctgcagaatgttcataggttccagcccccacccacacccacaggggcctggagctgcaggatcccaggggaggcgtctctctctgcatcccaagccattcagcccttctcgctgtacccagtaaaccctcaataaatatctttgtcagccagaaaaaaaaaaaa

SEQ ID NO: 520 - DNA, 2393 bp, Homo sapiens
  CDS (944)..(2275)
atttggccctcgaggccaagaattcggcacgagagcagttgggccaagatggcggccgccgagggaccggtgggcgacggcgagctgtggcagacctggcttcctaaccacgtcgtgttcttgcggctccgggagggactgaaaaaccagagtccaaccgaagctgagaaaccagcttcttcgtcgttgccttcgtcgccgccgccgcagttgctgacgagaaacgtggtctttggcctcggcggagagcttttcctgtgggacggagaagacagctccttcttagtcgttcgccttcggggccccagcggcggcggcgaagagcccgccctgtcccagtaccagagattgctttgcataaatccacccctgtttgaaatctatcaagtcttgttaagcccaacacaacatcatgtagcacttataggaataaaaggacttatggtattagaattacctaaaagatgggggaagaattctgaatttgaaggtggaaaatcaacagtgaattgtagtaccactccagttgcggagagatttttcaccagttccacctctctgactctaaagcatgctgcatggtatccaagtgaaatcctggatccccacgtagtgctgttaacatcagacaacgtaatcagaatttactcactacgtgagccgcagacacccactaacgtgataatactttcagaagccgaagaggaaagtctagtactcaataaaggaagggcgtataccgcatctctaggagagacagcagttgcatttgactttgggccattggcagcagtcccaaagactctatttggacaaaacggcaaagatgaagtagtggcatacccactgtacatcttatatgaaaatggagagactttcctgacatacatcagtctgttacacagccctggaaatatttggaaagctgttgggtccattgcccatgcatcctgcggctgaagataactatggttatgatgcgtgtgctgtactctgcttaccctgtgtccccaatatcttagtgatcgctactgaatcaggaatgctgtatcactgtgtcgtgctagaaggggaagaagaagatgaccacacgtcagaaaagtcctgggattccaggattgacctcattccttctctgtatgtgtttgaatgtgttgagttggagcttgctttgaaactggcatctggagaggatgacccttttgattctgacttttcttgtccagtcaaacttcatagagatcccaagtgtccttcaagatatcactgtactcatgaagctggtgtacatagtgttgggctaacttggattcataaacttcacaaatttcttggatcagatgaagaagataaggatagtttacaggaactctctacagaacagaaatgctttgttgaacacatcctttgtacgaggccattgccctgcaggcagccagctccaattcgaggattttggattgtacctgacattctgggacccacgatgatctgcatcaccagtacctatgaatgcctcatatggccgttattaagtacagtccatccagcgtctcctcccctgctttgtactcgagaagatgttgaagtggcagagtctcccctccgtgttctggctgaaaccccagattcctttgaaaagcatattagaagcattttgcaacgtagtgttgccaatccagcatttttgaaagcttctgaaaaggacatagcccctcctcctgaagaatgccttcagctcctcagcagagccacccaggtgttcagagagcagtacattctcaaacaggacttggcaaaggaggagattcagcggagggtcaaattattatgtgaccaaaaaaagaaacaactagaagatctcagttattgtcgagaagagaggaaaagtctgcgggaaatggctgagcgtttagctgacaaatatgaggaagctaaagaaaaacaagaggatatcatgaacaggatgaaaaaactacttcacagttttcactctgagctcccagttctctctgatagtgagcgagacatgaagaaagaattacagctgatacctgatcaacttcgacatttgggcaatgccatcaaacaggttactatgaaaaaggattatcaacagcaaaagatggagaaggtgttgagtcttccaaaacccaccattattctcagtgcctaccagcgaaagtgcattcagtccatcctgaaagaggagggtgaacatataagggaaatggtgaagcaaatcaatgatatccgcaatcatgtaaacttctgacaccaccaggagctgactcacacctgaactgaacaccattgaaggcttaaacccatattgtaaaacaggtagaattatctaatttataaaaaggtgttttgatgacaaaaaaaaaaaa

SEQ ID NO: 521 - DNA, 2393 bp, Homo sapiens; identical to SEQ ID NO: 520
  CDS (49)..(960)

SEQ ID NO: 522 - DNA, 4453 bp, Homo sapiens
  CDS (173)..(1909)
gctggtgtggggtggcttggaggctatggttggtgggtcctcgaagcacattctggttctgggccaggacctgaaggagccacagtgaaagagtgtttctggatgtatctgagacagacggagggaacccgagcgtcatgttagggtgaagcagaggacctcagtgctgaacatgctaaggaggttggacaaaatcaggttcagaggtcacaagagagatgacttcctcgatctagcggagtctccaaatgcctcggacaccgaatgcagcgacgaaatccccctgaaggtaccgcggacctcgccccgggacagcgaggagctgagggaccctgctggtccagggaccctcatcatggccacaggagtccaggactttaaccggacagagtttgatcgactgaatgagatcaaaggtcacctggaaattgccttattggaaaaacatttcttacaggaggagctccggaagctgcgagaagaaaccaacgcggagatgctgcggcaggagctggaccgcgagcggcagcggcggatggagctggagcagaaggtgcaggaggtgctgaaggccagaaccgaggagcagatggctcagcagcccccaaaagggcaggcccaggccagcaatggagcagagcgccggagccaggggctgtcctcgcgcctgcagaagtggttctacgagcggttcggggagtacgtggaggacttccggttccagcccgaggagaacactgtggagacagaggaacccctgagcgcccgcaggttaactgaaaatatgagacggctcaagcgcggtgccaagccggtcactaactttgtgaagaacctctctgccttatccgactggtactccgtctacacgtctgccattgccttcaccgtgtacatgaatgccgtgtggcatggctgggccatcccattgttcttatttctagcaattctgaggttatccctcaattacctcatcgccagggggtggcggatacagtggagcatcgtgcccgaagtgtctgagcccgtggaacctccaaaggaagacctgactgtgtctgagaagttccagctggtgctggacgtcgcccagaaagcccagaaccttttcgggaagatggctgacatcctggagaagatcaagaacttgttcatgtgggtccagccggagatcacacagaagctgtatgtggcgctctgggctgccttcctggcctcctgcttcttcccctaccgcctggtggggcttgccgtgggactctatgctggtatcaagttcttcctcattgatttcatctttaaacgctgcccgaggctgcgcgccaagtacgacacgccctatatcatctggaggagtctccccaccgacccgcagctcaaggagcgctccagcgccgcagtctcacgcaggctgcagacgacctcgtcacggagctacgtacccagcgcaccggccggcctgggtaaagaggaggacgccggtcgcttccacagcaccaagaagggcaatttccacgagatcttcaatctgacagaaaacgagcgtccgctggcggtgtgcgagaatggctggcgctgctgcctcatcaacagggaccggaagatgcccacggactacatcaggaacggggtgctctacgtcacggagaattacttgtgcttcgaaagctccaaatctgggtcctcaaagaggaacaaagtcatcaagctagtggacatcacggacatccagaagtacaaggtcctgtctgtcctcccaggctcaggcatggggattgccgtgtcgacgccatccacccagaaaccgctcgtgtttggtgccatggtgcacagggatgaggccttcgagaccattctcagccagtacatcaagatcacctcagcggcagcgtctggcggggacagctagtattgacttgcccaggacgttgctggaattttctttttctttttctttttctttttttttttttacgatttggtagtggaaacaattggacatcctcatgagcttttgcaataattttcctggacctgtggttctattgtgttgacctctgcgttttatcgaccaagaaggggccagggctcacagggacgggggtgcccctctcccacagggcacgtcaggtgcctctgagggccacccgcagactgggggagggggcagaggccctcgggggcccgtggagaagacacacaggacccctggccctgcccttctccgttccagcctggacagagaaacctctccagccaccccaagaggttctcgcaaccttgtgtcccgctctccagaggccagaagctcgtccaccaccaaagccatagctgaagagtgcggggcccttcctcctggggacagaaagatgtcgtcaaggagggacatgggggcctttcaccaaccaccgagaaacgggcctggcggccctccttcctcttacatgagaccctcctgtggcatttgcccttggtgccgggctggggccgggcgcagtgaccctgcctgcgctccacactcgctccacgggaacagagagggtgagaagggcccacccctcacctgccctcagtgtctttggtggcaccttccttgctggcctccagggcgctcagcaccgtgtctgtaagggcctgcctgctgctctcggcctgacacgccggccaggaggtctgtagctggggaccagtaagggcacaggatggtgcaggtaaaagcacatctttctcacactttgctctttggaaggcccaggagaacatccgcgaaggctgttggaggtgctccgagcactgtggcatgtctggcacatggcccccaggctgcggttgcctgggttggttgggggaggaagtggggaggagtgttccgggaccatggtggcccaggctgcagccgcctttgggccatccgagaggctctggcagcccctgtgctttagggagcaaccgtgagccgagcccagaggcctgggcctgcactgcctgcagccgacatgcgacagcgttccctcccccgcgtgcctagccggtgccggtccgggcacagacccccccagcccccgccctgccccagggaagcctgggcttcccgggaacaaggtggcatttgtggagggagcgcccgcaggcctggtctgctggggccgcctgcgctgggctgaagggagggaaaggcggcttgggcctcctggaaggaggtggccaccccgcgggcctgcgtgtctgctggggcggatcccgcagctccctcagcttgtcctgagtcccttgggtgtcgttgagattgttgttttttgaagaaacagaagattctattttttacagcgagcaagctggttttcttatttttgtatcctttttcagatgtaatttttatctttgctccgatcctcatttgctggtgtgggtgagggatccggcggcatgggctggtttcacccccttcacgaggggccgcagagtcacacgctggtgccgggggtgctttggggggagctgcgccgatcaccagattaagcacatgtcctatcccaggcggtggagcggagcccccgtggctctggactgcgcggacgttggcgtcaggatgaccacacggcggcctttcccgaatggggacagaacccgctctgagccgtgggtctggctcctgtaggggactggctctcttggtgcaccaggggagggggacatatcccagtgaaccccaccttggcgcctgaggcaacacagggtgggcactgacccacccccaggggcggctgcagaggcagtgcccgcagacaatggccacacctctctccccagggcccggcagtgcccaaggatgggtccggggcctcggggccaatgagcgcctcttcctaggtgctgggattcagtccccaaacacagcgggaggggtccctggggcagatggggctttaccagcgtcgggtggtttagttcgagtcccttttgtggagaaagggagatgaaaactgaccacgtgccaggtgtggccgaagcccccagggagggccacattcggggagcggggggtcgggggagggccaccgactggctctgctgccagcacaggcccctccctggaagtcctcgggagcggagcgcggatcggcacgggctctgggctccccgtggagagaagctgtagtttttaccaaattgtgtacatctgggcagatgtttaatttctgtgactaatcactgaactagacgaatgttaaattttttatgtctgaagcctgagtctattttggatctgtaaataatcattgccagtgtgacttttgttcaacaaaaggattgtactgtattaagaaccgatgaaaaaaattctcctgtaacatttttttaagaaaactttgtttgtttaaagaaaaagtattgtataaattataatttttatttaaataaacctaaaatgctttgtgctaaaaaaaaaaaa

SEQ ID NO: 523 - DNA, 1294 bp, Homo sapiens
  CDS (170)..(1189)
gctacttgttctttttgcaggatcccatcgataagcttgcttgttcttttggccgaagcggcctacggctgcgagaagacgacagaagggggcagcagcggcagccgagactcacggtcaagctaaggcgaagagtgggtggctgaagccatactattttatagaattaatggaaagcagaaaagacatcacaaaccaagaagaactttggaaaatgaagcctaggagaaatttagaagaagacgattatttgcataaggacacgggagagaccagcatgctaaaaagacctgtgcttttgcatttgcaccaaacagcccatgctgatgaatttgactgcccttcagaacttcagcacacacaggaactctttccacagtggcacttgccaattaaaatagctgctattatagcatctctgacttttctttacactcttctgagggaagtaattcaccctttagcaacttcccatcaacaatatttttataaaattccaatcctggtcatcaacaaagtcttgccaatggtttccatcactctcttggcattggtttacctgccaggtgtgatagcagcaattgtccaacttcataatggaaccaagtataagaagtttccacattggttggataagtggatgttaacaagaaagcagtttgggcttctcagtttcttttttgctgtactgcatgcaatttatagtctgtcttacccaatgaggcgatcctacagatacaagttgctaaactgggcatatcaacaggtccaacaaaataaagaagatgcctggattgagcatgatgtttggagaatggagatttatgtgtctctgggaattgtgggattggcaatactggctctgttggctgtgacatctattccatctgtgagtgactctttgacatggagagaatttcactatattcagagcaagctaggaattgtttcccttctactgggcacaatacacgcattgatttttgcctggaataagtggatagatataaaacaatttgtatggtatacacctccaacttttatgatagctgttttccttccaattgttgtcctgatatttaaaagcatactattcctgccatgcttgaggaagaagatactgaagattagacatggttgggaagacgtcaccaaaattaacaaaactgagatatgttcccagttgtagaattactgtttacacacatttttgttcaatattgatatattttatcaccaacatttcaagtttgtatttgttaataaaatgattattcaaggaaaaaaaaaaaaa

SEQ ID NO: 524 - DNA, 4567 bp, Homo sapiens
  CDS (338)..(3187)
gctctggagttcccgggtcgacgatttcgtagggccggtggcggcggcggctgcggctacggccggagacggcagtgttggcggtagtggtgggtggcaggggcctgtgaccgggagctgcccccggacccgggcaccatgagccaaggccccccccacaggggagagcagcgagcccgaagcaaaagtcctccacactaagcggctttaccgggctgtggtggaggctgtgcatcgacttgacctcatcctttgcaacaaaactgcttatcaagaagtattcaaaccagaaaacattagcctgaggaacaagctgcgtgagctctgcgtcaagcttatgttcctgcacccagtggactatgggagaaaggctgaggagctgctgtggagaaaggtatactatgaagttatccagcttatcaagactaacaaaaagcacatccacagccggagcactttggaatgtgcctacaggacgcacctggttgctggtattggcttctaccagcatctccttctctatatccagtcccactaccagctggaactgcagtgctgcatcgactggacccatgtcactgaccccctcataggatgcaagaagccagtgtctgcctcagggaaggagatggattgggcacagatggcatgtcaccgatgtctggtgtatctgggggatttgtcccgatatcagaatgaattagctggcgtagataccgagctgctagccgagagattttactaccaagccctgtcagtagctcctcagattggaatgcccttcaatcagctgggcaccctggcaggcagcaagtactataatgtggaagccatgtattgctacctgcgctgcatccagtcagaagtgtcctttgagggagcctatgggaacctcaagcggctgtatgacaaggcagccaaaatgtaccaccaactgaagaagtgtgagactcggaaactgtctcctggcaaaaagcgatgtaaagacattaaaaggttgctagtgaactttatgtatctgcaaagcctcctacagcccaaaagcagctccgtggactcagagctgacctcactttgccagtcagtcctggaggacttcaacctctgcctcttctacctgccctcctcacccaacctcagcctggccagtgaggatgaggaggagtatgagagtggatatgctttcctcccggaccttctcatctttcaaatggtcatcatctgccttatgtgtgtgcacagcttggagagagcaggatccaagcagtacagtgcagccattgccttcaccctggccctcttttcccacctcgtcaatcatgtcaacatacggctgcaggctgagctggaagagggcgagaatcccgtcccggcattccagagtgatggcacagatgaaccagagtccaaggaacctgtggagaaagaggaggagccagatcctgagcctcctcctgtaacaccccaagtgggtgagggcagaaagagccgtaagttctctcgcctctcctgtctccgccgtcgccgccacccacccaaagttggtgatgacagtgacctgagtgaaggctttgaatcggactcaagccatgactcagcccgggccagtgagggctcagacagtggctctgacaagagtcttgaaggtgggggaacggcctttgatgctgaaacagactcggaaatgaatagccaggagtcccgatcagacttggaagatatggaggaagaggaggggacacggtcaccaaccctggagccccctcggggcagatcagaggctcccgattccctcaatggcccactgggccccagtgaggctagcattgccagcaatctacaagccatgtccacccagatgttccagactaagcgctgcttccgactggcccccacctttagcaacctgctcctccagcccaccaccaaccctcatacctcggccagccacaggccttgcgtcaatggggatgtagacaagccttcagagccagcctctgaggagggctctgagtcggaggggagtgagtccagtggacgctcctgtcggaatgagcgcagcatccaggagaagcttcaggtcctgatggccgaaggtctgcttcctgctgtgaaagtcttcctggactggcttcggaccaaccccgacctcatcatcgtgtgtgcacagagctctcaaagtctgtggaaccgcctgtctgtgttgctgaatctgttgcctgctgctggtgaactccaggagtctggcctggccttgtgtcctgaggtccaagatcttcttgaaggttgtgaactgcctgacctcccctctagccttctgctcccagaggacatggctcttcgtaacctgcccccgctccgagctgcccacagacgctttaactttgacacggatcggcccctgctcagcaccttagaggagtcagtggtgcgcatctgctgcatccgcagctttggtcatttcatcgcccgcctgcaaggcagcatcctgcagttcaacccagaggttggcatcttcgtcagcattgcccagtctgagcaggagagcctgctgcagcaggcccaggcacagttccgaatggcacaggaggaagctcgtcggaacaggctcatgagagacatggctcagctacgacttcagctcgaagtgtctcagctggagggcagcctgcagcagcccaaggcccagtcagccatgtctccctacctcgtccctgacacccaggccctctgccaccatctccctgtcatccgccaactggccaccagtggccgcttcattgtcatcatcccaaggacagtgatcgatggcctggatttgctgaagaaggaacacccaggggcccgggatgggattcggtacctggaggcagagtttaaaaaaggaaacaggtacattcgctgccagaaagaggtgggaaagagctttgagcggcataagctgaagaggcaggatgcagatgcctggactctctataagatcctagacagctgcaaacagctgactctggcccagggggcaggtgaggaggatccgagtggcatggtgaccatcatcacaggccttccactggacaaccccagcgtgctttcaggccccatgcaggcagccctgcaggccgctgcccacgccagtgtggacatcaagaatgttctggacttctacaagcagtggaaggaaattggttgatactgacccccaggccctgcagtggggctgactccagatctctcctgccctccctggcagccaggaccagcacctgtagtcaccccaccacacgcagactcatgcacgcacacaggagggaggcctagctgctcagaggctgcagggagggcccaggagccggctgggagggtggggtccctttgttgccaagacgttaggaaagcgaggaaagtgcttggattaggagagtcttgtgggcccctggccagccttcctgcctcagctcccctgctgtctccaggggcaggtggtaggcatgggtacctgcatttcactggagtgggttcttggatctctgaggggaaggaacagcaaaagaggcccttcttcctcacccaagatgcagggtggttggggccaggagtttggaccctctaggtcttgggggaagagctgggtaatacctggtgtctgagtgattctctgcagacccttcccctcctcaaggatcacccatcctcctttcagccccctttatggggaccaggcagctctggagccagccacaggggctgttagagaagcaaggcctggagtggcctgcaccgagtagcagggtcagggttcgtgtgctcctcctcctgctgcaggggctgcacatcccattgccccacttctgctttgtgtctccctctgtctagcttccagggcagggagcaggccccacctagggctgcaggcagtctggcctgtgccagcacggtctcctgtgcccaccagccccacaggtgctgtgctttgtgctcttggctgctgtgctgggacagaatgggatgccaggaagagaagaaagggggtgcagtctgaggccaccaccccccttcctatctaagggagggctgaagacaaggggccggcattcagtgggcagcagaaaggagaggctccttgaagctgctcagtcagaggcccccgtccctccttttgccttccgcaggactgaagacctgaaggggctggcttttggagtgttgaggtgaatatctgggagcagagatcatgaatagctcagggcagtgaatggcgcaccaagagcagggctgtgtgtgggaggctgcagccaggattgcctcagctcctccccctcaggctgggaggatagcacaggctaggggctcggggtggagggtctcagctctgctgcccccaccccagtactagcctagcttcccaagctgtggcttagaggatagttggcttcctgcctctctcctctaaaatagcaagtctgggaaatcctggggtgagtggagtcaccccactcccagttgctggcagagactgagactaaagcatcacttaataaaccccccaagcccaaaaaaaaaaaaaaaa

SEQ ID NO: 525 - DNA, 4264 bp, Homo sapiens
  CDS (188)..(4261)
cgagcgttatcttcacttagcttcccgtacaagtgagaatatgtggtactcggttttccgatgatgtcctcgtatgctaacgatgatgtaggtactaaggttttgggcagtataatgtagtggtggagccagggttagagccaattcctcatcagtccgtctctctccaggagcctgtcagacaataatggtttttggtaccaaattcccagagagtaaaatagttctggccttaagaactaaacgggaaggccctggggaagttaggattcaagtttatgccttaaggataggtgagaatgagaacacagacagagaaagagacccaactcccaccccctgtccccagggacaccggatgatgacggagcctagggagaggagaggttacagtgtaccacctagaccagaggtccggacccaggccacggagtggagagtagaagaatctaacttcaacaagatcttcctgaaaaaagacgctgagcttggacggtccaaccacctccctacctgggataagccggaggatgcttcttggcttccccaaagctgtcttggtggtgatgctgtggcaaccacaggggagattcacgaggagaaagcctggaagaccagagccctggaagtggggcagccagcccagcgggacattcgtaggggcgagctctgggggaaggagcacggggctgatcaagccatccaggaaacactggaggacttgtccagccttgaaagaactctagtggtttctgaatctagcccacttggcggggattgtcaggaggtgaccactctcacggtgaaataccaagtgtcagaggaagtgccatctggtacagtgatcgggaagctgtcccaggaactgggccgggaggagaggcggaggcaagctggggctgccttccaggtgttgcagctgcctcaggcgctccccattcaggtggactctgaggaaggcttgctcagcacaggcaggcggctggatcgagagcagctgtgccgacagtgggatccctgcctggtttcctttgatgtgcttgccacaggggatttggctctgatccatgtggagatccaagtgctggacatcaatgaccaccagccacggtttcccaaaggcgagcaggagctggaaatctctgagagcgcctctctgcgaacccggatccccctggacagagctcttgacccagacacaggccctaacaccctgcacacctacactctgtctcccagtgagcactttgccttggatgtcattgtgggccctgatgagaccaaacatgcagaactcatagtggtgaaggagctggacagggaaatccattcattttttgatctggtgttaactgcctatgacaatgggaacccccccaagtcaggtaccagcttggtcaaggtcaacgtcttggactccaatgacaatagccctgcgtttgctgagagttcactggcactggaaatccaagaagatgctgcacctggtacgcttctcataaaactgaccgccacagaccctgaccaaggccccaatggggaggtggagttcttcctcagtaagcacatgcctccagaggtgctggacaccttcagtattgatgccaagacaggccaggtcattctgcgtcgacctctagactatgaaaagaaccctgcctacgaggtggatgttcaggcaagggacctgggtcccaatcctatcccagcccattgcaaagttctcatcaaggttctggatgtcaatgacaacatcccaagcatccacgtcacatgggcctcccagccatcactggtgtcagaagctcttcccaaggacagttttattgctcttgtcatggcagatgacttggattcaggacacaatggtttggtccactgctggctgagccaagagctgggccacttcaggctgaaaagaactaatggcaacacatacatgttgctaaccaatgccacactggacagagagcagtggcccaaatataccctcactctgttagcccaagaccaaggactccagcccttatcagccaagaaacagctcagcattcagatcagtgacatcaacgacaatgcacctgtgtttgagaaaagcaggtatgaagtctccacgcgggaaaacaacttaccctctcttcacctcattaccatcaaggctcatgatgcagacttgggcattaatggaaaagtctcataccgcatccaggactccccagttgctcacttagtagctattgactccaacacaggagaggtcactgctcagaggtcactgaactatgaagagatggccggctttgagttccaggtgatcgcagaggacagcgggcaacccatgcttgcatccagtgtctctgtgtgggtcagcctcttggatgccaatgataatgccccagaggtggtccagcctgtgctcagcgatggaaaagccagcctctccgtgcttgtgaatgcctccacaggccacctgctggtgcccatcgagactcccaatggcttgggcccagcgggcactgacacacctccactggccactcacagctcccggccattccttttgacaaccattgtggcaagagatgcagactcgggggcaaatggagagcccctctacagcatccgcagtggaaatgaagcccacctcttcatcctcaaccctcatacggggcagctgttcgtcaatgtcaccaatgccagcagcctcattgggagtgagtgggagctggagatagtagtagaggaccagggaagcccccccttacagacccgagccctgttgagggtcatgtttgtcaccagtgtggaccacctgagggactcagcccgcaagcctggggccttgagcatgtcgatgctgacggtgatctgcctggctgtactgttgggcatcttcgggttgatcctggctttgttcatgtccatctgccggacagaaaagaaggacaacagggcctacaactgtcgggaggccgagtccacctaccgccagcagcccaagaggccccagaaacacattcagaaggcagacatccacctcgtgcctgtgctcaggggtcaggcaggtgagccttgtgaagtcgggcagtcccacaaagatgtggacaaggaggcgatgatggaagcaggctgggacccctgcctgcaggcccccttccacctcaccccgaccctgtacaggacgctgcgtaatcaaggcaaccagggagcaccggcggagagccgagaggtgctgcaagacacggtcaacctccttttcaaccatcccaggcagaggaatgcctcccgggagaacctgaaccttcccgagccccagcctgccacaggccagccacgttccaggcctctgaaggttgcaggcagccccacagggaggctggctggagaccagggcagtgaggaagccccacagaggccaccagcctcctctgcaaccctgagacggcagcgacatctcaatggcaaagtgtcccctgagaaagaatcagggccccgtcagatcctgcggagcctggtccggctgtctgtggctgccttcgccgagcggaaccccgtggaggagctcactgtggattctcctcctgttcagcaaatctcccagctgctgtccttgctgcatcagggccaattccagcccaaaccaaaccaccgaggaaataagtacttggccaagccaggaggcagcaggagtgcaatcccagacacagatggcccaagtgcaagggctggaggccagacagacccagaacaggaggaagggcctttggatcctgaagaggacctctctgtgaagcaactgctagaagaagagctgtcaagtctgctggaccccagcacaggtctggccctggaccggctgagcgcccctgacccggcctggatggcgagactctctttgcccctcaccaccaactaccgtgacaatgtgatctccccggatgctgcagccacggaggagccaaggaccttccagacgttcggcaaggcagaggcaccagagctgagcccaacaggcacgaggctggccagcacctttgtctcggagatgagctcactgctggagatgctgctggaacagcgctccagcatgcccgtggaggccgcctccgaggcgctgcggcggctctcggtctgcgggaggaccctcagtttagacttggccaccagtgcagcctcaggcatgaaagtgcaaggggacccaggtggaaagacggggactgagggcaagagcagaggcagcagcagcagcagcaggtgcctgtga

SEQ ID NO: 526 - DNA, 2324 bp, Homo sapiens
  CDS (88)..(1113)
ggtttcatatgaactctcccgccacccgggaacagctggctgccaccgtttgtgttttccgagtttgtattcttgcaggtgaccaagatggagttttctggaagaaagcggaggaagctgaggttggcaggtgaccagaggaatgcttcctaccctcattgccttcagttttacttgcagccaccttctgaaaacatatctttaacagaatttgaaaacttggctattgatagagttaaattgttaaaatcagttgaaaatcttggagtgagctatgtgaaaggaactgaacaataccagagtaagttggagagtgagcttcggaagctcaagttttcctacagagagaagctagaagatgaatatgaaccacgaagaagagatcatatttctcattttattttgcggcttgcttattgccagtctgaagaacttagacgctggttcattcaacaagaaatggatctccttcgatttagatttagtattttacccaaggataaaattcaggatttcttaaaggatagccaattgcagtttgaggctataagtgatgaagagaagactcttcgagaacaggagattgttgcctcatcaccaagtttaagtggacttaagttggggttcgagtccatttataagatcccttttgctgatgctctggatttgtttcgaggaaggaaagtctatttggaagatggctttgcttacgtaccacttaaggacattgtggcaatcatcctgaatgaatttagagccaaactgtccaaggctttggcattaacagccaggtccttgcctgctgtgcagtctgatgaaagacttcagcctctgctcaatcacctcagtcattcctacactggccaagattacagtacccagggaaatgttgggaagatttctttagatcagattgatttgctttctaccaaatccttcccaccttgcatgcgtcagttacataaagccttgcgggaaaatcaccatcttcgtcatggaggccgaatgcagtatggcctatttctgaagggcattggtttaactttggaacaggcattgcagttctggaagcaagaatttatcaaaggaaagatgggttccagacaagtttgataaaggttactcttacaacatccgtcacagctttggaaaggaaggcaagaggacagactatacacctttcagttgcctgaagattattctgtccaatccaccaagccaaggggattatcatgggtgcccattccgtcacagtgatccagagctgctgaagcaaaagttgcagtcatacaagatctctcctggagggataagccagattttggatttagtaaaggggacacattaccaggtagcctgtcaaaaatactttgagatgatacacaatgtggatgattgtggcttttcttttgagtcatcctaatcagtacttttgtgagagccaacgtattctaaatggtggtaaagacataaagaaggaacctatccaaccagaaactcctcaacccaaaccaagtgtccagaaaaccaaggatgcatcatctgctctggcctctttaaattcctctctggaaatggatatggaaggactagaagattactttagtgaagattcttaggcagttttataaccctttttcctcaatagcctgtttcctgtttttaagattttgcctttgttgttgaaaaagggtttcactctgtcaccaaggcttagtgcagtgacacaattacagctgattgcagccttgaccttcccagctcaagtgatcctcctacctcagcctcccaagtagttgggaccacaggtgtgcacctcatatccagataatttttttcaatttttttttgtagaggtggggggtctccctatgttgcccaggcagatctcagactcctgggctcaagcgatcctcacacctcagcgtcccagagtgctgggattacagttgtgagccactgtgcctggcctttttttttttttaacctttttgtttaacttctctcttcactgcatcccaatccatctacaggcatgcacacttattaggaaaggaggtttgaggtaacaacagagactttcactatattttgctttgacagaaggaaagaggaggagtttctattaaaatctgtcacttgagtgatgtcatttaagtcctattttaggagataaaaacagctttggggactggttaaagtcccccagaaactacaataaagaacaacttttgttttaactcttaatcactttgtaattttgactcaatccttttctggaccatttttgttaataaatatcaaagtgtaaaaaaaaaaaaaaa

SEQ ID NO: 527 - DNA, 908 bp, Homo sapiens
  CDS (240)..(479)
  misc_feature (1)...(908): n = a,t,c or g
atttggccctcgaggcanagaattcggcacgaggagagactttcgcttccggctgccgcacgcttcgctggtgcaggtaagctccgcacactctcggccggtcccgagtccgactccctcaagggtgacgcgagctctgccctttaaccggaaacgtctccctgctcaccccacccccgcgcagacgcagtgctgagcacacagctaccggacaaagagtgacgcccggagctggagttatggcggctacggagccgatcttggcggccactgggagtcccgcggcggtgcaccggagaaactggaaggagccggttcgagctcagcccctgagcgtaactgtgtgggctcctcgctgccagaggcctcaccgcctgcccctgagccttccagtcccaacgccgcggtccctgaagccatccctacgccccgagctgcggcctccgcggccctggagctgcctctcgggcccgcacccgtgagcgtagcgcctcaggccgaagctgaagcgcgctccacaccaggccccgccggctctagactcggtcccgagacgttccgccagcgtttccggcagttccgctaccaggatgcggcgggtccccgggaggctttccggcagctgcgggagctgtcccgccagtggctgcggcctgacatccgcaccaaggagcagatcgtggagatgctggtgcaagagcagctgctcgccatcctgcccgaggcggctcgggcccggcggatccgccgccgcacggatgtgcgcatcactggctgagcggtggagctgcgggcggccagggccgggcgctctgtgcggactggggccatgatcgggcccgggggcctgagcctgggaccccaccccgtgttaatgaaaaatgagttttggcaaaaaaaaaaaaaaa

SEQ ID NO: 528 - DNA, 2411 bp, Homo sapiens
  CDS (210)..(2225)
ttcccgggtcgacgatttcgtaacgcggtgtcgctggttcagatctcgcagagctcagagtcctgcatgcctcagtcctcgcctcgctcctcctcgcggaggattctgggaggtgacgtcgcgggtctcggtcgcggggcccgtttgcagagcccgcggcgccgggaggactttgttcttcttcagaagagaaaactgaagaaggaggaatggctgtggggctttgtaaagccatgtcccaggggttggtgaccttcagagatgtggcgctagacttttcccaagaagagtgggaatggctgaagccatctcagaaggatttatacagagatgtcatgttggagaactacaggaacttggtatggcttggactctccatttctaagcccaacatgatctccttactggagcaagggaaggaaccgtggatggtggagagaaagatgtcacagggtcactgtgcagactgggagtcttggtgtgaaattgaggaattatctccaaaatggttcattgatgaagatgaaatatcccaggagatggtaatggaaaggctagcaagtcatggccttgaatgctccagtttcagagaagcctggaaatataagggtgaatttgagctacatcagggaaatgcggagaggcatttcatgcaagtgacagctgttaaggaaatctctactgggaaaagagacaatgaatttagtaattctgggagaagcatacccctgaaatcagtatttttaacacaacagaaagttcctaccatacagcaagtacataaatttgatatttatgataaactcttcccccaaaattcagtcataattgaatataaaagactccatgctgagaaggaatctttgataggtaatgaatgtgaagaattcaaccagagtacgtaccttagtaaagatataggaattcctcctggggagaaaccttatgaaagtcatgatttttcaaagctcttaagtttccactcattatttactcaacatcagaccactcattttggaaaattaccccatggatacgatgaatgtggtgatgcctttagctgttactcattctttactcaacctcagagaattcacagtggagaaaaaccatatgcatgcaatgactgtggaaaagcctttagccacgacttctttctcagtgaacatcaaagaactcatattggggagaaaccttatgaatgtaaggaatgtaacaaagctttcagacagagtgctcaccttgctcaacatcagaggatccacactggagagaaaccgtttgcgtgcaatgaatgtgggaaggcctttagccgttatgccttccttgttgaacatcagagaattcacacaggtgagaaaccatatgaatgtaaagaatgtaataaagccttcagacagagtgctcaccttaatcaacatcagaggattcacactggagagaaaccctatgaatgtaatcagtgtggaaaagccttcagcagacgcatagcccttactctacatcaaagaattcacacaggagagaaacccttcaaatgtagtgaatgtgggaagacctttggctatcgctcacacctgaatcaacatcagagaattcataccggagaaaagccctatgaatgcatcaaatgtgggaagttttttaggactgactcacaacttaatcgacatcatagaattcacactggagagagaccatttgaatgcagtaaatgtgggaaagccttcagtgatgctttagttctaattcaccataagagaagtcatgcaggagagaaaccctatgaatgtaacaaatgtggaaaggccttcagttgtggctcatatcttaatcaacatcaaagaattcatactggagagaaaccctatgaatgtagtgaatgtgggaaggcttttcatcagatcttgtccctaagactacaccagagaattcacgctggagaaaaaccttataaatgtaacgaatcacaaagagtccggcgctcagagctagcggtttcccgaggactcaccaccaagcccgcggacacaggccccgattccacacttaacgctgccaaagtggcagagccggcgcgggctgggacagaggcggcactgaggccggcgctgtcggtggctgagagcgccacaagtctcggtccgttacaccaggggcgacgcttcccagaggcccccgcggctcacccgggcgggactggcttcactgtttgcgcgtcctgagaagcagaccacggtgttccagggctcacagctccgcgcaggggagctcagcctaggttttgcacgagcggcctcccgcgagcccagctctgagagattgggagcgcaacttggtgctgagaagaatcgaatcgttccgacgaaatcgtcgacccgggaattccggaccggtacgtcaggcgtacg

SEQ ID NO: 529 - DNA, 1915 bp, Homo sapiens
  CDS (17)..(1522)
agcgagccgccacggtatgaccccaggggctctgctgatgctgctgggggcgctggggccgccgctcgccccaggcgtccgcggctcggaggcggagggtcgactccgggagaaacttttctctggctatgatagctccgtgcggccagcgcgggaggtgggagaccgtgtcagggtcagcgttggtctcatcctggcgcaactcatcagcctgaacgagaaggatgaagagatgagcacaaaggtgtacttagacctggagtggactgactacaggctgagctgggaccctgcggagcacgacggcatcgattcgctccgcatcacggcggaatccgtgtggctccctgacgtggtgctactgaacaacaatgatgggaattttgacgtggctctggacattagcgtcgtggtgtcctccgacggctccgtgcgttggcaacccccgggcatctatcgcagcagctgcagcatccaggtcacctacttccccttcgactggcagaattgcactatggtgttcagctcctacagctacgacagctcggaggtcagcctgcagacaggcctgggtcctgacgggcaagggcatcaggaaatccacattcatgaagggactttcattgagaatggccagtgggagaatatccacaagccctctcggctaatccagcctccaggcgatcctaggggagggagggaaggacagcgccaggaagtcatcttctacctcatcatccgccgcaagcctctcttctacctggtcaacgtcattgccccatgcatcctcatcactcttctggccatcttcgtcttctacctgccaccagatgcaggagagaagatggggctctcaatctttgccctgctgacccttactgtgttcctgctgctgctggctgacaaagtacctgagacctcactatcagtacccattattatcaagtacctcatgtttaccatggtcctcgtcaccttctcagtcatccttagtgtcgtggttctcaacctgcaccaccgctcaccccacacccaccaaatgcccctttgggtccgtcagatcttcattcacaaacttccgctgtacctgcgtctaaaaaggcccaaacccgagagagacctgatgccggagccccctcactgttcttctccaggaagtggctggggtcggggaacagatgaatatttcatccggaagccgccaagtgattttctcttccccaaacccaataggttccagcctgaactgtctgcccctgatctgcggcgatttatcgatggtccaaaccgggctgtggccctgcttccggagctacgggaggtcgtctcctctatcagctacatcgctcgacagctgcaggaacaggaggaccacgatgcgctgaaggaggactggcagtttgtggccatggtagtggaccgcctcttcctgtggactttcatcatcttcaccagcgttgggaccctagtcatcttcctggacgccacgtaccacttgccccctccagacccctttccttgaagactggagggttgagacccaggccccctgccagttgaagtgagagtttggtgatactgtcaagccccatccttctctgcctcttaactccttcacgaggaatctgggcctcttatttcgtttctggggactgcattggactgagggctgggtaggcaggtgtcttggacccacctgaaatgcagtatcatctgatttactctttgggatcttgaagaagctcttttgggtatcaacacctaggtcgccagtgaaatagaacacagaacaggaactagattataagccttatgaggtcaagaaatgtgacttggccgggcgcggtggctcacgcctgtaatcccagcactttgggaggccaaggcgggcggatcacctgaggtcgggagtttg

SEQ ID NO: 530 - DNA, 2045 bp, Homo sapiens
  CDS (644)..(1708)
ccactttgtacaagaaagctgggtacgcgtaagcttgggcccctcgagggatactctagagcggccgccctttttttttttttttttttttccagatttataatttaatggctgtgcagatcccagtccctcatttctgtcgctcacgtgcccactggtctggggtcagggttttctgttcaaaggcatggatgtgcgggagctcttctgctaggcacgcgttcaccagcctgtgtctctgaagcagcggtttcccctcgaacttggccgacaccaccaggactcggaagctacaggagcaacggttgagggtcgtgtcctccacctccacatgctccgcctccaggtcccgctgcagcttctcgcggaggtattcggcgctgagttccatggcggcagtccagctggaacggcagcccagcagggacacaaccccagctcgggcgccggccacgctaccttgctgccttacaggagccacttccgctggaaaactcacttccgcccttactaaggcgtacgtcaacgcagtacttccgccctcaagcaaccgggctttccagcggtccaggcttttcgcgcttgccatgtgtcagccaatcagagcctgagaaaggtgggactcgggcggagccgatgctgaatggtacgcgctcgccgactggacagcagtctggcttccgcggtcggacttctacacccgcctccagacaggagaggggcacgtaccggcgctacggcttcctgcaggctgcctccggatagtccccgagagcttgttccgaagcaagcaccctgcagccctagcgatccagccctcccctggaccctaggtcacggcaatcaaccccctgctgtggttcccgaaccccaaggcccgatgggtcccgcgggggtcgcggcgaggccagggcgctttttcggcgtctacctgctctactgcctgaacccccggtaccggggccgcgtctacgtggggttcactgtcaacactgctcgtcgggtccagcagcacaatgggggccgcaaaaaaggcggggcctggcggaccagcgggcgagggccctgggagatggtgctcgtcgtgcacggcttcccgtcctccgtggccgcccttcggtttgagtgggcttggcagcacccgcacgcctcgcgccgcctggcgcacgtggggcctcgcctgcgaggagagacagccttcgctttccacctgcgcgtgctggcgcacatgctgcgcgcaccgccctgggctcgcctcccgctcacgctgcgctgggtgcgcccagacctccgccaggacctctgcctcccgccgccgccgcacgtgcctctggccttcgggcctccaccgccccaggccccggccccaaggcgccgcgcaggtccctttgatgacgcggagcctgagccagaccagggggatccaggggcctgctgctccctgtgcgcccagaccatccaggatgaagaggggcccttgtgttgcccccaccctggctgcctgctaagggcccatgtgatctgcctggcagaggagtttcttcaggaagaaccagggcagcttctgcccctagagggccaatgcccttgctgtgagaagtcactgctttggggagacctgatctggctgtgccagatggacactgagaaagaagtagaagactcagaattagaagaggcacactggacagacctgctggagacctgatcctcagtgtccttaccccctcctacctcttttctgtgccacctgctgtgggtccagcaggtttttacttgagtacaataaaaagtctgagtcaagggtgccttatggtggatgctgaggggaggggcggagctagtagcccaaggtcctgccagtcacggggcttcctcaggggcacagaggaggcaggaggggcccctggccctagcacgtgaacagcttctactctgcctggaaaccccatgcctcagctttcccctacttgcctctgagctcatgcaattcttggaagcctgggagacttaccttgaaattgaatgcaaataggacaaagacc

SEQ ID NO: 531 - DNA, 5751 bp, Homo sapiens
  CDS (326)..(3688)
tgggggggggggggtcttgctacattgcccaggctcaaacttctgggctcaaatgatcctcctgcttctgcctcagcttctgcctcggcctccggagtagctgggactacaggcctgaaatactgtttctttaaggaagggcatgttacctataataccaaaccacaaaaggatagctgcggttttgggcgaggagagctcagagagtttcttgcatatggccctgtgatggcggccatggccctgcatagacacgagctggaatctgcaggtggcagccaggacgctgcgtgtgtcgagtgcacagtgtggcttggtgccaaccatggcgagggtggagagccccgtgcctgcagcgcgcgcttccctcactgggtcctgcgtccttgggcaggcgatgcccctgcggggaggggctggtccatccccggccagccacggacccacgcatggacccagcgacccacggacctgcttacctgggcgcggcgcgggtggcatgcggccacacggaaggggcgcgctgggctgctgcggcctctgcagcttctacacctgccacggggcggccggagatgaaatcatgcaccaggacatcgtcccgctctgtgctgccgacatccaggaccagctaaagaagcgctttgcttacctgtccggtgggcgggggcaggacggaagcccggttatcaccttccctgactacccggccttcagcgagattccggacaaggagttccagaatgtcatgacctacctcaccagcatccccagcctgcaggacgctggcatcggattcatcctggtgatagaccggcgacgggacaaatggacctccgtgaaggcgtccgtcctgcgcatcgcagcatctttcccggcaaacctgcagctcgtcctcgtgcttcgcccgacgggttttttccaaaggactctctccgacatcgctttcaaattcaatagagatgactttaagatgaaggtgccggtcataatgctgagctccgtaccagacttacacggttacatcgataagtcgcagctgaccgaggacctgggtgggaccctggactactgccactcccggtggctgtgccagcgcacggccatcgaaagtttcgccctcatggtgaagcagacggctcagatgctgcagtccttcgggaccgagctggctgaaacagagctgcccaatgacgtccagtcgacaagctcagtgctgtgtgcgcacacagagaagaaggacaaggcgaaggaggatttgaggctggcactgaaagaggggcacagtgtcctggagagcctcagggagctgcaggctgagggctcagagcccagtgtgaaccaggaccagcttgacaaccaggccaccgtgcagaggctcctggcccagctgaacgaaaccgaggctgccttcgatgagttctgggcaaagcatcagcagaaactggagcagtgtctgcagctccggcactttgagcagggcttccgggaggtcaaagccatcttggacgcagcgtcccagaagatagcaaccttcacagacatcggcaacagcctggcgcatgtggagcacctgctgagggacctggccagcttcgaggagaaatcaggcgtggccgtggagagggcccgggccctgtctctggacggcgagcagctcattgggaacaagcactacgcggtagactccatccgcccaaagtgccaggagctccggcacctctgtgaccagttctctgcggagatcgcaaggaggagggggctgctcagcaagtccctggagctgcaccgccgcctggagacgtccatgaagtggtgtgatgaagggatttacctgctggcctcacaacctgtggacaagtgccagtcccaggacggcgcggaggctgccctccaggaaatcgagaagtttttggagaccggtgcggaaaataagatccaggagctcaacgcgatttacaaggaatacgaatccatcctcaaccaagatctcatggagcacgtgcgaaaggtcttccagaagcaggcaagcatggaggaggtgttccaccgcaggcaggccagcctgaagaagctggcggccaggcagacgcggcccgtgcagccggtggcccccagacccgaggcactggcaaagtcgccctgcccctccccaggcattcggcgaggctctgagaactccagctccgagggcggtgcgctccggagagggccctaccggagggccaagagtgaggtgagtgagagccggcagggccgcggctcagcgggggaggaggaggaaagcctggccatcctgcgcaggcacgtgatgagcgagctcctggacacagaacgggcctacgtggaggagctgctgtgcgtcctggagggctacgccgcggagatggataacccactgatggctcacctcctgtcaacaggccttcacaacaagaaggatgttttgtttggaaacatggaggaaatctatcacttccacaacaggatattcctcagggagctggaaaactacactgactgcccagaactggttggaagatgctttctggagaggatggaagatttccagatctatgagaagtactgtcagaacaagccccgctctgagagcctgtggagacagtgctccgactgcccgtttttccaggaatgccagagaaagctggaccacaagctgagcctggactcctacctgctgaagccagtgcagaggatcaccaagtaccagctgctgctcaaggaaatgctgaaatacagcaggaactgcgagggggctgaggacctgcaggaggcgctgagctccatcctgggcatcctgaaggccgtgaacgactccatgcacctcatcgctatcaccggctatgacgggaatctcggcgacctgggcaagctgctgatgcagggctcgttcagcgtctggaccgaccacaagaggggccacaccaaggtgaaggagctggccaggttcaagcccatgcagcggcacctgttcctgcacgagaaggcagtgctcttctgcaagaagagggaggagaatggggaggggtatgagaaagctccctcctacagctacaagcagtccttaaacatggctgccgttggcattacggagaacgtgaagggagatgctaagaagttcgagatctggtacaacgcgcgcgaggaggtctacatcgtccaggcgccaactcctgagattaaagccgcgtgggtgaatgaaattcggaaagtgctgaccagccagctgcaggcttgtagagaagccagccagcaccgggcgctggagcagtcacagagcctgcccctgccggccccgaccagcaccagtccctcaagaggaaactcaaggaacatcaagaagctggaagaaaggaaaacagaccccctaagcctggagggatacgtcagctcagcgccactgacaaagccccccgaaaagggcaaaggttggagcaaaacgtcccactcactggaggcacctgaggacgacgggggctggtcaagtgcagaggagcagattaactcgtccgacgcagaggaggacggcgggttgggccccaagaagctggttccaggtaaatacacggtcgtggcggaccacgagaagggaggccccgatgcgctgcgcgtgaggagcggggacgtggtggagctggtgcaggagggcgacgagggcctctggtaagaccccgcgctcagccccggactgccccgcacgtggctgccgctgaccctcgccccttgcaggtacgtcagggacccgaccactggcaaggagggctgggtgccggccagcagcctgtccgtccggctcggcccgtccggctcggcccagtgcctgagcagctcaggtaaggcccacgtgccccgagcccacccgtgacgctgccaagggcccgggcgaggaagctgccccgtgtgtgcccggcagagccgacgccgaagcccgtccccgcctgatctccccgcagagtcgagcccggggtcggccgtgctgagcaactcgtccagctgcagcgagggcggccaggcccccttctccgacctgcaggggtagcgcggcctcggcgccggagacccgcgcgctgtctggggctgcggtggcgtggggagggcgcggcccccggacgccccgaggaaggggcacctcaccgccccgacccagagcgcctggccgtgcgggctgcagaggacccctccggggcagaggcaggttccacggaagaccccggcccgctggggcttccccggagactccagagcccacagaggaggggccgcagggaacagccccgggcggcaggcgccgggcagcggcatctcgtcctggctccaccgtgctgcttctgcctccggacggtgctttcaggggacgcgcggaccgtggtggagctgcttccggagaagtggaggatcctctggccaacggcctgaggagagcggggcacggggtctctttagcttttacaagttttaggattttttcaagcagggatcaatcccgtggccattttttgtggtactttggcctcaattcttcaccaggaatcactgtgtttacatgaaatgacaatttgatactgtatttgatagaaaactatttttttgttaccggggtttacatagaagcacgttgtttataccactaagtgactttggcggggctctcccatggaaacggatggcactccctgaagctccctggtcacaggtggatgaaaacgtgtccgtgggtgacatcaggtggtgtctccaccaccaaaagcagttagaagccaaggagattcctttatctacctagggttcattttcaaaagaaaatttaaactataatttaaacaattaacgttcttttctacaaaaaaaaatgcagggacttgatttttttaaagagcttcactgaattaggatatttttattgcttttaaagaaaatacaaagttgcagtttctgcagggtgtggcgtggaccagtgctgccgaccatagctcagagagccctgcccctgcctcactgcactgcagcctcctcggaggccgcacctccactccactccccacgcgccccctgcctcccacccaggtccacctgccacctggtgaccaccttgagtacagaagtgaaagtggggagagtattttattcaagtcacagcagaactggaaaaaaactcttctgttttaccaacttcttgtgtttcagaaacatattctgttcaaaacttttgaagccctttcggtgtctagtctgcagatgtttttgtatgtgtgcacctctgaccatgtgtgtacatatgtgtcttgctggaaaggacatattcgctgtccccgtgctgctgggagggccgcctcacagcctcacggttcccagccccagcacagtggaggcaggcgtggctgcattcccctcacgctaccctcccagcggcttgtagccgtcactggccagacctccagggtgcggaatcaaataggaagcatgcagagactcggcagcttttcctctgatgtgtaagttatttggaacgcgtgctgtgtcccgcgatgtccctgatgtactgtgcaggcgcggtgcctccgtctcgtcgcacagctgcgcgcccttgtgtgaccctccccataaaggcactttacagcttcatgtttcatccactgtcacttttttttaactgctgatgtaaatggaattttaaaagcagagttctttattgtatggatgacgtttgaataaatatcagcaactcctgcc

SEQ ID NO: 532 - DNA, 7516 bp, Homo sapiens
  CDS (235)..(6117)
ccggaattcccgggtcgacgatttcgtggagccgagctgggtgcggtgaggcgcgcagatcaccgcggttcctgggcagggcacggaaggctaagcaaggctgacctgctgcagctcccgcctcgtgcgctcgccccacccggccgccgcccgagcgctcgagaaagtcctctcgggagaagcagcgcctgttcccggggcagatccaggttcaggtcctggctataagtcaccatggcacagcaagctgccgataagtatctctatgtggataaaaacttcatcaacaatccgctggcccaggccgactgggctgccaagaagctggtatgggtgccttccgacaagagtggctttgagccagccagcctcaaggaggaggtgggcgaagaggccatcgtggagctggtggagaatgggaagaaggtgaaggtgaacaaggatgacatccagaagatgaacccgcccaagttctccaaggtggaggacatggcagagctcacgtgcctcaacgaagcctcggtgctgcacaacctcaaggagcgttactactcagggctcatctacacctattcaggcctgttctgtgtggtcatcaatccttacaagaacctgcccatctactctgaagagattgtggaaatgtacaagggcaagaagaggcacgagatgccccctcacatctatgccatcacagacaccgcctacaggagtatgatgcaagaccgagaagatcaatccatcttgtgcactggtgaatctggagctggcaagacggagaacaccaagaaggtcatccagtatctggcgtacgtggcgtcctcgcacaagagcaagaaggaccagggcgagctggagcggcagctgctgcaggccaaccccatcctggaggccttcgggaacgccaagaccgtgaagaatgacaactcctcccgcttcggcaaattcattcgcatcaactttgatgtcaatggctacattgttggagccaacattgagacttatcttttggagaaatctcgtgctatccgccaagccaaggaagaacggaccttccacatcttctattatctcctgtctggggctggagagcacctgaagaccgatctcctgttggagccgtacaacaaataccgcttcctgtccaatggacacgtcaccatccccgggcagcaggacaaggacatgttccaggagaccatggaggccatgaggattatgggcatcccagaagaggagcaaatgggcctgctgcgggtcatctcaggggttcttcagctcggcaacatcgtcttcaagaaggagcggaacactgaccaggcgtccatgcccgacaacacagctgcccaaaaggtgtcccatctcttgggtatcaatgtgaccgatttcaccagaggaatcctcaccccgcgcatcaaggtgggacgggattacgtccagaaggcgcagactaaagagcaggctgactttgccatcgaggccttggccaaggcgacctatgagcggatgttccgctggctggtgctgcgcatcaacaaggctctggacaagaccaagaggcagggcgcctccttcatcgggatcctggacattgccggcttcgagatctttgatctgaactcgtttgagcagctgtgcatcaattacaccaatgagaagctgcagcagctcttcaaccacaccatgttcatcctggagcaggaggagtaccagcgcgagggcatcgagtggaacttcatcgactttggcctcgacctgcagccctgcatcgacctcattgagaagccagcaggccccccgggcattctggccctgctggacgaggagtgctggttccccaaagccaccgacaagagcttcgtggagaaggtgatgcaggagcagggcacccaccccaagttccagaagcccaagcagctgaaggacaaagctgatttctgcattatccactatgccggcaaggtggattacaaagctgacgagtggctgatgaagaacatggatcccctgaatgacaacatcgccacactgctccaccagtcctctgacaagtttgtctcggagctgtggaaggatgtggaccgcatcatcggcctggaccaggtggccggcatgtcggagaccgcactgcccggggccttcaagacgcggaagggcatgttccgcactgtggggcagctttacaaggagcagctggccaagctgatggctacgctgaggaacacgaaccccaactttgtccgctgcatcatccccaaccacgagaagaaggccggcaagctggacccgcatctcgtgctggaccagctgcgctgcaacggtgttctcgagggcatccgtatctgccgccagggcttccccaacagggtggtcttccaggagtttcggcagagatatgagatcctgactccaaactccattcccaagggtttcatggacgggaagcaggcgtgcgtgctcatgataaaagccctggagctcgacagcaatctgtaccgcattggccagagcaaagtcttcttccgtgccggtgtgctggcccacctggaggaggagcgagacctgaagatcaccgacgtcatcatagggttccaggcctgctgcaggggctacctggccaggaaagcatttgccaagcggcagcagcagcttaccgccatgaaggtcctccagcggaactgcgctgcctacctgaagctgcggaactggcagtggtggcggctcttcaccaaggtcaagccgctgctgcaggtgagccggcaggaggaggagatgatggccaaggaggaggagctggtgaaggtcagagagaagcagctggctgcggagaacaggctcacggagatggagacgctgcagtctcagctcatggcagagaaattgcagctgcaggagcagctccaggcagaaaccgagctgtgtgccgaggctgaggagctccgggcccgcctgaccgccaagaagcaggaattagaagagatctgccatgacctagaggccagggtggaggaggaggaggagcgctgccagcacctgcaggcggagaagaagaagatgcagcagaacatccaggagcttgaggagcagctggaggaggaggagagcgcccggcagaagctgcagctggagaaggtgaccaccgaggcgaagctgaaaaagctggaggaggagcagatcatcctggaggaccagaactgcaagctggccaaggaaaagaaactgctggaagacagaatagctgagttcaccaccaacctcacagaagaggaggagaaatctaagagcctcgccaagctcaagaacaagcatgaggcaatgatcactgacttggaagagcgcctccgcagggaggagaagcagcgacaggagctggagaagacccgccggaagctggagggagactccacagacctcagcgaccagatcgccgagctccaggcccagatcgcggagctcaagatgcagctggccaagaaagaggaggagctccaggccgccctggccagagtggaagaggaagctgcccagaagaacatggccctcaagaagatccgggagctggaatctcagatctctgaactccaggaagacctggagtctgagcgtgcttccaggaataaagctgagaagcagaaacgggaccttggggaagagctagaggctctgaaaacagagttggaggacacgctggattccacagctgcccagcaggagctcaggtcaaaacgtgagcaggaggtgaacatcctgaagaagaccctggaggaggaggccaagacccacgaggcccagatccaggagatgaggcagaagcactcacaggccgtggaggagctggcggagcagctggagcagacgaagcgggtgaaagcaaacctcgagaaggcaaagcagactctggagaacgagcggggggagctggccaacgaggtgaaggtgctgctgcagggcaaaggggactcggagcacaagcgcaagaaagtggaggcgcagctgcaggagctgcaggtcaagttcaacgagggagagcgcgtgcgcacagagctggccgacaaggtcaccaagctgcaggtggagctggacaacgtgaccgggcttctcagccagtccgacagcaagtccagcaagctcaccaaggacttctccgcgctggagtcccagctgcaggacactcaggagctgctgcaggaggagaaccggcagaagctgagcctgagcaccaagctcaagcaggtggaggacgagaagaattccttccgggagcagctggaggaggaggaggaggccaagcacaacctggagaagcagatcgccaccctccatgcccaggtggccgacatgaaaaagaagatggaggacagtgtggggtgcctggaaactgctgaggaggtgaagaggaagctccagaaggacctggagggcctgagccagcggcacgaggagaaggtggccgcctacgacaagctggagaagaccaagacgcggctgcagcaggagctggacgacctgctggtggacctggaccaccagcgccagagcgcgtgcaacctggagaagaagcagaagaagtttgaccagctcctggcggaggagaagaccatctctgccaagtatgcagaggagcgcgaccgggctgaggcggaggcccgagagaaggagaccaaggctctgtcgctggcccgggccctggaggaagccatggagcagaaggcggagctggagcggctcaacaagcagttccgcacggagatggaggaccttatgagctccaaggatgatgtgggcaagagtgtccacgagctggagaagtccaagcgggccctagagcagcaggtggaggagatgaagacgcagctggaagagctggaggacgagctgcaggccaccgaagatgccaagctgcggttggaggtcaacctgcaggccatgaaggcccagttcgagcgggacctgcagggccgggacgagcagagcgaggagaagaagaagcagctggtcagacaggtgcgggagatggaggcagagctggaggacgagaggaagcagcgctcgatggcagtggccgcccggaagaagctggagatggacctgaaggacctggaggcgcacatcgactcggccaacaagaaccgggacgaagccatcaaacagctgcggaagctgcaggcccagatgaaggactgcatgcgcgagctggatgacacccgcgcctctcgtgaggagatcctggcccaggccaaagagaacgagaagaagctgaagagcatggaggccgagatgatccagttgcaggaggaactggcagccgcggagcgtgccaagcgccaggcccagcaggagcgggatgagctggctgacgagatcgccaacagcagcggcaaaggagccctggcgttagaggagaagcggcgtctggaggcccgcatcgcccagctggaggaggagctggaggaggagcagggcaacacggagctgatcaacgaccggctgaagaaggccaacctgcagatcgaccagatcaacaccgacctgaacctggagcgcagccacgcccagaagaacgagaatgctcggcagcagctggaacgccagaacaaggagcttaaggtcaagctgcaggagatggagggcactgtcaagtccaagtacaaggcctccatcaccgccctcgaggccaagattgcacagctggaggagcagctggacaacgagaccaaggagcgccaggcagcctgcaaacaggtgcgtcggaccgagaagaagctgaaggatgtgctgctgcaggtggatgacgagcggaggaacgccgagcagtacaaggaccaggccgacaaggcatctacccgcctgaagcagctcaagcggcagctggaggaggccgaagaggaggcccagcgggccaacgcctcccgccggaaactgcagcgcgagctggaggacgccactgagacggccgatgccatgaaccgcgaagtcagctccctaaagaacaagctcaggcgcggggacctgccgtttgtcgtgccccgccgaatggcccggaaaggcgccggggatggctccgacgaagaggtagatggcaaagcggatggggctgaggccaaacctgccgaataagcctcttctcctgcagcctgagatggatggacagacagacaccacagcctccccttcccagaccccgcagcacgcctctccccaccttcttgggactgctgtgaacatgcctcctcctgccctccgccccgtccccccatcccgtttccctccaggtgttgttgagggcatttggcttcctctgctgcatccccttccagctccctcccctgctcagaatctgataccaaagagacagggcccgggcccaggcagagagcgaccagcaggctcctcagccctctcttgccaaaaagcacaagatgttgaggcgagcagggcaggcccccggggaggggccagagttttctatgaatctatttttcttcagactgaggccttttggtagtcggagcccccgcagtcgtcagcctccctgacgtctgccaccagcgcccccactcctcctcctttctttgctgtttgcaatcacacgtggtgacctcacacacctctgccccttgggcctcccactcccatggctctgggcggtccagaaggagcaggccctgggcctccacctctgtgcagggcacagaaggctggggtggggggaggagtggattcctccccaccctgtcccaggcagcgccactgtccgctgtctccctcctgattctaaaatgtctcaagtgcaatgccccctcccctcctttaccgaggacagcctgcctctgccacagcaaggctgtcggggtcaagctggaaaggccagcagccttccagtggcttctcccaacactcttggggaccaaatatacttaatggttaagggacttgtcccaagtctgacagccagagcgttagaggggccagcggccctcccaggcgatcttgtgtctactctaggactgggcccgagggtggtttacctgcaccgttgactcagtatagtttaaaaatctgccacctgcacaggtatttttgaaagcaaaataaggttttcttttttcccctttcttgtaataaatgataaaattccgagtctttctcactgcctttgtttagaagagagtagctcgtcctcactggtctacactggttgccgaatttacttgtattcctaactgttttgtatatgctgcattgagacttacggcaagaaggcattttttttttttaaaggaaacaaactctcaaatcatgaagtgatataaaagctgcatatgcctacaaagctctgaattcaggtcccagttgctgtcacaaaggagtgagtgaaactcccaccctacccccttttttatataataaaagtgccttagcatgtgttgcagctgtcaccactacagtaagctggtttacagatgttttccactgagcatcacaataaagagaaccatgtgctaaaaaaaaaaaa

SEQ ID NO: 533 - DNA, 1880 bp, Homo sapiens
  CDS (215)..(1783)
gtgctctacaggagtttccaaagctcctttaacttacctgatgtcttacggctttgagcttgggtggagaaagggtaacagggctgtggcttgccgggaagacagaggaggagagtctgtgggcatggggcaggagtcaattctgtctcaggttcactggtgggaggctgagccggtggaaaagacaccgggaagagactcagaggcgaccataatgtcgttacgtgtacacactctgcccaccctgcttggagccgtcgtcagaccgggctgcagggagctgctgtgtttgctgatgatcacagtgactgtgggccctggtgcctctggggtgtgccccaccgcttgcatctgtgccactgacatcgtcagctgcaccaacaaaaacctgtccaaggtgcctgggaaccttttcagactgattaagagactggacctgagttataacagaattgggcttctggattctgagtggattccagtatcgtttgcaaagctgaacaccctaattcttcgtcataacaacatcaccagcatttccacgggcagtttttccacaactccaaatttgaagtgtcttgacttatcgtccaataagctgaagacggtgaaaaatgctgtattccaagagttgaaggttctggaagtgcttctgctttacaacaatcacatatcctatctcgatccttcagcgtttggagggctctcccagttgcagaaactctacttaagtggaaattttctcacacagtttccgatggatttgtatgttggaaggttcaagctggcagaactgatgtttttagatgtttcttataaccgaattccttccatgccaatgcaccacataaatttagtgccaggaaaacagctgagaggcatctaccttcatggaaacccatttgtctgtgactgttccctgtactccttgctggtcttttggtatcgtaggcactttagctcagtgatggattttaagaacgattacacctgtcgcctgtggtctgactccaggcactcgcgtcaggtacttctgctccaggatagctttatgaattgctctgacagcatcatcaatggttcctttcgtgcgcttggctttattcatgaggctcaggtcggggaaagactgatggtccactgtgacagcaagacaggtaatgcaaatacggatttcatctgggtgggtccagataacagactgctagagccggataaagagatggaaaacttttacgtgtttcacaatggaagtctggttatagaaagccctcgttttgaggatgctggagtgtattcttgtatcgcaatgaataagcaacgcctgttaaatgaaactgtggacgtcacaataaatgtgagcaatttcactgtaagcagatcccatgctcatgaggcatttaacacagcttttaccactcttgctgcttgcgtggccagtatcgttttggtacttttgtacctctatctgactccatgcccctgcaagtgtaaaaccaagagacagaaaaatatgctacaccaaagcaatgcccattcatcgattctcagtcctggccccgctagtgatgcctccgctgatgaacggaaggcaggtgcaggtaaaagagtggtgtttttggaacccctgaaggatactgcagcagggcagaacgggaaagtcaggctctttcccagcgaggcagtgatagctgagggcatcctaaagtccacgagggggaaatctgactcagattcagtcaattcagtgttttctgacacaccttttgtggcgtccacttaatttgtgcctatatttgtatgatgtcataatttaatctgttcatatttaactttgtgtgtggtctgcaaaataaacagcaggacagaaaaaaaaaaaa

SEQ ID NO: 534 - DNA, 1291 bp, Homo sapiens
  CDS (109)..(1185)
cttggacgagggggagagtggagaagagaagagaacaaaaagtaacttcaggatggggaccagtgaagtacttgcggcctgtacccagaatcaaaccccaagtttcacatgcctgaggatgtacgagaaaaaaaggaaaatcttctactcaattctgagagatctactaggctcttaacaaagaccagtcattcacaaggaggggatcaagctttaagtaagtccacagggtcaccaacagagaagttgattgaaaaacgtcaaggagctaagactgtttttaacaagttcagcaacatgaattggccagtggacattcaccctttaaacaaaagtttagtcaaagataataaatggaagaaaactgaggagacccaagagaaacgaaggtctttccttcaggagttttgcaagaaatacggtggggtgagtcatcatcagtcacatctttttcatacagtatccagaatctatgtagaagataaacacaaaatcttatattgtgaggtacctaaggctggctgttccaattggaaaagaattctgatggtactaaatggattggcttcctctgcatacaacatctcccacaatgctgtccactacgggaagcatttgaagaagctagatagctttgacctaaaagggatatatacccgcttaaatacttacaccaaagctgtgtttgttcgtgatcccatggaaagattagtatcagcctttagggacaaatttgaacaccccaatagttattaccatccagtattcggaaaggcaattatcaagaaatatcgaccaaatgcctgtgaagaagcattaattaatggatctggagtcaagttcaaagagtttatccactacttgctggattcccaccgtccagtaggaatggacattcactgggaaaaggtcagcaaactctgctatccgtgtttgatcaactatgattttgtagggaaatttgagactttggaagaagatgccaattactttttacagatgatcggtgctccaaaggagctgaaatttcccaactttaaggataggcactcttccgatgaaagaaccaatgctcaagtcgtgagacagtatttaaaggatctgactagaactgagagacaattaatctatgacttttattacttggactatttaatgtttaattatacaactccatttttgtagtttgcattcattttctaaaaccctgtatatacttaatgatgataagttcaaatcagctgtaatttttctataattctctgtatgacagaaatttaaaaaaaaaaaa

SEQ ID NO: 535 - DNA, 3754 bp, Homo sapiens
  CDS (1807)..(3744)
ggcgtagggcttctctagcaaccctctttcttcagattttgcatgtctccaagaaaaaacaacttgaaatttcttgaacacacagtttacttgttcatatctttaactatgctgttctcttttatctacaatgccatctatctcttccactgaaaacttccatttattcctcaaaatcctgctcaggtgctagcatatctgtgaagcgttctctgacctgttcctgaagtcaaacattccctcctcggtaatatttccatactttaaacttactattattgatggactccaaaaaaattctctttattgttgtgtctagccctatgatcctgatttcaagatcctgaaagacaagtttctatcccttacaaataccacaggacctggcacatagaagacacatttattgactcagtgttttcttcatgtttacattcttcaagtacacagctgtctatgcagtgaaaaatgtgctctacaagtagaaaaagaaatatgtgaagtgcacaatagacaatcctcaattcccataatgcagatgtgcatgagcaattattagcagttcaaagttgtttcattacggtaagtactattctaacaaactaactgccccaaccaattttgtctaggaagcatatatggttttaaagtgttgatttacgccagctgggcatggtgcttacgcctgcaatcccagcactttgggaggccaggcgggcggatcacaaggtcaagagatcgagaccatcctggccaacgtagtgaaaccccatctctattaaaaatacaaaaactagctgcgagtggtggcgcacgcctgtagtcccaggtcctcgaggccgggaactgggacgtgtgacagcaccctgtacacctctgcgtggccccccctcaccccgtgttgctccctcaccctgggcaccctcttcacccactgggcagcccccacccggggcccagagctctgtggtcatcttccgctttgtggagaaggccagtgtgaggccactgaatgggctacctgctccagggggcttgagtcggagctgggatctgggtggggtttctcctcccaggcccaccccagcccttgggcctggctccaaccggaagttacggctggaagcatccacatcagacccactccccgccagaggaggctcggccctacctggcagccggaaccttgtacatgggccgccagccccaccccaggttggagcagatggcctttactcctctctccccaatgggctggggggcccccctgagcgcctggccacactcttcggaggacctgctgacactggattcctgaaccagggggatacctggtcctccccccgggaagtctcctctcatgcccagagaatcgctagagccaaatgggaattcttctatggctccttggacccccccagctcaggtgctaagcccccagagcaggcccccccatctccacctggggtgggctcaaggcagggctctggggtggctgtggggcgagcagccaagtactccgagacagacctggacacggtgcccctgaggtgctaccgcgagactgacatcgatgaggtgctggctgagcgggaggaggccgactcggccatcgaaagtcagcccagctctgagggcccaccaggcactgcctacccacctgccccacggcccggcccactccctggccctcatcccagcctcggcagtggcaatgaggatgaggacgacgatgaggcaggtggggaagaagatgtggacgacgaggtgtttgaggcctctgaaggggcccggccagggagccggatgcctctcaagtcacctgtgccctttctacctgggacgagcccctcggctgatgggcctgactctttcagttgtgtgttcgaagccatcctggagtcacaccgggccaaaggcacctcctataccagcctcgcctcgctggaggccttggcctcacctggcccaacccagagccccttcttcacctttgagctgcctccccaaccccctgcaccccggcccgacccaccagctcccgccccacttgcccctcttgaaccggattctggtaccagctctgctgctgatggtccttggacacagagaggggaggaggaggaggcagaggccagagccaagctggccccagggagggagccccctagtccctgccactcagaggacagccttgggctgggggcagcaccccttggcagcgaaccacccctgagccagctggtgtccgactcagactcagagctggacagcacagagcggctggccctgggaagcacagacaccttgtccaatgggcagaaagcggacctggaggctgcgcagcgcctggccaagaggctgtaccgactagatggcttcaggaaggccgatgtggcccggcacctgggcaagaacaatgacttcagcaaactggtggctggggagtacctcaagttctttgtcttcacgggcatgactctggaccaagctctcagggtgtttctgaaggagctggccttaatgggtgagacccaggaacgagagcgcgtgctggcccacttctcccagcgatacttccagtgcaatcctgaagccctgtcctcagaggacggcgcccacacgctgacctgtgcgctcatgctgctcaacacggatctccacggccataacatcgggaagcgcatgacctgcggggacttcatcgggaacctggagggcctcaatgatggcggcgacttccctagggagctgctcaaggccttgtacagctccatcaagaatgagaagctgcagtgggccatagacgaggaggagctgagacgctctctgtctgagttggccgaccccaaccccaaggtcatcaagcggatcagcgggggcagtggcagtggctccagccctttcctggacctgactcccgagcctggggctgccgtctacaagcacggggccctggtgcgaaaggtgcacgcagaccctgactgcaggaagacacctcggggcaagcggggctggaagagcttccacgggatcctcaagggcatgatcctctacctgcagaaggaggagtacaagcctgggaaggccctttcagagacggagctcaagaatgccatcagcatccaccatgccctggccactcgtgccagtgactacagcaagaggccccacgtcttctacctgcgcacagctgactggcgggtcttcctcttccaggccccgagcctggagcagatgcagtcctggatcactcgcatcaatgtagtagccgctatgttctctgcgccccccttcccagctgctgttagctcccaaaagaagttcagccgccctctcctgcccagcgctgccacccgcctctcccaggaggagcaggtgcggacccacgaggccaagctgaaggccatggcaagtgagctgcgggagcaccgggccgcccagctgggcaagaagggccggggcaagaaggctgaagagcagcggcagaaggaggcctacctggagtttgagaaatcccgctacagcacctatgcagcgctgcttcgggtcaagctgaaggcaggcagtgaggagctggatgcagtggaggcagcactggcccaggccgggagcacagaggatggactccctccttctcactccagtccctccctgcagcccaaaccctccagccagccccgggctcagcgtcacagctcagagcctcggccaggggcaggcagtgggcggcggaagccctgagatgaggttt

SEQ ID NO: 536 - DNA, 2178 bp, Homo sapiens
  CDS (534)..(2105)
gggtcagggtttttgacgttcctcgccagctgcacaaacctcccggagcaagtgtgagtgtgggtgagagtgcgcgcgcgcgcacgggctggctgcgcttggcacgcttggtggcccagggtcccggggcccggggtcccgtctggcggcccgggattaccgtgacgtcacattgagcctctggccaccttggactgggacacctccggagcctcacagccccgcgccgcgccgcgcctcacctcgccaccacgcgcctttgggaacccgcatcttcttccttcccctgcccatccatgggcccttctgtcttccggaccccacgggccggaggggcgccttccggagcgcagggctcggcagccgggctgccctcggctctgcctccactggggccaaccaggcgaaggaaccggcgctgggcatccgcagcggtgtaaggaactgagacacctcactgctgggggcgcggaacagctgggctgagacgggaactcgacagggaagagagagacgggccagggacagccaccatgtccttcccacactttggacacccgtaccgcggcgcttcccagtttctggcgtcggcaagttccagcaccacatgctgcgaatctacccaacgctctgtctcagatgtggcatcaggctccaccccagcgcccgctctctgctgcgcaccctacgatagtcgactgctgggcagtgcgcgaccggagctgggcgccgccttgggcatctatggagcaccctatgcggccgctgcagctgcccagagctaccctggctacctgccctatagcccagagcccccctcactgtatggggcactgaatccacagtatgaatttaaggaggctgcagggagttttacatccagcctggcacaaccaggagcctattatccctatgagcggactctggggcagtaccaatatgaacggtatggcgcagtggaattgagtggcgccggtcgccgaaagaacgcgacccgggagaccaccagtacactcaaggcctggctcaacgagcaccgcaaaaacccctaccccactaagggtgagaagatcatgctggccatcatcaccaagatgaccctcacccaggtgtccacctggttcgccaacgcacgccggcgcctcaagaaagagaacaaaatgacatgggcgcccaagaacaaaggtggggaggagaggaaggcagagggaggagaggaggactcactaggctgcctaactgctgacaccaaagaagttactgctagccaggaggcccgggggctccggctgagtgacctggaagacctggaggaagaggaggaggaggaggaggaagctgaagacgaggaggtagtggccacagctggggacaggctgacggagttccgaaagggcgcgcagtcactgcctgggccgtgcgctgcagctcgagagggccgattggagcgcagggagtgcggcctggctgcgccccgcttctccttcaatgacccttccggatcggaagaagctgacttcctctcggcggagacaggcagccctaggttgaccatgcactacccatgcttggagaaaccgcgcatctggtctctggcgcacaccgcgacagccagcgctgttgaaggtgcacccccagcccggcctaggccacgaagtcctgagtgccgtatgattcctggacagcctcctgcctctgcccggcgactctcagtccccagagactccgcgtgcgacgagtcttcctgcatacccaaagcctttggaaaccccaagtttgccctgcagggactaccgctgaactgtgcgccgtgcccgcggaggagcgagcctgtagtgcagtgccagtacccgtctggagcagaaggtagtgggcccccagcggcgctgggagtatctatgcaaaagacacccacctaccgccccgcccggcaattgcacaccctctgccattccagtctgcccagaggagactcgctggtccctgctgtgctgctcagagagtttactagggttgggcaggcaccagggcttttagagaagtctaagactgtgggccagacgcacaccacagatttaaggggaccctccagtcgccctcgctgacccgcggcttagggtccggaaaattaaactgcgaaaagataaacattatttccagtcggctttgcgggattaa

SEQ ID NO: 537 - DNA, 2102 bp, Homo sapiens
  CDS (453)..(1769)
aaccctcctaaagggaataagcttgcggccgcgagaagccccgctctcctgtaaacgtccgcggaggagcagcaagcctccctgtgagtcggtgggagacaagacggagcggcggtaagggcggtagggaagtgaagcgcctctctccaccttgttagaagcgcgctgaaagcggcctgcctacccaccccatcgctgccgttttgcagtcgtcgctcccaccttccgctgccgcctggagggaagccggagcgacgggggtcacggcggcggtcagagggtaaaggtcttgctcccagcagcctccgcggtggatacgtcgccatcttggatccgcgggacaagaaaattcatgcgagggagacgtggtgggcggtccttcctgtgacacgacccttgagtgacagttctatttgattgcctccggtactgtgaggaaaggacacgactctatggtgaggactgatggacatacattatctgagaaaagaaactaccaggtgacaaacagcatgtttggtgcttcaagaaagaagtttgtagagggggtcgacagtgactaccatgacgaaaacatgtactacagccagtcttctatgtttccacatcggtcagaaaaagatatgctggcatcaccatctacatcaggtcagctgtctcagtttggggcaagtttatacgggcaacaaagtgcactaggccttccaatgagggggatgagcaacaatacccctcagttaaatcgcagcttatcacaaggcactcagttaccgagccacgtcacgccaacaacaggggtaccaacaatgtcacttcacacgcctccatctccaagcaggggtattttgcctatgaatcctaggaatatgatgaaccactcccaggttggtcagggcattggaattcctagcaggacaaatagcatgagcagttcagggttaggtagccccaacagaagctcgccaagcataatatgtatgccaaagcagcagccttctcgacagccttttactgtgaacagtatgtctggatttggaatgaacaggaatcaggcatttggaatgaataactccttatcaagtaacatttttaatggaacagacggaagtgaaaatgtgacaggattggacctttcagatttcccagcattagcagaccgaaacaggagggaaggaagtggtaacccaactccattaataaaccccttggctggaagagctccttatgttggaatggtaacaaaaccagcaaatgaacaatcccaggacttctcaatacacaatgaagattttccagcattaccaggctccagctataaagatccaacatcaagtaatgatgacagtaaatctaatttgaatacatctggcaagacaacttcaagtacagatggacccaaattccctggagataaaagttcaacaacacaaaataataaccagcagaaaaaagggatccaggtgttacctgatggtcgggttactaacattcctcaagggatggtgacggaccaatttggaatgattggcctgttaacatttatcagggcagcagagacagacccaggaatggtacatcttgcattaggaagtgacttaacaacattaggcctcaatctgaactctcctgaaaatctctaccccaaatttgcgtcaccctgggcatcttcaccttgtcgacctcaagacatagacttccatgttccatctgagtacttaacgaacattcacattagggataagttatttttctttttcagctggctgcaataaaacttggccgatatggtgaagaccttctcttctatctctattacatgaatggaggagacgtattacaacttttagctgcagtggagctttttaaccgtgattggagataccacaaagaagaacgagtatggattaccagggcaccaggcatggagccaacaatgaaaaccaatacctatgagaggggaacatattacttctttgactgtcttaactggaggaaagtagctaaggagttccatctggaatatgacaaattagaagaacggcctcacctgccatccaccttcaactacaaccctgctcagcaagccttctaaaaaaaaaaaa

SEQ ID NO: 538 - DNA, 4809 bp, Homo sapiens
  CDS (65)..(2884)
ttcgaaagccgtacgcctgcacgtaccggtccggaattcccgggtcgacgatttcgtcgccaagatggcgacgagtcagtatttcgacttcgcgcagggcggcggcccgcagtacagcacccaggctccgacccttcccctgcccactgtgggggccagctatactggacaacccactcctgggatggaccctgccgtgaacccggcctttcccccagctgccccggcagggtacggtggataccagccccactccggccaggacttcgcctacggcagccgaccccaggagcccgtccccacggccaccaccatggctacctaccaggacagttacagctacggacagtcagcagctgccaggagctatgaggacaggccgtacttccagtctgctgccctccagtctgggcgcatgacagccgcagactccggccagccagggacccaagaagcctgcgggcagcccagcccccatggcagtcacagccacgctcagcccccacagcaggcgcccatagtggagtccggacagccagcgagcaccttgtcctcgggatacacctaccccacggcgacaggcgtccagcccgagtcgtcagcttccatcgtgacctcctaccccccgccctcctacaaccccacctgcaccgcctacacggcaccaagctacccgaactatgacgcgtcggtgtactccgctgccagccctttctatcctccagcgcagcccccgcctcccccgggacccccgcagcagctgcccccgccgcccgcgcctgcaggctcaggaagcagccccagggccgactcgaagccaccgcttcccagcaagctgccgagacccaaggcggggcccaggcagctccagcttcactactgcgacatctgcaagatcagctgcgctggcccccagacctaccgggaacatctgggagggcagaagcacagaaagaaggaggcggcccagaagacaggcgtgcagcccaacgggagcccgcgcggggtgcaggcgcagctgcattgcgacctgtgcgccgtgtcctgcaccggggcggacgcctacgcggcccacatccggggatccaagcaccagaaggtcttcaagctgcacgccaaactggggaagcccattcccaccctcgagcctgcactggccacagagagcccccccggggcagaggccaagcccacgtcccccactggccccagcgtgtgtgcctcgagcaggccagcgctggccaagagacccgtggcctcgaaggccttatgcgaggggcctcctgagccacaggcagcaggctgcagaccccagtgggggaaaccagcccaacctaaattagagggtcccggagcacctacccaaggaggctcaaaggaagctcccgcgggctgctctgatgcgcagccggtgggcccggaatatgtggaggaggtgttcagcgacgaagggcgagtgcttcgcttccactgcaagctgtgcgagtgcagtttcaacgaccttaacgcgaaggacctgcacgtgagggggcggcggcaccggctgcagtaccggaagaaagtgaacccggaccttcccattgccacggagcccagcagccgggctcggaaggtcctggaggagcgcatgaggaagcagcggcacctggcggaggagcggctggagcagctgcggcgctggcacgcggagaggaggcggctggaggaggagccaccccaggacgtgccgccccacgcgccgcccgactgggcccagcctctgctcatgggcaggccggagtcacccgccagcgccccactccagcccgggcggcggccggcgtccagcgacgaccggcacgtcatgtgcaagcacgccaccatctaccccacggagcaggagctcctggccgtgcagagggccgtgtcccacgcagagcgggccctcaagctggtgtccgacacactggccgaggaggaccggggccgccgagaggaagagggtgacaagcgcagcagcgttgccccccagactcgggtcctgaaaggcgtcatgcgagtaggcatcctggcgaaaggcctcctcctgcgtggggacaggaacgtgcgcctcgctctgctctgctccgagaagcccacgcacagcctgctgcggaggatcgcccagcagctgccccggcagctccagatggtgaccgaggatgagtatgaggtctcctccgaccctgaagccaacattgtcatctcctcctgtgaggagcccaggatgcaggtcaccatatctgtcacctcacctctgatgcgggaggacccctccacagacccaggtgtggaggagcctcaggctgatgcaggtgatgtcctgagccccaagaagtgcctcgagtccctggccgccctccgtcatgccaggtggtttcaggctcgagccagcggcctgcagccatgcgtgatcgtcatcagggtcctgagggacctctgccggcgtgtgcccacctggggggccctgccagcctgggccatggagctgctggtggagaaggctgtgagcagtgcggctgggcccctgggccccggggatgcagtcaggcgagtcctggagtgcgtggccacagggacgctcctgacagacgggcccgggctccaggatccctgcgagagagaccagacagatgccctcgagcccatgaccctccaagagcgggaagacgtgaccgccagcgcccagcacgccctgcgaatgctggccttccggcagacccacaaggtcctgggcatggatctcctgccgcccagacaccggctgggggcccgcttccggaagaggcaacggggacctggcgagggagaggagggcgcaggggagaagaagcggggccggcggggcggagaggggctcgtgtgagccgcctacctcccccacctgcgggcctttgcatccctgcactcctggacgtgtgcgcgccgaccaatggctgcttcatccccgacgttggacaatggtcatttccttttgagtaacgctctgtaggtttcctttaaaacacctgtgcttcaggccgggcactgtggctcatgcctttaatcccagcactttgggaggctgagttgcttgagcctgagagttcaaggccagcccagacaacagagtgagacccccatctctccaaaatatttttaaaaatcagcttggcatggttggtggccaggcgcggtgattcacgcctgtaatcccagcactttgagaggccgaggtgggcagatcgcctgaggtcaggagttcgagaccggcctggtcaacatggtgaaaccctgtctctagtaaaaaacacaacaattagcctggcgtggtggtgtgcacctgtagtcccagctacttgggaggctgagtccggagccttgaggccaggagggcagtgagctgtgattgcaccgtgacactccagcctgggcaacagaagaagactttgtcacttaaaagaaatgttttttaacatttgtgcttaaattgttacagaaatgacaccatccagccctgggagtggcaccccttcctcgagggccccatcccccacagccaggggggccagcagtacagcaagcagattctaaactcgggggcatcttgctggctctaaactcacctcgtggtacaggaaggggttttaaaatacttcctctgggctgcgcatggtggctcacacctataatcccagcactttgggaggccaagcttggtggatcgcttgagcccagcggtttaagatcagtctgggcaatatggtgacaccccatctctacaaaaaattagccagttgtggtggcccaagcctgtagtcccagctactcgggaggctgaggccgtaggatcccttgagcccaggagttcgaggctgcagcgagccgagattgcgctactgaactccagcctgggttacagagcgagaccctgtctcaaagaaacaaacaaacaaacaaacaaacaaacaaaactttctttggatgcggctgcggcatggatttgaaatcacgtgggcaggccctgttctggggccccaccacatgtgcaggacaagcccaggggagctcccagccggcatccccacgcccccagcccagcctgctccaaacagaccccccacccacctccgcagccaggatgtcagcagggcctgagccaggctcgtcccctgtggggagagccacagggccaggtggacacgccgacgggcgatgaggatcctggctgggcctcccccgggaacagctgtgctggacagtcagacccggagcccagaggcacccccacccaccccccgccccgagccctgtaccactgagtgcctttcacagagaaaacccactctgccatgtgtcactgaggcctggatttgagcttccgtccttccttcctccctctctccctgatgtaggccttggctggccctgaggcagggggtccccaatccccccttgtggtagcagggcccgggacccgtgcctgggtgacccggggaggggccgccgtcttgtggatgctggccatggtgggcaggcgcctcctggcactgatggatgtgggggcacccccttctgagtccccaccccaacctgttcaaaccttccgcttggtcagtttttttttctttggccagctgcccagtggcattgaatgagaaaagtccacctttgggcagatgtgatctccagccagtggctcagttttgtttctctgtgtttgaaggacagcctgcatgtggctctgtctgaatgtctttgtagagctacctggaaattgggaggcagggggaataaaggaaatcatttgtc

SEQ ID NO: 539 - DNA, 1821 bp, Homo sapiens
  CDS (135)..(1391)
cggaagaaattgaaaccgttaaatttgatagccgtacgcctgcactaccggtccggaattcccgggtcgacgatttcgtcggcgacggggcgctctcgggctgccggcggggccgagcgccgcgcgtcccgagcatggcaggctccctgcctccctgcgtggtggactgtggcaccgggtataccaagcttggctacgcaggcaacactgagccccagttcattattccttcatgtattgccatcagagagtcagcaaaggtagttgaccaagctcaaaggagagtgttgaggggagttgatgaccttgactttttcataggagatgaagccatcgataaacctacatatgctacaaagtggccgatacgacatggaatcattgaagactgggatcttatggaaaggttcatggagcaagtggtttttaaatatcttcgagctgaacctgaggaccattattttttaatgacagaacctccactcaatacaccagaaaacagagagtatcttgcagaaattatgtttgaatcatttaacgtaccaggactctacattgcagttcaggcagtgctggccttggcggcatcttggacatctcgacaagtgggtgaacgtacgttaacggggatagtcattgacagcggagatggagtcacccatgttatcccagtggcagaaggttatgtaattggaagctgcatcaaacacatcccgattgcaggtagagatattacgtatttcattcaacagctgctaagggagagggaggtgggaatccctcctgagcagtcactggagaccgcaaaagccattaaggagaaatactgttacatttgccccgatatagtcaaggaatttgccaagtatgatgtggatccccggaagtggatcaaacagtacacgggtatcaatgcgatcaaccagaagaagtttgttatagacgttggttacgaaagattcctgggacctgaaatattctttcacccggagtttgccaacccagactttatggagtccatctcagatgttgttgatgaagtaatacagaactgccccatcgatgtgcggcgcccgctgtataagaatgtcgtactctcaggaggctccaccatgttcagggatttcggacgccgactgcagagggatttgaagagagtggtggatgctaggctgaggctcagcgaggagctcagcggcgggaggatcaagccgaagcctgtggaggtccaggtggtcacgcatcacatgcagcgctacgccgtgtggttcggaggctccatgctggcctcgactcccgagttctttcaggtctgccacaccaagaaggactatgaagagtacgggcccagcatctgccgccacaaccccgtctttggagtcatgtcctagtgtctgcctgaacgcgtcgttcgatggtgtcacgttggggaacaagtgtccttcagaacccagagaaggccgccgttctgtaaatagcgacgtcggtgttgctgcccagcagcgtgcttgcattgccggtgcatgaggcgcggcgcgggtccttcagtaaaagccatttatccgtgtgccgaccgctgtctgccagcctcctccttctcccgccctcctcaccctcgctctccctcctcctcctcctccgagctgctagctgacaaatacaattctgaaggaatccaaatgtgactttgaaaattgttagagaaaacaacattagaaaatggcgcaaaatcgttaggtcccaggagagaatgtgggggcgcaaacccttttcctcccagcctatttttgtaaataaaatgtttaaacttgaaaaaaaaaa

SEQ ID NO: 540 - DNA, 4596 bp, Homo sapiens
  CDS (369)..(2327)
atcgggtgattccgacaccgccctctgggaaaaccctcactaaagggaataagcttgcggccgcctgagaggaggcgggggctgttacctgcaacatcccggttgtccatcttgagactcatccaatcccacaatgctccggcgccccttaaggggccctgttatagtgtgcatcgcctgatgggagatgtagtccgcctcggtcagactcgccctattactgcttttacgactgggtttttttttttttaacctccagaaacggaagcctcagcctatcagcgatgcctaagtcccagtcacgataaccaaacggcgtcgcccttttacaccttcccggagcggcagtcatcccaaatacaaactacatgttccaggatgctttgggcggcagatctcgcggaagccgcgaggagagcccggccccgtctcgcgcgcctgcttccgcctccctgtggcggcggcttgttgttgtggaggccaaaatggcggctcaggcggcggcagcggcccaggcggcggcggcccaggctgcgcaggccgaggcggccgactcgtggtacctggcgcttctgggcttcgctgagcacttccgcacttccagcccgcccaaaatccgcctgtgcgtgcactgcctgcaggccgtgttccccttcaagccgccgcagcgcatcgaggcccgtacacacctgcagctgggctccgttctctatcaccacaccaagaacagcgagcaggcgcgcagccacctggagaaggcgtggttgatatcacagcaaatcccacagttcgaagatgttaaatttgaagcagcaagtctgttgtctgaattgtactgtcaagagaattccgttgatgcagcaaagccgctgctgcggaaggcgatccagatctcacagcagaccccatattggcactgccgcctgctcttccagctcgctcaactgcacacgcttgagaaggacctggtgtctgcctgtgacctcctgggtgtaggggccgagtacgcccgggtggtgggatctgaatacacacgggcgctgttcctcctcagcaaggggatgctgctgctgatggagcgaaagctgcaggaggtgcacccgctgctgaccctctgcgggcagatcgtggagaactggcaggggaaccccatccagaaggagtcgctgcgtgtcttcttcctggtgctccaggtcacccactatctggatgccgggcaggtgaagagcgtgaagccgtgtctgaagcagctgcagcagtgcatccagaccatctccacactgcacgatgatgagatcctgcccagcaaccccgctgacctcttccactggctgcccaaggagcacatgtgtgtgcttgtctacctggtgactgtgatgcactccatgcaggccggctacctggagaaggcgcagaagtacacggacaaggccctcatgcagctggagaagctcaagatgctggactgcagccccatcctgtcatccttccaagtgatcctgctggagcacatcatcatgtgccgccttgtcacgggtcacaaggccacggcgctgcaggagatctcccaggtctgccagctgtgccagcagtccccccggctcttctccaaccatgcagcacagctgcacacattgctgggcctgtactgtgtctctgtcaactgcatggacaacgcggaagcccagttcaccacggccctgaggctcaccaaccaccaggagctgtgggccttcatcgtcaccaacctggcgagtgtgtatatacgggaaggaaatagacaccaagaggtactctacagtctgctggagaggatcaacccggaccacagcttccctgtcagctcgcactgcctccgagcagccgccttctatgtgcgtgggctcttctccttcttccagggacgctacaacgaggccaagcgatttctgcgggaaactctgaagatgtccaatgctgaggacctgaaccggctcacagcctgctccctcgtgcttctgggccacatcttctatgtgctgggaaaccacagggagagtaacaacatggtggtgcctgccatgcagctcgccagcaagatcccggacatgtcggtacagctgtggtcgtcagcactgctgagagacctgaataaagcctgtgggaacgccatggatgcccatgaagccgcccagatgcaccagaacttctcgcagcagctgctccaggaccacattgaggcctgcagcctccccgaacacaacctcatcacgtggacagacggtccaccccccgtgcagttccaagctcagaatggacccaacaccagcctggccagcctcctgtgaggccttgatggggccatccagctccgcagggcctgcgcgtctccggcttccacccagacggcactcaagcctgcccccgaggcgtgcttccttcctgattgtctctagagcttccaagtcctgggaatgtgcggggccagtccctgccctcccaggaggggtggtagccgttcccacctcgcagcaggacccccagtgcagaggctcacaggtggcacacaggcgctgtctctccagagccatccttcagagtggacctcagtgccagtcctgcctcagcatctgggtcacgtcggccaggagtagggtgcaggcctccagcaggtcctaatcctgtgtgccagggcaggcagtgccccaggggcaccacgcctgactctccatcacccaggccttgatgccgagcgggagtagagtgtttcctctgctcaaggcaatttccagagcccggatgccagtttctggcctgaatttggagggaagaagtaatggccctagtgtgggacgaagcacagatcccagcacttttcccagctttctctccagcatcagtccctgcagcagctggggcctctggtcaggaaccctcagggacccaggaactcagcttccaaacatctgcaccttgaccggactcgccatcccgccgtgggggtgcaggtgattgtaaacacgggtgtgcatgtggatgcacacgggtgtgcggtgaagatctgtggagatggagctgggagctgaggctcctgttgcaccagccaccttcccccatcttgtggctgctgaggggcaggaagcgggggagtgggctcgtctcctaaatttaagatcacctcctcagctagcttagagtgcgtggcacgggccccccgcccccgagatctggagcccagggactttcttcctggcagatctgtggccttccctgctcagcctcttggtccccccactccctccaccgcctcaccttccctgctgggtctctggggcacagtgtgaaacccgcaccctagccaggccccagggagcctccgctgggcccagacagcagcgtttggttttatccacttttcttggataatcaggaggtgccccagtggtcacagtgtggcattccgagttggggcgggtggtcgggtcaagatagcagcagcaggtgtcagggctcaagacaccaccccctccagcttctggggcccaggagcctctccctgctacagggggtgggggtcctgctcagcagggtaggtggtggttttaggtcttgtcaccctcactcagtggaactgcctctgggagctttggcgtctgtgactaaagggacgctggattgctcaggtcagctgctcggggctcccaggctgggtgtgccttagccacaggcagggctgtcaataacccccttcctcactggccaccacctgacatcagcaccagtgacaggctggtcagagggcggggctggtgagggtttgtcctaagaggaccaccgccatctctgggtctccagggggagagcctggccctgtcctttgctacccagggctgcccccaggcccatgaagccaataggagagcgtgtggcactggcccacaaactgtccctgtcctgtcttcctcccgagccatggcctctgctagctccaccttgaaggagccccccacatcctcccctacatcccagagatgccaccacttgtgtctccacaatgtgctcctgcccacccgggttccgcactgtccgacccctgcacaccactcatgtcaccacggcgtgcatcatgttcatccccatctatttatttaagcctttctttgcttgtagggcattttgtatgtagagcagttgaaaacagaacctcagaacttaacatctgtcctgatgttaaagtgcttttcatgaccaccctgttatctatgtatatgtaaagttaaggatgagatcttaagtttacaattaaaaactcagtactcaatatttaatattctactcgagctttatggaagccaaatcatgtgcatgtgtgtgtgtgcgtgtgtgcaagctttgaacctccttccacagccgcatcttctcatgacacaaagcttttgataagtactttcctgtgggtcgctcagggcctcatagcatctcattcaattacaagaatagaggccagacacggtggcgcatgcctgtagtcccagctaactgggaggctgaggcaggaggatcacttgagcccaggagattgaggctgcagtgagcatgatcgcgacactgcactcc

SEQ ID NO: 541 - DNA, 4471 bp, Homo sapiens
  CDS (369)..(2162)
atcgggtgattccgacaccgccctctgggaaaaccctcactaaagggaataagcttgcggccgcctgagaggaggcgggggctgttacctgcaacatcccggttgtccatcttgagactcatccaatcccacaatgctccggcgccccttaaggggccctgttatagtgtgcatcgcctgatgggagatgtagtccgcctcggtcagactcgccctattactgcttttacgactgggtttttttttttttaacctccagaaacggaagcctcagcctatcagcgatgcctaagtcccagtcacgataaccaaacggcgtcgcccttttacaccttcccggagcggcagtcatcccaaatacaaactacatgttccaggatgctttgggcggcagatctcgcggaagccgcgaggagagcccggccccgtctcgcgcgcctgcttccgcctccctgtggcggcggcttgttgttgtggaggccaaaatggcggctcaggcggcggcagcggcccaggcggcggcggcccaggctgcgcaggccgaggcggccgactcgtggtacctggcgcttctgggcttcgctgagcacttccgcacttccagcccgcccaaaatccgcctgtgcgtgcactgcctgcaggccgtgttccccttcaagccgccgcagcgcatcgaggcccgtacacacctgcagctgggctccgttctctatcaccacaccaagaacagcgagcaggcgcgcagccacctggagaaggcgtggttgatatcacagcaaatcccacagttcgaagatgttaaatttgaagcagcaagtctgttgtctgaattgtactgtcaagagaattccgttgatgcagcaaagccgctgctgcggaaggcgatccagatctcacagcagaccccatattggcactgccgcctgctcttccagctcgctcaactgcacacgcttgagaaggacctggtgtctgcctgtgacctcctgggtgtaggggccgagtacgcccgggtggtgggatctgaatacacacgggcgctgttcctcctcagcaaggggatgctgctgctgatggagcgaaagctgcaggaggtgcacccgctgctgaccctctgcgggcagatcgtggagaactggcaggggaaccccatccagaaggagtcgctgcgtgtcttcttcctggtgctccaggtcacccactatctggatgccgggcaggtgaagagcgtgaagccgtgtctgaagcagctgcagcagtgcatccagaccatctccacactgcacgatgatgagatcctgcccagcaaccccgctgacctcttccactggctgcccaaggagcacatgtgtgtgcttgtctacctggtgactgtgatgcactccatgcaggccggctacctggagaaggcgcagaagtacacggacaaggccctcatgcagctggagaagctcaagatgctggactgcagccccatcctgtcatccttccaagtgatcctgctggagcacatcatcatgtgccgccttgtcacgggtcacaaggccacggcgctgcaggagggcctgtactgtgtctctgtcaactgcatggacaacgcggaagcccagttcaccacggccctgcggctctacagtctgctggagaggatcaacccggaccacagcttccctgtcagctcgcactgcctccgagcagccgccttctatgtgcgtgggctcttctccttcttccagggacgctacaacgaggccaagcgatttctgcgggaaactctgaagatgtccaatgctgaggacctgaaccggctcacagcctgctccctcgtgcttctgggccacatcttctatgtgctgggaaaccacagggagagtaacaacatggtggtgcctgccatgcagctcgccagcaagatcccggacatgtcggtacagctgtggtcgtcagcactgctgagagacctgaataaagcctgtgggaacgccatggatgcccatgaagccgcccagatgcaccagaacttctcgcagcagctgctccaggaccacattgaggcctgcagcctccccgaacacaacctcatcacgtggacagacggtccaccccccgtgcagttccaagctcagaatggacccaacaccagcctggccagcctcctgtgaggccttgatggggccatccagctccgcagggcctgcgcgtctccggcttccacccagacggcactcaagcctgcccccgaggcgtgcttccttcctgattgtctctagagcttccaagtcctgggaatgtgcggggccagtccctgccctcccaggaggggtggtagccgttcccacctcgcagcaggacccccagtgcagaggctcacaggtggcacacaggcgctgtctctccagagccatccttcagagtggacctcagtgccagtcctgcctcagcatctgggtcacgtcggccaggagtagggtgcaggcctccagcaggtcctaatcctgtgtgccagggcaggcagtgccccaggggcaccacgcctgactctccatcacccaggccttgatgccgagcgggagtagagtgtttcctctgctcaaggcaatttccagagcccggatgccagtttctggcctgaatttggagggaagaagtaatggccctagtgtgggacgaagcacagatcccagcacttttcccagctttctctccagcatcagtccctgcagcagctggggcctctggtcaggaaccctcagggacccaggaactcagcttccaaacatctgcaccttgaccggactcgccatcccgccgtgggggtgcaggtgattgtaaacacgggtgtgcatgtggatgcacacgggtgtgcggtgaagatctgtggagatggagctgggagctgaggctcctgttgcaccagccaccttcccccatcttgtggctgctgaggggcaggaagcgggggagtgggctcgtctcctaaatttaagatcacctcctcagctagcttagagtgcgtggcacgggccccccgcccccgagatctggagcccagggactttcttcctggcagatctgtggccttccctgctcagcctcttggtccccccactccctccaccgcctcaccttccctgctgggtctctggggcacagtgtgaaacccgcaccctagccaggccccagggagcctccgctgggcccagacagcagcgtttggttttatccacttttcttggataatcaggaggtgccccagtggtcacagtgtggcattccgagttggggcgggtggtcgggtcaagatagcagcagcaggtgtcagggctcaagacaccaccccctccagcttctggggcccaggagcctctccctgctacagggggtgggggtcctgctcagcagggtaggtggtggttttaggtcttgtcaccctcactcagtggaactgcctctgggagctttggcgtctgtgactaaagggacgctggattgctcaggtcagctgctcggggctcccaggctgggtgtgccttagccacaggcagggctgtcaataacccccttcctcactggccaccacctgacatcagcaccagtgacaggctggtcagagggcggggctggtgagggtttgtcctaagaggaccaccgccatctctgggtctccagggggagagcctggccctgtcctttgctacccagggctgcccccaggcccatgaagccaataggagagcgtgtggcactggcccacaaactgtccctgtcctgtcttcctcccgagccatggcctctgctagctccaccttgaaggagccccccacatcctcccctacatcccagagatgccaccacttgtgtctccacaatgtgctcctgcccacccgggttccgcactgtccgacccctgcacaccactcatgtcaccacggcgtgcatcatgttcatccccatctatttatttaagcctttctttgcttgtagggcattttgtatgtagagcagttgaaaacagaacctcagaacttaacatctgtcctgatgttaaagtgcttttcatgaccaccctgttatctatgtatatgtaaagttaaggatgagatcttaagtttacaattaaaaactcagtactcaatatttaatattctactcgagctttatggaagccaaatcatgtgcatgtgtgtgtgtgcgtgtgtgcaagctttgaacctccttccacagccgcatcttctcatgacacaaagcttttgataagtactttcctgtgggtcgctcagggcctcatagcatctcattcaattacaagaatagaggccagacacggtggcgcatgcctgtagtcccagctaactgggaggctgaggcaggaggatcacttgagcccaggagattgaggctgcagtgagcatgatcgcgacactgcactccagcctgggtgacggtgagactttgtctcaaaaaaaaaaaa

SEQ ID NO: 542 - DNA, 6076 bp, Homo sapiens
  CDS (1)..(1704)
atggccagtcacgtggacctgctgacggagctgcagctgctggagaaggtgcccacgctggagcggctgcgggctgcccagaagcgccgggcccagcagctgaagaaatgggcacagtacgagcaggacttgcagcaccgcaagcgaaagcatgagcggaagcgcagcacgggcggccgccgcaagaaagtgtccttcgaggccagcgtggccctgctggaggcctcgctgaggaacgacgccgaggaagtacgctacttcctgaagaataaggtcagccctgatttgtgcaatgaggacggactcacagccctacaccagtgctgcatcgacaactttgaggaaattgtgaagctgctcctctcccatggtgccaatgtgaacgccaaggacaacgagctgtggacacctctccatgctgcagccacctgcggccacatcaacctggtgaagatcctcgttcagtatggggccgacttgcttgctgtcaactcggatgggaacatgccatatgacctctgcgaggatgaacccaccctggatgtcatcgagacctgcatggcataccagggcatcacccaagagaaaatcaacgagatgcgggtggctcctgagcagcagatgattgcggacatccactgcatgatcgcagcgggccaggacctggactggatagatgcccagggtgccacactgctgcacatagctggagccaatggatacctgcgggcagctgagctcctcctggaccatggagtgcgtgtggatgtgaaggactgggatggctgggagcccctgcatgcagctgccttctggggacagatgcagatggcagagctattggtgtcccatggagctagtctcagtgcaaggacatccatggatgagatgccaatagacctgtgcgaggaggaagagttcaaggtcctgctgctggagctaaaacacaagcatgatgtgatcatgaagtcacagctgaggcacaagtcatccttgagccggaggacctccagcgcaggcagccgtgggaaggtggtgcggcgagccagcctgtcggacaggaccaacctgtataggaaggagtatgagggagaggccatcctgtggcagcggagtgcagctgaggatcagcggacctccacctacaacggggacatcagggagaccaggacagaccaagagaataaggaccctaaccccaggctggagaagcccgtgctactctccgaatttcctaccaagatcccacgaggtgaactggacatgcctgttgagaatggcctccgggctccggtcagtgcctaccagtatgcgctggccaacggggatgtctggaaggtgcatgaggtgcctgactacagcatggcctatggcaaccctggcgtggccgacgccaccccgccctggagcagctacaaggaacagagccctcagacgcttctggagctgaagcggcagcgggctgcagccaagctgctcagccaccccttccttagcacacacctgggcagcagcatggccaggacgggcgagagtagcagtgaaggcaaggcccccttgatcggaggcagaacttcaccgtacagcagcaatgggacctcggtatattacacggtcaccagcggagatcccccactcttaaagttcaaggcccccatagaggagatggaggagaaggtgcatggctgttgccgtatctcctagtctccgtgtgatggaggagggagatgcctggggaggggctcctggaatccaggccagcccaacaaccctggctggggaggtgtcagggcagctggggagaggtgggctctgcttttcagaggaactcagaccccagccctcagctggctgcccatagcatcccatgtcccacgtcccgtggttctgcttcctgctgcatcgtctgccatctgacacaaggcctgtcgtggcctcctggttcactctgctgtctgatcttgggagggtgggcttgagatcccagctctattcttggtataaaggcttctccggatcagtacatgcatgtcacattaacacacacacacacacacacatatacacacacacacaagctcgatcagtgtgtgtaggaatgacatacctgggctcaggggaagcaagggggcttagaatttgtggggtattcccaaaaggatggaagttaagactcagagtctcattaccactgccaatgtggttttagcaggggaggggacctgctaagctgagacccatagtcctgctcagagttatcccaaagtctgagccaccagccacacctgacaggggtgagaagtcctcgctgtgttcagagggagccaggaatctacatgggtagatgagatagacacagacctgctccccgcagccttgttgagagccacacttctgcccatgccaggagccagctgtgtgaccatccaggggtggagggggaaaaccaggcaatttcgttcctggaatcaaccaaatcatgttttcctcttggatggaagtgtcaaaggcagaagggtgtgggagggggacaaggtcagtatttaccaaagtgtatctgattttaaaaattcctttagtctgtaaaactcctagagggagggaggtaactgaattcacttctttttgtggatcgtatcaaggtcactgggttttactggctggtgctgggaaaatgaagctaagtgaggagcttccattggaatgcttttccagggagagaggccagttaatttaaaaaaaacagtcgctagttaacagcgacagagcccagcaccctggggtctttgtgaatatccagactgtttcagcccagcccatctcagccaaccctccttagactgagctgtcagagcaagcaattaggggccagcctgcctccacctcccacccccttccacctccatcagtcatgtgtgcagagtcagtgctcgggatcccgggcccagcttttgcctttttggggatgcttggtgagacagatttgccagtcagcccttttgagttcccggctcacccaggggctcccagcctgcacttgcaggagtggtgatgccccaagtctgcgaatccagggtgcacgtggtcaatatcccctcctgcattcaggagagccatggtagggctggagttgggtcttgcccagccctgcagtttcatagtcccagccttcctggtgctggggagggaggactgtgaatggctgttctcccctcactgctgagtctcccaggaccccctttggagatgcccatggcatgggcactgcccacaggctcagccagaacctcttggtgtacccgataagctgcaggttatcccttgctctgtgcgccttttatttgtccttaaactacctccttagagctctgaaggggtctcctagttccagattttaatttggggaacagatctgggttctttttaaccctcttctttctcagtctatgagaaacttgccctgaggggcacctgggctaggggcttgggactggaagaccatccccgccttgtgccacaactttggtcatgggatctgctctttgtcattcttagccccctactgtggcccccatagccccataacccagagagggagctggacttcagggagcctgagtgatgctttcccaggagcagggcagctggctggaccagaaagtagagggcccatgggagtgactgcacccttggtggctgctggaaggggagaggttctcagcatcaggccacctccaccccaatgccaggatagatgtattctggagtaggggtggaggcggcccaggaggctgaagacaggtgcacagatgcttcccacgaccttgccatttggggtgggctcttcaacatctcaggctgtggctggaacaggacaggatgatctaaaacacacgtaccattggctgtaaaacagtatgagcccagactgacgctgaaatccctcatgagccaaccttagctacaaggtagggagttctgagggaagccgcgtgctcctcaggagagagctgtttaggttttccgatctttttgctcaggggccaaacactgaaggcacgtactgcccaacccactgagcgcctgaggccattccctccttttccgcatggctcctgcctcctgggctattcctctccacccagaaggctgggaatcccagctgattccctgacaggagccgacttcacacacaggtgactctcaggcattggctcatgttttcagccagggataaaccatcccttcttggggctttaagtccctggggagctttccctgtaggtctcctgggtgttgagagacaagttggagaccaacctccaatgaatgagccgcggtcattcattaattcactcacgtaatttactgagtagctgcaacatgccagcctctacgttaggttctgcggataaaggaggaataagacagagtcaggagaactgttccttgtggtttccgtcccttggggaccacaggcatcagcagtcccattcaagtcacctgaggcaaagtgtctgcatcttcgtccagcgaccctttgcttttcggctcctagaatccttagagtctgaattcctttagctgggaacagctgtcatggtcacccctggataacatttgccaccaagtatagatgctggatcttgggttccaggcagacatcatccaggtccatctggaactttcagtgatagctgccttcagccagcatctttgggggactctataatagcagcttgagatcagtgtctagaagactgttctgcaatttgctgccaaatgcatctcaggtttttaaagtcattgtttcttgctcatggtggctcatttattacatagtcccctcaccccactaatggataatgggaggaaaagttgctgcttccttcagcatcaaagcctttccttgggaatctgcctccctccatggcaggggtggattcgggagctgggagtaaccaggcaaagtcaaccagatgcctagctcctgctgagacccaggtcctatggcagctcctcattagattaaaggagaccacttccaaagcaggtgctgcatggctcaccatcatatgccccaaacaactgaaagttggcggttatcaccagactgtgagtttctggcaagtagcttggggaagctgaataaactctaggcccagggctactaaagacttcaggatagaattctccatcaaatatacagcataagtaaaactgctctgcactgtttaatccatttccaaggggcttagaaaagctaacaagggtgtgtcccctgtcctgccccaccggtttgctggctttgtaataacataagaccattgtggttgttggtgtcagataccttcccatcctgagctctctcacctacctgctctctctcctagagcaggatactggggtacttttaagaagggtgctccttttaagatgcccagaaaagctgtatttaactcttgctatttgtaacttggggatggtctcccctgccccagggcacataagagcaaaggctccaatggtcagtggatgactctgcaaaagtgaccccctgtgccagaagctatagccctctccccaacaggtctctcttgttggccagagggcctgcttcccatgggcattgcaagtgccaccgtgcggggcctggctctgcacacccaggaaaagtctgcagacccccagccctccgcaataattcaccagaccagaagccactggtgtacagagaacacttaaaaaaatgtattttatgtgaaaaaaaattaaaactctgtatactgtatcagcagctttgtgtaaaaatggcaatcaagagagtctaatatatttaaaacttttttaaaaaaaatcttcgcagatctttgatatcgtactgaggtaacttccacgtagccccttgccacgcggcaccggtgggccttgggtccaaaactgtggctcagccacatcccaaagggggcacatgtccctggagttgcttccagctgccaaggcctgtgacagaattcgctgttaagagtttttaattaaaattattaaattccttttaataacaaaaaaaaaaaaa

SEQ ID NO: 543 - DNA, 1384 bp, Homo sapiens
  CDS (368)..(1111)
atttggccctcgaggccaagaattcggcactagataacctggagccggcggcgtaagttggctctttagggcttcaccccgaagctccaccttcgctcccgtctttctggaaacaccgctttgatctcggcggtgcgggacaggtacctcccggctgctgcgggtgccctggatccagtcggctgcaccaggcgagcgagacccttccctggtggaggctcagagttccggcagggtgcatccgggccttgtgtgtggcgcgaggcacggaaaccggtacccgggtcctggccccagcgctgacgttttctctcccctttcttctctcttcgcggttgcggcgtcgcatacactagtgtgagcccccatggcagatacgaccccgaacggcccccaaggggcgggcgctgtgcaattcatgatgaccaataaactggacacggcaatgtggctttctcgcttgttcacagtttactgctctgctctgtttgttctgcctcttcttgggttgcatgaagcagcaagcttttaccaacgtgctttgctggcaaatgctcttaccagtgctctgaggctgcatcaaagattaccacacttccagttaagcagagcattcctggcccaggctttgttagaggacagctgccactacctgttgtattcactcatctttgtaaattcctatccagttacaatgagtatcttcccagtcttgttattctctttgcttcatgctgccacatatacgaaaaaggtccttgacgcaaggggctcaaatagtttacctctgctgagatctgtcttggacaaattaagtgctaatcaacaaaatattctgaaattcattgcttgcaatgaaatattcctgatgcctgcgacagtttttatgctttttagtggtcaaggaagtttgctccaaccttttatatactatagatttcttacccttcgatattcgtctcgaagaaacccatattgtcggaccttatttaatgaactgaggattgttgttgaacacataataatgaaacctgcttgcccactgtttgtgagaagactttgtctccagagcattgcctttataagcagattggcaccaacagttccatagtttaacatctagttaagctacaaatatagtataagcattattagcagctggtacttctgctaggggttgtaaattccaggtgttacactgacctcaatccaatttacataatttacataaatgcatctcggtggaaaaataatcattttcttggcatgttaaatcaagcttaaaaagttttgagaaaattttactgtgctgtgttgctaatggttaaagaagtctgtatctagtgataaatataccagtttttttaaaaagaaaaaaaaaaaa

SEQ ID NO: 544 - DNA, 5055 bp, Homo sapiens
  CDS (1649)..(4648)
atggcagctgcggaccgtctccgcggcgcgtgggcttcgtgggcgcgggcgcatggcggggccatcgcgcagggcctcatcagagcaggaaaagtggaagctcagcacatactggccagtgcaccaacagacaggaacctatgtcactttcaagctctgggttgccggaccacgcactccaaccaggaggtgctgcagagctgcctgctcgtcatctttgccaccaagcctcatgtgctgccagctgtcctggcagaggtggctcctgtggtcaccactgaacacatcttggtgtccgtggctgctggggtgtctctgagcaccctggaggagctgctgcccccaaacacacgggtgctgcgggtcttgcccaacctgccctgtgtggtccaggaaggggccatagtgatggcgcggggccgccacgtggggagcagcgagaccaagctcctgcagcatctgctggaggcctgtgggcggtgtgaggaggtgcctgaagcctacgtcgacatccacactggcctcagtggcagtggcgtggccttcgtgtgtgcattctccgaggccctggctgaaggagccgtcaagatgggcatgcccagcagcctggcccaccgcatcgctgcccagaccctgctggggacggccaagatgctgctgcacgagggccaacacccagcccagctgcgctcagacgtgtgcaccccgggtggcaccaccatctatggactccacgccctggagcaggcgggactgtatgccaagcctgggcaggcctgggagcctggggtctggtgcaggcggccccctgaaggaaggtggacagcccttctgacggccacctgcattcacaccaagcccatctgcaaggagaaatcattgactttgcaccaacacctgtctccccctgggacctctgacaagccctgggcactagccagggcctggcaggcgatggcacccgcgcagctttgggaaagaacacttggcctcccaaagggttctgccacccctgggggccgctacagccaccaaccctggggtctttccatcacttcagacactgagcagaacccagagagggttagtgagctgcagacccacactgggcagcgctatgggaaggggctccatgagaaggaaggagacgccgaggaagagtgggcggccagcacctgcagaccccggtgggagagacggccacgaagcagcctggccaggatgtgcagtgcgctgcccttccgaacaccggtgtgcacagcaggcggtttaggtgactctgcttcccgccaagaaaggcagattgccacatgcagcgcctcatttggatgtgtctggaatcttgactaccctaccttctcctacaaatggaccttgagagcttgtttggaggttctacaagggaagcccagctcttctattgggtatggtcgttctcttcgactgagctgcagcttcgggagggacgcacatgaagcagtgaggaaggaaggggacacccgcctagccagccagatcagccgaatcaaccctggcgatcaatgggatgacaggtgtcgcagccagatcgccctcatatccgaccccccccccccaacactcaactggggcgaaatgaaacgcagggactgtgggaaggaactgcggtatgggctggggcgacggcgggtcctcggcggtcggcagacatccgggcctgctcctggcagctccgccctggcccgctccgccccgcccgcggaaaaaaggtcgcgtagcgatgacgtcgtgggggcctggccggccgtcgcggactcgggagatggaggaaaaggagatattacggcggcagatccgcctactgcagggtctgattgatgactacaaaaccctccacggcaatgccccggcccctggtaccccagcagcttctgggtggcagccacccacttaccacagtggcagagcctttagtgcccgctaccctcgtccaagccggaggggctactcttcccaccatgggccttcgtggcgcaagaaatactccctcgtgaatcggcccccgggaccctcagaccctcctgccgaccatgctgtgcggccgttgcacggggcccgggggggccagcctcctgtcccgcagcagcatgtccttgagagacaggtccagctcagtcagggtcagaacgtggtcatcaaagttaaaccgccatcaaagtctggctctgccagtgcctcaggggcccagcggggctctttggaagaatatgaggacaccccctggagtgaccaaaggccccgggaaggtgaaggtgagccccctcggggacagctgcagccctcgaggccaacaagagccagggggacctgcagtgtggaagatcctcttctggtctgccagaaggagcctggtaagcccaggatggtgaagtcagtgggcagtgtgggcgacagcccctgggagccccgccggacagtcagtgagagcgtgattgccgtcaaggcgagcttcccatcctccgctctgcccccacgcactggcgtggccctgggccggaagctgggttctcattccgtggccagctgtgctccacagctccttggggacaggagagtagatgctggccacacagatcagccagttccgtctggctcagtggggggccccgccagaccggcctcaggacccaggcaggcccgggaggcctcgctggttgtgacctgtcgaactaacaagttccggaaaaacaactacaaatgggtggctgcctcctcgaagagtccccgggttgctcggagggccctcagtcccagagtggctgcagagaatgtgtgcaaggcctctgctggcatggcaaacaaggtggagaagccgcagctcatagctgacccagagcccaagcccaggaagccagccacgtcctccaagccagggtctgcccccagcaagtacaagtggaaggcctccagcccctctgcctcctcctcttcctccttccgttggcagtcggaggccggcagcaaggaccatgcctcccagctctccccagtcctgtctaggtccccgtcgggggacagaccagcagtaggacacagtggcttgaagcccctctctggggagaccccgctctcggcttacaaagtgaagagccgcaccaagatcatccggagacgcggcagcacaagccttcctggagacaagaaaagcggcacctcacctgccgccaccgccaagagccacctcagcctccggcggagacaggccctcagggggaagagcagccctgtcctgaagaagacccccaacaagggcctggtacaggtcaccaagcaccgactatgtcgcctgccaccgagccgggcccacctccccaccaaggaagcgtccagcctgcatgccgtgcggactgcacccaccagcaaggtgatcaagacccgctaccgcattgtcaagaagacgccggcctcgcctctcagcgccccgcccttccccctgtctctgccctcctggcgggcccggcggctctcactatccaggtccctggtgctgaaccgcctgcgtccagttgccagcgggggtgggaaagcccaaccgggctccccttggtggcggagcaaaggctaccgctgcatcggaggggtcctctacaaagtatctgccaacaagctctccaagacctccggccagcccagtgatgcgggcagcaggcccctcctgcgcacaggccggctggatcctgcaggcagctgtagccgttccctggccagccgggcagtgcagcgcagcctggccatcatccggcaggcgcggcagcgcagggagaagaggaaggagtactgcatgtactacaaccgcttcggcaggtgcaaccgtggcgagcgctgcccctacatccacgatcccgagaaggtggccgtgtgcaccaggtttgtccggggcacctgcaagaaaacggatgggacctgccccttctcccaccatgtgtccaaggagaagatgccggtgtgctcctacttcctgaagggcatctgcagcaacagcaactgtccctatagccacgtgtacgtgtcccgcaaggccgaggtctgcagcgacttcctcaaaggctactgccccctgggtgcaaagtgcaagaagaaacacacgctgctgtgccccgactttgcccgcaggggggcgtgtccccgcggcgcccagtgccagctgctccaccgtacccagaaacgccacagtcggcgggcagccacgtcccccgccccagggcccagcgacgcaaccgccaggagcagggtctcggccagccacgggcccaggaagccttcagcatcccagcgccccaccaggcagacgcccagctcggctgccctcactgcggctgccgtggctgcacctccccactgcccaggggggtcagcctctccctcatcctcgaaggcttcctcctcctcctcctcctcctcatcccctcccgcttccttggaccacgaggcaccatctctccaggaggctgccttagcagcagcgtgctccaacaggctctgcaagctgccttccttcatctccctgcagtcctcgccgagcccaggagcccagcccagggtccgggcccctagggcccccctcaccaaggactcagggaagcctctgcacatcaaaccacgtctgtgaggaccccagggaccggcctgcacctacctcagaccctcatccttggagaggaaagaggctctgtccaccactctaccccacaggagggccgcccgccaccaagcctcacctgggggccacagggacactgctctgcctgcctggccctcaaccttccatgaccagcgtgtgcgcagggcctggtcttcctcccccaagccaggcccctgtccccaccccaccaccttccagggtgccaggcagggctggcctccaggcctgtccccgactgccattggcaacagtggccctgcagcccccagccctccccacccaggttttcggcccagtgaagaggccactggccaggcctcccaggcaggtgttttatgttcagcaataaaggttctatccgtaaaaaaaaaaaa

SEQ ID NO: 545 - DNA, 1783 bp, Homo sapiens
  CDS (263)..(1651)
cgaaaaaattgaagccttacgcccgcggtaccggtccggaattcccgggtcgacccacgcgtccgcctccccttacctcccttctcttctgaattctccattctgggctctttcctgtgaaatctttctttgctttccccatcttttcctcgcattttttcaccatctttccctcaatctccaggagccaatgcgagactttggctccgattaagcgacggcccgagacttggggtgcgcgaggaggatcgacagagtggtgatggagagcaccccttcaaggggactgaaccgagtacacctacaatgcaggaatctgcaggaattcttagggggcctgagccctggggtattggaccgattgtatgggcaccctgccacatgtctggctgtcttcagggagctcccatccttggctaagaactgggtgatgcggatgctctttctggagcagcctttgccacaggctgctgtagctctgtgggtaaagaaggaattcagcaaggctcaggaggaaagtacagggctgctgagcggcctccggatctggcacacacagctgctcccaggcgggctccagggcctcatcctcaaccccattttccgccagaacctccgcattgcccttctgggtggggggaaggcctggtctgatgacacaagtcagctgggaccagacaagcatgcccgggacgttccctcccttgacaagtacgccgaggagcgatgggaggtggtcttgcacttcatggtgggctcccccagtgcagctgtcagccaggacttggctcagctcctcagccaggctgggctcatgaagagtactgaacctggagagccgccctgcattacttccgctggcttccagttcctgttgctggacaccccggctcagctctggtactttatgttgcagtatttgcagacagcccagagccggggcatggacctggtagagattctctccttcctcttccagctcagcttctctactctgggcaaggattactctgtggaaggtatgagtgattctctgttgaacttcctgcaacatctgcgtgagtttgggcttgttttccagaggaagaggaaatctcggcgttactaccccacacgcctggccatcaatctctcatcaggtgtctctggagctgggggcactgtgcatcagccaggtttcattgtcgtggaaaccaattaccgactgtatgcctacacggagtcggagctgcagattgccctcattgccctcttctctgagatgctctatcggttccccaacatggtggtggcgcaggtgacccgggagagtgtgcagcaggcaatcgccagtggcatcacagcccagcagataatccatttcctaaggacaagagcccacccagtgatgctcaaacagacacctgtgctgccccccaccatcaccgaccagatccggctctgggagctggaaagggacagactccggttcactgagggtgtcctgtataaccagttcctgtcgcaagtggactttgagctgctgctggcccacgcgcgggagctgggcgtgctcgtgttcgagaactcggccaagcggctcatggtggtgaccccggccgggcacagcgacgtcaagcgcttttggaagcggcagaaacatagctcctgagagcgcgggacttggacacggacctcggcgggcgggactgggcggggcggggcatcagaactcaggtgttttttatttacgcgtcagggcttttcttgtttaataaagttatgatagctaaaaaaaaaaaaa

SEQ ID NO: 546 - DNA, 969 bp, Homo sapiens
  CDS (204)..(776)
cgtctgacatgacacgaatttttacgactcactatagggaatttggccctcgaggccaagaattcggcacgagggtggccgatagctggtcctctttctccaacacctagcctgagacttggcggcgcggctgctatcctgaactagcttggtaagtgttgtgtcccgaaccagcgtagagagacctcggaccagccgccttgatgacagcatccgcgtcctccttttcatcatctcagggtgtccagcagccctccatctacagcttctcccaaataaccagaagcttgtttctcagcaatggtgtggccgccaacgacaaactccttctgtccagcaatcgcatcaccgccattgtcaatgcctcggtggaagtggtcaacgtattcttcgagggcattcagtacataaaggtgcctgttaccgatgctcgtgactcgcgtctctacgacttttttgaccccattgctgatcttatccacaccatcgatatgaggcagggccgtacgctgctgcactgcatggctggagtgagccgttccgcctcactgtgccttgcgtacctcatgaaataccactccatgtcgctgctggacgcccatacatggaccaagtcgcgccgccccatcatccggcccaacaacggcttttgggaacagctcatcaattacgaattcaagctgtttaataacaacaccgtgcgcatgatcaactcgccggtaggtaacatccctgacatctatgagaaggacctacgtacgatgatatcaatgtaagccatcccggccagcccctgacatctgccatcgatcttgcaccaagactgaacttgaacactgacattttgttagtaaagaaaaccggatggtgccttgttaaagggcaagaaaaaagggagggggttggagttttgaacgtagtaagccttaccttaatagaattaaattcatgaaacataaaaaaaaaaaa

SEQ ID NO: 547 - DNA, 2088 bp, Homo sapiens
  CDS (85)..(1611)
atttggccctcgaggccaagaattcggcacgagcggcacgagctgggtttctgaactgctgggtttctgcttgctcctctggagatgcagcgtctgttgactccagtgaagcgcattctgcaactgacaagagcggtgcaggaaacctccctcacacctgctcgcctgctcccagtagcccaccaaaggttttctacagcctctgctgtccccctggccaaaacagatacttggccaaaggacgtgggcatcctggccctggaggtctacttcccagcccaatatgtggaccaaactgacctggagaagtataacaatgtggaagcaggaaagtatacagtgggcttgggccagacccgtatgggcttctgctcagtccaagaggacatcaactccctgtgcctgacggtggtgcaacggctgatggagcgcatacagctcccatgggactctgtgggcaggctggaagtaggcactgagaccatcattgacaagtccaaagctgtcaaaacagtgctcatggaactcttccaggattcaggcaatactgatattgagggcatagataccaccaatgcctgctacggtggtactgcctccctcttcaatgctgccaactggatggagtccagttcctgggatggtcgttatgccatggtggtctgtggagacattgccgtctatcccagtggtaatgctcgtcccacaggtggggccggagctgtggctatgctgattgggcccaaggcccctctggccctggagcgagggctgaggggaacccatatggagaatgtgtatgacttctacaaaccaaatttggcctcggagtacccaatagtggatgggaagctttccatccagtgctacttgcgggccttggatcgatgttacacatcataccgtaaaaaaatccagaatcagtggaagcaagctggcagcgatcgacccttcacccttgacgatttacagtacatgatctttcatacacccttttgcaagatggtccagaagtctctggctcgcctgatgttcaatgacttcctgtcagccagcagtgacacacaaaccagcttatataaggggctggaggctttcggggggctaaagctggaagacacctacaccaacaaggacctggataaagcacttctaaaggcctctcaggacatgttcgacaagaaaaccaaggcttccctttacctctccactcacaatgggaacatgtacacctcatccctgtacgggtgcctggcctcgcttctgtcccaccactctgcccaagaactggctggctccaggattggtgccttctcttatggctctggtttagcagcaagttttttttcatttcgagtatcccaggatgctgctccaggctctcccctggacaagttggtgtccagcacatcagacctgccaaaacgcctagcctcccgaaagtgtgtgtctcctgaggagttcacagaaataatgaaccaaagagagcaattctaccataaggtgaatttctccccacctggtgacacaaacagccttttcccaggtacttggtacctggagcgagtggacgagcagcatcgccgaaagtatgcccggcgtcccgtctaaaggtgttctgcagatccatggaaagcttcctgggaaacgtatgctagcagagcttctccccgtgaatcatatttttaagatcccactcttagctggtaaatgaatttgaatcgacatagtagccccataagcatcagccctgtagagtgaggagccatctctagcgggcccttcattcctctccatgctgcaatcactgtcctgggcttatggtgctatggactaggggtcctttgtgaaagagcaagatggagcaatggagagaagacctcttcctgaatcactggactccagaaatgtgcatgcagatcagctgttgccttcaagatccagataaactttcctgtcatgtgttagaactttattattattaatattgttaaacttctgtgctgttcctgtgaatctccaaattttgtaccttgttctaagctaatatatagcaattaaaaagagagaaagagaaaaaaaaaaaaa

SEQ ID NO: 548 - DNA, 3197 bp, Homo sapiens
  CDS (231)..(2906)
cctgtggcatgcctgctgcaccggcccggaattcccgggtcgacgatttcgtgctttgggcaggcaggagcgaaagggccaggggttgcctgtcctcccccaccctgttgaggccttcctccccctctgctgagcctcggttaattataactctgacctaagtgccctgtgacgtcaagcccgggccagccctgcccaggagacccagcaaccaggtccatgtctcagccatgctccccacggaggtcccccaatcccacccgggcccctcagcgttgcttctgctgcagctgttgctgccccccacatctgccttcttccccaacatctggagcctgctggctgcccctggctccatcacccaccaagacctaactgaggaggcagcgctcaacgtcaccctgcagctcttcctggagcagccacccccaggccgcccccctcttcgtcttgaggacttcctgggtcgaacactccttgctgatgacctctttgccgcctactttggacctggttcttctcggcggttccgagcagccttaggtgaggtgtctcgtgccaatgcagcccaggacttcctgccaacttccaggaatgaccccgacctgcactttgatgctgagcgactgggtcagggacgcgcgcgcctggtaggggctctgcgggagaccgtggtggcagccagggcccttgaccacaccctggctcgccagcgcctcggggctgcacttcatgccctgcaggatttctacagtcatagcaactgggtggagctgggcgagcagcagccacaccctcacctcctctggccaaggcaggagctccagaacctggcacaagtggccgatcctacctgctccgattgcgaggagttgagctgccccaggaattggctgggcttcacactcctcacctctggctactttggaactcatcccccgaaacctccagggaaatgtagccacgggggccattttgaccggagcagctcccagccaccgaggggaggcatcaacaaggacagcacatccccaggcttctcccctcaccacatgctgcacctccaggctgcaaaactggcccttctagcctccatccaggccttcagccttctgcgaagccgcctgggagacagggatttctccaggctgctggacatcaccccagcctccagcctgagctttgtcctggacaccacgggcagcatgggtgaggagatcaacgctgccaaaatccaggctcgccaccttgtggagcagcggagaggcagccccatggagcctgtccactatgtcctggtgccttttcatgacccagggttcggccctgtctttacaaccagtgaccctgacagcttctggcaacagcttaatgagatccatgccttggggggtggagacgagcctgagatgtgcctgtcagccctgcagctggccctgctgcacacacctccactctcagatatctttgtcttcacggatgcctcccccaaggatgcctttctcaccaaccaggtggaatccctgactcaggagcggcgctgccgggtaacattcctggtgactgaagatacatcaagggttcagggtcgagctcggcgtgagatcttgtcccctctgcgttttgagccatacaaagcagtggccctggcctcaggaggagaggtgatcttcaccaaagaccagcacattcgagacgtggcagccattgttggggagagcatggctgccctggtgactcttcccctggaccctcctgttgtggtgcctgggcagccacttgtgttcagcgtggatgggctgctccagaagatcacagtccggatccacggagacatcagcagcttctggatcaagaaccctgcaggggtctcccagggccaggaggaaggcgggggtcctctaggtcacactcgccgctttgggcagttctggatggtgaccatggatgaccctccacagacaggaacctgggagatccaggtcacagctgaggacacccctggggtgagagtgcaagcccagacctccctggacttcctcttccactttgggatccccatggaggatggaccccaccctggcctctaccccctgactcagccagttgcaggtcttcagacccagctgctggtagaagtgacagggttgggttccagagccaatcctggggatcctcagccgcatttctcccacgtcatccttcgaggggtcccagagggtgccgaactaggccaggtgcccttggagcccgtgggacctccggagcgaggtctcctcgcagcctcgctgtcgcccacgctgctgtccacccctagacccttctccctggagctgattggccaggacgcagcgggtcggcgcctgcacagggctgcccctcagcctagcactgtagtccctgtccttctggagcttagtggcccctcgggtttcttggccccgggcagcaaagtcccgctcagtctccgcatcgccagcttctcgggccctcaggatcttgaccttaggactttcgtcaaccccagcttctccctcacctccaacctctccagggctcacctggaactgaatgagtcggcctggggccgcctgtggctggaggtcccagattcagcggccccggattccgtggtgatggtgactgtgactgcagggggacgagaagccaacccagtacccccgactcatgctttcctccggctcctggtatcggccccagccccgcaggaccggcacaccacccctaccggctcatctgacccgatcctcaccacggccacccctgccttttcccccttcacattggtgactcaaggcagggctggggcagggctggctgcgggcagcccctggtggggcacagttggaggggtgctgcttctgctaggcctggcctcctggtgacacaacgggctctaaagggatgggtctccagcactattttcaacctgccccattggtaagaagacctgggacacatttgtcacataggtcttaggaccttacctctcctagctgggatgaaggttttctcttttttgttggtggtgttctttttttgagaaggggttatgttcattgcccaggctggagtgcagctgggcaatctcggctcgctgcaggctctgcctccttggtttaatggattctctctccctcacctcccaagaagatgggataacaggggcccgccct

SEQ ID NO: 549 - DNA, 6523 bp, Homo sapiens
  CDS (211)..(4194)
cgacctgacgaagttagtatcctctagagcggccgcctgcagctcagcttctccatcttctgcgctgagcctgcgacgctcctggccgacacgccggttaacgacggcgcctggcacagcgtgcgcatccgccgccagttccgcaacaccacgctcttcatcgaccaggtggaggccaagtgggtggaggtcaagtccaagcgcagggacatgacggtgttcagcggccttttcgtcggggggctgcccccggaactgcgcgccgcggcgctcaagctcaccctggcctcggtgagggagcgggagcccttcaaggggtggattcgtgacgtgagggtcaactcctcgcaggtcctgcccgtggacagcggcgaggtgaagctggacgatgagccgcccaacagcggcgggggaagcccgtgcgaggcgggcgaggagggcgagggcggggtgtgcctcaacggaggtgtgtgctccgtggtggacgaccaggccgtgtgcgactgctcgcgaaccggcttccgcggcaaggactgcagccaagaagacaacaatgtggaaggtctggcgcacctgatgatgggcgaccaaggaaaagaagaatatattgccacgttcaaaggatctgaatacttctgctacgacttgtctcaaaaccccattcaaagcagcagtgatgaaataactctgtcatttaaaacccttcagaggaatggactgatgcttcacactgggaaatcggctgattatgtcaatcttgccctgaaaaatggagctgtctctctggtcattaatttgggatcaggggcctttgaagcactagtggagcctgtgaatggaaagtttaatgataatgcctggcatgatgtgaaagtcaccaggaatctgcgtcagcactcaggcattggacacgctatggtgacaatatcagtggatgggattcttaccacaacgggctacacgcaagaagattataccatgctggggtctgatgactttttctatgttggaggcagtcccagcacagccgaccttccagggtcaccagtcagtaacaactttatgggctgtctcaaagaggttgtatataaaaataatgatgtgaggctggaattatctcgacttgccaagcaaggagatcctaagatgaagatccatggagtggtggcatttaaatgtgagaatgttgcaactttagacccaatcacctttgaaaccccagagtctttcatctctttgcctaaatggaatgcaaagaaaactggctccatatcatttgatttccgtacaacagagccaaatggcctcatcttatttagccatggcaagccaagacatcagaaagatgccaagcacccacagatgataaaggtggacttctttgctattgagatgctagatggccacctctacctcctcctggacatggggtcaggtactataaaaataaaagccctgttgaagaaagtgaatgatggagaatggtatcatgtggacttccagagagacggacggtcaggtaccatttctgtcaacacgttgcgtactccctacactgctcctggtgagagtgagattctggacctggatgatgagttgtacctgggggggctgccagaaaataaagctggccttgtcttccccaccgaggtgtggactgctctgctcaactatggctacgtgggctgcatcagggatttgttcatcgatggccaaagcaaagatatccggcaaatggctgaagttcaaagtactgctggagtgaagccttcctgctcaaaggaaacagcaaaaccgtgccttagcaacccttgcaaaaacaatggcatgtgcagggatgggtggaacagatatgtctgtgattgttccggaacaggctatcttggcaggtcctgtgagagagaggcaacggttttgagctatgatgggagcatgtttatgaaaattcagctccccgtagtcatgcatacggaggctgaggatgtttccttacggttccgatcccagcgtgcatatggcattctgatggcaaccacttctagagactctgctgacaccctccgcctggagctagacgcaggacgtgtgaaactgacggtcaatctagattgtatcaggattaactgtaattccagcaaaggtcccgagactctttttgctggctataacctcaatgataacgagtggcacacagtgcgtgtagttcggcgtggaaaaagtttaaagttaacagtgcatgaccaacaggccatgacaggtcaaatggcaggtgatcatactaggctggagttccataacatagagactggcatcatcacagaacgacggtatctttcttctgtcccctccaacttcattggacacctgcagagcttgacatttaatggaatggcatacattgacctgtgtaaaaatggcgacatagattactgtgagcttaatgccagatttggcttcaggaacatcatagcagatcctgtcaccttcaagaccaaatcgagctatgttgccttagctaccttgcaagcctacacttctatgcatctttttttccagttcaagacaacatccctagatggattaattctatataacagtggggatggaaatgactttattgtggttgaattagttaaagggtacttacattacgtgtttgatttgggaaatggtgctaacctcatcaaaggaagctcaaataaacctctcaatgacaatcagtggcacaacgtgatgatatcaagggacaccagcaacctccacactgtaaagattgacacaaaaatcacaacgcaaatcaccgccggagccaggaacttagacctcaagagtgacttatatataggaggagtagctaaagaaacatacaaatccttaccaaaacttgtacatgccaaagaaggctttcaaggctgcctggcatcagttgatttaaatggacggcttccggacctcatctccgatgctcttttctgcaacggacagatcgagagaggatgtgaagggcccagcacaacctgccaagaggactcatgttccaatcaaggtgtgtgcttgcaacaatgggatggcttcagctgtgactgtagtatgacttccttcagtggaccactctgcaatgaccctgggacgacatatatctttagcaaaggtggtggacaaatcacgtataagtggcctcctaatgaccgacccagtacgcgagcagacagactggccataggttttagcactgttcagaaagaagctgtattggtgcgagtggacagttcttcaggcttgggtgactacctagaactgcatatacaccagggaaaaattggagttaagtttaatgttgggacagatgacatcgccattgaagaatccaatgcaatcattaatgatgggaaataccatgtagttcgtttcacgaggagtggtggcaatgccacgttgcaggtggacagctggccagtgatcgagcgctaccctgcagggcgtcagctcacaatcttcaatagccaagcaaccataataattggcgggaaagagcagggccagcccttccagggccagctctctgggctgtactacaatggcttgaaagttctgaatatggcagccgaaaacgatgccaacatcgccatagtgggaaatgtgagactggttggtgaagtgccttcctctatgacaactgagtcaacagccactgccatgcaatcagagatgtccacatcaattatggagactaccacgaccctggctactagcacagccagaagaggaaagcccccgacaaaagaacccattagccagaccacagatgacatccttgtggcctcagcagagtgtcccagcgatgatgaggacattgacccctgtgagccgagctcaggtgggttagccaacccaacccgagcaggcggcagagagccgtatccaggctcagcagaagtgatccgggagtccagcagcaccacgggtatggtcgttgggatagtagccgctgccgccctgtgcatccttatcctcctctatgccatgtacaagtacagaaaccgggatgaaggctcataccatgtggacgagagtcgaaactacatcagtaactcagcacagtccaatggggctgttgtaaaggagaaacaacccagcagtgcgaaaagctccaacaaaaataagaaaaacaaggataaagagtattatgtctgatcccaagatcttaaatggacacttgtatagaaatagtcttcattttatctgagacataatataaacttatttactttcctttttatgaagcacatacaaaagaagacagggaatgcaatcaggaaggaaagactttttaaaaaataaaaacaagtatctcatgctcttgtttctcaaaaaagaaaaacaaaaaacaaaaaacaggggccaataaattccctaacatccacagtgttttcatttactctgcttgtctttatgttgctggaacatttctaaaagacagtgatgaccgcacgcattcataaagcaaaggagtactacagcatcaaggcacaacacaaaaaccaacacaaaacataacacaaaaggaggctacctatgatcctggatttagccaaagtgctagcgctttcctgagaagtcagtccaattgccagagaagactgtccttttgagtgactcaacctgcaaacctttaagagtttgccgcctggtgcaactggagcagtggttggaacttgcatttgaaacaaagtgctggcttttttgaagacttgtgtaggaacacattcaaaaagcccctttctggttgtgagagaggaaaaaaaagtatggaggccttattttcaaaaatgtgaaatataaggcacgttttcacacaaaatttcaaaacaaaaacaagagggcatagatgcaatcattgggaaattttcatgcacgcttattatgttattacatatgtttatataaaatccatctctgtgtgctttctggactgtgataagtgacgttttatagcctgttgtatagaaaatgcaaaatatatctctgctcttcagccatttttggtaaattcaatgttataagtgttgctaagtatagggagttttatgacatcagagcaacaattatttcagttgggtttttctttttttttgccaccattataaattgccacaattacttttattttttaaagaaattacagtgtagtgtttattctaaggaagatatgtatgaatgtatatacaaagactcagctacttcttttcttatatgtacagccttcattctgttgcaattaagttttagtacttgtatgaaaggtgtgaattagaaagtcacatatatacatatgtatcttataatcttttctccctgaaatactcacattcccacatacattcactattttcacacacacacacacacacacacacacacacacacacacacacgaatccacagcaatccatcagatatgctggaagatccaaacgtgcatacagtagcaaatatttattgacaaattgaaaagcaggaaggaagagggttgtgccaaggtattgatgacaaatggggtgatttgcttcattgagatcttgctcccaggtaaccttaagaagattttagtccctaaagaaatgaacctttccttatcaaatagaatatcactgatatactgctgcatgaataagaaccattatgtgggcaggttatggaagcaaaattggttaatctacaccttaactctggctgctgcaattgaaaactttctttctaataaaataatatatatatctctgaatctgatgtgcatgatgaacatttctggaaagtaaacactttctctcgactaagaaagtatttttcagtaatttttgattctgtattactacccacttaaaaaatcattctctgttaattattgactatgttttaacttttctggttttacatatatatcattaaatatagttttagtttaacacattaagtagtggaaaagtatagattatacacttgttttgcatattattcaatgatgttcacagcaataaattactaatatgagaaggtagtgcaaaaaatgcattattacattgcaagttgatgtttcaggaaaaattggttgcattacttgaataccttctaaaagaacgataaaaaattttgtagaagagaagaatatctttccaattagctttaatcagcaaaggcaaaaaatgcaaaacatcttttgtgatactttagttgatgaaaaaaaagccaagaagtggcctggatttcagacatacagcaccttagaaatatgtataattcatagcaaatcaccactatctatggttgccaagtaattgttgtgtacaaagaaatttagtggctttttatgacccagaaagtagaaggtataaaatgaaaatttaatatccattgcttcttttttagattttcatttttttaatttgccacattaaataattcacgagtcttttcttttccccgtctcattcagtcttactcaggggaagccagttaaataaga

SEQ ID NO: 550 - DNA, 455 bp, Homo sapiens
  CDS (59)..(223)
gatggaggtaacccttggactatgaaagccagcccacctgccattcactgtcatcatcatgcctaagagaaagcccagtgaaggtgctatgagtgacaaagtaaaggctagtttgagttacagaggagatcagcaggattattttctaaacctacccctccaaaaccagagaccaggcctaagaaggaccctgcaaatcagagacagaagctgcctaaagtgagaaagggaaaagcagatgcatcaaggaagggaacagccctgcagaagagagatgttccatggtccagacacagaaagtggaaggctggagaagtggctctgagcttccagtggctctgagcttctagaggctctgagctttcagtggctctgagcttccagtgaattgacagtttgagagctcttaaaaatcaaccggacgcgtgggtcgacccgggaattccggaccggta

SEQ ID NO: 551 - DNA, 4234 bp, Homo sapiens
  CDS (214)..(3141)
acggtggaattctcgacgggagggtgaggcgcggcgcagtgatcgggcggccggggtcctgtgcgcgtgcgcagcgaacagctgtcacctagtgcggaacaagtctcccaaatttcccaaatctccctgggccggaggccactgtcttctcttcctcctccaccgagtcgtgctctcgccccaacccgcgcgccagacactgccctaaccatcatggaggtggccgaggtggaaagtcctctgaaccccagctgtaagataatgaccttcagaccctccatggaggagttccgggagttcaacaaataccttgcatacatggagtctaaaggagcccatcgtgcgggtcttgcaaaggtgattcctcctaaggagtggaagccaagacagtgctatgatgacattgataatttgctcattccagcaccaattcagcagatggtcacagggcagtcaggactgttcactcagtacaacatccagaaaaaagcgatgactgtgaaggagttcaggcagctggccaacagtggcaaatattgtactccaagatacttggattacgaagatttggagcgcaagtactggaagaacttaacttttgtggcacctatctatggtgcagatattaatgggagcatatatgatgagggtgtggatgaatggaacatagctcgcctcaatacagtcttggatgtggttgaagaagagtgtggcatttctattgagggtgtaaataccccatatctctattttggcatgtggaagaccacgtttgcatggcacaccgaagacatggacctctatagcattaattatctccactttggagagcccaagtcttggtatgctatacctccggagcatggaaaacgacttgaaagactagctcaaggttttttcccaagcagctcccaagggtgtgatgcatttcttcgccacaagatgacattgatttctccatcagtattgaagaaatatggtattccctttgacaagataacccaggaggctggagaattcatgatcactttcccatatggctaccatgctggttttaatcatggtttcaactgtgcagaatctacaaattttgctactgtcagatggattgactatggaaaagttgccaaattgtgcacttgcaggaaagacatggtgaagatttcaatggatatctttgtgaggaaatttcagccagacagatatcagctttggaaacaaggaaaggatatatacaccattgatcacacgaagcctactccagcatccacccctgaagtaaaagcatggctgcagaggaggaggaaagtaagaaaagcatcccgaagcttccagtgtgctaggtctacctctaaaaggcctaaggctgatgaggaagaggaagtgtcagatgaagtcgatggggcagaggtccctaaccccgactcagtcacagatgacctcaaggtcagtgaaaagtcagaagcagcagtgaagctgaggaacacagaagcatcttcagaagaagagtcatctgctagcaggatgcaggtggagcagaatttatcagatcatatcaaactctcaggaaacagctgcttaagtacatctgtaacagaagacataaaaactgaggatgacaaagcttatgcatatagaagtgtaccttctatatccagtgaggctgatgattccattccattgtctactggctatgagaagcccgagaaatcagacccatccgagctttcatggccaaagtcacctgagtcatgctcatcagtggcagagagtaatggtgtgttaacagagggagaagagagtgatgtggagagccatgggaatggccttgaacctggggaaatcccagcggtccccagtggagagagaaatagcttcaaagtccccagtatagcagagggagagaacaaaacctctaagagttggcgccatccacttagcaggcctccagcaagatctccgatgactcttgtgaagcagcaggcgccaagtgatgaagaattgcctgaggttctgtccattgaggaggaagtggaagaaacagagtcttgggcgaaacctctcatccacctttggcagacgaagtcccctaacttcgcagctgagcaagagtataatgcaacagtggccaggatgaagccacactgtgccatctgcactctgctcatgccgtaccacaagccagatagcagcaatgaagaaaatgatgctagatgggagacaaaattagatgaagtcgttacatcggagggaaagactaagcccctcataccagagatgtgttttatttatagtgaagaaaatatagaatattctccacccaatgccttccttgaagaggatggaacaagtctccttatttcctgtgcaaagtgctgcgtacgggttcatgcaagttgttatggtattccttctcatgagatctgtgatggatggctgtgtgcccggtgcaaaagaaatgcgtggacagcagaatgctgtctctgcaatttgagaggaggtgctcttaagcaaacgaagaacaataagtgggcccatgtcatgtgcgccgttgcggtcccagaagttcgattcactaatgtcccagaaaggacacaaatagatgtaggcagaatacctttacagaggttaaaattgaaatgcatcttctgcagacaccgggttaagagggtctctggagcctgcatccagtgttcctacggtcgctgcccggcctccttccatgtcacttgtgcccatgctgctggggtactgatggagcctgatgattggccttatgtggtgaacattacatgctttcgacataaggtcaaccccaacgtgaagtccaaggcttgcgagaaggtcatttccgtgggtcaaacggtcatcacgaagcatcggaacacccggtattacagttgcagagtgatggctgtgacatcgcagaccttctatgaggtcatgtttgatgatggctcctttagcagagacacatttcctgaggatatcgtgagccgagactgtctgaagctgggcccacctgctgagggagaagtcgtccaagtcaagtggcccgatggcaaactctatggagcaaaatattttggatcaaatattgcccacatgtaccaggttgagttgaagatggatcccagatagcaatgaagagagaggacatctacactttagatgaagagttacccaagagagtgaaagctcgatttgtaagtgctggcagatgccacttggggacctgccaagtgaattccttgtcctcacctcatgtttcccaagcccagcaggaaacatacttgggcttttggattaattctaaaaaaagccaatgcaacattttccttagtggaacctattgaatgcaaacttcaaattcaaccaaaatcggggaaattaatgcatgtgctttacttttcttctaatgaagtcacatgatgcttctttgtgttgacatttattggtgcacaaaaatacttactgaatgtgtgctctgtgtaaaacaccaggagcaaacaaagataccatcaaggcatttgcaatcttgttagtagaagcaacattaaaagtattcaggagtagatcaaaggggactcggcataattgaatgtctgtctattcttttataggtttttcatggattgactaccttctgtctcagaaagttactgatgtttgtgtcagttcatcattaagctaaactctgactttcataataaaagggataaacaaagcctaaatgctagttgtgggaatactaaagcagttttttaaaaaggaaatagtagtttcatgccctcacataccattaaaagatgaacaaacatggacaaatattcaaaactgcagtcattgaaaaatataattcacaataatttagacttcatattattgtatcataaaatattcagtggaccctgaaatgaagtcagttttattcatttagaattatatctattgtgtctgtgaaatgataaatcctaaatagagaaatttgaatggatggggtttttctgactaaaatgaaattttttttctgaataattcagtttagtgagtgcttatgatatacttgtctgcagtgatagagtcactatagattatttggttattttggaaaaaccaagggttttcttaaatcagggatgtccaatctttttgcatccctgggccatacttgaagaagaagaattgtctttggcctcacataaactacactaacaatagctgatgagctacc

SEQ ID NO: 552 - DNA, 1293 bp, Homo sapiens
  CDS (646)..(1158)
caagctggctagcgtttaaacttaagcttggtaccgagctcggatccactagtccagtgtggtggaattcctgcttttctgctcgccttcccccatccgtcttccttcctccactgctggtctccagctctctgtggcctgagtacctggagggcggtaagaagaccttggacagcgtccctgtttgacgccgagttccgacgcttcgcgctgcctcgcgcttcggtgagcggcttccaggagttctcgcggttgctgcgggcggtgcaccagatcccgggcctggacgtgctacttggctatacggatgctcatggcgacctgctgcccctcaccaacgacgacagcctgcaccgggccctggccagcgggcccccgccactgcgcctactggtgcagaagcgggaagctgactccagcggcctggcttttgcctccaactctctgcagcggcgcaagaaagggctcttgctgcggccagtggcacccctgcgcacccggccacccttgctaatcagcctgccccaagatttccgccaggtttcctcagtcatagacgtggacctactgcctgagacccaccgacgggtgcggctgcacaagcatggttcagaccgccccctgggcttctacatccgagatggcatgagcgtgcgtgtggctccccagggcctggagcgggtaccaggaatcttcatctcccgcctggtacgtgggggtctggctgagagtacagggctgctggcggtcagtgatgagatcctcgaggtcaatggcattgaagtagccgggaagaccttggaccaagtgacggacatgatggttgccaacagccataacctcattgtcactgtcaagcccgccaaccagcgcaataacgtggtgcgaggggcatctgggcgtttgacaggtcctccctctgcagggcctgggcctgctgagcctgatagtgacgatgacagcagtgacctggtcattgagaaccgccagcctcccagttccaatgggctgtctcaggggcccccgtgctgggacctgcaccctggctgccgacatcctggtacccgcagctctctgccctccctggatgaccaggagcaggccagttctggctgggggagtcgcattcgaggagatggtagtggcttcagcctctgacagtcaggatgaagccccatgccactccacactgctgggacatggcagggacttcacagtgggggtttttagctggctcacagggctccctcagcctggggaacattaaaggttttctacaaaaaaaaaaaaaaa

SEQ ID NO: 553 - DNA, 4399 bp, Homo sapiens
  CDS (238)..(3057)
atacgactcatatagggatttggccctcgaggcagaattcggcacgaggcaagggttttgaaccaagtcttggtgagtaagctgtttagttggttcccagtgttatcttccaagaatcgtatattctagattgtatcttccagatgtatcctggagcaagcagctaagtcacttttgtttggtctcaatgttgtttaacacaggggaggccgttcctggctttgtagctcgctcaagatggcggcgcagccaccccgcgggatacgcctcagcgcgctttgcccgaagtttttacatacaaattctactagtcacacctggccattcagtgcagttgctgaattaatagataatgcttatgatcctgatgtgaacgctaaacaaatatggattgacaaaacagtgataaatgaccatatatgcttgacattcaccgacaatgggaatggtatgacttctgataaattacataaaatgctaagctttggcttcagtgacaaagtcaccatgaatggtcatgtcccagttggattatatgggaatggcttcaagtcgggttctatgcgtctgggtaaagacgcaatcgtttttaccaaaaatggagaaagcatgagcgtgggccttttgtctcagacctacttggaagtcataaaagcggagcatgttgttgttccaatagtggcattcaacaagcaccgacagatgattaatttagcagaatcaaaagccagccttgctgcaattctggaacattctctgttttccacggaacagaagttactggcagaacttgatgctattataggcaagaaggggacgaggatcatcatttggaatcttagaagctacaaaaatgcaacagagttcgattttgaaaaggataaatatgatatcagaattcccgaggatttagatgagataacagggaagaaggggtacaagaagcaggaaaggatggaccagattgcccctgagagtgactattccctgagggcttattgcagtatattatatctaaagccaagaatgcagatcatcctacgtggacagaaagtgaagacacagctggtttcgaagagtcttgcctacatcgaacgtgatgtttatcgaccaaaatttttatctaaaacagtgagaattacctttggattcaactgcagaaataaagatcattatgggataatgatgtatcacagaaatagactcatcaaagcttatgaaaaagttggatgtcagttaagggcaaacaacatgggtgttggagtggttggaattatagagtgtaatttccttaagccaactcataataaacaagatttcgactatactaatgagtacagacttacaataacagcactaggagaaaagctgaatgattactggaatgaaatgaaagtgaagaaaaatacagaatatcctctaaatttgccagttgaagatatacagaagcgtcctgatcagacatgggttcagtgtgatgcctgtctaaagtggcggaaattacctgatgggatggatcaacttcctgaaaaatggtattgctccaataaccctgacccacagttcagaaattgtgaggttccagaagaacctgaagatgaggatttggtacatcccacttatgaaaaaacctacaaaaagaccaacaaggaaaaattcaggatcagacaaccggaaatgatccctcggattaatgctgaactgttgtttcggccaactgctctttcaactccaagcttttcttctcctaaggaaagtgttccaagaagacatctttcagaaggaacaaattcttatgcgacaagacttctaaataatcatcaagttccacctcagtctgaacctgagagcaacagcttgaaacggagactttctactcgttcctcaattttgaatgcaaagaatcggagattgagtagtcagtttgaaaattcagtttataaaggtgatgatgatgatgaagatgtcatcatcttagaagaaaacagtacccccaaacctgcagtagatcatgatattgacatgaaatcagaacagagtcacgttgagcaaggtggtgttcaggttgagtttgtgggtgacagtgaaccttgtggccagactggttcaacaagcacctcatcatcccgatgcgaccagggaaatactgcagctacccagactgaagtaccaagtttagttgttaaaaaaaaaaaaactgttgaagacgagatagacgtaagaaatgatgcagtgattctgccctcctgtgtagaagctgaagcaaagatacatgaaacccaggaaaccaccgataaatctgcagatgatgcaggctgccaattacaagaactgagaaaccagctactccttgtcactgaggaaaaagagaattataaaagacagtgtcatatgtttactgatcaaatcaaagtgttacaacagaggatactagaaatgaatgacaagtatgttaagaaagaaacttgccatcagtccactgaaaccgatgctgtatttttacttgaaagtattaatggcaaatctgaaagtccagaccatatggtatctcagtatcagcaagctttggaagaaatagaaaggctgaaaaaacaatgtagtgctttgcaacatgtaaaggctgaatgcagccagtgttccaataatgagagtaaaagtgaaatggatgagatggctgtgcagcttgacgatgtgtttagacaactggacaaatgcagtattgagagggaccagtataaaagtgaggttgaattgctggaaatggaaaagtcacaaatccgttcacagtgtgaagaactcaaaactgaagtagaacagttaaaatctacaaatcaacagacggcaacagatgtttcaacatcaagtaacattgaggagtctgtaaatcatatggatggagaaagcctcaaactccgatctcttcgagttaacgtaggacaactgctggctatgattgtgcctgatcttgatcttcagcaagtgaattacgatgttgatgtagttgatgagattttaggacaagttgttgaacaaatgagtgaaatcagtagtacttaaagtatatgttatgtaagataaaatatttgctcaattcttttggttgtacagctttcaaaatataattaattttgttttatagatatgataggcaacagactgaaaaccataatctttactgtattctatgcattcaaatgtggtcacaaatattgtggacacattatcttatgttttgaaatacctgtgaattgttggcattgagcagctgaagctaactcatgactctgttttgaatgtaaatatttgtaattaagcctgcacatatttttttattgccctagagtactcaagtgtttttcaccaagagcttttcaggttgcccctaagctttgtgcaattttttctggttccccaaagtgtatttttctctaagtcgagggctatgccataatacaaatggaaatgttacctttgattttcttataaaggagtttaaataggatttttaaataatgtagtaacactcctgatacaactctggttataagtgaattgagcattaatgtttcttttgtataaattcctgtcctgaaatattttattcatgaaaataaggtaagcaaaaaccaactccattttgccaggattttgttgtgctgagattgccaatcacggttaaacacaaagtgtttttatagaatgaagaaacagtctttaacagaaaaaaggtattgaaatattaaatggccaccaagtttactttgaagcccatttttggctgtttagtcagcatgaagtgggcatgataattttttaatatttctttttgtgaaatttcctgtacagccttttgtaggattactacaggttaatgtgagttgaggaagacagtctttctcaaacaatactacatacctttaattatattacaaacctaagtgttttatatcctagagtcaaggaacaaatttccttaggattatagtattacatgccataaaatactatgctttattggtcccatgttttgtgcaattttaaagagatggctttctattaagtataaactatgtatatataagaaccatattttccacaactaaaatgtgcattattttttccaaagttttatcattgctatttatttttacctttgtttttgaacattcaatccgttcattttgtatgtatgcttaatacgtgtcggtcatatacagtattgaatttttactgtatagtaattctggaaagagcaaataaatgaagattgtttttatttgcctgataaagtaattgaaagtgtatttttggtatgaagctggttttctgtcacaattgtaatttcccaaattttaaaatatcttataataaaataaaaatatatgatggctaactgttc

SEQ ID NO: 554 - DNA, 2710 bp, Homo sapiens
  CDS (122)..(2119)
gcggccgcctgaggcgggcggtcggtatagagcgggcggcaggaggcaagcagcgaaaccttcccggccgccgctcccgtcccgacggcggcttccccaaggcggcaggactcggcgcgccatggacaggccggcggcggcggcggcggcgggctgcgagggcggcgggggcccgaacccggggccggcgggcggcaggaggcctcctcgggccgcggggggcgccaccgccggctcccggcagcccagcgtggagaccctggacagtcccacaggatcacatgttgaatggtgtaaacagcttatagctgctacaatttctagtcagatttcaggttcagtgacatcagaaaatgtgtccagagattacaaggctctaagggatggaaataagctggcacagatggaagaggctccacttttcccaggagaatcaattaaagccattgtgaaagatgtcatgtatatctgcccatttatgggagcagtgagtggaaccctgacagtgacggactttaagctgtacttcaaaaatgtcgagagggacccgcattttatccttgatgttccccttggagtgatcagcagagtggagaagattggagcacagagccatggagacaattcctgtggtatagagatagtgtgcaaggatatgaggaacttgcggcttgcttataaacaggaagaacagagtaaactagggatatttgaaaacctcaacaaacatgcatttcctctttctaacggacaggcactatttgcattcagctataaagaaaaatttccaattaatggctggaaagtttatgatccagtatctgaatataagagacagggcttgccaaatgagagttggaaaatatccaaaataaacagtaattatgagttctgtgacacctaccctgccatcattgttgtgccaactagtgtaaaagatgatgacctttcaaaagtggcagcttttcgagcaaaaggcagagtccctgtgttgtcatggattcatccggaaagtcaagcaacgattacccgttgcagccagccacttgtgggtcccaatgataagcgctgcaaagaggatgaaaaatacttgcaaacaataatggatgctaacgcacagtcacacaagcttatcatctttgatgctcgacaaaacagtgtcgctgataccaacaagacaaagggtggaggatatgaaagtgaaagtgcttacccaaatgcagaacttgtgttcttggagatccacaacattcatgtcatgcgagagtcactacgcaaattaaaagagattgtgtacccttcgatcgatgaggcgcggtggctctccaatgtggatgggacgcattggctggaatatataaggatgctgcttgctggggcagtaagaattgctgataaaatagaatctgggaaaacatctgtggtggtgcattgcagcgacggttgggaccgaacagcccagctcacatctctggctatgctaatgttggacagttactacaggaccattaaaggatttgaaactctcgtagaaaaggagtggataagctttggacacaggtttgcactgcgagtgggccatggtaatgacaaccatgcggatgctgaccgatctcccatatttctgcagtttgttgattgtgtttggcaaatgacaaggcagtttccttcagcattcgagtttaatgagctattcttgattacaattttggatcacctttatagctgtctttttgggacctttttgtgcaactgtgaacagcagcgattcaaagaggatgtatatacaaagacgatatctttatggtcgtatatcaatagccagctagacgagttttctaatcccttctttgtgaattatgaaaaccacgtgttatatcctgttgctagtctgagtcatttggaattgtgggtaaattattatgtacgatggaatccacggatgagacctcagatgcccattcaccagaatctcaaggagctgctggccgtcagggcggagctgcagaagcgtgtggagggcctacagcgggaggtggccacgcgcgccgtctcatcctcatctgagcggggctcctcgccctcccactccgccacctccgtccacacctcggtctgatgggcgagaaatatgtaatcccctggctgactaggactgttaaacatagtgtggactggatgatgccttcgacaaaccagagaagccaagttggggggagctggtgcctggagtgggccctgtgcacctcacctggcggaggctgggggggctctgtcagcaggaccctagaggagactctcattcgattttaaagaagcacaacgggtcattttcctttgtatgttcctagcgcagaactgtttctaaaacaacttgaagtatagttttgttatctaagcaatttttgttttaagtaagtaagtgtactagaatgcgaagccgttatggttcaggtttttaaaaactggtacagtattgtatttgtctcatctgttgcactgtatttcaatcatctgtaattaaaatgatcatatgtttgctccctggtcttttttaagtaagtaagtaagtatcttagtagatttttcctttgaggaaaatcggtaataaaataacatggattgaatgtttactgtgcgtcaagcacagttaatatatgatgatgtaaagtaactaactttatgtgatttaattcattcagtaaattgt

SEQ ID NO: 555 - DNA, 2411 bp, Homo sapiens
  CDS (463)..(1470)
  misc_feature (1)...(2411): n = a,t,c or g
gcgggaattcgattcgataaccattagcgtgtggaaccataagaaaattnnaataaacagggagctggcttcctgggctgtgtgcggctgctctccaatgccatcagcagattaaaagataccggatgtaagaaccaaacactttcctgcctcttaatgcaaccaaagaaagcttaggaggcatcgttttttgttttgatcgctgaatactgaattcctgccttcctccctagttcacgttccttgggttaagttttgaattgtttgtttacagaccagcgtttggatctatgcaaactaaacccctcagatactgatgcagttcgtggccagatagtggtcagtttacagacacgagacagaataggaaccggcggctcggtggtggactgcagaggactgttagaaaatgaaggaacggtgtatgaagactccgggcctgggaggccgctcagctgcttcatggaggaaccagccccttacacagatagcaccggtgctgctgctggaggagggaattgcaggttcgtggagtccccaagtcaagatcaaagacttcaggcacagcggcttcgaaaccctgatgtgcgaggttcactacagacgccccagaaccgaccacacggccaccagtccccggaactgcccgaaggctacgaacaaagaacaacagtccagggccaagtttactttttgcatacacagactggagttagcacgtggcacgaccccaggataccaagagaccttaacagtgtgaactgtgatgaacttggaccactgccgccaggctgggaagtcagaagtacagtttctgggaggatatattttgtagatcataataaccgaacaacccagtttacagacccaaggttacaccacatcatgaatcaccagtgccaactcaaggagcccagccagccgctgccactgcccagtgagggctctctggaggacgaggagcttcctgcccagagatacgaaagagatctagtccagaagctgaaagtcctcagacacgaactgtcgcttcagcagccccaagctggtcattgccgcatcgaagtgtccagagaagaaatctttgaggagtcttaccgccagataatgaagatgcgaccgaaagacttgaaaaaacggctgatggtgaaattccgtggggaagaaggtttggattacggtggtgtggccagggagtggctttacttgctgtgccatgaaatgctgaatccttattacgggctcttccagtattctacggacaatatttacatgttgcaaataaatccggattcttcaatcaaccccgaccacttgtcttatttccactttgtggggcggatcatggggctgggctgtgttccatggacactacatcaacgggggcttcacagtgcccttctacaagcagctgctggggaagcccatccagctctcagatctggaatctgtggacccagagctgcataagagcttggtgtggatcctagagaacgacatcacgcctgtactggaccacaccttctgcgtggaacacaacgccttcgggcggatcctgcagcatgaactgaaacccaatgggcagaaatgtgccagtcacagaggagaataagaaagaatacgtccggttgtatgtaaactggaggtttatgagaggaatcgaagcccagttcttagctctgcagaaggggttcaatgagctcatccctcaacatctgctgaagccttttgaccagaaggaactggagctgatcataggcggcctggataaaatagacttgaacgactggaagtcgaacacgcggctgaagcactgtgtggccgacagcaacatcgtgcggtggttctggcaagcggtggagacgttcgatgaagaaaggagggccaggctcctgcagtttgtgactgggtccacgcgagtcccgctccaaggcttcaaggctttgcaaggttctacaggcgcggcagggccccggctgttcaccatccacctgatagacgcgaacacagacaaccttccgaaggcccatacctgctttaaccggatcgacattccaccatatgagtcctatgagaagctctacgagaagctgctgacagccgtggaggagacctgcgggtttgctgtggagtgaaaagcaaccaaaggcaacagagtctagctcatggccaccagaccaaaagcatccagcttctgtgcacctcctgcaaagctggcagaggccctggaattccagatcacctgaggggaaagggttgtctctctcctttctgttgggggagggggatgggggacttttgttggtggctcccacccatatatccctcctttaccatagtactcccacccacttccatcacccatccaataaaatgcagccaggtttagcctttggctttggtcacacagg

SEQ ID NO: 556 - DNA, 6865 bp, Homo sapiens
  CDS (183)..(6386)
ggatcttgtacatcaacccggcagacttgggatggaaccctccagtgagcagctggattgagaagagggaaatccagacagagagagccaacttaaccattttgttcgacaagtatcttccaacctgcctagacacactcagaaccaggtttaagaagatcattcccatcccagagcagagcatggttcagatggtgtgtcaccttctggaatgtctcctgaccacggaggacatccctgcagactgccctaaggaaatttatgagcattattttgtgtttgctgccatctgggctttcggcggagcaatggtccaagatcagcttgtggactaccgggcagagttcagcaaatggtggctgactgagttcaaaacagtcaagtttccttcccaaggaaccatctttgactattacatcgacccagagaccaagaaattcgagccttggtccaagctcgtcccccagttcgaatttgaccccgagatgcccttgcaggcgtgtttggtgcacacgagtgagaccatccgtgtgtgctacttcatggagcggttgatggcgcggcagcggcctgtcatgctggtgggcacggctggcactggcaagtcggtgctggtgggagctaagctggccagccttgaccccgaggcatacctggtgaaaaacgtgccattcaactactacaccacgtcagcaatgctgcaggctgtcctggagaagcctctggaaaagaaggctggcagaaactatggccctccagggaacaagaaactcatctatttcattgatgacatgaacatgcctgaggtggatgcctacgggacggtgcagccccacaccatcatccggcagcatctggactatggccactggtatgatcggagcaagctgtccctaaaggagatcacaaatgtacagtatgtttcctgtatgaaccccacggcaggcagcttcaccatcaacccccggcttcagcgtcacttcagcgtgtttgtcctctccttcccgggggcagatgccctgtcctctatctacagcatcatcctcactcagcatctgaagctcggaaacttcccggcgtccctgcagaaatccatccccccactgatcgatctggccctcgccttccaccagaaaattgctaccaccttcctacccacaggaatcaaattccactacatcttcaacctcagagattttgccaacattttccagggcattctcttctcctcagtggaatgtgtgaaatccacatgggatcttataaggctctatctgcatgaatcaaatcgagtttatcgggataagatggtagaagaaaaggactttgatctttttgataaaatccagacagaagtgctcaagaaaacttttgatgatattgaagaccctgtggagcagacccaaagcccgaacctgtattgtcactttgcaaatggtattggggagcccaaatacatgcctgtacagtcttgggaacttttgacccagactctggtggaggccttggagaaccacaatgaagtcaacacagtgatggacctagttctctttgaggatgccatgcgccatgtctgccatatcaatcgcatcttggagtccccgcggggaaatgctctgctggttggtgtaggtgggagcggcaagcagagcctgacaaggctggcagctttcatcagctccatggatgtcttccagatcacactgcgcaaaggctaccagatccaggacttcaagatggacctggccagcctgtgtctgaaagctggagtgaagaatctcaacacagtgtttctcatgactgatgcccaagtggctgatgagaggttccttgtgctcatcaatgatcttttggcatctggggagatcccagatctctactctgatgatgaagttgaaaacatcataagcaatgtgaggaatgaagtcaagagccagggtctggttgacaacagagagaactgttggaagttctttatagatcggatccggcgacagctgaaggtgactctctgtttctcccctgtgggaaacaagctaagagtccgcagcaggaagttcccagccattgtgaactgcacagccatccactggttccacgagtggcctcagcaagcattggagtctgtcagcctccgcttcttgcagaacacagagggcattgagcccacagtaaagcagtcgattagcaaattcatggcctttgtccacacaagtgtcaaccaaacatcccagtcttatctgagcaatgaacagcgctacaactatacaactcccaagtcctttctggagttcatcagactctaccagagcttgttgcacaggcacagaaaagagctcaagtgcaagacagagcggttggagaacgggctgctgaagctgcatagcacctctgcccaggtggatgatctgaaagcaaagctggctgcccaggaagtagagctgaagcagaaaaatgaagatgcagacaaactgattcaggtcgtgggtgtggagactgacaaagtgagcagagagaaagccatggcagatgaagaggagcagaaggtggccgtcatcatgctagaggtgaaacagaagcagaaggactgtgaggaggacctggcaaaggctgagccagcactcacagcagcgcaggcagctctcaacaccctgaacaagaccaacctgacagagctgaagtcatttggctctccgcctctggccgtcagcaatgtcagcgctgcggtgatggtactgatggctcccaggggtagggtgcccaaggaccggagctggaaggctgctaaggtcaccatggccaaagtggatggcttcctggactcgctaataaacttcaacaaagagaacattcacgagaactgcctcaaagccatcaggccgtatctgcaagacccggagttcaatcctgagtttgtggccaccaaatcctatgcggctgcaggcctctgctcctgggtcatcaatattgtgagattttatgaggtgttctgtgatgtggaacccaagcgccaggcactgaacaaagccaccgcggacctcacagctgcccaggagaagctggctgccatcaaagccaagatcgctcaccttaatgaaaacctggcaaagctcacagccaggtttgagaaagcaacagcagacaaactcaaatgtcagcaagaagccgaagtgaccgcagtcaccatctcccttgccaaccgcctggttggaggactcgcttctgaaaacgtgaggtgggcagatgccgtgcagaacttcaaacagcaggaaaggacgttatgtggagacattttacttataacggctttcatttcctaccttggcttcttcacaaagaaataccggcagagcctcctggacagaacttggaggccctacctgagccagctgaaaactcccattccagtcaccccagccctggatcccctgaggatgctgatggatgatgctgacgtggctgcctggcagaacgagggcctcccagccgaccgcatgtccgtggagaatgccaccattctcatcaactgtgagcgctggccactcatggttgaccctcagctacaaggcatcaaatggatcaagaataaatatggtgaagatctccgggtcacgcagattggtcagaaaggctaccttcaaatcatagagcaggccctggaagctggagctgtggtgctgattgaaaatctagaggagtccattgatcctgttctgggacccctgcttgggagagaagtcattaaaaaaggacgattcattaaaattggagacaaagaatgtgaatacaatcccaagttccggctcatcctccacaccaagctggctaatcctcactaccagcctgagctgcaggctcaggccaccctgatcaacttcaccgtgaccagggatggcctggaggaccagttgctggccgctgtggtcagcatggagaggccagacttggagcagctgaagtccgatctcacaaagcagcagaatggattcaaaattaccctgaaaacgctggaagacagtcttctctctcgcctctcctccgcctctgggaacttcctgggagaaacagtgctggtggaaaacctagagatcaccaagcagactgctgccgaagttgagaaaaaggtccaggaggccaaggtgactgaagtgaaaatcaacgaggcccgagagcactaccggccagcagctgccagggcctcactgctctacttcatcatgaacgacctcagcaagatccatccaatgtaccagttttctctcaaggccttcagtatcgtcttccagaaggctgtggagagggctgctcctgacgaaagcctcagggagcgggtggccaacctaatagacagcataaccttctctgtgtaccagtacaccatccgcgggctctttgagtgtgataagctgacctaccttgcccagctcacctttcagattctcctcatgaaccgagaagtcaatgcagtggagttggatttcctgcttcgatctccagtgcagacgggcaccgccagccccgtggagttcctctcccatcaggcgtggggagctgtcaaggtactttcatcaatggaagaattctctaatctggatcgggacatagagggatctgctaagagctggaaaaagtttgtggagtccgaatgtcctgagaaagagaagctcccacaggagtggaagaacaagacagccctgcagcgcctctgcatgctgagagccatgcggcccgaccggatgacctatgctttgcgagattttgttgaagagaagttaggaagcaaatacgtggtgggaagagccctagattttgcaacctcatttgaagaatcgggaccagccactcctatgtttttcatcctgtctccaggggtggacccactgaaggatgtagaaagtcaaggaagaaaacttggatacaccttcaacaatcagaactttcacaacgtgtctttggggcaaggacaggaagtggtggctgaggctgcgctggacctcgctgccaagaaaggtcactgggttattttgcagaacactctggagatgtgttctcgggagacggagtttaagagcatcctctttgctctttgttacttccatgcggtggtggcagaaagacgaaaatttgggccccagggatggaatcgctcatacccctttaacactggagacctcactatctctgtgaatgtcctctacaacttcctggaggccaacgcaaaggtcccctatgatgatttgcgctacctgtttggagagatcatgtatggaggccatatcacagatgactgggacagaagactctgcagaacctacctgggggaattcattcgaccagaaatgttagaaggagaactgtctttggccccagggttcccactcccaggcaacatggactacaatggttatcatcagtacatcgatgctgagctgcccccagaatccccctacctctatggcctccacccgaacgcagagattggcttcctgacccaaacctcagaaaagctcttccgcactgtgctggagctgcagcctcgggacagccaggccagagacggagcgggcgccacaagagaagaaaaggtcaaggcacttctggaagaaatattggagcgggtgacagacgagtttaacatcccagaactgatggccaaagtggaggagcgcaccccttacattgtagttgccttccaggagtgtggccggatgaatatcctcaccagagagattcagcgctcactgagggagctggagctcggcttaaagggggagctgactatgaccagccacatggagaacttacagaatgccctgtacttcgatatggtgccagagtcctgggctagacgagcctacccttccacagcaggcctggcagcctggtttccagacctcctcaacagaatcaaggagctagaggcttggacgggtgactttacaatgccctccactgtgtggctgacaggcttcttcaacccccagtcgttcctgactgccatcatgcagtccacggctcgcaagaatgagtggccactggaccagatggccctgcaatgtgacatgacgaagaagaacagagaagagtttaggagtcctcctcgggaaggggcctacatccatggcctcttcatggaaggtgcctgctgggacacacaggctgggatcattacagaggcaaagctgaaggatctgacaccccctatgcctgtgatgttcatcaaggccattcctgcagataagcaggactgccgcagtgtctattcctgtcctgtgtacaagactagtcagcggggacccacctacgtgtggactttcaacctgaagactaaggaaaacccatccaagtgggttctggctggagtagccttgcttctccagatttagcatcctgcagagccaccgagaaaataaaaaagctgggcttggaggctgcctagagggacaggtgggtgaagggtcaccacagacacttagaacggtaagaaaccatgagcactcacaattctgtagaattcctctagggaacttggagaggtgtgcctaaggtgaggctgagctgaaggaatgtgggcccaggtttcttaataaaatgatttactcttcaactgtgtctggcccaggatttgagagctgctgaatcataaatgatcatgtagagaccaagagaaacaaaccacaagggccctgaccttgttacacaacactatcctaggtgctcttcttccaggctaccccacgcagtccttggaccagtggtattggcatcacccatgaaccagaatctccattttaacaatctctctggaaaatctgtatgcacattatagtttgagaaacactaccctggagcaggggtcaccaac

SEQ ID NO: 557 - DNA, 7093 bp, Homo sapiens
  CDS (183)..(6611)
ggatcttgtacatcaacccggcagacttgggatggaaccctccagtgagcagctggattgagaagagggaaatccagacagagagagccaacttaaccattttgttcgacaagtatcttccaacctgcctagacacactcagaaccaggtttaagaagatcattcccatcccagagcagagcatggttcagatggtgtgtcaccttctggaatgtctcctgaccacggaggacatccctgcagactgccctaaggaaatttatgagcattattttgtgtttgctgccatctgggctttcggcggagcaatggtccaagatcagcttgtggactaccgggcagagttcagcaaatggtggctgactgagttcaaaacagtcaagtttccttcccaaggaaccatctttgactattacatcgacccagagaccaagaaattcgagccttggtccaagctcgtcccccagttcgaatttgaccccgagatgcccttgcaggcgtgtttggtgcacacgagtgagaccatccgtgtgtgctacttcatggagcggttgatggcgcggcagcggcctgtcatgctggtgggcacggctggcactggcaagtcggtgctggtgggagctaagctggccagccttgaccccgaggcatacctggtgaaaaacgtgccattcaactactacaccacgtcagcaatgctgcaggctgtcctggagaagcctctggaaaagaaggctggcagaaactatggccctccagggaacaagaaactcatctatttcattgatgacatgaacatgcctgaggtggatgcctacgggacggtgcagccccacaccatcatccggcagcatctggactatggccactggtatgatcggagcaagctgtccctaaaggagatcacaaatgtacagtatgtttcctgtatgaaccccacggcaggcagcttcaccatcaacccccggcttcagcgtcacttcagcgtgtttgtcctctccttcccgggggcagatgccctgtcctctatctacagcatcatcctcactcagcatctgaagctcggaaacttcccggcgtccctgcagaaatccatccccccactgatcgatctggccctcgccttccaccagaaaattgctaccaccttcctacccacaggaatcaaattccactacatcttcaacctcagagattttgccaacattttccagggcattctcttctcctcagtggaatgtgtgaaatccacatgggatcttataaggctctatctgcatgaatcaaatcgagtttatcgggataagatggtagaagaaaaggactttgatctttttgataaaatccagacagaagtgctcaagaaaacttttgatgatattgaagaccctgtggagcagacccaaagcccgaacctgtattgtcactttgcaaatggtattggggagcccaaatacatgcctgtacagtcttgggaacttttgacccagactctggtggaggccttggagaaccacaatgaagtcaacacagtgatggacctagttctctttgaggatgccatgcgccatgtctgccatatcaatcgcatcttggagtccccgcggggaaatgctctgctggttggtgtaggtgggagcggcaagcagagcctgacaaggctggcagctttcatcagctccatggatgtcttccagatcacactgcgcaaaggctaccagatccaggacttcaagatggacctggccagcctgtgtctgaaagctggagtgaagaatctcaacacagtgtttctcatgactgatgcccaagtggctgatgagaggttccttgtgctcatcaatgatcttttggcatctggggagatcccagatctctactctgatgatgaagttgaaaacatcataagcaatgtgaggaatgaagtcaagagccagggtctggttgacaacagagagaactgttggaagttctttatagatcggatccggcgacagctgaaggtgactctctgtttctcccctgtgggaaacaagctaagagtccgcagcaggaagttcccagccattgtgaactgcacagccatccactggttccacgagtggcctcagcaagcattggagtctgtcagcctccgcttcttgcagaacacagagggcattgagcccacagtaaagcagtcgattagcaaattcatggcctttgtccacacaagtgtcaaccaaacatcccagtcttatctgagcaatgaacagcgctacaactatacaactcccaagtcctttctggagttcatcagactctaccagagcttgttgcacaggcacagaaaagagctcaagtgcaagacagagcggttggagaacgggctgctgaagctgcatagcacctctgcccaggtggatgatctgaaagcaaagctggctgcccaggaagtagagctgaagcagaaaaatgaagatgcagacaaactgattcaggtcgtgggtgtggagactgacaaagtgagcagagagaaagccatggcagatgaagaggagcagaaggtggccgtcatcatgctagaggtgaaacagaagcagaaggactgtgaggaggacctggcaaaggctgagccagcactcacagcagcgcaggcagctctcaacaccctgaacaagaccaacctgacagagctgaagtcatttggctctccgcctctggccgtcagcaatgtcagcgctgcggtgatggtactgatggctcccaggggtagggtgcccaaggaccggagctggaaggctgctaaggtcaccatggccaaagtggatggcttcctggactcgctaataaacttcaacaaagagaacattcacgagaactgcctcaaagccatcaggccgtatctgcaagacccggagttcaatcctgagtttgtggccaccaaatcctatgcggctgcaggcctctgctcctgggtcatcaatattgtgagattttatgaggtgttctgtgatgtggaacccaagcgccaggcactgaacaaagccaccgcggacctcacagctgcccaggagaagctggctgccatcaaagccaagatcgctcaccttaatgaaaacctggcaaagctcacagccaggtttgagaaagcaacagcagacaaactcaaatgtcagcaagaagccgaagtgaccgcagtcaccatctcccttgccaaccgcctggttggaggactcgcttctgaaaacgtgaggtgggcagatgccgtgcagaacttcaaacagcaggaaaggacgttatgtggagacattttacttataacggctttcatttcctaccttggcttcttcacaaagaaataccggcagagcctcctggacagaacttggaggccctacctgagccagctgaaaactcccattccagtcaccccagccctggatcccctgaggatgctgatggatgatgctgacgtggctgcctggcagaacgagggcctcccagccgaccgcatgtccgtggagaatgccaccattctcatcaactgtgagcgctggccactcatggttgaccctcagctacaaggcatcaaatggatcaagaataaatatggtgaagatctccgggtcacgcagattggtcagaaaggctaccttcaaatcatagagcaggccctggaagctggagctgtggtgctgattgaaaatctagaggagtccattgatcctgttctgggacccctgcttgggagagaagtcattaaaaaaggacgattcattaaaattggagacaaagaatgtgaatacaatcccaagttccggctcatcctccacaccaagctggctaatcctcactaccagcctgagctgcaggctcaggccaccctgatcaacttcaccgtgaccagggatggcctggaggaccagttgctggccgctgtggtcagcatggagaggccagacttggagcagctgaagtccgatctcacaaagcagcagaatggattcaaaattaccctgaaaacgctggaagacagtcttctctctcgcctctcctccgcctctgggaacttcctgggagaaacagtgctggtggaaaacctagagatcaccaagcagactgctgccgaagttgagaaaaaggtccaggaggccaaggtgactgaagtgaaaatcaacgaggcccgagagcactaccggccagcagctgccagggcctcactgctctacttcatcatgaacgacctcagcaagatccatccaatgtaccagttttctctcaaggccttcagtatcgtcttccagaaggctgtggagagggctgctcctgacgaaagcctcagggagcgggtggccaacctaatagacagcataaccttctctgtgtaccagtacaccatccgcgggctctttgagtgtgataagctgacctaccttgcccagctcacctttcagattctcctcatgaaccgagaagtcaatgcagtggagttggatttcctgcttcgatctccagtgcagacgggcaccgccagccccgtggagttcctctcccatcaggcgtggggagctgtcaaggtactttcatcaatggaagaattctctaatctggatcgggacatagagggatctgctaagagctggaaaaagtttgtggagtccgaatgtcctgagaaagagaagctcccacaggagtggaagaacaagacagccctgcagcgcctctgcatgctgagagccatgcggcccgaccggatgacctatgctttgcgagattttgttgaagagaagttaggaagcaaatacgtggtgggaagagccctagattttgcaacctcatttgaagaatcgggaccagccactcctatgtttttcatcctgtctccaggggtggacccactgaaggatgtagaaagtcaaggaagaaaacttggatacaccttcaacaatcagaactttcacaacgtgtctttggggcaaggacaggaagtggtggctgaggctgcgctggacctcgctgccaagaaaggtcactgggttattttgcagaacattcacctggtggccaagtggctcagcaccctggagaagaagctggaggagcacagtgagaacagccacccagagttcagggtcttcatgagtgcagagccagcaccctcccctgagggccacatcatcccccagggcatcctggagaactccattaagatcaccaatgagccccccacgggcatgcatgccaacctgcacaaggccctggacaacttcactcaggacactctggagatgtgttctcgggagacggagtttaagagcatcctctttgctctttgttacttccatgcggtggtggcagaaagacgaaaatttgggccccagggatggaatcgctcatacccctttaacactggagacctcactatctctgtgaatgtcctctacaacttcctggaggccaacgcaaaggtcccctatgatgatttgcgctacctgtttggagagatcatgtatggaggccatatcacagatgactgggacagaagactctgcagaacctacctgggggaattcattcgaccagaaatgttagaaggagaactgtctttggccccagggttcccactcccaggcaacatggactacaatggttatcatcagtacatcgatgctgagctgcccccagaatccccctacctctatggcctccacccgaacgcagagattggcttcctgacccaaacctcagaaaagctcttccgcactgtgctggagctgcagcctcgggacagccaggccagagacggagcgggcgccacaagagaagaaaaggtcaaggcacttctggaagaaatattggagcgggtgacagacgagtttaacatcccagaactgatggccaaagtggaggagcgcaccccttacattgtagttgccttccaggagtgtggccggatgaatatcctcaccagagagattcagcgctcactgagggagctggagctcggcttaaagggggagctgactatgaccagccacatggagaacttacagaatgccctgtacttcgatatggtgccagagtcctgggctagacgagcctacccttccacagcaggcctggcagcctggtttccagacctcctcaacagaatcaaggagctagaggcttggacgggtgactttacaatgccctccactgtgtggctgacaggcttcttcaacccccagtcgttcctgactgccatcatgcagtccacggctcgcaagaatgagtggccactggaccagatggccctgcaatgtgacatgacgaagaagaacagagaagagtttaggagtcctcctcgggaaggggcctacatccatggcctcttcatggaaggtgcctgctgggacacacaggctgggatcattacagaggcaaagctgaaggatctgacaccccctatgcctgtgatgttcatcaaggccattcctgcagataagcaggactgccgcagtgtctattcctgtcctgtgtacaagactagtcagcggggacccacctacgtgtggactttcaacctgaagactaaggaaaacccatccaagtgggttctggctggagtagccttgcttctccagatttagcatcctgcagagccaccgagaaaataaaaaagctgggcttggaggctgcctagagggacaggtgggtgaagggtcaccacagacacttagaacggtaagaaaccatgagcactcacaattctgtagaattcctctagggaacttggagaggtgtgcctaaggtgaggctgagctgaaggaatgtgggcccaggtttcttaataaaatgatttactcttcaactgtgtctggcccaggatttgagagctgctgaatcataaatgatcatgtagagaccaagagaaacaaaccacaagggccctgaccttgttacacaacactatcctaggtgctcttcttccaggctaccccacgcagtccttggaccagtggtattggcatcacccatgaaccagaatctccattttaacaatctctctggaaaatctgtatgcacattatagtttgagaaacactaccctggagcaggggtcaccaac

SEQ ID NO: 558 - DNA, 3440 bp, Homo sapiens
  CDS (428)..(3319)
gcacgagcagcagtcggccggccagcggacggcagagcgggcggacgggtaggcccggcctgctcttcgcgaggaggaagaaggtggccactctcccggtccccagaacctccccagcccccgcagtccgcccagaccgtaaagggggacgctgaggagccgcggacgctctccccggtgccgccgccgctgccgccgccatggctgccatgatggatcggaagtgagcattagggttaacggctgccggcgccggctcttcaagtcccggctccccggccgcctccacccggggaagcgcagcgcggcgcagctgactgctgcctctcacggccctcgcgaccacaagccctcaggtccggcgcgttccctgcaagactgagcggcggggagtggctcccggccgccggccccggctgcgagaaagatggcggacctggccgagtgcaacatcaaagtgatgtgtcgcttcagacctctcaacgagtctgaagtgaaccgcggcgacaagtacatcgccaagtttcagggagaagacacggtcgtgatcgcgtccaagccttatgcatttgatcgggtgttccagtcaagcacatctcaagagcaagtgtataatgactgtgcaaagaagattgttaaagatgtacttgaaggatataatggaacaatatttgcatatggacaaacatcctctgggaagacacacacaatggagggtaaacttcatgatccagaaggcatgggaattattccaagaatagtgcaagatatttttaattatatttactccatggatgaaaatttggaatttcatattaaggtttcatattttgaaatatatttggataagataagggacctgttagatgtttcaaagaccaacctttcagttcatgaagacaaaaaccgagttccctatgtaaaggggtgcacagagcgttttgtatgtagtccagatgaagttatggataccatagatgaaggaaaatccaacagacatgtagcagttacaaatatgaatgaacatagctctaggagtcacagtatatttcttattaatgtcaaacaagagaacacacaaacggaacaaaagctgagtggaaaactttatctggttgatttagctggtagtgaaaaggttagtaaaactggagctgaaggtgctgtgctggatgaagctaaaaacatcaacaagtcactttctgctcttggaaatgttatttctgctttggctgagggtagtacatatgttccatatcgagatagtaaaatgacaagaatccttcaagattcattaggtggcaactgtagaaccactattgtaatttgctgctctccatcatcatacaatgagtctgaaacaaaatctacactcttatttggccaaagggccaaaacaattaagaacacagtttgtgtcaatgtggagttaactgcagaacagtggaaaaagaagtatgaaaaagaaaaagaaaaaaataagatcctgcggaacactattcagtggcttgaaaatgagctcaacagatggcgtaatggggagacggtgcctattgatgaacagtttgacaaagagaaagccaacttggaagctttcacagtggataaagatattactcttaccaatgataaaccagcaaccgcaattggagttataggaaattttactgatgctgaaagaagaaagtgtgaagaagaaattgctaaattatacaaacagcttgatgacaaggatgaagaaattaaccagcaaagtcaactggtagagaaactgaagacgcaaatgttggatcaggaggagcttttggcatctaccagaagggatcaagacaatatgcaagctgagctgaatcgccttcaagcagaaaatgatgcctctaaagaagaagtgaaagaagttttacaggccctagaagaacttgctgtcaattatgatcagaagtctcaggaagttgaagacaaaactaaggaatatgaattgcttagtgatgaattgaatcagaaatcggcaactttagcgagtatagatgctgagcttcagaaacttaaggaaatgaccaaccaccagaaaaaacgagcagctgagatgatggcatctttactaaaagaccttgcagaaataggaattgctgtgggaaataatgatgtaaagcagcctgagggaactggcatgatagatgaagagttcactgttgcaagactctacattagcaaaatgaagtcagaagtaaaaaccatggtgaaacgttgcaagcagttagaaagcacacaaactgagagcaacaaaaaaatggaagaaaatgaaaaggagttagcagcatgtcagcttcgtatctctcaacatgaagccaaaatcaagtcattgactgaataccttcaaaatgtggaacaaaagaaaagacagttggaggaatctgtcgatgccctcagtgaagaactagtccagcttcgagcacaagagaaagtccatgaaatggaaaaggagcacttaaataaggttcagactgcaaatgaagttaagcaagctgttgaacagcagatccagagccatagagaaactcatcaaaaacagatcagtagtttgagagatgaagtagaagcaaaagcaaaacttattactgatcttcaagaccaaaaccagaaaatgatgttagagcaggaacgtctaagagtagaacatgagaagttgaaagccacagatcaggaaaagagcagaaaactacatgaacttacggttatgcaagatagacgagaacaagcaagacaagacttgaagggtttggaagagacagtggcaaaagaacttcagactttacacaacctgcgcaaactctttgttcaggacctggctacaagagttaaaaagagtgctgagattgattctgatgacaccggaggcagcgctgctcagaagcaaaaaatctcctttcttgaaaataatcttgaacagctcactaaagtgcacaaacagttggtacgtgataatgcagatctccgctgtgaacttcctaagttggaaaagcgacttcgagctacagctgagagagtgaaagctttggaatcagcactgaaagaagctaaagaaaatgcatctcgtgatcgcaaacgctatcagcaagaagtagatcgcataaaggaagcagtcaggtcaaagaatatggccagaagagggcattctgcacagattgctaaacctattcgtcccgggcaacatccagcagcttctccaactcacccaagtgcaattcgtggaggaggtgcatttgttcagaacagccagccagtggcagtgcgaggtggaggaggcaaacaagtgtaatcgtttatacatacccacaggtgttaaaaagtaatcgaagtacgaagaggacatggtatcaagcagtcattcaatgactataacctctactcccttgggattgtagaattataacttttaa

SEQ ID NO: 559 - DNA, 2179 bp, Homo sapiens
  CDS (1)..(1755)
atggcgtctgtgcaggcgtcccgccgccagtggtgctacctgtgcgacctgcccaagatgccgtgggccatggtgtgggacttcagcgaggccgtgtgtcgcggctgcgtgaacttcgagggcgcggaccgcatcgaactgctcatcgatgccgcccgccagctcaagcgcagccacgtgctccccgagggccgctcgcccgggcccccggcccttaagcacccggccaccaaggacctggcggcggcagccgcacaggggccccagctgccgcccccgcaggcccagccccagccgtcagggaccggcggcggcgtgtcgggccaggaccgctatgacagggccacatcatcaggccgcctccccctgccctcgcccgccctggagtacactctggggtcccgcctggccaatgggctgggccgtgaggaggccgtggctgagggggcgcgaagggccttgcttggctccatgcctggcttgatgccccctgggctgctggcagctgcagtgtctggcctgggaagccgaggcctgacgctggcacccggcttgagtcctgcccgtcccctcttcggctccgatttcgagaaagagaagcagcagaggaatgcggactgtctggcagaactgaacgaggccatgcgaggccgggcagaggaatggcacgggcgccccaaagcagtgcgggaacagctactggcgctgtccgcctgcgccccgttcaatgtgcgcttcaagaaggatcacgggctggtggggcgagtgttcgccttcgatgctactgcccgtcctccaggatacgagttcgagctgaagctcttcaccgaatacccctgtggttccggcaatgtgtacgccggcgtcctggcagtggctcgccagatgttccacgatgctctgcgggagccgggcaaggcactggcttcttcgggcttcaagtacctcgaatatgaacgccggcatggatcaggagaatggcggcagctgggcgagctgcttaccgacggcgtccgcagcttccgcgagccagctcccgcggaggccctgccccagcagtacccagagccggcccctgcggctctctgtggcccacccccgcgagccccatcccggaacctggcgcccacgccgcgccgtcgcaaggcatcccccgagccggagggcgaggcggctgggaagatgaccaccgaggagcagcagcaacggcactgggtggcacccggcggcccgtactccgctgagacccctggtgtgccctcgcccattgccgccctgaagaatgtggccgaagccctgggccactcacccaaggaccctggcggaggcggggggcctgtgcgtgcagggggcgccagccctgcagcctcctccacggcccagccgccaacccagcatcgccttgtggcccgcaacggcgaagcagaagtcagtcccacagcgggggccgaagctgtcagcgggggtggcagcggcactggggcgacccctggggcccccctgtgctgtaccctgtgcagggagcggctagaagacacccacttcgtccagtgcccctcggtgcccggacacaagttctgctttccctgctcccgggagttcatcaaggcgcagggcccggccggggaggtgtactgcccgagcggagacaagtgcccgctggtcggctcctccgtgccctgggccttcatgcagggcgagatcgccaccatccttgctggagacatcaaagttaagaaagaacgggacccctaggctaccactgcctccaggctactgccctctgcccctttgccacccaccgctgccgcggataaattattccctccccgacccagcccagtgccacctctatctgtgtacatactcccttcttccacccagatgggtcccctggggtagatgcattgtgggtggggggagaaagcttgtggctcctgtccgagggggtgtttggggtcccttggcccctccagtttccctctgtcctccttggcttggctttgctgctgcttgtagttgggggagaggtgcccccctcctccttgagaagggacctcctgaaaactcgctctttataaacgaggcaaaagcatttaattcccacccccccaccccccgctcccttctgctccttcaataaaccgaaagatgggtttttttttttaaaaaaaaaaaa

SEQ ID NO: 560 - DNA, 2591 bp, Homo sapiens
  CDS (312)..(2060)
attccactccgctggtcccttcagaagaaccaaatgaggaccctgaagccgaggtgaaaatcgaaggaaacacaaattcatccagtgttacaaattctgcagcaggtgttgaagatcttaacatcgttcaagtgactgttccagataatgagaaggaaagattatcaagcattgaaaagattaaacagctaagagaacaagttaatgacctctttagccgaaaatttggtgaagcaattggcgtggatttccctgtgaaagttccctacaggaagatcacattcaaccctggctgtgtggtgattgatggcatgcccccgggggtggtattcaaggcccccggctatctggaaatcagttccatgaggaggatcttggaggcagctgagtttatcaaattcacagtcatcaggccgcttccagggcttgagctcagtaatggtgagtattctacagtgggaaaacgcaagatagaccaggagggccgtgtgtttcaagaaaagtgggagagagcgtatttcttcgtggaagtacagaatattccaacatgtctcatatgcaaacaaagcatgtctgtgtccaaagaatataacctaagacgccactatcaaaccaatcacagcaagcattatgaccagtatatggaaagaatgcgtgacgagaagcttcacgagctgaaaaaagggctcaggaagtatctcttaggctcgtcagacaccgagtgtcccgagcaaaaacaagtgtttgcaaacccaagtccaacccagaaatcccccgtgcagcctgtagaggacctagctgggaacttatgggagaagttacgtgaaaaaatcaggtcttttgtggcatattctatcgcaatcgatgagatcacggatataaataataccacccagttggccatattcatccgtggtgtcgatgagaatttcgatgtgtccgaagaacttctggacacggtgcccatgacgggtacaaaatctggcaacgagatcttttcgcgtgttgagaagagcctgaaaaagttctgtatcgactggtcgaaattagtaagcgtggcctccactggcaccccagcgatggtggatgccaataacgggcttgtcacaaaactgaagtccagggtggcgacgttctgcaagggtgcggaactgaagtccatctgttgtataattcatccggaatcactctgtgctcagaagttgaagatggaccacgtcatggacgtggtagtgaagtccgtgaactggatatgctcccggggactgaaccacagcgagttcacaaccttgctctatgagctggacagccagtatggtagcctcctgtactacacggagattaagtggctcagtcgcgggctcgtgctaaagagatttttcgaatccttggaagaaatcgactccttcatgtcatccagagggaaacccctgcctcaactgagctccatagattggatccgagacctggccttcttggttgacatgacgatgcatctgaacgctttgaacatctctctccaaggacactcccaaatcgtcacgcagatgtatgacctgatccgggcgttcctagcaaaactgtgcctctgggagactcatttgacgaggaataatctggcccactttcccaccctgaaattggtttccagaaatgaaagcgatggcctgaactacattcccaaaatcgcggaactcaagaccgaattccagaaaaggctgtctgatttcaaactctacgaaagcgaactgactctgttcagctccccgttctccacgaagatcgacagtgtgcacgaggagctccagatggaggttatcgacctgcaatgcaacacggtcctgaagacgaaatacgacaaggtgggaataccagaattctacaagtacctctggggtagctacccgaaatacaagcaccattgcgcaaagattctttccatgttcgggagcacctacatctgcgaacagctgttctccattatgaaactgagcaaaacaaaatactgctcccagttaaaggattcccagtgggattctgtactccacatcgcaacgtgatggagagaaaactcctggcagggccctatggtgggaaaggctggagtcttctagtcccaagggattgggagatgacaaaatgaattttttttttcttttttgagatggagtcttgctctgtcgcccaggttggagtgcagtggcgtgatctcggcttactgcaacttccagctcctgggttcgaacgattctcctgcctcagcctcccgagcagctgggactacaggcatgcgccaccatgcccggctaatttttgtattagtagagatgaggtttcaccatgttggccaggctggtctccaactcctgacctcaggtgatccacctgcctcgacctcacaaagtgctgggattacaggcatgaaccactgtgcccagctgacaaaatgagttcttaaactttttttttttttcagttttttttccactttgaatcagaaatataatctgcagtatcatacttgtttatattacattgtatgcctcactattcattaaaaatcaagaaagttttattgtaaaaaaaaaaaa

SEQ ID NO: 561 - DNA, 1556 bp, Homo sapiens
  CDS (12)..(1097)
ggctgggagagatggcaggcggaagacaccggcgcgtcgtgggcaccctccacctgctgctgctggtggccgccctgccctgggcatccaggggggtcagtccgagtgcctcagcctggccagaggagaagaattaccaccagccagccattttgaattcatcggctcttcggcaaattgcagaaggcaccagtatctctgaaatgtggcaaaatgacttacagccattgctgatagagcgatacccgggatcccctggaagctatgctgctcgtcagcacatcatgcagcgaattcagaggcttcaggctgactgggtcttggaaatagacaccttcttgagtcagacaccctatgggtaccggtctttctcaaatatcatcagcaccctcaatcccactgctaaacgacatttggtcctcgcctgccactatgactccaagtatttttcccactggaacaacagagtgtttgtaggagccactgattcagccgtgccatgtgcaatgatgttggaacttgctcgtgccttagacaagaaactcctttccttaaagactgtttcagactccaagccagatttgtcactccagctgatcttctttgatggtgaagaggcttttcttcactggtctcctcaagattctctctatgggtctcgacacttagctgcaaagatggcatcgaccccgcacccacctggagcgagaggcaccagccaactgcatggcatggatttattggtcttattggatttgattggagctccaaacccaacgtttcccaatttttttccaaactcagccaggtggttcgaaagacttcaagcaattgaacatgaacttcatgaattgggtttgctcaaggatcactctttggaggggcggtatttccagaattacagttatggaggtgtgattcaggatgaccatattccatttttaagaagaggtgttccagttctgcatctgataccgtctcctttccctgaagtctggcacaccatggatgacaatgaagaaaatttggatgaatcaaccattgacaatctaaacaaaatcctacaagtctttgtgttggaatatcttcatttgtaatactctgatttagtttaggataattggttctagaattgaattcaaaagtcaaggcatcatttaaaataatctgatttcagacaaatgctgtgtggaaacatctatcctatagatcatcctattcttatgtgtctttggttatcagatcaattacagaataattgtgttgtgatattgtgtcctaaattgctcattaatttttatttacagattgaaaaagaggcaccgtgtaaagaaaatggcaaaataaatatctttccaaggatcatcatcacgatagctaaacagtacttaaatagcggttggaactaggtagcctttcgaattttatgattttttcatatgtggaaatctattacatgtaatacaaaacaaacatgtagtttgaaggcggtcagatttctttgagaaatctttgtagagttaattttatggaaattaaaatcagaattaaatgct

SEQ ID NO: 562 - DNA, 1409 bp, Homo sapiens
  CDS (12)..(950)
ggctgggagagatggcaggcggaagacaccggcgcgtcgtgggcaccctccacctgctgctgctggtggccgccctgccctgggcatccaggggggtcagtccgagtgcctcagcctggccagaggagaagcacatcatgcagcgaattcagaggcttcaggctgactgggtcttggaaatagacaccttcttgagtcagacaccctatgggtaccggtctttctcaaatatcatcagcaccctcaatcccactgctaaacgacatttggtcctcgcctgccactatgactccaagtatttttcccactggaacaacagagtgtttgtaggagccactgattcagccgtgccatgtgcaatgatgttggaacttgctcgtgccttagacaagaaactcctttccttaaagactgtttcagactccaagccagatttgtcactccagctgatcttctttgatggtgaagaggcttttcttcactggtctcctcaagattctctctatgggtctcgacacttagctgcaaagatggcatcgaccccgcacccacctggagcgagaggcaccagccaactgcatggcatggatttattggtcttattggatttgattggagctccaaacccaacgtttcccaatttttttccaaactcagccaggtggttcgaaagacttcaagcaattgaacatgaacttcatgaattgggtttgctcaaggatcactctttggaggggcggtatttccagaattacagttatggaggtgtgattcaggatgaccatattccatttttaagaagaggtgttccagttctgcatctgataccgtctcctttccctgaagtctggcacaccatggatgacaatgaagaaaatttggatgaatcaaccattgacaatctaaacaaaatcctacaagtctttgtgttggaatatcttcatttgtaatactctgatttagtttaggataattggttctagaattgaattcaaaagtcaaggcatcatttaaaataatctgatttcagacaaatgctgtgtggaaacatctatcctatagatcatcctattcttatgtgtctttggttatcagatcaattacagaataattgtgttgtgatattgtgtcctaaattgctcattaatttttatttacagattgaaaaagaggcaccgtgtaaagaaaatggcaaaataaatatctttccaaggatcatcatcacgatagctaaacagtacttaaatagcggttggaactaggtagcctttcgaattttatgattttttcatatgtggaaatctattacatgtaatacaaaacaaacatgtagtttgaaggcggtcagatttctttgagaaatctttgtagagttaattttatggaaattaaaatcagaattaaatgct

SEQ ID NO: 563 - DNA, 968 bp, Homo sapiens
  CDS (124)..(639)
tagactactatagggaatttggccctcgaggcaaggaattcggcacgagggtgtgatagcggcagcgaggggctcggagaggtgctcggattctcgtagctgtgccgggacttaaccaccaccatgtcgagcaaaagaacaaagaccaagaccaagaagcgccctcagcgtgcaacatccaatgtgtttgctatgtttgaccagtcacagattcaggagttcaaagaggccttcaacatgattgatcagaacagagatggtttcatcgacaaggaagatttgcatgatatgcttgcttcattggggaagaatccaactgatgagtatctagatgccatgatgaatgaggctccaggccccatcaatttcaccatgttcctcaccatgtttggtgagaagttaaatggcacagatcctgaagatgtcatcagaaatgcctttgcttgctttgatgaagaagcaactggcaccatacaggaagattacttgagagagctgctgacaaccatgggggatcggtttacagatgaggaagtggatgagctgtacagagaagcacctattgataaaaaggggaatttcaattacatcgagttcacacgcatcctgaaacatggagccaaagacaaagatgactgaaataacttcaaattccagccaaacgttccttgttgccactttgggtattctgagattttctcttgcatgcccttagctttacagcttttgcatttcctgttgtatttattctcagccattttgggcatatgtatctttataatcagactggaaacgggactttctattaatatcattttcagaataaaaaatagggtaatttaacctaccagcccttctcccccaataactgtggtctatacagagtcaatatattttttcagagaaagttattcgctcgattttttctgaatcataattaaactttatgataaaataaaaaaaaaaaa

SEQ ID NO: 564 - DNA, 6044 bp, Homo sapiens
  CDS (1)..(5163)
atggcggctgccccctccgcgctgcttctgctgccgccctttccagtcctctctacctatcggctccagagccgcagtcgtccttccgccccagagaccgatgatagtcgagttgggggcattatgagaggagagaaaaactactacttccgtggagctgcgggggaccacggttcctgccccactacaacttcgcctctggcctcggccctcttgatgccctcggaggcagtctcaagcagctggtctgagtctggaggcggtttgtcagggggagatgaagaggacactcggctccttcaactcctccgcactgcccgggatccttctgaggccttccaggctttgcaagctgctttgccgcggcggggcggtcgacttggcttcccccgacgcaaggaagctttgtatcgggcactgggccgagtgcttgtggaaggaggtagtgatgagaagcggctctgcttgcaacttctctcggacgttctccggggtcagggggaggcaggccagcttgaagaggcctttagcttagcacttttgcctcaactagttgtctcgttacgggaagagaatccagccctgcggaaagatgcgctgcagatccttcatatatgtctgaaacgtagtcctggagaggtgctgagaacgcttatacaacaaggactggaaagtaccgatgcccgacttagagcttccacagcactactgcttcccatcttgcttactactgaggacttgttgcttggtctggatctcaccgaggtgataatatccctagcccgaaagcttggtgatcaggagacagaagaagaatctgagacagctttctccgcacttcaacaaattggggagcgacttggccaagacaggtttcaatcttacatttctcgtctgccctctgccctgaggagacactacaatcgccgcctggagtcccagtttggaagtcaggttccttattatttggaacttgaagcctctggatttcctgaagatccccttccctgtgcagtgactctttccaacagcaatcttaaatttgggattattcctcaggagctgcattcacgattattggatcaggaagactataagaaccggacccaggccgtcgaagaactaaagcaggtgctgggaaaatttaaccctagttctactcctcattctagtcttgttggcttcattagtttgctatataatttgttagacgattctaacttcaaagtggtgcatggcacacttgaagtcctgcatttactggttattcgccttggagagcaggtacagcagttcttgggaccagttatagcagcttctgtcaaagtgctggcggacaacaagttggtgatcaaacaagaatacatgaaaatcttcctcaagctaatgaaggaagtaggacctcagcaggtgctttgtttactcctggaacatctcaaacataagcattccagagtgagagaggaggtggtgaacatttgcatctgctccctgctgacctatcctagtgaggattttgacttgcccaaactgtcctttgatcttgccccagctcttgtagatagcaaacgcagggtacgccaagcagctttagaagcttttgccgtattggcatcatcaatgggctcaggtaaaaccagcatcctttttaaagctgtggatacagttgaactgcaagataatggagatggagtgatgaatgctgtgcaggccagattggctaggaaaaccttaccaaggctcacagagcagggatttgtggaatatgcagtactgatgccatcttctgccgggggtaggtcaaaccatttggcacatggagcagatacggactggcttttggctggtaacagaactcagagtgcacactgtcactgtggtgaccacgtgagggatagcatgcacatttatggatcttacagcccaactatctgtacccgaagggtattaagtgcaggaaaaggaaaaaataaattaccatgggaaaatgagcaacctggaatcatgggagaaaaccagacctccacttccaaggatatagagcagttttcaacatatgatttcatcccatctgcaaaattaaagctttctcaaggaatgccagtcaatgatgatttatgttttagcagaaaaagagtatcaagaaacttatttcagaatagtcgggattttaacccagattgtcttcctttatgtgctgctggtactactgggactcatcaaacaaatctttctgggaaatgtgcacaacttggattttcacaaatatgtggtaaaactggcagtgtgggttctgacttacaattcctagggacaactagcagtcatcaagaaaaagtgtatgctagcctcaattttggcagtaagacacagcaaacatttggtagtcaaacagagtgtacttcctcaaatggtcaaaatccaagtccaggagcttacatccttccatcctatcctgtctcatcacctcgaactagtccaaagcatacatctcctcttattatatctccaaagaagtctcaagataattctgttaatttctcaaattcctggcctcttaaaagcttcgaaggactatcaaagccaagtccacagaagaagcttgtcagccaaaaatcgtctgatcctacgggtagaaatcatggagaaaattctcaagaaaaacctccagttcagcttacacctgccttggtgagatcgccatcttcccgacgaggtctaaatgggacaaagcctgttcctcccataccaaggggaataagccttttgcctgataaagctgatttaagcacagtgggacacaaaaagaaagagcctgatgatatttggaagtgtgaaaaagatagtcttccaattgatctttcagaattaaatttcaaggataaagatttggatcaagaagagatgcatagctctcttaggtcccttcgtaatagtgcagctaagaaaagagcaaaactgagtggcagtacttcagatcttgaaagccctgattctgcaatgaagctcgacttgacgatggactccccgtctctgtcttcctcaccaaacatcaattcttacagtgaaagtggagtttacagccaagaatcattgacttcttctctgtctacaactccccaggggaagagaataatgtcagacatatttccaacatttgggtcaaaaccttgtccaacaagactttcttctgcaaagaaaaaaatttctcatattgctgaacaaagccccagtgcagggtcatcatcaaatccacagcaaatttccagttttgacttcacaaccacaaaggctttatcagaagactcagtagtagttgttggaaaaggcgtatttggaagtttaagttcagcaccagcaacctgcagccaatcagtgatatcttctgtggaaaatggggatacattttcaattaaacaaagtattgaaccaccatcagggatttatggaagatcagtccagcaaaatatttcatcatatcttgatgttgagaatgaaaaagatgctaaagtttctatttctaaatctacttataacaagatgagacaaaaaaaaaaagaaaagaaagaactgtttcacaataaagattgtgaaaagaaggaaaaaaattcctgggaacgaatgagacatacaggaactgagaaaatggcatctgaaagtgaaacacctactggagctatttcacagtataaagaaaggatgccttctgtcactcatagtccagaaataatggatctgtcagaactacgaccattctctaaaccagaaatagcactgacagaagccctgaggcttttggctgatgaggattgggagaagaaaattgagggactgaattttattagatgcttagctgcttttcattctgagatactgaacacaaagttgcatgaaacaaattttgcagttgttcaagaggtgaaaaatttacgttctggagtttctcgtgctgctgtggtctgtttaagtgatcttttcacttatttgaaaaagagcatggatcaagagctagataccacagtaaaagttttgttgcacaaggctggtgaatcaaatacatttataagagaagatgttgacaaagcattgagagctatggttaataatgtaactcctgcacgtgcagttgtttctcttatcaatggtggacaaaggtattatggtcgaaagatgctgttcttcatgatgtgtcatcctaactttgaaaaaatgcttgaaaagtatgtcccatctaaagatttgccatatattaaggactctgttagaaacttacagcaaaagggtttgggggagataccattagatactccttcagcaaaaggaagacgatctcatactggcagtgttggaaatacaagatcatcatctgtttctagagatgctttcaattcagctgaaagagctgtaactgaagttcgtgaagtcaccagaaaatcagtccctcgtaattccttagaaagtgctgagtaccttaaactcataactggcttattaaatgcaaaagactttcgtgatcgtattaatgggattaagcagcttttatcagatacagaaaataatcaagaccttgttgttggaaacattgtgaagatttttgatgcttttaaatctcgacttcatgattctaatagtaaagtaaatctggtggctctggaaacaatgcacaaaatgattcctctacttagagaccacttatctcctataatcaacatgctaattccagcaatagtggataacaatctgaattccaagaatccaggcatctatgcggctgctacaaatgttgttcaggcactgagtcagcatgtagacaattacttacttctacagccattttgcacaaaagctcagtttttaaatggaaaagcaaaacaggacatgacggaaaagcttgctgatattgttacggaactttatcaaaggaagccgcatgccacagagcagaaagtgttggttgttttatggcatctcttaggaaatatgacaaatagtggctctctgcctggagctggaggaaatatacgaacagccacagctaaattatcaaaagcactctttgcacagatgggtcagaatctgttaaatcaggctgcatctcaaccaccacatatcaaaaagagtttggaggaattactcgatatgacaattttaaatgaattatgaatcttcgataaaatactgtatgatgaacaaaagtgtttacatgatgacaaatggaactttctaaaagttatgttatcagtgcctgcacttcacatccagcaaattaagtcaatggctatttttatttgcagcctatgagtacacatctgtcctatatcaaccttaccacttatattcatcacataaaaacctaaaatattcatgaataattcatgaaatctgagtcacatgggatgaattcaattttaatatttttgagaaaagtcctgctcatttgcactattctatagaaactacaatttgttgccctatatgtaaaattagaattgtaattaaaaatacacattttattatgtaatcatgttctggtatgtctcatttctcagccttattttataacgtggaagtcattgaactatgttatcagaaactaagtttgtatattatttgtgaaaaacatgtatttctgaatcagtccgctaatatgattgtgcagtattagcttgcttttgctgctgtgttaatgtcatatatttgcttaccttttgggttcaattatctacataattgtgaaatttaacaagttataataaagcatgacaaccaaagttttagaaaacattaaacattttaaatgcacgtttaaaaaacgtgttgaatgtaacccccctatttttgtgtgcaaacactaaattttattgctttatgttttgacctttataaaggtgttattctgctgcccagttttgtaattctcaaaaatagtgccaggtcttctatagcttttttcagaattcatgggcttacaagtactgtatgcatctttaaaaagaaaaggaatgttataaaataaaaggatttatttctttaaaaaaaaaaaa

SEQ ID NO: 565 - DNA, 1526 bp, Homo sapiens
  CDS (504)..(1526)
tgttccctgcttctcagactcttttgtgtcccagttctctccccctgtgccacctcttgagttgtcaggctcctcactcccgcttccggctgtagccttcttcagcttcctccactccctggctgcagcagctgccttcaaggccactcgcagcgatgctggccgcggaatcatcacgacaacgcccccttggcttgccggaaccgccttcctgcttccgttggcgtcacttccactggggggggcgtggccgcggcgcaggcgcgctgggtggttcagaagcgaattctgcaccgcgaagcctgagaggcaggtagctgcggcgctgggctggcggcggcgagtccacgtgctccccgcggccggttgaaaccgttggcgggcgctggctgagaggcaatgtttgctgtcttccattggagtgactgaatttctacatgacggctttttgacaagacttaaaacctgtcttggatagagaatatttagccatttacctaaaaatggtattttttacatgcaatgcatgtggtgaatcagtgaagaaaatacaagtggaaaagcatgtgtctgtttgcagaaactgtgaatgcctttcttgcattgactgcggtaaagatttctggggcgatgactataaaaaccacgtgaaatgcataagtgaagatcagaagtatggtggcaaaggctatgaaggtaaaacccacaaaggcgacatcaaacagcaggcgtggattcagaaaattagtgaattaataaagagacccaatgtcagccccaaagtgagagaacttttagagcaaattagtgcttttgacaacgttcccaggaaaaaggcaaaatttcagaattggatgaagaacagtttaaaagttcataatgaatccattctggaccaggtgtggaatatcttttctgaagcttccaacagcgaaccagtcaataaggaacaggatcaacggccactccacccagtggcaaatccacatgcagaaatctccaccaaggttccagcctccaaagtgaaagacgccgtggaacagcaaggggaggtgaagaagaataaaagagaaagaaaggaagaacggcagaagaaaaggaaaagagaaaagaaagaactaaagttagaaaaccaccaggaaaactcaaggaatcagaagcctaagaagcgcaaaaagggacaggaggctgaccttgaggctggtggggaggaagtccctgaggccaatggctctgcagggaagaggagcaagaagaagaagcagcgcaaggacagcgccagtgaggaagaggcacgcgtgggcgcagggaagaggaagcggaggcactcggaagttgaaacagattctaagaagaaaaagatgaagctcccagagcatcctgagggcggagaaccagaagacgatgaggctcctgcaaaagacccgtggcagatgttgctgatcaaatgcagcatttatttccctttgacagccaggtggaagcctcaaaatcctgaagagcaccggaaaatcactgccagttga

SEQ ID NO: 566 - DNA, 693 bp, Homo sapiens
  CDS (133)..(693)
attgaacccttgataaccggtgcaccggaccggaatgcccgggacgaccatttcgacgcatgctccctgcgggtgcaggctgggcttagctccgctggacccgcgctggggaactctggcctcgctgcactcatggcttctcctagcaaggcagtgattgttcccgggaacggaggcggggatgtgaccacccacggctggtatggctgggtgaaaaaggagctggagaagatacctggtttccagtgtttggctaaaaacatgcccgacccaattacagcacgagagagcatctggctgcccttcatggagacagagctgcactgtgatgagaagactatcatcattggccacagttctggggccatcgcggccatgaggtatgcagaaacacatcgagtatatgctattgtattagtgtctgcgtacacatcagacttgggggatgaaaatgagcgtgcaagtggatacttcacccgcccctggcagtgggagaagatcaaggccaactgcccttacattgtgcagtttggctctactgacgacccgttccttccctggaaggaacaacaagaagtggccgataggttggaaaccaaattgcacaaattcactgactgtggccactttcagaacacagagtttcatgaactgattactgttgtaaagtctttgctgaaagtaccagcatag

SEQ ID NO: 567 - DNA, 2420 bp, Homo sapiens
  CDS (102)..(2279)
ccgacactttcgggttgacgatcctcgccttgggtgggtctagacagccgcggcggctgcggcgcctatagtgacagtgagtgcgtgagacccggagagagatggcgatggcgatgtcggacagtggggcgagccgcctgcgtcggcagctggagtcagggggttttgaggcgcggctgtacgtgaagcagctctcgcagcagtcggatggggaccgggacctccaggagcaccggcagcgcatccaggcgctggcggaggagacggcgcagaacctgaagcgcaacgtctaccagaactaccggcagttcatagagacggcccgcgagatctcctacctggagagcgagatgtaccagctcagccatttgctgaccgagcagaaaagcagcctggagagcatcccgcttacgttgctgcctgccgctgctgccgccggagccgccgccgcctctggaggggaggagggagtcggtggggcggggggccgagaccacctccgaggccaggccggctttttctccacccccgggggtgcctcccgcgacggctccggtccaggcgaggaaggaaagcagcgcactctcaccaccctgcttgagaaggtggaaggctgcaggcatctgctggagacgccgggacagtacttggtgtacaatggggacctagtggaatacgatgcggaccacatggcccaactgcagcgggtgcacggctttctcatgaacgattgcttgttggtggctacctggctgcctcagcggcgtgggatgtatcgctacaacgctctctattccctagatggtttggccgtagtcaatgtcaaggacaacccgcccatgaaggacatgttcaagctgcttatgttccccgagaaccgtattttccaggccgaaaatgctaaaatcaaacgagagtggctggaagtgctggaggacaccaagagggccctcagtgagaaaaggcgaagggagcaggaggaggcagcggcccctcgagggccaccccaagtgacttccaaggccactaacccatttgaggatgacgaagaagaagaaccagctgttcctgaggtagaggaagagaaggtggacctctccatggaatggatccaggagttacctgaagacctggatgtctgcattgcgcagagagactttgaaggggcggttgacctgctggataaattgaaccattacctggaagataaacctagcccacctcctgtaaaagaactaagggccaaagtggaggagcgagttcgacagctcactgaggtgctagttttcgaactctccccagatcgttccctgagaggtggtccgaaggctactcgcagagcagtttcgcaactgatccggctgggccagtgcacgaaggcctgtgagctatttttgagaaacagggcagccgctgttcatactgcaattcgtcagcttcgcatcgaaggtgccactttactctatattcataagctgtgccatgtcttctttaccagccttctcgagactgcaagagaatttgagatcgattttgcaggcactgacagcggctgctactctgcctttgtggtctgggcaagatcagccatgggcatgttcgtggatgcttttagcaagcaggtgtttgatagtaaggagagcctctctacagcagctgagtgtgtaaaagtggctaaggagcattgccagcaactgggtgatatcggactggatctcaccttcatcatccatgcccttctggtgaaagacatccaaggggccttgcacagttacaaagaaatcatcattgaagccactaaacatcgcaactctgaagagatgtggaggaggatgaacttgatgacgccagaagccctgggtaagctcaaagaagagatgaaaagttgtggggtaagtaactttgagcagtacacaggggatgactgctgggtgaacctaagttacacagtggttgctttcaccaaacagaccatgggcttcttggaagaggccctgaagctgtatttcccagagctgcacatggtacttttggagagcctggtggaaatcattttggttgctgttcagcatgtggattatagtcttcgatgtgagcaggatccagagaagaaagcttttatcagacagaatgcatcctttttatatgaaacagtcctccctgtggtggagaaaaggtttgaagaaggtgtggggaaacctgccaagcaactccaagatctgaggaatgcatctagacttattcgtgtgaatcctgaaagtacaacatcagtggtctaatgcttgggtctgtttatatgtgtatatatgcagagagctttatattatttatatttatattaagttgtattagcatactctatagtttcaaacacaacttgaaaattaaaagtgccctcttaaaaatacaaaaaaaaaaaa

SEQ ID NO: 568 - DNA, 1482 bp, Homo sapiens
  CDS (68)..(1129)
gcgccggaattcccgggtcgacgatttcgtggcgcacctggggtggccctggcgtgcgggcggcgacatggaggacggcgtgctcaaggagggcttcctggtcaagaggggccacattgtccacaactggaaggcgcgatggttcatccttcggcagaacacgctggtgtactacaagcttgaggggggtcggagagtgacccctcccaagggccggatcctcctggatggctgcaccatcacctgcccctgcctggagtatgaaaaccgaccgctcctcattaagctgaagactcaaacatccacggagtacttcctggaggcctgttctcgagaggagcgggatgcctgggcctttgagatcaccggggctattcatgcagggcagccggggaaggtccagcagctgcacagcctgagaaactccttcaagctgcccccgcacatcagcctgcatcgcattgtggacaagatgcacgatagcaacaccggaatccgttcaagccccaacatggagcagggaagcacctataaaaagaccttcctcggctcctccctggtggactggctcatctccaacagcttcacggccagccgtctggaggcggtgaccctggcctccatgctcatggaggagaacttcctcaggcctgtgggtgtccgaagcatgggagccattcgctctggggatctggccgagcagttcctggatgactccacagccctgtacacttttgctgagagctacaaaaagaagataagccccaaggaagaaattagcctgagcactgtggagttaagtggcacggtggtgaaacaaggctacctggccaagcagggacacaagaggaaaaactggaaggtgcgtcgctttgttctaaggaaggatccagctttcctgcattactatgacccttccaaagaagagaacaggccagtgggtgggttttctcttcgtggttcactcgtgtctgctctggaagataatggcgttcccactggggttaaagggaatgtccagggaaacctcttcaaagtgattactaaggatgacacacactattacattcaggccagcagcaaggctgagcgagccgagtggattgaagctatcaaaaagctaacatgacaaggacctgagggaaccaggattcctccctcctaccagatgacacagacaagagttcctggagaatgggagtgttaagacttttgacttctttgtaagttttgtactgctttggagagtgaatgctgccaagagttcctcagattacaaacagcagtggtgccatttccttccccatcttcatgttacaaacctggaaaggctagaacagccattaggcgtcagcatcttgacttttccccagcatcacaaacagccatttcctcgggcaccaaagtaggttccctttgttggaacaattacactggccatgccataatgttgaataaaactctcttcttaaaaaaaaaaaa

SEQ ID NO: 569 - DNA, 4245 bp, Homo sapiens
  CDS (106)..(3132)
ccggaagagtccttggaggtctctgctggagttcttgagcatgcccccatcctgctcaccatcaggtgagagacacctgtccctgttcagttccccatcagtaaaatggggagaaattccaagcacacttctcagagcagagcagaagaggttgactatggagaggagaatgaagatgggacccaggtgagcccgggtgcccactactgcagccccactggcgcaggctgccccaggccctgtgcagacacaccaggccctcagccgcagcccatggacctgcgggtgggccagcggcccccagtggagcccccaccagagcccacattgctggccctgcagcgtccccagcgcctgcaccaccacctcttcctagcaggcctgcagcagcagcgctcggtggagcccatgaggctctccatggacacgccgatgcccgagttgcaggtgggaccccaggaacaagagctgcggcagcttctccacaaggacaagagcaagcgaagtgctgtagccagcagcgtggtcaagcagaagctagcggaggtgattctgaaaaaacagcaggcggccctagaaagaacagtccatcccaacagccccggcattccctacagaaccctggagcccctggagacggaaggagccacccgctccatgctcagcagctttttgcctcctgttcccagcctgcccagtgaccccccagagcacttccctctgcgcaagacagtctctgagcccaacctgaagctgcgctataagcccaagaagtccctggagcggaggaagaatccactgctccgaaaggagagtgcgccccccagcctccggcggcggcccgcagagaccctcggagactcctccccaagtagtagcagcacgcccgcatcaggatgcagctcccccaatgacagcgagcacggccccaatcccatcctgggctcggaggcgctcttgggccagcggctgcggctgcaggagacttctgtggccccgttcgccttgccgacagtgtccttgctgcccgcaatcactctggggctgcccgcccctgccagggctgacagtgaccgcaggacccatccgactctgggccctcgggggccaatcctggggagcccccacactcccctcttcctgccccatggcttggagcccgaggctgggggcaccttgccctctcgcctgcagcccattctcctcctggacccctcaggctctcatgccccgctgctgactgtgcccgggcttgggcccttgcccttccactttgcccagtccttaatgaccaccgagcggctctctgggtcaggcctccactggccactgagccggactcgctcagagcccctgccccccagtgccaccgctcccccaccgccgggccccatgcagccccgcctggagcagctcaaaactcacgtccaggtgatcaagaggtcagccaagccgagtgagaagccccggctgcggcagataccctcggctgaagacctggagacagatggcgggggaccgggccaggtggtggacgatggcctggagcacagggagctgggccatgggcagcctgaggccagaggccccgctcctctccagcagcaccctcaggtgttgctctgggaacagcagcgactggctgggcggctcccccggggcagcaccggggacactgtgctgcttcctctggcccagggtgggcaccggcctctgtcccgggctcagtcttccccagccgcacctgcctcactgtcagccccagagcctgccagccaggcccgagtcctctccagctcagagacccctgccaggaccctgcccttcaccacagggctgatctatgactcggtcatgctgaagcaccagtgctcctgcggtgacaacagcaggcacccggagcacgccggccgcatccagagcatctggtcccggctgcaggagcgggggctccggagccagtgtgagtgtctccgaggccggaaggcctccctggaagagctgcagtcagtccactctgagcggcacgtgctcctctacggcaccaacccgctcagccgcctcaaactggacaacgggaagctggcagggctcctggcacagcggatgtttgtgatgctgccctgtggtggggttggggtggacactgacaccatctggaatgagcttcattcctccaatgcagcccgctgggccgctggcagtgtcactgacctcgccttcaaagtggcttctcgtgagctaaagaatggtttcgctgtggtgcggcccccaggacaccatgcagatcattcaacagccatgggcttctgcttcttcaactcagtggccatcgcctgccggcagctgcaacagcagagcaaggccagcaagatcctcattgtagactgggacgtgcaccatggcaacggcacccagcaaaccttctaccaagaccccagtgtgctctacatctccctgcatcgccatgacgacggcaacttcttcccggggagtggggctgtggatgaggtaggggctggcagcggtgagggcttcaatgtcaatgtggcctgggctggaggtctggacccccccatgggggatcctgagtacctggctgctttcaggatagtcgtgatgcccatcgcccgagagttctctccagacctagtcctggtgtctgctggatttgatgctgctgagggtcacccggccccactgggtggctaccatgtttctgccaaatgttttggatacatgacgcagcaactgatgaacctggcaggaggcgcagtggtgctggccttggagggtggccatgacctcacagccatctgtgacgcctctgaggcctgtgtggctgctcttctgggtaacagggtggatcccctttcagaagaaggctggaaacagaaacccaacctcaatgccatccgctctctggaggccgtgatccgggtgcacagtaaatactggggctgcatgcagcgcctggcctcctgtccagactcctgggtgcctagagtgccaggggctgacaaagaagaagtggaggcagtaaccgcactggcgtccctctctgtgggcatcctggctgaagataggccctcggagcagctggtggaggaggaagaacctatgaatctctaaggctctggaaccatctgcccgcccaccatgcccttgggacctggttctcttctaacccctggcaatagcccccattcctgggtctttagagatcctgtgggcaagtagttggaaccagagaacagcctgcctgctttgacagttatcccagggagcgtgagaaaatccctgggtctagaatgggaactggagaggaccctgagaggagacgggctgggcggcgacccccacagggctctcgagaacagattctcccctccagtatgggccctggctgtggcccccattcctcaggactgcacagaggaggactggctccggctccgtcgggctcacccttaaccactattcctggctctgcaaaccccagactttgcacacagccccaggctccacacagaaatgtgaacttggcctcagacaggctggcccttcctaggctctaggggctaggggggagtggggagccaagaggtcccatattcctgagtgcaggggtagtccctctcacctgcttcctcagacgactctggaagcttccctctaccaccgggcactgagacgaagctccctgacagccgagactggcagccctccatctggtccgtaccctcgccagaggcccccctacatcaacctcctggcgatgccctggtggagcagatgggtgctctgggagtcctgtgcttcctgatccaatggtgccaaacccttcatctcccccagaagcgcagcatacccctgggacccctcggccactgcccactcggggagccttctctgtttctggggcctcccccaccatagctctgattcccaccccacataggaatagcctgactgagggggaaggggtgggagagaagatacagacatggaggaggggaggctgctctggcaaagtcttcaaggcttttgggggtccaggcctggggtcaagaaggaaaatgtgtgtgagcatgtgtgtgagtgaggcgtgtgtgtgagtgaggcgtgtgtgtgtgtctttcctaggacccaccataccctgtgtatgtatgcatgtttttgtaaaaaggaagaaaatggaaaaaaatctgaacaataaatgttttatttgctttaaaaaaaaaa

SEQ ID NO: 570 - DNA, 1361 bp, Homo sapiens
  CDS (39)..(629)
  misc_feature (1)...(1361): n = a,t,c or g
accggcccggaattcccgggtcgacgatttcgtagaagatggcggcgctaggggaacccgtgcggctggagagagatatttgtagagcaattgaattattggaaaaactacaaaggagtggagaagtaccaccacagaaacttcaggctttgcaaagagtccttcaaagtgaattctgcaatgctgtgagagaggtatatgaacatgtctatgagactgtggacatcagtagcagtcctgaagtgagagcgaacgctactgcaaaggctactgttgctgcatttgctgccagtgaaggacattctcatcctcgagttgttgagctaccaaaaacagaggagggccttggattcaatattatgggaggcaaagaacaaaactctccaatctatatatcccgaataattccaggtggaattgctgatagacatgggggcctcaaacgtggagatcaactcctctctgttaatggagtgagtgttgaaggagaacatcatgaaaaagctgtagaactgctgaaagccgcacaaggaaaggttaaattagtggtacgatacacacccaaagtcttagaagaaatggagtcgcgctttgaaaaaatgagatcagcaaaacgcaggcaacagacctaatacatttcaaaacttgatatttcattttgcgttttagctagagaagttttccttgtgacttactaatggctgcaatgccaatgattgtaagaaaacaaacaaatttatcatgaaattctccttgtcattttataaatgcctattttaacatcatttatggttccagagatgcatacacttttttctgacaagaaaaagtaaaaggtgatgagggcaattctgtcctactgtttttacaggcctttttcaaatgcagattttgtcataaagttgttatagattttttaaaatgcttttttaatattaaaatgtacttttacattcttaatctttttttagaaaggaaaagttttcttcatttagctgctgatttaaaagtaaagttctccaattctttttttttgcttactctattttttttaacctgtgaaatttctttacagttttccaagaaattaagcataacagtctcatctacggcagttcattacactgtcaatgttaacatcattgctgcattttgtactttgaacacacacataatatatataaccagtggtaaatcatgactcagtacagtgcaagttttttcacttttacttaaacataatatataatggatattcatttatactgatttatgaaagtaagtttttaaacactgaaacaatcattgctaaaatacatattcttaatatttgagcattgaggnnagaggatgnaattgat

SEQ ID NO: 571 - DNA, 1834 bp, Homo sapiens
  CDS (313)..(1128)
cccagcttccactgacacgagcctcggcgcggcttccgcttccggcgagtattgtgtgtcgcgccgcggggcgggggcgaggggaggaggaaggagggaggcagcgctccggcggctccgcgccccgcactcccggacccgaagccgggaagattcctttcttgtctgttagaaacgtatgtcaaacgaggatacagtgtctggaactattggttctaagatataagtggaatgagcctggatcaggagaagtatgctgagctagagttgaaggaagcttctctttctaacaagagaaagcagagttaaattatggcagagacaagtctgttagaggctggggcctctgcagcctctacagctgcggctttggagaacttacaggtggaggcgagctgctctgtgtgcctggagtatctgaaggaacctgtcatcattgagtgtgggcacaacttctgcaaagcttgcatcacccgctggtgggaggacctagagagggacttcccttgtcctgtctgtcgaaagacatcccgctaccgcagtctccgacctaatcggcaactaggcagtatggtggaaattgccaagcagctccaggccgtcaagcggaagatccgggatgagagcctctgcccccaacaccatgaggccctcagccttttctgttatgaggaccaggaggctgtatgcttgatatgtgcaatttcccacacccaccgggcccacaccgttgtgccactggacgatgctacacaggagtacaaggaaaaactgcagaagtgtctggagcccctggaacagaagctgcaggagatcactcgctgcaagtcctctgaggagaagaagcctggtgagctcaagagactagtggaaagtcgccgacagcagatcttgagggagtttgaagagcttcataggcggctggatgaagagcagcaggtgttgctttcacgactggaagaagaggaacaggacattctgcagcgactccgagaaaatgctgctcaccttggggacaagcgccgggacctggcccacttggctgccgaggtggagggcaagtgcttacagtcaggcttcgagatgcttaaggttcgacctttgcccctgcatagcccctcaggctgagtgcagcgtagctttgcgtagcctgggatttgtcagcctgggatactcattcttctgctctccttctctaaatccagttctttctgccaggtgtactcaaagggtctttgctacggaaaagtgatttctcccatccccttctaaccatttttgtgttcttatctctggtcagcaattatgtgcttaatctgttccaaagaaaagattcattcttttgaaaggagggaagtctagcctgagttagtgaaaaactatgcattaaaaattttgtaaatgcagttaccattacttttaagtcctgaaatttgatttatgtactgctgaaaaaggacagaaacatagtttaaaggatacaggcatacctcagagatattgtgggttcagttccataccacttcaataaagcgagtatcttgataaagcaagtcacattaattgttgggtttcctagtggaatcatatttttgctggtggagggtcttgtgttagtattgactgatcgagatggtggttgctgaagattggggtgactgtggtaatttcttaaaataagacaacgacgaagtttactttcaactcttccttttatgaaagatatctctgagcatgtgatgctgtttaatagcattttactcaccagtagaacttctttgaaaatcttgaaaacccacatgtattgcggccgctctagaggatccaggcttct

SEQ ID NO: 572 - DNA, 1636 bp, Homo sapiens
  CDS (131)..(958)
gctcgacgagccaattcggcacgaggaggccgggacccattgacagcacgatgttgacggagcaggaggtggatgccatcggcagacgctggtggaccccaagcagcccctgcaggcccgcttccgcgacatgttcacgctgcgtgggctcggcggcccaggcgccattgcatggatcagccaggccttcgatgacgattccgccctgctcaagcacgagctggcctactgcctgggccagatgcaggatgcccgcgccatccccatgctggtggacgtgctgcaagacacccgtcaggagcccatggtgcgccatgaggcaggggaggccctgggggccatcggggacccggaagttctggagatcctgaagcagtattcctcggaccccgtcatcgaggtggccgagacctgccagctggccgtgcgcaggctggagtggctgcagcagcacggcggggagccggcggcgggaccctacctctccgtggaccctgccccgccggctgaggagcgtgacgtggggcgcctgcgggaggcgctgctggatgagtcccggccgctcttcgagcgataccgcgccatgttcgccctgcgcaacgcgggaggcgaggaggccgccctggcgctggccgagggtctgcactgtgggagcgccctcttccgccacgaggtcggctacgtcctgggacagctgcagcacgaggcggcggtgccccagctggcggccgccctggcccgatgcaccgagaaccccatggtgcggcacgagtgcgcggaggccctgggcgccattgcccggcccgcctgcctggccgcgctgcaggctcacgcggacgacccagagcgcgtggtgcgtgagagctgcgaggtggctctggacatgtatgagcacgagaccgggcgggccttccagtacgcggacggcctggagcagctgcgcggggccccctcctagggccccaccctcacccggagctcccggaggactcttgagggccgctcctcccccgcagagctttggcgtctaaaccgggtgtgtgtaaatcggtgtcatcgcttgtgtcttgctgggcgcatggttgctgtccccctcctccgtctgggaccgaggagctgccgttgtgctgtgactccctgagtcccctgactgctcctcggggcctggcgcagggctgtagcgtggaagtttccaggcttggggtgggactctgcgggaggctctgggatgcccggctcaggacaggggaggattgcgagggaagccaggggaggatcgcgagggaagccaggggaggatcgcgagggaagccaggggaggatcgcgagggaagccaggggaggatcgcgagggaagccaagggaggatcgcgaggggagccaggggaggatcgcgagggaagccaggggcagagctggggctctgggaagaggctgacgttatggtggcttcagcttcactaggaatgggacacagggtctgggggcctctgactcccccaccccgaggcctgggtagggacagggtggtggtccctgagtgggtcaggtagggcacaggggccagggagggacaagcagacctcagagcgctgcccagatggaatattaaattatttttgccaaaaaaaaaaaa

SEQ ID NO: 573 - DNA, 1600 bp, Homo sapiens
  CDS (347)..(907)
gtccagcgtggtggaattccaagagtgaaactccatctcaaaaacaaaaaacaaaaaacaaaaactttggtattgtatgctttgctgacacaattattttatgtgcctaggttggctatgtgaagctttctgactcttccctgctatttaggaagggcttcaaagacctgaatacttagtagccagtgcagcagggtttcagggtctggcctggggaggggaggggagggggagggcaggttgcagctcaagtggctttagagatgctgagcctctccttctgtcctgcccaggacgcaatgagcccctgaagaaagagcggcttaagtggaagagcgactaccccatgactgacgggcagctgcggagcaaacgggatgagttctgggacacagcgcctgccttcgagggccgcaaggagatctgggatgccctcaaggctgccgcctatgctgctgaagccaacgaccacgagctggcccaggccatcctggatggagccagcatcaccctgcctcatggcaccctctgtgaatgctacgatgagctgggcaatcgctaccagctgcccatctactgcctgtcaccgccggtgaacctgctgctggagcacacggaggaggagagcctggagccccccgagcctccacccagcgtgcgccgtgagttcccgctgaaggtgcgcctgtccacgggcaaggacgtgaggctcagcgccagcctgcccgacacagtggggcagctcaagaggcagctgcacgcccaggagggcatcgagccatcgtggcagcggtggttcttctccgggaagctgctcacagaccgcacacggctccaggagaccaagatccagaaagattttgtcatccaggtcatcatcaaccagcccccaccaccccaggactgatgggcccacggacccctgggaagaggccccgcctggagcactaggcccccaccctgctgctgccttccagtgctgtcattttcttcaggggccctcccctcggtgtggctggtgggtgagccgtgaagggaccctgcctttcagggcactacgcgccaccagttcccggtacccagggagcaggcagccacacacgggccttgcaaccttgtcagagaaaaggcgaacagggccctcaccctgcctgtctcccgaagcaggttcgagccacaagggccaaccaggaggcccctggagcccagatctgtcatctggtgctgccagctgtgctcactctggttttctgctcagggtctgaagcagctgctgtctccctcctctgcccccatcccctggctctcccctgggcacagtgccactcccttggaagggagggaaccacccgtgagccccagggcttgggaagcctgaggcgggcctctgcctctccctgcccccagcacaattggcagagatgaggcgggtggtggacggctgggctgtcgtggcagggtctgcacagggccatgtcctggctgtaacccaggcagtgggaggtctgcagcctggtcatggcctccacagcaggtccctgtggacagacatatctgcatatttatcaataaagccttttgctccttcaaaaaaaaaaaa

SEQ ID NO: 574 - DNA, 6286 bp, Homo sapiens
  CDS (210)..(3443)
ccggtcgacgatttcgtggagcatctcaggaaaggggtccccggactctggggctctcagcacctgcggtcgcaaaccaacctcatgccctgactttaccaggcgtcgggactctgacttaaccggggaatgagggacttggtctggcggcagatcacaatgaggacctagggcatctgtctgctgacgccccctggcctgcagtgaccatggccccccgcaagaggagccaccatggcctgggcttcctgtgctgcttcgggggcagtgacatccccgaaatcaacctccgggacaaccaccctctgcagttcatggagttctccagccccatcccgaacgcagaggagctcaacatccgctttgcagagctggtggatgaattggatctcactgacaaaaaccgagaggctatgtttgcactgccccctgagaagaaatggcagatctactgcagcaagaagaaggagcaggaggaccccaacaagctggcaaccagctggcctgactattacatcgaccgcatcaattccatggctgcgatgcagagtctgtacgcgtttgatgaggaggagacggagatgaggaaccaagtcgtggaagacctgaagacagccctccggacacagcctatgaggtttgtgacccgcttcattgagctggagggcttgacctgtctgctaaatttcctccggagcatggaccacgccacctgtgagagccgcatccacacctcactcattggctgcatcaaagcattgatgaacaactcccaggggcgggcacatgtgctggcacagcctgaggccattagtaccatagcccagagcctacgcacagagaacagtaagaccaaggtggctgtgctggagatcctgggtgctgtgtgcctcgtgcctggtggccacaagaaggtgctgcaggccatgctgcactaccaggtgtatgcagcagagcgaacccgcttccagaccctgctgaacgagctagaccgaagtctgggccggtaccgggatgaagtgaatctgaaaacagccatcatgtccttcatcaatgctgtcctcaatgctggagctggagaggataatctggagttccgcctacatctacggtatgaattcctgatgctgggtatacagcctgtgattgacaagctccggcaacatgaaaatgccatcctggacaaacatttagacttcttcgagatggtgcggaatgaggatgacctggagctagccaggaggtttgacatggtccacatcgacaccaagagtgcttcccagatgtttgagttgatccacaagaagctgaagtacacggaggcctacccctgcctgctctctgtgctgcaccactgcctgcagatgccctacaaacggaacggtggctacttccagcagtggcagctcctggaccgcatcctccagcagattgtcctccaggatgagcggggtgtggaccctgacctggctcccttggagaacttcaatgtcaagaacatcgtcaacatgctcatcaacgagaatgaagtgaaacagtggcgagaccaggcagagaagttccggaaagaacacatggagcttgtgagccgtctggagaggaaggagcgggaatgcgagacaaagacattggagaaggaagagatgatgcggccgctgaacaaaatgaaggacaagctggcccgggagtcccaggagctgcgccaggctcggggacaagtggcagagctggtagcccagctcagtgaactctcaacaggccctgtatcttccccaccaccccctgggggcccactcaccttgtcttcctcaatgacaaccaatgacctgcctccaccccctcctcctctgccctttgcctgttgtccccctcccccaccaccaccccttcctcccgggggacccccgactcccccaggtgccccaccttgcctcggcatgggcctgcccctccctcaggacccctaccccagcagtgacgtcccactcaggaaaaagcgtgtcccccagccttctcacccactgaagtccttcaactgggtgaagctgaatgaggagcgtgtccctggcaccgtatggaatgagattgatgacatgcaggtatttcggatcctggacctagaggattttgaaaaaatgttttcagcctaccagaggcaccaggagctgataactaatccttctcagcagaaagagctgggctccactgaagacatatacctggcttcccgcaaggtcaaagagctgtcggtcattgatggccggagggcccaaaactgcatcatccttctttccaagttgaagctttctaacgaggagatccggcaggccatcttgaagatggatgagcaggaggaccttgctaaggacatgctggagcagctcctcaagttcatcccagagaagagtgacattgacctcctggaggagcacaagcatgaaattgagcggatggcccgtgctgaccgcttcctctatgaaatgagcaggattgaccactaccagcagcgactgcaagccctcttcttcaagaagaaattccaggagcggctggctgaggcaaagcccaaagtggaagccatcctgttggcctcccgggagctggtccgcagcaagcgtcttagacagatgctagaggtcatcctagccataggcaacttcatgaacaaagggcagcgtgggggcgcctacgggttccgggtggccagcctcaacaagatcgctgacaccaagtccagcatcgacagaaacatctctctgctccattacctgatcatgatcctggagaagcattttcctgatattctaaacatgccttcagagctgcaacatcttccagaagccgccaaagtcaacctagcagaactggagaaggaggtgggcaacctcaggaggggcctgagagcggtggaggtggagctggagtatcagaggcgccaggtacgggagcccagtgacaagtttgtccctgtcatgagcgacttcatcacggtgtccagcttcagcttctccgagctggaggaccagctaaatgaggccagggacaagttcgccaaggccttgatgcacttcggggagcatgacagcaagatgcagccagacgaattctttggcatctttgataccttcttgcaggccttctcagaggcccggcaggatctagaggccatgaggaggaggaaggaggaggaggagcggcgggcgcgcatggaagccatgctgaaggagcagagggaacgtgagcggtggcagcggcagcggaaggtcctggctgcaggcagctcgctggaggagggaggagagttcgatgacctggtgtcggccctgcgctctggggaggtcttcgacaaggacttatgcaagctcaagcgcagccgcaagcgatcagggagccaggccctggaagttacccgggagcgggcaataaaccggctaaattattgacctggggaactagccacacaggaggccgggagacagggactggtgagaatggggctgagtggaggaggtggtgatatttaaaccatttggtgcttggtttagagccttgggctgggtcctgggatggggggctgtgtgtggctggaccaggtgtctccccacgcttaccttaaggggctcctcttatctccccttcacacgattccttctgtgccctggccccaggtattattctgaggctgccttggatggcctcaggccaggtaaccccaggctgaaggggccctgctccccatcccctaccatgggcacccatgtgctggcacagaacagttccagatctagactggagaggtccacagccttgtccagagttcctgtgtagcacggggagcaatgatggagggagcccctgagagggaatctggtgagggaatccagactcccttctctcaaggggaggctcaacagaacattgacctgggggcaaactttcctcttgaatgggaacagaggaggcattatatattctagttagatcagctctggtaggttccagagaacagtcaatgttggaaggatgatgcagggaccaaagccatcaggacagagtagcagtgtctgtttcccatgtcacaagtcctctggcctctccctgcatgtcttaagtatctttcccttccttctctaccctcacctccatcctgtctactaatccacagtcctagaagactcaccttgggtttccacagctatggctcactaccaggtgcttgatgaatctggcgaggggctcaagacagacctcatgcatcaccacacctcatgccttttgggcatctcccatgtccccatctcctggacacctggccattgttgtgaagccagacagtgacctcaaatgttgccttggagtcccctacagcccctcagcagagggcagcacttgaatgcttagctccatcccatagttctctacttcatataaattgctcaggccctcccaccccttctctaacactagcttcaaggcagaagccacagcagcctctgtccagcctgcaggtggccacttggaaccatgtgtccactggcgttggggagttggttcctgagaggtctgagggccagagctgccctctacattaacatgctgtctctaagggtggcccctcctctcaggcgttcagatggtgcgaacagcagagcaggcaagggaaactggggagatggggatggaggaggaaggctgatatcctctggggagcacatcacctgaaggtgccaaggaggaaggctgagaggggggccaccccatttctggtacccaatttggttcttcagcccaacttgcaaggggttccttctggtcctcccatccactgccaccttccattttgtccatctcatgctggccttggtggatgggatggctgtatctagacaaaatttttctaaaactccatcaaggctcttattcaataccacgttccgagttggcctttcatcttctttgagactggccctgcctaacctctaccatcaatgagctcttggcccttctgcccttccctgtgtttctcactttccaacctaatccctggctcagggttattgccagtggagactggtgagctgggcctactctcagctgcctatcttctgcctttcacttgcatccaactcctggggctgggaccgtagtagctgcgggggggaagaaacacagggtcggtgagcccagcatgtgcgttggtttgagggggcgggcggtgtgtgtgtgttctggtgggagggatctgagcaagtgcaagcctggctgacacaggtgtgaagaggccatcctggaacccaggtgagggcaagatgaaggcttccaggcagaacagctgcagagagtttggctatatgcatctgcagccccaagagctcccactgcaagacaagtgttggggaagatgggaggttgtgggtgaggcctctaaaggtcctctcccaaactgaccaggctgatgtcaacctaaccccctcaggggcagggaacaggggagggctccacaagcgtgtctggcattcccacccaccatggaagactggatacgcacctggaaacaaaaggactatggaagctgttcaagatacatttgatcttcagaaaagcagaatttggttcaactgttgacagaggacacaaatacgttgttccagagctcagccttctcactctaaaagaaagatatttttctatttattttctacatctggccagtggctctggtgctagatgccactgtagccagatctccaacagtgccttggaccatggactcatactcaactgagtaagaaggggctggtgcccagtcggggtggctgagctggtccttaataggttgtttcttggtcttgctttcttcatgccctccccactgctcctgccacctttagataagtttctctagctaattttgtggccaatgtaaaattcgtcatcaacctaacaaacacaaccttctcagcagcatttctcccctgtgatggaaataaagtgtttagggcagtgggaggagaaaattctccaggtgaatggggaagggtctgttccagcctctccctactcccatcccatttccaccaactggggaactgtgactatctatctcccccgacttctaccagggatgccttcacgccaaggctgttctcaccagctgcctcagatgacaaatgaggctaatggacataatctacagtgtcctttttcacttgcaccttttttataagaatatattgtaatactaaaaaatattaaattcataccatccctacccaaaaaaaaaaaa

SEQ ID NO: 575 - DNA, 1167 bp, Homo sapiens
  CDS (265)..(1044)
atttttgccactttccaggtggtcgttctttgtcctcctgagcttgggcctcgctccttgggacccctggaccagaaccccaatcagctcaggaacaggcttctggcagatgagcccggcggcagtggagcgagagatgcagctgatcttctaggatctaaagcattttccacggaggatggtggagagccaggtgtggacagctcagtccctctgtctgtggtgtcctttcacctggtcagcttcgggcctgggaatgtgcacatgacccagggggagaaggagcggctgcgggtcctgctcacccttagtttggggctggggccttcagcccacactgacggggtaggagggctgcattcaagtgtccccatagcccttcccttcccaaccaggatgctggcaggtcaactcgaggccagggaccccaaagagggcacccacccagaggacccgtgcccaggagctggggctgtcatggagaagacagctgtggcagccgaggttctcacggaggactgcaacactggggagatgccaccattacagcagcagatcatcagactccaccaagagcttgggagacagaagtctctgtgggctgatgttcatggaaaactccggagtcatatagatgctttgagggagcagaacatggagctccgagaaaagctgagagctctgcagctgcagcggtggaaagccaggaagaaatctgcagcgtccccacacgcggggcaagaatcgcacactctggcattggaacctgcttttggaaaaatttcacctctgtcagctgatgaagagacaatacccaaatacgctggccacaagaatcagagtgccactctcctgggacaaagatcgtcatctaacaattcagctcctccaaagccaatgagtttaaagatagaaagaattagctcgtggaaaacaccaccacaggaaaatagagataaaaatctttccaggagacgtcaagacagaagagcaacacctactggaaggccaactccctgtgcagagagacgggggggtgtctgaagatggaaaggtggcctcggacacttgtgtcactctacactggccccttggaaaattcagattcagataaagttccacttaggtctaataaaagtactcaatttgttattcaaaaaaaaaaaa

SEQ ID NO: 576 - DNA, 1646 bp, Homo sapiens
  CDS (361)..(1605)
gtaccggtccggaattcccgggtcgacccacgcgtccgggccattgcttccaaagcctccatcacctgcccatacacgccagctcattgtattggccttactcttccaagaggccatggaagtataaataataaagcaagaaaggcagatgcatttggctggctcagtggacttctgaatgtactgtgagtatgagaccttcccttccaaaagatccggtgcttcttgtctattccacacgaagcttgcttcagatcgagggaggatgtagcactgtccacaggtgggtgtatgaaaggaaaattctagaggatctccaaaatccgggtctactactcaacaggatattcttcaaggaaaatgaaccccacactaggcctggccatttttctggctgttctcctcacggtgaaaggtcttctaaagccgagcttctcaccaaggaattataaagctttgagcgaggtccaaggatggaagcaaaggatggcagccaaggagcttgcaaggcagaacatggacttaggctttaagctgctcaagaagctggccttttacaaccctggcaggaacatcttcctatcccccttgagcatctctacagctttctccatgctgtgcctgggtgcccaggacagcaccctggacgagatcaagcaggggttcaacttcagaaagatgccagaaaaagatcttcatgagggcttccattacatcatccacgagctgacccagaagacccaggacctcaaactgagcattgggaacacgctgttcattgaccagaggctgcagccacagcgtaagtttttggaagatgccaagaacttttacagtgccgaaaccatccttaccaactttcagaatttggaaatggctcagaagcagatcaatgactttatcagtcaaaaaacccatgggaaaattaacaacctgatcgagaatatagaccccggcactgtgatgcttcttgcaaattatattttctttcgagccaggtggaaacatgagtttgatccaaatgtaactaaagaggaagatttctttctggagaaaaacagttcagtcaaggtgcccatgatgttccgtagtggcatataccaagttggctatgacgataagctctcttgcaccatcctggaaataccctaccagaaaaatatcacagccatcttcatccttcctgatgagggcaagctgaagcacttggagaagggattgcaggtggacactttctccagatggaaaacattactgtcacgcagggtcgtagacgtgtctgtacccagactccacatgacgggcaccttcgacctgaagaagactctctcctacataggtgtctccaaaatctttgaggaacatggtgatctcaccaagatcgcccctcatcgcagcctgaaagtgggcgaggctgtgaacaaggctgagctgaagatggatgagaggggtacggaaggggccgctggcaccggagcacagactctgcccatggagacaccactcgtcgtcaagatagacaaaccctatctgctgctgatttacagcgagaaaataccttccgtgctcttcctgggaaagattgttaaccctattggaaaataaaggagaattcctgcttgccacagaccccgaaaaaaaaaaaa

SEQ ID NO: 577 - DNA, 5995 bp, Homo sapiens
  CDS (301)..(5676)
gtatcatcagtttctcatgaaaatcctactgaagtgtttgaagatggagaaaatccaccaagtagtcgatcatcagagagtggattcactgagtttatacaatatcaagcagaccgaactgatgatattgacagagaactgagtgagggccagggggcagctgccatcccaattggtagcacatcctctgagacagaaacagcatccactgtgggatctgaagaaaccatcatccagaccccttccgtagtcactcaggggacagcaacccgaagtaggaagacagcccaaaagactgcaatgcagtgctgcttggagtatgtccaacagtttcttaccagacttatcaacctctacatcattcagaataactctttttctcagtctttggctacagaacatcaaggggatcttggtcgagaacaaggagagacttcaaaatgggacagaaattcacaaggagatgtaaaagagaaaaacataagtaaacaaaaaacttctaaagaatacctgtctgccttccttgctgcctgtcagctcttcctagagtgctcaagtttcccagtttacattgctgaggggaaccatacatcagagttacgttctgaaaaattggagactgactgtgagcatgtgcagcctccacagtggctccagactctgatgaatgcttgcagccaagcaagtgatttcagtgttcagagtgttgctatttcactagttatggacctggtgggactgacacagtctgtggccatggtcactggggaaaacatcaacagtgtagagcctgcacaacccttaagtccaaaccagggaagagtagctgtggttattagacctcccctcactcagggcaatctgaggtacatagctgagaagactgaatttttcaagcatgtagctttaacattgtgggaccagttgggagatgggacacctcagcatcaccagaagagtgtggaactattttatcaattacataacttagttccttcttctagcatctgtgaggatgttataagtcagcagttaacccataaagataagaaaataaggatggaagcacatgccaagtttgcagttctttggcatctaacgagagatctccatataaataaatcttcatcttttgtacgttcttttgacaggtcactgttcatcatgttagatagccttaacagtctcgatggttctactagctctgtgggacaagcctggctgaaccaagtcctacaaagacatgatattgcacgagttttggaaccattgctattgctcctgcttcatccaaaaactcagagggtttcagtacagcgtgtacaagcagaacgttattggaataagtctccctgttatccaggagaggagagtgacaagcatttcatgcaaaattttgcctgcagcaatgtgagccaagtacaactcatcacatcaaaaggaaatggtgaaaagccacttaccatggatgaaatagagaactttagtctcactgtgaatccattaagtgacagactttccctcctaagtaccagcagtgagacaattccaatggttgtgtctgattttgatcttccagaccaacagatagaaatacttcagagttctgactcgggatgttcacagtcctctgctggggacaacttgagttacgaagttgatcctgaaaccgtgaatgcccaagaggattctcaaatgcccaaggaaagctccccagatgatgatgttcaacaggtagtatttgacctgatatgtaaagttgtaagtggcctcgaagtggaatctgcatcagttacatctcaattagaaattgaagctatgcccccaaagtgcagtgatatagatccagatgaagagacgattaaaattgaagatgactccattcgacagagtcagaatgctttgctgagtaatgaaagttctcagtttctgtctgtgtctgcagagggaggccatgagtgtgtggcaaatggaatctccaggaatagctcctcaccttgtatttcaggaaccacacacactcttcatgactcttctgttgcttccatagaaaccaaatctagacaaaggagtcacagtagtattcaattcagcttcaaagaaaaattatcagaaaaagtttcggagaaggaaacaatagttaaggagtcaggtaaacaaccaggagcaaaacctaaagtaaaacttgccagaaaaaaggatgatgacaagaaaaaatcttcaaatgaaaaactcaaacaaaccagtgtattcttcagtgatggtctggatttagagaactggtatagctgtggagagggagacatttctgaaattgagagtgacatgggttctccaggatctcgaaaatctcccaatttcaacattcatcctctctatcaacatgtgctcctgtatctccagttgtatgattcatccaggactttgtatgctttctctgccatcaaagccatcttgaaaactaaccctatagcttttgtaaatgccatttcaactactagtgtaaataatgcatatactcctcagttgtctctccttcagaatctattggccagacaccggatttctgttatgggcaaagatttttatagtcacattccagtggactcaaatcataacttccggagttctatgtacatagaaattcttatttctctctgcttatattacatgcgtagccattacccaactcatgtcaaggttactgcacaagatttaataggcaatcgaaacatgcaaatgatgagcatagaaattctgacactactcttcactgagctggcaaaagtaatagaaagctcagcgaagggtttccctagttttatttctgatatgttatctaagtgcaaagttcagaaagtgattcttcattgtttgctgtcatctatctttagtgctcagaaatggcatagtgaaaaaatggcaggtaagaacctggttgctgtggaagaaggtttctcagaggacagccttattaatttctcagaggatgaatttgacaatggcagcacgttgcagtcacaacttcttaaggtgcttcagaggctgattgttctagaacacagagtaatgactattcctgaagagaatgaaacaggttttgattttgttgtatctgacttagaacacatcagtccccatcaacccatgacttctcttcagtatttgcatgctcagccaatcacatgtcaaggcatgttcctctgtgcagtgatacgagctttgcatcagcactgtgcatgtaagatgcacccacaatggattggtttaatcacatctactctgccttacatgggaaaagttctgcagagagtggttgtttctgtgacactacaactgtgcagaaatttagataatctaattcagcagtacaaatacgaaacaggattatctgatagtaggcctctgtggatggcatcaattattccaccagatatgattcttactcttttggaagggattacagccattatccattactgtttgttggatccaactacacagtatcaccaacttttggtcagtgtagaccagaaacacttgtttgaagcacgcagtggaatcctctcaatccttcatatgatcatgtcctctgtgacactgctttggagcatactgcatcaagctgattcttcagaaaagatgactattgccgcatccgcatctcttaccactattaatcttggagctacaaagaacttgagacaacagattcttgaattgttgggccccatttcaatgaatcatggtgttcactttatggctgccattgcatttgtgtggaatgaaagaagacagaataaaacaaccaccaggaccaaggtcattcctgcagccagtgaagaacagcttttattagtggaattggttcgttcaatcagtgtcatgagagcagaaactgttatccagactgtaaaagaagttttaaagcagccaccagccatagccaaggacaagaaacatctttctttggaagtctgcatgcttcagtttttctatgcttatattcaaagaattccagtgcccaatttagtggatagctgggcgtcactgttgatacttctgaaagactctatacaactgagtcttccagctccagggcagtttcttatacttggggttctgaatgagtttattatgaaaaaccctagtttggaaaataaaaaagaccaaagagaccttcaggatgtaactcacaaaatagtggatgcaattggtgcaattgctggttcttctctggaacagacaacatggctgcgacgaaatcttgaagttaagccttctcccaaaataatggtagatggaaccaatttggaatctgatgttgaagatatgttatcacctgcaatggaaaccgcaaacataactccttctgtatatagtgtccatgcattgacattactctctgaggttttggctcatcttttggatatggttttctatagtgatgaaaaggagcgggttattcctttacttgtaaatattatgcattatgttgtgccctacctcagaaatcacagtgcacataatgcccctagttatcgagcttgtgtccagctgctcagcagtcttagtgggtatcagtacacacggagagcttggaaaaaagaagcttttgacctctttatggatcccagtttctttcagatggatgcctcttgtgttaatcattggagagcaattatggacaatctgatgacacatgataaaacaacatttagagatttgatgactcgtgtagcagtggctcaaagcagttcacttaatctctttgcaaaccgtgatgtggagctagaacagagagctatgcttcttaaaagattagcatttgctatttttagcagtgaaattgaccagtaccagaaatatcttccagatatacaagagagattggttgagagtctccgtttgccacaggtgccaactctccattctcaagtgttcctgtttttcagagtgttacttttaagaatgtctccccaacatcttacctcactctggcctaccatgattacagaacttgtacaagtatttttactgatggagcaggaactcactgctgatgaagatatttcacggacttcagggccctctgtggctggtctggagacaacgtacacaggaggtaatggcttctctacttcatataacagccagcggtggttaaacctctatctctctgcttgcaaatttttggatttggctctcgcattgccctctgaaaaccttcctcagtttcagatgtaccgatgggcctttattccagaagcctcagatgattcaggtttggaagtcagaaggcagggtatacatcaacgagaatttaaaccttacgtggtacgactagcaaaacttcttcggaaaagagcaaagaaaaatccagaggaagacaactcagggagaacattgggttgggagccagggcacttgctgctcaccatctgcaccgtgcgcagtatggagcagctcctgccgttcttcaatgtgctcagtcaagtcttcaacagcaaagtcacaagccgatgtggaggacactcagggagtcctatcctctactcaaatgccttccctaataaggacatgaaactggagaaccacaaaccatgttccagcaaagccaggcaaaaaatagaagagatggtagaaaaagattttctggaagggatgataaaaacttgagcaccattgctggttccatttagcttacatgtaaatgtaattatttaaaacacacacactgctctgcgttgtatagtttttccttttttgtatgtaacagaacacatttcagattgtatttaatttaaatatttgtatataagagcaaatgtctgaatgtggcctgaatcaagtttaaatattgttggctcatactgattatggtgcctaagagagctatatatatacacatgtaaagtccattgtttttattgtcctgagttgtcttaaacctgcaaaatatacactacccattttttttttcaaaaaaaaaaaa

SEQ ID NO: 578 - DNA, 5845 bp, Homo sapiens
  CDS (301)..(5529)
gtatcatcagtttctcatgaaaatcctactgaagtgtttgaagatggagaaaatccaccaagtagtcgatcatcagagagtggattcactgagtttatacaatatcaagcagaccgaactgatgatattgacagagaactgagtgagggccagggggcagctgccatcccaattggtagcacatcctctgagacagaaacagcatccactgtgggatctgaagaaaccatcatccagaccccttccgtagtcactcaggggacagcaacccgaagtaggaagacagcccaaaagactgcaatgcagtgctgcttggagtatgtccaacagtttcttaccagacttatcaacctctacatcattcagaataactctttttctcagtctttggctacagaacatcaaggggatcttggtcgagaacaaggagagacttcaaaatgggacagaaattcacaaggagatgtaaaagagaaaaacataagtaaacaaaaaacttctaaagaatacctgtctgccttccttgctgcctgtcagctcttcctagagtgctcaagtttcccagtttacattgctgaggggaaccatacatcagagttacgttctgaaaaattggagactgactgtgagcatgtgcagcctccacagtggctccagactctgatgaatgcttgcagccaagcaagtgatttcagtgttcagagtgttgctatttcactagttatggacctggtgggactgacacagtctgtggccatggtcactggggaaaacatcaacagtgtagagcctgcacaacccttaagtccaaaccagggaagagtagctgtggttattagacctcccctcactcagggcaatctgaggtacatagctgagaagactgaatttttcaagcatgtagctttaacattgtgggaccagttgggagatgggacacctcagcatcaccagaagagtgtggaactattttatcaattacataacttagttccttcttctagcatctgtgaggatgttataagtcagcagttaacccataaagataagaaaataaggatggaagcacatgccaagtttgcagttctttggcatctaacgagagatctccatataaataaatcttcatcttttgtacgttcttttgacaggtcactgttcatcatgttagatagccttaacagtctcgatggttctactagctctgtgggacaagcctggctgaaccaagtcctacaaagacatgatattgcacgagttttggaaccattgctattgctcctgcttcatccaaaaactcagagggtttcagtacagcgtgtacaagcagaacgttattggaataagtctccctgttatccaggagaggagagtgacaagcatttcatgcaaaattttgcctgcagcaatgtgagccaagtacaactcatcacatcaaaaggaaatggtgaaaagccacttaccatggatgaaatagagaactttagtctcactgtgaatccattaagtgacagactttccctcctaagtaccagcagtgagacaattccaatggttgtgtctgattttgatcttccagaccaacagatagaaatacttcagagttctgactcgggatgttcacagtcctctgctggggacaacttgagttacgaagttgatcctgaaaccgtgaatgcccaagaggattctcaaatgcccaaggaaagctccccagatgatgatgttcaacaggtagtatttgacctgatatgtaaagttgtaagtggcctcgaagtggaatctgcatcagttacatctcaattagaaattgaagctatgcccccaaagtgcagtgatatagatccagatgaagagacgattaaaattgaagatgactccattcgacagagtcagaatgctttgctgagtaatgaaagttctcagtttctgtctgtgtctgcagagggaggccatgagtgtgtggcaaatggaatctccaggaatagctcctcaccttgtatttcaggaaccacacacactcttcatgactcttctgttgcttccatagaaaccaaatctagacaaaggagtcacagtagtattcaattcagcttcaaagaaaaattatcagaaaaagtttcggagaaggaaacaatagttaaggagtcaggtaaacaaccaggagcaaaacctaaagtaaaacttgccagaaaaaaggatgatgacaagaaaaaatcttcaaatgaaaaactcaaacaaaccagtgtattcttcagtgatggtctggatttagagaactggtatagctgtggagagggagacatttctgaaattgagagtgacatgggttctccaggatctcgaaaatctcccaatttcaacattcatcctctctatcaacatgtgctcctgtatctccagttgtatgattcatccaggactttgtatgctttctctgccatcaaagccatcttgaaaactaaccctatagcttttgtaaatgccatttcaactactagtgtaaataatgcatatactcctcagttgtctctccttcagaatctattggccagacaccggatttctgttatgggcaaagatttttatagtcacattccagtggactcaaatcataacttccggagttctatgtacatagaaattcttatttctctctgcttatattacatgcgtagccattacccaactcatgtcaaggttactgcacaagatttaataggcaatcgaaacatgcaaatgatgagcatagaaattctgacactactcttcactgagctggcaaaagtaatagaaagctcagcgaagggtttccctagttttatttctgatatgttatctaagtgcaaagttcagaaagtgattcttcattgtttgctgtcatctatctttagtgctcagaaatggcatagtgaaaaaatggcaggtaagaacctggttgctgtggaagaaggtttctcagaggacagccttattaatttctcagaggatgaatttgacaatggcagcacgttgcagtcacaacttcttaaggtgcttcagaggctgattgttctagaacacagagtaatgactattcctgaagagaatgaaacaggttttgattttgttgtatctgacttagaacacatcagtccccatcaacccatgacttctcttcagtatttgcatgctcagccaatcacatgtcaaggcatgttcctctgtgcagtgatacgagctttgcatcagcactgtgcatgtaagatgcacccacaatggattggtttaatcacatctactctgccttacatgggaaaagttctgcagagagtggttgtttctgtgacactacaactgtgcagaaatttagataatctaattcagcagtacaaatacgaaacaggattatctgatagtaggcctctgtggatggcatcaattattccaccagatatgattcttactcttttggaagggattacagccattatccattactgtttgttggatccaactacacagtatcaccaacttttggtcagtgtagaccagaaacacttgtttgaagcacgcagtggaatcctctcaatccttcatatgatcatgtcctctgtgacactgctttggagcatactgcatcaagctgattcttcagaaaagatgactattgccgcatccgcatctcttaccactattaatcttggagctacaaagaacttgagacaacagattcttgaattgttgggccccatttcaatgaatcatggtgttcactttatggctgccattgcatttgtgtggaatgaaagaagacagaataaaacaaccaccaggaccaaggtcattcctgcagccagtgaagaacagcttttattagtggaattggttcgttcaatcagtgtcatgagagcagaaactgttatccagactgtaaaagaagttttaaagcagccaccagccatagccaaggacaagaaacatctttctttggaagtctgcatgcttcagtttttctatgcttatattcaaagaattccagtgcccaatttagtggatagctgggcgtcactgttgatacttctgaaagactctatacaactgagtcttccagctccagggcagtttcttatacttggggttctgaatgagtttattatgaaaaaccctagtttggaaaataaaaaagaccaaagagaccttcaggatgtaactcacaaaatagtggatgcaattggtgcaattgctggttcttctctggaacagacaacatggctgcgacgaaatcttgaagttaagccttctcccaaaataatggtagatggaaccaatttggaatctgatgttgaagatatgttatcacctgcaatggaaaccgcaaacataactccttctgtatatagtgtccatgcattgacattactctctgaggttttggctcatcttttggatatggttttctatagtgatgaaaaggagcgggttattcctttacttgtaaatattatgcattatgttgtgccctacctcagaaatcacagttggagagcaattatggacaatctgatgacacatgataaaacaacatttagagatttgatgactcgtgtagcagtggctcaaagcagttcacttaatctctttgcaaaccgtgatgtggagctagaacagagagctatgcttcttaaaagattagcatttgctatttttagcagtgaaattgaccagtaccagaaatatcttccagatatacaagagagattggttgagagtctccgtttgccacaggtgccaactctccattctcaagtgttcctgtttttcagagtgttacttttaagaatgtctccccaacatcttacctcactctggcctaccatgattacagaacttgtacaagtatttttactgatggagcaggaactcactgctgatgaagatatttcacggacttcagggccctctgtggctggtctggagacaacgtacacaggaggtaatggcttctctacttcatataacagccagcggtggttaaacctctatctctctgcttgcaaatttttggatttggctctcgcattgccctctgaaaaccttcctcagtttcagatgtaccgatgggcctttattccagaagcctcagatgattcaggtttggaagtcagaaggcagggtatacatcaacgagaatttaaaccttacgtggtacgactagcaaaacttcttcggaaaagagcaaagaaaaatccagaggaagacaactcagggagaacattgggttgggagccagggcacttgctgctcaccatctgcaccgtgcgcagtatggagcagctcctgccgttcttcaatgtgctcagtcaagtcttcaacagcaaagtcacaagccgatgtggaggacactcagggagtcctatcctctactcaaatgccttccctaataaggacatgaaactggagaaccacaaaccatgttccagcaaagccaggcaaaaaatagaagagatggtagaaaaagattttctggaagggatgataaaaacttgagcaccattgctggttccatttagcttacatgtaaatgtaattatttaaaacacacacactgctctgcgttgtatagtttttccttttttgtatgtaacagaacacatttcagattgtatttaatttaaatatttgtatataagagcaaatgtctgaatgtggcctgaatcaagtttaaatattgttggctcatactgattatggtgcctaagagagctatatatatacacatgtaaagtccattgtttttattgtcctgagttgtcttaaacctgcaaaatatacactacccattttttttttcaaaaaaaaaaaa

SEQ ID NO: 579 - DNA, 3727 bp, Homo sapiens
  CDS (1329)..(3050)
ccttttgtgggagtccggtctgtccacttgccggtccctcagaccgtcggcggtctctgtccgcttcgggacctgtccgctggtcgctccgcgtccgatggctcctggccgcggaaccttaggcctggccctggtctccgagcgcgggttcgccgggaggagcgtgtggcgggggtgtgccggggcgtgagtgcgccgagcatggggctgagcctggtgtggggagtgggtatctgcggagccggcctgaaccccacctcagccgggcgcggggagggggctccgtgcgtgtgatcgtgcagctgtgagcgcgtggccgccccgcggggctccgctgcaggcccctcagccccaggagcagtactcgctcttcagggcctgccctggatcctggaggctacacagctgcccactcctcctggggaggctgccgtggaggccatggagatccctgccccggagcccgagaagacaggtacagcttcactcttgtagtcagtatgtctgtggatttgcacttgaggatattgacactcagagagatcaggccagtttcccagaagcatccagcatcttttttttttttttttaaatggaatctcactctgtcacccaggcgggagtggtgcaatggcttgatcttccgctcactgcaacctctgcttcccgggttcaaactattctcccgcctcaacctcccaagtagttgggattgcaggcacgcgccaccacgcccggctaatgtttgtatttttagtagagacggggttttgccatgtttcccaggctggtcttaagctcaagcgatccgcccgcctcggcctcccaaagtgctgggattacaggcgtgagccgatcggctcctggcctcctgcttctttcttccccgcgcccaatcatttgttcccactcagacgtgcttgattggcggtagcagctcttttcgtcatgaattggagtgtctgagacacaggcagattattcctcgatgctgtttctgttggtgctagctactggggctcgttccccacctggccttgctggcaggttctgcctcctctctgattctcacttgtgccacgacaggtgggctttaagctcagccgtgagcctggtagccgtgaccttgactcatttctccttcgccagctctttcctctcaggatcctgctctttccctgaaagagaatctcgaggatatatcgggttggggtcttcccgaagccaggtccaaggaatcggtgagtttcaaggatgtggctgtggacttcacccaggaggagtggggtcaactagactcccctcagagggccttgtaccgggatgtgatgttggagaactaccagaaccttcttgccctaggacctccactgcacaagccagatgtgatctctcatctggaacgaggcgaggagccatggagcatgcagagggaagtccccagagggccctgtccagaatgggagctgaaggcggtgccctctcaacagcagggcatttgcaaagaagaaccggcccaggagcccatcatggagcggcccctcggcggggcgcaggcgtgggggcgccaggcaggtgctctgcagaggagtcaggctgcgccctgggcgcccgcacctgccatggtctgggacgtccctgtagaggaattccccctcaggtgtcccctcttcgcccagcaacgcgttcccgaggggggacccttgctggacacacgcaagaacgtccaggccactgagggcagaaccaaggcccccgcgagactgtgtgcaggggaaaacgcctccacgccaagtgagccagaaaagttcccccaggtgcgccggcagcgcggggcgggcgccggggagggcgagttcgtgtgcggcgagtgcgggaaggcgttccgccagagctcctccctcacgctgcaccggcgctggcacagccgggagaaggcttacaagtgcgatgaatgcggcaaggccttcacctggagcaccaaccttctggagcaccggcgcatccacaccggcgagaagcccttcttctgcggcgagtgcgggaaggccttcagctgccactcgtccctcaacgtgcaccagcgcatccacacgggcgagcggccctacaagtgcagcgcctgcgagaaggccttcagctgcagctcgctgctcagcatgcacctgcgggtgcacaccggcgagaagccctaccggtgcggcgagtgcggcaaggccttcaaccagcgtacacacctcacacgccaccaccgcatccacacgggcgagaagccctaccagtgcggctcctgcggcaaggccttcacctgccactcatccctcaccgtgcatgagaagatccacagcggggacaagccgttcaagtgcagcgactgcgagaaggccttcaacagccgctcgcgcctcaccctccaccagaggacgcacacgggcgagaagcccttcaagtgcgccgactgcgggaagggcttcagctgccacgcgtacctgctcgtgcaccggcgcatccacagcggcgagaagcccttcaagtgcaacgagtgcggcaaagccttcagctcccacgcctacctcatcgtgcaccggcgcatccacacaggcgagaagcccttcgactgcagccagtgttggaaggccttcagctgccactcgtccctcatcgtgcaccagcgcatccacaccggtgagaagccctacaagtgcagcgagtgcggcagagccttcagccagaaccactgtctcattaaacatcagaaaatccactccggggagaagtcgtttaagtgtgagaaatgtggggagatgttcaactggagctcgcacctcactgagcaccagaggctgcacagcgaggggaagcccttggccatccagttcaacaaacacctgctcagcacatactacgtgcctggcagcctgctgggtgcaggggatgctggactgagggacgtggatcccatcgacgcgctggatgtggcaaagctcttgtgcgtggttccccccagagctggcaggaatttctccctggggagcaaacctcgaaactaacatgatgtgctttggtgtcagtagctgctttctgagctactcaacaaggaaagcaccctggtcctccctggctcctagatccagaccaccttcctccaggtgtgggagccttgccttatcaccccaatcaggtctgcatgccagggtgcctcctctagttaaagtcagtcacctccccagaagggccacactccaggaggagtgttgagagtcatttgaggtagtcttgccacctgttttccttgatgggcctggaagttgttgacaaggggaaagatctttcttgccaataaaaagaagggatatcgttgggtgccatggctcacacctgtaatcttaacactgtgggaggccaaggcaaggggatcacttgagcccaggagtctaggaccagcctggacaacatggtgagacctcgtctctacaaaaaatgcaaaaattagccagatgtggcggcatgtccctgtggtcccagctactcaggaggctgaggtgggaggatcatttgagcctaggaggtcaaggctgcagtgagccatgattcacagcactgcactgcagcctgggtgacaaagcaagaccctgtgtgaaattaaaaggaggtcgacgcggccgcgaatttagtagtagtagtcgacccgggaattccggaccggtacctgcaggcgtaccagctt

SEQ ID NO: 580 - DNA, 4248 bp, Homo sapiens
  CDS (371)..(3589)
aaggatccttaattaaattaatccccccccccccccccggtgttcccccggaagggtgagtctggacgcgggcgcggaaggagcgcggccggaggtcctcaggaagaagccgcggggactggctgcgcttgacaggctgcacttggatgggagcacctggtgcctcgggactgctccgatgcccgggtctgtgctgaatgtgtaatatgcggaactatattgaaacattacaaccatcttttgatggcaacaccctgaggacctcccttttccagatggggaaactgaggcccagaattgctaagtggcttgcttgagttgacacagggagctccaggactcaccctcagctgagccacctgccgggagcatgcctctgcgccactgggggatggccaggggcagtaagcccgttggggatggagcccagcccatggctgccatgggaggcctgaaggtgcttctgcactgggctggtccaggcggcggggagccctgggtcactttcagtgagtcatcgctgacagctgaggaagtctgcatccacattgcacataaagttggtatcactcctccttgcttcaatctctttgccctcttcgatgctcaggcccaagtctggttgcccccaaaccacatcctagagatccccagagatgcaagcctgatgctatatttccgcataaggttttatttccggaactggcatggcatgaatcctcgggaaccggctgtgtaccgttgtgggcccccaggaaccgaggcatcctcagatcagacagcacaggggatgcaactcctggacccagcctcatttgagtacctctttgagcagggcaagcatgagtttgtgaatgacgtggcatcactgtgggagctgtcgaccgaggaggagatccaccactttaagaatgagagcctgggcatggcctttctgcacctctgtcacctcgctctccgccatggcatccccctggaggaggtggccaagaagaccagcttcaaggactgcatcccgcgctccttccgccggcatatccggcagcacagcgccctgacccggctgcgccttcggaacgtcttccgcaggttcctgcgggacttccagccgggccgactctcccagcagatggtcatggtcaaatacctagccacactcgagcggctggcaccccgcttcggcacagagcgtgtgcccgtgtgccacctgaggctgctggcccaggccgagggggagccctgctacatccgggacagtggggtggcccctacagaccctggccctgagtctgctgctgggcccccaacccacgaggtgctggtgacaggcactggtggcatccagtggtggccagtagaggaggaggtgaacaaggaggagggttctagtggcagcagtggcaggaacccccaagccagcctgtttgggaagaaggccaaggctcacaaggcattcggccagccggcagacaggccgcgggagccactgtgggcctacttctgtgacttccgggacatcacccacgtggtgctgaaagagcactgtgtcagcatccaccggcaggacaacaagtgcctggagctgagcttgccttcccgggctgcggcgctgtccttcgtgtcgctggtggacggctatttccgcctgacggccgactccagccactacctgtgccacgaggtggctcccccacggctggtgatgagcatccgggatgggatccacggacccctgctggagccatttgtgcaggccaagctgcggcccgaggacggcctgtacctcattcactggagcaccagccacccctaccgcctgatcctcacagtggcccagcgtagccaggcaccagacggcatgcagagcttgcggctccgaaagttccccattgagcagcaggacggggccttcgtgctggagggctggggccggtccttccccagcgttcgggaacttggggctgccttgcagggctgcttgctgagggccggggatgactgcttctctctgcgtcgctgttgcctgccccaaccaggagaaacctccaatctcatcatcatgcggggggctcgggccagccccaggacactcaacctcagccagctcagcttccaccgggttgaccagaaggagatcacccagctgtcccacttgggccagggcacaaggaccaacgtgtatgagggccgcctgcgagtggagggcagcggggaccctgaggagggcaagatggatgacgaggaccccctcgtgcctggcagggaccgtgggcaggagctacgagtggtgctcaaagtgctggaccctagtcaccatgacatcgccctggccttctacgagacagccagcctcatgagccaggtctcccacacgcacctggccttcgtgcatggcgtctgtgtgcgcggccctgaaaatatcatggtgacagagtacgtggagcacggacccctggatgtgtggctgcggagggagcggggccatgtgcccatggcttggaagatggtggtggcccagcagctggccagcgccctcagctacctggagaacaagaacctggttcatggtaatgtgtgtggccggaacatcctgctggcccggctggggttggcagagggcaccagccccttcatcaagctgagtgatcctggcgtgggcctgggcgccctctccagggaggagcgggtggagaggatcccctggctggcccccgaatgcctaccaggtggggccaacagcctaagcaccgccatggacaagtgggggtttggcgccaccctcctggagatctgctttgacggagaggcccctctgcagagccgcagtccctccgagaaggagcatttctaccagaggcagcaccggctgcccgagccctcctgcccacagctggccacactcaccagccagtgtctgacctatgagccaacccagaggccatcattccgcaccatcctgcgtgacctcacccggctgcagccccacaatcttgctgacgtcttgactgtgaacccggactcaccggcgtcggaccctacggttttccacaagcgctatttgaaaaagatccgagatctgggcgagggtcacttcggcaaggtcagcttgtactgctacgatccgaccaacgacggcactggcgagatggtggcggtgaaagccctcaaggcagactgcggcccccagcaccgctcgggctggaagcaggagattgacattctgcgcacgctctaccacgagcacatcatcaagtacaagggctgctgcgaggaccaaggcgagaagtcgctgcagctggtcatggagtacgtgcccctgggcagcctccgagactacctgccccggcacagcatcgggctggcccagctgctgctcttcgcccagcagatctgcgagggcatggcctatctgcacgcgcagcactacatccaccgagacctagccgcgcgcaacgtgctgctggacaacgacaggctggtcaagatcggggactttggcctagccaaggccgtgcccgatgccacgagtactaccgcgtgcgcgaggatggggacagccccgtgttctggtatgccccagagtgcctgaaggagtataagttctactatgcgtcagatgtctggtccttcggggtgaccctgtatgagctgctgacgcactgtgactccagccagagcccccccacgaaattccttgagctcataggcattgctcagggtcagatgacagttctgagactcactgagttgctggaacgaggggagaggctgccacggcccgacaaatgtccctgtgaggtctatcatctcatgaagaactgctgggagacagaggcgtcctttcgcccaaccttcgagaacctcatacccattctgaagacagtccatgagaagtaccaaggccaggccccttcagtgttcagcgtgtgctgaggcacaatggcagccctgcctgggaggactggaccaggcagtggctgcagagggagcctcctgctccctgctccaggatgaaaccaagagggggatgtcagcctcacccacaccgtgtgccttactcctgtctagagaccccacctctgtgaacttatttttctttcttggccgtgagcctaaccatgatcttgagggacccaacatttgtaggggcactaatccagcccttaaatcccccagcttccaaacttgaggcccaccatctccaccatctggtaataaactcatgttttctctgaaaaaaaaaaaaaa

SEQ ID NO: 581 - DNA, 6912 bp, Homo sapiens
  CDS (663)..(3875)
cacgttaaccggacaggatgggcccagggccggcctgggaacgacgtcccttaccccacccccgcgccgattaggatctgcgctctgctgatggccccctccccgttttcctgcatttacaggcaagtgaaccggagcaaacgacttccgatccagtctgcgctgttgcggctcccgtttgggatttgatttgcagcatctttgagcctctacgacaaaaaaccgcgaagcacgcccagccctcccccggcaccccgaaaagcacccacgtcctcccggggacacagctgggcgcgtccacacccccgcagccccacaccatgttgtgcggaaggacttccactccccgcctgtgtcgttgatgtcagaccccaggccagctccggggctgcagttctcccggctaatgctgaggctgcggctccggctctagcacaggcaccagccgccgccgcacccggccccagcgcccaccgtctgcatgtgcccgccgtagccgtctgcccagcccgcagcccgcgctccacggagcgctggagaccaccgtggggggccccttctgccctcgagagaagcggtcttggaggtattgatttaggtggttggattttttccgtggatctatcaattcacaattcgaatttggaagaaagaaggaaaacatgacgtctccagccaaattcaaaaaggataaggagatcatagcagagtacgatactcaggtcaaagagatccgtgctcagctcacagagcagatgaaatgcctggaccagcagtgtgagcttcgggtgcaactgttgcaggacctccaggacttcttccgaaagaaggcagagattgagatggactactcccgcaacctggagaagctggcagaacgcttcctggccaagacatgcagcaccaaggaccagcaattcaagaaggatcagaatgttctctctccagtcaactgctggaatctcctcttaaaccaggtgaagcgggaaagcagggaccataccaccctgagtgacatctacctgaataatatcattcctcgatttgtacaagtcagcgaggactcaggaagactctttaaaaagagtaaagaagtcggccagcagctccaagatgatttgatgaaggtcctgaacgagctctactcggtgatgaagacatatcacatgtacaatgccgacagcatcagtgctcagagcaaactaaaggaggcggagaagcaggaggagaagcaaattggtaaatcggtaaagcaggaggaccggcagaccccacgctcccctgactccacggccaacgttcgcattgaggagaaacatgtccggaggagctcagtgaagaagattgagaagatgaaggagaagcgtcaagccaagtacacggagaataagctgaaggccatcaaagcccggaatgagtacttgctggctttggaggcaaccaatgcatctgtcttcaagtactacatccatgacctatctgaccttattgatcagtgttgtgacttaggctaccatgcaagtctgaaccgggctctacgcaccttcctctctgctgagttaaacctggaacagtcgaagcatgagggtctggatgccatcgagaatgcagtagaaaacctggatgccaccagtgacaagcagcgcctcatggagatgtacaacaacgtcttctgcccccctatgaagtttgagtttcagccccacatgggggatatggcttcccagctctgtgcccagcagcctgtccagagtgagctgctacagagatgccaacaactgcagtctcgcttatccactctaaagattgaaaacgaagaggtaaagaagacaatggaggccaccctgcaaaccatccaggacattgtgactgtcgaggactttgatgtgtctgactgcttccagtacagcaactccatggagtccgtcaagtccacggtctctgaaaccttcatgagcaagcccagcattgctaagaggagagccaaccagcaagagacagagcagttttatttcacaaaaatgaaagagtacctggagggcaggaacctcatcaccaagttacaagccaagcatgaccttctgcagaaaaccctgggagaaagtcagcggacagattgcagtctagccaggcgcagctcaactgtgaggaaacaggactccagccaggcaattcctctggtggtggaaagctgtatccggtttatcagcagacacggactacagcatgaaggaattttccgggtgtcaggatcccaggtggaagtgaatgacatcaaaaatgcctttgagagaggagaggaccccctggctggggaccagaacgaccatgacatggattccatagctggtgtcctgaagctttacttccgggggctggaacaccctctcttccccaaggacatctttcatgacctgatggcctgcgtcacaatggacaacctgcaggagagagctctgcacatccggaaagtcctcctagtcctgcccaaaaccactctgattatcatgagatacctctttgccttcctcaatcatttatcacagttcagtgaagagaacatgatggacccctacaacctcgccatctgcttcgggccctcgctaatgtcagtgccagagggccacgaccaggtgtcctgccaagcccacgtgaatgagctgatcaaaaccatcatcatccagcatgagaacatcttcccaagccccagggagctggagggccctgtctacagcagaggaggaagcatggaggattactgtgatagccctcatggagagactacctcggttgaagactcaacccaggatgtgaccgcagagcaccacacgagcgatgacgaatgtgagcccatcgaggccattgccaagtttgactacgtgggccggacagcccgagagctgtcctttaagaagggagcatccctgctgctttaccagcgggcttccgacgactggtgggaaggccggcacaatggcatcgacggactcatcccccatcagtacatcgtggtccaagacaccgaggacggtgtcgtggagaggtccagccccaagtctgagattgaggtcatttctgagccacctgaagaaaaggtgacagccagagcgggggccagctgtcccagtgggggtcatgtagccgatatttatcttgcaaacatcaacaagcaaaggaagcgtccagaatctgggagcatccggaaaacttttcggagtgacagccatgggctgagcagttccctgactgactcctcctccccaggggtgggggctagctgccgcccatcctcccagcccatcatgagccagagcctccccaaagaagggccagataagtgttccatcagtgggcacgggagcctcaactccatcagccgccactcatccctgaagaatcggctggatagtccacagatccggaagactgccacagcgggaaggtcaaaaagcttcaataaccatcggcccatggaccctgaggtcattgctcaggatattgaggcaacaatgaactcggccctgaatgagctacgggaactagaacggcagagcagtgtcaaacacacccctgacgtggttctggacaccttggagcccctcaaaacctccccagtggtggcccccacgtcagagccctccagccctctgcacacccagctcctcaaggaccccgagcccgccttccagcgcagcgccagtactgctggggacatcgcctgcgccttccggcctgtcaagtctgtcaagatggctgccccggtcaaaccaccagccacacggcccaagcccactgtcttccccaaaacaaatgccactagccctggtgtcaactcatcaacttccccacagtctactgacaagtcttgtactgtctgagggataataatttaattgttctagacaaggggactatagggactgactgttattaaaatcttcctatttaactagcttggggacttcagttgaaaattaggttctaagttgttcttgcaggaattagcctccccgtctcccaaaaccttgagaatgaagcccttggtatcgcctctcccttcccactgccctctgcttcccccagtcgtcgtaattcagccagctgcagtccgtactgttcttaggttagccagagacaggttttcattatcaggtcactgtgaaatctggtaaggcagtcctgaggacatgggctcaagtctcagtcccctcagaccacggtgatgccttgaccagatggttggctactgccatccagctttcagtggcatcttgttttgggaactgattatagagaatcatatatagtccagtcttcattttacatacacacacatattttacacacacacacattttacacacacacacacacacacacacacacacatatgtttttctagtctctggcatgtgtagcctctcctggtcatagaccagtctctttgtaagttattgtggcagttcacacagtagccaccaggggtctctgtttccattacaaactttgttctgtctgggccagagaacctagcctttgaaatctctccatcatgtgaaacataacgggatgggacaatcccgtaacctgtttggggttgggggctttctctctgtgttctttccattgatgtgaattggtcattggtgtttgctcttgcctctcctccatcccctagaagtacacccccgtcttattaaggagcttttaaagtttttctgaatgtatagacatttctcgggttcctacctttgtctctgatggaccattttccatttaagacattttcctgtataagacagttttatagctggttccttttagggtaaagagtcttaagagagttttattgtgtctatggcaggtttgggaaaggtaagaaatgggtcctttttcctcctaatgtttttggcacttaaaacataaaattcattatcctattaaaaaattaaattcagctttgctaatccagaaattgttcccaaatgaaaacttgttttaagtccaccccttagtttccttattttacaaggtctctcttcagggaccaacaggggcttagagagccttagttagattaaagggagaccctacctcttaaaaccagttttcatttatgcaaacaaggacaattaagggaaccctgaccccacaggctctcaagtcttcccaaggccagaatcgaaagaaaattaaaatttgaatgctgaatattctggctctactctggcctttttttctggttcccttccaaaatgcacaaatcatacccttgtctgctccaattcagtctccaaacctggtgcctgtgctcctggcccccctagcatcatgctatcccaggagtatcaggaccagacacatccacagccaggctcatgggtctcagacagcaacttgagttaaagctgaaactcatccttcttctctgtgttttctggtttaaaagctgcacttatattttagccttattattttctgtagttccggagagatggtgggttgccattctggtaggaaaatctgagttttcttatctttgacctagaagagattctttttggaccaacctgcgaaattggtagttaggtctatggaaagtggtaggatttttttttttaatcctgtgcaaaggaaaagaggtgctttgtgggaaatcactaatgagaaggctaacctgcagcaccagagaaacctttccaagtgctaggcaggagaactgaagaactctttcagtgaagtgagtcagcctagaagaggcaacccacagtcttgatttttgttgctgtttcctgacctgttcttgcctgtcacctgggcctacacaggtcccgagccaacggggctttcatacccaaggatctgtttccttgctgaaaatgaaaccctatctttcactttacattcctttcaatccaactgatcaaaactggtacccacacttgccctttctccctctctccagcacactcccctctaagaaagtaaaagcaaagccttcttaatggcaacactttgggcctgttctgttgctcctgccttatttctctttcaaccctgtacatgactcgtgttcaccatccccttgatcagtgtccatccgcgctaatttgcatcatgaactgaacagtgtgtgagtggtcacctactaaacccagctctgggggcagagctgtcttccccatctctggtgctcctaacacctgtgagatggtcctgtcgagaggactaggaaccgataggaggagagtccttctcggcagagctcactgcaaacaactggaattgaggttgcacactgtgatttttacaccgaaaagccaaaaggagctggccatccagggcctagggagaccagccttcctcagctatgcttgccgaaaccagcatgatgcttcaaagagccctgctccacccctcatggcatggatccttttcctggtgtggactctgaagggtcagtcttcggggaagagaggtggggtggggctactagcatcccaatttagaaaatagaggagtttgtagccagcagcctgtaaactggaaacactggtctcagccaacctcctcagggcgccctggcttctccccaaggagatgaggagcggtgatgccagcaccgggatgcgcagagcactggaagggctggtgcagatctacttcccatgcagaagagaagtcacatcttccagggaatcgcaatgttgtggcgtctgacttgtatgtcacatttgtgtaaaatggtatattctttaaaatagtgttgataactggaatattgtatgtatgcttggagatgctttgtgtgaacctaagactgtcactcaacagatgttggattggggaaaatccaaagcacaacttcaaaataaaatacatttttaggtttcaaaaaaaaaaaaaaaaaaa

SEQ ID NO: 582 - DNA, 2835 bp, Homo sapiens
  CDS (109)..(2673)
cgtaccggttcggaattcccgggtcgacgatttcgtcgctttgtctgtccggcaagccgacggcccgctgctggcctccgtgacgcggcctcctccgcgcctcgcggcatggcgtcggaggggccgcgggagcccgaaagcgagggcatcaagttatcagcagatgtcaaaccatttgtccccagatttgccgggctcaatgtggcatggttagagtcctcagaagcatgtgtcttccccagctctgcagccacatactatccgtttgttcaggaaccaccagtgacagagcagaaaatatatactgaagacatggcctttggagcttcaacttttccacctcagtatttatcttctgagataactcttcatccatatgcctattctccttatacccttgactccacacagaatgtttactcagtgcctggctcccagtatctttataaccaacccagttgttaccgaggttttcaaacagtgaagcatcgaaatgagaacacatgccctctcccacaagaaatgaaagctctgtttaagaagaaaacctatgatgagaaaaaaacgtatgatcagcaaaagtttgacagtgaaagggctgatggaactatatcatctgagataaaatcagctagaggttcacatcatttgtccatttacgctgagaatagtttgaaatcagatggttaccataagcgaacagacaggaaatccagaatcattgcaaaaaatgtatctacctccaaacctgagtttgaatttaccacactggactttcctgaactgcaaggtgcagagaacaatatgtcagagatacagaagcaacccaagtggggacctgtccactctgtctctaccgacatttctcttctaagagaagtagtaaaaccagctgcagtgttatcaaagggtgaaatagtggtgaaaaataacccaaatgaatctgtaactgctaatgccgctaccaattctccttcatgtacaagagagttatcttggacaccaatgggttatgttgttcgacagacattatctacagaactgtcagcagcccctaaaaatgttacttctatgataaacttaaagaccattgcttcatcagcagatcctaaaaatgttagtataccatcttctgaagctttatcttcggatccttcctacaacaaagaaaaacacattattcatcctacccaaaagtctaaagcatcacaaggtagtgaccttgaacaaaatgaagcctcaagaaagaataagaaaaaaaaaaaaaaatctacatcaaaatatgaagtcctgacagttcaagagcctccaaggattgaagatgccgaggaatttcccaacctggcagttgcatctgaaagaagagacagaatagagacaccgaaatttcaatctaagcagcagccacaggataattttaaaaataatgtaaagaagagccagcttccagtgcagttggacttggggggcatgctgacagccctggagaagaagcagcactctcagcatgcaaagcagtcctccaaaccagtggtagtctcagttggagcagtgccagtcctttccaaagaatgtgcatcaggggagagaggccgccgcatgagtcaaatgaagaccccgcacaatcccttggactccagcgccccactgatgaagaaagggaagcagagggagatccccaaggccaagaagccaacctcactgaagaagattattttgaaagaacggcaagagagaaagcagcgtctccaagaaaatgctgtgagtccagcttttaccagtgatgacacacaagatggagagagtggtggtgatgaccagtttcccgagcaggcagagctgtcagggccagaggggatggacgaactgatctccactccttcggttgaggacaagtctgaagagccaccaggcacagagctccagagggacacagaggcctcccaccttgctcccaatcacaccaccttccctaagatccacagccgcagattcagggattactgcagccagatgcttagtaaagaagtggatgcttgtgttaccgacctactcaaagaactggtccgtttccaagaccgtatgtaccagaaagatccagtcaaggccaagactaaacgtcgacttgtgttggggttgagggaggttctcaaacacctgaagctcaaaaaactgaaatgtgtcattatttctcccaactgtgagaagatacagtcaaaaggtgggctggatgacactttgcacacaattattgattatgcctgtgagcagaacattccctttgtgtttgctctcaaccgcaaagctctggggcgcagtttgaataaggcagttcctgtcagtgtggtggggatcttcagctatgatggggcccaggatcagttccacaagatggttgagctgacagtggcggcccgacaggcgtacaagaccatgctggagaatgtgcagcaggagctggtgggagagcccaggcctcaggcacctcccagcctacccacacagggccccagctgccctgcagaagatggccccccagccctgaaagaaaaagaagagccacactacattgaaatctggaaaaaacatctggaagcatacagtggatgtaccctggagctagaagaatccttggaggcttcaacctctcaaatgatgaatttgaatttatgagagttcttgcctgtgtgtctgtattttgggtaaggaggggaggtctgaaaaagactttggggctttttcttctgtttttcatgacaatgtaatttgtgtaactgttgaatctggaaattgatcagcattaaagggcacatgaagcagaaaaaaaaaaaaaaa

SEQ ID NO: 583 - DNA, 1738 bp, Homo sapiens
  CDS (408)..(752)
taagcttgcgaccgccttttccagttccaggtgtgcagaagtgtcctctccccacgcgcggcgggctgcacttggtcgctggctccgagatcgcgcggggccgccggaagcccaagacggtaccgggggccgcagccgcagccggcgccgccctccgccctccccaacagcaggccgagtcccgtagcatccggtagggaaatggtcgtgctttcggtccccgccgaagtcaccgtgatcctgttagatatcgaaggacattttatttccttacatcgaagaaaatgttaaagagtatctgcagacacattgggaagaagaggagtgccagcaggatgtcagtcttttgaggaaacaggttctttgcagatgtagttccagcagtcaggaagtggagagaggccggaatgaaggtgtacatctattcctcagggagtgtggaggcacagaaactgttattcgggcattctacggagggagatattcttgagcttgttgatggtcactttgataccaagattggacacaaagtagagagtgaaagttaccgaaagattgcagacagcattgggtgctcaaccaacaacattttgtttctgacagatgttactcgagaggccagtgctgctgaggaagcagatgtgcacgtagctgtggtggtgagaccaggcaacgcaggattaacagatgatgagaagacttactacagcctcatcacatccttcagtgaactatacctgccttcctcaacctagagaagggttgttaaggcagaccgccctgttccccagagttgtccctgtagtgtctaggtttattctaatggtaaaagtaacttacttaaaaaacatatgtacacatatgtatgcaagtatgtatatatgtgtatgctcagattaacttccataggtacataagtgaaagaagtctcagttcagtgaacacaaaacttatttaaagatgctttatatgtagaaattgtttcaaatcatactctaacccttagtgagggcaaagtgtagttggtagaagaaattgctaaatacctatctaatgtgctatgtttatcaaatcgtgtactaaaatggaaagctagttttgagaaattattcagaagccttgttattttaaaaatgaaatatttcaaagactgaatattttcaaagaaaatgaataattcattgcccttgtgatttagaagattataacagctgtatttcatatttgcctccttatatatatcaaagaccaaggtatttccttctgcttcaaaagaacaaaattgggaaagaaaactcacttgagtcttgatcaaacaagtgtcttttacttaagaagaaacttggtaatcattgtggcacccacagcaagcagttgccttaccagtgaaaaaggtgcactgaggtaacatctaaaacagagatgtggttcttaatgtttaacagaacagttctaatcctgccacgtgttatcattatagattttatagttgcctttctaactacttagcacagtttgagaatacgttaattgctatttactatttaaaaagttttactgaaatcagtccataacattaagatgagccctaatatgtaagattttcctctggaatggatgtgagaaatgtaaattttataacagcagtatttatcctggtttaattctaatacgatgtcatgttaatttcatgttgtgattaataaaagcattttttcttcaaaaaaaaaaaaaaaaa

SEQ ID NO: 584 - DNA, 1402 bp, Homo sapiens
  CDS (313)..(1347)
tcggcactaccagcctgcttagttaaccctcactaaagggaataagcttgcggccgccctcccacagccccacacactgggagaccgcccaccgcaaaccgcggagacccccgtctagatttaaagcgcggctgcgcccggcttctgacgtccattgaatcgcgcgggcggccggcggcgagcgcggggctgcgccgggatcgctgcgccctccgccgctggcctctgcgacgcgcgccgctcgcccgagccacccgccgccgcgccggctccccgcgccgctgcgctcctcgccccgcgcctgcccccaggatggtccgcgcgaggcaccagccgggtgggctttgcctcctgctgctgctgctctgccagttcatggaggaccgcagtgcccaggctgggaactgctggctccgtcaagcgaagaacggccgctgccaggtcctgtacaagaccgaactgagcaaggaggagtgctgcagcaccggccggctgagcacctcgtggaccgaggaggacgtgaatgacaacacactcttcaagtggatgattttcaacgggggcgcccccaactgcatcccctgtaaagaaacgtgtgagaacgtggactgtggacctgggaaaaaatgccgaatgaacaagaagaacaaaccccgctgcgtctgcgccccggattgttccaacatcacctggaagggtccagtctgcgggctggatgggaaaacctaccgcaatgaatgtgcactcctaaaggcaagatgtaaagagcagccagaactggaagtccagtaccaaggcagatgtaaaaagacttgtcgggatgttttctgtccaggcagctccacatgtgtggtggaccagaccaataatgcctactgtgtgacctgtaatcggatttgcccagagcctgcttcctctgagcaatatctctgtgggaatgatggagtcacctactccagtgcctgccacctgagaaaggctacctgcctgctgggcagatctattggattagcctatgagggaaagtgtatcaaagcaaagtcctgtgaagatatccagtgcactggtgggaaaaaatgtttatgggatttcaaggttgggagaggccggtgttccctctgtgatgagctgtgccctgacagtaagtcggatgagcctgtctgtgccagtgacaatgccacttatgccagcgagtgtgccatgaaggaagctgcctgctcctcaggtgtgctactggaagtaaagcactccggatcttgcaactccatttcggaagacaccgaggaagaggaggaagatgaagaccaggactacagctttcctatatcttctattctagagtggtaaactctctataagtgttcagtgttgacatagcctttgtgcaaaaaaaaaaaaaaaa

SEQ ID NO: 585 - DNA, 3763 bp, Homo sapiens
  CDS (243)..(2192)
cgaccctcgctcactcctcagtgtacgagtgatctgaagcatgacaagctcagcctgcagctgccgtgggctttgtgtggactggacgcagagcttgggagacgggggagggctattactccaattcactgtcaatggaattacagctatagcggcagtgtatataggattgctttttctcgtcttcctgggttctgaagtaacggaagctaccttgtataaagacctcaacactgctgaccatgatcagcgcagcctggagcatcttcctcatcgggactaaaattgggctgttccttcaagtagcacctctatcagttatggctaaatcctgtccatctgtgtgtcgctgcgatgcgggtttcatttactgtaatgatcgctttctgacatccattccaacaggaataccagaggatgctacaactctctaccttcagaacaaccaaataaataatgctgggattccttcagatttgaaaaacttgctgaaagtagaaagaatatacctataccacaacagtttagatgaatttcctaccaacctcccaaagtatgtaaaagagttacatttgcaagaaaataacataaggactatcacttatgattcactttcaaaaattccctatctggaagaattacatttagatgacaactctgtctctgcagttagcatagaagagggagcattccgagacagcaactatctccgactgcttttcctgtcccgtaatcaccttagcacaattccctggggtttgcccaggactatagaagaactacgcttggatgataatcgcatatccactatttcatcaccatctcttcaaggtctcactagtctaaaacgcctggttctagatggaaacctgttgaacaatcatggtttaggtgacaaagttttcttcaacctagttaatttgacagagctgtccctggtgcggaattccctgactgctgcaccagtaaaccttccaggcacaaacctgaggaagctttatcttcaagataaccacatcaatcgggtgcccccaaatgctttttcttatctaaggcagctctatcgactggatatgtccaataataacctaagtaatttacctcagggtatctttgatgatttggacaatataacacaactgattcttcgcaacaatccctggtattgcgggtgcaagatgaaatgggtacgtgactggttacaatcactacctgtgaaggtcaacgtgcgtgggctcatgtgccaagccccagaaaaggttcgtgggatggctattaaggatctcaatgcagaactgtttgattgtaaggacagtgggattgtaagcaccattcagataaccactgcaatacccaacacagtgtatcctgcccaaggacagtggccagctccagtgaccaaacagccagatattaagaaccccaagctcactaaggatcaccaaaccacagggagtccctcaagaaaaacaattacaattactgtgaagtctgtcacctctgataccattcatatctcttggaaacttgctctacctatgactgctttgagactcagctggcttaaactgggccatagcccggcatttggatctataacagaaacaattgtaacaggggaacgcagtgagtacttggtcacagccctggagcctgattcaccctataaagtatgcatggttcccatggaaaccagcaacctctacctatttgatgaaactcctgtttgtattgagactgaaactgcaccccttcgaatgtacaaccctacaaccaccctcaatcgagagcaagagaaagaaccttacaaaaaccccaatttacctttggctgccatcattggtggggctgtggccctggttaccattgcccttcttgctttagtgtgttggtatgttcataggaatggatcgctcttctcaaggaactgtgcatatagcaaagggaggagaagaaaggatgactatgcagaagctggcactaagaaggacaactctatcctggaaatcagggaaacttcttttcagatgttaccaataagcaatgaacccatctcgaaggaggagtttgtaatacacaccatatttcctcctaatggaatgaatctgtacaaaaacaatcacagtgaaagcagtagtaaccgaagctacagagacagtggtattccagactcagatcactcacactcatgatgctgaaggactcacagcagacttgtgttttgggttttttaaacctaagggaggtgatggtaggaaccctgttctactgcaaaacactggaaaaagagactgaaaaaaagcaatgtactgtacatttgccatataatttatatttaagaactttttattaaaagtttcaaatttcaggttactgctgcgattgatgtagtggagatgcctgaacacaattctatattttagtattttttagtaatttgtactgtattttccttgcaaatattggagttataaaccatttactttgtgttctactgagtaagatgacttgttgactgtgaaagtgaattttcttgctgtgtcgaacaatcaggactgcattcatatgagatccttgtagtataagcacaggccatttttcactttggtattaataaaatgtaaaaaaaaaaaactggctgaatggctgaatgagataaaatttaattttaaaaaatggttatgaaataatgttccaattattaaatttgtattatcccagtggtattcaataaatcaaaatgtgtgaagtaatgggcaatatcaaacttcctgcatatctccatttttgctctaggcaaattaattatccttaaaaaagttaagcatatcttctgaactgaatacatcagctggcataaaaggagcatgaagtctgttaaagccattgtcagcaaagctttgaaaataaaggacttcacaaaaacggtaatgtaaatgtgcttccaagttggggggaaaatgtgtacttaggaaaacatggaaacttagacttgtatagtgtaatgaacacaaataccaaaactgcattttggttttgcctataccatcctgatttttgaaaagtgaattataaacacaaaattgttagtgtttatgatgtttttatcataaaggatgtcagagaaactttatgcatattaaaaatgtaatgtaattataagcgattcccctcaacaatccagagaaagtagttctttaaataagagataatttaaagaaaaataaatactagacatcaaatttagatctggtttatgtcaaaggttttaacactgtacataaatgttcaatttacttttacaaagatcaagaatactgcccattactgtcacaattttccagatattatataatgaactcgtaatgtaacatttccttctagcttcctactgaattgtgagctgttacttgttgaaaaaccatatcacttttctgttgccatgatttttttttttcaacaaaaaaccaaagtgcattgtacgccctttggccagtcttgtatgtgccttgatccaacgctacatgtattcagcttttaaaactccacaaatttttcatactccttaaatatgaaaaattatggtcttattgctgaataaaacttttaaaaagtacagaataattgtgcttgctttttcaggattgtgttactatcactaagtagcaaattgcccagcacattagtcctaaacgtcccatgtatttttctaggcataaaaataaaagttggctaaaaattttaaaaaatcaaaaaaaaaaaa

SEQ ID NO: 586 - DNA, 7354 bp, Homo sapiens
  CDS (1592)..(6211)
cggtccggaattcccgggtcgacccacgcgtccgcgccgatggctgcggggtctcgcgccgtcgcaccgtccccacgcggcaagcgaccttcgggctcagggcggcggcggctgcaacgaggattaggagggcggcgcggaagccaagaatagtgtcgtcagcagcagccatttggtcccaggaggaaaagaggctgtggcagcgacgccgacgtcctgcgcgtaccccctctccgcggcacccaccgggccccctcctcctcctcttcggcggcggcagcgtccaccatcttcctcttgctgccagtggtagcgctcgtctggcggagctggttgttggtcttgacgatattatggatgaaggagttgttaaagaaagtggcaatgataccattgatgaagaagaactgattttacctaacaggaacttaagggacaaggtagaagaaaattcagtgagatctccaagaaaatcacctcgtttaatggcacaagaacaagtaagaagtttgcgacagagcactattgccaagcgttcaaatgcagcaccattaagtaacacaaaaaaagcatctgggaagactgtatctactgctaaagcaggagtgaaacaaccagaaaggagtcaggttaaagaagaagtatgtatgtcactgaaacctgagtaccataaggagaatagaaggtgcagccgaaatagcggacaaattgaagtggtacctgaagtatcagtgtcttcaagtcattcttcagtgtcatcttgtcttgaaatgaaggatgaagaatgattagactctaaggattatgtgtaataatccgggagacatagatgtgccatctcatgaattaaattgttcacttctttcagagacttgtgttactattggagaaaagaaaaatgaagctttgatggaatgtaaagccaagcctgttggtagtccaattgtttaagttttcagataaagaagaacatgaacaaaatgattccatttcaggtaaaacgggtgagactgttgttgaagaaatgatagcaacaagaaaagttgaacaagattcaaaggagacagaaaaattatcccatgaagatgaccatattcttgaggacgctggatcttctgatatttctagtgatgctgcttgtacaaatccaaataagacagaaaacagccttgtaggtttgcctagttgtgtagatgaagtgactgaatgtaatttggaattgaaggataccatgggtattgctgataaaactgagaacacccttgacagaactaaaattgaaccgttgggttattgtgaagatgcggagtctaataggcagttggagagcactgagtttaataaatcaaacttagaggtggttgatactagtacttttggaccggaaagtaatatcttgtaaaatgctatttgtgatgtgcctgaccaaaattcaaaacagttgaatgctatagaaagtactaaaatagagtcccatgaaacagcaaaccttcaggatgacagaaacagccagtcaagtagcgtttcttacttagagtcaaaaagtgtaaaatccaaacatacaaaacctgtaattcattctaagcaaaacatgaccacagatgctccgaagaaaattgttgcagcaaagtatgaagtaatacatagcaaaactaaagttaatgtcaaaagtgtgaaacgaaatactgatgtaccagaatctcagcaaaatctgcataggccagtcaaagtcagaaaaaaacaaattgataaggagccaaagattcagagttgcaattctggggttaaatctgtgaaaaaccaagctcattctgtactgaaaaaaacattacaggatcaaactttagtacaaattttcaagcccttaactcattctttgagtgataagtcacacgctcatcctggttgcttgaaagaacctcatcatcctgcacaaactggacatgtatcacattctagccagaaacagtgtcataagcctcagcaacaggccccagcaatgaaaaccaatagtcacgtgaaggaagagcttgaacacccaggcgttgagcattttaaggaagaggataaactgaaactgaaaaaacctgagaagaacctacaaccccgccaaagaagaagcagcaaaagtttttctttagatgagccaccattgttcattccagataacatagctaccataagaagagaaggctctgatcatagctcctcatttgaaagcaaatatatgtggactcccagcaagcagtgtgggttttgcaaaaaaccacatggcaacaggtttatggttggctgtgggagatgtgatgactggtttcatggtgattgtgttgggttaagtctttctcaagcacagcagatgggcgaggaagacaaagaatatgtctgtgtaaaatgttgtgctgaagaagacaaaaagactgaaatactagatccagatactttggaaaaccaagctacagttgaattccatagtggagataaaacaatggagtgtgaaaagcttggattatcaaaacacacaacaaatgatagaaccaaatatatagatgatacagtgaagcacaaggtcaaaattttaaaacgggagtctggtgaaggcagaaattcatcagactgtagagataatgaaattaaaaaatggcagctagctcctcttcgtaagatgggacaaccagttttacctcggagatcctcagaagaaaaaagtgaaaaaataccgaaagagtctacaactgttacttgcacaggagaaaaagcttcaaaaccaggtactcatgagaagcaagagatgaaaaagaagaaagttgaaaaaggagtgcttaatgtacatcctgctgcttctgcttccaagccttctgcagatcagatcaggcaaagtgtcagacattctctcaaagacattcttatgaagagacttacagactcaaatttgaaggtaccagaggaaaaggcagcaaaagttgccacaaaaattgagaaagagcttttctctttttttcgggacacagatgctaaatataagaacaaatatagaagtttgatgtttaatttgaaagatcctaaaaacaatatattatttaaaaaagtactgaaaggagaagtaactcctgatcatcttatcagaatgagtccagaagaactagcttctaaagagttagctgcttggagacgaagagaaaacagacataccatagaaatgattgagaaagagcagagagaagtggaacgacggccaatcaccaaaataactcataaaggtgaaatagaaattgagagtgatgccccaatgaaagaacaggaagcagccatggagattcaggaaccagccgccaataagtcattggagaagccagaaggatctgaaaaacaaaaagaggaggttgactctatgtctaaagataccactagtcaacacagacagcatctttttgatctcaactgcaaaatctgcataggtcgaatggcaccacctgtagatgatctttctccaaaaaaagtaaaagttgttgtaggagtagctcgcaaacattcagacaatgaagcagaaagtatagcagatgcattatcttcaacctcaaatattttggcttctgaattctttgaggaggagaaacaggagtctccaaagtcaacgttctctcctgctccacgtccagagatgcctggaactgttgaagttgagtctacctttctggctcgattgaacttcatctggaaaggttttatcaacatgccttctgtggcaaaatttgttaccaaagcctatccagtatctggctccccagaatacctgacagaggacctaccagatagtattcaagtaggtggcaggatatcacctcagacagtttgggattatgtggaaaaaataaaagcatcaggaaccaaggaaatttgtgtggttcgcttcacaccagtaactgaagaagatcaaatttcttatactttgctctttgcatacttcagtagcagaaagcgctatggagtagctgctaacaacatgaagcaggttaaagatatgtaccttattcctttgggtgccacagataaaattccacaccctcttgtgccttttgatggacctgggcttgaactgcatagacctaatctattgttgggcttaattattcgtcagaaactgaagcgacagcacagtgcctgtgctagtactagtcatatagctgagactcctgaaagtgcaccaccaatagcattgccacctgataaaaaaagtaaaatagaagtttctacagaagaagcaccagaggaagaaaatgacttttttaattcttttacaactgtattacacaagcagagaaataaacctcagcagaatcttcaggaagaccttccaacagcagttgaacctttaatggaagtcaccaaacaggagccaccaaaacctttaagatttcttcctggcgtgttgattggctgggagaatcaacctactactctggaattagcaaataaacctcttcctgtggatgatatacttcaaagccttttgggcaccactggtcaagtatatgaccaggcccagtcagtgatggaacaaaacactgttaaagaaattccatttttaaatgagcagaccaactcaaaaatagagaaaacagataatgtggaagtaactgatggtgaaaacaaggagataaaagttaaagtagataatatttcagaatctacagataagtcagcagaaatagaaacatcagtagtagggtcctcttccatttctgcagggtctttgacgagtcttagtctcagaggtaagccaccagatgtttctacagaagcatttttaacaaatttatcaattcagtcaaaacaagaggaaactgtggagagtaaagagaaaacattaaaaagacagcttcaggaagatcaagagaataatttgcaagataaccagacttcaaatagttctccatgcagatctaatgtaggaaaaggaaacatagatggtaatgtgagctgtagtgaaaaccttgttgctaatacagcgaggtctccacagtttatcaacctgaaaagggatcctaggcaagcagcaggacgaagtcagcctgtaactacttcagaaagcaaagatggagatagttgccggaatggagaaaaacacatgctgcctggcctgtcacacaacaaggagcacttaacagaacaaatcaatgtagaggaaaagttgtgttctgcagagaaaaactcgtgtgttcagcagagtgacaatttaaaagttgcacaaaactcaccatcagtagaaaacatacagacttctcaagcagaacaagcaaaacccttacaggaggatattttaatgcaaaatattgaaactgtgcacccatttcgaagaggatcagcagtagcgacatctcattttgaagttggaaacacatgtccatcagaatttccttctaaaagcatcacctttacttccagaagcaccagccccagaacaagtacaaacttttcacccatgaggccacagcagcccaaccttcagcatctcaagtctagcccacctggatttccatttccagggcctcctaattttcccccacaaagcatgtttggatttccaccacatttgccacctccattacttccccctccaggctttggctttgctcaaaatcccatggttccctggccacctgttgttcatctcccaggtcagccacagcgtatgatgggtcctctctcacaagcatcaaggtatataggcccgcagaatttttaccaggttaaagacattcggaggccagaaaggcgccatagtgacccttggggtaggcaagaccaacagcaactggataggccatttaataggggtaaaggggaccgccagagattttatagtgattcacaccatttgaaaagagagcgacatgaaaaggaatgggagcaagaatctgaaaggcatagacgcagagacagaagccaagacaaggacagagacagaaaaagcagggaggaagggcacaaagataaagagagggcacggttatcacatggtgatcgaggaacagatggaaaagcaagcagagatagtaggaatgtagacaagaagccagataaacctaaaagtgaagactatgagaaggacaaagaacgagagaaaagtaaacacagagaaggagaaaaggacagggataggtaccacaaagatagggaccacactgacagaactaaaagcaaaaggtaaaatttgcaggctgcttcaggattacatttaaataactgttaaaatgttgtatcttgtaaacaaaagaaagattgcctgctaggattgtgccatctttaaaatttttactattggtcatttgcagaacagtaaattctgtgtgttggtacagagtgctctgtaccagtgctcatcatcccttcttcataccaacggtccctagttataggaatttaatatttttaaaagttttacattgctgtatattcaaagatttgttttattaatatgcaataaaggcttagaaattttagttttattccttaattggtaaatatggttaactatggaatatatttacttcctctagtgaatgtcctttatataatgactaatttgggagtaatgtgtgctctgtaagtttgttttaaattgcactgtttttaaagaaactgtagaggagcaacaaaaatccaagcaacttcataatcagattatgctaatcatttagttgagcagtttttgaccaagaatcagaagcccaaggggtacatttattgctttaatctgcactcattgaagtcatttattaccatatactacagctttgtggtaggccattattttcattttcatttttggctcttcagaaacttgaatacttaagcttgtacatgatcttgtgttttgctatcctttttactgtaaaatgtaaatattttaagggatattttgattctaaatatgataaaataatttctcacctattttgtgtgtgtgacttgaaattcagtagtaaaagaatttcttctttaaagctttaattaccttcagacattgattttttgttactcagccaagaacatatagaaatagctatctatgtcaggcattagatgaggggaaaaacaatttttttaaaatcttaaattgtaggctgagatgaattgtgtagttctaaagaggctagaatttagaactacctgtgaaacactgtgcagctatagcccactttataggtaagtttctgaaaacttttacaccatcgcaatttggtactctgactcactaatcattaaaattaaagaccgcagaacttgaagagaaatatgttttgaatccttttataaaatgtgcgatttagccctattcgtaaagaaactg

SEQ ID NO: 587 - DNA, 1712 bp, Homo sapiens
  CDS (206)..(1390)
gtcgctgagaaccggccctcagtgcacccggccgcctgcacccccaggagcagctgctgtgaataaacacagaagtggagctggtgtactgattacaagcctcattcagtgcacctgggccccagcaggcccagccaggcgtggaggaagaggcattgaggactttccttacctgtttttccagctcacccactgccagcagagaatgctgtccagtttcaacgagtggttttggcaggacaggttctggttaccacccaatgtcacgtggacagagctagaagaccgggatggccgtgtctacccccacccccaggacttgttggcagccctgcccctggcgctggtcctcctggccatgcgccttgcctttgagagattcattggcctgcccctgagccggtggctgggtgtgagggatcagaccaggaggcaagtgaagcccaacgccacgctggagaaacacttcctcacggaagggcacaggcccaaggagccccagctgtctctcctggccgcccagtgtggcctcacgctgcagcagacccagcgatggttccggagacgccggaaccaggatcgaccccagctgaccaagaagttctgtgaggccagctggaggtttctcttctacctgtcctccttcgtgggcggcctctcggtcctgtaccacgagtcatggctgtgggcaccagtaatgtgctgggacaggtacccaaaccagactctgaagccatccctgtactggtggtacctcttggagctgggtttctacctctcactgctaatcaggctgccctttgatgtcaagcgcaaggatttcaaggagcaggtgatacaccacttcgtggcggtcatcctgatgaccttctcctacagtgccaacctgctgcgcattggctctctggtgctgctgttacacgattcctctgactacctgctggaggcctgtaagatggtcaactacatgcagtatcagcaagtgtgcgacgctctcttcctcatcttctcctttgtcttcttctacacccgactggtcctctttcccacccagatcctctacaccacatactacgagtccatcagcaacaggggccccttcttcggctactacttcttcaacgggcttctgatgttgctgcagctgctgcacgtgttctggtcttgcctcattctgcgcatgctctatagcttcatgaagaagggccagatggagaaggacattcgtagtgatgtagaagaatcagactccagtgaggaggcggcggcggcccaggaacctctgcagctaaagaacgggacagctggagggcccaggccagcccccactgatggccctcggagccgggtggccgggcgtctgaccaacaggcacacaacagccacatagccgggcggggctggctgtaaggggttgcccccccgccagtgccttggatatttctggggtgactggactggcgcccctgggccacctttctggagacagggagggccccacccggggtgggtgggaaggctgatgatctgtctccagccccttccttctgcccacccgcccttcttccctctgggcaactggacagatctgggagccagcagctggatgctgtggctggccagagacacctccaggctgtagcctgggggctggggggagccccaggctgaaaagggtccaattaaaacaaatggagccaaaaaaaaaaaaa

SEQ ID NO: 588 - DNA, 3147 bp, Homo sapiens
  CDS (32)..(1252)
cccacgcgtccgatttttgacgtgaggggccatggcacctgcaaggtgtttctcagcaagattgaggaccgtgtttcagggcgtggggcattgggctttgtccacatgggctggcctgaagcccagccggctactgccacagcgggcttctcccaggctgctctcggtcggccgtgcggacctcgccaagcatcaggaactcccggggaagaagctgctctctgagaaaaagctgaaaaggtactttgtggactatcggagagtgcttgtctgtggaggaaacggaggcgctggggcaagctgcttccacagtgagccccgcaaggagtttggaggccctgatggaggggacggaggcaacggtggacacgtcattctgagagttgaccagcaagtcaagtccctgtcgtcggtcctgtcgcggtaccagggtttcagtggagaagatggagggagtaaaaactgcttcgggcgcagtggcgccgtcctctacatccgggtccccgtgggcacgctggtgaaggagggaggcagagttgtggccgacctgtcttgcgtgggagatgagtacattgccgcgctgggcggggcaggagggaaaggcaaccgcttcttcctggccaacaacaaccgtgcccctgtgacctgtacccctggacagccaggacagcagcgagttctccacctggagctcaagacggcggcccacgccggaatggggggattccccaacgccgggaagtcctcactgctccgggccatttcaaacgccagacccgccgtggcttcctacccgttcaccaccctgaagccccacgtcgggatcgtccactacgaaggccacctacaaatagcagtggccgacatccccggcatcatacgaggcgcccaccagaacaggggtctggggtccgccttcctcaggcacatcgagcgctgccgctttctcttgttcgtggtggatctttctcagcctgagccgtggactcaagttgacgatttaaaatatgaactggagatgtatgaaaagggcctgtctgcgaggccccacgcaatcgtcgcaaacaagattgacctccctgaagcccaagccaatctgtcccagctccgggatcacttgggacaggaggtcatcgtgctgtcggcgttgaccggcgagaacctggagcagctgctgttgcacctgaaggtgctgtatgacgcctacgcggaggccgagctgggccagggccgccagccgctcaggtggtagccacgccagagcggggtcgcctctgggcctctgtctgagcaaacctggatgtgaattcggtggttttgaatgcataaagtgccttgtggacacgggggagttgtggtgcttctgggtctctgggccccgcctgctggcctgggatgccctcatgttgggaagcattccgtgccccccaccccgcctgccctccgtatttcctgcacctgtcagcctgcgctgactgatgagccagttgctcatttgtgctgattaacacccctaataaggggttggggtgcccataacggggtggccctgccgctgactcgggtctccgccatgcacgcgtggactctcggatgagctcagcagaaccgcacagccagagccccaggtcagaagtgcagaccagggttctcagcacagtgcccgtcgtgcttccatggcttgctacggagagagacctctggatccacactggggctgcgtctggcccgttgtccagcagccctgcggtaccgcaagcccaggcaccagtgtctcggggggcctcactgctgcgcaaggggtggggccgaggatgcaagtccaggcagagcggcgcaggcagctgtgagcttttctccatcagccgtctgagaagagcagtgaggccagctgcttcctgtccttcagaacacttctctgtgctcagtgggagccaggaagcctcaggcttcacgactgaatgcacccaatatccgacctggctgcgtgtttctggctgggctgccgtgtgcacagcaagttaactagaggggctgtgggccatggaactgtcagcgttattctcagaaggcggccgtggcatgggcagggtatagtgaggagtggaaggagacgtgtgcctggtaatatggggcggaatttccactcagctccatttgctggggatttaaagagaacccttgtgctacgccaggcagttaccgagccgaagggagatgatgggccttcgcccctcagtgggatggcagctgagggggccctgcatttgaccgtcgagactgcagcagcgcctttcctgtctgtggtttaagtctttgcagtcaagtactgatgcatccaagccaggcctatgcctggtgtctccctgactgcagaggagccccagggcaaggacagctcagctgctggcagcctgcctggcccatagacatcccccaagtagtctcaggcctctgacatgtccctgaggggcccctaagaaagaaagtggaggggacactccagaggctgtcgtgggaggatcatgtgagcctgggaggtcaaggctgcagtgagccgtgattgcaccactgcactccagcctgagtgacagagcgagaccctgtctcaaaaaacaaacaaacaaacaaacaaaaacagaacattctgggcacggtggctcatgcctgtagtcccagcactttgggaggccgaggctggtggatcacaaggtcaggagattgagaccatcctggctaacacagtgaaaccccgtctctactaaaaatacaaaaaaattagccaggcgtggtggcggtcacctgtagtcccagctactcgggaggctgaagcaggagaatggcgtgaacctgggaggcggagcttgcagtgagccgagatcacaccactgcactccagcctgagcgacagagcaagactccatctcaaaaaaaaaaaaaaaagggggggggtccaataaaggggaccgggttaacccgaggggcccccccccccttggcaggaaaaacgccacccttgggccgccacaaggattttggggggttcctcccccgggggagggggataacaacccggggttttcatatagaggctatagcaggggagcgcttaggacgccttgggggtcttcccttgccggggcccct

SEQ ID NO: 589 - DNA, 8649 bp, Homo sapiens
  CDS (636)..(8057)
cgcgcccttttgaatcgatacgcgtgagcgaccggcccggaattcccgggtcgacgatttcgtccgagacactaaagcgttttgcagggaaggtgacaacagccagtgtaaaggaacggagagaaatcctcagtgaacttgggaagtgtgttgctggaaaagatcttccagagggagcagtgaaggggctctgcaaattgttctgcttgactctgcatcgatatagagatgcagcctcccgcagggccttgcaggcagccatccagcagttggctgaggcccagccagaagccactgctaagaaccttctacactctctgcagtcttctggtataggctccaaagcaggtgttcccagtaagagcagtggctctgccgccttgctggccttgacctggacctgcctcctggtgcgcattgtctttccatcgagagccaagcgacaaggagacatctggaacaaactggtggaagtgcagtgcctgctcttgctggaggtgctgggtggctcccacaagcacgccgtggatggtgctgtgaagaaactcacgaagctgtggaaagagaaccccgggctggtggaacagtacttgtcagccattctcagcctagagcccaaccagaactatgctggcatgctggggctgctggtgcagttctgcacgagtcacaaggagatggacgtggtcagtcagcacaagagcgccctactggacttttacatgaagaacatcctgatgagcaaagtcaagcctccgaagtacctgttggatagctgtgcccctctgctccgatacctgtcccactcagaatttaaggatctgatactgcccaccatacagaagtccttactgaggagtccagagaatgttattgaaactatttctagtctgctggcatcagtgacgcttgacctcagccagtatgccatggacatcgtgaaaggactggctggtcacctgaaatccaacagtccccgcctgatggatgaagctgtgctggcactgcggaacctggcacgccagtgcagtgactcttcggccatggaatccctgaccaagcacctatttgctatcctcggaggctcggaaggaaaactaactgttgtagcccagaagatgagcgtcctctcagggattgggagcgtcagtcatcacgtggtgtctggaccttccagtcaggtcctgaatgggatcgtggctgagctgttcatcccgttccttcagcaggaagttcatgaagggaccttggtacacgctgtctcagtcctggctctctggtgtaaccgattcactatggaagtgcccaagaagctcactgaatggttcaaaaaagctttcagccttaaaacctccacatctgcggtgaggcatgcctacctgcagtgcatgttggcctcttaccggggtgacacgctgttgcaggccctggacttactgcccttgctcatccagacagtggagaaggcagcctcccaaagcactcaggttcccaccatcactgaaggggttgccgcagccttgttgctcttaaagttgtcagtggctgactcacaggctgaggccaaactgagcagtttctggcagttgattgtggatgagaaaaagcaggttttcacttctgagaaattcctggtcatggcttcagaggatgccctgtgtactgtgttgcatctgacagagagacttttccttgaccacccgcatagactcactggcaacaaagttcagcagtaccaccgggctctggtggcggtgctcctgagccgcacctggcacgtccgcaggcaggctcagcagacagttcggaagctgctgtcctctcttgggggctttaagctggcgcacggactcttggaggagctgaagactgtcctcagttctcacaaggtgctgcccttagaggctttggtgactgatgctggagaggtgactgaggcaggcaaggcctacgtgcctccacgggtcctgcaggaggctctgtgtgtcatctccggtgtgccagggctcaagggtgatgtcaccgacactgaacaactggcccaggaaatgctgatcatctcccaccacccatccttagttgccgtgcagtctggactttggccagcacttcttgccaggatgaagatcgatcctgaagcctttatcaccaggcacctggatcagatcattcccaggatgaccacacagagtcccctaaaccagtcctccatgaatgccatgggctccctttccgtcctgtcgccggaccgggtcctcccacagctcatcagcaccatcacttcctccgtgcagaaccctgcactgcgcctggtgacgcgggaggagtttgccattatgcagacccctgctggggagctgtatgacaaatccatcattcagagtgcccagcaggacagcataaaaaaggccaacatgaagcgagagaacaaagcttattccttcaaagagcagatcatcgagctggagctgaaggaggagataaagaagaagaaaggcatcaaagaggaggtgcagctgaccagcaagcagaaggagatgctgcaggcccagctagacagggaggcgcaggtccggaggcggctgcaggagctggatggggagctggaggcggcgcttggactgctggacatcatcctggccaagaagtcgaccggcctgacccagtacatccctgttttggtcgactcttttctgcccttgctgaagtctcccctggctgctcccaggatcaagaaccccttcttgtccttggctgcctgtgtcatgccctctaggctcaaggctttgggcactttggtgagccacgtgaccctgcgcctgctgaagccagagtgtgtcctggataagtcctggtgccaggaagagctgtcggtggctgtgaagagggcggtgatgctgctgcacacccacaccatcaccagcagggtgggcaagggggagccaggtgctgcgcccttgtccgcgccagccttctccttagtcttcccgtttctgaagatggtgctgacggagatgccccaccacagtgaggaggaggaggagtggatggcccagattcttcagatcctcactgtccaagcccagctgagggcctcccccaacaccccacccgggcgggtggacgagaatggcccggagttgctgcctcgcgtggccatgctgcgtcttctgacttgggtgatcgggacgggctcgcctcgcttacaggttctggcttcagacaccctgaccaccctgtgtgccagcagcagtggtgatgatggctgtgcctttgcagagcaggaggaggtggacgtgctgctctgtgccttgcagtccccgtgtgccagcgtgcgggaaaccgtgctccgggggctgatggaactccacatggtattgccagcacctgatactgatgagaagaatggcctgaaccttctgcggagactctgggtggtcaagtttgacaaggaggaggagatccggaagctggctgagaggctctggtcaatgatgggcctagacctgcagccagacctctgctccttgctgattgacgacgtgatctatcatgaggcggctgtaaggcaggcaggggccgaagccctctcccaagcagtggcacgttaccagcggcaggcggcggaggttatgggcaggctcatggagatttaccaggaaaagctctaccggccgcccccagtgctggatgctttgggacgagttatttcagaatctcctccagatcagtgggaagccaggtgtggcttggcgttggccctcaacaagctctcccagtatttggacagctctcaggtgaagccactctttcagttttttgtccctgatgccctcaatgaccgacacccagatgtccggaagtgcatgttggatgcagccctcgcaacgctcaacactcatgggaaggagaacgtcaactcgctgttgccagtattcgaggagttcctgaagaacgcgcccaatgatgccagctacgatgctgtgcgacagagtgtggtggtcctgatgggctctctggccaagcacctggacaagagtgaccccaaagtgaagcccattgttgccaagctcatcgctgccctctccaccccctcccagcaggtccaggagtccgtagccagctgcttgccacccctcgtgccagccatcaaggaggatgctggagggatgatccagaggcttatgcagcagctgctggagtcagacaagtacgcagagcgcaaaggggccgcgtatggcctggcgggcctggtgaagggcctgggcatcctctcgctgaagcaacaggagatgatggcggcactgactgatgccatccaagataagaagaacttccgccggcgagagggagccctctttgccttcgagatgctctgcaccatgctggggaaactttttgagccgtatgtggttcacgtgctgccccatctgctcctgtgctttggggatggaaaccagtatgtgcgtgaggctgcagatgactgtgccaaggctgtgatgagcaacttgagtgctcacggggtgaagctggtgctcccctccttactggctgccctggaggaggaatcgtggcggaccaaagctgggtcagtggagcttcttggggcaatggcgtactgtgctcctaagcagctgtcatcctgtctacccaacattgtgcccaagcttacggaggtgctgaccgactcccatgtcaaagtccagaaggctggacagcaggcgctcaggcagatcggctccgttatcaggaacccggagatcctggccattgctccagtcctcctggatgccctgacggatccctccaggaagacccagaagtgcttgcagaccctgctggacaccaagtttgtccacttcattgatgccccatccctggccctcatcatgcccattgtccagagagccttccaggaccgttccacggacacgcggaagatggcagcccagattattggcaacatgtactccctgacagaccagaaggacttggctccgtacctgcccagcgtgacgcctggcctgaaagcatcgcttttggaccctgtgcctgaggtgcggaccgtatctgcaaaggcccttggggccatggtgaagggcatgggggagtcgtgctttgaggacttgctgccgtggctgatggagacactgacctatgagcagagctctgtggatcgctcaggcgctgcacaggggttggctgaggtcatggccggtttgggggtggagaagttggagaagttgatgccagaaatcgtggctacagccagcaaagtggacattgcaccccatgtccgagatggctacattatgatgtttaactacctgcccatcacctttggagacaagtttactccttatgtggggcccatcatcccctgtatcctcaaagctcttgctgatgagaatgagtttgtgcgtgacaccgccctgcgcgcgggccagcgggttatctccatgtacgctgagacagccatcgccctgctgctgccccagctagagcaaggcctctttgatgacctttggagaatcaggttcagctctgttcagctccttggggatctcctgtttcacatctcaggagtcactgggaagatgaccacagaaactgcctctgaggatgataactttggaactgcccagtccaacaaggcgatcatcactgccctgggggtagagcggcggaaccgggtgttggcagggctgtacatgggccgctcagacacccagctggtggtgcggcaggcgtccctgcatgtctggaagattgttgtctccaataccccccgcaccttgcgtgagatcctacccactctctttgggctcctgctgggtttcctggccagcacgtgtgcagataagagaacgattgcagcgagaacattgggagatcttgtgcggaagttaggggagaaaatcctccccgagatcatccccatccttgaggaaggcctgaggtctcagaagagcgatgagaggcagggtgtgtgcattggcctaagtgagatcatgaagtccaccagccgggatgccgtgctgtatttctctgaatccctcgtgcccacggcaaggaaggctttgtgtgacccactggaggaggtcagagaggcggcagccaagactttcgagcagctgcattccaccatcggccaccaggctctggaggacattctcccatttttactaaagcagctggatgacgaggaggtgtcagagtttgccttggatggtctgaagcaagtcatggctattaagagtcgtgtggtgctgccctaccttgtgcccaagctgacaacgccacctgtcaacacccgggtgctggctttcctttcgtcagtggctggtgatgccctcacccgtcatcttggcgtgatcctcccagcggtcatgctggccctgaaggaaaagcttgggaccccagatgagcagctggagatggccaattgtcaggctgtgatcctctccgtagaggatgacacagggcaccggatcatcatcgaggatctgctggaggccacccgcagccctgaggtgggcatgaggcaagctgctgccatcatcctcaacatctactgttcccgctcaaaggctgactacaccagccacctgcggagcctggtctcgggcctgatccgcctcttcaatgactccagccctgtggttctggaggagagctgggatgccctaaatgccatcactaagaagctggatgctggcaaccagttggcactcattgaagagctgcacaaggaaatccggctcatagggaacgagagcaaaggcgagcatgtgccaggattctgcctcccgaagaagggagtgacctccatccttccagtgttgcgggaaggagtcctgactggcagccctgagcagaaggaggaggcagccaaagccttaggcttggtaatccgcctgacctcggctgacgccctgaggccctccgtggtcagcatcactggccctctgatccgcatcctgggggacaggttcagctggaatgtgaaggcggctctgctcgagacactcagcctcttgttggctaaggttgggattgccctgaagcccttcctgccccagctgcagaccactttcaccaaagccctgcaggactccaaccggggggtgcgcctgaaggccgcagatgctctggggaagctcatttccatccacattaaggtggaccccctcttcacagagctgctcaatggcatccgcgccatggaggacccaggtgtcagggacaccatgctgcaggccctgaggtttgtgattcagggagcaggggccaaagtggatgccgtcatccggaaaaacatcgtctcactcctgctgagcatgctgggacacgatgaggacaacactcgcatctcctcagccgggtgcctaggggaactgtgtgcctttttgactgaagaggagcttagtgccgttctacagcagtgcttgctggcggacgtgtccggcattgactggatggttcggcacgggcggagcctggcactttccgtggctgtgaatgtggctcctggcagactttgtgccggcagatatagcagtgatgttcaggaaatgatcctgagcagtgccacggcggacaggatccccattgcggtgagcggggtccggggcatgggctttctcatgagacaccacatcgagacaggcggagggcagttgccggccaaactttccagcctgttcgttaagtgtctgcagaacccatccagcgacatcaggctggtggctgagaagatgatctggtgggcaaataaggacccactgcctcccctggacccccaggccatcaagcccatcctgaaggctcttcttgacaacaccaaggataagaacaccgtggtcagggcctacagcgaccaggcaattgtcaacctcctcaagatgcggcagggtgaagaggtgtttcagtccctctccaagatcctggatgtggccagtttggaggtgctgaacgaggttaaccgaaggtccctgaagaagctggccagccaggccgactccacggagcaggtggacgacaccatcctgacatgagaggcctgggccagcagcagcattgccgctccacatctttgctcaatgttttcatttttgaaaatacatttgttccaatggggagcttggaagatggcgttcccagaaagtattttaatatcaatagaccacagccaaagccttaaatcaaacccacacacaactgaaaattgcctcctccatctctcaccttttcctgtggagaagagaaggaaaagcacacgcatgcgcctcagcaaatggcagcccaggagctgtttgtccagtttagcatggctaggtctggaactataatagcagggtcagactgtgggttcctcttctcctgtgcttgagctctggtttgagagctggcgctaccaacctttttcctatatcccgagtggggcacagacggtggatctctgcccagtgtggtgtgtctggcttggcttttcaatattgtgaggtctgaatggatctgatccctgtcagatgaaaatgattcacagctctggcagttcccaagtctggggaggggtataggtttgaaaggctgtttgaaagaggaatgtttaataaaggctttgatttaatcttgaaaaaaaaaaaa

SEQ ID NO: 590 - DNA, 2230 bp, Homo sapiens
  CDS (85)..(1152)
gtaggcagggactgggttctactgtgagctgagatccctggagctccatgaaaaggagaaaagaatgccgtgtttcctggatctatggagggaatcccaggatttcctggaaaccgaggattaatgggccaaaagggagaaattgggcctccaggacagcaaggaaaaaaaggagccccagggatgcctggtttaatgggaagcaatggctcaccaggccagcctggaacaccgggatctaagggaagcaaaggtgaacctggaattcaagggatgcctggggcttctgggctcaagggagaaccaggagcaacgggttccccaggagaaccaggatacatgggtttacccgggattcaaggaaaaaagggggacaaaggaaatcaaggtgaaaaaggtattcagggtcaaaagggagaaaatggaagacagggaattccagggcaacagggaattcaaggccatcatggtgcaaaaggagagagaggtgaaaagggagaacctggtgtccgaggtgccattggatcaaaaggagaatctggggtggatggcttgatggggcccgcaggtcctaaggggcaacctggggatccaggtcctcagggacccccaggtttggatgggaagcccggaagagagttttcagaacaatttattcgacaagtttgcacagatgtaataagagcccagctaccagtcttacttcagagtggaagaattagaaattgtgatcattgcctgtcccaacatggctccccgggtattcctgggccacctggtccgataggcccagagggtcccagaggattacctggtttgccaggaagagatggtgttcctggattagtgggtgtccctggacgtccaggtgtcagaggattaaaaggcctaccaggaagaaatggggaaaaagggagccaagggtttgggtatcctggagaacaaggtcctcctggtcccccaggtccagagggccctcctggaataagcaaagaaggtcctccaggagacccaggtctccctggcaaagatggagaccatggaaaacctggaatccaagggcaaccaggccccccaggcatctgcgacccatcactatgttttagtgtaattgccagaagagatccgttcagaaaaggaccaaactattagtgtctgatgcctcattcagcagcctaggcatggtgctttttctgtggtcttttgcatctcaggaagataaccaacagtaatcccttgaaaagaaacttaagtacctcggcgtttttattttttttttcttatggaaaaaaatataaaagatcacatatactgattttaaaggctcctcagtcatttggagcccttggattagcagcattaattaaatctcaagggtttcttgtaaagtccatttatgttaatcaaagttgaatataaaaatccaccattgcctgttagccagtcagttttagtcactgtgaaatatttcacattcagcctccatgcagtagagatttgagtttaatttcatgtccatgtgactttcatgtttcctatctcatagctcatgctactacataagccaaaacatgtatctcatcattggaagtaagatcagggctgatattcacctgggatagacagtattggtgaactactcatttactacagtgtctcagccttgataaggggcagtggattgcctgttgttcggtgttgtgaatagcacctctgaataagattagagtgtttcttaattcatttcaaactctaaaattagattaatggtggtgctaagaaagagtattaattactttgggaatggtcaaaattaacattaaaaacattttagacaaaaagtttcattgtacattcaaagaaaatgtaagtttggaagtactaaaagactattttatacttgttgattaatcggaatgtttgttgtatgccttcattttccatttcacttatatgtgtatgtccatatatgttaattttcattgtagcaaagctaatggaaataaagctaatgctctagttgaaagaaaaggaaaactcctgaaatcctagaatgtcttgttatttttagctgactgtaaaatattatgaacagtctttgtgtattgtgcttaatgcttttgtaagaaacagaatttgaaatatttcatccttgtcatgctcaaaattttgttacatgcttgttattcagagtataataaagttttgtacaggcctgaaaaaaaaaaaa

SEQ ID NO: 591 - DNA, 897 bp, Homo sapiens
  CDS (266)..(706)
gaatttaatacgatcactatagggaatttggccctcgaggcaagaattcggcacgaggcaaatgtaggtggagcaacttccctgcaacacacgtcgaagctgctgcagtggctgttcttcccctccccttggaaaggcaccaaaagccagcctttggaagggctggtggactgtgcccttctttcccttcagagaaccagtgtccctgtgactccacccactcatctggccaccgttgccctgacctgccaggagcctggagaagatgaaggcatccgtggttctctccctccttggctacctggtggttccaagtggtgcttacatcttggggcgttgcacagtggctaagaaactccacgatggaggcctggattattttgagggctatagccttgagaactgggtgtgcctggcctacttcgagagcaagttcaaccccatggccatctacgagaacacacgtgagggctacactggctttggcctctttcagatgcgtggcagtgactggtgtggcgaccatggcaggaaccgctgccatatgtcatgttccgctttactgaatcctaatttagagaagacaattaaatgtgccaagaccattgtaaaaggaaaagaagggatgggagcatggcccacctggtcccggtactgccagtactccgataccctggcacggtggctggatggttgcaagctgtagccgcctgcatggcccctgcagcactcaccagttgcatcttgtgaatgaaggtgcttttctgcttgctgcttcagtcaatccttttgatgatctcaccactttaagagttccagatggaaaaagacaaaagtttgcttcatccggggatgcaggatgcagaataaaccaaactagttactcaaaaaaaaaaa

SEQ ID NO: 592 - DNA, 2817 bp, Homo sapiens
  CDS (96)..(1232)
aaggatccttaattaaattaatcccccccccccggtcctgccgcttggccgcggggcgcctggctcagtggcttctgcgggcttcgaggagcgggatgttgcgggctgggtggctccggggcgcggcggcgctggcgctgctgctggcggcccgagtggtggcggcgttcgagcccatcaccgtgggcctagccatcggggccgcgtcggccatcaccggctacctgtcctacaatgacatctactgccgcttcgccgagtgctgccgcgaggagcggccgctcaacgcttcggctctcaagctggatttggaggagaagctgtttggacagcatctagccacggaagtgattttcaaggcgctgactggcttcaggaacaacaaaaatcccaagaaaccactgaccctttccttacacggctgggctggcacaggcaagaattttgtcagtcaaattgtggctgaaaatcttcacccaaaaggtctgaagagtaactttgtccacctgtttgtatcgactctgcacttccctcatgagcagaagataaaactgtacccggaccagttacagaagtggatccgcggtaatgtgagtgcatgtgcgaactctgttttcatatttgacgagatggataaattgcaccccgggatcattgacgcaatcaagccgtttctagactactacgagcaggttgacggagtgtattaccgcaaagccatcttcatctttctcagcaatgcaggcggggaccttataactaagacggctcttgacttttggcgggccggaagaaagagggaagacattcagctgaaggacctggaacctgtactgtctgtcggagtcttcaataataaacacagtggcctgtggcacagtggactgatcgacaaaaacctcattgattactttatccccttcctgcctttggagtacagacatgtgaaaatgtgtgtgatggccgagatgagggcccgtggttctgccatagatgaagacattgtcacaagagtggcagaggaaatgacgttttttccccagagacgagaaaatctactcagacaagggctgcaagactgtgcagtcgcggctggatttccactgagctcctatccagatggggtaggagacagctgggaggctccgcacgccagaggccttgcctttcagaagaaccctgaagaccgctttggggttttgcctgtttgcaccttagacttttgggtatagaatcttttttttgagaagaggtctcactccgtcatccaagctggagtgcagtggtgcaatcctcaactcactgcaacctccgctcccggtttgagtgattctcatgcctcagcctcccgagtagctgggattacaggcatgagccactgtgcccagctgggatatagaatctaagagttgattgtggaaaacacgtgaatctattgcgcgcatttgtcatttagcaagatggcagcagtccagctgttctttgcagctggagatgaacttttaaaaatccccttcacacttaatgtactgaccgagacagaagtacctgaaaacagctgtgcatggcaggcccggcaatagcttctgacccacagcacccgcgcctcagaagctacggtcacaactaaaggagtccagggacttgctgcaggctggggggcactgggtggttctcaccagcaggctgcggggcactgtgttctcattggccaaaaacatccttttgctctgtctcgttctttacacagagttcactgacttgaagtatactcagttaaaatcggggctggaggtgcagacggtgtctgaccggaggatgtggccgtgcccgccgagcactcttgatctgagctgacctgtgtgtgtgtgtgggggggggtggggccttcacctaagacctctgcagcagacctggacagacaggcccctcccgcctgtccatcgctctagctgctaatacagcgctggctgtggaatccttcaccgtctcagctggtatcagccccagcctgccttgtgccatatctcagcttggatctctgctagagtccccccaaccatatatcatagagttgaatcacaatgagaccgttggctttgaatttgagtcgttggttcccatggtgagatgcttgttaagactttatacttgggtcaatctctcactttattttgtagaaccatttgaaatcctaggatgtgcttgttctggaaggatgacatgggcccagactgaacaagtcagcttgatgatcttaaatgatggaagtataggacgttgcttattttaaaacaagggaaggacacaaaatggaatgactgcttagtcctttctcagatactcttaaaacaattttttattgttaaatttgtggtaatacatggtcacaaccgtggatcaaacaaggtcagtctaaagtggcaggtcctaggtgtgacctgataccaccaccctttgtggcagcaccgggctggactgccctgatccctgggacgtgagacttagcttccagccagtgtgaatcattgtatctgtctcataatcacagcacagctgcagacacaacaacgtgcagcattttttacataaaaatatggtagaattaatttatgacatggaaatgccttacgtggtatcacacttagtcttgaaaaaaacaccaaggtgacgtttaaaatttttagtacatatcctcaaattggagctaagttatacttcttttataaccttttgggcatctggtcgagagaagacaagattttctctatttacagtgaggcaataaatatgtttgccacctttaaaaaaaaaaaa

SEQ ID NO: 593 - DNA, 1015 bp, Homo sapiens
  CDS (88)..(351)
gtggggaaggaaccctgttgtaccgctccggaattcccgggtcgacccacgcgtccgcccacgcgtccggattgggaaaacaacgatatggcaggagccagtcttggggcccgcttctaccggcagatcaaaagacatccggggatcatcccgatgatcggcttaatctgcctgggcatgggcagcgctgcgctttacttgctgcgactcgcccttcgcagccccgacgtctgctgggacagaaagaacaacccggagccctggaaccgcctgagccccaatgaccaatacaagttccttgcagtttccactgactataagaagctgaagaaggaccggccagacttctaagccaggctgggctgccagtgccatgcaagccacagccagccagcccatccacttcttccactcctccccgcaggccccaaggcatcactccggccaccctgtcccgctactgcttacacaggccgggttcccacgcagaggggaggctgctccacccctactctcctcccttgctcccagcagcggaagcgcctctgacccttggcttgagtcccacgtgggggaggaggaggcaggcagcaccagcaggggtccaccaagagcccagaccagcccctctgccctcctacccgggcctcgaagggtgtggcacaggctacgtgttgagcgtggcctacgtgagccaacaagaagcaggggcctctgagtgccaagcgacgtggcgggctccacgttagcccaggctctgagagccagcccaggggcggcgctgctcagcttgggctggtccagggcctgcccaggctggggcacctttgcctcctgaggcgcagcgcactcctcccctgcccaagcctactgcctcccgctgccgccagtaccccctccagccccacacctgggcctccccctgccactcccctcccttgctcccctctgtccccagggatcaaacagaagcagccgtgggcaaaatacaatttcatttaacaaaaaaaaaaaa

SEQ ID NO: 594 - DNA, 636 bp, Homo sapiens
  CDS (88)..(516)
ggcaggaggagctgggccgggtgccagatactgggatcagccactgcagctccctgagcactctctacagagacgcggaccccagacatgaggaggctcctcctggtcaccagcctggtggttgtgctgctgtgggaggcaggtgcagtcccagcacccaaggtccctatcaagatgcaagtcaaacactggccctcagagcaggacccagagaaggcctggggcgcccgtgtggtggagcctccggagaaggacgaccagctggtggtgctgttccctgtccagaagccgaaactcttgaccaccgaggagaagccacgaggcaccaaggcctggatggagaccgaggacaccctgggccgtgtcctgagtcccgagcccgaccatgacagcctgtaccaccctccgcctgaggaggaccagggcgaggagaggccccggttgtgggtgatgccaaatcaccaggtgctcctgggaccggaggaagaccaagaccacatctaccacccccagtagggctccaggggccatcactgcccccgccctgtcccaaggcccaggctgttgggactgggaccctccctaccctgccccagctagacaaataaaccccagcaggccgggaaaaaaaaaaaa

SEQ ID NO: 595 - DNA, 663 bp, Homo sapiens
  CDS (88)..(543)
ggcaggaggagctgggccgggtgccagatactgggatcagccactgcagctccctgagcactctctacagagacgcggaccccagacatgaggaggctcctcctggtcaccagcctggtggttgtgctgctgtgggaggcaggtgcagtcccagcacccaaggtccctatcaagatgcaagtcaaacactggccctcagagcaggacccagagaaggcctggggcgcccgtgtggtggagcctccggagaaggacgaccagctggtggtgctgttccctgtccagaagccgaaactcttgaccaccgaggagaagccacgaggtcagggcaggggccccatccttccaggcaccaaggcctggatggagaccgaggacaccctgggccgtgtcctgagtcccgagcccgaccatgacagcctgtaccaccctccgcctgaggaggaccagggcgaggagaggccccggttgtgggtgatgccaaatcaccaggtgctcctgggaccggaggaagaccaagaccacatctaccacccccagtagggctccaggggccatcactgcccccgccctgtcccaaggcccaggctgttgggactgggaccctccctaccctgccccagctagacaaataaaccccagcaggccgggaaaaaaaaaaaa

SEQ ID NO: 596 - DNA, 3399 bp, Homo sapiens
  CDS (13)..(1599)
gcacgagcggagatggcggcggtgctgaacgcagagcgactcgaggtgtccgtcgacggcctcacgctcagcccggacccggaggagcggcctggggcggagggcgccccgctgctgccgccaccgctgccaccgccctcgccacctggatccggtcgcggcccgggcgcctcaggggagcagcccgagcccggggaggcggcggctgggggcgcggcggaggaggcgcggcggctggagcagcgctggggtttcggcctggaggagttgtacggcctggcactgcgcttcttcaaagaaaaagatggcaaagcatttcatccaacttatgaagaaaaattgaagcttgtggcactgcataagcaagttcttatgggcccatataatccagacacttgtcctgaggttggattctttgatgtgttggggaatgacaggaggagagaatgggcagccctgggaaacatgtctaaagaggatgccatggtggagtttgtcaagctcttaaataggtgttgccatctcttttcaacatatgttgcgtcccacaaaatagagaaggaagagcaagacaaaaaaaggaaggaggaagaggagcgaaggcatcgtgaagaggaagaaagagaacgtctgcaaaaggaggaagagaaacgtaggagagaagaagaggaaaggcttcgacgggaggaagaggaaaggagacggatagaagaagaaaggcttcggttggagcagcaaaagcagcagataatggcagctttaaactcccagactgccgtgcagttccagcagtatgcagcccaacagtatccagggaactacgaacagcagcaaattctcatccgccagttgcaggagcaacactatcagcagtacatgcagcagttgtatcaagtccagcttgcacagcaacaggcagcattacagaaacaacaggaagtagtagtggctgggtcttccttgcctacatcatcaaaagtgaatgcaactgtaccaagtaatatgatgtcagttaatggacaggccaaaacacacactgacagctccgaaaaagaactggaaccagaagctgcagaagaagccctggagaatggaccaaaagaatctcttccagtaatagcagctccatccatgtggacacgacctcagatcaaagacttcaaagagaagattcagcaggatgcagattccgtgattacagtgggccgaggagaagtggtcactgttcgagtacccacccatgaagaaggatcatatctcttttgggaatttgccacagacaattatgacattgggtttggggtgtattttgaatggacagactctccaaacactgctgtcagcgtgcatgtcagtgagtccagcgatgacgacgaggaggaagaagaaaacatcggttgtgaagagaaagccaaaaagaatgccaacaagcctttgctggatgagattgtgcctgtgtaccgacgggactgtcatgaggaggtgtatgctggcagccatcaatatccagggagaggagtctatctcctcaagtttgacaactcctactctttgtggcggtcaaaatcagtctactacagagtctattatactagataaaaatgttgttacaaagtctggagtctagggttgggcagaagatgacatttaatttggaaatttctttttacttttgtggagcattagagtcacagtttaccttattgatattggtctgatggtttgtgaactcttgctgggaatcaaaatttccttgagactctttagcattcatactttggggttaaaggagattcctcagactcatccagcccttgggtgctgaccagcagagtcactagtggatgctgaagttacatgagctacatgttaaatatttaaagtctccaaaataaaacaccccaacgttgaccttacccggctgatggttagccccttgctgcctgctccatgtgtcttatgagagcccgtagttacagtgtcctctaatttgaaatccataagttaacaagtctatatcaggtgcagctggctttgattaaaggccatttttaaaacttaaaaactcaacacctcacagattataatagaaaaagaaatggcctcagtttgatctcgttcagaatgacccagattgtttctgctttgggtgcagctgtttagttcagagttatattacagagaattattttctgagataatcttaaactagaatgttcaaaactaattgataattgaagtatcaagatacgtagaacacctcagagatttttcttcaggaacttccacaaactttgaatccttgtatctttatttggtattcatactactagtagcaaaatacaggttttttgttttgttttgttttgttttggcttcatagagtatctcaaattgaaacttttctgcacaaagaataaaattaaggattttataaactcaaattggcacctactgaattaaaatacataaaatcatttaaatataattcagcatatgggaagtaacattgcactaatatggaaatcactgccagagacagtctattttcttttaatttgttactacttagtcacaaaccccacattattccagtttggaattacttattaaggagaattggaaatacatatgcccatgcttaaattttatagctttaatttgtgttatttctttattgacgggaagaggtacatctttttttccttactgaaaacaaatatggattaattgcctcaaatttgtataagtgattggctagtgattcttgttttcagaagggagagtggtatagatagaaaatgacaaagatggcaatatacacttaatgttgttattgtatgttgttactgaagtacttagatttttaaaatttcaaatcctaaatcacttcttgtaggagggttttcattaactgcagtatatacagttcactacatatgggttgtttgagttttttgtgtgctggatttctttctgttttttaatacctggttttgtacatatctaactctgttctcttttggttgttcaaaaactggattttttttttcttaagcagtgcttaatgtgtgttttttaattttgattcagaagtagtcccagctcataggtgttcatactgttacatccagaacatttgtcaggctctctgtcagctttcatgtacatatggtatagaaaccatggagttaggcacttcctggattttttttatatgagaaaaatgctgtatttaaaatgtaaaataaacttttaaaaagcaggcactaatatatatttcttccagcctttgattacaaatttgtccttgcacatgttaagatgaattatctcctaaaaatatcattgttcttgggagcagtgtatgttactttacatagcagcggttcctgtcat

SEQ ID NO: 597 - DNA, 8617 bp, Homo sapiens
  CDS (151)..(7545)
gagcctccagaagatgatgcaaacatcattgagaagatcctggcatctaagactgtccaggaggttcacccaggagaacctccgttcgacttggagctgttctacgttaagtatagaaatttttcctacttacattgtaaatgggccacaatggaagagctcgaaaaggatcctcgcatcgcacagaagatcaagcgatttaggaataaacaagcccagatgaagcacatttttacggaggattcagtgagggactttgcaaaacctgagggcagctgcaagaggactgtcatggtgggaatggggcataggtggagagcggactgcacaatgcctgatgaagacttgttcaatccagactatgtagaagttgatcgcatcttggaggtggcccacaccaaggatgcagaaacaggggaggaggtaacacattacctggtgaagtggtgctcactaccatatgaagaaagcacgtgggagctagaggaagatgtagatcctgcaaaagttaaagaatttgaatctcttcaagttctccctgaaattaagcatgtggagcggcctgcttcagactcctggcagaaacttgagaagtctcgcgagtataagaacagtaaccagctccgggagtaccagctggaagggatgaactggcttctttttaactggtataacagaaaaaactgtattttggctgatgagatgggcctagggaaaaccatccagtccatcacattcctttcagaaatatttctgagaggaatccacggcccttttctcattatcgcccctctctccaccatcactaactgggagcgggagttccggacatggacagagatgaatgccattgtgtaccacggcagccagatcagcaggcagatgatccagcagtatgaaatggtgtacagagacgcccagggaaaccccctttcaggagtcttcaagttccacgtcgtcatcacaacatttgaaatgatcctagcagactgcccagagttgaagaagattcactggagctgtgtgataattgatgaagcccacagactgaagaataggaactgcaaacttctggagggtctaaagcttatggccctggaacataaagtgcttctcactggaacacccttgcagaactctgtggaggagctcttcagtttgttaaattttctggagccatcacagtttccttcagagaccgctttcttggaggaatttggagatctgaaaacagaggagcaggtaaagaaactgcagtctatcctaaaaccaatgatgcttcggcggctgaaagatgatgtggaaaagaaccttgctcccaaacaagagacgatcattgaggtggaactgaccaatatccagaaaaagtactaccgtgccatcctcgagaagaacttttccttcctgaccaagggggcaaatcagcacaacatgcccaatctcatcaacaccatgatggagctgaggaagtgctgtaaccatccctacctgatcaatggagcagaggagaaaattctagaagatttccgaaaaacccacagccctgatgcccctgactttcagctgcaggccatgattcaggcagcaggaaagcttgtgttgattgataaactactccctaagctgattgcaggtggccacaaagtactcatcttctcccagatggtgcgctgcctcgacatcctagaagattacctcatccagagaagatacacctatgagcgaattgatgggcgagtacggggaaacctgcgccaggcagccatcgaccggttctgtaagccagattcagaccgctttgtctttcttctgtgcaccagagcgggaggcctggggatcaatctcacagctgctgatacctgcatcatatttgattctgactggaacccacaaaatgacttgcaggtccctgaaggcagaattcagaaagtgtgggagcagatgtcctggccaagagcacagccacaagataatgcagctgctgcatgtctgcaggattttggaagtcagttgggagtccagagtgaggagacaggccctttccacaatcgccagaagcaggactcaggaaactcccacactgctccgaggggaagagtacttactgggcttcttagtgtttgggccgctttagtactaagtataggaattctggtgtcattttcagccatgaggttaggggaagaatgtgggcagggcatgggtgggggcttccatatccagggattctggcactgggctcaggcccgatgtcaccgcataggccagagcaaagctgtgaaggtgtatcgcctcatcactcgaaattcctacgagcgcgagatgtttgacaaggccagcctaaagctggggctggacaaggctgttcttcaggacatcaaccgaaagggcggcaccaatggggtacagcagctctcaaaaatggaggtggaggacctactccggaaaggtgcttatggagccttaatggatgaagaagatgaaggctccaagttctgtgaagaagacatagaccagattctgcagaggcgaacgcacaccatcaccatccagtctgaggggaaagggtccacttttgccaaggctagctttgtggcttcaggaaacagaacagatatttccttagatgatcctaacttttggcagaaatgggctaaaatagctgaactagacactgaagcaaagaatgaaaaggaaagcttagtgatcgaccgacctcgcgtgagaaagcagaccaaacactacaactcgtttgaggaagacgagctcatggagttttcagagttagacagcgactcagacgaaaggcccacgagatccaggcgcctcaatgacaaagccaggcgctacctccgagcggagtgcttccgggtagagaagaacctgctcatctttggctggggccggtggaaggacatcctgactcatggccgattcaagtggcatctgaacgagaaggacatggagatgatttgccgtgccctcctggtgtactgtgtcaagcattataagggggacgagaagatcaagagtttcatttgggaactgatcacacctaccaaagatgggcaagcccagaccctccagaaccactcaggcttatctgccccagtccccagagggaggaaggggaagaagacgaagaaccagttgctaatcccagagctaaaggatgcagattggctagccacctgcaaccccgaggtggtcttgcatgatgatggctataagaaacacctcaaacagcactgcaacaaagtacttttgcgagtccggatgctgtactacctaaaagctgaaatactgggagaagcagctgagaaagcatttgaaggatctcctgccagggagctggatgtacctctgcctgacatcgactacatggagatcccagtggactggtgggatgctgaagccgataagtcacttctcattggcgtgttcaagcatggttatgaaaggtacaatgccatgcgagcagacccagcactttgcttcctggagaaagttgggatgcccgatgagaagtccctttctgcagaacagggtgttacagatgggacctcagacattcctgaaagaggcaacacagataaagaagacaatgctgaggacaaagtagatggcctccagaaacaaacggagagttccagtgatggaggtgatggcgtttttagcgaaaagaaggatgacagccgggcagctcgtctcagacgtctggtcactgtttaccagcgctgcaaccgcaaggaactgtgccggcctgaaattctgggaccaggtaaccaaggatattgggttcaggaagagatgttcaggagaacctcagaaatggacctcatcaacaaggaagcccaaaagaggtggactaggagagaacaagcagacttctatagaacagtgtcttcctttggtgttgtttacgatcaagaaaagaaaacctttgactggacacagttccgcatcatttcccgtttggacaagaagtcggatgagagcctggaacagtatttttatagttttgtggccatgtgccggaatgtctgtcgtctacccacatggaaagatggcggtcccccagataccaccatctacgttgaacccatcactgaggaacgtgctgcaagaactctgtaccgcattgaactgttacggaaagtccgagagcaagtgctcaagtgccctcagctgcatgaacgcctccagctgtgcaggcccagcctctacctcccagtctggtgggagtgtgggaagcatgatcgagacctgctcatcggcactgccaaacatgggctgaaccgcactgactgttacatcatgaacgacccccagctgtccttcctggatgcctatagaaactatgcccagcataaaagatctggcacccaggcaccaggaaatctctgttgcctttaccagaccaactccaagttatatgaatctcttacatattctcaaatgagtaggacttcagagtcccttgaaaatgaacctgaaaatctagtgagagtagaaagcagagatgatcatctcagcctgcctgatgtgacatgtgaaaactttatttctaaagttcaggatgtcatttccatcaaccatgatgaaagtctgctgcctgagtccttagagagcatgatgtatggtaagaaggtgctcagccaagaaccaagctcttttcaggagagcccaagtaccaatactgaatctagaaaagatgttattaccatctcaataagcaaagatgggaactgccagtctggtggccctgaggcagaaatagcttctggccctacttttatgggtagcttagaagcaggaggagtagctcaagcaaacatcaaaaatggaaaacatttgttgatgtctatttcaaaggaaggggagctctgctgcagtgaggcaggacagagacctgaaaacattggccagctggaagccaagtgtttagcttccccttccttgaatccaggaaatgaaagtgggtttgtagatatgtgcagtcttagtgtctgtgactccaaaagaaacctgtcatcagatcagcaattaattgatttattggaaaacaaaagcttagaaagtaaattgattttgagtcagaaccacagtgatgaggaggaagaagaggaggaaaacgaggaggaaaacttagccatggcagtaggcatgggggaaaggccagaggtattgcatctcacggagcccactactaacatctcaagggaaaagaaccaaggcttccaagatgaaaccaagaaaggaagcttagaggtggcaaaccagactcctgggctacagagggctttccccgctccagcagcctgtcagtgccactgcaaacacatggagaggtggatgcatggcctcgagaatgatgaatttgaaatcgagaaacccaaggcttatatcccagatctgttcaaaagtaaaaccaatactatcgccatggagggtgaacccactgctattccatcacagccgtttaaagtgaagcatgagcttttaaaagaaccttggaaagaaagtgcagaggggcaaaacgttttccccacatatcctcttgaaggaagtgagctcaaatcagaagacatggattttgagaataaagatgattatgatagagacggaaactgccatagtcaagattatccagggaagtactctgaagaggagagcaagagctcaacatcgggcatcacaggagacattggggatgagctacaggaggctcgagctcccactattgctcagctgctacaggagaaaactctctattccttctctgagtggccaaaggaccgcgtgataattaaccgcctagataatatctgccacgtggtgttaaaggggaagtggccctctagccagcagtatgagccctcaggcacactgcccaccccggtattaaccagcagtgctggttctcgaaccagcctctcagagccggaagcagcagaacacagcttcagcaacggcgcagcattggcggcccagatccacaaggagagcttcttagctccagtattcacaaaggatgaacaaaagcacaggcgtccctatgagtttgaggtggagagggatgcaaaggctcggggcctggagcagttctctgccacccacgggcacacccctatcatcctcaatggctggcatggggagtcagctatggacctctcctgctcatcagaggggtccccaggagccacatcccctttcccagtgagcgccagcacccctaagattggggctatcagttcacttcagggagcccttggcatggacttgtctgggattctgcaagctggcctgatccatcctgtgactggacagattgtcaatggaagcctcagaagagatgatgcagccacgaggaggcggagagggaggcggaaacatgttgaaggagggatggacctcatctttttgaaggagcagacacttcaggcgggaatcttggaagtccatgaagacccagggcaggccaccttgagcaccacacaccctgaggggccagggcctgccacctcggctcctgagccagctacggcagccagcagccaagccgagaaatccattcccagcaagagtctgcttgactggctaaggcagcaggctgactactccttagaagttcctggctttggggcagggtttcttccagaaaacaagttcaatcacactctggctgagcctattcttcgagatacgggcccccgcaggagggggaggcggcctcggagcgaactcctgaaggctccttccattgtggcagactctccctctggaatggggccactgttcatgaatggactgattgctgggatggacctggtaggacttcagaacatgagaaatatgccaggcatccccctcaccgggctggtggggtttccagctggctttgccacgatgccaacaggtgaagaggtcaaaagtaccctgagcatgctgcccatgatgctgccaggcatggctgctgtgccccagatgtttggtgttgggggactcctcagtccacccatggcaaccacctgcacttccactgccccggcgtctctatcaagcacaacgaaaagtggtacggcagtgactgaaaagactgcggaagacaagccgagtagccatgatgtgaaaacagacactttagctgaggacaagcctggtccaggtccattttctgatcagtctgaacctgcaataactactagtagtcctgtggcttttaacccatttctcatcccaggagtatctcctggactcatttacccatccatgttcctctcccctggtatgggcatggctctgccagccatgcagcaggccagacactcggaaatagtaggtctggagagccagaagaggaagaagaagaagacaaagggggacaaccccaactcccacccagagcctgctcccagctgtgaaagggagcccagcggtgatgagaactgtgccgaacccagtgcccctttgcccgcagagagagaacatggggcacaggctggggagggggcactcaaagactccaacaacgacaccaattagaacttttttcatttaagaaattattgtgacttgtaagtttcttatcccataaaggtttgttacttccctcacttcacctccataagaacctgtgtttccataagtaagattacgtacctgatttcctgtctgagaactatggtaacagatgttaatagttgcagggtctcaccacttcattagataagtgttgtctacctagtctaggaggcacagaattctcattctgttatccagttcattccagcaatcatagttaatacagtacttggtgacacgccctacccccttctcttccaagtttcccactcacttgaggaggaaaaatggcaaaagaaagctgtctagggttttaccattgaagggtggaagaacagagacaaagaggagctctttttctgtgagctgggttgcacaggaagaatgtcacagggaaccaaaaagcacagaaaaaggaagtgctggtgcatatttttgagttaaaatatttccctattttatcatgattactaagtgagtagtatagacagaagtatataactaatggttgaaaatacatatattcatttctttataaaaaacaaaaaccttaccggtagtaatataatttcccccttggtggtttttcagacacctgcagcaagaagaaatactgactgactaggcattattttctatacatccctctcaccagtgaaaagattcctcttgctgcgagaaagctttacccaccatgagttattgctgtcgacgggggtggggcaaggacccgcgctccgtaaagctacacgctgcttcacaagcacacggctagcgctctgctctcacctggttcgcttacagatttctctagccattaatttgcctctctgtgtttaaagagcaccaggaccgaatggattttcacttcaggctttccttcaccaagaataaggttctttctggagcctgcaagaagacagttgcccaacactttgacacttgctagtaggtcctttgatcaagagtgtctgaggctgtcaaatgtgtgccaccctttataatacagctatgaaaagttacttctccattt

SEQ ID NO: 598 - DNA, 798 bp, Homo sapiens
  CDS (270)..(452)
atgttacggttttatttaacaggaaattctggaaacaaatgtccataaaaactaaatataaaattggttaaataaattgtggtacaggggaaagttctagtggcttgaggtataggcaggagcagccaggtggcaggaggaaccattatgggaactgaagctgacaattaaacctgaacaagattgcaacctcccaaaagcaccgagactttgtggcagagtccgtgggggaaaagccagtagggagcctggccgggattggtgaagttatggacaagaagctggaggaagggtgctttgacaaggcctatgttgtccttggccagtttctggtgctaaagaaagatgaagacctcttccgggaatggctgagggacactggtggtgccaacgccaagcagtcccgggactgcttcggatgccttcgagagtggtgcgacgccttcttgtgatgctctctgggaagctctcaatccccagccctcatccagagtttgcagccgagtagggactcctcccctgtcctctacgaaggaaaagattgctattgtcgtactcacctccgacgtactccggggtcttttgggagttttctcccctaaccatttcaacttttttttggattctcgctcttgcatgcctcccccgtcctttttcccttgccagttccctggtgacagttaccagctttcttgaatggattcccggccccatccctcacccccaccctcactttcaatccgtttgataccatttggctccttttttggcagaacagtcactgtccttgtaaagttt

SEQ ID NO: 599 - DNA, 4474 bp, Homo sapiens
  CDS (197)..(4021)
aggcgtgatgtatatacctatctattcgatgatgaagataccccaccaaacccaaaaaaagagatctctcgaggatccgaattcgcggccgcgtcgacgtggactagagccagggtaaggggatctgctagaagttggtcttccgccaggactagagtttcctcgcggtatatgcctccgtggcctccggaggaccatgtcattagactttggcagtgtggcactaccagtgcaaaatgaagatgaagagtatgacgaagaggactatgaaagagagaaagagttgcagcagttactcacagaccttccccatgacatgctggatgacgacctctcctctccagagctccagtattcggactgcagcgaggatggcacagacggacaaccacatcatcctgagcaattggagatgagctggaatgagcaaatgctgcccaaatctcaaagtgtaaatggtcccagttgtcaaggtttggaaccgtataataaagtgacatataaaccttatcagtcttctgcccagaataatggctcaccagcccaggagataacaggaagtgacacattcgaaggcctgcaacaacaatttttaggagctaatgagaactctgcagaaaatatgcagattattcaacttcaggttcttaacaaagcaaaagagagacaactggagaacttaattgaaaagttaaatgaaagtgaacgtcaaattcgatatctgaatcaccagcttgtaataataaaagatgaaaaggatggtttgactctcagccttcgagaatcacagaaactctttcagaatggaaaagaaagagagatacagcttgaagctcaaataaaagcactggagactcagatacaagcattaaaagtcaatgaagaacagatgatcaagaagtccagaacaactgaaatggctctggaaagcttgaagcagcagctggtggaccttcatcattctgaatcacttcaacgagctagagaacagcatgagagcattgttatgggcctcacaaagaagtacgaagagcaagtattgtccttacaaaagaatttggatgccacagtcaccgcacttaaagaacaggaagacatttgctctcgtctgaaagatcacgtgaaacaactggaaaggaatcaagaagcaatcaagttagaaaagactgagatcattaataagttgacaagaagtctagaggagagtcaaaagcagtgtgcccacttgttgcagtccgggtcagtacaagaggtggctcagctacagttccagctgcagcaagcacagaaggcacatgctatgagtgcaaacatgaacaaggctttgcaagaagaattaacagaactaaaagatgaaatttctctctatgaatctgctgcaaaactaggaatacatccaagtgactcagaaggagaattaaatatagaactcactgaatcgtatgtggatttgggtattaaaaaggtcaactggaaaaaatccaaagttaccagcattgtacaagaagaagacccaaatgaagagctttcaaaagatgagttcattctgaagttaaaggcagaagtacagcgtttgctgggtagcaactcaatgaagcgtcatctggtgtctcagttacaaaatgacctcaaagactgtcataagaaaattgaagatctccaccaagtgaagaaggatgaaaaaagcattgaggttgagactaaaacagatacctcagaaaaaccaaagaatcaattatggcctgagtcttctacttctgatgttgtcagagatgatattctgctgcttaaaaatgaaattcaagttttacaacaacaaaatcaggaacttaaagaaactgaaggaaaactgagaaatacaaatcaagacttatgtaatcaaatgagacaaatggtacaagattttgaccatgacaaacaagaagctgtggataggtgtgaaaggacttatcagcagcaccatgaagccatgaaaactcaaatacgtgaaagcctattagcaaagcatgctttggagaagcagcagctctttgaggcttatgagagaactcatttgcaactgaggtctgagttggataagttgaataaggaggtgactgctgtgcaggaatgttacctagaagtgtgcagagagaaggataatctagaattgactctcaggaagaccactgaaaaggagcaacagactcaggagaagatcaaagaaaaactcattcaacagcttgaaaaggagtggcagtctaagctggatcaaactataaaggcaatgaaaaagaagaccttagattgtggcagccaaactgaccaagtaaccaccagtgatgttatttccaagaaagagatggcaattatgatagaagagcagaagtgcacaatccagcaaaacttagaacaagagaaggacatagccatcaagggggctatgaagaaactcgaaattgaattggaactcaaacattgtgaaaatattaccaaacaggtagaaatagctgtgcaaaatgctcatcagcgatggctgggagaactaccagagctggcagagtatcaagcacttgtgaaggcagaacagaaaaagtgggaagaacagcatgaggtctctgtgaacaaaaggatatcatttgctgtttctgaagctaaagagaaatggaagagtgagcttgaaaatatgaggaaaaatatacttcctggaaaggaattggaagagaagattcattctcttcagaaggaacttgagttaaagaacgaagaagtccctgtggtcatcagggctgagttagctaaggctcggagtgaatggaacaaagaaaagcaagaagaaatccacagaatccaagaacaaaatgagcaagattaccggcaatttttagatgatcaccgaaataaaattaatgaggtgcttgcggcagctaaagaagactttatgaaacaaaaaactgaactacttcttcagaaggagacagaattacaaacttgtctagaccagagtcgtagagaatggactatgcaggaagccaagcggatccaactggaaatctatcagtatgaggaagacatcctgactgtacttggggttcttttaagtgatacccaaaaggagcacatcagtgattctgaggacaagcagcttttggaaatcatgtcgacttgttcttcaaaatggatgtctgtgcaatattttgaaaaactaaagggctgcatacagaaagcatttcaagatacacttcctctgcttgtagaaaacgctgacccagaatggaaaaagagaaatatggccgagctctctaaggattctgccagccagggcactggccaaggagaccctggacctgctgctggacaccatgctcagcccttggccttacaagcaacagaagcagaagctgataagaaaaaggtccttgaaattaaggatttatgctgtggacactgcttccaagaacttgaaaaggcaaagcaggaatgtcaagatctgaaaggaaaactggagaaatgctgtaggcatcttcagcatttagaaaggaagcacaaagctgtagtggaaaaaattggagaagagaataataaagttgttgaagaattaatagaagaaaacaacgacatgaagaataaattggaagaattgcaaacactttgtaaaacaccaccaaggtcattgtcagcaggggccattgaaaatgcttgcctgccatgcagtgggggagccttggaagaacttcgtgggcagtacattaaagctgtaaaaaaaattaaatgtgacatgcttcgttatattcaggagagtaaggaacgagctgcagaaatggtaaaagcagaggtactgcgagaacgtcaagaaaccgcccgaaagatgcgcaaatattatttgatttgcctccaacagattttgcaggatgatggaaaagaaggggctgagaaaaagattatgaatgctgctagcaaacttgctacaatggcaaaattactggaaacacctatttctagtaagtcccaaagcaaaactacacagtcaggtatgtcaaagtgagtcgccaaatggtttttctatcttttcttctttagctatttaatattttcagtatgaagaaggcagggaaggtaaggagtgagagttaatttgtgaagttttgtatgttttacttaaactagaagtttacgcaaaaagagtacacagtttccaatttaagtaggcagactgagcatgcccatcagtttcctattgctgcttccatccctcgaaatgatagaaaagattttaaacagccaaataaagaatgagaaaaagaagaaattataagtgggttttaaaaagttgcagtgggccaggcatcatggctcacacctgtaatcccagcactttgggaggctgaggtgggaggatcccttgatcccaggaatttgaggttgcagtaagctatgattgtgccactgtactccagcctgggtgacagagtgaggccctgtctcaaaaaaaaaa

SEQ ID NO: 600 - DNA, 802 bp, Homo sapiens
  CDS (234)..(539)
gaaccatcattacgcctagcttggcacgagggccagagtggttgtgtctgttcctccggtaaggggtgattcgccgaggggcgcggaccagacagacctcgggtcaggcccgggaaccccgagaggagagcccagcccctggtggaggcggcttggcggagattcggagccgtcagcagctcagccagacgtccaggatcccaccccttgcaaaagaccaggccgtggaagccatgttcccaccagccagggggaaggagctgctctcgtttgaggatgtggcgatgtacttcaccagagaggagtggggccacctcaactggggtcagaaggacctctaccgagatgtgatgttggagaactacaggaacatggtcttgctgggatttcagtttcccaaacctgagatgatctgtcagctggagaactgggacgagcagtggatcctggatctaccgagagctgggaataggaaggcttccggtagtgcttgcccaggcggactctcgctctgtcgccaggctgtcttagcctcctgagtggcttggactacaggcgcgcgccaccatgcccggctactttctgtattttagtggagatggggtttcaccatgttggtcaggctggtctggaactcctgacctcgtgatccgcctgccccggcctcccaaagtgctgggattacaggcgtgagccgtgcgcccagttggaaaaagttttgttttttttttaaaactaagtgcttccatgtacatcagatgttaacgactttgatcctaacaaacaaacaaaaaaaaaaaaa

SEQ ID NO: 601 - DNA, 2152 bp, Homo sapiens
  CDS (298)..(1761)
ggggctgtgaacatttgatacaccttcgtaccttaccgcctatttaggtgacactatagaacaagtttgtacaaaaaagcaggctggtaccggtccggaattcccgggatatcgtcgacccacgcgtccggcacaccctttactggccggccccgcgctgctctcctaagaccccgcgggccagcgccgcgaccccttcccagcgctcctcgcgctgtgtgcggcgcgtcctctcgccggtgacccggtgtgcgtggggtcgaggcgccgggcggagtggctccgggccgaaacgccatgcggaggggcgagcgcagggacgccggaggtccgcggcccgagtccccggtgcccgcgggcagggcctcgctggaggagccgcctgacgggccgtctgccggccaagccaccgggccgggcgagggccgccgcagcaccgagtccgaggtctacgacgacggcaccaacaccttcttctggcgagcccacaccttaaccgtgctcttcatcctcacctgtacgcttggctatgtgacgctgctggaggaaacacctcaggacacggcctacaacaccaagagaggtattgtggccagtattttggttttcttatgttttggagtcacacaagctaaagacgggccattttccagacctcatccagcttactggaggttttggctctgcgtgagtgtggtctacgagctgtttctcatctttatactcttccagactgtccaggacggccggcagtttctaaagtatgttgaccccaagctgggagtcccactgccagagagagactacgggggaaactgcctcatctacgacccagacaatgagactgacccctttcacaacatctgggacaagttggatggctttgttcccgcgcactttcttggctggtacctgaagaccctgatgatccgagactggtggatgtgcatgatcatcagcgtgatgttcgagttcctggagtacagcctggagcaccagctgcccaacttcagcgagtgctggtgggatcactggatcatggacgtgctcgtctgcaacgggctgggcatctactgcggcatgaagacccttgagtggctgtccctgaagacgtacaagtggcagggcctctggaacattccgacctacaagggcaagatgaagaggatcgccttccagttcacgccgtacagctgggttcgcttcgagtggaagccggcctccagcctgcgtcgctggctggccgtgtgcggcatcatcctggtgttcctgttggcagaactgaacacgttctacctgaagtttgtgctgtggatgcccccggagcactacctggtcctcctgcggctcgtcttcttcgtgaacgtgggtggcgtggccatgcgtgagatctacgacttcatggatgacccgaagccccacaagaagctgggcccgcaggcctggctggtggcggccatcacggccacggagctgctcatcgtggtgaagtacgacccccacacgctcaccctgtccctgcccttctacatctcccagtgctggaccctcggctccgtcctggcgctcacctggaccgtctggcgcttcttcctgcgggacatcacattgaggtacaaggagacccggtggcagaagtggcagaacaaggatgaccagggcagcaccgtcggcaacggggaccagcacccactggggctggacgaagacctgctggggcctggggtggccgagggcgagggagcaccaactccaaactgacctgggccgtggctgcctcgtgagcctcccagagcccaggcctccgtggcctcctcctgtgtgagtcccaccaggagccacgtgcccgccttgccctcaagctcgtgtgggcgctcgtccacaaacactccgtggctgagaggcagcggatccaggcagcgatgctgagccacctcctccgagccttcctttcacacagaccaccccggaggacacgtggatgatggggtcagagatcactgagctgcccctcaagggggcctggaacccgggtgctggggtcatgctgcctccgtggctccaaggtgagggtcatcttcacgagcaaagagaaccaataaagtgacaacgaacgtttgaggcttccagccctccccccaaaaaaaaaaaa

SEQ ID NO: 602 - DNA, 2250 bp, Homo sapiens
  CDS (51)..(2096)
cggtccggaattcccgggtcgacgatttcgtgtcgtggtcgttcggtcctatgtcgcgccgggccctccggaggctgaggggggaacagcgcggccaggagcccctcgggcccggcgccttgcatttcgatctccgtgatgacgatgacgcggaagaagaagggcccaagcgggagcttggtgtccggcgtcccgggggcgcagggaaggagggcgtccgagtcaacaaccgcttcgagctgataaacattgacgatcttgaggatgaccctgtggtgaacggggagaggtctggctgtgcgctcacagacgctgtggcaccagggaacaaaggaaggggtcagcgtggaaacacagagagcaagacggatggagatgacaccgagacagtgccctcagagcagtctcatgcaagtggcaaactccggaagaagaaaaaaaaacagaaaaacaagaaaagcagcacgggagaagcatcggaaaacggactagaagatatcgatcgcatcctagagaggattgaggacagcactgggttgaaccgtcccggcccagctcccctgagctccaggaagcacgttctctacgtggagcacagacacttgaatccagacacagaactgaaaaggtattttggtgcccgggcaatcctgggggagcaaaggccacggcagagacaacgtgtgtaccccaagtgcacatggctgaccacccctaaaagcacctggccccgctacagcaaaccaggtctgtccatgcggctgctggaatcaaaaaaaggcctctccttctttgcgtttgagcacagtgaggagtaccagcaggctcagcacaagttcctggtggccgtggagtctatggagccgaacaacatcgtggttctgctccagacgagcccttaccacgttgactcactcctgcagctcagcgatgcctgccgctttcaagaggatcaggagatggctcgagacctcgtagagagagcgctgtacagcatggaatgtgcgttccaccccctgttcagtctcaccagtggggcctgccggctggattaccgcagacccgagaacaggagcttctacctggccctctacaagcagatgagcttcctggagaagcgaggctgcccgcgcacggcgctggagtactgcaagctcatcctgagtctcgagccggatgaggaccccctctgcatgctgctgctcatcgaccacctggccttgcgggcccggaactacgagtacctgatccgcctcttccaggagtgggaggtgggtgcgagcctggctcatcggaacctgtcccagctccctaattttgccttctctgttccactggcgtatttcctgctgagccagcagacagacctccctgagtgtgagcagagctctgccaggcagaaggcctctctcctgatacagcaggcgctcaccatgttccctggagtcctcctgcccctgctcgagtcttgcagtgtgcggcccgacgccagcgtttccagtcaccgcttctttggacccaatgctgaaataagccagccccctgccctgagccagctggtgaacctgtaccttgggaggtcacactttctctggaaagagcccgccaccatgagctggctggaggagaacgtccacgaggttctgcaagcagtggacgccggggacccagccgtggaagcctgtgagaaccggcggaaggtgctctaccagcgtgcacccaggaatatccaccgccatgtgatcctctctgagatcaaggaagccgtcgctgccctgcccccggacgtgaccacgcagtctgtgatggggtttgatcctctgcctccttcggacacaatctactcctacgtcaggccagagaggctaagtcctatcagccatggaaacaccattgctctcttcttccggtcactgttgccaaactataccatggagggggagaggcccgaggaaggagtggctgggggtctgaaccgcaaccagggcctgaacaggctgatgctggctgtgcgcgacatgatggccaacttccacctcaacgacctggaggcgccgcacgaggacgacgctgagggggagggggagtgggactgagcgtccgcagaggtgaccgaaaagccgtatgatgatgttcccgatttctctgttggtcggagtcggccagttgcctgaagtagggaagctgagtgtgtcgctccctggtccactgtttctcctataaatgtaaatgggtcacaaaaaaaaaaaa

SEQ ID NO: 603 - DNA, 2205 bp, Homo sapiens
  CDS (51)..(2051)
cggtccggaattcccgggtcgacgatttcgtgtcgtggtcgttcggtcctatgtcgcgccgggccctccggaggctgaggggggaacagcgcggccaggagcccctcgggcccggcgccttgcatttcgatctccgtgatgacgatgacgcggaagaagaagggcccaagcgggagcttggtgtccggcgtcccgggggcgcagggaaggagggcgtccgagtcaacaaccgcttcgagctgataaacattgacgatcttgaggatgaccctgtggtgaacggggagaggtctggctgtgcgctcacagacgctgtggcaccagggaacaaaggaaggggtcagcgtggaaacacagagagcaagacggatggagatgacaccgagacagtgccctcagagcagtctcatgcaagtggcaaactccggaagaagaaaaaaaaacagaaaaacaagaaaagcagcacgggagaagcatcggaaaacggactagaagatatcgatcgcatcctagagaggattgaggacagcactgggttgaaccgtcccggcccagctcccctgagctccaggaagcacgttctctacgtggagcacagacacttgaatccagacacagaactgaaaaggtattttggtgcccgggcaatcctgggggagcaaaggccacggcagagacaacgtgtgtaccccaagtgcacatggctgaccacccctaaaagcacctggccccgctacagcaaaccaggtctgtccatgcggctgctggaatcaaaaaaaggcctctccttctttgcgtttgagcacagtgaggagtaccagcaggctcagcacaagttcctggtggccgtggagtctatggagccgaacaacatcgtgctcagcgatgcctgccgctttcaagaggatcaggagatggctcgagacctcgtagagagagcgctgtacagcatggaatgtgcgttccaccccctgttcagtctcaccagtggggcctgccggctggattaccgcagacccgagaacaggagcttctacctggccctctacaagcagatgagcttcctggagaagcgaggctgcccgcgcacggcgctggagtactgcaagctcatcctgagtctcgagccggatgaggaccccctctgcatgctgctgctcatcgaccacctggccttgcgggcccggaactacgagtacctgatccgcctcttccaggagtgggaggtgggtgcgagcctggctcatcggaacctgtcccagctccctaattttgccttctctgttccactggcgtatttcctgctgagccagcagacagacctccctgagtgtgagcagagctctgccaggcagaaggcctctctcctgatacagcaggcgctcaccatgttccctggagtcctcctgcccctgctcgagtcttgcagtgtgcggcccgacgccagcgtttccagtcaccgcttctttggacccaatgctgaaataagccagccccctgccctgagccagctggtgaacctgtaccttgggaggtcacactttctctggaaagagcccgccaccatgagctggctggaggagaacgtccacgaggttctgcaagcagtggacgccggggacccagccgtggaagcctgtgagaaccggcggaaggtgctctaccagcgtgcacccaggaatatccaccgccatgtgatcctctctgagatcaaggaagccgtcgctgccctgcccccggacgtgaccacgcagtctgtgatggggtttgatcctctgcctccttcggacacaatctactcctacgtcaggccagagaggctaagtcctatcagccatggaaacaccattgctctcttcttccggtcactgttgccaaactataccatggagggggagaggcccgaggaaggagtggctgggggtctgaaccgcaaccagggcctgaacaggctgatgctggctgtgcgcgacatgatggccaacttccacctcaacgacctggaggcgccgcacgaggacgacgctgagggggagggggagtgggactgagcgtccgcagaggtgaccgaaaagccgtatgatgatgttcccgatttctctgttggtcggagtcggccagttgcctgaagtagggaagctgagtgtgtcgctccctggtccactgtttctcctataaatgtaaatgggtcacaaaaaaaaaaaa

SEQ ID NO: 604 - DNA, 2542 bp, Homo sapiens
  CDS (400)..(2043)
ccactttgtacaagaaagctgggtacgcgtaagcttgggcccctcgagggatactctagagcggccgcccaagccagtgcaaggcccaggggcctgacatcgctcccagcgctcgaggaccgaggcctgctgtggaggacaccgtgctccctcgggacctgctctggattccggcccggacgtccccttggagctctgcatctccaacctggaacccaacccagaagtctcaagtttgacgcatcacgtggcgtgcggatccactgagggtccacagagaggggcgcccatctcctgcgtctcagttatcctggtgttgggaattctgtgccctaaagaattccgactcagatccgaacggggatctggtggaatcgagggtgaaagaccagagggacaatgttctactatcccaacgtgcttcagcgccacaccggctgctttgccaccatctggctggcggcgactcgcggcagccggttggtgaagcgcgaatacctgagggtgaatgtggtgaaaacctgcgaggaaatcctcaattacgtgctggtacgagtgcaacccccgcagcccggcctgccgcggccccgcttctccctctatctctcagcccaacttcagatcggtgtgatccgcgtctattctcaacaatgccagtacctcgtggaggacatccagcacatcttggagcgcctccaccgtgcccagctgcagatccgaatagatatggagactgagctacccagcctgctgcttcctaaccacctggccatgatggagaccctagaagatgctccagatcccttttttgggatgatgtctgtggatcccagacttcctagtcctttcgatatccctcagattcgacacctcttagaggctgcaatcccagagagagttgaagagatccctcctgaagttcctacagagcccagggagccagagaggattccggtcactgtgctgccacctgaggccatcacgatcctggaggcagagcccatacggatgctggagattgagggtgaacgggagctcccagaggtcagccgccgagaactggacctgctgatcgcagaggaagaagaagctatcttgttagaaatcccgcggctcccacctccagctcctgcagaggtggaaggaataggagaggcactgggtcctgaggagctgaggctgacaggctgggaacctggggccctactcatggaggtgacccccccggaggagctgcgtctgccagccccacccagcccagagaggaggcccccagtccccccacctcctcgccgccgccgtcgtcgccggttactgttctgggacaaggagactcagatctccccggagaaattccaggaacaactgcaaaccagagcccactgctgggaatgtcctatggtgcagccgcccgagaggaccatcagaggccctgcggagttgttcagaaccccaactctctctggctggctaccccctgaactactgggtctctggacccattgtgcccagccacccccaaaagccctcaggcgagagctgcctgaggaggcagccgctgaggaggaaaggagaaagattgaagttccaagtgagattgaggtcccgagggaggccctggagcccagtgttccccttatggtgtctttagagatctccctagaggcagctgaagaggagaagtcccgcatcagcctcatcccaccagaagaacggtgggcctggcctgaggtggaggcgccagaagctcctgcattgcccgtggtgcctgaactccctgaggtgcccatggagatgcctttggtgctgcccccagagctcgagctgctctcactggaagcagtgcacagggcagtggcactggagctgcaggctaacagggagcccgacttcagcagcctggtgtcacctctcagcccccgcaggatggctgcccgggtcttctacctgctcctggtgctctcagcgcaacagattcttcacgtgaaacaagaaaagccatatggtcgcctcctgatccagccggggcccagattccactgaggttagagtccatttacaaagctgccaggaaaccggccacttctagtaaaccacgtcgtgcctcactgggtcctgcttacctcatttctgaatgtgcatttccagccttcttgctctcagagctattgttcaagcagaaaacaagctgcttttattacagtatgatgtcatgactcatttgtaacagatccagcctcagggacagccctgtaaggcagcaagtggggctggctccaaatgggtatgagtctcagaatctttggtaaggcagaactgaactgggctgagaggtggtcttaaggcctgggcaggctctattctctctggactggctgcagcctgcagtctaggagaggcccagtacagcctggagctcctgagccttgtcaacaggcagtgagcccagagctgcttgaaagctgtcggtgtgctgtttggcaggaacgtcaggagcagcaacagtgccctcgtgccgaattcttggcctcgagggccaaat

SEQ ID NO: 605 - DNA, 2476 bp, Homo sapiens
  CDS (400)..(1977)
ccactttgtacaagaaagctgggtacgcgtaagcttgggcccctcgagggatactctagagcggccgcccaagccagtgcaaggcccaggggcctgacatcgctcccagcgctcgaggaccgaggcctgctgtggaggacaccgtgctccctcgggacctgctctggattccggcccggacgtccccttggagctctgcatctccaacctggaacccaacccagaagtctcaagtttgacgcatcacgtggcgtgcggatccactgagggtccacagagaggggcgcccatctcctgcgtctcagttatcctggtgttgggaattctgtgccctaaagaattccgactcagatccgaacggggatctggtggaatcgagggtgaaagaccagagggacaatgttctactatcccaacgtgcttcagcgccacaccggctgctttgccaccatctggctggcggcgactcgcggcagccggttggtgaagcgcgaatacctgagggtgaatgtggtgaaaacctgcgaggaaatcctcaattacgtgctggtacgagtgcaacccccgcagcccggcctgccgcggccccgcttctccctctatctctcagcccaacttcagatcggtgtgatccgcgtctattctcaacaatgccagtacctcgtggaggacatccagcacatcttggagcgcctccaccgtgcccagctgcagatccgaatagatatggagactgagctacccagcctgctgcttcctaaccacctggccatgatggagaccctagaagatgctccagatcccttttttgggatgatgtctgtggatcccagacttcctagtcctttcgatatccctcagattcgacacctcttagaggctgcaatcccagagagagttgaagagatccctcctgaagttcctacagagcccagggagccagagaggattccggtcactgtgctgccacctgaggccatcacgatcctggaggcagagcccatacggatgctggagattgagggtgaacgggagctcccagaggtcagccgccgagaactggacctgctgatcgcagaggaagaagaagctatcttgttagaaatcccgcggctcccacctccagctcctgcagaggtggaaggaataggagaggcactgggtcctgaggagctgaggctgacaggctgggaacctggggccctactcatggaggtgacccccccggaggagctgcgtctgccagccccacccagcccagagaggaggcccccagtccccccacctcctcgccgccgccgtcgtcgccggttactgttctgggacaaggagactcagatctccccggagaaattccaggaacaactgcaaaccagagcccactgctgggaatgtcctatggtgcagccgcccgagaggaccatcagaggccctgcggagttgttcagaaccccaactctctctggctggctaccccctgaactactgggtctctggacccattgtgcccagccacccccaaaagccctcaggcgagagctgcctgaggaggcagccgctgaggaggaaaggagaaagattgaagttccaagtgagattgaggtcccgagggaggccctggagcccagtgttccccttatggtgtctttagagatctccctagaggcagctgaagaggagaagtcccgcatcagcctcatcccaccagaagaacggtgggcctggcctgaggtggaggcgccagaagctcctgcattgcccgtggtgcctgaactccctgaggtgcccatggagatgcctttggtgctgcccccagagctcgagctgctctcactggaagcagtgcacagcccccgcaggatggctgcccgggtcttctacctgctcctggtgctctcagcgcaacagattcttcacgtgaaacaagaaaagccatatggtcgcctcctgatccagccggggcccagattccactgaggttagagtccatttacaaagctgccaggaaaccggccacttctagtaaaccacgtcgtgcctcactgggtcctgcttacctcatttctgaatgtgcatttccagccttcttgctctcagagctattgttcaagcagaaaacaagctgcttttattacagtatgatgtcatgactcatttgtaacagatccagcctcagggacagccctgtaaggcagcaagtggggctggctccaaatgggtatgagtctcagaatctttggtaaggcagaactgaactgggctgagaggtggtcttaaggcctgggcaggctctattctctctggactggctgcagcctgcagtctaggagaggcccagtacagcctggagctcctgagccttgtcaacaggcagtgagcccagagctgcttgaaagctgtcggtgtgctgtttggcaggaacgtcaggagcagcaacagtgccctcgtgccgaattcttggcctcgagggccaaat

SEQ ID NO: 606 - DNA, 3109 bp, Homo sapiens
  CDS (343)..(2106)
tgagcatcgatgcctgcacgtaccggtccggaattcccgggtcgacccacgcgtccgaaagaaactgccggctttcaaaatcctcctcctccgccatcatccgccgcggtgcggagagcaggtggtgctggaagcgcgtgaggccgggagctcgagagagctaacagactagccggctggacatctggaccgctggatccggaggtggcgaccccggcctgacccggaccctaaatccgtccccgccccagagggcggaggcgcgcgctcgattcccccaacgcggcggcgccgcctgtttacgtctgcagatctccaggggagcccaccagcctagtcaacatggcctcggaagacattgccaagctggcagagacacttgccaagactcaggtggccgggggacagctgagtttcaaaggcaagagcctcaaactcaacactgcagaagatgctaaagatgtgattaaagagattgaagactttgacagcttggaggctctgcgtctggaaggcaacacagtgggcgtggaagcagccagggtcatcgccaaggccttagagaagaagtcggagttgaagcgctgccactggagtgacatgttcacgggaaggctgcggaccgagatcccaccagccctgatctcactaggggaaggactcatcacagctggggctcagctggtggagctggacttaagcgacaacgcattcgggcccgacggtgtgcaaggcttcgaggccctgctcaagagctcagcctgcttcaccctgcaggaactcaagctcaacaactgtggcatgggcattggcggcggcaagatcctggctgcagctctgaccgaatgtcaccggaaatccagtgcccaaggcaagcctctggccctgaaggtctttgtggctggcagaaaccgtctggagaatgatggcgccactgccttggcagaagcttttagggtcatcgggaccctggaggaggtccacatgccacagaatgggatcaaccaccctggcatcactgccctggcccaggctttcgctgtcaaccccctgctgcgggtcatcaacctgaatgacaacaccttcactgagaagggcgccgtggccatggccgagaccttgaagaccttgcggcaggtggaggtgattaattttggggactgcctggtgcgctccaagggtgcagttgccattgcagatgccatccgcggcggcctgcccaagctaaaggagctgaacttgtcattctgtgaaatcaagagggatgctgccctggctgttgctgaggccatggcagacaaagctgagctggagaagctggacctgaatggcaacaccctgggagaagaaggctgtgaacagcttcaggaggtgctggagggcttcaacatggccaaggtgctggcgtccctcagtgatgacgaggacgaggaggaggaggaggaaggagaagaggaagaagaggaagcagaagaagaggaggaggaagatgaggaagaggaggaagaagaggaggaggaggaggaagaagagcctcagcagcgagggcagggagagaagtcagccacgccctcacggaagattctggaccctaacactggggagccagctcccgtgctgtcctccccacctcctgcagacgtctccaccttcctggcttttccctctccagagaagctgctgcgcctagggcccaagagctccgtgctgatagcccagcagactgacacgtctgaccccgagaaggtggtctctgccttcctaaaggtgtcatctgtgttcaaggacgaagctactgtgaggatggcagtgcaggatgcagtagatgccctgatgcagaaggctttcaactcctcgtccttcaactccaacaccttcctcaccaggctcctcgtgcacatgggtctgctcaagagtgaagacaaggtcaaggccattgccaacctgtacggccccctgatggcgctgaaccacatggtgcagcaggactatttccccaaggcccttgcacccctgctgctggcgttcgtgaccaagcccaacagcgccctggaatcctgctccttcgcccgccacagtctgctgcagacgctgtacaaggtctagactcaaagcctctcccatcccttggcctggaccagtgagctggggagggactcggatgaactgaggcgcagcctacgccattgccttggacaggactctggccacaggcagggcgggtctgtgtcccatgtgtcctgtcagtcccctgagtatgtgtgtgggtgtggcgcatgtgcaggtctgtgcctcctgtcgggatttgggttttaacgtcttctgctggcccagccctgctctgttgtggggagttggcccccaggggaaagggctgtgagctgctccgccattaaactcacctccacctgagggcgctctgctgatctccgcctgggccctgatggccgtccccacccacctgccttccggcccggctccctggcggagccagaacccaaggagttgcccgcgtgctgtccttcccctctgtgttgtgattgggttgtttcctgccctgcctggggctgcttctcgtcaccaagccctggtcctgcggcagctgtcacccctaccatccataccactgtgctgaccgctcagcctgaagagcagagaatgccatgggtgggactgtgggggtcggatcgtggggttgttggcagagggcaaccctgggccccacaccgtgtggacaggcagacaccagattgtccaggagcaggagctgctgggactgcgctggccccggacctagtgggccttctcctggctgctgagatgtcgtctgtgactggcctggctggagggggagtgttgacaacccaaagctgttctccagtctggggagggagaggcagggtccccaatgtccgagctgcatctggacgctgctcttaaaggacctcctggggcaggggagcggtagggtctggactgggcagatgctgtatgacctccctgagcacccgtgactgccccatgctttcccctttgtgctctgtgtgtgtctgggctgtgcccgggggcttcacaaataaagtcgtgtggcagcttcaaaaaaaaaaaa

SEQ ID NO: 607 - DNA, 3028 bp, Homo sapiens
  CDS (343)..(2025)
tgagcatcgatgcctgcacgtaccggtccggaattcccgggtcgacccacgcgtccgaaagaaactgccggctttcaaaatcctcctcctccgccatcatccgccgcggtgcggagagcaggtggtgctggaagcgcgtgaggccgggagctcgagagagctaacagactagccggctggacatctggaccgctggatccggaggtggcgaccccggcctgacccggaccctaaatccgtccccgccccagagggcggaggcgcgcgctcgattcccccaacgcggcggcgccgcctgtttacgtctgcagatctccaggggagcccaccagcctagtcaacatggcctcggaagacattgccaagctggcagagacacttgccaagactcaggtggccgggggacagctgagtttcaaaggcaagagcctcaaactcaacactgcagaagatgctaaagatgtgattaaagagattgaagactttgacagcttggaggctctgcgtctggaaggcaacacagtgggcgtggaagcagccagggtcatcgccaaggccttagagaagaagtcggagttgaagcgctgccactggagtgacatgttcacgggaaggctgcggaccgagatcccaccagccctgatctcactaggggaaggactcatcacagctggggctcagctggtggagctggacttaagcgacaacgcattcgggcccgacggtgtgcaaggcttcgaggccctgctcaagagctcagcctgcttcaccctgcaggaactcaagctcaacaactgtggcatgggcattggcggcggcaagatcctggctgcagctctgaccgaatgtcaccggaaatccagtgcccaaggcaagcctctggccctgaaggtctttgtggctggcagaaaccgtctggagaatgatggcgccactgccttggcagaagcttttagggtcatcgggaccctggaggaggtccacatgccacagaatgggatcaaccaccctggcatcactgccctggcccaggctttcgctgtcaaccccctgctgcgggtcatcaacctgaatgacaacaccttcactgagaagggcgccgtggccatggccgagaccttgaagaccttgcggcaggtggaggtgattaattttggggactgcctggtgcgctccaagggtgcagttgccattgcagatgccatccgcggcggcctgcccaagctaaaggagctgaacttgtcattctgtgaaatcaagagggatgctgccctggctgttgctgaggccatggcagacaaagctgagctggagaagctggacctgaatggcaacaccctgggagaagaaggctgtgaacagcttcaggaggtgctggagggcttcaacatggccaaggtgctggcgtccctcagtgatgacgaggacgaggaggaggaggaggaagaagagcctcagcagcgagggcagggagagaagtcagccacgccctcacggaagattctggaccctaacactggggagccagctcccgtgctgtcctccccacctcctgcagacgtctccaccttcctggcttttccctctccagagaagctgctgcgcctagggcccaagagctccgtgctgatagcccagcagactgacacgtctgaccccgagaaggtggtctctgccttcctaaaggtgtcatctgtgttcaaggacgaagctactgtgaggatggcagtgcaggatgcagtagatgccctgatgcagaaggctttcaactcctcgtccttcaactccaacaccttcctcaccaggctcctcgtgcacatgggtctgctcaagagtgaagacaaggtcaaggccattgccaacctgtacggccccctgatggcgctgaaccacatggtgcagcaggactatttccccaaggcccttgcacccctgctgctggcgttcgtgaccaagcccaacagcgccctggaatcctgctccttcgcccgccacagtctgctgcagacgctgtacaaggtctagactcaaagcctctcccatcccttggcctggaccagtgagctggggagggactcggatgaactgaggcgcagcctacgccattgccttggacaggactctggccacaggcagggcgggtctgtgtcccatgtgtcctgtcagtcccctgagtatgtgtgtgggtgtggcgcatgtgcaggtctgtgcctcctgtcgggatttgggttttaacgtcttctgctggcccagccctgctctgttgtggggagttggcccccaggggaaagggctgtgagctgctccgccattaaactcacctccacctgagggcgctctgctgatctccgcctgggccctgatggccgtccccacccacctgccttccggcccggctccctggcggagccagaacccaaggagttgcccgcgtgctgtccttcccctctgtgttgtgattgggttgtttcctgccctgcctggggctgcttctcgtcaccaagccctggtcctgcggcagctgtcacccctaccatccataccactgtgctgaccgctcagcctgaagagcagagaatgccatgggtgggactgtgggggtcggatcgtggggttgttggcagagggcaaccctgggccccacaccgtgtggacaggcagacaccagattgtccaggagcaggagctgctgggactgcgctggccccggacctagtgggccttctcctggctgctgagatgtcgtctgtgactggcctggctggagggggagtgttgacaacccaaagctgttctccagtctggggagggagaggcagggtccccaatgtccgagctgcatctggacgctgctcttaaaggacctcctggggcaggggagcggtagggtctggactgggcagatgctgtatgacctccctgagcacccgtgactgccccatgctttcccctttgtgctctgtgtgtgtctgggctgtgcccgggggcttcacaaataaagtcgtgtggcagcttcaaaaaaaaaaaa

SEQ ID NO: 608 - DNA, 1489 bp, Homo sapiens
  CDS (223)..(1146)
agcttgacgaggtggtactgaggaggcctagcagggtgaaggccacggtcgcggccttcacgggttcctcggccgtcctgagtcccaaatcccaagctggagccgttcagctcccctccaccgcttagagatttggggggctctggccccgtccttgcggaccattccgaggggagtccagaggtgtcagtaattaacactgtggatacctcccatgaggacatgattcacgacgcccagatggactactatggcacccgcctggcaacctgctcatcagacaggtccgtcaaaatctttgatgtgcgcaatggagggcagatccttatcgccgacctcaggggtcatgagggtcctgtgtggcaagtggcctgggctcaccccatgtacggcaacatcctggcatcgtgctcctatgaccggaaagtcattatctggagagaggaaaacggcacctgggagaagagccacgagcatgcgggacacgactcctcagtgaactcggtgtgctgggccccccatgactacggcctgatcctggcctgtgggagctcggatggggccatctccctgctgacttacaccggggaaggccaatgggaagtaaagaagatcaacaacgctcacaccattggctgcaatgccgtcagctgggcccctgctgttgtacctggaagcctcatagaccacccatcggggcagaaacccaattacatcaagaggtttgcatcaggtggctgtgacaacctcatcaagctgtggaaggaggaggaggacggccagtggaaggaggagcagaagctagaagcgcacagtgactgggttcgagatgtggcctgggccccctccatcggcctgcccaccagcaccatcgccagctgctcccaggatggtcgtgtgttcatttggacctgtgatgatgcctcaagcaatacgtggtcccctaaattgttgcacaagttcaacgatgtggtgtggcatgtgagctggtccatcacagccaacatcctggctgtctctggtggagacaataaggtgaccctgtggaaggagtcagttgatgggcagtgggtgtgcatcagtgatgtcaacaagggccagggctccgtatcagcatcagtgacagagggccagcagaacgagcagtgacaagacaggtggggcctggctccccacccgccagctccaggactgccccttcctgggccaactaaccaaacaactgggaagagcccccaactccaacaggattattttcccaggaggagttacagatgcagccacagattgatcatctgccttaacgtgatcggagatgctttgtaatctactgtccagctgaaagcactcatgttacgaggaagaaactacaagtgatgttcaaatctattttgggtcatttttatgtacctttgggttcaggcattatttggggggttttgtttccaaaggaactaaataaagtcatattgcttataaaaaaaaaaaa

SEQ ID NO: 609 - DNA, 657 bp, Homo sapiens
  CDS (135)..(467)
cagagtcaggccaaataaattggactttgggtcagagataacttaagtgtggtgttcggagtcttaagagcccccactagctcagaaatggtcttagttgtcctcccccattagcagcatggagagtcaaggagatgacttctaccttgccaaaggccttgggaagaaagacagcatcaaggtctcacacaacactccagggaggcagctgctgcccagtgctgtggacagcaaagcttcggtgcaggaaattaagattccccctgcctccccctcccccatcctcatcagcttggccatggcagggctgggggatcagaggtgaacaggaagcagaaggacccctgggggagacagggcctccagtgggaccagagctgagtggcctcaggcagtggcggaagctgattaaaggaaggtacggggagtggaggggaagtggacaaaagacaggacagccatcttagacaacaatgcaagggggagaaactgaagaaaacagaacagagaccactactggcaataaacagagagaaagtgaagccccatgggtgaggcacacctacattacttaagaaacgtgagcacattcttacgcctagggcaataaatacatccttgagctacacaggctaagcaagagtgaaattacagcac

SEQ ID NO: 610 - DNA, 2078 bp, Homo sapiens
  CDS (199)..(1836)
gcacgagggctgtcaattggtctgtttttgtgccgatcaatgagatgggtgcggtgattggcgactaccttgagagtagcgggttgaggtgtaagccctgaggaggcagcgttttctgggcttctgtctggttctctctctccagaaggttctgccggttcccccagctctgggtacccggctctgcatcgcgtcgccatgatgggccatcgtccagtgctcgtgctcagccagaacacaaagcgtgaatccggaagaaaagttcaatctggaaacatcaatgctgccaagactattgcagatatcatccgaacatgtttgggacccaagtccatgatgaagatgcttttggacccaatgggaggcattgtgatgaccaatgatggcaatgccattcttcgagagattcaagtccagcatccagcggccaagtccatgatcgaaattagccggacccaggatgaagaggttggagatgggaccacatcagtaattattcttgcaggggaaatgctgtctgtagctgagcacttcctggagcagcagatgcacccaacagtggtgatcagtgcttaccgcaaggcattggatgatatgatcagcaccctaaagaaaataagtatcccagtcgacatcagtgacagtgatatgatgctgaacatcatcaacagctctattactaccaaagccatcagtcggtggtcatctttggcttgcaacattgccctggatgctgtcaagatggtacagtttgaggagaatggtcggaaagagattgacataaaaaaatatgcaagagtggaaaagatacctggaggcatcattgaagactcctgtgtcttgcgtggagtcatgattaacaaggatgtgacccatccacgtatgcggcgctatatcaagaaccctcgcattgtgctgctggattcttctctggaatacaagaaaggagaaagccagactgacattgagattacacgagaggaggacttcacccgaattctccagatggaggaagagtacatccagcagctctgtgaggacattatccaactgaagcccgatgtggtcatcactgaaaagggcatctcagatttagctcagcactaccttatgcgggccaatatcacagccatccgcagagtccggaagacagacaataatcgcattgctagagcctgtggggcccggatagtcagccgaccagaggaactgagagaagatgatgttggaacaggagcaggcctgttggaaatcaagaaaattggagatgaatactttactttcatcactgactgcaaagaccccaaggcctgcaccattctcctccggggggctagcaaagagattctctcggaagtagaacgcaacctccaggatgccatgcaagtgtgtcgcaatgttctcctggaccctcagctggtgccagggggtggggcctccgagatggctgtggcccatgccttgacagaaaaatccaaggccatgactggtgtggaacaatggccatacagggctgttgcccaggccctagaggtcattcctcgtaccctgatccagaactgtggggccagcaccatccgtctacttacctcccttcgggccaagcacacccaggagaactgtgagacctggggtgtaaatggtgagacgggtactttggtggacatgaaggaactgggcatatgggagccattggctgtgaagctgcagacttataagacagcagtggagacggcagttctgctactgcgaattgatgacatcgtttcaggccacaaaaagaaaggcgatgaccagagccggcaaggcggggctcctgatgctggccaggagtgagtgctaggcaaggctacttcaatgcacagaaccagcagagtctccccttttcctgagccagagtgccaggaacactgtggacgtctttgttcagaagggatcaggttggggggcagcccccagtccctttctgtcccagctcagttttccaaaagacactgacatgtaattcttctctattgtaaggtttccatttagtttgcttccgatgattaaatttaagtcatttgaaaaaaaaaaaa

SEQ ID NO: 611 - DNA, 1731 bp, Homo sapiens
  CDS (188)..(1108)
ttgaacccatcgacgcctgcaggtaccggtccggaattcccgggtcgacccacgcgtccgctgggctggaccgaaaccggcgcggagcaactgaggcccgagccttctcgggacccgggggacgcctaaccccgcgagaaccctgcaaattttcttcctcataattgggagaagactcactggccgaatggcagcagtagatgacttgcaatttgaagaatttggcaatgcagccacttctctgacagcaaacccagatgccaccacagtaaacattgaggatcctggtgaaaccccaaaacatcagccaggatccccaagaggctcaggaagagaagaagatgatgagttactgggaaatgatgactctgacaaaactgagttacttgctggacagaagaaaagctcccccttctggacatttgaatactaccaaacattctttgatgtggacacctaccaggtctttgacagaattaaaggatctcttttgccaatacccgggaaaaactttgtgaggttatatatccgcagcaatccagatctctatggccccttttggatatgtgccacgttggtctttgccatagcaattagtgggaatctttccaacttcttgatccatctgggagagaagacgtaccattatgtgcccgaattccgaaaagtgtccatagcagctaccatcatctatgcctatgcctggctggttcctcttgcactctggggtttcctcatgtggagaaacagcaaagttatgaacatcgtctcctattcatttctggagattgtgtgtgtctatggatattccctcttcatttatatccccaccgcaatactgtggattatcccccagaaagctgttcgttggattctagtcatgattgccctgggcatctcaggatctctcttggcaatgacattttggccagctgttcgtgaggataaccgacgcgttgcattggccacaattgtgacaattgtgttgctccatatgctgctttctgtgggctgcttggcatacttttttgatgcaccagagatggaccatctcccaacaactacagctactccaaaccaaacagttgctgcagccaagtccagctaatgaggaaagactcacttgagataccctctccttgctgaagtttttcttgacttctccagttctcttttgttttttggagcatggttctttgggaagtggcatccactgcaggaaagcagaatgagcagagccagcagaactgatggagtggcacaaattcccagtgtctggatggtgccacactggcgcctaatcacccgtttaacaagcagaaattaaatgttgctcagcacatgtgtctttcagctcttccttttcacccatggatgatcattgcgagcatgcgctgattggactgaaatgccggggaataggttaggcatgctcagtgccgtccctttgccaccacagtcaaatgacatgcttcactgtggtaccttaatacctgaaatagaaccatggaaaattctgatgtcctctctctgaattatgtacagactacctgggggatcctcttctctccaaatgttagccatcctgaagtagccgaacagtagaaactttggtggggattaaccgggagcttgaaaatttgtctttggtaacctgatactggacagctgaactgaatggctgcaaaataaatacctcacatgatgtctgtgtctgcaaaaaaaaaaaaa

SEQ ID NO: 612 - DNA, 1717 bp, Homo sapiens
  CDS (86)..(331)
aattcccgggtcgacgatttcgtccgcgcacctgcagcgcccgctgctcggccctgcatcctgcctgggcatcctgcgcccggccatgacggcgcactcattcgccctcccggtcatcatcttcaccacgttctggggcctcgtcggcatcgccgggccctggttcgtgccgaagggacccaaccgcggagtgatcatcaccatgctggtcgccaccgccgtctgctgttacctcttctggctcatcgccatcctggcgcagctgaaccccctgttcgggccccagctgaagaatgagaccatctggtacgtgcgcttcctgtgggagtgacccgccgcccccgacccaggtgcccagctctcggaatgactgtggctccactgtccctgacaaccccttcgtccggaccctcccccacacaactatgtctggtcaccagctccctcctgctggcacccagagacccggacccgcagggcctgcctggttcctggaagtcttcccagtcttcccagccagcccgggccctggggagccctgggcacagcagcggccgaggggatgtcctgctccaatacccgcactgctctggagtttgccctctttcccaaggagatgctgctggggagctggtatgggtggggtctttccctttacagacggggcagatgccaggactcagcccatcctgaggaggacacgtgtcctcatggagagggtgctccggcccaggcgggggagtcggtgcccagtcagcagctctgccaccatcctgctgggaactgggggggcctctattgggttataggcaaggccttttctctggcatggaattgttaattttctgacacgtctagatgtgaaatttctgaaaatgttgaagcagagaaacattcacacacaaaaagcaacatagtcatgtgggtccagatggcctcagtcctagatgttggcaccctttgctgtgtctcctcagagtatcctgttccgcctcctgccacctggacctccctcagtggatgtcttccctcccccgaccccagcctgtcagtccgagcacagtgcaggtttggctctgacttgggcctttggctgcagtgggggtggatttcagagcctctcatggcagcatctaagtgaccagagctgggatgagagaggggaaggggcaatgtgagtggcgctatgggacgggccagccctgctcctgagccagccccgccctctgccccctggccctgggctctgtgctagggatggtgaagaatgggggcgtgccagcctggcaggagtgggaagcaacacgcaggggtcccggacctctccagccttgccctcacgcttacccgagctcccagtgtggttagcacagagctcacccaccttgcctggctcccagctggggcctgtcctcactggtgctccaggggaagaaacgacagcctcacttctgtatggactgctgatgtggcctgccatcctgttcagcgggcattgtctttggagcagcaggagaataggatgcctctcactcacatgccagttcctggctggccagctgctcagggctcaggctggggcctcccattgacatcctccccctacactccctctctgagcctccgtcgcccctcctgttgggtaagggtgttgagtgtgacttgtgctgaaaacctggttcatatataataaataatggtgatgaaaaaaaaaaaa

SEQ ID NO: 613 - DNA, 2215 bp, Homo sapiens
  CDS (6)..(1160)
cgtggatgatgtatataactatctattcgatgatgaagataccccaccaaacccaaaaaaagagatctctcgaggatccgaattcgcggccgcgtcgaccgcggtctatggctgcgacttctctaatgtctgctttggctgcccggctgctgcagcccgcgcacagctgctcccttcgccttcgccctttccacctcgcggcagttcgaaatgaagctgttgtcatttctggaaggaaactggcccagcagatcaagcaggaagtgcggcaggaggtagaagagtgggtggcctcaggcaacaaacggccacacctgagtgtgatcctggttggcgagaatcctgcaagtcactcctatgtcctcaacaaaaccagggcagctgcagttgtgggaatcaacagtgagacaattatgaaaccagcttcaatttcagaggaagaattgttgaatttaatcaataaactgaataatgatgataatgtagatggcctccttgttcagttgcctcttccagagcatattgatgagagaaggatctgcaatgctgtttctccagacaaggatgttgatggctttcatgtaattaatgtaggacgaatgtgtttggatcagtattccatgttaccggctactccatggggtgtgtgggaaataatcaagcgaactggcattccaaccctagggaagaatgtggttgtggctggaaggtcaaaaaacgttggaatgcccattgcaatgttactgcacacagatggggcgcatgaacgtcccggaggtgatgccactgttacaatatctcatcgatatactcccaaagagcagttgaagaaacatacaattcttgcagatattgtaatatctgctgcaggtattccaaatctgatcacagcagatatgatcaaggaaggagcagcagtcattgatgtgggaataaatagagttcacgatcctgtaactgccaaacccaagttggttggagatgtggattttgaaggagtcagacaaaaagctgggtatatcactccagttcctggaggtgttggccccatgacagtggcaatgctaatgaagaataccattattgctgcaaaaaaggtgctgaggcttgaagagcgagaagtgctgaagtctaaagagcttggggtagccactaattaactactgtgtcttctgtgtcacaaacagcactccaggccagctcaagaagcaaagcaggccaatagaaatgcaatatttttaatttattctactgaaatggtttaaaatgatgccttgtatttattgaaagcttaaatgggtgggtgtttctgcacatacctctgcagtacctcaccagggagcattccagtatcatgcagggtcctgtgatctagccaggagcagccattaacctagtgattaatatgggagacattaccatatggaggatggatgcttcactttgtcaagcacctcagttacacattcgccttttctaggattgcatttcccaagtgctattgcaataacagttgatactcattttaggtaccaaaccttttgagttcaactgatcaaaccaaaggaaaagtgttgctagagaaaattagggaaaaggtgaaaaagaaaaaatggtagtaattgagcagaaaaaaattaatttatatatgtattgattggcaaccagatttatctaagtagaactgaattggctaggaaaaaagaaaaactgcatgttaatcattttcctaagctgtccttttgaggcttagtcagtttattgggaaaatgtttaggattattccttgctattagtactcattttatgtatgttacccttcagtaagttctccccattttagttttctaggactgaaaggattcttttctacattatacatgtgtgttgtcatatttggcttttgctatatactttaacttcattgttaaatttttgtattgtatagtttctttggtgtatcttaaaacctatttttgaaaaacaaacttggcttgataatcatttgggcagcttgggtaagtacgcaacttacttttccaccaaagaactgtcagcagctgcctgcttttctgtgatgtatgtatcctgttgacttttccagaaattttttaagagtttgagttactattgaatttaatcagactttctgattaaagggttttctttcttttttaataaaacacatctgtctggtatggtatgaaaaaaaaaa

SEQ ID NO: 614 - DNA, 1305 bp, Homo sapiens
  CDS (100)..(1161)
cggtaccggtccggaattcccgggtcgacgatttcgtgtagacgaggacgccaacagcagcggagaaacgtttctctttcctctcagtttgcgcacaccatggcggcccctgcccagcagactactcagcctggcggcgggaagcgcaaaggcaaggctcagtatgtgctggccaagcgcgctcggcgctgcgacgctggcgggccccgtcagctagagcccgggctacagggcatcctcatcacctgcaatatgaacgagcgcaagtgcgtggaggaggcctacagcctcctcaacgaatacggcgacgacatgtatgggccagaaaagtttacagacaaggatcagcagccctctggaagtgagggagaggatgatgatgcggaggctgccttgaagaaagaagttggtgacattaaggcatctacagagatgaggttaagaagattccagtcagtggaaagtggagcaaataacgttgtcttcatcaggacacttgggatagagcctgagaaattggtgcatcatattctccaggatatgtacaaaaccaagaaaaagaagactcgagttattttgcgaatgttacccatctcaggcacatgcaaggcttttttagaagatatgaaaaaatatgcagaaacatttttggaaccctggtttaaagctccaaacaaagggacatttcagattgtgtacaaatctcgaaataacagtcatgtgaatagagaagaagttatcagagaattggcaggaatagtgtgcaccctcaattcagaaaataaagtggatctcaccaatccacagtacacagtggtagtagaaatcatcaaagctgtctgttgcctgagtgttgtgaaagattacatgttgtttagaaaatacaatctccaggaggtggtgaagagccctaaggatccgtcacagcttaactcaaagcagggaaatgggaaagaagctaaactggaatctgcggacaaatcagaccaaaacaacacagcagaaggaaaaaataaccagcaggtaccagagaatactgaggagctggggcagacaaaaccaacgtctaatccacaggtggtaaatgagggaggagccaaacctgaacttgcaagtcaagccacagaaggatccaagtcaaatgaaaatgacttctcataggaagtcatttggtgttggagctgacagtccagtgtcgcaattttggaaggcaagatgtgagagagacgagaaccattttaggcatagaactacagacatttctgaaaaggttggtgatgaagaacttcagtcttctgagtatac

SEQ ID NO: 615 - DNA, 5288 bp, Homo sapiens
  CDS (116)..(3571)
acaacagcagaagcttctgaaagtcctccaggccgtcgaaagtgactctgcccatctcggcagggtggtttcaccaaccaaggagcaagtatcagacacagaggacaaacagagaatgagggcagacgagatcaaagatgccatctacgtgaccatggagatcctgtccaactggggcaactcgtggtgggtgggtctcacagaagtcgagttctttgacttgaatgacacaaagctttatgtgtcgccccacgatgtggatatccggaacacagccacgcctggggagctgggccgcctcgtcaacaggaacttagctggcaagaaagactcctccccgtggacctgccccttccacccaccactccagctgttttttgttattcgaaacacaagacagctgggggacttccatctggccaagatcaaggttcggaattactggacagctgatggcgatcttgacattggtgccaagaacgtgaagctttacgtcaacagaaacctcatcttcaatggcaagttagacaaaggagatagggaggccccagctgaccacagcatcctggttgaccagaagaacgagaagagcgagcaactagaggaggccatgaacgctcactcggaagaaagcaaaggcacccatgagatggctggtgccagcggggacaaggagcttggtctcggttgctcaccgccagctgaaacattagcggatgcaaagctttcttcacaaggaaatgtgtctggcaaaagaaagaattctactaattgcaggaaagacagtttgtcccagttagaggaatatttgagactgtcggcagtccccacttcgatgggtgacatgcccagtgctcctgccacttccccacctgtgaagtgccctcctgtccatgaggagccctctctcatccaacaactggaaaacctcatgggcagaaaaatctgtgagccacccgggaaaaccccatcctggttacaaccttctcccaccggcaaggacaggaagcagggaggcaggaagccaaaacccctctggcttagtcccgagaagcccctggcctggaagggcaggctcccatcagacgatgtcatcggtgagggtcctggagagaccgaggccagggataaaggcctacggcatgagccagggtgggggaccagccggagtgtcaacaccaaggagagaccccagagggcaaccaccaaagtccacagtgatgactcagacatctttaaccagccccccaacagagagcgccctgctagtgggaggaggggctcaaggaaggatgctggcagcagtagtcatggggacgaccagccagccagcagagaagacacctggtcttccaggacgccgtcacggtcaaggtggcgcagtgagcaggagcacacacttcacgagtcatggagctccctcagtgccttcgaccgctcccaccggggacgcatctccaacacggagctcccgggggacatcctggatgagctcctgcagcaaaagagcagccggcacagcgacttgcccccctccaagaagggggagcagccagggctgtcgagagggcaggatggctactctggagagacagacgctgggggtgactttaaaatccccgtcttgccttatggacagcgcttggtcattgacatcaagtctacctggggggacagacactatgtcggcctcaacggaatagaaatattcagttccaagggtgaaccggtgcagatttcaaacataaaagcagaccctcccgatatcaatattttaccagcctatgggaaagacccccgcgtggtcaccaacctcatcgacggggtgaacaggacccaggatgacatgcatgtctggctggcccccttcacgcggggcagatcccactccatcaccattgacttcacgcacccttgccacgttgccctgatcagaatttggaactacaataaatctcggatacattccttccgaggcgtgaaggacatcacaatgctgttagacacccagtgcatctttgaaggagaaatcgccaaggcctctggaaccctggcgggagccccagagcactttggagacacgatcttattcacaaccgatgatgacattctcgaggccatattctattctgatgagatgtttgacctggatgtggggagcctggacagcctgcaggatgaagaggcaatgaggaggcccagcacggccgacggcgagggggatgagcggcccttcacccaggctggcttgggggctgatgaacggatcccggagctagagctcccatccagttcccctgtcccccaagtcaccacgccagagccaggcatctaccacggaatctgccttcagctgaatttcactgcctcctggggagacttgcactacctggggctcactggcctggaagtggtgggcaaggagggccaggcgctgcccatccacctgcaccagatctctgcttcccccagagacttaaatgagctccccgagtactctgacgactcccggaccctggacaagttaattgatggcaccaacatcaccatggaggatgagcatatgtggctgatccccttctcgccggggctggaccatgtggtcacgatccgcctggacagggccgaaagcatcgcaggcctgcgcttctggaactacaataaatctcccgaggacacctatcgcggggccaagattgtccacgtctccctggatggcctgtgcgtctccccgccagagggctttctcatccggaaggggccaggcaactgccactttgattttgctcaagaaatcctcttcgtggactacctacgggctcagctgctgccccagccggccaggaggctggacatgagaagcctggagtgtgcaagcatggactacgaggcaccgctgatgccctgtggcttcattttccagtttcagcttctcaccagctggggcgacccctactacatcggcctcaccggcctggagctgtatgacgagcgaggagaaaaaatccccttgtcggaaaacaatattgcggccttccccgacagcgtgaactccctggagggtgtgggcggggacgtccgcaccccagacaagctcatcgaccaagtgaacgacaccagtgatggccggcacatgtggctggctcccatcctgccgggcctggtgaaccgggtttatgtgattttcgatctgcctaccaccgtgtcaatgatcaaactgtggaattatgcgaaaacaccccatcgaggggtgaaggagtttggcctcctggtggacgacctgcttgtgtacaatgggatcctggccatggtgagccacctggtggggggcatcctgcccacatgtgagcccaccgtgccctaccacaccatcctcttcaccgaggacagggacatccgccaccaggagaaacacaccaccatcagtaatcaggccgaggatcaagatgtccagatgatgaatgaaaaccaaaccattaccaacgcgaaacggaagcagagcgttgttgacccagccttacgtcccaaaacctgcatcagcgagaaggagacgagacgacggcgctgctgactggtgaaggagggagagctggtcctcccactatggtgggctccgtcagcagccccactcagtgcctgcgtccctcaccctcagtcccaggagctggaagcgaaccacagtgttgaggggagcccgctgggaagaggggactcgggaggacagccctggatactaccagagtgacagatggctgtggctgcagggcaaagagatcccctgcagttctgggttggccacagggagcccaggacacccgccttcatgcctctgctgtgagacccagcaaagcagggcccatgaccactagggcctgggctgaccctgactcagaacaggacaatgacggggtggggaggcatcccatccagcctcagagggcccagagaatggctgagcaggacagtgggagaccagaccctaccccgcaactccagtaagcagggcactgcccagggagactgccttcagaaacctgagcttcagcggccaacaccccccatcccctgcgcatccttgtctcatttggggactggtggagctggctgagaggttggggtagtttcctggttacaggggtccacaagaccctctctcatcccggtataggggcctctctcctctcatcgggcctgataagggattggccaaggctgtgtgcatcctgcagagggaaggaagtcagctgggccacccgccatccaccttggcaagagctgggcccactctggcaggccagggtattatctgcgtgctgctgccgggccaggaagggtgggtgggtggccagcaggctggcagctccagaccccagagggccagaagaactcaccccagtgccctctggatgcaggtgttggggaacactgaggacaatcccccatctcccctcacccttgagcaggccctccctgcactctctgccacatgtccctcctggtctgatcacggctgtgctcactgatgtggctgctttctgtctctgcccctgtgcccttggaggcaggcagtgaggtgctcctttcccaggcccccaccccttctcccccttcagccacttcccagcgagttggaaatgtgccttgcacccccagccgagtgaagcccagaacgcatctatatgcatcgatgtaacaagctcggatcagggacctaattggtttcccagtagtgggtaatttctcgttgcaaatattaatccgttgtttttctggcgcccagcccggcccgccgcagtactgtactcgaggtacgttcctatgcaaccgagagccccggcaaatacttcatgagcttagcagcctgggctcgagcagctatgcaaacgcgcttttcatttggagcacggggctgatgtgaagataagaattgtttctcctggagaaagatccatcatttctccagcttccaagcccccggcacctctgctcagctcccagatgtgacgagcacctcccgccagggggagtcaggggttgatcaaaccagctcttgtgacccaaaccagtgccgctgcattaaagggaggcccagctactccttcccagctgagatgtgggtacaggtcagatttgtcagggagatggcactaacacgacacaagctcactcccagaaccgcagctgatgtttataataatcgtatgtactgtgcaatttaggaggggaaaaaaaggctgtacaagctttaactctaaaataaatttctatttttttcctcttgcaaaatt

SEQ ID NO: 616 - DNA, 1993 bp, Homo sapiens
  CDS (131)..(1726)
gcaattcggagctagaatattcgcctggatatgagaggcaccacgatgagcacagggaggaaccctcagtgctgcgtctagattctgcaggggaggtttgctgggaccttggctccacccagccagcgaaatggcagccacactcgatttgaaatcaaaggaggagaaggatgctgagttggacaagaggatcgaggctcttcggcggaagaatgaggccctcatccggcgctaccaggagattgaggaagaccgtaagaaagctgaacttgagggagtcgcagtcacagctccccgaaagggccgctcagtggagaaggagaacgtggcagtggagtcggagaagaacctgggtccttcccggaggtctcctgggacccctcggcccccaggggccagcaaggggggccggactcctccacagcagggaggccgggccggcatgggccgagcatcgcgcagctgggagggcagccccggggagcagcctcgaggaggaggagctgggggccgtggccggaggggccggggccgaggttcacctcacctctctggagctggagacacctcaatctctgaccgtaaatccaaggagtgggaggagcggcgcaggcagaacattgagaagatgaatgaggagatggagaagatcgccgagtatgagcgcaaccagcgggaaggggttcttgaacccaacccagtgcggaacttcctggacgacccccggcgacgcagcgggcccctggaggagtctgagcgggaccgccgggaggagagccgccggcacggccgcaactgggggggccccgacttcgagcgggtgcgctgtggccttgagcacgagcggcagggccgccgagctggcctgggcagtgctggagacatgacgttgtccatgacgggccgggagcggtcggagtacctgcgctggaagcaggagagggagaagatcgaccaggagcggctgcagaggcaccgcaagcccactggccagtggaggcgcgagtgggatgccgagaagaccgatgggatgttcaaggatggcccagtccctgcccatgaaccatcccaccgctatgatgaccaggcctgggcccggcccccgaagccccctacttttggggagttcctgtcccagcacaaagctgaggccagcagccgcagaaggagaaagagcagtcggccccaggccaaggcagcgcccagggcctacagtgaccatgatgaccgctgggagacaaaagaaggggcagcatccccagcccctgagactccacagcctacttcccccgagacttcccccaaggagacacccatgcagccacccgagatcccagctcctgcccaccggcctcctgaagacgagggggaagagaatgagggggaagaggatgaagaatgggaggacataagtgaggatgaggaagaggaggagatcgaggtggaagaaggtgatgaggaggaaccagcccaagaccaccaagccccagaggctgcccccaccgggatcccctgcagtgagcaggcccacggagtccccttcagtccggaggagcccctgctggagccccaggcccctggcacgccttccagccctttctcaccacccagcggccaccagcctgtgtccgattggggtgaagaggtggagctgaattctccccggaccactcacctggctggcgccctctccccgggtgaggcctggccttttgagagtgtatgaagctggctgcctgtgtgtgtgtgtgtgtgtgtgtgtgtgtgtgtgtgtgtgcgcgcgcgcgcgcgcgcgcgcgcgctagaggggtgtggctggtgggggacccttggggctgggccctgggacccagtgtgccccacagccctgtcagctgagggggtagcgcagcccatgctcttctgtactgtcatgcccgtctctggaatgtccactcccagagcctgccccagcccttcgagccccctccccaataaagaattcacatcctcc

SEQ ID NO: 617 - DNA, 2606 bp, Homo sapiens
  CDS (121)..(807)
tgacactatagaatactcaagctatgcatccaacgcgttgggagctctcccatatggtcgacctgcaggcggccgcactagtgattttcccgggtcgacgatttcgtgcggagacggcaaatggcggacttcgacacctacgacgatcgggcctacagcagcttcggcggcggcagagggtcccgcggcagtgctggtggccatggttcccgtagccagaaggagttgcccacagagcccccctacacagcatacgtaggaaatctacctttcaatacggttcagggcgacatagatgctatctttaaggatctcagcataaggagtgtacggctagtcagagacaaagacacagataaatttaaaggattctgctatgtagaattcgatgaagtggattcccttaaggaagccttgacatacgatggtgcactgttgggcgatcggtcacttcgtgtggacattgcagaaggcagaaaacaagataaaggtggctttggattcagaaaaggtggaccagatgacagaggcttcagggatgacttcttagggggcaggggaggtagtcgcccaggcgaccggcgaacaggcccccccatgggcagccgcttcagagatggccctcccctccgtggatccaacatggatttcagagaacccacagaagaggaaagagcacagagaccacgactccagcttaaacctcgaacagtcgcgacgcccctcaatcaagtagccaatcccaactctgctatcttcgggggtgccaggcctagagaggaagtcgttcaaaaggagcaagaatgagcctgcggttgggagggaatggggcgtggggggttagagcaggaccacagcctggtgagtccccgggcagccgtcctgcagccgccactcctgcgcctgccattggcctcctcacagcggaaacacagcttgtgagtgcatgtcagctgttaacaagtggtttttagtacattctgggctttgctgtatctatctagtgcctgtttgtgcgtttttttctttcttccgctgcttccccattttccttctgtcctttttctcctgctccttgttttcccagcagcacatggggttcctcggaggagcagaggtggccgccgtgggggggcgtttgggctgcggtgctgcgtcatttttcctttgctttctctttactttagacactggcccaactccaggcgtttcctttcattccctcagtgcttctcttctgacctgcatgttgagttctgtattgctggggcttccaacaaaaaccagagtcactgacagagggaacagcagagaccttgttggtattcagctgtgatggatatagagaatcagaggcaccttgttttcacaactaggataaaaatatctgcagggtcctttccattcctatttagagggagtcctggctccatgaccccctcccgagtggactgtccaagcagataggctcacacgagaaacagtgaggctgaaagggggggctatggaagagcggtagggagtccacggagaagatgcagtgaatgcttgcatgcattcacacgtgtgtgtgtcccagctagttcactcctttcgccgtgcgtggtggaggctggcctctctggctgggtgcagtgaatggccagcgggtttcttttctgctgggccaaggcgctttgggggtggagggggtggtgctggtgctgcactgggctgactgcggcgctgacgcagcgtttccccccatccctgttgcctgtgtgttgtgtggatctgttcctagtataggcaacataatgagatactgtgcttcccacctccccttcagttcagagccaaaatgggtctagaatctggcactttactcatttcctttgataaattgtactatgcagagctgtcaggaaccttcagatagcagtagaggactgcagctgtctaggtctgcggccacatcttggggacacactggactgttcccatgtgcagggttcagcagttatgtgggagtgctaggggttaggcttttgagcttgaacgcctgcgtgtgaacagatgaaaaatccttcagtacccaagtcccagtctgtcctatggggagcagtttgggggcggccggcagcaggagcctgggaaagaggccctcgccaggtgatggcagggccagggtggcctggggcacccagcggaatgtgcttagtatttggtcaccagccgtcatcctgggcttttcctactgtgtcttgttacaaggcctcagcaatccacagaactctctctccttccttccacctgtcagcttctctgcttctgagataagaaccatttgtgtaacaccaacacttaacttcagaaagacatgcattatgtggtgtaatcaaacccgatgctttcagatgacctacttacatcttcaatgtggataagataaagaacaaaacacatgcatctaaactgctgggcaatccagttgacttttaaatgtaagaatggaattccaaacacttaacacattcagctatatgacagaaagtaaatctatggatatggtattttgtgaatgatcttttaaataaaagaaaaccttacgtaataaaaaaaaaaaa

SEQ ID NO: 618 - DNA, 2666 bp, Homo sapiens
  CDS (121)..(867)
tgacactatagaatactcaagctatgcatccaacgcgttgggagctctcccatatggtcgacctgcaggcggccgcactagtgattttcccgggtcgacgatttcgtgcggagacggcaaatggcggacttcgacacctacgacgatcgggcctacagcagcttcggcggcggcagagggtcccgcggcagtgctggtggccatggttcccgtagccagaaggagttgcccacagagcccccctacacagcatacgtaggaaatctacctttcaatacggttcagggcgacatagatgctatctttaaggatctcagcataaggagtgtacggctagtcagagacaaagacacagataaatttaaaggattctgctatgtagaattcgatgaagtggattcccttaaggaagccttgacatacgatggtgcactgttgggcgatcggtcacttcgtgtggacattgcagaaggcagaaaacaagataaaggtggctttggattcagaaaaggtggaccagatgacagaggaatgggtagctctcgagaatctagaggtggatgggattcccgggatgacttcaattctggcttcagggatgacttcttagggggcaggggaggtagtcgcccaggcgaccggcgaacaggcccccccatgggcagccgcttcagagatggccctcccctccgtggatccaacatggatttcagagaacccacagaagaggaaagagcacagagaccacgactccagcttaaacctcgaacagtcgcgacgcccctcaatcaagtagccaatcccaactctgctatcttcgggggtgccaggcctagagaggaagtcgttcaaaaggagcaagaatgagcctgcggttgggagggaatggggcgtggggggttagagcaggaccacagcctggtgagtccccgggcagccgtcctgcagccgccactcctgcgcctgccattggcctcctcacagcggaaacacagcttgtgagtgcatgtcagctgttaacaagtggtttttagtacattctgggctttgctgtatctatctagtgcctgtttgtgcgtttttttctttcttccgctgcttccccattttccttctgtcctttttctcctgctccttgttttcccagcagcacatggggttcctcggaggagcagaggtggccgccgtgggggggcgtttgggctgcggtgctgcgtcatttttcctttgctttctctttactttagacactggcccaactccaggcgtttcctttcattccctcagtgcttctcttctgacctgcatgttgagttctgtattgctggggcttccaacaaaaaccagagtcactgacagagggaacagcagagaccttgttggtattcagctgtgatggatatagagaatcagaggcaccttgttttcacaactaggataaaaatatctgcagggtcctttccattcctatttagagggagtcctggctccatgaccccctcccgagtggactgtccaagcagataggctcacacgagaaacagtgaggctgaaagggggggctatggaagagcggtagggagtccacggagaagatgcagtgaatgcttgcatgcattcacacgtgtgtgtgtcccagctagttcactcctttcgccgtgcgtggtggaggctggcctctctggctgggtgcagtgaatggccagcgggtttcttttctgctgggccaaggcgctttgggggtggagggggtggtgctggtgctgcactgggctgactgcggcgctgacgcagcgtttccccccatccctgttgcctgtgtgttgtgtggatctgttcctagtataggcaacataatgagatactgtgcttcccacctccccttcagttcagagccaaaatgggtctagaatctggcactttactcatttcctttgataaattgtactatgcagagctgtcaggaaccttcagatagcagtagaggactgcagctgtctaggtctgcggccacatcttggggacacactggactgttcccatgtgcagggttcagcagttatgtgggagtgctaggggttaggcttttgagcttgaacgcctgcgtgtgaacagatgaaaaatccttcagtacccaagtcccagtctgtcctatggggagcagtttgggggcggccggcagcaggagcctgggaaagaggccctcgccaggtgatggcagggccagggtggcctggggcacccagcggaatgtgcttagtatttggtcaccagccgtcatcctgggcttttcctactgtgtcttgttacaaggcctcagcaatccacagaactctctctccttccttccacctgtcagcttctctgcttctgagataagaaccatttgtgtaacaccaacacttaacttcagaaagacatgcattatgtggtgtaatcaaacccgatgctttcagatgacctacttacatcttcaatgtggataagataaagaacaaaacacatgcatctaaactgctgggcaatccagttgacttttaaatgtaagaatggaattccaaacacttaacacattcagctatatgacagaaagtaaatctatggatatggtattttgtgaatgatcttttaaataaaagaaaaccttacgtaataaaaaaaaaaaa

SEQ ID NO: 619 - DNA, 1002 bp, Homo sapiens
  CDS (399)..(686)
ctgacggccagtgaattgaatttaggtgacactatagaagagctatgacgtcgcatgcacgcgtacgtaagcttggatcctctagagcggccgcctactactactaaattcgcggccggtcgacttttttttttttttttaattcttcagctaaaacagcggaagaggtgatttattatatggttgttacactcggccacaaataaacacagaaatagtccagaatgtcacaggtccagggcagaggaccaacatgggcattttgtttatgagcaaggtgggtctcagaggtgatcggcgatcagagggcgatgaagttctagatccattgagacaagctctagacagtagcatgcagtcccacaacttgtaccagcatccccagcgtctggcattccatgtttctgctcctgtggcctccacggtgcaacaagctagcggtttacttggacctctgcctcatctttcttcttttgcgcttcagcctgcgcattcgcttcttcctccacttggctctcatggcgcagaggtttccaaaaaaatggcgctacccacgcgtccgcccacgcgtccgcggacgcgtgggtttttttggaaacctctgcgccatgagagccaagtggaggaagaagcgaatgcgcaggctgaagcgcaaaagaagaaagatgaggcagaggtccaagtaaaccgctagcttgttgcaccgtggaggccacaggagcagaaacatggaatgccagacgctggggatgctggtacaagttgtgggactgcatgctactgtctagagcttgtctcaatggatctagaacttcatcgccctctgatcgccgatcacctctgagacccaccttgctcataaacaaaatgcccatgttggtcctctgccctggacctgtgacattctggactatttctgtgtttatttgtggccgagtgtaacaaccatataataaatcacctcttccgctgttttagctgaagaattaaaaaaaaaaaaaa

SEQ ID NO: 620 - DNA, 1668 bp, Homo sapiens
  CDS (187)..(1236)
ttttgattaccgatgaccaagctggctagcgtttaaacttaagcttggtaccgagctcggatccactagtccagtgtggtggaattccctccgccacatcctccacctctcttggtccagcgagcgttgccgggccagggtcaagcggagggctccgacggcgcggacggagcgaagcgccgagccatggcgcaccaaacgggcatccacgccacggaagagctgaaggaattctttgccaaggcacgggctggctctgtgcggctcatcaaggttgtgattgaggacgagcagctcgtgctgggtgcctcgcaggagccagtaggccgctgggatcaggactatgacagggccgtgctgccactgctggacgcccagcagccctgctacctgctctaccgcctcgactcacagaatgctcagggcttcgaatggctcttcctcgcctggtcgcctgataactcccccgtgcggctgaagatgctgtacgcggccacgcgggccacagtgaaaaaggagtttggaggtggccacatcaaggatgagctcttcgggactgtgaaggatgacctctcttttgctgggtaccagaaacacctgtcgtcctgtgcggcacctgccccgctgacctcggctgagagagagctccagcagatccgcattaacgaggtgaagacagagatcagtgtggaaagcaagcaccagaccctgcagggcctcgccttccccctgcagcctgaggcccagcgggcactccagcagctcaagcagaaaatggtcaactacatccagatgaagctggacctagagcgggaaaccattgagctggtgcacacagagcccacggatgtggcccagctgccctcccgggtgccccgagatgctgcccgctaccacttcttcctctacaagcacacccatgagggcgacccccttgagtctgtagtgttcatctactccatgccggggtacaagtgcagcatcaaggagcgaatgctctactccagctgcaagagccgcctcctcgactccgtggagcaggacttccatctggagatcgccaagaaaattgagattggcgatggggcagagctgacggcagagttcctctacgacgaggtgcaccccaagcaacacgccttcaagcaggccttcgccaagcccaagggcccagggggcaagcggggccataagcgcctcatccgcggcccgggtgaaaatggggatgacagctaggaggctggagcagggccggccacgtgtggactgtggggctgcccaccttccgctccctgccaccatcctccttcctgggctccaggaaagtgtttctgggaggtcaggagggctggcagctgaacgcacttgcagcgtccgagggccaccgggctggcattttgtgacccttccctgttgctgtccctgcatctcgtctgtgtgcccagggtgtccggggaccctgcctggctggcttaagggggctgggtcaggggcctggcatgaacctggcctcccggggagctgagactagggtcccagcacagcccagaaacctttggccacaagaagtggggtcagtcagggctggggcaggggtcactgcagtttgggatggttgaatgctgtattttctaaagaataaaatatttttaaatcaaaaaaaaaaaa

SEQ ID NO: 621 - DNA, 2000 bp, Homo sapiens
  CDS (82)..(1872)
  misc_feature (1)...(2000): n = a,t,c or g
cccacgcgtccgctctggcgcctggttccgcgcgccggagcgcgctagccgcattgcgagccgaacccgggagctggcgccatggtgctgttgcacgtgctgtttgagcacgcggtcggctacgcgctgctggcgctgaaggaagtggaggagatcagtctgctgcagccgcaggtggaggagtccgtgctcaacctgggcaaattccacagcatcgttcgtctggtggccttttgtccctttgcctcatcccaggttgccttggaaaatgccaacgccgtgtctgaaggggttgttcatgaggacctccgcctgctcttggagacccacctgccgtccaaaaagaagaaagtactcttgggagttggggatcccaagattggtgccgcaatacaggaggagttagggtacaactgccagactggaggagtcatagctgagatcctgcgaggagttcgtctgcacttccacaatctggtgaagggtctgaccgatctgtcagcttgtaaagcacagctggggctgggacacagctattcccgtgccaaagttaagtttaatgtgaaccgggtggacaatatgatcatccagtccattagcctcctggaccagctggataaggacatcaataccttctctatgcgtgtcagggagtggtacgggtatcactttccggagctggtgaagatcatcaacgacaatgccacatactgccgtcttgcccagtttattggaaaccgaagggaactgaatgaggacaagctggagaagctggaggagctgacaatggatggggccaaggctaaggctattctggatgcctcacggtcctccatgggcatggacatatctgccattgacttgataaacatcgagagcttctccagtcgtgtggtgtctttatctgaataccgccagagcctacacacttacctgcgctccaagatgagccaagtagcccccagcctgtcagccctaattggggaagcggtaggtgcacgtctcatcgcacatgctggcagcctcaccaacctggccaagtatccagcatccacagtgcagatccttggggctgaaaaggccctgttcagagccctgaagacaaggggtaacactccaaaatatggactcattttccactccaccttcattggccgagcagctgccaagaacaaaggccgcatctcccgatacctggcaaacaaatgcagtattgcctcacgaatcgattgcttctctgaggtgcccacgagtgtattcggggagaagcttcgagaacaagttgaagagcgactgtccttctatgagactggagagataccacgaaagaatctggatgtcatgaaggaagcaatggttcaggcagaggcagaggaagcggctgctgagattactaggaagctggagaaacaggagaagaaacgcttaaagaaggaaaagaaacggctggctgcacttgccctcgcgtcttcagaaaacagcagtagtactccagaggagtgtgaggagatgagtgaaaaacccaaaaagaagaaaaagcaaaagccccaggaggttcctcaggagaatggaatggaagacccatctatctctttctccaaacccaagaaaaagaaatctttttccaaggaggagttgatgagtagcgatcttgaagagaccgctggcagcaccagtattcccaagaggaagaagtctacacccaaggaggaaacagttaatgaccctgaggaggcaggccacagaagtggctccaagaaaaagaggaaattctccaaagaggagccggtcagcagtgggcctgaagaggcggctggcaagagcagctccaagaagaagaaaaagttccataaagcatcccaggaagattagaatgcaaatggacattctctgggaggtggggcataccatagcccaaggtgacatttcccaccctgtgccgtgttccccaataaaaacaaattcacaagnnnnnnnnnnnnnnnnnnngggggggccgt

SEQ ID NO: 622 - DNA, 3228 bp, Homo sapiens
  CDS (339)..(2033)
gtttcattcatttgtttccccaatagatactaagtatttactttgtaccaaacacgatgccaggtactggggatacgatggttgattcgatagatctggttcctgccctcagtgcgtatactgctccccactttcgttgatgtggtagtggtgatgactgagccaaccacctaatgtggaaatgagaggacagcaagattgtgggtatggaatggggcaaagcaataagggaaaattagtgtggcagggttcagtacagcagcctgggttcccatttccccccatattcaaatgctgacactctcttctcctcccaggtccagcctgtggtgtccacaatgccccaggcctctgagcaccgcctgggccgtacccgagagccacctgttaatatccagccccgagtgggatccaagctaccatttgcccccagggcccgcagcaaggagcgcagaaacccagcctctgggccaaaccccatgttacgacctctgcctccccggccaggtctgcctgatgaacggctcaagaaactggagctgggacggggacggacctcaggccctcgtcccagaggcccccttcgagcagatcatggggttcccctgcctggctcaccacccccaacagtggctttgcctctcccatctcggaccaacttagcccgttccaagtctgtgagcagtggggacttgcgtccaatggggattgccttgggagggcaccgtggcaccggagagcttggggctgcactgagccgcttggccctccggcctgagccacccactttgagacgtagcacttctctccgccgcctagggggctttcctggaccccctaccctgttcagcatacggacagagccccctgcttcccatggctccttccacatgatatccgcccggtcctctgagcctttctactctgatgacaagatggctcatcacacactccttctgggctctggtcatgttggccttcgaaacctgggaaacacgtgcttcctgaatgctgtgctgcagtgtctgagcagcactcgacctcttcgggacttctgtctgagaagggacttccggcaagaggtgcctggaggaggccgagcccaagagctcactgaagcctttgcagatgtgattggtgccctctggcaccctgactcctgcgaagctgtgaatcctactcgattccgagctgtcttccagaaatatgttccctccttctctggatacagccagcaggatgcccaagagttcctgaagctcctcatggagcggctacaccttgaaatcaaccgccgaggccgccgggctccaccgatacttgccaatggtccagttccctctccaccccgccgaggaggggctctgctagaagaacctgagttaagtgatgatgaccgagccaacctaatgtggaaacgttacctggagcgagaggacagcaagattgtggacctgtttgtgggccagttgaaaagttgtctcaagtgccaggcctgtgggtatcgctccacgaccttcgaggttttttgtgacctgtccctgcccatccccaagaaaggatttgctgggggcaaggtgtctctgcgggattgtttcaaccttttcactaaggaagaagagctagagtcggagaatgccccagtgtgtgaccgatgtcggcagaaaactcgaagtaccaaaaagttgacagtacaaagattccctcgaatcctcgtgctccatctgaatcgattttctgcctcccgaggctccatcaaaaaaagttcagtaggtgtagactttccactgcagcgactgagcctaggggactttgccagtgacaaagccggaagtcctgtataccagctgtatgccctttgcaaccactcaggcagcgtccactatggccactacacagccctgtgccggtgccagactggttggcatgtctacaatgactctcgtgtctcccctgtcagtgaaaaccaggtggcatccagcgagggctacgtgctgttctaccaactgatgcaggagccaccccggtgcctgtgacacctctaagctctggcacctgtgaagccctttaaacacccttaagccccaggctccccgtttacctcagagacgtctatttttgtgtctttttaatcggggaggggggagcctggggcttaagggtgtttaaaagggccttcacaggtgcccaaaccttagaggtgtcacaggcaccggggtggctcctgcatcagttggtagaacagcacgtagccctcgctggatgcccaccctggttttcactgacaggggagacacgagagtcattgtagacatgccaaccagtctggcaccggcacagggctgtgtagtggccatagtggacgctgcctgagtggttgcaaagggcatacagctggtatacaggacttccggctttgtcactggcaaagtcccctaggctcagtcgctgcagtggaaagtctacacctactgaactttttttgatggagcctcgggaggcagaaaatcgattcagatggagcacgaggattcgagggaatctttgtactgtcaactttttggtacttcgagttttctgccgacatcggtcacacactggggcattctccgactctagctcttcttccttagtgaaaaggttgaaacaatcccgcagagacaccttgcccccagcaaatcctttctgggggaaaaggggaagaaaggtcaacatgttctgaatttccttttccaactcttctcaatcaatccaggcttcagttctgctccagaaacccacagggttcccgcccacactctgggggtgggtaggcttgggtcacagagcccctgtcctgtccaccccggaatcctctggaatcccaccttggggatgggcagggacaggtcacaaaaaacctcgaaggtcgtggagcgatacccacaggcctggcacttgagacaacttttcaactggcccacaaacaggtctagacagaagcacagggacaggagaaaaggtcattgttggatgttatgagatgatttcttggatttccatctcttcctgcccctttgcttgacccttcctttcccactaccaacactcctaatcaactcttcacacagcttcacatttgcatcatccagtcttgttcccgaattccaccacactggactagtggatccgagctcggtaccaagcttaagtttaaacgctagccagcttgggtgtacggaaatcaat

SEQ ID NO: 623 - DNA, 5396 bp, Homo sapiens
  CDS (495)..(2750)
tgttgcgtataccaaggagaaacaacctaaagatgctgtaagtaacagatcacaatctgttgacaccaaaaatgtaatgactttagggaagtcatcttttgtttcagataatagcttaaacaggtctcctagatcagaaaatgaaaagccgggtctcagctccagatctgtatccatgatttctgttgctagttcagaagattcctgccatactacagtgacaaccccaaggcctccagttgagtatgactctgactttatgttagagagttcagaatcccaaatgtccttttcccagtcacctttttttgtcaattgccaaatctcctgctcttcatgaaagggaattggacagcctggctgacttgccggagcggattaaaccaccatatgcaaacagactttcaacatcccatcttaggtcatcttctgtagaagatgttaaactaattataagcgaggggagacctaccatagaagttcgaagatgtagcatgccttctgtcatttgtgaacataccaaacaattccaaacaatatcagaagagagcaatcaaggtagcttattaactgtgccaggagatactagtccttctcccaaacctgaggtattctcaaatgtgcctgaaagagacctttcaaatgtatctaacatacattccagttttgcaacttctccaactggagcttcaaacagcaagtatgtttcagctgatagaaatctcatcaagaatactgccccagtgaacactgtaatggacagtccagtgcatttagagccatctagtcaggttggtgtgatccagaataaatcatgggagatgcctgttgatagactagagacattaagcaccagagactttatctgcccaaattctaacatacctgatcaagaatcctctcttcagagtttttgtaattctgaaaataaggtattgaaagaaaatgctgattttttatccctgcgccagactgaactgccaggaaactcttgtgctcaggatccggcatcctttatgcctccacagcagccttgctctttccccagccaatcactttcagatgctgaatcgatttctaaacatatgtctttgtcatatgttgctaatcaagagccaggtattttacaacaaaaaaatgcagttcagattattagttctgctttagatactgataatgaatctacaaaagatacagaaaatacttttgtcctaggagatgttcaaaaaacagatgcctttgtcccagtgtactctgacagcactattcaagaagcatcaccaaactttgagaaagcttatactttacctgtgttaccatcagaaaaggactttaatggaagtgatgcctctacccagctaaatacacattatgcatttagcaaactaacttacaagtcttccagtggccatgaagttgagaatagcacaactgatactcaggtcatttcacatgaaaaagaaaacaaactggagagtttggttttaactcatttgagtaggtgtgattctgatttatgtgaaatgaatgcagggatgccaaaaggaaacctaaatgaacaagatccaaaacattgtcctgaaagtgaaaagtgtttgctttccatagaagatgaggaatctcaacaaagcattttatcaagtctggaaaaccattcacagcagtcaactcaaccagaaatgcataaatatggtcagttagttaaagtagaattagaagaaaatgccgaagatgataaaactgaaaaccaaatccctcaaagaatgactagaaacaaagcaaatacaatggcaaatcaaagcaaacagattcttgctagctgtacactattatcagaaaaagacagtgaatcctcatctcctagaggaagaataagattaactgaagatgacgatcctcaaattcaccatccacggaaaaggaaagtgtcacgtgtacctcagcctgtgcaagtgagtccctctttactacaagcaaaagagaaaactcagcaatctctggcagccattgtagattctctaaaactagatgagattcagccatacagttcagagagagcaaatccatattttgaatacttgcacataaggaaaaaaatagaagaaaaacgcaaattactgtgtagtgtgattcctcaagcacctcagtactatgacgaatatgtaacatttaacggatcatatctcctggatggaaaccccttaagcaagatttgtattcccacaattacaccaccaccttcactgtcagatccacttaaagagctttttcgacaacaggaagttgtaaggatgaaactacgtttgcaacacagtattgaaagggaaaaactcattgtatccaacgaacaagaagttttgcgagttcattacagagctgcaagaacattggcaaatcaaacactgccatttagtgcttgtactgttttgctggatgccgaagtatacaatgtaccattggactctcagtctgatgacagtaaaacttctgtgagggatcgctttaatgcaagacaattcatgtcttggttacaagatgtggatgataaatttgacaaattaaagacctgtcttttaatgaggcaacaacatgaagctgcggctttaaatgctgtccagaggttagaatggcagctcaaactccaggaacttgatcctgccacctataaatctatcagcatttacgaaatccaggagttttatgttccccttgttgatgttaacgacgactttgaattgactcctatatagcagtcagtacttcctgatggtattgtcctaaactggtgatgctcaagcattatactgtggaatactgccttttgacaaaaatactcatgcctttacaattgttagtaaagttcgattatagttggttatgtagtaaacactgtcattttataaaaaatgagaattattttggatcttagatccaaacacagtttctaatagaaaactattatttatattgggaaaggtaactattgcattagagcatgttggcagactggtaggtatttaaaaagttgagaatctgctaacagcgctggaagttgttagcgctctaagtaataagataaccactagtattcaaatctctttcaggttttattaaaaaatatatatcaataaactaaaaggttcaattcctaccaaatagtttctaatgtgggagaaaaacttggcacaaaatctcttcagtttattatctgtaaattgtacagttttctttttgaaagttttaatattgtcttcctttttaataacttattttatacatattgtgcagatgtaaatcttgtaattaatggtcaaactgtataaagggattggtagtcaaaacatgtacaaagaaatacctgtaaaactgttttgtctcatgttttattggaccaaagttgtggtttgtatggagtgtagtagtagtgtgtacaggtagaaaacttttaaatacagcatgcaggtgtttcagttagcttgttttcatcaccataactgcaaagatgtggcttagttgtattgcatgcttcctataatttaactctccataattgatgcctgcagtagtgtaaggcatttcatactagtctcctctagtagacctgtgacttactgtgttggacatattatttagacttagtcatacaaagaaacttagctcttttttcatctcacagtaaagcctatttccccaggaaaaaaataaatgcctttgaatgaaaattctgaaattgtaaatgtctattttaatattcacctatgaaagaatctgtgaatatatgtaaatacgtttaataaattttattggtcatgttaaatcattgtaaaacttttttacattgcttaatgttttaagcttaatagcctttgcacttttaaaataaaaaccaagtatgcaaatcaaagatatttggtagtcaaaataagtaaaagaaatataggaatattccagtcaatctctgaaatgtttatgaaaaacaggttaatatgttgtatttttttccttgtatcaagatgcaaaacataatttgcaaaattttataattgaaataaaacttggtatgctgttttataataaattagcaatatactttaaaaaaaatccagtttctcctataacatgatgtaaattaaatattcaggaatatttcaggtctgaaatctgctgctgaacttgttagacatttttgaaaggaaaattaggttagcgtacaatttatcataaatatatgaggtaaaatttgcaaaactttccacagtactttcttgaattataatactgaatgttttctgttccgatagagaaaagtgaagcaaatatgtgaggaatgaagtgatctagtgcaagttggtaattccagctaatgggagagaatgtaaatgtgcaaaggtacatattaagcttagggatttttgaatttttacgtcagtttatattttaattcttactgtacttggcatgcgcaataaagcagcacatgtaaaaaaaaaaatacacagtgcaaggactttattataaaggttggatgtagttttccttagaaatttaggtgagagattttggccttttttattggataaattgggccagaaaggcagggtagatttcgaagcactggttctgttgaagttaagtttattaagcctgggaacattaaaagctaatttataaaagcaatactttttaatatgaaaacttactgcaaagtttgtttatacttttgcctaaaaaggaaattggatgggatactgtggcaaatcataaaaaaccagataattgaactttgaagttatagaaaatcagagaggggtaagtttatagggcattttgttctgatggttcaaccagaggtctgggaaatagcactgttggcccaaacagaacaggcttttagaagataaaagcgacaagaaggaatctggtgaattttagtcatcccagctttttagtcttaaccacagttctcactctcttaaatggtacctcaaaaagctggagcctctctgccatgattatgcttctacaaatttcttttataaagagactcaaagctaatgatagcttaaaagaaaagttaatgccttctcattggaaatgtataatcaaataagtagttaagggcttttggtattaaagatattctgaagctctgaaatgctagaaaaaaatttggaatggagtatatgcctgaaaaggttttggattcagaaagaaaaaggatggttagtttaatcagtgattctttttaaactcttcaaatatcatgaacaagatactaaattgtacctaaggatttgtatttctttacaatttgttctaaatatctgtttaatgactagttgatatttgtgcatgttatttaataaagagttatatttttatagaaaaaaaaaaaa

SEQ ID NO: 624 - DNA, 1617 bp, Homo sapiens
  CDS (662)..(1423)
ctgattacgcttagcttggcacgacggggcgcgctggcccctggggacgccgagggcggctgcgacgcgccgagaggccgcggctctcccacctgtcaccctggcccttctctgcttggatggtgtcttcctctcctcagccgagaatgacttcgtccaccggatccaggaggaactggaccgctttctgctgcagaagcagctgtcaaaggttcttcttttccccccactctccagtcgcctccggtacctgatccatagaacagcagagaattttgatctcttgagcagcttctccgttggggagggctggaagaggaggacggtcatctgtcaccaggacatcagggtacccagttcggatggcctctctggcccctgccgcgctcctgcctcctgccccagcaggtaccacggtcctcggcccatctccaaccaaggagcagctgcggttccccgaggtgcccgggctggccggtggtatcgtggacgcaagcctgaccagcctttgtatgtgccccgggtgctgcgcaggcaggaagaatgggggctgacctctacctcggtgctcaagagagaggccccagctggcagggacccagaagagcctggagatgttggtgctggagaccccaactctgatcagggactccctgtgctgatgactcagggaacagaggacctaaagggcccaggacaaaggtgtgagaatgagccactgctggaccctgttggccctgagcctctggggcctgagagtcagtcagggaagggagacatggtggagatggccacacggtttgggtccaccctgcagctagacctggaaaaggggaaggagagtctgttggagaagaggctggtggcagaggaggaagaggacgaagaggaggtggaagaggatggccccagcagctgctcggaggacgattacagtgagctgctgcaggagatcacagacaacctgacgaagaaggagattcagatagagaagatccatttggacacatcctccttcgtggaggagctgcctggagagaaggaccttgcccacgtggtagagatctatgactttgaaccagcgctcaagacggaggacctgctggcaacgttttctgagttccaagagaaggggttcaggattcagtgggtggatgatactcacgcactcggcatctttccctgcctggcctcagctgcggaagccctgacccgggagttctcggtgctcaagatccggcccctcacacagggaaccaagcagtcaaagctcaaagccttgcagaggccaaaactcctgcgtctggtgaaggagaggccacagacaaatgcgactgtggcccggcggctggtggcccgggccctgggactccaacacaaaaagaaagagcggcctgctgtccggggatccgtgccgccctgaggcctggagacccaactggcctggatctgcgtcccgaccgtagtggcgcccccaacaccataagccttcacagacgccagagcagccccgcaccaccctcgagcttcaccatggggtgtggtgggctttagtttagtcccagaaatggagaaaaaataaaaactcacgttgttctaatgtgaaaaaaaaaaaaa

SEQ ID NO: 625 - DNA, 2496 bp, Homo sapiens
  CDS (230)..(2098)
gttgaaggctgatgtgataactctctattcgatgatgaagataccccaccaaacccaaaaaaagagatctctcgaggatccgaattcgcggccgcgtcgaccggagctccaggtctcctcttcactactctgtgtcctgtgctcctacaggcccagcctctgtggccctgtgacctgcaggtattgggagatccacagctaagacaccaggacccctggaagcctagaaatgggaccattgcaatttagagatgtggccatagaattctctctggaggagtggcattgcctggacactgcacagcggaatctatataggaatgtgatgttagagaactacagtaacctggtcttccttggtattgttgtctctaagccagacctgatcgcccatctggagcaaggaaaaaaacctttgactatgaagagacatgagatggtagccaacccctcagggccagttatatgttctcattttgcccaagatctttggccagagcagaacataaaagattctttccaaaaagtgatactgagaagatatgaaaaacgtggacatggaaatttacagttaataaaaaggtgtgaaagtgtagatgagtgtaaggtgcacacaggaggttataatggacttaaccagtgtagtacaactacccagagcaaagtatttcaatgtgataaatatgggaaagtctttcataaattttcaaattcaaatagacataatataagacatactgaaaaaaaacctttcaaatgcatagaatgtggcaaagcttttaaccagttctcaacccttataacacataagaaaattcatactggagagaaaccctacatttgtgaagaatgtggcaaagcctttaagtactcctctgcccttaatacacataagagaattcatactggagagaaaccatacaagtgtgataaatgtgacaaagcctttattgcatcctcaacccttagtaaacatgagatcattcatactggaaagaaaccctacaagtgtgaagaatgtggcaaagcttttaaccaatcctcgacacttactaaacataagaaaattcatactggagagaaaccctacaaatgtgaagaatgtggcaaagcttttaaccaatcctcaacacttactaaacataagaaaattcatactggagagaagccctacgtttgtgaagaatgtggcaaagcctttaagtactcccgtatccttactacacataagagaattcatactggagagaaaccatacaagtgtaataaatgtggcaaagcctttattgcatcctcaacccttagtagacatgagttcattcatatgggaaagaaacattacaaatgtgaagaatgtggcaaagccttcatttggtcctcagtcctaactagacataagagagttcatactggagagaagccctacaaatgtgaagaatgtggcaaagcctttaagtactcctctacccttagttcacataagagaagtcatactggagagaaaccctacaaatgtgaagaatgtggcaaagcctttgttgcatcctcaacccttagtaaacatgagatcattcatactggaaagaaaccctacaagtgtgaagaatgtggcaaagcttttaaccagtcctcatcccttactaaacataagaaaattcatactggagagaaaccctacaaatgtgaagaatgtggcaaagcttttaaccagtcctcttcccttactaaacataagaaaattcatactggagagaaaccctacaaatgtgaagaatgtggcaaagcttttaaccagtcctcaacccttattaaacataagaaaattcatactagagagaaaccctacaaatgtgaagaatgtggcaaagcttttcacctatccacacaccttactacacataagatacttcatactggagagaaaccttatagatgtagagaatgtggcaaagcttttaaccattctgcaaccctttcttcacataagaaaatccattctggagagaaaccatacgagtgtgataaatgtggcaaagcctttatttcaccctcaagccttagtagacatgagataattcatactggggagaaaccctagaagtgtgaagaatgtggcaaagctctcaagtggtcctcacaccttactatacactgagagttctgaacttactctgtaaccatcccaaactcctctcaggcacagtctggcagaggtcctgccatttctgagacctggaggaagtggcccatttacagccatgtaggcaggcctgcagaccttgggctttactagggtacctgaagtggttcaatgactcagtttcaggttactgagccacagcttaaggtcagttctgactatatagaaagcacacagttaacctgaggacatgctctctggtactcacctgaaggcacactcatctacatcctgatacgaggcccactatatgcagaggtggctgtcaaaacagtcctagtgtctggcgtaagatg

SEQ ID NO: 626 - DNA, 1978 bp, Homo sapiens
  CDS (320)..(1504)
tctgaataagccctcgtaatatattttcatgaagaatttaggtccaaaaaaaagatgggcattaattctagtcatttaaaaaattctatagatcagaggttacatggccaagattgaaacttagaggagtatagttacataaaagaaggcaaaacgatgtataaatgaaagaaattgagatggtgcacgatgcacagttgaagtgaacttgcggggtttttcagtatctacgattcatagatctggaattcgcggccgcgtcgacggcagcgggacgcaccatttcagttgtgttcttggttcatttcgtgtctcggcgatgtttcctagagtctcgacgttcctacctcttcgccccctttcccgccaccctttgtcctctggaagcccggagacatcagcggctgcgattatgctactcactgttcggcacggaacagtcaggtaccgcagttcagcgctgttggcccggacaaaaaataacatccaaagatattttggcactaacagtgtgatctgtagcaagaaagataagcagtctgttcgaactgaggagacttccaaggagacttcagagagccaagacagtgaaaaggaaaatacgaaaaaagacttgttaggcattattaagggcatgaaagttgaattaagcacagtaaatgtacgaacaacaaagccccccaaaagaagaccacttaaaagtttggaagctacacttggcaggcttcgaagagctacagaatatgctccaaagaagagaattgagcccctgagtcctgagttggtggcagctgcatctgctgtggcagattctctcccttttgataagcaaacaaccaagtcagagctgctgagccagctccagcagcatgaggaagagtcaagggcacagagagatgcaaagcgacctaaaattagtttcagtaacataatatcagatatgaaagttgccagatctgctacagctagagttcgttcaagaccagagcttcggattcagtttgatgaaggctatgacaattatcctggccaggagaagacggatgatcttaaaaaaaggaaaaatatattcacagggaaaagacttaatatttttgacatgatggcagttactaaagaagcacctgaaacagacacatcaccttcactttgggatgtggaatttgctaagcagttagccacagtaaatgaacaaccccttcagaatggatttgaagagctgatccagtggacaaaagaggggaaactatgggagttcccaattaacaatgaagcaggttttgatgatgatggttcagaatttcatgaacatatatttctggagaaacacctggagagctttccaaaacaaggaccaattcgccacttcatggagctggtgacttgtggcctttccaaaaacccatatcttagtgttaaacagaaggttgaacacatagagtggtttagaaattattttaatgaaaaaaaggatattctaaaagaaagtaacatacagttcaattaagaccatggaaatttttatttcaaacaattagagatggatattacaactaaataaaataattttactagagtttgtatatgttatgttgattattacatttgatttggctggtataaatgttacattgttttcaaaaatatgatggtaactgaaaaatattcttgcatggagaaaaatcatcagtattcataggttcaaaagaatatctgggaattagtaatacatttaagacaacaactcctaacctttttcttttcactcggtgaccatacttctttgaaatacaatacaattactggatgatatcacagtactatgttataagagttgagatgatttatagacagatatatatgtacatacgtttatttgtttacatttatacatatattttacactaaattaactaccctcacctaagtctgggtcactatagagaaattaatcttgtagaaataaaaagtttattct

SEQ ID NO: 627 - DNA, 1951 bp, Homo sapiens
  CDS (320)..(1480)
tctgaataagccctcgtaatatattttcatgaagaatttaggtccaaaaaaaagatgggcattaattctagtcatttaaaaaattctatagatcagaggttacatggccaagattgaaacttagaggagtatagttacataaaagaaggcaaaacgatgtataaatgaaagaaattgagatggtgcacgatgcacagttgaagtgaacttgcggggtttttcagtatctacgattcatagatctggaattcgcggccgcgtcgacggcagcgggacgcaccatttcagttgtgttcttggttcatttcgtgtctcggcgatgtttcctagagtctcgacgttcctacctcttcgccccctttcccgccaccctttgtcctctggaagcccggagacatcagcggctgcgattatgctactcactgttcggcacggaacagtccggacaaaaaataacatccaaagatattttggcactaacagtgtgatctgtagcaagaaagataagcagtctgttcgaactgaggagacttccaaggagacttcagagagccaagacagtgaaaaggaaaatacgaaaaaagacttgttaggcattattaagggcatgaaagttgaattaagcacagtaaatgtacgaacaacaaagccccccaaaagaagaccacttaaaagtttggaagctacacttggcaggcttcgaagagctacagaatatgctccaaagaagagaattgagcccctgagtcctgagttggtggcagctgcatctgctgtggcagattctctcccttttgataagcaaacaaccaagtcagagctgctgagccagctccagcagcatgaggaagagtcaagggcacagagagatgcaaagcgacctaaaattagtttcagtaacataatatcagatatgaaagttgccagatctgctacagctagagttcgttcaagaccagagcttcggattcagtttgatgaaggctatgacaattatcctggccaggagaagacggatgatcttaaaaaaaggaaaaatatattcacagggaaaagacttaatatttttgacatgatggcagttactaaagaagcacctgaaacagacacatcaccttcactttgggatgtggaatttgctaagcagttagccacagtaaatgaacaaccccttcagaatggatttgaagagctgatccagtggacaaaagaggggaaactatgggagttcccaattaacaatgaagcaggttttgatgatgatggttcagaatttcatgaacatatatttctggagaaacacctggagagctttccaaaacaaggaccaattcgccacttcatggagctggtgacttgtggcctttccaaaaacccatatcttagtgttaaacagaaggttgaacacatagagtggtttagaaattattttaatgaaaaaaaggatattctaaaagaaagtaacatacagttcaattaagaccatggaaatttttatttcaaacaattagagatggatattacaactaaataaaataattttactagagtttgtatatgttatgttgattattacatttgatttggctggtataaatgttacattgttttcaaaaatatgatggtaactgaaaaatattcttgcatggagaaaaatcatcagtattcataggttcaaaagaatatctgggaattagtaatacatttaagacaacaactcctaacctttttcttttcactcggtgaccatacttctttgaaatacaatacaattactggatgatatcacagtactatgttataagagttgagatgatttatagacagatatatatgtacatacgtttatttgtttacatttatacatatattttacactaaattaactaccctcacctaagtctgggtcactatagagaaattaatcttgtagaaataaaaagtttattct

SEQ ID NO: 628 - DNA, 3504 bp, Homo sapiens
  CDS (211)..(2223)
tccagtgtaattgaatttaggtgacactatagaagagctatgacgtcgcatgcacgcgtacgtaagcttggatcctctagagcggccgccaactactactactaaattcgcggccgtcagaccacgtgcggccggaagggaagtaacgtcagcctgagaactgagtagctgtactgtgtggcgccttattctaggcacttgttgggcagaatgtcacacctgccgatgaaactcctgcgtaagaagatcgagaagcggaacctcaaattgcggcagcggaacctaaagtttcagggggcctcaaatctgaccctatcggaaactcaaaatggagatgtatctgaagaaacaatgggaagtagaaaggttaaaaaatcaaaacaaaagcccatgaatgtgggcttatcagaaactcaaaatggaggcatgtctcaagaagcagtgggaaatataaaagttacaaagtctccccagaaatccactgtattaagcaatggagaagcagcaatgcagtcttccaattcagaatcaaaaaagaaaaagaagaaaaagagaaaaatggtgaatgatgctgagcctgatacgaaaaaagcaaaaactgaaaacaaagggaaatctgaagaagaaagtgccgagactactaaagaaacagaaaataatgtggagaagccagataatgatgaagatgagagtgaggtgcccagtctgcccctgggactgacaggagcttttgaggatacttcgtttgcttctctatgtaatcttgtcaatgaaaacactctgaaggcaataaaagaaatgggttttacaaacatgactgaaattcagcataaaagtatcagaccacttctggaaggcagggatcttctagcagctgcaaaaacaggcagtggtaaaaccctggcttttctcatccctgcagttgaactcattgttaagttaaggttcatgcccaggaatggaacaggagtccttattctctcacctactagagaactagccatgcaaacctttggtgttcttaaggagctgatgactcaccacgtgcatacctatggcttgataatgggtggcagtaacagatctgctgaagcacagaaacttggtaatgggatcaacatcattgtggccacaccaggccgtctgctggaccatatgcagaataccccaggatttatgtataaaaacctgcagtgtctggttattgatgaagctgatcgtatcttggatgtggggtttgaagaggaattaaagcaaattattaaacttttgccaacacgtagacagactatgctcttttctgccacccaaactcgaaaagttgaagacctggcaaggatttctctgaaaaaggagccattgtatgttggcgttgatgatgataaagcgaatgcaacagtggatggtcttgaacagggatatgttgtttgtccttctgaaaagagattccttctgctctttacattccttaagaagaaccgaaagaagaagcttatggtcttcttttcatcttgtatgtctgtgaaataccactatgagttgctgaactacattgatttgcccgtcttggccattcatggaaagcaaaagcaaaataagcgtacaaccacattcttccagttctgcaatgcagattcgggaacactattgtgtacggatgtggcagcgagaggactagacattcctgaagtcgactggattgttcagtatgaccctccggatgaccctaaggaatatattcatcgtgtgggtagaacagccagaggcctaaatgggagagggcatgccttgctcattttgcgcccagaagaattgggttttcttcgttacttgaaacaatccaaggttccattaagtgaatttgacttttcctggtctaaaatttctgacattcagtctcagcttgagaaattgattgaaaagaattactttcttcataagtcagcccaggaagcatataagtcatacatacgagcctatgattcccattctctgaaacagatctttaatgttaataacctaaatttgcctcaggttgctctgtcatttggtttcaaggtgcctcccttcgttgatctgaacgtcaacagtaatgaaggcaagcagaaaaagcgaggaggtggtggtggatttggctaccagaaaaccaagaaagttgagaaatccaaaatctttaaacacattagcaagaaatcatctgacagcaggcagttctctcactgaacacatgccttcctttcatcttgaataactttgtcctaaaatgaattttttttccccttgatttaacaggatttttgtagactttagaatttggacttacctaacaagagtataaattgacttgggttgcaagcactgagcactgttacttctatcacgtctctcttttatttctgggatataaaacaggctttaagtttcttggttgcccaagggcagagcaaggaatatctggtgtttcttgtgatgataatattttaattttaaatatccctccctcatacaagtgtatgttaccattttaatataattctttttgtatctttccttcttgttttgtgaagatttttgtggcatggattgctgtgctcactgctgtaaaaggtgacctagtgtactgggcagctggtggtggtgcagaaaagagtctcaggttattttagatttgtttaattcaaggtggtttggatttggtaagcctttgcactctgtagagtacttagaagacaagggcaacttacttggagttagagccaagctgtcagacggtgcccagcacacattaatgttagcttctttctgagaaaaaaatacctcttccaggccctgaaacaaaaaatacatttgctgtgaagattgaaaatgaacaaagttagaaaaaaaaacagcaaaatcagtgatttagtcaatgagtttttcgttgtaggagcacttgatttctagtgtgttttgtacagtatataactacaagatagtacattttgtagcagttcaaagccaaagttgctagcatcattttgctgttgtgccagttaatcataggatcccattaaataagtgtgctaacatcgaatatagagaaaactggtaaagaacattccagtaggaaaagaaaagaacaatcttccatttctgggcttggccaccatcaccctggtcggacctgtcctggacttccaaccttgactgctgagctcctggcttagcttcttgggttcctaattcctggtgtttaataattctctccacgatcatgtttttctgattttttttttcagaaataatgttttttaaaagacaaaaacaaagggaagaatatttaattactgagcagaagtaaatactgttggtattttgtacataatctaatttttatatgcatgttcatgctttttaatttttttatcaaaaattaagtcatctacctactacttgtaaccagcttgtttcataacatgttattttcctgtgtcattaaataattacttcaaaaaaaaaaaa

SEQ ID NO: 629 - DNA, 1853 bp, Homo sapiens
  CDS (157)..(489)
attcgatgatccactcgtccagtgtggtggaattcgtttcttaaaagacaaatctgactgtgtaggtgcatttgtataaaaaatataactccccattgcctctgggataaagtcttatctcagtttacatatattcttgataacctctccaactttatgtctcaccacccccactcacttcgtaattcgtgccttatcagaatggacctgttatactggcagttcaccatatataccattacattttgtttctcccatctctcaggtagacttacactttcggcccagcacatcagtcatcgcccttgcttgctttcctattcactcctgttctggaaggtgcaccaccttttcttggaaggcttcccttgctctcccaggctagatgagatgtccttccatcagttcccacagcaccctgtgcatgtatctgttgtgcacttaccaatagtatacaagggatctatgacccaagtctctccccactagcttgtaagctcctcacagacaggaaccatgttttgtctttgtactccagtgcctagtatataagagatactcaataaataaatatttgtcaaatcaactaattgattccttgtgacctaattctagagaatgggaagaaggcctgttattttgttgtcctttatggttctttaggaaagctctccaagcttggcatttgtcagggtgggaggaaaactgttgaagtattaagactggacacatggctgctaattcatcagcttatcattgaaaaagtccatagccaaaacctgactgtgcacttactataggaccctgacctgcctgggtctccctgtctctccagccagtatatttaaaggtaatgagataatgatgagtgttttgaaaaatgtttagtgttcaaatagaaaccattcgtgtcccttcactctctgaacatagtctgcaaatctctccctctctggtatgtttctgttttgtggattagactgctaaataagcgaagagttaattttgaagttcaggtcaacaaattcctgtttggagacgggctgttcctgaataccaggttgttatctgtctattacagccccttcacttctgggctcctggccctttgcgaagtacttcagaaagcctagagagaagagagggccctcaaatcccattccagcccctaaatgaaagtggcatcacaaggagaaaagtggaggtagaaatgtaccatgggggacgttgccccattgcctttcttcccctgactactgggcttcctctatcagctttaacgctggaagtagctgagtctccagtcactggtggccttccccaagtgagctcagcagcatgtgctaataggtgccaatactgtgctggctccagtgggattcctctctgcaaagctgctggcttagcttgactgtttccctattcctctccttagaactttcatagccagtcaagcatagaattgcatccattcttctgaaataggatctgtgcctaatttttcattggcttggccaagattctgttacctgtaattatgtcatatgggctgactggtgtaggtttggtaggcctcactgctctccagaggctagtgttcctatcccaggatggctgttgggattaggagtggaatgaggaatagtttaggaccacaagagatttggcctccttggaacatgtaggaaggcctcaaggatgtaattctagcccagggaagaaaatccttttcagcagacgcttcccttcccttcccctagggaatgtgtccctactatagtaaactcttccttaagagagttttatgttttctctgtcagaccaatttgtttttcttaatgttgttcctatgg

SEQ ID NO: 630 - DNA, 1388 bp, Homo sapiens
  CDS (37)..(963)
atttggccctcgaggccaagaattcggcacgagaagatggcggggaagaagaatgttctgtcgtctctcgcagtttacgcggaagattcagagcccgagtctgatggcgaggctggaatcgaggcggtgggcagcgcggctgaggagaaaggcggattggtatctgatgcctatggggaggatgacttttctcgtctagggggtgatgaagatggttatgaagaagaagaagatgagaacagtagacagtcggaagatgacgattcagagactgaaaaacctgaggctgatgacccaaaggataatacagaagcagaaaagcgagacccccaggaactcgtggcctccttttctgaaagagttcggaacatgtcgcctgatgaaatcaagatcccgccagaaccccctggcagatgttcaaatcacttgcaagacaagatccagaagctttatgaacgaaagataaaggagggaatggatatgaactacattatccaaaggaagaaagaatttcggaaccctagcatctacgagaagctgatccagttctgtgccattgacgagcttggcaccaactacccaaaggatatgtttgatccccatggctggtctgaggactcctactatgaggcattagccaaggcccagaaaattgagatggacaaattggaaaaggccaaaaaggagcgaacaaaaattgagtttgtgacgggcaccaaaaaaggcaccacgaccaacgccacgtccaccaccactaccactgccagcacagctgttgcagatgctcagaagagaaagagcaagtgggattcggctatcccagtgacaacgatagcccagcccaccatcctcaccaccacagccaccctgccagctgttgtcacggtcaccaccagcgccagcggctccaagaccaccgtcatctctgctgtgggcaccattgtgaagaaggccaagcagtgacctgaggggccaccctaggacttgaaaggaccgtgcagcccagtgaccactgcccagtgggaggcgccactttgtatatttcaggactgggacctactccccagatgccacctgagaggagcttctgtttggcattccagatggaaggacaggcagcacgggagccaggcgctgtggacagggtctgtccacgcaccacctggggtctgccgcctattaaaagtgccgtattcttacctcttggcatctcagatgcactggcctctcctgcattctgtttgcaggcaaatgcttcagctcacatgtcccccaagactcaatagtcttggttgggactattgcctcagggttgacaacagggtgatggaggcctgggacgctgttcagaggggtgacccaagaagtcaccgttgttatccgtgtat

SEQ ID NO: 631 - DNA, 1562 bp, Homo sapiens
  CDS (37)..(1137)
atttggccctcgaggccaagaattcggcacgagaagatggcggggaagaagaatgttctgtcgtctctcgcagtttacgcggaagattcagagcccgagtctgatggcgaggctggaatcgaggcggtgggcagcgcggctgaggagaaaggcggattggtatctgatgcctatggggaggatgacttttctcgtctagggggtgatgaagatggttatgaagaagaagaagatgagaacagtagacagtcgagacggtgtttcactatgtttcccagtctggtttcaaacttctggcctcaagcaattcccctgcctcaccctcccaaagtgctgggattacaggaagatgacgattcagagactgaaaaacctgaggctgatgacccaaaggataatacagaagcagaaaagcgagacccccaggaactcgtggcctccttttctgaaagagttcggaacatgtcgcctgatgaaatcaagatcccgccagaaccccctggcagatgttcaaatcacttgcaagacaagatccagaagctttatgaacgaaagataaaggagggaatggatatgaactacattatccaaaggaagaaagaatttcggaaccctagcatctacgagaagctgatccagttctgtgccattgacgagcttggcaccaactacccaaaggatatgtttgatccccatggctggtctgaggactcctactatgaggcattagccaaggcccagaaaattgagatggacaaattggaaaaggccaaaaaggagcgaacaaaagcttgttgcagggacgtgtctgcagcgcctggggaaccgagctgtccttcccctgtgcgggcgggcaccgcctcctcctggattgagtttgtgacgggcaccaaaaaaggcaccacgaccaacgccacgtccaccaccactaccactgccagcacagctgttgcagatgctcagaagagaaagagcaagtgggattcggctatcccagtgacaacgatagcccagcccaccatcctcaccaccacagccaccctgccagctgttgtcacggtcaccaccagcgccagcggctccaagaccaccgtcatctctgctgtgggcaccattgtgaagaaggccaagcagtgacctgaggggccaccctaggacttgaaaggaccgtgcagcccagtgaccactgcccagtgggaggcgccactttgtatatttcaggactgggacctactccccagatgccacctgagaggagcttctgtttggcattccagatggaaggacaggcagcacgggagccaggcgctgtggacagggtctgtccacgcaccacctggggtctgccgcctattaaaagtgccgtattcttacctcttggcatctcagatgcactggcctctcctgcattctgtttgcaggcaaatgcttcagctcacatgtcccccaagactcaatagtcttggttgggactattgcctcagggttgacaacagggtgatggaggcctgggacgctgttcagaggggtgacccaagaagtcaccgttgttatccgtgtat

SEQ ID NO: 632 - DNA, 1152 bp, Homo sapiens
  CDS (76)..(1152)
tcggccggaattcccgggtcgacgatttcgtccagggcggacaggctgggcgcacccgtgctcgcgcaccccaagatggctgagaggcaggaagagcagagagggagcccgcccttgagggcggaaggcaaggccgacgcggaggttaagctcattctgtaccattggacgcattccttcagctctcaaaaggtgcgcttggtaattgctgaaaaggcattgaagtgcgaggaacatgatgtaagtctgcccttgagtgagcacaatgagccttggtttatgcgtttgaactcaactggagaagtgcctgtccttatccacggggaaaacataatttgtgaggccactcagatcattgattatcttgaacagactttcctggatgaaagaacacccaggttaatgcctgataaagaaagcatgtattacccacgggtacaacattaccgagagctgcttgactccttgccaatggatgcctatacacatggctgcattttacatcctgagttaactgtggactccatgatcccggcttatgcaactacaaggattcgtagccaaattggaaacacagagtctgagctgaagaaacttgctgaagaaaacccagatttacaagaagcatacattgcaaaacagaaacgacttaaatcaaagctgcttgatcatgacaatgtcaagtatttgaagaaaattcttgatgagttggagaaagtcttggatcaggttgaaactgaattgcaaagaagaaatgaagaaaccccagaagagggccagcaaccttggctctgcggtgaatccttcaccctggcagacgtctcactcgctgtcacattgcatcgactgaagttcctggggtttgcaaggagaaactggggaaacggaaagcgaccaaacttggaaacctattacgagcgtgtcttgaagagaaaaacatttaacaaggttttaggacatgtcaacaatatattaatctctgcagtgctgccaacagcattccgggtggccaagaaaagggccccaaaagttcttggcacgacccttgtggttggtttgcttgcaggagtgggatattttgcttttatgcttttcagaaagagacttggcagcatgatattagcacttagacccagaccaaattatttctag

SEQ ID NO: 633 - DNA, 3567 bp, Homo sapiens
  CDS (50)..(1774)
gcactcgcccggctcgcccgctttcgcacccagttcacgcgccacagctatgtgtccccgagccgcgcgggcgcccgcgacgctactcctcgccctgggcgcggtgctgtggcctgcggctggcgcctgggagcttacgattttgcacaccaacgacgtgcacagccggctggagcagaccagcgaggactccagcaagtgcgtcaacgccagccgctgcatgggtggcgtggctcggctcttcaccaaggttcagcagatccgccgcgccgaacccaacgtgctgctgctggacgccggcgaccagtaccagggcactatctggttcaccgtgtacaagggcgccgaggtggcgcacttcatgaacgccctgcgctacgatgccatggcactgggaaatcatgaatttgataatggtgtggaaggactgatcgagccactcctcaaagaggccaaatttccaattctgagtgcaaacattaaagcaaaggggccactagcatctcaaatatcaggactttatttgccatataaagttcttcctgttggtgatgaagttgtgggaatcgttggatacacttccaaagaaaccccttttctctcaaatccagggacaaatttagtgtttgaagatgaaatcactgcattacaacctgaagtagataagttaaaaactctaaatgtgaacaaaattattgcactgggacattcgggttttgaaatggataaactcatcgctcagaaagtgaggggtgtggacgtcgtggtgggaggacactccaacacatttctttacacaggcaatccaccttccaaagaggtgcctgctgggaagtacccattcatagtcacttctgatgatgggcggaaggttcctgtagtccaggcctatgcttttggcaaatacctaggctatctgaagatcgagtttgatgaaagaggaaacgtcatctcttcccatggaaatcccattcttctaaacagcagcattcctgaagatccaagcataaaagcagacattaacaaatggaggataaaattggataattattctacccaggaattagggaaaacaattgtctatctggatggctcctctcaatcatgccgctttagagaatgcaacatgggcaacctgatttgtgatgcaatgattaacaacaacctgagacacacggatgaaatgttctggaaccacgtatccatgtgcattttaaatggaggtggtatccggtcgcccattgatgaacgcaacaatggcacaattacctgggagaacctggctgctgtattgccctttggaggcacatttgacctagtccagttaaaaggttccaccctgaagaaggcctttgagcatagcgtgcaccgctacggccagtccactggagagttcctgcaggtgggcggaatccatgtggtgtatgatctttcccgaaaacctggagacagagtagtcaaattagatgttctttgcaccaagtgtcgagtgcccagttatgaccctctcaaaatggacgaggtatataaggtgatcctcccaaacttcctggccaatggtggagatgggttccagatgataaaagatgaattattaagacatgactctggtgaccaagatatcaacgtggtttctacatatatctccaaaatgaaagtaatttatccagcagttgaaggtcggatcaagttttccacaggaagtcactgccatggaagcttttctttaatatttctttcactttgggcagtgatctttgttttataccaatagccaaaaattctccttgcctttaatgtgtgaaactgcattttttcaagtgagattcaaatctgccttttaggacctggctttgtgacagcaaaaaccatctttacaggctcctagaagctgaaggttagagcattataaaatgaagagacagacatgattactcagggtcagcaacctagtgagttagaaaaaaaattaacatagggccctataaggagaaagccaactatgttaagtttacgtgtccaaattttaatgaaattttactaacaattttaaaccatatttttcttcttcatatccatttctaatccatcaaacagcttatgtttacataaaattttatcattcacaaggaagttttaagcacactgtctcatttgatatccacaacttatttttggtaggaaagagagatgtttttcccacctgtcagatgaaaaaactgaagctcaaaaagggttgacttgaccatacagctaatgctgacagatccaagacctagacctaggtcttttgaactcaagtccagcattctcaactatatcaagttactgttcagaatacttaatatctcctctcttcataattatcaatagccccaagctcatggatgacaaatctctgctttatttcttgtctctattttttcactttatagctcctgttataatagcaagtttaatggtataaacacaggataccatcctctcttgcaacacccatgtgcctttgatgagtcaggtagcaagctgtagtagataatgagaaaggccagaggctgcaaaagacagtcaaaggacacgagagaaaggaaggggaagaacaggactccaggactgttttatattatagaaaagcaagagctaaagagcatttacacatgttaaacagatacttgttaagcatagtgcctgacacacggcattagctgttattttatgagattccatcagctctgcctctgtcctctttcttctaacatgaaggtatcatgagaagagaaccttctaacataagctgtaattctaaacctgcacttgtccctctccagcaagaggctagcactgaattcattctactcatactacacacccagttatggaatgtccagagttctcgaagaaaataaatgactttaggaagaggtatacattttttaagtcgctctgcctccaaatctgaacagtcactgtaaatcattcttaagcccagatatgagaacttctgctggaaagtgggaccctctgagtgggtggtcagaaaatacccatgctgatgaaatgacctatgcccaaagaacaaatacttaacgtgggagtggaacccacatgagcctgctcagctctgcataagtaattcaagaaatgggaggcttcaccttaaaaacagtgtgcaaatggcagctagaggttttgataggaagtatgtttgtttcttagtgtttacaaatattaagtactcttgatacaaaatatacttttaaacttcataacctttttataaaagttgttgcagcaaaataatagcctcggttctatgcatatatggattagctataaaaaatgtcaataagattgtacaaggaaaattagagaaagtcacatttagggtttattttttacacttggccagtaaaatagggtaaatcctattagaattttttaaagaactttttttaagtttcctaaatctgtgtgtgtattgtgaagtggtataagaaatgactttgaaccactttgcaattgtagattcccaacaataaaattgaagataagctcaaaaaaaaaaaa

SEQ ID NO: 634 - DNA, 2199 bp, Homo sapiens
  CDS (190)..(1329)
ttaaacttaagcttggtaccgagctcggatccactagtccagtgtggtggaattctttagtgagcagcacagtgtgggagcaggggccgaggggtggaaggagaagattgcaaatgcagacgcacgtctgtgtcactgcccaccttcagccaccttcacacttcctagtgctgcctgagtcatggtagaatgacaagcgtggctgcccgatctcacatgtggccatgctctggaaagacaggtgaacaggaaggttccctttcaacgctcttcagtagactttatgcatttgtgatgtctgttatttcagatgacagatttgaagatctggaagaggcaaatccattctcttttagagagtttctgaagaccaagaacctcggcctctcgaaagaggatccggccagcagaatttatgcaaaggaagcctcgaggcattccctgggacttgaccacaactccccaccctcccaaaccggcgggtatggcctggagtatcagcagccatttttcgaggatccgacaggggctggtgacctcctggatgaggaggaggatgaggacaccggatggagtggggcctacctgccgtccgccatcgagcagactcaccccgagagggtccctgccggcacgtcgccctgcagcacatacctttcctttttctccaccccgtcggagctggcagggcctgagtctctgccctcgtgggcgttgagtgacactgattctcgcgtgtctccggcctctccggcagggagtcctagcgcagactttgcggttcatggagagtctctgggagacaggcacctgcggacgctgcagataagttacgacgcactgaaagatgaaaattctaagctgagaagaaagctgaatgaggttcagagcttctctgaagctcaaacagaaatggtgaggacgcttgagcggaagttagaagcaaaaatgatcaaggaggaaagcgactaccacgacctggagtcggtggttcagcaggtggagcagaacctggagctgatgaccaaacgggctgtaaaggcagaaaaccacgtcgtgaaactaaaacaggaaatcagtttgctccaggcgcaggtctccaacttccagcgagagaatgaagccctgcggtgcggccagggtgccagcctgaccgtggtgaagcagaacgccgacgtggccctgcagaacctccgggtggtcatgaacagtgcacaggcttccatcaagcaactggtttccggagctgagacactgaatcttgttgccgaaatccttaaatctatagacagaatttctgaagttaaagacgaggaggaagactcttgaggacccctgggtgttctcagcatgaagctccgtgtataccctgaggtcaccaccgctcgatctaaatgtgcagttgtgtccttaaatatgcagtcttcacccagagtaaagtgttgatcgcaagagtccagtgtcgtgccctcagccagttcttggccaccacaatgggagcagccctggccgagttgtctctgtggtttctatgcagcccttcttggcgaaattcctgcgatcttatagattctaatgagctcttggaagacattgtcataaaagccagtgattttaagaaaaagagtggttctggaatcaatgttttccagtcccatcccagaacatcagttgtaagataagtacaattggttgtccttgatttcataagtagaacaaacactaaatgtgcctctgagatggccaccccgggcagggacctgtgccttccgccgatgctcagggctccctctggctcccgggtcactcttgtggccccagtgggtggtccctgcagtcatggcctgagtgcgcaggggccaccgcgtggctgctgctgtcctcctccgggacccacggggaccaaggtcacacgttccgtgctgtgaagctgtccagatgtgcctctttggctgggggttctggtggacgtttcaagtggcattttgtacaatgcaggttagaattcaggaatttcaagtatgtgcccgggtctgtcaggtcccagttgcctttctgacggcccccctcagagggacggcgacgagcactaaatgcttttttgactattttcctatagattttttttaaaacttttttttcctcctgttccaattgatagctttcttatttaataaattctgtagttcaaaaaaaaaa

SEQ ID NO: 635 - DNA, 1969 bp, Homo sapiens
  CDS (215)..(1642)
gcacgaggcgagtctgggctcagcctagagctctccggcggcggcgcagcttcagggcagcgcgggctgcagcggcggcggcggttagggctgtgtagggcgaggcctcccccttcctcctcgccatcctactcctccctcctcgtcatcctcccccttcgtcctcctcgccttcctcctcctcgtcaggctcgacccagctgtgagcggcaagatggcggcgcccaggccgccgcctgccaggctgtcgggcgtcatggtgccggcgcccatccaagacctggaggccctgcgcgcgctcacggcgctcttcaaagagcagcggaaccgagaaacagcacccaggactatcttccaaagagttctggatatcctaaagaaatcttctcatgctgttgagcttgcctgcagagatccatcccaagtggaaaacctggcttccagtctgcagttaataacagaatgcttcaggtgtcttcgcaatgcttgcatagagtgttctgtgaaccagaattcaatcaggaacttggatacgattggtgttgctgttgatttgattcttctgtttcgtgaactgcgagtggaacaggaatctctgttgacagcttttcgctgtggcctgcagtttttaggcaacattgcctcacggaatgaagattcccagtctattgtttgggtgcatgctttcccagaactgtttttgtcttgcttaaatcatccggacaaaaaaattgttgcctactcttcaatgattttgtttacatcccttaatcatgaaagaatgaaagaactggaggagaacctcaatattgcaattgatgtcatagatgcttaccaaaaacatcctgaatcagaatggccgttcttgattattacagacctctttctgaaaagcccggaattggtacaagccatgtttcccaaactgaacaatcaagaaagagttacactgttagaccttatgatagccaagataacgagtgatgagccactcaccaaggatgacatccctgtgtttttgcggcatgctgagttgattgcaagcacctttgtggatcagtgcaagactgtgctcaagctggcctctgaggagcctcctgatgatgaggaggcactggctacaattaggcttctcgacgtcctgtgcgaaatgactgtgaatactgagctgctcggctatctgcaggttttccctggcttgctggaaagagtgattgatcttttgcgggtgattcatgtagctggaaaagaaaccacaaacatcttcagtaattgtggttgcgtgagagcagaaggtgacatctccaatgtggccaatgggtttaagtctcatctcattcgtctgattggaaatctgtgttacaagaataaagataaccaagacaaggtaaatgagctggatggtatcccgttgatcctggacaactgcaacatcagtgacagtaacccctttctgacccagtgggtgatatatgccatccgaaaccttaccgaagacaacagccaaaaccaagatttgattgcaaagatggaggaacaggggctggcagatgcatccctacttaaaaaagtgggttttgaagttgaaaagaaaggcgaaaagctgatcctgaaatctactagagacacccctaagccatgaatgaactacatccaaatacctgaatttttggaatctgtttcatggatttttcatcttctaccgtatgtgaaattgcaagtgtttgaagatttataagtacaaatttgggaacatacaaatcttttaggtagtagagtttaacgtgtataagctaaaagtgaaagtaactgagtgttctcttgtttctttgcattaatgtaactgtgtggtttgcctttgtccccctggatagaacgtgcatttaaagaatatattgtacttactgtgacagcagataataaaccagtctcttggagggcacaacccttatttgacaaaaaaaaaaaa

SEQ ID NO: 636 - DNA, 1809 bp, Homo sapiens
  CDS (30)..(1415)
cgcccacgcgtccgggcccgcgccccgccatggaggacctggatgccctgctctctgacctggagactaccacctcgcacatgccaaggtcaggggctcccaaagagcgccctgcggagcctctcacccctcccccatcctatggccaccagccacagacagggtctggggagtcttcaggagcctcgggggacaaggaccacctgtacagcacggtatgcaagcctcggtccccaaagcctgcagccccggcggcccctccattctcctcttccagcggtgtcttgggtaccgggctctgtgagctagatcggttgcttcaggaacttaatgccactcagttcaacatcacagatgaaatcatgtctcagttcccatctagcaaggtggcttcaggagagcagaaggaggaccagtctgaagataagaaaagacccagcctcccttccagcccgtctcctggcctcccaaaggcttctgccacctcagccactctggagctggatagactgatggcctcactctctgacttccgcgttcaaaaccatcttccagcctctgggccaactcagccaccggtggtgagctccacaaatgagggctccccatccccaccagagccgactggcaagggcagcctagacaccatgctggggctgctgcagtccgacctcagccgccggggtgttcccacccaggccaaaggcctctgtggctcctgcaataaacctattgctgggcaagtggtgacggctctgggccgcgcctggcaccccgagcacttcgtttgcggaggctgttccaccgccctgggaggcagcagcttcttcgagaaggatggagcccccttctgccccgagtgctactttgagcgcttctcgccaagatgtggcttctgcaaccagcccatccgacacaagatggtgaccgccttgggcactcactggcacccagagcatttctgctgcgtcagttgcggggagcccttcggagatgagggtttccacgagcgcgagggccgcccctactgccgccgggacttcctgcagctgttcgccccgcgctgccagggctgccagggccccatcctggataactacatctcggcgctcagcgcgctctggcacccggactgtttcgtctgcagggaatgcttcgcgcccttctcgggaggcagctttttcgagcacgagggccgcccgttgtgcgagaaccacttccacgcacgacgcggctcgctgtgcgccacgtgtggcctccctgtgaccggccgctgcgtgtcggccctgggtcgccgcttccacccggaccacttcacatgcaccttctgcctgcgcccgctcaccaaggggtccttccaggagcgcgccggcaagccctactgccagccctgcttcctgaagctcttcggctgacagcccgctcggctcgccgtctcccccggaggccgcgccctcccggaaaagccgggtcctccagaccccgaggccttgctctcagagcgggaggccccacccactggagagccccgcccctaaggtactatgagtcctcaggggtcaagttcagaaacggcccagccagacctaaacccacacgcccacaaagtggattgcacacagacaagaactcccgtgcgggcctccactctattcccacccttgagggagcccccttactgggggagggtccttgcaattccagcgaatcggaggccaggccaggacgtccttgctccctgcaccctcactgttctgtgcactttttctacctacataaacacacgcattccacctcaaaaaaaaaaaa

SEQ ID NO: 637 - DNA, 6899 bp, Homo sapiens
  CDS (187)..(6672)
agcactgctgacacccctacacaaattaatgtccccatctctactgatacatctgataggtacaaacgatgtgtccgtgatgactggtggggctcatgtaatccccacctaagaaaagtagaaagtgcaactttatcttttaggttaataagtgctgagagatggaggtttttccttctcattttgatggagatgcctagaaaacctcgcctgacactctttgtccaacgcaggatagagaacatagcaacagaaagggaatttgatccggaagaattttactacctattggaagcagcagaaggccatgccaaagaaggacagggtattaaaaccgacattcccaggtacatcattagccaactgggactcaataaggatcccttggaagaaatggctcatttgggaaactacgatagtgggacagcagaaacaccagaaacagatgaatcagtgagtagctctaatgcctccctgaaacttcgaaggaaacctcgggaaagtgattttgaaacgattaaattgattagcaatggagcctatggggcagtctactttgttcggcataaagaatcccggcagaggtttgccatgaagaagattaataaacagaacctcatccttcgaaaccagatccagcaggcctttgtggagcgggatatcctgacttttgcagaaaacccctttgttgtcagcatgtattgctcctttgaaacaaggcgccacttgtgcatggtcatggaatatgtggaagggggagactgtgctactttaatgaaaaacatgggtcctctccctgttgatatggccagaatgtactttgctgagacggtcttggccttggaatatttacataattatggaattgtacacagggatttgaaaccagacaacttgttggttacctccatggggcacataaagctgacagattttggattatctaaggtgggactaatgagcatgactaccaacctttacgagggtcatattgagaaggatgctagagagttcctggataaacaggtctgtggcacacctgaatacattgcaccagaagtgattctgaggcagggttatggaaagccggtggactggtgggccatggggattatcctctatgaatttctggttggatgcgtgccattctttggggatactccagaggagctatttggacaagtcatcagtgatgagatcaactggcctgagaaggatgaggcacccccacctgatgcccaggatctgattaccttactcctcaggcagaatcccctggagaggctgggaacaggtggtgcatatgaagtcaaacagcatcgattcttccgttctttagactggaacagtttgctgagacagaaggcagaatttattccccaactggaatctgaggatgacacaagttattttgatactcggtctgagaagtatcatcatatggaaacggaggaagaagatgacacaaatgatgaagactttaatgtggaaataaggcagttttcttcatgttcacacaggttttcaaaagttttcagcagtatagatcgaatcactcagaattcagcagaagagaaggaagactctgtggacaaaaccaaaagcaccaccttgccatccacagaaacactgagctggagttcagaatattctgaaatgcaacagctatcaacatccaactcttcagatactgaaagcaacagacataaactcagttctggcctacttcccaaactggctatttcaacagagggagagcaagatgaagctgcctcctgccctggagacccccatgaggagccaggaaagccagcccttcctcctgaagagtgtgcccaggaggagcctgaggtcaccaccccagccagcaccatcagcagctccaccctgtcagttggcagtttttcagagcacttggatcagataaatggacgaagcgagtgtgtggacagtacagataattcctcaaagccatccagtgaacccgcttctcacatggctcggcagcgattagaaagcacagaaaaaaaaaaaatctcggggaaagtcacaaagtccctctctgccagtgctctttccctcatgatcccaggagatatgtttgctgtttcccctctgggaagtccaatgtctccccattccctgtcctcggacccttcttcttcacgagattcctctcccagccgagattcctcagcagcttctgccagtccacatcagccgattgtgatccacagttcggggaagaactacggctttaccatccgagccatccgggtgtatgtgggagacagtgacatctatacagtgcaccatatcgtctggaatgtagaagaaggaagtccggcatgccaggcaggactgaaggctggagatcttatcactcacatcaatggagaaccagtgcatggacttgtccacacagaagttatagaactcctactgaagagtgggaataaggtgtcaatcactactaccccatttgaaaacacatcaatcaaaactggaccagccaggagaaacagctataagagccggatggtgaggcggagcaagaaatccaagaagaaagaaagtctcgaaaggaggagatctcttttcaaaaagctagccaagcagccttctcctttactccacaccagccgaagtttctcctgcttgaacagatccctgtcatcgggtgagagcctcccaggttcccccactcatagcttgtctccccggtctccaacaccaagctaccgctccacccctgacttcccatctggtactaattcctcccagagcagctcccctagttctagtgcccccaattccccagcagggtccgggcacatccggcccagcactctccacggtcttgcacccaaactcggcgggcagcggtaccggtccggaaggcgaaagtccgccggcaacatcccactgtccccgctggcccggacgccctctccaaccccgcaacccacctccccgcagcggtcaccatcccctcttctgggacactcactgggcaattccaagatcgcgcaagcctttcccagcaagatgcactccccgcccaccatcgtcagacacatcgtgaggcccaagagtgcggagccccccaggtccccgctgctcaagcgcgtgcagtccgaggagaagctgtcgccctcttacggcagtgacaagaagcacctgtgctcccgcaagcacagcctggaggtgacccaagaggaggtgcagcgggagcagtcccagcgggaggcgccgctgcagagcctggatgagaacgtgtgcgacgtgccgccgctcagccgcgcccggccagtggagcaaggctgcctgaaacgcccagtctcccggaaggtgggccgccaggagtctgtggacgacctggaccgcgacaagctgaaggccaaggtggtggtgaagaaagcagacggcttcccagagaaacaggaatcccaccagaaatcccatggacccgggagtgatttggaaaactttgctctgtttaagctggaagagagagagaagaaagtctatccgaaggctgtggaaaggtcaagtacttttgaaaacaaagcgtctatgcaggaggcgccaccgctgggcagcctgctgaaggatgctcttcacaagcaggccagcgtgcgcgccagcgagggtgcgatgtcggatggcccggtgcctgcggagcaccgccagggtggcggggacttcagacgggcccccgctcctggcaccctccaggatggtctctgccactccctcgacaggggcatctctgggaagggggaaggcacggagaagtcctcccaggccaaggagcttctccgatgtgaaaagttagacagcaagctggccaacatcgattacctccgaaagaaaatgtcacttgaggacaaagaggacaacctctgccctgtgctgaagcccaagatgacagctggctcccacgaatgcctgccagggaacccagtccgacccacgggtgggcagcaggagcccccgccggcttctgagagccgagcttttgtcagcagcacccatgcagctcagatgagtgccgtctcttttgttcccctcaaggccttaacaggccgggtggacagtggaacggagaagcctggcttggttgctcctgagtcccctgttaggaagagcccctccgagtataagctggaaggtaggtctgtctcatgcctggagccgatcgagggcactctggacattgctctcctgtccggacctcaggcctccaagacagaactgccttccccagagtctgcacagagccccagcccaagtggtgacgtgagggcctctgtgccaccagttctccccagcagcagtgggaaaaagaacgataccaccagtgcaagagagctttctccttccagcttaaagatgaataaatcctacctgctggagccttggttcctgccccccagccgaggtctccagaattcaccagcagtttccctgcctgacccagagttcaagagggacaggaaaggtccccatcctactgccaggagccctggaacagtcatggaaagcaatccccaacagagagagggcagctcccctaaacaccaagaccacaccactgaccccaagcttctgacctgcctggggcagaacctccacagccctgacctggccaggccacgctgcccgctcccacctgaagcttccccctcaagggagaagccaggcctgagggaatcgtctgaaagaggccctcccacagccagaagcgagcgctctgctgcgagggctgacacatgcagagagccctccatggaactgtgctttccagaaactgcgaaaaccagtgacaactccaaaaatctcctctctgtgggaaggacccacccagatttctatacacagacccaggccatggagaaagcatgggcgccgggtgggaaaacgaaccacaaagatggcccaggtgaggcgaggcccccgcccagagacaactcctctctgcactcagctggaattccctgtgagaaggagctgggcaaggtgaggcgtggcgtggaacccaagcccgaagcgcttcttgccaggcggtctctgcagccacctggaattgagagtgagaagagtgaaaagctctccagtttcccatctttgcagaaagatggtgccaaggaacctgaaaggaaggagcagcctctacaaaggcatcccagcagcatccctccgccccctctgacggccaaagacctgtccagcccggctgccaggcagcattgcagttccccaagccacgcttctggcagagagccgggggccaagcccagcactgcagagcccagctcgagcccccaggaccctcccaagcctgttgctgcgcacagtgaaagcagcagccacaagccccggcctggccctgacccgggccctccaaagactaagcaccccgaccggtccctctcctctcagaaaccaagtgtcggggccacaaagggcaaagagcctgccactcagtccctcggtggctctagcagagaggggaagggccacagtaagagtgggccggatgtgtttcctgctaccccaggctcccagaacaaagccagcgatgggattggccagggagaaggtgggccctctgtcccactgcacactgacagggctcctctagacgccaagccacaacccaccagtggtgggcggcccctggaggtgctggagaagcctgtgcatttgccaaggccgggacacccagggcctagtgagccagcggaccagaaactgtccgctgttggtgaaaagcaaaccctgtctccaaagcaccccaaaccatccactgtgaaagattgccccaccctgtgcaaacagacagacaacagacagacagacaaaagcccgagtcagccggccgccaacaccgacagaagggcggaagggaagaaatgcactgaagcactttatgctccagcagagggcgacaagctcgaggccggcctttcctttgtgcatagcgagaaccggttgaaaggcgcggagcggccagccgcgggggtggggaagggcttccctgaggccagagggaaagggcccggtccccagaagccaccgacggaggcagacaagcccaatggcatgaaacggtccccctcagccactgggcagagttctttccgatccacggccctcccggaaaagtctctgagctgctcctccagcttccctgaaaccagggccggagttagagaggcctctgcagccagcagcgacacctcttctgccaaggccgccgggggcatgctggagcttccagcccccagcaacagggaccataggaaggctcagcctgccggggagggccgaacccacatgacaaagagtgactccctgccctccttccgggtctccaccctgcctctggagtcacaccaccccgacccaaacaccatgggcggggccagccaccgggacagggctctctcggtgactgccaccgtaggggaaaccaaagggaaggaccctgccccagcccagcctcccccagctaggaaacagaacgtgggcagagacgtgaccaagccatccccagccccaaacactgaccgccccatctctctttctaatgagaaggactttgtggtacggcagaggcgggggaaagagagtttgcgtagcagccctcacaaaaaggccttgtaacggggagggcccaggggcaggactgtggagacccgtcctgaacgggcgactgtgtcttgactacctttcaaaaccagcactgtgtgggaatgtccgccaggcagagctcggagcctcattgagacaggggagagagaaagacaaagaggggaccttcttccagatgccttcccagttgtaaccggtaaaactgttaccagatagtgtttgtacaaaaaaaaaaaacc

SEQ ID NO: 638 - DNA, 2077 bp, Homo sapiens
  CDS (1)..(1872)
atgcccgcttccttccctctctcccgcaatgcggggacaaggggaggaaatccagccccatcgccccctctgcgaagtcctgggaagggaagactcgccagccccatcctacctcaacgcagcggcaacataccggaggccccacgtcgatacgacccaggcgtccgcattggattgggcggtgcggcggcgcttctgtccgccttccggtgtcacgcgaccgcctccccctcccacccttctctgtctacctctgggcgggactgccgggtgatgagatactcggtcggcgacggtagaacgggcgacggcgacaaccgcaatcacatccacgacggtgatcatggcagaggtgaggagcctattgcaccgccgctggccccccggacccggaagccgcctctgaggcccggggaccgagcgcccgtgtgcaggtgggctgggttgaggaatcacgcccagaataaagccaagctcatctctgagacccggaggaggttcgaagctgagtatgtgacagataagtcagataaatatgatgcacgtgatgttgaaaggctacaacaagatgataactgggttgaaagttacttatcttggagacataatattgtagatgaaacactgaagatgctcgatgagagttttcagtggaggaaagaaatttctgtcaatgtctggatcagggtgaagtatcatgtaaaagaccagaaaaccatattggacaaaaagaagctcatagcattctggttggaacgttatgctaagagggaaaatgggaaacctgtaacagtgatgtttgacctgtcagaaactggaataaatagcattgacatggactttgtacgctttatcatcaactgctttaaggtttattaccctaaatacctctctgctttcaaaattgtgaaaacctggcttggtccagaagcagtgagcttgttgaagtttacaagcaaaaatgaagtccaggactatgtcagtgtagaatacctgcctccccacatgggtggaactgatcctttcaagtatagctatccaccactagtagatgatgacttccagaccccactgtgtgagaatgggcctattaccagtgaggatgaaacttcaagtaaagaagacatagaaagtgatggcaaagaaacattggaaacaatttctaatgaagaacaaacacctcttcttaaaaagattaacccaaccgaatctacttccaaagcagaagaaaatgaaaaagttgattcaaaagtgaaagctttcaagaaaccattgagtgtatttaaaggccccttactacacatcagcccagcagaagaactgtactttggaagtacagaatccggagagaagaaaaccttaatagtgttgacaaatgtaactaaaaatatagtggcatttaaggtgagaacaacagctccagaaaaatacagagtcaagccaagcaatagcagctgtgacccgggtgcatcagtggatatagttgtgtctccccatgggggtttaacagtctctgcccaagaccgttttctgataatggctgcagaaatggaacagtcatctggcacaggcccagcagaattaactcagttttggaaagaagttcccagaaacaaagtgatggaacataggttaagatgccatactgttgaaagcagtaaaccaaacactcttacgttaaaagacaatgctttcaatatgtcagataaaaccagtgaagatatatgtctacaactcagtcgtttactagaaagcaataggaagcttgaagaccaagttcagcgttgtatctggttccagcagctgctgctttccttaacaatgctcttgcttgcttttgtcacctctttcttctatttattgtacagttaaagaagtggtgccgggtaggaaccacggttccttcgtccattagttggaaaaagtaacagacctaaaactctaccaagctactaaaaacattgcacatctgtgcttcctaaaaggaaatatgcagcacgtggaggggaacacatacatgtcttgaaaataaactgctagaataaagaaatgctggagaaattgaaaaaaaaaaaaa

SEQ ID NO: 639 - DNA, 601 bp, Homo sapiens
  CDS (89)..(448)
atttggccctcgaggccaagaattcggcacgagggggcgtaagacggggagagtggcagctccgagtacacggagaagaactggaaacatgcaaaaactccaaacacggtcccctgccatgtccctgtctgacccaggcctggggtaccaccccacgtgctggaccctacgctggccacccctgtgctccctccacgccctccacgtgttccactgcctcttctcttctcgcttgggaactccagtctcacctcggcttgcaatggaccccaactgctcctgcgaggctggtggctcctgcgcctgcgccggctcctgcaagtgcaaaaagtgcaaatgcacctcctgcaagaagagctgctgctcctgttgccccctgggctgtgccaagtgtgcccagggctgcatctgcaaaggggcgtcagagaagtgcagctgctgtgcctgatgtcgggacagccctgctgtcagatgaaaacagaatgacacgtaaaatccaggatttttttttttctacaactccgactcatttgctacattccttttttttctgtgaaatatgtgaataataattaaacacttagacttgaaaaaaaaaaaa

SEQ ID NO: 640 - DNA, 1856 bp, Homo sapiens
  CDS (1061)..(1780)
  misc_feature (1)...(1856): n = a,t,c or g
ccgcgctttttgcccgtgaagcgccggtgacgcttgagattggttttggcatgggggcgtcgctggtggcaatggctaaagatcgccctgagcaggacttcctcggcattgaagtgcattcaccgggcgttggtgcgtgcctggcttctgcgcatgaagaaggtttaagcaacctgcgcgtgatgtgtcacgatgcggttgaagtgctgcataaaatgattcctgacaattcattgcgcatggtgcagctctttttccctgacccgtggcacaaagcgcgccataataaacgccgtatcgttcaggtgccgtttgccgaactggtaaaaagcaaactgcagctggggggcgtattccatatggcgaccgactgggaaccttatgcggaacatatgcttgaagtgatgtcttctattgacggttataaaaacctgtcagagagcaatgattacgtaccgcgtccggcatcacgtccggtgacgaaatttgaacaacgtggtcatcgtcttggtcacggagtatgggacttaatgttcgagagggtgaaataatggcaaagaaccgtagccgtcgtctgcgtaaaaaaatgcacatcgacgaattccaggaattaggattttcggtggcatggcgattcccggaaggtacatcggaagaacagattgataaaaccgttgatgattttattaacgaggttatcgaaccgaacaaactggcctttgacggcagcggttatctggcctgggaaggtctgatctgcatgcaggaaatcggcaaatgcaccgaagaacatcaggcgattgtgcgtaagtggctggaagagcgcaaactggatgaggtacgccccagcgaacttttcgacgtttggtgggactaagaaagcatacgggcgatgacaaatgcaaaactgcctgatgcgctacgcttatcaggcctggaaagatgcacgatcgagtaggcgggataaggtgtttacgccgcatccggcatggaaaacgcgtactttgttatcaatctggggccagcaaatgctggcctgattttttcttgagggaagactatgatgcgcaaaatgctgctggcggcagcactttcagtgacggcaatgaccgctcacgccgactaccagtgcagcgtcacgccgcgtgacgatgtgattgtcagcccgcaaaccgtgcaggtgaagggcgaaaacggcaatctggtgatcacgccagacggcaacgtgatgtataacggtaagcaatattccctgaatgccgcccagcgcgagcaggcgaaggattatcaggctgaactacgcagcacgctgccgtggattgatgaaggcgcgaaaagccgcgtcgagaaagcccgtattgctctggataaaattatcgttcaggagatgggcgaaagcagcaaaatgcgcagccgtctgaccaaacttgatgcgcagctgaaagagcagatgaaccgcattattgaaacgcgcagcgatggcctgacgtttcactataaagccattgatcaggttcgcgccgaaggccagcaattagtgaatcaggcaatgggtggaattttacaggacagcattaatgaaatgggcgcgaaagcggtgctgaaaagcggcggtaacccattacagaatgtgctgggaagcctgggggggctgcaatcctcaatccaaaccgagtggaaaaagcaggaaaaagatttccagcagtttggcaaagatgtttgtagccgcgttgtgactctggaagatagccgcaaagccctggtcgggaatttaaaataatcctctattttaagacggcataatacttttttatgccgnttaattcttcgttttgttacctgcctctaactttgta

SEQ ID NO: 641 - DNA, 2659 bp, Homo sapiens
  CDS (230)..(2164)
ggtccggaattcccgggtcgacgatttcgtcgccggggagcagtccgctacggagctccatcccttctctgagacggggaccaggggatggcagccatgcacctgacagcctggccccaggaacctattgtttcagaagtcggtgacctttgaggacgtggctgtgtacttcacccaggcggaatgggatggcctgtcccctgcacagaggaccctgtacagggatgtgatgctggagaattatgggaatgtggcatccctgggatttccacttctcaaacctgctgtgatctcacaactggagggaggaagtgagctggggggctcatctccactggctgcaggaacaggcctccagggcctccagactgtagatattcagactgacaatgatttgacaaaggaaatgtatgaaggaaaagagaatgtatcatttgaacttcaaagagacttttcccaggaaacagacttttcagaagcctctcttctagagaaacaacaggaagtccactcagcaggaaatataaagaaggagaagagcaacaccattgatggaacagtgaaagatgagacaagccccgtggaggagtgtttttttagtcaaagttcaaactcatatcagtgtcataccatcactggagagcagccctctgggtgtacaggattggggaaatccatcagctttgatacaaaactcgtgaagcatgaaataattaattctgaggaaagacctttcaaatgtgaagaattagtagagccctttaggtgtgactctcaacttattcaacatcaagagaacaacactgaggaaaagccttatcagtgttcggagtgtggcaaagctttcagcattaatgagaaattaatttggcatcagagacttcacagtggggagaaacccttcaaatgtgtggagtgtgggaaaagcttcagctacagttcccattatatcacacatcagacaatccacagtggggagaagccctatcagtgtaagatgtgtgggaaggccttcagtgttaatggaagcctaagtaggcatcagagaatccatacgggagagaagccctatcagtgcaaggaatgtggaaatggcttcagctgtagttctgcatatattacacatcagagagtccacactggagagaaaccttacgagtgtaatgactgtgggaaagcgttcaatgttaatgcaaaattaattcaacatcagagaatccatactggagagaaaccttatgaatgtaatgaatgtggaaaaggcttcaggtgcagctcccagcttaggcagcatcagagcatccacacaggagaaaagccctatcagtgtaaagagtgtggaaaaggcttcaataataatacaaaactcattcagcatcagagaatccacacaggtgagaaaccctatgaatgcactgaatgtggaaaagccttcagtgtcaaagggaagttaatccaacaccagagaattcacacaggcgagaaaccctatgagtgtaatgaatgcgggaaagccttcagatgtaactcccaatttcggcagcatctgagaattcacactggggagaagccctatgagtgtaatgagtgtggaaaggccttcagcgttaatgggaaactaatgcggcatcagagaattcacactggggagaaaccttttgaatgtaatgagtgtgggagatgctttacttctaaaagaaacctacttgatcatcaccgaatccatactggagaaaagccctatcaatgtaaggaatgtgggaaagccttcagtatcaatgccaaactaactaggcatcagaggatacatactggggagaaacctttcaaatgtatggaatgtgagaaagcattcagctgtagttctaactatattgtgcaccagagaatccatacaggagagaaaccctttcagtgtaaggagtgtggaaaagccttccatgttaatgcccatttaattcggcatcagagaagccacactggggagaaacccttcagatgtgtggaatgtggcaaaggcttcagctttagttctgactacattatacatcagacagtccacacttggaagaaaccctatatgtgtagtgtgtgtgggaaagcattcaggtttagcttccagctcagtcagcatcagagtgtccatagtgaaggaaaatcctaataatgagaaagatatagaaaactcttaaggttaatgccaaaatggatcaagtatcatcagattcatccattgaaaaacctccaagagggcatgaatatggcagagtcttcatatggaaacagtttttattctattcagtttaaatcaggaaaggatgaccagttaaagagaaacatccaaaaatagctttgttttgtaccaacaggaattagaaaatataatgaaaagatttcgttcccagcagcatcaagaaaagtagattttctagaaataaacagttatggaggacttgtatggagaaatttaagtcttcactgagggccactttacaaaggaaatttgaataaatggagagagagagaagccttgttgttggataggaaaacccgtactaaagatactctacctacattaatttatttgtttaatttttgacaacaagcatgtattacttttgaaaagatgaaaaataaagatttatttaaaaaaaaaaaa

SEQ ID NO: 642 - DNA, 510 bp, Homo sapiens
  CDS (53)..(352)
cccggccagtgcatacaatttacgtgacactatagaagagctatgacgtcgcatgcacgcgtacgtaagcttggatcctctagagcggccgcctactactactaaattcgcggccgcgtccgaccgccgccgcgccgccatcatggacaccagccgtgtgcagcctatcaagctggccagggtcaccaaggtcctgggcaggaccggttctcagggacagtgcacgcaggtgcgcgtggaattcatggacgacacgagccgatccatcatccgcaatgtaaaaggccccgtgcgcgagggcgacgtgctcacccttttggagtcagagcgagaagcccggaggttgcgctgagcttggctgctcgctgggtcttggatgtcgggttcgaccacttggccgatgggaatggtctgtcacaatctgctccttttttttgtccgccacacgtaactgagatgctcctttaaataaagcgtttgtgtttcaagttaactcagaaaaaaaaaaaa

SEQ ID NO: 643 - DNA, 997 bp, Homo sapiens
  CDS (67)..(948)
aaggatccttaattaaattaatccccccccccccccccccccgcttcttttccgacaaaacaccaaatggcggatgacgccggtgcagcgggggggcccgggggccctggtggccctgggatggggaaccgcggtggcttccgcggaggtttcggcagtggcatccggggccggggtcgcggccgtggacggggccggggccgaggccgcggagctcgcggaggcaaggccgaggataaggagtggatgcccgtcaccaagttgggccgcttggtcaaggacatgaagatcaagtccctggaggagatctatctcttctccctgcccattaaggaatcagagatcattgatttcttcctgggggcctctctcaaggatgaggttttgaagattatgccagtgcagaagcagacccgtgccggccagcgcaccaggttcaaggcatttgttgctatcggggactacaatggccacgtcggtctgggtgttaagtgctccaaggaggtggccaccgccatccgtggggccatcatcctggccaagctctccatcgtccccgtgcgcagaggctactgggggaacaagatcggcaagccccacactgtcccttgcaaggtgacaggccgctgcggctctgtgctggtacgcctcatccctgcacccaggggcactggcatcgtctccgcacctgtgcctaagaagctgctcatgatggctggtatcgatgactgctacacctcagcccggggctgcactgccaccctgggcaacttcgccaaggccacctttgatgccatttctaagacctacagctacctgacccccgacctctggaaggagactgtattcaccaagtctccctatcaggagttcactgaccacctcgtcaagacccacaccagagtctccgtgcagcggactcaggctccagctgtggctacaacatagggtttttatacaagaaaaataaagtgaattaagcgtgaaaaaaaaaaaa

SEQ ID NO: 644 - DNA, 3323 bp, Homo sapiens
  CDS (162)..(3323)
gtaccggtccggaattcccgggtcgacgatttcgtgcggctcgcggttcctccaccgcctccgccgccgcatcctccgcttgtgctaccgccgcgggcgctgggccgctctgctggtccggcatgagaccgtgagacgagagacgggtcggggccgccgacatgtttggccgctcgcggagctgggtgggcgggggccatggcaagacttcccgcaacatccactccttggaccacctcaagtatctgtaccacgttttgaccaaaaacaccacagtcacagaacagaaccggaacctgctagtggagaccatccgttccatcactgagatcctgatctggggagatcaaaatgacagctctgtatttgacttcttcctggagaagaatatgtttgttttcttcttgaacatcttgcggcaaaagtcgggccgttacgtgtgcgttcagctgctgcagaccttgaacatcctctttgagaacatcagtcacgagacctcactttattatttgctctcaaataactacgtaaattctatcatcgttcataaatttgacttttctgatgaggagattatggcctattatatatcgttcctgaaaacactttcgttaaaactcaacaaccacactgtccatttcttttataatgagcacaccaatgactttgccctgtacacagaagccatcaagtttttcaaccaccctgaaagcatggttagaattgctgtaagaaccataactttgaatgtctataaagtgtcattggataaccaggccatgctgcactacatccgagataaaactgctgttccttacttctccaatttggtctggttcattgggagccatgtgatcgaactcgatgactgcgtgcagactgatgaggagcatcggaatcggggtaaactgagtgatctggtggcagagcacctagaccacctgcactatctcaatgacatcctgatcatcaactgtgagttcctcaacgatgtgctcactgaccacctgctcaacaggctcttcctgcccctctacgtgtactcactggagaaccaggacaagggaggagaacggccgaaaattagcctgccggtgtctctttatcttctgtcacaggtcttcttaattatacatcatgcaccgctggtgaactcgttagctgaagtcattctgaatggtgatctgtctgagatgtacgctaagactgaacaggatattcagagaagttctgccaagcccagcattcggtgcttcattaaacccaccgagacactcgagcggtcccttgagatgaacaagcacaagggcaagaggcgggtgcaaaagagacccaactacaaaaacgttggggaagaagaagatgaggagaaagggcccaccgaggatgcccaagaagacgccgagaaggctaaaggtacagagggtggttcaaaaggcatcaagacgagtggggagagtgaagagatcgagatggtgatcatggagcgtagcaagctctcagagctggccgccagcacctccgtgcaggagcagaacaccacggacgaggagaaaagcgccgccgccacctgctctgagagcacgcaatggagcagacccttcctggatatggtgtaccacgcgctggacagcccggatgatgattaccatgccctgttcgtgctctgcctcctctatgccatgtctcataataaaggcatggatcctgaaaaattagagcgaatccagctccccgtgccaaatgcggccgagaagaccacctacaaccacccgctagctgaaagactcatcaggatcatgaacaacgctgcccagccagatgggaagatccggctggcgacgctggagctgagctgcctgcttctgaagcagcaagtcctgatgagtgctggctgcatcatgaaggacgtgcacctggcctgcctggagggtgcgagagaagaaagtgttcaccttgtacgacatttttataagggagaagacatttttttggacatgtttgaagatgagtataggagcatgacaatgaagcccatgaacgtggaatatctcatgatggacgcctccatcctgctgcccccaacaggcacgccactgacgggcattgacttcgtgaagcggctgccgtgtggcgatgtggagaagacccggcgggccatccgggtgttcttcatgctgcgttccctgtcactgcaattgcgaggggagcctgagacacagttgccgctgactcgggaggaggacctgatcaagactgatgatgtcctggatctgaataacagcgacttgattgcatgtacagtgatcaccaaggatggcggcatggtccagcgattcctggctgtggatatttaccagatgagtttggtggagcctgatgtgtccaggcttggctggggagtggtcaagtttgcaggcctattgcaggacatgcaggtgactggcgtggaggacgacagccgtgccctgaacatcaccatccacaagcctgcgtccagcccccattccaagcccttccccatcctccaggccaccttcatcttctcagaccacatccgctgcatcatcgccaagcagcgcctggccaaaggccgcatccaggcaaggcgcatgaagatgcagagaatagctgccctcctggacctcccaatccagcccaccactgaagtcctggggtttggactcggctcctccacctccactcagcacctgcctttccgcttctacgaccaggggcgccggggcagcagcgaccccacagtgcagcgctccgtgtttgcatcggtggacaaggtgccaggcttcgccgtggcccagtgcataaaccagcacagctccccgtccctgtcctcacagtcgccaccctccgccagcgggagccccagcggcagcgggagcaccagccactgcgactctggaggcaccagctcgtcctccaccccctccacagcccagagtccagcagatgcccccatgagtccagaactgcctaagcctcaccttcctgaccagttggtaatcgtcaacgaaacggaagcagactctaagcccagcaagaacgtggccaggagcgcagccgtggagacagccagcctgtcccccagcctcgtccctgcccggcagcccaccatttccctgctctgcgaggacacggctgacacgctgagcgtcgaatcgctgacccttgtccccccagttgacccccacagcctccgcagcctcaccggcatgcccccgctgtccacgccggctgccgcctgcacagagcccgtgggcgaagaggctgcatgtgctgagcctgtgggcaccgctgaggactga

SEQ ID NO: 645 - DNA, 843 bp, Homo sapiens
  CDS (388)..(507)
atgctgtgggtgatagatcttcttctcctaaaatagtgtctgtgcaaaagatgggaggaaacgatcgcctattaatttggtttttaagtccagatgaagaaccttgaaaatagccaaagagccaaaaatactgagtaacttcacattcagagggactgtttcttctctctatatatagcaagtcaaaaatagacatctcggattctgggcccccagcatcatctttgtactcaccttccttcaaatcccaccatttacaccctcggagcccctgttttatctgcttgtagatttctctgacacctgccaattggcagctccacgtcctcctcaacatttttactctttcattaaggtgtaaggagaattcaacaccattgggcacaaatgcatgaatgcaatgtccatacatacgcctctttattttgcctttttctgcttcatactggtaagctttgctgtctaaattctcaccggcactttcattgcataaaatattccaaatgaggccatgctcagcgttcagaactactccctgtaccaccagccatatttcaacaatgtgggaaccgtttcctatagactggggtctggagttctcagtgacaaggagaataatgtaaacataagatgacgatgataatgaagaaatactctggacggcttttatcacctaggatccacaggaagcctgccaagagggcagaagcacattccatcagcagagggcacattatcaatgcagccagaccttcactttataacatttaatatggaaataccggacgcgtgggtcgacccgggaattccggaacggtactcccaggcgtacggcttcataaa

SEQ ID NO: 646 - DNA, 1465 bp, Homo sapiens
  CDS (251)..(931)
attgaaagctgtacgcccgcggtaccggtccggaattcccgggtcgacccacgcgtccggggcatggtggcatgtgcctgtagtcccagctactcgggaggcgggggcgtgggagtcgcttgagcctgggaggtgtaggttgcagtgagccgggatcgcaccactgcactccagcctgggcaacggctggctagcgtttaaacttaagcttccggaattcccgggtcgacgatttcgtccgcggacgaagatggcgaccgccatgtacttggagcactatctggacagtatcgagaaccttccctgcgaacttcagaggaacttccagctgatgcgagagctggaccagaggacggaagataagaaagcagagattgacatcctggctgcagagtacatctccacggtgaagacgctgtctccagaccagcgcgtggagcgcctgcagaagatccagaacgcctacagcaagtgcaaggaatacagtgacgacaaagtgcagctggccatgcagacctacgagatggtggataaacacattcgaaggcttgatgcagacctggcgcgctttgaagcagatctgaaggacaagatggagggcagtgattttgaaagctccggagggcgagggttaaaaaaaggcctgcgtcagaaagaaaaaagagggtcccggggccgaggcaggaggacatcagaggaagacacaccaaagaaaaagaagcacaaaggagggtctgagttcactgacaccatcctgtccgtgcacccctctgatgtgctggacatgcccgtggacccaaacgaacccacgtactgcctgtgccaccaggtctcctatggggagatgattggctgtgacaatccagactgtccaattgagtggtttcactttgcctgcgtggaccttaccacgaaacccaaaggaaaatgatttcatttaaataaaaacctgtagtctgggcaacatcgggagaccccaactctacaaaaaatacaaaaattagtgcctgtcctcttagccacagtgtgtgctgccccactagggacaggaggatggtgagcaacgtgttgttgacagaggccaatgtagaccactctttaagtagctagatttctgtatatctgtcagttattttatgtgtcaacatatagtgtgcatatattcattgttaattatgtggccacatttattaaatagacatgtcatttaacttgaagttttttgagatactttatttaaagcattctcccactgacaccctccctgccaaaggtgttgtataccctccaaagagatcgtagcattacctcagaggagtggcatttagagtaaagagaaaatgctcaaatgccacgtagcctctctccagatgatctctcagagggagggtcaaagagtaaaagttttgggcacgaatggcgaaacgaaatcgtcgagccggcaattccggatcggtcaagcagt

SEQ ID NO: 647 - DNA, 5804 bp, Homo sapiens
  CDS (88)..(3927)
cacatcctcaacagttccaggaaaaccatcactgcccttgccttctcccctgatggcaagtacttggtcactggagagagtgggcacatgcctgccgtgcgggtttgggacgtggcagagcacagccaggtggccgagctgcaggagcacaagtatggtgtggcttgtgtggccttctctcctagcgccaagtacattgtctctgtgggctaccagcatgacatgatcgtcaacgtgtgggcctggaagaaaaacattgtggtggcctccaacaaggtgtccagtcgggtgacagcagtgtccttctctgaggattgcagctactttgtcactgcaggcaaccgacacatcaaattctggtatctcgatgacagcaagacctcaaaggtgaatgccactgtgcccttgctgggccgctcagggctgctgggagagctacggaacaacctattcactgatgtggcctgtggcagaggaaaaaaggcggacagtaccttctgcatcacgtcctcagggctgctgtgcgagttcagtgatcgaaggcttttggacaagtgggtggagctgagggtctaccccgaggtgaaggatagtaaccaggcctgcctgccccccagttcctttattacctgctcctcagacaacaccatccgcctgtggaacacagagagctccggggtgcatggctccaccctccaccgaaacatcctcagcagtgacctcattaaaatcatctatgtggatgggaacacccaggccctgctggacacagagctgcctggaggagacaaagctgatgcatccctgttggatccccgcgtgggcatccgctcggtgtgtgtcagccccaatggacagcatctagcatcaggggaccgtatgggcacacttagggtgcacgaacttcagtccctgagtgagatgctgaaggtggaggcccatgactctgagattctgtgcctggagtattctaagccagacacaggtctgaaactgctagcatcggcgagccgggaccggctgatccatgtgctggatgccgggcgggagtacagcctacagcagacgctggacgaacactcatcctccatcactgctgtcaagtttgcagccagtgatgggcaagtccgcatgatcagctgtggagcagacaagagcatctacttccgcactgcgcagaagtctggagatggagtgcagttcacacggacacaccacgtggtgcggaagacgaccctctatgacatggatgtggagcccagctggaagtacacggctatcggctgccaggaccgaaatattcggatatttaacatcagcagtggaaagcagaagaagctgtttaaagggtcacagggtgaggacggcacactcattaaggtgcagacagacccctcagggatctacattgccaccagctgttctgacaagaatctctccatttttgacttctcctcaggcgagtgcgtggccaccatgtttggccactcagagattgtcactggcatgaaatttagtaatgattgtaaacatctcatctctgtgtctggggacagctgcatatttgtgtggcgcctgagctctgagatgaccatcagcatgaggcagcgtctggccgagttgcgccagcgtcagcggggcggcaagcagcaaggaccatcctctccccaaagggcttctggacccaaccggcaccaggccccatcaatgctgtctcctggaccggctctctcatcagacagtgacaaggagggagaagatgaggggactgaagaagaacttccagcactgcccgtccttgccaagagtaccaagaaggcactggcctcggtccccagcccagctttgccccgaagcctgtcccactgggagatgagtcgggcacaggagtccgtggggttcctggacccagctcctgcagccaacccaggacccagaagaagagggcgctgggttcagccaggtgtggaactgagcgttagatccatgctggatctgcggcagctggaaacactggccccaagcctgcaggaccctagccaggactcgctggccatcatcccatctggtcccaggaagcatgggcaggaggcccttgagacttcactcactagccagaatgaaaagccccctcggcctcaggcttcccaaccttgttcctatccccatattatccgattattgtcacaagaggaaggggtctttgcccaagatctggaacctgcacccattgaagatggtattgtctacccggagccgagtgacaaccccaccatggataccagtgagttccaagtgcaggctccagcccggggaactctgggaagagtgtacccaggcagcaggagctcagaaaagcacagccctgacagtgcctgctctgtggattacagcagcagctgcctttccagcccggagcaccccactgaagactctgagagcacggagcccctcagtgtggatggcatctcctcagaccttgaagagccagctgagggtgatgaagaagaggaagaagaggagggaggcatgggcccctatgggctacaggagggcagcccccagactccagaccaggagcagtttctaaaacagcactttgagactctggccagtggagctgctccaggggccccagtgcaggtcccagagaggtcagagtctcggagtatctcttcacgattcctgttgcaagtacagacccgcccactcagggaaccatccccatcctcctcaagcctggcactgatgtcgagaccagcccaggtgccacaggcatctggtgagcagccgagaggcaatggtgccaatccccctggagcacccccggaggtggaaccgtcctctggcaaccccagcccccagcaggcagcctctgtgctgttgccacgatgccgtctcaaccctgacagcagctgggctcccaagagagtggccacagccagccccttttctggactccagaaggcccagtctgtgcacagtctggtgccacaggaaagacatgaggccagtctgcaggccccttcaccaggcgcactgctgtctcgggagatcgaagctcaggatggtctgggctccctgcccccagctgatggccctccgtctcggcctcactcctatcagaaccccaccaccagttccatggccaagatatcccgcagtatctctgttggggagaacctgggcctggtggctgaacctcaagctcatgcccccatccgagtctcaccactcagcaagctggccctgcccagccgggctcacctggtcctggacatccccaaaccactgcctgaccgtcctaccctggctgcattctctcctgtcaccaaaggccgggcccctggcgaggcagaaaagcctggcttcccggtgggcctaggaaaagctcacagtacaactgagagatgggcctgtttgggggagggcaccactcccaagcctaggacagagtgccaggctcatcctgggcccagcagcccctgtgcccagcaactgccagtcagcagcctcttccaaggccctgaaaacttgcagcccccaccccctgagaagactcccaaccccatggaatgcaccaagccaggggcagccctgagccaggactcagagccagcggtgagcctggagcagtgtgagcagctggtggcagagctccgcggcagcgtgcgccaggcagtgcggctctaccactcggtggctggctgcaagatgccctcagcagagcaaagtcggattgcccagctcctcagagacaccttctcttcagtgcgacaggagctggaagctgtggctggggcagtgctgtccagcccaggcagcagccctggggctgtgggagccgagcagacacaggccctgctggagcaatactcagaactgttgcttcgagccgtggaacggcgtatggaacgcaaactctgagttctggaagcctgtcccaagtgaatgaatgctccagcgattccaaactgcagcccctctgcccctcaccaaaacctgcggggctgcttggagtggaaagcagggagcagtgttcagaggcaaagcagccttcccagccgctcctcgtggggggcctgtatttattaatttatttccctgactgttgcctcacttccttggaactcctgcctccacagcccctccagtggcagggacaggtcttgggtctttgtcatcttggtgctgtgagaggtaggagggcagcctgccccatctaggaatctgggaagggctggccctctcttagaagccatttgaaattactgcagggattagctccctgtggtggagcatacacagggtactctggggtcgaggtgagaggtgatgtggtattcagtgcccgtcagccaactgtgggccttcacctctacttgcacttcccctctcacaccagctgcactcccctggctgccagagcagggtggttttccccaatacctggagctcagaaaggcagagccatctggccctccagggtgtccccagccatcaggagacttgagttggtatttggacctgagcccgcacattccactcccattctccctccaagaggggcccagcattgtatttccctgtgaccccttactctcctggccagaacttgagccagctgtgggatgttgctgcaggacagtaagccctcacctgggcaaacatgaagctctggcctcctttcctcagccccttgttcttccctgtcctccaccctggaccccagccggctgctggagcccagaggccaccttctccctgcatcctgaatgatgcttagtcagaagcctgtgttggaacatccctcgtttacggggcgctggcctacctcctgaggacctcagccacagatgagatcacacgcatgcacgtgcacacatgtacacacacacacctacctgcacagcacgctgttgagtgttggttgctagagtatccggctggctgctgtgtgcctggtttcctcacatcctgcctcagcttcaccaccctggcttatgtggaacacctatcagggagcagaaaaggggtgcagtacactaagtgaacccagattctggattcttggtgtccacagcctagctgatacgagatagcccataggacacctggtttaggtagaaggagcctcctcaaaggcagtgctgggcacccacgggtgtgctggatactggagtttgagaggagggaggtgctggggccaaaggagacactagaaaagtggtagatgggacaggtaagtggcagaggtgaggggataagttagaatgtaaaagggcagtaattaggggtgagggaaaggagataggggaccctaggaggtagagtgggaccatgtcgtgaggcagttgaagagttgaggaaaggtttttctgggccctactgctcccctctgctgcaggtaagtcagagcagctttaccacagcttcaggccacgagagccccttcacccgccctgctgcgccataggcagaggcttataaagaaatgggttctgggccaggtgtggtggctcaagcctgtaatcccagcactttgggaggccgaggcgggtggatcacctgaggttaggagttcgagatcagcctggccaacatggtgaaaccctgtctctactaaaaataaaaaaattagctgggcgtggtggtgggcgcctgtaatcccagctactcgggaggtttaggcaggagaatcgcttgaaccctggaggtggaggtggaggttgcagtgagccgagatcgcgccattgcactccaacctaggtgacaaagctacacgccatctcaaaaaaaaaaaa

SEQ ID NO: 648 - DNA, 1436 bp, Homo sapiens
  CDS (166)..(837)
  misc_feature (1)...(1436): n = a,t,c or g
gctccgggcagaggcgccaggagctctctcgccccattccctgcggcacaggtggggacgttagggattgaccttggaagtaaaacgccttcaggaattaggtagaaaaggaccatccgttcatccaagatcatctcacctcccatgaagggaacggtcttctaaatgcagttttccttccagcagggtggatggggagcatcgctggctgacaggctggtcagaaaatgtgatgttctgaatcgtggattttcaggttacaataccaggtgggccaaaattatccttccaagattaatcaggaaaggaaacagtttggacatcccagtagcagttacaattttctttggggccaatgacagtgcactaaaagatgagaatcccaagcagcacattcccctggaggagtacgctgcgaacctaaagagcatggtgcagtacctgaagtccgtggacatccctgagaatcgagtcattctcatcacgccgaccccactttgtgaaacagcctgggaagaacagtgcatcatacaaggttgcaaactaaatcgcctgaactctgttgttggtgaatatgccaatgcgtgtttacaagtggcccaagactgtgggactgacgtacttgacctgtggaccctgatgcaggacagccaggacttctcatcttatttatcagatggactacatttgtctccaaaggggaatgaatttttgttctcgcatctctggcctttgatagagaaaaaggtctcttctctacctttgctgcttccttactggcgggatgtagcagaagcaaaacctgaattaagtctgctgggagatggagaccattagccaatcacaggagacccaaatctgcttgttatctacagaactcaaagttgtcaatacgtagaggtacgcttttttcctcaggcttaaacctttgccactgatattaataataaaagtattagatgatttttcagggaagttttatacttaggtccattgtgtttcgacagtatttattaatgcagatatcagtgctacagctataaaatataccctgagcagcttgttaattctataaatgacaaagactatgtttttaaaaagtcacaattttataaaaatggtttttcttacattcttttgagaactgtttcactcatacatacacccacacaccccactcaaccttgtatcaaattccaaaagtgtaactaaaggtataaggattatcatgactaggttaaaaggataggcaaataccataagggtacaagttccaaggtattaggtataacaaggtatctggggtaaccaaatgtccttgggaatgggggggtgggnggggtatatggttaggtccccgggttgggttaactgcccntcaaatttacaggtttaaatgttttgggccggtgagcccctttccgttcttggggggg

SEQ ID NO: 649 - DNA, 1183 bp, Homo sapiens
  CDS (118)..(252)
  misc_feature (1)...(1183): n = a,t,c or g
cggaattaccgggtcgacccacgcgtccgattcattttgcccagaaagttcctgcttcagagctgaaggtaagtacattttccactaattcctcagcttgctaagtgcttttggaccatgaatagagcagctaggaacaaatctgagaagaggtactattcagaattcctccaaatagctcatctttttaattatgggctttcatccttcctaagggagtttattatttttctaattaaactactacaatgaaggctattacctttttgtctagctaaaacaatctttcctattaatgaatttattggcttctctagtactcttcaaattgtcattgagctctattcaaggactacagccagttttttcctaatagaattaggggtgaaacaaatcatgcttctattatcacttctggagttagcccttcacctgatcagcttgtctaggtgtaagagtgcgggggttttagcgccacaaagacgtgggcatgcggcagcttcctgaacctcaggcattggtgtctaagcaactccaccatccacacgtgtgacgttacagttctgggagatgcacgcacactntctgtgcctttctcaaccactagcttaatcagcctccaccttcctaggcagcaacacggggtgcaggataaacaataactaaaagcatactgattatcacatactcctgcaaagtgtttgcacccagaaagcatgcagtcactgccatcatgaggggctcacacctttctttggctggctctgtcggggggcacatgttacctataaaagaggcccaagcattcgattaaacagctcttctttataattcagtttggctaagctgccttcaaaaaacttgtccccaattcttcacttacccccccccacttttacacacgcatatacccaacttacccgggcccacttggaaacactacatacatagcatgcttgccaaaagttcacatagggattaggattgcgaaaggggtaccacaggtgggccacagcgtcctgcgtctggacgtaacacagtgaggacgggctgtcatgcttctgtgatcctcgtcacgccacgcctacgacgcgagtgccgtgagacggtcggtacgctaggcattggtcaccatcgctacgacacgccatacagtgcgcttgccagcctctcgtgtcgcgcc

SEQ ID NO: 650 - DNA, 1885 bp, Homo sapiens
  CDS (1115)..(1744)
ccttaattctcccacggcaaagtccatttctgaaggaaaaactacctccttccaagggtctcctgctaccccactctctttcctcttcttctttttcttccttttcagagctggctcctcgatgactggctgctctaccttctttttggacttcatctttttctttgcggaggccttagggtcatcacttatggggatgtattccggagcctcaactttgactggcttctttttacttcctttcctagggctgctctccatggacctggagggcttggagtggcctgggagggcatctccctcctggtggattttttttttcttcttcaccttcccattgtgttctctggggctcttccgcttccgtttctgccccaaggctgcctgttcctcatccttcttccccactgagcaagtgtccccaacatccctggcctccctggcctcacagaaccaagggtcctggaccgagaaggctgtggggtcctgggccccctttttttccttcttgtgttttttgagcttcttgccaactctggtttcctcctcaccctgtctagggtctggggaggttttcaccccagaggcatgggacatggctagaggtgacttcttatttttcttttccccactgaggaactccaagtggccaaacacctgcttcctgaggctgggtgacttctctgtccgtctagcaggcagcgtggtctcaggttctacatgctcctcgcaaagggtgctgacacccttctttttcttcttctttttcttcactagaggcatctcaggtgcctgcccatgggccacactcttagagggggatgtagctcttaaaggagaaacatcagcaaagtaatcatcattgtttaaaactgagtatcgagtctctggttctttgaccactttcttcttctttttcttctctgggagcccaaggtctactttgtgtgtcttggtgatcattccggtgggcgaaatttccccgcctccacgtgagagccagctccgccgtgacccggaagtccacttcgagtcgccggcccaccctctcgggttccggcttcttccgggtcgcggccttccggcgaacgcggttaccgtggaaaccgcggccatggcggcaccgcggcaaatccccagccacatagtgcgcctcaagcccagctgctctacagactcgtcgttcacccggacgccggtgcccaccgtgtctctcgcgtcccgcgagctgcctgtctcgtcgtggcaggtcaccgagccgtcaagcaagaatctgtgggagcagatctgcaaggagtatgaagctgagcagcctccctttccagaaggatataaagtcaaacaggagcctgtgattacggttgcgccagtagaggaaatgctttttcatggcttcagtgcagagcactattttccggtttcccatttcaccatgatctcacgtacaccctgtcctcaagataaatcggaaacaatcaacccaaaaacatgttctcccaaagaatatttggaaactttcatctttcctgttctgcttcccggaatggctagcctgcttcaccaagcgaagaaagaaaaatgttttgaggttcgctgtgatcctgagattcaagaactgcgtcagtggcagaagaaacttcgcgaggccaagcacattcaccagcaagtcaaaattttctgggccaagcaagaacaaaaagtgaaatgcaaaatggaggacgatcagtacctgcagccaagatgaaaattccatcatcttaaccatagctaagacgtatctttgcccattcgacacaagttaccttgtgcaaggaaaatgtccaaatgatgctctctctcttgtgatttctttaacaagacttggaacatgtgcaaaaaaaaaaaa

SEQ ID NO: 651 - DNA, 635 bp, Homo sapiens
  CDS (115)..(363)
agggacttgccccgtaattcccgggacgacgatctcgtccggaacgggtgccgggacggatcaccgtacggtcgatcgcgacccgaggaggcggaagagcggcgccgtcactccatggattcctttgggcaacccagaccagaagataatcagtcagtagtcagaagaatgcaaaagaaatactggaaaactaaacaggtctttatcaaagcaacaggaaaaaaagaggatgagcacttggtggcgtctgatgctgaactggatgctaaacttgaggtttttcactctgttcaagagacatgcactgaacttctgaagataatcgagaaataccagctaagactcaatggtatgaaatcatagttatctatctgataattcccatttaaaataaatattagcattttttaaaatgaaagatttaatgtaaaaacaattttgtgaatagcttcttatggcaaaatatgaatatttacagctacctgttctcaaaggccccagtattctctcttctttcctcagttaatcaaatcctctgacccagatttattttttgctgatattttttttctttgagacagggtctttctctgcactccagcctaggcaacagagcaagactccgtctcaaaaaa

SEQ ID NO: 652 - DNA, 2864 bp, Homo sapiens
  CDS (407)..(2746)
gtaagggcacccaccaggtgtaattgtgggcgagcggccgcttcggagctgacactaagcatgtgcagatcaagtccagaagcgccggggttcctcgaagcagttttcaggacttaaggctctgggacatccagcacagtgagcggcccctgggcaccaccagaaaacatttgtgggtgaacgtggagtgatgaccatgtggacactgtctttccagggtttcttggagcctctgcagagtctgggggccaggcttcttagtggaaactgcaggatcttccttctgacccctgcttgcctcgccccagcagctccggttgagtccacagatgccagctcagcttccagcttggggaagagtggggttgtcagcaggagagcctgagggctgaggcccagcgtgaacatggcagctaatggggactctcccccatggtccccggccctggctgcagagggacgtggcagctcatgtgaggcttcagtgtcatttgaggacgtgactgtggacttcagcaaggaggagtggcagcacttggaccctgcccagagacgcctgtactgggatgtgacactagagaactacagccacctgctctcagtggggtaccaaattcccaagtcagaggctgccttcaagttggagcaaggagaggggccatggatgctggagggggaagccccacatcagagctgttcaggtgaggctattgggaaaatgcagcaacagggaattcctggaggaattttcttccactgtgagagatttgatcaacccataggagaagattcattatgttctattttagaagaactgtggcaagataatgaccagctagagcaacgtcaggaaaaccagaataaccttttaagtcatgtgaaagtattgattaaggagaggggctatgaacataaaaacattgaaaaaataattcatgtgactaccaagcttgttccttcaattaaaagactccataactgtgacacaattttgaagcatactttaaactcacataatcataatagaaacagtgcaacaaagaaccttggcaagatttttggaaatggtaacaatttcccccatagcccttcctctactaagaatgagaatgctaaaacaggagcaaattcctgtgaacatgaccactatgaaaaacatctcagccacaaacaagctcccacccaccatcagaaaattcatcctgaggagaagctttatgtgtgtactgaatgtgtaatgggcttcactcagaagtcacatctgtttgagcatcagagaattcatgctggagaaaagtcccgtgaatgtgacaaaagcaacaaagtcttcccccagaaaccccaggttgatgtacatccaagtgtttatacaggagaaaaaccctatctgtgtactcaatgtgggaaagtctttaccctcaaatcaaacctcattacacatcaaaaaattcataccgggcagaaaccctacaaatgcagtgaatgtggaaaagcctttttccagagatcagacctctttagacatctgagaattcatacaggagaaaaaccttatgaatgcagtgaatgtggaaaaggcttctcccagaactcagacctcagtatacatcagaaaactcataccggagagaaacactatgaatgcaatgaatgtgggaaggctttcacaagaaaatcagcactcaggatgcatcagagaatccacacgggagagaaaccttatgtatgcgctgactgtgggaaggccttcatccagaaatcacatttcaacacacatcagagaattcatactggagaaaagccgtatgaatgcagtgactgtgggaaatccttcactaagaagtcacaactccatgtgcatcaaagaattcacaccggagagaaaccctatatatgtacagaatgtggaaaggtcttcactcacaggacaaacctcaccacacatcagaaaactcatactggggaaaaaccctatatgtgtgctgaatgtggaaaggcttttactgaccagtcaaatctcattaaacaccagaaaactcacactggagagaaaccctataagtgcaatggctgtggaaaagccttcatatggaagtcgcgcctcaaaatacatcagaaatctcatattggagagagacactatgaatgcaaggactgcgggaaagccttcatccagaaatcaacactaagcgtgcatcagagaatccatacaggagagaaaccgtacgtttgtcctgaatgcgggaaggcctttatccagaaatcgcacttcattgcgcatcatagaatccatactggagagaagccttatgaatgcagcgactgtgggaaatgcttcactaagaagtcacaactccgtgtgcatcagaaaatccacacaggtgagaagcccaatatatgtgctgaatgtggaaaggccttcactgaccgatcaaatctcataacacatcagaaaatccacactagggagaaaccctatgaatgtggtgactgcgggaaaaccttcacctggaagtcacgcctcaatatacatcagaagtctcatactggagaaagacactatgaatgtagtaaatgtgggaaagctttcatccagaaagccacactaagtatgcatcagataattcatacaggaaagaaaccttatgcttgtacagaatgtcagaaggcctttactgacagatcgaatctcattaaacaccagaaaatgcatagtggagaaaaacgctataaagccagtgactgagaaagtcttcacctggaaatcacaactgggtatgcatcaggtatctaatagcagggaggaggaaggcctgttgctgcaatcattgtacagggggaaatgggtatgagagactgaggct

SEQ ID NO: 653 - DNA, 817 bp, Homo sapiens
  CDS (148)..(459)
atgtctccagaggtggggcctagagctccgcccacttttttgatgttttcaaacaggtccgcatcgagagactataagccctggtctgcgactggcaatcacagtgggcagcccgattttctgctgagtaggcgctgtgatttcagaatgtctgggcgaggtaaaggtggcaaggggctgggtaagggaggcgccaagcgccaccggaaggtgctgcgggacaatatccaaggcattacaaagccggcgattcgccgtctcgcccgacgtgggggcgtcaagcgcatttctggtctcatctacgaggagacccggggagtcctcaaagtcttcctggagaacgtgatccgtgacgcggtgacttacacggagcacgccaagcgcaagaccgtcacggccatggatgtggtgtacgcgctgaaacgccagggtcgcaccctttatggtttcggcggttgagctgtccccacagcttctctacagactccaaaaggcccttttcagggcccccaaactgtcacagaaagagctgttaacacttcctagataacggaccaagtctagctctgccaccgaggctggagtgcagtggcacgatctcgcctccgcctcccgggttcaagcgattcacctgcctcagcttcccgagtagctgggattacaggcctgcgccaccacgcctggctaatttttgtatttttttttttttttgggaaaaaacggggtttccccttgtgggccgggggggttttgaactccgggcctaaagggattcccccccctccgcctcccaaagggggggattttaaggggggac

SEQ ID NO: 654 - DNA, 1857 bp, Homo sapiens
  CDS (1)..(1785)
atggcggcggccgtgcttagggattcgacttcggttcccgtgactgcagaagctaaacttatgggctttacacagggctgtgtgacctttgaggacgtggccatttacttctcccaggaagaatgggggctccttgatgaggctcagaggctcctgtaccgcgatgtgatgctggagaactttgcacttataactgcgctggtttgttggcatgggatggaggatgaagagacacctgagcaaagtgtttctgtagaaggagtacctcaggtcaggactccagaggccagtccatccacccagaagattcaatcctgtgacatgtgtgtcccattcctgaccgacattttgcacctgaccgatttgcctgggcaggaactatacttgactggggcatgtgcggtctttcaccaggaccagaagcatcatagtgcagagaaacccttggaaagtgacatggacaaggcctcatttgtgcagtgctgcctgttccatgagtcaggaatgcctttcaccagcagtgaggttgggaaggacttcctagccccattgggcattcttcagccgcaagctattgctaactatgagaagccaaacaaaatcagcaaatgtgaggaggcctttcatgttggaataagtcattacaagtggagtcaatgcaggagagagtccagccacaaacacactttttttcaccctagagtctgcactggaaaaaggctttatgaatctagcaaatgtgggaaagcctgctgctgtgagtgctcccttgttcagctgcaaagagtccaccctggagaaaggccttatgagtgcagtgaatgtgggaaatcttttagccaaacctctcatctgaatgatcatcggagaatccacactggagaaaggccttatgtgtgtggtcagtgtgggaaatcatttagccaaagagccaccctcattaaacatcacagagttcacactggagaaaggccttacgagtgtggtgaatgtgggaaatcttttagccaaagttccaaccttattgaacattgcagaattcacactggagaaaggccttatgagtgtgatgaatgtggaaaagcctttgggtccaaatccactcttgttcgacaccagagaactcacacaggagaaaagccatatgagtgtggtgaatgtgggaaattattcagacaaagcttcagccttgttgtacaccagagaattcacactacagcaaggccttatgagtgtggccagtgtgggaaatcatttagcctaaagtgtggcctcattcagcaccagttaattcacagtggagctaggccctttgagtgtgatgagtgcggaaaatcctttagccaaagaaccaccctcaataaacaccacaaagttcacactgcagaaaggccttatgtatgtggggaatgtgggaaagcttttatgttcaaatctaaacttgttaggcaccagagaactcacactggagaaaggccttttgagtgcagtgaatgtgggaaattttttagacaaagctataccctcgttgaacaccagaaaattcacactggattaaggccttacgactgtggacagtgcgggaaatcctttatccaaaagtctagcctcattcaacaccaagtggttcacacaggagaaaggccatatgagtgtggcaaatgtgggaagtcctttacacaacactctggcctcattctccaccgaaaatctcacactgtggagaggcctcgtgacagcagcaaatgtggaaaaccctacagcccaagatctaacattgtttaactcttgaaactccaaacctgagaaaagccttagacctgcagggaatgtgccatgtctttcttcagtgttatg

SEQ ID NO: 655 - DNA, 1113 bp, Homo sapiens
  CDS (166)..(804)
catgatgaagataccccaccaaacccaaaaaaagagatctctcgaggatccgaattcgcggccgcgtcgacgtgggctggagcgggcggagctcggcccgcggcttgcgtgagctcaggccggtcccagcgtccagagcgccggcccttcggcttcttctaggccatggcagggccgggcccaggcccgggggacccggacgagcagtacgatttcctgttcaagctggtgctggtgggcgacgcaagcgtgggcaagacgtgcgtggtgcagcgcttcaagaccggcgccttctcggagcgccagggaagcaccatcggcgtcgacttcaccatgaagacgctggagatccagggcaagcgggtcaagctgcagatctgggacacggccggccaggagcggttccgcaccatcacccagagctactaccgcagtgccaatggggccatccttgcctacgacatcaccaagaggagctccttcctgtcggtgcctcactggattgaggatgtgaggaagtatgcgggctccaacattgtgcagctgctgatcgggaacaagtcagacctcagcgagcttcgggaggtctccttggctgaggcacagagcctggctgagcactatgacatcctgtgtgccattgagacgtctgccaaggactcgagcaacgtggaggaggccttcctgagggtggccacggagctcatcatgcggcacgggggccccttgttcagcgagaagagccccgaccacatccagctgaacagcaaggacatcggagaaggctggggctgcgggtgctgaccaggggccgggccggcagactgggggttccccacctccttgctctccccagcctgccaagcccagccctccagagccagccctcctgggtaccggcaactacagcagccgggtgaagctctggagctctgcatcctgtggcctggctgcgggatggaggctctccttgaggaaggggaagcaggataccctggcgggccaccctgccagccagcagctggccctccaccatcttcacattccaagactggcctgaacccgccggtgtgggccacagtgggaggggccagcagtcctccctgtcccatg

SEQ ID NO: 656 - DNA, 1406 bp, Homo sapiens
  CDS (907)..(1029)
ccccgtttttactaaaaaacaaaaaaataaatgggggggggggggcaagcccgtaatcccaactacctggggagggtgagacaacaaaatccctttaaactgggaggcaaaaaattcaatgaaccgggattttggttctgccctcccacccgggggcaaaaggaggctccctccaaaaaaaaaaaaaaaaaaaaattcaactaatactttagtcattgtgactttaagaaagagacttggtcacctttactgtaacactcagacatcatttacttcagttgatggagatttcaaaattccttttcaaaagagctaaacatacaaacaccatgaaaaagtcacctaggccttgcaaaacggaaacttagaaaacgtgagaaaatacagcactatcagtccttgaaattgcgaagatgtcaactggctagagtttaataacaagaatgagtaaactctgggaattctgaaaaatcacacacatgaaacatacagtctagttatcatttctagacttcctgctcattaaaaaataatggtaacctgaagatgtcacactgcttctctacagatttgactggtttctgggttctgcctaaaaggaccctgttggcaacaacctaagttcacttgtactgatcacattttccaagtactctagtcggttaatttacactttatttttttaaaaagttgatttaaaaaagaaacaacacaagtttagaatccataaaatgtcagcaatgctgatgtgcactggactgaaacatcttgatcatcttctgatagaagtaatattccatacaaaaagattcttagattccattttttgcttcattattgtttgtggcttgctttctttgagcaataaaggggtacatacacttgtccgctcctaggaaccgatacatgcacacaactgcttcaaatggtaggatgctcttcatgaaggtcacgatgtacatgaggcggggagtgcagatcatgggctggtcagtgaggatggccttcatggcctgcttcacacagtaatcaggcttcagaggtggcagaaaaggctcaatttctttcctgaaagttatttattcaaaaacaaaatgaaaaattaactcaatagaaaagactggaaatacatatcaaaacattaacagtgatgttatctgagtgatgggattttgggtacattttgttttcttcatagtgcttttctgtattttccaaattttcctgctatgaacacattttattggcacagtctggagaacaagttgggaaaaaaaagcaaaattggtctgcttttccataagatgaaaaagtcatgtttttaagatgccttaaaagtatttcaaattattttcctatgaaagcttcaatgaaaaggagaaggtgtttggccggacgcgtgggtc

SEQ ID NO: 657 - DNA, 1537 bp, Homo sapiens
  CDS (375)..(1127)
gaaagccaggcctcagagccgcagacccacccggccacccctcagcgtctacgcccccgaaacgtctgggccctcacctggccgggggcgtcgtccccttccaggactccctggtttaacgcgcttccccccatgtcctagctgccctccctgtggcgtgagccttcggcctggtgcgccccgctgcccttcctggctgtgactctggtggggttccgaaggcccctttatgcccggcagacccctaccgacggcggcattacattctggggccacgaggaggcactcatcgtttcgttccaaccgccgccaacggccctggccctcgcgagctctggaactacagaggtcgcacgcccgggcagtgagtgtggatggcttggcaggtgagcctgctggagctggaggaccggcttcagtgtcccatctgcctggaggtcttcaaggagtccctaatgctacagtgcggccactcctactgcaagggctgcctggtttccctgtcctaccacctggacaccaaggtgcgctgccccatgtgctggcaggtggtggacggcagcagctccttgcccaacgtctccctggcctgggtgatcgaagccctgaggctccctggggacccggagcccaaggtctgcgtgcaccaccggaacccgctcagccttttctgcgagaaggaccaggagctcatctgtggcctctgcggtctgctgggctcccaccaacaccacccggtcacgcccgtctccaccgtctgcagccgcatgaaggaggagctcgcagccctcttctctgagctgaagcaggagcagaagaaggtggatgagctcatcgccaaactggtgaaaaaccggacccgaatcgtcaatgagtcggatgtcttcagctgggtgatccgccgcgagttccaggagctgcgccacccggtggacgaggagcaggcccgctgcctggaggggatagggggtcacacccgtggcctggtggcctccctggacatgcagctggagcaggcccagggaacccgggagcggctggcccaagccgagtgtgtgctggaacagttcggcaatgaggaccaccatgagttcatctggaagttccactccatggcctccaggtaataaccttggagagagctcagccagggtctggtggctgcgggcacgggcatctcagctccactggttcctccattcagcttaaccagcgcctcccaagcagctgcctatagctggctctataactgagcctggggaagatagaggaaagtcacgtccctgccttcaagggtctcgcagacaggtggggaggcagatggtgaactgtgggtacctagaacagcagaagttcactcaagctacagaaatactagaggagggtggctcatgcctgcaatcccagtactttgggaggccaaggcaggagtattgctggaggccgggagttcgagaccagcctggccaatgtagtaacacccccgtctctacaaaaaatacaaaaataaaaaaattagttgggaaaaaaaaaaaaa

SEQ ID NO: 658 - DNA, 2214 bp, Homo sapiens
  CDS (71)..(988)
cgacccacgcgtccggccgccgctgctacagccgccgccgccgctgttgccgcggcttgttattcttaaaatggcgccgctagacctggacaagtatgtggaaatagcgcggctgtgcaagtacctgccagagaacgacctgaagcggctatgtgactacgtttgtgacctcctcttagaagagtcaaatgttcagccagtatcaacaccagtaacagtgtgtggagatatccatggacagttttatgacctttgtgaactgttcagaactggaggtcaggttcctgacacaaactacatatttatgggtgattttgtagacagaggttactatagtttggagaccttcacttaccttcttgcattaaaggctaaatggcctgatcgtattacacttttgcgaggaaatcatgagagtagacagataacacaggtctatggattttatgatgagtgccaaaccaaatatggaaatgctaatgcctggagatactgtaccaaagtttttgacatgctcacagtagcagctttaatagatgagcagattttgtgtgtccatggtggtttatctcctgatatcaaaacactggatcaaattcgaaccatcgaacggaatcaggaaattcctcataaaggagcattttgtgatctggtttggtcagatcctgaagatgtggatacctgggctatcagtccccgaggagcaggttggctttttggagcaaaggtcacaaatgagtttgttcatatcaacaacttaaaactcatctgcagagcacatcaactagtgcacgaaggctataaatttatgtttgatgagaagctggtgacagtatggtctgctcctaattactgctatcgttgtggaaatattgcttcgatcatggtcttcaaagatgtaaatacaagagaaccaaagttattccgggcagttccagattcagaacgtgttattcctcccagaacgacaacgccatatttcctttgaggccttcgcccatcctgctgacccatttttctgccctcttcttaccccaattttcttgtattaccctctacaatatactttttattgagcactttgctgctgaaatgctgcctcttgcctttttttttttaaattttaaattatctaaatttattgtttgttgtggtgtctatagcaaagtttttctatcaattttcccccatcccatccccaccctggactcatttgagaagacttgagaaatgtcttaatactcacactgctgcatgtagctcttgcttatttactggtctgggaaacaggatgtgtttcctttttttaaaagccaattgacagattacacctaaatactcctccttttgtatcattcagccttttgttttagtttggtaagttttaagaaatttcagcagcaaagttgttattcagtgggcacgatggactccaaatgcctcaagttatgtatacctgtcccagatgtaaacttcattgtcctttgttggatgatattttaaatggatataaaataaattggtctaaagggctgccctccttgttgtgtttttaaattttagttaaaaactgctacagcttatgactttgtactttaagataattgtattgatcttttttcagattccttgtattttttaataaagtaatcttaaataaaactcagataggttaagtgttagaaattttaaacagcttacattgttagcgtaaagttatcttttcttttttcctaatcagagttcttgaccctttggttattgagtttaaaacttcaattgaaattcaatagtatttattttttaaaaaaatcactaaactgtgcctaaagaacataactgccatattaatgttttggtttatatcctctatagtaatagaaaaacatttaatacttgtaatgctgatgtgttaatttgataccagttgagtagaatgtgatcaatccagtttacaatctatcatgagtattattaactaaaatctatgtgcttttcaataggaatcattcttctcttgctgtaacacttgaccttaacttttagaaagtgttcatttttaaactgcaactggaaaggttgaaaagttaggactcttgtatttgtgaactgtaatctgaagcagattatttaaagtgtagaaaaagaaacaagttcttttttgcaaaggtctgtgataccatatttcagctttgtgtaagtaatttgaatatc

SEQ ID NO: 659 - DNA, 2624 bp, Homo sapiens
  CDS (193)..(1776)
agcgaccggtccggaattcccgggtcgacccacgcgtccgctcaggtcgggcttctcagctgcgcacagcagtactcatcttggccctgggaagaaactcaagaagaagcttttgaaacataaagcttggatggggtttgacctctgcagggcagcgcccagctataggagttcccctgctgagcagagaagatgactgcagaattgagagaagccatggccctagccccatggggcccagtgaaggtgaaaaaggaggaggaagaagaagaaaacttcccaggtcaggcatccagccaacaagtgcactccgagaacatcaaagtctgggccccagtgcagggtcttcagacaggccttgatggatcagaagaggaagaaaagggtcagaacatatcctgggatatggcggtagtcctgaaagcaactcaggaggcacctgctgcttcaacccttggcagctactcattaccagggactctggccaagagtgagatactggagactcatgggaccatgaactttctaggtgctgaaaccaagaacctacagttactggttccaaaaactgagatatgtgaggaagctgaaaaacccctcatcatatcagaaagaatccagaaagctgatcctcaaggacctgagttaggagaagcttgtgaaaagggaaacatgttaaagaggcagagaataaagagagaaaagaaagatttcagacaagtgatagtgaatgactgtcacttacctgaaagcttcaaagaagaggaaaaccagaaatgtaagaaatctggaggaaaatatagccttaattctggcgctgttaaaaatccaaaaacccagcttggacaaaagccttttacgtgtagcgtgtgtgggaaaggatttagtcagagtgcaaacctcgttgtgcatcagcgaatccacactggagagaaaccctttgaatgtcatgagtgtgggaaggccttcattcagagtgcaaacctcgttgtgcatcagagaatccacactggacagaaaccttatgtttgctcaaaatgtgggaaagccttcactcagagttcaaatctgactgtacatcaaaaaatccactccttagaaaaaacttttaagtgcaatgaatgtgagaaagcctttagttacagctcacaacttgctcggcaccagaaagtccacattacggaaaaatgctatgaatgtaatgaatgtgggaaaacatttactaggagctcaaacctcattgtccaccagaggatccacactggggagaagccctttgcctgtaacgactgtggcaaagcctttacccagagtgcaaatcttattgtacatcagcgaagccatactggtgagaagccatatgagtgtaaagagtgtgggaaagcctttagttgtttttcacaccttattgtgcaccagagaattcacactgcagagaaaccttacgactgcagcgaatgtgggaaagccttcagtcagctctcttgccttattgtccaccagagaattcacagtggagatcttccttacgtgtgtaatgaatgtgggaaggccttcacatgtagctcatacctacttattcatcagagaattcataatggagaaaaaccttacacatgtaatgagtgtgggaaggccttcagacagaggtcgagcctcaccgtgcaccagagaacccacactggggagaagccctatgaatgtgagaagtgtggtgcagctttcatttccaactcacacctcatgcgacaccatagaacccatcttgttgaataacaagtaaggaagaggaagacctccagcattggtcataaccttctgcctccctaatgagacacctctttgctgttttcttcctcctctataaaagtgagggctgtgtccttaaaagttatagttttcaggaatgcagcagaagacacaagaaaagcatttcagaggctaatttaaaacaaaaagtaagcacctaaagggaaggactttgttttaactgtaccttaagcggtcatgttctctgaagtggaatgtggctttcctaggaatgggtcgtacaaagctaagtggtaatgatgctatttggggaaaggtcttttttgcttaattttgttttttaaaactctgatgattgcttgagcaacaggcaggttatctgcctggttgaattctggttgaaccgtgtattctaatatttctggttaagtggtgactgggtaaggaaaccacttggggtagcagttcaacaattcacttacgaatgtttataagctttccatttcctaggtaattttttaaaagccagtcaaaacaaaaactttactgaaaatggacagaaataggaaatggactttttccttactgtctatacctcctgaaccttggtattgtaaagatctggggacctctgggtctgttctgaccattccctagtctccatggccaagcactcaaggattgatggacaccacacaccagctatattcatttgccaagatcaacagctccttctccaaacaactcaagcccccaattcccatcgcattccatttgggtgagatgcaactaacagccccttcctggatgaaggagtcaaagaataaagcttgcctagaggcaaaaaaaaaaaa

SEQ ID NO: 660 - DNA, 2215 bp, Homo sapiens
  CDS (293)..(2215)
catactttacgcctgcagtaccggcccggaattcccgggtcgacgatttcgtcggcgtctttccggtggtggtcgtttttgctgcctgcgagcgcgtccgcgggctgggcgtttccggctcgctgggtccgggccaggtaactggagccggaaaccggtggaggtggtgtccgcccgcagaggagcttgcctggtctcggtctgagcgtcgcccagcgatttgccaccgcacgcacgccggatcccgggctttaccgcccgcctttccaggccccgccccgcctaaagtcccatggccgaggcagcgctagtgaatacgccgcagattcccatggtaacagaagagtttgtgaaaccatcacagggccatgtgacctttgaggatattgctgtgtacttctcccaggaggagtggggcctccttgatgaagctcaaaggtgcctgtatcatgatgtgatgctggagaacttttcgcttatggcctcagtaggttgtttgcatggaatagaggctgaggaggccccttctgagcagactctttctgcgcaaggagtgtcacaggccaggactccaaagctaggtccttccatcccaaatgctcattcttgtgagatgtgtatcctggtcatgaaagacattttgtacctcagtgagcatcaggggacacttccctggcagaaaccttatacgtctgtggccagtgggaaatggttttcatttggttctaacctgcaacagcaccagaaccaggacagtggagagaaacacatcagaaaggaggagagcagtgccttgcttctgaatagctgcaaaattcctctgtcagacaatcttttcccatgcaaagatgttgagaaggattttccaaccatcctgggccttctccaacaccagaccacccacagcagacaagagtatgcacatagaagcagggagacctttcaacaaagacgttacaaatgtgagcaagttttcaatgagaaagttcatgttactgagcatcagagagtccacactggagaaaaagcttataagcgtagggaatatgggaaatccttgaactctaaatacttatttgttgaacaccagagaacccataatgcagaaaagccttatgtgtgcaatatatgtgggaaatcattcctccataaacaaacactcgttgggcaccagcagagaattcacactagagaaaggtcttatgtgtgcatcgaatgtgggaaatccttgagctccaaatactcacttgtggaacaccagagaacccataatggagaaaagccttatgtgtgcaatgtatgtgggaaatcattccgccacaaacaaacatttgttggccatcagcagagaatccacactggagagaggccttatgtgtgtatggaatgtgggaaatcttttattcattcctatgaccgcattcgacaccagagagttcacactggagaaggggcttatcagtgcagtgaatgtgggaaatccttcatatacaaacagtcacttcttgatcaccatagaatccacacgggagaaaggccttatgagtgcaaagaatgtgggaaggccttcattcacaaaaaaagacttcttgagcaccagagaattcatactggagaaaagccttatgtgtgcatcatatgtgggaaatcatttatccgctcgtctgactacatgcgacaccagagaattcacactggagaaagggcttatgaatgcagtgactgtgggaaagccttcatctccaaacaaacacttcttaagcatcacaaaatccacactagagaaaggccttatgaatgcagtgaatgtggaaaaggcttctaccttgaggttaaacttcttcagcaccaaagaatccatactagagaacaactttgtgagtgcaatgaatgtggaaaagtcttcagccaccaaaaaagacttcttgagcaccagaaagttcacactggcgaaaagccctgtgagtgcagtgaatgtgggaaatgctttagacaccgcaccagcctcattcaacaccagaaagttcacagtggagagaggccttataactgcactgcatgtgagaaggcctttatctataaaaacaaacttgttgagcatcagcgaatccacaccggagaaaagccgtatgaatgtggtaaatgtgggaaagccttcaacaaaagatattcccttgtcaggcaccagaaggtacatataacagaagagccctag

SEQ ID NO: 661 - DNA, 10756 bp, Homo sapiens
  CDS (1074)..(3539)
tcggaaccggctcggaattctcgggtcgacccacgcgtccgcccacgcgtccgcccacgcgtccgcggagccgtacaggacctgtttcactgcagggggatccaaaacaagccccgtggagcagcagccagagcaacagcagccgcaagacattgtttctctccctctgcccccccttccccacgcaaccccagatccatttacactttacagagcatcgtgcatcaagtcaccagggtggtccattcaagctgcagatttgtttgtcatccttgtacagcaatctcctcctccactgccactacagggaagtgcatcacatgtcagcatactggagcatcgtgaaagagtctattttgaagcttcaaacttagtgctgctgcagaccaggaacaagagagaaagagtggatttcagcctgcacggatggtcttgaaacacaaatggtttttgcaaaagaaatagcttacaatgcccagctctggaactttgcagtatgaaacgtgtgtgaggtggtgacctggctgaggaagtctcccttgagaagaggactgagctgagagctgaaggagaaaagaatacaaggtctaggcgttttacactgagattctccactgccaccctttctactcaagcaaaatcttcgtgaaaagatctgctgcaaggaactgatagcttatggttctccattgtgatgaaagcacatggtacagttttccaaagaaattagaccattttcttcgtgagaaagaaatcgacgtgctgttttcatagggtatttctcacttctctgtgaaaggaagaaagaacacgcctgagcccaagagccctcaggagccctccagagcctgtgggaagtctccatggtgaagtataggctgaggctacctgtgaacagtacgcagtgaatgttcatccagagctgctgttggcggattgtacccacggggagatgattcctcatgaagagcctggatcccctacagaaatcaaatgtgactttccgtttatcagactaaaatcagagccatccagacagtgaaacagtcaccgtggaggggggacggcgaaaaatgaaatccaaccaagagcggagcaacgaatgcctgcctcccaagaagcgcgagatccccgccaccagccggtcctccgaggagaaggcccctaccctgcccagcgacaaccaccgggtggagggcacagcatggctcccgggcaaccctggtggccggggccacgggggcgggaggcatgggccggcagggacctcggtggagcttggtttacaacagggaataggtttacacaaagcattgtccacagggctggactactccccgcccagcgctcccaggtctgtccccgtggccaccacgctgcctgccgcgtacgccaccccgcagccagggaccccggtgtcccccgtgcagtacgctcacctgccgcacaccttccagttcattgggtcctcccaatacagtggaacctatgccagcttcatcccatcacagctgatccccccaaccgccaaccccgtcaccagtgcagtggcctcggccgcaggggccaccactccatcccagcgctcccagctggaggcctattccactctgctggccaacatgggcagtctgagccagacgccgggacacaaggctgagcagcagcagcagcagcagcagcagcagcagcagcagcagcagcagcagcaacagcatcagcagcagcagcagcagcagcagcagcagcagcagcagcagcagcagcacctcagcagggctccggggctcatcaccccggggtcccccccaccagcccagcagaaccagtacgtccacatttccagttctccgcagaacaccggccgcaccgcctctcctccggccatccccgtccacctccacccccaccagacgatgatcccacacacgctcaccctggggcccccctcccaggtcgtcatgcaatacgccgactccggcagccactttgtccctcgggaggccaccaagaaagccgagagcagccggctgcagcaggccatccaggccaaggaggtcctgaacggtgagatggagaagagccggcggtacggggccccgtcctcagccgacctgggcctgggcaaggcaggcggcaagtcggttcctcacccgtacgagtccaggcacgtggtggtccacccgagcccctcagactacagcagtcgtgatccttcgggggtccgggcctctgtgatggtcctgcccaacagcaacacgcccgcagctgacctggaggtgcaacaggccactcatcgtgaagcctccccttctaccctcaacgacaaaagtggcctgcatttagggaagcctggccaccggtcctacgcgctctcaccccacacggtcattcagaccacacacagtgcttcagagccactcccggtgggactgccagccacggccttctacgcagggactcaaccccctgtcatcggctacctgagcggccagcagcaagcaatcacctacgccggcagcctgccccagcacctggtgatccccggcacacagcccctgctcatcccggtcggcagcactgacatggaagcgtcgggggcagccccggccatagtcacgtcatccccccagtttgctgcagtgcctcacacgttcgtcaccaccgcccttcccaagagcgagaacttcaaccctgaggccctggtcacccaggccgcctacccagccatggtgcaggcccagatccacctgcctgtggtgcagtccgtggcctccccggcggcggctccccctacgctgcctccctacttcatgaaaggctccatcatccagttggccaacggggagctaaagaaggtggaagacttaaaaacagaagatttcatccagagtgcagagataagcaacgacctgaagatcgactccagcaccgtagagaggattgaagacagccatagcccgggcgtggccgtgatacagttcgccgtcggggagcaccgagcccaggtcagcgttgaagttttggtagagtatcctttttttgtgtttggacagggctggtcatcctgctgtccggagagaaccagccagctctttgatttgccgtgttccaaactctcagttggggatgtctgcatctcgcttaccctcaagaacctgaagaacggctctgttaaaaagggccagcccgtggatcccgccagcgtcctgctgaagcactcaaaggccgacggcctggcgggcagcagacacaggtatgccgagcaggaaaacggaatcaaccaggggagtgcccagatgctctctgagaatggcgaactgaagtttccagagaaaatgggattgtctgcagcgcccttcctcaccaaaatagaacccagcaagcccgcggcaacgaggaagaggaggtggtcggcgccagagagccgcaaactggagaagtcagaagacgaaccacctttgactcttcctaagccttctctaattcctcaggaggttaagatttgcattgaaggccggtctaatgtaggcaagtagaggcagcgtgggggaaaggaaacgtggctctcccttatcatttgtatccagattactgtactgtaggctaaaataacacagtatttacatgttatcttcttaattttaggtttctgttctaaccttgtcattagagttacagcaggtgtgtcgcaggagactggtgcatatgctttttccacgagtgtctgtcagtgagcgggcgggaggaagggcacagcaggagcggtcagggctccaggcatccccggggaagaaaggaacggggcttcacagtgcctgccttctctagcggcacagaagcagccgggggcgctgactcccgctagtgtcaggagaaaagtcccgtgggaagagtcctgcaggggtgcagggttgcacgcatgtgggggtgcacaggcgctgtggcggcgagtgagggtctctttttctctgcctccctctgcctcactctcttgctatcggcatgggccgggggggttcagagcagtgtcctcctggggttcccacgtgcaaaatcaacatcaggaacccagcttcagggcatcgcggagacgcgtcagatggcagatttggaaagttaaccatttaaaagaacatttttctctccaacatattttacaataaaagcaacttttaattgtatagatatatatttccccctatggggcctgactgcactgatatatattttttttaaagagcaactgccacatgcgggatttcatttctgctttttactagtgcagcgatgtcaccagggtgttgtggtggacagggaagcccctgctgtcatggccccacatggggtaaggggggttgggggtgggggagagggagagagcgaacacccacgctggtttctgtgcagtgttaggaaaaccaatcaggttattgcattgacttcactcccaagaggtagatgcaaactgcccttcagtgagagcaacagaagctcttcacgttgagtttgcgaaatctttttgtctttgaactctagtactgtttatagttcatgactatggacaactcgggtgccacttttttttttttcagattccagtgtgacatgaggaattagattttgaagatgagcatatattactatctttaagcatttaaaaatactgttcacactttattaccaagcatcttggtctctcattcaacaagtactgtatctcactttaaactctttggggaaaaaacaaaaacaaaaaaaactaagttgctttctttttttcaacactgtaactacatttcagctctgcagaattgctgaagagcaagatattgaaagtttcaatgtggtttaaagggatgaatgtgaattatgaactagtatgtgacaataaatgaccaccaagtactacctgacgggaggcacttttcactttgatgtctgagaatcagttcaaggcatatgcagagttggcagagaaactgagagaaaagggatggagaagagaatactcatttttgtccagtgtttttctttttaagatgaacttttaaagaaccttgcgatttgcacatattgagtttataacttgtgtgatattcctgcagtttttatccaataacattgtgggaaaggtttgggggactgaacgagcataaataaatgtagcaaaatttctttctaacctgcctaaactctaggccattttataaggttatgttcctttgaaaattcattttggtctttttaccacatctgtcacaaaaagccaggtcttagcgggctcttagaaactctgagaattttcttcagattcattgagagagttttccataaagacatttatatatgtgagcaagattttttttaaacaattactttattattgttgttattaatgttattttcagaatggctttttttttctattcaaaatcaaatcgagatttaatgtttggtacaaacccagaaagggtatttcatagtttttaaacctttcattcccagagatccgaaatatcatttgtgggttttgaatgcatctttaaagtgctttaaaaaaaagttttataagtagggagaaatttttaaatattcttacttggatggctgcaactaaactgaacaaatacctgacttttcttttaccccattgaaaatagtactttcttcgtttcacaaattaaaaaaaaaatctggtatcaacccacattttggctgtctagtattcatttacatttagggttcaccaggactaatgatttttataaaccgttttctggggtgtaccaaaaacatttgaataggtttagaatagctagaatagttccttgactttcctcgaatttcattaccctctcagcatgcttgcagagagctgggtgggctcattcttgcagtcatactgcttatttagtgctgtattttttaaacgtttctgttcagagaacttgcttaatcttccatatattctgctcagggcacttgcaattattaggttttgtttttctttttgttttttagcctttgatggtaagaggaatacgggctgccacatagactttgttctcattaatatcactatttacaactcatgtggactcagaaaaacacacaccaccttttggcttacttcgagtattgaattgactggatccactaaaccaacactaagatgggaaaacacacatggtttggagcaataggaacatcatcataatttttgtggttctatttcaggtataggaattataaaataattggttctttctaaacacttgtcccatttcattctcttgcttttttagcatgtgcaatactttctgtgccaatagagtctgaccagtgtgctatatagttaaagctcattcccttttggctttttccttgtttggttgatcttccccattctggccagagcagggctggagggaaggagccaggagggagagagcctcccacctttcccctgctgcggatgctgagtgctggggcggggagccttcaggagccccgtgcgtctgccgccacgttgcagaaagagccagccaaggagacccgggggaggaaccgcagtgtcccctgtcaccacacggaatagtgaatgtggagtgtggagaggaaggaggcagattcatttctaagacgcactctggagccatgtagcctggagtcaacccattttccacggtcttttctgcaagtgggcaggcccctcctcggggtctgtgtccttgagacttggagccctgcctctgagcctggacgggaagtgtggcctgttgtgtgtgtgcgttctgagcgtgttggccagtggctgtggaggggaccacctgccacccacggtcaccactcccttgtggcagctttctcttcaaataggaagaacgcacagagggcaggagcctcctgtttgcagacgttggcgggccccgaggctcccagagcagcctctgtcaccgcttctgtgtagcaaacattaacgatgacaggggtagaaattcttcggtgccgttcagcttacaaggatcagccatgtgcctctgtactatgtccactttgcaatatttaccgacagccgtcttttgttctttctttcctgttttccatttttaaactagtaacagcaggccttttgcgtttacaatggaacacaatcaccaagaaattagtcagggcgaaaagaaaaaaataatactattaataagaaaccaacaaacaagaacctctctttctagggatttctaaatatataaaatgactgttccttagaatgtttaacttaagaattatttcagtttgtctgggccacactggggcagaggggggagggagggatacagagatggatgccacttacctcagatcttttaaagtggaaatccaaattgaattttcatttggactttcaggataattttctatgttggtcaacttttcgttttccctaactcacccagtttagtttgggatgatttgatttctgttgttgttgatcccatttctaacttggaattgtgagcctctatgttttctgttaggtgagtgtgttgggttttttccccccaccaggaagtggcagcatccctccttctcccctaaagggactctgcggaacctttcacacctctttctcagggacggggcaggtgtgtgtgtggtacactgacgtgtccagaagcagcactttgactgctctggagtagggttgtacaatttcaaggaatgtttggatttcctgcatcttgtggattactccttagataccgcatagattgcaatataatgctgcatgttcaagatgaacagtagctcctagtaatcataaaatccactctttgcacagtttgatctttactgaaatatgttgccaaaatttatttttgttgttgtagctctggattttgttttgttttgttttttaaggaaacgattgacaataccctttaacatctgtgactactaaggaaacctatttctttcatagagagaaaaatctccaatgcttttgaagacactaataccgtgctatttcagatatgggtgaggaagcagagctctcggtaccgaaggccgggcttcttgagctgtgttggttgtcatggctactgtttcatgaaccacaagcagctcaacagactggtctgttgccttctgaaaccctttgcacttcaatttgcaccaggtgaaaacagggccagcagactccatggcccaattcggtttcttcggtggtgatgtgaaaggagagaattacactttttttttttttaagtggcgtggaggcctttgcttccacatttgtttttaacccagaatttctgaaatagagaatttaagaacacatcaagtaataaatatacagagaatatacttttttataaagcacatgcatctgctattgtgttgggttggtttcctctcttttccacggacagtgttgtgtttctggcatagggaaactccaaacaacttgcacacctctactccggagctgagatttcttttacatagatgacctcgcttcaaatacgttaccttactgatgataggatcttttcttgtagcactataccttgtgggaatttttttttaaatgtacacctgatttgagaagctgaagaaaacaaaattttgaagcactcactttgaggagtacaggtaatgttttaaaaaattgcacaaaagaaaaatgaatgtcgaaatgattcattcagtgtttgaaagatatggctctgttgaaacaatgagtttcatactttgtttgtaaaaaaaaaaagcagagaagggttgaaagttacatgtttttttgtatatagaaatttgtcatgtctaaatgatcagatttgtatggttatggcctggaagaattactacgtaaaaggctcttaaactatacctatgcttattgttatttttgttacatatagccctcgtctgagggaggggaactcggtattctgcgatttgagaatactgttcattcctatgctgaaagtacttctctgagctcccttcttagtctaaactcttaagccattgcaacttctttttcttcagagatgatgtttgacattttcagcacttcctgttcctataaacccaaagaatataatcttgaacacgaagtgtttgtaacaagggatccaggctaccaatcaaacaggactcattatggggacaaaaaaaaaaaaaattatttcaccttctttccccccacacctcatttaaatggggggagtaaaaacatgatttcaatgtaaatgcctcattttattttagttttattttgatttttatttaatataaagaggccagaataaatacggagcatcttctcagaatagtattcctgtccaaaaatcaagccggacagtggaaactggacagctgtggggatattaagcacccccacttacaattcttaaattcagaatctcgtcccctcccttctcgttgaaggcaactgttctggtagctaactttctcctgtgtaatggcgggagggaacaccggcttcagtttttcatgtccccatgacttgcatacaaatggttcaactgtattaaaattaagtgcatttggccaataggtagtatctatacaataacaacaatctctaagaatttccataacttttcttatctgaaaggactcaagtcttccactgcagatacattggaggcttcacccacgttttctttccctttagtttgtttgctgtctggatggccaatgagcctgtctccttttctgtggccaatctgaaggccttcgttggaagtgttgttcacagtaatccttaccaagataacatactgtcctccagaataccaagtattaggtgacactagctcaagctgttgtcttcagagcagttaccaagaagctcggtgcacaggttttctctggttcttacaggaaccacctactctttcagttttctggcccaggagtggggtaaatcctttagttagtgcatttgaacttggtacctgtgcattcagttctgtgaatactgccctttttggcggggtttcctcatctccccagcctgaactgctcaactctaaacccaaattagtgtcagccgaaaggaggtttcaagatagtcctgtcagtatttgtggtgaccttcagattagacagtcttcatttccagccagtggagtcctggctccagagccatctctgagactccgtactactggatgttttaatatcagatcattacccaccatatgcctcccacaggccaagggaaaacagacaccagaacttgggttgagggcactaccagactgacatggccagtacagaggagaactagggaaggaatgatgttttgcaccttattgaaaagaaaattttaagtgcatacataatagttaagagcttttattgtgacaggagaacttttttccatatgcgtgcatactctctgtaattccagtgtaaaatattgtacttgcactagcttttttaaacaaatattaaaaaatggaagaattcatattctattttctaatcgtggtgtgtctatttgtaggatacactcgagtctgtttattgaattttatggtccctttctttgatggtgcttgcaggttttctaggtagaaattatttcattattataataaaacaatgtttgattcaaaatttgaacaaaattgttttaaataaattgtctgtataccagtacaagtttattgtttcagtatactcgtactaataaaataacagtgccaattgc

SEQ ID NO: 662 - DNA, 912 bp, Homo sapiens
  CDS (24)..(695)
tattggaacctcccaatgggagaatgactcctttggacttgaaatttcagtatgaggagacccgtagccagcaaggaagcgtgggcgagcggtgttctgcaaaatgggctctccggcagcggatctgcgcagaagcgttccgtgcgtgcaagtgctgcgaaccacgtgggtcccgggcgcgtttcgggtgctggcggctgcagccggagttcaaacctaagcagctggaaggaaccatggccaactgtgagcgtaccttcattgcgatcaaaccagatggggtccagcggggtcttgtgggagagattatcaagcgttttgagcagaaaggattccgccttgttggtctgaaattcatgcaagcttccgaagatcttctcaaggaacactacgttgacctgaaggaccgtccattctttgccggcctggtgaaatacatgcactcagggccggtagttgccatggtctgggaggggctgaatgtggtgaagacgggccgagtcatgctcggggagaccaaccctgcagactccaagcctgggaccatccgtggagacttctgcatacaagttggcaggaacattatacatggcagtgattctgtggagagtgcagagaaggagatcggcttgtggtttcgccctgaggaactggtagattacacgagctgtgctcagaactggatctatgaatgacaggagggcagaccacattgcttttcacatccatttcccctccttcccatgggcagaggaccaggctgtaggaaatctagttatttacaggaacttcatcataatttggagggaagctcttggaagcccgtgagttctccctgtacagtgttacattccccgaccatctgattaaaatgcttccttccagcataggattcattgagttggttacttc

SEQ ID NO: 663 - DNA, 5256 bp, Homo sapiens
  CDS (136)..(1590)
ctcacaaaccagttctcagatagtaaacagcacattgaagtgttgaaggagtccttgactgctaaggagcagagggctgccatcctgcagactgaggtggatgctctccgattgcgtttggaagagaaggaaaccatgttgaataaaaagacaaaacaaattcaggatatggctgaagagaaggggacacaagctggagagatacatgacctcaaggacatgttggatgtgaaggagcggaaggttaatgttcttcagaagaagattgaaaatcttcaagagcagcttagagacaaggaaaagcagatgagcagcttgaaagaacgggtcaaatccttgcaggctgacaccaccaacactgacactgccttgacaactttggaggaggcccttgcagagaaagagcggacaattgaacgcttaaaggagcagagggacagagatgagcgagagaagcaagaggaaattgataactacaaaaaagatcttaaagacttgaaggaaaaagtcagcctgttgcaaggcgacctttcagagaaagaggcttcacttttggatctgaaagagcatgcttcttctctggcatcctcaggactgaaaaaggactcacggcttaagacactagagattgctttggagcagaagaaggaggagtgtctgaaaatggaatcacaattgaaaaaggcacatgaggcagcattggaagccagagccagtccagagatgagtgaccgaatacagcacttggagagagagatcaccaggtacaaagatgaatctagcaaggcccaggcagaagttgatcgactcttagaaatcttgaaggaggtggaaaatgagaagaatgacaaagataagaagatagctgagttggaaagtctcacctcaaggcaagtgaaagaccagaataagaaggtagcaaatctgaagcacaaggaacaggtggaaaaaaagaagagtgcacaaatgttagaggaggcgcgacgacgggaggacaatctcaacgacagctctcagcagctacaggacagtctccgtaagaaggatgacaggattgaagagctggaagaagcactaagagaaagtgtacagataactgcagagcgggaaatggtgctagcacaagaggaatcagccaggaccaatgctgaaaaacaggtggaggagttactgatggccatggagaaggtaaagcaggaactagaatccatgaaagcaaagctgtcctccacccagcagtctctggcagaaaaggaaactcacttgactaatcttcgggcagagagaaggaaacacttagaggaagttctggagatgaagcaagaagctcttctggctgccattagtgaaaaagacgccaatatagctctcttggagctttcgtcctctaagaagaagacccaagaggaagtggctgccctgaagcgggagaaggatcgtctggtacagcagcttaagcagcagacgcaaaatcgaatgaagctaatggccgacaactacgaggatgaccacttcaaatcctcccattccaatcaaacaaatcacaagccctccccagaccaggatgaggaggagggtatatgggcatagccaatcagaggcttagttcagccattttgttcagaacgatcatccagcccctcttagaacttgaccaaaatagaagtaaattaaagttgtacattggacacctgacaaccctctgccatgaccgagaccccctgatcctccgtggactcactccaccagcttcctataacttggacgatgaccaggcggcttgggagaatgagctgcagaagatgacccgggggcagcttcaggatgagttagagaaaggtgaacgggacaatgcagaactgcaggagtttgccaacgccattcttcagcagatagcagaccattgtcccgacatcctagagcaagtggtcaacgccctggaagagtcctcttgaccctgctttatggggaagcctgaggtagtcaacccaggagccaagaaaagagaactacgaggaacaggtgcccggaaccttcttggcaccaaacactacaaacttcatcccaacttgctcacttgaagaagtgtgattccagcaccgtttctacatctgccatcttactctgcctttctgctttggatgtggtctctacactaaccttcttgatgtccagggtagataaagggtcgaatctctctgaagaactgccacctggtcatcagcagtggagaactgtgggagctggtggctctgccctgacagagagccatggagcagaggagcctctcacctcctgtcctctgacatgagaatgaaaccaggaatggacttggagttcaacaggctgagaggatgcctccaatggaccagagagctgagtgttctaatatcacaataggtgctttctcctaaaagggcaaaaaacaatctcaaaaagattagaaaaagagaaggggggaagggaagagaaaatcgactcttctttttactgtctcttctgcttactttccacatgagatgctttgtaccggggagctgtgagcaggcctcacgatggcttgggagcactcgttctcccaaggtctgagtcttcatccagccctgcctgtctgtcgcagccttcctcactctgttcctcggccagttaacaagaagatggtgtgaggtgttctctaccagtctctcctgtttgagactgttgacgttatcatactgaggtgttagatcaaatatctctaattgaagaacatgtgaggttgaaagagcaccagccagggcaacatagcgtgaccctgtctctacaaaaaattaaaaagagaacatacaaagttgacatatgagaccctgttgtccccgcctgcagctttgccccagtaacagatgcccgttgctcttgggctggtttcccctgaacacctccaagaggctgcctgccttgccagcacccgtgtcctgagctcctgcagcccagtggctgctgaagttgtgatccctcactcaccctgctagctttgcccttgactcgtcttctctgaacctcagcctcgtgcattgcctggaaccttcttctagcataaatgaaggtttttcctcctacacacattccttcctcggttatttcattcagagaatatttatgaaatgcctactgtgtgcaagtcatccatccttgaaaaggccacttctcagtgagggagagatgtagtggattctgtgagacatacctgctggagttgaagcagtaaatagcatgtccttcccctccccgatcttaaggtgtgttttctagaaaagttccctaatggaattcatgagtttgggggtctcagtcacccgcttgcctgtaggattccatttgatgattctggatttttgctgtttgttattgcccttagaggggctctgagtatctacttgtgggtggccatttcctgacatctgcatgtacctcgtggaattcagccagcttcatgttgcaaatcagaaagctgaccccaagactgcaaatcaatgaaggtattggcattgttaaggacgtagcgtagacaacagcagtcataaataattaggcaggaacttaacccaaatctagttctttgaccacctctaccaccagaacccagcagacactcacatctcctgataagagttgctggactcgatgtttttgttttgcattttctcctctccttccccacttactcagagaatttaaagtctgtagagtcagcacagccccatcagtccaggaacttcccaccaccagcccttgactgtcccattaactgacatggtcagatttccagctccccctactccctgctgtgaaacaatccctctccctgtgagaggaaactgtggagcgtttcttatcgaaggttaaatggactctgctcataaacctcttactgagatgcttcctgatagccaggctggccagagaggggtgcaggggttagatagtaagtggtggtcgtttgtggtcagttacctcaattctgttcattgcagtgcccgtaaaccatgtagaaagctcccagcactgaaaggcaggagtgttagcatctcgctttatccaccataacgtaaagaactgcggtgtgataacagccttcacggggccacggtggaaccaagacagcaggcgaggccatgcctaaacaagtggtctggcacgggcactggccagctgctctctccaagcaggtggcccagatcccacccacgtggactttctcatcaggtgcagcgcctgccactctcagccactgggtgtgtcactctcctcttcatctcagcattctccatcacttcccctccagaaaaacggatggaaggaagccctctgtgacactgcttctgagaagaagcatttccgggaccgatatcatctgtctggtctctgtgaacagcaaggaatcttcttgaccgttcttgggcactggaggctggttaggagttcagtaataaacgtggccttcgtgctgtagggcagagtggatgcagtttgtagctttcagagtgtctcattgagtctagatcattgaaccaacacttaaccaaatgtcccactcccatcacactaggacttgtcattccatgcccctctcctagtggtcatggtttcatatgggcatacaactgctactgaagttatatagccttgaaaactcagtgcaggttgcccttaattttccccaaacccctccatcggcaagtctagttgccctttagcacctaaagatctgcaccccaaaccaatgtcaccataaagagggcacgaagaagagtgggtgtgatcccaacggggttttgtaactgaagaagcccagtgtgagcttctcatcttttcatatacctctaacccccggtactcattgaatcattgatgaggtatctcaattgagatttgcaaggactttgataccatttgaaatggaaaaattttgaacgggctttaacatgtttaagaaatatggatggggccggccacagtggctcacgcctgtaatcccagaactctggaaggctgaggcaggcggatcacctgagatcaggagttcgaggccagcctggccaagatggcaaaaaccccgactctactaaaaatacaaaattagccaggcgtggtggcgtacgcctgtaatcccagctactcaggaggcaggagaatcgcttgagcctgggaggcagaggctgcggtgagccgagatcgtgtcactgcactccagcctgggtgacagagactccattt

SEQ ID NO: 664 - DNA, 1578 bp, Homo sapiens
  CDS (208)..(1491)
atggatctacagtatacaagctacttgttctttttgcaggatcccatcgattcgaagaagtcgatcgaaaagaaagccccagcgctctagagctcagctgacgggaaagggggtgcgcagcctcgagtttgagagctacccggagctccaagacaggggggggttccagctgcccgcacgccccgaccttccatcgtaggccggaccatgggaaccccaaagccacggatcctgccctggctggtgtcgcagctggacctggggcaactggagggcgtggcctgggtgaacaagagccgcacgcgcttccgcatcccttggaagcacggcctacggcaggatgcacagcaggaggatttcggaatcttccaggcctgggccgaggccactggtgcatatgttcccgggagggataagccagacctgccaacctggaagaggaatttccgctctgccctcaaccgcaaagaagggttgcgtttagcagaggaccggagcaaggaccctcacgacccacataaaatctacgagtttgtgaactcaggagttggggacttttcccagccagacacctctccggacaccaatggtggaggcagtacttctgatacccaggaagacattctggatgagttactgggtaacatggtgttggccccactcccagatccgggacccccaagcctggctgtagcccctgagccctgccctcagcccctgcggagccccagcttggacaatcccactcccttcccaaacctggggccctctgagaacccactgaagcggctgttggtgccgggggaagagtgggagttcgaggtgacagccttctaccggggccgccaagtcttccagcagaccatctcctgcccggagggcctgcggctggtggggtccgaagtgggagacaggacgctgcctggatggccagtcacactgccagaccctggcatgtccctgacagacaggggagtgatgagctacgtgaggcatgtgctgagctgcctgggtgggggactggctctctggcgggccgggcagtggctctgggcccagcggctggggcactgccacacatactgggcagtgagcgaggagctgctccccaacagcgggcatgggcctgatggcgaggtccccaaggacaaggaaggaggcgtgtttgacctggggcccttcattgtagatctgattaccttcacggaaggaagcggacgctcaccacgctatgccctctggttctgtgtgggggagtcatggccccaggaccagccgtggaccaagaggctcgtgatggtcaaggttgtgcccacgtgcctcagggccttggtagaaatggcccgggtagggggtgcctcctccctggagaatactgtggacctgcacatttccaacagccacccactctccctcacctccgaccagtacaaggcctacctgcaggacttggtggagggcatggatttccagggccctggggagagctgagccctcgctcctcatggtgtgcctccaacccccctgttccccaccacctcaaccaataaactggttcctgctatgaaaaaaaaaaaa

SEQ ID NO: 665 - DNA, 873 bp, Homo sapiens
  CDS (39)..(569)
acattcggcacgagggacgtggcgggttgctttccaaaatggcgcgggtgctgaaggctgcagccgcgaatgccgtagggcttttttccagacttcaagctcccattccaacagtaagagcttcttccacatcacagcccttggatcaagtgacaggttctgtgtggaacctgggtcgactcaaccatgtagccatagcagtgccagatttggaaaaggctgcagcattttataagaatattctgggggcccaggtaagtgaagcggtccctcttcctgaacatggagtatctgttgtttttgtcaacctgggaaataccaagatggaactgcttcatccattgggacgtgacagtccaattgcaggttttctgcagaaaaacaaggctggaggaatgcatcacatctgcatcgaggtggataatattaatgcagctgtgatggatttgaaaaaaaagaagatccgcagtctaagtgaagaggtcaaaataggagcacatggaaaaccagtgatttttctccatcctaaagactgtggtggagtccttgtggaactggagcaagcttgatttatatttgcaagcaactaaattaattgacctgaaaaagcctatcaaatactatcaaaatgtactatgacattgagtccttcactgcttccatcatgtaaaagttcacagttaaagactgaattacagaaagattaaaatatatacatatataaatacataaatatgtatattatttagattaacaaacatatttgttaatttgaatttgaagaaaatcttgattactaattacttagggaacattattaaaatcatatagaaataaattattcctcttctacaatggggtaaaaaaaaaaaa

SEQ ID NO: 666 - DNA, 6567 bp, Homo sapiens
  CDS (1)..(6567)
atggcggatgtaaccgcccgtagtctgcaatacgagtacaaggcgaactcgaatcttgtgctccaagctgaccgttctctcattgaccggacccgccgggatgaacccacaggagaggtgctgtcccttgttgggaagctggagggcacccgtatgggagacaaggctcaacggaccaaaccgcagatgcaggaggaaagaagagccaagcgaagaaagcgtgatgaggaccggcatgacatcaacaagatgaagggttatactctgctgtcggagggcattgatgagatggtgggcatcatctacaagcccaaaactaaagagactcgggagacctatgaggtgctactcagcttcatccaggctgctcttggggaccagccacgtgatatcctttgtggggcagctgatgaagttctagctgttctaaagaatgaaaagctgcgggacaaggaaaggcgaaaggagattgacctgctgctgggtcaaacagatgataccagataccatgtgctagtgaacctgggcaaaaagatcacagactatggtggagataaggaaatccaaaatatggatgacaacattgatgagacatacggtgtgaatgtgcagtttgagtctgatgaggaggaaggtgatgaagacgtatacggggaggttcgagaagaggcatctgatgatgacatggaaggggacgaggctgtcgtgcgctgcaccctctcggctaatatgtatgttgatgaaatcttagtctggtgtgcttctgaactcaatattccagagttttttcctctggaaagtcctcacaagaaggtgggctatggattgtcaagtagaacttggttgcagggtggtggcaaagtgatcgaggctggcagagacctgctcgtagcctcaggtgaactgatgagttccaagaagaaggatttgcaccctcgggatattgatgcattttggctgcagcggcagctcagtcgtttctatgatgatgccatcgtgtcgcagaagaaggcagatgaagtattggagattttgaagacggccagtgatgatcgggaatgtgaaaatcagctggttctgctgcttggtttcaacacctttgatttcattaaagtgttgcggcagcacaggatgatgattttatactgtaccttgctggccagtgcacaaagtgaagctgaaaaggaaaggattatgggaaagatggaagctgacccagagctatccaagttcctctaccagcttcatgaaaccgagaaggaggatctgatccgagaggaaaggtcccggagagagcgagtgcgtcagtctcgaatggacacagatctggaaaccatggatctcgaccagggtggagaggcactggctccacggcaggttctggacttggaggacctggtttttacccaagggagccactttatggccaataaacgctgtcagcttcctgatggatccttccgtcgccagcgtaagggctatgaagaggtgcatgtgcctgctctgaagcccaagccctttggctcagaagaacaactgcttccagtggaaaagctgccaaagtatgcccaggctgggtttgagggcttcaaaacactgaatcggatccagagtaagctctaccgtgctgcccttgagacggatgagaatctgctgctgtgtgctcctactggtgctgggaagaccaacgtggccctgatgtgcatgctccgagagattgggaaacacataaacatggacggcaccatcaatgtggatgacttcaagattatctacattgcccccatgcgctccttggtgcaggagatggtgggcagctttggaaagcgcctggccacttatggcatcactgttgctgaactgactggggaccaccagctgtgcaaagaagagatcagtgccactcagatcatcgtctgcacccccgagaagtgggacatcatcacccgcaagggtggtgagcgcacctacacccagctggtgcggctcatcattctggatgagattcatcttctccacgatgacagaggtcctgtcttagaagctttagtggccagggccatccgaaacattgagatgacccaagaggatgtccgactcattggtctcagtgccaccctacccaactatgaagatgtagccacctttctacgtgttgaccctgccaagggtctcttttactttgacaacagcttccgtccagtgcctctggaacagacatatgtgggtatcacagagaaaaaagctatcaagcgtttccagatcatgaatgaaatagtctatgaaaaaatcatggaacatgctggaaaaaatcaggtgctcgtgtttgtccattctcgcaaagaaactgggaagacagcaagggcaatccgtgacatgtgtctggagaaggacactttgggtctgtttcttcgcgagggttctgcctccactgaagtccttcgtacagaagcagagcagtgcaagaacttggagctgaaggatcttttgccctatggctttgctattcatcatgcaggcatgactagagttgaccgaacacttgtagaagatctttttggtgacaagcatattcaggttttagtttccaccgcaactctggcgtggggtgtaaatcttcctgcacatacagtcatcattaaaggtacccaagtgtacagtccagagaaggggcgttggacagagctgggagcactggatatcctgcagatgctgggccgtgctggacggccgcagtatgacaccaagggtgaaggcatcctcatcacatcccatggggagctccagtactacctctccctcctcaaccagcagctgcctatcgagagccagatggtctccaagctgcctgacatgctcaatgcggaaattgttctgggcaatgtccagaatgcaaaggatgcagtgaactggctgggctatgcctacctatacatccgaatgctccggtcccctaccctctatggcatttctcatgatgacctcaagggagatcccttgctggaccagcgccgactcgatcttgttcacactgctgccttgatgctggacaagaacaatctggtcaagtacgacaagaagacaggcaacttccaggtgacagaacttggccggatagcaagtcactactatatcaccaatgatactgtgcagacctacaaccagctgctgaagcctactctgagtgagattgagcttttccgagtgttctccttgtcctcagagttcaagaacatcactgtaagagaggaggagaagctggagctgcagaagttgctggagagagtgcccatccctgtaaaggagagcattgaggaacccagcgctaagatcaacgtgcttctccaagccttcatctcacagctgaaactcgaaggctttgcgctgatggctgacatggtgtatgtgacccagtcggctggccggttgatgcgtgcaatcttcgaaattgtcctgaaccgaggttgggcacagcttacagataagaccctgaatctctgcaagatgattgacaagcgcatgtggcagtccatgtgtcctcttcgccagttccgaaaacttcctgaggaagtagtgaagaagattgagaagaaaaacttcccctttgagcggctgtatgacttgaatcataatgagataggtgaacttattcgaatgccgaagatggggaagaccatccacaagtatgtccatcttttccccaagttggagttgtcagtgcacctgcagcctattacacgctctacgctgaaagtagagctgactatcacaccagatttccagtgggatgaaaaggtccatggttcgtcagaggcattttggattctggtggaggatgtggacagcgaggtgattctgcaccatgaatattttctgctgaaggccaagtatgcccaggatgagcacctcatcacattctttgttccagtctttgaaccactacctcctcagtacttcattcgagtagtgtctgatcgctggctctcttgtgagacgcagctacctgtctccttccggcatctgatcctaccagagaagtacccacctccaactgaactgttggacctgcagccattgcctgtgtctgctctgagaaacagtgcttttgagagcctttaccaagataaatttcctttcttcaatcccatccagactcaagtatttaataccgtgtacaacagtgatgataacgtgtttgtgggggcccccacgggcagcgggaagactatctgcgcggagtttgccatccttcggatgctgctgcagaattctgagggacgctgtgtctacattacccctatgaggctctggcaggagcaggtatacatggactggtatgagaagtttcaggacaggctcaacaagaaggtcgtgctgctgacgggggagaccagcacagacctgaagctcctgggcaaaggcaacatcatcatcagtacccctgagaagtgggacatcctctctcggaggtggaagcagcgcaagaacgtccagaacattaacctctttgtggtggatgaggtccaccttattgggggcgagaatgggcctgtcttggaagtgatctgctcccggatgcgctacatctcctcccagattgagcggcccattcgcattgtggcacttagctcctcactctccaatgccaaggatgtggctcactggctgggctgcagtgccacctccaccttcaacttccatcctaatgtgcgccctgtacctttggaactgcacatccagggcttcaacatcagtcacacacagactcgcctgctctctatggccaagcctgtgttccatgctatcaccaaacactcacccaagaagcctgtcatcgtttttgtcccatctcgtaagcagacccgcctcactgcaatagacatcctcactacctgtgcagcagacatccagcggcagaggttcctgcactgcaccgagaaggacctgatcccttacctggagaagctcagtgacagcacactcaaagagaccctgttaaatggggtgggctacctgcatgaaggcctgagccccatggagaggcgcctggtagagcagctcttcagctccggggctatccaggtggtggtagcttctcggagtctctgctggggcatgaatgttgctgctcatctagtgatcatcatggatactctgtactacaatggcaagatccatgcctatgtggattaccccatctatgatgtgcttcagatggtgggccatgccaaccggcccctgcaggatgatgaggggcgctgtgtcatcatgtgtcagggttctaaaaaggattttttcaaaaaatttttgtatgagccattgccagtagagtctcacctggaccactgtatgcatgaccacttcaatgctgagattgtcaccaagaccattgagaacaagcaggatgctgtggactacctcacctggacctttctgtatcgcagaatgacacagaaccccaattactacaacctgcaggggatatcccatcgtcatctgtctgaccacctgtcagagctggtggagcagaccctcagtgacctggagcagtccaaatgcatcagtattgaggacgagatggatgtggcccctctgaacctgggcatgattgctgcctactattacataaactacaccaccattgagctcttcagcatgtctctgaatgctaaaaccaaggttcgaggacttattgagatcatttccaatgcagcagagtatgagaacattccaatcaggcatcatgaagacaacctcctgcgccagttggctcagaaggtcccccacaagctgaataaccccaagttcaatgatccacatgtgaagaccaatctgctgctgcaggctcacctgtcccgcatgcagctaagtgctgaactacagtcagacacagaggagatccttagtaaggcaatccggctaattcaggcctgtgtggatgtactctccagtaatgggtggcttagtcctgctctggcagccatggaactggcccagatggtcacccaagccatgtggtctgaggactcttacctgaggcggttgccccctttcccttcggggcttttcaaacgttgcacagataagggagtggagagtgtttttgacatcatggagatggaggatgaagaacggaatgcattgcttcagttgactgacagccagattgcagatgtggcccgcttctgtaaccgctacccgaatattgaactgtcctatgaagtggtggataaagacagcatccgcagtggcggaccagttgtggtgctagtgcaactggagcgagaggaggaagtcacgggcccagttattgcacctctcttcccacagaaacgtgaagagggctggtgggttgtgattggagacgccaagtccaacagcctcatctccatcaagaggctgaccctgcagcagaaagccaaggtgaagctagactttgtggccccagccacaggtggccgccacaataccctgtacttcatgagtgacgcatacatgggatgtgaccaggagtataagttcagtgtggatgtgaaagaagctgagacagacagtgattcagattga

SEQ ID NO: 667 - DNA, 6525 bp, Homo sapiens
  CDS (1)..(6525)
atggcggatgtaaccgcccgtagtctgcaatacgagtacaaggcgaactcgaatcttgtgctccaagctgaccgttctctcattgaccggacccgccgggatgaacccacaggagaggtgctgtcccttgttgggaagctggagggcacccgtatgggagacaaggctcaacggaccaaaccgcagatgcaggaggaaagaagagccaagcgaagaaagcgtgatgaggaccggcatgacatcaacaagatgaagggttatactctgctgtcggagggcattgatgagatggtgggcatcatctacaagcccaaaactaaagagactcgggagacctatgaggtgctactcagcttcatccaggctgctcttggggaccagccacgtgatatcctttgtggggcagctgatgaagttctagctgttctaaagaatgaaaagctgcgggacaaggaaaggcgaaaggagattgacctgctgctgggtcaaacagatgataccagataccatgtgctagtgaacctgggcaaaaagatcacagactatggtggagataaggaaatccaaaatatggatgacaacattgatgagacatacggtgtgaatgtgcagtttgagtctgatgaggaggaaggtgatgaagacgtatacggggaggttcgagaagaggcatctgatgatgacatggaaggggacgaggctgtcgtgcgctgcaccctctcggctaatatgtatgttgatgaaatcttagtctggtgtgcttctgaactcaatattccagagttttttcctctggaaagtcctcacaagaaggtgggctatggattgtcaagtagaacttggttgcagggtggtggcaaagtgatcgaggctggcagagacctgctcgtagcctcaggtgaactgatgagttccaagaagaaggatttgcaccctcgggatattgatgcattttggctgcagcggcagctcagtcgtttctatgatgatgccatcgtgtcgcagaagaaggcagatgaagtattggagattttgaagacggccagtgatgatcgggaatgtgaaaatcagctggttctgctgcttggtttcaacacctttgatttcattaaagtgttgcggcagcacaggatgatgattttatactgtaccttgctggccagtgcacaaagtgaagctgaaaaggaaaggattatgggaaagatggaagctgacccagagctatccaagttcctctaccagcttcatgaaaccgagaaggaggatctgatccgagaggaaaggtcccggagagagcgagtgcgtcagtctcgaatggacacagatctggaaaccatggatctcgaccagggtggagaggcactggctccacggcaggttctggacttggaggacctggtttttacccaagggagccactttatggccaataaacgctgtcagcttcctgatggatccttccgtcgccagcgtaagggctatgaagaggtgcatgtgcctgctctgaagcccaagccctttggctcagaagaacaactgcttccagtggaaaagctgccaaagtatgcccaggctgggtttgagggcttcaaaacactgaatcggatccagagtaagctctaccgtgctgcccttgagacggatgagaatctgctgctgtgtgctcctactggtgctgggaagaccaacgtggccctgatgtgcatgctccgagagattgggaaacacataaacatggacggcaccatcaatgtggatgacttcaagattatctacattgcccccatgcgctccttggtgcaggagatggtgggcagctttggaaagcgcctggccacttatggcatcactgttgctgaactgactggggaccaccagctgtgcaaagaagagatcagtgccactcagatcatcgtctgcacccccgagaagtgggacatcatcacccgcaaggtggatgagattcatcttctccacgatgacagaggtcctgtcttagaagctttagtggccagggccatccgaaacattgagatgacccaagaggatgtccgactcattggtctcagtgccaccctacccaactatgaagatgtagccacctttctacgtgttgaccctgccaagggtctcttttactttgacaacagcttccgtccagtgcctctggaacagacatatgtgggtatcacagagaaaaaagctatcaagcgtttccagatcatgaatgaaatcgtctatgaaaaaatcatggaacatgctggaaaaaatcaggtgctggtgtttgtccactcccggaaggagactggaaagacagccagggccatccgggacatgtgcctagaaaaggacactctgggtctgtttctgagggagggctcagcctccacagaagtcctgcgaacagaagctgagcagtgcaagaacctagagctgaaggatcttctgccttatggctttgctattcatcacgcaggcatgaccagggttgaccgaacactcgtggaggatctttttgctgataaacatattcaggttttagtttccacagcaactctagcttggggtgtgaatctccctgcacatacagtcatcatcaaaggcacccaggtgtacagtccagagaaggggcgttggacagaactgggagcactggacattctgcagatgctgggacgtgccggaagaccccagtatgacaccaagggtgaaggcatactcatcacatctcatggggagctacagtactacctgtccctcctcaatcaacaacttcctattgaaagccagatggtttcaaagcttcctgacatgctcaatgcagaaatcgtgctaggaaatgtccagaatgccaaggatgcggtgaactggctgggctatgcctacctctatatccgaatgctgcgatccccaaccctctatggcatctctcatgatgacctcaagggagatcccctgctggaccagcgccgactagatctggttcatacagctgccctgatgctggacaagaacaatctggtcaagtacgacaagaagacgggcaacttccaggtgacagaactgggccgtatagccagccactactacatcaccaatgatacagtgcagacttacaaccagctgctgaagcccaccctgagtgagattgagcttttcagggtcttctcattgtcctctgagttcaagaacatcacagtgagagaggaggagaagctggagctgcagaagttgctggagagggtgcctatccctgtaaaggagagcattgaggaacccagtgctaagatcaacgttcttctgcaagccttcatctcacagctgaaattggagggctttgcactgatggctgacatggtgtatgtcacacagtcggctggccggttgatgcgagcgatatttgaaattgtcctgaaccgaggttgggcacagcttacagacaagaccctgaacctctgcaagatgatcgacaaacgcatgtggcagtccatgtgtcctctgcgccagttccggaaactccctgaggaagtagtgaagaagattgagaagaagaatttcccctttgagcgtctgtacgacctgaatcataatgagattggggagcttatccgcatgccaaagatggggaagaccatccacaaatatgtccatctgtttcccaagttggagttgtcagtgcacctgcagcctatcacacgctccaccctgaaggtggagctgaccatcacgccagacttccagtgggatgaaaaggtgcatggttcatccgaggctttttggattctggtggaggatgtggacagcgaggtgattctgcaccatgagtattttctcctcaaggccaagtacgcccaggacgagcacctcattacattcttcgtgcctgtctttgaaccgctgccccctcagtacttcatccgagtggtgtctgaccgctggctctcttgtgagacccagctgcctgtctccttccggcacctgatcttgccggagaagtacccccctccaaccgaacttttggacctgcagcccttgcccgtgtctgctctgagaaacagtgcctttgagagtctttaccaagataaatttcctttcttcaatcccatccagacccaggtgtttaacactgtatacaacagtgacgacaacgtgtttgtgggggcccccacgggcagcgggaagactatttgtgcagagtttgccatcctgcgaatgctgctgcagagctcggaggggcgctgtgtgtacatcacccccatggaggccctggcagagcaggtatacatggactggtacgagaagttccaggacaggctcaacaagaaggtggtactcctgacaggcgagaccagcacagacctgaagctgctgggcaaagggaacattatcatcagcacccctgagaagtgggacatactttcccggcgatggaagcagcgcaagaacgtgcagaacatcaacctcttcgtggtggatgaggtccaccttatcgggggcgagaatgggcctgtcttagaagtgatctgctcccgaatgcgctacatctcctcccagattgagcggcccattcgcattgtggcactcagctcttcgctctccaatgccaaggatgtggcccactggctgggctgcagtgccacctccaccttcaacttccatcccaatgtgcgtcccgtccccttggagctgcacatccagggcttcaacatcagccatacacaaacccgcctgctctccatggccaagcctgtgtaccatgctatcaccaagcactcgcccaagaagcctgtcattgtctttgtgccgtctcgcaagcagacccgcctcactgccattgacatcctcaccacctgtgcagcagacatccaacggcagaggttcttgcactgcaccgagaaggatctgattccgtacctggagaagctaagtgacagcacgctcaaggaaacgctgctaaatggggtgggctacctgcatgaggggctcagccccatggagcgacgcctggtggagcagctcttcagctcaggggctatccaggtggtggtggcttctcggagtctctgctggggcatgaacgtggctgcccacctggtaatcatcatggatacccagtactacaatggcaagatccacgcctatgtggattaccccatctatgacgtgcttcagatggtgggccacgccaaccgccctttgcaggacgatgaggggcgctgtgtcatcatgtgtcagggctccaagaaggatttcttcaagaagttcttatatgagccattgccagtagaatctcacctggaccactgtatgcatgaccacttcaatgctgagatcgtcaccaagaccattgagaacaagcaggatgctgtggactacctcacctggacctttctgtaccgccgcatgacacagaaccccaattactacaacctgcagggcatctcccatcgtcacttgtcggaccacttgtcagagctggtggagcagaccctgagtgacctggagcagtccaagtgcatcagcatcgaggacgagatggacgtggcgcctctgaacctaggcatgatcgccgcctactattacatcaactacaccaccattgagctcttcagcatgtccctcaatgccaagaccaaggtgcgagggcttatcgagatcatctccaatgcagcagagtatgagaacattcccatccggcaccatgaagacaatctcctgaggcagttggctcagaaggtcccccacaagctgaataaccctaagttcaatgatccgcacgtcaagaccaacctgctcctgcaggctcacttgtctcgcatgcagctgagtgctgagttgcagtcagatacggaggaaatccttagtaaggcaatccggctcatccaggcctgcgtggatgtcctttccagcaatgggtggctcagccctgctctggcagctatggaactggcccagatggtcacccaagccatgtggtccaaggactcatacctgaagcagctgccacacttcacctctgagcatatcaaacgttgcacagacaagggagtggagagtgttttcgacatcatggagatggaggatgaagaacggaacgcgttgcttcagctgactgacagccagattgcagatgtggctcgcttttgtaaccgctaccctaatatcgaactatcttatgaggtggtagataaggacagcatccgcagtggcgggccagttgtggtgctggtgcagctggagcgagaggaggaagtcacaggccctgtcattgcgcctctcttcccgcagaaacgtgaagagggctggtgggtggtgattggagatgccaagtccaatagcctcatctccatcaagaggctgaccttgcagcagaaggccaaggtgaagttggactttgtggccccagccactggtgcccacaactacactctgtacttcatgagtgacgcttacatgggatgtgaccaggagtacaaattcagcgtggatgtgaaagaagctgagacagacagtgattcagattga

SEQ ID NO: 668 - DNA, 1182 bp, Homo sapiens
  CDS (314)..(862)
tcgtttgctaccccagttcctgcactctcggtcgctgccctgcggggccgtccgactccggactcctgctgtggccgaggtgaggctgccgtcggccacactttgctacttctgccgctgtcgcctcggcttgggagcggcgttatttccacgaagcgctagggccttggcagcctcggcgctacctgcccagggctcccggtggccagtgctcagcagcccgggactccccgcagccttcgcttctttccctgcctgccctcagcgcagctacagcacggaggagaagccccagcagcaccagaaaaccaagatgatcgtcctgggattctccaaccccatcaactgggttaggactcgaattaaggccttccttatctgggcctatttcgacaaagagttcagcatcacagagttctccgagggagcgaagcaggcttttgctcatgtatccaagttgctgtcacagtgtaaatttgatctgttggaagaacttgtggccaaagaggtgctacatgcattgaaagaaaaggttacttcactacctgacaaccataaaaatgcccttgctgctaacatagatgaaattgtatttacatcaacaggagacatctccatttactatgatgagaaaggaaggaagtttgttaacatcctgatgtgcttttggtatctaaccagtgccaacatccccagtgaaactttaagaggagccagtgtattccaggttaagttggggaatcagaatgtggaaactaaacaacttcttagtgcaagctatgagtttcagagggagttcacacaaggagtaaagcctgactggaccattgcacggattgaacactcaaaattattagaataattttcttggaaaaatcagcttatggactttagcagttgctgtgaaaaactaaggaagaaaaattttggggtcatttgatcttcacttaatctaagtctgtgaattacttttatattattttgaaatactccttgcagtatattggcatgatacagtaaaagcattttccacagattgttatcaccttctttaaaagaagtcaaaatttaaaaaatacaatagcacgttgttggtgtcatattcaataacatttccaatgctacatataattttatagacataataaagaaggtattgaaaaaactaaaaaaaaaaaaaaa

SEQ ID NO: 669 - DNA, 4574 bp, Homo sapiens
  CDS (144)..(4325)
cccccattgacaggcagatgatatatctatctactcgatgatgaagataccccaccaaacccaaaaaaagagatctctcgaggatccgaattcgcggccgcgtcgacgaacttttttcccttcttcaggtcaggggaaagggaatgcccaattcagagagacatgggggcaagaaggacgggagtggaggagcttctggaactttgcagccgtcatcgggaggcggcagctctaacagcagagagcgtcaccgcttggtatcgaagcacaagcggcataagtccaaacactccaaagacatggggttggtgacccccgaagcagcatccctgggcacagttatcaaacctttggtggagtatgatgatatcagctctgattccgacaccttctccgatgacatggccttcaaactagaccgaagggagaacgacgaacgtcgtggatcagatcggagcgaccgcctgcacaaacatcgtcaccaccagcacaggcgttcccgggacttactaaaagctaaacagaccgaaaaagaaaaaagccaagaagtctccagcaagtcgggatcgatgaaggaccggatatcgggaagttcaaagcgttcgaatgaggagactgatgactatgggaaggcgcaggtagccaaaagcagcagcaaggaatccaggtcatccaagctccacaaggagaagaccaggaaagaacgggagctgaagtctgggcacaaagaccggagtaaaagtcatcgaaaaagggaaacacccaaaagttacaaaacagtggacagcccaaaacggagatccaggagcccccacaggaagtggtctgacagctccaaacaagatgatagcccctcgggagcttcttatggccaagattatgaccttagtccctcacgatctcatacctcgagcaattatgactcctacaagaaaagtcctggaagtacctcgagaaggcagtcggtcagtcccccttacaaggagccttcggcctaccagtccagcacccggtcaccgagcccctacagtaggcgacagagatctgtcagtccctatagcaggagacggtcgtccagctacgaaagaagtggctcttacagcgggcgatcgcccagtccctatggtcgaaggcggtccagcagccctttcctgagcaagcggtctctgagtcggagtccactccccagtaggaaatccatgaagtccagaagtagaagtcctgcatattcaagacattcatcttctcatagtaaaaagaagagatccagttcacgcagtcgtcattccagtatctcacctgtcaggcttccacttaattccagtctgggagctgaactcagtaaaaaaaaaaagaaaaaagcagctgctgctgctgcagcaaagatggatggaaaggagtccaagggttcacctgtatttttgcctagaaaagagaacagttcagtagaggctaaggattcaggtttggagtctaaaaagttacccagaagtgtaaaattggaaaaatctgccccagatactgaactggtgaatgtaacacatctaaacacagaggtaaaaaattcttcagatacagggaaagtaaagttggatgagaactccgagaagcatcttgttaaagatttgaaagcacagggaacaagagactctaaacccatagcactgaaagaggagattgttactccaaaggagacagaaacatcagaaaaggagacccctccacctcttcccacaattgcttctcccccaccccctctaccaactactacccctccacctcagacaccccctttgccacctttgcctccaataccagctcttccacagcaaccacctctgcctccttctcagccagcatttagtcaggttcctgcttccagtacttcaactttgcccccttctactcactcaaagacatctgctgtgtcctctcaggcaaattctcagccccctgtacaggtttctgtgaagactcaagtatctgtaacagctgctattccacacctgaaaacttcaacgttgcctcctttgcccctcccacccttattacctggaggtgatgacatggatagtccaaaagaaactcttccttcaaaacctgtgaagaaagagaaggaacagaggacacgtcacttactcacagaccttcctctccctccagagctccctggtggagatctgtctcccccagactctccagaaccaaaggcaatcacaccacctcagcaaccatataaaaagagaccaaaaatttgttgtcctcgttatggagaaagaagacaaacagaaagcgactgggggaaacgctgtgtggacaagtttgacattattgggattattggagaaggaacctatggccaagtatataaagccagggacaaagacacaggagaactagtggctctgaagaaggtgagactagacaatgagaaagagggcttcccaatcacagccattcgtgaaatcaaaatccttcgtcagttaatccaccgaagtgttgttaacatgaaggaaattgtcacagataaacaagatgcactggatttcaagaaggacaaaggtgccttttaccttgtatttgagtatatggaccatgacttaatgggactgctagaatctggtttggtgcacttttctgaggaccatatcaagtcgttcatgaaacagctaatggaaggattggaatactgtcacaaaaagaatttcctgcatcgggatattaagtgttctaacattttgctgaataacagtgggcaaatcaaactagcagattttggacttgctcggctctataactctgaagagagtcgcccttacacaaacaaagtcattactttgtggtaccgacctccagaactactgctaggagaggaacgttacacaccagccatagatgtttggagctgtggatgtattcttggggaactattcacaaagaagcctatttttcaagccaatctggaactggctcagctagaactgatcagccgactttgtggtagcccttgtccagctgtgtggcctgatgttatcaaactgccctacttcaacaccatgaaaccgaagaagcaatatcgaaggcgtctacgagaagaattctctttcattccttctgcagcacttgatttattggaccacatgctgacactagatcctagtaagcggtgcacagctgaacagaccctacagagcgacttccttaaagatgtcgaactcagcaaaatggctcctccagacctcccccactggcaggattgccatgagttgtggagtaagaaacggcgacgtcagcgacaaagtggtgttgtagtcgaagagccacctccatccaaaacttctcgaaaagaaactacctcagggacaagtactgagcctgtgaagaacagcagcccagcaccacctcagcctgctcctggcaaggtggagtctggggctggggatgcaataggccttgctgacatcacacaacagctgaatcaaagtgaattggcagtgttattaaacctgctgcagagccaaaccgacctgagcatccctcaaatggcacagctgcttaacatccactccaacccagagatgcagcagcagctggaagccctgaaccaatccatcagtgccctgacggaagctacttcccagcagcaggactcagagaccatggccccagaggagtctttgaaggaagcaccctctgccccagtgatcctgccttcagcagaacagatgacccttgaagcttcaagcacaccagctgacatgcagaatatattggcagttctcttgagtcagctgatgaaaacccaagagccagcaggcagtctggaggaaaacaacagtgacaagaacagtgggccacaggggccccgaagaactcccacaatgccacaggaggaggcagcagcatgtcctcctcacattcttccaccagagaagaggccccctgagccccccggacctccaccgccgccacctccaccccctctggttgaaggcgatctttccagcgccccccaggagttgaacccagccgtgacagccgccttgctgcaacttttatcccagcctgaagcagagcctcctggccacctgccacatgagcaccaggccttgagaccaatggagtactccacccgaccccgtccaaacaggacttatggaaacactgatgggcctgaaacagggttcagtgccattgacactgatgaacgaaactctggtccagccttgacagaatccttggtccagaccctggtgaagaacaggaccttctcaggctctctgagccaccttggggagtccagcagttaccagggcacagggtaggagcaacggtgggaatgccctctgaggaatgcagtgatgtccatcagtcacctctcacccagagcctggcaaattcagtctctttcacagaacctaaagccaagccaggttcagtgggaaatcccacctgtccaaacactgtgtgagacaccagaattagaggcctgcaagcctgcttccttcatccccaatgcccagatgggacaggtcaccagcctcctgtgctacccccacctttcttgcttgctg

SEQ ID NO: 670 - DNA, 426 bp, Homo sapiens
  CDS (121)..(426)
atttggccctcgaggccaagaattcggcacgaggagatggcattgtaaacgccagagcgaggttctgcctaccccgagactgctgctgttcggagacctgcaggtgaatgccccatcaccatgtctgacctggaggcaaaactttcaactgagcatttgggggataagataaaagatgaagatattaaactcagggttattggacaggatagcagtgagattcatttcaaagtgaaaatgacaacacctctcaagaaactcaagaaatcgtactgtcagagacagggcgttccagtgaattccctcaggtttctctttgaaggtcagagaattgctgataatcatactccagaagaactgggaatggaggaagaagatgtgattgaggtttatcaggaacaaatcggaggtcattcaacagtttag

SEQ ID NO: 671 - DNA, 1830 bp, Homo sapiens
  CDS (59)..(1546)
gcccccgcccgccccgggccctgatggactgaatgaaggctgcctacaccgcctatcgatgcctcaccaaagacctagaacgtgcgccatgaacccggagctgacaatggaaagtctgggcactttgcacggcgcgcgcggcggcggcagtggcgggggcggcggcgggggcggcgggggcggcggcgggggcccgggccatgagcaggagctgctggccagccccagcccccaccacgcgcgccgcggcccgcgtggctcgctgcggggccctccgccgcctccaaccgcgcaccaggagctgggcacggcggcagcggcggcagcggcggcgtcgcgctcggccatggtcaccagcatggcctcgatcctggacggcggcgactaccggcccgagctctccatcccgctgcaccacgccatgagcatgtcctgcgactcgtctccgcctggcatgggcatgagcaacacctacaccacgctgacaccgctccagccgctgccacccatctccaccgtgtctgacaagttccaccaccctcacccgcaccaccatccgcaccaccaccaccaccaccaccaccagcgcctgtccggcaacgtcagcggcagcttcaccctcatgcgcgacgagcgcgggctcccggccatgaacaacctctacagtccctacaaggagatgcccggcatgagccagagcctgtccccgctggccgccacgccgctgggcaacgggctaggcggcctccacaacgcgcagcagagtctgcccaactacggtccgccgggccacgacaaaatgctcagccccaacttcgacgcgcaccacactgccatgctgacccgcggtgagcaacacctgtcccgcggcctgggcaccccacctgcggccatgatgtcgcacctgaacggcctgcaccacccgggccacactcagtctcacgggccggtgctggcacccagtcgcgagcggccaccctcgtcctcatcgggctcgcaggtggccacgtcgggccagctggaagaaatcaacaccaaagaggtggcccagcgcatcacagcggagctgaagcgctacagtatcccccaggcgatctttgcgcagagggtgctgtgccggtctcaggggactctctccgacctgctccggaatccaaaaccgtggagtaaactcaaatctggcagggagaccttccgcaggatgtggaagtggcttcaggagcccgagttccagcgcatgtccgccttacgcctggcagcgtgcaaacgcaaagagcaagaaccaaacaaagacaggaacaattcccagaagaagtcccgcctggtgttcactgacctccaacgccgaacactcttcgccatcttcaaggagaacaaacgcccgtcaaaggagatgcagatcaccatttcccagcagctgggcctggagctcacaaccgtcagcaacttcttcatgaacgcccggcgccgcagcctggagaagtggcaagacgatctgagcacagggggctcctcgtccacctccagcacgtgtaccaaagcatgatggaaggactctcacttgggcacaagtcacctccaaatgaggacaacagataccaaaagaaaacaaaggaaaaagacaccggattcctagctggggcccttcactggtgatttgaaagcacaattctcttgcaaagaaacttatattctagctgtaatcataggccaggtgttcttcttttgtttttaatggctatggagtccaagtgcaagctgaaaaattaatctcttagaaccagacactgttctctgagcatgctaagcatcagaaacccaaatggggcc

SEQ ID NO: 672 - DNA, 3239 bp, Homo sapiens
  CDS (281)..(2407)
  misc_feature (1)...(3239): n = a,t,c or g
gtaccggtccggaattcccgggtcgacgatttcgtagcggcggcgcggcgactgaagcgcgcgaaaagctgaggcggcaacgtcggggacggctgcgcgggacggctctgtaggaaggaacttggttccccctccctcagcttccgccccaaaagcagaagtagaaagtaatgaaaaggacaacagacctgaggaagaagagcaagtaatacatgaagatgatgaaagaccttctgagaaaaatgaattttctagacgaaaacgttctaaatcagaagacatggacaatgtacagtctaaacgtcgtcgatatatggaagaagaatatgaggcagaatttcaagtaaagattacagccaaaggagacattaaccagaaacttcaaaaggttatacagtggttgctggaagaaaaattgtgtgcgctgcagtgtgctgtatttgataagactttggcagaattgaaaacacgagtggaaaagattgaatgtaacaagaggcataaaacagttctcactgaactacaggccaagatagccaggttaaccaaacgctttgaagcagccaaagaagatcttaagaaaagacatgaacatccacccaacccaccagtatcaccaggaaaaactgtaaatgatgtcaacagcaataataacatgtcttacagaaatgcaggcacagtgagacagatgctggagtccaaaagaaatgtaagcgagagtgcaccaccatcctttcaaactcctgtgaatacagtatcttcaaccaatcttgtcactcctccagcagttgtcagtagtcaacctaaattgcagactccagtgacttcgggttccctcacagcaacgtcagttcttcctgcacccaatacagctactgtagttgctactactcaggtgcctagtggaaatccccagcctacaatctctttacagcctttgccagtgattttgcatgtacctgttgcagtatcctcccagcctcagcttctacagagccatccagggactttggtgactaatcaaccatctggcaatgttgaattcatttctgtgcaaagcccacctacagtgagtggtcttaccaaaaatccagtatccttgccatccttgccaaatcccactaaaccaaacaacgttccttctgtgcccagtcctagtattcaaaggaaccctactgccagtgctgcaccattgggaacaacacttgctgtgcaggctgttccaacagcacactctattgtacaagccacaaggacttctttacccacagtgggcccatcaggactctatagtccatcaactaatcgaggtcctatacagatgaaaattccaatttctgcatttagtacttcgtctgctgcagaacagaacagcaataccaccccaagaattgaaaaccagacaaacaaaacaatagatgcttctgtcagtaagaaagcagctgatagcacatcacagtgtggaaaagccactggcagtgattcaagtggtgtcattgatctcacaatggatgatgaagagagtggagcttcacaagaccccaaaaaactaaatcacactcctgtatcaaccatgagttcttctcagcctgtgtcacgaccattgcaacccatacaaccagcaccgcctcttcaaccatctggggtgccaacaagtggaccatctcagaccaccatacacttactacctacagctccaactaccgtgaatgtaacacatcgtccagtaactcaggtgaccacaagactccctgtaccaagagctcctgcaaaccaccaggtggtttatacaactcttcctgcaccaccagctcaggctcccttgcgaggaactgttatgcaggctcctgctgttcggcaggtcaatccccaaaatagtgttacagttcgagtgcctcaaacaaccacatatgttgtaaacaatggactaaccctgggatcaacaggacctcagctcacagtgcatcaccgaccaccacaagtgcatactgagcccccacgccccgtgcacccagcacccttaccagaagctccacaaccacagcgtctgcccccagaagctgccagcacatctctgcctcagaagccacacttgaagttagcacgcgttcagagtcaaaatggcatagtactgtcatggagtgtcctggaggtggatcgaagctgtgccactgttgatagctaccatctctatgcttaccatgaggaacccagtgccactgtgccctcacaatggaaaaagattggggaagtcaaggcacttcccttgcccatggcatgtactctcacccagtttgtatctggtagcaaatactactttgcagtacgagccaaggatatttatggacgttttgggcctttctgtgatcctcagtcaacagatgtgatctcttctacccagagcagttaaaccttggagcctttatattttcctcttttaaaatttccaccttttggtcttgtttttaatcttgtgcatgataccccatgtaaaatccaccttgtgcaagatttcttggacagatgtgtgtatacactacatttgtttataaccagaagcaaaataaactcagcccacaaagctagaatcttttcctggacagtttaggctttggggtttggaaatgtaaatgtgtaccttgctttagttttgaggctggggaatatgtgtgggtgtttatgtgtgtttttccttatgtaggtgttattgcattggagtctcccattttcattctcaaatttacctcttaaagtacgaagtaagtagatcaaaggatttgagatgtgtaactggcatgattctgcttttgaaggatctatagtatcattttagttaagtgggtcaaacagaatcaaaacaaaacccaaagaaaaaaaaaacaaaatggctaaatagtttaaaataggttaattcgaacacaggaaaggatctatttgttgtttcttttgtctggtctcctgagttgttaattaggtgaaaaaagatctgcaatggccccctccctttcctaatctggcttttacatttattttgtgccttaaagattaactacaaagataaacatggccaaaaataaataaataaatatggccatatgtccgntgttgcttagtcttcccttgcagccttttacccttgatttctccttcatctctaccaaatatagcacaactcctcaagtaattttttttttttgaaatggagttttgctcttgttgcccaggctggaaaggcgggg

SEQ ID NO: 673 - DNA, 1144 bp, Homo sapiens
  CDS (314)..(1144)
cggtccggaattcccgggtcgacccacgcgtcggagagaagcagcttcggctgcagcaaaccacgcaggtccttcttgatcatctagaactgaccgctccgccttgccaggagtctgcagaaccacgtggctagcctgcctgaagttctcacctctccaggaaggcggggggtttctaatggctgcagctgcgctgggggctgggggctcccgctgggactccacttccgtggatgtctaagcttcacctttcttgcgcccgcaggggcatgactcaggtgaaagggagccattttctcagacccctggcctcatgcagcccttcagcatccccgtgcaaatcacacttcagggcagccggaggcgccaggggaggacagcctttcctgcctcagggaagaagagagagacagactacagtgatggagacccactagatgtgcacaagaggctgccatccagtactggagaggaccgagccgtgatgctggggtttgccatgatgggcttctcagtcctaatgttcttcttgctcggaacaaccattctaaagccttttatgctcagcattcagagagaagaatcgacctgcactgccatccacacagatatcatggacgactggctggactgtgccttcacctgtggtgtgcactgccacggtcaggggaagtacccatgtcttcaggtgtttgtgaacctcagccatccaggtcagaaagctctcctacattataatgaagaggctgtccagataaatcccaagtgcttttacacacctaagtgccaccaagatagaaatgatttgctcaacagtgctctggacataaaagaattcttcgatcacaaaaatggaactcccttttcatgcttctacagtccagccagccaatctgaagatgtcattcttataaaaaagtatgaccaaatggctatcttccactgtttattttggccttcactgactctgctaggtggtgccctgattgttggcatggtgagattaacacaacacctgtccttactgtgtgaaaaatatagcactgtagtcagagatgaggtaggtggaaaagtaccttatatagaacagcatcagttcaaactgtgcattatgaggaggagcaaaggaagagcagagaaatct

SEQ ID NO: 674 - DNA, 1310 bp, Homo sapiens
  CDS (99)..(974)
ctatagggagacccaagctggctagcgtttaaacttaagcttggtaccgagctcggatccactagtccagtgtggtggaattcgccctgagcgtctccatggcctgcctgagcccctcgcagctccagaagttccaacaggatggattcctggtgctggaaggattcttgtctgcggaagagtgtgtggccatgcaacaaaggattggcgagatagtggctgaaatggatgttcctctccactgccgcacagaattctccacccaggaagaggagcagcttcgagcccagggcagcacagactatttcttgagcagtggtgacaagattcgattcttctttgagaaaggcgtttttgatgagaaaggaaatttcctggtccctccggagaaatccatcaacaaaattggccacgctctgcacgcccacgaccccgtcttcaagagcatcacacactccttcaaggtgcagaccttggccagaagtctgggcctccagatgcccgtggtggtgcagagcatgtacatctttaagcaacctcactttggcggtgaagtctcccctcatcaggacgcctccttcctgtacacggagcccctgggccgggtgctgggcgtgtggatcgcagtggaggatgccacgctggagaacggctgtctctggttcatccctggctcccacaccagtggtgtgtcaagaaggatggtccgggcccctgttggctcagcgcctggtaccagcttccttgggtcagagccagcccgggataacagcctctttgtgcccaccccagtgcagagaggggccctggtcctcatccatggagaagtggtacacaagagcaagcagaacctctctgaccgctcgcgccaggcctacactttccacctcatggaggcctctggcaccacctggagcccggagaactggctccagccaacagctgaactgccctttccccaactgtacacctaaaggctctcgcagggcaggagccctcgcccctcccgggtgaagctgtgggctgtaaacaccagtgccttgctcagcctcctggttgcaacagggaggtcttgtctcccctcctgggctttcctcctgccctgtgggcagcagcctaggctgggtcaggggcttccctaagatcttcacctctctgcctccctactgccccaacatagccttgaggaggcttctcagccaccaaagggttctggccccttctcactctcctctcctctcagatggaactctggttattatggtgttagttatcgaataaaaacgacttcagaatgcaaaaaaaaaaaa

SEQ ID NO: 675 - DNA, 707 bp, Homo sapiens
  CDS (164)..(364)
atttggccctcgaggccaagaattcggcacgaggaaaggcttttcctgctgactccaccagcagcattctgggatatttcttccttcaaggagtcacagtgcttcacatgggtcaaggcaaagacaggtctcctgccaaggcacccaagatgaaatcttgaaaatgagaaacacatttgctgaactgaagaattcattagaggctctcagcagtagaatggaccaggcagaggaaagaattgggacccaggctggagtgcagtggcgtgatcatggctcactgcagcctcaacctcctgaattcaagcaatgcttccacctcagtctcccaagtagctgggactacagggcgtgcctttcttagagcaatcctggtgccactaaaagctgcattttcaatatgagataaaaatgtattttacaaaaagtgcaaggtcttcatgtctgctggcattgctgcaacagtggcttgtgtgagagatcactttttacggcaatacccaatttattggagagacaaactgctcaagcaaggatgattagcattctatggcattttaaaaggatacttgcaatgcttgaccttaccacaatagcaacaggaggtagctacaaaattattacaatagtagagtatggtaccacagttaattttatgtagctataatttaatactgcatctttaatgttgttcacatttctctgga

SEQ ID NO: 676 - DNA, 929 bp, Homo sapiens
  CDS (78)..(779)
  misc_feature (1)...(929): n = a,t,c or g
ctgaattcccgggtcgacccacgcgtccgcgcgtcgggcagcgggcgcggcggccccgcgcagccatggactggctcatggggaagtccaaagccaagcccaatggcaagaagcccgctgcggaggagaggaaggcctacctggagcctgagcacaccaaggccaggatcaccgacttccagttcaaggagctggtggtgctgccccgcgagattgaccttaacgagtggctggccagcaacaccacgacgtttttccaccacatcaacctgcagtatagcaccatctcggagttctgcacaggagagacgtgtcagacgatggccgtgtgcaacacacagtactactggtatgacgagcgggggaagaaggtcaagtgcacggccccacagtacgttgacttcgtcatgagctccgtgcagaagctggtgacggatgaggacgtgttccccacaaaatacggcagagaattccccagctcctttgagtccctggtgaggaagatctgcagacacctgttccacgtgctggcacacatctactgggcccacttcaaggagacgctggccctggagctgcacggacacttgaacacgctctacgtccacttcatcctctttgctcgggagttcaacctgctggaccccaaagagaccgccatcatggacgacctcaccgaggtgctatgcagcggggccggcggggtccacagtgggggcagtggggatggggccggcagcgggggcccgggagcacagaaccacgtgaaggagagatgagccccccgggccggacaggggcacacgtgtgcaaagagacggtggtgtgtgttctctcctgcatctgcgtgtncacacatgtgctgggcacgcgtgtggcgaggacttgcagggccccggactgacctggtgtgtggctgcataatcacg

SEQ ID NO: 677 - DNA, 2663 bp, Homo sapiens
  CDS (894)..(1724)
cctggcgcgcgcgggccgggccgcaccgctgcgggctccgcgcgcgcgggccatgtccgctttctgcctgggcttggtcggccgcgcttcagcacccgccgagccggacagcgcctgctgcatggagctgcccgccgcggccggggacgcagtccggagtcccgccgccgccgccgccctcatcttccccgggggctccggggagctagaactggcgttagaggaggagctggcgctgctggcggccgggggagcggccgtccgaccccggggaacaccctcaggccgagcctgggtctctggccgagggggccggaccgcagccgccgccctcccaggaccccgagctgctgtcggtgatccgacagaaggagaaggatctggtgttggcggcccggctgggtaaggcgctgctcgagaggaaccaggacatgagccggcagtacgagcagatgcataaggagctgacagacaagctcgagcacttagagcaagagaaacatgaattgagaagacgatttgagaaccgagaaggggagtgggaaggccgagtgtcagagctggagagtgatgtgaagcagctacaggatgagttggagaggcagcagattcatctgcgggaagcagatcgagaaaaatcacgggctgtccaggaactgtcggaacagaaccaaaggctattggatcagctcagcaggaaaattaagacttggatttactattctacctcagcccttcttgtatattgaaaataaaactaccaactcttcagttaccggaggaaaaagaacttctctgatatcatccctcagcactgatgttctcatgggagcagtgccgtgtctgcatggtctcctctgtttcaggcatcagaagttgagagacaactctccatgcaggtccacgccctcagagaagactttcgggagaaaaactcatcaaccaaccagcacattatccggctggagagccttcaggccgagatcaagatgctgtcagatcggaaacgggagctggagcatcgtctcagcgctactttagaggaaaatgacctgctccaagggaccgtggaggagctacaggaccgggtgctaatcctggagaggcagggccatgacaaggacctacagctgcaccaaagccagctggagcttcaggaggtgcgtctctcctgccgacagctgcaggtgaaggtggaagaactcactgaggagaggagtctgcagagctctgccgccaccagcacatccctcctgtcagagatcgagcagagcatggaggctgaggagctggagcaggagcgagagcaggtgacactgctgagtgtggagatgactgccctaaaagaggagagagaccgactcagagtcacttctgaggacaaggagccaaaggagcagcttcagaaggccatcagggaccgcgacgaggccattgcaaagaagaatgctgtggagctggaacttgccaagtgcaggatggatatgatgtctctgaacagccagttgctggatgccattcagcagaaactgaacctctcgcagcagctggaagcttggcaggatgacatgcacagggtcattgaccggcagctgatggacacgcacctgaaagaacggagccagccggctgctgccctctgcaggggccacagcgctgggcggggggatgagcccagcatcgctgaaggcaaacgactcttctcattcttcaggaaaatttaagttgggaggagtcaggccaccaaagatgggtggactggaggcagctggaaaggcggtgcaggcaaggcctcccctgcagcttgcacctcagcagctgccctgcccctcatgctagggccccatgggtccgggagggcctgctccctttcgtcggtggggatggagacctagaggtgggggcctgccttggccactgaaggcttcccttggcccaccgcctggagaagcccaggcgtgggcttctccaggaccacgtgcttgagcagggttaggccacctcccagaggggccccttggtgttgggctttgcagctcacacccaacagatcgcagcccacccccaggcactgctgcctccttgattttagcaaatggggaacagaaggaatggaggcccttctctgcatgcctcaggaggcctgagccccaggggcctagacctgtgggggcagcgggccaggcctgagcctccattccttccccagcccctggcccagggtcaaaggagagatggcagcccctcccccgcatgcatgcacctcagctggcaggaggccaagcctctggccgcagggtctaagagccggggcttacccaagctcagctgaggccacccgagccccagggaggaagaaggccctgtccccctgtcgccactgctctccctcccagccttcagtctctgccccttagcagggcctggccaggcagagtgttatcaccagtcatctgcaggctttagccatccagccctttcccctgctcagggctggggttggacggggtctcctcctcccacagcgcccacctccacccctcacatacatacataatttcttggcctagcaaacaagtccaggccactgaatggcaccagaggggtctgtggtcagccaccccaccttgagggcagcacaggcaccacggggtggaggagag

SEQ ID NO: 678 - DNA, 6792 bp, Homo sapiens
  CDS (1)..(6792)
atggcagtgtggcagctctactactggaggggtggggtcactgtcagtgttggtggcagcagacctgggcagacacttagaggaagtgtccaaaataaactcaatccccgacctggaaaggtagtgatatatagtgaacccgacgtctctgagaagtgcattgaagttttcagtgacattcaggattgcagttcttggagcctctctccagtgatactcataaaagttgttagaggatgttggattttgtatgagcaaccaaattttgaagggcactccatccccttagaagaaggagaattggaactctctggtctctggggtatagaagacattgtggaaaggcacgaagaagcagagtctgataagccagtggtgattggttccatcagacatgtggttcaggattacagagttagtcacattgacttatttactgaaccagaagggttaggaatcctaagttcctactttgatgatactgaagaaatgcagggatttggtgtaatgcagaagacttgttccatgaaagtacattggggcacgtggctgatttatgaagaacctggatttcagggtgttcctttcatcctggaacctggtgaataccctgacttgtccttctgggatacagaagcagcgtacattggatccatgcggcctctgaaaatgggtggccgtaaagttgaattccctacagatccaaagtccagagcacaacctccagaagacaacagaaggaagccagttttggggaaacttggcactctattcactgcaggaaggagaagaaacagtagaaacgggttagagagtcccaccagatcaaatgccaaaccactctctcccaaagatgtggtagcctctcctaagctcccagagagagagagtgagaggagcagatctcagagcagccaactgaagcaaacggacacaagcgaggagggctccccgcgggagaatccccgagaggcagagggcgagctccccgagagcggtggccccgcagccccccctgacgccgagctgtcacctcgctggagcagcagtgcagcggctgtggctgtgcagcagtgccatgaaaatgattcaccccaattagaacctctggaggcagagggagagcctttcccagatgccaccaccactgccaagcagctgcattcctcgccgggaaattcctccaggcaagagaacgcagagacgcccgcccgcagtccgggggaggacgcttcaccaggtgctggccacgaacaggaggctttcctgggtgtgaggggtgcgccagggtcgcccacccaggagcggcccgcgggaggactaggcgaggcccctaacgcagcccccagtgtgtgtgccgaagaaggctccctggggccccgcaacgcccgcagccagccccccaagggcgcgtctgatttgccaggtgagcctccggccgagggcgcagcgcacacggccagctccgcgcaggcagactgcacagcccgccccaagggtcacgcccaccctgctaaggtgctaactttggacatctacttgagtaagactgagggggcacaagtggacgagccggtcgtgattactcccagagcggaagattgcggtgactgggacgacatggagaagaggtccagcggccgtaggtcggggaggcggagggggtcgcagaaatccaccgactcccccggcgcggacgccgagctccctgagagcgctgccagggacgacgcggtgttcgacgacgaggtggcgccaaacgcggccagcgataacgcctcggcggaaaagaaagtgaaatctccgcgggcagccctcgacgggggcgttgcctccgctgcgagcccagagtccaagcccagccccggtaccaaagggcagctccgaggggagtcggaccggagcaaacagccacccccggcttcgtcccccacgaagaggaagggcaggagccgtgccctcgaggccgtgcccgccccgcccgccagcggcccccgggctcccgccaaggagtccccacccaagagggtgcccgatcccagcccagtcaccaagggcactgcggccgagagcggggaggaggcggcgcgggccatcccccgcgagctcccggtcaagagcagctcgctgctgccggagatcaagcccgagcacaagaggggcccgctccccaaccacttcaacggccgggcagagggaggtcgaagcagagagctgggcagagcggccggagcgcctggagcttctgacgccgacggcttgaagcccaggaaccatttcggcgtgggcaggtcgacagtgaccactaaagtgaccctccctgccaagcccaaacatgtggaactaaatcttaaaacccctaagaatcttgacagtttgggaaatgagcacaatccatttagccagccagttcacaaaggcaacactgccaccaaaatctccttatttgaaaacaaacggacaaacagtagcccaagacacactgacattcgaggccaaaggaatactcctgcctctagtaaaacgtttgttgggagggcaaagctgaatttagccaaaaaagccaaagaaatggagcaacctgaaaagaaagtaatgccaaacagtccccagaatggtgtgctggttaaggaaactgctatagaaaccaaagttaccgtctcggaagaagagattctgccagcaaccagaggaatgaatggagactcttctgagaatcaagctcttggtcctcagcctaaccaagatgataaagcagatgtacaaacagatgctggctgcctttcagaaccagtggcttctgctctgattcctgtcaaggatcataagctcttagagaaggaggactcagaggctgcagacagcaaaagccttgtacttgaaaatgtaaccgatacagcacaagacatccccaccactgtggataccaaagatttacctccaacggccatgccaaagccacagcatacattttctgactcacagtcccctgctgagtcatctcctgggccttctctttcactgtctgcacccgctcctggggatgttcccaaagacacatgtgttcaatcacccataagcagtttcccatgcactgatctaaaagtgtcagaaaaccataaaggatgtgttttgcctgtgtctcgtcagaacaatgagaaaatgccacttttagaacttggaggagaaacaacccctcctttgtccacagagcgtagtccagaagctgtgggaagtgagtgtccatccagagtcctcgtccaggtcaggtccttcgtgctccccgtggagagcacccaggatgtgagctcccaggtcatcccagagagctctgaagttagagaagtgcagttgccaacttgtcacagtaatgaacctgaagtggtttccgttgcaagttgtgctcccccacaagaggaagtactgggcaatgaacactctcattgcacagcagagctcgcggcaaaatctggcccacaagtcataccgccagcatcagagaaaactctgcctattcaggctcaaagtcagggcagcagaacacccctgatggctgaatccagtcccaccaactctcccagcagcggaaatcacttagccactcctcaaaggccagatcagactgttacaaatggccaggatagccctgccagccttttgaacatttctgctggtagtgatgatagtgtatttgattcttcttctgatatggaaaaattcactgaaattataaaacagatggatagcgcagtttgtatgcccatgaaaagaaagaaggccaggatgccaaactctcctgctcctcactttgccatgcctcctattcacgaagaccatttagaaaaggtgtttgatcccaaagtgtttacctttggtttggggaagaagaaggaaagtcagccagaaatgtcaccggctttacatttgatgcagaaccttgacacaaaatccaaactgagacccaaacgtgcatctgctgaacagagcgtcctcttcaagtccctgcacaccaacactaatgggaacagtgagcctctggtgatgccggaaatcaatgacaaagagaacagggacgtcacaaatggtggcattaagagatcgagactagaaaaaagtgcacttttctcaagcttgttatcttctttaccacaagacaaaatcttttctccttctgtgacatcagtcaacactatgaccacggctttcagtacttctcagaacggttccctatctcagtcttcagtgtcacagcccacgactgagggtgccccgccctgtggtttgaacaaagaacagtcaaatcttctgcccgacaactccttaaaggtcttcaatttcaactcgtcaagtacatcacactccagtttgaaaagtccaagccacatggaaaaatacccgcaaaaagagaaaaccaaagaagatctggattcacgaagcaacctacacttgccagaaactaaattttctgaattgtcaaaactgaagaatgatgatatggaaaaggctaatcatattgaaagtgttattaaatcaaacttgccaaactgtgcaaacagtgacaccgacttcatgggtcttttcaaatcaagccggtatgacccaagcatttctttttctggaatgtcattatcagacacaatgacacttagaggaagtgtccaaaataaactcaatccccgacctggaaaggtagtgatatatagtgaacccgacgtctctgagaagtgcattgaagttttcagtgacattcaggattgcagttcttggagcctctctccagtgatactcataaaagttgttagaggatgttggattttgtatgagcaaccaaattttgaagggcactccatccccttagaagaaggagaattggaactctctggtctctggggtatagaagacattttggaaaggcacgaagaagcagagtctgataagccagtggtgattggttccatcagacatgtggttcaggattacagagttagtcacattgacttatttactgaaccagaagggttaggaatcctaagttcctactttgatgatactgaagaaatgcagggatttggtgtaatgcagaagacttgttccatgaaagtacattggggcacgtggctgatttatgaagaacctggatttcagggtgttcctttcatcctggaacctggtgaataccctgacttgtccttctgggatacagaagcagcgtacattggatccatgcggcctctgaaaatgggtggccgtaaagttgaattccctacagatccaaaggtagttgtttatgaaaagcctttctttgaaggaaaatgtgtggaactagaaacaggaatgtgtagttttgtcatggagggaggtgaaacagaagaggcgactggagacgatcatttgccgtttacgtcagtggggtctatgaaagttctaagaggcatttgggttgcatatgagaagcctggatttaccggtcatcagtatttgctagaagaaggagaatacagggactggaaagcctggggaggttacaatggagagcttcagtctttacgacctatattaggtgatttttcaaatgctcacatgataatgtacagtgaaaaaaactttggatccaaaggttccagtattgatgtattgggaattgttgctaatttaaaggagactggatatggagtgaagacacagtctattaatgtactgagtggagtatgggtagcctatgaaaatcctgacttcacaggagaacagtatatactggataaaggattttataccagttttgaggactggggaggcaaaaattataagatctcttctgttcaacctatatgtttggattctttcactggcccaaggagacgaaatcagattcacttgttttcagaaccacagtttcaaggtcacagtcaaagttttgaagaaacaacaagtcaaattgatgattcattttctaccaagtcttgcagagtttcaggaggcagctgggttgtatatgatggagaaaatttcactggtaatcaatacgtgttggaagaaggccattatccttgtctgtctgcaatgggatgcccgcctggagcaactttcaagtctcttcgttttatagatgttgaattttctgaaccaacaattattctctttgaaagagaagacttcaaaggaaaaaagattgaacttaatgcagaaactgtcaatctccgatccctgggattcaacacacaaatacgctctgttcaggttattggtggcatatgggttacttatgaatatggcagttacagagggcgacagttcctattgtcacctgcagaagtacctaattggtatgaattcagtggctgtcgccaaataggttctctacgaccttttgttcagaagcgaatttatttcagacttcgaaacaaagcaacagggttattcatgtcaaccaatggaaacttagaggatctgaagcttctgaggatacaggtcatggaggatgtcggggccgatgatcagatttggatctatcaagaaggatgtatcaaatgcaggatagcagaagactgctgcctgacgattgtgggcagcctggtaacatctggctccaagctaggcctggccctggaccagaatgctgacagccagttctggagcttgaagtccgatggcaggatttacagcaagttgaagccaaatttagttttagacattaaagggggcacacagtatgatcaaaatcacattatcctcaacactgtcagcaaagagaagtttacacaagtgtgggaagccatggtcctatatacctga

SEQ ID NO: 679 - DNA, 2101 bp, Homo sapiens
  CDS (185)..(1438)
gccgagctgaggctcggcttcctgctgatggtcagggttttggcaactccccggtgtgagaggggtagggagtgctcccggcggcgacggggccgagttcaccagccgccggggcagtagtcgaaggcccggcgcggcatgtcctgggtgccgcggtgcgggcagtgaacgcgcgccgggcgggatgggccggcgccgggcgccagagctgtaccgggctccgttcccgttgtacgcgcttcaggtcgaccccagcactgggctgctcatcgctgcgggcggaggaggcgccgccaagacaggcataaagaatggcgtgcactttctgcagctagagctgattaatgggcgcttgagtgcctccttgctgcactcccatgacacagagacacgggccaccatgaacttggcactggctggtgacatccttgctgcagggcaggatgcccactgtcagctcctgcgcttccaggcacatcaacagcagggcaacaaggcagagaaggccggttccaaggagcaggggcctcgacaaaggaagggagcagccccagcagagaagaaatgtggagcggaaacccagcacgaggggctagaactcagggtagagaatttgcaggcggtgcagacagactttagctccgatccactgcagaaagttgtgtgcttcaaccacgataataccctgcttgccactggaggaacagatggctacgtccgtgtctggaaggtgcccagcctggagaaggttctggagttcaaagcccacgaaggggagattgaagacctggctttagggcctgatggcaagttggtaaccgtgggccgggaccttaaggcctctgtgtggcagaaggatcagctggtgacacagctgcactggcaagaaaatggacccaccttttccagcacaccttaccgctaccaggcctgcaggtttgggcaggttccagaccagcctgctggcctgcgactcttcacagtgcaaattccccacaagcgcctgcgccagccccctccctgctacctcacagcctgggatggctccaacttcttgccccttcggaccaagtcctgtggccatgaagtcgtctcctgcctcgatgtcagtgaatccggcaccttcctaggcctgggcacagtcactggctctgttgccatctacatagctttctctctccagtgcctctactacgtgagggaggcccatggcattgtggtgacggatgtggcctttctacctgagaagggtcgtggtccagagctccttgggtcccatgaaactgccctgttctctgtggctgtggacagtcgttgccagctgcatctgttgccctcacggcggagtgttcctgtgtggctcctgctcctgctgtgtgtcgggcttattattgtgaccatcctgctgctccagagtgcctttccaggtttcctttagcttccctgcttcctgggaatcaggagcctggacactgccatctctagagcagagtggaggcctggactccctttgctcactccattcgggtccacagctgaggttgcctctgacaagatgaatgggcactgcctgcccttctagtgaaaaggcttggctatggccctgtgtgactccaggtcccaggaaccttgccttcgtcatctgtggatccatccagaacagcggtatctgaagcccaggccatactccctgcctcctttcttctgcctaccagaggctccagagttgagcttgtcctttatctagaaacatgtgaagatgcccaagagcctggaggcactgctgtccttcctgcagaaacagtttctcctcctcccctcagccttgtggccagttcctcttgacatgaagcccctggcatttgctggggaagggactggcctggtacttgctgttagggcaggaaggggcaaaaggaagacttgggtagtaatctgggggttcagatgggtagcactaagccagctggcctaaagatgcaataagttcctaggtagtctacccttaccttgaggaatgggaaaatgaacctcagcccattaggcaggaaaagttgatatttaataaacaaggaaagagtgaactgagaaaaaaaaaaaa

SEQ ID NO: 680 - DNA, 1851 bp, Homo sapiens
  CDS (1063)..(1815)
tcacaggtggatcatatcaagaatgctggttaataaaggcaggtgagtataggtgagggcatcagcagcaagagccactagagcaggttgggcggcagcaggtggacacacagcagctggggcggtagcaggtggtcctgcagcaggtggtctggccacagctggggcggcagcaggtgggctggcagtacacagactggcagcactggggtctgaagcagctggacacacagcagctgggacggcagcaggtggtcctgcagcaagtggtctggcagcagctggggctgcagcaggtgggctggcagcacacagactggcagcactgcggtctgcagcagctggacacacagcagctggggcggcagcaggtggtcctgcagcaggtggtctggcagcagctgggacggcagcagttcttttcatatcatgggatggtgactggctcatggttgatagtccaatatgaggttcaacaagaggatccacagcagctggggcggcagcaagttgcacggcagcaggtggtctgacagcagagtggacggcagcagctggacacaccacagctggggcggcaggtggtctgacaacagagtggacggcagcagctggacataccacagctggggtggcaggtggtctgacagcagagtgggcggcagcagctggacacaccacagctggggcggcaggtggtctgacaacagactgggtggcagcagctggggcgacagcaagtggtctggcagcaggtagtctgagagcaggatgggcggcagcagctggatacaacacagctggggcagcaacaggtggtctggcagcagctggggcggcagcaggtctcttggcagaggccttgatcacagccctggtcagagcagacagagccacaacaagagttaaccatggtgtcagagggtggaggttagaagctgcggcagcagcaagcggtcttgcagcaggtggtctggcagcagctgggatggcagcagatctcttggcagaggtcttaaccacacctctctgaacaggagcccacccttcacccctgacaccatgacccactgctgttccccttgctgtcagcctacatgctgcaggaccacctgctgcaggacaacctgctggaagcccaccactgtgaccacctgcagcagcacaccctgttgccagccctcctgctgtgtgcccagctgctgccagccttgctgccacccaacttgctgtcaaaacacctgctgcaggaccacctgctgccagcccacttgtgtggccagctgctgccagccttcctgctgcagcacaccctgctgccagcccacctgctgtgggtccagctgctgtggccaaaccagctgtgggtccagctgctgtcagcctatttgtgggtccagttgctgtcagccttgctgtcacccgacttgctatcaaactatctgcttcaggaccacctgctgccagcctacctgctgccagcccacctgctgcaggaacacctcttgccagcccacctgctgtgggtccagctgctgccagccttgctgccacccaacatgctgtcaaaccatttgtagatccacctgctgccaaccatcctgtgtgaccagatgctgcagcacaccctgttgccagccaacctgtggtgggtccagctgctgtagccaaacctgcaatgagtccagctattgtctgccttgctgccgtcccacctgctgccagaccacctgctacaggaccacctgttgccgccccagctgttgctgcagtccttgctgtgtctccagctgctgccagccttcctgctgctaatccacttgctgcagacccaccacccaccagagacat

SEQ ID NO: 681 - DNA, 3306 bp, Homo sapiens
  CDS (1050)..(3260)
ctgggattacaagcctttgccagcacgcccgggtaattttgtatttttagtaaagacaggttttttccatgttgggcagggtggttttgaactccccaccccaggtgatccccccgccccagcctcccaaaaaggtgggattacagggtttagcccccgcgcccggcctgcaaaacccttttttacttttggggcccaaaaagatcccccatttccccgtccttttccggtagactattcgctactgaaacgatttttttttttttttgagacgaggtggaggggcgggggttctcgctatcttgctcaagctgatctcgaactcctgggttcgatcaatactcagacaatcttggcaggcgcaggaggaccaaattctagtgaatgagatcgagtctctcggctctttcccttccatgttttctttttgattggccctcgacgatcctcagtgacgcctcccgcaccgcctcacccgagagtcagccgccctcgcttttccgtgcgcacgcgcagtatcccgattggctctgccctagcggattgacgggcaggttagccaatggtctcgtaatataggtggagcgagccctcgaggatgtccacgacccggcctctcgctgaatattcatgagggaggcgggtcgaccccgctgcacagtccggccggcgccatgaagtgagaagggggctgggggtcgcgctcgctagcgggcgcggggggtcttgaagatggggtcatcggtgggcgcgcctgggtccccaagggggcgaggggagggtgaaggggtgggacgggggcagccgcagggagcagcagtgatagcgaggagacactgagggggccccgaggctcctgaggacctgagggttaccgggggcgccgggcccgtcacccttctctgggctcgacgaccgggcactgtggaggcgggagaggggctgaggggacgggaactgacccagcagcccctgccgccaggctcaacgtggacgggctcctggtctacttcccgtacgactacatctaccccgagcagttctcctacatgcgggagctcaaacgcacgctggacgccaagggtcatggagtcctggagatgccctcaggcaccgggaagacagtatccctgttggccctgatcatggcataccagagagcatatccgctggaggtgaccaaactcatctactgctcaagaactgtgccagagattgagaaggtgattgaagagcttcgaaagttgctcaacttctatgagaagcaggagggcgagaagctgccgtttctgggactggctctgagctcccgcaaaaacttgtgtattcaccctgaggtgacacccctgcgctttgggaaggacgtcgatgggaaatgccacagcctcacagcctcctatgtgcgggcgcagtaccagcatgacaccagcctgccccactgccgattctatgaggaatttgatgcccatgggcgtgaggtgcccctccccgctggcatctacaacctggatgacctgaaggccctggggcggcgccagggctggtgcccatacttccttgctcgatactcaatcctgcatgccaatgtggtggtttatagctaccactacctcctggaccccaagattgcagacctggtgtccaaggaactggcccgcaaggccgtcgtggtcttcgacgaggcccacaacattgacaacgtctgcatcgactccatgagcgtcaacctcacccgccggacccttgaccggtgccagggcaacctggagaccctgcagaagacggtgctcaggatcaaagagacagacgagcagcgcctgcgggacgagtaccggcgtctggtggaggggctgcgggaggccagcgccgcccgggagacggacgcccacctggccaaccccgtgctgcccgacgaagtgctgcaggaggcagtgcctggctccatccgcacggccgagcatttcctgggcttcctgaggcggctgctggagtacgtgaagtggcggctgcgtgtgcagcatgtggtgcaggagagcccgcccgccttcctgagcggcctggcccagcgcgtgtgcatccagcgcaagcccctcagattctgtgctgaacgcctccggtccctgctgcatactctggagatcaccgaccttgctgacttctccccgctcaccctccttgctaactttgccacccttgtcagcacctacgccaaaggcttcaccatcatcatcgagccctttgacgacagaaccccgaccattgccaaccccatcctgcacttcagctgcatggacgcctcgctggccatcaaacccgtatttgagcgtttccagtctgtcatcatcacatctgggacactgtccccgctggacatctaccccaagatcctggacttccaccccgtcaccatggcaaccttcaccatgacgctggcacgggtctgcctctgccctatgatcatcggccgtggcaatgaccaggtggccatcagctccaaatttgagacccgggaggatattgctgtgatccggaactatgggaacctcctgctggagatgtccgctgtggtccctgatggcatcgtggccttcttcaccagctaccagtacatggagagcaccgtggcctcctggtatgagcaggggatccttgagaacatccagaggaacaagctgctctttattgagacccaggatggtgccgaaaccagtgtcgccctggagaagtaccaggaggcctgcgagaatggccgcggggccatcctgctgtcagtggcccggggcaaagtgtccgagggaatcgactttgtgcaccactacgggcgggccgtcatcatgtttggcgtcccctacgtctacacacagagccgcattctcaaggcgcggctggaatacctgcgggaccagttccagattcgtgagaatgactttcttaccttcgatgccatgcgccacgcggcccagtgtgtgggtcgggccatcaggggcaagacggactacggcctcatggtctttgccgacaagcggtttgcccgtggggacaagcgggggaagctgccccgctggatccaggagcacctcacagatgccaacctcaacctgaccgtggacgagggtgtccaggtggccaagtacttcctgcggcagatggcacagcccttccaccgggaggatcagctgggcctgtccctgctcagcctggagcagctagaatcagaggagacgctgaagaggatagagcagattgctcagcagctctgagtggggcgggtggggccataaacggttcctggtgaaaaaaaaaaaa

SEQ ID NO: 682 - DNA, 681 bp, Homo sapiens
  CDS (281)..(499)
catcgacgcccgcttcgactggctgatgtatataactatctattcgatgatgaagataccccaccaaacccaaaaaaagagatctctcgaggatccgaattcgcggtcgcgtcgacggaggaggaggagaggtcggagccgtctccaggagcccttagagaccgagtcccggcggcgacggcggggcagcgcaccggcaggcggattcattccacttaaaacctgaaaacattggaccacacaaagtcttactgatttcaggtaaaaacaataattgaagatgtccagcaaaacagcaagcaccaacaatatagcccaggcaaggagaactgtgcagcagttaagattagaagcctccattgaaagaataaaggtttcgaaggcatcagcggacctcatgtcctactgtgaggaacatgccaggagtgaccctttgctgataggaataccaacttcagaaaaccctttcaaggataaaaaaacttgcatcatcttatagtggaatagagaaacagctcctcgcctctttccaacaacgcaaattatgagcagctccttgaagagatttaccttcagcttatttggtaaccactgctaataactaaaatgttctcagcttggaataatggactctgaagtctctattttccaagttgtcctttctccttaaaataccctttt

SEQ ID NO: 683 - DNA, 510 bp, Homo sapiens
  CDS (47)..(409)
gtgaacggagctttcgcagctggagaaggctcatccacctgcagacatggggcgcagaaagtcaaaacgaaagccgcctcccaagaagaagatgacaggcaccctcgagacccagttcacctgccccttctgcaaccacgagaaatcctgtgatgtgaaaatggaccgtgcccgcaacaccggagtcatctcttgtaccgtgtgcctagaggaattccagacgcccataacgtgtatccttggaaacctgggctttttccagagggtggggagggggctggagtccggaccctgctcatctggcccactgtgtgccctggtgcagggccaaagccgtccagaggaacaggtgccacctagtgatttctgtggggtgagaagatgcagggcagggttccaatgccaatgatcgcccttgacctatgtgggccagatctgtcagaacctcgggatgtgtacagtgattggatagactcctgccatgcggccaatcagtaacgacacagagga

SEQ ID NO: 684 - DNA, 459 bp, Homo sapiens
  CDS (83)..(268)
cattaccggtccggaattcccgggtcgacccacgcgtccgctaaaaagctgctaccaagacagccacgaagatcctaccaaaatgaagcgcttcctcttcctcctactcaccatcagcctcctggttatggtacagatacaaactggactctcaggacaaaacgacaccagccaaaccagcagcccctcagcatccagcagcatgagcggaggcattttccttttcttcgtggccaatgccataatccacctcttctgcttcagttgaggggacacgtctcagccttagccctgtgccccctgaaacagctgccaccatcactcgcaagagaatcccctccatctttgggaggggttgatgccagacatcaccaggttgtagaagttgacaggcagtgccatgggggcaacagccaaaataggggggtaatgatgtaggggccaagcactgcccagctg

SEQ ID NO: 685 - DNA, 4379 bp, Homo sapiens
  CDS (139)..(1251)
gcacgagcgggctcggtggttgggtccgcggcggctcggggtccgcccgcgggctgccggtgcgagcgggcggcccggctcccctcctcccccgcccgccgccgccgctgtgattgggtggaagatggcgctggccggatggaaatcctaatgacagtctccaaattcgcctccatctgtaccatgggcgccaatgcttcggcattagagaaagagattggtccagaacagtttccggtcaatgagcactattttggattagtcaattttgggaatacctgctactgcaattcagttcttcaagcactttatttttgtcgtccatttcgggaaaaagttcttgcgtataagagtcaacctaggaaaaaggagagccttcttacatgcttagcagatctcttccatagcatagccactcagaagaaaaaggttggagtaataccccctaagaagttcatcacaagattacggaaagaaaatgagctttttgacaactacatgcaacaagatgcccatgaattcttaaattacctactaaatacaattgctgatattttacaagaagagagaaagcaggaaaaacaaaatggtcgtttacctaatggtaatattgataatgaaaataataacagcacaccagacccaacgtgggttcatgagatttttcagggaacattaactaatgaaaccagatgtcttacttgtgaaactataagcagcaaagatgaagattttttagacctttctgttgacgtggaacaaaatacatcaattactcactgcttaaggggtttcagcaacacagaaactctgtgcagtgaatacaagtattactgtgaagagtgtcgcagcaaacaggaagcacacaaacggatgaaagttaaaaaactgcccatgattctagctctacacctgaagagatttaaatatatggatcaacttcatcgatatacaaaactctcttaccgggtagtttttcctttagaacttcgtctgtttaacacttcaggtgatgccaccaatccagacagaatgtacgaccttgttgctgttgtggttcactgtggaagtggtcccaatcgaggccattatattgcaatagttaagagtcatgatttttggttgttgtttgatgacgacattgtagaaaaaatagatgcacaagctattgaagaattctacgggttgacatcagatatctcaaagaactctgagtctggttacatccttttctatcagtctcgggactgagagggaaccgtgatgaagagacactttctgcctcatttcttctctggttattttggaaaggatcaagcactgatttttcaagaaaagagaaatgcaggaagctcagggggcagtagcacactttgcacacgataaagcaaagacgatggattgacaagcccttccgatcatggtagttgatttatttgctcaggtatcatgctgtctgtacagttccatacaacaaggaggtgaaatcagagataccagctcctcttttaaaacagccttccagtcattggcacgcattttctctttattaattgcaccaataatgctttgaattccttgggggtgcagtagaaagaatcggaatctgtgccgtattgataaggagatgatgttgaacacactgcataaatttgcctggttcagtatgtatagaaggcatattcagtggtcttttcaagagtaaaccagaaatacttttgggcccaacacttgcagttgccttcctgatgtaaaaactaacatgctagataatccagtgtcgggaagacaaagatgttttgcttctctgaagaagcttataataatatacagtatatgtatatgtagggagcaattggtcaaaagtggctttttgtttccccaagggaaagactggctttgtaattataattttttccttatttattttacttaaaactggtagagtctaagtattatatgaagtgcccatgattctgtcagtaaatttgaacatatttttattagttaatgtcagtttaagttgtccttttgtttgtttctatttttaaggtgaattttaatttctatctgaaatcagttaagataccttgagaaaaactgcagtgagaggagataaatatcctttttcaggaggaactgatatctctggctaaatatttgtccttttattatggtttctaaatcagttattttcttcagctttaatttcataaaattaaaaaactattttaaaaattcctgtagttgttggaataattaaaaattctggtgcagtggtggtataccaatctttagaattcttaagtattctaatgtttcaagttgagatcatgcttgggaaaatcatgtcatagcatttatgttattttcagatgccattttttaccctggaaagaagtcataatgttcatcataaccctagcagcctggatagtgagctaaacaaacccttcaaagattaaattttaatcaagtagaccgggaatacaaaagacaagtccttccttcccttccccccacctttacaaatcttactggaagggtgttcagaaattaaaatctgtgtttgctaagacttcattctgttgggggttttaagaagtaatatatgtaacataaaatatatgtaaacgattgcagtttttttggacgtttttccatgcatcagtaagttgtctgacagtagccaaatgtaacttgcagaaaattattgaaaattatattcagaataatagcaatcaggccttggatgttctttattaaactcttttcaggcagtaaatttaaaaaaaattgtcattttctaaagtccttttgctaaaactgttgactatggaaaacaacaaaaaggaattttttagtctgctgctattattaacatttattatctgtatcttttggctcaggaaatgacttcacctattttttccataagcagacctttaacagagtcacttaattgggctgcttaaacggatgttctgggagaaaattataatatttagtatttgtacaaaatatcaaaaagtattttgacaagtttctttttaagatagttcctaaagccttaccctggctagaggtgttttgtacaaattatatataagccagcctgatctaccaacatgccacagagaatcacaatcaacagtgtggggaaagtcagggcagtggaagtggatgcactctttttattttgaaggcttaaaccaaattgtcttggaattaaagctgtatttctgcagctttcggtacagagaaaaagaggaaagtgaagctgtgtcagttttaacattagctatatcaacatgtttaagaaagatagatgaagtcatttgcataaaggtacagcattgaaatactatgttgtgtttgtttttacatttttgcattaaaaaaaaacatgccgtaaaagccaagttaaatttcatattaaagcaagttctagtgtatgtgttgagttcctggtaatcacatacttgttcacatctacaccgtacttcatagtatgatttgtcaggggagggattgtggggtgacagttttacatttactttttcttcttaatgcagctggatctaagtaaaatgttttgaagtttatcagaaactaaatgtacttttaaaacgtatagggtcagggttgggggaaaaatacaggtatagtaagtaagaaaagtgacccatgaagaaagcatcgtgaggttgtatgttggttgactgtgattaaaatgcggggctggtgtaagttgtaagtggtggctgattgccgtgtaactatgtacatgattgttgggatggctgtcccatattttgtatattggaataaaaatttctataaattattgtaactaaaagtaaatattctaaattaagtcccacttcttaagtcacatggcttctgtcttggaaattttacctttaaaagattatttaagacaggaaccaggaggcttgggaacagggaaagagggaaatgttgtattatgtgggtcttggggcctctaaccatcagtatagggttttttctttccttgatggcagtagaaagacctcattttcataacataactactcttgatactttctttaaaaacactttttattaaagattctatcatgaggtatttggctgggagctgggaggctaaagcgctcatgtcctggctcttcagtgaatttaactgtgtgaccttgggcaagtcacttaacctctctgtgcttcagtctccctgtcttgtaaaatgggagtaatacctacctcacagggttgttgtggggattaattagagataatgtctgtaaagcatttaaggttcttgaagaaggcactatataaatacaaaataatatctattaaagttggtttatttgtga

SEQ ID NO: 686 - DNA, 919 bp, Homo sapiens
  CDS (78)..(632)
cccgttgtgaccggccggaattcccgttgtcgacgatttcgtccgaccgcagggcctctacggaccttactagaaaaatgaaacctgatgaaactcctatgtttgacccaaatctactcaaagaagtggactggagtcagaatacagctacattttctccagccatttccccaacacatcctggagaaggcttggttttgaggcctctttgtactgctgacttaaatagaggtttttttaaggtattgggtcagctaacagagactggagttgtcagccctgaacaatttatgaaatcttttgagcatatgaagaaatctggggattattatgttacagttgtagaagatgtgactctaggacagattgttgctacggcaactctgattatagaacataaattcatccattcctgtgctaagagaggaagagtagaagatgttgttgctagtgatgaatgcagaggaaagcagcttggcaacttgttattatcaacccttactttgctaagcaagaaactgaactgttacaagattacccttgaatgtctaccacaaaatgttggtttctataaaaagtttggatatactgtatctgaagaaaactacatgtgtcggaggtttctaaagtaaaaatcttgtaagaaaattgtcaaaggggctaatgctacaaggctacactcttcctagagttgaaatattttgttgctgcagccgagtgacctccataaatactggactgaaaaaacattgtaatactacaagtataatgacatttagaagattactttgggctggtgggacatgctgtgaatttagattacaaatgaatattataaaggggatgatttttaaccaaaggaatatatttttaacttgaatcttttcttgcattgtatttttctaaaagtttggcttcc

SEQ ID NO: 687 - DNA, 1303 bp, Homo sapiens
  CDS (166)..(1245)
ctgcacgtaccggtccggaattcccgggtcgacccacgcgtccgcccacgcgtccggcttctccgcccgagccgttcgcggagctgccgggggctccttagcacccgggcgccggggccctcgcccttccgcagccttcactccagccctctgctcccgcacgccatgaagtcgccgttctaccgctgccagaacaccacctctgtggaaaaaggcaactcggcggtgatgggcggggtgctcttcagcaccggcctcctgggcaacctgctggccctggggctgctggcgcgctcggggctggggtggtgctcgcggcgtccactgcgcccgctgccctcggtcttctacatgctggtgtgtggcctgacggtcaccgacttgctgggcaagtgcctcctaagcccggtggtgctggctgcctacgctcagaaccggagtctgcgggtgcttgcgcccgcattggacaactcgttgtgccaagccttcgccttcttcatgtccttctttgggctctcctcgacactgcaactcctggccatggcactggagtgctggctctccctagggcaccctttcttctaccgacggcacatcaccctgcgcctgggcgcactggtggccccggtggtgagcgccttctccctggctttctgcgcgctacctttcatgggcttcgggaagttcgtgcagtactgccccggcacctggtgctttatccagatggtccacgaggagggctcgctgtcggtgctggggtactctgtgctctactccagcctcatggcgctgctggtcctcgccaccgtgctgtgcaacctcggcgccatgcgcaacctctatgcgatgcaccggcggctgcagcggcacccgcgctcctgcaccagggactgtgccgagccgcgcgcggacgggagggaagcgtcccctcagcccctggaggagctggatcacctcctgctgctggcgctgatgaccgtgctcttcactatgtgttctctgcccgtaatttatcgcgcttactatggagcatttaaggatgtcaaggagaaaaacaggacctctgaagaagcagaagacctccgagccttgcgatttctatctgtgatttcaattgtggacccttggatttttatcattttcagatctccagtatttcggatattttttcacaagattttcattagacctcttaggtacaggagccggtgcagcaattccactaacatggaatccagtctgtgacagtgtttttcactctgtggtaagctgaggaatatgtcacattttcagcggcaccagc

SEQ ID NO: 688 - DNA, 1023 bp, Homo sapiens
  CDS (121)..(846)
atttggccctcgagcagcaattcggcacgaggtgagttggctgccggtgagttgggtgccggtggagtcgtgttggtcctcagaatccccgcgtagccgctgcctcctcctaccctcgccatgtttcttacccggtctgagtacgacaggggcgtgaatactttttctcccgaaggaagattatttcaagtggaatatgccattgaggctatcaagcttggttctacagccattgggatccagacatcagagggtgtgtgcctagctgtggagaagagaattacttccccactgatggagcccagcagcattgagaaaattgtagagattgatgctcacataggttgtgccatgagtgggctaattgctgatgctaagactttaattgataaagccagagtggagacacagaaccactggttcacctacaatgagacaatgacagtggagagtgtgacccaagctgtgtccaatctggctttgcagtttggagaagaagatgcagatccaggtgccatgtctcgtccctttggagtagcattattatttggaggagttgatgagaaaggaccccagctgtttcatatggacccatctgggacctttgtacagtgtgatgctcgagcaattggctctgcttcagagggtgcccagagctccttgcaagaagtttaccacaagtctatgactttgaaagaagccatcaagtcttcactcatcatcctcaaacaagtaatggaggagaagctgaatgcaacaaacattgagctagccacagtgcagcctggccagaatttccacatgttcacaaaggaagaacttgaagaggttatcaaggacatttaaggaatcctgatcctcagaacttctctgggacaatttcagttctaataatgtccttaaattttatttccagctcctgttccttggaaaatctccattgtatgtgcattttttaaatgatgtctgtacataaaggcagttctgaaataaagaaaattttaaaatattaaaaaaaaaaaa

SEQ ID NO: 689 - DNA, 2132 bp, Homo sapiens
  CDS (59)..(1255)
gcccactggccagggagggcgccgcgcggaggcgcgttcgtgtctcctgtcaaaagccatgctcggcaggtctgggtaccgggcgctgcccctgggtgattttgaccgcttccagcagtcgagcttcggctttctgggctcgcagaagggctgcttgtccccggagcggggcggcgtggggacaggggccgatgtaccccagagctggccctcctgcctctgtcatggcctcatcagtttcctggggttcttgctgctgttggtcaccttccccatttctggctggtttgccctgaagattgtgcccacctacgagcggatgattgtgttccgcctgggccggatccgcaccccccagggacctggcatggttctgctcttgcccttcattgactcctttcagagggtggatctgaggacacgagccttcaacgtccctccctgcaagctggcctctaaggacggggctgtgctgtccgtgggagccgatgtccagtttcgcatctgggacccggtgctgtcggtgatgactgtgaaagacctgaacacagccacacgcatgacagcccagaacgccatgaccaaggccctgctcaagaggccgctgcgggagatccagatggagaagctcaagatcagcgaccagcttctgctggagatcaacgatgtgaccagggcctgggggctggaggtagaccgcgtggagctggcagtggaggccgtgctccagccgccccaggacagcccagctgggcccaacctggacagcaccctccagcagctggccctgcacttcctgggaggaagcatgaactcaatggcaggaggtgccccgtccccggggccagcagacaccgtggagatggtgagtgaagttgagccacctgcccctcaagttggtgccaggtccagtccgaagcagcctctggcggaggggctactgactgctctacagcccttcctgtctgaggccctggtcagccaagtcggggcctgctaccagttcaatgtcgtcctgcccagcggcacccaaagcgcctacttcctggacctcactacaggacgaggaagagtgggacacggggtgcctgatggcatccctgatgtggtggtggagatggccgaggcagacctgcgggccctgctatgcagagagctgcggcccctgggggcctacatgagtggacggctgaaggtgaagggcgacctggctatggccatgaagctggaggctgtcctcagggccttgaagtagcagccttggctgactttccagagcccagtcccaagcctggcaccaagcctgaggggcctcttggaggaggaggtgttcatctgcaccacagagagttgaggccctaacaaatttcaggcccagccaagagcccatgaatggaggctgcaggaggctgagtccggctgccatgcacgtctcccctacagtggttctctggacaaggctttgtccatcccggtccccagctgagtgcccagcgctgagctgggtgcacggtgtgattccaggaggagagccaggcctgccctgccctgctggcttcctgactggagagacaggacccacagaaacagcctgacagcagctggtttggtccttgtgtgagggaccaagcatgtggcccaggctctaagctctgcggggattggagagggatggggagggaagggaaggcagctccaagaagaggtccctgtggcgaagttacctggggatcctggctggcccaccttcctggctgcagtccaggcccgtgctggcgggattgggcatgggaaggagcagggcctgctgcttccctggcgctgctcccaaagatttctgactcatctgccagctccgtcctgcatgcctggcgagctggggcccagggcagcatgaaggagagccctgcgttctgtgcttcttaccagaggtttgcaagcctcagacaaataaatgtggtgtttacaatgtaaaaaaaagacttcagtcatcccagcaatcgcttggttcagtttcattcagctctctatggaccagtaatctgataaataaccgagctcttctttggggatcactacttcttgacttgtagtaactgccaccaatcaagcagtctctcccctgcaaaaca

SEQ ID NO: 690 - DNA, 575 bp, Homo sapiens
  CDS (134)..(499)
acggccagtgaattgaatttaggtgacactatagaagagctatgacgtcgcatgcacgcgtacgtaagcttggatcctctagagcggccgcctactactactaaattcgcggcggcgacgtggtgaaatagatatggcgaccgagggggatgtggagctggagttggagactgagaccagtggaccagagcggcctccggagaagccacggaaacatgacagcggtgcggcggacttggagcgggtcaccgactatgcagaggagaaggagatccagagttccaatctggagacggccatgtctgtgattggagacagaaggtcccgggagcagaaagccaaacaggagcgggagaaagaactggcaaaagtcactatcaagaaggaagatctggagctaataatgactgagatggagatatctcgagcagcagcagaacgcagtttgcgggaacacatgggcaacgtggtagaggcgcttattgccctaaccaactgatgcgtgctttctcaaatatacctactggattaatttatggcaataaaatttttttttgtcttttaaaaaaaaaaaa

SEQ ID NO: 691 - DNA, 642 bp, Homo sapiens
  CDS (52)..(471)
atttggccctcgaggccaagaattcggcacgagcggcgacggaggaggaggatggaggcggtggtgttcgtcttctctctcctcgattgttgcgcgctcatcttcctctcggtctacttcataattacattgtctgatttagaatgtgattacattaatgctagatcatgttgctcaaaattaaacaagtgggtaattccagaattgattggccataccattgtcactgtattactgctcatgtcattgcactggttcatcttccttctcaacttacctgttgccacttggaatatatatcgatacattatggtgccgagtggtaacatgggagtgtttgatccaacagaaatacacaatcgagggcagctgaagtcacacatgaaagaagccatgatcaagcttggtttccacttgctctgcttcttcatgtatctttatagtatgatcttagctttgataaatgactgaagccgtggttgaagtcagcctacactacagtgcacagttgaggagccagagacttcttaaatcatccttagaaccgtgaccatagcagtatatattttcctcttggaacaaaaaactatttttgctgtatttttaccatataaagtatttaaaaaacataaaaaaaaaaaa

SEQ ID NO: 692 - DNA, 3135 bp, Homo sapiens
  CDS (489)..(2900)
aagagatgaccgctgtagcaggcctcaatttaaccctcactaaagggaataagcttgcggccgcaatgcttttttaggtgtttttttttggggctggggtgtgtttatttgggtatatacaatgagtcatggattaaaattgcttccagcggatagatacctaggtgttccacagcattactgaacaagctgtcgtcatttccccattacctcagaagacccccttaattacttacttatattaactgtagaacgtatttatgcataccaggctctacctctgggctttctattctgttccagagacccagtaccagaatatttaaatcactgggggcgttaaatacgttttaatatctgatagggccagtttctgcgcattgcacatttttttttcccctttcaggaacgtgttcaggcccgcggcagggggcgggatcgcgcctcctcctcggctctggttccagccgagcctctcggacgcagagatggaaatcccgaagctgctcccggctcgcgggacactacagggcggcggcggcggcggtatccccgcgggtggcggccgagtccaccgaggccctgactcgccggctggccaggtccccacgcgccgcctcctgctgctccggggcccccaagatggcgggcccgggcggcggcgcgaggaggccagcacggcatcacggggccctggcccaagcctgttggcgccgaggaccgatcaacctagcggcggcggcggcggcggcggcgacgacttcttcctggtgctgcttgacccggtgggtggcgacgtggagaccgcgggctccggtcaggccgcagggcctgtgttgagggaggaggccgaggagggcccggggctccaggggggcgagagcggcgcgaatcccgcggggcccactgcgctaggcccccgctgcctgtccgcggttcccactccggccccgatctccgcccccggccccgccgcggccttcgcgggcacagtcactatccacaaccaggacctgctgttgcgctttgagaacggcgtcctcaccctggccacgcccccaccacacgcctgggagccaggggccgctcctgcccagcagcccgggtgtctgatcgccccgcaagctgggttcccgcatgccgcgcacccgggtgactgcccagagctgccgccagacctcctgctagctgagccggccgaacccgcgccagctccggcgcctgaggaggaggcggagggcccggccgccgccctgggcccccgcggaccgctgggctccggcccaggcgtggtgctgtacttgtgccccgaggcgcagtgcgggcaaaccttcgccaagaagcaccagctgaaggtgcacctgctgacgcacagcagcagccagggccagaggcccttcaaatgccccctgggtggctgcggctggaccttcaccacctcttacaagctcaagaggcacctgcagtcgcacgacaaactgcggccctttggctgcccggcagagggctgtggcaagagcttcaccacagtgtacaacctcaaggcgcacatgaagggccatgagcaggagaactcattcaaatgcgaggtgtgcgaggagagcttccccacgcaggccaaactcagcgcccaccagcgcagccacttcgaaccggagaggccttaccagtgcgcgttttctggctgcaagaagacatttatcacagtgagtgctctgttttcccataaccgcgcccatttcagggaacaggaactgttttcctgctcttttcctggctgcagcaaacaatatgacaaggcttgtaggctgaaaattcacctgcggagtcacaccggcgagagacctttcctttgtgactttgatggctgtggctggaacttcactagcatgtccaaactcttaaggcacaaaagaaagcacgacgatgaccggaggttcatgtgccctgtggaaggctgtgggaaatctttcacgagggcggaacatctgaaaggccacagcataacccacctgggcacaaagcctttcgtgtgtcctgtggcaggctgctgtgccaggttctctgctcgcagtagcctctacattcactccaagaaacacctgcaggatgtggacacttggaaaagccgttgcccgatctcctcttgtaataaactcttcacatccaagcacagcatgaagacgcacatggttaaaaggcataaggtgggccaggatctcttagctcagctagaagcagcaaattctctcacacccagcagtgaacttaccagccagagacagaatgatctcagtgatgcagagatagtgtctctcttctctgatgtacctgacagtacttctgctgcattgctggacacagcattggtgaactctggaatcttgactattgatgtggcttctgtgagctcgactctggcagggcacctccctgctaataataataattccgtagggcaggctgtggaccctccgtccttgatggccaccagcgaccctcctcaaagtctggatacctctctcttttttggaacggcggccactggttttcagcagagctccttaaatatggatgaggtctcaagtgtaagtgtggggccattgggatctctggactctttggccatgaaaaactccagtccagagcctcaggctttgacacccagcagtaagctaacagtggacacagatgctctgactccttcgagcaccctttgtgaaaacagtgtctcagaactactgacaccaaccaaagcggagtggaacgtacatcctgactctgacttctttggacaggagggagaaacccagtttggattccccaatgcagcaggaaaccatggttctcagaaagaaacagatcttatcactgtgactggcagctcatttttggtatgaaccaactctattcattcctcatcatgtggcttacttttattacagtcaattttgaggatattctggactaaatatttaagtgcagtcatttctttttggtttgcaaaaagagcacagccctggactacaagtttggagatttaaatctgatcttgagtttgggactgacaagtggtgtgacctgagcaagtcagttaactatctgagcttaattccctaattataattggggggt

SEQ ID NO: 693 - DNA, 1636 bp, Homo sapiens
  CDS (146)..(613)
  misc_feature (1)...(1636): n = a,t,c or g
attganccttgtagcgagacccaagctggctagcgtttaaacttaagcttggtaccgagctcggatccactagtccagtgtggtggaattccggctgcgtgagaggcgcgcggcggcgcagtgaacagtctccttccacaaaaccatggcgtcgctcaaatgtagcaccgtcgtctgcgtgatctgcttggagaagcccaaataccgctgtccagcctgccgcgtgccctactgctcggtagtctgcttccggaagcacaaagaacagtgcaaccctgaaactcgtcctgttgagaaaaaaataagatcagctcttcctaccaaaaccgtaaagcctgtggaaaacaaagatgatgatgactctatagctgattttctcaatagtgatgaggaagaagacagagtttctttgcagaatttaaagaatttaggggaatctgcaacattaagaagcttattgctcaatccacacctcaggcagttgatggtcaacctcgatcagggagaagacaaagcaaagctcatgagagcttacatgcaagagcctttgtttgtggagtttgcagactgctgtttaggaattgtggagccatcccagaatgaggagtcttaagatggattattgtgctgcttgctcaagcgtgtgcttgactcctggaacctgcctgctccctctcccagaccagctagtttggggctggggagctcaggcaaaagaggtttccaggatgcagattaggtcatgcaggcctttaccggcattgatgtggctcatgtttcaggcagacttggggtccttaaggtggcaagtcctttatggagagaaaacttgacattcagatgattgtttttaaatgttttacttttggtacagttgatagacatcataaacgatatcaagcttacacttcatatggagttaaacttggtcagtgttaataaaatcaaaacgtgattctactgtacattgcattattcataatttaattgtttgaaattacattaaataaatcaactaattaaatactaaagttttgttcctttttaaaggaaataaccacaagatttttcccagcccaaattccagcgccaattttaggccaactttggctgttttcttccaaaagtgcttatgtggaattgggatccccagtgtagtgacagacagtcatgactgctgctgagtttgatctgtgaaggtagtgaaatgtggccctgatgtttcttaaccctgatttggtaactaccagccctgacaccatcagtgcttgatgtagcctggaaccccaggcccactgacgcactgggcacggggctctgggtcgaaggctggagccgtcactgttgttcatgtgcatttggagcactgtgggaatagtctggcagctgtgtgctgattaaatgtctttggcaaggcagggggcaggaaaaggccttgtggaaacaaaggcaccaaggatcaccccagcccagtgaaggcagaagaggtcacgtggatcagcctgtgtctttccagcagaatctgattaaagcctgtaatgctgtagggtgaaggttcagggcagatgtcagcgcacgcgtgggcggacgcgtgggtcgacccgggaattccggaccggtaccgcacgcgatcgat

SEQ ID NO: 694 - DNA, 2874 bp, Homo sapiens
  CDS (1)..(2874)
atgcctggccgccgcccccggcccctctctgcagagctaggaggcagcacccaggccatgagggacaaatgtggagcaagggatggagctggaacttgctattatgggacgttaaagctggcaggacctgagagccttagatggcttgccttagatggcgaaagggatgttgcagatacaatgaagaattttgagatgcggattctcctggattacccaggtgggcccagcacaatcactggatcagagagagtagaagatgcctctttgctggctttgaagatggaggaaggggctatgagtgaaggaggagggaagaatagccactgtctactgacctctaccgtgaggcccagagcaacagcttacggagccagtggcccagaccctggcccagcccgtgtggcctccagacgtctgggggccgcagttgggcttctgagtgcagacacgctgtggcctctcaatggccttgccagggcaatagatgaggaaattgaggctctgagagatgactctggggacgacgacgaggctaccaccccagccgacaagagcgagctgcaccacaccctgaagaatctttccctgaagttagatgacctcagcacgtgcaatgacctcatcgccaagcacggcgctgcactccagcgctccctgacagagctggacggcctcaagatcccatctgagagtggggagaagctgaaggtggtgaatgagcgggccaccctcttccgcatcacatccaatgctatgatcaacggcgctgcagccatcctcacctcatatcaggaatggcttcagccccaggggtttgagggaacaaggtgctcagaggtggtttctggattgggaatctggaacagcaacgctgtgtttcaaccccccacgcctttaccagtgctgtaccttctagaacaccccttcctcacccttcagcacagccaggatggggcctggagaaggccggcagcagcagaggagaccctgggagtcagggatggacaccaggtgaggactggtgtgcccatcttcctcctttggggtgggacagcctgtgatgtgcatggagctcagtgggtgctccaggcctgcagggacttcttggaactagcagagatacacagtcggaaatggcagcgggcactgcagtatgagcaggagcagcgcgtgcacttggaggaaaccattgagcagctggcgaagcagcacaacagcctcgagcgggccttccacagtgcccctggccggccggccaacccctccaagagcttcattgagggaagcctcttgactcccaaaggagaggacagtgaggaagatgaagataccgagtactttgatgccatggaagactccacatccttcatcaccgtgatcaccgaggccaaggaagacagcagaaaagctgaaggtagcaccgggacaagttccgtggactggagctcagcagacaatgtactagatggtgcctcgctcgtgcccaagggttcatccaaagtcaagaggcgagtccgcattcccaacaagcccaactacagccttaacctctggagcatcatgaagaactgcatcggccgggagctctccaggatccccatgccggtgaacttcaatgagcccctgtccatgctccagcggctgacagaggacctggagtaccaccacctgctggacaaggcagtgcactgcaccagctcagtggagcagatgtgcctggtggccgccttctctgtgtcctcctactccaccacagtgcaccgcatcgccaagcccttcaaccccatgctgggggagaccttcgagctggaccgcctcgacgacatgggcctgcgctccctctgtgagcaggtgagccaccaccccccctcagctgcgcactacgtgttctccaagcatggctggagcctctggcaggagatcaccatctccagcaagttccggggaaaatacatctccatcatgccgctaggtgccatccacttagaattccaggccagtgggaatcactacgtgtggaggaagagcacctcaactgttcacaacatcatcgtgggcaagctctggatcgaccagtcaggggacatcgagattgtgaaccataagaccaatgaccggtgccagctgaagttcctgccctacagctacttctccaaagaggcagcccggaaggtgacaggagtggtgagtgacagccagggcaaggcccattacgtgctgtccggctcgtgggatgaacaaatggagtgctccaaggtcatgcatagcagtcccagcagccccagctctgacgggaagcagaagacagtgtaccagaccctgtcagccaagctgctgtggaagaagtacccgctgccggagaacgcggagaacatgtactacttctcagagctggccctgaccctcaacgagcacgaggagggcgtagcgccaaccgacagccgcctgcggcccgaccagcggctgatggagaagggccgttgggacgaggccaataccgagaagcagcggctggaggagaagcagcgcctgtcgcggcgccggcggctggaggcctgcgggccgggcagcagctgcagctcggaggaagaaggtgtaaaggcatttgacaaaattcagccagtttccagggggcacagcccacgtttcattctgtgtgactgctgccccctggcgcccaactcaggcaggactggcaactaccggaagctcgcgaggcttccaaagcgcatgcgcaggtcacggtacgggcacgtgcggcgcgccagcaaaaccacgcaggcgtcttgtcgcttccgcctcgagcgtgtggcgggattgcggaagccctccacagttcataaccgttggctggttatgaaccgttcataa

SEQ ID NO: 695 - DNA, 9530 bp, Homo sapiens
  CDS (169)..(6738)
gaataccacattgtgaagaagtctacccgctccttaagcacgactcaggtggaatctccttggaggctcattcggccatccgtcatctcgatcattgggttgtacaaagaaaaaggcaagggccttggctttagtattgctggaggtcgagactgcattcgtggacagatggggatttttgtcaagaccatcttcccaaatggatcagctgcagaggacggaagacttaaagaaggggatgaaatcctagatgtaaatggaataccaataaagggcttgacatttcaagaagccattcatacctttaagcaaatccggagtggattatttgttttaacggtacgcacaaagttggtgagccccagcctcacaccctgctcgacacccacacacatgagcagatccgcctccccgaacttcaataccagtgggggagcctcggcgggaggttccgatgaaggcagttcttcatccctgggtcggaagacccctgggcccaaggacaggatcgtcatggaagtaacactcaacaaagagccaagagttggattaggcattggtgcctgctgcttggctctggaaaacagtcctcctggcatctacattcacagccttgctccaggatcagtggccaagatggagagcaacctgagccgcggggatcaaatcctggaagtgaactccgtcaacgtccgccatgctgctttaagcaaagtccacgccatcttgagtaaatgccctccaggacccgttcgccttgtcatcggccggcaccctaatccaaaggactcccttatttctgaatctgaactctcccagtactttgcccacgatgtccctggccccttgtcagacttcatggtggccggttctgaggacgaggatcacccgggaagtggctgcagcacgtcggaggagggcagcctgcctcccagcacctccactcacaaggagcctggaaaacccagagccaacagcctcgtgactcttgggagccatcgggcttctgggctcttccacaagcaggtgacagttgccagacaagccagtctccccggaagcccacaggccctccgaaaccctctcctccgccagaggaaggtaggctgctacgatgccaacgatgccagtgatgaggaagagtttgacagagaaggggactgcatttcactcccaggggccctcccgggtcccatcaggcctctgtcagaggatgacccgaggcgtgtctcaatttcctcttccaagggcatggacgtccacaaccaagaggaacgaccccggaaaacactggtgagcaaggccatctcggcacctcttcttggtagctcagtggacttagaggagagtatcccagagggcatggtggatgctgcgtcctatgcagccaacctcacggactctgcagaggcccccaaggggagccctggaagctggtggaagaaggaactgtcaggatcaagtagcgcacccaaattggaatacacagtccgtacagacacccagagtccgacgaacactgggagccccagttccccccagcagaaaagtgaaggcctgggctccaggcacagaccagtggccagggtaagcccccactgcaagagatccgaggctgaggccaagcccagtggctcacagacagtgaacctgactggcagagccaatgatccatgcgatctggactcgagagtccaggccacttctgtcaaagtgactgtcgctggctttcagccaggtggagctgtggagaaggaatctctgggaaagctgaccactggagatgcttgtgtctctaccagctgtgaactagccagtgctctgtcccatctggatgccagccacctcacagagaacctgcccaaagctgcatcagagctggggcaacaacccatgactgaactggacagctcctcggacctcatctcttccccagggaagaagggggccgctcatcctgaccccagcaagacctctgtagacacagggaaagtcagtcggccagagaatcccagccagcctgcatcgcccagggtcgccaagtgcaaggccaggtctccagtcaggctcccccatgagggcagcccctccccaggggagaaagcagcggctccccctgactacagcaagactcgatcagcatcggaaaccagcacaccccacaataccaggagggtggctgccctcaggggagcgggacctggagcagagggaatgacaccagctggtgctgtcctgccaggagaccccctcacatcccaggagcagagacagggagctccaggtaaccacagtaaggctctggaaatgacaggaatccatgcacctgaaagctcccaggagccttccctgctggagggagcagattctgtgtcctcaagggcaccgcaggccagcctctccatgctgccatccactgacaacaccaaagaagcatgtggccatgtctcggggcactgctgcccgggggggagtagagagagccctgtgacggacattgacagcttcatcaaggagctggatgcttctgcagcaaggtctccgtcttcccagacgggggacagtggctctcaggagggcagtgctcagggccacccaccagccggggctggaggtgggagctcctgccgtgccgaaccagtcccggggggccagacctcctccccgaggagggcctgggctgctggtgcccccgcctacccacaatgggcctcccagccttcggttttagattcaattaatcccgacaaacattttactgtgaacaaaaactttctgagcaactactctagaaattttagcagttttcatgaagacagcacctccctatcaggcctgggtgacagcacggagccgtctctgtcatccatgtatggcgatgctgaggattcttcttctgaccctgagtcactcactgaagccccacgagcttctgccagggacggctggtcccctcctcgttcccgtgtgtctttgcacaaggaagatccttcggagtcagaagaggaacagattgagatttgttccacacgtggctgccccaatccaccctcgagtcctgctcatcttcccacccaggctgccatctgtcctgcctcagccaaagttctgtcattaaaatacagcactccgagagagtcggtggccagtccccgtgagaaggccgcctgcttgccaggctcatacacttcaggcccagactcttcccagccatcatcactcttggagatgagctctcaggagcatgaaactcatgcggacataagcacttcacagaaccacaggccctcgtgtgcagaagaaaccacagaagtcaccagcgctagctcagccatggaaaacagtccgctgtctaaagtagccaggcattttcacagtccgcccatcattctcagctcccccaacatggtaaatggcttggaacatgacctgctagatgacgaaaccctgaatcaatacgaaacaagcattaatgcagctgccagtctgtcctccttcagtgtggatgtccctaagaatggagaatctgttttggaaaacctccacatctctgaaagtcaagacctggatgacttgctacagaaaccaaaaatgatcgctaggaggcccatcatggcctggtttaaagaaataaataaacataaccaaggcacacatttgaggagcaaaaccgagaaggaacaacctctaatgcctgccagaagtcccgactccaagattcagatggtgagttcaagccaaaaaaagggcgttactgtgcctcatagccctcctcagccgaaaacaaacctggaaaataaggacctgtctaagaagagtccggcagaaatgcttctgactaatggtcagaaggcaaagtgtggtccgaagctgaagaggctcagcctcaagggcaaggccaaagtcaactctgaggcccctgctgcgaatgctgtgaaggctggggggacggaccacaggaaacccttgatctcaccccagacctcccacaaaacactttctaaggcagtgtcacagcggctccatgtagccgaccacgaggaccctgacagaaacaccacagctgcccccaggtccccccagtgtgtgctggaaagcaagccacctcttgccacctctgggccactgaaaccctcagtgtctgacacgagcatcaggacatttgtctcgcccctgacctctcccaagcctgttcctgagcaaggcatgtggagcaggttccacatggctgtcctctctgaacccgacagaggttgcccaaccacccctaaatctcctaagtgtagagcagagggcagggcgccccgtgctgactccgggccggtgagtccggcagcgtctaggaacggcatgtccgtggcagggaacagacagagtgagccgcgcctggccagccatgtggcagcagacacagcccaacccaggccgactggcgaaaaaggaggcaacataatggccagcgatcgcctcgaaagaacaaaccagctgaaaatcgtggagatttctgctgaagcagtgtcagagactgtatgtggtaacaagccagctgaaagcgacagacggggagggtgcttggcccagggcaactgtcaggagaagagtgaaatcaggctctatcgccaggtcgcagaatcatccacaagtcatccatcctcactcccatctcatgcctcccaggcagagcaggaaatgtcacgatcattcagcatgacaaaactggcgtcctcctcctcctcccttcaaacagccattagaaaggcagaatactcccagggaaaatcaagcctgatgtcagactcccgaggggtgcccagaaacagcattccagggggcccctcgggggaggaccatctctacttcaccccaaggccagcgaccaggacctactccatgccagcccagttctcaagccattttggacgggagggtcaccccccacacagcctgggtcgctctcgggacagccaggtccctgtgacaagcagtgttgtccccgaggcaaaggcatccagaggtggtcttcccagcctggctaatggacagggcatatatagtgtaaagccgctgctggacacatcgaggaatcttccagccacagatgaaggggatatcatttcagtccaggagacgagctgcctagtcacagacaaaatcaaagtcaccagacgacactactgctatgagcagaactggccccatgaatctacctcatttttctctgtgaagcagcggatcaagtcttttgagaacctggccaatgctgaccggcctgtagccaagtccggggcttccccatttttgtcggtgagctccaagcctcccattgggaggcggtcttccggcagcattgtttccgggagcctgggccacccaggtgacgcagcagcaaggttgttgagacgcagcttgagttcctgcagcgaaaaccaaagcgaagccggcaccctcctgccccagatggccaagtctccctcaatcatgacactgaccatctctcggcagaacccaccagagaccagtagcaagggctctgattcggaactaaagaaatcacttggtcctttgggaattcccaccccaacgatgaccctggcttctcctgttaagaggaacaagtcctcggtacgccacacgcagccctcgcccgtgtcccgctccaagctccaggagctgagagccttgagcatgcctgaccttgacaagctctgcagcgaggattactcagcagggccgagcgccgtgctcttcaaaactgagctggagatcacccccaggaggtcacctggccctcctgctggaggcgtttcgtgtcccgagaagggcgggaacagggcctgtccaggaggaagtggccctaaaaccagtgctgctgagacacccagttcagccagtgatacgggtgaagctgcccaggatctgccttttagaagaagctggtcagttaatttggatcaacttctagtctcagcgggggaccagcaaagattacagtctgttttatcgtcagtgggatcgaaatctaccatcctaactctcattcaggaagcgaaagcacaatcagagaatgaagaagatgtttgcttcatagtcttgaatagaaaagaaggctcaggtctgggattcagtgtggcaggagggacagatgtggagccaaaatcaatcacggtccacagggtgttttctcagggggcggcttctcaggaagggactatgaaccgaggggatttccttctgtcagtcaacggcgcctcactggctggcttagcccacgggaatgtcctgaaggttctgcaccaggcacagctgcacaaagatgccctcgtggtcatcaagaaagggatggatcagcccaggccctctgcccggcaggagcctcccacagccaatgggaagggtttgctgtccagaaagaccatccccctggagcctggcattgggagaagtgtggctgtacacgatgctctgtgtgttgaagtgctgaagacctcggctgggctgggactgagtctggatgggggaaaatcatcggtgacgggagatgggcccttggtcattaaaagagtgtacaaaggtggtgtggctgaacaagctggaataatagaagctggagatgaaattcttgctattaatgggaaacctctggttgggctcatgcactttgatgcctggaatattatgaagtctgtcccagaaggacctgtgcagttattaattagaaagcataggaattcttcatgaattttaacaagaatcattttctcagttctcttctttctttagcaaatcagagtgacttctttaaaccacaggttgttgaaatggccaacactggtacagacacggactataaaaatctccaagcttgtgcttacacatgaagcctgacttaactgtatgtgcaacagcaatgaaattaactccagaagccttccacctgcgtcacccaggccgggagggttccttcgttccagtgcctgtcccctacctttatgttatgtttactgatggggatacaagatgtgacacacccttctttatttgaaacaaacaaacatttagctagacctttgcttccttcttgccagctctcccaacatacccaatcctggtgatcagggaactaaaagtctgagggggacacaaatgtcacacctaagaggacaatcaatcattttgtatgattttgtaagtaagtaaatgacagaatgcttttaggcacattcaatggaaggaggagatgtaggtctgtatatgttaccctgaaaagagaataagacttacttaaaaaaatgaattatgacctgttaggctgagctcaggaattgtccaaaaaggaaaaagcaaaataattaattgagagtattttttagtgagtgtaatgtataatgtacgtatgcaaagttcaactcaataggttattgatcaccatgaagtattgatcattttctatctcaaaagtgtaagccataaggctgttttacagaatagcacttctgataagctgtattaaatagccatgagcttcactgcttagagggagcagaaaggtcaacatctaaaagcaccttacaactagtttttgaacctgtcttgataagtgcttgaattcaagactggtcagtacaagagcagacaaaaatatcacaagtcagtcactgggtttccatttctgaattttatgcactccaaccatgaatttaaactaaatttttagaaatcaagtatctttctaagtgtccttggatttatagacaatgtatgtacaatccaaatagaggagcttaatggaatccttttaggagactggttggtttttttccctctttcccaacatgtttaagaaatgtaacattctaagtattggatctcttttcttgacctagtataatgacaactgcagtgacttaagtttttgctgttttcgttttcccgctttgcaatttcctccttttgccaaaaatgttttcctacagaagactgtcgtgactcacgctacttgggaaactcactctggccactcctcctctggtggcatgagctgcttcccagtagctattccgattggatattccgttcgtcgtcacatagctggcttttctctcctcatgatgtaccttattttcttaggtaaataattccaaactctcatcgggtcataaagaggaggagaaacagggtgagtcaaggtaaaggagcagaaatgtagttacaagccaggtcgtcttcagtggcacaaaccaacccgttgagccctgacaacatgagtggagagtgcatttgccatacctgtgtgcatgacactaagattttatgttggagatacttctttaaataacctacagcttgggtctatggctgtgacccccagattcatggaggggctttagccatcagctttgtacatcatcatttttctgaatgaccaatcccactaaacatctttgaagtcggcctagagaggtccttcagatgagagagaaatagctggcttgtctgagtccagatttctcatcaactggcaatacaaaggaaaatatggtacaggagttagttagaaaggtcttattgattttacttctacttttcactacagttacaggtagaatactgtaggaagtcagtgcaaggtgcatgcttgattgatagatattgattgtttttcagtctctggggtcagttttgtggtttctgctttcttgcctaaatcaaagactatttcaagtcaacaacactgaaaactgcttttcgcctccactcttacagctgtgcctaataataattaattaataaacgcacagccctatgtgaacagacaggaatttcttgtgcaatgtggagcaaatggaatggtctccttccgcaagtctttttaatcctcatatctggagtacaagggtagacctctggcttaccacatacactatgctaaagtcatcagccactgctactacatcttgccagaaggtttccctcgccaacaaacagttgaaatttaagggaagaagcaaaagctaaactgtctttgaccctaagatagatagaaagctatttatttgtcttcagtgttcaaggcatgactagtatttctaattagcctaataaattcccacactttctgaagtgaacactaatggtattgtcctactaaaactgtcattgtttctttttttttaactggtcagtcattcacaataagctatgagggtaaataaatatgtgttataacaagtaaaccgtagttgcaagaatataccatgaagattaaagtaggctgggtttcatttccatcttcccacacatctcattgaatttgatggttgacttaattggcaccataactttgtatgatattatacattaacctttatttatgtaaagtaaaatgccttatatattaaagagtaagtgcaataatatgaaatagcctgtacattttaaaaatgttgtcaccaagttatataaatccacatctctgtaaacaaccttttttaagtaattttaaaaaaaataaacactctgcttactacttg

SEQ ID NO: 696 - DNA, 2291 bp, Homo sapiens
  CDS (361)..(1566)
cgttagcccagtcaagcccagccaagcccagccaagccccgccgatcgcgggcaccggagccagccccgcagcgggagcctaacccagaggaagtggagactcctttactgcacatctgtctgctccaggccaggcactgttctaggagccaggatacagaggtggagacagaaacaaacaaaccgataactgtatacaatactctaacgtcagagggaccacagagcaccagcctgcatggaacttccttcctcactcagcttcccacgttgccagctgggacaggggagatggagtaattttgctgtggaaagacttcacgtcttgccgaatgaaagtcccgcctgtctgtcacgctgatgcccgtgcagctgtctgagcacccggaatggaatgagtctatgcactccctccggatcagtgtggggggccttcctgtgctggcgtccatgaccaaggccgcggacccccgcttccgcccccgctggaaggtgatcctgacgttctttgtgggtgccgccatcctctggctgctctgctcccaccgcccggcccccggcaggccccccacccacaatgcacacaactggaggctcggccaggcgcccgccaactggtacaatgacacctaccccctgtctcccccacaaaggacaccggctgggattcggtatcgaatcgcagttatcgcagacctggacacagagtcaagggcccaagaggaaaacacctggttcagttacctgaaaaagggctacctgaccctgtcagacagtggggacaaggtggccgtggaatgggacaaagaccatggggtcctggagtcccacctggcggagaaggggagaggcatggagctatccgacctgattgttttcaatgggaaactctactccgtggatgaccggacgggggtcgtctaccagatcgaaggcagcaaagccgtgccctgggtgattctgtccgacggcgacggcaccgtggagaaaggcttcaaggccgaatggctggcagtgaaggacgagcgtctgtacgtgggcggcctgggcaaggagtggacgaccactacgggtgatgtggtgaacgagaacccggagtgggtgaaggtggtgggctacaagggcagcgtggaccacgagaactgggtgtccaactacaacgccctgcgggctgctgccggcatccagccgccaggctacctcatccatgagtctgcctgctggagtgacacgctgcagcgctggttcttcctgccgcgccgcgccagccaggagcgctacagcgagaaggacgacgagcgcaagggcgccaacctgctgctgagcgcctcccctgacttcggcgacatcgctgtgagccacgtcggggcggtggtccccactcacggcttctcgtccttcaagttcatccccaacaccgacgaccagatcattgtggccctcaaatccgaggaggacagcggcagagtcgcctcctacatcatggccttcacgctggacgggcgcttcctgttgccggagaccaagatcggaagcgtgaaatacgaaggcatcgagttcatttaactcaaaacggaaacactgagcaaggccatcaggactcagcttttataaaaacaagaggagtgcacttttgttttgttttgttctttttggaactgtgcctgggttggaggtctggacagggagcccagtcccgggccccatagtggtgcgggcactggacccccgggccccacggaggccgcggtctgaactgctttccatgctgccatctggtggtgatttcggtcacttcaggcattgactcaaggcctgcctaactggctgggtcgtttcttccatccgacctcgtttcttttctttcctatgttcttttgttcagtgaatatccctagagctcctaccatatgtcaggccctatgcctcaccctgagaacgcagtacgcatgaggtggacctgtttgctgggaaccccaggtcacccccttttcttcctactctgtgcctggagcatcatgtccacccctgcagatccttggaaaagaaaatgtttatgttgcagggtattgcatggtcacgagtgagggcaggcccctggggacacatctgcccacagctgcacaggccagggcacaggcacatctgttggttctcaggcctcagataaaaccatctccgcatcatatggccagtgaccgctttctcccttcaagaaaattctgtggctgtgcagtactttgaagtttattattacctgctttaataaagcagtttccttcctataaagg

SEQ ID NO: 697 - DNA, 2232 bp, Homo sapiens
  CDS (262)..(1260)
gttaaacctccaactgtgattggtcaattccacacccttttctttggatcgatccgaatattcttcctcggggtgctaggctttgcagtttatgggaatgaggccttgcacttcatttgcgatccagacaaaagagaagtaaacctcttctgttacaatcagttcaggccaatcactccacaactctgccctccccttacttgccaaggttctagcccagtcctagagggtgatgtcagatccttcagaaactggtctgagatgaatggagaagaagaatacggaagcggaagtgccggtggagcgcgagtaggaagtggtgagttcggagtagagatggccgcgcttgcaccgctgcccccgctccccgcacagttcaagagcatacagcatcatctgaggacggctcaggagcatgacaagcgagaccctgtggtggcttattactgtcgtttatacgcaatgcagactggaatgaagatcgatagtaaaactcctgaatgtcgcaaatttttatcaaagttaatggatcagttagaagctctaaagaagcagttgggtgataatgaagctattactcaagaaatagtgggctgtgcccatttggagaattatgctttgaaaatgtttttgtatgcagacaatgaagatcgtgctggacgatttcacaaaaacatgatcaagtccttctatactgcaagtcttttgatagatgtcataacagtatttggagaactcactgatgaaaatgtgaaacacaggaagtatgccagatggaaggcaacatacatccataattgtttaaagaatggggagactcctcaagcaggccctgttggaattgaagaagataatgatattgaagaaaatgaagatgctggagcagcctctctgcccactcagccaactcagccatcatcatcttcaacttatgacccaagcaacatgccatcaggcaactatactggaatacagattcctccgggtgcacacgctccagctaatacaccagcagaagtgcctcacagcacaggtgtagcaagtaatactatccaacctactccacagactatacctgccattgatcccgcacttttcaatacaatttcccagggggatgttcgtctaaccccagaagactttgctagagctcagaagtactgcaaatatgctggcagtgctttgcagtatgaagatgtaagcactgctgtccagaatctacaaaaggctctcaagttactgacgacaggcagagaatgaagcctttgtatgacagacccatgtatttttggcatgaggaactaacagtccattactctatcttcagcctatcaggatcacagttttaaggaagacttggttttgttgaatatgacaatgaaatctgtgtgtatcagatttttattgaagcattcatcagcagcctcaaccagttttcattgtccatttactagattcaatcgtctctgagtatatagggctgatgttagcaagaccctaaaaatgtccattgaaccctgcttcaaaaaatgaaaacacacctctataaaatgtgtactgggaataagctttgtatttacatacattaggggaatttttttaaaatctgtaatgtttggacaaacagatgatattactttgctataaaattataaatgtaacttttaataaagatagccagaatattctaaattagaaattacgtttttgtttccctcaagacataaaacaaatataaacattctaaactgctggatgaatctgaaaagacattaagttcaaattttaatttattctcatattaaatataactccattaaaagtttaaaatttcatgggagaaaatataataaggtaaagaggtagaatcactttcagacttaagaataatgttgatttcccaagtgctttaccttatctgttaaagcgtaagatgaattggtatttgcttcataggcagtttgactgcatgtattagagaatgaaaagaagatatttgtagtaatgcctggaaacttggtgctttaaattaaggtactcctctgctgctgtagaatggattccacacagtggatagctatgggtgattcagaatattatgtttagattcccatttgttaagtttataagttttgtggggaattatgaacttactgtgtactacctgcatttgtgctgtgtgaaaaataaatacaaggattcgtttagctaattcaacttaaaaaaaaaaaa

SEQ ID NO: 698 - DNA, 1381 bp, Homo sapiens
  CDS (23)..(964)
cgtgtcgacgatttcgtgaaagatggcggcgactctgggaccccttgggtcgtggcagcagtggcggcgatgtttgtcggctcgggatgggtccaggaggttactccttcttcttttgttggggtctgggcaggggccacagcaagtcggggcgggtcaaacgttcgagtacttgaaacgggagcactcgctgtcgaagccctaccagggtgaggcgcccaggccatgtttcctgagagactgggagttgcaggtgcacttcaaaatccatggacaaggaaagaagaatctgcatggggatggcttggcaatctggtacacaaaggatcggatgcagccagggcctgtgtttggaaacatggacaaatttgtggggctgggagtatttgtagacacctaccccaatgaggagaagcagcaagagcgggtattcccctacatctcagccatggtgaacaacggctccctcagctatgatcatgagcgggatgggcggcctacagagctgggaggctgcacagccattgtccgcaatcttcattacgacaccttcctggtgattcgctacgtcaagaggcatttgacgataatgatggatattgatggcaagcatgagtggagggactgcattgaagtgcccggagtccgcctgccccgcggctactacttcggcacctcctccatcactggggatctctcagataatcatgatgtcatttccttgaagttgtttgaactgacagtggagagaaccccagaagaggaaaagctccatcgagatgtgttcttgccctcagtggacaatatgaagctgcctgagatgacagctccactgccgcccctgagtggcctggccctcttcctcatcgtctttttctccctggtgttttctgtatttgccatagtcattggtatcatactctacaacaaatggcaggaacagagccgaaagcgcttctactgagccctcctgctgccaccacttttgtgactgtcacccatgaggtatggaaggagcaggcactggcctgagcatgcagcctggagagtgttcttgtctctagcagctggttggggactatattctgtcactggagttttgaatgcagggaccccgcattcccatggttgtgcatggggacatctaactctggtctgggaagccacccaccccagggcaatgctgctgtgatgtgcctttccctgcagtccttccatgtgggagcagaggtgtgaagagaatttacgtggttgtgatgccaaaatcacagaacagaatttcatagcccaggctgccgtgttgtttgactcagaaggcccttctacttcagttttgaatccacaaagaattaaaaactggtaacaccacaaaaaaaaaaaa

SEQ ID NO: 699 - DNA, 2236 bp, Homo sapiens
  CDS (57)..(1190)
gggtcgacccacgcgtccggcgccgtcctccactactggctactggcgctgcagccatgcagcccccgcccccgggcccgctgggcgactgcctgcgggactgggaggatctacagcaggacttccagaacatccaggagacccatcggctctaccgcctgaagctggaggagctgaccaaacttcagaacaattgcaccagctccatcacgcggcagaagaagcggctccaggagctggccctcgccctgaagaaatgcaaaccctccctcccagcagaggccgagggggccgcacaggagctggagaaccagatgaaagagcgccaaggcctcttctttgacatggaggcctatttgcctaagaagaatggattgtacctgagcctggttctggggaacgtcaacgtcacgctcctgagcaagcaggctaagtttgcctacaaggacgagtatgagaagttcaagctctacctcaccatcatcctcatcctcatctccttcacttgccgcttcctgctcaactccagggtgacagatgctgccttcaacttcctgctggtctggtactactgcaccctgaccatccgggagagcatcctcatcaacaacggctcccggatcaaaggctggtgggtgttccatcactacgtgtccaccttcctgtcgggagtcatgctgacgtggcccgacggtctcatgtaccagaaattccggaaccaattcctctccttttccatgtaccagagcttcgtgcagtttctccagtactactaccagagcggctgcctctaccgcctgcgggcgctgggcgagcggcacaccatggacctcactgtggagggcttccagtcctggatgtggcggggcctcaccttcctgctgccttttcttttctttggacacttctggcagctttttaacgcgctgacgttgttcaacctggcccaggaccctcagtgcaaggagtggcaggtgcttatgtgcggctttcccttcctcctccttttcctcggcaatttcttcaccaccctgagggttgtgcaccagctccatcacgcggcagaagaagcggctccaggagctgggccttcccctgaagaaatgcaaaccctccctcccagcagaggccgagggggccgcacaggagctggagaaccagatgaaagagcgccaaggcctcttctttgacatggaggcctatttgcctaagaagaatggattgtacctgagcctggttctggggaacgtcaacgtcacgctcctgagcaagcaggctaagtttgcctacaaggacgagtatgagaagttcaagctctacctcaccatcatcctcatcctcatctccttcacttgccgcttcctgctcaactccagggtgacagatgctgccttcaacttcctgctggtctggtactactgcaccctgaccatccgggagagcatcctcatcaacaacggctcccggtgggcagggcgggccctgagggaggggagcatggaatggggtgccaggaccctccgggaagcaggaacaggcgctgggggtgatggtggctctctgctccaggatcaaaggctggtgggtgttccatcactacgtgtccaccttcctgtcgggagtcatgctgacgtggcccgacggtctcatgtaccagaaattccggaaccaattcctctccttttccatgtaccagagcttcgtcgagtttctccagtactactaccagagcggctgcctctaccgcctgcggcgctgggcgagcggcacaccatggacctcactgtggagggcttccagtcctggatgtggcggggcctcaccttcctgctgccttttcttttctttggacacttctggcagctttttaacgcgctgacgttgttcaacctggcccaggaccctcagtgcaaggagtggcaggtgcttatgtgcggctttcccttccttctccttttcctcggcaatttcttcaccaccctgtgtgttgtgcaccacaagtttcacagtcagcggcacgggagcaagaaggattgaggctgggccttcccctgccggcccagaggggcttctgtcctgtgtgttgtgggaggggatgggaggcgcccctcgagtgtgcgtgtatcagggggtctcttctattctcccttgggttttatgggcgctgtgggccctgaaggaagacctggcccagtgccctcaataaagagaggcccagaggtggaaaaaaaaaaaa

SEQ ID NO: 700 - DNA, 963 bp, Homo sapiens
  CDS (214)..(798)
ccggccgaattccggtcgaccacgcgccgagactctatataaatcgctgtgggctcaccacctctaaggaggagcactgactgaagacagaaaaattgatgaactgaagaagacatggtccattatgccttacaaacttacacagtgctttgggaattccaaagtactcagtggagagaggtgtttcaggagccgtagagccagatcgtcatcatgtctgcattgtggctgctgctgggcctccttgccctgatggacttgtctgaaagcagcaactggggatgctatggaaacatccaaagcctggacacccctggagcatcttgtgggattggaagacgtcacggcctgaactactgtggagttcgtgcttctgaaaggctggctgaaatagacatgccatacctcctgaaatatcaacccatgatgcaaaccattggccaaaagtactgcatggatcctgccgtgatcgctggtgtcttgtccaggaagtctcccggtgacaaaattctggtcaacatgggcgataggactagcatggtgcaggaccctggctctcaagctcccacatcctggattagtgagtctcaggtttcccagacaactgaagttctgactactagaatcaaagaaatccagaggaggtttccaacctggacccctgaccagtacctgagaggtggactctgtgcctacagtgggggtgctggctatgtccgaagcagccaggacctgagctgtgacttctgcaatgatgtccttgcacgagccaagtacctcaagagacatggcttctaacatctcagatgaaacccaagaccatgatcacatatgcagcctcaaatgttacacagataaaactagccaagggcacctgtaactgggaatctgagtttgacctaaaagtcattaaaataacatgaatcacattaaaggaagaattttgacctgcaaaaaaaaaaa

SEQ ID NO: 701 - DNA, 975 bp, Homo sapiens
  CDS (28)..(714)
ggactaatttgtgccacctactggggaatgaagatcaagccgggtttcatggggaaggccactccaccctatgacgtccagtttcatatggaggcctcagttgaaaactgcattattgtgagcatgaacaccgctgaccctggcagccagggcatcacacacagcctcttgctacaggtcattgatgacaagggcagcatcctgccacctaacacagaaggaaacattggcatcagaatcaaacctgtcaggcctgtgagcctcttcatgtgctatgagggtgacccagagaagacagctaaagtggaatgtggggacttctacaacactggggacagaggaaagatggatgaagagggctacatttgtttcctggggaggagtgatgacatcattaatgcctctgggtatcgcatcgggcctgcagaggttgaaagcgctttggtggagcacccagcggtggcggagtcagccgtggtgggcagcccagacccgattcgaggggaggtggtgaaggcctttattgtcctgaccccacagttcctgtcccatgacaaggatcagctgaccaaggaactgcagcagcatgtcaagtcagtgacagccccatacaagtacccaaggaaggtggagtttgtctcagagctgccaaaaaccatcactggcaagattgaacggaaggaacttcggaaaaaggagactggtcagatgtaatcggcagtgaactcagaacgcactgcacacctgaggcaaatccctggccactttagtctccccactatggtgaggacgagggtggggcattgagagtgttgatttgggaaagtatcaggagtgccatgattccaatgttttccttcttttaaattaaattcagttgctctgcttcctccaagtcctctgtatctttagaatttcccaggtgagcactcataacgcaagtaataaaatactgatatcaacaaaaaaaaaaaa

SEQ ID NO: 702 - DNA, 1075 bp, Homo sapiens
  CDS (224)..(811)
aatagttcgcagggactggcaggaagtgagtgacatccacttggccatggccaactgtaaaatgaccaaaagcatcaggttccctgccctggagcactgctatactggcggggaggtcgtgttgcccaaggatcaggaggagtggaaaagacggacgggccttctgctctacgagaactatgggcagtcggaaacgggactaatttgtgccacctactggggaatgaagatcaagccgggtttcatggggaaggccactccaccctatgacgtccaggtcattgatgacaagggcagcatcctgccacctaacacagaaggaaacattggcatcagaatcaaacctgtcaggcctgtgagcctcttcatgtgctatgagggtgacccagagaagacagctaaagtggaatgtggggacttctacaacactggggacagaggaaagatggatgaagagggctacatttgtttcctggggaggagtgatgacatcattaatgcctctgggtatcgcatcgggcctgcagaggttgaaagcgctttggtggagcacccagcggtggcggagtcagccgtggtgggcagcccagacccgattcgaggggaggtggtgaaggcctttattgtcctgaccccacagttcctgtcccatgacaaggatcagctgaccaaggaactgcagcagcatgtcaagtcagtgacagccccatacaagtacccaaggaaggtggagtttgtctcagagctgccaaaaaccatcactggcaagattgaacggaaggaacttcggaaaaaggagactggtcagatgtaatcggcagtgaactcagaacgcactgcacacctgaggcaaatccctggccactttagtctccccactatggtgaggacgagggtggggcattgagagtgttgatttgggaaagtatcaggagtgccatgattccaatgttttccttcttttaaattaaattcagttgctctgcttcctccaagtcctctgtatctttagaatttcccaggtgagcactcataacgcaagtaataaaatactgatatcaacaaaaaaaaaaaa

SEQ ID NO: 703 - DNA, 2338 bp, Homo sapiens
  CDS (104)..(2212)
ctccccagggccgagtcttccggagtcagcagagagcctggatggatcacaggaggataagcctcggggctcatgtgcggagcccacttttactgatacgggaatggtggctcacataaacaacagccggctcaaggccaagggcgtgggccagcacgacaacgcccagaactttggtaaccagagctttgaggagctgcgagcagcctgtctaagaaagggggagctcttcgaggaccccttattccctgctgaacccagctcactgggcttcaaggacctgggccccaactccaaaaatgtgcagaacatctcctggcagcggcccaaggatatcataaacaaccctctattcatcatggatgggatttctccaacagacatctgccaggggatcctcggggactgctggctgctggctgccatcggctcccttaccacctgccccaaactgctataccgcgtggtgcccagaggacagagcttcaagaaaaactatgctggcatcttccattttcagatttggcagtttggacagtgggtgaacgtggtggtagatgaccggctgcccacaaagaatgacaagctggtgtttgtgcactcaaccgaacgcagtgagttctggagtgccctgctggagaaggcgtatgccaagctgagtgggtcctatgaagcattgtcagggggcagtaccatggagggccttgaggacttcacaggaggcgtggcccagagcttccaactccagaggccccctcagaacctgctcaggctccttaggaaggccgtggagcgatcctccctcatgggttgctccattgaagtcaccagtgatagtgaactggaatccatgactgacaagatgctggtgagagggcacgcttactctgtgactggccttcaggatgtccactacagaggcaaaatggaaacactgattcgggtccggaatccctggggccggattgagtggaatggagcttggagtgacagtgccagggagtgggaagaggtggcctcagacatccagatgcagctgctgcacaagacggaggacggggagttctggatgtcctaccaagatttcctgaacaacttcacgctcctggagatctgcaacctcacgcctgatacactctctggggactacaagagctactggcacaccaccttctacgagggcagctggcgcagaggcagctccgcagggggctgcaggaaccaccctggcacgttctggaccaacccccagtttaagatctctcttcctgagggggatgacccagaggatgacgcagagggcaatgttgtggtctgcacctgcctggtggccctaatgcagaagaactggcggcatgcacggcagcagggagcccagctgcagaccattggctttgtcctctacgcggtcccaaaagagtttcagaacattcaggatgtccacttgaagaaggaattcttcacgaagtatcaggaccacggcttctcagagatcttcaccaactcacgggaggtgagcagccaactccggctgcctccgggggaatatatcattattccctccacctttgagccacacagagatgctgacttcctgcttcgggtcttcaccgagaagcacagcgagtcatgggaattggatgaagtcaactatgctgagcaactccaagaggaaaaggtctctgaggatgacatggaccaggacttcctacatttgtttaagatagtggcaggagagggcaaggagataggggtgtatgagctccagaggctgctcaacaggatggccatcaaattcaaaagcttcaagaccaagggctttggcctggatgcttgccgctgcatgatcaacctcatggataaagatggctctggcaagctggggcttctagagttcaagatcctgtggaaaaaactcaagaaatggatggacatcttcagagagtgtgaccaggaccattcaggcaccttgaactcctatgagatgcgcctggttattgagaaagcaggcatcaagctgaacaacaaggtaatgcaggtcctggtggccaggtatgcagatgatgacctgatcatagactttgacagcttcatcagctgtttcctgaggctaaagaccatgttcacattctttctaaccatggaccccaagaatactggccatatttgcttgagcctggaacagtggctgcagatgaccatgtggggatagaggcgctgtaggagcctggtcatctctaccagcagcagcagcagcgaggttctagcccaggagggtggggtgcttcttgtagccctcagctctccagtctctgctgatgaaatgggatccaggtgg

SEQ ID NO: 704 - DNA, 1541 bp, Homo sapiens
  CDS (81)..(173)
cccctctgtgcactcattacctgcttcctgagctccccgagaagtcatccaggacctccccgagaagccgtccaggaaacatgctctcaggggacccccatctgcctcagcctctttgtcactgcctggaccattgtccctgctgtttctcaggcaccaccaggaccagctgatcattccagcccacagcaatggagccacatgactcctcccacatggactctgagttccgatacactctcttcccgattgtttacagcatcatctttgtgctcggggtcattgctaatggctacgtgctgtgggtctttgcccgcctgtacccttgcaagaaattcaatgagataaagatcttcatggtgaacctcaccatggcggacatgctcttcttgatcaccctgccactttggattgtctactaccaaaaccagggcaactggatactccccaaattcctgtgcaacgtggctggctgccttttcttcatcaacacctactgctctgtggccttcctgggggtcatcacttataaccgcttccaggcagtaactcggcccatcaagactgctcaggccaacacccgcaagcgtggcatctctttgtccttggtcatctgggtggccattgtgggagctgcatcctacttcctcatcctggactccaccaacacagtgcccgacagtgctggctcaggcaacgtcactcgctgctttgagcattacgagaagggcagcgtgccagtcctcatcatccacatcttcatcgtgttcagcttcttcctggtcttcctcatcatcctcttctgcaacctggtcatcatccgtaccttgctcatgcagccggtgcagcagcagcgcaacgctgaagtcaagcgccgggcgctgtggatggtgtgcacggtcttggcggtgttcatcatctgcttcgtgccccaccacgtggtgcagctgccctggacccttgctgagctgggcttccaggacagcaaattccaccaggccattaatgatgcacatcaggtcaccctctgcctccttagcaccaactgtgtcttagaccctgttatctactgtttcctcaccaaaaagttccgcaagcacctcaccgaaaagttctacagcatgcgcagtagccggaattgctcccgggccaccacggatacggtcactgaagtggttgtgccattcaaccagatccctggcaattccctcaaaaattagtccctgcttccatgcctgaagtcttctcctccatgaacatcatggactgagctgggggaagaagggatatctactgtgggtctgggcaccacctctgtgggctctggtgggccattagatttggaggctacctcacctgggcagggatgatggcagagccaggctgttggaaaatccagaactcaaatgagccccttcatccgcctgtgggcgcatactacagtaactgtgactgatgactttatcctgagtcccttaatcttatggggccggaaggaatgtcagggccaggtgcagaccttgggggaagactttaaacca

SEQ ID NO: 705 - DNA, 523 bp, Homo sapiens
  CDS (71)..(445)
gacacgcgttcgaacctatgcaaatgcccactccctgccaacctacgtgaagagcccagctccctgccagatgacctacatcaaaagtccagctccctgccagacccagacgtgctatgtccagggtgcttctccttgccagagctattatgttcaagctcctgcaagtggctcaacctcccagtactgtgtcactgacccatgctctgctccctgttccaccagctactgctgtctggctccccggaccttcggggtgagtcccctgagacgctggattcagcggccccagaactgcaacacaggatcatctggctgctgtgagaattcgggaagctctgggtgctgtggttctgggggctgtggctgcagctgtggatgtggcagctctgggtgctgctgtttgggaattatccccatgaagtcccgaagtcctgcgttgctgtgaccatgaggatgactgctgctgctaaacatacgacagctcaactccagaatgcactgccccgctacccctctggaa

SEQ ID NO: 706 - DNA, 1783 bp, Homo sapiens
  CDS (133)..(1548)
  misc_feature (1)...(1783): n = a,t,c or g
gaggtcanagcactggagccaacaccgccccaggatggggtataaaagggttgggaggagaggaggcttcagtctcagtggctcagccttcccagctgatctgaagctcctgtgcagcctcagccctacaccatgacctccttctacagcacctcctcatgccctctgggttgcaccatggctcctggagcaagaaatgtctttgtctctcctatcgatgttgggtgccagcctgtggcagaggccaatgctgcctccatgtgcctcttggccaacgtggcacacgccaacagagtccgtgtggggtcgactcccctgggccgccccagcctctgtctgcccccaaccagtcacactgcttgtcccttgccagggacctgtcacattcccggcaacatcggaatctgtggggcctacggcaaaaacaccctgaatggccatgagaaggagaccatgaagttcctgaatgaccgcctggccaactacctggagaaggtgcgccagctggagcaggagaatgcagagctggagaccacactcctcgagaggagcaagtgccacgagtccaccgtgtgccccgactaccagtcctacttccgtacaatcgaggagctccagcagaagatcctgtgcagcaaggctgagaatgccaggctgattgtacaaattgacaacgcgaagctggctgctgatgactttaggatcaagctggagagtgagcgctcccttcaccagctggtggaggcggacaagtgcgggacgcagaagctcctggatgacgcgaccctggccaaggccgacctggaggcccagcaggagtccctgaaggaggagcagctctccctcaagagcaaccacgagcaggaagtaaagattctgaggagtcagctgggggagaagttccggatcgagctggacattgagcccaccattgacctgaacagggtgttgggggagatgcgggctcagtacgaggccatggtggagaccaaccaccaggatgtggaacagtggttccaagcccagtctgaaggcatcagcctgcaggccatgtcctgctccgaggagctgcagtgctgccagtcggagatcctggagctgagatgcacggtgaatgccctggaggtggagcgccaagcccagcacaccttgaaggactgtctgcagaactccctgtgtgaagcggaggaccgctacggcacagagctggcccagatgcagagcctcattagcaacttggaagagcagttgtctgagatccgggccgacctggagcggcagaaccaggagtaccaggtgctgctggacgtgaaggcccggttggagaacgagattgccacataccggaaccttactcccctgcaatccctgttccacgcctgcctcctgtacttcttgtccaagctgtggccctgtcaccggtgggtctccctctggccatggagccagcatggggagatgattctgaaggcccgagttaggagattgaggctggttgcactggggtcaggagtgccctcaccttgcccagtcttccttcaagactagactcactgaggcattttccctaaatcaaccggtagcagatacttccaaggagtggctccctgcctatgcctctaagctgtattttttgttgttgctaaaatgttgtaattatcttccatgaaagcaattatttttcctggtgtctcttcttggtacttttagttctattccagtgtttcagaatctccaaaaatgtaactgggttccctgcattaaatggtcaataaacctcctt

SEQ ID NO: 707 - DNA, 422 bp, Homo sapiens
  CDS (47)..(403)
  misc_feature (1)...(422): n = a,t,c or g
tgatctgctgcagtgcctgaaccagctttattcagcttctacagagatgtcctgccagcagagccagcagcagtgccagcctcctcccaaatgtacccctaaatgccctcccaagtgtactcctaagtgtcctcccaagtgtcccccaaaatgccctccccagtattcagccccatgcccacctccagtctcttcctgctgtggttccagctctgggggctgctgcagctctgagggtggtggctgctgcctgagccaccacaggccccgccagtccctccgacgccgacctcagagttccagctgctgtggcagtggcagtggccagcagtctgggggctccagctgctgccacagctctgggggctctggctgctgccacagctctggaggctgctgctgacctgggccatgaggagcan

SEQ ID NO: 708 - DNA, 1304 bp, Homo sapiens
  CDS (181)..(723)
atttggccctcgaggccaagaattcggcacgagggcggcgcggacagcgttcggggctgtgtgccggcgcctctggcagggattggggaatttttctgtaaacacttctaagggcaatacagccaaaaatggtggcttgcttctgtttctctttttttccccacacatagcagtaccaatatgaagtgggtacagttttcaaacctacacgttgatgttccaaaggatttgaccaaacctgtggtaacaatctctgatgaaccagacatattatataagcgcctctcggttttggtgaaaggtcacgataaggctgtattggacagttatgaatattttgctgtgcttgctgctaaagaacttggtatctctattaaagtacatgaacctccaaggaaaatagagcgatttactcttctccaatcagtgcatatttacaagaagcacagagttcagtatgaaatgagaacactttacagatgtttagagttagaacatctaactggaagcacagcagatgtctacttggaatatattcagcgaaacttacctgaaggggttgccatggaagtaacaaagttttgtttctttatttttttagacacaattagaacagttaccagaacacatcaaggagccaatctgggaaacactatcagaagaaaaagaagaaagcaagtcataaagcctcagggaggccatttttgcctaaatttgaaatgagggtgggccagatgagtatgtttaagtggagagtgcttccagctgagatgatttgagtctgtcctaactgctccattgagttctcgtgccctcatcagctgagggcagggaatggaactttaatggaagaaccacttttatctattctttttattcattgtttcagttctgatttcagcaaacatgagcaaaccactttgactgaaagcagaaagagtgaaaattctattttgttacgctactggtgttcaattattagtttgtaccatttttaatttatgtcagttgatgcatctgaaaataagtgcttggagtgttcgtacccttatttttttttaagattcctagaaggaatctttggttaattcagattgagcagttaaagtttttgctatttacctttgtgcaggctggcatatgctaatttgggggtggtaaccaaccgattttatctcatgtaagcattacattttgaagactgaatatacttcacagcagatcaaacacatttatggcatgcactgacctcttcttggagcccagactttatagagttgcctaccaggggttactgtaatgga

SEQ ID NO: 709 - DNA, 414 bp, Homo sapiens
  CDS (53)..(370)
  misc_feature (1)...(414): n = a,t,c or g
ggacgtatctgttgctgcgtctgaacccactgtttatcgaaatcccaccaagatgtcctgccagcagaaccaacagcagtgccagccccctcccaagtgtcctatccccaagtatcccccaaaatgtccctcaaagtgtgcatcctcatgcccacctccaatctcttcctgctgtggctccagctctgggggctgctgtagctctgggggctgtggttgctgcagctctgagggaggtggctgctgcctgagccaccacagacaccataggtcccactgccacagacccaagagctccaattgctatggcagtggcagtggccagcagtctgggggttctggctgctgctctggagggggctgttgctgacctggaccaggagcagcaccaaaggaattagtgggcgaaggacn

SEQ ID NO: 710 - DNA, 2254 bp, Homo sapiens
  CDS (238)..(1278)
aattccgggtcgacctacgcgtccgaagctataggctacccattcagctcccctgtcagagactcaagctttgagaaaggctagcaaagagcaaggaaagagagaaaacaacaaagtggcgaggccctcagagtgaaagcgtaaggttcagtcagcctgctgcagctttgcagacctcagctgggcatctccagactcccctgaaggaagagccttcctcacccaaacccacaaaagatgctgaaaaagcctctctcagctgtgacctggctctgcattttcatcgtggcctttgtcagccacccagcgtggctgcagaagctctctaagcacaagacaccagcacagccacagctcaaagcggccaactgctgtgaggaggtgaaggagctcaaggcccaagttgccaaccttagcagcctgctgagtgaactgaacaagaagcaggagagggactgggtcagcgtggtcatgcaggtgatggagctggagagcaacagcaagcgcatggagtcgcggctcacagatgctgagagcaagtactccgagatgaacaaccaaattgacatcatgcagctgcaggcagcacagacggtcactcagacctccgcagatgccatctacgactgctcttccctctaccagaagaactaccgcatctctggagtgtataagcttcctcctgatgacttcctgggcagccctgaactggaggtgttctgtgacatggagacttcaggcggaggctggaccatcatccagagacgaaaaagtggccttgtctccttctaccgggactggaagcagtacaagcagggctttggcagcatccgtggggacttctggctggggaacgaacacatccaccggctctccagacagccaacccggctgcgtgtagagatggaggactgggagggcaacctgcgctacgctgagtatagccactttgttttgggcaatgaactcaacagctatcgcctcttcctggggaactacactggcaatgtggggaacgacgccctccagtatcataacaacacagccttcagcaccaaggacaaggacaatgacaactgcttggacaagtgtgcacagctccgcaaaggtggctactggtacaactgctgcacagactccaacctcaatggagtgtactaccgcctgggtgagcacaataagcacctggatggcatcacctggtatggctggcatggatctacctactccctcaaacgggtggagatgaaaatccgcccagaagacttcaagccttaaaaggaggctgccgtggagcacggatacagaaactgagacacgtggagactggatgagggcagatgaggacaggaagagagtgttagaaagggtaggactgagaaacagcctataatctccaaagaaagaataagtctccaaggagcacaaaaaaatcatatgtaccaaggatgttacagtaaacaggatgaactatttaaacccactgggtcctgccacatccttctcaaggtggtagactgagtggggtctctctgcccaagatccctgacatagcagtagcttgtcttttccacatgatttgtctgtgaaagaaaataattttgagatcgttttatctattttctctacggcttaggctatgtgagggcaaaacacaaatccctttgctaaaaagaaccatattattttgattctcaaaggataggcctttgagtgttagagaaaggagtgaaggaggcaggtgggaaatggtatttctatttttaaatccagtgaaattatcttgagtctacacattatttttaaaacacaaaaattgttcggctggaactgacccaggctggacttgcggggaggaaactccagggcactgcatctggcgatcagactctgagcactgcccctgctcgccttggtcatgtacagcactgaaaggaatgaagcaccagcaggaggtggacagagtctctcatggatgccggcacaaaactgccttaaaatattcatagttaatacaggtatatctatttttatttactttgtaagaaacaagctcaaggagcttccttttaaattttgtctgtaggaaatggttgaaaactgaaggtagatggtgttatagttaataataaatgctgtaaataagcatctcactttgtaaaaataaaatattgtggttttgttttaaacattcaacgtttcttttccttctacaataaacactttcaaaatgtgaaaaaaaaaaaaaaaaaaa

SEQ ID NO: 711 - DNA, 3655 bp, Homo sapiens
  CDS (50)..(1414)
gcacgaggttttcttataactgagctcagccaaggaaactcttgcacaaatgtacaatactgtttggaatatggaagacctggatttagaatatgccaagacagatataaattgtggcacagacttgatgttttatatagaaatggacccaccagcactgcctcctaaaccaccaaaacctactactgtagccaacaacggtatgaataacaatatgtccttacaagatgctgaatggtactggggagatatctcgagggaagaagtgaatgaaaaacttcgagatacagcagacgggacctttttggtacgagatgcgtctactaaaatgcatggtgattatactcttacactaaggaaagggggaaataacaaattaatcaaaatatttcatcgagatgggaaatatggcttctctgacccattaaccttcagttctgtggttgaattaataaaccactaccggaatgaatctctagctcagtataatcccaaattggatgtgaaattactttatccagtatccaaataccaacaggatcaagttgtcaaagaagataatattgaagctgtagggaaaaaattacatgaatataacactcagtttcaagaaaaaagtcgagaatatgatagattatatgaagaatatacccgcacatcccaggaaatccaaatgaaaaggacagctattgaagcatttaatgaaaccataaaaatatttgaagaacagtgccagacccaagagcggtacagcaaagaatacatagaaaagtttaaacgtgaaggcaatgagaaagaaatacaaaggattatgcataattatgataagttgaagtctcgaatcagtgaaattattgacagtagaagaagattggaagaagacttgaagaagcaggcagctgagtatcgagaaattgacaaacgtatgaacagcattaaaccagaccttatccagctgagaaagacgagagaccaatacttgatgtggttgactcaaaaaggtgttcggcaaaagaagttgaacgagtggttgggcaatgaaaacactgaagaccaatattcactggtggaagatgatgaagatttgccccatcatgatgagaagacatggaatgttggaagcagcaaccgaaacaaagctgaaaacctgttgcgagggaagcgagatggcacttttcttgtccgggagagcagtaaacagggctgctatgcctgctctgtagtggtggacggcgaagtaaagcattgtgtcataaacaaaacagcaactggctatggctttgccgagccctataacttgtacagctctctgaaagaactggtgctacattaccaacacacctcccttgtgcagcacaacgactccctcaatgtcacactagcctacccagtatatgcacagcagaggcgatgaagcgcttactctttgatccttctcctgaagttcagccaccctgaggcctctggaaagcaaagggctcctctccagtctgatctgtgaattgagctgcagaaacgaagccatctttctttggatgggactagagctttctttcacaaaaaagaagtaggggaagacatgcagcctaaggctgtatgatgaccacacgttcctaagctggagtgcttatcccttctttttctttttttctttggtttaatttaaagccacaaccacatacaacacaaagagaaaaagaaatgcaaaaatctctgcgtgcagggacaaagaggcctttaaccatggtgcttgttaatgctttctgaagctttaccagctgaaagttgggactctggagagcggaggagagagaggcagaagaaccctggcctgagaaggtttggtccagcctggtttagcctggatgttgctgtgcacggtggacccagacacatcgcactgtggattatttcattttgtaacaaatgaacgatatgtagcagaaaggcacgtccactcacaagggacgctttgggagaatgtcagttcatgtatgttcagaagaaattctgtcatagaaagtgccagaaagtgtttaacttgtcaaaaaacaaaaacccagcaacagaaaaatggagtttggaaaacaggacttaaaatgacattcagtatataaaatatgtacataatattggatgactaactatcaaatagatggatttgtatcaataccaaatagcttctgttttgttttgctgaaggctaaattcacagcgctatgcaattcttaattttcattaagttgttatttcagttttaaatgtaccttcagaataagcttccccaccccagtttttgttgcttgaaaatattgttgtcccggatttttgttaatattcatttttgttatccttttttaaaagtaaatgtacaggatgccagtaaaaaaaaaaaatggcttcagaattaaaactatgaaatattttacagtttttcttgtacagagtacttggctgttagcccaaggttaaaaagttcataacagattttttttggactgttttgttgggcagtgcctgataagcttcaaagctgctttattcaataaaaaaaagaaatgaaaaagatatatgaatatgacaaagtattgctgagtccaacaatgttgttttaagactcttaaaatacggtacctgggcaatgtttatttcataaagaattgtgaacttcttgaatctagggagggggaatgtagtgaagggatgtatcaagtggggtggtgggagggggaggcaaggttatatgcactttctcatgatttacagagaagtgaataactgcaaagtgaagttgcttcttctacttcagtcttctctcactttgatttgctagttgttatcaattaatgacaattacaaacctactgtatctctaatacagtgtgactggtcaggtatttcagttcttaggaaggaagtgccaagtttgtttttgggttcctggaacagcgctcacctttgtttagaacactggtttaaagggataatcatctctgtcacattagactatccatcatgaccagcaaatactcattttaggaaaaaaaaaagcatgatctgaaaaatacttttggtggtatgttggttaccctcctagctttccatttggtttagaacataaagcaaatagacacagtcatactgtcactgctctggactgtgtggagctcgctaaagtcatggtcattgcaggaatccaagtggcagtccttctcattcattctaatcattgtatgtgcttcactacgggggggagaaggaaacgttagcatcatgtttcccatttagggcaggagtgagaggtctctcttcctgatttagatatgcaaaagctggtatgttcagtaggaactgtacatgtgttgggaggcataaagactaattagcaaccataatatggtcactaccctaatagactaaatgaaatcttgcaatttcaaaattactcctttccccaatattaagatttaccccacaagctaatatttcccgtttaaagtactaagggtgagggttttctgttactttgttttttaatgttgttccttttgaaagaatcagtcttgcagctgagtgaaaaatctgtggaatgtattatttgtcctctttacatgaaactactcatacttaagcaaaagtcagtcttatagcaaga

SEQ ID NO: 712 - DNA, 818 bp, Homo sapiens
  CDS (573)..(710)
gccggccggaattcccgggtcgacccacgcgtccgcccgagccctgcgctgccctcgtcccgggcacctccccgagataagcgtctcctgggtgccctccccgatctccctggccaaagcctgggtgtcgccggatcgttgcattcccatttcgcggatcagtagaatgaggcgcaactgttgaggaccaaagctgcaacttcggatccctgcgctgggttgtctcagtgcctcacatcagcgccagctcctgccctgacccattacttagcaggacaggccgagtgcccggtgggcgcggggccggcctgccccgccatcattccccacgctgttgtctgcaggtgttcttcaacggtgccaacgtccggcaggtggacgtgcccacgctgaccggagccttcggcatcctggcggcccacgtgcccacgctgcaggtcctgcggccggggctggtcgtggtgcatgcagaggacggcaccacctccaaatactttgtgagcagcggttccatcgcagtgaacgccgactcttcggtgcagttgttggccgaagaggccgtgacgctggacatgttggacctgggggcagccaaggcaaacttggagaaggcccaggcggagctggtggggacagctgacgaggccacgcgggcagagatccagatccgaatcgaggccaacgaggccctggtgaaggccctggagtaggcgagccagccgccaaggttgacctcagcttcggagccacctctggatgaactgcccccagcccccgccccattaaagacccggaagcctgaaaaaaaaaaaaaaaaa

SEQ ID NO: 713 - DNA, 3687 bp, Homo sapiens
  CDS (329)..(1429)
ggcattatgtttagaactacctattcgatgatgaagataccccaccaaacccaaaaaaagagatctctcgaggatccgaattcgcggccgcgtcgacctcaggctcatcccacacactcggtgctagtcactgctgtgtgtttacatgagtaatggagctgccgggggaggggagttgtaagcagagcgctgagcctcgcagctcgcattcggagggaagctgacatccacaccaagtcgagacttccagggatgtggccggggagcagtcacatgctgtagctttcatgagcacaggcatcagtcaggcagatgtttgtcgactggaatggcgccaaatcttaaaggcagaccacgcaaaaagaaaccatgcccacaaagaagagattcattcagtggtgttaaggattccaacaacaattccgatggcaaagccgttgccaaggtgaaatgtgaggccaggtcagccttgaccaagccgaagaataaccataactgtaaaaaagtctcaaatgaagaaaaaccaaaggttgccattggtgaagagtgcagggcagatgaacaagccttcttggtggcactttataaatacatgaaagaaaggaaaacgccgatagaacgaataccctatttaggttttaaacagattaacctttggactatgtttcaagctgctcaaaaactgggaggatatgaaacaataacagcccgccgtcagtggaaacatatttatgatgaattaggcggtaatcctgggagcaccagcgctgccacttgtacccgcagacattatgaaagattaatcctaccatatgaaagatttattaaaggagaagaagataagcccctgcctccaatcaaacctcggaaacaggagaacagttcacaggaaaatgagaacaaaacaaaagtatctggaaccaaacgcatcaaacatgaaatacctaaaagcaagaaagaaaaagaaaatgccccaaagccccaggatgcagcagaggtttcatcagagcaagaaaaagaacaagagactttaataagccagaaaagcatccctgagcctctcccagcagcagacatgaagaaaaaaatagaagggtatcaggaattttcagcgaagcccctggcatccagagtagacccagagaaggacaacgaaacagaccaaggttccaacagtgagaaggtggcagaggaggcgggagagaaggggcccacacctccactcccaagtgctcctctggccccagaaaaagattcagccttggtccctggggccagcaaacagccactcacctctcctagtgccctggtggactcaaaacaagaatccaaactgtgctgttttacagagagccctgaaagtgaaccccaagaagcatccttccccagcttccccaccacacaggccaccgctggcaaaccagaatgagacggaggatgacaaactgcccgccatggcagattacattgccaactgcaccgtgaaggtggaccagctgggcagtgacgacatccacaatgcgctcaagcagaccccaaaggtccttgtggtccagtcgtttgacatgttcaaagacaaagacctgactgggcccatgaacgagaaccatggacttaattacacgcccctgctctactctaggggcaacccaggcatcatgtccccactggccaagaaaaagcttttgtcccaagtgagtggggccagcctctccagcagctacccttatggctccccaccccctttgatcagcaaaaagaaactgattgctagggatgacttgtgttccagtttgtcccagacccaccatggccaaagcactgaccatatggcggtcagccggccatcagtgattcagcacgtccagagtttcagaagcaagccctcggaagagagaaagaccatcaatgacatctttaagcatgagaaactgagtcgatcagatccccaccgctgcagcttctccaagcatcaccttaacccccttgctgactcctacgtcctgaagcaagaaattcaggagggcaaggataaactcttagagaaaagggccctcccccattcccacatgcctagcttcctggctgacttctactcgtcccctcatctccatagcctctacagacacaccgagcaccatcttcataatgaacagacatccaaatacccttccagggacatgtacagggaatcggaaaacagttcttttccttcccacagacaccaagaaaagctccatgtaaattatctcacgtccctgcacctgcaagacaaaaagtcggcggcagcagaagcccctacggatgatcagcctacagatctgagccttcccaagaacccgcacaaacctaccggcaaggtcctgggcctggctcattccaccacagggccccaggagagcaaaggcatctcccagttccaggtcttaggcagccagagtcgagactgtcaccccaaagcctgtcgggtatcacccatgaccatgtcaggccctaaaaaataccctgaatcgctttcaagatcaggaaaacctcaccatgtgagactggagaatttcaggaagatggaaggcatggtccacccaatcctgcaccggaaaatgagcccgcagaacattggggcggcgcggccgatcaagcgcagcctggaggatttggaccttgtgattgcagggaaaaaggcccgggcagtgtctcccttagacccatccaaggaggtctctgggaaggagaaggcctctgagcaggagagtgaaggcagcaaagcagcgcacggtgggcattccgggggcggatcagaaggccacaagcttcccctctcctcccctatcttcccaggtctgtattccgggagcctgtgtaactcgggcctcaactccaggctcccggctgggtattctcattctctgcagtacttgaaaaaccagactgtgctttctccactcatgcagcccctggctttccactcgcttgtgatgcaaagaggaatttttacatcaccgacaaattctcagcagctgtacagacacttggctgcggctacacctgtaggaagttcatatggggaccttttgcataacagcatttaccctttagctgctataaatcctcaagctgcctttccatcttcccagctgtcatccgtgcaccccagtacaaaactgtaggctcagctctgcccagcagtccaaagcggcatggccaacagagcttcactccttacccaggagtgctggcttatagagttagaagtcagtatttcttctaatctgaggctatgatcagtcccagctgtaggggcccagaggggaggtgaacatgcctgatttttgtgggacaactgtagcccacaaactgactggctggtgagtcttgactcccttccaacacagatgcccaggcacctccagatcattcacttcgcacgtgggccttgtgaagggatttgtgaatatccaggaagaacttagaggaccccatctgagttcggatggtcaggaaacaatctgggcaaaaaagaggcaggcatttcaaaggaaggggcaaggaagactggcaaacagatggcaagggatgcccctctttttcataaaactctccaaggttcaatcaatgcaatgtatagtgaaacttcaatagatctttcattttgacactattaaacaatccagagaagtaaacactgtt

SEQ ID NO: 714 - DNA, 1925 bp, Homo sapiens
  CDS (130)..(1497)
ctgtccggaattcccgggtcgacccacgcgtccggcttgaggacaccttgactaacctccaagggcaactaaaggatcaagaaaggcccagcacagcagaagatcagctggatctagctcctgcaggagatgtgtacaaagacaatcccagtcctctggggatgtttcctcctgtggaatctctatgtctcatcctctcagaccatttaccctggaatcaaggcaaggattactcagagggcacttgactatggtgttcaagctggaatgaagatgattgagcaaatgctaaaagaaaagaaactcccagatttaagcggttctgagtctcttgaatttctaaaagttgattatgtaaactacaatttttcaaatataaaaatcagtgccttttcatttccaaatacctcattggcttttgtgcctggagtgggaatcaaagcgctaaccaaccatggcactgccaacatcagcacagactgggggttcgagtctccactttttgttctgtataactcctttgctgagcccatggagaaacccattttaaagaacttaaatgaaatgctctgtcccattattgcaagtgaagtcaaagcgctaaatgccaacctcagcacactggaggttttaaccaagattgacaactacactctgctggattactccctaatcagttctccagaaattactgagaactaccttgacctgaacttgaagggtgtattctacccactggaaaacctcaccgacccccccttctcaccagttccttttgtgctcccagaacgcagcaactccatgctctacattggaatcgccgagtatttctttaaatctgcgtcctttgctcatttcacagctggggttttcaatgtcactctctccaccgaagagatttccaaccattttgttcaaaactctcaaggccttggcaacgtgctctcccggattgcagagatctacatcttgtcccagcccttcatggtgaggatcatggccacagagcctcccataatcaatctacaaccaggcaatttcaccctggacatccctgcctccatcatgatgctcacccaacccaagaactccacagttgaaaccatcgtttccatggacttcgttgctagtaccagtgttggcctggttattttgggacaaagactggtctgctccttgtctctgaacagattccgccttgctttgccagagtccaatcgcagcaacattgaggtcttgaggtttgaaaatattctatcgtccattcttcactttggagtcctcccactggccaatgcaaaattgcagcaaggatttcctctgcccaatccacacaaattcttattcgtcaattcagatattgaagttcttgagggtttccttttgatttccaccgacctgaagtatgaaacatcctcaaagcagcagccaagtttccacgtatgggaaggtctgaacctgataagcagacagtggagggggaagtcagccccttgattgccggtttgcaattcaccccaggaagtaaatggtccttaatcctacaactactgtaaacccagaagggaaagacagtacacactggaattgtaaagcccttgtgaattgcttaggcagaaagttttctttcttaagccttcaggaacccagaataaggcagactctgttaaagggataaatagaggtgtctgaatgtgagtgtatgcatgctgcgtgtgtctgtgtttatgtttgtttgtttgtttggggcaagaaagattctaggacaagagctaggcatgtacttctgaccaggtgggtaagcaactctaagtctgtatttgtattggtcattctcagtggaaatcccttaggccctctagtggttttcccctacctgcatattggttttcatgttttatattcactgttactatcttctgtgg

SEQ ID NO: 715 - DNA, 1264 bp, Homo sapiens
  CDS (611)..(904)
aacggaattcccggtcgactactactactaaattgcggccgcgtcgacgagcacagtgctcatgcctgtaatctcagcactttgggaggtcggggcaggaggacttgaggcctagagtttgagaccagcctgggcaacatagcgagcaccccatctccagaaaaaatttaaaaattggctggacgcagtggctcatgcctgtaatcccagcactttgggaggccgagggggatggatcatttgaggtcaggagtttgagaccagcctggccaacatggtgaaaccccatctctactaaaaatacaaaaattagccgggcatggtggtgggcacctgtaatcctagctacttgggaggctgaggcaggagaatcgcttgaacccaggaggcggtggttgtagtgagctaggatcatgccattgcagtccagcctggacagcaaagctagactccatctcaaaaaaaaaaaaaaaaagtcgaccggccgcgaatttagtagtagtaggcggccgctctagaggatccaagcttacgtacgcgtgcatgcgacgtcatagctcttctatagtgtcacctaaattcaattcactggtcgtaggtctacaacatcatgactggcaaaacaaccaaggtacccaatgcctgtttattcaccatcaacaaagaagaccacacactgggaaacatcattaaatcacaactcctaaaagacccgcaagtgctatttgctggctacaaagtcccccaccccttggagcacaagatcatcatccgagtgcagaccacgccggactacagcccccaggaagcctttaccaacgccatcaccgacctcatcagcgagctgtccctgctggaggagcgcttccggacgtgcctgcttccccttcgccttctgccgtgattgtcagtttcctgaggcctccccagccacgcttcctgtacagcctgcagaactgccggacatggtggctcacacctggaatcccagaacttcaggaggctgaggtgggaggatcacttgagcccaggagtttgagaccagcctgggcaacacgctgccccagagcacatcagctatgtgccccagctctcaaacgacaccttggcggggaggctcaccctgtccaccttcacgctggagcagcctttaggccagttcagcagccacaacatctctgacttggataccatctggctggtggtggccctcagcaacgccacgccgagcctcgtgccgaattcttggcctcgagggccaaat

SEQ ID NO: 716 - DNA, 751 bp, Homo sapiens
  CDS (262)..(594)
aactcatcttttcatgtttttaatttttctgtgtcacagaacctaaattggtaataaatcaataagaaatatttacattcactcagtgaaaagtgtcatgtctgagctcagcatatatcggagccacacatggacacgtaagtatcttgtgtgtggacctgtataggcaggtgaatctccgaactgcaaggccggcgaaggctctcctgacattcttcctttctaatccttcagctctccttcctccactaagagcggaaaatgaacaaatcccaggaacaagtgtcattcaaggatgtatgtgtggacttcactcaggaagagtggtatctgctggaccctgctcagaagattctatacagagatgtgatcctggaaaattatagcaatcttgtctcagtagggtattgcattactaaaccagaagtgatctttaagatcgagcaaggagaagagccctggatattagaaaaaggattcccaagccagtgccaaccagaaagggaatgggaagttgatgacgtgttagagagcagccaggaacatgaagatgacccattttgggagcttctattccccaacaacaaacagtaagtgtagaaaatggggatagaggaagcaaactttcaatttggggcaagaccctgttctttaagaattaccctataaatttgtgcccatgtgaatgatttgggaattttggggttaatttttgtaaagactttccgaaagtcctggtggtttatgttta

SEQ ID NO: 717 - DNA, 1902 bp, Homo sapiens
  CDS (981)..(1880)
atttggccctcgaggccaagaattcggcacgagatgatatctcctttcagggccccagcttaagggcaaagtgagttaatgtgtagacaaaggcgagggacaagagagagttaacatctagacagtggaaaaagccatggtgtgtggtttctgggaaccaccaacacttgcaggtttagctttttcccagggttgactacaagaaagaaaaccatgtttttgcaagattaaaatgtggttgagtgtgcctaaattaaccatccccatttttatcatatttccaccatcacttcagggttttaagagtcagtgctcacctgggcggagctggtagtacattttgcttcttagaaagctaagtcctgggttccgtctgattttaggttccaggaacttcctgagaacacccgatcgcagagggtaattttctggagtttgttttgcagggatagctgggagtatggccaccctgctccacgatgcggtaatgaatccagcagaagtggtgaagcagcgcttgcagatgtacaactcgcagcaccggtcagcaatcagctgcatccggacggtgtggaggaccgaggggttgggggccttctaccggagctacaccacgcagctgaccatgaacatccccttccagtccatccacttcatcacctatgagttcctgcaggagcaggtcaacccccaccggacctacaacccgcattcccacatcatctcaggcgggctggccggggccctcgccgcggccgccacgacccccctggacgtctgtaaaacccttctgaacactcaggagaacgtggccctctcgctggccaacatcagcggccggctggtggtgcctatgggccctctgctccccaatgccttagagagaggaggggacggcacggccgctcaccggaaggctgtgtgcggggacatccgagaggtctgggagctggaccggctgctgccttgtgacatccgggatggcgccttcattactatgccctttcactgctatgcacaaaaccgtggggagggcctcctgcgccccgccgagctggcggatggagctgcgcagcgggagcgtgggcagccaggcggtggcgcggaggatggatggggacagccgagatggcggcggcggcaaggacgccaccgggtcggaggactacgagaacctgccgactagcgcctccgtgtccacccacatgacagcaggagcgatggccgggatcctggagcactcggtcatgtacccggtggactcggtgaagacacgaatgcagagtttgagtccagatcccaaagcccagtacacaagtgtctacggagccctcaagaaaatcatgcggaccgaaggcttctggaggcccttgcgaggcgtcaacgtcatgatcatgggtgcagggccagcccatgccatgtattttgcctgctatgaaaacatgaaaaggactttaaatgacgttttccaccaccaaggaaacagccacctagccaacgggatagctgggagtatggccaccctgctccacgatgcggtaatgaatccagcagaagtggtgaagcagcgcttgcagatgtacaactcgcagcaccggtcagcaatcagctgcatccggacggtgtggaggaccgaggggttgggggccttctaccggagctacaccacgcagctgaccatgaacatccccttccagtccatccacttcatcacctatgagttcctgcaggagcaggtcaacccccaccggacctacaacccgcagtcccacatcatctcaggcgggctggccggggccctcgccgcggccgcgaattcggatcctcgagagatctctttttttgggtttggtggggtatcttcatcatcgaatagatagttatatgcacagccattctatg

SEQ ID NO: 718 - DNA, 733 bp, Homo sapiens
  CDS (217)..(330)
atttggccctcgaggccaagaattcggcacgagtggaaaacaggccttactagcatagtgaggagtgttatctttgagaacattttgagggctgacgaaagagaaagagaactcaaaagggagaataagataaagagaaaatgaggctagaaaaacatgcaggagctagaaaggtaaaggaacccctgccccttgaccttccttccctctaccctcatggtcctcttactgtccttgactttcttctctgctttaacattccattctatttgtcaactgcgtaacacaggcgtagaagtggacattgttttccagagagtctcctttttatagtttcttcctcaaccttaaaatgtctgtccttttggcacgttgtgaaggagaacactaacgtgcctaagattggaggtgacgatatctctgtgatgctgggggagaaatcacaggggcgaaacaaaaactttaggggtcattgaccaaaggggccccttctttataaaaaaagggaattcctggcttttctttcccatctaattctcaggagtaccttgaatggctccttgaaagagagggcacaggaaccctcacaccatctctcctttgctttattcgggatggaagctttccaataattacttaactgggcgggtgtggcctcttcatgctctatggagcatccccttggggaacagcttaaaaataattagggagaccagaccaagggaaggggggg

SEQ ID NO: 719 - DNA, 608 bp, Homo sapiens
  CDS (49)..(468)
atttggccctcgaggccaagaattcggcacgagaagaaggagagaacaatgtcttctttacccgtgccatacaaactgcctgtgtctttgtctgttggttcctgcgtgataatcaaagggacaccaatccactcttttatcaatgacccacagctgcaggtggatttctacactgacatggatgaggattcagatattgccttccgtttccgagtgcactttggcaatcatgtggtcatgaacaggcgtgagtttgggatatggatgttggaggagacaacagactacgtgccctttgaggatggcaaacaatttgagctgtgcatctacgtacattacaatgagtatgagataaaggtcaatggcatacgcatttacggctttgtccatcgaatcccgccatcatttgtgaagatggtgcaagtgtcgagagatatctccctgacctcagtgtgtgtctgcaattgagggagatgatcacactcctcattgttgaggaatccctctttctacctgaccatgggattcccagaacctgctaacagaataatccctgctcacattttcccctacactttgtcattaaaacagcacgaaaactcaaaaaa

SEQ ID NO: 720 - DNA, 1625 bp, Homo sapiens
  CDS (40)..(1179)
cattacgccaagcttggcacgaggccgaggttgaagttcatgagttcgcccagcctcagtgacctgggcaagagagagccggccgccgccgcggacgagcggggcacgcagcagcgccgggcctgcgccaacgccacctggaacagcatccacaacggggtgatcgccgtcttccagcgcaaggggctgcccgaccaggagctcttcagcctcaacgagggcgtccggcagctgttgaagacagagctggggtccttcttcacggagtacctgcagaaccagctgctgacaaaaggcatggtgatccttcgggacaagattcgcttctatgagggacagaagctgctggactcactggcagagacctgggacttcttcttcagtgacgtgctgcccatgctgcaggccatcttctacccggtgcagggcaaggagccatcggtgcgccagctggccctgctgcacttccggaatgccatcaccctcagtgtgaagctagaggatgcgctggcccgggcccatgcccgtgtgccccctgccatcgtgcagatgctgctggtgctgcagggggtacatgagtccaggggcgtgactgaggactacctgcgcctggagacgctggtccagaaggtggtgtcgccatacctgggcacctacggcctccactccagcgaggggcccttcacccattcctgcatcctggaaaagcgcctcctccgccgctcccgctcgggggacgtgctggccaagaaccctgtggtgcgctccaagagctacaacacgcctctgctgaaccccgtgcaggagcacgaggcggagggcgcggcggccggcggtaccagcatccgcaggcactctgtgtcggagatgacgtcctgccccgagcctcagggcttctccgacccgcccggccagggccccaccgggaccttcaggtcctccccggcgccccactcagggccctgccccagcagactgtaccccacgacccagccccctgagcagggcttggatcccacccgcagctccctgccccgctccagcccggagaacctggtggaccagatcctggagtccgtggactcggattctgaagggattttcattgactttggccggggccggggctctggcatgtccgacttggagggctctgggggccggcagagtgtcgtgtgaggcctcacagctggccttgagtttttactgacacgtccctgtgtgcgggggtgtccatgtggcgtgtgtgtgagtgagacttttttactgcgtcccgtcccgccagccctatcggcctcgtcactggccttggtcactttgtatttctgtcttggttggaaataccatcagccttccttgctcggcccaggtctgtttcaggcatctgagtcggcgtttacccaggggccgggccagagacgggggtcggccgctcgctcccacgctcctcctgccccagccctctggtgtccacacctgcccacagagaatgtaaacccagtgggctctgcccacgccgggccccaaagtgaccagactccagcacacctgtctcctcctgcctggggtggccatggggatggaagggggtggaataaaacctgtcaacctggaaaaaaaaaaaa

SEQ ID NO: 721 - DNA, 1116 bp, Homo sapiens
  CDS (163)..(789)
gaggttagtaaggggggttgatgtgcactacggatcgccgccggctaatatgaaccctcactaaagggaataagcttgcggccgccgcgagtctggtatcctgagcttcgtgagttgagcgctgctgctccgcggtggagtcaccgcaccgctcccgggatcatggtgttctacttcaccagcagcagcgttaattcatctgcctacactatttacatgggaaaagataaatatgaaaatgaagatctgatcaagcatggctggcctgaagatatctggtttcatgtggacaaactctcttcggctcatgtataccttcgattacataagggagagaatatagaagacatcccaaaggaagtgctgatggactgtgcccaccttgtgaaggccaatagcattcaaggctgcaagatgaacaacgttaatgtggtatatacgccgtggtctaacctgaagaaaacagctgacatggatgtggggcagataggctttcacaggcagaaggatgtaaaaattgtgacagtggagaagaaagtaaatgagatcctgaaccgattagaaaagaccaaagtcgagcggttctcagacctagcagcagagaaagaatgcagagatcgtgaagagaggaatgagaaaaaagcccaaattcaggaaatgaaaaagagagaaaaagaagaaatgaagaagaagagggaaatggatgaacttaggagctattcatcactaatgaaagttgaaaatatgtcttcaaatcaggatggcaatgattcagatgaattcatgtaaaaggagaaaaggagaaaaggacctttgaaagatgtgaatgtagagacaattgcagaccttttggtttcatctgtgttctgaaatataaaatacaaccaaaattctaccttcatcctacccagaaattattgattttcaagttttaaaaaaattgtaccttttttgctgacagaaaaggatcagatatgtataaaatagttgaacttgacagcatataacttaaagtgaaaatgtttttgccagaacatgtcttggtaccttgtgaaagcaggctgcccttgttcttgagatagactttaaaatgaaccagctctgaaaaaaaaaaaa

SEQ ID NO: 722 - DNA, 510 bp, Homo sapiens
  CDS (163)..(423)
gaggttagtaaggggggttgatgtgcactacggatcgccgccggctaatatgaaccctcactaaagggaataagcttgcggccgccgcgagtctggtatcctgagcttcgtgagttgagcgctgctgctccgcggtggagtcaccgcaccgctcccgggatcatggtgttctacttcaccagcagcagcgttaattcatctgcctacactatttacatgggaaaagataaatatgaaaatgaagatctgatcaagcatggctggcctgaagatatctggtttcatgtggacaaactctcttcggctcatgtataccttcgattacataagggagagaatatagaagacatcccaaaggaagtgctgatggactgtgcccaccttgtgaaggccaatagcattcaaggagctattcatcactaatgaaagttgaaaatatgtcttcaaatcaggatggccatgattcatatgaattcatgtaaaaggagaagaggagaaaaggacctttga

SEQ ID NO: 723 - DNA, 2430 bp, Homo sapiens
  CDS (959)..(1342)
actcgtccagtgtggtggaattcctttcagaggcttccggaggactgagcagctagaggtgattttgcatttgcgtttcccgacgttgccacatctcaggtgaataagttctatgaagcgctcacactagtacgtggcccctcggtggtttgtcctcgaggtcgaaggtccagatgtccaggggctgccctggactccagagtggtgcggctgagcaggctgtggtcttgggtgcttgggcacctcccgtctctccctgctcagagttcttctctcctgggcagccagaaaggatcagaaccggtcacatgcagagcggcctcccgtatcccacagcagctccgttctctaatctgggtcttcagatgcggctgtgtctcccggcaccttgctggaatgtggtgcatccctcggagtccagcagcccttaggcagagctgggtgccgagcttgagtccaggagggcctcagacacctgcgatcttgcagcctgttgccctggacagtgggtgtgctgtgggtggaggatggcgccctgcctccacggaagcatccccagcttgcccctcagtcacacgaagcgtctgtccccagcctggggcatttctgagtggcctccacttggcctcttcctttttctggagcaagtatttgaactcctgcaggcgccagagatctccttacctgtttcccgctacccttctccagccaggtttctgccctcagccagattgtcctgcagtgacttgcttttggccatggagtagtggctgctcagtgcctgagattgttttagcagcagaagggaccgggtccccctgctgctggcaacacagacgcttgcttacagttctctggtcctggacacctgaggtctcggcctccccaggacggcccttccagattctcaggaccaccttgccctccctgccctgtctcctaggtgaccctggcaaagatgagagtgcacatttcgtcctgcctgaaggtccaggagcagatggccaactgccccaagttcgtccccgtggtgcccacatcacagcctatccccagcaacatccccaacaggtccaccttcgcctgcccgtactgtggtgcccgcaacctggaccagcaggagctggtgaagcactgtgtggaaagccaccgcagcgaccccaaccgcgtggtgtgccccatctgctcggcaatgccctggggggaccccagctacaagagcgccaacttcctgcagcacctgcttcaccgacacaagttctcctacgacacctttgtggactacagtattgacgaggaggccgccttccaggctgctctggccctgtctctctctgagaactgaagggaagcgcagccacccgcctgcgtctggggtcagggatgtccccgctcctgtgtcgcacctggcacctgctcgggagcgcacctcaccggactgagctcacaggaggagcctgcacccgcgcagaaggggagccggggccgagcctccgggcctgaatacgggccagccgccgaggccgccagagcagggccgcctggtcccaccggcgtcgctgggttcttcggtgcttctggccgagcaggcggcctacttgggcagggctggacgctgggacctggagctgccgccgtctcttcaaagccatgataccccctcgtgggaagaagggaccgacgcgcgagtcgcgctccgcagtcgagccgggaggaacccaggctgctgccctgcccagcccgaccctgccccggccccgcttccaccttgcgcatttggtactggcttttgtgatacttaggaaccctggcatcttttctatattatccagtgtgataatcttttcacgttttatagagcaaagacagagcagttactcttcatattgcaatatctgtgtttgactaggaataatagtatttttatggaacatttacaaaattatattttttaagaaaacaatcaaaacaagcattgggggattggggcaaggatggaaggagcagtggggcagctgccagagctcaggcgagccatggggtctgctgtggggtctgccctggccacccactgtgtgtctgggtccttgaggtttgtacgtttctctttgatgaccaggaagaaatcccagcaccccagccacaggctgtggctgctcccagcagaggcggggccggcagagaaggggcctcctccacccagagtcctggccttggcccgctgtcaccttcaaagctgactgtgccccgctgcgggaggggacggcaccccagtggtggcagagcttgggggcctgggcaggggcccgcttggcgggccgggcaacacgtcaacattcttttctgttcttggcattaattattgctgtctttttttaaaaaaaaaaagtttaaataaaatgtctcagagcatcaaaaaaaaaaaaaaaa

SEQ ID NO: 724 - DNA, 5371 bp, Homo sapiens
  CDS (108)..(1856)
agaccctggggaggtggctgctcggagtttatgagacggttgcccccaccctggcgtgcctgccccggccgcggctgaggaggaggaggaggaggaggaggaggaggatgatctccagatacactcggaaggcggtgccacagagcttggagctgaaaggaataacaaaacatgctcttaaccatcatccccctccagagaagctggaggaaatttcccccaccagtgacagtcatgagaaagacacaagttcccaaagcaagtctgacatcacaagagaatcatcttttacatcagccgacactgggaattcactgtctgcttttccaagttatacaggcgcagggatatctactgaaggaagctcggacttctcctggggatatggtgaactcgatcaaaatgccactgaaaaagtccagacaatgttcacagccattgatgaactcttgtatgagcagaagttgagtgtgcataccaagagtctacaagaagagtgccaacagtggacagctagctttcctcacctcaggattctaggtaggcagataatcactccaagtgaaggttatagattgtatcctagatccccttctgctgtttccgcttcatatgaaacaaccttgtctcaagaaagagattctactatatttggtataaggggaaagaagttacatttttcatcttcttatgctcataaagcatcttccattgccaaatcctccagcttttgttctatggaaagagatgaggaagactctataatcgtctcagaaggaataattgaggaatacctagcattcgatcacatagatatagaagagggatttcatgggaagaaatcagaagcagctacagagaaacagaaattagggtatcctcccattgctccattttactgcatgaaagaagatgtccttgcttatgtgtttgacagtgtatggtgcaaggttgtgagctgtatggagcagttgacacgtagtcactgggaaggatttgcctctgatgatgagagtaatgttgcagttaccagacccgattcagaaagttcctgtgtgctgagtgaactacatcctttggtgttaccgcgagtgccacagtctaaggtgctgtacattacctcaaatccgatgagtctctgtcaagcaagcagacatcagccaaatgtgaatgatctcttggttcatggaatgcctctacagccaagaaatctctccctaatggacaagctcctagatcttgatgacaagctacttatgaggcctgggtccagtaccatcctttcaactcgaaattggccaaatcgagctgtggagtttagtacatcatctctgtcatacacagtgcagtccaccaggagacgcaatccaccaccacgaactcttcatccgatcagcacgagccattcatgtgctgaaacaccaagatctgtggaagaaatcctcagaggagcccgagtcccagtggcacccgactcgctctcctctccctcaccgacgcccctgagtcgaaataatctgctaccacctattggcacagctgaagtggaacatgtgagcactgtggggccacaaagacagatgaaaccccatggcgactctagtcgagctcaaagtgcggtggtggatgaacctaactatcagcagccacaagaaaggctccttttgcccgactttttccccaggcccaacacaactcaatcatttttgctggatacacagtatcgtcgctcatgtgcagttgagtatcctcatcaggcccgacctggcaggggatctgcaggtcctcagttacatgggtctacaaaatctcaaagcggaggcagaccagtctctcgaaccaggcagggaccataaggcaaatgagaagaatctatcaggctgcaggaaacacgagatttcatgaagcagtattcagtcatcaagtgatgcagagcttgtatagaagatcgactagaaatcatcttcatgaagagtgattttggcacaagtgaccgaagaacaaaacaccatagcagccaaaaatgacatgagtgttgtttctatctccagttactgtctctttcagcagaaattaacctatcccattggaaaggcaagtttgtacccaaagatgcaacagtgaataataccccaaatcactgctcatgttatctcttaacaatgatcagttcaatcatataggatttgatgagctcacacatacacaaaaagcagcaaatcatcagtgacaatatcactggcttcagaatacttcagcctgtgttcatttctggagagttgtactcagttttaagtcattttgctgttgaaaatctgacctcatcaaatagatgtcattcctaaaactctctttagatgtcctaccctatcagcagattaaaatggaaggggtgtgtaactaaaaacataaatgttaagcattagtataaagtaacttctgtaataaattatatcgcatattttttcagataggacagctcaaccttacgatgcctacctgatgccaggtgatgcttattttcttcctaaagtaggttactggtcatatcttttttccaaatattaaatgcaccttgccagatattctcctgcagctctaaggaaaggaaatcaatttaaaaataatttgtagaatctactattgagccaccaaagtataattccctaaaagtttaagaaaccctggcaattaattcagcataaacatatcctataaacagcaggagaggttcagctttctgattttactgtggaccttttcctaagggcattcatgaatgcagcaacagttttaactatggcttacatttattttaaatttcactaaatacaaatcttgattgtcatgccagttttagatcttattaattttcagaatggataaattcaaataatcataaattacggtaactttttattataccaaggtgttctaatgccatcatatgaagacagatgcttcaaacaacctgcattaaattatatttttaataaaattaaaatctatttttaacctatttgtagtcacaaaccgaaaacgtgtcgtctttaccttagagctaaaggcttactttatgcatacggtatatttaatagtctacaaatcaaagatttaaacagtcccttaaaaattccatatattctcataccaactcatctacatagaaatgaaaatctctattgttctcacaaaccattaccatgagttcactataacaactggatcaatatggcttgcctttcaaagttaaagaatcagaaaggggcctgtaagaagtcatttagcccaattccctcaccctgtgtgttttccctcaaagccagtgcaatttttttttaaccaaaaaactggacatgtttaatacatacagtttgacaaatttggatttcactctttgttttgatgtagtaactcttttataaaagggaacagattcagacaagctcagtggcccaactgaagacattcagcaattaatggcaggacttcagtaatcagtggcaggactacaacatacatctcttcatgctagggaaaccaggctctctattataaagctgaccagggctattgttttccccttttctctcatcctaaacaccattcatatttttcctaggtcacattttagtgggatcatttacaaagcccccagaacttaatcatcatgttttaccttttttattgaattatatacacctcttacaaaaatgcttgaagtaatttaacacctgtacatcagtacaaaacctggctgagtaaaatgaagagaggatctattcaagatcattaagaccaaatgtaaactgggaagtatgtggaagatagctgtccagcaagtgtctggaaggtgttctagctgggtagagagcctattctaacagacacgcacatcgcagaaagcagcatgaacagaaccacatcctagataagagttctgtgtacagaaaaggggaaatttccccccccccctaaatggaggcaagtgctgtcaggaaggacactgcctccctccaccctcccaaatgtcaccaccaagttccttcaggtgagacctcacacaatgtcaagtgctttctaggaaatactaagatcaggttgagagattctgcttggtctagtcaatctgaaaaattcaggctggaaagacaccttttctcaagagctgaattgacttttgccttcaaatcctgcctgcaccttgcctacgatggcatcaatttacacctaaggacctttgaagagaaaaattccattatttcttttctttcttgagagcagattttttccctcctcctttggaagatttgcagtactttgcttccatctgagccagaaaattgtccatttccttttgccgatccttttgtctgctctgtttgagaagttaaaacacaagctttcacaacattatccatagacagaaagtacctagtggttgccaggggctggaaaagtggaataactactaatgggtatggagtttttttggaatggtgaaaatgtcctacaattggtgttaataattgtaaaactttgtaaatacacttaaaaccaccaaattgtacactttaaaaggacaaatagaaggtatgcggttatgtcttaaaagaagaaaacaaaatacaacattccaaagaaaatattagcagtaggaatcagatcattaaagatgtggcaacaaactgccaagtttacctgaatggctgccttcaggctatccacgccttcatcaagccccaactcctttctgctcatttctgcttctttggcctcttcctgagcctgaaacaggaactcacatgagactcagggccaccaggaaatgcttaaaatacatactctttcccaaaagcaaatctataattctgtttcaattttatgaatatatgaatagacaaaatgaatcgaattacataactatgtcattcattaaatggcaacaatgctgacagcaagcagtagatcctctgattccaattaccatttgttttttacccaattctatttgctagaggtagtaagtactctggcactcataaatcacatgatgataaaaaggaacatgaggccgggtatggtggctcacaactgtaatccccataccttgggaggccaaggtgggaggatcacttgaactcaggagttcaagacctgcctgggtaacatagtgagacctcagttctataaaaaagaaaagaaatgagcctggtgtggtggcatgtgcttgtagtcccagctactagggaggctgaggtgggaagatggcttcagtctgagagttcaggctgcaataagctgtgatcatgcctctgcactccagcctgggtgatggagatgccatctcttagaaaaaagagaaaaaaaa

SEQ ID NO: 725 - DNA, 774 bp, Homo sapiens
  CDS (52)..(564)
atttggccctcgaggccaagaattcggcacgagtttgcctcttcaaggtgaatgcggcttcaaggggctatctttgtgctcctgccccacctggggcccatcctggtctggctgttcactcgtgatcacatgtctggttggtgtgagggcccgaggatgctgtcctggtgcccattctacaaagtcttattgcttgtacagacagccatctactctgtcgtgggctatgcctcctacctggtgtggaaggacctgggagggggcttggggtggcccctggccctgcctcttggcctctatgctgttcagctcaccatcagctggactgtcctggttctctttttcacagtccacaaccctggtctggccctgctgcacctgctgctgctgtatgggctggtggtgagcacagcactgatctggcatcccatcaacaaactggctgccctgttactgctgccctacctagcctggctcaccgtgacttcagccctcacctaccacctgtggagggacagcctttgtccagtgcaccagcctcagcccacggagaagagtgactgaggccctagggcatgggagaggagggacgcccagggtggggaggaagagtctgcaagcagggctgtggagttagggttcaccccaatgggaccaccctcctgggtcccctggagccgtttttccttagaaatcagagaaatgggaaagggggggaaagggatttcacacttaaataaaaaaataccaccagcaactctgaaaaaaaaaaaa

SEQ ID NO: 726 - DNA, 1601 bp, Homo sapiens
  CDS (277)..(1428)
aaatttgatagctgtacgcctgcggtaccggtccggaattcccgggtcgacccatcaacaggggaagtgtattgcagagtgccaaatagtggaaaagacgagatcgaagccgcggtcaaggccgccagagaagcctttcccagctggtcatcccgcagcccccaggagcgctcacgggtcctgaaccaggtggcggatttgctggagcagtccctggaggagtttgcccaggccgagtctaaagaccaagggaaaaccttagcactggcaagaaccatggacattccccggtctgtgcagaacttcaggttcttcgcttcctccagcctgcaccacacgtcagagtgcacgcagatggaccacctgggctgcatgcactacacggtgcgggccccggggggagtcgctggtctgatcagcccctggaatttgccactctacttgctgacctggaagatagctccagcgatggctgcagggaacactgtgatagccaagcccagtgagctgacttcagtgactgcgtggatgttgtgcaaactcctggataaagcaggtgttccaccaggtgtggtcaatattgtgtttggaaccgggcccagggtgggtgaggccctggtgtcccacccagaggtgcccctgatctccttcaccgggagccagcccaccgctgagcggatcacccagctgagcgctccccactgcaaaaagctctccctggagctggggggcaagaatcctgccatcatctttgaggacgccaacctggatgagtgcattccggcaaccgtcaggtccagctttgccaaccagggtgaaatctgtctctgtaccagcaggatctttgtccagaagagcatctatagtgaatttttaaagagatttgtagaagctaccagaaagtggaaagtcggcattccctctgatccactggtgagcataggtgctctgataagtaaagcacatttggagaaagtcagaagttacgtcaagagagctcttgctgaaggtgcccaaatttggtgcggtgagggagtggataagttgagcctccctgccaggaaccaggcaggctactttatgcttcccacggtgataacagacattaaggatgaatcctgctgcatgacggaagagatatttggtccagtgacgtgtgtcgtcccctttgatagtgaagaggaggtgattgaaagagccaacaacgttaagtatgggctggcggctaccgtgtggtccagcaatgtggggcgcgtccaccgggtggctaagaagctgcagtctggcttggtctggaccaactgctggctcatcagggagctgaaccttcctttcggggggatgaagagttctggaataggtagagagggagccaaggactcttacgacttcttcactgagatcaaaaccatcaccgttaaacactgatctttgctaatggtggagccactatggccaatgcctggctgcaggcatcagttgttcaatgtggtagatgaaaatcatggcatgaattccagctatgccttgacttggcagaaggttatctctagcttatcctcagttcttagtaactttacccactagtgaagagatactgt

SEQ ID NO: 727 - DNA, 2232 bp, Homo sapiens
  CDS (1)..(1698)
atggggagaaaccagagcagaaaagctgaaaattctaaaaatcagagtgcctcatctacaccaaaggatcacagcgcctcgccagcaacggaacaaagctggatggggaatgactttgatgagttgacagaattaggcttcagaaaatcggtaatgacaaacttctcccagctaaaggaggatgttcgaacccatcacaaagaagctaaaaacctagaaaaaagattagacaaatggctaactagaataaacagcatagaggagaccttaaatgacctgatggagctgaaaaccatggcacgagaactacgtgacacatgcacaagcttcagtagccgattcgatcaagtggaagaaggggaaatacaaactaccatcagagaatattatgaacacctctacgcaaataaactagaaaatctagaagaaatggataaattcctggacacatacactctcccaagactaaaccaggaagaagttgaatccctgaatagaccaataacaggttctgaaattgaggcaataattaatagcctaccaaccaaaaaaattccagggccagacagattcacagccaaattctaccagaggtacaaagaggagctgagtaacctgatccactacctgggactgagccatcacctgctggcactgaattttatcattgtttcttttggcaaaaaaagcgcgtggtcttctgcccaagtgaaggtgaccgacacagactttgatggtgtggaagtcagagtgtttgaaggccctccgaagcccgaagagccactgaaacgcagcgtcgtttatatccacggaggaggctgggccttggcaagtgcaaaaatcaggtattatgatgagctgtgtacagcaatggctgaggaattgaatgctgtcattgtttccattgaatacaggctagttccaaaggtttattttcctgagcaaattcatgatgttgtacgggccacaaagtatttcctgaagccagaagtcttacagaagtatatggttgatccaggcagaatttgcatttctggtgacagtgctggtggaaatctggctgctgcccttggacaacagtttactcaagatgccagcctaaaaaataagctcaaactacaagctttaatttatccagttcttcaagctttagattttaacacaccatcttatcagcaaaatgtgaacaccccaatcctgccccgctatgtcatggtgaagtattgggtggactacttcaaaggcaactatgactttgtgcaggcaatgatcgttaacaatcacacttcacttgatgtggaagaggctgctgctgtcagggcccgtctaaactggacatccctcttgcctgcatccttcacaaagaactacaagcctgttgtacagaccacaggcaatgccaggattgtccaggagcttcctcagttgctggatgcccgctccgccccactcattgcagaccaggcagtgctgcagctcctcccaaagacctacattctgacgtgtgagcatgatgtcctcagagacgatggcatcatgtatgccaagcgtttggagagtgccggtgtggaggtgaccctggatcactttgaggatggctttcacggatgtatgattttcactagctggcccaccaacttctcagtgggaatccggactaggaatagttacatcaagtggctagatcaaaacctgtaaaggagcaaaacttccagaagcctcgagcccctcttgacctcctacacctgctttggaaagacatgcactttttagttgactaattcttcctcccattcccctctacttgcgagttatggaatttctattccataactgaagtctttatgataacctaatttttaaaaatgaatttgactaacttaagtgcaaaacatgtaaatttggttcccagagtgggccaatctctctgttcttgttatcttagccaactatactgatacctacagctacagaaagcaggactaggaactggaaataactttgggtcctgccttcattaggacgttctttttagaagcagttcttccagctctggatcatagagtgacctttaataagttaaaaaaacgaggactccttaattctgctagagttaaccttgagttcagagcagtattaaatgcgtgcactttcaggtcagtactggggaccaagtaccctctggtcttttgtgaatggatggttttgtttccatgggaattttggcaaggt

SEQ ID NO: 728 - DNA, 2844 bp, Homo sapiens
  CDS (355)..(2223)
aatttaggtgacactatagaagagctatgacgtcgcatgcacgcgtacgtaagcttggatcctctagagcggccgctcgcgatctagaactagtcgcggcgcggctgcggctttgcctcggcgcgacagggaaaataaaagaagcaaaaacaggccctgctgtgagggaccacgaggcagtgccaggatgaaagagttggagtaacctaggtgattctgagtgaatcagtcaggaggccttcctggagggggctgaggccccagcttgtggccaccacaacgtatcaagctatctccagggttgggctcaggactcagagctgacgcagctggggtgccccttggttctggaggatgaggctcctccgcagacgccacatgcccctgcgcctggccatggtgggctgcgcctttgtgctcttcctcttcctcctgcatagggatgtgagcagcagagaggaggccacagagaagccgtggctgaagtccctggtgagccggaaggatcacgtcctggacctcatgctggaggccatgaacaaccttagagattcaatgcccaagctccaaatcagggctccagaagcccagcagactctgttctccataaatcagtcctgcctccctgggttctataccccagctgaactgaagcccttctgggaacggccaccacaggaccccaatgcccctggggcagatggaaaagcatttcagaagagcaagtggacccccctggagacccaggaaaaggaagaaggctataagaagcactgtttcaatgcctttgccagcgaccggatctccctgcagaggtccctggggccagacacccgaccacctgagtgtgtggaccagaagttccggcgctgccccccactggccaccaccagcgtgatcattgtgttccacaacgaagcctggtccacactgctgcgaacagtgtacagcgtcctacacaccacccctgccatcttgctcaaggagatcatactggtggatgatgccagcacagaggagcacctaaaggagaagctggagcagtacgtgaagcagctgcaggtggtgagggtggtgcggcaggaggagcggaaggggctgatcaccgcccggctgctgggggccagcgtggcacaggcggaggtgctcacgttcctggatgcccactgtgagtgcttccacggctggctggagcccctcctggctcgaatcgctgaggacaagacagtggtggtgagcccagacatcgtcaccatcgaccttaatacttttgagttcgccaagcccgtccagaggggcagagtccatagccgaggcaactttgactggagcctgaccttcggctgggaaacacttcctccacatgagaagcagaggcgcaaggatgaaacctaccccatcaaatccccgacgtttgctggtggcctcttctccatctccaagtcctactttgagcacatcggtacctatgataatcagatggagatctggggaggggagaacgtggaaatgtccttccgggtgtggcagtgtgggggccagctggagatcatcccctgctctgtcgtaggccatgtgttccggaccaagagcccccacaccttccccaagggcactagtgtcattgctcgcaatcaagtgcgcctggcagaggtctggatggacagctacaagaagattttctataggagaaatctgcaggcagcaaagatggcccaagagaaatccttcggtgacatttcggaacgactgcagctgagggaacaactgcactgtcacaacttttcctggtacctgcacaatgtctacccagagatgtttgttcctgacctgacgcccaccttctatggtgccatcaagaacctcggcaccaaccaatgcctggatgtgggtgagaacaaccgcggggggaagcccctcatcatgtactcctgccacggccttggcggcaaccagtactttgagtacacaactcagagggaccttcgccacaacatcgcaaagcagctgtgtctacatgtcagcaagggtgctctgggccttgggagctgtcacttcactggcaagaatagccaggtccccaaggacgaggaatgggaattggcccaggatcagctcatcaggaactcaggatctggtacctgcctgacatcccaggacaaaaagccagccatggccccctgcaatcccagtgacccccatcagttgtggctctttgtctaggacccagatcatccccagagagagcccccacaagctcctcaggaaacaggattgctgatgtctgggaacctgatcaccagcttctctggaggccgtaaagatggatttctaaacccactgggtggcaaggcaggaccttcctaatccttgcaacaacattgggcccattttctttccttcacaccgatggaagagaccattaggacatatatttagcctagcgttttcctgttctagaaatagaggctcccaaagtagggaaggcagctgggggagggttcagggcagcaatgctgagttcaagaaaagtacttcaggctgggcacagtggctcatgcctgaaatcctagcactttgggaagacaatgtgggagaatggcttgagcccaggagttcaagaccggcctgagcaacatagtgaggatcccatctctacgcccaccctccccccggcaaaaaaaaaagctgggtatggtggcttatgcctgtagtcgcagctactcagaaggctgaggtgggaggattgcttgttccccggaggttgaagctacagtgagccttgattgtgtcactgcactccagcctgggcaacaggtaagactctgtctcaaaaaaaaaaaa

SEQ ID NO: 729 - DNA, 3385 bp, Homo sapiens
  CDS (493)..(1527)
gagatttcagagaacagctttgacctcagccagaaacttaaagaagctcagagcaaatacgaggaggctatgaaagaagtccttagtgtgcagaagcagatgaaactcggtcttgtctcacctgaaagcatggataattattcacatttccacgagctgagggtcacggaagaggaaataaatgtgctaaagcaggatctgcagaatgcattagaagaaagtgaaagaaataaagagaaagtgagagagttagaggaaaaactggtagagagggagaaaggtacagtgattaagccacctgtggaagagtacgaggaaatgaaaagttcatattgctctgttattgagaatatgaataaggagaaagcatttttgtttgagaaataccaagaagcccaagaagaaatcatgtaattaaaagacacactaaaaagtcagatgacacaggaagccagtgatgaagctgaggacatgaaagaagccatgaataggatgatagatgaactcaataaacaggtgagcgagctgtcacagctgtacaaagaagcccaggctgagctggaggattacaggaagaggaaatctctagaggatgtcacagctgaatatatccataaagcagagcatgagaaactgatgcaattgacaaacgtgtccagggctaaagcagaagatgcactgtctgaaatgaagtctcagtattcaaaagtgttgaatgagttgacccagctcaaacaactggtggatgcacaaaaagagaactctgtctctatcacagaacatttgcaagtgataaccacgctgcggactgcagcaaaagagatggaagaaaaaataagcaatcttaaggaacaccttgcaagcaaggaagtggaagtagcaaagctggagaaacaactcttagaagagaaagctgctatgactgatgcaatggtacctcggtcttcctatgaaaaactccagtcatccttagagagtgaagtgagtgtgttggcatcgaaattaaaggaatctgtgaaagagaaagagaaggtccattcagaggttgtccagattagaagtgaggtctcacaggtgaaaagagaaaaggaaaatattcagactctcttgaaatccaaagagcaagaagtaaatgaacttctgcaaaaattccagcaagctcaggaagaacttgcagaaatgaaaagatactctgagagctcttcaaaactggaggaagataaagataaaaagataaatgagatgtcgaaggaagtcaccaaattgaaggaggccttgaacagcctctcccagctctcctactcaacaagctcatccaaaaggcagagtcagcagctggaggcgctgcagcagcaagtcaaacagctccagaaccagctggcggaatgcaagaaacaacaccaggaggtcatatcagtttacagaatgcatcttctgtatgctgtgcagggccagatggatgaagatgtccagaaagtactgaagcaaatccttaccatgtgtaaaaaccagtctcaaaagaagtaaagtggattccttggcaggacactgccccttgtcatctgtctttgtgttagatccagagttgtcggcagccgctgccattgttctcattcgtggtatgcactgtggcctagcgtagcttcttccctttccaaaggtttctgaggacttctcccaggagaagactgcccgcctcagaactgcttagagacttcaaaccagcagaggtgaaagtccctgtcatcccttcagattccagagctgggatcagccatgcccagaggtctggtcctgatgctggcaggggggccccctcctccatccctgactggctgagtggctttatcaccaccgagtgatgtgctgaggcctcctgcagtgaatgctccttccattcctgtactcgggcagtgccattcagcacaggagagctctttttgcctttggctttcaattccaaaacatgatttaatttctaactaaattagtatggcactagttatgaagtatctgcttaaaacccttcatcatgatatcctgtggatttaaaaactctaattccatgttttcttcccatctgccttatatatctcatcaccctgcttatcaatattcagtttgatgagcactattaactaaaatatgaaacttaaaaacaaaagcaagttgtccttaaaagttctttttttaagtaaattgttgacatactgcaaattttctatgcaaacttgcctcctgctgttatctgtgaagctcaggaaatccaaacatttgtgtttcaacaagggacagtaaactgtgtgtttacagccaaaagaaatgcctcatagttcttaacctcaacttttgtagaagtatttttttctctgtaatatttttattggctcataaagatgttttcgtatctgaactcctaaataagtgaaattacagtagattatattaacaaaatactttttaggtagccatgcttgagactttttaaaaatataactttttccttaaagttttcagctatagcaaaaggtagttatgtatgccagacctaatatgagctgccaccaacacccctagaactttcagccatggtgtcttcagaattgtagcgcatttctgaatctagcaaatcctccttttacccgttgaatgttttgaatgccctgactctaccagcgcccataaatgatctctagaaggactgttagtaccaatctgtttttcaactttgaagctaaaaaccctgatatggtaatattatggtgcatagcagaggtctcggaaaaaaaatatttctgttcactttactttcaggttaaaaatgtttctaacacgcttgcaacttcccttatggcattaatcttgttgagggagagagacagaatcctggactctccaaagtatttaactgaaagtagggcctgctctgacagggcccatgtcccacaaggctgcttggcctcagtgggtgcttggctgtgctggatgatatgttgatctgtattggataaggaccaatgacagcaaagcaaaaatggctttaaagcttggtgttacttttcttaagttgtttaattatagttaagcaatttcaaaaatgctccaaagaaatgtgaaaggaccttttgtcacagcacttcagaaaatacacaacagccccttctgcccccgcacagaaatgctgcagagtatataaaacttgagacatttttgtaggatgcctgacgaggtgtagccttttatcttgtttccggatgcatatttattacgagtactctggttaaatattgaaaagttatatgctgtagtttttagtattttgtctttgtaatttacagaagttattggagaaaataaacttgtttcattttgcaaaaaaaaaaaa

SEQ ID NO: 730 - DNA, 1774 bp, Homo sapiens
  CDS (399)..(1313)
atgcccccctactgaacgcctgtggtatatgaccgcaattcccgggtcgacccacgcgtccgcggcgactcaggaatcctgaagactctctgagcgacctggagcaccttggctgtgtccctgcctgccttcaccctcctccagtgcccccagtactgggcgtgagtccggaagtggccacaacccagcctggaccgtcgcttataaagctgtgtaaacctgtataagctcaggcgttgacagctggaaggcagctggcactggcagcccccttcattgcacctatctcccccatctcattgccacggctgaaccctccttctcaatcttggaacagcacccccttctttaaggtgaagctccccccgcagaaggaagtgatcacatcggatgagctcatggcccatcttggaaactgcctcctgtccatcaagccccaggagaagtcagagggacttcagcttaattttcagcagaatgtggatgatgcaatgacagtgctgcctaaactggccacaggtctggatgtcaatgtgcgattcacaggcgtctctgattttgagtatacacccgagtgcagtgtctttgacctgctaggcatacctctgtaccatggctggcttgttgatccacagcagagtcctgaggctgcgcgtgcagttgggaaactgagttacaaccagctggtggagaggatcatcacctgcaaacactccagtgacaccaacctcgtgacagaaggcctgattgcagagcagttcctggagaccaccgcggcccatctgacctaccacggactgtgtgagctgacagcagctgctaaggagggtgaacttagcgtctttttccgaaacaaccactttagcaccatgactaagcataagagtcacttatacctactggtcactgaccagggctttctacaggaggagcaagtcgtatgggagagcctgcacaatgtggatggagacagctgcttttgtgactctgactttcacctgagtcattccctgggcaaggggcctggagcagaaggtgggagtggctccccagaaaagcagctgcaggtagaccaggactacctgattgctctgtccctgcagcagcaacagccacgaggcccgctggggcttaccgacttggagctggcccagcagcttcagcaagaggagtatcaacagcagcaggcagcgcagccagtgcggatgcggacgcgggtcctgtcactgcaggggagaggagccacatctggacgcccagccggggagcgtcggcagaggccgaagcacgagtcagactgcattctgctgtagctctgccccagtgccaggctggcctgccccttcttccagaggctatggctagttggcttgctcccccgcctccacccctgagatgtgctggataacttatttatggactgttggggatgagagcaggcaacaaatgccaaggtcagacttggtaatgtccttgacctcacgtgctgctgccttctctgcctcccacccagggcaacactaggattggtgggtttctggttctcaactcccggtccctgaatagtcacacgtatgtacagactgaggctctggggtgaggtccctatccagaatgcatctcttctgcttcccatccctgctgcctggatgctcctgatcacctaggcaggcctgtctccagttgtttcagagcttaatttgggtttctatctcttatttgtaatgccttcctggggtttggaaataaaacttctggccgggcaaaaaaaaaa

SEQ ID NO: 731 - DNA, 1952 bp, Homo sapiens
  CDS (1)..(1413)
atggagtttgctgctgaaaatgaagggaagtctgggggaggtctccacagcgtagctgagggggtgcggctaagtccagagcctggcagggagggagtaagggacttagcaggggcggaggagttcggcggcggagaggaggggacagggctgacagggataaaggagataggggatggagaggaaggaagtggacaaaggccagaggaaataccgatggacctaacggtagtgaagcaggaaattatagactggccaggtacagaaggcaggttggctggccagtgggtagaacaggaggtggaggataggcctgaggtgaaggatgagaacgcaggcgtattggaggtgaagcaggagacggatagtagtttagtggtaaaagaagcgaaggtgggtgaaccagaggtaaaggaagagaaggtaaaggaagaggtaatggactggtcagaagtgaaggaagagaaggataacttggagataaaacaggaggagaagtttgttggtcaatgcataaaagaggaattgatgcatggagagtgtgtaaaagaagagaaggatttcctgaagaaagaaatcgtggatgatacaaaggtgaaagaagagcctccgataaatcacccggtgggctgcaagcggaaactggccatgtcaaggtgtgagacttgtggtacagaagaagcaaagtacagatgtccacgttgtatgcgatattcctgcagtttgccctgtgtaaagaaacacaaagcagaactgacatgtaatggagttcgagataaaactgcatacatttcaatacaacagtttactgaaatgaatctcctaagtgattatcgatttttggaagatgtggcaagaacagcggaccatatttctagagatgcttttttgaagagaccaataagcaataaatatatgtactttatgaaaaatcgtgcccggaggcaaggtattaacttaaaacttctacccaatggattcaccaagaggaaggagaattcaaccttttttgataagaaaaaacaacagttttgttggcatgtgaagctccagtttcctcaaagtcaagctgagtacatagaaaaaagagtaccagatgataaaactattaatgaaatcctaaaaccttacattgatcctgaaaagtctgatcctgtaattcgtcaaaggttgaaagcctacattcgctctcagactggggttcagattttaatgaagattgaatatatgcagcaaaatttagtaagatattatgaactagatccttataaaagtctcctagacaatttgaggaacaaagtgatcattgagtatccaacattacatgtggtattgaaaggatccaataatgacatgaaagttcttcaccaagtgaagagtgaatctaccaagaacgttggcaatgaaaattgagcattttttctggaagaagaaagtgaaaacttccagacaactgcagcagactctgcattgatgggctgttggctgattggggtattgtcaatgggagatcggaattttttctttgtatgaaaaataagcttaactcttttaaaaaatgtattttataacctcttgaattaattgacttgtaagacccatttattcatattaagaactctcctttgcacttgatcagcatagtacttattaggccctggctttttaatatgcttaattgcttaattccataaactgaaaactttttttttcttttttctttctttttttgagatggggtcttggagtgcaagtggtatgagcatagcttcctcaaattcctgggctcgaatggtcctctcactgcagcctcccaacaggctggtaccaccacactcagctaagtttttttttttttttttttttgggagagacagggttggcgtctttcggccaggctggtctcaaatttgtggcctcaaggaattcttccaccttaggattccaaggat

SEQ ID NO: 732 - DNA, 2962 bp, Homo sapiens
  CDS (319)..(2253)
gcacgagagctccgcagcccttgccaccttccctgcacctgccctgcccggcctcatgtaccgcgcgctgtacgcgttccgctcggcggagcccaacgcgctggcgttcgccgcgggcgagaccttcctggtgctagagcgaagcagcgcgcactggtggctggccgcgcgggcgcgcagtggtgagacgggctacgtgccgccagcctacctgcgccgcctgcaggtctaactgctgtcccctgccccccccaaggcctggagcaggatgtcctccaggccattgaccgggccatcgaggctgtacacaacacagccatgcgggatggtggcaagtacagcctggaacagcgtggagtcctccagaagctgatccaccaccggaaagagaccctgtcacgcagaggcccttcagcctccagtgttgcagttatgacctcatcaaccagtgaccaccacttggatgctgctgcagccaggcagcccaatggggtgtgtcgagctgggttcgagcggcagcacagcctacccagttctgagcatcttggggcagatggaggcctctaccagatcccacttccatcttcccagatcccaccacagcctcgccgagcagcacccaccacaccgcccccaccagtgaagcgccgagaccgcgaggccctgatggcctctgggagtggtggccacaacaccatgccctccgggggtaactctgtgtccagcggctcctcagtcagcagcacctccctggacacgctctataccagctccagcccatctgaaccaggctccagctgctcacccacacccccacctgtgccccgccgaggcacccacaccaccgtgtcccaagtccagccccctccctccaaggcatcagcacctgaaccccctgcagaagaagaagtggcaactggtacaacctcagcctctgatgacctggaagccctgggtacactgagcctggggaccacagaggagaaggcagcagctgaggcggctgtgcccaggaccattggggccgagctgatggagctggtgcggagaaacactggcctgagccacgaattatgccgggtggccatcggcatcatagtgggtcacatccaggcctcggtgccggccagctcaccagtcatggagcaggtcctcctctcactcgtagagggcaaggacctcagcatggccctgccctcagggcaggtctgccacgaccagcagaggctggaggtgatctttgcagacctggctcgccggaaggacgacgcccagcagcgcagttgggcactatatgaggatgagggtgtcatccgctgctacctagaggagctgctgcatattctgactgatgcagaccctgaagtttgcaagaaaatgtgcaagagaaacgagttcgagtctgtcctggccttggtggcctattaccaaatggaacaccgagcatcactgcggctgctgctcctcaagtgctttggcgccatgtgcagcctggatgcagccatcatctccacgcttgtgtcatccgtgctgcctgtagagctggcgagggacatgcagacagacacgcaggaccaccagaaactctgttactctgccctcatcctggccatggtcttctccatgggagaggcagtgccctatgcacactatgagcacctgggcacgcctttcgcccagttcctactgaacatcgtcgaggatgggctgcccttggacaccacagagcagctgccggacctctgcgtgaacctgcttctggctctcaacctgcacctgccagctgctgaccagaatgtcatcatggctgccctgagcaaacacgccaatgtcaagatcttctccgagaagctgttgttgctcctgaacagaggggatgaccctgtgcgcatcttcaaacatgagccacagccaccacactctgtcctcaagttcctgcaggacgtgtttggcagcccggccacagctgccatcttctaccacacagacatgatggctctcattgacatcactgtgcggcacatcgcagacctgtcaccaggagacaagctgcgcatggagtacctctccctgatgcatgctatagtccgcaccacaccctacctgcagcaccgccaccggctacccgacctgcaggccatactgcgacgcatcctgaatgaggaggagacctcaccccagtgccagatggaccgcatgattgtccgagagatgtgcaaggaattcctggtgctgggggaggctcccagctagcaccttgctgtcctcccttccctgcagctccagtcagtgtgcaggggactcaggggcttggccctaagaatgttttgcactgacagtgggaggggataaggtggcagaaggaacctgagcaggacccccacctgaagtagaacttaagagaggggccaagtgtaggattggggaccatggtctgggagctgttctggggcagggggaatatgcaagctaaagcccctctataccctggtaggcttcctcttcagcatgcccccctcttcaccccacacccatgtgtacactcagagtcctgctgccgctccaggctggaccagacccccatccccacccctcctggtctgtatcctgggcctcagcaagccatgcccctggggtgaggggaggcatctcccaccagctctattctttgccttagctttgcagtgagtgctgctcatgtcctcccctccacccgcacatgggggtcgctgcccttcactcctacccccagaggccttggccaagctgctgctttgaaagcgggatcttggagacaggccatccatcctggagcctcatggaacaggatgatggcactgagaaagccaatgaccgaatctcttttctctgtaaaaatgtagactgaaaagccatgtgtattttcctatgtgctgtagctctcctttggaaataaatcacaggcatctggaaaaaaaaaaaa

SEQ ID NO: 733 - DNA, 658 bp, Homo sapiens
  CDS (101)..(658)
taagaagaaccagcttcaggtggagaactggacacgcacagctgaccaagcgaggctacttcagaataaaattaacactgagttacaaactgaagtggcaatgttgaaatccatggttctgtggttaggagaacaggtacaaagcttgcagttgcagcagcaattgcgtcatcattttaatcacattcatatttgcgtaactaactcagaatataaccaaagtgagtatccgtgggaccttgtgaaagcccatttgcaaggagctttcacatccaacatcacctttgatattagtgaattacaaaacaaaattcttgatttaaataggcacactcaagaatttcagccttctttagaagactggactgaattccaggaaggcctggagagcctcaacccttggacctatctaaagtaccacagtaacatcttatatgtagttcttggagtaatgttgttttgtctctgtcttctgtttatagtctgtaaaatcggatggaccgccaatcggagaatgagagctgcccagcctggtcttacattctttcaattaattcataaacagggggatatgcagggagccgaaggcccatgggacgtgaccaactcagcattccactggaggctatatgatcaaacagcaaactgtttatcatga

SEQ ID NO: 734 - DNA, 1819 bp, Homo sapiens
  CDS (259)..(1578)
ccgttgagatgatgttataactatctattcgatgatgaagataccccaccaaacccaaaaaaagagatctctcgaggatccgaattcgcggccgcgtcgacgcagcagcgaaggtggcggcggcagcagcggcagcggctatggtgtggtcgctcgattctcccagtgcctggctgagtttcggacgtggttaagaaccaactggttgaggttcaatgcagacaagacggatgtgatgctgtagaaaatgtgcatcagatgtttatgtttaattggtttacagactgtctgtggactcttttcctgtcaaattaccagccatctgttgaatcttcaagtccaggaggttcagcaacatcagatgaccatgaatttgatccatcagctgacatgctggttcatgattttgatgatgaacgaacattagaagaggaagaaatgatggaaggagaaacaaacttcagctctgaaatagaagatcttgcaagggaaggcgacatgccaattcatgaacttctcagcctttatggttatggtagtactgttcgactacctgaagaagatgaggaagaggaagaagaggaagaagaaggtgaagatgatgaagatgctgataatgatgacaacagtggctgtagtggggaaaataaagaggagaatataaaggattcatcaggtcaggaggatgaaactcagtcttccaatgatgatccatcacaatctgttgcttctcaagatgcccaggaaataatccgcccacgtcgatgtaaatattttgatacaaatagtgaagtagaagaagaatctgaagaagatgaagattatattccatcagaagactggaaaaaggagattatggtgggctccatgtttcaagcagaaattccagttggcatttgtagatacaaagaaaatgaaaaagtatatgaaaatgatgatcagctcctgtgggaccctgagtacttaccagaagataaagtgattatatttcttaaagatgcatctagaagaacaggtgatgagaagggtgtagaagcaattcctgaaggatctcacataaaagacaatgaacaggctttatatgaattggttaaatgcaattttgatacagaagaagcattgagaagattaagatttaatgtaaaagcagctagagaggaattatctgtttggacagaggaagagtgtagaaattttgaacaagggctgaaggcctatggaaaggattttcatttgattcaggctaataaagtccgaacaaggtcagttggtgaatgtgtagcattctattacatgtggaaaaaatctgaacgttatgatttctttgctcagcaaacacgatttggaaagaagaaatataatcttcatcctggtgtaacggattacatggatcgtcttctagacgaaagtgaaagtgctgcatctagtcgagcacaatcccctcccccaactgcatcaaacagtagtaacagccagtctgagaaagaagatggcactgtaagcactgctaatcaaaatggtaagcaaccagagaaacatttctctttcttcataataagggacactttcttgcagtgacttgggaaattccgtttgggtttctattaaacttccagagcagaaagtaaaaaatgataacacatgagacaaacataacatcagcatacatatatactaacagaatacaaagtgattggacatcactaaaaagtaattttaataaagcctactgtcaacagtgactatttcttgtaagaaatttgttctttttcagcggacgcgtgggtcgacccgggaattccggaccggtacctgcagg

SEQ ID NO: 735 - DNA, 2537 bp, Homo sapiens
  CDS (225)..(1568)
taagcttgcggccgccgcccgcccaccgcgcgctcgcttgaccgcggcgcccgcccccggccgcccccgcccgtccccctgccgcgatgccctcccttcggggccccggcggcccgcgcccctgctaggctgcggcggcatggcccgcgcgcccggcgcgacctctgcggattgcatcggtgtgtggcggcggggcatgcccagagcaccgggcacggccttcaatgggcgaggacacggacacgcggaaaattaaccacagcttcctgcgggaccacagctatgtgactgaagctgacatcatctctaccgttgagttcaaccacacgggagagctgctggccacaggtgacaagggcggccgggtcgtcatcttccagcgggaaccagagagtaaaaatgcgccccacagccagggcgaatacgacgtgtacagcactttccagagccacgagccggagtttgactatctcaagagcctggagatagaggagaagatcaacaagatcaagtggctcccacagcagaacgccgcccactcactcctgtccaccaacgataaaactatcaaattatggaagattaccgaacgagataaaaggcccgaaggatacaacctgaaggatgaagaggggaaacttaaggacctgtccacggtgacgtcactgcaggtgccagtgctgaagcccatggatctgatggtggaggtgagccctcggaggatctttgccaatggccacacctaccacatcaactccatctccgtcaacagtgactgcgagacctacatgtcggcggatgacctgcgcatcaacctctggcacctggccatcaccgacaggagcttcaacatcgtggacatcaagccggccaacatggaggaccttacggaggtgatcacagcatctgagttccatccgcaccactgcaacctcttcgtctacagcagcagcaagggctccctgcggctctgcgacatgcgggcagctgccctgtgtgacaagcattccaagctctttgaagagcctgaggaccccagtaaccgctcattcttctcggaaatcatctcctccgtgtccgacgtgaagttcagccacagcggccgctacatgctcacccgggactaccttacagtcaaggtctgggacctgaacatggaggcaagacccatagagacctaccaggtccatgactaccttcggagcaagctctgttccctgtacgagaacgactgcattttcgacaagtttgaatgtgcctggaacgggagcgacagcgtcatcatgaccgggacctacaacaacttcttccgcatgttcgatcggaacaccaagcgggacgtgaccctggaggcctcgagggaaagcagcaagccccgggctgtgctcaagccacggcgcgtgtgcgtggggggcaagcgccggcgtgatgacatcagtgtggacagcttggacttcaccaagaagatcctgcacacggcctggcacccggctgagaacatcattgccattgccgccaccaacaacctgtacatcttccaggacaaggtaaactctgacatgcactaggtatgtgcagatcccggcccctgccacccagcctcatgcaagtcatccccgacatgaccttcacgaccgcaatgcaaggaggggaagaaagtcacagcactgatgaggacagctgcagaggtggcagtgtgtggacacaggaagtttgggccccctccctgccccagctttcctaggccagaattgtgtttggcagtaattgtctgtttaaaaaaataaaaaggagaggaagcgttcaccgccacaaatcataaaatggacatgactgtggagtcttacagttcagggttctttcattcacgtcccttcctgtctcggtctgcggtctttaccacatcaataggactttttatgcgtccgggttaatttttcactccagtgtgtcctgttgcagggaccggagctgatgggagctgcttctcccccatgcctcactggtcccagatcagggctccagggacagatgatgagtctcaaacgagccagccaggggttcttttggttataaatggggcaattcgccctgtctcagagctgatgacctcaccgttgttttttggatggtgaattcatgctgagaatttgcagatgcaagctcctctcctaggtcttctgaatgtcttgaaacatcccaggtcccaggtctggtgcggtttcccgagaggagcggagtggggtttgtcttctgtgtgcctgtgtcctcatctgattcacctgccatttgctgagcctctgctgtgtaccaggcgtggtgctcagccctagaggcagttgacttaccccctgcagccctccctgccgcctcacccttcagcattcactgggcaccttcccggagcggacactgactcccatgcacgattttttggaatcttcctcctgactgtgaggtgggtgttcattcatttcctccataaacaccaacttctcgaagcgtgccaggctctgggctggatgctggggataagc

SEQ ID NO: 736 - DNA, 2103 bp, Homo sapiens
  CDS (132)..(554)
gtgaggtcccgctccggaattcccgggtcgacccacgcgtccgcaaatgaaagacacaagccaataaagccagtgagaaaggagcttaccaaaggcagtgtacgaagaaggttcctgggagactgtcagaaatgagtttttcactgaacttcaccctgccggcgaacacaacgtcctctcctgtcacaggtgggaaagaaacggactgtgggccctctcttggattagcggcgggcataccattgctggtggccacagccctgctggtggctttactatttactttgattcaccgaagaagaagcagcattgaggccatggaggaaagtgacagaccatgtgaaatttcagaaattgatgacaatcccaagatatctgagaatcctaggagatcacccacacatgagaagaatacgatgggagcacaagaggcccacatatatgtgaagactgtagcaggaagcgaggaacctgtgcatgaccgttaccgtcctactatagaaatggaaagaaggaggggattgtggtggcttgtgcccagactgagcctggaatgatgcagctcagtcaaggagcagcagacctggcactggaacagggttgaaaacccagggttttgtacttggagaggaaagatgccaagctgcttcttaatcaatccaaatttcatttacagctctggaacactttggggctgatttgtctctttaggggacatccccaacatggttaattccaactctcagatcttgtgctttagttagtacatgtgactcaccagatggggtccttagatcctattcctgctcccagtgggaatttgcttttctttgtcattttgggaaaggggcttggtttctgagtgtcttgccttctcatctttttttttcatatcctttttctcaaaaaagccatcagatctgactttcatggaagtgttgctgaggtcagcctggtgcaagttgggatacaaatgaaacttatgcaggatgtgtgagaggaagcagttaattgtttctgaatatctcagggtaggaaccatgtggagccacacattccctgaccacagggaagcacctggctcaatcatgtcacacagcagtggaaagaatacggactcttaagtcacacctaccactgagcagctgtacgactttggagaagttgtttaacattttcaagcctcagtttttgcttttttaaaggaggggaaatatttgcctcatgtcataattgaaaagattaaataagaaataaagggaagtgtctgctacttagttgccagtcaaaatgttagttctctctctctaccaccttcttcctacctcttcccatattgcttgcctgataaaacagctaatcaccagcatttgttccccatagtcacagggccacacaagggaacatttaggacaaactttctccatggcctatgatccaaattgttatctaaagatgattctaggtgttgctggtagtatgtgaatcttccaatctaggtgtgatcgtgtcctcatatgaatcaggaaaaggcagtttcttacaagttccgaattccaaatacagagactggtggtgttacatttaaccttaaagatgttaatgttgatggaaattcatgtttcatattaaaacaacactttgtctttacaatgaaacattttgcttaatttttaaagtaagacattatgatacctctgatggcagttcctcaaataactttaacttttgtgctttagggatagttgttaaagttacaacttcttttattttattttttaaaggcttcagattaaacaagagcccttaagcccacgcatagcattgccgcttcagcttgctgaggactgtctccaaggaggccaaatggaaaaggagaggctacttcaagtggtgttggcccattgagcctattgggcaaactataaccaggttgccttattttgggtggattactccaggagaggccaccctccagctttctcttatcccagtaactcctcttcccattttccaatccatccccagccatttttttttttcttctgtactcttcttttgccttcaatatgagtttcatttcctctgtgtctttgggcagac

SEQ ID NO: 737 - DNA, 1027 bp, Homo sapiens
  CDS (458)..(901)
gctggcccatggctgagacctctctcccagagctggggggagaggacaaagccacgccttgccccagcatcctggagctggaggagctcctgcgggcagggaagtcttcttgcagccgtgtggacgaagtttggcccaaccttttcataggagatgcagctggtccttactccctgccatggggctctgccactttgccaccctggcactgatcctgctggtgctgctggaggctctggcccaggcggacacacagaagatggtggaagcccagcgtggggtcggccctagagcctgctactccatctggctccttctggcgcctacaccccctctcagccactgtcttcagtctccacagaaacagcatcaagtgtgcggagacaggcggctgaaagccggcatcacgaactgcccgtcagagaagtgcacagcctgggccagatactcccacaggatggactcactgcagaagcaggacctccggaggcccaagatccatggggcagtccaggcatctccctaccagccgcccacattggcttcgctgcagcgcttgctgtgggtccgtcaggctgccacactgaaccatatcgatgaggtctggcccagcctcttcctgggagatgcgtacgcagcccgggacaagagcaagctgatccagctgggaatcacccacgttgtgaatgccgctgcaggccgcgtgctggtacactgtgccatgggggtaagccgctctgccacacttgtcctggccttcctcatgatctatgagaacatgacgctggtagaggccatccagacggtgcaggcccaccgcaatatctgccctaactcaggcttcctccggcagctccaggttctggacaaccgactggggcgggagacggggcggttctgatctggcaggcagccaggatccctgacccttggcccaaccccacccagcctggccctgggaacagcaggctctgctgtttctagtgaccctgagatgtaaacagcaagtgggggctgaggcagaggc

SEQ ID NO: 738 - DNA, 583 bp, Homo sapiens
  CDS (105)..(518)
aaggatccttaattaaattaatcccccccccccccccccccagtggttccgggtaggagctaggtgaccctcggctgctgcagggatctgcagcgactgcagccatgggggcgcacctggtccggcgctacctgggcgatgcctcggtggagcccgaccccctgcagatgccaaccttcccgccagactacggcttccccgaacgcaaggagcgcgagatggtggccacacagcaggagatgatggacgcgcagctgaggctccagctgcgggactactgcgcccaccacctcatccggctgctcaagtgcaagcgtgacagcttccccaacttcctggcctgcaagcaggagcggcacgactgggactactgcgagcaccgcgactatgtgatgcgcatgaaggagtttgagcgggagcggaggctgctccagcggaagaagcggcgggagaagaaggcggcagagttggccaaaggccagggacccggggaagtggaccccaaggtggccctgtagggggtgcaccccccaccctatggaccagtcaaataaaagccttcaggcccctcaaaaaaaaaaaa

SEQ ID NO: 739 - DNA, 535 bp, Homo sapiens
  CDS (105)..(470)
aaggatccttaattaaattaatcccccccccccccccccccagtggttccgggtaggagctaggtgaccctcggctgctgcagggatctgcagcgactgcagccatgggggcgcacctggtccggcgctacctgggcgatgcctcggtggagcccgaccccctgcagatgccaaccttcccgccagactacggcttccccgaacgcaaggagcgcgagatggtggccacacagcaggagatgatggacgcgctgctcaagtgcaagcgtgacagcttccccaacttcctggcctgcaagcaggagcggcacgactgggactactgcgagcaccgcgactatgtgatgcgcatgaaggagtttgagcgggagcggaggctgctccagcggaagaagcggcgggagaagaaggcggcagagttggccaaaggccagggacccggggaagtggaccccaaggtggccctgtagggggtgcaccccccaccctatggaccagtcaaataaaagccttcaggcccctcaaaaaaaaaaaa

SEQ ID NO: 740 - DNA, 3897 bp, Homo sapiens
  CDS (75)..(3800)
gaccgttagtgaggcggttgctgagacagacgctgaggcgggtaggaggagcccgagccgtaagggaagccgtgatgagggccgtgttgacgtggagagataaagccgagcactgtataaatgacatcgcatttaagcctgatggaactcaactgattttggctgccggaagcagattactggtttatgacacctctgatggcaccttacttcagcccctcaagggacacaaagacactgtgtactgtgtggcatatgcgaaggatggcaagcgctttgcttctggatcagctgacaaaagcgttattatctggacatcaaaactggaaggcattctgaagtacacgcacaatgatgctatacaatgtgtctcctacaatcctattactcatcaactggcatcttgttcctccagtgactttgggttgtggtctcctgaacagaagtctgtctccaaacacaaatcaagcagcaagatcatctgctgcagctggacaaatgatggtcagtacctggcgctggggatgttcaatgggatcatcagcatacggaacaaaaatggcgaggagaaagtaaagatcgagcggccggggggctccctctcgccaatatggtccatctgctggaacccttcaagccgatgggagagtttctggatgaacagagagaatgaggatgccgaggatgtcattgtcaacagatatattcaggaaatcccttccactctgaagtcagcagtgtacagtagtcagggtagtgaggcagaggaggaagaaccagaggaagaggacgacagtcccagggacgacaacttagaggaacgtaatgacatcctggctgtggctgactggggacagaaagtttccttctaccagctgagtggaaaacagattggaaaggatcgggcactgaactttgacccctgctgcatcagctactttactaaaggcgagtacattttgctggggggttcagacaagcaagtatctcttttcaccaaggatggagtgcggcttgggactgttggggagcagaactcctgggtgtggacgtgtcaagcgaaaccggattccaactatgtggtggtcggctgccaggacggcaccatttccttctaccagcttattttcagcacagtccatgggctttacaaggaccgctatgcctacagggatagcatgactgacgtcattgtgcagcacctgatcactgagcagaaagttcggattaaatgcaaagagcttgtcaagaagattgccatctacagaaatcgattggctatccaactgccagagaaaatcctcatctatgagttgtattcagaggacttatcagacatgcattaccgggtaaaggagaagattatcaagaagtttgagtgcaacctcctggtggtgtgtgccaatcacatcatcctgtgccaggagaaacggctgcagtgcctgtccttcagcggagtgaaggagcgggagtggcagatggagtctctcattcgttacatcaaggtgatcggtggccctcctggaagagaaggcctcttagtggggctgaagaatggacagatcctgaagatcttcgtggacaatctctttgctatcgtcctgctgaagcaggccacagctgtgcgctgcttggacatgagtgcctcccgtaagaagctggccgtggtagatgaaaatgacacttgcctggtgtatgacatcgacaccaaggagctgctttttcaggaaccaaacgccaacagtgtagcttggaacacccagtgtgaggacatgctctgcttctcgggaggaggctacctcaacatcaaagccagcaccttccctgtgcaccggcagaagctgcagggctttgtggtcggctacaatggctccaagatcttctgcctccatgtcttctccatttctgccgtggaggtgccgcagtccgctcccatgtaccagtacctggataggaaactgttcaaggaagcctaccagattgcttgcttgggtgtcacagacactgattggcgtgaactggccatggaagcgctagaaggtttagattttgaaacagcaaagaaggccttcatcagagtacaagacctccgatatttagagctcatcagcagcattgaggagaggaagaagcggggagagaccaacaatgacctgtttctggcagatgtgttttcctaccaggggaagttccatgaggccgccaaactgtacaagaggagtgggcacgagaacctcgcgcttgaaatgtacaccgacctctgcatgtttgagtatgccaaggatttccttggatctggagaccccaaagaaacaaagatgctaatcaccaaacaggctgactgggccagaaatatcaaggagcccaaagccgccgtggagatgtacatctcagcaggagagcacgtcaaggccatcgagatctgtggtgaccatggctgggttgacatgttgatcgacatcgcccgcaaactggacaaggctgagcgcgagcccctgctgctgtgcgctacctacctcaagaagctggacagccctggctatgctgctgagacctacctgaagatgggtgacctcaagtccctggtgcagctgcacgtggagacccagcgctgggatgaggcctttgctttgggtgagaagcatcctgagtttaaggatgacatctacatgccgtatgctcagtggctagcagagaacgatcgctttgaggaagcccagaaagcgttccacaaggctgggcgacagagagaagcggtccaggtgctggagcagctcacaaacaatgccgtggcggagagcaggtttaatgatgctgcctattattactggatgctgtccatgcagtgcctcgatatagctcaagatcctgcccagaaggacacaatgcttggcaagttctaccacttccagcgtttggcagagctgtaccatggttaccatgccatccatcgccacacggaagatccgttcagtgtccatcgtcctgaaactcttttcaacatctccaggttcctgctgcacagcctgcccaaggacaccccctcgggcatctctaaagtgaaaatactcttcaccttggccaagcagagcaaggccctcggtgcctacaggctggcccggcacgcctatgacaagctgcgtggcctgtacatccctgccagattccaaaagtccattgagctgggtaccctgaccatccgcgccaagcccttccacgacagtgaggagttggtgcccttgtgctaccgctgctccaccaacaacccgctgctcaacaacctgggcaacgtctgcatcaactgccgccagcccttcatcttctccgcctcttcctacgacgtgctacacctggttgagttctacctggaggaagggatcactgatgaagaagccatctccctcatcgacctggaggtgctgagacccaagcgggatgacagacagctagagattgcaaacaacagctcccagattctgcggctagtggagaccaaggactccatcggagatgaggacccgttcacagctaagctgagctttgagcaaggtggctcagagttcgtgccagtggtggtgagccggctggtgctgcgctccatgagccgccgggatgtcctcatcaagcgatggcccccacccctgaggtggcaatacttccgctcactgctgcctgacgcctccattaccatgtgcccctcctgcttccagatgttccattctgaggactatgagttgctggtgcttcagcatggctgctgcccctactgccgcaggtgcaaggatgaccctggcccatgaccagcatcctggggacggcctgcaccctctgcccgccttggggtctgctgggctgtgaaggagaataaagagttaaactgtcaaaaaaaaaaaaaaa

SEQ ID NO: 741 - DNA, 1802 bp, Homo sapiens
  CDS (87)..(1139)
tgtccagtccggcggaattacgcggagacacgagcgccgatcgattcgagggagcacgccccggcaggcaagcgtttgcctccgccatgaaccccaggggcctgttccaggacttcaaccccagtaaggttctcatctacacctgcctgctgctcttctcggggctgctgcccctccgcctggacggcatcatccaatggagctactgggccgtctttgcccccatatggctgaggaagcttctagtcgtcgcaggcgcctccgtgggcgcgggcgtttgggcccgcaaccctcgctaccgcaccgagggagaggcctgtgtggagatcaaagccatgctgatcgctgtgggcatccacctgctgctgctcatgttcgaagtcctggtctgcgacagggtggagaggggcacccacttctggctgctggtcttcatgcctctcttcttcgtgtcccccgtgtccgtggctgcctgcgtctggggctttcgacacgataggtcgctggagctggagatcctgtgctcggtcaacatcctgcagttcatcttcatcgccctaaagctggacaggattattcactggccgtggctggtggtgtttgtgcccctgtggatcctcatgtcgttcctttgcctggtcgtcctctattacatcgtctggtccctcctgttcctgcggtccctggatgtggttgccgagcagcggagaacacacgtgaccatggctatcagttggataacgattgtcgtgcctctgctcacttttgaggtcctgctggttcacagattggatggccacaatacattctcctacgtctccatatttgtccccctttggctttccttactaactttaatggccacaacatttaggcgaaaggggggcaatcattggtggtttggcattcgcagagacttctgtcagtttctgcttgaaattttcccatttttaagagaatatgggaacatttcatatgatctccatcacgaagatagtgaagatgctgaagaaacatcagttccagaagctccgaaaattgctccaatatttggaaagaaggccagagtagttataacccagagccctgggaaatacgttcccccccctcccaagttaaatattgatatgccagattaaactcctagagaggacccaggcacacacagactccacttggccttcgcctcttgttcattcatcccaaacctggaaatggaaacaggcttcaaacactcgtctcacgccgtgtttgagatcaccgcctcatcagtatgcatcatagatggaggtggtttcagtatgtgggtgtgtgtggtgtgtacctgggtaagagacttgctttccaggttcgcactttcaggtgtagctgggggcagtaagtcgaattgttttagtaggtcctcaaaaggaataaccacacagctgtttgtttaaatgctactgtacctatcaaaactattgtttaaaaagtatttttatacactgctaatctaaaattgtatttcagattgtgcctgtcataacaatagcaaatgtaaaaagttctctttcccaccacttgtttataaacctcatagttgatatttttagtgttcctactgttaaaatactctctccttgggctttgctgatactggtctttaatattctgataggtgaatttttctaatggaatgaacccatgcatatatagtatttatatgaatattttagcagtgtaatatgttgaattctagttctctgcattaccattattacgttaaagtattttttaaagcttaggtgtgaaaaaaaaaaaaa

SEQ ID NO: 742 - DNA, 1413 bp, Homo sapiens
  CDS (21)..(740)
gtggtgtcgtacatgacacaatgacgtgtttcgggccatatcctattggaactggacttcagggaataaccttgtgttatagttgttttccctccttctgcaagatgaaaagcaggatgtgcatggctatcagcatttgtcagacgctttccatgttgagttttgtggtctgtgctttcaggtacaggcatatgttcaaaaggggttggccaatgggtacatgttgtttgtttctgcccacagctgccccagtgctcagctgtgaagctgcaacacagactgaaaggagactggatctggctgcagtgactctgaggagaggcttgagatctagagcttcgcgatgcagaccgcggtctttgatagattacaaatcctacatggacaccaagctgctggtggcgaggttcctggagcagtcctcttgtaccatgaccccagacatccatgaacttgtagaaaacattaaatctgttttgaaatctgatgaggagcacatggaggaagccatcacaagtgccagttttctagaacagataatggccccattgcagcccagcacatccagggcccacaagctgcccttgcggagacagcctggcctgctgcacctccagagctgcggcgaccttcacaccatcacaccagcggggaggccccgagccgagaggaggccccggcgagtggaggctgagcggtcacacagcctcattggggtcatccgagagactgtcctgtgaaccctggaagacagaaggtcactccaaggggaaggatccctctcctctctgtcatgtcttggatgggagctgtggcccacctcaaaaaaaaaggagcactctggacacgtgttcccacctgttgggtcccgtgtctgctgactgagggcattcaggagtaaatgcacaggtcggtccaggcccgtctgggtttgggatgcactgagttggaggttatgaaagctttgatcctcttcttcctctgctgggcctcgcagcattcccaagggtcacatgccctggcatgggcagaaactgggctaatgattctttgcccacttcacccctcgtgtctctctttgttgctaagttctttccctcttggaaggacagatctgccgggctgctatttatagttgcctttggcctttcactgctctgcgatttggcaggaaataaggcgattaaccctatgtgtccacaagcctcaagccttgtttcaggtcaccctcaaatcacactctctttaggcaaaacaggaaacttcttaagtgacaaattttaatgccagacatttaaggagaggattattgttgattccatttactcatgcttgcaaaactagagacccctaaggcagaactgagaataaacatgtttactttgggccactgggcttgatgtgtaaaaaaaa

SEQ ID NO: 743 - DNA, 1711 bp, Homo sapiens
  CDS (338)..(1051)
atcgagaatcactagtccagtgcggtggaattccgataacacaagtcagtacaacgtccttgaggacgtttgggacaaaggtatagtcaaagtgatcagagcattacattcatctgacaagtcttgtctctcttcagccccttcctctcttaattgactacttcatcctcgctccttggaacatcctttcattggtcagccacatttttcctgcttggcccatccatccccatctatttgtcataccccatgaaacttaacctcattatggtttgcattctggattctcctctccaccatctggctttaccttgggggtggtgtcgtacatgacacaatgacgtgtttcgggccatatcctattggaactggacttcagggaataaccttgtgttgttttccctccttctgcaagatgaaaagcaggatgtgcatggctatcagcatttgtcagatgctttccatgttgagttttgtggtctgtgctttcaggtacaggcatatgttcaaaaggggctggccaatgggtacatgttgtttgtttctgcccacagctgccccagtgctcagctgtgaagctgcaacacagactgaaaggagactggatctggctgcagtgactctgaggagaggcttgagatctagagcttcgcgatgcagaccgcggtctttgatagattacaaatcctacatggacaccaagctgctggtggcgaggttcctggagcagtcctcttgtaccatgaccccagacatccatgaacttgtagaaaacattaaatctgttttgaaatctgatgaggagcacatggaggaagccatcacaagtgccagttttctagaacagataatggccccattgcagcccagcacatccagggcccacaagctgccctcgcggagacagcctggcctgctgcacctccagagctgcggcgaccttcacaccttcacaccagcggggaggccccgagccgagaggaggccccggcgagtggaggctgagcggccacacagcctcattggggtcatccgagagactgtcctgtgaaccctggaagacagaaggccactccaaggggaaggatccctctcctctctgccatttcttggctgggagctgtggtccacctcaaaaaaaaggagcactctggaggacacgttttcccacctgttggctcccgtgtctgctgactgagggcattcaggagtaaatgcacaggtcggtccaggcccgtctgggtttgggatgcactgagttggaggttatgaaagctttgatcctcttcttcctctgctgggcctcgcagcattcccaagggtcacatgccctggcatgggcagaaactgggctaatgattctttgcccacttcacccctcgtgtctctctttgttgctaagttctttccctcttggaaggacagatctgccgggctgctatttatagttgcctttggcctttcactgctctgcgatttggcaggaaataaggcgattaaccctatgtgtccacaagcctcaagccttgtttcaggtcaccctcaaatcacactctctttaggcaaaacaggaaacttcttaagtgacaaattttaatgccagacatttaaggagaggattattgttgattccatttactcatgcttgcaaaactagagacccctaaggcagaactgagaataaacatgtttactttgggccaaaaaaaaa

SEQ ID NO: 744 - DNA, 453 bp, Homo sapiens
  CDS (90)..(407)
ccaatgatgaccattagtccatgcggtggaattcggaggaagcgagaggcatctaagcaggcagtgttttgccttcaccccaagtgaccatgagaggtgccacgcgagtctcaatcatgctcctcctagtaactgtgtctgactgtgctgtgatcacaggggcctgtgagcgggatgtccagtgtggggcaggcacctgctgtgccatcagcctgtggcttcgagggctgcggatgtgcaccccgctggggcgggaaggcgaggagtgccaccccggcagccacaagatccccttcttcaggaaacgcaagcaccacacctgtccttgcttgcccaacctgctgtgctccaggttcccggacggcaggtaccgctgctccatggacttgaagaacatcaatttttaggcgcttgcctggtctcaggatacccaccattcttttcctgagcaca

SEQ ID NO: 745 - DNA, 1735 bp, Homo sapiens
  CDS (473)..(1201)
cccgggtcgacccacgcgtccggcggcgctcggctcggctcgggcatttccgcctctttgttttaaactccggacgggcttttttctcctcctcttgggggggacccagagggagcggcgccccctcccccctccggcgcggaccccgcgtgcgccttgctcgcccgcagccccgagaccgcaggcgtcacaatgtagcagggaccccaggcgtcgtgctcagaaaatggaaaaagagccagggccggaaggagggtgcagaagcgagtccgcgtgcggagccaggaggcagcgtcgcgtgggagtgctggcctgaagcctccatgccccggcagagggacggacacgcggacgtctagcggaggctcccgtgtcctcagtatgcatcaggtctcccgaacctcacagccccgcagggaggaggagaaggggaggatttgactttggaagtctctgtgaccagaagccaaagatgttgaccaggaagatcaagctgtgggacatcaacgcccacatcacctgccgcctgtgcagcgggtacctcatcgacgccaccacggtgaccgagtgtctgcacaccttctgcaggagctgcctggtgaagtacctggaggagaacatcacctgccccacctgcaggattgtgatccaccagagccaccccctgcagtacatcggtcatgacagaaccatgcaagatattgtttacaaattggtaccaggcctccaagaagcggaaatgagaaagcagagggagttctatcacaaattgggcatggaggtgccgggagacatcaagggggagacctgctctgcaaaacagcacttagattcccatcggaatggtgaaaccaaagcagacgacagttcaaacaaagaggccgcggaggagaagccggaggaggacaacgactaccaccgcagcgacgagcaggtgagcatctgcctggagtgtaacagcagcaaactgcgcgggctgaagcggaagtggatccgctgctcagcccaggcgaccgtcttgcatctgaagaagttcatcgccaaaaaactcaacctttcatcctttaacgagctggacattttatgcaacgaggagatcctgggcaaggaccacacactcaagttcgtggttgtcactaggtggagattcaagaaggcgccgctcctgctgcactacagacccaagatggacttgctgtgaatggtgccacacagcgcccacagactgggccctcgcacccttgggtgctcccggccgccgcgcttaagaacattgcctctgggtgtcatgtggaccagacttctgaatagagaatatttataacttttgtatgagagagaattcacactcaacaagacactaccagcaccacgtttacagaggatgaaaacacttcacagtctcccagagccgatcgtcctctcccccgccccaccccgtgcttcagccttgcagggagagtgatgctccaggcaacacggttctgagtcaccttctgacacgagctccctctgcttgctttccaggtcttgaaaatctgaattcacttcagtttagtttatgaattttaggtttcatgataagcctcaattgtagttggacttttattgaatccttcctaagttattgaaaaaatgtcttttcatggtgaatgacaatatttatgttgcctttagcttcttgaagatttagaagttatataaaaaattaatttaaaagcaaaaaaaaaaaaaa

SEQ ID NO: 746 - DNA, 1185 bp, Homo sapiens
  CDS (6)..(1139)
gcggtatgccgcacgaggtggtacgcgatgagaacagcagcgtctacgccgaggtctcccggctgctcctcgccaccggccactggaagaggctgcggcgagacaaccccagattcaacctgatgctgggagagaggaatcggctgcccttcgggagactgggtcacgagcccgggctggtacagttggtgaattactacaggggtgctgacaaactgtgtcgcaaagcttctttagtgaagctaatcaagacaagccctgaactggctgagtcctgcacatggttccctgaatcttatgtgatttatccaaccaatctcaagactccagttgctccagcacagaatggaattcagccaccaatcagtaactcaaggacagatgaaagagaattctttctcgcctcttataacagaaagaaagaggatggagagggcaacgtttggattgcaaagtcatcagccggtgccaaaggtgaaggcattctcatctcctcagaggcttcagagcttctcgatttcatagacaaccagggccaagtgcacgtgatccagaaatatcttgagcaccctctgctgcttgagccaggtcatcgcaagtttgacatccgaagctgggtcttggtggatcatcagtataatatctacctctatagagagggtgtgcttcggactgcttcagaaccatatcatgttgataatttccaagacaaaacctgccatttgaccaatcactgcattcaaaaagagtattcaaagaactacgggaagtatgaagaaggaaatgaaatgttcttcaaggagttcaatcagtacctaacaagtgctttgaacattaccctagaaagtagtatcttactacaaatcaaacatataataaggaactgcctcctgagcgtggagcctgccattagcaccaagcacctcccttaccagagcttccagctcttcggctttgacttcatggtcgacgaggagctgaaggtgtggctcattgaggtcaacggtgcccctgcatgtgctcagaagctctatgcagaactgtgccaaggcatcgtggacatagccatttccagtgtcttcccacccccagatgtggagcaacctcagacccagccagctgccttcatcaagctgtgacagagggcactccctgctgccttggaaaaagcacggtgtactgctc

SEQ ID NO: 747 - DNA, 1986 bp, Homo sapiens
  CDS (251)..(913)
aaggatccttaattaaattaatcccccccccccggtagtccccgcctcttccccaggggccgcgtcggagcctcggcggcggcggcggtgcttacagcctgagaagagcgtctcgcccgggagcggcggcggccatcgagacccacccaaggcgcgtccccctcggcctcccagcgctcccaagccgtagcggccgcgccccttcagctagctcgctcgctcgctctgcttccctgctgccggctgcgccatggcgttggcgttggcggcgctggcggcggtcgagccggcctgcggcagccggtaccagcagttgcagaatgaagaagagtctggagaacctgaacaggctgcaggtgatgctcctccaccttacagcagcatttctgcagagagcgcagcatattttgactacaaggatgagtctgggtttccaaagcccccatcttacaatgtagctacaacactgcccagttatgatgaagcggagaggaccaaggctgaagctactatccctttggttcctgggagagatgaggattttgtgggtcgggatgattttgatgatgctgaccagctgaggataggaaatgatgggattttcatgttaacttttttcatggcattcctctttaactggattgggtttttcctgtctttttgcctgaccacttcagctgcaggaaggtatggggccatttcaggatttggtctctctctaattaaatggatcctgattgtcaggttttccacctatttccctggatattttgatggtcagtactggctctggtgggtgttccttgttttaggctttctcctgtttctcagaggatttatcaattatgcaaaagttcggaagatgccagaaactttctcaaatctccccaggaccagagttctctttatttattaaagatgttttctggcaaaggccttcctgcatttatgaattctctctcaagaagcaagagaacacctgcaggaagtgaatcaagatgcagaacacagaggaataatcacctgctttaaaaaaataaagtactgttgaaaagatcatttctctctatttgttcctaggtgtaaaattttaatagttaatgcagaattctgtaatcattgaatcattagtggttaatgtttgaaaaagctcttgcaatcaagtctgtgatgtattaataatgccttatatattgtttgtagtcattttaagtagcatgagccatgtccctgtagtcggtagggggcagtcttgctttattcatcctccatctcaaaatgaacttggaattaaatattgtaagatatgtataatgctggccattttaaaggggttttctcaaaagttaaacttttgttatgactgtgtttttgcacataatccatatttgctgttcaagttaatctagaaatttattcaattctgtatgaacacctggaagcaaaatcatagtgcaaaaatacatttaaggtgtggtcaaaaataagtctttaattggtaaataataagcattaattttttatagcctgtattcacaattctgcggtaccttattgtacctaagggattctaaaggtgttgtcactgtataaaacagaaagcactaggatacaaatgaagcttaattactaaaatgtaattcttgacactctttctataattagcgttcttcacccccacccccacccccaccccccttattttccttttgtctcctggtgattaggccaaagtctgggagtaaggagaggattaggtacttaggagcaaagaaagaagtagcttggaacttttgagatgatccctaacatactgtactacttgcttttacaatgtgttagcagaaaccagtgggttataatgtagaatgatgtgctttctgcccaagtggtaattcatcttggtttgctatgttaaaactgtaaatacaacagaacattaataaatatctcttgtgtagcaccttttactgtaaaaaaaaaaaa

SEQ ID NO: 748 - DNA, 1514 bp, Homo sapiens
  CDS (103)..(1374)
cttgaaaaccttggacgcctgcaggtaccggtccggaattcccgggtcgacccacgcgtccgggcggggtccaggtggaggtcttgaggctatcagatcggtatggcattggcgtccgggcccgcaaggcgggcgctagctggctccgggcagctcggccttgggggcttcggggccccgagacgcggggcgtatgagtggggcgtgcgctccacgcggaagtcggagcctcctcccctggatagggtgtacgagatccctggactggagcccatcacctttgcggggaagatgcacttcgtgccctggctggcgcggccgatctttccgccctgggaccgcggctacaaggacccaaggttctaccgctcgccccctcttcacgagcatccgctgtacaaagaccaggcctgctatatctttcaccaccgttgccgccttctcgagggtgtaaagcaggccctctggctcaccaagaccaagttaatagaaggccttcccgagaaagtgcttagccttgttgatgatccaaggaaccacatagagaaccaagacgagtgcgttctgaatgtgatctctcacgcccgtctctggcagaccactgaggaaatccccaagagagagacctactgcccggtcatcgtggacaacctaatacagctgtgtaaatctcagattctcaagcatccttctctggccaggaggatctgtgtccaaaactccacgttttctgctacctggaaccgagagtctcttctccttcaagtccgtggttctggtggagcccgactgagcactaaggatcctctgcccaccatcgcctccagagaggagattgaagctactaagaatcatgttctagagaccttctaccccatatcacccatcatcgatcttcatgaatgcaatatttatgatgtgaaaaatgacacaggattccaggaaggctatccttacccctatccccataccctgtacttactggacaaagccaatttacgaccacaccgccttcaaccagatcagctgcgggccaagatgatcctgtttgcttttggcagtgccctggctcaggcccggctcctctatgggaatgatgccaaggtcttggagcagcccgtggtggtgcagagcgtgggcacggatggacgtgtcttccatttcctagtgtttcaactgaataccacagacctggactgtaacgagggtgtcaagaatttggcctgggtggactcagaccagctcctctatcagcatttttggtgtctcccagtgatcaaaaagagagtggttgtggaacctgttgggccagttggtttcaagccagagacattcagaaagtttttagctctatatttgcatggtgctgcgtgagcagaggacccctctgaatcctgaaacccctcttgcctctcttccacggaagagggcctgggccccgtggagcctcagtgcccgtttggcctgctgctctcgctgacaataaagagcccttgcgttgcaaaaaaaaaaaa

SEQ ID NO: 749 - DNA, 1594 bp, Homo sapiens
  CDS (147)..(1109)
gcacgagggagccgggccgcacccgccgagccgtgaaaaaagtacatctcctggaagggatgctttttagctgagctctggtggatgagaggagctagccttgaaaaacttgatactgatggacattgtgtgggccagaggcagggatggttggctatgaccccaaaccagatggcaggaataacaccaagttccaggtggcagtggctgggtctgtgtctggacttgttactcgggcgctgatcagtcccttcgacgtcatcaagatccgtttccagcttcagcatgagcgcctgtctcgcagtgaccccagcgcaaagtaccatggcatcctccaggcctctaggcagattctgcaggaggagggtccgacagctttctggaaaggacacgtcccagctcagattctctccataggctatggagctgtccaattcttgtcatttgaaatgctgacggagctggtccacagaggcagcgtgtacgacgcccgggaattctcagtgcactttgtatgtggtggcctggctgcctgtatggccaccctcactgtgcaccccgtggatgttctgcgcacccgctttgcagctcagggtgagcccaaggtctataatacgctgcgccacgccgtggggaccatgtataggagcgaaggcccccaggttttctacaaaggcttggctcccaccttgatcgccatcttcccctacgccgggctgcagttctcttgctacagctccttgaagcacctgtacaagtgggccataccagccgaaggaaagaaaaatgagaacctccaaaacctgctttgtggcagtggagctggtgtcatcagcaagaccctgacatatccgctggacctcttcaagaagcggctacaggttggagggtttgagcatgccagagctgcctttggccaggtacggagatacaagggcctcatggactgtgccaagcaggtgctacaaaaggaaggcgccctgggcttcttcaagggcctgtcccccagcttgctgaaggctgccctctccacaggcttcatgttcttctcgtatgaattcttctgtaatgtcttccactgcatgaacaggacagccagccagcgctgagcgcaggaaggaccccaggtcttccctggaggcagcctcctgaaggaaggaagattcagtctccactgagaggtgccgtctggcccttccctgcaggccagctgccccaagcggggtagcagccttgaacccacccagctgggacaccaccagaaggtccagggctctccccatgagagaatcagagggaatgcaggacgtggtctatggtgagccaacgacacagtgagaaggagcaggaagttgctgtttctcctctgaccagcccacactgcaaaggaaacagacgccatcctacacctatcagccctgcctgccaggagaacagaacacactcctggtctggatggggctgctgcttgagtgcagagggctgcggtaggccctttgcaggagtcaggtccctacacttggcctgtttttccaacctatttaatagacattaaagctaaacacacattccttatcttaaaaaaaaaaaaaaa

SEQ ID NO: 750 - DNA, 2187 bp, Homo sapiens
  CDS (266)..(1759)
aaccctgcggtaccggtccggaattcccgggtcgacgatttcgtgagcatttgcagctggtcactccagtctcctgggactttgactcgccgtactcggcgcgctcctgctgagggtcgccggagatgtcgctcggccgccttctaccaggagcctgatccgtgccgcccgccgcccggatgggaccaccagagtgctctaaagtctccagtgaatattgaattgctgaggattttgggaaaagacaaatcaaagttcccattccatggatcccttaggtgcaccttcccagtttgtggatgtggatacactaccaagctggggtgactcatgccaagatgaattaaattcctctgatactacagctgaaatatttcaggaagacactgttcgatcaccttttctttataataaggacgtcaatggaaaagtggttctttggaaaggagatgtggcattactgaactgtacagccattgtgaataccagcaatgaaagtctcacagataagaatcctgtgtcagaaagtatcttcatgcttgcagggcctgatttgaaggaagatctccagaaacttaaagggtgccgaacaggtgaagcaaaattgacaaaaggattcaatctagctgcccggttcatcattcacacagtgggacctaaatataaaagccgctatcgcacagcagctgagagttccctttatagctgctacagaaacgtacttcaactagcaaaagagcagtcaatgtcttctgttggcttctgtgtcatcaattctgcaaaacgtggttatcctttagaggatgcaacacacatagcacttcgcactgtaagaagattcctagagattcatggggaaaccattgaaaaagtagtatttgctgtctctgatcttgaagagggtacttaccaaaagctgctacctctctacttcccaaggtcattaaaagaggagaatcgatcattgccctacctacctgcagatattggaaatgcagaaggggagcctgtggtacctgaacgacagattagaataagtgagaaacctggtgctccagaagataaccaagaagaggaggatgaaggcttgggagttgatctctctttcattggctctcatgcttttgctcgaatggaaggagatattgacaagcaaagaaaactgatccttcagggacaattatcagaggcagctctgcagaagcagcatcaaagaaattataatcgctggttatgtcaagcacgagctgaggatctgtctgatattgcttctctaaaagccttataccaaacaggtgttgataactgtggtcgaacagtgatggtggtagttggaagaaacattcctgtaacattaatagatatggacaaggctctcttatatttcattcatgtaatggatcacattgctgtgaaggagtatgtattagtgtattttcacaccctgaccagcgaatacaatcacctggactccgacttcctgaagaaactctacgatgttgttgatgtcaagtacaagaggaatttgaaggctgtttattttgtacatcccacatttcgttcaaaggtgtcaacatggttttttaccaccttttctgtctcaggactgaaggacaaaatccaccatgtggacagcctccaccagctgttttctgccatatcaccagaacagattgactttcctccttttgtccttgaatatgatgccagggaaaacgggccttactatacatcatatcccccatcaccagatttgtgacctgccatctttcagtgcttcttggttcccaggatgccacttcctccacgaatagctacctgttgaagtgatattcattgttgctgtacagatccagagagccttttgtccccacctctctggtatttttttattgactgtatattttctggcacataagcaatctaaaaatggtaggccattctgaactgcacacattttaaatttgtatatttatatgaaatggaaatgttcatttttagattgttaatagaaattggggagcaacttttgagtatctttagtttcctgaaggacaccgaattctccattagataaaccaccaagactgttcacatcatctctctaacattgcacgcttcctttgtgtacttaagtgattctcgaaatatacagaaccaatgtatgctaaccagaaaaaaaaaaaa

SEQ ID NO: 751 - DNA, 1930 bp, Homo sapiens
  CDS (238)..(1512)
tctgcggtaccggtccggaattcccgggtcgacccacgcgtccgggcagaatggctgagctcccttccgtggcaagcccccagcttctggaagaggttggggctggtctggggccgggtaccttcaggcctcaggcagagtcacggtggcagcattgagagttggacacccgggtccttgaagtgatctctaggccccagccccaaatccgccaccattccgtgctgcggggacaccatggctccagaagaggacgctggaggggaggccttagggggcagtttctgggaggctggcaactacaggcgcacggtacagcgggtggaggacgggcaccggctgtgcggggacctggtcagctgcttccaggagcgcgcccgcatcgagaaggcttatgcccagcagttggctgactgggcccgaaagtggagggggaccgtggagaagggcccccagtatggcacactggagaaggcctggcatgcctttttcacggcggctgagcggctgagcgcgctgcacctggaggtgcgggagaagctgcaagggcaggacagtgagcgggtgcgcgcctggcagcggggggctttccaccggcctgtgctgggcggcttccgcgagagccgggcggccgaggacggcttccgcaaggcccagaagccctggctgaagaggctgaaggaggttgaggcttccaagaaaagctaccacgcagcccggaaggatgagaagaccgcccagacgagggagagccacgcaaaggcagacagcgccgtctcccaggagcagctgcgcaaactgcaggaacgggtggaacgctgtgccaaggaggccgagaagacaaaagctcagtatgagcagacgctggcagagctgcatcgctacactccacgctacatggaggacatggaacaggcctttgagacctgccaggccgccgagcgccagcggcttcttttcttcaaggatatgctgctcaccttacaccagcacctggacctttccagcagtgagaagttccatgaactccaccgtgacttgcaccagggcattgaggcagccagtgacgaagaggatctgcgctggtggcgcagcacccacgggccaggcatggccatgaactggccacagttcgaggagtggtccttggacacacagaggacaatcagccggaaagagaagggtggccggagccctgatgaggttaccctgaccagcattgtgcctacaagagatggcaccgcacccccaccccagtccccggggtccccaggcacggggcaggatgaggagtggtcagatgaagagagtccccggaaggctgccaccggggttcgggtgagggcactctatgactacgctggccaggaagctgatgagctgagcttccgagcaggggaggagctgctgaagatgagtgaggaggacgagcagggctggtgccaaggccagttgcagagtggccgcattggcctgtaccctgccaactacgtggagtgtgtgggcgcctgagtgtcctgacagcccttctgcaacgtttacccaccctggttcagagcccagcttctcctggagagccggaccctcagggccctgaaccgtcgctctctggctgctcctctgtcccttgagggaggaagtcctgggacccagggaggggaggggcctttgtctagggaagggactggtagggaagggacgagtctaggctgagggcaagatgggaggtcagaggtgacagaagcgttcaggggtgcctgggcctccccaggagctgtggactcagttcctgacctctgctttggggttcctggggtgggcttggggtgagtgtagttctggcctagcagcaccctcttgtggcttgttctagcgtgtattaaaacttgacacacacccacacacaaaaacaaaaacaccaaaaaaaaaa

SEQ ID NO: 752 - DNA, 4232 bp, Homo sapiens
  CDS (173)..(1978)
atgggaagccgtacgcacgcgctaccggtccggaattcccgggtcgacccacgcgtccgggcgatcggcggcgttgaggcgggatccgggcgagccgagtgaagacctggtcctgtagacgggaaggagcctggacacagtgacacattctcaaaggccctgcaggaccaccatggcttatgatgactccgtgaagaaagaagattgttttgatggtgatcatacctttgaggacataggacttgcagctggccgaagccaacgagagaaaaaacgttcttacaaagattttttaagggaagaggaagaaattgctgctcaggtcaggaattcttccaagaagaagttgaaggatagtgaactttacttcttggggacggacacacacaagaagaagaggaagcactcctctgatgattactactatggagacatttcgtctttggaatcgtcacagaagaaaaagaaaaagtccagcccacagtctactgatacagctatggacctgttgaaagctatcacttccccactggcagcaggctccaagccctccaaaaagactggggagaaatcctctggctcttcaagccattcggagagtaaaaaggagcaccacaggaagaaagtcagtggaagcagtggggaactacccctagaggatggtggctcccacaaatcgaaaaaaatgaaacctctctatgtgaacacagagacactgacccttcgggagcctgatggtttaaaaatgaaacttattctgtcaccaaaggagaagggaagcagctctgttgatgaggagtcttttcaatatccctcccaacaagcgactgtgaaaaaatcctcaaagaaatcagctcgggatgagcagggtgctttactcctaggacatgagttacagagctttctgaaaacagcccggaaaaagcacaagtcatcctcagacgcacattcatctcctggccctgaaggctgtgggtctgacgcctcccagttcgcagagtcccacagtgctaaccttgatctttcagggcttgaacctattctggtagaatcagactcatcctctggtggggaactagaggctggggagttagtgatagatgattcttaccgagaaatcaagaagaaaaagaagtcaaagaagagcaaaaagaagaaagacaaggagaagcataaagagaagcgacactccaagtccaagagaagtttaggactttctgccgtgccagtgggagaggtcacagtgacatctggccctcctcccagcatcccatacgctggagcagcagcacctcccctgccacttcctggcctccacacagatgggcatagtgaaaaaaaaaaaaaaaaaaaagagaaggacaaagagagagagagaggagaaaagccaaaaaagaagaacatgtcggcctaccaggtgttctgtaaagagtatcgcgtgaccattgtggctgaccatccaggtatagattttggggaacttagtaaaaaactggctgaggtgtggaagcaattaccagaaaaagacaaactgatttggaagcaaaaagctcagtatctgcagcacaaacagaacaaagcagaagccacaactgtgaaaaggaaagcatccagctcagaaggttccatgaaagtcaaagcctcttctgtaggagtactgtcaccccagaagaagtccccacccaccaccatgctgttaccagcctcaccagccaaagcccctgagacagagcccattgatgttgctgctcatcttcagctgttgggagagtccctaagcctcattggacaccgtctgcaggaaactgagggtatggtggctgtgtctggcagtttgtcagtgcttctggattccattatctgtgcccttggccccttggcatgtctcaccacacaactacctgaattgaatggctgtcccaaacaggtcttgtcaaacacattagacaacattgcttacaccacgccgggactgtgacagcaaagaatcctgggacagaaaccttatcctacaccattgctggtttgtgtatatatgactgttgcagattccttcagtggcctctggctgtaggttttaaatttttatatctatacatacatatatacatatatatataatgtacaatatatacatagactgtaactactttgcttttaataattttatgaaatggcaaaggtttagccaagaggaaattttggcatgaatacaggcttgggattcttttttctcctgtggtggataaatctgccttaaaaatcaatgtaacttgggggctgggggcttgttctgggtgccaagcgcatctctttatggacagctaaaatgtgattattttccaagctcagttggacctccagacccatcactgaccatttgccttacctgtcttagtctgaaatgtaataggaaagataacgggaagatgccagttgactgaaaattcaaagcctttcaatttgaagtgacctaggtgggaggtgataaaatttgttccctttatagttacggaggtggcttaggtgaattgagtagagggttcattccaattcctactgtataggtgtctgtgtctcaaaatttattgtaatcattggtaccattggtggcctcaacagaggccaaggagttctgtgagccctggcagcaaaaaacaccttggggggtgaagctgtcaatgccaccagttggacctccatacattctgagctaacccagaatctttagtcggcagaattaagtgctggtgtctttcactggcagcatgaagttagccaccaagtcctcacaagccgtgctgcttagttgctcggtggttatggataaactttgcccagcatgatttttgggttcatcttatcggttcccctggtgggcagatacacagtgttctgcattccacatgtaagtgaattgcaaaaacaaaacaaaactcactctcttgtaggtttatttatgtgtgtgtgaatgtgtattttaattatgtgtatttaactctttaaaatctcttagattttaatttatcctgtaaatttctgtatatataatttaataacagaagcctccaccagcaacagcatgtggaagatacagatttgtcatttctcccttccgccctcccttctttccttccttccttccctgtttccttccctctttccttccttcctcctggtctgttccaaaaactctgaatcatctacattttaaggtattttacctcaaaaatgaatcattgtgttaggattctaattctttataaagaacttcatgggcttcaataatgtctagaaagtaaaataaagaggaatgttaccatccccagctgcccttatttccagagaaccagacgtttgtttcccagttggaaagaagacagttgagcacttcaggatggtttttaaatttggtatgagattctctgccaacaccaagctctgagttaactgtgctttcttctcctggccctgacagagcactacagcatcaaagtaaatctttggggacagtgtagcccatctgcatcctatttaatttcttcccttctccccaccagtgttgtcacagggctatgttgcttaaaggtagtctggctgctgaatccctttctcagctcagagcagttttaagatttaattgggaatacagagaaacaggattgtttgagaaccaaaatcaagaggaacagaaatcttaacttgatttcatgtgttagaacattgtaccatgcctcttctgtatctgtggaagtttcctgtttgacacagggtatctaggaggggcggggaagacatggatagtataggaagacattaatcctagcattgtcatttatatacattaatgaaatcctgatgaggacctgctttttgtttgttttcctttgaaacccagccctattgtatttgtatttaaaatttgtacacatttgtataataatctgtaccttgtggtatttggtactattagaggaaaaactttggattcagaccttcttgcagtttttatatcattgttttattttgttttttaaataaattctagtggtttgatccaaatcccattacagttgtataaagaaataaaattttgtacttatattattaaaaatcacatttttaatatttgtaaaaaaaaaaaaaaaaaaaaaaaaaaaaagggcggccgctctagagtatccctcgaggggcccaagcttacgcgtacccagctttcttgtacaaagtgg

SEQ ID NO: 753 - DNA, 1878 bp, Homo sapiens
  CDS (207)..(839)
cgaggacctgagtttccatctcctggaccctcctctccttcccctcagcttttgcttttccctctgggaatatcgtggtcccaccccctgcccggtccccttcctccaggtgtgaagaggtacagctgcagcccccagaggtctggtcccctgacccgtgccaaccccatagccatgacttcctgacagatgccatcgtgaggaaaatgagccggatgttctgtcaggctgcgagagtggacctgacgctggaccctgacacggctcacccggccctgatgctgtcccctgaccgccggggggtccgcctggcagagcggcggcaggaggttgctgaccatcccaagcgcttctcggccgactgctgcgtactgggggcccagggcttccgctccggccggcactactgggaggtagaggtgggcgggcggcggggctgggcggtgggtgctgcccgtgaatcaacccatcataaggaaaaggtgggccctgggggttcctccgtgggcagcggggatgccagctcctcgcgccatcaccatcgccgccgccggctccacctgccccagcagcccctgctccagcgggaagtgtggtgcgtgggcaccaacggcaaacgctatcaggcccagagctccacagaacagacgctgctgagccccagtgagaaaccaaggcgctttggtgtgtacctggactatgaagctgggcgcctgggcttctacaacgcagagactctagcccacgtgcacaccttctcggctgccttcctgggcgagcgtgtctttcctttcttccgggtgctctccaagggcacccgcatcaagctctgcccttgattatcctgccacccgcaggggcccctctgtcagcacttggggggtgggtggtggagggtggcccgtaagtttgagggctcaaaggctcttcccactgcttgttactgtgttgcttcccactcccccttgaccccaggcccctgcttctccctctaggagcctaaagaaccctcctggcctccagctcagccttctctcacctactatgtctgtccaacaggtctgcatgggtccctgataatgagaacagctgcctggtcttctctcccagtctgcctagcccagccctgggactggaatttgagtaggggatgaggggaaattgtaatttcattccttaacttccttttccccacccctgctcttcaacctctttatcagttctgaggctggagggtttgggcaaggcaacatccccattccaattccattttctgatgcagattttagctgagggatttggaagccatttggggaggcaggctgggccaaagggtagagctgggtaataaatgtctattctcctggggaggagggattctaaactttccttccgtcctcaatttctacctccatagaccggccagaatttagcttcacttgagagagatctggaatggtcgccatgattgaaaccacgcaccattacatcatcattacattaattacatcaacataaattatttcttcccccttcccttttccagcactcaaccaaggagcaaagctcatcccaccccacacccctcccaggtctgctcactgccaggctcctctcccctttgttcagtggagctggcttttctcccagcccctttccatgcctttcactccatttggcaagctctgagggggagcctggggacgggtttgggtccccaggaggagagccttgggtataatctatttttctaggagcctcttgccttgtcacttgcagctttcgccctctgctttgatggctgaggtgaactcatgttctttgggaaaagggaaggcgtgctgtggaaataaaatgtttatttgcaaaaaaaaaaaa

SEQ ID NO: 754 - DNA, 1624 bp, Homo sapiens
  CDS (168)..(1220)
agctgtacgcctgccgtaccggaccggaattcccgggtcgacgatttcgagaaggggcgaggcccgtttgcaggggccgctcggcccggggaagcccgcgccccgctcagccttgcagccccgcgcccggagcatctccctggaggaacggagacaaaggaggattcatgtccaaagggctcccagagaccaggacggacgcagccatgtcagagctggtgcctgagcccaggcctaagccagcggtgcccatgaagcccatgagcatcaactccaacctgctgggctacatcggcatcgacaccatcatcgagcagatgcgcaagaagaccatgaagaccggtttcgacttcaacatcatggtcgttggccagagtggactgggcaaatcaacgctggtcaacacgctcttcaaatcccaagtgagccgcaaggcctccagctggaaccgggaggagaagatccccaagacagtggagatcaaagctatcgggcatgtgatagaggaaggcggtgtcaaaatgaagctgaccgtcatcgacaccccaggctttggagaccaaatcaacaatgaaaactgctgggagcccattgagaagtacatcaatgagcagtacgagaagttcctgaaggaggaggtcaacatcgccaggaagaaacgcatccctgacactcgtgtccactgctgcctttacttcatctctcccacaggacactccttgcgacctctggatcttgagttcatgaaacacctcagcaaggttgtgaacatcatccctgtcattgctaaggctgacaccatgaccctggaggagaagtctgaattcaagcaaagggttcgcaaggagcttgaagtaaatggcattgaattctacccccagaaggaatttgatgaggatttggaggataagacggagaatgacaaaatcaggcaggagagcatgccttttgctgtggtgggaagtgacaaggagtaccaagtgaatggcaagagggtcctcggccgaaaaactccatgggggatcatcgaagtggaaaacctcaaccactgtgagtttgccctgcttcgagactttgtcatcaggacccacctccaggacctcaaggaagtgacacacaacatccactatgagacttacagggccaagcggctcaatgacaatggaggcctccctccggtgagcgtggacacagaggaaagccacgacagtaacccatgacgaccacttctctgtgtcatcacacatacccacttcacacacacacatcccaaataccaccaccaaccaccttcttcctctcaactctgtcccacaggcctgtctggtatttgtggagcatcttgtctgtgtgtgtgtgtgtgtgtgtgtgtgtgtgtgtgtgtgacagagagagagcgagagagcctgtgtgtgtgcatgcaggggtgaggtattttcactgccctccctggagagtcccttgtaagtttggctcctccatgcctgtccattatctgtctcctttccttgtgtcccaaaacaaagctgtttgcctcactcaggagatctgggggaggtttcatttaaaagtgctgggagcaggtgaccacaggcaactcttctctcggaacctgcctcgtgcc

SEQ ID NO: 755 - DNA, 3384 bp, Homo sapiens
  CDS (113)..(1546)
cattgaaactgaagccgtacgcctgcggtaccggtccggaattcccgggtcgacgatttcgtcctcgatctcccgtgacttcctcggccaggccgcctgcgcctctgggaccatgttgcgctggctgcgggacttcgtgctgcccaccgcggcctgccaggacgcggagcagccgatgcgctacgagaccctcttccaggcactggaccgcaatggggacggagtggtggacatcggcgagctgcaggaggggctcaggaacctgggcatccctctgggccaggacgccgaggagaaaatttttactactggagatgtcaacaaagatgggaagctggattttgaagaatttatgaagtaccttaaagaccatgagaagaaaatgaaattggcatttaagagtttagacaaaaataatgatggaaaaattgaggcttcagaaattgtccagtctctccagacactgggtctgactatttctgaacaacaagcagagttgattcttcaaagcattgatgttgatgggacaatgacagtggactggaatgaatggagagactacttcttatttaatcctgttacagacattgaggaaattatccgtttctggaaacattctacaggaattgacataggggatagcttaactattccagatgaattcacggaagacgaaaaaaaatccggacaatggtggaggcagcttttggcaggaggcattgctggtgctgtctctcgaacaagcactgcccctttggaccgtctgaaaatcatgatgcaggttcacggttcaaaatcagacaaaatgaacatatttggtggctttcgacagatggtaaaagaaggaggtatccgctcgctttggaggggaaatggtacaaacgtcatcaaaattgctcctgagacagctgttaaattctgggcatatgaacagtacaagaagttacttactgaagaaggacaaaaaataggaacatttgagagatttatttctggttccatggctggagcaactgcacagacttttatatatccaatggaggttatgaaaaccaggctggctgtaggcaaaactgggcagtactctggaatatatgattgtgccaagaagattttgaaacatgaaggcttgggagctttttacaaaggctatgttcccaatttattaggtatcataccttatgcaggcatagatcttgctgtgtatgagctcttgaagtcctattggctggataattttgcaaaagattctgtaaaccctggagtcatggtgttgctgggatgcggtgccttatccagcacctgtggtcagctggccagctacccattggctttggtgagaactcgcatgcaggctcaagccatgttagaaggttccccacagctgaatatggttggcctctttcgacgaattatttccaaagaaggaataccaggactttacagaggcatcaccccaaacttcatgaaggtgctccctgctgtaggcatcagttatgtggtttatgaaaatatgaagcaaactttaggagtaacccagaaatgatgttgcattttttgctttagcctgataattgaaactttcaacaatctctggagtgactttttctcctcgaattgaaacaagtctatggcaaaagaagctgcatttttttcacaaaagggaagatggtaacaatggtcacttcaaacttttgggctaaattatatgtacacagaaatgttcaaaatcatagttttaatgtgttttgaaaaggccacacaattatactttatcttttcttaataatcctgcaaatctctgccctgaatccgaaatctgaaaatgtactggcttgaacaaaatttgttttgtgtgttagagttataaatcattaatctttatttcgggtggtttacgtttatgccagttcctttatatttaaatttcttgttttatatattttgaatgtctttatagatttctttaaatttccttatagaaccattaatagaaaatcattacatttaaaatataccttacagcaaaagcatccaaataagtatagggtttatgtccttatttttctttcagctgaatacgaatgaacacagtggtggaatttctgaagggaagtgatgaaattatatttatttcagtgggcacttttccattttaccactgtaccattatttggttcctggagttatacactaattttcagtatattactgttaaattaccaacacaaggcaatttatttgaaagattccgtttatcctgccattgctttgaaaagcagcaggaaacgaaatcctttgacttgtatcagcttctgcagagcatctttgttttcctttgtcctttgtttcctaccttttgaatcagattccgttttagtcaggaagacttcttgggaccattcttagtaacctgaaatttcctttttaattgcatgaagtggattgatcatgagcaaatgatgttcttatttctccctcactgttgaatatctttgaacttgctgttttcaatatgggcagcacaaaggtgagagatacatattaatagtagtatgtattactcttatacattagatacctatatttaaatgaaaggcccaatttgtaaacatatacattcatattctctcttgccccaagttttaggaacatgttaggatataggagacttaatttataataatgagagcatttttttattttactaaagccatttttatagtcaactatcttttcttatttgtgtgattagaacttagaaaaatatttactagttgaagttattatcagtttttaatttagttcttaaactcatttcacttctaataatttctgttataaattgccagcattttaatgaaaatctaatgatgtaataggcattttctttatttgaacctacctcttttattttctgaaccaaagagaaagatggactggtgtttgtgaaacatttttaaaaatgtagtttcatttatattagttatgtttgataaatgtctcagtatttttataatatgataagcctgggattctacttttagggttatttgtacttttgagtaatatataaagtgacaatattaaggtacatgatcagctctttctatttttactcgtaaaaattatggaaatgaataattttgctaacaactttgaaatttcaaacttctggaaaatatgaaaatattcattgttcattatgaatttaaattgtaaggtatgaatgtgatttgtctgtacatcttgtatcttttccaaaaaatgattctgtatcttttggaaaaaagccgagagttgaagatagtatatttctggtagtactgaatatttacttacagtttctatcaaaaatatatatttgtttctaaaaaaaaaaaa

SEQ ID NO: 756 - DNA, 2916 bp, Homo sapiens
  CDS (28)..(2355)
gaattccggggagcaggaagagccaacatgctggccccgcgcggagccgccgtcctcctgctgcacctggtcctgcagcggtggctagcggcaggcgcccaggccaccccccaggtctttgaccttctcccatcttccagtcagaggctaaacccaggcgctctgctgccagtcctgacagaccccgccctgaatgatctctatgtgatttccaccttcaagctgcagactaaaagttcagccaccatcttcggtctttactcttcaactgacaacagtaaatattttgaatttactgtgatgggacgcttaagcaaagccatcctccgttacctgaagaacgatgggaaggtgcatttggtggttttcaacaacctgcagctggcagacggaaggcggcacaggatcctcctgaggctgagcaatttgcagcgaggggccggctccctagagctctacctggactgcatccaggtggattccgttcacaatctccccagggcctttgctggcccctcccagaaacctgagaccattgaattgaggactttccagaggaagccacaggacttcttggaagagctgaagctggtggtgagaggctcactgttccaggtggccagcctgcaagactgcttcctgcagcagagtgagccactggctgccacaggcacaggggactttaaccggcagttcttgggtcaaatgacacaattaaaccaactcctgggagaggtgaaggaccttctgagacagcaggttaaggaaacatcatttttgcgaaacaccatagctgaatgccaggcttgcggtcctctcaagtttcagtctccgaccccaagcacggtggtcgccccggctccccctgcaccgccaacacgcccacctcgtcggtgtgactccaacccatgtttccgaggtgtccaatgtaccgacagtagagatggcttccagtgtgggccctgccccgagggctacacaggaaacgggatcacctgtattgatgttgatgagtgcaaataccatccctgctacccgggcgtgcactgcataaatttgtctcctggcttcagatgtgacgcctgcccagtgggcttcacagggcccatggtgcagggtgttgggatcagttttgccaagtcaaacaagcaggtctgcactgacattgatgagtgtcgaaatggagcgtgcgttcccaactcgatctgcgttaatactttgggatcttaccgctgtgggccttgtaagccggggtatactggtgatcagataaggggatgcaaagtggaaagaaactgcagaaacccagagctgaacccttgcagtgtgaatgcccagtgcattgaagagaggcagggggatgtgacatgtgtgtgtggagtcggttgggctggagatggctatatctgtggaaaggatgtggacatcgacagttaccccgacgaagaactgccatgctctgccaggaactgtaaaaaggacaactgcaaatatgtgccaaattctggccaagaagatgcagacagagatggcattggcgacgcttgtgacgaggatgctgacggagatgggatcctgaatgagcaggataactgtgtcctgattcataatgtggaccaaaggaacagcgataaagatatctttggggatgcctgtgataactgcctgagtgtcttaaataacgaccagaaagacaccgatggggatggaagaggagatgcctgtgatgatgacatggatggagatggaataaaaaacattctggacaactgcccaaaatttcccaatcgtgaccaacgggacaaggatggtgatggtgtgggggatgcctgtgacagttgtcctgatgtcagcaaccctaaccagtctgatgtggataatgatctggttggggactcctgtgacaccaatcaggacagtgatggagatgggcaccaggacagcacagacaactgccccaccgtcattaacagtgcccagctggacaccgataaggatggaattggtgacgagtgtgatgatgatgatgacaatgatggtatcccagacctggtgccccctggaccagacaactgccggctggtccccaacccagcccaggaggatagcaacagcgacggagtgggagacatctgtgagtctgactttgaccaggaccaggtcatcgatcggatcgacgtctgcccagagaacgcagaggtcaccctgaccgacttcagggcttaccagaccgtgggcctggatcctgaaggggatgcccagatcgatcccaactgggtggtcctgaaccagggcatggagattgtacagaccatgaacagtgatcctggcctggcagtggggtacacagctttttaatggagttgacttcgaagggaccttccatgtgaatacccagacagatgatgactatgcaggctttatctttggctaccaagatagctccagcttctacgtggtcatgtggaagcagacggagcagacatattggcaagccaccccattccgagcagttgcagaacctggcattcagctcaaggctgtgaagtctaagacaggtccaggggagcatctccggaactccctgtggcacacgggggacaccagtgaccaggtcaggctgctgtggaaggactccaggaatgtgggctggaaggacaaggtgtcctaccgctggttcctacagcacaggccccaggtgggctacatcagggtacgattttatgaaggctctgagttggtggctgactctggcgtcaccatagacaccacaatgcgtggaggccgacttgccgttttctgcttctctcaagaaaacatcatctggtccaacctcaagtattcggctgcgatgacaccatccctgaggacttccaagagtttcaaacccagaatttcgaccgcttcgataattaa

SEQ ID NO: 757 - DNA, 3493 bp, Homo sapiens
  CDS (153)..(1265)
ccctgtccggaatccccgggtcgacgatttcgtgtcaaattcaagatggatggaatcacagcggctgcggcggctgcggcgcgcgcgagccgagtgtgagcggaaaggggcccggcgtctgcctcgagactgaagaccgataaactcaagccatggagggattactgcattacatcaaccctgcacacgccatttctctcctaagtgccctgaatgaggagcgtctcaaaggacagctgtgtgatgtgctgctgattgttggagaccaaaagttccgagctcataaaaacgtcttggctgccagcagcgaatactttcagagtttattcacaaataaggaaaatgagtcacaaactgtatttcagcttgacttctgtgagccagatgcttttgataatgttttaaactacatttattcttcctctctatttgttgagaagagcagccttgctgctgtgcaagaacttggctatagtcttgggatttcctttctgactaacatcgtttctaaaacacctcaagccccctttccaacgtgtcctaatagaaaaaaagtgtttgtagaagatgatgaaaacagttctcaaaagagaagtgtcattgtttgtcaaagtagaaacgaagcacaaggaaaaactgttagtcaaaatcaacccgatgtaagccatacttcccggccctctcctagcattgcagtcaaggccaataccaataagccacatgtcccaaaaccaatagaaccacttcataatttgtcattaactgaaaagagttggccgaaagatagttctgtggtatatgcaaagtctcttgagcattctggatctttggatgatcctaatagaatcagtttggtgaaaagaaatgcagtgttgccttcaaagcctctgcaagacagagaagctatggatgataaaccaggtgtgagtggtcagcttccaaaaggaaaagctctagagctggctttgaagagaccacggccacctgttttgtctgtttgtagctcatcagagactccctatctattaaaagaaactaacaaaggaaatggtcaaggtgaagatagaaacttgttgtactattcaaagttaggcttagtgatcccatccagtggatctggttctggaaaccaaagcattgacaggagtggcccacttgttaagagtctcctcagacggtcattgtcgatggatagccaggttcctgtctattcaccttccatagatttgaaatcttcccaggggatcatcttcggtgtccagtgatgcccaggggaatgtgttgtgtgctttatctcagaagtcatctttaaaagattgtagtgaaaaaacagccctagatgacaggcctcaagtgctacaaccgcatcgcctcaggtcctttagtgcttctcagtcaacagacagggagggagcttcccctgtgactgaggtgcgcataaagactgagcccagcagcccgctgtcggacccctcggacatcatccgcgtcactgtgggagatgcggcaacaacagcagctgcctcatcttcgtcggtcacaagagacctgtctctgaaaacagaagatgaccaaaaagacatgagcagactcccagcaaaaaggaggttccaagcggaccgaagattgccgtttaagaagttaaaggtgaatgagcacgggtctcctgtgtcagaagataattttgaggaaggctcaagccctactctccttgatgcagattttccagattctgatttgaataaagacgaatttggtgagttggaggggacgagaccaaacaaaaaatttaaatgcaaacattgccttaagatctttagatcaacagcaggtcttcaccgtcatgttaacatgtaccataacccagaaaagccctacgcttgtgacatctgtcacaagaggtttcacaccaacttcaaagtgtggacacactgtcagacccaacacggcatagtgaagaacccatcaccagcctctagttcacatgctgttttggatgaaaaattccaaagaaagctgattgacatagtgagagagagagaaattaagaaggccctgatcattaagttaaggcgcggcaagcctggttttcagggacagagtagctcccaagcacagcaagtcatcaagaggaacttgaagatctcgagccaaagggagcttacatttgtacttactgcggaaaaacgtaccgctttctctctcaatttaagcagcatataaaaatgcatccaggagaaaaaccccttggagtaaataaagttgctaaaccaaaagagcatgctcctcttgcaagtccagtagaaaacaaggaggtttaccagtgccgcctctgtaatgctaagctctcttctctcctagagcaaggaagccacgagcggctgtgccggaacgcggccgtctgcccttactgcagcctcaggtttttctcgcccgagctgaagcaagaacacgagagcaagtgtgagtataagaagctgacctgcctcgagtgcatgcgcaccttcaagtcctctttcagcatctggcggcaccaggttgaagtccataatcagaacaacatggcacccaccgaaaacttttctttgcccgttttggaccacaatggtgatgtgactggttcttcaaggccccaatcccagcctgagcccaacaaagtaaaccacatcgtcaccacaaaagacgacaacgtgttcagtgattcttcagaacaagttaacttcgactcggaagattcctcttgtcttcccgaagaccttagtctttccaagcaactgaaaatccaagtcaaagaggagcctgtggaggaggctgaagaagaggcacccgaggccagcacagcccccaaagaagcgggtcctagcaaagaagccagcctgtggccctgcgagaagtgtgggaagatgttcacggtgcataagcagctggagcgtcaccaggagcttctgtgctctgtgaaaccatttatttgtcacgtgtgcaacaaagcttttcgcactaattttcgactctggagtcacttccaatcgcacatgtctcaggcttcagaggaatcggcacataaggaatctgaggtgtgccctgttcccacaaactctccctctccaccacctctgccaccgccaccaccactgcccaagatccagcctctggagcctgacagccccacaggcctgtccgaaaacccaactccagccacagaaaaactgtttgtgccccaagaatcagacacccttttttaccatgccccacccctttcagcaatcacatttaaaagacagtttatgtgtaaactttgccacaggacattcaagactgcatttagtctttggagtcacgaacaaacacacaattgaaagaccaacactttttacctatgggaggcagtccccagatttcaacctgaattgtgaaatgtgtcataagaaacaaaatattttttaaacaagaataataaaggttggagattgttacgcttgaaaaaaaaaaaaaa

SEQ ID NO: 758 - DNA, 1470 bp, Homo sapiens
  CDS (251)..(799)
tttcgtccggtgttcgcggaggagtcgaggcacggagaggcttcgggggagggacggaaagaagggtggcccgccaggcgggcggggtccatggattcggggtgagggccgtccgcggcctcgctttcgcctcctccgagccgggccggcgatggccgcagctgtgaggcgagcagaagaatagaaggaaggtgataggatgtgatgatagaatttgtgatagccaagcaacaacttttcctaattcggcatgttaaaaaataagggtcactcatctaagaaagataacttggcagtcaatgcagttgctttacaagatcacattttacatgatcttcaacttcgaaatctttcagttgcagatcattctaagacacaagtacaaaagaaagagaacaaatctctaaaaagagatacaaaggcaataatagatactggacttaaaaaaactacacagtgccccaaactagaagactcagaaaaagaatatgttcttgatcccaaaccgccgccgttgactttggcacagaagttgggcctcattgggcctccaccacctccactgtcatcagatgaatgggagaaggtgaaacagcgctctctcctgcaaggggactccgtgcaaccatgccccatctgtaaagaagaattcgagcttcgtcctcaggtgtttagcatacgagggtgctgctttcatgctcccatgtgttccacaaagcatgtcttcaggcttttgaaaagttcacaaataagaaaacctgtcctctctgtagaaagaaccagtatcaaacccgagtgatacacgatggggcccgcctgttcagaatcaagtgtgtgaccagaatccaagcctactggagaggatgtgttgttagaaagtggtacagaaacctgaggaaaacagtacctcccacagatgccaagttaagaaaaaaattctttgaaaaaaagttcacagaaatcagccaccgcatcctgtgctcatacaacaccaacattgaagagctctttgcagaaatcgatcagtgcttggccataaatcgaagtgttcttcagcagttggaagaaaaatgtggccatgagatcacagaagaggaatgggagaaaatccaagtgcaggctctgcgccgggagacccacgagtgcttcattctgcctggcccctctctccgctgctggcggtcagcgcgtgggtgcaggcaggcgttccagagagatggccctcctgtcctgctcacatgtgttccaccatgcgtgtctgctggcactagcaggagttctccgtgggagacaggcctcctttccatgcctgtcctctctgccgatcctggttccagaatagcattcacgagtgcgtaagtcatagtcaagtagagcgaggtcagtctgaggtataaagttcgccaatcgttcggtagtgagcggccgtgtggtaggtgtaataagccgggaatccgggccggtactctc

SEQ ID NO: 759 - DNA, 914 bp, Homo sapiens
  CDS (12)..(899)
gcagcttggagatgtcgtcggatggggaacccctgagccgcatggactcggaggacagcataagcagtactataatggatgtagacagcacaatttccagtgggcgttcaactccagcaatgatgaatggacaaggaagcactacttcttcaagcaaaaatattgcctataattgttgttgggaccagtgccaggcttgcttcaactctagcccagatctggcagatcacatccgttccatacatgtagatggtcagcgaggaggggtatttgtttgcttatggaaaggttgtaaagtatataacactccatctaccagtcaaagttggttacaaaggcatatgctgacacacagtggagacaaacctttcaagtgtgttgttggtggctgcaatgccagctttgcttctcagggagggctagctcgtcatgtacccacacacttcagtcagcagaactcctcaaaagtttctagccagccaaaggccaaagaagaatctccttctaaagctggaatgaacaaaaggaggaaattaaagaacaaaagacgacgctcattaccacggccacatgatttcttcgatgcacaaacactggatgcgataagacatcgagccatatgctttaacctctcagctcatatagaaagtttagggaagggacacagtgttgtttttcatagtcctgtaatagctaagagaaaagaagattctgggaagatcaaacttttgcttcattggatgcctgaagacattctgcatgatgtgtgggtgaatgaaagtgaacgacatcagttaaaaactaaagtagttcatttatcaaagctacccaaagatactgccttgcttttggacccaaacatatacagaacaatgccgcagaagaggttgaagaggtaaaaaaaaaaaaaaaaa

SEQ ID NO: 760 - DNA, 913 bp, Homo sapiens
  CDS (18)..(662)
cggccgcggcgggcgacatggacaacgcggggaaggagcgtgaggcagtacagctgatggcggaggccgagaagcgagtcaaggcctcccactccttcctccgagggctgtttggaggaaacacaagaatagaagaggcttgtgaaatgtataccagagctgcaaatatgttcaagatggctaaaaattggagtgctgcaggaaacgcattttgtcaggcagccaagctccacatgcagcttcagagcaaacatgactctgctaccagctttgtggatgctggaaatgcttacaaaaaggcagatccccaagaggctatcaactgcttaaatgcagccatcgacatttacacagacatgggaaggtttacaattgcagccaagcaccacattactattgcagagatctatgagactgaacttgtagacattgagaaggctattgcacattatgaacaatctgctgattattacaaaggagaagaatccaacagctcagcaaacaagtgtctgctgaaggtggcagcatatgctgcccagcttgagcagtaccagaaagccattgagatctatgagcaggttggggccaacacaatggaatatccctttgtggaatacaggccaaaggatacttcttcaaagctgccttttgccactctatagagacgagttgaaggccagcttgctcttgagaatatgaggaatgttccagcattactgattcagagatgtaaattattgaaaaactctagagctcatgacgacagacagggaacttacctgagcagtgaggattggctcatatctgcttgacagagttgacacatgtggtcgatcaaagccttccagggatgagacgaatgggactaatgaaggtttgtttggcagcatacaccttatttgttagcaaggac

SEQ ID NO: 761 - DNA, 2047 bp, Homo sapiens
  CDS (369)..(860)
cacgaggcgtgtgagcgtgaggagctgccgccaccgcctgctcctcgtcgtcctcgtcctccggggccccggcgacgtgggccgcgcacggccctggaaaagacgtcgcctccccttcatccgcctctctctcaccgcgccgctcccgcctcctcgtcctgcgctgcgggctcaggcggaacccggaacggccgtcctcttcccccgccctccgccgcctcctccttctcctcctcctcctcctcctcctccttctcggcttcctcctcagccccgggccggagcggggtgtcggcggcggccggttcgggcggcgactcgcgcttctttgggcggcggcgcttggccatgtcgtgtcggggaaggtaatgagccgcagagccccggggtctcggctgagcagcggcggcggcggcggcggcaccaagtatccgcggagctggaatgactggcaacccagaactgatagtgcatcagccgacccagataatttaaaatattcttcatccagagatagaggtggttcttcctcttatggactgcaaccttcaaattcagctgtggtgtctcggcaaaggcacgatgataccagagtccacgctgacatacagaatgacgaaaagggtggctacagtgtcaatggaggatctggggaaaatacttatggtcggaagtcgttggggcaagagctgagggttaacaatgtgaccagccctgagttcacaagtgttcagcatggcagtcgtgctttagccaccaaagacatgaggaaatcacaggagagatcgatgtcttattgtgatgagtctcgactgtcaaatcttcttcggaggatcacccgggaagacgacagagactgaagattggtcactgtaaagcagttgaaagaatttattcagcaaccagaaaataagctggtactagttaaacaattggataatatcttggctgctgtacatgatgtgcttaatgaaagtagcaaattgcttcaggagttgagacaggagggagcttgctgtctcggccttctttgtgcttctctgagctatgaggctgagaagatcttcaagtggatttttagcaaatttagctcatctgcaaaagatgaagttaaactcctctacttatgtgccacctacaaagcactagagactgtaggagaaaagaaagccttttcatctgtaatgcagcttgtaatgaccagcctgcagtcaattcttgaaaatgtggatacaccagaattgctttgcaaatgtgttaagtgcattcttttggtggctcgatgttaccctcatattttcagcactaattttagggatacagttgatatattagttggatggcatagagatcatactcagaaaccttcgctcacgcagcaggtatctgggtggttgcagagtttggagccattttgggtagctgatcttgcatttcctacgactcttcttggtcagtttctagaagacatggaagcatatgctgaggacctcagccatgtggcctctggggaatcagtggatgaagacgtccctcctccatcagtgtcatcaccaaagctggctgcgcttctccgggtatttagtactgtgctgaggagcattggggaacgcttcagcccaattcgggtcctccaattactgaggcatacgtaacagttgttctgtacagagtaatgagatgtgtgacggctgcaaaccaggtgtttttttctgaggctgtgttgacagctgctaatgagtgtgttggtgttttgctcggcagcttggatcctagcatgactatacattgtgacatggtcattacatatggagtagaccaactggagaattgccagacttgtggtaccaattatatcatctcagtcttgaatttactcacgctgattgttgaccagataaatacgaaactgccatcatcatttgtagaaaactgtttataccatcatctaaactactattctggcgttatcataagacaaggggttttgctgtagcccatctgtttatcaagcaatctcagcttgagatattcctgtttggagact

SEQ ID NO: 762 - DNA, 567 bp, Homo sapiens
  CDS (295)..(465)
tccggaactcccgggtcgacgatttcgtgtgtctctggaaccctgtggcttctttgagttcatctcctgctggttaccaccttactcatttctctccaacgatactggccttcttgttattccttgaacataccaagtatattctcttgcctcagggactttgcttctgcccttctccattcttgggatactcttctcccagttattctgcatgcctttctcccacacctcttttaaatatttgctttgaagtcaccttcttatcttttgccttgttgcactcctgaaggcaaaatggatcacaagcagctctgctggagccacccacaaaaatctggccagagttctcgctcttgttgcatctgctcaaaccagcatggtctgatctggaaatatagcctcaatatgtgcctccagtgttgccatcagtacgtgaaggatataggtttcattaaattggactaagtgatcttccttgaatggattatccaaggcatccacacaatgaaaaatcatattagctgtttgtacataaaataaaaatgaagaaaatgaagtcaaacgaca

SEQ ID NO: 763 - DNA, 888 bp, Homo sapiens
  CDS (589)..(858)
ccatttcgtctggaaacccagttcagggacagtgtggagattaagttgactcactggatctatctagcacttttgtgtctctggctttgcgcaaggttggggattggcccctcagtgcccgcagagagaagggactgaaccaggagccccaaggcaggggtctggccctccagaagatgggtcaagaggaagagagccctccaagagaggagaggccccagcagagtccaaaggtacagtgttacctgtttaaacaaaggagaaggatttggggaggctgagacctcaagacctgcttgactttgcaccctatccccaggcatctccgggactgctggcagctgccttacaacagagccaggaactgagttgggtaccagctttgctcaaaatggtttctaccatgaggccgtggtcctcttcacccaggccttgaagctcaacccccaggaccaccggttatttggaaatcgttccttctgccatgagcggttgggtcagccagcgtgggccctggctgatgcccaggtggcccttaccctacggcctggctggccccggggcctcttccgcctgggcaaggccttgatgggactacagcgcttcagagaggcagctgctgtgtttcaggaaactctgagaggtgggtcccagcctgacgcagcccgagagctccgctcttgccttctccacctcacactgcagggtcagcgaggaggaatctgtgcaccacctctgtcacctggggccctccagccacttccccatgctgagctggcaccctcaggcctaccttccctcaggtgccctcgaagcactgctttgaggtcccctggcctgtctccactcttgcattaaccataatgtcaccgaagccacccctgtatt

SEQ ID NO: 764 - DNA, 984 bp, Homo sapiens
  CDS (153)..(806)
tatacgaggcactatagggaatttcgccccgagcagtaattcggcacgacggggaaccgcatcctccgcatccacatccgcatcgtcgtcctccccgaccgcgtcctgcagcagctgccagtggagccgcctgacaaggactgccatccaccatggtgaagctgggctgcagcttctctgggaagccaggtaaagaccctggggaccaggatggggctgccatggacagtgtgcctctgatcagccccttggacatcagccagctccagccgccactccctgaccaggtggtcatcaagacacagacagaataccagctgtcctccccagaccagcagaatttccctgacctggagggccagaggctgaactgcagccacccagaggaagggcgcaggctgcccaccgcacggatgatcgccttcgccatggcgctactgggctgcgtgctgatcatgtacaaggccatctggtacgaccagttcacctgccccgacggcttcctgctgcggcacaagatctgcacgccgctgaccctggagatgtactacacggagatggaccccgagcgccaccgcagcatcctggcggccatcggggcctacccgctgagccgcaagcacggcacggagacgccggcggcctggggggacggctaccgcgcagccaaggaggagcgcaaggggcccacccaggctggggcggcggcggcggccaccgaaccccccgggaagccgtcggccaaggcggagaaggaggcggcgcggaaggcggccgggagcgcggcgcccccgcccgcgcagtgacgtctccagccccgcagcccggcccgggcgtcctccgccagctcctgtgaccagcgcgtctcccgatgctctccgccgtgttcgtgtccccaggcgccctcgctgcagccccgcccccgtgggtctctgactctgtcgcttttctctaagtaaagatttcacgtccaaaaaaaaaaaa

SEQ ID NO: 765 - DNA, 1538 bp, Homo sapiens
  CDS (237)..(1451)
catggaacccccctagatacgtcatgcggaaccgccccggaattcccgggtcgacccacgcgtccgggagacgtgtctgtctgtgaggcgctgggtgcacgtccccagggctctgggctaggaaggcagcggcgaggtgcctccccacgtacccctcgcgggcccagccgagcaacgtggggcgaaggcggcggcgaaggcccgggctgggagcgttggcggccggagtcccagccatggcggagtctgtggagcgcctgcagcagcgggtccaggagctggagcgggaacttgcccaggagaggagtctgcaggtcccgaggagcggcgacggagggggcggccgggtccgcatcgagaagatgagctcagaggtggtggattcgaatccctacagccgcttgatggcattgaaacgaatgggaattgtaagcgactatgagaaaatccgtacctttgccgtagcaatagtaggtgttggtggagtaggtagtgtgactgctgaaatgctgacaagatgtggcattggtaagttgctactctttgattatgacaaggtggaactagccaatatgaatagacttttcttccaacctcatcaagcaggattaagtaaagttcaagcagcagaacatactctgaggaacattaatcctgatgttctttttgaagtacacaactataatataaccacagtggaaaactttcaacatttcatggatagaataagtaatggtgggttagaagaaggaaaacctgttgatctagttcttagctgtgtggacaattttgaagctcgaatgacaataaatacagcttgtaatgaacttggacaaacatggatggaatctggggtcagtgaaaatgcagtttcagggcatatacagcttataattcctggagaatctgcttgttttgcgtgtgctccaccacttgtagttgctgcaaatattgatgaaaagactctgaaacgagaaggtgtttgtgcagccagtcttcctaccactatgggtgtggttgctgggatcttagtacaaaacgtgttaaagtttctgttaaattttggtactgttagtttttaccttggatacaatgcaatgcaggatttttttcctactatgtccatgaagccaaatcctcagtgtgatgacagaaattgcaggaagcagcaggaggaatataagaaaaaggtagcagcactgcctaaacaagaggttatacaagaagaggaagagataatccatgaagataatgaatggggtattgagctggtatctgaggtttcagaagaggaactgaaaaatttttcaggtccagttccagacttacctgaaggaattacagtggcatacacaattccaaaaaagcaagaagattctgtcactgagttaacagtggaagattctggtgaaagcttggaagacctcatggccaaaatgaagaatatgtagataatggactgggatatattgtatttctcatgttaaagcctcttcccttgaaattaaaaaaaaattttaactgataaaaaaaaaaaa

SEQ ID NO: 766 - DNA, 1884 bp, Homo sapiens
  CDS (51)..(647)
gccgcggagccggcgggagggcgggcgggcgggcggacgggcagcctaacatggcagaccagagacagcgctcactgtctacctctggggagtcattgtaccacgtccttgggttggacaagaacgcaacctcagatgacattaaaaagtcctatcggaagcttgccttgaaatatcaccccgacaagaaccccgacaacccggaggccgcggacaagtttaaggagatcaacaacgcgcacgccatcctcacggacgccacaaaaaggaacatctacgacaagtacggctcgctgggtctctacgtggccgagcagtttggggaagagaacgtgaacacctacttcgtgctgtccagctggtgggccaaggccctgtttgtcttctgcggcctcctcacgtgctgctactgctgctgctgtctgtgctgctgcttcaactgctgctgcgggaagtgtaagcccaaggcgcctgaaggcgaggagacggagttctacgtgtcccccgaggatctggaggcacagctgcagtctgacgagagggaggccacagacacgccgatcgtcatacagccggcatccgccaccgagaccacccagctcacagccgactcccaccccagctaccacactgacgggttcaactaaatccaggaggagctgtggtcagaggaggagccggcgcctggccacgccaaccttagaatcatgaactgtagtcacagagatgggaaggcagcctcctgcctgccctggccttgctggggcccctcctgcctccacgcccacccagcgtcgacccttgacccacgaagtgcgtagcatgcagtatttaaagcagtgtagctacggtcttctgtttttttcccttttttaatagcatgtatggggttctgttccatgtctgtgttgtggacattccgcggcatgaccgcgtgaactgcacggtggagctgcctcagggctgtcggtcaggttggtccagtgaggggtgactgcagccggtcaggtgggcgaggagaaggggggctgcccctttcctacctgtgcttgaggggccggaggcaggtgctgcctggcagagctgtgttaccgtcttggcctcggggtctggtccacactctgtgctcccagccttgaggctgcagtaggactctgatctcacctgccagaagagaggcggggccgcgtcctcctggcgtcaccggcgtcactgtcattccttggtgtctgtgctgggcatggttggcttgggggtctgtggtttcctgggccttgtggcagggtttctcccgtgggagaatttggtgtggaaagcataggaggccccttccgaggttgacaccgtgtcctccgcggtgtttctcgcctggtcgtctcgtcgtgtggacgctgccgttctggttctcggaggtgtgtccttcgccgtgttggggttatttgtctgtgttcctgcacttttcccgggctctgagctggattgatggggccagtctcccccctcccatcttgaggtcgttctccacattccttccagcacacgtgtcctttccatagccctttttggacctttagaaccacagatgataggaccagcccaatgagccacagtcagagagtagattgtgcatgtgtgagcacccagctactggggacgggggctctcccacgacccctcctcctgtgtttgccagagctcccatctgccccactcgcctttgccccgtcatcgatgattcaggcagagccagattcgttaggtccctggaggaaggactgactggaccagagggaccctctggctcaggagggttgggtccctgggaggccggcagccaggccacagaatccacacgtggaccattgtgggtccctgggaggccgg

SEQ ID NO: 767 - DNA, 3641 bp, Homo sapiens
  CDS (121)..(2979)
gacggcaatgcaagcgaaaattaccctcactaaagcggaataagcttgcggccgctgcggggcgcgagctgcccttcacaaacatggcggccgaggggtgcggggagtggcggggtaaggatgggaagccgagcagacggccccagaacaagcggtcatgtgactgggaagatggccgtctttccttggcactccaggaataggaactacaaagctgaatttgcatcatgccgactggaggctgtaccattggagtttggggactatcaccctctgaaacccataactgtcacagagtcaaagacaaagaaagtgaaccggaaaggaagcacttcttccacgtcctcctcctcctccagctccgtggtggacccgctgagcagcgtcctcgatgggactgaccccctctccatgtttgcagccactgctgaccccgcagccttggcagctgccatggacagctccagaaggaaacgtgatagagatgataactccgttgtaggatcggattttgagccttggaccaacaaacggggagaaatccttgcccggtacaccactaccgaaaagctgtctattaatctgtttatgggatctgaaaaaggcaaagctgggactgccacattggcaatgtcagagaaggtgcggacccggctggaggagctggatgactttgaggagggttcccaaaaggagctgttgaacttgactcagcaggattacgtgaaccgcatagaggagctcaaccaatcgctgaaggatgcctgggcctcagaccagaaagtgaaggctctaaaaatagttcatccaggaaagctcgtgtacgagcgcatcttttccatgtgtgtggatagccgcagcgtcttaccagatcacttttctccagagaatgcaaatgacacggccaaggaaacatgcctaaattggtttttcaagattgcctccatcagggaactcattccaagattttacgtggaggcatccatcctgaaatgtaacaaattcctctccaaaacgggaatttcagagtgcctgccccggttgacatgcatgatcagagggatcggagacccactagtgtcggtgtatgcccgtgcctacctgtgccgggtgggaatggaagtggccccacatctcaaagaaaccctaaataagaacttttttgacttcctccttacgttcaaacagattcatggggatacggtccagaaccagctggtggtccaaggagtggagctcccatcttacctccccttgtacccgcctgccatggactggatcttccagtgcatctcctaccatgcccccgaggctctgctgaccgagatgatggaaaggtgtaagaaactaggaaacaatgccttgctgttgaattctgtgatgtctgccttccgggctgagttcatcgccacaaggtctatggatttcattggcatgattaaagagtgtgatgaatctggtttccccaagcatcttctttttcgatcactgggattaaacttggccttggctgatcctcctgagagtgaccgacttcagattctcaacgaagcttggaaagtcatcactaagctgaagaacccacaggactacattaattgtgccgaagtgtgggtggaatacacctgcaagcatttcacgaaacgagaggtgaataccgttttggcagatgtcatcaagcacatgactccagatcgtgcatttgaagattcctacccccagcttcagttaataattaagaaagttattgcccacttccatgacttctcagttcttttctcagtggaaaaatttctgccgtttctggacatgttccaaaaagagagtgtgcgggtggaggtttgcaaatgcatcatggacgcctttatcaagcatcaacaagagcccaccaaggacccggtcatcttgaatgcccttttgcatgtttgcaagaccatgcatgactctgtgaatgcactcactcttgaggatgagaaaagaatgctgtcatatttgattaatggatttataaaaatggtttcctttggccgtgattttgaacaacagctgagtttttatgttgagtccaggtcgatgttttgcaatctggagcctgttcttgtgcagttgattcatagtgtgaaccggttggcaatggagacaagaaaagtaatgaaaggaaatcattccagaaagacagctgcatttgtccgggcctgtgttgcctactgcttcatcaccatcccctccctggcgggcatcttcacacgtctcaatctctacctgcattctggtcaggtggccttggccaaccagtgcctctcccaagctgatgcttttttcaaagccgctataagccttgttccggaagttccaaagatgattaatattgatgggaagatgcggccatcggaatcgttccttctggaattcctctgcaatttcttttctactttattaatagttccggatcatcctgaacatggggtcctgtttcttgttcgagagcttctcaacgtgatccaggactacacctgggaggacaacagcgatgagaaaatccgcatctacacctgcgtcctgcatctcctctccgccatgagccaggagacgtacctttaccacatagacaaagtggactccaacgacagcctctacgggggagactccaagttcctggcagaaaacaacaagctgtgtgagacggtgatggctcagatcctagagcatctgaaaaccctggccaaggacgaggccctgaagcgccagagctcgttgggcctttccttctttaacagcatcttggcccatggggacctacgcaacaacaagctcaaccagctctccgtcaacctgtggcacctggcacagaggcacggctgtgcagacaccaggaccatggtgaaaacgctagaatacatcaagaagcaaagcaaacaaccagacatgactcatctgacggagctggccctcagactccctctgcaaacaaggacctgacccccgggcccatccccaggctcagggactctggtgccaaatccagaaagatctgctctgctgccctgaactcttacggcaatttaggtttctcatttttcttttctttttacatatgtacaaattgttttaagctttggcctctatccaggttattctgacaatgaagaaatgggagttgtcagagcattaaaatgcaatcttcactaagaagcagtctctgtgttgtctttgcacaagtggccttcggtctactcagcccgatctgatgggcctttttagcaagagagaaacaagaatgcaagtaacatctttcttctctggaaggtgtttgttttttcatagtttagaaataaggactttaaaagtggactgcttttcaaagtgccactgttccagacccattccattccagactttgtaccttaaagttagagcacacccaaagtctggaactgtgttacctgaacccctatggaggatttataaaaggcagaaatagcactccattaactctttttcctatcaaaagcagctcttgattggacttagaatctgtgttggtggatcaaaggagaaagcgaggtcaaatttgagattctctgtggcttcagtatacagtaactgaataaatgtcctgaaggagcaaaaaaaaaaaaaaa

SEQ ID NO: 768 - DNA, 2811 bp, Homo sapiens
  CDS (699)..(2228)
aagcagctgatatccaagtcaagaattttctccctcacacccatatgctgaggactaagatccctggtaccctgtggggtcttgataataaaatttggtttctcttgatgtgctttcagttgggatgttaacactgcctgtgcaacctggcagaagaatgaatgtgagatgtggcttctctggacactggccagacctgtggcatctctgaccctgttgaccaccaacctgcaaagactcttcaccctggctttggcaacggaccgccccggtgcacgaagcgcagggcggtcgcaggagctggctgagcagcgaagcccaggccctcctgggaagaagtccgagcaggggcatcgcgcggcaggacgccggctttccgggacaggaacaaaaggcctgggaaggaggcgggtcagacaccaggaagggtggagggcactgcaaaggcggaacccgcgcaccagggaaaactcgggcgtttgcgcacctcactagtcacgaaggctgaggtgggatcctcccaagttcccttagtagccagcttcggcacttccgggaggagccggaaataatttttgtgctcggcggaggctctctaggcgtgcgacccagcgactcgatagccggaagtcatccttgctgaggctggggcaaccaccgcaggtcgagacagcaggcggctcaagtggacagccgggatggcagagcgtgcggcgctggaggagctggtgaaacttcagggagagcgcgtgcgaggcctcaagcagcagaaggccagcgccgagctgatcgaggaggaggtggcgaaactcctgaaactgaaggcacagctgggtcctgatgaaagcaaacagaaatttgtgctcaaaacccccaagggcacaagagactatagtccccggcagatggcagttcgcgagaaggtgtttgacgtaatcatccgttgcttcaagcgccacggtgcagaagtcattgatacacctgtatttgaactaaaggaaacactgatgggaaagtatggggaagactccaagcttatctatgacctgaaggaccagggcggggagctcctgtcccttcgctatgacctcactgttccttttgctcggtatttggcaatgaataaactgaccaacattaaacgctaccacatagcaaaggtatatcggcgggataacccagccatgacccgtggccgataccgggaattctaccagtgtgattttgacattgctgggaactttgatcccatgatccctgatgcagagtgcctgaagatcatgtgcgagatcctgagttcacttcagataggcgacttcctggtcaaggtaaacgatcgacgcattctagatgggatgtttgctatctgtggtgtttctgacagcaagttccgtaccatctgctcctcagtagacaagctggacaaggtgtcctgggaagaggtgaagaatgagatggtgggagagaagggccttgcacctgaggtggctgaccgcattggggactatgtccagcaacatggtggggtatccctggtggaacagctgctccaggatcctaaactatcccaaaacaagcaggccttggagggcctgggagacctgaagttgctctttgagtacctgaccctatttggcattgatgacaaaatctcctttgacctgagccttgctcgagggctggattactacactggggtgatctatgaggcagtgctgctacagaccccagcccaggcaggggaagagcccctgggtgtgggcagtgtggctgctggaggacgctatgatgggctagtgggcatgttcgaccccaaagggcgcaaggtgccatgtgtggggctcagcattggggtggagcggattttctccatcgtggaacagagactagaggctttggaggagaagatacggaccacggagacacaggtgcttgtggcatctgcacagaagaagctgctagaggaaagactaaagcttgtctcagaactgtgggatgctgggatcaaggctgagctgctgtacaagaagaacccaaagctactgaaccagttacagtactgtgaggaggcaggcatcccactggtggctatcatcggcgagcaggaactcaaggatggggtcatcaagctccgttcagtgacgagcagggaagaggtggatgtccgaagagaagaccttgtggaggaaatcaaaaggagaacaggccagcccctctgcatctgctgaactgaacaaactatcagaggaaaggaagtgggactggcactatttgaggttaagacaaactgcatatgtacttcaattgctttgcacttttccgtttcagcgggaagacctgaagagtggtcagaacagagcctttgatttttattatggttattttattgattattactggcaaaaacggccaggtacaacacctttttcatacaaggcccaggaggcttagtccagtctgtgctcctgggctacaaggacccagcctgagatggtcccatctgcagggccccgcaccagttggagcagatgcctccccaccaccaattgccaaaggtccaataaaatgcctcaaccacggagtctgcgtgtgtcagtgatgcctagccccgccttccccagcagaccaatgtagggatggaaaagggagaaaaacagtaaacttgtgaccctgaggttcttgtctccagcgtccaccctgcggcttgggagctcctcctcgggaggcagccaccgtacatacgcacccgcgactttgcagctttcacctgagcggacgcgtgggtcgacccgggaattccggaccggtacc

SEQ ID NO: 769 - DNA, 14899 bp, Homo sapiens
  CDS (467)..(14101)
cagcggtgcgagctccaggcccatgcactgaggaggcggaaacaaggggagcccccagagctccatcaagccccctccaaaggctcccctacccggtccacgccccccaccccccctccccgcctcctcccaattgtgcatttttgcagccggaggcggctccgagatggggctgtgagcttcgcccggggagggggaaagagcagcgaggagtgaagcgggggggtggggtgaagggtttggatttcggggcagggggcgcacccccgtcagcaggccctccccaaggggctcggaactctacctcttcacccacgcccctggtgcgctttgccgaaggaaagaataagaacagagaaggaggagggggaaaggaggaaaagggggaccccccaactggggggggtgaaggagagaagtagcaggaccagaggggaaggggctgctgcttgcatcaacccacaccatgctgaccccgccgttgctcctgctgctgcccctgctctcagctctggtcgcggcggctatcgacgcccctaagacttgcagccccaagcagtttgcctgcagagatcaaataacctgtatctcaaagggctggcggtgcgacggtgagagggactgcccagacggatctgacgaggcccctgagatttgtccacagagtaaggcccagcgatgccagccaaacgagcataactgcctgggtactgagctgtgtgttcccatgtcccgcctctgcaatggggtccaggactgcatggacggctcagatgaggggccccactgccgagagctccaaggcaactgctctcgcctgggctgccagcaccattgtgtccccacactcgatgggcccacctgctactgcaacagcagctttcagcttcaggcagatggcaagacctgcaaagattttgatgagtgctcagtgtacggcacctgcagccagctatgcaccaacacagacggctccttcatatgtggctgtgttgaaggatacctcctgcagccggataaccgctcctgcaaggccaagaacgagccagtagaccggccccctgtgctgttgatagccaactcccagaacatcttggccacgtacctgagtggggcccaggtgtctaccatcacacctacgagcacgcggcagaccacagccatggacttcagctatgccaacgagaccgtatgctgggtgcatgttggggacagtgctgctcagacgcagctcaagtgtgcccgcatgcctggcctaaagggcttcgtggatgagcacaccatcaacatctccctcagtctgcaccacgtggaacagatggccatcgactggctgacaggcaacttctactttgtggatgacatcgatgataggatctttgtctgcaacagaaatggggacacatgtgtcacattgctagacctggaactctacaaccccaagggcattgccctggaccctgccatggggaaggtgtttttcactgactatgggcagatcccaaaggtggaacgctgtgacatggatgggcagaaccgcaccaagctcgtcgacagcaagattgtgtttcctcatggcatcacgctggacctggtcagccgccttgtctactgggcagatgcctatctggactatattgaagtggtggactatgagggcaagggccgccagaccatcatccagggcatcctgattgagcacctgtacggcctgactgtgtttgagaattatctctatgccaccaactcggacaatgccaatgcccagcagaagacgagtgtgatccgtgtgaaccgctttaacagcaccgagtaccaggttgtcacccgggtggacaagggtggtgccctccacatctaccaccagaggcgtcagccccgagtgaggagccatgcctgtgaaaacgaccagtatgggaagccgggtggctgctctgacatctgcctgctggccaacagccacaaggcgcggacctgccgctgccgttccggcttcagcctgggcagtgacgggaagtcatgcaagaagccggagcatgagctgttcctcgtgtatggcaagggccggccaggcatcatccggggcatggatatgggggccaaggtcccggatgagcacatgatccccattgaaaacctcatgaacccccgagccctggacttccacgctgagaccggcttcatctactttgccgacaccaccagctacctcattggccgccagaagattgatggcactgagcgggagaccatcctgaaggacggcatccacaatgtggagggtgtggccgtggactggatgggagacaatctgtactggacggacgatgggcccaaaaagacaatcagcgtggccaggctggagaaagctgctcagacccgcaagactttaatcgagggcaaaatgacacaccccagggctattgtggtggatccactcaatgggtggatgtactggacagactgggaggaggaccccaaggacagtcggcgtgggcggctggagagggcgtggatggatggctcacaccgagacatctttgtcacctccaagacagtgctttggcccaatgggctaagcctggacatcccggctgggcgcctctactgggtggatgccttctacgaccgcatcgagacgatactgctcaatggcacagaccggaagattgtgtatgaaggtcctgagctgaaccacgcctttggcctgtgtcaccatggcaactacctcttctggactgagtatcggagtggcagtgtctaccgcttggaacggggtgtaggaggcgcaccccccactgtgacccttctgcgcagtgagcggccccccatctttgagatccgaatgtatgatgcccagcagcagcaagttggcaccaacaaatgccgggtgaacaatggcggctgcagcagcctgtgcttggccacccctgggagccgccagtgcgcctgtgctgaggaccaggtgttggacgcagacggcgtcacttgcttggcgaacccatcctacgtgcctccaccccagtgccagccaggcgagtttgcctgtgccaacagccgctgcatccaggagcgctggaagtgtgacggagacaacgattgcctggacaacagtgatgaggccccagccctctgccatcagcacacctgcccctcggaccgattcaagtgcgagaacaaccggtgcatccccaaccgctggctctgcgacggggacaatgactgtgggaacagtgaagatgagtccaatgccacttgttcagcccgcacctgcccccccaaccagttctcctgtgccagtggccgctgcatccccatctcctggacgtgtgatctggatgacgactgtggggaccgctctgatgagtctgcttcgtgtgcctatcccacctgcttccccctgactcagtttacctgcaacaatggcagatgtatcaacatcaactggagatgcgacaatgacaatgactgtggggacaacagtgacgaagccggctgcagccactcctgttctagcacccagttcaagtgcaacagcgggcgttgcatccccgagcactggacctgcgatggggacaatgactgcggagactacagtgatgagacacacgccaactgcaccaaccaggccacgaggccccctggtggctgccacactgatgagttccagtgccggctggatggactatgcatccccctgcggtggcgctgcgatggggacactgactgcatggactccagcgatgagaagagctgtgagggagtgacccacgtctgcgatcccagtgtcaagtttggctgcaaggactcagctcggtgcatcagcaaagcgtgggtgtgtgatggcgacaatgactgtgaggataactcggacgaggagaactgcgagtccctggcctgcaggccaccctcgcacccttgtgccaacaacacctcagtctgcctgccccctgacaagctgtgtgatggcaacgacgactgtggcgacggctcagatgagggcgagctctgtgaccagtgctctctgaataacggtggctgcagccacaactgctcagtggcacctggcgaaggcattgtgtgttcctgccctctgggcatggagctggggcccgacaaccacacctgccagatccagagctactgtgccaagcatctcaaatgcagccaaaagtgcgaccagaacaagttcagcgtgaagtgctcctgctacgagggctgggtcctggaacctgacggcgagagctgccgcagcctggaccccttcaagccgttcatcattttctccaaccgccatgaaatccggcgcatcgatcttcacaaaggagactacagcgtcctggtgcccggcctgcgcaacaccatcgccctggacttccacctcagccagagcgccctctactggaccgacgtggtggaggacaagatctaccgcgggaagctgctggacaacggagccctgactagtttcgaggtggtgattcagtatggcctggccacacccgagggcctggctgtagactggattgcaggcaacatctactgggtggagagtaacctggatcagatcgaggtggccaagctggatgggaccctccggaccaccctgctggccggtgacattgagcacccaagggcaatcgcactggatccccgggatgggatcctgttttggacagactgggatgccagcctgccccgcattgaggcagcctccatgagtggggctgggcgccgcaccgtgcaccgggagaccggctctgggggctggcccaacgggctcaccgtggactacctggagaagcgcatcctttggattgacgccaggtcagatgccatttactcagcccgttacgacggctctggccacatggaggtgcttcggggacacgagttcctgtcgcacccgtttgcagtgacgctgtacgggggggaggtctactggactgactggcgaacaaacacactggctaaggccaacaagtggaccggccacaatgtcaccgtggtacagaggaccaacacccagccctttgacctgcaggtgtaccacccctcccgccagcccatggctcccaatccctgtgaggccaatgggggccagggcccctgctcccacctgtgtctcatcaactacaaccggaccgtgtcctgcgcctgcccccacctcatgaagctccacaaggacaacaccacctgctatgagtttaagaagttcctgctgtacgcacgtcagatggagatccgaggtgtggacctggatgctccctactacaactacatcatctccttcacggtgcccgacatcgacaacgtcacagtgctagactacgatgcccgcgagcagcgtgtgtactggtctgacgtgcggacacaggccatcaagcgggccttcatcaacggcacaggcgtggagacagtcgtctctgcagacttgccaaatgcccacgggctggctgtggactgggtctcccgaaacctgttctggacaagctatgacaccaataagaagcagatcaatgtggcccggctggatggctccttcaagaacgcagtggtgcagggcctggagcagccccatggccttgtcgtccaccctctgcgtgggaagctctactggaccgatggtgacaacatcagcatggccaacatggatggcagcaatcgcaccctgctcttcagtggccagaagggccccgtgggcctggctattgacttccctgaaagcaaactctactggatcagctccgggaaccataccatcaaccgctgcaacctggatgggagtgggctggaggtcatcgatgccatgcggagccagctgggcaaggccaccgccctggccatcatgggggacaagctgtggtgggctgatcaggtgtcggaaaagatgggcacatgcagcaaggctgacggctcgggctccgtggtccttcggaacagcaccaccctggtgatgcacatgaaggtctatgacgagagcatccagctggaccataagggcaccaacccctgcagtgtcaacaacggtgactgctcccagctctgcctgcccacgtcagagacgacccgctcctgcatgtgcacagccggctatagcctccggagtggccagcaggcctgcgagggcgtaggttcctttctcctgtactctgtgcatgagggaatcaggggaattcccctggatcccaatgacaagtcagatgccctggtcccagtgtccgggacctcgctggctgtcggcatcgacttccacgctgaaaatgacaccatctactgggtggacatgggcctgagcacgatcagccgggccaagcgggaccagacgtggcgtgaagacgtggtgaccaatggcattggccgtgtggagggcattgcagtggactggatcgcaggcaacatctactggacagaccagggctttgatgtcatcgaggtcgcccggctcaatggctccttccgctacgtggtgatctcccagggtctagacaagccccgggccatcaccgtccacccggagaaagggtacttgttctggactgagtggggtcagtatccgcgtattgagcggtctcggctagatggcacggagcgtgtggtgctggtcaacgtcagcatcagctggcccaacggcatctcagtggactaccaggatgggaagctgtactggtgcgatgcacggacagacaagattgaacggatcgacctggagacaggtgagaaccgcgaggtggttctgtccagcaacaacatggacatgttttcagtgtctgtgtttgaggatttcatctactggagtgacaggactcatgccaacggctctatcaagcgcgggagcaaagacaatgccacagactccgtgcccctgcgaaccggcatcggcgtccagcttaaagacatcaaagtcttcaaccgggaccggcagaaaggcaccaacgtgtgcgcggtggccaatggcgggtgccagcagctgtgcctgtaccggggccgtgggcagcgggcctgcgcctgtgcccacgggatgctggctgaagacggagcatcgtgccgcgagtatgccggctacctgctctactcagagcgcaccattctcaagagtatccacctgtcggatgagcgcaacctcaatgcgcccgtgcagcccttcgaggaccctgagcacatgaagaacgtcatcgccctggcctttgactaccgggcaggcacctctccgggcacccccaatcgcatcttcttcagcgacatccactttgggaacatccaacagatcaacgacgatggctccaggaggatcaccattgtggaaaacgtgggctccgtggaaggcctggcctatcaccgtggctgggacactctctattggacaagctacacgacatccaccatcacgcgccacacagtggaccagacccgcccaggggccttcgagcgtgagaccgtcatcactatgtctggagatgaccacccacgggccttcgttttggacgagtgccagaacctcatgttctggaccaactggaatgagcagcatcccagcatcatgcgggcggcgctctcgggagccaatgtcctgacccttatcgagaaggacatccgtacccccaatggcctggccatcgaccaccgtgccgagaagctctacttctctgacgccaccctggacaagatcgagcggtgcgagtatgacggctcccaccgctatgtgatcctaaagtcagagcctgtccaccccttcgggctggccgtgtatggggagcacattttctggactgactgggtgcggcgggcagtgcagcgggccaacaagcacgtgggcagcaacatgaagctgctgcgcgtggacatcccccagcagcccatgggcatcatcgccgtggccaacgacaccaacagctgtgaactctctccatgccgaatcaacaacggtggctgccaggacctgtgtctgctcactcaccagggccatgtcaactgctcatgccgagggggccgaatcctccaggatgacctcacctgccgagcggtgaattcctcttgccgagcacaagatgagtttgagtgtgccaatggcgagtgcatcaacttcagcctgacctgcgacggcgtcccccactgcaaggacaagtccgatgagaagccatcctactgcaactcccgccgctgcaagaagactttccggcagtgcagcaatgggcgctgtgtgtccaacatgctgtggtgcaacggggccgacgactgtggggatggctctgacgagatcccttgcaacaagacagcctgtggtgtgggcgagttccgctgccgggacgggacctgcatcgggaactccagccgctgcaaccagtttgtggattgtgaggacgcctcagatgagatgaactgcagtgccaccgactgcagcagctacttccgcctgggcgtgaagggcgtgctcttccagccctgcgagcggacctcactctgctacgcacccagctgggtgtgtgatggcgccaatgactgtggggactacagtgatgagcgcgactgcccaggtgtgaaacgccccagatgccctctgaattacttcgcctgccctagtgggcgctgcatccccatgagctggacgtgtgacaaagaggatgactgtgaacatggcgaggacgagacccactgcaacaagttctgctcagaggcccagtttgagtgccagaaccatcgctgcatctccaagcagtggctgtgtgacggcagcgatgactgtggggatggctcagacgaggctgctcactgtgaaggcaagacgtgcggcccctcctccttctcctgccctggcacccacgtgtgcgtccccgagcgctggctctgtgacggtgacaaagactgtgctgatggtgcagacgagagcatcgcagctggttgcttgtacaacagcacttgtgacgaccgtgagttcatgtgccagaaccgccagtgcatccccaagcacttcgtgtgtgaccacgaccgtgactgtgcagatggctctgatgagtcccccgagtgtgagtacccgacctgcggccccagtgagttccgctgtgccaatgggcgctgtctgagctcccgccagtgggagtgtgatggcgagaatgactgccacgaccagagtgacgaggctcccaagaacccacactgcaccagcccagagcacaagtgcaatgcctcgtcacagttcctgtgcagcagtgggcgctgtgtggctgaggcactgctctgcaacggccaggatgactgtggcgacagctcggacgagcgtggctgccacatcaatgagtgtctcagccgcaagctcagtggctgcagccaggactgtgaggacctcaagatcggcttcaagtgccgctgtcgccctggcttccggctgaaggacgacggccggacgtgtgctgatgtggacgagtgcagcaccaccttcccctgcagccagcgctgcatcaacacccatggcagctataagtgtctgtgtgtggagggctatgcaccccgcggcggcgacccccacagctgcaaggctgtgactgacgaggaaccgtttctgatcttcgccaaccggtactacctgcgcaagctcaacctggacgggtccaactacacgttacttaagcagggcctgaacaacgccgttgccttggattttgactaccgagagcagatgatctactggacagatgtgaccacccagggcagcatgatccgaaggatgcaccttaacgggagcaatgtgcaggtcctacaccgtacaggcctcagcaaccccgatgggctggctgtggactgggtgggtggcaacctgtactggtgcgacaaaggccgggacaccatcgaggtgtccaagctcaatggggcctatcggacggtgctggtcagctctggcctccgtgagcccagggctctggtggtggatgtgcagaatgggtacctgtactggacagactggggtgaccattcactgatcggccgcatcggcatggatgggtccagccgcagcgtcatcgtggacaccaagatcacatggcccaatggcctgacgctggactatgtcactgagcgcatctactgggccgacgcccgcgaggactacattgaatttgccagcctggatggctccaatcgccacgttgtgctgagccaggacatcccgcacatctttgcactgaccctgtttgaggactacgtctactggaccgactgggaaacaaagtccattaaccgagcccacaagaccacaggcaccaacaaaacgctcctcatcagcacgctgcaccggcccatggacctgcatgtcttccatgccctgcgccagccagacgtgcccaatcacccctgcaaggtcaacaatggtggctgcagcaacctgtgcctgctgtcccccgggggagggcacaaatgtgcctgccccaccaacttctacctgggcagcgatgggcgcacctgtgtgtccaactgcacggctagccagtttgtatgcaagaacgacaagtgcatccccttctggtggaagtgtgacaccgaggacgactgcggggaccactcagacgagcccccggactgccctgagttcaagtgccggcccggacagttccagtgctccacaggtatctgcacaaaccctgccttcatctgcgatggcgacaatgactgccaggacaacagtgacgaggccaactgtgacatccacgtctgcttgcccagtcagttcaaatgcaccaacaccaaccgctgtattcccggcatcttccgctgcaatgggcaggacaactgcggagatggggaggatgagagggactgccccgaggtgacctgcgcccccaaccagttccagtgctccattaccaaacggtgcatcccccgggtctgggtctgcgaccgggacaatgactgtgtggatggcagtgatgagcccgccaactgcacccagatgacctgtggtgtggacgagttccgctgcaaggattcgggccgctgcatcccagcgcgttggaagtgtgacggagaggatgactgtggggatggctcggatgagcccaaggaagagtgtgatgaacgcacctgtgagccataccagttccgctgcaagaacaaccgctgcgtgcccggccgctggcagtgcgactacgacaacgattgcggtgacaactccgatgaagagagctgcacccctcggccctgctccgagagtgagttctcctgtgccaacggccgctgcatcgcggggcgctggaaatgcgatggagaccacgactgcgcggacggctcggacgagaaagactgcaccccccgctgtgacatggaccagttccagtgcaagagcggccactgcatccccctgcgctggcgctgtgacgcagacgccgactgcatggacggcagcgacgaggaggcctgcggcactggcgtgcggacctgccccctggacgagttccagtgcaacaacaccttgtgcaagccgctggcctggaagtgcgatggcgaggatgactgtggggacaactcagatgagaaccccgaggagtgtgcccggttcgtgtgccctcccaaccggcccttccgttgcaagaatgaccgcgtctgtctgtggatcgggcgccaatgcgatggcacggacaactgtggggatgggactgatgaagaggactgtgagccccccacagcccacaccacccactgcaaagacaagaaggagtttctgtgccggaaccagcgctgcctctcctcctccctgcgctgcaacatgttcgatgactgcggggacggctctgacgaggaggactgcagcatcgaccccaagctgaccagctgcgccaccaatgccagcatctgtggggacgaggcacgctgcgtgcgcaccgagaaagcggcctactgtgcctgccgctcgggcttccacaccgtgcccggccagcccggatgccaagacatcaacgagtgcctgcgcttcggcacctgctcccagctctgcaacaacaccaagggcggccacctctgcagctgcgctcggaacttcatgaagacgcacaacacctgcaaggccgaaggctctgagtaccaggtcctgtacatcgctgatgacaatgagatccgcagcctgttccccggccacccccattcggcttacgagcaggcattccagggtgacgagagtgtccgcattgatgctatggatgtccatgtcaaggctggccgtgtctattggaccaactggcacacgggcaccatctcctaccgcagcctgccacctgctgcgcctcctaccacttccaaccgccaccggcgacagattgaccggggtgtcacccacctcaacatttcagggctgaagatgcccagaggcatcgccatcgactgggtggccggaaacgtgtactggaccgactcgggccgagatgtgattgaggtggcgcagatgaagggcgagaaccgcaagacgctcatctcgggcatgattgacgagccccacgccattgtggtggacccactgagggggaccatgtactggtcagactggggcaaccaccccaagattgagacggcagcgatggatgggacgcttcgggagacactggtgcaggacaacattcagtggcccacaggcctggccgtggattatcacaatgagcggctgtactgggcagacgccaagctttcagtcatcggcagcatccggctcaatggcacggaccccattgtggctgctgacagcaaacgaggcctaagtcaccccttcagcatcgacgtctttgaggattacatctatggtgtcacctacatcaataatcgtgtcttcaagatccataagtttggccacagccccttggtcaacctgacagggggcctgagccacgcctctgacgtggtcctttaccatcagcacaagcagcccgaagtgaccaacccatgtgaccgcaagaaatgcgagtggctctgcctgctgagccccagtgggcctgtctgcacctgtcccaatgggaagcggctggacaacggcacatgcgtgcctgtgccctctccaacgccccccccagatgctccccggcctggaacctgtaacctgcagtgcttcaacggtggcagctgtttcctcaatgcacggaggcagcccaagtgccgctgccaaccccgctacacgggtgacaagtgtgaactggaccagtgctgggagcactgtcgcaatgggggcacctgtgctgcctccccctctggcatgcccacgtgccggtgccccacgggcttcacgggccccaaatgcacccagcaggtgtgtgcgggctactgtgccaacaacagcacctgcactgtcaaccagggcaaccagccccagtgccgatgcctacccggcttcctgggcgaccgctgccagtaccggcagtgctctggctactgtgagaactttggcacatgccagatggctgctgatggctcccgacaatgccgctgcactgcctactttgagggatcgaggtgtgaggtgaacaagtgcagccgctgtctcgaaggggcctgtgtggtcaacaagcagagtggggatgtcacctgcaactgcacggatggccgggtggcccccagctgtctgacctgcgtcggccactgcagcaatggcggctcctgtaccatgaacagcaaaatgatgcctgagtgccagtgcccaccccacatgacagggccccggtgtgaggagcacgtcttcagccagcagcagccaggacatatagcctccatcctaatccctctgctgttgctgctgctgctggttctggtggccggagtggtattctggtataagcggcgagtccaaggggctaagggcttccagcaccaacggatgaccaacggggccatgaacgtggagattggaaaccccacctacaagatgtacgaaggcggagagcctgatgatgtgggaggcctactggacgctgactttgccctggaccctgacaagcccaccaacttcaccaaccccgtgtatgccacactctacatggggggccatggcagtcgccactccctggccagcacggacgagaagcgagaactcctgggccggggccctgaggacgagataggggaccccttggcatagggccctgccccgtcggactgcccccagaaagcctcctgccccctgccggtgaagtccttcagtgagcccctccccagccagcccttccctggccccgccggatgtataaatgtaaaaatgaaggaattacattttatatgtgagcgagcaagccggcaagcgagcacagtattatttctccatcccctccctgcctgctccttggcacccccatgctgccttcagggagacaggcagggagggcttggggctgcacctcctaccctcccaccagaacgcaccccactgggagagctggtggtgcagccttcccctccctgtataagacactttgccaaggctctcccctctcgccccatccctgcttgcccgctcccacagcttcctgagggctaattctgggaagggagagttctttgctgcccctgtctggaagacgtggctctgggtgaggtaggcgggaaaggatggagtgttttagttcttgggggaggccaccccaaaccccagccccaactccaggggcacctatgagatggccatgctcaacccccctcccagacaggccctccctgtctccagggcccccaccgaggttcccagggctggagacttcctctggtaaacattcctccagcctcccctcccctggggacgccaaggaggtgggccacacccaggaagggaaagcgggcagccccgttttggggacgtgaacgttttaataatttttgctgaattcctttacaactaaataacacagatattgttataaataaaattgtaaaaaaaaaaaaa

SEQ ID NO: 770 - DNA, 1538 bp, Homo sapiens
  CDS (195)..(1373)
gttattcacaccccccccccccccccccccccccccccgcccgcgcggaacgtcggacatgcgcacgcgctgcctcatccctcactaaagggaataagcttgcggccgccaacttttttttttttttttttggtttccggttctgtcacctccaggctgagccgggctggcggaagaggcacgtgcgctgctgaatggagctggtcgctggttgctacgagcaggtcctctttgggttcgctgtacacccggagcccgaggcttgcggcgaccacgagcaatggactcttgtggctgacttcactcaccatgctcacactgcctccttgtcagcagtagctgtaaatagtcgttttgtggtcactgggagcaaagatgaaacaattcacatttatgacatgaaaaagaagattgagcatggggctctagtgcatcacagtggtacaataacttgcctgaaattctatggcaacaggcatttaatcagtggagcggaagatggactcatctgtatctgggatgcaaagaaatgggaatgcctgaagtcaattaaagctcacaaaggacaggtgaccttcctttctattcacccatctggcaagttggccctgtcggttggtacagataaaactttaagaacgtggaatcttgtagaaggaagatcagcattcataaaaaatataaaacaaaatgctcacatagtagaatggtccccaagaggagagcagtatgtagttatcatacagaataaaatagacatctatcagcttgacactgcatccattagtggcaccatcacaaatgaaaagagaatttcctctgttaaatttctttcagagtctgtccttgcagtggctggagatgaagaagttataaggttttttgactgtgattcactagtgtgcctctgcgaatttaaagctcatgaaaacagggtaaaggacatgttcagttttgaaattccagagcatcatgttattgtttcagcatcgagtgatggtttcatcaaaatgtggaagcttaagcaggataagaaagttcccccatctttactctgtgaaataaacactaatgccaggctgacgtgtcttggagtgtggctagacaaagtggcagacatgaaagaaagccttcctccagctgcagagccttctcctgtaagtaaagaacagtccaaaattggcaaaaaggagcctggtgacacagtgcacaaagaagaaaagcggtcaaaacctaacacaaagaaacgcggtttaacaggtgacagtaagaaagcaacaaaagaaagtggcctgatatcaaccaagaagaggaaaatggtagaaatgttggaaaagaagaggaaaaagaagaaaataaaaccaatgcagtgaatcacagatgtctcctgaaagaactcttttagatgaaatcattctactcaaatgtaccttaattttttttttttccctgagtaaaagcaagaaatttcttcctttggaaaaaatatatatattaaaaaaccacttttagatggttttttttaaaaaaaaaaaaaa

SEQ ID NO: 771 - DNA, 1588 bp, Homo sapiens
  CDS (466)..(1266)
tagcatgatgtatataactatctattcgatgatgaagataccccaccaaacccaaaaaaagagatctctcgaggatccgaattcgcggccgcgtcgacgtgtaggccagggggttggcggtgccgtgtcatggaggctcagtctctgagcagccattgaaggggaaggaactgcgggtgtgtgtgtgtatgtgtgtgtgtatgtgtgtgcgcgcgtgcgtgcgtgtgtgtgcgcgcgctagtgtgtggacaaggaggtgggggcagctgagttagagtcccaactcttggactccatttgctattctcttctttctcccccacacctatctggtggtggtagtgggcgtttatatttgcgttccttttcattcatttctaaatctcttaaaaattttgggttgggggtattggggaaggcaggaaagggaaaaggagagtagtagctgaagagcaagaggaggacatggagatgaagaagaagattaacctggagttaaggaacagatccccggaggaggtgacagagttagtccttgataattgcctgtgtgtcaatggggaaattgaaggcctgaatgatactttcaaagaactagaatttctgagtatggctaatgtggaactaagttcgctggcccggcttcccagcttaaataaacttcgaaaattggagcttagtgataatataatttctggaggcttggaagtcctggcagagaaatgtccaaatcttacctacctcaatctgagtggaaacaaaataaaagatctcagtacagtagaagctctgcaaaatcttaaaaatttgaaaagtcttgacctgtttaactgtgagatcacaaacctggaagattatagagaaagtatttttgaactactgcagcaaatcacatacttagatggatttgatcaggaggataatgaagcgccggactctgaagaggaggatgatgaggatggagatgaagatgatgaagaggaagaggaaaatgaagctggtccaccggaaggatatgaggaagaggaggaggaagaggaggatgaggatgaggatgaagatgaagatgaagcaggttcagagttgggagagggagaagaggaagtgggcctctcatacttaatgaaagaagaaattcaggatgaagaagatgatgatgactatgttgaagaaggggaagaagaggaagaagaggaagaaggaggtcttcgaggggagaagaggaaacgagatgctgaagacgatggagaggaagaagatgactagatcattctaagaccagattctctaatgtttctgggtgtgcaatagagtgatcacatctttgtttcttcatgtacgatagctatccctacagaagataatgtgtaactttttataggaaaagtgtggttttactatttttgccttatcattccaaataagaactagtctgttaatgatcatattgtatgtagagaaaaattttcattgactcccattgtggaattccctagcaatttatttagacttaattttttaaattcaagcttactgtattagtcatttttagcccataattaaaacatgatcacttttaaaaaaaaaa

SEQ ID NO: 772 - DNA, 1033 bp, Homo sapiens
  CDS (53)..(766)
gtaccggtccggaattcccgggtcgacgatttcgtgtgcccgggacgaagccatggccctggaggcggcgggagggccgccggaggaaacgctgtcactgtggaaacgggagcaagctcggctgaaggcccacgtcgtagaccgggacaccgaggcgtggcagcgagaccccgccttctcgggtctgcagagggtcgggggcgttgacgtgtccttcgtgaaaggggacagtgtccgcgcttgtgcttccctggtggtgctcagcttccctgagctcgaggtccttcttgtggatggaaacggggtactccaccaccgaggctttggggtggcctgccaccttggcgtccttacagacctgccgtgtgttggggtggccaagaaacttctgcaggtggatgggctggagaacaacgccctgcacaaggagaagatccgactcctgcagactcgaggagactcattccctctgctgggagactctgggactgtcctgggaatggccctgaggagccacgaccgcagcaccaggcccctctacatctccgtgggccacaggatgagcctggaggccgctgtgcgcctgacttgctgctgctgcaggttccggatcccagagcccgtgcgccaggctgacatctgctcccgagagcacatccgcaagtcgctgggactccccgggccacccacaccgaggagcccgaaggcgcagaggccagtggcatgccccaaaggagactccggagagtcctcagcactttgttgaacgtggtggtgagagcacacgtcctcgtctcattcctgatcgaacgcggtggtgagagcacacgtcctcgtctcgttcgtgacagaacgcggtggtgagagcacacgtcgtcgtttcgatcctgatcgaacgcggtggtgagagcgcacgtcctcgtctcgttcctgaacgaacgcggtggtgagagcccacgtcgtggtctcgatcctgattgaactaggagacgaaatcgtcgacagcgaagtcgacccgggaattccgggccgg

SEQ ID NO: 773 - DNA, 1168 bp, Homo sapiens
  CDS (53)..(901)
gtaccggtccggaattcccgggtcgacgatttcgtgtgcccgggacgaagccatggccctggaggcggcgggagggccgccggaggaaacgctgtcactgtggaaacgggagcaagctcggctgaaggcccacgtcgtagaccgggacaccgaggcgtggcagcgagaccccgccttctcgggtctgcagagggtcgggggcgttgacgtgtccttcgtgaaaggggacagtgtccgcgcttgtgcttccctggtggtgctcagcttccctgagctcgaggtggtgtatgaggagagccgcatggtcagcctcacagccccctacgtgtcgggcttcctggccttccgagaggtgcccttcttgctggagctggtgcaacagctgcgggagaaggagccgggcctcatgccccaggtccttcttgtggatggaaacggggtactccaccaccgaggctttggggtggcctgccaccttggcgtccttacagacctgccgtgtgttggggtggccaagaaacttctgcaggtggatgggctggagaacaacgccctgcacaaggagaagatccgactcctgcagactcgaggagactcattccctctgctgggagactctgggactgtcctgggaatggccctgaggagccacgaccgcagcaccaggcccctctacatctccgtgggccacaggatgagcctggaggccgctgtgcgcctgacttgctgctgctgcaggttccggatcccagagcccgtgcgccaggctgacatctgctcccgagagcacatccgcaagtcgctgggactccccgggccacccacaccgaggagcccgaaggcgcagaggccagtggcatgccccaaaggagactccggagagtcctcagcactttgttgaacgtggtggtgagagcacacgtcctcgtctcattcctgatcgaacgcggtggtgagagcacacgtcctcgtctcgttcgtgacagaacgcggtggtgagagcacacgtcgtcgtttcgatcctgatcgaacgcggtggtgagagcgcacgtcctcgtctcgttcctgaacgaacgcggtggtgagagcccacgtcgtggtctcgatcctgattgaactaggagacgaaatcgtcgacagcgaagtcgacccgggaattccgggccgg

SEQ ID NO: 774 - DNA, 4076 bp, Homo sapiens
  CDS (243)..(3329)
aagctggcacgcctgcaggtaccggtccggaattcccgggtcgacgatttcgtgtccccgcagtgtcgaggcgcgggccctggcaggtcctttctcgaggcagggggcacggtagcacagggagcttctctttgtgggcgggcgcgaggcccgctagggggttatactggggaacgtgcctgcgcgtgcttggatagttcatttaaagcccccatccctgcaaggtggtgctttctaccaatatgaatcttttcaacctggaccgttttggctttgagaaaaggaataagattgaggaagcgcccgaagcaacccctcaaccttcccagcctggcccttcttcaccaatttctcttagtgctgaagaggagaatgctgaaggggaagttagcagggcaaacactcctgattcagatataactgaaaaaacagaagattctagtgttccagaaactccagataatgaaagaaaagcaagtatatcatatttcaaaaatcaaagaggaatacagtatattgatttgtcttctgatagtgaagatgtcgtttccccaaattgctccaatacagttcaagagaaaacattcaacaaagatacagtgattatagtttctgagccatctgaagatgaagagtcccaaggccttcctaccatggcacgtagaaatgatgatatttcagaactggaagacctttcggaattggaagaccttaaagatgctaaacttcagactttgaaggaactttttccacaaagaagtgacaatgatttacttaagttgattgaatcaacaagcactatggatggagcaattgctgctgccttgctgatgtttggtgatgcaggtggtgggcccaggaaaagaaaattatcttcttcttcagagccatatgaggaagatgaatttaatgatgatcaatctataaaaaagacaagactggatcatggagaggaatcaaatgagtctgcagaatctagcagtaattgggaaaagcaggaaagtattgtactgaaattgcaaaaggaatttcccaattttgataaacaggaacttagagaagtactcaaggaacatgaatggatgtacacagaagctttagaatctctaaaagtgtttgcagaagaccaagatatgcaatatgcatcacaaagtgaggttccaaatggaaaagaagtttcttcaagaagtcaaaattaccctaaaaatgcaactaaaacaaaactaaaacagaaattttcaatgaaagcacaaaatggctttaacaaaaaaaaaaaaaaaaatgtttttaatccaaagagagttgttgaagactctgaatatgattcaggttctgatgtcggtagttcactagatgaggactatagtagtggtgaagaagtgatggaggatggctataaaggtaaaattcttcacttccttcaagatgcttcaattggtgaacttactttgattcctcagtgttctcagaaaaaggctcagaagataacagaactccggccctttaatagttgggaggctctgttcacaaagatgtccaaaactaatggcttatcagaagatttgatatggcactgtaaaacactgatccaagaaagagatgtagttataaggcttatgaacaaatgtgaagacatttcaaataaattgaccaaacaagttaccatgcttactggaaatggaggtggatggaacatagaacaaccttccattctaaaccaaagtttgtcactcaagccctatcagaaggttggtttgaattggctggcattggtacataaacatggacttaatggcattttggcagatgaaatgggcctaggaaaaactattcaagccattgcatttctggcatacctctatcaggagggtaataatggtcctcatttgatcgttgttccagcttcaactatagataactggttaagggaagttaatttatggtgccctactttgaaggtcctctgttactatggttctcaagaagaacgtaaacaaattagatttaacattcatagtagatatgaagattacaatgtaattgtgaccacatataactgtgcgatcagcagttctgatgatcgtagtctgtttcgacggctgaaacttaattacgcaatttttgatgagggccatatgctgaagaatatgggctccattcgctaccagcaccttatgacaattaatgcaaataaccgtttgctgctcacaggcacacctgtacagaacaatctgttagaactcatgtcgctgttgaattttgttatgccacacatgtttagtagtagcaccagtgaaatacgaagaatgttttcctctaagacaaaatcagcagatgagcaaagcatatatgaaaaggagagaatagcacatgcaaaacaaattataaagccatttattctcagaagagtaaaagaagaggttctcaagcagttaccccccaagaaagatcgaattgagttgtgtgcaatgtcggagaagcaggagcaactctatttgggtcttttcaacagattgaaaaaatctatcaataacttggtcacagaaaaaaacacagaaatgtgcaatgtcatgatgcagttgaggaaaatggccaatcatcctttattacatcgccaatattacacagctgaaaaactcaaggaaatgtctcagcttatgctaaaggaacctacacattgtgaggctaaccctgacctgatctttgaagatatggaagttatgacagacttcgaactacatgtactttgtaaacagtaccgacacattaataactttcagttagacatggacttgattttagattctggaaaatttcgagttttaggatgcatcttgtctgaattgaaacagaagggtgatagagttgtgttatttagccaatttaccatgatgctggatatcttagaggttctattaaaacatcatcagcataggtacctcagattagatggaaagactcagatttctgaaaggattcatctaattgatgagtttaataccgatatggatatctttgtgtttctgctatcaacaaaagctggtggattaggaataaatctgacttcagcaaatgttgttatacttcacgatattgactgtaatccttataatgacaaacaagcagaagatagatgccatagagtaggccagactaaagaagtactagttataaaactaataagccaagggacgattgaagaatccatgctaaaaattaaccaacagaaattgaaactagaacaggatatgactacagtagatgaaggtgatgaagggagtatgccagcagatatagccacattactaaaaacatcaatgggcctgtgaaataagaactgtgaactctcaattgatgaggaaatatcaacttggtgcactcaaggacatttacattatgatgaccatggggtttatgaacatttataactttttataatttccatattacatttctcatagtatggacaactttttgccactaactgaattctccaaatactcacacgtgaaatttcaaaaaagaagccacaaatatgtagttctgaagatgttgaataatcattttacaaagcagttttctgaatggggattagttggtgattgtttgtaacaaatatgctaatgctttagaaatgtcagtatttttgtaattatttctacctccaaatatatatatattgtctttcactggataatgtgtgtagatttttacatgtgccttatttgacaatgcttatgtcttgtttttgcttgtctcatttgaagttcttttttattatgttaaagaatgcagctgtatagattatatagctttcattttattgctatttgaagcagatgttcaccaatgtcagcaagaactcaacctgaatttaaaggtggcattccatatactaacatcccccaggtcctctcaagtacttctgctgaaacaaatttatttggctaggcactaagttgttttccagtgaatagtaactaaagaagcccctaccttgctccatggattaagcccttccgttcattttccaactggcctaatggggcctattactcttgctaatcctgtgcatc

SEQ ID NO: 775 - DNA, 912 bp, Homo sapiens
  CDS (9)..(908)
ccactcgcatgcagctaccgctccggaattcccgggtcgacggtttcgtctcgaacttggtcggggcgcggatcccgagagggaaagtcataacaaccgcacgagggagttcgactggcgaactggaaggccacgcctcctcccgcctgccccctcagccctgtggctgggggcagagctcagacttattatctaggatagatttggatgaactaatgaaaaaagatgaaccgcctcttgattttcctgataccctggaaggatttgaatatgcttttaatgaaaagggacagttaagacacataaaaactggggaaccatttgtttttaactaccgggaagatttacacagatggaaccagaaaagatacgaggctctaggagagatcatcacgaagtatgtatatgagctcctggaaaaggattgtaatttgaaaaaagtatctattccagtagatgccactgagagtgaaccaaagagttttatctttatgagtgaggatgctttgacaaatccacagaaactgatggttttaattcatggtagtggtgttgtcagggcagggcagtgggctagaagacttattataaatgaagatctggacagtggcacacagataccgtttattaaaagagctgtggctgaaggatatggagtaatagtactaaatcccaatgaaaactatattgaagtagaaaagccgaagatacacgtacagtcatcatctgatagttcagatgaaccagcagaaaaacgggaaagaaaagataaagtttctaaagaaacaaagaagcgacgtgatttctatgagaagtatcgtaacaacaaaaaaaaaaaaaaaaaaacacagaaggggggccaggtacaacaatacaacctgataatgagtcataatacaattcactagacca

SEQ ID NO: 776 - DNA, 3835 bp, Homo sapiens
  CDS (14)..(3175)
gagagaagatagaatggctcttgacaatttattggcaaacctacccccggccaagccaggaaaaagtagcagtttagaaatgactccctacaatacacctcagctatctccagcaaccactccagcaaataaaaagaatcgattacctatagcaactcggagcagaagccgcaccaatatgctaatggacctacatatggaccatgaaggatcatctcaagaaaccatccaggaggtgcaaccagaagaggtgttggtcatttccttaggtacaggtccccagcttactccagggatgatgtcagaaaatgaggtcctaaacatgcagctttcggatggaggacaaggagatgtccctgttgatgaaaacaaactccatggtaaacctgataaaaccttgcgcttttccctctgcagtgataatctggaaggaatatctgaaggtccttcaaatcgctccaattcagtgtcctccctagacctagaaggagagtctgtgtcagaacttggagcaggaccttctggcagtaatggagttgaagctctacagctgttagaacatgagcaagctacaacacaggataaccttgatgataagctaaggaagtttgaaattcgtgacatgatgggattaacagatgatagggacatatcagaaacagtgagtgagacctggagtacagacgtcttgggaagtgactttgaccctaatattgatgaagatcgcttgcaagaaattgcaggtgctgcagcagagaacatgttaggcagtttgctgtgcctcccaggttcagggtcagtgcttcttgacccctgcactggttctaccatatcagagacaacaagtgaagcttggagtgtagaggtattgccaagtgactcagaggccccagacctaaagcaggaggagcgtctgcaagaactggagagctgttctggactgggtagcacatctgatgatacggatgtcagggaggtcagttcccgccccagcacaccaggcctcagtgttgtgtccggcataagtgcaacctctgaggatattcccaataagattgaagacctgagatctgagtgcagctctgattttgggggtaaagattctgtcactagtccagacatggatgaaataactcacgattttctttatatacttcagccaaaacaacattttcaacacattgaagcagaagcagacatgagaatccagctgtcttctagtgcccaccagctgacctctcctccttctcagtcagagtctctgctggccatgtttgatccactgtcttcacatgaaggggcttctgctgtggtaaggccaaaggttcactatgctaggccatcgcatccaccaccagatcccccaatcctggaaggagctgtgggaggaaatgaggccaggttgccaaactttggttcccatgttttaactccagctgaaatggaggcattcaagcaaaggcattcttaccctgagagactagttcgaagcaggagctctgatatagtatcttctgtccggagacccatgagtgaccccagctggaaccggcgtccaggaaatgaagagcgagaactccctccagctgcagccattggtgctacttctttggtggctgcacctcattcatcatcttcatccccgagtaaggactcctcaagaggagagactgaagaacgcaaagatagcgatgatgagaaatcagacaggaacagaccttggtggagaaaacgttttgtttcagccatgcctaaagctcctataccatttagaaagaaagaaaaacaagaaaaagacaaagatgatctggggcctgacagattctcaacactcacagatgatcccagccctagactcagtgcacaagctcaggtggctgaggatattctggacaaatacaggaatgccattaaacggaccagccccagtgatggagcaatggcaaactatgaaagtacagaggttatgggtgatggtgaaagtgcacatgattctccccgtgacgaagcactgcagaacatctcggctgatgatctcccagactctgcaagccaagcagcccacccgcaggattcagctttctcttacagagatgcaaaaaagaaactgaggcttgctctttgctctgcggactctgttgccttcccagtgctgacccattcaacaaggaatggtttaccagaccacacagacccagaagacaatgaaattgtatgcttcttaaaagttcaaatagctgaagcaattaatttacaagataagaatctaatggctcaacttcaagaaacaatgcgctgtgtgtgccgttttgataataggacttgtaggaaactgctggcttcgattgctgaggactacagaaaaagagccccatatattgcttatctcactcgttgtcgacaaggactacagaccacacaggctcacctggaaaggctattgcaaagagttttgcgggacaaagaagtggccaatcgatactttaccactgtctgtgtgagattactgcttgagagcaaagaaaagaagatcagggaattcattcaagactttcagaaactcaccgcagctgacgataaaactgctcaggtagaagattttctgcagtttctttatggtgcaatggcccaggatgtcatatggcaaaacgcgagtgaagaacagcttcaagatgcacagctggccattgagcgaagcgtgatgaaccggattttcaagctcgccttctaccctaatcaagatggggacatacttcgcgaccaggttcttcatgaacatatccagagattgtctaaagtagtgactgcaaatcacagagctcttcagataccagaggtttatcttcgagaagcaccatggccatctgcacaatcagaaatcaggacaataagtgcttataaaaccccccgggacaaagtgcagtgcatcctgagaatgtgctctacgattatgaacctcctgagcctggccaatgaggactctgtccctggagcggatgactttgttcctgtgttggtgtttgtgttgataaaggcaaatccaccctgtttgctgtctactgtgcagtatatcagtagcttttatgctagctgtctgtctggagaggagtcctattggtggatgcagttcacagcagcagtagaattcattaaaaccatcgatgaccgaaagtgaccaagaccaaggcccaccaaggcagcagactgttaatcagacaaacagatctctgagaaggtgcatcagctgctttgaaggctgaagattgttttgtatgatactgcacagcatcaggcattttaaagcagatctttactaaacaggttaatgagctaacaagcaggttctctcgtctttgggctctttcctttctgagttgcatattctattttcttgtccccaagtagagactagtactacaaaaagggaccacatttttcaagtatttctaagtataaaaaacaaaacaaaaatctcttaggaaatgtctagacctccattcttggattccctttctttccttttattttaaaaaagaacagtacccctcttttaagatgctgtcttacattaatgagcatctaatggaaagaaggtatgagttgcactgaggattagaatagtggtgcgttagtggcattatctataaatacactcacctaaattgaaagctaagaaggaaatgtaaatataatatatatttatatttgatgtaatatggacatctgcagattctaataaacaaggactattgctgatagtaggctgtgacatactgtcttgtgaaatggtttccttgacaaaatttaagctgagcttaaaagcaaaaaaaaaaaa

SEQ ID NO: 777 - DNA, 3754 bp, Homo sapiens
  CDS (14)..(3094)
gagagaagatagaatggctcttgacaatttattggcaaacctacccccggccaagccaggaaaaagtagcagtttagaaatgactccctacaatacacctcagctatctccagcaaccactccagcaaataaaaagaatcgattacctatagcaactcggagcagaagccgcaccaatatgctaatggacctacatatggaccatgaaggatcatctcaagaaaccatccaggaggtgcaaccagaagaggtgttggtcatttccttaggtacaggtccccagcttactccagggatgatgtcagaaaatgaggtcctaaacatgcagctttcggatggaggacaaggagatgtccctgttgatgaaaacaaactccatggtaaacctgataaaaccttgcgcttttccctctgcagtgataatctggaaggaatatctgaaggtccttcaaatcgctccaattcagtgtcctccctagacctagaaggagagtctgtgtcagaacttggagcaggaccttctggcagtaatggagttgaagctctacagctgttagaacatgagcaagctacaacacaggataaccttgatgataagctaaggaagtttgaaattcgtgacatgatgggattaacagatgatagggacatatcagaaacagtgagtgagacctggagtacagacgtcttgggaagtgactttgaccctaatattgatgaagatcgcttgcaagaaattgcaggtgctgcagcagagaacatgttaggcagtttgctgtgcctcccaggttcagggtcagtgcttcttgacccctgcactggttctaccatatcagagacaacaagtgaagcttggagtgtagaggtattgccaagtgactcagaggccccagacctaaagcaggaggagcgtctgcaagaactggagagctgttctggactgggtagcacatctgatgatacggatgtcagggaggtcagttcccgccccagcacaccaggcctcagtgttgtgtccggcataagtgcaacctctgaggatattcccaataagattgaagacctgagatctgagtgcagctctgattttgggggtaaagattctgtcactagtccagacatggatgaaataactcacggtgcccaccagctgacctctcctccttctcagtcagagtctctgctggccatgtttgatccactgtcttcacatgaaggggcttctgctgtggtaaggccaaaggttcactatgctaggccatcgcatccaccaccagatcccccaatcctggaaggagctgtgggaggaaatgaggccaggttgccaaactttggttcccatgttttaactccagctgaaatggaggcattcaagcaaaggcattcttaccctgagagactagttcgaagcaggagctctgatatagtatcttctgtccggagacccatgagtgaccccagctggaaccggcgtccaggaaatgaagagcgagaactccctccagctgcagccattggtgctacttctttggtggctgcacctcattcatcatcttcatccccgagtaaggactcctcaagaggagagactgaagaacgcaaagatagcgatgatgagaaatcagacaggaacagaccttggtggagaaaacgttttgtttcagccatgcctaaagctcctataccatttagaaagaaagaaaaacaagaaaaagacaaagatgatctggggcctgacagattctcaacactcacagatgatcccagccctagactcagtgcacaagctcaggtggctgaggatattctggacaaatacaggaatgccattaaacggaccagccccagtgatggagcaatggcaaactatgaaagtacagaggttatgggtgatggtgaaagtgcacatgattctccccgtgacgaagcactgcagaacatctcggctgatgatctcccagactctgcaagccaagcagcccacccgcaggattcagctttctcttacagagatgcaaaaaagaaactgaggcttgctctttgctctgcggactctgttgccttcccagtgctgacccattcaacaaggaatggtttaccagaccacacagacccagaagacaatgaaattgtatgcttcttaaaagttcaaatagctgaagcaattaatttacaagataagaatctaatggctcaacttcaagaaacaatgcgctgtgtgtgccgttttgataataggacttgtaggaaactgctggcttcgattgctgaggactacagaaaaagagccccatatattgcttatctcactcgttgtcgacaaggactacagaccacacaggctcacctggaaaggctattgcaaagagttttgcgggacaaagaagtggccaatcgatactttaccactgtctgtgtgagattactgcttgagagcaaagaaaagaagatcagggaattcattcaagactttcagaaactcaccgcagctgacgataaaactgctcaggtagaagattttctgcagtttctttatggtgcaatggcccaggatgtcatatggcaaaacgcgagtgaagaacagcttcaagatgcacagctggccattgagcgaagcgtgatgaaccggattttcaagctcgccttctaccctaatcaagatggggacatacttcgcgaccaggttcttcatgaacatatccagagattgtctaaagtagtgactgcaaatcacagagctcttcagataccagaggtttatcttcgagaagcaccatggccatctgcacaatcagaaatcaggacaataagtgcttataaaaccccccgggacaaagtgcagtgcatcctgagaatgtgctctacgattatgaacctcctgagcctggccaatgaggactctgtccctggagcggatgactttgttcctgtgttggtgtttgtgttgataaaggcaaatccaccctgtttgctgtctactgtgcagtatatcagtagcttttatgctagctgtctgtctggagaggagtcctattggtggatgcagttcacagcagcagtagaattcattaaaaccatcgatgaccgaaagtgaccaagaccaaggcccaccaaggcagcagactgttaatcagacaaacagatctctgagaaggtgcatcagctgctttgaaggctgaagattgttttgtatgatactgcacagcatcaggcattttaaagcagatctttactaaacaggttaatgagctaacaagcaggttctctcgtctttgggctctttcctttctgagttgcatattctattttcttgtccccaagtagagactagtactacaaaaagggaccacatttttcaagtatttctaagtataaaaaacaaaacaaaaatctcttaggaaatgtctagacctccattcttggattccctttctttccttttattttaaaaaagaacagtacccctcttttaagatgctgtcttacattaatgagcatctaatggaaagaaggtatgagttgcactgaggattagaatagtggtgcgttagtggcattatctataaatacactcacctaaattgaaagctaagaaggaaatgtaaatataatatatatttatatttgatgtaatatggacatctgcagattctaataaacaaggactattgctgatagtaggctgtgacatactgtcttgtgaaatggtttccttgacaaaatttaagctgagcttaaaagcaaaaaaaaaaaa

SEQ ID NO: 778 - DNA, 3754 bp, Homo sapiens
  CDS (14)..(3094)
gagagaagatagaatggctcttgacaatttattggcaaacctacccccggccaagccaggaaaaagtagcagtttagaaatgactccctacaatacacctcagctatctccagcaaccactccagcaaataaaaagaatcgattacctatagcaactcggagcagaagccgcaccaatatgctaatggacctacatatggaccatgaaggatcatctcaagaaaccatccaggaggtgcaaccagaagaggtgttggtcatttccttaggtacaggtccccagcttactccagggatgatgtcagaaaatgaggtcctaaacatgcagctttcggatggaggacaaggagatgtccctgttgatgaaaacaaactccatggtaaacctgataaaaccttgcgcttttccctctgcagtgataatctggaaggaatatctgaaggtccttcaaatcgctccaattcagtgtcctccctagacctagaaggagagtctgtgtcagaacttggagcaggaccttctggcagtaatggagttgaagctctacagctgttagaacatgagcaagctacaacacaggataaccttgatgataagctaaggaagtttgaaattcgtgacatgatgggattaacagatgatagggacatatcagaaacagtgagtgagacctggagtacagacgtcttgggaagtgactttgaccctaatattgatgaagatcgcttgcaagaaattgcaggtgctgcagcagagaacatgttaggcagtttgctgtgcctcccaggttcagggtcagtgcttcttgacccctgcactggttctaccatatcagagacaacaagtgaagcttggagtgtagaggtattgccaagtgactcagaggccccagacctaaagcaggaggagcgtctgcaagaactggagagctgttctggactgggtagcacatctgatgatacggatgtcagggaggtcagttcccgccccagcacaccaggcctcagtgttgtgtccggcataagtgcaacctctgaggatattcccaataagattgaagacctgagatctgagtgcagctctgattttgggggtaaagattctgtcactagtccagacatggatgaaataactcacgattttctttatatacttcagccaaaacaacattttcaacacattgaagcagaagcagacatgagaatccagctgtcttctagtgcccaccagctgacctctcctccttctcagtcagagtctctgctggccatgtttgatccactgtcttcacatgaaggggcttctgctgtggtaaggccaaaggttcactatgctaggccatcgcatccaccaccagatcccccaatcctggaaggagctgtgggaggaaatgaggccaggttgccaaactttggttcccatgttttaactccagctgaaatggaggcattcaagcaaaggcattcttaccctgagagactagttcgaagcaggagctctgatatagtatcttctgtccggagacccatgagtgaccccagctggaaccggcgtccaggaaatgaagagcgagaactccctccagctgcagccattggtgctacttctttggtggctgcacctcattcatcatcttcatccccgagtaaggactcctcaagaggagagactgaagaacgcaaagatagcgatgatgagaaatcagacaggaacagaccttggtggagaaaacgttttgtttcagccatgcctaaagatgatcccagccctagactcagtgcacaagctcaggtggctgaggatattctggacaaatacaggaatgccattaaacggaccagccccagtgatggagcaatggcaaactatgaaagtacagaggttatgggtgatggtgaaagtgcacatgattctccccgtgacgaagcactgcagaacatctcggctgatgatctcccagactctgcaagccaagcagcccacccgcaggattcagctttctcttacagagatgcaaaaaagaaactgaggcttgctctttgctctgcggactctgttgccttcccagtgctgacccattcaacaaggaatggtttaccagaccacacagacccagaagacaatgaaattgtatgcttcttaaaagttcaaatagctgaagcaattaatttacaagataagaatctaatggctcaacttcaagaaacaatgcgctgtgtgtgccgttttgataataggacttgtaggaaactgctggcttcgattgctgaggactacagaaaaagagccccatatattgcttatctcactcgttgtcgacaaggactacagaccacacaggctcacctggaaaggctattgcaaagagttttgcgggacaaagaagtggccaatcgatactttaccactgtctgtgtgagattactgcttgagagcaaagaaaagaagatcagggaattcattcaagactttcagaaactcaccgcagctgacgataaaactgctcaggtagaagattttctgcagtttctttatggtgcaatggcccaggatgtcatatggcaaaacgcgagtgaagaacagcttcaagatgcacagctggccattgagcgaagcgtgatgaaccggattttcaagctcgccttctaccctaatcaagatggggacatacttcgcgaccaggttcttcatgaacatatccagagattgtctaaagtagtgactgcaaatcacagagctcttcagataccagaggtttatcttcgagaagcaccatggccatctgcacaatcagaaatcaggacaataagtgcttataaaaccccccgggacaaagtgcagtgcatcctgagaatgtgctctacgattatgaacctcctgagcctggccaatgaggactctgtccctggagcggatgactttgttcctgtgttggtgtttgtgttgataaaggcaaatccaccctgtttgctgtctactgtgcagtatatcagtagcttttatgctagctgtctgtctggagaggagtcctattggtggatgcagttcacagcagcagtagaattcattaaaaccatcgatgaccgaaagtgaccaagaccaaggcccaccaaggcagcagactgttaatcagacaaacagatctctgagaaggtgcatcagctgctttgaaggctgaagattgttttgtatgatactgcacagcatcaggcattttaaagcagatctttactaaacaggttaatgagctaacaagcaggttctctcgtctttgggctctttcctttctgagttgcatattctattttcttgtccccaagtagagactagtactacaaaaagggaccacatttttcaagtatttctaagtataaaaaacaaaacaaaaatctcttaggaaatgtctagacctccattcttggattccctttctttccttttattttaaaaaagaacagtacccctcttttaagatgctgtcttacattaatgagcatctaatggaaagaaggtatgagttgcactgaggattagaatagtggtgcgttagtggcattatctataaatacactcacctaaattgaaagctaagaaggaaatgtaaatataatatatatttatatttgatgtaatatggacatctgcagattctaataaacaaggactattgctgatagtaggctgtgacatactgtcttgtgaaatggtttccttgacaaaatttaagctgagcttaaaagcaaaaaaaaaaaa

SEQ ID NO: 779 - DNA, 6632 bp, Homo sapiens
  CDS (1)..(2058)
atggaaacactggagtctgaattgacctgtccaatctgcctagagttgtttgaagacccccttctgctcccttgtgctcacagcctctgcttcagctgtgcccatcgcattttggtatcaagctgcagctctggtgaatccattgaacccattactgctttccagtgtcctacctgcaggtatgttatctcgctgaaccaccggggcctggatggcctcaagaggaatgtgactctgcagaacattattgatcgcttccagaaggcttcagtcagtgggcccaattcccctagtgagagccgccgggaaaggacttacaggcccaccactgccatgtctagcgagcgaattgcttgccaattctgtgagcaggacccgccaagggatgcagtaaaaacatgcatcacctgtgaggtctcctactgtgaccgttgcctgcgggccacgcaccccaacaagaaacctttcaccagccaccgcctggtggaaccagtgccagacacacatcttcgagggatcacctgcctggaccatgagaatgagaaagtgaacatgtactgtgtatctgatgaccaattgatctgtgccttatgcaaactggtgggtcgtcaccgagaccatcaggtcgcatccctgaatgatcgatttgagaaactcaagcaaactctggagatgaacctcaccaacctggttaagcgcaacagcgaactagaaaatcaaatggccaaactaatacagatctgccagcaggttgaggtgaatactgctatgcatgaggcaaaacttatggaagaatgtgacgagttggtagagatcatccagcagaggaagcaaatgatcgctgtcaaaatcaaagagacaaaggttatgaaactgagaaagttggcacagcaggttgctaattgccgccagtgtcttgaacggtcaacagtcctcatcaaccaagctgagcatatcctgaaagaaaatgaccaggcacggtttctacagtctgcaaaaaatattgctgagagggtcgctatggcaactgcatcttctcaagttctgattccagacatcaattttaatgatgcctttgaaaactttgctttagatttttccagagaaaagaaactgctagaggggttagattatttaacagccccaaacccaccatctatccgagaagaactctgtactgcctcccatgacaccattacagtccactggatctcggatgatgagttcagcatcagctcctatgagcttcagtacaccatattcactggccaggctaacttcatcagcctgtataattcagtagacagctggatgattgttcccaacattaaacagaaccattacacagtgcatggactccagagcgggactcgctacatcttcatcgttaaagccataaaccaagccggcagccggaacagtgaacctacccgactaaaaacaaacagccaaccctttaaattggatcccaaaatgactcacaagaagttgaagatctccaatgatggattgcagatggagaaggatgaaagctctctaaagaagagccacaccccagagaggtttagtggcacagggtgctatggggcagcaggaaatatattcattgacagtggctgccactattgggaggtggtcatgggttcctcaacatggtatgcaattggcattgcctacaaatcagctccaaagaatgaatggattggcaagaatgcctcctcatgggtcttctctcgctgcaatagtaacttcgtggtgagacacaacaacaaggaaatgctggtggatgtgcccccacacctgaagcgtctgggtgtcctcctggattatgacaacaatatgctgtctttctatgacccagctaactctctccatcttcatacttttgatgtgaccttcattcttccagtttgtccaacatttacaatctggaacaaatccctaatgatcctgtctggcttgcctgccccagattttattgattaccctgagcggcaggaatgcaactgcaggcctcaagaatccccttatgtttctgggatgaaaacctgtcattaagtttcaggagagtatataattcactggctctctagttcagcagttcttcccctcctacacctaagttagcgttcaatatacgagacacaaaataaagtttgtttgaagcatccaaaataactagatattgcagatttaatttttgtgcattaaagcttgtatttgaattaatttattgagtttttcagaacaaattatctgagtagtctgcgttcaagccattggagaaaaatttagaaaatgcctctgttgtcattggagaattaaaaattcccaatgatttaagaatataaattatattggaagcaattagggtaattctagttaaataatgtggaaaggtgccctgaataaggagctagcaagccagagcggggggtggtcagcctttctagtactggccagtttggccatgtagaattttgaacagtgtcaaattatcacatattatattttacttttgatgaaaacctatcatcaagggtttgttaggaaaccatgaatgtgtatatgtaatatataaagtgaacatatatgtactttatatatattcacttgtgtatgtatgtttatgcatattcactttatatattacatatacacaaaaaacttttttttccaaacaccacctcgaactagaacaaaaaactttttaatttgctaatttgagtgagaaatatactggaagggaaaataagttacaccatccatttttgtcccctaaaggaaacatcaaaatcaatcaacatttatttcctccctctatccatcattgccttcctccctcctgtcacgcacacatacacatgcaaccatgacacagataatgggaagagctttattggattagcagagatttacagacaagattgcacaagagatgctgttgctggatagaaaattgatcaggtagaagtgatgctacctacttgaggatggccatctgaattgttaaaaattctgtcatagactattaaaaaaaaagttttactactcccaagtacacacagttatgagaattaggcttttaaaaagttgcacagtgaaggctctttaggaacctactttacttaatcagtaaaaattgagtattattgatgcaccaactattcccatataaatgtacttgctttttcagataaaacacttctgaagtgctcaagaatgtctgaaaacagtttgttttcttaaataggataaataatcattccttttgcaatcttgtttacagtattcattctcttagccaatccctccacgcaaatggagacaaacttcatcccagtcctaaccagtatagttgaagggaatggagccttgtagtctatgatttttttttttaaatttccatcgaagggattggggatgtcagagagccagagctttcccctttccaggagctaagttggcttcggaagtcttctgggatttgtgaaaatattactgttgtaaaattacaaagtggtagccataacaactccctcagattggagacttgaaatgtcaaaactcccctcttcctttcccctagtttggtggatgctcatttattaattcattcaataaactattagatgccaggtaccaaactactgccatgggagtgcacatattaacaaaatgctctacctgctgccaaatggcttactattctgtggaagaaacaaagtatataatcctccccaataacagttatgtattgtttgttcacttaatgtggaaggcaagactgatgcagacacacaaggaaggctcaaaaatataaatctagcagcaatgtcatcttttttgattttaaataccatatgtgcttactgctaatcaggaaatgaacaacctcagtaaaattcatcagtgctggtaaatagtttgctgtagtggaaagctcataacctttggattcaaatgatcctagtttctgtaccatttattagcgttgtgacctaggacaagtacctcacttctctgagcctgtttcctcctctgtaaaataatgtctacttcacaaggctgtttcaaaggttaaaaaagatagcatatgtaaactgtcttagctcagcgcttgacatttcctaagtgtgccataaatattaatctctttccttactcccagctccaatacagcgtaacagtgctttaaaatgtatgtccttcatttctccttcatttctcagtcacctttgtctcttccctagggcatatccccaaattcttaaacaaaaaaaaatgatttttttccccttcatcaaacttttcactggctcccttagcacccagtagaaggtcccaactccttacagagtctgggttttcatgtccctgtttgcttacacagcttaatcttttgccactttccccctcacattgattaaggtagccaagtttaactatttacacaactattcacacaagttattctctgggcctgcagcagaaacatgattaacaattttaatgcccagagtaaacaacagaaatttttcttaaattaaaggaatagtgtgaaaatgctgtaagtacagaaaatgcaacctccattccagtagaacaatttcctttgccttgtccttggctctccaaaactgttcatttattgtggtgtcttttagattttagtgccctgggacaaagatctaatttccccaccctacttttgactctatcctggactacctttcctcacctctatctctctcaaccagactaactctttattccttagacttgatgatgcatccctctttagagatccaaagacaccccaagcatccccctctctcagcaataatcacattgtatagcagtgtttttcaaagtgtggtcctcacaccgcctgtgttagaatcacctttagtgtttgttaaaagaattgattttgggttcccactcctgacctaaccagaatatctgagaacataggcaggaatttacatttttgacaagctcctcatgattctgatgcaccaaaaattttaatgaataatcatcttccctactagactgaacaccttgagaggaaggactgtgtcttttattgttgttatattgttaatacctggcacagtgcttggaacattagcttggctaatgtttattgaatgaatgtatgaatgaaaaaatgcattatgaaagtttcctcttgtactctcatgttcgtagtgatgtttgttacttcctgggcagaaaagcttggttactactccatttgagctgtattaattctattttgcagagatatcaaggctcctacataataaatgatcattgtcctcctcaaaaactctttggcagttatcttggggaaatgtctttggagcatatggcaccattgttttcagtaacatttcagtcttgtcaaactttgttgtttgaaggtggatttacatttcggttatagccaaaaatcactcaaagctaagcctacttaaaaaagtggggaattaaactgggtttggattaagcaatgaagtttgactctgaagtcccaaattctgagtcaaacagtgaaaaatgacttctaagatacaacatggtgacaaagtacttagtgggggtgcgatgggccccagatatttacttcagttaacttggcttttatagaatcctggcaatgccatggaccttaagagaagtaattggctacctctagctaaacccagctggacaaagagaataggacttgtatttaacattttcaaagaaggtgactgcataagcttttgttgttgttgctctactcaacctgttctccacaactgtttctaccagaagattattttatgtctgcaatttatgcttgtttccactttttatattgtcttattgaagaaagcacaaaaataatcaaaaataaagtaaaacctgttttgagagtatgaaagaaattttaatgccacattgaggttctggctacttgtaagtaagagtaactgcatctggatgtgtttttattatacaattctatgtgtatctttagatgcagtgaaattcagattgcagcaaaatcacttatctgttcttttcggctaaaacactctaggtgaattttctaaacttccatggtttacatatttatatatgactaccaagatggagcaatccacggatggacttttgaataaactcaaatatttgatactgcttcctccaaggaatggagagtgtcaggcaggtaggtaagaaccactcctacacttatttctagctcctgaagccaactgcagccttggagccaatggctgtatttggctgtgtgttacaggttggccaaactgattgccatcaggtcagacaaaactgccttttatggtgtagtctgccagcttcagacatatgctgtattgttgttattggctagactatttattagactattgttggactattttttatcaaatgctttaccccacgcctgtttgtattgggagctctggaccaatagtgtctctcctagtgacagaaatatgagcatctgtggattacacagcctcatccctctctacaatattccagcccatccaaaatgctatattatgaattaaataaatatatatgtattcatgaaaaaaaaaaaa

SEQ ID NO: 780 - DNA, 3437 bp, Homo sapiens
  CDS (564)..(3080)
aaggatccttaattaaattaatctcctccccccccccggtctttgccattcggatcgctgggaaagcggtgggaatccaactgaagagcagccagaggagagctgaagagaggagggggaggccgatgacctgggctctgggcctctgaaggacccccttctgtcagctgtggggcttgacactacttgaacaagaaaaggagggggaaactgcaccacataagtgaagatccacctccagtggctgctctgctggtggtggggttgctgctgacaaccaccctcaacgggtctgcacccatccaggaaatctctgtcttcctcaagcttggttgtgcctgttctacactctatctgtattattgaattactgactgagactgtgtttgggaaggaggctgagtgactactggactggatattgactctaactcttgtttccaagcttatatcctcaatcacctaaagatcagagtgtgaagaaacaaacctgtgacagatctgtggttgaggtttagactacgggaggagtatattacctgactttctttgtaacttgtaccatgactggggcagagattgagcctagtgcccaggccaagcctgaaaagaaggctggggaagaggttatcgctgggcctgagagagagaatgatgtccctctggtggtcagacccaaggttaggacccaggcaactactggggcaaggcccaaaactgagaccaagtctgtgcctgcggcaaggcccaaaactgaggcccaagcaatgtctggggcaaggcccaaaactgaggtccaagtaatgggtggtgcaagacccaaaacggaggctcaaggaatcacaggggccaggcccaaaaccgatgccagggcagtaggtggcgctcgttctaaaactgatgccaaggcaatccctggagcaaggcccaaggatgaggcccaggcatgggcccagagtgaatttgggactgaagcagtgtcacaggcagaaggagtgtcccagactaatgccgttgcttggccactggccactgctgagtctggatcagttactaaatctaagggcctgtctatggatagagaactagtcaatgtggatgctgaaacctttcctggcacccagggtcagaaaggaatccagccctggtttggaccaggggaggagactaatatggggtcttggtgctattccaggcccagggccagagaggaggcctctaatgagtctgggttctggtcagcagatgagacctctacagcgtcttctttctggactggagaagagacaagtgtcagatcatggcccagggaagagtccaataccaggtccaggcacagggctaaacatcagactaatcccaggtccaggcccagatccaagcaagaagcctatgttgattcctggtctggatctgaggatgaggccagcaacccattctccttctgggttggagaaaataccaataacttgttcaggcccagagtcagggaggaggcaaatatcaggtccaagctcaggacaaatagagaagattgttttgaatctgagtctgaagatgagttctataagcagtcctgggttttgcctggagaagaggccaatagtagattcaggcacagagacaaagaagatcctaatactgccttgaaactcagggcccagaaagatgttgacagtgatagggtcaaacaagaacccaggtttgaggaggaagtcattattgggtcctggttctgggcagaaaaagaggccagtttggagggtggagcttcagcaatctgtgaatctgagccaggaactgaggagggggccattggcggatccgcgtactgggctgaggaaaagtccagtttgggggctgtggccagagaagaggccaagccggagtctgaagaagaggccatatttgggtcctggttctgggacagagatgaggcctgctttgacctaaatccctgtcctgtgtacaaggtcagtgataggttcagagatgcagctgaggagcttaatgcatcctccaggccccaaacctgggacgaggtcactgttgaattcaaacctggtctttttcatggggttggcttccgatccacaagcccctttggaattcccgaagaggcttctgaaatgcttgaggcaaagcccaagaacctggaacttagcccagaaggagaagagcaggaatctttgcttcagcctgatcagcctagtcctgagttcacatttcagtatgatccttcctaccggtcagtccgggaaattcgagagcatcttagggccagggagagtgcagagtctgagagttggtcctgcagctgcatacaatgtgagctgaaaattggttctgaagagtttgaagaattccttttattaatggacaaaattcgggatccttttattcatgaaatatctaaaattgcaatgggtatgagaagtgcttctcaatttacccgagatttcattcgagattcaggtgttgtctcacttattgaaaccttgcttaattatccatcctctagagttaggacaagttttttggaaaatatgattcacatggctccaccttatccaaatctaaacatgattgagacattcatatgtcaagtgtgtgaggaaacccttgcacatagtgtggattcccttgagcagctgactggaataaggatgcttagacacctcactatgactattgactatcacacactgattgccaactatatgtccgggtttctctccttattaaccacagccaatgcgagaacgaagtttcacgttctgaaaatgctattgaatttgtctgaaaatcctgctgtggcaaaaaaactattcagtgccaaagctctttcaatatttgtgggtctctttaacatagaagagacaaatgataatattcaaattgttattaaaatgtttcagaatatcagtaacattataaaaagtggaaagatgtccttaattgatgatgatttcagtcttgagccgcttatttctgcatttcgtgaatttgaggagttagctaagcaactacaagcccaaatagacaaccaaaatgatcctgaggtgggacaacaaagttaatatgattaaccacctgccgctgatcagccttatgttcccaaagagccctgagtagtgctttggtgttcacagtctgtttttttgttgtaacttatattttttaatgctgatgttaactttgtcaaactcttgttttgagctggatcattttgtggatgccaaatgaatatcaaaactgaaaacacatttgttgatatttgtcttgctgtccagattgcggtatttttcagtattaagttttcaatgaactgtgtcacctaagtaagctaccctgctattcgttgtttaaatatatggttctctatttgagtctgtgttttcaataaagttctatgttaaaattggaaaaaaaaaaaa

SEQ ID NO: 781 - DNA, 4603 bp, Homo sapiens
  CDS (846)..(3911)
ctggtggtccagtacctccaaagatatggaatacactcctgaaatatcctgaaaacttttttttttcagaatcctttaataagcagttatgtcaatctgaaagttgcttacttgtactttatattaatagctattcttgtttttcttatccaaagaaaaatcctctaatccccttttcacatgatagttgttaccatgtttaggcattagtcacatcaacccctctcctctcccaaacttctcttcttcaaatcaaactttattagtccctcctttataatgattccttgcctcgttttatccagatcaattttttttcactttgatgcccagagctgaagaaatggactactgtataaattattcattgccaagagaataattgcattttaaacccatattataacaaagaataatgattatattttgtgatttgtaacaaataccctttattttcccttaactattgaattaaatattttaattatttgtattctctttaactatcttggtatattaaagtattatcttttatatatttatcaatggtggacacttttataggtactctgtgtcatttttgatactgtaggtatcttatttcatttatctttattcttaatgtacgaattcataatatttgattcagaacaaatttatcactaattaacagagtgtcaattatgctaacatctcatttactgattttaatttaaaacagtttttgttaacatgcatgtttagggttggcttcttaataatttcttcttcctcttctctctctcctcttcttttggtcagtgttgtgcgggttaatacaacaaactgtaacaagtgtacctggtatggacttgttgtccgggacgtacattttcgcggtcctgctagcatgcgtggtgttccactctggcgcccaggagaaaaactacaccatccgagaagaaatgccagaaaacgtcctgataggcgacttgttgaaagaccttaacttgtcgctgattccaaacaagtccttgacaactgctatgcagttcaagctagtgtacaagaccggagatgtgccactgattcgaattgaagaggatactggtgagatcttcactactggcgctcgcattgatcgtgagaaattatgtgctggtatcccaagggatgagcattgcttttatgaagtggaggttgccattttgccggatgaaatatttagactggttaagatacgttttctgatagaagatataaatgataatgcaccattgttcccagcaacagttatcaacatatcaattccagagaactcggctataaactctaaatatactctcccagcggctgttgatcctgacgtaggaataaacggagttcaaaactacgaactaattaagagtcaaaacatttttggcctcgatgtcattgaaacaccagaaggagacaagatgccacaactgattgttcaaaaggagttagatagggaagagaaggatacctacgtgatgaaagtaaaggttgaagatggtggctttcctcaaagatccagtactgctattttgcaagtgagtgttactgatacaaatgacaaccacccagtctttaaggagacagagattgaagtcagtataccagaaaatgctcctgtaggcacttcagtgacacagctccatgccacagatgctgacataggtgaaaatgccaagatccacttctctttcagcaatctagtctccaacattgccaggagattatttcacctcaatgccaccactggacttatcacaatcaaagaaccactggatagggaagaaacaccaaaccacaagttactggttttggcaagtgatggtggattgatgccagcaagagcaatggtgctggtaaatgttacagatgtcaatgataatgtcccatccattgacataagatacatcgtcaatcctgtcaatgacacagttgttctttcagaaaatattccactcaacaccaaaattgctctcataactgtgacggataaggatgcggaccataatggcagggtgacatgcttcacagatcatgaaatccctttcagattaaggccagtattcagtaatcagttcctcctggagactgcagcatatcttgactatgagtccacaaaagaatatgccattaaattactggctgcagatgctggcaaacctcctttgaatcagtcagcaatgctcttcatcaaagtgaaagatgaaaatgacaatgctccagttttcacccagtctttcgtaactgtttctattcctgagaataactctcctggcatccagttgacgaaagtaagtgcaatggatgcagacagtgggcctaatgctaagatcaattacctgctaggccctgatgctccacctgaattcagcctggattgtcgtacaggcatgctgactgtagtgaagaaactagatagagaaaaagaggataaatatttattcacaattctggcaaaagataacggggtaccacccttaaccagcaatgtcacagtctttgtaagcattattgatcagaatgacaatagcccagttttcactcacaatgaatacaacttctatgtcccagaaaaccttccaaggcatggtacagtaggactaatcactgtaactgatcctgattatggagacaattctgcagttacgctctccattttagatgagaatgatgacttcaccattgattcacaaactggtgtcatccgaccaaatatttcatttgatagagaaaaacaagaatcttacactttctatgtaaaggctgaggatggtggtagagtatcacgttcttcaagtgccaaagtaaccataaatgtggttgatgtcaatgacaacaaaccagttttcattgtccctccttccaactgttcttatgaattggttctaccgtccactaatccaggcacagtggtctttcaggtaattgctgttgacaatgacactggcatgaatgcagaggttcgttacagcattgtaggaggaaacacaagagatctgtttgcaatcgaccaagaaacaggcaacataacattgatggagaaatgtgatgttacagaccttggtttacacagagtgttggtcaaagctaatgacttaggacagcctgattctctcttcagtgttgtaattgtcaatctgttcgtgaatgagtcggtgaccaatgctacactgattaatgaactggtgcgcaaaagcactgaagcaccagtgaccccaaatactgagatagctgatgtatcctcaccaactagtgactatgtcaagatcctggttgcagctgttgctggcaccataactgtcgttgtagttattttcatcactgctgtagtaagatgtcgccaggcaccacaccttaaggctgctcagaaaaacaagcagaattctgaatgggctaccccaaacccagaaaacaggcagatgataatgatgaagaaaaagaaaaagaagaagaagcattcccctaagaacttgctgcttaattttgtcactattgaagaaactaaggcagatgatgttgacagtgatggaaacagagtcacactagaccttcctattgatctagaagagcaaacaatgggaaagtacaattgggtaactacacctactactttcaagcccgacagccctgatttggcccgacactacaaatctgcctctccacagcctgccttccaaattcagcctgaaactcccctgaattcgaagcaccacatcatccaagaactgcctctcgataacacctttgtggcctgtgactctatctccaagtgttcctcaagcagttcagatccctacagcgtttctgactgtggctatccagtgacgaccttcgaggtacctgtgtccgtacacaccagaccggtaggtatccaagtttctaacacaactttctaactatttttttattattattttcagttgatgtagaactttacaaaatctattgacttcaaagagggatcaaaacaatcatattctacagatgtacccaatagatatatggattcaattaagtttggtagaagatgagaacaaaataactactgatttaggaaaattggatgcagaataataattatagtaggggcaattttgtctgtagatggcagtatgacaattcttgctagagaatatattgaaaaaaacttcaacacaaagggttgtagcactgtcctcagtaccattgtgtgcatgaggatcagaatagtctgggctagatacatcacattaaagcttttcagaatctgataaatagctctaaatactaatgatattgagaagcctagcttcacttgggaaaatctgtggctgttcacagaaattcagcaccaagttattccccccatactctaccaggccttcaggtcctcataaagaaaagtgtcgttttcagattaggaactcaaaattattttggtgcatcaaatctacagtcacacaatataacaagaatgggattagaaaaatgaaagcctactcattctcatctttaagccagagaatgaaatatatatgaggtctctggatagctatttaaatatttgcatatttatgcaaggtattttgagcccttcagaagacattct

SEQ ID NO: 782 - DNA, 1312 bp, Homo sapiens
  CDS (60)..(866)
tgcaggatcccatcgattcgaattcggcacgaggccaggacatctaccggctccttctgatggattttgtgttctctttagtcaattccttcctgggggagtttctgaggagaatcattgggatgcaactgatcacaagtcttggccttcaggagtttgacattgccaggaacgttctagaactgatctatgcacaaactctggtgtggattggcatcttcttctgccccctgctgccctttatccaaatgattatgcttttcatcatgttctactccaaaaatatcagcctgatgatgaatttccagcctccgagcaaagcctggcgggcctcacagatgatgactttcttcatcttcttgctctttttcccatccttcaccggggtcttgtgcaccctggccatcaccatctggagattgaagccttcagctgactgtggcccttttcgaggtctgcctctcttcattcactccatctacagctggatcgacaccctaagtacacggcctggctacctgtgggttgtttggatctatcggaacctcattggaagtgtgcacttctttttcatcctcaccctcattgtgctaatcatcacctatctttactggcagatcacagagggaaggaagattatgataaggctgctccatgagcagatcattaatgagggcaaagataaaatgttcctgatagaaaaattgatcaagctgcaggatatggagaagaaagcaaaccccagctcacttgttctggaaaggagagaggtggagcaacaaggctttttgcatttgggggaacatgatggcagtcttgacttgcgatctagaagatcagttcaagaaggtaatccaagggcctgatgactcttttggtaaccagacaccaatcaaataaggggaggagatgaaaatggaatgatttcttccatgccacctgtgcctttaggaactgcccagaagaaaatccaaggctttagccaggagcggaaactgactaccatgtaattatcaaagtaaaattgggcattccatgctatttttaatacctggattgctgatttttcaagacaaaatacttggggttttccaataaagattgttgtaatattgaaatgagcctacaaaaacctaggaagagataactagggaataatgtatattatcttcaagaagtgtgtgcaggaatgattggttcttagaaatctctcctgccagacttcccagacctggcaaaggtttagaaactgttgctaagaaaagtggtccatcctgaataaacatgtaatactccaaaaaaaaaaaaaaaa

SEQ ID NO: 783 - DNA, 3479 bp, Homo sapiens
  CDS (114)..(3188)
gcgcgcagctggttcccgctctgcagcgcaacgcctgaggcagtgggcgcgctcagtcccgggaccaggcgttctctcctctcgcctctgggcctgggacccgcaaagcggcgatggagcggaggtcgcggaggaagtcgcggcgcaacgggcgctcgaccgcgggcaaggccgccgcgacccagcccgcgaagtctccgggcgcacagctctggctctttcccagcgccgcgggcctccaccgcgcgctgctccggagggtggaggtgacgcgccaactctgctgctcgccggggcgcctcgcggtcttggaacgcggcggggcgggcgtccaggttcaccagctgctcgccgggagcggcggcgcccggacgccgaaatgcattaaattaggaaaaaacatgaagatacattccgtggaccaaggagcagagcacatgctgattctctcatcagatggaaaaccatttgagtatgacaactatagcatgaaacatctaaggtttgaaagcattttacaagaaaaaaaaataattcagatcacatgtggagattaccattctcttgcactctcaaaaggcggtgagctttttgcctggggacagaacctgcatgggcagcttggagttggaaggaaatttccctcaaccaccacaccacagattgtggagcacctcgcaggagtacccttggctcagatttctgccggagaagcccacagcatggccttatccatgtctggcaacatttattcatggggaaaaaatgaatgtggacaactaggcctgggccacactgagagtaaagatgatccatcccttattgaaggactagacaatcagaaagttgaatttgtcgcttgtggtggctctcacagtgccctactcacacaggatgggctgctgtttactttcggtgctggaaaacatgggcaacttggtcataattcaacacagaatgagctaagaccctgtttggtggctgagcttgttgggtatagagtgactcagatagcatgtggaaggtggcacacacttgcctatgtttctgatttgggaaaggtcttttcctttggttctggaaaagatggacaactgggaaatggtggaacacgtgaccagctgatgccgcttccagtgaaagtatcatcaagtgaagaactcaaacttgaaagccatacctcagaaaaggagttaataatgattgctggagggaatcaaagcattttgctctggataaagaaagagaattcatatgttaatctgaagaggacaattcctactctgaatgaagggactgtaaagagatggattgctgatgtggagactaaacggtggcagagcacaaaaagggaaatccaagagatattttcatctcctgcttgtctaactggaagttttttaaggaaaagaagaactacagaaatgatgcctgtttatttggacttaaataaagcaagaaacatcttcagggagttaacccaaaaggactggattactaacatgataaccacctgcctcaaagataatctgctcaaaagacttccatttcattctccaccccaagaagctttagaaattttcttccttctcccagaatgtcctgtgatgcatatttccaacaactgggagagccttgtggttccatttgcaaaggttgtttgtaaaatgagtgaccagtcttcactggttctggaagagtattgggcaactctgcaagaatccactttcagcaaactggtccagatgtttaaaacagccgtcatatgccagttggattactgggatgaaagtgctgaggagaatggtaatgttcaagctctcctagaaatgttgaagaagctgcacagggtaaaccaggtgaaatgtcaactacctgaaagtattttccaagtagacgaactcttgcaccgtctcaatttttttgtagaagtatgcagaaggtacttgtggaaaatgactgtggacgcttcagaaaatgtacaatgctgcgtcatattcagtcactttccatttatctttaataatctgtcgaaaattaaactactacatacagacacacttttaaaaatagagagtaaaaaacataaagcttatcttaggtcggcagcaattgaggaagaaagagagtctgaattcgctttgaggcccacgtttgatctaacagtcagaaggaatcacttgattgaggatgttttgaatcagctaagtcaatttgagaatgaagacctgaggaaagagttatgggtttcatttagtggagaaattgggtatgacctcggaggagtcaagaaagagttcttctactgtctgtttgcagagatgatccagccggaatatgggatgttcatgtatcctgaaggggcttcctgcatgtggtttcctgtcaagcctaaatttgagaagaaaagatacttcttttttggggttctatgtggactttccctgttcaattgcaatgttgccaacctccctttcccactggcactgtttaagaaacttttggaccaaatgccatcattggaagacttgaaagaactcagtcctgatttgggaaagaatttgcaaacacttctggatgatgaaggtgataactttgaggaagtattttacatccattttaatgtgcactgggacagaaacgacacaaacttaattcctaatggaagtagcataactgtcaaccagactaacaagagagactatgtttctaagtatatcaattacattttcaacgactctgtaaaggcggtttatgaagaatttcggagaggattttataaaatgtgcgacgaagacattatcaaattattccaccccgaagaactgaaggatgtgattgttggaaatacagattatgattggaaaacatttgaaaagaatgcacgttatgaaccaggatataacagttcacatcccaccatagtgatgttttggaaggctttccacaaattgactctggaagaaaagaaaaaattccttgtatttcttacaggaactgacagactacaaatgaaagatttaaataatatgaaaataacattttgctgtcctgaaagttggaatgaaagagaccctataagagcactgacatgtttcagtgtcctcttcctccctaaatattctacaatggaaacagttgaagaagcgcttcaagaagccatcaacaacaacagaggatttggctgaccagcttgcttgtccaacagccttattttgttgttgttatcgttgttgttgttgttgttgttgttgtttctctactttgttttgttttaggcttttagcagcctgaagccatggtttttcatttctgtctctagtgataagcaggaaagagggatgaagaagagggtttactggccggttagaacccgtgactgtattctctcccttggatacccctatgcctacatcatattccttacctcttttgggaaatatttttcaaaaataaaataaccgaaaaactaaaaaaag

SEQ ID NO: 784 - DNA, 2140 bp, Homo sapiens
  CDS (39)..(1796)
tgaactctcacccgagcggtttctctttccgggacaacatggcgccgtccacgccgctcttgacagtccgaggatcagaaggactgtacatggtgaatggaccaccacattttacagaaagcacagtgtttccaagggaatctgggaagaattgcaaagtctgtatctttagtaaggatgggaccttgtttgcctggggcaatggagaaaaagtaaatattatcagtgtcactaacaagggactactgcactccttcgacctcctgaaggcagtttgccttgaattctcacccaaaaatactgtcctggcaacgtggcagccttacagtacttctaaagatggcacagctgggatacccaacctacaactttatgatgtgaaaactgggacatgtttgaaatctttcatccagaaaaaaatgcaaaattggtgtccatcctggtcagaagatgaaactctttgtgcccgcaatgttaacaatgaagttcacttctttgaaaacaacaattttaacacaattgcaaataaattgcatttgcaaaaaattaatgattttgtattatcacctggaccccaaccatacaaggtggctgtctatgttccaggaagtaaaggtgcaccttcatttgttagattatatcagtaccccaactttgctggacctcatgcagctttagctaataaaagtttctttaaggcagataaagttacaatgctgtggaataaaaaagctactgctgtgttggtaatagctagcacagatgttgacaagacaggagcttcctactatggagaacaaactctacactacattgcaacaaatggagaaagtgctgtagtgcaattaccaaaaaatggccccatttatgatgtagtttggaattctagttctactgagttttgtgctgtatatggttttatgcctgccaaagcgacaattttcaacttgaaatgtgatcctgtatttgactttggaactggtcctcgtaatgcagcctactatagccctcatggacatatattagtattagctggatttggaaatctgaggggacaaatggaagtgtgggatgtgaaaaactacaaacttatttctaaaccggtggcttctgattctacatattttgcttggtgcccggatggtgagcatattttaacagctacatgtgctcccaggttacgggttaataatggatacaaaatttggcattatactggctctatcttgcacaagtatgatgtgccatcaaatgcagaattatggcaggtttcttggcagccatttttggatggaatatttccagcaaaaacaataacttaccaagcagttccaagtgaagtacccaatgaggaacctaaagttgcaacagcttatagacccccagctttaagaaataaaccaatcaccaattccaaattgcatgaagaggaaccacctcagaatatgaaaccacaatcaggaaacgataagccattatcaaaaacagctcttaaaaatcaaaggaagcatgaagctaagaaagctgcaaagcaggaagcaagaagtgacaagagtccagatttggcacctactcctgccccacagagcacaccacgaaacactgtctctcagtcaatttctggggaccctgagatagacaaaaaaatcaagaacctaaagaagaaactgaaagcaatcgaacaactgaaagaacaagcagcaactggaaaacagctagaaaaaaatcagttggagaaaattcagaaagaaacagcccttctccaggagctggaagatttggaattgggtatttaaagattcacggaaagcaagttgatgaccagaaatcagtgcaaacacatcttctgttaaacccattggtatacacagaatattcctgtgcccacacttaatgtcaatctataattttaaccatttatccaagattctactaagtgtaaaattatttaataatgtctattaaattgatatttatatcttgcatcctatatcatgtcaatatgtgatatagaaaagagatacgtgaattttttagctaagcttgacagattgaaagacaagtgtcatttttttttgtagagggtgatatataccatgtaaatgaataaagacattttaaatttaaaaaaaaaaaaaaa

SEQ ID NO: 785 - DNA, 3159 bp, Homo sapiens
  CDS (85)..(2607)
cgcccgggcaggtcggagacggaggaaaggtggcagccagattacttagagaggcacagaggagagagatcggggtgagtcgccatggggactcccagggcccagcacccgccgcctccccagctgctgttcctaattctgctgagctgtccctggatccagggtctgcccctgaaggaggaggagatattgccagagcctggaagtgagacccccacggtggcctctgaggccctggctgaactgcttcatggggccctgctgaggaggggcccagagatgggctacctgccagggcctccccttgggcctgagggaggagaggaggagacgacgaccaccatcatcaccacgacaactgttaccactacggtgaccagcccagttctgtgtaataacaacatctccgagggcgaagggtatgtggagtctccagatctggggagccccgtcagccgcaccctggggctcctggactgcacttacagcatccatgtctaccctggctacggcattgagatccaggtgcagacgctgaacctgtcacaggaagaggagctcctggtgctggctggtgggggatccccaggcctggccccccgactcctggccaactcatccatgcttggagaaggacaagtccttcggagcccaaccaaccggctgcttctgcacttccagagcccacgggtcccaaggggcggtggcttcaggatccactatcaggcctacctcctgagctgtggcttccctccccggccggcccatggggacgtgagtgtgacggacctgcaccctgggggcactgccacctttcactgtgattcgggctaccagctgcagggagaggagaccctcatctgcctcaatggcacccggccatcctggaacggtgaaacccccagctgcatggcatcctgtggtggcaccatccacaatgccaccctgggccgcatcgtgtccccagagcctgggggagccgtagggcccaacctcacctgccgttgggtcattgaagcagctgaggggcgccggctgcacctgcactttgaaagggtctcgctggatgaggacaatgaccggctgatggtgcgctcagggggcagccccctatcccccgtgatctatgattcggacatggacgatgtccccgagcggggtctcatcagtgacgcccagtccctctacgtggagctgctgtcagagacacctgccaatcccctgctgttaagccttcgatttgaagcctttgaggaggatcgctgcttcgcccccttcctggcacatggaaatgtcactaccacggaccctgagtatcgcccaggggcactggcaaccttctcgtgcctcccaggatatgccctggagccccctgggccccccaatgccatcgaatgtgtggatcccacagaaccccactggaacgacacagagccggcctgcaaagccatgtgtggaggggagctgtcggaaccagctggcgtggtcctctctcccgactggccccagagctatagcccgggccaagactgcgtgtggggcgtgcacgtccaggaagagaagcgcatcttgctccaagttgagatattgaatgtgcgggaaggggacatgctgacgctgtttgacggggacggtcccagcgcccgagtcttggcccagctgcggggacctcagccgcgccgccgccttctctcctctgggcccgacctcacactgcagtttcaggcaccgcccgggcccccaaatccaggcctgggccagggcttcgtattgcacttcaaagaggtcccgaggaacgacacgtgccccgagctgccacctccggagtggggctggagaacggcatcccacggggacctgatccggggcacggtgctcacctaccagtgcgagcctggctacgagctgctaggctccgacattctcacttgccagtgggacctgtcttggagcgccgcgccgcccgcctgccaaaagatcatgacttgtgctgaccctggcgagattgccaacgggcaccgcaccgcctcggacgccggcttccccgttggctcccacgtccagtaccgctgcctgccagggtacagcctcgagggggcagccatgctcacctgctacagccgggacacaggcacacccaagtggagcgatagggtccccaaatgcgccttgaagtacgagccgtgcctgaacccgggggttcccgagaatggctaccagacgctgtacaagcaccactaccaggcgggcgagtctctgcgcttcttctgctatgagggctttgagcttatcggcgaggtcaccatcacctgtgtgcccggccacccctcccagtggaccagccagcccccactctgcaaagtgacccagaccacagatccatcacggcagctggaaggggggaacctggccctggccatcctgctgcctctaggcttggtcattgtcctcggcagtggcgtttacatctactacaccaagcttcagggaaagtcccttttcggcttctcgggctcccactcctacagccccatcaccgtggagtcggacttcagcaacccgctgtatgaagctggggatacgcgggagtatgaagtttccatctgaaccccaagactacagctgcaggacccaggacgcccctcccctcctcattcgggcagagggaaatacgggacccggtctctgcctcctggctgccctcctccctggctgtgtaaatagtctccctatcccacgagggggctttgatggccctggagatcctacagtaaataaaccagcatcctgccgcccaaagccgcctcttctcagttgccaaacgaggggcctgccccccgccctaccggcttttggattctgggaggggaactctgcctccctgcaaatcttgcagcccctcctgcccagggcacccctcaaggactgcccccgatagctctactgttcccttggccacgaaggtgcccccctcccagatgccctggccctaggcctgactccggccaggagggtcagaagaaggacaaaggggagagctgggacaaggccttgcccccttcctgccatctccccaacccacagtctctccacctttgcttctgaattcttgtttttgagcaataaacagaaaatcgccacttgtaaaaaaaaaaaaaa

SEQ ID NO: 786 - DNA, 3198 bp, Homo sapiens
  CDS (85)..(2646)
cgcccgggcaggtcggagacggaggaaaggtggcagccagattacttagagaggcacagaggagagagatcggggtgagtcgccatggggactcccagggcccagcacccgccgcctccccagctgctgttcctaattctgctgagctgtccctggatccagggtctgcccctgaaggaggaggagatattgccagagcctggaagtgagacccccacggtggcctctgaggccctggctgaactgcttcatggggccctgctgaggaggggcccagagatgggctacctgccagggcctccccttgggcctgagggaggagaggaggagacgacgaccaccatcatcaccacgacaactgttaccactacggtgaccagcccagttctgtgtaataacaacatctccgagggcgaagggtatgtggagtctccagatctggggagccccgtcagccgcaccctggggctcctggactgcacttacagcatccatgtctaccctggctacggcattgagatccaggtgcagacgctgaacctgtcacaggaagaggagctcctggtgctggctggtgggggatccccaggcctggccccccgactcctggccaactcatccatgcttggagaaggacaagtccttcggagcccaaccaaccggctgcttctgcacttccagagcccacgggtcccaaggggcggtggcttcaggatccactatcaggcctacctcctgagctgtggcttccctccccggccggcccatggggacgtgagtgtgacggacctgcaccctgggggcactgccacctttcactgtgattcgggctaccagctgcagggagaggagaccctcatctgcctcaatggcacccggccatcctggaacggtgaaacccccagctgcatggcatcctgtggtggcaccatccacaatgccaccctgggccgcatcgtgtccccagagcctgggggagccgtagggcccaacctcacctgccgttgggtcattgaagcagctgaggggcgccggctgcacctgcactttgaaagggtctcgctggatgaggacaatgaccggctgatggtgcgctcagggggcagccccctatcccccgtgatctatgattcggacatggacgatgtccccgagcggggtctcatcagtgacgcccagtccctctacgtggagctgctgtcagagacacctgccaatcccctgctgttaagccttcgatttgaagcctttgaggaggatcgctgcttcgcccccttcctggcacatggaaatgtcactaccacggaccctgagtatcgcccaggggcactggcaaccttctcgtgcctcccaggatatgccctggagccccctgggccccccaatgccatcgaatgtgtggatcccacagaaccccactggaacgacacagagccggcctgcaaagccatgtgtggaggggagctgtcggaaccagctggcgtggtcctctctcccgactggccccagagctatagcccgggccaagactgcgtgtggggcgtgcacgtccaggaagagaagcgcatcttgctccaagttgagatattgaatgtgcgggaaggggacatgctgacgctgtttgacggggacggtcccagcgcccgagtcttggcccagctgcggggacctcagccgcgccgccgccttctctcctctgggcccgacctcacactgcagtttcaggcaccgcccgggcccccaaatccaggcctgggccagggcttcgtattgcacttcaaagaggtcccgaggaacgacacgtgccccgagctgccacctccggagtggggctggagaacggcatcccacggggacctgatccggggcacggtgctcacctaccagtgcgagcctggctacgagctgctaggctccgacattctcacttgccagtgggacctgtcttggagcgccgcgccgcccgcctgccaaaagatcatgacttgtgctgaccctggcgagattgccaacgggcaccgcaccgcctcggacgccggcttccccgttggctcccacgtccagtaccgctgcctgccagggtacagcctcgagggggcagccatgctcacctgctacagccgggacacaggcacacccaagtggagcgatagggtccccaaatgcgccttgaagtacgagccgtgcctgaacccgggggttcccgagaatggctaccagacgctgtacaagcaccactaccaggcgggcgagtctctgcgcttcttctgctatgagggctttgagcttatcggcgaggtcaccatcacctgtgtgcccggccacccctcccagtggaccagccagcccccactctgcaaagttgcctatgaggagctcctggacaaccgaaaactggaagtgacccagaccacagatccatcacggcagctggaaggggggaacctggccctggccatcctgctgcctctaggcttggtcattgtcctcggcagtggcgtttacatctactacaccaagcttcagggaaagtcccttttcggcttctcgggctcccactcctacagccccatcaccgtggagtcggacttcagcaacccgctgtatgaagctggggatacgcgggagtatgaagtttccatctgaaccccaagactacagctgcaggacccaggacgcccctcccctcctcattcgggcagagggaaatacgggacccggtctctgcctcctggctgccctcctccctggctgtgtaaatagtctccctatcccacgagggggctttgatggccctggagatcctacagtaaataaaccagcatcctgccgcccaaagccgcctcttctcagttgccaaacgaggggcctgccccccgccctaccggcttttggattctgggaggggaactctgcctccctgcaaatcttgcagcccctcctgcccagggcacccctcaaggactgcccccgatagctctactgttcccttggccacgaaggtgcccccctcccagatgccctggccctaggcctgactccggccaggagggtcagaagaaggacaaaggggagagctgggacaaggccttgcccccttcctgccatctccccaacccacagtctctccacctttgcttctgaattcttgtttttgagcaataaacagaaaatcgccacttgtaaaaaaaaaaaaaa

SEQ ID NO: 787 - DNA, 3238 bp, Homo sapiens
  CDS (172)..(2121)
ttgtaaacgccgggccagtgaattgaatttaggtgacactatagaagagctatgacgtcgcatgcacgcgtacgtaagcttggatcctctagagcggccgcgggagccggggccgccgcgccggcttctcagcaccccgcaaccggcaccggcgctgtccagaccgaggccatgaagcagattctcggggtgatcgacaagaaacttcggaacctggagaagaaaaagggtaagcttgatgattaccaggaacgaatgaacaaaggggaaaggcttaatcaagatcagctggatgccgtttctaagtaccaggaagtcacaaataatttggagtttgcaaaagaattacagaggagtttcatggcactaagtcaagatattcagaaaacaataaagaagacagcacgtcgggagcagcttatgagagaagaagctgaacagaaacgtttaaaaactgtacttgagctacagtatgttttggacaaattgggagatgatgaagtgcggactgacctgaaacaaggtttgaatggagtgccaatattgtccgaagaggagttgtcattgttggatgaattctataagctagtagaccctgaacgggacatgagcttgaggttgaatgaacagtatgaacatgcctccattcacctgtgggacctgctggaagggaaggaaaaacctgtatgtggaaccacctataaagttctaaaggaaattgttgagcgtgtttttcagtcaaactactttgacagcacccacaaccaccagaatgggctgtgtgaggaagaagaggcagcctcagcacctgcagttgaagaccaggtacctgaagctgaacctgagccagcagaagagtacactgagcaaagtgaagttgaatcaacagagtatgtaaatagacagttcatggcagaaacacagttcaccagtggtgaaaaggagcaggtagatgagtggacagttgaaacggttgaggtggtaaattcactccagcagcaacctcaggctgcatccccttcagtaccagagccccactctttgactccagtggctcaggcagatccccttgtgagaagacagcgagtacaagaccttatggcacaaatgcagggtcccgataatttcatacaggattcaatgctggattttgaaaatcagacacttgatcctgccattgtatctgcacagcctatgaatccaacacaaaacatggacatgccccagctggtttgccctccagttcattctgaatctagacttgctcagcctaatcaagttcctgtacaaccagaagcgacacaggttcctttggtatcatccacaagtgaggggtacacagcatctcaacccttgtaccagccttctcatgctacagagcaacgaccacagaaggaaccaattgatcagattcaggcaacaatctctttaaatacagaccagactacagcatcatcatcccttcctgctgcgtctcagcctcaagtatttcaggctgggacaagcaaacctttacatagcagtggaatcaatgtaaatgcagctccattccaatccatgcaaacggtgttcaatatgaatgccccagttcctcctgttaatgaaccagaaactttaaaacagcaaaatcagtaccaggccagttataaccagagcttttctagtcagcctcaccaagtagaacaaacagagcttcagcaagaacagcttcaaacagtggttggcacttaccatggttccccagaccagtcccatcaagtgactggtaaccaccagcagcctcctcagcagaacactggatttccacgtagcaatcagccctattacaatagtcgtggtgtgtctcgtggaggctcccgtggtgctagaggcttgatgaatggataccggggccctgcaatggattcagaggaggatatgatggttaccgcccttcattctctaacactccaaacagtggttatacacagtctcagttcagtgctccccgggattactctggctatcaacgggatggatatcagcagaatttcaagcgaggctctgggcagagtggaccacggggagccccacgaggtcgtggagggcccccaagacccaacagagggatgccgcaaatgaacactcagcaagtgaattaatctgattcacaggattatgtttaatcgccaaaaacacactggccagtgtaccataatatgttaccagaagagttattatctatttgttctccctttcaggaaacttattgtaaagggactgttttcatcccataaagacaggactacaattgtcagctttctattacctggatatggaaggaaactatttttactctgcatgttctgtcctaagcgtcatcttgagccttgcacatgatactcagattcctcacccttgcttaggagtaaaacaatatactttacagggtgataataatctccatagttatttgaagtggcttgaaaaaggcaagattgacttttatgacattggataaaatctacaaatcagccctcgagttattcaatgataactgacaaactaaattatttccctagaaaggaagatgaaaggagtggagtgtggtttggccagaacaactgcatttcacagcttttccagttaaattggagcactgaacgttcagatgcataccaaattatgcatgggtcctaatcacacatataaggctggctaccagctttgacacagcactgttcatctggccaaacaactgtggttaaaaacacatgtaaaatggctttttaacagctgatactgtataagacaaagccaagatgcaaaattaggctttgattggcactttttgaaaaatatgcaacaaatatgggatgtaatccggatggccgcttctgtacttaatgtgaaatatttagatacctttttgaacacttaacagtttctttgagacaatgactttgtaaggattggtactatctatcattccttatgacatgtacattgtctgtcactaatccttggattttgctgtattgtcaccgggattggtacaggtactgatgaaaatctctagtggataatcataacactctcggtcacatgtttttccttcagcttgaaagctttttttaaaaggaaaagataccaaatgcctgctgctaccacccttttcaattgctatgttttgaaaggcaccagtatgtgttttagattgatttccctgtttcagggaaatcacggacagtagtttccg

SEQ ID NO: 788 - DNA, 1826 bp, Homo sapiens
  CDS (2)..(1723)
gatggctcactatattacatttctctgcatggttttggtgctgcttcttcagaattctgtgttagctgaagatggggaagtaagatcaagttgtcgtactgctccgacagatttagttttcatcttagatggctcttatagtgttggcccagaaaactttgaaatagtgaaaaagtggcttgtcaatatcacaaaaaactttgacatagggccgaagtttattcaagttggagtggttcaatatagtgactaccctgtgctggagattcctctcggaagctatgattcaggagaacatttgacggcagcagtggaatccatactctacttaggaggaaacacaaagacagggaaggccatccagtttgcgctcgattacctttttgccaagtcctcacgatttctgactaagatagcagtggtacttacggatggcaaatcccaagatgacgtcaaggatgcagctcaagcagcaagagatagtaagataacattatttgctattggtgttggttcagaaacagaagatgccgaacttagagctattgccaacaagccttcgtctacttatgtgttttatgtggaagactatattgcaatatccaaaataagggaagtgatgaagcagaaactttgtgaagaatctgtctgtccaacacgaattccagtggcagctcgtgatgaaaggggatttgatattcttttaggtttagatgtaaataaaaaggttaagaaaagaatacagctttcaccaaaaaagataaaaggatatgaagtaacatcaaaagttgatttatcagaactcacaagcaatgttttcccagaaggtcttcctccatcatatgtatttgtgtctactcaaagatttaaagtcaagaaaatttgggatttatggagaatattaactattgatggaaggccacaaatagcagttaccttaaatggtgtggacaaaatcttattatttacaacaaccagcgtaattaatggctcacaagtggttacctttgctaaccctcaagttaagacgttgtttgatgaaggctggcaccaaattcgtctcttagtaacagaacaagatgtgactttgtatattgatgaccaacaaattgaaaacaagcccttacatccagttttagggatcttgatcaatgggcaaacccaaattggaaaatattctggaaaagaagaaactgttcagtttgatgtccaaaagttgcgaatctactgtgacccagaacagaacaaccgggagacagcatgtgagattcctggattttgccttaatggtcccagtgatgtaggttcaactccagctccctgtatttgtcctccgggaaaaccaggacttcaaggccccaaaggtgaccctggactgcctgggaaccctggctaccctggacaacctggtcaagatggtaagcctgtgagtactgaaagcttagtcatctccggtatatctgggattacaggatatcagggaattgcagggacaccaggtgttccaggatctccaggaatacaaggagctcgaggactaccaggttacaaaggagaaccagggcgagatggtgacaagggtgatcgtggacttcctggttttcctgggcttcatggcatgccaggatcaaagggtgaaatgggtgccaaaggagacaaaggatcacctggattttatggcaaaaagggaagtatagatcacacaacaaagtattcatattgaacttttaatgtaatggaaacagaaaactagaattgcagttctaacccagcattagaacagttagctctgttcacccttcttaggggattaattcagaacaatg

SEQ ID NO: 789 - DNA, 4759 bp, Homo sapiens
  CDS (156)..(3962)
cgcggagaagcttgggtacctgagccgcggtcccgggtgacaccctcagtgacgccaggcgcgttccttcctcttcctctctcctctccggccccgccttcccttccctccgcccacctccctgaagcggagccgccgtcgccaccagcgccgtcatgtcggcccccgccgggtcctctcacccggccgccagcgcccggatcccgcccaagttcggcggatcggccgtctcaggagccgcagcgcccgcgggcccgggtgcgggcccggcgccgcaccagcagaacggtccagcccagaatcaaatgcaggttccatctggatatggattgcatcatcaaaactatattgctccctcaggacattactctcaaggacctgggaaaatgacctcattgccattggatacccagtgtggtgattactactctgctctctatacagtaccaacacaaaatgtgactcctaacacagtgaaccagcaaccaggagcacagcagttgtacagcaggggtcctcctgcccctcatattgtgggatccactctaggatctttccaaggtgctgcatcgtcagcatcccatttgcatacgagtgcctcccaaccatactcctcttttgtgaatcactacaatagtccagccatgtactctgccagctcttctgttgcgtctcagggatttccctctacttgtggtcattatgctatgtcaactgtttctaatgccgcgtatcctagtgtttcatatccctctctgcctgctggtgatacatatgggcaaatgtttacctcacagaatgctccgactgttaggccagttaaagataattcattctctggtcaaaatacagctatcagccatccatcgccacttccacctctaccatcacaacagcaccaccagcagcaaagtctttcaggatacagtactctaacgtggtcatctccaggccttccatcgactcaagacaatctcatccgaaaccacacaggatccctggctgtagcgaacaacaacccaaccattactgttgcagattctttatcctgtcctgttatgcaaaatgttcagcctcccaagtccagcccagtggtatccactgttttatcaggatcctcaggatcctcatcaacaagaacacctcccactgcaaatcacccagttgagcctgtgacctcagttacacagccatcagagctattacaacaaaaaggcgtgcagtatggtgaatatgttaataaccaagctagctccgcaccaactcccttgtcatcaacttccgatgatgaggaagaggaggaggaggatgaggaagcaggtgttgacagctcttctaccacaagcagtgcttctccaatgcccaacagttatgatgccctggaaggaggcagttacccagatatgctttcttcatcagcaagcagtcctgctcctgatcccgcccctgaacctgatcctgcttctgctccagctccagcttcagctccagctcctgtcgtccctcagccttcaaaaatggctaagcctttggctatggctatccaacacttcagcctggttatcagaatgctacagcaccacttatttctggagtacagccccagtaacccggtatattctggattccagcagtatcctcaacagtatcctggtgtgaaccagctatcctccagtataggaggattgagtcttcagagttctccacaaccagaaagcctgagacctgtaaaccttactcaggagaggaatattttacctatgactcctgtttgggctcctgtacctaacttgaatgcagacctcaaaaaattaaactgtagcccagattcatttcggtgtactttgacaaatattccacagacacaggctttactgaataaagctaagcttcctttaggattgttgttacatcccttcagagacctaacgcaattaccagtgataacatcaaataccattgtgaggtgccgatcctgtcgaacgtatattaacccctttgtatccttcattgatcaacgtagatggaaatgcaatttgtgctatagagtaaacgatgttcctgaagaatttatgtataacccccttacccgatcttatggagagcctcataaacgaccagaagttcagaattcaactgtggagttcattgcttcttcagattacatgctgcgtcctcctcaacctgcagtttacttgtttgttttagatgtgtctcataatgcagtggaagctggatatttgacaattttgtgccagtcactcctagaaaatctagacaagcttcctggagattcacgaacaagaataggattcatgacctttgatagcactattcatttctacaatttacaagaaggattatcacagcctcaaatgttgattgtgtctgatatagatgatgtttttctacctacaccggatagtttacttgtgaatctatatgaaagtaaagagcttataaaagacttactgaatgcattaccaaacatgttcaccaatacaagagaaacacacagtgcccttggtcctgcacttcaggctgcctttaaattaatgtctccaacaggtggccgtgtgtctgtatttcagacacagttaccttccttgggtgcaggacttctgcaatccagagaagatcctaatcagagatcaagtacaaaggtggtacaacatcttggccctgcaactgatttttataagaaacttgcattagattgctcgggacagcaaactgcagtggatttgttccttttaagttcacagtattctgatcttgcttctctagcttgcatgtccaagtattctgcagggtgcatctattattatccatcattccactatactcacaatccttcacaagcagaaaagttacaaaaagacctaaaacggtatctcacaagaaaaattgggtttgaagctgttatgagaataaggtgtactaaaggtctttcaatgcacacttttcacggtaacttctttgtccgttctactgatttgttatcccttgccaacatcaatcctgatgctggatttgcggtgcagttgtcaattgaagaaagtttaacagatacttccttagtatgttttcaaacagccctattatatacatcaagcaaaggtgagcggagaattagagtacatacactttgtttgccagtggtaagttcactagcagatgtatatgcgggagtggatgtacaagctgccatctgccttctggcaaacatggctgtggatcggtccgtttcatcaagtctgtcagatgcaagagatgccttagtgaatgctgtagtggactcattgtctgcatatggctcaactgtctcaaatttacagcactctgcattgatggcgcccagctccctcaagttgtttcctctctatgttttggcccttctcaaacagaaagcatttagaacgggtacaagcacacggctggatgatcgtgtatatgccatgtgtcagataaagtctcagccacttgttcatctaatgaaaatgattcatcccaacttatacaggatagacagattgacagatgagggtgcagtacatgttaatgacaggattgtaccacagccacctcttcaaaaattgtctgcagagaagctgacaagagaaggtgctttccttatggactgtggctctgttttttacatttgggttgggaaaggctgtgacaataacttcatagaggatgtgcttggatatactaattttgcatcaataccacagaaaatgacacatcttccagagctagatacactttcatcagaaagagccagatccttcataacttggcttagagacagcagaccattaagtccaatccttcacatagtaaaagatgagagtcctgccaaagcagaattttttcagcatttgattgaagaccggacagaggctgcattttcttactatgaatttttgcttcatgttcagcagcagatttgtaagtgaagtagaataaaattgaataagaaaaagatctataacctaggtaaagcataatctgtcagagaagcgcgtgagaaatttgaaatgaaggcatttgttaatacaagatgcaacgcacagcactctgtctgaggctttggtaaaaagtaaaggggaagaaagaacttgacagatctttttcaactcaaattaatggtaacgatgatgctgtttcaccaagtatattttgaattggtttctacacatttccagtagtatggcagtacagtgctctgttcattgcaagctggcaaatttatgtagctatgtggaatgatatgtcataatgtaaaattagataaattcttttttcttataattaatataacatttctggacttgaactctggcaagagatgccaaaaggcattggtaccgtgttatttgtttatatgaattactttttaacaaggaatgtttcttattcattaaatgaattcaacattttctctgtaaaaacaatagagtttcagtacatgaactatagaaaaaaatctatatataatgtacataaatgttacatttgtaaagaaaatgtaaaaatgtaactatagcatatgaattgcttaaactgtgctgcattgttggatgacaactctttttgtcacagttagagaatgaggttgactaatgcatattatgaattgagtccacaaaggaacacaaaactctttgtaattctgttaaatcttttatgtagatttatttatgatcagcctactaattaaaactatttcgcttgacagtaaaaaaaaaaaaaa

SEQ ID NO: 790 - DNA, 1800 bp, Homo sapiens
  CDS (379)..(1701)
ggcgctctgccagccccgggaacagcagaggcggcggcactggctggacccatgcgcgcgcctccggggctgaagaaggaaggagtgagccgagccgagcaccccacatctggaggggacagccagccgtgggccccgccccggcgtccggagcaggagaactccgagcttcttgcccaggcagagagagcaggagcggaccgcgcgcccgggattgagagtccttgcgctccagacccccacccagtggccgccagggtccccgcctgtccggaccctcgccgcgcccaggcaggcgcgccagggcggggctgacctgcccgcgaagttgcggacagtgcgtgagaaaccagcacccccttccgccgcctccagcttatggaaactggtcaaagaactcatgcaagtggaacttacagcttccttgatcggactcagcattcagatatcaaagcagactgcaatacctgcgtggaaatagaagacagaaaggtttcaagacaacagatgaattgtgaaagagagcagctaaggggtaatcaggaagcagccgctgcccctgacacaatggctcagccttacgcttcggcccagtttgctcccccgcagaacggtatccccgcggaatacacggcccctcatccccaccccgcgccagagtacacaggccagaccacggttcccgagcacacattaaacctgtaccctcccgcccagacgcactccgagcagagcccggcggacacgagcgctcagaccgtctctggcaccgccacacagacagatgacgcagcaccgacggatggccagccccagacacaaccttctgaaaacacggaaaacaagtctcagcccaagcggctgcatgtctccaatatccccttcaggttccgggatccggacctcagacaaatgtttggtcaatttggtaaaatcttagatgttgaaattatttttaatgagcgaggctcaaagggatttggtttcgtaactttcgaaaatagtgccgatgcggacagggcgagggagaaattacacggcaccgtggtagagggccgtaaaatcgaggtaaataatgccacagcacgtgtaatgacaaataaaaagaccgtcaacccttatacaaatggctggaaattgaatccagttgtgggtgcagtctacagtcccgaattctatgcaggcacggtcctgttgtgccaggccaaccaggagggatcttccatgtacagtgcccccagttcacttgtatatacttctgcaatgccaggcttcccgtatccagcagccaccgccgcggccgcctaccgaggggcgcacctgcgaggccgcggtcgcaccgtgtacaacaccttcagggccgcggcgcccccgcccccgatcccggcctacggcggtgttgtttaccaggatggattttatggtgcagacatttatggtggttatgctgcataccgctacgcccagcctacccctgccactgccgctgcctacagtgacagttacggacgagtttatgctgccgacccctaccaccacgcacttgctccagcccccacctacggcgttggtgccatgaatgcttttgcacctttgactgatgccaagactaggagccatgctgatgatgtgggtctcgttctttcttcattgcaggctagtatataccgagggggatacaaccgttttgctccatactaaatgacaaaaccataaaaaccttccaatgtggggagaaaggaagctttccgaggcctgagtattgcaatacatgcagtagtacatcattttagcaactct

SEQ ID NO: 791 - DNA, 2296 bp, Homo sapiens
  CDS (27)..(2267)
ggaaagatgaatcaaatgaaattgaaatgacaattccaggtttagattggggaatggaggaagtgatgcaaaaggatcagaaaaaagtacctcagaagaaagttccttatgcaaaacccattcctgctcagttccagcaggcttggatgcaaaataaagttccaattcctgctccaaatgaggtgctgaatgacagaaaagaagacattaaattggaagagaagaaaaaaacacaagcagaaattgagcaagaaatggctacattacaatatactaacccacaacttctggagcaacttaaaattgaaagacttgcacagaaacaagttgagcaaattcagcctcctccctcatctggcacccctctcctcggaccccagccttttccaggacaaggtccaatgtctcagattcctcaaggttttcaacagccccatccatctcagcagatgccaatgaacatggctcaaatggggcctccaggtccacagggacagtttaggcctcctggaccccagggacaaatgggaccacaaggtcctccactgcatcagggaggtggggggccacaaggattcatgggaccacaggggccccagggcccgccccaggggttgccacggcctcaggacatgcatgggccccaaggaatgcagaggcatcctggacctcatggccctttgggacctcaagggccacctggaccacaaggtagttctggtcctcaaggtcatatgggtcctcagggtccacctggcccacagggtcacataggcccccaaggcccgcctggccctcagggtcacttgggcccacaggggcctccgggtactcaaggtatgcagggaccacctggtcccagaggaatgcaagggcctcctcatcctcatgggatccaaggcggaccagggtctcaagggatccaaggtcctgtgtctcagggacctctgatgggattgaatccaagaggaatgcaggggcctccaggcccccgggagaaccagggtcctgctccccaagggatgattatgggccacccgcctcaagagatgagaggacctcaccctccaggtggactactgggacacggccctcaggaaatgagaggtcctcaggagatccgaggcatgcaggggcctccaccccaaggatcaatgctgggacctccccaggaattgcgagggcctccaggctcacaaagtcagcaggggccgccccagggctctttaggacctccaccccagggtggcatgcaaggaccccccggacctcagggacagcagaacccagcaagagggccacatccatctcaagggccaataccattccagcaacagaaaacgcctctgctaggtgatgggccccgggcccccttcaaccaggaaggacagagcacaggccccccacccctgataccaggcctagggcagcagggagcacaaggtcgcattccccctctgaaccccggacaaggacctggccccaacaaagtttcagaagaggagccccgccgaggcatgagggccgtgctccccccagaggaagggatggttttcctggtcctgaagactttagtccagaggagaattttgatgcttatgagggaagcggcccgaggacgagatctcagaggtcgaggtcggggtaccccacgaggaggaaggaagggtttacttcccactcctgacgagttccctcgctttgaaggagggcggaagccagattcctgggatggaaacagagagcctgggccaggtcatgaacattttcgtgatactccccgccctgatcatccccctcacgacggtcattccccagccagcagagaacgctcctcttctctccaaggcatggacatggcatccctacctccccgaaagcgcccctggcatgatggcccaggcacttctgagcacagagagatggaggccccaggaggcccttctgaagaccgaggaggcaaaggccgagggggcccaggacctgctcagagagtgcccaaatctgggcgttccagctccttagacggagagcaccacgatggataccacagagatgaaccttttgggggccctccaggcagtggcaccccttctcgagggggccggagtggcagtaactggggtagagggagtaacatgaactctggcccgccgaggcgaggagctttcctgggtggtgggaggggtccggtaaaacctcgaactgagttccctgagggcgtttttggacagattgtaagaacttttggtggacttcacccatagaaacaaatgggaagcttgaccattggtgg

SEQ ID NO: 792 - DNA, 1267 bp, Homo sapiens
  CDS (386)..(1147)
agagaggcgccgaagttttccggaaagagacgaccaactgagaggtgggcccccaaagccggctgcgagagtcaccgaagatttccggagagccaaggagtcgggaagagccacttactgagcgttgcgaacgtgtacggagatagccgaagaggcggaagcggggccacaagagcccttcctgcagggaacctcaggcttcagagagccgaaaagttgggaggcgtaaccacttacaggccggaagtgtccggggtggacgcattcgggtagccgaagaagtcccaggattgccgaagaagtcccaggatttccgaagcgagccgaagcatcgcgacagttttcagagacagctgatcggttggagctgttgcgccgagcagtcatggcggcggccagagctactacgccggccgatggcgaggagcccgccccggaggctgaggctctggccgcagcccgggagcggagcagccgcttcttgagcggcctggagctggtgaagcagggtgccgaggcgcgcgtgttccgtggccgcttccagggccgcgcggcggtgatcaagcaccgcttccccaagggctaccggcacccggcgctggaggcgcggcttggcagacggcggacggtgcaggaggcccgggcgctcctccgctgtcgccgcgctggaatatctgccccagttgtcttttttgtggactatgcttccaactgcttatatatggaagaaattgaaggctcagtgactgttcgagattatattcagtccactatggagactgaaaaaactccccagggtctctccaacttagccaagacaattgggcaggttttggctcgaatgcacgatgaagacctcattcatggtgatctcaccacctccaacatgctcctgaaaccccccctggaacagctgaacattgtgctcatagactttgggctgagtttcatttcagcacttccagaggataagggagtagacctctatgtcctggagaaggccttcctcagtacccatcccaacactgaaactgtgtttgaagcctttctgaagagctactccacctcctccaaaaaggccaggccagtgctaaaaaaattagatgaagtgcgcctgagaggaagaaagaggtccatggttgggtagaagaatgtgtatgacaaccacacacagtgaagctcttttttcaaagtaaatttgaagaaatgctacaagtatgagatgagatctaagtaaaggtgttaagatatttttaaaaaaaaaaaa

SEQ ID NO: 793 - DNA, 1506 bp, Homo sapiens
  CDS (218)..(1399)
ttttaggaatgacgtaccggtccggaattcccgggtcgacgatttcgtgtccggcctccctgacatgcatatttccacccagaagacagagaaggagccagtggtcatggaatgggctggggtcaaagactgggtgcctgggagctgaggcagccaccgtttcagcctggccagccctctggaccccgaggttggaccctactgtgacacacctaccatgcggacactcttcaacctcctctggcttgccctggcctgcagccctgttcacactaccctgtcaaagtcagatgccaaaaaagccgcctcaaagacgctgctggagaagagtcagttttcagataagccggtgcaagaccggggtttggtggtgacggacctcaaagctgagagtgtggttcttgagcatcgcagctactgctcggcaaaggcccgggacagacactttgctggggatgtactgggctatgtcactccatggaacagccatggctactatgtcaccaaggtctttgggagcaagttcacacagatctcacccgtctggctgcagctgaagagacgtggccgtgagatgtttgaggtcacgggcctccacgacgtggaccaagggtggatgcgagctgtcaggaagcatgccaagggcctgcacatagtgcctcggctcctgtttgaggactggacttacgatgatttccggaacgtcttatacagtgaggatgagatagaggagctgagcaagaccgtggtccaggtggcaaagaaccagcatttcgatggcttcgtggtggaggtctggaaccagctgctaagccagaagcgcgtgggcctcatccacatgctcacccacttggccgaggctctgcaccaggcccggctgctggccctcctggtcatcccgcctgccatcacccccgggaccgaccagctgggcatgttcacgcacaaggagtttgagcagctggcccccgtgctggatggtttcagcctcatgacctacgactactctacagcgcatcagcctggccctaatgcacccctgtcctgggttcgagcctgcgtccaggtcctggacccgaagtccaagtggcgaagcaaaatcctcctggggctcaacttctatggtatggactacgcgacctccaaggatgcccgtgagcctgttgtcggggccaggtacatccagacactgaaggaccacaggccccggatggtgtgggacagccaggcctcagagcacttcttcgagtacaagaagagccgcagtgggaggcacgtcgtcttctacccaaccctgaagtccctgcaggtgcggctggagctggcccgggagctgggcgttggggtctctatctgggagctgggccagggcctggactacttctacgacctgctctaggtgggcattgcggcctccgcggtggacgtgttcttttctaagccatggagtgagtgagcaggtgtgaaatacaggcctccactccgtttgctgtgaaaaaaaaaaaa

SEQ ID NO: 794 - DNA, 1770 bp, Homo sapiens
  CDS (277)..(1515)
atttggccctcgaggccaagaattcggcacgaggaccgtccatccagaggaaggcaagtttttggctcgggcggctgagaagaccgcgcggggctggagacaggtagcagtacgggggcggggcttcatgccggatgtgatagtctgcagtcgtttcggttggcagcctggcgggtgggagatgcggcggccacctgctgcaaagaaccgaagggaaggttagaagtacgaaggcagtttggagctggggctaagcagctgtcgcacggtcagatcatgggctccaccaagcactggggcgaatggctcctgaacttgaaggtggctccagccggcgtctttggtgtggcctttctagccagagtcgccctggttttctatggcgtcttccaggaccggaccctgcacgtgaggtatacggacatcgactaccaggtcttcaccgacgccgcgcgcttcgtcacggaggggcgctcgccttacctgagagccacgtaccgttacaccccgctgctgggttggctcctcactcccaacatctacctcagcgagctctttggaaagtttctcttcatcagctgcgacctcctcaccgctttcctcttataccgcctgctgctgctgaaggggctggggcgccgccaggcttgtggctactgtgtcttttggcttcttaaccccctgcctatggcagtatccagccgcggtaatgcggactctattgtcgcctccctggtcctgatggtcctctacttgataaagaaaagactcgtcgcgtgtgcagctgtattctatggtttcgcggtgcatatgaagatatatccagagacttacatccttcccataaccctccacctgcttccagatcgcgacaatgacaaaagcctccgtcaattccggacaaggctgtgtaatcggactgcgctgatgtttgtagcagttgctggactcacgttttttgccctgagctttggtttttactatgagtacggctgggaatttttggaacacacctacttttatcacctgactaggcgggatatccgtcacaacttttctccgtacttctacatgctgtatttgactgcagagagcaagtggagtttttccctgggaattgctgcattcctgccacagctcatcttgctttcagctgtgtctttcgcctattacagagacctcgttttttgttgttttcttcatacgtccatttttgtgacttttaacaaagtctgcacctcccagtactttctttggtacctctgcttactgcctcttgtgatgccactagtcagaatgccttggaaaagagctgtagttctcctaatgttatggtttatagggcaggccatgtggctggctcctgcctatgttctagagtttcaaggaaagaacacctttctgtttatttggttagctggtttgttctttcttcttatcaattgttccatcctgattcaaattatttcccattacaaagaagaacccctgacagagagaatcaaatatgactagtgtatgttccacaccctctgctactgtgttacattctgattgtcttgtatggaccagaagagagctttgggacattttttctgaacattctaagcattctagtgaaagttcccatgttccaacagaacttaaaagcaatgtttgccttatatataaaagggacacaataattgaggtccaccttttaggaaatcctaggactcgtttatttgggacatggtgggaataaaggtcacatattggaaaaaaaaaaaa

SEQ ID NO: 795 - DNA, 2958 bp, Homo sapiens
  CDS (72)..(2678)
cgggcgggtgtggccaggggtgtgggtctgtgagggaccggtcggaagggcgtcgcgcggcctcgggtgacatgcggggggcggcgagcgcgagtgtccgcgagccgacgccgctcccgggtagaggcgccccccgcacaaagccccgggcgggccgaggcccgactgtagggactccagccaccttggccctccctgcccggggaaggccgcgctcaaggaatggcctcgcatccaaaggccagcgaggagcggcccctacggggcctgggcacagagctctgccttccagggacactgctcttccccaggagagaaacaagaagctggaggctgtggggacaggaattgaacctaaagccatgtcccagggcttggtgacatttggggatgtggctgtagatttctcccaagaggagtgggagtggctgaaccccattcagaggaacttgtacaggaaggtgatgttggagaactacaggaacctggcatcgctgggactttgtgtttctaagcccgatgtgatctcctcgttggaacaaggaaaagagccttggacagtgaagcgaaagatgacaagagcctggtgcccagacttgaaggctgtgtggaagatcaaggagttacctctcaagaaggacttctgcgaaggaaagctatcccaggcagtgataacagagagactcacaagctataatctggagtactctctgttaggggaacactgggattatgatgctctgtttgagacacagccgggcttggtgactatcaaaaacctggctgttgacttccgccagcagctacacccagctcagaagaatttctgtaagaatgggatatgggagaacaacagtgacctgggatcagcaggacattgtgtggctaagccagatttagtctctttactagagcaagagaaggagccctggatggtgaagcgagagctgacaggaagcctgttctcaggccagcgatctgtacatgagacccaggaattatttccaaagcaagattcatatgctgaaggggtaacagacagaacctcaaacactaaacttgattgttccagtttcagagaaaattgggattctgactatgtgttcggaaggaagcttgcagtaggtcaagagacacaattcaggcaagagccaattactcataacaaaaccctctctaaggaaagagaacgtacatataacaaatctggaagatggtcctatttggacgattcagaagagaaagttcataatcgtgattcaattaaaaattttcaaaaaagttcagtggtaataaaacaaacaggcatctatgcaggaaaaaagcttttcaagtgtaatgaatgtaagaaaacttttacccagagctcatctcttactgttcatcagagaattcacactggagagaaaccttataaatgtaatgaatgtgggaaggcctttagtgacggctcatcctttgcccgacaccagagatgtcacactggcaagaagccctatgagtgcattgagtgtgggaaagctttcatacagaacacatcccttatccgtcactggagatactatcatactggggagaaaccctttgattgcatcgattgtgggaaagccttcagtgaccacatagggcttaatcaacacaggagaattcatactggagagaaaccttacaaatgtgatgtatgtcacaaatccttcaggtatggttcctcccttactgtacatcaaaggattcataccggagaaaaaccatatgaatgtgatgtttgcagaaaagccttcagccatcatgcatcactcactcaacatcaaagagtacattctggagaaaagccttttaagtgtaaagagtgcggaaaagcttttaggcagaatatacaccttgccagtcatttaaggattcatactggggagaagccttttgaatgtgcggagtgtggaaaatccttcagcatcagttctcagcttgccactcatcagagaatccatactggagagaagccctatgaatgtaaggtttgtagtaaagcgttcacccagaaggctcaccttgcacagcatcagaaaacccatacaggagagaaaccatatgagtgcaaggaatgcggtaaagccttcagccagaccacacacctcattcaacatcagagagttcacactggtgagaaaccctataaatgtatggaatgtgggaaggcctttggtgataactcatcctgtactcaacatcaaagactgcacactggccaaagaccttatgaatgtattgagtgtggaaaggcattcaagacaaaatcctcccttatttgtcatcgcagaagtcatactggagaaaaaccttatgaatgcagtgtgtgtggcaaagcctttagtcatcgtcaatcccttagtgtacatcagagaatccattctggaaagaaaccatatgaatgtaaggaatgtaggaaaaccttcatccaaattggacaccttaatcaacataagagagttcatactggagagagatcttataactataagaaaagcagaaaagtcttcaggcaaactgctcacttagctcatcatcagcgaattcatactggagagtcgtcaacatgcccctctttaccttccacgtcaaatcctgtggatctgtttcccaaatttctctggaatccatcctccctcccatcaccatagcctcgagacgtcatttctgtttgactactccagcagtttaaaaccccatctccctgcccttttgttttctttttgtcccttattagttagttcttcacataagtgtaaatgtaacttattcactcctcttgtaaaacttatagtttctttaaattggttaatgtgtgagatgtgctcagcacagtgcctggtccatagtaagtgctcagtaaacttagctgttttaaaaactttgtatttgaacattgaaaagttacagtagtcagctctgataaaaaaa

SEQ ID NO: 796 - DNA, 999 bp, Homo sapiens
  CDS (131)..(964)
cctcggcgccccgctgggtgtgctcgtggaagtgtcttcgtggtgctgctggcggcgtcagatagggctggatctaaatcgctagctaaggctctgtcctagtgcctttgggtgtgtttcctttaaaaagatgcagcacctggactgcgacctttggctccagctggaactttccagccagtgtgtgcttctggggaacggagtggctatgaatctgcatgtaaagactttgtccctcatgacttggaggtccagattcctggaagagtctttttggtcactggaggaaacagcggcattggcaaagcaactgcccttgaaatcgccaagcgagaacatttttctgcacattgtggacttgtctgatcccaagcaaatctggaaatttgttgaaaatttcaagcaggaacataaactccatgttctgatcaataatgcaggttgcatggtcaataaaagagagctcacagaagatggacttgaaaaaaactttgctgccaatactctgggtgtgtacattctcacgaccggcctgatccctgtgctggagaaagaacacgacccccgagtgataaccgtctcctcaggaggaatgttggttcagaaactgaacaccaatgatctccagtccgaaagaacaccatttgatggaactatggtctatgcacaaaacaagaggcagcaagtggttctgacggagcggtgggcccaagggcacccggccatccatttttcttccatgcatcctggctgggccgacaccccaggtgtgaggcaggcgatgccggggttccacgccaggttcagggaccgcctgcgctccgaggcccagggcgcggacaccatgctgtggctggccctctcctctgccgcagccgcacagcccagcggccgctctagagtatccctcgaggggcccaagcttacgcgtacccagctttcttgtacaaagtggtccctatagtgagtcgtatatgagctaggcacacagggcaatcc

SEQ ID NO: 797 - DNA, 1687 bp, Homo sapiens
  CDS (129)..(725)
gtgcggtactcacaccaccagatcttcgtcttcatcggtgagtgtcccgccggcgcagggcggggcgggcgtcctccaggccctcaccgggcgcccgccgccctgtgcccgcagtggacctgctgcagatgctggagatgaacatggccatcgccttccccgcagcgcccctgctgaccgtcatcctggccctcgtcgggatggaggccatcatgtcggagttcttcaacgacaccaccaccgccttctacatcatcctcatcgtgtggctcgcggaccagtatgacgccatctgctgccacaccagcaccagcaagcggcattggctgcggttcttctatctctaccacttcgccttctatgcctatcactaccgcttcaatgggcagtatagcagcctggccctggtcacctcctggctcttcatccagcattccatgatctacttcttccaccactacgagctgcctgccatcctgcagcaggtccgcatccaggagatgctgcttcaggcgccgacactgggccccgggacccccacggcgctgcccgatgacatgaacaacaactcgggcgccccggctacagcccctgactctgccggccagccccccgccctgggccccgtctcgcctgggggccagcgggagtcccgggcctgtggcagcggcgcccagctccctggtggccgcggcagcctcagtggcagcagctgccggtggtgacctgggttggatggcagagaccgctgccatcatcacagacgcctccttcctgtccggcctgagcgcctccctcctggagcggcgtccagccagcccgctgggccctgctgggggcctcccccacgccccccaggacagtgtccccccgagtgactccgcagcttctgacacaactcccctgggggctgcggtaggcgggcctagcccggcctccatggccccaacggaggcgccctcggaggtggggtcctgagccgcacagctgagccgcctctgacccctgctggctgggcctgaccttcccgagcccgtgggggtgggggaggccagccacctccttcctctgggactgcccagcctgtgtcgggggctttcagggtttcgtggggtttgcccggaaggcggctttcctccccctggtgtgaggtcgcgcccgaggcttgtacccgctagtgaggtgtttgagctggtcagcaaggagagggggtggggttccgcggaaggttctggaggggtcttggtaggtctgcagtgaaccgtcctgaggatggagtggggtcccatggtgcaggtctctgagcaaggcggaggtgtggaggagaggccggcttggggtggggcctcgcgccctagtgccggccggcctcagcccggctctgcctggtgctccctgcagtgccttctccatggccccgccctccccgcgtgtgcgccaggcttggggtccccgggagagcagagcttgcgcctcgggcatagggacgtggggtgcaggcgccaacatcagtggcagcagccagggccgtggtccagtcccactcggggatggagtgggccggcggccaaaccagtcactcggggaggaatgcggaggagcgctcattccattctatttaattgcagtgtacaaaattgtgtttgtatatagaataaactgtctgttgacagcgaaaaaaaaaaaa

SEQ ID NO: 798 - DNA, 5079 bp, Homo sapiens
  CDS (428)..(4795)
agctggtctcctgcttgacaccataaagaggccagcattgcagggtctatgtctttgtcttgacttccagtttgatactgtggttaaagacagacccacaattttgagcaagcttttactcttgcactttcttaagcaggatattcctgctctgagctgggagttctttgtcaatagatttgagacgctttctttggaagcccagctacatttggattgtaacaaggaatttccttttcctacaaccatcactgctgtgaggaccaatgttgctaacctcagcgatgcagccttatggaagatcaagagagctcgctttgcaagaaaccgccagaagagtgtacgttccctgagggacagcgtgaaagggcctgtggaatccaagagggcgctctccctccctgagaccctgacctccaaaattcctatgaggttgaccaggcatgagcagtctgctccagctctcggtgggacacccgaacagacgccaggacaacaatctcctgagaatgacaacaccatcaaggacctgctcccagaagacgctgggatcgaccaccagacagttcaccagctgattacagtgctcatgaagttcatggccaaggatgaaagcagcgctgagtcagacatcagcagtgcaaaggccttcaacacggtcaagcgacacctgtacgtcttactcggctatgaccagcaggaaggttgcttcatgattgcacctcaaaaaatgcgcctgtcaacttgctttaatgcattcattgcaggaattgcccaagttatggactataacattaacttgggaaaacaccttctccccttagtggttcaggtgctcaaatactgctcttgtcctcaactccggcattatttccaacagccgcctcgttgctccctctggtccctaaagcctcacatccggcagatgtggttgaaggccttgcttgtcatcctttacaagtatccataccgagactgtgatatcagcaagatcctgctgcatctgattcacataacagtcaatacactcaatgcgcagtatcatagctgcaagccccatgccacggcaggacctttgtacagtgacaacagtaacataagcagatacagcgaaaaagaaaaagaagaagatagtgtttttgatgaatctgatattcatgatacacctactggaccctgcaataaagagtctcaaactttttttgcaagattgaaaagaataggcggcagcaaaatggtgaaatatcagccggttgagatgaatgttcagagaagtgaaatagaactggctgaatatagagagacgggtgcattacaagacagccttctccactgtgtgagagaagaaagcattccgaaaaaaaagctacgctctttcaaacaaaaatctcttgatatagggaatgcagactcgcttttgtttacattagacgaacatcgtaggaagtcgtgcatagatcggtgtgacatagagaagcctccgacccaagctgcgtatatcgcacaaagaccaaacgaccctggacgttctagacagaactctgctacgaggcctgacaatagtgaaatccccgagaacccagctatggaagggtttccagatgctcgaaggcctgtcataccagaggttaggttaaactgtatggagactttcgaggtgaaagttgactcgccggtaaagcctgctcctaaagaggatttagatctgatagatctatcctcagattcaacctcggggcctgaaaaacactctatactctcaacctccgacagcgactctcttgtatttgagcctcttccccctctcagaatagtcgagagtgacgaagaagaggagacgatgaaccaaggcgatgacggcccctccggtaaaaatgctgcctcttctccctccatccccagccatccctccgtcctcagcctgagcacagctccgcttgtacaagtaagtgtggaggattgttccaaagacttttcttctaaggactcaggaaataatcagtcagcagggaacactgactctgccctcatcactctggaagaccctatggacgccgaaggatcctcaaagccagaggagctgccagagttctcctgcggtagcccactgacgctgaagcaaaaacgagacctccttcagaagtcgtttgctctccccgagatgtcgctggatgatcaccctgacccgggcactgagggggagaagcctggggagctgatgccaagttcaggggcaaaaaccgtcctcctcaaagttcccgaagatgcagagaaccccacagaaagtgagaagcctgataccagtgcagaatctgatacagaacagaatcctgaaaggaaggtggaagaggatggagctgaggaatccgaatttaagattcagattgttcccaggcagaggaagcagaggaagattgctgtcagtgctatccagagagagtacctcgacatctccttcaacattctggacaaactgggagaacagaaagatccagatccttctactaaaggactttcaactttggaaatgccacgagaatcttcatctgcccctacgttagatgcaggtgtgccggaaacaagtagccattcctcaatatcaactcagtataggcagatgaaaaggggatccctgggagttctgacaatgagccagttaatgaagcggcagctggagcatcagtctagcgccccccataacatcagcaactgggacactgaacagatacagcctgggaaacgccagtgtaacgtgccaacatgcctaaaccctgacctggagggacagccattgaggatgagaggtgccaccaaatccagcctgctatcagcaccaagcatagtcagtatgtttgtgcctgcacctgaagagttcactgacgagcagccgacggtgatgacggacaaatgccatgactgtggggccattcttgaagaatacgatgaagagacacttgggctagccatcgtggtcctctccacattcattcacttaagcccagacctggcagccccgctgctgctggatatcatgcagtctgtgggaagattggcatccagtactaccttttctaatcaagcagaaagcatgatggttcccggcaatgcggcgggggtggccaagcagttcctgcgctgcatcttccatcagttggcccccaacggcatcttcccgcagctgttccaaagcacgatcaaagatgggacttttttacggaccttagcctcgtctctgatggacttcaatgagctgagctccatcgcagctctcagtcagctcctagagggtctaaataacaaaaagaatttaccagcagggggtgctatgattcgctgtttggaaaacattgcaaccttcatggaagctttgcctatggattctcctagtagcctctggaccacaattagcaaccagtttcagacattttttgccaagctgccttgtgttttacctctgaagtgttctttagattccagtttaagaattatgatttgcctcttgaagatcccttctaccaatgctacaaggagtttgttggaaccattttcaaaactgctcagctttgtaattcagaatgccgtcttcactctggcctacctggtggagctgtgtggcttatgttaccgagctttcactaaggaacgagataaattctacttgtctcgtagtgttgttctagaacttctgcaggccctaaagctcaaatctcctttaccagatacaaaccttcttctgcttgttcagtttatttgtgcagatgctggaaccaaactagctgagtcaacaatcctgagcaagcagatgatagcctctgtacctggatgtgggactgcagcgatggagtgtgtgaggcagtacatcaacgaagtgctggatttcatggcagacatgcacacgctgaccaaactgaagagccacatgaagacatgttcccagcctctgcatgaagatacctttgggggacatctcaaagtggggctggcccagattgcagccatggacatctcacggggcaaccacagagataacaaagctgtgatccgctatctgccttggctttatcatcccccctctgcaatgcagcaaggacctaaagaattcattgagtgtgtctcccatatccgactgttgtcctggctgctgctgggttccctcactcacaatgcagtgtgcccaaatgcctcctctccctgcctgcccattcctctggatgcaggctcccacgttgcagaccatcttattgttatcctgattggatttccagagcaatcaaagacctccgtgctgcacatgtgctccctcttccacgcgttcatctttgctcagctgtggacagtttattgcgagcaaagtgccgtcgctacaaatctccaaaatcagaatgaattcagcttcacggcgatactgacagcactagaattttggagtagggtgacacccagcatccttcagctaatggcccataacaaagtgatggtagaaatggtgtgtctccatgtgattagtttaatggaggcattgcaggaatgcaattcgaccatttttgtcaagctgatacctatgtggttgccaatgattcagtcaaatatcaagcacttatctgcgggactccagcttcgcctccaggctattcagaaccacgtgaaccaccacagcctaaggacgctgccgggctcgggccagagcagtgctggcctggcagccctccgaaagtggttgcagtgcactcagttcaaaatggcccaggtggagatccagtcctcggaagcagcctctcaattttatcctctatgagtggactcctcggcgctcagtgtcaacactctggtttagcaataatgggtttaaaaacaaacaatttgatccaagcaggttggggaacatattggtactgtacattctctttctagtttagtaaaagatgtgcaaaggccagagagggccgaaaatgaagctttcttgctacacatatttctgatgactccttgggctatctgattaagtgtttccttacattattttttaaaaaccaaatcatttttctttaactaacttctattttttttaagaaaaaaaaa

SEQ ID NO: 799 - DNA, 1568 bp, Homo sapiens
  CDS (167)..(1444)
atttggccctcgaggccaagaattcggcacgaggctcgaaaagagtggcgcagggtcgcgcggccccgcctccttccccgcccagcgaagctctctgaccacccctcttttctagagttctgcctcgcttcccggcgcggtcgcagccctcagcccacttaggataatggcgacagctgaggtactgaacattggtaaaaaattatatgagggtaaaacaaaagaagtctacgaattgttagacagtccaggaaaagtcctcctgcagtccaaggaccagattacagcaggaaatgcagctagaaaaaaccacctggaaggaaaagctgcaatctcaaataaaatcaccagttgtatttttcagttattacaggaagcaggtattaaaactgccttcaccagaaaatgtggggagacagctttcattgcaccgcagtgtgaaatgattccaattgaatgggtttgcagaagaatagcaactggttcttttctcaaaagaaatcctggtgtcaaggaaggatataagttttacccacctaaagtggagttgtttttcaaggatgatgccaataatgacccacagtggtctgaggaacagctgattgctgcaaaattttgctttgctggacttcttataggccagactgaagtggatatcatgagtcatgctacacaggctatatttgaaatactggagaaatcctggttgccccagaattgtacactggttgatatgaagattgaatttggtgttgatgtaaccaccaaagaaattgttcttgctgatgttattgacaatgattcctggagactctggccatcaggagatcgaagccaacagaaagacaaacagtcttatcgggacctcaaagaagtaactcctgaagggctccaaatggtaaagaaaaactttgagtgggttgcagagagagtagagttgcttttgaaatcagaaagtcagtgcagggttgtagtgttgatgggctctacttctgatcttggtcactgtgaaaaaatcaagaaggcctgtggaaattttggcattccatgtgaacttcgagtaacatctgcgcataaaggaccagatgaaactctgaggattaaagctgagtatgaaggggatggcattcctactgtatttgtggcagtggcaggcagaagtaatggtttgggaccagtgatgtctgggaacactgcatatccagttatcagctgtcctcccctcacaccagactggggagttcaggatgtgtggtcttctcttcgactacccagtggtcttggctgttcaaccgtactttctccagaaggatcagctcaatttgctgctcagatatttgggttaagcaaccatttggtatggagcaaactgcgagcaagcattttgaacacatggatttccttgaagcaggctgacaagaaaatcagagaatgtaatttataagaaagaatgccattgaattttttaggggaaaaactacaaatttctaatttagctgaaggaaaatcaagcaagatgaaaaggtaattttaaattagagaacacaaataaaatgtattagtgaaca

SEQ ID NO: 800 - DNA, 1686 bp, Homo sapiens
  CDS (230)..(1330)
cacgagggggaatgggcctcagctccccgagtcccagagagcttggctgagccctggtgttcccacctcctcagagccatgaggcaggaatgttctccttatgtgactaggcacaggttccaaatggggaggggactggctcagcatccggagccaaaacaggaatagaactggaagctgagcctggagcggttctgggcttttggttctctgcatcaacacagccagcatgcctatgatttctgtgctgggcaaaatgtttctgtggcagcgtgaagggcctggaggacgatggacttgtcagacaagtcgcagagtgtcctcggaccccgcttgggctgtggagtggatcgaacttcctcggggtctctctctatcctctttgggatctgctcgaaccctccgaggctggagcaggtcctcccgcccttcctcggtggacagtcaggacttgccagaggtgaatgttggagacacagtcgcgatgctgcccaagtcccggcgagccctaactatccaggagatcgctgcgctggccaggtcctccctgcatggtatttcccaggtggtgaaggaccacgtgaccaagcctaccgccatggcccagggccgagtggctcacctcattgagtggaagggctggagcaagccgagtgactcacctgctgccctggaatcagccttttcctcctattcagacctcagcgagggcgaacaagaggctcgctttgcagcaggagtggctgagcagtttgccatcgcggaagccaagctccgagcatggtcttcggtggatggcgaggactccactgatgactcctatgatgaggactttgctgggggaatggacacagacatggctgggcagctgcccctggggccgcacctccaggacctgttcaccggccaccggttctcccggcctgtgcgccagggctccgtggagcctgagagcgactgctcacagaccgtgtccccagacaccctgtgctctagtctgtgcagcctggaggatgggttgttgggctccccggcccggctggcctcccagctgctgggcgatgagctgcttctcgccaaactgccccccagccgggaaagtgccttccgcagcctgggcccactggaggcccaggactcactctacaactcgcccctcacagagtcctgcctttcccccgcggaggaggagccagccccctgcaaggactgccagccactctgcccaccactaacgggcagctgggaacggcagcggcaagcctctgacctggcctcttctggggtggtgtccttagatgaggatgaggcagagccagaggaacagtgacccacatcatgcctggcagtggcatgcatcccccggctgctgccaggggcagagccttctgtgcccaagtgtgggctcaaggctcccagcagagctccacagcctagagggctcctgggagcgctcgcttctccgttgtgtgttttgcatgaaagtgtttggagaggaggcaggggctgggctgggggcgcatgtcctgcccccactcccggggcttgccgggggttgcccgggggcctctggggcatggctacagctgtggcagacagtgatgttcatgttcttaaaatgccacacacacatttcctcctcggataatgtgaaccactaagggggttgtgactgggctgtgtgag

SEQ ID NO: 801 - DNA, 3065 bp, Homo sapiens
  CDS (72)..(1958)
gcccccagcaggctctccagtcccaggatgcgctgagccgccggggggctgaggccgcgccaactacatgcatgtcccccgggggcaagttcgactttgacgacgggggctgctacgtggggggctgggaggcggggcgggcacatggctacggcgtgtgcacgggccccggcgcccagggcgagtacagcggctgctgggcacacggcttcgagtcactgggcgtcttcacggggcccggcggacacagctaccagggccactggcagcagggcaagcgcgaagggctgggcgtggagcgcaagagccgctggacgtaccgcggcgagtggctgggcgggctgaaggggcgcagcggcgtgtgggaaagcgtgtccggcctgcgctacgccgggctctggaaggacggtttccaggacggctacggcactgagacctactccgacggaggcacctaccagggccagtggcaggccgggaagcgccacggctacggggtacgccagagtgtgccctaccatcaggcggcgctgctgcgctcgccccgccgcacctccctggattccggccacagcgaccccccgacgccacccccgcccctgcccttgccgggcgacgagggaggcagccccgcctcgggctcccggggcggcttcgtgctggccgggcccggggacgccgacggcgcgtcgtcccgaaagcgcactccggcggccggcggattctttcgccgttcgctgctgctcagcgggctccgagcgggcggacgtcgcagctccctgggcagcaagcgaggctccctgcgcagcgaggtgagcagcgaggtgggcagcaccggaccgcccggctcggaggccagcgggcccccggccgcagcgccgcccgccctcatcgagggctcggccacagaggtgtacgcgggcgagtggcgcgcagatcggcgcagcggcttcggcgtcagccagcgctccaacgggctgcgctacgagggcgagtggctgggcaaccggcggcacggctacgggcgcaccacccgccccgacggctcccgcgaggagggcaagtacaagcgcaaccggctggtgcacggcgggcgcgtccgcagtctcctgcctctggcccttcggcggggcaaggttaaggagaaggtggacagggctgtcgagggcgcccgtcgagccgtgagtgctgcccgtcagcgccaggagatcgccgctgccagggcagcagacgccctcctaaaggcagtggcagccagcagtgtcgctgagaaggccgtggaggcagctcgaatggccaaactgatagcccaggacctgcagcccatgctagaggccccaggccgcagacccaggcaggactcagaaggttccgacacggagcccctggatgaggacagccctggggtatatgagaacggactgaccccctcagagggatcccctgaactgcccagcagtcctgcctcctcccgccaaccctggcgaccccctgcctgccggagcccactgcctcctggaggggaccagggtcccttctccagccccaaagcttggcctgaggagtgggggggggcaggcgcacaggcagaggaactagctggctatgaggctgaggatgaggctgggatgcaagggccagggcccagagacggttccccactcctcggaggctgcagcgacagttcaggaagtcttcgagaggaggagggggaggatgaagagcccctgcccccgctgagggccccagcaggcacggagcctgagcccatcgccatgctggtcctgaggggctcgtcctcgaggggtcctgatgctgggtgcctgacagaagagctcggggagcccgctgcaaccgagaggcctgcccagccgggagctgccaaccccctggtggtgggagccgtggccctcctggacctcagcctggcattcctgttctcccagctcctcacctgaggctacttcctggcctggttctggctttggttgcgtgcctcttcacccctttgacctgccttttttctcttctcctcttcctggctgtgttttctcctatctttctttctcttcttcctttcttttctgtgctcctttgtttttttctctcgctttttctttccctgtcttctttcagattatctcatttcttctggatctgtctctgtattcctcactcccttccccatcccaaccccttctttctctagattgtttacatatgaagggcttttctctctcagagttgctgtcttctctgagacacacaaatctaagtcagaccattgctccacgccctcccaccttttctttagacctcaacttcgctgcgggtgggggtttggtgtcctaaggagactcctggaagctgaatggagaggaggaagaaaatgaagaaggagtgattgaatgtcgggcaaggcactggctgagctgctgtggctccctagcctaaggggcctgctgtccctctgaggcctagtgaaaaagctgcaggaggtgcatcctccacctctaatcttggaggctattatcttacctccaagcactgagctgggttactgcccaattccatccttccctgaaggagagaagggaagtgaaaagtagagtaactccccagcatttccctctttttctcctcatcggccagcccctcctccagccccctctggtggcatgccatgccaagagcaacgtgtaaaggaacagagaatatccaatgcagtcaagtccaccctgcccagactttgccactgacttctcccacccttctgtctcccccataatagtttatttggttggtctggactcacttgtggcctttgattaaattcctaaggggcctgaagaagacatttctactgcagagggttagaggcacttgagcaaggcccccacatcccaactctgggagttgtggtgggaggaggcacttctgggggataggaccagacaagataacaggagctcacatggaagcagaagctgtgacaagtttagtagtcccaaaatgggttatatcccttccccctcgtgccgaattcttggcctcgagggccaaat

SEQ ID NO: 802 - DNA, 4253 bp, Homo sapiens
  CDS (62)..(3418)
gagggggcgcccgcgccgccatattccctcccgccggccggctccgcggcgcgcagccaccatgagcaccgccgccttccacatctccagcctcctggagaagatgacgtccagcgacaaggacttcaggttcatggccaccagcgacctgatgtcggagttgcagaaggactccatccagctggacgaggacagcgagcgcaaggtggtgaagatgctgctccggctcctggaggacaagaacggtgaggtgcagaacctggctgtcaagtggctgggtgtcccgctgggcgccttccacgccagcctcctgcactgtctgctgccacagctgagcagcccgcgcctggcggtgcgcaagcgggcggtcggagcgcttggccacctggcggccgcctgcagcaccgacctcttcgtcgagctcgctgaccacctactggaccggctgcccggcccgcgggtgcccaccagcccgactgccatccgcaccctgatccaatgtttgggcagcgtcggccgccaggccggccaccgcctcggggctcacctggaccgcctggtgcccctggtggaggatttctgcaacctggatgatgatgagctccgggagtcctgcctccaggcttttgaggccttcttgaggaagtgccccaaggaaatgggtcctcacgtgcccaacgtgaccagcctctgcctccaatacataaaacacgaccccaactacaactacgacagtgatgaggatgaggagcagatggagacagaggatagtgaattcagtgagcaagagagtgaagacgagtacagcgatgacgatgacatgagctggaaggtgcgccgggcagctgccaagtgcatcgcagccttgatcagctcgcggcctgacctgctgcccgatttccactgcaccctggcacctgtgctcatccgccgcttcaaagaacgcgaggagaacgtcaaggctgacgtcttcactgcttacatcgtgctgctgcggcaaacacggcccccgaagggatggctggaggccatggaggaacccacccagaccggcagcaacctccatatgctacgtggacaggtgccccttgtggtcaaggccctgcagcggcagcttaaagatcggagcgtcagagcccgccagggatgcttcagcctcctcaccgagctggcgggtgtcctcccaggcagcctggccgagcatatgcctgtgctggtatcaggcatcatcttctcgctggccgaccgctccagctcctccaccatccggatggatgccctggccttcttgcaggggctgctgggcaccgaaccagctgaggccttccacccacacttgcctatcctcctgccacctgtgatggcctgtgtggctgactctttctacaagattgcagccgaggccctggtggtgctgcaggagctggtgcgggccctgtggccgctgcacaggcctcggatgctggatcctgagccatatgttggagagatgtctgctgtcaccctggcgcgacttcgtgccactgacctggaccaggaggtgaaggagcgggccatttcctgcatgggccaccttgtaggccacctgggtgaccggcttggggatgacctggagcccacgttactgctcctcctggaccgcctgcggaatgagatcacccggctgcccgccatcaaggcgcttacgctggtggccgtatccccactacagcttgacctacagcccatcctggccgaggcactgcacattctggcctcattcctgcggaagaaccagcgggctttgcgactggccacactggcagccctggacgccctggcccagagccagggcctcagcctcccaccgtctgccgtgcaggccgtgctggctgagctgcctgccctggtcaacgagagcgacatgcatgtggcccagctggctgtggacttccttgccacagtgacccaggcccagccagcctctttggtggaggtcagtggccctgtgctctcagagctgctgcggctgctgcgttcgcccctgttgccagccggagttctggcagctgctgaaggcttcctgcaggccctggtagggacccgtcccccgtgtgtggactatgccaaactcatcagcctgctcactgcgcctgtttatgagcaggctgtggatggtgggcctggcctgcacaagcaggtgttccactcattggcccggtgtgtggcagccctctcagctgcctgtccccaagaggcggcaagcacagccagtcgcctggtctgcgatgccaggtcgccccactccagcacgggggtcaaggtcctggcattcttgtcgctggctgaggtgggtcaggtggctgggccaggcccccagcgggagctgaaggcggtgctcctggaagctttggggtcacccagtgaggatgtgagggctgcagcctcgtatgcactgggccgtgtgggtgctggcagcctgcccgacttcctgcccttcctgctggagcagatcgaggctgagccccgacgacagtacctgctgctgcactcactcagggaggccctgggggccgcccagcctgacagcctgaagccctacgccgaggacatctgggccttgctgttccagcgctgcgagggtgctgaggagggcacccggggggtggtggccgagtgcattgggaagctggtccttgtgaacccttcgttccttctgccccgcttgcggaagcagcttgctgcaggtcggccacacacccggagcaccgtcatcacagcggtcaagttccttatctcggaccagccccatcccattgaccccctcctgaagagcttcatcgctgtgcacaacaagccctcgctagtccgggacctgctggatgacatcctgcccctcctctaccaggagacaaagatccggcgggacctcatccgagaggtggagatggggccctttaaacatacagtggacgatgggctggacgtgcggaaggcggcctttgaatgcatgtattcactgcttgagagctgcctgggccagctggatatctgtgagttcctgaaccatgtggaggacgggctgaaggaccactacgacatccggatgctgaccttcatcatggttgcccggctggccaccctgtgtcctgcacctgtcctgcagagggtggaccgactcattgagccactaagggccacctgcactgccaaggtcaaagctggttctgtgaagcaggagtttgaaaagcaagatgaactgaagcgctctgcaatgagggcagtggctgccctgctgaccatccccgaggtggggaaaagccccatcatggccgacttctcttcccaaatcagatccaaccctgaacttgctgccctctttgaaagcatccagaaggattccacttcagcccccagcacagactcaatggagctcagctagtcccctcagcaccaaggtgggccctcgcttaagagaaaggagcccacccaagtccgaggcctccccatcccaccatcgcaggtctctacttttgcccttccaccatctcactgggggccctgtcgctcctggtcagggcttacagtgccttctccagggacccaactcaaaggcccccagcccaagctgtgaggctgccaacagttgggccccttccttaactcaggacagtcatccaaagaaatagggtgaggaagttttccagtgacttcacactgtacccctccatagtctgtctggttccttcagagggtgtctctgcctcacaaactagtagtatttagaaataggctgtgctgtcagctgtaaaagatcaggaggcagcagacaccactctgctttcttcactgcattcagcaatgcctgaagttagtgctcaggccgggcatctcaaaagaaaagatacttgagttattcacattttaaaattcaaaacggttcatttttaagtggcagtgatgaatcagaaatttggaagatgatacgggtttcttttttccagggaggaggaatgggttgggtagggaactggacaggcttggacctcatgtttcatttctaatttcaaaatacttattagcaaattgggcaacaatgggcatcttccatgccaccacccaggcataaccagttggtttgtttccttctgaggaaggtttcaaatgtgtctagtgttcagtattgaggacaaagaaatacaagtggcaggcccaagtattttctgtgatatcccaggttaataaagattagattctaagttaaaaaaaaaaaa

SEQ ID NO: 803 - DNA, 4325 bp, Homo sapiens
  CDS (62)..(3493)
gagggggcgcccgcgccgccatattccctcccgccggccggctccgcggcgcgcagccaccatgagcaccgccgccttccacatctccagcctcctggagaagatgacgtccagcgacaaggacttcaggttcatggccaccagcgacctgatgtcggagttgcagaaggactccatccagctggacgaggacagcgagcgcaaggtggtgaagatgctgctccggctcctggaggacaagaacggtgaggtgcagaacctggctgtcaagtggctgggtgtcccgctgggcgccttccacgccagcctcctgcactgtctgctgccacagctgagcagcccgcgcctggcggtgcgcaagcgggcggtcggagcgcttggccacctggcggccgcctgcagcaccgacctcttcgtcgagctcgctgaccacctactggaccggctgcccggcccgcgggtgcccaccagcccgactgccatccgcaccctgatccaatgtttgggcagcgtcggccgccaggccggccaccgcctcggggctcacctggaccgcctggtgcccctggtggaggatttctgcaacctggatgatgatgagctccgggagtcctgcctccaggcttttgaggccttcttgaggaagtgccccaaggaaatgggtcctcacgtgcccaacgtgaccagcctctgcctccaatacataaaacacgaccccaactacaactacgacagtgatgaggatgaggagcagatggagacagaggatagtgaattcagtgagcaagagagtgaagacgagtacagcgatgacgatgacatgagctggaaggtgcgccgggcagctgccaagtgcatcgcagccttgatcagctcgcggcctgacctgctgcccgatttccactgcaccctggcacctgtgctcatccgccgcttcaaagaacgcgaggagaacgtcaaggctgacgtcttcactgcttacatcgtgctgctgcggcaaacacggcccccgaagggatggctggaggccatggaggaacccacccagaccggcagcaacctccatatgctacgtggacaggtgccccttgtggtcaaggccctgcagcggcagcttaaagatcggagcgtcagagcccgccagggatgcttcagcctcctcaccgagctggcgggtgtcctcccaggcagcctggccgagcatatgcctgtgctggtatcaggcatcatcttctcgctggccgaccgctccagctcctccaccatccggatggatgccctggccttcttgcaggggctgctgggcaccgaaccagctgaggccttccacccacacttgcctatcctcctgccacctgtgatggcctgtgtggctgactctttctacaagattgcagccgaggccctggtggtgctgcaggagctggtgcgggccctgtggccgctgcacaggcctcggatgctggatcctgagccatatgttggagagatgtctgctgtcaccctggcgcgacttcgtgccactgacctggaccaggaggtgaaggagcgggccatttcctgcatgggccaccttgtaggccacctgggtgaccggcttggggatgacctggagcccacgttactgctcctcctggaccgcctgcggaatgagatcacccggctgcccgccatcaaggcgcttacgctggtggccgtatccccactacagcttgacctacagcccatcctggccgaggcactgcacattctggcctcattcctgcggaagaaccagcgggctttgcgactggccacactggcagccctggacgccctggcccagagccagggcctcagcctcccaccgtctgccgtgcaggccgtgctggctgagctgcctgccctggtcaacgagagcgacatgcatgtggcccagctggctgtggacttccttgccacagtgacccaggcccagccagcctctttggtggaggtcagtggccctgtgctctcagagctgctgcggctgctgcgttcgcccctgttgccagccggagttctggcagctgctgaaggcttcctgcaggccctggtagggacccgtcccccgtgtgtggactatgccaaactcatcagcctgctcactgcgcctgtttatgagcaggctgtggatggtgggcctggcctgcacaagcaggtgttccactcattggcccggtgtgtggcagccctctcagctgcctgtccccaagaggcggcaagcacagccagtcgcctggtctgcgatgccaggtcgccccactccagcacgggggtcaaggtcctggcattcttgtcgctggctgaggtgggtcaggtggctgggccaggcccccagcgggagctgaaggcggtgctcctggaagctttggggtcacccagtgaggatgtgagggctgcagcctcgtatgcactgggccgtgtgggtgctggcagcctgcccgacttcctgcccttcctgctggagcagatcgaggctgagccccgacgacagtacctgctgctgcactcactcagggaggccctgggggccgcccagcctgacagcctgaagccctacgccgaggacatctgggccttgctgttccagcgctgcgagggtgctgaggagggcacccggggggtggtggccgagtgcattgggaagctggtccttgtgaacccttcgttccttctgccccgcttgcggaagcagcttgctgcaggtcggccacacacccggagcaccgtcatcacagcggtcaagttccttatctcggaccagccccatcccattgaccccctcctgaagagcttcatcggagagttcatggagagcctgcaggacccagacctgaacgtgcgccgtgcgactctggctttcttcaactcagctgtgcacaacaagccctcgctagtccgggacctgctggatgacatcctgcccctcctctaccaggagacaaagatccggcgggacctcatccgagaggtggagatggggccctttaaacatacagtggacgatgggctggacgtgcggaaggcggcctttgaatgcatgtattcactgcttgagagctgcctgggccagctggatatctgtgagttcctgaaccatgtggaggacgggctgaaggaccactacgacatccggatgctgaccttcatcatggttgcccggctggccaccctgtgtcctgcacctgtcctgcagagggtggaccgactcattgagccactaagggccacctgcactgccaaggtcaaagctggttctgtgaagcaggagtttgaaaagcaagatgaactgaagcgctctgcaatgagggcagtggctgccctgctgaccatccccgaggtggggaaaagccccatcatggccgacttctcttcccaaatcagatccaaccctgaacttgctgccctctttgaaagcatccagaaggattccacttcagcccccagcacagactcaatggagctcagctagtcccctcagcaccaaggtgggccctcgcttaagagaaaggagcccacccaagtccgaggcctccccatcccaccatcgcaggtctctacttttgcccttccaccatctcactgggggccctgtcgctcctggtcagggcttacagtgccttctccagggacccaactcaaaggcccccagcccaagctgtgaggctgccaacagttgggccccttccttaactcaggacagtcatccaaagaaatagggtgaggaagttttccagtgacttcacactgtacccctccatagtctgtctggttccttcagagggtgtctctgcctcacaaactagtagtatttagaaataggctgtgctgtcagctgtaaaagatcaggaggcagcagacaccactctgctttcttcactgcattcagcaatgcctgaagttagtgctcaggccgggcatctcaaaagaaaagatacttgagttattcacattttaaaattcaaaacggttcatttttaagtggcagtgatgaatcagaaatttggaagatgatacgggtttcttttttccagggaggaggaatgggttgggtagggaactggacaggcttggacctcatgtttcatttctaatttcaaaatacttattagcaaattgggcaacaatgggcatcttccatgccaccacccaggcataaccagttggtttgtttccttctgaggaaggtttcaaatgtgtctagtgttcagtattgaggacaaagaaatacaagtggcaggcccaagtattttctgtgatatcccaggttaataaagattagattctaagttaaaaaaaaaaaa

SEQ ID NO: 804 - DNA, 1409 bp, Homo sapiens
  CDS (190)..(1368)
attgaaatcgatagcgtgtaggaccggcccggaattcccggttccacgggaggcaggaggggaagtcccaacggtgctagaatggtgctgcagttgcagaagacggctcacaagtgaagtctggaagagcaacagggaagacatccatcatttgctccaaagtgtgcaagtcaaatcctggggagaatcatgataaccctgatcactgagcagctacagaagcagactctggatgagctgaaatgcacacgcttcagcatcagtctgcctttgcctgatcatgcagacatctccaactgtgggaactctttccagcttgtgtctgaaggtgcttcctggaggggcctgccccactgttcctgtgctgagttccaggacagcctcaacttcagctaccatccctcaggcctgagcctgcacctcagaccacccagtcggggaaactcccccaaggagcagcccttctcccaagtcctaagacctgagcccccagatccagagaagcttcctgtgccccctgcccctccatccaagaggcactgccgctcactctcagtgcccgtggacctgtctcgctggcagccggtgtggcggcccgccccctccaagctgtggactcccataaagcaccggggcagtggtggagggggtgggccgcaggtgcctcaccagagccccccaaagcgggtctccagcctcaggttcctccaagctcccagtgcctcttctcaatgtgccccagctcacagaccctacagccctcctttcttcagcctggccctggcccaagattcctctcgaccctgcgccgcctcccctcaaagtggctcctgggagagtgatgctgagtccttgtcaccttgcccacctcagcgccgcttctccctgtcacccagtctgggcccgcaggcaagccgcttcttgccctctgcccggagctctcccgcatcctccccagagctgccctggcgacctcgaggtctccgcaaccttccccgaagccgctcacagccttgtgatctggatgcccgcaaaactggggtcaagcggcgccacgaggaagacccccggcgtctgcggccttcgttggactttgacaagatgaatcagaaaccatactcaggaggtctttgtctccaagaaacagcccgggaaggcagcagcatctctccaccatggttcatggcctgtagccccccacccctctctgcttcctgcagccccactgggggttcctcccaggtgctgagtgaaagcgaagaggaggaggagggggctgtgcggtggggtcggcaggcgctgagcaagcggacactgtgccagcgggactttggggacctggacttgaatttgattgaggaaaactaaaactgagaggctacttcctgggaaaaaaaaaaaaaaaaaaa

SEQ ID NO: 805 - DNA, 4344 bp, Homo sapiens
  CDS (140)..(1768)
ctgccggcggcccgggcgggctggcagctagagtgggtgcgatagccgcctccgcctctgcccgcctccgccgtcgcctcctccgcccgggccgttcgctgctgcgcggggagagcgaggcggggccgccggggccgccatggagcccgactcggtgattgaggacaagaccatcgagctcatgtgttctgtgccaaggtctttgtggctaggctgcgccaacctggtagagagcatgtgcgcactgagttgcctgcagagcatgcccagtgtcagatgtctccagataagtaatggaacatcatctgtgatcgtctccagaaagaggccatcagaaggaaactatcaaaaagaaaaagacttgtgtattaaatattttgaccagtggtctgaatcagatcaagtggaatttgtggaacatcttatttcacgaatgtgtcattatcagcatggacatattaactcttacctgaagcccatgttgcagcgggactttattaccgctttaccagagcaaggcttagatcacatagcagaaaacattctttcgtacctggatgccaggtctctgtgtgcagcagagctggtatgtaaagaatggcagcgagtgatctcagaaggaatgctttggaagaagctgattgaacgaatggtacgcactgatcccctatggaaaggactttcagaaagaagagggtgggatcagtacctgtttaaaaacagacccacagatggccctccaaattcattttataggtcattatacccaaagattatccaggatatagagactatagaatctaactggcggtgtggacgacacaacttgcagaggattcagtgccgctctgaaaatagtaaaggtgtctactgtttacagtacgatgatgaaaaaattatcagtggcctacgagataattctattaagatatgggataaaaccagcctggaatgtttgaaagtgttaacaggacacacaggctctgtcctctgtctgcagtatgatgagcgtgtcattgtaactggctcttcagattctacggtgagagtgtgggatgtgaacacgggtgaagttcttaacacattgatccaccacaatgaggctgtattgcacttacgcttcagcaatggactgatggtgacctgttccaaggaccgctccattgctgtgtgggacatggcttctgcgaccgacatcactttacgccgtgtcctggttggccaccgggctgccgtcaatgtagtagactttgacgacaagtacatcgtgtctgcctctggtgacaggaccatcaaagtctggagcacgagcacctgtgaatttgttcgtactctcaatgggcacaagcggggcattgcctgtctccagtacagggatcgcctggttgttagtggatcatcagataataccattaggctctgggatattgaatgtggtgcctgtttaagagtcctagagggacatgaagaattggtccgatgcatccggtttgataacaagaggattgtcagtggggcctatgatgggaaaattaaagtttgggacttgcaagctgctcttgaccctcgagccccagcaagcacattgtgtttgcgcacattggtggaacattctggacgtgtgtttcggctccagtttgatgagtttcagatcatcagcagctcccatgatgacactattttgatttgggatttcttaaatgtgcctcccagtgcccagaatgagacccgttctccctccagaacatacacttacatctctagataacagtctgcactttcacccgtttcagggttttctagtcttgaactactggctacgtggctaccaaatgcctaagggagttcgttcacagctgagttatgaagctggaattggttctagacgctgggtagatgcaaagcagcctaactcttcaagtaccgacatttctcacctctgattccggctctcctttgagaaggagaccttagcttccccggcttcaagtagaacagaagcccgtttccttccctcatcagtgaaaaaatctaatgtttcaaatgtaaattgttcatagaaaaggaacatagaatctgttttacagaagtaaatcgaccgtcaagagaagacttggcctctaatttatattgctttgcactttggtttgatattaagaaacagcattcttcttcagtgaaattttgggtgccaaacacctacccagaatgtccagggctttcattttcaaaagttagcattctccttttgaccgtccaagtcattatgaattctgacttgttgtattaggaacatgttggacagtggaaaattttctctggattgttttagtaatatttttgggattatacttcctttctgtaccaatttcttttaatttaaagaactataagtcagttatattatctaccaacaggtaatatagctctttcttttattaactgttctctgtcccccaaccatctcctgatatttggtagagtaacacctttatacgtgtgcttgcctcctaatttaaaatactgtattcgcatgtagatataatgtacataacagtttaacctcaaagttgctggagtcagggccccctgtgcttgagacactaatacagagtgtgttcgcacttagccatgggctgggctcaagaacctgatacctgggttgatgtggattacctagaacccttcctgcagtattcatacagtgtttttattttgttgttgtcattgcgtgtgtgtggtttgtgtgtgtttttaatgagaatcttgttttaaaatgtaatttctaaggtttaacaccaaaatgttttatttgttgtggagtatatattatacaatagagaggtaccttaaacattttttgttcttattctttttctcataagtactcctgagtacaagtggtcacctcccatagtattcatttggcttcgctgtcaaaaatcattattctgtgcagtcgtggccctgggaaggggaaataagaaggccctgttgacgggctgtcttggctctggaattcatgcatcctggccttgccaaggttctggcagggcctgctggtgtgttggagcctgcagggcaggtcaggctggttcagaggcccatgctgaggggtgggtgctctgaagtggagtgaagcctcaagcccatgaatgccaccccagtcatctctggtgtcagctgctgctgtggccccagcaggttctcaaagctcccaagtcctccctacgacacagcccaaatgtgtaaatggcactgttgccctgacagtgcatggaaaggacgttggcatccaattggcactccttctcccttattcaatattaggtttgatttgcccttcgccattgtttccaaagatcaaggaatgtcaataacattttaaaggaccaataaacagcctcctataaagtaaacctcttcccgtggaagcacactctactactaaagggaaggcccctgggctctgatttgtcctttgcattgagaacggtgtggggatcagtgtgtgtgtatgtgatttgtttattgagttggctttgcttttttagtttttcttttaaaaataaaatccttccttcccatgttactaaattaatttatgtttttgagaggttgagtctcaaagtgtaaacaataaacctccattcataaggtggatgttgtaagcttgatggtggttgtgaaagtgatttagctttgaccacttttcatcctacagcttcaatatcaaactggttaggaaagcccagggggaagggagggggcaggggaggaggcaattctgaatgaatgaatggattttttgttgtttttgcatgtttaatatagaagttcccctcgttccttgggagatgatggcctttgaatatgcagacaacctttgaattgtgcctactaaattatagcaggggactttggcacccaaggagttctgactttctgggattataatagtaattcccagccatactctggactttattttgctaaccataactgagcaaatgtaaattactgctatattaatgttttaaagcactgggatagtctaattctaacttgtaattaattatgtttgccaattatctgtttgaaataaatttgtgtctgaacagctattgaaactgttaaattgtacagatattattcatgacagctttgtactgtggaatgtgcttaataaaaaacaaaaaagtttgacttttgtccagtaaattgctaagtaatgtcaataaatcgagtatgggtattatgcagtgcacctaatctggcttcatgcaattgttacttcagctactgattcaaagccaatactcttaataaagtgttgcaatactc

SEQ ID NO: 806 - DNA, 2907 bp, Homo sapiens
  CDS (76)..(2907)
cctgtaagccgtacgcctgcggtaccggtccggaattcccgggtcgacgatttcgtatctggcagcccatggaggatggatgggagcacggagaggctggaggcaaggagaccagccgggaggctgccgtggtcatccaggcaagaaatgacgaggcgtccctccctgatggcgggcagacagcacggatggagcgcccagcagagtgccaccgtggccaacccagtgcctggtgccaacccggacctgcttccccacttcctggtggagcccgaggatgtgtacatcgtcaagaacaagccagtgctgcttgtgtgcaaggccgtgcccgccacgcagatcttcttcaagtgcaacggggagtgggtgcgccaggtggaccacgtgatcgagcgcagcacagacgggagcagtgggctgcccaccatggaggtccgcattaatgtctcaaggcagcaggtcgagaaggtgttcgggctggaggaatactggtgccagtgcgtggcatggagctcctcgggcaccaccaagagtcagaaggcctacatccgcatagcctatttgcgcaagaacttcgagcaggagccgctggccaaggaggtgtccctggagcagggcatcgtgctgccctgccgtccaccggagggcatccctccagccgaggtggagtggctccggaacgaggacctggtggacccgtccctggaccccaatgtatacatcacgcgggagcacagcctggtggtgcgacaggcccgccttgctgacacggccaactacacctgcgtggccaagaacatcgtggcacgtcgccgcagcgcctccgctgctgtcatcgtctacggtgggccccgggactccctggtcacagggagaggcactgcggtgcccctgggcagtgacatgtggctgtccttctctgtccggccagtgaacggtgggtggtcgacgtggaccgagtggtccgtctgcagcgccagctgtgggcgcggctggcagaaacggagccggagctgcaccaacccggcgcctctcaacgggggcgctttctgtgaggggcagaatgtccagaaaacagcctgcgccaccctgtgcccagtggacggcagctggagcccgtggagcaagtggtcggcctgtgggctggactgcacccactggcggagccgtgagtgctctgacccagcaccccgcaacggaggggaggagtgccagggcactgacctggacacccgcaactgtaccagtgacctctgtgtacacaactcctacacccctgcccccaccaaggccatgctgtctcccgcagctgcttctggccctgaggacgtggccctctatgtgggcctcatcgccgtggccgtctgcctggtcctgctgctgcttgtcctcatcctcgtttattgccggaagaaggaggggctggactcagatgtggctgactcgtccattctcacctcaggcttccagcccgtcagcatcaagcccagcaaagcagacaacccccatctgctcaccatccagccggacctcagcaccaccaccaccacctaccagggcagtctctgtccccggcaggatgggcccagccccaagttccagctcaccaatgggcacctgctcagccccctgggtggcggccgccacacactgcaccacagctctcccacctctgaggccgaggagttcgtctcccgcctctccacccagaactacttccgctccctgccccgaggcaccagcaacatgacctatgggaccttcaacttcctcgggggccggctgatgatccctaatacaggaatcagcctcctcatccccccagatgccataccccgagggaagatctatgagatctacctcacgctgcacaagccggaagacgtgagctgtggaccccctggcgtcctgctcacccggccagtcatcctggctatggaccactgtggggagcccagccctgacagctggagcctgcgcctcaaaaagcagtcgtgcgagggcagctgggaggatgtgctgcacctgggcgaggaggcgccctcccacctctactactgccagctggaggccagtgcctgctacgtcttcaccgagcagctgggccgctttgccctggtgggagaggccctcagcgtggctgccgccaagcgcctcaagctgcttctgtttgcgccggtggcctgcacctccctcgagtacaacatccgggtctactgcctgcatgacacccacgatgcactcaaggaggtggtgcagctggagaagcagctggggggacagctgatccaggagccacgggtcctgcacttcaaggacagttaccacaacctgcgcctatccatccacgatgtgcccagctccctgtggaagagtaagctccttgtcagctaccaggagatccccttttatcacatctggaatggcacgcagcggtacttgcactgcaccttcaccctggagcgtgtcagccccagcactagtgacctggcctgcaagctgtgggtgtggcaggtggagggcgacgggcagagcttcagcatcaacttcaacatcaccaaggacacaaggtttgctgagctgctggctctggagagtgaagcgggggtcccagccctggtgggccccagtgccttcaagatccccttcctcattcggcagaagataatttccagcctggacccaccctgtaggcggggtgccgactggcggactctggcccagaaactccacctggacagccatctcagcttctttgcctccaagcccagccccacagccatgatcctcaacctgtgggaggcgcggcacttccccaacggcaacctcagccagctggctgcagcagtggctggactgggccagccagacgctggcctcttcacagtgtcggaggctgagtgctga

SEQ ID NO: 807 - DNA, 3218 bp, Homo sapiens
  CDS (187)..(3198)
taagcttgcggccgccgctcttgtcgtcgcagtatttcctgttcggatgatcttttgcgggcccccagctgcctccttaccctcacactcccactcctccgtttccgcgggcgaagctgccttcggccccgggtggtctcccccgcccggggaccccctgtgcctcccctcccgggctccgagaccatgaggaaattcaacatcaggaaggtgctggacggcctgaccgccggctcgtcctcggcgtcgcagcagcaacagcagcagcatccgcctgggaaccgggagccggagatccaggaaacgctccagtccgagcactttcagctctgcaagactgttcgccatggatttccctatcaaccctcagccctggcctttgatcctgtacagaagatcctggcagtgggaactcagactggtgctttaaggctctttggtcgtccaggagtagaatgttattgccagcatgacagtggagctgcagtaatccagctccagttcctgattaatgagggagcgcttgtgagtgccttggctgatgacaccttacacttatggaatttacgtcagaagaggcctgccatactacattcgcttaaattttgcagagaaagggttacattttgccatctgcctttccagagtaagtggctctatgtgggcactgaacgaggtaatatacatattgtcaatgtggagtccttcacactctcaggctacgtcattatgtggaataaagccattgaactgtcatctaaatctcacccaggacctgtggtccatataagtgataatccaatggacgagggaaagcttttgattggctttgaatctggaacagtagttctatgggacctcaaatacaagaaagccgactacagatacacatatgatgaggctatccactctgttgcttggcatcatgaaggaaaacaatttatttgcagtcattcagatggcaccttgaccatatggaatgtaaggtcccctgctaaaccagtacagacaatcactccacatggaaaacagttaagggatgggaagaagccagaaccatgcaaacctatcctcaaggtggaattcaaaacgactagatctggggagccttttattattttatcaggaggtttgtcatatgatactgtaggaagaagaccttgcttaacagtgatgcatgggaaaagcactgctgtgctagaaatggactattcaattgtcgattttctaacgctgtgtgaaacaccatacccaaatgattttcaagaaccatatgctgtggttgttcttctagaaaaggatttagtacttatagaccttgcacaaaatggatatcctatatttgaaaatccctaccctttgagtatacatgagtcccctgttacatgttgcgaatattttgcggattgtcctgtggaccttattcctgcactttattctgttggagctagacagaaacgtcaaggttacagcaaaaaggaatggcccatcaacggaggtaattggggcttgggtgctcaaagttacccagaaataattattacagggcatgctgatgggtcagttaagttctgggatgcttctgcaataactctacaagtattatataagctaaagacatctaaagtatttgaaaagtcaagaaataaagatgacaggccaaacacagacattgtagatgaagatccatatgccattcagatcatctcctggtgtccagaaagtagaatgctgtgcatcgctggagtttcagctcatgtcattatttatagattcagcaagcaggaagtaatcacagaagtcattccgatgcttgaagttcgattattatatgagataaatgatgtggaaactccggagggtgagcagccaccacctttgccaacacccgtgggagggtccaaccctcagcccatccctcctcagtctcatccatctaccagtagcagttcatctgatgggcttcgtgataatgtaccttgtttaaatgtagtgtgtaaggagcatggaaatcattttatcttaacaagaagtaaaaagctgaacaaactggaaaatcaacaactcttcttaaagatctgtaagagaagactgccttcagaaataacacttttacgagagcctaacctgctggggttttatcagggaccaactaacctgagagaagaaaaatcactccagtgggcccaagccttccaagtaaaggaagagaagtacgcaactccagcccactttagccatcttattccacctaaaagggagtgggaggaagtaaaagaaccagtggaatttgaaataattaatttgaaattatttgaaatttatattagcaccccaaaaaatgaaatacttaaatataaatctaacaaatatgtacaagatctacacgaagaacagcacaaaactctgcagagtgagaatattctgtatgatattataatgatgaaagacatggttacattttgccatctgcctttccagagtaagtggctctatgtgggcactgaacgaggtaatatacatattgtcaatgtggagtccttcacactctcaggctacgtcattatgtggaataaagccattgaactgtcatctaaatctcacccaggacctgtggtccatataagtgataatccaatggacgagggaaagcttttgattggctttgaatctggaacagtagttttatgggacctcaaatcaaagaaagccgactacagatacacatatgatgaggctatccactctgttgcttggcatcatgaaggaaaacaatttatttgcagtcattcagatggcaccttgactatatggaatgtaaggtcccctgctaaaccagtacagacaatcactccacatggaaaacagttaaaggatgggaagaagccagaaccatgcaaacctatcctcaaggtggaattcaaaacgactagatctggggagccttttattattttatcaggaggtttgtcatatgatactgtaggaagaagaccttgcttaacagtgatgcatgggaaaagcactgctgtgctagaaatggactattcaattgttgattttctaacgctgtgtgaaacaccatacccaaatgattttcaagaaccatatgctgtggttgttcttctagaaaaggatttagtacttatagaccttgcacaaaatggatatcctatatttgaaatccctaccctttgagtaacatgagactgtattag

SEQ ID NO: 808 - DNA, 5355 bp, Homo sapiens
  CDS (53)..(5302)
ccgttccggaattcccgggtcgacgatttcgtctgaaagacaggtgtgcgtcatgcacttgaagcacctgaggaccctgctgagccctcaggatggagctgcaaaggtgacctgcatggcttggtcccagaacaatgccaaatttgctgtctgcacagtggaccgagtggtcttgctgtatgatgaacatggagaacggagagataaattctccaccaaaccagctgacatgaagtatggcaggaagagctatatggtgaagggcatggctttttctcctgattccactaaaattgccataggacagactgacaacatcatctatgtctacaagattggagaagattggggtgacaagaaagtcatctgcaacaagttcatccagacgagtgctgtcacttgtctgcaatggccggcagaatacatcattgtctttggactggctgaagggaaggttcgtttagcaaacaccaaaactaataaatcatctaccatctatgggacagagtcttacgtggtgtccctgacaacaaattgctctgggaaaggaattctctctggtcatgcagatggtaccatcgttaggtatttctttgatgatgaaggctctggagagtcacaggagaagttggttaaccacccgtgtccaccctatgccttggcatgggcaaccaatagcatcgtggctgcaggctgtgatcggaaaattgtagcctatggaaaagaaggtcacatgctacaaacttttgattatagccgtgaccctcaggagcgggagttcaccacagctgtatcaagtcctgggggccagtctgttgtgctaggaagttatgacaggcttcgggtgttcaactggatccctcgaagaagcatctgggaagaggcaaagcccaaggagattaccaatttatacaccatcactgccttggcctggaagcgggatggctcacggctctgtgtgggcacactatgtggtggggtggaacagtttgactgctgcctccgaaggagtatttacaagaacaagtttgagttgacgtatgtgggacctagccaggtgattgtgaagaacctgtcatcaggaacccgagtggtgctcaagtcacactatggctatgaggtggaagaggtgaaaatcctaggaaaggaacgttacttggtggctcacacatcagaaacactgctgctgggggacctgaacactaatcggcttagtgagatagcctggcaaggatctggtggcaatgagaagtatttctttgaaaatgagaatgtatgcatgatcttcaatgccggagagctaaccctggtggaatatgggaataatgacaccctgggttctgtacgcactgaattcatgaacccccacctcatcagtgttcgtattaatgagaggtgtcagcgaggaacagaagataataagaaattggcttatcttattgatattaagactattgctatagtggatctgattggtggctacaacattggcaccgtcagccatgagagccgtgtggattggctggaacttaatgagactggacacaagctcctcttcagggaccggaaacttcgtttgcatctgtatgatattgaaagctgctctaagacaatgatcctcaacttctgctcctatatgcagtgggtcccaggaagtgacgtgctggtagctcagaaccgaaacagtctgtgtgtatggtacaacattgaggcacctgagagagtcaccatgttcactattaggggtgatgttataggtctggagcggggcgggggaaagaccgaggtgatggtgatggaaggtgtgactactgttgcctacacattggatgagggcctcatcgagtttggaacagccattgatgatggcaactacatccgggcaacagccttcttagagactctggaaatgaccccagaaacagaggcaatgtggaaaaccttgagtaaactggcactagaggcaaggcaactacacattgcggagaggtgcttttctgctttgggccaagtagcaaaagctcgattcctgcatgagaccaatgagattgcagatcaagtatcccgggaatatggcggagaaggaacagacttttatcaggtccgagcacgtctagccatgctggaaaagaactacaaactggctgaaatgatctttttggaacagaatgctgtggaggaggccatgggcatgtaccaggagctacaccgttgggatgagtgtatcgctgtggctgaagccaaggggcacccagccctggagaagctacgtcgtagttactaccagtggctgatggacacacagcaagaggagcgagcaggtgaactacaggagagccaaggggatgggctagcagccatcagcctctacctcaaagctgggctccctgccaaagctgctcggctggtgctgacccgagaggaactgctagccaacacagagctggtagaacacatcactgcagcccttatcaagggggaactctacgaaagggcaggtgatctctttgagaagattcacaatccacagaaggccctggagtgctaccgtaaaggcaacgcattcatgaaagcggtagagctggctcgattggccttcccagtggaggtggtgaaactagaggaggcatggggggaccacctggtgcagcagaagcagcttgatgcagccattaatcactacatcgaagccaggtgctccattaaggcaattgaggccgccctgggtgcccgccagtggaagaaggcaatttatatattagatctacaggaccggaacactgcatccaaatactatcctctcgtggcccaacactatgcatccctgcaggagtatgagattgctgaggagctctatactaagggagatcggacaaaagatgccatagacatgtacacccaggctggtcgttgggaacaagcccacaagctggcgatgaaatgcatgagaccagaagatgtgtcagtgctatacatcactcaggcccaggaaatggagaagcagggcaagtaccgtgaggctgaaaggctatatgtgacagtacaagagcctgatcttgccatcaccatgtacaaaaagcacaagttgtatgatgacatgatccgcctggtagggaagcaccatccagatctcctcagtgatacacacctacatctgggcaaggagctggaggctgaaggccgactacaggaggctgagtaccactacctcgaggcccaggaatggaaggcaacagtgaacatgtaccgggccagtgggctttgggaagaggcctacagggtggccagaactcaaggaggggctaatgcccacaaacacgtggcctatctgtgggcaaagagcctgggaggagaggctgcagttagactgcttaataagctgggactcctggaagctgctgttgaccacgctgcagacaattgctcctttgaatttgcgtttgaactctctcggctggccctcaagcacaaaacccccgaggttcatctcaaatatgctatgttcctggaggatgagggtaaattcgaagaggctgaagctgaattcatcagagctggtaaacccaaggaggcagtcctcatgtttgtccataaccaggattgggaggcagctcagcgtgtggctgaggctcacgaccctgacagtgtcgccgaggtgcttgtgggacaggcccggggggccttggaggagaaggactttcagaaagcagaagggctgctgctccgggcccagagaccaggcctggccctcaattattataaggaggctggattatggagtgacgctctgcgcatctgcaaggactatgtgcccagccagctggaggctctgcaggaagaatatgagcgggaagctactaagaagggggccaggggtgtggagggatttgtggaacaagctcgacactgggagcaggctggagagtacagccgtgccgtggactgctacctcaaagtgcgagactctggaaacagcggcctggcggagaagtgctggatgaaggcagctgaactctccatcaagtttctgcctccccaacgtaatatggaagtcgttctggctgtaggaccccagctgattggaattggaaagcacagtgcagctgcagagctctatctgaatctggaccttgtcaaggaagcaatcgatgctttcatcgagggtgaggagtggaacaaggcgaagcgtgtagctaaggagttagatcccaggtatgaagactatgtggaccagcattataaagagttcctcaagaatcagggcaaagtggactcgctggtgggtgtggatgtgatagctgctttggacctgtatgtggagcagggccagtgggacaagtgcattgaaacagctaccaagcagaactacaagattctgcacaagtatgtggctttgtatgcaactcacttgatccgggagggtagctctgcccaggcattggccctgtatgtacagcacggagcccctgctaacccacagaacttcaatatctacaaaaggatcttcactgacatggtgagctctcctggaaccaactgtgccgaggcctatcatagctgggctgatcttcgagatgtcctcttcaacctgtgtgaaaacctggtgaagtccagtgaggcaaactctccagcccatgaggagttcaagacgatgctgctgatcgctcattactatgccacgcgctctgcagcccagagtgtcaaacagctggaaaccgtggctgccaggctttctgtttcactcttgcgtcacacccagctactacctgtagacaaagccttctatgaagcaggcattgctgccaaggcagttggctgggataacatggcattcatcttcctcaatcgctttttggacctgaccgatgcaatcgaggaagggactctagatggccttgaccactctgattttcaggatacagacattccctttgaggtgccactcccagctaagcagcatgtaccggaggctgagagagaagaggttcgagactgggtgcttacagtctccatggaccagcggctggagcaggttctgcctcgggatgagcgtggcgcctacgaggcctccctagtggcagcgagcactggtgttcgagccctgccctgccttattacaggataccccattctgaggaacaaaattgaatttaagcggccagggaaggctgctaacaaggacaactggaataaattccttatggccatcaagacctcccacagcccagtgtgccaggacgtgctgaaattcatcagtcagtggtgtggagggctccccagcaccagcttttcctttcagtagttggtagagctgaggaagagttagggcctctccctcattaaagttttataaat

SEQ ID NO: 809 - DNA, 2660 bp, Homo sapiens
  CDS (40)..(2334)
gagatcccccgagacctcacgctggatgccctgctggagatgaatgaggccaaggtgaaggagacgctgcggcgctgtggggccagcggggatgagtgtggccgtctgcagtatgccctcacctgcctgcggaaggtgacaggcctgggaggggagcacaaggaggactccagttggagttcattggatgcgcggcgggaaagtggctcagggccttccacggacaccctctcagcagccagcctgccctggcccccagggagctcccagctgggcagagcaggcaacagcgcccagggcccacgctccatctccgtgtcagctctgcccgcctcagactcccccacccccagcttcagtgagggcctctcagacacctgtattcccctgcacgccagcggccggctgaccccccgtgccctgcacagcttcatcaccccgcccaccacaccccagctgcgacggcacaccaagctgaagccaccacggacgccccccccacccagccgcaaggtcttccagctgctgcccagcttccccacactcacccggagcaagtcccatgagtctcagctggggaaccgcattgatgacgtctcctcgatgaggtttgatctctcgcatggatccccacagatggtacggagggatatcgggctgtcggtgacgcacaggttctccaccaagtcctggctgtcgcaggtctgccacgtgtgccagaagagcatgatatttggagtgaagtgcaagcattgcaggttgaagtgtcacaacaaatgtaccaaagaagcccctgcctgtagaatatccttcctgccactaactcggcttcggaggacagaatctgtcccctcggacatcaacaacccggtggacagagcagccgaaccccattttggaaccctccccaaagcactgacaaagaaggagcaccctccggccatgaatcacctggactccagcagcaacccttcctccaccacctcctccacaccctcctcaccggcgcccttcccgacatcatccaacccatccagcgccaccacgccccccaacccctcacctggccagcgggacagcaggttcaacttcccagctgcctacttcattcatcatagacagcagtttatctttccagacatttcagcctttgcacacgcagccccgctccctgaagctgccgacggtacccggctcgatgaccagccgaaagcagatgtgttggaagctcacgaagcggaggctgaggagccagaggctggcaagtcagaggcagaagacgatgaggacgaggtggacgacttgccgagctctcgccggccctggcggggccccatctctcgcaaggccagccagaccagcgtgtacctgcaggagtgggacatccccttcgagcaggtagagctgggcgagcccatcgggcagggccgctggggccgggtgcaccgcggccgctggcatggcgaggtggccattcgcctgctggagatggacggccacaaccaggaccacctgaagctcttcaagaaagaggtgatgaactaccggcagacgcggcatgagaacgtggtgctcttcatgggggcctgcatgaacccgccccacctggccattatcaccagcttctgcaaggggcggacgttgcactcgtttgtgagggaccccaagacgtctctggacatcaacaagacgaggcaaatcgctcaggagatcatcaagggcatgggatatcttcatgccaagggcatcgtacacaaagatctcaaatctaagaacgtcttctatgacaacggcaaggtggtcatcacagacttcgggctgtttgggatctcaggcgtggtccgagagggacggcgtgagaaccagctaaagctgtcccacgactggctgtgctatctggcccctgagattgtacgcgagatgacccccgggaaggacgaggatcagctgccattctccaaagctgctgatgtctatgcatttgggactgtttggtatgagctgcaagcaagagactggcccttgaagaaccaggctgcagaggcatccatctggcagattggaagcggggaaggaatgaagcgtgtcctgacttctgtcagcttggggaaggaagtcagtgagatcctgtcggcctgctgggctttcgacctgcaggagagacccagcttcagcctgctgatggacatgctggagaaacttcccaagctgaaccggcggctctcccaccctggacacttctggaagtcagctgacattaacagcagcaaagttgtaccccggtttgaaaggtttggcttgggcgtcctggagtccagtaatccaaagatgtagccagccatatggtttttcgctgctgatctctttctttttaaaatgtgtttctgaaacatcccaacaaccaccacgacaaaaaaacactgcctgcccagcgctgcaaaccaggagcacacgtcctagattcagactgttggccataaaccccactcgggagatggagctgcacctgctatttcttaaaatgacaccaccaacaaccaaacctgtcatgacagacagcaaatgtttacacgtatatttctcctgagtgaacctgatgttttacaataggtaataataaaaacagtctgtgcagatgcaaaaaaaaaaaaaaaaaaaaa

SEQ ID NO: 810 - DNA, 1691 bp, Homo sapiens
  CDS (115)..(1041)
ggaatttccgggtcgacgatttcgtgcaacactcagctggctgcgacggcaaccccgagcctggacactgcgccaggaatcctaaaaccaaaatattagaacgaaaacagaaacatggctcactatattacatttctctgcatggttttggtgctgcttcttcagaattctgtgttagctgaagatggggaagtaagatcaagttgtcgtactgctccgacagatttagttttcatcttagatggctcttatagtgttggcccagaaaactttgaaatagtgaaaaagtggcttgtcaatatcacaaaaaactttgacatagggccgaagtttattcaagttggagtggttcaatatagtgactaccctgtgctggagattcctctcggaagctatgattcaggagaacatttgacggcagcagtggaatccatactctacttaggaggaaacacaaagacagggaaggccatccagtttgcgctcgattacctttttgccaagtcctcacgatttctgactaagatagcagtggtacttacggatggcaagtcccaagatgacgtcaaggatgcagctcaagcagcaagagatagtaagataacattatttgctattggtgttggttcagaaacagaagatgccgaacttagagctattgccaacaagccttcgtctacttatgtgttttatgtggaagactatattgcaatatccaaaataagggaagtgatgaagcagaaactttgtgaagaatctgtctgtccaacacgaattccagtggcagctcgtgatgaaaggggatttgatattcttttaggtttagatgtaaataaaaaggttaagaaaagaatacagctttcaccaaaaaagataaaaggatatgaagtaacatcaaaagttgatttatcagaactcacaagcaatgttttcccagaaggtcttcctccatcatatgtatttgtgtctactcaaagatttaaagtcaagaaaatttgggatttatggagaatattaactattgatggatgccacaaatagcagttaccttaaatggtgtggacaaaatcttattatttacaacaaccagcgtaattaatggctcacaagtggttacctttgctaaccctcaagttaagacgttgtttgatgaaggctggcaccaaattcgtctcttagtaacagaacaagatgtgactttgtatattgatgaccaacaaattgaaaacaagcccttacatccagttttagggatcttgatcaatgggcaaacccaaattggaaaatattctggaaaagaagaaactgttcagtttgatgtccaaaagttgcgaatctactgtgacccagaacagaacaaccgggagacagcatgtgagattcctggattttgccttaatggtcccagtgatgtaggttcaactccagctccctgtatttgtcctccgggaaaaccaggacttcaaggccccaaaggtgaccctggactgcctgggaaccctggctaccctggacaacctggtcaagatggtaagcctgtgagtactgaaagcttagtcatctccggtatatctgggattacaggatatcagggaattgcagggacaccaggtgttccaggatctccaggaatacaaggagctcgaggactaccaggttacaaaggagaaccagggcgagatggtgacaag

SEQ ID NO: 811 - DNA, 1305 bp, Homo sapiens
  CDS (1)..(1305)
atggatttcaatggtgttcagtttgtttgcagaaacctactgaaagtgagcatgtttttgaacacattaacaccgaagttctacgtggccctaacaggcacttcctcactaatatcagggcttattttgatatttgaatggtggtattttcgcaaatacggaacttcattcattgaacaagtctcagtaagccacttgcgcccccttctgggaggggttgacaacaactcttccaacaattctaattccagtaacggggactcagattccaataggcaaagtgtctcagaatgcaaagtatggcgaaatccactaaatttatttaggggtgctgaatacaatcggtatacttgggtgacaggacgagagcctcttacttactatgacatgaatctctctgcccaagaccaccagacattctttacttgtgactcggaccatctgcgtcccgcagatgcaataatgcagaaagcctggagagagagaaacccccaagctaggatttctgcagctcatgaagccttggagataaatgagacgagacaccaatgtcttggtgtacatcaaaagaaggctagcaatgtgtgccagaagactcgggaggaccagggaagcaaagcccttctggaactacaagcatatgctgatgttcaggcagtcttagcaaagtatgatgatataagcttaccaaagtcagcaacaatatgctacacagctgctttgctcaaagcaagagctgtctctgacaaattctctcctgaggctgcatctcggcgggggctgagcacagcagagatgaatgcagtagaggccattcatagagctgtggaattcaatcctcatgtgccaaaatacctactagaaatgaaaagcttaatcctacccccagaacatatcctgaagagaggagacagtgaagcaatagcatatgcattctttcatcttgcacactggaagagagtggaaggggctttgaatcttttgcattgtacgtgggaaggcacttttcggatgatcccttatcccttggaaaaggggcacctattttatccttacccaatctgtacagaaacagcagaccgagagctgcttccatctttccatgaagtctcagtttacccaaagaaggagcttcccttctttattctctttactgctggattatgttccttcacagccatgctggccctcctgacacatcagttcccggaacttatgggggtcttcgcaaaagctgtgagtgtttgcctagagggaggccttggggaatggatggggaaagccaagggcataaaagcagcgtga

SEQ ID NO: 812 - DNA, 2003 bp, Homo sapiens
  CDS (250)..(981)
cacgaggctcacccagacagaagagaccacggtaaagatcagctgacggcctctgtgggaacaaagacagggaaaggggaaatgagttcaccagaaaccaacaggcagcacaggaggtggtaaacccgaaaaagaaaatgaagaaaaagaaatacgtgaattctggcacagacccagatcaacttcactgtggccattgatttcactgcctccaatgggaacccctcacagtccacatccctgcactacatgagcccctaccagctgaacgcctacgcgctggcgctgactgccgtcggagagatcatccagcactacgacagtgacaagatgttccctgccctgggcttcggggccaagctgcccccggatggcagagtgtcccacgagttcccactgaatggcaaccaggagaacccctcatgctgcggcatcgacggcatcctggaggcctaccaccgcagcctgcgcactgtgcagctgtacggccccaccaactttgcccccgtggtcacccacgtggccaggaatgcagcggccgtgcaggatggctcccagtactcggtgctgctcatcattactgatggggtcatctcggacatggcgcagaccaaggaggccattgtcaacgctgccaagctccccatgtccatcattatcgtcggcgtgggccaggcagagttcgacgccatggtggagctggatggcgacgacgtgcggatctcctcccgggggaagctggctgaacgcgacatcgtccagtttgtacccttccgggactatgtggaccgcacaggcaaccacgtgctgagcatggcccgcctggcccgagacgtgctggcagagatccctgaccaactggtgtcctacatgaaggcacagggcattcgcccgcgttccccacccgcagcaccaacccactcgccctcgcagtccccagcccgcacgccccctgcgtgccccctgcacacgcacatctgaacctggtctcagcaggcaggtggctggggcctgggagaggccaggtgaatgggaggccagggccccagactccccgaagttggcctgcccggcctttgggacatctgtgtgcctgggaggctgccagggggtggggcttctgaagacccctcctcaatttcttggcctcacttattgcccaaacccagggagttaggggggtacgggtgaaagaggggtacacagggacccagcccttctcttcttccccaatacctggctctaacccagccaggaaggtgtaaacaataagggtgattggggtccctgtcgcccacccccggcaatcctatttgcttacctgtcaccctgaagcctgggcttggcctcctccagccccccatctccgtcccatcctcccatggtgtctactcctgtccctgagccccgccctgtggtctatcctgtgcccgatttccagtgaaccccatgaagctgatgggtttgcaggaaggcctgaacatgtgcaccctcccagggacactggatgcgctgggagccccggggaccccatggggtgctgtaatcatggaccgtaggccatgtgatgggcctgaagtggaggctgctcagcacagagccctttctggtgcctctcgaactcagtacgatgcaagttctagacacacagatggcctgtggaggcctctccctggtgtgggcccacaggtacttccatggttgactcctggcttcaggaatcccttcctccctccagaggcttcccagggccctcggtgcccacgcctctgcccatctggaggcctgagtaaggagtggctcaaccccacgttcccacactgctcctgctctttgccctgtatcccatgaggctaggagacaggagtcctgggtttgagccctgcctccccccactgcctaatgtgggaacccaagcaaggcccttctaccttttgggcctcagtttccatgtctgtacgacaagagggttggaccaagatggcccccaggggttttccttt

SEQ ID NO: 813 - DNA, 3704 bp, Homo sapiens
  CDS (217)..(3495)
gacgcaccggtccggaattcccgggccgacccacgcgtccggagcagtccgaggggaacgtgggttgaacgttgcaactagggtggagatcaagctggaacaggagttccgatcgacccggtaccaagaaggggagtgcccgcggcagggttcattgaaaaaatccttagtgatattgacatgtctcaagtgacataaattagccaatgactcggaatgatggattctccgaagattggaaatggtttgccagtgattggaccagggactgatatagggatatcttcactccacatggtggggtatttgggaaaaaattttgattcagctaaagttccatcagatgagtattgccctgcttgtagagagaagggaaagttaaaagccttaaagacttaccgaattagttttcaagaatctatctttttgtgtgaggatctgcagtgcatctatcctttgggctctaaatcacttaataacctaatttctcctgatttggaagaatgtcacactccacataagcctcagaaaaggaagagcttagaaagcagctataaggattcactccttttagcaaattccaaaaagactagaaattatattgctattgacggtggaaaagttttgaacagcaaacataatggagaagtatatgacgaaacctcgtcaaacttacctgatagtagtggtcaacagaatccaattaggacagctgattccttggagcggaatgagattttggaagctgatactgttgacatggctactacaaaagatcctgctacagttgatgtctctggaactggcagaccttcccctcaaaatgaaggatgtacatctaaactggaaatgccactggagagcaaatgtacatcatttccccaggctttatgtgtccagtggaaaaatgcttatgctctctgttggttagactgtatcctgtcagctttggtgcactcggaagagttaaagaacaccgtgactggactgtgctcgaaggaggaatctatattctggcggttgcttacaaaatataatcaagcaaatacacttctatataccagtcaattgagtggtgttaaagatggagattgtaaaaaacttacctcagaaatatttgcagagatagagacctgtctgaatgaagttagagatgaaatttttattagccttcagccccagcttagatgcacattaggtgatatggaaagccctgtgtttgcatttcccctgctcttaaaactagaaacccacattgaaaagctcttcctatattctttttcttgggactttgaatgttcgcagtgtggacaccaatatcaaaacaggcatatgaagagtctggtcacctttacaaatgtcatccctgagtggcacccacttaatgctgcccattttggcccatgtaacaattgcaacagtaaatcacaaataagaaaaatggtattagaaaaagtatctcccatattcatgttgcactttgtagaaggcttaccacagaatgacttgcagcactatgcatttcattttgaaggctgtctttatcagataacttctgtaattcagtatcgagcaaataatcattttataacatggattttagatgctgatggaagttggctggaatgtgatgacttaaaaggcccatgttctgaaaggcacaagaaatttgaagttcctgcttcagagatacatattgttatttgggaaagaaaaatatcccaagtgacagataaagaagctgcctgccttccacttaaaaagactaatgaccaacacgctctcagtaatgagaaaccagtatctttaacatcgtgttctgtgggtgatgctgcctcagctgaaacagcctcagtaactcaccctaaagatatatcagttgcccctcgtactctttcacaggacacagctgtaactcatggagatcatttactttcaggtccaaaaggtttggttgacaatattttacctctgacacttgaagaaactatccagaaaacagcctcagtttcacagttaaattctgaagctttcctgttagaaaataaacctgtagcagaaaatacaggaattctcaaaaccaatactttgctatcacaagaatcactaatggcttcttcagtatcagctccatgtaatgaaaagcttattcaagaccaatttgtggacataagttttccatcccaagttgtaaatacaaacatgcagtcagtacagctgaatacagaagatactgtaaatactaaatctgtgaataatactgatgctactggtcttatacagggagtgaagtcagtagaaattgagaaggacgctcagttaaaacaattccttacaccaaaaactgaacaattaaaaccagaacgtgtcacatctcaggtatctaatttgaagaaaaaagaaactacagcagattctcaaaccacaacatctaagtcattacagaatcagtctctgaaagaaaatcagaagaagccatttgtgggaagttgggttaaaggcttaataagcaggggtgcttcttttatgccactctgtgtttcagctcataatagaaacactataactgatttacaaccttcagttaaaggggtaaataattttggtggctttaaaactaaaggtataaaccagaaggccagccacgtatccaagaaagctcgtaagagtgcaagtaagcctcctcccatcagtaagccaccagcaggccctccatcgtctaatggcacagctgcccacccacatgctcatgctgcttcagaagttttggaaaagtctggaagcacctcatgtggagctcaactcaaccacagttcttatgggaatggtatttcttcagcaaaccatgaagacttggtggaaggtcagattcataaacttcgtctaaaacttcgtaaaaagctaaaggcagaaaagaagaaattagctgctcttatgtcttccccgcaaagcagaacagttcgaagtgaaaatctagaacaggtgccccaggatgggtctccaaatgattgtgaatcaatagaggacttgttaaatgagctaccatatccaattgatattgccaatgagtctgcatgcaccactgttcctggtgtttccctgtacagtagtcaaactcatgaagaaattttagcggaattattgtctcctacacctgtttcaacagagctgtcagaaaatggggaaggtgactttaggtatttgggaatgggagatagtcatatcccaccaccagtaccaagtgaattcaatgatgtttcccagaacacacatctgagacaggaccataattattgtagccccaccaagaaaaatccatgtgaagttcagccagactctctgacaaataatgcctgcgttagaacattaaacttggagagtccgatgaagactgatattttcgatgagtttttttcctcctcagcattaaatgctttagcaaatgacacattagacctacctcatttcgatgaatatctgtttgagaattattgaattaatgcttgttaacttttttcatataatatttattattattagaagaacttacaatgtgttcaggtagtgtttatacactggacttgtgtaattacttgtgtaataaccatgaacaaaatgcaaggtttaacctttggttctgcccatgaagcatgtaatctttcttacacattaaaatcactgaatgtgttaaaaaaaaaaaaaaa

SEQ ID NO: 814 - DNA, 1828 bp, Homo sapiens
  CDS (71)..(1789)
gggcggtggtgctttgtctcctcagcactctgctgtcactcaaggaagtatcatcaagaacaaggagggcatggatgctaagtcactaactgcctggtcccggacactggtgaccttcaaggatgtatttgtggacttcaccagggaggagtggaagctgctggacactgctcagcagatcgtgtacagaaatgtgatgctggagaactataagaacctggtttccttgggttatcagcttactaagccagatgtgatcctccggttggagaagggagaagagccctggctggtggagagagaaattcaccaagagacccatcctgattcagagactgcatttgaaatcaaatcatcagtttccagcaggagcatttttaaagataagcaatcctgtgacattaaaatggaaggaatggcaaggaatgatctctggtatttgtcattagaagaagtctggaaatgtagagaccagttagacaagtatcaggaaaacccagagagacatttgaggcaagtggcattcacccaaaagaaagtacttactcaggagagagtctctgaaagtggtaaatatgggggaaactgtcttcttcctgctcagctagtactgagagagtatttccataaacgtgactcacatactaaaagtttaaaacatgatttagttcttaatggtcatcaggacagttgtgcaagtaacagtaatgaatgtggtcaaactttctgtcaaaacattcaccttattcagtttgcaagaactcacacaggtgataaatcctacaaatgccctgataatgacaactctcttactcatggttcatctcttggtatatcaaagggcatacatagagagaaaccctatgaatgtaaggaatgtggaaaattcttcagctggcgctctaatcttactaggcatcagcttattcatactggagaaaaaccctatgagtgtaaagaatgtggaaagtctttcagccggagttctcacctcattggacatcaaaagacccatactggtgaggaaccctatgaatgtaaagaatgtggaaaatccttcagctggttctctcaccttgttactcatcagagaactcatacaggagacaaactgtacacatgtaatcagtgtgggaaatcttttgttcatagctctaggcttattagacaccagaggacacatactggagagaaaccctatgaatgtcctgaatgtgggaaatctttcagacagagcacacatctcattctgcatcagagaacccatgtgagagtgaggccctatgaatgcaatgaatgtggaaagtcttacagccagagatctcaccttgttgtgcatcatagaattcacactggactaaaaccttttgagtgtaaggattgtggaaaatgttttagtcgaagctctcacctttattcacatcaaagaacccacactggagagaaaccatatgagtgtcatgattgtggaaaatctttcagccagagttctgcccttattgtgcatcagaggatacacactggagagaaaccatatgaatgctgtcagtgtgggaaagccttcatccggaagaatgacctcattaagcaccagagaattcatgttggagaagagacctataaatgtaatcaatgtggcattatcttcagccagaactctccatttatagttcatcaaatagctcacactggagagcagttcttaacatgcaatcaatgtgggacagcgcttgttaatacctctaaccttattggataccagacaaatcatattagagaaaatgcttactaataaatatgggaatttttcacaaagaaaaaaaaaaaa

SEQ ID NO: 815 - DNA, 1426 bp, Homo sapiens
  CDS (71)..(1390)
gggcggtggtgctttgtctcctcagcactctgctgtcactcaaggaagtatcatcaagaacaaggagggcatggatgctaagtcactaactgcctggtcccggacactggtgaccttcaaggatgtatttgtggacttcaccagggaggagtggaagctgctggacactgctcagcagatcgtgtacagaaatgtgatgctggagaactataagaacctggtttccttgggttatcagcttactaagccagatgtgatcctccggttggagaagggagaagagccctggctggtggagagagaaattcaccaagagacccatcctgattcagagactgcatttgaaatcaaatcatcagtttccagcaggagcatttttaaagataagcaatcctgtgacattaaaatggaaggaatggcaaggaatgatctctggtatttgtcattagaagaagtctggaaatgtagagaccagttagacaagtatcaggaaaacccagagagacatttgaggcatcagcttattcatactggagaaaaaccctatgagtgtaaagaatgtggaaagtctttcagccggagttctcacctcattggacatcaaaagacccatactggtgaggaaccctatgaatgtaaagaatgtggaaaatccttcagctggttctctcaccttgttactcatcagagaactcatacaggagacaaactgtacacatgtaatcagtgtgggaaatcttttgttcatagctctaggcttattagacaccagaggacacatactggagagaaaccctatgaatgtcctgaatgtgggaaatctttcagacagagcacacatctcattctgcatcagagaacccatgtgagagtgaggccctatgaatgcaatgaatgtggaaagtcttacagccagagatctcaccttgttgtgcatcatagaattcacactggactaaaaccttttgagtgtaaggattgtggaaaatgttttagtcgaagctctcacctttattcacatcaaagaacccacactggagagaaaccatatgagtgtcatgattgtggaaaatctttcagccagagttctgcccttattgtgcatcagaggatacacactggagagaaaccatatgaatgctgtcagtgtgggaaagccttcatccggaagaatgacctcattaagcaccagagaattcatgttggagaagagacctataaatgtaatcaatgtggcattatcttcagccagaactctccatttatagttcatcaaatagctcacactggagagcagttcttaacatgcaatcaatgtgggacagcgcttgttaatacctctaaccttattggataccagacaaatcatattagagaaaatgcttactaataaatatgggaatttttcacaaagaaaaaaaaaaaa

SEQ ID NO: 816 - DNA, 2571 bp, Homo sapiens
  CDS (289)..(2127)
  misc_feature (1)...(2571): n = a,t,c or g
ttgaaattctttggcgacccaagctggctagcgtttaaacttaagcttggtaccgagctcggatccactagtccagagtggtggaattcgaattggttacgggtcctaacggtcccctgccttgaaatcccttgttgagggcctgcaaccttgtgcttccgactggagacgcctttggtccctcggtgtctgcactggctgctggtcaaggcttcagtgtggagtaattgacactttcgagaatattaaaatcaaattagagaagaaaactgatccataataataaaaatgtctcgaaaaatttcaaaggagtcaaaaaaagtgaacatctctagttctctggaatctgaagatattagtttagaaacaacagttcctacggatgatatttcctcatcagaagagcgagagggcaaagtcagaatcaccaggcagctaattgaacgaaaagaactacttcataatattcagttactaaaaattgagctatcccagaaaactatgatgatcgacaatttgaaagtggattatcttacaaagattgaagaattggaggagaaacttaatgatgcacttcaccagaagcagctactaacattgagattagacaaccaattggcttttcaacagaaagatgccagcaaatatcaagaattaatgaaacaagaaatggaaaccattttgttgagacagaaacaactagaagagacaaatcttcagctaagagaaaaagctggagatgttcgtcgaagcctgcgtgactttgagttgacagaagagcaatatattaaattaaaagcttttcctgaagatcagctttctattcctgaatatgtatctgttcgcttctatgagctagtgaatccattaagaaaggaaatctgtgaactacaagtgaaaaagaatatcctagcagaagaattaagtacaaacaaaaaccaactgaagcagctgacagagacatatgaggaagatcgaaaaaactactctgaagttcaaattagatgtcaacgtttggccttagaattagcagacacaaaacagttaattcagcaaggtgactaccgtcaagagaactatgataaagtcaagagtgaacgtgatgcacttgaacaggaagtaattgagcttaggagaaaacatgaaatacttgaagcctctcacatgattcaaacaaaagaacgaagtgaattatcaaaagaggtagtcaccttagagcaaactgttactttactgcaaaaggataaagaatatcttaatcgccaaaacatggagcttagtgttcgctgtgctcatgaagaggatcgccttgaaagacttcaagctcaactggaagaaagcaaaaaggctagagaagagatgtatgaaaaatatgtagcatccagagaccattataaaacagaatatgaaaataaactacatgatgaactagaacaaatcagattgaaaaccaaccaagaaattgatcaacttcgaaatgcctctagggaaatgtatgaacgagaaaacagaaatctccgagaagcaagggataatgctgtggctgaaaaggaacgagcagtgatggctgaaaaggatgctttagaaaaacacgatcagctcttagacaggtacagagaactacaacttagtacagaaagcaaagtaacagaatttctccatcaaagtaaattaaaatcttttgaaagtgagcgtgttcaacttctgcaagaggaaacagcaagaaatctcacacagtgtcaattggaatgtgaaaaatatcagaaaaaattggaggttttaaccaaagaattttatagtctccaagcctcttctgaaaaacgcattactgaacttcaagcacagaactcagagcatcaagcaaggctagacatttatgagaaactggaaaaagagcttgatgaaataataatgcaaactgcagaaattgaaaatgaagatgaggctgaaagggttcttttttcctacggctatggtgctaatgttcccacaacagccaaaagacgactaaagcaaagtgttcacttggcaagaagagtgcttcaattagaaaaacaaaactcgctgattttaaaagatctggaacatcgaaaggaccaagtaacacagctttcaccaggagcttgacagaggccaattcgctattaaaccagactcaacagccttacaggtatctcattgaatcagtgcgtcagagagattctaagattgattcactgacggaatctattgcacaacttggagaaaggatgtcagcaacttaaataaagaaaagtcagctttactacagacgganggaatcaaaatggcattaggatttaggaccaacttctaaatcatcgtgaggaattggcagcaatgaaacagattctcgttaagatgcatagtaaacattctgagaacagcttacttctcactaaaacagaaccaaaacatgtgacagaaaatcagaaatcaaagactttgaatgtgcctaaagagcatgaagacaatatatttacacctaaaccaacactctttactaaaaaagaagcacctgagtggtctaagaaacaaaagatgaagacctag

SEQ ID NO: 817 - DNA, 4515 bp, Homo sapiens
  CDS (93)..(2354)
ggggaaaggacatttgaggctctcggtccggaattcccgggtcgacccacgcgtccgatgatgctgccgaattcagagttgttgctgatgccatgaaagtcattggcttcaaacctgaggagatccaaacagtgtataagattttggctgctattctgcacttgggaaatttaaaatttgtagtagatggtgacacgcctcttattgagaatggcaaagtagtatctatcatagcagaattgctctctactaagacagatatggttgagaaagcccttctttaccggactggggccacaggccgtgacatcattgacaagcagcacacagaacaagaggccagctacggcagagacgcctttgccaaggcaatatatgagcgccttttttgttggatcgttactcgcatcaatgatattattgaggtcaagaactatgacaccacaatccatgggaaaaacactgttattggtgtcttggatatctatggctttgaaatctttgacaacaacagttttgaacaattctgtatcaattactgcaatgagaaactgcagcagctatttattcagctggttctgaagcaagaacaagaggaataccagcgggaagggatcccctggaaacatattgactacttcaacaatcagatcattgttgacctcgtggagcaacagcacaaagggatcattgcaatccttgatgatgcttgcatgaatgtcggcaaagtcaccgatgaaatgtttcttgaagcacttaacagtaaattgggcaaacacgcccatttttccagccgaaagctctgtgcctcagacaaaattctggagtttgatcgagattttcgaattcgacattatgcaggcgatgtagtctattctgtcattggttttattgacaaaaataaagatactttatttcaagatttcaagcgccttatgtataacagttcaaatcctgtgctcaagaatatgtggcctgaaggcaaactgagcattacagaggtgaccaagcgacctctgactgctgctaccttgtttaagaattctatgattgctctagtagacaaccttgcatcaaaggaaccatattacgttcgttgcatcaaacccaatgacaagaaatctccacagatatttgatgatgaacgctgccggcaccaagtagaatatcttggactactggaaaatgtgagagtgcgtcgggcaggatttgccttccgccagacatacgagaagtttcttcacaggtataagatgatctctgaattcacctggcccaaccatgaccttccttcagacaaagaggctgtcaagaaactaattgaacggtgtggttttcaggatgatgtagcttatgggaagaccaaaattttcattcgaacaccccgaacattgtttaccttggaagaactccgtgcccagatgctcataaggattgtcctctttctacaaaaggtgtggcggggcaccctggcccgcatgcggtacaaaagaaccaaggcagctctgacaataatcaggtactaccggcgctacaaagtgaagtcgtacatccacgaggtggccagacgcttccatggcgtcaagaccatgcgagactacgggaagcacgtgaagtggccaagccctcctaaagttcttcgccgttttgaggaggccctgcagacgattttcaatagatggagagcatcccagctcatcaagagcattccggcctcagacctgccccaggtcagggcaaaggttgcagccgtggaaatgttgaagggtcaaagggctgacctcgggctccagagggcctgggagggcaactatcttgcttcaaagccagatacacctcagacctcaggcacttttgtccctgttgctaatgaattgaaacggaaggacaaatacatgaatgtcctcttttcctgtcacgtccgtaaggtaaatcgatttagtaaggtggaagacagagcaatttttgtcactgaccgtcacctgtataaaatggatcccactaaacagtacaaggtgatgaagactatccctctatacaatttgactggtctgagtgtctccaatggaaaggaccaacttgtagtgttccatacgaaagacaacaaagacctcattgtctgcctcttcagcaaacagccaacccatgagagtcgaattggagaacttgttggagtgctggtgaatcatttcaagagtgagaagcgccaccttcaagtgaacgtcaccaacccagtacagtgcagcctgcacgggaagaagtgcaccgtctccgtggagacgcggctcaaccagccccagcccgacttcaccaagaatcgctcgggcttcatcctcagcgtgcccgggaactgacgccccgcggaggcctggcccggagcccggccacactccgagtcctgggtcccagtccagctgctgcctcccaacccatgcccgctagaaacctgctgcgagggcccctcccagaggagccccgcccctgtaagatttccttcctggttttctgcctttggtatcatcttcctctgtccttactgtccacggtccctgttcaataagccaaagaccctggtgccccgcccagacccctgggctgacgtccagaccaatctcaccccagaggcaactggatggtgcctttagttggtgcggatgccccgtggccaggtcaagtcagagcacctggacaggtgtcctccctgctgctgaccctgcagagggaaggggtggggatgcaggaccccactctgcgggagccccatagccacctctcttgcccaaggtgagccagccctggggacccagctcagggaggctctgctcagagttcggcggacccaccccaacccaactcccagccgccagccaaagccactgggtgagcagagtcacccacagggccagcccctcagccaggagccagtggcaggaggcggaacagcccatccagcagagtgagtccatccttcccaggttctcccctgggagactccctttgccaccaaggcccccaccagggcctctgaccaccgctctggagaggacagtgtggcatgctccaaggatcatcttacttaactcgcagcctgtggctgtggtcctcttatagatactttcaccgtttgcagggttgctaatcagatacctgctgtcaccacacttgggtcaggaaccctaatgagaacggggagctgccagggtgagggcagccctcagggtcggccgctttccctctggaccacctcccgctgcgtttcctactcagagaaacagcaagggcggggtcaagacacgggatgacgggaagcaggaagcggggcagcagcacagcgtggggtcctggcactgcaggccaggccaggatgcccaccccgccctctacacggccccttggggcctgcgcccgtgaaactggtgccagggagcactgccagcttgccagtttctgcccagcaaaagcacgtatgcttcaggggccttctgagaccaccttccccactgagccccagctgctgagaaggccttgagggaagtagaggctgggagcaaatgccccatgcggtgagaggatgaggggagcctacgcctcaggcatgtggtgagaggaggagggggagggagccaacgcctcaggtggagtgggcagaggtgcaagagagggatgtactgaagcttcttcccgtcctgccacagacacttctcctgccttcccaccctgacccggcagaacccaccaagtgcctgtgtgcagcctcctgtgcctcacccagggcctgaccccagagtggtcccaacaacccggtctcatgcccactccccatccctgcttcccaaaaattgcactgtgtgcagtttgcaacaaagaatcccgctggcatcctgtccttgggaaccctttctcattctccaagcctggtcagctgcctgcacaggcagaggtgccctcagcccagattagcaacactcatagttttgccaattaccagtagacactagtggaaccatctaactggaacttcctctctccttccacttatttcctcaaacttgttgctttacactagacacatgcaaatgtatgttttaaacacaccaaaacagatcatgccaaatgagttgcctgtcaaaggctggagggcaggaggagggcctgggtttgggttctttcctcccagcctttggatggtgccttgggccccttagccccagcgccagggcctcccagctgaggccacaggacaagcacttttttatgatgtactaaaagccacagtatgtggcaactgcaaaaggatcaggaatttagggtatgatctcggtcacgtgtcccgggcgctgaggggaaaggaagcgggcatgattgtagacaatgagggggttctcttgatgtaatgaaatgcaattttatggtttggtgcaaaaactcctattttccagtaaattaactttatttctaaagcatattttgatttgccatcaagagcaataaagcattaaatcttaaaaaaaaaaa

SEQ ID NO: 818 - DNA, 6827 bp, Homo sapiens
  CDS (85)..(6585)
cgacacccgtcctgaatttccgggacgacgacttcgtcctgccgcaacgtggcgcagtataacgccaaccatcccgacttccccatgcagatcgagcagctggagcgctacattcagcgatatctggtttatgccatactctggtccctgtctggagacagccggctaaaaatgagagcagagctgggtgaatacatcagaagaatcacgaccgtgcctctgcccactgcgcccaacatacccattatcgattatgaggtgtccatcagcggagaatggtctccgtggcaggccaaggtgcctcagattgaagtggagacgcacaaggtggcagcccctgatgtcgtcgtgccaacgctggacacagtccgccacgaagccctcttgtacacttggctggccgaacacaagcccctggtcttgtgtggccctcctgggtctggcaagaccatgacactcttcagcgccctccgggccttgcctgacatggaggtggtgggtctcaacttctccagtgctactactccagagctgcttctgaagacttttgatcactactgcgagtacaggcgcacacctaatggggtggttttggctcctgttcaacttggaaagtggctggtgttgttctgtgatgaaatcaacttgccagatatggataaatatgggacccagagggtcatatccttcatcagacagatggtggagcacggaggcttttaccgtacctcagatcaaacatgggtgaagctggagagaatccagtttgttggggcttgtaatccccccacagaccctggaagaaagcccctctcacacaggttcctgcgccacgtgcctgtcgtgtatgtggattacccgggccccgcctccctcacacagatctacggcaccttcaaccgcgccatgctgaggctcattccatccctgcggacgtatgcagagccgctcactgctgccatggtggagttctacaccatgtctcaggagagattcacccaggatacacaacctcactatatctattcaccccgtgaaatgactaggtgggtgagaggcatctttgaagcgctgagacctctggagaccctgcctgttgaaggcctcattcggatttgggcacatgaagctctgcgtctcttccaagatagactcgtagaggatgaggagaggcgttggactgatgagaacatcgacacggttgctctgaagcacttccctaacatcgacagagagaaggcaatgagccgacccatcttgtacagcaactggctgtcaaaggattacatcccagtagaccaagaagagttaagagattatgtcaaagctaggctgaaggtcttttatgaagaagaacttgatgttccgctggtgctgtttaatgaagtcctagaccacgtgctgaggattgacagaatattccgtcaacctcaaggccacttgcttctgattggtgttagtggagcaggaaaaactaccctgtctcgtttcgtcgcctggatgaacggtttgagtgtgtaccagattaaggtccataggaagtacacaggggaagactttgatgaagatctacggacagtgttgagacgttctggctgtaaaaatgaaaagatagcatttataatggatgaatctaatgtgttagattctggattcctggagcgaatgaatacccttctggccaatggagaggtgcctggtctctttgaaggagacgagtatgccaccttgatgacgcagtgcaaagagggggcacagaaggaaggcctgatgctggactcgcacgaggagctctacaagtggttcactagccaggttatccgcaacctccacgtcgtgttcaccatgaacccgtcctcggagggactcaaggaccgggcagctacatcaccagcacttttcaacaggtgtgtgttgaattggtttggagactggtccaccgaagcactgtatcaggttggcaaagaattcacaagtaagatggatctggagaagccaaattacatcgtgcctgattacatgccagttgtgtatgataagctgccgcagccaccatcccatcgggaagccattgtgaacagctgtgtgtttgttcatcagactcttcaccaggcgaatgctcggctagcaaagcgaggcggcagaacgatggccatcacccctcgccactacctggacttcatcaatcactatgccaacctgttccacgagaagcggagcgagctggaggagcagcagatgcacttgaacgtggggctcaggaagatcaaagagacagtcgaccaggtagaagaactgcgtcgtgacttgaggataaagagccaagagctggaggtgaagaatgcagcagccaatgacaagctgaaaaagatggtgaaagaccagcaggaggctgaaaagaagaaggttatgagccaagaaatccaggaacagctgcataagcagcaggaggtaattgcagacaaacagatgagtgtcaaagaagatcttgataaggtggaacctgccgtcattgaggcccagaatgctgtgaagtcgatcaagaagcagcacctggtggaggtgaggtccatggccaaccctcctgctgctgtgaagctggcgctggagtccatctgcctgctgctgggggaaagcaccacagactggaagcagatccgctccatcatcatgcgggagaacttcatccccaccatcgtcaacttctctgcagaggagatcagtgacgccataagggagaagatgaagaaaaattacatgtccaatccaagttacaattatgaaattgtgaatcgggcttccctggcttgcggccctatggtgaaatgggcaattgcacagcttaactatgcagacatgttaaagagagtggagcccctacgcaatgagctgcagaagctggaagatgacgccaaggacaaccagcagaaggccaacgaggtggagcagatgatccgagacctggaagccagcatcgcccgctacaaggaggaatacgccgtcctgatctcagaggcccaggccatcaaggcagacctggcagctgtcgaggcaaaagtaaaccggagcactgctcttctgaagagcttgtctgctgaacgtgaacgatgggaaaaaacaagtgaaactttcaaaaaccagatgtccaccattgctggggactgtctcttgtcagctgcgttcattgcctacgcgggttactttgaccagcagatgcgtcagaacttgttcactacctggtcccatcacctacagcaagccaacatccagttccgtacagatattgccaggacggaatacctttccaatgctgatgagcgtcttcgctggcaggccagctccttgcctgctgatgacctttgcacagaaaatgccatcatgctgaaacgattcaataggtatccgctgatcattgacccctctggacaggccacagaattcattatgaatgaatataaggatcgtaagatcacacggaccagcttcctggatgacgccttcagaaagaacttagagagtgcactgagattcggtaacccccttctggtccaggatgtggaaagctacgatccagttttgaacccggtgctgaaccgtgaagtgcggcgaacaggggggagagtgctgatcactctcggggaccaggacatagacctgtcgccatcgtttgtcatcttcctgtccacccgggatccaactgtcgagttcccaccagatctctgttcccgggttacttttgtaaacttcacagttacccgtagcagtttacaaagccagtgtctaaatgaagtacttaaagcagaaagacctgatgtggacgagaaacgatctgatcttcttaaacttcaaggggaatttcagctccgtttgcgtcagctggaaaaatctctactacaagctctgaacgaggtgaaagggcgcattttggatgacgacacgatcataaccactctggagaacctgaagagagaggctgcagaggtcaccaggaaagttgaggagacggacattgtcatgcaggaggtggagaccgtgtcccagcagtacctcccgctctccaccgcctgcagcagcatctacttcaccatggagtccctcaagcagatacacttcttgtaccagtactccctccagtttttcctggacatttatcacaacgtcctatacgagaacccgaacctgaagggtgtcaccgaccacacacagcgcctgtccattataacaaaggacctcttccaggtggcgtttaaccgagtggctcgaggcatgctgcatcaggaccacattacctttgccatgctgctggcaagaatcaaactgaagggcaccgtgggggagcccacctacgatgcagaattccagcacttcttgagaggaaatgagattgtcctgagtgctggctccacccccaggatccagggcctgactgtggagcaggcggaggcggtggtgaggctgagctgccttcccgcgtttaaggacttgattgcaaaggttcaggcagacgagcaatttggcatctggctggacagcagctccccggagcagactgtgccctacctctggagtgaagaaacacctgcaacacccattggccaggccatccaccgcctgctcctgatccaggctttccggcccgatcgcctgttggccatggcccacatgtttgtttcaacaaaccttggggagtctttcatgtccatcatggagcagccgctcgacctgacccacattgtgggcacagaggtgaagcccaacactcctgtcttaatgtgctctgtgcctggttatgatgccagtggacatgtcgaggaccttgcagccgagcagaacacgcagatcacttcaattgcaatcggctctgcagaaggctttaaccaagcagataaggcaataaacaccgctgtaaagtcgggcaggtgggtgatgctgaagaatgtgcatctggccccagggtggctgatgcagctggagaagaagttgcattccctgcagccgcatgcctgcttccgactcttcctcaccatggagatcaaccccaaggtgcctgtgaatctgctccgtgcgggccgcatctttgtgttcgagccaccgccaggggtgaaggccaacatgctgaggacgttcagcagcattcccgtctcacggatatgcaagtctcccaacgagcgtgcccgcttgtacttcctgctggcctggtttcatgcgatcatccaagaacgcttacgatacgcaccactggggtggtcaaagaagtatgaatttggagagtctgacctgcggtcagcttgcgatacggtggacacgtggctggatgacacggccaagggcaggcagaacatctcaccggataagatcccgtggtctgcactaaagaccttaatggcccagtccatttatggcgggcgcgtggacaacgagtttgaccagcgtctgctcaacaccttcctggagcgcctgttcacaaccaggagtttcgacagtgagtttaagctggcatgcaaggtcgacggacataaagacattcaaatgccagatggcatcaggcgagaggagtttgtgcagtgggtggagttgctccccgacacccagacgccctcctggctgggcctgcccaacaacgccgagagagtcctccttaccacacagggtgtggacatgatcagtaaaatgctgaagatgcagatgttggaggatgaggacgacctggcctacgcagagactgagaagaagacgaggacagactccacgtccgacgggcgccctgcctggatgcggacactgcacaccaccgcgtccaactggctgcacctcatcccccagacgctgagccacctcaagcgcaccgtggagaatatcaaggatcctttgttcaggttctttgagagagaagtgaagatgggcgcaaagctgcttcaggacgttcgccaggaccttgcagatgtcgtccaggtgtgcgaaggaaagaagaagcagaccaactacttgcgcacgctgatcaacgagctagtgaaagggatcttgcctcggagctggtcccactacacggtgcctgccggcatgaccgtcatccagtgggtgtccgacttcagcgagaggatcaaacagctgcagaacatctcactggcagctgcatctggtggcgccaaggagctaaagaacatccacgtgtgcctgggtggcctgttcgtgcctgaggcgtacatcactgccaccaggcagtatgtggcccaggccaacagctggtccctggaggagctctgcctggaagtcaacgtcaccacctcacagggcgccacccttgacgcttgcagcttcggagtcacgggtttgaaacttcaaggggccacgtgcaacaacaacaagctgtcactgtccaatgccatctcaaccgcccttcccctgacgcagctgcgctgggtcaagcagacaaacaccgagaagaaggccagtgtggtaaccttacctgtctacctgaacttcacccgtgcagacctcatcttcaccgtggacttcgaaattgctacaaaggaggatcctcgcagcttctacgagcggggtgtcgcagtcttgtgcacagagtaaacttttctagctgcccctttctgtaatagtgaaagttggtatttaacatttattcatttttaaaatatttggaaggtctgagcttgtgaaaagaaagtggttggtctgaggttggaggaagctgaatggaatctgacggttgggagtggtggaaattggaaggataccaggaggtatttgggaaggccaatggcgtggctcctttgaggaaataaaacactaagcatgaaaaaaaaaaaaaa

SEQ ID NO: 819 - DNA, 3028 bp, Homo sapiens
  CDS (210)..(2531)
ccgtgccggaattcccgcgtcgacgatttcgtggctaaggcgccaggcacgggcaccaccagggcgcccaggagccgcccgccgccggcatggaccagctgtactgcccaccgagcgcgtgccagtcttttggtaagaactagtcacacagacctcaacctgatgcgtggagacaaggaaatgcttttcagtgtgtccagaaagagaaaatgcaggtgtcttctgcggaggtgcgcatcgggcccatgagactgacgcaggaccctattcaggttttgctgatctttgcaaaggaagatagtcagagcgatggcttctggtgggcctgcgacagagctggttatagatgcaatattgctcggactccagagtcagcccttgaatgctttcttgataagcatcatgaaattattgtaattgatcatagacaaactcagaacttcgatgcagaagcagtgtgcaggtcgatccgggccacaaatccctccgagcacacggtgatcctcgcagtggtttcgcgagtatcggatgaccatgaagaggcgtcagtccttcctcttctccacgcaggcttcaacaggagatttatggagaatagcagcataattgcttgctataatgaactgattcaaatagaacatggggaagttcgctcccagttcaaattacgggcctgtaattcagtgtttacagcattagatcactgtcatgaagccatagaaataacaagcgatgaccacgtgattcagtatgtcaacccagccttcgaaaggatgatgggctaccacaaaggtgagctcctgggaaaagaactcgctgatctgcccaaaagcgataagaaccgggcagaccttctcgacaccatcaatacatgcatcaagaagggaaaggagtggcagggggtttactatgccagacggaaatccggggacagcatccaacagcacgtgaagatcaccccagtgattggccaaggagggaaaattaggcattttgtctcgctcaagaaactgtgttgtaccactgacaataataagcagattcacaagattcatcgtgattcaggagacaattctcagacagagcctcattcattcagatataagaacaggaggaaagagtccattgacgtgaaatcgatatcatctcgaggcagtgatgcaccaagcctgcagaatcgtcgctatccgtccatggcgaggatccactccatgaccatcgaggctcccatcacaaaggttataaatataatcaatgcagcccaagaaaacagcccagtcacagtagcggaagccttggacagagttctagagattttacggaccacagaactgtactcccctcagctgggtaccaaagatgaagatccccacaccagtgatcttgttggaggcctgatgactgacggcttgagaagactgtcaggaaacgagtatgtgtttactaagaatgtgcaccagagtcacagtcaccttgcaatgccaataaccatcaatgatgttcccccttgtatctctcaattacttgataatgaggagagttgggacttcaacatctttgaattggaagccattacgcataaaaggccattggtttatctgggcttaaaggtcttctctcggtttggagtatgtgagtttttaaactgttctgaaaccactcttcgggcctggttccaagtgatcgaagccaactaccactcttccaatgcctaccacaactccacccatgctgccgacgtcctgcacgccaccgctttctttcttggaaaggaaagagtaaagggaagcctcgatcagttggatgaggtggcagccctcattgctgccacagtccatgacgtggatcacccgggaaggaccaactctttcctctgcaatgcaggcagtgagcttgctgtgctctacaatgacactgctgttctggagagtcaccacaccgccctggccttccagctcacggtcaaggacaccaaatgcaacattttcaagaatattgacaggaaccattatcgaacgctgcgccaggctattattgacatggttttggcaacagagatgacaaaacactttgaacatgtgaataagtttgtgaacagcatcaacaagccaatggcagctgagattgaaggcagcgactgtgaatgcaaccctgctgggaagaacttccctgaaaaccaaatcctgatcaaacgcatgatgattaagtgtgctgacgtggccaacccatgccgccccttggacctgtgcattgaatgggctgggaggatctctgaggagtattttgcacagactgatgaagagaagagacagggactacctgtggtgatgccagtgtttgaccggaatacctgtagcatccccaagtctcagatctctttcattgactacttcataacagacatgtttgatgcttgggatgcctttgcacatctgccagccctgatgcaacatttggctgacaactacaaacactggaagacactagatgacctaaagtgcaaaagtttgaggcttccatctgacagctaaagccaagccacagagggggcctcttgaccgacaaaggacactgtgaatcacagtagcgtaaacaagaggccttcctttctaatgacaatgacaggtattggtgaaggagctaatgtttaatatttgaccttgaatcattcaagtccccaaatttcattcttagaaagttatgttccatgaagaaaaatatatgttcttttgaatacttaatgacagaacaaatacttggcaaactcctttgctctgctgtcatcctgtgtacccttgtcaatccatggagctggttcactgtaactagcaggccacaggaagcaaagccttggtgcctgtgagctcatctcccaggatggtgactaagtagcttagctagtgatcagctcatcctttaccataaaagtcatcattgctgtttagcttgactgttttcctcaagaacatcgatctgaaggattcataaggagcttatctgaacagatttatctaagaaaaaaaaaaaa

SEQ ID NO: 820 - DNA, 1259 bp, Homo sapiens
  CDS (385)..(1203)
  misc_feature (1)...(1259): n = a,t,c or g
atttggccctcgagcagnagattcggaacgatggagaaaagaaaaagagagagagaaaaaaaagtccatttggcatgtttcagaccaagtgaccagtcatcaatcaatttttcttcattgtgtttggatattttgaagtcacatagacaccaactaatatctgtcacccactgtgtcatcggatggatcgggtgacactccaaatcagtcgtgcaggtagttctgagtgtgcagccattagccaatgttgagtcacctcatgttgcacgtgttggctgactggctgcctttccccctgccagggagaagcgcattggcattgacctggtgcacgacacagtggagcatgagctgataaaggaggctgagatcatccagggcattatggctctgctgacccgtaccttggaggaggcttccgagcagattcggatgaaccgctctgccaagtacaatcttgagaaggatttgaaggacaagtttgtggccctgaccatagatgatatctgcttctcgctcaacaacaactcaccaaacatcagatattctgagaacgccgtgaggattgagccaaactccgtgagtctggaagactggttggacttctccagcaccaatgtggagaaggctgacaagcagcggaacaactccctgatgctgaaagccctggtggatcgaatcctgtccatgacagccaatgatctgcgcaagcagtgtgatgtggtgcacacggcattcaagaatgggctgaaggatacaaaggatgccagggacaagctggctgatcatctggccaaggtcatggaagagattgcttcccaggagaaaaatattacagctcttgaaaaggccatccttgaccaagaagggccagccaaggtggctcatacgcgcttggagaccaggacacaccggccgaacgtggagctgtgtcgtgatgtcgcacaatataggctaatgaaggaggttcaagagatcacccacaatgtcgcaagattgaaggaaactttagcccaagctcaggcagagctgaaagggctgcatcgcagacagcttgccctgcaggaggagatccaggtcaaagagaacaccatttatatcgacgaagtgctgtgtatgcagatgaggaaatccatcccacttcgggatggggaagaccatggggtctgggctgggggcctccgccctgatgctgtctgctaatagtagggctagttccaattctcattaaaccacattgtaaacagtaaaaaaaaaaa

SEQ ID NO: 821 - DNA, 1387 bp, Homo sapiens
  CDS (518)..(1054)
ggcgcgctgatgagccccgcttatatacgactcactatagggaccactttgtacaagaaagctgggtacgcgtaagcttgggcccctcgagggatactctagagcggccgcccgggagtccgagcgccagctgcgcctccgcctctgcgtcctcaacgagatcttgggcaccgagagggactacgtgggcaccttgcgcttcttgcagtcggcattcctgcatcgcatccggcagaacgtggccgactcagtggagaagggcctcacggaggagaatgtcaaggtcctgttctcgaacatcgaagacatcctggaagttcataaggatttcttggccgccttggagtattgtttacacccggagccgcagtctcagcatgaacttgggaatgttttcttaaaattcaaggacaagttctgcgtgtacgaggagtattgcagcaaccatgagaaagccctgaggctgctggtggagctgaacaagatccctaccgtgcgcgccttccttttgagctgcatgcttctgggaggccggaagaccacggacatccctttggaaggctacctgttgtctccgatccagaggatctgcaagtacccgctcctccttaaggagctggccaagaggactcccggcaagcacccagaccaccccgcggtccagagtgccctgcaggccatgaagaccgtttgctccaacatcaatgagaccaagcggcagatggagaagctggaagccctggagcagctgcagtcccacatcgaaggctgggagggttccaacctcacagacatctgcactcagctcctcctgcaagggactttgttaaagatctctgcgggcaacatccaggaaagggccttcttcctcttcgacaaccttctcgtctactgcaagcggaaatccagggtcaccgggagcaagaagtccaccaagaggaccaaatccatcaacggctccctctacatcttcaggggtcgaatcaacactgaagtcatggaggtggagaatgtggaagatgggacaggtagcccctcccccagccttgcctgagccctgcctgagccctgcctgctccctggcactctctctgtttcatttaaatatatttttttcttttatcatgagatgtaatctacctacagaaaagtgcccagagcatagatgcatgaagcgaacatctgggtggttagcattcaagttaagaaataaaacactgcaccccaaatccttcctccttgcaatgccttcttccccctagaagtaaccactgtctgaattttgtgatgatcattttcttgctttttaaagacatttttacctcctaagcatttatgactaaacattttaattaaaatttctatttttgagccttaaaaaaaaaaa

SEQ ID NO: 822 - DNA, 4862 bp, Homo sapiens
  CDS (182)..(2809)
aagctggtacgcctgcaggtaccggtccggaattcccgggtcgacgatttcgttgaagggcctgtagccggggggttcctggccggatcccggtctacccttagcccagactcgttccggaccccagcccggcccggaacactctgggcgagacggcggtggcaactctccccttgccgccatgcacgacgctttcgagccagtgccgatcctagaaaagctgcctctgcaaatcgactgtctggctgcctgggaggaatggcttcttgtgggaaccaaacaaggacatcttcttctctataggattcggaaggacgttggttgcaacagatttgaagtgacactagagaaatccaataagaacttctccaaaaagattcagcagatccatgtggtttcccagtttaagattctggtcagcttgttagaaaataacatttatgtccatgacctattgacatttcaacaaatcactacggtttcaaaggcaaagggagcatcactgtttacttgtgacctccagcacacagagaccggtgaggaggtgttacggatgtgtgtggcagtaaaaaagaggctgcagctctatttctggaaggacagagaatttcatgaattgcagggggactttagtgtgccagatgtgcccaagtccatggcgtggtgtgaaaattctatctgtgtgggtttcaagagagactactacctaataagggtggatggaaaggggtccatcaaagagctctttccaacaggaaaacagctggagcccttagttgcacctctggcagatggaaaagtggctgtgggccaggatgatctcaccgtggtactcaatgaggaagggatctgcacacagaaatgtgccctgaactggacggacataccagtggccatggagcaccagcctccctacatcattgcagtgttgcctcgatatgttgagatccgaacatttgaaccgaggcttctggtccaaagcattgaattgcaaaggccccgtttcattacctcaggaggatcaaacattatctatgtggccagcaatcattttgtttggagactcatccctgtccccatggcaacccaaatccaacaacttctccaggacaagcagtttgaattggctctgcagctcgcagaaatgaaagatgattctgacagtgaaaagcagcaacaaattcatcacatcaagaacttgtatgccttcaacctcttctgccagaagcgttttgatgagtccatgcaggtctttgctaaacttggcacagatcccacccatgtgatgggcctgtaccctgacctgctgcccacagactacagaaagcagttgcagtatcccaacccattgcctgtgctctccggggctgaattggagaaggctcacttagctctgattgactacctgacacagaaacgaagtcaattggtaaagaagctgaatgactctgatcaccagtcaagcacctcaccgctcatggaaggcactcccaccatcaaatccaagaagaagctgctacaaatcatcgacaccaccctgctcaagtgctatctccatacaaatgtggccctggtggcccccttgctacgcctggagaacaatcactgccacatcgaggagagcgagcacgtgctgaagaaggctcacaagtacagtgagcttatcatcctgtatgagaagaaggggctccacgagaaagctctgcaggtgctcgtggaccagtccaagaaagccaactcccctctgaaaggccacgagaggacagtgcagtatctgcagcatctgggcacagaaaacctgcatttgattttctcctactcagtgtgggtgctgagagacttcccagaagatggcctgaagatatttactgaagatctcccggaagtggagtctctgccacgtgatcgagtcctcggcttcttaatagagaattttaagggtctggctattccttatctggaacacatcatccatgtttgggaggagacaggctctcggttccacaactgcctgatccagctatactgtgagaaggtgcaaggtctgatgaaggagtatctcctgtccttccctgcaggcaaaaccccagtcccagctggagaggaagagggtgagctgggagaataccggcaaaagctcctcatgttcttggagatttccagctactatgatccaggccggctcatctgtgattttccctttgatggcctcttagaagaacgagctctcctgttggggcgcatggggaaacatgaacaagctcttttcatttatgtccacatcttgaaggatacaaggatggctgaggagtactgccacaaacactatgaccgaaacaaagatggcaacaaagatgtgtatctgtccctgcttcggatgtacctgtcgccccccagcattcactgcctggggccaatcaagctggaactactggagccaaaagccaacctccaggccgctctgcaggtcctcgagctacaccacagcaaactggacaccaccaaggccctcaaccttctgccagcaaacactcagatcaatgacatacgcatcttcctggaaaaggtcttggaagaaaatgcacaaaagaaacggttcaatcaagtgctcaagaaccttctccatgcagaattcctgagggtccaggaagagcggattttacaccagcaggtgaagtgcatcatcacagaggagaaggtgtgcatggtgtgtaagaagaagattgggaacagtgcatttgcaagataccccaatggagtggtcgtccattacttctgttccaaagaggtaaacccagctgacacttgagcccagcatcctggggatccagcggatggacagcttggctctcccagagaggtgaaggagcacctggccttaggaatcctggctgccaccaccacaaggctccccatttggacattactggctatcttgtgccctggaacaactctgaattaattagactcatggtctggcattgccagctttttaatgggaaaagagattagttataccttataccattatgttgtgggcaattccagagaattcagtacctgcttggtcaggaggatgtgcaccatcttgcctttgcacaccagtcacctgaacaaggaaacttgtcacaagtgtttgtaaccatggggttgttcatcaagggcttttctattaagtacatgacttcacaaggaccgctcagcatggctcactggagagttccatgagagaacagcactcaagcttctggccgcatggacccgatggctcgcattctgtgtagtgttttacgtctccatggtaactgtgccctgcacccctcggtagccgccctgttagttttcagtctccttttctttctcaccatttatcacttccctcactgccctacccaggctttctctcccacttccctgactctgggaataactaatatttaagcaaggtaagatgagaagcaaggggtctcagttctaggaatacagtgctagttgattgtcaggtatgttgtaaatagaccctctttggccatacactccatgcctagatgcctcggagagcatcattctctgcctaggcaaggccctgcatcccttgcctcaggccgggctgagtgtgactgcagctcctgaggatgggcctgccctgtctggggtatgcgtgatccctagatacatgttcccacagaggtgcctgctccgtcttcgctcaccagacactcaggcaggctggcttagtctttgtgcgtggcgattttgtgctctgggccctttctctttttccagccagtttccattcacttgccttacagcctgccctggccgtcactccccagctttgttcagcaatggtgtggttggagagttgtgctgggatagcgcaggaaggtgggtcccggcaacacgcaggggatgagtggacctggaactgacaatggcgtgctgccaagtgttcctgagaggtgtttaggcacagcagaggggacgcggggggcaagaacagcaggacgctggtttaaaaataactcaccgccaaacctgtggagcagtgtggggcatcctgccagaggtgcacaggctggagtttcaggcactgcaggctgatgacacacagggagagtggccctgcctcctgtcctccccggggtttttgcagactcgaagtctcactgcaccagtgtctttgatggtggtgagggtgggtgatggtgcccagcaccaacagttttagtggcctgtccttgacctgccgtggtcctttgtaaactatggctccatgctgtgtgacagatcaacgtgctgatggtaagtagactaggcttccccaggcatgccgtccgtgggggcctgaagagacagtgagtgccattggccccattcgcagatgtgggagactctgctcaggcctgtgaggctgggcagcccttcaccagagttcggaggagcagtgtgtggcgccacgtcccgactggccatacccacacagaagcagtgctgcccggggcctcatctgggccagcttggactctgcttcctccaggagcagcagggaagctctgggccacctccctggatagcaggaacttgacctgccatgtgtgccctgccttcctggccagctgtgcttgttatcttccattctcacaaactgtctttgaagcaatagaataaagaatgtgtgttttctttcctggtatacatacatgatcccatgctcccaagctccattcttccttccctcaactctctgccctccacagagctatggagaaggctggagatgaaagctttgtagtgaggactgataaagatctcatcactgctccttataataaacctaataaagcaagaaaaaaaaaaaa

SEQ ID NO: 823 - DNA, 1899 bp, Homo sapiens
  CDS (69)..(1064)
ccactttgtacaagaaagctgggtacgcgtaagcttgggcccctcgagggatactctagagcggccgcatgagccgcgcgcgtggggcgctgtgccgggcctgcctcgcgctggccgcggccctggccgcgctgctgttactgccgctgccgctgccccgcgcgcccgccccggcccggacccccgccccggccccgcgcgcgcccccgtcccggcccgctgcccccagcctgcggcctgacgacgtcttcatcgccgtcaagaccacccggaagaaccacgggccgcgcctgcggctgctgctgcgcacctggatctcccgggcccgccagcagacgtttatcttcaccgacggggacgaccctgagctcgagctccagggcggcgaccgtgtcatcaacaccaactgctcggcggtgcgcactcgtcaggccctctgctgcaagatgtccgtggagtatgacaagttcattgagtccgggcgcaagtggttttgccacgtggatgatgacaattatgtgaacgcaaggagcctcctgcacctgctctccagcttctcacccagccaggacgtctacctggggcggcccagcctggaccaccccattgaggccaccgagagggtccagggtggcagaactgtgaccacggtcaagttctggtttgctactggtggggccgggttctgcctcagcagaggccttgccctcaagatgagcccatgggccagcctgggcagcttcatgagcacagctgagcaggtgcggctgccggatgactgcacagttggctacatcgtggaggggctcctgggcgcccgcctgctgcacagccccctcttccactctcacctggagaacctgcagaggctgccgcccgacaccctgctccagcaggttaccttgagccatgggggtcctgagaacccacagaacgtggtgaacgtggctggaggcttcagcctgcatcaagaccccacacggtttaagtctatccattgtcttctgtacccagacacggactggtgtcccaggcagaaacagggcgccccgacctctcggtgacaccaaccaccccgacccagggctgcctggctctgtcccaggcgcggggaaccagagccccctatgggctcagtgggctccctcaggtgccacggccgcaccagtgagatgcaggcacctggcagaccctctggctagcctgcagccccccctctcccagcccctggtgggctgcggtgatgggtgttttgggagaacgaagacagccaggctgatggccagggccgcagtgcccctccccccgacccagccccaaggttgatcccacgggaacaggcttccaccccagcacttgcgcacctgggagggagctgccatccgggctccattacctgttgctgaaggcgggtgctaggctggctgggtgtcaaggagcaggctccaggccaaggtcctggcccagccacggccattgcaagggctcagcctggcaggctttgtgggggacgccgccctctctgccgcaggctgggtgcacggccgggcaccacagtgggactcaggcccgggaaggtcatgttctcgaccagagctttgctcccagtccaggcgcctcattcggaggcctcttgactgggaccacagagatgttttctccgctctgacttgtggctcaggactactttctgggtcgtgctcctgccccactgtgcctgggcccataaacaacaggagccttttgttccgctgacctgcccatcccagcagacccacctccccgcctggtgccttccatggagggaaatgggacaggggccgtcatctcccctctgcctcctgctttgctgttgccgagcacgagtaaagcttttgttcttacttcaaaaaaaaaaaa

SEQ ID NO: 824 - DNA, 1971 bp, Homo sapiens
  CDS (545)..(1747)
cggttttttgctagttcacagaaagaccatttttaatatgaaaagagaaaaacaatttgaaggccccacaatttgttgtgtaacaacataatttcaagtaaagtgaatgtgattaaaacatcttgatttcacaaagccattcagaggaggcttcgacaaacgcaaagcgacccaaaccctggagggtcacatcccggctgctacaaacctcggcggggcggccccgctcttgcggccgggacagcgcagcggcagcaggggccgcaggggacccgcagattggcacgccgctccccatccccgcagcgcgtctgcaccggagactctgcggggattgtagccggagggcgggccgggctccgaggcgctgctcaggcattggggtttgtcctcatgagctccacgtcggcgtgcaccatctccctcaccagctcatcgaaagcgacccggggcttccagttcagcttctgtttcgctttggtgcagtcgccctgcagaaagtcctcggcggcagcgtgcgaccctctttctaacgcggccgtggatgtttcttcccgggccgcagccaagcgcggttcttcctgggcggtggctttgggcttttcgtacccacagtcaagtcagttcacgtcgcctcccgcacacacgcgttcataaaacgaaactggagtttcacgaagcaattcttaggcttagcgtccaggaacgctgtagacggtctattctattctacccctattctactcggttcgattctgttcctaagaaaatgccgatctcgacccacttgtacttccacgagcggagctgcagccagcagctctgcaggaccccgcactgcccgccaccgtcccctctggcagtgccttcctcctcccgctttccccaactgctccactcgaggaaaccggaggacaggttcagctcactgaaaggggtcccaacagaggtgaagatccaagaaatgacgaagctgggccacgagctgatgctgtgtgcgccagatgaccaggagctcctcaagggctgtgcctgcgcccagaagcagctacacttcatggaccagttgctcgataccatccggagcctgaccattgggtgctccagttgctcgagcctgatggagcacttcgaggacaccagggagaagaacgaggccttgctgggggagctcttctctagcccccacctgcagatgctcctgaatccagagtgcgacccgtggcccctggacatgcagcccctcctcaacaagcagagtgatgactggcagtgggccagtgcctctgccaagtccgaggaggaggagaagctggcggagcttgccaggcagctgcaggagagtgctgccaagttgcacgcgcttagaacggagtactttgcacagcatgagcaaggggctgctgcgggcgcagccgacatcagcaccctagaccagaagctgcgtctggtcacttccgacttccaccagctaatcttggcttttctccaagtctacgacgacgagctgggcgagtgctgccagcgcccaggccctgacctccacccgtgcggccccatcatccaggccacgcaccagaatctgacttcctacagccaactgctgcaagtggtcatggcagttgctgacacctctgcgaaggccgtggagaccgtgaagaagcagcaaggcgagcagatctgctggggtggcagcagctccgtcatgagtctagctaccaagatgaatgaactaatggagaaatagaaagtcttcagtgatggcctacgccaaagcacaggatggggcgggcaggaagccctctcccaagatcgagttggccgaggatggatgattgtggcagcagaagccgttgcagccccacgttgtgctctaggcagggacctttggcccctttggggagggagagacagacgggcggtttgacttggacacaaagaaagccttggtttctaagcaaaaaaaaaaaa

SEQ ID NO: 825 - DNA, 1188 bp, Homo sapiens
  CDS (158)..(907)
agaaatttgttttttaaagtcaggaagcatctaaatatggtgtcctccggaaaaaagtattccaggaaatctgggaagccgtctgtggaagatcagtttacgagagcctatgactttgagactgaagataagaaagatctgagtggatcagaggaagatgttattgaaggtgcagtacatctcatgttgggcagtgatgtccttcagttcatttgttttgaacccattgagactatcgtacaacttagtttgtaaagcattttcaggtatggtcttccctcccccggtatttgtggttacagaacctgctgacacggatggccagctgtacttgtgtttctcatttgatccttatattgcagtatcggagttacagaagcttattcggcaactcttgcttttgcagttatttccaaaatatctgatatatattgacattaacaaggctcttcttgccaagagaaagagactagaaatgtataccaaggcttctctcaaaactagtaaccagaaaattgaacatgtttggaaaacacaacaagatcaaaggcagaagcttaaccaagaatattctcagcagtttctgactttgtttcagcagtgggatttagatatgcagaaagctgaggaacaagaagaaaaaatacttaatatgtttcgacagcaacaaaagattcttcaacaatctagaattgttcagagccagagattgaaaacaattaaacagttatatgagcagttcataaagagtatggaagagttggagaagaatcatgataatctacttactggtgcacaaaatgaatttaaaaaagaaatggctatgttgcaaaaaaaaattatgatggaaactcagcagcaagagatagcaagtgttcggaagtctcttcaatccatgttattctgatgactctttgaagaaagaacttgaacctaagtaatatgatacaattataacgttagctaagaagcatattgtaagtctttagaatagtttaattgtaacatctttaatcataaacctgtttcattgtaagacctccctttctgttaagtcaaatctaaatagttatgagttagttagcaactattcctaaagaatatgtattaagctttcagctctttagtaatgatagtgaatttttctctctaacactgtcaattaaataaagacgatttaattttaaa

SEQ ID NO: 826 - DNA, 796 bp, Homo sapiens
  CDS (280)..(627)
taagcttgcggccgcgggctctcgcggggcggcgacgccgcggggaggatgctgcttgccgcgcccgcgtcctcaccgtcctcccgggccgcctgctggggctttgttgtggcccggacgccgcgggccaccccctgaagtcgcctgccgccgccgccgccgcacctagcggacgggcgggcgggcgcgcgtgtgcccaggagtgcgcgcctgtcgcggtggtgggtgcaggactggacccacgggcccattgtgcgcccgcccgcggcagccaggaccatgtgggtgaacccggaggaggtgttgctggccaacgcgctgtggatcaccgagagggccaacccatacttcatcctgcagcggaggaagggccacgccggcgatggaggcggcggcggcggactggcgggcctgctggtgggtacccttgatgttgtgttggactccagcgcccgggtcgctccttaccgaatcttgtaccagactccagactccctgggtctactggaccatcgcctgtgggtggttccaggaaagaaatcactgaacactgggaatggcttgagcaaaatctcttgcagacactttccatctttgaaaatgagaatgatatcaccacatttgtgagaggaaaaatacagggcatcattgcagaatacaacaaaatcaatgatgtaaaggaagatgatgacacggagaagtttaaagaagccattgtgaaatttcataggctgtttgggatgccagaggaagagaaactcgtcaactattactcttgcagctattggaaggggag

SEQ ID NO: 827 - DNA, 2624 bp, Homo sapiens
  CDS (271)..(2202)
tatttataatatgtggaggagagagagctcaccatgctcaggtaaagggatgaagcctctggtatgtcagaaccatgctgtcttccatgagacttcctttgtgaagagcatccatttaaaagacttttatgaatacatggtttcaatcaagtccccagagaacacatttgtcttctgagctgctggcagttttgagaatctgatgacctccgaggggaccctgcactcagccatcaaagtgttcctgcccctctggacactcataattcaatggtagatgcaggtggagttgagaacatcacccagcttccccaggagcttcctcagatgatggctgcagcagccgatggtttggggagtatagcgatagacacgacccagctcaacatgtccgtgacagatcccacagcctgggctacagccatgaataacctgggcatggttcccgtagggttgcctggacagcagctcgtgtctgactcaatctgtgtcccaggctttgatccaagcctcaacatgatgactggaatcacccccattaacccaatgataccaggccttggactggtacctcccccaccaccaacagaagtggctgttgtcaaagaaataatccactgcaaaagctgtactctttttcctcaaaatccaaatcttccacctccttccacaagagaacgacctcctgggtgtaagaccgtgtttgtcggaggattaccagaaaatgctactgaggaaattattcaagaagtctttgaacagtgcggtgatattacagcaattcggaaaagcaagaagaatttttgtcacattcgctttgcagaggaattcatggttgataaagccatttacctttctggttataggatgcgattagggtctagcaccgacaaaaaggattcaggccgccttcatgtggactttgcccaggccagggatgacttctatgagtgggaatgcaagcagaggatgcgtgcccgggaggagcggcaccggcgcaagctggaggaggaccggctcaggcccccatccccgcctgccataatgcactactcggagcacgaagccgctctgctggctgaaaagctgaaagatgatagcaagttttcagaggctatcacagtgctgctttcctggattgaacgaggggaagtgaatcggcgctctgcaaaccagttctattccatggtgcagtcggccaacagccacgtccgccggctaatgaatgaaaaagccacccatgagcaagagatggaggaagccaaggagaattttaaaaatgccttaactgggattctcactcaatttgagcagattgtggccgttttcaacgcttctaccagacaaaaagcttgggaccatttctcgaaagcccagcgcaagaacatagacatttggcgaaagcattctgaggagctccggaatgctcaaagtgagcagctcatgggcatccgccgcgaagaagaaatggaaatgtctgatgatgagaactgtgacagccctacaaagaaaatgagagtcgatgaatcagccctggctgcccaggcctacgctctgaaagaggagaatgacagtctccgctggcagctggatgcctacaggaatgaggtggagctgctgaaacaagaaaaagaacagcttttccgaacagaagaaaacctcaccaaggaccagcaactgcagtttctgcagcaaaccatgcaaggcatgcagcagcaattgctaaccatccaggaggagttaaacaacaaaaagtcagaattggaacaagcaaaggaagagcagtcccatacacaagcgttactaaaagtcctgcaggaacaattaaaaggtaccaaggaattggtcgagaccaatggccacagccatgaggattcaaatgaaatcaatgtgttgacagttgcattagtcaaccaagaccgagagaacaatattgagaaaagaagccaaggcttaaaatcagagaaagaagctctgctaataggtatcatatcaacgtttcttcacgtccatccttttggagccaacatagaatatctttggtcatacatgcagcagctggactccaagatatctgcaaatgaaatagaaatgcttttgatgaggctgccacgcatgttcaaacaggaattcacgggtgtgggagccacgctggaaaaaagatggaagttgtgtgcctttgaaggaattaaaaccacctaactgcgaagagcaaagcatctctggaaatgaaaccatgtgaacctggccagggcggtgcgacggggaagcaggaggtgtggggttggtcccgcacgcaacctttgtggagccatcgaagcctgcctttagttatatctgtggcgttctcttgtaagtggaaatgtaattgtgtaccagtttcttaaaataaacaaagcttcatactgtgacagatctgtttcctatgaaaaccaaacaatgattccacagtcataatgatggcaaaatcttaaaatgtgctacatttgagaatagctcaccaagcaaaatatttaaagttaatgatggtgtagcaatgattgttgctaggctacagagttgtatatgtaatgtatagctgaaatcattaaatgacattttcctgaaagtctttctgttttagt

SEQ ID NO: 828 - DNA, 2565 bp, Homo sapiens
  CDS (1)..(2565)
atgccaggcgggggtcctcagggcgccccagccgccgccggcggcggcggcgtgagccaccgcgcaggcagccgggattgcttaccacctgcagcgtgctttcggaggcggcggctggcacggaggccgggctacatgagaagctcgacagggcctgggatcgggttcctttccccagcagtgggcacactgttccggttcccaggaggggtgtctggcgaggagtcccaccactcggagtccagggccagacagtgtggccttgactcgagaggcctcttggtccggagccctgtttccaagagtgcagcagcccctactgtgacctctgtgagaggaacctcggcgcactttgggattcagctcagaggtggcaccagattgcctgacaggcttagctggccgtgtggccctgggagtgctgggtggcagcaagagtttgcagccatggatagttctgagaccctggacgccagctgggaggcagcctgcagcgatggagcaaggcgtgtccgggcagcaggctctctgccatcagcagagttgagtagcaacagctgcagccctggctgtggccctgaggtccccccaacccctcctggctctcacagtgcctttacctcaagctttagctttattcggctctcgcttggctctgccggggaacgtggagaagcagaaggctgcccaccatccagagaggctgagtcccattgccagagcccccaggagatgggagccaaagctgccagcttggacgggcctcacgaggacccgcgatgtctctctcagcccttcagtctcttggctacacgggtctctgcagacttggcccaggccgcaaggaacagctccaggccagagcgtgacatgcattctttaccagacatggaccctggctcctccagttctctggatccctcactggctggctgtggtggtgatgggagcagcggctcaggggatgcccactcttgggacaccctgctcaggaaatgggagccagtgctgcgggactgcctgctgagaaaccggaggcagatggaggtaatatccttaagattaaaacttcagaaacttcaggaagatgcagttgagaatgatgattatgataaagctgagacgttacaacaaagattagaagacctggaacaagagaaaatcagcctgcactttcaacttccttcaaggcagccagctcttagcagtttcctgggtcacctggcagcacaagtccaggctgccttgcgccgtggggccactcagcaggccagcggagatgacacccacaccccactgagaatggagccgaggctgttggaacccactgctcaggacagcttgcacgtgtccatcacgagacgagactggcttcttcaggaaaagcagcagctacagaaagaaatcgaagctctccaagcaaggatgtttgtgctggaagccaaagatcaacagctgagaagggaaatagaggagcaagagcagcaactccagtggcagggctgcgacctgaccccactggtgggccagctgtccctgggtcagctgcaggaggtcagcaaggccttgcaggacaccctggcctcagccggtcagattcccttccatgcagagccaccggaaaccataaggagcctccaggaaagaataaaatccctcaacttgtcacttaaagaaatcactactaaggtgtgtatgagtgagaaattctgcagcaccctgaggaagaaagttaacgatattgaaacccaactaccagccttgcttgaagccaaaatgcatgccatatcaggaaaccatttctggacggctaaagacctcaccgaggagattagatcattaacatcagagagagaagggctggagggactcctcagcaagctgttggtgttgagttccaggaatgtcaaaaagctgggaagtgttaaagaagattacaacagactgagaagagaagtggagcaccaggagactgcctatgaaacaagtgtgaaggaaaatactatgaagtacatggaaacacttaagaataaactgtgcagctgcaagtgtccactgcttgggaaagtgtgggaagctgacttggaagcttgtcgattgcttatccagtgcctacagctccaggaagccaggggaagcctgtctgtagaagatgagaggcagatggatgacttagagggagctgctcctcctattccccccaggctccactccgaggataaaaggaagacccctttgaaggtattggaagaatggaagactcacctcatcccctctctgcactgtgctggaggtgaacagaaagaggaatcttacatcctttctgcagaacttggagaaaagtgtgaagacataggcaagaagctattgtacttggaagatcaacttcacacagcaatccacagtcatgatgaagatctcattcagtctctcaggagggagctccagatggtgaaggaaactctgcaggccatgatcctgcagctccagccagcaaaggaggcgggagaaagagaagctgcagcttcctgcatgacagctggtgtccacgaagcacaagcctga

SEQ ID NO: 829 - DNA, 1126 bp, Homo sapiens
  CDS (46)..(999)
taagcttgcggccgccggcgggccgggcccgcgcacagcgcccgcatgtacaacatgatggagacggagctgaagccgccgggcccgcagcaaacttcggggggcggcggcggcaactccaccgcggcggcggccggcggcaaccagaaaaacagcccggaccgcgtcaagcggcccatgaatgccttcatggtgtggtcccgcgggcagcggcgcaagatggcccaggagaaccccaagatgcacaactcggagatcagcaagcgcctgggcgccgagtggaaacttttgtcggagacggagaagcggccgttcatcgacgaggctaagcggctgcgagcgctgcacatgaaggagcacccggattataaataccggccccggcggaaaaccaagacgctcatgaagaaggataagtacacgctgcccggcgggctgctggcccccggcggcaatagcatggcgagcggggtcggggtgggcgccggcctgggcgcgggcgtgaaccagcgcatggacagttacgcgcacatgaacggctggagcaacggcagctacagcatgatgcaggaccagctgggctacccgcagcacccgggcctcaatgcgcacggcgcagcgcagatgcagcccatgcaccgctacgacgtgagcgccctgcagtacaactccatgaccagctcgcagacctacatgaacggctcgcccacctacagcatgtcctactcgcagcagggcacccctggcatggctcttggctccatgggttcggtggtcaagtccgaggccagctccagcccccctgtggttacctcttcctcccactccagggcgccctgccaggccggggacctccgggacatgatcagcatgtatctccccggcgccgaggtgccggaacccgccgcccccagcagacttcacatgtcccagcactaccagagcggcccggtgcccggcacggccattaacggcacactgcccctctcacacatgtgagggccggacagcgaactggaggggggagaaattttcaaagaaaaacgagggaaatgggaggggtgcaaaagaggagagtaagaaacagcatggagaaaacccggtacgctcaaaaagaaaaaaaaaa

SEQ ID NO: 830 - DNA, 3276 bp, Homo sapiens
  CDS (1)..(2760)
atggtgcagcgcatgtgggccgaggcggccgggcctgctggcggcgccgagccgctgtttccgggctcccggcggagccgcagcgtgtgggacgccgtgcgcctggaggtgggcgtccccgacagctgcccggtggtgctgcacagcttcacgcagctagaccccgacctgccgcgcccggagagctccacgcaggagatcggtgaggagctgatcaacggagtcatctactccatctccctgcgcaaggtgcagctgcaccacggaggcaacaaggggcagcgctggctcgggtatgagaatgagtcggccctgaacctttatgagacttgcaaggtgcggaccgtgaaggctggcacgctggagaagctggtggagcacctggtgccagccttccagggcagcgacctctcctacgtcaccatcttcctgtgtacctatagagccttcaccaccacccaacaggtcctggacctgctgttcaaaaggtacggtagatgtgacgccctcacggcctcctctagatacggctgcatcctcccctattccgacgaggatggtggaccccaggaccaacttaaaaatgccatctcctccatcctgggcacctggctggaccagtactcggaggatttctgtcaacctccggactttccctgcctcaagcagctggtggcctacgtgcagctcaacatgccaggctcagacctggagcgccgtgcccaccttctcctggcccagctggagcactcggaacccattgaggcagagcctgagggtgaggaggactgggctctgtcaccagtgccagctctaaaaccaactccagagctcgagctagctctaacaccagctcgagcacccagcccagtgccggctccagccccggagccagagccagctccaacaccagctccaggttcagagctagaagtagctccagcaccagctccggagctccagcaggctccagagccagctgtgggactagaatcggctccagcgccagctctggaactagagccagctccagaacaggatccagctccctcacaaactctagagctggagccagctccagcaccagttccatcattacagccttcctggccttcacctgtggttgcagagaacgggctgagtgaggagaagcctcacctcttggtgttccctccagatctggtggcagagcagtttacactgatggatgcggaactgttcaagaaggtggtgccctaccactgcctgggctccatctggtcccagcgggacaagaagggcaaggagcacctggcgcccaccatccgcgccactgtcacccagttcaacagtgtggccaactgtgtcatcaccacctgcctcgggaaccgaagcacgaaagccccagacagggccagggtggtggagcactggatcgaggtggccagggagtgccggatcctcaagaacttctcgtcactgtatgccatcctctcggccctgcagagcaactccatccaccgtctgaagaagacgtgggaagacgtttccagggacagtttccggatctttcagaagctgtcagagatcttctcagatgagaacaactactcattgagccgggagctgctcatcaaggagggcacctccaagtttgccaccctggagatgaaccccaagagagcccagaaacggccgaaggagacgggcatcatccagggcaccgttccctacctgggcacgttcctcaccgacctggtgatgctggacactgccatgaaggactatctgtatggcagactcatcaactttgagaagaggaggaaggagttcgaggtgatcgcccagatcaagctgctgcagtcggcctgcaacaactacagcatcgcgccagatgagcaatttggggcctggttccgggccgtggagcggctcagcgagactgagagctacaacctgtcgtgcgagctggagcccccatccgagtcagccagcaacaccctcaggaccaagaagaacacagccattgtcaagcgctggagcgaccgccaggcccccagcactgagctcagtaccagtggcagctcccactccaagtcctgtgaccagctcaggtgtggcccctacctcagcagcggggacatcgctgacgcgctcagcgtgcactcggccggctcctctagctccgacgtggaggagatcaacatcagcttcgtcccggagtctcctgatggccaggaaaagaagttctgggaatcagcctcacagtcatccccggagacctccggcatcagctcagcctccagcagcacctcgtcctcctcagcctccaccacgcccgtggctgccacacgcacccacaagcgctctgtctcagggctctgcaactccagctccgcgctgccgctctacaaccagcaggtgggcgactgctgtatcatccgcgtcagcctggacgtggacaatggcaacatgtacaagagcatcctggtgaccagccaagataaggctccggctgtaatccgcaaggccatggacaaacacaacctggaggaggaggagccggaggactatgagctgctgcagattctctcagatgaccggaagctgaagatccctgaaaacgccaacgtcttctatgccatgaactctaccgccaactatgactttgtcctcaagaagcggaccttcaccaagggagtgaaggtcaagcacggagccagctccaccctccctcgcatgaagcagaaaggactcaagattgccaagggcatcttctgagggcatcctcccagggtctggctggctggtagccaagcacttatggaccagagtggcccaggccagctgggcgccttcctcccacctgccagcccagggtaccccagactccagtttcatcctgaacctctcccgctgctgggattgacgcctgccattggtcaggctgacctggcctcccgtggaccactcgctgccttaggtgccttctgctctctggaaccagaggactagctgacttttgccaaggagcagtgccaacgggcatggcatggtgccctgcctgcccccgggcaccacctctgtacacttccctgacaccttcccaggtgtgggtcactgccacctgtgcccatgggcaccccagagcacccactgtgaccactgcagttctctcatgcccacaggcactggcctgtgaccttcgcaggggtcccggcccctcccaccactctagcctttctcaggctgcaccaaagattccatcatcagggccaactgagagtgagggagtct

SEQ ID NO: 831 - DNA, 4863 bp, Homo sapiens
  CDS (185)..(4096)
ggagatagcgcctgtcagtcggtgggtcggtcctcgcgccggccctccccctccccggtctccgggggaggcgcggtggagtccgcccccggggttctccgatgggggagaagcggcgacggcggcagtggagtaaccgagccggagcgtgagcggccccggtgccccgttccccacggaggccatgggcgacccagcccccgcccgcagcctggacgacatcgacctgtccgccctgcgggaccctgctgggatctttgagcttgtggaggtggtcggcaatggaacctacggacaggtgtacaagggtcggcatgtcaagacggggcagctggctgccatcaaggtcatggatgtcacggaggacgaggaggaagagatcaaacaggagatcaacatgctgaaaaagtactctcaccaccgcaacatcgccacctactacggagccttcatcaagaagagccccccgggaaacgatgaccagctctggctggtgatggagttctgtggtgctggttcagtgactgacctggtaaagaacacaaaaggcaacgccctgaaggaggactgtatcgcctatatctgcagggagatcctcaggggtctggcccatctccatgcccacaaggtgatccatcgagacatcaaggggcagaatgtgctgctgacagagaatgctgaggtcaagctagtggattttggggtgagtgctcagctggaccgcaccgtgggcagacggaacactttcattgggactccctactggatggctccagaggtcatcgcctgtgatgagaaccctgatgccacctatgattacaggagtgatatttggtctctaggaatcacagccatcgagatggcagagggagccccccctctgtgtgacatgcaccccatgcgagccctcttcctcattcctcggaaccctccgcccaggctcaagtccaagaagtggtctaagaagttcattgacttcattgacacatgtctcatcaagacttacctgagccgcccacccacggagcagctactgaagtttcccttcatccgggaccagcccacggagcggcaggtccgcatccagcttaaggaccacattgaccgatcccggaagaagcggggtgagaaagaggagacagaatatgagtacagcggcagcgaggaggaagatgacagccatggagaggaaggagagccaagctccatcatgaacgtgcctggagagtcgactctacgccgggagtttctccggctccagcaggaaaataagagcaactcagaggctttaaaacagcagcagcagctgcagcagcagcagcagcgagaccccgaggcacacatcaaacacctgctgcaccagcggcagcggcgcatagaggagcagaaggaggagcggcgccgcgtggaggagcaacagcggcgggagcgggagcagcggaagctgcaggagaaggagcagcagcggcggctggaggacatgcaggctctgcggcgggaggaggagcggcggcaggcggagcgcgagcaggaatacaagcggaagcagctggaggagcagcggcagtcagaacgtctccagaggcagctgcagcaggagcatgcctacctcaagtccctgcagcagcagcaacagcagcagcagcttcagaaacagcagcagcagcagctcctgcctggggacaggaagcccctgtaccattatggtcggggcatgaatcccgctgacaaaccagcctgggcccgagaggtagaagagagaacaaggatgaacaagcagcagaactctcccttggccaagagcaagccaggcagcacggggcctgagccccccatcccccaggcctccccagggcccccaggacccctttcccagactcctcctatgcagaggccggtggagccccaggagggaccgcacaagagcctggtggcacaccgggtcccactgaagccatatgcagcacctgtaccccgatcccagtccctgcaggaccagcccacccgaaacctggctgccttcccagcctcccatgaccccgaccctgccatccccgcacccactgccacgcccagtgcccgaggagctgtcatccgccagaattcagaccccacctctgaaggacctggccccagcccgaatcccccagcctgggtccgcccagataacgaggccccacccaaggtgcctcagaggacctcatctatcgccactgcccttaacaccagtggggccggagggtcccggccagcccaggcagtccgtgccagtaaccccgacctcaggaggagcgaccctggctgggaacgctcggacagcgtccttccagcctctcacgggcacctcccccaggctggctcactggagcggaaccgcgtgggagtctcctccaaaccggacagctcccctgtgctctcccctgggaataaagccaagcccgacgaccaccgctcacggccaggccggcccgcaagctataagcgagcaattggtgaggactttgtgttgctgaaagagcggactctggacgaggcccctcggcctcccaagaaggccatggactactcgtcgtccagcgaggaggtggaaagcagtgaggacgacgaggaggaaggcgaaggcgggccagcagaggggagcagagatacccctgggggccgcagcgatggggatacagacagcgtcagcaccatggtggtccacgacgtcgaggagatcaccgggacccagcccccatacgggggcggcaccatggtggtccagcgcacccctgaagaggagcggaacctgctgcatgctgacagcaatgggtacacaaacctgcctgacgtggtccagcccagccactcacccaccgagaacagcaaaggccaaagcccaccctcgaaggatgggagtggtgactaccagtctcgtgggctggtaaaggcccctggcaagagctcgttcacgatgtttgtggatctagggatctaccagcctggaggcagtggggacagcatccccatcacagccctagtgggtggagagggcactcggctcgaccagctgcagtacgacgtgaggaagggttctgtggtcaacgtgaatcccaccaacacccgggcccacagtgagacccctgagatccggaagtacaagaagcgattcaactccgagatcctctgtgcagccctttggggggtcaacctgctggtgggcacggagaacgggctgatgttgctggaccgaagtgggcagggcaaggtgtatggactcattgggcggcgacgcttccagcagatggatgtgctggaggggctcaacctgctcatcaccatctcagggaaaaggaacaaactgcgggtgtattacctgtcctggctccggaacaagattctgcacaatgacccagaagtggagaagaagcagggctggaccaccgtgggggacatggagggctgcgggcactaccgtgttgtgaaatacgagcggattaagttcctggtcatcgccctcaagagctccgtggaggtgtatgcctgggcccccaaaccctaccacaaattcatggccttcaagtcctttgccgacctcccccaccgccctctgctggtcgacctgacagtagaggaggggcagcggctcaaggtcatctatggctccagtgctggcttccatgctgtggatgtcgactcggggaacagctatgacatctacatccctgtgcacatccagagccagatcacgccccatgccatcatcttcctccccaacaccgacggcatggagatgctgctgtgctacgaggacgagggtgtctacgtcaacacgtacgggcgcatcattaaggatgtggtgctgcagtggggggagatgcctacttctgtggcctacatctgctccaaccagataatgggctggggtgagaaagccattgagatccgctctgtggagacgggccacctcgacggggtcttcatgcacaaacgagctcagaggctcaagttcctgtgtgagcggaatgacaaggtgttttttgcctcagtccgctctgggggcagcagccaagtttacttcatgactctgaaccgtaactgcatcatgaactggtgacggggccctgggctggggctgtcccacactggacccagctctccccctgcagccaggcttcccgggccgcccctctttcccctccctgggcttttgcttttactggtttgatttcactggagcctgctgggaacgtgacctctgacccctgatgctttcgtgatcacgtgaccatcctcttccccaacatgtcctcttcccaaaactgtgcctgtccccagcttctggggagggacacagcttccccttcccaggaattgagtgggcctagcccctccccccttttctccatttgagaggagagtgcttggggcttgaaccccttaccccactgctgctgactgggcagggccctggacccctttatttgcacgtcaggggagccggctccccccttgaatgtaccagaccctggggggggtcactgggccctagatttttggggggtcaccagccactccaggggcagggaccatttcttcattttctgaaagcactttaatgattccccttcccccaaactccagggaatggaggggggaccccgccagccaaaacattccccccattcccgacccccctctcctcttctagcccatgcccttccccggtggagggagggagcagggagccctcactctccacgccccttgcttgcatctgtatatagtgtgagcagcaagtaacccttctccctccccccccacccctcctcaatgtagtggccttggatatcctgtttgttaataaagacaattcaaccagct

SEQ ID NO: 832 - DNA, 1223 bp, Homo sapiens
  CDS (93)..(770)
gatcgcaaagcggttgattatcacctcggcaggtggatggccttgctgccctgcagaaaggcctggcccccgccctcttgtaccagttcctgatgaatggcatccgactgggcacctatgggctggctgaggctgggggctacctgcacacagccgaaggcacccacagtcctgcccgcagcgcagcagctggggccatggctggggtcatgggagcctacttggggagccccatctacatggtgaagacacacctgcaggcacaggcagcctcagaaattgctgtagggcaccagtataagcatcagggcatgtttcaggcgctaaccgagattggccagaaacatggtctggtggggttatggcgtggggctctgggcggcctgccccgagttatcgtcggttcctccacccagctgtgcaccttctcatccaccaaggacctcctgagccagtgggagatctttcctccccagagctggaagttggcgctggtggctgccatgatgagtggcattgcagttgtcttggccatggcaccctttgatgtggcctgcacaaggctctacaaccagcccacagatgcacagggcaagggcctcatgtaccgggggatacttgacgctctgctgcagacagctcggaccgagggcatttttggcatgtacaagggtataggtgcctcctacttccgcctcggcccccacaccatcctctccctcttcttctgggaccagctgcgctccctctactacacagacactaaataacagccgctttcccagtctccaccaaatgagcactccttggccacttgtgcctccaccactatgtcctggtgactactgattaggtgacctttcatccatccatgggggacagccaaccccactccccatctgttctcagggttgaatcactacaagagatgagtttcccttctttccttgggtgttgctttaaaccttccctacccattccctgggtaactcacacccctctctcagggctgaacgagtcatcccaaagtgtatttcctcccactcaccactgccacccttgagtccctcctgctcccatgcacagttttaaactcctccctccaaaaccaaagggaattgagagacccaattcccaggcgtctgggacccaggtgtcctgttagattcaaaggcacagagattatattgattataaagcaagtttattctgaaaaaaaaaaa

SEQ ID NO: 833 - DNA, 893 bp, Homo sapiens
  CDS (309)..(893)
aaaaattaacccttgccagctaaaagtaaccctcactaaagggaataagcttgcggccgcgcgggagtgaaggggcgcgcggcaggccggcggggagccccccggggcgcacggagcccgcgcgccctccgggaccctcccccgtccctgggccggacctgtgggcgccgggagtccgggcagcgttcggcgcgccgggccggggtggcgggcggccccgggacccgggcagctggagaaggagccggagcccggccgggatgagaaggtgacgccgccgggggcgccactcgctttgtggggggaagatgctcgcctactgcgtgcaggatgccaccgtggtggacgtggagaagcggaggaacccctccaagcactacgtatacataatcaatgtgacctggtctgactccacctcccagactatctaccggaggtacagcaagttctttgacctgcagatgcagcttttggataagtttcccattgaaggcggccagaaggaccccaagcaaaggatcatccccttcctcccaggcaagatcctcttccgcagaagccacatccgggacgtagctgtgaagagactgaagcccatcgatgaatactgccgggcacttgtccggctgcccccccacatctcacagtgtgacgaagtcttccggttcttcgaggctcgacccgaggatgtcaaccctccaaaagagcaaggcccctcacccccagatgcagtcctcccatatggtgtcaacaagggcaaacaggagctaaaggcaggcccaaactggcccggcaggactcaccacgtggtcaactgcgtgacccagaaatgcctctttgtgttccattttaaattctcatccagtggaaataaggaatctaaaagtctttga

SEQ ID NO: 834 - DNA, 2601 bp, Homo sapiens
  CDS (93)..(2192)
cattcgacattcgaaagctgtacgcctgcggtaccggtccggaattcccgggtcgacgatttcgtacggtagtgacgcgtattgcctggaggatggcggacgccggcattcgccgcgtggttcccagcgacctgtatcccctcgtgctcggcttcctgcgcgataaccaactctcagaggtggccaataagttcgccaaagcgacaggagctacacagcaggatgccaatgcctcttccctcttagacatctatagcttctggctcaagtctgccaaggtcccagagcgaaagttacaggcaaatggaccagtggctaagaaagctaagaagaaggcctcatccagtgacagtgaggacagcagcgaggaggaggaggaagttcaagggcctccagcaaagaaggctgctgtacctgccaagcgagtcggtctgcctcctgggaaggctgcagccaaagcatcagagagtagcagcagtgaagagtccagtgatgatgatgatgaggaggaccaaaagaaacagcctgtccagaagggagttaagccccaagccaaggcagccaaagctcctcctaagaaggccaagagctctgattctgattctgactcaagctccgaggatgagccaccaaagaaccagaagccaaagataacacctgtgacagttaaagctcagactaaagcccctcccaaaccagctcgagcagcacctaaaatagccaatggtaaagcagccagtagcagcagtagcagcagcagcagcagtagcagtgatgactcagaggaggagaaggcagcagccacccccaagaagactgtacctaaaaagcaagttgtggccaaggccccagtgaaagcagctaccacccctacccggaagagttctagcagtgaggattcctccagtgacgaggaagaggagcaaaaaaaacccatgaaaaataaaccaggtccctacagttcagtccccccgccttctgctcccccaccaaagaagtctctgggaacccagcctcccaagaaggctgtggagaagcagcagcctgtggaaagcagtgaagacagcagtgatgagtctgattcaagttctgaagaagagaagaaacccccaactaaggcagtagtctctaaagcaaccactaaaccacctccagcaaagaaagcagcagagagctcttcagacagctcagactctgacagctctgaggatgatgaagctccttctaagccagctggtaccaccaagaattcttcaaataagccagctgtcaccaccaagtcacctgcagtgaagccagctgcagcccccaagcaacctgtgggcggtggccagaagcttctgacgagaaaggctgacagcagctccagcgaggaagagagcagctccagtgaggaggagaagacaaagaagatggtggccaccactaagcccaaggcgactgccaaagcagctctatctctgcctgccaagcaggctcctcagggtagtagggacagcagctctgattcagacagctccagcagtgaggaggaggaagagaagacatctaagtctgcagttaagaagaagccacagaaggtagcaggaggtgcagccccttccaagccagcctctgcaaagaaaggaaaggctgagagcagcaacagttcttcttctgatgactccagtgaggaagaggaagagaagctcaagggcaagggctctccaagaccacaagcccccaaggccaatggcacctctgcactgactgcccagaatggaaaagcagctaagaacagtgaggaggaggaagaagaaaagaaaaaggcggcagtggtagtttccaaatcaggttcattaaagaagcggaagcagaatgaggctgccaaggaggcagagactcctcaggccaagaagataaagcttcagacccctaacacatttccaaaaaggaagaaaggagaaaaaagggcatcatccccattccgaagggtcagggaggaggaaattgaggtggattcacgagttgcggacaactcctttgatgccaagcgaggtgcagccggagactggggagagcgagccaatcaggttttgaagttcaccaaaggcaagtcctttcggcatgagaaaaccaagaagaagcggggcagctaccggggaggctcaatctctgtccaggtcaattctattaagtttgacagcgagtgacctgaggccatcttcggtgaagcaagggtgatgatcggagactacttactttctccagtggacctgggaaccctcaggtctctaggtgagggtcttgatgaggacagaagtttagagtaggtcctaagactttacagtgtaacatcctctctggtccttttctgtgttcctagttttgtacagacttgtttttgagtgttgagtagcagggacaaaataagggaatgttattttttaagaaaattcattttcattgttgtctccttccttttctgtgaaagtcctcatactgagaaatttgtatattttatattaaatcacttactattgatttttgttgtgattttcaaaggtggattcccacagataaaatcttggctattgcccaaaacataaaaaaaaaaaaaaa

SEQ ID NO: 835 - DNA, 8174 bp, Homo sapiens
  CDS (1204)..(6375)
tgtttccagcagtcaaagaaagggacactgctgattgagaaagaaccaccactgtggctggattacaagagtagttttgagcaaaccaggaagcaatccagggcagcattgaacctgaagggagagtactccttaagtagcagactctggggaacagacaatctacagatgaatgtcacccggactccagagtcatttcctcccgggaaattgttaccaatttcaccaacatggcctttcacagaagtcaggtcttcctcagcagcagacagaatcaagaccgtgctgggacagtcctctgacaacacaagcttgccacagtcagcccgaacccctgcgtccaagacacaccacagaactagggctcacgcggacttctcttcttccctttaccaaggaagcggacatagcgcctccctcgaaccttccaaggattctaccgagtccctggtccaaccggggcctaaagggggacaagaagcagccgatgtgtcaggtttgcctctcaccagcatgctcccctcgttgtccacagtcccatcagggacatccttcagtgctgtccccccatcccagccagtatgggcagggacttcctccatttcaaagcatcccccaaggtcagacattcccccactcctccctctacctccatcctcttcattggctcctgactcacctcattccatcatctctgagccagcagagcaatcccccaaagtgctgttagttccccaaacagctccagccgacccctctttaggtcagaacatagctaatcccttaatcccattttctgatgaaatggaccacactgcatcccaaaatgcccaggatctcataggcatccctcatctaggtgtttctggatcctcaacaaaatggcattccgagctgtccccaacagagggtccccattcagcaggttcatccacacctgggtttttgagccccatggcagaactgtcccatccgtctccccctcccccagcacttggaagtcttcttcagcttccagatggaagcccctcatggtcaatgttggaagtggcttcaggtcctgcatccacccagcagatcaaagctggggtgcctggaagagtgcacaatggggtgtctttgccaacttttaagaatacagaaacagcgacccatgaggctgagcctccacttttccagactgcagaatcaggggccatagaaatgaccagcagaaagctagcctctgccactgcaaatgactctgctaacccgctgcatttgtcagcagctccagagaattccagagggcccgccctttcggcagaacacacctcttctttggtgccttctctgcatatcaccacactgggtcaagagcaagccatcctttctggggcggttcccgcatcaccatcaactgggacagccgactttccctccatacttactttcctccagcccacagagaatcatgcctccccatctcctgtgccagaaatgcccactcttccagcagagggcagtgatgggtcccctcctgcaactagagacttgctcctctcaagcaaagttcctaatcttctttccacatcttggacatttccccggtggaaaaaggacagtgtgacagccattttagggaagaatgaagaggcaaatgtgacgattcctctccaggcctttccaaggaaagaggttttgagtcttcacactgtaaatggatttgtctctgatttcagcaccggtagtgtctcatctcccatcattacagcaccaaggacgaatccccttccttcaggaccacctctaccttccatactctccatacaagccacccagactgttttcccatctctcttggctttttccagcaccaagccagaggtttatgcagctgctgtggaccattctgggttgccagcttcagctcccaaacaggtgagagcatcgccctcctccatggatgtatatgattccttaacaataggagacatgaaaaagccagcaaccacagatgttttctggagttctctttcagcagaaactggatctctttccacagaatcaataatatctggcttgcagcagcaaacaaattatgatttaaatggacacacaattagcaccacaagttgggaaactcatttagctccaacagctcctcccaatggtttaacttcagctgccgatgccataaaatctcaggatttcaaagatactgctgggcattcagtgactgcagaagggtttagtattcaggatctagtcctcggtacaagcattgagcagcctgtgcaacagtcagacatgaccatggttggaagccatatagacctctggcccacaagcaataacaaccattccagagacttccaaacagctgaagttgcatattactcacccacaactcgacattccgtgtctcatcctcagctacagttgcccaaccagccagcacatcctcttttgctaacctcaccaggaccaacttctacaggtagcttgcaggaaatgctttcagatggaacagatacaggttctgaaatttccagtgacatcaattcatcacctgagagaaatgcttccacaccattccagaacatcttgggatatcactctgctgctgaatcttctatatcgaccagtgtctttcccaggacctcctccagagtgctgcgggcttctcagcaccccaagaaatggacaggtgcagccactaatgcagcggacacagtatcatctaaggtacagccaacagcagcagctgccgtcacattgtttctgaggaaatcaagtccacctgcactgtctgcagccctggttgctaagggcaccagcagcagccctttggccgtggcctcaggaccagctaagagcagttcgatgactactcttgctaaaaatgtcacaaacaaggccgcatctggcccaaagaggacaccaggggcagtccatacagccttcccattcacaccaacctacatgtatgcaagaacaggacataccacgagcacacatacagccatgcaaggaaacatggacactgcctctggcctgttgtctacaacttacctccccaggaaaccacaagccatgcacaccggcctcccaaaccccaccaacctggagatgcccagagcatccacgccacgcccactgacagtcacggccgcgctgacatccattacagcctcagtgaaggccacccggttgccaccattgcgagcagaaaacacagatgctgtccttcctgctgcatcggctgcagtggtcacgactggcaaaatggcatccaacctggagtgtcagatgtccagtaagctcctggtgaagacagttctctttctcacccaaaggagagtgcagatcagtgaatccttgaagttcagtatcgccaaagggctcacacaggcattgcggaaggctttccaccagaacgatgtctcagctcacgtggacattctggaatattctcataatgtcacagttggttattatgctaccaaagggaagttggtgtatttgcctgctgtggtgatcgaaatgctgggtgtgtatggagtcagcaacgtcactgcagacctgaagcaacacaccccacacttacagtctgtggcagtacttgcctccccatggaatccccagcctgcaggctacttccagctaaaaacagtgctgcagtttgtgagccaagcggacaacatacagtcctgcaagtttgctcagacaatggaacagaggctgcagaaggcattccaggatgccgagaggaaagtcctgaataccaaaagcaacttgacaattcagattgtgagcacgtccaatgcctcccaggcagtcaccttggtgtacgtcgtgggcaatcagagcacattcctcaacggcaccgtcgccagcagcctcctcagccagctctcggctgagctggtgggattctacctcacctatccgccgctaaccattgctgaaccactggaatatcccaaccttgacatatcagaaacaaccagagactattgggtaattacagtgctgcagggtgtggacaattcgctggtgggcctgcacaaccagagctttgcccgggtcatggagcagcgcctggcccagctattcatgatgtcccagcaacaaggccggcggtttaaacgggccaccaccctgggaagctacactgtgcagatggtgaagatgcagcgtgtcccaggcccgaaggacccagcggagctgacttactataccctgtacaacgggaagcctttgttggggaccgtagctgccaagatcctgagcaccattgattcccaaaggatggccttgacccttcatcacgttgtccttctgcaagctgaccccgtggtgaagaacccgcccaataacctgtggatcatcgctgcagtgctggcgcccattgccgtggtcacggtcatcatcatcatcatcactgccgtgctctgcaggaagaacaagaacgacttcaagcctgacaccatgataaacctgccgcagagagcaaagcctgtgcaaggctttgattatgccaagcaacacctgggccagcaaggggcagatgaggaggtcatccctgtgactcaggagacagtggttctcccactgcccattagagatgctcctcaggaaagagacgtcgctcaggatggaagcaccatcaagaccgccaaatccactgaaaccaggaagagcaggtcgcccagtgagaatggctctgtcatcagcaacgaatcagggaagcccagctcagggagacgctcaccccagaatgtaatggcacagcagaaagtgacaaaggaggaggcaaggaagagaaatgtgccagcgagtgacgaagaggagggagcggttctatttgacaactccagcaaggtggccgctgaaccctttgacacatcttctgggtctgtgcagctcattgccataaaacccacagccctccccatggtgccccccacctcggacaggagccaggagtcatcggcagtcctcaacggcgaggtgaacaaagccctgaagcagaagtcagacatcgagcactatcggaacaagctgcgcctcaaagccaagaggaagggatattacgacttccctgcagtggagacgagcaagggtctgaccgaaagaaagaagatgtatgaaaaagccccgaaggaaatggagcatgttttggatccagattcagaactctgtgctccattcaccgagtctaaaaacaggcaacagatgaagaactctgtctacagaagccggcagtctctgaacagcccgagtccaggggaaaccgagatggaccttctggtgactcgggagcgaccccggcgtggaatccgcaacagcggatacgatactgagcctgaaatcatagaggaaaccaacattgacagagttcctgagccccggggctattccaggtctcgacaggtgaaaggccactcggagacctccacactgagctcccagccatccatcgacgaggtcaggcagcagatgcacatgctgctggaggaggccttcagcctggcatccgcgggccacgcaggccagagccggcaccaagaggcctacggctcagcccagcacctgccctattcggaggtggtgaccagcgctccggggaccatgacgcggcccagggccggggtgcagtgggtgccgacctaccgcccagaaatgtatcagtacagtctgccccggccggcttacaggttttcccagcttcctgagatggtcatgggctcaccgcctccacccgtacctccccggactggtcctgtggctgtcgcttctctcaggcgatccacctcagacatcggcagcaagaccagaatggccgagtctacagggcccgagccggcccagctgcacgacagcgcctccttcacgcagatgtccagaggccctgtgtccgtgacgcagttggatcagtcggctttaaattactcaggtaatacggtgccagcagtgttcgccatcccagctgccaacagacctggcttcaccggctacttcatcccaacgcctccctcatcctataggaaccaggcctggatgtcctatgcaggagagaatgagctcccgagccagtgggcagattcggtgcccctcccagggtacatcgaggcctacccccgatcacggtacccccagagctctccctccaggcttcctcgtcagtacagccagccagccaacctgcaccccagcctggagcaggccccggcgccctccacagcggcctcgcagcagagcctggcagaaaacgacccgtctgacgctcccctgaccaacatctccactgcggcccttgtgaaggccatccgggaggaggtggccaagctggccaaaaaacagacagacatgtttgagttccaggtctaacgccttagccccgtgggactctggacttccaaactctgaggactcagcctttgggtttcccatgcctacgtgttaggacttgagacatagcaatgggtgagtctttctcaccctccatttctgaaaaggtgaactatggggcttctgggaacaggaaactcttgaacgactagattcttggctcatccaactgattgtgggtcaagtccctggcttggggccttatgtttgatactctctcatgtcaaatgtttgaactttgggcatgtgccctatggaagcttagtcacaagaggcactagctaatctacagattcctatccaatgccacattttaataaatcaccggaagcgggagaatgtagctcttatcttcggtgacctctgcatgttaactctgtttctgtgttaaaggcaatgcaggagtgtggattaagcaccagactgtattctcattcaaccatgaccgtgcgcattaaaatcagtttgtaagggagacactgactccagccaagaaacctgagccccttttttttaggttcatattcaaagtcaaatgaactggatgaaagtcagtaccaatggctgtgcctataaatagacctgattctttgtttccctcgtcaattaaacaaaggccaagaaagagagaagatgagagggaatggtggatttgcgttgacagattttttaaaaggtgttgccattttggaaataaaagtcccctacaagttaggatctaactgaaagagaatcggtgctaagagcttttaggatcctacaaaagaaacacagttatttgtgaaggtttttctttgccttgttttgaaggtggcctgagaatggagcttctctttttcttgggataatagatacatcaacttttacaagaaaatctctgtctcttcaacaatgatgtccagtgtgtgctgctgagtggtacaaaaggaaatagtacttgattcctgttagaaacaggagtggtagaaccacagtcttcccaggccgcagcctctgtttatagaagcttctgaatgtagaaaagctgttgaatttcatttaaatgtaaataaccttttaaaaagcgtatggagttagccagttccccctagttaatggacataggaagacatttgctgaaatggtagggtggccactttgtgaccatgatgttgcaagttgccctccctggcatggtgagttggcttccagagctgtgggtagaggacatcgcctcacggcactgaggcaccagccgctgcctacccatcaatgcaagcaaaacagctactgactttgtgtagcagggagattggggactctggttccctcgccaagtgtggcagcctgtgcagtgttgggggcttacttggtatctgttggagaatgaggtcctgtcctgctttcacccatgacccatctagcttcagctgtatccattttcttctgagcccatcttccattgtcctcaacgagtttctttggtctttactgaaagaagatagtagaaatttaaaagttgagagaagactagaaatggaactgattagaaggggaggttcaaactgtcaatgcacagacttttcaaagaagttgtttatattttccaatggcaaactgccctttctggaatgttcagagatgatgtgtcatggaaccttcaaacaagtctcttgttcggatgataataggtagtgtccttttagtatgctggttgatctttcatagtgttagtgttttgttacttaaaaaggaaatcagctataaataaaatgtatttttgtaaaaaaaaaaaaaaa

SEQ ID NO: 836 - DNA, 2025 bp, Homo sapiens
  CDS (30)..(1775)
tcctgcacttcatcacggaggtgattagaatgactggtttcatgaagggcctctacacagacgccgagatgaagtctgataatgtgaaggataaagatgcaaaaattagcttcctacaaaaggccatagacgtggttgtaatggtgtcgggagagccactgttggccaaaccagcccgaatcgtggcggggcatgagcctgaaagaacaaacgagctgctccagataattggaaaatgctgtctcaacaagctctctagtgacgatgcggtgcggagggttttagctggagagaagggagaagtgaaaggccgggcctcactgacctcaagatctcaggaattggataataagaatgtgcgagaagaagagtccagagttcacaaaaatacagaggatagaggagacgctgaaataaaagagagaagtacaagcagagatcgaaaacagaaggaagaattgaaagaagaccgcaagccaagagaaaaggacaaggacaaggagaaggccaaggagaatggcggaaacagacacagagaaggggagagagagagagccaaagcccgggccaggccagacaacgagcgacagaaagacagaggcaacagggagcgggacagagactccgagcgcaagaaggagacagagagaaagagtgagggggggaaagagaaggagagactgagagacagggaccgagagcgcgaccgggacaaagggaaggacagggacagacggagagtgaaaaacggggagcactcctgggacctggacagggagaataacagagagcatgacaaacctgagaaaaagtcagcaagctcaggggagatgtctaaaaagttatcagatggaacttttaaagactccaaggctgaaacagagactgagatttccactagagcttccaagtcattgacaacaaaaacatcaaaacggcgatccaaaaattcagtggaaggtgactccaccagtgatgcagaaggagatgctggacctgctggccaagataagtctgaggtgccagagactccagaaattcctaatgagctttcatccaacatcagaagaattcctcggcctgggagtgcaagaccagcccctccccgggtcaaacggcaagacagcatggaggcgctacaaatggataggtcagggagtggtaaaaccgtttcaaatgtgattacagagtcacacaattctgacaatgaagaggatgatcaatttgtggtggaagctgcccctcagctctctgaaatgtcagaaattgaaatggtaacagcagtggaactagaagaagaggagaagcatggtggacttgtgaaaaaaattttggagacgaagaaagattatgagaaattgcagcagtcacccaaacctggggagaaggagcgatctctctttgagtcggcatggaagaaggagaaggacatcgtttccaaggagatagagaagctccgcacgtccatccagaccctgtgcaagagcgcacttcccctggggaagatcatggactacatccaggaagacgtggatgccatgcagaatgagctgcagatgtggcacagcgagaacaggcagcacgccgaggccctgcagcaggagcagaggatcacagactgtgccgtggagcccttaaaggctgagctcgcggagctggagcagctgatcaaagaccagcaagacaagatctgtgctgtgaaggccaacatcctcaagaatgaagaaaaaatccagaaaatggtatatagtatcaatttgacttcgagaaggtgaacactcaaaagtttcagagatgaaaagtcacctcagtttaaaagcaaaaaggaagatagaaaatcattactcttttaagttccagtttgctaagaaaatgaacagtttacaatgttattatccagctaattttcagagctttaaaactgtaagcatgttaagtgtattaaaaaaaccatgttttcttacctccttccagatggaatactggctagttataaatagcgcttccaaacaaaaaaaaaaaaaa

SEQ ID NO: 837 - DNA, 5069 bp, Homo sapiens
  CDS (1)..(4359)
atgaggacacttgggacttgcctggcgactttggccggacttttgctaactgcggcgggcgagacgttctcaggtggctgcctctttgatgagccgtatagcacatgtggatatagtcaatctgaaggtgatgacttcaattgggagcaagtgaacaccttgactaaaccgacttctgatccatggatgccatcaggttctttcatgctggtgaatgcctctgggagacctgaggggcagagagcccacctgctcttaccccaacttaaagaaaatgacacccactgcatcgattttcactattttgtgtccagcaagagtaattctcctccggggttactcaatgtctacgtgaaggtcaataacgggccactggggaatcctatctggaatatatctggagacccaacacgtacatggaacagggcagaactggccattagtactttctggcctaacttttatcaggtgatttttgaagtgataacttctggacatcaaggctatctcgctatcgatgaggtgaaggtgttaggacatccatgtaccaggactcctcacttcctgcggattcagaatgtggaagttaatgctggccagtttgctaccttccagtgcagtgccatcggcaggaccgtggcaggagacaggctctggttacagggcattgatgtgcgagatgctcctctgaaggaaatcaaggtgaccagctcccgacgcttcattgcttcatttaatgttgtgaataccaccaaacgagatgctggaaagtaccgctgcatgattcgcactgaaggaggtgttggaatatcaaactatgcagagttggtagttaaagaaccacccgttcctattgccccacctcagctcgcctctgtaggagccacctacctgtggatacagctcaacgccaactccatcaatggggatgggcccattgtggcccgagaggtggagtactgcacggccagtgggagctggaatgaccggcagccagtcgattccacgagctataaaattggacaccttgacccagatacagaatatgagattagtgtgctcctgaccaggccaggggagggtggcactggctctcctggtccagctctcaggacaagaacaaagtgtgctgatcccatgcgaggcccaagaaaactagaagtagtggaggtcaaatctcggcaaatcactatccgctgggagccatttggatataatgtaactcgttgccacagttataatctcactgtccactactgttaccaagttggaggacaagaacaagtgcgagaagaagtaagctgggatacagaaaattcacaccctcaacacacgatcactaacctgtcaccatacaccaatgtcagtgtgaaactgatcctcatgaacccagagggccggaaggaaagccaagaactcatagtgcagacagatgaagacctcccaggtgctgttcccactgaatccatacaaggaagtacctttgaagagaagatatttcttcagtggagagaaccaactcaaacatatggtgtaatcactttatatgagatcacctacaaagcagtcagttcctttgacccagaaatagatttatccaatcagagtggaagagtttcaaagctgggaaatgaaacccattttctgttttttggactgtatccggggaccacatactcctttaccatccgagctagcacagctaagggttttgggcctccagcaacaaaccagttcaccaccaaaatatcagcaccctctatgccagcttatgaacttgagacacctttgaatcaaactgacaataccgtgacagtcatgctgaaacctgcccacagcagaggagcacctgtcagtgtctatcaaatagttgttgaggaagaacgtcctcgaagaactaaaaagacgacagaaatcttaaagtgctacccagtgccaattcacttccagaatgcttctctgctgaactcacagtactactttgctgcagaatttcctgcagacagcctccaagctgcgcagccttttacaattggtgataataagacatataatggatactggaacactccccttctcccctataaaagctacagaatttatttccaagctgctagtagagccaatggggaaaccaaaatagactgtgtccaagtggccacaaaaggagctgccactccgaaaccagtcccagaacccgagaaacagacagaccatacagttaaaattgctggagtcatcgcgggcatcttgctgttcgtgattatatttcttggagttgtgttggtaatgaagaaaaggaaactggccaagaagcggaaagagaccatgagcagcacccgacaggagatgactgtgatggtgaactcaatggacaagagctatgctgagcagggcacaaactgcgacgaggctttctcattcatggacacgcacaatctgaatgggagatctgtgtcttcaccatcgtccttcacaatgaaaacaaatacactgagcacatcggtgcctaattcctattacccagatgaaacccacacaatggccagcgataccagcagcctggtgcagtcccatacttacaagaagcgagagccggccgacgtgccctatcagactgggcagctccaccccgccatccgggtggcagacctccttcagcacatcacacagatgaagtgtgcggagggctacggcttcaaggaggaatacgagagcttctttgaagggcagtctgcaccatgggactcggctaagaaagatgagaacagaatgaagaacagatacgggaatatcattgcatacgatcattcccgagtgaggctgcagacaatagaaggagacacaaactcagactatatcaatggcaattatatcgatggttatcatcgacccaatcattacattgctacccaagggccaatgcaggaaaccatctatgacttctggaggatggtgtggcacgaaaacactgcaagtatcatcatggtgaccaatcttgtggaagtgggaagggtcaaatgctgcaaatactggccagatgacacagagatatataaagacattaaagttaccctaatagaaacagaactactggcagaatatgtgataagaacatttgctgttgaaaagagaggtgtgcatgaaatccgagagatcagacagtttcacttcactggctggccggatcatggggtcccctaccatgccaccggcctgctgggattcgtgcggcaagtcaagtccaagagcccgcccagtgcaggcccactggtggtgcactgcagtgctggtgcagggaggactggctgtttcatcgtcattgatatcatgttggacatggccgaaagggaaggggtcgtagacatctacaactgcgtcagggagctgcggtcacggagggtgaacatggtgcaaacagaggagcagtatgtgtttatccacgatgcgatcctggaagcctgtctttgtggggacacctctgtgcctgcttcccaagttaggtctctgtattatgacatgaacaaactggatccacagacaaactcaagccagattaaagaggaattccggacgctaaacatggtgacaccaacgctgcgagtagaggactgcagcatcgcactgttgccccggaaccatgagaaaaaccggtgcatggacatcctgcccccagaccgctgcctgcccttcctcatcaccatcgatggggagagcagcaactacatcaatgctgccctcatggacagctataaacagccttcagcttttatagtcacccagcatcctttgccaaacacagtgaaagacttttggagactggtcctggattatcactgcacatccgtagttatgctaaatgatgtggatcctgcccagttgtgtccacagtactggccagaaaacggagtacacagacacggccccatccaggtggaatttgtctctgctgacctggaagaggacatcatcagcaggatattccgcatttacaatgccgccagaccccaagatggatatcggatggtgcagcaattccagttcctgggctggccgatgtacagggacacaccagtgtctaagcgctccttcttgaagctcattcgccaggtggacaagtggcaagaggaatacaatggcggggaaggccgcaccgttgtgcactgcttgaacgggggaggccgcagtgggacgttctgcgccatcagcatcgtatgtgagatgctccggcaccagagaaccgtggatgtctttcacgctgtgaagacactgaggaacaacaagcccaacatggtcgacctcctggatcagtacaagttctgctacgaggtggccctggaatacttgaattctggctgatggtgtaaacagctctgcaaacaatccctttcataccacaaagccaagacgttccatggtatttgtgcaaaagagatgaagacttctcaatatgcttattttgctttgcataattggctctttttaagagcccaagaaagtgtttctaaaattgcttgcactgcccaatcccagtaatgctgctgcctgacagaaacacacacacagccacagttgccaaatcccgtactccttgccaccggcttcctagagcagcgtagacagctggtaaactgaagagcacaactatattcttatgaaggaatttgtacctttggggtattattttgtggcccgtgaccctcgttattgttacagctgagtgtatgtttttgttctgtggagaatgctatctggcattatggtaatatattattttaggtaatatttgtactttaacatgttgcataatatatgcttatgtagctttccaggactaacagataaatgtgtaatgaacaaagatatgttgtatgagtcgtcgtttctgtcagatttgtattgtttccaagggaaaagcttgggggaggactcagttcacaaaatgcaaaactcaacgatcagattcacggacccagagcttttccatgtgtttatattgtaaatatttttgatttcatcaaattatttattcattaaaagaaatttttgtgaaaaaaaaaaaaaaaaaa

SEQ ID NO: 838 - DNA, 6278 bp, Homo sapiens
  CDS (16)..(5634)
tccaaactgttcaaaatgatgaacgaagatgcagctcagaaaagcgacagtggagagaagttcaacggcagtagtcagaggagaaaaagacccaagaagtctgacagcaatgcaagcttcctccgtgctgccagagcaggcaacctggacaaagttgtggaatatctgaaggggggcatagacatcaatacctgcaatcagaatggactcaacgctctccatctggctgccaaggaaggccacgtggggctggtgcaggagctgctgggaagagggtcctctgtggattctgccactaagaagggaaataccgctcttcacattgcatctttggctggacaagcagaagttgtcaaagttcttgttaaggaaggagccaatattaatgcacagtctcagaatggctttactcctttatacatggctgcccaagagaatcacattgatgttgtaaaatatttgctggaaaatggagctaatcagagcactgctacagaggatggctttactcctctagctgtggcactccagcaaggacacaaccaggcggtggccatcctcttggagaatgacaccaaagggaaagtgaggctgccagctctgcatattgccgctaggaaagacgacaccaaatctgccgcacttctgcttcagaatgaccacaatgctgacgtacaatccaagatgatggtgaataggacaactgagagtggttttacccctttgcacatagctgcacattacggaaatgtcaacgtggcaactcttcttctaaaccggggagctgctgtggacttcacagccaggaatggaatcactcctctgcatgtggcttccaaaagaggaaatacaaacatggtgaagctcttactggatcgaggcggtcagatcgatgccaaaactagggatgggttgacaccacttcactgtgctgcacgaagtgggcatgaccaagtggtggaacttctgttggaacggggtgcccccttgctggcaaggactaagaatgggctgtctccactacacatggctgcccagggagaccacgtggaatgtgtgaagcacctgttacagcacaaggcacctgttgatgatgtcaccctagactacctgacagccctccacgttgctgcgcactgtggccactaccgtgtaaccaaactccttttagacaagagagccaatccgaacgccagagccctgaatggttttactccactgcacattgcctgcaagaaaaaccgcatcaaagtcatggaactgctggtgaaatatggggcttcaatccaagctataacagagtctggcctcacaccaatacatgtggctgccttcatgggccacttgaacattgtcctccttctgctgcagaacggagcctctccagatgtcactaacattcgtggtgagacggcactacacatggcagcccgagccgggcaggtggaagtggtccgatgcctcctgagaaatggtgcccttgttgatgccagagccagggaggaacagacacctttacatattgcctcccgcctgggtaagacagaaattgtccagctgcttctacaacatatggctcatccagatgcggccactacaaatgggtacacaccactgcacatctctgcccgggagggccaggtggatgtggcatcagtcctattggaagcaggagcagcccactccttagctaccaagaagggttttactcccctgcatgtagcagccaagtatggaagcctggatgtggcaaaacttctcttgcaacgccgtgctgccgcagattctgcagggaagaacggccttaccccgctccatgttgctgctcattatgacaaccagaaggtggcgctgctgttactggagaagggtgcttcccctcatgccactgccaagaatggctatactccgttacatattgctgccaagaagaatcaaatgcagatagcttccacactcctgaactatggagcagagacaaacattgtgacaaagcaaggagtaactccactccatctggcctcgcaggaggggcacacagatatggttaccttgcttctggataagggagccaatatccacatgtcaactaagagtggactcacatccttacaccttgcagcccaggaagataaagtgaatgttgctgatattctcaccaagcatggagctgatcaggatgctcatacaaagcttggttacacacctttaattgtggcctgtcactatggaaatgtgaaaatggtcaactttcttctgaagcagggagcaaatgttaacgcaaaaaccaagaacggctacacgcctttgcaccaggccgctcagcagggtcacacgcacatcatcaacgtcctgctccagcatggggccaagcccaacgccaccactgcgaatggcaacactgccttggcgattgctaagcgtctgggctacatctccgtggtcgacaccctgaaggttgtgactgaggaggtcaccaccaccaccacaactattacagaaaaacacaaactaaatgtacctgagacgatgactgaggttcttgatgtttctgatgaagagggtgatgacacaatgactggtgatgggggagaataccttaggcctgaggacctaaaagaactgggtgatgactcactacccagcagtcagttcctggatggtatgaattacctgcgatacagcttggagggaggacgatctgacagccttcgatccttcagttccgacaggtctcacactctgagccatgcctcctacctgagggacagtgccgtgatggatgactcagttgtgattcccagtcaccaggtgtcaactctagccaaggaggcagaaaggaattcttatcgcctaagctggggcactgagaacttagacaacgtggctctttcttctagtcctattcattcaggtttcctggttagttttatggtggatgcccgaggtggtgctatgcgaggatgcagacacaatgggctccgaatcattattccacctcggaaatgtactgctccaacgcgagtcacctgccgactggtcaagcgccacagactggcaacaatgcctccaatggtggaaggagaaggcctggccagtcgcctgatcgaagttggaccttctggtgctcagttccttggtaaacttcacctgccaacggctcctcccccacttaatgagggagaaagtttggtcagccgcattcttcagctggggcctcctggaaccaaattccttgggcctgtgatcgtggagatccctcactttgcggcccttcgaggaaaggaaagggaactggtggtcctgcgcagtgagaatggggacagctggaaagagcatttctgtgactacactgaagatgaattgaatgaaattcttaacggcatggatgaagtactggatagcccagaagacctagaaaagaaacgaatctgccgcatcatcacccgagacttcccacagtactttgcagtggtgtctcgtatcaaacaggacagcaatctgattggcccagaaggaggtgtactgagcagcacagtggtgccccaggtgcaggccgtcttcccagagggggcactcaccaagcggatccgtgtaggcctgcaggctcaacctatgcacagtgagctggttaagaagatcctaggcaacaaagctaccttcagccctatagtcactttggaacctagaagaagaaaattccacaaaccaattaccatgaccattcctgtccccaaagcttcaagtgatgtcatgttgaatggttttgggggagatgcaccaaccttaagattactatgcagcataacaggtggaaccacccctgcccagtgggaagatattacaggaactacgccattaacatttgtcaatgaatgtgtttcctttacaacaaacgtgtctgccaggttctggctgatagattgtcgacagatccaggaatccgttacttttgcatcacaagtatacagagaaattatctgcgtaccttatatggccaaatttgtagtgtttgccaaatcacatgaccccattgaagccaggttgaggtgtttctgcatgactgatgataaagtggataagacccttgaacaacaagaaaattttgctgaggtggccagaagcagggatgtggaggtgttagaaggaaaacccatctacgttgattgtttcggcaacttggtaccattaactaaaagtggccagcatcatatattcagtttttttgccttcaaagaaaatagacttcctctatttgtcaaggtacgcgatacgactcaggaaccttgcggacgactatcatttatgaaggagccaaaatccacgagaggcctggtgcatcaagctatttgcaacttaaacatcactttgccgatttatacaaaggaatcagagtcagatcaagaacaggaggaagagatcgatatgacatcagaaaaaaatccacaggatgagcaggaacggatcgaggaaaggctggcttatattgctgatcaccttggcttcagctggacagaattagcaagagaactggatttcactgaggagcaaattcatcaaattcgaattgaaaatcccaactctcttcaagaccagagtcatgcactgttgaagtactggctagagagggatgggaaacatgctacagataccaacctcgttgaatgtctcaccaagatcaaccgaatggatattgttcatctcatggagaccaacacagaacctctccaggagcgcatcagtcatagttatgcagaaattgaacagaccattacactggatcatagtgaagggttctcggtacttcaagaggagttatgcactgcacagcacaagcagaaagaggagcaagctgtttctaaagaaagtgagacctgcgatcaccctcctatcgtctcagaggaagacatttctgttggttattccacttttcaggatggcgtccccaaaactgagggggacagctcatcaacagcactctttccccaaactcacaaggagcaagttcaacaggatttctcagggaaaatgcaagacctgcctgaagagtcatctctggaatatcagcaggaatattttgtgacaactccaggaacagaaacatcagagactcagaaggctatgatagtacccagctctcccagcaagacacctgaggaagttagcacccctgcagaggaggagaagctgtacctccagaccccaacatccagcgagcggggaggctctcccatcatacaagaacccgaagagccctcagagcacagagaggagagctctccgcggaaaaccagcctcgtaatagtggagtctgccgataaccagcctgagacctgtgaaagactcgatgaagatgcagcttttgaaaagggagacgatatgcctgaaatacccccagaaacagtcacagaagaagaatacattgatgagcatggacacaccgtggtaaagaaggttactaggaaaatcattaggcggtatgtatcctctgaaggcacagagaaagaagagattatggtgcagggaatgccacaggaacctgtcaacatcgaggaaggggatggctattccaaagttataaagcgtgttgtattgaagagtgacaccgagcagtcagaggacaacaatgagtaaagccatcacacagaagagggctgtggtgaaggaccagcatggaaaacgcattgacttggagcacctggaggatgtaccagaagcactagaccaggacgacctccagcgcgatctccagcagctccttcggcatttctgcaaggaggacttgaagcaagaggccaagtgagggactgcccagttctcacaccagaaaccacacattcactcaatatgcagcttcctgtttcagtaggggagtgacctaactggcctaattaatgggataccccgacatttccactgttagcaaatatacggcattttgctttagttttcccccatcctctttaactataaagctaatttgtgaccaaagatggcatccttcatactggatgctgtatccaatactttgttgtgtctgtgctaacctgggaactggccacctccattgttctttgcttctgcacaagatccatgaaaatccattgatcagaagaacttcacctgcagacctcttcaagtgacactatgtaggaatccttccaaggaatatctatgtacaatgtatatagctgaaatgctcagatgaacaacatattaaaattaaaaccactgcctattgtaactacactgggcatcagaataaaaggcctctaaaa

SEQ ID NO: 839 - DNA, 9412 bp, Homo sapiens
  CDS (68)..(8890)
cattgaccaactcaagtcatctttaaacaaattggaaactgagggaaccttgagaatttgtgctgttatgggatgcataatgacagaagcattagagaataaaagtgtacattttcccctaagaagtaaatacaacaggcttacaaaagttgctcgctttctccaagaaaatccttcatgtttactatgtaatatactacaccactatctgcaccaggcaaattactccatcattgatgatgctacaatgagcgatggacttcctgctttggtaactttgaagaaaggtttagttgcactggcaaggcagtggatgaagtttattgtggtgacaccagcctttaaaggagttagcttacatagaccagctcagcctctgaaacctcaaatagctatggaccatgaacatgaagatggacttggattggacaatgggggtggtcttcaaagtgataccagtgctgatggagcagaatttgagttcgatgcagccacagtcagtgaacacacaatgctattagaaggaacagctaaccggcctccacctggtagctctggacctgtaactggagctgagataatgaggaaactttctaaaactcatacccatagtgactctgcattaaaaataaagggcattcacccatatcattctctgagctataccagtggagacactgccactgattctccagtgcatgttggacgtgctgggatgccagtaaaggacagtccaaggaaggagagcctactcagctacctgactggaagcttcccaagcctgcacaacctcctggaaggtactcctcagagaagcagtgctgctgtgaaaagtagctccctaacgagaacaggaaatacagtagccactgatatgttatctgaacatcccttgctatctgagccatcatctgtgagtttctataattggatgtcaaatgctgtgggtaatcgaggaagtgtgttacaagaatctcctgttacaaaatcaggacacaatagtcttcccacaggtgttgcacccaatcttccaacaataccctcagcctcagatttcaacactgtcttgtctagtgaccaaaatactttggatgggacacattctcagcatagcaccagtcaggatgatgtggcaggtgtagaagaagcaaaccaagggtttcctgctgttcagcttgctgatgcacaggttgttttcaagcctcttctgagtcatacagggatccagtcacaggatacaatgccattctgctaccgaatgtactttggagaacacctttcattttcagggactttggactgcctcagagcagatattgtggattcagacacagccaaagagagaaaaggcaaaagagcaagaaggcaaggccatgtgaatcttcctccacttgagttcaaaccagcattaatgttgggaacctttagcatcagtgctgttgtaatggaaaagtccgtgtgcacccctcagaactctaccagtgccctttcttttcatgatctcagcaagcggtattataacacctttcactgcaactttactatttcctgtcagtcaataagccagcatgtagacatggctttggttcgtcttattcatcagtttagcacaatgatagatgacatcaaagcaactcagactgatattaaacttagcagatatacagccggatctgcttccccaacacctaccttcaaaaccagaaaacatcgggactttcgttcatctgactttagccgcagttctagaggaagtcttaatggtggcaatagagtaaataatgcaaagaacaaacggaccaacaatgagaataacaaaaaggaatctcgaaacaagaattcattaggaagatctgaaagaagaacatcaaaagtgtctaggaaaggttcaaaagatgtggtggatcacatgactattcatatggatgactctgattcaattacagtgtcagaacaaagtgagccttcagctgagtgctggcagaatatgtataaattgcttaacttctattcacttatctccgatccaacaggaatattggaaaagtcttcagaaacatttggaccagcaggagttcggagccctacagagccaacatgtaaagttgtgtttgagaatgaacaagacaacagcagtttgactaagactcagaggaaacgtagcttggtaacttctgaacctcagcatgttactctaatagtgtttgggattggcatggtgaaccgcacacacctagaggcagatattggtggactaacaatggaatcagaactgaagaggatccatggcagttttactcttaaggaaaaaatgaaagatgttttacatcaaaagatgactgagacttgtgctactgctcatattggtggggttaatattgtgctgcttgaagggattacaccaaatatacaactggaggattttcctacatctcctacaagtacagccaaacaagagtttctaactgtagtgaaatgtagtattgccaagtcccaagccctctacagtgcccaaagagggctgaagacaaacaatgctgctgtgttcaaagtaggagctatcagtatcaacattcctcagcaccctgccaccttacatagcatgatggttcgaagttctcaccaactatctaaacaaatctcagacctaatcagacagccttctacagccccacagcctgtaaaagaagatattgcaaccccactaccttctgaaaaaaccccaacaagtgttaatcaaactcctgttgaaacaaatgaatttcctcagctaccagaaggcttagaaaagaagcctattgttcttaaattcagtgccatgttagatggtatagccattggagcagcacttttaccatctctgaaagcagaatacaagatgggaagaatgagaagtcatggaatgacaggtgcacagacaagatttacatttgagctgccaaatcacagattgcgttttacttcaaaagtttctgccacagatatgtcaaccattcctccttctgccagtcttaaccttccccctgttaccatgtcagggaaatatataatggaagaacatgatagttattcggatcaggtgtggagtatagatgaactgccttctaaacaaggttactatttacagggaaattatctgcgttgtgtggcagaagttggttcctttgaacataatcttacaactgatcttctaaaccacttggtatttgtacagaaagtgttcatgaaggaagttaatgaagtaatacaaaaagtttctggtggggagcagcctattcctctctggaacgaacatgatggaacagcagatggagataaacctaaaattctcctctattccctaaacttgcagttcaagggtattcaagtaacggccactactccatcaatgagagctgtaagatttgaaactggattgattgaactggaactttctaaccgacttcaaaccaaagcttcaccaggaagtagcagctatctgaaactgtttggcaaatgccaggtggatttaaatctggcattaggacaaattgtcaaacatcaggtttatgaggaagctggttctgattttcatcaagttgcctattttaaaaccagaattggattaagaaatgccctccgagaagaaatcagtggttcttcagatagggaagctgtgcttattactttgaatagaccaattgtttatgcacagcctgtggcctttgatagagctgtgctgttttggctgaattataaggctgcctatgacaactggaatgaacaacgaatggctttacataaggatattcatatggctacaaaggaagtagtagatatgctacctggtatccagcaaacatcagcccaggcctttgggactctttttctccagctcactgtcaatgatctgggaatttgcctacctatcacaaatactgcacagtctaatcatactggagaccttgacactggttctgctttggtattaaccattgaaagtactctcatcactgcatgctcttcagagtctctggttagcaaagggcatttcaaaaacttttgtatccgttttgctgatggatttgagacatcatgggatgactggaaaccagaaattcatggggatttagtgatgaatgcctgtgtagttccagatggcacctatgaagtatgttcaagaactacaggacaagcagcagctgaaagcagtagtgctggaacctggacactcaacgtattgtggaaaatgtgtgggattgatgttcacatggatcctaacattggcaaaaggcttaatgctctgggcaatactcttacaacactgacaggagaggaagacatagatgacattgctgacttaaattcagtgaacatagctgacctgtcagatgaggatgaagttgatactatgtctcccactatccatactgaagccacagattatcgaagacaggcagcatctgctagccagccgggagaacttagaggaagaaaaattatgaagcgtatagtggatatcagagaactgaatgaacaggccaaagtaatagatgatctgaaaaaattaggtgcaagtgaaggaaccataaaccaggaaattcaacgttaccaacagttagaatctgtggctgtgaatgacattagaagagatgttcgtaaaaaattacggaggtccagtatgcgggctgcttccctaaaggataagtggggtttgagttacaaaccaagttacagccgatcaaaaagcatttctgcttctggaagaccacctcttaagcgaatggaaagggcaagttctcgagtaggagaaactgaagagctcccagaaatccgtgtggatgcagcatctcctggacctagagtaacttttaatatccaggatacatttccagaggagacagaactggaccttttgtcagtaaccattgaaggtccatcccattattcatcaaatagtgaaggatcatgttctgtgttcagttctcccaaaactccaggaggcttttcaccaggcattcctttccaaactgaagagggccgacgggatgacagtttgtcttctaccagtgaagattccgagaaggatgaaaaagatgaagaccatgagagggaaaggttttatatttacaggaaaccctcacatacgtctcgtaaaaaagcaacaggctttgctgctgttcatcagctatttacagaacgctggccaacaacaccagtcaatagaagtcttagtggcacagctacagagagaaatattgactttgaacttgatatacgggttgaaattgatagtggaaaatgtgtactccacccaaccacccttctacaagaacatgatgatataagtttgagaaggagttatgatcgaagttccaggagcttagatcaagattcaccttcaaaaaagaagaagtttcaaactaattatgcttctaccacccatttaatgaccggcaagaaagtgccatcatctctacagacaaagcctagtgacttagaaacaacagtattttacattcccggagttgatgtaaagttgcattacaattccaagacgctaaagactgaatcacctaatgcctccaggggatcttccttgccaagaacactgtccaaagagtccaagctgtatggtatgaaagatagtgcaacatctcctccttctcctcctttaccttccactgtccagagcaagactaacaccttacttcctccccagcccccacctattcctgcagccaaaggaaaaggaagtggaggagtaaaaacagccaagttatatgcctgggtagcacttcagtcattgccagaagaaatggttattagtccctgcctattagactttctggaaaaagctctggaaactatcccaattacaccagttgaaaggaattatacagctgtcagctcacaagatgaagatatgggacattttgaaataccagatcctatggaagaatcaacaacatcactagtgtcgtcttcaacatctgcttactcttccttccctgtagatgttgtggtttatgtacgagttcagccctcacagatcaaatttagctgtttaccagtatcaagagtagaatgcatgttaaagctgccatccctggatttggtgttttcttcaaaccgaggagaactggagactttagggactacatatcctgcagagactttatcccctggaggtaatgctactcagagtggaacaaagacttctgctagcaaaactggaataccaggttcatcgggattaggcagccctcttggccgaagtcgacatagtagtagtcagtcagacctgaccagttccagcagtagttcatctggcttgagcttcactgcatgcatgtctgacttttccctttatgtatttcatccatatggagcagggaaacaaaaaactgctgtttctggcctcacacctggatcaggaggattagggaatgtggatgaggagcccacttcagtcactggtcgaaaagattcactcagtataaaccttgagtttgtaaaagtgagtttgtcacggatcaggcgttcaggaggtgcctcattttttgaaagtcagtctgtaagcaagtctgcaagcaaaatggatactacgttaataaatatatctgctgtttgtgatatagggtctgcctcctttaaatatgatatgcgccgactcagtgaaattctggcatttccaagagcatggtatagaagaagtattgcaagacgtctattccttggagaccaaactataaatttgccaacatctggcccagggacacctgattccattgaaggggtaagccaacacctttcccctgaatcatcaagaaaagcttactgcaagacctgggagcagccaagtcagtcagcctccttcacccacatgcctcagtcacctaatgtgttcaatgagcatatgacaaacagcaccatgtcaccagggacagtaggacagagcctaaaatccccagcttccataagatcaaggagtgtatctgattcttcagttcctcgaagagattcactttcaaaaacatcaactccttttaacaaatcaaacaaagcagcaagccaacaagggaccccatgggaaacacttgtcgtgtttgctatcaacttgaagcaattaaacgttcaaatgaatatgagtaatgtaatgggaaatacaacttggacaactagtggtttgaagagccagggccgtctgtcagtaggaagtaatcgtgatcgagagatcagcatgtctgttggtctgggaagatcacaattagattctaaaggaggagtagttggagggaccatagatgtcaatgctttggagatggttgctcatatttctgaacatccaaatcagcaacccagtcacaaaattcagattactatgggttctactgaagctcgtgttgattacatgggctcaagtatcctcatgggcatcttcagtaatgctgatcttaagcttcaggatgaatggaaagtaaacttgtataatacattggattcaagcataactgataaaagtgagattttcgtccatggagatttgaagtgggatattttccaagtaatgatatcaaggtcaaccacaccagatctgataaaaataggaatgaagctccaggaatttttcacacaacaatttgataccagcaaacgagctctgtctacctggggaccagttccttaccttccgccaaagacaatgactagcaacctagaaaaaagttcacaagaacaattacttgatgcagcacatcatcgacactggcctggagtattgaaggtggtatcaggatgccacatatccttatttcagattccattaccagaagatggaatgcaatttggaggatcaatgagcttacatggaaatcatatgacactggcatgttttcatggtccaaattttcgttcaaaatcttgggccctttttcatttagaagaaccaaatattgctttttggactgaagctcagaaaatctgggaagatggctccagtgatcattctacatatattgtacaaacactagattttcacctgggtcataatactatggttaccaaaccatgtggtgctttggaaagtcctatggcaacaataaccaagataacaaggcgtcgccatgaaaatccaccccatggagtagcaagtgtgaaagaatggttcaattatgttacagctacaaggaatgaagagctaaatctgcttcgtaatgttgatgctaacaacactgagaatagcactactgtgaagaattctagtttgttgagtggattcagaggaggttctagctacaaccatgaaacagagactatctttgcattaccaaggatgcagcttgactttaaatccattcatgttcaagaaccacaggagccttcattacaggatgccagcctgaagccaaaagtagaatgtagtgtggtgacagagttcactgaccacatttgtgtgactatggatgctgagctcatcatgtttcttcatgatttagtatcagcttatcttaaagaaaaagaaaaagccatctttccacctcggattttatctactcgaccaggacaaaaaagtccaattattatacatgacgacaattcctctgataaagatagagaagatagcatcacttatactactgtggactggagagattttatgtgcaatacatggcatctagaacctactcttagattaatttcttggactggaagaaagattgatccagtaggtgttgattatattcttcaaaaattgggctttcatcatgctaggactactattcctaaatggcttcaaagaggagtcatggatccactggacaaggttctgtcagttcttatcaaaaagctcggtactgcactacaggatgaaaaggaaaagaaaggcaaagacaaagaagaacactaaaaaagtaatttgatctgtgaacaaattatgattgtgtctgttttattacactggagtgtttttttagtataataatttgaaatataactttaaaataattctaaatttgtggctataattaaaagtttgtaagttaacctgttctagttccatcattctgtgtacagtgaagtattgcatgataatgtaaattttgtgaaaaactagattaaaatatataactgcttgttatggtttataattatataatgtgcaatacaattcctgcatctttaaaatgtctgcagaataactgtgaatttttttgttattggattggccgtaacttttagaaaaaaatcttgttgatgataatgtgattttggggaggtcattaattgctttttcttttttaaatgtagacttatataaatacctgtttgtatatagcttgagtaattgtgatatgattgtataccactaaaatattgttaactattataataaagtcacagtaatggtttaaaaaaaaaaaaaaaaaaa

SEQ ID NO: 840 - DNA, 621 bp, Homo sapiens
  CDS (40)..(621)
atttggccctcgaggccaagaattcggcacgagggcgaaatggaggggtgtgtgtctaacctaatggtctgcaacctggcctacagcgggaagctggaagagttgaaggagagtattctggccgataaatccctggctactagaactgaccaggcaggttggtctcctcttcatattgcggcttctgctggccgggatgagattgtaaaagcccttctgggaaaaggtgctcaagtgaatgctgtcaatcaaaatggctgtactcccttacattatgcagcttcgaaaaacaggcatgagatcgctgtcatgttactggaaggcggggctaatccagatgctaaggaccattatgaggctacagcaatgcaccgggcagcagccaagggtaacttgaagatgattcatatccttctgtactacaaagcatccacaaacatccaagacactgagggtaacactcctctacacttagcctgtgatgaggagagagtggaagaagcaaaactgctggtgtcccaaggagcaagtatttacattgagaataaagaagaaaagacacccctgcaagtggccaaaggtggcctgggtttaatactcaagagaatggtggaaggttaa

SEQ ID NO: 841 - DNA, 1128 bp, Homo sapiens
  CDS (389)..(1036)
ccggtccggtattcccgggtggcgctgcggaggggggacgtggtaaaagtactcagcaagaccacagaggataagggctggtgggaaggagagtgtcaaggacgaagaggagtttttccagacaactttgtactcccaccacccccaatcaagaagctggtcccacggaaagtggtatctcgggaatcagctcctattaaggaaccaaaaaagttgatgcccaaaacatccctccccacagtcaagaagctagcaacagccaccactgggcccagcaaagccaagacatctcggacacccagcagggacagtcagaagctcacctcccgagactcaggaggaagagcacagcagcccggtaaaggccccctctgtgaagagaacccccatgccggacaagactgccaccccagagaggcccccagctccagagaacgcccccagctccaagaagatcccggctcctgacaaagtcccctccccagagaagaccctcactctaggggacaaggcctctgtcccagggaactccacctcggggaagatcccagctcctgacaaagtccccaccccagagaagatggtgactccggaggacaaggcttctatcccagagaactccatcatcccagaggagaccctgactgtggacaaaccctccactccagagagggtcttttcagtggaagagtcccctgccctagaagccccacctatggataaagtccctaatccaaagatggcccctctgggggatgaggcccccactctagaaaaggtcttgaccccagagctttctgaagaagaggtgtccaccagagatgacattcaattccatcacttctcttcggaggaagccctgcagaaggtcaagtactttgtagccaaagaggatccatcatcccaggaggaggcccacacgccagaggcacccccaccccaggccactaacagcaacaacagagaggctggagctctgcctgcgtgcgggccaagggctaaaccttggacaggttctttcacttactccgcctgacaaccctgcgacgtgataccattatccccacttcgcagatcaaataaacggagtcttggtgagattgaggtgaatttggctaacctgtaaaa

SEQ ID NO: 842 - DNA, 911 bp, Homo sapiens
  CDS (90)..(665)
  misc_feature (1)...(911): n = a,t,c or g
ttcctgcactatagaatacaagctacttgttctttttgcaggatcccatcgattcgaattcggcacgagcagccatcaggtaagccaagatgggtgcatacaagtacatccaggagctatggagaaagaagcagtctgatgtcatgcgctttcttctgagggtccgctgctggcagtaccgccagctctctgctctccacagggctccccgccccacccggcctgataaagcgcgccgactgggctacaaggccaagcaaggttacgttatatataggattcgtgttcgccgtggtggccgaaaacgcccagttcctaagggtgcaacttacggcaagcctgtccatcatggtgttaaccagctaaagtttgctcgaagccttcagtccgttgcagaggagcgagctggacgccactgtggggctctgagagtcctgaattcttactgggttggtgaagattccacatacaaattttttgaggttatcctcattgatccattccataaagctatcagaagaaatcctgacacccagtggatcaccaaaccagtccacaagcacagggagatgcgtgggctgacatctgcaggccgaaagagccatgggcttggaaaggaccgtatgttccaccatgctattggtggttcttgccgggcagcttagagaaggcgcaaaactctccagttcccctgttaccactaatataagtaaagtttgtaaaattcatgcctcataatttagggcagtcaaaaaaataaataaataagctattttaatatttttattctccttcaagggaccagaggccacaaaagtcttgtacactatgtgtccccagtaaatgacacatagaatgnccggacgcggggtcgccccgggaattccggagcgntctccagggaccatgca

SEQ ID NO: 843 - DNA, 2146 bp, Homo sapiens
  CDS (131)..(1894)
ggcgtgatgtatataactatctattcgatgatgaagataccccaccaaacccaaaaaaagagatctctcgaggatccgaattcgcggccgcgtccgactggacctctggcagcagcttcactaaggtgggatggatagcagggtctcaggcacaaccagtaatggagagacaaaaccagtgtatccagtcatggaaaagaaggaggaagatggcaccctggagcgggggcactggaacaacaagatggagtttgtgctgtcagtggctggggagatcattggcttaggcaacgtctggaggtttccctatctctgctacaaaaatgggggaggtgccttcttcatcccctacctcgtcttcctctttacctgtggcattcctgtcttccttctggagacagcactaggccagtacactagccagggaggcgtcacagcctggaggaagatctgccccatctttgagggcattggctatgcctcccagatgatcgtcatcctcctcaacgtctactacatcattgtgttggcctgggccctgttctacctcttcagcagcttcaccatcgacctgccctggggcggctgctaccatgagtggaacacagaacactgtatggagttccagaagaccaacggctccctgaatggtacctctgagaatgccacctctcctgtcatcgagttctgggagcggcgggtcttgaagatctctgatgggatccagcacctgggggccctgcgctgggagctggctctgtgcctcctgctggcctgggtcatctgctacttctgcatctggaagggggtgaagtccacaggcaaggtggtgtacttcacggccacatttccttacctcatgctggtggtcctgttaattcgaggggtgacgttgcctggggcagcccaaggaattcagttttacctgtacccaaacctcacgcgtctgtgggatccccaggtgtggatggatgcaggcacccagatattcttctccttcgccatctgtcttgggtgcctgacagccctgggcagctacaacaagtaccacaacaactgctacagcggcaccagctttgtggccggctttgccatcttctccatcctgggcttcatgtctcaggagcagggggtgcccatttctgaggtggccgagtcaggccctggcctggctttcatcgcttacccgcgggctgtggtgatgctgcccttctctcctctctgggcctgctgtttcttcttcatggtcgttctcctgggactggatagccagtttgtgtgtgtagaaagcctggtgacagcgctggtggacatgtaccctcacgtgttccgcaagaagaaccggagggaagtcctcatccttggagtatctgtcgtctccttccctgtggggctgatcatgctcacagagggcggaatgtacgtgttccagctctttgactactatgcggccagtggcatgtgcctcctgttcgtggccatcttcgagtccctctgtgtggcttgggtttacggagccaagcgcttctacgacaacatcgaagacatgattgggtacaggccatggcctcttatcaaatactgttggctcttcctcacaccagctgtgtgcacagccacctttctcttctccctgataaagtacactccgctgacctacaacaagaagtacacgtacccgtggtggggcgatgccctgggctggctcctggctctgtcctcctggtctgcattcctgcctggagcctctacagactcggaaccctcaagggccccttcagagagagaatccgtcagctcatgtgcccagccgaggacctgccccagcggaacccagcaggaccctcggctcccgccacccccaggacctcactgctcagactcacagagctagagtctcactgctagggggcaggcccttggatggtgcctgtgtgcctggccttggggatggctgtggagggaacgtggcagaagcagccccatgtgttccctgcccccgacctggagtggataagacaagaggggtattttggagtccacctgctgagctggaggcctcccactgcaacttttcagctcaggggttgttgaacagatgtgaaaaggccagtgccaagagtgtccctcggagacccttgaaggc

SEQ ID NO: 844 - DNA, 930 bp, Homo sapiens
  CDS (39)..(593)
gaaagcctgccagcacctattccacctcccagcccagcatggcacccctgctgcccatccggaccttgcccttgatcctgattctgctggctctgctgtccccaggggctgcagacttcaacatctcaagcctctctggtctgctgtccccggcgctaacggagagcctgctggttgccttgcccccctgtcacctcacaggaggcaatgccacactgatggtccggagagccaatgacagcaaagtggtgacgtccagctttgtggtgcctccgtgccgtgggcgcagggaactggtgagtgtggtggacagtggtgctggcttcacagtcactcggctcagtgcataccaggtgacaaacctcgtgccaggaaccaaattctacatttcctacctagtgaagaaggggacagccactgagtccagcagagagatcccaatgtccacactccctcgaaggaacatggaatccattgggctgggtatggcccgcacagggggcatggtggtcatcacggtgctgctctctgtcgccatgttcctgctggtgctgggcttcatcattgccctggcactgggctcccgcaagtaaggaggtctgcccggagcagcagcttctccaggaagcccagggcaccatccagctccccagcccacctgctcccaggccccaggcctgtggctcccttggtgccctcgcctcctcctcctgccctcctctcccctagagccctctcctccctctgtccctctccttgcccccagtgcctcaccttccaacactccattattcctctcaccccactcctgtcagagttgactttcctcccattttaccactttaaacacccccataacaattcccccatccttcagtgaactaagtccctataataaaggctgaggctgcatctgccaaaaaaaaaaaa

SEQ ID NO: 845 - DNA, 2153 bp, Homo sapiens
  CDS (68)..(1645)
tgaaaaaatttgaaagcgttgcgcccgctgtaccggtccggaattcccgggtcgacccacgcgtccgatggcggctgtggtgctggcggcgacgcggttgctgcggggctcgggttcttggggctgttcgcggctgaggtttggacctcctgcgtatagacggtttagtagtggtggtgcctatcccaacatccccctctcttctcccttacctggagtacccaagcctgtttttgctacagttgatggacaggaaaagtttgaaaccaaagtaaccacattggataatgggcttcgcgtggcatctcagaataagtttggacagttttgtacagtaggaattcttatcaattcaggatcgagatatgaagcgaaataccttagtggaattgctcactttttggaaaaattggcattttcgtctactgctcgatttgacagcaaagatgaaattctgcttacgttggaaaagcatgggggtatctgtgactgccagacatcaagagacaccaccatgtatgctgtgtctgctgatagcaaaggcttggacacggtggttgccttactggctgatgtggttctgcagccccggctaacagatgaagaagtcgagatgacgcggatggcggtccagtttgagctggaggacctgaacctgcggcctgacccagagccacttctcaccgagatgattcatgaagcggcttacagggagaacacagttggcctccaccgtttctgccccacagaaaacgtagcaaagatcaatcgagaggtgctgcattcctacctgaggaactactacactcccgaccgcatggtgctggccggcgtgggcgtggagcacgagcatctggtggactgtgcccggaagtacctcctgggggtccagccggcctgggggagcgcagaggccgtggatattgacagatctgtggcccagtacactggggggattgccaagctagaaagagacatgtccaatgtcagcctgggcccgacccccatccccgagctcacgcacatcatggttggactggagagctgctccttcctggaggaggacttcatcccctttgcagtgttgaacatgatgatgggcggaggtggctccttctcggctggtgggcccggcaagggcatgttctccaggctctacctcaacgtgctcaacaggcaccactggatgtataacgcgacctcctaccaccacagctacgaggacactggcctcctttgcatccatgccagcgccgacccaagacaggttcgagaaatggtagaaatcatcacaaaggagtttattttaatgggcggaaccgtggacacggtggagctggaacgagccaagacgcagctgacatcaatgctcatgatgaacctggaatccaggcctgtgatcttcgaggatgtggggaggcaggtgctggccactcgctccagaaagctgccgcacgagctgtgcacgctcatccgcaacgtgaagccggaagatgtgaagagagtcgcttctaagatgctccgagggaagccggcagtggccgccctgggtgacctgactgacctgcccacgtatgagcacatccagaccgccctgtcgagtaaggacgggcgcctgcccaggacgtaccggctcttccggtagaaccgctccccggcctgacagacccagggagctgcagctggagcccgttcccgtgcgtgttagtttggacacgaatttagtctaaaaagctgtctggttgtataaacggtgcaaacaatgtcgccacagcacccacgcggtttgcattcttttggaactcaatgtgccgatcagtggagtcagtatcgagcctgaccaccgcaagccaggaagcaggtgaagtgcccagcgctggagtgcagcgtgccacgaggagggcggtcggtgcttccctcctcgggctgtgggcacatggggccccgcaggttccttggaggagccctgagctgggaggcagcaaaggctgacctatcaaagcctcccggaggccaccgtgctgggtaccaggactcacctctgacaagcaggagaaggtaagggcccggtcagctccaaggagcgcgctccacgcgcgtgcacacagcttccctggtaataaagagctggcatctttcttaaaaaaaaaaaa

SEQ ID NO: 846 - DNA, 4455 bp, Homo sapiens
  CDS (1)..(4080)
atggcggaggccggcctgaggggctggctgctgtgggccctgctcctgcgcttggcccagagtgagccttacacaaccatccaccagcctggctactgcgccttctatgacgaatgtgggaagaacccagagctgtctggaagcctcatgacactctccaacgtgtcctgcctgtccaacacgccggcccgcaagatcacaggtgatcacctgatcctattacagaagatctgcccccgcctctacaccggccccaacacccaagcctgctgctccgccaagcagctggtatcactggaagcgagtctgtcgatcaccaaggccctcctcacccgctgcccagcctgctctgacaattttgtgaacctgcactgccacaacacgtgcagccccaatcagagcctcttcatcaatgtgacccgcgtggcccagctaggggctggacaactcccagctgtggtggcctatgaggccttctaccagcatagctttgccgagcagagctatgactcctgcagccgtgtgcgcgtccctgcagctgccacgctggctgtgggcaccatgtgtggcgtgtatggctctgccctttgcaatgcccagcgctggctcaacttccagggagacacaggcaatggtctggccccactggacatcaccttccacctcttggagcctggccaggccgtggggagtgggattcagcctctgaatgagggggttgcacgttgcaatgagtcccaaggtgacgacgtggcgacctgctcctgccaagactgtgctgcatcctgtcctgccatagcccgcccccaggccctcgactccaccttctacctgggccagatgccgggcagtctggtcctcatcatcatcctctgctctgtcttcgctgtggtcaccatcctgcttgtgggattccgtgtggcccccgccagggacaaaagcaagatggtggaccccaagaagggcaccagcctctctgacaagctcagcttctccacccacaccctccttggccagttcttccagggctggggcacgtgggtggcttcgtggcctctgaccatcttggtgctatctgtcatcccggtggtggccttggcagcgggcctggtctttacagaactcactacggaccccgtggagctgtggtcggcccccaacagccaagcccggagtgagaaagctttccatgaccagcatttcggccccttcttccgaaccaaccaggtgatcctgacggctcctaaccggtccagctacaggtatgactctctgctgctggggcccaagaacttcagcggaatcctggacctggacttgctgctggagctgctagagctgcaggagaggctgcggcacctccaggtatggtcgcccgaagcacagcgcaacatctccctgcaggacatctgctacgcccccctcaatccggacaataccagtctctacgactgctgcatcaacagcctcctgcagtatttccagaacaaccgcacgctcctgctgctcacagccaaccagacactgatggggcagacctcccaagtcgactggaaggaccattttctgtactgtgccaatgccccgctcaccttcaaggatggcacagccctggccctgagctgcatggctgactacggggcccctgtcttccccttccttgccattggggggtacaaaggaaaggactattctgaggcagaggccctgatcatgacgttctccctcaacaattaccctgccggggacccccgtctggcccaggccaagctgtgggaggaggccttcttagaggaaatgcgagccttccagcgtcggatggctggcatgttccaggtcacgttcatggctgagcgctctctggaagacgagatcaatcgcaccacagctgaagacctgcccatctttgccaccagctacattgtcatattcctgtacatctctctggccctgggcagctattccagctggagccgagtgatggtggactccaaggccacgctgggcctcggcggggtggccgtggtcctgggagcagtcatggctgccatgggcttcttctcctacttgggtatccgctcctccctggtcatcctgcaagtggttcctttcctggtgctgtccgtgggggctgataacatcttcatctttgttctcgagtaccagaggctgccccggaggcctggggagccacgagaggtccacattgggcgagccctaggcagggtggctcccagcatgctgttgtgcagcctctctgaggccatctgcttcttcctaggggccctgacccccatgccagctgtgcggacctttgccctgacctctggccttgcagtgatccttgacttcctcctgcagatgtcagcctttgtggccctgctctccctggacagcaagaggcaggaggcctcccggttggacgtctgctgctgtgtcaagccccaggagctgcccccgcctggccagggagaggggctcctgcttggcttcttccaaaaggcttatgcccccttcctgctgcactggatcactcgaggtgttgtgctgctgctgtttctcgccctgttcggagtgagcctctactccatgtgccacatcagcgtgggactggaccaggagctggccctgcccaaggactcgtacctgcttgactatttcctctttctgaaccgctacttcgaggtgggggccccggtgtactttgttaccaccttgggctacaacttctccagcgaggctgggatgaatgccatctgctccagtgcaggctgcaacaacttctccttcacccagaagatccagtatgccacagagttccctgagcagtcttacctggccatccctgcctcctcctgggtggatgacttcattgactggctgaccccgtcctcctgctgccgcctttatatatctggccccaataaggacaagttctgcccctcgaccgtcaactctctgaactgcctaaagaactgcatgagcatcacgatgggctctgtgaggccctcggtggagcagttccataagtatcttccctggttcctgaacgaccggcccaacatcaaatgtcccaaaggcggcctggcagcatacagcacctctgtgaacttgacttcagatggccaggttttagacacagttgccattctgtcacccaggctggagtacagtggcacaatctcggctcactgcaacctctacctcctggattcagcctccaggttcatggcctatcacaagcccctgaaaaactcacaggattacacagaagctctgcgggcagctcgagagctggcagccaacatcactgctgacctgcggaaagtgcctggaacagacccggcttttgaggtcttcccctacacgatcaccaatgtgttttatgagcagtacctgaccatcctccctgaggggctcttcatgctcagcctctgccttgtgcccaccttcgctgtctcctgcctcctgctgggcctggacctgcgctccggcctcctcaacctgctctccattgtcatgatcctcgtggacactgtcggcttcatggccctgtggggcatcagttacaatgctgtgtccctcatcaacctggtctcggcggtgggcatgtctgtggagtttgtgtcccacattacccgctcctttgccatcagcaccaagcccacctggctggagagggccaaagaggccaccatctctatgggaagtgcggtgtttgcaggtgtggccatgaccaacctgcctggcatccttgtcctgggcctcgccaaggcccagctcattcagatcttcttcttccgcctcaacctcctgatcactctgctgggcctgctgcatggcttggtcttcctgcccgtcatcctcagctacgtggggcctgacgttaacccggctctggcactggagcagaagcgggctgaggaggcggtggcagcagtcatggtggcctcttgcccaaatcacccctcccgagtctccacagctgacaacatctatgtcaaccacagctttgaaggttctatcaaaggtgctggtgccatcagcaacttcttgcccaacaatgggcggcagttctgatacagccagaggccctgtctaggctctatggccctgaaccaaagggttatggggatcttccttgtgactgccccttgacacacgccctcctcaaatcctaggggaggccattcccatgagactgcctgtcactggaggatggcctgctcttgaggtatccaggcagcaccactgatggctcttggggctgggctggtcctcccatcttcacctcgggcctggatcccaggcctcaaaccagcccaacccgaacctttggaacagttttccaaaaccttgacctgcaggggaaatgaaaatcctggctctgtgctgtgcacataggtgtttaataaacatttgttggccgagggcaaaaaatccaatcaaaaattc

SEQ ID NO: 847 - DNA, 4374 bp, Homo sapiens
  CDS (1)..(3999)
atggcggaggccggcctgaggggctggctgctgtgggccctgctcctgcgcttggcccagagtgagccttacacaaccatccaccagcctggctactgcgccttctatgacgaatgtgggaagaacccagagctgtctggaagcctcatgacactctccaacgtgtcctgcctgtccaacacgccggcccgcaagatcacaggtgatcacctgatcctattacagaagatctgcccccgcctctacaccggccccaacacccaagcctgctgctccgccaagcagctggtatcactggaagcgagtctgtcgatcaccaaggccctcctcacccgctgcccagcctgctctgacaattttgtgaacctgcactgccacaacacgtgcagccccaatcagagcctcttcatcaatgtgacccgcgtggcccagctaggggctggacaactcccagctgtggtggcctatgaggccttctaccagcatagctttgccgagcagagctatgactcctgcagccgtgtgcgcgtccctgcagctgccacgctggctgtgggcaccatgtgtggcgtgtatggctctgccctttgcaatgcccagcgctggctcaacttccagggagacacaggcaatggtctggccccactggacatcaccttccacctcttggagcctggccaggccgtggggagtgggattcagcctctgaatgagggggttgcacgttgcaatgagtcccaaggtgacgacgtggcgacctgctcctgccaagactgtgctgcatcctgtcctgccatagcccgcccccaggccctcgactccaccttctacctgggccagatgccgggcagtctggtcctcatcatcatcctctgctctgtcttcgctgtggtcaccatcctgcttgtgggattccgtgtggcccccgccagggacaaaagcaagatggtggaccccaagaagggcaccagcctctctgacaagctcagcttctccacccacaccctccttggccagttcttccagggctggggcacgtgggtggcttcgtggcctctgaccatcttggtgctatctgtcatcccggtggtggccttggcagcgggcctggtctttacagaactcactacggaccccgtggagctgtggtcggcccccaacagccaagcccggagtgagaaagctttccatgaccagcatttcggccccttcttccgaaccaaccaggtgatcctgacggctcctaaccggtccagctacaggtatgactctctgctgctggggcccaagaacttcagcggaatcctggacctggacttgctgctggagctgctagagctgcaggagaggctgcggcacctccaggtatggtcgcccgaagcacagcgcaacatctccctgcaggacatctgctacgcccccctcaatccggacaataccagtctctacgactgctgcatcaacagcctcctgcagtatttccagaacaaccgcacgctcctgctgctcacagccaaccagacactgatggggcagacctcccaagtcgactggaaggaccattttctgtactgtgccaatgccccgctcaccttcaaggatggcacagccctggccctgagctgcatggctgactacggggcccctgtcttccccttccttgccattggggggtacaaaggaaaggactattctgaggcagaggccctgatcatgacgttctccctcaacaattaccctgccggggacccccgtctggcccaggccaagctgtgggaggaggccttcttagaggaaatgcgagccttccagcgtcggatggctggcatgttccaggtcacgttcatggctgagcgctctctggaagacgagatcaatcgcaccacagctgaagacctgcccatctttgccaccagctacattgtcatattcctgtacatctctctggccctgggcagctattccagctggagccgagtgatggtggactccaaggccacgctgggcctcggcggggtggccgtggtcctgggagcagtcatggctgccatgggcttcttctcctacttgggtatccgctcctccctggtcatcctgcaagtggttcctttcctggtgctgtccgtgggggctgataacatcttcatctttgttctcgagtaccagaggctgccccggaggcctggggagccacgagaggtccacattgggcgagccctaggcagggtggctcccagcatgctgttgtgcagcctctctgaggccatctgcttcttcctaggggccctgacccccatgccagctgtgcggacctttgccctgacctctggccttgcagtgatccttgacttcctcctgcagatgtcagcctttgtggccctgctctccctggacagcaagaggcaggaggcctcccggttggacgtctgctgctgtgtcaagccccaggagctgcccccgcctggccagggagaggggctcctgcttggcttcttccaaaaggcttatgcccccttcctgctgcactggatcactcgaggtgttgtgctgctgctgtttctcgccctgttcggagtgagcctctactccatgtgccacatcagcgtgggactggaccaggagctggccctgcccaaggactcgtacctgcttgactatttcctctttctgaaccgctacttcgaggtgggggccccggtgtactttgttaccaccttgggctacaacttctccagcgaggctgggatgaatgccatctgctccagtgcaggctgcaacaacttctccttcacccagaagatccagtatgccacagagttccctgagcagtcttacctggccatccctgcctcctcctgggtggatgacttcattgactggctgaccccgtcctcctgctgccgcctttatatatctggccccaataaggacaagttctgcccctcgaccgtcaactctctgaactgcctaaagaactgcatgagcatcacgatgggctctgtgaggccctcggtggagcagttccataagtatcttccctggttcctgaacgaccggcccaacatcaaatgtcccaaaggcggcctggcagcatacagcacctctgtgaacttgacttcagatggccaggttttagcctccaggttcatggcctatcacaagcccctgaaaaactcacaggattacacagaagctctgcgggcagctcgagagctggcagccaacatcactgctgacctgcggaaagtgcctggaacagacccggcttttgaggtcttcccctacacgatcaccaatgtgttttatgagcagtacctgaccatcctccctgaggggctcttcatgctcagcctctgccttgtgcccaccttcgctgtctcctgcctcctgctgggcctggacctgcgctccggcctcctcaacctgctctccattgtcatgatcctcgtggacactgtcggcttcatggccctgtggggcatcagttacaatgctgtgtccctcatcaacctggtctcggcggtgggcatgtctgtggagtttgtgtcccacattacccgctcctttgccatcagcaccaagcccacctggctggagagggccaaagaggccaccatctctatgggaagtgcggtgtttgcaggtgtggccatgaccaacctgcctggcatccttgtcctgggcctcgccaaggcccagctcattcagatcttcttcttccgcctcaacctcctgatcactctgctgggcctgctgcatggcttggtcttcctgcccgtcatcctcagctacgtggggcctgacgttaacccggctctggcactggagcagaagcgggctgaggaggcggtggcagcagtcatggtggcctcttgcccaaatcacccctcccgagtctccacagctgacaacatctatgtcaaccacagctttgaaggttctatcaaaggtgctggtgccatcagcaacttcttgcccaacaatgggcggcagttctgatacagccagaggccctgtctaggctctatggccctgaaccaaagggttatggggatcttccttgtgactgccccttgacacacgccctcctcaaatcctaggggaggccattcccatgagactgcctgtcactggaggatggcctgctcttgaggtatccaggcagcaccactgatggctcttggggctgggctggtcctcccatcttcacctcgggcctggatcccaggcctcaaaccagcccaacccgaacctttggaacagttttccaaaaccttgacctgcaggggaaatgaaaatcctggctctgtgctgtgcacataggtgtttaataaacatttgttggccgagggcaaaaaatccaatcaaaaattc

SEQ ID NO: 848 - DNA, 1126 bp, Homo sapiens
  CDS (393)..(1070)
  misc_feature (1)...(1126): n = a,t,c or g
tgtgggaaaaaantttaganccnctgatcgccttcggtaccgcnccggaattcccgggtcgacccacgcgtccgcccacgcgtccggagccgtggaggtacgaacttaagacatgcctattttattaatttacttccaaacgcaacgaaaggtccatggacaatttgtgggccatttaattcagggcccccaattcgtacgtggagaagtgggaatgcaaaagtactttgacctttaaccttcggtccggcgcggtggagggaaacgcctccgtctctatataaggaattttccggtctcttcgggtcctttttcctctcttcagcgtggggcgcccacaatttgcgcgctctctttctgctgctccccagctctcggatacagccgacaccatgggtttcggagacctgaaaagccctgccggcctccaggtgctcaacgattacctggcggacaagagctacatcgaggggtatgtgccatcacaagcagatgtggcagtatttgaagccgtgtccagcccaccgcctgccgacttgtgtcatgccctacgttggtataatcacatcaagtcttacgaaaaggaaaaggccagcctgccaggagtgaagaaagctttgggcaaatatggtcctgccgatgtggaagacactacaggaagtggagctacagatagtaaagatgatgatgacattgacctctttggatctgatgatgaggaggaaagtgaagaagcaaagaggctaagggaagaacgtcttgcacaatatgaatcaaagaaagccaaaaaacctgcacttgttgccaagtcttccatcttactagatgtgaaaccttgggatgatgagacagatatggcgaaattagaggagtgcgtcagaagcattcaagcagacggcttagtctggggctcatctaaactagttccagtgggatacggaattaagaaacttcaaatacagtgtgtagttgaagatgataaagttggaacagatatgctggaggagcagatcactgcttttgaggactatgtgcagtccatggatgtggctgctttcaacaagatctaaaatccatcctggatcatggcatttaaataaaagattgaaagattaaaaaaaaaaaa

SEQ ID NO: 849 - DNA, 2044 bp, Homo sapiens
  CDS (86)..(2044)
agcaccggtccggaattcccgggtcgacccacgcgtccgactagttctctgatttcacttatagtcaaattaagaactctgtcacatgataaatatgtgttttcaggaactcgtaacattcagggatgtggccatagaattctcccctgaagagtggaaatgtctggaccctgcccagcagaatttgtatagagatgtgatgttggagaactacaggaacctggtctccctgggttttgtgatctctaacccagacctggtcacctgtctggagcaaataaaagagccctgcaatttgaagatacatgagacagcagccaaacccccagctatatgttctcctttcagccaagacctttcaccagtgcaggggatagaagattcattccacaaacttatactgaaaagatacgagaaatgtggacatgagaatttacaattaagaaaaggctgtaaacgtgtgaatgagtgtaaggtgcagaaaggagttaataatggagtttaccagtgcttgtcaactacccagagcaaaatatttcaatgtaatacatgtgttaaagtttttagtaaattttcaaattcaaacaaacataagataagacatactggagagaaaccctttaaatgtacagaatgtggcagatcgttttacatgtcacacctaactcaacatacaggaattcatgctggagagaaaccctacaatgtgaaaaatgtggcaaagctttacagggtccacaatccactgaatgaacataagagaattcatactggagagaaaccctacacatgtgaagaatgtggcaaagctttagacgttctgaacgaacataagaaaattcatactggagagaaaccctacaaatgtgaagaatgtggcaaagcctttacaaggtccacaacactgaatgaacacaagaaaattcatactggagagaaaccctacaaatgtaaagaatgtggcaaagcctttagatggtccacaagcctgaatgaacataagaatattcatactggagagaaaccctacaaatgtaaagaatgtggcaaagcctttagacagtccaggagcctgaatgaacataaaaatattcatactggcgaaaaaccctacacatgtgaaaaatgtggcaaagcttttaaccaatcctcaagtcttattatacacaggagcattcattctgaacaaaaactttacaaatgtgaagaatgtggcaaagcctttacttggtcctcatcccttaataaacataagagaattcatactggagagaaaccctacacatgtgaagaatgtggcaaagctttttataggtcctcacaccttgctaaacataagagaattcatactggagagaaaccctacacgtgcgaagaatgtggcaaagcttttaaccaatcctcaactcttatattacacaagagaatccattctggacaaaaaccttacaaatgtgaagaatgtggcaaagcctttacacggtccacaacactgaacgaacataagaaaattcatactggcgagaaaccctacaaatgtgaagaatgtggcaaagctttcatatggtccgcaagcctgaatgaacataagaatattcatactggagagaaaccctacaaatgtaaagaatgtggcaaagcttttaaccaatcctcaggccttattatacacaggagcattcattctgaacaaaaactttacaaatgtgaagaatgtggcaaagcctttactcggtccacagccctgaatgaacataagaaaattcattctggagagaaaccctacaaatgcaaagaatgtggcaaagcctataacttatcctcaacccttactaaacataagagaattcatactggagagaaacccttcacatgtgaagaatgtggcaaagccttcaattggtcctcatcccttactaaacataagataattcatactggagagaaatcctacaaatgtgaagaatgtggcaaaggttttaatcggccctcaacccttactgtacacaagcgattcatactggcaaggaacatagttgaatga

SEQ ID NO: 850 - DNA, 1431 bp, Homo sapiens
  CDS (25)..(1431)
gttactgtgtctccagaaacacatatggacctcacaaagggctgtgtgacctttgaggacatcgccatttacttctcacaggacgagtggggacttcttgatgaggctcagagactcctgtaccttgaagtgatgctggagaactttgcccttgtagcctcactgggttgtggccatggaacagaggatgaagagacaccttctgaccagaatgtttctgtaggagtgtcacagtcaaaggcaggttcatccacacagaagactcaatcctgtgagatgtgtgtcccagtcctgaaagatattttgcatctagctgatctccctgggcagaaaccatacttggttggagaatgtacaaaccatcaccagcaccagaagcatcacagtgcaaagaaatccttgaagagggacatggacagagcctcatatgtgaagtgctgcctattctgtatgtcattgaagccctttcgcaaatgggaggttggaaaggaccttccagccatgttgcggcttctgaggtccctggtctttcctggaggcaagaaacccggcacaattactgaatgtggggaggacattcgcagtcaaaaaagtcattacaagtcaggtgaatgtgggaaggcttccaggcacaaacacactcctgtttaccatccaagagtctacactggaaaaaagctttatgagtgtagcaaatgtgggaaagccttccgtggcaagtactcacttgttcagcaccagagagtccatactggagaaaggccttgggagtgcaatgaatgtggaaaattctttagccaaacctcccacctgaatgatcatcggagaatccacaccggagaaaggccttatgagtgcagcgaatgtggaaaattatttagacaaaactccagccttgttgaccaccagaaaatacacactggagcaaggccttatgagtgtagccagtgtgggaaatcctttagccaaaaagccacccttgttaaacaccaaagagttcacactggagaaaggccttataagtgtggtgaatgtgggaattcctttagtcaaagtgccattcttaatcaacaccgaagaattcacactggagcaaagccttatgagtgtggccagtgtgggaaatcctttagtcaaaaagctaccctcattaaacaccagagagttcacactggagaaaggccttataagtgtggtgactgtgggaaatcctttagtcaaagctccatccttattcaacaccggagaattcatactggagcaaggccttatgagtgtggccagtgtggaaagtcctttagccaaaagtctggtctcattcaacaccaagtggttcacactggagaaaggccttatgagtgcaacaaatgtgggaattcctttagccaatgctccagcctcatacatcaccaaaaatgtcataacacatag

SEQ ID NO: 851 - DNA, 865 bp, Homo sapiens
  CDS (253)..(618)
ggaactctctgttcttgctttttgttctgtttgattgatttattgggcttctctttttatatccagtaggggaatcagattgtggccaaaggtagtgtattaactctagaaaaggagattatatctacagttcctcaaacaattttagatttttcttttcaaggacagctagagaagataatgacataataactatttccttttttaggatctgaatctaaaaatggtgaagcagacagttcagataaagaaatgaaacatgggcaaaaatctcccactggaaaacaaacaagtcagcacttaaaacgattaaaaaagtctggtttagggcacttgaaatggaccaaagctgaggacattgacatagaaaccccaggatctattcttgtcaacactaacttgagggcattaataaataaacatacgtttgcttccttacctcagcattttcaacaatacctcctgcttttgctcccagaagtggataggcagatgggaagtgatggaattttacgcctcagtacttcagctctaaataatgaattctttgcatatgcagcacaagggtggaaacagcgactggcagaaggtaaatttgtattttctattattatgtgacatattggagtacacataccgtactgagcttgtacctttctctgatttttcagtcttttccccgacacagtacactttaatttagtaaaaactcatatccctttccaaatgagttcactgattcttttgttatacttgacattattgatgtcagatatttttgaagaaagcataattttatcttggacatcataaaatttttgatgcagcaacattttcttgcggatggtaattttaatgacattgt

SEQ ID NO: 852 - DNA, 2229 bp, Homo sapiens
  CDS (99)..(1976)
ctacgtaccggaccggaatccgggtcgacccacgcgtccgcagaggggtttgtgtggctgaagaggcaggaggaacagtgtatccacagcgtgggaccatgccaggcacaaaacggtttcaacatgtcattgagaccccggagcctggcaagtgggagttgtctgggtacgaggcagctgtgccaatcacggagaagtcaaacccactgacccaggatctagacaaagcagatgctgagaacattgttcgactgctagggcaatgtgatgctgagatcttccaggaggaggggcaagccctgtccacataccagagactctacagcgaatccattctgaccaccatggtacaggtggctgggaaagttcaggaagtgctgaaggagccagatggggggctggttgtgctgagtggagggggcacctctggccggatggcattcctcatgtcggtgtcctttaatcagctgatgaaaggtctgggacagaaacctctttacacctacctcattgcaggtggtgacaggtctgtggtggcctctagggaggggacagaagatagtgccttgcacgggattgaggaactgaagaaggtggctgccgggaagaagagagtgattgtcattggcatttctgtgggactctctgctccctttgtggcaggccagatggactgctgcatgaacaacacagctgtcttcttgccagtcctggttggcttcaatccagtgagcatggccagaaatgaccccattgaagactggagttcaacattccgacaagtagcagagcggatgcagaaaatgcaggagaaacagaaagcttttgtgctcaatcctgccatcgggcccgagggtctcagcggctcctcccggatgaaaggtggaagtgccaccaagattctgctggaaaccctgttattagcagcccataagactgtggaccagggcattgcagcatctcaaagatgcctcctggaaatcttgcggacatttgagcgagctcatcaggtgacctacagccaaagccccaagattgccaccctgatgaagagtgtcagcaccagtctggagaagaaaggccacgtgtacctggttggctggcagaccctgggcatcattgccatcatggatggagtagagtgcatccacacctttggtgctgatttccgagatgtccgtggctttctcattggtgatcacagtgacatgtttaaccagaaggctgagctcaccaaccagggtccccagttcaccttctcccaggaggacttcctgacttccatccttccctctctcacggaaatcgatactgtggtcttcattttcaccctggatgacaacctcacggaggtgcagactatagtggagcaggtgaaagagaagaccaaccacatccaggccctggcacacagcaccgtgggtcagaccttgctgatccctctgaagaagctctttccctccatcatcagcatcacatggccactgcttttctttgaatatgaagggaacttcatccagaagttccagcgtgagctaagcaccaaatgggtgctgaatacagtgagtacaggtgctcatgtgcttcttggtaagatcctacaaaaccacatgttggaccttcggattagcaactccaagctcttctggcgggcgctggccatgctgcagcggttctctggacagtccaaggctcgatgcatcgagagcctcctccgagcgatccactttccccagccactgtcagatgatattcgggctgctcccatctcctgccgtgtccaggttgcacatgagaaggaacaggtgatacccatcgccttgctgagcctcctattccggtgctcgatcactgaggctcaggcacacctggctgcagctccttctgtctgtgaggctgtcaggagtgctcttgctgggccaggtcagaagcgcactgcggaccccctcgagatcctagagcctgacgttcagtgaacccatgtttctgggtgggtgaaaggggcccaaccctgcccacttcagcccagcccgcccaaggggacttgtgccagcagaacatgtgggaggaagaagccccgtttccagggcatccgcagcccagggtagggagaaatattctctccactttgggggagagttcttgctctcgacctagtggtttctactctcaccgacttattctgatttcagaaataaaatgaaatgtcttattttggaaaaaaaaaaa

SEQ ID NO: 853 - DNA, 1614 bp, Homo sapiens
  CDS (137)..(1264)
tgatacgactcactataggaaatttggccctcgaggccaagaattcggcacgaggctgctttctgagggcatgaagtaagagggtctcttccgtctggctgctggggcctcggtgctgaagcgtctcaagcagacaatggcctcggacccccacagcctggaggagttttgctccgacccgcacgctgtggcaggtgccctcaagtcctatctgcgggagctgccagagcctctgatgaccttcgacctctatgatgactggatgagggcagccagcctgaaggagccaggggcccggctgcaggccctccaagaggtgtgcagccgcctaccccccgagaacctcagcaacctcaggtacctgatgaagttcctggcacggctggccgaggagcaggaggtgaacaagatgacacccagcaacatcgccatagtcctgggacccaacttgctgtggccacctgagaaagaaggggaccaggcccagctggatgcagcctccgtgtcttccatccaggtggtgggcgtcgtcgaggcgctgatccagagcgcagacaccctcttccctggagacatcaacttcaacgtgtcaggcctcttctcagctgttaccctccaggacacagtcagtgacaggctggcctctgaggaacttccgtccactgccgtgcccaccccagccaccaccccggctccggctccggctccagctccagctccggccccagccttggcttcagcagctaccaaggaaaggacagagtctgaggtgcctcccagaccagcctcccccaaggtcaccaggagtcccccggagacagctgccccagtggaggacatggctcggaggaccaagcgcccggcgccagcccggcccaccatgccgcccccccaggtctccggctcccgctcctcccctccagccccgcccttgccccctggctctggcagccctgggaccccccaagccctgccccgacgtctggttggcagcagcctccgagcccccacagtgccacccccgttaccccccacaccccctcagcctgcccggcgccaaagccggcgttcaccagcctcccccagcccggcctccccaggtccagcctcccccagcccagtctctttgagtaaccctgcacaggtggacctgggggctgccacagcagagggaggagcccctgaggctatcagtggggtccccactcccccagctatcccccctcagccccgccccaggagccttgcctcagagaccaactgagtggctggtttctccctaagcagccctcagcaccccctccctccccacctggccctcccaggacagctctcgccccccacaaaggggcatgggcctccagcctttgcccacaagtgcctcagtgcccactgggtcggcccccatggccaggagggctcaggacaatcctctatttcctgaccttttcctcgtccaccctgggcttggggacccccccaccggactctccactctccggcaggtcctaggggagccaccggaaggaaggagaggtttgcctgctcctacgggactgattcttctcttgccgacatgttttttgtaaggctggtaaataaattattttggac

SEQ ID NO: 854 - DNA, 1188 bp, Homo sapiens
  CDS (179)..(1138)
gttggacgaggctggaagaagggagtgagactgctcagagaggcaggattcctgctgactccagggggacacctggcacctcagcttcctttcccacttctccaggctgcatggaggggtgccgggcaggggcctcctggaagggaacctcctgcagcctcaagcaccaggtcatgacatgacatctatccctttcccaggtgaccgactcctgcaggtggatggagtgattctgtgcggcctcacccacaagcaggctgtgcagtgcctgaagggtcctgggcaggttgcaagactggtcttagagagaagagtccccaggagtacacagcagtgtccttctgctaatgacagcatgggagatgaacgcacggctgtttccttggtaacagccttgcctggcaggccttcgagctgtgtctcggtgacagatggtcctaagtttgaagtcaaactaaaaaagaatgccaatggtttgggattcagtttcgtgcagatggagaaagagagctgcagccatctcaaaagtgatcttgtgaggattaagaggctctttccggggcagccagctgaggagaatggggccattgcagctggtgacattatcctggccgtgaatggaaggtccacggaaggcctcatcttccaggaggtgctgcatttactgagaggggccccacaggaagtcacgctcctcctttgccgaccccctccaggtgcgctgcctgagatggagcaggaatggcagacacctgaactctcagctgacaaagaattcaccagggcaacatgtactgactcatgtaccagccccatcctggatcaagaggacagctggagggacagtgcctccccagatgcaggggaaggcctgggtctcaggccagagtcttcccaaaaggccatcagagaggcacaatggggccaaaacagagagagaccttgggccagttccttgacacattctcctgagtcccaccctcatttatgcaaacttcaccaagaaagggatgaatcaacattggcgacctctttggaaaaggatgtgaggcaaaactgctattcagtttgtgatatcatgagacttggaagatattccttctcatctcctctaaccagactttcgacagatattttctgagcaccttctctgcatgtctgcagtgctgtgtaaaatgccctcgtgcc

SEQ ID NO: 855 - DNA, 1402 bp, Homo sapiens
  CDS (893)..(1231)
aaaaatactatctatcctctcaccgttgatggcactgtcttccccaaaagccccaaggaactcctgaaggagaagcccttccactctgtgcccttcctcatgggtgtcaacaaccatgagttcagctggctcatccccaggggctggggtctcctggatacaatggagcagatgagccgggaggacatgctggccatctcaacacccgtcttgaccagtctggatgtgccccctgagatgatgcccaccgtcatagatgaatacctaggaagcaactcggacgcacaagccaaatgccaggcgttccaggaattcatgggtgacgtattcatcaatgttcccaccgtcagtttttcaagataccttcgagattctggaagccctgtctttttctatgagttccagcatcgacccagttcttttgcgaagatcaaacctgcctgggtgaaggctgatcatggggccgagggtgcttttgtgttcggaggtcccttcctcatggacgagagctcccgcctggcctttccagaggccacagaggaggagaagcagctaagcctcaccatgatggcccagtggacccactttgcccggacaggacctcccacactttggggcatcgttgccactggagcctctcttcgggtgacgttgcccctccctgctgcccccaagctggccccttcccactcttcagaccttgaccaggaccccaggaaacaaggcaatcgctggcggtgcgggcctctgggccgtcctctggggttccgagaggaccccaccttacagatgaggaaattagaatcagagaggggcagtaccgtgcctgaggccacacaggctgaggccccaggataagttccttgtgctggcctcagatggcctgtgggacatgctgagcaatgaggacgtggtaaggctggtggtggggcacctggctgaggcagattggcacaagacagacctggcccagagacccgccaacttggggctcatgcagagcctgctgctgcagaggaaagccagcgggctccacgaggctgaccaaaatgcagccacgcggctgatcagacatgccatcgggaacaatgagtatggggagatggaggcagagcggctggcggcgatgctgacattgccagaggacttggcgaggatgtacagggatgatatcactgtcactgtggtgtattttaactcagaatcaatcggtgcatattacaaggggggttaagaatctcccatcctattgtcaaggttaacataaatgctcttctaaaatgtttcacttactcctaaactagctatccaaacctatgatgtgagtgcccagacatctacatatcacctttccttttggtttttgctctgagctacctcaatcattctaaagctttaagtt

SEQ ID NO: 856 - DNA, 2610 bp, Homo sapiens
  CDS (165)..(2267)
ccccccatcgaacgcctgcggtaccggtccggaatccctgggtcgacccacgcgtccggccaggccagagacagctgcgctgtgcgggcagctagtcccagtactccgagtcggtcgcgggccgacaggcatcccctgagcgcctgctgggctcttatcacgcgatggcatccactgtggaaggaggcgacacagctctgctcccagaattccccagggggcccctcgatgcctaccgagcaagagcgtccttcagctggaaggagctggcgctgttcacggaaggggagggcatgctccgctttaagaaaaccatcttctcagctcttgagaatgaccctcttttcgctcgttcccctggagccgatctgtccttggagaagtatcgcgagctgaacttccttcgatgcaagcggatcttcgagtatgacttcctcagtgtcgaagacatgttcaagagccctctgaaggtccccgccttgattcagtgcctgggcatgtatgactcttctctggctgccaagtacctcctccatagcttggtttttggatcagcagtttacagttctggttctgaaagacatctcacatatattcaaaagatcttcaggatggagatttttggatgttttgctctgaccgaattaagccacggcagtaataccaaggccattcgcacaactgcccactacgatcctgccactgaggaattcatcatacattcccctgatttcgaagctgccaagttttgggttggcaacatgggcaagacagccactcacgcggtggtgtttgctaagctgtgtgtgccaggggaccagtgccatgggctgcatccctttatcgtgcagatccgggacccgaagacccttcttcccatgcctggagtgatggttggcgacataggaaaaaaactcgggcagaacggtctggataatggtttcgccatgttccacaaggtcagagttcctcgccagagccttctgaaccggatgggagacgtcacccccgagggcacctatgtcagcccctttaaggacgtcaggcagcgctttggagcgtccctggggagcctgtcctcgggccgggtctccatcgtgagcctggccatccttaacctaaagctggccgtggccatcgctcttcgcttctcagccactcggcgtcagtttggacccacagaggaggaggaaataccagtgcttgagtatccaatgcagcaatggcgcttgcttccatatctggcagctgtctacgccttagaccatttctccaagtcgctcttcctggacctggtggagctccagcgaggacttgcatcgggagaccgcagcgccagacaggcagagcttggacgtgagatccacgccctggcatcggccagcaagcccctggcctcgtggaccacccagcaaggaattcaggaatgccgggaggcgtgtggaggacacggctatctggccatgaaccggttgggtgtccttagagatgacaacgatcccaactgcacatacgaaggtgacaacaacatcctgctgcagcagacaagcaactatttgctgggtctcctggcacaccaggtccacgatggagcttgcttccgcagtccgctgaagtcagtggactttctggacgcctatcccggcatccttgaccagaagtttgaggtctccagtgttgccgactgcttggactctgcagtcgccctggcagcatacaagtggctggtttgctacctgctccgagagacttatcaaaaattaaaccaagagaaaagatcaggaagcagtgactttgaagcaaggaacaaatgccaggtgtcccacggccgtccgttggcgctggccttcgtggacctcacggtggtccagaggttccacgagcacgtgcaccagccttccgtgccgccctcgctgcgggccgtgctggggcggctcagtgctctgtacgccctgtggtccctgagccgccacgcggccctgctctaccgaggaggatacttctccggtgagcaggcgggagaagtgttggagagcgccgtcctggctttgtgttcccagctgaaagacgatgcagttgccctggtagacgtgatcgctcctcctgactttgttctggactcaccgattggcagagccgacggcgagctctacaaaaacctctggggcgctgtcctgcaggaaagcaaggtgttggagcgggcatcctggtggccagagttttctgtgaacaaacctgtcataggaagtctgaaatcgaagctctagtgggactggcacattcagccaagtctaatgaaacgaagggaactaatcagacgtggacctcaacttctgattccagaacacgccggagattgctgctgctttctgagcccgcacctgtgcgcctaaactgctgattggcctcaactgcccaggcggacgggagggaggcacccggccggctggactaatctgggatcgcggtgatttgcagcgtggaaaagaaatgcagatgatcatgtctacctgatgcgccgtgggttttttgataattagaatttcgcacattcagttttcagggttcagctcctttctctaaagtaaacagcccattgtcagggaaaaa

SEQ ID NO: 857 - DNA, 1071 bp, Homo sapiens
  CDS (177)..(878)
atgaccactatagggaatttggccctcgagcaagaattcggcacgagggtggtaggctgcgaccccttcctcccacagccccttcccgcccctcgccgggcatccgccgacaggtacataccaagaaattgaattgctgagtcacaggagagatttacaaatagtgttttggcatcatggaacgtgtaggttgtactttaacgacaacttacgcccaccctagaccaacaccaaccaactttctaccagccatcagtaccatggcctcaagctacagggaccgctttccccactccaatttgacccatagcctgagccttccttggagacccagcacatactacaaagtcgcctccaattccccaagcgtggccccgtactgcaccagatcacagagggtgtccgagaataccatgcttccctttgtttccaacagaaccactttcttcacaagatacacaccggatgactggtacaggtccaatttaaccaactatcaagagtccaacacttcccgacataattcggagaaactaagagtggatacatctcgcctgattcaagacaaatatcaacaaacaagaaaaactcaggcagacacaacccaaaatctgggagaacgtgtcaatgacatagggttttggaaatctgaaatcattcatgagttggatgaaatgattggagagacaaatgcacttactgatgtgaagaaaagactggagcgggctttgatggagactgaagcccctcttcaggtagcccgagaatgtctatttcatcgagaaaagagaatgggaatcgacctagttcacgatgaagttgaagcacaactgctgacggtaaatgtgggggaaatgcatcagtcacaggcagcttagttgtaaatgtatgttgaatatgtagaagcaaaaaaggatgttacataaaatgacttataagtaaagcattatcgtatcagatgctgatagcatttagcaaagacatgtttttcttggttataacatatattcaatgagaatatgaaaatgcaaacgagtaaataaagatgaaaatcacttgaaaaaaaaaaaa

SEQ ID NO: 858 - DNA, 1627 bp, Homo sapiens
  CDS (397)..(972)
gaattccccagacttgtaagccgggggctgagcctcagggcaggggtgcagatgggggtgcagcctccccgcttcccggcgactccgggaaggtcagcgcgggcagtcggggcgcgctcctgcggccgggcctcgccggcaacccggtccccacctgaaaccccgcctgccactccgttccagagggccaatagccgtgcaacctgcccgggatggggcgggacttatgcaaatagtgtcgccttcgggaggcacatagtgatacaagagctggaaggcggctccggcgcagaccttggagagcacagctgccggcccgcgagccagcctcggttcccgcggcccgccgaggctcggagccatccagcgacccggcgaccggcctcaggccccgccatggggaagaccaacagcaagctggcccccgaggtgctggaggaccttgttcagaacactgagttcagcgagcaggagctgaagcagtggtacaagggcttcctgaaggactgccccagcggcatcctcaacctggaggagtttcagcagctctacatcaagttcttcccctacggcgacgcctccaagttcgcgcagcacgctttccgcaccttcgacaagaacggcgacggcaccatcgacttccgggagttcatctgcgccctgtcggtcacctcccgcggcagcttcgagcagaagctcaactgggcctttgagatgtacgacctggacggcgacgggcgcatcacgcgcctggagatgctggagatcatcgaggcaatctacaagatggtgggcaccgtgatcatgatgcgcatgaaccaggacgggctcacgccccagcagcgtgtggacaagatcttcaagaagatggaccaggataaggacgaccagattacattggaggagttcaaggaggcagccaagagtgacccatccattgtgttgctgctgcagtgtgacatgcagaagtagaagctggtgaggggcagggtccctggccagaaggggcatggccacctcccaacctgatgacctctctggctggcctcccaggaggagggacactccagcccccctctctggcccacccagtcctctgcccaagcccttcctcccctccatcaagatctttgagggaccacctcaccctgcaaaagagacaggtcctccagtaccctgtcttctagccccacctcccacttggccagaaccaatgtccattgggcataggggagttggcttttgccccaggaggtgaggttaaggagttgggggccctggggttctggttaggaattctcttgatcctgggattatgctttatgggatgtggtcccacaggcctgtcacagggccaaattgggtctgtccattcctgaggctccagatcccataaagggggtctcttccccatcccttctactctacctggcccttccagccccagcctttggagcgttcattcagtcctttcttcagctaatgattactgacacctgtttggtgctaaggatatggtcatttacaagacacatcttgtgccctctggaagctcatagggttgtgaggcaaacttccagccgtcagggtctcagctaagcagaaggtgctggaaggcggaattcat

SEQ ID NO: 859 - DNA, 1371 bp, Homo sapiens
  CDS (117)..(1133)
taagcttgcggccgcttctagtagtttccaggcgctgccgggcggctggcactaagcggtcctgaggctgtggctacggctgctccggagctggtggcgccgcgataggagagccgatggccaagtggggtgagggagacccacgctggatcgtggaggagcgggcggacgccaccaacgtcaacaactggcactggacggagagagatgcttcaaattggtccacggataagctgaaaacactgttcttggcagtgcaggttcaaaatgaagaaggcaagtgtgaggtgacggaagtgagtaagcttgatggagaggcatccattaacaatcgcaaagggaaacttatcttcttttatgaatggagcgtcaaactaaactggacaggtacttctaagtcaggagtacagtacaaaggacatgtggagatccccaatttgtctgatgaaaacagcgtggatgaagtggagattagtgtgagccttgccaaagatgagcctgacacaaatctcgtggccttaatgaaggaagaaggggtgaaacttctaagagaagcaatgggaatttacatcagcaccctcaaaacagagttcacccagggcatgatcttacctacaatgaatggagagtcagtagacccagtggggcagccagcactgaaaactgaggagcgcaaggctaagcctgctccttcaaaaacccaggccagacctgttggagtcaaaatccccacttgtaagatcactcttaaggaaaccttcctgacgtcaccagaggagctctatagagtgtttaccacccaagagctggtgcaggcctttacccatgctcctgcaacattagaagcagacagaggtggaaagttccacatggtagatggcaacgtctctggggaatttactgatctggtccctgagaaacatattgtgatgaagtggaggtttaaatcttggccagagggacactttgccaccatcaccttgaccttcatcgacaagaacggagagactgagctgtgcatggaaggtcgaggcatccctgctcctgaggaagagcggacacgacagggctggcagcggtactactttgagggcattaaacagacctttggctatggcgcacgcttattttagggccagcggcaggggactccagcctgctggacacttcagtccagctctctcctgactggggcttgcgactcacaggattgcatcgtcccagctgctaacttggggccggggcccctcccttccacatataccttgggtttgtgcatgttttctgctgggtgggttcagagggcaatttctcttttatgtgtacatatgctaaataaacataatttaaaaaacaaaaaaaaaaaaaaaa

SEQ ID NO: 860 - DNA, 1036 bp, Homo sapiens
  CDS (1)..(933)
atgtcttatcttaagcaaccgccttacgcagtcaatgggctgagtctgaccacttcgggtatggacttgctgcacccctccgtgggctacccgggtttgccttctgaggaagcagtcccagggcatttactgaccaagcagagaacaggggttgggaaaaccaccccccggaaacagcgccgggagaggacgacgttcactcgggcgcagctagatgtgctggaagcactgtttgccaagacccggtacccagacatcttcatgcgagaggaggtggcactgaaaatcaacttgcccgagtcgagggtgcaggtatggtttaagaatcgaagagctaagtgccgccaacaacagcaacaacagcagaatggaggtcaaaacaaagtgagacctgccaaaaagaagacatctccagctcgggaagtgagttcagagagtggaacaagtggccaattcactcccccctctagcacctcagtcccgaccattgccagcagcagtgctcctgtgtctatctggagcccagcttccatctccccactgtcagatcccttgtccacctcctcttcctgcatgcagaggtcctatcccatgacctatactcaggcttcaggttatagtcaaggatatgctggctcaacttcctactttgggggcatggactgtggatcatatttgacccctatgcatcaccagcttcccggaccaggggccacactcagtcccatgggtaccaatgcagtcaccagccatctcaatcagtccccagcttctctttccacccagggatatggagcttcaagcttgggttttaactcaaccactgattgcttggattataaggaccaaactgcctcctggaagcttaacttcaatgctgactgcttggattataaagatcagacatcctcgtggaaattccaggttttgtgaagacctgtagaacctctttttgtgggtgatttttaaatatactgggctggacattccagttttagccaggcattggttaaaagagttagatgggatgatgccg

SEQ ID NO: 861 - DNA, 2623 bp, Homo sapiens
  CDS (93)..(1457)
ggagtgaccgccgtcgattacgcctatttaggtgacactatagaacaagtttgtacaaaaaagcaggctggtaccggtccggaattcccgggatggcgcagcgggactggacctgggtgccgagcggagccgctgccatgggcctgggcgtcagcgctgagcagcccgcaggcggcgccgagggcttccacctccacggggtgcaggagaactccccagcccagcaggcgggcctggagccctactttgacttcatcatcaccattgggcactcgaggctgaacaaggagaatgacaccctgaaggcactactgaaagccaatgtggagaagcccgtgaagctggaggtgttcaatatgaagaccatgagggtgcgcgaggtggaggtggtgcccagcaacatgtggggcggccagggcctactgggtgccagtgtgcgcttctgcagcttccgcagggccagtgagcaggtgtggcatgtgctggatgtggaaccatcttcacctgctgcccttgccggcctgcgcccctacacagactatgtggttggttcggaccagattctccaggagtccgaggacttctttacgctcatcgagtctcatgaggggaagcccttgaagctgatggtgtataactccaagtcagactcctgccgggaggtgactgtaactcccaacgcagcctggggtggagagggcagtctgggatgtggcattggctatgggtatctacaccggatcccaactcagccccccagctaccacaagaagccacctggcaccccaccaccttctgctctaccacttggtgccccaccacctgatgctctaccacctggacccacccccgaggactctccttccctggagacaggttccaggcagagtgactacatggaggccctgctgcaggcacctggctcctccatggaggatccccttcctgggcctgggagtcccagccacagtgctccagaccctgatggacttccccatttcatggagactcctcttcagcccccacctccagtgcagcgagttatggacccaggcttcctggacgtgtcgggaatttctctcttggacaacagcaatgccagtgtgtggcccagcctgccctcttccacagaactgaccaccacagctgtctcaacctcagggccagaggacatctgctccagcagcagttctcatgagcggggtggtgaggctacatggtctgggtcagagtttgaggtctccttcctggacagcccaggtgcccaagcccaggcggaccacctgcctcagctgactcttcctgacagtctcacctctgcagcctcaccagaagatgggctgtccgccgagctgcttgaagctcaggctgaggaggaaccagcaagcacagagggcctagatactgggacggaggctgaggggctggacagccaagcccagatctctaccacagaataacaccctgggctgtgacaaggcccatgatgacatttcatgaggcccagatgtgggcaggcagcccgggctgcactatgcggtcaggattccttgctgctttggtgggacatgaggcctcagtgggtggtgagagggggccatggctttgtgggaggatatcttttggccgtgtaccctcaggtccagtgcttggtcctgctctggtcactggggcttcccaggaggcagcagggtctggtcataatccagtgtgaagatgaggtgaggaaggaaggggttgctgtccagtgttggcctggtcgctttgattcttcctgcacagctcagcccaccccatctgtactggaagggaccctggagccctgggaccaccccctttcaagtcccaaacactgagtcctctgtcatgtgtccttgtccctaggctacaatgctacacttggctcaggctgatcaccatgctagtcacaggagggagagagaggcagtgtacttgcccccatctcctggagggaggtgcgttggaaattctaggcccttcagcagagacccatttgtgcccagaccacaatatttcttcttcctcagggactacatgccacagacctgtatccccagtggcaactcctgttagctcccaaacttaaacagtgatctcttctaaatatacaaggcatctacccagccccaatagtgaataaaagtcacaaatttaagttcaacaccctaagcaatttctcaaagccagtctacctgactaggtctatccacgcacggttcccaaccccaagggggaattaggggattagattaagagtaggtaaagacccttttgttctttcctgttgtaggggaggaagctgttctccccaccccaggtgcctttggaggttaaggctaggttaggccctgcactccacctggggacggcccctcatcacctgaagtcctctgctgtgttgactggaccctcagttcccacactgctaattactatgaaagctgctctggcctcgtcttctagcttgtgcctagttgaaagtctcacctttacaggatcatttgtaatgctggtgtacatgcagggaactcacaagctgtgtcaggtatgcaggacaaggaatgtctgctctggggggcacaggccaactatatggagggag

SEQ ID NO: 862 - DNA, 1499 bp, Homo sapiens
  CDS (195)..(944)
catcgcatgcggtcccctgcggtaccggtccggaattcccgggtcgacccacgcgtccgcccacgcgtccggtaaggaacgccggctcttcgcctctcagcgcggcttgtcctttgttccggacgcccgctcctcagccctgcggctcctggggtcgctgctgcatcccgcacgcctccaccggctgcagacccatggccgagcgcggggaactcgacttgaccggcgccaaacagaacacaggagtgtggctagtcaaggttcctaaatatttgtcacagcaatgggctaaagcctctggaagaggtgaagttgggaaactgcggattgccaagactcaaggaaggactgaggtgtcatttactttgaatgaggatcttgcaaatattcatgatattggtggaaaaccagcttcagtcagtgctcctagagaacatccatttgtcttgcaaagtgttggaggacagacattaacagtatttactgagagctcatcagataagctgtcattggaaggaatagtggtacaaagagctgaatgccgaccagctgccagtgaaaactacatgcgattaaaaagattgcaaatagaagagtcttccaaaccagtgaggctatcacaacagctggacaaagttgtaacaaccaattacaaacctgttgctaatcatcaatacaatatcgaatatgaaaggaaaaagaaagaagacggaaagcgagctcgagctgataaacaacatgttttagacatgctattttcagcctttgagaaacatcaatactataatcttaaggacttggtggacatcacaaaacaacctgtggtgtacctgaaggaaatcttaaaagaaattggtgttcagaatgtaaaagggatccacaaaaacacatgggagctgaagccagagtacagacactatcaaggagaagaaaagagtgactaagaagactcctagccagcatgctagtgaaacgactagcagcgatgctatgcaaaaggcgctgatactggaaggcttgaacaccgtatgttaataggggttaagtgacagtactttgatttctctcggtaaattttttaaacctgtaattcttgtaaagtttcttaactgtttttttgaggagaaagaacagatttatttatagacttaacttgtattaaaccagattattcacagtaggaataggggttggaggattaagagggtttttcttaaatattagcttttaatgtgtacaattaggaaatttttttaagtgaggactctctacccttgccgtatctaaggagctgaggtaatacagatccaaggagaattgtatagcaagaaaaaaacagtcaactacagaaactcttaaaaggaataaaaacccaaagttccttattttgaaattgtcaaagaacaaagcggtgtttttcttttaaacaggtgatcacgtttcgtgttcatactcaacgttaataaaaggagagagtttgtagtgaaaaaaaaaaaaaa

SEQ ID NO: 863 - DNA, 472 bp, Homo sapiens
  CDS (190)..(354)
cttgatagctgttgcgcctgccggaccggtccggatttcccgggtcgacccacgcgtccggccataaaaaatatataaaacataggagattgggaagacatagggaagtcccctgaaagaataattcaatactatgggccagctacctgggcacaagatgggtcacggggatactgcactcctatttacatgcttaaccacatcataaggttgcaggcagtacttgaaatcatcatgaatgaaagagcaaatgcattagatttactggcccagcaaaccacaaaaatgagaaatgctaactatcagaacagattagctttagattacctcctagcccacgaaggaggagtatgaggaaagttcagtctaactaattgttgcctggaaattgatgacaatggaaaagcaattatggaaataactgcaagaatgagaaaattagcccatattccagttcacactttgaaagggg

SEQ ID NO: 864 - DNA, 4304 bp, Homo sapiens
  CDS (50)..(1180)
ccggtccggaattcccgggtcgacgatttcgtgacggtgtgtgcggaacatggcggagcgcggcaggaagcggccgtgcggcccgggtgaacacggccaaaggattgagtggcgaaaatggaagcaacagaagaaagaggagaaaaaaaaatggaaggatctcaagctgatgaaaaaactggagcggcagcgggcacaggaggaacaggcaaagcgcctggaagaggaggaggcagcggcagagaaggaggaccgcgggcggccctacacactgagcgtagccctgccgggctccatcctggacaatgctcagtcgccggagcttcgcacctacttggccggtcagattgccagagcctgtgccatcttctgtgtggatgagatcgtggtgtttgatgaggagggccaggatgccaagactgtggagggggaattcacaggagttgggaagaaggggcaggcgtgcgtacagctggcccggatcctgcagtacctggagtgtccacagtacctgaggaaggcgttcttccccaagcaccaggatctacagtttgcagggctcctgaaccccctggacagcccccaccacatgcgtcaggatgaggaatccgagttccgagagggcatcgtggtggatcggcccacccggccaggccacggctcctttgtcaactgtggcatgaaaaaggaggtgaagattgacaagaacctggagcccgggcttcgggtgactgtgcgactgaaccagcagcagcacccagactgcaagacctaccatggcaaagtggtatcatcgcaggaccctcgcaccaaagctggtctctactggggctacaccgtccgactggcttcctgcctcagtgctgtgtttgctgaggcccccttccaagatgggtatgacctgaccatcgggacgtcagagcgcggctcagatgtggcttctgcccagcttcccaacttcaggcatgctcttgtggtgttcgggggcctccagggtctggaagctggagcggatgctgaccccaacctggaggtggctgaacccagtgtcctctttgacctgtacgtcaatacctgtcctggccagggtagccgtaccatccgcacggaggaagccatcctcatctccctggccgccctgcagcctggcctcacccaggcgggtgcccggcacacctgaaagttctaaggggccgaggacatcagtgaagcagcagtgaaaccaggggctctgcaggtcacttgggacggacgccaccagacttgtctccaaaaatcaccacctttaatactccccggcctgcacacacccacagtctcactgggctccaccctcacttactgcccgccgtgatggccttgaggctgcctgcccgcgccaggatgtttggcacaaagagcagccccgaagcccgctcaatgctctcgatgggcaccaggaagcgctccagtgggatggcctcatccacaggtgcgttgggcatcacgtaggtgcggagctcaatttgcccacctgctgcctccaggatcagcaccttgaagaagtgtgtgggcactgccacgtggttcttgccgatgacctggtactttacgtaggatttcccatcagcctctgtcctgtgggcagacccaggcacacgtgggcagggggcctggatgaacccaaagccacctcttccaggcagccttccctgatctgtcctctaacttctgtcaacctgcaggaccacgccctcactgtgagacttctgtagcctgcctggctcctccttgaggctggaactctctccagggtggttaactctttccctctgttttccttatgcccaacactgggtcaggcagagtgggcgacaataaacgctgctaggagaatcgagccttctgaatattcacattcgtctgaggggagacttaacgactgtccatctctccccacagaggtgagcaacaagtgggcaaggaccatgacaggtgacatcccagcaccagcacaggtgccaggacaccggacgggggctccccctcagcagagtctcctcccttccaccaggccctaggaggcacctgctaatgaaatttgatcagtgccccaaccaccgccttggccagcctatgccgagcccttaccatggaccaggccctggggaagcatgtgacatcaaccaagaggtcacaggttttgcagagggggacacaggtcatttgcccacagcaccaaggaactaggtgatgaggcctggactccatcccgagcctgtggattccagagtgagctgctcagcctggacctgttgcctctcagccccagccctctgcaggccagaaaaaccacggagcacacccagaggtgctcagttgcttccacctgagaggcagggctgcacaggagcaagagtggaggccctgggtcaggcagatctagattcaaactcccgagaagggtggagggaagtgctccaagcagagcagagactgaaggcgggagagcctggtgcaccgcggacctgcagggggaaggcgtgagagctcggtgcactggggacctgcatggggaaggcgggagagctcggtgcactggggacctgcatggggaaggcgtgagagctcggtgcactggggacctgcatggggaaggcgggagagctcggtgcacctcggacctgcagagggaaggtgggagagcttggtgcaccgcagacctgcagggggaaggcgggagagcttggtgcactgcagacctgcggggggaaggtgggagagcttggtgcactgcagacctgcggggggttccatattggcagaacaagattgggtgggcatgccaagaggtgacagcagggagaagcgggggcagattcagggcctgctgctgcccatgggcagaggagagatggtcaggggtacccgacaggtctttggctgtggaggtggaatgaggggactcgaggcagggaagctgacaggcttgccaagaaaccagatgagtagggaactggtattgacccagagcctggggcaagcctggccctgtgagtggcagtaggggcctcgggtgagtgggaggttctgccgcccccctggtttccaccttacctgggcaggaagagtggccctgtgcagacatagacgttttggtagctgcgggtcaagctgcggctatatttctccaggttgttccaggcattctggttgaggtggggcacctggtaggagagatagggcttagcaggactgtggctgggacccttcctcctctatcagagggccgccccaggtcctgaggggatggacaggctcagagatatccagtgagacaagcggggggaaactgaggctcaaggaatgaaagtcactccctgaaacccagggctgatagagtgctagccaccaccctctgtccctcccacagcccaggtgtcaaagtcttttctcagctcccaagagtcgaatgaaggaagagcctgtctccacctttcagagaggactgaggcctgtccccagccccacccagggtctcctgggaagaccagcccttccaactaccaacccgttccttttcccagtctgagccacaggaagagcctagcggggaatgccatgaatcgacctccatcctgagctctccaggcctgggacaatggaaagtggatagggggctgtcttcccagaaggaagctgggtcagaggttggtgccccatgggctccacccagagccccatggcagtctccatccattggtgccaggacctgctgggaacaggctgagagggtggttggcccagtgcacagtgcctggcactaacaacctgatcgtgggccaggtgtctgcctcgaaactgcctgaaggcaggcagggtaggacaatgtctggaggctcacggttttatagactaggggtccccaacccctgggctacagaccggtaccagaaccgggccacacagcaggaggtgagcagcaggcgagcaagggaagcttcatctgtatttacagccacccccccattgatcccacagcagcctgagctccgcctcctgtcagatcagtggcggctggagattgtcataggagctggaaccctatggtgaactgcgcatgtgaggaggttgcgcgcttcttttgaaaacctaatgcctgatctgtcgttgttgcccatcacctccagataggactgtctagttgcaggaaaacaagctcagggctcccacggatcctacattactgtgagttgtatatttcactatatgttacaatgtaataataatagaaataaaatgtacataaatgtaaaaaaaaaaaa

SEQ ID NO: 865 - DNA, 1323 bp, Homo sapiens
  CDS (294)..(1229)
atttggccctcgaggccaagaattcggcacgagccatgcacaggtgcagctaccatataacaatccacacagttcctgacacatcataggccttcaatacatactttccagttgaattggaaagaaatgtgttaagtctcagttatgtcgtgatgcaaatgctcacaaaatatctgtttagggccatcttttcatcaaaagaattgtatctccgaatacttaacatcagcaatctgagtaaataaacttgctcatcaaggacaacttctttcttataattcttgtctgcaggcatgtctaattttactcattatgcctatctgcttatgatagagtcactgatgttggggaaagttcccccgcatgtccccagtcatcatttcatatttcatgatgatgggagtgccagacagaagggagagagtgattacaaggtcatcatacagcagtggttctcaaagagtggtccctggaccaccagcagcaatgttacctggggcttgttagaactgcaacaaagcatttctgaatcagctgttttaaccattcctccaggagattctggtgcaggctcaaatttgataaccatgtttctacgtaacagaaaagaaacagatctgtgcagtgggagaagtaaagtgaacagaggatggaattctggcagatgcaaacaaaggggcaagactgagcagcctggagagcccttggaacatgtgtatgtgactataaaacatgctgtagccctggaatcccgacatcaaaagggagagcttcagtgcctgataaaaatgtgcattcctcttagcaaaccactccaaatgttcttttctccaccccactgggaagcttggctgcagagagtacagcaacttgcgaaaaacacaagatacttcagacaaagactgcaggaaatgggattcattatctatggcaatgagaatgcttctgttgttcctctgcttctttatatgcctggtaaagtagcggcttttgcaaggcatatgctagagaaaaaaattggagtggtggtcgtgggatttccagccactcccctcgcagaagctcgggctcggttttgtgtttcagcggcacatacccgggagatgttagacacggttttagaagctcttgatgaaatgggtgatctcttgcaactgaaatattcccggcacaagaagtcagcacgtcctgagctctatgatgagacgagctttgaactcgaagattaagtttactggtcctgaatgacacataaagactttgcgagaaagacctccctccttgcctcacaaggaatataaatggatttctcccccttcctca

SEQ ID NO: 866 - DNA, 1035 bp, Homo sapiens
  CDS (571)..(858)
aggagctcgcggcttggaattcgcacgaggctcctaagaattctctaacctgccttctgcccttaggctccggtagattgcaaacgacctgctttctttctgatcccgggctgcgttcggacccctgtcgtatagaaaatcccaagtaaggtacctgccgtcggcagatctgagctttcttcttggacacctaatacccacagtcctccagacccctgtcggatagtaaatcccaagtaaggtaccttctgctggaagatctgagctttcttcttggacacctaaaacccacagtcctccagtgaaggatccagtgagattttccaggttaacggtcataatcgcctactggtccaacgttcagaagtaacacaggcacctggacaatacacagtagatgtggaaggacacggttgtacatttatccaggccacccttaagtacaatgttctcctacctaagaaggcatctggattttctctttccttggaaatagtaaagaactactcttcgactgcttttgacctcacagtgaccctcaaatacactggaattcgcaataaatccagtatggtggttatagatgtaaaaatgctatcaggatttactccaaccatgtcatccattgaagagcttgaaaacaagggccaagtgatgaagactgaagtcaagaatgaccatgttcttttctacttggaaaatggttttggtcgagcagacagtttccctttttctgttgagcagagcaaccttgtgttcaacattcagccagccccagccatggtctacgattactatgaaaaagaagaatatgccctagctttttacaacatcgacagtagttcagtttccgagtgagacaaagcaattactagaagagttggagaagcatttcttgtaacaaactgattcttctgtatcaaacctggaaaaaaatcatgaaccatctgacatcgtgaacagtctgcagtgggctatggtttcttgtcaagtcttatttccttatcatcccattaaatgttgtcattttgcaaa

SEQ ID NO: 867 - DNA, 3182 bp, Homo sapiens
  CDS (97)..(2307)
ctgtcgcgctctcctcggcgagcgcgctcccggcccgcgcgctccgggctccggtttctcccggctcctgtcagtgcggtgactgcgctgggaaacatggcgaccgagggaatgatccttactaaccacgaccatcaaatccgtgtcggagtccttacagtgagtgatagttgcttcaggaatcttgcagaagaccgcagtgggataaatctcaaagatctcgtacaagatccttctttgttgggtgggactatatcagcatacaagatagtaccagatgaaatagaagaaatcaaggaaaccctgatagattggtgtgatgaaaaggaacttaatttgatattaacaactggaggaacaggatttgcaccacgagatgtcactccagaggccacaaaagaagtaatagaacgggaagcaccagggatggccctggcaatgctgatgggatcacttaatgttacacctctgggcatgctctctaggcctgtatgtggaatcagagggaaaacgctcataattaacctgccaggtagcaagaaaggatctcaggaatgctttcaattcatactgccagctctacctcatgccattgaccttttacgtgatgccattgtaaaagtaaaggaggtgcatgatgaacttgaagatttgccttccccacctccccctctttcccctcctcctactaccagcccccataaacagacagaagacaaaggagttcaatgtgaggaagaggaagaagagaagaaagacagtggtgttgcttcaacagaagatagttcctcatcacatataactgcagcagccattgctgccaagattccagactccatcatttctcgtggtgttcaggtgctcccacgagacacagcctccctcagcactactccttcagaatcgcctcgtgctcaggctacatctcgcctctctacagcttcctgcccaacaccaaaagtccagtccaggtgcagcagcaaggagaacattctcagagccagtcacagtgctgtcgatatcaccaaggtggctagaagacatcgcatgtctccttttcctctgacatctatggacaaagcctttatcacagtcctggagatgactccggtgcttgggacagaaatcatcaattaccgagatggaatggggcgagtccttgctcaagatgtatatgcaaaagacaatttaccccccttcccagcatcagtaaaagatggctatgctgtccgagctgctgatggcccaggagatcgtttcatcattggggaatcccaagctggtgaacagccaactcagacagtaatgccaggacaagtcatgcgggttacaacaggtgctccaataccctgcggtgctgatgcagtagtacaagtggaagataccgaacttatcagggaatcagatgatggcactgaagaacttgaagtgcgaattctggtgcaagctcggccaggccaagatatcagacccatcggccatgacattaaaagaggggaatgtgttttggccaaaggaacccacatgggcccctcagagattggtcttctggcaactgtaggtgtcacagaggttgaagttaataagtttccagtggttgcagtcatgtcaacagggaatgagctgctaaatcctgaagatgacctcttaccagggaagattcgagacagcaatcgttcaactcttctagcaacaattcaggaacatggttaccccacgatcaacttgggtattgtaggagacaacccagatgacttactcaatgccttgaatgagggtatcagtcgtgctgatgtcatcatcacatcagggggtgtatccatgggggaaaaggactatctcaagcaggtgctggacattgatcttcatgctcagatccattttggcagggtttttatgaaaccaggcttgccaacaacatttgcaactttggatattgatggtgtaagaaaaataatctttgcactacctgggaatcctgtatcggctgtggtcacctgcaatctctttgttgtgcctgcactgaggaaaatgcagggcatcttggatcctcggccaaccatcatcaaagcaaggttatcatgtgatgtaaaacttgatcctcgtccagaataccatcggtgtatactaacttggcatcaccaagaaccactaccttgggcacagagtacaggtaatcaaatgagcagccgtctgatgagcatgcgcagtgccaatggattgttgatgctacctccaaagacagaacagtacgtggagctccacaaaggcgaggtggtggatgtcatggtcattggacggctatgatggtcaccagcaggagaaagctttgatgcatgtccacatatcattgactgtatcctgtaatatgcaacggcacagctagttttcccgatttggataaaagttgatctgtatagtcaacatcttgaactatatttcaaatgaatttaaatatcttttaaagaaaaaaacacctaaaaataaatcttaacagaaaattctgttctgattatatcaaggcaaatttttcctttcttgcaaattgctttgtgtgttcaatgctaggtctgatagcgatagcttttagtagacagcggtaggtgcctgcagaacttgtgtttttctcatctttaaaatacaactacttatgctcttaaatcaaggctgtctgcttatttatactagcgtaggcaacacttggatttcccttcttagtatgcttcataactgctttacagagagcttttgcttgttctttctcatgtatctcgtgtttatgtgcacagtgccaaaagaagactgactgggtggaggctctgccttgcctcaagaaccatcccctgcagagcatccagggaggtttctcgccccaatagcctcacggcacagtactcttgggcagtaactggacaccttttatttgaagaaacaaactgaagaaaaaatgcttccttaagtgctgacagcctttttaaccaatacatttaaaattgtacagaacaaaaaaataaaatcaaagactgatcttgtacagatattagtgttaccagcattcatgtggaaatcaagagcaaagacaaaataatgttaaacaattctgtaccataacattttctgtaatgatactgaaacttaatgaataaaaaaattccttgatcattatttaaaaaaaaaaaaaa

SEQ ID NO: 868 - DNA, 2582 bp, Homo sapiens
  CDS (130)..(2082)
cctaagctgggctatccctgcaatcatgtcatgctctcctgctgcgattttgattagcctctcatagtacctgaggatcgccgacctgcagagcccgcagctgcaccacggagagtttcagaggcagagatggcgggccgagaggccctgtcactgggcacagaggccgagctgccgaacagcctgccgggcgatgaccaggatgagtgccttctcctcccgggagagctgtgccagcacctttgcatcaatactgtgggttcttaccactgtgcctgctttcctggcttctcactgcaggacgatggccgcacttgccgcccagagggtcaccctccacagccggaagccccacaggagcctgcactgaagtcagaattttcccaggtggcctctaacaccatcccgctgccactgccgcagcccaatacctgcaaagacaatggaccctgcaagcaggtgtgcagcactgttgggggctcagccatatgctcctgttttcccggctatgccatcatggcggatggcgtgtcctgtgaagaccaagacgagtgcctgatgggtgctcacgattgtagccggcgacagttctgtgtgaacaccctgggatccttctactgtgtcaaccacacagtgctctgtgccgatggctatatcctcaatgcgcacaggaagtgcgtggacatcaacgagtgtgtgacggacctgcacacgtgcagccggggcgagcactgtgtgaacacactgggctccttccactgctacaaggcactcacctgtgagccaggctatgccctcaaggatggcgagtgcgaagacgtggatgagtgtgcgatgggcacgcacacctgccagccgggcttcttgtgccagaacaccaagggctccttctactgccaggccaggcagcgctgcatggatggcttcctgcaggatcctgaaggcaactgtgtggacatcaacgagtgcacgtcactgtccgagccatgtcggccaggcttcagctgcatcaacacggtgggctcctacacgtgccagaggaacccgctgatctgcgcgcgcggctaccacgccagcgatgatgggaccaagtgtgtggacgtgaatgagtgtgagacaggtgtgcaccgctgcggtgagggccaagtgtgccacaacctccctggctcctaccgctgtgactgcaaagccggctttcagcgggatgccttcggccggggctgcatcgacgtgaatgagtgctgggcctcgccaggccgcctgtgccagcacacgtgtgagaacacactcggctcctaccgctgttcctgcgcctccgggttcctgctagcagcggacggcaagcgctgtgaagacgtgaatgagtgtgaggcccagcgctgcagccaggagtgtgccaacatctatggctcctaccagtgctactgccgccagggctaccagctggctgaggatgggcacacctgcacagacatcgacgagtgtgctcaaggcgccggcatcctctgcaccttccgctgtctcaacgtgccagggagctaccagtgtgcatgccctgagcagggctacaccatgacggccaacgggaggtcctgcaaggacgtggatgagtgtgcactgggtacccacaactgttccgaggctgagacctgccacaacatccagggtagcttccgctgcctgcgcttcgagtgtcctcccaactatgtccaagtctccaaaacgaagtgcgagcgcaccacgtgccatgacttcctggagtgccagaactcgccagcgcgcatcacgcactaccagctcaacttccagacgggcctcctggtgcctgcgcatatcttccgcattggccccgcgccagccttcacaggggacaccatcgccctgaacatcatcaagggcaatgaggagggctactttggcacgcgcaggctcaatgcctacacgggtgtggtctacctgcagcgggccgtgctggagccccgggactttgccctggatgtggagatgaagctctggaggcagggctccgtcaccaccttcctggccaagatgcacatcttcttcaccacctttgccctgtgaggtgccagcacgggccacctgcgggtgtggcgcagcccagggctcacactgcgtgggagggactgggtcactattgtggtttttactataactttgtaaattaacttaattttgctgacttgactcctgtggcttctggacccctcctctgccccgcaggaggaagttccacggcaggtggtgcgttcccacgcaggcaccaagtggaagcttgcacggtgggccacggccgtggcgggtgccctgtgggtgaggctgggtgatgacctgaggaccagagacacgcgaccatgttggggctcttggactcctctggatgacccgtccccaaagttgacattccatttcatgttccactgtgattaattcttttcttttttaaaaaatcattttaaagttttttgtttaattataaagtagtacatgtacattataaaaaaaaaagttcaactagtatgaaagggttataaagtaacagaggaaaacaaaaaaaaaaaaaa

SEQ ID NO: 869 - DNA, 2441 bp, Homo sapiens
  CDS (130)..(1941)
cctaagctgggctatccctgcaatcatgtcatgctctcctgctgcgattttgattagcctctcatagtacctgaggatcgccgacctgcagagcccgcagctgcaccacggagagtttcagaggcagagatggcgggccgagaggccctgtcactgggcacagaggccgagctgccgaacagcctgccgggcgatgaccaggatgagtgccttctcctcccgggagagctgtgccagcacctttgcatcaatactgtgggttcttaccactgtgcctgctttcctggcttctcactgcaggacgatggccgcacttgccgcccagagggtcaccctccacagccggaagccccacaggagcctgcactgaagtcagaattttcccaggtggcctctaacaccatcccgctgccactgccgcagcccaatacctgcaaagacaatggaccctgcaagcaggtgtgcagcactgttgggggctcagccatatgctcctgttttcccggctatgccatcatggcggatggcgtgtcctgtgaagacatcaacgagtgtgtgacggacctgcacacgtgcagccggggcgagcactgtgtgaacacactgggctccttccactgctacaaggcactcacctgtgagccaggctatgccctcaaggatggcgagtgcgaagacgtggatgagtgtgcgatgggcacgcacacctgccagccgggcttcttgtgccagaacaccaagggctccttctactgccaggccaggcagcgctgcatggatggcttcctgcaggatcctgaaggcaactgtgtggacatcaacgagtgcacgtcactgtccgagccatgtcggccaggcttcagctgcatcaacacggtgggctcctacacgtgccagaggaacccgctgatctgcgcgcgcggctaccacgccagcgatgatgggaccaagtgtgtggacgtgaatgagtgtgagacaggtgtgcaccgctgcggtgagggccaagtgtgccacaacctccctggctcctaccgctgtgactgcaaagccggctttcagcgggatgccttcggccggggctgcatcgacgtgaatgagtgctgggcctcgccaggccgcctgtgccagcacacgtgtgagaacacactcggctcctaccgctgttcctgcgcctccgggttcctgctagcagcggacggcaagcgctgtgaagacgtgaatgagtgtgaggcccagcgctgcagccaggagtgtgccaacatctatggctcctaccagtgctactgccgccagggctaccagctggctgaggatgggcacacctgcacagacatcgacgagtgtgctcaaggcgccggcatcctctgcaccttccgctgtctcaacgtgccagggagctaccagtgtgcatgccctgagcagggctacaccatgacggccaacgggaggtcctgcaaggacgtggatgagtgtgcactgggtacccacaactgttccgaggctgagacctgccacaacatccagggtagcttccgctgcctgcgcttcgagtgtcctcccaactatgtccaagtctccaaaacgaagtgcgagcgcaccacgtgccatgacttcctggagtgccagaactcgccagcgcgcatcacgcactaccagctcaacttccagacgggcctcctggtgcctgcgcatatcttccgcattggccccgcgccagccttcacaggggacaccatcgccctgaacatcatcaagggcaatgaggagggctactttggcacgcgcaggctcaatgcctacacgggtgtggtctacctgcagcgggccgtgctggagccccgggactttgccctggatgtggagatgaagctctggaggcagggctccgtcaccaccttcctggccaagatgcacatcttcttcaccacctttgccctgtgaggtgccagcacgggccacctgcgggtgtggcgcagcccagggctcacactgcgtgggagggactgggtcactattgtggtttttactataactttgtaaattaacttaattttgctgacttgactcctgtggcttctggacccctcctctgccccgcaggaggaagttccacggcaggtggtgcgttcccacgcaggcaccaagtggaagcttgcacggtgggccacggccgtggcgggtgccctgtgggtgaggctgggtgatgacctgaggaccagagacacgcgaccatgttggggctcttggactcctctggatgacccgtccccaaagttgacattccatttcatgttccactgtgattaattcttttcttttttaaaaaatcattttaaagttttttgtttaattataaagtagtacatgtacattataaaaaaaaaagttcaactagtatgaaagggttataaagtaacagaggaaaacaaaaaaaaaaaaaa

SEQ ID NO: 870 - DNA, 970 bp, Homo sapiens
  CDS (231)..(452)
ttgcccactgacccggcagttatgagcctggctttggcactcccagctttgtgactttgggtgagccttacagcccctgagtcctacacccagaaggtggctgagggaactgaggccagcatttttcctcctgcccctgggggtttggggccggcttctcccctcttgtgaagcacaaagtcccctccccacctacccttcctgcagatggcttctcaaactcgggcatcatggaagagcgccccctagacgcagtggtgcccttcctcccgctccagcggcaccacgtccggcactgcgtgctcaacgagctggcccagctgggcctggagccaagggatgaggttgtccaggctgtgctggacagcaccaccttcttccctgaagacgagcagctcttctcctccaacggctgcaagaccgtggcctcccgaatcgccttcttcctctgactctctgagtggtgtcctcggcccccctgatggccaggccatgcaggaaaggccaggggcctctgtcacaggaacccagagcaccaagtgagatgaacggagtgtcggctaggccacgggacagatggccaggaagggccctggcctctaaactggctcgagagcatcttggccccggccaccttccccagggaaacccctggtcaccccagaacctcactgagccttgacctccccctgcagcctgagccttcttactgtgaattataactcagggactgtggctcgtggcggtgctccctcctcagtctgccacccttgccccttgcctccttggtcgggcaccatacctcctcccctccaccccacaccctgtgtccatatcaagccaggtggagccttctcagtttccagaaatggagggactcaagctgccacttgggcctggttttagatgtttttaattttgtaaaagaaaacaagtataataaactcagctgtgggaccagaaaaaaaaa

SEQ ID NO: 871 - DNA, 6813 bp, Homo sapiens
  CDS (102)..(3752)
gaagcagagaagggaggccgcgccacgcgctccgcgccccgcgcagtgtccccagtacatggcgcgctcgccgagtcgactcgaagcccagatgagcccagatgcccggggctcaacccggagtgcacgccttgcaactcaagcccgtgtgcgtgtcggacagcctcaagaagggcaccaaattcgtcaagtgggatgatgactcaactagtgttactccaattattgtgaggactgaccctcagggatttttcttttactggacagatcaaaacaaggagacagagctactggatctcagccttgtcaaagatgccagatgtgggagacacgccaaagctcccaaggaccccaaattacgtgaacttttggatgtggggaacatcgggcgcctggagcagcgcatgatcacagtggtgtatgggcctgacctcgtgaacatctcccatttgaatctcgtggctttccaagaagaagtggccaaggaatggacaaatgaggttttcagtttggcaacaaacctgctggcccaaaacatgtccagggatgcatttctggaaaaagcctatactaaacttaagctgcaagtcactccagaagggcgtattcctctcaaaaacatatatcgcttgttttcagcagatcggaagcgagttgaaactgctttagaggcttgtagtcttccatcttcaaggaatgattcaatacctcaagaagatttcactccagaagtgtacagagttttcctcaacaacctttgccctcgacctgaaattgataacatcttttcagaatttggtgcaaaaagcaaaccatatcttaccgttgatcagatgatggattttatcaaccttaagcagcgagatcctcggcttaatgaaatactttatccacctctaaaacaagagcaagtccaagtattgattgagaagtatgaacccaacaacagcctcgccagaaaaggacaaatatcagtggatgggttcatgcgctatctgagtggagaagaaaacggagtcgtttcacctgagaaactggatttgaatgaagacatgtctcagcccctttctcactatttcattaattcctcgcacaacacctacctcacagctggccaactggctggaaactcctctgttgagatgtatcgccaagtgctcctgtctggttgtcgctgtgtggagctggactgctggaagggacggactgcagaagaggaacctgtcatcacccatggcttcaccatgacaactgaaatatctttcaaggaagtgatagaagcaattgcggagtgtgcatttaagacttcaccttttccaattctcctttcgtttgagaaccatgtggattccccaaagcagcaagccaagatggcggagtactgccgactgatctttggggatgcccttctcatggagcccctggaaaaatatccactggaatctggagttcctcttccaagccctatggatttaatgtataaaattttggtgaaaaataagaagaaatcacacaagtcatcagaaggaagcggcaaaaagaagctctcagaacaagcctccaacacctacagtgactcctccagcatgttcgagccctcatccccaggagccggagaagctgatacggaaagtgacgacgacgatgatgatgatgactgtaaaaaatcttcaatggatgaggggactgctggaagtgaggctatggccacagaagaaatgtctaatctggtgaactatattcagccagtcaagtttgagtcatttgaaatttcaaaaaaaagaaataaaagttttgaaatgtcttccttcgtggaaaccaaaggacttgaacaactcaccaagtctccagtggaatttgtagaatataacaaaatgcagcttagcaggatatatccaaaaggaacacgtgtggattcatccaactatatgcctcagctcttctggaatgcaggttgtcagatggtggcacttaatttccagacaatggacctggctatgcaaataaatatggggatgtatgaatacaacgggaagagtggctacagattgaagccagagttcatgaggaggcctgacaagcattttgatccatttactgaaggcatcgtagatgggatagtggcaaacactttgtctgttaagattatttcaggtcagtttctttctgataagaaagttgggacttacgtggaagtagatatgtttggtttgcctgtggatacaaggaggaaggcatttaagaccaaaacatcccaaggaaatgctgtgaatcctgtctgggaagaagaacctattgtgttcaaaaaggtggttcttcctactctggcctgtttgagaatagcagtttatgaagaaggaggtaaattcattggccaccgtatcttgccagtgcaagccattcggccaggctatcactatatctgtctaaggaatgaaaggaaccagcctctgacgctgcctgctgtctttgtctacatagaagtgaaagactatgtgccagacacatatgcagatgtcatcgaagctttatcaaacccaatccgatatgtgaacctgatggaacagagagctaagcaattggctgctttgacactggaagatgaagaagaagtaaagaaagaggctgatcctggagaaacaccatcagaggctccaagtgaagcgagaacgactccagcagaaaatggggtgaatcacactacaaccctgacacccaagccaccctcccaggctctccacagccagccagctccaggttctgtaaaggcacctgccaaaacagaagatcttattcagagtgtcttaacagaagtggaagcacagaccatcgaagaactaaagcaacagaaatcgtttgtgaaacttcaaaagaaacactacaaagaaatgaaagacctggttaagagacaccacaagaaaaccactgaccttatcaaagaacacactaccaagtataatgaaattcagaatgactacttgagaaggagagccgctttggaaaagtccgccaaaaaggacagtaagaaaaaatcggaacccagcagccctgatcatggttcatcaacgattgagcaagacctcgctgctctggatgctgaaatgacccaaaagttaatagacttgaaggacaaacaacagcagcagctgcttaatcttcggcaagaacagtattatagtgaaaaataccagaagcgagaacatattaaactgcttattcaaaagttgacggatgtcgcagaagagtgtcagaacaatcagttaaagaagctcaaagaaatctgtgagaaagaaaagaaagaattaaagaagaaaatggataaaaagaggcaggagaagataacagaagctaaatccaaagacaaaagtcagatggaagaggagaagacagagatgatccggtcatatatccaggaagtggtgcagtatatcaagaggctagaagaagcgcaaagtaaacggcaagaaaaactcgtagagaaacacaaggaaatacgtcagcagatcctggatgaaaagcccaagctgcaggtggagctggagcaagaataccaagacaaattcaaaagactgcccctcgagattttggaattcgtgcaggaagccatgaaaggaaagatcagtgaagacagcaatcacggttctgcccctctctccctgtcctcagaccctggaaaagtgaaccacaagactccctccagtgaggagctgggaggagacatcccaggaaaagaatttgatactcctctgtgaatgctcctgccaggccttcagaaattgcatggccactccagcgtcatcggactctctcttattacaaagatcactgcccaggaccatcttcccgagaagcatcccttagcctaaaatccacaccaaagggagagttccagaggaatccatgaagaattcccatgcccaggctccatgtgtcatgtggaaacctccacaggtctgctagtgaagaatgcatgtatgtgagatttttgttttctttccaatagcaaattcaaagcaagcaacttgcaggctccatggaacttttaatgaaggacagtgtcttctttgaagaaaatcaagctcgtgtttttattcgaagctctggtgtaaaatatttcaaagtcatagaaatagtttgagaaatgcatagcattatttaacactattgaacagccgactttgagcattgtttcttctaactgcccctcaactaccattatcttcaagtcaacatgcatattacattttcatcctttgctttgcaagcactggtggcttgcagtttgctaatttatttatcatagagtcatcaatgtatttgttgctgacatggttttattagatactgtagtgattcaaataagttttctatttgaaaaaaaaaatcacttgattgtatccttgcccagtgaagccatcctaagacttagcaatatggattgtacatttggctgcatgagcaagtcggccgcacacttccagacagtgtgctgtttgaattgactatttgcactcaaagtctgggtattcattggttattggcctgaaatgatcaaataactacaaatgatctgttgaataaaaatagttgagctgatatatgttaagcagatattcaatcagaatgaacaggttccggtggttattttgccgtttgacattttttatggttcatttatttttaatatagagaggaagattgaatatttatctagagaatacaaagacccacatgtaaatgataggtattatctccatgtatatatgtacccacttagtcatgtaagtgcatatacacatacacacacatgagtgtagacatgtgtttattaattgacaatgacccaaatctcttccacaagacttaaaaccaaattcagggacaaatggatagagaagaaaagggtcaaacatcgagattacatggatgttaaattatatggagacgctaagaaataattgatggagccattgatgcaaaccgaagtagatttagaacttatatgaatttgatttatattttgcaagatcaaaaattagatgttaagtatcagattttaagcttgttttaatggtcaaaaaattaggacagaaataatatggacatttattagtatcttccataatttttaagtctgacacatttctattttattctaacataaaaaaacttccattatatatttactaagtatatttaattcacttaactctgtctttataagttcctattttagatggaataagagaaacaaattatatcaaggtaaaactgatcaaaagcataattgaaagttctgaaaaaaaaaaaataataatatgtagaaaaatgtaacttagagagtaacacatgaacattgaagttaaaacccagaagccagatgctcacagttttattttactttaaaataaacctgtctgactgtagctttgcgaaatatcttaaaacgcaaaaaccagttgtgtcctgaaaattgtttcaagaatttaatatttttatgaaaattattttatttaactttaagcaataactagagattacaattaaattttaatcaaaatgaaggcttagttcaaacataaggaaacagtgtttgattaaaaaaaacacatctagtaagacgtaaggggaaaatcacatcctctttggagatgattatattttgatctgaagggtttggggtgttcattagacacttaataaaacttaacttccaatgaaaaagaaatcttttgtaaatcattctacttttgcactttgaaagaaaggcgttaatcataaagaagcaagaatggtcaaaatcgaatgctgcatttttataaacaaaattacagactgtctgaaattgaagaagaatgaactaataatagcattcataaccaaacacaatgatgattattgcagaacattgtatcacattttagtccagagatagaataaagttgaataaccttgacttacacaaaactgttttggtagttggatttcattatcttagtgaatttagtcattttacaatatgtttgtatttggccatttactgtaatcacatttttatatctgtacaatgacactttttgcagttgtggggtagtgtgtaacactgtccatcttgcatcattgaaactactacaatgatactatcatttaataatattaatattacttgaaatagactaagataaagaaaaggggtctgtatgatgtgcagttttgtgcctttatgtatttgccttgttctttgtcgaatgtgtgaaattctgtactgtggtttttcctataatagaaagtagagctgtgtattaaattagactgtgtctctctgatacctttacactactgagaatagcatggttttggccatgtaaaccaattttcaaagttctaatgacatagccatgtgtttttggttttttatatttcattttaaaatttgagtatcaccatacattaattaatactcctgtagtagataagctgtcattaagtaattcccaaaaaaagggccatttgcttgcattactttgaatttaatgttgcgcttgtgcactgtgttaatattgtttgtgatggattggacgttgtgactcttgccttttaagaagaaaaaaaagataggacaaagtatttgaagctcttaaaatgtacatattttggttcttctatctcaaattatttaaaatgcataattcacatttttgtaataattctatgcaattttgtggcatgatgtttcttccacttgtaattttatgtgctttcatcacaaatccaaaggaaagaataaaaatttcttaacacaaaaaaaaaaaa

SEQ ID NO: 872 - DNA, 911 bp, Homo sapiens
  CDS (357)..(908)
cgtaatggggggggggaaggaaaaaatgatttgcaagctgtacgcctgccgtaccggtccggaattcccgggtcgacgatttcgtctgtctctaaataaataaataaaaatattatagcagtatactttgttctatcacattatatgcaagattattattaaatcatgtacttgattacagatctgtctaacttgactagctcctaagttttttggttaattgtggatcatgagtttcttgagggcaaagcccatgtctatctctagcacagtacaatgcctggaacacagtacatacttttcatttctgacttaattaaaaagaaggttcactcagcttttccctgaatctttaaatgaaatttgatttttattctttctttgatggtacagcaaagcgtagaaggttttcctccaaaccagttgtactcacagaagcccagaaacaacttatgatatgccacctacctcaggttctcagactgcacctcaaacgattcaggtggtcaggacgtaataaccgagagaagattggtgttcatgttggctttgaggaaatcttaaacatggagccctattgctgcagggagaccctgaaatccctcagaccagaatgctttatctatgacttgtccgcggtggtgatgcaccatgggaaaggatttggctcagggcactacactgcctactgctataattctgaaggagggttctgggtacactgcaatgattccaaactaagcatgtgcactatggatgaagtatgcaaggctcaagcttatatcttgttttatacccaacgagttactgagaatggacattctaaacttttgcctccagagctcctgttggggagccaacatcccaatgaagacgctgatacctcgtctaatgaaatccttagctgatcc

SEQ ID NO: 873 - DNA, 603 bp, Homo sapiens
  CDS (120)..(527)
cacacctacagtatagggaatttgcgccctcgaggcaaagaattcggcacgagggttaggttcccggttgcgggacagtttttttttcttttttaaaacagacacagctactgagtgcaatgccgcctccacagaaaatcccaagcgtcagacccttcaagcagaggaaaagcttggcaatcagacaagaggaagttgctggaatccgggcaaagttccccaacaaaatcccggtggtagtggagcgctaccccagggagacgttcctgcccccgctggacaaaaccaagttcctggtcccgcaggagctgaccatgacccagttcctcagcatcatccggagccgcatggtcctgagagccacggaagccttttacttgctggtgaacaacaagagcctggtcagcatgagcgcaaccatggcagagatctacagagactgcatccagccatataaccgtattctaaataagaaatggttggcttgtgtgatggttttgtgtaatgagctagagataatattttaagtgtcttctgtggtatatgtgggagggccattaaggagtgggtttcactccctgcatgtgggcaggtgtccatcta

SEQ ID NO: 874 - DNA, 1739 bp, Homo sapiens
  CDS (380)..(1654)
agtccggaattcccgggtcgacccacgcgtccgcccacgcgtccgataaaaaatgtttgtcatctactattcaagacaatcattatttttctggaaattgtatctgttttcaaggttatatgtaaagtgttaagacaatatcctataaaatgcatttttaggaagttttgcattactttcttcctaagtcttggtaaagttatataattagtaccttgaaaaaaataaagtgaaaagccttttggggactttagactttagtgtttaaatgtaattatttttatttgtttttggtttattttttatttttattttttttggccgtggttataatcttcagcatctgcaagaaggacgaaaagctcaacaatatcttgacatgtgctggaaacagatggataatagtaaaaagaagtttgaaagagaatgtagagaggcagaaaaggcacaacagagttatgaaagattggataatgatactaatgcaaccaaggcagatgttgaaaaggccaaacagcagttgaatctgcgtacgcatatggccgatgaaaataaaaatgaatatgctgcacaattacaaaactttaatggagaacaacataaacatttttatgtagtgattcctcagatttacaagcaactacaagaaatggacgaacgaaggactattaaactcagtgagtgttacagaggatttgctgactcagaacgcaaagttattcccatcatttcaaaatgtttggaaggaatgattcttgcagcaaaatcagttgatgaaagaagagactctcaaatggtggtagactccttcaaatctggttttgaacctccaggagactttccatttgaagattacagtcaacatatatatagaaccatttctgatgggactatcagtgcatccaaacaggagagtgggaagatggatgccaaaaccacagtaggaaaggccaagggcaaattgtggctctttggaaagaagccaaagggcccagcactagaagatttcagtcatctgccaccagaacagagacgtaaaaaactacagcagcgcattgatgaacttaacagagaactacagaaagaatcagaccaaaaagatgcactcaacaaaatgaaagatgtatatgagaagaatccacaaatgggggatccagggagtttgcagcctaaattagcagagaccatgaataacattgaccgcctacgaatggaaatccataagaatgaggcttggctctctgaagtcgaaggcaaaacaggtgggagaggagacagaagacatagcagtgacataaatcatcttgtaacacagggacgagaaagtcctgagggaagttacactgatgatgcaaaccaggaagtccgtgggccaccccagcagcatggtcaccacaatgagtttgatgatgaatttgaggatgatgatcccttgcctgctattggacactgcaaagctatctacccttttgatggacataatgaaggtactctagcaatgaaagaaggtgaagttctctacattatagaggaggacaaaggtgacggatggacaagagctcggagacagaacggtgaagaaggctacgttcccacgtcatacatagatgtaactctagagaaaaacagtaaaggtgcagtaacttatatctaaactaaccaggcacctttgtgccatgtgtgacataggaagagtaacataaaatgaaaacacattcaacaggttgaaaaaaaaaaaa

SEQ ID NO: 875 - DNA, 1212 bp, Homo sapiens
  CDS (333)..(689)
atttggccctcgaggccaagaattcggcacgagcccagttttgtttttattacaagagtagttacaggggcagagtaagtgtccccagttctcttcctgctaagtgagtttgtttaagcatcttaaacacgtggcatggaagaccagaagagaagtggaatcctcagacctcaagctttttgcaagtgttggtgtctgtccagtcccttatattagtagctgagccttattttaatgaaccgggatatgaacggtctagaggcactcccagtggcacacagagttctcgagaatatgatggaaacattcgacaagcaacagttaagtgggcaatgctagaacaaatcagaaacccttcaccatgttttaaagaggtaatacacaaacatttttacttgaaaagagttgagataatggcccaatgtgaggagtggattgcggatatccagcagtacagcagtgataagcgggtaggcaggactatgtctcaccatgcagcagctctcaagcgtcacactgctcagctccgcgaagagttgctgaaacttccctgccctgaaggcttggatcctgacactgacgatgccccagaggtgtgcagagccacaacaggtgctgaggagactctaatgcatgatcaggttaaacccagcagcagcaaagaactccccagtgacttccagttatgagctgcattgatgtggacttcatagacacaaaggcttcgaagcacaagccaaatatgtcaatatttgtatgtaagaaactaattatgtaataggtaatgaaactgaaactatactatgcccttaaggagatccagtttaattcaaggtgatcttttatttacctgtacaggagtgtaaacttttttgtgcttttatttttcaattgtgagaaccactgattggtatgttcaacaaatttgtgtatacaaagaaatggataaatcactgctatataagggaaactaccttaggaaagaatgtttactgaatgtttattttatttttttttttttttactatagagtgaggggttgttaacaaagaatatatattggtcattcttacaactactatttaaagtcagcaacttttcactgaatttgatagattttatgtttggccatatcttcatgctcacatttgatttctgaagacctcctacatacacttcaataaaagttaaatggacataaaaaaaaaaaaa

SEQ ID NO: 876 - DNA, 4092 bp, Homo sapiens
  CDS (465)..(2636)
ggattttttctgaaccagccaggaaataccggaacccaccaaactttaaacaccagcctaaattattcctgttcttttaagcaggcagcagaaatgacagaaacccgttaacagaaaaaaaaaaaataatgcttttcatttgaactcctgtgcattttctttttaacttatatgtgttcctaattttccttactctttttgtttgtttgtttcttagtgtggtttattgacaatcatttacaatgccgaagagtgctgtagtgagccagcacagtgggtaacacagcaacggagaacagatgcaggtttgaggaatttaacttgctaaaaccttgaactgaagtcttagagattggaacatacgggtttgtataaataggcttttaagccctgtttgcaatgggttactgataggagaaacttgcttgtggaatgtcagctgcgtgagctcactgtcagacaagatggaagaagaagggctggagtgtccaaactcttcctctgaaaaacgctattttcctgaatccctggattccagcgatggggatgaggaagaggttttggcctgtgaggatttggaacttaacccctttgatggattgccatattcatcacgttattataaacttctgaaagaaagagaagatcttcctatatggaaagaaaaatactcctttatggagaacctgcttcaaaatcaaatcgtgattgtttcaggagatgctaaatgtggtaagagcgctcaggttcctcagtggtgtgctgaatattgtctttccatccactaccagcacgggggcgtgatatgcacacaggtccacaagcagactatggtccagctcgccctgcgggtggcggatgaaatggatgttaacattggtcatgaggttggctacgtgatccctttcgagaactgctgtaccaacgaaacaatcctgaggtattgtactgatgatatgctgcaaagagaaatgatgtccaatccttttttgggtagctatggggtcatcatcttagatgatattcatgaaagaagcattgcaaccgatgtgttacttggacttcttaaagatgttttactagcaagaccagaactgaagctcataattaactcctcacctcacctgatcagcaaactcaattcttattatggaaacgtgcctgtcatagaagtgaaaaataaacaccctgtggaggttgtgtaccttagtgaggctcaaaaggattcttttgagtctattttacgccttatctttgaaattcaccactcgggtgagaaaggtgacattgtagtctttctggcctgtgaacaagatattgagaaagtctgtgaaactgtctatcaaggatctaacctaaacccagatcttggagaactggtggttgttcctttgtatccaaaagagaaatgttcattgttcaagccactcgatgaaacagaaaaaagatgccaagtttatcaaagaagagtggtgttaactactagctctggagagtttttgatctggagcaactcagtcagatttgttatcgatgtgggtgtggaaagaagaaaggtgtacaacccgagaataagagcaaactcgctcgtcatgcagcccatcagccagagccaggcagagatacgcaagcagattcttggctcatcttcttcaggaaaatttttctgcctgtacactgaagaatttgcctccaaagacatgacgccactgaagccagcagaaatgcaggaagccaacctaacaagcatggtgctttttatgaagaggatagacattgcgggcctaggccactgtgacttcatgaacagaccagcaccagaaagtttgatgcaggcattggaagacttagattatctggcagcactggataatgatggaaatctttctgaatttggaatcatcatgtcagagtttcctcttgatccacaactctcgaagtctatcttagcgtcctgtgaatttgactgtgtagatgaagtgctaacaatcgcagccatggtaacagctccaaattgcttttcacatgtgccacatggagctgaagaggctgccttgacttgttggaagacatttttacatcccgaaggagatcactttaccctcatcagcatttacaaggcttaccaagacacaactctgaattctagcagtgagtactgtgtggaaaagtggtgtcgtgattacttcctcaactgttcagcactcagaatggcagatgttattcgagctgaactcttagaaattatcaagcgaatcgagcttccctatgcagaacctgcttttggctccaaggaaaacactctaaacataaagaaagctcttctgtccggttactttatgcagattgctcgggatgttgatggatcaggtaactacttaatgctgacacataagcaggttgctcagctgcatcccctgtctggttactcaatcaccaagaagatgccagagtgggtcctcttccataaattcagcatttctgagaacaactacatcaggattacctcagaaatctctcctgaactatttatgcagctggtaccacaatactatttcagtaatctgcctcctagtgaaagtaaggacattctacagcaagtagtgggatcacctatcccctgtgtcaacaatgaataaggaacagcaaatgtgtgagacgtgccctgaaactgaacagagatgcactctccagtgactccccagcaaacacaaggtgcagcagggtcccaaaggtagctggatggctgaactgctggatatgggagatacatgacgcgaagacggatttcacatccacaggacggtcttgaagaaaataacactgtgtatattattttaaaataaaaaatagaagtttttattgagttctttaaattacgactccatgcttttcttcttcttggaaaagtttttaaatcaaccactcataatttgaccaaaattttaaaaaactggtattttgtaaatgtgtcagagacacatgggacagaaccctactttttgtagaggaacttaatctgaataaagtctgagtttttcagtaaatctccactgagttttctggtaattttacaaaaacaagcccatcactgtccattggaaatgggttagacagatagatattctttcagtttatccatgatttcgttcatcttgtcgcctggaattaacatcacagttcgcaagggcgtcattggtacgtcatcaaaagaccatttgcctcccagacaagtgtcgctctcctcctgcactgagtagttgaacttgagaattgccttctcatagaaaaattcttcctctgcatttgcaaacattaacgcagctttctttttgttgctaggtttctttttggaattgttttttcctgcttccacaaatgtcttactaatcagaaggtaaaagtagcacttcccacatggcttattggttctgtgtgcccccgccagttctttctgaagctgctggtacatgggcagagcgatctgtggagggacattaatgaatctttcacttaggagaaggcccacaggcttggtggtgtcatttaaaaacttgtccagctgttcaaccatgctcttttcacagttcttctcacagaagcgtagaaccaactcttgaatttgttcaacacactgggtaccctttctttcagttaaatttaaaaggcttatgaaaccaaaaacctcatcttcatccatatcatcattgctgtcttctgaaacatccgtttgcttaatcacactcccaatatggttctgttgaattaagagatctgttagttctgcagtgttcacaggagcctttagaaaaagctgctgcagtaatttcttaattccgtcataatcattatctgatagggaataagcttcaaattcaatattcacttcctcgtcaatgacctcgtcctcttcatccttttccttgtcactgtcatcatcgtcttcatcctcattttcgacttctttttcctcttcctcgtcgcgctggactgggggatccggcggctgcggaaccccactttccacggcacgccgcttaggaaatcgtcgacccgggaattccggaccggtacctgcaggcgtaccagctt

SEQ ID NO: 877 - DNA, 6103 bp, Homo sapiens
  CDS (238)..(5331)
ggctgaggcggcgcggcggagccctgagcggctgtgacaggctacgcaacaggttcgcgggcggcggcctgacgaccaagccagctgcagtggcggcgacggcggcagagcagggtctccccgcgcctgcccgcgcccaggctgccggtgctgagggacgcggagtcgcgctgtgacgagcgggaggcgcggcgagggcgccagatggctgagagctagcaaggaaaactcaggaccatgatggctcagtttcccacagctatgaatggagggccaaacatgtgggctattacctctgaagaacgtactaagcatgacaggcagtttgataacctcaaaccttcaggaggttacataacaggtgatcaagcacgtaattttttcctacaatcaggtctgccggcccctgttttagctgaaatatgggctttatcagacctaaacaaggatgggaagatggatcagcaagagttctccatagctatgaaactcatcaaactgaagcttcaaggccaacagttgcctgtggttctccctcctattatgaagcaaccccctatgttttctccattaatttctgctcgttttggaatgggaagcatgcccaatctgtccattcctcagccattgcctccagctgcacctataacatcattgtcttctgcgacttcagggaccaaccttcctcccttaatgatgcccactcccctagtgccttctgttagcacatcatcattaccaaatggaaccgccagtctcattcagcctttacccattccttattcttcttcaacattgcctcatgggtcatcttatagtctgatgatgggaggatttggaggtgctagtatacagaaagcgcagtctctgattgatttaggatctagtagctcaacttcctcgactgcttcactctcagggaactcacccaagactgggacctcagagtgggcagttcctcagcctacaagattaaaatatcggcaaaaatttaatactcttgacaaaagtatgagtggatatctctcaggttttcaagctagaaatgcccttcttcagtcaaatctttctcaaactcagctggctactatttggactctggctgacgttgatggtgatggacagctaaaagcagaagagtttattcttgcaatgcaccttactgacatggccaaagctggacagccattaccactgactttacctcctgagcttgttcctccatctttcagaggaggaaagcaaattgattccattaatggaactctgccttcatatcagaaaatgcaagaagaggagcctcagaagaaattaccagttacttttgaggacaaacggaaagccaactatgagcgagggaacatggagctggaaaagcgacgccaagccttgatggagcagcaacaaagggaggcagaacgtaaagcccagaaagaaaaggaagagtgggaacgaaaacagagagaattacaagaacaagaatggaagaaacaacttgaattagaaaaacgcttagagaagcaacgggaattggagagacaacgagaggaagaaaggagaaaagacatagaaagacgagaggcagcaaaacaggaacttgaacgacaacgtcgcttagaatgggagagaattcggcgacaggagcttctcaatcaaaagaatagagaacaagaagaaattgtcaggttaaactctaaaaagaagaatcttcatcttgagttggaagcactgaatggcaaacatcagcagatctcaggcagacttcaggatgtccgactcaaaaagcaaactcaaaagactgagctggaagttctggataagcagtgtgacttggaaattatggaaatcaagcaacttcaacaggaacttcaggaatatcagaataagcttatctatctggtacctgagaagcaattattaaatgaaagaattaaaaacatgcagttcagtaacacacctgattcaggggtcagtttacttcataaaaaatcattagaaaaggaagaattatgccaaagacttaaagaacagttagatgctcttgaaaaagaaactgcatctaagctgtcagaaatggattcttttaacaatcaactaaagtgtgggaatatggatgactctgttcttcagtgccttttgtctctgctaagctgtctcaacaacctcttcctcttacttaaggaactgagagaaacctacaacacacagcagttagcccttgaacagctttataagatcaaacgtgacaagttgaaggaaattgaaaggaaaagattagaactaatgcagaaaaagaaactagaagatgaggctgcaaggaaagcaaagcaaggaaaagaaaacttatggaaagaaaatcttagaaaggaggaagaagaaaaacaaaagcgactccaggaagaaaaaacacaagaaaaaattcaagaagaggaacggaaagctgaggagaaacaacgtaaggataaggatactttgaaagctgaggagaaaaaacgtgagacagctagtgttttggtgaattatagagcattatacccctttgaagcaaggaaccatgatgagatgagttttaattctggagatataattcaggttgatgaaaaaaccgtaggagaacctggttggctttatggtagttttcaaggaaattttggctggtttccatgcaattatgtagaaaaaatgccatcaagtgaaaatgaaaaagctgtatctccaaagaaggccttacttcctcctacagtttctttatctgctacctcaacttcctctgaaccactttcttcaaatcaaccagcatcagtgactgattatcaaaatgtatctttttcaaacctaactgtaaatacatcatggcagaaaaaatcagccttcactcgaactgtgtcccctggatctgtatcacctattcatggacagggacaagtggtagaaaacttaaaagcacaggccctttgttcctggactgcaaagaaagataaccacttgaacttctcaaaacatgacattattactgtcttggagcagcaagaaaattggtggtttggggaggtgcatggaggaagaggatggtttcccaaatcttatgtcaagatcattcctgggagtgaagtaaaacgggaagaaccagaagctttgtatgcagctgtaaataagaaacctacctcggcagcctattcagttggagaagaatatattgcactttatccatattcaagtgtggaacctggagatttgactttcacagaaggtgaagaaatattggtgacccagaaagatggagagtggtggacaggaagtattggagatagaagtggaatttttccatcaaactatgtcaaaccaaaggatcaagagagttttgggagtgctagcaagtctggagcatcaaataaaaaacctgagattgctcaggtaacttcagcatatgttgcttctggttctgaacaacttagccttgcaccaggacagttaatattaattctaaagaaaaatacaagtgggtggtggcaaggagagttacaggccagaggaaaaaagcgacagaaaggatggtttcctgccagtcatgttaaacttttgggtccaagtagtgaaagagccacacctgcctttcatcctgtatgtcaggtgattgctatgtatgactatgcagcaaataatgaagatgagctcagtttctccaagggacaactcattaatgttatgaacaaagatgatcctgattggtggcaaggagagatcaacggggtgactggtctctttccttcaaactacgttaagatgacgacagactcagatccaagtcaacagtggtgtgctgatctgcaaaccctggacacaatgcagccaattgagaggaaaagacagggctatattcatgagctgattcagaccgaagagcggtacatggctgaccttcagctcgtcgtcgaggtttttcagaaacgcatggcagagtcaggctttctcactgaaggggagatggccctgatttttgttaactggaaggagctcatcatgtccaacacaaagctgctgaaggctttgcgggtgcggaagaagaccgggggcgagaagatgccggtgcagatgattggggacatcctggccgctgagctgtcccacatgcaggcttacatcaggttctgcagctgccagcttaatggagcagctctgttacagcagaagacagatgaagacacagatttcaaagaatttttaaagaagctggcatctgacccgcggtgtaaaggaatgcccctctccagcttcctgctgaaacccatgcagaggatcacccgctacccactgctcatcagaagtattctggagaacaccccggagagccatgcagaccattcctccctaaagctggccctcgagcgggcagaggagctgtgctctcaagtgaatgagggagttcgggagaaggaaaactcggaccgactggagtggatccaggcgcacgtgcagtgtgaaggcctcgcggagcaacttattttcaactctctcaccaactgcctggggccccggaagctcttacacagtgggaaattatacaagaccaagagcaacaaggaactgcacggattcctcttcaatgacttcctgcttcttacctacatggtcaagcagtttgctgtttcctctggctctgagaaacttttcagctcgaagtccaatgctcaattcaaaatgtataaaacgcccattttcctgaatgaagtcttggtgaaactgcccacagacccttccagcgatgagcctgtcttccacatttcccacattgatcgggtctacaccctccgaacagacaacattaatgagaggaccacctgggtgcagaagatcaaggcggcgtctgagcagtacatcgacaccgagaagaagaagcgtgagaaagcttaccaagcccgctcccaaaagacttcaggcattgggcgcctgatggtgcatgtcattgaagctacagaattaaaagcctgcaaaccaaatggaaagagcaacccatactgtgaaatcagcatgggctcccagagctacaccaccaggaccatccaggacacactcaatcccaagtggaattttaactgccagttctttattaaggatctctaccaagacgtgctgtgtctcaccctgtttgacagagaccagttttcaccagatgatttcctgggtcgtactgaaattccagtggcaaaaattcgaacagaacaggaaagcaaaggccctatgacccgccgactgctgctgcatgaggtccccaccggggaggtctgggtccgttttgacctgcagctttttgagcaaaaaactctcctgtaggggttctaaaggacagcaccagcgggacagcccacaaggctggggctggagaatgagagactgcgctctcttggggctgagggagcaccatgcagcttcacccctcacaaagccatgcacgctgggggctctgttttcctgcacactaaatagctagcaatctatgcaaacacctttcccataaagaaaccaaaccccatagtacagtgccttgtcctagtgttcacatgttcagctctgtttgtttagatgccaaggtttccattttcagggctataaaaagtattacttggaaatgaggcatcagaccaccagatgttaccgctcggttgaatgtgtccaccgtggagtggtttggtgacgctgtaaccattccacgccagtgacctctgctgggtcacagccactcaggaggggaagggtcaggatgagaggctgcagcctcgacacttggcgcggcctgatactgaaatagcgtctactcgtgcactgaataaaaacagaaacttgatcattttattcctgattagattttatcactctctgctaagacaatatagtctggagtataagtgggaaagcttgatttaaatactgtgaactctaataatgtggaaaatatttttcaactttaattttctgaagtataaattatttatgtaaattcattgtttttgcatatttcttaggacatgcatctttaagctttatcattgcccatatgtacagaaagagaataaagacatatgtttatggatggaaaaaaaaaaaa

SEQ ID NO: 878 - DNA, 1668 bp, Homo sapiens
  CDS (95)..(1432)
atttggccctcgaggccaagaattcggcacgagacactcttcagcgaccacgcaggcactttcccggtccccagtataccataattgaagaaaaatgatggaagagagtggaatagagacaacaccacctgggactcctccaccaaatcctgcagggctggctgctactgctatgtcttctacccctgttccattagcggcaaccagttctttttcttctccaaatgtatcctccatggagtccttcccaccactcgcatactctactcctcagccgccccttcctcctgtgaggccttcagcaccattaccttttgtgcctcctcctgcagttccttctgtcccaccacttgttacttctatgccacctcctgtttctccatcaactgctgctgccttcggtaatcctcctgtatctcacttcccaccttcaacttctgccccaaacactcttttacctgcacccccttcgggtcctcctatatcaggattttctgttggttcaacttatgacattacaaggggacatgctgggagagctccccagacacccctgatgccatcattttctgcaccttcaggaacaggtcttttgccaactcctattactcagcaagccagtttgacatctctggcacagggaactggaaccacatcagccattactttcccagaggagcaagaagaccctagaattactagaggtcaggatgaagcatctgctggtggaatctggggttttattaagggtgtggctgggaatcctatggtgaagtctgtgcttgataagacaaaacattcagtagaaagcatgattacaacgctggaccctggcatggctccctatatcaaatctggaggtgaactggatattgtagtgacctcaaataaagaagtaaaagttgctgctgtccgagatgccttccaggaggtctttggcttagctgtggttgtaggggaagctggacagtccaatattgccccacaaccagtgggctatgcagctggattaaaaggtgctcaggaacggatagatagcttgcgtcgaactggggtgatccatgaaaaacagacagctgtgtcagtagaaaacttcattgcagaattgctgcctgacaaatggtttgacattggttgtttggtggttgaagatcctgtccatggcattcatctagaaacatttacacaagccacaccagtgcctttggaatttgtacagcaggctcaaagtctaactccccaggactataatctgaggtggtcaggccttttggtgacagtgggtgaagtcctggaaaagagtttactgaatgtcagccggactgattggcacatggcatttactgggatgtcccgtcggcagatgatctacagtgcagccagagcgatagcaggcatgtataaacagcgcctgccacccaggacagtgtgagaggagacctacctgggagactgagactttcccccacttttagcttgatgttaaagaagtggttgtaccttcctaaatcgaatagtctaaatgaatccagtagtttttatcattttcctgtagcctgcaatttttctttctctagaaaggcatcatgtcattccaggagacaaaaagaaacaaatcctttttatagtcataccatttcacctatcatagtactcaaaaaaaaaaaa

SEQ ID NO: 879 - DNA, 1350 bp, Homo sapiens
  CDS (1)..(1056)
atggcactcccctttcaaaaagagctggagaaatacaagaacattgatgaagatgagcttcttggcaaactctcagaagaggaactgaaacagttggaaaatgttctagatgacctagatcctgagagtgccatgctgccagctggatttcgacagaaagaccagacacagaaggcagccaccggcccctttgaccgcgagcacctcctcatgtacctggagaaggaggctttggaacagaaagacagagaggactttgtgcccttcactggagaaaagaaagggagagtctttatccctaaagaaaagcctatagaaactcgtaaagaagaaaaagtgacccttgacccagaactggaagaagctttggccagtgcctctgacaccgaactctatgatcttgcagctgtccttggagtacacaatttgctcaacaatccaaagttcgatgaagaaacagccaacaataaaggtggcaaaggacctgtcagaaatgttgtcaaaggtgaaaaagtaaagccagtatttgaggaaccaccaaatcccacaaatgtggaaataagcctgcagcagatgaaagccaatgatcctagcttgcaagaagtcaacctcaacaacattaagaacattccaattccaaccctgagggaatttgcaaaggctctggagaccaacactcacgtgaagaagttcagcctggccgcaactcgcagcaatgaccctgtggccattgcttttgcagacatgctgaaagtaaacaagaccttgacaagtctaaacatagaatccaattttatcactggaactgggatcctggccctggtagaggcactgaaagaaaatgacaccttgacagaaatcaagattgacaaccagaggcagcagttgggaacagctgtagagatggaaattgcccagatgctggaggagaattcaaggatcctcaagtttggataccagtttaccaagcaagggccacgaacaagggtggcagctgccatcacaaagaataatgacctggttcgtaagaagagagttgaagcagaccgaaggtaaacttccttgaggagaagtgaagtttcactgtggtatggccattgaaaaacaaaaactcttcttcttccccatcaggaccattttatcaaagttcgttcatttccgttaaccacataactaataatttaattgttattcttttttagcactacttatttatcttggattttgtaatatatgcaattgttttatttgctcatgggcacttctggcaacttgacaaatggaccgatgcagattttagagagtgacgacatggaaaatgaatttaaccactttcttaaaaaaaaaaaa

SEQ ID NO: 880 - DNA, 855 bp, Homo sapiens
  CDS (157)..(771)
gcacgagtagtggagcccgtttgttccgcccgtgtcgagcctggagccagaacctgtgaagagcggaagggccaagggacgtcttctccacgccgctccgactccaggggagccgtggcctcctctccgccctagcgctgagaaccgtgggtaccgatggatgtggccgagagccctgaacgggatcctcactctccagaggatgaagagcagccacagggactctcggacgatgacattctgagggacagcgggtccgatcaggatttggacggggcgggggtgagggcttctgatctggaggatgaggaaagtgcagccagggggccgagccaggaggaggaagataatcactccgacgaggaggaccgggcaagtgagcctaaatcccaagaccaggactcagaggtgaatgagctgagccggggcccgaccagctccccctgcgaggaggagggggacgaaggggaggaagaccggacaagcgaccttagggatgaggcctcctcagtcaccagggagctggatgagcatgagctagactacgatgaggaggttcctgaggagccagctcccgccgtccaggaggacgaggctgagaaagcgggggctgaggatgatgaggagaagggcgaaggcactcccagggaggaggggaaggctggtgttcagagtgtgggagaaaaggaatccctggaggctgccaaggagaaaaagaaagaggacgatgatggagaaatcgaatttagtagtagtaggcggccgctctagaggatccaagcttacgtacgcgtgcatgcgacgtcatagctcttctatagtgtcacctaaatgcgattcacttaccgctacatc

SEQ ID NO: 881 - DNA, 1973 bp, Homo sapiens
  CDS (255)..(1784)
cctgtattacgtagacccaagctggctagcgtttaaacttaagcttggtaccgagctcggatccactagtccagtgtggtggaattcgatggaggacgcagaggcacgctgttgccatggcagtgtggtcctggctgccgcggaggcaggtgccggggtctcctttgcctcaatgtgaagagcttaaaaagaggaggagaggagaactcccccggccatctctgtgatcccagccgccgcattttacacagaaaatgaatgaaaataaagatactgattcaaagaaaagtgaagaatacgaagatgactttgaaaaggacctggagtggttaattaatgaaaatgaaaaaagtgatgccagcataatagagatggcttgtgagaaggaagagaatattaaccaagacttaaaagagaatgagacagtaatggagcacaccaaacggcattctgatcctgacaaatctttgcaggatgaggtctcaccaagaagaaatgacatcatttctgtaccaggtattcaacctttggatcccatatcagattcagatagtgaaaactctttccaggaatccaaactagaaagccagaaagacttggaggaggaagaggatgaggaagtaaggagatatattatggagaaaattgtacaagctaacaagcttctacagaatcaagaaccggtgaatgataaaagggagcgaaaacttaagttcaaggaccagttagttgatttggaagttcctccactagaagacactactacttttaaaaattattttgaaaacgaaaggaatatgtttgggaaactgtcacaattatgtatttccaatgattttggacaagaagatgtgctcctgtcacttactaatggaagctgtgaagaaaacaaggataggacaatactggtagagagagatggaaaatttgaacttctgaatttacaagacattgccagtcaggggtttttgcctcccattaataatgcaaatagtacagaaaatgaccctcagcagttgttacccagatcttccaactcctctgtcagtggcaccaagaaagaagattctacagcaaagattcatgctgtcactcactcatcaacaggagagccgctggcttatatcgctcagccaccactcaaccgcaagacttgtccaagctctgctgtcaactcagatcgaagtaaagggaatgggaaatctaatcacaggacacagtctgcacatatctcaccagtgacttcaacatactgtctttcccctcgacagaaagaactacaaaaacaactagaagaaaagagagaaaaactgaaaagagaggaagagcgacgaaaaatagaagaagagaaagaaaaaaagagagagaatgacatagtatttaaagcgtggttgcaaaagaaaagagagcaggtcttagaaatgaggagaattcagcgagcaaaggaaattgaagacatgaacagtagacaggaaaacagagatccacaacaagcttttcgattatggcttaaaaaaaagcacgaagagcagatgaaagaaagacagacagaagaactaagaaagcaagaggaatgtttattcttccttaaaggaacagaaggccgggaaagggcctttaaacaatggttaagaaggaaacggatggaaaaaatggcagagcaacaagctgtcagagagagaactagacagctccgactagaagctaagcgttctaaacagttacagcaccacctatatatgtcagaagccaaaccttttcgttttactgatcattataactgaaagtttctattaaatatttcagtgggcagctgctatcaaaattttggatatgatttcttagggtctgtgtactttggttgtattctaaattatggaaatggtatttatcttttattgacagtgaatttgtttttttaatactagaacaaaataaatttttttctcacagtgttgtaaaaaaaaaaaaaa

SEQ ID NO: 882 - DNA, 951 bp, Homo sapiens
  CDS (620)..(859)
atgctgctccatgaggtggggattttgtctgcttgttcactgctgtgtgcccagggcccacgacagtgcccgatacagcaggcgctcaataagtggcgaatgaaagacagggcaaggcggagagagaagaaacagaaagggaaagagaaagcccgggccgccagagcgcttaatcacacctggctcaggctccacactggtcctccagctcccttttctcagcgatggactcacagccccacccggagcgctggagcgcggacgcggtcactgcgcgtgcgcctcaccgcgctggcaccccggcctggcagcctttggggacctgaaccagctgcgcctgcgcaggtggaacgggtggaacgggtgggggagcggacagtcgaacggcctgagagggctcagctggtccggggctgcggcgcctttgtgagcgcggccgccggccaggatcgagccctggcccgggccctggcccagccccggcctccaaggaccgcgccgaaggaggtgcccactggagggaggaggcgctcgactttctcaggatactgtccctctcccacagaggagctgaaggagtaggacagaagaactgtcaaattctggaatccttaaagccatgtccaaggatttggtgacatttggggatgtggctgtaaatttctctcaagaggaatgggaatggctgaaccctgctcagaggaatttgtacaggaaagtgatgttggagaactacaggagcttggtatcattgggagtttctgtttctaagccagatgtgatctcattattggagcaaggaaaagagccctggatggtgaagaaggagggaacaagaggcccatgccctggtgagtgagagagaaatagggagacagaagccattgccaggaagagctcagcaatttctgaagatttcagttcataattgacgtttcgtgggtagctctt

SEQ ID NO: 883 - DNA, 508 bp, Homo sapiens
  CDS (116)..(328)
aaaatgtatgcggtactagctggctagcgtttaaacttaagcttggtaccgagctcggatccactagtccagtgtggtggaattcgcgttttcggcgggcttcccgggtacaaaaatggctgtggctagcgatttctacctgcgctactacgtagggcacaagggcaagtttgggcacgagtttctggagttcgaatttcggccggacggtgagaagaggcccacggcacgcggtgctgggaaaggggagcgagaccgagaggccgggtggtgtggagggtacaggcggcggaggccactgcttccctcgaaggaaataggagcttaagaatagaggaggcataagttggttttataaatgaaagagaattaattgcaataaattaaagctaatcctgtcacaaactgaaaagttgaacctacagtaatcagaattctgtaacagtgcaccagaagggactctagatcgtcgccctgattgaaaatgctagcacttttttgaaaaccg

SEQ ID NO: 884 - DNA, 792 bp, Homo sapiens
  CDS (122)..(751)
cactgagtccctcgtacgggcggaggaagacctccgcggacagacattgcaagacacccctgctcctcgttggcaagccgccccatgatgaaggcctacacctggtcacggagacttttggatgcagcctttaacgaaggacgcaggcatgagcctgtcctctgtgacgctggccagcgccctacaggtcaggggtgaagctctgtctgaggaggaaatctggtccctcctgttcctggccgctgagcagctcctggaagacctccgcaacgattcctcggactatgtggtttgcccctggtcagccctgctttctgcagctggaagcctttctttccaaggccgtgtttctcatatagaggctgctcctttcaaggcccctgaactgctacagggacagagtgaggatgagcagcctgatgcatctcagatgcatgtctattctttaggaatgaccctctactggtcagcagggtttcatgttccgccacatcagcccctgcagctctgcgagcccctgcactccatcctgctgaccatgtgtgaagaccagcctcacaggcggtgcacgttgcagtcggttctggaagcttgtcgggttcatgagaaagaagtgtctgtctacccagcccctgctggtctccacatcagaaggctggttggcttggttctgggtaccatttctgaggtcagtagagaaccgtgcttttcaagcagtagctgctggtcatgtgtggctattaaaatttgaattagttatattatcattaactaaaataaaataaaaaaaaa

SEQ ID NO: 885 - DNA, 2136 bp, Homo sapiens
  CDS (309)..(1625)
aatgcaggaccggtccggaattcccgggtcgacgatttcgtcgagggggggttaaaggcccccaaaacatgcacacatgaaaagggcaaaaagtaaccgtccttgacagggagtcttaactagagaaggaaacggaactaaactggcgggctccgtggaagcgtggccggcagcgtcccggacgaggagagacagcgtcttgctcagtcacccaggctggagtgcagtgatcatagctcatcgcatccttgaactcctgggcttaagctatcctcccgccttagcctcctgaatagctgggaccacagatgtctttggtggacttgggaaagaggttgctagaagcagcaagaaaaggccaagatgatgaagtgagaacgttgatggcaaatggcgccccattcaccacagactggttttccaaattgagagtctcctgtggatatataggtgataattgtaagaatggtgcagatgtgaatgccaaggacatgctgaagatgacagctttgcattgggccacagagcgccaccatcgagatgtcgtagagttacttatcaaatatggagctgatgtccatgctttcagcaaatttgataaatcagcctttgacatagctctggagaaaaacaatgctgagattttggtcatcctccaggaagcaatgcagaatcaggtgaatgttaatccagagagagccaaccctgtgactgaccctgtgagtatggctgctccattcatcttcacgtcgggtgaggttgttaacctcgcaagccttatttcttcaaccaacaccaaaacaacctcaggtgacccccatgcctcaacagtacagttttcaaattctaccacctcagtgctggctacccttgcagctcttgctgaggcatcagtccccctctccaactcacacagagccacagccaatacagaggaaattatagaaggaaattccgttgactcatcaatccagcaagtaatggggagtggaggccagagggtcatcaccatagtgactgatggagtccctctgggtaatatccaaacttcaatccctactggaggcattggccagccatttattgtaactgtgcaagatggacagcaagttctaactgtacctgctggtaagggtgcagaggagactgtaattaaagaggaagaagaagagaagttgccactaacaaagaaaccaaggataggagagaagacaaacagtgtggaggaaagcaaggaaggcaatgaaagagagctactacagcaacaactccaggaggccaatcgaagagcccaggaataccgacaccagctcctaaagaaagagcaggaagcagaacagtaccgtcttaagctggaggccatagcccgacagcagcccaatggagttgatttcaccatggttgaagaggtggctgaggtagatgctgtagtagtcacagagggggagttggaagagagagagacaaaagtgactgggtcagcaggggccacggagcctcacactagaggtttccatggcaactgtttcatcttaatatgcaagggccacaatttgcactgtgttcatattaatcctcttttaaaaaaggaaatatacagaagacaaacattgtataaaaactaagagtgtctttaagaagaaaactatagcagggtacaatgcttgggctcaggaagtttctctgtgcaactagaaaattcaaagccatatttagggaacattttttctgaggggccaaaagaataaaggaccaaatttcttagctcatatcattgctttaaacatagaagtaaaagaatactgcatgttgtgggttgattttttttttttaaataactgactttctcacaaaagattttaagataacatttctaatatatatgcaccaatatatatgcctttaataattataccatcaagtgacctgaaaatgccccttagatttatgatgcgtatctgttggaaaaaccaattggaagggaagttagacaagctttggggaagagaaaaggaatatagtccatttccaaaggagcaggaactcccaaccttaagttaatttcactgaagagaattttcccttttttttttttttttggaaacaaaggggattttaacttcaaaaaaaaaaaaa

SEQ ID NO: 886 - DNA, 1335 bp, Homo sapiens
  CDS (1)..(1335)
atgattgaagacaataaggagaacaaagaccattccttagaaaggggaagagcaagtctcattttttccttaaagaatgaagttggaggacttataaaagccctgaaaatctttcaggagaagcatgtgaatctgttacatatcgagtcccgaaaatcaaaaagaagaaactcagaatttgagatttttgttgactgtgacatcaacagagaacaattgaatgatatttttcatctgctgaagtctcataccaatgttctctctgtgaatctaccagataattttactttgaaggaagatggtatggaaactgttccttggtttccaaagaagatttctgacctggaccattgtgccaacagagttctgatgtatggatctgaactagatgcagaccatcctggcttcaaagacaatgtctaccgtaaacgtcgaaagtattttgcggacttggctatgaactataaacatggagaccccattccaaaggttgaattcactgaagaggagattaagacctggggaaccgtattccaagagctcaacaaactctacccaacccatgcttgcagagagtatctcaaaaacttacctttgctttctaaatattgtggatatcgggaggataatatcccacaattggaagatgtctccaactttttaaaagagcgtacaggtttttccatccgtcctgtggctggttacttatcaccaagagatttcttatcaggtttagcctttcgagtttttcactgcactcaatatgtgagacacagttcagaccccttctataccccagagccggatacctgccatgaactcttaggtcacgttccccttttggctgagccaagttttgctcagttctcccaagaaattggcctggcttcccttggagcttcagaggaggctgttcaaaaactggcaacgtgctactttttcactgtggagtttggtctatgtaaacaagacggacagttacgagtcttcggcgctggcttactttcttctatcagtgaactcaaacatgtgctttctggacatgccaaagtaaagccttttgatcccaagattacctgcaaacaagaatgcctcatcacaacttttcaggatgtctactttgtatctgaaagttttgaagatgcaaaggagaagatgagagaatttaccaaaacaattaagcgtccctttggagtgaaatataatccctacacacgaagcattcagatcctgaaagacgccaaaagcataacgaatgccatgaacgagctgcggcatgatcttgacgttgtcagcgacgcccttgggaaggtcagcaggaagccgagtatctaa

SEQ ID NO: 887 - DNA, 3266 bp, Homo sapiens
  CDS (166)..(2742)
atcgattgcaatagctatctattcgatgatgaagataccccaccaaacccaaaaaaagagatctctcgaggatccgaattcgcggtcgcgtccgcgtcgccgccatcctcggcgcgactcgcttctttcggttctacctgggagaatccaccgccatccgccaccatggtgaacttcacggtagaccagatccgcgccatcatggacaagaaggccaacatccgcaacatgtctgtcatcgcccacgtggaccatggcaagtccacgctgacagactccctggtgtgcaaggcgggcatcatcgcctcggcccgggccggggagacacgcttcactgatacccggaaggacgagcaggagcgttgcatcaccatcaagtcaactgccatctccctcttctacgagctctcggagaatgacttgaacttcatcaagcagagcaaggacggtgccggcttcctcatcaacctcattgactcccccgggcatgtcgacttctcctcggaggtgactgctgccctccgagtcaccgatggcgcattggtggtggtggactgcgtgtcaggcgtgtgcgtgcagacggagacagtgctgcggcaggccattgccgagcgcatcaagcctgtgctgatgatgaacaagatggaccgcgccctgctggagctgcagctggagcccgaggagctctaccagactttccagcgcatcgtggagaacgtgaacgtcatcatctccacctacggcgagggcgagagcggccccatgggcaacatcatgatcgatcctgtcctcggtaccgtgggctttgggtctggcctccacgggtgggccttcaccctgaagcagtttgccgagatgtatgtggccaagttcgccgccaagggggagggccagttggggcctgccgagcgggccaagaaagtagaggacatgatgaagaagctgtggggtgacaggtactttgacccagccaacggcaagttcagcaagtcagccaccagccccgaagggaagaagctgccacgcaccttctgccagctgatcctggaccccatcttcaaggtgtttgatgcgatcatgaatttcaagaaagaggagacagcaaaactgatagagaaactggacatcaaactggacagcgaggacaaggacaaagaaggcaaacccctgctgaaggctgtgatgcgccgctggctgcctgccggagacgccttgttgcagatgatcaccatccacctgccctcccctgtgacggcccagaagtaccgctgcgagctcctgtacgaggggcccccggacgacgaggctgccatgggcattaaaagctgtgaccccaaaggccctcttatgatgtatatttccaaaatggtgccaacctccgacaaaggtcggttctacgcctttggacgagtcttctcggggctggtctccactggcctgaaggtcaggatcatggggcccaactatacccctgggaagaaggaggacctctacctgaagccaatccagagaacaatcttgatgatgggccgctacgtggagcccatcgaggatgtgccttgtgggaacattgtgggcctcgtgggcgtggaccagttcctggtgaagacgggcaccatcaccaccttcgagcacgcgcacaacatgcgggtgatgaagttcagcgtcagccctgttgtcagagtggccgtggaggccaagaacccggctgacctgcccaagctggtggaggggctgaagcggctggccaagtccgaccccatggtgcagtgcatcatcgaggagtcgggagagcacatcatcgcgggcgccggcgagctgcacctggagatctgcctgaaggacctggaggaggaccacgcctgcatccccatcaagaaatctgacccggtcgtctcgtaccgcgagacggtcagtgaagagtcgaacgtgctctgcctctccaagtcccccaacaagcacaaccggctgtacatgaaggcgcggcccttccccgacggcctggccgaggacatcgataaaggcgaggtgtccgcccgtcaggagctcaagcagcgggcgcgctacctggccgagaagtacgagtgggacgtggctgaggcccgcaagatctggtgctttgggcccgacggcaccggccccaacatcctcaccgacatcaccaagggtgtgcagtacctcaacgagatcaaggacagtgtggtggccggcttccagtgggccaccaaggagggcgcactgtgtgaggagaacatgcggggtgtgcgcttcgacgtccacgacgtcaccctgcacgccgacgccatccaccgcggagggggccagatcatccccacagcacggcgctgcctctacgccagtgtgctgaccgcccagccacgcctcatggagcccatctaccttgtggagatccagtgtccagagcaggtggtcggtggcatctacggggttttgaacaggaagcggggccacgtgttcgaggagtcccaggtggccggcacccccatgtttgtggtcaaggcctatctgcccgtcaacgagtcctttggcttcaccgctgacctgaggtccaacacgggcggccaggcgttcccccagtgtgtgtttgaccactggcagatcctgcccggagaccccttcgacaacagcagccgccccagccaggtggtggcggagacccgcaagcgcaagggcctgaaagaaggcatccctgccctggacaacttcctggacaaattgtaggcggcccttcctgcagcgcctgccgccccggggactcgcagcacccacagcaccacgtcctcgaattctcagacgacacctggagactgtcccgacacagcgacgctcccctgagaggtttctggggcccgctgcgtgccatcactcaaccataacacttgatgccgtttctttcaatatttatttccagagtccggaggcagcagacacgccctcttagtagggacttaatgggccggtcggggagggggaggcgggatgggacacccaacactttttccatttcttcagagggaaactcagatgtccaaactaatttttcaaaacctaattttaacaaacgcattaagaggtttatttgggtacatggcccgcagtggcttttgccccagaaaggggaaaggaacacgcgggtagatgatttctagcaggcaggaagtcctgtgcggtgtcaccatgagcacctccagctgtactagtgccattggaataataaatttgataaggtggtgaaaaaaaaaaaa

SEQ ID NO: 888 - DNA, 833 bp, Homo sapiens
  CDS (174)..(818)
ctcgtagccggtcgcctgcggtaccggtccggaattcccgggtcgacccacgcgtccgctcttcaaccaggagccgagatttctgttgctctgaagccatccaggggtctttaaccagaagagagaggagagcctcaggagttaggaccagaagaagccagggaagcagtgcaatggcttcaaaaatcttgcttaacgtacaagaggaggtgacctgtcccatctgcctggagctgttgacagaacccttgagtctagactgtggccacagcctctgccgagcctgcatcactgtgagcaacaaggaggcagtgaccagcatgggaggaaaaagcagctgtcctgtgtgtggtatcagttactcatttgaacatctacaggctaatcagcatctggccaacatagtggagagactcaaggaggtcaagttgagcccagacaatgggaagaagagagatctctgtgatcatcatggagagaaactcctactcttctgtaaggaggataggaaagtcatttgctggctttgtgagcggtctcaggagcaccgtggtcaccacacagtcctcacggaggaagtattcaaggaatgtcaggagaaactccaggcagtcctcaagaggctgaagaaggaagaggaggaagctgagaagctggaagctgacatcagagaagagaaaacttcctggaagtatcaggtacaaactgagagacaaaggatacaaacagaatttgatcagcttagaagcatcctaaataatgaggagcagagagagctgcaaagattggaaaaaaaaaaaaaaaagatctttaattaagcggccgcaagctta

SEQ ID NO: 889 - DNA, 2385 bp, Homo sapiens
  CDS (103)..(1935)
attccgagagagagacgccctggaaggtctgtatcagcgtctgtcgcgctgggacccacactggcttttaaggaggacacccggacacctggaagctgggaaatggactcagtggcctttgaagatgtggctgtgaacttcacacaagaggagtgggctttgctgggtccatcacagaagagtctctacagaaatgtcatgcaggaaaccattaggaacctggactgtatagaaatgaaatgggaggaccagaacattggagatcagtgccaaaatgccaagagaaatctaagaagtcatacatgtgaaattaaagatgacagtcaatgtggagaaacttttggccagattccagatagtattgtgaacaagaacactcctcgagtaaatccatgtgacagtggtgagtgtggagaagtcgtcttgggtcattcgtctcttaattgcaacatcagagttgacactggacacaaatcatgtgagcatcaggaatatggagagaagccatatacacataaacaacgtgggaaagccatcagtcatcagcactccttccagacacatgaaaggccccccaccggaaagaaacccttcgattgtaaagaatgtgcaaaaacctttagttctcttggaaacctccgaagacacatggcggcacaccatggagatggaccttataaatgtaagttgtgtgggaaagcctttgtttggcccagtttatttcatttgcacgaaagaacacacactggagagaaaccgtatgaatgtaagcagtgttctaaagcctttcctttttacagttcctatctaagacatgaaagaatccacacgggagagaaagcgtatgaatgtaagcagtgttccaaagcctttcctgattacagtacctatctaagacatgagagaactcacaccggagagaaaccctataaatgtacacaatgtgggaaagccttcagctgttactattacactcgactacatgaaaggactcacacgggagaacaaccctatgcatgtaagcaatgtgggaaaacgttttatcatcacacaagctttcgaagacacatgataaggcacactggagacggaccacataaatgtaagatatgtgggaaaggctttgattgtcctagttcagttcgaaatcatgaaactactcacactggagagaaaccctatgaatgtaagcagtgtgggaaagtgttatctcatagctcgagctttcgaagtcacatgataacacacacaggagatggaccccagaaatgcaagatatgtgggaaagcctttggttgtcccagtttatttcaaagacatgaaaggactcacactggagagaaaccctatcaatgtaaacaatgtggtaaagccttcagtcttgccggttcccttcgaagacatgaagcaactcacactggagtgaaaccctataaatgtcagtgtgggaaagcctttagtgatctctcttcctttcaaaatcatgagacaactcacactggagagaagccatatgagtgtaaggaatgtgggaaagcattcagttgtttcaaatacctttctcaacataaaaggacccacacagtagaaaaaccttatgagtgtaaaacatgtagaaaagccttcagtcatttcagtaacttaaaagtccatgaaaggattcactctggagagaagccatatgaatgtaaggaatgtggaaaagcattctcttggctcacttgccttctacgacatgaaagaattcacactggagagaaaccctatgaatgtctacaatgtggtaaagccttcactcgttcccgtttccttcgaggacatgaaaaaactcacactggagagaagctgtatgaatgtaaggaatgtgggaaagcattgagttctctccgttccttgcatagacataaaaggactcactggaaagatactctctaaatgtatggaatgtgggaaaacattcagtactttaatttcagaaacttgaaagaactcactttggagatagaccctatgaatgtaaacatgggataaagccttaagtagtttcaatttttttaaatacagttatcccccaatatattgcaggggattggttccagcaccctctaaatccacagatgccaagtcctttgttatatggcatatttgcatgtaacctatgcatatcctccagtatactgtgtaaatcatctctagatgacttttaatacctcatgcattgtaaaagctatgtaaatagttgtttgattgtattgtttagagaatcatgacaagaaaaatagtctctacatgttcgatgcagacacaaccattgcaggcccacctacgtggtatatgtcacccagaacattaaaatttgttttaacattcaaaaaaaaaaaaaaa

SEQ ID NO: 890 - DNA, 1045 bp, Homo sapiens
  CDS (302)..(889)
gaaggcagctcgtggcgactgtccgtggtgctgagcgccggcgagagctggcgcggagcggctgatcggctccctcgaactggggaggtccagtggggtcgcttagggcccaaagcccccacccggctccaaaagctcccagggcctccccaggcaccggtgctcggcccttccttcggtcagaaagtcgccccctgggggcagttcgtcccaaagggtttcctcgaaagaatctgagagggcgcagtccttgaccgagggaatctctctgtgtagccttggaagccgccagccccagaagatgcctgccttcaatagattgtttcccctggcttctctcgtgcttatctactgggtcagtgtctgcttccctgtgtgtgtggaagtgccctcggagacggaggccgtgcagggcaaccccatgaagctgcgctgcatctcctgcatgaagagagaggaggtggaggccaccacggtggtggaatggttctacaggcccgagggcggtaaagatttccttatttacgagtatcggaatggccaccaggaggtggagagcccctttcaggggcgcctgcagtggaatggcagcaaggacctgcaggacgtgtccatcactgtgctcaacgtcactctgaacgactctggcctctacacctgcaatgtgtcccgggagtttgagtttgaggcgcatcggccctttgtgaagacgacgcggctgatccccctaagagtcaccgaggaggctggagaggacttcacctctgtggtctcagaaatcatgatgtacatccttctggtcttcctcaccttgtggctgctcatcgagatgatatattgctacagaaaggtctcaaaagccgaagaggcagcccaagaaaacgcgtaagtccagagatgccaaagtaataatgaaagctagcaccttcagaatgcttgctctcacaggtgaggtgctaagcagtttacattcatccggacgcgtgggtcgacccgggaattccggaccggtacctgcaggcgtacgagcttcagtaattcaaaa

SEQ ID NO: 891 - DNA, 936 bp, Homo sapiens
  CDS (7)..(594)
aggctgatgtatataactatctattcgatgatgaagataccccaccaaacccaaaaaaagagatctctcgaggatccgaattcgcggccgcgtcgacctttctttaaaagtgtgaaggaagaagtgttctggaggaactacttttaccgcgtctccctgattaagcagtcagcccagctcacggccctggctgcccaacagcaggccgcagggaaggaggagaagagcaatggcagagagcaagatttgccgctggcagaggcagtacggcccaaaacgccacccgttgtaatcaaatctcagcttaaaactcaagaggatgaggaagaaatttctactagcccaggtgtttctgagtttgtcagtgatgccttcgatgcctgtaacctaaatcaggaagatctaaggaaagaaatggagcaactagtgcttgacaaaaagcaagaggagacagccgtactggaagaggattctgcagattgggaaaaagaactgcagcaggaacttcaagaatatgaagtggtgacagaatctgaaaaacgagatgaaaactgggataaggaaatagagaaaatgcttcaagaggaaaattagctgttcctgaaatagaagaataatccttaacagtctgcaaactgacattaaattctagatgttgacaattactgaatcagaaggcatgaaagagtataattttatgaaattcaaaattattcttttttcaagttgaaacttgcctcttctactttaaaaaagtatatagaacagttacttctaataatcagaaagagatgttttatagaacatttctttaatataaagttagagatgtcttcataggcagtatggctatctttgccacagaaacataagtaaaattttagagttctgttttccatgaggtcaaaaatataatttattcctcaaaaaaaaaaa

SEQ ID NO: 892 - DNA, 2124 bp, Homo sapiens
  CDS (235)..(1980)
ggagttgagaattagggaggaggtggtagagtccgggtagtgagcggagggacaggaagggtagggcaagaaagggagaggggacaggagggaagggtgggccaaagcggtgagaaaggagggccagccagttgggtgggggagagggccgaggcccgggggcaggagtgcagggctctgaggcggggagaggagaggagagaagagccgcggggggcccagcccggagccaggatgcccgcgccgcgcgcccgggagcagccccgcgtgcccggggagcgccagccgctgctgcctcgcggtgcgcggggccctcgacggtggcggcgggcggcgggcgcggccgtgctgctggtggagatgctggagcgcgccgccttcttcggcgtcaccgccaacctcgtgctgtacctcaacagcaccaacttcaactggaccggcgagcaggcgacgcgcgccgcgctggtattcctgggcgcctcctacctgctggcgcccgtgggcggctggctggccgacgtgtacctgggccgctaccgcgcggtcgcgctcagcctgctgctctacctggccgcctcgggcctgctgcccgccaccgccttccccgacggccgcagctccttctgcggagagatgcccgcgtcgccgctgggacctgcctgcccctcggccggctgcccgcgctcctcgcccagcccctactgcgcgcccgtcctctacgcgggcctgctgctactcggcctggccgccagctccgtccggagcaacctcacctccttcggtgccgaccaggtgatggatctcggccgcgacgccacccgccgcttcttcaactggttttactggagcatcaacctgggtgctgtgctgtcgctgctggtggtggcgtttattcagcagaacatcagcttcctgctgggctacagcatccctgtgggctgtgtgggcctggcatttttcatcttcctctttgccacccccgtcttcatcaccaagcccccgatgggcagccaagtgtcctctatgcttaagctcgctctccaaaactgctgcccccagctgtggcaacgacactcggccagagaccgtcaatgtgcccgcgtgctggccgacgagaggtctccccagccaggggcttccccgcaagaggacatcgccaacttccaggtgctggtgaagatcttgcccgtcatggtgaccctggtgccctactggatggtctacttccagatgcagtccacctatgtcctgcagggtcttcacctccacatcccaaacattttcccagccaacccggccaacatctctgtggccctgagagcccagggcagcagctacacgatcccggaagcctggctcctcctggccaatgttgtggtggtgctgattctggtccctctgaaggaccgcttgatcgaccctttactgctgcggtgcaagctgcttccctctgctctgcagaagatggcgctggggatgttctttggttttacctccgtcattgtggcaggagtcctggagatggagcgcttacactacatccaccacaacgagaccgtgtcccagcagattggggaggtcctgtacaacgcggcaccactgtccatctggtggcagatccctcagtacctgctcattgggatcagtgagatctttgccagcatcccaggcctggagtttgcctactcagaggccccgcgctccatgcagggcgccatcatgggcatcttcttctgcctgtcgggggtgggctcactgttgggctccagcctagtggcactgctgtccttgcccgggggctggctgcactgccccaaggactttgggaacatcaacaattgccggatggacctctacttcttcctgctggctggcattcaggccgtcacggctctcctatttgtctggatcgctggacgctatgagagggcgtcccagggcccagcctcccacagccgtttcagcagggacaggggctgaacaggccctattccagcccccttgcttcactctaccggacagacggcagcagtcccagctctggtttccttctcggtttattctgttagaatgaaatggttcccataaataaggggcatgagcccttcctcaaaaaaaaaaaaa

SEQ ID NO: 893 - DNA, 3495 bp, Homo sapiens
  CDS (181)..(2793)
ccgggaaccgagttcgtggctgcggctgaggcggcggcggcgccccgcttctgttgaggttgccggggccgcgcgcgctgatctgcgagtgaagagggacgagggaaaagaaacaaagccacagacgcaacttgagactcccgcatcccaaaagaagcaccagatcagcaaaaaaagaagatgggccccccgagcctcgtgctgtgcttgctgtccgcaactgtgttctccctgctgggtggaagctcggccttcctgtcgcaccaccgcctgaaaggcaggtttcagagggaccgcaggaacatccgccccaacatcatcctggtgctgacggacgaccaggatgtggagctgggttccatgcaggtgatgaacaagacccggcgcatcatggagcagggcggggcgcacttcatcaacgccttcgtgaccacacccatgtgctgcccctcacgctcctccatcctcaccggcaagtacgtccacaaccacaacacctacaccaacaatgagaactgctcctcgccctcctggcaggcacagcacgagagccgcacctttgccgtgtacctcaatagcactggctaccggacagctttcttcgggaagtatcttaatgaatacaacggctcctacgtgccacccggctggaaggagtgggtcggactccttaaaaactcccgcttttataactacacgctgtgtcggaacggggtgaaagagaagcacggctccgactactccaaggattacctcacagacctcatcaccaatgacagcgtgagcttcttccgcacgtccaagaagatgtacccgcacaggccagtcctcatggtcatcagccatgcagccccccacggccctgaggattcagccccacaatattcacgcctcttcccaaacgcatctcagcacatcacgccgagctacaactacgcgcccaacccggacaaacactggatcatgcgctacacggggcccatgaagcccatccacatggaattcaccaacatgctccagcggaagcgcttgcagaccctcatgtcggtggacgactccatggagacgatttacaacatgctggttgagacgggcgagctggacaacacgtacatcgtatacaccgccgaccacggttaccacatcggccagtttggcctggtgaaagggaaatccatgccatatgagtttgacatcagggtcccgttctacgtgaggggccccaacgtggaagccggctgtctgaatccccacatcgtcctcaacattgacctggcccccaccatcctggacattgcaggcctggacatacctgcggatatggacgggaaatccatcctcaagctgctggacacggagcggccggtgaatcggtttcacttgaaaaagaagatgagggtctggcgggactccttcttggtggagagaggcaagctgctacacaagagagacaatgacaaggtggacgcccaggaggagaactttctgcccaagtaccagcgtgtgaaggacctgtgtcagcgtgctgagtaccagacggcgtgtgagcagctgggacagaagtggcagtgtgtggaggacgccacggggaagctgaagctgcataagtgcaagggccccatgcggctgggcggcagcagagccctctccaacctcgtgcccaagtactacgggcagggcagcgaggcctgcacctgtgacagcggggactacaagctcagcctggccggacgccggaaaaaactcttcaagaagaagtacaaggccagctatgtccgcagtcgctccatccgctcagtggccatcgaggtggacggcagggtgtaccacgtaggcctgggtgatgccgcccagccccgaaacctcaccaagcggcactggccaggggcccctgaggaccaagatgacaaggatggtggggacttcagtggcactggaggccttcccgactactcagccgccaaccccattaaagtgacacatcggtgctacatcctagagaacgacacagtccagtgtgacctggacctgtacaagtccctgcaggcctggaaagaccacaagctgcacatcgaccacgagattgaaaccctgcagaacaaaattaagaacctgagggaagtccgaggtcacctgaagaaaaagcggccagaagaatgtgactgtcacaaaatcagctaccacacccagcacaaaggccgcctcaagcacagaggctccagtctgcatcctttcaggaagggcctgcaagagaaggacaaggtgtggctgttgcgggagcagaagcgcaagaagaaactccgcaagctgctcaagcgcctgcagaacaacgacacgtgcagcatgccaggcctcacgtgcttcacccacgacaaccagcactggcagacggcgcctttctggacactggggcctttctgtgcctgcaccagcgccaacaataacacgtactggtgcatgaggaccatcaatgagactcacaatttcctcttctgtgaatttgcaactggcttcctagagtactttgatctcaacacagacccctaccagctgatgaatgcagtgaacacactggacagggatgtcctcaaccagctacacgtacagctcatggagctgaggagctgcaagggttacaagcagtgtaacccccggactcgaaacatggacctgggacttaaagatggaggaagctatgagcaatacaggcagtttcagcgtcgaaagtggccagaaatgaagagaccttcttccaaatcactgggacaactgtgggaaggctgggaaggttaagaaacaacagaggtggacctccaaaaacatagaggcatcacctgactgcacaggcaatgaaaaaccatgtgggtgatttccagcagacctgtgctattggccaggaggcctgagaaagcaagcacgcactctcagtcaacatgacagattctggaggataaccagcaggagcagagataacttcaggaagtccatttttgcccctgcttttgctttggattatacctcaccagctgcacaaaatgcattttttcgtatcaaaaagtcaccactaaccctcccccagaagctcacaaaggaaaacggagagagcgagcgagagagatttccttggaaatttctcccaagggcgaaagtcattggaatttttaaatcataggggaaaagcagtcctgttctaaatcctcttattcttttggtttgtcacaaagaaggaactaagaagcaggacagaggcaacgtggagaggctgaaaacagtgcagagacgtttgacaatgagtcagtagcacaaaagagatgacatttacctagcactataaaccctggttgcctctgaagaaactgccttcattgtatatatgtgactatttacatgtaatcaacatgggaacttttaggggaacctaataagaaatcccaattttcaggagtggtggtgtcaataaacgctctgtggccagtgtaaaagaaaaaaaaaaaa

SEQ ID NO: 894 - DNA, 3435 bp, Homo sapiens
  CDS (181)..(2733)
ccgggaaccgagttcgtggctgcggctgaggcggcggcggcgccccgcttctgttgaggttgccggggccgcgcgcgctgatctgcgagtgaagagggacgagggaaaagaaacaaagccacagacgcaacttgagactcccgcatcccaaaagaagcaccagatcagcaaaaaaagaagatgggccccccgagcctcgtgctgtgcttgctgtccgcaactgtgttctccctgctgggtggaagctcggccttcctgtcgcaccaccgcctgaaaggcaggtttcagagggaccgcaggaacatccgccccaacatcatcctggtgctgacggacgaccaggatgtggagctgggttccatgcaggtgatgaacaagacccggcgcatcatggagcagggcggggcgcacttcatcaacgccttcgtgaccacacccatgtgctgcccctcacgctcctccatcctcaccggcaagtacgtccacaaccacaacacctacaccaacaatgagaactgctcctcgccctcctggcaggcacagcacgagagccgcacctttgccgtgtacctcaatagcactggctaccggacagctttcttcgggaagtatcttaatgaatacaacggctcctacgtgccacccggctggaaggagtgggtcggactccttaaaaactcccgcttttataactacacgctgtgtcggaacggggtgaaagagaagcacggctccgactactccaaggattacctcacagacctcatcaccaatgacagcgtgagcttcttccgcacgtccaagaagatgtacccgcacaggccagtcctcatggtcatcagccatgcagccccccacggccctgaggattcagccccacaatattcacgcctcttcccaaacgcatctcagcacatcacgccgagctacaactacgcgcccaacccggacaaacactggatcatgcgctacacggggcccatgaagcccatccacatggaattcaccaacatgctccagcggaagcgcttgcagaccctcatgtcggtggacgactccatggagacgatttacaacatgctggttgagacgggcgagctggacaacacgtacatcgtatacaccgccgaccacggttaccacatcggccagtttggcctggtgaaagggaaatccatgccatatgagtttgacatcagggtcccgttctacgtgaggggccccaacgtggaagccggctgtctgaatccccacatcgtcctcaacattgacctggcccccaccatcctggacattgcaggcctggacatacctgcggatatggacgggaaatccatcctcaagctgctggacacggagcggccggtgaatcggtttcacttgaaaaagaagatgagggtctggcgggactccttcttggtggagagaggcaagctgctacacaagagagacaatgacaaggtggacgcccaggaggagaactttctgcccaagtaccagcgtgtgaaggacctgtgtcagcgtgctgagtaccagacggcgtgtgagcagctgggacagaagtggcagtgtgtggaggacgccacggggaagctgaagctgcataagtgcaagggccccatgcggctgggcggcagcagagccctctccaacctcgtgcccaagtactacgggcagggcagcgaggcctgcacctgtgacagcggggactacaagctcagcctggccggacgccggaaaaaactcttcaagaagaagtacaaggccagctatgtccgcagtcgctccatccgctcagtggccatcgaggtggacggcagggtgtaccacgtaggcctgggtgatgccgcccagccccgaaacctcaccaagcggcactggccaggggcccctgaggaccaagatgacaaggatggtggggacttcagtggcactggaggccttcccgactactcagccgccaaccccattaaagtgacacatcggtgctacatcctagagaacgacacagtccagtgtgacctggacctgtacaagtccctgcaggcctggaaagaccacaagctgcacatcgaccacgagattgaaaccctgcagaacaaaattaagaacctgagggaagtccgaggtcacctgaagaaaaagcggccagaagaatgtgactgtcacaaaatcaggaagggcctgcaagagaaggacaaggtgtggctgttgcgggagcagaagcgcaagaagaaactccgcaagctgctcaagcgcctgcagaacaacgacacgtgcagcatgccaggcctcacgtgcttcacccacgacaaccagcactggcagacggcgcctttctggacactggggcctttctgtgcctgcaccagcgccaacaataacacgtactggtgcatgaggaccatcaatgagactcacaatttcctcttctgtgaatttgcaactggcttcctagagtactttgatctcaacacagacccctaccagctgatgaatgcagtgaacacactggacagggatgtcctcaaccagctacacgtacagctcatggagctgaggagctgcaagggttacaagcagtgtaacccccggactcgaaacatggacctgggacttaaagatggaggaagctatgagcaatacaggcagtttcagcgtcgaaagtggccagaaatgaagagaccttcttccaaatcactgggacaactgtgggaaggctgggaaggttaagaaacaacagaggtggacctccaaaaacatagaggcatcacctgactgcacaggcaatgaaaaaccatgtgggtgatttccagcagacctgtgctattggccaggaggcctgagaaagcaagcacgcactctcagtcaacatgacagattctggaggataaccagcaggagcagagataacttcaggaagtccatttttgcccctgcttttgctttggattatacctcaccagctgcacaaaatgcattttttcgtatcaaaaagtcaccactaaccctcccccagaagctcacaaaggaaaacggagagagcgagcgagagagatttccttggaaatttctcccaagggcgaaagtcattggaatttttaaatcataggggaaaagcagtcctgttctaaatcctcttattcttttggtttgtcacaaagaaggaactaagaagcaggacagaggcaacgtggagaggctgaaaacagtgcagagacgtttgacaatgagtcagtagcacaaaagagatgacatttacctagcactataaaccctggttgcctctgaagaaactgccttcattgtatatatgtgactatttacatgtaatcaacatgggaacttttaggggaacctaataagaaatcccaattttcaggagtggtggtgtcaataaacgctctgtggccagtgtaaaagaaaaaaaaaaaa

SEQ ID NO: 895 - DNA, 1260 bp, Homo sapiens
  CDS (1)..(1260)
atggtcttctcggcagtgttgactgcgttccataccgggacatccaacacaacatttgtcgtgtatgaaaacacctacatgaatattacactccctccaccattccagcatcctgacctcagtccattgcttagatatagttttgaaaccatggctcccactggtttgagttccttgaccgtgaatagtacagctgtgcccacaacaccagcagcatttaagagcctaaacttgcctcttcagatcaccctttctgctataatgatattcattctgtttgtgtcttttcttgggaacttggttgtttgcctcatggtttaccaaaaagctgccatgaggtctgcaattaacatcctccttgccagcctagcttttgcagacatgttgcttgcagtgctgaacatgccctttgccctggtaactattcttactacccgatggatttttgggaaattcttctgtagggtatctgctatgtttttctggttatttgtgatagaaggagtagccatcctgctcatcattagcatagataggttccttattatagtccagaggcaggataagctaaacccatatagagctaaggttctgattgcagtttcttgggcaacttccttttgtgtagcttttcctttagccgtaggaaaccccgacctgcagataccttcccgagctccccagtgtgtgtttgggtacacaaccaatccaggctaccaggcttatgtgattttgatttctctcatttctttcttcatacccttcctggtaatactgtactcatttatgggcatactcaacacccttcggcacaatgccttgaggatccatagctaccctgaaggtatatgcctcagccaggccagcaaactgggtctcatgagtctgcagagacctttccagatgagcattgacatgggctttaaaacacgtgccttcaccactattttgattctctttgctgtcttcattgtctgctgggccccattcaccacttacagccttgtggcaacattcagtaagcacttttactatcagcacaacttttttgagattagcacctggctactgtggctctgctacctcaagtctgcattgaatccgctgatctactactggaggattaagaaattccatgatgcttgcctggacatgatgcctaagtccttcaagtttttgccgcagctccctggtcacacaaagcgacggatacgtcctagtgctgtctatgtgtgtggggaacatcggacggtggtgtga

SEQ ID NO: 896 - DNA, 3836 bp, Homo sapiens
  CDS (1)..(2832)
atggcggcggtagcggcagtggcggcgcgtaggaggcggtcttgggcgtctttggtactggcttttttaggggtctgcctggggattacccttgctgtggatagaagcaactttaagacctgtgaagagagttctttctgcaagcgacagagaagcatacggccaggcctctctccataccgagccttgctggactctctacagcttggtcctgattccctcacggtccatctgatccatgaggtcaccaaggtgttgctggtgctagagcttcaggggcttcaaaagaacatgactcggttcaggattgatgagctggagcctcggcgaccccgataccgtgtaccagatgttttggtggctgatccaccaatagcccggctttctgtctctggtcgtgatgagaacagtgtggagttaaccatggctgagggaccctacaagatcatcttgacagcacggccattccgccttgacctactagaggaccgaagtcttttgcttagtgtcaatgcccgaggactcttggagtttgagcatcagagggcccctagggtctcgcaaggatcaaaagacccagctgagggcgatggggcccagcctgaggaaacacccagggatggcgacaagccagaggagactcaggggaaggcagagaaagatgagccaggagcctgggaggagacattcaaaactcactctgacagcaagccgtatggccccatgtctgtgggtttggacttctctctgccaggcatggagcatgtctatgggatccctgagcatgcagacaacctgaggctgaaggtcactgagggtggggagccatatcgcctctacaatttggatgtgttccagtatgagctgtacaacccaatggccttgtatgggtctgtgcctgtgctcctggcacacaaccctcatcgcgacttgggcatcttctggctcaatgctgcagagacctgggttgatatatcttccaacactgccgggaagaccctgtttgggaagatgatggactacctgcagggctctggggagaccccacagacagatgttcgctggatgtcagagactggcatcattgacgtcttcctgctgctggggccctccatctctgatgttttccggcaatatgctagtctcacaggaacccaggcgttgcccccactcttctccctcggctaccaccagagccgttggaactaccgggacgaggctgatgtgctggaagtggatcagggctttgatgatcacaacctgccctgtgatgtcatctggctagacattgaacatgctgatggcaagcggtatttcacctgggaccccagtcgcttccctcagccccgcaccatgcttgagcgcttggcttctaagaggcggaagctggtggccatcgtagacccccacatcaaggtggactccggctaccgagttcacgaggagctgcggaacctggggctgtatgttaaaacccgggatggctctgactatgagggctggtgctggccaggctcagctggttaccctgacttcactaatcccacgatgagggcctggtgggctaacatgttcagctatgacaattatgagggctcagctcccaacctctttgtctggaatgacatgaacgaaccatctgtgttcaatggtcctgaggtcaccatgctcaaggatgcccagcattatgggggctgggagcaccgggatgtgcataacatctatggcctttatgtgcacatggcgactgctgatgggctgagacagcgctctgggggcatggaacgcccctttgtcctggccagggccttcttcgctggctcccagcgctttggagccgtgtggacaggggacaacactgccgagtgggaccatttgaagatctctattcctatgtgtctcagcttggggctggtgggactttccttctgtggggcggatgtgggtggcttcttcaaaaacccagagccagagctgcttgtgcgctggtaccagatgggtgcttaccagccattcttccgggcacatgcccacttggacactgggcgacgagagccatggctgttaccatctcagcacaatgatataatccgagatgccttgggccagcgatattctttgctgcccttctggtacaccctcttatatcaggcccatcgggaaggcattcctgtcatgaggcccctgtgggtgcagtaccctcaggatgtgactaccttcaatatagatgatcagtacttgcttggggatgcgttgctggttcaccctgtatcagactctggagcccatggtgtccaggtctatctgcctggccaaggggaggtgtggtatgacattcaaagctaccagaagcatcatggtccccagaccctgtacctgcctgtaactctaagcagtatccctgtgttccagcgtggagggacaatcgtgcctcgatggatgcgagtgcggcggtcttcagaatgtatgaaggatgaccccatcactctctttgttgcacttagccctcagggtacagctcaaggagagctctttctggatgatgggcacacgttcaactatcagactcgccaagagttcctgctgcgtcgattctcattctctggcaacacccttgtctccagctcagcagaccctgaaggacactttgagacaccaatctggattgagcgggtggtgataataggggctggaaagccagcagctgtggtactccagacaaaaggatctccagaaagccgcctgtccttccagcatgaccctgagacctctgtgttggtcctgcgcaagcctggcatcaatgtggcatctgattggagtattcacctgcgataacccaagggatgttctgggttagggggagggaaggggagcattagtgctgagagatattctttcttctgccttggagttcggccctccccagacttcacttatgctagtctaagacccagattctgccaacatttgggcaggatgagagggctgaccctgggctccaaattcctcttgtgatctcctcacctctcccactccattgataccaactctttcccttcattcccccaacatcctgttgctctaactggagcacattcacttacgaacaccaggaaaccacagggcccttgtcgccccttctctttcccttatttaggagccctgaactcccccagagtctatccattcatgcctcttgtatgttgatgccacttcttggaagaagatgagggcaatgagttagggctccttttccccttccctcccaccagattgctctcccacctttcatttcttcctccaggctttactcccctttttatgccccaccgatacactgggaccaccccttaccccggacaggatgaatggatcaaaggagtgaggttgctaaagaacatccttttccctctcattctacccttttcctctccccgattccttgtagagctgctgcaattcttagaggggcagttctacctcctctgtccctcggcagaaagacgtttccacacctcttaggggatgcgcattaaacttcttttgcccccttcttgtcccctttgaggggcacttaagatggagaaatcagttgtggtttcagtgaatcatggtcacctgtatttattgctaggagaagcctgagggtggggggagatgatcatgtgtgctcggggttggctggaagccctgggtggggggttgggggaggactaatggggagtcggggaatatttgtgggtatttttttttacttcctcttggttcccagctgtgacacgttttgatcaaaggagaaacaataaagggataaaccataaataaaaaaaaaaaaa

SEQ ID NO: 897 - DNA, 2276 bp, Homo sapiens
  CDS (99)..(2273)
ggtggggatctcgacgttgaacgcctgcggtaccggtccggaattcccgggtcgacccacgcgtccgcccacgcgtccgcccacgcgtccgcctggacatgaagaccgaggggggtaaagttctttacaaagttcgctggaaaggctatacatcggatgatgatacctgggagcccgagattcacctggaggactgtaaagaagtgcttcttgaatttaggaagagaattgcagagaacatagccaaagcagtcaagaaggatattcagagactatccttaaataacgacatatttgaggcgaactctgatagcgatcagcaaagtgagacaaaagaagatacttccccaaagaagaaaaagaaaaaattgaggcagagagaagagaaaagcccagatgatctgaaaaagaaaaaagcaaaggccgggaagctaaaagacaagtccaaaccagacctggagagctccttggaaagtttagtttttgatttaaggacaaagaaaagaatttctgaagccaaagaagaactaaaggagtccaaaaagcccaaaaaagatgaagtaaaagaaacaaaagaattaaagaaagttaaaaagggtgaaataagagatttaaagacgaaaacaagagaagatcccaaagaaaatagaaaaacaaaaaaagaaaaatttgtcgaatcccaggtggaatctgaatcaagtgtacttaatgattctccctttccagaggatgacagtgaagggctacattccgacagcagagaagagaaacaaaacactaaaagtgcaagagagagagcagggcaggacatggggctggagcatggctttgagaagcccctagacagtgccatgagtgctgaggaggataccgatgtcagaggcaggaggaaaaagaagaccccgagaaaggctgaggacactagagagaacaggaagctagagaacaagaacgctttcttagagaagaaaactgtgcctaaaaagcagaggaatcaagacagaagcaaaagtgctgcagagttagagaagctgatgcctgtatctgcccaaacgccaaagggccggaggttgagcggggaagagagaggcctctggtccacggactcagccgaggaggacaaagaaaccaaaagaaatgaatccaaagaaaaatatcagaaaaggcatgattctgacaaggaagaaaaaggcagaaaagagccaaaaggattaaagaaagccattttggtacaagcttcaacatccagctatagacagtctggtgtctttagctgtgggaaaggtgctggtgtgacttggatcactctgagactcactgccttcagtaggcctttgtcacaactgcaggaaatcagaaatgcatttgatttatttaaattaactccagaagaaaaaaatgatgtttctgagaataatcggaaaagggaagaaataccactggattttaaaaccatagacgatcacaaaaccaaggaaaacaaacagtcacttaaagaaaggagaaacaccagagacgaaacggatacttgggcatacattgctgcagaaggtgatcaggaggttttagacagcgtgtgccaagcagatgagaattcaggggccaacagacgcctcatacaggagagctccggctggcatctggcgggtgcccctctgggacgaagcttccagaggaaggaacaggcagcaatctttgctgttctgcagcttccgctggtgatacccaggcaaacagagtctggagatcacaactcctcgccaagggaacaaaactgggcggagaatgagtttgacgaattgacagaagtaggcttcagaaggtgggtaataaactcctctgagctaaaagagcatgttctaacccaatgcaaggaagctaagaaccttgagaaaaggttagaggaattgctgactagaataacaagtttagggaagaacagaaatgacctgatggagctgaaaacacagcacgagaacttcatgaagcatacacaagtatcaataacgaaatcggaacgcagctcctcaccagcaacggaacaaagctggatggagaatgactttgacaagttgagagaaggcttcagacgatcaaactactccgagctaaaggaggaagttcaaacccatagcaaagaagttaaaaaccttgaaaaaagattagacgaatggctaactagaataaccaatgcagagaagtccttaaaggacctgatggagctgaaaaccaaggcacgagaactacgtgacgaacgcacaagcctcagtagctga

SEQ ID NO: 898 - DNA, 3672 bp, Homo sapiens
  CDS (731)..(3451)
ctgatgctggaattgatcatggagatctcgtttctgttcctgggcccggatcatatccatgaccttccggttttcagggaggcaggtggggcagtcagcatcactttccgagtaactctcaaagcagtgttggtggaaggagtggccacacaggaagtggactgagggcaactccaaggcactgttacagatgctgcacttggtcttttggaaaatcttaggatccccaaccccccgccgctcctttccccgtttctccagcagagggcgcaggcccaaaggttccgccgaccccgccccagcctggccccgccccgccccggcgtaggggcggggaagacgggcacagaaacctggccgcggctttccgggagctgtgggcacgcgagctgctcgaagccggtggcccggggatcgtcgctgcccagtccggccgcggccggccgcttccccgagcttaccagtaagccggtccgcctccgggacgcgccccgcccgccccgggctcgcgcgctctgaaggggcgcgtcccgcgcactcccggcgccgcccactcccctccccacggccgctcctccctccgcccggatagccggcggcggcggcggcggcggcggcggcggcggcggcggcggccgggagaggcccctccttcacgccctgcttctctccctcgctcgcagtcgagccgagccggcggacccgcctgggctccgaccctgcccaggccatggccggcaacgtgaagaagagctctggggccgggggcggcagcggctccgggggctcgggttcgggtggcctgattgggctcatgaaggacgccttccagccgcaccaccaccaccaccaccacctcagcccccacccgccggggacggtggacaagaagatggtggagaagtgctggaagctcatggacaaggtggtgcggttgtgtcagaacccaaagctggcgctaaagaatagcccaccttatatcttagacctgctaccagatacctaccagcatctccgtactatcttgtcaagatatgaggggaagatggagacacttggagaaaatgagtattttagggtgtttatggagaatttgatgaagaaaactaagcaaaccataagcctcttcaaggagggaaaagaaagaatgtatgaggagaattctcagcctaggcgaaacctaaccaaactgtccctcatcttcagccacatgctggcagaactaaaaggaatctttccaagtggactctttcagggagacacatttcggattactaaagcagatgctgcggaattttggagaaaagcttttggggaaaagacaatagtcccttggaagagctttcgacaggctctacatgaagtgcatcccatcagttctgggctggaggccatggctctgaaatccactattgatctgacctgcaatgattatatttcggtttttgaatttgacatctttacccgactctttcagccctggtcctctttgctcaggaattggaacagccttgctgtaactcatcctggctacatggcttttttgacgtatgacgaagtgaaagctcggctccagaaattcattcacaaacctggcagttatatcttccggctgagctgtactcgtctgggtcagtgggctattgggtatgttactgctgatgggaacattctccagacaatccctcacaataaacctctcttccaagcactgattgatggcttcagggaaggcttctatttgtttcctgatggacgaaatcagaatcctgatctgactggcttatgtgaaccaactccccaagaccatatcaaagtgacccaggaacaatatgaattatactgtgagatgggctccacattccaactatgtaaaatatgtgctgaaaatgataaggatgtaaagattgagccctgtggacacctcatgtgcacatcctgtcttacatcctggcaggaatcagaaggtcagggctgtcctttctgccgatgtgaaattaaaggtactgaacccatcgtggtagatccgtttgatcctagagggagtggcagcctgttgaggcaaggagcagagggagctccctccccaaattatgatgatgatgatgatgaacgagctgatgatactctcttcatgatgaaggaattggctggtgccaaggtggaacggccgccttctccattctccatggccccacaagcttcccttcccccggtgccaccacgacttgaccttctgccgcagcgagtatgtgttccctcaagtgcttctgctcttggaactgcttctaaggctgcttctggctcccttcataaagacaaaccattgccagtacctcccacacttcgagatcttccaccaccaccgcctccagaccggccatattctgttggagcagaatcccgacctcaaagacgccccttgccttgtacaccaggcgactgtccctccagagacaaactgccccctgtcccctctagccgccttggagactcatggctgccccggccaatccccaaagtaccagtatctgccccaagttccagtgatccctggacaggaagagaattaaccaaccggcactcacttccattttcattgccctcacaaatggagcccagaccagatgtgcctaggctcggaagcacgttcagtctggatacctccatgagtatgaatagcagcccattagtaggtccagagtgtgaccaccccaaaatcaaaccttcctcatctgccaatgccatttattctctggctgccagacctcttcctgtgccaaaactgccacctggggagcaatgtgagggtgaagaggacacagagtacatgactccctcttccaggcctctacggcctttggatacatcccagagttcacgagcatgtgattgcgaccagcagattgatagctgtacgtatgaagcaatgtataatattcagtcccaggcgccatctatcaccgagagcagcacctttggtgaagggaatttggccgcagcccatgccaacactggtcccgaggagtcagaaaatgaggatgatgggtatgatgtcccaaagccacctgtgccggccgtgctggcccgccgaactctctcagatatctctaatgccagctcctcctttggctggttgtctctggatggtgatcctacaacaaatgtcactgaaggttcccaagttcccgagaggcctccaaaaccattcccgcggagaatcaactctgaacggaaagctggcagctgtcagcaaggtagtggtcctgccgcctctgctgccaccgcctcacctcagctctccagtgagatcgagaacctcatgagtcaggggtactcctaccaggacatccagaaagctttggtcattgcccagaacaacatcgagatggccaaaaacatcctccgggaatttgtttccatttcttctcctgcccatgtagctacctagcacaccatctccctgctgcaggtttagaggaccagtgagttgggagttattactcaagtggcacctagaagggcaggagttcctttggtgacttcacagtgaagtcttgccctctctgtgggatatcacatcagtggttccaagatttcaaagtggtgaaatgaaaatggagcagctagtatgttttattattttatgggtcttgagtgcatttgaaggtg

SEQ ID NO: 899 - DNA, 2865 bp, Homo sapiens
  CDS (78)..(2699)
attgaacactttgaacgcctgcggtaccggaccggaattcccgggtcgacccacgcgtccgcggacgcgtggggagcatggacggtgccatggggcctcgggggctgctgatgtgcatgtacctggtatctctcctcatcctgcaggccatgcctgccctgggctcggctacaggcaggtccaagagcagcgagaagcgacaggctgtggacaccgctgtcgatggcgtgttcatccggagtttgaaagtcaactgcaaagtcacctctcgcttcgcccactatgttgtcaccagccaagtggtcaacactgccaatgaagccagggaagtggccttcgacctggaaatccccaacacaggcttcatcagtgactttgccgttacagcagatggaaacgcatttatcggagacataaaggacaaggtgactgcatggaagcagtaccggaaagcagctatctcaggagagaatgccggccttgtcagggcctcggggagaactatggagcaattcatcatccacctcaccgtcaatccccagagcaaggtcacgtttcagctgacttatgaggaagtgctgaagagaaaccatatgcagtatgaaattgtcatcaaagtcaagcccaagcagctggtgcatcattttgagattgatgtggacatcttcgagccccaggggatcagcaagctggatgcccaggcctctttcctgccgaaggaactggcagcccaaactatcaagaagtccttctcaggaaaaaagggtcatgtgctgttccgtcccaccgtgagccagcagcagtcctgccccacatgctctacatccttactgaacgggcacttcaaggtgacctacgatgtcagtcgagacaagatctgcgacctcctggtggccaataaccactttgcccacttctttgccccccaaaacctgacaaacatgaacaagaacgtggtttttgtgattgacatcagtggctccatgagaggccagaaagtgaagcagaccaaggaggcactccttaaaattctgggggacatccacccaggggactactttgacctggttctttttgggactcgagtacaatcgtggaagggctcgctggtgcaagcatctgaggccaacctacaagcagctcaagactttgtgcggggcttttccctggatgaggccacaaacctgaatggaggtttgctccggggaattgagatcttgaaccaagttcaggaaagcctcccagaactcagcaaccatgcctcaatactcatcatgttgacagatggcgatcccacagagggggtgacggaccgttcccaaatcctcaagaacgtccgcaacgccatccggggcaggttcccgctctacaacctgggtttcggccacaatgtggactttaactttctggaggtcatgtccatggagaacaacggacgggcccagagaatctacgaggaccatgatgccacccagcagctgcagggtttctacagccaggtagccaaacccctgctggtggatgtggatttgcagtacccccaggatgctgtcttggccctgacccagaaccaccataaacagtactacgaaggctcagagattgtggtggccgggcgcattgctgacaacaaacagagcagcttcaaggctgatgtgcaggcccatggggagggacaagaattcagtataacctgcctagtggatgaggaggagatgaagaaactgctccgagagcgtggccacatgctggagaaccacgtcgagcgcctctgggcctacctcaccatccaggagctgctggccaagcggatgaaggtggacagggaggtgagggccaacctgtcatcccaggccctgcggatgtcgctggactatgggtttgtgaccccactgacctccatgagcatcaggggcatggcggaccaggacggcctgaagcccaccatcgacaagccctcagaggattctccgcctttggagatgctgggacccagaaggacgttcgtgctgtcagccttgcagccttctcctactcattccagctccaatacccagcggctgccagaccgagtgaccggcggcttctcagtgaatggacagctcattggcaacaaggccaggagccctgggcagcatgacggcacgtacttcgggcggctgggaatcgcaaaccctgccacggactttcagttggaagtgactcctcagaacattacgctgaaccccggctttggtgggcctgtgttttcctggagggaccaagctgtgctgcggcaggacggggtggtggtgaccatcaacaagaagaggaacctggtggtgtctgtggacgacggtggcacctttgaggttgttttgcaccgagtgtggaaggggagctcggtccaccaggacttcctgggcttctatgtgctggacagtcatcggatgtcagcccggacgcacgggctgctggggcaatttttccaccccatcggttttgaagtgtctgacatccacccaggctctgaccccacaaagccagatgccacgatggtggtgaggaaccgccggctcacggtcaccaggggtttgcaaaaagactacagcaaggacccgtggcatggggccgaggtgtcctgctggttcattcacaacaatggggctggactcatcgatggtgcctacactgattatatcgtccccgacatcttctgagccctctggccagcacgcctgtcctcccccggggccaaggcagaggaggaggacgacatcctgacctgctgctgaggctgtacctccttgactaagctggttccttgtgtcaaagcacctcatgccttccattaaagagaggccgtgtccacccaaaaaaaaaaaa

SEQ ID NO: 900 - DNA, 3336 bp, Homo sapiens
  CDS (132)..(1751)
atcgacccacgcgtccgggagcttgcgccagtctcttcgcggcgtccaccacttagacgcaagttgctgaagccggccggggagaaggtgttgttgccggagctgagaccgggcggccacagtccgcagggatgaacctcgagttgctggagtcctttgggcagaactatccagaggaagctgatggaactttggattgtatcagcatggctttgacttgcacctttaacaggtggggcacactgcttgcagttggctgtaatgatggccgaattgtcatctgggatttcttgacaagaggcattgctaaaattaaatttagtgcacacatccatccagtgtgttctttatgctggagccgagatggtcataaactcgtgagtgcttccactgataacatagtgtcacagtgggatgttctttcaggcgactgtgaccagaggtttcgattcccttcacccatcttaaaagtccaatatcatccacgagatcagaacaaggttctcgtgtgtcccatgaaatctgctcctgtcatgttgaccctttcagattccaaacatgttgttctgccggtggacgatgactccgatttgaacgttgtggcatcttttgataggcgaggggaatatatttatacgggaaacgcaaaaggcaagattttggtcctaaaaacagattctcaggatcttgttgcttccttcagagtgacaactggaacaagcaataccacagccattaagtcaattgagtttgcccggaaggggagttgctttttaattaacacggcagatcgaataatcagagtttatgatggcagagaaatcttaacatgtggaagagatggagagcctgaacctatgcaggaattgcaggatttggtgaataggaccccatggaagaaatgttgtttctctggggatggggaatacatcgtggcaggttctgcccggcagcatgccctgtacatctgggagaagagcattggcaacctggtgaagattctccatgggacgagaggagaactcctcttggatgtagcttggcatcctgttcgacccatcatagcatccatttccagtggagtggtatctatctgggcacagaatcaagtagaaaactggagtgcatttgcaccagacttcaaagaattggatgaaaatgtagaatacgaagaaagggaatcagggtttgatattgaagatgaagataagagtgagcctgagcagacaggggctgatgctgcagaagatgaggaagtggatgtcaccagcgtggaccctattgctgccttctgtagcagtgatgaagagctggaagattcaaaggctctattgtatttacccattgcccctgaggtagaagacccagaagaaaatccttacggccccccaccggatgcagtccaaacctccttgatggatgaaggggctagttcagagaagaagaggcagtcctcagcagatgggtcccagccacctaagaagaaacccaaaacaaccaatatagaacttcaaggagtaccaaatgatgaagtccatccactactgggtgtgaagggggatggcaaatccaagaagaagcaagcaggccggcctaaaggatcaaaaggtaaagagaaagattctccatttaaaccgaaactctacaaaggggacagaggtttacctctggaaggatcagcgaagggtaaagtgcaggcggaactcagccagcccttgacagcaggaggagcaatctcagaactgttatgaagaccttcgaagttcttcattctttctcactttgccatcatgtggcctctggacactgtggtcagtcatttgaaaattgactttaatttaaaacaaaggcctgtgcctcccacccaggaggtgggagggtgaattttatgtttaaatgaagaagtgaattatggaagaagagtatacgaccttcccttccctttcaagcataagtccaaatagactctcaggaatgaagatttgtgaagacatcagataggaattttgactcatttaaactttgatgcttagttatgttgctggagaaaagatacttatgttttgctcatctaacttcattgtacccagcgtcattttgacatgtcatttcctatctcccatttgccttcggtcctcaatgcatgtctttgagtgacttcttatctgaaattttgctactggtatcctaggaaagcttttgttggatactctcattttaaacttctcctctccccagatacctcctatatttccatattgtgtgcaaaggatgggcagaaaagaaagtgcttgaaagatttcaaattttcagaaagggaacaacgaaggccctctcttcctctcataccacgttttgctcaagaagctgggctgtaacaattcagggttttcccttgttttcctctcattgcatgtttccctccaatattggttcattgtcatcaatcatggtttttgaagatagctagttttatccatctccagcaaagaatcatcaatagtttatattgctttacctgtgctggcttccagagatggaaacaaacccaggtgtctctcaacaagctacttttttactggggtgggggaatctatgcaaggagtaaagtaaaaccatccagaatcaaagcagcaaccacatagttcaaatcaaagatcaaggtgaattttttgtatcactgcctgtggaaatctatcctcatcagtcattgcatttttccctgcctatacctgtgctcctttttcttactgtgttttcagtcacttcctttctgtgaaaggttgcttagctttttttttgacatttgttgttctttatataaaaataacagattggatagatgtgtacatttggtgtttgaaattctctgaaaatcccattaggaaaccaggtgtgaaaagggctcagtagcttctctgagtggcgtttttagctgactggaagtgcttaatctggatcgtctttttttttttttttttttttcaatattttaaaaggagaatttaaatactgtgcttactgtgaaatatatcagttggtgagccgggcgtggtgggtcacgcctgtaatcccagcactttgggaggccaaggcgggttgatcacccgaggtcaggagttcaagaccagcctggccaacatggtgaaagcctgtatctattaaaagacaaaaattagctgggcgtggtggtacatgcctgtaatcccagctacactggaggctgagtcaggagaatcacttgaacgtgggaggcagaggttgcagtgagtggagatcgcaccactgccctccagcctaggtgacagaatgagactctatctcaaaaaaaaaaaa

SEQ ID NO: 901 - DNA, 2650 bp, Homo sapiens
  CDS (201)..(2501)
cgtccggaattcccgggtcgacccacgcgtccgcaagggccctttacattgcgttcttaacggttcagtcaccttaaccgttattattcacttgcgggcgagaagtccgagctagggatcctgaaaaggagggaacaattgttgtagcaggtctaaaagttcaggtccagccccggtttctctggattctgtgcttctccatggaggaaactcaaggagaactgacaagttcttgtggttctaaaaccatggccaatgtatctttggcatttagggatgtgtccatagacctctcccaagaggagtgggagtgcctggacgctgtgcagagggacttgtacaaggatgtgatgttggagaactacagcaacctggtctcactggatttggaatacaagtatattaccaagaatttgctttcagaaaagaatgtttgcaaaatctatttatctcaattgcagacaggggaaaaaagtaaaaacaccatccatgaggacaccattttcagaaatggtttgcagtgtaaacatgaatttgagagacaagagagacatcagatgggatgcgttagtcaaatgctaatccaaaaacaaatatctcatcctctacatccaaaaattcatgctagagagaaatcatatgaatgtaaggaatgtagaaaggcctttagacaacagtcataccttattcaacatctgagaattcacactggtgagagaccctataaatgtatggaatgtggaaaggccttttgtcgagtgggagaccttagagtacatcacacaatccatgctggggagagaccctatgaatgtaaagaatgtgggaaggcctttagacttcattatcaccttactgaacatcagagaatacattctggtgtgaaaccctacgagtgtaaggaatgtgggaaagcctttagtcgtgttagagaccttagagtacatcagacaattcatgctggagagagaccttatgaatgcaaagaatgtgggaaggcctttagacttcattatcaactaactgaacatcaaagaattcatactggtgagaggccttatgaatgtaaggtttgtggcaagacctttagggtacaacgacatattagtcaacatcagaaaattcatactggtgtcaaaccctataaatgtaatgaatgtgggaaggcctttagtcatggctcataccttgttcaacatcagaaaattcatactggtgaaaaaccctacgaatgtaaagaatgtggtaagtcctttagttttcatgcagaacttgctcgacatcgtagaattcatactggtgagaaaccctatgaatgtagagaatgtggaaaagcctttcgtcttcaaacggaacttactcggcatcatagaactcatactggtgagaaaccctatgaatgtaaggaatgtgggaaggcctttatttgtggttatcaacttactttacatctgagaactcacaccggtgagattccctatgaatgtaaggaatgtggaaaaaccttcagtagtcgctatcatctcactcaacactacagaattcatactggtgagaaaccctacatatgtaacgaatgtggaaaagcctttcgtcttcaaggagaacttacccgacatcacagaattcatacatgtgagaaaccctatgaatgtaaggaatgtgggaaggcttttattcatagcaatcaatttatttcacaccagcgaattcacaccagtgagagcacctacatatgtaaagaatgtgggaagatttttagtcgtcgctataatcttactcaacattttaaaattcatactggtgaaaaaccctacatatgtaatgaatgtgggaaagcctttcgatttcaaacagaacttactcagcatcacagaattcatactggtgaaaaaccctataaatgtacagaatgtgggaaggcctttattcgtagcactcatctcacgcaacatcacagaattcatactggtgagaaaccctacgaatgtacggaatgtgggaagacgtttagtcggcactatcatcttactcaacatcacagaggccatactggtgagaagccctacatatgtaatgaatgtgggaatgcttttatttgcagttatcgacttacattacatcaaagaattcacactggtgagcttccatatgaatgtaaggaatgtggaaagacctttagtcgtcggtatcatcttactcaacattttagacttcatactggtgagaaaccttatagctgtaaagaatgtgggaatgcctttcgtcttcaagcagaacttactcgacatcacatagttcacacgggtgagaaaccctataaatgtaaagaatgtgggaaagccttcagtgttaattcagaacttactcgacatcacagaattcatactggtgaaaaaccctatcaatgtaaagaatgtggaaaagcctttattcgtagtgatcaacttactttacatcagagaaatcatattagtgaggaagtcctatgcataatgtaaagagaatacgatggcctttagaaaatgccctttagcagagaatttgtaatttaagaaattttctgtttgttacggaacatgtgggaatcccttttacttcatgctcacaatttatcagaaattatttcgtatgttaaagagtcgaaaga

SEQ ID NO: 902 - DNA, 791 bp, Homo sapiens
  CDS (208)..(738)
tgcttatttttcccttaactactccagtgttttggcatttttgcctttggagtgaggggcttcccagcctgggactggggaaggactaattcagagagtctctgtccacagactgatgctgagaagcactcacaggtggagaggaattccctgtggtctggtgatgatgtcaagaaatcagacggaggctcagacagcggcataaaaatggagccaggttccaagtggaggcggaatccttctgatgtgtctgacgagtccgacaaaagcacgtcgggcaagaagaatcctgtcatctcccagacaggctcatggcggcgaggcatgacagctcaggtgggcatcaccatgccaaggacgaaggcttcagccccggcaggcgcactgaagaccccaggaactggtaagaggccggggctgtcttggccctggggcaccaacgccagcagctcctccgcagttagcaaggatggcctgggctttcagtctgtcagcagcctccacaccagctgtgagtccatcgacatctccctcagcagtggaggggtccccagccacaattcttccactggcctcatcgcctcctccaaggacgactccttgactccctttgtcagaactaacagtgtgaagaccacactgtcagaaaggttggtgctgtgcctctggctgcctttctcagaaagacacccttccaaaaataaaaagattagcttaggaatcccaaatgtcgaatagcctttgcctgtaagatttctcctcgtgccgaatctcttgctcgagggccaaat

SEQ ID NO: 903 - DNA, 3277 bp, Homo sapiens
  CDS (145)..(792)
cacctttcggaattcccgggtcgacgatttcgtgggggagacggagccccaggagtgttgaagcctggaaatcccctcccctttcccctcccccctttacagtatccccctccctccaccctttcccattctgataatctggccatgactagcagaagcacagctaggcccaatgggcaaccccaggccagcaaaatttgccagttcaaattggtcctgctgggagaatctgcagtgggaaagtcaagcctggtattacgttttgtcaaagggcagttccatgagtaccaggagagcaccattggagcggccttcctcacccagtccgtttgtctagatgacacaacagtgaagtttgagatctgggacacagctgggcaggagcgatatcacagcttagcccccatgtactacaggggtgcccaagctgcaatcgtggtttacgacattactaatcaggaaacctttgcccgagcaaagacatgggtgaaggaactacagcgacaggccagtcctagcatcgttattgccctggcagggaacaaagctgacctggccaacaaacgtatggtggagtatgaagaggcccaggcatatgcagatgacaacagcttattgttcatggagacttcagccaagacagctatgaacgtgaatgatctcttcctggcaatagctaagaagttgccaaagagtgaaccccagaatctgggaggtgcagcaggccgaagccggggtgtggatctccatgaacagtcccagcagaacaagagccagtgttgtagcaactgagggggtggctagcagcaaacaagtatggagctagcacaagagctaagaaataacctccatccctacccctcagcacacaacccctacggtaacagcacactgagccctggctcccaagggctgcctcctgacagctccgtcatggcactttttaacgcttcagcaacaaacaccaggcagctgttgccactggcctcctaccccctactctggggcttgggggtcaactccccccaggacttaccttccaaaacaaactttcttcactttgtattataggtacaagacagcgacttacgtatcttttctcctcctccctagtgttcctccccattttttcagaaaacacttctgactcctgtcccttccccttctgcttttggtcagtccctgttcttgagcctcttttctcctctccccaggatgcagaaagtggtgaacccaggaactgaggaaggaggtttccagttcatttacattaagggccctgggggagaataaagctcagagcaggagggagtaaggaaacatttcctttttgtttttatttggttggagtttctcatatttgaaaacattgcggtatccatgatttggccttgtggagggtgttcctaggtagaggtgagaatggggaggcaagatctcaggcaccaggcaggaggtgccttgtaagctaactgggcggaggtggaggtgcagtgtcaactgtggctctgtaactcttcaaaggcccagtttcccctcacgcagcctcttaggtagcgtttcccctaatcgtgggggttggaccccagagtcttccaaagaattttcactggttgcctgcatctttggctctgctgtgatctgattggaggagggacagtttctggtacccatcctctgatttatacatatgcattttttcccctctggcctttagatggcctcagccccagccaccatatacccctgcagtttgcactttaattgatggtagttcagttggggtacttgttttatggaagttttgattgatttacttgccctcccaccttctttttaattcaatgaaatctgaggttaatgcgaggttcgaggagaggttatagataaaactaccagtggcagctactcaagtcctatctccactgttagcttcctccaactctaattattaacctatattcttgccaagctaactattgactataggtttgcctttcctggagaattaattgagcaattgaggagtgtctcaggatagcacaggccaaggtaggggagtaaaaaggaggtcaggcaaaagggaggagttttctgtcctttcccaggtttcacactcaatttgatatccattaccatgtcttttctacttccttgtaaataggtatgatctttattcccactgtacagtctgttctatcctctgcctcccatcaggccctgtttctttgttcctttgttaatatcttgaatttagtccctccatccttaatccccccatccctccccatcatgcaaccagtggtttaatccatgtaccaataggggctagtaccacagaggcctcctgtggtgccctcgtatcataccacctgttcctgtggagagggaatgaccggcactgaaggtaccttacaactggctcatattatcagaggaccttggtcctttctaaatctctagtctctcttcatatccttcatcaggtgttttaagatgtctctgagaagccatcaaggcaaaagagaactttaagttccttgttccagcccggagttttgggaaagaaagaaaggaaaggtcacagtgacctaggattggaaccttcctgcccttttggcttgcagactgccttctatcccagaacagctgagaaatctatgaagctgagattctgaaggacccagcttaggttcttccacttaggcctcaattcccttccttttccaggggcagccttagttcccatggccctgaaacacacacatttcccccttcctttcccagaagccactggccccccatagcacccagtgcatcctttttacaagtggaagaactaggatggctttccaaagtcttctagaaatgaagttctttctctgtgcagctttcccccttggagcaggagtgaagatgtttcattatcttgggcctgggaaaccacttccccaggcttctccctccccccacccccataggaacaggatttggccttagcttctgggcctatcggctgccttccctctacttcctaccacctcttctgccttcctttgagctctgttgggcttggggatcttagttttcttttgtttatttcccagctcatttttttcttctggtcagtttttttaagggggggtgttgtggttttttgtttttgttttgcttctgagaaagcatttgcctttcttcctctcccaacataacaatcgtggtaacagaatgcgactgctgatttaccgatgtatttaatgtaagtaaaaaaaaaaaa

SEQ ID NO: 904 - DNA, 2818 bp, Homo sapiens
  CDS (75)..(2468)
gaattccggacaggacgtgaagatagttgggtttggaggcggccgccaggcccaggcccggtggacctgccgccatgcaggacggtaacttcctgctgtcggccctgcagcctgaggccggcgtgtgctccctggcgctgccctctgacctgcagctggaccgccggggcgccgaggggccggaggccgagcggctgcgggcagcccgcgtccaggagcaggtccgcgcccgcctcttgcagctgggacagcagccgcggcacaacggggccgctgagcccgagcctgaggccgagactgccagaggcacatccagggggcagtaccacaccctgcaggctggcttcagctctcgctctcagggcctgagtggggacaagacctcgggcttccggcccatcgccaagccggcctacagcccagcctcctggtcctcccgctccgccgtggatctgagctgcagtcggaggctgagttcagcccacaacgggggcagcgcctttggggccgctgggtacgggggtgcccagcccacccctcccatgcccaccaggcccgtgtccttccatgagcgcggtggggttgggagccgggccgactatgacacactctccctgcgctcgctgcggctggggcccgggggcctggacgaccgctacagcctggtgtctgagcagctggagcccgcggccacctccacctacagggcctttgcgtacgagcgccaggccagctccagctccagccgggcaggggggctggactggcccgaggccactgaggtttccccgagccggaccatccgtgcccctgccgtgcggaccctgcagcgattccagagcagccaccggagccgcggggtaggcggggcagtgccgggggccgtcctggagccagtggctcgagcgccatctgtgcgcagcctcagcctcagcctggctgactcgggccacctgccggacgtgcatgggttcaacagctacggtagccaccgaaccctgcagagactcagcagcggttttgatgacattgacctgccctcagcagtcaagtacctcatggcttcagaccccaacctgcaggtgctgggagcggcctacatccagcacaagtgctacagcgatgcagccgccaagaagcaggcccgcagccttcaggccgtgcctaggctggtgaagctcttcaaccacgccaaccaggaagtgcagcgccatgccacaggtgccatgcgcaacctcatctacgacaacgctgacaacaagctggccctggtggaggagaacgggatcttcgagctgctgcggacactgcgggagcaggatgatgagcttcgcaaaaatgtcacagggatcctgtggaacctttcatccagcgaccacctgaaggaccgcctggccagagacacgctggagcagctcacagacctggtgttgagccccctgtcgggggctgggggtccccccctcatccagcagaacgcctcggaggcggagatcttctacaacgccaccggcttcctcaggaacctcagctcagcctctcaggccactcgccagaagatgcgggagtgccacgggctggtggacgccctggtcacctctatcaaccacgccctggacgcgggcaaatgcgaggacaagagcgtggagaacgcggtgtgcgtcctgcggaacctgtcctaccgcctctacgacgagatgccgccgtccgcgctgcagcggctggagggtcgcggccgcagggacctggcgggggcgccgccgggagaggtcgtgggctgcttcacgccgcagagccggcggctgcgcgagctgcccctcgccgccgatgcgctcaccttcgcggaggtgtccaaggaccccaagggcctcgagtggctgtggagcccccagatcgtggggctgtacaaccggctgctgcagcgctgcgagctcaaccggcacacgacggaggcggccgccggggcgctgcagaacatcacggcaggcgaccgcaggtgggcgggggtgctgagccgcctggccctggagcaggagcgtattctgaaccccctgctagaccgtgtcaggaccgccgaccaccaccagctgcgctcactgactggcctcatccgaaacctgtctcggaacgctaggaacaaggacgagatgtccacgaaggtggtgagccacctgatcgagaagctgccgggcagcgtgggtgagaagtcgcccccagccgaggtgctggtcaacatcatagctgtgctcaacaacctggtggtggccagccccatcgctgcccgagacctgctgtattttgacggactccgaaagctcatcttcatcaagaagaagcgggacagccccgacagtgagaagtcctcccgggcagcatccagcctcctggccaacctgtggcagtacaacaagctccaccgtgacttccgggcgaagggctatcggaaggaggacttcctgggcccataggtgaagccttctggaggagaaggtgacgtggcccagcgtccaagggacagactcagctccaggctgcttggcagcccagcctggaggagaaggctaatgacggaggggcccctcgctggggcccctgtgtgcatctttgagggtcctgggccaccaggaggggcagggtcttatagctggggacttggcttccgcagggcagggggtggggcagggctcaaggctgctctggtgtatggggtggtgacccagtcacattggcagaggtgggggttggctgtggcctggcagtatcttgggatagccagcactgggaataaagatggccatgaacagtcaaaaaaaaaaaa

SEQ ID NO: 905 - DNA, 988 bp, Homo sapiens
  CDS (199)..(750)
atgtaaatcacacagatgttggtagagaaaaaggcatactggtattgaaactgtaaactggcctgtttacttcgtctcctaacaaaaaacactttggattcaggttctccacagcagtcttccactggccacagtgaggggagctaggtttccccagtctccagctagaaaaactcagaacatctaaagatctgaaagatggaaaaaagagaactaaaggcttctgttccaaaatttgacaagattccttggcttagtgaggccagccttgtaaacaagccattagtgctcagccttcccagaagatatcctcatacctctgcgacttttctgacttcatccaagaagaatatgaatttgccaattttgtttcaagttccagatgttttatctaaggccaggaggaaccagtgtgactccatgctgctcagaaaccaacagctgtgctccacatgtcaagaaatgaaaatggtacaaccaagaacaatgaaaatcccagatgatccaaaagcatcctttgagaattgtatgagttatagaatgagtcttcatcaacccaaattccagactacacctgagcctttccatgatgacatcccaacagaaaacattcactacagactgcccattctgggccccaggacagctgtcttccacggattactgacagaggcctacaaaactctaaaagagagacaacgttcttccttgcccagaaaggaaccaataggcaagacaacgaggcagtgagcggtaggagctcatcacctcccagactcccagagagaaaataacctcgccaagccaatctttgacactggcaccttctcctcacaattttctctcttctcccaaaagatgatttaattttgccttcctaagattgctggtattctagctcttacctctatgttctttctcacgtctcctaaagacaaaattgtttaatttacatgattataaagatctgtttatgaaaaaaaaaaaa

SEQ ID NO: 906 - DNA, 4265 bp, Homo sapiens
  CDS (153)..(3359)
atttggccctcgaggccaagaattcggcacgagcggcacgagaggaaactgtttaaccggatcccattgtacccagagtgcagagccgcctttccagcatgcaggggctgctcagcgtttagtcacatcaagaaatagaacagaattcagccatggccccaagaaagagaggtggacgaggtatttcattcatcttttgctgtttccgaaataatgatcacccagaaatcacgtatcggctgcgaaatgatagcaactttgcgcttcagaccatggaaccagcattgcccatgccccctgtggaggagctggatgtcatgttcagtgaactggtggatgaactggacctcacagacaaacacagagaagccatgtttgcacttccagctgagaaaaaatggcaaatatactgtagcaagaaaaaggaccaggaagaaaacaagggagctacaagttggcctgaattctacattgatcagctcaattccatggctgctagaaaatctctgctggctttagagaaggaagaagaagaagaaagaagtaaaactatagagagtttaaagacagcactgaggacaaaaccaatgaggtttgtaaccagattcatcgacttggatggcctatcatgtatcctcaactttctaaagaccatggactacgagacctcagagtctcgaatacatacttctctcattggctgtataaaggcgttaatgaacaactctcaaggccgggctcacgtcctggctcattctgagagtattaatgtaattgctcagagtctgagcacagagaacattaaaacgaaggtggccgtgctggaaatcttgggcgccgtgtgcctggttcccgggggccacaagaaggttctgcaggccatgctgcactaccagaagtatgccagcgaaaggacccgctttcagacattaattaacgacttggataaaagcactgggcggtatcgagatgaagtgagtctcaagactgccatcatgtccttcattaatgcagtgctcagccaaggtgcaggagtggagagtttggactttagacttcatcttcgctatgaatttctgatgttaggaattcaacctgtaatagataaattaagggaacacgaaaattcaacattagataggcatttagacttttttgaaatgctccgaaatgaagatgaactagaatttgccaaaagatttgaactggttcacatagacacaaaaagtgcaactcagatgtttgagctgaccaggaagaggctgacacatagtgaagcttacccgcatttcatgtccatcctgcaccactgcctccaaatgccttacaagaggagtggcaacactgttcagtactggctactactagatagaattatacagcagatagttatccagaatgacaaaggacaggaccctgactccacacctttggaaaactttaatattaagaatgtcgtacgaatgttggttaatgaaaatgaagttaagcagtggaaagaacaagcggaaaaaatgagaaaagagcacaatgagctacaacagaaactggaaaagaaagaacgagaatgtgatgctaagactcaagagaaggaagagatgatgcagaccttaaataaaatgaaagagaaacttgaaaaggagactactgagcataagcaagtcaagcagcaggtggcggacctcacagcacagctccatgagctcagcaggagggccgtctgtgcttcaatcccaggtggaccctcgcctggagcaccaggagggccctttccttcctctgtgcctggatctctccttcctcccccaccacccccacctctaccaggtgggatgcttccccctccaccgcctcccctccctccaggtggccctcctcctcccccagggcctcctcccttaggggcaatcatgccacctcctggtgctccaatgggcctagcactgaagaagaaaagcattcctcagcccacaaatgccctgaaatccttcaactggtctaaactgcccgagaacaaactggaaggaacagtatggaccgaaattgatgatacaaaagtcttcaaaattctagatcttgaagacctggaaagaaccttctctgcctatcaaagacagcagaaagaagcagatgccattgatgacactctgagttccaaacttaaagttaaagagctttcggtgattgatggtcggagagctcagaattgcaacatccttctatcgaggttgaaattatccaatgacgaaatcaaacgggcaattctaacaatggacgaacaggaagatctgcccaaggacatgttggaacagctcttgaaatttgttcctgaaaaaagtgacattgacctattggaggaacataaacatgaactggatcggatggccaaggctgataggttcctttttgagatgagccgaattaatcactatcagcaaaggttgcaatcgctgtacttcaaaaagaagtttgcagagcgtgtggcagaagtgaaacctaaagtggaagcaattcgttctggctcagaagaggtgtttaggagtggtgccctcaagcagttgctggaggtggttttggcatttggaaattatatgaataaaggtcaaagagggaatgcatatggattcaagatatctagcctaaacaaaattgctgacacaaaatccagcatcgacaaaaacattacccttttgcactatctcatcactattgtggaaaataagtaccccagtgttctcaatctaaatgaagaattgcgagatattcctcaagctgcgaaagtaaacatgactgagctggacaaagaaataagtaccttgagaagtggcttgaaagcagtagagacagagctggaatatcagaagtctcagcccccacagcccggagataagtttgtgtctgttgtcagccagttcatcacagtagccagcttcagcttctctgatgttgaagaccttctagcagaagctaaagacctgtttactaaagcagtgaagcactttggggaagaggctggcaaaatacaaccagatgagttctttggcatttttgatcaatttcttcaagctgtgtcagaagccaaacaagaaaacgaaaatatgagaaagaaaaaggaggaagaagaacgtcgagctcgcatggaagctcagctcaaagaacaacgtgaaagggaacgtaaaatgagaaaagctaaagagaatagtgaagaaagcggagagtttgatgaccttgtttcagctttacgctcaggagaagtgtttgacaaagacctttctaaattgaaacggaatcgcaaacgtattaccaaccagatgactgacagcagcagagagagaccaatcacaaaacttaatttctaattttccatgaatacttttttttagaaagctcattagcagccctctaaagtgactagaacgtttcattacactgccttgcaatccaaacagtggcaattttttccttcatctgtgagtgaatgtgtgaacgtgtgtatgtaaatgtatgtgtgtatatattaaaaaatgtatatagatgtctgagtgttgtctggagacctatacgtatggttaaaaagatttatgttaatgtatgtgctccaaaacctttcgtgtatgcattcacattgagtgtggctcattttctttccccgaacgccatgactgttcagaagcacaatactatctcctgaaagagataagagacattccctagattcaaaggcaaaacagaagaaacaaacaaacaaacaaacaaagcttgcaaaatattttatggtttccaagcttgatatcctttaaaattattttcattgatggaactggagttgttggaaaaacatagatttaaaatgatttttgatagctgacattgtgatgttgatgtatcacatcagtaataggaccagctttgaatttctgacattggtgtggggatacagtctgtaaatgtttattgagaacatcttgcacacaatttgaattatgtagaatgtcaatcaagtttttgtatatttaaaagttggacatcaattttttcccctgatttcatcaagttatctctgccaagtgctcttgataatttcttcagatttttggaaaaaaacactatataaatgcaatccatgctttttttaaagaacaacattgccagagtatgcttgttctaacaatatagatatataaaccttaaaaataataaaatatctcacccaagacttaaaggaagaattctctgaagggataaagattactaaaaaaaaaaaa

SEQ ID NO: 907 - DNA, 1957 bp, Homo sapiens
  CDS (77)..(1639)
cggctgtagtaattcggcacgagcctcggcggcccggctggtgaatcacacactctatgttcacctgcagccgggcatgagcctggagggcccggctcagccccagtacagccccgtgcaggccacgtttgaggttcttgatttcatcacgcacctctatgctggcgccgacgtccacaggcacttggacgtcagaatcctactgaccaatatccgaaccaagagcacctttctccctcccctgcccacctcagtccagaatctcgcccacccgccagaagtcgtgttgacagatttccagaccctggatggaagccagtacaacccggtcaaacagcagctagtgcgttacgccaccagctgttacagctgttgtccgcgactggcctcggtgctgctatactccgattatgggataggagaagtgcccgtggagcccctggatgtccccttaccctccacgatcaggccagcttcccccgtggccgggtctccaaagcagccggtgcgtggctactaccgtggcgctgtcggtggcacgtttgaccgcctgcacaacgcccacaaggtgttgctcagtgtcgcgtgcatcctggcccaggagcagcttgtggtgggagtagcagacaaagatctgttgaagagcaagttgctccctgagctgctccaaccttatacagaacgtgtggaacatctgagtgaattcctggtggacatcaagccctccttgacttttgatgtcatccccctgctggacccctatgggcccgctggctctgacccctccctggagttcctggtggtcagcgaggagacctatcgtggggggatggccatcaaccgcttccgccttgagaatgacctggaggaacttgctttgtaccagatccagctgctgaaggacctcagacatacagagaatgaagaggacaaagtcagctcctccagcttccgccagcgaatgttggggaacctgcttcggcctccatatgaaaggccagagctccccacatgtctctatgtaattgggctgactggcatcagtggctctgggaagagctcaatagctcagcgactgaagggcctgggggcgtttgtcattgacagtgaccacctgggtcatcgggcctatgccccaggtggccctgcctaccagcctgtggtggaggcctttggaacagatattctccataaagatggcatcatcaacaggaaggtcctaggcagccgggtgtttgggaataagaagcagctgaagatactcacggacattatgtggccaattatcgcaaagctggcccgagaggagatggatcgggctgtggctgagggaaagcgtgtgtgtgtgattgatgccgctgtgttgcttgaagccggctggcagaacctggtccatgaggtgtggactgctgtcatcccagagactgaggctgtaagacgcattgtggagagggatggcctcagtgaagccgcggctcaaagccggctgcagagccagatgagcgggcagcagcttgtggaacagagccacgtggtgctcagcaccttgtgggagccgcatatcacccaacgccaggtggagaaagcctgggccctcttgcagaagcgcattcccaagactcatcaggccctcgactgaaaagttctcagtggggccagactggctcctggagctgacaagcgaccccgtggtgaggagaaatgggggccttgatgctcaccctggttcaggcccagaggtccaagctatactgtgcaggacatggccaggcctggtggacacaggaagcctacccaacacgctggtatttggccaacactgaggatgtggttcatgggggagcagtcccctccccactcttgcccatgggtgactcttacccacagctgactagggccagcgcaaatactggaacctgtaacagaattaaaggtgaatgttctgaaaaaaaaaaaa

SEQ ID NO: 908 - DNA, 4399 bp, Homo sapiens
  CDS (141)..(4133)
tttgatagctgtacgcctgcaggtaccggtccggaattcccgggtcgacgatttcgtgtggtgtgtagccggcttggcgtgaccctcgcctgatccagttgttagagttggaagcttggcagttggcctcccttcttcccatggaggacgggggcttaacagcctttgaagaggaccagagatgcctttcccagagcctccccttgccagtgtcagcagagggcccagctgcacagaccactgctgagcccagcaggtcgttttcctcagcccacagacacctgagcagaaggaatgggctttccagactctgccagagcaggacagcgctctctgaagacagatggagctcctattgtctatcatcactggctgcccagaatatttgtacaagtaaactgcactgccctgctgcccctgagcacacggacccgtccgaaccgcggggcagtgtgtcctgctgctccctgctgcggggactgtcctcagggtggtcctcacctctgcttccggcccctgtgtgcaaccctaacaaggccatcttcacggtggatgccaagaccacagagatcctcgttgctaacgacaaagcttgcgggctcctggggtacagcagccaggacctgattggccagaagctcacgcagttctttctgaggtcagattctgatgtggtggaggccctcagcgaggagcacatggaggccgacggccacgctgcggtggtgtttggcacggtggtggacatcatcagccgtagtggggagaagattccagtgtctgtgtggatgaagaggatgcggcaggagcgccgcctatgctgcgtggtggtcctggagcccgtggagagggtctcgacctgggtcgctttccagagcgatggcaccgtcacgtcatgtgacagtctctttgctcatcttcacgggtacgtgtctggggaggacgtggctgggcagcatatcacagacctgatcccttctgtgcagctccctccttctggccagcacatcccaaagaatctcaagattcagaggtctgttggaagagccagggacggtaccaccttccctctgagcttaaagctgaaatcccaacccagcagcgaggaggcgaccaccggtgaggcggcccctgtgagcggctaccgggcatctgtctgggtgttctgcaccatcagtggcctcatcaccctcctgccggatgggaccatccacggcatcaaccacagcttcgcgctgacactgtttggttacggaaagacggagctcctgggcaagaatatcactttcctgattcctggtttctacagctacatggaccttgcgtacaacagctcattacagctcccagacctggccagctgcctggacgtcggcaatgagagtgggtgtggggagagaaccttggacccgtggcagggccaggacccagctgaggggggccaggatccaaggattaatgtcgtgcttgctggtggccacgttgtgccccgagatgagatccggaagctgatggaaagccaagacatcttcaccgggactcagactgagctgattgctggaggccagctcctttcctgcctctcacctcagcctgctccaggggtggacaatgtcccagaaggaagcctgccagtgcacggtgaacaggcgctgcccaaggaccagcaaatcactgccttggggagagaggaacctgtggcaatagagagccccggacaggatcttctgggagaaagcaggtctgaaccagtggatgtgaagccatttgcttcctgcgaagattctgaagctccagtcccagctgaggatgggggcagtgatgctggcatgtgtggcctgtgtcagaaggcccagctagagcggatgggagtcagtggtcccagcggttcagacctttgggctggggctgccgtggccaagccccaggccaagggtcagctggcggggggcagcctcctgatgcactgcccttgctatgggagtgaatggggcttgtggtggcgaagccaggacttggcccccagcccctctgggatggcaggcctctcgtttgggacacctactctagatgagccgtggctgggagtggaaaacgaccgagaagagctgcagacctgcttgattaaggagcagctgtcccagttgagccttgcaggagccctggatgtcccccacgccgaactcgttccgacagagtgccaggctgtcaccgctcctgtgtcgtcctgcgatctgggaggcagagacctgtgcggtggctgcacgggcagctcctcagcctgctatgccttggccacggacctccctgggggcctggaagcagtggaggcccaggaggttgatgtgaattcgttttcctggaacctcaaggaactctttttcagtgaccagacagaccaaacgtcatcaaattgttcctgtgctacgtctgaactcagagagacaccctcttccttggcagtgggctccgatccagatgtaggcagtctccaggaacaggggtcgtgtgtcctggatgacagggagctgttactactgaccggcacctgtgttgaccttggccaaggccgacggttccgggagagctgtgtgggacatgatccaacagaaccgcttgaggtttgtttggtgtcctctgagcattatgcagcaagcgacagagaaagcccaggacacgttccttccacgttggatgctggccctgaggacacgtgcccatcagcagaggagccaaggctgaacgtccaggtcacctccacgcccgtgatcgtgatgcgcggggctgctggcctgcagcgggagatccaggagggtgcctactccgggagctgctaccatcgagatggcttacggctgagtatacagtttgaggtgaggcgggtggagctccagggccccacacctctgttctgctgctggctggtgaaagacctcctccacagccaacgcgactcagccgccaggacccgcctgttccttgccagcctgcccggctccacccactctaccgctgctgagctcaccggacccagcctggtggaagtgctcagagccagaccctggtttgaggagccccccaaggctgtggaactggaggggttggcggcctgtgagggcgagtactcccaaaagtacagtaccatgagcccgctgggcagtggggccttcggcttcgtgtggactgctgtggacaaggaaaaaaacaaggaggtggtggtgaagtttattaagaaggagaaggtcttggaggattgttggattgaggatcccaaacttgggaaagttactttagagatcgcaattctatccagggtggagcacgccaatatcatcaaggtattggatatatttgaaaaccaagggttcttccagcttgtgatggagaagcacggctccggcctagacctcttcgctttcatcgaccgccaccccaggctggatgagcccctggcgagctacatcttccgacaagtgagagcaggccagagccgtctagtgtcagcagtgggatacctgcgcttgaaggacatcatccaccgtgacatcaaggatgagaacatcgtgatcgctgaggacttcacaatcaagctgatagactttggctcggccgcctacttggaaaggggaaaattattttatactttttgtgggaccatcgagtactgtgcaccggaagttctcatggggaatccctacagagggccggagctggagatgtggtctctgggagtcactctgtacacgctggtctttgaggagaaccccttctgtgagctggaggagaccgtggaggctgccatacacccgccatacctggtgtccaaagaactcatgagccttgtgtctgggctgctgcagccagtccctgagagacgcaccaccttggagaagctggtgacagacccgtgggtaacacagcctgtgaatcttgctgactatacatgggaagaggtgtttcgagtaaacaagccagaaagtggagttctgtccgctgcgagcctggagatggggaacaggagcctgagtgatgtggcccaggctcaggagctttgtgggggccccgttccaggcgaggctcctaatggccaaggctgtttgcatcccggggatccccgtctgctgaccagctaaacaccaatttcttcctgcttttctccacttggtttggaaaatcacacagttttcaggctccatctgtttggagaaaatacattctgaagcatccccaattcaccttctaaaaactcatgtgcaggtttgataaacaccagaacagaagacagtgatgctgtattattttagatttattacatagatttggaattcacttttttcatgacctagaaaaaaacattccagtgttcaactgttttatattattaaagggcttttaattt

SEQ ID NO: 909 - DNA, 4393 bp, Homo sapiens
  CDS (141)..(4112)
tttgatagctgtacgcctgcaggtaccggtccggaattcccgggtcgacgatttcgtgtggtgtgtagccggcttggcgtgaccctcgcctgatccagttgttagagttggaagcttggcagttggcctcccttcttcccatggaggacgggggcttaacagcctttgaagaggaccagagatgcctttcccagagcctccccttgccagtgtcagcagagggcccagctgcacagaccactgctgagcccagcaggtcgttttcctcagcccacagacacctgagcagaaggaatgggctttccagactctgccagagcaggacagcgctctctgaagacagatggagctcctattgtctatcatcactggctgcccagaatatttgtacaagtaaactgcactgccctgctgcccctgagcacacggacccgtccgaaccgcggggcagtgtgtcctgctgctccctgctgcggggactgtcctcagggtggtcctcacctctgcttccggcccctgtgtgcaaccctaacaaggccatcttcacggtggatgccaagaccacagagatcctcgttgctaacgacaaagcttgcgggctcctggggtacagcagccaggacctgattggccagaagctcacgcagttctttctgaggtcagattctgatgtggtggaggccctcagcgaggagcacatggaggccgacggccacgctgcggtggtgtttggcacggtggtggacatcatcagccgtagtggggagaagattccagtgtctgtgtggatgaagaggatgcggcaggagcgccgcctatgctgcgtggtggtcctggagcccgtggagagggtctcgacctgggtcgctttccagagcgatggcaccgtcacgtcatgtgacagtctctttgctcatcttcacgggtacgtgtctggggaggacgtggctgggcagcatatcacagacctgatcccttctgtgcagctccctccttctggccagcacatcccaaagaatctcaagattcagaggtctgttggaagagccagggacggtaccaccttccctctgagcttaaagctgaaatcccaacccagcagcgaggaggcgaccaccggtgaggcggcccctgtgagcggctaccgggcatctgtctgggtgttctgcaccatcagtggcctcatcaccctcctgccggatgggaccatccacggcatcaaccacagcttcgcgctgacactgtttggttacggaaagacggagctcctgggcaagaatatcactttcctgattcctggtttctacagctacatggaccttgcgtacaacagctcattacagctcccagacctggccagctgcctggacgtcggcaatgagagtgggtgtggggagagaaccttggacccgtggcagggccaggacccagctgaggggggccaggatccaaggattaatgtcgtgcttgctggtggccacgttgtgccccgagatgagatccggaagctgatggaaagccaagacatcttcaccgggactcagactgagctgattgctggaggccagctcctttcctgcctctcacctcagcctgctccaggggtggacaatgtcccagaaggaagcctgccagtgcacggtgaacaggcgctgcccaaggaccagcaaatcactgccttggggagagaggaacctgtggcaatagagagccccggacaggatcttctgggagaaagcaggtctgaaccagtggatgtgaagccatttgcttcctgcgaagattctgaagctccagtcccagctgaggatgggggcagtgatgctggcatgtgtggcctgtgtcagaaggcccagctagagcggatgggagtcagtggtcccagcggttcagacctttgggctggggctgccgtggccaagccccaggccaagggtcagctggcggggggcagcctcctgatgcactgcccttgctatgggagtgaatggggcttgtggtggcgaagccaggacttggcccccagcccctctgggatggcaggcctctcgtttgggacacctactctagatgagccgtggctgggagtggaaaacgaccgagaagagctgcagacctgcttgattaaggagcagctgtcccagttgagccttgcaggagccctggatgtcccccacgccgaactcgttccgacagagtgccaggctgtcaccgctcctgtgtcgtcctgcgatctgggaggcagagacctgtgcggtggctgcacgggcagctcctcagcctgctatgccttggccacggacctccctgggggcctggaagcagtggaggcccaggaggttgatgtgaattcgttttcctggaacctcaaggaactctttttcagtgaccagacagaccaaacgtcatcaaattgttcctgtgctacgtctgaactcagagagacaccctcttccttggcagtgggctccgatccagatgtaggcagtctccaggaacaggggtcgtgtgtcctggatgacagggagctgttactactgaccggcacctgtgttgaccttggccaaggccgacggttccgggagagctgtgtgggacatgatccaacagaaccgcttgaggtttgtttggtgtcctctgagcattatgcagcaagcgacagagaaagcccaggacacgttccttccacgttggatgctggccctgaggacacgtgcccatcagcagaggagccaaggctgaacgtccaggtcacctccacgcccgtgatcgtgatgcgcggggctgctggcctgcagcgggagatccaggagggtgcctactccgggagctgctaccatcgagatggcttacggctgagtatacagtttgaggtgaggcgggtggagctccagggccccacacctctgttctgctgctggctggtgaaagacctcctccacagccaacgcgactcagccgccaggacccgcctgttccttgccagcctgcccggctccacccactctaccgctgctgagctcaccggacccagcctggtggaagtgctcagagccagaccctggtttgaggagccccccaaggctgtggaactggaggggttggcggcctgtgagggcgagtactcccaaaagtacagtaccatgagcccgctgggcagtggggccttcggcttcgtgtggactgctgtggacaaggaaaaaaacaaggaggtggtggtgaagtttattaagaaggagaaggtcttggaggattgttggattgaggatcccaaacttgggaaagttactttagagatcgcaattctatccagggtggagcacgccaatatcatcaaggtattggatatatttgaaaaccaagggttcttccagcttgtgatggagaagcacggctccggcctagacctcttcgctttcatcgaccgccaccccaggctggatgagcccctggcgagctacatcttccgacaactagtgtcagcagtgggatacctgcgcttgaaggacatcatccaccgtgacatcaaggatgagaacatcgtgatcgctgaggacttcacaatcaagctgatagactttggctcggccgcctacttggaaaggggaaaattattttatactttttgtgggaccatcgagtactgtgcaccggaagttctcatggggaatccctacagagggccggagctggagatgtggtctctgggagtcactctgtacacgctggtctttgaggagaaccccttctgtgagctggaggagaccgtggaggctgccatacacccgccatacctggtgtccaaagaactcatgagccttgtgtctgggctgctgcagccagtccctgagagacgcaccaccttggagaagctggtgacagacccgtgggtaacacagcctgtgaatcttgctgactatacatgggaagaggtgtttcgagtaaacaagccagaaagtggagttctgtccgctgcgagcctggagatggggaacaggagcctgagtgatgtggcccaggctcaggagctttgtgggggccccgttccaggcgaggctcctaatggccaaggctgtttgcatcccggggatccccgtctgctgaccagctaaacaccaatttcttcctgcttttctccacttggtttggaaaatcacacagttttcaggctccatctgtttggagaaaatacattctgaagcatccccaattcaccttctaaaaactcatgtgcaggtttgataaacaccagaacagaagacagtgatgctgtattattttagatttattacatagatttggaattcacttttttcatgacctagaaaaaaacattccagtgttcaactgttttatattattaaagggcttttaatttgtgaaaaaaaaaaaa

SEQ ID NO: 910 - DNA, 3042 bp, Homo sapiens
  CDS (402)..(2069)
gaattcgcggccgctcgacgctcagcagagctaccagctgccctgttggcttcgctggtcggatcgtcctcctggccccgccaaacaggcggggggagcggccccgactgtggggccatggcagtagtctcctcgttctccgccgccgctagcctagctgagtcgccggcttctgcgctaggggctcccaccgcctccgcaggctaaggagccgctgccaccaacgagctgtgagggttactatgctccctctttgccgccgtctcctcctcttgcccgcgcaggcacccctctggctgctcagtcctgcctcagtgtcaaaccagaagagaagtaaaattcaacaaaaatttatgtgtggagttccttcttaaaagaagaaaaaagtgattatttagactatggatcggagcaaacggaattcaattgcaggatttcctccacgtgtggagcgtcttgaagagtttgaaggaggtggtggaggagaaggaaatgtgagccaggtgggaagagtttggccatcttcgtatcgagctcttataagtgccttttccagactgacgcgtttggatgatttcacctgtgaaaaaatagggtctggcttcttttctgaagtgttcaaggtacgacaccgagcttctggtcaggtgatggctcttaagatgaacacattgagcagtaaccgggcaaacatgctgaaagaagtacagctcatgaatagactctcccatcccaacatccttaggtatatcaactccgggaacctggaacagttgctagacagtaacctgcatttgccttggactgtgagggtaaaactggcctatgacatagcagtgggcctcagctaccttcacttcaaaggcatttttcatcgggacctcacatctaagaactgcctgataaagagggatgagaatggttactctgcagtggtagctgactttggcctggctgagaagatccccgatgtcagcatggggagtgagaagctggccgtggtgggttccccattctggatggcacctgaggttctccgagatgagccctataatgaaaaggcagatgtgttctcttatggtatcatcctctgcgagatcatcgcccgcatccaggccgatccggactatcttccccgcacagagaatttcgggctggactatgatgctttccagcacatggtgggagactgtcccccagattttctgcaacttactttcaactgctgtaacatggatcccaaactgcgcccatcttttgtggagattgggaagaccctggaggaaattctgagccgcctacaggaagaagagcaggagagggataggaagctgcagcccacagccaggggactcttggagaaagcacctggggtgaagcgactaagctcactggatgacaagatcccccacaagtcaccatgcccaagacgtaccatctggctgtctcgaagccagtcagatatcttttcccgtaagcccccacgtacagtgagtgtcttggacccatactaccggccacgagatggtgctgcccgcacccccaaagtcaacccttttagtgctcgccaggacctcatggggggcaagatcaagttttttgacctgcccagcaagtctgtcatctctctggtatttgacctggatgcaccagggcccggaactatgcccctggctgactggcaggagcccctggccccacctattcgccggtggcgttccttgcctggttcgcctgagttcttgcatcaagaggcttgtccatttgtgggccgggaagaatcgctatctgatgggcccccaccacgcctaagtagtctcaagtacagagttaaagagatcccaccattccgggcatctgccctaccagctgctcaagcccatgaggctatggactgctccattctccaggaagaaaatggttttgggtccaggccccaggggaccagtccatgccctgcgggtgcttctgaggagatggaggtagaagaaaggccagcaggctcaactccagccaccttctccacctcaggcataggcctgcaaacccagggaaagcaggatgggtgagggggtttagtccctgcctcaccttggggatggaccttcagctgaaaccatatggccccctaggtgcacagccttgattcttccctggagcctacagagcaggcaggctaggccaagccaggctcaacttctgggctcccagtgcccattggctgtgtatgacgggaggcagcagtgagaggccttcctagttagggccaacagctgataccaagcctctgaaatccagcaaggaggtctgcctcccaccagaccctctccagtgtacttccccagataggaccagaggatgtctagttctaggctgagctggcaggcagctattaccccggttctttccccaccccaggtctgtctcttgccttttcttggggcatataagctactgagtggaacatggagctgatcaagaggccgtaatggtcatggctgtttcccagacctgaatattggggtgcttcttgccagtattctaagacatttgagtaattgctgtttgcacttactgcatggtcagaccacgtcactacatttctatgcaaggggacagcaaggcagcgtggtggtcatggctcttagctaacctattcaaagaccttttcctgttgattaatctattttcatatttataaaggagtcttaatgttctgccccataagactttcaaccttgtggttgggagtggggctggttttgtaggccctagggcctgcttctatgtatttatcaacatgtgatacattcaattggttaaatggtttatacagggactgatttgcttcccttcctgccatggctggagctttgggaacagtctgtccttacagagctgcaataagaaataaccaaagatgaagctggtcaaatattttcataacttgcttctgttgattttttttttgtaaaactttcccaagacattttcagacttaaaaataaagtcagtgttacaggtaaaaaaaaaaagtcgacg

SEQ ID NO: 911 - DNA, 2958 bp, Homo sapiens
  CDS (402)..(1985)
gaattcgcggccgctcgacgctcagcagagctaccagctgccctgttggcttcgctggtcggatcgtcctcctggccccgccaaacaggcggggggagcggccccgactgtggggccatggcagtagtctcctcgttctccgccgccgctagcctagctgagtcgccggcttctgcgctaggggctcccaccgcctccgcaggctaaggagccgctgccaccaacgagctgtgagggttactatgctccctctttgccgccgtctcctcctcttgcccgcgcaggcacccctctggctgctcagtcctgcctcagtgtcaaaccagaagagaagtaaaattcaacaaaaatttatgtgtggagttccttcttaaaagaagaaaaaagtgattatttagactatggatcggagcaaacggaattcaattgcaggatttcctccacgtgtggagcgtcttgaagagtttgaaggaggtggtggaggagaaggaaatgtgagccaggtgggaagagtttggccatcttcgtatcgagctcttataagtgccttttccagactgacgcgtttggatgatttcacctgtgaaaaaatagggtctggcttcttttctgaagtgttcaaggtacgacaccgagcttctggtcaggtgatggctcttaagatgaacacattgagcagtaaccgggcaaacatgctgaaagaagtacagctcatgaatagactctcccatcccaacatccttaggtatatcaactccgggaacctggaacagttgctagacagtaacctgcatttgccttggactgtgagggtaaaactggcctatgacatagcagtgggcctcagctaccttcacttcaaaggcatttttcatcgggacctcacatctaagaactgcctgataaagagggatgagaatggttactctgcagtggtagctgactttggcctggctgagaagatccccgatgtcagcatggggagtgagaagctggccgtggtgggttccccattctggatggcacctgaggttctccgagatgagccctataatgaaaagaatttcgggctggactatgatgctttccagcacatggtgggagactgtcccccagattttctgcaacttactttcaactgctgtaacatggatcccaaactgcgcccatcttttgtggagattgggaagaccctggaggaaattctgagccgcctacaggaagaagagcaggagagggataggaagctgcagcccacagccaggggactcttggagaaagcacctggggtgaagcgactaagctcactggatgacaagatcccccacaagtcaccatgcccaagacgtaccatctggctgtctcgaagccagtcagatatcttttcccgtaagcccccacgtacagtgagtgtcttggacccatactaccggccacgagatggtgctgcccgcacccccaaagtcaacccttttagtgctcgccaggacctcatggggggcaagatcaagttttttgacctgcccagcaagtctgtcatctctctggtatttgacctggatgcaccagggcccggaactatgcccctggctgactggcaggagcccctggccccacctattcgccggtggcgttccttgcctggttcgcctgagttcttgcatcaagaggcttgtccatttgtgggccgggaagaatcgctatctgatgggcccccaccacgcctaagtagtctcaagtacagagttaaagagatcccaccattccgggcatctgccctaccagctgctcaagcccatgaggctatggactgctccattctccaggaagaaaatggttttgggtccaggccccaggggaccagtccatgccctgcgggtgcttctgaggagatggaggtagaagaaaggccagcaggctcaactccagccaccttctccacctcaggcataggcctgcaaacccagggaaagcaggatgggtgagggggtttagtccctgcctcaccttggggatggaccttcagctgaaaccatatggccccctaggtgcacagccttgattcttccctggagcctacagagcaggcaggctaggccaagccaggctcaacttctgggctcccagtgcccattggctgtgtatgacgggaggcagcagtgagaggccttcctagttagggccaacagctgataccaagcctctgaaatccagcaaggaggtctgcctcccaccagaccctctccagtgtacttccccagataggaccagaggatgtctagttctaggctgagctggcaggcagctattaccccggttctttccccaccccaggtctgtctcttgccttttcttggggcatataagctactgagtggaacatggagctgatcaagaggccgtaatggtcatggctgtttcccagacctgaatattggggtgcttcttgccagtattctaagacatttgagtaattgctgtttgcacttactgcatggtcagaccacgtcactacatttctatgcaaggggacagcaaggcagcgtggtggtcatggctcttagctaacctattcaaagaccttttcctgttgattaatctattttcatatttataaaggagtcttaatgttctgccccataagactttcaaccttgtggttgggagtggggctggttttgtaggccctagggcctgcttctatgtatttatcaacatgtgatacattcaattggttaaatggtttatacagggactgatttgcttcccttcctgccatggctggagctttgggaacagtctgtccttacagagctgcaataagaaataaccaaagatgaagctggtcaaatattttcataacttgcttctgttgattttttttttgtaaaactttcccaagacattttcagacttaaaaataaagtcagtgttacaggtaaaaaaaaaaagtcgacg

SEQ ID NO: 912 - DNA, 3353 bp, Homo sapiens
  CDS (55)..(957)
gctgtacgcctgcggtaccggtccggaattcccgggtcgacgatttcgtggaacatggactctgactcttgcgccgccgccttccacccggaggaatactcccccagttgcaagaggcgcaggaccgtggaagacttcaacaaattctgcacctttgtcttggcctatgctggctacatcccttatccgaaggaggaactccctttaaggagcagccccagccctgctaacagcactgctggtaccattgacagcgacggctgggacgcgggtttctcagacatcgcgtcctcagtgcccttgccagtctctgaccgctgctttagccacctgcagcctactctcttgcagcgagccaagcccagtaacttcctgctggacagaaagaaaacggacaagctgaagaagaagaagaagaggaagcgcagggacagtgatgcgcctgggaaagaggggtacagggggggcttgctgaagctggaagccgctgacccctacgtggagacccccacgagtcccaccttgcaggatatcccccaggctcccagcgacccctgctcgggctgggactccgatactccctcgagtggatcttgtgccactgtgtcacctgatcaggtcaaaaaaaaaaaaactgaaggcaaacggactatcgtccggcagggaaagcaggtggtgttccgagatgaggacagcactggcaatgatgaggacatcatggtggactcagatgacgattcctgggacctcgtgacctgcttctgcatgaagccatttgccggccgccccatgatcgagtgtaatgagtgccacacctggattcacctgtcctgtgcgaaaatccggaaatccaatgttccagaagtgtttgtctgccaaaagtgccgggactccaagtttgacatccgccgttccaaccgctcgcggacgggctcccggaagctgttcctggactgactgctggctggcgaggaggctgcgagcgtggaatcggaagcgaccgcgggcttttttgcccttctcttagttgagcacagaaccctcagctctggtgcgggcagatccctgccatttaggtgcctaagcaaaaggacaggctgtccaaggtagaaactgtacatagccggtgaccgaatgcgacctttgccagccagagctgctgccagagctgcgttccctgcagtggaggtggactggacacccacgtgcagcgggtttggctcatttgaaaatgagggtccgtggtagctgtgcgttttgctatcattgctaagagattcccgctgattgggctcagtgccagctgttattctgcttccactgtgttggggagaggtgttcggtttccccagcctgttaatgaacagccatacgtgtaagctttttcttgagtgttaagtcttttaccaaaagtgtctgtacagcagccatccaagttgcccctacttagtggcttgccctctgcctgcctcagctgctgcctgaccggctgggggaggcactggcgggaggcctcgggctcccctggaagggcgctgggctggcgggtcagctggtggttcttaggtttccttctgtttgttaaaagggacaatgtggccacttctctgtggaaagggagttggttggggggttgagatggcccgtgttcataactcagtttcctgttttgcacgatgtaaaaaccctgtctttttgcacgatacagccaaaagtattggctgatttcttgctgagtgccctcttagttggtgtgtgaggtcttggtgggctcaggccagctgtttgcgagtgtgggaactcataggttctgtctttgtctcttcctttcacctcattctggtagcagcataaaggttaggcaatcactgggacccgcatggtgttcctccaaagaatagggtaaaggagagctgggagggagccctctccgttgggtgactcttgtgtgccctttagacaggctggcctgccggttccacagggtacagttaggacttgagtctttctttttctgttttgagttggtgagtgagtgatagggtaacatgggccttcaggatgaccccttggaactgtgccgagttccttaaatctcagctgggatcctggacctgggaggcccctgtgagggccagctctggaaaaacctgggagttgatgccggaggctgtggaagaactctgctcgagggcagggtgccctggaacactggtagttctggggctgggagggagaggggctccggctttctctgaaatgaacactgctcttcagcagttcaagtacttgttctcaaaacattttctaattgattggtaggttttcataagcattgtttctttaaggcatggaaagggaagaatgctcaagcaagtcatgtttgttttcagtgggatgggcccgcgttctcactgctgggggcttccccttcatgtggcacctttgtgccaggccaccaggcagactcttcccaccttctcccactgaagcaccaaggggcttgaaccgtaatttggctaatcagaggcattttttttgtcctagtatctttcacacttgtccaaccgtcttatttttttaaaagttctgttgcttgtattaacacgaaactagagagaaatagtttctgaagccagtttattgtgaagatccccaagggggaggttcggtagagaaaaatagtaagctggtttagaaactgacgagggcaaacagccaggacgcattggagaggaatttgccaaagatctaccctgagataacgcctgtccagtgtcttcaccacgtgaataaccagcgctccaaagtgtttttctgctttgaaaaaaaaaaattccacaagcttttaaaggtgcatttaagaatccatgtgactttagaatggaactgccggccctggcaactgtcacgtgtgctagaaggttcgatgcctctggaatgcatgtgatactcatctccattttgtttccttgattgcatttttgttcttttagcagatctgtccctgtgggtggtgtctaagaagtcggacaccttggtttttgtgttagattgagctgggcagctgcaatcagcttctttatatgcaaattaggcacgacccatctgtggttcctggttggtggctaatgaagtgaggggagggagggatgtcaccccaaaagtaggccctcccattggctttggccaggccagacacttcacatcgtttacatggttctgtgtaattttaaagtttatgtgtataaagcgaagctgtttctgtgaaactgtatattttgtaaataaatatattgctactttgaggttcatgattcaaggttcaggcgattgcgttctgtgctgaagga

SEQ ID NO: 913 - DNA, 7838 bp, Homo sapiens
  CDS (673)..(2616)
tgaatgagtctcatcctgcacttgcagaatggtgcagtttgggcagatatagtcttccccattcctttccaaaagcctccctcgagcctcagaaatgcccacacaatcgccatgaaaccattcttcacagcggtcacagcaaatcataaacctgttgttgtgaggctggcggcaaatgcaatacagggcgttggggtcgtaccctcacattcaggcttcgtattttcaacaactcagattatctagaggctgttcccgtggagtaagctccttcgcctccgactcagtgtagacgtcgccatcccggttccagatttccgcgctccaacgcctccgcagcagccatcttgccagagggccgacgcccttttgactctggcgccaacccgtagtgcgtggtcgccgcgaggggagttctgcgcaagtacggaagctgaggttccgcgcttccgggagaccgtccgctccgccccctcgcgggggcgcttcattggtcatcggctcgcgctctcgcgctctcttgctgtcgcgagagcccaggagaggctgcggagccgcagccgcccagaccgcgcagcgcgggaggcaggttccgcacgtgggaggcagcccaagcgcactgagcgcgtggagcagttcctgaccattgcgcggcgccgcggcaggaggagcatgcctgtctccctggaggattctggtgagcccacgtcctgccccgccacagacgccgagacagcctccgagggcagcgtggaaagcgcttctgagaccagaagcggcccccagtctgcttccacagctgtgaaggaacgaccagcctcttctgaaaaggtgaaaggaggggatgaccacgatgacacctccgatagtgacagcgatggcctgaccttgaaagagcttcagaatcgccttcgcaggaagcgggaacaggagcccactgagaggcccctgaaagggatccagagtcgcctgcggaagaagcgccgggaggagggtcccgccgagactgtgggctccgaggccagtgacactgtggagggcgtcctgcccagtaagcaggagcccgagaacgatcagggggttgtgtcccaggctgggaaagatgacagagagagtaagttggagggaaaggcggctcaggacatcaaagatgaggagcctggagacttgggccgaccgaagcctgaatgtgagggttacgaccccaacgccctgtattgcatttgccgccagcctcacaacaacaggtttatgatttgctgtgaccgctgtgaagaatggtttcatggcgattgtgtgggcatttctgaggctcgagggaggcttttggaaaggaatggggaagactatatctgcccaaactgcaccattctgcaagtgcaggatgagactcattcagaaacggcagatcagcaggaagctaaatggagacctggagatgctgatggcaccgattgtacaagtataggaacaatagagcagaagtctagcgaagaccaagggataaagggtagaattgagaaagctgcaaatccaagtggcaagaagaaactcaagatcttccagcctggtcccgggcctgtccccacccagctgcctgtcctctggcaggtattggaaattgctgtgtctagaagcatctctgccttcacactcttgcactgcattagctgcaaggtgatagaggcgcctggtgcctcaaaatgtattggccccgggtgctgtcacgtggcgcagcccgactcggtgtactgcagtaatgactgtatcctcaaacacgccgcagcgacaatgaagtttctaagctcaggtaaagaacagaagccaaagcctaaagaaaagatgaagatgaagccagagaagcccagtcttccgaaatgcggtgctcaggcaggtattaaaatctcttctgtgcacaagagaccagctccagaaaaaaaagagaccacagtgaagaaggcagtggtggtccctgcgcggagtgaagcactcgggaaggaagcagcttgtgagagcagcacgccgtcgtgggcgagcgatcacaattacaatgcagtaaagccagaaaagactgctgctccctcgccgtcactgttgtataaatccacgaaggaagacaggaggtccgaggagaaagcggcagccacggcagcctcaaagaaaacagcccctccaggctccacggtgggcaagcagcctgcacctagaaacctcgtgccaaagaagtcttcttttgctaatgtggcagcagccacaccagccattaaaaagccaccctcaggtttcaagggcaccatccccaagaggccatggctctccgctaccccatcgagtggtgcttcagctgccaggcaggccggaccggcacctgcagcggcgacggctgcctccaagaagttccctggctccgctgctttggtgggagccgtaaggaagccagtggtaccttctgttccaatggcctcgccagccccaggacgccttggggctatgagtgctgcaccatcgcagccaaattcacaaattcggcaaaatatcagacgctccttaaaagagattttgtggaaaagttccttttttttattctgttcagagtcaatgacagcgatgacttaatcatgacagaaaacgaagtaggaaaaattgccctccatattgagaaggagatgtttaacttgtttcaagttacagataatcgctacaagagtaaatatcgcagcatcatgttcaacctgaaggaccctaaaaatcagggactcttccatcgtgttctgcgtgaggaaatctctttggcgaaacttgtgagactgaagccagaagaacttgtatctaaagagctttccacgtggaaagagaggccagcgagatctgtgatggagtccagaactaaactgcacaatgaaagcaagaagacggcccccaggcaggaggccatccccgatctggaggactctccgccagtgtcggattcagaggaacagcaagagtcagcacgtgctgtccctgagaagagcacagcgccgcttctcgacgtcttcagcagcatgttgaaagacaccaccagtcagcaccgcgcacacctcttcgatctcaactgtaaaatttgcacaggccaggttccctccgcagaagatgagccagctccgaaaaaacaaaaattgtcagcttctgttaagaaagaagacttaaaatcaaagcatgacagctctgcacctgacccagctccggattcagctgatgaggtgatgccggaggctgtgcctgaagttgcctctgagccaggcctagaaagtgcttctcatccaaatgtggacagaacgtatttccctgggcctccaggagatggccatcccgagccctccccgctggaagacctgtccccctgcccagcctcctgtgggagcggggtggtcaccaccgtcacagtgtccggccgggaccccaggaccgctccaagcagttcatgcacagccgtggcctccgcagcatcccgcccagacagcacccacatggtggaagccagacaggatgtgccgaagcctgtcttgacttctgtgatggtgcccaagtccatactagctaagccatcctcatctcctgacccaagatacctgtcagttcctccgtcaccaaatatcagcacttcagaatcacgttcccctccagagggagacacgaccctctttttgtctcgactcagcaccatttggaaaggatttattaacatgcagagtgtggcaaaatttgtcactaaggcgtatcctgtctctgggtgttttgattacctcagtgaggatttgcctgacacaattcacattggtgggaggatcgcaccgaagacagtttgggattatgttggcaaactcaagtcttctgtgtctaaggagctctgtctgatccgcttccaccccgccacagaggaagaggaggtcgcctatatctctctctactcctatttcagcagccgtggccgctttggtgttgtagctaataacaacaggcacgtcaaggacctctacctgatcccgctgagcgcccaggaccctgttccatccaaactcttgccctttgagggaccaggtaagcgccggctttctgggtggaggtgaggcccacctgcacctgcacccctcctcccactgacatgccctgctgagtcctgaccagcccagggctctctgggagcaggagttaggagcacagacgcagcggttagcaataggattcatctttgagggcgtaggactgtggcacgagaagtacccctgattcacagcataaattgtcttaggagagttttttagagagggaaaaacccacagcctgcaaccagctcatcttggcctcaggtcagagaagactcagtgcccaggagcccaaggctcagccagaaagggaggtgacactcccagcggccctgctctttcctctagacagactcgggagccagcacacaccgggaagtggctccatcagggatcacttctctaacagggatggatttccaggagacttaacaataatgacatagaaaactatttctagaaataattattttaaaatctgcagctcaaattgtaatagttcattcatctttggcaagctattttgtgtttgcacgttccttggaaagtactgtatttaaacgattatttacaaatagcctaaaatacatctttgtcaagggttgagggtgattccaggggccacgtgctctgttagtgaccagctctttcatagccccttagaagaagctgatgtgacttcagttaggggttagtatctgatgcccaactgaagtgtctccgtggccatgcagtccccagaggattggtgttctctcaaagcgggtgtgtggatcacacagtgtcctctaaagtgcttcgtcataaaggcaggtgctgtctggaccctgtgcctcagtgccctctgtccctgtcaccaggcctcggcgggtgttcctgccatagctgtgcagggtgttcccacccacacccctcatgccgcaccctagctagctggggtcctgtaggggccactccacatcttgggcgggacttctgtcgccccaggcacagcccacgttcctactggagcccattcttcacagctggagtgggctcagcctatgcctgtgttgtggaattatatgtccataaagggattggttggtatcagtaatttcagggttaaatatttgctggcgtggtgcattaaattattttagtgccagataaatttttaaaagcaaagtgctttagtgtgtcccctcaaatcctacttgggataaagagatgccacctaatgggtggcagaaaggaccctggtagaggttcttggtgttgcttgtgaagagctctggccagctccacgtgaccagggagaggaaaagcccggccctcctggaggtgaagaccgagaagctggcctctccgcacctgtgaagacccactggtcagttgcaagtgcgacagtgtgtgcactcagtgcagacactgcagcacctcagcacctccctaccggggtggaaagagcactttttctttacagaaacatgattcttagatagcgagcctcccctttttaaaacaattgaagcgatatttcatcctttcttgagcttctctccctgctcatctccaaacttggagctgtcaggtgagcacaggttgtagggtgttgagcgagccccggcgcatgccgggcaccggggttccccacacttgggcagtgacggggcccagggaggccaccagaggagcggcgcctccattctccccacagcaagggctggctgtgcaggtgcagccccggggcagagggaaaggacaggtctcccagcacctcccggatggcaccgggacaaggagggctgggctggggtcactcaccttgtctgctgagtgcgatggcaccaaccacccacactgtcagctccgcgaccagctgggggaacgtcacactcgcccaccaaggcacttgctgaggccacgacgccgcctgacggggacacacaaaagccccagggactttgatccacgataaagagcagaggcgtctgggtaaagtaacacagggcaagggactttagaaaagtaacagctagtgaaacctttccatacacttcagaaatgttttaacttaagacttcagtataatgttaacttctcctgatgtccttgttgacatgaatgcgtgtgcgtgaaatctcacacacttccatggtcactaaacagccttcaccccgggccaggccatcgggtactcggcccgcttcacgtactgattacttgacttggcgttttctagatataaacatgtacatgtgtgtcctggctttgtggtgtaaatgtgtagtgcgtgtgcatgtgcgcgcgtgtgtgtgtgtaaggctaggtcctggcatgtttcccctgtctcagcggaccctgtcctcacggagatagcccagaagcccttggacagcacaggccacacctgagggtgctgatggtggtgactccacagagctgtggtcaggggtgagcgtgtgctgcgcagcttggagtcacgcccccagaagtgctgggtgagggtctgcaggacccagctccattccacagcctcagttctctgcggcacatgcagcacaggcctgaaggagacctggcgccccagccttgagctgcccgtctgcatcagggcactgatgtgggagcatcttcccctggggatgttaaggagaaggtcctgttgggggtagagattcacgcagaaaagagtgactgactcgtccgtgtgcctcagtttataccacacaattgcaggtgtccatgcctcccacacatggggacctagtgggttttgacagcgtggtgtccagtcctagccccctcagtgcttgctgttcacacttaagcaagtgaaggcctgaaggtgcccagctgtgccctcaggggaaacttaagtcacccgccctgtcagcacttggcccttgtcgggcagtgagagtggagctgcccccgcagcaccctcaggagccatgcagttcacagcagtagctggatctccctgaggacatttgtccttgcatatcttaatgatttgtccacagaaacaccgggttgtcttcctctgcccctctgccccgcagtgggggcactctctgtaactcagcatcacggtggggggcagctgggaggcctggttccaggtgaccttctccacctagatgttcaccccactcagttccagctttaccaacagggccccccgcagggacttggggtcgcagagtcccggcctgtctcagggccttgttcatggaagggagatgagtcaggttgaaagctcatcgtgtagggttctgtgcggggcccttacaggactggaccgcagccaagatgcctgcctgttaaccatgcccagcccccgtcatttccgcgtgaagccgcaggcctcggagccttggtctgaaatgcctgtggagtaacctcggtccataaacatgggtgcacagtctgttctccccaagtacagggcaggaggaaacaccgccctctgtagctgctcgaatggaaagggctcttttctctgaggtctttatacattagaaagctcttctgggaagaatgtttgaatccatagtgtctttctgtattcacttttaattgctttctaaattagctgagaaattctgacttgaaatattgtcaggtaagcatttcttcagttttcatgtgtgtatgtaacagtagctttgcatggaaattgtaatcagagtcaaatacagtattgaatggaatgtactgccttctcctcctaaatcaataaacatctttcatggaaaaaaaaaaaaa

SEQ ID NO: 914 - DNA, 3484 bp, Homo sapiens
  CDS (131)..(3178)
cgcccagcagcccgtgggcaggcgcggcggagcgagcggggccggcggcgggcgccgagggacgccgaggcctcgggcgggggctggcccggggttccaggtctccagtgggggctgcagactaagcaaaatgaggcggttcctgaggccagggcatgaccctgtgcgggagaggctcaagcgggacctgttccagtttaacaagacggtggagcatggcttcccgcaccagcccagcgccctcggctacagcccgtccctgcgcatcctggccatcggcacccgttctggagccatcaagctctacggagccccaggcgtggagttcatggggctgcaccaggagaacaacgctgtgacgcagatccacctcctgcccggccagtgccagctggtcaccctgctggatgacaacagcctgcacctttggagcctgaaggtcaagggcggggcatcggagctgcaggaggatgagagcttcacactgcgtggacccccaggggctgcccccagtgccacacagatcaccgtggtcctgccacattcctcctgcgagctgctctacctgggcaccgagagtggcaacgtgtttgtggtgcagctgccagcttttcgtgcgctggaggaccggaccatcagctcggacgcggtgctgcagcggttgccagaggaggcccgccaccggcgtgtgttcgagatggtggaggcactgcaggagcaccctcgagaccccaaccagatcctgatcggctacagccgaggcctcgttgtcatctgggacctacagggcagccgcgtgctctaccacttcctcagcagccagcaactggagaacatctggtggcagcgggacggccgcctgctcgtcagctgtcactctgacggcagctactgccagtggcccgtgtccagcgaagcccagcaaccagagcccctccgcagcctcgtgccttacggtccctttccttgcaaagcgattaccagaatcctctggctgaccactaggcaggggttgcccttcaccatcttccagggtggcatgccacgggccagctacggggaccgccactgcatctcagtgatccacgatggccagcagacggccttcgacttcacctcccgtgtcatcggcttcactgtcctcacagaggcagaccctgcagccacctttgacgacccctatgccctggtggtgctggctgaggaggagctggtggtgattgacctgcagacagcaggctggccaccggtccagctgccctacctggcttctctgcactgttccgccatcacctgctctcaccacgtctccaacatcccgctgaagctgtgggagcggatcattgccgccggcagccggcagaacgcacacttctccaccatggagtggccaattgatggtggcaccagcctgaccccagccccaccccagagggacctgctgctcacagggcacgaggacggcacggtgcggttctgggatgcctcgggtgtctgcctgcggctgctctacaaactcagcactgtgcgcgtgttcctcaccgacacggaccccaacgagaacttcagtgcccagggcgaggacgagtggcccccactccgcaaggtgggctcctttgacccctacagtgatgacccccggctgggcatccagaagatcttcctctgcaagtacagcggctacctggctgtggcaggcacggcagggcaggtgctggtactggaactgaatgacgaggcagcggagcaggctgtggagcaggtggaggccgacctgctgcaggaccaagagggctaccgctggaaggggcacgagcgcctggcagcccgctcagggcccgtgcgctttgagcctggctttcagcccttcgtgttggtgcagtgtcagcccccggctgtggtcacctccttggccctgcactctgagtggcggctcgtggccttcggcaccagccatggctttggcctctttgaccaccagcagcggcggcaggtctttgttaagtgcacactgcaccccagtgaccagctggccttggagggcccactctcccgcgtcaagtccctcaagaagtccttgcgtcagtcattccgccggatgcgtcggagccgggtgtccagccggaagcggcacccggctggccccccaggagaggcacaggaggggagtgccaaggctgagcggccaggcctccagaacatggagctggcgcctgtgcagcgcaagatcgaggctcgctcggcagaggactccttcacaggcttcgtccggaccctgtactttgctgacacctacctgaaggacagctcccggcactgcccctcgctgtgggctggcaccaatgggggcaccatctatgccttctccctgcgtgtgcctcccgccgagcggagaatggatgagcctgtgcgggcagagcaggccaaggagatccagctgatgcaccgggcgccggtggtgggcatcctggtgctcgacggacacagcgtaccccttcccgagcccctcgaagtggcccatgatctgtcgaagagccctgacatgcagggaagccaccagctgctcgtcgtatcagaggagcagttcaaggtgttcacgctgcccaaggtgagtgccaagctgaagttgaagctgacggccctggagggctcaagagtgcggcgggtcagcgtggcccacttcggcagtcgtcgagccgaggactacggggagcaccacctggcagtccttaccaacctgggcgacatccaggtggtctcgctgcccctgctcaagccccaggtgcgctacagctgcatccgccgggaggacgtcagtggcatcgcctcctgcgtcttcaccaaatatggccaaggcttctacctgatctcaccctcggagtttgagcgcttctctctctccaccaagtggctggtggagccccggtgtctggtggattcagcagaaaccaagaaccaccgccctggtaacggtgcgggccccaagaaggccccgagccgagccaggaactcagggactcagagtgatggcgaggagaagcagcccggcctggtgatggagcgcgctctgctcagtgatgagagagcggcaactggcgttcacatcgagccgccgtggggtgcagcctcagcaatggcggagcagagtgagtggctgagcgtccaggctgcgcgatgagcacacactactactgatggcctttcgggggtccctgccccaaccggagaggccggtgcacagggccccgccaggggctgggggcatcccggcttccacaatgcagctgctctgggcctcgggagaggagagaccccagtcccctgggctgcccttcccgggcctcgtctgtctgggtcctttggtcaatgttgcacagtttttattgctcccatccctttttgtagtgggctgggttttaagttataaatgttaactgcctctgggtgaaaaagtttttaataaacacctattacctcttgaaaa

SEQ ID NO: 915 - DNA, 3274 bp, Homo sapiens
  CDS (131)..(2968)
cgcccagcagcccgtgggcaggcgcggcggagcgagcggggccggcggcgggcgccgagggacgccgaggcctcgggcgggggctggcccggggttccaggtctccagtgggggctgcagactaagcaaaatgaggcggttcctgaggccagggcatgaccctgtgcgggagaggctcaagcgggacctgttccagtttaacaagacggtggagcatggcttcccgcaccagcccagcgccctcggctacagcccgtccctgcgcatcctggccatcggcacccgttctggagccatcaagctctacggagccccaggcgtggagttcatggggctgcaccaggagaacaacgctgtgacgcagatccacctcctgcccggccagtgccagctggtcaccctgctggatgacaacagcctgcacctttggagcctgaaggtcaagggcggggcatcggagctgcaggaggatgagagcttcacactgcgtggacccccaggggctgcccccagtgccacacagatcaccgtggtcctgccacattcctcctgcgagctgctctacctgggcaccgagagtggcaacgtgtttgtggtgcagctgccagcttttcgtgcgctggaggaccggaccatcagctcggacgcggtgctgcagcggttgccagaggaggcccgccaccggcgtgtgttcgagatggtggaggcactgcaggagcaccctcgagaccccaaccagatcctgatcggctacagccgaggcctcgttgtcatctgggacctacagggcagccgcgtgctctaccacttcctcagcagccagcaactggagaacatctggtggcagcgggacggccgcctgctcgtcagctgtcactctgacggcagctactgccagtggcccgtgtccagcgaagcccagcaaccagagcccctccgcagcctcgtgccttacgcctttgacgacccctatgccctggtggtgctggctgaggaggagctggtggtgattgacctgcagacagcaggctggccaccggtccagctgccctacctggcttctctgcactgttccgccatcacctgctctcaccacgtctccaacatcccgctgaagctgtgggagcggatcattgccgccggcagccggcagaacgcacacttctccaccatggagtggccaattgatggtggcaccagcctgaccccagccccaccccagagggacctgctgctcacagggcacgaggacggcacggtgcggttctgggatgcctcgggtgtctgcctgcggctgctctacaaactcagcactgtgcgcgtgttcctcaccgacacggaccccaacgagaacttcagtgcccagggcgaggacgagtggcccccactccgcaaggtgggctcctttgacccctacagtgatgacccccggctgggcatccagaagatcttcctctgcaagtacagcggctacctggctgtggcaggcacggcagggcaggtgctggtactggaactgaatgacgaggcagcggagcaggctgtggagcaggtggaggccgacctgctgcaggaccaagagggctaccgctggaaggggcacgagcgcctggcagcccgctcagggcccgtgcgctttgagcctggctttcagcccttcgtgttggtgcagtgtcagcccccggctgtggtcacctccttggccctgcactctgagtggcggctcgtggccttcggcaccagccatggctttggcctctttgaccaccagcagcggcggcaggtctttgttaagtgcacactgcaccccagtgaccagctggccttggagggcccactctcccgcgtcaagtccctcaagaagtccttgcgtcagtcattccgccggatgcgtcggagccgggtgtccagccggaagcggcacccggctggccccccaggagaggcacaggaggggagtgccaaggctgagcggccaggcctccagaacatggagctggcgcctgtgcagcgcaagatcgaggctcgctcggcagaggactccttcacaggcttcgtccggaccctgtactttgctgacacctacctgaaggacagctcccggcactgcccctcgctgtgggctggcaccaatgggggcaccatctatgccttctccctgcgtgtgcctcccgccgagcggagaatggatgagcctgtgcgggcagagcaggccaaggagatccagctgatgcaccgggcgccggtggtgggcatcctggtgctcgacggacacagcgtaccccttcccgagcccctcgaagtggcccatgatctgtcgaagagccctgacatgcagggaagccaccagctgctcgtcgtatcagaggagcagttcaaggtgttcacgctgcccaaggtgagtgccaagctgaagttgaagctgacggccctggagggctcaagagtgcggcgggtcagcgtggcccacttcggcagtcgtcgagccgaggactacggggagcaccacctggcagtccttaccaacctgggcgacatccaggtggtctcgctgcccctgctcaagccccaggtgcgctacagctgcatccgccgggaggacgtcagtggcatcgcctcctgcgtcttcaccaaatatggccaaggcttctacctgatctcaccctcggagtttgagcgcttctctctctccaccaagtggctggtggagccccggtgtctggtggattcagcagaaaccaagaaccaccgccctggtaacggtgcgggccccaagaaggccccgagccgagccaggaactcagggactcagagtgatggcgaggagaagcagcccggcctggtgatggagcgcgctctgctcagtgatgagagagcggcaactggcgttcacatcgagccgccgtggggtgcagcctcagcaatggcggagcagagtgagtggctgagcgtccaggctgcgcgatgagcacacactactactgatggcctttcgggggtccctgccccaaccggagaggccggtgcacagggccccgccaggggctgggggcatcccggcttccacaatgcagctgctctgggcctcgggagaggagagaccccagtcccctgggctgcccttcccgggcctcgtctgtctgggtcctttggtcaatgttgcacagtttttattgctcccatccctttttgtagtgggctgggttttaagttataaatgttaactgcctctgggtgaaaaagtttttaataaacacctattacctcttgaaaa

SEQ ID NO: 916 - DNA, 5250 bp, Homo sapiens
  CDS (166)..(2499)
ggtgactcaggaggacccctggtctgcgaggagccctctggccggttctttctggctggcatcgtgagctggggaatcgggtgtgcggaagcccggcgtccaggggtctatgcccgagtcaccaggctacgtgactggatcctggaggccaccaccaaagccagcatgcctctggcccccaccatggctcctgcccctgccgcccccagcacagcctggcccaccagtcctgagagccctgtggtcagcacccccaccaaatcgatgcaggccctcagtaccgtgcctcttgactgggtcaccgttcctaagctacaagaatgtggggccaggcctgcaatggagaagcccacccgggtcgtgggcgggttcggagctgcctccggggaggtgccctggcaggtcagcctgaaggaagggtcccggcacttctgcggagcaactgtggtgggggaccgctggctgctgtctgccgcccactgcttcaaccacacgaaggtggagcaggttcgggcccacctgggcactgcgtccctcctgggcctgggcgggagcccggtgaagatcgggctgcggcgggtagtgctgcaccccctctacaaccctggcatcctggacttcgacctggctgtcctggagctggccagccccctggccttcaacaaatacatccagcctgtctgcctgcccctggccatccagaagttccctgtgggccggaagtgcatgatctccggatggggaaatacgcaggaaggaaatgccaccaagcccgagctcctgcagaaggcgtccgtgggcatcatagaccagaaaacctgtagtgtgctctacaacttctccctcacagaccgcatgatctgcgcaggcttcctggaaggcaaagtcgactcctgccaggtgagtggcatcaaggcgctgtacgagtcggagctggccgatgcccggagagtcctggatgagacggctcgagagcgtgcccggctgcagatagagattgggaagctgagggcagagttggacgaggtcaacaagagcgccaagaagagggagggcgagcttacggtggcccagggccgtgtgaaggacctggagtccctgttccaccggagcgaggtggagctggcagctgccctcagcgacaagcgcggcctggagagtgacgtggctgagctgcgggcccagctggccaaggccgaggacggtcatgcagtggccaaaaagcagctggagaaggagacgctgatgcgtgtggacctggagaaccgctgccagagcctgcaggaggagctggacttccggaagagtgtgttcgaggaggaggtgcgggagacgcggcggcggcacgagcggcgcctggtggaggtggacagcagccggcagcaggagtacgacttcaagatggcacaggcgctggaggagctgcggagccagcacgacgagcaagtgcggctctacaagctggagctggagcagacctaccaggccaagctggacagcgccaagctgagctctgaccagaacgacaaggcggccagtgcggctcgcgaggagctgaaggaggcccgcatgcgcctggagtccctcagctaccagctctccggcctccagaagcaggccagtgccgctgaagatcgcattcgggagctggaggaggccatggccggggagcgggacaagttccggaagatgctggacgccaaggagcaggagatgacggagatgcgggacgtgatgcagcagcagctggccgagtaccaggagctgctggacgtgaagctggccctggacatggagatcaacgcctaccggaagctcctggagggcgaggaggagaggctgaagctgtcccccagcccatcctcgcgcgtcaccgtctcacgagccacctcgagcagcagcggcagcttgtccgccaccgggcgcctgggccgcagtaagcggaagcggctggaggtggaggagcccttgggcagcggcccaagcgtcctgggcacgggcacgggtggcagcggtggcttccacctggcccagcaggcctcggcctcgggcagcgtcagcatcgaggagatcgacctggagggcaagtttgtgcagctcaagaacaactcggacaaggatcagtctctggggaactggagaatcaagaggcaggtcttggagggggaggagatcgcctacaagttcacgcccaagtacatcctgcgcgccggccagatggtcacggtgtgggcagctggtgcgggggtggcccacagccccccctcgacgctggtgtggaagggccagagcagctggggcacgggcgagagcttccgcaccgtcctggttaacgcggatggcgaggaagtggccatgaggactgtgaagaagtcctcggtgatgcgtgagaatgagaatggggaggaagaggaggaggaagccgagtttggcgaggaggatcttttccaccaacagggggacccgaggaccacctcaagaggctgctacgtgatgtgaacccacactcctcatccacacacctttctttacccagagccactgaaaactatttttatatcattggctttctttagttcttgatacatttctagagaatttctaagcgaactgccagaacgtgtgggtgggtctcccccagccctccctcctggcgggtctcctccagcctcacttcgctgccacttcgccgctgccccggagacttttcaatcccaccccactcctcatctcaccatttggtcaaattggaagcccagggccaggacccggaggtttagaagatgcttgggcttggagggaggagggccggcgaggctagcgaggggacaggagacggccctgctgcggacggagcgcggaaactgcgtaggaattcagtggtggtgggtttttttaaggctttctacaaaaccaaattcagaatccaggcgtcgacctggtggggcccggggccaagcctgcattctggctgcccagcttcggacagcgggaactcctcaggcagccacgcagcgggtgtgggccagcatggggatggcgtggcccccagggcgggttttcactccgctgcctgggcttccagattcccgttctggcagcgcaccggccgggtttctcggaccgttgactttatttgggggagttttcccgcagttcagttcctgactgtgcagggccaacagggcaggggaggggaagacctggggaaggaagaatgaggacagtcccgtcgtaagacctgtcacaacaataagcagggaggggagatgtggaggggacacatctggttgccttggaggcagaagctgtgagtttcagaacagctgtctgcagggaacgccaccatgttgaccctctggaggagagcgctgtggagcccctcccgtgttccagctccgtctgccctgtgcctatatatacacatgcgtctatccatactgtgcttttatctgtgattttctcgctgaaaccatgtttctcagacaggccaaggccacctgactcctatcacgacgcacccaagcccctcagtccagcttcccaatgcctggcaccccccttcggcaatagctcaccgtttacaccctccctcatagatacacagaagttatttttttaatggatatttatttttttacattggtcagtacacaggtcaggagctcacgccagggccttgaggacaggctgaccctcctccccggggtggcgtggggctggggcaccctccgacggcagagcctccttcagaaagtgcagctcaagtcttaaagacaccaaaactgagccatgggcacgcgccgtctccgggccatggcgttcactgcagggcgggggcggcaccgctcccctgtgactgcatcccgcctccctggggacctgcctgtggcaggaaggaatggggggccccagcccaggccgggaaggagccagcggccgacaaagcagaaacacccgctgctccacgtagcccctgctggctgtccttgctctcagaagtcccggtcccatgtagatagagcccggcggatcttaccaaagcatttcctcctggaggctacgccgcttggtgctcccagtgaggcggctggtagggagctttgcctgccccggggataccctctaccagccgctggaagtgggaatgctggcgacagactgtgtctgtttcccaccttcatagcaggaatcacccggacccgactggctgggcttcgtgctagcgagggttttctgggggtgggtcttggtgatcttgtcctatggggatctctgcagtggtctcagccacatcctagtatattttggctctggaggagcaaagctgtatcctggagttggtctgtgatttgccgacagacttgcaggctgggctcagcaaagtcccccccaaaacccgcaggtcctcatgtccagacgctgccagtcctgtcctgaaaacagcacgccccaggcccacagaaccccccaccctacatttgccttgggtggagctgggggtggtcctaggactgcgggtgcccttagctgaagggggcccgcagaagcgtgagctgggccgcctgtgggtcattggaggttcattgagaattgagtctttggaaacactaagaaaatcaaatttttaaaagttatttatggcctgggaaacaatttgcatttgtccccaaatacgcttagctgtgtgccgcttagaacgatgcgaaaccatccctctgtgtaagcccgtgccgtgtgactcgaagcctagcgccctccctgcgaagcatcagacgccacccagccctggggggaggcccacgcctgctggaccaacgcgggttctggggtgcacagcgccaggttaacgctgaagcctgccccgctgagcccaggagccgggaggcctgcgggctgacccagaatccgatcatgcacctgtcctcatgccagcggctttggctggggttggtctgaagcctgcacgcggcagttctttgttaaagatctgagggactcctcagtcctggggcgtcgccgcctgcagcctcttccaagccctgcgtccagcgagcgtcacagcacaacctgcaaaaacggagctgggctgcagctggggctggcatggactttcatttcagagattcggtttttaagaagatgcatgcctaatgtgttcttttttttttccaatgatttgtaatatacattttatgactggaaacttttttgtacaacactccaataaacattttgattttaaaaaaa

SEQ ID NO: 917 - DNA, 2066 bp, Homo sapiens
  CDS (85)..(1932)
aggtaccgcgccggaattcccggggacggtcgcaaggattacattcgcctgacccggcccggcttgaccctgcccgggcgcgccatgttcgcgcgtgggtcccggaggcgccgctccgggcgtgcgcctccagaggcagaggacccagaccggggccagccctgcaactcctgtagggagcagtgccctggcttcctgctccacggctggagaaagatctgccagcattgcaaatgcccgcgggaggagcatgcagtgcacgcggtgcctgtggacctggaacgcatcatgtgtcggctaatctcggacttccagcgccactccatctccgacgacgactcaggctgtgcatcggaggagtatgcctgggtgcccccaggccttaagccggagcaggtatatcaatttttcagctgcctcccagaggacaaggtcccctacgtcaacagtcctggggagaaatacaggatcaagcagctgctgcaccagctgcccccacacgacagtgaggcacagtactgcacagcactggaagaggaggaaaagaaagagctccgagcctttagccagcagcggaagcgggagaatctggggcgtggcatcgtgcgcatcttcccggtgaccatcactggggccatctgtgaggagtgcggaaagcagattggaggtggggacatcgcagtgtttgccagccgtgcaggcctgggtgcctgctggcacccacagtgcttcgtgtgtaccacgtgccaggaactgctggttgacctcatctacttctaccatgttggcaaggtctactgcgggcgtcaccatgccgaatgcctgcgtccacgctgccaagcctgtgacgagatcatcttctcccctgagtgcacggaggctgagggccgccactggcacatggatcacttctgctgctttgagtgtgaagcttcactaggagggcagcgctatgtcatgcgtcagagccgcccccactgctgcgcctgctacgaggcccgccacgcggagtactgtgatggctgtggggagcacatcggcctggaccaaggccagatggcttacgagggccagcactggcatgcctcagaccgctgcttctgctgtagtcgctgtgggcgggccctgctgggccgcccattcctgccacgccgaggcctaatcttctgctctcgagcctgcagccttgggtccgagcccacagctccagggccgagccgccgcagctggagtgccggccctgtcacagccccacttgcagcctccacagcctctttctctgctgtgaagggggcatcagagaccaccaccaaaggcaccagcacagagttagcgccagctacaggccctgaggagccctcccgctttctgagaggggctccccaccgccactccatgccggaactggggctccgcagtgtccccgagccgcccccagagtcccccggccagcctaacctgcgcccagatgatagtgccttcggtcgtcagagcaccccacgcgtcagcttccgcgaccctctggtgtctgaaggaggcccgcgccggaccctgagtgcacccccggcccagcgccgcaggccacgcagtcccccacccagggcccccagccgtcgccgccaccatcatcataatcaccatcaccatcacaaccgccacccaagcagacgtcgccactatcaatgtgacgcgggatcagggtcagactcggaatcttgctccagctcgccctccagttccagttccgaatcatcagaggatgatggcttcttcctaggagagcgcatccctctgcccccgcatttgtgcaggcccatgcctgctcaggacactgcaatggagaccttcaactccccatctttatcgctccccagggactctcgcgcagggatgcctcgtcaggcccgagacaagaactgcatcgtggcttgaaggcaggccgtcctggagggggctccattctccagtcagagtagatgatgaggcccatgcccctcacccccacgccccgcccctacaacctaagtcataaatcctcttcctccctcctttaaaaaaaaaaaaaa

SEQ ID NO: 918 - DNA, 7137 bp, Homo sapiens
  CDS (47)..(3793)
ctatgcacgcgtacgtaagcttggatcctctagagcggccgcggtgatgatgacgggctacaataatggtcgctgtccccggaattctctctacagtgactgcattattgaggagaagacggtggtcctgcagaaaaaagacaatgagggctttggattcgtgcttcgaggggccaaagctgacacacccattgaagaattcacaccaacaccggctttcccagccctacagtacctggagtccgtggatgaaggtggggtggcgtggcaagccggactaaggaccggggacttcttgattgaggttaacaatgagaatgttgtcaaagtcggccacaggcaggtggtgaacatgatccggcagggagggaatcacctggtccttaaggtggtcacggtgaccaggaatctggaccccgacgacaccgccaggaagaaagctcccccgcctccaaagcgggcaccgaccacagccctcaccctgcgctccaagtccatgacctcggagctggaggagctcgtggataaagcctcggtccggaagaagaaggataaacccgaggagatagtcccggcctccaagccctcccgcgctgctgagaacatggctgtggaaccgagggtggcgaccatcaagcagcggcccagcagccggtgcttcccggcgggctcagacatgaactctgtgtacgaacgccaaggaatcgccgtgatgacgcccactgttcctgggagcccaaaagccccgtttctgggcatccctcgaggtacgatgcgaaggcagaaatcaatagacagcagaatctttctatcaggaataacagaggaagagcggcagtttctggctcctccaatgctgaagttcaccagaagcctgtccatgccggacacctctgaggacatcccccctccaccgcagtctgtgcccccgtccccaccaccaccttccccaaccacttacaactgccccaagtccccaactccaagagtctacgggacgattaagcctgcgttcaatcagaattctgccgccaaggtgtcccccgccaccaggtccgacaccgtggccaccatgatgagggagaaggggatgtacttcaggagagagctggaccgctactccttggactctgaagacctctacagtcggaatgccggcccgcaagccaacttccgcaacaagagaggccagatgccagaaaacccatactcagaggtggggaagatcgccagcaaagccgtctacgtccccgccaagcccgccaggcggaaggggatgctggtgaagcagtccaacgtggaggacagccccgagaagacgtgctccatccctatcccgaccatcatcgtgaaggagccgtccaccagcagcagcggcaagagcagccagggcagcagcatggagatcgacccccaggccccggagccaccgagccagctgcggcctgacgaaagcctgaccgtcagcagcccctttgccgccgccatcgccggagccgtccgcgaccgtgagaagcggctggaagccaggaggaactccccggccttcctctccacagacctgggggatgaggatgtgggcctggggccacccgcccccaggacgcggccctccatgttccccgaggagggggattttgctgacgaggacagcgctgagcagctgtcatcccccatgccgagtgccacgcccagggagcccgaaaaccatttcgtgggtggcgccgaggccagtgctccgggtgaggctgggaggccgctgaattccacgtccaaagcccaggggcccgagagcagcccagcagtgccctccgcgagcagcggcacagccggccccgggaattatgtccacccactcacagggcggctgcttgatcccagctccccgctggccctggcactctccgcaagggaccgagccatgaaggagtctcaacagggacccaaaggggaggcccccaaggccgacctcaacaaacctctttacattgataccaaaatgcggcccagcctggatgccggcttccctacggtcaccaggcagaacacccggggacccctgaggcggcaggagacggagaacaagtacgagaccgacctgggccgagaccggaaaggcgatgacaagaagaacatgctgatcgacatcatggacacgtcccagcagaagtcggctggcctgctgatggtgcacaccgtggacgccactaagctggacaacgccctgcaggaagaggacgagaaggcagaggtggagatgaagccagacagctcgccgtccgaggtgccagaaggtgtttccgaaaccgaaggtgctttacagatctccgctgcccccgagcccaccaccgtgcccggcagaaccatcgtcgcggtgggctccatggaagaggcggtgattttgccattccgcatccctcctccccctctggcatccgtggacttggatgaggattttatttttacagagccattgcctcctcccctggaatttgcaaatagttttgatatccccgatgaccgggcagcttctgtcccggctctctcagacttagtgaagcagaagaaaagcgacacccctcagtccccttcgttgaactccagccaaccaaccaactctgcagacagcaagaagccagccagtctttcaaactgtctgcctgcctcattcctgccaccccctgaaagctttgacgccgtcgccgactctgggatcgaggaggtggacagccggagtagcagcgaccaccacctcgagacgaccagcactatctccaccgtgtctagcatctccaccctgtcttccgaaggtggagagaatgtggacacctgcacagtctatgcagatgggcaagcatttatggttgacaaacccccagtacctcctaagccaaaaatgaagcccatcattcacaaaagcaatgcactttatcaagacgcgctcgtggaagaagatgtagatagctttgttatccccccgcccgctcccccgcccccgccgggcagtgcccagcctgggatggccaaggttctccagccaaggacctccaagttgtggggcgacgtcacagagatcaaaagcccgattctctcaggcccaaaggcaaacgttattagtgaattgaactctatcctacagcaaatgaaccgagagaaattggcaaagccgggggaaggactggattcaccaatgggagccaagtccgccagcctcgctccaagaagcccggagatcatgagcaccatctcaggtacacggagcacgacggtcaccttcactgttcgccccggcacctcccagcccatcaccctgcagagccggccccccgactatgaaagcaggacctcaggaacaagacgtgccccaagccctgtggtctcgccaacagagatgaacaaagagaccctgcccgcccccctgtctgctgccaccgcctctccttctcccgctctctcagatgtctttagccttccaagccagcccccttctggggatctatttggcttgaacccagcgggacgcagtaggtcgccatccccctcgatactgcaacagccaatctcaaataagccttttacaactaaacctgtccacctgtggactaaaccagatgtggccgattggctggaaagtctaaacttgggtgaacataaagaggccttcatggacaatgagatcgatggcagtcacttaccaaacctgcagaaggaggacctcatcgatcttggggtaactcgagtcgggcacagaatgaacatagaaagggctttgaaacagctgctggacagataaggacggctgctctccacctcgcagactgctcttgttataagtagagatgggctcgtgctgaaacatctgaatgccaagcgaagtctgtgagcatcaaccccactccatgggtttgtctcctggtacccaaagaaatactgagttgtgtccacaacatggctgggtcttcagacccctggctcaccatgtgggtgtcttgggcagtttctatcacacatgggacaaggggagggagtttttctaacatggaaaaagattcccagcctgccgcccagcatgcaggtggcctcgctttgccgggtccgtgaggctccccgtcaattttgcacgggatcctagctcttgtaggcagacaccagtgcactctagatacctcctgagacctccgtcctctgctttccgggcagctctcaccaccccaggccccggcatgaggcctttcctcagtcctgtggcctctcagaggacacctgatgctcacctgcccctctttctcctgcacttggcttgcagtgagatgctcccagatgcatttgtccagtgccccatcatgggcctgaaaggcagagaaactttttcctacacagattcttttccccatctcctcctgtggtttgcatccatggctctttggccatgaggttcctggcagtgctgggagtttggatgggatcgtgcccagctttgcttagctttctttatttctgcaaatctgttagcataattccaaggtggccaagcagatgtcacatggagttagtcaaagcacaaagtcacgattccacaatggaggggagacctggccaagggagccagccagcgtgcaactgcccaagctccaggtctccaggacaagagcagttgtctgccatgagcacccatccaggatggagaataagggcttctctgcctctcagaattctttttaattgaagatgtcttgagctctgcaaagatcagagcaggtgagcatccactttgacatgaaggacaagaagacgcatggctcatggcgggcacatgcggctgccagtgagacagcgtctcctctgggagctgggcgggcacagcatcctcagttctgtgcccagccaagggtgagcatctctgctgagacagtccttttgctctcggaggccagggaagatggtacttagaggcttttcccctatcgctctgggtgtctaggaatcccaccagcttgtcttaacagtacaacagcttctttgaggacccagtgggtatggagtatagacagaacccagggttgagaacagaaggtgggcggcaggatcagagtgaaagcagaggcgtgaggagaggaaagcagggaggtctcctgggctgccaggtcagcctctctggcaaggctttcttgagccccgcccctttctttccccggagtccctccaccccataacaatacctcgaatttccaaaagaggtcaccagatgcacatgggccgcaaaacacacagtcaggcttccagcacattctcccccatttggaggatactcgaatgtcaggtttttggttttattattatttcagaactagctcagcccatctctaattataaaacatggttttgttttttttttttcctttttttcttgattaggtctggaacagctctagaatgaacacataaaatttagcaatttaaaatctttctttactgcaagtttaaatagttgtacagatagtttataagcacaatattttaagaaaaaaaagtggctggtctactaggcagcctttgtgccacttcagtgctagaaagttaaagaaaaaaaaacttttgtgatttaataatactatttctgtggaataattataaaagtatgacctttttaaatcaaccttatttggatgcatctgaaccagcagagctgtgttatattttctatctttgctagaacttcgtcattgaaggacaatttcttcaaagtggttacaattcataatgcagcagtttctccaaaaacaaaaacaaaacacacaccacacacacgcgcttttccagtcacacacccctgatgttggaaccaagtttttggaccttctgttccaaaaccttttgcaggtcaatctttgtatttgaaatgatccaatccaacttgaagtcaattgaatattaaggcgctttacttccgtgtgctttcagtttttccatcatgagatgaatgagcattactctagataaatttcaagacaggatactacaggtggcctgctgaggctgccccatattttagaaaatgtaaaaatggtggtttggccattaatttgtcttccatttgatgataccgcaaaattccgtgagtccattcctttggcatggcactttccctgggcctacagttggtattacctctgtgctcagtgccaggcaaaacactagctcaaaggagagtcaaggaaaccgctggcagacgataaccagtcgaaactcgtgacttcggtttgttgaactttggcagccagttggtgagggccagatgttattccctttcttaaagatactccaagccacatgccactaaccacaagcaagctggctgcaagactaaagagctgacaacatagtttatttttacactgtcttattatagagaagtaatagacctatcagaacctgcactgaccaacaaataaacacatgttgccaagatgaatcggtctctatctctatctgcttattttggtactgaaagcaatagttcctcattcaaatcaccacccactgttctccccctttgggacatgttaggacgaggccctattccatgcccctctttaatggtggaacaaatgttaaactgctcatctaaagatcatgttgatattattccaggttttaagatcaacttttgttacatactgtaatttaaataaactgcatttacatgcctagtttctgtaatattgtgtatacaaaacccaaatctctcaaaatgtaaattatgtatacctgccaagataccttttccagggtgtctgcgcacattttaagttaattcacataatataaaaattactcaatgtgactgttgatttgctgaactttacatatcacaaagtgaattatttgtgatactttagttaataaaatggtaaatttttttctcagttattgaacaagcaagcattatccagttgatctggcaatgactttttgtgtgtgggccacaatattgattttcccattaacaatttttttttgttttttaaatactaatatgtttcacactatagtttgtgtaacaacacgtgttcgcattatctatgttgctgttacttttgtgcttttattctttttagactttataaaaaaaaaaaa

SEQ ID NO: 919 - DNA, 2212 bp, Homo sapiens
  CDS (227)..(1291)
aatactttataagtgaaatattacttgaatcctttgagatgttacaagttttttttttccttgagtcatgctaatagatggttcaatacatgaatgagtcccttgctgaaatgctttaggacttcagactaccctgaacgttgattactctttatactgaaataggcattattcagtggaagagagggaagaccaaattgatagactggactttattcgaaaccagatgaaccttttaacactggatgttaagaaaaaaatcaaggaggttaccgaggaggtggcaaacaaagtttcatgtgcaatgacagatgaaatttgtcgactgtctgttttggttgatgaattttgttcagagtttcatcctaatccagatgtattaaaaatatataaaagtgaattaaataagcacatagaggatggtatgggaagaaatttggctgatcgatgcaccgatgaagtaaacgccttagtgcttcagacccagcaagaaattattgaaaatttgaagccattacttccagctggtatacaggataaactacatacactgatcccttgcaagaaatttgatctcagttataatctaaattaccacaagttatgttcagattttcaagaggatattgtatttcgtttttccctgggctggtcttcccttgtacatcgatttttgggccctagaaatgctcaaagggtgctcctaggattatcagagcctatctttcagctccctagatctttagcttctactcccactgctcctaccactccagcaacgccagataatgcatcacaggaagaactcatgattacattagtaacaggattggcgtccgttacatctagaacttctatgggcatcattattgttggaggagtgatttggaaaactataggctggaaactcctatctgtttcattaactatgtatggagctttgtatctttatgaaagactgagctggaccacccatgccaaggagcgagcctttaaacagcagtttgtaaactatgcaactgaaaaactgaggatgattgttagctccacgagtgcaaactgcagtcaccaagtaaaacaacaaatagctaccacttttgctcgcctgtgccaacaagttgatattactcaaaaacagctggaagaagaaattgctagattacccaaagaaatagatcagttggagaaaatacaaaacaattcaaagctcttaagaaataaagctgttcaacttgaaaatgagctggagaattttactaagcagtttctaccttcaagcaatgaagaatcctaacaatagagattgctttggtgaccatgataggaggaaacgaaacttgtaagattggaacagttgttatttttatgaaattactttaaatatgaattgtactaactgtacctaaatagcaaagccctgtgtagattctggtaatgatctgtctcagggtatgtgtatttttgaagagtgttatgtccttagttttaattttgagtaaagaaaaggctaaaatcatgaattagttacaagcaacagtaccaacttatgtgacccctgaggggtggggctgtgagctcttaatttgtttttgattctgaaaaactctgcttcctggcatccaggagttagagattgagcctttcatcttctttctcaaaactagtttttgatgctttctttcatgggaatagtcacttttttatttagtaaatcgcattgctggaaccaccaaggagtgtggaatgtccttgagtgtattatttatgcaagtcacagtcacgttgccatcatggcagctatgtgaaacactaataaatgtgtttttactttttattcccgttaaaactgatgtaaaacaggataaaggcttgttatagtcacttataagtatctgggtctaagtaatttccttagatgtttctaaagaaacattttcagctttgctcccattatgattccaataaggaacgctttcctagtgcaattttaggagtaaagtttgaagagataaaaatagccaaagataggagacgtctgaattttgaatgataaacagtgatgttttaaaaaggctgttgttcttcaggaggcatttgcctaggatattgctggattataccccattggaggcttttaattttatttgtatgaattttccaggatttcattaaaaattattattgtattttttaccttaaaaaaaaaaaaaaa

SEQ ID NO: 920 - DNA, 2083 bp, Homo sapiens
  CDS (748)..(1482)
acagttaatcaactggcccatgcccttcacatggacaaagatttgaaagctggctgtcttgtacgtgtgttttgcccaaaagcaaaatgtgccctcttgagagatgacctggtgttagtagacagtccaggcacagatgtcactacagagctggatagctggattgataagttttgcctagatgctgatgtctttgttttggtcgcaaactctgaatcaacactaatgaatacggaaaaacacttttttcacaaggtgaatgagcggctttccaagcctaatattttcattctcaataatcgttgggatgcctctgcatcagagccagaatatatggaagacgtacgcagacagcacatggaaagatgcctgcatttcttggtggaggagctcaaagttgtaaatgctttagaagcacagaatcgtatcttctttgtttcagcaaaggaagttcttagtgctagaaagcaaaaagcacaggggatgccagaaagtggtgtggcacttgctgaaggatttcatgcaagattacaggaatttcagaattttgaacaaatctttgaggagtgtatctcgcagtcagcagtgaaaacaaagttcgaacagcacactatcagagctaaacagatactagctactgtgaaaaacataatggattcagtaaacctggcagctgaagataaaaggcattattcagtggaagagagggaagaccaaattgatagactggactttattcgaaaccagatgaaccttttaacactggatgttaagaaaaaaatcaaggaggttaccgaggaggtgccaaacaaagtttcatgtgcaatgacagatgaaatttgtcgactgtctgttttggttgatgaattttgttcagagtttcatcctaatccagatgtattaaaaatatataaaagtctccctagatctttagcttctactcccactgctcctaccactccagcaacgccagataatgcatcacaggaagaactcatgattacattagtaacaggattggcgtccgttacatctagaacttctatgggcatcattattgttggaggagtgatttggaaaactataggctggaaactcctatctgtttcattaactatgtatggagctttgtatctttatgaaagactgagctggaccacccatgccaaggagcgagcctttaaacagcagtttgtaaactatgcaactgaaaaactgaggatgattgttagctccacgagtgcaaactgcagtcaccaagtaaaacaacaaatagctaccacttttgctcgcctgtgccaacaagttgatattacccacaaacagctggaagaagaaattgctagattacccaaagaaatagatcagttggagaaaatccaaaacaattcaaagctcttaagaaataaagctgttcaacttgaaaatgagctggagaattttactaagcagtttctaccttcaagcaatgaagaatcctaacaatagagattgctttggtgaccatgataggaggaaacgaaacttgtaagattggaacagttgttatttttatgaaattactttaaatatgaattgtactatctgtacctaaatagcaaagccctgtgtagattctggtaatgatctgtctcagggtatgtgtatttttgaagagtgttatgtccttagttttaattttgagtaaagaaaaggctaaaatcatgaattagttacaagcaacagtaccaacttatgtgacccctgaggggtggggctgtgagctcttaatttgtttttgattctgaaaaactctgcttcctggcatccaggagttagagattgagcctttcatcttctttctcaacactagtttttgatgctttctttcatgggaatagtcacttttttatttagtaaatcgcattgctggaaccaccccaaggagtgtggaatgtccttgagtgtattatttatgcaagtcacagtcacgttgccatcatggcagctatgtgaaacactaataaatgtgtttttactttttattcccgttaaaactgatgtaaaacaggataaaggcttgttatagtcaaaaaaaaaaaaa

SEQ ID NO: 921 - DNA, 3231 bp, Homo sapiens
  CDS (331)..(1158)
gcacgagtggacttgtggtgcgctgccagggctccgcagcgttgccggttgtattcgctggataccagagggcggaagtgcagcagggttcagctccgacctccgcgccggtgctttttgcggctgcgcgggcttcctggagtcctgctaccgcgtccccgcaggacagtgtgtcaggcgggcagcttgccccgccgccccaccggagcgcggaatctgggcgtccccaccagtgcggggagccggaaggaggagccatagcttggagtaggtttggctttggttgaaataagaatttagcctgtatgtactgctttaactcctggaagaatgacagatgacaaagatgtgcttcgagatgtgtggtttggacgaattccaacttgtttcacgctatatcaggatgagataactgaaagggaagcagaaccatactatttgcttttgccaagagtaagttatttgacgttggtaactgacaaagtgaaaaagcactttcagaaggttatgagacaagaagacattagtgagatatggtttgaatatgaaggcacaccactgaaatggcattatccaattggtttgctatttgatcttcttgcatcaagttcagctcttccttggaacatcacagtacattttaagagttttccagaaaaagaccttctgcactgtccatctaaggatgcaattgaagctcattttatgtcatgtatgaaagaagctgatgctttaaaacataaaagtcaagtaatcaatgaaatgcagaaaaaagatcacaagcaactctggatgggattgcaaaatgacagatttgaccagttttgggccatcaatcggaaactcatggaatatcctgcagaagaaaatggatttcgttatatcccctttagaatatatcagacaacgactgaaagacctttcattcagaagctgtttcgtcctgtggctgcagatggacagttgcacacactaggagatctcctcaaagaagtttgtccttctgctattgatcctgaagatggggaaaaaaagaatcaagtgatgattcatggaattgagccaatgttggaaacacctctgcagtggctgagtgaacatctgagctacccggataattttcttcatattagtatcatcccacagccaacagattgaaggatcaactatttgcctgaacagaatcatccttaaatgggatttatcagagcatgtcacccttttgcttcaatcaggtttggtggaggcaacctgaccagaaacacttcgctgctgcaagccagacaggaaaaagattccatgtcagataaggcaactgggctggtcttactttgcatcacctctgctttcctccactgccatcattaaacctcagctgtgacatgaaagacttaccggaccactgaaggtcttctgtaaaatataatgaagctgaaacctttggcctaagaagaaaatggaagtatgtgccactcgatttgtatttctgattaacaaataaacaggggtatttcctaaggtgaccatggttgaactttagctcatgaaagtggaaacattggtttaattttcaagagaattaagaaagtaaaagagaaattctgttatcaataacttgcaagtaattttttgtaaaagattgaattacagtaaacccatctttccttaacgaaaatttcctatgtttacagtctgtctattggtatgcaatcttgtaactttgataatgaacagtgagagatttttaaataaagcctctaaatatgttttgtcatttaataacatacagttttgtcacttttcaagtactttctgactcacatacagtagatcactttttactctgtgttaccattttgactggtcgtcattggcatggggtggatatagggcataggattacttgtctcagaagctgtcatagaatttcttgctgccaattaaaaaacctgtgttctttacacactacacgtataaatattgtaactgttcatctttgttgttttatcactgtaagcctgtcaaatcatagtatcctaagcatctgtaaatgctaattttgcatttttggaaaaacccattccttccaagctagtgtttttcattggctccaggtctaatttttcactgtggtccctggcagccagtcttttgaagtttaaagattacctgtctcttgactgcagtaccttttctttaatttttaccaaaaatatccagaggttactggagttcttattcaatataaggaaagtttgctgcactttattaccaagcctctgggattttaccagtcaaacatatttgtgcattacatttcatttcttgtgagctagctggctgtccatattgaatgttgacccatttgagtacgctaaaaggcttacagtatcagacacgatcatggttttagatcccataataaaaatgaatgtttttcttataaaaaattatacaaatgctgaagtgagattctactattgttcattgcttccttttctttttccttttgcgattttcactgattaatagcacatttcttcacaaaattagataaagttggtcaaagaccagatattctggaatggaaattgtaaagcttaatcaaaaagaatagccagtacagcatacaatctcagaaacttagaagcaagtagaaaataattggttgatgtaaacgaaagtgccattttagtaaaggcaggaaaaaaatagcaatatttgagttatgtaaggataaaaaatccactgacttgtatttttgcacaagaggctggtctgaatatgattgttcacattaagagtgtttattcgtcggttcattttggggattttcccccttgatgttttgacagattgaagtgagctttagtgagcaaaaggatcagaatgcagggaacactaagctgtgatgaagaaagtgtggtaaaaagccagagtagttttatacagacaaaaccagtgtcaggcctttgcagtaggcttgagtgaacttctgatctagatttgaaagtaaattttatgaagacattgcccatttttacttcctcattcattattgtaccagcatcatagctttattactctaatcccaggtaagtcaagcctacaatgccctagaggaagagtaaaaccagaaattcatgctggcttaaataatctatttttgtttcttttcatttgaatatttaaattttatggtttattaaaaaattaaataaaaaaaaaaaa

SEQ ID NO: 922 - DNA, 1073 bp, Homo sapiens
  CDS (337)..(720)
accacatatatacccaacttttatttgtcaattacactttaataaagctgggggaagccactctttttttgggcacagcatccggcttttatttactaactttgagaacagagtaccttgatcaattaaatggtagggagcgctgtggagacagcatcctccccagtccgggaagagaggcctaggatgcctggggcccagcggcctcttccctcctggcgtccccggctgccctcgctcccaggccccgcagtctcatttgccgcttccgacgcgtgaccccggcgcgctagcgtccgggaccggtgacaggcgcggggtgcgccaagcagtcccatgtgtcccctccctctcgcagccgccgcagtcgctgcgccccgagcccctctccggctcctcaacagagggctcgccgccgccatgtctaccgcccagtcactcaaatccgtggactacgaggtgttcggaagagtgcagggtgtttgcttcagaatgtatacagaagatgaagctaggaaaataggagtggttggctgggtgaagaataccagcaaaggcaccgtgacaggccaagtgcaggggccagaagacaaagtcaattccatgaagtcctggctgagcaaggttggaagccctagttctcgcattgaccgcacaaacttttctaatgaaaaaaccatctctaagcttgaatactctaattttagtattagatactaatagaagagaaaaattgtaacacactgaacaatagatactgtatgttcttaagactatgtatactagaataatagtagcagagtagggtgaaaaggaactttctgttctgaaagctaagcgactgtacgtgctactaaaaatgtctgacactgaaataattttactcaactatgttttcaacaagcaaaaatatagtattctaagattaaaatgtcattacaaaatatttagtgtgaacatttaatttaaacttgtctcatggaatctttaatttcaatgaacattacagcatatatatgttatttggcgagacatcaaataaagttaaccatttaaaaattaaaaaaaaaaaa

SEQ ID NO: 923 - DNA, 1246 bp, Homo sapiens
  CDS (218)..(1078)
atttggccctcgaggccaagaattcggcacgagcacggaaatgaaagtggaagcaaacagcctgcgagcagagcctcctgaggtgtatttcgggtcttgctggggctgagagagaccacagccctttggggggtacaaacaagagttcagttgctgtgaattctgccactgtgcccagctctgaagcctcagctcttgccaaacagacccgagacccatgtcagccccactggatgccgccctccacgcccttcaggaggagcaggccagactcaagatgaggctgtgggacctgcagcagctgagaaaggagctcggggactcccccaaagacaaggtcccattttcagtgcccaagatccccctggtattccgaggacacacccagcaggacccggaagtgcctaagtctttagtttccaatttgcggatccactgccctctgcttgcgggctctgctctgatcacctttgatgaccccaaagtggctgagcaggtgctgcaacaaaaggagcacacgatcaacatggaggagtgccggctgcgggtgcaggtccagcccttggagctgcccatggtcaccaccatccaggtgtccagccagttgagtggccggagggtgttggtcactggatttcctgccagcctcaggctgagtgaggaggagctgctggacaagctagagatcttctttggcaagactaggaacggaggtggcgatgtggacgttcgggagctactgccagggagtgtcatgctggggtttgctagggatggagtggctcagcgtctgtgccaaatcggccagttcacagtgccactgggtgggcagcaagtccctctgagagtctctccgtatgtgaatggggagatccagaaggctgagatcaggtcgcagccagttccccgctcggtactggtgctcaacattcctgatatcttggatggcccggagctgcatgacgtcctggagatccacttccagaagcccacccgcgggggcggggaggtagaggccctgacagtcgtaccccaaggacagcagggcctagcagtcttcacctctgagtcaggctaggggcctccccttctcatcctccccacccccccgccaaggttctcacactggcctgggcttgggtgcccatataggaggtctgtatgttcaccaacagtgcagaggggtcacacattgcaaaacactgcccagaacagtaaaaagagcctgcatgccaaaaaaaaaaaa

SEQ ID NO: 924 - DNA, 530 bp, Homo sapiens
  CDS (45)..(449)
tagtccagtgtggtggaattcaaaacacacttgataactgaaggatgatgaagtgtccacaggctttactagctatcttttggcttctactgagctgggtgagcagtgaagacaaggtggtacaaagccctctatctctggttgtccacgagggagacaccgtaactctcaattgcagttatgaagtgactaactttcgaagcctactatggtacaagcaggaaaagaaagctcccacatttctatttatgctaacttcaagtggaattgaaaagaagtcaggaagactaagtagcatattagataagaaagaactttccagcatcctgaacatcacagccacccagaccggagactcggccatctacctctgtgctgtggaggcacagtgctccctagtcacctgcagcctgtactcaaattctacagctgaggctctgcaactgtaagatggggaacttgctacattgagcaagccctcaaaaataaactatacggaaaagcagttattggtcaaaaaaaaaaaaaaa

SEQ ID NO: 925 - DNA, 2243 bp, Homo sapiens
  CDS (94)..(1341)
ccggaattcccgggtcgacccacgcgtccgcggacgcgtgggcggaggtctttggcgttcagactcttagctgaacgcggagctgcggcggctatgctgtggagcggctgccggcgtttcggggcgcgcctcggctgcctgcccggcggtctccgggtcctcgtccagaccggccaccggagcttgacctcctgcatcgacccttccatgggacttaatgaagagcagaaagaatttcaaaaagtggcctttgactttgctgcccgagagatggctccaaatatggcagagtgggaccagaaggagctgttcccagtggatgtgatgcggaaggcagcccagctaggcttcggaggggtctacatacaaacagatgtgggcgggtctgggctgtcacgtcttgatacctctgtcatttttgaagccttggctacaggctgcaccagcaccacagcctatataagcatccacaacatgtgtgcctggatgattgatagcttcggaaatgaggaacagaggcacaaattttgcccaccgctctgtaccatggagaagtttgcttcctactgcctcactgaaccaggaagtgggagtgatgctgcctctcttctgacctccgctaagaaacagggagatcattacatcctcaatggctccaaggccttcatcagtggtgctggtgagtcagacatctatgtggtcatgtgccgaacaggaggaccaggccccaagggcatctcatgcatagttgttgagaaggggacccctggcctcagctttggcaagaaggagaaaaaggtggggtggaactcccagccaacacgagctgtgatcttcgaagactgtgctgtccctgtggccaacagaattgggagcgaggggcagggcttcctcattgccgtgagaggactgaacggagggaggatcaatattgcttcctgctccctgggggctgcccacgcctctgtcatcctcacccgagaccacctcaatgtccggaagcagtttggagagcctctggccagtaaccagtacttgcaattcacactggctgatatggcaacaaggctggtggccgcgcggctgatggtccgcaatgcagcagtggctctgcaggaggagaggaaggatgcagtggccttgtgctccatggccaagctctttgctacagatgaatgctttgccatctgcaaccaggccttgcagatgcacgggggctacggctacctgaaggattacgctgttcagcagtacgtgcgggactccagggtccaccagattctagaaggtagcaatgaagtgatgaggatactgatctctagaagcctgcttcaggagtagaacccacacttgttctggcctggtgttcagtgcgactgcagtcagtgttgagtggtgccatgtgggccgctctattccaaaggaatcatggattagacccaagggctgagctcctctagggcaggacctgcaccctgtgtgttggcaccagcatcgggtcttggactggggcagaatccccagtggaaccggaagagctggactgatgagaaacatcagaagaacacatactaccttgttttcctaatgccagaagggtgaccagtgaagattcaccgtcaaaccatgaaagtcctttcttggatccactttatcttgattagtctgcattttactagttcactggatccctcctctaggggcctggggactttcactgatgctcttcctgattctagagcaaaggtgtgggaaggggaaatggaggaatgccctcctgtctgtgtcgttctctgtgccacagctacagatgcagaaggtttctctggatagcacacctctgaatgtaaatcatgataaaatggatatttggaaacttactcctaagctgtgatttagggtgtatttctacttctggactgcctcaatatcaagggctgagacttttgaattttgaatattcgttgggtttcatgttaagaagcctgtggtctaggagtgctattcagtgtttcttttcctgataaacactttgaatattttttttgtgtttttgtttccttttctgaagctgttcctccttttaaatatttttaatcacattgataaaatctatccttcaccacctctggttctactatagttgatttttattttaaatgtttaattgtatttgattaaacacttaactggattttggaataataaaactctcgtccaatttggcttttaaaaaaaaaaaa

SEQ ID NO: 926 - DNA, 1014 bp, Homo sapiens
  CDS (141)..(986)
tcggcctgacttcccgggtcgacgatttcgtcttccggctgtcaagctcccggccgggctgactcaagcggaggcgcgcggaacagtcgccgaggcgattcccgcccaggctcctgtaaccgccaggcagtggccccgccatgtcccagccccggaccccagagcaggcactggatacaccgggggactgccccccaggcaggagagacgaggacgctggggaggggatccagtgctcccaacgcatgctcagcttcagtgacgccctgctgtccatcatcgccaccgtcatgatcctgcctgtgacccacacggagatctccccagaacagcagttcgacagaagtgtacagaggcttctggcaacacggattgccgtctacctgatgacctttctcatcgtgacagtggcctgggcagcacacacaaggttgttccaagttgttgggaaaacagacgacacacttgccctgctcaacctggcctgcatgaagaccatcaccttcctgccttacacgttttcgttaatggtgaccttccctgatgtgcctctgggcatcttcttgttctgtgtgtgtgtgatcgccattggggtcgtgcaggcactgattgtggggtacgcattccacttcccgcacctgctgagcccgcagatccagcgctctgcccacagggctctgtaccgacgacacgtcctgggcatcgtcctccaaggcccggccctgtgctttgcagcggccatcttctctctcttctttgtccccctgtcttacctgctgatggtgactgtcatcctcctcccctatgtcagcaaggtcaccggctggtgcagagacaggctcctgggccacagggagccctcggctcacccagtggaagtcttctcgtttgacctccacgagccactcagcaaggagcgcgtggaagccttcagcgacggagtctacgccatcgtggccacgcttctcatcctggacatctggtgaggaccccgcgtcacctgccccagctatt

SEQ ID NO: 927 - DNA, 1893 bp, Homo sapiens
  CDS (289)..(1317)
  misc_feature (1)...(1893): n = a,t,c or g
cagggtgatggatatctgcagaattcggcttactcactatagggctcgagcggccgcccgggcaggtgcagaacagaacactttctcatgtccagggtcagattacaagagcactcaagactttactgacgaaaactcaggaaatcctctatcacaaagaggtttggcaactaaactaagacattaaaaggaaaataccagatgccactctgcaggctgcaataactactacttactggatacattcaaaccctccagaatcaacagttatcaggtaaccaacaagaaatgcaagccgtcgacaatctcacctctgcgcctgggaacaccagtctgtgcaccagagactacaaaatcacccaggtcctcttcccactgctctacactgtcctgttttttgttggacttatcacaaatggcctggcgatgaggattttctttcaaatccggagtaaatcaaactttattatttttcttaagaacacagtcatttctgatcttctcatgattctgacttttccattcaaaattcttagtgatgccaaactgggaacaggaccactgagaacttttgtgtgtcaagttacctccgtcatattttatttcacaatgtatatcagtatttcattcctgggactgataactatcgatcgctaccagaagaccaccaggccatttaaaacatccaaccccaaaaatctcttgggggctaagattctctctgttgtcatctgggcattcatgttcttactctctttgcctaacatgattctgaccaacaggcagccgagagacaagaatgtgaagaaatgctctttccttaaatcagagttcggtctagtctggcatgaaatagtaaattacatctgtcaagtcattttctggattaatttcttaattgttattgtatgttatacactcattacaaaagaactgtaccggtcatacgtaagaacgaggggtgtaggtaaagtccccaggaaaaaggtgaacgtcaaagttttcattatcattgctgtattctttatttgttttgttcctttccattttgcccgaattccttacaccctgagccaaacccgggatgtctttgactgcactgctgaaaatactctgttctatgtgaaagagagcactctgtggttaacttccttaaatgcatgcctggatccgttcatctattttttcctttgcaagtccttcagaaattccttgataagtatgctgaagtgccccaattctgcaacatctctgtcccaggacaataggaaaaaagaacaggatggtggtgacccaaatgaagagactccaatgtaaacaaattaactaaggaaatatttcaatctctttgtgttcagaactcgttaaagcaaagcgctaagtaaaaatattaactgacgaagaagcaactaagttaataataatgactctaaagaaacagaagattacaaaagcaattttcatttacctttccagtatgaaaagctatcttaaaatatagaaaactaatctaaactgtagctgtattagcagcaaaacaaacgacatccaattgtcatgctgcatgcaaaactacacagaattcatgttttgcagagttttgccaaaatgagtaatcatataatatttactgtaatttttaaaatacattatcgttcacaattttattttttcataatccactaagggaagaacgatcaattggatataatcttcttaccaaaaaatgatagntaaaatgtatataatatctagtcccctaaccaaaatncttgacctattgggatacttaataaaaaattaaagtaagtgggataccccaaagaaataataactatttaactttttcatttattagccaaaaaccctaaggggatttaaacctaattggga

SEQ ID NO: 928 - DNA, 627 bp, Homo sapiens
  CDS (72)..(494)
  misc_feature (1)...(627): n = a,t,c or g
atttggccctcgaggccaagaattcggcacgaggacacaactgtgttcactagcaacctcaaacagacaccatggtgcacctgactcctgaggagaagtctgccgttactgccctgtggggcaaggtgaacgtggatgaagttggtggtgaggccctgggcaggctgctggtggtctacccttggacccagaggttctttgagtcctttggggatctgtccactcctgatgctgttatgggcaaccctaaggtgaaggctcatggcaagaaagtgctcggtgcctttagtgatggcctggctcacctggacaacctcaagggcacctttgccacactgagtgagctgcactgtgacaagctgcacgtggatcctgagaacttcaggctcctgggcaacgtgctggtctgtgtgctggcccatcactttggcaaagaattcaccccaccagttgcaggcttgcctatcagaaagttggtggctggttgtggctaatgccctggcccacaagtaatcacttaagcctcgctttccttgctggtccaatttccaattaaaaggttcctttggttccctaagtccaaatacttaaacnggggggatattattgaaagggccttgagaatct

SEQ ID NO: 929 - DNA, 2402 bp, Homo sapiens
  CDS (295)..(1962)
gcccgttgtaccgccccggaattcccgggtcgacccacgcgtccgaccacgcgtacgcccacgcgtgcggctcaaggcatttgggaagtgcaaaatgacatgcaccccctctggaggggcgcacctttgaagtcacctggaccaaggaaaggccctgccctgaaggctggtcacttgcagaggtaaactcccctctttgacttctggccagggtttgtgctgagctggctgcagccgctctcagcctcgctccgggcacgtcgggcagcctcgggccctcctgcctgcaggatcatgcccaccaccgtggacgatgtcctggagcatggaggggagtttcactttttccagaagcaaatgtttttcctcttggctctgctctcggctaccttcgcgcccatctacgtgggcatcgtcttcctgggcttcacccctgaccaccgctgccggagccccggagtggccgagctgagtctgcgctgcggctggagtcctgcagaggaactgaactacacggtgccgggcccaggacctgcgggcgaagcctccccaagacagtgtaggcgctacgaggtggactggaaccagagcacctttgactgcgtggaccccctggccagcctggacaccaacaggagccgcctgccactgggcccctgccgggacggctgggtgtacgagacgcctggctcgtccatcgtcaccgagtttaacctggtatgtgccaactcctggatgttggacctattccagtcatcagtgaatgtaggattctttattggctctatgagtatcggctacatagcagacaggtttggccgtaagctctgcctcctaactacagtcctcataaatgctgcagctggagttctcatggccatttccccaacctatacgtggatgttaatttttcgcttaatccaaggactggtcagcaaagcaggctggttaataggctacatcctgattacagaatttgttgggcggagatatcggagaacagtggggattttttaccaagttgcctatacagttgggctcctggtgctagctggggtggcttacgcacttcctcactggaggtggttgcagttcacagttgctctgcccaacttcttcttcttgctctattactggtgcatacctgagtctcccaggtggctgatctcccagaataagaatgctgaagccatgagaatcattaagcacatcgcaaagaaaaatggaaaatctctacccgcctcccttcagcgcctgagacttgaagaggaaactggcaagaaattgaacccttcatttcttgacttggtcagaactcctcagataaggaaacatactatgatattgatgtacaactggttcacgagctctgtgctctaccagggcctcatcatgcacatgggccttgcaggtgacaatatctacctggatttcttctactctgccctggttgaattcccagctgccttcatgatcatcctcaccatcgaccgcatcggacgccgttacccttgggctgcatcaaatatggttgcaggggcagcctgtctggcctcagtttttatacctggtgatctacaatggctaaaaattattatctcatgcttgggaagaatggggatcacaatggcctatgagatagtctgcctggtcaatgctgagctgtaccccacattcattaggaatcttggcgtccacatctgttcctcaatgtgtgacattggtggcatcatcacgccattcctggtctaccggctcactaacatctggcttgagctcccgctgatggttttcggcgtacttggcttggttgctggaggtctggtgctgttgcttccagaaactaaagggaaagctttgcctgagaccatcgaggaagccgaaaatatgcaaagaccaagaaaaaataaagaaaagatgatttacctccaagttcagaaactagacattccattgaactaagaagagagaccgttgctgctgtcatgacctagctttgatggcagcaagaccaaaagtagaaatccctgcactcatcacaaagcccatacaactcaaccaaacttacccctgagccctatcaacctaggtctacagccagtggagtctattgtacactgtggaaaaatacccatgggaccagatcctgccaaattcttccagctcactttattctcagcattcctaggacattggacattggttttctggagggttttttttccatctttgtatttttttaaatttgattcttttctttgcaatgctatctaaccagaatacataggggaactgtgggctaggcaaacaaaatagaaaaaagtgtgaaaaacagtaaagttgggagaggagcatctattttcttaaagaaataaaacacccaaaacaataaaaaaaaaaaa

SEQ ID NO: 930 - DNA, 2029 bp, Homo sapiens
  CDS (69)..(917)
  misc_feature (1)...(2029): n = a,t,c or g
ccggaattcccgggtcgacccacgcgtccgcccacgcgtccgtggactctcagattctttactatgcaatgttgggggtgaatccccgctttgactcagcttcctccagctactatttggacatgcacagcctcccccatgtcatcaacccagtggagtcccggctgggatccagtgctgcctccttgtaccctgtgctcaactttctactctacgtgcctgagcttgcacactcaccgctgtacattcaggacaaggatggcgctccagtggccaccaatgccttccatagtccccgctggggtggcattatggtatataatgttgactccaaaacctataatgcctcagtgctgccagtgagagtcgaggtggacatggtgcgagtgatggaggtgttcctggcacagttgcggttgctctttgggattgctcagccccagctgcctccaaaatgcctgctttcagggcctacgagtgaagggctaatgacctgggagctagaccggctgctctgggctcggtcagtggagaacctggccacagccaccaccacccttacctccctggcgcagcttctgggcaagatcagcaacattgtcattaaggacgacgtggcatctgaggtgtacaaggctgtagctgccgtccagaagtcggcagaagagttggcgtctgggcacctggcatctgcctttgtcgccagccaggaagctgtgacatcctctgagcttgccttctttgacccgtcactcctccacctcctttatttccctgatgaccagaagtttgccatctacatcccactcttcctgcctatggctgtgcccatcctcctgtccctggtcaagatcttcctggagacccgcaagtcctggagaaagcctgagaagacagactgtgtacgtgatatctgaacactcctcacttcttccccaggacatgatgagctacattgggcccaagaggacagcagtggtgcgggggataatgcaccgggaggcctttaacatcattggccgccgcatagtccaggtggcccaggccatgtctttgactgaggatgtgcttgctgctgctctggctgaccaccttccagaggacaagtggagcgctgagaagaggcggcctctcaagtccagcttgggctatgagatcaccttcagtttactcaacccagaccccaagtcccatgatgtctactgggacattgagggggctgtccggcgctatgtgcaacctttcctgaatgccctcggtgccgctggcaacttctctgtggactctcagattctttactatgcaatgttgggggtgaatccccgctttgactcagcttcctccagctactatttggacatgcacagcctcccccatgtcatcaacccagtggagtcccggctgggatccagtgctgcctccttgtaccctgtgctcaactttctactctacgtgcctgagcttgcacactcaccgctgtacattcaggacaaggatggcgctccagtggccaccaatgccttccatagtccccgctggggtggcattatggtatataatgttgactccaaaacctataatgcctcagtgctgccagtgagagtcgaggtggacatggtgcgagtgatggaggtgttcctggcacagttgcggttgctctttgggattgctcagccccagctgcctccaaaatgcctgctttcagggcctacgagtgaagggctaatgacctgggagctagaccggctgctctgggctcggtcagtggagaacctggccacagccaccaccacccttacctccctggcgcagcttctgggcaagatcagcaacattgtcattaaggacgacgtggcatctgaggtgtacaaggctgtagctgccgtccagaagtcggcagaagagttggcgtctgggcacctggcatctgcctttgtcgccagccaggaagctgtgacatcctcacgaaatcgtcgacccgggaattccggnccggtcctgcaggcgacaggcttacaatggcgagcct

SEQ ID NO: 931 - DNA, 3208 bp, Homo sapiens
  CDS (1)..(2364)
atggggtcgaccgactccaagctgaacttccggaaggcggtgatccagctcaccaccaagacgcagcccgtggaagccaccgatgatgccttttgggaccagttctgggcagacacagccacctcggtgcaggatgtgtttgcactggtgccggcagcagagatccgggccgtgcgggaagagtcaccctccaacttggccaccctgtgctacaaggccgttgagaagctggtgcagggagctgagagtggctgccactcggagaaggagaagcagatcgtcctgaactgcagccggctgctcacccgcgtgctgccctacatctttgaggaccccgactggaggggcttcttctggtccacagtgcccggggcagggcgaggagggggagaagaggatgatgagcatgccaggcccctggccgagtccctgctcctggccattgctgacctgctcttctgcccggacttcacggttcagagccaccggaggagcactgtggactcggcagaggacgtccactccctggacagctgtgaatacatctgggaggctggtgtgggcttcgctcactccccccagcctaactacatccacgatatgaaccggatggagctgctgaaactgctgctgacatgcttctccgaggccatgtacctgcccccagctccggaaagtggcagcaccaacccatgggttcagttcttttgttccacggagaacagacatgccctgcccctcttcacctccctcctcaacaccgtgtgtgcctatgaccctgtgggctacgggatcccctacaaccacctgctcttctctgactaccgggaacccctggtggaggaggctgcccaggtgctcattgtcactttggaccacgacagtgccagcagtgccagccccactgtggacggcaccaccactggcaccgccatggatgatgctgatcctccaggccctgagaacctgtttgtgaactacctgtcccgcatccatcgtgaggaggacttccagttcatcctcaagggtatagcccggctgctgtccaaccccctgctccagacctacctgcctaactccaccaagaagatccagttccaccaggagctgctagttctcttctggaagctctgcgacttcaacaagaaattcctcttcttcgtgctgaagagcagcgacgtcctagacatccttgtccccatcctcttcttcctcaacgatgcccgggccgatcagtctcgggtgggcctgatgcacattggtgtcttcatcttgctgcttctgagcggggagcggaacttcggggtgcggctgaacaaaccctactcaatccgcgtgcccatggacatcccagtcttcacagggacccacgccgacctgctcattgtggtgttccacaagatcatcaccagcgggcaccagcggttgcagcccctcttcgactgcctgctcaccatcgtggtcaacgtgtccccctacctcaagagcctgtccatggtgaccgccaacaagttgctgcacctgctggaggccttctccaccacctggttcctcttctctgccgcccagaaccaccacctggtcttcttcctcctggaggtcttcaacaacatcatccagtaccagtttgatggcaactccaacctggtctacgccatcatccgcaagcgcagcatcttccaccagctggccaacctgcccacggacccgcccaccattcacaaggccctgcagcggcgccggcggacacctgagcccttgtctcgcaccggctcccaggagggcacctccatggagggctcccgccccgctgcccctgcagagccaggcaccctcaagaccagtctggtggctactccaggcattgacaagctgaccgagaagtcccaggtgtcagaggatggcaccttgcggtccctggaacctgagccccagcagagcttggaggatggcagcccggctaagggggagcccagccaggcatggagggagcagcggcgaccgtccacctcatcagccagtgggcagtggagcccaacgccagagtgggtcctctcctggaagtcgaagctgccgctgcagaccatcatgaggctgctgcaggtgctggttccgcaggtggagaagatctgcatcgacaagggcctgacggatgagtctgagatcctgcggttcctgcagcatggcaccctggtggggctgctgcccgtgccccaccccatcctcatccgcaagtaccaggccaactcgggcactgccatgtggttccgcacctacatgtggggcgtcatctatctgaggaatgtggacccccctgtctggtacgacaccgacgtgaagctgtttgagatacagcgggtgtgaggatgaagccgacgaggggctcagtctaggggaaggcagggccttggtccctgaggcttcccccatccaccattctgagctttaaattaccacgatcagggcctggaacaggcagagtggccctgagtgtcatgccctagagacccctgtggccaggacaatgtgaactggctcagatccccctcaacccctaggctggactcacaggagccccatctctggggctatgcccccaccagagaccactgcccccaacactcggactccctctttaagacctggctcagtgctggcccctcagtgcccacccactcctgtgctacccagccccagaggcagaagccaatgggtcactgtgccctaaggggtttgaccagggaaccacgggctgtcccttgaggtgcctggacagggtaagggggtgcttccagcctcctaacccaaagccagctgttccaggctccaggggaaaaaggtgtggccaggctgctcctcgaggaggctgggagctggccgactgcaaaagccagactggggcacctcccgtatccttggggcatggtgtggggtggtgagggtctcctgctatattctcctggatccgtggaaatagcctggctccctcttacccagtaatgaggggcagggaagggaactgggaggcagccgtttagtcctccctgccctgcccactgcctggatggggcgatgccacccctcatccttcacccagctctggcctctgggtcccaccacccagccccccgtgtcagaacaatctttgctctgtacaatcggcctctttacaataaaacctcctgctccacaaaaaaaaaaaaaaaaa

SEQ ID NO: 932 - DNA, 1669 bp, Homo sapiens
  CDS (74)..(1495)
  misc_feature (1)...(1669): n = a,t,c or g
attgaatgcatgcaggtaccggtccggaattcccgggtcgacccacgcgtccgctcagttccagcaggcttggatgcaaaataaagttccaattcctgctccaaatgaggtgctgaatgacagaaaagaagacattaaattggaagagaagaaaaaaacacaagcagaaattgagcaagaaatggctacattacaatatactaacccacaacttctggagcaacttaaaattgaaagacttgcacagaaacaagttgagcaaattcagcctcctccctcatctggcacccctctcctcggaccccagccttttccaggacaaggtccaatgtctcagattcctcaaggttttcaacagccccatccatctcagcagatgccaatgaacatggctcaaatggggcctccaggtccacagggacagtttaggcctcctggaccccagggacaaatgggaccacaaggtcctccactgcatcagggaggtggggggccacaaggattcatgggaccacaggggccccagggcccgccccaggggttgccacggcctcaggacatgcatgggccccaaggaatgcagaggcatcctggacctcatggccctttgggacctcaagggccacctggaccacaaggtagttctggtcctcaaggtcatatgggtcctcagggtccacctggcccacagggtcacataggcccccaaggcccgcctggccctcagggtcacttgggcccacaggggcctccgggtactcaaggtatgcagggaccacctggtcccagaggaatgcaagggcctcctcatcctcatgggatccaaggcggaccagggtctcaagggatccaaggtcctgtgtctcagggacctctgatgggattgaatccaagaggaatgcaggggcctccaggcccccgggagaaccagggtcctgctccccaagggatgattatgggccacccgcctcaagagatgagaggacctcaccctccaggtggactactgggacacggccctcaggaaatgagaggtcctcaggagatccgaggcatgcaggggcctccaccccaaggatcaatgctgggacctccccaggaattgcgagggcctccaggctcacaaagtcagcaggggccgccccagggctctttaggacctccaccccagggtggcatgcaaggaccccccggacctcagggacagcagaacccagcaagagggccacatccatctcaagggccaataccattccagcaacagaaaacgcctctgctaggtgatgggccccgggcccccttcaaccaggaaggacagagcacaggccccccacccctgataccaggcctagggcagcagggagcacaaggtcgcattccccctctgaaccccggacaaggacctggccccaacaaagtttcagaagaggagccccgccgaggcatgagggccgtgctccccccagaggaagggatggttttcctggtcctatgaagactttagtccnagaggagaatttttgatgcttatgagggaagcgggcccgaggacgagatcttcagaaggtcgaggtcggggtaccccacgaaggagggaaggaagggtttacttcccactcctgacgagttccctcgctttgatgagggcggaagccacattcctgcgatg

SEQ ID NO: 933 - DNA, 1087 bp, Homo sapiens
  CDS (46)..(963)
taagcttgcggccgccggcgggccgggcccgcgcacagcgcccgcatgtacaacatgatggagacggagctgaagccgccgggcccgcagcaaacttcggggggcggcggcggcaactccaccgcggcggcggccggcggcaaccagaaaaacagcccggaccgcgtcaagcggcccatgaatgccttcatggtgtggtcccgcgggcagcggcgcaagatggcccaggagaaccccaagatgcacaactcggagatcagcaagcgcctgggcgccgagtggaaacttttgtcggagacggagaagcggccgttcatcgacgaggctaagcggctgcgagcgctgcacatgaaggagcacccggattataaataccggccccggcggaaaaccaagacgctcatgaagaaggataagtacacgctgcccggcgggctgctggcccccggcggcaatagcatggcgagcggggtcggggtgggcgccggcctgggcgcgggcgtgaaccagcgcatggacagttacgcgcacatgaacggctggagcaacggcagctacagcatgatgcaggaccagctgggctacccgcagcacccgggcctcaatgcgcacggcgcagcgcagatgcagcccatgcaccgctacgacgtgagcgccctgcagtacaactccatgaccagcatgtcctactcgcagcagggcacccctggcatggctcttggctccatgggttcggtggtcaagtccgaggccagctccagcccccctgtggttacctcttcctcccactccagggcgccctgccaggccggggacctccgggacatgatcagcatgtatctccccggcgccgaggtgccggaacccgccgcccccagcagacttcacatgtcccagcactaccagagcggcccggtgcccggcacggccattaacggcacactgcccctctcacacatgtgagggccggacagcgaactggaggggggagaaattttcaaagaaaaacgagggaaatgggaggggtgcaaaagaggagagtaagaaacagcatggagaaaacccggtacgctcaaaaagaaaaaaa

SEQ ID NO: 934 - DNA, 2182 bp, Homo sapiens
  CDS (21)..(1868)
aagcctaccttgcaggctcaatggaaacaacattagccatttctaccacaacaccaggcctaagtgcaaaagggggcattctttacagtagctccagatctccagaagagacactctcacctgccagcatgagaagctccagcatcagtggagaacccaccagcttgtatagccaagcagagtcaacacacacaacagcgttccctgccagcaccaccacctcaggcctcagtcaggaatcaacaactttccacagtaagccaggctcaactgagacaacactgtcccctggcagcatcacaacttcatcttttgctcaagaatttaccacccctcatagccaaccaggctcagctctgtcaacagtgtcacctgccagcaccacagtgccaggccttagtgaggaatctaccaccttctacagcagcccaggctcaactgaaaccacagcgttttctcacagcaacacaatgtccattcatagtcaacaatctacacccttccctgacagcccaggcttcactcacacagtgttacctgccaccctcacaaccacagacattggtcaggaatcaacagccttccacagcagctcagacgcaactggaacaacacccttacctgcccgctccacagcctcagaccttgttggagaacctacaactttctacatcagcccatcccctacttacacaacactctttcctgcgagttccagcacatcaggcctcactgaggaatctaccaccttccacaccagtccaagcttcacttctacaattgtgtctactgaaagcctggaaaccttagcaccagggttgtgccaggaaggacaaatttggaatggaaaacaatgcgtctgtccccaaggctacgttggttaccagtgcttgtcccctctggaatccttccctgtagaaaccccggaaaaactcaacgccactttaggtatgacagtgaaagtgacttacagaaatttcacagaaaagatgaatgacgcatcctcccaggaataccagaacttcagtaccctcttcaagaatcggatggatgtcgttttgaagggcgacaatcttcctcagtatagaggggtgaacattcggagattgctcaacggtagcatcgtggtcaagaacgatgtcatcctggaggcagactacactttagagtatgaggaactgtttgaaaacctggcagagattgtaaaggccaagattatgaatgaaactagaacaactcttcttgatcctgattcctgcagaaaggccatactgtgctatagtgaagaggacactttcgtggattcatcggtgactccgggctttgacttccaggagcaatgcacccagaaggctgccgaaggatatacccagttctactatgtggatgtcttggatgggaagctggcctgtgtgaacaagtgcaccaaaggaacgaagtcgcaaatgaactgtaacctgggcacatgtcagctgcaacgcagtggcccccgctgcctgtgcccaaatacgaacacacactggtactggggagagacctgtgaattcaacatcgccaagagcctcgtgtatgggatcgtgggggctgtgatggcggtgctgctgctcgcattgatcatcctaatcatcttattcagcctatcccagagaaaacggcacagggaacagtatgatgtgcctcaagagtggcgaaaggaaggcacccctggcatcttccagaagacggccatctgggaagaccagaatctgagggagagcagattcggccttgagaacgcctacaacaacttccggcccaccctggagactgttgactctggcacagagctccacatccagaggccggagatggtagcatcccctgtgtgagccaacgggggcctcccaccctcatctagctttgttcaggaaagctgcaaacacaaagccccccccaagcctccggggcgggtcaaaaggagaccgaagtcaggccctgaaaccggtcctgctttgagctgacaaacttggccagtcccctgcctgtgctcctgctggggaaggctgggggctgtaagcctttccatccgggagcttccaaactcccaaaagcctcggcacccctgtttcctcctgggtggctcccccctttggaatttccctaccaataaaagcaaatttgaaagctcaaaaaaaaaaaaaaa

SEQ ID NO: 935 - DNA, 1295 bp, Homo sapiens
  CDS (226)..(990)
cccgggtcgacccacgcgtccgctcacggcctagaaactgcgcattcggaactcccccagcaagactctctgcttggttctctcccatctgccacaccacaggctcaggtggaagcagaaggccccactcctggaaaatcggcacctccaaggggctctcctcccaggggggctcagcctggggctggagcaggaccccaggaacccacgcaaacccctcccaccatggctgagcaggaagcccaacccaggccatccctcacgactgctcacgcaaaaaaacaaggcccgcctcactccagggaaccaagggcagagagcaggcttgaagatccaggaatggactccagggaagctgggctgaccccatccccgggagaccccatggctggagggggaccccaggccaaccctgattacctcttccatgtcatctttctgggagactccaacgtgggcaaaacatccttcctgcacctgctgcaccagaattctttcgccaccggattgacagctaccgtgggagtagattttcgggtcaaaaccttgctggtggacaacaagtgctttgtgctgcagctctgggacacagctggccaagagaggtaccacagtatgacgcgacagctgctccgcaaggctgacggggtggtgctcatgtacgacatcacctcccaggagagctttgcccacgtgcgctactggctagactgtctccaggatgcagggtcggatggggtggtcatccttctcctgggaaacaagatggactgtgaggaggaacggcaagtgtccgtggaagctgggcagcaactggcccaggaactgggggtctattttggggagtgcagtgccgccttgggtcacaacatcctggagcctgtagtaaacctggccaggtcactcaggatgcaagaagaaggcctgaagggctcgctggtgaaggtggcccccaagaggccgcccaagagattcggctgttgctcctgatcacctgtcctgtcctgggtaggatggacacccatggggtttcctgtccctcagctcctgtcctttgttcctggacagcaacgacacagaggaccagcttggaggttcaggaaaacccttctcaactcaggactcggatcccagagcagggccgcatcacctctgcctttcacactccaaaggagggctttgctgagtgaacaaggcttgaggggcaggggtatggcaaaactctccaaacaaagaaagtctagaaaaacgacttaaggaaaatacaccaaaatattggccgcaaaaaaaaaaaa

SEQ ID NO: 936 - DNA, 2940 bp, Homo sapiens
  CDS (28)..(2883)
cgaactgctacagaatgtgacgttcgtatgagcaagtctaagtcagacaatcagatcagtgacagagctgctttggaggccaaagtgaaggatcttctcacgctggcaaaaaccaaagacgtagaaattttacatttgagaaatgaactgcgagacatgcgtgcccagctgggcattaatgaggatcattctgagggtgatgaaaaatctgagaaggaaactattatggctcaccagccgactgatgtggagtccactttattgcagttgcaggaacagaatactgccatccgtgaagaactcaaccagctgaaaaatgaaaacagaatgttaaaggacaggttgaatgcattgggcttttccctagagcagaggttagacaattctgaaaaactgtttggctatcagtccctgagcccagaaatcacccctggtaaccagagcgatggaggaggaactctgacttcttcagtggaaggctctgcccctggctcagtggaggatctcttgagtcaggatgaaaatacactaatggaccatcagcacagtaactccatggacaatttagacagtgagtgcagtgaggtctaccagcccctcacatcgagcgatgatgcgctggatgcaccatcctcctcagagtcggaaggcatccccagcatagagcgctcccggaaggggagcagcgggaatgccagtgaagtgtccgtggcttgcctgactgaacggatacaccagatggaagagaaccaacacagtacaagtgaggaactccaggcaaccctgcaagagctagctgatttacagcagattacccaggaactgaatagtgaaaacgaaaggcttggagaagagaaggttattctgatggagtctttatgtcagcagagcgataagttggaacactttagtcgacagattgaatacttccgctctcttctagatgagcatcacatttcttatgtcatagatgaagatgtaaaaagtgggcgctatatggaattagagcaacgttacatggacctcgctgagaatgcccgttttgaacgggagcagcttcttggtgtccagcagcatttaagcaatactttgaaaatggcagaacaagacaataaggaagctcaagaaatgataggggcactcaaagaacgcagtcaccatatggagcgaattattgagtctgagcagaaaggaaaagcagccttggcagccacgttagaggaatacaaagccacagtggccagtgaccagatagagatgaatcgcctgaaggctcagctggagaatgaaaagcagaaagtggcagagctgtattctatccataactctggagacaaatctgatattcaggacctcctggagagtgtcaggctggacaaagaaaaagcagagactttggctagtagcttgcaggaagatctggctcatacccgaaatgatgccaatcgattacaggatgccattgctaaggtagaggatgaataccgagccttccaagaagaagctaagaaacaaattgaagatttgaatatgacgttagaaaaattaagatcagacctggatgaaaaagaaacagaaaggagtgacatgaaagaaaccatctttgaacttgaagatgaagtagaacaacatcgtgctgtgaaacttcatgacaacctcattatttctgatctagagaatacagttaaaaaactccaggaccaaaagcacgacatggaaagagaaataaagacactccacagaagacttcgggaagaatctgcggaatggcggcagtttcaggctgatctccagactgcagtagtcattgcaaatgacattaaatctgaagcccaagaggagattggtgatctaaagcgccggttacatgaggctcaagaaaaaaatgagaaactcacaaaagaattggaggaaataaagtcacgcaagcaagaggaggagcgaggccgggtatacaattacatgaatgccgttgagagagatttggcagccttaaggcagggaatgggactgagtagaaggtcctcgacttcctcagagccaactcctacagtaaaaaccctcatcaagtcctttgacagtgcatctcaagtaccaaaccctgctgcagctgcaattcctcgaacgcccctgagcccaagtcctatgaaaacccctcctgcagcagctgtgtcccctatgcagagacattccataagtggaccaatctcaacatccaaacccctgacagccctgtcagataagagaccaaactatggggaaatccctgttcaagagcatctgttaagaacatcttcagccagccggcctgcttccctgccaagagtgcctgcgatggaaagtgccaagaccctctcagtgtctcgacgaagtagtgaagaaatgaaacgggacatttctgcacaggagggagcgtcgccagcctctctgatggctatgggaaccacgtctccacagctttccctgtcctcttctccaacggcatctgtgactcccaccacccgaagccgaataagagaagaaaggaaagaccctctctcagcattggccagagaatatggaggatcaaagaggaacgccttgctgaagtggtgtcagaagaaaacagaaggctatcagaatattgacattacaaacttcagcagcagctggaatgatgggctggccttctgtgccctcctgcatacatatctccctgcccacattccatatcaagaactgaacagccaggataagagaaggaacttcatgctggctttccaggcagctgaaagtgtcggcatcaaatccacactggacattaatgaaatggtacggactgaacgacccgactggcagaacgtgatgctgtatgtgacggcgatctacaagtactttgagacctgagcatgccgggaggagccgccccaatagcgggggtacccctccacagcgaccgag

SEQ ID NO: 937 - DNA, 3173 bp, Homo sapiens
  CDS (232)..(2532)
tgatgtgatatggctgcaagtgcctttgacccttttgtctcccttccataaactgaaatacctaagctgctccaacctcctttttgtcttttgtttcataaatcctttcccattgcacatcaactcctgtctctctttgtactgtcactctcatctgttgctttccattcacactgcctttagccactcatcattttgtgcctacaccacagaaacctctgaatgtaatggatgttcctaccagaggacaagtcgtacaatggtggaggaataggttcttcaaataggatcatggacttcttggaggagccaatccctggtgtagggacctatgatgatttcaatacaattgattgggtgagagagaagtctcgagaccgggataggcaccgagagattaccaataaaagcaaagagtcaacatgggccttaattcacagtgtgagtgatgctttttccggctggttgttgatgctccttattgggcttttatcaggttcgttagctggtttgatagacatctctgctcattggatgacagacttaaaagaaggtatatgcacagggggattctggtttaaccatgaacattgttgctggaactctgagcatgtcacctttgaagagagagacaaatgtccagagtggaatagttggtcccagcttatcatcagcacagatgagggagcctttgcctacatagtcaattatttcatgtacgtcctctgggctctcctatttgccttccttgccgtatctcttgtcaaggtgtttgcgccttatgcctgtggctctggaatccctgagataaaaactatcttgagtggtttcattattaggggctatttgggtaagtggactctggttatcaaaaccatcaccttggtgctggcagtgtcgtctggcttgagcctgggcaaagagggccctctagtgcacgtggcttgctgctgtgggaacatcctgtgccactgcttcaacaaatacaggaagaatgaagccaagcgcagagaggtcttgtcggctgcagcagcagctggtgtatctgtagcctttggagcacctataggtggagtattattcagccttgaagaggtcagctactattttcccctcaaaacattgtggcgttcattctttgctgccttggtggcagcattcactctacgctccatcaatccatttgggaacagccgcctggtactattttatgtggagtttcacaccccatggcatctctttgagctcgtgccattcattctgctgggcatatttggtggtctgtggggagcactgtttatccgcacaaacattgcctggtgtcggaagcgaaagaccacccagttgggcaagtatcctgttatagaggtactcgtcgtgacagccatcactgccatcctggctttccccaatgaatacactcggatgagcacaagtgagctcatttctgagctgtttaatgactgtggccttctggactcctccaagctctgtgattatgagaaccgtttcaacacaagcaaagggggtgaactgcctgacagaccggctggcgtgggagtctacagtgcaatgtggcagctggctttaacactcatactgaaaattgtcattactatattcacctttggcatgaagatcccttctggcctctttatccctagcatggctgttggtgctatagcaggtcgacttctaggagtaggaatggaacagctggcttattaccaccaggaatggaccgtcttcaatagctggtgtagtcagggagctgattgcatcacccccggcctttatgcaatggttggggctgcagcctgcttaggtggggtgactcggatgactgtttctcttgttgtcataatgtttgaactgactggtggcttagaatacatcgtgcctctgatggctgcagccatgacaagcaagtgggtggcagatgctcttgggcgggagggcatctatgatgcccacatccgtctcaatggatacccctttcttgaagccaaagaagagtttgctcataagaccctggcaatggatgtgatgaaaccccggagaaatgatcctttgttgactgtccttactcaggacagtatgactgtggaagatgtagagaccataatcagtgaaaccacttacagtggcttcccagtggtggtatcccgggagtcccaaagacttgtgggctttgtcctccgaagagatctcattatttcaattgaaaatgctcgaaagaaacaggatggggttgttagcacttccatcatttatttcacggagcattctcctccattgccaccatacactccacccactctaaagcttcggaacatcctcgatctcagccccttcactgtgactgaccttacacccatggagatcgtagtggatattttccgaaagctgggactgcggcagtgcctggttacacacaacgggcgattgcttggaatcattaccaaaaaggatgtgttaaagcatatagcacagatggcgaaccaagatcctgattccattctcttcaactagaatcatagagttctggatgtaaagcgggaaggacattacagaccatggatatgttgtttaacggtacccaaaacacattttccatatttggatggtgaagtcacattagtgtgttgtctctttcctacaagttaaccagttgcactacataatctctggaaattaattttctctttaggagaaattatagttaggcttccatgatgttacattaggaagatatcatgaaagaataaataagattgctatggtttaattatatttgctttttaaaagatttttttaacttaaaaagtagttagccaatatgcaatcactgaaaactatgcaagagaaattccaaccgtcctgacctataacctgtaggaaaccgacgaaaaagtcactcttttgggatctaactgttgttactggaagacgaaggtaaactaaggggctttgcttttcaaaccagagaaaggaaagccagaaggaaaagagtaatggtattttctagactgtgaagattcagttcaaatgttatccttgttcctgttacaatatttagcattattagtttgttatgtgtgtatgtttatgttaattttaatttctgattataagacaatgctgctttggttaatctcttctaaaggaattta

SEQ ID NO: 938 - DNA, 1357 bp, Homo sapiens
  CDS (88)..(1119)
  misc_feature (1)...(1357): n = a,t,c or g
gagaaaggagaggagggaggaggcgcgccgcgccatggtgtcctgcgcggggccagggccagggccggggccgggccaggccgggccatgagccgcgccgggagctgggacatggacgggctgcgggcagacggcgggggcgccggtggcgccccggcctcttcctcctcctcatcggtggcggcggcggcggcgtcaggccagtgccgcggctttctctccgcgcctgtgttcgccgggacgcattcggggcgggcggcggcggcggcagcggcggctgcggcggcggcggcggcagcctccggctttgcgtaccccgggacctctgagcgcacgggctcttcctcgtcgtcgtcctcttctgccgttgtagcggcgcgcccggaggctcccccagccaaagagtgcccagcacccacgcctgcagcggccgctgcagcgcccccgagcgctccagcgctgggctacggctaccacttcggcaacggctactacagctgccgtatgtcgcacggcgtgggcttacagcagaatgcgctcaagtcatcgccgcacgcctcgctgggaggctttcccgtggagaagtacatggacgtgtcaggcctggcgagcagcagcgtaccggccaacgaggtgccagcgcgagccaaggaggtatccttctaccagggctatacgagcccttaccagcacgtgcccggctatatcgacatggtgtccactttcggctccggggagcctcggcacgaggcctacatctccatggaggggtaccagtcctggacgctggctaacgggtggaacagccaggtgtactgcaccaaggaccagccacaggggtcccacttttggaaatcttcctttccaggggatgtggctctaaatcagccggacatgtgcgtctaccgaagagggaggaagaagagagtgccttacaccaaactgcagcttaaagaactggagaacgagtatgccattaacaaattcattaacaaggacaagcggcggcgtatctcggctgctacgaacctatctgagagacaagtgaccatttggtttcagaaccgaagagtgaaggacaagaaaattgtctccaagctcaaagatactgtctcctgatgtggtccaggttggccacagacagcttacaagccattcggttgtctccaaaaggcctttggaaagacttgaaatgtatttaattccccccaccccctgccaatggtggcaaattttgtgaattgtttttctctcttccccttatctggctctaaaaccttctgctgcccaacctgactttgtagttctgaattttacttggttattantggnttnntgtcttgcctaaggtttttaa

SEQ ID NO: 939 - DNA, 4055 bp, Homo sapiens
  CDS (29)..(2884)
  misc_feature (1)...(4055): n = a,t,c or g
gggccgcgggggagggggcgaccacaagatggcggacctctcgctgcttcaggaggacctgcaggaggacgcagacggatttggtgtggatgactacagctcagagtctgatgtgattattataccttcagccctggactttgtctcacaagatgaaatgttgacgcccctggggagattggacaagtatgctgcaagtgagaacatatttaaccagacaaaatggtggccccggagtttgctcgataccttgagggaagtctgcgatgatgaaagagattgtattgctgttttggaaagaattagcagattggccgatgattcagaaccaactgtgagagcggagctgatggaacaggtgcctcacatcgcactgttttgtcaagaaaaccggccttcaataccatatgctttttcaaaattcttactacctattgtggttagataccttgcagatcagaataatcaggtgaggaaaacaagtcaggcagctttgctggctctgttggagcaggagctcattgaacgatttgatgtggagaccaaagtgtgccctgtcctcatagagctgacagccccagatagcaatgatgatgtgaaaacagaagctgtggctataatgtgcaaaatggctcccatggttgggaaggatattacagagcgtcttatcctccctaggttttgtgagatgtgctgcgattgcagaatgtttcacgttcgaaaggtctgtgctgccaattttggagatatttgcagtgtagttggccagcaagctactgaagaaatgttgctgcccagatttttccagctttgttctgataatgtatggggagtccgaaaggcttgtgctgaatgcttcatggcggtttcatgtgcaacatgtcaagaaatccgacggaccaaattatcagcactttttattaatttgatcagtgatccttcacgttgggttcgccaagcagcttttcagtctctgggacctttcatatctacttttgctaatccatctagctcaggccagtattttaaagaagaaagcaaaagttcagaagagatgtcagtagaaaacaaaaataggaccagagatcaagaagccccagaggatgtacaagtcaggccagaggatactccttcagatctcagtgttagtaattccagtgtcatactggaaaacacgatggaagaccatgctgctgaggcatccgggaagcctctaggtgaaattagtgttccactggacagctctttactttgtactttgtcctcagaatctcaccaggaagcagctagtaatgagaatgataaaaaacctggtaactacaaatctatgttacgaccagaggttggcaccacttcacaagattcagctctcttagatcaggaattgtataactccttccatttctggaggactcctcttcctgaaatagatctagacatagagcttgaacagaactctgggggaaaacccagcccagagggaccagaggaagaatctgagggccctgtgcccagttctccaaacatcaccatggccaccagaaaggaactggaagaaatgatagaaaatctagagccccacattgatgatccagatgttaaagcacaagtggaagtgctgtccgctgcactacgtgcttccagcctggatgcacatgaagagaccatcagtatagaaaagagaagtgatttgcaagatgaactggatataaatgagctaccaaattgtaaaataaatcaagaagattctgtgcctttaatcagcgatgctgttgagaatatggactccactcttcactatattcacagcgattcagacttgagcaacaatagcagttttagccctgatgaggaaaggagaactaaagtacaagatgttgtacctcaggcgttgttagatcagtatttatctatgactgacccttctcgtgcacagacggttgacactgaaattgctaagcactgtgcatatagcctccctggtgtggccttgacactcggaagacagaattggcactgcctgagagagacgtatgagactctggcctcagacatgcagtggaaagttcgacgaactctagcattctccatccacgagcttgcagttattcttggagatcaattgacagctgcagatctggttccaatttttaatggatttttaaaagacctcgatgaagtcaggataggtgttcttaaacacttgcatgattttctgaagcttcttcatattgacaaaagaagagaatatctttatcaacttcaggagtttttggtgacagataatagtagaaattggcggtttcgagctgaactggctgaacagctgattttacttctagagttatatagtcccagagatgtttatgactatttacgtcccattgctctgaatctgtgtgcagacaaagtttcttctgttcgttggatttcctacaagttggtcagcgagatggtgaagaagctgcacgcggcaacaccaccaacgttcggagtggacctcatcaatgagcttgtggagaactttggcagatgtcccaagtggtctggtcggcaagcctttgtctttgtctgccagactgtcattgaggatgactgccttcccatggaccagtttgctgtgcatctcatgccgcatctgctaaccttagcaaatgacagggttcctaacgtgcgagtgctgcttgcaaagacattaagacaaactctactagaaaaagactatttcttggcctctgccagctgccaccaggaggctgtggagcagaccatcatggctcttcagatggaccgggacagcgatgtcaagtattttgcaagcatccaccctgccagtaccaaaatctccgaagatgccatgagcacagcgtcctcaacctactagaaggcttgaatctcggtgtctttcctgcttccatgagagccgaggttcagtgggcattcgccacgcatgtgacctgggatagctttcgggggaggagagaccttcctctcctgcggacttcattgcaggtgcaagttgcctacacccaataccagggatttcaagagtcaagagaaagtacagtaaacactattatcttatcttgactttaaggggaaataatttctcagaggattataattgtcaccgaagccttaaatccttctgtcttcctgactgaatgaaacttgaattggcagagcattttccttatggaagggatgagattcccagagacctgcattgctttctcctggttttatttaacaatcgacaaatgaaattcttacagcctgaaggcagacgtgtgcccagatgtgaaagagaccttcagtatcagccctaactcttctctcccaggaaggacttgctgggctctgtggccagctgtccagcccagccctgtgtgtgaatcgtttgtgacgtgtgcaaatgggaaaggaggggtttttacatctcctaaaggacctgatgccaacacaagtaggattgacttaaactcttaagcgcagcatattgctgtacacatttacagaatggttgctgagtgtctgtgtctgattttttcatgctggtcatgacctgaaggaaatttattagacgtataatgtatgtctggtgtttttaacttgatcatgatcagctctgaggtgcaacttcttcacatactgtacatacctgtgaccactcttgggagtgctgcagtctttaatcatgctgtttaaactgttgtggcacaagttctcttgtccaaataaaatttattaataagatctatagagagagatatatacacttttgattgttttctagatgtctaccaataaatgcaatttgtgacctgtattaatgatttaaagtggggaaactagattaaaatatttgtcttttaactagtttattagtttctntggaatctgcctgtgtccctgggtttgggttttgctcttggcagcagcaggtgcctcttgggtgctcctcctgctcctgcctgcagccctaagagcaggtgggtgccgagtgtctggcacagcttggatgccgcccactgaagacagcagaggggggttgt

SEQ ID NO: 940 - DNA, 2568 bp, Homo sapiens
  CDS (281)..(2188)
gggatgggggcggagtccagggcgtgggggggccggtttgttgtggtcgccattttgctggttgcattactgggtaatcggggccctggcttgccgcgtccgccggataccctcagccagtgggcaggtctgagctcgggctccccgagcagtttgagtccccttgcccgctccttcaggtctcagcggcggtggcagccgaggtgcaggatgcaagaaggcgccccccggccgggctcccgctccaggcctcgctcccctgcggccctctgagcccaccatggccgtcccaccgggccatggtcccttctctggcttcccagggccccaggagcacacgcaggtattgcctgatgtgcggctactgcctcggaggctgcccctggccttccgggatgcaacctcagccccgctgcgtaagctctctgtggacctcatcaagacctacaagcacatcaatgaggtatactatgcgaagaagaagcggcgggcccagcaggcgccaccccaggattcgagcaacaagaaggagaagaaggtcctgaaccatggttatgatgacgacaaccatgactacatcgtgcgcagtggcgagcgctggctggagcgctacgaaattgactcgctcattggcaaaggctcctttggccaggtggtgaaagcctatgatcatcagacccaggagcttgtggccatcaagatcatcaagaacaaaaaggctttcctgaaccaggcccagattgagctgcggctgctggagctgatgaaccagcatgacacggagatgaagtactatatagtacacctgaagcggcacttcatgttccggaaccacctgtgcctggtatttgagctgctgtcctacaacctgtacgacctcctgcgcaacacccacttccgcggcgtctcgctgaacctgacccggaagctggcgcagcagctctgcacggcactgctctttctggccacgcctgagctcagcatcattcactgcgacctcaagcccgaaaacatcttgctgtgcaaccccaagcgcagcgccatcaagattgtggacttcggcagctcctgccagcttggccagaggatctaccagtatatccagagccgcttctaccgctcacctgaggtgctcctgggcacaccctacgacctggccattgacatgtggtccctgggctgcatccttgtggagatgcacaccggagagcccctcttcagtggctccaatgaggtgtgcccccaggaaggggtcgaccagatgaaccgcattgtggaggtgctgggcatcccaccggccgccatgctggaccaggcgcccaaggctcgcaagtactttgaacggctgcctgggggtggctggaccctacgaaggacgaaagaactcaggaaggattaccagggccccgggacacggcggctgcaggaggtgctgggcgtgcagacgggcgggcccgggggccggcgggcgggggagccgggccacagccccgccgactacctccgcttccaggacctggtgctgcgcatgctggagtatgagcccgccgcccgcatcagccccctgggggctctgcagcacggcttcttccgccgcacggccgacgaggccaccaacacgggcccggcaggcagcagtgcctccacctcgcccgcgcccctcgacacctgcccctcttccagcaccgccagctccatctccagttctggaggctccagtggctcctccagtgacaaccggacctaccgctacagcaaccgatattgtgggggccctgggccccctatcacagactgtgagatgaacagcccccaggtcccaccctcccagccgctgcggccctgggcagggggtgatgtgccccacaagacacatcaagcccctgcctctgcctcgtcactgcctgggaccggggcccagttacccccccagccccgataccttggtcgtcccccatcaccaacctcaccaccacccccggagctgatggatgtgagcctggtgggcggccctgctgactgctccccacctcacccagcgcctgccccccagcacccggctgcctcagccctccggactcggatgactggaggtcgtccacccctcccgcctcctgatgaccctgccactctggggcctcacctgggcctccgtggtgtaccccagagcacagcagccagctcgtgaccctgccccctccctggggcccctcctgaagccataccctcccccatctgggggccctgggctcccatcctcatctctctccttgactggaattgctgctacccagctggggtgggtgaggcctgcactgattggggcctggggcaggggggtcaaggagagggttttggccgctccctccccactaaggactggacccttgggcccctctccccctttttttctatttattgtaccaaagacagtggtggtccggtggagggaagaccccccctcaccccaggaccctaggagggggtgggggcaggtagggggagatggccttgctcctcctcgctgtacccccagtaaagagctttctcacaaaaaaaaaaaaaaaa

SEQ ID NO: 941 - DNA, 665 bp, Homo sapiens
  CDS (196)..(501)
cccgaattcccgggcaacccacgcgtccgctcagcctcaggagccaatctaaccgatgctcacctcttctgtcttcttgcatgcgaccgcgatctgtgttgcgatggcttcgtcctcacacaggttcaaggaggtgccatcatctgtgggttgctgagctcacccagcgtcctgctttgtaatgacaaagactggatggatccctctgaagcctgggctaatgctacatgtcctggtgtgacatatgaccaggagagccaccaggtgatattgcgtcttggagaccacgagttcatcaagagtctgacacccttagaaggaactcaagacacctttaccaattttcagcaggtttatctctggaaagattctgacatggggtctcggcctgagtctatgggatgtagaaaaaacacagtgccaaggccagcatctccaacagaagcaggtactgacccccaaaccttcttacacacttgggtgtctgaatgcagagactaaatgggtgcaccaagagtttaatcaatgaacggatgtattgacatcactctattctgtatccatggactctcctttaatcttttaacccaattatccagctcataaatatgggaagctcctcagatgggccattgtcacaagaaagtaaggcataatcactgcaa

SEQ ID NO: 942 - DNA, 3913 bp, Homo sapiens
  CDS (146)..(3757)
gccgagaggacgagtggggagggccagagctgcgcgtgctgctttgcccgagcccgagcccgagcccgagcccgagcccgagcccgagcccgagcccgaacgcaagcctgggagcgcggagcccggctagggactcctcctatttatggagcaggcacccaacatggctgagccccggggccccgtagaccatggagtccagattcgcttcatcacagagccagtgagtggtgcagagatgggcactctacgtcgaggtggacgacgcccagctaaggatgcaagagccagtacctacggggttgctgtgcgtgtgcagggaatcgctgggcagccctttgtggtgctcaacagtggggagaaaggcggtgactcctttggggtccaaatcaagggggccaatgaccaaggggcctcaggagctctgagctcagatttggaactccctgagaacccctactctcaggtcaagggatttcctgccccctcgcagagcagcacatctgatgaggagcctggggcctactggaatggaaagctactccgttcccactcccaggcctcactggcaggccctggcccagtggatcctagtaacagaagcaacagcatgctggagctagccccgaaagtggcttccccaggtagcaccattgacactgctcccctgtcttcagtggactcactcatcaacaagtttgacagtcaacttggaggccaggcccggggtcggactggccgccgaacacggatgctaccccctgaacagcgcaaacggagcaagagcctggacagccgcctcccacgggacacctttgaggaacgggagcgccagtccaccaaccactggacctctagcacaaaatatgacaaccatgtgggcacttcgaagcagccagcccagagccagaacctgagtcctctcagtggctttagccgttctcgtcagactcaggactgggtccttcagagttttgaggagccgcggaggagtgcacaggaccccaccatgctgcagttcaaatcaactccagacctccttcgagaccagcaggaggcagccccaccaggcagtgtggaccatatgaaggccaccatctatggcatcctgagggagggaagctcagaaagtgaaacctctgtgaggaggaaggttagtttggtgctggagaagatgcagcctctagtgatggtttcttctggttctactaaggccgtggcagggcagggtgagcttacccgaaaagtggaggagctacagcgaaagctggatgaagaggtgaagaagcggcagaagctagagccatcccaagttgggctggagcggcagctggaggagaaaacagaagagtgcagccgactgcaggagctgctggagaggaggaagggggaggcccagcagagcaacaaggagctccagaacatgaagcgcctcttggaccagggtgaagatttacgacatgggctggagacccaggtgatggagctgcagaacaagctgaaacatgtccagggtcctgagcctgctaaggaggtgttactgaaggacctgttagagacccgggaacttctggaagaggtcttggaggggaaacagcgagtagaggagcagctgaggctgcgggagcgggagttgacagccctgaagggggccctgaaagaggaggtagcctcccgtgaccaggaggtggaacatgtccggcagcagtaccagcgagacacagagcagctccgcaggagcatgcaagatgcaacccaggaccatgcagtgctggaggcggagaggcagaagatgtcagcccttgtgcgagggctgcagagggagctggaggagacttcagaggagacagggcgttggcagagtatgttccagaagaacaaggaggatcttagagccaccaagcaggaactcctgcagctgcgaatggagaaggaggagatggaagaggagcttggagagaagatagaggtcttgcagagggaattagagcaggcccgagctagtgctggagatactcgccaggttgaggtgctcaagaaggagctgctccggacacaggaggagcttaaggaactgcaggcagaacggcagagccaggaggtggctgggcgacaccgggaccgggagttggagaagcagctggcggtcctgagggtcgaggctgatcgaggtcgggagctggaagaacagaacctccagctacaaaagaccctccagcaactgcgacaggactgtgaagaggcttccaaggctaagatggtggccgaggcagaggcaacagtgctggggcagcggcgggccgcagtggagacgacgcttcgggagacccaggaggaaaatgacgaattccgccggcgcatcctgggtttggagcagcagctgaaggagactcgaggtctggtggatggtggggaagcggtggaggcacgactacgggacaagctgcagcggctggaggcagagaaacagcagctggaggaggccctgaatgcgtcccaggaagaggaggggagtctggcagcagccaagcgggcactggaggcacgcctagaggaggctcagcgggggctggcccgcctggggcaggagcagcagacactgaaccgggccctggaggaggaagggaagcagcgggaggtgctccggcgaggcaaggctgagctggaggagcagaagcgtttgctggacaggactgtggaccgactgaacaaggagttggagaagatcggggaggactctaagcaagccctgcagcagctccaggcccagctggaggattataaggaaaaggcccggcgggaggtggcagatgcccagcgccaggccaaggattgggccagtgaggctgagaagacctctggaggactgagccgacttcaggatgagatccagaggctgcggcaggccctgcaggcatcccaggctgagcgggacacagcccggctggacaaagagctactggcccagcgactgcaggggctggagcaagaggcagagaacaagaagcgttcccaggacgacagggcccggcagctgaagggtctcgaggaaaaagtctcacggctggaaacagagttagatgaggagaagaacaccgtggagctgctaacagatcgggtgaatcgtggccgggaccaggtggatcagctgaggacagagctcatgcaggaaaggtctgctcggcaggacctggagtgtgacaaaatctccttggagagacagaacaaggacctgaagacccggttggccagctcagaaggcttccagaagcctagtgccagcctctctcagcttgagtcccagaatcagttgttgcaggagcggctacaggctgaagagagggagaagacagttctgcagtctaccaatcgaaaactggagcggaaagttaaagaactatccatccagattgaagacgagcggcagcatgtcaatgaccagaaagaccagctaagcctgagggtgaaggctttgaagcgtcaggtggatgaagcagaagaggaaattgagcgactggacggcctgaggaagaaggcccagcgtgaggtggaggagcagcatgaggtcaatgaacagctccaggcccggatcaagtctctggagaaggactcctggcgcaaagcttcccgctcagctgctgagtcagctctcaaaaacgaagggctgagctcagatgaggaattcgacagtgtctacgatccctcgtccattgcatcactgcttacggagagcaacctacagaccagctcctgttagctcgtggtcctcaaggactcagaaaccaggctcgaggcctatcccagcaagtgctgctctgctctgcccaccctgggttctgcattcctatgggtgacccaattattcagacctaagacagggaggggtcagagtgatggtgataaaaaaaaaaaa

SEQ ID NO: 943 - DNA, 1978 bp, Homo sapiens
  CDS (257)..(1921)
cttggtataggcgagacccaagctggctagcgtttattcgtaagcttggtaccgagctcggatccactagtccagtgtggtggaattcgaccctctgtgtagattaaacctgcgctccctgtttcccatttccacagccgatgtccagggtcgatacggcccttaaaatccccgcacactccaccccagcattgacttccaaagactcctggcacatgaggaagaaacccagaagaggagagcaaaggagtcaggaatggcttttactcagttgacattcagggacgtggccatcgaattctctcaagatgagtggaaatgcctgaactctacacagaggactttatacagggatgtgatgttggagaactacaggaacctggtctccctggatctgtctcgtaactgtgtaatcaaggaactagcaccacaacaggaaggtaacccaggagaagtattccacacagtgacattggaacaacatgaaaaacatgacattgaagagttttgcttcagggaaatcaagaaaaaaatacacgactttgactgtcagtggagagatgatgaaagaaattgcaacaaagtgactacggccccaaaagaaaatcttacttgtaggagagaccaacgcgatagaagaggtataggaaacaagtctattaaacatcagcttggattaagctttctaccacatccccatgaactgcagcagtttcaagctgaagggaaaatttatgaatgtaaccatgttgagaagtctgtcaaccatggttcctcagtttcaccaccccaaatactttcttctaccgtcaaaacccatgtttctaataaatatgggactgatttcatctgttcttcattactcacacaagaacagaaatcatgcattagggaaaaaccttacagatatattgagtgcgacaaagccttgaatcatggctcacacatgactgtacgtcaggtaagtcattctggagagaaaggatataaatgtgatctgtgtggcaaggtctttagtcaaaaatcaaaccttgcgcgtcattggagagttcatactggagagaaaccatacaaatgtaatgaatgtgacagaagtttcagtcgcaactcatgccttgcactacatcggagagttcacactggagagaaaccttacaaatgttatgagtgtgacaaggtcttcagtcgaaattcatgccttgcactacatcagaaaactcatattggagagaaaccttacacatgtaaagagtgtggcaaagcctttagtgtgaggtcaacacttaccaaccatcaggtaattcatagtggcaagaaaccttacaaatgcaatgaatgtggcaaggtgttcagtcagacttcaagccttgcaactcatcagagaattcacactggggagaaaccatacaagtgtaatgaatgtggtaaagtcttcagtcagacttcaagccttgcaaggcattggagaattcatactggagagaaaccttacaaatgcaatgaatgtggtaaggttttcagttacaattcacaccttgcgagtcatcggagagttcatactggagagaaaccttacaagtgtaatgagtgtgggaaagcctttagtgtgcattcgaacttaactacccatcaggtcatccatactggagagaagccttacaaatgtaatcaatgtggcaaaggcttcagtgtgcattcaagcctaactacccatcaggtcatccatactggagaaaaaccttacaaatgtaatgagtgtggcaaatcctttagtgtgcgcccaaacctcactagacatcagataatccatactggaaagaaaccttacaaatgtagtgattgtgggaagtcctttagtgtgcgcccaaacctcttcagacatcaaattatccatactaaggagaaaccttataaaagaaattaatatggcaaggtcttcagtcaaagtttaaatcctgtgagtcatcaaagaatttat

SEQ ID NO: 944 - DNA, 915 bp, Homo sapiens
  CDS (224)..(865)
tgcgccggaactcccgggtcgacccacgcgtccgctgtggtccttctgctaatgcaaacaacaaaacgggcacactagtcacccccgagggaggccaccatcactgtaactgttggccaaagctacaaaagaagcgagggaatccaaccgagcgcagcgacactgagaacagcttcccctgccttctgcggcggcagaagtgaagtgcctgaggaccggaaggatggtgcagtcctgctccgcctacggctgcaagaaccgctacgacaaggacaagcccgtttctttccacaagtttcctcttactcgacccagtctttgtaaagaatgggaggcagctgtcagaagaaaaaactttaaacccaccaagtatagcagtatttgttcagagcactttactccagactgctttaagagagagtgcaacaacaagttactgaaagagaatgctgtgcccacaatatttctttgtactgagccacatgacaagaaagaagatcttctggagccacaggaacagcttcccccacctcctttaccgcctcctgtttcccaggttgatgctgctattggattactaatgccgcctcttcagacccctgttaatctctcagttttctgtgaccacaactatactgtggaggatacaatgcaccagcggaaaaggattcatcagctagaacagcaagttgaaaaactcagaaagaagctcaagaccgcacagcagcgatgcagaaggcaagaacggcagcttgaaaaattaaaggaggttgttcacttccagaaagagaaagacgacgtatcagaaagaggttatgtgattctaccaaatgactactttgaaatagttgaagtaccagcataaaaaaatgaaatgtgtattgatttctaatggggcaataccacatatcctcc

SEQ ID NO: 945 - DNA, 787 bp, Homo sapiens
  CDS (145)..(609)
taattcccgggtcgacttcgctgtcgacgatttcgtagccgggcgcctcacctgtcagccgcaccggctccagcgctcgcctctcgcccttgcttctccagcgctccttgctcgcaaggcgggggaggcggcggcccagccacgatgatacatttcatattgctcttcagtcgacaagggaaattacggctacagaaatggtacatcactctccctgataaagagaggaagaagatcacccgggaaattgttcagattattctctcccgtggtcacaggacaagcagttttgttgactggaaggagctaaaacttgtttataaaaggtatgctagtttatatttttgctgtgcaatagaaaatcaggacaatgagctcttgacgctagagattgtgcatcgttacgtggagctgctggacaaatattttggaaatgtctgtgagctggatattatctttaattttgaaaaggcttatttcatcctggacgagtttataataggtggggaaattcaggaaacatccaagaaaattgctgtcaaagccattgaagactctgatatgttacaggaggtcagtacggtttcccaaaccatgggagaaagatgatgatgatgatgatgatgatggtgttaataattataatattaaccaagacttactgagtacttactctgtgctgggtacagtttctaaactatttatatgtattagcttatttaatcctcacaacaactcgaaaaagtaggtggtattgttactcccactttacagatgagtaaactgg

SEQ ID NO: 946 - DNA, 2083 bp, Homo sapiens
  CDS (569)..(2011)
  misc_feature (1)...(2083): n = a,t,c or g
cgtccccggtccctgcctccaggcgcgtacacggcgcgctaagaggcgcggggagctcttagcgcacctactacttaaccggaccggctacttactggccgccaggtggaagcctgcgatcgagctggccgggcctcccagcaccgccgctctccaggctccctttccaggactcaactttggtcccagccccaatcgcagctccggtaacctttccaggaaccgaaatgctagatacagcggaaggagaaacggagggaggaagacaaacccggagcagggcggcgcggcagtttggacacgccccgagctctcctgggctctcagtccccgtcaggatgggaggcgcgtgccgagggaggaggctgaggacacagcctcctttcgccctgcgctgcccggccttccgcgtgaccccgcctatgacctcggggcgttccgcctacgtctgaccgtcaggtgcgcacgcgcacttacaggcttgttttgccagcttcacgccacccgggatgggagaaagcaggtgtcgcgagagttgggcgcaagacgccttgtagggagtgtaactatggccggcctgcggaacgaaagtgaacaggagccgctcttaggcgacacacctggaagcagagaatgggacattttagagactgaagagcattataagagccgatggagatctattaggattttatatcttactatgtttctcagcagtgtagggttttctgtagtgatgatgtccatatggccatatctccaaaagattgatccgacagctgatacaagttttttgggctgggttattgcttcatatagtcttggccaaatggtagcttcacctatatttggtttatggtctaattatagaccaagaaaagagcctcttattgtctccatcttgatttccgtggcagccaactgcctctatgcatatctccacatcccagcttctcataataaatactacatgctggttgctcgtggattgttgggaattggagcagtttttcagacttgttttacattccttggagaaaaaggtgtgacatgggatgtgattaaactgcagataaacatgtatacaacaccagttttacttagcgccttcctgggaattttaaatattattctgatccttgccatactaagagaacatcgtgtggatgactcaggaagacagtgtaaaagtattaattttgaagaagcaagtacagatgaagctcaggttccccaaggaaatattgaccaggttgctgttgtggccatcaatgttctgttttttgtgactctatttatctttgccctttttgaaaccatcattactccattaacaatggatatgtatgcctggactcaagaacaagctgtgttatataatggcataatacttgctgctcttggggttgaagccgttgttattttcttaggagttaagttgctttccaaaaagattggcgagcgtgctattctactgggaggactcatcgttgtatgggttggcttctttatcttgttaccttggggaaatcaatttcccaaaatacagtgggaagatttgcacaataattcaatccctaataccacatttggggaaattattattggtctttggaagtctccaatggaagatgacaatgaaagaccaactggttgctcgattgaacaagcctggtgcctctacaccccggtgattcatctggcccagttccttacatcagctgtgctaataggattaggctatccagtctgcaatcttatgtcctatactctatattcaaaaattctaggaccaaaacctcagggtgtatacatgggctggttaacagcatctggaagtggagcccggattcttgggcctatgttcatcagccaagtgtatgctcactggggaccacgatgggcattcagcctggtgtgtggaataatagtgctcaccatcaccctcctgggagtggtttacaaaagactcattgctctttctgtaagatatgggaggattcaggaataaactagctaagactgtgatggaaacacgaaatcgtcgacagcgaagtccctccnnnntttccggaccgggacc

SEQ ID NO: 947 - DNA, 4079 bp, Homo sapiens
  CDS (134)..(3664)
gcacgaggtgaagcgtgtgctttagtttcgtgggaggcctggcatccccgagagggaggggaaaggtaaccactcctttgtggaggtcgccagggtcattgtcgtggatttgcacagtcggctgggcggtgcaatggcggaaagaaaaggaacagccaaagtggactttttgaagaagattgagaaagaaatccaacagaaatgggatactgagagagtgtttgaggtcaatgcatctaatttagagaaacagaccagcaagggcaagtattttgtaaccttcccatatccatatatgaatggacgccttcatttgggacacacgttttctttatccaaatgtgagtttgctgtagggtaccagcgattgaaaggaaaatgttgtctgtttccctttggcctgcactgtactggaatgcctattaaggcatgtgctgataagttgaaaagagaaatagagctgtatggttgcccccctgattttccagatgaagaagaggaagaggaagaaaccagtgttaaaacagaagatataataattaaggataaagctaaaggaaaaaagagtaaagctgctgctaaagctggatcttctaaataccagtggggcattatgaaatcccttggcctgtctgatgaagagatagtaaaattttctgaagcagaacattggcttgattatttcacgccactggctattcaggatttaaaaagaatgggtttgaaggtagactggcgtcgttccttcatcaccactgatgttaatccttactatgattcatttgtcagatggcaatttttaacattaagagaaagaaacaaaattaaatttgggaagcggtatacaatttactctccgaaagatggacagccttgcatggatcatgatagacaaactggagagggtgttggacctcaggaatatactttactcaaattgaaggtgcttgagccatacccatctaaattaagtggcctgaaaggtaaaaatattttcttggtggctgctactctcagacctgagaccatgtttgggcagacaaattgttgggttcgtcctgatatgaagtacattggatttgagacggtgaatggtgatatattcatctgtacccaaaaagcagccaggaatatgtcataccagggctttaccaaagacaatggcgtggtgcctgttgttaaggaattaatgggggaggaaattcttggtgcatcactttctgcacctttaacatcatacaaggtgatctatgttctcccaatgctaactattaaggaggataaaggcactggtgtggttacaagtgttccttccgactcccctgatgatattgctgccctcagagacttgaagaaaaagcaagccttacgagcaaaatatggaattagagatgacatggtcttgccatttgagccggtgccagtcattgaaatcccaggttttggaaatctttctgctgtaaccatttgtgatgagttgaaaattcagagccagaatgaccgggaaaaacttgcagaagcaaaggagaagatatatctaaaaggattttatgagggtatcatgttggtggatggatttaaaggacagaaggttcaagatgtaaagaagactattcagaaaaagatgattgacgctggagatgcacttatttacatggaaccagagaaacaagtgatgtccaggtcgtcagatgaatgtgttgtggctctgtgtgaccagtggtacttggattatggagaagagaattggaagaaacagacatctcagtgcttgaagaacctggaaacattctgtgaggagaccaggaggaattttgaagccaccttaggttggctacaagaacatgcttgctcaagaacttatggtctaggcactcacttgccttgggatgagcagtggctgattgaatcactttctgactccactatttacatggcattttacacagttgcacacctattgcaggggggtaacttgcatggacaggcagagtctccgctgggcattagaccgcaacagatgaccaaggaagtttgggattatgttttcttcaaggaggctccatttcctaagactcagattgcaaaggaaaaattagatcagttaaagcaggagtttgaattctggtatcctgttgatcttcgcgtctctggcaaggatcttgttccaaatcatctttcatattacctttataatcatgtggctatgtggccggaacaaagtgacaaatggcctacagctgtgagagcaaatggacatctcctcctgaactctgagaagatgtcaaaatccacaggcaacttcctcactttgacccaagctattgacaaattttcagcagatggaatgcgtttggctctggctgatgctggtgacactgtagaagatgccaactttgtggaagccatggcagatgcaggtattctccgtctgtacacctgggtagagtgggtgaaagaaatggttgccaactgggacagcctaagaagtggtcctgccagcactttcaatgatagagtttttgccagtgaattgaatgcaggaattataaaaacagatcaaaactatgaaaagatgatgtttaaagaagctttgaaaacagggttttttgagtttcaggccgcaaaagataagtaccgtgaattggctgtggaagggatgcacagagaacttgtgttccggtttattgaagttcagacacttctcctcgctccattctgtccacatttgtgtgagcacatctggacactcctgggaaagcctgactcaattatgaatgcttcatggcctgtggcaggtcctgttaatgaagttttaatacactcctcacagtatcttatggaagtaacacatgaccttagactacgactcaagaactatatgatgccagctaaagggaagaagactgacaaacaacccctgcagaagccctcacattgcaccatctatgtggcaaagaactatccaccttggcaacataccaccctgtctgttctacgtaaacactttgaggccaataacggaaaactgcctgacaacaaagtcattgctagtgaactaggcagtatgccagaactgaagaaatacatgaagaaagtcatgccatttgttgccatgattaaggaaaatctggagaagatggggcctcgtattctggatttgcaattagaatttgatgaaaaggctgtgcttatggagaatatagtctatctgactaattcgcttgagctagaacacatagaagtcaagtttgcctccgaagcagaagataaaatcagggaagactgctgtcctgggaaaccacttaatgtttttagaatagaacctggtgtgtccgtttctctggtgaatccccagccatccaatggccacttctcaaccaaaattgaaatcaagcaaggagataactgtgattccataatcaggcgtttaatgaaaatgaatcgaggaattaaagacctttccaaagtgaaactgatgagatttgatgatccactgttggggcctcgacgagttcctgtcctgggaaaggagtacaccgagaagacccccatttctgagcatgctgttttcaatgtggacctcatgagcaagaaaattcatctgactgagaatgggataagggtggatattggcgatacaataatctatctggttcattaaactcatgcacattggagatttatcctggtttcttaggaatactactactctgattgtgtctactgattggctatcagaaccttaggctggacctaaatagattgatttcatttctaaccatccaattctgcatgtattcataattctatcaagtcatctttgattcctggacctaataaattttttttccctttctttgggtgtccaagagaaatggtttttgccaaactctttttaaaaaacaaattgttgctatttcctagaagtttctggtttttaagatgaacataaaagtgtcagtatgcttcttttatgaggtgtactttatactttgatgaaggctaaggtgtacctaacagctttttatagtatattcatttatggagttagctgtattttttttaaaaaaaaaaaa

SEQ ID NO: 948 - DNA, 5352 bp, Homo sapiens
  CDS (109)..(5229)
attttccgggtcgacgatttcgtgcgactctcggtcgtgcagcggcggcgagcgctcgcgagcggctgcgggacgcgaggtttccggagctgagctcaatgtgcagcaatggatgacgacagcctggatgagcttgtggcccggagcccagggccggatggacacccacaggtcggccctgcggacccggcaggtgactttgaagaaagcagcgtgggcagcagtggggactctggggacgacagtgacagcgagcatggagatggcacagacggagaagacgagggggcgtctgaggaggaagacctggaagacagatctggttccgaggattctgaagacgacggggagacattgctggaggtagcgggtactcaggggaaactggaagccgctggctctttcaattctgatgatgatgcagagagctgcccaatctgtctcaacgcattcagagaccaggccgtggggacgccggagaactgtgcccattacttctgcctggactgcattgtcgaatggtccaagaatgccaattcctgtccagttgatcgaactctatttaagtgcatttgtattcgagctcaatttggtggtaaaatcttaaaaaagatcccagtggagaacaccaaagcgagcgaggaggaggaggacccgaccttctgtgaggtgtgcggcaggagcgaccgtgaggacaggcttttgctctgcgacggctgcgatgcggggtaccacatggaatgcttggacccccctctccaggaggtgccggtggacgagtggttctgcccggaatgtgctgcgcctggtgttgtccttgccgctgatgcgggtcccgtgagtgaggaggaggtctccctgctcttggctgatgtggtgcccaccaccagcaggcttcggcctcgagcaggtaggacccgggcgatagccaggacacggcagagtgagagagtgagagcaaccgtgaaccggaaccggatctccacggccaggagggtccagcacacaccagggcgcctcgggtcttccctgctggatgaagccatcgaggctgtggcgactggcctgagcactgccgtgtatcagcgccccctgacgccgcgcactcccgcccgacggaagaggaagacaagaagacggaagaaagtgccgggaagaaagaaaaccccgtccggaccatccgcaaaaagtaagagctcagcgacaagatctaagaaacgccaacatcgagtgaagaagagaagagggaagaaggtaaagagtgaagccaccactcgctctcgaatcgcgcggacgctgggcctgcgcaggcctgttcacagcagctgcatcccgtcagtgttgaagccagtggagccctctttggggctgctgagagcggatattggagctgcctctctgtctctgtttggagatccttatgagctggatcccttcgacagcagtgaagagctttctgcaaaccctctttcccctctgagtgccaagagacgggctctgtcccggtcagccctgcagtcccaccagcccgtggccaggcccgtctccgtggggctttccaggaggcgcctccctgccgcggtgccagagccagacttggaggaggagccagtgcctgacctgctgggcagcatcctgtcgggccagagcctcctgatgctgggcagcagtgatgtcatcatccaccgcgacggctccctcagcgccaagagggcggctccagtttcttttcagcgaaactcaggcagtctgtccagaggggaagaaggattcaagggctgcctgcagccccgagcactgccctccgggagcccggcccaaggcccgtcaggaaacaggccacagagcacagggctcagctgtcaaggcaggtcccgcacccccgcccgcaccgcgggggcgcctgtgaggctggacttgccagcagcccctggggcggttcaggctcggaacttgtcaaatgggagtgtgcctggcttcagacagagccacagcccctggttcaacggcaccaacaagcacaccttgccccttgcctctgccgcgtctaagatctcaagcagagattctaagcccccatgtcgcagtgtggtgccggggcctcccctgaagccagcgcccagaagaacagacatctctgagctacccaggataccaaagatcaggagagatgacggtggtggcagacgggatgcggccccggcccacgggcagagcattgagatccccagtgcctgcatcagccgactgactggcagggagggcaccgggcagccagggcgaggcacacgggcagagagcgaggccagcagcagggtgccccgggagcccggggtgcacacgggcagctcccggcccccagcccccagctcccatggcagtttggccccactgggaccatcaagagggaaaggggtcgggtcgacctttgagagcttccggatcaatattcctggaaacatggcacattccagccagctctccagccctggcttctgtaacacgttccggcctgtggacgataaggagcagaggaaggagaacccctcacccctcttctccatcaagaagacgaagcagctgcggagcgaggtctacgacccatccgaccccaccggctccgactccagcgcccctggcagcagccccgagaggtctggccccggcctcctgccctctgagatcacacgaaccatctccatcaacagcccgaaggcccagacggtgcaggctgtgcgctgcgtcacctcctacacggtggagagcatctttggtacagagcccgaaccccctctcggaccgtcctccgccatgtccaagctccggggtgcagtggctgccgagggggcctctgacacggagcgagaggagcccacagagagccagggcctggctgcccggctgcggaggccatcccccccagagccctgggatgaggaggatggggcgtcttgcagcaccttctttggctctgaggagcggacggtgacctgtgtgactgtcgtggagccggaagccccacccagcccggacgtgctgcaggctgccacccacagagtcgtggagctcaggcccccttcccggtcccgctccacatccagctcccgcagcaggaagaaggccaagaggaagagggtgtccagggagcacggacggacgcgctctgggacgcgctctgaatccagggacaggagctcgaggtcagcgtcaccatcagtgggtgaggagcgccccaggaggcagcggtccaaggccaagagccggcggtcctccagtgaccgctccagcagccgagagcgagctaagaggaagaaagccaaggacaagagcagggagcacaggcggggcccctggggccacagccggaggacgtcccggtcgcggtcggggagccctggcagctcttcctatgagcactatgagagtagaaaaaaaaaaaaaaggagatcagcgtccagacctcggggaagggagtgctcccccaccagcagcctggagaggctctgcaggcacaagcatcagcgggaacgcagccacgagcggccagacaggaaggagagtgtggcgtggccccgagaccggaggaagcggaggtcccggtccccaagctcggagcacagggcacgggagcacaggcggcctcggtcccgtgagaagtggccgcagacccggtcccattccccagagaggaagggggctgtgagggaggcttccccagcgccccttgcacagggggagccagggcgggaagacctccccaccaggttgccagccttgggggaagcacatgtctcgccggaggtggctacggccgacaaggcccccctgcaggctccccctgtcctggaggtggcagctgagtgtgagccggacgacctggacctggattatggcgactccgtggaggccggacacgtctttgatgatttctcaagcgacgccgttttcatccagctcgatgacatgagctcgccaccttctcccgaaagcacagactcttccccggagcgagacttcccactgaagcctgcgttgcccccagccagcctggccgtggccgccatccagagggaggtgtcattgatgcacgatgaagacccttcgcagcccccacccctgccagagggcacccaggagccacatttgctcaggccggacgcggctgagaaggctgaggcacccagttccccggatgtggcgcctgcggggaaggaagacagcccctctgcgagtgggagggtacaggaggcagcccggcctgaggaggtggtttcgcagacccccctgctgcggtccagagccctggtgaagcgggtcacctggaacctgcaggagtcggagagcagcgcccccgccgaggacagagccccccggggcaccacttcacaggccacagaagccccgagaaggagcctgggacatggaggatgtggcccccacaggggtcaggcaggcgttctccgagctgccctttcccagtcacgtgcttccggaacccgggttcccagacacagacccctctcaggtttacagccccggcctgccgcctgccccggcccagccctcaagcatcccaccctgcgcactggtcagccagcccacggtccagttcatccttcaggggagcctgccgctagtgggctgtggggcagcacagaccctggccccagtgcccgctgccctgaccccagcctcagagccagccagtcaagccactgcagccagcaactcggaggagaagaccccggcccccaggctagctgcggagaaaaccaagaaggaggagtacatgaagaagctgcacatgcaggagcgtgctgtggaggaggtgaagctggccatcaagcccttctaccagaagagggaggtgaccaaggaggagtacaaggacatcctgcgcaaggccgtgcagaagatctgccacagcaagagtggagagatcaaccccgtgaaggtggccaacctggtgaaggcgtacgtggacaagtacaggcacatgcgcaggcacaagaaaccagaggccggggaggagccgcccacgcagggggccgagggctgaggccaggcaatcacgggctatgcccggggagctgtcgggagtggcgggaatcggggccatgcccggggagctgtcgggagtggcgggaatcggggccatgcccggggagctgtcgggagtggcgggaaatggggggcatcaccatgcctgccgtcgggttcctgcgctgacacctggtctgtgcacctgtgttgctcacagttgaaaactggacacttttgtatgtatattatagagacactgtttccattctaatttatcaaaaatggattatctttagaaaaaaaaaaaaa

SEQ ID NO: 949 - DNA, 2319 bp, Homo sapiens
  CDS (227)..(1162)
  misc_feature (1)...(2319): n = a,t,c or g
ggggttgaangaggatacccctttgaccattcggcctatttaggtgacactatagaacaagtttgtacaaaaaagcaggctggtaccggtccggaattcccgggatatcgtcgacccacgcgtccgccgccccgcgctgggaatttgcggcggcctccgccggggcagccgagctgaaccggtctcttcctcggaaaggcagggccgaggggcctgcggggcagccatggaggcgacgcggaggcggcagcacctgggagcgacgggcggcccaggcgcgcagctgggcgcctccttcctgcaggccaggcatggctctgtgagcgctgatgaggctgcccgcacggctcccttccacctcgacctctggttctacttcacactgcagaactgggttctggactttgggcgtcccattgccatgctggtattccctctcgagtggtttccactcaacaagcccagtgttggggactacttccacatggcctacaacgtcatcacgccctttctcttgctcaagctcatcgagcggtccccccgcaccctgccacgctccatcacgtacgtgagcatcatcatcttcatcatgggtgccagcatccacctggtgggtgactctgtcaaccaccgcctgctcttcagtggctaccagcaccacctgtctgtccgtgagaaccccatcatcaagaatctcaagccggagacgctgatcgactcctttgagctgctctactattatgatgagtacctgggtcactgcatgtggtacatccccttcttcctcatcctcttcatgtacttcagcggctgctttactgcctctaaagctgagagcttgattccagggcctgccctgctcctggtggcacccagtggcctgtactactggtacctggtcaccgagggccagatcttcatcctcttcatcttcaccttcttcgccatgctggccctcgtcctgcaccagaagcgcaagcgcctcttcctggacagcaacggcctcttcctcttctcctccttcgcactgaccctcttgcttgtggcgctctgggtcgcctggctgtggaatgaccctgttctcaggaagaagtacccgggtgtcatctacgtccctgagccctgggctttctacacccttcacgtcagcagtcggcactgagtccctggcaccaggctctggcgctctgctgggtgggagggtgggccatggagggcatctgaatacaggagtagggggggtgtgggtgtgtaaccagagaccgagagcatgagtggggtgtgcctcgtgtgcgtggattcgtgtgtgtgtgtgtgtcttgtatatgtgtgcgcagagtgcatcattttcagactctactatttccgtcaagtttctgtttgatttggatcatctcaggatcggattctgttttagagtgtttctgggccaggatccgggcccctgccctcctctgcacctgaccacactccctactcagggctagtctgttcttcccggacatcttctggtagccgtgcaggagagggctgggtggggcagaggccaggaggggacctggtgtgtcacctgcccaccacctggctcatccctcaggcccaccctgaccctacattacataggttacgtcagcctactgtggctgttgagcaaagcatttctcctttctgggcctcatttgcactagatgggcctgtggtcccaaagtaggtcagtaggttggggttgctgacaccccttgggtgcagctttgggacagatgagtggctctgtcctgtcactgccctctccctgcctgggggctatgtgcactccagacccctgcccaggctcaggcccatgaggtatggagacaccctggcccccaggagctggaggcaccgcccactcccctggcattccagctttgcaggtgaccctcctctacccaaagctctgtccccctgctcccactccagaagaactgcggcacgtgcttcgggcagcctagccacaggctttgagcgcctgcattcctgggggctggagggtggggtgccaaaggccctgagcaaaagccagagctcctctcatcaaagcctttacaaggtgctgggcccagaggctttgccttgacagagtggcccagggtttcaagggaggaggaacctccccctacctaggacccttcctgtggggggtctacagagtcagggacagaagggaagggacccacaggaagtcacagtggtgcccagggatgtgtcagcccccagccacggggacgcgggattcaagaatgaagtaaatacagtcacagccccaaaaaaaaaaaaaaa

SEQ ID NO: 950 - DNA, 1392 bp, Homo sapiens
  CDS (157)..(1212)
gtacgagggcggcggcgaggaccacaccgggggcggggccggtagtgggagtgcggggcgcgcggtgacagcgcggggttggcggcgtgggacccagggggcgacagaggcagcagcagcccgaggcctgaggagaggagaccggcggcggcggcaatgctggagacccttcgcgagcggctgctgagcgtgcagcaggatttcacctccgggctgaagactttaagtgacaagtcaagagaagcaaaagtgaaaagcaaacccaggactgttccatttttgccaaagtactctgctggattagaattacttagcaggtatgaggatacatgggctgcacttcacagaagagccaaagactgtgcaagtgctggagagctggtggatagcgaggtggtcatgctttctgcgcactgggagaagaaaaagacaagcctcgtggagctgcaagagcagctccagcagctcccagctttaatcgcagacttagaatccatgacagcaaatctgactcatttagaggcgagttttgaggaggtagagaacaacctgctgcatctggaagacttatgtgggcagtgtgaattagaaagatgcaaacatatgcagtcccagcaactggagaattacaagaaaaataagaggaaggaacttgaaaccttcaaagctgaactagatgcagagcacgcccagaaggtcctggaaatggagcacacccagcaaatgaagctgaaggagcggcagaagttttttgaggaagccttccagcaggacatggagcagtacctgtccactggctacctgcagattgcagagcggcgagagcccataggcagcatgtcatccatggaagtgaacgtggacatgctggagcagatggacctgatggacatatcggaccaggaggccctggacgtcttcctgaactctggaggagaagagaacactgtgctgtcccccgccttagggcctgaatccagtacctgtcagaatgagattaccctccaggttccaaatccctcagaattaagagccaagccaccttcttcttcctccacctgcaccgactcggccacccgggacatcagtgagggtggggagtcccccgttgttcagtccgatgaggaggaagttcaggtggacactgccctggccacatcacacactgacagagaggccactccggatggtggtgaggacagcgactcttaaattgggacatgggcgttgtctggccacactggaatccagttttggctgtatgcggaattccacctggaaagccaggttgttttatagaggttcttgatttttacataattgccaataatgtgtgagaaacttaaagaacagctaacaataaagtgtgaggacggtaaaaaaaaaaaaaaa

SEQ ID NO: 951 - DNA, 3423 bp, Homo sapiens
  CDS (845)..(2593)
cgaaatattcacaaaacccagggtaaatgccatcagtcataatggaaattgtcccctgaagctacagataaactttaagtaagtttgcagctttgggtgggacacaaatggcatgtgctgacatcctcatactttattagggaacatattctgctctgggctgaagccaactcatttcatcatcatcattgttgtcataatcatcgtcgtcatcatcatagcaaccatttcctgaacgtttattgtgttgcatacactggtccagaaccttaaggcagatgatctatttcatcttctgaagaaatctgagacctgagatgctcccatgagttttgaatatgctctgctccttacagcaaagacaccatttttaaaagtaccattcttttgactttgctgttcccaaggcttctgtgatattccggcccctccgtttaaaagccatcagatttgagagcaataagtcttcaaaaccgggaatttacattgtttttcagctgaccgacttccaggaaaaggactcaaccgcatctacccaaataccgtggcactgcttgcgctctttgccaccggatactccccttccaatgagactttctgattgtgtctaccaactctcctattaggaaacccgtgggttgcatgcagctattctgttgtattctcattctcactctccctcccttctctcactctcactcttgctggaggcgagccactaccattctgctgagaaggaaaagcccgcaactactttaagagattaagacaatatgcgcaatcctcgcctttcctagcaatcactatttaaatctggcaagaactgacaacagtctttgcaagaatggaatccgtaaaacaaaggattttggccccaggaaaagaggggctaaagaattttgctggaaaatcactcggccagatctacagggtgctggagaagaagcaagacaccggggagacaatcgagctgacggaggatgggaagcccctagaggtgcccgagaggaaggcgccgctgtgcgactgcacgtgcttcggcctgccccgccgctacattatcgccatcatgagcggcctgggcttctgcatctccttcggtatccgctgcaacctgggcgtggccattgtggacatggtcaacaacagcaccatccaccgcgggggcaaggtcatcaaggagaaagccaaattcaactgggacccggaaaccgtggggatgatccacggttccttcttttggggctacatcatcactcagattccgggaggctacatcgcgtctcggctggcagccgacagggttttcggagctgccatacttcttacctctaccctaaatatgctaattccatcagcagccagagtgcattatggatgtgtcatctttgtcagaatactgcagggacttgttgagggtgtgacctacccagcatgtcatgggatatggagcaaatgggccccacctctagagaggagtagactggcaaccacctccttttgtggttcctatgccggagctgtgattgcaatgcctttagctggcattcttgtgcagtacactggctggtcttcagtgttttatgtctacggaagctttggaatggtctggtacatgttttggcttttggtgtcttatgaaagtcctgcaaagcatcctactattacagatgaagaacgtaggtacacagaagaaagcattggagagagtgcaaatcttttaggtgcaatggaaaaattcaagactccatggaggaagttttttacatccatgccagtctatgcaataattgttgcaaacttctgcagaagctggactttttatttattgcttattagtcagccagcatattttgaggaagtctttggatttgaaattagcaaggttggtatgctatctgctgtgccacacttagtaatgacaattattgtgcctattgggggacaaattgcagattttctaagaagcaagcagattctttcaactacgacagtgagaaagatcatgaattgtggtggttttggcatggaagccacactgctcctggtcgttggctattctcatactagaggggtagcaatctcattcttggtacttgcagtgggattcagtggatttgctatatctggtttcaatgttaaccacttggatatcgctccaagatatgccagtatcttaatgggcatttcgaatggtgttggcacattgtcaggaatggtttgtcctatcattgttggtgcaatgacaaagaataagtcacgtgaagagtggcagtatgtcttcctgatcgctgccctagtccactatggtggagttatattttatgcaatatttgcctcaggagagaaacaaccctgggcagacccggaggaaacaagtgaagaaaaatgtggatttattcatgaagatgaactcgatgaagaaacaggggacattactcaaaattatataaattatggtaccaccaagtcttatggtgccacaacacaggccaatggaggttggcctagtggttgggaaaagaaagaggaatttgtacaaggagaagtacaagactcacatagctataaggaccgagttgattattcataacaaaactaattactggatttatttttagtgtttgtgattaaattcattgtgattgcacaaaaattttaaaaacacgtgatgtaaacttgcaagcatatcaaccaggcaagtcttgctgtaaaaatgaaaacaaaacaaacccatgaggttaccatcaagtgcaatctgtaaaattgtgaagttccatcatttccattcaagtcatccattcttgcatttgtgacttaaaggttgactggtcaaaattgtagaaacaagtagttacccattggattcatatgagctaaaactcatcactatttactaaagcacaacatctcatcctacaaaagttaagaagccaaagctacttgatcatgcaaaatgcacttatatatttgttacactgtattgcaagatagcacacagaagttggctgcgtcaagtagaggcgacatttattaagtgaaaatcatgggagttgggatatctctcaattaaagaaatacattgtgaactatcagctaccaagttgtactgaataactattagaattgcataatgtgagatattttgttagtcctcaaaaggaatatcttgcagtgttttctatgaaatgcttgggcacaaacacttatttctgtgaaagagaacatgtaagttgaggggtatgcttcatgttcttccatccatttacctaatagtatgaaacagttcacatttcaataaaatcaaacttttcatgtagcgtatcacataacttttttgcaaaaaatataaaaagaaataaacttcaatgtattttttattacaactttgtactggttgtaacttgcattagaaaaaaaaaa

SEQ ID NO: 952 - DNA, 1492 bp, Homo sapiens
  CDS (223)..(1212)
aaggatccttaattaaattaatccccccccccccccccgaccactccagctgggactgctaggaaggttgcgggtccacccggccgagccgaacgagggaaatggtcctcacccggccactcgccggttgaaaaggggccgccctggcagggaagcggccgccgcggcgcggtgcagcgcagcggcgagaaggagtgcgttatcgtcttgcgctactgctgaatgtccgtcccggaggaggaggagaggcttttgccgctgacccagagatggccccgagcgagcaaattcctactgtccggctgcgcggctaccgtggccgagctagcaacctttcccctggatctcacaaaaactcgactccaaatgcaaggagaagcagctcttgctcggttgggagacggtgcaagagaatctgccccctataggggaatggtgcgcacagccctagggatcattgaagaggaaggctttctaaagctttggcaaggagtgacacccgccatttacagacacgtagtgtattctggaggtcgaatggtcacatatgaacatctccgagaggttgtgtttggcaaaagtgaagatgagcattatcccctttggaaatcagtcattggagggatgatggctggtgttattggccagtttttagccaatccaactgacctagtgaaggttcagatgcaaatggaaggaaaaagaaaactggaaggaaaaccattgcgatttcgtggtgtacatcatgcatttgcaaaaatcttagctgaaggaggaatacgagggctttgggcaggctgggtacccaatatacaaagagcagcactggtgaatatgggagatttaaccacttatgatacagtgaaacactacttggtattgaatacaccacttgaggacaatatcatgactcacggtttatcaagtttatgttctggactggtagcttctattctgggaacaccagccgatgtcatcaaaagcagaataatgaatcaaccacgagataaacaaggaaggggacttttgtataaatcatcgactgactgcttgattcaggctgttcaaggtgaaggattcatgagtctatataaaggctttttaccatcttggctgagaatggtaaagttaggtttacttcctttgttttttttctttgtacttaaattacttttaatttataagcattttcccttttctcttctggtttgaagcatggccctgccccccaaatcaaggtcctttctttcttttttaaatcttcttttatttcctttcacttctcctcagagttatcttgccttctgtggtagagtaaggtaaaataagttacatccattgacgaataagttgatagtcttgttataaagccagtaaatagattttctgtaatgtaaaatttttagtatttcatttagtcatattttaatacaatattttagaatatatatacagattttacactagagacctctcctacaaaaaaaaaaaa

SEQ ID NO: 953 - DNA, 4250 bp, Homo sapiens
  CDS (139)..(1626)
gagttgatatcttcccatccacccgccgcttctttcctccatctagcgatttttattttttaagtgtctcttcctttttctttcttttcttttttattttttatatatattttttggcattgctttgcagatgttgggatgagagtcggagccgaataccaagctcggatccctgaatttgatccaggtgctacaaagtacacagataaagacaatggagggatgcttgtatggtctccatatcacagtatcccagatgccaaattggatgaatacattgcaattgcaaaggaaaagcatggctacaatgtggaacaggcacttggcatgttgttctggcataaacataacattgagaagtcccttgctgatctccctaatttcactccctttccggatgagtggacagtggaagataaagtcctatttgaacaagcctttagttttcatggaaagagctttcacaggattcagcaaatgcttccagataagacaattgcaagccttgtaaaatattactattcttggaaaaaaactcgctctaggacaagtttgatggatcgccaggctcgtaaactagctaatagacataatcagggtgacagtgatgatgatgtagaagaaacacatccaatggatgggaatgatagtgattatgatcccaaaaaagaagccaaaaaagagggtaatactgaacaacctgtccaaactagcaagattggacttggaagaagagagtatcagagtttacaacatcgccatcattctcagcgttctaagtgccgtccacctaagggcatgtatttaacccaggaagatgtggtagcagtttcctgtagtcccaatgcagccaacaccatcctgaggcaactggacatggagttgatctctctaaaacgtcaggttcagaatgctaagcaagtaaacagtgcacttaaacagaaaatggaaggtggaattgaagaattcaaacctcctgagtcaaatcagaaaattaatgcccgttggaccacagaggagcagcttctagcagtgcaaggtgtccgcaaatatggtaaagattttcaagctattgcagatgtaattggcaacaagactgttggccaagtgaagaacttctttgtaaactacaggcgtcggtttaacttagaggaggtattgcaggagtgggaagcagaacaaggaacccaggcttctaatggtgatgcttctactttaggggaggagacaaaaagtgcttctaatgtgccatcagggaagagcactgatgaagaagaggaggcacagaccccacaggctcctcggacactgggtccatcacctcctgccccatcatccactccaacaccaacagcccctattgccactctgaaccagcctccaccacttcttcgtccaacactgcctgctgccccggctcttcaccggcagcctcctccactccagcagcaggctcggttcatccagccccggccaactttaaatcagcctccaccacctcttattcgccctgctaattccatgccaccccgtctaaacccaagaccggtgttgtccacggttggtggtcaacagccaccatcacttattggaattcagacagattcacagtcctcactgcactaaaaattaaattggacacagctgcagtaacttttcaccccatcattataccagtgctcatctgactgatgaaaaagaggaaagaataatcatttctagatactgaggctgcgaactagttctgtggcagtggactagcataagtggatgtctaagaaatttttcagttcactagactaaaatgttttacaacaaaaagcctccagttagcctcctttctagagtatatgttcagcaatgtgatctcataaaaggaaaaacaaaagatttaagtattctatataccaagtttttgttttgtttttactgtatttattttattgaggttctttatattcctgcctcttcatagtcaaggctcttagtacaggaatattgacttaggaattgtgaaaactccttaagtttcttaagttaaggatgtttggcttttttctttaattttttaaaaaccattttcctatgttaggagtgcaagaatagccagcatttccgattttgacatatgttcattttatgcatatttaagaaattatagctgcatatcccttctttcaaaaaatgttgcttttttttttaaaggaattttaatatattcctttaaaagaaagcaatttaatcaattgcaaagcaattatataaaaccacaaagaatgtactgaacctactaaccctttaacatacagtttagggtcctagcgcagagtccttgtttaaaggtcattgactcatcatctgtcagtaatgagaggattggaagaataattttgcatacaaatgaggacttaatttgttgaaaaataatctctttaagttccttgaaaatggagttggttttttttgtttctaaatgctatctgcttttaactagtagttgcctacatctggggacttcagagaagaattatattttgttagttaagtagacacagtggttatggaagcatttctttacagtaccctttacgtgtttggtttctgaacttaaaattgccctcatacttaataatatggtctgcatttaatatgaaaggtgttttattgataaatctattgtactatttggatacatttgtgtattccttgcagccaacctgtattcgtgggattggtgtagggttaaatcatcaacattatttcataaaataagaatttgttctgtgttatctaaagatgtatcagtatattgtcacagttgtgctgttaactaaaaatgctgagacccctttttatagaaaaacaaaaagacatcaagtcttcttaattcaacccataatcattaagtacttaacaaagaatattttacaagtgatagtatttcaacaatgtgtaattaatatttttgatacagtgatttcatattggaatcattatttgtgcaaagggacagacagatcacttagattgctatactagtggacataggctaaatgtttgcacattcacattcttatcacgtgtagaatacttcacaaaatagtcaacatctaaggccctaatttatgttttgaaagatcatgtgttcccaaagtattccctattgttggctccacagccttaaagtgctatagatttaaattcattgattagttttaatttttaattttagactgtgtatttccataaataccctacgtactggcatatttgaaactctttttccaggttaggtccttttctttctcattgaatcatcttaaatagttcttggccctgaatttagctgatttaaaattcttaatattcaagaatttatacttattttttccttaaaagccacaggggacagttaaatatcttaaaatatctaaaacattttttaaagcacttagattgtcttacgtatgtgcatactatacctttacagcgtttattgtcttgtctcttgtcagtagaccttcagtacacagtatgtgggatatgtcagtcaagttggtcagcaccagcatctgtccagctgttcagtatattgtgattcattaaaaaatctcttctatcccagacatgggccaaggtgctgtatctgagggatgtgctgtaatttgatttacatgcattagagcacacagtagaaaaacgttagcttcattagtaatatgacacatgtatatagtgagatgtctttattgtgtgctttgcatattttgtaaatattttgcacgtcattatttttcttttttgtttaagcagtgtttggcctggaagagtgatatgcttgctgcttaatcaaaggattaaagatttaaagatgtctatgtcttctatttttatataatttcatgttctatgaggaatttagtacctcttcactgtgaaattcgaaataatgatttttataaaagcaaaactagaaatcttttaatgacaattttcattaatttcagggttatcatttttgagaaatctacaccaaagtggttttttaaaattacataactaaaaataaaccacactgtggatacatcttataaaactaatggaaacaatgtttttctatatgatttaattctagtgtaatatggatgaggtaagagtaagttatgatcaaactttttatgttcttaataagcttgcaattgagtaaaatagaatataaaataaaggtgaaataatataaaaaaaaaaaa

SEQ ID NO: 954 - DNA, 1770 bp, Homo sapiens
  CDS (266)..(1135)
ccggaattcccgggtcgacgatttcgtcgcccgccgtggcgggcgctgcccacccggcggagccgagcggcgtgcagaggctacaagtgccgtagctggtgattgggggactttctccgggaaccgtgccgggagagcgcgcggtgctggagccgcaccgggtggccgaagcagaagactttccggaagctgctgggggatgtctgactagctctcatggagctccactaccttgctaagaagagcaaccaggcagacctctgtgatgccagggactggagttcaagagggctgcctggtgaccaggcagatacagcagccacaagagctgctctctgctgtcagaaacagtgtgcatccaccccaagagcaaccgagactggaagggtctaaacttagttcttctccagcatccccctcctcctctctgcaaaacagtactcttcagccagatgcctttccaccaggacttctccactcagggaacaaccaaataacagcggaacggaaagtctgtaactgctgcagccaggaattagaaacttcttttacctatgtggacaaaaacatcaacttggagcagcggaaccggagctcgccatcagcaaaagggcataatcaccctggggagcttggctgggaaaatccaaatgagtggtcccaagaggctgccatatctttgatatctgaagaggaggatgatacaagttcagaagccacgtcttcagggaagtctatagactatggtttcatcagcgccatcttgttcttggtcactgggatcctgctcgtgatcatctcttacatcgtcccacgggaagtgactgtggaccccaacactgtggcagcccgggagatggagcgcctggagaaggagagtgcgaggctgggggctcacctggaccgctgtgtgattgcggggctctgcctcctcacgctggggggcgtcatcctgtcctgcttgttaatgatgtccatgtggaagggggagctctatcgtcgaaacagatttgcctcttccaaagagtctgcaaaactctatggttctttcaacttcaggatgaaaaccagcacgaatgaaaacactctggaactgtccttggtagaggaagatgcgcttgctgtacagagttaattctggttgtgaatatcttgagagtctgccttggcattttataatatgaaaaaagttaatttataaaaattcacagtgcaatttatttgcctggcaagaaaagtttatttcacaaaccaacagccagtaagtgtttttgttctctatgtgtcttctatttagaagaaaagccatgtaagatgtataagaaaccacaaccagccacacctatccttctgaagagctgaaggctaattaatctgtaatggccaagaacttctacttcgatagaaaaatatttctaatgacccagtctacaaattatttcttttacacaaatatatgatgttattctttggacactaggtggtcctacacacagtaggatcaattgctaatctactttgtgaaaaagaactaagcactaatcaataataaggcttacatctaattctcaaaggtgcttatccattttcttgctaaattatccttcttgtaatttggctaaacactaaaacatggaatttttagtttgaatattttgaagtttgaggatgttgggctttccttattgtaaaaaatgttatgtttgaaattattcctgttttcaaaaatggtaattaagtcattaggataaactttctaataaaaaaaaa

SEQ ID NO: 955 - DNA, 1877 bp, Homo sapiens
  CDS (447)..(1826)
gctccggaattcccgggtcgacttcgctgtcgacgatttcgtttttctgtgccactgacaccagaaatgctatttagaagaagttatcagtaatcctgacaaaggatgcttcctgcagctcaaatcaggctggaggtgcctttatatttttcattgaattactgttttggtgactcgaatgaatcatcaattcatttatttgtcttcaaatgtctgacggcacttaaggtctaaaaaagaaggtaagtttaaacagatagtttgatgttaaggtataaattgaaagtatgtaacattttccctgtgttcattagcagctcatatcaagcacccaaaggaacaccttggatgtttttccttaggcccttaagctatttaaaagaatacctcctaggtgtggtgcggtcttttacaggaatgtgtttctgatcatctgaatcttaatcatgtccaactgcctgcaaaatttcctgaaaattacaagcactcgtcttctatgttcaagattatgccaacagttaagaagtaaaaggaagtttttcggaactgtgccaatatccagattgcataggcgagttgtcattacaggcattggcttagtgactcctcttggtgttggaactcacctggtttgggatcgtcttatcggaggagagagtggaattgtttcactggttggtgaagagtataagagtatcccttgcagtgttgctgcttatgtgccaagaggtagtgatgaaggtcagttcaatgaacaaaactttgtgtccaaatcagatatcaagtccatgtcttctcccaccatcatggccattggggctgcagaattagccatgaaggattctggctggcatcctcagtcagaagctgatcaagtggctactggtgttgcaattggcatgggaatgattcctcttgaagttgtttctgaaactgctttgaattttcagacaaaaggttacaataaagttagcccattttttgtccctaagattctggtcaatatggcagcaggccaggtcagcattcgatataaactcaagggcccaaatcatgcagtatccacagcctgtaccacaggagctcatgctgtgggagactcatttagatttatagcccatggtgatgctgatgtgatggtggctggaggtacagattcttgtattagccctttatctcttgctgggttttccagagcccgggctctgagcacaaactcagatcccaagttggcatgtcgaccatttcatccaaagagagatggttttgtaatgggagaaggtgcagctgtgctggtgctggaagaatatgaacatgctgttcaaagaagagcccggatctatgcagaagttttgggctatggactctcaggtgatgctggtcacataactgcccctgatcctgaaggagaaggtgccttaaggtgtatggctgctgctttaaaagatgcaggtgtgcagcctgaggagatatcctatatcaatgcacatgctacttccacaccattgggagatgctgctgaaaacaaagctatcaaacatctcttcaaagaccatgcatatgcccttgcagtttcctcaactaagggagcaacaggacatctgctgggagctgcaggggcagtcgaggcagcttttaccacattagcttgttattatcaaaaactaccacctactttaaacctggattgttcggaaccagaatttgatctcaactatgttccactaaaggcacaggaatggaaaactgagaaaagatttattggcctcaccaattcctttggttttggtggtactaatgcaacactttgtattgctggactgtagaacatataatttgtaattaaatactgatttttaaatgctaaaaaaaaaaaa

SEQ ID NO: 956 - DNA, 917 bp, Homo sapiens
  CDS (274)..(774)
aatttaggtgacactatagaagagctatgacgtcgcatgcacgcgtacgtaagcttggatcctctagagcggccgctgtcgttgttctgaggcccttgaccctatcctaagaacctttaactcggaactctgttggggtggagggcccctcttttcagccggtgtcttgccttccattctcccttcatcctgctcaacaccccgaagctggtgaaaacagcagagctgcccccggatcggaactacgtgctgggcgcccaccctcatgggatcatgtgtacaggcttcctctgtaatttctccaccgagagcaatggcttctcccagctcttcccggggctccggccctggttagccgtgctggctggcctcttctacctcccggtctatcgcgactacatcatgtcctttggactctgtccggtgagccgccagagcctggacttcatcctgtcccagccccagctcgggcaggccgtggtcatcatggtggggggtgcgcacgaggccctgtattcagtccccggggagcactgccttacgctccagaagcgcaaaggcttcgtgcgcctggcgctgaggcacggggcgtccctggtgcccgtgtactcctttggggagaatgacatctttagacttaaggcttttgccacaggctcctggcagcattggtgccagctcaccttcaagaagctcatgggcttctctccttgcatcttctggggccgcggtatctttgcaaccaccacctggagcctgcatccctttggatgacccatcatccctgtgaaaggccctcaccaccccttcaaataaatttcgttgcaggaagggaaggaccaattttagtgagtgtcacaccgtttggaatgacagtggtggagactctcttctctggagggctcgcgacaagcggg

SEQ ID NO: 957 - DNA, 912 bp, Homo sapiens
  CDS (59)..(850)
taccggtccggaattcccgggtcgacgatttcgtgcggcggggcggccggcggcggccatgggagatatcccagtcgtgggcctcagctcctggaaggcttctccagggaaagtgaccgaggcagtgaaagaggccattgacgcagggtaccggcacttcgactgtgcttacttttaccacaatgagagggaggttggagcagggatccgttgcaagatcaaggaaggcgctgtaagacgggaggatctgctcattgccactaagctgtggtgcacctgccataagaagtccttggtggaaacagcatgcagaaagagtctcaaggccttgaagctgaactatttggacctctacctcatacactggcccatgggtttcaagcctcctcatccagaatggatcatgagctgcagtgaactttccttctgcctctcacatcctcgagtgcaggacttgcctctggacgagagcaacatggttattcccagtgacacggacttcctggacacgtgggaggccatggaggacctggtgatcaccgggctggtgaagaacatcggggtgtcaaacttcaaccatgaacagcttgagaggcttttgaataagcctgggttgaggttcaagccactaaccaaccagattttgatccgatttcaaatccagaggaatgtgatagtgatccccggatctatcaccccaagtcacattaaagagaatatccaggtgtttgattttgaattaacacagcacgatatggataacatcctcagcctaaacaggaatctccgactggccatgttccccataactaaaaatcacaaagactatcctttccacatagaatactgaggacccagaacaacgacagcggccgctctagaggatccaagcttacgtacgcgtgcatgcga

SEQ ID NO: 958 - DNA, 3367 bp, Homo sapiens
  CDS (236)..(3310)
aagctggtacgcctgcaggtatcggtccggaattcccgggtcgacgatttcgtaccagttcctgagagggacgcgtgccgcggagccaggcttactacgtgacccggacaccaggcatacgctaggggcagtcagctgtgccttctctttcggagttgttccgtgctcccacgtgcttccccttctccactggctgggatcccccgggctcggggcgcagtaataatttttcaccatgcatcggaaaaaggtggataaccgaatccggattctcattgagaatggagtagctgagcggcaaagatctctctttgttgtagttggggatcgaggaaaagatcaggtggtaatacttcatcacatgttatccaaagcaactgtgaaggctcggccttcagtgctgtggtgttataagaaagagctggggtttagcagtcaccggaagaaaagaatgcgacagctgcagaagaaaataaagaatggaacactgaacataaagcaggacgacccctttgaactcttcatagcagccacaaacattcgctactgctactacaacgagacccacaagatcctgggcaataccttcggcatgtgtgtgctgcaggattttgaagccttaactccaaacttgctggccaggactgtagaaacagtggaaggtggtgggctagtggtcatcctcctacggaccatgaactcactcaagcaattgtacacagtgactatggatgtgcattccaggtacagaactgaggcccatcaggatgtggtgggaagatttaatgaaaggtttattctgtctctggcctcttgtaagaagtgtctcgtcattgatgaccagctcaacatcctgcccatctcctcccacgttgccaccatggaggccctgcctccccagactccggatgagagtcttggtccttctgatctggagctgagggagttgaaggagagcttgcaggacacccagcctgtgggtgtgttggtggactgctgtaagactctagaccaggccaaagctgtcttgaaatttatcgagggcatctctgaaaagaccctgaggagtactgttgcactcacagctgctcgaggacggggaaaatctgcagccctgggattggcgattgctggggcggtggcatttgggtactccaatatctttgttacctccccaagccctgataacctccatactctgtttgaatttgtatttaaaggatttgatgctctgcaatatcaggaacatctggattatgagattatccagtctctaaatcctgaatttaacaaagcagtgatcagagtgaatgtatttcgagaacacaggcagactattcagtatatacatcctgcagatgctgtgaagctgggccaggctgaactagttgtgattgatgaagctgccgccatccccctccccttggtgaagagcctacttggcccctaccttgttttcatggcatccaccatcaatggctatgagggcactggccggtcactgtccctcaagctaattcagcagctccgtcaacagagcgcccagagccaggtcagcaccactgctgagaataagaccacgacgacagccagattggcatcagcgcggacactgcatgaggtttccctccaggagtcaatccgatacgcccctggggatgcagtggagaagtggctgaatgacttgctgtgcctggattgcctcaacatcactcggatagtctcaggctgccccttgcctgaagcttgtgaactgtactatgttaatagagataccctcttttgctaccacaaggcctctgaagttttcctccaacggcttatggccctctacgtggcttctcactacaagaactctcccaatgatctccagatgctctccgatgcacctgctcaccatctcttctgccttctgcctcctgtgccccccacccagaatgcccttccagaagtgcttgctgttatccaggtgtgccttgaaggggagatttctcgccagtccatcttgaacagtctgtctcgaggcaagaaggcttcaggggacctgattccatggacagtgtcagaacagttccaagatccagactttggtggtctgtctggtggaagggtcgttcgcattgctgttcacccagattatcaagggatgggctatggcagccgtgctctgcagctgctgcagatgtactatgaaggcaggtttccttgtctggaggaaaaggtccttgagacaccacaggaaattcacaccgtaagcagcgaggctgtcagcttgttggaagaggtcatcactccccggaaggacctgcctcctttactcctcaaattgaatgagaggcctgccgaacgcctggattacctgggtgtttcctatggcttgacccccaggctcctcaagttctggaaacgagctggatttgttcctgtttatctgagacagaccccgaatgacctgaccggagagcactcgtgcatcatgctgaagacgctcactgatgaggatgaggctgaccagggaggctggcttgcagccttctggaaagatttccgacggcggttcctagccttgctctcctaccagttcagtaccttctctccttccctggctctgaacatcattcagaacaggaacatggggaagccagcccagcctgccctgagccgggaggagctggaagcactcttcctcccctatgacctgaagcggctggagatgtattcacggaatatggtggactatcacctcatcatggacatgatcccggccatctctcgcatctatttcctgaaccagctgggggacctggccctgtctgcggctcagtcggctcttctcttggggattggcctgcagcataagtctgtggaccagctggaaaaggagattgagctgccctcgggccagttgatgggacttttcaaccggatcatccgcaaagttgtgaagctatttaatgaagttcaggaaaaggccattgaggagcagatggtggcagcgaaggatgtggtcatggagcccacgatgaagaccctcagtgacgacctagatgaagcagcaaaggaatttcaggagaaacacaagaaggaagtagggaagctgaagagcatggacctctctgaatacataatccgtggggacgatgaagagtggaatgaagttttgaacaaagctgggccgaacgcctcgatcatcagcctgaaaagtgacaagaaaaggaagttagaggccaaacaagaacccaaacagagcaagaagttgaagaacagagagacaaagaacaaaaaagatatgaaactgaagcggaagaaatagtgaagagaaactcgggcatctgtgtttgatcatgggaagatactctcactaact

SEQ ID NO: 959 - DNA, 2485 bp, Homo sapiens
  CDS (31)..(2238)
taagcttgcggccgctacggtgctgacaagatggcggctggcggagctgtcgctgcggcgcccgagtgccggcttctcccctacgcgctacacaagtggagctccttttcctccacctaccttcccgagaacattttagtggacaaaccaaatgaccaatcttcaagatggtcttcagagagcaactatcctccccagtacttgattctaaagctcgaaaggcctgctatagttcagaatatcacatttggaaaatatgagaaaactcatgtttgcaatttgaagaaatttaaagtctttggtggaatgaatgaagaaaatatgacagagctgttgtccagtggcttaaagaatgattataacaaagaaacattcaccttgaagcataaaattgatgaacagatgttcccttgtcgattcattaaaatagttccactcttgtcctggggacccagctttaactttagcatctggtatgttgaacttagtggcattgatgatcctgatatagtacaaccttgtctcaactggtatagcaagtaccgtgaacaggaagctattcgcctttgcctaaaacacttcagacaacacaactatacagaagcttttgagtcactgcaaaagaaaaccaagattgcactggaacatcccatgtcaacagatattcatgacaagctggtgttgaagggtgattttgatgcttgcgaagagttgattgaaaaggctgtaaatgatggcttgttcaatcagtatatcagtcaacaggaatataagccacgatggagtcaaatcattcccaaaagtaccaaaggtgatggggaagataaccgtccaggaatgagaggaggccatcagatggttattgatgttcaaacagagactgtttatttgtttggtggctgggatggaacacaagatcttgctgacttctgggcgtacagtgtgaaggagaaccagtggacatgtatctctagagacactgaaaaagagaatggtcctagtgccagatcgtgtcataaaatgtgcattgatattcaacggaggcaaatctacacattggggcgttacttggattcctctgtgaggaacagcaaatctctgaaaagtgacttctatcgttatgacattgatacaaacacatggatgttactaagtgaggatactgctgctgatggagggccgaaattggtgtttgatcatcagatgtgtatggactcagaaaaacatatgatctacacttttggtggtagaattttgacttgtaatggcagcgtagatgacagcagagccagtgaaccacaattcagtggcttgtttgctttcaactgtcaatgtcaaacctggaaacttcttcgagaggactcctgtaatgctgggcctgaggacatccagtctcgaataggacactgcatgttattccactcaaaaaatcgttgcttatatgtatttggtggccagcgatcaaagacctatttgaatgatttctttagttatgatgtggactctgatcatgtagacataatatcagatggcaccaagaaagactctgggatggttccaatgacaggatttacacagagagcaactattgatccagaactgaatgaaatacacgtcttatctggactcagcaaagataaggaaaagagggaagaaaatgttagaaattcattctggatttatgacattgtgaggaatagttggtcttgtgtctataagaatgatcaagctgcaaaggataatccaactaaaagtcttcaggaagaagaaccatgtccaaggtttgcccatcagcttgtatacgatgagctacacaaggttcattacttatttggtgggaatccaggaaaatcttgctctccaaagatgagattagatgacttctggtcactgaagttgtgtagaccttcaaaagattatttactgaggcattgcaagtacctcataagaaaacacaggtttgaagaaaaggcccaagtggatccccttagtgctctgaaatatttacaaaatgatctttatataactgtggatcattcagacccagaagagacaaaagagtttcagctcctggcatcagctctattcaaatctggttcagattttacagctctgggcttttctgatgtggatcacacctatgctcaaagaactcagctctttgacaccttagtaaatttctttcctgacagcatgactcctcctaaaggcaacctggtagacctcatcacactgtaactgaagagtcactggacacagaaatggaaaacaggagtcgattttccgtcttttggattgcagctccactgactgacagtaaagctgcagtgattgaggactgcaccagagttctgaagggatcttaaccatcacaagtttttaccctcttccttcatgcctgacctcaaccccgctctcctcatcctattcctaaattaggctaataaagtgaaattggtatactttccagttaaaaaaaaaaaaa

SEQ ID NO: 960 - DNA, 823 bp, Homo sapiens
  CDS (300)..(695)
gtagctcccgctttcgcctcttcgtttatgactccgttgggctccggccctcctagagaggcctccatagcgcaggttcgtgggttctcgcggacctttttccgtgtagctttctgcttcttcccggcattcctgtttccgttttctcacagccctctggcttttccaccactgagacactttgcgctcaggacttcagtgacgtcatctttctgcggcgcgcggacacccgccggtggaagaagaaacagctccgccgtccttcgcttcttttgctgggctgctgctccttcggcatcatggcgccgtcgctgtggaaggggctggtgggcatcggtctctttgccctagcccacgccgccttttccgctgcgcagcatcgttcttatatgcgattaacagaaaaagaagatgaatcactgccaatagatatagttcctcagacacttctggcctttgcagttacctgttacggtatagttcatattgcaggagagtttaaagacatggatgccacttcagaactgaaaaataagacatttgatacgttaaggaatcacccatccttttatgtatttaatcatcgtggtcgagtacttttccggccttcggatacagcaaattcttcaaaccaagatgcattgtcctctaacacatcattgaagttacgaaaactcgaatcactgcgtcgttaagatttttacaaattataataataggacaggacacagagctggaatattggagtttggggtataaaacactcctccctgcccccattagtatttatattgatctttcagacctactttagtaaaaaaaa

SEQ ID NO: 961 - DNA, 1542 bp, Homo sapiens
  CDS (228)..(932)
atttggccctcgaggccaagaattcggcacgaggcagctccttcccgggcgcgcacacgcgcttcctctcttgagctcccgggcgtccggaggcgaaggtcccggagcgttcacgagaatccgggtcccggcgagtccggggtccgctcctccagctgcgcccagggcgcacgagccggccagcctcggggagagggcgcgggggcgctgggggttcttacgggaagatgaggaagcccgacagcaagatcgtgctcctgggggacatgaacgtggggaagacgtcgctgctgcagcggtatatggagcggcgcttcccggacacggtcagcacggtgggcggcgccttctacctgaagcagtggcgctcctacaacatctccatctgggacaccgcagggcgggagcagttccacggcctgggatccatgtactgccggggggcggccgccatcatcctcacctatgatgtgaatcaccggcagagcctggtggagctggaggaccggttcctgggcctgacagacacagccagcaaagactgcctcttcgccatcgtggggaacaaagtggacctcactgaggagggggccttggcgggccaggagaaggaagagtgcagtcccaatatggacgctggggaccgtgtctccccaagggcacctaagcaggtgcagctggaggatgcggtggccctttataaaaagatcctcaagtacaagatgctggatgagcaggatgtgccggccgctgagcaaatgtgctttgagaccagcgccaagaccggctacaatgtggacctcctgtttgagaccctctttgacctggtggtgccaatgatcttacagcagagagctgagaggccgtcacacacagtggatatatccagtcataagccacccaagaggaccagatctgggtgttgtgcctgactttcgagggcctcctggactcagactgtgcatgttgggaaggggtctgaccaggcaagctgtgatctgaaaggagcaaggaacagcaaggaattattttccagaatgacacccgcagcagaatgttggagtggaaatgatggctggctatgaagaggaggtcaacgtgtgtggtctcctcagtctctgtcagaggggtggggaggtgggaaacaggaatcctctgcaaagcccaatctgcagagtcgagacccctggtgctctctgccccgctgcctggcactggtcctttgcagccagccaccaacggcccccttgcccttgcagaggcagaagcctgcgtctgcacctgcacctctgaccgtttcagcaccctgggttgttaccacgtcctacaactctgacatttcttgttctcaagcgtttctcttcactgtgagttgtctttggtcctcccacttggtacttgtatcttgatgctttataatcctgactctcgacgtgttcatttatacaaaatcaggaataactttgtttttatactgattgcagcaatgttggctacatgtattattaaagaggatttttggaacaacttaaaaaaaaaaaa

SEQ ID NO: 962 - DNA, 6707 bp, Homo sapiens
  CDS (420)..(5426)
actcgcgttcggaaaatgatagggtacagaagaatttgaaaaacacttctgctgaagaacatgttgctcaaggagatgccactcttgaacattccacaaatttagactcctcaccatccttaagttcagtgactgttgtgcctctgagggaatcgtatgatccagatgtaattcctctgtttgacaaaagaactgttttggaaggtagcacagccagcacctcccctgcggatcactctgctctccctaaccaaagtctgactgttagggaatcagaagtccttaagacaagtgacagcaaagaaggtggtgaaggtttcacagtagatacaccagcaaaagcaagcatcactagcaaaagacacattccagaagctcaccaggctactttattggatggtaaacaaggaaaggtaatcatgcctcttggaagtaagttaacgggcgtgattgtggaaaatgagaatattaccaaagaaggtggcttagtggacatggccaagaaagaaaatgacttaaatgcagagcccaatttaaagcagacaattaaagcaacagtagagaatggcaagaaggatggcattgctgttgatcatgttgtaggcctgaatacagaaaaatatgctgaaactgtcaaacttaagcataaaagaagcccaggtaaagtaaaagacatatcaattgatgttgaaagaaggaatgaaaacagtgaggtagacaccagtgctggaagtggctctgcaccctctgttttacaccaaaggaacggacaaactgaggatgtggcaactgggcctaggagagcagaaaagacttctgttgccactagtactgaagggaaggacaaagatgtcaccttaagtccagtgaaggctgggcctgccacaaccacttcttcagaaacaagacaaagtgaggtggctttgccttgcaccagcattgaggcagatgaaggcctcataataggaacacattccagaaataatcctcttcatgttggtgcagaagccagtgaatgcactgtttttgctgcagctgaagaaggtggggctgttgtcacagagggatttgctgaaagtgaaaccttcctcacaagcactaaggaaggggaaagtggggagtgtgctgtggctgaatctgaggacagagcagcagacctactggctgtgcatgcagttaaaatcgaagccaatgtaaatagcgttgtgacagaggaaaaggatgatgctgtaaccagtgcaggctctgaagaaaaatgtgatggttctttaagtagagactcagaaatagttgaaggaactattacttttattagtgaagttgaaagtgatggagcagttacaagtgctggaacagagataagagcaggatctataagcagtgaagaggtggatggctcccagggaaatatgatgagaatgggtcccaaaaaagaaacagagggcactgtgacatgtacaggagcagaaggcagaagtgataactttgtgatctgctcagtaactggagcagggccccgggaggaacgcatggttacaggtgcaggtgttgtcctgggagataatgatgcaccaccaggaacaagtgccagccaagaaggagatggttctgtgaatgatggtacagaaggtgagagtgcagtcaccagcacggggataacagaagatggagaggggccagcaagttgcacaggttcagaagatagcagcgaaggctttgctataagttctgaatcggaagaaaatggagagagtgcaatggacagcacagtggccaaagaaggcactaatgtaccattagttgctgctggtccttgtgatgatgaaggcattgtgactagcacaggcgcaaaagaggaagacgaggaaggggaggatgttgtgactagtactggaagaggaaatgaaattgggcatgcttcaacttgtacagggttaggagaagaaagtgaaggggtcttgatttgtgaaagtgcagaaggggacagtcagattggtactgtggtagagcatgtggaagctgaggctggagctgccatcatgaatgcaaatgaaaataatgttgacagcatgagtggcacagagaaaggaagtaaagacacagatatctgctccagtgcaaaagggattgtagaaagcagtgtgaccagtgcagtctcaggaaaggatgaagtgacaccagttccaggaggttgtgagggtcctatgactagtgctgcatctgatcaaagtgacagtcagctcgaaaaagttgaagataccactatttccactggcctggtcgggggtagttacgatgttcttgtatctggtgaagtcccagaatgtgaagttgctcacacatcaccaagtgaaaaagaagatgaggacatcatcacctctgtagaaaatgaagagtgtgatggtctcatggcaactacagccagtggtgatattaccaaccagaatagcttagcagggggtaaaaatcaaggcaaagttttgattatttccaccagtaccacaaatgattacacccctcaggtaagcgcaattacagatgtggaaggaggtctctcagatgctctgagaactgaagaaaatatggaaggtaccagagtaaccacagaagaatttgaggcccccatgcccagtgcagtctcaggagatgacagccaactcactgccagcagaagtgaagagaaagatgagtgtgccatgatttccacaagcataggggaagaattcgaattgcctatctccagtgcaacaaccatcaagtgtgctgaaagtcttcagccggttgctgcagcagtggaagaaagggctacaggtccagtcttgataagcaccgccgactttgaggggcctatgcccagtgcgcccccagaagctgaaagtcctcttgcctcaaccagcaaggaggagaaggatgaatgtgctctcatttccactagcatagcagaagaatgtgaggcttctgtttccggtgtagttgttgaaagtgaaaatgagcgagctggcacagtcatggaagaaaaagacgggagtggcatcatctctacgagctcggtggaagactgtgagggcccagtgtccagtgctgtccctcaagaggaaggcgacccctcagtcacaccagcggaagagatgggtgacaccgccatgatttccacaagcacctctgaagggtgtgaagcagtcatgattggtgctgtcctccaggatgaagatcggctcaccatcacaagagtagaagacttgagcgatgctgccatcatctccaccagcacagcagaatgtatgccaatttccgccagcattgacagacatgaagagaatcagctgactgcagacaacccagaagggaacggtgacctgtcagccacagaagtgagcaagcacaaggtccccatgcccagcctaattgctgagaataactgtcggtgtcctgggccagtcaggggaggcaaagaaccgggtcccgtgttggcagtgagcaccgaggaggggcacaacgggccatcagtccacaagccctctgcagggcaaggccatccaagtgctgtttgtgcggaaaaagaagagaagcatggcaaggagtgccccgaaataggaccatttgcaggaagaggacagaaagagagcactttacacctcataaatgcagaagagaagaatgtattgttgaactcccttcagaaagaagataagagcccagagacagggacagcagggggcagtagcacagcaagttattcagcaggaaggggcttagaggggaatgctaactcacctgcccacctgagaggaccagaacagccgtctgggcagacggctaaggatccctctgtcagcattcgctatttggcagcagtaaacaccggtgctataaaagctgatgacatgccacctgttcaagggaccgtggctgagcattcctttcttcctgccgagcagcaggggtctgaagacaacttgaaaaccagtaccaccaaatgtattactggccaagaatcaaaaattgctccttcccacacaatgatccctccagctacttacagtgtagctctgttggctcctaaatgtgagcaggacttgactataaagaatgattatagtggcaaatggactgatcaagcatctgctgagaaaacaggagatgataacagcacaaggaaatcattccctgaggaaggagacataatggttactgtgtcttctgaagaaaatgtgtgtgacataggcaatgaagagtctccattgaatgttttgggaggattgaaactgaaagccaacttgaaaatggaggcttatgtgccttcagaggaagagaaaaatggtgaaattctggcaccaccagaaagtctgtgtgggggaaagccaagtggaatagctgaactccagagggagcctttgttggtgaatgaatcactaaatgttgaaaattcaggcttcagaacaaatgaagaaattcatagcgaatcttataacaaaggagagatatccagtggtagaaaagacaacgcagaagccataagcggtcacagtgttgaagcagatcctaaagaggttgaagaggaagaaaggcatatgcctaaaagaaaaagaaagcagcattatctctcttcagaagatgaaccagatgataatccagatgtcctggattccagaatagaaacagcacaaaggcagtgtcctgaaacggagccacatgacacaaaggaagagaactccagagatttggaagaattacctaaaaccagttctgaggcaaatagcactacctcaagggtcatggaagaaaaagatgaatatagcagcagtgaaactactggtgaaaagccagagcagaacgatgatgacaccataaaatctcaggaggaagatcagccaataattattaaaaggaaaagaggaagacctcgcaaataccctgtagaaacaacgttaaaaatgaaagacgactccaaaacagatactggcattgtcactgtagaacaatctccatctagcagcaaactgaaagtaatgcaaacagatgaatccaataaagaaacagctaacctacaagaaagaagtataagcaatgatgatggtgaagaaaaaatagtaacaagtgtgcgtcggagaggaagaaaacccaaacgttctctcactgtatcagatgatgctgaatcctcagagccagaaagaaaacgccagaaatcagtttctgatccagtggaggacaagaaagagcaggagtctgatgaggaagaggaagaagaggaagaggacgagccttcaggagccaccacaagatccaccaccagatcagaggctcagagatcaaagacacagctctccccttctatcaagcgcaagagagaagtcagccctcctggggcccgaacaagaggccagcaaagggtggaggaagcccctgtgaaaaaagcgaagcgataatcctgaccactgctgccctaggcttatggaggaacacggtggagaggaaagagacatgccttggtggccataggcttctctttaaccaggaaaaagatatgcatgtgctgtaagtccctaggtgcaagctttttcttgttatgttttaaacagctttataaactattgttcatagaagatattatgtacatttatttcagataaaggacaataagtttactttgtatctgaactcaaaacaaagtagttgtatattttaacattcaaaattgggatttcccaatgtgacacatcatgaatgcaaacccctccagcccatcagacgccaggctgcctactggtaatctgtgtatagtatataaacatgtaaaaataggttgtattttactctatgtatgatgctaatcaatgaacactttatttattttacagagaaaacttatctgtgaactttactatatatctgtttattttactttattttttttttaaataaaaagggttttaaatgctatgcagtcattagtagaaaattttttaggactctgcctgctctgtaactatcttaatatgatctggcagaaactcgcatgtatccaagtaaagtagtttagctaaagaaaggttcttcattgcttttctgttcacagttgtggctctgttttttaagaatgtaacttgtttttagattatacttgcatctgtgactttactaccagccacgttgacacaaaacaggttctggttcaggtaaagttgcgtcagtcacctgcagcagaaatccctcttcattcctcttctctgtgttcattcctcttctgtgctgttctgaagcttctaccaatactctttccatattgtctttttcagtgaagagaaatgcattcaagattaggtccctcctgtctatccagtttcaggattttatgttgttttatacacagttatttcagtatagaaactggctttattgccaagtgtttttttaaacatgttttaactctcatatgagcaaactgtccaacttcagtttttcataagattaaacttcttacgatcaaatttgtctcttgcaatgatgtgatgagttgccaaataattgagattattttaaaatgttttgttcatattcttgttttataattaaaatttacattcagtgtgtatgggtttttttttttattttgactcttaatgtaaggtggatatttctgtcattttacatggtttcttactgagattttatatataaattataaaatgtttaccaaaaaaaaaaaa

SEQ ID NO: 963 - DNA, 6848 bp, Homo sapiens
  CDS (420)..(5567)
actcgcgttcggaaaatgatagggtacagaagaatttgaaaaacacttctgctgaagaacatgttgctcaaggagatgccactcttgaacattccacaaatttagactcctcaccatccttaagttcagtgactgttgtgcctctgagggaatcgtatgatccagatgtaattcctctgtttgacaaaagaactgttttggaaggtagcacagccagcacctcccctgcggatcactctgctctccctaaccaaagtctgactgttagggaatcagaagtccttaagacaagtgacagcaaagaaggtggtgaaggtttcacagtagatacaccagcaaaagcaagcatcactagcaaaagacacattccagaagctcaccaggctactttattggatggtaaacaaggaaaggtaatcatgcctcttggaagtaagttaacgggcgtgattgtggaaaatgagaatattaccaaagaaggtggcttagtggacatggccaagaaagaaaatgacttaaatgcagagcccaatttaaagcagacaattaaagcaacagtagagaatggcaagaaggatggcattgctgttgatcatgttgtaggcctgaatacagaaaaatatgctgaaactgtcaaacttaagcataaaagaagcccaggtaaagtaaaagacatatcaattgatgttgaaagaaggaatgaaaacagtgaggtagacaccagtgctggaagtggctctgcaccctctgttttacaccaaaggaacggacaaactgaggatgtggcaactgggcctaggagagcagaaaagacttctgttgccactagtactgaagggaaggacaaagatgtcaccttaagtccagtgaaggctgggcctgccacaaccacttcttcagaaacaagacaaagtgaggtggctttgccttgcaccagcattgaggcagatgaaggcctcataataggaacacattccagaaataatcctcttcatgttggtgcagaagccagtgaatgcactgtttttgctgcagctgaagaaggtggggctgttgtcacagagggatttgctgaaagtgaaaccttcctcacaagcactaaggaaggggaaagtggggagtgtgctgtggctgaatctgaggacagagcagcagacctactggctgtgcatgcagttaaaatcgaagccaatgtaaatagcgttgtgacagaggaaaaggatgatgctgtaaccagtgcaggctctgaagaaaaatgtgatggttctttaagtagagactcagaaatagttgaaggaactattacttttattagtgaagttgaaagtgatggagcagttacaagtgctggaacagagataagagcaggatctataagcagtgaagaggtggatggctcccagggaaatatgatgagaatgggtcccaaaaaagaaacagagggcactgtgacatgtacaggagcagaaggcagaagtgataactttgtgatctgctcagtaactggagcagggccccgggaggaacgcatggttacaggtgcaggtgttgtcctgggagataatgatgcaccaccaggaacaagtgccagccaagaaggagatggttctgtgaatgatggtacagaaggtgagagtgcagtcaccagcacggggataacagaagatggagaggggccagcaagttgcacaggttcagaagatagcagcgaaggctttgctataagttctgaatcggaagaaaatggagagagtgcaatggacagcacagtggccaaagaaggcactaatgtaccattagttgctgctggtccttgtgatgatgaaggcattgtgactagcacaggcgcaaaagaggaagacgaggaaggggaggatgttgtgactagtactggaagaggaaatgaaattgggcatgcttcaacttgtacagggttaggagaagaaagtgaaggggtcttgatttgtgaaagtgcagaaggggacagtcagattggtactgtggtagagcatgtggaagctgaggctggagctgccatcatgaatgcaaatgaaaataatgttgacagcatgagtggcacagagaaaggaagtaaagacacagatatctgctccagtgcaaaagggattgtagaaagcagtgtgaccagtgcagtctcaggaaaggatgaagtgacaccagttccaggaggttgtgagggtcctatgactagtgctgcatctgatcaaagtgacagtcagctcgaaaaagttgaagataccactatttccactggcctggtcgggggtagttacgatgttcttgtatctggtgaagtcccagaatgtgaagttgctcacacatcaccaagtgaaaaagaagatgaggacatcatcacctctgtagaaaatgaagagtgtgatggtctcatggcaactacagccagtggtgatattaccaaccagaatagcttagcagggggtaaaaatcaaggcaaagttttgattatttccaccagtaccacaaatgattacacccctcaggtaagcgcaattacagatgtggaaggaggtctctcagatgctctgagaactgaagaaaatatggaaggtaccagagtaaccacagaagaatttgaggcccccatgcccagtgcagtctcaggagatgacagccaactcactgccagcagaagtgaagagaaagatgagtgtgccatgatttccacaagcataggggaagaattcgaattgcctatctccagtgcaacaaccatcaagtgtgctgaaagtcttcagccggttgctgcagcagtggaagaaagggctacaggtccagtcttgataagcaccgccgactttgaggggcctatgcccagtgcgcccccagaagctgaaagtcctcttgcctcaaccagcaaggaggagaaggatgaatgtgctctcatttccactagcatagcagaagaatgtgaggcttctgtttccggtgtagttgttgaaagtgaaaatgagcgagctggcacagtcatggaagaaaaagacgggagtggcatcatctctacgagctcggtggaagactgtgagggcccagtgtccagtgctgtccctcaagaggaaggcgacccctcagtcacaccagcggaagagatgggtgacaccgccatgatttccacaagcacctctgaagggtgtgaagcagtcatgattggtgctgtcctccaggatgaagatcggctcaccatcacaagagtagaagacttgagcgatgctgccatcatctccaccagcacagcagaatgtatgccaatttccgccagcattgacagacatgaagagaatcagctgactgcagacaacccagaagggaacggtgacctgtcagccacagaagtgagcaagcacaaggtccccatgcccagcctaattgctgagaataactgtcggtgtcctgggccagtcaggggaggcaaagaaccgggtcccgtgttggcagtgagcaccgaggaggggcacaacgggccatcagtccacaagccctctgcagggcaaggccatccaagtgctgtttgtgcggaaaaagaagagaagcatggcaaggagtgccccgaaataggaccatttgcaggaagaggacagaaagagagcactttacacctcataaatgcagaagagaagaatgtattgttgaactcccttcagaaagaagataagagcccagagacagggacagcagggggcagtagcacagcaagttattcagcaggaaggggcttagaggggaatgctaactcacctgcccacctgagaggaccagaacagccgtctgggcagacggctaaggatccctctgtcagcattcgctatttggcagcagtaaacaccggtgctataaaagctgatgacatgccacctgttcaagggaccgtggctgagcattcctttcttcctgccgagcagcaggggtctgaagacaacttgaaaaccagtaccaccaaatgtattactggccaagaatcaaaaattgctccttcccacacaatgatccctccagctacttacagtgtagctctgttggctcctaaatgtgagcaggacttgactataaagaatgattatagtggcaaatggactgatcaagcatctgctgagaaaacaggagatgataacagcacaaggaaatcattccctgaggaaggagacataatggttactgtgtcttctgaagaaaatgtgtgtgacataggcaatgaagagtctccattgaatgttttgggaggattgaaactgaaagccaacttgaaaatggaggcttatgtgccttcagaggaagagaaaaatggtgaaattctggcaccaccagaaagtctgtgtgggggaaagccaagtggaatagctgaactccagagggagcctttgttggtgaatgaatcactaaatgttgaaaattcaggcttcagaacaaatgaagaaattcatagcgaatcttataacaaaggagagatatccagtggtagaaaagacaacgcagaagccataagcggtcacagtgttgaagcagatcctaaagaggttgaagaggaagaaaggcatatgcctaaaagaaaaagaaagcagcattatctctcttcagaagatgaaccagatgataatccagatgtcctggattccagaatagaaacagcacaaaggcagtgtcctgaaacggagccacatgacacaaaggaagagaactccagagatttggaagaattacctaaaaccagttctgaggcaaatagcactacctcaagggtcatggaagaaaaagatgaatatagcagcagtgaaactactggtgaaaagccagagcagaacgatgatgacaccataaaatctcaggaggaagatcagccaataattattaaaaggaaaagaggaagacctcgcaaataccctgtagaaacaacgttaaaaatgaaagacgactccaaaacagatactggcattgtcactgtagaacaatctccatctagcagcaaactgaaagtaatgcaaacagatgaatccaataaagaaacagctaacctacaagaaagaagtataagcaatgatgatggtgaagaaaaaatagtaacaagtgtgcgtcggagaggaagaaaacccaaacgttctctcactgtatcagatgatgctgaatcctcagagccagaaagaaaacgccagaaatcagtttctgatccagtggaggacaagaaagagcaggagtctgatgaggaagaggaagaagaggaagaggacgagccttcaggagccaccacaagatccaccaccagatcagaggctcagagaaagcaacatagcaagccatctgcacgtgcaacatccaaacttggcagcccagacacagtttctcctagaaatcgccaaaaattagcaaaagagaagttacctaccagcgaaaaagttagtaactctcccccattaggaagatcaaagacacagctctccccttctatcaagcgcaagagagaagtcagccctcctggggcccgaacaagaggccagcaaagggtggaggaagcccctgtgaaaaaagcgaagcgataatcctgaccactgctgccctaggcttatggaggaacacggtggagaggaaagagacatgccttggtggccataggcttctctttaaccaggaaaaagatatgcatgtgctgtaagtccctaggtgcaagctttttcttgttatgttttaaacagctttataaactattgttcatagaagatattatgtacatttatttcagataaaggacaataagtttactttgtatctgaactcaaaacaaagtagttgtatattttaacattcaaaattgggatttcccaatgtgacacatcatgaatgcaaacccctccagcccatcagacgccaggctgcctactggtaatctgtgtatagtatataaacatgtaaaaataggttgtattttactctatgtatgatgctaatcaatgaacactttatttattttacagagaaaacttatctgtgaactttactatatatctgtttattttactttattttttttttaaataaaaagggttttaaatgctatgcagtcattagtagaaaattttttaggactctgcctgctctgtaactatcttaatatgatctggcagaaactcgcatgtatccaagtaaagtagtttagctaaagaaaggttcttcattgcttttctgttcacagttgtggctctgttttttaagaatgtaacttgtttttagattatacttgcatctgtgactttactaccagccacgttgacacaaaacaggttctggttcaggtaaagttgcgtcagtcacctgcagcagaaatccctcttcattcctcttctctgtgttcattcctcttctgtgctgttctgaagcttctaccaatactctttccatattgtctttttcagtgaagagaaatgcattcaagattaggtccctcctgtctatccagtttcaggattttatgttgttttatacacagttatttcagtatagaaactggctttattgccaagtgtttttttaaacatgttttaactctcatatgagcaaactgtccaacttcagtttttcataagattaaacttcttacgatcaaatttgtctcttgcaatgatgtgatgagttgccaaataattgagattattttaaaatgttttgttcatattcttgttttataattaaaatttacattcagtgtgtatgggtttttttttttattttgactcttaatgtaaggtggatatttctgtcattttacatggtttcttactgagattttatatataaattataaaatgtttaccaaaaaaaaaaaa

SEQ ID NO: 964 - DNA, 1393 bp, Homo sapiens
  CDS (266)..(1330)
accgctccggaattcccgggtcgacgatttcgtgctacatttccaatcacctaaacaaccgagcaagacaagccactccgacaaggttggctgcccggcgggtctctgtgagagatccaggtagatggtgaacggccccggcagctgagggcaggccaggcccccagacgcatcagaccctgaaggactgcgtggtgggagccctgcaccgctcctggccccgggccccctggatccgtcggggcgcctccacccagctgttagcatgatgtcttacctcaaacaacccccatacggcatgaacgggctgggcctggccgggcccgccatggacctcctgcacccatccgtgggctatccggccactccgcggaagcagcggcgggagcgcaccaccttcacgcgttcacagctggacgtgctcgaggcgctcttcgccaagactcgctaccctgacatcttcatgcgggaggaggtggcgctcaagatcaacctgccggagtctagagtccaggtctggttcaagaaccgccgcgccaaatgccgccagcagcagcagagcgggagcggaaccaagagccgcccagccaagaagaagtcctctccagtgcgggagagctcgggctccgaaagcagtggccaattcacgccgccagctgtgtccagctctgcctcgtcctctagctcggcgtccagctcttccgccaacccagcggctgcagcggctgcgggactaggtgggaacccggtggcggccgcgtcgtcgctgagtacaccagctgcctcatctatctggagcccggcctccatctcgccaggctcagcgcccgcgtccgtgtcggtgccggagccattggccgcgcctagcaacacctcgtgtatgcagcgctccgtagctgcaggcgccgccaccgcagcagcctcttatcccatgtcctacggccagggcggcagctacggccaaggctaccctacgccctcctcttcctactttggcggcgtggactgcagctcatacctagcgcccatgcactcacatcaccacccgcaccagctcagccccatggcaccctcctccatggcgggccaccatcatcaccacccacatgcgcaccacccgttgagccagtcctcaggccaccaccaccaccatcaccaccaccaccaccaaggctacggtggctctgggcttgccttcaactctgccgactgcttggattacaaggagcctggcgccgctgctgcttcctccgcctggaaactcaacttcaactcccccgtctgtctggactataaggaccaagcctcatggcggttccaggtcttgtgagcccaggaatgaaagaggagaagaaacgcaactacctgcgccctccgtggtcccgatcctgtt

SEQ ID NO: 965 - DNA, 2802 bp, Homo sapiens
  CDS (65)..(2425)
ccggaatatcccgggtcgacgatttcgtcctccgggtctgaggaggcttctaaaagggcctcacatgccccgggagccacgtggatacagaacgagggttcccgctctcagagagttggtccccagttcccatgcagggagtggagcctctgagcactgccagaacaacaggcagggttctcgacagcacagagcctcacgcaatgtgcaggcaggtggtgctctcgctccaccacggcacctctgcggtctctgcagccgtttgcatttcctgaaaccggatcttagtgtcagagccgcccccagccgggcgggcgcctcagtcatggccctgcgcaaggaactgctcaagtccatctggtacgcctttaccgcgctggacgtggagaagagtggcaaagtctccaagtcccagcccagggtgctgtcccacaacctgtacacggtcctgcacatcccccatgaccccgtggccctggaggaacacttccgagatgatgatgacggccctgtgtccagccagggatacatgccctacctcaacaagtacatcctggacaaggtggaggagggggcttttgttaaagagcactttgatgagctgtgctggacgctgacggccaagaagaactatcgggcagatagcaacgggaacagtatgctctccaatcaggatgccttccgcctctggtgcctcttcaacttcctgtctgaggacaagtaccctctgatcatggttcctgatgagggtgatgaagggaaccacccgagccctgaaccagtgccctctactaaacacccaaacaagacccaggatcccccagaaagtcctaaacagagtgtcccaaaaagctgctggggcaggctctgggagccagatagagcactccctggtgttggtgctggcaacaccacctgctgcagctaccaggccttccttctcctgctccaggtggaatacctgctgaaaaaggtactcagcagcatgagcttggaggtgagcttgggtgagctggaggagcttctggcccaggaggcccaggtggcccagaccaccggggggctcagcgtctggcagttcctggagctcttcaattcgggctgctgcctgcggggcgtgggccgggacaccctcagcatggccatccacgaggtctaccaggagctcatccaagatgtcctgaagcggggctacctgtggaagcgagggcacctgagaaggaactgggccgaacgctggttccagctgcagcccagctgcctctgctactttgggagtgaagagtgcaaagagaaaaggggcattatcccgctggatgcacactgctgcgtggaggtgctgccagaccgcgacggaaagcgctgcatgttctgtgtgaagacagccacccgcacgtatgagatgagcgcctcagacacgcgccagcgccaggagtggacagctgccatccagatggcgatccggctgcaggccgaggggaagacgtccctacacaaggacctgaagcagaaacggcgcgagcagcgggagcagcgggagcggcgccgggcggccaaggaagaggagctgctgcggctgcagcagctgcaggaggagaaggagcggaagctgcaggagctggagctgctgcaggaggcgcagcggcaggccgagcggctgctgcaggaggaggaggaacggcgccgcagccagcaccgcgagctgcagcaggcgctcgagggccaactgcgcgaggcggagcaggcccgggcctccatgcaggctgagatggagctgaaggaggaggaggctgcccggcagcggcagcgcatcaaggagctggaggagatgcagcagcggttgcaggaggccctgcaactagaggtgaaagctcggcgagatgaagaatctgtgcgaatcgctcagaccagactgctggaagaggaggaagagaagctgaagcagttgatgcagctgaaggaggagcaggagcgctacatcgaacgggcgcagcaggagaaggaagagctgcagcaggagatggcacagcagagccgctccctgcagcaggcccagcagcagctggaggaggtgcggcagaaccggcagagggctgacgaggatgtggaggctgcccagagaaaactgcgccaggccagcaccaacgtgaaacactggaatgtccagatgaaccggctgatgcatccaattgagcctggagataagcgtccggtcaccagcagctccttctcaggcttccagccccctctgcttgcccaccgtgactcctccctaaagcgcctgacccgctggggatcccagggcaacaggaccccctcgcccaacagcaatgagcagcagaagtccctcaatggtggggatgaggctcctgccccggcttccacccctcaggaagataaactggatccagcaccagaaaattagcctctcttagccccttgttcttcccaatgtcatatccaccaggacctggccacagctggcctgtgggtgatcccagctcttactaggagagggagctgaggtcctggtgccaggggcccaggccctccaaccataaacagtccaggatggaacctggttcacccttcataccagctccaagccccagaccatgggagctgtctgggatgttgatccttgagaacttggccctgtgctttagacccaaggacccgattcctgggctaggaaagagagaacaagcaagccggggctacctgcccccaggtggccaccaagttgtggaagcacatttctaaataaaaactgctcttagaatgaaaaaaaaaaaaaaaaaa

SEQ ID NO: 966 - DNA, 1035 bp, Homo sapiens
  CDS (160)..(507)
caagctggctagcgtttaaacttaagcttggtaccgagctcggatccactagtccagtgtggtggaattcgatggcaggacttggtctgccttggaggcagtcgtgcccaggagcagaaacccctgcagcagctgtggaacgccatcctgctggtggccatgctcctgtgcacaggcctcgtggtccaggcccagcggcaggcgtcgcggcagagccagcgggagctcggaggccaggtggacctgtttaagcgccgcgtggtgcggagactggcatccctcaagacacggcgctgccggctgagcagggcagcgcagggcctcccagatccgggtgctgagacctgtgcggtgtgcctggactacttctgcaacaaacagtggctccgggtgctgccctgtaagcacgagtttcaccgagactgtgtggacccctggctgatgctccagcagacctgcccactgtgcaaattcaacgtcctggggaaccgctactccgatgattagctgcccagctggactctgcacatggggatggacccttcctgcctgcaccccggtcctcagcctgggctcccaggacaggacaggatgggacagcaggatagacaggacagcaagcccagtgggtgggaggaaggatgagggccccaccatgtccacactgggaaggagggccccacagcttcagactgaggatctagggctgggacctgtcagtcaaggaagcgagtgtcactttgggaccttctctgcaatcctgtgacgtgagtctgccctccttacaggcagctcccaggtcaataaggaaagagaatatggggccagtgtagctgtcgccagggttctgggagctccctgtggcctgtctgggaattcctgggggctgagactacagtggccaggttttgtgcttattgattggggggtgggttgagggaagagctatctggccttggcgtaccctggcctgaccgtctttcaggatacttcttgtcaaggctgtctgcctgttgcctttggtcctcaagcact

SEQ ID NO: 967 - DNA, 826 bp, Homo sapiens
  CDS (22)..(780)
gccagctgtgctttattgacaatgcgcccctcaggccttgaccgcgtacttccgcagcgggtacagccgctccttccgctgctgcttcttggtcttcaggttctcctcgtgcttgttgagccggcggcgcatggcacgtgtcttcttaggccgcaggtccaggggcttgtacttcttgcccttgtagaatttcctgaggttttctttctgagtctggttaataactgtgagaacacgggcaatggatttccggacgactcggatcttagagagcttggaggccgcaccgcctgtcactttggcgacgcgcagctgggacagctccaccttcaggtcgtccagctgtttcagcagctcctccttcttcttccctcggagcgggcggcggcgttggcggcttgtgcagcaatggccaagatcaaggctcgagatcttcgcgggaagaagaaggaggagctgctgaaacagctggacgacctgaaggtggagctgtcccagctgcgcgtcgccaaagtgacaggcggtgcggcctccaagctctctaagatccgagtcgtccggaaatccattgcccgtgttctcacagttattaaccagactcagaaagaaaacctcaggaaattctacaagggcaagaagtacaagcccctggacctgcggcctaagaagacacgtgccatgcgccgccggctcaacaagcacgaggagaacctgaagaccaagaagcagcagcggaaggagcggctgtacccgctgcggaagtacgcggtcaaggcctgaggggcgcattgtcaataaagcacagctggctgagaaaaaaaaaaaa

SEQ ID NO: 968 - DNA, 1360 bp, Homo sapiens
  CDS (156)..(932)
cactatagggaatttggccctcgaggccaagaattcggcacgaggaagaatttgtttgtaaggtatgggaaggtcggtggcgagtgatccctcatgatgtactaccagactggctcaaggataatgacttcctcttgcatggacaccggcctcctatgccttctttacgggcctgttttaagagcattttcagaatacacacagaaacaggcaacatttggacacatctcttaggttgtgtattcttcctgtgcctggggatcttttatatgtttcgcccaaatatctcctttgtggcccctctgcaagagaaggtggtctttggattatttttcttaggagccattctctgcctttctttttcatggctcttccacacagtctactgccactcagagggggtctctcggctcttctctaaactggattactctggtattgctcttctgattatgggaagttttgttccttggctttattattctttctactgtaatccacaaccttgcttcatctacttgattgtcatctgtgtgctgggcattgcagccattatagtctcccagtgggacatgtttgccacccctcagtatcggggagtaagagcaggagtgtttttgggcctaggcctgagtggaatcattcctaccttgcactatgtcatctcggaggggttccttaaggccgccaccatagggcagataggctggttgatgctgatggccagcctctacatcacaggagctgccctgtatgctgcccggatccccgaacgctttttccctggcaaatgtgacatctggtttcactctcatcagctgtttcatatctttgtggttgctggagcttttgttcacttccatggtgtctcaaacctccaggagtttcgtttcatgatcggcgggggctgcagtgaagaggatgcactgtgatacctaccagtctccagggactatgaccctaaaccagggcctgcggcacttgcgggcctccctgctggctactgatgccagtaccagaggagccccaaaactttgacagcctcgtgggctttgtgacggcccaggggctctgcgtggtacatgactgagaagagaaaaacaaaaataaatcatacctcaaaggatggagtgcatcaattgggagaaaaggagacatagcccaaaccctggcttattcttgggatctactgattgcgggctctgcaagacccttggcaaactggcttctgatccatatcatatttatttgtagaagatggcgaaacagtttagctggtggttctttcttctccctttctctctctctatgacaataatacaaaccaatttaataaaggagttgaaagaaaaaaaaaaaa

SEQ ID NO: 969 - DNA, 1458 bp, Homo sapiens
  CDS (273)..(1151)
cgccgaccaggcctcgaacgggatggcagaggaggtgaggagggaggaagcgtccggagtggggcgggcccggactccgacccccggggcgcttcgagccccccagctggtcaccgaggcaccgccgcttcacccaggccagtagccgccccctcgcgcaccccggccccgcctcacacgcgcgcccgagcgagccccgggctcccctcgggcccagcgtggctgcagggtgtcagtggttctctcgggtctcgggacaggtgagcaccctgatgaaggccacggtcctgatgcggcagcctgggcgggtgcaggagatcgtgggcgccctccgcaagggcggcggagaccggttacaggtgatttctgattttgacatgaccttgagcaggtttgcatataatggaaagcgatgcccttcttcttacaatattctggataatagcaagatcatcagtgaggagtgtcggaaagagctcacagcgctccttcaccactattacccaattgagatcgacccacaccggaccgtcaaggagaagctacctcatatggtggaatggtggaccaaagcgcacaatctcctatgtcagcagaagattcagaagtttcagatagcccaggtggttagagagtccaatgcaatgctcagggagggatataagaccttcttcaacacactctaccataacaacattccccttttcatcttttctgcgggcattggtgatatcctggaagaaattatccgacagatgaaagtgttccaccccaacatccacatcgtgtctaactacatggattttaatgaagatggttttctccagggatttaagggccagctgatacacacatacaacaagaacagctctgcgtgtgagaactctggttacttccagcaacttgagggcaaaaccaatgtcatcctgctgggagactctatcggggacctcaccatggccgatggggttcctggtgtgcagaacattctcaaaattggcttcctgaatgacaaggtggaggagcggcgggagcgctacatggactcctatgacatcgtgctggagaaggacgagactctggatgtggtcaacgggctactgcagcacatcctgtgccagggggtccagctggagatgcaaggcccctgaaggcgcaggctccagcccggcctgcaggccgtggtgaggaggggcgcctccccagagtctgctcccccgtgaacacagagcagaggccagggtggccagcagtggctgggtccttccgcgcccctccgtcctcctttccctgagcaccttcatcaccagaggcttgaaggaaccccgccatgtggcagggcacaggcactgttcctggtgaaccttggaccacagcatgtcagtgctctagggattgtctactccagggattttcttcaaaatttttaaacatgggaagttcaaacaaaaaaaaaaa

SEQ ID NO: 970 - DNA, 644 bp, Homo sapiens
  CDS (39)..(500)
gggtcgacccacgcgtccgcaatgctgctctggggaacatggaggaggacaactggaggtggcatttctacgacaccgtgaagggctccgactggctgggggaccaggatgccatccactacatgacggagcaggcccccgccgccgtggtcgagctagaaaattatggcatgccgtttagcagaactgaagatgggaagatttatcagcgtgcatttggtggacagagcctcaagtttggaaagggcgggcaggcccatcggtgctgctgtgtggctgatcggactggccactcgctattgcacaccttatatggaaggtctctgcgatatgataccagctattttgtggagtattttgccttggatctcctgatggagaatggggagtgccgtggtgtcatcgcactgtgcatagaagtcgacgcggccgcgaattcggatcctcgagagatctctttttttgggtttggtggggtatcttcatcatcgaatagatagttgtatacatcagccgtccaaacttagtaatcgtccacataatcgtgagatgcacgtgatctcactatatgacagtgatcttgataacgcacacatcagtggattgcatatataattagtagcgtctcatgctttacagatgca

SEQ ID NO: 971 - DNA, 5553 bp, Homo sapiens
  CDS (241)..(3717)
aaagcacctgcagctcccaaagtacctgtgacccccagagtctccagagctcccaaaacacctgcagctcagaaggtgcccacggatgcagggccaaccttggatgtagccagacttctgagtgaggtccagcctacatcaagggctagtgtctccttactgaagggccaggggcaggctggaaggcagggtccccagtccagtggcaccttggccctcagcagtaagcaccagtttcagatggaggggctcctgggggcttgggagggggccccaaggcagccacctcgccacctgcaagcgaacagcacagtgaccagcttccagaggtaccacgaggccctgaatacacccttcgagctgaacctgtcaggggaacctggaaaccaggggttgcggcgagtggtcatcgatggcagcagtgtggccatggtgcatggcctgcagcacttcttctcctgccgaggaattgccatggcagtgcagtttttctggaaccggggacaccgagaggtcactgtgtttgtacccacctggcagctgaagaagaaccggagggtgagagagagccactttctgacgaagctacactcgctcaagatgctttcaatcacaccctcccagcttgagaatggcaagaagatcaccacctacgattataggttcatggtaaagctggcagaggagacagatggcatcattgtcaccaatgagcagattcacatcctgatgaatagttccaagaaactgatggtcaaagatcgcttgctgcctttcacctttgcggggaatctcttcatggtgcctgatgaccccctgggccgtgatggccccaccttggatgagtttctgaagaagccaaacaggttggacactgacattggcaacttcctgaaggtgtggaagacccttcctcccagctcagccagtgtcactgagctgagtgatgacgctgactctgggcccctggagagtctgccgaatatggaagaagtcagggaagagaaggaggagaggcaggatgaggagcagagacaggggcagggcacacagaaggcggctgaggaggacgaccttgactcttcgctggcgtcagtgttcagggtggagtgcccgtccctttcggaggagatcctgcggtgcctcagcctccatgatccccctgatggggccctggacatcgacctcctgccaggggcagcttctccctacctgggcatcccctgggatggaaaggctccctgccagcaggttcttgcccacctggcccagctcaccatccccagcaacttcaccgcactctccttcttcatgggcttcatggactcccacagggatgccatccctgactatgaagccctagtgggccccctgcacagcctcctcaagcagaagcctgactggcagtgggaccaggagcatgaggaggccttcctggccctgaagcgagccctggtgtctgccctctgcctgatggcccccaactcccagctgcccttccgcctggaggtgaccgtgagccacgtggccctgacggccatcctccatcaggagcactcagggaggaagcaccccatagcctatacctcaaaacccctcctccctgatgaggagagccagggcccccagtcagggggtgacagcccctatgctgtggcctgggccctcaagcatttttcccgctgcattggagacaccccggtggtcctggacctttcctatgcctcccggaccactgcggaccctgaggtgcgggagggccgcagggtttccaaagcttggttgatccgatggtccctcttggttcaggacaaaggcaagagggccctggaattggccctcctccagggcctgctgggggagaaccgcctgctcacccccgcggcctccatgcctcgcttcttccaggttctgccgcctttctctgacctgtccacgttcgtctgcatccacatgtcgggctactgcttctaccgtgaggatgagtggtgtgctggctttggtctctatgttctatcgcccaccagcccccctgtctccctttccttctcctgctccccttacacgccaacctatgcccacctggcagccgtggcctgcggcctggagcgctttggccagtccccactcccagtggttttcctcactcactgcaactggatcttcagcctcctgtgggagctcctgcccctctggagggctcggggcttcctctcctctgatggggctccactccctcacccaagcctgctctcctacattatatccctcacctctggcctctcatcccttccgtttatctaccgaacctcctaccggggctctctgtttgctgtgacagtggacaccctggccaagcagggtgcccaggggggtgggcagtggtggagtttgccaaaggatgtgccagcccctacagtgagtccccatgccatgggcaagaggcccaatttgctggcattacagctgagtgacagcaccctggccgacatcattgccaggctgcaggctgggcagaaactgtctggctcctcaccgtttagttctgcctttaactcactcagcctcgacaaggagagtggcctgcttatgttcaagggagataagaagcccagggtctgggtagtcccgacgcaactccggagggatctgattttctctgtgcatgacattcccttgggggcccaccagaggcccgaagagacctacaagaagttgcgtttgctggggtggtggcctgggatgcaggagcatgtgaaagattactgcaggagctgcttgttctgcatcccccgaaatctcataggcagcgagttgaaggttattgagtccccatggcccctcaggtcgaccgccccctggtcgaacctgcagatcgaggtggtgggcccggtcaccataagtgaggagggccataagcatgtacttattgtggctgacccaaacaccaggtgggtggaggcattccccctgaagccctacacacacacggctgtggcccaggtgctgcttcagcatgtgtttgcaaggtggggtgttcctgtgaggctggaggcagcccaggggccccagtttgcccggcacgtccttgtgagctgtgggctggccctgggagcccaggtggcctccctgagtcgggacctccagttcccctgcctgacgagctcaggggcctactgggaattcaagagggccctcaaggagttcatcttcctgcatgggaagaagtgggcggcctccctgcctttgctgcacctggccttcagggcctcctccactgatgccacaccgttcaaggtcctgaccgggggtgagtcaaggctcacggagcccctgtggtgggagatgagcagcgcaaacattgaagggctcaagatggacgtcttcctgctacagctggtgggggagctgctggagctccactggagggtggctgacaaggcgagtgaaaaggccgagaacaggcgtttcaagcgggagagccaggagaaggagtggaatgtgggtgaccaggtccttttgctgtccctccccaggaatggcagcagtgccaaatgggtgggtcccttctatatcggggaccggctgagcctgtcactctataggatatggggcttcccaaccccagagaagctggggtgcatctatcccagcagtctgatgaaggcctttgccaagagtggcaccccgctgtccttcaaggtcttggagcagtgagcgggagcagcgggggtgccccctgccccagggccgtgggtttctgctgctaggcctccccctgtcccagcagtgctctcagtccactgggggccctcagttgtgccttttgtagagaacttgcttcataaagctttgctgaattgccttgaactagggaccagcatccccatggaaacatccccagtttggggtacttggagaatttgccaaaggctgtcagatatgggtccctggcagttttacactgggaaatagagtgctcctctaggctataccaggctcagtgtcttctccccaagtatcctctttccccttcacatgtaggtgtgtggtggtgtgcacacacactcacgaaagaatctatcttggccatgaaactgtggctgttgaccttggaattggaaccacagtcctttcccatacagaaaccccaaatgtgggctcctccctccaacctgttcttttggggaccctttgcccttagagctgtcacagatgacataagcctgggcaggctgtggggaggccgctgcctcctagcctcacggtcagctttctcaagccaggtgtggcctgcacagctgtcagggcagggctggccatcctcccaggcctcaagggcagtgtcttggagtgggaggatggccagccacaagccaccagcttgtcagcatgggaagggcaagggggaaatgggttggcctacctcatttgactccagccaatggagacaattcctgacccctgctttgatggtgttgaccccacaggaatcaaggatcttgatgccaagtgtggcatctctacctgaagagctgcttctgttagacccaggggccccggcctctgttttaagggggcagggcgtctgcaacaggagtggcacacggtgaagtgctggcatggctctacctcccaacccctcccaaccccatcccaaagcctacagtcctctgctccttctacctccactgtatcctgcatcccagaccctacagattgtgtgattgcttcatctgtatcaccccccgagtcctgtggacctgccttctgtgtagagcaaaacccaggctccctcacagccattctttgcagagatcacccttgcagtgagtgtgagttccttccaggtgtgtgcgcgtacactcaccctctgaattgctgccgctgccaaggaagtgggctccaggtgaaggccagtgccacgtcactctggctggccttcttagtagtttcatttctccggaagctgagccagtctcctggtctagcccaggttgccagaacgcttggcattgcagagtgctagagccagtggagaacttgccaacttgattgttttacagcagaggaaagaggatcacagagggaaagtgattcacccaaagtcacacagcaagttcatggctgagctgagaccaggattaagcttcctgactcccagttcaccatgaaaagggttctggcaacaggttcaagctggagaatccttcaaaatgctacacccacattctctccaactcttcatctccctgatcttccagacaaactacctggatgttgcccttaaaccatttctagctgttaaccctatccagaaaaatgattgagtgatagctgagaagtggaaagtgtgggatttttggcaggtgctctctttcctccgccccccgcgccatcctttctcttcctcctctctgtaatggtatgtccagcctcactctccctccctggtgctgtatgcgttccccctgttagctacatttgtgatcacatacccttcttttaagtgaatttttttcatttgatttgtcaataaacgaatcaaactgg

SEQ ID NO: 972 - DNA, 1881 bp, Homo sapiens
  CDS (1)..(1824)
atgggaagtgtcacagttcggtatttctgttatgggtgcctttttacatctgcgacctggacagttttgctttttgtttatttcaacttcagtgaagtgactcagccacttaagaatgtgcccgtcaaggggtctgggccccacggaccatctccaaaaaaattctatccccgtttcactcgaggcccaagtcgagtgctcgagccacagttcaaagcaaacaaaattgacgatgtgatagacagtcgtgttgaagatccagaagaaggccacttgaaattctcttctgaattaggtatgatttttaatgaacgcgatcaagagttgagagacttgggctatcagaaacatgcttttaatatgcttatcagtgaccgcttgggctaccacagagatgtgccagacacaaggaatgcagcgtgtaaagaaaagttctacccacctgacctgccagctgctagtgttgttatctgtttctataatgaagcgttttctgccttgcttcggacagtgcacagtgtcatagaccgcacgccagcacacctgcttcatgagatcatccttgtggatgatgatagtgactttgatgatttgaaaggagaactagatgaatatgtccaaaaatacctccctggaaaaattaaagtcataagaaatacaaagcgtgaggggttgattcgagggagaatgattggcgcggcccacgcgacaggagaagtccttgtgttcctggacagccactgtgaagtgaatgtgatgtggctgcagcccttgctggccgccatccgtgaggaccggcacaccgtggtgtgcccagtgattgacatcatcagcgccgacacgctggcctacagctcgtcccctgtcgtccgcggagggttcaactggggactgcacttcaaatgggatcttgtccccctttctgagctaggacgagcggagggagccactgcaccaataaagtcaccaacaatggctggaggtttgtttgccatgaacagacagtatttccatgaacttggacagtatgatagtggcatggatatctggggaggagaaaatttggaaatatcatttcggatctggatgtgtggcggtaagctcttcatcatcccttgctctagagtaggacacattttccgaaaaaggcgaccatatggatctcccgaaggccaggacaccatgacacacaactctttgcggctggcacatgtctggttggatgaatacaaggagcagtatttttccttaagacctgacctgaagacgaaaagctatggcaatatcagtgagcgtgtggaactgagaaagaagttgggctgtaaatcatttaaatggtatttggataatgtatacccagagatgcagatatctgggtcccacgccaaaccccaacaacccatttttgtcaatagagggccaaaacgacccaaagtccttcaacgtggaaggctctatcacctccagaccaacaaatgcctggtggcccagggccgcccaagtcagaagggaggtctcgtggtgcttaaggcctgtgactacagtgacccaaatcagatctggatctataatgaagagcatgaattggttttaaatagtctcctttgtctagatatgtcagagactcgctcatcagacccgccacggctcatgaaatgccacgggtcaggaggatcccagcagtggacctttgggaaaaacaatcggctataccaggtgtcggttggacagtgcctgagagcagtggatcccctgggtcagaagggctctgtcgccatggcgatctgcgatggctcctcttcacagcagtggcatttggaaggttaaggtggatgctgtggcgggaacgttgcttcatcaggcgttgcctccggtgtggag

SEQ ID NO: 973 - DNA, 5814 bp, Homo sapiens
  CDS (24)..(2924)
aggtcttaaaatggaaatatgaaatgtttttgaactttggtcagtgtgggccccctgcaagtctttgtcagtccatctcaagacctgtgcctgtcagatttcacaattatggagattattttaatgtttttttccctttgatggtattgaatacttttgaaacagtggcacaagaatggctcaactctccaaatagagagaatttctatcagttgcaagtacgaaaatttcctgccgattatataaaatactgggagtttgcagtttatctggaagaatgtgaactggctaaacagctttatccaaaggaaaacgatttggtgtttttagctcctgagagaataaatgaagagaagaaagatacagagagaaatgacatacaagatctccacgaatatcattctggttatgttcataaatttcgccgcacgtcagtcatgcgtaatgggaaaactgagtgttacctttccatccagactcaagagaactttccggccaatttaaacgaacttgtgaattgtattgtaatcagttctctggtaactacacaaaggaagttgaaagccatgtctctgttgggtagtcggaaccaactggctagagctgttctgaatccaaaccctatggacttctgtacaaaagatttactgactacaacatctgagagaattattgcgtacttaagagatttcaatgaagatcaaaagaaagcaatagaaactgcatatgctatggtgaaacactcaccatcagttgccaaaatctgcttgattcatggaccacctggaacaggaaaatcaaaaactattgttggcctcctctatcgtctactgacagagaaccagaggaaggggcattcagacgaaaactccaatgccaaaatcaaacaaaaccgtgtcctcgtgtgtgcaccttccaatgcagctgttgatgaactcatgaaaaaaattatccttgaattcaaagaaaaatgtaaagacaagaagaatcctttaggaaactgtggagatataaatttagtacgactgggtccagaaaagtctattaatagtgaggttctaaagttcagtttggacagccaagtaaaccacagaatgaaaaaagagttaccttctcatgttcaggcgatgcataaaagaaaggaatttctagattatcagctggatgagctttcccggcagcgagctctatgccgaggtggacgggaaatacagaggcaagaattagatgaaaacatttccaaagtttctaaggaaaggcaggaacttgcttctaaaattaaagaggttcaaggacgcccacagaaaacacagagtatcatcatcttagagtcccatatcatctgctgcacgttgagcacaagtggtggtttactacttgagtctgctttccgtgggcaagggggtgtccccttcagctgtgtcattgttgatgaggctggacagtcttgtgaaattgagactcttactccactcatccatcgctgcaataagctcatcctagtaggagatcctaagcagctccctccgacagtcatctctatgaaagcacaggagtatggctacgaccagtcaatgatggctcgcttctgcagactgctggaagagaatgtagaacacaacatgatcagcaggctgcccattctacagctcactgttcagtacaggatgcatccagacatatgcctcttcccttctaattatgtttataacagaaacttaaaaacaaatagacagacagaagccattcgatgttcatcagattggccatttcagccataccttgtgtttgatgttggagatggttcagaaagacgggataatgactcatatataaatgttcaagaaataaaactggtgatggaaataattaagcttattaaagacaaaagaaaggatgttagttttcgaaacattggcataataactcattacaaggcccagaagacgatgattcagaaggatttggacaaagagttcgatagaaaaggaccagcagaagtagacactgtggatgcattccagggtcggcagaaggattgtgttattgttacgtgtgtcagagcaaatagcatccaaggttcaattggattcctggcaagtttgcagagattgaatgtcaccatcacacgagccaagtacagcctcttcatcctcggacatttgaggaccctgatggaaaaccagcattggaatcagctgattcaggatgctcagaagcgtggtgccattattaagacctgtgacaaaaactatagacatgatgcagtgaagattctgaaactcaagcctgtgctgcagagaagtctcactcaccctcctaccatagccccagaggggtccagaccccagggtggtttgcccagcagcaagctagacagtggatttgccaagacatctgttgctgcttctctataccacacaccctctgactccaaggaaattactcttactgttacttcaaaggaccctgaaagacctcctgttcatgaccaacttcaggacccacgactgctgaagaggatgggcattgaggtcaaaggaggaatattcctttgggatccacaaccctcgagcccccagcatcctggagcaacacctcctacgggcgagccgggcttccctgtcgttcaccaggacctgagccatatacagcagcccgctgctgtagtggctgctctgagcagccacaaacctcccgtgcggggcgaacctccagctgccagtcccgaggcttccacgtgtcagagcaaatgtgatgacccggaagaggagctctgtcacaggagagaggccagggctttcagtgaaggggagcaggagaagtgtggttccgagacccatcacaccaggaggaactctaggtgggacaagaggacactggagcaggaggacagcagttccaagaaaagaaagcttttataggaaagcccagtgacatgggccagcagccacagcatattgtaaactgaagatgaccagctcgtgggaccatctagataagcttgttttttgtaaggagtttgtgtgctgttggaaaacatggaaaatgcatccttaacacctgagcctctggtcatcttcagtattttctgtcatttgcaaaagctttcagagggcattgtgtatccgtaataatgtccttgaagtcagagactggaaatgttgatctcttagtcttctatagacaaggaggtcagactggagtgaatgttgtaaaagttgaaatgtatatttgtatagcaaataacaaaatccttttaaaatttaatctagtagaccgcttttctttccccctgtttaaaatgttaatcagttttcaacagaacaaactttatattaccaaaaaaaaaaaagatgggaggagggcgggtcctttcaaccattgttagagcaagacagataattatttaacagcctagcttggaataagctgagttagtgctggtgggtcaggtgtctctggctctattaaaaaaagcaaaaacccccccaaaaacctggagtctcctaggggacactttgggcagcacggttatgttaggtaaagtcttgctgacatggtgcatttttagatagagtgcattggcccagggtattatatttctgtgatgagttcatttacctgtttcagtatgcacatagttccctagctaaaattcctaatcttcttgagagagaagaatatggagtgaaagaataattcttgagctatcattcaaatgctcccagcatattgtgagccttgtgtgactggtgaggtacagacatttggttgccaaatgctagattagcgctgggtcagctgtggaagaatcgcctcagcttacagattgtcagacagatctaactagttttccagaaagcctgggaagctgtgtgttcaacatttcccaagggattctgatcaccaggcagcttgggaaccactggggcaggccaaatagaatattttgggcgggaaagaagcacccgatttaaaatgaagcgtaaccagaggagttcagaactgggaagagagtggtagacttcctgtgatcttcagaaatcatctacctggtaaaaatacatgctgtttagaatatctgataggtgtttccagctactattagaggtgatagtgcttttgtgggggaaaaaattggtcatggtgaatggagatcgaggaagctcgggacaagggaggggtgggctgcctgattttgtccagttttccaaatatccacgcagtgaactggagtatcctaaacatgagaatgtacagttgacagttgtaaaaactagggatctgtaatgaatgctgtgcagccccatatctcatttgggggtaggaaaatagctgaagattcatgtgcattatttgacatttcctttgtcatctgctttttaagcaaaaaagggttttgtgttagaaattctacttgagcagattataaagagctttaaaaaacaactttcggttgccaaaagtttgagcatttgatttcattacctgtgtctccctcactggtgtccagacggtcaactgaatactcctgaaacccagggagcaggtgacttcctggagtgctttgtccccagagtcagccactgcttcctctgtgggggtggagagtttgtctttggccatgcagtgtgcgacagttcaggacgggtagggatgggtcccattctgtctgggtcaagggctctatcagcttcttccatgtgcctttgggaagaaatctcgttactttaagtttgctttcctgttatcttgatgaagtgcccattttagcagacacttgtagtgctgaccacttagggaatgtacaaactcctaagcttctaaagggagggcatgggcaaaaacgttggggtcaggatgtctctcacgctgctcatgttaatactattaacacatgatttgagaaataagttttctctaaaatgcatattttgccgccacacactgaacaatattatttccagtgaagtttgatgcctgttcttacgttgtgttcacctgttggttcaccactcagcagatctgattctgcaagaattaatggtagaactagatcatcctttctaacagacgagcctgtgtcctgtgacggcctttcacagcggaatgcagttgtacctcacattacttttgaaacttcactcgttccagttggtacaagtatttgccaaagccatttcctatgttcaccgtggcccctcctgatgtggctgtcagcgcagcgttgttgaacagggctattctttttacaaggtgtgaagtgtggctcttcgcttcgtctttgccatggcattaaaagaaagttccctgtcttctttcaatattagttatttcaaatgaatatgtgctacttaaaagcttgttttgtttctttgtatataatttgccttggatttattgtgcacagtttgttgagttgtatgtttttgtgaattatcaggagtaaatttgacaagtacatgtgaataacctcctgtaaatgaattttataacaaaaatgtactgaactattttttaaagttgtgcagattagcaattttttgctatagctttgacttttctatgctgtgaattaatagctgcgatttggcaaacagccctgttgtctttgttaaaccctaaattttaagaggaaatggcagaattaaaagcagaaacaagaagatggacatggattagaggttatgtattatgaagtaaactacaaggtactaacatcatttcgtctgccatttggtttgctttatgctgaaattacttggtggggatttgtgcaattcagatataaaaagtttcattatccaaaaa

SEQ ID NO: 974 - DNA, 1960 bp, Homo sapiens
  CDS (1115)..(1882)
aaactggctaagttggttgctttttggggattagtcaaagagaccaaatcccatatcctcgtccgactcctccgactcttccttggcttcaaccttagctggggctgcagcagcagcaggagcagctgtggtggcagcagccacaggggcagcagccacaaaggcagatggatcagccaagaaggccttgaccttttcagcaagtgggaaggtgtaatccgtctccacagacaaggccaggactcgtttgtacccgttgatgatagaatggggtactgatgcaacagttgggtagccaatctgcagacagacactggcaacattgcggacaccctccaggaagcgagaatgcagagtttcctctgtgatatcaagcacttcagggttgtagatgctgccattgtcgaacacctgctggatgaccagcccaaaggagaagggggagatgttgagcatgttcagcagcgtggcttcgctggctcccactttgtctccagtcttgatcagctgcacatcactcaggatttcaatggtgcccctggagattttagtggtgatacctaaagcctggaaaaaggaggtcttctcgggcccgagaccagtgttctgggctggcacagtgacttcacatggggcaatggcaccagcacgggcagcagctggcaccttattggccagcaacatgtccctgatctcagtgaggtcctccttggtgaacacaaagcccacattcccccggatatgaggcagcagtttctccagagctgggttgttttccaggtgccctcggatggccttgcgcatcatggtgttcttgcccatcagcaccacagccttcccgcgaagggacatgcggatctgctgcatctgcttggagcccacattgtctgctcccacaatgaaacatttcggataatcatccaatagttggatgatcttaaggaagtagttggacttccaggtcgccctgtcttccctgggcatcacggcggtgcgtcagggattgccacgcagggtttaaagacgatgtcacccacgcgtccgcccacgcgtccgctcgtggaagtgacatcgtctttaaaccctgcgtggcaatccctgacgcaccgccgtgatgcccagggaagacagggcgacctggaagtccaactacttccttaagatcatccaactattggatgattatccgaaatgtttcattgtgggagcagacaatgtgggctccaagcagatgcagcagatccgcatgtcccttcgcgggaaggctgtggtgctgatgggcaagaacaccatgatgcgcaaggccatccgagggcacctggaaaacaacccagctctggagaaactgctgcctcatatccgggggaatgtgggctttgtgttcaccaaggaggacctcactgagatcagggacatgttgctggccaataaggtgccagctgctgcccgtgctggtgccattgccccatgtgaagtcactgtgccagcccagaacactggtctcgggcccgagaagacctcctttttccaggctttaggtatcaccactaaaatctccaggggcaccattgaaatcctgggtgtccgcaatgttgccagtgtctgtctgcagattggctacccaactgttgcatcagtaccccattctatcatcaacgggtacaaacgagtcctggccttgtctgtggagacggattacaccttcccacttgctgaaaaggtcaaggccttcttggctgatccatctgcctttgtggctgctgcccctgtggctgctgccaccacagctgctcctgctgctgctgcagccccagctaaggttgaagccaaggaagagtcggaggagtcggacgaggatatgggatttggtctctttgactaatcaccaaaaagcaaccaacttagccagttttatttgcaaaacaaggaaataaaggcttacttctttaaaaaaaaaaaa

SEQ ID NO: 975 - DNA, 1313 bp, Homo sapiens
  CDS (547)..(1239)
tagatgtgttaccagagacgagccgcaaaacatttctcagtcttagtctcttgtaaaatagaggtaataagaaacacttttcagtattttgtgacatgtagaagtaagtgatggtggcatgcatcacacttggttaatagtaggtcctgttgttaagtctctaatggcgataccctatggcttctccaaatggtgaccttgccaaattgttttccaaagcgacatgtggcttttttctcccaatccctcattttaactctcatggtaatttaacttttatatttttattagatgcatttagtaacttgcctcatagtcattttcttggaaattcaatttcttctccacagggtctcttttgagattaaagagagagaagtggcaaatttaggatgttagaataattttcatttaaaagtagatccttgtttttattaccctatcattaatgttttctgttttcctttatcagcgagttactgctcatttgattcatattgccaaactgaactctcttgttttcttgcaagatgaaaggagacaaccatgaatgagccactagactatttagcaaatgcttctgatttccccgattatgcagctgcttttggaaattgcactgatgaaaacatcccactcaagatgcactacctccctgttatttatggcattatcttcctcgtgggatttccaggcaatgcagtagtgatatccacttacattttcaaaatgagaccttggaagagcagcaccatcattatgctgaacctggcctgcacagatctgctgtatctgaccagcctccccttcctgattcactactatgccagtggcgaaaactggatctttggagatttcatgtgtaagtttatccgcttcagcttccatttcaacctgtatagcagcatcctcttcctcacctgtttcagcatcttccgctactgtgtgatcattcacccaatgagctgcttttccattcacaaaactcgatgtgcagttgtagcctgtgctgtggtgtggatcatttcactggtagctgtcattccgatgaccttcttgatcacatcaaccaacaggaccaacagatcagcctgtctcgacctcaccagttcggatgaactcaatactattaagtggtacaacctaattttgactgcaactactttgcctccccttggtgatagtgacactttgctataccacgattatccacactctgacccatggactgcaaactgacagctgccttaagcagaaagcacgaaggctaaccattctgctactcccggacgcgtgggtcgacacgggaatgt

SEQ ID NO: 976 - DNA, 2751 bp, Homo sapiens
  CDS (58)..(1482)
ggcttcggggtgggcgcccagggtagggcaggtggccgccgcgtggaggcagggagaatgcgactctccaaaaccctcgtcgacatggacatggccgactacagtgctgcactggacccagcctacaccaccctggaatttgagaatgtgcaggtgttgacgatgggcaatgacacgtccccatcagaaggcaccaacctcaacgcgcccaacagcctgggtgtcagcgccctgtgtgccatctgcggggaccgggccacgggcaaacactacggtgcctcgagctgtgacggctgcaagggcttcttccggaggagcgtgcggaagaaccacatgtactcctgcagatttagccggcagtgcgtggtggacaaagacaagaggaaccagtgccgctactgcaggctcaagaaatgcttccgggctggcatgaagaaggaagccgtccagaatgagcgggaccggatcagcactcgaaggtcaagctatgaggacagcagcctgccctccatcaatgcgctcctgcaggcggaggtcctgtcccgacagatcacctcccccgtctccgggatcaacggcgacattcgggcgaagaagattgccagcatcgcagatgtgtgtgagtccatgaaggagcagctgctggttctcgttgagtgggccaagtacatcccagctttctgcgagctccccctggacgaccaggtggccctgctcagagcccatgctggcgagcacctgctgctcggagccaccaagagatccatggtgttcaaggacgtgctgctcctaggcaatgactacattgtccctcggcactgcccggagctggcggagatgagccgggtgtccatacgcatccttgacgagctggtgctgcccttccaggagctgcacatcgatgacaatgagtatgcctacctcaaagccatcatcttctttgacccagatgccaaggggctgagcgatccagggaagatcaagcggctgcgttcccaggtgcaggtgagcttggaggactacatcaacgaccgccagtatgactcgcgtggccgctttggagagctgctgctgctgctgcccaccttgcagagcatcacctggcagatgatcgagcagatccagttcatcaagctcttcggcatggccaagattgacaacctgttgcaggagatgctgctgggagggtcccccagcgatgcaccccatgcccaccaccccctgcaccctcacctgatgcaggaacatatgggaaccaacgtcatcgttgccaacacaatgcccactcacctcagcaacggacagatgtgtgagtggccccgacccaggggacaggcagccacccctgagaccccacagccctcaccgccaggtggctcagggtctgagccctataagctcctgccgggagccgtcgccacaatcgtcaagcccctctctgccatcccccagccgaccatcaccaagcaggaagttatctagcaagccgctggggcttgggggctccactggctccccccagccccctaagagagcacctggtgatcacgtggtcacggcaaaggaagacgtgatgccaggaccagtcccagagcaggaatgggaaggatgaagggcccgagaacatggcctaagggccacatcccactgccacccttgacgccctgctctggataacaagactttgacttggggagacctctactgccttggacaacttatctcatgttgaagccactgccttcaccttcaccttcatccatgtccaacccccgacttcatcccaatggacagccgcctggagatgacttgaggccttacttaaacccagctcccttcttccctagcctggtgcttctcctctcctagcccctgtcatggtgtccagacagagccctgtgaggctgggtccaattgtggcacttggggcaccttgctcctccttctgctgctgcccccacctctgctgcctccctctgctgtcaccttgctcagccatcccgtcttctccaacaccacctctccagaggccaaggaggccttggaaacgattcccccagtcattctgggaacatgttgtaagcactgactgggaccaggcaccaggcagggtctagaaggctgtggtgagggaagacgcctttctcctccaacccaacctcatcctccttcttcagggacttgggtgggtacttgggtgaggatccctgaaggccttcaacccgagaaaacaaacccaggttggcgactgcaacaggaacttggagtggagaggaaaagcatcagaaagaggcagaccatccaccaggcctttgagaaagggtagaattctggctggtagagcaggtgagatgggacattccaaagaacagcctgagccaaggcctcgtggtagtaagaatctagcaagaattgaggaagaatggtgtgggagagggatgatgaagagagagagggcctgctggagagcatagggtctggaacaccaggctgaggtcctgatcagcttcaaggagtatgcagggagctgggcttccagaaaatgaacacagcagttctgcagaggacgggaggctggaagctgggaggtcaggtggggtggatgatataatgcgggtgagagtaatgaggcttggggctggagaggacaagatgggtaaaccctcacatcagagtgacatccaggaggaataagtcccagggcctgtctctaggtcgtctgtaacgccggccatgtccagcgtcagtatg

SEQ ID NO: 977 - DNA, 6109 bp, Homo sapiens
  CDS (227)..(2836)
cgggaagctggggtcacttcctgctccgtcccagtcaccctgaactggtccccgggtcctcagcctggaatcaccccttgagaaggaccccagagtcctcggcgcccagtccgtcccccgaggcagggcactgaaggggttaagtcccctggggctggattccgccttccggcttttcccagaccccagagccggtccctggaacactgcagtcctgagctctgggatggagcccgagactgcgctgtggggcccggatctgcagggtccggaacagagccccaacgatgctcacagaggtgccgagagtgaaaacgaagaggagagccctcggcaggaaagttctggggaggagatcatcatgggagacccggctcagagtccagaatccaaggactcaacagagatgtccctggagagatcctcccaggacccctctgtcccccagaaccccccaaccccactgggtcactccaatcccttggaccaccagatccccctggaccccccagccccggaggtagtccctaccccatctgactggaccaaggcctgcgaggccagctggcagtggggcgctctcaccacatggaacagccccccagtcgtccccgccaacgagcccagcctgcgggagctggtgcagggccgcccggcgggggcggagaagccctacatctgcaacgagtgcggcaagagcttcagccagtggtccaagctgctgcggcaccagcgcatccacacgggagagcggcccaacacctgctccgagtgcggcaagagcttcacgcagagctcgcacctggtgcagcaccagcgcacgcacaccggcgagaagccctacaagtgccccgactgcggcaagtgcttcagctggagctccaacctggtgcagcaccagcgcacgcacacgggagaagagccctacaagtgcacggagtgcgagatagccttcacccagagcaccaacctcatcaagcaccagcgatcccacaccggcgagaagccctacaagtgcggcgagtgccgccgggctttctaccgcagctcggacctcatccagcaccaggccacccacacaggcgagaaaccctacaagtgccccgagtgcgggaagcgcttcggccagaaccacaacctcctcaagcaccagaagatccacgcgggcgagaagccataccgctgcaccgagtgcgggaagagcttcatccagagctcggagctgacccagcaccagcgcacgcacacaggcgagaagccctacgagtgcctagagtgcggcaagagcttcggccacagctccaccctcatcaagcaccagcggactcacctgcgcgaggacccgttcaagtgcccagtgtgcggcaagaccttcaccctgagcgccacgttgctgcggcaccagcgcacgcacacgggcgagcggccctacaagtgcccagagtgcggcaagagcttcagcgtcagctccaacctcatcaaccaccagcgcatccaccgcggcgagcggccctacatctgcgccgactgcggcaagagcttcatcatgagctccacccttatccgccaccagcgcatccacaccggtgagaagccctacaagtgttccgactgcggcaagagcttcatccgcagctcccaccttatccagcaccgccgcacgcacaccggcgagaagccctacaagtgccccgagtgcggcaagagcttcagccagagctccaaccttattacccacgtccgcacgcacatggacgagaacctgttcgtgtgctccgactgcgggaaggccttcctggaagcccacgagctggagcagcaccgggtgatccatgagagggggaagaccccagcgcgtagggcccagggcgacagcctgctggggctcggggacccctccctgctgaccccgccgccgggagccaagccgcacaagtgtctcgtgtgcggaaagggcttcaacgacgagggcatcttcatgcaacatcagaggatccacatcggagaaaacccctacaaaaatgcagacggcctcatcgcacacgcagcccccaaacctcctcagttacgatccccaaggctccctttcagagggaattcctaccccggggctgcggagggcagagcggaggcccccggacagccccttaagccgccggagggtcaggagggcttcagccagaggcgggggctgctgtcctccaagacctacatctgctcccactgcggagagagcttcctggatcgctctgtgctcctccagcatcagctcacccacggcaacgaaaagccctttctctttcctgattatagaattggcctaggggaaggcgcagggcccagccccttcttaagtgggaagccctttaaatgccctgaatgcaaacaaagctttggcctcagctctgagctgctgctgcaccagaaagtccatgcaggcgggaagagctcccagaagagtccagagctggggaagagctcttccgtcctcctggagcatctcaggagccccctgggggccagaccctaccgctgctcagattgcagggcctccttcctcgaccgcgtggccctcacccggcaccaagaaacccacacccaggaaaaaccccccaatcccgaggacccccctccagaggcagtcaccctgtccacagatcaggaaggtgagggcgagacccctacccccacagagagcagcagccatggggaagggcaaaaccccaaaaccctagtggaagaaaagccctatctgtgccccgagtgtggagccggcttcacagaagtcgcagccctcctgctccataggagctgccacccaggtgtctccctgtgaaatgggtctggagaccaggggcctcgctctctccagagaggaacactggattttttcccccaaaaaaattacatggggaagggaggataaccctatcagatggtagtggagtggaggagaaagaaccctgggaaaaaatagtgcttttacatcagtgatgagaaaccctataaaattgttggtgggaagcacttataaggcagtagagaaaaactgttgggttagaaaccctataaatatgtaggaaaaaaaaaagccctttaagtctgtagcagaaaaaccctataaaccatagtggataaaagccctattaattgtaggaagaggtcccaatatgtctctgaacaaccctataaaattgtatcaaaatccttaggaaaatcctatagggtcggggaagtaccgcaatggcactgacccgggagtaacgaccctcagatgatgcagaaaacacctctccctcactgttccacaatgttctctcccagcagccctggacagttctcatggaggaagatgctcagctgggggagtggtgtgggaactgggtggaactgaaaaggaagaaaataggagaaaaataagtgaccaggggctctggagcccccagaggagataagacagagactaggaagaaaaggtcccactcactgcactggggtccttggggtttgaggacaatgttagatgcattgtgtgttttagggaaagaggcctatggaatcccttatcaaaaccccaaaatggggaagaaaaaacaaattggcaagcctttttaaaggctgaagtttggggtgcagaaacatggtcagtataagaatactgagaaaccaccacaaaaattagggggaagcagggggcagtttctgttagattgctttgaggggagcaaaccaaggtggggaaactgctcacatggaacccagctaactccaggccccttcttgcttccggaagcttgcgaaactgcaagtagcaggcaggtcccagctctcagagtgcaagggttctccccacaccaggcaggaccaccctttctccctgcccagccagggacttctactctgcaaggcctccagggatggcggttgcctcccaccacattctcaggtctcaccttcaggaggtttttcctgaaatctaactgccgccagtggcagctcatttcctcaaattctgtcctcagtggagagggagaaccgctgctagtcgacctccaaagaataaagcccttcagagacttagggcctgcgtgtgggcctccccagccttctccaagtcatcagggccacagaatttcttagaaagctttgattagccagcaacttgattttaaacttcagctattcatctttgttggtagcaaggctgccccgcaggataaggcagccctcctccctggtggggatccagacaccccacagactgagccacaggtccctgaagagtccgcagaggccgtatcaccctcttcaccctggtacctggagccctccagggttgtgagatccagcccaatctcagccttgagatggatgggatggattccactcacttggctcccctctcctccttggccagaaaccttcagaaggaaacagaaggatgagaaagcctcccttgccaggcccatctcacctcccacaccacacagttacacattcataaacagccaagcctgctcacaggcctgggcatatgtggctggggagagactgttgccctatgagatggtggaagacagaaaactcttgaatgaaacatctgtaacaagactcccactccctaatcctggagaccccttcaaaaggagaggactctgctcagcgctgggtcagaaaggaagtgcttgccaaccccagtaatgcgctgtcctggagtaagaggactgagatgccagctgtggggcccgtcaggagtcacgtctcaagagaggggtgacccagatttttgcaaagctgtggaagagacctctaattccatgacctaaagtttcacacaacctttatgcaaatccttcgccatttgtctatcctggccccagcaggatgaccctcacatttaaaaggatcaaaatctcaaacattgtgggaggaaaacgccaggcctgctggggagagggagaaggcaggcctcaggattgtgcggagaaccatgttgccatctgcataacgccccagcctatccaagtgccaggaagggaagcactactgaggggggtgctgcctgtgggtctcttcctaacagaacgccaacgaagggggtgccctgtaagaatgagaagtctgccaagtctaaggagatgtccccctccccaagatggtagcagaaactgaagttgtaaagacaaacctctcgcaaagccagaagcagatgctctcaaaaacaggcctaaggaatctgttcccagaagaggcctggggagcagcttttggggctcagaggccagtctggggggaggcaggcagtgtgactgaaggccggcgcaggcctgtttcggactagggtgtagcatatttagtaggatgctcacatgttgtagggatgggtgagggctaaggggcttggctcttgtacgggatggatgatgtgagcgcacagttcgtagggtcaggcgtcttgcggtaggaaaggggcagggttcgatacctctggggtgtggcgtgttctctcttgcccacctccccaagctcctttaaccaggagcttccctcccagagtgagctacgtcttgggaggattgaagcagggaggtggcagtggctagagttgctcagatcggctcagatgaaggcccaggggtcaaagcatttgctcaccacaactgagtctggaaggcactgtgcagccaaaccctcttgtccaatcacatgcaggccccaggcccctcagaaacgccctggtggagggaggagcccaacagatagggtcagggagtcagtggggaaagcagaggggagagcttagagtgaaacttgaaactgctatggacatggaggtcagatgggaacttggaactgggcatgaatcctgaatggtggggaaacttgaagccatcacagccaagaggtggggttccatgacctgccctgaggtcagcagctcccagactcctttgccctcactagggaagccccagtcaccggacttgtccccatggagtgaagagaggccccatttttgagtgttgtgtgtccaaaacagtgttgtgtcactggtggtcatgttgcttagttgaagagaataaagggaataagatttaaaaaaaaaaaa

SEQ ID NO: 978 - DNA, 3657 bp, Homo sapiens
  CDS (645)..(3254)
acggctaggtacgaggcctggtgttagcagagttgagtccactccgcaccccaccctctgtctggtacagcttaccaaaccaaagtgcccaaagccgtgacatcccggccggcggctcgcaggcccccgccctccgcacgtcacggccgccgggtgcagtgccccctaggggcccctgggacgaggaggaagcgccaggtccttcccgccgccgccgccgccgccgccgccgcctgctcccctggcacgcgccccgccgccctcggcagccgcagctccgtgtcccctgagaaccagccgtcccgcgccatgggcacgcgtctgccgctcgtcctgcgccagctccgccgcccgccccagcccccgggccctccgcgccgcctccgtgtgccctgtcgcgctagcagcaggcgcgcggcggcaggcggctggcgtgtggccgggagggcctgcttggacagcggcggccgcaggatggccaggcccggagcagctgcagccccggcggccgaacgcccgcggcgcgggactccatcgtcagagaagtcattcagaattcaaaagaagttctaagtttattgcaagaaaaaaaccctgccttcaagccggttcttgcaattatccaggcaggtgacgacaacttgatgcaggaaatcaaccagaatttggctgaggaggctggtctgaacatcactcacatttgcctccctccagatagcagtgaagccgagattatagatgaaatcttaaagatcaatgaagataccagagtacatggccttgcccttcagatctctgagaacttgtttagcaacaaagtcctcaatgccttgaaaccagaaaaagatgtggatggagtaacagacataaacctggggaagctggtgcgaggggatgcccatgaatgttttgtttcacctgttgccaaagctgtaattgaacttcttgaaaaatcagtaggtgtcaacctagatggaaagaagattttggtagtgggggcccatgggtctttggaagctgctctacaatgcctgttccagagaaaagggtccatgacaatgagcatccagtggaaaacacgccagcttcaaagcaagcttcacgaggctgacattgtggtcctaggctcacctaagccagaagagattccccttacttggatacaaccaggaactactgttctcaactgctcccatgacttcctgtcagggaaggttgggtgtggctctccaagaatacattttggtggactcattgaggaagatgatgtgattctccttgctgcagctctgcgaattcagaacatggtcagtagtggaaggagatggcttcgtgaacagcagcacaggcggtggagacttcactgcttgaaacttcagcctctctcccctgtgccaagtgacattgagatttcaagaggacaaactccaaaagctgtggatgtccttgccaaggagattggattgcttgcagatgaaattgaaatctatggcaaaagcaaagccaaagtacgtttgtccgtgctagaaaggttaaaggatcaagcagatggaaaatacgtcttagttgctgggatcacacccacccctcttggagaagggaagagcacagtcaccatcgggcttgtgcaggctctgaccgcacacctgaatgtcaactcctttgcctgcttgaggcagccttcccaaggaccgacgtttggagtgaaaggaggagccgcgggtggtggatatgcccaggtcatccccatggaggagttcaaccttcacttgactggagacatccacgccatcaccgctgccaataacttgctggctgccgccatcgacacgaggattcttcatgaaaacacgcaaacagataaggctctgtataatcggctggttcctttagtgaatggtgtcagagaattttcagaaattcagcttgctcggctaaaaaaactgggaataaataagactgatccgagcacactgacagaagaggaagtgagtaaatttgcccgtctcgacatcgacccatctaccatcacgtggcagagagtattggatacaaatgaccgatttctacgaaaaataaccatcgggcagggaaacacagagaagggccattaccggcaggcgcagtttgacatcgcagtggccagcgagatcatggcggtgctggccctgacggacagcctcgcagacatgaaggcacggctgggaaggatggtggtggccagtgacaaaagcgggcagcctgtgacagcagatgatttgggggtgacaggtgctttgacagttttgatgaaagatgcaataaaaccaaacctgatgcagaccctggaagggacacctgtgttcgtgcatgcgggcccttttgctaacattgctcacggcaactcttcagtgttggctgataaaattgccctgaaactggttggtgaagaaggatttgtagtgaccgaagctggctttggtgctgacatcggaatggagaaattcttcaacatcaagtgccgagcttccggcttggtgcccaacgtggttgtgttagtggcaacggtgcgagctctgaagatgcatggaggcgggccaagtgtaacggctggtgttcctcttaagaaagaatatacagaggagaacatccagctggtggcagacggctgctgtaacctccagaagcaaattcagatcactcagctctttggggttcccgttgtggtggctctgaatgtcttcaagaccgacacccgcgctgagattgacttggtgtgtgagcttgcaaagcgggctggtgcctttgatgcagtcccctgctatcactggtcggttggtggaaaaggatcggtggacttggctcgggctgtgagagaggctgcgagtaaaagaagccgattccagttcctgtatgatgttcaggttccaattgtggacaagataaggaccattgctcaggctgtctatggagccaaagatattgaactctctcctgaggcacaagccaaaatagatcgttacactcaacagggttttggaaatttgcccatctgcatggcaaagacccacctttctctatctcaccaacctgacaaaaaaggtgtgccaagggacttcatcttacctatcagtgacgtccgggccagcataggcgctgggttcatttaccctttggtcggaacgatgagcaccatgccaggactgcccacccggccctgcttttatgacatagatcttgataccgaaacagaacaagttaaaggcttgttctaagtggacaaggctctcacaggacccgatgcagactcctgaaacagactactctttgcctttttgctgcagttggagaagaaactgaatttgaaaaatgtctgttatgcaatgctggagacatggtgaaataggccaaagatttcttcttcgttcaagatgaattctgttcacagtggagtatggtgttcggcaaaaggacctccaccaagactgaaagaaactaatttatttctgtttctgtggagtttccattatttctactgcttacactttagaatgtttattttatggggactaagggattaggagtgtgaactaaaaggtaacattttccactctcaagttttctactttgtctttgaactgaaaataaacatggatctagaaaaccaaaaaaaaaaaa

SEQ ID NO: 979 - DNA, 806 bp, Homo sapiens
  CDS (341)..(487)
accacgaggtcacggtaagggtggaaccaggattctgcccggatggggatctggcatgggggggtggggggttgatttgggaagcagagcacagcagcccaaatttgcttgtaatgtcggcggctacagaggaaaggccaagaatggacagattaataaagggccatctacaagccacgaataaggccatcaccagaagccaaccccgccagtccttgatctaggacttccagacttcaaaacttttctagcctgctggcctgccttcactgtcctgggggagacttggagagaccaggtggactggagtagactgttgagagacgctggtctggtgaagatgtccaggaaaccacgagcctccagcccattgtccaacaaccacccaccaacaccaaagaggcgaggaagtggaaggttcccaagacaacccggaagggaaaagggacccatcaaggaagttccaggaacaaaaggctctccctaaaagaccgccgcttcaaaaaaacctgaggaatggagtgggccaacactatccagccactctgaccagccgaacgaggaactcaatcaaaatgagccatagcgggaccacaagggcaaggagaccaccaccttctccagtctctcttcggacagccagtaattcccgggcaaggccagagacttcaagtctatctgaaaagtctccagaggtctaaccccagataaatagccaacagggtgtagagtacattttacaccccaaagagtgtgccccatggtgatgaaaataaagtgaacatgttgcaaactgaaaaaaaaaa

SEQ ID NO: 980 - DNA, 842 bp, Homo sapiens
  CDS (341)..(523)
accacgaggtcacggtaagggtggaaccaggattctgcccggatggggatctggcatgggggggtggggggttgatttgggaagcagagcacagcagcccaaatttgcttgtaatgtcggcggctacagaggaaaggccaagaatggacagattaataaagggccatctacaagccacgaataaggccatcaccagaagccaaccccgccagtccttgatctaggacttccagacttcaaaacttttctagcctgctggcctgccttcactgtcctgggggagacttggagagaccaggtggactggagtagactgttgagagacgctggtctggtgaagatgtccaggaaaccacgagcctccagcccattgtccaacaaccacccaccaacaccaaagaggcgaggaagtggaaggcatcctctcatccctggcccagaagccctatcaaagttcccaagacaacccggaagggaaaagggacccatcaaggaagttccaggaacaaaaggctctccctaaaagaccgccgcttcaaaaaaacctgaggaatggagtgggccaacactatccagccactctgaccagccgaacgaggaactcaatcaaaatgagccatagcgggaccacaagggcaaggagaccaccaccttctccagtctctcttcggacagccagtaattcccgggcaaggccagagacttcaagtctatctgaaaagtctccagaggtctaaccccagataaatagccaacagggtgtagagtacattttacaccccaaagagtgtgccccatggtgatgaaaataaagtgaacatgttgcaaactgaaaaaaaaaa

SEQ ID NO: 981 - DNA, 1805 bp, Homo sapiens
  CDS (9)..(1517)
actgggaaatgtgcaggattctgaatgatgaggctgcctggaatgagttggccagagcttgtctacatcacatggaagtggagtttgcaatccgtgtttatcggagaattggaaatgttggcatagtgatgtccttggaacaaataaagggaatagaggactacaatcttttggcaggacaccttgccatgtttaccaacgattataacctggctcaggacttgtaccttgcatccagctgtcctattgctgccctggagatgagaagggatttacagcattgggacagtgctctacaactggcaaagcatttggccccagaccagataccttttatatcaaaagaatatgctattcagcttgaattcgcgggtgattatgtaaatgctttggctcattatgagaaaggaataacaggtgataataaggaacatgatgaagcttgtctggctggagtggcccagatgtccataagaatgggagacatacgtcgaggggttaaccaagccctcaagcatcccagcagggtccttaaaagagactgtggagccatattggagaatatgaagcaattttcagaagcggcccaactgtatgaaaaaggtctctactacgataaagcagcatctgtttacatccgctctaagaattgggcaaaagttggtgatcttctgccccacgtttcttctcctaagatccatttgcagtatgccaaagccaaggaagcagatggaagatacaaagaagctgttgtagcttatgaaaatgcaaaacagtggcaaagtgtaatccgcatctatctggatcacctcaataatcctgaaaaagctgtcaatattgttagagagacccagtctctggatggagccaaaatggtagccaggttttttctacagcttggtgactatgggtctgccatccagtttcttgtcatgtccaaatgcaacaatgaagctttcacactggctcagcaacacaacaaaatggaaatctatgcagatattattggttctgaagacactactaatgaagactatcaaagcattgccttatactttgaaggagaaaagagatatcttcaggctggaaaattcttcttgctgtgtggccaatattcacgagcacttaaacacttcctgaaatgcccaagctcggaagataatgtggcaatagaaatggcaattgaaactgttggtcaggccaaagatgaactgctgaccaatcagctgatagaccatctcctgggggagaacgatagcatgcctaaggatgccaagtacctgttccgcttgtacatggctctgaagcaataccgagaagctgcccagactgccatcatcattgccagagaagagcagtctgcaggcaactaccggaatgcacacgatgttctcttcagtatgtatgcagaactgaaatcccagaagatcaaaattccctccgagatggccaccaacctcatgattctgcacagctatatactagtaagattcatgttaaaaatggagatcacatgaaaggggctcgcatgctcattcgggtggccaacaacatcagcaaatttccatcacacattgtacccatcctgacgtcaactgtgattgagtgtcacagggcaggcctgaagaactctgctttcagcttcgcagctatgttgatgaggcctgaataccgcagcaaaatagatgccaaatacaaaaagaagatcgagggaatggtcaggagacccgatatatctgagatagaagaggccacgactccatgtccattctgcaaatttcttctcccagagagagaactcctca

SEQ ID NO: 982 - DNA, 1252 bp, Homo sapiens
  CDS (231)..(1202)
tattttgaagctgtttaccctcgcagctctctgactggcacccctgcctgcctgcccggccctgcacaacatgcagccctccggcctcgagggtcccggcacgtttggtcggtggcctctgctgagtctgctgctcctgctgctgctgctccagcctgtaacctgtgcctacaccacgccaggccccccccagagccctcaccacgctgggcgcccccagagcccacaccatgccgggcacctacgctccctcgaccacactcagtagtcccagcacccagggcctgcaagagcaggcacgggccctgatgcgggacttcccgctcgtggacggccacaacgacctgcccctggtcctaaggcaggtttaccagaaagggctacaggatgttaacctgcgcaatttcagctacggccagaccagcctggacaggcttagagatggcctcgtgggcgcccagttctggtcagcctatgtgccatgccagacccaggaccgggatgccctgcgcctcaccctggagcagattgacctcatacgccgcatgtgtgcctcctattctgagctggagcttgtgacctcggctaaagctctgaacgacactcagaaattggcctgcctcatcggtgtagagggtggccactcgctggacaatagcctctccatcttacgtaccttctacatgctgggagtgcgctacctgacgctcacccacacctgcaacacaccctgggcagagagctccgctaagggcgtccactccttctacaacaacatcagcgggctgactgactttggtgagaaggtggtggcagaaatgaaccgcctgggcatgatggtagacttatcccatgtctcagatgctgtggcacggcgggccctggaagtgtcacaggcacctgtgatcttctcccactcggctgcccggggtgtgtgcaacagtgctcggaatgttcctgatgacatcctgcagcttctgaagaagaacggtggcgtcgtgatggtgtctttgtccatgggagtaatacagtgcaacccatcagccaatgtgtccactgtggcagatcacttcgaccacatcaaggctgtcattggatccaagttcatcgggattggtggagattatgatggggccggcaagtacaggaagaaaacaaagtgcaaagccccttggaggacaagttcccggatgagcagctgagcagttcctgccactccgacctctcacgtctgcgtcagagacagagtctg

SEQ ID NO: 983 - DNA, 1608 bp, Homo sapiens
  CDS (49)..(1608)
cgaggccgcccaacaccaacactggagaagaagaaaaaacctcatttgatggcggaagatgaaccttcaggggccctcttgaagccgctggtttttcgcgttgacgagaccaccccggctgtggtgcaaagcgtcctcctggagagggggtggaataagtttgataagcaggagcagaacgcggaggactggaacctgtactggaggacatcctctttccgaatgaccgaacacaacagtgttaaaccgtggcagcagctaaaccaccaccctggaaccaccaagcttaccaggaaagactgtttggccaaacacctgaagcacatgaggaggatgtatggcacttccctgtaccagttcatccccctgacgttcgtcatgcccaatgactataccaagttcgtggctgaatactttcaggagaggcagatgctgggcaccaagcatagctattggatttgcaagcctgctgagttatctcgtgggagggggatactaattttcagtgactttaaagacttcatctttgatgatatgtacatagtgcagaaatatatctccaatcctttacttattggcagatataaatgtgatctccgcatctatgtttgtgttactggctttaagcctttgaccatttatgtttatcaggaagggttggttcggtttgccacggaaaagtttgacctcagtaatttgcaaaacaattatgcccatttgaccaacagcagcatcaataaatccggggcctcttatgagaagatcaaagaagtgattggtcatggttgtaaatggacgctcagcagatttttttcctaccttcgtagctgggatgtggacgatctgcttttgtggaagaaaatccaccgcatggttattctcaccattctcgccattgcaccatctgtcccctttgctgccaattgctttgagctctttgggtttgatattttgattgatgacaacttgaaaccatggcttttagaggtcaactacagcccagccttgaccttggattgttcaacagatgtgttggtgaagagaaaacttgtccatgatattattgacctgatttacttaaatggtctaagaaatgaggggagagaagccagtaatgccacacatggaaattccaacatcgacgctgcaaaaagtgacagaggtgggcttgatgctcctgactgtcttccttatgattctctttcgttcacaagcagaatgtacaacgaggatgactctgtggtggagaaagctgtgagtgtgcgtcctgaagctgcacctgcctcccagctggaaggagagatgagtgggcaggattttcatctgtcaacaagggagatgccacaaagcaagcccaagttacggagcaggcacacgcctcacaagacactcatgccctacgcgtccctcttccagtcgcactcctgcaagaccaagacctccccgtgtgtcctgtcagaccgtggcaaagctccagatccccaagcaggcaactttgttcttgtttttcctttcaatgaagcaactctcggagcttccaggaatggattaaatgtcaaaagaataatccaagagctccagaaactaatgaataagcaacattcctaa

SEQ ID NO: 984 - DNA, 1891 bp, Homo sapiens
  CDS (362)..(1084)
  misc_feature (1)...(1891): n = a,t,c or g
ctggtggaattcgaagcaaagggtgtagctgatgtgcagattgggattgaatgtgggaatgagggtgtgatgggagtgattggaaatattgcagccctgcatagtctccatcagggatgtgacaaagtggataatctctaccacgtgagaaacttccaacattacttgcaaatcagatttaatgaataaaataaagctgtagcacttggcacattcattgggacccttacccaaacattatcaatattgtgtacgttatctttattatcaggtcacaaaagatgtcataaaagaatttgcagatgacggcgtcaagtacctggaactaaggagcacacccagaagagaaaatgctactggaatgactaaaaagacttatgtggaatctatacttgaaggtataaaacagtccaaacaagaaaacttggacattgatgttaggtatttgatagcagttgacagaagaggtggccctttagtagccaaggagactgtaaaacttgccgaggagttcttcctttctactgagggtacagttcttggccttgacctcagtggagaccctactgtaggacaagcaaaagacttcttggaacctcttttagaagctaagaaagcaggtctgaagttagcattgcatctttcagagattccaaaccaaaaaaaagaaacacaaatactcctggatctgcttcctgacagaatcgggcatggaacatttctcaactccggtgagggaggatccctggatctggtggactttgtgaggcaacatcggataccactggaactctgtttgacctcaaacgtcaaaagtcagacagttccatcttatgaccagcaccatttcggattctggtacagcattgcccatccttctgtgatctgtactgatgataagggtgtttttgcaacacacctttctcaagagtaccagctggcagctgaaacatttaatttgacccagtctcaggtgtgggatctgtcttatgaatccatcaactacatctttgcttctgacagcaccagatctgaactgaggaagaaatggaatcacctgaagcccagagtgttacatatttaagctataatgaggtgaactacttctgagtatgtgtttcaatcaagttcctgccatatcccacttagtaaaacagtccaccactcctttgaagcatagcaaccaagttccttgggctctatcaccagcaccttacacatggcaggtactcagtaaatacgtgtcttcaactgactcacaagctctcaggtgcttactgggtgggacttgactgttgttgctaattaaatccccattccaccagtgattattgtgactcagcagtccttccctattagtgatcataaaatttcagggaaatcgaagtttctcatcaggaaatgttttggaattactagtataaagttaggaaagtggggaaattaggttactgccgagacctttaagccttctaaacagctttatattttattgtgcatactttaatcagactcccttcactcgctttaagtttttaaaagtattccccagccggatgtgatggctcatgcctgtaatcccagcactttgggaagccaaagtgggcagattgcttgatcctaggagttcagtagcagcctaggcaacatggagaaaccctgtctctacaaaaacaaaaaaacaaaaaaccggaaattagtcaggcacggtggtacacacctgtagtcccagccaccagggaggctaaggtgggaggagacctgatcccaggggatgtttgaggctgcagtgagctggagtgcagtgacatgatcacagatcactgcagctttcagttttaaaacagcttttattacattntctttgtggaaagctgatttctaccttaga

SEQ ID NO: 985 - protein, 132 aa, Homo sapiens
MLLRMSEHRNEALGNYLEMRLKSSFLRGLGSWKSNPLRLGGWTILLTLTMGQGEPGGPQGDPWVPHELLLPSLCDSSHASSWGSGSITCAWRGGDSSSHPLVSGHILSNSPVAAVMCSSMGTHLSPFKGTLL

SEQ ID NO: 986 - protein, 851 aa, Homo sapiens
KAIRMFKCWSVVLVLGFIFLESEGRPTKEGGYGLKSYQPLMRLRHKQEKNQESSRVKGFMIQDGPLGSCENKYCGLGRHCVASRETGQAECACMDLCKRHYRPVCGSDGEFYENHCEVHRAACLKKQKITIVHNEDCFFKGDKCKTTEYSKMKNMLLDLQNQKYIMQENENPNGDDISRKKLLVDQMFKYFDADSNGLVDINELTQVIKQEELGKDLFDCTLYVLLKYDDFNADKHLALEEFYRAFQVIQLSLPEDQKLSITAATVGQSAVLSCAIQGTLRPPIIWKRNNIILNNLDLEDINDFGDDGSLYITKVTTTHVGNYTCYADGYEQVYQTHIFQVNVPPVIRVYPESQAREPGVTASLRCHAEGIPKPQLGWLKNGIDITPKLSKQLTLQANGSEVHISNVRYEDTGAYTCIAKNEAGVYEDISSLFVEDSARKTLANILWREEGLGIGNMFYVFYEDGIKVIQPIECEFQRHIKPSEKLLGFQDEVCPKAEGDEVQRCVWASAVNVKDKFIYVAQPTLDRVLIVDVQSQKVVQAVSTDPVPVKLHYDKSHDQVWVLSWGTLEKTSPTLQVITLASGNVPHHTIHTQPVGKQFDRVDDFFIPTTTLIITHMRFGFILHKDEAALQKIDLETMSYIKTINLKDYKCVPQSLAYTHLGGYYFIGCKPDSTGAVSPQVMVDGVTDSVIGFNSDVTGTPYVSPDGHYLVSINDVKGLVRVQYITIRGEIQEAFDIYTNLHISDLAFQPSFTEAHQYNIYGSSSTQTDVLFVELSSGKVKMIKSLKEPLKAEEWPWNRKNRQIQDSGLFGQYLMTPSKDSLFILDGRLNKLNCEITEVEKGNTVIWVGDA

SEQ ID NO: 987 - protein, 803 aa, Homo sapiens
MRALWVLGLCCVLLTFGSVRADDEVDVDGTVEEDLGKSREGSRTDDEVVQREEEAIQLDGLNASQIRELREKSEKFAFQAEVNRMMKLIINSLYKNKEIFLRELISNASDALDKIRLISLTDENALSGNEELTVKIKCDKEKNLLHVTDTGVGMTREELVKNLGTIAKSGTSEFLNKMTEAQEDGQSTSELIGQFGVGFYSAFLVADKVIVTSKHNNDTQHIWESDSNEFSVIADPRGNTLGRGTTITLVLKEEASDYLELDTIKNLVKKYSQFINFPIYVWSSKTETVEEPMEEEEAAKEEKEESDDEAAVEEEEEEKKPKTKKVEKTVWDWELMNDIKPIWQRPSKEVEEDEYKAFYKSFSKESDDPMAYIHFTAEGEVTFKSILFVPTSAPRGLFDEYGSKKSDYIKLYVRRVFITDDFHDMMPKYLNFVKGVVDSDDLPLNVSRETLQQHKLLKVIRKKLVRKTLDMIKKIADDKYNDTFWKEFGTNIKLGVIEDHSNRTRLAKLLRFQSSHHPTDITSLDQYVERMKEKQDKIYFMAGSSRKEAESSPFVERLLKKGYEVIYLTEPVDEYCIQALPEFDGKRFQNVAKEGVKFDESEKTKESREAVEKEFEPLLNWMKDKALKDKIEKAVVSQRLTESPCALVASQYGWSGNMERIMKAQAYQTGKDISTNYYASQKKTFEINPRHPLIRDMLRRIKEDEDDKTVLDLAVVLFETATLRSGYLLPDTKAYGDRIERMLRLSLNIDPDAKVEEEPEEEPEETAEDTTEDTEQDEDEEMDVGTDEEEETAKESTAEKDEL

SEQ ID NO: 988 - protein, 83 aa, Homo sapiens
LRNSARGRLQQIGAMALEQNQSTDYYYEENEMNGTYDYSQYELICIKEDVREFAKVFLPVFLTIVFVIGLAGNSMVVAIYAKH

SEQ ID NO: 989 - protein, 139 aa, Homo sapiens
MKEKMWQNVLCCTLQTAVILKLFQNKVLNILKNFFLSPLDTRKNKVFKKWAGGPGAVAHACNPSTLGGRGGRITKSGDRDHPGQHGETRSLLKVQKISQVWWQMTVGQANWEAEAGEWCEPGEGRACSEPRSPTALQTG

SEQ ID NO: 990 - protein, 272 aa, Homo sapiens
MHLRLISWLFIILNFMEYIGSQNASRGRRQRRMHPNVSQGCQGGCATCSDYNGCLSCKPRLFFALERIGMKQIGVCLSSCPSGYYGTRYPDINKCTKCKADCDTCFNKNFCTKCKSGFYLHLGKCLDNCPEGLEANNHTMECVSIVHCEVSEWNPWSPCTKKGKTCGFKRGTETRVREIIQHPSAKGNLCPPTNETRKCTVQRKKCQKGERGKKGRERKRKKPNKGESKEAIPDSKSLESSKEIPEQRENKQQQKKRKVQDKQKSVSVSTVH

SEQ ID NO: 991 - protein, 264 aa, Homo sapiens
MDPTISTLDTELTPINGTEETLCYKQTLSLTVLTCIVSLVGLTGNAVVLWLLGCRMRRNAFSIYILNLAAADFLFLSGRLIYSLLSFISIPHTISKILYPVMMFSYFAGLSMLSTISTEHRLSVLWPIWYCCHCPTHLSAVMCVLLWALSLLQSILEWMFCSFLFSDVDSDNWCQILDFLTVAWLIFLICGSLWVHPGPADQDHMWIPEDTADQAVCDHPAHRAGLPPLWPAPQHSVFPIILDPRGQGSLILSCSSSFYFPVRS

SEQ ID NO: 992 - protein, 78 aa, Homo sapiens
MRPCIWIHVHLKPPCRLVELLPFSSALQGLSHLSLGTTLPVILPERNEEQNLQELSHNADKYQMGDCCKEEIDDSIFY

SEQ ID NO: 993 - protein, 645 aa, Homo sapiens
MDFSFSFMQGIMGNTIQQPPQLIDSANIRQEDAFDNNSDIAEDGGQTPYEATLQQGFQYPATTEDLPPLTNGYPSSISVYETQTKYQSYNQYPNGSANGFGAVRNFSPTDYYHSEIPNTRPHEILEKPSPPQPPPPPSVPQTVIPKKTGSPEIKLKITKTIQNGRELFESSLCGDLLNEVQASEHTKSKHESRKEKRKKSNKHDSSRSEERKSHKIPKLEPEEQNRPNERVDTVSEKPREEPVLKEEAPVQPILSSVPTTEVSTGVKFQVGDLVWSKVGTYPWWPCMVSSDPQLEVHTKINTRGAREYHVQFFSNQPERAWVHEKRVREYKGHKQYEELLAEATKQASNHSEKQKIRKPRPQRERAQWDIGIAHAEKALKMTREERIEQYTFIYIDKQPEEALSQAKKSVASKTEVKKTRRPRSVLNTQPEQTNAGEVASSLSSTEIRRHSQRRHTSAEEEEPPPVKIAWKTAAARKSLPASITMHKGSLDLQKCNMSPVVKIEQVFALQNATGDGKFIDQFVYSTKGIGNKTEISVRGQDRLIISTPNQRNEKPTQSVSSPEATSGSTGSVEKKQQRRSIRTRSESEKSTEVVPKKKIKKEQVETVPQATVKTGLQKGSADRGVQGSVRFSDSSVSAAIEETVD

SEQ ID NO: 994 - protein, 455 aa, Homo sapiens
MSSSGLNSEKVAALIQKLNSDPQFVLAQNVGTTHDLLDICLKRATVQRAQHVFQHAVPQEGKPITNQKSSGRCWIFSCLNVMRLPFMKKLNIEEFEFSQSYLFFWDKVERCYFFLSAFVDTAQRKEPEDGRLVQFLLMNPANDGGQWDMLVNIVEKYGVIPKKCFPESYTTEATRRMNDILNHKMREFCIRLRNLVHSGATKGEISATQDVMMEEIFRVVCICLGNPPETFTWEYRDKDKNYQKIGPITPLEFYREHVKPLFNMEDKICLVNDPRPQHKYNKLYTVEYLSNMVGGRKTLYNNQPIDFLKKMVAASIKDGEAVWFGCDVGKHFNSKLGLSDMNLYDHELVFGVSLKNMNKAERLTFGESLMTHAMTFTAVSEKDDQDGAFTKWRVENSWGEDHGHKGYLCMTDEWFSEYVYEVVVDRKHVPEEVLAVLEQEPIILPAWDPMGALAE

SEQ ID NO: 995 - protein, 84 aa, Homo sapiens
MRLRFNNDRMKTTIKETTILSSAILTFLTYLMKMSFERCTARNKMFVNSPFYPRVDNYCTSSWKKFYLKCYFSLNTIKKEKKMT

SEQ ID NO: 996 - protein, 800 aa, Homo sapiens
MLIQSEKKTQLSKTESVKESESLMEFAQPEIQPQEFLNRRYMTEVDYSNKQGEEQPWEADYARKPNLPKRWDMLTEPDGQEKKQESFKSWEASGKHQEVSKPAVSLEQRKQDTSKLRSTLPEEQKKQEISKSKPSPSQWKQDTPKSKAGYVQEEQKKQETPKLWPVQLQKEQDPKKQTPKSWTPSMQSEQNTTKSWTTPMCEEQDSKQPETPKSWENNVESQKHSLTSQSQISPKSWGVATASLIPNDQLLPRKLNTEPKDVPKPVHQPVGSSSTLPKDPVLRKEKLQDLMTQIQGTCNFMQESVLDFDKPSSAIPTSQPPSATPGSPVASKEQNLSSQSDFLQEPLQATSSPVTCSSNACLVTTDQASSGSETEFMTSETPEAAIPPGKQPSSLASPNPPMAKGSEQGFQSPPASSSSVTINTAPFQAMQTVFNVNAPLPPRKEQEIKESPYSPGYNQSFTTASTQTPPQCQLPSIHVEQTVHSQETANYHPDGTIQVSNGSLAFYPAQTNVFPRPTQPFVNSRGSVRGCTRGGRLITNSYRSPGGYKGFDTYRGLPSISNGNYSQLQFQAREYSGAPYSQRCLETSEPLWLLGKARIISSSVISEEGHLVVHEQIREVSSPERDNETFNSGDSGQGDSRSMTPVDVPVTNPAATILPVHVYPLPQQMRVAFSAARTSNLAPGTLDQPIVFDLLLNNLGETFDLQLGRFNCPVNGTYVFIFHMLKLAVNVPLYVNLMKNEEVLVSAYANDGAPDHETASNHAILQLFQGDQIWLRLHRGAIYGSSWKYSTFSGYLLYQD

SEQ ID NO: 997 - protein, 710 aa, Homo sapiens
MLIQSEKKTQLSKTESVKESESLMEFAQPEIQPQEFLNRRYMTEVDYSNKQGEEQPWEADYARKPNLPKRWDMLTEPDGQEKKQESFKSWEASGKHQEVSKPAVSLEQRKQDTSKLRSTLPEEQKKQEISKSKPSPSQWKQDTPKSKAGYVQEEQKKQETPKLWPVQLQKEQDPKKQTPKSWTPSMQSEQNTTKSWTTPMCEEQDSKQPETPKSWENNVESQKHSLTSQSQISPKSWGVATASLIPNDQLLPRKLNTEPKDVPKPVHQPVGSSSTLPKDPVLRKEKLQDLMTQIQGTCNFMQESVLDFDKPSSAIPTSQPPSATPGSPVASKEQNLSSQSDFLQEPLQVFNVNAPLPPRKEQEIKESPYSPGYNQSFTTASTQTPPQCQLPSIHVEQTVHSQETAANYHPDGTIQVSNGSLAFYPAQTNVFPRPTQPFVNSRGSVRGCTRGGRLITNSYRSPGGYKGFDTYRGLPSISNGNYSQLQFQAREYSGAPYSQRDNFQQCYKRGGTSGGPRANSRAGWSDSSQVSSPERDNETFNSGDSGQGDSRSMTPVDVPVTNPAATILPVHVYPLPQQMRVAFSAARTSNLAPGTLDQPYGVDLLLNNLGETFDLQLGRFNCPVNGTYVFIFHMLKLAVNVPLYVNLMKNEEVLVSAYANDGAPDHETASNHAILQLFQGDQIWLRLHRGAIYGSSWKYSTFSGYLLYQD

SEQ ID NO: 998 - protein, 456 aa, Homo sapiens
MEASWGSFNAERGWYVSVQQPEEAEAEELSPLLSNELHRQRSPGVSFGLSVFNLMNAIMGSGILGLAYVMANTGVFGFSFLLLTVALLASYSVHLLLSMCIQTAVTSYEDLGLFAFGLPGKLVVAGTIIIQNIGAMSSYLLIIKTELPAAIAEFLTGDYSRYWYLDGQTLLIIICVGIVFPLALLPKIGFLGYTSSLSFFFMMFFALVVIIKKWSIPCPLTLNYVEKGFQISNVTDDCKPKLFHFSKESAYALPTMAFSFLCHTSILPIYCELQSPSKKRMQNVTNTAIALSFLIYFISALFGYLTFYDKVESELLKGYSKYLSHDVVVMTVKLCILFGVLLTVPLIHFPARKAVTMMFFSNFPFSWIRHFLITLALNIIIVLLAIYVPDIRNVFGVVGASTSTCLIFIFPGLFYLKLSREDFLSWKKLGAFVLLIFGILVGNFSLALIIFDWINK

SEQ ID NO: 999 - protein, 1001 aa, Homo sapiens
MEAAHAKTTEECLAYFGVSETTGLTPDQVKRNLEKYGLNELPAEEGKTLWELVIEQFEDLLVRILLLAACISFVLAWFEEGEETITAFVEPFVILLILIANAIVGVWQERNAENAIEALKEYEPEMGKVYRADRKSVQRIKARDIVPGDIVEVAVGDKVPADIRILAIKSTTLRVDQSILTGESVSVIKHTEPVPDPRAVNQDKKNMLFSGTNIAAGKALGIVATTGVGTEIGKIRDQMAATEQDKTPLQQKLDEFGEQLSKVISLICVAVWLINIGHFNDPVHGGSWFRGAIYYFKIAVALAVAAIPEGLPAVITTCLALGTRRMAKKNAIVRSLPSVETLGCTSVICSDKTGTLTTNQMSVCKMFIIDKVDGDICLLNEFSITGSTYAPEGEVLKNDKPVRPGQYDGLVELATICALCNDSSLDFNEAKGVYEKVGEATETALTTLVEKMNVFNTDVRSLSKVERANACNSVIRQLMKKEFTLEFSRDRKSMSVYCSPAKSSRAAVGNKMFVKGAPEGVIDRCNYVRVGTTRVPLTGPVKEKIMAVIKEWGTGRDTLRCLALATRDTPPKREEMVLDDSARFLEYETDLTFVGVVGMLDPPRKEVTGSIQLCRDAGIRVIMITGDNKGTAIAICRRIGIFGENEEVADRAYTGREFDDLPLAEQREACRRACCFARVEPSHKSKIVEYLQSYDEITAMTGDGVNDAPALKKAEIGIAMGSGTAVAKTASEMVLADDNFSTIVAAVEEGRAIYNNMKQFIRYLISSNVGEVVCIFLTAALGLPEALIPVQLLWVNLVTDGLPATALGFNPPDLDIMDRPPRSPKEPLISGWLFFRYMAIGGYVGAATVGAAAWWFLYAEDGPHVNYSQLTHFMQCTEDNTHFEGIDCEVFEAPEPMTMALSVLVTIEMCNALNSLSENQSLLRMPPWVNIWLLGSICLSMSLHFLILYVDPLPMIFKLRALDLTQWLMVLKISLPVIGLDEILKFVARNYLEDPEDERRK

SEQ ID NO: 1000 - protein, 1052 aa, Homo sapiens
MIRTLLLSTLVAGALSCGVSTYAPDMSRMLGGEEARPNSWPWQVSLQYSSNGQWYHTCGGSLIANSWVLTAAHCISSSRIYRVMLGQHNLYVAESGSLAVSVSKIVVHKDWNSNQVSKGNDIALLKLANPVSLTDKIQLACLPPAGTILPNNYPCYVTGWGRLQTNGALPDDLKQGRLLVVDYATCSSSGWWGSTVKTNMICAGGDGVICTCNGDSGGPLNCQASDGRWEVHGIGSLTSVLGCNYYYKPSIFTRVSNYNDWINSLWKGREMEVRKLSISWQFLIVLVLILQILSALDFDPYRVLGVSRTASQADIKKAYKKLAREWHPDKNKDPGAEDKFIQISKAYEILSNEEKRSNYDQYGDAGENQGYQKQQQQREYRFRHFHENFYFDESFFHFPFNSERRDSIDEKYLLHFSHYVNEVVPDSFKKPYLIKITSDWCFSCIHIEPVWKEVIQELEELGVGIGVVHAGYERRLAHHLGAHSTPSILGIINGKISFFHNAVVRENLRQFVESLLPGNLVEKVTNKNYVRFLSGWQQENKPHVLLFDQTPIVPLLYKLTAFAYKDYLSFGYVYVGLRGTEEMTRRYNINIYAPTLLVFKEHINRPADVIQARGMKKQIIDDFITRNKYLLAARLTSQKLFHELCPVKRSHRQRKYCVVLLTAETTKLSKPFEAFLSFALANTQDTVRFVHVYSNRQQEFADTLLPDSEAFQGKSAVSILERRNTAGRVVYKTLEDPWIGSESDKFILLGYLDQLRKDPALLSSEAVLPDLTDELAPVFLLRWFYSASDYISDCWDSIFHNNWREMMPLLSLIFSALFILFGTVIVQAFSDSNDERESSPPEKEEAQEKTGKTEPSFTKENSSKIPKKGFVEVTELTDVTYTSNLVRLRPGHMNVVLILSNSTKTSLLQKFALEVYTFTGSSCLHFSFLSLDKHREWLEYLLEFAQDAAPIPNQYDKHFMERDYTGYVLALNGHKKYFCLFKPQKTVEEEEAIGSCSDVDSSLYLGESRGKPSCGLGSRPIKGKLSKLSLWMERLLEGSLQRFYIPSWPELD

SEQ ID NO: 1001 - protein, 338 aa, Homo sapiens
MWLKVFTTFLSFATGACSGLKVTVPSHTVHGVRGQALYLPVHYGFHTPASDIQIIWLFERPHTMPKYLLGSVNKSVVPDLEYQHKFTMMPPNASLLINPLQFPDEGNYIVKVNIQGNGTLSASQKIQVTVDDPVTKPVVQIHPPSGAVEYVGNMTLTCHVEGGTRLAYQWLKNGRPVHTSSTYSFSPQNNTLHIAPVTKEDIGNYSCLVRNPVSEMESDIIMPIIYYGPYGLQVNSDKGLKVGEVFTVDLGEAILFDCSADSHPPNTYSWIRRTDNTTYIIKHGPRLEVASEKVAQKTMDYVCCAYNNITGRQDETHFTVIITSVGMCDIQGRDPNKT

SEQ ID NO: 1002 - protein, 265 aa, Homo sapiens
MSEEVTYADLQFQNSSEMEKIPEIGKFGEKAPPAPSHVWRPAALFLTLLCLLLLIGLGVLASMFHVTLKIEMKKMNKLQNISEELQRNISLQLMSNMNISNKIRNLSTTLQTIATKLCRELYSKEQEHKCKPCPRRWIWHKDSCYFLSDDVQTWQESKMACAAQNASLLKINNKNALEFIKSQSRSYDYWLGLSPEEDSTRGMRVDNIINSSAWVIRNAPDLNNMYCGYINRLYVQYYHCTYKQRMICEKMANPVQLGSTYFREA

SEQ ID NO: 1003 - protein, 254 aa, Homo sapiens
MYQVPLPLDRDGTLVRLRFTMVALVTVCCPLVAFLFCILWSLLFHFKETTATHCGVPNYLPSVSSAIGGEVPQRYVWRFCIGLHSAPRFLVAFAYWNHYLSCTSPCSCYRPLCRLNFGLNVVENLALLVLTYVSSSEDFTIHENAFIVFIASSLGHMLLTCILWRLTKKHTVSQEDRKSYSWKQRLFIINFISFFSALAVYFRHNMYCEAGVYTIFAILEYTVVLTNMAFHMTAWWDFGNKELLITSQPEEKRF

SEQ ID NO: 1004 - protein, 467 aa, Homo sapiens [sequence omitted]

SEQ ID NO: 1005 - protein, 361 aa, Homo sapiens
METGAAELYDQALLGILQHVGNVQDFLRVLFGFLYRKTDFYRLLRHPSDRMGFPPGAAQALVLQVFKTFDHMARQDDEKRRQELEEKIRRKEEEEAKTVSAAAAEKEPVPVPVQEIEIDSTTELDGHQEVEKVQPPGPVKEMAHGSQEAEAPGAVAGAAEVPREPPILPRIQEQFQKNPDSYNGAVRENYTWSQDYTDLEVRVPVPKHVVKGKQVSVALSSSSIRVAMLEENGERVLMEGKLTHKINTESSLWSLEPGKCVLVNLSKVGEYWWNAILEGEEPIDIDKINKERSMATVDEEEQAVLDRLTFDYHQKLQGKPQSHELKVHEMLKKGWDAEGSPFRGQRFDPAMFNISPGAVQF

SEQ ID NO: 1006 - protein, 506 aa, Homo sapiens
MDDYMVLRMIGEGSFGRALLVQHESSNQMFAMKEIRLPKSFSNTQNSRKEAVLLAKMKHPNIVAFKESFEAEGHLYIVMEYCDGGDLMQKIKQQKGKLFPEDMILNWFTQMCLGVNHIHKKRVLHRDIKSKNIFLTQNGKVKLGDFGSARLLSNPMAFACTYVGTPYYVPPEIWENLPYNNKSDIWSLGCILYELCTLKHPFQANSWKNLILKVCQGCISPLPSHYSYELQFLVKQMFKRNPSHRPSATTLLSRGIVARLVQKCLPPEIIMEYGEEVLEEIKNSKHNTPRKKTNPSRIRIALGNEASTVQEEEQDRKGSHTDLESINENLVESALRRVNREEKGNKSVHLRKASSPNLHRRQWEKNVPNTALTALENASILTSSLTAEDDRGGSVIKYSKNTTRKQWLKETPDTLLNILKNADLSLAFQTYTIYRPGSEGFLKGPLSEETEASDSVDGGHDSVILDPERLEPGLDEEDTDFEEEDDNPDWVSELKKRAGWQGLCDR

SEQ ID NO: 1007 - protein, 894 aa, Homo sapiens
MNPGFDLSRRNPQEDFELIQRIGSGTYGDVYKARNVNTGELAAIKVIKLEPGEDFAVVQQEIIMMKDCKHPNIVAYFGSYLRRDKLWICMEFCGGGSLQDIYHVTGPLSELQIAYVSRETLQGLYYLHSKGKMHRDIKGANILLTDNGHVKLADFGVSAQITATIAKRKSFIGTPYWMAPEVAAVERKGGYNQLCDLWAVGITAIELAELQPPMFDLHPMRALFLMTKSNFQPPKLKDKMKWSNSFHHFVKMALTKNPKKRPTAEKLLQHPFVTQHLTRSLAIELLDKVNNPDHSTYHDFDDDDPEPLVAVPHRIHSTSRNVREEKTRSEITFGQVKFDPPLRKETEPHHELPDSDGFLDSSEEIYYTARSNLDLQLEYGQGHQGGYFLGADKSLLKSVEEELHQRGHVAHLEDDEGDDDESKHSTLKAKIPPPLPPKPKSIFIPQEMHSTEDENQGTIKRCPMSGSPAKPSQVPPRPPPPRLPPHKPVALGNGMSSFQLNGERDGSLCQQQNEHRGTNLSRKEKKDVPKPISNGLPPTPKVHMGACFSKVFNGCPLKIHCASSWINPDTRDQYLIFGAEEGIYTLNLNELHETSMEQLFPRRCTWLYVMNNCLLSISGKASQLYSHNLPGLFDYARQMQKLPVAIPAHKLPDRILPRKFSVSAKIPETKWCQKCCVVRNPYTGHKYLCGALQTSIVLLEWVEPMQKFMLIKHIDFPIPCPLRMFEMLVVPEQEYPLVCVGVSRGRDFNQVVRFETVNPNSTSSWFTESDTPQTNVTHVTQLERDTILVCLDCCIKIVNLQGRLKSSRKLSSELTFDFQIESIVCLQDSVLAFWKHGMQGRSFRSNEVTQEISDSTRIFRLLGSDRVVVLESRPTDNPTANSNLYILAGHENSY

SEQ ID NO: 1008 - protein, 873 aa, Homo sapiens
MNPGFDLSRRNPQEDFELIQRIGSGTYGDVYKARNVNTGELAAIKVIKLEPGEDFAVVQQEIIMMKDCKHPNIVAYFGSYLRRDKLWICMEFCGGGSLQDIYHVTGPLSELQIAYVSRETLQGLYYLHSKGKMHRDIKGANILLTDNGHVKLADFGVSAQITATIAKRKSFIGTPYWMAPEVAAVERKGGYNQLCDLWAVGITAIELAELQPPMFDLHPMRALFLMTKSNFQPPKLKDKMKWSNSFHHFVKMALTKNPKKRPTAEKLLQHPFVTQHLTRSLAIELLDKVNNPDHSTYHDFDDDDPEPLVAVPHRIHSTSRNVREEKTRSEITFGQVKFDPPLRKETEPHHELDLQLEYGQGHQGGYFLGANKSLLKSVEEELHQRGHVAHLEDDEGDDDESKHSTLKAKIPPPLPPKPKSIFIPQEMHSTEDENQGTIKRCPMSGSPAKPSQVPPRPPPPRLPPHKPVALGNGMSSFQLNGERDGSLCQQQNEHRGTNLSRKEKKDVPKPISNGLPPTPKVHMGACFSKVFNGCPLKIHCASSWINPDTRDQYLIFGAEEGIYTLNLNELHETSMEQLFPRRCTWLYVMNNCLLSISGKASQLYSHNLPGLFDYARQMQKLPVAIPAHKLPDRILPRKFSVSAKIPETKWCQKCCVVRNPYTGHKYLCGALQTSIVLLEWVEPMQKFMLIKHIDFPIPCPLRMFEMLVVPEQEYPLVCVGVSRGRDFNQVVRFETVNPNSTSSWFTESDTPQTNVTHVTQLERDTILVCLDCCIKIVNLQGRLKSSRKLSSELTFDFQIESIVCLQDSVLAFWKHGMQGRSFRSNEVTQEISDSTRIFRLLGSDRVVVLESRPTDNPTANSNLYILAGHENSY

SEQ ID NO: 1009 - protein, 441 aa, Homo sapiens
MVHIKKGELTQEEKELLEVIGKGTVQEAGTLLSSKNVRVNCLDENGMTPLMHAAYKGKLDMCKLLLRHGADVNCHQHEHGYTALMFAALSGNKDITWVMLEAGAETDVVNSVGRTAAQMAAFVGQHDCVTIINNFFPRERLDYYTKPQGLDKEPKLPPKLAGPLHKIITTTNLHPVKIVMLVNENPLLTEEAALNKCYRVMDLICEKCMKQRDMNEVLAMKMHYISCIFQKCINFLKDGENKLDTLIKSLLKGRASDGFPVYQEKIIRESIRKFPYCEATLLQQLVRSIAPVEIGSDPTAFSVLTQAITGQVGFVDVEFCTTCGEKGASKRCSVCKMVIYCDQTCQKTHWFTHKKICKNLKDIYEKQQLEAAKEKRQEENHGKLDVNSNCVNEEQPEAEVGISQKDSNPEDSGEGKKESLESEAELEGLQDAPAGPQVSEE

SEQ ID NO: 1010 - protein, 1756 aa, Homo sapiens
MMYITIYSMMKIPHQTQKKRSLEDPNSRPRRRSDDLRTGLFQDVQDAESLKLPGVYEVLFYNETEDCPGMMLWRYPEPRGLTLVRITPVPFNTTEDPDISTADLGDVLQDPCSLEYWDELQKVFVAFREFNLSESKVCELQLPDINLVNDQKKLVSSDLWRIVLNSSQNGADDQSSASESGSQSTCDPLVTPTALAACTRVDSCFTPWFVPSLCVSFQFAHLEFHLCHHLDQLGTAAPQYLQPFVSDRNMPSELEYMIVSFREPHMYLRQWNNGSVCQEIQFLAQADCKLLECRNVTMQSVVKPFSIFGQMAVSSDVVEKLLDCTVIVDSVFVNLGQHVVHSLNTAIQAWQQNKCPEVEELVFSHFVICNDTQETLRFGQVDTDENILLASLHSHQYSWRSHKSPQLLHICIEGWGNWRWSEPFSVDHAGTFIRTIQYRGRTASLIIKVQQLNGVQKQIIICGRQIICSYLSQSIELKVVQHYIGQDGQAVVREHFDCLTAKQKLPSYILENNELTELCVKAKGDEDWSRDVCLESKAPEYSIVIQVPSSNSSIIYVWCTVLTLEPNSQVQQRMIVFSPLFIMRSHLPDPIIIHLEKRSLGLSETQIIPGKGQEKPLQNIEPDLVHHLTFQAREEYDPSDCAVPISTSLIKQIATKVHPGGTVNQILDEFYGPEKSLQPIWPYNKKDSDRNEQLSQWDSPMRVKLSIWKPYVRTLLIELLPWALLINESKWDLWLFEGEKIVLQVPAGKIIIPPNFQEAFQIGIYWANTNTVHKSVAIKLVHNLTSPKWKDGGNGEVVTLDEEAFVDTEIRLGAFPGHQKLCQFCISSMVQQGIQIIQIEDKTTIINNTPYQIFYKPQLSVCNPHSGKEYFRVPDSATFSICPGGEQPAMKSSSLPCWDLMPDISQSVLDASLLQKQIMLGFSPAPGADSSQCWSLPAIVRPEFPRQSVAVPLGNFRENGFCTRAIVLTYQEHLGVTYLTLSEDPSPRVIIHNRCPVKMLIKENIKDIPKFEVYCKKIPSECSIHHELYHQISSYPDCKTKDLLPSLLLRVEPLDEVTTEWSDAIDINSQGTQVVFLTGFGYVYVDVVHQCGTVFITVAPEGKAGPILTNTNRAPEKIVTFKMFITQLSLAVFDDLTHHKASAELLRLTLDNIFLCVAPGAGPLPGEEPVAALFELYCVEICCGDLQLDNQLYNKSNFHFAVLVCQGEKAEPIQCSKMQSLLISNKELEEYKEKCFIKLCITLNEGKSILCDINEFSFELKPARLYVEDTFVYYIKTLFDTYLPNSRLAGHSTHLSGGKQVLPMQVTQHARALVNPVKLRKLVIQPVNLLVSIHASLKLYIASDHTPLSFSVFERGPIFTTARQLVHALAMHYAAGALFRAGWVVGSLDILGSPASLVRSIGNGVADFFRLPYEGLTRGPGAFVSGVSRGTTSFVKHISKGTLTSITNLATSLARNMDRLSLDEEHYNRQEEWRRQLPESLGEGLRQGLSRLGISLLGAIAGIVDQPMQNFQKTSEAQASAGHKAKGVISGVGKGIMGVFTKPIGGAAELVSQTGYGILHGAGLSQLPKQRHQPSDLHADQAPNSHVKYVWKMLQSLGRPEVHMALDVVLVRGSGQEHEGCLLLTSEVLFVVSVSEDTQQQAFPVTEIDCAQDSKQNNLLTVQLKQPRVACDVEVDGVRERLSEQQYNRLVDYITKTSCHLAPSCSSMQIPCPVVAAEPPPSTVKTYHYLVDPHFAQVFLSKFTMVKNKALRKGFP

SEQ ID NO: 1011 - protein, 768 aa, Homo sapiens
MSFSMGQLLPTLGHLDSKPSSKSNMIRGRNSATSADEQPHIGNYRLLKTIGKGNFAKVKLARHILTGKEVAVKIIDKTQLNSSSLQKLFREVRIMKVLNHPNIVKLFEVIETEKTLYLVMEYASGGEVFDYLVAHGRMKEKEARAKFRQIVSAVQYCHQKFIVHRDLKAENLLLDADMNIKIADFGFSNEFTFGNKLDTFCGSPPYAAPELFQGKKYDGPEVDVWSLGVILYTLVSGSLPFDGQNLKELRERVLRGKYRIPFYMSTDCENLLKKFLILNPSKRGTLEQIMKDRWMNVGHEDDELKPYVEPLPDYKDPRRTELMVSMGYTREEIQDSLVGQRYNEVMATYLLLGYKSSELEGDTITLKPRPSADLTNSSAHPHPTRYRSVSANPKQRRFSDQAGPPIPTSNSYSKKTQSNNAENKRPEEDRESGRKASSTAKVPASPLPGLERKKTTPTPSTNSVLSTSTNRSRNSPLLERASLGQASIQNGKDSLTMPGSRASTASASAAVSAARPRQHQKSMSASVHPNKASGLPPTESNCEVPRPSTAPQRVPVASPSAHNISSSGGAPDRTNFPRGVSSRSTFHAGQLRQVRDQQNLPYGVTPASPSGHSQGRRGASGSIFSKFTSKFVRRNLNEPESKDRVETLRPHVVGSGGNDKEKEEFREAKPRSLRFTWSMKTTSSMEPNEMMREIRKVLDANSCQSELHEKYMLLCMHGTPGHEDFVQWEMEVCKLPRLSLNGVRFKRISGTSMAFKNIASKIANELKL

SEQ ID NO: 1012 - protein, 1054 aa, Homo sapiens
MEVCAAFEAKEETYKSLMQKGQQMLARCPKSAETNIDQDINNLKEKWESVETKLNERKTKLEEALNLAMEFHNSLQDFINWLTQAEQTLNVASRPSLILDTVLFQIDEHKVFANEVNSHREQIIELDKTGTHLKYFSQKQDVVLIKNLLISVQSRWEKVVQRLVERGRSLDDARKRAKQFHEAWSKLMEWLEESEKSLDSELEIANDPDKIKTQLAQHKEFQKSLGAKHSVYDTTNRTGRSLKEKTSLADDNLKLDDMLSELRDKWDTICGKSVERQNKLEEALLFSGQFTDALQALIDWLYRVEPQLAEDQPVHGDIDLVMNLIDNHKAFQKELGKRTSSVQALKRSARELIEGSRDDSSWVKVQMQELSTRWETVCALSISKQTRLEAALRQAEEFHSVVHALLEWLAEAEQTLRFHGVLPDDEDALRTLIDQHKEFMKKLEEKRAELNKATTMGDTVLAICHPDSITTIKHWITIIRARFEEVLAWAKQHQQRLASALAGLIAKQELLEALLAWLQWAETTLTDKDKEVIPQEIEEVKALIAEHQTFMEEMTRKQPDVDKVTKTYKRRAADPSSLQSHIPVLDKGRAGRKRFPASSLYPSGSQTQIETKNPRVNLLVSKWQQVWLLALERRRKLNDALDRLEELREFANFDFDIWRKKYMRWMNHKKSRVMDFFRRIDKDQDGKITRQEFIDGILSSKFPTSRLEMSAVADIFDRDGDGYIDYYEFVAALHPNKDAYKPITDADKIEDEVTRQVAKCKCAKRFQVEQIGDNKYRFFLGNQFGDSQQLRLVRILRSTVMVRVGGGWMALDEFLVKNDPCRAKGRTNMELREKFILADGASQGMAAFRPRGRRSRPSSRGASPNRSTSVSSQAAQAASPQVPATTTPKILHPLTRNYGKPWLTNSKMSTPCKAAECSDFPVPSAEGTPIQGSKLRLPGYLSGKGFHSGEDSGLITTAAARVRTQFADSKKTPSRPGSRAGSKAGSRASSRRGSDASDFDISEIQSVCSDVETVPQTHRPTPRAGSRPSTAKPSKIPTPQRKSPASKLDKSSKR

SEQ ID NO: 1013 - protein, 1017 aa, Homo sapiens
MEVCAAFEAKEETYKSLMQKGQQMLARCPKSAETNIDQDINNLKEKWESVETKLNERKTKLEEALNLAMEFHNSLQDFINWLTQAEQTLNVASRPSLILDTVLFQIDEHKVFANEVNSHREQIIELDKTGTHLKYFSQKQDVVLIKNLLISVQSRWEKVVQRLVERGRSLDDARKRAKQFHEAWSKLMEWLEESEKSLDSELEIANDPDKIKTQLAQHKEFQKSLGAKHSVYDTTNRTGRSLKEKTSLADDNLKLDDMLSELRDKWDTICGKSVERQNKLEEALLFSGQFTDALQALIDWLYRVEPQLAEDQPVHGDIDLVMNLIDNHKAFQKELGKRTSSVQALKRSARELIEGSRDDSSWVKVQMQELSTRWETVCALSISKQTRLEAALRQAEEFHSVVHALLEWLAEAEQTLRFHGVLPDDEDALRTLIDQHKEFMKKLEEKRAELNKATTMGDTVLAICHPDSITTIKHWITIIRARFEEVLAWAKQHQQRLASALAGLIAKQELLEALLAWLQWAETTLTDKDKEVIPQEIEEVKALIAEHQTFMEEMTRKQPDVDKVTKTYKRRAADPSSLQSHIPVLDKGRAGRKRFPASSLYPSGSQTQIETKNPRVNLLVSKWQQVWLLALERRRKLNDALDRLEELREFANFDFDIWRKKYMRWMNHKKSRVMDFFRRIDKDQDGKITRQEFIDGILSSKFPTSRLEMSAVADIFDRDGDGYIDYYEFVAALHPNKDAYKPITDADKIEDEVTRQVAKCKCAKRFQVEQIGDNKYRFFLGNQFGDSQQLRLVRILRSTVMVRVGGGWMALDEFLVKNDPCRAKGRTNMELREKFILADGASQGMAAFRPRGRRSRPSSRGASPNRSTSVSSQAAQAASPQVPATTTPKGTPIQGSKLRLPGYLSGKGFHSGEDSGLITTAAARVRTQFADSKKTPSRPGSRAGSKAGSRASSRRGSDASDFDISEIQSVCSDVETVPQTHRPTPRAGSRPSTAKPSKIPTPQRKSPASKLDKSSKR

SEQ ID NO: 1014 - protein, 684 aa, Homo sapiens
MAAGGAEGGSGPGAAMGDCAEIKSQFRTREGFYKLLPGDGAARRSGPASAQTPVPPQPPQPPPGPASASGPGAAGPASSPPPAGPGPGPALPAVRLSLVRLGEPDSAGAGEPPATPAGLGSGGDRVCFNLGRELYFYPGCCRRGSQRWHTPLTPFLPPLKSIDLNKPIDKRIYKGTQPTCHDFNQFTAATETISLLVGFSAGQVQYLDLIKKDTSKLFNEERLIDKTKVTYLKWLPESESLFLASHASGHLYLYNVSHPCASAPPQYSLLKQGEGFSVYAAKSKAPRNPLAKWAVGEGPLNEFAFSPDGRHLACVSQDGCLRVFHFDSMLLRGLMKSYFGGLLCVCWSPDGRYVVTGGEDDLVTVWSFTEGRVVARGHGHKSWVNAVAFDPYTTRAEEAATAAGADGERSGEEEEEEPEAAGTGSAGGAPLSPLPKAGSITYRFGSAGQDTQFCLWDLTEDVLYPHPPLARTRTLPGTPGTTPPAASSSRGGEPGPGPLPRSLSRSNSLPHPAGGGKAGGPGVAAEPGTPFSIGRFATLTLQERRDRGAEKEHKRYHSLGNISRGGSGGSGSGGEKPSGPVPRSRLDPAKVLGTALCPRIHEVPLLEPLVCKKIAQERLTVLLFLEDCIITACQEGLICTWARPGKAGISSQPGNSPSGTVVGSHGYSAPPTPCPQPSSHNPSL

SEQ ID NO: 1015 - protein, 1190 aa, Homo sapiens
MPRGVFQQLSNLVLQELNANLSNLTSAFEKATAEKIKCQQEADATNRVILLANRLVGGLASENIRWAESVENFRSQGVTLCGDVLLISAFVSYVGYFTKKYRNELMEKFWIPYIHNLKVPIPITNGLDPLSLLTDDADVATWNNQGLPSDRMSTENATILGNTERWPLIVDAQLQGIKWIKNKYRSELKAIRLGQKSYLDVIEQATSEGDTLLIENIGETVDPALDPLLGRNTIKKGKYIKIGDKEVGVPPQVPPDPTHQVLQPTLQARDAGSVHLINFLVTRDGLEDQLLAAVVAKERPDLEQLKANLTKSQNEFKIVLKELEDSLLARLSAASGNFLGDTTLVENLETTKHTASEIEEKVVEAKITEVKINEARENYRPAAERASLLYFILNDLNKINPVYQFSLKAFNVVFEKAIQRTTPANEVKQRVINLTDEITYSVYMYTARGLFERDKLIFLAQVTFQVLSMKKELNPVELDFLLRFPFKAGVVSPVDFLQHQGWGGIKALSEMDEFKNLDSDIEGSAKRWKKLVESEAPEKEIFPKEWKNKTALQKLCMVRCLRPDRMTYAIKNFVEEKMGSKFVEGRSVEFSKSYEESSPSTSIFFILSPGVDPLKDVEALGKKLGFTIDNGKLHNVSLGQGQEVVAENALDVAAEKGHWVILQNIHLVARWLGTLDKKLERYSTGSHEDYRVFISAEPAPSPETHIIPQGILENAIKITNEPPTGMHANLHKALDLFTQDTLEMCTKEMEFKCMLFALCYFHAVVAERRKFGAQGWNRSYPFNNGDLTISINVLYNYLEANPKVPWDDLRYLFGEIMYGGHITDDWDRRLCRTYLAEYIRTEMLEGDVLLAPGFQIPPNLDYKGYHEYIDENLPPESPYLYGLHPNAEIGFLTVTSEKLFRTVLEMQPKETDSGAGTGVSREEKVKAVLDDILEKIPETFNMAEIMAKAAEKTPYVVVAFQECERMNILTNEMRRSLKELNLGLKGELTITTDVEDLSTALFYDTVPDTWVARAYPSMMGLAAWYADLLLRIRELEAWTTDFALPTTVWLAGFFNPQSFLTAIMQSMARKNEWPLDKMCLSVEVTKKNREDMTAPPREGSYVYGLFMEGARWDTQTGVIAEARLKELTPAMPVIFIKAIPVDRMETKNIYECPVYKTRIRGPTYVWTFNLKTKEKAAKWILAAVALLLQV

SEQ ID NO: 1016 - protein, 476 aa, Homo sapiens
METPGASASSLLLPAASRPPRKREAGEAGAATSKQRVLDEEEYIEGLQTVIQRDFFPDVEKLQAQKEYLEAEENGDLERMRQIAIKFGSALGKMSREPPPPYVTPATFETPEVHAGTGVVGNKPRPRGRGLEDGEAGEEEEKEPLPSLDVFLSRYTSEDNASFQEIMEVAKERSRARHAWLYQAEEEFEKRQKDNLELPSAEHQAIESSQASVETWKYKAKNSLMYYPEGVPDEEQLFKKPRQVVHKNTRFLRDPFSQALSRCQLQQAAALNAQHKQGKVGPDGKELIPQESPRVGGFGFVATPSPAPGVNESPMMTWGEVENTPLRVEGSETPYVDRTPGPAFKILEPGRRERLGLKMANEAAAKNRAKKQEALRRVTENLASLTPKGLSPAMSPALQRLVSRTASKYTDRALRASYTPSPARSTHLKTPASGLQTPTSTPAPGSATRTPLTQDPASITDNLLQLPARRKASDFF

SEQ ID NO: 1017 - protein, 526 aa, Homo sapiens
MASNDYTQQATQSYGAYPTQPGQGYSQQSSQPYGQQSYSGYSQSTDTSGYGQSSYSSYGQSQNTGYGTQSTPQGYGSTGGYGSSQSSQSSYGQQSSYPGYGQQPAPSSTSGSYGSSSQSSSYGQPQSGSYSQQPSYGGQQQSYGQQQSYNPPQGYGQQNQYNSSSGGGGGGGGGGNYGQDQSSMSSGGGSGGGYGNQDQSGGGGSGGYGQQDRGGRGRGGSGGGGGGGGGGYNRSSGGYEPRGRGGGRGGRGGMGGSDRGGFNKFGGPRDQGSRHDSEQDNSDNNTIFVQGLGENVTIESVADYFKQIGIIKTNKKTGQPMINLYTDRETGKLKGEATVSFDDPPSAKAAIDWFDGKEFSGNPIKVSFATRRADFNRGGGNGRGGRGRGGPMGRGGYGGGGSGGGGRGGFPSGGGGGGGQQRAGDWKCPNPTCENMNFSWRNECNQCKAPKPDGPGGGPGGSHMGGNYGDDRRGGRGGYDRGGYRGRGGDRGGFRGGRGGGDRGGFGPGKMDSRGEHRQDRRERPY

SEQ ID NO: 1018 - protein, 536 aa, Homo sapiens
MASNDYTQQATQSYGAYPTQPGQGYSQQSSQPYGQQSYSGYSQSTDTSGYGQSSYSSYGQSQNTGYGTQSTPQGYGSTGGYGSSQSSQSSYGQQSSYPGYGQQPAPSSTSGSYGSSSQSSSYGQPQSGSYSQQPSYGGQQQSYGQQQSYNPPQGYGQQNQYNSSSGGGGGGGGGGNYGQDQSSMSSGGQDQSSMSSGGGSGGGYGNQDQSGGGGSGGYGQQDRGGRGRGGSGGGGGGGGGGYNRSSGGYEPRGRGGGRGGRGGMGGSDRGGFNKFGGPRDQGSRHDSEQDNSDNNTIFVQGLGENVTIESVADYFKQIGIIKTNKKTGQPMINLYTDRETGKLKGEATVSFDDPPSAKAAIDWFDGKEFSGNPIKVSFATRRADFNRGGGNGRGGRGRGGPMGRGGYGGGGSGGGGRGGFPSGGGGGGGQQRAGDWKCPNPTCENMNFSWRNECNQCKAPKPDGPGGGPGGSHMGGNYGDDRRGGRGGYDRGGYRGRGGDRGGFRGGRGGGDRGGFGPGKMDSRGEHRQDRRERPY

SEQ ID NO: 1019 - protein, 128 aa, Homo sapiens
MLWAGAHQHGRNWRKRETSPGTQGPLPPVPRARPALMATHAIAPTLSWAIPRQQCSPQPGRLNALPPDRCSGPHFGDRAPESCFPGACSVSGACAFKGTRPACPPQEPSLRSSRNRLREGQTFGRMEI

SEQ ID NO: 1020 - protein, 337 aa, Homo sapiens [sequence omitted]

SEQ ID NO: 1021 - protein, 1194 aa, Homo sapiens
METRRRLEQERATMQMTPGEFRRPRLASFGGMGTTSSLPSFVGSGNHNPAKHQLQNGYQGNGDYGSYAPAAPTTSSMGSSIRHSPLSSGISTPVTNVSPMHLQHIREQMAIALKRLKELEEQVRTIPVLQVKISVLQEEKRQLVSQLKNQRAASQINVCGVRKRSYSAGNASQLEQLSRARRSGGELYIDYEEEEMETVEQSTQRIKEFRQLTADMQALEQKIQDSSCEASSELRENGECRSVAVGAEENMNDIVVYHRGSRSCKDAAVGTLVEMRNCGVSVTEAMLGVMTEADKEIELQQQTIESLKEKIYRLEVQLRETTHDREMTKLKQELQAAGSRKKVDKATMAQPLVFSKVVEAVVQTRDQMVGSHMDLVDTCVGTSVETNSVGISCQPECKNKVVGPELPMNWWIVKERVEMHDRCAGRSVEMCDKSVSVEVSVCETGSNTEESVNDLTLLKTNLNLKEVRSIGCGDCSVDVTVCSPKECASRGVNTEAVSQVEAAVMAVPRTADQDTSTDLEQVHQFTNTETATLIESCTNTCLSTLDKQTSTQTVETRTVAVGEGRVKDINSSTKTRSIGVGTLLSGHSGFDRPSAVKTKESGVGQININDNYLVGLKMRTIACGPPQLTVGLTASRRSVGVGDDPVGESLENPQPQAPLGMMTGLDHYIERIQKLLAEQQTLLAENYSELAEAFGEPHSQMGSLNSQLISTLSSINSVMKSASTEELRNPDFQKTSLGKITGNYLGYTCKCGGLQSGSPLSSQTSQPEQEVGTSEGKPISSLDAFPTQEGTLSPVNLTDDQIAAGLYACTNNESTLKSIMKKKDGNKDSNGAKKNLQFVGINGGYETTSSDDSSSDESSSSESDDECDVIEYPLEEEEEEEDEDTRGMAEGHHAVNIEGLKSARVEDEMQVQECEPEKVEIRERYELSEKMLSACNLLKNTINDPKALTSKDMRFCLNTLQHEWFRVSSQKSAIPAMVGDYIAAFEAISPDVLRYVINLADGNGNTALHYSVSHSNFEIVKLLLDADVCNVDHQNKAGYTPIMLAALAAVEAEKDMRIVEELFGCGDVNAKASQAGQTALMLAVSHGRIDMVKGLLACGADVNIQDDEGSTALMCASEHGHVEIVKLLLAQPGCNGHLEDNDGSTALSIALEAGHKDIAVLLYAHVNFAKAQSPGTPRLGRKTSPGPTHRGSFD

SEQ ID NO: 1022 - protein, 365 aa, Homo sapiens
MGRKKIQISRILDQRNRQVTFTKRKFGLMKKAYELSVLCDCEIALIIFNSANRLFQYASTDMDRVLLKYTEYSEPHESRTNTDILETLKRRGIGLDGPELEPDEGPEEPGEKFRRLAGEGGDPALPRPRLYPAAPAMPSPDVVYGALPPPGCDPSGLGEALPAQSRPSPFRPAAPKAGPPGLGHPLFSPSHLTSKTPPPLYLPTEGRRSDLPGGLAGPRGGLNTSRSLYSGLQNPCSTATPGPPLGSFPFLPGGPPVGAEAWARRVPQPAAPPRRPPQSASSLSASLRPPGAPATFLRPSPIPCSSPGPWQSLCGLGPPCAGCPWPTAGPGRRSPGGTSPERSPGTARARGDPTSLQASSEKTQQ

SEQ ID NO: 1023 - protein, 372 aa, Homo sapiens
MSLRCGDAARTLGPRVFGRYFCSPVRPLSSLPDKKKELLQNGPDLQDFVSGDLADRSTWDEYKGNLKRQKGERLRLPPWLKTEIPMGKNYNKLKNTLRNLNLHTVCEEARCPNIGECWGGGEYATATATIMLMGDTCTRGCRFCSVKTARNPPPLDASEPYNTAKAIAEWGLDYVVLTSVDRDDMPDGGAEHIAKTVSYLKERNPKILVECLTPDFRGDLKAIEKVALSGLDVYAHNVETVPELQSKVRDPRANFDQSLRVLKHAKKVQPDVISKTSIMLGLGENDEQVYATMKALREADVDCLTLGQYMQPTRRHLKVEEYITPEKFKYWEKVGNELGFHYTASGPLVRSSYKAGEFFLKNLVAKRKTKDL

SEQ ID NO: 1024 - protein, 528 aa, Homo sapiens
MQGPWVLLLLGLRLQLSLGVIPAEEENPAFWNRQAAEALDAAKKLQPIQKVAKNLILFLGDGLGVPTVTATRILKGQKNGKLGPETPLAMDRFPYLALSKTYNVDRQVPDSAATATAYLCGVKANFQTIGLSAAARFNQCNTTRGNEVISVMNRAKQAGKSVGVVTTTRVQHASPAGTYAHTVNRNWYSDADMPASARQEGCQDIATQLISNMDIDVILGGGRKYMFPMGTPDPEYPADASQNGIRLDGKNLVQEWLAKHQGAWYVWNRTELMQASLDQSVTHLMGLFEPGDTKYEIHRDPTLDPSLMEMTEAALRLLSRNPRGFYLFVEGGRIDHGHHEGVAYQALTEAVMFDDAIERAGQLTSEEDTLTLVTADHSHVFSFGGYTLRGSSIFGLAPSKAQDSKAYTSILYGNGPGYVFNSGVRPDVNESESGSPDYQQQAAVPLSSETHGGEDVAVFARGPQAHLVHGVQEQSFVAHVMAFAACLEPYTACDLAPPACTTDAAHPVAASLPLLAGTLLLLGASAAP

SEQ ID NO: 1025 - protein, 218 aa, Homo sapiens
MNRLFGKAKPKAPPPSLTDCIGTVDSRAESIDKKISRLDAELVKYKDQIKKMREGPAKNMVKQKALRVLKQKRMYEQQRDNLANSHSTWTSHYTIQSLKDTKTTVDAMKLGVKEMKKAYKQVKIDQIEDLQDQLEDMMEDANEIQEALSRSYGTPELDEDDLEAELDALGDELLADEDSSYLDEAASAPAIPEGVPTDTKNKDGVLVDEFGLPQIPAS

SEQ ID NO: 1026 - protein, 488 aa, Homo sapiens
MQHVSSSQSSQRHVQWPGACPGAGEEQPACSQPSLPLTLASPSHQLQQLMVRGGPAGGQNMNVDLQGVGPGLQGSPQVTLAPLPLPSPTSPGFQFSAQPRRFEHGSPSYIQVTSPLSQQVQTQSPTQPSPGPGQALQNVRAGAPGPGLGLCSSSPTGDFVDASVLVRQISLSPSSGGHFVFQDGSGLTQIAQGAQVQLQHPGTPITVRERRPSQPHTQSGGTIHHLGPQSPAAAGGAGLQPLASPSHITTANLPPQISSIIQGQLVQQQQVLQGPPLPRPLGFERTPGVLLPGAGGAAGFGMTSPPPPTSPSRTAVPPGLSSLPLTSVGNTGMKKVPKKLEEIPPASPEMAQMRKQCLDYHHQEMQALKEVFKEYLIELFFLQHFQGNMMDFLAFKERLYGPLQAYLRQNDLDIEEEEEEHFEVINDEVKVVARKHGQPGTPVAIATQLPPRTSAAFPAQQQPLQVLSDGSTVQLPRLSSLGFEDSMC

SEQ ID NO: 1027 - protein, 290 aa, Homo sapiens
MHPINVRRDPSIPIYGLRQSILLNTRLQDCYVDSPALTNIWMARTCAKQNINAPAPATTSSWEVVRNPLIASSFSLVKLVLRRQLKNKCCPPPCKFGEGKLSKRLKHKDDSVMKATQQARKRNFISSKSKQPAGHRRPAGGIRESKESSKEKKLTVRQDLEDRYAEHVAATQALPQDSGTAAWKGRVLLPETQKRQQLSEDTLTIHGLPTEGYQALYHAVVEPMLWNPSGTPKRYSLELGKAIKQKLWEALCSQGAISEGAQRDRFPGRKQPGVHEEPVLKKWPKLKSKK

SEQ ID NO: 1028 - protein, 547 aa, Homo sapiens [sequence omitted]

SEQ ID NO: 1029 - protein, 577 aa, Homo sapiens
MGSRHFEGIYDHVGHFGRFQRVLYFICAFQNISCGIHYLASVFMGVTPHHVCRPPGNVSQVVFHNHSNWSLEDTGALLSSGQKDYVTVQLQNGEIWELSRCSRNKRENTSSLGYEYTGSKKEFPCVDGYIYDQNTWKSTAVTQWNLVCDRKWLAMLIQPLFMFGVLLGSVTFGYFSDRLGRRVVLWATSSSMFLFGIAAAFAVDYYTFMAARFFLAMVASGYLVVGFVYVMEFIGMKSRTWASVHLHSFFAVGTLLVALTGYLVRTWWLYQMILSTVTVPFILCCWVLPETPFWLLSEGRYEEAQKIVDIMAKWNRASSCKLSELLSLDLQGPVSNSPTEVQKHNLSYLFYNWSITKRTLTVWLIWFTGSLGFYSFSLNSVNLGGNEYLNLFLLGVVEIPAYTFVCIAMDKVGRRTVLAYSLFCSALACGVVMVIPQKHYILGVVTAMVGKFAIGAAFGLIYLYTAELYPTIVRSLAVGSGSMVCRLASILAPFSVDLSSIWIFIPQLFVGTMALLSGVLTLKLPETLGKRLATTWEEAAKLESENESKSSKLLLTTNNSGLEKTEAITPRDSGLGE

SEQ ID NO: 1030 - protein, 363 aa, Homo sapiens
MMTPEVLAEAYGKKEWKHFLSDTGMACRSGKYYFYDNYFDLPGALLCARVVDYLTKLNNGQKTFDFWKDIVAAIQHNYKMSAFKENCGIYFPEIKRDPGRYLHSCPESVKKWLRQLKNAGKILLLITSSHSDYCRLLCEYILGNDFTDLFDIVITNALKPGFFSHLPSQRPFRTLENDEEQEALPSLDKPGWYSQGNAVHLYELLKKMTGKPEPKVVYFGDSMHSDIFPARHYSNWETVLILEELRGDEGTRSQRPEESEPLEKKGKYEGPKAKPLNTSSKKWGSFFIDSVLGLENTEDSLVYTWSCKRISTYSTIAIPSIEAIAELPLDYKFTRFSSSNSKTAGYYPNPPLVLSSDETLISK

SEQ ID NO: 1031 - protein, 693 aa, Homo sapiens
MTPQSLLQTTLFLLSLLFLVQGAHGRGHREDFRFCSQRNQTHRSSLHYKPTPDLRISIENSEEALTVHAPFPAAHPASRSFPDPRGLYHFCLYWNRHAGRLHLLYGKRDFLLSDKASSLLCFQHQEESLAQGPPLLATSVTSWWSPQNISLPSAASFTFSFHSPPHTAAHNASVDMCELKRDLQLLSQFLKHPQKASRRPSAAPASQQLQSLESKLTSVRFMGDMVSFEEDRINATVWKLQPTAGLQDLHIHSRQEEEQSEIMEYSVLLPRTLFQRTKGRSGEAEKRLLLVDFSSQALFQDKNSSQVLGEKVLGIVVQNTKVANLTEPVVLTFQHQLQPKNVTLQCVFWVEDPTLSSPGHWSSAGCETVRRETQTSCFCNHLTYFAVLMVSSVEVDAVHKHYLSLLSYVGCVVSALACLVTIAAYLCSRVPLPCRRKPRDYTIKVHMNLLLAVFLLDTSFLLSEPVALTGSEAGCRASAIFLHFSLLTCLSWMGLEGYNLYRLVVEVFGTYVPGYLLKLSAMGWGFPIFLVTLVALVDVDNYGPIILAVHRTPEGVIYPSMCWIRDSLVSYITNLGLFSLVFLFNMAMLATMVVQILRLRPHTQKWSHVLTLLGLSLVLGLPWALIFFSFASGTFQLVVLYLFSIITSFQGFLIFIWYWSMRLQARGGPSPLKSNSDSARLPISSGSTSSSRI

SEQ ID NO: 1032 - protein, 308 aa, Homo sapiens
FGPRGQEFGTRSRGQLDAGQSSEQHGGNRQPEQSRSRSSSSSSSPRRSRSAAEPAMALSMPLNGLKEEDKEPLIELFVKAGSDGESIGNCPFSQRLFMILWLKGVVFSVTTVDLKRKPADLQNLAPGTHPPFITFNSEVKTDVNKIEEFLEEVLCPPKYLKLSPKHPESNTAGMDIFAKFSAYIKNSRPEANEALERGLLKTLQKLDEYLNSPLPDEIDENSMEDIKFSTRKFLDGNEMTLADCNLLPKLHIVKVVAKKYRNFDIPKEMTGIWRYLTNAYSRDEFTNTCPSDKEVEIAYSDVAKRLTK

SEQ ID NO: 1033 - protein, 132 aa, Homo sapiens
MQVIHGPHVEKLQSPLGPHRPSPRCPLSVVTGPDLQECTFHSTRKPYDILRLPRPAACMGPLPSSTPTLRMVPCSALVLCWPLPATPTLRHPGVVGPNWLAPPSAALCRPDAAVWPDLPSSNILLVTPPPAK

SEQ ID NO: 1034 - protein, 541 aa, Homo sapiens
MRLKMTTRNFPEREVPCDVEVERFTREVPCLSSLGDGWDCENQEGHLRQSALTLEKPGTQEAICEYPGFGEHLIASSDLPPSQRVLATNGFHAPDSNVSGLDCDPALPSYPKSYADKRTGDSDACGKGFNHSMEVIHGRNPVREKPYKYPESVKSFNHFTSLGHQKIMKRGKKSYEGKNFENIFTLSSSLNENQRNLPGEKQYRCTECGKCFKRNSSLVLHHRTHTGEKPYTCNECGKSFSKNYNLIVHQRIHTGEKPYECSKCGKAFSDGSALTQHQRIHTGEKPYECLECGKTFNRNSSLILHQRTHTGEKPYRCNECGKPFTDISHLTVHLRIHTGEKPYECSKCGKAFRDGSYLTQHERTHTGEKPFECAECGKSFNRNSHLIVHQKIHSGEKPYECKECGKTFIESAYLIRHQRIHTGEKPYGCNQCQKLFRNIAGLIRHQRTHTGEKPYECNQCGKAFRDSSCLTKHQRIHTKETPYQCPECGKSFKQNSHLAVHQRLHSREGPSRCPQCGKMFQKSSSLVRHQRAHLGEQPMET

SEQ ID NO: 1035 - protein, 508 aa, Homo sapiens
LPDRNSRVDPRVRSLTELLSFFQPTAHSLTSLLGTMTTCSRQFTSSSSMKGSCGIGGGIGGGSSRISSVLAGGSCRAPSTYGGGLSVSSRFSSGGACGLGGGYGGGFSSSSSFGSGFGGGYGGGLGAGFGGGLGAGFGGGFAGGDGLLVGSEKVTMQNLNDRLASYLDKVRALEEANADLEVKIRDWYQRQRPSEIKDYSPYFKTIEDLRNKIIAATIENAQPILQIDNARLAADDFRTKYEHELALRQTVEADVNGLRRVLDELTLARTDLEMQIEGLKEELAYLRKNHEEEMLALRGQTGGDVNVEMDAAPGVDLSRILNEMRDQYEQMAEKNRRDAETWFLSKTEELNKEVASNSELVQSSRSEVTELRRVLQGLEIELQSQLSMKASLENSLEETKGRYCMQLSQIQGLIGSVEEQLAQLRCEMEQQSQEYQILLDVKTRLEQEIATYRRLLEGEDAHLSSQQASGQSYSSREVFTSSSSSSSRQTRPILKEQSSSSFSQGQSS

SEQ ID NO: 1036 - protein, 251 aa, Homo sapiens [sequence omitted]

SEQ ID NO: 1037 - protein, 788 aa, Homo sapiens
MTIHQFLLLFLFWVCLPHFCSPEIMFRRTPVPQQRILSSRVPRSDGKILHRQKRGWMWNQFFLLEEYTGSDYQYVGKLHSDQDKGDGSLKYILSGDGAGTLFIIDEKTGDIHATRRIDREEKAFYTLRAQAINRRTLRPVEPESEFVIKIHDINDNEPTFPEEIYTASVPEMSVVGTSVVQVTATDADDPSYGNSARVIYSILQGQPYFSVEPETGIIRTALPNMNRENREQYQVVIQAKDMGGQMGGLSGTTTVNITLTDVNDNPPRFPQNTIHLRVLESSPVGTAIGSVKATDADTGKNAEVEYRIIDGDGTDMFDIVTEKDTQEGIITVKKPLDYESRRLYTLKVEAENTHVDPRFYYLGPFKDTTIVKISIEDVDEPPVFSRSSYLFEVHEDIEVGTIIGTVMARDPDSISSPIRFSLDRHTDLDRIFNIHSGNGSLYTSKPLDRELSQWHNLTVIAAEINNPKETTRVAVFVRILDVNDNAPQFAVFYDTFVCENARPGQLIQTISAVDKDDPLGGQKFFFSLAAVNPNFTVQDNEDNTARILTRKNGFNRHEISTYLLPVVISDNDYPIQSSTGTLTIRVCACDSQGNMQSCSAEALLLPAGLSTGALIAILLCIIILLVIVVLFAALKRQRKKEPLILSKEDIRDNIVSYNDEGGGEEDTQAFDIGTLRNPAAIEEKKLRRDIIPETLFIPRRTPTAPDNTDVRDFINERLKEHDLDPTAPPYDSLATYAYEGNDSIAESLSSLESGTTEGDQNYDYLREWGPRFNKLAEMYGGGESDKDS

SEQ ID NO: 1038 - protein, 171 aa, Homo sapiens
MSLCEWTLPLPTRVSLSSHPSHQSHSHLLVWLFGECRPGQGHRLGHESSAYCPGQMQIPCHGIPQKVLFFRWGKSVGIMLTELEKALNSIIDVYHKYSLIKGNFHAVYRDDLKKLLETECPQYIRKKGADVWFKELDINTDGAVNFQEFLILVIKMGVAAHKKSHEESHKE

SEQ ID NO: 1039 - protein, 417 aa, Homo sapiens
MYEGIRCLLKALLGFVSLAIGTLYCPRQYRPFPGSLGIEAINVPEPIPDSYYRDMATWPTHAPSVEEGGQGRFGNQADHFLGSLAFAKLLNRTLAVPPWIEYQHHKPPFTNLHVSYQKYFKLEPLQAYHRVISLEDFMEKLAPTHWPPEKRVAYCFEVAAQRSPDKKTCPMKEGNPFGPFWDQFHVSFNKSELFTGISFSASYREQWSQRFSPKEHPVLALPGAPAQFPVLEEHRPLQKYMVWSDEMVKTGEAQIHAHLVRPYVGIHLRIGSDWKNACAMLKDGTAGSHFMASPQCVGYSRSTAAPLTMTMCLPDLKEIQRAVKLWVRSLDAQSVYVATDSESYVPELQQLFKGKVKVVSLKPEVAQVDLYILGQADHFIGNCVSSFTAFVKRERDLQGRPSSFFGMDRPPKLRDEF

SEQ ID NO: 1040 - protein, 228 aa, Homo sapiens
MAGESFMATAPFVQIGRFFLSSGLIDKVDNFKSLSLSKLEDPHVDIIRRGDFFYHSENPKYPEVGDLRVSFSYAGLSGDDPDLGPAHVVTVIARQRGDQLVPFSTKSGDTLLLLHHGDFSAEEVFHRELRSNSMKTWGLRAAGWMAMFMGLNLMTRILYTLVDWFPVFRDLVNIGLKAFAFCVATSLTLLTVAAGWLFYRPLWALLIAGLALVPILVARTRVPAKKLE

SEQ ID NO: 1041 - protein, 183 aa, Homo sapiens
MTAQGGLVANRGRRFKWAIELSGPGGGSRGRSDRGSGQGDSLYPVGYLDKQVPDTSVQETDRILVEKRCWDIALGPLKQIPMNLFIMYMAGNTISIFPTMMVCMMAWRPIQALMAISATFKMLESSSQKFLQGLVYLIGNLMGLALAVYKCQSMGLLPTHASDWLAFIEPPERMEFSGGGLLL

SEQ ID NO: 1042 - protein, 308 aa, Homo sapiens
MASSNTVLMRLVASAYSIAQKAGMIVRRVIAEGDLGIVEKTCATDLQTKADRLAQMSICSSLARKFPKLTIIGEEDLPSEEVDQELIEDSQWEEILKQPCPSQYSAIKEEDLVVWVDPLDGTKEYTEGLLDNVTVLIGIAYEGKAIAGVINQPYYNYEAGPDAVLGRTIWGVLGLGAFGFQLKEVPAGKHIITTTRSHSNKLVTDCVAAMNPDAVLRVGGAGNKIIQLIEGKASAYVFASPGCKKWDTCAPEVILHAVGGKLTDIHGNVLQYHKDVKHMNSAGVLATLRNYDYYASRVPESIKNALVP

SEQ ID NO: 1043 - protein, 381 aa, Homo sapiens
MRSHTITMTTTSVSSWPYSSHRMRFITNHSDQPPQNFSATPNVTTCPMDEKLLSTVLTTSYSVIFIVGLVGNIIALYVFLGIHRKRNSIQIYLLNVAIADLLLIFCLPFRIMYHINQNKWTLGVILCKVVGTLFYMNMYISIILLGFISLDRYIKINRSIQQRKAITTKQSIYVCCIVWMLALGGFLTMIILTLKKGGHNSTMCFHYRDKHNAKGEAIFNFILVVMFWLIFLLIILSYIKIGKNLLRISKRRSKFPNSGKYATTARNSFIVLIIFTICFVPYHAFRFIYISSQLNVSSCYWKEIVHKTNEIMLVLSSFNSCLDPVMYFLMSSNIRKIMCQLLFRRFQGEPSRSESTSEFKPGYSLHDTSVAVKIQSSSKST

SEQ ID NO: 1044 - protein, 352 aa, Homo sapiens
MRSLGALLLLLSACLAVSAGPVPTPPDNIQVQENFNISRIYGKWYNLAIGSTCPWLKKIMDRMTVSTLVLGEGATEAEISMTSTRWRKGVCEETSGAYEKTDTDGKFLYHKSKWNITMESYVVHTNYDEYAIFLTKKFSRHHGPTITAKLYGRAPQLRETLLQDFRVVAQGVGIPEDSIFTMADRGECVPGEQEPEPILIPRVRRAVLPQEEEGSGGGQLVTEVTKKEDSCQLGYSAGPCMGMTSRYFYNGTSMACETFQYGGCMGNGNNFVTEKECLQTCRTVAACNLPIVRGPCRAFIQLWAFDAVKGKCVLFPYGGCQGNGNKFYSEKECREYCGVPGDGDEELLRFSN

SEQ ID NO: 1045 - protein, 102 aa, Homo sapiens
MALLKANKDLISAGLKEFSVLLNQQVFNDPLVSEEDMVTVVEDWMNFYINYYRQQVTGEPQERDKALQELRQELNTLANPFLAKYRDFLKSHELPSHPPPSS

SEQ ID NO: 1046 - protein, 113 aa, Homo sapiens
MSASVVSVISRFLEEYLSSTPQRLKLLDAYLLYILLTGALQFGYCLLVGTFPFNSFLSGFISCVGSFILAVCLRIQINPQNKADFQGISPERAFADFLFASTILHLVVMNFVG

SEQ ID NO: 1047 - protein, 309 aa, Homo sapiens
MDPTTAALEKEHEAITKVKYVDKIHIGNYEIDAWYFSPFPEDYGKQPKLWLCEYCLKYMKYEKSYRFHLGQCQWRQPPGKEIYRKSNISVYEVDGKDHKIYCQNLCLLAKLFLDHKTLYFDVEPFVFYILTEVDRQGAHIVGYFSKEKESPDGNNVACILTLPPYQRRGYGKFLIAFSYELSKLESTVGSPEKPLSDLGKLSYRSYWSWVLLEILRDFRGTLSIKDLSQMTSITQNDIISTLQSLNMVKYWKGQHVICVTPKLVEEHLKSAQYKKPPITGGWGAAVCRGRWGSVSIWTGRSQGLLIAVT

SEQ ID NO: 1048 - protein, 299 aa, Homo sapiens
MDPTTAALEKEHEAITKVKYVDKIHIGNYEIDAWYFSPFPEDYGKQPKLWLCEYCLKYMKYEKSYRFHLGQCQWRQPPGKEIYRKSNISVYEVDGKDHKIYCQNLCLLAKLFLDHKTLYFDVEPFVFYILTEVDRQGAHIVGYFSKEKESPDGNNVACILTLPPYQRRGYGKFLIAFSYELSKLESTVGSPEKPLSDLGKLSYRSYWSWVLLEILRVSQMTSITQNDIISTLQSLNMVKYWKGQHVICVTPKLVEEHLKSAQYKKPPITGGWGAAVCRGRWGSVSIWTGRSQGLLIAVT

SEQ ID NO: 1049 - protein, 206 aa, Homo sapiens
MDEDVLTTLKILIIGESGVGKSSLLLRFTDDTFDPELAATIGVDFKVKTISVDGNKAKLAIWDTAGQERFRTLTPSYYRGAQGVILVYDVTRRDTFVKLDNWLNELETYCTRNDIVNMLVGNKIDKENREVDRNEGLKFARKHSMLFIEASAKTCDGVQCAFEELVEKIIQTPGLWESENQNKGVKLSHREEGQGGGACGGYCSVL

SEQ ID NO: 1050 - protein, 66 aa, Homo sapiens [sequence omitted]

SEQ ID NO: 1051 - protein, 194 aa, Homo sapiens
MAASLVGKKIVFVTGNAKKLEEVVQILGDKFPCTLVAQKIDLPEYQGEPDEISIQKCQEAVRQVQGPVLVEDTCLCFNALGGLPGPYIKWFLEKLKPEGLHQLLAGFEDKSAYALCTFALSTGDPSQPVRLFRGRTSGRIVAPRGCQDFGWDPCFQPDGYEQTYAEMPKAEKNAVSHRFRALLELQEYFGSLAA

SEQ ID NO: 1052 - protein, 331 aa, Homo sapiens
MITLNNQDQPVPFNSSHPDEYKIAALVFYSCIFIIGLFVNITALWVFSCTTKKRTTVTIYMMNVALVDLIFIMTLPFRMFYYAKDEWPFGEYFCQILGALTVFYPSIALWLLAFISADRYMAIVQPKYAKELKNTCKAVLACVGVWIMTLTTTTPLLLLYKDPDKDSTPATCLKISDIIYLKAVNVLNLTRLTFFFLIPLFIMIGCYLVIIHNLLHGRTSKLKPKVKEKSIRIIITLLVQVLVCFMPFHICFAFLMLGTGENSYNPWGAFTTFLMNLSTCLDVILYYIVSKQFQARVISVMLYRNYLRSMRRKSFRSGSLRSLSNINSEML

SEQ ID NO: 1053 - protein, 610 aa, Homo sapiens
METAPKPGKDVPPKKDKLQTKRKKPRRYWEEETVPTTAGASPGPPRNKKNRELRPQRPKNAYILKKSRISKKPQVPKKPREWKNPESQRGLSGAQDPFPGPAPVPVEVVQKFCRIDKSRKLPHSKAKTRSRLEVAEAEEEETSIKAARSELLLAEEPGFLEGEDGEDTAKICQADIVEAVDIASAAKHFDLNLRQFGPYRLNYSRTGRHLAFGGRRGHVAALDWVTKKLMCEINVMEAVRDIRFLHSEALLAVAQNRWLHIYDNQGIELHCIRRCDRVTRLEFLPFHFLLATASETGFLTYLDVSVGKIVAALNARAGRLDVMSQNPYNAVIHLGHSNGTVSLWSPAMKEPLAKILCHRGGVRAVAVDSTGTYMATSGLDHQLKIFDLRGTYQPLSTRTLPHGAGHLAFSQRGLLVAGMGDVVNIWAGQGKASPPSLEQPYLTHRLSGPVHGLQFCPFEDVLGVGHTGGITSMLVPGAGEPNFDGLESNPYRSRKQRQEWEVKALLEKVPAELICLDPRALAEVDVISLEQGKKEQIERLGYDPQAKAPFQPKPKQKGRSSTASLVKRKRKVMDEEHRDKVRQSLQQQHHKEAKAKPTGARPSALDRFVR

SEQ ID NO: 1054 - protein, 670 aa, Homo sapiens
MPAPVGRRSPPSPRSSMAAVALRDSAQGMTFEDVAIYFSQEEWELLDESQRFLYCDVMLENFAHVTSLGYCHGMENEAIASEQSVSIQVRTSKGNTPTQKTHLSEIKMCVPVLKDILPAAEHQTTSPVQKSYLGSTSMRGFCFSADLHQHQKHYNEEEPWKRKVDEATFVTGCRFHVLNYFTCGEAFPAPTDLLQHEATPSGEEPHSSSSKHIQAFFNAKSYYKWGEYRKASSHKHTLVQHQSVCSEGGLYECSKCEKAFTCKNTLVQHQQIHTGQKMFECSECEESFSKKCHLILHKIIHTGERPYECSDREKAFIHKSEFIHHQRRHTGGVRHECGECRKTFSYKSNLIEHQRVHTGERPYECGECGKSFRQSSSLFRHQRVHSGERPYQCCECGKSFRQIFNLIRHRRVHTGEMPYQCSDCGKSFSCKSELIQHQRIHSGERPYECRECGKSFRQFSNLIRHRSIHTGDRPYECSECEKSFSRKFILIQHQRVHTGERPYECSECGKSFTRKSDLIQHRRIHTGTRPYECSECGKSFRQRSGLIQHRRLHTGERPYECSECGKSFSQSASLIQHQRVHTGERPYECSECGKSFSQSSSLIQHQRGHTGERPYECSQCGKPFTHKSDLIQHQRVHTGERPYECSECGKSFSRKSNLIRHRRVHTEERP

SEQ ID NO: 1055 - protein, 797 aa, Homo sapiens
MAHRCLRLWGRGGCWPRGLQQLLVPGGVGPGEQPCLRTLYRFVTTQARASRNSLLTDIIAAYQRFCSRPPKGFGKYFPNGKNGKKASEPKEVMGEKKESKPAATTRSSGGGGGGGGKRGGKKDDSHWWSRFQKGDIPWDDKDFRMFFLWTALFWGGVMFYLLLKRSGREITWKDFVNNYLSKGVVDRLEVVNKRFVRVTFTPGKTPVDGQYVWFNIGSVDTFERNLETLQQELGIEGENRVPVVYIAESDGSFLLSMLPTVLIIAFLLYTIRRGPAAIGRTGRGMGGLFSVGETTAKVLKDEIDVKFKDVAGCEEAKLEIMEFVNFLKNPKQYQDLGAKIPKGAILTGPPGTGKTLLAKATAGEANVPFITVSGSEFLEMFVGVGPARVRDLFALARKNAPCILFIDEIDAVGRKRGRGNFGGQSEQENTLNQLLVEMDGFNTTTNVVILAGTNRPDILDPALLRPGRFDRQIFIGPPDIKGRASIFKVHLRPLKLDSTLEKDKLARKLASLTPGFSGADVANVCNEAALIAARHLSDSINQKHFEQAIERVIGGLEKKTQVLQPEEKKTVAYHEAGHAVAGWYLEHADPLLKVSIIPRGKGLGYAQYLPKEQYLYTKEQLLDRMCMTLGGRVSEEIFFGRITTGAQDDLRKVTQSAYAQIVQFGMNEKVGQISFDLPRQGDMVLEKPYSEATARLIDDEVRILINDAYKRTVALLTEKKADVEKVALLLLEKEVLDKNDMVELLGPRPFAEKSTYEEFVEGTGSLDEDTSLPEGLKDWNKEREKEKEEPPGEKVAN

SEQ ID NO: 1056 - protein, 386 aa, Homo sapiens
MSALEKSMHLGRLPSRPPLPGSGGSQSGAKMRMGPGRKRDFSPVPWSQYFESMEDVEVENETGKDTFRVYKSGSEGPVLLLLHGGGHSALSWAVFTAAIISRVQCRIVALDLRSHGETKVKNPEDLSAETMAKDVGNVVEAMYGDLPPPIMLIGHSMGGAIAVHTASSNLVPSLLGLCMIDVVEGTAMDALNSMQNFLRGRPKTFKSLENAIEWSVKSGQIRNLESARVSMVGQVKQCEGITSPEGSKSIVEGIIEEEEEDEEGSESISKRKKEDDMETKKDHPYTWRIELAKTEKYWDGWFRGLSNLFLSCPIPKLLLLAGVDRLDKDLTIGQMQGKFQMQVLPQCGHAVHEDAPDKVAEAVATFLIRHRFAEPIGGFQCVFPGC

SEQ ID NO: 1057 - protein, 55 aa, Homo sapiens
MGRPRDRKELGRGHSPPHLEGPHMLPSGAARWRWLEAPVLVLEPLVLRPAAAPTP

SEQ ID NO: 1058 - protein, 335 aa, Homo sapiens [sequence omitted]

SEQ ID NO: 1059 - protein, 147 aa, Homo sapiens
MGFIFSKSMNESMKNQKEFMLMNARLQLERQLIMQSEMRERQMAMQIAWSREFLKYFGTFFGLAAISLTAGAIKKKKPAFLVPIVPLSFILTYQYDLGYGTLLERMKGEAEDILETEKSKLQLPRGMITFESIEKARKEQSRFFIDK

SEQ ID NO: 1060 - protein, 91 aa, Homo sapiens
MKMLWKLTDNIKYEDCEVSATPARSSVRSQAPSLTLPLLLLSLQPAAKRGWDKLSPAQRPSLGFARRTRGRSCRERTWMLPSLVSEFLHRD

SEQ ID NO: 1061 - protein, 254 aa, Homo sapiens
MISSNTSYLSSRGRMIKWFWDSAEEGYRTYHMDEYDEDKNPSGIINLGTSENKLCFDLLSWRLSQRDMQRVEPSLLQYADWRGHLFLREEVAKFLSFYCKSPVPLRPENVVVLNGGASLFSALATVLCEAGEAFLIPTPYYGAITQHVCLYGNIRLAYVYLDSEVTGLDTRPFQLTVEKLEMALREAHSEGVKVKGLILISPQNPLGDVYSPEELQEYLVFAKRHRLHVIVDEVYMLSVFEKSVGYRSVLSLER

SEQ ID NO: 1062 - protein, 166 aa, Homo sapiens
MAVSTVFSTSSLMLALSRHSLLSPLLSVTSFRRFYRGDSPTDSQKDMIEIPLPPWQERTDESIETKRARLLYESRKRGMLENCILLSLFAKEHLQHMTEKQLNLYDRLINEPSNDWDIYYWATEAKPAPEIFENEVMALLRDFAKNKNKEQRLRAPDLEYLFEKPR

SEQ ID NO: 1063 - protein, 290 aa, Homo sapiens
MRNVKKQDPLVQCGGILHSLWPWILMDDSLMQISLQLLCVYTANFPNGCSSLCWSSCGQHPVQATHRGAVSNSLMLCILKLASQMPLENTTVQQMVFMLLSNLALSHDCKGVIQKSNFLQNFLSLALPKGGNKHLSNLTILWLKLLLNISSGEDGQQMILRLDGCLDLLTEMSKYKHKSSPLLPLLIFHNVCFSPANKPKILANEKVITVLAACLESENQNAQRIGAAALWALIYNYQKAKTALKSPSVKRRVDEAYSLAKKTFPNSEANPLNAYYLKCLENLVQLLNSS

SEQ ID NO: 1064 - protein, 400 aa, Homo sapiens
MGKNPVRPPRALPPVPSQDDIPLSRPKKKKPRTKNTPASASLEGLAQTAGRRPSEGNEPSTKELKEHPEAPVQRRQKKTRLPLELETSSTQKKSSSSSLLRNENGIDAEPAEEAVIQKPRRKTKKTQPAELQYANELGVEDEDIITDEQTTVEQQSVFTAPTGISQPVGKVFVEKSRRFQAADRSELIKTTENIDVSMDVKPSWTTRDVALTVHRAFRMIGLFSHGFLAGCAVWNIVVIYVLAGDQLSNLSNLLQQYKTLAYPFQSLLYLLLALSTISAFDRIDFAKISVAIRNFLALDPTALASFLYFTALILSLSQQMTSDRIHLYTPSSVNGSLWEAGIEEQILQPWIVVNLVVALLVGLSWLFLSYRPGMDLSEELMFSSEVEEYPDKEKEIKASS

SEQ ID NO: 1065 - protein, 367 aa, Homo sapiens
MSLHGASGGHERSRDRRRSSDRSRDSSHERTESQLTPCIRNVTSPTRQHHVEREKDHSSSRPSSPRPQKASPNGSISSAGNSSRNSSQSSSDGSCKTAGEMVFVYENAKEGARNIRTSERVTLIVDNTRFVVDPSIFTAQPNTMLGRMFGSGREHNFTRPNEKGEYEVAEGIGSTVFRAILDYYKTGIIRCPDGISIPELREACDYLCISFEYSTIKCRDLSALMHELSNDGARRQFEFYLEEMILPLMVASAQSGERECHIVVLTDDDVVDWDEEYPPQMGEEYSQIIYSTKLYRFFKYIENRDVAKSVLKERGLKKIRLGIEGYPTYKEKVKKRPGGAPRSDLQLCPKTLYSNVLGRRKKERVGM

SEQ ID NO: 1066 - protein, 634 aa, Homo sapiens
MQGGNSGVRKREEEGDGAGAVAAPPAIDFPAEGPDPEYDESDVPAEIQVLKEPLQQPTFPFAVANQLLLVSLLEHLSHVHEPNPLRSRQVFKLLCQTFIKMGLLSSFTCSDEFSSLRLHHNRAITHLMRSAKERVRQDPCEDISRIQKIRSREVALEAQTSRYLNEFEELAILGKGGYGRVYKVVFHVRNKLDGQYYAIKKILIKGATKTVCMKVLREVKVLAGLQHPNIVGYHTAWIEHVHVIQPRADRAAIELPSLEVLSDQEEDREQCGVKNDESSSSSIIFAEPTPEKEKRFGESDTENQNNKSVKYTTNLVIRESGELESTLELQENGLAGLSASSIVEQQLPLRRNSHLEESFTSTEESSEENVNFLGQTEAQYHLMLHIQMQLCELSLWDWIVERNKRGREYVDESACPYVMANVATKIFQELVEGVFYIHNMGIVHRDLKPRNIFLHGPDQQVKIGDFGLACTDILQKNTDWTNRNGKRTPTHTSRVGTCLYASPEQLEGSEYDAKSDMYSLGVVLLELFQPFGTEMERAEVLTGLRTGQLPESLRKRCPVQAKYIQHLTRRNSSQRPSAIQLLQSELFQNSGNVNLTLQMKIIEQEKEIAELKKQLNLLSQDKGVRDDGKDGGVG

SEQ ID NO: 1067 - protein, 319 aa, Homo sapiens
MKIELSMQPWNPGYSSEGATAQETYTCPKMIEMEQAEAQLAELDLLASMFPGENELIVNDQLAVAELKDCIEKKTMEGRSSKVYFTINMNLDVSDEKMAMFSLACILPFKYPAVLPEITVRSVLLSRSQQTQLNTDLTAFLQKHCHGDVCILNATEWVREHASGYVSRDTSSSPTTGSTVQSVDLIFTRLWIYSHHIYNKCKRKNILEWAKELSLSGFSMPGKPGVVCVEGPQSACEEFWSRLRKLNWKRILIRHREDIPFDGTNDETERQRKFSIFEEKVFSVNGARGNHMDFGQLYQFLNTKGCGDVFQMFFGVEGQ

SEQ ID NO: 1068 - protein, 744 aa, Homo sapiens
MAGRSMQAARCPTDELSLTNCAVVNEKDFQSGQHVIVRTSPNHRYTFTLKTHPSVVPGSIAFSLPQRKWAGLSIGQEIEVSLYTFDKAKQCIGTMTIEIDFLQKKSIDSNPYDTDKMAAEFIQQFNNQAFSVGQQLVFSFNEKLFGLLVKDIEAMDPSILKGEPATGKRQKIEVGLVVGNSQVAFEKAENSSLNLIGKAKTKENRQSIINPDWNFEKMGIGGLDKEFSDIFRRAFASRVFPPEIVEQMGCKHVKGILLYGPPGCGKTLLARQIGKMLNAREPKVVNGPEILNKYVGESEANIRKLFADAEEEQRRLGANSGLHIIIFDEIDAICKQRGSMAGSTGVHDTVVNQLLSKIDGVEQLNNILVIGMTNRPDLIDEALLRPGRLEVKMEIGLPDEKGRLQILHIHTARMRGHQLLSADVDIKELAVETKNFSGAELEGLVRAAQSTAMNRHIKASTKVEVDMEKAESLQVTRGDFLASLENDIKPAFGTNQEDYASYIMNGIIKWGDPVTRVLDDGELLVQQTKNSDRTPLVSVLLEGPPHSGKTALAAKIAEESNFPFIKICSPDKMIGFSETAKCQAMKKIFDDAYKSQLSCVVVDDIERLLDYVPIGPRFSNLVLQALLVLLKKAPPQGRKLLIIGTTSRKDVLQEMEMLNAFSTTIHVPNIATGEQLLEALELLGNFKDKERTTIAQQVKGKKVWIGIKKLLMLIEMSLQMDPEYRVRKFLALLREEGASPLDFD

SEQ ID NO: 1069 - protein, 290 aa, Homo sapiens
MGDGGAERDRGPARRAESGGGGGRCGDRSGAGDLRADGGGHSPTEVAGTSASSPAGSRESGADSDGQPGPGEADHCRRILVRDAKGTIREIVLPKGLDLDRPKRTRTSFTAEQLYRLEMEFQRCQYVVGRERTELARQLNLSETQVKVWFQNRRTKQKKDQSRDLEKRASSSASEAFATSNILRLLEQGRLLSVPRAPSLLALTPSLPGLPASHRGTSLGDPRNSSPRLNPLSSASASPPLPPPLPAVCFSSAPLLDLPAGYELGSSAFEPYSWLERKVGSASSCKKANT

SEQ ID NO: 1070 - protein, 94 aa, Homo sapiens
MACVISGWALSRGARTWTWATPTGPVHRAQPAIRSLSAEGALTRLKEEKWPGRYILPNHLTPPFLYKHLGSVPPSHWRSPLISHSVNILALNWR

SEQ ID NO: 1071 - protein, 364 aa, Homo sapiens
MLRFLPDLAFSFLLILALGQAVQFQEYVFLQFLGLDKAPSPQKFQPVPYILKKIFQDREAAATTGVSRDLCYVKELGVRGNVLRFLPDQGFFLYPKKISQASSCLQKLLYFNLSAIKEREQLTLAQLGLDLGPNSYYNLGPELELALFLVQEPHVWGQTNPKPGKMFVLRSVPWPQGAVHFNLLDVAKDWNDNPRKNFGLFLEILVKEDRDSGVNFQPEDTCARLRCSLHASLLVVTLNPDQCHPSRKRRAAIPVPKLSCKNLCHRHQLFINFRDLGWHKWIIAPKGFMANYCHGECPFSLTISLNSSNYAFMQALMHAVDPEIPQAVCIPTKLSPISMLYQDNNDNVILRHYEDMVVDECGCG

SEQ ID NO: 1072 - protein, 264 aa, Homo sapiens
MRPLLGLLLVFAGCTFALYLLSTRLPRGRRLGSTEEAGGRSLWFPSDLAELRELSEVLREYRKEHQAYVFLLFCGAYLYKQGFAIPGSSFLNVLAGALFGPWLGLLLCCVLTSVGATCCYLLSSIFGKQLVVSYFPDKVALLQRKVEENRNSLFFFLLFLRLFPMTPNWFLNLSAPILNIPIVQFFFSVLIGLIPYNFICVQTGSILSTLTSLDALFSWDTVFKLLAIAMVALIPGTLIKKFSQKHLQLNETSTANHIHSRKDT

SEQ ID NO: 1073 - protein, 225 aa, Homo sapiens
MSRPRKRLAGTSGSDKGLSGKRTKTENSGEALAKVEDSNPQKTSATKNCLKNLSSHWLMKSEPESRLEKGVDVKFSIEDLKAQPKQTTCWDGVRNYQARNFLRAMKLGEEAFFYHSNCKEPGIAGLMKIVKEAYPDHTQFEKNNPHYDPSSKEDNPKWSMVDVQFVRMMKRFIPLAELKSYHQAHKATGGPLKNMVLFTRQRLSIQPLTQEEFDFVLSLEEKEPS

SEQ ID NO: 1074 - protein, 184 aa, Homo sapiens
MSRPRKRLAGTSGSDKGLSGKRTKTENSGEALAKVEDSNPQKTSATKNCLKNLSSHWLMKSEPESRLEKGVDVKFSIEDLKAQPKQTTCWDGVRNYQARNFLRAMKLGEEAFFYHSNCKEPGIAGLMKIVKEAYPDHTQFEKNNPHYDPSSKEDNPKWSMRLSIQPLTQEEFDFVLSLEEKEPS

SEQ ID NO: 1075 - protein, 311 aa, Homo sapiens
MGSFQLEDFAAGWIGGAASVIVGHPLDTVKTRLQAGVGYGNTLSCIRVVYRRESMFGFFKGMSFPLASIAVYNSVVFGVFSNTQRFLSQHRCGEPEASPPRTLSDLLLASMVAGVVSVGLGGPVDLIKIRLQMQTQPFRDANLGLKSRAVAPAEQPAYQGPVHCITTIVRNEGLAGLYRGASAMLLRDVPGYCLYFIPYVFLSEWITPEACTGPSPCAVWLAGGMAGAISWGTATPMDVVKSRLQADGVYLNKYKGVLDCISQSYQKEGLKVFFRGITVNAVRGFPMSAAMFLGYELSLQAIRGDHAVTSP

SEQ ID NO: 1076 - protein, 419 aa, Homo sapiens
MPARAGAWAETPEPLYQSPRKNSQQCLVRPCFHGVLLLGKGTGGNYTFRLWQGPWRCRRPQPMAQRYDELPHYPGIADGPAALAGFPEAVPAAPGPYGPHRPPQPLPPGLDSDGLKRDKDEIYGHPLFPLLALVFEKCELATCSPRDGAGAGLGTPRGGDVCSSDSFNEDNTAFAKQVCSERPFSSNPELDNLMIQAIQVLRFHLLELEKGKMPIDLVIEDRDGGCREDFEDYPASCPSLPDQNNIWIRDHEDSGSVHLGTPGPSSGGLASQSGDNSSDQGVGLDTSVASPSSGGEDEDLDQEPRRNKKRGIFPKVATNIMRAWLFQHLSHPYPSEEQKKQLAQDTGLTILQVNNWFINARRRIVQPMIDQSNRTGQGAAFSPEGQPIGGYTETEPHVAFRAPASVGMSLNSEGEWHYL

SEQ ID NO: 1077 - protein, 260 aa, Homo sapiens
MVSHPHPPPSPRWGQTPEGLPAASPCGPGPRSCFSSILPTGDSWGMLACLCTVLWHLPAVPALNRTGDPGPGPSIQKTYDPTRYLEHQLRSLAGTYLNYLGPPFNEPDFNPPRLGAETLPRATVDLEVWRSLNDKLRLTQNYEAYSHLLCYLRGLNRQAATAELRRSLAHFCTSLQGLLGSIAGVMAALGYPLPQPLPGTEPTWTPGPAHSDFLQKMDDFWLLKELQTWLWRSAKDFNRLKKKMQPPAAAVTLHLGAHGF

SEQ ID NO: 1078 - protein, 132 aa, Homo sapiens
MYAYMYICTHICICAYRGIHIDVYLYMCIYIHIWIHTYLCVHIYVYVYICTHICMCIHTYVYVYTYMYVYTYICLCVYICLCVHIYLCVYIHMYMCTHICMCIHTYVHMCICVYIHMYTCVYVYTYTCVYMY

SEQ ID NO: 1079 - protein, 248 aa, Homo sapiens
MRGEEEVAPVTLCSLYTYDQGDSLDLLGPIGILQEGRDPGTQGPQEKEKQMPASPMNTDAHLDINFKEGLKKERSYTGQFEANVRDEERQCGCGVVPDSLLMKVLSQRLDQQDCIQKGWVLHGVPRDLDQAHLLNRLGYNPNRVFFLNVPFDSIMERLTLRRIDPVTGERYHLMYKPPPTMEIQARLLQNPKDAEEQVKLKMDLFYRNSADLEQLYGSAITLNGDQDPYTVFEYIESGIINPLPKKIP

SEQ ID NO: 1080 - protein, 387 aa, Homo sapiens
MTSHARVRKLGSSRAAAAGPGAGQEVQTENVTVAEGGVAEITCRLHQYDGSIVVIQNPARQTLFFNGTRALKDERFQLEEFSPRRVRIRLSDARLEDEGGYFCQLYTEDTHHQIATLTVLVAPENPVVEVREQAVEGGEVELSCLVPRSRPAATLRWYRDRKELKGVSSSQENGKVWSVASTVRFRVDRKDDGGIIICEAQNQALPSGHSKQTQYVLDVQYSPTARIHASQAVVREGDTLVLTCAVTGNPRPNQIRWNRGNESLPERAEAVGETLTLPGLVSADNGTYTCEASNKHGHARALYVLVVYDPGAVVEAQTSVPYAIVGGILALLVFLIICVLVGMVWCSVRQKGSYLTHEASGLDEQGEAREAFLNGSDGHKRKEEFFI

SEQ ID NO: 1081 - protein, 749 aa, Homo sapiens
MAAAGSRKRRLAELTVDEFLASGFDSESESESENSPQAETREAREAARSPDKPGGSPSASRRKGRASEHKDQLSRLKDRDPEFYKFLQENDQSLLNFSDSDSSEEEEGPFHSLPDVLEEASEEEDGAEEGEDGDRVPRGLKGKKNSVPVTVAMVERWKQAAKQRLTPKLFHEVVQAFRAAVATTRGDQESAEANKFQVTDSAAFNALVTFCIRDLIGCLQKLLFGKVAKDSSRMLQPSSSPLWGKLRVDIKAYLGSAIQLVSCLSETTVLAAVLRHISVLVPCFLTFPKQCRMLLKRMVVVWSTGEESLRVLAFLVLSRVCRHKKDTFLGPVLKQMYITYVRNCKFTSPGALPFISFMQWTLTELLALEPGVAYQHAFLYIRQLAIHLRNAMTTRKKETYQSVYNWQYVHCLFLWCRVLSTAGPSEALQPLVYPLAQVIIGCIKLIPTARFYPLRMHCIRALTLLSGSSGAFIPVLPFILEMFQQVDFNRKPGRMSSKPINFSVILKLSNVNLQEKAYRDGLVEQLYDLTLEYLHSQAHCIGFPELVLPVVLQLKSFLRECKVANYCRQVQQLLGKVQENSAYICSRRQRVSFGVSEQQAVEAWEKLTREEGTPLTLYYSHWRKLRDREIQLEISGKERLEDLNFPEIKRRKMADRKDEDRKQFKDLFDLNSSEEDDTEGFSERGILRPLSTRHGVEDDEEDEEEGEEDSSNSEDGDPDAEAGLAPGELQQLAQGPEDELEDLQLSEDD

SEQ ID NO: 1082 - protein, 154 aa, Homo sapiens
HLDRYIKSPGSGSSTPAPPSHLLLYLIHPQSTRTMGCCGCSGGCGSGCGGCGSSCGGCGSGCGGCGSGRGGCGSGCGGCSSSCGGCGSRCYVPVCCCKPVCSWVPACSCTSCGSCGGSKGGCGSCGGSKGGCGSCGCSQSSCCKPCCCSSGCGS

SEQ ID NO: 1083 - protein, 1339 aa, Homo sapiens
AGIFELVELVGNGTYGQVYKGRHVKTGQLAAIKVMDVTGDEEEEIKQEINMLKKYSHHRNIATYYGAFIKKNPPGMDDQLWLVMEFCGAGSVTDLIKNTKGYTLKEEWIAYICREILRGLSHLHQHKVIHRDIKGQNVLLTENAEVKLVDFGVSAQLDRTVGRRNTFIGTPYWMAPEVIACDENPDATYDFKSDLWSLGITAIEMAEGAPPLCDMHPMRALFLIPRNPAPRLKSKKWSKKFQSFIESCLVKNHSQRPATEQLMKHPFIRDQPNERQVRIQLKDHIDRTKKKRGEKDETEYEYSGSEEEEEENDSGEPSSILNLPGESTLRRDFLRLQLANKERSEALRRQQLEQQQRENEEHKRQLLAERQKRIEEQKEQRRRLEEQQRREKELRKQQEREQRRHYEEQMRREEERRRAEHEQEYIRRQLEEEQRQLEILQQQLLHEQALLLEYKRKQLEEQRQAERLQRQLKQERDYLVSLQHQRQEQRPVEKKPLYHYKEGMSPSEKPAWAKEVEERSRLNRQSSPAMPHKVANRISDPNLPPRSESFSISGVQPARTPPMLRPVDPQIPHLVAVKSQGPALTASQSVHEQPTKGLSGFQEALNVTSHRVEMPRQNSDPTSENPPLPTRIEKFDRSSWLRQKEDIPPKVPQRTTSISPALARKNSPGNGSALGPRLGSQPIRASNPDLRRTEPILESPLQRTSSGSSSSSSTPSSQPSSQGGSQPGSQAGSSERTRVRANSKSEGSPVLPHEPAKVKPEESRDITRPSRPASYKKAIDEDLTALAKELRELRIEETNRPMKKVTDYSSSSEESESSEEEEEDGESETHDGTVAVSDIPRLIPTGAPGSNEQYNVGMVGTHGLETSHADSFSGSISREGTLMIRETSGEKKRSGHSDSNGFAGHINLPDLVQQSHSPAGTPTEGLGRVSTHSQEMDSGTEYGMGSSTKASFTPFVDPRVYQTSPTDEDEEDEESSAAALFTSELLRQEQAKLNEARKISVVNVNPTNIRPHSDTPEIRKYKKRFNSEILCAALWGVNLLVGTENGLMLLDRSGQGKVYNLINRRRFQQMDVLEGLNVLVTISGKKNKLRVYYLSWLRNRILHNDPEVEKKQGWITVGDLEGCIHYKVVKYERIKFLVIALKNAVEIYAWAPKPYHKFMAFKSFADLQHKPLLVDLTVEEGQRLKVIFGSHTGFHVIDVDSGNSYDIYIPSHIQGNITPHAIVILPKTDGMEMLVCYEDEGVYVNTYGRITKDVVLQWGEMPTSVAYIHSNQIMGWGEKAIEIRSVETGHLDGVFMHKRAQRLKFLCERNDKVFFASVRSGGSSQVFFMTLNRNSMMNW

SEQ ID NO: 1084 - protein, 205 aa, Homo sapiens
MGQVECGGQKLGNQLEDDSEPAEGKVYSSDEEKLEASAGDPAGSEQEEEGSGGDSEDDGFLDSSAGGPGALLGPKPKLKGSLGTGAEEGAPVTAGVTAPGGKSRRRRTAFTSEQLLELEKEFHCKKYLSLTERSQIAHALKLSEVQVKIWFQNRRAKWKRIKAGNVSSRSGEPVRNPKIVVPIPVHVNRFAVRSQHQQMEQGARP

SEQ ID NO: 1085 - protein, 471 aa, Homo sapiens
MKGNYESLISMDYAINQPDVLSQIQPEGEHNTEDQAGPEESEIPTDPSEEPGISTSDILSWIKQEEEPQVGAPPESKESDVYKSTYADEELVIKAEGLARSSLCPEVPVPFSSPPAAAKDAFSDVAFKSQQSTSMTPFGRPATDLPEASEGQVTFTQLGSYPLPPPVGEQVFSCHHCGKNLSQDMLLTHQCSHATEHPLPCAQCPKHFTPQADLSSTSQDHASETPPTCPHCARTFTHPSRLTYHLRVHNSTERPFPCPDCPKRFADQARLTSHRRAHASERPFRCAQCGRSFSLKISLLLHQRGHAQERPFSCPQCGIDFNGHSALIRHQMIHTGERPYPCTDCSKSFMRKEHLLNHRRLHTGERPFSCPHCGKSFIRKHHLMKHQRIHTGERPYPCSYCGRSFRYKQTLKDHLRSGHNGGCGGDSDPSGQPPNPPGPLITGLETSGLGVNTEGLETNQWYGEGSGGGVL

SEQ ID NO: 1086 - protein, 736 aa, Homo sapiens
SCGHKSAYGSYTGLQLFWEDGQELLQHQQLQDLRLCVHLRPQSEKVELSLWTLFVVGKGEPSAVREKLGKAGFAAASGPGGRPGAERASTVLNILHLTAESRWEPNACNRVSSSPAGVGPLDLPVGPLLYFFAPWARASFLCHAFQRPLTGIGLNTVRFTSEFPLHSKDPTAHKLLFTGNYLCKLHPRPRHAPQGSLSDFCHGTEGKDLPSEHNVSVEGVAQDRSPEATLCPQKTCPCDICGLRLKDILHLAEHQTTHPRQKPFVCEAYVKGSEFSANLPQKQVQQNVHNPIRTEEGQASPVKTCRDHTSDQLSTCREGGKDFVATAGFLQCEVTPSDGEPHEATEGVVDFHIALRHNKCCESGDAFNNKSTLVQHQRIHSRERPYECSKCGIFFTYAADLTQHQKVHNRGKPYECCECGKFFSQHSSLVKHRRVHTGESPHVCGDCGKFFSRSSNLIQHKRVHTGEKPYECSDCGKFFSQRSNLIHHKRVHTGRSAHECSECGKSFNCNSSLIKHWRVHTGERPYKCNECGKFFSHIASLIQHQIVHTGERPHGCGECGKAFIRSSDLMKHQRVHTGERPYECNECGKLFSQSSSLNSHRRLHTGERPYQCSECGKFFNQSSSLNNHRRLHTGERPYECSECGKTFRQRSNLRQHLKVHKPDRPYECSECGKAFNQRPTLIRHQKIHIRERSMENVLLPCSQHTPEISSENRPYQGAVNYKLKLVHPSTHPGEVP

SEQ ID NO: 1087 - protein, 862 aa, Homo sapiens
MGNREMEELIPLVNRLQDAFSALGQSCLLELPQIAVVGGQSAGKSSVLENFVGRDFLPRGSGIVTRRPLVLQLVTSKAEYAEFLHCKGKKFTDFDEVRLEIEAETDRVTGMNKGISSIPINLRVYSPHVLNLTLIDLPGITKVPVGDQPPDIEYQIRMIMQFITRENCLILAVTPANTDLANSDALKLAKEVDPQGLRTIGVITKLDLMDEGTDARDVLENKLLPLRRGYVGVVNRSQKDIDGKKDIKAAMLAERKFFLSHPAYRHIADRMGTPHLQKVLNQQLTNHIRDTLPNFRNKLQGQLLSIEHEVEAYKNFKPEDPTRKTKALLQMVQQFAVDFEKRIEGSGDQVDTLELSGGAKINRIFHERFPFEIVKMEFNEKELRREISYAIKNIHGIRTGLFTPDMAFEAIVKKQIVKLKGPSLKSVDLVIQELINTVKKCTKKLANFPRLCEETERIVANHIREREGKTKDQVLLLIDIQVSYINTNHEDFIGFANAQQRSSQVHKKTTVGNQVIRKGWLTISNIGIMKGGSKGYWFVLTAESLSWYKDDEEKEKKYMLPLDNLKVRDVEKSFMSSKHIFALFNTEQRNVYKDYRFLELACDSQEDVDSWKASLLRAGVYPDKSVGNNKAENDENGQAENFSMDPQLERQVETIRNLVDSYMSIINKCIRDLIPKTIMHLMINNVKDFINSELLAQLYSSEDQNTLMEESAEQAQRRDEMLRMYQALKEALGIIGDISTATVSTPAPPPVDDSWIQHSRRSPPPSPTTQRRPTLSAPLARPTSGRGPAPAIPSPGPHSGAPPVPFRPGPLPPFPSSSDSFGAPPQVPSRPTRAPPSVPSRRPPPSPTRPTIIRPLESSLLD

SEQ ID NO: 1088 - protein, 292 aa, Homo sapiens
MPRNRHEATGRTPRSPSACSGVGVLPALRMRGNLALVGVLISLAFLSLLPSGHPQPAGDDACSVQILVPGLKGDAGEKGDKGAPGRPGRVGPTGEKGDMGDKGQKGSVGRHGKIGPIGSKGEKGDSGDIGPPGPNGEPGLPCECSQLRKAIGEMDNQVSQLTSELKFIKNAVAGVRETESKIYLLVKEEKRYADAQLSCQGRGGTLSMPKDEAANGLMAAYLAQAGLARVFIGINDLEKEGAFVYSDHSPMRTFNKWRSGEPNNAYDEEDCVEMVASGGWNDVACHTTMYFM

SEQ ID NO: 1089 - protein, 268 aa, Homo sapiens
MPRNRHEATGRTPRSPSACSGVGVLPALRMRGNLALVGVLISLAFLSLLPSGHPQPAGDDACSVQILVPGLKGDAGEKGDKGAPGRPGRVGPTGEKGEKGDSGDIGPPGPNGEPGLPCECSQLRKAIGEMDNQVSQLTSELKFIKNAVAGVRETESKIYLLVKEEKRYADAQLSCQGRGGTLSMPKDEAANGLMAAYLAQAGLARVFIGINDLEKEGAFVYSDHSPMRTFNKWRSGEPNNAYDEEDCVEMVASGGWNDVACHTTMYFM

SEQ ID NO: 1090 - protein, 242 aa, Homo sapiens
MKVLQNAPDEILVVASSMLCNLLLEFSPSKEPILESGAVELLCGLTQSENPALRVNGIWALMNMAFQAEQKIKADILRSLSTEQLFRLLSDSDLNVLMKTLGLLRNLLSTRPHIDKIMSTHGKQIMQAVTLILEGEHNIEVKEQTLCILANIADGTTAKDLIMTNDDILQKIKYYMGHSHVKLQLAAMFCISNLIWNEEEGSQERQDKLRDMGIVDILHKLSQSPDSNLCDKAKMALQQYLA

SEQ ID NO: 1091 - protein, 11 aa, Homo sapiens
SCVKILLEHNA

SEQ ID NO: 1092 - protein, 61 aa, Homo sapiens
MDPNCSCAAGDSCTCAGSCKCKECKCTSCKKSCCSCCPVGCAKCAQGCICKGASDKCSCCA

SEQ ID NO: 1093 - protein, 85 aa, Homo sapiens
MASDLDFSPPEVPEPTFLENLLRYGLFLGAIFQLICVLAIIVPIPKSHEAEAEPSEPRSAEVTRKPKAAVPSVNKRPKKETKKKR

SEQ ID NO: 1094 - protein, 132 aa, Homo sapiens
MCILRRHTDISQSVSNGLIAIKFGSFTYATTEKVRRSIYSCLDAQFYDDETVTVVLKDTVGREGRDRLLVQLPLSLVYNSEDSAEYQFTGTYSTRLDEQCSAIPTRTMHFEKHWRLLESMKAQYVAGNGFRK

SEQ ID NO: 1095 - protein, 260 aa, Homo sapiens
FAYQSSEVDWCESNFQYSELVAEFYNTFSNIPFFIFGPLMMLLMHPYAQKRSRYIYVVWVLFMIIGLFSMYFHMTLSFLGQLLDEIAILWLLGSGYSIWMPRCYFPSFLGGNRSQFIRLVFITTVVSTLLSFLRPTVNAYALNSIALHILYIVCQEYRKTSNKELRHLIEVSVVLWAVALTSWISDRLLCSFWQRIHFFYLHSIWHVLISITFPYGMVTMALVDANYEMPGETLKVRYWPRDSWPVGLPYVEIRGDDKDC

SEQ ID NO: 1096 - protein, 196 aa, Homo sapiens
MADGQMPFSCHYPSRLRRDPFRDSPLSSRLLDDGFGMDPFPDDLTASWPDWALPRLSSAWPGTLRSGMVPRGPTATARFGVPAEGRTPPPFPGEPWKVCVNVHSFKPEELMVKTKDGYVEVSGKHEEKQQEGGIVSKNFTKKIQLPAEVDPVTVFASLSPEGLLIIEAPQVPPYSTFGESSFNNELPQDSQEVTCT

SEQ ID NO: 1097 - protein, 961 aa, Homo sapiens
MDPMSLESLLSDDLVAFEHQWTSFFANFDTEIPFLLELSESQAGECGGARNSTGHQLIDVGIIIHIPNRQPFVLFGNHSTRENLNAGNFNFPSEGHLVRSTGPGGSFAKHMVAQCVSPKGPLACSRTYFFGATHVPYLGGDSKLPKKTEQIRLLSQIYAAVIEAVLAGIACYAKTSSLTKAKEVAEQTLGSGLDSFELIPFKAALRSKMTFHIHAVNNQGRIVPLDSEDSLSFVKTACMAVYDIPDLLGGNGCLGSVVFSESFLTSQILVKEKDGTVTTETSSVVLTAAVPRFCSWLVEDNEVKLSEKTQQAVRGDESFLGTYLTGGEGAYLYSSNLQSWPEEGNVHFFSSGLLFSHCRHGSIIISKDHMNSISFYDGDSTSTVAALLIDFKSSLLPHLPVHFHGSSNFLMIALFPKSKIYQAFYSEVFSLWKQQDNSGISLKVIQEDGLSVEQKRLHSSAQKLFSALSQPAGEKRSSLKLLSAKLPELDWFLQHFAISSISQEPVMRTHLPVLLQQAEINTTHRIESDKVIISIVTGLPGCHASELCAFLVTLHKECGRWMVYRQIMDSSECFHAAHFQRYLSSALEAQQNRSARQSAYIRKKTRLLVVLQGYTDVIDVVQALQTHPDSNVKASFTIGAITACVEPMSCYMEHRFLFPKCLDQCSQGLVSNVVFTSHTTEQRHPLLVQLQSLIRAANPAAAFILAENGIVTRNEDIELILSENSFSSPEMLRSRYLMYPGWYEGKLNAGSVYPLMVQICVWFGRPLEKTRFVAKCKAIQSSIKPSPFSGNIYHILGKVKFSDSERTMEVCYNTLANSLSIMPVLEGPTPPPDSKSVSQDSSGQQECYLVFIGCSLKEDSIKDWLRQSAKQKPQRKALKTRGMLTQQEIRSIHVKRHLEPLPAGYFYNGTQFVNFFGDKTDFHPLMDQFMNDYVEEANREIEKYNQELEQQEYHDLFELKP

SEQ ID NO: 1098 - protein, 127 aa, Homo sapiens [sequence omitted]

SEQ ID NO: 1099 - protein, 325 aa, Homo sapiens
MSLLRSLRVFLVARTGSYPAGSLLRQSPQPRHTFYAGPRLSASASSKELLMKLRRKTGYSFVNCKKALETCGGDLKQAEIWLHKEAQKEGWSKAAKLQGRKTKEGLIGLLQEGNTTVLVEVNCETDFVSRNLKFQLLVQQVALGTMMHCQTLKDQPSAYSKGFLNSSELSGLPAGPDREGSLKDQLALAIGKLGENMILKRAAWVKVPSGFYVGSYVHGAMQSPSLHKLVLGKYGALVICETSEQKTNLEDVGRRLGQHVVGMAPLSVGSLDDEPGGEAETKMLSQPYLLDPSITLGQYVQPQGVSVVDFVRFECGEGEEAAETE

SEQ ID NO: 1100 - protein, 408 aa, Homo sapiens [sequence omitted]

SEQ ID NO: 1101 - protein, 178 aa, Homo sapiens
MPKAKGKTRRQKFGYSVNRKRLNRNARRKAAPRIECSHIRHAWDHAKSVRQNLAEMGLAVDPNRAVPLRKRKVKAMEVDIEERPKELVRKPYVLNDLEAEASLPEKKGNTLSRDLIDYVRYMVENHGEDYKAMARDEKNYYQDTPKQIRSKINVYKRFYPAEWQDFLDSLQKRKMEVE

SEQ ID NO: 1102 - protein, 527 aa, Homo sapiens
MADSRDPASDQMQHWKEQRAAQKADVLTTGAGNPVGDKLNVITVGPRGPLLVQDVVFTDEMAHFDRERIPERVVHAKGAGAFGYFEVTHDITKYSKAKVFEHIGKKTPIAVRFSTVAGESGSADTVRDPRGFAVKFYTEDGNWDLVGNNTPIFFIRDPILFPSFIHSQKRNPQTHLKDPDMVWDFWSLRPESLHQVSFLFSDRGIPDGHRHMNGYGSHTFKLVNANGEAVYCKFHYKTDQGIKNLSVEDAARLSQEDPDYGIRDLFNAIATGKYPSWTFYIQVMTFNQAETFPFNPFDLTKVWPHKDYPLIPVGKLVLNRNPVNYFAEVEQIAFDPSNMPPGIEASPDKMLQGRLFAYPDTHRHRLGPNYLHIPVNCPYRARVANYQRDGPMCMQDNQGGAPNYYPNSFGAPEQQPSALEHSIQYSGEVRRFNTANDDNVTQVRAFYVNVLNEEQRKRLCENIAGHLKDAQIFIQKKAVKNFTEVHPDYGSHIQALLDKYNAEKPKNAIHTFVQSGSHLAAREKANL

SEQ ID NO: 1103 - protein, 329 aa, Homo sapiens
MTGNAGEWCLMESDPGVFTELIKGFGCRGAQVEEIWSLEPENFEKLKPVHGLIFLFKWQPGEEPAGSVVQDSRLDTIFFAKQVINNACATQAIVSVLLNCTHQDVHLGETLSEFKEFSQSFDAAMKGLALSNSDVIRQVHNSFARQQMFEFDTKTSAKEEDAFHFVSYVPVNGRLYELDGLREGPIDLGACNQDDWISAVRPVIEKRIQKYSEGEIRFNLMAIVSDRKMIYEQKIAELQRQLAEEEPMDTDQGNSMLSAIQSEVAKNQMLIEEEVQKLKRYKIENIRRKHNYLPFIMELLKTLAEHQQLIPLVEKAKEKQNAKKAQETK

SEQ ID NO: 1104 - protein, 749 aa, Homo sapiens [sequence omitted]

SEQ ID NO: 1105 - protein, 757 aa, Homo sapiens
MPALPLDQLQITHKDPKTGKLRTSPALHPEQKADRYFVLYKPPPKDNIPALVEEYLERATFVANDLDWLLALPHDKFWCQVIFDETLQKCLDSYLRYVPRKFDEGVASAPEVVDMQKRLHRSVFLTFLRMSTHKESKDHFISPSAFGEILYNNFLFDIPKILDLCVLFGKGNSPLLQKMIGNIFTQQPSYYSDLDETLPTILQVFSNILQHCGLQGDGANTTPQKLEERGRLTPSDMPLLELKDIVLYLCDTCTTLWAFLDIFPLACQTFQKHDFCYRLASFYEAAIPEMESAIKKRRLEDSKLLGDLWQRLSHSRKKLMEIFHIILNQICLLPILESSCDNIQGFIEEFLQIFSSLLQEKRFLRDYDALFPVAEDISLLQQASSVLDETRTAYILQAVESAWEGVDRRKATDAKDPSVIEEPNGEPNGVTVTAEAVSQASSHPENSEEEECMGAAAAVGPAMCGVELDSLISQVKDLLPDLGEGFILACLEYYHYDPEQVINNILEERLAPTLSQLDRNLDREMKPDPTPLLTSRHNVFQNDEFDVFSRDSVDLSRVHKGKSTRKEENTRSLLNDKRAVAAQRQRYEQYSVVVEEVPLQPGESLPYHSVYYEDEYDDTYDGNQVGANDADSDDELISRRPFTIPQVLRTKVPREGQEEDDDDEEDDADEEAPKPDHFVQDPAVLREKAEARRMAFLAKKGYRHDSSTAVAGSPRGHGQSRETTQERRKKEANKATRANHNRRTMADRKRSKGMIPS

SEQ ID NO: 1106 - protein, 68 aa, Homo sapiens
MDPETCPCPSGGSCTCADSCKCEGCKCTSCKKSCCSCCPAECEKCAKDCVCKGGEAAEAEAEKCSCCQ

SEQ ID NO: 1107 - protein, 243 aa, Homo sapiens
MAAIAASEVLVDSAEEGSLAAAAELAAQKREQRLRKFRELHLMRNEARKLNHQEVVEEDKRLKLPANWEAKKARLEWELKEEEKKKECAARGEDYEKVKLLEISAEDAERWERKKKRKNPDLGFSDYAAAQLRQYHRLTKQIKPDMETYERLREKHGEEFFPTSNSLLHGTHVPSTEEIDRMVIDLEKQIEKRDKYSRRRPYNDDADIDYINERNAKFNKKAERFYGKYTAEIKQNLERGTAV

SEQ ID NO: 1108 - protein, 201 aa, Homo sapiens
MAAIAASEVLVDSAEEGSLAAAAELAAQKREQRLRKFRELHLMRECAARGEDYEKVKLLEISAEDAERWERKKKRKNPDLGFSDYAAAQLRQYHRLTKQIKPDMETYERLREKHGEEFFPTSNSLLHGTHVPSTEEIGRMVIDLEKQIEKRDKYSRRRPYNDDADIDYINERNAKFNKKAERFYGKYTAEIKQNLERGTAV

SEQ ID NO: 1109 - protein, 322 aa, Homo sapiens
MSLRPRRACAQLLWHPAAGMASWAKGRSYLAPGLLQGQVAIVTGGATGIGKAIVKELLELGSNVVIASRKLERLKSAADELQANLPPTKQARVIPIQCNIRNEEEVNNLVKSTLDTFGKINFLVNNGGGQFLSPAEHISSKGWHAVLETNLTGTFYMCKAVYSSWMKKHGGSIVNIIVPTKAGFPLAVHSGAARAGVYNLTKSLALEWACSGIRINCVAPGVIYSQTAVENYGSWGQSFFEGSFQKIPAKRIGVPEEVSSVVCFLLSPAASFITGQSVDVDGGRSLYTHSYEVPDHDNWPKGAGDLSVVKKMKETFKEKAKL

SEQ ID NO: 1110 - protein, 1085 aa, Homo sapiens
MGYMGEMEVQGPTRESGQSLPPQKKAYLSHLSTGSGHIEGDWAGRNRKLLKPRSIQKSWFVQFPWLIMNEEQTALFCSACREYPSIRDKRSRLIEGYTGPFKVETLKYHAKSKAHMFCVNALAARDPIWAARFRSIRDPPGDVLASPEPLFTADCPIFYPPGPLGGFDSMAELLPSSRAELEDPGGDGAIPAMYLDCISDLRQKEITDGIHSSSDINILYNDAVESCIQDPSAEGLSEEVPVVFEELPVVFEDVAVYFTREEWGMLDKRQKELYRDVMRMNYELLASLGPAAAKPDLISKLERRAAPWIKDPNGPKWGKGRPPGNKKMVAVREADTQASAADSALLPGSPVEARASCCSSSICEEGDGPRRIKRTYRPRSIQRSWFGQFPWLVIDPKETKLFCSACIERPNLHDKSSRLVRGYTGPFKVETLKYHEVSKAHRLCVNTVEIKEDTPHTALVPEISSDLMANMEHFFNAAYSIAYHSRPLNDFEKILQLLQSTGTVILGKYRNRTACTQFIKYISETLKREILEDVRNSPCVSVLLDSSTDASEQACVGIYIRYFKQMEVKESYITLAPLYSETADGYFETIVSALDELDIPFRKPGWVVGLGTDGSAMLSCRGGLVEKFQEVIPQLLPVHCVAHRLHLAVVDACGSIDLVKKCDRHIRTVFKFYQSSNKRLNELQEGAAPLEQEIIRLKDLNAVRWVASRRRTLHALLVSWPALARHLQRVAEAGGQIGHRAKGMLKLMRGFHFVKFCHFLLDFLSIYRPLSEVCQKEIVLITEVNATLGRAYVALESLRHQAGPKEEEFNASFKDGRLHGICLDKLEVAEQRFQADRERTVLTGIEYLQQRFDADRPPQLKNMEVFDTMAWPSGIELASFGNDDILNLARYFECSLPTGYSEEALLEEWLGLKTIAQHLPFSMLCKNALAQHCRFPLLSKLMAVVVCVPISTSCCERGFKAMNRIRTDERTKLSNEVLNMLMMTAVNGVAVTEYDPQPAIQHWYLTSSGRRFSHVYTCAQVPARSPASARLRKEEMGALYVEEPRTQKPPILPSREAAEVLKDCIMEPPERLLYPHTSQEAPGMS

SEQ ID NO: 1111 - protein, 354 aa, Homo sapiens
MGCTLSAEERAALERSKAIEKNLKEDGISAAKDVKLLLLGAGESGKSTIVKQMKIIHEDGFSGEDVKQYKPVVYSNTIQSLAAIVRAMDTLGIEYGDKERKADAKMVCDVVSRMEDTEPFSAELLSAMMRLWGDSGIQECFNRSREYQLNDSAKYYLDSLDRIGAADYQPTEQDILRTRVKTTGIVETHFTFKNLHFRLFDVGGQRSERKKWIHCFEDVTAIIFCVALSGYDQVLHEDETTNRMHESLKLFDSICNNKWFTDTSIILFLNKKDIFEEKIKKSPLTICFPEYTGPSAFTEAVAYIQAQYESKNKSAHKEIYTHVTCATDTNNIQFVFDAVTDVIIAKNLRGCGLY

SEQ ID NO: 1112 - protein, 318 aa, Homo sapiens
EARTARELTDGVTDGLTMADQPKPISPLKNLLAGGFGGVCLVFVGHPLDTVKVRLQTQPPSLPGQPPMYSGTFDCFRKTLFREGITGLYRGMAAPIIGVTPMFAVCFFGFGLGKKLQQKHPEDVLSYPQLFAAGMLSGVFTTGIMTPGERIKCLLQIQASSGESKYTGTLDCAKKLYQEFGIRGIYKGTVLTLMRDVPASGMYFMTYEWLKNIFTPEGKRVSELSAPRILVAGGIAGIFNWAVAIPPDVLKSRFQTAPPGKYPNGFRDVLRELIRDEGVTSLYKGFNAVMIRAFPANAACFLGFEVAMKFLNWATPNL

SEQ ID NO: 1113 - protein, 666 aa, Homo sapiens
MADMEDLFGSDADSEAERKDSDSGSDSDSDQENAASGSNASGSESDQDERGDSGQPSNKELFGDDSEDEGASHHSGSDNHSERSDNRSEASERSDHEDNDPSDVDQHSGSEAPNDDEDEGHRSDGGSHHSEAEGSEKAHSDDEKWGREDKSDQSDDEKIQNSDDEERAQGSDEDKLQNSDDDEKMQNTDDEERPQLSDDERQQLSEEEKANSDDERPVASDNDDEKQNSDDEEQPQLSDEEKMQNSDDERPQASDEEHRHSDDEEEQDHKSESARGSDSEDEVLRMKRKNAIASDSEADSDTEVPKDNSGTMDLFGGADDISSGSDGEDKPPTPGQPVDENGLPQDQQEEEPIPETRIEVEIPKVNTDLGNDLYFVKLPNFLSVEPRPFDPQYYEDEFEDEEMLDEEGRTRLKLKVENTIRWRIRRDEEGNEIKESNARIVKWSDGSMSLHLGNEVFDVYKAPLQGDHNHLFIRQGTGLQGQAVFKTKLTFRPHSTDSATHRKMTLSLADRCSKTQKIRILPMAGRDPECQRTEMIKKEEERLRASIRRESQQRRMREKQHQRGLSASYLEPDRYDQEEEGEESISLAAIKNRYKGGIREERARIYSSDSDEGSEEDKAQRLLKAKKLTSDEEGEPSGKRKAEDDDKANKKHKKYVISDEEEEDDD

SEQ ID NO: 1114 - protein, 248 aa, Homo sapiens
MATNFLAHEKIWFDKFKYDDAERRFYEQMNGPVAGASRQENGASVILRDIARARENIQKSLAGSSGPGASSGTSGDHVVQELQQAISKLEARLNVLEKSSPGHRATGPQTQHVSPMRQVEPPAKKPATPAEDDEDDDIDLFGSDNEEEDKEAAQFREERLRHYAEKKAKKPALGGQVLHPAWNVKPWDDDDGHGPAGGLCALYPAGRAGLGGFQAGARGLRYPEATDSVCGGGRQGGDRLAGGGDHQV

SEQ ID NO: 1115 - protein, 262 aa, Homo sapiens
MATNFLAHEKIWFDKFKYDDAERRFYEQMNGPVRGASRQENGASVILRDIARARENIQKSLAGSSGPGASSGTSGDHVVQELQQAISKLEARLNVLEKSSPGHRATAPQTQHVSPMRQVEPPAKKPATPAEDDEDDDIDLFGSDNEEEDKEAAQLREERLRQYAEKKAKKPALVAKSSILLDVKPWDDETDMAQLEACVRSIQLDGLVWGASKLVPVGYGIRKLQIQCVVEDDKVGTDLLEEEITKFEEHVQSVDIAAFNKI

SEQ ID NO: 1116 - protein, 1299 aa, Homo sapiens
MAAETQTLNFGPEWLRALSSGGSITSPPLSPALPKYKLADYRYGREEMLALFLKDNKIPSDLLDKEFLPILQEEPLPPLALVPFTEEEQRNFSMSVNSAAVLRLTGRGGGGTVVGAPRGRSSSRGRGRGRGECGFYQRSFDEVEGVFGRGGGREMHRSQSWEERGDRRFEKPGRKDVGRPNFEEGGPTSVGRKHEFIRSESENWRIFREEQNGEDEDGGWRLAGSRRDGERWRPHSPDGPRSAGWREHMERRRRFEFDFRDRDDERGYRRVRSGSGSIDDDRDSLPEWCLEDAEEEMGTFDSSGAFLSLKKVQKEPIPEEQEMDFRPVDEGEECSDSEGSHNEEAKEPDKTNKKEGEKTDRVGVEASEETPQTSSSSARPGTPSDHQSQEASQFERKDEPKTEQTEKAEEETRMENSLPAKVPSRGDEMVADVQQPLSQIPSDTASPLLILPPPVPNPSPTLRPVETPVVGAPGMGSVSTEPDDEEGLKHLEQQAEKMVAYLQDSALDDERLASKLQEHRAKGVSIPLMHEAMQKWYYKDPQGEIQGPFNNQEMAEWFQAGYFTMSLLVKRACDESFQPLGDIMKMWGRVPFSPGPAPPPHMGELDQERLTRQQELTALYQMQHLQYQQFLIQQQYAQVLAQQQKAALSSQQQQQLALLLQQFQTLKMRISDQNIIPSVTRSVSVPDTGSIWELQPTASQPTVWEGGSVWDLPLDTTTPGPALEQLQQLEKAKAAKLEQERREAEMRAKREEEERKRQEELRRQQEEILRRQQEEERKRREEEELARRKQEEALRRQREQEIALRRQREEEERQQQEEALRRLEERRREEEERRKQEELLRKQEEEAAKWAREEEEAQRRLEENRLRMEEEAARLRHEEEERKRKELEVQRQKELMRQRQQQQEALRRLQQQQQQQQLAQMKLPSSSTWGQQSNTTACQSQATLSLAEIQKLEEERERQLREEQRRQQRELMKALQQQQQQQQQKLSGWGNVSKPSGTTKSLLEIQQEEARQMQKQQQQQQQHQQPNRARNNTHSNLHTSIGNSVWGSINTGPPNQWASDLVSSIWSNADTKNSNMGFWDDAVKEVGPRNSTNKNKNNASLSKSVGVSNRQNKKVEEEEKLLKLFQGVNKAQDGFTQWCEQMLHALNTANNLDVPTFVSFLKEVESPYEVHDYIRAYLGDTSEAKEFAKQFLERRAKQKANQQRQQQQLPQQQQQQPPQQPPQQPQQQDSVWGMNHSTLHSVFQTNQSNNQQSNFEAVQSGKKKKKQKMVRADPSLLGFSVNASSERLNMGEIETLDDY

SEQ ID NO: 1117 - protein, 1258 aa, Homo sapiens
MAAETQTLNFGPEWLRALSSGGSITSPPLSPALPKYKLADYRYGREEMLALFLKDNKIPSDLLDKEFLPILQEEPLPPLALVPFTEEEQRNFSMSVNSAAVLRLTGRGGGGTVVGAPRGRSSSRGRGRGRGECGFYQRSFDEVEGVFGRGGGREMHRSQSWEERGDRRFEKPGRKDVGRPNFEEGGPTSVGRKHEFIRSESENWRIFREEQNGEDEDGGWRLAGSRRDGERWRPHSPDGPRSAGWREHMERRRRFEFDFRDRDDERGYRRVRSGSGSIDDDRDSLPEWCLEDAEEEMGTFDSSGAFLSLKKVQKEPIPEEQEMDFRPVDEGEECSDSEGSHNEEAKEPDKTNKKEGEKTDRVGVEASEETPQTSSSSARPGTPSDHQSQEASQFERKDEPKTEQTEKAEEETRMENSLPAKVPSRGDEMVADVQQPLSQIPSDTASPLLILPPPVPNPSPTLRPVETPVVGAPGMGSVSTEPDDEEGLKHLEQQAEKMVAYLQDSALDDERLASKLQEHRAKGVSIPLMHEAMQKWYYKDPQGEIQGPFNNQEMAEWFQAGYFTMSLLVKRACDESFQPLGDIMKMWGRVPFSPGPAPPPHMGELDQERLTRQQELTALYQMQHLQYQQFLIQQQYAQVLAQQQKAALSSQQQQQLALLLQQFQTLKMRISDQNIIPSVTRSVSVPDTGSIWELQPTASQPTVWEGGSVWDLPLDTTTPGPALEQLQQLEKAKAAKLEQERREAEMRAKREEEERKRQEELRRQQEEILRRQQEEERKRREEEELARRKQEEALRRQREQEIALRRQREEEERQQQEEALRRLEERRREEEERRKQEELLRKQEEEAAKWAREEEEAQRRLEENRLRMEEEAARLRHEEEERKRKELEVQRQKELMRQRQQQQEALRRLQQQQQQQQLAQMKQRRQQRELMKALQQQQQQQQQKLSGWGNVSKPSGTTKSLLEIQQEEARQMQKQQQQQQQHQQPNRARNNTHSNLHTSIGNSVWGSINTGPPNQWASDLVSSIWSNADTKNSNMGFWDDAVKEVGPRNSTNKNKNNASLSKSVGVSNRQNKKVEEEEKLLKLFQGVNKAQDGFTQWCEQMLHALNTANNLDVPTFVSFLKEVESPYEVHDYIRAYLGDTSEAKEFAKQFLERRAKQKANQQRQQQQLPQQQQQQPPQQPPQQPQQQDSVWGMNHSTLHSVFQTNQSNNQQSNFEAVQSGKKKKKQKMVRADPSLLGFSVNASSERLNMGEIETLDDY

SEQ ID NO: 1118 - protein, 219 aa, Homo sapiens
LHPAATSTAWLRVPPGLSMALSWVLTVLSLLPLLEAQIPLCANLVPVPITNATLDRITGKWFYIASAFRNEEYNKSVQEIQATFFYFTPNKTEDTIFLREYQTRQDQCIYNTTYLNVQRENGTISRYVGGQEHFAHLLILRDTKTYMLAFDVNDEKNWGLSVYADKPETTKEQLGEFYEALDCLRIPKSDVVYTDWKKDKCEPLEKQHEKERKQEEGES

SEQ ID NO: 1119 - protein, 518 aa, Homo sapiens
MAITATCTRFTDDYQLFEELGKGAFSVVRRSVKKTSTHEYAAKIINTKKLSARDHQKLEREARICRLLKHPNIVRLHDSISEEGFHYLVFDLVTGGELFEDIVAREYYSEADASHCIHQILESVNHIHQHDIVHRDLKPENLLLASKCKGAAVKLADFGLAIEVQGEQQAWFGFAGTPGYLSPEVLRKDPYGKPVDIWACGVILYILLVGYPPFWDEDQHKLYQQIKAGAYDFPSPEWDTVTPEAKNLINQMLTINPAKRITADQALKHPWVCQRSTVASMMHRQETVECLRKFNARRKLKGAILTTMLVSRNFSAAKSLLNKKSDGGVKPQSNNKNSLVSPAQEPAPLQTAMEPQTTVVHNATDGIKGSTESCNTTTEDEDLKVRKQEIIKITEQLIEAINNGDFEAYTKICDPGLTSFEPEALGNLVEGMDFHKFYFENLLSKNSKPIHTTILNPHVHVIGEDAACIAYIRLTQYIDGQGRPRTSQSEETRVWHRRDGKWLNVHYHCSGAPAAPLQ

SEQ ID NO: 1120 - protein, 325 aa, Homo sapiens
MLCLIGLLTIGLERPPGQVICPERVQLSQPQNWNFSGAGGAWSLDFAEQLKWSAELARLGESIMDGKQGGMDGSKPAGPRDFPGIRLLSNPLMGDAVSDWSPMHEAAIHGHQLSLRNLISQGWAVNIITADHVSPLHEACLGGHLSCVKILLKHGAQVNGVTADWHTPLFNACVSGSWDCVNLLLQHGASVQPESDLASPIHEAARRGHVECVNSLIAYGGNIDHKISHLGTPLYLACENQQRACVKKLLESGADVNQGKGQDSPLHAVARTASEELACLLMDFGADTQAKNAEGKRPVELVPPESPLAQLFLEREGASLPKPKP

SEQ ID NO: 1121 - protein, 120 aa, Homo sapiens
DMAGLMTIVTSLLFLGVCAHHIIPTGSVVLPSPCCMFFVSKRIPENRVVSYQLSSRSTCLKAGVIFTTKKGQQFCGDPKQEWVQRYMKNLDAKQKKASPRARAVAVKGPVQRYPGNQTTC

SEQ ID NO: 1122 - protein, 1337 aa, Homo sapiens
MEAGGGGGALPAGVETMVLTLGESWPVLVGRRFLSLSAADGSDGSHDSWDVERVAEWPWLSGTIRAVSHTDVTKKDLKVCVEFDGESWRKRRWIEVYSLLRRAFLVEHNLVLAERKSPEISERIVQWPAITYKPLLDKAGLGSITSVRFLGDQQRVFLSKDLLKPIQDVNSLRLSLTDNQIVSKEFQALIVKHLDESHLLKGDKNLVGSEVKIYSLDPSTQWFSATVVNGNPASKTLQVNCEEIPALKIVDPSLIHVEVVHDNLVTCGNSARIGAVKRKSSENNGTLVSKQAKSCSEASPSMCPVQSVPTTVFKEILLGCTAATPPSKDPRQQSTPQAANSPPNLGAKIPQGCHKQSLPEEISSCLNTKSEALRTKPDVCKAGLLSKSSQIGTGDLKILTEPKGSCTQPKTNTDQENRLESVPQALTGLPKECLPTKASSKAELEIANPPELQKHLEHAPSPSDVSNAPEVKAGVNSDSPNNCSGKKVEPSALACRSQNLKESSVKVDNESCCSRSNNKIQNAPSRKSVLTDPAKLKKLQQSGEAFVQDDSCVNIVAQLPKCRECRLDSLRKDKEQQKDSPVFCRFFHFRRLQFNKHGVLRVEGFLTPNKYDNEAIGLWLPLTKNVVGIDLDTAKYILANIGDHFCQMVISEKEAMSTIEPHRQVAWKRAVKGVREMCDVCDTTIFNLHWVCPRCGFGVCVDCYRMKRKNCQQGAAYKTFSWLKCVKSQIHEPENLMPTQIIPGKALYDVGDIVHSVRAKWGIKANCPCSNRQFKLFSKPASKEDLKQTSLAGEKPTLGAVLQQNPSVLEPAAVGGEAASKPAGSMKPACPASTSPLNWLADLTSGNVNKENKEKQPTMPILKNEIKCLPPLPPLSKSSTVLHTFNSTILTPVSNNNSGFLRNLLNSSTGKTENGLKNTPKILDDIFASLVQNKTTSDLSKRPQGLTIKPSILGFDTPHYWLCDNRLLCLQDPNNKSNWNVFRECWKQGQPVMVSGVHHKLNSELWKPESFRKEFGEQEVDLVNCRTNEIITGATVGDFWDGFEDVPNRLKNEKEPMVLKLKDWPPGEDFRDMMPSRFDDLMANIPLPEYTRRDGKLNLASRLPNYFVRPDLGPKMYNAYGLITPEDRKYGTTNLHLDVSDAANVMVYVGIPKGQCEQEEEVLKTIQDGDSDELTIKRFIEGKEKPGALWHIYAAKDTEKIREFLKKVSEEQGQENPADHDPIHDQSWYLDRSLRKRLHQEYGVQGWAIVQFLGDVVFIPAGAPHQVHNLYSCIKVAEDFVSPEHVKHCFWLTQEFRYLSQTHTNHEDKLQVKNVIYHAVKDAVAMLKASESSFGKP

SEQ ID NO: 1123 - protein, 568 aa, Homo sapiens
MPSTDLLMLKAFEPYLEILEVYSTKAKNYVNGHCTKYEPWQLIAWSVVWTLLIVWGYEFVFQPESLWSRFKKKCFKLTRKMPIIGRKIQDKLNKTKDDISKNMSFLKVDKEYVKALPSQGLSSSAVLEKLKEYSSMDAFWQEGRASGTVYSGEEKLTELLVKAYGDFAWSNPLHPDIFPGLRKIEAEIVRIACSLFNGGPDSCGCVTSGGTESILMACKAYRDLAFEKGIKTPEIVAPQSAHAAFNKAASYFGMKIVRVPLTKMMEVDVRAMRRAISRNTAMLVCSTPQFPHGVIDPVPEVAKLAVKYKIPLHVDACLGGFLIVFMEKAGYPLEHPFDFRVKGVTSISADTHKYGYAPKGSSLVLYSDKKYRNYQFFVDTDWQGGIYASPTIAGSRPGGISAACWAALMHFGENGYVEATKQIIKTARFLKSELENIKGIFVFGNPQLSVIALGSRDFDIYRLSNLMTAKGWNLNQLQFPPSIHFCITLLHARKRVAIQFLKDIRESVTQIMKNPKAKTTGMGAIYGMAQTTVDRNMVAELSSVFLDSLYSTDTVTQGSQMNGSPKPH

SEQ ID NO: 1124 - protein, 931 aa, Homo sapiens
MKIQKKLTGCSRLMLLCLSLELLLEAGAGNIHYSVPEETDKGSFVGNIAKDLGLQPQELADGGVRIVSRGRMPLFALNPRSGSLITARRIDREELCAQSMPCLVSFNILVEDKMKLFPVEVEIIDINDNTPQFQLEELEFKMNEITTPGTRVSLPFGQDLDVGMNSLQSYQLSSNPHFSLDVQQGADGPQHPEMVLQSPLDREEEAVHHLILTASDGGEPVRSGTLRIYIQVVDANDNPPAFTQAQYHINVPENVPLGTQLLMVNATDPDEGANGEVTYSFHNVDHRVAQIFRLDSYTGEISNKEPLDFEEYKMYSMEVQAQDGAGLMAKVKVLIKVLDVNDNAPEVTITSVTTAVPENFPPGTIIALISVHDQDSGDNGYTTCFIPGNLPFKLEKLVDNYYRLVTERTLDRELISGYNITITAIDQGTPALSTETHISLLVTDINDNSPVFHQDSYSAYIPENNPRGASIFSVRAHDLDSNENAQITYSLIEDTIQGAPLSAYLSINSDTGVLYALRSFDYEQFRDMQLKVMARDSGDPPLSSNVSLSLFLLDQNDNAPEILYPALPTDGSTGVELAPLSAEPGYLVTKVVAVDRDSGQNAWLSYRLLKASEPGLFSVGLHTGEVRTARALLDRDALKQSLVVAVQDHGQPPLSATVTLTVAVADRISDILADLGSLEPSAKPNDSDLTLYLVVAAAAVSCVFLAFVIVLLAHRLRRWHKSRLLQASGGGLASMPGSHFVGVDGVRAFLQTYSHEVSLTADSRKSHLIFPQPNYADTLISQESCEKKGFLSAPQSLLEDKKEPFSQQAPPNTDWRFSQAQRPGTSGSQNGDDTGTWPNNQFDTEMLQAMILASASEAADGSSTLGGGAGTMGLSARYGPQFTLQHVPDYRQNVYIPGSNATLTNAAGKRDGKAPAGGNGNKKKSGKKEKK

SEQ ID NO: 1125 - protein, 1262 aa, Homo sapiens
MDQMPPYYAASHKLIALAICKLIHITIEPLYRSVTSWAVDHAGFLESDPCDSTVGHLLSRVGVPKGAKGSPVNALQNKRAPKQAESFEDLRRDVFNMFCYLGPHLSHDPILFAKVVRIGKSFMKEFQSDGSKQEDKEKTEVILSCLLSITDQVLLPSLSLMDCNACMSEELWGMFKTFPYQHRYRLYGQWKNETYNSHPLLVKVKAQTIDRAKYIMKRLTKENVKPSGRQIGKLSHSNPTILFDYVCFEILSQIQKYDNLITPVVDSLKYLTSLNYDVLACILSNCIIEALANPEKERMKHDDTTISSWLQSLASFCGAVFRKYPIDLAGLLQYVANQLKAGKSFDLLILKEVVQKMAGIEITEEMTMEQLEAMTGGEQLKAEGGYFGQIRNTKKSSQRLKDALLDHDLALPLCLLMAQQRNGVIFQEGGEKHLKLVGKLYDQCHDTLVQFGGFLASNLSTEDYIKRVPSIDVLCNEFHTPHDAAFFLSRPMYAHHISSKYDELKKSEKGSKQQHKVHKYITSCEMVMAPVHEAVVSLHVSKVWDDISPQFYATFWSLTMYDLAVPHTSYEREVNKLKVQMKAIDDNQEMPPNKKKKEKERCTALQDKLLEEEKKQMEHVQRVLQRLKLEKDNWLLAKSTKNETITKFLQLCIFPRCIFSAIDAVYCARFVELVHQQKTPNFSTLLCYDRVFSDIIYTVASCTENEASRYGRFLCCMLETVTRWHSDRATYEKECGNYPGFLTILRATGFDGGNKADQLDYENFRHVVHKWHYKLTKASVHCLETGEYTHIRNILIVLTKILPWYPKVLNLGQALERRVHKICQEEKEKRPDLYALAMGYSGQLKSRKSYMIPENEFHHKDPPPRNAVASVQNGPGGGPSSSSIGSASKSDESSTEETDKSRERSQCGVKAVNKASSTTPKGNSSNGNSGSNSNKAVKENDKEKGKEKEKEKKEKTPATTPEARVLGKDGKEKPKEERPNKDEKARETKERTPKSDKEKEKFKKEEKAKDEKFKTTVPNAESKSTQEREREKEPSRERDIAKEMKSKENVKGGEKTPVSGSLKSPVPRSDIPEPEREQKRRKIDTHPSPSHSSTVKDSLIELKESSAKLYINHTPPPLSKSKEREMDKKDLDKSRERSREREKKDEKDRKERKRDHSNNDREVPPDLTKRRKEENGTMGVSKHKSESPCESPYPNEKDKEKNKSKSSGKEKGSDSFKSEKMDKISSGGKKESRHDKEKIEKKEKRDSSGGKEEKKQSSDKHR

SEQ ID NO: 1126 - protein, 271 aa, Homo sapiens
MAGPQQQPPYLHLAELTASQFLEIWKHFDADGNGYIEGKELENFFQELEKARKGSGMMSKSDNFGEKMKEFMQKYDKNSDGKIEMAELAQILPTEENFLLCFRQHVGSSAEFMEAWRKYDTDRSGYIEANELKGFLSDLLKKANRPYDEPKLQEYTQTILRMFDLNGDGKLGLSEMSRLLPVQENFLLKFQGMKLTSEEFNAIFTFYDKDRSGYIDEHELDALLKDLYEKNKKEMNIQQLTNYRKSVMSLAEAGKLYRKDLEIVLCSEPPM

SEQ ID NO: 1127 - protein, 292 aa, Homo sapiens
MPLHVKWPFPAVPPLTWTLASSVVMGLVGTYSCFWTKYMNHLTVHNREVLYELIEKRGPATPLITVSNHQSCMDDPHLWGILKLRHIWNLKLMRWTPAAADICFTKELHSHFFSLGKCVPVCRGAEFFQAENEGKGVLDTGRHMPGAGKRREKGDGVYQKGMDFILEKLNHGDWVHIFPEGKVNMSSEFLRFKWGIGRLIAECHLNPIILPLWHVGMNDVLPNSPPYFPRFGQKITVLIGKPFSALPVLERLRAENKSAVEMRKALTDFIQEEFQHLKTQAEQLHNHLQPGR

SEQ ID NO: 1128 - protein, 855 aa, Homo sapiens
MSAPSEEEEYARLVMEAQPEWLRAEVKRLSHELAETTREKIQAAEYGLAVLEEKHQLKLQFEELEVDYEAIRSEMEQLKEAFGQAHTNHKKVAADGESREESLIQESASKEQYYVRKVLELQTELKQLRNVLTNTQSENERLASVAQELKEINQNVEIQRGRLRDDIKEYKFREARLLQDYSELEEENISLQKQVSVLRQNQVEFEGLKHEIKRLEEETEYLNSQLEDAIRLKEISERQLEEALETLKTEREQKNSLRKELSHYMSINDSFYTSHLHVSLDGLKFSDDAAEPNNDAEALVNGFEHGGLAKLPLDNKTSTPKKEGLAPPSPSLVSDLLSELNISEIQKLKQQLMQMEREKAGLLATLQDTQKQLEHTRGSLSEQQEKVTRLTENLSALRRLQASKERQTALDNEKDRDSHEDGDYYEVDINGPEILACKYHVAVAEAGELREQLKALRSTHEAREAQHAEEKGRYEAEGQALTEKVSLLEKASRQDRELLARLEKELKKVSDVAGETQGSLSVAQDELVTFSEELANLYHHVCMCNNETPNRVMLDYYREGQGGAGRTSPGGRTSPEARGRRSPILLPKGLLAPEAGRADGGTGDSSPSPGSSLPSPLSDPRREPMNIYNLIAIIRDQIKHLQAAVDRTTELSRQRIASQELGPAVDKDKEALMEEILKLKSLLSTKREQITTLRTVLKANKQTAEVALANLKSKYENEKAMVTETMMKLRNELKALKEDAATFSSLRAMFATRCDEYITQLDEMQRQLAAAEDEKKTLNSLLRMAIQQKLALTQRLELLELDHEQTRRGRAKAAPKTKPATPSVSHTCACASDRAEGTGLANQVFCSEKHSIYCD

SEQ ID NO: 1129 - protein, 310 aa, Homo sapiens
MVKVVPATRGNLPRSQLTGTHQHCQPREPKITASERLRRRPRATARLRAHAAPPEPPLAVFAPPSDRKELLALPVACDPVIASVMSWVQAASLIQGPGDKGDVFDEEADESLLAQREWQSNMQRRVKEGYRDGIDAGKAVTLQQGFNQGYKKGAEVILNYGRLRGTLSALLSWCHLHNNNSTLINKINNLLDAVGQCEEYVLKHLKSITPPSHVVDLLDSIEDMDLCHVVPAEKKIDEAKDERLCENNAEFNKNCSKSHSGIDCSYVECCRTQEHAHSENPSPTWILEQTASLVKQLGLSVDVLQHLKQL

SEQ ID NO: 1130 - protein, 135 aa, Homo sapiens
IWPSRPRIRHERPASERECSLCQRLKRELNMGDVEKGKKIFIMKCSQCHTVEKGGKHKAGPTLHGLFGRKTGQAPGYSYTAANKNKGIIWGEDTLMEYLENPKKYIPGTKMIFVGIKKKEERADLIAYLKKATNE

SEQ ID NO: 1131 - protein, 482 aa, Homo sapiens
MHAYVSLDPLERPLPLPGDGRQSRRDAEEPAARARCRRGTAFRAGPASLAGEDALVSVMGCGTSKVLPEPPKDVQLDLVKKVEPFSGTKSDVYKHFITEVDSVGPVKAGFPAASQYAHPCPGPPTAGHTEPPSEPPRRARVAKYRAKFDPRVTAKYDIKALIGRGSFSRVVRVEHRATRQPYAIKMIETKYREGREVCESELRVLRRVRHANIIQLVEVFETQERVYMVMELATGGELFDRIIAKGSFTERDATRVLQMVLDGVRYLHALGITHRDLKPENLLYYHPGTDSKIIITDFGLASARKKGDDCLMKTTCGTPEYIAPEVLVRKPYTNSVDMWALGVIAYILLSGTMPFEDDNRTRLYRQILRGKYSYSGEPWPSVSNLAKDFIDRLLTVDPGARMTALQALRHPWVVSMAASSSMKNLHRSISQNLLKRASSRCQSTKSAQSTRSSRSTRSNKSRRVRERELRELNLRYQQQYNG

SEQ ID NO: 1132 - protein, 423 aa, Homo sapiens
MFADLDYDIEEDKLGIPTVPGKVTLQKDAQNLIGISIGGGAQYCPCLYIVQVFDNTPAALDGTVAAGDEITGVNGRSIKGKTKVEVAKMIQEVKGEVTIHYNKLQADPKQGMSLDIVLKKVKHRLVENMSSGTADALGLSRAILCNDGLVKRLEELERTAELYKGMTEHTKNLLRAFYELSQTHRGNGIPQSCAFGDVFSVIGVREPQPAASEAFVKFADAHRSIEKFGIRLLKTIKPMLTDLNTYLNKAIPDTRLTIKKYLDVKFEYLSYCLKVKEMDDEEYSCIALGEPLYRVSTGNYEYRLILRCRQEARARFSQMRKDVLEKMELLDQKHVQDIVFQLQRLVSTMSKYYNDCYAVLRDADVFPIEVDLAHTTLAYGLNQEEFTDGEEEEEEEDTAAGEPSRDTRGAAGPLDKGGSWCDS

SEQ ID NO: 1133 - protein, 323 aa, Homo sapiens
MDSKQQCVKLNDGHFMPVLGFGTYAPPEVPRSKALEVTKLAIEAGFRHIDSAHLYNNEEQVGLAIRSKIADGSVKREDIFYTSKLWSTFHRPELVRPALENSLKKAQLDYVDLYLIHSPMSLKPGEELSPTDENGKVIFDIVDLCTTWEAMEKCKDAGLAKSIGVSNFNRRQLEMILNKPGLKYKPVCNQVECHPYFNRSKLLDFCKSKDIVLVAYSALGSQRDKRWVDPNSPVLLEDPVLCALAKKHKRTPALIALRYQLQRGVVVLAKSYNEQRIRQNVQVFEFQLTAEDMKAIDGLDRNLHYFNSDSFASHPNYPYSDEY

SEQ ID NO: 1134 - protein, 284 aa, Homo sapiens
MSMLPSFGFTQEQVACVCEVLQQGGNLERLGRFLWSLPACDHLHKNESVLKAKAVVAFHRGNFRELYKILESHQFSPHNHPKLQQLWLKAHYVEAEKLRGRPLGAVGKYRVRRKFPLPRTIWDGEETSYCFKEKSRGVLREWYAHNPYPSPREKRELAEATGLTTTQVSNWFKNRRQRDRAAEAKERENTENNNSSSNKQNQLSPLEGGKPLMSSSEEEFSPPQSPDQNSVLLLQGNMGHARSSNYSLPGLTASQPSHGLQTHQHQLQDSLLGPLTSSLVDLGS

SEQ ID NO: 1135 - protein, 481 aa, Homo sapiens
MADNDTDRNQTEKLLKRVRELEQEVQRLKKEQAKNKEDSNIRENSSGAGKTKRAFDFSAHGRRHVALRIAYMGWGYQGFASQENTNNTIEEKLFEALTKTRLVESRQTSNYHRCGRTDKGVSAFGQVISLDLRSQFPRGRDSEDFNVKEEANAAAEEIRYTHILNRVLPPDIRILAWAPVEPSFSARFSCLERTYRYFFPRADLDIVTMDYAAQKYVGTHDFRNLCKMDVANGVINFQRTILSAQVQLVGQSPGEGRWQEPFQLCQFEVTGQAFLYHQVRCMMAILFLIGQGMEKPEIIDELLNIEKNPQKPQYSMAVEFPLVLYDCKFENVKWIYDQEAQEFNITHLQQLWANHAVKTHMLYSMLQGLDTVPVPCGIGPKMDGMTEWGNVKPSVIKQTSAFVEGVKMRTYKPLMDRPKCQGLESRIQHFVRRGRIEHPHLFHEEETKAKRDCNDTLEEDNTNLETPTKRVCVDTEIKSII

SEQ ID NO: 1136 - protein, 425 aa, Homo sapiens
MNAMLETPELPAVFDGVKLAAVAAVLYVIVRCLNLKSPTAPPDLYFQDSGLSRFLLKSCPLLTKEYIPPLIWGKSGHIQTALYGKMGRVRSPHPYGHRKFITMSDGATSTFDLFEPLAEHCVGDDITMVICPGIANHSEKQYIRTFVDYAQKNGYRCAVLNHLGALPNIELTSPRMFTYGCTWEFGAMVNYIKKTYPLTQLVVVGFSLGGNIVCKYLGETQANQEKVLCCVSVCQGYSALRAQETFMQWDQCRRFYNFLMADNMKKIILSHRQALFGDHVKKPQSLEDTDLSRLYTATSLMQIDDNVMRKFHGYNSLKEYYEEESCMRYLHRIYVPLMLVNAADDPLVHESLLTIPKSLSEKRENVMFVLPLHGGHLGFFEGSVLFPEPLTWMDKLVVEYANAICQWERNKLQCSDTEQVEADLE

SEQ ID NO: 1137 - protein, 1204 aa, Homo sapiens
MGLLLMILASAVLGSFLTLLAQFFLLYRRQPEPPADEAARAGEGFRYIKPVPGLLLREYLYGGGRDEEPSGAAPEGGATPTAAPETPAPPTRETCYFLNATILFLFRELRDTALTRRWVTKKIKVEFEELLQTKTAGRLLEGLSLRDVFLGETVPFIKTIRLVRPVVPSATGEPDGPEGEALPAACPEELAFEAEVEYNGGFHLAIDVDLVFGKSAYLFVKLSRVVGRLRLVFTRVPFTHWFFSFVEDPLIDFEVRSQFEGRPMPQLTSIIVNQLKKIIKRKHTLPNYKIRFKPFFPYQTLQGFEEDEEHIHIQQWALTEGRLKVTLLECSRLLIFGSYDREANVHCTLELSSSVWEEKQRSSIKTGTISLTAVFMGWHRVSEAFPGLWYKLLVDLPFWGLEDGGPLLTAPLGSALVELIKGNLQSVGLTLRLVQSTDGYAGHVIIETVAPNSPAAIADLQRGDRLIAIGGVKITSTLQVLKLIKQAGDRVLVYYERPVGQSNQGAVLQDNFGQLEENFLSSSCQSGYEEEAAGLTVDTESRELDSEFEDLASDVRAQNEFKDEAQSLSHSPKRVPTTLSIKPLGAISPVLNRKLAVGSHPLPPKIQSKDGNKPPPLKTSEITDPAQVSKPTQGSAFKPPVPPRPQAKVPLPSADAPNQAEPDVLVEKPEKVVPPPLVDKSAEKQAKNVDAIDDAAAPKQFLAKQEVAKDVTSETSCPTKDSSDDRQTWESSEILYRNKLGKWTRTRASCLFDIEACHRYLNIALWCRDPFKLGGLICLGHVSLKLEDVALGCLATSNTEYLSKLRLEAPSPKAIVTRTALRNLSMQKGFNDKFCYGDITIHFKYLKEGESDHHVVTNVEKEKEPHLVEEVSVLPKEEQFVGQMGLTENKHSFQDTQFQNPTWCDYCKKKVWTKAASQCMFCAYVCHKKCQEKCLAETSVCGATDRRIDRTLKNLRLEGQETLLGLPPRVDAEASKSVNKTTGLTRHIINTSSRLLNLRQVSKTRLSEPGTDLVEPSPKHTPNTSDNEGSDTEVCGPNSPSKRGNSTGIKLVRKEGGLDDSVFIAVKEIGRDLYRGLPTEERIQKLEFMLDKLQNEIDQELEHNNSLVREEKETTDTRKKSLLSAALAKSGERLQALTLLMIHYRAGIEDIETLESLSLDQHSKKISKYTDDTEEDLDNEISQLIDSQPFSSISDDLFGPSESV

SEQ ID NO: 1138 - protein, 30 aa, Homo sapiens
MAAAGAGRLRRVASALLLRSPRLPARELSA

SEQ ID NO: 1139 - protein, 340 aa, Homo sapiens
MRKELQLSLSVTLLLVCGFLYQFTLKSSCLFCLPSFKSHQGLEALLSHRRGIVFLETSERMEPPHLVSCSVESAAKIYPEWPVVFFMKGLTDSTPMPSNSTYPAFSFLSAIDNVFLFPLDMKRLLEDTPLFSWYNQINASAERNWLHISSDASRLAIIWKYGGIYMDTDVISIRPIPEENFLAAQASRYSSNGIFGFLPHHPFLWECMENFVEHYNSAIWGNQGPELMTRMLRVWCKLEDFQEVSDLRCLNISFLHPQRFYPISYREWRRYYEVWDTEPSFNVSYALHLWNHMNQEGRAVIRGSNTLVENLYRKHCPRTYRDLIKGPEGSVTGELGPGNK

SEQ ID NO: 1140 - protein, 248 aa, Homo sapiens
MAAGMYLEHYLDSIENLPFELQRNFQLMRDLDQRTEDLKAEIDKLATEYMSSARSLSSEEKLALLKQIQEAYGKCKEFGDDKVQLAMQTYEMVDKHIRRLDTDLARFEADLKEKQIESSDYDSSSSKGKKSRTQKEKKAARARSKGKNSDEEAPKTAQKKLKLVRTSPEYGMPSVTFGSVHPSDVLDMPVDPNEPTYCLCHQVSYGEMIGCDNPDCSIEWFHFACVGLTTKPRGKWFCPRCSQERKKK

SEQ ID NO: 1141 - protein, 871 aa, Homo sapiens
MVAVRAAGPREGASQDEAGTVWAPMTGCPCQCRPGPSWLLVDTLEPETAYPVQRPGPEQAGNQRLQMKRAQFGPHDWLSLPVPPGPSWLLVDTLEPETAYQFSVLAQNKLGTSAFSEVVTVNTLAFPITTPEPLVLVTPPRCLIANRTQQGVLLSWLPPANHSFPIDRYIMEFRVAERWELLDDGIPGTEGEFFAKDLSQDTWYEFRVLAVMQDLISEPSNIAGVSSTDIFPQPDLTEDGLARPVLAGIVATICFLAAAILFSTLAACFVNKQRKRKLKRKKDPPLSITHCRKSLESPLSSGKVSPESIRTLRAPSESSDDQGQPAAKRMLSPTREKELSLYKKTKRAISSKKYSVAKAEAEAEATTPIELISRGPDGRFVMDPAEMEPSLKSRRIEGFPFAEETDMYPEFRQSDEENEDPLVPTSVAALKSQLTPLSSSQESYLPPPAYSPRFQPRGLEGPGGLEGRLQATGQARPPAPRPFHHGQYYGYLSSSSPGEVEPPPFYVPEVGSPLSSVMSSPPLPTEGPFGHPTIPEENGENASNSTLPLTQTPTGGRSPEPWGRPEFPFGGLETPAMMFPHQLPPCDVPESLQPKAGLPRGLPPTSLQVPAAYPGILSLEAPKGWAGKSPGRGPVPAPPAAKWQDRPMQPLVSQGQLRHTSQGMGIPVLPYPEPAEPGAHGGPSTFGLDTRWYEPQPRPRPSPRQARRAEPSLHQVVLQPSRLSPLTQSPLSSRTGSPELAARARPRPGLLQQAEMSEITLQPPAAVSFSRKSTPSTGSPSQSSRSGSPSYRPAMGFTTLATGYPSPPPGPAPAGPGDSLDVFGQTPSPRRTGEELLRPETPPPTLPTSGKLRRDRPAPATSPPERALSKL

SEQ ID NO: 1142 - protein, 273 aa, Homo sapiens
MSLTNTKTGFSVKDILDLPDTNDEEGSVAEGPEEENEGPEPAKRAGPLGQGALDAVQSLPLKNPFYDSSDNPYTRWLASTEGLQYSLHGLAAGAPPQDSSSKSPEPSADESPDNDKETPGGGGDAGKKRKRRVLFSKAQTYELERRFRQQRYLSAPEREHLASLIRLTPTQVKIWFQNHRYKMKRARAEKGMEVTPLPSPRRVAVPVLVRDGKPCHALKAQDLAAATFQAGIPFSAYSAQSLQHMQYNAQYSSASTPQYPTAHPLVQAQQWTW

SEQ ID NO: 1143 - protein, 59 aa, Homo sapiens
MTRGNQRELARQKNMKKQSDSVKGKRRDDGLSAAARKQRDSEIMQQKQKKANEKKEEPK

SEQ ID NO: 1144 - protein, 843 aa, Homo sapiens
MSFPPHLNRPPMGIPALPPGIPPPQFPGFPPPVPPGTPMIPVPMSIMAPAPTVLVPTVSMVGKHLGARKDHPGLKAKENDENCGPTTTVFVGNISEKASDMLIRQLLAKCGLVLSWKRVQGASGKLQAFGFCEYKEPESTLRALRLLHDLQIGEKKLLVKVDAKTKAQLDEWKAKKKASNGNARPETVTNDDEEALDEETKRRDQMIKGAIEVLIREYSSELNAPSQESDSHPRKKKKEKKEDIFRRFPVAPLIPYPLITKEDINAIEMEEDKRDLISREISKFRDTHKKLEEEKGKKEKERQEIEKERRERERERERERERREREREREREREREKEKERERERERDRDRDRTKERDRDRDRERDRDRDRERSSDRNKDRSRSREKSRDREREREREREREREREREREREREREREREREREREKDKKRDREEDEEDAYERRKLERKLREKEAAYQERLKNWEIRERKKTREYEKEAEREEERRREMAKEAKRLKEFLEDYDDDRDDPKYYRGSALQKRLRDREKEMEADERDRKREKEELEEIRQRLLAEGHPDPDAELQRMEQEAERRRQPQIKQEPESEEEEEEKQEKEEKREEPMEEEEEPEQKPCLKPTLRPISSAPSVSSASGNATPNTPGDESPCGIIIPHENSPDQQQPEEHRPKIGLSLKLGASNSPGQPNSVKRKKLPVDSVFNKFEDEDSDDVPRKRKLVPLDYGEDDKNATKGTVNTEEKRKHIKSLIEKIPTAKPELFAYPLDWSIVDSILMERRIRPWINKKIIEYIGEEEATLVDFVCSKVMAHSSPQSILDDVAMVLDEEAEVFIVKMWRLLIYETEAKKIGLVK

SEQ ID NO: 1145 - protein, 185 aa, Homo sapiens
MTTPNKTPPGADPKQLERTGTVREIGSQAVWSLSSCKPGFGVDQLRDDNLETYWQSDGSQPHLVNIQFRRKTTVKTLCIYADYKSDESYTPSKISVRVGNNFHNLQEIRQLELVEPSGWIHVPLTDNHKKPTRTFMIQIAVLANHQNGRDTHMRQIKIYTPVEESSIGKFPRCTTIDFMMYRSIR

SEQ ID NO: 1146 - protein, 388 aa, Homo sapiens
MNTMYVMMAQILRSHLIKATVIPNRVKMLPYFGIIRNRMMSTHKSKKKIREYYRLLNVEEGCSADEVRESFHKLAKQYHPDSGSNTADSATFIRIEKAYRKVLSHVIEQTNASQSKGEEEEDVEKFKYKTPQHRHYLSFEGIGFGTPTQREKHYRQFRADRAAEQVMEYQKQKLQSQYFPDSVIVKNIRQSKQQKITQAIERLVEDLIQESMAKGDFDNLSGKGKPLKKFSDCSYIDPMTHNLNRILIDNGYQPEWILKQKEISDTIEQLREAILVSRKKLGNPMTPTEKKQWNHVCEQFQENIRKLNKRINDFNLIVPILTRQKVHFDAQKEIVRAQKIYETLIKTKEVTDRNPNNLDQGEGEKTPEIKKGFLNWMNLWKFIKIRSF

SEQ ID NO: 1147 - protein, 639 aa, Homo sapiens
MEIIRSNFKSNLHKVYQAIEEADFFAIDGEFSGISDGPSVSALTNGFDTPEERYQKLKKHSMDFLLFQFGLCTFKYDYTDSKYITKSFNFYVFPKPFNRSSPDVKFVCQSSSIDFLASQGFDFNKVFRNGIPYLNQEEERQLREQYDEKRSQANGAGALSYVSPNTSKCPVTIPEDQKKFIDQVVEKIEDLLQSEENKNLDLEPCTGFQRKLIYQTLSWKYPKGIHVETLETEKKERYIVISKVDEEERKRREQQKHAKEQEELNDAVGFSRVIHAIANSGKLVIGHNMLLDVMHTVHQFYCPLPADLSEFKEMTTCVFPRLLDTKLMASTQPFKDIINNTSLAELEKRLKETPFNPPKVESAEGFPSYDTASEQLHEAGYDAYITGLCFISMANYLGSFLSPPKIHVSARSKLIEPFFNKLFLMRVMDIPYLNLEGPDLQPKRDHVLHVTFPKEWKTSDLYQLFSAFGNIQISWIDDTSAFVSLSQPEQVKIAVNTSKYAESYRIQTYAEYMGRKQEEKQIKRKWTEDSWKEADSKRLNPQCIPYTLQNHYYRNNSFTAPSTVGKRNLSPSQEEAGLEDGVSGEISDTELEQTDSCAEPLSEGRKKAKKLKRMKKELSPAGSISKNSPATLFEVPDTW

SEQ ID NO: 1148 - protein, 474 aa, Homo sapiens
MALAVAPWGRQWEEARALGRAVRMLQRLEEQCVDPRLSVSPPSLRDLLPRTAQLLREVAHSRRAAGGGGPGGPGGSGDFLLIYLANLEAKSRQVAALLPLRGRRSANDELFRAGSRLRRQLAKLAIIFSHMHAELHALFPGGKYCGHMYQLTKAPAHTFWRESCGARCVLPWAEFESLLGTCHPVEPGCTALALRTTIDLTCSGHVSIFEFDVFTRLFQPWPTLLKNWQLLAVNHPGYMAFLTYDEVQERLQACRDKPGSYIFRPSCTRLGQWAIGYVSSDGSILQTIPANKPLSQVLLEGQKDGFYLYPDGKTHNPDLTELGQAEPQQRIHVSEEQLQLYWAMDSTFELCKICAESNKDVKIEPCGHLLCSCCLAAWQHSDSQTCPFCRCEIKGWEAVSIYQFHGQATAEDSGNSSDQEGRELELGQVPLSAPPLPPRPDLPPRKPRNAQPKVRLLKGNSPPAALGPQDPAPA

SEQ ID NO: 1149 - protein, 1068 aa, Homo sapiens
MRNKKHSNNWLAQHWFQSSIILCFSPVGRTLRVRARKFPAIVNCTAIDWFHAWPQEALVSVSRRFIEETKGIEPVHKDSISLFMAHVHTTVNEMSTRYYQNERRHNYTTPKSFLEQISLFKNLLKKKQNEVSEKKERLVNGIQKLKTTASQVGDLKARLASQEAELQLRNHDAEALITKIGLQTEKVSREKTIADAEERKVTAIQTEVFQKQRECEADLLKAEPALVAATAALNTLNRVNLSELKAFPNPPIAVTNVTAAVMVLLAPRGRVPKDRSWKAAKVFMGKVDDFLQALINYDKEHIPENCLKVVNEHYLKDPEFNPNLIRTKSFAAAGLCAWVINIIKFYEVYCDVEPKRQALAQANLELAAATEKLEAIRKKLVVSANYDIEKSEKIRWGQSIKSFEAQEKTLCGDVLLTAAFVSYVGPFTRQYRQELVHCKWVPFLQQKVSIPLTEGLDLISMLTDDATIAAWNNEGLPSDRMSTENAAILTHCERWPLVIDPQQQGIKWIKNKYGMDLKVTHLGQKGFLNAIETALAFGDVILIENLEETIDPVLDPLLGRNTIKKGKYIRIGDKECEFNKNFRLILHTKLANPHYKPELQAQTTLLNFTVTEDGLEAQLLAEVVSIERPDLEKLKLVLTKHQNDFKIELKYLEDDLLLRLSAAEGSFLDDTKLVERLEATKTTVAEIEHKVIEAKENERKINEARECYRPVAARASLLYFVINDLQKINPLYQFSLKAFNVLFHRAIEQADKVEDMQGRISILMESITHAVFLYTSQALFEKDKLTFLSQMAFQILLRKKEIDPLELDFLLRFTVEHTHLSPVDFLTSQSWSAIKAIAVMEEFRGIDRDVEGSAKQWRKWVESECPEKEKLPQEWKKKSLIQKLILLRAMRPDRMTYALRNFVEEKLGAKYVERTRLDLVKAFEESSPATPIFFILSPGVDALKDLEILGKRLGFTIDSGKFHNVSLGQGQETVAEVALEKASKGGHWVILQNVHLVAKWLGTLEKLLERFSQGSHRDYRVFMSAESAPTPDEHIIPQGLLENSIKITNEPPTGMLANLHAALYNFDQ

SEQ ID NO: 1150 - protein, 117 aa, Homo sapiens
MLGLVPGVDGRSPRGGRGGLGWRSCFLSDGEWILRTGSVGSGLVGSRGSAGGPRLEMDPNCSCATGGSCTCAGSCKCKECKCTSCKKSCCSCCPVGCAKCAQGCVCKGASEKCSCCA

SEQ ID NO: 1151 - protein, 953 aa, Homo sapiens
MEEQGHSEMEIIPSESHPHIQLLKSNRELLVTHIRNTQCLVDNLLKNDYFSAEDAEIVCACPTQPDKVRKILDLVQSKGEEVSEFFLYLLQQLADAYVDLRPWLLEIGFSPSLLTQSKVVVNTDPVSRYTQQLRHHLGRDSKFVLCYAQKEELLLEEIYMDTIMELVGFSNESLGSLNSLACLLDHTTGILNEQGETIFILGDAGVGKSMLLQRLQSLWATGRLDAGVKFFFHFRCRMFSCFKESDRLCLQDLLFKHYCYPERDPEEVFAFLLRFPHVALFTFDGLDELHSDLDLSRVPDSSCPWEPAHPLVLLANLLSGKLLKGASKLLTARTGIEVPRQFLRKKVLLRGFSPSHLRAYARRMFPERALQDRLLSQLEANPNLCSLCSVPLFCWIIFRCFQHFRAAFEGSPQLPDCTMTLTDVFLLVTEVHLNRMQPSSLVQRNTRSPVETLHAGRDTLCSLGQVAHRGMEKSLFVFTQEEVQASGLQERDMQLGFLRALPELGPGGDQQSYEFFHLTLQAFFTAFFLVLDDRVGTQELLRFFQEWMPPAGAATTSCYPPFLPFQCLQGSGPAREDLFKNKDHFQFTNLFLCGLLSKAKQKLLRHLVPAAALRRKRKALWAHLFSSLRGYLKSLPRVQVESFNQVQAMPTFIWMLRCIYETQSQKVGQLAARGICANYLKLTYCNACSADCSALSFVLHHFPKRLALDLDNNNLNDYGVRELQPCFSRLTVLRLSVNQITDGGVKVLSEELTKYKIVTYLGLYNNQITDVGARYVTKILDECKGLTHLKLGKNKITSEGGKYLALAVKNSKSISEVGMWGNQVGDEGAKAFAEALRNHPSLTTLSLASNGISTEGGKSLARALQQNTSLEILWLTQNELNDEVAESLAEMLKVNQTLKHLWLIQNQITAKGTAQLADALQSNTGITEICLNGNLIKPEEAKVYEDEKRIICF

SEQ ID NO: 1152 - protein, 306 aa, Homo sapiens [sequence omitted]

SEQ ID NO: 1153 - protein, 539 aa, Homo sapiens
MKRMVSWSFHKLKTMKHLLLLLLCVFLVKSQGVNDNEEQYRITIKRTRSENLTNYKIIKEQNFKIKETGDEKTGAQIKQLAQGLIAGFFSARGHRPLDKKREEAPSLRPAPPPISGGGYRARPAKAAATQKKVERKAPDAGGCLHADPDLGVLCPTGCQLQEALLQQERPIRNSVDELNNNVEAVSQTSSSSFQYMYLLKDLWQKRQKQVKDNENVVNEYSSELEKHQLYIDETVNSNIPTNLRVLRSILENLRSKIQKLESDVSAQMEYCRTPCTVSCNIPVVSGKECEEIIRKGGETSEMYLIQPDSSVKPYRVYCDMNTENGGWTVIQNRQDGSVDFGRKWDPYKQGFGNVATNTDGKNYCGLPGEYWLGNDKISQLTRMGPTELLIEMEDWKGDKVKAHYGGFTVQNEANKYQISVNKYRGTAGNALMDGASQLMGENRTMTIHNGMFFSTYDRDNDGWLTSDPRKQCSKEDGGGWWYNRCHAANPNGRYYWGGQYTWDMAKHGTDDGVVWMNWKGSWYSMRKMSMKIRPFFPQQ

SEQ ID NO: 1154 - protein, 491 aa, Homo sapiens
MKRMVSWSFHKLKTMKHLLLLLLCVFLVKSQGVNDNEEGFFSARGHRPLDKKREEAPSLRPAPPPISGGGYRARPAKAAATQKKVERKAPDAGGCLHADPDLGVLCPTGCQLQEALLQQERPIRNSVDELNNNVEAVSQTSSSSFQYMYLLKDLWQKRQKQVKDNENVVNEYSSELEKHQLYIDETVNSNIPTNLRVLRSILENLRSKIQKLESDVSAQMEYCRTPCTVSCNIPVVSGKECEEIIRKGGETSEMYLIQPDSSVKPYRVYCDMNTENGGWTVIQNRQDGSVDFGRKWDPYKQGFGNVATNTDGKNYCGLPGEYWLGNDKISQLTRMGPTELLIEMEDWKGDKVKAHYGGFTVQNEANKYQISVNKYRGTAGNALMDGASQLMGENRTMTIHNGMFFSTYDRDNDGWLTSDPRKQCSKEDGGGWWYNRCHAANPNGRYYWGGQYTWDMAKHGTDDGVVWMNWKGSWYSMRKMSMKIRPFFPQQ

SEQ ID NO: 1155 - protein, 453 aa, Homo sapiens
MKRMVSWSFHKLKTMKHLLLLLLCVFLVKSQGVNDNEEGFFSARGHRPLDKKREEAPSLRPAPPPISGGGYRARPAKAAATQKKVERKAPDAGGCLHADPDLGVLCPTGCQLQEALLQQERPIRNSVDELNNNVEAVSQTSSSSFQYMYLLKDLWQKRQKQVKDNENVVNEYSSELEKHQLYIDETVNSNIPTNLRVLRSILENLRSKIQKLESDVSAQMEYCRTPCTVSCNIPVVSGKGWTVIQNRQDGSVDFGRKWDPYKQGFGNVATNTDGKNYCGLPGEYWLGNDKISQLTRMGPTELLIEMEDWKGDKVKAHYGGFTVQNEANKYQISVNKYRGTAGNALMDGASQLMGENRTMTIHNGMFFSTYDRDNDGWLTSDPRKQCSKEDGGGWWYNRCHAANPNGRYYWGGQYTWDMAKHGTDDGVVWMNWKGSWYSMRKMSMKIRPFFPQQ

SEQ ID NO: 1156 - protein, 151 aa, Homo sapiens
MPRGSRSRTSRMAPPASRAPQMRAAPRPAPVAQPPAAAPPSAVGSSAAAPRQPGLMAQMATTAAGVAVGSAVGHTLGHAITGGFSGGSNAEPARPDITYQEPQGTQPAQQQQPCLYEIKQFLECAQNQGDIKLCEGFNEVLKQCRLANGLA

SEQ ID NO: 1157 - protein, 230 aa, Homo sapiens
MAGAHYPLHCLHSAAAAAAAGSHHHHHHQHHHHGSPYASGGGNSYNHRSLAAYPYMSHSQHSPYLQSYHNSSAAAQTRGDDTDQQKTTVIENGEIRFNGKGKKIRKPRTIYSSLQLQALNHRFQQTQYLALPERAELAASLGLTQTQVKIWFQNKRSKFKKLLKQGSNPHESDPLQGSAALSPRSPALPPVWDVSASAKGVSMPPNSYMPGYSHWYSSPHQDTMQRPQMM

SEQ ID NO: 1158 - protein, 2099 aa, Homo sapiens
MKYAIYALCVNSHQHSQCQDCKDSLSEDLASATEPANDSLSSPGAANLFSTYLARCQQYLCSIPDSLCLELLENIFSLLLITSADLHPEPHLPEDYAEDDDIEGKSPSGLRSPSESPQHIAHPERKSERGSLGVPKTLAYTMPSHVKAEPKDSYPGPHRHSFLDLKHFTSGISGFLADEFAIGAFLRLLQEQLDEISSRSPPEKPKQESQSCSGSRDGLQSRLHRLSKVVSEAQWRHKVVTSNHRSGERRVELVGPEGGEGERSQEYGRELGVHRSHPITQGISSPWQPVSEHWGMLHVSEPSANLPQPVMPRKGQIKVDHSPFCPIGFALSEEQPSRRYQPATRHPSLRRGRRTRRSQAEGSLSAMSGRNELHSRLHPHPQSSLIPMMFSPPESLLASCILRGNFAEAHQVLFTFNLKSSPSSGELMFMERYQEVIQELAQVEHKIENQNSDAGSSTIRRTGSGRSTLQAIGSAAAAGMVFYSISDVTDKLLNTSGDPIPMLQEDFWISTALVEPTAPLREVLEDLSPPAMAAFDLACSQCQLWKTCKQLLETAERRLNSSLERRGRRIDHVLLNADGIRGFPVVLQQISKSLNYLLMSASQTKSESVEEKGGGPPRCSITELLQMCWPSLSEDCVASHTTLSQQLDQVLQSLREALELPEPRTPPLSSLVEQAAQKAPEAEAHPVQIQTQLLQKNLGKQTPSGSRQMDYLGTFFSYCSTLAAVLLQSLSSEPDHVEVKVGNPFVLLQQSSSQLVSHLLFERQVPPERLAALLAQENLSLSVPQVIVSCCCEPLALCSSRQSQQTSSLLTRLGTLAQLHASHCLDDLPLSTPSSPRTTENPTLERKPYSSPRDSSLPALTSSALAFLKSRSKLLATVACLGASPRLKVSKPSLSWKELRGRREVPLAAEQVARECERLLEQFPLFEAFLLAAWEPLRGSLQQGQSLAVNLCGWASLSTVLLGLHSPIALDVLSEAFEESLVARDWSRALQLTEVYGRDVDDLSSIKDAVLSCAVACDKEGWQYLFPVKDASLRSRLALQFVDRWPLESCLEILAYCISDTAVQEGLKCELQRKLAELQVYQKILGLQSPPVWCDWQTLRSCCVEDPSTVMNMILEAQEYELCEEWGCLYPIPREHLISLHQKHLLHLLERRDHDKALQLLRRIPDPTMCLEVTEQSLDQHTSLATSHFLANYLTTHFYGQLTAVRHREIQALYVGSKILLTLPEQHRASYSHLSSNPLFMLEQLLMNMKVDWATVAVQTLQQLLVGQEIGFTMDEVDSLLSRYAEKALDFPYPQREKRSDSVIHLQEIVHQAADPETLPRSPSAEFSPAAPPGISSIHSPSLRERSFPPTQPSQEFVPPATPPARHQWVPDETESICMVCCREHFTMFNRRHHCRRCGRLVCSSCSTKKMVVEGCRENPARVCDQCYSYCNKDVPEEPSEKPEALDSSKSESPPYSFVVRVPKADEVEWILDLKEEENELVRSEFYYEQAPSASLCIAILNLHRDSIACGHQLIEHCCRLSKGLTNPEVDAGLLTDIMKQLLFSAKMMFVKAGQSQDLALCDSYISKVDVLNILVAAAYRHVPSLDQILQPAAVTRLRNQLLEAEYYQLGVEVSTKTGLDTTGAWHAWGMACLKAGNLTAAREKFSRCLKPPFDLNQLNHGSRLVQDVVEYLESTVRPFVSLQDDDYFATLRELEATLRTQSLSLAVIPEGKIMNNTYYQECLFYLHNYSTNLAIISFYVRHSCLREALLHLLNKESPPEVFIEGIFQPSYKSGKLHTLENLLESIDPTLESWGKYLIAACQHLQKKNYYHILYELQQFMKDQVRAAMTCIRFFSHKAKSYTELGEKLSWLLKAKDHLKIYLQETSRSSGRKKTTFFRKKMTAADVSRHMNTLQLQMEVTRFLHRCESAGTSQITTLPLPTLFGNNHMKMDVACKVMLGGKNVEDGFGIAFRVLQDFQLDAAMTYCRAARQLVEKEKYSEIQQLLKCVSESGMAAKSDGDTILLNCLEAFKRIPPQELEGLIQAIHNDDNKVRAYLICCKLRSAYLIAVKQEHSRATALVQQVQQAAKSSGDAVVQDICAQWLLTSHPRGAHGPGSRK

SEQ ID NO: 1159 - protein, 710 aa, Homo sapiens
MWASQVSSFQASPFLTLWMTGAPLTARIALGPPLAWIPAASLTSTKGEFGVEDDRPARGPPPPKSEEASWSESGVSSSSGDGPFAGGEVDKRLHQLKTQLATLTSSLATVTQEKSRMEASYLADKKKMKQDLEDASNKAEEERARLEGELKGLQEQIAETKARLITQQHDRAQEQSDHALMLRELQKLLQEERTQRQDLELRLEETREALAGRAYAAEQMEGFELQTKQLTREVEELKSELQAIRDEKNQPDPRLQELQEEAARLKSHFQAQLQQEMRKTALAEDQLRQQSQVEEQRVAALENQISEVSELLGTYEKAKQKDQLAIQKLKERILQLDLENKTLALAASSRSPLDSHGEESSLDVNVLKDKMEKLKRLLQVAARKSQVTLDVEKLCDLEIMPSSEAADGEKATALYYQQELKQLKEEFERYKMRAQVVLKSKNTKDGNLGKELEAAQEQLAELKEKYISLRLSCEELEHQHQQEADDWKQELARLQQLHRQELERCQLDFRDRTLKLEEELHKQRDRALAVLTEKDLELEQLRSVALASGLPGRRSPVGGGGPGDPADTSSSDSLTQALQLAAANEPTFFLYAEQLARKEVEITSLRKQKHRLEVEVHQLQDRLLEEGERHREEVAALQSHIEKNIRDQSREGANLEYLKNIIYRFLTLPDSLGRQQTLTAILTILHFSPEEKQVIMRLPTSASWWPSGKR

SEQ ID NO: 1160 - protein, 339 aa, Homo sapiens
MAAACGPGAAGYCLLLGLHLFLLTAGPALGWNDPDRMLLRDVKALTLHYDRYTTSRRLDPIPQLKCVGGTAGCDSYTPKVIQCQNKGWDGYDVQWECKTDLDIAYKFGKTVVSCEGYESSEDQYVLRGSCGLEYNLDYTELGLQKLKESGKQHGFASFSDYYYKWSSADSCNMSGLITIVVLLGIAFVVYKLFLSDGQYSPPPYSEYPPFSHRYQRFTNSAGPPPPGFKSEFTGPQNTGHGATSGFGSAFTGQQGYENSGPGFWTGLGTGGILGYLFGSNRAATPFSDSWYYPSYPPSYPGTWNRAYSPLHGGSGSYSVCSNSDTKTRTASGYGGTRRR

SEQ ID NO: 1161 - protein, 367 aa, Homo sapiens
MIRNWLTIFILFPLKLVEKCESSVSLTVPPVVKLENGSSTNVSLTLRPPLNATLVITFEITFRSKNITILELPDEVVVPPGVTNSSFQVTSQNVGQLTVYLHGNHSNQTGPRIRFLVIRSSAISIINQVIGWIYFVAWSISFYPQVIMNWRRKSVIGLSFDFVALNLTGFVAYSVFNIGLLWVPYIKEQFLLKYPNGVNPVNSNDVFFSLHAVVLTLIIIVQCCLYERGGQRVSWPAIGFLVLAWLFAFVTMIVAAVGVITWLQFLFCFSYIKLAVTLVKYFPQAYMNFYYKSTEGWSIGNVLLDFTGGSFSLLQMFLQSYNNDQWTLIFGDPTKFGLGVFSIVFDVVFFIQHFCLYRKRPGYDQLN

SEQ ID NO: 1162 - protein, 637 aa, Homo sapiens
MLGKGVVGGGGGTKAPKPSFVSYVRPEEIHTNEKEVTEKEVTLHLLPGEQLLCEASTVLKYVQEDSCQHGVYGRLVCTDFKIAFLGDDESALDNDETQFKNKVIGENDITLHCVDQIYGVFDEKKKTLFGQLKKYPEKLIIHCKDLRVFQFCLRYTKEEEVKRIVSGIIHHTQAPKLLKRLFLFSYATAAQNNTVTDPKNHTVMFDTLKDWCWELERTKGNMKYKAVSVNEGYKVCERLPAYFVVPTPLPEENVQRFQGHGIPIWCWSCHNGSALLKMSALPKEQDDGILQIQKSFLDGIYKTIHRPPYEIVKTEDLSSNFLSLQEIQTAYSKFKQLFLIDNSTEFWDTDIKWFSLLESSSWLDIIRRCLKKAIEITECMEAQNMNVLLLEENASDLCCLISSLVQLMMDPHCRTRIGFQSLIQKEWVMGGHCFLDRCNHLRQNDKEEHQRQLSLPLTQSKSSPKRGFFREETDHLIKNLLGKRISKLINSSDELQDNFREFYDSWHSKSTDYHGLLLPHIEGPEIKVWAQRYLRWIPEAQILGGGQVATLSKLLEMMEEVQSLQEKIDERHHSQQAPQAEAPCLLRNSARLSSLFPFALLQRHSSKPVLPTSGWKALGDEDDLAKREDEFVDLGDV

SEQ ID NO: 1163 - protein, 251 aa, Homo sapiens
MSDIGDWFRSIPAITRYWFAATVAVPLVGKLGLISPAYLFLWPEAFLYRFQIWRPITATFYFPVGPGTGFLYLVNLYFLYQYSTRLETGAFDGRPADYLFMLLFNWICIVITGLAMDMQLLMIPLIMSVLYVWAQLNRDMIVSFWFGTRFKACYLPWVILGFNYIIGGSVINELIGNLVGHLYFFLMFRYPMDLGGRNFLSTPQFLYRWLPSRRGGVSGFGVPPASMRRAADQNGGGGRHNWGQGFRLGDQ

SEQ ID NO: 1164 - protein, 273 aa, Homo sapiens
MAFLAGPRLLDWASSPPHLQFNKFVLTGYRPASSGSGCLRSLFYLHNELGNIYTHGLALLGFLVLVPMTMPWGQLGKDGWLGGTHCVACLAPPAGSVLYHLFMCHQGGSAVYARLLALDMCGVCLVNTLGALPIIHCTLACRPWLRPAALVGYTVLSGVAGWRALTAPSTSARLRAFGWQAAARLLVFGARGVGLGSGAPGSLPCYLRMDALALLGGLVNVARLPERWGPGRFDYWGNSHQIMHLLSVGSILQLHAGVVPDLLWAAHHACPRD

SEQ ID NO: 1165 - protein, 797 aa, Homo sapiens
MHEIYKGNITPQLNKNTLKTSAATDVWAVYFSQFWIDYEGMKSGKGRPISFVDSFPLSIWICQPTRYAESQKEPQTCNQVSLNTSQSESSDLAGRLKRKKLLKEYYSTESEPLTNGGQKPSSSDTFFRFSPSSSEADIHLLVHVHKHVSMQINHYQYLLLLFLHESLILLSENLRKDVEAVTGSPASQTSICIGILLRSAELALLLHPVDQANTLKSPVSESVSPVVPDYLPTENGDFLSSKRKQISRDINRIRSVTVNHMSDNRSMSVDLSHIPLKDPLLFKSASDTNLQKGISFMDYLSDKHLGKISEDESSGLVYKSGSGEIGSETSDKKDSFYTDSSSVLNYREDSNILSFDSDGNQNILSSTLTSKGNETIESIFKAEDLLPEAASLSENLDISKEETPPVRTLKSQSSLSGKPKERCPPNLAPLCVSYKNMKRSSSQMSLDTISLDSMILEEQLLESDGSDSHMFLEKGNKKNSTTNYRGTAESVNAGANLQNYGETSPDAISTNSEGAQENHDDLMSVVVFKITGVNGEIDIRGEDTEICLQVNQVTPDQLGNISLRHYLCNRPVGSDQKAVIHSKSSPEISLRFESGPGAVIHSLLAEKNGFLQCHIENFSTEFLTSSLMNIQHFLEDETVATVMPMKIQVSNTKINLKDDSPRSSTVSLEPAPVTVHIDHLVVERSDDGSFHIRDSHMLNTGNDLKENVKSDSVLLTSGKYDLKKQRSVTQATQTSPGVPWPSQSANFPEFSFDFTREQLMEENESLKQELAKAKMALAEAHLEKDALLHHIKKMTVE

SEQ ID NO: 1166 - protein, 502 aa, Homo sapiens
MDYDFKAKLAAERERVEDLFEYEGCKVGRGTYGHVYKARRKDGKDEKEYALKQIEGTGISMSACREIALLRELKHPNVIALQKVFLSHSDRKVWLLFDYAEHDLWHIIKFHRASKANKKPMQLPRSMVKSLLYQILDGIHYLHANWVLHRDLKPANILVMGEGPERGRVKIADMGFARLFNSPLKPLADLDPVVVTFWYRAPELLLGARHYTKAIDIWAIGCIFAELLTSEPIFHCRQEDIKTSNPFHHDQLDRIFSVMGFPADKDWEDIRKMPEYPTLQKDFRRTTYANSSLIKYMEKHKVKPDSKVFLLLQKLLTMDPTKRITSEQALQDPYFQEDPLPTLDVFAGCQIPYPKREFLNEDDPEEKGDKNQQQQQNQHQQPTAPPQQAAAPPQAPPPQQNSTQTNGTAGGAGAGVGGTGAGLQHSQDSSLNQVPPNKKPRLGPSGANSGGPVMPSDYQHSSSRLNYQSSVQGSSQSQSTLGYSSSSQQSSQYHPSHQAHRY

SEQ ID NO: 1167 - protein, 476 aa, Homo sapiens
MAEPPSPVHCVAAAAPTATVSEKEPFGKLQLSSRDPPGSLSAKKVRTEEKKAPRRVNGEGGSGGNSRQLQPPAAPSPQSYGSPASWSFAPLSAAPSPSSSRSSFSFSAGTAVPSSASASLSQPVPRKLLVPPTLLHAQPHHLLLPAAAAAASANAKSRRPKEKREKERRRHGLGGAREAGGASREENGEVKPLPRDKIKDKIKERDKEKEREKKKHKVMNEIKKENGEVKILLKSGKEKPKTNIEDLQIKKVKKKKKKKHKENEKRKRPKMYSKSIQTICSGLLTDVEDQAAKGILNDNIKDYVGKNLDTKNYDSKIPENSEFPFVSLKEPRVQNNLKRLDTLEFKQLIHIEHQPNGGASVIHAYSNELSHLSPMEMERFAEEFVGLVFSENENSAAFYVMGIVHGAATYLPDFLDYFSFNFPNSPVKMEILGKKDIETTTMSNFHAQSLTVLQPGRQSETPSQKKRKKFMIMLSS

SEQ ID NO: 1168 - protein, 250 aa, Homo sapiens
MSIFTPTNQIRLTNVAVVRMKRAGKRFEIACYKNKVVGWRSGVEKDLDEVLQTHSVFVNVSKGQVAKKEDLISAFGTDDQTEICKQILTKGEVQVSDKERHTQLEQMFRDIATIVADKCVNPETKRPYTVILIERAMKDIHYSVKTNKSTKQQALEVIKQLKEKMKIERAHMRLRFILPVNEGKKLKEKLKPLIKVIESEDYGQQLEIVCLIDPGCFREIDELIKKETKGKGSLEVLNLKDVEEGDEKFE

SEQ ID NO: 1169 - protein, 1047 aa, Homo sapiens
MVEGKRHVLHGGRQERMRAKQKGKPLIKSSDLVRLIHYHHNSSPLHKQSSGPSSSPAAAAAPEKPGPKAAEVGDDFLGDFVVGERVWVNGVKPGVVQYLGETQFAPGQWAGVVLDDPVGKNDGAVGGVRYFECPALQGIFTRPSKLTRQPTAEGSGSDAHSVESLTAQNLSLHSGTATPPLTSRVIPLRESVLNSSVKTGNESGSNLSDSGSVKRGEKDLRLGDRVLVGGTKTGVVRYVGETDFAKGEWCGVELDEPLGKNDGAVAGTRYFQCPPKFGLFAPIHKVIRIGFPSTSPAKAKKTKRMAMGVSALTHSPSSSSISSVSSVASSVGGRPSRSGLLTETSSRYARKISGTTALQEALKEKQQHIEQLLAERDLERAEVAKATSHICEVEKEIALLKAQHEQYVAEAEEKLQRARLLVESVRKEKVDLSNQLEEERRKVEDLQFRVEEESITKGDLETQTQLEHARIGELEQSLLLEKAQAERLLRELADNRLTTVAEKSRVLQLEEELTLRRGEIEELQQCLLHSGPPPPDHPDAAEILRLRERLLSASKEHQRESGVLRDKYEKALKAYQAEVDKLRAANEKYAQEVAGLKDKVQQATSENMGLMDNWKSKLDSLASDHQKSLEDLKATLNSGPGAQQKEIGELKAVMEGIKMEHQLELGNLQAKHDLETAMHVKEKEALREKLQEAQEELAGLQRHWRAQLEVQASQHRLELQEAQDQRRDAELRVHELEKLDVEYRGQAQAIEFLKEQISLAEKKMLDYERLQRAEAQGKQEVESLREKLLVAENRLQAVEALCSSQHTHMIESNDISEETIRTKETVEGLQDKLNKRDKEVTALTSQTEMLRAQVSALESKCKSGEKKVDALLKEKRRLEAELETVSRKTHDASGQLVLISQELLRKERSLNELRVLLLEANRHSPGPERDLSREVHKAEWRIKEQKLKDDIRGLREKLTGLDKEKSLSDQRRYSLIDPSSAPELLRLQHQLMSTEDALRDALDQAQQVEKLMEAMRSCPDKAQTIGNSGSANGIHQQDKAQKQEDKH

SEQ ID NO: 1170 - protein, 777 aa, Homo sapiens
MSGSHTPACGPFSALTPSIWPQEILAKYTQKEESAEQPEFYYDEFGFRVYKEEGDEPGSSLLANSPLMEDAPQRLRWQAHLEFTHNHDVGDLTWDKIAVSLPRSEKLRSLVLAGIPHGMRPQLWMRLSGALQKKRNSELSYREIVKNSSNDETIAAKQIEKDLLRTMPSNACFASMGSIGVPRLRRVLRALAWLYPEIGYCQGTGMVAACLLLFLEEEDAFWMMSAIIEDLLPASYFSTTLLGVQTDQRVLRHLIVQYLPRLDKLLQEHDIELSLITLHWFLTAFASVVDIKLLLRIWDLFFYEGSRVLFQLTLGMLHLKEEELIQSENSASIFNTLSDIPSQMEDAELLLGVAMRLAGSLTDVAVETQRRKHLAYLIADQGQLLGAGTLTNLSQVVRRRTQRRKSTITALLFGEDDLEALKAKNIKQTELVADLREAILRVARHFQCTDPKNCSVVSRQLPGLLPNTALTPPTPLVGLCSLWQELTPDYSMESHQRDHENYVACSRSHRRRAKALLDFERHDDDELGFRKNDIITIVSQKDEHCWVGELNGLRGWFPAKFVEVLDERSKEYSIAGDDSVTEGVTDLVRGTLCPALKALFEHGLKKPSLLGGACHPWLFIEEAAGREVERDFASVYSRLVLCKTFRLDEDGKVLTPEELLYRAVQSVNVTHDAVHAQMDVKLRSLICVGLNEQVLHLWLEVLCSSLPTVEKWYQPWSFLRSPGWVQIKCELRVLCCFAFSLSQDWELPAKREAQQPLKEGVRDMLVKHHLFSWDVDG

SEQ ID NO: 1171 - protein, 749 aa, Homo sapiens
MSGSHTPACGPFSALTPSIWPQEILAKYTQKEESAEQPEFYYDEFGFRVYKEEGDEPGSSLLANSPLMEDAPQRLRWQAHLEFTHNHDVGDLTWDKIAVSLPRSEKLRSLVLAGIPHGMRPQLWMRLSGALQKKRNSELSYREIVKNSSNDETIAAKQIEKDLLRTMPSNACFASMGSIGVPRLRRVLRALAWLYPEIGYCQGTGMVAACLLLFLEEEDAFWMMSAIIEDLLPASYFSTTLLGVQTDQRVLRHLIVQYLPRLDKLLQEHDIELSLITLHWFLTAFASVVDIKLLLRIWDLFFYEGSRVLFQLTLGMLHLKEEELIQSENSASIFNTLSDIPSQMEDAELLLGVAMRLAGSLTDVAVETQRRKHLAYLIADQGQLLGAGTLTNLSQVVRRRTQRRKSTITALLFGEDDLEALKAKNIKQTELVADLREAILRVARHFQCTDPKNCSVELTPDYSMESHQRDHENYVACSRSHRRRAKALLDFERHDDDELGFRKNDIITIVSQKDEHCWVGELNGLRGWFPAKFVEVLDERSKEYSIAGDDSVTEGVTDLVRGTLCPALKALFEHGLKKPSLLGGACHPWLFIEEAAGREVERDFASVYSRLVLCKTFRLDEDGKVLTPEELLYRAVQSVNVTHDAVHAQMDVKLRSLICVGLNEQVLHLWLEVLCSSLPTVEKWYQPWSFLRSPGWVQIKCELRVLCCFAFSLSQDWELPAKREAQQPLKEGVRDMLVKHHLFSWDVDG

SEQ ID NO: 1172 - protein, 1616 aa, Homo sapiens
MEGAEPRARPERLAEAETRAADGGRLVEVQLSGGAPWGFTLKGGREHGEPLVITKIEEGSKAAAVDKLLAGDEIVGINDIGLSGFRQEAICLVKGSHKTLKLVVKRRSELGWRPHSWHATKFSDSHPELAASPFTSTSGCPSWSGRHHASSSSHDLSSSWEQTNLQRTLDHFSSLGSVDSLDHPSSRLSVAKSNSSIDHLGSHSKRDSAYGSFSTSSSTPDHTLSKADTSSAENILYTVGLWEAPRQGGRQAQAAGDPQGSEEKLSCFPPRVPGDSGKGPRPEYNAEPKLAAPGRSNFGPVWYVPDKKKAPSSPPPPPPPLRSDSFAATKSHEKAQGPVFSEAAAAQHFTALAQAQPRGDRRPELTDRPWRSAHPGSLGKGSGGPGCPQEAHADGSWPPSKDGASSRLQASLSSSDVRFPQSPHSGRHPPLYSDHSPLCADSLGQEPGAASFQNDSPPQVRGLSSCDQKLGSGWQGPRPCVQGDLQAAQLWAGCWPSDTALGALESLPPPTVGQSPRHHLPQPEGPPDARETGRCYPLDKGAEGCSAGAQEPPRASRAEKASQRLAASITWADGESSRICPQETPLLHSLTQEGKRRPESSPEDSATRPPPFDAHVGKPTRRSDRFATTLRNEIQMHRAKLQKSRSTVALTAAGEAEDGTGRWRAGLGGGTQEGPLAGTYKDHLKEAQARVLRATSFKRRDLDPNPGDLYPESLEHRMGDPDTVPHFWEAGLAQPPSSTSGGPHPPRIGGRRRFTAEQKLKSYSEPEKMNEVGLTRGYSPHQHPRTSEDTVGTFADRWKFFEETSKPVPQRPAQKQALHGIPRDKPERPRTAGRTCEGTEPWSRTTSLGDSLNAHSAAEKAGTSDLPRRLGTFAEYQASWKEQRKPLEARSSGRCHSADDILDVSLDPQERPQHVHGRSRSSPSTDHYKQEASVELRRQAGDPGEPREELPSAVRAEEGQSTPRQADAQCREGSPGSQQHPPSQKAPNPPTFSELSHCRGAPELPREGRGRAGTLPRDYRYSEESTPADLGPRAQSPGSPLHARGQDSWPVSSALLSKRPAPQRPPPPKREPRRYRATDGAPADAPVGVLGRPFPTPSPASLDVYVARLSLSHSPSVFSSAQPQDTPKATVCERGSQHVGGDASRPLPEALLPPKQQHLRLQTATMETSRSPSPQFAPQKLTDKPPLLIQDEDSTRIERVMDNNTTVKMVPIKIVHSESQPEKESRQSLACPAEPPALPHGLEKDQIKTLSTSEQFYSRFCLYTRQGAEPEAPHRAQPAEPQPLGTQVPPEKDRCTSPPGLSYMKAKEKTVEDLKSEELAREIVGKDKSLADILDPSVKIKTTMDLMEGIFPKDEHLLEEAQQRRKLLPKIPSPRSTEERKEEPSVPAAVSLATNSTYYSTSAPKAELLIKMKDLQEQQEHEEDSGSDLDHDLSVKKQELIESISRKLQVLREARESLLEDVQANTVLGAEVEAIVKGVCKPSEFDKFRMFIGDLDKVVNLLLSLSGRLARVENALNNLDDGASPGDRQSLLEKQRVLIQQHEDAKELKENLDRRERIVFDILANYLSEESLADYEHFVKMKSALIIEQRELEDKIHLGEEQLKCLLDSLQPERGK

SEQ ID NO: 1173 - protein, 593 aa, Homo sapiens
METPPLPPACTKQGHQKPLDSKDDNTEKHCPVTVNPWHMKKAFKVMNELRSQNLLCDVTIVAEDMEISAHRVVLAACSPYFHAMFTGEMSESRAKRVRIKEVDGWTLRMLIDYVYTAEIQVTEENVQVLLPAAGLLQLQDVKKTCCEFLESQLHPVNCLGIRAFADMHACTDLLNKANTYAEQHFADVVLSEEFLNLGIEQVCSLISSDKLTISSEEKVFEAVIAWVNHDKDVRQEFMARLMEHVRLPLLPREYLVQRVEEEALVKNSSACKNYLIEAMKYHLLPTEQRILMKSVRTRLRTPMNLPKLMVVVGGQAPKAIRSVECYDFKEQRWHQVAELPSRRCRAGMVYMAGLVFAVGGFNGSLRVRTVDSYDPVKDQWTSVANMRDRRSTLGAAVLNGLLYAVGGFDGSTGLSSVEAYNIKSNEWFHVAPMNTRRSSVGVGVVGGLLYAVGGYDGASRQYLSTVECYNATTNEWTYIAEMSTRRSGAGVGVLNNLLYAVGGHDGPLVRKSVEVYDPTTNAWRQVADMNMCRRNAGVCAVNGLLYVVGGDDGSCNLASVEYYNPTTDKWTVVSSCMSTGRSYAGVTVIDKPL

SEQ ID NO: 1174 - protein, 284 aa, Homo sapiens
MDAIKKKMQMLKLDKENALDRAEQAEADKKAAEDRSKQLEEDIAAKEKLLRVSEDERDKYSEALKDAEDSLLAAEEAAAKAEADVASLNRRIQLVEEELDRAQERLATALQKLEEAEKAADESERGMKVIESRAQKDEEKMEIQEIQLKEAKHIAEDADRKYEEVARKLVIIESDLERAEERAELSEGKCAELEEELKTVTNNLKSLEAQAEKYSQKEDRYEEEIKVLSDKLKEAETRAEFAERSVTKLEKSIDDLEEKVAHAKEENLSMHQMLDQTLLELNNM

SEQ ID NO: 1175 - protein, 207 aa, Homo sapiens
MEESKLKNDDRKTPVNWKDSRGTRVAVSSPMSQHQSYIQYLHAYPYPQMYDPSHPAYRAVSPVLMHSYPGAYLSPGFHYPVYGKMSGREETEKVNTSPSVNTKTTTESKALDLLQQHANQYRSKSPAPVEKATAEREREAERERDRHSPFGQRHLHTHHHTHVGMGYPLIPGQYDPFQGLTSAALVASQQVAAQASASGMFPGQRRE

SEQ ID NO: 1176 - protein, 210 aa, Homo sapiens
MVKGFRNWLKPSSLSTLPLQYGILFPKLLAWLVHLHFGHFSSAVISVTSFYLSMNLDGSAQDPEKREYSSVCVGREDDIKKSERMTAVVHDREVVIFYHKGEYHAMDIRCYHSGGPLHLGDIEDFDGRPCIVCPWHKYKITLATGEGLYQSINPKDPSAKPKWCSKGIKQRIHTVTVDNGNIYVTLSNEPFKCDSDFYATGDFKVIKSSS

SEQ ID NO: 1177 - protein, 92 aa, Homo sapiens
MSCQQNQQQCQPPPKCPSPKCPPKSPVQCLPPASSGCAPSSGGCGPSSEGGCFLNHHRRHHRCRRQRPNSCDRGSGQQGGGSGCGHGSGGCC

SEQ ID NO: 1178 - protein, 404 aa, Homo sapiens
MLGDPPASPLTRNRTGAAASRLPTCLQQWPRGALRKRLYKGLSPALPSREENRRRAQEETVPAGGRSCRSGGLLGAGLGGDRWRGGAWGSEGWALEIRGSTLLRCLDSGFRPGASRGLVGSWAAMESTLGAGIVIAEALQNQLAWLENVWLWITFLGDPKILFLFYFPAAYYASRRVGIAVLWISLITEWLNLIFKCRWVRVMPSLAYCTFLLAVGLSRIFILAHFPHQVLAGLITGAVLGWLMTPRVPMERELSFYGLTALALMLGTSLIYWTLFTLGLDLSWSISLAFKWCERPEWIHVDSRPFASLSRDSGAALGLGIALHSPCYAQVRRAQLGNGQKIACLVLAMGLLGPLDWLGHPPQISLFYIFNFLKYTLWPCLVLALVPWAVHMFSAQEAPPIHSS

SEQ ID NO: 1179 - protein, 266 aa, Homo sapiens
MMALGAAGATRVFVAMVAAALGGHPLLGVSATLNSVLNSNAIKNLPPPLGGAAGHPGSAVSAAPGILYPGGNKYQTIDNYQPYPCAEDEECGTDEYCASPTRGGDAGVQICLACRKRRKRCMRHAMCCPGNYCKNGICVSSDQNHFRGEIEETITESFGNDHSTLDGYSRRTTLSSKMYHTKGQEGSVCLRSSDCASGLCCARHFWSKICKPVLKEGQVCTKHRRKGSHGLEIFQRCYCGEGLSCRIQKDHHQASNSSRLHTCQRH

SEQ ID NO: 1180 - protein, 520 aa, Homo sapiens [sequence omitted]

SEQ ID NO: 1181 - protein, 1328 aa, Homo sapiens
MISTAPLYSGVHNWTSSDRIRMCGINEERRAPLSDEESTTGDCQHFGSQEFCVSSSFSKVELTAVGSGSNARGADPDGSATEKLGHKSEDKPDDPQPKMDYAGNVAEAEGLLVPLSSPGDGLKLPASDSAEASNSRADCSWTPLNTQMSKQVDCSPAGVKALDSRQGVGEKNTFILATLGTGVPVEGTLPLVTTNFSPLPAPICPPAPSSASVPHSVPDAFQAPVPPSAPTLVLAPVPTPVLAPMPASTPPAAPAPPSVPMPTPTPSSGPPSTPTLIPAFAPTPVPAPTPAPIFTPAPTPMPAATPAAIPTSAPIPASFSLSRVCFPAAQAPAMQKVPLSFQPGTVLTPSQPLVYIPPPSCGQPLSVATLPTTLGVSSTLTLPVLPSYLQDRCLPGVLASPELRSYPYAFSVARPLTSDSKLVSLEVNRLPCTSPSGSTTTQPAPDGVPGPLADTSLVTASAKVLPTPQPLLPAPSGSSAPPHPAKMPSGTEQQTEGTSVTFSPLKSPPQLEREMASPPECSEMPLDLSSKSNRQKLPLPNQRKTPPMPVLTPVHTSSKALLSTVLSRSQRTTQAAGGNVTSCLGSTSSPFVIFPEIVRNGDPSTWVKNSTALISTIPGTYVGVANPVPASLLLNKDPNLGLNRDPRHLPKQEPISIIDQGEPKGTGATCGKKGSQAGAEGQPSTVKRYTPARIAPGLPGCQTKELSLWKPTGPANIYPRCSVNGKPTSTQVLPVGWSPYHQASLLSIGISSAGQLTPSQGAPIRPTSVVSEFSGVPSLSSSEAVHGLPEGQPRPGGSFVPEQDPVTKNKTCRIAAKPYEEQVNPVLLTLSPQTGTLALSVQPSGGDIRMNQGPEESESHLCSDSTPKMEGPQGACGLKLAGDTKPKNQVLATYMSHELVLATPQNLPKMPELPLLPHDSHPKELILDVVPSSRRGSSTERPQLGSQVDLGRVKMEKVDGDVVFNLATCFRADGLPVAPQRGQAEVRAKAGQARVKQESVGVFACKNKWQPDDVTESLPPKKMKCGKEKDSEEQQLQPQAKAVVRSSHRPKCRKLPSDPQESTKKSPRGASDSGKEHNGVRGKHKHRKPTKPESQSPGKRADSHEEGSLEKKAKSSFRDFIPVVLSTRTRSQSDLKARKQKTSSSQSLEHRLRNRNLLLPNKVQGISDSPNGFLPNNLEEPACLENSEKPSGKRKCKTKHMATVSEEAKGKGRWSQQKTRSPKSPTPVKPTEPCTPSKSRSASSEEASESPTARQIPPEARRLIVNKNAGETLLQRAARLGYKDVVLYCLQKDSEDVNHRDNAGYTALHEACSRGWTDILNILLEHGA

SEQ ID NO: 1182 - protein, 990 aa, Homo sapiens
MTSPLVTWVKTFGPLAAGNGTNLDEYVALVDGVFLNQVMLQINPKLESQRVNKKVNNDASLRMHNLSILVRQIKFYYQETLQQLIMMSLPNVLIIGKNPFSEQGTEEVKKLLLLLLGCAVQCQKKEEFIERIQGLDFDTKAAVAAHIQEVTHNQENVFDLQWMEVTDMSQEDIEPLLKNMALHLKRLIDERDEHSETIIELSEERDGLHFLPHASSSAQSPCGSPGMKRTESRQHLSVELADAKAKIRRLRQELEEKTEQLLDCKQELEQMEIELKRLQQENMNLLSDARSARMYRDELDALREKAVRVDKLESEVSRYKERLHDIEFYKARVEELKEDNQVLLETKTMLEDQLEGTRARSDKLHELEKENLQLKAKLHDMEMERDMDRKKIEELMEENMTLEMAQKQSMDESLHLGWELEQISRTSELSEAPQKSLGHEVNELTSSRLLKLEMENQSLTKTVEELRTTVDSVEGNASKILKMEKENQRLSKKVEILENEIVQEKQSLQNCQNLSKDLMKEKAQLEKTIETLRENSERQIKILEQENEHLNQTVSSLRQRSQISAEARVKDIEKENKILHESIKETSSKLSKIEFEKRQIKKELEHYKEKGERAEELENELHHLEKENELLQKKITNLKITCEKIEALEQENSELERENRKLKKTLDSFKNLTFQLESLEKENSQLDEENLELRRNVESLKCASMKMAQLQLENKELESEKEQLKKGLELLKASFKKTERLEVSYQGLDIENQRLQKTLENSNKKIQQLESELQDLEMENQTLQKNLEELKISSKRLEQLEKENKSLEQETSQLEKDKKQLEKENKRLRQQAEIKDTTLEENNVKIGNLEKENKTLSKEIGIYKESCVRLKELEKENKELVKRATIDIKTLVTLREDLVSEKLKTQQMNNDLEKLTHELEKIGLNKERLLHDEQSTDDSRYKLLESKLESTLKKSLEIKEEKIAALEARLEESTNYNQQLRQELKTVKKK

SEQ ID NO: 1183 - protein, 819 aa, Homo sapiens
MDPGTSRGPDVGVGESQAEEPRSFEVTRREGLSSHNELLASCGKKFCSRGSRCVLSRKTGEPECQCLEACRPSYVPVCGSDGRFYENHCKLHRAACLLGKRITVIHSKDCFLKGDTCTMAGYARLKNVLLALQTRLQPLQEGDSRQDPASQKRLLVESLFRDLDADGNGHLSSSELAQHVLKKQDLDEDLLGCSPGDLLRFDDYNSDSSLTLREFYMAFQVVQLSLAPEDRVSVTTVTVGLSTVLTCAVHGDLRPPIIWKRNGLTLNFLDLEDINDFGEDDSLYITKVTTIHMGNYTCHASGHEQLFQTHVLQVNVPPVIRVYPESQAQEPGVAASLRCHAEGIPMPRITWLKNGVDVSTQMSKQLSLLANGSELHISSVRYEDTGAYTCIAKNEVGVDEDISSLFIEDSARKTLANILWREEGLSVGNMFYVFSDDGIIVIHPVDCEIQRHLKPTEKIFMSYEEICPQREKNATQPCQWVSAVNVRNRYIYVAQPALSRVLVVDIQAQKVLQSIGVDPLPAKLSYDKSHDQVWVLSWGDVHKSRPSLQVITEASTGQSQHLIRTPFAGVDDFFIPPTNLIINHIRFGFIFNKSDPAVHKVDLETMMPLKTIGLHHHGCVPQAMAHTHLGGYFFIQCRQDSPASAARQLLVDSVTDSVLGPNGDVTGTPHTSPDGRFIVSAAADSPWLHVQEITVRGEIQTLYDLQINSGISDLAFQRSFTESNQYNIYAALHTEPDLLFLELSTGKVGMLKNLKEPPAGPAQPWGGTHRIMRDSGLFGQYLLTPARESLFLINGRQNTLRCEVSGIKGGTTVVWVGEV

SEQ ID NO: 1184 - protein, 837 aa, Homo sapiens
MARGERRRRAVPAEGVRTAERAARGGPGRRDGRGGGPRSTAGGVALAVVVLSLALGMSGRWVLAWYRARRAVTLHSAPPVLPADSSSPAVAPDLFWGTYRPHVYFGMKTRSPKPLLTGLMWAQQGTTPGTPKLRHTCEQGDGVGPYGWEFHDGLSFGRQHIQDGALRLTTEFVKRPGGQHGGDWSWRVTVEPQDSGTSALPLVSLFFYVVTDGKEVLLPEVGAKGQLKFISGHTSELGDFRFTLLPPTSPGDTAPKYGSYNVFWTSNPGLPLLTEMVKSRLNSWFQHRPPGASPERYLGLPGSLKWEDRGPSGQGQGQFLIQQVTLKIPISIEFVFESGSAQAGGNQALPRLAGSLLTQALESHAEGFRERFEKTFQLKEKGLSSGEQVLGQAALSGLLGGIGYFYGQGLVLPDIGVEGSEQKVDPALFPPVPLFTAVPSRSFFPRGFLWDEGFHQLVVQRWDPSLTREALGHWLGLLNADGWIGREQILGDEARARVPPEFLVQRAVHANPPTLLLPVAHMLEVGDPDDLAFLRKALPRLHAWFSWLHQSQAGPLPLSYRWRGRDPALPTLLNPKTLPSGLDDYPRASHPSVTERHLDLRCWVALGARVLTRLAEHLGEAEVAAELGPLAASLEAAESLDELHWAPELGVFADFGNHTKAVQLKPRPPQGLVRVVGRPQPQLQYVDALGYVSLFPLLLRLLDPTSSRLGPLLDILADSRHLWSPFGLRSLAASSSFYGQRNSEHDPPYWRGAVWLNVNYLALGALHHYGHLEGPHQARAAKLHGELRANVVGNVWRQYQATGFLWEQYSDRDGRGMGCRPFHGWTSLVLLAMAEDY

SEQ ID NO: 1185 - protein, 1309 aa, Homo sapiens
MLLNGDCPESLKKEAAAAEPPRENGLDEAGPGDETTGQEAIVIQDTGFSVKILAPGIEPFSLQVSPQEMVQEIHQVLMDREDTCHRTCFSLHLDGNVLDHFSELRSVEGLQEGSVLRVVEEPYTVREARIHVRHVRDLLKSLDPSDAFNGVDCNSLSFLSVFTDGDLGDSGKRKKGLEMDPIDCTPPEYILPGSRERPLCPLQPQNRDWKPLQCLKVLTMSGWNPPPGNRKMHGDLMYLFVITAEDRQVSITASTRGFYLNQSTAYHFNPKPASPRFLSHSLVELLNQISPTFKKNFAVLQKKRVQRHPFERIATPFQVYSWTAPQAEHAMDCVRAEDAYTSRLGYEEHIPGQTRDWNEELQTTRELPRKNLPERLLRERAIFKVHSDFTAAATRGAMAVIDGNVMAINPSEETKMQMFIWNNIFFSLGFDVRDHYKDFGGDVAAYVAPTNDLNGVRTYNAVDVEGLYTLGTVVVDYRGYRVTAQSIIPGILERDQEQSVIYGSIDFGKTVVSHPRYLELLERTSRPLKILRHQVLNDRDEEVELCSSVECKGIIGNDGRHYILDLLRTFPPDLNFLPVPGEELPEECARAGFPRAHRHKLCCLRQELVDAFVEHRYLLFMKLAALQLMQQNASQLETPSSLENGGPSSLESKSEDPPGQEAGSEEEGSSASGLAKVKELAETIAADDGTDPRSREVIRNACKAVGSISSTAFDIRFNPDIFSPGVRFPESCQDEVRDQKQLLKDAAAFLLSCQIPGLVKDCMEHAVLPVDGATLAEVMRQRGINMRYLGKVLELVLRSPARHQLDHVFKIGIGELITRSAKHIFKTYLQGVELSGLSAAISHFLNCFLSSYPNPVAHLPADELVSKKRNKRRKNRPPGAADNTAWAVMTPQELWKNICQEAKNYFDFDLECETVDQAVETYGLQKITLLREISLKTGIQVLLKEYSFDSRHKPAFTEEDVLNIFPVVKHVNPKASDAFHFFQSGQAKVQQGFLKEGCELINEALNLFNNVYGAMHVETCACLRLLARLHYIMGDYAEALSNQQKAVLMSERVMGTEHPNTIQEYMHLALYCFASSQLSTALSLLYRARYLMLLVFGEDHPEMALLDNNIGLVLHGVMEYDLSLRFLENALAVSTKYHGPKALKVALSHHLVARVYESKAEFRSALQHEKEGYTIYKTQLGEDHEKTKESSEYLKCLTQQAVALQRTMNEIYRNGSSANIPPLKFTAPSMASVLEQLNVINGILFIPLSQKDLENLKAEVARRHQLQEASRNRDRAEEPMATEPAPAGAPGDLGSQPPAAKDPSPSVQG

SEQ ID NO: 1186 - protein, 1207 aa, Homo sapiens
MLLTLIILLPVVSKFSFVSLSAPQHWSCPEGTLAGNGNSTCVGPAPFLIFSHGNSIFRIDTEGTNYEQLVVDAGVSVIMDFHYNEKRIYWVDLERQLLQRVFLNGSRQERVCNIEKNVSGMAINWINEEVIWSNQQEGIITVTDMKGNNSHILLSALKYPANVAVDPVERFIFWSSEVAGSLYRADLDGVGVKALLETSEKITAVSLDVLDKRLFWIQYNREGSNSLICSCDYDGGSVHISKHPTQHNLFAMSLFGDRIFYSTWKMKTIWIANKHTGKDMVRINLHSSFVPLGELKVVHPLAQPKAEDDTWEPEQKLCKLRKGNCSSTVCGQDLQSHLCMCAEGYALSRDRKYCEDVNECAFWNHGCTLGCKNTPGSYYCTCPVGFVLLPDGKRCHQLVSCPRNVSECSHDCVLTSEGPLCFCPEGSVLERDGKTCSGCSSPDNGGCSQLCVPLSPVSWECDCFPGYDLQLDEKSCAASGPQPFLLFANSQDIRHMHFDGTDYGTLLSQQMGMVYALDHDPVENKIYFAHTALKWIERANMDGSQRERLIEEGVDVPEGLAVDWIGRRFYWTDRGKSLIGRSDLNGKRSKIITKENISQPRGIAVHPMAKRLFWTDTGINPRIESSSLQGLGRLVIASSDLIWPSGITIDFLTDKLYWCDAKQSVIEMANLDGSKRRRLTQNDVGHPFAVAVFEDYVWFSDWAMPSVIRVNKRTGKDRVRLQGSMLKPSSLVVVHPLAKPGADPCLYQNGGCEHICKKRLGTAWCSCREGFMKASDGKTCLALDGHQLLAGGEVDLKNQVTPLDILSKTRVSEDNITESQHMLVAEIMVSDQDDCAPVGCSMYARCISEGEDATCQCLKGFAGDGKLCSDIDECEMGVPVCPPASSKCINTEGGYVCRCSEGYQGDGIHCLDIDECQLGVHSCGENASCTNTEGGYTCMCAGRLSEPGLICPDSTPPPHLREDDHHYSVRNSDSECPLSHDGYCLHDGVCMYIEALDKYACNCVVGYIGERCQYRDLKWWELRHAGHGQQQKVIVVAVCVVVLVMLLLLSLWGAHYYRTQKLLSKNPKNPYEESSRDVRSRRPADTEDGMSSCPQPWFVVIKEHQDLKNGGQPVAGEDGQAADGSMQPTSWRQEPQLCGMGTEQGCWIPVSSDKGSCPQVMERSFHMPSYGTQTLEGGVEKPHSLLSANPLWQQRALDPPHQMELTQ

SEQ ID NO: 1187 - protein, 84 aa, Homo sapiens
MATMENKVICALVLVSMLALGTLAEAQTETCTVAPRERQNCGFPGVTPSQCANKGCCFDDTVRGVPWCFYPNTIDVPPEEECEF

SEQ ID NO: 1188 - protein, 557 aa, Homo sapiens
MAKSNGENGPRAPAAGESLSGTRESLAQGPDAATTDELSSLGSDSEANGFAERRIDKFGFIVGSQGAEGASILGQTVPSPHGRVGEGPPIRSYTASSTGTGNRLEEVPLEVLRQRESKWLDMLNNWDKWMAKKHKKIRLRCQKGIPPSLRGRAWQYLSGGKVKLQQNPGKFDELDMSPGDPKWLDVIERDLHRQFPFHEMFVSRGGHGQQDLFRVLKAYTLYRPEEGYCQAQAPIAAVLLMHMPAEQAFWCLVQICEKYLPGYYSEKLEAIQLDGEILFSLLQKVSPVAHKHLSRQKIDPLLYMTEWFMCAFSRTLPWSSVLRVWDMFFCEEKPQKASLYLLPIPHAGVKIIFRVGLVLLKHALGSPEKVKACQGQYETIERLRSLSPKIMQEAFLVQEVVELPVTERQIEREHLIQLRRWQETRGELQCRSPPRLHGAKAILDAEPGPRPALQPSPSIRLPLDAPLPGSKAKPKPPKQAQKEQRKQMKGRGQLEKPPAPNQAMVVAAAGDACPPQHVPPKDSAPKDSAPQDLAPQVSAHHRSQESLTSQESEDTYL

SEQ ID NO: 1189 - protein, 196 aa, Homo sapiens
MGSRSSHAAVIPDGDSIRRETGFSQASLLRLHHRFRALDRNKKGYLSRMDLQQIGALAVNPLGDRIIESFFPDGSQRVDFPGFVRVLAHFRPVEDEDTETQDPKKPEPLNSRRNKLHYAFQLYDLDRDGKISRHEMLQVLRLMVGVQVTEEQLENIADRTVQEADEDGDGAVSFVEFTKSLEKMDVEQKMSIRILK

SEQ ID NO: 1190 - protein, 123 aa, Homo sapiens
MSTLSNFTQTLEDVFRRIFITYMDNWRQNTTAEQEALQAKVDAENFYYVILYLMVMIGMFSFIIVAILVSTVKSKRREHSNDPYHQYIVEDWQEKYKSQILNLEESKATIHENIGAAGFKMSP

SEQ ID NO: 1191 - protein, 129 aa, Homo sapiens
MGRRDAQLLAALLVLGLCALAGSEKPSPCQCSRLSPHNRTNCGFPGITSDQCFDNGCCFDSSVTGVPWCFHPLPKQESDQCVMEVSDRRNCGYPGISPEECASRKCCFSNFIFEVPWCFFPKSVEDCHY

SEQ ID NO: 1192 - protein, 68 aa, Homo sapiens
MVYYPELFVWVSQEPFPNKDMEGRLPKGRLPVPKEVNRKKNDETNAASLTPLGSSELRSPRISYLHFF

SEQ ID NO: 1193 - protein, 152 aa, Homo sapiens [sequence omitted]

SEQ ID NO: 1194 - protein, 645 aa, Homo sapiens
MPRSRGGRAAPGPPPPPPPPGQAPRWSRWRVPGRLLLLLLPALCCLPGAARAAAAAAGAGNRAAVAVAVARADEAEAPFAGQNWLKSYGYLLPYDSRASALHSAKALQSAVSTMQQFYGIPVTGVLDQTTIEWMKKPRCGVPDHPHLSRRRRNKRYALTGQKWRQKHITYSIHNYTPKVGELDTRKAIRQAFDVWQKVTPLTFEEVPYHEIKSDRKEADIMIFFASGFHGDSSPFDGEGGFLAHAYFPGPGIGGDTHFDSDEPWTLGNANHDGNDLFLVAVHELGHALGLEHSSDPSAIMAPFYQYMETHNFKLPQDDLQGIQKIYGPPAEPLEPTRPLPTLPVRRIHSPSERKHERQPRPPRPPLGDRPSTPGTKPNICDGNFNTVALFRGEMFVFKDRWFWRLRNNRVQEGYPMQIEQFWKGLPARIDAAYERADGRFVFFKGDKYWVFKEVTVEPGYPHSLGELGSCLPREGIDTALRWEPVGKTYFFKGERYWRYSEERRATDPGYPKPITVWKGIPQAPQGAFISKEGYYTYFYKGRDYWKFDNQKLSVEPGYPRNILRDWMGCNQKEVERRKERRLPQDDVDIMVTINDVPGSVNAVAVVIPCILSLCILVLVYTIFQFKNKTGPQPVTYYKRPVQEWV

SEQ ID NO: 1195 - protein, 526 aa, Homo sapiens
MASGPHSTATAAAAASSAAPSAGGSSSGTTTTTTTTTGGILIGDRLYSEVSLTIDHSLIPEERLSPTPSMQDGLDLPSETDLRILGCELIQAAGILLRLPQVAMATGQVLFHRFFYSKSFVKHSFEIVAMACINLASKIEEAPRRIRDVINVFHHLRQLRGKRTPSPLILDQNYINTKNQVIKAERRVLKELGFCVHVKHPHKIIVMYLQVLECERNQTLVQTAWNYMNDSLRTNVFVRFQPETIACACIYLAARALQIPLPTRPHWFLLFGTTEEEIQEICIETLRLYTRKKPNYELLEKEVEKRKVALQEAKLKAKGLNPDGTPALSTLGGFSPASKPSSPREVKAEEKSPISINVKTVKKEPEDRQQASKSPYNGVRKDSKRSRNSRSASRSRSRTRSRSRSHTPRRHYNNRRSRSGTYSSRSRSRSRSHSESPRRHHNHGSPHLKAKHTRDDLKSSNRHGHKRKKSRSRSQSKSRDHSDAAKKHRHERGHHRDRRERSRSFERSHKSKHHGGSRSGHGRHRR

SEQ ID NO: 1196 - protein, 1083 aa, Homo sapiens
MPTNFTVVPVEAHADGGGDETAERTEAPGTPEGPEPERPSPGDGNPRENSPFLNNVEVEQESFFEGKNMALFEEEMDSNPMVSSLLNKLANYTNLSQGVVEHEEDEESRRREAKAPRMGTFIGVYLPCLQNILGVILFLRLTWIVGVAGVLESFLIVAMCCTCTMLTAISMSAIATNGVVPAGGSYYMISRSLGPEFGGAVGLCFYLGTTFAGAMYILGTIEIFLTYISPGAAIFQAEAAGGEAAAMLHNMRVYGTCTLVLMALVVFVGVKYVNKLALVFLACVVLSILAIYAGVIKSAFDPPDIPVCLLGNRTLSRRSFDACVKAYGIHNNSATSALWGLFCNGSQPSAACDEYFIQNNVTEIQGIPGAASGVFLENLWSTYAHAGAFVEKKGVPSVPVAEESRASTLPYVLTDIAASFTLLVGIYFPSVTGIMAGSNRSGDLKDAQKSIPTGTILAIVTTSFIYLSCIVLFGACIEGVVLRDKFGEALQGNLVIGMLAWPSPWVIVIGSFFSTCGAGLQTLTGAPRLLQAIARDGIVPFLQVFGHGKANGEPTWALLLTVLICETGILIASLDSVAPILSMFFLMCYLFVNLACAVQTLLRTPNWRPRFKFYHWTLSFLGMSLCLALMFICSWYYALSAMLIAGCIYKYIEYRGAEKEWGDGIRGLSLNAARYALLRVEHGPPHTKNWRPQVLVMLNLDAEQAVKHPRLLSFTSQLKAGKGLTIVGSVLEGTYLDKHMEAQRAEENIRSLMSTEKTKGFCQLVVSSSLRDGMSHLIQSAGLGGLKHNTVLMAWPASWKQEDNPFSWKNFVDTVRDTTAAHQALLVAKNVDSFPQNQERFGGGHIDVWWIVHDGGMLMLLPFLLRQHKVWRKCRMRIFTVAQVDDNSIQMKKDLQMFLYHLRISAEVEVVEMVENDISAFTYERTLMMEQRSQMLKQMQLSKNEQEREAQLIHDRNTASHTAAAARTQAPPTPDKVQMTWTREKLIAEKYRSRDTSLSGFKDLFSMKPDQSNVRRMHTAVKLNGVVLNKSQDAQLVLLNMPGPPKNRQGDENYMEFLEVLTEGLNRVLLVRGGGREVITIYS

SEQ ID NO: 1197 - protein, 907 aa, Homo sapiens
MTSHARVRKLGSSRAAAEPGAGPAREPARLCGYLQKLSGKGPLRGYRSRWFVFDARRCYLYYFKSPQDALPLGHLDIADACFSYQGPDEAAEPGTEPPAHFQVHSAGAVTVLKAPNRQLMTYWLQELQQKRWEYCNSLDMVKWDSRTSPTPGDFPKGLVARDNTDLIYPHPNASAEKARNVLAVETVPGELVGEQAANQPAPGHPNSINFYSLKQWGNELKNSMSSFRPGRGHNDSRRTVFYTNEEWELLDPTPKDLEESIVQEEKKKLTPEGNKGVTGSGFPFDFGRNPYKGKRPLKDIIGSYKNRHSSGDPSSEGTSGSGSVSIRKPASEMQLQVQSQQEELEQLKKDLSSQKELVRLLQQTVRSSQYDKYFTSSRLCEGVPKDTLELLHQKDDQILGLTSQLERFSLEKESLQQEVRTLKSKVGELNEQLGMLMETIQAKDEVIIKLSEGEGNGPPPTVAPSSPSVVPVARDQLELDRLKDNLQGYKTQNKFLNKEILELSALRRNAERRERDLMAKYSSLEAKLCQIESKYLILLQEMKTPVCSEDQGPTREVIAQLLEDALQVESQEQPEQAFVKPHLVSEYDIYGFRTVPEDDEEEKLVAKVRALDLKTLYLTENQEVSTGVKWENYFASTVNREMMCSPELKNLIRAGIPHEHRSKVWKWCVDRHTRKFKDNTEPGHFQTLLQKALEKQNPASKQIELDLLRTLPNNKHYSCPTSEGIQKLRNVLLAFSWRNPDIGYCQGLNRLVAVALLYLEQEDAFWCLVTIVEVFMPRDYYTKTLLGSQVDQRVFRDLMSEKLPRLHGHFEQYKVDYTLITFNWFLVVFVDSVVSDILFKIWDSFLYEGPKVIFRFALALFKYKEEEILKLQDSMSIFKYLRYFTRTILDARSGTDAPTTWRKSGWS

SEQ ID NO: 1198 - protein, 1367 aa, Homo sapiens
MRQKFAMALASPFGLVETWRRPNSQLYRASALFETIRHEAQLSTDYKLSLFDLQTSSYQALQRVLVSLGHHDEALAVAERGRTRAFADLLVERQTGQQDSDPYSPVTIDQILEMVNGQRGLVLYYSLAAGYLYSWLLAPGAGIVKFHEHYLGENTVENSSDFQASSSVTLPTATGSALEQHIASVREALGVESHYSRACASSETESEAGDIMDQQFEEMNNKLNSVTDPTGFLRMVRRNNLFNRSCQSMTSLFSNTVSPTQDGTSSLPRRQSSFAKPPLRALYDLLIAPMEGGLMHSSGPVGRHRQLILVLEGELYLIPFALLKGSSSNEYLYERFGLLAVPSIRSLSVQSKSHLRKNPPTYSSSTSMAAVIGNPKLPSAVMDRWLWGPMPSAEEEAYMVSELLGCQPLVGSVATKERVMSALTQAECVHFATHISWKLSALVLTPSMDGNPASSKSSFGHPYTIPESLRVQDDASDGESISDCPPLQELLLTAADVLDLQLPVKLVVLGSSQESNSKVAADGVIALTRAFLAAGAQCVLVSLWPVPVAAFKMFIHAFYSSLLNGLKASAALGEAMKVVQSSKAFSHPSNWAGFMLIGSDVKLNSPSSLIGQALTEILQHPERARDALRVLLHLVEKSLQRIQNGQRNAMYTSQQSVENKVGGIPGWQALLTAVGFRLDPPTSGLPAAVFFPTSDPGDRLQQCSSTLQSLLGLPNPALQALCKLITASETGEQLISRAVKNMVGMLHQVLVQLQAGEKEQDLASAPIQVSISVQLWRLPGCHEFLAALGFDLCEVGQEEVILKTGKQANRRTVHFALQSLLSLFDSTELPKRLSLDSSSSLESLASAQSVSNALPLGYQQPPFSPTGADSIASDAISVYSLSSIASSMSFVSKPEGGSEGGGPGGRQDHDRSKNAYLQRSTLPRSQLPPQTRPAGNKDEEEYEGFSIISNEPLATYQENRNTCFSPDHKQPQPGTAGGMRVSVSSKGSISTPNSPVKMTLIPSPNSPFQKVGKLASSDTGESDQSSTETDSTVKSQEESNPKLDPQELAQKILEETQSHLIAVERLQRSGGQVSKSNNPEDGVQAPSSTAVFRASETSAFSRPVLSHQKSQPSPVTVKPKPPARSSSLPKVSSGYSSPTTSEMSIKDSPSQHSGRPSPGCDSQTSQLDQPLFKLKYPSSPYSAHISKSPRNMSPSSGHQSPAGSAPSPALSYSSAGSARSSPADAPDIDKLKMAAIDEKVQAVHNLKMFWQSTPQHSTGPMKIFRGAPGTMTSKRDVLSLLNLSPRHNKKEEGVDKLELKELSLQQHDGAPPKAPPNGHWRTETTSLGSLPLPAGPPATAPARPLRLPSGNGYKFLSPGRFFPSSKC

SEQ ID NO: 1199 - protein, 242 aa, Homo sapiens
MMMDLFETGSYFFYLDGENVTLQPLEVAEGSPLYPGSDGTLSPCQDQMPPEAGSDSSGEEHVLAPPGLQPPHCPGQCLIWACKTCKRKSAPTDRRKAATLRERRRLKKINEAFEALKRRTVANPNQRLPKVEILRSAISYIERLQDLLHRLDQQEKMQELGVDPFSYRPKQENLEGADFLRTCSSQWPSVSDHSRGLVITAKEGGASIDSSASSSLRCLSSIVDSISSEERKLPCVEEVVEK

SEQ ID NO: 1200 - protein, 145 aa, Homo sapiens
MKFNPFVTSDRSKNRKRHFNAPSHVRRKIMSSPLSKELRQKYNVRSMPIRKDDEVQVVRGHYKGQQIGKVVQVYRKKYVIYIERVQREKANGTTVHVGIHPSKVVITRLKLDKDRKKILERKAKSRQVGKEKGKYKEELIEKMQE

SEQ ID NO: 1201 - protein, 977 aa, Homo sapiens
MDIYDTQTLGVVVFGGFMVVSAIGIFLVSTFSMKETSYEEALANQRKEMAKTHHQKVEKKKKEKTVEKKGKTKKKEEKPNGKIPDHDPAPNVTVLLREPVRAPAVAVAPTPVQPPIIVAPVATVPAMPQEKLASSPKDKKKKEKKVAKVEPAVSSVVNSIQVLTSKAAILETAPKEGRNTDVAQSPEAPKQEAPAKKKSGSKKKGPPDADGPLYLPYKTLVSTVGSMVFNEGEAQRLIEILSEKAGIIQDTWHKATQKGDPVAILKRQLEEKEKLLATEQEDAAVAKSKLRELNKEMAAEKAKAAAGEAKVKKQLVAREQEITAVQARMQASYREHVKEVQQLQGKIRTLQEQLENGPNTQLARLQQENSILRDALNQATSQVESKQNAELAKLRQELSKVSKELVEKSEAVRQDEQQRKALEAKAAAFEKQVLQLQASHRESEEALQKRLDEVSRELCHTQSSHASLRADAEKAQEQQQQMAELHSKLQSSEAEVRSKCEELSGLHGQLQEARAENSQLTERIRSIEALLEAGQARDAQDVQASQAEADQQQTRLKELESQVSGLEKEAIELREAVEQQKVKNNDLREKNWKAMEALATAEQACKEKLHSLTQAKEESEKQLCLIEAQTMEALLALLPELSVLAQQNYTEWLQDLKEKGPTLLKHPPAPAEPSSDLASKLREAEETQSTLQAECDQYRSILAETEGMLRDLQKSVEEEEQVWRAKVGAAEEELQKSRVTVKHLEEIVEKLKGELESSDQVREHTSHLEAELEKHMAAASAECQNYAKEVAGLRQLLLESQSQLDAAKSEAQKQSDELALVRQQLSEMKSHVEDGDIAGAPASSPEAPPAEQDPVQLKTQLEWTEAILEDEQTQRQKLTAEFEEAQTSACRLQEELEKLRTAGPLESSETEEASQLKERLEKEKKLTSDLGRAATRLQELLKTTQEQLAREKDTVKKLQEQLEKAEDGSSSKEGTSV

SEQ ID NO: 1202 - protein, 880 aa, Homo sapiens
MVTIRISDRQRLIQPYIHNYSWLLFAALALYSAHLASAEDVDGEKLDPQTRSSATTLRSQCMQLVGDCLMKAHQGKGLKALALLGVLPDGDSSLEDHALPVTVPTGASEEQLEKKAVQGAELSEAGNGKRAVHEEIRPVDFKQRNKADKGVSLSKDPSCQTQISDSPADASPPTGLPDAEDSEVSSQKPIEEKAVTPSPEQVFAECSQKRILGLLAAMLPPLKSGPTVPLIDLEHVLPLMFQVVISNAGHLNETYHLTLGLLGQLIIRLLPAEVDAAVIKVLSAKHNLFAAGDSSIVPDGWKTTHLLFSLGAVCLDSRVGLDWACSMAEILRSLNSAPLWRDVIATFTDHCIKQLPFQLKHTNIFTLLVLVGFPQVLCVGTRCVYMDNANEPHNVIILKHFTEKNRAVIVDVKTRKRKTVKDYQLVQKGGGQECGDSRAQLSQYSQHFAFIASHLLQSSMDSHCPEAVEATWVLSLALKGLYKTLKAHGFEEIRATFLQTDLLKLLVKKCSKGTGFSKTWLLRDLEILSIMLYSSKKEINALAEHGDLELDERGDREEEVERPVSSPGDPEQKKLDPLEGLDEPTRICFLMAHDALNAPLHILRAIYELQMKKTDYFFLEVQKRFDGDELTTDERIRSLAQRWQPSKSLRLEEQSAKAVDTDMIILPCLSRPARCDQATAESNPVTQKLISSTESELQQSYAKQRRSKSAALLHKELNCKSKRAVRDYLFRVNEATAVLYARHVLASLLAEWPSHVPVSEDILELSGPAHMTYILDMFMQLEEKHEWEKVVMQTELVLTHQVLPLPHRLPPVSASWSEATCVAVQLPDRCECSKGRVTVSSPKDWASEELRGPERDFQLNQKALSPSSQFPSAEILRHIR

SEQ ID NO: 1203 - protein, 154 aa, Homo sapiens
MAGPVKDREAFQRLNFLYQAAHCVLAQDPENQALARFYCYTERTIAKRLVLRRDPSVKRTLCRGCSSLLVPGLTCTQRQRRCRGQRWTVQTCLTCQRSQRFLNDPGHLLWGDRPEAQLGSQADSKPLQPLPNTAHSISDRLPEEKMQTQGSSNQ

SEQ ID NO: 1204 - protein, 109 aa, Homo sapiens
MSQYAPSPDFKRALDSSPEANTEDDKTEEDVPMPKNYLWLTIVSCFCPAYPINIVALVFSIMSLNSYNDGDYEGARRLGRNAKWVAIASIIIGLLIIGISCAVHFTRNA

SEQ ID NO: 1205 - protein, 1359 aa, Homo sapiens
EQGPRRAGRIWGGSGGCRRRAWTSRWLQRRRSPESCEAPLSAPLWGPQRGLPGREPLRSRSASAIALRTIGHILALLLRLLHLGLGSGGCREDVPPSGRGKKEEKMKKHRRALALVSCLFLCSLVWLPSWRVCCKESSSASASSYYSQDDNCALENEDVQFQKKDEREGPINAESLGKSGSNLPISPKEHKLKDDSIVDVQNTESKKLSPPVVETLPTVDLHEESSNAVVDSETVENISSSSTSEITPISKLDEIEKSGTIPIAKPSETEQSETDCDVGEALDASAPIEQPSFVSPPDSLVGQHIENVSSSHGKGKITKSEFESKVSASEQGGGDPKSALNASDNLKNESSDYTKPGDIDPTSVASPKDPEDIPTFDEWKKKVMEVEKEKSQSMHASSNGGSHATKKVQKNRNNYASVECGAKILAANPEAKSTSAILIENMDLYMLNPCSTKIWFVIELCEPIQVKQLDIANYELFSSTPKDFLVSISDRYPTNKWIKLGTFHGRDERNVQSFPLDEQMYAKYVKMFIKYIKVELLSHFGSEHFCPLSLIRVFGTSMVEEYEEIADSQYHSERQELFDEDYDYPLDYNTGEDKSSKNLLGSATNAILNMVNIAANILGAKTEDLTEGNKSISENATATAAPKMPESTPVSTPVPSPEYVTTEVHTHDMEPSTPDTPKESPIVQLVQEEEEEASPSTVTLLGSGEQEDESSPWFESETQIFCSELTTICCISSFSEYIYKWCSVRVALYRQRSRTALSKGKDYLVLAQPPLLLPAESVDVSVLQPLSGELENTNIEREAETVVLGDLSSSMHQDDLVNHTVDAVELEPSHSQTLSQSLLLDITPEINPLPKIEVSESVEYEAGHIPSPVIPQESSVEIDNETEQKSESFSSIEKPSITYETNKVNELMDNIIKEDVNSMQIFTKLSETIVPPINTATVPDNEDGEAKMNIADTAKQTLISVVDSSSLPEVKEEEQSPEDALLRGLQRTATDFYAELQNSTDLGYANGNLVHGSNQKESVFMRLNNRIKALEVNMSLSGRYLEELSQRYRKQMEEMQKAFNKTIVKLQNTSRIAEEQDQRQTEAIQLLQAQLTNMTQLVSNLSATVAELKREVSDRQSYLVISLVLCVVLGLMLCMQRCRNTSQFDGDYISKLPKSNQYPSPKRCFSSYDDMNLKRRTSFPLMRSKSLQLTGKEVDPNDLYIVEPLKFSPEKKKKRCKYKIEKIETIKPEEPLHPIANGDIKGRKPFTNQRDFSNMGEVYHSSYKGPPSEGSSETSSQSEESYFCGISACTSLCNGQSQKTKTEKRALKRRRSKVQDQGKLIKTLIQTKSGSLPSLHDIIKGNKEITVGTFGVTAVSGHI

SEQ ID NO: 1206 - protein, 1358 aa, Homo sapiens
MGADGETVVLKNMLIGVNLILLGSMIKPSECQLEVTTERVQRQSVEEEGGIANYNTSSKEQPVVFNHVYNINVPLDNLCSSGLEASAEQEVSAEDETLAEYMGQTSDHESQVTFTHRINFPKKACPCASSAQVLQELLSRIEMLEREVSVLRDQCNANCCQESAATGQLDYIPHCSGHGNFSFESCGCICNEGWFGKNCSEPYCPLGCSSRGVCVDGQCICDSEYSGDDCSELRCPTDCSSRGLCVDGECVCEEPYTGEDCRELRCPGDCSGKGRCANGTCLCEEGYVGEDCGQRQCLNACSGRGQCEEGLCVCEEGYQGPDCSAVAPPEDLRVAGISDRSIELEWDGPMAVTEYVISYQPTALGGLQLQQRVPGDWSGVTITELEPGLTYNISVYAVISNILSLPITAKVATHLSTPQGLQFKTITETTVEVQWEPFSFSFDGWEISFIPKNNEGGVIAQVPSDVTSFNQTGLKPGEEYIVNVVALKEQARSPPTSASVSTVIDGPTQILVRDVSDTVAFVEWIPPRAKVDFILLKYGLVGGEGGRTTFRLQPPLSQYSVQALRPGSRYEVSVSAVRGTNESDSATTQFTTEIDAPKNLRVGSRTATSLDLEWDNSEAEVQEYKVVYSTLAGEQYHEVLVPRGIGPTTRATLTDLVPGTEYGVGISAVMNSQQSVPATMNARTELDSPRDLMVTASSETSISLIWTKASGPIDHYRITFTPSSGIASEVTVPKDRTSYTLTDLEPGAEYIISVTAERGRQQSLESTVDAFTGFRPISHLHFSHVTSSSVNITWSDPSPPADRLILNYSPRDEEEEMMEVSLDATKRHAVLMGLQPATEYIVNLVAVHGTVTSEPIVGSITTGIDPPKDITISNVTKDSVMVSWSPPVASFDYYRVSYRPTQVGRLDSSVVPNTVTEFTITRLNPATEYEISLNSVRGREESERICTLVHTAMDNPVDLIATNITPTEALLQWKAPVGEVENYVIVLTHFAVAGETILVDGVSEEFRLVDLLPSTHYTATMYATNGPLTSGTISTNFSTLLDPPANLTASEVTRQSALISWQPPRAEIENYVLTYKSTDGSRKELIVDAEDTWIRLEGLLENTDYTVLLQAAQDTTWSSITSTAFTTGGRVFPHPQDCAQHLMNGDTLSGVYPIFLNGELSQKLQVYCDMTTDGGGWIVFQRRQNGQTDFFRKWADYRVGFGNVEDEFWLGLDNIHRITSQGRYELRVDMRDGQEAAFASYDRFSVEDSRNLYKLRIGSYNGTAGDSLSYHQGRPFSTEDRDNDVAVTNCAMSYKGAWWYKNCHRTNLNGKYGESRHSQGINWYHWKGHEFSIPFVEMKMRPYNHRLMAGRKRQSLQF

SEQ ID NO: 1207 - protein, 166 aa, Homo sapiens
MASGVTVNDEVIKVFNDMKVRKSSTQEEIKKRKKAVLFCLSDDKRQIIVEEAKQILVGDIGDTVEDPYTSFVKLLPLNDCRYALYDATYETKESKKEDLVFIFWAPESAPLKSKMIYASSKDAIKKKFTGIKHEWQVNGLDDIKDRSTLGEKLGGNVVVSLEGKPL

SEQ ID NO: 1208 - protein, 476 aa, Homo sapiens
MFRLNSLSALAELAVGSRWYHGGSQPIQIRRRLMMVAFLGASAVTASTGLLWKRAHAESPPCVDNLKSDIGDKGKNKDEGDVCNHEKKTADLAPHPEEKKKKRSGFRDRKVMEYENRIRAYSTPDKIFRYFATLKVISEPGEAEVFMTPEDFVRSITPNEKQPEHLGLDQYIIKRFDGKKISQEREKFADEGSIFYTLGECGLISFSDYIFLTTVLSTPQRNFEIAFKMFDLNGDGEVDMEEFEQVQSIIRSQTSMGMRHRDRPTTGNTLKSGLCSALTTYFFGADLKGKLTIKNFLEFQRKLQHDVLKLEFERHDPVDGRITERQFGGMLLAYSGVQSKKLTAMQRQLKKHFKEGKGLTFQEVENFFTFLKNINDVDTALSFYHMAGASLDKVTMQQVARTVAKVELSDHVCDVVFALFDCDGNGELSNKEFVSIMKQRLMRGLEKPKDMGFTRLMQAMWKCAQETAWDFALPKQ

SEQ ID NO: 1209 - protein, 130 aa, Homo sapiens
MAAVLGALGATRRLLAALRGQSLGLAAMSSGTHRLTAEERNQAILDLKAAGWSELSERDAIYKEFSFHNFNQAFGFMSRVALQAEKMNHHPEWFNVYNKVQITLTSHDCGELTKKDVKLAKFIEKAAASV

SEQ ID NO: 1210 - protein, 224 aa, Homo sapiens
MWAAWTSELIREIAGLVRRYDRNEITIWASEKRVRPAHGSSGGPVPEVSKDTHERRDQREDEELIREIAGLVRRYDRNEITIWASEKSSVMKKCKAANPEMPLSFTISRGFWVLLSYYLGLLPFIPIPEKFFFCFLPNIINRTYFPFSCSCLNQLLAVVSKWLIMRKSLIRHLEERGVQVVFWCLNEESDFEAAFSVGATGVITDYPTALRHYLDNHGPAARTS

SEQ ID NO: 1211 - protein, 464 aa, Homo sapiens
METLSFPRYNVAEIVIHIRNKILTGADGKNLTKNDLYPNPKPEVLHMIYMRALQIVYGIRLEHFYMMPVNSEVMYPHLMESFLPFSNLVTHLDSFLPICRVNDFETADILCPKAKRTSRFLSGIINFIHFREACRETYMEFLWQYKSSADKMQQLNAAHQEALMKLERLDSVPVEEQEEFKQLSDGIQELQQSLNQDFHQKTIVLQEGNSQKKSNISEKTKRLNELKLLVVSLKEIQESLKTKIVDSPEKLKNYKEKMKDTVQKLKNARQEVVEKYEIYGDSVDCLPSCQLEVQLYQKKIQDLSDNREKLASILKESLNLEDQIESDESELKKLKTEENSFKRLMIVKKEKLATAQFKINKKHEDVKQYKRTVIEDCNKVQEKRGAVYERVTTINHEIQKIRLGIQQLKDAAEREKLKSQEIFLNLKTALEKYHDGIEKAAEDSYAKIDEKTAELKRKMFKMST

SEQ ID NO: 1212 - protein, 2261 aa, Homo sapiens
MACWPQLRLLLWKNLTFRRRQTCQLLLEVAWPLFIFLILISVRLSYPPYEQHECHFPNKAMPSAGTLPWVQGIICNANNPCFRYPTPGEAPGVVGNFNKSIVARLFSDARRLLLYSQKDTSMKDMRKVLRTLQQIKKSSSNLKLQDFLVDNETFSGFLYHNLSLPKSTVDKMLRADVILHKVFLQGYQLHLTSLCNGSKSEEMIQLGDQEVSELCGLPREKLAAAERVLRSNMDILKPILRTLNSTSPFPSKELAEATKTLLHSLGTLAQELFSMRSWSDMRQEVMFLTNVNSSSSSTQIYQAVSRIVCGHPEGGGLKIKSLNWYEDNNYKALFGGNGTEEDAETFYDNSTTPYCNDLMKNLESSPLSRIIWKALKPLLVGKILYTPDTPATRQVMAEVNKTFQELAVFHDLEGMWEELSPKIWTFMENSQEMDLVRMLLDSRDNDHFWEQQLDGLDWTAQDIVAFLAKHPEDVQSSNGSVYTWREAFNETNQAIRTISRFMECVNLNKLEPIATEVWLINKSMELLDERKFWAGIVFTGITPGSIELPHHVKYKIRMGIDNVERTNKIKDGYWDPGPRADPFEDMRYVWGGFAYLQDVVEQAIIRVLTGTEKKTGVYMQQMPYPCYVDDIFLRVMSRSMPLFMTLAWIYSVAVIIKGIVYEKEARLKETMRIMGLDNSILWFSWFISSLIPLLVSAGLLVVILKLGNLLPYSDPSVVFVFLSVFAVVTILQCFLISTLFSRANLAAACGGIIYFTLYLPYVLCVAWQDYVGFTLKIFASLLSPVAFGFGCEYFALFEEQGIGVQWDNLFESPVEEDGFNLTTSVSMMLFDTFLYGVMTWYIEAVFPGQYGIPRPWYFPCTKSYWFGEESDEKSHPGSNQKRISEICMEEEPTHLKLGVSIQNLVKVYRDGMKVAVDGLALNFYEGQITSFLGHNGAGKTTTMSILTGLFPPTSGTAYILGKDIRSEMSTIRQNLGVCPQHNVLFDMLTVEEHIWFYARLKGLSEKHVKAEMEQMALDVGLPSSKLKSKTSQLSGGMQRKLSVALAFVGGSKVVILDEPTAGVDPYSRRGIWELLLKYRQGRTIILSTHHMDEADVLGDRIAIISHGKLCCVGSSLFLKNQLGTGYYLTLVKKDVESSLSSCRNSSSTVSYLKKEDSVSQSSSDAGLGSDHESDTLTIDVSAISNLIRKHVSEARLVEDIGHELTYVLPYEAAKEGAFVELFHEIDDRLSDLGISSYGISETTLEEIFLKVAEESGVDAETSDGTLPARRNRRAFGDKQSCLRPFTEDDAADPNDSDIDPESRETDLLSGMDGKGSYQVKGWKLTQQQFVALLWKRLLIARRSRKGFFAQIVLPAVFVCIALVFSLIVPPFGKYPSLELQPWMYNEQYTFVSNDAPEDTGTLELLNALTKDPGFGTRCMEGNPIPDTPCQAGEEEWTTAPVPQTIMDLFQNGNWTMQNPSPACQCSSDKIKKMLPVCPPGAGGLPPPQRKQNTADILQDLTGRNISDYLVKTYVQIIAKSLKNKIWVNEFRYGGFSLGVSNTQALPPSQEVNDATKQMKKHLKLAKDSSADRFLNSLGRFMTGLDTRNNVKVWFNNKGWHAISSFLNVINNAILRANLQKGENPSHYGITAFNHPLNLTKQQLSEVAPMTTSVDVLVSICVIFAMSFVPASFVVFLIQERVSKAKHLQFISGVKPVIYWLSNFVWDMCNYVVPATLVIIIFICFQQKSYVSSTNLPVLALLLLLYGWSITPLMYPASFVFKIPSTAYVVLTSVNLFIGINGSVATFVLELFTDNKLNNINDILKSVFLIFPHFCLGRGLIDMVKNQAMADALERFGENRFVSPLSWDLVGRNLFAMAVEGVVFFLITVLIQYRFFIRPRPVNAKLSPLNDEDEDVRRERQRILDGGGQNDILEIKELTKIYRRKRKPAVDRICVGIPPGECFGLLGVNGAGKSSTFKMLTGDTTVTRGDAFLNRNSILSNIHEVHQNMGYCPQFDAITELLTGREHVEFFALLRGVPEKEVGKVGEWAIRKLGLVKYGEKYAGNYSGGNKRKLSTAMALIGGPPVVFLDEPTTGMDPKARRFLWNCALSVVKEGRSVVLTSHSMEECEALCTRMAIMVNGRFRCLGSVQHLKNRFGDGYTIVVRIAGSNPDLKPVQDFFGLAFPGSVPKEKHRNMLQYQLPSSLSSLARIFSILSQSKKRLHIEDYSVSQTTLDQVFVNFAKDQSDDDHLKDLSLHKNQTVVDVAVLTSFLQDEKVKESYV

SEQ ID NO: 1213 - protein, 415 aa, Homo sapiens
MPGNHSAPSPGLSLTLCPAASEHSGIPGSTHACADAWVAGSYPEGAPAVLADKRQQFGSRFLRDPARVFHHNAWDNVEWSEEQAAAAERKVQENSIQRVCQEKQVDYEINAHKYWNDFYKIHENGFFKDRHWLFTEFPELAPSQNQNHLKDWFLENKSEVPECRNNEDGPGLIMEEQHKCSSKSLEHKTQTPPVEENVTQKISDLEICADEFPGSSATYRILEVGCGVGNTVFPILQTNNDPGLFVYCCDFSSTAIELVQTNSEYDPSRCFAFVHDLCDEEKSYPVPKGSLDIIILIFVLSAIVPDKMQKAINRLSRLLKPGGMVLLRDYGRYDMAQLRFKKGQCLSGNFYVRGDGTRVYFFTQEELDTLFTTAGLEKVQNLVDRRLQVNRGKQLTMYRVWIQCKYCKPLLSSTS

SEQ ID NO: 1214 - protein, 387 aa, Homo sapiens
MEVLAAETTSQQERLQAIAEKRKRQAEIENKRRQLEDERRQLQHLKSKALRERWLLEGTPSSASEGDEDLRRQMQDDEQKTRLLEDSVSRLEKEIEVLERGDSAPAAAKENAAAPSPVRAPAPSPAKEERKTEVVMNSQQTPVGTPKDKRVSNTPLRTVDGSPMMKAAMYSVEITVEKDKVTGETRVLSSTTLLPRQPLPLGIKVYEDETKVVHAVDGTAENGIHPLSSSEVDELIHKADEVTLSEAGSTAGAAETRGAVEGAARTTPSRREITGVQAQPGEATSGPPGIQPGQEPPVTMIFMGYQNVEDEAETKKVLGLQDTITAELVVIEDAAEPKEPAPPNGSAAEPPTEAASREENQAGPEATTSDPQDLDMKKHRCKCCSIM

SEQ ID NO: 1215 - protein, 453 aa, Homo sapiens
MGRRMRGAAATAGLWLLALGSLLALWGGLLPPRTELPASRPPEDRLPRRPARSGGPAPAPRFPLPPPLAWDARGGSLKTFRALLTLAAGADGPPRQSRSEPRWHVSARQPRPEESAAVHGGVFWSRGLEEQVPPGFSEAQAAAWLEAARGARMVALERGGCGRSSNRLARFADGTRACVRYGINPEQIQGEALSYYLARLLGLQRHVPPLALARVEARGAQWAQVQEELRAAHWTEGSVVSLTRWLPNLTDVVVPAPWRSEDGRLRPLRDAGGELANLSQAELVDLVQWTDLILFDYLTANFDRLVSNLFSLQWDPRVMQRATSNLHRGPGGALVFLDNEAGLVHGYRVAGMWDKYNEPLLQSVCVFRERTARRVLELHRGQDAAARLLRLYRRHEPRFPELAALADPHAQLLQRRLDFLAKHILHCKAKYGRRSGDLVSPGGKERDLGLGYG

SEQ ID NO: 1216 - protein, 314 aa, Homo sapiens
MGAPVWYLVAAALLVGFILFLTRSRGRAASAGQEPLHNEELAGAGRVAQPGPLEPEEPRAGGRPRRRRDLGSRLQAQRRAQRVAWAEADENEEEAVILAQEEEGVEKPAETHLSGKIGAKKLRKLEEKQARKAQREAEEAEREERKRLESQREAEWKKEEERLRLEEEQKEEEERKAREEQAQREHEEYLKLKEAFVVEEEGVGETMTEEQSQSFLTEFINYIKQSKVVLLEDLASQVGLRTQATINRIQDLLAEGTITGVIDDRGKFIYITPEELAAVANFIRQRGRVSIAELAQASNSLIAWGRESPAQAPA

SEQ ID NO: 1217 - protein, 1379 aa, Homo sapiens
MSLVNFEPAARRASNICDTDSHVSSSTSVRFYPHDVLSLPQIRLNRLLTIDTDLLEQQDIDLSPDLAATYGPTEEAAQKVKHYYRFWILPQLWIGINFDRLTLLALFDRNREILENVLAVILAILVAFLGSILLIQGFFRDIWVFQFCLVIASCQYSLLKSVQPDSSSPRHGHNRIIAYSRPVYFCICCGLIWLLDYGSRNLTATKFKLYGITFTNPLVFISARDLVIVFTLCFPIVFFIGLLPQVNTFVMYLCEQLDIHIFGGNATTSLLAALYSFICSIVAVALLYGLCYGALKDSWDGQHIPVLFSIFCGLLVAVSYHLSRQSSDPSVLFSLVQSKIFPKTEEKNPEDPLSEVKDPLPEKLRNSVSERLQSDLVVCIVIGVLYFAIHVSTVFTVLQPALKYVLYTLVGFVGFVTHYVLPQVRKQLPWHCFSHPLLKTLEYNQYEVRNAATMMWFEKLHVWLLFVEKNIIYPLIVLNELSSSAETIASPKKLNTELGALMITVAGLKLLRSSFSSPTYQYVTVIFTVLFFKFDYEAFSETMLLDLFFMSILFNKLWELLYKLQFVYTYIAPWQITWGSAFHAFAQPFAVPHSAMLFIQAAVSAFFSTPLNPFLGSAIFITSYVRPVKFWERDYNTKRVDHSNTRLASQLDRNPGTYCQQREVEAITEGVEEDEGFCCCEPGHIPHMLSFNAAFSQRWLAWEVIVTKYILEGYSITDNSAASMLQVFDLRKVLTTYYVKGIIYYVTTSSKLEEWLANETMQEGLRLCADRNYVDVDPTFNPNIDEDYDHRLAGISRESFCVIYLNWIEYCSSRRAKPVDVDKDSSLVTLCYGLCVLGRRALGTASHHMSSNLESFLYGLHALFKGDFRISSIRDEWIFADMELLRKVVVPGIRMSIKLHQDHFTSPDEYDDPTVLYEAIVSHEKNLVIAHEGDPAWRSAVLANSPSLLALRHVMDDGTNEYKIIMLNRRYLSFRVIKVNKECVRGLWAGQQQELVFLRNRNPERGSIQNAKQALRNMINSSCDQPIGYPIFVSPLTTSYSDSHEQLKDILGGPISLGNIRNFIVSTWHRLRKGCGAGCNSGGNIEDSDTGGGTSCTGNNATTANNPHSNVTQGSIGNPGQGSGTGLHPPVTSYPPTLGTSHSSHSVQSGLVRQSPARASVASQSSYCYSSRHSSLRMSTTGFVPCRRSSTSQISLRNLPSSIQSRLSMVNQMEPSGQSGLACVQHGLPSSSSSSQSIPACKHHTLVGFLATEGGQSSATDAQPGNTLSPANNSHSRKAEVIYRVQIVDPSQILEGINLSKRKELQWPDEGIRLKAGRNSWKDWSPQEGMEGHVIHRWVPCSRDPGTRSHIDKAVLLVQIDDKYVTVIETGVLELGAEV

SEQ ID NO: 1218 - protein, 151 aa, Homo sapiens
MRFLAATFLLLALSTAAQAEPVQFKDCGSVDGVIKEVNVSPCPTQPCQLSKGQSYSVNVTFTSNIQSKSSKAVVHGILMGVPVPFPIPEPDGCKSGINCPIQKDKTYSYLNKLPVKSEYPSIKLVVEWQLQDDKNQSLFCWEIPVQIVSHL

SEQ ID NO: 1219 - protein, 115 aa, Homo sapiens
MRFLAATFLLLALSTAAQAEPVQFKDCDIQSKSSKAVVHGILMGVPVPFPIPEPDGCKSGINCPIQKDKTYSYLNKLPVKSEYPSIKLVVEWQLQDDKNQSLFCWEIPVQIVSHL

SEQ ID NO: 1220 - protein, 1179 aa, Homo sapiens
MPVRLQVPVRNSRVDPRVRPRVRTKLILLVNDKKRYERVGGGPKRLGRDVEMEEMIEQLQEKVHELEKQNETLKNRLISAKQQLQTQGYRQTPYNNVQSRINTGRRKANENAGLQECPRKGIKFQDADVAETPHPMFTKYGNSLLEEARGEIRNLENVIQSQRGQIEELEHLAEILKTQLRRKENEIELSLLQLREQQATDQRSNIRDNVEMIKLHKQLVEKSNALSAMEGKFIQLQEKQRTLKISHDALMANGDELNMQLKEQRLKCCSLEKQLHSMKFSERRIEELQDRINDLEKERELLKENYDKLYDSAFSAAHEEQWKLKEQQLKVQIAQLETALKSDLTDKTEILDRLKTERDQNEKLVQENRELQLQYLEQKQQLDELKKRIKLYNQENDINADELSEALLLIKAQKEQKNGDLSFLVKVDSEINKDLERSMRELQATHAETVQELEKTRNMLIMQHKINKDYQMEVEAVTRKMENLQQDYELKVEQYVHLLDIRAARIHKLEAQLKDIAYGTKQYKFKPEIMPDDSVDEFDETIHLERGENLFEIHINKVTFSSEVLQASGDKEPVTFCTYAFYDFELQTTPVVRGLHPEYNFTSQYLVHVNDLFLQYIQKNTITLEVHQAYSTEYETIAACQLKFHEILEKSGRIFCTASLIGTKGDIPNFGTVEYWFRLRVPMDQAIRLYRERAKALGYITSNFKGPEHMQSLSQQAPKTAQLSSTDSTDGNLNELHITIRCCNHLQSRASHLQPHPYVVYKFFDFADHDTAIIPSSNDPQFDDHMYFPVPMNMDLDRYLKSESLSFYVFDDSDTQENIYIGKVNVPLISLAHDRCISGIFELTDHQKHPAGTIHVILKWKFAYLPPSGSITTEDLGNFIRSEEPEVVQRLPPASSVSTLVLAPRPKPRQRLTPVDKKVSFVDIMPHQSDVSQEGSVDEVKENTEKMQQGKDDVSLLSEGQLAEQSLASSEDETEITEDLEPEVEEDMSASDSDDCIIPGPISKNIKQPSEKIRIEIIALSLNDSQVTMDDTIQRLFVECRFYSLPAEETPVSLPKPKSGQWVYYNYSNVIYVDKENNKAKRDILKAILQKQEMPNRSLRFTVVSDPPEDEQDLECEDIGVAHVDLADMFQEGRDLIEQNIDVFDARADGEGIGKLRVTVEALHALQSVYKQYRDDLEA

SEQ ID NO: 1221 - protein, 233 aa, Homo sapiens
MKGSGWHLRSGMVGTLITTILPHWRRTAHVGTNILTAVSYLKGLWMECVWHSTGIYQCQIYRSLLALPQDLQAARALMVISCLLSGIACACAVIGMKCTRCAKGTPAKTTFAILGGTLFILAGLLCMVAVSWTTNDVVQNFYNPLLPSGMKFEIGQALYLGFISSSLSLIGGTLLCLSCQDEAPYRPYQAPPRATTTTANTAPAYQPPAAYKDNRAPSVTSATHSGYRLNDYV

SEQ ID NO: 1222 - protein, 254 aa, Homo sapiens [sequence omitted]

SEQ ID NO: 1223 - protein, 153 aa, Homo sapiens
MADEIDFTTGDAGASSTYPMQCSALRKNGFVVLKGRPCKIVEMSTSKTGKHGHAKVHLVGIDIFTGKKYEDICPSTHNMDVPNIKRNDYQLICIQDGYLSLLTETGEVREDLKLPEGELGKEIEGKYNAGEDVQVSVMCAMSEEYAVAIKPCK

SEQ ID NO: 1224 - protein, 513 aa, Homo sapiens
MQSCESSGDSADDPLSRGLRRRGQPRVVVIGAGLAGLAAAKALLEQGFTDVTVLEASSHIGGRVQSVKLGHATFELGATWIHGSHGNPIYHLAEANGLLEETTDGERSVGRISLYSKNGVACYLTNHGRRIPKDVVEEFSDLYNEVYNLTQEFFRHDKPVNAESQNSVGVFTREEVRNRIRNDPDDPEATKRLKLAMIQQYLKVESCESSSHSMDEVSLSAFGEWTEIPGAHHIIPSGFMRVVELLAEGIPAHVIQLGKPVRCIHWDQASARPRGPEIEPRGEGDHNHDTGEGGQGGEEPRGGRWDEDEQWSVVVECEDCELIPADHVIVTVSLGVLKRQYTSFFRPGLPTEKVAAIHRLGIGTTDKIFLEFEEPFWGPECNSLQFVWEDEAESHTLTYPPELWYRKICGFDVLYPPERYGHVLSGWICGEEALVMEKCDDEAVAEICTEMLRQFTGNPNIPKPRRILRSAWGSNPYFRGSYSYTQVGLQRGGMWRSWAKPLPYTESSKTATK

SEQ ID NO: 1225 - protein, 720 aa, Homo sapiens
MTENPAPDWLSDRAWRDILALSNLPTFSSFSSDFVKHLSEFRVIFDSLEPHRPLSPAVRLAESLGPPTSFQQAGSQGGVGHCCREPLPGIWDQYLDQFQKLLVLRCLRGDKTANLSVVFKDSNSTTPLIFVLSPGTDPAADLYKFAEEMKFSKKLSAISLGQGQGPRAEAMMRSSIERGKWVFFQNCHLAPSWMPALERLIEHINPDKVHRDFRLWLTSLPSNKFPVSILQNGSKMTIEPPRGVRANLLKSYSSLGEDFLNSCHKVMEFKSLLLSLCLFHGNALERRKFGPLGFNIPYEFTDGDLRICISQLKMFLDEYDDIPYKVLKYTAGEINYGGRVTDDWDRRCIMNILEDFYNPDVLSPEHSYSASGIYHQIPPTYDLHGYLSYIKSLPLNDMPEIFGLHDNANITFAQNETFALLGTIIQLQPKSSSAGSQGREEIVEDVTQNILLKVPEPINLQWVMAKYPVLYEESMNTVLVQEVIRYNRLLQVITQTLQDLLKALKGLVVMSSQLELMAASLYNNTVPELWSAKAYPSLKPLSSWVMDLLQRLDFLQAWIQDGIPAVFWISGFFFPQAFLTGTLQNFARKFVISIDTISFDFKVMFEAPSELTQRPQVGCYIHGLFLEGARWDPEAFQLAESQPKELYTEMAVIWLLPTPNRKAQDQDFYLCPIYKTLTRAGTLSTTGHSTNYVIAVEIPTHQPQRHWIKRGVALICALDY

SEQ ID NO: 1226 - protein, 262 aa, Homo sapiens
MYHRIPAHGNSFNEEESESSVFDLDGGEESPEGISKPVVPADLINHANREGWTAAHIAASKGFKNCLEILCRHGGLEPERRDKCNRTVHDVATDDCKHLLENLNALKIPLRISVGEIEPSNYGSDDLECENTICALNIRKQTSWDDFSKAVSQALTNHFQAISSDGWWSLEDVTCNNTTDSNIGLSARSIRSITLGNVPWSVGQSFAQSPWDFMRKNKAEHITVLLSGPQEGCLSSVTYASMIPLQMMQNYLRLMGKLNRER

SEQ ID NO: 1227 - protein, 603 aa, Homo sapiens
MAASAQVSVTFEDVAVTFTQEEWGQLDAAQRTLYQEVMLETCGLLMSLGCPLFKPELIYQLDHRQELWMATKDLSQSSYPGDNTKPKTTEPTFSHLALPEEVLLQEQLTQGASKNSQLGQSKDQDGPSEMQEVHLKIGIGPQRGKLLEKMSSERDGLGSDDGVCTKITQKQVSTEGDLYECDSHGPVTDALIREEKNSYKCEECGKVFKKNALLVQHERIHTQVKPYECTECGKTFSKSTHLLQHLIIHTGEKPYKCMECGKAFNRRSHLTRHQRIHSGEKPYKCSECGKAFTHRSTFVLHHRSHTGEKPFVCKECGKAFRDRPGFIRHYIIHTGEKPYECIECIECGKAFNRRSYLTWHQQIHTGVKPFECNECGKAFCESADLIQHYIIHTGEKPYKCMECGKAFNRRSHLKQHQRIHTGEKPYECSECGKAFTHCSTFVLHKRTHTGEKPYECKECGKAFSDRADLIRHFSIHTGEKPYECVECGKAFNRSSHLTRHQQIHTGEKPYECIQCGKAFCRSANLIRHSIIHTGEKPYECSECGKAFNRGSSLTHHQRIHTGRNPTIVTDVGRPFMTAQTSVNIQELLLGKEFLNITTEENLW

SEQ ID NO: 1228 - protein, 358 aa, Homo sapiens
MLARAARGTGALLLRGSLLASGRAPRRASSGLPRNTVVLFVPQQEAWVVERMGRFHRILEPGLNILIPVLDRIRYVQSLKEIVINVPEQSAVTLDNVTLQIDGVLYLRIMDPYKASYGVEDPEYAVTQLAQTTMRSELGKLSLDKVFRERESLNASIVDAINQAADCWGIRCLRYEIKDIHVPPRVKESMQMQVEAERRKRATVLESEGTRESAINVAEGKKQAQILASEAEKAEQINQAAGEASAVLAKAKAKAEAIRILAAALTQHNGDAAASLTVAEQYVSAFSKLAKDSNTILLPSNPGDVTSMVAQAMGVYGALTKAPVPVPGTPDSLSSGSSRDVQGTDASLDEELDRVKMS

SEQ ID NO: 1229 - protein, 1129 aa, Homo sapiens
MHQMASGVGSMKCSLRKMWRPGEKKEPQGVVYEDVPDDTEDFKESLKVVFEGSAYGLQNFNKQKKLKTCDDMDTFFLHYAAAEGQIELMEKITRDSSLEVLHEMDDYGNTPLHCAVEKNQIESVKFLLSRGANPNLRNFNMMAPLHIAVQGMNNEVMKVLLEHRTIDVNLEGENGNTAVIIACTTNNSEALQILLNKGAKPCKSNKWGCFPIHQAAFSGSKECMEIILRFGEEHGYSRQLHINFMNNGKATPLHLAVQNGDLEMIKMCLDNGAQIDPVEKGRCTAIHFAATQGATEIVKLMISSYSGSVDIVNTTDGCHETMLHRASLFDHHELADYLISVGADINKIDSEGRSPLILATASASWNIVNLLLSKGAQVDIKDNFGRNFLHLTVQQPYGLKNLRPEFMQMQQIKELVMDEDNDGCTPLHYACRQGGPGSVNNLLGFNVSIHSKSKDKKSPLHFAASYGRINTCQRLLQDISDTRLLNEGDLHGMTPLHLAAKNGHDKVVQLLLKKGALFLSDHNGWTALHHASMGGYTQTMKVILDTNLKCTDRLDEDGNTALHFAAREGHAKAVALLLSHNADIVLNKQQASFLHLALHNKRKEVVLTIIRSKRWDECLKIFSHNSPGNKCPITEMIEYLPECMKVLLDFCMLHSTEDKSCRDYYIEYNFKYLQCPLEFTKKTPTQDVIYEPLTALNAMVQNNRIELLNHPVCKEYLLMKWLAYGFRAHMMNLGSYCLGLIPMTILVVNIKPGMAFNSTGIINETSDHSEILDTTNSYLIKTCMILVFLSSIFGYCKEAGQIFQQKRNYFMDISNVLEWIIYTTGIIFVLPLFVEIPAHLQWQCGAIAVYFYWMNFLLYLQRFENCGIFIVMLEVILKTLLRSTVVFIFLLLAFGLSFYILLNLQDPFSSPLLSIIQTFSMMLGDINYRESFLEPYLRNELAHPVLSFAQLVSFTIFVPIVLMNLLIGLAVGDIAEVQKHASLKRIAMQVELHTSLEKKLPLWFLRKVDQKSTIVYPNKPRSGGMLFHIFCFLFCTGEIRQEIPNADKSLEMEILKQKYRLKDLTFLLEKQHELIKLIIQKMEIISETEDDDSHCSFQDRFKKEQMEQRNSRWNTVLRAVKAKTHHLEP

SEQ ID NO: 1230 - protein, 681 aa, Homo sapiens
MNASSEGESFAGSVQIPGGTTVLVELTPDIHICGICKQQFNNLDAFVAHKQSGCQLTGTSAAAPSTVQFVSEETVPATQTQTTTRTITSETQTITVSAPEFVFEHGYQTYLPTESNENQTATVISLPAKSRTKKPTTPPAQKRLNCCYPGCQFKTAYGMKDMERHLKIHTGDKPHKCEVCGKCFSRKDKLKTHMRCHTGVKPYKCKTCDYAAADSSSLNKHLRIHSDERPFKCQICPYASRNSSQLTVHLRSHTGDAPFQCWLCSAKFKISSDLKRHMRVHSGEKPFKCEFCNVRCTMKGNLKSHIRIKHSGNNFKCPHCDFLGDSKATLRKHSRVHQSEHPEKCSECSYSCSSKAALRIHERIHCTDRPFKCNYCSFDTKQPSNLSKHMKKFHGDMVKTEALERKDTGRQSSRQVAKLDAKKSFHCDICDASFMREDSLRSHKRQHSEYSESKNSDVTVLQFQIDPSKQPATPLTVGHLQVPLQPSQVPQFSEGRVKIIVGHQVPQANTIVQAAAAAVNIVPPALVAQNPEELPGNSRLQILRQVSLIAPPQSSRCPSEAGAMTQPAVLLTTHEQTDGATLHQTLIPTASGGPQEGSGNQTFITSSGITCTDFEGLNALIQEGTAEVTVVSDGGQNIAVATTAPPVFSSSSQQELPKQTYSIIQGAAHPALLCPADSIPD

SEQ ID NO: 1231 - protein, 572 aa, Homo sapiens
MCSKQVDPSEGASSHLKHRGGSRAAHLEVRRLLRRLVGALVAEAGFCYVQVAEGQRVVGVLEVAEAAAAPVQHEPTAAVATQSRWFPRGTRPGLCSLPIAVAALLCPGSGPGAQSGLEFVERPPPSPLAVVLARWPLPPPAGRCPRDAPEARVPEKARAEGSERENNYGCGVVGGEMTTLVLDNGAYNAKIGYSHENVSVIPNCQFRSKTARLKTFTANQIDEIKDPSGLFYILPFQKGYLVNWDVQRQVWDYLFGKEMYQVDFLDTNIIITEPYFNFTSIQESMNEILFEEYQFQAVLRVNAGALSAHRYFRDNPSELCCIIVDSGYSFTHIVPYCRSKKKKEAIIRINVGGKLLTNHLKEIISYRQLHVMDETHVINQVKEDVCYVSQDFYRDMDIAKLKGEENTVMIDYVLPDFSTIKKGFCKPREEMVLSGKYKSGEQILRLANERFAVPEILFNPSDIGIQEMGIPEAIVYSIQNLPEEMQPHFFKNIVLTGGNSLFPGFRDRVYSEVRCLTPTDYDVSVVLPENPITYAWEGGKLISENDDFEDMVVTREDYEENGHSVCEEKFDI

SEQ ID NO: 1232 - protein, 231 aa, Homo sapiens
MSRPAPGRRAAPTATAAAAMNIFRLTGDLSHLAAIVILLLKIWKTRSCAGISGKSQLLFALVFTTRYLDLFTSFISLYNTSMKVIYLACSYATVYLIYLKFKATYDGNHDTFRVEFLVVPVGGLSFLVNHDFSPLEILWTFSIYLESVAILPQLFMISKTGEAETITTHYLFFLGLYRALYLVNWIWRFYFEGFFDLIAVVAGVVQTILYCDFFYLYITKVLKGKKLSLPA

SEQ ID NO: 1233 - protein, 145 aa, Homo sapiens
MELVQVLKRGLQQITGHGGLRGYLRVFFRTNDAKVGTLVGEDKYGNKYYEDNKQFFGRHRWVVYTTEMNGKNTFWDVDGSMVPPEWHRWLHSMTDDPPTTKPLTARKFIWTNHKFNVTGTPEQYVPYSTTRKKIQEWIPPSTPYK

SEQ ID NO: 1234 - protein, 225 aa, Homo sapiens
MATHALEIAGLFLGGVGMVGTVAVTVMPQWRVSAFIENNIVVFENFWEGLWMNCVRQANIRMQCKIYDSLLALSPDLQAARGLMCAASVMSFLAFMMAILGMKCTRCTGDNEKVKAHILLTAGIIFIITGMVVLIPVSWVANAIIRDFYNSIVNVAQKRELGEALYLGWTTALVLIVGGALFCCVFCCNEKSSSYRYSIPSHRTTQKSYHTGKKSPSVYSRSQYV

SEQ ID NO: 1235 - protein, 147 aa, Homo sapiens [sequence omitted]

SEQ ID NO: 1236 - protein, 329 aa, Homo sapiens
MSCPGSSYRTVVRPTYKVMYKIVTAREWRCCPGHSRVSCEEVAGSSASLEPMWSGSTMRRMALRPTAFSGCLNCSKVSELTERLKVLEAKMTMLTVIEQPVPPTPATPEDPAPLWGPPPAQGSPGDGGLQDQVGAWGLPGPTGPKGDAGSRGPMGMRGPPGDPLLSNTFTETNNHWPQGPTGPPGPPGPMGPPGPPGPTGVPGSPGHIGPPGPTGPKGISGHPGEKGERGLRGEPGPQGSAGQRGEPGPKGDPGEKSHWGEGLHQLREALKILAERVLILETMIGLYEPELGSGAGPAGTGTPSLLRGKRGGHATNYRIVAPRSRDERG

SEQ ID NO: 1237 - protein, 357 aa, Homo sapiens [sequence omitted]

SEQ ID NO: 1238 - protein, 1400 aa, Homo sapiens
MLSDSKLWKGARSVYHQLFMSSLLMDLKYKKLFAVRFAKNYERLQSDYVTDDHDREFSVADLSVQIFTVPSLARMLITEENLMSIIIKTFMDHLRHRDAQGRFQFERYTALQAFKFRRVQSLILDLKYVLISKPTEWSDELRQKFLEGFDAFLELLKCMQGMDPITRQVGQHIEMEPEWEAAFTLQMKLTHVISMMQDWCASDEKVLIEAYKKCLAVLMQCHGGYTDGEQPITLSICGHSVETIRYCVSQEKVSIHLPVSRLLAGLHVLLSKSEVAYKFPELLPLSELSPPMLIEHPLRCLVLCAQVHAGMWRRNGFSLVNQIYYYHNVKCRREMFDKDVVMLQTGVSMMDPNHFLMIMLSRFELYQIFSTPDYGKRFSSEITHKDVVQQNNTLIEEMLYLIIMLVGERFSPGVGQVNATDEIKREIIHQLSIKPMAHSELVKSLPEDENKETGMESVIEAVAHFKKPGLTGRGMYELKPECAKEFNLYFYHFSRAEQSKAEEAQRKLKRQNREDTALPPPVLPPFCPLFASLVNILQSDVMLCIMGTILQWAVEHNGYAWSESMLQRVLHLIGMALQEEKQHLENVTEEHVVTFTFTQKISKPGEAPKNSPSILAMLETLQNAPYLEVHKDMIRWILKTFNAVKKMRESSPTSPVAETEGTIMEESSRDKDKAERKRKAEIARLRREKIMAQMSEMQRHFIDENKELFQQTLELDASTSAVLDHSPVASDMTLTALGPAQTQVPEQRQFVTCILCQEEQEVKVESRAMVLAAFVQRSTVLSKNRSKFIQDPEKYDPLFMHPDLSCGTHTSSCGHIMHAHCWQRYFDSVQAKEQRRQQRLRLHTSYDVENGEFLCPLCECLSNTVIPLLLPPRNIFNNRLNFSDQPNLTQWIRTISQQIKALQFLRKEESTPNNASTKNSENVDELQLPEGFRPDFRPKIPYSESIKEMLTTFGTATYKVGLKVHPNEEDPRVPIMCWGSCAYTIQSIERILSDEDKPLFGPLPCRLDDCLRSLTRFAAAHWTVASVSVVQGHFCKPFASLVPNDSHEELPCILDIDMFHLLVGLVLAFPALQCQDFSGISLGTGDLHIFHLVTMAHIIQILLTSCTEENGMDQENPPCEEESAVLALYKTLHQYTGSALKEIPSGWHLWRSVRAGIMPFLKCSALFFHYLNGVPSPPDIQVPGTSHFEHLCSYLSLPNNLICLFQENSEIMNSLIESWCRNSEVKRYLEGERDAIRYPRESNKLINLPEDYSSLINQASNFSCPKSGGDKSRAPTLCLVCGSLLCSQSYCCQTELEGEDVGACTAHTYSCGSGVGIFLRVRECQVLFLAGKTKGCFYSPPYLDDYGETDQGLRRGNPLHLCKERFKKIQKLWHQHSVTEEIGHAQEANQTLVGIDWQHL

SEQ ID NO: 1239 - protein, 274 aa, Homo sapiens
MATTVSTQRGPVYIGELPQDFLRITPTQQQRQVQLDAQAAQQLQYGGAVGTVGRLNITVVQAKLAKNYGMTRMDPYCRLRLGYAVYETPTAHNGAKNPRWNKVIHCTVPPGVDSFYLEIFDERAFSMDDRIAWTHITIPESLRQGKVEDKWYSLSGRQGDDKEGMINLVMSYALLPAAMVMPPQPVVLMPTVYQQGVGYVPITGMPAVCSPGMVPVALPPAAVNAQPRCSEEDLKAIQDMFPNMDQEVIRSVLEAQRGNKDAAINSLLQMGEEP

SEQ ID NO: 1240 - protein, 380 aa, Homo sapiens
LERTPASADMAWTKYQLFLAGLMLVTGSINTLSAKWADNFMAEGCGGSKEHSFQHPFLQAVGMFLGEFSCLAAFYLLRCRAAGQSDSSVDPQQPFNPLLFLPPALCDMTGTSLMYVALNMTSASSFQMLRGAVIIFTGLFSVAFLGRRLVLSQWLGILATIAGLVVVGLADLLSKHDSQHKLSEVITGDLLIIMAQIIVAIQMVLEEKFVYKHNVHPLRAVGTEGLFGFVILSLLLVPMYYIPAGSFSGNPRGTLEDALDAFCQVGQQPLIAVALLGNISSIAFFNFAGISVTKELSATTRMVLDSLRTVVIWALSLALGWEAFHALQILGFLILLIGTALYNGLHRPLLGRLSRGRPLAEESEQERLLGGTRTPINDAS

SEQ ID NO: 1241 - protein, 564 aa, Homo sapiens
MQLVLRKRICVNVHGRQGFAQSLLKKMSHRSSIPGCGVTFEIVSNIPEDAQGVEEREALARMAANVENPASADSEAYIEKYLRSVLAVENLLTLDRLRQEVAVKEQLTGKGKLSRRSISSPNVNRLSGSRQDLIPSYSLGSNKGRWESQQDVSQTTVSRGIAPAPALSVSPQNNHSPDPGLSNLAASYLNPVKSFVPQMPKLLKSLFPVRDEKRGKRPSPLAHQPVPRIMVQSASPDIRVTRMEEAQPEMGPDVLVQTMGAPALKICDKPAKVPSPPPVIAVTAVTPAPEAQDGPPSPLSEASSGYFSHSVSTATLSDALGPGLDAAAPPGSMPTAPEAEPEAPISHPPPPTAVPAEEPPGPQQLVSPGRERPDLEAPAPGSPFRVRRVRASELRSFSRMLAGDPGCSPGAEGNAPAPGAGGQALASDSEEADEVPEWLREGEFVTVGAHKTGVVRYVGPADFQEGTWVGVELDLPSGKNDGSIGGKQYFRCNPGYGLLVRPSRVRRATGPVRRRSTGLRLGAPEARRSATLSGSATNLASLTAALAKADRSHKNPENRKSWAS

SEQ ID NO: 1242 - protein, 114 aa, Homo sapiens
MEKPLFPLVPLHWFGFGYTALVVSGGIVGYVKTGSVPSLAAGLLFGSLAGLGAYQLYQDPRNVWGFLAATSVTFVGVMGMRSYYYGKFMPVGLIAGASLLMAAKVGVRMLMTSD

SEQ ID NO: 1243 - protein, 159 aa, Homo sapiens
MELPAVNLKVILLGHWLLTTWGCIVFSGSYAWANFTILALGVWAVAQRDSIDAISMFLGGLLATIFLDIVHISIFYPRVSLTDTGRFGVGMAILSLLLKPLSCCFVYHMYRERGGELLVHTGFLGSSQDRSAYQTIDSAEAPADPFAVPEGRSQDARGY

SEQ ID NO: 1244 - protein, 605 aa, Homo sapiens
MDPAEAVLQEKALKFMCSMPRSLWLGCSSLADSMPSLRCLYNPGTGALTAFMNSSEREDCNNGEPPRKIIPEKNSLRQTYNSCARLCLNQETVCLASTAMKTENCVAKTKLANGTSSMIVPKQRKLSASYEKEKELCVKYFEQWSESDQVEFVEHLISQMCHYQHGHINSYLKPMLQRDFITALPARGLDHIAENILSYLDAKSLCAAELVCKEWYRVTSDGMLWKKLIERMVRTDSLWRGLAERRGWGQYLFKNKPPDGNAPPNSFYRALYPKIIQDIETIESNWRCGRHSLQRIHCRSETSKGVYCLQYDDQKIVSGLRDNTIKIWDKNTLECKRILTGHTGSVLCLQYDERVIITGSSDSTVRVWDVNTGEMLNTLIHHCEAVLHLRFNNGMMVTCSKDRSIAVWDMASPTDITLRRVLVGHRAAVNVVDFDDKYIVSASGDRTIKVWNTSTCEFVRTLNGHKRGIACLQYRDRLVVSGSSDNTIRLWDIECGACLRVLEGHEELVRCIRFDNKRIVSGAYDGKIKVWDLVAALDPRAPAGTLCLRTLVEHSGRVFRLQFDEFQIVSSSHDDTILIWDFLNDPAAQAEPPRSPSRTYTYISR

SEQ ID NO: 1245 - protein, 579 aa, Homo sapiens
MDPAEAVLQEKALKFMCSMPRSLWLGCSSLADSMPSLRCLYNPGTGALTAFQTYNSCARLCLNQETVCLASTAMKTENCVAKTKLANGTSSMIVPKQRKLSASYEKEKELCVKYFEQWSESDQVEFVEHLISQMCHYQHGHINSYLKPMLQRDFITALPARGLDHIAENILSYLDAKSLCAAELVCKEWYRVTSDGMLWKKLIERMVRTDSLWRGLAERRGWGQYLFKNKPPDGNAPPNSFYRALYPKIIQDIETIESNWRCGRHSLQRIHCRSETSKGVYCLQYDDQKIVSGLRDNTIKIWDKNTLECKRILTGHTGSVLCLQYDERVIITGSSDSTVRVWDVNTGEMLNTLIHHCEAVLHLRFNNGMMVTCSKDRSIAVWDMASPTDITLRRVLVGHRAAVNVVDFDDKYIVSASGDRTIKVWNTSTCEFVRTLNGHKRGIACLQYRDRLVVSGSSDNTIRLWDIECGACLRVLEGHEELVRCIRFDNKRIVSGAYDGKIKVWDLVAALDPRAPAGTLCLRTLVEHSGRVFRLQFDEFQIVSSSHDDTILIWDFLNDPAAQAEPPRSPSRTYTYISR

SEQ ID NO: 1246 - protein, 632 aa, Homo sapiens
MDPAEAVLQEKALKFMMEFRSWCPGWNTMARSRLTATSTSRVQCSMPRSLWLGCSSLADSMPSLRCLYNPGTGALTAFMNSSEREDCNNGEPPRKIIPEKNSLRQTYNSCARLCLNQETVCLASTAMKTENCVAKTKLANGTSSMIVPKQRKLSASYEKEKELCVKYFEQWSESDQVEFVEHLISQMCHYQHGHINSYLKPMLQRDFITALPARGLDHIAENILSYLDAKSLCAAELVCKEWYRVTSDGMLWKKLIERMVRTDSLWRGLAERRGWGQYLFKNKPPDGNAPPNSFYRALYPKIIQDIETIESNWRCGRHSLQRIHCRSETSKGVYCLQYDDQKIVSGLRDNTIKIWDKNTLECKRILTGHTGSVLCLQYDERVIITGSSDSTVRVWDVNTGEMLNTLIHHCEAVLHLRFNNGMMVTCSKDRSIAVWDMASPTDITLRRVLVGHRAAVNVVDFDDKYIVSASGDRTIKVWNTSTCEFVRTLNGHKRGIACLQYRDRLVVSGSSDNTIRLWDIECGACLRVLEGHEELVRCIRFDNKRIVSGAYDGKIKVWDLVAALDPRAPAGTLCLRTLVEHSGRVFRLQFDEFQIVSSSHDDTILIWDFLNDPAAQAEPPRSPSRTYTYISR

SEQ ID NO: 1247 - protein, 430 aa, Homo sapiens
MAANLSRNGPALQEAYVRVVTEKSPTDWALFTYEGNSNDIRVAGTGEGGLEEMVEELNSGKVMYAFCRVKDPNSGLPKFVLINWTGEGVNDVRKGACASHVSTMASFLKGAHVTINARAEEDVEPECIMEKVAKASGANYSFHKESGRFQDVGPQAPVGSVYQKTNAVSEIKRVGKDSFWAKAEKEEENRRLEEKRRAEEAQRQLEQERRERELREAARREQRYQEQGGEASPQRTWEQQQEVVSRNRNEQESAVHPREIFKQKERAMSTTSISSPQPGKLRSPFLQKQLTQPETHFGREPAAAISRPRADLPAEEPAPSTPPCLVQAEEEAVYEEPPEQETFYEQPPLVQQQGAGSEHIDHHIQGQGLSGQGLCARALYDYQAADDTEISFDPENLITGIEVIDEGWWRGYGPDGHFGMFPANYVELIE

SEQ ID NO: 1248 - protein, 145 aa, Homo sapiens [sequence omitted]

SEQ ID NO: 1249 - protein, 521 aa, Homo sapiens
MLCALLLLPSLLGATRASPTSGPQECAKGSTVWCQDLQTAARCGAVGYCQGAVWNKPTAKSLPCDVCQDIAAAAGNGLNPDATESDILALVMKTCEWLPSQESSAGCKWMVDAHSSAILSMLRGAPDSAPAQVCTALSLCEPLQRHLATLRPLSKEDTFEAVAPFMANGPLTFHPRQAPEGALCQDCVRQVSRLQEAVRSNLTLADLNIQEQCESLGPGLAVLCKNYLFQFFVPADQALRLLPPQELCRKGGFCEELGAPARLTQVVAMDGVPSLELGLPRKQSEMQMKAGVTCEVCMNVVQKLDHWLMSNSSELMITHALERVCSVMPASITKECIILVDTYSPSLVQLVAKITPEKVCKFIRLCGNRRRARAVHDAYAIVPSPEWDAENQGSFCNGCKRLLTVSSHNLESKSTKRDILVAFKGGCSILPLPYMIQCKHFVTQYEPVLIESLKDMMDPVAVCKKVGACHGPRTPLLGTDQCALGPSFWCRSQEAAKLCNAVQHCQKHVWKEMHLHAGEHA

SEQ ID NO: 1250 - protein, 362 aa, Homo sapiens
MLCALLLLPSLLGATRASPTSGPQECAKGSTVWCQDLQTAARCGAVGYCQGAVWNKPTAKSLPCDVCQDIAAAAGNGLNPDATESDILALVMKTCEWLPSQESSAGCKWMVDAHSSAILSMLRGAPDSAPAQVCTALSLCEPLQRHLATLRPLSKEDTFEAVAPFMANGPLTFHPRQAPEGALCQDCVRQLVAKITPEKVCKFIRLCGNRRRARAVHDAYAIVPSPEWDAENQGSFCNGCKRLLTVSSHNLESKSTKRDILVAFKGGCSILPLPYMIQCKHFVTQYEPVLIESLKDMMDPVAVCKKVGACHGPRTPLLGTDQCALGPSFWCRSQEAAKLCNAVQHCQKHVWKEMHLHAGEHA

SEQ ID NO: 1251 - protein, 935 aa, Homo sapiens
MRDLELREVKQLARGHTAGYKTLLKCLSGKFCRRELIGIMGPSGAGKSTFMNILAGYRESGMKGQILVNGRPRELRTFRKMSCYIMQDDMLLPHLTVLEAMMVSANLKLSEKQEVKKELVTEILTALGLMSCSHTRTALLSGGQRKRLAIALELVNNPPVMFFDEPTSGLDSASCFQVVSLMKSLAQGGRTIICTIHQPSAKLFEMFDKCIFKGVVTNLIPYLKGLGLHCPTYHNPADFIIEVASGEYGDLNPMLFRAVQNGLCAMAEKKSSPEKNEVPAPCPPCPPEVDPIESHTFATSTLTQFCILFKRTFLSILRDTVVCPVVYCSIVYWMTGQPAETSRFLLFSALATATALVAQSLGLLIGAASNSLQVATFVGPVTAIPVLLFSGFFVSFKTIPTYLQWSSYLSYVRYGFEGVILTIYGMERGDLTCLEERCPFREPQSILRALDVEDAKLYMDFLVLGIFFLALRLLAYLVLRYRECGFCSLDSSADLIRHVYFHCYHTKLKQWGLQALQSQADLGPCILDFQSRNVIPDIPDHFLCLWEHCELPLAQNSFDNPEWFYRHVEAHSLCCEYEAVGKDNPVVLCGWKGCTCTFKDRSKLREHLRSHTQEKVVACPTCGGMFANNTKFLDHIRRQTSLDQQHFQCSHCSKRFATERLLRDHMRNHVNHYKCPLCDMTCPLPSSLRNHMRFRHSEDRPFKCDCCDYSCKNLIDLQKHLDTHSEEPAYRCDFENCTFSARSLCSIKSHYRKVHEGDSEPRYKCHVCDKCFTRGNNLTVHLRKKHQFKWPSGHPRFRYKEHEDGYMRLQLVRYESVELTQQLLRQPQEGSGLGTSLNESSLQGIILETVPGEPGRKEEEEEGKGSEGTALSASQDNPSSVIHVVNQTNAQGQQEIVYYVLSEAPGEPPPVPEPPSGGIMEKLQGIAEEPEIQMV

SEQ ID NO: 1252 - protein, 679 aa, Homo sapiens [sequence omitted]

SEQ ID NO: 1253 - protein, 140 aa, Homo sapiens [sequence omitted]

SEQ ID NO: 1254 - protein, 371 aa, Homo sapiens
MAELQEVQITEEKPLLPGQTPEAAKEAELAARILLDQGQTHSVETPYGSVTFTVYGTPKPKRPAILTYHDVGLNYKSCFQPLFQFEDMQEIIQNFVRVHVDAPGMEEGAPVFPLGYQYPSLDQLADMIPCVLQYLNFSTIIGVGVGAGAYILARYALNHPDTVEGLVLINIDPNAKGWMDWAAHKLTGLTSCSPEMILGHLFSQEELSGNSELIQKYRNIITHAPNLDNIELYWNSYNNRRDLNFERGGDITLRCPVMLVVGDQAPHEDAVVECNSKLDPTQTSFLKMADSGGQPQLTQPGKLTEAFKYFLQGMGYMASSCMTRLSRSRTASLTSAESVDGNRSRSRTLSQSRESGTLSSGPPGHTMEVSC

SEQ ID NO: 1255 - protein, 520 aa, Homo sapiens
MGRGWGFLFGLLGAVWLLSSGHGEEQPPETAAQRCFCQVSGYLDDCTCDVETIDRFNNYRLFPRLQKLLESDYFRYYKVNLKRPCPFWNDISQCGRRDCAVKPCQSDEVPDGIKSASYKYSEEANNLIEECEQAERLGAVDESLSEETQKAVLQWTKHDDSSDGIKSASYKYSEEANNLIEECEQAERLGAVDESLSEETQKAVLQWTKHDDSSDNFCEADDIQSPEAEYVDLLLNPERYTGYKGPDAWKIWNVIYEENCFKPQTIKRPLNPLASGQGTSEENTFYSWLEGLCVEKRAFYRLISGLHASINVHLSARYLLQETWLEKKWGHNITEFQQRFDGILTEGEGPRRLKNLYFLYLIELRALSKVLPFFERPDFQLFTGNKIQDEENKMLLLEILHEIKSFPLHFDENSFFAGDKKEAHKLKEDFRLHFRNISRIMDCVGCFKCRLWGKLQTQGLGTALKILFSEKLIANMPESGPSYEFHLTRQEIVSLFNAFGRISTSVKELENFRNLLQNIH

SEQ ID NO: 1256 - protein, 208 aa, Homo sapiens
MSAGGDFGNPLRKFKLVFLGEQSVGKTSLITRFMYDSFDNTYQATIGIDFLSKTMYLEDRTVRLQLWDTAGQERFRSLIPSYIRDSTVAVVVYDITNLNSFQQTSKWIDDVRTERGSDVIIMLVGNKTDLADKRQITIEEGEQRAKELSVMFIETSAKTGYNVKQLFRRVASALPGMENVQEKSKEGMIDIKLDKPQEPPASEGGCSC

SEQ ID NO: 1257 - protein, 1723 aa, Homo sapiens
MREKEQEREEQLMEDKKRKKEDKKKKEATQKVTEQKTKVPEVTKPSLSQPTAASPIGSSPSPPVNGGNNAKRVAVPNGQPPSAARYMPREVPPRFRCQQDHKVLLKRGQPPPPSCMLLGGGAGPPPCTAPGANPNNAQVTGALLQSESGTAPDSTLGGAAASNYANSTWGSGASSNNGTSPNPIHIWDKVIVDGSDMEEWPCIASKDTESSSENTTDNNSASNPGSEKSTLPGSTTSNKGKGSQCQSASSGNECNLGVWKSDPKAKSVQSSNSTTENNNGLGNWRNVSGQDRIGPGSGFSNFNPNSNPSAWPALVQEGTSRKGALETDNSNSSAQVSTVGQTSREQQSKMENAGVNFVVSGREQAQIHNTDGPKNGNTNSLNLSSPNPMENKGMPFGMGLGNTSRSTDAPSQSTGDRKTGSVGSWGAARGPSGTDTVSGQSNSGNNGNNGKEREDSWKGASVQKSTGSKNDSWDNNNRSTGGSWNFGPQDSNDNKWGEGNKMTSGVSQGEWKQPTGSDELKIGEWSGPNQPNSSTGAWDNQKGHPLPENQGNAQAPCWGRSSSSTGSEVGGQSTGSNHKAGSSDSHNSGRRSYRPTHPDCQAVLQTLLSRTDLDPRVLSNTGWGQTQIKQDTVWDIEEVPRPEGKSDKGTEGWESAATQTKNSGGWGDAPSQSNQMKSGWGELSASTEWKDPKNTGGWNDYKNNNSSNWGGGRPDEKTPSSWNENPSKDQGWGGGRQPNQGWSSGKNGWGEEVDQTKNSNWESSASKPVSGWGEGGQNEIGTWGNGGNASLASKGGWEDCKRSPAWNETGRQPNSWNKQHQQQQPPQQPPPPQPEASGSWGGPPPPPPGNVRPSNSSWSSGPQPATPKDEEPSGWEEPSPQSISRKMDIDDGTSAWGDPNSYNYKNVNLWDKNSQGGPAPREPNLPTPMTSKSASDSKSMQDGWGESDGPVTGARHPSWEEEEDGGVWNTTGSQGSASSHNSASWGQGGKKQMKCSLKGGNNDSWMNPLAKQFSNMGLLSQTEDNPSSKMDLSVGSLSDKKFDVDKRAMNLGDFNDIMRKDRSGFRPPNSKDMGTTDSGPYFEKGGSHGLFGNSTAQSRGLHTPVQPLNSSPSLRAQVPPQFISPQVSASMLKQFPNSGLSPGLFNVGPQLSPQQIAMLSQLPQIPQFQLACQLLLQQQQQQQLLQNQRKISQAVRQQQEQQLARMVSALQQQQQQQQRQPGMKHSPSHPVGPKPHLDNMVPNALNVGLPDLQTKGPIPGYGSGFSSGGMDYGMVGGKEAGTESRFKQWTSMMEGLPSVATQEANMHKNGAIVAPGKTRGGSPYNQFDIIPGDTLGGHTGPAGDSWLPAKSPPTNKIGSKSSNASWPPEFQPGVPWKGIQNIDPESDPYVTPGSVLGGTATSPIVDTDHQLLRDNTTGSNSSLNTSLPSPGAWPYSASDNSFTNVHSTSAKFPDYKSTWSPDPIGHNPTHLSNKMWKNHISSRNTTPLPRPPPGLTNPKPSSPWSSTAPRSVRGWGTQDSRLASASTWSDGGSVRPSYWLVLHNLTPQIDGSTLRTICMQHGPLLTFHLNLTQGTALIRYSTKQEAAKAQTALHMCVLGNTTILAEFATDDEVSRFLAQAQPPTPAATPSAPAAGWQSLETGQNQSDPVGPALNLFGGSTGLGQWSSSAGGSSGADLAGASLWGPPNYSSSLWGVPTVEDPHRMGSPAPLLPGDLLGGGSDSI

SEQ ID NO: 1258 - protein, 303 aa, Homo sapiens [sequence omitted]

SEQ ID NO: 1259 - protein, 201 aa, Homo sapiens
MKWVWALLLLAALGSGRAERDCRVSSFRVKENFDKARFSGTWYAMAKKDPEGLFLQDNIVAEFSVDETGQMSATAKGRVRLLNNWDVCADMVGTFTDTEDPAKFKMKYWGVASFLQKGNDDHWIVDTDYDTYAVQYSCRLLNLDGTCADSYSFVFSRDPNGLPPEAQKIVRQRQEELCLARQYRLIVHNGYCDGRSERNLL

SEQ ID NO: 1260 - protein, 214 aa, Homo sapiens
MNCKEGTDSSCGCRGNDEKKMLKCVVVGDGAVGKTCLLMSYANDAFPEEYVPTVFDHYAVTVTVGGKQHLLGLYDTAGQEDYNQLRPLSYPNTDVFLICFSVVNPASYHNVQEEWVPELKDCMPHVPYVLIGTQIDLRDDPKTLARLLYMKEKPLTYEHGVKLAKAIGAQCYLECSALTQKGLKAVFDEAILTIFHPKKKKKRCSEGHSCCSII

SEQ ID NO: 1261 - protein, 223 aa, Homo sapiens
MQLKPMEINPEMLNKVLSRLGVAGQWRFVDVLGLEEESLGSVPAPACALLLLFPLTAQHENFRKKQIEELKGQEVSPKVYFMKQTIGNSCGTIGLIHAVANNQDKLGFEDGSVLKQFLSETEKMSPEARAKCFEKNEAIQAAHDAVAQEGQCRVDDKVNFHFILFNNVDGHLYELDGRMPFPVNHGASSEDTLLKDAAKVCREFTEREQGEVRFSAVALCKAA

SEQ ID NO: 1262 - protein, 370 aa, Homo sapiens
MLPRRLLAAWLAGTRGGGLLALLANQCRFVTGLRVRRAQQIAQLYGRLYSESSRRVLLGRLWRRLHGRPGHASALMAALAGVFVWDEERIQEEELQRSINEMKRLEEMSNMFQSSGVQHHPPEPKAQTEGNEDSEGKEQRWEMVMDKKHFKLWRRPITGTHLYQYRVFGTYTDVTPRQFFNVQLDTEYRKKWDALVIKLEVIERDVVSGSEVLHWVTHFPYPMYSRDYVYVRRYSVDQENNMMVLVSRAVEHPSVPESPEFVRVRSYESQMVIRPHKSFDENGFDYLLTYSDNPQTVFPRYCVSWMVSSGMPDFLEKLHMATLKAKNMEIKVKDYISAKPLEMSSEAKATSQSSERKNEGSCGPARIEYA

SEQ ID NO: 1263 - protein, 489 aa, Homo sapiens
MSFRKVVRQSKFRHVFGQPVKNDQCYEDIRVSRVTWDSTFCAVNPKFLAVIVEASGGGAFLVLPLSKTGRIDKAYPTVCGHTGPVLDIDWCPHNDEVIASGSEDCTVMVWQIPENGLTSPLTEPVVVLEGHTKRVGIIAWHPTARNVLLSAGCDNVVLIWNVGTAEELYRLDSLHPDLIYNVSWNHNGSLFCSACKDKSVRIIDPRRGTLVAEREKAHEGARPMRAIFLADGKVFTTGFSRMSERQLALWDPENLEEPMALQELDSSNGALLPFYDPDTSVVYVCGKGDSSIRYFEITEEPPYIHFLNTFTSKEPQRGMGSMPKRGLEVSKCEIARFYKLHERKCEPIVMTVPRKSDLFQDDLYPDTAGPEAALEAEEWVSGRDADPILISLREAYVPSKQRDLKISRRNVLSDSRPAMAPGSSHLGAPASTTTAADATPSGSLARAGEAGKLEEVMQELRALRALVKEQGDRICRLEEQLGRMENGDA

SEQ ID NO: 1264 - protein, 189 aa, Homo sapiens
MGTAGAMQLCWVILGFLLFRGHNSQPTMTQTSSSQGGLGGLSLTTEPVSSNPGYIPSSEANRPSHLSSTGTPDTFQTVPPNSTTMSLSMREDATILPSPTSETVLTVAAFGVISFIVILVVVVIILVGVVSLRFKCRKSKESEDPQKPGSSGLSESCSTANGEKDSITLISMKNINMNNGKQSLSAEKI

SEQ ID NO: 1265 - protein, 205 aa, Homo sapiens
MGTAGAMQLCWVILGFLLFRGHNSQPTMTQTSSSQGGLGGLSLTTEPVSSNPGYIPSSEANRPSHLSSTGTPGAGVPSSGRDGGTSRDTFQTVPPNSTTMSLSMREDATILPSPTSETVLTVAAFGVISFIVILVVVVIILVGVVSLRFKCRKSKESEDPQKPGSSGLSESCSTANGEKDSITLISMKNINMNNGKQSLSAEKVL

SEQ ID NO: 1266 - protein, 929 aa, Homo sapiens
MEYERRGGRGDRTGRYGATDRSQDDGGENRSRDHDYRDMDYRSYPREYGSQEGKHDYDDSSEEQSAEDSYEASPGSETQRRRRRRHRHSPTGPPGFPRDGDYRDQDYRTEQGEEEEEEEDEEEEEKASNIVMLRMLPQAATEDDIRGQLQSHGVQAREVRLMRNKSSGQSRGFAFVEFSHLQDATRWMEANQHSLNILGQKVSMHYSDPKPKINEDWLCNKCGVQNFKRREKCFKCGVPKSEAEQKLPLGTRLDQQTLPLGGRELSQGLLPLPQPYQAQGVLASQALSQGSEPSSENANDTIILRNLNPHSTMDSILGALAPYAVLSSSNVRVIKDKQTQLNRGFAFIQLSTIEAAQLLQILQALHPPLTIDGKTINVEFAKGSKRDMASNEGSRISAASVASTAIAAAQWAISQASQGGEGTWATSEEPPVDYSYYQQDEGYGNSQGTESSLYAHGYLKGTKGPGITGTKGDPTGAGPEASLEPGADSVSMQAFSRPQPGAAPGIYQQSAEASSSQGTAANSQSYTIMSPAVLKSELQSPTHPSSALPPATSPTAQESYSQYPVPDVSTYQYDETSGYYYDPQTGLYYDPNSQYYYNAQSQQYLYWDGERRTYVPALEQSADGHKETGAPSKEGKEKKEKHKTKTAQQIAKDMERWARSLNKQKENFKNSFQPISSLRDDERRESATADAGYAILEKKGALAERQHTSMDLPKLASDDRPSPPRGLVAAYSGESDSEEEQERGGPEREEKLTDWQKLACLLCRRQFPSKEALIRHQQLSGLHKQNLEIHRRAHLSENELEALEKNDMEQMKYRDRAAERREKYGIPEPPEPKRRKYGGISTASVDFEQPTRDGLGSDNIGSRMLQAMGWKEGSGLGRKKQGIVTPIEAQTRVRGSGLGARGSSYGVTSTESYKETLHKTMVTRFNEAQ

SEQ ID NO: 1267 - protein, 420 aa, Homo sapiens
RPRNRPGIPGSTHASAPSFLNTGLGPTALGVLGGAGAGLMSNPSPQVPEEEASTSVCRPKSSMASTSRRQRRERRFRRYLSAGRLVRAQALLQRHPGLDVDAGQPPPLHRACARHDAPALCLLLRLGADPAHQDRHGDTALHAAARQGPDAYTDFFLPLLSRCPSAMGIKNKDGETPGQILGWGPPWDSAEEEEEDDASKEREWRQKLQGELEDEWQEVMGRFEGDASHETQEPESFSAWSDRLAREHAQKCQQQQREAEGSCRPPRAEGSSQSWRQQEEEQRLFRERARAKEEELRESRARRAQEALGDREPKPTRAGPREEHPRGAGRGSLWRFGDVPWPCPGGGDPEAMAAALVARGPPLEEQGALRRYLRVQQVRWHPDRFLQRFRSQIETWELGRVMGAVTALSQALNRHAEALK

SEQ ID NO: 1268 - protein, 9 aa, Homo sapiens
AGGMAEPTS

SEQ ID NO: 1269 - protein, 4 aa, Homo sapiens
SQRR

SEQ ID NO: 1270 - protein, 57 aa, Homo sapiens
MAFMKKYLLPILGLFMAYYYYSANEEFRPEMLQGKKVIVTGASKGIGREMAYHLAKM

SEQ ID NO: 1271 - protein, 344 aa, Homo sapiens
MQLEIKVALNFIISYLYNKLPRRRADLFGEELERLLKKKYEGHWYPEKPLKGSGFRCVHIGEMVDPVVELAAKRSGLAVEDVRANVPEELSVWIDPFEVSYQIGEKGAVKVLYLDDSEGCGAPELDKEIKSSFNPDAQVFVPIGSQDSSLSNSPSPSFGQSPSPTFIPRSAQPITFTTASFAATKFGSTKMKKGGGAASGGGVASSGAGGQQPHQQPRMARSPTNSLLKHKSLSLSMHSLNFITANPAPQSQLSPNAKEFVYNGGGSPSLFFDAADGRAAAPQARLEAVGLAPATAAALTWPRYLEVVPTASSWRRHPFVEGLSYNLNTMQYPSQQFQPVVLAN

SEQ ID NO: 1272 - protein, 240 aa, Homo sapiens
MLLQSQTMGVSHSFTPKGITIPQREKPGHMYQNEDYLQNGLPTETTVLGTVQILCCLLISSLGAILVFAPYPSHFNPAISTTLMSGYPFLGALCFGITGSLSIISGKQSTKPFDLSSLTSNAVSSVTAGAGLFLLADSMVALRTASQHCGSEMDYLSSLPYSEYYYPIYEIKDCLLTSVSLTGVLVVMLIFTVLELLLAAYSSVFWWKQLYSNNPGSSFSSTQSQDHIQQVKKSSSRSWI

SEQ ID NO: 1273 - protein, 95 aa, Homo sapiens
MENLKSGVYPLKEASGCPGADRNLLVYSFYEKGPLTFRDVAIEFSLEEWQCLDTAQQDLYRKVMLENYRNLVFLGENNFNTKSLIYPKVFISLFS

SEQ ID NO: 1274 - protein, 227 aa, Homo sapiens
MSVVPPNRSQTGWPRGVTQFGNKYIQQTKPLTLERTINLYPLTNYTFGTKEPLYEKDSSVAARFQRMREEFDKIGMRRTVEGVLIVHEHRLPHVLLLQLGTTFFKLPGGELNPGEDEVEGLKRLMTEILGRQDGVLQDWVIDDCIGNWWRPNFEPPQYPYIPAHITKPKEHKKLFLVQLQEKALFAVPKNYKLVAAPLFELYDNAPGYGPIISSLPQLLSRFNFIYN

SEQ ID NO: 1275 - protein, 140 aa, Homo sapiens
MFFTISRKNMSQKLSLLLLVFGLIWGLMLLHYTFQQPRHQSSVKLREQILDLSKRYVKALAEENKNTVDVENGASMAGYADLKRTIAVLLDDILQRLVKLENKVDYIVVNGSAANTTNGTSGNLVPVTTNKRTNVSGSIR

SEQ ID NO: 1276 - protein, 465 aa, Homo sapiens
MDGRMMRSMRLREEESPGPSHTASCLCGSAPCILCSCCPASRNSTVSRLIFTFFLFLGVLVSIIMLSPGVESQLYKLPWVCEEGAGIPTVLQGHIDCGSLLGYRAVYRMCFATAAFFFFFTLLMLCVSSSRDPRAAIQNGFWFFKFLILVGLTVGAFYIPDGSFTNIWFYFGVVGSFLFILIQLVLLIDFAHSWNQRWLGKAEECDSRAWYAGLFFFTLLFYLLSIAAVALMFMYYTEPSGCHEGKVFISLNLTFCVCVSIAAVLPKVQDAQPNSGLLQASVITLYTMFVTWSALSSIPEQKCNPHLPTQLGNETVVAGPEGYETQWWDAPSIVGLIIFLLCTLFISLRSSDHRQVNSLMQTEECPPMLDATQQQQQQVAACEGRAFDNEQDGVTYSYSFFHFCLVLASLHVMMTLTNWYKPGETRKMISTWTAVWVKICASWAGLLLYLWTLVAPLLLRNRDFS

SEQ ID NO: 1277 - protein, 403 aa, Homo sapiens
MFVASERKMRAHQVLTFLLLFVITSVASENASTSRGCGLDLLPQYVSLCDLDAIWGIVVEAVAGAGALITLLLMLILLVRLPFIKEKEKKSPVGLHFLFLLGTLGLFGLTFAFIIQEDETICSVRRFLWGVLFALCFSCLLSQAWRVRRLVRHGTGPAGWQLVGLALCLMLVQVIIAVEWLVLTVLRDTRPACAYEPMDFVMALIYDMVLLVVTLGLALFTLCGKFKRWKLNGAFLLITAFLSVLIWVAWMTMYLFGNVKLQQGDAWNDPTLAITLAASGWVFVIFHAIPEIHCTLLPALQENTPNYFDTSQPRMRETAFEEDVQLPRAYMENKAFSMDEHNAALRTAGFPNGSLGKRPSGSLGKRPSAPFRSNVYQPTEMAVVLNGGTIPTAPPSHTGRHLW

SEQ ID NO: 1278 - protein, 140 aa, Homo sapiens
MSRFLNVLRSWLVMVSIIAMGNTLQSFRDHTFLYEKLYTGKPNLVNGLQARTFGIWTLLSSVIRCLCAIDIHNKTLYHITLWTFLLALGHFLSELFVYGTAAPTIGVLAPLMVASFSILGMLVGLRYLEVEPVSRQKKRN

SEQ ID NO: 1279 - protein, 244 aa, Homo sapiens
MKSEEQKIKDARKGPLVPFPNQKSEAAEPPKTPPSSCDSTNAAIAKQALKKPIKGKQAPRKKAQGKTQQNRKLTDFYPVRRSSRKSKAELQSEERKRIDELIESGKEEGMKIDLIDGKGRGVIATKQFSRGDFVVEYHGDLIEITDAKKREALYAQDPSTGCYMYYFQYLSKTYCVDATRETNRLGRLINHSKCGNCQTKLHDIDGVPHLILIASRDIAAGEELLYDYGDRSKASIEAHPWLKH

SEQ ID NO: 1280 - protein, 263 aa, Homo sapiens
MTCWLRGVTATFGRPAEWPGYLSHLCGRSAAMDLGPMRKSYRGDREAFEETHLTSLDPVKQFAAWFEEAVQCPDIGEANAMCLATCTRDGKPSARMLLLKGFGKDGFRFFTNFESRKGKELDSNPFASLVFYWEPLNRQVRVEGPVKKLPEEEAEVATFHFPGPKSSQIGAVVSHQSSVIPDREYLRKKNEELEQLYQDQEVPKPKSWGGYVLYPQVMEFWQGQTNRLHDRIVFRRGLPTGDSPLGPMTHRGEEDWLYERLAP

SEQ ID NO: 1281 - protein, 378 aa, Homo sapiens
MEVKPPPGRPQPDSGRRRRRRGEEGHDPKEPEQLRKLFIGGLSFETTDDSLREHFEKWGTLTDCVVMRDPQTKRSRGFGFVTYSCVEEVDAAMCARPHKVDGRVVEPKRAVSREDSVKPGAHLTVKKIFVGGIKEDTEEYNLRDYFEKYGKIETIEVMEDRQSGKKRGFAFVTFDDHDTVDKIVVQKYHTINGHNCEVKKALAKQVMQPAGSQRGRGGGSGNCMGHRGNFGGGGGNFGRDGNFGGRGGYGGGGGGSRGSYGGGDGGYNGFGGDGGNYGGGPGYSSRGGYGGGGPGYGNQGGGYGGGGGYDGYNEGGNFGGGNYGGGGNYNDFGNYSGQQQSNYGPMKGGSFGGRSSGSPYGGGYGSGGGSGGYGSRRF

SEQ ID NO: 1282 - protein, 365 aa, Homo sapiens
MAALRDAEIQKDVQTYYGQVLKRSADLQTNGCVTTARPVPKHIREALQNVHEEVALRYYGCGLVIPEHLENCWILDLGSGSGRDCYVLSQLVGEKGHVTGIDMTKGQVEVAEKYLDYHMEKYGFQASNVTFIHGYIEKLGEAGIKNESHDIVVSNCVINLVPDKQQVLQEAYRVLKHGGELYFSDVYTSLELPEEIRTHKVLWGECLGGALYWKELAVLAQKIGFCPPRLVTANLITIQNKELERVIGDCRFVSATFRLFKHSKTGPTKRCQVIYNGGITGHEKELMFDANFTFKEGEIVEVDEETAAILKNSRFAQDFLIRPIGEKLPTSGGCSALELKDIITHPFKLAEKFDPMNSTRAPDAS

SEQ ID NO: 1283 - protein, 382 aa, Homo sapiens
MAALRDAEIQKDVQTYYGQVLKRSADLQTNGCVTTARPVPKHIREALQNVHEEVALRYYGCGLVIPEHLENCWILDLGSGSGRDCYVLSQLVGEKGHVTGIDMTKGQVEVAEKYLDYHMEKYGFQASNVTFIHGYIEKLGEAGIKNESHDIVVSNCVINLVPDKQQVLQEAYRVLKVAKGSKSEVTVVTECVKHGGELYFSDVYTSLELPEEIRTHKVLWGECLGGALYWKELAVLAQKIGFCPPRLVTANLITIQNKELERVIGDCRFVSATFRLFKHSKTGPTKRCQVIYNGGITGHEKELMFDANFTFKEGEIVEVDEETAAILKNSRFAQDFLIRPIGEKLPTSGGCSALELKDIITHPFKLAEKFDPMNSTRAPDAS

SEQ ID NO: 1284 - protein, 209 aa, Homo sapiens
KLVRLQVPVRNSRVDPRVRLGSNTAPALRVMVQAWYMDDAPGDPRQPHRPDPGRPVGLEQLRRLGVLYWKLDADKYENDPELEKIRRERNYSWMDIITICKDKLPNYEEKIKMFYEEHLHLDDEIRYILDGSGYFDVRDKEDQWIRIFMEKGDMVTLPAGIYHRFTVDEKNYTKAMRLFVGEPVWTAYNRPADHFEARGQYVKFLAQTA

SEQ ID NO: 1285 - protein, 305 aa, Homo sapiens
MGIQTSPVLLASLGVGLVTLLGLAVGSYLVRRSRRPQVTLLDPNEKYLLRLLDKTTVSHNTKRFRFALPTAHHTLGLPVGKHIYLSTRIDGSLVIRPYTPVTSDEDQGYVDLVIKVYLKGVHPKFPEGGKMSQYLDSLKVGDVVEFRGPSGLLTYTGKGHFNIQPNKKSPPEPRVAKKLGMIAGGTGITPMLQLIRAILKVPEDPTQCFLLFANQTEKDIILREDLEELQARYPNRFKLWFTLDHPPKDWAYSKGFVTADMIREHLPAPGDDVLVLLCGPPPMVQLACHPNLDKLGYSQKMRFTY

SEQ ID NO: 1286 - protein, 328 aa, Homo sapiens
MSMLAERRRKQKWAVDPQNTAWSNDDSKFGQRMLEKMGWSKGKGLGAQEQGATDHIKVQVKNNHLGLGATINNEDNWIAHQDDFNQLLAELNTCHGQETTDSSDKKEKKSFSLEEKSKISKNRVHYMKFTKGKDLSSRSKTDLDCIFGKRQSKKTPEGDASPSTPEENETTTTSAFTIQEYFAKRMAALKNKPQVPVPGSDISETQVERKRGKKRNKEATGKDVESYLQPKAKRHTEGKPERAEAQERVAKKKSAPAEEQLRGPCWDQSSKASAQDAGDHVQPPEGRDFTLKPKKRRGKKKLQKPVEIAEDATLEETLVKKKKKKDSK

SEQ ID NO: 1287 - protein, 84 aa, Homo sapiens
MKVKIKCWNGVATWLWVANDENCGICRMAFNGCCPDCKVPGDDCPLVWGQCSHCFHMHCILKWLHAQQVQQHCPMCRQEWKFKE

SEQ ID NO: 1288 - protein, 85 aa, Homo sapiens
MSKVSFKITLTSDPRLPYKVLSVPESTPFTAVLKFAAEEFKVPAATSAIITNDGIGINPAQTAGNVFLKHGSELRIIPRDRVGSC

SEQ ID NO: 1289 - protein, 381 aa, Homo sapiens [sequence omitted]

SEQ ID NO: 1290 - protein, 475 aa, Homo sapiens
MPHRKKKPFIEKKKAVSFHLVHRSQRDPLAADESAPQRVLLPTQKIDNEERRAEQRKYGVFFDDDYDYLQHLKEPSGPSELIPSSTFSAHNRREEKEETLVIPSTGIKLPSSVFASEFEEDVGLLNKAAPVSGPRLDFDPDIVAALDDDFDFDDPDNLLEDDFILQANKATGEEEGMDIQKSENEDDSEWEDVDDEKGDSNDDYDSAGLLSDEDCMSVPGKTHRAIADHLFWSEETKSRFTEYSMTSSVMRRNEQLTLHDERFEKFYEQYDDDEIGALDNAELEGSIQVDSNRLQEVLNDYYKEKAENCVKLNTLEPLEDQDLPMNELDESEEEEMITVVLEEAKEKWDCESICSTYSNLYNHPQLIKYQPKPKQIRISSKTGIPLNVLPKKGLTAKQTERIQMINGSDLPKVSTQPRSKNESKEDKRARKQAIKEERKERRVEKKANKLAFKLEKRRQEKELLNLKKNVEGLKL

SEQ ID NO: 1291 - protein, 319 aa, Homo sapiens
MEPGNDTQISEFLLLGFSQEPGLQPFLFGLFLSMYLVTVLGNLLIILATISDSHLHTPMYFFLSNLSFADICVTSTTIPKMLMNIQTQNKVITYIACLMQMYFFILFAGFENFLLSVMAYDRFVAICHPLHYMVIMNPHLCGLLVLASWTMSALYSLLQILMVVRLSFCTALEIPHFFCELNQVIQLACSDSFLNHMVIYFTVALLGGGPLTGILYSYSKIISSIHAISSAQGKYKAFSTCASHLSVVSLFYGAILGVYLSSAATRNSHSSATASVMYTVVTPMLNPFIYSLRNKDIKRALGIHLLWGTMKGQFFKKCP

SEQ ID NO: 1292 - protein, 696 aa, Homo sapiens
MKAVRKRNETSVIDQIGEDLLTWFSGPGEEKLKHAAATFCSNQPFALEMIKSRQKKDSRFQTFVQDAESNPLCRRLQLKDIIPTQMQRLTKYPLLLDNIAKYTEWPTEREKVKKAADHCRQILNYVNQAVKEAENKQRLEDYQRRLDTSSLKLSEYPNVEELRNLDLTKRKMIHEGPLVWKVNRDKTIDLYTLLLEDILVLLQKQDDRLVLRCHSKILASTADSKHTFSPVIKLSTVLVRQVATDNKALFVISMSDNGAQIYELVAQTVSEKTVWQDLICRMAASVKEQSTKPIPLPQSTPGEGDNDEEDPSKLKEEQHGISVTGLQSPDRDLGLESTLISSKPQSHSLSTSGKSEVRDLFVAERQFAKEQHTDGTLKEVGEDYQIAIPDSHLPVSEERWALDALRNLGLLKQLLVQQLGLTEKSVQEDWQHFPRYRTASQGPQTDSVIQNSENIKAYHSGEGHMPFRTGTGDIATCYSPRTSTESFAPRDSVGLAPQDSQASNILVMDHMIMTPEMPTMEPEGGLDDSGEHFFDAREAHSDENPSEGDGAVNKEEKDVNLRISGNYLILDGYDPVQESSTDEEVASSLTLQPMTGIPAVESTHQQQHSPQNTHSDGAISPFTPEFLVQQRWGAMEYSCFEIQSPSSCADSQSQIMEYIHKIEADLEHLKKVEESYTILCQRLAGSALTDKHSDKS

SEQ ID NO: 1293 - protein, 690 aa, Homo sapiens
MAPWPELGDAQPNPDKYLEGAAGQQPTAPDKSKETNKTDNTEAPVTKIELLPSYSTATLIDEPTEVDDPWNLPTLQDSGIKWSERDTKGKILCFFQGIGRLILLLGFLYFFVCSLDILSSAFQLVGGKMAGQFFSNSSIMSNPLLGLVIGVLVTVLVQSSSTSTSIVVSMVSSSLLTVRAAIPIIMGANIGTSITNTIVALMQVGDRSEFRRAFAGATVHDFFNWLSVLVLLPVEVATHYLEIITQLIVESFHFKNGEDAPDLLKVITKPFTKLIVQLDKKVISQIAMNDEKAKNKSLVKIWCKTFTNKTQINVTVPSTANCTSPSLCWTDGIQNWTMKNVTYKENIAKCQHIFVNFHLPDLAVGTILLILSLLVLCGCLIMIVKILGSVLKGQVATVIKKTINTDFPFPFAWLTGYLAILVGAGMTFIVQSSSVFTSALTPLIGIGVITIERAYPLTLGSNIGTTTTAILAALASPGNALRSSLQIALCHFFFNISGILLWYPIPFTRLPIRMAKGLGNISAKYRWFAVFYLIIFFFLIPLTVFGLSLAGWRVLVGVGVPVVFIIILVLCLRLLQSRCPRVLPKKLQNWNFLPLWMRSLKPWDAVVSKFTGCFQMRCCCCCRVCCRACCLLCGCPKCCRCSKCCEDLEEAQEGQDVPVKAPETFDNITISREAQGEVPASDSKTECTAL

SEQ ID NO: 1294 - protein, 404 aa, Homo sapiens
MSVKPSWGPGPSEGVTAVPTSDLGEIHNWTELLDLFNHTLSECHVELSQSTKRVVLFALYLAMFVVGLVENLLVICVNWRGSGRAGLMNLYILNMAIADLGIVLSLPVWMLEVTLDYTWLWGSFSCRFTHYFYFVNMYSSIFFLVCLSVDRYVTLTSASPSWQRYQHRVRRAMCAGIWVLSAIIPLPEVVHIQLVEGPEPMCLFMAPFETYSTWALAVALSTTILGFLLPFPLITVFNVLTACRLRQPGQPKSRRHCLLLCAYVAVFVMCWLPYHVTLLLLTLHGTHISLHCHLVHLLYFFYDVIDCFSMLHCVINPILYNFLSPHFRGRLLNAVVHYLPKDQTKAGTCASSSSCSTQHSIIITKGDSQPAAAAPHPEPSLSFQAHHLLPNTSPISPTQPLTPS

SEQ ID NO: 1295 - protein, 297 aa, Homo sapiens
MASPQLCRALVSAQWVAEALRAPRAGQPLQLLDASWYLPKLGRDARREFEERHIPGAAFFDIDQCSDRTSPYDHMLPGAEHFAEYAGRLGVGAATHVVIYDASDQGLYSAPRVWWMFRAFGHHAVSLLDGGLRHWLRQNLPLSSGKSQPAPAEFRAQLDPAFIKTYEDIKENLESRRFQVVDSRATGRFRGTEPEPRDGIEPGHIPGTVNIPFTDFLSQEGLEKSPEEIRHLFQEKKVDLSKPLVATCGSGVTACHVALGAYLCGKPDVPIYDGSWVEWYMRARPEDVISEGRGKTH

SEQ ID NO: 1296 - protein, 445 aa, Homo sapiens
MREIVHIQAGQCGNQIGAKFWEVISDEHGIDPTGSYHGDSDLQLERINVYYNEAAGNKYVPRAILVDLEPGTMDSVRSGPFGQIFRPDNFVFGQSGAGNNWAKGHYTEGAELVDSVLDVVRKESESCDCLQGFQLTHSLGGGTGSGMGTLLISKIREEYPDRIMNTFSVMPSPKVSDTVVEPYNATLSVHQLVENTDETYSIDNEALYDICFRTLKLTTPTYGDLNHLVSATMSGVTTCLRFPGQLNADLRKLAVNMVPFPRLHFFMPGFAPLTSRGSQQYRALTVPELTQQMFDSKNMMAACDPRHGRYLTVAAIFRGRMSMKEVDEQMLNVQNKNSSYFVEWIPNNVKTAVCDIPPRGLKMSATFIGNSTAIQELFKRISEQFTAMFRRKAFLHWYTGEGMDEMEFTEAESNMNDLVSEYQQYQDATADEQGEFEEEEGEDEA

SEQ ID NO: 1297 - protein, 179 aa, Homo sapiens
MTPSEGARAGTGRELEMLDSLLALGGLVLLRDSVEWEGRSLLKALVKKSALCGEQVHILGCEVSEEEFREGFDSDINNRLVYHDFFRDPLNWSKTEEAFPGGPLGALRAMCKRTDPVPVTIALDSLSWLLLRLPCTTLCQVLHAVSHQDSCPGETPPSLFPLIHLPLPRSVPLFLSTLE

SEQ ID NO: 1298 - protein, 269 aa, Homo sapiens
MGQNDLMGTAEDFADQFLRVTKQYLPHVARLCLISTFLEDGIRMWFQWSEQRDYIDTTWNCGYLLASSFVFLNLLGQLTGCVLVLSRNFVQYACFGLFGIIALQTIAYSILWDLKFLMRNLALGGGLLLLLAESRSEGKSMFAGVPTMRESSPKQYMQLGGRVLLVLMFMTLLHFDASFFSIVQNIVGTALMILVAIGFKTKLAALTLVVWLFAINVYFNAFWTIPVYKPMHDFLKYDFFQTMSVIGGLLLVVALGPGGVSMDEKKKEW

SEQ ID NO: 1299 - protein, 118 aa, Homo sapiens [sequence omitted]

SEQ ID NO: 1300 - protein, 60 aa, Homo sapiens
MLGLQTQVYLMLDLHLLSHCVTLSLRRVRLWVSRLQRQVTHVRSSGQNQREGWSRVLEMR

SEQ ID NO: 1301 - protein, 230 aa, Homo sapiens [sequence omitted]

SEQ ID NO: 1302 - protein, 62 aa, Homo sapiens
MSYLDSVASKLLQMVKKLSQSFCSNFKYLTKYSRKQVSDEIKKSRRTVESNPIFFKKNKKIQ

SEQ ID NO: 1303 - protein, 87 aa, Homo sapiens
MYIPVTQGDMPGEMRIFFFFFRYFFIIKHSVPRDGPGTSLEIFHLLTSEESKFPTVSATGRATPSTCPLADPCLPSAGCCWRQVQLH

SEQ ID NO: 1304 - protein, 109 aa, Homo sapiens [sequence omitted]

SEQ ID NO: 1305 - protein, 445 aa, Homo sapiens
MSELTKELMELVWGTKSSPGLSDTIFCRWTQGFVFSESEGSALEQFEGGPCAVIAPVQAFLLKKLLFSSEKSSWRDCSEEEQKELLCHTLCDILESACCDHSGSYCLVSWLRGKTTEETASISGSPAESSCQVEHSSALAVEELGFERFHALIQKRSFRSLPELKDAVLDQYSMWGNKFGVLLFLYSVLLTKGIENIKNEIEDASEPLIDPVYGHGSQSLINLLLTGHAVSNVWDGDRECSGMKLLGIHEQAAVGFLTLMEALRYCKVGSYLKSPKFPIWIVGSETHLTVFFAKDMALVAPEAPSEQARRVFQTYDPEDNGFIPDSLLEDVMKALDLVSDPEYINLMKNKLDPEGLGIILLGPFLQEFFPDQGSSGPESFTVYHYNGLKQSNYNEKVMYVEGTAVVMGFEDPMLQTDDTPIKRCLQTKWPYIELLWTTDRSPSLN

SEQ ID NO: 1306 - protein, 336 aa, Homo sapiens
MEKLRLLGLRYQEYVTRHPAATAQLETAVRGFSYLLAGRFADSHELSELVYSASNLLVLLNDGILRKELRKKLPVSLSQQKLLTWLSVLECVEVFMEMGAAKVWGEVGRWLVIALIQLAKAVLRMLLLLWFKAGLQTSPPIVPLDRETQAQPPDGDHSPGNHEQSYVGKRSNRVVRTLQNTPSLHSRHWGAPQQREGRQQQHHEELSATPTPLGLQETIAEFLYIARPLLHLLSLGLWGQRSWKPWLLAGVVDVTSLSLLSDRKGLTRRERRELRRRTILLLYYLLRSPFYDRFSEARILFLLQLLADHVPGVGLVTRPLMDYLPTWQKIYFYSWG

SEQ ID NO: 1307 - protein, 118 aa, Homo sapiens
MQVAAHNLEFALSFCSCSICKKKQNRHFIVPASRFKLLKGAEHITTYTFNTHKAQHTFCKRCGVQSFYTPRSNPGGFGIAPHCLDEGTVRSMVTEEFNGSDWEKAMKEHKTIKNMSKE

SEQ ID NO: 1308 - protein, 52 aa, Homo sapiens
MRQLLLSKAIGTLGKANRHVVETSTSSEEICCRGRNSREPSQRRQSELGMEG

SEQ ID NO: 1309 - protein, 715 aa, Homo sapiens
MELADVGAAASSQGVHDQVLPTPNASSRVIVHVDLDCFYAQVEMISNPELKDKPLGVQQKYLVVTCNYEARKLGVKKLMNVRDAKEKCPQLVLVNGEDLTRYREMSYKVTELLEEFSPVVERLGFDENFVDLTEMVERRLQQLQSDELSAVTVSGHVYNNQSINLLDVLHIRLLVGSQIAAEMREAMYNQLGLTGCAGVASNKLLAKLVSGVFKPNQQTVLLPESCQHLIHSLNHIKEIPGIGYKTAKCLEALGINSVRDLQTFSPKILEKELGISVAQRIQKLSFGEDNSPVILSGPPQSFSEEDSFKKCSSEVEAKNKIEELLASLLNRVCQDGRKPHTVRLIIRRYSSEKHYGRESRQCPIPSHVIQKLGTGNYDVMTPMVDILMKLFRNMVNVKMPFHLTLLSVCFCNLKALNTAKKGLIDYYLMPSLSTTSRSGKHSFKMKDTHMEDFPKDKETNRDFLPSGRIESTRTRESPLDTTNFSKEKDINEFPLCSLPEGVDQEVFKQLPVDIQEEILSGKSREKFQGKGSVSCPLHASRGVLSFFSKKQMQDIPINPRDHLSSSKQVSSVSPCEPGTSGFNSSSSSYMSSQKDYSYYLDNRLKDERISQGPKEPQGFHFTNSNPAVSAFHSFPNLQSEQLFSRNHTTDSHKQTVATDSHEGLTENREPDSVDEKITFPSDIDPQVFYELPEAVQKELLAEWKRTGSDFHIGHK

SEQ ID NO: 1310 - protein, 285 aa, Homo sapiens
MAAETRNVAGAEAPPPQKRYYRQRAHSNPMADHTLRYPVKPEEMDWSELYPEFFAPLTQNQSHDDPKDKKEKRAQAQVEFADIGCGYGGLLVELSPLFPDTLILGLEIRVKVSDYVQDRIRALRAAPAGGFQNIACLRSNAMKHLPNFFYKGQLTKMFFLFPDPHFKRTKHKWRIISPTLLAEYAYVLRVGVSWDRRDDGGLVYTITDVLELHDWMCTHFEEHPLFERVPLEDLSEDPVVGHLGTSTEEGKKVLRNGGKNFPAIFRRIQDPVLQAVTSQTSLPGH

SEQ ID NO: 1311 - protein, 931 aa, Homo sapiens
MASPPRGWGCGELLLPFMLLGTLCEPGSGQIRYSMPEELDKGSFVGNIAKDLGLEPQELAERGVRIVSRGRTQLFALNPRSGSLVTAGRIDREELCAQSPLCVVNFNILVENKMKIYGVEVEIIDINDNFPRFRDEELKVKVNENAAAGTRLVLPFARDADVGVNSLRSYQLSSNLHFSLDVVSGTDGQKYPELVLEQPLDREKETVHDLLLTALDGGDPVLSGTTHIRVTVLDANDNAPLFTPSEYSVSVPENIPVGTRLLMLTATDPDEGINGKLTYSFRNEEEKISETFQLDSNLGEISTLQSLDYEESRFYLMEVVAQDGGALVASAKVVVTVQDVNDNAPEVILTSLTSSISEDCLPGTVIALFSVHDGDSGENGEIACSIPRNLPFKLEKSVDNYYHLLTTRDLDREETSDYNITLTVMDHGTPPLSTESHIPLKVADVNDNPPNFPQASYSTSVTENNPRGVSIFSVTAHDPDSGDNARVTYSLAEDTFQGAPLSSYVSINSDTGVLYALRSFDYEQLRDLQLWVTASDSGNPPLSSNVSLSLFVLDQNDNTPEILYPALPTDGSTGVELAPRSAEPGYLVTKVVAVDKDSGQNAWLSYRLLKASEPGLFAVGLHTGEVRTARALLDRDALKQSLVVAVEDHGQPPLSATFTVTVAVADRIPDILADLGSIKTPIDPEDLDLTLYLVVAVAAVSCVFLAFVIVLLVLRLRRWHKSRLLQAEGSRLAGVPASHFVGVDGVRAFLQTYSHEVSLTADSRKSHLIFPQPNYADTLLSEESCEKSEPLLMSDKVDANKEERRVQQAPPNTDWRFSQAQRPGTSGSQNGDDTGTWPNNQFDTEMLQAMILASASEAADGSSTLGGGAGTMGLSARYGPQFTLQHVPDYRQNVYIPGSNATLTNAAGKRDGKAPAGGNGNKKKSGKKEKK

SEQ ID NO: 1312 - protein, 375 aa, Homo sapiens
MSSHKGSVVAQGNGAPASNREADTVELAELGPLLEEKGKRVIANPPKAEEEQTCPVPQEEEEEVRVLTLPLQAHHAMEKMEEFVYKVWEGRWRVIPYDVLPDWLKDNDYLLHGHRPPMPSFRACFKSIFRIHTETGNIWTHLLGFVLFLFLGILTMLRPNMYFMAPLQEKVVFGMFFLGAVLCLSFSWLFHTVYCHSEKVSRTFSKLDYSGIALLIMGSFVPWLYYSFYCSPQPRLIYLSIVCVLGISAIIVAQWDRFATPKHRQTRAGVFLGLGLSGVVPTMHFTIAEGFVKATTVGQMGWFFLMAVMYITGAGLYAARIPERFFPGKFDIWFQSHQIFHVLVVAAAFVHFYGVSNLQEFRYGLEGGCTDDTLL

SEQ ID NO: 1313 - protein, 158 aa, Homo sapiens
MNQEKLAKLQAQVRIGGKGTARRKKKVVHRTATADDKKLQSSLKKLAVNNIAGIEEVNMIKDDGTVIHFNNPKVQASLSANTFAITGHAEAKPITEMLPGILSQLGADSLTSLRKLAEQFPRQVLDSKAPKPEDIDEEDDDVPDLVENFDEASKNEAN

SEQ ID NO: 1314 - protein, 268 aa, Homo sapiens
MLLKEYRICMPLTVDEYKIGQLYMISKHSHEQSDRGEGVEVVQNEPFEDPHHGNGQFTEKRVYLNSKLPSWARAVVPKIFYVTEKAWNYYPYTITEYTCSFLPKFSIHIETKYEDNKGSNDTIFDNEAKDVEREVCFIDIACDEIPERYYKESEDPKHFKSEKTGRGQLREGWRDSHQPIMCSYKLVTVKFEVWGLQTRVEQFVHKVVRDILLIGHRQAFAWVDEWYDMTMDDVREYEKNMHEQTNIKVCNQHSSPVDDIESHAQTST

SEQ ID NO: 1315 - protein, 104 aa, Homo sapiens
MGKESGWDSGRAAVAAVVGGVVAVGTVLVALSAMGFTSVGIAASSIAAKMMSTAAIANGGGVAAGSLVAILQSVGAAGLSVTSKVIGGFAGTALGAWLGSPPSS

SEQ ID NO: 1316 - protein, 126 aa, Homo sapiens
MSVMDLANTCSSFQSDLDFCSDCGSVLPLPGAQDTVTCIRCGFNINVRDFEGKVVKTSVVFHQLGTAMPMSVEEGPECQGPVVDRRCPRCGHEGMAYHTRQMRSADEGQTVFYTCTNCKFQEKEDS

SEQ ID NO: 1317 - protein, 460 aa, Homo sapiens
MANDPLEGFHEVNLASPTSPDLLGVYESGTQEQTTSPSVIYRPHPSALSSVPIQANALDVSELPTQPVYSSPRRLNCAEISSISFHVTDPAPCSTSGVTAGLTKLTTRKDNYNAEREFLQGATITEACDGSDDIFGLSTDSLSRLRSPSVLEVREKGYERLKEELAKAQRELKLKDEECERLSKVRDQLGQELEELTASLFEEAHKMVREANIKQATAEKQLKEAQGKIDVLQAEVAALKTLVLSSSPTSPTQEPLPGGKTPFKKGHTRNKSTSSAMSGSHHDLSVIQPIVKDCKEADLSLYNEFRLWKDEPTMDRTCPFLDKIYQEDIFPCLTFSKSELASAVLEAVENNTLSIEPVGLQPIRFVKASAVECGGPKKCALTGQSKSCKHRIKLGDSSNYYYISPFCRYRITSVCNFFTYIRYIQQGLVKQQDVDQMFWEVMQLRKEMSLAKLGYFKEEL

SEQ ID NO: 1318 - protein, 190 aa, Homo sapiens
MAAGELEGGKPLSGLLNALAQDTFHGYPGITEELLRSQLYPEVPPEEFRPFLAKMRGILKSIASADMDFNQLEAFLTAQTKKQGGITSDQAAVISKFWKSHKTKIRESLMNQSRWNSGLRGLSWRVDGKSQSRHSAQIHTPVAIIELELGKYGQESEFLCLEFDEVKVNQILKTLSEVEESISTLISQPN

SEQ ID NO: 1319 - protein, 110 aa, Homo sapiens
MAKHHPDLIFCRKQAGVAIGRLCEKCDGKCVICDSYVRPCTLVRICDECNYGSYQGRCVICGGPGVSDAYYCKECTIQEKDRDGCPKIVNLGSSKTDLFYERKKYGFKKR

SEQ ID NO: 1320 - protein, 125 aa, Homo sapiens
MKLLTHNLLSSHVRGVGSRGFPLRLQATEVRICPVEFNPNFVARMIPKVEWSAFLEAADNLRLIQVPKGPVEGYEENEEFLRTMHHLLLEVEVIEGTLQCPESGRMFPISRGIPNMLLSEEETES

SEQ ID NO: 1321 - protein, 529 aa, Homo sapiens
MDSVAFEDVAVSFTQEEWALLDPSQKNLYRDVMQETFKNLTSVGKTWKVQNIEDEYKNPRRNLSLMREKLCESKESHHCGESFNQIADDMLNRKTLPGITPCESSVCGEVGTGHSSLNTHIRADTGHKSSEYQEYGENPYRNKECKKAFSYLDSFQSHDKACTKEKPYDGKECTETFISHSCIQRHRVMHSGDGPYKCKFCGKAFYFLNLCLIHERIHTGVKPYKCKQCGKAFTRSTTLPVHERTHTGVNADECKECGNAFSFPSEIRRHKRSHTGEKPYECKQCGKVFISFSSIQYHKMTHTGEKPYECKQCGKAFRCGSHLQKHGRTHTGEKPYECRQCGKAFRCTSDLQRHEKTHTEDKPYGCKQCGKGFRCASQLQIHERTHSGEKPHECKECGKVFKYFSSLRIHERTHTGEKPHECKQCGKAFRYFSSLHIHERTHTGDKPYECKVCGKAFTCSSSIRYHERTHTGEKPYECKHCGKAFISNYIRYHERTHTGEKPYQCKQCGKAFIRASSCREHERTHTINR

SEQ ID NO: 1322 - protein, 24 aa, Homo sapiens
MANYIHVPPGSPEVPKLNVTVQDQ

SEQ ID NO: 1323 - protein, 4 aa, Homo sapiens
MLPF

SEQ ID NO: 1324 - protein, 1378 aa, Homo sapiens
MNRPGIPAASASSTNLIHLSSKGHISPAKDTSLQQRTPAEMSPVLHFYVRPSGHEGAASGHTRRKLQGKLPELQGVETELCYNVNWTAEALPSAEETKKLMWLFGCPLLLDDVARESWLLPGSNDLLLEVGPRLNFSTPTSTNIVSVCRATGLGPVDRVETTRRYRLSFAHPPSAEVEAIALATLHDRMTEQHFPHPIQSFSPESMPEPLNGPINILGEGRLALEKANQELGLALDSWDLDFYTKRFQELQRNPSTVEAFDLAQSNSEHSRHWFFKGQLHVDGQKLVHSLFESIMSTQESSNPNNVLKFCDNSSAIQGKEVRFLRPEDPTRPSRFQQQQGLRHVVFTAETHNFPTGVCPFSGATTGTGGRIRDVQCTGRGAHVVAGTAGYCFGNLHIPGYNLPWEDLSFQYPGNFARPLEVAIEASNGASDYGNKFGEPVLAGFARSLGLQLPDGQRREWIKPIMFSGGIGSMEADHISKEAPEPGMEVVKVGGPVYRIGVGGGAASSVQVQGDNTSDLDFGAVQRGDPEMEQKMNRVIRACVEAPKGNPICSLHDQGAGGNGNVLKELSDPAGAIIYTSRFQLGDPTLNALEIWGAEYQESNALLLRSPNRDFLTHVSARERCPACFVGTITGDRRIVLVDDRECPVRRNGQGDAPPTPPPTPVDLELEWVLGKMPRKEFFLQRKPPMLQPLALPPGLSVHQALERVLRLPAVASKRYLTNKVDRSVGGLVAQQQCVGPLQTPLADVAVVALSHEELIGAATALGEQPVKSLLDPKVAARLAVAEALTNLVFALVTDLRDVKCSGNWMWAAKLPGEGAALADACEAMVAVMAALGVAVDGGKDSLSMAARVGTETVRAPGSLVISAYAVCPDITATVTPDLKHPEGRGHLLYVALSPGQHRLGGTALAQCFSQLGEHPPDLDLPENLVRAFSITQGLLKDRLLCSGHDVSDGGLVTCLLEMAFAGNCGLQVDVPVPRVDVLSVLFAEEPGLVLEVQEPDLAQVLKRYRDAGLHCLELGHTGEAGPHAMVRVSVNGAVVLEEPVGELRALWEETSFQLDRLQAEPRCVAEEERGLRERMGPSYCLPPTFPKASVPREPGGPSPRVAILREEGSNGDREMADAFHLAGFEVWDVTMQDLCSGAIGLDTFRGVAFVGGFSYADVLGSAKGWAAAVTFHPRAGAELRRFRKRPDTFSLGVCNGCQLLALLGWVGGDPNEDAAEMGPDSQPARPGLLLRHNLSGRYESRWASVRVGPGPALMLRGMEGAVLPVWSAHGEGYVAFSSPELQAQIEARGLAPLHWADDDGNPTEQYPLNPNGSPGGVAGICSCDGRHLAVMPHPERAVRPWQWAWRPPPFDTLTTSPWLQLFINARNWTLEGSC

SEQ ID NO: 1325 - protein, 183 aa, Homo sapiens
MASRAGPRAAGTDGSDFQHRERVAMHYQMSVTLKYEIKKLIYVHLVIWLLLVAKMSVGHLRLLSHDQVAMPYQWEYPYLLSILPSLLGLLSFPRNNISYLVLSMISMGLFSIAPLIYGSMEMFPAAQQLYRHGKAYRFLFGFSAVSIMYLVLVLAVQVHAWQLYYSKKLLDSWFTSTQEKKHK

SEQ ID NO: 1326 - protein, 551 aa, Homo sapiens
MAAPVRLGRKRPLPACPNPLFVRWLTEWRDEATRSRHRTRFVFQKALRSLRRYPLPLRSGKEAKILQHFGDGLCRMLDERLQRHRTSGGDHAPDSPSGENSPAPQGRLAEVQDSSMPVPAQPKAGGSGSYWPARHSGARVILLVLYREHLNPNGHHFLTKEELLQRCAQKSPRVAPGSAPPWPALRSLLHRNLVLRTHQPARYSLTPEGLELAQKLAESEGLSLLNVGIGPKEPPGEETAVPGAASAELASEAGVQQQPLELRPGEYRVLLCVDIGETRGGGHRPELLRELQRLHVTHTVRKLHVGDFVWVAQETNPRDPANPGELVLDHIVERKRLDDLCSSIIDGRFREQKFRLKRCGLERRVYLVEEHGSVHNLSLPESTLLQAVTNTQVIDGFFVKRTADIKESAAYLALLTRGLQRLYQGHTLRSRPWGTPGNPESGAMTSPNPLCSLLTFSDFNAGAIKNKAQSVREVFARQLMQVRGVSGEKAAALVDRYSTPASLLAAYDACATPKEQETLLSTIKCGRLQRNLGPALSRTLSQLYCSYGPLT

SEQ ID NO: 1327 - protein, 327 aa, Homo sapiens [sequence omitted]

SEQ ID NO: 1328 - protein, 259 aa, Homo sapiens
MAASRLELNLVRLLSRCEAMAAEKRDPDEWRLEKYVGALEDMLQALKVHASKPASEVINEYSWKVDFLKGMLQAEKLTSSSEKALANQFLAPGRVPTTARERVPATKTVHLQSRARYTSEMRSELLGTDSAEPEMDVRKRTGVAGSQPVSEKQSAAELDLVLQRHQNLQEKLAEEMLGLARSLKTNTLAAQSVIKKDNQTLSHSLKMADQNLEKLKTESERLEQHTQKSVNWLLWAMLIIVCFIFISMILFIRIMPKLK

SEQ ID NO: 1329 - protein, 133 aa, Homo sapiens [sequence omitted]

SEQ ID NO: 1330 - protein, 189 aa, Homo sapiens
MTLAAYKEKMKELPLVSLFCSCFLADPLNKSSYKYEADTVDLNWCVISDMEVIELNKCTSGQSFEVILKPPSFDGVPEFNASLPRRRDPSLEEIQKKLEAAEERRKYQEAELLKHLAEKREHEREVIQKAIEENNNFIKMAKEKLAQKMESNKENREAHLAAMLERLQEKDKHAEEVRKNKELKEEASR

SEQ ID NO: 1331 - protein, 319 aa, Homo sapiens
MMYITIYSMMKIPHQTQKKRSLEDPNSRPRRRGVLSRLQLGSGAPLLTWVQETAGVAGGAPRRRTPVTMWRLLARASAPLLRVPLSDSWALLPASAGVKTLLPVPSFEDVSIPEKPKLRFIERAPLVPKVRREPKNLSDIRGPSTEATEFTEGNFAILALGGGYLHWGHFEMMRLTINRSMDPKNMFAIWRVPAPFKPITRKSVGHRMGGGKGAIDHYVTPVKAGRLVVEMGGRCEFEEVQGFLDQVAHKLPFAAKAVSRGTLEKMRKDQEERERNNQNPWTFERIATANMLGIRKVLSPYDLTHKGKYWGKFYMPKRV

SEQ ID NO: 1332 - protein, 622 aa, Homo sapiens
RNRSGIPGSTHASGGSGSAAETMPEIRVTPLGAGQDVGRSCILVSIAGKNVMLDCGMHMGFNDDRRFPDFSYITQNGRLTDFLDCVIISHFHLDHCGALPYFSEMVGYDGPIYMTHPTQAICPILLEDYRKIAVDKKGEANFFTSQMIKDCMKKVVAVHLHQTVQVDDELEIKAYYAGHVLGAAMFQIKVGSESVVYTGDYNMTPDRHLGAAWIDKCRPNLLITESTYATTIRDSKRCRERDFLKKVHETVERGGKVLIPVFALGRAQELCILLETFWERMNLKVPIYFSTGLTEKANHYYKLFIPWTNQKIRKTFVQRNMFEFKHIKAFDRAFADNPGPMVVFATPGMLHAGQSLQIFRKWAGNEKNMVIMPGYCVQGTVGHKILSGQRKLEMEGRQVLEVKMQVEYMSFSAHADAKGIMQLVGQAEPESVLLVHGEAKKMEFLKQKIEQELRVNCYMPANGETVTLPTSPSIPVGISLGLLKREMAQGLLPEAKKPRLLHGTLIMKDSNFRLVSSEQALKELGLAEHQLRFTCRVHLHDTRKEQETALRVYSHLKSVLKDHCVQHLPDGSVTVESVLLQAAAPSEDPGTKVLLVSWTYQDEELGSFLTSLLKKGLPQAPS

SEQ ID NO: 1333 - protein, 110 aa, Homo sapiens
ARAAFRRLGALSGAAALGFASYGAHGAQFPDAYGKELFDKANKHHFLHSLALLGVPHCRKPLWAGLLLASGTTLFCTSFYYQALSGDPSIQTLAPAGGTLLLLGWLALAL

SEQ ID NO: 1334 - protein, 397 aa, Homo sapiens
ARSPAAPRVCPRPAGAGKMEAVIEKECSALGGLFQTIISDMKGSYPVWEDFINKAGKLQSQLRTTVVAAAAFLDAFQKVADMATNTRGGTREIGSALTRMCMRHRSIEAKLRQFSSALIDCLINPLQEQMEEWKKVANQLDKDHAKEYKKARQEIKKKSSDTLKLQKKAKKGRGDIQPQLDSALQDVNDKYLLLEETEKQAVRKALIEERGRFCTFISMLRPVIEEEISMLGEITHLQTISEDLKSLTMDPHKLPSSSEQVILDLKGSDYSWSYQTPPSSPSTTMSRKSSVCSSLNSVNSSDSRSSGSHSHSPSSHYRYRSSNLAQQAPVRLSSVSSHDSGFISQDAFQSKSPSPMPPEAPNQRRKEKREPDPNGGGPTTASGPPAAAEEAQRPRSM

SEQ ID NO: 1335 - protein, 277 aa, Homo sapiens
MNLEGLEMVAVLVVLALFVKVLEQFGLFEPVSLEGHPPGPTKKALKQRFLKLLPCCGPQALPSVSESKCLSCASGGGARCVHSVDDEFELSTVCHRPEGLEQLQEQTKFTRKELQVLYRGFKNECPSGIVNEENFKQIYSQFFPQGDSSTYATFLFNAFDTNHDGSVSFEDFVAGLSVILRGTVDDRLNWAFNLYDLNKDGCITKEEMLDIMKSIYDMMGKYTYPALREEAPREHVESFFQKMDRNKDGVVTIEEFIESCQKDENIMRSMQLFDNVI

SEQ ID NO: 1336 - protein, 122 aa, Homo sapiens
MIWYTEKGHLTKTRDFKKLRKLSGSGDSWARAPTHHTIQTRALWPCARKDLIILFTLQNVAEAQCIANQVQLFYATDRKETYGLVETFNLRPNEFKYMSVIAELEQSGLGAELKCAQNQNKT

SEQ ID NO: 1337 - protein, 188 aa, Homo sapiens
MNWHMIISGLIVVVLKVVGMTLFLLYFPQIFNKSNDGFTTTRSYGTVSQIFGSSSPSPNGFITTRSYGTVCPKDWEFYQARCFFLSTSESSWNESRDFCKGKGSTLAIVNTPEKLKFLQDITDAEKYFIGLIYHREEKRWRWINNSVFNGNVTNQNQNFNCATIGLTKTFDAASCDISYRRICEKNAK

SEQ ID NO: 1338 - protein, 1088 aa, Homo sapiens
MGSAARWEGSFSREFSSLLSRGCLSTSRIDMDALEDYVWPRATSELILLPVTGLECVGDRLLAGEGPDVLVYSLDFGGHLRMIKRVQNLLGHYLIHGFRVRPEPNGDLDLEAMVAVFGSKGLRVVKISWGQGHFWELWRSGLWNMSDWIWDARWLEGNIALALGHNSVVLYDPVVGCILQEVPCTDRCTLSSACLIGDAWKELTIVAGAVSNQLLVWYPATALADNKPVAPDRRISGHVGIIFSMSYLESKGLLATASEDRSVRIWKVGDLRVPGGRVQNIGHCFGHSARVWQVKLLENYLISAGEDCVCLVWSHEGEILQAFRGHQGRGIRAIAAHERQAWVITGGDDSGIRLWHLVGRGYRGLGVSALCFKSRSRPGTLKAVTLAGSWRLLAVTDTGALYLYDVEVKCWEQLLEDKHFQSYCLLEAAPGPEGFGLCAMANGEGRVKVVPINTPTAAVDQTLFPGKVHSLSWALRGYEELLLLASGPGGVVACLEISAAPSGKAIFVKERCRYLLPPSKQRWHTCSAFLPPGDFLVCGDRRGSVLLFPSGPGRDGAYYQLFVRDGQLQPVLRQKSCRGMNWLAGLRIVPDGSMVILGFHANEFVVWNPRSHEKLHIINCGGGHRSWAFSDTEAAMAFAYLKDGDVMLYRALGGCTRPHVILREGLHGREITCVKRVGTITLGPEYGVPSFMQPDDLEPGSEGPDLTDIVITCSEDTTVCVLALPTTTGSAHALTAVCNHISSVRAVAVWGIGTPGGPQDPQPGLTAHVVSAGGRAEMHCFSIMVTPDPSTPSRLACHVMHLSSHRLDEYWDRQRNRHRMVKVDPETRYMSLAVCELDQPGLGPLVAAACSDGAVRLFLLQDSGRILQLLAETFHHKRCVLKVHSFTHEAPNQRRRLLLCSAATDGSLAFWDLTTMLDHDSTVLEPPVDPGLPYRLGTPSLTLQAHSCGINSLHTLPTREGHHLVASGSEDGSLHVFVLAVEMLQLEEAVGEAGLVPQLRVLEEYSVPCAHAAHVTGLKILSPSIMVSASIDQRLTFWRLGHGEPTFMNSTVFHVPDVADMDCWPVSPEFGHRCALGGQGLEVYNWYD

SEQ ID NO: 1339 - protein, 184 aa, Homo sapiens [sequence omitted]

SEQ ID NO: 1340 - protein, 738 aa, Homo sapiens
MKGFKLSCTASNSNRSTPACSPILRKRSRSPTPQNQDGDTMVEKGSDHSSDKSPSTPEQGVQRSCSSQSGRSGGKNSKKSQSWYNVLSPTYKQRNEDFRKLFKQLPDTERLIVDYSCALQRDILLQGRLYLSENWICFYSNIFRWETLLTVRLKDICSMTKEKTARLIPNAIQVCTDSEKHFFTSFGARDRTYMMMFRLWQNALLEKPLCPKELWHFVHQCYGNELGLTSDDEDYVPPDDDFNTMGYCEEIPVEENEVNDSSSKSSIETKPDASPQLPKKSITNSTLTSTGSSEAPVSFDGLPLEEEALEGDGSLEKELAIDNIMGEKIEMIAPVNSPSLDFNDNEDIPTELSDSSDTHDEGEVQAFYEDLSGRQYVNEVFNFSVDKLYDLLFTNSPFQRDFMEQRRFSDIIFHPWKKEENGNQSRVILYTITLTNPLAPKTATVRETQTMYKASQESECYVIDAEVLTHDVPYHDYFYTINRYTLTRVARNKSRLRVSTELRYRKQPWGLVKTFIEKNFWSGLEDYFRHLESELAKTESTYLAEMHRQSPKEKASKTTTVRRRKRPHAHLRVPHLEEVMSPVTTPTDEDVGHRIKHVAGSTQTRHIPEDTPNGFHLQSVSKLLLVISCVICFSLVLLVILNMMLFYKLWMLEYTTQTLTAWQGLRLQERLPQSQTEWAQLLESQQKYHDTELQKWREIIKSSVMLLDQMKDSLINLQNGIRSRDYTSESEEKRNRYH

SEQ ID NO: 1341 - protein, 734 aa, Homo sapiens
MKGFKLSCTASNSNRSTPACSPILRKRSRSPTPQNQDGDTMVEKGSDHSSDKSPSTPEQGVQRSCSSQSGRSGGKNSKKSQSWYNVLSPTYKQRNEDFRKLFKQLPDTERLIVDYSCALQRDILLQGRLYLSENWICFYSNIFRWETLLTVRLKDICSMTKEKTARLIPNAIQVCTDSEKHFFTSFGARDRTYMMMFRLWQNALLEKPLCPKELWHFVHQCYGNELGLTSDDEDYVPPDDDFNTMGYCEEIPVEENEVNDSSSKSSIETKPDASPQLPKKSITNSTLTSTGSSEAPVSFDGLPLEEEALEGDGSLEKELAIDNIMGEKIEMIAPVNSPSLDFNDNEDIPTELSDSSDTHDEGEVQAFYEDLSGRQYVNEVFNFSVDKLYDLLFTNSPFQRDFMEQRRFSDIIFHPWKKEENGNQSRVILYTITLTNPLAPKTATVRETQTMYKASQESECYVIDAEVLTHDVPYHDYFYTINRYTLTRVARNKSRLRVSTELRYRKQPWGLVKTFIEKNFWSGLEDYFRHLESELAKTESTYLAEMHRQSPKEKASKTTTVRRRKRPHAHLRVPHLEEVMSPVTTPTDEDVGHRIKHVAGSTQTRHIPEDTPNGFHLQSVSKLLLVISCVLVLLVILNMMLFYKLWMLEYTTQTLTAWQGLRLQERLPQSQTEWAQLLESQQKYHDTELQKWREIIKSSVMLLDQMKDSLINLQNGIRSRDYTSESEEKRNRYH

SEQ ID NO: 1342 - protein, 435 aa, Homo sapiens
MAASDTERDGLAPEKTSPDRDKKKEQSEVSVSPRASKHHYSRSRSRSRERKRKSDNEGRKHRSRSRSKEGRRHESKDKSSKKHKSEEHNDKEHSSDKGRERLNSSENGEDRHKRKERKSSRGRSHSRSRSRERRHRSRSRERKKSRSRSRERKKSRSRSRERKKSRSRSRERKRRIRSRSRSRSRHRHRTRSRSRTRSRSRDRKKRIEKPRRFSRSLSRTPSPPPFRGRNTAMDAQEALARRLERAKKLQEQREKEMVEKQKQQEIAAAAAATGGSVLNVAALLASGTQVTPQIAMAAQMAALQAKALAETGIAVPSYYNPAAVNPMKFAEQEKKRKMLWQGKKEGDKSQSAEIWEKLNFGNKDQNVKFRKLMGIKSEDEAGCSSVDEESYKTLKQQEEVFRNLDAQYEMARSQTHTQRGMGLGFTSSMRGMDAV

SEQ ID NO: 1343 - protein, 132 aa, Homo sapiens [sequence omitted]

SEQ ID NO: 1344 - protein, 228 aa, Homo sapiens
MKTLFLGVTLGLAAALSFTLEEEDITGTWYVKAMVVDKDFPEDRRPRKVSPVKVTALGGGNLEATFTFMREDRCIQKKILMRKTEEPGKFSAYGGRKLIYLQELPGTDDYVFYCKDQRRGGLRYMGKLVASAPCRAVPLSPRRLTWPPHLQVGILIPTWRPWKNLRNWCSTRDSRRRTFSCPCRREAAFSNTRQPPGLHLQSPPYHQTQSPDHLDLPSSHDPSLLPPT

SEQ ID NO: 1345 - protein, 541 aa, Homo sapiens
MRQKRKGDLSPAELMMLTIGDVIKQLIEAHEQGKDIDLNKVKTKTAAKYGLSAQPRLVDIIAAVPPQYRKVLMPKLKAKPIRTASGIAVVAVMCKPHRCPHISFTGNICVYCPGGPDSDFEYSTQSYTGYEPTSMRAIRARYDPFLQTRHRIEQLKQLGHSVDKVEFIVMGGTFMALPEEYRDYFIRNLHDALSGHTSNNIYEAVKYSERSLTKCIGITIETRPDYCMKRHLSDMLTYGCTRLEIGVQSVYEDVARDTNRGHTVKAVCESFHLAKDSGFKVVAHMMPDLPNVGLERDIEQFTEFFENPAFRPDGLKLYPTLVIRGTGLYELWKSGRDKSYSPSDLVELVARILALVPPWTRVYRVQRDIPMPLVSSGVEHGNLRELALARMKDLGIQCRDVRTREVGIQEIHHKVRPYQVELVRRDYVANGGWETFLSYEDPDQDILIGLLRLRKCSEETFRFELGGGVSIVRELHVYGSVVPVSSRDPTKFQHQGFGMLLMEEAERIAREEHGSGKIAVISGVDVLGQRQRGGHHRSCSL

SEQ ID NO: 1346 - protein, 547 aa, Homo sapiens
MRQKRKGDLSPAELMMLTIGDVIKQLIEAHEQGKDIDLNKVKTKTAAKYGLSAQPRLVDIIAAVPPQYRKVLMPKLKAKPIRTASGIAVVAVMCKPHRCPHISFTGNICVYCPGGPDSDFEYSTQSYTGYEPTSMRAIRARYDPFLQTRHRIEQLKQLGHSVDKVEFIVMGGTFMALPEEYRDYFIRNLHDALSGHTSNNIYEAVKYSERSLTKCIGITIETRPDYCMKRHLSDMLTYGCTRLEIGVQSVYEDVARDTNRGHTVKAVCESFHLAKDSGFKVVAHMMPDLPNVGLERDIEQFTEFFENPAFRPDGLKLYPTLVIRGTGLYELWKSGRDKSYSPSDLVELVARILALVPPWTRVYRVQRDIPMPLVSSGVEHGNLRELALARMKDLGIQCRDVRTREVGIQEIHHKVRPYQVELVRRDYVANGGWETFLSYEDPDQDILIGLLRLRKCSEETFRFELGGGVSIVRELHVYGSVVPVSSRDPTKFQHQGFGMLLMEEAERIAREEHGSGKIAVISGVGTRNYYRKIGYRLQGPYMVKMLK

SEQ ID NO: 1347 - protein, 138 aa, Homo sapiens
MAELQQLRVQEAVESMVKSLERENIRKMQGLMFRCSASCCEDSQASMKQVHQCIERCHVPLAQAQALVTSELEKFQDRLARCTMHCNDKAKDSIDAGSKELQVKQQLDSCVTKCVDDHMHLIPTMTKKMKEALLSIGK

SEQ ID NO: 1348 - protein, 768 aa, Homo sapiens
MNREDRNVLRMKERERRNQEIQQGEDAFPPSSPLFAEPYKVTSKEDKLSSRIQSMLGNYDEMKDFIGDRSIPKLVAIPKPTVPPSADEKSNPNFFEQRHGGSHQSSKWTPVGPAPSTSQSQKRSSGLQSGHSSQRTSAGSSSGTNSSGQRHDRESYNNSGSSSRKKGQHGSEHSKSRSSSPGKPQAVSSLNSSHSRSHGNDHHSKEHQRSKSPRDPDANWDSPSRVPFSSGQHSTQSFPPSLMSKSNSMLQKPTAYVRPMDGQESMEPKLSSEHYSSQSHGNSMTELKPSSKAHLTKLKIPSQPLDASASGDVSCVDEILKEMTHSWPPPLTAIHTPCKTEPSKFPFPTKESQQSNFGTGEQKRYNPSKTSNGHQSKSMLKDDLKLSSSEDSDGEQDCDKTMPRSTPGSNSEPSHHNSEGADNSRDDSSSHSGSESSSGSDSESESSSSDSEANEPSQSASPEPEPPPTNKWQLDNWLNKVNPHKVSPASSVDSNIPSSQGYKKEGREQGTGNSYTDTSGPKETSSATPGRDSKTIQKGSESGRGRQKSPAQSDSTTQRRTVGKKQPKKAEKAAAEEPRGGLKIESETPVDLASSMPSSRHKAATKGSRKPNIKKESKSSPRPTAEKKKYKSTSKSSQKSREIIETDTSSSDSDESESLPPSSQTPKYPESNRTPVKPSSVEEEDSFFRQRMFSPMEEKELLSPLSEPDDRYPLIVKIDLNLLTRIPGKPYKETEPPKGEKKNVPEKHTREAQKQASEKVSNKGKREA

SEQ ID NO: 1349 - protein, 833 aa, Homo sapiens
MKLLGRQQPDTELEIQQKCGFSELYSWQRERKVKTEFCLHDGPPYANGDPHVGHALNKILKDIANRFHMMNGSKIHFVPGWDCHGLPIEIKVLSELGREAQNLSAMEIRKKARSFAKAAIEKQKSAFIRWGIMADWNNCYYTFDGKYEAKQLRTFYQMYDKGLVYRSYKPVFWSPSSRTALAEAELEYNPEHVSRSIYVKFPLLKPSPKLASLIDGSSPVSILVWTTQPWTIPANEAVCYMPESKYAVVKCSKSGDLYVLAADKVASVASTLETTFETISTLSGVDLENGTCSHPLIPDKASPLLPANHVTMAKGTGLVHTAPAHGMEDYGVASQHNLPMDCLVDEDGVFTDVAGPELQNKAVLEEGTDVVIKMLQTAKNLLKEEKLVHSYPYDWRTKKPVVIRASKQWFINITDIKTAAKELLKKVKFIPGSALNGMVEMMDRRPYWCISRQRVWGVPIPVFHHKTKDEYLINSQTTEHIVKLVEQHGSDIWWTLPPEQLLPKEVLSEVGGPDALEYVPGQDILDIWFDSGTSWSYVLPGPDQRADLYLEGKDQLGGWFQSSLLTSVAARKRAPYKTVIVHGFTLGEKGEKMSKSLGNVIHPDVVVNGGQDQSKEPPYGADVLRWWVADSNVFTEVAIGPSVLNAARDDISKLRNTLRFLLGNVADFNPETDSIPVNDMYVIDQYMLHLLQDLANKITELYKQYDFGKVVRLLRTFYTRELSNFYFSIIKDRLYCEKENDPKRRSCQTALVEILDVIVRSFAPILPHLAEEVFQHIPYIKEPKSVFRTGWISTSSIWKKPGLEEAVRVRVQCETHFLEASLAKMQLSTRLSL

SEQ ID NO: 1350 - protein, 590 aa, Homo sapiens [sequence omitted]

SEQ ID NO: 1351 - protein, 748 aa, Homo sapiens
MLGTLRAMEGEDVEDDQLLQKLRASRRRFQRRMQRLIEKYNQPFEDTPVVQMATLTYETPQGLRIWGGRLIKERNEGEIQDSSMKPADRTDGSVQAAAWGPELPSHRTVLGADSKSGEVDATSDQEESVAWALAPAVPQSPLKNELRRKYLTQVDILLQGAEYFECAGNRAGRDVRVTPLPSLASPAVPAPGYCSRISRKSPGDPAKPASSPREWDPLHPSSTDMALVPRNDSLSLQETSSSSFLSSQPFEDDDICNVTISDLYAGMLHSMSRLLSTKPSSIISTKTFIMQNWNCRRRHRYKSRMNKTYCKGARRSQRSSKENFIPCSEPVKGTGALRDCKNVLDVSCRKTGLKLEKAFLEVNRPQIHKLDPSWKERKVTPSKYSSLIYFDSSATYNLDEENRFRTLKWLISPVKIVSRPTIRQGHGENRQREIEIRFDQLHREYCLSPRNQPRRMCLPDSWAMNMYRGGPASPGGLQGLETRRLSLPSSKAKAKSLSEAFENLGKRSLEAGRCLPKSDSSSSLPKTNPTHSATRPQQTSDLHVQGNSSGIFRKSVSPSKTLSVPDKEVPGHGRNRYDEIKEEFDKLHQKYCLKSPGQMTVPLCIGVSTDKASMEVRYQTEGFLGKLNPDPHFQGFQKLPSSPLGCRKSLLGSTAIEAPSSTCVARAITRDGTRDHQFPAKRPRLSEPQGSGRQGNSLGASDGVDNTVRPGDQGSSSQPNSEERGENTSYRMEEKSDFMLEKLETKSV

SEQ ID NO: 1352 - protein, 213 aa, Homo sapiens
MDPALAAQMSEAVAEKMLQYRRDTAGWKICREGNGVSVSWRPSVEFPGNLYRGEGIVYGTLEEVWDCVKPAVGGLRVKWDENVTGFEIIQSITDTLCVSRTSTPSAAMKLISPRDFVDLVLVKRYEDGTISSNATHVEHPLCPPKPGFVRGFNHPCGCFCEPLPGEPTKTNLVTFFHTDLSGYLPQNVVDSFFPRSMTRFYANLQKAVKQFHE

SEQ ID NO: 1353 - protein, 357 aa, Homo sapiens
MNARAWKRWCTQILSALSFLHACTPPIIHGNLTSDTIFIQHNGLIKIGSVWHRIFSNALPDDLRSPIRAEREELRNLHFFPPEYGEVADGTAVDIFSFGMCALEMAVLEIQTNGDTRVTEEAIARARHSLSDPNMREFILCCLARDPARRPSAHSLLFHRVLFEVHSLKLLAAHCFIQHQYLMPENVVEEKTKAMDLHAVLAELPRPRRPPLQWRYSEVSFMELDKFLEDVRNGIYPLMNFAATRPLGLPRVLAPPPEEVQKAKTPTPEPFDSETRKVIQMQCNLERSEDKARWHLTLLLVLEDRLHRQLTYDLLPTDSAQDLASELVHYGFLHEHDRMKLAAFLESTFLKYRGTQA

SEQ ID NO: 1354 - protein, 534 aa, Homo sapiens
MFQFHAGSWESWCCCCLIPADRPWDRGQHWQLEMADTRSVHETRFEAAVKVIQSLPKNGSFQPTNEMMLKFYSFYKQATEGPCKLSRPGFWDPIGRYKWDAWSSLGDMTKEEAMIAYVEEMKKIIETMPMTEKVEELLRVIGPFYEIVEDKKSGRSSDIPSVRLEKISKCLEDLGNVLTSTPNAKTVNGKAESSDSGAESEEEEAQEEVKGADQSDNDKKMMKKSADHKNLEVIVTNGYDKDGFVQDIQNDIHASSSLNGRSTEEVKPIDENLGQTGKSAVCIHQDINDDHVEDVTGIQHLTSDSDSEVYCDSMEQFGQEESLDSFTSNNGPFQYYLGGHSSQPMENSGFREDIQVPPGNGNIGNMQVVAVEGKGEVKHGGEDGRNNSGAPHREKRGGETDEFSNVRRGRGHRMQHLSEGTKGRQVGSGGDGERWGSDRGSRGSLNEQIALVLMRLQEDMQNVLQRLQKLETLTALQAKSSTSTLQTAPQPTSQRPSWWPFEMSPGVLTFAIIWPFIAQWLVYLYYQRRRRKLN

SEQ ID NO: 1355 - protein, 496 aa, Homo sapiens [sequence omitted]

SEQ ID NO: 1356 - protein, 565 aa, Homo sapiens
MSAGEVERLVSELSGGTGGDEEEEWLYGDENEVERPEEENASANPPSGIEDETAENGVPKPKVTETEDDSDSDSDDDEDDVHVTIGDIKTGAPQYGSYGTAPVNLNIKTGGRVYGTTGTKVKGVDLDAPGSINGVPLLEVDLDSFEDKPWRKPGADLSDYFNYGFNEDTWKAYCEKQKRIRMGLEVIPVTSTTNKITVQQGRTGNSEKETALPSTKAEFTSPPSLFKTGLPPSRNSTSSQSQTSTASRKANSSVGKWQDRYGRAESPDLRRLPGAIDVIGQTITISRVEGRRRANENSNIQVLSERSATEVDNNFSKPPPFFPPGAPPTHLPPPPFLPPPPTVSTAPPLIPPPGIPITVPPPGFPPPPGAPPPSLIPTIESGHSSGYDSRSARAFPYGNVAFPHLPGSAPSWPSLVDTSKQWDYYARREKDRDRERDRDRERDRDRDRERERTRERERERDHSPTPSVFNSDEERYRYREYAERGYERHRASREKEERHRERRHREKEETRHKSSRSNSRRRHESEEGDSHRRHKHKKSKRSKEGKEAGSEPAPEQESTEATPAE

SEQ ID NO: 1357 - protein, 2136 aa, Homo sapiens
MEQTDCKPYQPLPKVKHEMDLAYTSSSDESEDGRKPRQSYNSRETLHEYNQELRMNYNSQSRKRKEVEKSTQEMEFCETSHTLCSGYQTDMHSVSRHGYQLEMGSDVDTETEGAASPDHALRMWIRGMKSEHSSCLSSRANSALSLTDTDHERKSDGENGFKFSPVCCDMEAQAGSTQDVQSSPHNQFTFRPLPPPPPPPHACTCARKPPPAADSLQRRSMTTRSQPSPAAPAPPTSTQDSVHLHNSWVLNSNIPLETRHFLFKHGSGSSAIFSAASQNYPLTSNTVYSPPPRPLPRSTFSRPAFTFNKPYRCCNWKCTALSATAITVTLALLLAYVIAVHLFGLTWQLQPVEGELYANGVSKGNRGTESMDTTYSPIGGKVSDKSEKKVFQKGRAIDTGEVDIGAQVMQTIPPGLFWRFQITIHHPIYLKFNISLAKDSLLGIYGRRNIPPTHTQFDFVKLMDGKQLVKQDSKGSDDTQHSPRNLILTSLQETGFIEYMDQGPWYLAFYNDGKKMEQVFVLTTAIEIMDDCSTNCNGNGECISGHCHCFPGFLGPDCARDSCPVLCGGNGEYEKGHCVCRHGWKGPECDVPEEQCIDPTCFGHGTCIMGVCICVPGYKGEICEEEDCLDPMCSNHGICVKGECHCSTGWGGVNCETPLPVCQEQCSGHGTFLLDAGVCSCDPKWTGSDCSTELCTMECGSHGVCSRGICQCEEGWVGPTCEERSCHSHCTEHGQCKDGKCECSPGWEGDHCTIAHYLDAVRDGCPGLCFGNGRCTLDQNGWHCVCQVGWSGTGCNVVMEMLCGDNLDNDGDGLTDCVDPDCCQQSNCYISPLCQGSPDPLDLIQQSQTLFSQHTSRLFYDRIKFLIGKDSTHVIPPEVSFDSRRACVIRGQVVAIDGTPLVGVNVSFLHHSDYGFTISRQDGSFDLVAIGGISVILIFDRSPFLPEKRTLWLPWNQFIVVEKVTMQRVVSDPPSCDISNFISPNPIVLPSPLTSFGGSCPERGTIVPELQVVQEEIPIPSSFVRLSYLSSRTPGYKTLLRILLTHSTIPVGMIKVHLTVAVEGRLTQKWFPAAINLVYTFAWNKTDIYGQKVWGLAEALVSVGYEYETCPDFILWEQRTVVLQGFEMDASNLGDWSLNKHHILNPQSGIIHKGNGENMFISQQPPVISTIMGNGHQRSVACTNCNGPAHNNKLFAPVALASGPDGSVYVGDFNFVRRIFPSGNSVSILELSTSPAHKYYLAMDPVSESLYLSDTNTRKVYKLKSLVETKDLSKNFEVVAGTGDQCLPFDQSHCGDGGRASEASLNSPRGITVDRHGFIYFVDGTMIRKIDENAVITTVIGSNGLTSTQPLSCDSGMDITQVRLEWPTDLAVNPMDNSLYVLDNNIVLQISENRRVRIIAGRPIHCQVPGIDHFLVSKVAIHSTLESARAISVSHSGLLFIAETDERKVNRIQQVTTNGEIYIIAGAPTDCDCKIDPNCDCFSGDGGYAKDAKMKAPSSLAVSPDGTLYVADLGNVRIRTISRNQAHLNDMNIYEIASPADQELYQFTVNGTHLHTLNLITRDYVYNFTYNSEGDLGAITSSNGNSVHIRRDAGGMPLWLVVPGGQVYWLTISSNGVLKRVSAQGYNPALMTYPGNTGLLATKSNENGWTTVYEYDPEGHLTNATFPTGEVSSFHSDLEKLTKVELDTSNRENVLMSTNLTATSTIYILKQENTQSTYRVNPDGSLRVTFASGMEIGLSSEPHILAGAVNPTLGKCNISLPGEHNANLIEWRQRKEQNKGNVSAFERRLRAHNRNLLSIDFDHITRTGKIYDDHRKFTLRILYDQTGRPILWSPVSRYNEVNITYSPSGLVTFIQRGTWNEKMEYDQSGKIISRTWADGKIWSYTYLEKSVMLLLHSQRRYIFEYDQSDCLLSVTMPSMVRHSLQTMLSVGYYRNIYTPPDSSTSFIQDYSRDGRLLQTLHLGTGRRVLYKYTKQARLSEVLYDTTQVTLTYEESSGVIKTIHLMHDGFICTIRYRQTGPLIGRQIFRFSEEGLVNARFDYSYNNFRVTSMQAVINETPLPIDLYRYVDVSGRTEQFGKFSVINYDLNQVITTTVMKHTKIFSANGQVIEVQYEILKAIAYWMTIQYDNVGRHGNM

SEQ ID NO: 1358 - protein, 68 aa, Homo sapiens
MQSRDTVNVKFTPRSFWGSRPKHTGGRSEMRAHVPQAPWARQAPPVLPLWTVVNDHPHEKPVSRPQNT

SEQ ID NO: 1359 - protein, 501 aa, Homo sapiens
MNKSLGPVSFKDVAVDFTQEEWQQLDPEQKITYRDVMLENYSNLVSVGYHIIKPDVISKLEQGEEPWIVEGEFLLQSYPDEVWQTDDLIERIQEEENKPSRQTVFIETLIEERGNVPGKTFDVETNPVPSRKIAYKNSLCDSCEKCLTSVSEYISSDGSYARMKADECSGCGKSLLHIKLEKTHPGDQAYEFNQNGEPYTLNEESLYQKIRILEKPFEYIECQKAFQKDTVFVNHMEEKPYKWNGSEIAFLQMSDLTVHQTSHMEMKPYECSECGKSFCKKSKFIIHQRTHTGEKPYECNQCGKSFCQKGTLTVHQRTHTGEKPYECNECGKNFYQKLHLIQHQRTHSGEKPYECSYCGKSFCQKTHLTQHQRTHSGERPYVCHDCGKTFSQKSALNDHQKIHTGVKLYKCSECGKCFCRKSTLTTHLRTHTGEKPYECNECGKAFSRMSYLTVHYRTHSGEKPYECTECGKKFYHKSAFNSHQRIHRRGNMNVIDVGRLL

SEQ ID NO: 1360 - protein, 288 aa, Homo sapiens
MKLPIFIADAFTARAFRGNPAAVCLLENELDEDMHQKIAREMNLSETAFIRKLHPTDNFAQSSCFGLRWFTPASEVPLCGHATLASAAVLFHKIKNMNSTLTFVTLSGELRARRAEDGIVLDLPLYPAHPQDFHEVEDLIKTAIGNTLVQDICYSPDTQKLLVRLSDVYNRSFLENLKVNTENLLQVENTGKVKGLILTLKGEPGGQTQAFDFYSRYFAPWVGVAEDPVTGSAHAVLSSYWSQHLGKKEMHAFQCSHRGGELGISLRPDGRVDIRGGAAVVLEGTLTA

SEQ ID NO: 1361 - protein, 94 aa, Homo sapiens
MNMFKEAVTFKDVAVTFTEEELGLLGPAQRKLYRDVMVENFRNLLSVGHPPFKQDVSPIERNEQLWIMTTATRRQGNLDTLLVKALLLYDLAQT

SEQ ID NO: 1362 - protein, 184 aa, Homo sapiens
MQFTSISNSLTSTAAIGLSFTTSTTTTATFTTNTTTTITSGFTVNQNQLLSRGFENLVPYTSTVSVVATPVMTYGHLEGLINEWNLELEDQEKYFLLQATQVNAWDHTLIENGEMIRILHGEVNKVKLDQKRLEQELDFILSQQQELEFLLTYLEESTRDQSGLHYLQDADEEHVEISTRSAEF

SEQ ID NO: 1363 - protein, 350 aa, Homo sapiens
MEYYLVKWKGWPDSTNTWEPLQNLKCPLLLQQFSNDKHNYLSQVKKGKAITPKDNNKTLKPAIAEYIVKKAKQRIALQRWQDELNRRKNHKGMIFVENTVDLEGPPSDFYYINEYKPAPGISLVNEATFGCSCTDCFFQKCCPAEAGVLLAYNKNQQIKIPPGTPIYECNSRCQCGPDCPNRIVQKGTQYSLCIFRTSNGRGWGVKTLVKIKRMSFVMEYVGEVITSEEAERRGQFYDNKGITYLFDLDYESDEFTVDAARYGNVSHFVNHSCDPNLQVFNVFIDNLDTRLPRIALFSTRTINAGEELTFDYQMKGSGDISSDSIDHSPAKKRVRTVCKCGAVTCRGYLN

SEQ ID NO: 1364 - protein, 1516 aa, Homo sapiens [sequence omitted]

SEQ ID NO: 1365 - protein, 366 aa, Homo sapiens
MQPPLDLKQILPFPLEPAPTLGLFSNYSTMDPVQKAVLSHTFGGPLLKTKRPVISCNICQIRFNSQSQAEAHYKGNRHARRVKGIEAAKTRGREPGVREPGDPAPPGSTPTNGDGVAPRPVSMENGLGPAPGSPEKQPGSPSPPSIPETGQGVTKGEGGTPAPASLPGGSKEEEEKAKRLLYCALCKVAVNSLSQLEAHNKGTKHKTILEARSGLGPIKAYPRLGPPTPGEPEAPAQDRTFHCEICNVKVNSEVQLKQHISSRRHRDGVAGKPNPLLSRHKKSRGAGELAGTLTFSKELPKSLAGGLLPSPLAVAAVMAAAAGSPLSLRPAPAAPLLQGPPITHPLLHPAPGPIRTAHGPILFSPY

SEQ ID NO: 1366 - protein, 146 aa, Homo sapiens
MTSERGGGRRVASCSDPATEAGSVQRSLWFRFPGPQNGTQHRFCSRSRSGRMEGAKGKECTAGHSWPAPALWCLLPVTSEGRWTEPPSGLVLFPATERAGWHPTPGEQYLVPHPLLPTTSKAKLGPIASTAWFSPSPLPRSGELDK

SEQ ID NO: 1367 - protein, 1516 aa, Homo sapiens [sequence omitted]

SEQ ID NO: 1368 - protein, 456 aa, Homo sapiens
MEGPEGLGRKQACLAMLLHFLDTYQGLLQEEEGAGHIIKDLYLLIMKDESLYQGLREDTLRLHQLVETVELKIPEENQPPSKQVKPLFRHFRRIDSCLQTRVAFRGSDEIFCRVYMPDHSYVTIRSRLSASVQDILGSVTEKLQYSEEPAGREDSLILVAVSSSGEKVLLQPTEDCVFTALGINSHLFACTRDSYEALVPLPEEIQVSPGDTEIHRVEPEDVANHLTAFHWELFRCVHELEFVDYVFHGERGRRETANLELLLQRCSEVTHWVATEVLLCEAPGKRAQLLKKFIKIAALCKQNQDLLSFYAVVMGLDNAAVSRLRLTWEKLPGKFKNLFRKFENLTDPCRNHKSYREVISKMKPPVIPFVPLILKDLTFLHEGSKTLVDGLVNIEKLHSVAEKVRTIRKYRSRPLCLDMEASPNHLQTKAYVRQFQVIDNQNLLFELSYKLEANSQ

SEQ ID NO: 1369 - protein, 559 aa, Homo sapiens
MDSPGYNCFVDKDKMDAAIQDLGPKELSCTELQELKQLARQGYWAQSHALRGKVYQRLIRDIPCRTVTPDASVYSDIVGKIVGKHSSSCLPLPEFVDNTQVPSYCLNARGEGAVRKILLCLANQFPDISFCPALPAVVALLLHYSIDEAECFEKACRILACNDPGRRLIDQSFLAFESSCMTFGDLVNKYCQAAHKLMVAVSEDVLQVYADWQRWLFGELPLCYFARVFDVFLVEGYKVLYRVALAILKFFHKVRAGQPLESDSVKQDIRTFVRDIAKTVSPEKLLEKAFAIRLLSRKEIQLLQMANEKALKQKGITVKQKSVSLSKRQFVHLAVHAENFRSEIVSVREMRDIWSWVPERFALCQPLLLFSSLQHGYSLARFYFQCEGHEPTLLLIKTTQKEVCGAYLSTDWSERNKFGGKLGFFGTGECFVFRLQPEVQRYEWVVIKHPELTKPPPLMAAEPTAPLSHSASSDPADRLSPFLAARHFNLPSKTESMFMAGGSDCLIVGGGGGQALYIDGDLNRGRTSHCDTFNNQPLCSENFLIAAVKAWGFQDPDTQ

SEQ ID NO: 1370 - protein, 477 aa, Homo sapiens
MPGSDTALTVDRTYSDPGRHHRCKSRVERHDMNTLSLPLNIRRGGSDTNLNFDVPDGILDFHKVKLTADSLKQKILKVTEQIKIEQTSRDGNVAEYLKLVNNADKQQAGRIKQVFEKKNQKSAHSIAQLQKKLEQYHRKLREIEQNGASRSSKDISKDHLKDIHRSLKDAHVKSRTAPHCMESSKSGMPGVSLTPPVFVFNKSREFANLIRNKFGSADNIAHLKNSLEEFRPEASARAYGGSATIVNKPKYGSDDECSSGTSGSADSNGNQSFGAGGASTLDSQGKLAVILEELREIKDTQAQLAEDIEALKVQFKREYGFISQTLQEERYRYERLEDQLHDLTDLHQHETANLKQELASIEEKVAYQAYERSRDIQEALESCQTRISKLELHQQEQQALQTDTVNAKVLLGRCINVILAFMTVILVCVSTIAKFVSPMMKSRCHILGTFFAVTLLAIFCKNWDHILCAIERMIIPR

SEQ ID NO: 1371 - protein, 219 aa, Homo sapiens
MTAAAASNWGLITNIVNSIVGVSVLTMPFCFKQCGIVLGALLLVFCSWMTHQSCMFLVKSASLSKRRTYAGLAFHAYGKAGKMLVETSMIGLMLGTCIAFYVVIGDLGSNFFARLFGFQVGGTFRMFLLFAVSLCIVLPLSLQRNMMASIQSFSAMALLFYTVFMFVIVLSPLKHGLFSGQWLRRVSYVRWEGVFRCIPIFGHVLRLPVPSAAHLRQPG

SEQ ID NO: 1372 - protein, 2063 aa, Homo sapiens
MVLDDLPNLEDIYTSLCSSTMEDSEMDFDSGLEDDDTKSDSILEDSTIFVAFKGNIDDKDFKWKLDAILKNVPNLLHMESSKLKVQKVEPWNSVRVTFNIPREAAERLRILAQSNNQQLRDLGILSVQIEGEGAINLALAQNRSQDVRMNGPMGAGNSVRMEAGFPMASGPGIIRMNNPATVMIPPGGNVSSSMMAPGPNPELQPRTPRPASQSDAMDPLLSGLHIQQQSHPSGSLAPPHHPMQPVSVNRQMNPANFPQLQQQQQQQQQQQQQQQQQQQQQQQQQLQARPPQQHQQQQPQGIRPQFTAPTQVPVPPGWNQLPSGALQPPPAQGSLGTMTANQGWKKAPLPGPMQQQLQARPSLATVQTPSHPPPPYPFGSQQASQAHTNFPQMSNPGQFTAPQMKSLQGGPSRVPTPLQQPHLTNKSPASSPSSFQQGSPASSPTVNQTQQQMGPRPPQNNPLPQGFQQPVSSPGRNPMVQQGNVPPNFMVMQQQPPNQGPQSLHPGLGGMPKRLPPGFSAGQANPNFMQGQVPSTTATTPGNSGAPQLQANQNVQHAGGQGAGPPQNQMQVSHGPPNMMQPSLMGIHGNMNNQQAGTSGVPQVNLSNMQGQPQQGPPSQLMGMHQQIVPSQGQMVQQQGTLNPQNPMILSRAQLMPQGQMMVNPPSQNLGPSPQRMTPPKQMLSQQGPQMMAPHNQMMGPQGQVLLQQNPMIEQIMTNQMQGNKQQFNTQNQSNVMPGPAQIMRGPTPNMQGNMVQFTGQMSGQMLPQQGPVNNSPSQVMGIQGQVLRPPGPSPHMAQQHGDPATTANNDVSLSQMMPDVSIQQTNMVPPHVQAMQGNSASGNHFSGHGMSFNAPFSGAPNGNQMSCGQNPGFPVNKDVTLTSPLLVNLLQSDISAGHFGVNNKQNNTNANKPKKKKPPRKKKNSQQDLNTPDTRPAGLEEADQPPLPGEQGISLDNSGPKLPEFSNRPPGYPSQPVEQRPLQQMPPQLMQHVAPPPQPPQQQPQPQLPQQQQPPPPSQPQSQQQQQQQQQMMMMLMMQQDPKSVRLPVSQNVHPPRGPLNPDSQRMPMQQSGSVPVMVSLQGPASVPPSPDKQRMPMPVNTPLGSNSRKMVYQESPQNPSSSPLAEMASLPEASGSEAPSVPGGPNNMPSHVVLPQNQLMMTGPKPGPSPLSATQGATPQQPPVNSLPSSHGHHFPNVAAPTQTSRPKTPNRASPRPYYPQTPNNRPPSTEPSEISLSPERLNASIAGLFPPQINIPLPPRPNLNRGFDQQGLNPTILKAIGQAPSNLTMNPSNFATPQTHKLDSVVVNSGKQSNSGATKRASPSNSRRSSPGSSRKTTPSPGRQNSKAPKLTLASQTNAALLQNVELPRNVLVSPTPLANPPVPGSFPNNSGLNPQNSTVSVAAVGGVVEDNKESLNVPQDSDCQNSQSRKEQVNIELKAVPAQEVKMVVPEDQSKKDGQPSDPNKLPSVEENKNLVSPAMREAPTSLSQLLDNSGAPNVTIKPPGLTDLEVTPPVVSGEDLKKASVIPTLQDLSSSKEPSNSLNLPHSNELCSSLVHPELSEVSSNVAPSIPPVMSRPVSSSSISTPLPPNQITVFVTSNPITTSANTSAALPTHLQSALMSTVVTMPNAGSKVMVSEGQSAAQSNARPQFITPVFINSSSIIQVMKGSQPSTIPAAPLTTNSGLMPPSVAVVGPLHIPQNIKFSSAPVPPNALSSSPAPNIQTGRPLVLSSRATPVQLPSPPCTSSPVVPSHPPVQQVKELNPDEASPQVNTSADQNTLPSSQSTTMVSPLLTNSPGSSGNRRSPVSSSKGKGKVDKIGQILLTKACKKVTGSLEKGEEQYGADGETEGQGLDTTAPGLMGTEQLSTELDSKTPTPPAPTLLKMTSSPVGPGTASAGPSLPGGALPTSVRSIVTTLVPSELISAVPTTKSNHGGIASESLAGGLVEEKVGSHPELLPSIAPSQNLVSKETSTTALQASVARPELEVNAAIVSGQSSEPKEIVEKSKIPGRRNSRTEEPTVASESVENGHRKRSSRPASASSSTKDITSAVQSKRRKSK

SEQ ID NO: 1373 - protein, 658 aa, Homo sapiens
MRLKIGFILRSLLVVGSFLGLVVLWSSLTPRPDDPSPLSRMREDRDVNDPMPNRGGNGLAPGEDRFKPVVPWPHVEGVEVDLESIRRINKAKNEQEHHAGGDSQKDIMQRQYLTFKPQTFTYHDPVLRPGILGNFEPKEPEPPGVVGGPGRESQAIGFGAQNLNKQFKPAFKEFGFNMVASDMFSLDRNVNDLRQEECKYWHYDENLLTSSVVIVFHNEGWSTLMRTVHSVIKRTPRKYLAEIVLIDDFSNKEHLKEKLDEYIKLWNGLVKVFRNERREGLIQARSIGAQKAKLGQVLIYLDAHCEVAVNWYAPLVAPISKDRTICTVPLIDVINGNTYEIIPQGGGDEDGYARGAWDWSMLWKRVPLTPQEKRLRKTKTEPYRSPAMAGGLCAIEREFFFELGLYDPGLQIWGGENFEISYKIWQCGGKLLFVPCSRVGHIYRLEGWQGNPPPIYVGSSPTLKNYVRVVEVWWDEYKDYFYASRPESQALPYGDISELKKFREDHNCKSFKWFMEEIAYDITSHYPLPPKNVDWGEIRGFETAYCIDSMGKTNGGFVELGPCHRMGGNQLFRINEANQLMQYDQCLTKGADGSKVMITHCNLNEFKEWQYFKNLHRFTHIPSGKCLDRSEVLHQVFISNCDSSKTTQKWEMNNIHSV

SEQ ID NO: 1374 - protein, 618 aa, Homo sapiens
MGLVAISTVSFSISAFSETDTQSTGEASVVSGPRVAQGYHQRTLLDLNDKILDYTPQPPLSKEGESENSTDHAQGDYPKDIFSLEERRKGAIILHVIGMIYMFIALAIVCDEFFVPSLTVITEKLGISDDVAGATFMAAGGSAPELFTSLIGVFIAHSNVGIGTIVGSAVFNILFVIGMCALFSREILNLTWWPLFRDVSFYIVDLIMLIIFFLDNVIMWWESLLLLTAYFCYVVFMKFNVQVEKWVKQMINRNKVVKVTAPEAQAKPSAARDKDEPTLPAKPRLQRGGSSASLHNSLMRNSIFQLMIHTLDPLAEELGSYGKLKYYDTMTEEGRFREKASILHKIAKKKCHVDENERQNGAANHVEKIELPNSTSTDVEMTPSSDASEPVQNGNLSHNIEGAEAQTADEEEDQPLSLAWPSETRKQVTFLIVFPIVFPLWITLPDVRKPSSRKFFPITFFGSITWIAVFSYLMVWWAHQVGETIGISEEIMGLTILAAGTSIPDLITSVIVARKGLGDMAVSSSVGSNIFDITVGLPLPWLLYTVIHRFQPVAVSSNGLFCAIVLLFIMLLFVILSIALCKWRMNKILGFIMFGLYFVFLVVSVLLEDRILTCPVSI

SEQ ID NO: 1375 - protein, 1744 aa, Homo sapiens
MVIDPLHVTLTPKKLKTGIGSTVILSCALTGSPEFTIRWYRNTELVLPDEAISIRGLSNETLLITSAQKSHSGAYQCFATRKAQTAQDFAIIALEDGTPRIVSSFSEKVVNPGEQFSLMCAAKGAPPPTVTWALDDEPIVRDGSHRTNQYTMSDGTTISHMNVTGPQIRDGGVYRCTARNLVGSAEYQARINVRGPPSIRAMRNITAVAGRDTLINCRVIGYPYYSIKWYKDALLLPDNHRQVVFENGTLKLTDVQKGMDEGEYLCSVLIQPQLSISQSVHVAVKVPPLIQPFEFPPASIGQLLYIPCVVSSGDMPIRITWRKDGQVIISGSGVTIESKEFMSSLQISSVSLKHNGNYTCIASNAAATVSRERQLIVRVPPRFVVQPNNQDGIYGKAGVLNCSVDGYPPPKVMWKHAKGSGNPQQYHPVPLTGRIQILPNSSLLIRHVLEEDIGYYLCQASNGVGTDISKSMFLTVKIPAMITSHPNTTIAIKGHAKELNCTARGERPIIIRWEKGDTVIDPDRVMRYAIATKDNGDEVVSTLKLKPADRGDSVFFSCHAINSYGEDRGLIQLTVQEPPDPPELEIREVKARSMNLRWTQRFDGNSIITGFDIEYKNKSDSWDFKQSTRNISPTINQANIVDLHPASVYSIRMYSFNKIGRSEPSKELTISTEEAAPDGPPMDVTLQPVTSQSIQVTWKAPKKELQNGVIRGYQIGYRENSPGSNGQYSIVEMKATGDSEVYTLDNLKKFAQYGVVVQAFNRAGTGPSSSEINATTLEDVPSQPPENVRALSITSDVAVISWSEPPRSTLNGVLKGYRVIFWSLYVDGEWGEMQNITTTRERVELRGMEKFTNYSVQVLAYTQAGDGVRSSVLYIQTKEDVPGPPAGIKAVPSSASSVVVSWLPPTKPNGVIRKYTIFCSSPGSGQPAPSEYETSPEQLFYRIAHLNRGQQYLLWVAAVTSAGRGNSSEKVTIEPAGKAPAKIISFGGTVTTPWMKDVRLPCNSVGDPAPAVKWTKDSEDSAIPVSMDGHRLIHTNGTLLLRAVKAEDSGYYTCTATNTGGFDTIIVNLLVQVPPDQPRLTVSKTSASSITLTWIPGDNGGSSIRGFVLQYSVDNSEEWKDVFISSSERSFKLDSLKCGTWYKVKLAAKNSVGSGRISEIIEAKTHGREPSFSKDQHLFTHINSTHARLNLQGWNNGGCPITAIVLEYRPKGTWAWQGLRANSSGEVFLTELREATWYELRMRACNSAGCGNETAQFATLDYDGSTIPPIKSAQGEGDDVKKLFTIGCPVILATLGVALLFIVRKKRKEKRLKRLRDAKSLAEMLISKNNRSFDTPVKGPPQGPRLHIDIPRVQLLIEDKEGIKQLGDDKATIPVTDAEFSQAVNPQSFCTGVSLHHPTLIQSTGPLIDMSDIRPGTNPVSRKNVKSAHSTRNRYSSQWTLTKCQASTPARTLTSDWRTVGSQHGVTVTESDSYSASLSQDTDKGRNSMVSTESASSTYEELARAYEHAKLEEQLQHAKFEITECFISDSSSDQMTTGTNENADSMTSMSTPSEPGICRFTASPPKPQDADRGKNVAVPIPHRANKSDYCNLPLYAKSEAFFRKADGREPCPVVPPREASIRNLARTYHTQARHLTLDPASKSLGLPHPGAPAAASTATLPQRTLAMPAPPAGTAPPAPGPTPAEPPTAPSAAPPAPSTEPPRAGGPHTKMGGSRDSLLEMSTSGVGRSQKQGAGAYSKSYTLV

SEQ ID NO: 1376 - protein, 937 aa, Homo sapiens
MRRRSGTLVIDFRSGGRPEEYEGEYQCFARNKFGTALSNRIRLQVSKSPLWPKENLDPVVVQEGAPLTLQCNPPPGLPSPVIFWMSSSMEPITQDKRVSQGHNGDLYFSNVMLQDMQTDYSCNARFHFTHTIQQKNPFTLKVLTTRGVAERTPSFMYPQGTASSQMVLRGMDLLLECIASGVPTPDIAWYKKGGDLPSDKAKFENFNKALRITNVSEEDSGEYFCLASNKMGSIRHTISVRVKAAPYWLDEPKNLILAPGEDGRLVCRANGNPKPTVQWMVNGEPLQSAPPNPNREVAGDTIIFRDTQISSRAVYQCNTSNEHGYLLANAFVSVLDVPPRMLSPRNQLIRVILYNRTRLDCPFFGSPIPTLRWFKNGQGSNLDGGNYHVYENGSLEIKMIRKEDQGIYTCVATNILGKAENQVRLEVKDPTRIYRMPEDQVARRGTTVQLECRVKHDPSLKLTVSWLKDDEPLYIGNRMKKEDDFVTIFGVAERDQGSYTCVASTELDQDLAKAYLTVLGRPDRPRDLELTDLAERSVRLTWIPGDANNSPITDYVVQFEEDQFQPGVWHDHSKYPGSVNSAVLRLSPYVNYQFRVIAINEVGSSHPSLPSERYRTSGAPPESNPGDVKGEGTRKNNMEITWTPMNATSAFGPNLRYIVKWRRRETREAWNNVTVWGSRYVVGQTPVYVPYEIRVQAENDFGKGPEPESVIGYSGEDYPRAAPTEVKVRVMNSTAISLQWNRVYSDTVQGQLREYRAYYWRESSLLKNLWVSQKRQQASFPGDRLRGVVSRLFPYSNYKLEMVVVNGRGDGPRSETKEFTTPEGVPSAPRRFRVRQPNLETINLEWDHPEHPNGIMIGYTLKYVAFNGTKVGKQIVENFSPNQTKFTVQRTDPVSRYRFTLSARTQVGSGEAVTEESPAPPNEGRCMAAAPGVKGPS

SEQ ID NO: 1377 - protein, 952 aa, Homo sapiens
MRRRSGTLVIDFRSGGRPEEYEGEYQCFARNKFGTALSNRIRLQVSKSPLWPKENLDPVVVQEGAPLTLQCNPPPGLPSPVIFWMSSSMEPITQDKRVSQGHNGDLYFSNVMLQDMQTDYSCNARFHFTHTIQQKNPFTLKVLTTRGVAERTPSFMYPQGTASSQMVLRGMDLLLECIASGVPTPDIAWYKKGGDLPSDKAKFENFNKALRITNVSEEDSGEYFCLASNKMGSIRHTISVRVKAAPYWLDEPKNLILAPGEDGRLVCRANGNPKPTVQWMVNGEPLQSAPPNPNREVAGDTIIFRDTQISSRAVYQCNTSNEHGYLLANAFVSVLDVPPRMLSPRNQLIRVILYNRTRLDCPFFGSPIPTLRWFKNGQGSNLDGGNYHVYENGSLEIKMIRKEDQGIYTCVATNILGKAENQVRLEVKDPTRIYRMPEDQVARRGTTVQLECRVKHDPSLKLTVSWLKDDEPLYIGNRMKKEDDFVTIFGVAERDQGSYTCVASTELDQDLAKAYLTVLADQATPTNRLAALPKGRPDRPRDLELTDLAERSVRLTWIPGDANNSPITDYVVQFEEDQFQPGVWHDHSKYPGSVNSAVLRLSPYVNYQFRVIAINEVGSSHPSLPSERYRTSGAPPESNPGDVKGEGTRKNNMEITWTPMNATSAFGPNLRYIVKWRRRETREAWNNVTVWGSRYVVGQTPVYVPYEIRVQAENDFGKGPEPESVIGYSGEDYPRAAPTEVKVRVMNSTAISLQWNRVYSDTVQGQLREYRAYYWRESSLLKNLWVSQKRQQASFPGDRLRGVVSRLFPYSNYKLEMVVVNGRGDGPRSETKEFTTPEGVPSAPRRFRVRQPNLETINLEWDHPEHPNGIMIGYTLKYVAFNGTKVGKQIVENFSPNQTKFTVQRTDPVSRYRFTLSARTQVGSGEAVTEESPAPPNEGRCMAAAPGVKGPS

SEQ ID NO: 1378 - protein, 790 aa, Homo sapiens
MLTPPLLLLLPLLSALVAAAIDAPKTCSPKQFACRDQITCISKGWRCDGERDCPDGSDEAPEICPQSKAQRCQPNEHNCLGTELCVPMSRLCNGVQDCMDGSDEGPHCRELQGNCSRLGCQHHCVPTLDGPTCYCNSSFQLQADGKTCKDFDECSVYGTCSQLCTNTDGSFICGCVEGYLLQPDNRSCKAKNEPVDRPPVLLIANSQNILATYLSGAQVSTITPTSTRQTTAMDFSYANETVCWVHVGDSAAQTQLKCARMPGLKGFVDEHTINISLSLHHVEQMAIDWLTGNFYFVDDIDDRIFVCNRNGDTCVTLLDLELYNPKGIALDPAMGKVFFTDYGQIPKVERCDMDGQNRTKLVDSKIVFPHGITLDLVSRLVYWADAYLDYIEVVDYEGKGRQTIIQGILIEHLYGLTVFENYLYATNSDNANAQQKTSVIRVNRFNSTEYQVVTRVDKGGALHIYHQRRQPRVRSHACENDQYGKPGGCSDICLLANSHKARTCRCRSGFSLGSDGKSCKKPEHELFLVYGKGRPGIIRGMDMGAKVPDEHMIPIENLMNPRALDFHAETGFIYFADTTSYLIGRQKIDGTERETILKDGIHNVEGVAVDWMGDNLYWTDDGPKKTISVARLEKAAQTRKTLIEGKMTHPRAIVVDPLNGWMYWTDWEEDPKDSRRGRLERAWMDGSHRDIFVTSKTVLWPNGLSLDIPAGRLYWVDAFYDRIETILLNGTDRKIVYEGPELNHAFGLCHHGNYLFWTEYRSGSVYRLERGVGGAPPTVTLLRSEPAPHL

SEQ ID NO: 1379 - protein, 161 aa, Homo sapiens [sequence omitted]

SEQ ID NO: 1380 - protein, 437 aa, Homo sapiens
MPEEKDCGGGDALSNGIKKHRTSLPSPMFSRNDFSIWSILRKCIGMELSKITMPVIFNEPLSFLQRLTEYMEHTYLIHKASSLSDPVERMQCVAAFAVSAVASQWERTGKPFNPLLGETYELVRDDLGFRLISEQVSHHPPISAFHAEGLNNDFIFHGSIYPKLKFWGKSVEAEPKGTITLELLEHNEAYTWTNPTCCVHNIIVGKLWIEQYGNVEIINHKTGDKCVLNFKPCGLFGKELHKVEGYIQDKSKKKLCALYGKWTECLYSVDPATFDAYKKNDKKNTEEKKNSKQMSTSEELDEMPVPDSESVFIIPGSVLLWRIAPRPPNSAQMYNFTSFAMVLNEVDKDMESVIPKTDCRLRPDIRAMENGEIDQASEEKKRLEEKQRAARKNRSKSEEDWKTRWFHQGPNPYNGAQDWIYSGSYWDRNYFNLPDIY

SEQ ID NO: 1381 - protein, 1563 aa, Homo sapiens
MLGAPPISLENLLAAVSLSRIKSNVDGRYLVDGVPFSCCNPSSPRPCIQYQITNNSAHYSYDHQTEELNLWVRGCRAALLSYYSSLMNSMGVVTLLIWLFEVTITIGLRYLQTSLDGVSNPEESESESEGWLLEKSVPETWKAFLESVKKLGKGNQVTVAINKNISSDPLPRAVDNEFETVATQLLKRTQAMLNKYRCLLLEDAMRINPSAEMVMIDRMFNQEERASLSRDKRLALVDPEGFQADFCCSFKLDKAAHETQFGRSDQHGSKASSSLQPPAKAQGRDRAKTGVTEPMNHDQFHLVPNHIVVSAEGNISKKTECLGRALKFDKVGLVQYQSTSEEKASRREPLKASQCSPGPEGHRKTSSRSDHGTESKLSSILADSHLEMTCNNSFQDKSLRNSPKNEVLHTDIMKGSGEPQPDLQLTKSLETTFKNILELKKAGRQPQSDPTVSGSVELDFPNFSPMASQENCLEKFIPDHSDVVMDDDDDSCLLDLIGDPQALNYFLHGPSNKSSNDDLTNAGYSAANSNSIFANSSNADPKSSLKGVSNQLGEGPSDGLPLSSSLQFLEDELESSPLPDLTEDQPFDILQKSLQEANITEQTLAEEAYLDASIGSSQQFAQAQLHPSSSASFTQASNVSNYSGQTLQPIGVTHVPVGASFASNTVGVQHGFMQHVGISVPSQHLSNSSQISGSGQIQLIGSFGNHPSMMTINNLDGSQIILKGSGQQAPSNVSGGLLVHRQTPNGNSLFGNSSSSPVAQPVTVPFNSTNFQTSLPVHNIIIQRGLAPNSNKVPINIQPKPIQMGQQNTYNVNNLGIQQHHVQQGISFASASSPQGSVVGPHMSVNIVNQQNTRKPVTSQAVSSTGGSIVIHSPMGQPHAPQSQFLIPTSLSVSSNSVHHVQTINGQLLQTQPSQLISGQVASEHVMLNRNSSNMLRTNQPYTGPMLNNQNTAVHLVSGQTFAASGSPVIANHASPQLVGGQMPLQQASPTVLHLSPGQSSVSQGRPGFATMPSVTSMSGPSRFPAVSSASTAHPSLGSAVQSGSSGSNFTGDQLTQPNRTPVPVSVSHRLPVSSSKSTSTFSNTPGTGTQQQFFCQAQKKCLNQTSPISAPKTTDGLRQAQIPGLLSTTLPGQDSGSKVISASLGTAQPQQEKVVGSSPGHPAVQVESHSGGQKRPAAKQLTKGAFILQQLQRDQAHTVTPDKSHFRSLSDAVQRLLSYHVCQGSMPTEEDLRKVDNEFETVATQLLKRTQAMLNKYRCLLLEDAMRINPSAEMVMIDRMFNQEERASLSRDKRLALVDPEGFQADFCCSFKLDKAAHETQFGRSDQHGSKASSSLQPPAKAQGRDRAKTGVTEPMNHDQFHLVPNHIVVSAEGNISKKTECLGRALKFDKVGLVQYQSTSEEKASRREPLKASQCSPGPEGHRKTSSRSDHGTESKLSSILADSHLEMTCNNSFQDKSLRNSPKNEVLHTDIMKGSGEPQPDLQLTKSLETTFKNILELKKAGRQPQSDPTVSGSVELDFPNFSPMASQENCLEKFIPDHSEGVVETDSILEAAVNSILEC

SEQ ID NO: 1382 - protein, 185 aa, Homo sapiens
MAGPRPRWRDQLLFMSIIVLVIVVICLMLYALLWEAGNLTDLPNLRIGFYNFCLWNEDTSTLQCHQFPELEALGVPRVGLGLARLGVYGSLVLTLFAPQPLLLAQCNSDERAWRLAVGFLAVSSVLLAGGLGLFLSYVWKWVRLSLPGPGFLALGSAQALLILLLIAMAVFPLRAERAESKLESC

SEQ ID NO: 1383 - protein, 385 aa, Homo sapiens
MAAVVAATALKGRGARNARVLRGILAGATANKASHNRTRALQSHSSPEGKEEPEPLSPELEYIPRKRGKNPMKAVGLAWYSLYTRTWLGYLFYRQQLRRARNRYPKGHSKTQPRLFNGVKVLPIPVLSDNYSYLIIDTQAQLAVAVDPSDPRAVQASIEKEGVTLVAILCTHKHWDHSGGNRDLSRRHRDCRVYGSPQDGIPYLTHPLCHQDVVSVGRLQIRALATPGHTQGHLVYLLDGEPYKGPSCLFSGDLLFLSGCGRTFEGNAETMLSSLDTVLGLGDDTLLWPGHEYAEENLGFAGVVEPENLARERKMQWVQRQRLERKGTCPSTLGEERSYNPFLRTHCLALQEALGPGPGPTGDDDYSRAQLLEELRRLKDMHKSK

SEQ ID NO: 1384 - protein, 445 aa, Homo sapiens
MLLFVEQVASKGTGLNPNAKVWQEIAPGNTDATPVTHGTESSWHEIAATSGAHPEGNAELSEDICKEYEVMYSSSCETTRNTTGIEESTDGMILGPEDLSYQIYDVSGESNSAVSTEDLKECLKKQLEFCFSRENFSKDLYLISQMDSDQFIPIWTVANMEEIKKLTTDPDLILEVLRSSPMVQVDEKGEKVRPSHKRCIVILREIPETTPIEEVKGLFKSENCPKVISCEFAHNSNWYITFQSDTDAQQAFKYLREEVKTFQGKPIMARIKAINTFFAKNGYRLMDSSIYSHPIQTQAQYASPVFMQPVYNPHQQYSVYSIVPQSWSPNPTPYFETPLAPFPNGSFVNGFNSPGSYKTNAAAMNMGRPFQKNRVKPQFRSSGGSEHSTEGSVSLGDGQLNRYSSRNFPAERHNPTVTGHQEQTYLQKETSTLQVEQNGDYGRGR

SEQ ID NO: 1385 - protein, 190 aa, Homo sapiens
MARHVFLTGPPGVGKTTLIHKASEVLKSSGVPVDGFYTEEVRQGGRRIGFDVVTLSGTRGPLSRVGLEPPPGKRECRVGQYVVDLTSFEQLALPVLRNADCSSGPGQRVCVIDEIGKMELFSQLFIQAVRQTLSTPGTIILGTIPVPKGKPLALVEEIRNRKDVKVFNVTKENRNHLLPDIVTCVQSSRK

SEQ ID NO: 1386 - protein, 403 aa, Homo sapiens
MEPVGCCGECRGSSVDPRSTFVLSNLAEVVERVLTFLPAKALLRVACVCRLWRECVRRVLRTHRSVTWISAGLAEAGHLEGHCLVRVVAEELENVRILPHTVLYMADSETFISLEECRGHKRARKRTSMETALALEKLFPKQCQVLGIVTPGIVVTPMGSGSNRPQEIEIGESGFALLFPQIEGIKIQPFHFIKDPKNLTLERHQLTEVGLLDNPELRVVLVFGYNCCKVGASNYLQQVVSTFSDMNIILAGGQVDNLSSLTSEKNPLDIDASGVVGLSFSGHRIQSATVLLNEDVSDEKTAEAAMQRLKAANIPEHNTIGFMFACVGRGFQYYRAKGNVEADAFRKFFPSVPLFGFFGNGEIGCDRIVTGNFILRKCNEVKDDDLFHSYTTIMALIHLGSSK

SEQ ID NO: 1387 - protein, 226 aa, Homo sapiens
MWPGILAGGAREASCRYPALGPRLAAHFPAQRPPQRTLQNGLALQRCLHATATRALPLIPIVVEQTGRGERAYDIYSRLLRERIVCVMGPIDDSVASLVIAQLLFLLLAAGTPGMRHSLPNSRIMIHQPSGGARGQATDIAIQAEEIMKLKKQLYNIYAKHTKQSLQVIESAMERDRYMSPMEAQEFGILDKVLVHPPQDGEDEPTLVQKEPVEAAPAAEPVPAST

SEQ ID NO: 1388 - protein, 74 aa, Homo sapiens
MLTSLSRPITTMALSALVYPGMCGLLAKHLSFHIVGAFLITLGLQLSVSLLWPDQERRHMQISTEIIIELKNLR

SEQ ID NO: 1389 - protein, 110 aa, Homo sapiens [sequence omitted]

SEQ ID NO: 1390 - protein, 905 aa, Homo sapiens
MQLWIPKDKSRTLMTLKVLNAVSETVATSTAGIPSAATPSLLLATAEMIPSTAWIPLALARRQTPSPDVVLRGSSDGRGSDSESDLPHRKLPDVKKDDMSARRTSHGEPKSAVPFNQYLPNKSNQTAYVPAPLRKKKAEREEYRKSWSTATSPLGGERPFRYGPRTPVSDDAESTSMFDMRCEEEAAVQPHSRARQEQLQLINNQLREEDDKWQDDLARWKSRRRSVSQDLIKKEEERKKMEKLLAGEDGTSERRKSIKTYREIVQEKERRERELHEAYKNARSQEEAEGILQQYIERFTISEAVLERLEMPKILERSHSTEPNLSSFLNDPNPMKYLRQQSLPPPKFTATVETTIARASVLDTSMSAGSGSPSKTVTPKAVPMLTPKPYSQPKNSQDVLKTFKVDGKVSVNGETVHREEEKERECPTVAPAHSLTKSQMFEGVARVHGSPLELKQDNGSIEINIKKPNSVPQELAATTEKTEPNSQEDKNDGGKSRKGNIELASSEPQHFTTTVTRCSPTVAFVEFPSSPQLKNDVSEEKDQKKPENEMSGKVELVLSQKVVKPKSPEPEATLTFPFLDKMPEANQLHLPNLNSQVDSPSSEKSPVTTPFKFWAWDPEEERRRQEKWQQEQERLLQERYQKEQDKLKEEWEKAQKEVEEEERRYYEEERKIIEDTVVPFTVSSSSADQLSTSSSMTEGSGTMNKIDLGNCQDEKQDRRWKKSFQGDDSDLLLKTRESDRLEEKGSLTEGALAHSGNPVSKGVHEDHQLDTEAGAPHCGTNPQLAQDPSQNQQTSNPTHSSEDVKPKTLPLDKSINHQIESPSERRKSISGKKLCSSCGLPLGKGAAMIIETLNLYFHIQCFRCGICKGQLGDAVSGTDVRIRNGLLNCNDCYMRSRSAGQPTTL

SEQ ID NO: 1391 - protein, 127 aa, Homo sapiens
MEPGNRSLNPHKTKHHMECRVTGRAEVTASREGRGACAWECGSSRGPWGLLRYTFAPVRASRPWACLPKGSLSQRPKVPPPVHLPPKSSCPPRAGGGGAQGRRVPCTYLSPLSHSPKTFCTFLQGCP

SEQ ID NO: 1392 - protein, 29 aa, Homo sapiens
MKKSPEIISGRMTFGTASELASVCMPRNK

SEQ ID NO: 1393 - protein, 1247 aa, Homo sapiens
MEDAGAAGPGPEPEPEPEPEPEPAPEPEPEPKPGAGTSEAFSRLWTDVMGILDGSLGNIDDLAQQYADYYNTCFSDVCERMEELRKRRVSQDLEVEKPDASPTSLQLRSQIEESLGFCSAVSTPEVERKNPLHKSNSEDSSVGKGDWKKKNKYFWQNFRKNQKGIMRQTSKGEDVGYVASEITMSDEERIQLMMMVKEKMITIEEALARLKEYEAQHRQSAALDPADWPDGSYPTFDGSSNCNSREQSDDETEESVKFKRLHKLVNSTRRVRKKLIRVEEMKKPSTEGGEEHVFENSPVLDERSALYSGVHKKPLFFDGSPEKPPEDDSDSLTTSPSSSSLDTWGAGRKLVKTFSKGESRGLIKPPKKMGTFFSYPEEEKAQKVSRSLTEGEMKKGLGSLSHGRTCSFGGFDLTNRSLHVGSNNSDPMGKEGDFVYKEVIKSPTASRISLGKKVKSVKETMRKRMSKKYSSSVSEQDSGLDGMPGSPPPSQPDPEHLDKPKLKAGGSVESLRSSLSGQSSMSGQTVSTTDSSTSNRESVKSEDGDDEEPPYRGPFCGRARVHTDFTPSPYDTDSLKLKKGDIIDIISKPPMGTWMGLLNNKVGTFKFIYVDVLSEDEEKPKRPTRRRRKGRPPQPKSVEDLLDRINLKEHMPTFLFNGYEDLDTFKLLEEEDLDELNIRDPEHRAVLLTAVELLQEYDSNSDQSGSQEKLLVDSQGLSGCSPRDSGCYESSENLENGKTRKASLLSAKSSTEPSLKSFSRNQLGNYPTLPLMKSGDALKQGQEEGRLGGGLAPDTSKSCDPPGVTGLNKNRRSLPVSICRSCETLEGPQTVDTWPRSHSLDDLQVEPGAEQDVPTEVTEPPPQIVPEVPQKTTASSTKAQPLERDSAVDNALLLTQSKRFSEPQKLTTKKLEGSIAASGRGLSPPQCLPRNYDAQPPGAKHGLARTPLEGHRKGHEFEGTHHPLGTKEGVDAEQRMQPKIPSQPPPVPAKKSRERLANGLHPVPMGPSGALPSPDAPCLPVKRGSPASPTSPSDCPPALAPRPLSGQAPGSPPSTRPPPWLSELPENTSLQEHGVKLGPALTRKVSCARGVDLETLTENKLHAEGIDLTEEPYSDKHGRCGIPEALVQRYAEDLDQPERDVAANMDQIRVKQLRKQHRMAIPSGGLTEICRKPVSPGCISSVSDWLISIGLPMYAGTLSTAGFSTLSQVPSLSHTCLQEAGITEERHIRKLLSAARLFKLPPGPEAM

SEQ ID NO: 1394 - protein, 1512 aa, Homo sapiens
MATLSLTVNSGDPPLGALLAVEHVKDDVSISVEEGKENILHVSENVIFTDVNSILRYLARVATTAGLYGSNLMEHTEIDHWLEFSATKLSSCDSFTSTINELNHCLSLRTYLVGNSLSLADLCVWATLKGNAAWQEQLKQKKAPVHVKRWFGFLEAQQAFQSVGTKWDVSTTKARVAPEKKQDVGKFVELPGAEMGKVTVRFPPEASGYLHIGHAKAALLNQHYQVNFKGKLIMRFDDTNPEKKKEDFEKVILEDVAMLHIKPDQFTYTSDHFETIMKYAEKLIQEGKAYVDDTPAEQMKAEREQRIESKHRKNPIEKNLQMWEEMKKGSQFGQSCCLRAKIDMSSNNGCMRDPTLYRCKIQPHPRTGNKYNVYPTYDFACPIVDSIEGVTHALRTTEYHDRDEQFYWIIEALGIRKPYIWEYSRLNLNNTVLSKRKLTWFVNEGLVDGWDDPRFPTVRGVLRRGMTVEGLKQFIAAQGSSRSVVNMEWDKIWAFNKKVIDPVAPRYVALLKKEVIPVNVPEAQEEMKEVAKHPKNPEVGLKPVWYSPKVFIEGADAETFSEGEMVTFINWGNLNITKIHKNADGKIISLDAKLNLENKDYKKTTKVTWLAETTHALPIPVICVTYEHLITKPVLGKDEDFKQYVNKNSKHEELMLGDPCLKDLKKGDIIQLQRRGFFICDQPYEPVSPYSCKEAPCVLIYIPDGHTKEMPTSGSKEKTKVEATKNETSAPFKERPTPSLNNNCTTSEDSLVLYNRVAVQGDVVRELKAKKAPKEDVDAAVKQLLSLKAEYKEKTGQEYKPGNPPAEIGQNISSNSSASILESKSLYDEVAAQGEVVRKLKAEKSPKAKINEAVECLLSLKAQYKEKTGKEYIPGQPPLSQSSDSSPTRNSEPAGLETPEAKVLFDKVASQGEVVRKLKTEKAPKDQVDIAVQELLQLKAQYKSLIGVEYKPVSATGAEDKDKKKKKKKKKSEKQNKPQKQNDGQRKDPSKNQGGGLSSSGAGEGQGPKKQTRLGLEAKKEENLADWYSQVITKSEMIEYHDISGCYILRPWAYAIWEAIKDFFDAEIKKLGVENCYFPMFVSQSALEKEKTHVADFAPEVAWVTRSGKTELAEPIAIRPTSETVMYPAYAKWVQSHRDLPIKLNQWCNVVRWEFKHPQPFLRTREFLWQEGHSAFATMEEAAEEVLQILDLYAQVYEELLAIPVVKGRKTEKEKFAGGDYTTTIEAFISASGRAIQGGTSHHLGQNFSKMFEIVFEDPKIPGEKQFAYQNSWGLTTRTIGVMTMVHGDNMGLVLPPRVACVQVVIIPCGITNALSEEDKEALIAKCNDYRRRLLSVNIRVRADLRDNYSPGWKFNHWELKGVPIRLEVGPRDMKSCQFVAVRRDTGEKLTVAENEAETKLQAILEDIQVTLFTRASEDLKTHMVVANTMEDFQKILDSGKIVQIPFCGEIDCEDWIKKTTARDQDLEPGAPSMGAKSLCIPFKPLCELQPGAKCVCGKNPAKYYTLFGRSY

SEQ ID NO: 1395 - protein, 745 aa, Homo sapiens
MPFPVTTQGSQQTQPPQKHYGITSPISLAAPKETDCVLTQKLIETLKPFGVFEEEEELQRRILILGKLNNLVKEWIREISESKNLPQSVIENVGGKIFTFGSYRLGVHTKGADIDALCVAPRHVDRSDFFTSFYDKLKLQEEVKDLRAVEEAFVPVIKLCFDGIEIDILFARLALQTIPEDLDLRDDSLLKNLDIRCIRSLNGCRVTDEILHLVPNIDNFRLTLRAIKLWAKRHNIYSNILGFLGGVSWAMLVARTCQLYPNAIASTLVHKFFLVFSKWEWPNPVLLKQPEECNLNLPVWDPRVNPSDRYHLMPIITPAYPQQNSTYNVSVSTRMVMVEEFKQGLAITDEILLSKAEWSKLFEAPNFFQKYKHYIVLLASAPTEKQRLEWVGLVESKIRILVGSLEKNEFITLAHVNPQSFPAPKENPDKEEFRTMWVIGLVFKKTENSENLSVDLTYDIQSFTDTVYRQAINSKMFEVDMKIAAMHVKRKQLHQLLPNHVLQKKKKHSTEGVKLTALNDSSLDLSMDSDNSMSVPSPTSATKTSPLNSSGSSQGRNSPAPAVTAASVTNIQATEVSVPQVNSSESSGGTSSESIPQTATQPAISPPPKPTVSRVVSSTRLVNPPPRSSGNAATSGNAATKIPTPIVGVKRTSSPHKEESPKKTKTEEDETSEDANCLALSGHDKTEAKEQLDTETSTTQSETIQTAASLLASQKTSSTDLSDIPALPANPIPVIKNSIKLRLNR

SEQ ID NO: 1396 - protein, 1008 aa, Homo sapiens
MSYDYHQNWGRDGGPRSSGGGYGGGPAGGHGGNRGSGGGGGGGGGGRGGRGRHPGHLKGREIGMWYAKKQGQKNKEAERQERAVVHMDERREEQIVQLLNSVQAKNDKESEAQISWFAPEDHGYGTEVSTKNTPCSENKLDIQEKKLINQEKKMFRIRNRSYIDRDSEYLLQENEPDGTLDQKLLEDLQKKKNDLRYIEMQHFREKLPSYGMQKELVNLIDNHQVTVISGETGCGKTTQVTQFILDNYIERGKGSACRIVCTQPRRISAISVAERVAAERAESCGSGNSTGYQIRLQSRLPRKQGSILYCTTGIILQWLQSDPYLSSVSHIVLDEIHERNLQSDVLMTVVKDLLNFRSDLKVILMSATLNAEKFSEYFGNCPMIHIPGFTFPVVEYLLEDVIEKIRYVPEQKEHRSQFKRGFMQGHVNRQKKKKKEAIYKERWPDYVRELRRRYSASTVDVIEMMEDDKVDLNLIVALIRYIVLEEEDGAILVFLPGWDNISTLHDLLMSQVMFKSDKFLIIPLHSLMPTVNQTQVFKRTPPGVRKIVIATNIAETSITIDDVVYVIDGGKIKETHFDTQNNISTMSAEWVSKANAKQRKGRAGRVQPGHCYHLYNGLRASLLDDYQLPEILRTPLEELCLQIKILRLGGIAYFLSRLMDPPSNEAVLLSIRHLMELNALDKQEELTPLGVHLARLPVEPHIGKMILFGALFCCLDPVLTIAASLSFKDPFVIPLGKEKIADARRKELAKDTRSDHLTVVNAFEGWEEARRRGFRYEKDYCWEYFLSSNTLQMLHNMKGQFAEHLLGAGFVSSRNPKDPESNINSDNEKIIKAVICAGLYPKVAKIRLNLGKKRKMVKVYTKTDGLVAVHPKSVNVEQTDFHYNWLIYHLKMRTSSIYLYDCTEVSPYCLLFFGGDISIQKDNDQETIAVDEWIVFQSPARIAHLVKELRKELDILLQEKIESPHPVDWNDTKSRDCAVLSAIIDLIKTQEKATPRNFPPRFQDGYYS

SEQ ID NO: 1397 - protein, 48 aa, Homo sapiens
MKRKPRASSPVVEEQPRANTKETRKKKSFSQPMTASTKKSPKIAKKGK

SEQ ID NO: 1398 - protein, 249 aa, Homo sapiens
MKITRQKHAKKHLGFFRNNFGVREPYQILLDGTFCQAALRGRIQLREQLPRYLMGETQLCTTRCVLKELETLGKDLYGAKLIAQKCQVRNCPHFKNAVSGSECLLSMVEEGNPHHYFVATQDQNLSVKVKKKPGVPLMFIIQNTMVLDKPSPKTIAFVKAVESGQLVSVHEKESIKHLKEEQGLVKNTEQSRRKKRKKISGPNPLSCLKKKKKAPDTQSSASEKKRKRKRIRNRSNPKVLSEKQNAEGE

SEQ ID NO: 1399 - protein, 449 aa, Homo sapiens
MRECISVHVGQAGVQIGNACWELFCLEHGIQADGTFDAQASKINDDDSFTTFFSETGNGKHVPRAVMIDLEPTVVDEVRAGTYRQLFHPEQLITGKEDAANNYARGHYTVGKESIDLVLDRIRKLTDACSGLQGFLIFHSFGGGTGSGFTSLLMERLSLDYGKKSKLEFAIYPAPQVSTAVVEPYNSILTTHTTLEHSDCAFMVDNEAIYDICRRNLDIERPTYTNLNRLISQIVSSITASLRFDGALNVDLTEFQTNLVPYPRIHFPLVTYAPIISAEKAYHEQLSVAEITSSCFEPNSQMVKCDPRHGKYMACCMLYRGDVVPKDVNVAIAAIKTKRTIQFVDWCPTGFKVGINYQPPTVVPGGDLAKVQRAVCMLSNTTAIAEAWARLDHKFDLMYAKRAFVHWYVGEGMEEGEFSEAREDLAALEKDYEEVGTDSFEEENEGEEF

SEQ ID NO: 1400 - protein, 856 aa, Homo sapiens [sequence omitted]

SEQ ID NO: 1401 - protein, 293 aa, Homo sapiens
MGFPAAALLCALCCGLLAPAARAGYSEERCSWRGSGLTQEPGSVGQLALACAEGAVEWLYPAGALRLTLGGPDPRARPGIACLRPVRPFAGAQVFAERAGGALELLLAEGPGPAGGRCVRWGPRERRALFLQATPHQDISRRVAAFRFELREDGRPELPPQAHGLGVDGACRPCSDAELLLAACTSDFVIHGIIHGVTHDVELQESVITVVAARVLRQTPPLFQAGRSGDQGLTSIRTPLRCGVHPGPGTFLFMGWSRFGEARLGCAPRFQEFRRAYEAARAAHLHPCEVALH

SEQ ID NO: 1402 - protein, 370 aa, Homo sapiens
MSAQAQMRALLDQLMGTARDDETRQRVKFTDDRVCKSHLLDCCPHDILAGTRMDLGECTKIHDLALRADYEIASKERDLFFELDAMDHLESFIAECDRRTELAKKRLAETQEEISAEVSAKAEKVHELNEEIGKLLAKAEQLGAEGNVDESQKILMEVEKVRAKKKEAEEEYRNSMPASSFQQQKLRVCEVCSAYLGLHDNDRRLADHFGGKLHLGFIQIREKLDQLRKTVAEKQEKRNQDRLRRREEREREERLSRRSGSRTRDRRRSRSRDRRRRRSRSTSRERRKLSRSRSRDRHRRHRSRSRSHSRGHRRASRDRSAKYKFSRERASREESWESGRSERGPPDWRLESSNGKMASRRSEEKEAGEI

SEQ ID NO: 1403 - protein, 311 aa, Homo sapiens
MSAQAQMRALLDQLMGTARDDETRQRVKFTDDRVCKSHLLDCCPHDILAGTRMDLGECTKIHDLALRADYEIASKERDLFFELDAMDHLESFIAECDRRTELAKKRLAETQEEISAEVSAKAEKVHELNEEIGKLLAKAEQLGAEGNVDESQKILMEVEKVRAKKKEAEKTVAEKQEKRNQDRLRRREEREREERLSRRSGSRTRDRRRSRSRDRRRRRSRSTSRERRKLSRSRSRDRHRRHRSRSRSHSRGHRRASRDRSAKYKFSRERASREESWESGRSERGPPDWRLESSNGKMASRRSEEKEAGEI

SEQ ID NO: 1404 - protein, 1062 aa, Homo sapiens
MRLLSMPGAQGAAAAGSEPPPATTSPEGQPKVHRARKTMSKPGNGQPPVPEKRPPEIQHFRMSDDVHSLGKVTSDLAKRRKLNSGGGLSEELGSARRSGEVTLTKGDPGSLEEWETVVGDDFSLYYDSYSVDERVDSDSKSEVEALTEQLSEEEEEEEEEEEEEEEEEEEEEEEEDEESGNQSDRSGSSGRRKAKKKWRKDSPWVKPSRKRRKREPPRAKEPRGVNGVGSSGPSEYMEVPLGSLELPSEGTLSPNHAGVSNDTSSLETERGFEELPLCSCRMEAPKIDRISERAGHKCMATESVDGELSGCNAAILKRETMRPSSRVALMVLCETHRARMVKHHCCPGCGYFCTAGTFLECHPDFRVAHRFHKACVSQLNGMVFCPHCGEDASEAQEVTIPRGDGVTPPAGTAAPAPPPLSQDVPGRADTSQPSARMRGHGEPRRPPCDPLADTIDSSGPSLTLPNGGCLSAVGLPLGPGREALEKALVIQESERRKKLRFHPRQLYLSVKQGELQKVILMLLDNLDPNFQSDQQSKRTPLHAAAQKGSVEICHVLLQAGANINAVDKQQRTPLMEAVVNNHLEVARYMVQRGGCVYSKEEDGSTCLHHAAKIGNLEMVSLLLSTGQVDVNAQDSGGWTPIIWAAEHKHIEVIRMLLTRGADVTLTDNEENICLHWASFTGSAAIAEVLLNARCDLHAVNYHGDTPLHIAARESYHDCVLLFLSRGANPELRNKEGDTAWDLTPERSDVWFALQLNRKLRLGVGNRAIRTEKIICRDVARGYENVPIPCVNGVDGEPCPEDYKYISENCETSTMNIDRNITHLQHCTCVDDCSSSNCLCGQLSIRCWYDKDGRLLQEFNKIEPPLIFECNQACSCWRNCKNRVVQSGIKVRLQLYRTAKMGWGVRALQTIPQGTFICEYVGELISDAEADVREDDSYLFDLDNKDGEVYCIDARYYGNISRLLCHLCDPNIIPVRVFMLHQDLRFPRIAFFSSRDIRTGEELGFDYGDRFWDIKSKYFTCQCGSEKCKHSAEAIALEQSRLARLDPHPELLPELGSLPPVNT

SEQ ID NO: 1405 - protein, 350 aa, Homo sapiens
MEHVSPALPVFLVSTYTLGTLCPISPDGRLIVSCSEDKTIKIWDTTNKQCVNNFSDSVGFANFVDFNPSGTCIASAGSDQTVKVWDVRVNKLLQHYQVHSGGVNCISFHPSGNYLITASSDGTLKILDLLEGRLIYTLQGHTGPVFTVSFSKGGELFASGGADTQVLLWRTNFDELHCKGLTKRNLKRLHFDSPPHLLDIYPRTPHPHEEKVETVEINPKLEVIDLQISTPPVMDILSFDSTTTTETSGRTLPDKGEEACGYFLNPSLMSPECLPTTTKKKTEDMSDLPCESQRSIPLAVTDALEHIMEQLNVLTQTVSILEQRLTLTEDKLKDCLENQQKLFSAVQQKS

SEQ ID NO: 1406 - protein, 117 aa, Homo sapiens [sequence omitted]

SEQ ID NO: 1407 - protein, 430 aa, Homo sapiens
MQKHHPQSIEEAVALVEHLQRESGQTWNGVAVHELGKEAVLLGETAEASSFGLKPTESQPVGVSQDEEFWNTYEGLQEQLSRNTHKETEPVYERAVPTQQILAFPEQTNTKDWTVTPEHVLPESQSLLTFEEVAMYFSQEEWELLDPTQKALYNDVMQENYETVISLALFVLPKPKVISCLEQGEEPWVQVSPEFKDSAGKSPTGLKLKNDTENHQPASLSDLEIQASAGVISKKAKVKVPQKTAGKENHFDMHRVGKWHQDFPVKKRKKLSTWKQELLKLMDRHKKDCAREKPFKCQECGKTFRVSSDLIKHQRIHTEEKPYKCQQCDKRFRWSSDLNKHLTTHQGIKPYKCSWCGKSFSQNTNLHTHQRTHTGEKPFTCHECGKKFSQNSHLIKHRRTHTGEQPYTCSICRRNFSRRSSLLRHQKLHL

SEQ ID NO: 1408 - protein, 697 aa, Homo sapiens
MAGLGPGVGDSEGGPRPLFCRKGALRQKVVHEVKSHKFTARFFKQPTFCSHCTDFIWGIGKQGLQCQVCSFVVHRRCHEFVTFECPGAGKGPQTDDPRNKHKFRLHSYSSPTFCDHCGSLLYGLVHQGMKCSCCEMNVHRRCVRSVPSLCGVDHTERRGRLQLEIRAPTADEIHVTVGEARNLIPMDPNGLSDPYVKLKLIPDPRNLTKQKTRTVKATLNPVWNETFVFNLKPGDVERRLSVEVWDWDRTSRNDFMGAMSFGVSELLKAPVDGWYKLLNQEEGEYYNVPVADADNCSLLQKFEACNYPLELYERVRMGPSSSPIPSPSPSPTDPKRCFFGASPGRLHISDFSFLMVLGKGSFGKVMLAERRGSDELYAIKILKKDVIVQDDDVDCTLVEKRVLALGGRGPGGRPHFLTQLHSTFQTPDRLYFVMEYVTGGDLMYHIQQLGKFKEPHAAFYAAEIAIGLFFLHNQGIIYRDLKLDNVMLDAEGHIKITDFGMCKENVFPGTTTRTFCGTPDYIAPEIIAYQPYGKSVDWWSFGVLLYEMLAGQPPFDGEDEEELFQAIMEQTVTYPKSLSREAVAICKGFLTKHPGKRLGSGPDGEPTIRAHGFFRWIDWERLERLEIPPPFRPRPCGRSGENFDKFFTRAAPALTPPDRLVLASIDQADFQGFTYVNPDFVHPDARSPTSPVPVPVM

SEQ ID NO: 1409 - protein, 57 aa, Homo sapiens
MLWGFSVFRRSWILNCWLSSSQVGISAACKFSTLTHTHTHTHTHTRHAPFCGTCLYY

SEQ ID NO: 1410 - protein, 199 aa, Homo sapiens
MKTFIIGISGVTNSGKTTLAKNLQKHLPNCSVISQDDFFKPESEIETDKNGFLQYDVLEALNMEKMMSAISCWMESARHSVVSTDQESAEEIPILIIEGFLLFNYKPLDTIWNRSYFLTIPYEECKRRRSTRVYQPPDSPGYFDGHVWPMYLKYRQEMQDITWEVVYLDGTKSEEDLFLQVYEDLIQELAKQKCLQVTA

SEQ ID NO: 1411 - protein, 175 aa, Homo sapiens
MKTFIIGISGVTNSGKTTLAKNLQKHLPNCSVISQDDFFKPESEIETDKNGFLQYDVLEALNMEKMMSAISCWMESARHSVVSTDQESAEEIPILIIEGFLLFNYNTRVYQPPDSPGYFDGHVWPMYLKYRQEMQDITWEVVYLDGTKSEEDLFLQVYEDLIQELAKQKCLQVTA

SEQ ID NO: 1412 - protein, 158 aa, Homo sapiens
MSSAIERKSLDPSEEPVDEVLQIPPSLLTCGGCQQNIGDRYFLKAIDQYWHEDCLSCDLCGCRLGEVGRRLYYKLGRKLCRRDYLRLFGQDGLCASCDKRIRAYEMTMRVKDKVYHLECFKCAACQKHFCVGDRYLLINSDIVCEQDIYEWTKINGMI

SEQ ID NO: 1413 - protein, 127 aa, Homo sapiens
MLTQQGMALQNYDNKLVKCIEELCQKQEELCWQIQQEEDKKQRLQNEVRQLTEKLACVNEKLARVNENLARKIASCSKFYQTIAETEAAYLKILESSQTLLSVLKREAGNLTKATAPDQKSSGGRDS

SEQ ID NO: 1414 - protein, 174 aa, Homo sapiens
MGGTESSISEPGSPSRNRENETSRQNLSECKVWRNPLNLFRGAEYRRYTWVTGKEPLTYYDMNLSAQDHQTFFTCDTDFLRPSDTVMQKAWRERNPPARIKAAYQALELNNDCATAYVLLAEEEATTIVDAERLFKQALKAGETIYRQSQQCQHQSPQHEAQLRRDTNVLVYIN

SEQ ID NO: 1415 - protein, 664 aa, Homo sapiens
MKTGLFFLCLLGTAAAIPTNARLLSDHSKPTAETVAPDNTAIPSLRAEAEENEKETAVSTEDDSHHKAEKSSVLKSKEESHEQSAEQGKSSSQELGLKDQEDSDGHLSVNLEYAPTEGTLDIKEDMSEPQEKKLSENTDFLAPGVSSFTDSNQQESITKREENQEQPRNYSHHQLNRSSKHSQGLRDQGNQEQDPNISNGEEEEEKEPGEVGTHNDNQERKTELPREHANSKQEEDNTQSDDILEESDQPTQVSKMQEDEFDQGNQEQEDNSNAEMEEENASNVNKHIQETEWQSQEGKTGLEAISNHKETEEKTVSEALLMEPTDDGNTTPRNHGVDDDGDDDGDDGGTDGPRHSASDDYFIPSQAFLEAERAQSIAYHLKIEEQREKVHENENIGTTEPGEHQEAKKAENSSNEEETSSEGNMRVHAVDSCMSFQCKRGHICKADQQGKPHCVCQDPVTCPPTKPLDQVCGTDNQTYASSCHLFATKCRLEGTKKGHQLQLDYFGACKSIPTCTDFEVIQFPLRMRDWLKNILMQLYEANSEHAGYLNEKQRNKVKKIYLDEKRLLAGDHPIDLLLRDFKKNYHMYVYPVHWQFSELDQHPMDRVLTHSELAPLRASLVPMEHCITRFFEECDPNKDKHITLKEWGHCFGIKEEDIDENLLF

SEQ ID NO: 1416 - protein, 728 aa, Homo sapiens
MAGPEGFQYRALYPFRRERPEDLELLPGDVLVVSRAALQALGVAEGGERCPQSVGWMPGLNERTRQRGDFPGTYVEFLGPVALARPGPRPRGPRPLPARPRDGAPEPGLTLPDLPEQFSPPDVAPPLLVKLVEAIERTGLDSESHYRPELPAPRTDWSLSDVDQWDTAALADGIKSFLLALPAPLVTPEASAEARRALREAAGPVGPALEPPTLPLHRALTLRFLLQHLGRVASRAPALGPAVRALGATFGPLLLRAPPPPSSPPPGGAPDGSEPSPDFPALLVEKLLQEHLEEQEVAPPALPPKPPKAKPASTVLANGGSPPSLQDAEWYWGDISREEVNEKLRDTPDGTFLVRDASSKIQGEYTLTLRKGGNNKLIKVFHRDGHYGFSEPLTFCSVVDLINHYRHESLAQYNAKLDTRLLYPVSKYQQDQIVKEDSVEAVGAQLKVYHQQYQDKSREYDQLYEEYTRTSQELQMKRTAIEAFNETIKIFEEQSQTQEKCSKEYLERFRREGNEKEMQRILLNSERLKSRIAEIHESRTKLEQQLRAQASDNREIDKRMNSLKPDLMQLRKIRDQYLVWLTQKGARQKKINEWLGIKNETEDQYALMEDEDDLPHHEERTWYVGKINRTQAEEMLSGKRDGTFLIRESSQRGCYACSVVVDGDTKHCVIYRTATGFGFAEPYNLYGSLKELVLHYQHASLVQHNDALTVTLAHPVRAPGPGPPPAAR

SEQ ID NO: 1417 - protein, 704 aa, Homo sapiens
MDSARHHISHSTSAGPIPSQKEEEMTESQGTVTFKDVAIDFTQEEWKRLDPAQRKLYRNVMLENYNNLITVGYPFTKPDVIFKLEQEEEPWVMEEEVLRRHWQGEIWGVDEHQKNQDRLLRQVEVKFQKTLTEEKGNECQKKFANVFPLNSDFFPSRHNLYEYDLFGKCLEHNFDCHNNVKCLMRKEHCEYNEPVKSYGNSSSHFVITPFKCNHCGKGFNQTLDLIRHLRIHTGEKPYECSNCRKAFSHKEKLIKHYKIHSREQSYKCNECGKAFIKMSNLIRHQRIHTGEKPYACKECEKSFSQKSNLIDHEKIHTGEKPYECNECGKAFSQKQSLIAHQKVHTGEKPYACNECGKAFPRIASLALHMRSHTGEKPYKCDKCGKAFSQFSMLIIHVRIHTGEKPYECNECGKAFSQSSALTVHMRSHTGEKPYECKECRKAFSHKKNFITHQKIHTREKPYECNECGKAFIQMSNLVRHQRIHTGEKPYICKECGKAFSQNSNLIAHEKIHSGEKPYECNECGKAFSQKQNFITHQKVHTGEKPYDCNECGKAFSQIASLTLHLRSHTGEKPYECDKCGKAFSQCSLLNLHMRSHTGEKPYVCNECGKAFSQRTSLIVHMRGHTGEKPYECNKCGKAFSQSSSLTIHIRGHTGEKPYECKECRKAFSHKKNFITHQKIHTREKPLSVIIVEKASIRLWTSSDI

SEQ ID NO: 1418 - protein, 258 aa, Homo sapiens
MARPPVPGSVVVPNWHESAEGKEYLACILRKNRRRVFGLLERPVLLPPVSIDTASYKIFVSGKSGVGKTALVAKLAGLEVPVVHHETTGIQTTVVFWPAKLQASSRVVMFRFEFWDCGESALKKFDHMLLACMENTDAFLFLFSFTDRASFEDLPGQLARIAGEAPGVVRMVIGSKFDQYMHTDVPERDLTAFRQAWELPLLRVKSVPGRRLADGRTLDGRAGLADVAHILNGLAEQLWHQDQVAAGLLPNPPESAPE

SEQ ID NO: 1419 - protein, 358 aa, Homo sapiens [sequence omitted]

SEQ ID NO: 1420 - protein, 849 aa, Homo sapiens
MGDKKDDKDSPKKNKGKERRDLDDLKKEVAMTEHKMSVEEVCRKYNTDCVQGLTHSKAQEILARDGPNALTPPPTTPEWVKFCRQLFGGFSILLWIGAILCFLAYGIQAGTEDDPSGDNLYLGIVLAAVVIITGCFSYYQEAKSSKIMESFKNMVPQQALVIREGEKMQVNAEEVVVGDLVEIKGGDRVPADLRIISAHGCKVDNSSLTGESEPQTRSPDCTHDNPLETRNITFFSTNCVEGTARGVVVATGDRTVMGRIATLASGLEVGKTPIAIEIEHFIQLITGVAVFLGVSFFILSLILGYTWLEAVIFLIGIIVANVPEGLLATVTVCLTLTAKRMARKNCLVKNLEAVETLGSTSTICSDKTGTLTQNRMTVAHMWFDNQIHEADTTEDQSGTSFDKSSHTWVALSHIAGLCNRAVFKGGQDNIPVLKRDVAGDASESALLKCIELSSGSVKLMRERNKKVAEIPFNSTNKYQLSIHETEDPNDNRYLLVMKGAPERILDRCSTILLQGKEQPLDEEMKEAFQNAYLELGGLGERVLGFCHYYLPEEQFPKGFAFDCDDVNFTTDNLCFVGLMSMIDPPRAAVPDAVGKCRSAGIKVIMVTGDHPITAKAIAKGVGIIFEGNETVEDIAARLNIPVSQVNPRDAKACVIHGTDLKDFTSEQIDEILQNHTEIVFARTSPQQKLIIVEGCQRQGAIVAVTGDGVNDSPALKKADIGVAMGIAGSDVSKQAADMILLDDNFASIVTGVEEGRLIFDNLKKSIAYTLTSNIPEITPFLLFIMANIPLPLGTITILCIDLGTDMVPAISLAYEAAESDIMKRQPRNPRTDKLAEEPMGRSYHLWDYD

SEQ ID NO: 1421 - protein, 1721 aa, Homo sapiens
MLISKNMPWRRLQGISFGMYSAEELKKLSVKSITNPRYLDSLGNPSANGLYDLALGPADSKEVCSTCVQDFSNCSGHLGHIELPLTVYNPLLFDKLYLLLRGSCLNCHMLTCPRAVIHLLLCQLRVLEVGALQAVYELERILNRFLEENADPSASEIREELEQYTTEIVQNNLLGSQGAHVKNVCESKSKLIALFWKAHMNAKRCPHCKTGRSVVRKEHNSKLTITFPAMVHRTAGQKDSEPLGIEEAQIGKRGYLTPTSAREHLSALWKNEGFFLNYLFSGMDDDGMESRFNPSVFFLDFLVVPPSRYRPVSRLGDQMFTNGQTVNLQAVMKDVVLIRKLLALMAQEQKLPEEVATPTTDEEKDSLIAIDRSFLSTLPGQSLIDKLYNIWIRLQSHVNIVFDSEMDKLMMDKYPGIRQILEKKEGLFRKHMMGKRVDYAARSVICPDMYINTNEIGIPMVFATKLTYPQPVTPWNVQELRQAVINGPNVHPGASMVINEDGSRTALSAVDMTQREAVAKQLLTPATGAPKPQGTKIVCRHVKNGDILLLNRQPTLHRPSIQAHRARILPEEKVLRLHYANCKAYNADFDGDEMNAHFPQSELGRAEAYVLACTDQQYLVPKDGQPLAGLIQDHMVSGASMTTRGCFFTREHYMELVYRGLTDKVGRVKLLSPSILKPFPLWTGKQVVSTLLINIIPEDHIPLNLSGKAKITGKAWVKETPRSVPGFNPDSMCESQVIIREGELLCGVLDKAHYGSSAYGLVHCCYEIYGGETSGKVLTCLARLFTAYLQLYRGFTLGVEDILVKPKADVKRQRIIEESTHCGPQAVRAALNLPEAASYDEVRGKWQDAHLGKDQRDFNMIDLKFKEEVNHYSNEINKACMPFGLHRQFPENTLQLMVQSGAKGSTVNTMQISCLLGQIELEGRSTPLMASGKSLPCFEPYEFTPRAGGFVTGRFLTGIKPPEFFFHCMAGREGLVDTAVKTSRSGYLQRCIIKHLEGLVVQYDLTVRDSDGSVVQFLYGEDGLDIPKTQFLQPKQFPFLASNYEVIMKSQHLHEVLSRADPKKALHHFRAIKKWQSKHPNTLLRRGAFLSYSQKIQEAVKALKLESENRNGRRPWDSGRMLRMWYELDEESRRKYQKKAAACPDPSLSVWRPDIYFASVSETFETKVDDYSQEWAAQTEKSYEKSELSLDRLRTLLQLKWQRSLCEPGEAVGLLAAQSIGEPSTQMTLNTFHFAGRGEMNVTLGIPRLREILMVASANIKTPMMSVPVLNTKKALKRVKSLKKQLTRVCLGEVLQKIDVQESFCMEEKQNKFQVYQLRFQFLPHAYYQQEKCLRPEDILRFMETRFFKLLMESIKKKNNKASAFRNVNTRRATQRDLDNAGELGRSRGEQEGDEEEEGHIVDAEAEEGDADASDAKRKEKQEEEVDYESEEEEEREGEENDDEDMQEERNPHREGARKTQEQDEEVGLGTEEDPSLPALLTQPRKPTHSQEPQGPEAMERRVQAVREIHPFIDDYQYDTEESLWCQVTVKLPLMKINFDMSSLVVSLAHGAVIYATKGITRCLLNETTNNKNEKELVLNTEGINLPELFKYAEVLDLRRLYSNDIHAIANTYGIEAALRVIEKEIKDVFAVYGIAVDPRHLSLVADYMCFEGVYKPLNRFGIRSNSSPLQQMTFETSFQFLKQATMLGSHDELRSPSACLVVGKVVRGGTGLFELKQPLR

SEQ ID NO: 1422 - protein, 791 aa, Homo sapiens
MEEKRRKYSISSDNSDTTDSHATSTSASRCSKLPSSTKSGWPRQNEKKPSEVFRTDLITAMKIPDSYQLSPDDYYILADPWRQEWEKGVQVPAGAEAIPEPVVRILPPLEGPPAQASPSSTMLGEGSQPDWPGGSRYDLDEIDAYWLELINSELKEMERPELDELTLERVLEELETLCHQNMARAIETQEGLGIEYDEDVVCDVCRSPEGEDGNEMVFCDKCNVCVHQACYGILKVPTGSWLCRTCALGVQPKCLLCPKRGGALKPTRSGTKWVHVSCALWIPEVSIGCPEKMEPITKISHIPASRWALSCSLCKECTGTCIQCSMPSCVTAFHVTCAFDHGLEMRTILADNDEVKFKSFCQEHSDGGPRNEPTSEPTEPSQAGEDLEKVTLRKQRLQQLEEDFYELVEPAEVAERLDLAEALVDFIYQYWKLKRKANANQPLLTPKTDEVDNLAQQEQDVLYRRLKLFTHLRQDLERVRNLCYMVTRRERTKHAICKLQEQIFHLQMKLIEQDLCRAGLSTSFPIDGTFFNSWLAQSVQITAENMAMSEWPLNNGHREDPAPGLLSEELLQDEETLLSFMRDPSLRPGDPARKARGRTRLPAKKKPPPPPPQDGPGSRTTPDKAPKKTWGQDAGSGKGGQGPPTRKPPRRTSSHLPSSPAAGDCPILATPESPPPLAPETPDEAASVAADSDVQVPGPAASPKPLGRLRPPRESKVTRRLPGARPDAGMGPPSAVAERPKVSLHFDTETDGYFSDGEMSDSDVEAEDGGVQRGPREAGAEEVVRMGVLAS

SEQ ID NO: 1423 - protein, 116 aa, Homo sapiens [sequence omitted]

SEQ ID NO: 1424 - protein, 505 aa, Homo sapiens
MTKAQESLTLEDVAVDFTWEEWQFLSPAQKDLYRDVMLENYSNLVSVGYQAGKPDALTKLEQGEPLWTLEDEIHSPAHPEIEKADDHLQQPLQNQKILKRTGQRYEHGRTLKSYLGLTNQSRRYNRKEPAEFNGDGAFLHDNHEQMPTEIEFPESRKPISTKSQFLKHQQTHNIEKAHECTDCGKAFLKKSQLTEHKRIHTGKKPHVCSLCGKAFYKKYRLTEHERAHRGEKPHGCSLCGKAFYKRYRLTEHERAHKGEKPYGCSECGKAFPRKSELTEHQRIHTGIKPHQCSECGRAFSRKSLLVVHQRTHTGEKPHTCSECGKGFIQKGNLNIHQRTHTGEKPYGCIDCGKAFSQKSCLVAHQRYHTGKTPFVCPECGQPCSQKSGLIRHQKIHSGEKPYKCSDCGKAFLTKTMLIVHHRTHTGERPYGCDECEKAYFYMSCLVKHKRIHSREKRGDSVKVENPSTASHSLSPSEHVQGKSPVNMVTVAMVAGQCEFAHILHS

SEQ ID NO: 1425 - protein, 405 aa, Homo sapiens [sequence omitted]

SEQ ID NO: 1426 - protein, 450 aa, Homo sapiens
MAADQRPKADTLALRQRLISSSCRLFFPEDPVKIVRAQGQYMYDEQGAEYIDCISNVAHVGHCHPLVVQAAHEQNQVLNTNSRYLHDNIVDYAQRLSETLPEQLCVFYFLNSGSEANDLALRLARHYTGHQDVVVLDHAYHGHLSSLIDISPYKFRNLDGQKEWVHVAPLPDTYRGPYREDHPNPAMAYANEVKRVVSSAQEKGRKIAAFFAESLPSVGGQIIPPAGYFSQVAEHIRKAGGVFVANEIQVGFGRVGKHFWAFQLQGKDFVPDIVTMGKSIGNGHPVACVAATQPVARAFEATGVEYFNTFGGSPVSCAVGLAVLNVLEKEQLQDHATSVGSFLMQLLGQQKIKHPIVGDVRGVGLFIGVDLIKDEATRTPATEEAAYLVSRLKENYVLLSTDGPGRNILKFKPPMCFSLDNARQVVAKLDAILTDMEEKVRSCETLRLQP

SEQ ID NO: 1427 - protein, 390 aa, Homo sapiens
MLSSRAEAAMTAADRAIQRFLRTGAAVRYKVMKNWGVIGGIAAALAAGIYVIWGPITERKKRRKGLVPGLVNLGNTCFMNSLLQGLSACPAFIGWLEEFTSQYSRDQKEPPSHQYLSLTLLHLLKALSCQEVTDDEVLHASCLLDVLRMYRWQISSFEEQDAHELFHVITSSLEDERDRQPRVTHLFDVHSLEQQSEITPKQITCRTRGSPHPTSNHWKSQHPFHGRLTSNMVCKHCEHQSPVRFDTFDSLSLSIPAATWGHPLTLDHCLHHFISSESVRDVVCDNCTKIEAKGTLNGEKVEHQRTTFVKQLKLGKLPQCLCIHLQRLSWSSHGTPLKRHEHVQFNEFLMMDIYKYHLLGHKPSQHNPKLNKNPGPTLELQDGPGAPHQF

SEQ ID NO: 1428 - protein, 504 aa, Homo sapiens
MYSPLCLTQDEFHPFIEALLPHVRAFAYTWFNLQARKRKYFKKHEKRMSKEEERAVKDELLSEKPEVKQKWASRLLAKLRKDIRPEYREDFVLTVTGKKPPCCVLSNPDQKGKMRRIDCLRQADKVWRLDLVMVILFKGIPLESTDGERLVKSPQCSNPGLCVQPHHIGVSVKELDLYLAYFVHAADSSQSESPSQPSDADIKDQPENGHLGFQDSFVTSGVFSVTELVRVSQTPIAAGTGPNFSLSDLESSSYYSMSPGAMRRSLPSTSSTSSTKRLKSVEDEMDSPGEEPFYTGQGRSPGSGSQSSGWHEVEPGMPSPTTLKKSEKSGFSSPSPSQTSSLGTAFTQHHRPVITGPRASPHATPSTLHFPTSPIIQQPGPYFSHPAIRYHPQETLKEFVQLVCPDAGQQAGQPNGSSQGKVHNPFLPTPMLPPPPPPPMARPVPLPVPDTKPPTTSTEGGAASPTSPTYSTPSTSPANRFVSVGPRDPSFVNIPQQTQSWYLG

SEQ ID NO: 1429 - protein, 600 aa, Homo sapiens
MRPPLWEPQLQAMEEPPVPVSVLHRFPFSSALQRMSVVVAWPGATQPEAYVKGSPELVAGLCNPETVPTDFAQMLQSYTAAGYRVVALASKPLPTVPSLEAAQQLTRDTVEGDLSLLGLLVMRNLLKPQTTPVIQALRRTRIRAVMVTGDNLQTAVTVARGCGMVAPQEHLIIVHATHPERGQPASLEFLPMESPTAVNGVKDPDQAASYTVEPDPRSRHLALSGPTFGIIVKHFPKLLPKVLVQGTVFARMAPEQKTELVCELQKLQYCVGMCGDGANDCGALKAADVGISLSQAEASVVSPFTSSMASIECVPMVIREGRCSLDTSFSVFKYMALYSLTQFISVLILYTINTNLGDLQFLAIDLVITTTVAVLMSRTGPALVLGRVRPPGALLSVPVLSSLLLQMVLVTGVQLGGYFLTLAQPWFVPLNRTVAAPDNLPNYENTVVFSLSSFQYLILAAAVSKGAPFRRPLYTNERARPVPPRLPAPPPAQAGLQEALQAAGTRAGRAALAAAARRPPEVVQAHGHPRHWNSLPLSHQLDPSPATPPPPPPTSLRLATVYTPPPRPPPPWGSVDYCPLPWTIPRRGGSPQLPSVLLSV

SEQ ID NO: 1430 - protein, 52 aa, Homo sapiens
MLTGYLYLMWRRKAFWSGTQRHPLPGGLKRRRRPGRGPWPAPGGQGVGPSAL

SEQ ID NO: 1431 - protein, 734 aa, Homo sapiens
MHESVHVGFLSIPSKEKGLGLLQLGLLLPLNPIGTYAHTFQSFPDQCQHAALPLTKCTINTAQAHGSHKASHLYSMGHIKNDSSTIIHTDFSHTKPLNKQGSVATELSIIIIIIIWLLLARFSSYRTLLHHHHHLVAFGKQGSVATELSSSSSSSSSSSSSGCFQQGSVATELSIIIIIIIIIIIIIWLLLARFSSYRTLLLLLLLLLLLIIIIIIWLLLARFSSYRTLLLLLLLLIIIIIWLLSARFSSYRTLLHHHQHHHLVAFGKQGSVATELSSSSSSSSSSSSSGCFQQGSVATELSIIIIIIIIIIIIIWLLLARFSSYRTLLHHHHHHHLVAFGKQGSVATELSIIIIIIIIIIIIIWLLLARFSSYRTLLHHHHHHHLVAFGKALARIIWLYRNTYSIGNQFQSKMPEYYSSTQCPISLVDYKLTTTTCLLWIQSPPKSESSLPGYKPPSPGSSMLDSSLTSTSSDHWVALLAVLQPSSRSDTHPLSGEPRPLLYPLPDPAVPFWTLRTPLSPRTPYRLFLLHSHNSARAPLRLCGQRGRAQAIGAEELPVPAVNKTWTCEPGQKGFRSAGNWRLAVGVDRRGDWRLSDLLLFADQAAVGNDGCPDPVGGVKESCTDTRTLTEGRVRLRAPHLVAERSAFRGRPPGTSRRGPGFILFAPFPPLKAVLDFLVYMDKGYNEGNILEILAYLVVHRSLDFIGQQNLKGRERENKRDHHMEDKFDAITSK

SEQ ID NO: 1432 - protein, 460 aa, Homo sapiens
MSWPPSGEIASPPELPSSPPPGLPEVAPDATSTGLPDTPAAPETSTNYPVECTEGSAGPQSLPLPILEPVKNPCSVKDQTPLQLSVEDTTSPNTKPCPPTPTTPETSPPPPPPPPSSTPCSAHLTPSSLFPSSLESSSEQKFYNFVILHARADEHIALRVREKLEALGVPDGATFCEDFQVPGRGELSCLQDAIDHSAFIILLLTSNFDCRLSLHQVNQAMMSNLTRQGSPDCVIPFLPLESSPARLSSDTASLLSGLVRLDEHSQIFARKVANTFKPHRLQARKAMWRKEQDTRALREQSQHLDGERMQAAALNAAYSAYLQSYLSYQAQMEQLQVAFGSHMSFGTGAPYGARMPFGGQVPLGAPPPFPTWPGCPQPPPLHAWQAGTPPPPSPQPAAFPQSLPFPQSPAFPTASPAPPQSPGLQPLIIHHAQMVQLGLNNHMWNQRGSQAPEDKTQEAE

SEQ ID NO: 1433 - protein, 382 aa, Homo sapiens
MEKCSVGGLELTEQTPALLGNMAMATSLMDIGDSFGHPACPLVSRSRNSPVEDDDDDDDVVFIESIQPPSISAPAIADQRNFIFASSKNEKPQGNYSVIPPSSRDLASQKGNISETIVIDDEEDIETNGGAEKKSSCFIEWGLPGTKNKTNDLDFSTSSLSRSKTKTGVRPFNPGRMNVAGDLFQNGEFATHHSPDSWISQSASFPSNQKQPGVDSLSPVALLRKQNFQPTAQQQLTKPAKITCANCKKPLQKGQTAYQRKGSAHLFCSTTCLSSFSHKRTQNTRSIICKKDASTKKANVILPVESSKSFQEFYSTSCLSPCENNWNLKKGVFNKSRCTICSKLAEVWIFIPKLLFRLTVIILTFKCYYVLFHLHNARVLDV

SEQ ID NO: 1434 - protein, 287 aa, Homo sapiens
MEKCSVGGLELTEQTPALLGNMAMATSLMDIGDSFGHPACPLVSRSRNSPVEDDDDDDDVVFIESIQPPSISAPAIADQRNFIFASSKNEKPQGNYSVIPPSSRDLASQKGNISETIVIDDEEDIETNGGAEKKSSCFIEWGLPGTKNKTNDLDFSTSSLSRSKTKTGVRPFNPGRMNVAGDLFQNGEFATHHSPDDASTKKANVILPVESSKSFQEFYRTSCLSPCENNWNLKKGVFNKSRCTICSKLAEVWIFIPKLLFRLTVIILTFKCYYGLFHLHNARVLDV

SEQ ID NO: 1435 - protein, 722 aa, Homo sapiens
MSLSMRDPVIPGTSMAYHPFLPHRAPDFAMSAVLGHQPPFFPALTLPPNGAAALSLPGALAKPIMDQLVGAAETGIPFSSLGPQAHLRPLKTMEPEEEVEDDPKVHLEAKELWDQFHKRGTEMVITKSGRRMFPPFKVRCSGLDKKAKYILLMDIIAADDCRYKFHNSRWMVAGKADPEMPKRMYIHPDSPATGEQWMSKVVTFHKLKLTNNISDKHGFTILNSMHKYQPRFHIVRANDILKLPYSTFRTYLFPETEFIAVTAYQNDKITQLKIDNNPFAKGFRDTGNGRREKRKQLTLQSMRVFDERHKKENGTSDESSSEQAAFNCFAQASSPAASTVGTSNLKDLCPSEGESDAEAESKEEHGPEACDAAKISTTTSEEPCRDKGSPAVKAHLFAAERPRDSGRLDKASPDSRHSPATISSSTRGLGAEERRSPVREGTAPAKVEEARALPGKEAFAPLTVQTDAAAAHLAQGPLPGLGFAPGLAGQQFFNGHPLFLHPSQFAMGGAFSSMAAAGMGPLLATVSGASTGVSGLDSTAMASAAAAQGLSGASAATLPFHLQQHVLASQGLAMSPFGSLFPYPYTYMAAAAAASLRQPQLRCTAPLLNLNTMRPRLRYSPYSIPVPVPDGSSLLTTALPSMAAAAGPLDGKVAALAASPASVAVDSGSELTSRSSTLSSSSMSLSPKLCAEKEAATSELQSIQRLVSGLEAKPDRSRSASP

SEQ ID NO: 1436 - protein, 342 aa, Homo sapiens
MAQVLIVGAGMTGSLCAALLRRQTSGPLYLAVWDKAEDSGGRMTTACSPHNPQCTADLGAQYITCTPHYAKKHQRFYDELLAYGVLRPLSSPIEGMVMKEGDCNFVAPQGISSIIKHYLKESGAEVYFRHRVTQINLRDDKWEVSKQTGSPEQFDLIVLTMPVPEILQLQGDITTLISECQRQQLEAVSYSSRYALGLFYEAGTKIDVPWAGQYITSNPCIRFVSIDNKKRNIESSEIGPSLVIHTTVPFGVTYLEHSIEDVQELVFQQLENILPGLPQPIATKCQKWRHSQVTNAAANCPGQMTLHHKPFLACGGDGFTQSNFDGCITSALCVLEALKNYI

SEQ ID NO: 1437 - protein, 255 aa, Homo sapiens
MLSVAARSGPFAPVLSATPEQPVLDLKRPFLSRESLSGQAVRRPLVASVGLNVPASVCYSHTDIKVPDFSEYRRLEVLDSTKSSRESSEARKGFSYLVTGVTTVGVAYAAKNAVTQFVSSMSASADVLALAKIEIKLSDIPEGKNMAFKWRGKPLFVRHRTQKEIEQEAAVELSQLRDPQHDLDRVKKPEWVILIGVCTHLGCVPIANAGDFGGYYCPCHGSHYDASGRIRLGPAPLNLEVPTYEFTSDDMVIVG

SEQ ID NO: 1438 - protein, 654 aa, Homo sapiens
MWVGRQRDSGVLSRPCPSTAALPEALLCSSAPAARRPSLCGATGGSCADFDSGVDFVRRESSGLWGPQPPLSPVKNYTEMFQDPVAFKDVAVNFTQEEWALLDISQKNLYREVMLETFWNLTSIGKKWKDQNIEYEYQNPRRNFRSVTEEKVNEIKEDSHCGETFTPVPDDRLNFQKKKASPEVKSCDSFVCEVGLGNSSSNMNIRGDTGHKACECQEYGPKPWKSQQPKKAFRYHPSLRTQERDHTGKKPYACKECGKNIIYHSSIQRHMVVHSGDGPYKCKFCGKAFHCLSLYLIHERTHTGEKPYECKQCGKSFSYSATHRIHERTHIGEKPYECQECGKAFHSPRSCHRHERSHMGEKAYQCKECGKAFMCPRYVRRHERTHSRKKLYECKQCGKALSSLTSFQTHIRMHSGERPYECKTCGKGFYSAKSFQRHEKTHSGEKPYKCKQCGKAFTRSGSFRYHERTHTGEKPYECKQCGKAFRSAPNLQSHGRTHTGEKPYQCKECGKAFRSASQLRIHRRIHTGEKPYECKKCGKAFRYVQNFRFHERTHNGEKPYECKECRKAFSLPTSFHRHEKTLEGNPMKASNVAKLSLLPVLFNIMKEFTLGRNPISVSNVRKPLFLPLLFNIMKGLTWERNPMSVCHVGKPSFF

SEQ ID NO: 1439 - protein, 296 aa, Homo sapiens
MLLGSLLPVKIIETDFEKAHRSKKILSLCNTFGGGVFLATCFNALLPAVREKLQKVLSLGHISTDYPLAETILLLGFFMTVFLEQLILTFRKEKPSFIDLETFNAGSDVGSDSEYESPFMGGARGHALYVEPHGHGPSLSVQGLSRASPVRLLSLAFALSAHSVFEGLALGLQEEGEKVVSLFVGVAVHETLVAVALGISMARSAMPLRDAAKLAVTVSAMIPLGIGLGLGIESAQGVPGSVASVLLQGLAGGTFLFITFLEILAKELEEKSDRLLKVLFLVLGYTVLAGMVFLKW

SEQ ID NO: 1440 - protein, 1452 aa, Homo sapiens
MTRGKSLDFSAPQFPHLESRNDNRTCHWCDTEIHIVNATISDTDCMKSAMVVALSKRSQEAEAAFLSVYKQLIEAPALWELKLKSRPALGDSRVQQGQHDPKTDNQNTQQKAGFKEGWLAEASEREAFGPGFKDPVPVFEAARSLDDRLQPPSFDPSGQPRRDLHTSWKRNPELLSPKALKATQAELLELRRKYDEEAASKADEVGLIMTNLEKANQRAEAAQREVESLREQLASVNSSIRLACCSPQGPSGDKVNFTLCSGPRLEAALASKDREILRLLKDVQHLQSSLQELEEASANQIADLERQLTAKSEAIEKLEEKLQAQSDYEEIKTELSILKAMKLASSTCSLPQGMAKPEDSLLIAKEAFFPTQKFLLEKPSLLASPEEDPSEDDSIKDSLGTEQSYPSPQQLPPPPGPEDPLSPSPGQPLLGPSLGPDGTRTFSLSPFPSLASGERLMMPPAAFKGEAGGLLVFPPAFYGAKPPTAPATPAPGPEPLGGPEPADGGGGGAAGPGAEEEQLDTAEIAFQVKEQLLKHNIGQRVFGHYVLGLSQGSVSEILARPKPWRKLTVKGKEPFIKMKQFLSDEQNVLALRTIQVRQRGSITPRIRTPETGSDDAIKSILEQAKKEIESQKGGEPKTSVAPLSIANGTTPASTSEDAIKSILEQARREMQAQQQALLEMEVAPRGRSVPPSPPERPSLATASQNGAPALVKQEEGSGGPAQAPLPVLSPAAFVQSIIRKVKSEIGDAGYFDHHWASDRGLLSRPYASVSPSLSSSSSSGYSGQPNGRAWPRGDEAPVPPEDEAAAGAEDEPPRTGELKAEGATAEAGARLPYYPAYVPRTLKPTVPPLTPEQYELYMYREVDTLELTRQVKEKLAKNGICQRIFGEKVLGLSQGSVSDMLSRPKPWSKLTQKGREPFIRMQLWLSDQLGQAVGQQPGASQASPTEPRSSPSPPPSPTEPEKSSQEPLSLSLESSKENQQPEGRSSSSLSGKMYSGSQAPGGIQEIVAMSPELDTYSITKRVKEVLTDNNLGQRLFGESILGLTQGSVSDLLSRPKPWHKLSLKGREPFVRMQLWLNDPHNVEKLRDMKKLEKKAYLKRRYGLISTGSDSESPATRSECPSPCLQPQDLSLLQIKKPRVVLAPEEKEALRKAYQLEPYPSQQTIELLSFQLNLKTNTVINWFHNYRSRMRREMLVEGTQDEPDLDPSGGPGILPPGHSHPDPTPQSPDSETEDQKPTVKELELQEGPEENSTPLTTQDKAQVRIKQEQMEEDAEEEAGSQPQDSGELDKGQGPPKEEHPDPPGNDGLPKVAPGPLLPGGSTPDCPSLHPQQESEAGERLHPDPLSFKSASESSRCSLEVSLNSPSAASSPGLMMSVSPVPSSSAPISPSPPGAPPAKVPSASPTADMAGALHPSAKVNPNLQRRHEKMANLNNIIYRLERAANREEALEWEF

SEQ ID NO: 1441 - protein, 353 aa, Homo sapiens
MAAATLRTPTQGTVTFEDVAVHFSWEEWGLLDEAQRCLYRDVMLENLALLTSLDVHHQKQHLGEKHFISNVGRALFVKTCTFHVSGEPSTCREFGKDFLAKLGFLHQQAAHTGEQSNSKSDGGAISHRGKTHYNCGEHTKAFSGKHTLVQQQRTLTTERCYICSECGKSFSKSYSLNDHWRLHTGEKPYECRECGKSFRQSSSLIQHRRGHTAVRPHEGDECGKLFSNPSNLIKHRRVHTGERPYECSECGKSFNQRSALLQHRGGHTGERPYECSECGKFFPYSSSLRKHQRVHTGSRPYECSECGKSFTQNSGLIKHRRVHTGEKPYECTECGKSFSHNSSLIKHQRIHSR

SEQ ID NO: 1442 - protein, 267 aa, Homo sapiens
MKGISGGVRVAALAARAEREELPVPAMEPQPTAWGSPHPEAVLQLEVAPESSGPCTDTAKDQQSDKLPDLMPPAVATGLSPGAESIAGDRRGREEVASMAPASSSHAAPSPGHGASLGVRDQGVQSELLYLTKERPLLFTRATALLPQDLFILPVLGLSICKLEVLRAGKGGCEEGFGQLLLLSEVASSSRHGGLSTTGLLGYLPLICSLVRALVNRQARGAGTRQGLQRVQYQIFQTQHLCPGVSKLSSALGFIHTVKLPVYANDM

SEQ ID NO: 1443 - protein, 235 aa, Homo sapiens
MPWALLLLTLLTHSAVSVVQAGLTQPPSVSKGLRQTATLTCTGNSNNVGDQGASWLQQHQGHPPKLLSYRNNNRPSGISERLSASRSGNTASLTITGLQPEDEADYYCSAWDSSLSAWVFGGGTKLTVLGQPKAAPSVTLFPPSSEELQANKATLVCLISDFYPGAVTVAWKADSSPVKAGVETTTPSKQSNNKYAASSYLSLTPEQWKSHRSYSCQVTHEGSTVEKTVAPTECS

SEQ ID NO: 1444 - protein, 461 aa, Homo sapiens
MCVRSCFQSPRLQWVWRTAFLKHTQRRHQGSHRWTHLGGSTYRAVIFDMGGVLIPSPGRVAAEWEVQNRIPSGTILKALMEGGENGPWMRFMRAEITAEGFLREFGRLCSEMLKTSVPVDSFFSLLTSERVAKQFPVMTEAITQIRAKGLQTAVLSNNFYLPNQKSFLPLDRKQFDVIVESCMEGICKPDPRIYKLCLEQLGLQPSESIFLDDLGTNLKEAARLGIHTIKVNDPETAVKELEALLGFTLRVGVPNTRPVKKTMEIPKDSLQKYLKDLLGIQTTGPLELLQFDHGQSNPTYYIRLANRDLVLRKKPPGTLLPSAHAIEREFRIMKALANAGVPVPNVLDLCEDSSVIGTPFYVMEYCPGLIYKDPSLPGLEPSHRRAIYTAMNTVLCKIHSVDLQAVGLEDYGKQGSTTWCFIQKSQRCLLSLTGNFLPWATPLLMWPTAAWLITCHPVFPC

SEQ ID NO: 1445 - protein, 205 aa, Homo sapiens
MEMEQEKMTMNKELSPDAAAYCCSACHGDETWSYNHPIRGRAKSRSLSASPALGSTKEFRRTRSLHGPCPVTTFGPKACVLQNPQTIMHIQDPASQRLTWNKSPKSVLVIKKMRDASLLQPFKELCTHLMEENMIVYVEKKVLEDPAIASDESFGAVKKKFCTFREDYDDISNQIDFIICLGGDGTLLYASSLFQGTQLLFSGVG

SEQ ID NO: 1446 - protein, 549 aa, Homo sapiens
MTTEGHHWLTNARLTKYQSLPCENPHITIEVCNTLNPTTLLPVSESPGEHNCVEVLDSVYSSRPDLRDQPWASSVDWELYMDGSSFINSQGERCAGYAVVTLDAVIKAKLWLQGTSAQKAELIALTRAVELSEGQESLEELLGRYFYVSHLPAFAKAVAQLCITCRQHNARQSPTVSPHIQAYGAAPFEDLQVDFTEMPKCGGNKYLLVLTCTYSGWVEAYPTRTEKAYEVTRVLLRDLIPRFGLPLRIGSHNGPVFVADLDCVEINVDTGVIWATWIKNEKDPVQLQKGKSGPSCTKGQCNPLELVITNPLDPRWKKGERVTLGINGAGLNPRVNILVRGEVYKCSLEPVFQTFYDELNVPITEFPGKTRNLFLQLAEHVAQSLTVTSCYVCGGTVIADQWPWEARELVPTDPVPDEFPAQKNHPDNFWVLKASIIRQYYIARVEKDFTLPVGRLHGGVQTTQRKIHSVNFQSCRPFRPTQNPTGTGQPPLGYTGYVDIEPTLSCLTSSCVIGTIKPSFFLLSIKTGELLGFPVYASREKHSYKKLKQ

SEQ ID NO: 1447 - protein, 111 aa, Homo sapiens
MSWRGRSTYRPRPRRSLQPPELIGAMLEPTDEEPKEEKPPTKSRNPTPDQKREDDQGAAEIQVPDLEADLQELCQTKTGDGCEGGTDVKGKILPKAEHFKMPEAGEGKSQV

SEQ ID NO: 1448 - protein, 58 aa, Homo sapiens
MPAPGGTQDTSALSGEDEESLSTQTPTPSRTSWGPHRSCYPSCPARESNRRLWPRKAS

SEQ ID NO: 1449 - protein, 184 aa, Homo sapiens
MYTYIFCPNCVSYKMKTDHFSLRYLHSSCAEDNKSSVDSSGQAAHPSKGKFFPHGTHWGTQCRGHISVLGWQCSCPSTGCRVGLGLAMCQTHAYIHTHTHTHTHTPPDYGAHHTDPLQRWGLGPRTIRSRAPPPAVSRPKPSRASEPWGITQKRWAPRLAPSTPGAQGAWEMRQGRSFTPDQAD

SEQ ID NO: 1450 - protein, 1069 aa, Homo sapiens
MPTQTDVKLKFKPLSKKVVSAALQFSLSCIFLREGKATDEDMQSLASLMSMKQADIGNLDDFEEDNEDDDENRVNQEEKAAKITELINKLNFLDEAEKDLATVNSNPFDDPDAAELNPFGDPDSEEPITETASPRKTEDSFYNNSYNPFKEVQTPQYLNPFDEPEAFVTIKDSPPQSTKRKNIRPVDMSKYLYADSSKTEEEELDESNPFYEPKSTPPPNNLVNPVQELETERRVKRKAPAPPVLSPKTGVLNENTVSAGKDLSTSPKPSPIPSPVLGRKPNASQSLLVWCKEVTKNYRGVKITNFTTSWRNGLSFCAILHHFRPDLIDYKSLNPQDIKENNKKAYDGFASIGISRLLEPSDMVLLAIPDKLTVMTYLYQIRAHFSGQELNVVQIEENSSKSTYKVGNYETDTNSSVDQEKFYAELSDLKREPELQQPISGAVDFLSQDDSVFVNDSGVGESESEHQTPDDHLSPSTASPYCRRTKSDTEPQKSQQSSGRTSGSDDPGICSNTDSTQAQVLLGKKRLLKAETLELSDLYVSDKKKDMSPPFICEETDEQKLQTLDIGSNLEKEKLENSRSLECRSDPESPIKKTSLSPTSKLGYSYSRDLDLAKKKHASLRQTESDPDADRTTLNHADHSSKIVQHRLLSRQEELKERARVLLEQARRDAALKAGNKHNTNTATPFCNRQLSDQQDEERRRQLRERARQLIAEARSGVKMSELPSYGEMAAEKLKERSKASGDENDNIEIDTNEEIPEGFVVGGGDELTNLENDLDTPEQNSKLVDLKLKKLLEVQPQVANSPSSAAQKAVTESSEQDMKSGTEDLRTERLQKTTERFRNPVVFSKDSTVRKTQLQSFSQYIENRPEMKRQRSIQEDTKKGNEEKAAITETQRKPSEDEVLNKGFKDTSQYVVGELAALENEQKQIDTRAALVEKRLRYLMDTGRNTEEEEAMMQEWFMLVNKKNALIRRMNQLSLLEKEHDLERRYELLNRELRAMLAIEDWQKTEAQKRREQLLLDELVALVNKRDALVRDLDAQEKQAEEEDEHLERTLEQNKGKMAKKEEKCVLQ

SEQ ID NO: 1451 - protein, 1033 aa, Homo sapiens
MPTQTDVKLKFKPLSKKVVSAALQFSLSCIFLREGKATDEDMQSLASLMSMKQADIGNLDDFEEDNEDDDENRVNQEEKAAKITELINKLNFLDEAEKDLATVNSNPFDDPDAAELNPFGDPDSEEPITETASPRKTEDSFYNNSYNPFKEVQTPQYLNPFDEPEAFVTIKDSPPQSTKRKNIRPVDMSKYLYADSSKTEEEELDESNPFYEPKSTPPPNNLVNPVQELETERRVKRKAPAPPVLSPKTGVLNENTVSAGKDLSTSPKPSPIPSPVLGRKPNASQSLLVWCKEVTKNYRGVKITNFTTSWRNGLSFCAILHHFRPDLIDYKSLNPQDIKENNKKAYDGFASIGISRLLEPSDMVLLAIPDKLTVMTYLYQIRAHFSGQELNVVQIEENSSKSTYKVGNYETDTNSSVDQEKFYAELSDLKREPELQQPISGAVDFLSQDDSVFVNDSGVGESESEHQTPDDHLSPSTASPYCRRTKSDTEPQKSQQSSGRTSGSDDPGICSNTDSTQAQVLLGKKRLLKAETLELSDLYVSDKKKDMSPPFICEETDEQKLQTLDIGSNLEKEKLENSRSLECRSDPESPIKKTSLSPTSKLGYSYSRDLDLAKKKHASLRQTESDPDADRTTLNHADHSSKIVQHRLLSRQEELKERARVLLEQARRDAALKAGNKHNTNTATPFCNRQLSDQQDEERRRQLRERARQLIAEARSGVKMSELPSYGEMAAEKLKERSKASGEQNSKLVDLKLKKLLEVQPQVANSPSSAAQKAVTESSEQDMKSGTEDLRTERLQKTTERFRNPVVFSKDSTVRKTQLQSFSQYIENRPEMKRQRSIQEDTKKGNEEKAAITETQRKPSEDEVLNKGFKDTSQYVVGELAALENEQKQIDTRAALVEKRLRYLMDTGRNTEEEEAMMQEWFMLVNKKNALIRRMNQLSLLEKEHDLERRYELLNRELRAMLAIEDWQKTEAQKRREQLLLDELVALVNKRDALVRDLDAQEKQAEEEDEHLERTLEQNKGKMAKKEEKCVLQ

SEQ ID NO: 1452 - protein, 301 aa, Homo sapiens
MRRTALILGSGLLSFVAFWNSVTWHLQRFWGASGYFWQAQWERLLTTFEGKEWILFFIGAIQVPCLFFWSFNGLLLVVDTTGKPNFISRYRIQVGKNEPVDPVKLHQCMISFPMVVFLYPFLKWWRDPCRRELPTFHWFLLELAIFTLIEEVLFYYSHRLLHHPTFYKKIHKKHHEWTAPIGVISLYAHPIEHAVSNMLPVIVGPLVMGSHLSSITMWFSLALIITTISHCGYHLPFLPSPEFHDYHHLKFNQCYGVLGVLDHLHGTDTMFKQTKAYERHVLLLGFTPLSESIPDSPKRME

SEQ ID NO: 1453 - protein, 565 aa, Homo sapiens [sequence omitted]

SEQ ID NO: 1454 - protein, 666 aa, Homo sapiens
MAASRKPPRVRVNHQDFQLRNLRIIEPNEVTHSGDTGVETDGRMPPKVTSELLRQLRQAMRNSEYVTEPIQAYIIPSGDAHQSEYIAPCDCRRAFVSGFDGSAGTAIITEEHAAMWTDGRYFLQAAKQMDSNWTLMKMGLKDTPTQEDWLVSVLPEGSRVGVDPLIIPTDYWKKMAKVLRSAGHHLIPVKENLVDKIWTDRPERPCKPLLTLGLDYTGISWKDKVADLRLKMAERNVMWFVVTALDEIAWLFNLRGSDVEHNPVFFSYAIIGLETIMLFIDGDRIDAPSVKEHLLLDLGLEAEYRIQVHPYKSILSELKALCADLSPREKVWVSDKASYAVSETIPKDHRCCMPYTPICIAKAVKNSAESEGMRRAHIKDAVALCELFNWLEKEVPKGGVTEISAADKAEEFRRQQADFVDLSFPTISSTGPNGAIIHYAPVPETNRTLSLDEVYLIDSGAQYKDGTTDVTRTMHFGTPTAYEKECFTYVLKGHIAVSAAVFPTGTKGHLLDSFARSALWDSGLDYLHGTGHGVGSFLNVHEGPCGISYKTFSDEPLEAGMIVTDEPGYYEDGAFGIRIENVVLVVPVKTKYNFNNRGSLTFEPLTLVPIQTKMIDVDSLTDKECDWLNNYHLTCRDVIGKELQKQGRQEALEWLIRETQPISKQH

SEQ ID NO: 1455 - protein, 1552 aa, Homo sapiens [sequence omitted]

SEQ ID NO: 1456 - protein, 283 aa, Homo sapiens [sequence omitted]

SEQ ID NO: 1457 - protein, 251 aa, Homo sapiens
MLPLSDGPEGSSSRPQMIRGRLCDDTKPETFNQLWTVEEQKKLEQLLIKYPPEEVESRRWQKIADELGNRTAKQSSTSRRQHPLNKHLFKPSTFMTSHEPPVYMDEDDDRSCFHSHMNTAVEDASDDESIPIMYRNLPEYKELLQFKKLKKQKLQQMQAESGFVQHVGFKCDNCGIEPIQGVRWHCQDCPPEMSLDFCDSCSDCLHETDIHKEDHQLEPIYRSETFLDRDYCVSQGTSYNYLDPNYFPANR

SEQ ID NO: 1458 - protein, 466 aa, Homo sapiens
MASHETMAAGTLYTYPENWRAFKALIAAQYSGAHVRVLSAPPHFHFGQTNRTPEFLRKFPAGKVPAFEGDDGFCVFESNAIAYYVSNEELRGSTPEAAAQVVQWVSFADSDIVPPASTWVFPTLGIMHHNKQATENAKEEVRRILGLLDAYLKTRTFLVGERVTLADITVVCTLLWLYKQVLEPSFRQAFPNTNRWFLTCINQPQFRAVLGEVKLCEKMAQFDAKKFAETQPKKDTPRKEKGSREEKQKPQAERKEEKKAAAPAPEEEMDECEQALAAEPKAKDPFAHLPKSTFVLDEFKRKYSNEDTLSVALPYFWEHFDKDGWSLWYSEYRFPEELTQTFMSCNLITGMFQRLDKLRKNAFASVILFGTNNSSSISGVWVFRGQELAFPLSPDWQVDYESYTWRKLDPGSEETQTLVREYFSWEGAFQHVAKPSIRARSSSEHLLPSPSCLHLPFREMGVIKGN

SEQ ID NO: 1459 - protein, 125 aa, Homo sapiens [sequence omitted]

SEQ ID NO: 1460 - protein, 635 aa, Homo sapiens
MPLPLLPMDLKGEPGPPGKPGPWGPPGPPGFPGKPGHGKPGLHGQPGPAGPPGFSRMGKAGPPGLPGNVGPPGQPGLRGEPGIRGDQGLRGPPGPPGLPGPSGITIPGKPGAQGVPGPPGFQGEPGPQGEPGPPGDRGLKGDNGVGQPGLPGAPGQGGAPGPPGLPGPAGLGKPGLDGLPGAPGDKGESGPPGVPGPRGEPGAVGPKGPPGVDGVGVPGAAGLPGPQGPSGAKGEPGTRGPPGLIGPTGYGMPGLPGPKGDRGPAGVPGLLGDRGEPGEDGEPGEQGPQGLGGPPGLPGSAGLPGRRGPPGPKGEAGPGGPPGVPGIRGDQGPSGLAGKPGVPGERGLPGAHGPPGPTGPKGEPGFTGRPGGPGVAGALGQKGDLGLPGQPGLRGPSGIPGLQGPAGPIGPQGLPGLKGEPGLPGPPGEGRAGEPGTAGPRGPPGVPGSPGITGPPGLPGPPGAPGAFDETGIAGLHLPNGGVEGAVLGKGGKPQFGLGELSAHATPAFTAVLTSPLPASGMPVKFDRTLYNGHSGYNPATGIFTCPVGGVYYFAYHVHVKGTNVWVALYKNNVPATYTYDEYKKGYLDQASGGAVLQLRPNDQVWVQMPSDQANGLYSTEYIHSSFSGFLLCPT

SEQ ID NO: 1461 - protein, 240 aa, Homo sapiens
MDSPRAGTHQGPLDAETEVGADRCTSTAYQEQRPQVEQVGKQAPLSPGLPAMGGPGPGPCEDPAGAGGAGAGGSEPLVTVTVQCAFTVALRARRGADLSSLRALLGQALPHQAQLGQLSYLAPGEDGHWVPIPEEESLQRAWQDAAACPRGLQLQCRGAGGRPVLYQVVAQHSYSAQGPEDLGFRQGDTVDVLCEVDQAWLEGHCDGRIGIFPKCFVVPAGPRMSGAPGRLPRSQQGDQP

SEQ ID NO: 1462 - protein, 361 aa, Homo sapiens
MWVLTPAAFAGKLLSVFRQPLSSLWRSLVPLFCWLRATFWLLATKRRKQQLVLRGPDETKEEEEDPPLPTTPTSVNYHFTRQCNYKCGFCFHTAKTSFVLPLEEAKRGLLLLKEAGMEKINFSGGEPFLQDRGEYLGKLVRFCKVELRLPSVTIVSNGSLIRERWFQNYGEYLDILAISCDSFDEEVNVLIGRGQGKKNHVENLQKLRRWCRDYRVAFKINSVINRFNVEEDMTEQIKALNPVRWKVFQCLLIEGENCGEDALREAERFVIGDEEFERFLERHKEVSCLVPESNQKMKDSYLILDEYMRFLNCRKGRKDPSKSILDVGVEEAIKFSGFDEKMFLKRGGKYIWSKADLKLDW

SEQ ID NO: 1463 - protein, 1030 aa, Homo sapiens
MGFDLQNVWRVSHINSNYKLCPSYPQKLLVPVWITDKELENVASFRSWKRIPVVVYRHLRNGAAIARCSQPEISWWGWRNADDEYLVTSIAKACALDPGTRATGGSLSTGNNDTSEACDADFDSSLTACSGVESTAAPQKLLILDARSYTAAVANRAKGGGCECEEYYPNCEVVFMGMANIHAIRNSFQYLRAVCSQMPDPSNWLSALESTKWLQHLSVMLKAAVLVANTVDREGRPVLVHCSDGWDRTPQIVALAKILLDPYYRTLEGFQVLVESDWLDFGHKFGDRCGHQENVEDQNEQCPVFLQWLDSVHQLLKQFPCMFEFNEAFLVKLVQHTYSCLYGTFLANNPCEREKRNIYKRTCSVWALLRAGNKNFHNFLYTPSSDMVLHPVCHVRALHLWTAVYLPASSPCTLGEENMDLYLSPVAQSQEFSGRSLDRLPKTRSMDDLLSACDTSSPLTRTSSDPNLNNHCQEVRVGLEPWHSNPEGSETSFVDSGVGGPQQTVGEVGLPPPLPSSQKDYLSNKPFKSHKSCSPSYKLLNTAVPREMKSNTSDPEIKVLEETKGPAPDPSAQDELGRTLDGIGEPPEHCPETEAVSALSKVISNKCDGVCNFPESSQNSPTGTPQQAQPDSMLGVPSKCVLDHSLSTVCNPPSAACQTPLDPSTDFLNQDPSGSVASISHQEQLSSVPDLTHGEEDIGKRGNNRNGQLLENPRFGKMPLELVRKPISQSQISEFSFLGSNWDSFQGMVTSFPSGEATPRRLLSYGCCSKRPNSKQMRATGPCFGGQWAQREGVKSPVCSSHSNGHCTGPGGKNQMWLSSHPKQVSSTKPVPLNCPSPVPPLYLDDDGLPFPTDVIQHRLRQIEAGYKQEVEQLRRQVRELQMRLDIRHCCAPPAEPPMDYEDDFTCLKESDGSDTEDFGSDHSEDCLSEASWEPVDKKETEVTRWVPDHMASHCYNCDCEFWLAKRRHHCRNCGNVFCAGCCHLKLPIPDQQLYDPVLVCNSCYEHIQVSRARELMSQQLKKPIATASS

SEQ ID NO: 1464 - protein, 557 aa, Homo sapiens
MTFFSSVADFIGLDPRIAAWLIDPSDATPSFEDLVEKYCEKSITVKVNSTYGNSSRNIVNQNVRENLKTLYRLTMDLCSKLKDYGLWQLFRTLELPLIPILAVMESHAIQVNKEEMEKTSALLGARLKELEQEAHFVAGERFLITSNNQLREILFGKLKLHLLSQRNSLPRTGLQKYPSTVSEALNALRDLHPLPKIILEYRQVHKIKSTFVDGLLACMKKGSISSTWNQTGTVTGRLSAKHPNIQGISKHPIQITTPKNFKGKEDKILTISPRAMFVSSKGHTFLAADFSQIELRILTHLSGDPELLKLFQESERDDVFSTLTSQWKDVPVEQVTHADREQTKKVVYAVVYGAGKERLAACLGVPIQEAAQFLESFLQKYKKIKDFARAAIAQCHQTGCVVSIMGRRRPLPRIHAHDQQLRAQAERQAVNFVVQGSAADLCKLAMIHVFTAVAASHTLTARLVAQIHDELLFEVEDPQIPECAALVRRTMESLEQVPLKVSLSAGRSWGHLVPLQEAWGPPPGPCRTESPSNSLAAPGSPASTQPPPLHFSPSFCL

SEQ ID NO: 1465 - protein, 272 aa, Homo sapiens
MKGKKGIVAASGSETEDEDSMDIPLDLSSSAGSGKRRRRGNLPKESVQILRDWLYEHRYNAYPSEQEKALLSQQTHLSTLQVCNWFINARRRLLPDMLRKDGKDPNQFTISRRGAKISETSSVESVMGIKNFMPALEETPFHSCTAGPNPTLGRPLSPKPSSPGSVLARPSVICHTTVTALKDVPFSLCQSVGVGQNTDIQQIAAKNFTDTSLMYPEDTCKSGPSTNTQSGLFNTPPPTPPDLNQDFSGFQLLVDVALKRAAEMELQAKLTA

SEQ ID NO: 1466 - protein, 343 aa, Homo sapiens
MLATRLSRPLSRLPGKTLSACDRENGARRPLLLGSTSFIPIGRRTYASAAEPVGSKAVLVTGCDSGFGFSLAKHLHSKGFLVFAGCLMKDKGHDGVKELDSLNSDRLRTVQLNVCSSEEVEKVVEIVRSSLKDPEKGMWGLVNNAGISTFGEVEFTSLETYKQVAEVNLWGTVRMTKSFLPLIRRAKGRVVNISSMLGRMANPARSPYCITKFGVEAFSDCLRYEMYPLGVKVSVVEPGNFIAATSLYSPESIQAIAKKMWEELPEVVRKDYGKKYFDEKIAKMETYCSSGSTDTSPVIDAVTHALTATTPYTRYHPMDYYWWLRMQIMTHLPGAISDMIYIR

SEQ ID NO: 1467 - protein, 1096 aa, Homo sapiens
MMPMILTVFLSNNEQILTEVPITPETTCRDVVEFCKEPGEGSCHLAEVWRGNERPIPFDHMMYEHLQKWGPRREEVKFFLRHEDSPTENSEQGGRQTQEQRTQRNVINVPGEKRTENGVGNPRVELTLSELQDMAARQQQQIENQQQMLVAKEQRLHFLKQQERRQQQSISENEKLQKLKERVEAQENKLKKIRAMRGQVDYSKIMNGNLSAEIERFSAMFQEKKQEVQTAILRVDQLSQQLEDLKKGKLNGFQSYNGKLTGPAAVELKRLYQELQIRNQLNQEQNSKLQQQKELLNKRNMEVAMMDKRISELRERLYGKKIQACEKVFLNRVNGTSSPQSPLSTSGRVAAVGPYIQVPSAGSFPVLGDPIKPQSLSIASNAAHGRSKSANDGNWPTLKQNSSSSVKPVQVAGADWKDPSVEGSVKQGTVSSQPVPFSALGPTEKPGIEIGKVPPPIPGVGKQLPPSYGTYPSPTPLGPGSTSSLERRKEGSLPRPSAGLPSRQRPTLLPATGSTPQPGSSQQIQQRISVPPSPTYPPAGPPAFPAGDSKPELPLTVAIRPFLADKGSRPQSPRKGPQTVNSSSIYSMYLQQATPPKNYQPAAHSALNKSVKAVYGKPVLPSGSTSPSPLPFLHGSLSTGTPQPQPPSESTEKEPEQDGPAAPADGSTVESLPRPLSPTKLTPIVHSPLRYQSDADLEALRRKLANAPRPLKKRSSITEPEGPGGPNIQKLLYQRFNTLAGGMEGTPFYQPSPSQDFMGTLADVDNGNTNANGNLEELPPAQPTAPLPAEPAPSSDANDNELPSPEPEELICPQTTHQTAEPAEDNNNNVATVPTTEQIPSPVAEAPSPGEEQVPPAPLPPASHPPATSTNKRTNLKKPNSERTGHGLRVRFNPLALLLDASLEGEFDLVQRIIYEVEDPSKPNDEGITPLHNAVCAGHHHIVKFLLDFGVNVNAADSDGWTPLHCAASCNSVHLCKQLVESGAAIFASTISDIETAADKCEEMEEGYIQCSQFLYGVQEKLGVMNKGVAYALWDYEAQNSDELSFHEGDALTILRRKDESETEWWWARLGDREGYVPKNLLGLYPRIKPRQRTLA

SEQ ID NO: 1468 - protein, 831 aa, Homo sapiens
MHVDMDCFFVSVGIRNRPDLKGKPVAVTSNRGTGRAPLRPGANPQLEWQYYQNKILKGKADIPDSSLWENPDSAQANGIDSVLSRAEIASCSYEARQLGIKNGMFFGHAKQLCPNLQAVPYDFHAYKEVAQTLYETLASYTHNIEAVSCDEALVDITEILAETKLTPDEFANAVRMEIKDQTKCAASVGIGSNILLARMATRKAKPDGQYHLKPEEVDDFIRGQLVTNLPGVGHSMESKLASLGIKTCGDLQYMTMAKLQKEFGPKTGQMLYRFCRGLDDRPVRTEKERKSVSAEINYGIRFTQPKEAEAFLLSLSEEIQRRLEATGMKGKRLTLKIMVRKPGAPVETAKFGGHGICDNIARTVTLDQATDNAKIIGKAMLNMFHTMKLNISDMRGVGIHVNQLVPTNLNPSTCPSRPSVQSSHFPSGSYSVRDVFQVQKAKKSTEEEHKEVFRAAVDLEISSASRTCTFLPPFPAHLPTSPDTNKAESSGKWNGLHTPVSVQSRLNLSIEVPSPSQLDQSVLEALPPDLREQVEQVCAVQQAESHGDKKKEPVNGCNTGILPQPVGTVLLQIPEPQESNSDAGINLIALPAFSQVDPEVFAALPAELQRELKAAYDQRQRQGENSTHQQSASASVPKNPLLHLKAAVKEKKRNKKKKTIGSPKRIQSPLNNKLLNSPAKTLPGACGSPQKLIDGFLKHEGPPAEKPLEELSASTSGVPGLSSLQSDPAGCVRPPAPNLAGAVEFNDVKTLLREWITTISDPMEEDILQVVKYCTDLIEEKDLEKLDLVIKYMKRLMQQSVESVWNMAFDFILDNVQVVLQQTYGSTLKVT

SEQ ID NO: 1469 - protein, 1202 aa, Homo sapiens
MNTKDTTEVAENSHHLKIFLPKKLLECLPRCPLLPPERLRWNTNEEIASYLITFEKHDEWLSCAPKTRPQNGSIILYNRKKVKYRKDGYLWKKRKDGKTTREDHMKLKVQGMECLYGCYVHSSIVPTFHRRCYWLLQNPDIVLVHYLNVPALEDCGKGCSPIFCSISSDRREWLKWSREELLGQLKPMFHGIKWSCGNGTEEFSVEHLVQQILDTHPTKPAPRTHACLCSGGLGSGSLTHKCSSTKHRIISPKVEPRALTLTSIPHPHPPEPPPLIAPLPPELPKAHTSPSSSSSSSSSGFAEPLEIRPSPPTSRGGSSRGGTAILLLTGLEQRAGGLTPTRHLAPQADPRPSMSLAVVVGTEPSAPPAPPSPAFDPDRFLNSPQRGQTYGGGQGVSPDFPEAEAAHTPCSALEPAAALEPQAAARGPPPQSVAGGRRGNCFFIQDDDSGEELKGHGAAPPIPSPPPSPPPSPAPLEPSSRVGRGEALFGGPVGASELEPFSLSSFPDLMGELISDEAPSIPAPTPQLSPALSTITDFSPEWSYPEGGVKVLITGPWTEAAEHYSCVFDHIAVPASLVQPGVLRCYCPAHEVGLVSLQVAGREGPLSASVLFEYRARRFLSLPSTQLDWLSLDDNQFRMSILERLEQMEKRMAEIAAAGQVPCQGPDAPPVQDEGQGPGFEARVVVLVESMIPRSTWKGPERLAHGSPFRGMSLLHLAAAQGYARLIETLSQWRSVETGSLDLEQEVDPLNVDHFSCTPLMWACALGHLEAAVLLFRWNRQALSIPDSLGRLPLSVAHSRGHVRLARCLEELQRQEPSVEPPFALSPPSSSPDTGLSSVSSPSELSDGTFSVTSAYSSAPDGSPPPAPLPASEMTMEDMAPGQLSSGVPEAPLLLMDYEATNSKGPLSSLPALPPASDDGAAPEDADSPQAVDVIPVDMISLAKQIIEATPERIKREDFVGLPEAGASMRERTGAVGLSETMSWLASYLENVDHFPSSTPPSELPFERGRLAVPSAPSWAEFLSASTSGKMESDFALLTLSDHEQRELYEAARVIQTAFRKYKGRRLKEQQEVAAAVIQRCYRKYKQLTWIALKFALYKKMTQAAILIQSKFRSYYEQKRFQQSRRAAVLIQQHYRSYRRRPGPPHRTSATLPARNKGSFLTKKQDQAARKIMRFLRRCRHRMRELKQNQELEGLPQPGLAT

SEQ ID NO: 1470 - protein, 696 aa, Homo sapiens
MKAPIPHLILLYATFTQSLKVVTKRGSADGCTDWSIDIKKYQVLVGEPVRIKCALFYGYIRTNYSLAQSAGLSLMWYKSSGPGDFEEPIAFDGSRMSKEEDSIWFRPTLLQDSGLYACVIRNSTYCMKVSISLTVGENDTGLCYNSKMKYFEKAELSKSKEISCRDIEDFLLPTREPEILWYKECRTKTWRPSIVFKRDTLLIREVREDDIGNYTCELKYGGFVVRRTTELTVTAPLTDKPPKLLYPMESKLTIQETQLGDSANLTCRAFFGYSGDVSPLIYWMKGEKFIEDLDENRVWESDIRILKEHLGEQEVSISLIVDSVEEGDLGNYSCYVENGNGRRHASVLLHKRELMYTVELAGGLGAILLLLVCLVTIYKCYKIEIMLFYRNHFGAEELDGDNKDYDAYLSYTKVDPDQWNQETGEEERFALEILPDMLEKHYGYKLFIPDRDLIPTGTYIEDVARCVDQSKRLIIVMTPNYVVRRGWSIFELETRLRNMLVTGEIKVILIECSELRGIMNYQEVEALKHTIKLLTVIKWHGPKCNKLNSKFWKRLQYEMPFKRIEPITHEQALDVSEQGPFGELQTVSAISMAAATSTALATAHPDLRSTFHNTYHSQMRQKHYYRSYEYDVPPTGTLPLTSIGNQHTYCNIPMTLINGQRPQTKSSREQNPDEAHTNSAILPLLPRETSISSVIW

SEQ ID NO: 1471 - protein, 558 aa, Homo sapiens
MAKKVAVIGAGVSGLSSIKCCVDEDLEPTCFERSDDIGGLWKFTESSKDGMTRVYKSLVTNVCKEMSCYSDFPFHEDYPNFMNHEKFWDYLQEFAEHFDLLKYIQFKTTVCSITKRPDFSETGQWDVVTETEGKQNRAVFDAVMVCTGHFLNPHLPLEAFPGIHKFKGQILHSQEYKIPEGFQGKRVLVIGLGNTGGDIAVELSRTAAQVLLSTRTGTWVLGRSSDWGYPYNMMVTRRCCSFIAQVLPSRFLNWIQERKLNKRFNHEDYGLSITKGKKAKFIVNDELPNCILCGAITMKTSVIEFTETSAVFEDGTVEENIDVVIFTTGYTFSFPFFEEPLKSLCTKKIFLYKQVFPLNLERATLAIIGLIGLKGSILSGTELQARWVTRVFKGLCKIPPSQKLMMEATEKEQLIKRGVFKDTSKDKFDYIAYMDDIAACIGTKPSIPLLFLKDPRLAWEVFFGPCTPYQYRLMGPGKWDGARNAILTQWDRTLKPLKTRIVPDSSKPASMSHYLKAWGAPVLLASLLLICKSSLFLKLVRDKLQDRMSPYLVSLWRG

SEQ ID NO: 1472 - protein, 1134 aa, Homo sapiens
MAGISQNAKTGDLPAFGECVGIASKALCGLTEAAAQAAYLVGIFDPNSQAGHQGLVDPIQFARANQAIQMACQNLVDPGSSPSQVLSAATIVAKHTSALCNACRIASSKTANPVAKRHFVQSAKEVANSTANLVKTIKALDGDFSEDNRNKCRIATAPLIEAVENLTAFASNPEFVSIPAQISSEGSQAQEPILVSAKTMLESSSYLIRTARSLAINPKDPPTWSVLAGHSHTVSDSIKSLITSIRDKAPGQRECDYSIDGINRCIRDIEQASLAAVSQSLATRDDISVEALQEQLTSVVQEIGHLIDPIATAARGEAAQLGHKVTQLASYFEPLILAAVGVASKILDHQQQMTVLDQTKTLAESALQMLYAAKEGGGNPKAQHTHDAITEAAQLMKEAVDDIMVTLNEAASEVGLVGGMVDAIAEAMSKLDEGTPPEPKGTFVDYQTTVVKYSKSIAVTAQEMMTKSVTNPEELGGLASQMTSDYGHLAFQGQMAAATAEPEEIGFQIRTRVQDLGHGCIFLVQKAGALQVCPTDSYTKRELIECARAVTEKVSLVLSALQAGNKGTQACITAATAVSGIIADLDTTIMFATAGTLNAENSETFADHRENILKTAKALVEDTKLLVSGAASTPDKLAQAAQSSAATITQLAEVVKLGAASLGSDDPETQVVLINAIKDVAKALSDLISATKGAASKPVDDPSMYQLKGAAKVMVTNVTSLLKTVKAVEDEATRGTRALEATIECIKQELTVFQSKDVPEKTSSPEESIRMTKGITMATAKAVAAGNSCRQEDVIATANLSRKAVSDMLTACKQASFHPDVSDEVRTRALRFGTECTLGYLDLLEHVLVILQKPTPEFKQQLAAFSKRVAGAVTELIQAAEAMKGTEWVDPEDPTVIAETELLGAAASIEAAAKKLEQLKPRAKPKQADETLDFEEQILEAAKSIAAATSALVKSASAAQRELVAQGKVGSIPANAADDGQWSQGLISAARMVAAATSSLCEAANASVQGHASEEKLISSAKQVAASTAQLLVACKVKADQDSEAMRRLQAAGNAVKRASDNLVRAAQKAAFGKADDDDVVVKTKFVGGIAQIIAAQEEMLKKERELEEARKKLAQIRQQQYKFLPTELREDEG

SEQ ID NO: 1473 - protein, 511 aa, Homo sapiens [sequence omitted]

SEQ ID NO: 1474 - protein, 197 aa, Homo sapiens
MFGCLVAGRLVQTAAQQVAEDKFVFDLPDYESINHVVVFMLGTIPFPEGMGGSVYFSYPDSNGMPVWQLLGFVTNGKPSAIFKISGLKSGEGSQHPFGAMNIVRTPSVAQIGISVELLDSMAQQTPVGNAAVSSVDSFTQFTQKMLDNFYNFASSFAVSQAQMTPSPSEMFIPANVVLKWYENFQRRLAQNPLFWKT

SEQ ID NO: 1475 - protein, 444 aa, Homo sapiens
MAGGMKVAVSPAVGPGPWGSGVGGGGTVRLLLILSGCLVYGTAETDVNVVMLQESQVCEKRASQQFCYTNVLIPQWHDIWTRIQIRVNSSRLVRVTQVENEEKLKELEQFSIWNFFSSFLKEKLNDTYVNVGLYSTKTCLKVEIIEKDTKYSVIVIRRFDPKLFLVFLLGLMLFFCGDLLSRSQIFYYSTGMTVGIVASLLIIIFILSKFMPKKSPIYVILVGGWSFSLYLIQLVFKNLQEIWRCYWQYLLSYVLTVGFMSFAVCYKYGPLENERSINLLTWTLQLMGLCFMYSGIQIPHIALAIIIIALCTKNLEHPIQWLYITCRKVCKGAEKPVPPRLLTEEEYRIQGEVETRKALEELREFCNSPDCSAWKTVSRIQSPKRFADFVEGSSHLTPNEVSVHEQEYGLGSIIAQDEIYEEASSEEEDSYSRCPAITQNNFLT

SEQ ID NO: 1476 - protein, 374 aa, Homo sapiens
MEESDSEKTTEKENLGPRMDPPLGEPEGSLGWVLPNTAMKKKVLLMGKSGSGKTSMRSIIFANYIARDTRRLGATILDRIHSLQINSSLSTYSLVDSVGNTKTFDVEHSHVRFLGNLVLNLWDCGGQDTFMENYFTSQRDNIFRNVEVLIYVFDVESRELEKDMHYYQSCLEAILQNSPDAKIFCLVHKMDLVQEDQRDLIFKEREEDLRRLSRPLECSCFRTSIWDETLYKAWSSIVYQLIPNVQQLEMNLRNFAEIIEADEVLLFERATFLVISHYQCKEQRDAHRFEKISNIIKQFKLSCSKLAASFQSMEVRNSNFAAFIDIFTSNTYVMVVMSDPSIPSAATLINIRNARKHFEKLERVDGPKQCLLMR

SEQ ID NO: 1477 - protein, 346 aa, Homo sapiens
MEESDSEKTTEKENLGPRMDPPLGEPEGSLGWVLPNTAMKKKVLLMGKSGSGKTSMRSIIFANYIARDTRRLGATIDVEHSHVRFLGNLVLNLWDCGGQDTFMENYFTSQRDNIFRNVEVLIYVFDVESRELEKDMHYYQSCLEAILQNSPDAKIFCLVHKMDLVQEDQRDLIFKEREEDLRRLSRPLECSCFRTSIWDETLYKAWSSIVYQLIPNVQQLEMNLRNFAEIIEADEVLLFERATFLVISHYQCKEQRDAHRFEKISNIIKQFKLSCSKLAASFQSMEVRNSNFAAFIDIFTSNTYVMVVMSDPSIPSAATLINIRNARKHFEKLERVDGPKQCLLMR

SEQ ID NO: 1478 - protein, 387 aa, Homo sapiens
MEESDSEKTTEKENLGPRMDPPLGEPEGSLGWVLPNTAMKKKVRRVRYVKTMKKKVLLMGKSGSGKTSMRSIIFANYIARDTRRLGATILDRIHSLQINSSLSTYSLVDSVGNTKTFDVEHSHVRFLGNLVLNLWDCGGQDTFMENYFTSQRDNIFRNVEVLIYVFDVESRELEKDMHYYQSCLEAILQNSPDAKIFCLVHKMDLVQEDQRDLIFKEREEDLRRLSRPLECSCFRTSIWDETLYKAWSSIVYQLIPNVQQLEMNLRNFAEIIEADEVLLFERATFLVISHYQCKEQRDAHRFEKISNIIKQFKLSCSKLAASFQSMEVRNSNFAAFIDIFTSNTYVMVVMSDPSIPSAATLINIRNARKHFEKLERVDGPKQCLLMR

SEQ ID NO: 1479 - protein, 956 aa, Homo sapiens
MASKRKSTTPCMIPVKTVVLQDASMEAQPAETLPEGPQQDLPPEASAASSEAAQNPSSTDGSTLANGHRSTLDGYLYSCKYCDFRSHDMTQFVGHMNSEHTDFNKDPTFVCSGCSFLAKTPEGLSLHNATCHSGEASFVWNVAKPDNHVVVEQSIPESTSTPDLAGEPSAEGADGQAEIIITKTPIMKIMKGKAEAKKIHTLKENVPSQPVGEALPKLSTGEMEVREGDHSFINGAVPVSQASASSAKNPHAANGPLIGTVPVLPAGIAQFLSLQQQPPVHAQHHVHQPLPTAKALPKVMIPLSSIPTYSAAMDSNSFLKNSFHKFPYPTKAELCYLTVVTKYPEEQLKIWFTAQRLKQGISWSPEEIEDARKKMFNTVIQSVPQPTITVLNTPLVASAGNVQHLIQAALPGHVVGQPEGTGGGLLVTQPLMANGLQATSSPLPLTVTSVPKQPGVAPINTVCSNTTSAVKVVNAAQSLLTACPSITSQAFLDASIYKNKKSHEQLSALKGSFCRNQFPGQSEVEHLTKVTGLSTREVRKWFSDRRYHCRNLKGSRAMIPGDHSSIIIDSVPEVSFSPSSKVPEVTCIPTTATLATHPSAKRQSWHQTPDFTPTKYKERAPEQLRALESSFAQNPLPLDEELDRLRSETKMTRREIDSWFSERRKKVNAEETKKAEENASQEEEEAAEDEGGEEDLASELRVSGENGSLEMPSSHILAERKVSPIKINLKNLRVTEANGRNEIPGLGACDPEDDESNKLAEQLPGKVSCKKTAQQRHLLRQLFVQTQWPSNQDYDSIMAQTGLPRPEVVRWFGDSRYALKNGQLKWYEDYKRGNFPPGLLVIAPGNRELLQDYYMTHKMLYEEDLQNLCDKTQMSSQQVKQWFAEKMGEETRAVADTGSEDQGPGTGELTAVHKGMGDTYSEVSENSESWEPRVPEASSEPFDTSSPQAGRQLETD

SEQ ID NO: 1480 - protein, 399 aa, Homo sapiens
MAQRAFPNPYADYNKSLAEGYFDAAGRLTPEFSQRLTNKIRELLQQMERGLKSADPRDGTGYTGWAGIAVLYLHLYDVFGDPAYLQLAHGYVKQSLNCLTKRSITFLCGDAGPLAVAAVLYHKMNNEKQAEDCITRLIHLNKIDPHAPNEMLYGRIGYIYALLFVNKNFGVEKIPQSHIQQICETILTSGENLARKRNFTAKSPLMYEWYQEYYVGAAHGLAGIYYYLMQPSLQVSQGKLHSLVKPSVDYVCQLKFPSGNYPPCIGDNRDLLVHWCHGAPGVIYMLIQAYKVFREEKYLCDAYQCADVIWQYGLLKKGYGLCHGSAGNAYAFLTLYNLTQDMKYLYRACKFAEWCLEYGEHGCRTPDTPFSLFEGMAGTIYFLADLLVPTKARFPAFEL

SEQ ID NO: 1481 - protein, 835 aa, Homo sapiens
MPQTPVPPEGQGQLPRRAGSREAVPAPASAPEAAPGSARPGRSRHVTGAARSPSRAGPSDPPAMGDEDDDESCAVELRITEANLTGHEEKVSVENFELLKVLGTGAYGKVFLVRKAGGHDAGKLYAMKVLRKAALVQRAKTQEHTRTERSVLELVRQAPFLVTLHYAFQTDAKLHLILDYVSGGEMFTHLYQRQYFKEAEVRVYGGEIVLALEHLHKLGIIYRDLKLENVLLDSEGHIVLTDFGLSKEFLTEEKERTFSFCGTIEYMAPEIIRSKTGHGKAVDWWSLGILLFELLTGASPFTLEGERNTQAEVSRRILKCSPPFPPRIGPVAQDLLQRLLCKDPKKRLGAGPQGAQEVRNHPFFQGLDWVALAARKIPAPFRPQIRSELDVGNFAEEFTRLEPVYSPPGSPPPGDPRIFQGYSFVAPSILFDHNNAVMTDGLEAPGAGDRPGRAAVARSAMMQDSPFFQQYELDLREPALGQGSFSVCRRCRQRQSGQEFAVKILSRRLEANTQREVAALRLCQSHPNVVNLHEVHHDQLHTYLVLELLRGGELLEHIRKKRHFSESEASQILRSLVSAVSFMHEEAGVVHRDLKPENILYADDTPGAPVKIIDFGFARLRPQSPGVPMQTPCFTLQYAAPELLAQQGYDESCDLWSLGVILYMMLSGQVPFQGASGQGGQSQAAEIMCKIREGRFSLDGEAWQGVSEEAKELVRGLLTVDPAKRLKLEGLRGSSWLQDGSARSSPPLRTPDVLESSGPAVRSGLNATFMAFNRGKREGFFLKSVENAPLAKRRKQKLRSATASRRGSPAPANPGRAPVASKGAPRRANGPLPPS

SEQ ID NO: 1482 - protein, 433 aa, Homo sapiens
MNKSRWQSRRRHGRRSHQQNPWFRLRDSEDRSDSRAAQPAHDSGHGDDESPSTSSGTAGTSSVPELPGFYFDPEKKRYFRLLPGHNNCNPLTKESIRQKEMESKRLRLLQEEDRRKKIARMGFNASSMLRKSQLGFLNVTNYCHLAHELRLSCMERKKVQIRSMDPSALASDRFNLILADTNSDRLFTVNDVTVGGSKYGIINLQSLKTPTLKVFMHENLYFTNRKVNSVCWASLNHLDSHILLCLMGLAETPGCATLLPASLFVNSHPGIDRPGMLCSFRIPGAWSCAWSLNIQANNCFSTGLSRRVLLTNVVTGHRQSFGTNSDVLAQQFAFMAPLLFNGCRSGEIFAIDLRCGNQGKGWKATRLFHDSAVTSVRILQDEQYLMASDMAGKIKLWDLRTTKCVRQYEGHVNEYAYLPLHVHEEEGILVAGT

SEQ ID NO: 1483 - protein, 1997 aa, Homo sapiens
MLSHGAGLALWITLSLLQTGLAEPERCNFTLAESKASSHSVSIQWRILGSPCNFSLIYSSDTLGAALCPTFRIDNTTYGCNLQDLQAGTIYNFKIISLDEERTVVLQTDPLPPARFGVSKEKTTSTGLHVWWTPSSGKVTSYEVQLFDENNQKIQGVQIQESTSWNEYTFFNLTAGSKYNIAITAVSGGKRSFSVYTNGSTVPSPVKDIGISTKANSLLISWSHGSGNVERYRLMLMDKGILVHGGVVDKHATSYAFHGLSPGYLYNLTVMTEAAGLQNYRWKLVRTAPMEVSNLKVTNDGSLTSLKVKWQRPPGNVDSYNITLSHKGTIKESRVLAPWITETHFKELVPGRLYQVTVSCVSGELSAQKMAVGRTFPDKVANLEANNNGRMRSLVVSWSPPAGDWEQYRILLFNDSVVLLNITVGKEETQYVMDGTGLVPGRQYEVEVIVESGNLKNSERCQGRTVPLAVLQLRVKHANETSLSIMWQTPVAEWEKYIISLADRDLLLIHKSLSKDAKEFTFTDLVPGRKYMATVTSISGDLKNSSSVKGRTVPAQVTDLHVANQGMTSSLFTNWTQAQGDVEFYQVLLIHENVVIKNESISSETSRYSFHSLKSGSLYSVVVTTVSGGISSRQVVVEGRTVPSSVSGVTVNNSGRNDYLSVSWLLAPGDVDNYEVTLSHDGKVVQSLVIAKSVRECSFSSLTPGRLYTVTITTRSGKYENHSFSQERTVPDKVQGVSVSNSARSDYLRVSWVHATGDFDHYEVTIKNKNNFIQTKSIPKSENECVFVQLVPGRLYSVTVTTKSGQYEANEQGNGRTIPEPVKDLTLRNRSTEDLHVTWSGANGDVDQYEIQLLFNDMKVFPPFHLVNTATEYRFTSLTPGRQYKILVLTISGDVQQSAFIEGFTVPSAVKNIHISPNGATDSLTVNWTPGGGDVDSYTVSAFRHSQKVDSQTIPKHVFEHTFHRLEAGEQYQIMIASVSGSLKNQINVVGRTVPASVQGVIADNAYSSYSLIVSWQKAAGVAERYDILLLTENGILLRNTSEPATTKQHKFEDLTPGKKYKIQILTVSGGLFSKEAQTEGRTVPAAVTDLRITENSTRHLSFRWTASEGELSWYNIFLYNPDGNLQERAQVDPLVQSFSFQNLLQGRMYKMVIVTHSGELSNESFIFGRTVPASVSHLRGSNRNTTDSLWFNWSPASGDFDFYELILYNPNGTKKENWKDKDLTEWRFQGLVPGRKYVLWVVTHSGDLSNKVTAESRTAPSPPSLMSFADIANTSLAITWKGPPDWTDYNDFELQWLPRDALTVFNPYNNRKSEGRIVYGLRPGRSYQFNVKTVSGDSWKTYSKPIFGSVRTKPDKIQNLHCRPQNSTAIACSWIPPDSDFDGYSIECRKMDTQEVEFSRKLEKEKSLLNIMMLVPHKRYLVSIKVQSAGMTSEVVEDSTITMIDRPPPPPPHIRVNEKDVLISKSSINFTVNCSWFSDTNGAVKYFTVVVREADGSDELKPEQQHPLPSYLEYRHNASIRVYQTNYFASKCAENPNSNSKSFNIKLGAEMESLGGKCDPTQQKFCDGPLKPHTAYRISIRAFTQLFDEDLKEFTKPLYSDTFFSLPITTESEPLFGAIEGVSAGLFLIGMLVAVVALLICRQKVSHGRERPSARLSIRRDRPLSVHLNLGQKGNRKTSCPIKINQFEGHFMKLQADSNYLLSKEYEELKDVGRNQSCDIALLPENRGKNRYNNILPYDATRVKLSNVDDDPCSDYINASYIPGNNFRREYIVTQGPLPGTKDDFWKMVWEQNVHNIVMVTQCVEKGRVKCDHYWPADQDSLYYGDLILQMLSESVLPEWTIREFKICGEEQLDAHRLIRHFHYTVWPDHGVPETTQSLIQFVRTVRDYINRSPGAGPTVVHCSAGVGRTGTFIALDRILQQLDSKDSVDIYGAVHDLRLHRVHMVQTECQYVYLHQCVRDVLRARKLRSEQENPLFPIYENVNPEYHRDPVYSRH

SEQ ID NO: 1484 - protein, 329 aa, Homo sapiens
MAAQYGSMSFNPSTPGASYGPGRQEPRNSQLRIVLVGKTGAGKSATGNSILGRKVFHSGTAAKSITKKCEKRSSSWKETELVVVDTPGIFDTEVPNAETSKEIIRCILLTSPGPHALLLVVPLGRYTEEEHKATEKILKMFGERARSFMILIFTRKDDLGDTNLHDYLREAPEDIQDLMDIFGDRYCALNNKATGAEQEAQRAQLLGLIQRVVRENKEGCYTNRMYQRAEEEIQKQTQAMQELHRVELEREKARIREEYEEKIRKLEDKVEQEKRKKQMEKKLAEQEAHYAVRQQRARTEVESKDGILELIMTALQIASFILLRLFAED

SEQ ID NO: 1485 - protein, 705 aa, Homo sapiens [sequence omitted]

SEQ ID NO: 1486 - protein, 516 aa, Homo sapiens
MKIQPPFEDLFDTAEEYILLLLLEPWTKMVKSDQIAYKKVELVEETRQLDSTYFRKLQALHKETFSKKAEDTTCEIGTGILSLSNVSKRTEYWDNVPAEYKHFKFSDLLNNKLEFEHFRQFLETHSSSMDLMCWTDIEQFRRITYRDRNQRKAKSIYIKNKYLNKKYFFGPNSPASLYQQNQVMHLSGGWGKILHEQLDAPVLVEIQKHVQNRLENVWLPLFLASEQFAARQKIKVQMKDIAEELLLQKAEKKIGVWKPVESKWISSSCKIIAFRKALLNPVTSRQFQRFVALKGDLLENGLLFWQEVQKYKDLCHSHCDESVIQKKITTIINCFINSSIPPALQIDIPVEQAQKIIEHRKELGPYVFREAQMTIFGVLFKFWPQFCEFRKNLTDENIMSVLERRQEYNKQKKKLAVLEDEKSGKDGIKQYANTSVPAIKTALLSDSFLGLQPYGRQPTWCYSKYIEALEQERILLKIQEELEKKLFAGLQPLTNFKASSSTMSLKKNMSAHSSQK

SEQ ID NO: 1487 - protein, 1026 aa, Homo sapiens
MMSFGGADALLGAPFAPLHGGGSLHYALARKGGAGGTRSAAGSSSGFHSWTRTSVSSVSASPSRFRGAGAASSTDSLDTLSNGPEGCMVAVATSRSEKEQLQALNDRFAGYIDKVRQLEAHNRSLEGEAAALRQQQAGRSAMGELYEREVREMRGAVLRLGAARGQLRLEQEHLLEDIAHVRQRLDDEARQREEAEAAARALARFAQEAEAARVDLQKKAQALQEECGYLRRHHQEEVGELLGQIQGSGAAQAQMQAETRDALKCDVTSALREIRAQLEGHAVQSTLQSEEWFRVRLDRLSEAAKVNTDAMRSAQEEITEYRRQLQARTTELEALKSTKDSLERQRSELEDRHQADIASYQEAIQQLDAELRNTKWEMAAQLREYQDLLNVKMALDIEIAAYRKLLEGEECRIGFGPIPFSLPEGLPKIPSVSTHIKVKSEEKIKVVEKSEKETVIVEEQTEETQVTEEVTEEEEKEAKEEEGKEEEGGEEEEAEGGEEETKSPPVEEAASPEKEAKSPVKEEAKSPAEAKSPEKEEAKSPAEVKSPEKAKSPAKEEAKSPPEAKSPEKEEAKSPAEVKSPEKAKSPAKEEAKSPAEAKSPEKAKSPVKEEAKSPAEAKSPVKEEAKSPAEVKSPEKAKSPTKEEAKSPEKAKSPEKAKSPEKEEAKSPEKAKSPVKAEAKSPEKAKSPVKAEAKSPEKAKSPVKEEAKSPEKAKSPVKEEAKSPEKAKSPVKEEAKTPEKAKSPVKEEAKSPEKAKSPEKAKTLDVKSPEAKTPAKEEARSPADKFPEKAKSPVKEEVKSPEKAKSPLKEDAKAPEKEIPKKEEVKSPVKEEEKPQEVKVKEPPKKAEEEKAPATPKTEEKKDSKKEEAPKKEAPKPKVEEKKEPAVEKPKESKVEAKKEEAEDKKKVPTPEKEAPAKVEVKEDAKPKEKTEVAKKEPDDAKAKEPSKPAEKKEAAPEKKDTKEEKAKKPEEKPKTEAKAKEDDKTLSKEPSKPKAEKAEKSSSTDQKDSKPPEKATEDKAAKGK

SEQ ID NO: 1488 - protein, 462 aa, Homo sapiens
MSIAGVAAQEIRVPLKTGFLHNGRAMGNMRKTYWSSRSEFKNNFLNIDPITMAYSLNSSAQERLIPLGHASKSAPMNGHCFAENGPSQKSSLPPLLIPPSENLGPHEEDQVVCGFKKLTVNGVCASTPPLTPIKNSPSLFPCAPLCERGSRPLPPLPISEALSLDDTDCEVEFLTSSDTDFLLEDSTLSDFKYDVPGRRSFRGCGQINYAYFDTPAVSAADLSYVSDQNGGVPDPNPPPPQTHRRLRRSHSGPAGSFNKPAIRISNCCIHRASPNSDEDKPEVPPRVPIPPRPVKPDYRRWSAEVTSSTYSDEDRPPKVPPREPLSPSNSRTPSPKSLPSYLNGVMPPTQSFAPDPKYVSSKALQRQNSEGSASKVPCILPIIENGKKVSSTHYYLLPERPPYLDKYEKFFREAEETNGGAQIQPLPADCGISSATEKPDSKTKMDLGGHVKRKHLSYVVSP

SEQ ID NO: 1489 - protein, 1452 aa, Homo sapiens
MVPIFSGRQKHVSGITDTEEERIKEAAAYIAQRNLLASEEGITTPKQSTASKQTTASKQSTASKQSTASKQSTASRQSTASRQSVVSKQATSALQQEETSEKKSRKVVIRGKAERLSLRKTLEETETYHAKLNEDHLLHAPEFIIKPRSHTVWEKENVKLHCSIAGWPEPRVTWYKNQVPINVHANPGKYIIESRYGMHTLEINACDFEDTAQYRASAMNVKGELSAYASVVVKRYKGEFDETRFHAGASTMPLSFGVTPYGYASRFEIHFDDKFDVSFGREGETMSLGCRVVITPEIKHFQPEIRWYRNGVPLSPSKWVQTLWSGERATLTFSHLNKEDEGLYTIRVRMGEYYEQYSAYVFVRDADAEIEGAPAAPLDVKCLEANKDYIIISWKQPAVDGGSPILGYFIDKCEVGTDSWSQCNDTPVKFARFPVTGLIEGRSYIFRVRAVNKMGIGFPSRVSEAVAALDPAEKARLKSPLSTLDWTVIVTEEEPSEGIVPGPPTDLSVTEATRSYVVLSWKPPGQRGHEGIMYFVEKCEAGTENWQRVNTELPVKSPRFALFDLAEGKSYCFRVRCSNSAGVGEPSEATEVTVVGDKLDIPKAPGKIIPSRNTDTSVVVSWEESKDAKELVGYYIEASVAGSGKWEPCNNNPVKGSRFTCHGLVTGQSYIFRVRAVNAAGLSEYSQDSEAIEVKAAIAPPSPPCDITCLESFRDSMVLGWKQPDKIGGAEITGYYVNYREVIDGVPGKWREANVKAVSEEAYKISNLKENMVYQFQVAAMNMAGLGAPSAVSECFKCEEWTIAVPGPPHSLKCSEVRKDSLVLQWKPPVHSGRTPVTGYFVDLKEAKAKEDQWRGLNEAAIKNVYLKVRGLKEGVSYVFRVRAINQAGVGKPSDLAGPVVAETRPGTKEVVVNVDDDGVISLNFECDKMTPKSEFSWSKDYVSTEDSPRLEVESKGNKTKMTFKDLGMDDLGIYSCDVTDTDGIASSYLIDEEELKRLLALSHEHKFPTVPVKSELAVEILEKGQVRFWMQAEKLSGNAKVNYIFNEKEIFEGPKYKMHIDRNTGIIEMFMEKLQDEDEGTYTFQLQDGKATNHSTVVLVGDVFKKLQKEAEFQRQEWIRKQGPHFVEYLSWEVTGECNVLLKCKVANIKKETHIVWYKDEREISVDEKHDFKDGICTLLITEFSKKDAGIYEVILKDDRGKDKSRLKLVDEAFKELMMEVCKKIALSATDLKIQSTAEGIQLYSFVTYYVEDLKVNWSHNGSAIRYSDRVKTGVTGEQIWLQINEPTPNDKGKYVMELFDGKTGHQKTVDLSGQAYDEAYAEFQRLKQAAIAEKNRARVLGGLPDVVTIQEGKALNLTCNVWGDPPPEVSWLKNEKALASDDHCNLKFEAGRTAYFTINGVSTADSGKYGLVVKNKYGSETSDFTVSVFIPEEEARMAALESLKGGKKAK

SEQ ID NO: 1490 - protein, 1028 aa, Homo sapiens [sequence omitted]

SEQ ID NO: 1491 - protein, 153 aa, Homo sapiens
MTKIKADPDGPEAQAEACSGERTYQELLVNQNPIAQPLASRRLTRKLYKCIKKAVKQKQIRRGVKEVQKFVNKGEKGIMVLAGDTLPIEVYCHLPVMCEDRNLPYVYIPSKTDLGAAAGSKRPTCVIMVKPHEEYQEAYDECLEEVQSLPLPL

SEQ ID NO: 1492 - protein, 632 aa, Homo sapiens
MSDKSELKAELERKKQRLAQIREEKKRKEEERKKKETDQKKEAVAPVQEESDLEKKRREAEALLQSMGLTPESPIVPPPMSPSSKSVSTPSEAGSQDSGDGAVGSRTLHWDTDPSVLQLHSDSDLGRGPIKLGMAKITQVDFPPREIVTYTKETQTPVMAQPKEDEEEDDDVVAPKPPIEPEEEKTLKKDEENDSKAPPHELTEEEKQQILHSEEFLSFFDHSTRIVERALSEQINIFFDYSGRDLEDKEGEIQAGAKLSLNRQFFDERWSKHRVVSCLDWSSQYPELLVASYNNNEDAPHEPDGVALVWNMKYKKTTPEYVFHCQSAVMSATFAKFHPNLVVGGTYSGQIVLWDNRSNKRTPVQRTPLSAAAHTHPVYCVNVVGTQNAHNLISISTDGKICSWSLDMLSHPQDSMELVHKQSKAVAVTSMSFPVGDVNNFVVGSEEGSVYTACRHGSKAGISEMFEGHQGPITGIHCHAAVGAVDFSHLYVTSSFDWTVKLWTTKNNKPLYSFEDNADYVYDVMWSPTHPALFACVDGMGRLDLWNLNNDTEVPTASISVEGNPALNRVRWTHSGREIAVGDSEGQIVIYDVGEQIAVPRNDEWARFGRTLAEINANRADAEEEAATRIPA

SEQ ID NO: 1493 - protein, 612 aa, Homo sapiens
MSDKSELKAELERKKQRLAQIREEKKRKEEERKKKETDQKKEAVAPVQEESDLEKKRREAEALLQSMGLTPESPIVPPPMSPSSKSVSTPSEAGSQDSGDGAVGSRRGPIKLGMAKITQVDFPPREIVTYTKETQTPVMAQPKEDEEEDDDVVAPKPPIEPEEEKTLKKDEENDSKAPPHELTEEEKQQILHSEEFLSFFDHSTRIVERALSEQINIFFDYSGRDLEDKEGEIQAGAKLSLNRQFFDERWSKHRVVSCLDWSSQYPELLVASYNNNEDAPHEPDGVALVWNMKYKKTTPEYVFHCQSAVMSATFAKFHPNLVVGGTYSGQIVLWDNRSNKRTPVQRTPLSAAAHTHPVYCVNVVGTQNAHNLISISTDGKICSWSLDMLSHPQDSMELVHKQSKAVAVTSMSFPVGDVNNFVVGSEEGSVYTACRHGSKAGISEMFEGHQGPITGIHCHAAVGAVDFSHLYVTSSFDWTVKLWTTKNNKPLYSFEDNADYVYDVMWSPTHPALFACVDGMGRLDLWNLNNDTEVPTASISVEGNPALNRVRWTHSGREIAVGDSEGQIVIYDVGEQIAVPRNDEWARFGRTLAEINANRADAEEEAATRIPA

(The sequence listing continues in the following parts.)

What is claimed is:

1. An isolated polynucleotide comprising a nucleotide sequence selected from the group consisting of SEQ ID NO:1-16, 18-234, 236-547, 549-898, 900-984, 1969-1984, 1986-2202, 2204-2515, 2517-2866, 2869-2952, 3937-3942 or 3949-3954, a mature protein coding portion of SEQ ID NO: 1-16, 18-234, 236-547, 549-898, 900-984, 1969-1984, 1986-2202, 2204-2515, 2517-2866, 2869-2952, 3937-3942 or 3949-3954, an active domain coding portion of SEQ ID NO: 1-16, 18-234, 236-547, 549-898, 900-984, 1969-1984, 1986-2202, 2204-2515, 2517-2866, 2869-2952, 3937-3942 or 3949-3954, and complementary sequences thereof.

2. An isolated polynucleotide encoding a polypeptide with biological activity, wherein said polynucleotide hybridizes to the polynucleotide of claim 1 under stringent hybridization conditions.

3. An isolated polynucleotide encoding a polypeptide with biological activity, wherein said polynucleotide has greater than about 90% sequence identity with the polynucleotide of claim 1.

4. The polynucleotide of claim 1 wherein said polynucleotide is DNA.

5. An isolated polynucleotide of claim 1 wherein said polynucleotide comprises the complementary sequences.

6. A vector comprising the polynucleotide of claim 1.

7. An expression vector comprising the polynucleotide of claim 1.

8. A host cell genetically engineered to comprise the polynucleotide of claim 1.

9. A host cell genetically engineered to comprise the polynucleotide of claim 1 operatively associated with a regulatory sequence that modulates expression of the polynucleotide in the host cell.

10. An isolated polypeptide, wherein the polypeptide is selected from the group consisting of:
(a) a polypeptide encoded by any one of the polynucleotides of claim 1; and
(b) a polypeptide encoded by a polynucleotide hybridizing under stringent conditions with any one of SEQ ID NO: 1-16, 18-234, 236-547, 549-898, 900-984, 1969-1984, 1986-2202, 2204-2515, 2517-2866, 2869-2952, 3937-3942 or 3949-3954.

11. A composition comprising the polypeptide of claim 10 and a carrier.

12. An antibody directed against the polypeptide of claim 10.

13. A method for detecting the polynucleotide of claim 1 in a sample, comprising:
a) contacting the sample with a compound that binds to and forms a complex with the polynucleotide of claim 1 for a period sufficient to form the complex; and
b) detecting the complex, so that if a complex is detected, the polynucleotide of claim 1 is detected.

14. A method for detecting the polynucleotide of claim 1 in a sample, comprising:
a) contacting the sample under stringent hybridization conditions with nucleic acid primers that anneal to the polynucleotide of claim 1 under such conditions;
b) amplifying a product comprising at least a portion of the polynucleotide of claim 1; and
c) detecting said product and thereby the polynucleotide of claim 1 in the sample.

15. The method of claim 14, wherein the polynucleotide is an RNA molecule and the method further comprises reverse transcribing an annealed RNA molecule into a cDNA polynucleotide.

16. A method for detecting the polypeptide of claim 10 in a sample, comprising:
a) contacting the sample with a compound that binds to and forms a complex with the polypeptide under conditions and for a period sufficient to form the complex; and
b) detecting formation of the complex, so that if a complex formation is detected, the polypeptide of claim 10 is detected.

17. A method for identifying a compound that binds to the polypeptide of claim 10, comprising:
a) contacting the compound with the polypeptide of claim 10 under conditions sufficient to form a polypeptide/compound complex; and
b) detecting the complex, so that if the polypeptide/compound complex is detected, a compound that binds to the polypeptide of claim 10 is identified.

18. A method for identifying a compound that binds to the polypeptide of claim 10, comprising:
a) contacting the compound with the polypeptide of claim 10, in a cell, under conditions sufficient to form a polypeptide/compound complex, wherein the complex drives expression of a reporter gene sequence in the cell; and
b) detecting the complex by detecting reporter gene sequence expression, so that if the polypeptide/compound complex is detected, a compound that binds to the polypeptide of claim 10 is identified.

19. A method of producing the polypeptide of claim 10, comprising,
a) culturing a host cell comprising a polynucleotide sequence selected 1-16, 18-234, 236-547, 549-898, 900-984, 1969-1984, 1986-2202, 2204-2515, 2517-2866, 2869-2952, 3937-3942 or 3949-3954, a mature protein coding portion of SEQ ID NO: 1-984, 1969-2952, 3937-3942 or 3949-3954, an active domain coding portion of SEQ ID NO: 1-984, 1969-2952, 3937-3942 or 3949-3954, complementary sequences thereof and a polynucleotide sequence hybridizing under stringent conditions to SEQ ID NO: 1-16, 18-234, 236-547, 549-898, 900-984, 1969-1984, 1986-2202, 2204-2515, 2517-2866, 2869-2952, 3937-3942 or 3949-3954, under conditions sufficient to express the polypeptide in said cell; and
b) isolating the polypeptide from the cell culture or cells of step (a).

20. An isolated polypeptide comprising an amino acid sequence selected from the group consisting of any one of the polypeptides SEQ ID NO: 985-1000, 1002-1218, 1220-1531, 1533-1882, 1884-1968, 2953-2968, 2970-3186, 3188-3499, 3501-3850, 3852-3936, 3943-3948 or 3955-3960, the mature protein portion thereof, or the active domain thereof.

21. The polypeptide of claim 20 wherein the polypeptide is provided on a polypeptide array.

22. A collection of polynucleotides, wherein the collection comprising the sequence information of at least one of SEQ ID NO: 1-16, 18-234, 236-547, 549-898, 900-984, 1969-1984, 1986-2202, 2204-2515, 2517-2866, 2869-2952, 3937-3942 or 3949-3954.

23. The collection of claim 22, wherein the collection is provided on a nucleic acid array.

24. The collection of claim 23, wherein the array detects full-matches to any one of the polynucleotides in the collection.

25. The collection of claim 23, wherein the array detects mismatches to any one of the polynucleotides in the collection.

26. The collection of claim 22, wherein the collection is provided in a computer-readable format.

27. A method of treatment comprising administering to a mammalian subject in need thereof a therapeutic amount of a composition comprising a polypeptide of claim 20 and a pharmaceutically acceptable carrier.

28. A method of treatment comprising administering to a mammalian subject in need thereof a therapeutic amount of a composition comprising an antibody that specifically binds to a polypeptide of claim 20 and a pharmaceutically acceptable carrier.
